(19) United States
(12) Patent Application Publication
(10) Pub. No.: US 2026/0151510 A1
(43) Pub. Date: Jun. 4, 2026

(54) RECOMBINANT AAVS WITH IMPROVED TROPISM AND SPECIFICITY

(71) Applicant: AFFINIA THERAPEUTICS INC., Waltham, MA (US)

(72) Inventors: Charles Francis ALBRIGHT, Boston, MA (US); Xiaohong CAO, Southborough, MA (US); Lin-Ya HUANG, Cambridge, MA (US)

(21) Appl. No.: 19/122,709

(22) PCT Filed: Oct. 19, 2023
(86) PCT No.: PCT/US2023/077340

§ 371 Date: Apr. 18, 2025

Related U.S. Application Data
(60) Provisional application No. 63/380,170, filed on Oct. 19, 2022.
(60) Provisional application No. 63/482,874, filed on Feb. 2, 2023.
(60) Provisional application No. 63/502,871, filed on May 17, 2023.

(51) Int. Cl. A61K 48/00; C07K 14/005; C12N 15/86

(52) U.S. Cl. CPC A61K 48/0058; C07K 14/005; C12N 15/86; C12N 2750/14122; C12N 2750/14143; C12N 2750/14145

(57) ABSTRACT

The present disclosure provides a modified AAV capsid protein comprising a targeting peptide in variable region VIII (VR VIII). The modified AAV capsid protein can form an rAAV, which has a preferred tropism, specificity or biodistribution in vivo or in vitro. The rAAV of the present disclosure can be used for gene therapies targeted at a specific tissue.

### 1. CROSS-REFERENCE TO RELATED APPLICATIONS

[0001] This application claims the benefit of U.S. Provisional Application Nos. 63/380,170 filed on Oct. 19, 2022, 63/482,874 filed on Feb. 2, 2023, and 63/502,871 filed on May 17, 2023, each of which is hereby incorporated in its entirety by reference.

### 2. SEQUENCE LISTING

[0002] The instant application contains a Sequence Listing with 55,921 sequences, which has been submitted via Patent Center and is hereby incorporated by reference in its entirety. Said XML copy, created on Oct. 16, 2023 is named 53023WO_CRF_sequencelisting.xml, and is 48,736,195 bytes in size.

[0003] The instant application also incorporates by reference in their entireties the Appendices, titled “Appendix A” and “Appendix B” and the sequences described therein. Appendix A and Appendix B are filed concurrently herewith.

### 3. BACKGROUND

[0004] Adeno-associated virus (AAV) has become the vector system of choice for in vivo gene therapy. A growing variety of recombinant AAVs (rAAVs) engineered to deliver therapeutic nucleic acids have been developed and tested in nonhuman primates and humans, and the FDA has recently approved two rAAV gene therapy products for commercialization.

[0005] Although AAV vectors are safer and less inflammatory than other viruses, toxicities have occurred following administration of high doses of rAAVs for gene therapy. Thus, local administration of rAAVs to a target tissue or organ has been used to improve targeting and reduce systemic toxicity. Further, various natural and synthetic AAV variants have been tested to develop an AAV vector with desired tropism and specificity.

[0006] In general, the capsid is thought to be the primary determinant of infectivity and host-vector related properties such as adaptive immune responses, tropism, specificity, potency, and bio-distribution. Indeed, several of these properties are known to vary between natural serotypes and engineered AAV variants. Over the last decade, novel synthetic AAV variants have been developed by using a variety of capsid engineering techniques, one of which is the insertion of small, peptide into an exposed loop of the capsid protein, called variable region VIII (VRVIII). In some circumstances, the insertion of a novel peptide into a wild type capsid changes the tropism of the variant.

[0007] To date, however, there is little understanding as to how changes on the AAV capsid alter their biological properties and AAV vectors with a desired tropism and specificity to therapeutic targets, such as the central nervous system (CNS), have not yet been available. Species-specific differences in AAV tropism, for example between mice and nonhuman primates (NHP), has made it difficult to develop AAV vectors that have a desired tropism in humans.

[0008] Treatment of diseases of the CNS remains an intractable problem. Currently, therapeutics for CNS diseases are limited because many of them, when delivered intravenously, do not cross the blood-brain barrier, or, when delivered directly to the brain, are not widely distributed. Thus, there is a need for an AAV vector having a preferred and specific tropism to the CNS for treatment of such CNS diseases.

### 4. SUMMARY OF THE INVENTION

[0009] The present disclosure provides a modified AAV capsid protein that can form an rAAV having a preferred tropism and specificity to a therapeutic target. In some embodiments, a modified adeno-associated virus (AAV) capsid protein with the preferred tropism comprises (i) a targeting peptide at a site within variable region VIII (VR VIII); wherein the targeting peptide has a sequence of X₁X₂X₃X₄X₅X₆X₇X₈X₉, wherein X₁, X₂, X₃, X₄, X₅, X₆, X₇, X₈, and X₉ are each independently selected from any amino acid residue. In some embodiments, the modified capsid protein comprising the targeting peptide having a sequence of X₁X₂X₃X₄X₅X₆X₇X₈X₉ at a site within variable region VIII (VR VIII) includes a deletion of amino acids residues (e.g., A587 and Q588 in AAV9 capsid).

[0010] Applicant previously demonstrated that a single injection of Anc80L65, a rationally designed synthetic vector (vector described in WO2015/054653, which is incorporated by reference in its entirety herein), into the CSF of adult cynomolgus monkeys leads to efficient transduction of broad regions of the CNS and strikingly outperformed the capabilities of AAV9 to target the cortex and deep brain nuclei (PCT Application No. PCT/US2022/024262, which is incorporated by reference in its entirety herein).

[0011] Applicant now reports a modified AAV capsid protein (e.g., Anc80L65, AAV9, and other AAV capsid proteins) comprising a targeting peptide within variable region VIII (VR VIII)) provides synergistic effects to the specific targeting of an rAAV to a target tissue (e.g., the CNS). Therefore, the modified AAV capsid proteins (e.g., modified AAV capsid proteins comprising the targeting peptides described herein inserted at the insertion sites described herein) of the present disclosure can change the tropism, specificity and/or bio-distribution of an AAV comprising the modified AAV capsid protein.

[0012] Overall, the rAAVs containing the modified AAV capsid protein comprising a targeting peptide at a site within variable region VIII (VR VIII) demonstrate better targeting with more specific expression of a transgene in the target tissue, e.g., brain compared to a AAV capsid protein not comprising the targeting peptide at a site within variable region VIII.

[0013] In another aspect, this disclosure features a modified adeno-associated virus (AAV) capsid protein, comprising: a targeting peptide within variable region VIII (VR VIII), wherein the targeting peptide has a sequence of X₁X₂X₃X₄X₅X₆X₇X₈X₉ and X₁, X₂, X₃, X₄, X₅, X₆, X₇, X₈, and X₉ are each independently selected from any amino acid residue. In some embodiments,
[0014] (i) X₁ is independently selected from a proline (P) and a glycine (G);
[0015] (ii) X₂ is independently selected from a lysine (L), a threonine (T), a serine (S), an alanine (A), a valine (V), and an isoleucine (I);
[0016] (iii) X₃ is independently selected from an asparagine (N), a glutamine (Q), and a proline (P);
[0017] (iv) X₄ is independently selected from a glycine (G) and an alanine (A);
[0018] (v) X₅ is independently selected from an alanine (A), a threonine (T), a serine (S), a valine (V), and a glycine (G);
[0019] (vi) X₆ is independently selected from a valine (V), a leucine (L), an alanine (A), an isoleucine (I), a glycine (G), a serine (S), and a threonine (T);
[0020] (vii) X₇ is independently selected from a histidine (H), an arginine (R), and a lysine (K);
[0021] (viii) X₈ is independently selected from a leucine (L) and a valine (V); and
[0022] (ix) X₉ is independently selected from a tyrosine (Y), an arginine (R), a histidine (H), a lysine (K), and a phenylalanine (F).

[0023] In some embodiments, a targeting peptide within VR VIII has a sequence selected from SEQ ID NO: 620-55819.

[0024] In some embodiments, the targeting peptide has a sequence of PX₂X₃GAVX₇LY (SEQ ID NO: 2) and X₂, X₃, and X₇ are independently selected from any amino acid residue.

[0025] In some embodiments,
[0026] (i) X₂ is independently selected from a lysine (L), an isoleucine (I), a valine (V), and an alanine (A);
[0027] (ii) X₃ is an asparagine (N) or a glutamine (Q); and
[0028] (iii) X₇ is independently selected from a histidine (H), an arginine (R) and a lysine (K).

[0029] In some embodiments, the targeting peptide is:

```
(SEQ ID NO: 3)
(i) PLQGAVHLY;
(SEQ ID NO: 4)
(ii) PLQGAVRLY;
  (SEQ ID NO: 5)
(iii) PLQGAVKLY;
  (SEQ ID NO: 6)
(iv) PINGAVHLY;
  (SEQ ID NO: 7)
(v) PVNGAVHLY;
  (SEQ ID NO: 8)
(vi) PANGAVHLY;
or
(SEQ ID NO: 9)
(vii) PLNGAVHLY.
```

[0030] In some embodiments, the targeting peptide is inserted between S586 and A589 of an AAV9 capsid protein, thereby replacing A587 and Q588 of the AAV9 capsid protein.

[0031] In some embodiments, the modified AAV capsid protein comprises a sequence having at least 90%, 95%, 96%, 97%, 98% or 99% sequence identity to an AAV9 capsid protein.

[0032] In some embodiments, the targeting peptide is inserted
[0033] (i) between S586 and T589 of an Anc80L65 capsid protein, thereby replacing A587 and N588 of the Anc80L65 capsid protein;
[0034] (ii) between Q585 and N588 of an Anc80L65 capsid protein, thereby replacing S586 and A587 of the Anc80L65 capsid protein;
[0035] (iii) between L584 and A587 of an Anc80L65 capsid protein, thereby replacing Q585 and S586 of the Anc80L65 capsid protein;
[0036] (iv) between A587 and A590 of an Anc80L65 capsid protein, thereby replacing N588 and T589 of the Anc80L65 capsid protein; or
[0037] (v) between S586 and A587 of an Anc80L65 capsid protein.

[0038] In some embodiments, the targeting peptide comprises: PLNGAVHLY (SEQ ID NO: 9).

[0039] In some embodiments, the modified AAV capsid protein comprises a sequence having at least 90%, 95%, 96%, 97%, 98% or 99% sequence identity to an Anc80L65 capsid protein.

[0040] In some embodiments, the targeting peptide has a sequence of PX₂X₃GX₅X₆X₇LY (SEQ ID NO: 10) and X₂, X₃, X₅, X₆, and X₇ are independently selected from any amino acid residue. In some embodiments,
[0041] (i) X₂ is independently selected from a leucine (L), a threonine (T), or a serine (S);
[0042] (ii) X₃ is independently selected from an asparagine (N) and a glutamine (Q);
[0043] (iii) X₅ is independently selected from an alanine (A) and a threonine (T);
[0044] (iv) X₆ is independently selected from a valine (V) and a leucine (L); and
[0045] (v) X₇ is independently selected from a histidine (H), an arginine (R), and a lysine (K).

[0046] In some embodiments, the targeting peptide is:

```
  (SEQ ID NO: 11)
(i) PTNGTVRLY;
  (SEQ ID NO: 12)
(ii) PTNGTVHLY;
  (SEQ ID NO: 13)
(iii) PTNGTVKLY;
  (SEQ ID NO: 14)
(iv) PSNGTLRLY;
  (SEQ ID NO: 15)
(v) PSNGTLHLY;
  (SEQ ID NO: 16)
(vi) PSNGTLKLY;
  (SEQ ID NO: 17)
(vii) PTNGTLRLY;
  (SEQ ID NO: 18)
(viii) PTNGTLHLY;
or
(SEQ ID NO: 19)
(ix) PTNGTLKLY.
```

[0047] In some embodiments, the targeting peptide has a sequence of PX₂X₃GAVX₇X₈X₉ (SEQ ID NO: 20) and X₂, X₃, X₅, X₆, and X₇ are independently selected from any amino acid residue. In some embodiments,
[0048] (i) X₂ is independently selected from a leucine (L), a threonine (T), or a serine (S);
[0049] (ii) X₃ is independently selected from an asparagine (N) and a glutamine (Q);
[0050] (iii) X₇ is independently selected from a histidine (H) and a threonine (T);
[0051] (iv) X₈ is independently selected from a valine (V) and a leucine (L); and (v) X₉ is independently selected from a tyrosine (Y) and an arginine (R).

[0052] In some embodiments, the targeting peptide is:

```
  (SEQ ID NO: 21)
(i) PTQGAVTVR;
  (SEQ ID NO: 22)
(ii) PLQGAVTVR;
  (SEQ ID NO: 23)
(iii) PLQGAVHVR;
  (SEQ ID NO: 24)
(iv) PLQGAVHVY;
  (SEQ ID NO: 25)
(v) PSQGAVTLR;
  (SEQ ID NO: 26)
(vi) PLQGAVTLR;
  (SEQ ID NO: 27)
(vii) PLQGAVHLR;
or
(SEQ ID NO: 28)
(viii) PTQGAVTLR.
```

[0053] In some embodiments, the targeting peptide does not comprise PLNGAVHLY (SEQ ID NO: 9).

[0054] In some embodiments, the targeting peptide is inserted between S586 and A589 of an AAV9 capsid protein, thereby replacing A587 and Q588 of the AAV9 capsid protein.

[0055] In another aspect, this disclosure features a modified adeno-associated virus (AAV) capsid protein, comprising: a targeting peptide within VR VIII wherein the targeting peptide has a sequence selected from SEQ ID NO: 160-619.

[0056] In some embodiments, the modified AAV capsid protein comprises a sequence having at least 90%, 91%, 92%, 93%, 94%, 95%, 96%, 97%, 98%, 99% or 99.5% sequence identity to the sequence of a reference AAV capsid protein.

[0057] In some embodiments, the reference AAV capsid protein is selected from VP1, VP2 and VP3.

[0058] In some embodiments, the reference AAV capsid protein is a capsid protein of an AAV selected from the group consisting of: AAV9; Anc80L65; Anc80-55, Anc80-129, Anc80-156, Anc80-751, Anc80-1029, Anc80-1712, AAV2; AAV1; AAV6; AAV3; AAV LK03; AAV7; AAV8; AAV hu.37; AAV rh.10; AAV hu.68; AAV10; AAV5; AAV3-3; AAV4-4; AAV1-A; hu.46-A; hu.48-A; hu.44-A; hu.43-A; AAV6-A; hu.34-B; hu.47-B; hu.29-B; rh.63-B; hu.56-B; hu.45-B; rh.57-B; rh.35-B; rh.58-B; rh.28-B; rh.51-B; rh.19-B; rh.49-B; rh.52-B; rh.13-B; AAV2-B; rh.20-B; rh.24-B; rh.64-B; hu.27-B; hu.21-B; hu.22-B; hu.23-B; hu.7-C; hu.61-C; rh.56-C; hu. 9-C; hu.54-C; hu.53-C; hu.60-C; hu.55-C; hu.2-C; hu.1-C; hu.18-C; hu.3-C; hu.25-C; hu.15-C; hu.16-C; hu.1l-C; hu.10-C; hu.4-C; rh.54-D; rh.48-D; rh.55-D; rh.62-D; AAV7-D; rh.52-E; rh.51-E; hu.39-E; rh.53-E; hu.37-E; rh.43-E; rh.50-E; rh.49-E; rh.61-E; hu.41-E; rh.64-E; rh74; hu.42-E; rh.57-E; rh.40-E; hu.67-E; hu.17-E; hu.6-E; hu.66-E; rh.38-E; hu.32-F; AAV9/hu; hu.31-F; Anc80; Anc81; Anc82; Anc83; Anc84; Anc94; Anc113; Anc126; Anc127; Anc80L27; Anc80L59; Anc80L60; Anc80L62; Anc80L33; Anc80L36; Anc80L44; Anc80L1; Anc110; and Anc80DI.

[0059] In some embodiments, the reference AAV capsid protein is a capsid protein having a sequence selected from SEQ ID Nos: 54-158, or a fragment thereof.

[0060] In some embodiments, the modified AAV capsid protein has one or more modifications comprising amino acid insertions, deletions, substitutions or combinations thereof as compared to a reference AAV capsid protein.

[0061] In some embodiments, the reference AAV capsid protein is a capsid protein having a sequence of SEQ ID NO: 61 or a fragment thereof.

[0062] In some embodiments, the reference AAV capsid protein is a capsid protein having a sequence of SEQ ID NO: 142 or a fragment thereof.

[0063] In some embodiments, the targeting peptide is positioned between 576 and 601 within VR VIII of the modified AAV capsid protein.

[0064] In some embodiments, the modified AAV capsid protein further comprises an N-terminal flanking region on the N-terminal end of the targeting peptide.

[0065] In some embodiments, the N-terminal flanking region comprises at least four consecutive amino acid residues from amino acids 576-585 of the reference AAV capsid protein, wherein the amino acid residues are numbered according to the amino acid sequence of the reference AAV capsid protein.

[0066] In some embodiments, the N-terminal flanking region has the sequence of B₁YGB₂VA′TNB₃QS (SEQ ID NO: 55849), and B₁, B₂, and B₃ are each independently selected from any amino acid residue. In some embodiments, B₁ is selected from an glutamate (E) or a serine (S), B₂ is selected from a threonine (T) or a glutamine (Q), and B₃ is selected from a leucine (L) or a histidine (H).

[0067] In some embodiments, the N-terminal flanking region has the sequence of SYGQVATNHQS (SEQ ID NO: 55848).

[0068] In some embodiments, the N-terminal flanking region replaces N-terminal reference sequence of the reference AAV capsid protein, wherein the N-terminal reference sequence has at least 60% sequence identity to the N-terminal flanking region and positioned at N-terminal end of an insertion site of the targeting peptide within the reference AAV capsid protein. In some embodiments, the N-terminal flanking region has the sequence of SYGQVATNHQS (SEQ ID NO: 55848).

[0069] In some embodiments, the modified AAV capsid protein further comprises a C-terminal flanking region on the C-terminal end of the targeting peptide.

[0070] In some embodiments, the C-terminal flanking region comprises at least four consecutive amino acids from amino acid residues 589-602 of the reference AAV capsid protein, wherein the amino acid residues are numbered according to the amino acid sequence of the reference AAV capsid protein.

[0071] In some embodiments, the C-terminal flanking region has the sequence of AQAQTGZ₁VZ₂Z₃QGZ₄ (SEQ ID NO: 55851), and Z₁, Z₂, Z₃, and Z₄ are each independently selected from any amino acid residue. In some embodiments, Z₁ is selected from a threonine (T) or a tryptophan (W), Z₂ is selected from an asparagine (N) or a glutamine (Q), Z₃ is selected from a serine (S) or an asparagine (N), and Z₄ is selected from an alanine (A) or an isoleucine (I).

[0072] In some embodiments, the C-terminal flanking region has the sequence of AQAQTGWVQNQGI (SEQ ID NO: 55850).

[0073] In some embodiments, the C-terminal flanking region replaces C-terminal reference sequence of the reference AAV capsid protein, wherein the C-terminal reference sequence has at least 60% sequence identity to the C-terminal flanking region and positioned at C-terminal end of an insertion site of the targeting peptide within the reference AAV capsid protein. In some embodiments, the C-terminal reference sequence has the sequence of AQAQTGZ₁VZ₂Z₃QGZ₄ (SEQ ID NO: 55851).

[0074] In some embodiments, the modified AAV capsid protein further comprises: a N-terminal flanking region having the sequence of B₁YGB₂VATNB₃QS (SEQ ID NO: 55849, where B₁, B₂, and B₃ are each independently selected from any amino acid residue; and a C-terminal flanking region having the sequence of AQAQTGZ₁VZ₂Z₃QGZ₄ (SEQ ID NO: 55851), where Z₁, Z₂, Z₃, and Z₄ are each independently selected from any amino acid residue.

[0075] T In some embodiments, the modified AAV capsid protein further comprises: a N-terminal flanking region having the sequence of B₁YGB₂VATNB₃QS (SEQ ID NO: 55860) and B₁ is selected from a glutamate (E) or a serine (S), B₂ is selected from a threonine (T) or a glutamine (Q), and B₃ is selected from a leucine (L) or a histidine (H); and a C-terminal flanking region having the sequence of AQAQTGZ₁VZ₂Z₃QGZ₄ (SEQ ID NO: 55861) and Z₁ is selected from a threonine (T) or a tryptophan (W), Z₂ is selected from an asparagine (N) or a glutamine (Q), Z₃ is selected from a serine (S) or an asparagine (N), and Z₄ is selected from an alanine (A) or an isoleucine (I).

[0076] In some embodiments, the modified AAV capsid protein further comprises:
[0077] a N-terminal flanking region having the sequence of SYGQVATNHQS (SEQ ID NO: 55848), and
[0078] a C-terminal flanking region having the sequence of AQAQTGWVQNQGI (SEQ ID NO: 55850).

[0079] In some embodiments, the modified AAV capsid protein comprises an amino acid sequence of B₁YGB₂VATNB₃QSPLMGAVHLYAQAQTGZ₁VZ₂Z₃QGZ₄ (SEQ ID NO: 55852), where B₁, B₂, B₃, Z₁, Z₂, Z₃, and Z₄ are each independently selected from any amino acid residue. In some embodiments, B₁ is selected from a glutamate (E) or a serine (S), B₂ is selected from a threonine (T) or a glutamine (Q), B₃ is selected from a leucine (L) or a histidine (H), Z₁ is selected from a threonine (T) or a tryptophan (W), Z₂ is selected from an asparagine (N) or a glutamine (Q), Z₃ is selected from a serine (S) or an asparagine (N), and Z₄ is selected from an alanine (A) or an isoleucine (I).

[0080] In some embodiments, the targeting peptide is a peptide having 1, 2, 3, 4, 5, 6, 7, 8, 9, 10, or more amino acid residues different to a sequence of SEQ ID NO: 29, wherein the different amino acid comprise an insertion, a deletion, or a substitution.

[0081] In some embodiments, the targeting peptide is SEQ ID NO: 29.

[0082] In some embodiments, the one or more modifications comprises an amino acid insertion, deletion, substitution, or a combination thereof to introduce the targeting peptide into VR VIII of the reference AAV capsid protein.

[0083] In some embodiments, the one or more modifications comprises an amino acid modification outside of VR VIII of the reference AAV capsid protein.

[0084] In some embodiments, the one or more modifications outside of VR VIII of the reference AAV capsid protein comprise one or more modifications in VR I, VR II, VR III, VR IV, VR V, VR VI, or VR VII.

[0085] In some embodiments, the one or more modifications outside of VR VIII of the reference AAV capsid protein comprise one or more modifications in VR IV and VR V.

[0086] In some embodiments, the one or more modifications in VR IV result in introduction of a sequence of SEQ ID NO: 30.

[0087] In some embodiments, the one or more modifications in VR V result in introduction of a sequence of SEQ ID NO: 31.

[0088] In some modifications, the one or more modifications comprises one or more amino acid deletions within VR VIII.

[0089] In some modifications, the one or more amino acid deletions comprise a deletion of one, two, three, four, or five or more amino acid residues immediately adjacent to the N terminal end of the targeting peptide within VR VIII.

[0090] In some modifications, the one or more amino acid deletions comprise a deletion of at least one amino acid residue at a position selected from 584, 585, 586, 587, or 588, or a combination thereof, relative to a reference sequence numbered according to the amino acid sequence of the reference AAV capsid protein. In some modifications, the one or more amino acid deletions comprises a deletion of the amino acid residue at position 587, relative to a reference sequence numbered according to the amino acid sequence of the reference AAV capsid protein. In some modifications, the one or more amino acid deletions comprises a deletion of the amino acid residue at position 588, relative to a reference sequence numbered according to the amino acid sequence of the reference AAV capsid protein.

[0091] In some modifications, the amino acid deletion comprises deletion of one, two, three, four, or five or more amino acid residues immediately adjacent to the C terminal end of the targeting peptide within VR VIII. In some modifications, the amino acid deletion comprises deletion of an amino acid residue at position 589, 590, or 591, or a combination thereof, relative to a reference sequence numbered according to the amino acid sequence of the reference AAV capsid protein.

[0092] In some modifications, the amino acid insertion comprises insertion of one, two, three, four, or five or more amino acid residues immediately adjacent to C terminal end of the targeting peptide within VR VIII.

[0093] In some modifications, the inserted amino acid residue is independently selected from any amino acid residue.

[0094] In some modifications, the inserted amino acid residue(s) is identical to the amino acid residue deleted adjacent to the N terminal end or C terminal end of the targeting peptide within VR VIII.

[0095] In some modifications, the inserted amino acid residue is an alanine (A) or an asparagine (N). In some modifications, the inserted amino acids are an alanine (A) at the position immediately adjacent to the C terminal end of the targeting peptide and an asparagine (N) at the next subsequent position, thereby having an amino acid sequence of AN immediately adjacent to the C terminal end of the targeting peptide.

[0096] In some modifications, the targeting peptide is:

(SEQ ID NO: 32)
(i) PLNGAVHLYN;
or
(SEQ ID NO: 33)
(ii) PLNGAVHLYAN.

[0097] In some embodiments,
[0098] (i) the reference AAV capsid protein is a capsid protein of AAV1 or a modification thereof and the targeting peptide is between S586 and T589 of the reference AAV capsid protein, thereby replacing residues S587 and S588 of the reference capsid protein;
[0099] (ii) the reference AAV capsid protein is a capsid protein of AAV2 or a modification thereof and the targeting peptide is between R585 and R588 of the reference AAV capsid protein, thereby replacing residues G586 and N587 of the reference capsid protein;
[0100] (iii) the reference AAV capsid protein is a capsid protein of AAV3 or a modification thereof and the targeting peptide is between S586 and T589 of the reference AAV capsid protein, thereby replacing residues S587 and N588 of the reference capsid protein;
[0101] (iv) the reference AAV capsid protein is a capsid protein of AAV4 or a modification thereof and the targeting peptide is between D582 and N585 of the reference AAV capsid protein, thereby replacing residues Q583 and S584 of the reference capsid protein;
[0102] (v) the reference AAV capsid protein is a capsid protein of AAV5 or a modification thereof and the targeting peptide is between S575 and T578 of the reference AAV capsid protein, thereby replacing residues S576 and S577 of the reference capsid protein;
[0103] (vi) the reference AAV capsid protein is a capsid protein of AAV6 or a modification thereof and the targeting peptide is between S586 and T589 of the reference AAV capsid protein, thereby replacing residues S587 and S588 of the reference capsid protein;
[0104] (vii) the reference AAV capsid protein is a capsid protein of AAV7 or a modification thereof and the targeting peptide is between A587 and T590 of the reference AAV capsid protein, thereby replacing residues A588 and N589 of the reference capsid protein;
[0105] (viii) the reference AAV capsid protein is a capsid protein of AAV8 or a modification thereof and the targeting peptide is between Q588 and A591 of the modified AAV capsid protein thereby replacing residues Q589 and N590 of the reference capsid protein;
[0106] (ix) the reference AAV capsid protein is a capsid protein of AAV9 or a modification thereof and the targeting peptide is between S586 and A589 of the reference AAV capsid protein thereby replacing residues A587 and Q588 of the reference capsid protein;
[0107] (x) the reference AAV capsid protein is a capsid protein of AAVrh10 or a modification thereof and the targeting peptide is between Q588 and A591 of the reference AAV capsid protein thereby replacing residues Q589 and N590 of the reference capsid protein;
[0108] (xi) the reference AAV capsid protein is a capsid protein of AAVpo.1 or a modification thereof and the targeting peptide is between N565 and S568 of the reference AAV capsid protein thereby replacing residues Q566 and N567 of the reference capsid protein;
[0109] (xii) the reference AAV capsid protein is a capsid protein of AAV12 or a modification thereof and the targeting peptide is between N590 and A593 of the reference AAV capsid protein thereby replacing residues Q591 and N592 of the reference capsid protein;
[0110] (xiii) the reference AAV capsid protein is a capsid protein of Anc80 or a modification thereof and the targeting peptide is between S586 and T589 of the reference AAV capsid protein thereby replacing residues S587 and N588 of the reference capsid protein;
[0111] (xiv) the reference AAV capsid protein is a capsid protein of Anc80-55 or a modification thereof and the targeting peptide is between S586 and T589 of the reference AAV capsid protein thereby replacing residues S587 and N588 of the reference capsid protein;
[0112] (xv) the reference AAV capsid protein is a capsid protein of Anc80-129 or a modification thereof and the targeting peptide is between S586 and T589 of the reference AAV capsid protein thereby replacing residues A587 and N588 of the reference capsid protein;
[0113] (xvi) the reference AAV capsid protein is a capsid protein of Anc80-156 or a modification thereof and the targeting peptide is between S586 and T589 of the reference AAV capsid protein thereby replacing residues A587 and N588 of the reference capsid protein;
[0114] (xvii) the reference AAV capsid protein is a capsid protein of Anc80-751 or a modification thereof and the targeting peptide is between S586 and T589 of the reference AAV capsid protein thereby replacing residues A587 and N588 of the reference capsid protein;
[0115] (xviii) the reference AAV capsid protein is a capsid protein of Anc80-1029 or a modification thereof and the targeting peptide is between S586 and T589 of the reference AAV capsid protein thereby replacing residues A587 and N588 of the reference capsid protein; or
[0116] (xix) the reference AAV capsid protein is a capsid protein of Anc80-1712 or a modification thereof and the targeting peptide is between S586 and T589 of the reference AAV capsid protein thereby replacing residues A587 and N588 of the reference capsid protein.

[0117] In some embodiments,
[0118] (i) the reference AAV capsid protein is a capsid protein of AAV1 or a modification thereof and the targeting peptide is between D590 and P591 or between S588 and T589 of the reference AAV capsid protein;
[0119] (ii) the reference AAV capsid protein is a capsid protein of AAV2 or a modification thereof and the targeting peptide is between R588 and Q589 or between N587 and R588 of the reference AAV capsid protein;
[0120] (iii) the reference AAV capsid protein is a capsid protein of AAV3 or a modification thereof and the targeting peptide is between S586 and S587 or between N588 and T589 of the reference AAV capsid protein;
[0121] (iv) the reference AAV capsid protein is a capsid protein of AAV4 or a modification thereof and the targeting peptide is between S584 and N585 or between S586 and N587 of the reference AAV capsid protein;
[0122] (v) the reference AAV capsid protein is a capsid protein of AAV5 or a modification thereof and the targeting peptide is between S575 and S576 or between T577 and T578 of the reference AAV capsid protein;
[0123] (vi) the reference AAV capsid protein is a capsid protein of AAV6 or a modification thereof and the targeting peptide is between D590 and P591 or S588 and T589 of the reference AAV capsid protein;
[0124] (vii) the reference AAV capsid protein is a capsid protein of AAV7 or a modification thereof and the targeting peptide is between N589 and T590 of the reference AAV capsid protein;
[0125] (viii) the reference AAV capsid protein is a capsid protein of AAV8 or a modification thereof and the targeting peptide is between N590 and T591 of the modified AAV capsid protein;
[0126] (ix) the reference AAV capsid protein is a capsid protein of AAV9 or a modification thereof and the targeting peptide is between Q588 and A589 of the reference AAV capsid protein;
[0127] (x) the reference AAV capsid protein is a capsid protein of AAVrh10 or a modification thereof and the targeting peptide is between N590 and A591 of the reference AAV capsid protein;
[0128] (xi) the reference AAV capsid protein is a capsid protein of AAVpo.1 or a modification thereof and the targeting peptide is between N567 and S568 or between N569 and T570 of the reference AAV capsid protein;
[0129] (xii) the reference AAV capsid protein is a capsid protein of AAV12 or a modification thereof and the targeting peptide is between N592 and A593 or between T594 and T595 of the reference AAV capsid protein;
[0130] (xiii) the reference AAV capsid protein is a capsid protein of Anc80 or a modification thereof and the targeting peptide is between T589 and A590, between N588 and T589, or between N587 and T588 of the reference AAV capsid protein;
[0131] (xiv) the reference AAV capsid protein is a capsid protein of Anc80-55 or a modification thereof and the targeting peptide is between T589 and A590 or between N587 and T588 of the reference AAV capsid protein;
[0132] (xv) the reference AAV capsid protein is a capsid protein of Anc80-129 or a modification thereof and the targeting peptide is between T589 and A590 or between N587 and T588 of the reference AAV capsid protein;
[0133] (xvi). the reference AAV capsid protein is a capsid protein of Anc80-156 or a modification thereof and the targeting peptide is between T589 and A590 or between N587 and T588 of the reference AAV capsid protein;
[0134] (xvii) the reference AAV capsid protein is a capsid protein of Anc80-751 or a modification thereof and the targeting peptide is between T589 and A590 or between N587 and T588 of the reference AAV capsid protein;
[0135] (xviii) the reference AAV capsid protein is a capsid protein of Anc80-1029 or a modification thereof and the targeting peptide is between T589 and A590 or between N587 and T588 of the reference AAV capsid protein; or
[0136] (xix) the reference AAV capsid protein is a capsid protein of Anc80-1712 or a modification thereof and the targeting peptide is between T589 and A590 or between N587 and T588 of the reference AAV capsid protein.

[0137] In another aspect, this disclosure features a polynucleotide encoding any of the modified AAV capsid proteins described herein.

[0138] In another aspect, this disclosure features a vector comprising any of the polynucleotides described herein. In some embodiments, the vector includes a promoter operably linked to the polynucleotide.

[0139] In another aspect, this disclosure features a host cell comprising any of the modified AAV capsid proteins described herein, any of the polynucleotides described herein, or any of the vectors described herein.

[0140] In another aspect, this disclosure features a recombinant AAV virion (rAAV) comprising any of the modified AAV capsid proteins described herein.

[0141] In some embodiments, the rAAV further comprises an exogenous polynucleotide. In some embodiments, the exogenous polynucleotide comprises a template for homology directed repair. In some embodiments, the exogenous polynucleotide comprises an expressible polynucleotide encoding a therapeutic tRNA, miRNA, gene editing guide RNA, or RNA-editing guide RNA. In some embodiments, the exogenous polynucleotide comprises an expressible polynucleotide encoding a therapeutic protein. In some embodiments, the therapeutic protein is used for treating and/or preventing a disease of the central nervous system (CNS).

[0142] In some embodiments, the AAV virion, when administered in a therapeutically effective amount to a subject, has increased specificity to a central nervous system (CNS) tissue, relative to a reference AAV virion comprising a reference AAV capsid protein without the targeting peptide.

[0143] In some embodiments, the AAV virion, when administered in a therapeutically effective amount to a subject, has increased transduction efficiency in the CNS, relative to a reference AAV virion comprising a reference AAV capsid protein without the targeting peptide.

[0144] In some embodiments, the AAV virion, when administered in a therapeutically effective amount to a subject, has increased blood brain barrier penetration in the subject, relative to a reference AAV virion comprising a reference capsid protein without the targeting peptide.

[0145] In another aspect, this disclosure features a pharmaceutical composition comprising any of the AAV virions described herein.

[0146] In another aspect, this disclosure features a method for treating or ameliorating or preventing a disease or condition in a subject, comprising administering a therapeutically effective amount of any of the AAV virions described herein or any of the pharmaceutical compositions described herein.

[0147] In some embodiments, the disease is a disease of the central nervous system (CNS).

[0148] In some embodiments, the CNS disease is a lysosomal storage disease (LSD).

[0149] In some embodiments, the CNS disease is a leukodystrophy.

[0150] In some embodiments, the CNS disease is metachromatic leukodystrophy (MLD).

[0151] In some embodiments, the CNS disease is Krabbe.

[0152] In some embodiments, the CNS disease is cancer. In some embodiments, the CNS disease is metastatic breast cancer.

[0153] In some embodiments, any of the modified adeno-associated virus (AAV) capsid proteins described herein are used for treating and/or preventing a disease of the central nervous system (CNS).

[0154] In another aspect, this disclosure features an AAV virion comprising any of the modified AAV capsid proteins described herein or any of the AAV virions described herein used for treating and/or preventing a disease of the central nervous system (CNS).

[0155] In another aspect, this disclosure features any of the pharmaceutical compositions comprising any of the modified AAV capsid proteins described herein, and/or any of the AAV virions described herein used for treating and/or preventing a disease of the central nervous system (CNS).

[0156] In another aspect, this disclosure features a method of transferring an exogenous polynucleotide to the central nervous system (CNS), comprising the step of administering any of the AAV virions described herein to a subject. In some embodiments, the administration results in transfer of the exogenous polynucleotide in the CNS, at a CNS:liver infection ratio of greater than 1 when measured by genome copies of the AAV virion. In some embodiments, the administration results in expression of the exogenous polynucleotide in CNS, at a CNS:liver expression ratio of greater than 10. In some embodiments, the CNS:liver expression ratio of greater than 10 when measured by protein expression.

[0157] In another aspect, this disclosure features use of any of the AAV capsid proteins described herein, and/or any of the AAV virions described herein for transferring an exogenous polynucleotide to the central nervous system. In some embodiments, the use is a non-therapeutic use.

[0158] It is expected that the modified rAAVs of the disclosure will provide improved therapeutics indices due to specific tropism to the target tissues and greater expression of a therapeutic protein as compared to a control rAAV having an unmodified capsid protein.

### 5. BRIEF DESCRIPTION OF THE SEVERAL VIEWS OF THE DRAWINGS

[0159] These and other features, aspects, and advantages of the present invention will become better understood with regard to the following description, and accompanying drawings where:

[0160] FIG. 1 summarizes the NHP study design described in the Examples.

[0161] FIGS. 2A-2D are immunohistochemistry (IHC) images of brain sections, obtained from NHPs administered with (i) Anc80L65-CAG-GFP or (ii) AAV9-CAG-GFP by intracisternal magna injection (ICM) or lumbar-puncture (LP). Brown stain=GFP expression (arrows). Inset in Anc80L65-LP (FIG. 2B) shows mostly neuronal staining. FIG. 2A shows GFP expression after administration of Anc80L65 via ICM injection. FIG. 2B shows GFP expression after administration of Anc80L65 via LP. FIG. 2C shows GFP expression after administration of AAV9 via ICM injection. FIG. 2D shows GFP expression after administration of AAV via LP.

[0162] FIGS. 3A-3C are IHC images of brain sections including cortex, obtained from a NHP administered with vehicle (FIG. 3A), Anc80L65-CAG-GFP (FIG. 3B), or AAV9-CAG-GFP (FIG. 3C). Brown stain=GFP expression.

[0163] FIGS. 4A-4B are IHC images of a brain section including ependyma and caudate nucleus, obtained from a NHP administered Anc80L65-CAG-GFP by ICM injection. FIG. 4B is an enlarged image of a portion of FIG. 4A. Brown stain=GFP expression.

[0164] FIGS. 5A-5B are IHC images of a brain section including caudate nucleus, obtained from a NHP administered with Anc80L65-CAG-GFP by ICM injection. FIG. 5B is an enlarged image of a portion of FIG. 5A. Brown stain=GFP expression.

[0165] FIG. 6 is an IHC image of a brain section including substantia nigra, obtained from a NHP administered with Anc80L65-CAG-GFP by ICM injection. Brown stain=GFP expression.

[0166] FIGS. 7A and 7B are IHC images of a brain section including perivascular cells, obtained from a NHP administered with Anc80L65-CAG-GFP by ICM injection. FIG. 7B is an enlarged image of a portion of FIG. 7A. Brown stain=GFP expression.

[0167] FIGS. 8A and 8B are IHC images of a brain section including cortex, obtained from a NHP administered with Anc80L65-CAG-GFP by ICM injection. FIG. 8B is an enlarged image of a portion of FIG. 8A. Brown stain=GFP expression.

[0168] FIG. 9 is an IHC image of a brain section including cortex, obtained from a NHP administered with Anc80L65-CAG-GFP by lumbar puncture (LP). Brown stain=GFP expression.

[0169] FIGS. 10A-10C provide one-way analysis of transgene expression determined by measurement of mRNA transcript of eGFP calculated according to the equation: % eGFP expression=(eGFP cp/uL÷RPP30 cp/uL)×100, in various brain regions in animals administered with AAV9-CAG-GFP by ICM injection or with Anc80L65-CAG-GFP by LP.

[0170] FIG. 10A provides data for the frontal cortex; FIG. 10B provides data for the motor cortex; and FIG. 10C provides data for the parietal lobe of the cortex.

[0171] FIGS. 11A-11B provide one-way analysis of transgene expression determined by measurement of mRNA transcript of eGFP calculated according to the equation: % eGFP expression=(eGFP cp/uL÷RPP30 cp/uL)×100, in various brain regions administered with AAV9-CAG-GFP by ICM injection or with Anc80L65-CAG-GFP by LP. FIG. 11A provides data for the caudate nucleus; and FIG. 11B provides data for the globus pallidus.

[0172] FIGS. 12A-12B provide one-way analysis of transgene expression determined by measurement of mRNA transcript of eGFP calculated according to the equation: % eGFP expression=(eGFP cp/uL÷RPP30 cp/uL)×100, in various brain regions administered with AAV9-CAG-GFP by ICM injection or with Anc80L65-CAG-GFP by LP. FIG. 12A provides data for the putamen; and FIG. 12B provides data for the substantia nigra.

[0173] FIGS. 13A-17 provide one-way analysis of viral genome (DNA) copy per diploid genome (VGC/DG) determined by measurement of the genome copy numbers using ddPCR and calculation of (VGC/DG) values using the equation: VGC/DG=(eGFP cp/uL÷RPP30 cp/uL)×2. Each figure provides data for a different brain region or liver, including cerebellar cortex (FIG. 13A), dorsal root ganglia, cervical (FIG. 13B), dorsal root ganglia, lumbar (FIG. 14A), frontal cortex (FIG. 14B), liver (FIG. 15A), motor cortex (FIG. 15B), spinal cord, cervical (FIG. 16A), spinal cord, lumbar (FIG. 16B), and sciatic nerve (FIG. 17).

[0174] FIGS. 18A, 18B, 19A, 19B, 20A, 20B and 21 provide one-way analysis of transgene expression determined by measurement of mRNA transcript of eGFP calculated according to the equation: % eGFP expression=(eGFP cp/uL÷RPP30 cp/uL)×100. Each figure provides data for a different brain region, including caudate nucleus (FIG. 18A), frontal cortex (FIG. 18B), globus pallidus (FIG. 19A), motor cortex (FIG. 19B), parietal cortex (FIG. 20A), putamen (FIG. 20B), and substantia nigra (FIG. 21).

[0175] FIGS. 22A-22D are immunohistochemistry (IHC) images of brain sections, obtained from NHPs administered with Anc80L65-CAG-GFP or AAV9-CAG-GFP by intracisternal magna injection. Brown stain=GFP expression. FIG. 22A shows GFP expression in the cortex after administration of Anc80L65-CAG-GFP. FIG. 22B shows GFP expression in the caudate nucleus after administration of Anc80L65-CAG-GFP. FIG. 22C shows GFP expression in the cortex after administration of AAV9-CAG-GFP. FIG. 22D shows GFP expression in the caudate nucleus after administration of AAV9-CAG-GFP.

[0176] FIGS. 23 and 24 illustrate the GFP mRNA expression measured by ddPCR in the NHP brain and spinal cord 2 weeks after ICM or LP delivery of AAV9-CAG-GFP or Anc80L65-CAG-GFP. FIG. 23 provides % GFP expression in the frontal cortex, motor cortex, and parietal cortex. FIG. 24 Provides % GFP expression in the caudate nucleus, globus palidus, putamen, and substantia nigra.

[0177] FIG. 25 illustrates the vector genome copy analysis via qPCR. VGCs per cell (presented as mean vector genome copies per diploid genome VGC/DG) in NHPs injected with Anc80L65-CAG-GFP and AAV9-CAG-GFP by LP or ICM injection are provided.

[0178] FIGS. 26A-26F are double immunofluorescence (IF) staining images of brain sections administered with Anc80L65-CAG-GFP (FIGS. 26A, 26B and 26C) or AAV9-CAG-GFP (FIGS. 26D, 26E and 26F). The transgene expression from the AAVs was detected by staining against GFP and cell types were detected by staining against cell-type specific markers, including NeuN for neurons (FIG. 26A and FIG. 26D), GFAP for astrocytes (FIG. 26B and FIG. 26E), and Iba1 for microglial cells (FIG. 26C and FIG. 26F). Examples were imaged from the motor cortex. In all cases, GFP+ cells are shown in red, the cell specific marker is shown in green, and the merged images are shown with double-labeled cells in yellow/orange (arrows for double-labeled cells).

[0179] FIGS. 27A-27F are double immunofluorescence (IF) staining images of brain sections from NHP administered with Anc80L65-CAG-GFP via LP (FIGS. 27A, 27B and 27C) or via ICM (FIGS. 27D, 27E and 27F). Examples were imaged from the motor cortex. The transgene expression from Anc80L65 was detected by staining against GFP and oligodendrocyte cells were detected by staining against oligodendrocyte specific marker OLIG2, shown in green (FIG. 27A and FIG. 27D). GFP+ cells are shown (FIG. 27B and FIG. 27E). The merged images are shown with arrows pointing to double-labeled cells (FIG. 27C and FIG. 27F).

[0180] FIG. 28 illustrates the structure of an AAV VP1 protein with certain variable regions (VR I, VR IV, VR V, and VR VIII) highlighted. The location of the targeting peptide insertion site in VR VIII is indicated.

[0181] FIGS. 29A-29C provide the sequence alignment of VP1 sequences of certain AAV variants using AAV2 VP1 as a reference. The location of the insertion site of a targeting peptide (FIG. 29B) is indicated. FIG. 29 discloses SEQ ID NOS 55, 54, 58, 56, 64, 59, 60, 89, 111, 61, 63, 62, and 57, respectively, in order of appearance.

[0182] FIGS. 30A-30D provide the sequence alignment of VP1 sequences of ancestral AAVs using AAV2 as a reference. The location of the insertion site of a targeting peptide (FIG. 30C) is indicated. One or more representative member sequences for each of the Anc80, Anc81, Anc82, Anc83, Anc84, Anc94, Ac110, Anc113, Anc 126 and Anc127 libraries were used for the alignment. FIGS. 30A-30D disclose SEQ ID NOS 55, 55911, 143, 147, 144, 146, 145, 148, 149-150, 142, and 55912-55921, respectively, in order of appearance.

[0183] FIG. 31 provides sequences for a window of VR VIII of modified AAV capsid proteins (e.g., Anc80L65) with targeting peptides at various positions in VR VIII. Underlined sequences represent amino acid residues of the targeting peptide. FIG. 31 discloses SEQ ID NOS 55875-55881, respectively, in order of appearance.

[0184] FIG. 32A illustrates the structure of an AAV VP1 capsid protein focusing on the variable region (VR) IV, VR V, and VR VIII.

[0185] FIG. 32B provides partial sequence information for three AAV capsid protein variant having various combinations of VR IV, VR V, and VR VIII regions of an Anc80L65 or AAV9 capsid protein.

[0186] FIG. 32C provides a sequence alignment of amino acid residues 540-640 of SEQ ID NOs: 61 (AAV9 capsid protein), 142 (Anc80L65 capsid protein), and 55853. Box indicates amino acids positions 576-601 corresponding to positions in AAV9 without a targeting peptide inserted. FIG. 32C discloses SEQ ID NOS 55853, and 55882-55883, respectively, in order of appearance.

[0187] FIG. 32D provides a sequence alignment of amino acid residues 540-640 of AAV9 (SEQ ID NO: 61), AAV9 (SEQ ID NO: 61) and targeting peptide (SEQ ID NO: 9) inserted in between 588 and 589 (with 586 and 587 removed), and AFT-6 has the Anc80L65 capsid protein backbone with an N-terminal flanking region from AAV9 (SEQ ID NO: 55848), a targeting peptide of SEQ ID NO: 9, and a C-terminal flanking region from AAV9 (SEQ ID NO: 55850). Box indicates amino acids positions 559-635. FIG. 32D discloses SEQ ID NOS 55884-55885, 55884, and 55886, respectively, in order of appearance.

[0188] FIG. 33 provides sequences for a window of VR VIII of modified AAV capsid proteins (e.g., AAV9) with targeting peptides shown as underlined amino acid residues and blank spaces at positions 587 and 588 corresponding to deletion of A587 and Q588 from the modified AAV9 capsid protein. Each of AFT-9 to AFT-31 are inserted as described into an AAV9 capsid protein. FIG. 33 discloses SEQ ID NOS 55875, and 55887-55909, respectively, in order of appearance.

[0189] FIG. 34 shows a plot of gene transfer efficacy data (RNA logMN_Fold Change) averaged across all brain tissues for each of the rAAV in the AAV^{mini} library. ** denotes technical replicate of AFT-6 (SEQ ID NO: 55820).

[0190] FIG. 35 shows a plot of tissue enrichment scores (log 10 scale of expression) for the indicated tissues. Capsids tested included AAV9 and an Anc80L65 capsid comprising an N2 targeting peptide (SEQ ID NO: 9) located in VPR VIII (full capsid sequence is referred to as AFT-6 (SEQ ID NO: 55820)). “On-target” CNS tissues analyzed included frontal lobe, motor cortex, parietal lobe, occipital lobe, temporal lobe, cerebellum, putamen, thalamus, globus pallidus, caudate, and substantia nigra. “Off-target” tissues analyzed included dorsal root ganglion; such as cervical, lumbar, thoracic; and liver. Higher tissue enrichment score values represent greater tropism.

[0191] FIG. 36 shows a plot of tissue enrichment scores (log 10 scale of expression) for the indicated tissues. Capsids tested included AAV9, an AAV9 comprising an N3 targeting peptide (PLNGSVHLY (SEQ ID NO: 3603 in Appendix B)) positioned in VR VIII between amino acid residues 586 and 589, replacing amino acids A587 and Q588, and an AAV9 comprising an N4 targeting peptide (PLNGTVHLY (SEQ ID NO: 1232 in Appendix B)) positioned in VR VIII between amino acid residues 586 and 589, replacing amino acids A587 and Q588. CNS tissues analyzed included frontal cortex, temporal lobe, putamen, thalamus, and globus pallidus. Higher tissue enrichment score values represent greater tropism.

[0192] FIG. 37 shows a plot of tissue enrichment scores (log10 scale of expression) for the indicated tissues. Capsids tested included an AAV9 comprising an N1 targeting peptide (SEQ ID NO: 9) located in VR VIII of AAV9, an Anc80L65 capsid comprising an N2 targeting peptide (SEQ ID NO: 9) located in VR VIII (full capsid sequence is referred to as AFT-6 (SEQ ID NO: 55820)); an AAV9 comprising an N3 targeting peptide (PLNGSVHLY (SEQ ID NO: 3603)) positioned in VR VIII between amino acid residues 586 and 589, replacing amino acids A587 and Q588, and an AAV9 comprising an N4 targeting peptide (PLNGTVHLY (SEQ ID NO: 1232)) positioned in VR VIII between amino acid residues 586 and 589, replacing amino acids A587 and Q588. Tissues analyzed included frontal lobe, motor cortex, parietal lobe, occipital lobe, cerebellum, putamen, thalamus, globus pallidus, caudate, substantia nigra, liver, DRG-cervical, DRG-lumbar, and DRG-thoracic. Higher tissue enrichment score values represent greater tropism.

[0193] FIG. 38 provides sequences for a window of VR VIII of modified AAV capsid library having targeting peptides (e.g., X₁X₂X₃X₄X₅X₆X₇X₈X₉) where a residue at X₁ to X₉ is selected from the amino acid residues in the corresponding column. In the library, blank spaces at positions 587 and 588 correspond to deletion of A587 and Q588 from the modified AAV capsid protein. FIG. 38 discloses SEQ ID NOS 55875 and 55910, respectively, in order of appearance.

### 6. DETAILED DESCRIPTION OF THE INVENTION

### 6.1. Definitions

[0194] “AAV” is adeno-associated virus and may be used to refer to the virus itself or derivatives thereof. The term covers all subtypes, serotypes and pseudotypes, and both naturally occurring and recombinant forms, except where required otherwise.

[0195] The term “AAV capsid protein” or simply “capsid protein” refers to a VP1, VP2, or VP3 capsid protein of AAV. In some embodiments, the AAV capsid protein is a wild type or modified capsid protein of AAV9; AAV2; AAV1; AAV6; AAV3; AAV LK03; AAV7; AAV8; AAV hu.37; AAV rh 10; AAV hu.68; AAV10; AAV5; AAV3-3; AAV4-4; AAV1-A; hu.46-A; hu.48-A; hu.44-A; hu.43-A; AAV6-A; hu.34-B; hu.47-B; hu.29-B; rh.63-B; hu.56-B; hu.45-B; rh.57-B; rh.35-B; rh.58-B; rh.28-B; rh.51-B; rh.19-B; rh.49-B; rh.52-B; rh.13-B; AAV2-B; rh.20-B; rh.24-B; rh.64-B; hu.27-B; hu.21-B; hu.22-B; hu.23-B; hu.7-C; hu.61-C; rh.56-C; hu. 9-C; hu.54-C; hu.53-C; hu.60-C; hu.55-C; hu.2-C; hu.1-C; hu.18-C; hu.3-C; hu.25-C; hu.15-C; hu.16-C; hu.11-C; hu.10-C; hu.4-C; rh.54-D; rh.48-D; rh.55-D; rh.62-D; AAV7-D; rh.52-E; rh.51-E; hu.39-E; rh.53-E; hu.37-E; rh.43-E; rh.50-E; rh.49-E; rh.61-E; hu.41-E; rh.64-E; rh74; hu.42-E; rh.57-E; rh.40-E; hu.67-E; hu.17-E; hu.6-E; hu.66-E; rh.38-E; hu.32-F; AAV9/hu; hu.31-F; Anc80; Anc8l; Anc82; Anc83; Anc84; Anc94; Anc113; Anc126; Anc127; Anc80L27; Anc80L59; Anc80L60; Anc80L62; Anc80L65; Anc80L33; Anc80L36; Anc80L44; Anc80L1; Anc110; and Anc80DI.

[0196] The term “modified AAV capsid protein” or simply “modified capsid protein” refers to a capsid protein that is modified as compared to such naturally occurring or synthetic/artificial capsid protein, which is referred to as the “reference AAV capsid protein” or “reference capsid protein.” The reference AAV capsid protein as used herein may be a VP1, VP2, or VP3 capsid protein of a naturally occurring AAV variant or a non-naturally occurring VP1, VP2, or VP3 capsid protein that is known in the art.

[0197] The term “targeting peptide” as used herein refers to an amino acid sequence ranging from 5 to 16 amino acids in length within the variable region VIII (VRVIII) of a modified AAV capsid protein introduced by one or more modifications described herein. AAVs comprising a modified capsid protein with a targeting peptide can have localization and distribution in a target cell, tissue or organ different from the AAV with a capsid protein without the target peptide.

[0198] The term “amino acid position” within an AAV capsid protein as here herein refers to a position of an amino acid residue in an AAV VP1 protein sequence, counted from the first amino acid in the N terminal. As used herein, the term “amino acid” comprises naturally occurring L- and D-amino acids and artificial, i.e. non-naturally occurring, α-amino acids. Preferably, the amino acid is a naturally occurring amino acid. In preferred embodiments, the amino acid is a naturally occurring L-α-amino acid.

[0199] For the avoidance of doubt, as used herein, the indication that an insertion site is at amino acid position X means that the targeting peptide is inserted between amino acids X and X+1, i.e., the targeting peptide is inserted after the amino acid at position X and before the amino acid at position X+1.

[0200] The term “inverted terminal repeat” (or “ITR”) refers to a polynucleotide sequence found at the ends of AAV genomes that form a hairpin, which contributes to the genome's ability to self-prime (allowing for primase-independent synthesis of the complementary second DNA strand) and provides for encapsidation of the genome into an AAV particle. An ITR can be a wild-type ITR or a variant thereof.

[0201] The term “modification” when in conjunction with an amino acid residue, amino acid residues, or a modified sequence, refers to insertion(s), deletion(s), substitution(s) or a combination thereof.

[0202] The terms “operably linked” and “operatively linked” refer to the functional relationship of the nucleic acid sequences with regulatory sequences of nucleotides, such as promoters, enhancers, transcriptional and translational stop sites, and other signal sequences and indicates that two or more DNA segments are joined together such that they function in concert for their intended purposes. For example, operative linkage of nucleic acid sequences, typically DNA, to a regulatory sequence or promoter region refers to the physical and functional relationship between the DNA and the regulatory sequence or promoter such that the transcription of such DNA is initiated from the regulatory sequence or promoter, by an RNA polymerase that specifically recognizes, binds and transcribes the DNA.

[0203] The term “parenteral” administration of a composition includes, e.g., subcutaneous (s.c.), intravenous (i.v.), intramuscular (i.m.), or intrasternal injection, or infusion techniques.

[0204] The terms “peptide”, “polypeptide” and “protein” are used interchangeably herein to refer to a polymer of amino acid residues.

[0205] The term “pharmaceutically acceptable carrier” includes any of the standard pharmaceutical carriers, excipients, stabilizers and adjuvants. For examples of carriers, excipients, stabilizers and adjuvants, see Remington: The Science and Practice of Pharmacy, 22nd Revised Ed., Pharmaceutical Press, 2012.

[0206] The abbreviation “rAAV” refers to a recombinant adeno-associated viral particle composed of at least one AAV capsid protein and an encapsidated polynucleotide, sometimes referred to herein as a “genome”. rAAV can include a genome that comprises a heterologous polynucleotide (i.e., a polynucleotide other than a wild-type AAV genome), such as a heterologous polynucleotide encoding a gene delivered to a mammalian cell such as sequence encoding a therapeutic protein.

[0207] The terms “percent sequence identity” (% sequence identity), “percent identical” (% identical) and the like refer to percent sequence identity between two nucleotide sequences or between two amino acid sequences calculated by aligning the two sequences, determining the number of matches of nucleotides or amino acid residues between the two sequences, dividing the number of matches by the length of the aligned region (i.e., the number of aligned nucleotides or amino acid residues), and multiplying by 100 to arrive at a percent sequence identity value. For calculation of the percent sequence identity (% sequence identity), two or more sequences are aligned using the EMBOSS Needle Pairwise Sequence Alignment software tool based on the Needleman and Wunsch algorithm (available at www.ebi.ac.uk/Tools/psa/emboss_needle) with the following parameters: Matrix: BLOSUM62 (for protein sequences) or DNAfull (for DNA sequences); Gap Open: 10; Gap Extend: 0.5; End Gap Penalty: false; End Gap Open: 10; and End Gap Extend: 0.5.

[0208] Methods of alignment of nucleotide and amino acid sequences for comparison are well known in the art. The local homology algorithm (BESTFIT) of Smith and Waterman (1981) Adv. Appl. Math 2:482, may permit optimal alignment of compared sequences; by the homology alignment algorithm (GAP) of Needleman and Wunsch (1970) J. Mol. Biol. 48:443-453; by the search for similarity method (Tfasta and Fasta) of Pearson and Lipman (1988) Proc. Natl. Acad. Sci. USA 85:2444; by computerized implementations of these algorithms, including, but not limited to: CLUSTAL in the PC/Gene program by Intelligenetics, Mountain View, Calif, GAP, BESTFIT, BLAST, FASTA and TFASTA in the Wisconsin Genetics Software Package, Version 8 (available from Genetics Computer Group (GCG™ programs (Accelrys, Inc., San Diego, Calif.)). The CLUSTAL program is well described by Higgins and Sharp (1988) Gene 73:237-244; Higgins and Sharp (1989) CABIOS 5: 151-153; Corpet, et al. (1988) Nucleic Acids Res. 16: 10881-10890; Huang, et al. (1992) Computer Applications in the Biosciences 8: 155-165; and Pearson, et al. (1994) Meth. Mol. Biol. 24:307-331. An example of a good program to use for optimal global alignment of multiple sequences is PileUp (Feng and Doolittle (1987) J. Mol. Evol. 25:351-260, which is similar to the method described by Higgins and Sharp (1989) CABIOS 5: 151-153 (and is hereby incorporated by reference). The BLAST family of programs that can be used for database similarity searches includes: BLASTN for nucleotide query sequences against nucleotide database sequences; BLASTX for nucleotide query sequences against protein database sequences; BLASTP for protein query sequences against protein database sequences; TBLASTN for protein query sequences against nucleotide database sequences; and TBLASTX for nucleotide query sequences against nucleotide database sequences. See, Current Protocols in Molecular Biology, Chapter 19, Ausubel, et al., eds., Greene Publishing and Wiley-Interscience, New York (1995). An updated version of the BLAST family of programs includes the BLAST+ suite. (Camacho, C., et al. (2009 Dec. 15) BLAST+: architecture and applications. BMC Bioinformatics 10:421).

[0209] The term “tissue-specific” promoter or expression regulatory element (ERE) as used herein refers to a nucleotide sequence which, when operably linked with a polynucleotide encodes or specified by a gene, causes the gene product to be produced in a cell substantially only if the cell is a cell of the tissue type corresponding to the promoter.

[0210] The terms “treatment”, “treating”, and the like are used herein to generally mean obtaining a desired pharmacologic and/or physiologic effect. The effect may be prophylactic in terms of completely or partially preventing a disease, condition, or symptoms thereof, and/or may be therapeutic in terms of a partial or complete cure for a disease or condition and/or adverse effect attributable to the disease or condition. “Treatment” as used herein covers any treatment of a disease or condition of a mammal, particularly a human, and includes: (a) preventing the disease or condition from occurring in a subject which may be predisposed to the disease or condition but has not yet been diagnosed as having it; (b) inhibiting the disease or condition (e.g., arresting its development); or (c) relieving the disease or condition (e.g., causing regression of the disease or condition, providing improvement in one or more symptoms).

[0211] The terms “vector”, “AAV vector” and “rAAV vector” refer to an rAAV that comprises a heterologous polynucleotide, e.g., a transgene.

[0212] The terms “variable region” or “VR” as used herein refer to one or more of nine sequence variable regions (e.g., VRI to VRIX) in an AAV capsid protein previously defined by comparison and alignment of various AAV capsid proteins. See e.g., Govindasamy et al., Structurally mapping the diverse phenotype of adeno-associated virus serotype 4, J. Virol. (2006); Meyer et al. Structure of the gene therapy vector, adeno-associated virus with its cell receptor, AAVR, eLife (2019). The VRs are known to contain amino acids that contribute to slight differences in surface topologies and distinct functional phenotypes, such as in receptor binding, transduction efficiency, and antigenic re-activity. The relative positions of the VR 1, VR IV, VR V, and VIIII are illustrated in FIG. 28, but the specific positions of the variable regions within a capsid protein can vary depending on the capsid protein and/or the sequence alignment method.

[0213] Unless otherwise defined, all technical and scientific terms used herein have the same meaning as commonly understood by one of ordinary skill in the art to which the methods and compositions of matter belong. Although methods and materials similar or equivalent to those described herein can be used in the practice or testing of the methods and compositions of matter, suitable methods and materials are described below. In addition, the materials, methods, and examples are illustrative only and not intended to be limiting. All publications, patent applications, patents, and other references mentioned herein are incorporated by reference in their entirety.

### 6.2. Modified AAV Capsid Proteins

[0214] One aspect of the present disclosure provides a modified adeno-associated virus (AAV) capsid protein comprising: a targeting peptide within variable region VIII (VR VIII), wherein the targeting peptide has a sequence of X₁X₂X₃X₄X₅X₆X₇X₈X₉ and X₁, X₂, X₃, X₄, X₅, X₆, X₇, X₈, and X₉ are each independently selected from any amino acid residue.

[0215] In some embodiments, the modified adeno-associated virus (AAV) capsid protein comprises: a targeting peptide within VR VIII wherein the targeting peptide has a sequence selected from SEQ ID NOs: 620-55819.

[0216] In some embodiments, the modified adeno-associated virus (AAV) capsid protein comprises: a targeting peptide within variable region VIII (VR VIII), wherein the targeting peptide has a sequence of PX₂X₃GAVX₇LY (SEQ ID NO: 2) and X₂, X₃, and X₇ are independently selected from any amino acid residue.

[0217] In some embodiments, the modified adeno-associated virus (AAV) capsid protein comprises: a targeting peptide within variable region VIII (VR VIII), wherein the targeting peptide has a sequence of PX₂X₃GX₅X₆X₇LY (SEQ ID NO: 10) and X₂, X₃, X₅, X₆, and X₇ are independently selected from any amino acid residue.

[0218] In some embodiments, the modified adeno-associated virus (AAV) capsid protein comprises: a targeting peptide within variable region VIII (VR VIII), wherein the targeting peptide has a sequence of PX₂X₃GAVX₇X₈X₉ (SEQ ID NO: 20) and X₂, X₃, X₅, X₆, and X₇ are independently selected from any amino acid residue.

[0219] In some embodiments, the modified AAV capsid protein has one or more amino acid insertions, deletions, substitutions, or combinations thereof as compared to a reference AAV capsid protein. Some or all of the amino acid insertions, deletions, substitutions, or combinations thereof are for introduction of the targeting peptide into the reference AAV capsid protein. In some embodiments, all the differences between the modified AAV capsid protein and the reference AAV capsid protein are within variable region VIII (VR VIII). In some embodiments, all the differences between the modified AAV capsid protein and the reference AAV capsid protein are within the targeting peptide.

[0220] In some embodiments, the modified AAV capsid protein further comprises one or more modifications comprising an amino acid insertion, deletion, substitution, or a combination thereof outside of the introduction of the targeting peptide within VR VIII of the reference AAV capsid protein.

[0221] In some embodiments, the modified capsid protein further comprises one or more modifications outside of the VR VIII of the reference AAV capsid protein.

[0222] In some embodiments, the modified AAV capsid protein includes one or more modifications comprising an amino acid insertion, deletion, substitution, or a combination thereof to introduce the targeting peptide within VR VIII (e.g., wherein VR VIII corresponds to amino acids between positions 565 and 595 of the reference AAV capsid protein).

[0223] In some embodiments, the reference AAV capsid protein is an AAV9 capsid protein. In some embodiments, the modified AAV capsid protein has a sequence having at least 90%, 95%, 96%, 97%, 98% or 99% sequence identity to an AAV9 capsid protein. In some embodiments, the modified AAV capsid protein has a sequence having 1, 2, 3, 4, 5, 6, 7, 8, 9, 10, 11, 12, 13, 14, 15, 16, 17, 18, 19, 20, 21, 22, 23, 24, 25, 26, 27, 28, 29, 30 or more amino acid residues different (e.g., insertion, deletion, or substitution) from an AAV9 capsid protein. In some embodiments, the modified AAV capsid protein has a sequence having at least 90%, 95%, 96%, 97%, 98% or 99% sequence identity to an AAV9 capsid protein having a targeting peptide (e.g., any of the targeting peptides described herein) in VR VIII. In some embodiments, the modified AAV capsid protein has a sequence having 1, 2, 3, 4, 5, 6, 7, 8, 9, 10, 11, 12, 13, 14, 15, 16, 17, 18, 19, 20, 21, 22, 23, 24, 25, 26, 27, 28, 29, 30 or more amino acid residues different (e.g., insertion, deletion, or substitution) from an AAV9 capsid protein having a targeting peptide (e.g., any of the targeting peptides described herein) in VR VIII.

[0224] In some embodiments, the reference AAV capsid protein is an Anc80L65 capsid protein. In some embodiments, the modified AAV capsid protein has a sequence having at least 90%, 95%, 96%, 97%, 98% or 99% sequence identity to an Anc80L65 capsid protein. In some embodiments, the modified AAV capsid protein has a sequence having 1, 2, 3, 4, 5, 6, 7, 8, 9, 10, 11, 12, 13, 14, 15, 16, 17, 18, 19, 20, 21, 22, 23, 24, 25, 26, 27, 28, 29, 30 or more amino acid residues different (e.g., insertion, deletion, or substitution) from an Anc80L65 capsid protein. In some embodiments, the modified AAV capsid protein has a sequence having at least 90%, 95%, 96%, 97%, 98% or 99% sequence identity to an Anc80L65 capsid protein having a targeting peptide (e.g., any of the targeting peptides described herein) in VR VIII. In some embodiments, the modified AAV capsid protein has a sequence having 1, 2, 3, 4, 5, 6, 7, 8, 9, 10, 11, 12, 13, 14, 15, 16, 17, 18, 19, 20, 21, 22, 23, 24, 25, 26, 27, 28, 29, 30 or more amino acid residues different (e.g., insertion, deletion, or substitution) from an Anc80L65 capsid protein having a targeting peptide (e.g., any of the targeting peptides described herein) in VR VIII.

[0225] In some embodiments, the modified AAV capsid protein has a sequence having at least 90%, 95%, 96%, 97%, 98% or 99% sequence identity to a sequence selected from SEQ ID NOs: 34-38 or 55820-55847. In some embodiments, the modified AAV capsid protein has a sequence selected from SEQ ID NOs: 34-38 or 55820-55847. In some embodiments, the modified AAV capsid protein has a sequence selected from SEQ ID NOs: 34-39.

[0226] In some embodiments, the AAV virion comprising the modified AAV capsid protein, when administered in a therapeutically effective amount to a subject, has increased specificity to a central nervous system (CNS) tissue, relative to an AAV virion comprising a reference capsid protein without the targeting peptide.

[0227] In some embodiments, the AAV virion comprising the modified AAV capsid protein, when administered in a therapeutically effective amount to a subject, has increased transduction efficiency in the CNS, relative to an AAV virion comprising a reference capsid protein without the targeting peptide.

[0228] In some embodiments, the AAV virion comprising the modified AAV capsid protein, when administered in a therapeutically effective amount to a subject, has increased blood brain barrier penetration in the subject, relative to an AAV virion comprising a reference capsid protein without the targeting peptide.

[0229] In some embodiments, the AAV virion comprising the modified AAV capsid protein, when administered in a therapeutically effective amount to a subject, has decreased specificity to a central nervous system (CNS) tissue, relative to an AAV virion comprising a reference capsid protein without the targeting peptide.

[0230] In some embodiments, the AAV virion comprising the modified AAV capsid protein, when administered in a therapeutically effective amount to a subject, has decreased transduction efficiency in the CNS, relative to an AAV virion comprising a reference capsid protein without the targeting peptide.

[0231] In some embodiments, the AAV virion comprising the modified AAV capsid protein, when administered in a therapeutically effective amount to a subject, has decreased blood brain barrier penetration in the subject, relative to an AAV virion comprising a reference capsid protein without the targeting peptide.

### 6.2.1. Targeting Peptide

[0232] In some embodiments, the targeting peptide within variable region VR VIII has a sequence of X₁X₂X₃X₄X₅X₆X₇X₈X₉ and X₁, X₂, X₃, X₄, X₅, X₆, X₇, X₈, and X₉ are each independently selected from any amino acid residue. In some embodiments, the modified capsid protein comprises the targeting peptide having a sequence of X₁X₂X₃X₄X₅X₆X₇X₈X₉ at a site within variable region VIII (VR VIII), wherein the targeting peptide is inserted between S586 and A589 of an AAV9 capsid protein, thereby replacing A587 and Q588 of the AAV9 capsid protein. In some embodiments,
[0233] (i) X₁ is independently selected from a proline (P) and a glycine (G);
[0234] (ii) X₂ is independently selected from a lysine (L), a threonine (T), a serine (S), an alanine (A), a valine (V), and an isoleucine (I);
[0235] (iii) X₃ is independently selected from an asparagine (N), a glutamine (Q), and a proline (P);
[0236] (iv) X₄ is independently selected from a glycine (G) and an alanine (A);
[0237] (v) X₅ is independently selected from an alanine (A), a threonine (T), a serine (S), a valine (V), and a glycine (G);
[0238] (vi) X₆ is independently selected from a valine (V), a leucine (L), an alanine (A), an isoleucine (I), a glycine (G), a serine (S), and a threonine (T);
[0239] (vii) X₇ is independently selected from a histidine (H), an arginine (R), and a lysine (K);
[0240] (viii) X₈ is independently selected from a leucine (L) and a valine (V); and
[0241] (ix) X₉ is independently selected from a tyrosine (Y), an arginine (R), a histidine (H), a lysine (K), and a phenylalanine (F).

[0242] In some embodiments, the modified AAV capsid protein comprises a targeting peptide having at least 90%, at least 95%, at least 98%, at least 99%, or at least 100% sequence identity to an amino acid sequence selected from SEQ ID NOs.: 620-55819 that is introduced into VRVIII. In some embodiments, the modified AAV capsid protein comprises a targeting peptide where the peptide has a sequence that differs from a comparative peptide by substitution of 0, 1, 2, 3 or 4 residues to an amino acid sequence selected from SEQ ID NOs.: 620-55819 that is introduced into VR VIII.

[0243] In some embodiments, the targeting peptide has a sequence of PX₂X₃GAVX₇LY (SEQ ID NO: 2) and X₂, X₃, and X₇ are independently selected from any amino acid residue. In some embodiments, the modified capsid protein comprises the targeting peptide having the sequence of PX₂X₃GAVX₇LY (SEQ ID NO: 2), wherein insertion of the targeting peptide replaces amino acids residues A587 and Q588. In some embodiments,
[0244] (i) X₂ is independently selected from a lysine (L), an isoleucine (I), a valine (V), and an alanine (A);
[0245] (ii) X₃ is an asparagine (N) or a glutamine (Q); and
[0246] (iii) X₇ is independently selected from a histidine (H), an arginine (R) and a lysine (K).

[0247] In some embodiments, the targeting peptide is selected from:

```
  (SEQ ID NO: 3)
(i) PLQGAVHLY;
  (SEQ ID NO: 4)
(ii) PLQGAVRLY;
  (SEQ ID NO: 5)
(iii) PLQGAVKLY;
  (SEQ ID NO: 6)
(iv) PINGAVHLY;
  (SEQ ID NO: 7)
(v) PVNGAVHLY;
  (SEQ ID NO: 8)
(vi) PANGAVHLY;
or
(SEQ ID NO: 9)
(vii) PLNGAVHLY.
```

[0248] In some embodiments, the targeting peptide is PLNGAVHLY (SEQ ID NO: 9). In some embodiments, the targeting peptide is not PLNGAVHLY (SEQ ID NO: 9).

[0249] In some embodiments, the targeting peptide the targeting peptide has a sequence selected from SEQ ID NOs: 620-55819.

[0250] In some embodiments, the targeting peptide has a sequence of PX₂X₃GX₅X₆X₇LY (SEQ ID NO: 10) and X₂, X₃, X₅, X₆, and X₇ are independently selected from any amino acid residue. In some embodiments, the modified capsid protein comprising the targeting peptide having the sequence of PX₂X₃GX₅X₆X₇LY (SEQ ID NO: 10), wherein insertion of the targeting peptide replaces amino acids residues A587 and Q588. In some embodiments,
[0251] (i) X₂ is independently selected from a leucine (L), a threonine (T), or a serine (S);
[0252] (ii) X₃ is independently selected from an asparagine (N) and a glutamine (Q);
[0253] (iii) X₅ is independently selected from an alanine (A) and a threonine (T);
[0254] (iv) X₆ is independently selected from a valine (V) and a leucine (L); and
[0255] (v) X₇ is independently selected from a histidine (H), an arginine (R), and a lysine (K).

[0256] In some embodiments, the targeting peptide is selected from:

```
  (SEQ ID NO: 11)
(i) PTNGTVRLY;
  (SEQ ID NO: 12)
(ii) PTNGTVHLY;
  (SEQ ID NO: 13)
(iii) PTNGTVKLY;
  (SEQ ID NO: 14)
(iv) PSNGTLRLY;
  (SEQ ID NO: 15)
(v) PSNGTLHLY;
  (SEQ ID NO: 16)
(vi) PSNGTLKLY;
(SEQ ID NO: 17)
(vii) PTNGTLRLY;
  (SEQ ID NO: 18)
(viii) PTNGTLHLY;
or
(SEQ ID NO: 19)
(ix) PTNGTLKLY.
```

[0257] In some embodiments, the targeting peptide has a sequence of PX₂X₃GAVX₇X₈X₉ (SEQ ID NO: 20) and X₂, X₃, X₅, X₆, and X₇ are independently selected from any amino acid residue. In some embodiments, the modified capsid protein comprising the targeting peptide having the sequence of PX₂X₃GAVX₇X₈X₉ (SEQ ID NO: 20), wherein insertion of the targeting peptide replaces amino acids residues A587 and Q588. In some embodiments,
[0258] (i) X₂ is independently selected from a leucine (L), a threonine (T), or a serine (S);
[0259] (ii) X₃ is independently selected from an asparagine (N) and a glutamine (Q);
[0260] (iii) X₇ is independently selected from a histidine (H) and a threonine (T);
[0261] (iv) X₈ is independently selected from a valine (V) and a leucine (L); and
[0262] (v) X₉ is independently selected from a tyrosine (Y) and an arginine (R).

[0263] In some embodiments, the targeting peptide is selected from:

```
  (SEQ ID NO: 21)
(i) PTQGAVTVR;
  (SEQ ID NO: 22)
(ii) PLQGAVTVR;
  (SEQ ID NO: 23)
(iii) PLQGAVHVR;
  (SEQ ID NO: 24)
(iv) PLQGAVHVY;
  (SEQ ID NO: 25)
(v) PSQGAVTLR;
  (SEQ ID NO: 26)
(vi) PLQGAVTLR;
  (SEQ ID NO: 27)
(vii) PLQGAVHLR;
or
(SEQ ID NO: 28)
(viii) PTQGAVTLR.
```

[0264] In some embodiments, the targeting peptide is PLNGSVHLY (SEQ ID NO: 3603).

[0265] In some embodiments, the modified AAV capsid protein comprises a modified AAV9 capsid protein comprising a targeting peptide having the sequence of PLNGSVHLY (SEQ ID NO: 3603) positioned in VR VIII between amino acid residues 586 and 589, replacing amino acids A587 and Q588.

[0266] In some embodiments, the targeting peptide is PLNGTVHLY (SEQ ID NO: 1232).

[0267] In some embodiments, the modified AAV capsid protein comprises a modified AAV9 capsid protein comprising a targeting peptide having the sequence of PLNGTVHLY (SEQ ID NO: 1232) positioned in VR VIII between amino acid residues 586 and 589, replacing amino acids A587 and Q588.

[0268] In some embodiments, the targeting peptide is anyone selected from Appendix B.

[0269] In some embodiments, the targeting peptide does not comprise a sequence of SEQ ID NO: 9.

[0270] In some embodiments, the targeting peptide within VR VIII wherein the targeting peptide has a sequence selected from SEQ ID NO: 160-619. In some embodiments, the targeting peptide is inserted into an AAV9 or Anc80L65 backbone.

[0271] In some embodiments, the modified AAV capsid protein comprises a targeting peptide having at least 90%, at least 95%, at least 98%, at least 99%, or at least 100% sequence identity to the amino acid sequence selected from SEQ ID NOs.: 160-619 that is introduced into the VRVIII. In some embodiments, the modified AAV capsid protein comprises a targeting peptide where the peptide has a sequence that differs from a comparative peptide by substitution of 0, 1, 2, 3 or 4 residues to an amino acid sequence selected from SEQ ID NOs.: 160-619 that is introduced into VR VIII.

[0272] In some embodiments, the modified AAV capsid protein comprises a targeting peptide having a sequence selected from SEQ ID NOs: 518, 396, 393, 186, 368, 493, 179, 217, 614, 475, 523, 411, 443, 192, 403, 266, 416, 579, 619, 589, 247, 367, 263, 410, 615, and 597. In some embodiments, the modified AAV capsid protein comprises a targeting peptide having a sequence selected from SEQ ID NOs: 518, 396, 393, 186, 368, 493, 179, 217, 614, 475, 523, 411, 443, 192, 403, 266 and 416. In some embodiments, the modified AAV capsid protein comprises a targeting peptide having a sequence selected from SEQ ID NOs: 518, 396, 393, 186 and 368. In some embodiments, the modified AAV capsid protein comprises a targeting peptide having a sequence selected from Appendix A.

[0273] In some embodiments, the targeting peptide is the targeting peptide disclosed in US2017/0166926, incorporated by reference in its entirety herein.

[0274] In some embodiments, the targeting peptide is not a targeting peptide disclosed in WO 2020/210655; WO 2021/222831; WO 2021/202651; WO 2021/211753; WO 2021/226167; WO 2021/230987; or WO 2022/040527, incorporated by reference in their entireties herein.

[0275] In some embodiments, the targeting peptide does not have a sequence identified in the variable region VR VIII of a reference AAV capsid protein.

### 6.2.2. Targeting Peptide Site

[0276] A modified AAV capsid protein of the present disclosure comprises a targeting peptide within VR VIII of the reference AAV capsid protein (FIG. 28).

[0277] Preferably, the targeting peptide is at a site exposed to the exterior of the capsid, preferably based on structure predictions and/or experimental data. More preferably, the targeting peptide is at a site exposed to the exterior of the AAV capsid in a manner that does not interfere with the activity of said protein in capsid assembly.

[0278] In some embodiments, the one or more modifications comprises an amino acid insertion, deletion, substitution, or a combination thereof to introduce the targeting peptide into VR VIII of the reference AAV capsid protein.

[0279] In some embodiments, the one or more modifications comprises one or more amino acid deletions within VR VIII. In some embodiments, the one or more amino acid deletions comprise a deletion of one, two, three, four, or five or more amino acid residue immediately adjacent to the N terminal end of the targeting peptide within VR VIII. In some embodiments, the one or more amino acid deletions comprise a deletion of one amino acid residue immediately adjacent to the N terminal end of the targeting peptide within VR VIII. In some embodiments, the one or more amino acid deletions comprise a deletion of two amino acid residue immediately adjacent to the N terminal end of the targeting peptide within VR VIII. In some embodiments, the one or more amino acid deletions comprise a deletion of three amino acid residue immediately adjacent to the N terminal end of the targeting peptide within VR VIII. In some embodiments, the one or more amino acid deletions comprise a deletion of four amino acid residue immediately adjacent to the N terminal end of the targeting peptide within VR VIII.

[0280] In some embodiments, the one or more amino acid deletions comprise a deletion of at least one amino acid residue at a position selected from 584, 585, 586, 587, or 588, or a combination thereof, relative to a reference sequence numbered according to the amino acid sequence of the reference AAV capsid protein. In some embodiments, the one or more amino acid deletions comprise a deletion of an amino acid residue at position 587, relative to a reference sequence numbered according to the amino acid sequence of the reference AAV capsid protein. In some embodiments, the one or more amino acid deletions comprise a deletion of an amino acid residue at position 588, relative to a reference sequence numbered according to the amino acid sequence of the reference AAV capsid protein. In some embodiments, the one or more amino acid deletions comprise a deletion of amino acid residues at positions 587 and 588, relative to a reference sequence numbered according to the amino acid sequence of the reference AAV capsid protein. In some embodiments, the one or more amino acid deletions comprise a deletion of amino acid residues at positions 586, 587 and 588, relative to a reference sequence numbered according to the amino acid sequence of the reference AAV capsid protein. In some embodiments, the one or more amino acid deletions comprise a deletion of amino acid residues at positions 585, 586, 587 and 588, relative to a reference sequence numbered according to the amino acid sequence of the reference AAV capsid protein.

[0281] In some embodiments, the one or more amino acid deletions comprises deletion of one, two, three, four, or five or more amino acid residues immediately adjacent to the C terminal end of the targeting peptide within VR VIII. In some embodiments, the one or more amino acid deletions comprise a deletion of one amino acid residue immediately adjacent to the C terminal end of the targeting peptide within VR VIII. In some embodiments, the one or more amino acid deletions comprise a deletion of two amino acid residue immediately adjacent to the C terminal end of the targeting peptide within VR VIII. In some embodiments, the one or more amino acid deletions comprise a deletion of three amino acid residue immediately adjacent to the C terminal end of the targeting peptide within VR VIII. In some embodiments, the one or more amino acid deletions comprise a deletion of four amino acid residue immediately adjacent to the C terminal end of the targeting peptide within VR VIII.

[0282] In some embodiments, the amino acid deletion comprises deletion of an amino acid residue at position 589, 590, or 591, or a combination thereof, relative to a reference sequence numbered according to the amino acid sequence of the reference AAV capsid protein. In some embodiments, the amino acid deletion comprises deletion of an amino acid residue at position 589, relative to a reference sequence numbered according to the amino acid sequence of the reference AAV capsid protein. In some embodiments, the amino acid deletion comprises deletion of an amino acid residue at position 590, relative to a reference sequence numbered according to the amino acid sequence of the reference AAV capsid protein. In some embodiments, the amino acid deletion comprises deletion of an amino acid residue at position 591, relative to a reference sequence numbered according to the amino acid sequence of the reference AAV capsid protein. In some embodiments, the amino acid deletion comprises deletion of an amino acid residues at positions 589 and 590, relative to a reference sequence numbered according to the amino acid sequence of the reference AAV capsid protein. In some embodiments, the amino acid deletion comprises deletion of an amino acid residues at positions 590 and 591, relative to a reference sequence numbered according to the amino acid sequence of the reference AAV capsid protein. In some embodiments, the amino acid deletion comprises deletion of an amino acid residues at positions 589, 590, and 591, relative to a reference sequence numbered according to the amino acid sequence of the reference AAV capsid protein.

[0283] In some embodiments, the one or more modifications comprises an amino acid insertion to introduce the targeting peptide into VR VIII of the reference AAV capsid protein. In some embodiments, the amino acid insertion comprises insertion of one, two, three, four, or five or more amino acid residues immediately adjacent to C terminal end of the targeting peptide within VR VIII. In some embodiments, the one or more amino acid insertions comprise an insertion of one amino acid residue immediately adjacent to the C terminal end of the targeting peptide within VR VIII. In some embodiments, the one or more amino acid insertions comprise an insertion of two amino acid residue immediately adjacent to the C terminal end of the targeting peptide within VR VIII. In some embodiments, the one or more amino acid insertions comprise an insertion of three amino acid residue immediately adjacent to the C terminal end of the targeting peptide within VR VIII. In some embodiments, the one or more amino acid insertions comprise an insertion of four amino acid residue immediately adjacent to the C terminal end of the targeting peptide within VR VIII. In some embodiments, the one or more amino acid insertions comprise an insertion of five amino acid residue immediately adjacent to the C terminal end of the targeting peptide within VR VIII.

[0284] In some embodiments, the one or more modifications comprises an amino acid insertion to introduce the targeting peptide into VR VIII of the reference AAV capsid protein. In some embodiments, the amino acid insertion comprises insertion of one, two, three, four, or five or more amino acid residues immediately adjacent to N terminal end of the targeting peptide within VR VIII. In some embodiments, the one or more amino acid insertions comprise an insertion of one amino acid residue immediately adjacent to the N terminal end of the targeting peptide within VR VIII. In some embodiments, the one or more amino acid insertions comprise an insertion of two amino acid residue immediately adjacent to the N terminal end of the targeting peptide within VR VIII. In some embodiments, the one or more amino acid insertions comprise an insertion of three amino acid residue immediately adjacent to the N terminal end of the targeting peptide within VR VIII. In some embodiments, the one or more amino acid insertions comprise an insertion of four amino acid residue immediately adjacent to the N terminal end of the targeting peptide within VR VIII. In some embodiments, the one or more amino acid insertions comprise an insertion of five amino acid residue immediately adjacent to the N terminal end of the targeting peptide within VR VIII.

[0285] In some embodiments, the inserted amino acid residue is independently selected from any amino acid residue. In some embodiments where VR VIII comprises an insertion and a deletion relative to the amino acid sequence of the reference AAV capsid protein, the inserted amino acid residue(s) is identical to the amino acid residue deleted adjacent to the N terminal end or C terminal end of the targeting peptide within VR VIII. In some embodiments, the inserted amino acid residue is an alanine (A) or an asparagine (N). In some embodiments, the inserted amino acid residue is an alanine (A). In some embodiments, the inserted amino acid residue is or an asparagine (N). In some embodiments, the inserted amino acids are an alanine (A) at the position immediately adjacent to the C terminal end of the targeting peptide and an asparagine (N) at the next subsequent position, thereby having an amino acid sequence of AN immediately adjacent to the C terminal end of the targeting peptide.

[0286] In some embodiments where the modified capsid protein includes an amino acid insertion in VR VIII, the targeting peptide comprises: (i) PLNGAVHLYN (SEQ ID NO: 32); or (ii) PLNGAVHLYAN (SEQ ID NO: 33).

[0287] In some embodiments, the one or more modifications comprises an amino acid insertion, an amino acid deletion and/or an amino acid substitution to introduce the targeting peptide into VR VIII of the reference AAV capsid protein. In one embodiment, a modified capsid protein includes insertion of two amino acid residues immediately adjacent to the C-terminal end of the targeting peptide and a deletion of four amino acid residues immediately adjacent to the N-terminal end of the targeting peptide. In another embodiment, a modified capsid protein includes insertion of one amino acid residue immediately adjacent to the C-terminal end of the targeting peptide and a deletion of three amino acid residues immediately adjacent to the N-terminal end of the targeting peptide. In yet another embodiment, a modified capsid protein includes insertion of two amino acid residues immediately adjacent to the C-terminal end of the targeting peptide and a deletion of two amino acid residues immediately adjacent to the N-terminal end of the targeting peptide. In yet another embodiment, a modified capsid protein includes no insertion of amino acid residues immediately adjacent to the C-terminal end of the targeting peptide and a deletion of one amino acid residues immediately adjacent to the N-terminal end of the targeting peptide.

[0288] In some embodiments, insertion sites for the targeting peptides are provided in FIGS. 29A-29C and FIGS. 30AE-30D. In some embodiments, insertions sites for the targeting peptides are provided in FIG. 29B. In some embodiments, the insertion sites for the targeting peptides are provided in FIG. 30C.

[0289] In some embodiments, insertion sites for the targeting peptides are provided in Table 1. In Table 1, the preferred sites are indicated by a “-” relative to wild type VP₁ capsid polypeptide. In some embodiments, Table 1 includes exemplary insertion sites for targeting peptides selected from SEQ ID NO: 620-55819. In some embodiments, Table 1 includes exemplary insertion sites for targeting peptides selected from SEQ ID NO: 160-619.

TABLE 1
Exemplary insertion sites

| | Insertion sites 1 | | Insertion sites 2 | | Insertion sites 3 | |
|---|---|---|---|---|---|---|
| AAV1 | D590 | STD- | S588 | SSS- | S586 | S[ ][ ]-T |
| | P591 | PAT | T589 | TDP | T589 | |
| AAV2 | R588 | GNR- | N587 | RGN- | R585 | R[ ][ ]-R |
| | Q589 | QAA | R588 | RQA | R588 | |
| AAV3b | S586 | LQS- | N588 | SSN- | S586 | S[ ][ ]-T |
| | S587 | SNT | T589 | TAP | T589 | |
| AAV4 | S584 | DQS- | S586 | SNS- | D582 | D[ ][ ]-N |
| | N585 | NSN | N587 | NLP | N585 | |
| AAV5 | S575 | NQS- | T577 | SST- | S575 | S[ ][ ]-T |
| | S576 | STT | T578 | TAP | T578 | |
| AAV6 | D590 | STD- | S588 | SSS- | S586 | S[ ][ ]-T |
| | P591 | PAT | T589 | TDP | T589 | |
| AAV7 | N589 | AAN- | | | A587 | A[ ][ ]-T |
| | T590 | TAA | | | T590 | |
| AAV8 | N590 | QQN- | | | Q588 | Q[ ][ ]-T |
| | T591 | TAP | | | T591 | |
| AAV9 | Q588 | SAQ- | | | S586 | S[ ][ ]-A |
| | A589 | AQA | | | A589 | |
| AAVrh10 | N590 | QQN- | | | Q588 | Q[ ][ ]-A |
| | A591 | AAP | | | A591 | |
| AAVpo.1 | N567 | NON- | N569 | NSN- | N565 | N[ ][ ]-S |
| | S568 | SNT | T570 | THP | S568 | |
| AAV12 | N592 | NQN- | T594 | NAT- | N590 | N[ ][ ]-A |
| | A593 | ATT | T595 | TAP | A593 | |
| Anc80 | N588 | QSXN-T | | | S586 | S[ ][ ]-T |
| | T589 | | | | T589 | |
| Anc80L65 | N588 | QSAN-T | | | S586 | S[ ][ ]-T |
| | T589 | | | | T589 | |
| Anc80-55 | N588 | QSSN-T | | | S586 | S[ ][ ]-T |
| | T589 | | | | T589 | |
| Anc80-129 | N588 | QSAN-T | | | S586 | S[ ][ ]-T |
| | T589 | | | | T589 | |
| Anc80-156 | N588 | QSAN-T | | | S586 | S[ ][ ]-T |
| | T589 | | | | T589 | |
| Anc80-751 | N588 | QSAN-T | | | S586 | S[ ][ ]-T |
| | T589 | | | | T589 | |
| Anc80-1029 | N588 | QSAN-T | | | S586 | S[ ][ ]-T |
| | T589 | | | | T589 | |
| Anc80-1712 | N588 | QSAN-T | | | S586 | S[ ][ ]-T |
| | T589 | | | | T589 | |

[0290] Three exemplary insertion sites are indicated in Table 1. For insertion sites 1 and 2, the targeting peptide is inserted between 2 amino acid positions, where the insertion site is denoted as “-”. For example, for AAV1 capsid protein insertion site 1, the targeting peptide is inserted between positions D590 and P591. In some embodiments, the AAV capsid protein is modified by way of mutation or substitution of one or more amino acids, followed by insertion of the targeting peptide. For example, for insertion site 3 of Table 1, two amino acids are deleted prior to insertion of the targeting peptide. In such cases, “[ ]” represents a deleted amino acid residue/position. For example, for AAV9 capsid protein insertion site 3, the targeting peptide is inserted between position S586 and A589 after the amino acids “AQ” positioned between A586 and A589 (A587 and Q588) are deleted, denoted as “S[ ][ ]-A”.

[0291] In some embodiments, the targeting peptide is at between 560 and 610 within the VR VIII of the modified AAV capsid protein. In some embodiments, the targeting peptide is at between 565 and 605 within the VR VIII of the modified AAV capsid protein. In some embodiments, the targeting peptide is at between 570 and 600 within the VR VIII of the modified AAV capsid protein. In some embodiments, the targeting peptide is at between 575 and 595 within the VR VIII of the modified AAV capsid protein. In some embodiments, the targeting peptide is at between 580 and 590 within the VR VIII of the modified AAV capsid protein.

[0292] In some embodiments, the reference AAV capsid protein is a capsid protein of AAV1 or a modification thereof and the targeting peptide is between D590 and P591 or between S588 and T589 of the modified AAV capsid protein. In some embodiments, the reference AAV capsid protein is a capsid protein of AAV1 or a modification thereof and the targeting peptide is between positions 587 and 594 or between positions 585 and 592 of the modified AAV capsid protein. In some embodiments, the reference AAV capsid protein is a capsid protein of AAV1 or a modification thereof and the targeting peptide is between S586 and T589 of the reference AAV capsid protein and amino acid residues S587 and S588 are deleted.

[0293] In some embodiments, the reference AAV capsid protein is a capsid protein of AAV2 or a modification thereof and the targeting peptide is between R585 and Q589 or between N587 and R588 of the modified AAV capsid protein. In some embodiments, the reference AAV capsid protein is a capsid protein of AAV2 or a modification thereof and the targeting peptide is between positions 582 and 592 or between positions 585 and 591 of the modified AAV capsid protein. In some embodiments, the reference AAV capsid protein is a capsid protein of AAV2 or a modification thereof and the targeting peptide is between R585 and R588 thereby replacing amino acid residues G586 and N587.

[0294] In some embodiments, the reference AAV capsid protein is a capsid protein of AAV3 or a modification thereof and the targeting peptide is between S586 and S587 or between N588 and T589 of the modified AAV capsid protein. In some embodiments, the reference AAV capsid protein is a capsid protein of AAV3 or a modification thereof and the targeting peptide is between positions 583 and 590 or between positions 585 and 592 of the modified AAV capsid protein. In some embodiments, the reference AAV capsid protein is a capsid protein of AAV3 or a modification thereof and the targeting peptide is between S586 and T589 of the reference AAV capsid protein, thereby replacing amino acid residues S587 and N588.

[0295] In some embodiments, the reference AAV capsid protein is a capsid protein of AAV4 and the targeting peptide is between S584 and N585 or between S586 and N587 of the modified AAV capsid protein. In some embodiments, the reference AAV capsid protein is a capsid protein of AAV4 or a modification thereof and the targeting peptide is between positions 581 and 586 or between positions 583 and 590 of the modified AAV capsid protein. In some embodiments, the reference AAV capsid protein is a capsid protein of AAV4 or a modification thereof and the targeting peptide is between D582 and N585 of the reference AAV capsid protein, thereby replacing amino acid residues Q583 and S584.

[0296] In some embodiments, the reference AAV capsid protein is a capsid protein of AAV5 or a modification thereof and the targeting peptide is between S575 and S576 or between T577 and T578 of the capsid protein. In some embodiments, the reference AAV capsid protein is a capsid protein of AAV5 or a modification thereof and the targeting peptide is between positions 572 and 579 or between positions 574 and 581 of the capsid protein. In some embodiments, the reference AAV capsid protein is a capsid protein of AAV5 and the targeting peptide is between S575 and T578 of the reference AAV capsid protein, thereby replacing S576 and S577.

[0297] In some embodiments, the reference AAV capsid protein is a capsid protein of AAV6 or a modification thereof and the targeting peptide is between D590 and P591 or S588 and T589 of the modified AAV capsid protein. In some embodiments, the reference AAV capsid protein is a capsid protein of AAV6 or a modification thereof and the targeting peptide is between positions 587 and 594 or positions 585 and 592 of the modified AAV capsid protein. In some embodiments, the reference AAV capsid protein is a capsid protein of AAV6 or a modification thereof and the targeting peptide is between S586 and T589 of the reference AAV capsid protein, thereby replacing amino acid residues S587 and S588.

[0298] In some embodiments, the reference AAV capsid protein is a capsid protein of AAV7 or a modification thereof and the targeting peptide is between N589 and T590 of the modified AAV capsid protein. In some embodiments, the reference AAV capsid protein is a capsid protein of AAV7 or a modification thereof and the targeting peptide is between positions 586 and 593 of the modified AAV capsid protein. In some embodiments, the reference AAV capsid protein is a capsid protein of AAV7 or a modification thereof and the targeting peptide is between A587 and T590 of the reference AAV capsid protein, thereby replacing amino acid residues A588 and N589.

[0299] In some embodiments, the reference AAV capsid protein is a capsid protein of AAV8 and the targeting peptide is between N590 and T591 of the modified AAV capsid protein. In some embodiments, the reference AAV capsid protein is a capsid protein of AAV8 or a modification thereof and the targeting peptide is between positions 587 and 594 of the modified AAV capsid protein. In some embodiments, the reference AAV capsid protein is a capsid protein of AAV8 or a modification thereof and the targeting peptide is between Q588 and T591 of the modified AAV capsid protein, thereby replacing amino acid residues Q589 and N590.

[0300] In some embodiments, the reference AAV capsid protein is a capsid protein of AAV9 and the targeting peptide is between Q588 and A589 of the modified AAV capsid protein. In some embodiments, the reference AAV capsid protein is a capsid protein of AAV9 or a modification thereof and the targeting peptide is between positions 585 and 592 of the modified AAV capsid protein. In some embodiments, the reference AAV capsid protein is a capsid protein of AAV9 or a modification thereof and the targeting peptide is between S586 and A589 of the reference AAV capsid protein, thereby replacing amino acid residues A587 and Q588.

[0301] In some embodiments, the reference AAV capsid protein is a capsid protein of AAVrh10 or a modification thereof and the targeting peptide is between N590 and A591 of the modified AAV capsid protein. In some embodiments, the reference AAV capsid protein is a capsid protein of AAVrh10 or a modification thereof and the targeting peptide is between positions 587 and 594 of the modified AAV capsid protein. In some embodiments, the reference AAV capsid protein is a capsid protein of AAVrh10 or a modification thereof and the targeting peptide is between Q588 and A591 of the reference AAV capsid protein, thereby replacing amino acid residues Q589 and N590.

[0302] In some embodiments, the reference AAV capsid protein is a capsid protein of AAVpo.1 or a modification thereof and the targeting peptide is between N567 and S568 or between N569 and T570 of the modified AAV capsid protein. In some embodiments, the reference AAV capsid protein is a capsid protein of AAVpo.1 or a modification thereof and the targeting peptide is between positions 570 and 571 or between positions 566 and 573 of the modified AAV capsid protein. In some embodiments, the reference AAV capsid protein is a capsid protein of AAVpo.1 or a modification thereof and the targeting peptide is between N565 and S568 of the reference AAV capsid protein, thereby replacing amino acid residues Q566 and N567.

[0303] In some embodiments, the reference AAV capsid protein is a capsid protein of AAV12 or a modification thereof and the targeting peptide is between N592 and A593 or between T594 and T595 of the modified AAV capsid protein. In some embodiments, the reference AAV capsid protein is a capsid protein of AAV12 or a modification thereof and the targeting peptide is between positions 589 and 596 or between positions 591 and 598 of the modified AAV capsid protein. In some embodiments, the reference AAV capsid protein is a capsid protein of AAV12 or a modification thereof and the targeting peptide is between N590 and A593 of the reference AAV capsid protein, thereby replacing amino acid residues Q591 and N592.

[0304] In some embodiments, the reference AAV capsid protein is a capsid protein of Anc80 or a modification thereof and the targeting peptide is between T589 and A590, between N588 and T589, or between S587 and N588 of the modified AAV capsid protein. In some embodiments, the reference AAV capsid protein is a capsid protein of Anc80 or a modification thereof and the targeting peptide is between positions 586 and 593 or between positions 584 and 591 of the modified AAV capsid protein. In some embodiments, the reference AAV capsid protein is a capsid protein of Anc80 or a modification thereof and the targeting peptide is between S586 and T589 of the reference AAV capsid protein, thereby replacing amino acid residues S587 and N588.

[0305] In some embodiments, the reference AAV capsid protein is a capsid protein of Anc80L65 or a modification thereof and the targeting peptide is between T589 and A590, between N588 and T589 or between A587 and N588 of the modified AAV capsid protein. In some embodiments, the reference AAV capsid protein is a capsid protein of Anc80L65 or a modification thereof and the targeting peptide is between positions 586 and 593 or between positions 584 and 591 of the modified AAV capsid protein.

[0306] In some embodiments, the reference capsid protein is a capsid protein of Anc80L65 or a modification thereof and the targeting peptide is (i) between S586 and T589 of an Anc80L65 capsid protein, thereby replacing A587 and N588 of the Anc80L65 capsid protein; (ii) between Q585 and N588 of an Anc80L65 capsid protein, thereby replacing S586 and A587 of the Anc80L65 capsid protein; (iii) between L584 and A587 of an Anc80L65 capsid protein, thereby replacing Q585 and S586 of the Anc80L65 capsid protein; (iv) between A587 and A590 of an Anc80L65 capsid protein, thereby replacing N588 and T589 of the Anc80L65 capsid protein; or (v) between S586 and A587 of an Anc80L65 capsid protein.

[0307] In some embodiments, the reference AAV capsid protein is a capsid protein of Anc80-55 or a modification thereof and the targeting peptide is between T589 and A590 or between S587 and N588 of the modified AAV capsid protein. In some embodiments, the reference AAV capsid protein is a capsid protein of Anc80-55 or a modification thereof and the targeting peptide is between positions 586 and 593 or between positions 584 and 591 of the modified AAV capsid protein. In some embodiments, the reference AAV capsid protein is a capsid protein of Anc80-55 or a modification thereof and the targeting peptide is between S586 and T589 of the reference AAV capsid protein, thereby replacing amino acid residues S587 and N588.

[0308] In some embodiments, the reference AAV capsid protein is a capsid protein of Anc80-129 or a modification thereof and the targeting peptide is between T589 and A590 or between A587 and N588 of the modified AAV capsid protein. In some embodiments, the reference AAV capsid protein is a capsid protein of Anc80-129 or a modification thereof and the targeting peptide is between positions 586 and 593 or between positions 584 and 591 of the modified AAV capsid protein. In some embodiments, the reference AAV capsid protein is a capsid protein of Anc80-129 or a modification thereof and the targeting peptide is between S586 and T589 of the reference AAV capsid protein, thereby replacing amino acid residues A587 and N588.

[0309] In some embodiments, the reference AAV capsid protein is a capsid protein of Anc80-156 or a modification thereof and the targeting peptide is between T589 and A590 or between A587 and N588 of the modified AAV capsid protein. In some embodiments, the reference AAV capsid protein is a capsid protein of Anc80-156 or a modification thereof and the targeting peptide is between positions 586 and 593 or between positions 584 and 591 of the modified AAV capsid protein. In some embodiments, the reference AAV capsid protein is a capsid protein of Anc80-156 or a modification thereof and the targeting peptide is between S586 and T589 of the reference AAV capsid protein, thereby replacing amino acid residues A587 and N588.

[0310] In some embodiments, the reference AAV capsid protein is a capsid protein of Anc80-751 or a modification thereof and the targeting peptide is between T589 and A590 or between A587 and N588 of the modified AAV capsid protein. In some embodiments, the reference AAV capsid protein is a capsid protein of Anc80-751 or a modification thereof and the targeting peptide is between positions 586 and 593 or between positions 584 and 591 of the modified AAV capsid protein. In some embodiments, the reference AAV capsid protein is a capsid protein of Anc80-751 or a modification thereof and the targeting peptide is between S586 and T589 of the reference AAV capsid protein, thereby replacing amino acid residues A587 and N588.

[0311] In some embodiments, the reference AAV capsid protein is a capsid protein of Anc80-1029 or a modification thereof and the targeting peptide is between T589 and A590 or between A587 and N588 of the modified AAV capsid protein. In some embodiments, the reference AAV capsid protein is a capsid protein of Anc80-1029 or a modification thereof and the targeting peptide is between positions 586 and 593 or between positions 584 and 591 of the modified AAV capsid protein. In some embodiments, the reference AAV capsid protein is a capsid protein of Anc80-1029 or a modification thereof and the targeting peptide is between S586 and T589 of the reference AAV capsid protein, thereby replacing amino acid residues A587 and N588.

[0312] In some embodiments, the reference AAV capsid protein is a capsid protein of Anc80-1712 or a modification thereof and the targeting peptide is between T589 and A590 or between A587 and T588 of the modified AAV capsid protein. In some embodiments, the reference AAV capsid protein is a capsid protein of Anc80-1712 or a modification thereof and the targeting peptide is between positions 586 and 593 or between positions 584 and 591 of the modified AAV capsid protein. In some embodiments, the reference AAV capsid protein is a capsid protein of Anc80-1712 or a modification thereof and the targeting peptide is between S586 and T589 of the reference AAV capsid protein, thereby replacing amino acid residues A587 and N588.

### 6.2.3. Modified AAV Capsid Proteins Having Flanking Regions

[0313] In some embodiments, the modified AAV capsid protein further comprises a N-terminal flanking region on the N-terminal end of the targeting peptide, a C-terminal flanking region on the C-terminal end of the targeting peptide, or both.

[0314] In some embodiments, the N-terminal flanking region comprises 1, 2, 3, 4, 5, 6, 7, 8, 9, 10, 11, 12, 13, 14, 15, 16, 17, 18, 19, 20, 21, 22, 23, 24, 25, 26, 27, 28, 29, 30, or more, amino acid residues. In a non-limiting example, the N-terminal flanking region comprises 11 amino acids, where the amino acids are selected from amino acid residues 578-588 of AAV9, 577-587 of AAV9, or 576-586 of AAV9.

[0315] In some embodiments, the N-terminal flanking region comprises at least four (e.g., at least five, at least six, at least seven, at least eight, at least nine, or at least ten) consecutive amino acid residues from amino acid 558-589 (e.g., 558-588, 558-587, 558-586, and 558-585) of the reference AAV capsid protein, wherein the amino acid residues are numbered according to the amino acid sequence of the reference AAV capsid protein. In some embodiments, the N-terminal flanking region comprises a sequence having 1, 2, 3, 4, 5, 6, 7, 8, 9, 10, 11, 12, 13, 14, 15, 16, 17, 18, 19, 20, 21, 22, 23, 24, 25, 26, 27, 28, 29, 30 or more amino acid residues different (e.g., insertion, deletion, or substitution) from amino acids of 558-589 of the reference AAV capsid protein, wherein the amino acid residues are numbered according to the amino acid sequence of the reference AAV capsid protein.

[0316] In some embodiments, the N-terminal flanking region comprises at least four (e.g., at least five, at least six, at least seven, at least eight, at least nine, or at least ten) consecutive amino acid residues from amino acids 576-585 of the reference AAV capsid protein, wherein the amino acid residues are numbered according to the amino acid sequence of the reference AAV capsid protein. In some embodiments, the N-terminal flanking region comprises at least four (e.g., at least five, at least six, at least seven, at least eight, at least nine, or at least ten) consecutive amino acid residues from amino acids 576-586 of the reference AAV capsid protein, wherein the amino acid residues are numbered according to the amino acid sequence of the reference AAV capsid protein. In some embodiments, the N-terminal flanking region comprises at least four (e.g., at least five, at least six, at least seven, at least eight, at least nine, or at least ten) consecutive amino acid residues from amino acids 576-587 of the reference AAV capsid protein, wherein the amino acid residues are numbered according to the amino acid sequence of the reference AAV capsid protein. In some embodiments, the N-terminal flanking region comprises at least four (e.g., at least five, at least six, at least seven, at least eight, at least nine, or at least ten) consecutive amino acid residues from amino acids of the reference AAV capsid protein, wherein the amino acid residues are numbered according to the amino acid sequence of the reference AAV capsid protein. In some embodiments, the N-terminal flanking region comprises at least four (e.g., at least five, at least six, at least seven, at least eight, at least nine, or at least ten) consecutive amino acid residues from amino acids 576-589 of the reference AAV capsid protein, wherein the amino acid residues are numbered according to the amino acid sequence of the reference AAV capsid protein.

[0317] In some embodiments, the N-terminal flanking region has the sequence of B₁YGB₂VATNB₃QS (SEQ ID NO: 55849), and B₁, B₂, and B₃ are each independently selected from any amino acid residue. In some embodiments, the N-terminal flanking region has the sequence of B₁YGB₂VATNB₃QS (SEQ ID NO: 55849) where B₁ is selected from a glutamate (E) or a serine (S), B₂ is selected from a threonine (T) or a glutamine (Q), and B₃ is selected from a leucine (L) or a histidine (H).

[0318] In some embodiments, the N-terminal flanking region has the sequence of SYGQVATNHQS (SEQ ID NO: 55848). In some embodiments, the N-terminal flanking region comprises a sequence having 1, 2, 3, 4, 5, or more amino acid residues different (e.g., insertion, deletion, or substitution) to the sequence of SYGQVATNHQS (SEQ ID NO: 55848).

[0319] In some embodiments, the N-terminal flanking region replaces N-terminal reference sequence of the reference AAV capsid protein, wherein the N-terminal reference sequence has at least 60% (e.g., at least 70%, at least 80%, at least 90% or at least 95%) sequence identity to the N-terminal flanking region and positioned at N-terminal end of an insertion site of the targeting peptide within the reference AAV capsid protein. The modified AAV capsid protein of claim 34, wherein the N-terminal reference sequence has the sequence of B₁YGB₂VATNB₃QS (SEQ ID NO: 55849).

[0320] In some embodiments, the modified AAV capsid protein further comprises a C-terminal flanking region on the C-terminal end of the targeting peptide.

[0321] In some embodiments, the C-terminal flanking region has 1, 2, 3, 4, 5, 6, 7, 8, 9, 10, 11, 12, 13, 14, 15, 16, 17, 18, 19, 20, 21, 22, 23, 24, 25, 26, 27, 28, 29, 30, or more, amino acid residues. In a non-limiting example, the C-terminal flanking region comprises 13 amino acids, where the amino acids are selected from amino acid residues 589-602 of AAV9, 588-601 of AAV9, or 587-602 of AAV9.

[0322] In some embodiments, the C-terminal flanking region comprises at least four (e.g., at least five, at least six, at least seven, at least eight, at least nine, or at least ten) consecutive amino acid residues from amino acids 589-635 of the reference AAV capsid protein, wherein the amino acid residues are numbered according to the amino acid sequence of the reference AAV capsid protein. In some embodiments, the C-terminal flanking region comprises a sequence having 1, 2, 3, 4, 5, 6, 7, 8, 9, 10, 11, 12, 13, 14, 15, 16, 17, 18, 19, 20, 21, 22, 23, 24, 25, 26, 27, 28, 29, 30 or more amino acid residues different (e.g., insertion, deletion, or substitution) from amino acid residues of 589-635, where residues 589-635 relative to a reference sequence numbered according to the amino acid sequence of the reference AAV capsid protein.

[0323] In some embodiments, the C-terminal flanking region comprises at least four (e.g., at least five, at least six, at least seven, at least eight, at least nine, or at least ten) consecutive amino acid residues from amino acids 589-601 of the reference AAV capsid protein, wherein the amino acid residues are numbered according to the amino acid sequence of the reference AAV capsid protein. In some embodiments, the C-terminal flanking region comprises at least four (e.g., at least five, at least six, at least seven, at least eight, at least nine, or at least ten) consecutive amino acid residues from amino acids 590-601 of the reference AAV capsid protein, wherein the amino acid residues are numbered according to the amino acid sequence of the reference AAV capsid protein. In some embodiments, the C-terminal flanking region comprises at least four (e.g., at least five, at least six, at least seven, at least eight, at least nine, or at least ten) consecutive amino acid residues from amino acids 591-601 of the reference AAV capsid protein, wherein the amino acid residues are numbered according to the amino acid sequence of the reference AAV capsid protein.

[0324] In some embodiments, the C-terminal flanking region has the sequence of AQAQTGZ₁VZ₂Z₃QGZ₄ (SEQ ID NO: 55851), where Z₁, Z₂, Z₃, and Z₄ are each independently selected from any amino acid residue. In some embodiments, the C-terminal flanking region has the sequence of AQAQTGZ₁VZ₂Z₃QGZ₄ (SEQ ID NO: 55861), where wherein Z₁ is selected from a threonine (T) or a tryptophan (W), Z₂ is selected from an asparagine (N) or a glutamine (Q), Z₃ is selected from a serine (S) or an asparagine (N), and Z₄ is selected from an alanine (A) or an isoleucine (I).

[0325] In some embodiments, the C-terminal flanking region has the sequence of AQAQTGWVQNQGI (SEQ ID NO: 55850). In some embodiments, the C-terminal flanking region comprises a sequence having 1, 2, 3, 4, 5, or more amino acid residues different (e.g., insertion, deletion, or substitution) to the sequence of AQAQTGWVQNQGI (SEQ ID NO: 55850).

[0326] In some embodiments, the C-terminal flanking region replaces C-terminal reference sequence of the reference AAV capsid protein, wherein the C-terminal reference sequence has at least 60% (e.g., at least 70%, at least 80%, at least 90% or at least 95%) sequence identity to the C-terminal flanking region and positioned at C-terminal end of an insertion site of the targeting peptide within the reference AAV capsid protein. In some embodiments, the C-terminal reference sequence has the sequence of AQAQTGZ₁VZ₂Z₃QGZ₄ (SEQ ID NO: 55851).

[0327] In some embodiments, the modified AAV capsid protein further comprises a N-terminal flanking region having the sequence of B₁YGB₂VATNB₃QS (SEQ ID NO: 55849, where B₁, B₂, and B₃ are each independently selected from any amino acid residue; and a C-terminal flanking region having the sequence of AQAQTGZ₁VZ₂Z₃QGZ₄ (SEQ ID NO: 55851), where Z₁, Z₂, Z₃, and Z₄ are each independently selected from any amino acid residues.

[0328] In some embodiments, the modified AAV capsid protein further comprises a N-terminal flanking region having the sequence of B₁YGB₂VATNB₃QS (SEQ ID NO: 55860) and B₁ is selected from a glutamate (E) or a serine (S), B₂ is selected from a threonine (T) or a glutamine (Q), and B₃ is selected from a leucine (L) or a histidine (H); and a C-terminal flanking region having the sequence of AQAQTGZ₁VZ₂Z₃QGZ₄ (SEQ ID NO: 55861) and Z₁ is selected from a threonine (T) or a tryptophan (W), Z₂ is selected from an asparagine (N) or a glutamine (Q), Z₃ is selected from a serine (S) or an asparagine (N), and Z₄ is selected from an alanine (A) or an isoleucine (I).

[0329] In one embodiment, the modified AAV capsid protein further comprises a N-terminal flanking region having the sequence of SYGQVATNHQS (SEQ ID NO: 55848), and a C-terminal flanking region having the sequence of AQAQTGWVQNQGI (SEQ ID NO: 55850).

[0330] In some embodiments, the modified AAV capsid protein further comprises an amino acid sequence of B₁YGB₂VATNB₃QSPLMGAVHLYAQAQTGZ₁VZ₂Z₃QGZ₄ (SEQ ID NO: 55852), where B₁, B₂, B₃, Z₁, Z₂, Z₃, and Z₄ are each independently selected from any amino acid residue. In some embodiments, the modified AAV capsid protein further comprises an amino acid sequence of B₁YGB₂VATNB₃QSPLMGAVHLYAQAQTGZ₁VZ₂Z₃QGZ₄ (SEQ ID NO: 55862), where B₁ is selected from a glutamate (E) or a serine (S), B₂ is selected from a threonine (T) or a glutamine (Q), B₃ is selected from a leucine (L) or a histidine (H), Z₁ is selected from a threonine (T) or a tryptophan (W), Z₂ is selected from an asparagine (N) or a glutamine (Q), Z₃ is selected from a serine (S) or an asparagine (N), and Z₄ is selected from an alanine (A) or an isoleucine (I)..

[0331] In one embodiments, the targeting peptide in VR VIII is SEQ ID NO: 29. In some embodiments, the targeting peptide is SEQ ID NO: 29, wherein upon insertion in VR VIII one or more residues are replaced by the insertion.

[0332] In some embodiments, the targeting peptide is a peptide having at least 90% (e.g., 92%, 94%, 96%, or 98%) sequence identity to the sequence of SEQ ID NO: 29. In some embodiments, the targeting peptide is a peptide having 1, 2, 3, 4, 5, 6, 7, 8, 9, 10, or more amino acid residues different (e.g., insertion, deletion, or substitution) to a sequence of SEQ ID NO: 29.

### 6.2.4. Additional Modifications in Modified AAV Capsid Protein

[0333] In some embodiments, the modified AAV capsid protein has one or more modifications comprising amino acid insertions, deletions, substitutions or combinations thereof as compared to a reference AAV capsid protein.

[0334] In some embodiments, the one or more modifications comprises an amino acid insertion, deletion, substitution, or a combination thereof to introduce the targeting peptide into VR VIII of the reference AAV capsid protein.

[0335] In some embodiments, the one or more modifications comprises an amino acid modification outside of VR VIII of the reference AAV capsid protein.

[0336] In some embodiments, the one or more modifications outside of VR VIII of the reference AAV capsid protein comprise one or more modifications in VR I, VR II, VR III, VR IV, VR V, VR VI, or VR VII.

[0337] In some embodiments, variable region I (VR I) corresponds to sequences between about position 259 to about position 275 in the AAV capsid protein (e.g., reference capsid or modified capsid). In some embodiments, VR I corresponds to sequence between about position 262 to about position 272 in the AAV capsid protein (e.g., reference capsid or modified capsid).

[0338] In some embodiments, variable region II (VR II) corresponds to sequences between about position 329 to about position 336 in the AAV capsid protein (e.g., reference capsid or modified capsid). In some embodiments, VR II corresponds to sequence between about position 330 to about position 335 in the AAV capsid protein (e.g., reference capsid or modified capsid).

[0339] In some embodiments, variable region III (VR III) corresponds to sequences between about position 378 to about position 400 in the AAV capsid protein (e.g., reference capsid or modified capsid). In some embodiments, VR III corresponds to sequence between about position 385 to about position 394 in the AAV capsid protein (e.g., reference capsid or modified capsid).

[0340] In some embodiments, variable region IV (VR IV) corresponds to sequences between about position 438 to about position 480 in the AAV capsid protein (e.g., reference capsid or modified capsid). I n some embodiments, VTR IV corresponds to sequence between about position 456 to about position 476 in the AAV capsid protein (e.g., reference capsid or modified capsid). In some embodiments, VR IV corresponds to sequence between about position 449 to about position 468 in the AAV capsid protein (e.g., reference capsid or modified capsid).

[0341] In some embodiments, variable region V (VR V) corresponds to sequences between about position 483 to about position 518 in the AAV capsid protein (e.g., reference capsid or modified capsid). In some embodiments, VR V corresponds to sequence between about position 494 to about position 512 in the AAV capsid protein (e.g., reference capsid or modified capsid). In some embodiments, VR V corresponds to sequence between about position 487 to about position 504 in the AAV capsid protein (e.g., reference capsid or modified capsid).

[0342] In some embodiments, variable region VI (VR VI) corresponds to sequences between about position 531 to about position 549 in the AAV capsid protein (e.g., reference capsid or modified capsid). In some embodiments, VR VI corresponds to sequence between about position 533 to about position 545 in the AAV capsid protein (e.g., reference capsid or modified capsid).

[0343] In some embodiments, variable region VII (VR VII) corresponds to sequences between about position 551 to about position 567 in the AAV capsid protein (e.g., reference capsid or modified capsid). In some embodiments, VR VII corresponds to sequence between about position 553 to about position 563 in the AAV capsid protein (e.g., reference capsid or modified capsid).

[0344] In some embodiments, variable region VIII (VR VIII) corresponds to sequences between about position 570 to about position 605 in the AAV capsid protein (e.g., reference capsid or modified capsid). In some embodiments, variable region VIII (VR VIII) corresponds to sequences between about position 576 to about position 601 in the AAV capsid protein (e.g., reference capsid or modified capsid).). In some embodiments, variable region VIII (VR VIII) corresponds to sequences between about position 576 to about position 608 in the AAV capsid protein (e.g., reference capsid or modified capsid). In some embodiments, variable region VIII (VR VIII) corresponds to sequences between about position 579 to about position 594 in the AAV capsid protein (e.g., reference capsid or modified capsid). In some embodiments, VR VIII corresponds to sequence between about position 585 to about position 591 in the AAV capsid protein (e.g., reference capsid or modified capsid).

[0345] In some embodiments, variable region IX (VR IX) corresponds to sequences between about position 709 to about position 736 in the AAV capsid protein (e.g., reference capsid or modified capsid). In some embodiments, VR IX corresponds to sequence between about position 714 to about position 721 in the AAV capsid protein (e.g., reference capsid or modified capsid).

[0346] In some embodiments, the variable regions in an AAV capsid are as defined in Padron et al., J. Virology, 79(8): 5047-5058 (2005), doi.org/10.1128/JVI.79.8.5047-5058.2005; Dimattia, et al., J. Virology, 86(12): 6947-6958 (2012), doi.org/10.1128/JVI.07232-11; Meyer et al., eLIFE; 8:e44707. DOI: doi.org/10.7554/eLife.44707 (2019); Goertsen et al., Nat Neurosci., 25(1):106-115. doi: 10.1038/s41593-021-00969 (2022), each of which is herein incorporated by reference in its entirety.

[0347] In some embodiments, the variable regions in an AAV capsid are defined by which amino acids are present on surface-exposed loops. In some embodiments, the variable regions in an AAV capsid are defined by which amino acids are present on surface-exposed loops and where the surface-exposed loop contributes to tropism (i.e., contributes to the AAV virion binding to a receptor). In some embodiments, the presence of a targeting peptide in the modified capsid protein may change the amino acid residues present on a surface exposed-loop.

[0348] In some embodiments, the one or more modifications outside of VR VIII of the reference AAV capsid protein comprise one or more modifications in VR IV and VR V.

[0349] In some embodiments, the one or more modifications in VR IV comprises modifications result in introduction of a sequence of SEQ ID NO: 30. In some embodiments, the one or more modifications in VR VI results in introduction of a sequence having at least 90% (e.g., 91%, 92%, 93%, 94%, 95%, 96%, 97%, 98%, 99% or 99.5%) sequence identity to the sequence of SEQ ID NO: 30. In some embodiments, the one or more modifications in VR VI results in introduction of a sequence having 1, 2, 3, 4, 5, 6, 7, 8, 9, 10, or more amino acid residues different (e.g., insertion, deletion, or substitution) to a sequence of SEQ ID NO: 30.

[0350] In some embodiments, the one or more modifications in VR V comprises modifications result in introduction of a sequence of SEQ ID NO: 31. In some embodiments, the one or more modifications in VR VI results in introduction of a sequence having at least 90% (e.g., 91%, 92%, 93%, 94%, 95%, 96%, 97%, 98%, 99% or 99.5%) sequence identity to the sequence of SEQ ID NO: 31. In some embodiments, the one or more modifications in VR VI results in introduction of a sequence having 1, 2, 3, 4, 5, 6, 7, 8, 9, 10, or more amino acid residues different (e.g., insertion, deletion, or substitution) to a sequence of SEQ ID NO: 31.

[0351] In some embodiments, a modified capsid protein has at least 90% (e.g., 91%, 92%, 93%, 94%, 95%, 96%, 97%, 98%, 99% or 99.5%) sequence identity to the sequence of a reference AAV capsid protein (e.g., any of the reference capsid proteins described herein) and comprises a VR I derived from a second reference capsid protein (e.g., any of the reference capsid proteins described herein). In some embodiments, a modified capsid protein has at least 90% (e.g., 91%, 92%, 93%, 94%, 95%, 96%, 97%, 98%, 99% or 99.5%) sequence identity to the sequence of a reference AAV capsid protein (e.g., any of the reference capsid proteins described herein) and comprises a VR II derived from a second reference capsid protein (e.g., any of the reference capsid proteins described herein). In some embodiments, a modified capsid protein has at least 90% (e.g., 91%, 92%, 93%, 94%, 95%, 96%, 97%, 98%, 99% or 99.5%) sequence identity to the sequence of a reference AAV capsid protein (e.g., any of the reference capsid proteins described herein) and comprises a VR III derived from a second reference capsid protein (e.g., any of the reference capsid proteins described herein). In some embodiments, a modified capsid protein has at least 90% (e.g., 91%, 92%, 93%, 94%, 95%, 96%, 97%, 98%, 99% or 99.5%) sequence identity to the sequence of a reference AAV capsid protein (e.g., any of the reference capsid proteins described herein) and comprises a VR IV derived from a second reference capsid protein (e.g., any of the reference capsid proteins described herein). In some embodiments, a modified capsid protein has at least 90% (e.g., 91%, 92%, 93%, 94%, 95%, 96%, 97%, 98%, 99% or 99.5%) sequence identity to the sequence of a reference AAV capsid protein (e.g., any of the reference capsid proteins described herein) and comprises a VR V derived from a second reference capsid protein (e.g., any of the reference capsid proteins described herein). In some embodiments, a modified capsid protein has at least 90% (e.g., 91%, 92%, 93%, 94%, 95%, 96%, 97%, 98%, 99% or 99.5%) sequence identity to the sequence of a reference AAV capsid protein (e.g., any of the reference capsid proteins described herein) and comprises a VR VI derived from a second reference capsid protein (e.g., any of the reference capsid proteins described herein). In some embodiments, a modified capsid protein has at least 90% (e.g., 91%, 92%, 93%, 94%, 95%, 96%, 97%, 98%, 99% or 99.5%) sequence identity to the sequence of a reference AAV capsid protein (e.g., any of the reference capsid proteins described herein) and comprises a VR VII derived from a second reference capsid protein (e.g., any of the reference capsid proteins described herein). In some embodiments, a modified capsid protein has at least 90% (e.g., 91%, 92%, 93%, 94%, 95%, 96%, 97%, 98%, 99% or 99.5%) sequence identity to the sequence of a reference AAV capsid protein (e.g., any of the reference capsid proteins described herein) and comprises a VR VIII derived from a second reference capsid protein (e.g., any of the reference capsid proteins described herein). In some embodiments, a modified capsid protein has at least 90% (e.g., 91%, 92%, 93%, 94%, 95%, 96%, 97%, 98%, 99% or 99.5%) sequence identity to the sequence of a reference AAV capsid protein (e.g., any of the reference capsid proteins described herein) and comprises a VR IX derived from a second reference capsid protein (e.g., any of the reference capsid proteins described herein).

[0352] In some embodiments, a modified capsid protein has at least 90% (e.g., 91%, 92%, 93%, 94%, 95%, 96%, 97%, 98%, 99% or 99.5%) sequence identity to SEQ ID NO: 142 and comprises a VR I derived from AAV9. In some embodiments, a modified capsid protein has at least 90% (e.g., 91%, 92%, 93%, 94%, 95%, 96%, 97%, 98%, 99% or 99.5%) sequence identity to SEQ ID NO: 142 and comprises a VR IV derived from AAV9. In some embodiments, a modified capsid protein has at least 90% (e.g., 91%, 92%, 93%, 94%, 95%, 96%, 97%, 98%, 99% or 99.5%) sequence identity to SEQ ID NO: 142 and comprises a VR V derived from AAV9. In some embodiments, a modified capsid protein has at least 90% (e.g., 91%, 92%, 93%, 94%, 95%, 96%, 97%, 98%, 99% or 99.5%) sequence identity to SEQ ID NO: 142 and comprises a VR VIII derived from AAV9.

[0353] In some embodiments, a modified capsid protein has at least 90% (e.g., 91%, 92%, 93%, 94%, 95%, 96%, 97%, 98%, 99% or 99.5%) sequence identity to the sequence of a reference AAV capsid protein (e.g., any of the reference capsid proteins described herein) and comprises two or more variable regions (VR I, II, III, IV, V, VI, VII, VIII, or IX) derived from a second reference capsid protein (e.g., any of the reference capsid proteins described herein). In some embodiments, a modified capsid protein has at least 90% (e.g., 91%, 92%, 93%, 94%, 95%, 96%, 97%, 98%, 99% or 99.5%) sequence identity to the sequence of a reference AAV capsid protein (e.g., any of the reference capsid proteins described herein), and comprises a VR IV derived from a second reference capsid protein (e.g., any of the reference capsid proteins described herein), and a VR V derived from a second reference capsid protein (e.g., any of the reference capsid proteins described herein). In one embodiment, a modified capsid protein has at least 90% (e.g., 91%, 92%, 93%, 94%, 95%, 96%, 97%, 98%, 99% or 99.5%) sequence identity to SEQ ID NO: 142, and comprises a VR IV derived from AAV9, and a VR V derived from AAV9.

[0354] A modified AAV capsid protein of the present disclosure can change the tropism, specificity and/or bio-distribution of an AAV comprising the modified AAV capsid protein. In preferred embodiments, an AAV comprising the modified AAV capsid protein has increased targeting to a target cell, tissue or organ when administered to a subject. In some embodiments, an AAV comprising the modified AAV capsid protein has decreased distribution outside of a target cell, tissue or organ when administered to a subject. In some embodiments, tropism of a modified AAV capsid protein can be measured using an enrichment score. A non-limiting example of an enrichment score is based on the combination of amino acid residues present in the modified sequence within VR VIII. An exemplary enrichment formula is provided below:

$$Tissue Enrichment score = log 2 FoldChange = log 2 {MN}_{Tissue} - log 2 {MN}_{TestArticle}$$

[0355] The formula for the scaled log 2 fold change is provided below:

$$Scaled log 2 FoldChange = ( log 2 FoldChange - min ( log 2 FoldChange ) ) / ( max ( log 2 FoldChange ) - min ( log 2 FC ) )$$

### 6.2.5. Reference AAV Capsid Proteins

[0356] The reference AAV capsid protein used in various embodiments of the present disclosure is a VP1, VP2 or VP3 capsid protein of an AAV known in the art. It can be a VP1, VP2 or VP3 capsid protein of a naturally occurring or non-naturally occurring AAV variant. The reference AAV capsid protein does not comprise a targeting peptide disclosed herein in VR VIII.

[0357] The non-naturally occurring VP1, VP2, or VP3 capsid protein includes a capsid protein generated by biological or chemical alteration or in silico design, or variation of a naturally occurring AAV capsid protein. Accordingly, the reference AAV capsid protein includes, but is not limited to, a capsid protein of various AAV serotypes (e.g., AAV1, AAV2, AAV3B, AAV5, AAV6, AAV8, and AAV9) or a variant thereof. A non-naturally occurring VP1, VP2, or VP3 capsid protein further includes an artificial capsid protein created by in silico design or synthesis. An artificial capsid protein includes, but is not limited to, AAV capsid proteins disclosed in PCT/US2014/060163, U.S. Pat. No. 9,695,220, PCT/US2016/044819, PCT/US2018/032166, PCT/US2019/031851, and PCT/US2019/047546, which are incorporated herein by reference in their entireties.

[0358] In some embodiments, the reference AAV capsid protein is the capsid protein of AAV9 (Genbank Ace. No: AAS99264.1), AAV1 (Genbank Ace. No: AAD27757.1), AAV2 (Genbank Ace. No: AAC03780.1), AAV3 (Genbank Ace. No: AAC55049.1), AAV3b (Genbank Ace. No: AF028705.1), AAV4 (Genbank Ace. No: AAC58045.1), AAV5 (Genbank Ace. No: AAD13756.1), AAV6 (Genbank Ace. No: AF028704.1), AAV7 (Genbank Ace. No: AAN03855.1), AAV 8 (Genbank Ace. No: AAN03857.1), AAV10 (Genbank Ace. No: AAT46337.1), AAVrh10 (Genbank Ace. No: AY243015.1), AAV11 (Genbank Ace. No: AAT46339.1), AAV12 (Genbank Ace. No: ABI16639.1), or AAV13 (Genbank Ace. No: ABZ10812.1), AAVpol (Genbank Ace. No: FJ688147.1). In certain embodiments, the AAV capsid protein is the capsid protein of AAV9 (Genbank Ace. No: AAS99264.1).

[0359] The reference AAV capsid protein can be VP1 capsid protein having a sequence selected from: SEQ IID NO: 54 (AAV1 (AAD27757)), SEQ ID NO: 55 (AAV2 (AAC03780)), SEQ ID NO: 56 (AAV3 (AAC55049)), SEQ ID NO: 57 (AAV5 (AAD13756)), SEQ ID NO: 58 (AAV6 (AAB₉₅₄₅₀)), SEQ ID NO: 59 (AAV7 (AF513851_2)), SEQ ID NO: 60 (AAV8 (AF513852_2)), SEQ ID NO: 61 (AAV9 (AAS99264)), SEQ ID NO: 62 (AAV10 (AAT46337)), SEQ ID NO: 63 (AAV hu.68), SEQ ID NO: 64 (AAV LK03), SEQ ID NO: 65 (AAV hu.1 (AAS99260)), SEQ ID NO: 66 (AAV hu.2 (AAS99270)), SEQ ID NO: 67 (AAV hu.3 (AAS99280)), SEQ ID NO: 68 (AAV hu.4 (AAS99287)), SEQ ID NO: 69 (AAV hu.6 (AAS99306)), SEQ ID NO: 70 (AAV hu.7 (AAS99313)), SEQ ID NO: 71 (AAV hu.9 (AAS99314)), SEQ ID NO: 72 (AAV hu.10 (AAS99261)), SEQ ID NO: 73 (AAV hu.11 (AAS99262)), SEQ ID NO: 74 (AAV hu.15 (AAS99265)), SEQ ID NO: 75 (AAV hu.16 (AAS99266)), SEQ ID NO: 76 (AAV hu.17 (AAS99267)), SEQ ID NO: 77 (AAV hu.18 (AAS99268)), SEQ ID NO: 78 (AAV hu.20 (AAS99271)), SEQ ID NO: 79 (AAV hu.21 (AAS99272)), SEQ ID NO: 80 (AAV hu.22 (AAS99273)), SEQ ID NO: 81 (AAV hu.23 (AAS99274)), SEQ ID NO: 82 (AAV hu.25 (AAS99276)), SEQ ID NO: 83 (AAV hu.27 (AAS99277)), SEQ ID NO: 84 (AAV hu.28 (AAS99278)), SEQ ID NO: 85 (AAV hu.29 (AAS99279)), SEQ ID NO: 86 (AAV hu.31 (AAS99281)), SEQ ID NO: 87 (AAV hu.32 (AAS99282)), SEQ ID NO: 88 (AAV hu.34 (AAS99283)), SEQ ID NO: 89 (AAVhu.37 (AAS99285)), SEQ ID NO: 90 (AAV hu.39 (AAS99286)), SEQ ID NO: 91 (AAV hu.41 (AAS99289)), SEQ ID NO: 92 (AAV hu.42 (AAS99290)), SEQ ID NO: 93 (AAV hu.43 (AAS99291)), SEQ ID NO: 94 (AAV hu.44 (AAS99292)), SEQ ID NO: 95 (AAV hu.45 (AAS99293)), SEQ ID NO: 96 (AAV hu.46 (AAS99294)), SEQ ID NO: 97 (AAV hu.47 (AAS99295)), SEQ ID NO: 98 (AAV hu.48 (AAS99296)), SEQ ID NO: 99 (AAV hu.51 (AAS99298)), SEQ ID NO: 100 (AAV hu.52 (AAS99299)), SEQ ID NO: 101 (AAV hu.53 (AAS99300)), SEQ ID NO: 102 (AAV hu.54 (AAS99301)), SEQ ID NO: 103 (AAV hu.55 (AAS99302)), SEQ ID NO: 104 (AAV hu.56 (AAS99303)), SEQ ID NO: 105 (AAV hu.57 (AAS99304)), SEQ ID NO: 106 (AAV hu.60 (AAS99307)), SEQ ID NO: 107 (AAV hu.61 (AAS99308)), SEQ ID NO: 108 (AAV hu.63 (AAS99309)), SEQ ID NO: 109 (AAV hu.66 (AAS99311)), SEQ ID NO: 110 (AAV hu.67 (AAS99312)), SEQ ID NO: 111 (AAV rh.10 (AAO88201)), SEQ ID NO: 112 (AAV rh.13 (AAO88199)), SEQ ID NO: 113 (AAV rh.19 (AAO88194)), SEQ ID NO: 114 (AAV rh.22 (AAO88192)), SEQ ID NO: 115 (AAV rh.23 (AAO88191)), SEQ ID NO: 116 (AAV rh.24 (AAO88190)), SEQ ID NO: 117 (AAV rh.35 (AAO88186)), SEQ ID NO: 118 (AAV rh.43 (AAS99245)), SEQ ID NO: 119 (AAV rh.48 (AAS99246)), SEQ ID NO: 120 (AAV rh.49 (AAS99247)), SEQ ID NO: 121 (AAV rh.50 (AAS99248)), SEQ ID NO: 122 (AAV rh.51 (AAS99249)), SEQ ID NO: 123 (AAV rh.52 (AAS99250)), SEQ ID NO: 124 (AAV rh.53 (AAS99251)), SEQ ID NO: 125 (AAV rh.54 (AAS99252)), SEQ ID NO: 126 (AAV rh.55 (AA599253)), SEQ ID NO: 127 (AAV rh.57 (AA599254)), SEQ ID NO: 128 (AAV rh.58 (AAS99255)), SEQ ID NO: 129 (AAV rh.62 (AAS99258)), SEQ ID NO: 130 (AAV rh.64 (AAS99259)), SEQ ID NO: 131 (AAV rh.56 (JA400164)), SEQ ID NO: 143 (Anc80L1), SEQ ID NO: 144 (Anc80L27), SEQ ID NO: 145 (Anc80L33), SEQ ID NO: 146 (Anc80L36), SEQ ID NO: 147 (Anc80L44), SEQ ID NO: 148 (Anc80L59), SEQ ID NO: 149 (Anc80L60), SEQ ID NO: 150 (Anc80L62), SEQ ID NO: 151 (Anc82DI), SEQ ID NO: 152 (AAV rh.74); Anc80-55 (SEQ ID NO: 44885); Anc80-129 (SEQ ID NO: 44887); Anc80-156 (SEQ ID NO: 44889); Anc80-751 (SEQ ID NO: 44916); Anc80-1029 (SEQ ID NO: 44917); and Anc80-1712 (SEQ ID NO: 44893). The reference AAV capsid protein can be a VP2 or VP3 protein having a part of one of the sequences. For example, VP2 protein can have a sequence corresponding to amino acids 138 to 736 of AAV9 VP1 and VP3 protein can have a sequence corresponding to amino acids 138 to 736 of AAV9 VP1 protein.

[0360] The reference AAV capsid protein can be VP1 capsid protein having any member sequence of the ancestral AAV library selected from SEQ ID NO: 132 (Anc80), SEQ ID NO: 133 (Anc81 (AKU89596)), SEQ ID NO: 134 (Anc82 (AKU89597)), SEQ ID NO: 135 (Anc83 (AKU89598)), SEQ ID NO: 136 (Anc84 (AKU89599)), SEQ ID NO: 137 (Anc94) SEQ ID NO: 138 (Ancl 10 (AKU89600)), SEQ ID NO: 139 (Anc113 (AKU89601)), SEQ ID NO: 140 (Anc126 (AKU89602)), SEQ ID NO: 141 Anc127 (AKU89603), and SEQ ID NO: 142 (Anc80L65 (AKU89595)). The reference AAV capsid protein can be a VP2 or VP3 protein having a part of one of the sequences. For example, VP2 protein can have a sequence corresponding to amino acids 138 to 736 of AAV9 VP1 and VP3 protein can have a sequence corresponding to amino acids 138 to 736 of AAV9 VP1 protein. When a SEQ ID NO for a library sequence is used in this disclosure, it refers to a sequence of any one member of the library.

[0361] In some embodiments, the reference AAV capsid protein is a liver-toggle mutant described in WO2019/217911, which is incorporated by reference in its entirety herein.

[0362] In some embodiments, the reference AAV capsid protein is a capsid protein (VP1, VP2 or VP3) of an AAV variant selected from the group consisting of: AAV2; AAV1; AAV6; AAV3; AAV LK03; AAV7; AAV8; AAV hu.37; AAV rh.10; AAV9; AAV hu.68; AAV10; AAV5; AAV3-3; AAV4-4; AAV1-A; hu.46-A; hu.48-A; hu.44-A; hu.43-A; AAV6-A; hu.34-B; hu.47-B; hu.29-B; rh.63-B; hu.56-B; hu.45-B; rh.57-B; rh.35-B; rh.58-13; rh.28-B; rh.51-B; rh.19-B; rh.49-B; rh.52-B; rh.13-B; AAV2-B; rh.20-B; rh.24-B; rh.64-B; hu.27-B; hu.21-B; hu.22-B; hu.23-B; hu.7-C; hu.61-C; rh.56-C; hu. 9-C; hu.54-C; hu.53-C; hu.60-C; hu.55-C; hu.2-C; hu.1-C; hu.18-C; hu.3-C; hu.25-C; hu.15-C; hu.16-C; hu.11-C; hu.10-C; hu.4-C; rh.54-D; rh.48-D; rh.55-D; rh.62-D; AAV7-D; rh.52-E; rh.51-E; hu.39-E; rh.53-E; hu.37-E; rh.43-E; rh.50-E; rh.49-E; rh.61-E; hu.41-E; rh.64-E; hu.42-E; rh.57-E; rh.40-E; rh74; hu.67-E; hu.17-E; hu.6-E; hu.66-E; rh.38-E; hu.32-F; AAV9/hu; hu.31-F; Anc80L27; Anc80L59; Anc80L60; Anc80L62; Anc80L65; Anc80L33; Anc80L36; Anc80L44; Anc80L1; Anc80-55, Anc80-129, Anc80-156, Anc80-751, Anc80-1029, Anc80-1712; Anc 10; and Anc80DI. In some embodiments, the reference AAV capsid protein is a capsid protein of any member protein of an ancestral AAV library selected from: Anc80; Anc81; Anc82; Anc83; Anc84; Anc94; Anc113; Anc126; and Anc127.

[0363] In some embodiments, the reference AAV capsid protein is a protein having at least 90%, 95%, 96%, 97%, 98% or 99% sequence identity to a sequence selected from SEQ ID NOs: 54-131 and 143-158. In some embodiments, the reference AAV capsid protein is a protein having 1, 2, 3, 4, 5, 6, 7, 8, 9, 10, 11, 12, 13, 14, 15, 16, 17, 18, 19, 20, 21, 22, 23, 24, 25, 26, 27, 28, 29, 30 or more amino acid residues different (e.g., insertion, deletion, or substitution) to a sequence selected from SEQ ID NOs: 54-131 and 143-158. In some embodiments, the reference AAV capsid protein is a protein having a sequence selected from SEQ ID NOs: 54-131 and 143-158. In some embodiments, the reference AAV capsid protein is a protein having a VP2 (corresponding to amino acids 138 to 736 of AAV9 VP1) or VP3 portion (corresponding to amino acids 138 to 736 of AAV9 VP1) of the protein having a sequence selected from SEQ ID NOs: 54-131 and 143-158.

### 6.2.6. Other Modifications

[0364] In some embodiments, the modified AAV capsid protein comprises one or more additional modifications compared to a reference AAV capsid protein. The one or more additional modifications can be an insertion, deletion, substitution or a combination thereof, and can be located in the VRVIII and/or outside of the VRVIII.

[0365] In some embodiments, the modified AAV capsid protein is different from the reference AAV capsid protein by having one or more amino acid substitutions at a variable region of the reference AAV capsid protein. In some embodiments, the one or more amino acid substitutions is at a variable region, VR I, of the reference AAV capsid protein (FIG. 28).

### 6.3. Polynucleotides Encoding Modified AAV Capsid Proteins; Vectors; Host Cells

[0366] In another aspect, the present disclosure provides a polynucleotide encoding a modified AAV capsid protein described herein. In some embodiments, the polynucleotide is codon optimized for expression in a bacterial or mammalian cell.

[0367] In some embodiments, the polynucleotide is inserted into an expression vector. In some embodiments, the polynucleotide is operably linked to a promoter or a sequence inducing expression of a protein from the polynucleotide. The present disclosure provides a vector including the polynucleotide encoding a modified AAV capsid protein. The vector can be used for generation of the modified AAV capsid protein. In some embodiments, the vector is used to generate an AAV virion comprising the modified AAV capsid protein. In some embodiments, the vector further comprises an AAV rep protein or a fragment thereof. In some embodiments, the reference capsid protein for the modified AAV capsid protein and the rep protein are originated from an AAV of the same clade. In some embodiments, the reference capsid protein for the modified AAV capsid protein and the rep protein are originated from an AAV of different clades.

[0368] In some embodiments, the polynucleotide is transfected to a host cell. The present disclosure provides a host cell comprising the polynucleotide encoding a modified AAV capsid protein. The host cell can be a prokaryotic cell or eukaryotic cell. In some embodiments, the host cell is a mammalian cell or a yeast cell.

[0369] In some embodiments, the host cell further comprises another polynucleotide encoding an AAV protein. In some embodiments, the host cell comprises a functional rep gene; a recombinant nucleic acid vector comprising AAV inverted terminal repeats (ITRs) and an expressible polynucleotide; and sufficient helper functions to permit packaging of the recombinant nucleic acid vector into the modified AAV capsid protein.

[0370] In some embodiments, the components required for the host cell to package a recombinant nucleic acid vector in a modified AAV capsid protein are provided to the host cell in trans. In some embodiments, any one or more of the required components (e.g., a recombinant nucleic acid vector, rep sequences, cap sequences, and/or helper functions) are provided by a stable host cell which has been engineered to contain one or more of the required components using methods known to those of skill in the art. In some embodiments, such a stable host cell contains the required component(s) under the control of an inducible promoter. In some embodiments, the required component(s) is under the control of a constitutive promoter.

### 6.4. Modified AAV Virions

[0371] The present disclosure further provides a modified recombinant AAV (rAAV) virion comprising a modified AAV capsid protein described herein. In some embodiments, the modified rAAV comprises a modified AAV capsid protein and a recombinant nucleic acid vector.

[0372] In some embodiments, the modified rAAV comprising a modified AAV capsid protein achieves higher infection of a target following administration to a mammalian subject as compared to an rAAV comprising a corresponding reference AAV capsid protein. In some embodiments, the modified rAAV achieves higher expression in a target of an expressible polynucleotide within the recombinant nucleic acid vector following administration to a mammalian subject when compared to expression of the expressible polynucleotide administered in an rAAV comprising a corresponding reference AAV capsid protein.

[0373] In some embodiments, the modified rAAV comprising a modified AAV capsid protein achieves lower infection of an off-target following administration to a mammalian subject as compared to an rAAV comprising a corresponding reference AAV capsid protein. In some embodiments, the modified rAAV achieves lower expression in an off-target of an expressible polynucleotide within the recombinant nucleic acid vector following administration to a mammalian subject as compared to expression of the expressible polynucleotide administered in an rAAV comprising a corresponding reference AAV capsid protein. In some embodiments, the corresponding reference AAV capsid protein is a capsid protein identical to the modified AAV capsid protein except that it does not include a targeting peptide described above.

[0374] In some embodiments, the target is brain, muscle, spinal cord, eye, or other organ. In some embodiments, the off-target tissue is muscle, liver, or other organ. In one embodiment, the target is CNS.

[0375] In some embodiments, the modified rAAV has less liver toxicity than an rAAV comprising a corresponding reference AAV capsid protein administered by the same route of administration and in the same dose. In some embodiments, the less liver toxicity is because of de-targeting of the modified rAAV to a liver.

### 6.5. Methods of Producing rAAV

[0376] The rAAV of the disclosure comprises a recombinant nucleic acid vector containing a heterologous polynucleotide. In some embodiments, the heterologous polynucleotide comprises an expressible polynucleotide operably linked to an ERE. The expressible polynucleotide and ERE optionally replace the AAV genomic coding region (e.g., replace the AAV rep and cap genes). The expressible polynucleotide and ERE are generally flanked on either side by AAV inverted terminal repeat (ITR) regions, although a single ITR may be sufficient to carry out the functions normally associated with configurations comprising two ITRs (see, for example, WO 94/13788), and vector constructs with only one ITR can thus be employed in conjunction with the rAAV of the present disclosure.

[0377] In some embodiments, the rAAV of the disclosure comprise a therapeutic protein coding sequence operably linked to an ERE. The therapeutic protein coding sequence and ERE optionally replace the AAV genomic coding region (e.g., replace the AAV rep and cap genes).

[0378] In order to replicate and package the vector, the missing functions are complemented with a packaging gene, or a plurality thereof, which together encode the necessary functions for the various missing rep and/or cap gene products. The packaging genes or gene cassettes are in one embodiment not flanked by AAV ITRs and in one embodiment do not share any substantial homology with the rAAV genome.

[0379] The rAAV vector construct, and the complementary packaging gene constructs can be implemented in a number of different forms. Viral particles, plasmids, and stably transformed host cells can all be used to introduce such constructs into the packaging cell, either transiently or stably.

[0380] In certain embodiments of this invention, the AAV vector and complementary packaging gene(s), if any, are provided in the form of bacterial plasmids, AAV particles, or any combination thereof. In other embodiments, either the AAV vector sequence, the packaging gene(s), or both, are provided in the form of genetically altered (preferably inheritably altered) eukaryotic cells. The development of host cells inheritably altered to express the AAV vector sequence, AAV packaging genes, or both, provides an established source of the material that is expressed at a reliable level.

[0381] A variety of different genetically altered cells can thus be used in the context of this invention. By way of illustration, a mammalian host cell may be used with at least one intact copy of a stably integrated rAAV vector. An AAV packaging plasmid comprising at least an AAV rep gene operably linked to a promoter can be used to supply replication functions (as described in U.S. Pat. No. 5,658,776). Alternatively, a stable mammalian cell line with an AAV rep gene operably linked to a promoter can be used to supply replication functions (see, e.g., WO 95/13392; WO 98/23018; and U.S. Pat. No. 5,656,785). The AAV cap gene, providing the encapsidation proteins as described above, can be provided together with an AAV rep gene or separately (see, e.g., the above-referenced patent documents as well as WO 98/27204).

[0382] Thus, the rAAV of the disclosure can be assembled by, for example, expression of its components in a packaging host cell. The components of a virus particle (e.g., rep sequences, cap sequences, inverted terminal repeat (ITR) sequences) can be introduced into a packaging host cell using one or more viral vectors.

[0383] Once assembled, rAAV particles can be purified, if desired, using routine methods. As used herein, “purified” virus particles refer to virus particles that are removed from components in the mixture in which they were made such as, but not limited to, viral components (e.g., rep sequences, cap sequences), packaging host cells, and partially- or incompletely-assembled virus particles.

### 6.6. Pharmaceutical Composition Comprising Modified rAAV

[0384] In one aspect, the present disclosure provides a pharmaceutical composition comprising a modified AAV capsid protein or a modified rAAV of the present disclosure and a pharmaceutically acceptable carrier. The modified rAAV can comprise a modified AAV capsid protein as described herein and a recombinant nucleic acid vector containing an expressible polynucleotide.

[0385] In particular embodiments, the present disclosure provides a pharmaceutical composition comprising an rAAV whose genome comprises therapeutic protein used for treating and/or preventing a disease of the central nervous system where the coding sequence for the therapeutic protein is operably linked to an expression regulatory element (ERE).

[0386] The pharmaceutical composition can be formulated using one or more carriers, excipients, stabilizers and adjuvants to, for example: (1) increase stability; (2) increase cell transfection or transduction; (3) permit the sustained or delayed release; (4) alter the biodistribution (e.g., target the rAAV particle to specific tissues or cell types); (5) increase the translation of encoded protein in vivo; and/or (6) alter the release profile of encoded protein in vivo.

[0387] Formulations of the pharmaceutical compositions provided herein can include, without limitation, saline, which may be formulated with a variety of buffering solutions (e.g., phosphate buffered saline), lactose, sucrose, calcium phosphate, gelatin, dextran, agar, pectin, water, lipidoids, liposomes, lipid nanoparticles, polymers, lipoplexes, core-shell nanoparticles, peptides, proteins, nanoparticle mimics and combinations thereof.

[0388] Formulations of the pharmaceutical compositions described herein can be prepared by any method known or hereafter developed in the art of pharmacology. In general, such preparatory methods include the step of associating the active ingredient with a carrier and/or one or more other accessory ingredients (e.g., excipients, stabilizers and adjuvants).

[0389] A pharmaceutical composition in accordance with the present disclosure can be prepared, packaged, and/or sold in bulk, as a single unit dose, and/or as a plurality of single unit doses. As used herein, a unit dose refers to a discrete amount of the pharmaceutical composition including a predetermined amount of the active ingredient. The amount of the active ingredient is generally equal to the dosage of the active ingredient which would be administered to a subject and/or a convenient fraction of such a dosage such as, for example, one-half or one-third of such a dosage.

[0390] Relative amounts of the active ingredient (e.g., rAAV), the pharmaceutically acceptable carrier, and/or any additional ingredients in a pharmaceutical composition in accordance with the present disclosure can vary, depending upon the identity, size, and/or condition of the subject being treated and further depending upon the route by which the composition is to be administered.

[0391] Various carriers, excipients, stabilizers and adjuvants for formulating pharmaceutical compositions and techniques for preparing the composition are known in the art (see Remington: The Science and Practice of Pharmacy, 22nd Revised Ed., Pharmaceutical Press, 2012; incorporated herein by reference in its entirety). The use of suitable conventional carriers, excipients, stabilizers and adjuvants is contemplated within the scope of the present disclosure.

[0392] In some embodiments, the pharmaceutical composition is in the form of a solution containing from about 1×10¹ to about 1×10¹⁶ genome copies (GCs)/ml of rAAV (e.g., a solution containing concentrations of from about 1×10³ to about 1×10¹⁴ GCs/ml).

### 6.6.1. Routes of Administration

[0393] The present disclosure provides a method of administering an rAAV to transfer a polynucleotide to the CNS. In some embodiments, the rAAV is administered locally or systematically.

[0394] In certain embodiments, the rAAV is administered locally to the CNS. In some embodiments, rAAV is administered to the cerebral spinal fluid (CSF) of said subject. In some embodiments, the rAAV is administered to the cisternae magna, intraventricular space, brain ventricle, subarachnoid space, intrathecal space and/or ependyma of the subject.

[0395] In some embodiments, rAAV is administered by intrathecal administration, intracranial administration, intracerebroventricular (ICV), or intraparenchymal administration or administration to the lateral ventricles of the brain.

[0396] In some embodiments, rAAV is administered by lumbar injection (e.g., into the lumbar cistern) and/or injection into the intra cisterna magna (ICM).

[0397] In some embodiments, rAAV is administered to the ventricular system. In some embodiments, rAAV is administered to the rostral lateral ventricle; and/or administered to the caudal lateral ventricle; and/or administered to the right lateral ventricle; and/or administered to the left lateral ventricle; and/or administered to the right rostral lateral ventricle; and/or administered to the left rostral lateral ventricle; and/or administered to the right caudal lateral ventricle; and/or administered to the left caudal lateral ventricle.

[0398] In some embodiments, rAAV is administered such that the rAAV contacts ependymal cells of said subject. Such ependymal cells express the encoded polypeptide and optionally the polypeptide is expressed by the cells.

[0399] In some embodiments, the polypeptide is expressed and/or is distributed in the lateral ventricle, CSF, and/or brain (e.g., striatum, thalamus, medulla, cerebellum, occipital cortex, and/or prefrontal cortex).

[0400] In some embodiments, rAAV is administered intravenously or systemically.

[0401] In some embodiments, rAAV is administered inter-digitally.

[0402] To deliver the rAAV specifically to a particular region of the CNS, especially to a particular region of the brain, it may be administered by stereotaxic microinjection. For example, on the day of surgery, patients can have the stereotaxic frame base fixed in place (screwed into the skull). The brain with stereotaxic frame base (MRI-compatible with fiduciary markings) can be imaged using high resolution MRI. The MRI images can then be transferred to a computer that runs stereotaxic software. A series of coronal, sagittal and axial images can be used to determine the target site of vector injection, and trajectory. The software directly translates the trajectory into 3-dimensional coordinates appropriate for the stereotaxic frame. Burr holes can be drilled above the entry site and the stereotaxic apparatus localized with the needle implanted at the given depth. The vector in a pharmaceutically acceptable carrier can then be injected. The AAV vector can be then administrated by direct injection to the primary target site and retrogradely transported to distal target sites via axons. Additional routes of administration can be used, e.g., superficial cortical application under direct visualization, or other non-stereotaxic application.

[0403] In some embodiments, rAAV is delivered by a pump. The pump may be implantable. Another convenient way to administer the rAAV is to use a cannula or a catheter.

[0404] In some embodiments, rAAV is administered by Convection-enhanced delivery (CED) (Nguyen et al., (2003) J. Neurosurg. 98:584-590), which has been used clinically in gene therapy (AAV2-hAADC) for Parkinson's disease (Fiandaca et al., (2008) Exp. Neurol. 209:51-57). The underlying principle of CED involves pumping infusate into brain parenchyma under sufficient pressure to overcome the hydrostatic pressure of interstitial fluid, thereby forcing the infused particles into close contact with the dense perivasculature of the brain. Pulsation of these vessels acts as a pump, distributing the particles over large distances throughout the parenchyma (Hadaczek et al., (2006) Hum. Gene Ther. 17:291-302). To increase the safety and efficacy of CED, a reflux-resistant cannula (Krauze et al., (2009) Methods Enzymol. 465:349-362) can be employed along with monitored delivery with real-time MRI. Monitored delivery allows for the quantification and control of aberrant events, such as cannula reflux and leakage of infusate into ventricles (Eberling et al., (2008) Neurology 70:1980-1983; Fiandaca et al., (2009) Neuroimage 47 Suppl. 2:T27-35; Saito et al., (2011) Journal of Neurosurgery Pediatrics 7:522-526). US20190111157A1 provides improved procedures to achieve widespread expression of AAV vectors in the cortex and/or striatum.

[0405] In some embodiments, the rAAV is administered to the striatum. In some embodiments, the rAAV is administered to at least the putamen and the caudate nucleus of the striatum. In some embodiments, the rAAV is administered to at least the putamen and the caudate nucleus of each hemisphere of the striatum. In some embodiments, the rAAV is administered to at least one site in the caudate nucleus and two sites in the putamen.

[0406] In some embodiments, rAAV is delivered by intraparenchymal administration to a specific area of the brain. In some embodiments, rAAV is delivered by intraparenchymal administration to putamen, striatum, basal forebrain region, substantia nigra and/or ventral tegmental area.

[0407] In some embodiments of the above aspects and embodiments, the rAAV is delivered by stereotactic delivery. In some embodiments, the rAAV is delivered by convection enhanced delivery (CED). In some embodiments, the rAAV is delivered using a CED delivery system. In some embodiments, the CED system comprises a cannula. In some embodiments, the cannula is a reflux-resistant cannula or a stepped cannula. In some embodiments, the CED system comprises a pump. In some embodiments, the pump is a manual pump. In some embodiments, the pump is an osmotic pump. In some embodiments, the pump is an infusion pump.

[0408] A modified rAAV of the present disclosure can be administered to a subject (e.g., a human or non-human mammal) in a suitable carrier. Suitable carriers include saline, which may be formulated with a variety of buffering solutions (e.g., phosphate buffered saline), lactose, sucrose, calcium phosphate, gelatin, dextran, agar, pectin, and water. A modified rAAV typically is administered in sufficient amounts to transduce or infect the desired cells and to provide sufficient levels of gene transfer and expression to provide a therapeutic benefit without undue adverse effects. Conventional and pharmaceutically acceptable routes of administration include, but are not limited to, direct delivery to an organ such as, for example, the muscle, liver or lung, orally, intranasally, intratracheally, intrathecally, intravenously, intramuscularly, intraocularly, subcutaneously, intradermally, or by other routes of administration. Routes of administration can be combined, if desired.

### 6.6.2. Subject

[0409] The present disclosure provides a method of transferring a polynucleotide to the central nervous system (CNS) of a subject, e.g., a mammal. In some embodiments, the subject is a human. In some embodiments, the subject has a CNS disease. In some embodiments, the subject has a genetic defect associated with CNS disease or disorder.

[0410] In some embodiments, the CNS disease or disorder is selected from Adrenoleukodystrophy, Alexander Disease, Alzheimer disease, Amyotrophic lateral sclerosis, Angelman syndrome, Ataxia telangiectasia, Canavan disease, Charcot-Marie-Tooth syndrome, Cockayne syndrome, Chronic inflammatory demyelinating polyneuropathy (CIDP), Deafness, Duchenne muscular dystrophy, Epilepsy, Essential tremor, Fragile X syndrome, Friedreich's ataxia, Gaucher disease, GM1 gangliosidosis, GM2 gangliosidoses, Huntington disease, Frontotemporal Degeneration (FTD), Lesch-Nyhan syndrome, Maple syrup urine disease, Menkes syndrome, Metachromatic leukodystrophy (MLD), Myotonic dystrophy, Multiple sclerosis, Narcolepsy, Neurofibromatosis, Niemann-Pick disease, Parkinson's disease, Phenylketonuria, Prader-Willi syndrome, Refsum disease, Rett syndrome, Spinal muscular atrophy, Spinocerebellar ataxia, Tangier disease, Tay-Sachs disease, Tuberous sclerosis, Von Hippel-Lindau syndrome, Williams syndrome, Wilson's disease, and Zellweger syndrome.

[0411] In some embodiments, the CNS disease or disorder is a demyelinating or white matter disease. In some embodiments, the subject has a monogenetic defect. In some embodiments, the subject has a genetic defect in a protein expressed in the CNS. In some embodiments, the subject has a monogenetic defect in a protein expressed in the CNS.

[0412] In some embodiments, the subject has a lysosomal storage disease (LDS). In some embodiments, the subject has a disease selected from: mucopolysaccharidosis type I e.g., Hurler syndrome and the variants Scheie syndrome and Hurler-Scheie syndrome; Hunter syndrome; mucopolysaccharidosis type III, e.g., Sanfilippo syndrome; mucopolysaccharidosis type IV, e.g., Morquio syndrome; mucopolysaccharidosis type VI, e.g., Maroteaux-Lamy syndrome; mucopolysaccharidosis type II; mucopolysaccharidosis type III; mucopolysaccharidosis type IV; mucopolysaccharidosis type VI; mucopolysaccharidosis type VII; mucopolysaccharidosis type VIII; mucopolysaccharidosis type IX; Tay-Sachs disease; Sandhoff disease; GM1 gangliosidosis; Fabry disease; Krabbe's disease; leukodystrophy; metachromatic leukodystrophy; Pompe disease; Fucosidosis deficiency; alpha-mannosidosis deficiency; beta-mannosidosis deficiency; Gaucher disease; Infantile Batten Disease; Classic Late Infantile Batten Disease; Juvenile Batten Disease; Batten, other forms Niemann-Pick disease; Niemann-Pick disease without sphingomyelinase deficiency; and Wolman disease.

[0413] In some embodiments, the subject has a brain cancer. In some embodiments, the subject has brain metastases of a cancer. In some embodiments, the subject has brain metastases of breast cancer. In some embodiments, the subject has brain metastases of HER2 positive breast cancer.

### 6.6.3. Dosages

[0414] The dose of a viral vector administered to a subject will depend primarily on factors such as the condition being treated, and the age, weight, and health of the subject. For example, a therapeutically effective dosage of a viral vector to be administered to a human subject generally is in the range of from about 0.1 ml to about 10 ml of a solution containing concentrations of from about IE1 to about 1E16 genome copies (GCs)/ml of viruses (e.g., a solution containing concentrations of from about 1E3 to about 1E14 GCs/ml). In some embodiments, the total dose of the rAAV administered to a subject is less than 3E14 GCs, e.g., 1E14 GCs or less, 5E13 GCs or less, 1E13 GCs or less, 5E12 GCs or less, or 1E12 GCs or less.

[0415] In another embodiment, a therapeutically effective dosage of a viral vector to be administered to a human subject generally is in the range of from about 0.1 ml to about 10 ml of a solution containing concentrations of from about 1E1 to 1E12 genome copies (GCs) of viruses (e.g., about 1E3 to 1E9 GCs). Transduction and/or expression of a transgene can be monitored at various time points following administration by DNA, RNA, or protein assays. In some instances, the levels of expression of the transgene can be monitored to determine the frequency and/or amount of dosage. Dosage regimens similar to those described for therapeutic purposes also may be utilized for immunization.

[0416] In some embodiments, the effective dose is between 1E10 to 1E16 genome copy numbers (GC) of the rAAV per subject. In some embodiments, the effective dose for a human patient corresponds to a monkey dose of 1E12 to 1E15 GC of the rAAV. In some embodiments, the effective dose for a human patient corresponds to a monkey dose of 1E13 to 1E14 GC of the rAAV. In some embodiments, the effective dose for a human patient corresponds to a monkey dose of about 4E13 GC of the rAAV.

[0417] In some embodiments, the effective dose is 1E11 to 1E15 GC of the rAAV per a gram brain mass. In some embodiments, the effective dose is 1E11 to 1E13 GC of the rAAV per a gram brain mass. In some embodiments, the effective dose is 1E11 to 1E12 GC of the rAAV per a gram brain mass. In some embodiments, the effective dose is 1E12 to 1E14 GC of the rAAV per a gram brain mass. In some embodiments, the effective dose is about 5E11 GC of the rAAV per a gram brain mass. In some embodiments, the effective dose is about 2.5E11 GC of the rAAV per a gram brain mass. In some embodiments, the effective dose is about 5E10 GC of the rAAV per a gram brain mass. In some embodiments, the effective dose is about 2.5E10 GC of the rAAV per a gram brain mass.

[0418] In some embodiments, the effective dose is between 1E10-1E16 genome copy numbers (GC) of the rAAV per kg body weight. In some embodiments, the effective dose is between 1E11-1E15 genome copy numbers (GC) of the rAAV per kg body weight. In some embodiments, the effective dose is between 1E12-5E14 genome copy numbers (GC) of the rAAV per kg body weight. In some embodiments, the effective dose is between 0.5E13-2E14 genome copy numbers (GC) of the rAAV per kg body weight.

[0419] Transduction and/or expression of a transgene can be monitored at various time points following administration by DNA, RNA, or protein assays. In some instances, the levels of expression of the transgene can be monitored to determine the frequency and/or amount of dosage. Dosage regimens similar to those described for therapeutic purposes also may be utilized for immunization.

[0420] In one aspect, the present invention provides a unit dose of rAAV provided herein. The unit dose comprises about 0.1 ml to about 10 ml of a solution containing concentrations of from about 1E9 to 1E17 genome copies (GCs) per ml of rAAV described herein. In some embodiments, the unit dose contains about 1E10 to 1E16 genome copies (GCs) per ml of rAAV described herein. In some embodiments, the unit dose contains about 1E11 to 1E15 genome copies (GCs) per ml of rAAV described herein. In some embodiments, the unit dose contains about 1E12 to 1E14 genome copies (GCs) per ml of rAAV described herein. In some embodiments, the unit dose contains about 2E13 genome copies (GCs) per ml of rAAV described herein.

[0421] In some embodiments, the unit dose contains about 1E10 to 1E16 genome copies (GCs) of rAAV described herein. In some embodiments, the unit dose contains about 1E11 to 1E15 genome copies (GCs) of rAAV described herein. In some embodiments, the unit dose contains about 1E12 to 1E15 genome copies (GCs) of rAAV described herein. In some embodiments, the unit dose contains about 1E13 to E15 genome copies (GCs) of rAAV described herein.

[0422] The unit dose further comprises a pharmaceutically acceptable excipient.

### 6.6.4. Targeting

[0423] The pharmaceutical composition can be used to deliver the recombinant nucleic acid vector to a target within a mammalian subject. When the pharmaceutical composition is administered, the modified rAAV can achieve a higher infection of target cells following administration to a mammalian subject as compared to an rAAV comprising a corresponding reference AAV capsid protein administered by the same route of administration and in the same dose. In some embodiments, the modified rAAV achieves higher expression in target cells of an expressible polynucleotide within the recombinant nucleic acid genome following administration to a mammalian subject as compared to the expressible polynucleotide administered in an rAAV comprising a corresponding reference AAV capsid protein administered by the same route of administration and in the same dose.

[0424] Targeting of rAAVs can be tested in an experimental animal by measuring rAAV infection or expression of a polynucleotide. In some embodiments, targeting is measured in a non-human primate (NHP), mice, rats, birds, rabbits, guinea pigs, hamsters, farm animals (including pigs and sheep), dogs, or cats.

[0425] Targeting of rAAVs can be measured after systemic or local administration of rAAVs. In some embodiments, targeting of rAAVs is measured after intravenous infusion of rAAVs or local administration to CNS. In certain embodiments, targeting is measured after administration to the CNS by lumbar puncture (LP) via injection into the lumbar cistern (e.g., approximately L3-L4) or intra cisterna magna (ICM) administration.

[0426] In some embodiments, targeting of modified rAAVs is measured by measuring the ratio between the copy numbers of the transgene transcripts and a housekeeping gene (e.g., RPP30, actin, GAPDH or ubiquitin) transcripts. In a particular embodiment, the transcripts are measured by RT-ddPCR. In some embodiments, the ratio is measured after a first administration into a mammal such as a primate, e.g., monkey (such as cynomolgus or rhesus macaque) or a mouse.

[0427] In some embodiments, rAAV of the present disclosure provides the ratio of infection (i.e., expression) in a brain (or target region of the brain) or other tissue (or non-target region of the brain) of at least 10, at least 20, at least 30, at least 40, at least 50, at least 60, at least 70, at least 80, at least 90, at least 100, at least 150, at least 200, at least 500, at least 1000 fold, compared to AAV9.

[0428] In some embodiments, a brain: comparative tissue infection ratio is measured by comparing the ratios between the copy numbers of the transgene transcripts and house keeping gene (e.g., RPP30) transcripts in the same organs (e.g., brain) or in the same tissues (e.g., caudate nucleus, frontal cortex, globus pallidum, motor cortex, parietal cortex, putamen, substantia nigra) in two individual or two groups of animals, each administered with a test rAAVₜₑₛₜ (e.g., rAAV comprising a modified AAV capsid protein) or AAV9.

$$rAAVtest : AAV 9 infection ratio = \frac{( \frac{tansgene transcripts}{housekeeping transctips} ) in rAAVtest}{( \frac{tansgene transcripts}{housekeeping transctips} ) in AAV 9}$$

[0429] In some embodiments, the rAAVₜₑₛₜ achieves infection ratio of at least 2, at least 3, at least 4, at least 5, at least 6, at least 7, at least 8, at least, at least 10, at least 20, at least 30, at least 40, or at least 50 compared to AAV9 in the brain. In some embodiments, the rAAVₜₑₛₜ achieves infection ratio of at least 2, at least 3, at least 4, at least 5, at least 6, at least 7, at least 8, at least, at least 10, at least 20, at least 30, at least 40, or at least 50 compared to AAV9 at one of the target tissues, caudate nucleus, frontal cortex, globus pallidum, motor cortex, parietal cortex, putamen, and substantia nigra.

[0430] In some embodiments, targeting of modified rAAVs is measured by measuring the ratio between the copy numbers of the transgene DNA genomes to copy numbers of host genes or genetic loci (e.g., RPP30). In a particular embodiment, the genomes are measured by RT-ddPCR. In some embodiments, the ratio is measured after a first administration into a mammal, e.g., a mouse, or a non-human primate such as a marmoset or rhesus macaque.

[0431] In some embodiments, a brain: comparative tissue infection ratio (DNA) is measured by comparing the ratios between the copy numbers of the transgene DNA genomes and housekeeping gene (e.g., RPP30) genomes in the same organ (e.g., brain) or in the same tissues (e.g., caudate nucleus, frontal cortex, globus pallidum, motor cortex, parietal cortex, putamen, substantia nigra) in two individual or two groups of animals, each administered with a test rAAVₜₑₛₜ (e.g., rAAV comprising a modified AAV capsid protein) or AAV9.

$$rAAV : test AAV 9 infection ratio ( DNA ) = \frac{( \frac{transgene DNA genomes}{houskeeping genomes} ) in rAAVtest}{( \frac{transgene DNA genomes}{houskeeping genomes} ) in AAV 9}$$

[0432] In some embodiments, the rAAVₜₑₛₜ achieves infection ratio of at least 2, at least 3, at least 4, at least 5, at least 6, at least 7, at least 8, at least, at least 10, at least 20, at least 30, at least 40, or at least 50 compared to AAV9 in the brain. In some embodiments, the rAAVₜₑₛₜ achieves infection ratio of at least 2, at least 3, at least 4, at least 5, at least 6, at least 7, at least 8, at least, at least 10, at least 20, at least 30, at least 40, or at least 50 compared to AAV9 at one of the target tissues, caudate nucleus, frontal cortex, globus pallidum, motor cortex, parietal cortex, putamen, and substantia nigra.

[0433] In certain embodiments, when the (transgene genomes/housekeeping genomes) in the comparison tissue is zero or below detection limits, the brain:comparative tissue infection ratio is reported as >10,000 by convention.

[0434] In some embodiments, the modified rAAV of the present disclosure provides a brain: comparative tissue infection ratio (DNA) of at least 1, at least 1.5, at least 2, at least 2.5, at least 3, at least 3.5, at least 4, at least 4.5, at least 5, at least 5.5, at least 6, at least 6.5, at least 7, at least 7.5, at least 8, at least 8.5, at least 9, at least 9.5, at least 10, at least 11, at least 12, at least 13, at least 14, at least 15, at least 16, at least 17, at least 18, at least 19, at least 20, at least 30, at least 40, at least 50, at least 60, at least 70, at least 80, at least 90, at least 100, at least 150, at least 200, at least 500, at least 1,000 or at least 10,000. In some embodiments, the muscle is triceps surae, biceps, heart or quadricep.

[0435] In some embodiments, modified rAAV of the present disclosure provides a brain: comparative tissue infection ratio (DNA) in the range of 0.5 to 1, 0.5 to 5, 0.5 to 10, 1 to 10, 1 to 100, 2 to 8, 5 to 10, 10 to 20, 20 to 80, 10 to 50, 10 to 100, 50 to 80, 100 to 500, 100 to 1000, or 500 to 1000. In some embodiments, the muscle is triceps surae, biceps, heart, or quadricep. In some embodiments, the modified rAAV achieves a brain: comparative tissue infection ratio (DNA) of at least 2, at least 5, at least 10, at least 20, at least 30, at least 40, at least 50, at least 60, at least 70, at least 80, at least 90, at least 100, at least 150, at least 200, at least 500, at least 1000. In some embodiments, the modified rAAV achieves a brain: comparative tissue infection ratio of 0.1 to 1, 1 to 5, 1 to 10, I to 20, 1 to 50, i to 100, 1 to 200, 1 to 300, 100 to 500, 250 to 750, or 500 to 1000.

### 6.6.4.1 RNA Data—Brain:Liver Infection Ratio

[0436] In some embodiments, targeting of modified rAAVs is measured by measuring the ratio between the copy numbers of the transgene transcripts and housekeeping gene (e.g., RPP30) transcripts. In a particular embodiment, the transcripts are measured by RT-ddPCR. In some embodiments, the ratio is measured after a first administration into a mammal, e.g., a mouse, or a non-human primate such as a marmoset or rhesus macaque.

[0437] In some embodiments, a brain:liver infection ratio (RNA) is measured by comparing the ratios between the copy numbers of the transgene transcripts and housekeeping gene (e.g., RPP30) transcripts in the two different organs (e.g., brain v. liver).

$$brain : liver infection ratio ( RNA ) = \frac{( \frac{tansgene transcripts}{housekeeping transctips} ) in brain}{( \frac{tansgene transcripts}{housekeeping transctips} ) in liver}$$

[0438] In some embodiments, modified rAAV of the present disclosure provides a (transgene transcripts/housekeeping transcripts) ratio in liver of less than 1000, less than 900, less than 800, less than 700, less than 600, less than 500, less than 400, less than 300, less than 200, less than 100, less than 90, less than 80, less than 70, less than 60, less than 50, less than 40, less than 30, less than 20, or less than 10.

[0439] In certain embodiments, when the (transgene transcripts/housekeeping transcripts) in the liver is zero or below detection limits, the brain:liver infection ratio is reported as >10,000 by convention.

[0440] In some embodiments, the modified rAAV of the present disclosure provides a brain:liver infection ratio (RNA) of at least 10, at least 15, at least 20, at least 25, at least 30, at least 35, at least 40, at least 45, at least 50, at least 55, at least 60, at least 65, at least 70, at least 75, at least 80, at least 85, at least 90, at least 95, at least 100, at least 150, at least 200, at least 500, at least 1000. In some embodiments, the muscle is caudate nucleus, frontal cortex, globus pallidum, motor cortex, parietal cortex, putamen, or substantia nigra.

[0441] In some embodiments, modified rAAV of the present disclosure provides a brain:liver infection ratio (RNA) of 1 to 10, 1 to 100, 10 to 20, 10 to 50, 10 to 80, 10 to 100, 20 to 100, 100 to 500, 100 to 1000, or 500 to 1000. In some embodiments, the muscle is caudate nucleus, frontal cortex, globus pallidum, motor cortex, parietal cortex, putamen, or substantia nigra.

### 6.6.4.2 DNA Data—Brain:Liver Infection Ratio

[0442] In some embodiments, targeting of modified rAAVs is measured by measuring the ratio between the copy numbers of the transgene DNA genomes to copy numbers of host genes or genetic loci (e.g., RPP30). In a particular embodiment, the genomes are measured by RT-ddPCR. In some embodiments, the ratio is measured after a first administration into a mammal, e.g., a mouse, or a non-human primate such as a marmoset or rhesus macaque.

[0443] In some embodiments, a brain:liver infection ratio (DNA) is measured by comparing the ratios between the copy numbers of the transgene DNA genomes and housekeeping gene (e.g., RPP30) genomes in the two different organs (e.g., brain v. liver).

$$brain : liver infection ratio ( DNA ) = \frac{( \frac{transgene DNA genomes}{houskeeping genomes} ) in brain}{( \frac{transgene DNA genomes}{houskeeping genomes} ) in liver}$$

[0444] In some embodiments, modified rAAV of the present disclosure provides a (transgene genomes/housekeeping genomes) ratio in liver of less than 1, or in a range from 1 to 10, 1 to 5, i to 2, 0.1 to 1, 0 to 1, 0.01 to 0.1, 0.01 to 0.5, or 0.01 to 0.05.

[0445] In certain embodiments, when the (transgene genomes/housekeeping genomes) in the liver is zero or below detection limits, the brain:liver infection ratio is reported as >10,000 by convention.

[0446] In some embodiments, the modified rAAV of the present disclosure provides a brain:liver infection ratio (DNA) of at least 1, at least 1.5, at least 2, at least 2.5, at least 3, at least 3.5, at least 4, at least 4.5, at least 5, at least 5.5, at least 6, at least 6.5, at least 7, at least 7.5, at least 8, at least 8.5, at least 9, at least 9.5, at least 10, at least 11, at least 12, at least 13, at least 14, at least 15, at least 16, at least 17, at least 18, at least 19, at least 20, at least 30, at least 40, at least 50, at least 60, at least 70, at least 80, at least 90, at least 100, at least 150, at least 200, at least 500, at least 1,000 or at least 10,000. In some embodiments, the muscle is caudate nucleus, frontal cortex, globus pallidum, motor cortex, parietal cortex, putamen, or substantia nigra.

[0447] In some embodiments, modified rAAV of the present disclosure provides a brain:liver infection ratio (DNA) in the range of 0.5 to 1, 0.5 to 5, 0.5 to 10, I to 10, 1 to 100, 2 to 8, 5 to 10, 10 to 20, 20 to 80, 10 to 50, 10 to 100, 50 to 80, 100 to 500, 100 to 1000, or 500 to 1000. In some embodiments, the muscle is caudate nucleus, frontal cortex, globus pallidum, motor cortex, parietal cortex, putamen, or substantia nigra. In some embodiments, the modified rAAV achieves a brain:liver infection ratio (DNA) of at least 2, at least 5, at least 10, at least 20, at least 30, at least 40, at least 50, at least 60, at least 70, at least 80, at least 90, at least 100, at least 150, at least 200, at least 500, at least 1000. In some embodiments, the modified rAAV achieves a brain:liver infection ratio of 0.1 to 1, 1 to 5, I to 10, 1 to 20, 1 to 50, 1 to 100, 1 to 200, 1 to 300, 100 to 500, 250 to 750, or 500 to 1000.

### 6.6.4.3 IHC Data Brain:Liver Infection Ratio

[0448] In some embodiments, targeting of modified rAAVs is calculated using the % of cells that have been successfully transduced and express a transgene in a tissue (e.g., eGFP). In a particular embodiment, the transgene expression is measured by immunohistochemistry. In some embodiments, the ratio is measured after a first administration into a mammal, e.g., a mouse, or a non-human primate such as a marmoset or rhesus macaque.

[0449] In some embodiments, a brain:liver infection ratio (IHC) is measured by comparing the ratios between the transgene % GFP+ cells and housekeeping gene (e.g., RPP30) % GFP+ cells in the two different organs (e.g., brain v. liver).

$$brain : liver infection ratio ( IHC ) = \frac{( \frac{transgene \% GFP + cells}{housekeeping \% GFP + cells} ) in brain}{( \frac{transgene \% GFP + cells}{housekeeping \% GFP + cells} ) in liver}$$

[0450] In some embodiments, modified rAAV of the present disclosure provides a (transgene % GFP/housekeeping % GFP) ratio in liver of less than 1, less than 5, less than 10, or in a range from 1 to 10, 1 to 5, 1 to 2, 0.1 to 1, 0 to 1, 0.01 to 0.1, 0.01 to 0.5, or 0.01 to 0.05.

[0451] In certain embodiments, when the (transgene % GFP/housekeeping % GFP) in the liver is zero or below detection limits, the brain:liver infection ratio is reported as >10,000 by convention.

[0452] In some embodiments, the modified rAAV of the present disclosure provides a brain:liver infection ratio (IHC) of at least 1, at least 1.5, at least 2, at least 2.5, at least 3, at least 3.5, at least 4, at least 4.5, at least 5, at least 5.5, at least 6, at least 6.5, at least 7, at least 7.5, at least 8, at least 8.5, at least 9, at least 9.5, at least 10, at least 11, at least 12, at least 13, at least 14, at least 15, at least 16, at least 17, at least 18, at least 19, at least 20, at least 30, at least 40, at least 50, at least 60, at least 70, at least 80, at least 90, at least 100, at least 150, at least 200, at least 500, at least 1000. In some embodiments, the muscle is caudate nucleus, frontal cortex, globus pallidum, motor cortex, parietal cortex, putamen, or substantia nigra.

[0453] In some embodiments, modified rAAV of the present disclosure provides a brain:liver infection ratio (IHC) of 1 to 5, 1 to 10, 1 to 100, 2 to 8, 10 to 20, 20 to 30, 10 to 50, 10 to 100, 20 to 80, 50 to 80, 100 to 500, 100 to 1000, or 500 to 1000. In some embodiments, the muscle is caudate nucleus, frontal cortex, globus pallidum, motor cortex, parietal cortex, putamen, or substantia nigra.

### 6.7. Method of Use

[0454] A modified rAAV as described herein can be used in research and/or therapeutic applications. In some embodiments, a modified rAAV is for genetically modifying a cell in vitro or in vivo. In some embodiments, a modified rAAV is used for gene therapy or for vaccination in a human or animal. More specifically, a modified rAAV can be used for gene addition, gene augmentation, genetic delivery of a polypeptide therapeutic, genetic vaccination, gene silencing, genome editing, gene therapy, RNAi delivery, cDNA delivery, mRNA delivery, miRNA delivery, miRNA sponging, genetic immunization, optogenetic gene therapy, transgenesis, DNA vaccination, or DNA immunization of liver cells or non-liver cells.

[0455] In some embodiments, a modified rAAV of the present disclosure is used for treatment of treating or ameliorating or preventing a disease or condition in a subject. In some embodiments, the disease is a disease of the central nervous system (CNS).

[0456] In some embodiments, a modified rAAV of the present disclosure is used for transferring an exogenous polynucleotide to the central nervous system (CNS). In some embodiment, transferring the exogenous polynucleotide to the CNS results in a CNS:liver infection ratio of greater than 1 when measured by genome copies of the AAV virion. In some embodiments, transferring the exogenous polynucleotide to the CNS results in expression of the exogenous polynucleotide in the CNS at a CNS:liver expression ratio of greater than 10. In some embodiments, transferring the exogenous polynucleotide to the CNS results in expression of the exogenous polynucleotide in the CNS at a CNS:liver expression ratio of greater than 10 when measured by protein expression.

[0457] A modified rAAV of the present disclosure can be administered to a subject in a suitable pharmaceutical carrier.

[0458] The rAAV of the disclosure are typically administered in sufficient amounts to transduce or infect the desired cells and to provide sufficient levels of gene transfer and expression to provide a therapeutic benefit to subjects suffering from a disease. In particular embodiments, the rAAV is administered in sufficient amounts to provide a therapeutic benefit to subjects suffering from a disease of the central nervous system (CNS).

[0459] Conventional and pharmaceutically acceptable routes of administration include, but are not limited to, direct delivery to an organ such as, for example, the brain, intra cisterna magna (ICM), inter-digitally, intravenously, orally, intranasally, intratracheally, intrathecally, intramuscularly, intraocularly, subcutaneously, intradermally, or by other routes of administration. Routes of administration can be combined, if desired.

[0460] Transduction and/or expression of the transgene can be monitored at various time points following administration by DNA, RNA, or protein assays.

[0461] Accordingly, the present disclosure provides a method of treating and/or preventing a muscular disease and/or muscle degeneration by administering a modified rAAV described herein.

### 7. EXAMPLES

### 7.1. Example 1: Assessment of CNS Tropism of Anc80L65 Compared to AAV9

[0462] Applicant evaluated distribution of AAV9 and Anc80L65 vectors encoding the EGFP reporter 14 days following injection by either lumbar puncture (LP) injection into the lumbar cistern (approximately L3-L4) or intra cisterna magna (ICM) injection (4E13gc/animal; 2E13 vg/ml) in adult cynomolgus macaques. Applicant demonstrated that a single injection of Anc80L65 into the CSF of adult cynomolgus monkeys led to the efficient transduction of broad regions of the CNS.

[0463] Following ICM injection, Anc80L65 distributes more broadly throughout the cortex and into deep brain nuclei compared to AAV9. Following LP injection, Anc80L65 distribution throughout the cortex was on par with ICM delivery and superior to that seen with AAV9 via ICM delivery. AAV9 showed limited transduction in the cortex following LP delivery. AAV9 and Anc80L65 efficiently transduced spinal cord ventral horn motor neurons with both routes of administration.

[0464] Specifically, Anc80L65 transducing both neurons and astrocytes. Rare oligodendrocyte transduction was also observed in cortical regions with Anc80L65, however no microglial cells were found to be transduced using the microglial marker Iba1. AAV9 showed a similar tropism in the nonhuman primate CNS to Anc80L65, transducing largely neurons and astrocytes. Similar to Anc80L65 no microglial double labeling was observed. Oligodendrocyte transduction was not observed with AAV9, however there was less transduction overall in the CNS compared to Anc80L65 making it a difficult comparison.

[0465] This work demonstrated the ability of Anc80L65 to target widespread regions of the CNS following CSF routes of delivery and outperforms the distribution of AAV9 in targeting cortical and deep brain regions. The ability of Anc80L65 to mediate efficient gene transfer and expression in neurons and astrocytes throughout the brain and spinal cord of NHPs supports use of Anc80L65 vector for treatment of a wide range of neurologic disorders.

### 7.1.1. Experimental Procedures

### 7.1.1.1 Lumbar Puncture (LP) Injection

[0466] The animal was injected with anesthesia and were placed in lateral recumbency. A 22-gauge Gerti Marx spinal needle was percutaneously inserted into the lumbar cistern (approximately L3-L4). Fluoroscopy was used for guidance if necessary. Once the needle was placed, the stylet was removed, and positive cerebral spinal fluid (CSF) flow confirmed, and predose CSF was collected. The test article syringe was then attached to the needle and the test article slowly infused by hand as a slow bolus over approximately 120±5 seconds. After completion of the injection, the needle was removed, and brief pressure was applied by hand over the injection site. Animal was then be placed in the Trendelenburg position (30°, head down) for a minimum of approximately 10 minutes. The animal was then allowed to recover naturally from anesthesia. Lumbar puncture is an intrathecal injection.

### 7.1.1.2 Intracisternal Magna (ICM) Injection

[0467] The animal was injected with anesthesia and placed in lateral recumbency. A 22-gauge spinal needle was advanced percutaneously into the cisterna magna, correct needle placement was verified by the presence of positive cerebral spinal fluid (CSF) flow, and predose CSF was collected. An appropriate Test Article syringe was then be connected to the spinal needle and the Test Article was administered by hand via a slow bolus injection (120±5 seconds). After completion of the injection, the syringe was removed, and pressure was applied briefly by hand. Animal was then placed in the Trendelenburg position (30°, head down) for a minimum of approximately 10 minutes. The animal was then be allowed to recover naturally from anesthesia.

### 7.1.1.3 Immunohistochemistry (IHC)

[0468] Two weeks after injection, tissue samples were collected and preserved in 10% neutral buffered formalin (NBF) for 48-72 hours, then transferred to 70% ethanol. The brain was placed into a pre-chilled brain matrix and sliced into 4 mm sections, then hemisected. Even-numbered hemisected slabs were preserved in 10% NBF and used for immunohistochemistry (IHC). Odd-numbered hemisected brain slabs were frozen on dry ice and stored at −60 to −90° C. until used for ddPCR analysis.

[0469] For detection of GFP expression, slides were incubated with antibodies against GFP (GeneTex, GTX₂₀₂₉₀) diluted 1:1,000 in Monet Blue Diluent (Biocare Medical, PD901). The slides were washed with Valent Wash Buffer (Biocare Medical, VLT8013MX) and incubated with anti-rabbit antibody conjugated with Farma HRP for 30 minutes (Biocare Medical, BRR4009). The slides were washed and then reacted with Betazoid DAB for 5 minutes (Biocare Medical, BDB2004) and counterstained with Mayer's Hematoxylin for 5 minutes (StatLab, HXMMHPT). After the reactions with Betazoid DAB or Mayer's Hematoxylin, the slides were washed with Aqua Rinse (Biocare Medical, VLT8012MX).

[0470] GFP staining by 3,3′-diaminobenzidine (DAB): Sections (3 per each 6-mm block: separation of 2 mm) were washed 3 times in PBST followed by treatment with 1% H2O2. Sections were stained with the primary anti-GFP antibody diluted 1:1000 in Da Vinci Green Diluent as previously described (Lluis Samaranch, Ernesto A. Salegio, Waldy San Sebastian, Adrian P. Kells, John R. Bringas, John Forsayeth, and Krystof S. Bankiewicz Human Gene Therapy. Volume: 24 Issue 5: Mar. 20, 2013, incorporated herein by reference).

[0471] For detection of Trastuzumab expression, slides were incubated with antibodies against IgG (Fc). IgG (Fc) can serve as a proxy for Trastuzumab expression.

### 7.1.1.4 Double-Immunofluorescence:

[0472] Fluorescence immunostaining of different cellular markers (NeuN, GFAP, Iba1, Olig2+) with GFP as previously described (San Sebastian et al., 2013).

### Sample Collection:

[0473] Tissue samples were collected and preserved in 10% neutral buffered formalin (NBF) for 48-72 hours, then transferred to 70% ethanol. The brain was placed into a pre-chilled brain matrix and sliced into 4 mm sections, then hemisected. Even-numbered hemisected slabs were preserved in 10% NBF and used for immunohistochemistry (IHC). Odd-numbered hemisected brain slabs were frozen on dry ice and stored at −60 to −90° C. until used for ddPCR analysis.

### Immunohistochemistry Protocol for GFP Expression:

[0474] Bake slides for 15 minutes at 55-65 Celsius to remove paraffin
[0475] Load slides onto Valent Staining Platform (Biocare Medical)
[0476] Val DePar 8 minutes (Biocare Medical, VLT800 I MM)
[0477] Lo pH1 AR at 98 Celsius for 60 minutes (Biocare Medical, VLT8004MM)
[0478] Peroxidazed 1 for 5 minutes (Biocare Medical, PX₉₆₈)
[0479] Background Punisher for 5 minutes (Biocare Medical, BP974)
[0480] GFP (GeneTex, GTX₂₀₂₉₀) 1:1,000 in Monet Blue Diluent (Biocare Medical, PD901)
[0481] Rabbit on Farma H1RP for 30 minutes (Biocare Medical, BRR4009)
[0482] Betazoid DAB for 5 minutes (Biocare Medical, BDB2004)
[0483] Counterstain with Mayer's Hematoxylin for 5 minutes (StatLab, HXMMHPT)

[0484] Valent Wash Buffer (Biocare Medical, VLT8013MX) was used after all steps expect for Betazoid DAB and Mayer's Hematoxylin. Aqua Rinse (Biocare Medical, VLT8012MX) was used after these reagents.

Dual Staining Methods for the IBA1, NeuN and GFAP with the GFP:

### Reagents:

[0485] GFP (GeneTex, GTX20290) 1:1,000, GFAP (Cell Signaling, 3670) 1:500 in Monet Blue Diluent (Biocare Medical, PD901)
[0486] GFP (GeneTex, GTX20290) 1:1,000, IBA1 (Millipore, MABN92) 1:250 in Monet Blue Diluent (Biocare Medical, PD901)
[0487] GFP (GeneTex, GTX20290) 1:1,000, NeuN (Abcam, ab104224) 1:250 in Monet Blue Diluent (Biocare Medical, PD901)

### Protocol:

[0488] Bake slides for 15 minutes at 55-65 Celsius to help remove paraffin
[0489] Load slides onto Valent Staining Platform (Biocare Medical)
[0490] Val DePar 8 minutes (Biocare Medical, VLT8001MM)
[0491] Lo pH AR at 98 Celsius for 60 minutes (Biocare Medical, VLT8004MM)
[0492] Peroxidazed 1 for 5 minutes (Biocare Medical, PX968)
[0493] Background Punisher for 10 minutes (Biocare Medical, BP974)
[0494] Primary Antibody Cocktail: Rabbit 594 nm (Invitrogen, A32740) 1:500, Mouse 488 nm (Invitrogen, A−21202) 1:500, cocktailed together in Da Vinci Green for 60 minutes (Biocare Medical, PD900)
[0495] Coverslip with Prolong Diamond Antifade Reagent with DAPI
[0496] Valent Wash Buffer (Biocare Medical, VLT8013MX) was used after all steps.

### 7.1.1.5 Ddpcr

[0497] After euthanasia and exsanguination, brains were placed into a pre-chilled brain matrix and sliced into 4 mm sections, then hemisected. Odd numbered hemisected slabs were frozen over dry ice, then stored at −60° C. to −90° C. until analyzed. Brain regions were isolated using 2 mm or 3 mm diameter tissue punches (Miltex, Cat. No.: 95039-098 and 98PUN6-4) prior to nucleic acid isolation.

[0498] Tissues were homogenized in a Qiagen Tissuelyser II (20rps for 2 min) in lysis buffer from the Qiagen Dneasy Blood and Tissue Kit or the Qiagen RNeasy Lipid Tissue Mini Kit following the standard Qiagen protocol. Samples were eluted in 50 μL of buffer. Prior to analysis, DNA and RNA concentration and quality were determined using a NanoDrop One, using the nucleic acid (DNA or RNA) program. DNA samples were analyzed for biodistribution of vector genomes using a duplexed ddPCR method targeting the transgene (eGFP) and a reference gene (RPP30). RNA samples were analyzed for expression of the eGFP transgene using a duplexed, one-step RT-ddPCR method) and a reference gene (RPP30).

### Dual Staining Method for Olig22 and GFP (Performed at StageBio):

### Reagents:

[0499] GFP (GeneTex, GTX₂₀₂₉₀) 1:1,000, Olig2 (Millipore, MABN50) 1:250 in Monet Blue Diluent (Biocare Medical, PD901)

### Protocol:

[0500] Bake slides for 15 minutes at 55-65 Celsius to help remove paraffin
[0501] Load slides onto Valent Staining Platform (Biocare Medical)
[0502] Val DePar 8 minutes (Biocare Medical, VLT8001MM)
[0503] Lo pH AR at 98 Celsius for 60 minutes (Biocare Medical, VLT8004MM)
[0504] Peroxidazed for 5 minutes (Biocare Medical, PX₉₆₈)
[0505] Background Punisher for 10 minutes (Biocare Medical, BP974)
[0506] Primary Antibody Cocktail: Biotinylated Mouse (Vector Laboratories, BA-9200) 1:500 in Da Vinci Green Diluent
[0507] Rabbit 594 nm (Invitrogen, A32740) 1:500, Streptavidin 488 nm (Invitrogen, S11223) 1:500, cocktailed together in Da Vinci Green for 60 minutes (Biocare Medical, PD900)
[0508] Coverslip with Prolong Diamond Antifade Reagent with DAPIValent Wash Buffer (Biocare Medical, VLT8013MX) was used after all steps.

### DNA Analysis:

[0509] For isolation of DNA, tissues were homogenized in a Qiagen Tissuelyser II (20rps for 2 min) in lysis buffer from the Qiagen DNeasy Blood and Tissue Kit (Part No. 69506), following the standard Qiagen protocol. Samples were eluted in 50 uL of AE buffer. Prior to analysis, DNA concentration and quality were determined using a NanoDrop One, using the nucleic acid (DNA) program.

[0510] DNA samples were analyzed for biodistribution of vector genomes using a duplexed ddPCR method targeting the transgene (eGFP or Trastuzumab) and a reference gene (RPP30). Specific primer probe sequences are listed in the table below.

| | | SEQ | |
|---|---|---|---|
| Name | Target | ID NO: | Sequence |
| pCAG.eGFP_DNA | eGFP | 55863 | GCTTCTGGCGTGTGACC |
| FWD Set 4 | | | |
| pCAG.eGFP_DNA | eGFP | 55864 | TGATGAGACAGCACAAT |
| REV Set 4 | | | AACCAG |
| pCAG.eGFP_DNA | eGFP | 55865 | FAM/TTTCCTACA/ZEN/ |
| PRB Set 4 | | | GCTCCTGGGCAACG/ |
| | | | 3IABKFQ |
| RPP30_NHP_DNA | RPP30 | 55866 | GAACCTGAAACTTCACA |
| FWD Set 3 | | | |
| RPP30_NHP_DNA | RPP30 | 55867 | CCATTTAAGGAGTGGTTAT |
| REV Set 3 | | | |
| RPP30_NHP_DNA | RPP30 | 55868 | HEX/TAAAGTCTA/ZEN/ |
| PRB Set 3 | | | CGCACTACCACTTAC/ |
| | | | 3IABKFQ |

[0511] The samples were analyzed following the standard Bio-Rad ddPCR protocol for probe-based analysis of DNA biodistribution. Briefly, reaction mixes containing the 2 primer probe sets, DNA samples and Bio-Rad ddPCR Supermix for Probes (no dUTP) (Part No. 186-3024) were prepared according to the recipe in the table below.

| Reagent | Vol/reaction |
|---|---|
| 2X ddPCR Supermix | 10 |
| 20X RPP30 PnP | 1 |
| 20X eGFP PnP or 20X Trastuzumab PnP | 1 |
| Water | 3 |
| Sample* | 3 |

*DNA samples were pre-diluted to 2 ng/μL (liver), 10 ng/μL (DRG, no dilution for the samples with the concentration <10 ng/μL) and 20 ng/μL (other samples) using nuclease-free water.

[0512] After droplet generation, reactions were amplified using the thermal cycling program indicated below.

| Parameter | Time | Temp ° C. | Cycles |
|---|---|---|---|
| Enzyme Activation | 10 min | 95° C. | 1 |
| Denaturation | 30 sec | 94° C. | 40 |
| Annealing | 30 sec | 54° C. | |
| Extension | 60 sec | 74° C. | |
| Enzyme deactivation | 10 min | 98° C. | 1 |
| Hold | ∞ (Press Cancel Run to end | 4° C. | 1 |
| | program) | | |

| | |
|---|---|
| Ramp Rate | 2° C./sec |
| Volume | 40 μL |
| Lid Temperature | 105° C. |

[0513] Data is reported in vector genomes copied per diploid genome (VGC/DG). The formula for calculating the output is VGC/DG=(eGFP cp/μL÷RPP30 cp/μL)×2 for eGFP or VGC/DG=(Trastuzumab cp/μL÷RPP30 cp/μL)×2 for Trastuzumab.

### RNA Analysis:

[0514] For isolation of mRNA, tissues were homogenized in a Qiagen Tissuelyser II (20rps for 1 min) in 1 ml of Qiazol from the Qiagen RNeasy Lipid Tissue Mini Kit (Part No. 74804), following the standard Qiagen protocol. Samples were eluted in 50 L of Nuclease-free water. Prior to analysis, RNA concentration and quality were determined using a NanoDrop One, using the nucleic acid (RNA) program.

[0515] DNA samples were analyzed for expression of the eGFP transgene or the Trastuzumab transgene using a duplexed, one-step RT-ddPCR method targeting the transgene (eGFP or Trastuzumab) and a reference gene (RPP30). Specific primer probe sequences are listed in the table below.

| | | SEQ ID | |
|---|---|---|---|
| Name | Target | NO: | Sequence |
| pCAG.eGFP | eGFP | 55869 | CACAGCTCCTGGGCAAC |
| RNA FWD Set 5 | | | |
| pCAG.eGFP | eGFP | 55870 | AGCTCGACCAGGATGGG |
| RNA REV Set 5 | | | |
| pCAG.eGFP | eGFP | 55871 | FAM/ATGGTGAGC/ZEN/ |
| RNA PRB Set 5 | | | AAGGGCGAGGA/ |
| | | | 3IABKFQ |
| RPP30 NHP R | RPP30 | 55872 | GCGGGTTCTGACCTGAAG |
| NA FWD Set 3 | | | |
| RPP30 NHP R | RPP30 | 55873 | TCCCTGTACAATCGGTAA |
| NA REV Set 3 | | | AGTTG |
| RPP30 NHP R | RPP30 | 55874 | HEX/CGGCTCACC/ZEN/ |
| NA PRB Set 3 | | | TTGGCTATTCAGTTGT/ |
| | | | 3IABkFQ |

[0516] The samples were analyzed following the standard Bio-Rad RT-ddPCR protocol for probe-based analysis of RNA expression. Briefly, reaction mixes containing the 2 primer probe sets, RNA samples and Bio-Rad One-Step RT-ddPCR Advanced Kit for Probes (Part No. 186-4021) were prepared according to the recipe in the table below.

| Reagent | Vol (uL)/reaction |
|---|---|
| Supermix | 5 |
| 300 mM DTT | 1 |
| Reverse Transcriptase | 2 |
| 20X RPP30 PnP | 1 |
| 20X eGFP PnP or 20x Trastuzumab PnP | 1 |
| Nuclease-free water | 5 |
| RNA Sample* | 5 |

*RNA samples were pre-diluted to 20 ng/μL using nuclease-free water.

[0517] After droplet generation, reactions were amplified using the thermal cycling program indicated below.

| Parameter | Time | Temp ° C. | Cycles |
|---|---|---|---|
| Reverse Transcription | 60 min | 48° C. | 1 |
| Enzyme Activation | 10 min | 95° C. | 1 |
| Denaturation | 30 sec | 94° C. | 40 |
| Annealing | 30 sec | 57 | |
| Extension | 60 sec | 74° C. | |
| Enzyme deactivation | 10 min | 98° C. | 1 |
| Hold | ∞ (Press Cancel Run | 4° C. | 1 |
| | to end program) | | |

| | |
|---|---|
| Ramp Rate | 2° C./sec |
| Volume | 40 μL |
| Lid Temperature | 105° C. |

[0518] Data is reported as 00 eGFP expression, which is calculated according to the formula, 00 eGFP expression=(eGFP cp/μL÷RPP30 cp/μL)×100 or 00 Trastuzumab expression=(Trastuzumab cp/μL÷RPP30 cp/μL)×100.

### 7.1.2. Broad CNS Penetration and Wide Distribution of Anc80L65 Compared to AAV9

[0519] The objective of this study is to determine the biodistribution and initial feasibility of Anc80L65 vector compared to AAV9 vector, when administered by a single lumbar puncture or intra-cisterna magna administration. The results confirm broad penetration and wide distribution of Anc80L65 compared to AAV9.

[0520] Two AAV constructs were used in the experiment: (i) Anc80L65-CAG-GFP, and (ii) AAV9-CAG-GFP, each including an AAV genome construct containing a coding sequence of GFP. GFP was used to detect distribution of AAVs and expression of the transgene. Cynomolgus monkeys were used as the subject animals.

[0521] Total 14 animals were divided into 6 groups as summarized in the FIG. 1 and TABLE 2. Animals in Group 1 and 4 are control animals administered with vehicle. Animals in Group 2 and 5 were administered with 4E13vg (viral genome or GC) of Anc80L65, and animals in Group 3 and 6 were administered with 4E13vg of AAV9. Two routes of administration were tested—animals in Group 1-3 were administered by ICM, and animals in Group 4-6 were administered by LP. Animals were sacrificed on day 14 or 15 after the vehicle or AAV administration and their organ samples were collected for analysis.

TABLE 2
NHP Experiment Design

| | | | | Dose | Dose Con- | |
|---|---|---|---|---|---|---|
| Group | Test | Dose | Dose Level | Volume | centration | # of |
| No. | Material | Route | vg/animal | (mL) | (vg/mL) | animals |
| 1 | Vehicle | ICM | 0 | 2 | 0 | 1 |
| 2 | Anc80L65 | ICM | 4E13 | 2 | 2E13 | 3 |
| 3 | AAV9 | ICM | 4E13 | 2 | 2E13 | 3 |
| 4 | Vehicle | LP | 0 | 2 | 0 | 1 |
| 5 | Anc80L65 | LP | 4E13 | 2 | 2E13 | 3 |
| 6 | AAV9 | LP | 4E13 | 2 | 2E13 | 3 |

[0522] Collected samples were processed for IHC and stained with an antibody against GFP. Images of the IHC staining are provided in FIGS. 2A-9 and 22A-22D. FIGS. 2A-2D provide immunohistochemistry (IHC) images of cortical tissue from the brain sections obtained from NHPs administered with Anc80L65 or AAV9 by intracisternal magna injection or lumbar-puncture. FIGS. 22A-22D provide IHC images of brain sections of cortex and caudate nucleus obtained from NHPs administered with Anc80L65 or AAV9 by intracisternal magna injection.

[0523] These results show transgene (GFP) expression capabilities of Anc80L65 are superior compared to AAV9 both by ICM and LP administrations. More cells were stained for GFP expression in the cortex and caudate nucleus after administration of Anc80L65 compared to AAV9. FIGS. 2A-2D further show that ICM administration provides better results than LP administration with both vectors (i.e., Anc80L65 and AAV9) in terms of breadth of distribution within the brain.

[0524] IHC results in other parts of the brain are also provided—specifically, in the cortex (FIGS. 3A-3C, 8A-8C and 9), ependyma and caudate nucleus (FIGS. 4A-4B), caudate nucleus (FIGS. 5A-5B), substantia nigra (FIG. 6), and perivascular cells (FIG. 7A-7B). The results show broad penetration and wide distribution of Anc80L65 compared to AAV9.

[0525] To characterize cell types expressing GFP after Anc80L65 or AAV9 administration, the NHP brain sections were double stained for GFP and a cell-type specific marker. FIGS. 26A-26F and FIGS. 27A-27F provide the images of the double staining —-against GFP and a marker for neurons (NeuN) (FIGS. 26A and 26D), against GFP and a marker for astrocytes (FIGS. 26B and 26E), against GFP and a marker for microglial cells (iba1), against GFP and a marker for oligodendrocyte (FIGS. 27A, 27B and 27C) in the motor cortex transfected with Anc80L65 or AAV9. In all cases, GFP+ cells are shown in red, the cell specific marker is shown in green, and the merged images are shown with double-labeled cells in yellow/orange (arrows). The staining results show that Anc80L65 can mediate efficient transgene expression in neurons, astrocytes and oligodendrocytes across large regions of the NHP brain following a single LP or ICM injection. This suggests that Anc80L65 can be used for clinical applications to treat a wide range of neurologic disorders, particularly using a relatively noninvasive route of administration such as LP.

[0526] Transgene transfer and expression capabilities of Anc80L65 and AAV9 administered by ICM or LP to NHPs were also tested with ddPCR, by measuring amounts of DNA and mRNA of the transgene (eGFP) in the NHP brain and spinal cord 2 weeks after ICM or LP delivery. DNA genome copies and mRNA transcript copies of the transgene (eGFP) were quantified in comparison to the amounts of DNA genome copies or mRNA transcript copies of a house keeping gene (RPP30), respectively. Specifically, DNA genome copies are reported as vector genomes copies per diploid genome (VGC/DG). The formula for calculating the output is VGC/DG=(eGFP cp/μL÷RPP30 cp/μL)×2. RNA transcript copies are reported as % eGFP expression, which is calculated according to the formula, % eGFP expression=(eGFP cp/μL÷RPP30 cp/μL)×100.

[0527] Viral DNA genome copies (VGCs) per diploid genome (i.e., VGCs per cell) measured in the experiment are provided in FIGS. 13A-17. Each figure provides data corresponding to different brain regions or liver, including cerebellar cortex (FIG. 13A), dorsal root ganglia, cervical (FIG. 13B), dorsal root ganglia, lumbar (FIG. 14A), frontal cortex (FIG. 14B), liver (FIG. 15A), motor cortex (FIG. 15B), spinal cord, cervical (FIG. 16A), spinal cord, lumbar (FIG. 16B), and sciatic nerve (FIG. 17). The VGCs data are further analyzed and summarized in FIG. 25.

[0528] The data show Anc80L65 led to more vector genome copies per cell in frontal cortex, motor cortex and spinal cord (cervical and lumbar) compared with AAV9, irrespective of injection route as shown in FIG. 25.

[0529] RNA transcripts measured from the experiment are provide in FIGS. 18A, 18B, 19A, 19B, 20A, 20B and 21. Each figure provides data corresponding to different brain regions, including caudate nucleus (FIG. 18A), frontal cortex (FIG. 18B), globus pallidus (FIG. 19A), motor cortex (FIG. 19B), parietal cortex (FIG. 20A), putamen (FIG. 20B), and substantia nigra (FIG. 21). Administration of Anc80L65 induced higher levels of GFP expression in several brain regions, including caudate nucleus after ICM administration, globus pallidus after LP administration, motor cortex after both ICM and LP administration, parietal cortex after both ICM and LP administration, and putamen after LP administration.

[0530] One-way statistical analysis of the expression data is provided in FIGS. 10A-FIG. 12B. The analysis results are also tabulated in FIG. 23 and FIG. 24. FIGS. 10A-10C and 23 provide analysis of the data from the frontal cortex (FIG. 10A, FIG. 23), motor cortex (FIG. 10B, FIG. 23); and parietal lobe of the cortex (FIG. 10C, FIG. 23). The data show significantly higher expression of GFP in the cortex of the animals injected with Anc80L65 by ICM or LP compared to AAV9 by ICM or LP. FIGS. 11A-11B, FIGS. 12A-12B and FIG. 24 show similar analysis in caudate nucleus (FIG. 11A, FIG. 24), globus pallidus (FIG. 11B, FIG. 24), putamen (FIG. 12A, FIG. 24) and substantia nigra (FIG. 12B, FIG. 24). These figures also show significantly higher GFP expression in the most brain areas of animals injected with Anc80L65 by ICM or LP compared to AAV9 by ICM or LP. These results suggest that both ICM and LP injections of Anc80L65 can be effective ways of delivering and expressing a transgene, superior to ICM administration of AAV9.

[0531] The statistical analysis of the ddPCR data is also provided below in TABLE 3. The table provides fold differences and p-value results from the Tukey-Kramer HSD test showing comparisons of GFP transcript (RNA) expression in various tissues between Anc80L65 (ICM) vs. AAV9 (ICM), Anc80L65 (LP) vs. AAV9 (ICM), and Anc80L65 (LP) vs. AAV9 (LP). Positive differences indicate the magnitude of expression advantage attributed to Anc80L65. Statistically significant p-Values are indicated in red (asterisk). The analysis shows that superiority of Anc80L65 is statistically significant compared to AAV9 in various brain regions.

TABLE 3

| | | | Anc80L65 Expression | |
|---|---|---|---|---|
| Tissue | Treatment 1 | Treatment 2 | Advantage | p-Value |
| Caud. Nuc. | ICM_+_Anc80L65 | ICM_+_AAV9 | +7.0 | 0.00* |
| Caud. Nuc. | LP_+_Anc80L65 | ICM_+_AAV9 | +0.8 | 0.96 |
| Caud. Nuc. | LP_+_Anc80L65 | LP_+_AAV9 | +0.9 | 0.95 |
| Frontal | ICM_+_Anc80L65 | ICM_+_AAV9 | +6.6 | 0.35 |
| Ctx. | | | | |
| Frontal | LP_+_Anc80L65 | ICM_+_AAV9 | +8.2 | 0.17 |
| Ctx. | | | | |
| Frontal | LP_+_Anc80L65 | LP_+_AAV9 | +6.4 | 0.36 |
| Ctx. | | | | |
| Glob. Pal. | ICM_+_Anc80L65 | ICM_+_AAV9 | +0.2 | 0.88 |
| Glob. Pal. | LP_+_Anc80L65 | ICM_+_AAV9 | +1.5 | <.0001* |
| Glob. Pal. | LP_+_Anc80L65 | LP_+_AAV9 | +1.4 | 0.0001* |
| Motor Ctx. | ICM_+_Anc80L65 | ICM_+_AAV9 | +9.1 | 0.01* |
| Motor Ctx. | LP_+_Anc80L65 | ICM_+_AAV9 | +16.8 | <.0001* |
| Motor Ctx. | LP_+_Anc80L65 | LP_+_AAV9 | +16.6 | <.0001* |
| Parietal | ICM_+_Anc80L65 | ICM_+_AAV9 | +13.2 | 0.02* |
| Ctx. | | | | |
| Parietal | LP_+_Anc80L65 | ICM_+_AAV9 | +23.2 | <.0001* |
| Ctx. | | | | |
| Parietal | LP_+_Anc80L65 | LP_+_AAV9 | +18.8 | 0.0004* |
| Ctx. | | | | |
| Putamen | ICM_+_Anc80L65 | ICM_+_AAV9 | +0.1 | 0.98 |
| Putamen | LP_+_Anc80L65 | ICM_+_AAV9 | +0.6 | 0.04* |
| Putamen | LP_+_Anc80L65 | LP_+_AAV9 | +0.6 | 0.05* |
| Sub. Nigra | ICM_+_Anc80L65 | ICM_+_AAV9 | +1.4 | 0.56 |
| Sub. Nigra | LP_+_Anc80L65 | ICM_+_AAV9 | −0.2 | 1.00 |
| Sub. Nigra | LP_+_Anc80L65 | LP_+_AAV9 | −3.8 | 0.01* |

### 7.2. Example 2: Analysis of AAV-^{Lib460} in Non-Human Primate to Identify Capsid Variants with Enhanced CNS Tropism

[0532] The objective of this study was to assess the 460 modified capsid proteins from the AAV-^{Lib460} in non-human primates (NHP) to identify capsids having VR VIII variants that enhance CNS tropism. The 460 targeting peptides included sequences of SEQ ID NO: 160-619. The targeting peptides were inserted between Q588 and A589 of the Anc80L65 VP1 capsid protein.

[0533] NHPs were administered the library containing 460 unique sequences of modified Anc80L65 VP1 capsid proteins (referred to herein as the AAV-^{Lib460} library) produced as described above. The targeting peptides were positioned between Q588 and A589 in VR VIII for each of the 460 modified Anc80L65 VP1 capsid variants. Controls include wild-type Anc80L65, wild-type AAV9, and wild-type AAV9-retro (as described in Tervo et al., Neuron, 92(2): 372-382 (2016), doi.org/10.1016/j.neuron.2016.09.021 and Lin et al., Molecular Brain, 13:138 (2020), doi.org/10.1186/s13041-020-00679-1).

### 7.2.1. Experimental Design

[0534] Three Cynomolgus macaques were treated as summarized in the Table 4 below. All animals received all 3 treatments with the indicated amounts or concentrations of AAV-^{Lib460} (comprising the 460 modified capsid proteins and controls (an Anc80L65 capsid protein, an AAV9 capsid protein, and an AAV9-Retro capsid protein)) (see Table 4) by ICM, IG, or IV.

TABLE 4
Experimental design for non-human primate study treated with AAV^{-medium}

| | | | | Study end |
|---|---|---|---|---|
| | | | | point |
| Treatment | | Dose | | (necropsy |
| No. | Treatment | Route | Dose (vg/animal or kg) | day 28) |
| 1 | Anc80L65- | ICM | Library-BC1(1-460): 4E+13 | 3 |
| | neurotropic peptide | | pLib-AAV9-BC1a: 8.7E+10 | |
| | (460 variants) and | | pLib-Anc80L65-BC1b: 8.7E+10 | |
| | controls | | pLib-AAV9-Retro-BC1c: 8.7E+10 | |
| 2 | Anc80L65- | IV | Library-BC2(1-460): 1.2E+14 | 3 |
| | neurotropic peptide | | pLib-AAV9-BC2a: 2.06E+11 | |
| | (460 variants) and | | pLib-Anc80L65-BC2b: 2.06E+11 | |
| | controls | | pLib-AAV9-Retro-BC2c: 2.06E+11 | |
| 3 | Anc80L65- | IG | Library-BC3(1-460): 1.4E+13 | 3 |
| | neurotropic peptide | (inter- | pLib-AAV9-BC3a: 3.06E+10 | |
| | (460 variants) and | digital) | pLib-Anc80L65-BC3b: 3.06E+10 | |
| | controls | | pLib-AAV9-Retro-BC3c: 3.06E+10 | |

### 7.2.2. Intracisternal Magna (ICM) Injection

[0535] ICM was performed as described in Example 1.

### 7.2.3. Inter-Digital Injection

[0536] The animal is injected with anesthesia and placed in lateral recumbency. A 25 gauge needle loaded with an appropriate Test Article syringe is advanced into the pad of the animals upper limb digits. In particular, the middle and index finger (which are both connected to the median nerve) on the right hand are injected with equal volumes of 0.2 mL of Test Article per site (total 0.4 mL).

### 7.2.4. Intravenous Injection

[0537] The animal was injected with anesthesia and placed in lateral recumbency. The animal was restrained in a position that allows access to the vein. The injection site was surgically prepared (shaved and cleaned aseptically). The vein was distended by compressing the vein closer to the heart than the catheter entry site. Compression was applied manually. The vein was visualized, and the catheter was inserted and advanced into the vein, the stylet was held stationary as the catheter was slowly advanced into the vessel until the hub reaches the skin puncture site. The dose was administered by a syringe through the injection cap. The catheter was flushed with sterile saline following the administration of the test article.

### 7.2.5. Analysis

[0538] Animals were sacrificed on day 28 after AAV vector administration and their tissue samples were collected for analysis. Tissue samples collected include CNS, liver, DRG, peripheral nerves, and spinal cord.

[0539] All analytical work was conducted by the Sponsor, using an analytical method developed and qualified by that laboratory.

[0540] DNA samples were analyzed for biodistribution of vector genomes in the CNS, liver, DRG, peripheral nerves, and spinal cord using NGS.

[0541] Gene transfer efficacy of each AAV vector was assessed by measuring mRNA transcript in the CNS, liver, DRG, peripheral nerves, and spinal cord using NGS.

[0542] Appendix A provides a rank order list of the 64 targeting peptides selected among 460 peptides based on their CNS targeting capability when incorporated into the AAV capsid. The rank is based on gene transfer efficacy assessed by measuring mRNA transcripts in the CNS. The list provides SEQ ID NO of targeting peptide; peptide sequence; and LogFC mean administered by ICM. See Appendix A.

### 7.3. Example 3: Analysis of AAV-^{Lib1} in Non-Human Primate to Identify Capsid Variants with CNS Tropism

[0543] The objective of this study was to assess the modified capsid proteins in the AAV-^{mini} library (i.e., the targeting peptides (and insertion sites) as described, in part, in FIGS. 31-33 and SEQ ID NOs: 3-9, 11-19 or 21-28) in non-human primates (NHP) to identify capsids having targeting peptides (and/or insertion sites) that enhance CNS tropism. Full length modified capsid proteins including the targeting peptides described above are as described in SEQ ID NOs: 34-38 or 55820-55847.

[0544] NHPs were administered the AAV-^{mini} library containing rAAVs having the modified capsid proteins sequences produced as described above. The targeting peptides (SEQ ID NOs: 3-9, 11-19 or 21-28) were inserted in VR VIII in either Anc80L65 VP1 capsid proteins or AAV9 VP1 capsid proteins as described, in part, in FIGS. 31-33. Additionally, Anc80L65 capsid proteins comprising one or more additional modifications as described in FIGS. 32A-32D were tested. Specifically, AFT-6, AFT-7 and AFT-8 VP1 capsid proteins were tested. AFT-6 includes Anc80L65 VP1 capsid protein backbone with the Anc80L65 VR VIII region replaced with the AAV9 VR VIII region (SEQ ID NO: 29). AFT-7 includes Anc80L65 VP1 capsid protein backbone with the Anc80L65 VR IV and VIII regions replaced with the AAV9 VR IV region (SEQ ID NO: 30) and AAV9 VIII region (SEQ ID NO: 29), respectively. AFT-8 includes Anc80L65 VP1 capsid protein backbone with the Anc80L65 VR IV, VR V and VIII regions replaced with the AAV9 VR IV region (SEQ ID NO: 30), AAV9 VR V region (SEQ ID NO: 31) and AAV9 VIII region (SEQ ID NO: 29), respectively.

[0545] Controls included pLib-AAV9, pLib-AAV9-D1, pLib-Anc80L65 (pLib-AAV9-C1 (AAV9 comprising a targeting peptide having a sequence of SEQ ID NO: 55854 inserted between Q558 and A589), pLib-AAV9-C2 (AAV9 comprising a targeting peptide having a sequence of SEQ ID NO: 55855 inserted between Q558 and A589), pLib-AAV9-C3 (AAV9 comprising a targeting peptide having a sequence of SEQ ID NO: 55856 inserted between Q558 and A589) in library ATP292).

### 7.3.1. Experimental Design

[0546] Three animals were treated as summarized in Table 5 below. Immunosuppression of the animals began 7 days prior to vector administration. The animals were administered with the indicated amounts or concentrations of AAV-^{mini} (comprising the 37 modified capsid proteins and controls (see Table 5)) by IV.

TABLE 5
Experimental design for non-human primate study with AAV^{-mini} Library

| | | | | | | Study end |
|---|---|---|---|---|---|---|
| Group | | | Dose | Number of | Dose (vg/animal | point (in- |
| No. | Treatment | Strain | Route | animals | or kg) | life days)) |
| 1 | AAV9/Anc80L65- | Cyno | IV | 3 | 2E+13 (5.4E+11 | 28 |
| | AFT mini library | | | | per variant) | |
| | (37 variants) | | | | | |

### 7.3.2. Analysis

[0547] Animals were sacrificed on day 28 after AAV vector administration and their organ samples were collected for analysis. Tissue samples collected included CNS, liver, DRG, peripheral nerves, and spinal cord.

[0548] All analytical work was conducted by the Sponsor, using an analytical method developed and qualified by that laboratory.

[0549] DNA samples were collected and will be analyzed for biodistribution of vector genomes in the CNS, liver, DRG, peripheral nerves, and spinal cord using NGS.

[0550] Gene transfer efficacy of each AAV vector was assessed by measuring mRNA transcript in the CNS, liver, DRG, peripheral nerves, and spinal cord using NGS. For these experiments, each AAV comprised a barcode mRNA, which represented the ID of a single AAV. The barcoded mRNA served as a proxy for the presence of the AAV (i.e., an AAV comprising the various capsid protein) and was the entity that was sequenced and used to quantify gene transfer efficacy. To aid quantification, comparison to a test article (TA) was used to normalize for different AAV abundances in the TA occurring due to manufacturing and also was used as a quantitative measurement of expression in the final sample. The sequenced entity in the test article (TA) was the DNA of that same barcode from the packaged capsid. Gene transfer data is shown in FIG. 34 and Table 6.

[0551] Table 6 provides a rank order list of the AAV tested where rank is based on LogFC_mean. “LogMN_FC” refers the log 2 fold-change in a sample relative to injection test article (TA). In particular, LogMN_FC refers to log 2(median normalized counts per million (CPM) in a sample for a single AAV/median normalized CPM in a test article (TA) for the same AAV). “CPM” is the count of a single AAV/total count of all AAVs×1E6. “Mean normalized CPM” is the CPM of a single AAV/median (CPM of all AAVs in a sample). Table 6 shows that AFT-6 and AFT-6** (biological replicates of AFT-6 (SEQ ID NO: 55820)) had the highest RNA expression of the tested AAVs.

[0552] FIG. 34 shows the inverse coefficient of variation (ICV) for expression levels of single AAVs in brain tissue (“Average LogMN_FC”). In particular, “LogMN_FC” refers to log 2(median normalized counts per million (CPM) in a sample for a single AAV/median normalized CPM in a test article (TA) for the same AAV). “Average LogMN_FC” refers to the mean of logMN_FC values for a single AAV across all samples from all 3 animals in a selected tissue set (i.e., brain tissue). ICV is a measure of variability where a larger value denotes less variability compared to the mean and was calculated as 1/coefficient of variation for each AAV across all samples. As shown in FIG. 34, AFT-6A and AFT-6B (biological replicates of AFT-6 (SEQ ID NO: 55820)) not only had the highest RNA expression of the AAV tested but also had the least amount of variability compared to the mean of all the AAVs tested.

[0553] Overall, this data showed that an AAV virion comprising capsid protein AFT-6 (SEQ ID NO: 55820) exhibited the highest RNA expression levels in brain tissue among the capsid proteins tested (see FIG. 34 and Table 6).

TABLE 6

| | | Capsid | | | | |
|---|---|---|---|---|---|---|
| | | protein | | | | |
| | Targeting | (including | | | | |
| | peptide in | targeting | | | | |
| | VR VIII - | peptide) - | | | logFC | scaled |
| variant_{—} | SEQ ID | SEQ ID | Final | logFC | std | logFC |
| name | NO: | NO: | rank | mean | dev | mean |
| AFT-6 | 9 | 55820 | 1 | 8.33 | 3.85 | 0.95 |
| AFT-6** | 9 | 55820 | 2 | 7.92 | 4.09 | 0.92 |
| AAV9_D1 | 9 | * | 3 | 7.82 | 3.95 | 0.92 |
| AFT-13 | 7 | 55829 | 7 | 3.12 | 3.52 | 0.68 |
| AFT-3 | 9 | 36 | 4 | 2.95 | 3.84 | 0.67 |
| AAV9_C3 | 55854 | * | 5 | 1.8 | 3.41 | 0.62 |
| AFT-22 | 18 | 55838 | 5 | 1.8 | 3.98 | 0.61 |
| AAV9_C2 | 55855 | * | 12 | 1.67 | 2.9 | 0.6 |
| AFT-20 | 16 | 55836 | 10 | 1.64 | 3.14 | 0.6 |
| AFT-4 | 9 | 37 | 10 | 1.37 | 3.9 | 0.59 |
| AAV9 | — | 61 | 14 | 1.26 | 4.39 | 0.58 |
| AFT-8 | 9 | 55823 or | 8 | 1.24 | 4.9 | 0.58 |
| | | 55824 | | | | |
| AAV9_C1 | 55856 | * | 16 | 1.24 | 3.38 | 0.58 |
| Anc80L65 | — | 161 | 8 | 1.08 | 4.17 | 0.58 |
| AFT-12 | 6 | 55828 | 16 | 0.45 | 3.95 | 0.54 |
| AFT-17 | 13 | 55833 | 15 | 0.33 | 3.89 | 0.54 |
| AFT-23 | 19 | 55839 | 21 | −0.51 | 2.45 | 0.49 |
| AFT-21 | 17 | 55837 | 18 | −0.51 | 2.59 | 0.49 |
| AFT-15 | 11 | 55831 | 13 | −0.56 | 4.58 | 0.5 |
| AFT-25 | 22 | 55841 | 23 | −0.85 | 3.46 | 0.47 |
| AFT-24 | 21 | 55840 | 22 | −1.55 | 5.6 | 0.44 |
| AFT-19 | 15 | 55835 | 18 | −1.65 | 4.22 | 0.44 |
| AFT-9 | 3 | 55825 | 18 | −1.69 | 5.05 | 0.44 |
| AFT-28 | 25 | 55844 | 24 | −1.96 | 3.66 | 0.42 |
| AFT-31 | 28 | 55847 | 33 | −2.32 | 4.1 | 0.39 |
| AFT-29 | 26 | 55845 | 30 | −2.43 | 5.35 | 0.39 |
| AFT-14 | 8 | 55830 | 24 | −2.49 | 3.87 | 0.39 |
| AFT-5 | 9 | 38 | 29 | −3.23 | 4.97 | 0.35 |
| AFT-30 | 27 | 55846 | 24 | −3.28 | 5.23 | 0.36 |
| AFT-27 | 24 | 55843 | 24 | −3.76 | 5.08 | 0.34 |
| AFT-16 | 12 | 55832 | 30 | −3.76 | 5.7 | 0.33 |
| AFT-18 | 14 | 55834 | 24 | −4.07 | 5.4 | 0.32 |
| AFT-10 | 4 | 55826 | 34 | −4.19 | 5.27 | 0.3 |
| AFT-26 | 23 | 55842 | 36 | −4.72 | 4.88 | 0.28 |
| AFT-11 | 5 | 55827 | 32 | −4.77 | 5.2 | 0.28 |
| AFT-2 | 9 | 35 | 36 | −5.65 | 6.23 | 0.23 |
| AFT-1 | 9 | 34 | 35 | −6.42 | 4.97 | 0.18 |

*denotes an AAV9 backbone (SEQ ID NO: 61) with targeting peptide inserted between Q588 and A589
**denotes technical replicate of AFT-6

[0554] Using the sequence data, enrichment scores for each tissue were calculated for each AAV variant containing a unique targeting peptide. In particular, the AAV variants including each targeting peptide were ranked based on a mean log fold-change tissue score (see, e.g., Table 6). After determining a sequence count from sequence read data (FASTQ) following sequencing, AAV variants containing a unique targeting peptide were counted and normalized, followed by performing a tissue enrichment analysis for each tissue. Tissue enrichment analysis included Sequence Activity Relationship (SAR) analysis, Network analysis, and structural modeling. SAR analysis identified particular amino acid at a specific capsid position or sequence motifs (combination of amino acids at several positions) that significantly affects tissue tropism. Network analysis identified modules of variants that shared amino acid or peptide sequences of top performing variants. Structural modeling provided understanding of the structural effect of significant amino acids at specific capsid positions for mechanistic hypothesis formulation.

[0555] As shown in FIG. 35, SAR analysis identified one modified AAV capsid protein (i.e., an Anc80L65 capsid comprising an N2 targeting peptide (SEQ ID NO: 9; C4) located in VR VIII (full capsid sequence is referred to as AFT-6 (SEQ TD NO: 55820)) that increased tissue enrichment in on-target CNS tissues (as indicated in FIG. 35) as compared to AAV9. In particular, the Anc80L65 modified AAV capsid protein comprising the targeting peptide N2 has 100-1000 increased expression in various brain regions. On-target CNS tissues included frontal lobe, motor cortex, parietal lobe, occipital lobe, temporal lobe, cerebellum, putamen, thalamus, globus pallidus, caudate, and substantia nigra. This Anc80L65 modified AAV capsid protein comprising the N2 targeting peptide also had decreased tissue enrichment in off-target CNS tissues (as indicated in FIG. 35) as compared to AAV9. Off-target CNS tissues included dorsal root ganglion; such as cervical, lumbar, thoracic; and liver.

[0556] Additional SAR analysis identified three modified AAV capsid proteins (e.g., an Anc80L65 modified AAV capsid protein comprising a targeting peptide N2 (SEQ ID NO: 9) inserted into VR VIII (full capsid sequence is referred to as AFT-6 (SEQ ID NO: 55820)); an AAV9 comprising an N3 targeting peptide (PLNGSVHLY (SEQ ID NO: 3603) positioned in VR VIII between amino acid residues 586 and 589, replacing amino acids A587 and Q588, and an AAV9 comprising an N4 targeting peptide (PLNGTVHLY (SEQ ID NO: 1232) positioned in VR VIII between amino acid residues 586 and 589, replacing amino acids A587 and Q588) that increased tissue enrichment in various CNS tissues compared to controls (see FIG. 36 and FIG. 37).

[0557] Overall, this data showed that a subset of the modified AAV capsid proteins described herein have optimal CNS tropism.

### 7.4. Example 4: Analysis of AAV-^{Lib1} in Non-Human Primate to Identify Capsid Variants with CNS Tropism

[0558] The objective of this study was to assess the 54,000 modified capsid proteins comprising the AAV-^{Lib} library (i.e., the targeting peptides of Appendix A and inserted between positions Q586 and A589 in AAV, thereby replacing A587 and Q588) in non-human primates (NHP) to identify capsids having targeting peptides that enhance CNS tropism.

[0559] NHPs were administered a library containing about 54,000 unique sequences of modified capsid proteins, which is referred to herein as the AAV-^{Lib} library. The targeting peptides are positioned in VR VIII in AAV9 VP1 capsid proteins between amino acid residues 586 and 589, replacing amino acids A587 and Q588. Targeting peptides includes the sequences as described in SEQ ID NOs:620-55819 and 55857-55859. For example, the amino acid modifications (insertions, deletions, substitutions) in the VR VIII region of AAV9 include those shown in FIG. 33. Controls include pLib-AAV9, pLib-AAV9-C4, pLib-AAV9-C1, pLib-AAV9-C2, pLib-AAV9-C3.

### 7.4.1. Experimental Design

[0560] Three animals were treated as summarized in Table 6 below. Immunosuppression of the animals begins 7 days prior to vector administration. The animals are administered with the indicated amounts or concentrations of AAV-Lib (comprising the about 55,200 modified capsid proteins and controls) (see Table 8) by IV. Animals are sacrificed on day 28 after AAV vector administration and their organ samples are collected for analysis.

TABLE 8
Experimental design for non-human
primate study with AAV^{-Lib} Library

| Group | Treat- | Dose | Dose Vol | Dose (vg/ | Study end point |
|---|---|---|---|---|---|
| No. | ment | Route | (ml) | animal or kg) | (necropsy day 28) |
| 1 | AAV^{-Lib} | IV | 2.0 | 2E+13 | 3 |
| | | | | (3.7E+8 per | |
| | | | | variant) | |

### 7.4.2. Analysis

[0561] Animals were sacrificed on day 28 after AAV vector administration and their organ samples are collected for analysis. Tissue samples include: Basal Ganglia_Caudate; Basal Ganglia_Globus Pallidus; Basal Ganglia_Substantia Nigra; Cerebellar Cortex; DRG_Cervical; DRG_Lumbar; DRG_Thoracic; Frontal Lobe; Liver; Occipital Lobe; Parietal Lobe; Putamen Sensory, Motor Cortex; Temporal Lobe; and Thalamus.

[0562] DNA samples were analyzed for biodistribution of vector genomes in the CNS, liver, DRG, peripheral nerves, and spinal cord using NGS (data not shown).

[0563] Gene transfer efficacy of each AAV vector was assessed by measuring mRNA transcript in the tissues described in Appendix B. Tissue enrichment data is also presented in Appendix B, which is hereby incorporated by reference in its entirety. The data represents Average LogMN_FC measured and calculated as described above. Appendix B provides 750 targeting peptides selected among 54,000 modified capsid proteins for their CNS targeting capability.

[0564] Overall, this data showed that a subset of the modified AAV capsid proteins, (e.g., capsid proteins provided in Appendix B), have optimal CNS tropism.

[0565] Table 7 provides CNS-targeting data (Average LogMN_FC) of some of the AAV vectors, AAV9 or AAV9 with a targeting peptide (N3, N4 or N5).

TABLE 7

| | | | Basal | Basal | | |
|---|---|---|---|---|---|---|
| | Peptide | Basal | Ganglia_{—} | Ganglia_{—} | | |
| | (SEQ ID | Ganglia_{—} | Globus | Substantia | Cerebellar | DRG_{—} |
| | NO) | Caudate | Pallidus | Nigra | Cortex | Cervical |
| AAV9-N3 (PLNGSVHLY) | 3603 | 5.851529775 | 8.06713 | 8.367424 | 8.073194 | 5.790573 |
| AAV9-N4 (PLNGTVHLY) | 1232 | 8.07772938 | 11.44512 | 7.010849 | 9.781078 | 5.13861 |
| AAV9-N5 (PLNGVVHLY) | 5363 | 10.01029843 | 10.1324 | 7.552607 | 7.226381 | 4.15682 |
| AAV9 | Control | 0.858062602 | 0.443734 | 6.192864 | NA | 8.692444 |
| | Peptide | | | | | |
| | (SEQ ID | DRG_{—} | DRG_{—} | Frontal | | Occipital |
| | NO) | Lumbar | Thoracic | Lobe | Liver | Lobe |
| AAV9-N3 (PLNGSVHLY) | 3603 | 6.54552 | 7.087162 | 7.886621 | 4.143932 | 13.85746 |
| AAV9-N4 (PLNGTVHLY) | 1232 | 11.95689 | 7.175497 | 10.41715 | 6.059846 | 7.449502 |
| AAV9-N5 (PLNGVVHLY) | 5363 | 9.225067 | 10.0492 | 9.666616 | 4.089119 | 7.404831 |
| AAV9 | Control | 4.160245 | 10.91645 | 1.463794 | 7.069782 | NA |
| | Peptide | | | Sensory | | |
| | (SEQ ID | Parietal | | Motor | Temporal | |
| | NO) | Lobe | Putamen | Cortex | Lobe | Thalamus |
| AAV9-N3 (PLNGSVHLY) | 3603 | 9.32805 | 20.60432 | 8.240024 | 5.962567 | 10.27073 |
| AAV9-N4 (PLNGTVHLY) | 1232 | 8.248708 | 10.17588 | 7.023651 | 7.868765 | 10.10989 |
| AAV9-N5 (PLNGVVHLY) | 5363 | 9.830613 | 10.34292 | 9.222774 | NA | 10.00561 |
| AAV9 | Control | NA | 0.268243 | 5.332247 | 1.244784 | 8.688741 |

7.4.3. Production of rAAVs Containing AAV-Lib1 Capsids

[0566] rAAVs containing various AAV-Lib1 capsids were generated in suspension HEK293 Cells to test their yields and manufacturability. As provided in Table 8, the study showed that rAAV containing AAV9-N3 and AAV9-N4 provide good yields at harvest and are stable during formulation. However, rAAV containing AAV9-N5 capsids provided lower yields at harvest and precipitated during formulation.

TABLE 8

| | AAV-Lib1 capsids | | |
|---|---|---|---|
| | AAV9-N3 | AAV9-N4 | |
| Harvest | PLNGSVHLY | PLNGTVHLY | |
| yields | (SEQ ID | (SEQ ID | |
| (vg/ml) | NO: 3603) | NO: 1232)) | AAV9-N5 |
| Minimum | 2.57E+11 | 2.78E+11 | 9.52E+10 |
| Maximum | 4.2E+11 | 3.54E+11 | 2.03E+11 |

7.4.4. Seroprevalence of rAAVs Containing AAV-Lib1 Capsids

[0567] Seroprevalence of various AAV-Lib1 capsids were tested in an in vitro neutralizing antibody assay using donor samples (N=55) that approximately represent demographics according to US Census Bureau, 2019. All samples were run at a 1:5 serum dilution and titers were determined as the reciprocal of the serum dilution reporting 50% relative light units (RLUs) compared to AAV capsid alone. Samples with a titer<5 were defined as seronegative samples and samples with a titer>5 were defined as seropositive samples.

[0568] Table 9 shows % of tested donor samples that are seropositive or seronegative. The data show that AAV9-N3, AAV9-N4 have lower seroprevalence than AAV9 and higher seroprevalence than AAV9-C4 and AAV5.

TABLE 9

| | Seropositive | Seronegative |
|---|---|---|
| AAV9-N3 | 34.54545 | 65.45455 |
| PLNGSVHLY | | |
| (SEQ ID | | |
| NO: 3603) | | |
| AAV9-N4 | 34.54545 | 65.45455 |
| PLNGTVHLY | | |
| (SEQ ID | | |
| NO: 1232) | | |
| AAV9 | 36.36364 | 63.63636 |
| AAV9-C4 | 21.81818 | 78.18182 |
| PLNGAVHLY | | |
| (SEQ ID | | |
| NO: 9) | | |
| AAV5 | 30.90909 | 69.09091 |

### 8. SEQUENCES

[0569] Many of the nucleotide sequences provided below are obtained from double stranded vectors. Thus, one of skill in the art would appreciate that, unless the references throughout the specification and claims to nucleotide sequences provided herein also include references to the complementary sequences unless the context dictates otherwise. Additional sequences are found in Appendix A and Appendix B each of which are hereby incorporated by reference in their entireties.

| | SEQUENCE (X or Xⁿ can be any of the standard amino acids; for Anc library sequences |
|---|---|
| SEQ ID | (Anc80; Anc81; Anc82; Anc83; Anc84; Anc94; Anc110; Anc113; Anc126; and Anc127), |
| NO | X can be any one of the amino acids listed below for each toggle site) |
| (AAV-Lib | X₁X₂X₃X₄X₅X₆X₇X₈X₉ |
| targeting | X₁, X₂, X₃, X₄, X₅, X₆, X₇, X₈, and X₉ are each independently selected from any |
| peptide) | amino acid residue. |
| SEQ ID | PX₂X₃GAVX₇LY |
| NO: 2 | X₂, X₃, and X₇ are independently selected from any amino acid residue |
| (AAV-mini | |
| consensus | |
| 1) | |
| SEQ ID | PLQGAVHLY |
| NO: 3 | |
| (AFT-9) | |
| SEQ ID | PLQGAVRLY |
| NO: 4 | |
| (AFT-10) | |
| SEQ ID | PLQGAVKLY |
| NO: 5 | |
| (AFT-11) | |
| SEQ ID | PINGAVHLY |
| NO: 6 | |
| (AFT-12) | |
| SEQ ID | PVNGAVHLY |
| NO: 7 | |
| (AFT-13) | |
| SEQ ID | PANGAVHLY |
| NO: 8 | |
| (AFT-14) | |
| SEQ ID | PLNGAVHLY |
| NO: 9 (C4) | |
| SEQ ID | PX₂X₃GX₅X₆X₇LY |
| NO: 10 | X₂, X₃, X₅, X₆, and X₇ are independently selected from any amino acid residue |
| (AAV-mini | |
| consensus | |
| 2) | |
| SEQ ID | PTNGTVRLY |
| NO: 11 | |
| (AFT-15) | |
| SEQ ID | PTNGTVHLY |
| NO: 12 | |
| (AFT-16) | |
| SEQ ID | PTNGTVKLY |
| NO: 13 | |
| (AFT-17) | |
| SEQ ID | PSNGTLRLY |
| NO: 14 | |
| (AFT-18) | |
| SEQ ID | PSNGTLHLY |
| NO: 15 | |
| (AFT-19) | |
| SEQ ID | PSNGTLKLY |
| NO: 16 | |
| (AFT-20) | |
| SEQ ID | PTNGTLRLY |
| NO: 17 | |
| (AFT-21) | |
| SEQ ID | PTNGTLHLY |
| NO: 18 | |
| (AFT-22) | |
| SEQ ID | PTNGTLKLY |
| NO: 19 | |
| (AFT-23) | |
| SEQ ID | PX₂X₃GAVX₇X₈X₉ |
| NO: 20 | X₂, X₃, X₅, X₆, and X₇ are independently selected from any amino acid residue |
| (AAV-mini | |
| consensus | |
| 3) | |
| SEQ ID | PTQGAVTVR |
| NO: 21 | |
| (AFT-24) | |
| SEQ ID | PLQGAVTVR |
| NO: 22 | |
| (AFT-25) | |
| SEQ ID | PLQGAVHVR |
| NO: 23 | |
| (AFT-26) | |
| SEQ ID | PLQGAVHVY |
| NO: 24 | |
| (AFT-27) | |
| SEQ ID | PSQGAVTLR |
| NO: 25 | |
| (AFT-28) | |
| SEQ ID | PLQGAVTLR |
| NO: 26 | |
| (AFT-29) | |
| SEQ ID | PLQGAVHLR |
| NO: 27 | |
| (AFT-30) | |
| SEQ ID | PTQGAVTLR |
| NO: 28 | |
| (AFT-31) | |
| SEQ ID | SYGQVATNHQSPLNGAVHLYAQAQTGWVQNQGI |
| NO: 29 | |
| (AAV9- | |
| VR VIII) | |
| SEQ ID | KTINGSGQNQQTLKFSV |
| NO: 30 | |
| (AAV9- | |
| VR IV) | |
| SEQ ID | TTVTQNNNSEFAWPGASSWA |
| NO: 31 | |
| (AAV9- | |
| VR V) | |
| SEQ ID | PLNGAVHLYN |
| NO: 32 | |
| (AFT-2 | |
| with C- | |
| term) | |
| SEQ ID | PLNGAVHLYAN |
| NO: 33 | |
| (AFT-3 | |
| with C- | |
| term) | |
| SEQ ID | MAADGYLPDWLEDNLSEGIREWWDLKPGAPKPKANQQKQDDGRGLVLPGYKYLGP |
| NO: 34 | FNGLDKGEPVNAADAAALEHDKAYDQQLKAGDNPYLRYNHADAEFQERLQEDTSF |
| (AFT-1 | GGNLGRAVFQAKKRVLEPLGLVEEGAKTAPGKKRPVEQSPQEPDSSSGIGKKGQQPA |
| Capsid + | RKRLNFGQTGDSESVPDPQPLGEPPAAPSGVGSNTMAAGGGAPMADNNEGADGVG |
| targeting | NASGNWHCDSTWLGDRVITTSTRTWALPTYNNHLYKQISSQSGGSTNDNTYFGYSTP |
| peptide) | WGYFDFNRFHCHFSPRDWQRLINNNWGFRPKKLNFKLFNIQVKEVTTNDGTTTIANN |
| | LTSTVQVFTDSEYQLPYVLGSAHQGCLPPFPADVFMIPQYGYLTLNNGSQAVGRSSFY |
| | CLEYFPSQMLRTGNNFQFSYTFEDVPFHSSYAHSQSLDRLMNPLIDQYLYYLSRTQTT |
| | SGTAGNRTLQFSQAGPSSMANQAKNWLPGPCYRQQRVSKTTNQNNNSNFAWTGAT |
| | KYHLNGRDSLVNPGPAMATHKDDEDKFFPMSGVLIFGKQGAGNSNVDLDNVMITNE |
| | EEIKTTNPVATEEYGTVATNLQSPLNGAVHLYTAPATGTVNSQGALPGMVWQDRDV |
| | YLQGPIWAKIPHTDGHFHPSPLMGGFGLKHPPPQILIKNTPVPANPPTTFSPAKFASFIT |
| | QYSTGQVSVEIEWELQKENSKRWNPEIQYTSNYNKSTNVDFAVDINGVYSEPRPIGT |
| | RYLTRNL |
| SEQ ID | MAADGYLPDWLEDNLSEGIREWWDLKPGAPKPKANQQKQDDGRGLVLPGYKYLGP |
| NO: 35 | FNGLDKGEPVNAADAAALEHDKAYDQQLKAGDNPYLRYNHADAEFQERLQEDTSF |
| (AFT-2 | GGNLGRAVFQAKKRVLEPLGLVEEGAKTAPGKKRPVEQSPQEPDSSSGIGKKGQQPA |
| Capsid + | RKRLNFGQTGDSESVPDPQPLGEPPAAPSGVGSNTMAAGGGAPMADNNEGADGVG |
| targeting | NASGNWHCDSTWLGDRVITTSTRTWALPTYNNHLYKQISSQSGGSTNDNTYFGYSTP |
| peptide) | WGYFDFNRFHCHFSPRDWQRLINNNWGFRPKKLNFKLFNIQVKEVTTNDGTTTIANN |
| | LTSTVQVFTDSEYQLPYVLGSAHQGCLPPFPADVFMIPQYGYLTLNNGSQAVGRSSFY |
| | CLEYFPSQMLRTGNNFQFSYTFEDVPFHSSYAHSQSLDRLMNPLIDQYLYYLSRTQTT |
| | SGTAGNRTLQFSQAGPSSMANQAKNWLPGPCYRQQRVSKTTNQNNNSNFAWTGAT |
| | KYHLNGRDSLVNPGPAMATHKDDEDKFFPMSGVLIFGKQGAGNSNVDLDNVMITNE |
| | EEIKTTNPVATEEYGTVATNLQPLNGAVHLYNTAPATGTVNSQGALPGMVWQDRDV |
| | YLQGPIWAKIPHTDGHFHPSPLMGGFGLKHPPPQILIKNTPVPANPPTTFSPAKFASFIT |
| | QYSTGQVSVEIEWELQKENSKRWNPEIQYTSNYNKSTNVDFAVDTNGVYSEPRPIGT |
| | RYLTRNL |
| SEQ ID | MAADGYLPDWLEDNLSEGIREWWDLKPGAPKPKANQQKQDDGRGLVLPGYKYLGP |
| NO: 36 | FNGLDKGEPVNAADAAALEHDKAYDQQLKAGDNPYLRYNHADAEFQERLQEDTSF |
| (AFT-3 | GGNLGRAVFQAKKRVLEPLGLVEEGAKTAPGKKRPVEQSPQEPDSSSGIGKKGQQPA |
| Capsid + | RKRLNFGQTGDSESVPDPQPLGEPPAAPSGVGSNTMAAGGGAPMADNNEGADGVG |
| targeting | NASGNWHCDSTWLGDRVITTSTRTWALPTYNNHLYKQISSQSGGSTNDNTYFGYSTP |
| peptide) | WGYFDFNRFHCHFSPRDWQRLINNNWGFRPKKLNFKLFNIQVKEVTTNDGTTTIANN |
| | LTSTVQVFTDSEYQLPYVLGSAHQGCLPPFPADVFMIPQYGYLTLNNGSQAVGRSSFY |
| | CLEYFPSQMLRTGNNFQFSYTFEDVPFHSSYAHSQSLDRLMNPLIDQYLYYLSRTQTT |
| | SGTAGNRTLQFSQAGPSSMANQAKNWLPGPCYRQQRVSKTTNQNNNSNFAWTGAT |
| | KYHLNGRDSLVNPGPAMATHKDDEDKFFPMSGVLIFGKQGAGNSNVDLDNVMITNE |
| | EEIKTTNPVATEEYGTVATNLPLNGAVHLYANTAPATGTVNSQGALPGMVWQDRDV |
| | YLQGPIWAKIPHTDGHFHPSPLMGGFGLKHPPPQILIKNTPVPANPPTTFSPAKFASFIT |
| | QYSTGQVSVEIEWELQKENSKRWNPEIQYTSNYNKSTNVDFAVDINGVYSEPRPIGT |
| | RYLTRNL |
| SEQ ID | MAADGYLPDWLEDNLSEGIREWWDLKPGAPKPKANQQKQDDGRGLVLPGYKYLGP |
| NO: 37 | FNGLDKGEPVNAADAAALEHDKAYDQQLKAGDNPYLRYNHADAEFQERLQEDTSF |
| (AFT-4 | GGNLGRAVFQAKKRVLEPLGLVEEGAKTAPGKKRPVEQSPQEPDSSSGIGKKGQQPA |
| Capsid + | RKRLNFGQTGDSESVPDPQPLGEPPAAPSGVGSNTMAAGGGAPMADNNEGADGVG |
| targeting | NASGNWHCDSTWLGDRVITTSTRTWALPTYNNHLYKQISSQSGGSTNDNTYFGYSTP |
| peptide) | WGYFDFNRFHCHFSPRDWQRLINNNWGFRPKKLNFKLFNIQVKEVTTNDGTTTIANN |
| | LTSTVQVFTDSEYQLPYVLGSAHQGCLPPFPADVFMIPQYGYLTLNNGSQAVGRSSFY |
| | CLEYFPSQMLRTGNNFQFSYTFEDVPFHSSYAHSQSLDRLMNPLIDQYLYYLSRTQTT |
| | SGTAGNRTLQFSQAGPSSMANQAKNWLPGPCYRQQRVSKTTNQNNNSNFAWTGAT |
| | KYHLNGRDSLVNPGPAMATHKDDEDKFFPMSGVLIFGKQGAGNSNVDLDNVMITNE |
| | EEIKTTNPVATEEYGTVATNLQSAPLNGAVHLYAPATGTVNSQGALPGMVWQDRDV |
| | YLQGPIWAKIPHTDGHFHPSPLMGGFGLKHPPPQILIKNTPVPANPPTTFSPAKFASFIT |
| | QYSTGQVSVEIEWELQKENSKRWNPEIQYTSNYNKSTNVDFAVDTNGVYSEPRPIGT |
| | RYLTRNL |
| SEQ ID | MAADGYLPDWLEDNLSEGIREWWDLKPGAPKPKANQQKQDDGRGLVLPGYKYLGP |
| NO: 38 | FNGLDKGEPVNAADAAALEHDKAYDQQLKAGDNPYLRYNHADAEFQERLQEDTSF |
| (AFT-5 | GGNLGRAVFQAKKRVLEPLGLVEEGAKTAPGKKRPVEQSPQEPDSSSGIGKKGQQPA |
| Capsid + | RKRLNFGQTGDSESVPDPQPLGEPPAAPSGVGSNTMAAGGGAPMADNNEGADGVG |
| targeting | NASGNWHCDSTWLGDRVITTSTRTWALPTYNNHLYKQISSQSGGSTNDNTYFGYSTP |
| peptide) | WGYFDFNRFHCHFSPRDWQRLINNNWGFRPKKLNFKLFNIQVKEVTTNDGTTTIANN |
| | LTSTVQVFTDSEYQLPYVLGSAHQGCLPPFPADVFMIPQYGYLTLNNGSQAVGRSSFY |
| | CLEYFPSQMLRTGNNFQFSYTFEDVPFHSSYAHSQSLDRLMNPLIDQYLYYLSRTQTT |
| | SGTAGNRTLQFSQAGPSSMANQAKNWLPGPCYRQQRVSKTTNQNNNSNFAWTGAT |
| | KYHLNGRDSLVNPGPAMATHKDDEDKFFPMSGVLIFGKQGAGNSNVDLDNVMITNE |
| | EEIKTTNPVATEEYGTVATNLQSPLNGAVHLYANTAPATGTVNSQGALPGMVWQDR |
| | DVYLQGPIWAKIPHTDGHFHPSPLMGGFGLKHPPPQILIKNTPVPANPPTTFSPAKFAS |
| | FITQYSTGQVSVEIEWELQKENSKRWNPEIQYTSNYNKSTNVDFAVDINGVYSEPRPI |
| | GTRYLTRNL |
| SEQ ID | MAADGYLPDWLEDNLSEGIREWWALKPGAPQPKANQQHQDNARGLVLPGYKYLGP |
| NO: 39 | GNGLDKGEPVNAADAAALEHDKAYDQQLKAGDNPYLKYNHADAEFQERLKEDTSF |
| (AAV-retro | GGNLGRAVFQAKKRLLEPLGLVEEAAKTAPGKKRPVEQSPQEPDSSAGIGKSGAQPA |
| Capsid) | KKRLNFGQTGDTESVPDPQPIGEPPAAPSGVGSLTMASGGGAPVADNNEGADGVGSS |
| | SGNWHCDSQWLGDRVITTSTRTWALPTYNNHLYKQISNSTSGGSSNDNAYFGYSTP |
| | WGYFDFNRFHCHFSPRDWQRLINNNWGFRPKRLNFKLFNIQVKEVTDNNGVKTIAN |
| | NLTSTVQVFTDSDYQLPYVLGSAHEGCLPPFPADVFMIPQYGYLTLNDGSQAVGRSSF |
| | YCLEYFPSQMLRTGNNFQFSYEFENVPFHSSYAHSQSLDRLMNPLIDQYLYYLSKTIN |
| | GSGQNQQTLKFSVAGPSNMAVQGRNYIPGPSYRQQRVSTTVTQNNNSEFAWPGASS |
| | WALNGRNSLMNPGPAMASHKEGEDRFFPLSGSLIFGKQGTGRDNVDADKVMITNEE |
| | EIKTTNPVATESYGQVATNHQSAQLADQDYTKTAAQAQTGWVQNQGILPGMVWQD |
| | RDVYLQGPIWAKIPHTDGNFHPSPLMGGFGMKHPPPQILIKNTPVPADPPTAFNKDKL |
| | NSFITQYSTGQVSVEIEWELQKENSKRWNPEIQYTSNYYKSNNVEFAVNTEGVYSEPR |
| | PIGTRYLTRNL |
| SEQ ID | MAADGYLPDWLEDTLSEGIRQWWKLKPGPPPPKPAERHKDDSRGLVLPGYRYLGPFNG |
| NO: 78 | LDKGEPVNEADAAALEHDKAYDRQLDSGDNPYLKYNHVDAEFQERLKEDTSFGGNLG |
| (AAVhu.20 | RAVFQAKKRILEPLGLVEEPVKAAPGEKRPVEHSPAEPDSSSGTGKAGQQPARKRLNFG |
| (AAS99271)) | QTGDADSVPDPQPLGQPPAAPSGLGTNTMASGSGAPMADNNEGADGVGNSSGNWHCD |
| | STWMGDRVITTSTRTWALPTYNNHLYKQISSQSGASNDNHYFGYSTPWGHFDFNRFHC |
| | HFSPRDWQRLINNNWGFRPKRLSFKLFNIQVKEVTQNDGTTTIANNLTSTVQVFTDSEYQ |
| | LPYVLGSAHQGCLPPFPADVFMVPQYGYLTLNNGSQAVGRSSFYCLEYFPSQMLRTGNN |
| | FTFSYTFEDVPFHSSYAHSQSLDRLMNPLIDQYLYYLSRTNTPSGTTTMSRLQFSQAGAS |
| | DIRDQSRNWLPGPCYRQQRVSKTAADNNNSDYSWTGATKYHLNGRDSLVNPGPAMAS |
| | HKDDEEKYFPQSGVLIFGKQDSGKTNVDIEKVMITDEEEIRTTNPVATEQYGSVSTNLQS |
| | GNTQAATSDVNTQGVLPGMVWQDRDVYLQGPIWAKIPHTDGHFHPSPPMGGFGLKHPP |
| | PQILIKNTPVPANPSTTFSAAKFASFITQYSTGQVSVEIEWELQKENSKRWNPEIQYTSNY |
| | NKSVNVDFTVDINGVYSEPRPIGARYLTRNL |
| SEQ ID | MAADGYLPDWLEDTLSEGIRQWWKLKPGPPPPKPAERHKDDSRGLVLPGYKYLGPFNG |
| NO: 79 | LDKGEPVNEADAAALEHDKAYDRQLDSGDNPYLKYNHADAEFQERLKEDTSFGGNLG |
| (AAVhu.21 | RAVFQAKKRILEPLGLVEEPVKTAPGKKRPVEHSPAEPDSSSGTGKAGQQPARKRLNFG |
| (AAS99272)) | QTGDADSVPDPRPLGQPPAAPSGLGTNTMASGSGAPMADNNEGADGVGNSSGNWHCD |
| | STWMGDRVITTSTRTWALPTYNNHLYKQISSQSGASNDNHYFGYSTPWGYFDFNRFHC |
| | HFSPRDWQRLINNNWGFRPKRLSFKLFNIQVKEVTQNDGTTTIANNLTSTVQVFTDSEYQ |
| | LPYVLGSAHQGCLPPFPADVFMVPQYGYLTLNNGSQAVGRSSFYCLEYFPSQMLRTGNN |
| | FTFSYTFEDVPFHSSYAHSQSLDRLMNPLIDQYLYYLSRTNTPSGTTTMSRLQFSQAGAS |
| | DIRDQSRNWLPGPCYRQQRVSKTAADNNNSDYSWTGATKYHLNGRDSLVNPGPAMAS |
| | HKDDEEKYFPQSGVLIFGKQDSGKTNVDIEKVMITDEEEIRTTNPVATEQYGSVSTNLQS |
| | GNTQAATSDVNTQGVLPGMVWQDRDVYLQGPIWAKIPHTDGHFHPSPLMGGFGLKHPP |
| | PQILIKNTPVPANPSTTFSAAKFASFITQYSTGQVSVEIEWELQKENSKRWNPEIQYTSNY |
| | NKSVNVDFTVDTNGVYSEPRPIGTRYLTRNL |
| SEQ ID | MAADGYLPDWLEDTLSEGIRQWWKLKPGPPPPKPAERHKDDSRGLVLPGYKYLGPFNG |
| NO: 80 | LDKGEPVNEADAAALEHDKAYDRQLDSGDNPYLKYNHADAEFQERLKGDTSFGGNLG |
| (AAVhu.22 | RAVFQAKKRILEPLGLVEEPVKTAPGKKRPVEHSPAEPDSSSGTGKAGQQPARKRLNFG |
| (AAS99273)) | QTGDADSVPDPQPLGQPPAAPSGLGTNTMASGSGAPMADNNEGADGVGNSSGNWHCD |
| | STWMGGRVITTSTRTWALPTYNNHLYKQISSQSGASNDNHYFGYSTPWGYFDFNRFHC |
| | HFSPRDWQRLINNNWGFRPKRLSFKLFNIQVKEVTQNDGTTTIANNLTSTVQVFTDSEYQ |
| | LPYVLGSAHQGCLPPFPADVFMVPQYGYLTLNNGSQAVGRSSFYCLEYFPSQTLRTGNN |
| | FTFSYTFEDVPFHSSYAHSQSLDRLMNPLIDQYLYYLSRTNTPSGTTTMSRLQFSQAGAS |
| | DIRDQSRNWLPGPCYRQQRVSKTAADNNNSDYSWTGATKYHLNGRDSLVNPGPAMAS |
| | HKDDEEKYFPQSGVLIFGKQDSGKTNVDIEKVMITDEEEIRTTNPVATEQYGSVSTNLQS |
| | GNTQAATSDVNTQGVLPGMVWQDRDVYLQGPIWAKIPHTDGHFHPSPLMGGFGLKHPP |
| | PQILIKNTPVPANPSTTFSAAKFASFITQYSTGQVSVEIEWELQKENSKRWNPEIQYTSNY |
| | NKSVNVDFTVDTNGVYSEPRPIGTRYLTRNL |
| SEQ ID | MAADGYLPDWLEDTLSEGIRQWWKLKPGPPPPKPAERHKDDSRGLVLPGYKYLGPFNG |
| NO: 81 | LDKGEPVNEADAAALEHDKAYDRQLDSGDNPYLKYNHADAEFQERLKEDTSFGGNLG |
| (AAVhu.23 | RAVFQAKKRILEPLGLVEEPVKTAPGKKRPVEHSPAEPDSSSGTGKAGQQPARKRLNFG |
| (AAS99274)) | QTGDADSVPDPQPLGQPPAAPSGLGTNTMASGSGAPMADNNEGADGVGNSSGNWHCD |
| | STWMGDRVITTSTRTWALPTCNNHLYKQISSQSGASNDNHYFGYSTPWGYFDFNRFHCH |
| | FSPRDWQRLINNNWGFRPKRLSFKLFNIQVKEVTQNDGTTTIANNLTSTVQVFTDSEYQL |
| | PYVLGSAHQGCLPPFPADVFMVPQYGYLTLNNGSQAVGRSSFYCLEYFPSQMLRTGNNF |
| | TFSYTFEDVPFHSSYAHSQSLDRLMNPLIDQYLYYLSRTNTPSGTTTMSRLQFSQAGASDI |
| | RDQSRNWLPGPCYRQQRVSKTAADNNNSDYSWTGATKYHLNGRDSLVNPGPAMASHK |
| | DDEEKYFPQSGVLIFGKQDSGKTNVDIEKVMITDEEEIRTTNPVATEQYGSVSTYLQSGN |
| | TQAATSDVNTQGVLPGMVWQDRDVYLRGPIWAKIPHTDGHFHPSPLMGGFGLKHPPPQI |
| | LIKNTPVPANPSTTFSAAKFASFITQYSTGQVSVEIEWELQKENSKRWNPEIQYTSNYNKS |
| | VNVDFTVDTNGVYSEPRPIGTRYLTRNL |
| SEQ ID | MAADGYLPDWLEDTLSEGIRQWWKLKPGPPPPKPAERHKDGSRGLVLPGYKYLGPFNG |
| NO: 82 | LDKGEPVNEADAAALEHDKAYDRQLNSGDNPYLKYNHADAEFQERLKEDTSFGGNLG |
| (AAVhu.25 | RAVFQAKKRVLEPLGLVEEPVKTAPGKKRPVEHSPAEPDSSSGTGKAGQQPARKRLNFG |
| (AAS99276)) | QTGDADSVPDPQPLGQPPAAPSGLGSTTMATGSGAPMADNNEGADGVGNSSGNWHCD |
| | SQWLGDRVITTSTRTWALPTYNNHLYKQISSQSGASNDNHYFGYSTPWGYFDFNRFHCH |
| | FSPRDWQRLINNNWGFRPKRLNFKLFNIQVKEVTQNDGTTTIANNLTSTVQVFTDSEYQL |
| | PYVLGSAHQGCLPPFPADVFMVPQYGYLTLNNGSQAVGRSPFYCLEYFPSQMLRTGNNF |
| | QFSYTFEDVPFHSSYAHSQSLDRLMNPLIDQYLYYLNKTQTNSGTLQQSRLLFSQAGPTN |
| | MSLQAKNWLPGPCYRQQRLSKQANDNNNSNFPWTAATKYHLNGRDSLVNPGPAMASH |
| | KDDEEKFFPMHGTLIFGKQGTNANDADLENVMITDEEEIRTTNPVATEQYGTVSNNLQN |
| | SNTGPTTGTVNHQGALPGMVWQDRDVYLQGPIWAKIPHTDGHFHPSPLMGGFGLKHPP |
| | PQIMIKNTPVPANPPTNFSSAKFASFITQYSTGQVSVEIEWELQKENSKRWNPEIQYTSNY |
| | NKSVNVDFTVDNNGVYSEPRPIGTRYLTRNL |
| SEQ ID | MAADGYLPDWLEDTLSEGIRQWWKLKPGPPPPKPAERHKDDSRGLVLPGYKYLGPFNG |
| NO: 83 | LDKGEPVNEADAAALEHDKAYDRQLDSGDNPYLKYNHADAEFQERLKEDTSFGGNLG |
| (AAVhu.27 | RAVFQAKKRILEPLGLVEEPVKTAPGKKRPVEHSPAEPDSSSGTGKAGQQPARKRLNFG |
| (AAS99277)) | QTGDADSVPDPQPLGQPPAAPSGLGTNTMASGSGAPMADNNEGADGVGNSSGNWHCD |
| | STWMGDRVITTSTRTWALPTYNNHLYKQISSQSGASNDNHYFGYSTPWGYFDFNRFHC |
| | HFSPRDWQRLINNNWGFRPKRLSFKLFNIQVKEVTQNDGTTTIANNLTSTVQVFTDSGYQ |
| | LPYVLGSAHQGCLPPFPADVFMVPQYGYLTLNNGSQAVGRSSFYCLEYFPSQMLRTGNN |
| | FTFSYTFEDVPFHSSYAHGQSLDRLMNPLIDQYLYYLSRTNTPSGTTTMSRLQFSQAGAS |
| | DVRDQSRNWLPGPCYRQQRVSKTAADNNNSDYSWTGATKYHLNGRDSLVNPGPAMAS |
| | HKDDEEKYFPQSGVLVFGKQDSGKTNVDIEKVMITDEEEIRTTNPAATEQYGSVSTNLQS |
| | GNTQAATSDVNTQGVLPGMVWQDRDVYLQGPIWAKIPHTDGHFHPSPLMGGFGLKHPP |
| | PQILIKNTPVPANPSTTFSAAKFVSFITQYSTGQVSVEIEWELQKENSKRWNPEIQYTSNY |
| | NKSVNVDFTVDTNGVYSEPRPIGTRYLTRNL |
| SEQ ID | MAADGYLPDWLEDTLSEGIRQWWKLKPGPPPPKPAERHKDDSRGLVLPGYKYLGPFNG |
| NO: 84 | LDKGEPVNEADAAALEHDKAYDRQLDSGDNPYLKYNHADAEFQERLKEDTSFGGNLG |
| (AAVhu.28 | RAVFQAKKRVLEPLSLVEEPVKTAPGKKRPVEHSPAEPDSSSGTGKSGNQPARKRLNFG |
| (AAS99278)) | QTGDSDSVPDPQPLGQPPAAPSGLGTNTMATGSGAPMADNNEGADGVGNSSGNWHCD |
| | STWMGDRVITTSTRTWALPTYNNHLYKQISSQSGASNDNHYFGYSTPWGYFDFNRFHC |
| | HFSPRDWQRLINNNWGFRPKRLNFKLFNIQVKEVTQNDGTTTIANNLTSTVQVFTDSEY |
| | QLPYVLGSAHQGCLPPFPADVFMVPQYGYLTLNNGSQAVGRSSFYCLEYFPSQMLRTGN |
| | NFTFSYTFEDVPFHSSYAHSQSLDRLMNPLIDQYLYYLSRTNTPSGTTTQSRLQFSQAGAS |
| | DIQDQSRNWLPGPCYRQQRVSKTSADNNNSEYSWTGATKYHLNGRDSLVNPGPAMASH |
| | KDDEEKFFPQSGVLIFGKQGSEKTNVDIEKVMITDEEEIRTTNPVATEQYGSVSTNLQSGN |
| | TQAATADVNTQGVLPGMVGQDRDVYLQGPTWAKIPHTDGHFHPSPLMGGFGLKHPPPQ |
| | ILIKNTPVPANPSTTFSAAKFASFITQYSTGQVSVEIEWELQKENSKRWNPEIQYTSNYNK |
| | SVNVDFTVDTNGVYSEPRPIGTRYLTRNL |
| SEQ ID | MAADGYLPDWLEDTLSEGIRQWWKLKPGPPPPKPAERHKDDSRGLVLPGYKYLGPFNG |
| NO: 85 | LDKGEPVNEADAAALEHDKAYDRQLDSGDNPYLKYNHADAEFQERLKEDTSFGGNLG |
| (AAVhu.29 | RAVFQAKKRVLEPLGLVEEPVKTAPGKKRPVEHSPAEPDSSSGTGKSGNQPARKRLNFG |
| (AAS99279)) | QTGDSDSVPDPQPLGQPPAAPSGLGTNTMATGSGAPMADNNEGADGVGNSSGNWHCD |
| | STWMGDRVITTSTRTWALPTYNNHLYKQISSQSGASNDNHYFGYSTPWGYFDFNRFHC |
| | HFSPRDWQRLINNNWGFRPKRLNFKLFNIQVKEVTQNDGTTTIANNLTSTVQVFTDSEY |
| | QLPYVLGSAHQGCLPPFPADVFMVPQYGYLTLNNGSQAVGRSSFYCLGYFPSQMLRTGN |
| | NFTFSYTFEDVPFHSSYAHSQSLDRLMNPLIDQYLYYLSRTNTPSGTTTQSRLQFSQAGAS |
| | DIRDQSRNWLPGPCYRQQRVSKTSADNNNSEYSWTGATKYHLNGRDSLVNPGPAMASH |
| | KDDEEKFFPQSGVLIFGKQGPEKTNVDIEKVMITDEEEIRTTNPVATEQYGSVSTNLQSGN |
| | TQAATADVNTQGVLPGMVWQDRDVYLQGPIWAKIPHTDGHFHPSPLMGGFGLKHPPPQ |
| | ILIKNTPVPANPSTTFSAAKFASFITQYSTGQVSVEIEWELQKENSKRWNPEIQYTSNYNK |
| | SVNVDFTVDTNGVYSEPRPIGTRYLTRNL |
| SEQ ID | MAADGYLPDWLEDTLSEGIRQWWKLKPGPPPPKPAERHKDDSRGLVLPGYKYLGPGNG |
| NO: 86 | LDKGEPVNAADAAALEHDKAYDQQLKAGDNPYLKYNHADAEFQERLKEDTSFGGNLG |
| (AAVhu.31 | RAVFQAKKRLLEPLGLVEEAAKTAPGKKRPVEQSPQEPDSSAGIGKSGSQPAKKKLNFG |
| (AAS99281)) | QTGDTESVPDPQPIGEPPAAPSGVGSLTMASGGGAPVADNNEGADGVGSSSGNWHCDS |
| | QWLGDRVITTSTRTWALPTYNNHLYKQISNSTSGGSSNDNAYFGYSTPWGYFDFNRFHC |
| | HFSPRDWQRLINNNWGFRPKRLNFKLFNIQVKEVTDNNGVKTIANNLTSTVQVFTDSDY |
| | QLPYVLGSAHEGCLPPFPADVFMIPQYGYLTLNDGGQAVGRSSFYCLEYFPSQMLRTGN |
| | NFQFSYEFENVPFHSSYAHSQSLDRLMNPLIDQYLYYLSKTINGSGQNQQTLKFSVAGPS |
| | NMAVQGRNYIPGPSYRQQRVSTTVTQNNNSEFAWPGASSWALNGRNSLMNPGPAMAS |
| | HKEGEDRFFPLSGSLIFGKQGTGRDNVDADKVMITNEEEIKTTNPVATESYGQVATNHQS |
| | AQAQAQTGWVQNQGILPGMVWQDRDVYLQGPIWAKIPHTDGNFHPSPLMGGFGMKHP |
| | PPQILIKNTPVPADPPTAFNKDKLNSFITQYSTGQVSVEIEWELQKENSKRWNPEIQYTSN |
| | YYKSNNVEFAVSTEGVYSEPRPIGTRYLTRNL |
| SEQ ID | MAADGYLPDWLEDTLSEGIRQWWKLKPGPPPPKPAERHKDDSRGLVLPGYKYLGPGNG |
| NO: 87 | LDKGEPVNAADAAALEHDKAYDQQLKAGDNPYLKYNHADAEFQERLKEDTSFGGNLG |
| (AAVhu.32 | RAVFQAKKRLLEPLGLVEEAAKTAPGKKRPVEQSPQEPDSSAGIGKSGSQPAKKKLNFG |
| (AAS99282)) | QTGDTESVPDPQPIGEPPAAPSGVGSLTMASGGGAPVADNNEGADGVGSSSGNWHCDS |
| | QWLGDRVITTSTRTWALPTYNNHLYKQISNSTSGGSSNDNAYFGYSTPWGYFDFNRFHC |
| | HFSPRDWQRLINNNWGFRPKRLNFKLFNIQVKEVTDNNGVKTIANNLTSTVQVFTDSDY |
| | QLPYVLGSAHEGCLPPFPADVFMIPQYGYLTLNDGSQAVGRSSFYCLEYFPSQMLRTGN |
| | NFQFSYEFENVPFHSSYAHSQSLDRLMNPLIDQYLYYLSKTINGSGQNQQTLKFSVAGPS |
| | NMAVQGRNYIPGPSYRQQRVSTTVTQNNNSEFAWPGASSWALNGRNSLMNPGPAMAS |
| | HKEGEDRFFPLSGSLIFGKQGTGRDNVDADKVMITNEEEIKTTNPVATESYGQVATNHQS |
| | AQAQAQTGWVQNQGILPGMVWQDRDVYLQGPIWAKIPHTDGNFHPSPLMGGFGMKHP |
| | PPQILIKNTPVPADPPTAFNKDKLNSFITQYSTGQVSVEIEWELQKENSKRWNPEIQYTSN |
| | YYKSNNVEFAVNTEGVYSEPRPIGTRYLTRNL |
| SEQ ID | MAADGYLPDWLEDTLSEGIRQRWKLKPGPPPPEPAERHKDDSRGLVLPGYKYLGPFNGL |
| NO: 88 | DKGEPVNEADAAALEHDKAYDRQLDSGDNPYLKYNHADAEFQERLKEDTSFGGNLGR |
| (AAVhu.34 | AVFQAKKRVLEPLGLVEEPVKTAPGKKRPVEHSPVEPDSSSGTGKAGQQPARKRLNFGQ |
| (AAS99283)) | TGDADSVPDPQPLGQPPAAPSGLGTNTMATGSGAPMADNNEGADGVGNSSGNWHCDS |
| | TWMGDRVITTSTRTWALPTYNNHLYKQISSQSGASNDNHYFGYSTPWGYFDFNRFHCH |
| | FSPRDWQRLINNNWGFRPKRLNFKLFNIQVKEVTQNDGTTTIANNLTSTVQVFTDSEYQL |
| | PYVLGSAHQGCLPPFPADVFMVPQYGYLTLNNESQAVGRSSFYCLEYFPSQMLRTGNNF |
| | TFSYTFEDVPFHSSYAHSQSLGRLMNPLIDQYLYYLSRTNTPSGTTTQSRLQFSQAGASDI |
| | RDQSRNWLPGPCYRQQRVSKTSADNNNSEYSWTGATKYHLNGRDSLVNPGPAMASHK |
| | DDEEKFFPQSGVLIFGKQGSEKTNVDIEKVMITDEEEIRTTNPVATEQYGSVSTNLQRGNR |
| | QAATADVNTQGVLPGMVWQDRDVYLQGPIWAKIPHTDGHFHPSPLMGGFGLKHPPPQI |
| | LIKNTPVPANPSTTFSAAKFASFITQYSTGQVSVEIEWELQKENSKRWNPEIQYTSNYNKS |
| | VNVDFTVDTNGVYSEPRPIGTRYLTRNL |
| SEQ ID | MAADGYLPDWLEDNLSEGIREWWDLKPGAPKPKANQQKQDDGRGLVLPGYKYLGPFN |
| NO: 89 | GLDKGEPVNAADAAALEHDKAYDQQLKAGDNPYLRYNHADAEFQERLQEDTSFGGNL |
| (AAVhu.37 | GRAVFQAKKRVLEPLGLVEEAAKTAPGKKRPVEPSPQRSPDSSTGIGKKGQQPAKKRLN |
| (AAS99285)) | FGQTGDSESVPDPQPIGEPPAGPSGLGSGTMAAGGGAPMADNNEGADGVGSSSGNWHC |
| | DSTWLGDRVITTSTRTWALPTYNNHLYKQISNGTSGGSTNDNTYFGYSTPWGYFDFNRF |
| | HCHFSPRDWQRLINNNWGFRPKRLSFKLFNIQVKEVTQNEGTKTIANNLTSTIQVFTDSE |
| | YQLPYVLGSAHQGCLPPFPADVFMIPQYGYLTLNNGSQAVGRSSFYCLEYFPSQMLRTG |
| | NNFEFSYTFEDVPFHSSYAHSQSLDRLMNPLIDQYLYYLSRTQSTGGTQGTQQLLFSQAG |
| | PANMSAQAKNWLPGPCYRQQRVSTTLSQNNNSNFAWTGATKYHLNGRDSLVNPGVAM |
| | ATHKDDEERFFPSSGVLMFGKQGAGRDNVDYSSVMLTSEEEIKTTNPVATEQYGVVAD |
| | NLQQTNTGPIVGNVNSQGALPGMVWQNRDVYLQGPIWAKIPHTDGNFHPSPLMGGFGL |
| | KHPPPQILIKNTPVPADPPTTFSQAKLASFITQYSTGQVSVEIEWELQKENSKRWNPEIQYT |
| | SNYYKSTNVDFAVNTEGTYSEPRPIGTRYLTRNL |
| SEQ ID | MAADGYLPDWLEDNLSEGIREWWDLKPGAPKPKANQQKQDDGRGLVLPGYKYLGPFN |
| NO: 90 | GLDKGEPVNAADAAALEHDKAYDQQLKAGDNPYLRYNHADAEFQERLQEDTSFGGNL |
| (AAVhu.39 | GRAVFQAKKRVLEPLGLVEEGAKTAPGKKRPVEPSPQRSPDSSTGIGKKGQQPARKRLN |
| (AAS99286)) | FGRTGDSESVPDPQPIGEPPAAPSSVGSGTMAAGGGAPMADNNEGADGVGSSSGNWHC |
| | DSTWLGDRVITTSTRTWALPTYNNHLYKQISNGTSGGSTNDNTYFGYSTPWGYLDFNRF |
| | HCHFSPRDWQRLINNNWGFRPKRLSFKLFNIQVKEVTQNEGTKTIANNLASTIQVFTDSE |
| | YQPPYVLGSAHQGCLPPFPADVFMIPQYGYLTLNNGSQAVGRSSFYCLEYFPSQMLRTG |
| | NNFSFSYTFEDVPFHSSYAHSQSLDRLMNPLIDQYLYYLSRTQSTGGTAGTQQLLFSRAG |
| | PSNMSAQARNWLPGPCYRQQRVSTTLSQNNNSNFAWTGATKYHLNGRDSLVNPGVAM |
| | ATNKDDEDRFFPSSGILMFGKQGAGKDNVDYSNVMLTSEEEIKTTNPVATEQYGVVAD |
| | NLQQQNTAPTVGAVNSQGALPGMVWQNRDVYLQGPIWAKIPHTDGNFHPSPLMGGFG |
| | LKHPPPQILIKNTPVPADPPTAFNQAKLNSFIAQYSTGQVSVEIEWELQKENSKRWNPEIQ |
| | YTSNYYKSTNADFAVNTEGVYSEPRPIGTRYLTRNL |
| SEQ ID | MAADGYLPDWLEDNLSEGIREWWDLKPGAPKPKANQQKQDDGRGLVLPGYKYLGPFN |
| NO: 91 | GLDKGEPVNAADAAALEHDKAYDQQLKAGDNPYLRYNHADAEFQERLQEDTSFGGNL |
| (AAVhu.41 | GRAVFQAKKRVLEPLGPVEEAAKTAPGKKRPVEPPPQRSPDSSTGIGKKGQQPAKKRLN |
| (AAS99289)) | FGQTGDSESVPDPQPIGEPPAGPSGLGSGTMAAGGGAPMADNNEGADGVGSSSGNWHC |
| | DSTWLGDRVITTSTRTWALPTYNNHLYKQISNGTSGGSTNDNTYFGYSTPWGYFDFNRF |
| | HCHFSPRDWQRLINNNWGFRPKRLSFKLFNIQVKEVTQNEGTKTVANNLTSTIQVFTDSE |
| | YQLPYVLGSAHQGCLPPFPADVFMIPQYGYLTLNNGSQAVGRSSFYCLEYFPSQMLRTG |
| | NNFEFSYTFEDVPFHSSYAHSQSLDRLMNPLIDQYLYYLSRTQSTGGTQGTQQLLFSQAG |
| | PANMSAQAKNWLPGPCYRQQRVSTTLSQNNNSNFAWTGATKYHLNGRDSLVNPGVAM |
| | ATHKDDEERFFPSSGVLMFGKQGAGRDNVDYSSVMLTSEEEIKTTNPVATEQYGVVAD |
| | NLQQTNTGPIVGNVNSQGALPGMVWQNRDVYLQGPIWAKIPHTDGNFHPSPLMGGFGL |
| | KHPPPQILIKNTPVPADPPTTFSQAKLASFITQYSTGQVSVEIEWELQKENSKRWNPEIQYT |
| | SNYYKSTNVDFAVNTEGTYSEPRPIGTRYLTRNL |
| SEQ ID | MAADGYLPDWLEDNLSEGIREWWDLKPGAPKPKANQQKQDDGRGLVLPGYKYLGPFN |
| NO: 92 | GLDKGEPVNAADAAALEHDKAYDQQLKAGDNPYLRYNHADAEFQERLQEDTSFGGNL |
| (AAVhu.42 | GRAVFQAKKRVLEPLGLVEEAAKTAPGKKRPVEPSPQRSPDSSTGIGKKGQQPAKKRLN |
| (AAS99290)) | FGQTGDSESVPDPQPIGEPPAGPSGLGSGTMAAGGGAPMADNNEGADGVGSSSGNWHC |
| | DSTWLGDRVITTSTRTWALPTYNNHLYKQISNGTSGGSTNDNTYFGYSTPWGYFDFNRF |
| | HCHFSPRDWQRLINNNWGFRPKRLSFKLFNIQVKEVTQNEGTKTIANNLTSTIQVFTDSE |
| | YQLPYVLGSAHQGCLPPFPADVFMIPQYGYLTLNNGSQAVGRSSFYCLEYFPSQMLRTG |
| | NNFEFSYTFEDVPFHSSYAHSQSLDRLMNPLIDQYLYYLSRTQSTGGTQGTQQLLFSQAG |
| | PANMSAQAKNWLPGPCYRQQRVSTTLSQSNNSNFAWTGATKYHLNGRDSLVNPGVAM |
| | ATHKDDEERFFPSSGVLMFGKQGAGRDNVDYSSVMLTSEEEIKTTNPVATEQYGVVAD |
| | NLQQTNTGPIVGNVNSQGALPGMVWQNRDVYLQGPIWAKIPHTDGNFHPSPLMGGLGL |
| | KHPPPQILIKNTPVPADPPTTFSQAKLASFITQYSTGQVSVEIEWELQKENSKRWNPEIQYT |
| | SNYYKSTNVDFAVNTEGTYSEPRPIGTRYLTRNL |
| SEQ ID | MAADGYLPDWLEDNLSEGIREWWDLKPGAPKPKANQQKQDDGRGLVLPGYKYLGPFN |
| NO: 93 | GLDKGEPVNAADAAALEHDKAYDQQLKAGDNPYPRYNHADAEFQERLQEDTPFGGNL |
| (AAVhu.43 | GRAVFQAKKRVLEPLGLVEEAAKTAPGKKRPVEPSPQRSPDSSTGIGKKGQQPAKKRLN |
| (AAS99291)) | FGQTGDSESVPDPQPIGEPPAGPSGLGSGTMAAGGGAPMADNNEGADGVGNASGNWHC |
| | DSTWLGDRVITTSTRTWALPTYNNHLYKQISSASTGASNDNHYFGYSTPWGYFDFNRFH |
| | CHFSPRDWQRLINNNWGFRPKRLNFKLFNIQVKEVTTNDGVTTIANNLTSTVQVFSDSEY |
| | QLPYVLGSAHQGCLPPFPADVFMIPQYGYLTLNNGSQAVGRSSFYCLEYFPSQMLRTGN |
| | NFTFSYTFEEVPLHSSYAHSQSLDRLMNPLIVQYLYYLNRTQNQSGSAQNKDLLFSRGSP |
| | AGMSVQPKNWLPGPCYRQQRVSKTKTDNNNSNFTWTGASKYNLNGRESIINPGTAMAS |
| | HKDDEDKFFPMSGVMIFGKESAGASNTALDNVMITDEEEIKATNPVATERFGTVAVNFQ |
| | SSSTDPATGDVHAMGALPGMVWQDRDVYLQGPIWAKIPHTDGHFHPSPLMGGFGLKNP |
| | PPQILIKNTPVPANPPAEFSATKFASFITQYSTGQVSVEIEWELQKENSKRWNPEVQYTSN |
| | YAKSASVDFTVDNNGLYTEPRPIGTRYLTRPL |
| SEQ ID | MAADGYLPDWLEDTLSEGIRQWWKLRPGPPPPKPAERHKDDSRGLVLPGYKYLGPFNG |
| NO: 94 | LDKGEPVNEADAAALEHDKAYDRQLDSGDNPYLKYNHADAEFQERLKEDTSFGGNLG |
| (AAVhu.44 | RAVFQAKKRVLEPLGLVEEGAETAPGKKRPVEQSPQGPDSSSGIGKTGQQPAKKRLNFG |
| (AAS99292)) | QTGDSESVPDPQPLGEPPATPAAVGPTTMASGGGAPMADNNEGADGVGNASGNWHCD |
| | STWLGDRVITTSTRTWALPTYNNHLYKQISSASTGASNDNHYFGYSTPWGYFDFNRFHC |
| | HFSPRDWQRLINNNWGFRPKRLNFKLFNIQVKEVTTNDGVTTIANNLTSTVQVFSDSEYQ |
| | LPYVLGSAHQGCLPPFPADVFMIPQYGYLTLNNGSQAVGRSSFYCLEYFPSQMLRTGNN |
| | FTFSYTFEEVPFHSSYAHSQSLDRLMNPLIDQYLYYPNRTQNQSGSAQNKDLLFSRGSPA |
| | GMSVQPKNWLPGPCYRQQRVSKTKTDNNNSNFTWTGASKYNLNGRESIINPGTAMASH |
| | KDDEDKFFPMSGVMIFGKESAGASNTALDNVMITDEEEIKATNPVATERFGTVAVNFQS |
| | SSTDPATGDVHAMGALPGMVWQGRDVYLQGPIWAKIPHTDGHFHPSPLMGGFGLKNPP |
| | PQILIKNTPVPANPPAEFSATKFASFITQYSTGQVSVEIEWELQKENSKRWNPEVQYTSNY |
| | AKSANVDFTVDNNGLYTEPRPIGTRYLTRPL |
| SEQ ID | MAADGYLPDWLEDNLSEGIREWWDLKPGAPKPKANQQKQDDGRGLVLPGYKYLGPFN |
| NO: 111 | GLDKGEPVNAADAAALEHDKAYDQQLKAGDNPYLRYNHADAEFQERLQEDTSFGGNL |
| (AAVrh.10 | GRAVFQAKKRVLEPLGLVEEGAKTAPGKKRPVEPSPQRSPDSSTGIGKKGQQPAKKRLN |
| (AAO88201)) | FGQTGDSESVPDPQPIGEPPAGPSGLGSGTMAAGGGAPMADNNEGADGVGSSSGNWHC |
| | DSTWLGDRVITTSTRTWALPTYNNHLYKQISNGTSGGSTNDNTYFGYSTPWGYFDFNRF |
| | HCHFSPRDWQRLINNNWGFRPKRLNFKLFNIQVKEVTQNEGTKTIANNLTSTIQVFTDSE |
| | YQLPYVLGSAHQGCLPPFPADVFMIPQYGYLTLNNGSQAVGRSSFYCLEYFPSQMLRTG |
| | NNFEFSYQFEDVPFHSSYAHSQSLDRLMNPLIDQYLYYLSRTQSTGGTAGTQQLLFSQAG |
| | PNNMSAQAKNWLPGPCYRQQRVSTTLSQNNNSNFAWTGATKYHLNGRDSLVNPGVAM |
| | ATHKDDEERFFPSSGVLMFGKQGAGKDNVDYSSVMLTSEEEIKTTNPVATEQYGVVAD |
| | NLQQQNAAPIVGAVNSQGALPGMVWQNRDVYLQGPIWAKIPHTDGNFHPSPLMGGFGL |
| | KHPPPQILIKNTPVPADPPTTFSQAKLASFITQYSTGQVSVEIEWELQKENSKRWNPEIQYT |
| | SNYYKSTNVDFAVNTDGTYSEPRPIGTRYLTRNL |
| SEQ ID | MAADGYLPDWLEDNLSEGIREWWDLKPGAPKPKANQQKQDDGRGLVLPGYKYLGPFN |
| NO: 112 | GLDKGEPVNEADAAALEHDKAYDKQLEQGDNPYLKYNHADAEFQERLQEDTSFGGNL |
| (AAVrh.13 | GRAVFQAKKRVLEPLGLVEEGAKTAPGKKRPIESPDSSTGIGKKGQQPAKKKLNFGQTG |
| (AAO88199)) | DSESVPDPQPLGEPPAAPSGLGSGTMAAGGGAPMADNNEGADGVGNASGNWHCDSTW |
| | LGDRVITTSTRTWALPTYNNHLYKQISSQSGATNDNHFFGYSTPWGYFDFNRFHCHFSPR |
| | DWQRLINNNWGFRPRKLRFKLFNIQVKEVTTNDGVTTIANNLTSTIQVFSDSEYQLPYVL |
| | GSAHQGCLPPFPADVFMIPQYGYLTLNNGSQSVGRSSFYCLEYFPSQMLRTGNNFEFSYT |
| | FEEVPFHSSYAHSQSLDRLMNPLIDQYLYYLARTQSTTGSTRELQFHQAGPNTMAEQSK |
| | NWLPGPCYRQQRLSKNIDSNNNSNFAWTGATKYHLNGRNSLTNPGVAMATNKDDEDQ |
| | FFPINGVLVFGETGAANKTTLENVLMTSEEEIKTTNPVATEEYGVVSSNLQSSTAGPQTQ |
| | TVNSQGALPGMVWQNRDVYLQGPIWAKIPHTDGNFHPSPLMGGFGLKHPPPQILIKNTP |
| | VPANPPEVFTPAKFASFITQYSTGQVSVEIEWELQKENSKRWNPEIQYTSNYAKSNNVEF |
| | AVNNEGVYTEPRPIGTRYLTRNL |
| SEQ ID | MAADGYLPDWLEDNLSEGIREWWDLKPGAPKPKANQQKQDDGRGLVLPGYKYLGPFN |
| NO: 113 | GLDKGEPVNEADAAALEHDKAYDKQLEQGDNPYLKYNHADAEFQERLQEDTSFGGNL |
| (AAVrh.19 | GRAVFQAKKRVLEPLGLVEEGAKTAPGKKRPVEPSPQRSPDSSTGIGKTGQQPAKKRLN |
| (AAO88194)) | FGQTGDSESVPDPQPIGEPPAGPSGLGSGTMAAGGGAPMADNNEGADGVGSSSGNWHC |
| | DSTWLGDRVITTSTRTWALPTYNNHLYKQISNGTSGGSTNDNTYFGYSTPWGYFDFNRF |
| | HCHFSPRDWQRLINNNWGFRPRKLRFKLFNIQVKEVTTDDGVTTIANNLTSTIQVFSDSE |
| | YQLPYVLGSAHQGCLPPFPADVFMIPQYGYLTLNNGSQSVGRSSFYCLEYFPSQMLRTG |
| | NNFEFSYTFEEVPFHSSYAHSQSLDRLMNPLIDQYLYYLARTQSTTGSTRELQFHQAGPN |
| | TMAEQSKNWLPGPCYRQQRLSKNIDSNNNSNFAWTGATKYHLNGRNSLTNPGVAMAT |
| | NKDDEDQFFPINGVLVFGKTGAANKTTLENVLMTSEEEIKTTNPVATEEYGVVSSNLQSS |
| | TAGPQTQTVNSQGALPGMVWQNRDVYLQGPIWAKIPHTDGNFHPSPLMDGFGLKHPPP |
| | QILIKNTPVPANPPEVFTPAKFASFITQYSTGQVSVEIEWELQKENSKRWNPEIQYTSNYA |
| | KSNNVEFAVNNEGVYTEPRPIGTRYLTRNL |
| SEQ ID | MAADGYLPDWLEDNLSEGIREWWDLKPGAPKPKANQQKQDDGRGLVLPGYKYLGPFN |
| NO: 114 | GLDKGEPVNAADAAALEHDKAYDQQLKAGDNPYLRYNHADAEFQERLQEDTSFGGNL |
| (AAVrh.22 | GRAVFQAKKRVLEPLGLVEEGAKTAPGKKRPIESPDSSTGIGKKGQQPAKKKLNFGQTG |
| (AAO88192)) | DSESVPDPQPIGEPPAGPSGLGSGTMAAGGGAPMADNNEGADGVGNASGNWHCDSTW |
| | LGDRVITTSTRTWALPTYNNHLYKQISSQSGATNDNHFFGYSTPWGYFDFNRFHCHFSPR |
| | DWQRLINNNWGFRPRKLRFKLFNIQVKEVTTNDGVTTIANNLTSTIQVFSDSEYQLPYVL |
| | GSAHQGCLPPFPADVFMIPQYGYLTLNNGSQSVGRSSFYCLEYFPSQMLRTGNNFEFSYT |
| | FEEVPFHSSYAHSQSLDRLMNPLIDQYLYYLARTQSTTGSTRELQFHQAGPNTMAEQSK |
| | NWLPGPCYRRQRLSKDIDSNNNSNFAWTGATKYHLNGRNSLTNPGVAMATNKDDEDQ |
| | FFPINGVLVFGKTGAANKTTLENVLMTSEEEIKTTNPVATEEYGVVSSNLQSSTAGPQTQ |
| | TVNSQGALPGMVWQNRDVYLQGPIWAKIPHTDGNFHPSPLMGGFGLKHPPPQILIKNTP |
| | VPANPPEVFTPAKFASFITQYSTGQVSVEIEWELQKENSKRWNPEIQYTSNYAKSNNVEF |
| | AVNNEGVYTEPRPIGTRYLTRNL |
| SEQ ID | MAADGYLPDWLEDNLSEGIREWWDLKPGAPKPKANQQKQDDGRGLVLPGYKYLGPFN |
| NO: 115 | GLDKGEPVNEADAAALEHDKAYDKQLEQGDNPYLKYNHADAEFQERLQEDTSFGGNL |
| (AAVrh.23 | GRAVFQAKKRVLEPLGLVEEGAKTAPGKKRPVEPSPQRSPDSSTGIGKTGQQPAKKRLN |
| (AAO88191)) | FGQTGDSESVPDPQPIGEPPAGPSGLGSGTMAAGGGAPMADNNEGADGVGSSSGNWHC |
| | DSTWLGDRVITTSTRTWALPTYNNHLYKQISNGTSGGSTNDNTYFGYSTPWGYFDFNRF |
| | HCHFSPRDWQRLINNNWGFRPKRLNFKLFNIQVKEVTQNEGTKTIANNLTSTIQVFTDSE |
| | YQLPYVLGSAHQGCLPPFPADVFMIPQYGYLTLNNGSQAVGRSSFYCLEYFPSQMLRTG |
| | NNFEFSYQFEDVPFHSSYAHSQSLDRLTNPLIDQYLYYLARTQSTTGSTRGLQFHQAGPN |
| | TMAEQSKNWLPGPCYRQQRLSKNIDSNNNSNFAWTGATKYHLNGRNSLTNPGVAMAT |
| | NKDDEDQFFPINGVLVFGKTGAANKTTLENVLMTSEEEIKTTNPVATEEYGVVSSNLQSS |
| | TAGPQTQTVNSQGALPGMVWQNRDVYLQGPIWAKIPHTDGNFHPSPLMGGFGLKHPPP |
| | QILIKYTSNYYKSTNVDFAVNTEGTYSEPRPIGTRYLTRNL |
| SEQ ID | MAADGYLPDWLEDNLSEGIREWWDLKPGAPKPKANQQKQDDGRGLVLPGYKYLGPFN |
| NO: 116 | GLDKGEPVNAADAAALEHDKAYDQQLKAGDNPYLRYNHADAEFQERLQEDTSFGGNL |
| (AAVrh.24 | GRAVFQAKKRVLEPLGLVEEGAKTAPGKKRPIESPDSSTGIGKKGQQPAKKKLNFGQTG |
| (AAO88190)) | DSESVPDPQPIGEPPAGPSGLGSGTMAAGGGAPMADNNEGADGVGSSSGNWHCDSTWL |
| | GDRVITTSTRTWALPTYNNHLYKQISNGTSGGSTNDNTYFGYSTPWGYFDFNRFHCHFSP |
| | RDWQRLINNNWGFRPKRLNFKLFNIQVKEVTQNEGTKTIANNLTSTIQVFTDSEYQLPYV |
| | LGSAHQGCLPPFPADVFMIPQYGYLTLNNGSQAVGRSSFYCLEYFPSQMLRTGNNFEFSY |
| | QFEDVPFHSSYAHSQSLDRLMNPLIDQYLYYLSRTQSTGGTAGTQQLLFSQAGPNNMSA |
| | QAKNWLPGPCYRQQRVSTTVSQNNNSNFAWTGATKYHLNGRDSLVNPGVAMATHKG |
| | DEERFFPSSGVLMFGKQGAGKDNVDYSSVMLTSEEEIKTTNPVATEQYGVVADNLQQQ |
| | NAAPIVGAVNSQGALPGMVWQNRDVYLQGPIWAKIPHTDGNFHPSPLMGGFGLKHPPP |
| | QILIKNTPVPADPPTTFSQAKLASFITQYSTGQVSVEIEWELQKENSKRWNPEIQYTSNYY |
| | KSTNVDFAVNTEGTYSEPRPIGTRYLTRSL |
| SEQ ID | MAADGYLPDWLEDNLSEGIREWWDLKPGAPKPKANQQKQDDGRGLVLPGYKYLGPFN |
| NO: 117 | GLDKGEPVNAADAAALEHDKAYDQQLKAGDNPYLRYNHADAEFQERLQEDTSFGGNL |
| (AAVrh.35 | GRAVFQAKKRVLEPLGLVEEGAKTAPGKKRPIDSPDSSTGIGKKGQQPAKKKLNFGQTG |
| (AAO88186)) | DSESVPDPQPLGEPPAAPSSVGSGTMAAGGGAPMADNNEGADGVGNASGNWHCDSTW |
| | LGDRVITTSTRTWALPTYNNHLYKQISSSSSGATNDNHYFGYSTPWGYFDFNRFHCHFSP |
| | RDWQRLINNNWGFRPKKLRFKLFNIQVKEVTTNDGVTTIANNLTSTVQVFSDSEYQLPY |
| | VLGSAHQGCLPPFPADVFMIPQYGYLTLNNGSQSVGRSSFYCLEYFPSQMLRTGNNFEFS |
| | YSFEDVPFHSSYAHSQSLDRLMNPLIDQYLYYLARTQSTTGSTRELQFHQAGPNTMAEQS |
| | KNWLPGPCYRQQGLSKNLDFNNNSNFAWTAATKYHLNGRNSLTNPGIPMATNKDDED |
| | QFFPINGVLVFGKTGAANKTTLENVLMTSEEEIKTTNPVATEEYGVVSSNLQPSTAGPQS |
| | QTINSQGALPGMVWQNRDVYLQGPIWAKIPHTDGNFHPSPLMGGFGLKHPPPQILIKNTP |
| | VPANPPEVFTPAKFASFITQYSTGQVSVEIEWELQKENSKRWNPEIQYTSNYAKSNNVEF |
| | AVNPDGVYTEPRPIGTRYLPRNL |
| SEQ ID | MAADGYLPDWLEDNLSEGIREWWDLKPGAPKPKANQQKQDDGRGLVLPGYKYLGPFN |
| NO: 118 | GLDKGEPVNAADAAALEHDKAYDQQLEAGDNPYLRYNHADAEFQERLQEDTSFGGNL |
| (AAVrh.43 | GRAVFQAKKRVLEPLGLVEEGAKTAPGKKRPVEQSPQEPDSSSGIGKKGQQPARKRLNF |
| (AAS99245)) | GQTGDSESVPDPQPLGEPPAAPSGVGPNTMAAGGGAPMADNNEGADGVGSSSGNWHC |
| | DSTWLGDRVITTSTRTWALPTYNNHLYKQISNGTSGGATNDNTYFGYSTPWGYFDFNRF |
| | HCHFSPRDWQRLINNNWGFRPKRLSFKLFNIQVKEVTQNEGTKTIANNLTSTIQVFTDSE |
| | YQLPYVLGSAHQGCLPPFPADVFMIPQYGYLTLNNGSQAVGRSSFYCLEYFPSQMLRTG |
| | NNFQFTYTFEDVPFHSSYAHSQSLDRLMNPLIDQYLYYLSRTQTTGGTANTQTLGFSQGG |
| | PNTMANQAKNWLPGPCYRQQRVSTTTGQNNNSNFAWTAGTKYHLNGRNSLANPGIAM |
| | ATHKDDEERFFPVTGSCFWQQNAARDNADYSDVMLTSEEEIKTTNPVATEEYGIVADNL |
| | QQQNTAPQIGTVNSQGALPGMVWQNRDVYLQGPIWAKIPHTDGNFHPSPLMGGFGLKH |
| | PPPQILIKNTPVPADPPTTFNQSKLNSFITQYSTGQVSVEIEWELQKENSKRWNPEIQYTSN |
| | YYKSTSVDFAVNTEGVYSEPRPIGTRYLTRNL |
| SEQ ID | MAADGYLPDWLEDNLSEGIREWWDLKPGAPKPKANQQKQDDGRGLVLPGYKYLGPFN |
| NO: 119 | GLDKGEPVNAADAAALEHDKAYDQQLKAGDNPYLRYNHADAEFQERLQEDTSFGGNL |
| (AAVrh.48 | GRAVFQAKKRVLEPLGLVEEAAKTAPGKKRPVEPSPQRSPDSSTGIGKKGQQPARKRLN |
| (AAS99246)) | FGQTGDSESVPDPQPIGEPPAGPSGLGSGTMAAGGGAPMADNNKGADGVGNASGNWH |
| | CDSTWLGDRVITTSTRTWALPTYNNHLYKQISSQSAGSTNDNVYFGYSTPWGYFDFNRF |
| | HCHFSPRDWQRLINSNWGFRPKKLNFKLFNIQVKEVTTNDGVTTIANNLTSTVQVFSDSE |
| | YQLPYVLGSAHQGCLPPFPADVFMIPQYGYLTLNNGSQSVGRSSFYCLEYFPSQMLRTG |
| | NNFTFSYTFEDVPFHSSYAHSQSLDRLMNPLIDQYLYYLARTQSNAGGTAGNRELQFYQ |
| | GGPTTMAEQAKNWLPGPCFRQQRVSKTLDQNNNSNFAWTGATKYHLNGRNSLVNPGV |
| | AMATHKDDEERFFPSSGVLIFGKTGAANKTTLENVLMTNEEEIRPTNPVATEEYGTVSSN |
| | LQAANTAAQTQVVNNQGALPGMVWQNRDVYLQGPIWAKIPHTDGNFHPSPLMGGFGL |
| | KHPPPQILIKNTPVPANPPEVFTPAKFASFITQYSTGQVSVEIEWELQKENSKRWNPEIQYT |
| | SNFDKQTGVDFAVDSQGVYSEPRPIGTRYLTRNL |
| SEQ ID | MAADGYLPDWLEDNLSEGIREWWDLKPGAPKPKANQQKQDDGRGLVLPGYKYLGPFN |
| NO: 120 | GLDKGEPVNAADAAALEHDKAYDQQLKAGDNPHLRYNHADAEFQERLQEDTSFGGNL |
| (AAVrh.49 | GRAVFQAKKRVLEPLGLVEEGAKTAPGKKRPVEPSPQRSPDSSTGIGKKGQQPARKRLN |
| (AAS99247)) | FGQTGDSESVPDPQLIGEPPAAPSSVGSGTMAAGGGAPMADNNEGADGVGSSSGNWHC |
| | DSTWLGDRVITTSTRTWALPTYNNHLYKQISNGTSGGSTNDNTYFGYSTPWGYFDFNRF |
| | HCHFSPRDWQRLINNNWGFRPKRLSFKLFNIQVKEVTQNEGTKTIANNLTSTIQVFTDSE |
| | YQLPYVLGSAHQGCLPPFPADVFMIPQYGNLTLNNGSQAVGRSSFYCLEYFPSQMLRTG |
| | NNFSFSYTFEDVPFHSSYAHSQSLDRLMNPLIDQYLYYLSRTQSTGGTAGTQQLLFSQAG |
| | PSNMSAQARNWLPGPCYRQQRVSTTLSQNNNSNFAWTGATKYHLNGRDSLVNPGVAM |
| | ATNKDDEDRFFPSSGILMFGKQGAGKDNMGYSNVMLTSEEEIKTTNPVATEQYGVVAD |
| | NLQQQNTAPIVGAVNSQGALPGMVWQNRDVYLQGPIWAKIPHTDGNFHPSPLMGGFGL |
| | KHPPPQILIKNTPVPADPPTAFNQAKLNSFITQYGTGQVSVEIEWELQKENSKRWNPEIQY |
| | TSNYYKSTNVDFAVNTEGVYSEPRPIGTRYLTRNL |
| SEQ ID | MAADGYLPDWLEDNLSEGIREWWDLKPGAPKPKANQQKQDDGRGLVLPGYKYLGPFN |
| NO: 121 | GLDKGEPVNAADAAALEHDKAYDQQLKAGDNPYLRYNHADAEFQERLQEDTSFGGNL |
| (AAVrh.50 | GRAVFQAKKRVLEPLGLVEEGAKTAPGKKRPVEPSPQRSPDSSTGIGKKGQQPAGKRLN |
| (AAS99248)) | FGQTGDSESVPDPQPIGEPPAAPSSVGSGTMAAGGGAPMADNNEGADGVGSSSGNWHC |
| | DSTWLGDRVITTSTRTWALPTYNNHLYKQISNGTSGGSTNDNTYFGYSTPWGYFDFNRF |
| | HCHFSPRDWQRLINNNWGFRPKRLSFKLFNIQVKEVTQNEGTKTIANNLTSTIQVFTDSE |
| | YQLPYVLGSAHQGCLPPFPADVFMIPQYGYLTLNNGSQAVGRSSFYCLEYFPSQMLRTG |
| | NNFSFSYTFEDVPFHSSYAHSQSLDRLMNPLVDQYLYYLSRTQSTGGTAGTQQLLFSQA |
| | GPSNMSAQARNWLPGPCYRQQRVSTTLSQNNNSNFAWTGATKYHLNGRDSLVNPGVA |
| | MATNKDDEDRFFPSSGILMFGKQGAGKDNVDYSNVMLTSEEEIKTTNPVATEQYGVVA |
| | DNLQQQNTAPIVGAVNSQGALPGMVWQNRDVYLQGPIWAKIPHTDGNFHPSPLMGGFG |
| | LKHPPPQILIKNTPVPADPPTAFNQAKLNSFITQYSTGQVSVEIEWELQKENSKRWSPEIQ |
| | YTSNYYKSTNVDFAVNTEGVYSEPRPIGTRYLTRNL |
| SEQ ID | MAADGYLPDWLEDNLSEGIREWWDLKPGAPKPKANQQKQDDGRGLVLPGYKYLGPFN |
| NO: 132 | GLDKGEPVNAADAAALEHDKAYDQQLKAGDNPYLRYNHADAEFQERLQEDTSFGGNL |
| (Anc80) | GRAVFQAKKRVLEPLGLVEEGAKTAPGKKRPVEQSPQEPDSSSGIGKKGQQPAXKRLNF |
| | GQTGDSESVPDPQPLGEPPAAPSGVGSNTMAXGGGAPMADNNEGADGVGNASGNWHC |
| | DSTWLGDRVITTSTRTWALPTYNNHLYKQISSQSGXSTNDNTYFGYSTPWGYFDFNRFH |
| | CHFSPRDWQRLINNNWGFRPKXLNFKLFNIQVKEVTTNDGTTTIANNLTSTVQVFTDSEY |
| | QLPYVLGSAHQGCLPPFPADVFMIPQYGYLTLNNGSQAVGRSSFYCLEYFPSQMLRTGN |
| | NFXFSYTFEDVPFHSSYAHSQSLDRLMNPLIDQYLYYLSRTQTTSGTAGNRXLQFSQAGP |
| | SSMANQAKNWLPGPCYRQQRVSKTXNQNNNSNFAWTGATKYHLNGRDSLVNPGPAM |
| | ATHKDDEDKFFPMSGVLIFGKQGAGNSNVDLDNVMITXEEEIKTTNPVATEXYGTVATN |
| | LQSXNTAPATGTVNSQGALPGMVWQXRDVYLQGPIWAKIPHTDGHFHPSPLMGGFGLK |
| | HPPPQILIKNTPVPANPPTTFSPAKFASFITQYSTGQVSVEIEWELQKENSKRWNPEIQYTS |
| | NYNKSTNVDFAVDINGVYSEPRPIGTRYLTRNL |
| | (168)..(168) Lys or Arg |
| | (205)..(205) Ala or Ser |
| | (266)..(266) Ala or Gly |
| | (311)..(311) Arg or Lys |
| | (411)..(411) Glu or Gln |
| | (460)..(460) Thr or Glu |
| | (493)..(493) Ala or Thr |
| | (562)..(562) Ser or Asn |
| | (576)..(576) Gln or Glu |
| | (587)..(587) Ser or Ala |
| | (609)..(609) Asn or Asp |
| SEQ ID | MAADGYLPDWLEDNLSEGIREWWDLKPGAPKPKANQQKQDDGRGLVLPGYKYLGPFN |
| NO: 133 | GLDKGEPVNAADAAALEHDKAYDQQLKAGDNPYLRYNHADAEFQERLQEDTSFGGNL |
| (Anc81 | GRAVFQAKKRVLEPLGLVEEGAKTAPGKKRPVEQSPQEPDSSXGIGKKGQQPAXKRLNF |
| (AKU89596)) | GQTGDSESVPDPQPLGEPPAAPSGVGSNTMAAGGGAPMADNNEGADGVGNASGNWHC |
| | DSTWLGDRVITTSTRTWALPTYNNHLYKQISXXQSGGSTNDNTYFGYSTPWGYFDFNRF |
| | HCHFSPRDWQRLINNNWGFRPKXLNFKLFNIQVKEVTINDGTTTIANNLTSTVQVFTDSE |
| | YQLPYVLGSAHQGCLPPFPADVFMIPQYGYLTLNNGSQAVGRSSFYCLEYFPSQMLRTG |
| | NNFXFSYTFEDVPFHSSYAHSQSLDRLMNPLIDQYLYYLSRTQTTGGTAGNXXLQFSQA |
| | GPSSMANQAKNWLPGPCYRQQRVSKTTNQNNNSNFAWTGATKYHLNGRDSLVNPGVA |
| | MATHKDDEDRFFPSSGVLIFGKQGAGNXNVDXXNVMITXEEEIKTTNPVATEEYGXVAT |
| | NLQSXNTAPQTGTVNSQGALPGMVWQNRDVYLQGPIWAKIPHTDGNFHPSPLMGGFGL |
| | KHPPPQILIKNTPVPANPPTTFXPAKFASFITQYSTGQVSVEIEWELQKENSKRWNPEIQYT |
| | SNYNKSTNVDFAVDTEGVYSEPRPIGTRYLTRNL |
| | (157)..(157) Thr or Ser |
| | (168)..(168) Lys or Arg |
| | (262)..(262) Asn or Ser |
| | (263)..(263) Ser or His |
| | (312)..(312) Arg or Lys |
| | (412)..(412) Glu or Gln |
| | (460)..(460) Arg or Gln |
| | (461)..(461) Thr or Glu |
| | (552)..(552) Asp or Ser |
| | (556)..(556) Leu or Tyr |
| | (557)..(557) Asp or Ser |
| | (563)..(563) Ser or Asn |
| | (580)..(580) Val or Ile |
| | (588)..(588) Asn or Ser |
| | (664)..(664) Ser or Thr |
| SEQ ID | MAADGYLPDWLEDNLSEGIREWWDLKPGAPKPKANQQKQDDGRGLVLPGYKYLGPFN |
| NO: 134 | GLDKGEPVNAADAAALEHDKAYDQQLKAGDNPYLRYNHADAEFQERLQEDTSFGGNL |
| (Anc82 | GRAVFQAKKRVLEPLGLVEEGAKTAPGKKRPVEQSPQREPDSSXGIGKKGQQPAXKRLN |
| (AKU89597)) | FGQTGDSESVPDPQPLGEPPAAPSGVGSNTMAAGGGAPMADNNEGADGVGNSSGNWH |
| | CDSTWLGDRVITTSTRTWALPTYNNHLYKQISNGTSGGSTNDNTYFGYSTPWGYFDFNR |
| | FHCHFSPRDWQRLINNNWGFRPKRLNFKLFNIQVKEVTTNEGTKTIANNLTSTVQVFTDS |
| | EYQLPYVLGSAHQGCLPPFPADVFMIPQYGYLTLNNGSQAVGRSSFYCLEYFPSQMLRT |
| | GNNFQFSYTFEDVPFHSSYAHSQSLDRLMNPLIDQYLYYLSRTQTTGGTAGTQTLQFSQA |
| | GPSSMANQAKNWLPGPCYRQQRVSTTTNQNNNSNFAWTGATKYHLNGRDSLVNPGVA |
| | MATHKDDEDRFFPSSGVLIFGKQGAGNDNVDYSNVMITXEEEIKTTNPVATEEYGVVAT |
| | NLQSANTAPQTGTVNSQGALPGMVWQNRDVYLQGPIWAKIPHTDGNFHPSPLMGGFGL |
| | KHPPPQILIKNTPVPADPPTTFNQAKLNSFITQYSTGQVSVEIEWELQKENSKRWNPEIQY |
| | TSNYYKSTNVDFAVNTEGVYSEPRPIGTRYLTRNL |
| | (158)..(158) Thr or Ser |
| | (169)..(169) Lys or Arg |
| | (564)..(564) Ser or Asn |
| SEQ ID | MAADGYLPDWLEDNLSEGIREWWDLKPGAPKPKANQQKQDDGRGLVLPGYKYLGPFN |
| NO: 135 | GLDKGEPVNAADAAALEHDKAYDQQLKAGDNPYLRYNHADAEFQERLQEDTSFGGNL |
| (Anc83 | GRAVFQAKKRVLEPLGLVEEGAKTAPGKKRPVEQSPQREPDSSXGIGKKGQQPAXKRLN |
| (AKU89598)) | FGQTGDSESVPDPQPLGEPPAAPSGVGSNTMAAGGGAPMADNNEGADGVGSSSGNWHC |
| | DSTWLGDRVITTSTRTWALPTYNNHLYKQISNGTSGGSTNDNTYFGYSTPWGYFDFNRF |
| | HCHFSPRDWQRLINNNWGFRPKRLXFKLFNIQVKEVTQNEGTKTIANNLTSTIQVFTDSE |
| | YQLPYVLGSAHQGCLPPFPADVFMIPQYGYLTLNNGSQAVGRSSFYCLEYFPSQMLRTG |
| | NNFXFSYTFEDVPFHSSYAHSQSLDRLMNPLIDQYLYYLSRTQTTGGTAGTQTLQFSQAG |
| | PSXMANQAKNWLPGPCYRQQRVSTTTSQNNNSNFAWTGATKYHLNGRDSLVNPGVAM |
| | ATHKDDEXRFFPSS |
| | GXLIFGKQGAGKDNVDYSNVMLTSEEEIKTTNPVATEEYGVVADNLQQQNTAPQXGTV |
| | NSQGALPGMVWQNRDVYLQGPIWAKIPHTDGNFHPSPLMGGFGLKHPPPQILIKNTPVP |
| | ADPPTTFNQAKLNSFITQYSTGQVSVEIEWELQKENSKRWNPEIQYTSNYYKSTNVDFAV |
| | NTEGVYSEPRPIGTRYLTRNL |
| | (158)..(158) Thr or Ser |
| | (169)..(169) Arg or Lys |
| | (315)..(315) Asn or Ser |
| | (413)..(413) Gln or Glu |
| | (472)..(472) Asn, Thr or Ser |
| | (534)..(534) Asp or Glu |
| | (542)..(542) Ile or Val |
| | (595)..(595) Ile or Val |
| SEQ ID | MAADGYLPDWLEDNLSEGIREWWDLKPGAPKPKANQQKQDDGRGLVLPGYKYLGPFN |
| NO: 136 | GLDKGEPVNAADAAALEHDKAYDQQLKAGDNPYLRYNHADAEFQERLQEDTSFGGNL |
| (Anc84 | GRAVFQAKKRVLEPLGLVEEGAKTAPGKKRPVEPSPQRSPDSSTGIGKKGQQPAXKRLN |
| (AKU89599)) | FGQTGDSESVPDPQPIGEPPAAPSGVGSGTMAAGGGAPMADNNEGADGVGSSSGNWHC |
| | DSTWLGDRVITTSTRTWALPTYNNHLYKQISNGTSGGSTNDNTYFGYSTPWGYFDFNRF |
| | HCHFSPRDWQRLINNNWGFRPKRLXFKLFNIQVKEVTQNEGTKTIANNLTSTIQVFTDSE |
| | YQLPYVLGSAHQGCLPPFPADVFMIPQYGYLTLNNGSQAVGRSSFYCLEYFPSQMLRTG |
| | NNFEFSYTFEDVPFHSSYAHSQSLDRLMNPLIDQYLYYLSRTQSTGGTAGTQQLLFSQAG |
| | PSNMSAQAKNWLPGPCYRQQRVSTTLSQNNNSNFAWTGATKYHLNGRDSLVNPGVAM |
| | ATHKDDEXRFFPSSGXLMFGKQGAGKDNVDYSNVMLTSEEEIKTTNPVATEQYGVVAD |
| | NLQQQNTAPIVGAVNSQGALPGMVWQNRDVYLQGPIWAKIPHTDGNFHPSPLMGGFGL |
| | KHPPPQILIKNTPVPADPPTTFNQAKLNSFITQYSTGQVSVEIEWELQKENSKRWNPEIQY |
| | TSNYYKSTNVDFAVNTEGVYSEPRPIGTRYLTRNL |
| | (169)..(169) Arg or Lys |
| | (315)..(315) Asn or Ser |
| | (534)..(534) Asp or Glu |
| | (542)..(542) Ile or Val |
| SEQ ID | MAADGYLPDWLEDNLSEGIREWWDLKPGAPKPKANQQKQDDGRGLVLPGYKYLGPFN |
| NO: 137 | GLDKGEPVNAADAAALEHDKAYDQQLKAGDNPYLRYNHADAEFQERLQEDTSFGGNL |
| (Anc94) | GRAVFQAKKRVLEPLGLVEEGAKTAPGKKRPVEPSPQRSPDSSTGIGKKGQQPAKKRLN |
| | FGQTGDSESVPDPQPIGEPPAGPSGLGSGTMAAGGGAPMADNNEGADGVGSSSGNWHC |
| | DSTWLGDRVITTSTRTWALPTYNNHLYKQISNGTSGGSTNDNTYFGYSTPWGYFDFNRF |
| | HCHFSPRDWQRLINNNWGFRPKRLNFKLFNIQVKEVTQNEGTKTIANNLTSTIQVFTDSE |
| | YQLPYVLGSAHQGCLPPFPADVFMIPQYGYLTLNNGSQAVGRSSFYCLEYFPSQMLRTG |
| | NNFEFSYTFEDVPFHSSYAHSQSLDRLMNPLIDQYLYYLSRTQSTGGTAGTQQLLFSQAG |
| | PXNMSAQAKNWLPGPCYRQQRVSTTLSQNNNSNFAWTGATKYHLNGRDSLVNPGVAM |
| | ATHKDDEERFFPSSGVLMFGKQGAGKDNVDYSSVMLTSEEEIKTTNPVATEQYGVVAD |
| | NLQQQNTAPIVGAVNSQGALPGMVWQNRDVYLQGPIWAKIPHTDGNFHPSPLMGGFGL |
| | KHPPPQILIKNTPVPADPPTTFSQAKLASFITQYSTGQVSVEIEWELQKENSKRWNPEIQYT |
| | SNYYKSTNVDFAVNTEGTYSEPRPIGTRYLTRNL |
| | (471)..(471) Ser or Asn |
| SEQ ID | MAADGYLPDWLEDNLSEGIREWWDLKPGAPKPKANQQKQDDGRGLVLPGYKYLGPFN |
| NO: 138 | GLDKGEPVNAADAAALEHDKAYDQQLKAGDNPYLRYNHADAEFQERLQEDTSFGGNL |
| (Anc110 | GRAVFQAKKRVLEPLGLVEEGAKTAPGKKRPVEQSPQEPDSSXLGIGKTGQQPAXKRLN |
| (AKU89600)) | FGQTGDSESVPDPQPLGEPPAAPSGVGSNTMASGGGAPMADNNEGADGVGNSSGNWHC |
| | DSTWLGDRVITTSTRTWALPTYNNHLYKQISNGTSGGSTNDNTYFGYSTPWGYFDFNRF |
| | HCHFSPRDWQRLINNNWGFRPKRLNFKLFNIQVKEVTTNEGTKTIANNLTSTVQVFTDSE |
| | YQLPYVLGSAHQGCLPPFPADVFMIPQYGYLTLNNGSQAVGRSSFYCLEYFPSQMLRTG |
| | NNFQFSYTFEDVPFHSSYAHSQSLDRLMNPLIDQYLYYLSRTQTTGTXGTQTLXFSQAGP |
| | SSMANQARNWVPGPCYRQQRVSTTTNQNNNSNFAWTGAXKXXLNGRDSLMNPGVAM |
| | ASHKDDEDRFFPSSGVLIFGKQGAGNDNVDYSXVMITNEEEIKTTNPVATEEYGAVATN |
| | XQXLANTQAQTGLVHNQGVLPGMVWQNRDVYLQGPIWAKIPHTDGNFHPSPLMGGFG |
| | LKHPPPQILIKNTPVPADPPTTFNQAKLNSFITQYSTGQVSVEIEWELQKENSKRWNPEIQ |
| | YTSNYYKSTNVDFAVNTEGVYSEPRPIGTRYLTRNL |
| | (157)..(157) Ser or Thr |
| | (169)..(169) Lys or Arg |
| | (457)..(457) Ala or Gly |
| | (463)..(463) Gln or Ala |
| | (508)..(508) Thr or Ala |
| | (510)..(510) Tyr or Phe |
| | (511)..(511) His or Lys |
| | (558)..(558) Gln or Asn |
| | (585)..(585) Asn or His |
| | (587)..(587) Ser or Ala |
| SEQ ID | MAADGYLPDWLEDNLSEGIREWWDLKPGAPKPKANQQKQDDGRGLVLPGYKYLGPFN |
| NO: 139 | GLDKGEPVNAADAAALEHDKAYDQQLKAGDNPYLRYNHADAEFQERLQEDTSFGGNL |
| (Anc113 | GRAVFQAKKRVLEPLGLVEEGAKTAPGKKRPVEXSPQRSPDSSTGIGKKGQQPAXKRLN |
| (AKU89601)) | FGQTGDSESVPDPQPLGEPPAAPSGVGSGTMAAGGGAPMADNNEGADGVGNASGNWH |
| | CDSTWLGDRVITTSTRTWALPTYNNHLYKQISSQSAGSTNDNTYFGYSTPWGYFDFNRF |
| | HCHFSPRDWQRLINNNWGFRPKKLXFKLFNIQVKEVTTNDGVTTIANNLTSTVQVFSDSE |
| | YQLPYVLGSAHQGCLPPFPADVFMIPQYGYLTLNNGSQSVGRSSFYCLEYFPSQMLRTG |
| | NNFEFSYTFEDVPFHSSYAHSQSLDRLMNPLIDQYLYYLARTQSTTGGTAGNRELQFXQA |
| | GPSTMAEQAKNWLPGPCYRQQRVSKTLDQNNNSNFAWTGATKYHLNGRNSLVNPGVA |
| | MATHKDDEDRFFPSSGVLIFGKTGAANKTTLENVLMTXEEEIKTTNPVATEEYGXVSSNL |
| | QSXNTAPQTQTVNSQGALPGMVWQNRDVYLQGPIWAKIPHTDGNFHPSPLMGGFGLKH |
| | PPPQILIKNTPVPANPPEVFTPAKFASFITQYSTGQVSVEIEWELQKENSKRWNPEIQYTSN |
| | YDKSTNVDFAVDSEGVYSEPRPIGTRYLTRNL |
| | (148)..(148) Pro or Gln |
| | (169)..(169) Lys or Arg |
| | (314)..(314) Arg or Asn |
| | (466)..(466) Tyr or His |
| | (563)..(563) Asn or Ser |
| | (580)..(580) Val or Ile |
| | (588)..(588) Ala or Ser |
| SEQ ID | MAADGYLPDWLEDNLSEGIREWWDLKPGAPKPKANQQKQDDGRGLVLPGYKYLGPFN |
| NO: 140 | GLDKGEPVNAADAAALEHDKAYDQQLKAGDNPYLRYNHADAEFQERLQEDTSFGGNL |
| (Anc126 | GRAVFQAKKRVLEPLGLVEEGAKTAPGKKRPVEQSPQEPDSSSGIGKXGQQPAXKRLNF |
| (AKU89602)) | GQTGDSESVPDPQPLGEPPAAPSGVGSNTMASGGGAPMADNNEGADGVGNXSGNWHC |
| | DSTWLGDRVITTSTRTWALPTYNNHLYKQISSQSGASNDNHYFGYSTPWGYFDFNRFHC |
| | HFSPRDWQRLINNNWGFRPKXLNFKLFNIQVKEVTINDGTTTIANNLTSTVQVFTDSEYQ |
| | LPYVLGSAHQGCLPPFPADVFMIPQYGYLTLNNGSQAVGRSSFYCLEYFPSQMLRTGNN |
| | FXFSYTFEDVPFHSSYAHSQSLDRLMNPLIDQYLYYLXRTQTTSGTAQNRELXFSQAGPS |
| | SMXNQAKNWLPGPCYRQQRVSKTANDNNNSNFAWTGATKYHLNGRDSLVNPGPAMA |
| | SHKDDEDKFFPMSGVLIFGKQGAGASNVDLDNVMITDEEEIKTTNPVATEQYGTVATNL |
| | QSSNTAPATGTVNSQGALPGMVWQDRDVYLQGPIWAKIPHTDGHFHPSPLMGGFGLKH |
| | PPPQILIKNTPVPANPPTTFSPAKFASFITQYSTGQVSVEIEWELQKENSKRWNPEIQYTSN |
| | YNKSXNVDFTVDINGVYSEPRPIGTRYLTRNL |
| | (162)..(162) Ser or Thr |
| | (168)..(168) Lys or Arg |
| | (224)..(224) Ala or Ser |
| | (310)..(310) Arg or Lys |
| | (410)..(410) Thr or Gln |
| | (446)..(446) Ser or Asn |
| | (461)..(461) Gln or Leu |
| | (471)..(471) Ala or Ser |
| | (708)..(708) Ala or Thr |
| SEQ ID | MAADGYLPDWLEDNLSEGIREWWDLKPGAPQPKANQQHQDDXRGLVLPGYKYLGPFN |
| NO: 141 | GLDKGEPVNEADAAALEHDKAYDQQLKAGDNPYLKYNHADAEFQERLQEDTSFGGNL |
| Anc127 | GRAVFQAKKRVLEPLGLVEEAAKTAPGKKRPVEQSPQEPDSSSGIGKSGQQPAXKRLNF |
| (AKU89603) | GQTGDSESVPDPQPLGEPPAAPSGVGSNTMASGGGAPMADNNEGADGVGNSSGNWHC |
| | DSTWLGDRVITTSTRTWALPTYNNHLYKQISSQSGASNDNHYFGYSTPWGYFDFNRFHC |
| | HFSPRDWQRLINNNWGFRPKXLNFKLFNIQVKEVTQNDGTTTIANNLTSTVQVFTDSEY |
| | QLPYVLGSAHQGCLPPFPADVFMIPQYGYLTLNNGSQAVGRSSFYCLEYFPSQMLRTGN |
| | NFXFSYTFEDVPFHSSYAHSQSLDRLMNPLIDQYLYYLXRTQTTSGTTQQSRLXFSQAGP |
| | SSMXQQAXNWLPGPCYRQQRVSKTANDNNNSNFAWTXATKYHLNGRDSLVNPGPAM |
| | ASHKDDEEKFFPMHGXLIFGKQGTGASNVDLDNVMITDEEEIRTTNPVATEQYGTVATN |
| | LQSSNTAPATGTVNSQGALPGMVWQDRDVYLQGPIWAKIPHTDGHFHPSPLMGGFGLK |
| | HPPPQILIKNTPVPANPPTTFSPAKFASFITQYSTGQVSVEIEWELQKENSKRWNPEIQYTS |
| | NYNKSVNVDFTVDTNGVYSEPRPIGTRYLTRNL |
| | (42)..(42) Gly or Ser |
| | (168)..(168) Arg or Lys |
| | (310)..(310) Lys or Arg |
| | (410)..(410) Thr or Gln |
| | (446)..(446) Ser or Arg |
| | (461)..(461) Gln or Leu |
| | (471)..(471) Ala or Ser |
| | (475)..(475) Lys or Arg |
| | (504)..(504) Gly or Ala |
| | (539)..(539) Val or Asn |
| SEQ ID | MAADGYLPDWLEDNLSEGIREWWDLKPGAPKPKANQQKQDDGRGLVLPGYKYLGPFN |
| NO: 142 | GLDKGEPVNAADAAALEHDKAYDQQLKAGDNPYLRYNHADAEFQERLQEDTSFGGNL |
| (Anc80L65 | GRAVFQAKKRVLEPLGLVEEGAKTAPGKKRPVEQSPQEPDSSSGIGKKGQQPARKRLNF |
| (AKU89595)) | GQTGDSESVPDPQPLGEPPAAPSGVGSNTMAAGGGAPMADNNEGADGVGNASGNWHC |
| | DSTWLGDRVITTSTRTWALPTYNNHLYKQISSQSGGSTNDNTYFGYSTPWGYFDFNRFH |
| | CHFSPRDWQRLINNNWGFRPKKLNFKLFNIQVKEVTTNDGTTTIANNLTSTVQVFTDSEY |
| | QLPYVLGSAHQGCLPPFPADVFMIPQYGYLTLNNGSQAVGRSSFYCLEYFPSQMLRTGN |
| | NFQFSYTFEDVPFHSSYAHSQSLDRLMNPLIDQYLYYLSRTQTTSGTAGNRTLQFSQAGP |
| | SSMANQAKNWLPGPCYRQQRVSKTTNQNNNSNFAWTGATKYHLNGRDSLVNPGPAM |
| | ATHKDDEDKFFPMSGVLIFGKQGAGNSNVDLDNVMITNEEEIKTTNPVATEEYGTVATN |
| | LQSANTAPATGTVNSQGALPGMVWQDRDVYLQGPIWAKIPHTDGHFHPSPLMGGFGLK |
| | HPPPQILIKNTPVPANPPTTFSPAKFASFITQYSTGQVSVEIEWELQKENSKRWNPEIQYTS |
| | NYNKSTNVDFAVDINGVYSEPRPIGTRYLTRNL |
| SEQ ID | MAADGYLPDWLEDNLSEGIREWWDLKPGAPKPKANQQKQDDGRGLVLPGYKYLGPFN |
| NO: 143 | GLDKGEPVNAADAAALEHDKAYDQQLKAGDNPYLRYNHADAEFQERLQEDTSFGGNL |
| (Anc80L1) | GRAVFQAKKRVLEPLGLVEEGAKTAPGKKRPVEQSPQEPDSSSGIGKKGQQPAKKRLNF |
| | GQTGDSESVPDPQPLGEPPAAPSGVGSNTMAAGGGAPMADNNEGADGVGNASGNWHC |
| | DSTWLGDRVITTSTRTWALPTYNNHLYKQISSQSGASTNDNTYFGYSTPWGYFDFNRFH |
| | CHFSPRDWQRLINNNWGFRPKRLNFKLFNIQVKEVTTNDGTTTIANNLTSTVQVFTDSEY |
| | QLPYVLGSAHQGCLPPFPADVFMIPQYGYLTLNNGSQAVGRSSFYCLEYFPSQMLRTGN |
| | NFEFSYTFEDVPFHSSYAHSQSLDRLMNPLIDQYLYYLSRTQTTSGTAGNRTLQFSQAGP |
| | SSMANQAKNWLPGPCYRQQRVSKTANQNNNSNFAWTGATKYHLNGRDSLVNPGPAM |
| | ATHKDDEDKFFPMSGVLIFGKQGAGNSNVDLDNVMITSEEEIKTTNPVATEQYGTVATN |
| | LQSSNTAPATGTVNSQGALPGMVWQNRDVYLQGPIWAKIPHTDGHFHPSPLMGGFGLK |
| | HPPPQILIKNTPVPANPPTTFSPAKFASFITQYSTGQVSVEIEWELQKENSKRWNPEIQYTS |
| | NYNKSTNVDFAVDINGVYSEPRPIGTRYLTRNL |
| SEQ ID | MAADGYLPDWLEDNLSEGIREWWDLKPGAPKPKANQQKQDDGRGLVLPGYKYLGPFN |
| NO: 144 | GLDKGEPVNAADAAALEHDKAYDQQLKAGDNPYLRYNHADAEFQERLQEDTSFGGNL |
| (Anc80L27) | GRAVFQAKKRVLEPLGLVEEGAKTAPGKKRPVEQSPQEPDSSSGIGKKGQQPARKRLNF |
| | GQTGDSESVPDPQPLGEPPAAPSGVGSNTMAAGGGAPMADNNEGADGVGNASGNWHC |
| | DSTWLGDRVITTSTRTWALPTYNNHLYKQISSQSGGSTNDNTYFGYSTPWGYFDFNRFH |
| | CHFSPRDWQRLINNNWGFRPKRLNFKLFNIQVKEVTTNDGTTTIANNLTSTVQVFTDSEY |
| | QLPYVLGSAHQGCLPPFPADVFMIPQYGYLTLNNGSQAVGRSSFYCLEYFPSQMLRTGN |
| | NFEFSYTFEDVPFHSSYAHSQSLDRLMNPLIDQYLYYLSRTQTTSGTAGNRTLQFSQAGP |
| | SSMANQAKNWLPGPCYRQQRVSKTANQNNNSNFAWTGATKYHLNGRDSLVNPGPAM |
| | ATHKDDEDKFFPMSGVLIFGKQGAGNSNVDLDNVMITNEEEIKTTNPVATEQYGTVATN |
| | LQSANTAPATGTVNSQGALPGMVWQDRDVYLQGPIWAKIPHTDGHFHPSPLMGGFGLK |
| | HPPPQILIKNTPVPANPPTTFSPAKFASFITQYSTGQVSVEIEWELQKENSKRWNPEIQYTS |
| | NYNKSTNVDFAVDINGVYSEPRPIGTRYLTRNL |
| SEQ ID | MAADGYLPDWLEDNLSEGIREWWDLKPGAPKPKANQQKQDDGRGLVLPGYKYLGPFN |
| NO: 145 | GLDKGEPVNAADAAALEHDKAYDQQLKAGDNPYLRYNHADAEFQERLQEDTSFGGNL |
| (Anc80L33) | GRAVFQAKKRVLEPLGLVEEGAKTAPGKKRPVEQSPQEPDSSSGIGKKGQQPAKKRLNF |
| | GQTGDSESVPDPQPLGEPPAAPSGVGSNTMAAGGGAPMADNNEGADGVGNASGNWHC |
| | DSTWLGDRVITTSTRTWALPTYNNHLYKQISSQSGGSTNDNTYFGYSTPWGYFDFNRFH |
| | CHFSPRDWQRLINNNWGFRPKKLNFKLFNIQVKEVTTNDGTTTIANNLTSTVQVFTDSEY |
| | QLPYVLGSAHQGCLPPFPADVFMIPQYGYLTLNNGSQAVGRSSFYCLEYFPSQMLRTGN |
| | NFEFSYTFEDVPFHSSYAHSQSLDRLMNPLIDQYLYYLSRTQTTSGTAGNRTLQFSQAGP |
| | SSMANQAKNWLPGPCYRQQRVSKTANQNNNSNFAWTGATKYHLNGRDSLVNPGPAM |
| | ATHKDDEDKFFPMSGVLIFGKQGAGNSNVDLDNVMITSEEEIKTTNPVATEQYGTVATN |
| | LQSSNTAPATGTVNSQGALPGMVWQNRDVYLQGPIWAKIPHTDGHFHPSPLMGGFGLK |
| | HPPPQILIKNTPVPANPPTTFSPAKFASFITQYSTGQVSVEIEWELQKENSKRWNPEIQYTS |
| | NYNKSTNVDFAVDTNGVYSEPRPIGTRYLTRNL |
| SEQ ID | MAADGYLPDWLEDNLSEGIREWWDLKPGAPKPKANQQKQDDGRGLVLPGYKYLGPFN |
| NO: 146 | GLDKGEPVNAADAAALEHDKAYDQQLKAGDNPYLRYNHADAEFQERLQEDTSFGGNL |
| (Anc80L36) | GRAVFQAKKRVLEPLGLVEEGAKTAPGKKRPVEQSPQEPDSSSGIGKKGQQPAKKRLNF |
| | GQTGDSESVPDPQPLGEPPAAPSGVGSNTMASGGGAPMADNNEGADGVGNASGNWHC |
| | DSTWLGDRVITTSTRTWALPTYNNHLYKQISSQSGGSTNDNTYFGYSTPWGYFDFNRFH |
| | CHFSPRDWQRLINNNWGFRPKKLNFKLFNIQVKEVTTNDGTTTIANNLTSTVQVFTDSEY |
| | QLPYVLGSAHQGCLPPFPADVFMIPQYGYLTLNNGSQAVGRSSFYCLEYFPSQMLRTGN |
| | NFEFSYTFEDVPFHSSYAHSQSLDRLMNPLIDQYLYYLSRTQTTSGTAGNRTLQFSQAGP |
| | SSMANQAKNWLPGPCYRQQRVSKTANQNNNSNFAWTGATKYHLNGRDSLVNPGPAM |
| | ATHKDDEDKFFPMSGVLIFGKQGAGNSNVDLDNVMITSEEEIKTTNPVATEEYGTVATN |
| | LQSSNTAPATGTVNSQGALPGMVWQNRDVYLQGPIWAKIPHTDGHFHPSPLMGGFGLK |
| | HPPPQILIKNTPVPANPPTTFSPAKFASFITQYSTGQVSVEIEWELQKENSKRWNPEIQYTS |
| | NYNKSTNVDFAVDTNGVYSEPRPIGTRYLTRNL |
| SEQ ID | MAADGYLPDWLEDNLSEGIREWWDLKPGAPKPKANQQKQDDGRGLVLPGYKYLGPFN |
| NO: 147 | GLDKGEPVNAADAAALEHDKAYDQQLKAGDNPYLRYNHADAEFQERLQEDTSFGGNL |
| (Anc80L44) | GRAVFQAKKRVLEPLGLVEEGAKTAPGKKRPVEQSPQEPDSSSGIGKKGQQPAKKRLNF |
| | GQTGDSESVPDPQPLGEPPAAPSGVGSNTMASGGGAPMADNNEGADGVGNASGNWHC |
| | DSTWLGDRVITTSTRTWALPTYNNHLYKQISSQSGGSTNDNTYFGYSTPWGYFDFNRFH |
| | CHFSPRDWQRLINNNWGFRPKKLNFKLFNIQVKEVTTNDGTTTIANNLTSTVQVFTDSEY |
| | QLPYVLGSAHQGCLPPFPADVFMIPQYGYLTLNNGSQAVGRSSFYCLEYFPSQMLRTGN |
| | NFQFSYTFEDVPFHSSYAHSQSLDRLMNPLIDQYLYYLSRTQTTSGTAGNRELQFSQAGP |
| | SSMANQAKNWLPGPCYRQQRVSKTTNQNNNSNFAWTGATKYHLNGRDSLVNPGPAM |
| | ATHKDDEDKFFPMSGVLIFGKQGAGNSNVDLDNVMITNEEEIKTTNPVATEQYGTVATN |
| | LQSANTAPATGTVNSQGALPGMVWQDRDVYLQGPIWAKIPHTDGHFHPSPLMGGFGLK |
| | HPPPQILIKNTPVPANPPTTFSPAKFASFITQYSTGQVSVEIEWELQKENSKRWNPEIQYTS |
| | NYNKSTNVDFAVDTNGVYSEPRPIGTRYLTRNL |
| SEQ ID | MAADGYLPDWLEDNLSEGIREWWDLKPGAPKPKANQQKQDDGRGLVLPGYKYLGPFN |
| NO: 148 | GLDKGEPVNAADAAALEHDKAYDQQLKAGDNPYLRYNHADAEFQERLQEDTSFGGNL |
| (Anc80L59) | GRAVFQAKKRVLEPLGLVEEGAKTAPGKKRPVEQSPQEPDSSSGIGKKGQQPAKKRLNF |
| | GQTGDSESVPDPQPLGEPPAAPSGVGSNTMASGGGAPMADNNEGADGVGNASGNWHC |
| | DSTWLGDRVITTSTRTWALPTYNNHLYKQISSQSGASTNDNTYFGYSTPWGYFDFNRFH |
| | CHFSPRDWQRLINNNWGFRPKRLNFKLFNIQVKEVTTNDGTTTIANNLTSTVQVFTDSEY |
| | QLPYVLGSAHQGCLPPFPADVFMIPQYGYLTLNNGSQAVGRSSFYCLEYFPSQMLRTGN |
| | NFQFSYTFEDVPFHSSYAHSQSLDRLMNPLIDQYLYYLSRTQTTSGTAGNRELQFSQAGP |
| | SSMANQAKNWLPGPCYRQQRVSKTTNQNNNSNFAWTGATKYHLNGRDSLVNPGPAM |
| | ATHKDDEDKFFPMSGVLIFGKQGAGNSNVDLDNVMITNEEEIKTTNPVATEEYGTVATN |
| | LQSANTAPATGTVNSQGALPGMVWQNRDVYLQGPIWAKIPHTDGHFHPSPLMGGFGLK |
| | HPPPQILIKNTPVPANPPTTFSPAKFASFITQYSTGQVSVEIEWELQKENSKRWNPEIQYTS |
| | NYNKSTNVDFAVDTNGVYSEPRPIGTRYLTRNL |
| SEQ ID | MAADGYLPDWLEDNLSEGIREWWDLKPGAPKPKANQQKQDDGRGLVLPGYKYLGPFN |
| NO: 149 | GLDKGEPVNAADAAALEHDKAYDQQLKAGDNPYLRYNHADAEFQERLQEDTSFGGNL |
| (Anc80L60) | GRAVFQAKKRVLEPLGLVEEGAKTAPGKKRPVEQSPQEPDSSSGIGKKGQQPARKRLNF |
| | GQTGDSESVPDPQPLGEPPAAPSGVGSNTMAAGGGAPMADNNEGADGVGNASGNWHC |
| | DSTWLGDRVITTSTRTWALPTYNNHLYKQISSQSGGSTNDNTYFGYSTPWGYFDFNRFH |
| | CHFSPRDWQRLINNNWGFRPKRLNFKLFNIQVKEVTTNDGTTTIANNLTSTVQVFTDSEY |
| | QLPYVLGSAHQGCLPPFPADVFMIPQYGYLTLNNGSQAVGRSSFYCLEYFPSQMLRTGN |
| | NFEFSYTFEDVPFHSSYAHSQSLDRLMNPLIDQYLYYLSRTQTTSGTAGNRELQFSQAGP |
| | SSMANQAKNWLPGPCYRQQRVSKTTNQNNNSNFAWTGATKYHLNGRDSLVNPGPAM |
| | ATHKDDEDKFFPMSGVLIFGKQGAGNSNVDLDNVMITSEEEIKTTNPVATEEYGTVATN |
| | LQSSNTAPATGTVNSQGALPGMVWQERDVYLQGPIWAKIPHTDGHFHPSPLMGGFGLK |
| | HPPPQILIKNTPVPANPPTTFSPAKFASFITQYSTGQVSVEIEWELQKENSKRWNPEIQYTS |
| | NYNKSTNVDFAVDTNGVYSEPRPIGTRYLTRNL |
| SEQ ID | MAADGYLPDWLEDNLSEGIREWWDLKPGAPKPKANQQKQDDGRGLVLPGYKYLGPFN |
| NO: 150 | GLDKGEPVNAADAAALEHDKAYDQQLKAGDNPYLRYNHADAEFQERLQEDTSFGGNL |
| (Anc80L62) | GRAVFQAKKRVLEPLGLVEEGAKTAPGKKRPVEQSPQEPDSSSGIGKKGQQPARKRLNF |
| | GQTGDSESVPDPQPLGEPPAAPSGVGSNTMASGGGAPMADNNEGADGVGNASGNWHC |
| | DSTWLGDRVITTSTRTWALPTYNNHLYKQISSQSGGSTNDNTYFGYSTPWGYFDFNRFH |
| | CHFSPRDWQRLINNNWGFRPKKLNFKLFNIQVKEVTTNDGTTTIANNLTSTVQVFTDSEY |
| | QLPYVLGSAHQGCLPPFPADVFMIPQYGYLTLNNGSQAVGRSSFYCLEYFPSQMLRTGN |
| | NFEFSYTFEDVPFHSSYAHSQSLDRLMNPLIDQYLYYLSRTQTTSGTAGNRELQFSQAGP |
| | SSMANQAKNWLPGPCYRQQRVSKTTNQNNNSNFAWTGATKYHLNGRDSLVNPGPAM |
| | ATHKDDEDKFFPMSGVLIFGKQGAGNSNVDLDNVMITSEEEIKTTNPVATEEYGTVATN |
| | LQSANTAPATGTVNSQGALPGMVWQDRDVYLQGPIWAKIPHTDGHFHPSPLMGGFGLK |
| | HPPPQILIKNTPVPANPPTTFSPAKFASFITQYSTGQVSVEIEWELQKENSKRWNPEIQYTS |
| | NYNKSTNVDFAVDTNGVYSEPRPIGTRYLTRNL |
| SEQ ID | MAADGYLPDWLEDNLSEGIREWWDLKPGAPKPKANQQKQDDGRGLVLPGYKYLGPFN |
| NO: 151 | GLDKGEPVNAADAAALEHDKAYDQQLKAGDNPYLRYNHADAEFQERLQEDTSFGGNL |
| (Anc82DI) | GRAVFQAKKRVLEPLGLVEEGAKTAPGKKRPVEQSPQREPDSSTGIGKSGQQPAKKRLN |
| | FGQTGDSESVPDPQPLGEPPAAPSGVGSNTMASGGGAPMADNNEGADGVGNSSGNWHC |
| | DSTWLGDRVITTSTRTWALPTYNNHLYKQISNGTSGGSTNDNTYFGYSTPWGYFDFNRF |
| | HCHFSPRDWQRLINNNWGFRPKRLNFKLFNIQVKEVTTNEGTKTIANNLTSTVQVFTDSE |
| | YQLPYVLGSAHQGCLPPFPADVFMIPQYGYLTLNNGSQAVGRSSFYCLEYFPSQMLRTG |
| | NNFQFSYTFEDVPFHSSYAHSQSLDRLMNPLIDQYLYYLSRTQTTGGTAGTQTLQFSQAG |
| | PSSMANQARNWVPGPCYRQQRVSTTTNQNNNSNFAWTGATKYHLNGRDSLMNPGVA |
| | MASHKDDEDRFFPSSGVLIFGKQGAGNDNVDYSNVMITSEEEIKTTNPVATEEYGVVAT |
| | NHQSANTQAQTGTVQNQGILPGMVWQNRDVYLQGPIWAKIPHTDGNFHPSPLMGGFGL |
| | KHPPPQILIKNTPVPADPPTTFNQAKLNSFITQYSTGQVSVEIEWELQKENSKRWNPEIQY |
| | TSNYYKSTNVDFAVNTEGVYSEPRPIGTRYLTRNL |
| SEQ ID | MAADGYLPDWLEDNLSEGIREWWDLKPGAPKPKANQQKQDNGRGLVLPGYKYLGPFN |
| NO: 152 | GLDKGEPVNAADAAALEHDKAYDQQLQAGDNPYLRYNHADAEFQERLQEDTSFGGNL |
| (AAVrh.74) | GRAVFQAKKRVLEPLGLVESPVKTAPGKKRPVEPSPQRSPDSSTGIGKKGQQPAKKRLNF |
| | GQTGDSESVPDPQPIGEPPAGPSGLGSGTMAAGGGAPMADNNEGADGVGSSSGNWHCD |
| | STWLGDRVITTSTRTWALPTYNNHLYKQISNGTSGGSTNDNTYFGYSTPWGYFDFNRFH |
| | CHFSPRDWQRLINNNWGFRPKRLNFKLFNIQVKEVTQNEGTKTIANNLTSTIQVFTDSEY |
| | QLPYVLGSAHQGCLPPFPADVFMIPQYGYLTLNNGSQAVGRSSFYCLEYFPSQMLRTGN |
| | NFEFSYNFEDVPFHSSYAHSQSLDRLMNPLIDQYLYYLSRTQSTGGTAGTQQLLFSQAGP |
| | NNMSAQAKNWLPGPCYRQQRVSTTLSQNNNSNFAWTGATKYHLNGRDSLVNPGVAM |
| | ATHKDDEERFFPSSGVLMFGKQGAGKDNVDYSSVMLTSEEEIKTTNPVATEQYGVVAD |
| | NLQQQNAAPIVGAVNSQGALPGMVWQNRDVYLQGPIWAKIPHTDGNFHPSPLMGGFGL |
| | KHPPPQILIKNTPVPADPPTTFNQAKLASFITQYSTGQVSVEIEWELQKENSKRWNPEIQYT |
| | SNYYKSTNVDFAVNTEGTYSEPRPIGTRYLTRNL |
| Anc80- | MAADGYLPDWLEDNLSEGIREWWDLKPGAPKPKANQQKQDDGRGLVLPGYKYLGPFN |
| 55 | GLDKGEPVNAADAAALEHDKAYDQQLKAGDNPYLRYNHADAEFQERLQEDTSFGGNL |
| SEQ ID | GRAVFQAKKRVLEPLGLVEEGAKTAPGKKRPVEQSPQEPDSSSGIGKKGQQPAKKRLNF |
| NO: 153 | GQTGDSESVPDPQPLGEPPAAPSGVGSNTMAAGGGAPMADNNEGADGVGNASGNWHC |
| | DSTWLGDRVITTSTRTWALPTYNNHLYKQISSQSGASTNDNTYFGYSTPWGYFDFNRFH |
| | CHFSPRDWQRLINNNWGFRPKKLNFKLFNIQVKEVTTNDGTTTIANNLTSTVQVFTDSEY |
| | QLPYVLGSAHQGCLPPFPADVFMIPQYGYLTLNNGSQAVGRSSFYCLEYFPSQMLRTGN |
| | NFQFSYTFEDVPFHSSYAHSQSLDRLMNPLIDQYLYYLSRTQTTSGTAGNRELQFSQAGP |
| | SSMANQAKNWLPGPCYRQQRVSKTANQNNNSNFAWTGATKYHLNGRDSLVNPGPAM |
| | ATHKDDEDKFFPMSGVLIFGKQGAGNSNVDLDNVMITNEEEIKTTNPVATEEYGTVATN |
| | LQSSNTAPATGTVNSQGALPGMVWQDRDVYLQGPIWAKIPHTDGHFHPSPLMGGFGLK |
| | HPPPQILIKNTPVPANPPTTFSPAKFASFITQYSTGQVSVEIEWELQKENSKRWNPEIQYTS |
| | NYNKSTNVDFAVDTNGVYSEPRPIGTRYLTRNL |
| Anc80- | MAADGYLPDWLEDNLSEGIREWWDLKPGAPKPKANQQKQDDGRGLVLPGYKYLGPFN |
| 129 | GLDKGEPVNAADAAALEHDKAYDQQLKAGDNPYLRYNHADAEFQERLQEDTSFGGNL |
| SEQ ID | GRAVFQAKKRVLEPLGLVEEGAKTAPGKKRPVEQSPQEPDSSSGIGKKGQQPAKKRLNF |
| NO: 154 | GQTGDSESVPDPQPLGEPPAAPSGVGSNTMAAGGGAPMADNNEGADGVGNASGNWHC |
| | DSTWLGDRVITTSTRTWALPTYNNHLYKQISSQSGASTNDNTYFGYSTPWGYFDFNRFH |
| | CHFSPRDWQRLINNNWGFRPKRLNFKLFNIQVKEVTTNDGTTTIANNLTSTVQVFTDSEY |
| | QLPYVLGSAHQGCLPPFPADVFMIPQYGYLTLNNGSQAVGRSSFYCLEYFPSQMLRTGN |
| | NFQFSYTFEDVPFHSSYAHSQSLDRLMNPLIDQYLYYLSRTQTTSGTAGNRTLQFSQAGP |
| | SSMANQAKNWLPGPCYRQQRVSKTTNQNNNSNFAWTGATKYHLNGRDSLVNPGPAM |
| | ATHKDDEDKFFPMSGVLIFGKQGAGNSNVDLDNVMITNEEEIKTTNPVATEQYGTVATN |
| | LQSANTAPATGTVNSQGALPGMVWQDRDVYLQGPIWAKIPHTDGHFHPSPLMGGFGLK |
| | HPPPQILIKNTPVPANPPTTFSPAKFASFITQYSTGQVSVEIEWELQKENSKRWNPEIQYTS |
| | NYNKSTNVDFAVDTNGVYSEPRPIGTRYLTRNL |
| Anc80- | MAADGYLPDWLEDNLSEGIREWWDLKPGAPKPKANQQKQDDGRGLVLPGYKYLGPFN |
| 156 | GLDKGEPVNAADAAALEHDKAYDQQLKAGDNPYLRYNHADAEFQERLQEDTSFGGNL |
| SEQ ID | GRAVFQAKKRVLEPLGLVEEGAKTAPGKKRPVEQSPQEPDSSSGIGKKGQQPAKKRLNF |
| NO: 155 | GQTGDSESVPDPQPLGEPPAAPSGVGSNTMAAGGGAPMADNNEGADGVGNASGNWHC |
| | DSTWLGDRVITTSTRTWALPTYNNHLYKQISSQSGASTNDNTYFGYSTPWGYFDFNRFH |
| | CHFSPRDWQRLINNNWGFRPKRLNFKLFNIQVKEVTTNDGTTTIANNLTSTVQVFTDSEY |
| | QLPYVLGSAHQGCLPPFPADVFMIPQYGYLTLNNGSQAVGRSSFYCLEYFPSQMLRTGN |
| | NFQFSYTFEDVPFHSSYAHSQSLDRLMNPLIDQYLYYLSRTQTTSGTAGNRTLQFSQAGP |
| | SSMANQAKNWLPGPCYRQQRVSKTANQNNNSNFAWTGATKYHLNGRDSLVNPGPAM |
| | ATHKDDEDKFFPMSGVLIFGKQGAGNSNVDLDNVMITSEEEIKTTNPVATEEYGTVATN |
| | LQSANTAPATGTVNSQGALPGMVWQNRDVYLQGPIWAKIPHTDGHFHPSPLMGGFGLK |
| | HPPPQILIKNTPVPANPPTTFSPAKFASFITQYSTGQVSVEIEWELQKENSKRWNPEIQYTS |
| | NYNKSTNVDFAVDTNGVYSEPRPIGTRYLTRNL |
| Anc80- | MAADGYLPDWLEDNLSEGIREWWDLKPGAPKPKANQQKQDDGRGLVLPGYKYLGPFN |
| 751- | GLDKGEPVNAADAAALEHDKAYDQQLKAGDNPYLRYNHADAEFQERLQEDTSFGGNL |
| SEQ ID | GRAVFQAKKRVLEPLGLVEEGAKTAPGKKRPVEQSPQEPDSSSGIGKKGQQPAKKRLNF |
| NO: 156 | GQTGDSESVPDPQPLGEPPAAPSGVGSNTMASGGGAPMADNNEGADGVGNASGNWHC |
| | DSTWLGDRVITTSTRTWALPTYNNHLYKQISSQSGASTNDNTYFGYSTPWGYFDFNRFH |
| | CHFSPRDWQRLINNNWGFRPKRLNFKLFNIQVKEVTTNDGTTTIANNLTSTVQVFTDSEY |
| | QLPYVLGSAHQGCLPPFPADVFMIPQYGYLTLNNGSQAVGRSSFYCLEYFPSQMLRTGN |
| | NFEFSYTFEDVPFHSSYAHSQSLDRLMNPLIDQYLYYLSRTQTTSGTAGNRELQFSQAGP |
| | SSMANQAKNWLPGPCYRQQRVSKTTNQNNNSNFAWTGATKYHLNGRDSLVNPGPAM |
| | ATHKDDEDKFFPMSGVLIFGKQGAGNSNVDLDNVMITSEEEIKTTNPVATEEYGTVATN |
| | LQSSNTAPATGTVNSQGALPGMVWQDRDVYLQGPIWAKIPHTDGHFHPSPLMGGFGLK |
| | HPPPQILIKNTPVPANPPTTFSPAKFASFITQYSTGQVSVEIEWELQKENSKRWNPEIQYTS |
| | NYNKSTNVDFAVDTNGVYSEPRPIGTRYLTRNL |
| Anc80- | MAADGYLPDWLEDNLSEGIREWWDLKPGAPKPKANQQKQDDGRGLVLPGYKYLGPFN |
| 1029 | GLDKGEPVNAADAAALEHDKAYDQQLKAGDNPYLRYNHADAEFQERLQEDTSFGGNL |
| SEQ ID | GRAVFQAKKRVLEPLGLVEEGAKTAPGKKRPVEQSPQEPDSSSGIGKKGQQPARKRLNF |
| NO: 157 | GQTGDSESVPDPQPLGEPPAAPSGVGSNTMAAGGGAPMADNNEGADGVGNASGNWHC |
| | DSTWLGDRVITTSTRTWALPTYNNHLYKQISSQSGASTNDNTYFGYSTPWGYFDFNRFH |
| | CHFSPRDWQRLINNNWGFRPKKLNFKLFNIQVKEVTTNDGTTTIANNLTSTVQVFTDSEY |
| | QLPYVLGSAHQGCLPPFPADVFMIPQYGYLTLNNGSQAVGRSSFYCLEYFPSQMLRTGN |
| | NFQFSYTFEDVPFHSSYAHSQSLDRLMNPLIDQYLYYLSRTQTTSGTAGNRTLQFSQAGP |
| | SSMANQAKNWLPGPCYRQQRVSKTTNQNNNSNFAWTGATKYHLNGRDSLVNPGPAM |
| | ATHKDDEDKFFPMSGVLIFGKQGAGNSNVDLDNVMITNEEEIKTTNPVATEEYGTVATN |
| | LQSANTAPATGTVNSQGALPGMVWQDRDVYLQGPIWAKIPHTDGHFHPSPLMGGFGLK |
| | HPPPQILIKNTPVPANPPTTFSPAKFASFITQYSTGQVSVEIEWELQKENSKRWNPEIQYTS |
| | NYNKSTNVDFAVDTNGVYSEPRPIGTRYLTRNL |
| Anc80- | MAADGYLPDWLEDNLSEGIREWWDLKPGAPKPKANQQKQDDGRGLVLPGYKYLGPFN |
| 1712 | GLDKGEPVNAADAAALEHDKAYDQQLKAGDNPYLRYNHADAEFQERLQEDTSFGGNL |
| SEQ ID | GRAVFQAKKRVLEPLGLVEEGAKTAPGKKRPVEQSPQEPDSSSGIGKKGQQPARKRLNF |
| NO: 158 | GQTGDSESVPDPQPLGEPPAAPSGVGSNTMASGGGAPMADNNEGADGVGNASGNWHC |
| | DSTWLGDRVITTSTRTWALPTYNNHLYKQISSQSGASTNDNTYFGYSTPWGYFDFNRFH |
| | CHFSPRDWQRLINNNWGFRPKRLNFKLFNIQVKEVTTNDGTTTIANNLTSTVQVFTDSEY |
| | QLPYVLGSAHQGCLPPFPADVFMIPQYGYLTLNNGSQAVGRSSFYCLEYFPSQMLRTGN |
| | NFQFSYTFEDVPFHSSYAHSQSLDRLMNPLIDQYLYYLSRTQTTSGTAGNRELQFSQAGP |
| | SSMANQAKNWLPGPCYRQQRVSKTANQNNNSNFAWTGATKYHLNGRDSLVNPGPAM |
| | ATHKDDEDKFFPMSGVLIFGKQGAGNSNVDLDNVMITNEEEIKTTNPVATEQYGTVATN |
| | LQSANTAPATGTVNSQGALPGMVWQNRDVYLQGPIWAKIPHTDGHFHPSPLMGGFGLK |
| | HPPPQILIKNTPVPANPPTTFSPAKFASFITQYSTGQVSVEIEWELQKENSKRWNPEIQYTS |
| | NYNKSTNVDFAVDTNGVYSEPRPIGTRYLTRNL |
| SEQ ID | MAADGYLPDWLEDNLSEGIREWWALKPGAPQPKANQQHQDNARGLVLPGYKYLGPGN |
| NO: 159 | GLDKGEPVNAADAAALEHDKAYDQQLKAGDNPYLKYNHADAEFQERLKEDTSFGGNL |
| AAV9- | GRAVFQAKKRLLEPLGLVEEAAKTAPGKKRPVEQSPQEPDSSAGIGKSGAQPAKKRLNF |
| retro | GQTGDTESVPDPQPIGEPPAAPSGVGSLTMASGGGAPVADNNEGADGVGSSSGNWHCD |
| | SQWLGDRVITTSTRTWALPTYNNHLYKQISNSTSGGSSNDNAYFGYSTPWGYFDFNRFH |
| | CHFSPRDWQRLINNNWGFRPKRLNFKLFNIQVKEVTDNNGVKTIANNLTSTVQVFTDSD |
| | YQLPYVLGSAHEGCLPPFPADVFMIPQYGYLTLNDGSQAVGRSSFYCLEYFPSQMLRTG |
| | NNFQFSYEFENVPFHSSYAHSQSLDRLMNPLIDQYLYYLSKTINGSGQNQQTLKFSVAGP |
| | SNMAVQGRNYIPGPSYRQQRVSTTVTQNNNSEFAWPGASSWALNGRNSLMNPGPAMAS |
| | HKEGEDRFFPLSGSLIFGKQGTGRDNVDADKVMITNEEEIKTTNPVATESYGQVATNHQS |
| | AQLADQDYTKTAAQAQTGWVQNQGILPGMVWQDRDVYLQGPIWAKIPHTDGNFHPSP |
| | LMGGFGMKHPPPQILIKNTPVPADPPTAFNKDKLNSFITQYSTGQVSVEIEWELQKENSK |
| | RWNPEIQYTSNYYKSNNVEFAVNTEGVYSEPRPIGTRYLTRNL |
| AFT-6 | MAADGYLPDWLEDNLSEGIREWWDLKPGAPKPKANQQKQDDGRGLVLP |
| Capsid + | GYKYLGPFNGLDKGEPVNAADAAALEHDKAYDQQLKAGDNPYLRYNHA |
| targeting | DAEFQERLQEDTSFGGNLGRAVFQAKKRVLEPLGLVEEGAKTAPGKKRPV |
| peptide | EQSPQEPDSSSGIGKKGQQPARKRLNFGQTGDSESVPDPQPLGEPPAAPSGV |
| SEQ ID | GSNTMAAGGGAPMADNNEGADGVGNASGNWHCDSTWLGDRVITTSTRT |
| NO: 55820 | WALPTYNNHLYKQISSQSGGSTNDNTYFGYSTPWGYFDFNRFHCHFSPRD |
| | WQRLINNNWGFRPKKLNFKLFNIQVKEVTTNDGTTTIANNLTSTVQVFTDS |
| | EYQLPYVLGSAHQGCLPPFPADVFMIPQYGYLTLNNGSQAVGRSSFYCLEY |
| | FPSQMLRTGNNFQFSYTFEDVPFHSSYAHSQSLDRLMNPLIDQYLYYLSRT |
| | QTTSGTAGNRTLQFSQAGPSSMANQAKNWLPGPCYRQQRVSKTTNQNNN |
| | SNFAWTGATKYHLNGRDSLVNPGPAMATHKDDEDKFFPMSGVLIFGKQG |
| | AGNSNVDLDNVMITNEEEIKTTNPVATESYGQVATNHQSPLNGAVHLYAQ |
| | AQTGWVQNQGILPGMVWQDRDVYLQGPIWAKIPHTDGHFHPSPLMGGFG |
| | LKHPPPQILIKNTPVPANPPTTFSPAKFASFITQYSTGQVSVEIEWELQKENS |
| | KRWNPEIQYTSNYNKSTNVDFAVDTNGVYSEPRPIGTRYLTRNL |
| AFT-7(1) | MAADGYLPDWLEDNLSEGIREWWDLKPGAPKPKANQQKQDDGRGLVLP |
| Capsid + | GYKYLGPFNGLDKGEPVNAADAAALEHDKAYDQQLKAGDNPYLRYNHA |
| targeting | DAEFQERLQEDTSFGGNLGRAVFQAKKRVLEPLGLVEEGAKTAPGKKRPV |
| peptide | EQSPQEPDSSSGIGKKGQQPARKRLNFGQTGDSESVPDPQPLGEPPAAPSGV |
| SEQ ID | GSNTMAAGGGAPMADNNEGADGVGNASGNWHCDSTWLGDRVITTSTRT |
| NO: 55821 | WALPTYNNHLYKQISSQSGGSTNDNTYFGYSTPWGYFDFNRFHCHFSPRD |
| | WQRLINNNWGFRPKKLNFKLFNIQVKEVTTNDGTTTIANNLTSTVQVFTDS |
| | EYQLPYVLGSAHQGCLPPFPADVFMIPQYGYLTLNNGSQAVGRSSFYCLEY |
| | FPSQMLRTGNNFQFSYTFEDVPFHSSYAHSQSLDRLMNPLIDQYLYYLSKTI |
| | NGSGQNQQTLKFSVAGPSSMANQAKNWLPGPCYRQQRVSKTTNQNNNSN |
| | FAWTGATKYHLNGRDSLVNPGPAMATHKDDEDKFFPMSGVLIFGKQGAG |
| | NSNVDLDNVMITNEEEIKTTNPVATESYGQVATNHQSPLNGAVHLYAQAQ |
| | TGWVQNQGILPGMVWQDRDVYLQGPIWAKIPHTDGHFHPSPLMGGFGLK |
| | HPPPQILIKNTPVPANPPTTFSPAKFASFITQYSTGQVSVEIEWELQKENSKR |
| | WNPEIQYTSNYNKSTNVDFAVDTNGVYSEPRPIGTRYLTRNL |
| AFT-7(2) | MAADGYLPDWLEDNLSEGIREWWDLKPGAPKPKANQQKQDDGRGLVLP |
| Capsid + | GYKYLGPFNGLDKGEPVNAADAAALEHDKAYDQQLKAGDNPYLRYNHA |
| targeting | DAEFQERLQEDTSFGGNLGRAVFQAKKRVLEPLGLVEEGAKTAPGKKRPV |
| peptide | EQSPQEPDSSSGIGKKGQQPARKRLNFGQTGDSESVPDPQPLGEPPAAPSGV |
| SEQ ID | GSNTMAAGGGAPMADNNEGADGVGNASGNWHCDSTWLGDRVITTSTRT |
| NO: 55822 | WALPTYNNHLYKQISSQSGGSTNDNTYFGYSTPWGYFDFNRFHCHFSPRD |
| | WQRLINNNWGFRPKKLNFKLFNIQVKEVTTNDGTTTIANNLTSTVQVFTDS |
| | EYQLPYVLGSAHQGCLPPFPADVFMIPQYGYLTLNNGSQAVGRSSFYCLEY |
| | FPSQMLRTGNNFQFSYTFEDVPFHSSYAHSQSLDRLMNPLIDQYLYYLSRT |
| | QTTSGTAGNRTLQFSQAGPSSMANQAKNWLPGPCYRQQRVSKTTNQNNN |
| | SNFAWTGATKYHLNGRDSLVNPGPAMATHKDDEDKFFPMSGVLIFGKQG |
| | AGNSNVDLDNVMITNEEEIKTTNPVATESYGQVATNHQSPLNGAVHLYAQ |
| | AQTGWVQNQGILPGMVWQDRDVYLQGPIWAKIPHTDGHFHPSPLMGGFG |
| | LKHPPPQILIKNTPVPANPPTTFSPAKFASFITQYSTGQVSVEIEWELQKENS |
| | KRWNPEIQYTSNYNKSTNVDFAVDTNGVYSEPRPIGTRYLTRNL |
| AFT-8(1) | MAADGYLPDWLEDNLSEGIREWWDLKPGAPKPKANQQKQDDGRGLVLP |
| Capsid + | GYKYLGPFNGLDKGEPVNAADAAALEHDKAYDQQLKAGDNPYLRYNHA |
| targeting | DAEFQERLQEDTSFGGNLGRAVFQAKKRVLEPLGLVEEGAKTAPGKKRPV |
| peptide | EQSPQEPDSSSGIGKKGQQPARKRLNFGQTGDSESVPDPQPLGEPPAAPSGV |
| SEQ ID | GSNTMAAGGGAPMADNNEGADGVGNASGNWHCDSTWLGDRVITTSTRT |
| NO: 55823 | WALPTYNNHLYKQISSQSGGSTNDNTYFGYSTPWGYFDFNRFHCHFSPRD |
| | WQRLINNNWGFRPKKLNFKLFNIQVKEVTTNDGTTTIANNLTSTVQVFTDS |
| | EYQLPYVLGSAHQGCLPPFPADVFMIPQYGYLTLNNGSQAVGRSSFYCLEY |
| | FPSQMLRTGNNFQFSYTFEDVPFHSSYAHSQSLDRLMNPLIDQYLYYLSKTI |
| | NGSGQNQQTLKFSVAGPSSMANQAKNWLPGPCYRQQRVSTTVTQNNNSE |
| | FAWPGASSWALNGRDSLVNPGPAMATHKDDEDKFFPMSGVLIFGKQGAG |
| | NSNVDLDNVMITNEEEIKTTNPVATESYGQVATNHQSPLNGAVHLYAQAQ |
| | TGWVQNQGILPGMVWQDRDVYLQGPIWAKIPHTDGHFHPSPLMGGFGLK |
| | HPPPQILIKNTPVPANPPTTFSPAKFASFITQYSTGQVSVEIEWELQKENSKR |
| | WNPEIQYTSNYNKSTNVDFAVDTNGVYSEPRPIGTRYLTRNL |
| AFT-8(2) | MAADGYLPDWLEDNLSEGIREWWDLKPGAPKPKANQQKQDDGRGLVLP |
| Capsid + | GYKYLGPFNGLDKGEPVNAADAAALEHDKAYDQQLKAGDNPYLRYNHA |
| targeting | DAEFQERLQEDTSFGGNLGRAVFQAKKRVLEPLGLVEEGAKTAPGKKRPV |
| peptide | EQSPQEPDSSSGIGKKGQQPARKRLNFGQTGDSESVPDPQPLGEPPAAPSGV |
| SEQ ID | GSNTMAAGGGAPMADNNEGADGVGNASGNWHCDSTWLGDRVITTSTRT |
| NO: 55824 | WALPTYNNHLYKQISSQSGGSTNDNTYFGYSTPWGYFDFNRFHCHFSPRD |
| | WQRLINNNWGFRPKKLNFKLFNIQVKEVTTNDGTTTIANNLTSTVQVFTDS |
| | EYQLPYVLGSAHQGCLPPFPADVFMIPQYGYLTLNNGSQAVGRSSFYCLEY |
| | FPSQMLRTGNNFQFSYTFEDVPFHSSYAHSQSLDRLMNPLIDQYLYYLSRT |
| | QTTSGTAGNRTLQFSQAGPSSMANQAKNWLPGPCYRQQRVSTTVTQNNNS |
| | EFAWPGASSWALNGRDSLVNPGPAMATHKDDEDKFFPMSGVLIFGKQGA |
| | GNSNVDLDNVMITNEEEIKTTNPVATESYGQVATNHQSPLNGAVHLYAQA |
| | QTGWVQNQGILPGMVWQDRDVYLQGPIWAKIPHTDGHFHPSPLMGGFGL |
| | KHPPPQILIKNTPVPANPPTTFSPAKFASFITQYSTGQVSVEIEWELQKENSK |
| | RWNPEIQYTSNYNKSTNVDFAVDTNGVYSEPRPIGTRYLTRNL |
| AFT-9 | MAADGYLPDWLEDNLSEGIREWWALKPGAPQPKANQQHQDNARGLVLP |
| Capsid + | GYKYLGPGNGLDKGEPVNAADAAALEHDKAYDQQLKAGDNPYLKYNHA |
| targeting | DAEFQERLKEDTSFGGNLGRAVFQAKKRLLEPLGLVEEAAKTAPGKKRPV |
| peptide | EQSPQEPDSSAGIGKSGAQPAKKRLNFGQTGDTESVPDPQPIGEPPAAPSGV |
| SEQ ID | GSLTMASGGGAPVADNNEGADGVGSSSGNWHCDSQWLGDRVITTSTRTW |
| NO: 55825 | ALPTYNNHLYKQISNSTSGGSSNDNAYFGYSTPWGYFDFNRFHCHFSPRD |
| | WQRLINNNWGFRPKRLNFKLFNIQVKEVTDNNGVKTIANNLTSTVQVFTD |
| | SDYQLPYVLGSAHEGCLPPFPADVFMIPQYGYLTLNDGSQAVGRSSFYCLE |
| | YFPSQMLRTGNNFQFSYEFENVPFHSSYAHSQSLDRLMNPLIDQYLYYLSK |
| | TINGSGQNQQTLKFSVAGPSNMAVQGRNYIPGPSYRQQRVSTTVTQNNNSE |
| | FAWPGASSWALNGRNSLMNPGPAMASHKEGEDRFFPLSGSLIFGKQGTGR |
| | DNVDADKVMITNEEEIKTTNPVATESYGQVATNHQSPLQGAVHLYAQAQT |
| | GWVQNQGILPGMVWQDRDVYLQGPIWAKIPHTDGNFHPSPLMGGFGMKH |
| | PPPQILIKNTPVPADPPTAFNKDKLNSFITQYSTGQVSVEIEWELQKENSKR |
| | WNPEIQYTSNYYKSNNVEFAVNTEGVYSEPRPIGTRYLTRNL |
| AFT-10 | MAADGYLPDWLEDNLSEGIREWWALKPGAPQPKANQQHQDNARGLVLP |
| Capsid + | GYKYLGPGNGLDKGEPVNAADAAALEHDKAYDQQLKAGDNPYLKYNHA |
| targeting | DAEFQERLKEDTSFGGNLGRAVFQAKKRLLEPLGLVEEAAKTAPGKKRPV |
| peptide | EQSPQEPDSSAGIGKSGAQPAKKRLNFGQTGDTESVPDPQPIGEPPAAPSGV |
| SEQ ID | GSLTMASGGGAPVADNNEGADGVGSSSGNWHCDSQWLGDRVITTSTRTW |
| NO: 55826 | ALPTYNNHLYKQISNSTSGGSSNDNAYFGYSTPWGYFDFNRFHCHFSPRD |
| | WQRLINNNWGFRPKRLNFKLFNIQVKEVTDNNGVKTIANNLTSTVQVFTD |
| | SDYQLPYVLGSAHEGCLPPFPADVFMIPQYGYLTLNDGSQAVGRSSFYCLE |
| | YFPSQMLRTGNNFQFSYEFENVPFHSSYAHSQSLDRLMNPLIDQYLYYLSK |
| | TINGSGQNQQTLKFSVAGPSNMAVQGRNYIPGPSYRQQRVSTTVTQNNNSE |
| | FAWPGASSWALNGRNSLMNPGPAMASHKEGEDRFFPLSGSLIFGKQGTGR |
| | DNVDADKVMITNEEEIKTTNPVATESYGQVATNHQSPLQGAVRLYAQAQT |
| | GWVQNQGILPGMVWQDRDVYLQGPIWAKIPHTDGNFHPSPLMGGFGMKH |
| | PPPQILIKNTPVPADPPTAFNKDKLNSFITQYSTGQVSVEIEWELQKENSKR |
| | WNPEIQYTSNYYKSNNVEFAVNTEGVYSEPRPIGTRYLTRNL |
| AFT-11 | MAADGYLPDWLEDNLSEGIREWWALKPGAPQPKANQQHQDNARGLVLP |
| Capsid + | GYKYLGPGNGLDKGEPVNAADAAALEHDKAYDQQLKAGDNPYLKYNHA |
| targeting | DAEFQERLKEDTSFGGNLGRAVFQAKKRLLEPLGLVEEAAKTAPGKKRPV |
| peptide | EQSPQEPDSSAGIGKSGAQPAKKRLNFGQTGDTESVPDPQPIGEPPAAPSGV |
| SEQ ID | GSLTMASGGGAPVADNNEGADGVGSSSGNWHCDSQWLGDRVITTSTRTW |
| NO: 55827 | ALPTYNNHLYKQISNSTSGGSSNDNAYFGYSTPWGYFDFNRFHCHFSPRD |
| | WQRLINNNWGFRPKRLNFKLFNIQVKEVTDNNGVKTIANNLTSTVQVFTD |
| | SDYQLPYVLGSAHEGCLPPFPADVFMIPQYGYLTLNDGSQAVGRSSFYCLE |
| | YFPSQMLRTGNNFQFSYEFENVPFHSSYAHSQSLDRLMNPLIDQYLYYLSK |
| | TINGSGQNQQTLKFSVAGPSNMAVQGRNYIPGPSYRQQRVSTTVTQNNNSE |
| | FAWPGASSWALNGRNSLMNPGPAMASHKEGEDRFFPLSGSLIFGKQGTGR |
| | DNVDADKVMITNEEEIKTTNPVATESYGQVATNHQSPLQGAVKLYAQAQT |
| | GWVQNQGILPGMVWQDRDVYLQGPIWAKIPHTDGNFHPSPLMGGFGMKH |
| | PPPQILIKNTPVPADPPTAFNKDKLNSFITQYSTGQVSVEIEWELQKENSKR |
| | WNPEIQYTSNYYKSNNVEFAVNTEGVYSEPRPIGTRYLTRNL |
| AFT-12 | MAADGYLPDWLEDNLSEGIREWWALKPGAPQPKANQQHQDNARGLVLP |
| Capsid + | GYKYLGPGNGLDKGEPVNAADAAALEHDKAYDQQLKAGDNPYLKYNHA |
| targeting | DAEFQERLKEDTSFGGNLGRAVFQAKKRLLEPLGLVEEAAKTAPGKKRPV |
| peptide | EQSPQEPDSSAGIGKSGAQPAKKRLNFGQTGDTESVPDPQPIGEPPAAPSGV |
| SEQ ID | GSLTMASGGGAPVADNNEGADGVGSSSGNWHCDSQWLGDRVITTSTRTW |
| NO: 55828 | ALPTYNNHLYKQISNSTSGGSSNDNAYFGYSTPWGYFDFNRFHCHFSPRD |
| | WQRLINNNWGFRPKRLNFKLFNIQVKEVTDNNGVKTIANNLTSTVQVFTD |
| | SDYQLPYVLGSAHEGCLPPFPADVFMIPQYGYLTLNDGSQAVGRSSFYCLE |
| | YFPSQMLRTGNNFQFSYEFENVPFHSSYAHSQSLDRLMNPLIDQYLYYLSK |
| | TINGSGQNQQTLKFSVAGPSNMAVQGRNYIPGPSYRQQRVSTTVTQNNNSE |
| | FAWPGASSWALNGRNSLMNPGPAMASHKEGEDRFFPLSGSLIFGKQGTGR |
| | DNVDADKVMITNEEEIKTTNPVATESYGQVATNHQSPINGAVHLYAQAQT |
| | GWVQNQGILPGMVWQDRDVYLQGPIWAKIPHTDGNFHPSPLMGGFGMKH |
| | PPPQILIKNTPVPADPPTAFNKDKLNSFITQYSTGQVSVEIEWELQKENSKR |
| | WNPEIQYTSNYYKSNNVEFAVNTEGVYSEPRPIGTRYLTRNL |
| AFT-13 | MAADGYLPDWLEDNLSEGIREWWALKPGAPQPKANQQHQDNARGLVLP |
| Capsid + | GYKYLGPGNGLDKGEPVNAADAAALEHDKAYDQQLKAGDNPYLKYNHA |
| targeting | DAEFQERLKEDTSFGGNLGRAVFQAKKRLLEPLGLVEEAAKTAPGKKRPV |
| peptide | EQSPQEPDSSAGIGKSGAQPAKKRLNFGQTGDTESVPDPQPIGEPPAAPSGV |
| SEQ ID | GSLTMASGGGAPVADNNEGADGVGSSSGNWHCDSQWLGDRVITTSTRTW |
| NO: 55829 | ALPTYNNHLYKQISNSTSGGSSNDNAYFGYSTPWGYFDFNRFHCHFSPRD |
| | WQRLINNNWGFRPKRLNFKLFNIQVKEVTDNNGVKTIANNLTSTVQVFTD |
| | SDYQLPYVLGSAHEGCLPPFPADVFMIPQYGYLTLNDGSQAVGRSSFYCLE |
| | YFPSQMLRTGNNFQFSYEFENVPFHSSYAHSQSLDRLMNPLIDQYLYYLSK |
| | TINGSGQNQQTLKFSVAGPSNMAVQGRNYIPGPSYRQQRVSTTVTQNNNSE |
| | FAWPGASSWALNGRNSLMNPGPAMASHKEGEDRFFPLSGSLIFGKQGTGR |
| | DNVDADKVMITNEEEIKTTNPVATESYGQVATNHQSPVNGAVHLYAQAQT |
| | GWVQNQGILPGMVWQDRDVYLQGPIWAKIPHTDGNFHPSPLMGGFGMKH |
| | PPPQILIKNTPVPADPPTAFNKDKLNSFITQYSTGQVSVEIEWELQKENSKR |
| | WNPEIQYTSNYYKSNNVEFAVNTEGVYSEPRPIGTRYLTRNL |
| AFT-14 | MAADGYLPDWLEDNLSEGIREWWALKPGAPQPKANQQHQDNARGLVLP |
| Capsid + | GYKYLGPGNGLDKGEPVNAADAAALEHDKAYDQQLKAGDNPYLKYNHA |
| targeting | DAEFQERLKEDTSFGGNLGRAVFQAKKRLLEPLGLVEEAAKTAPGKKRPV |
| peptide | EQSPQEPDSSAGIGKSGAQPAKKRLNFGQTGDTESVPDPQPIGEPPAAPSGV |
| SEQ ID | GSLTMASGGGAPVADNNEGADGVGSSSGNWHCDSQWLGDRVITTSTRTW |
| NO: 55830 | ALPTYNNHLYKQISNSTSGGSSNDNAYFGYSTPWGYFDFNRFHCHFSPRD |
| | WQRLINNNWGFRPKRLNFKLFNIQVKEVTDNNGVKTIANNLTSTVQVFTD |
| | SDYQLPYVLGSAHEGCLPPFPADVFMIPQYGYLTLNDGSQAVGRSSFYCLE |
| | YFPSQMLRTGNNFQFSYEFENVPFHSSYAHSQSLDRLMNPLIDQYLYYLSK |
| | TINGSGQNQQTLKFSVAGPSNMAVQGRNYIPGPSYRQQRVSTTVTQNNNSE |
| | FAWPGASSWALNGRNSLMNPGPAMASHKEGEDRFFPLSGSLIFGKQGTGR |
| | DNVDADKVMITNEEEIKTTNPVATESYGQVATNHQSPANGAVHLYAQAQT |
| | GWVQNQGILPGMVWQDRDVYLQGPIWAKIPHTDGNFHPSPLMGGFGMKH |
| | PPPQILIKNTPVPADPPTAFNKDKLNSFITQYSTGQVSVEIEWELQKENSKR |
| | WNPEIQYTSNYYKSNNVEFAVNTEGVYSEPRPIGTRYLTRNL |
| AFT-15 | MAADGYLPDWLEDNLSEGIREWWALKPGAPQPKANQQHQDNARGLVLP |
| Capsid + | GYKYLGPGNGLDKGEPVNAADAAALEHDKAYDQQLKAGDNPYLKYNHA |
| targeting | DAEFQERLKEDTSFGGNLGRAVFQAKKRLLEPLGLVEEAAKTAPGKKRPV |
| peptide | EQSPQEPDSSAGIGKSGAQPAKKRLNFGQTGDTESVPDPQPIGEPPAAPSGV |
| SEQ ID | GSLTMASGGGAPVADNNEGADGVGSSSGNWHCDSQWLGDRVITTSTRTW |
| NO: 55831 | ALPTYNNHLYKQISNSTSGGSSNDNAYFGYSTPWGYFDFNRFHCHFSPRD |
| | WQRLINNNWGFRPKRLNFKLFNIQVKEVTDNNGVKTIANNLTSTVQVFTD |
| | SDYQLPYVLGSAHEGCLPPFPADVFMIPQYGYLTLNDGSQAVGRSSFYCLE |
| | YFPSQMLRTGNNFQFSYEFENVPFHSSYAHSQSLDRLMNPLIDQYLYYLSK |
| | TINGSGQNQQTLKFSVAGPSNMAVQGRNYIPGPSYRQQRVSTTVTQNNNSE |
| | FAWPGASSWALNGRNSLMNPGPAMASHKEGEDRFFPLSGSLIFGKQGTGR |
| | DNVDADKVMITNEEEIKTTNPVATESYGQVATNHQSPTNGTVRLYAQAQT |
| | GWVQNQGILPGMVWQDRDVYLQGPIWAKIPHTDGNFHPSPLMGGFGMKH |
| | PPPQILIKNTPVPADPPTAFNKDKLNSFITQYSTGQVSVEIEWELQKENSKR |
| | WNPEIQYTSNYYKSNNVEFAVNTEGVYSEPRPIGTRYLTRNL |
| AFT16 | MAADGYLPDWLEDNLSEGIREWWALKPGAPQPKANQQHQDNARGLVLP |
| Capsid + | GYKYLGPGNGLDKGEPVNAADAAALEHDKAYDQQLKAGDNPYLKYNHA |
| targeting | DAEFQERLKEDTSFGGNLGRAVFQAKKRLLEPLGLVEEAAKTAPGKKRPV |
| peptide | EQSPQEPDSSAGIGKSGAQPAKKRLNFGQTGDTESVPDPQPIGEPPAAPSGV |
| SEQ ID | GSLTMASGGGAPVADNNEGADGVGSSSGNWHCDSQWLGDRVITTSTRTW |
| NO: 55832 | ALPTYNNHLYKQISNSTSGGSSNDNAYFGYSTPWGYFDFNRFHCHFSPRD |
| | WQRLINNNWGFRPKRLNFKLFNIQVKEVTDNNGVKTIANNLTSTVQVFTD |
| | SDYQLPYVLGSAHEGCLPPFPADVFMIPQYGYLTLNDGSQAVGRSSFYCLE |
| | YFPSQMLRTGNNFQFSYEFENVPFHSSYAHSQSLDRLMNPLIDQYLYYLSK |
| | TINGSGQNQQTLKFSVAGPSNMAVQGRNYIPGPSYRQQRVSTTVTQNNNSE |
| | FAWPGASSWALNGRNSLMNPGPAMASHKEGEDRFFPLSGSLIFGKQGTGR |
| | DNVDADKVMITNEEEIKTTNPVATESYGQVATNHQSPTNGTVHLYAQAQT |
| | GWVQNQGILPGMVWQDRDVYLQGPIWAKIPHTDGNFHPSPLMGGFGMKH |
| | PPPQILIKNTPVPADPPTAFNKDKLNSFITQYSTGQVSVEIEWELQKENSKR |
| | WNPEIQYTSNYYKSNNVEFAVNTEGVYSEPRPIGTRYLTRNL |
| AFT-17 | MAADGYLPDWLEDNLSEGIREWWALKPGAPQPKANQQHQDNARGLVLP |
| Capsid + | GYKYLGPGNGLDKGEPVNAADAAALEHDKAYDQQLKAGDNPYLKYNHA |
| targeting | DAEFQERLKEDTSFGGNLGRAVFQAKKRLLEPLGLVEEAAKTAPGKKRPV |
| peptide | EQSPQEPDSSAGIGKSGAQPAKKRLNFGQTGDTESVPDPQPIGEPPAAPSGV |
| SEQ ID | GSLTMASGGGAPVADNNEGADGVGSSSGNWHCDSQWLGDRVITTSTRTW |
| NO: 55833 | ALPTYNNHLYKQISNSTSGGSSNDNAYFGYSTPWGYFDFNRFHCHFSPRD |
| | WQRLINNNWGFRPKRLNFKLFNIQVKEVTDNNGVKTIANNLTSTVQVFTD |
| | SDYQLPYVLGSAHEGCLPPFPADVFMIPQYGYLTLNDGSQAVGRSSFYCLE |
| | YFPSQMLRTGNNFQFSYEFENVPFHSSYAHSQSLDRLMNPLIDQYLYYLSK |
| | TINGSGQNQQTLKFSVAGPSNMAVQGRNYIPGPSYRQQRVSTTVTQNNNSE |
| | FAWPGASSWALNGRNSLMNPGPAMASHKEGEDRFFPLSGSLIFGKQGTGR |
| | DNVDADKVMITNEEEIKTTNPVATESYGQVATNHQSPTNGTVKLYAQAQT |
| | GWVQNQGILPGMVWQDRDVYLQGPIWAKIPHTDGNFHPSPLMGGFGMKH |
| | PPPQILIKNTPVPADPPTAFNKDKLNSFITQYSTGQVSVEIEWELQKENSKR |
| | WNPEIQYTSNYYKSNNVEFAVNTEGVYSEPRPIGTRYLTRNL |
| AFT-18 | MAADGYLPDWLEDNLSEGIREWWALKPGAPQPKANQQHQDNARGLVLP |
| Capsid + | GYKYLGPGNGLDKGEPVNAADAAALEHDKAYDQQLKAGDNPYLKYNHA |
| targeting | DAEFQERLKEDTSFGGNLGRAVFQAKKRLLEPLGLVEEAAKTAPGKKRPV |
| peptide | EQSPQEPDSSAGIGKSGAQPAKKRLNFGQTGDTESVPDPQPIGEPPAAPSGV |
| SEQ ID | GSLTMASGGGAPVADNNEGADGVGSSSGNWHCDSQWLGDRVITTSTRTW |
| NO: 55834 | ALPTYNNHLYKQISNSTSGGSSNDNAYFGYSTPWGYFDFNRFHCHFSPRD |
| | WQRLINNNWGFRPKRLNFKLFNIQVKEVTDNNGVKTIANNLTSTVQVFTD |
| | SDYQLPYVLGSAHEGCLPPFPADVFMIPQYGYLTLNDGSQAVGRSSFYCLE |
| | YFPSQMLRTGNNFQFSYEFENVPFHSSYAHSQSLDRLMNPLIDQYLYYLSK |
| | TINGSGQNQQTLKFSVAGPSNMAVQGRNYIPGPSYRQQRVSTTVTQNNNSE |
| | FAWPGASSWALNGRNSLMNPGPAMASHKEGEDRFFPLSGSLIFGKQGTGR |
| | DNVDADKVMITNEEEIKTTNPVATESYGQVATNHQSPSNGTLRLYAQAQT |
| | GWVQNQGILPGMVWQDRDVYLQGPIWAKIPHTDGNFHPSPLMGGFGMKH |
| | PPPQILIKNTPVPADPPTAFNKDKLNSFITQYSTGQVSVEIEWELQKENSKR |
| | WNPEIQYTSNYYKSNNVEFAVNTEGVYSEPRPIGTRYLTRNL |
| AFT-19 | MAADGYLPDWLEDNLSEGIREWWALKPGAPQPKANQQHQDNARGLVLP |
| Capsid + | GYKYLGPGNGLDKGEPVNAADAAALEHDKAYDQQLKAGDNPYLKYNHA |
| targeting | DAEFQERLKEDTSFGGNLGRAVFQAKKRLLEPLGLVEEAAKTAPGKKRPV |
| peptide | EQSPQEPDSSAGIGKSGAQPAKKRLNFGQTGDTESVPDPQPIGEPPAAPSGV |
| SEQ ID | GSLTMASGGGAPVADNNEGADGVGSSSGNWHCDSQWLGDRVITTSTRTW |
| NO: 55835 | ALPTYNNHLYKQISNSTSGGSSNDNAYFGYSTPWGYFDFNRFHCHFSPRD |
| | WQRLINNNWGFRPKRLNFKLFNIQVKEVTDNNGVKTIANNLTSTVQVFTD |
| | SDYQLPYVLGSAHEGCLPPFPADVFMIPQYGYLTLNDGSQAVGRSSFYCLE |
| | YFPSQMLRTGNNFQFSYEFENVPFHSSYAHSQSLDRLMNPLIDQYLYYLSK |
| | TINGSGQNQQTLKFSVAGPSNMAVQGRNYIPGPSYRQQRVSTTVTQNNNSE |
| | FAWPGASSWALNGRNSLMNPGPAMASHKEGEDRFFPLSGSLIFGKQGTGR |
| | DNVDADKVMITNEEEIKTTNPVATESYGQVATNHQSPSNGTLHLYAQAQT |
| | GWVQNQGILPGMVWQDRDVYLQGPIWAKIPHTDGNFHPSPLMGGFGMKH |
| | PPPQILIKNTPVPADPPTAFNKDKLNSFITQYSTGQVSVEIEWELQKENSKR |
| | WNPEIQYTSNYYKSNNVEFAVNTEGVYSEPRPIGTRYLTRNL |
| AFT-20 | MAADGYLPDWLEDNLSEGIREWWALKPGAPQPKANQQHQDNARGLVLP |
| Capsid + | GYKYLGPGNGLDKGEPVNAADAAALEHDKAYDQQLKAGDNPYLKYNHA |
| targeting | DAEFQERLKEDTSFGGNLGRAVFQAKKRLLEPLGLVEEAAKTAPGKKRPV |
| peptide | EQSPQEPDSSAGIGKSGAQPAKKRLNFGQTGDTESVPDPQPIGEPPAAPSGV |
| SEQ ID | GSLTMASGGGAPVADNNEGADGVGSSSGNWHCDSQWLGDRVITTSTRTW |
| NO: 55836 | ALPTYNNHLYKQISNSTSGGSSNDNAYFGYSTPWGYFDFNRFHCHFSPRD |
| | WQRLINNNWGFRPKRLNFKLFNIQVKEVTDNNGVKTIANNLTSTVQVFTD |
| | SDYQLPYVLGSAHEGCLPPFPADVFMIPQYGYLTLNDGSQAVGRSSFYCLE |
| | YFPSQMLRTGNNFQFSYEFENVPFHSSYAHSQSLDRLMNPLIDQYLYYLSK |
| | TINGSGQNQQTLKFSVAGPSNMAVQGRNYIPGPSYRQQRVSTTVTQNNNSE |
| | FAWPGASSWALNGRNSLMNPGPAMASHKEGEDRFFPLSGSLIFGKQGTGR |
| | DNVDADKVMITNEEEIKTTNPVATESYGQVATNHQSPSNGTLKLYAQAQT |
| | GWVQNQGILPGMVWQDRDVYLQGPIWAKIPHTDGNFHPSPLMGGFGMKH |
| | PPPQILIKNTPVPADPPTAFNKDKLNSFITQYSTGQVSVEIEWELQKENSKR |
| | WNPEIQYTSNYYKSNNVEFAVNTEGVYSEPRPIGTRYLTRNL |
| AFT-21 | MAADGYLPDWLEDNLSEGIREWWALKPGAPQPKANQQHQDNARGLVLP |
| Capsid + | GYKYLGPGNGLDKGEPVNAADAAALEHDKAYDQQLKAGDNPYLKYNHA |
| targeting | DAEFQERLKEDTSFGGNLGRAVFQAKKRLLEPLGLVEEAAKTAPGKKRPV |
| peptide | EQSPQEPDSSAGIGKSGAQPAKKRLNFGQTGDTESVPDPQPIGEPPAAPSGV |
| SEQ ID | GSLTMASGGGAPVADNNEGADGVGSSSGNWHCDSQWLGDRVITTSTRTW |
| NO: 55837 | ALPTYNNHLYKQISNSTSGGSSNDNAYFGYSTPWGYFDFNRFHCHFSPRD |
| | WQRLINNNWGFRPKRLNFKLFNIQVKEVTDNNGVKTIANNLTSTVQVFTD |
| | SDYQLPYVLGSAHEGCLPPFPADVFMIPQYGYLTLNDGSQAVGRSSFYCLE |
| | YFPSQMLRTGNNFQFSYEFENVPFHSSYAHSQSLDRLMNPLIDQYLYYLSK |
| | TINGSGQNQQTLKFSVAGPSNMAVQGRNYIPGPSYRQQRVSTTVTQNNNSE |
| | FAWPGASSWALNGRNSLMNPGPAMASHKEGEDRFFPLSGSLIFGKQGTGR |
| | DNVDADKVMITNEEEIKTTNPVATESYGQVATNHQSPTNGTLRLYAQAQT |
| | GWVQNQGILPGMVWQDRDVYLQGPIWAKIPHTDGNFHPSPLMGGFGMKH |
| | PPPQILIKNTPVPADPPTAFNKDKLNSFITQYSTGQVSVEIEWELQKENSKR |
| | WNPEIQYTSNYYKSNNVEFAVNTEGVYSEPRPIGTRYLTRNL |
| AFT-22 | MAADGYLPDWLEDNLSEGIREWWALKPGAPQPKANQQHQDNARGLVLP |
| Capsid + | GYKYLGPGNGLDKGEPVNAADAAALEHDKAYDQQLKAGDNPYLKYNHA |
| targeting | DAEFQERLKEDTSFGGNLGRAVFQAKKRLLEPLGLVEEAAKTAPGKKRPV |
| peptide | EQSPQEPDSSAGIGKSGAQPAKKRLNFGQTGDTESVPDPQPIGEPPAAPSGV |
| SEQ ID | GSLTMASGGGAPVADNNEGADGVGSSSGNWHCDSQWLGDRVITTSTRTW |
| NO: 55838 | ALPTYNNHLYKQISNSTSGGSSNDNAYFGYSTPWGYFDFNRFHCHFSPRD |
| | WQRLINNNWGFRPKRLNFKLFNIQVKEVTDNNGVKTIANNLTSTVQVFTD |
| | SDYQLPYVLGSAHEGCLPPFPADVFMIPQYGYLTLNDGSQAVGRSSFYCLE |
| | YFPSQMLRTGNNFQFSYEFENVPFHSSYAHSQSLDRLMNPLIDQYLYYLSK |
| | TINGSGQNQQTLKFSVAGPSNMAVQGRNYIPGPSYRQQRVSTTVTQNNNSE |
| | FAWPGASSWALNGRNSLMNPGPAMASHKEGEDRFFPLSGSLIFGKQGTGR |
| | DNVDADKVMITNEEEIKTTNPVATESYGQVATNHQSPTNGTLHLYAQAQT |
| | GWVQNQGILPGMVWQDRDVYLQGPIWAKIPHTDGNFHPSPLMGGFGMKH |
| | PPPQILIKNTPVPADPPTAFNKDKLNSFITQYSTGQVSVEIEWELQKENSKR |
| | WNPEIQYTSNYYKSNNVEFAVNTEGVYSEPRPIGTRYLTRNL |
| AFT-23 | MAADGYLPDWLEDNLSEGIREWWALKPGAPQPKANQQHQDNARGLVLP |
| Capsid + | GYKYLGPGNGLDKGEPVNAADAAALEHDKAYDQQLKAGDNPYLKYNHA |
| targeting | DAEFQERLKEDTSFGGNLGRAVFQAKKRLLEPLGLVEEAAKTAPGKKRPV |
| peptide | EQSPQEPDSSAGIGKSGAQPAKKRLNFGQTGDTESVPDPQPIGEPPAAPSGV |
| SEQ ID | GSLTMASGGGAPVADNNEGADGVGSSSGNWHCDSQWLGDRVITTSTRTW |
| NO: 55839 | ALPTYNNHLYKQISNSTSGGSSNDNAYFGYSTPWGYFDFNRFHCHFSPRD |
| | WQRLINNNWGFRPKRLNFKLFNIQVKEVTDNNGVKTIANNLTSTVQVFTD |
| | SDYQLPYVLGSAHEGCLPPFPADVFMIPQYGYLTLNDGSQAVGRSSFYCLE |
| | YFPSQMLRTGNNFQFSYEFENVPFHSSYAHSQSLDRLMNPLIDQYLYYLSK |
| | TINGSGQNQQTLKFSVAGPSNMAVQGRNYIPGPSYRQQRVSTTVTQNNNSE |
| | FAWPGASSWALNGRNSLMNPGPAMASHKEGEDRFFPLSGSLIFGKQGTGR |
| | DNVDADKVMITNEEEIKTTNPVATESYGQVATNHQSPTNGTLKLYAQAQT |
| | GWVQNQGILPGMVWQDRDVYLQGPIWAKIPHTDGNFHPSPLMGGFGMKH |
| | PPPQILIKNTPVPADPPTAFNKDKLNSFITQYSTGQVSVEIEWELQKENSKR |
| | WNPEIQYTSNYYKSNNVEFAVNTEGVYSEPRPIGTRYLTRNL |
| AFT-24 | MAADGYLPDWLEDNLSEGIREWWALKPGAPQPKANQQHQDNARGLVLP |
| Capsid + | GYKYLGPGNGLDKGEPVNAADAAALEHDKAYDQQLKAGDNPYLKYNHA |
| targeting | DAEFQERLKEDTSFGGNLGRAVFQAKKRLLEPLGLVEEAAKTAPGKKRPV |
| peptide | EQSPQEPDSSAGIGKSGAQPAKKRLNFGQTGDTESVPDPQPIGEPPAAPSGV |
| SEQ ID | GSLTMASGGGAPVADNNEGADGVGSSSGNWHCDSQWLGDRVITTSTRTW |
| NO: 55840 | ALPTYNNHLYKQISNSTSGGSSNDNAYFGYSTPWGYFDFNRFHCHFSPRD |
| | WQRLINNNWGFRPKRLNFKLFNIQVKEVTDNNGVKTIANNLTSTVQVFTD |
| | SDYQLPYVLGSAHEGCLPPFPADVFMIPQYGYLTLNDGSQAVGRSSFYCLE |
| | YFPSQMLRTGNNFQFSYEFENVPFHSSYAHSQSLDRLMNPLIDQYLYYLSK |
| | TINGSGQNQQTLKFSVAGPSNMAVQGRNYIPGPSYRQQRVSTTVTQNNNSE |
| | FAWPGASSWALNGRNSLMNPGPAMASHKEGEDRFFPLSGSLIFGKQGTGR |
| | DNVDADKVMITNEEEIKTTNPVATESYGQVATNHQSPTQGAVTVRAQAQT |
| | GWVQNQGILPGMVWQDRDVYLQGPIWAKIPHTDGNFHPSPLMGGFGMKH |
| | PPPQILIKNTPVPADPPTAFNKDKLNSFITQYSTGQVSVEIEWELQKENSKR |
| | WNPEIQYTSNYYKSNNVEFAVNTEGVYSEPRPIGTRYLTRNL |
| AFT-25 | MAADGYLPDWLEDNLSEGIREWWALKPGAPQPKANQQHQDNARGLVLP |
| Capsid + | GYKYLGPGNGLDKGEPVNAADAAALEHDKAYDQQLKAGDNPYLKYNHA |
| targeting | DAEFQERLKEDTSFGGNLGRAVFQAKKRLLEPLGLVEEAAKTAPGKKRPV |
| peptide | EQSPQEPDSSAGIGKSGAQPAKKRLNFGQTGDTESVPDPQPIGEPPAAPSGV |
| SEQ ID | GSLTMASGGGAPVADNNEGADGVGSSSGNWHCDSQWLGDRVITTSTRTW |
| NO: 55841 | ALPTYNNHLYKQISNSTSGGSSNDNAYFGYSTPWGYFDFNRFHCHFSPRD |
| | WQRLINNNWGFRPKRLNFKLFNIQVKEVTDNNGVKTIANNLTSTVQVFTD |
| | SDYQLPYVLGSAHEGCLPPFPADVFMIPQYGYLTLNDGSQAVGRSSFYCLE |
| | YFPSQMLRTGNNFQFSYEFENVPFHSSYAHSQSLDRLMNPLIDQYLYYLSK |
| | TINGSGQNQQTLKFSVAGPSNMAVQGRNYIPGPSYRQQRVSTTVTQNNNSE |
| | FAWPGASSWALNGRNSLMNPGPAMASHKEGEDRFFPLSGSLIFGKQGTGR |
| | DNVDADKVMITNEEEIKTTNPVATESYGQVATNHQSPLQGAVTVRAQAQT |
| | GWVQNQGILPGMVWQDRDVYLQGPIWAKIPHTDGNFHPSPLMGGFGMKH |
| | PPPQILIKNTPVPADPPTAFNKDKLNSFITQYSTGQVSVEIEWELQKENSKR |
| | WNPEIQYTSNYYKSNNVEFAVNTEGVYSEPRPIGTRYLTRNL |
| AFT-26 | MAADGYLPDWLEDNLSEGIREWWALKPGAPQPKANQQHQDNARGLVLP |
| Capsid + | GYKYLGPGNGLDKGEPVNAADAAALEHDKAYDQQLKAGDNPYLKYNHA |
| targeting | DAEFQERLKEDTSFGGNLGRAVFQAKKRLLEPLGLVEEAAKTAPGKKRPV |
| peptide | EQSPQEPDSSAGIGKSGAQPAKKRLNFGQTGDTESVPDPQPIGEPPAAPSGV |
| SEQ ID | GSLTMASGGGAPVADNNEGADGVGSSSGNWHCDSQWLGDRVITTSTRTW |
| NO: 55842 | ALPTYNNHLYKQISNSTSGGSSNDNAYFGYSTPWGYFDFNRFHCHFSPRD |
| | WQRLINNNWGFRPKRLNFKLFNIQVKEVTDNNGVKTIANNLTSTVQVFTD |
| | SDYQLPYVLGSAHEGCLPPFPADVFMIPQYGYLTLNDGSQAVGRSSFYCLE |
| | YFPSQMLRTGNNFQFSYEFENVPFHSSYAHSQSLDRLMNPLIDQYLYYLSK |
| | TINGSGQNQQTLKFSVAGPSNMAVQGRNYIPGPSYRQQRVSTTVTQNNNSE |
| | FAWPGASSWALNGRNSLMNPGPAMASHKEGEDRFFPLSGSLIFGKQGTGR |
| | DNVDADKVMITNEEEIKTTNPVATESYGQVATNHQSPLQGAVHVRAQAQT |
| | GWVQNQGILPGMVWQDRDVYLQGPIWAKIPHTDGNFHPSPLMGGFGMKH |
| | PPPQILIKNTPVPADPPTAFNKDKLNSFITQYSTGQVSVEIEWELQKENSKR |
| | WNPEIQYTSNYYKSNNVEFAVNTEGVYSEPRPIGTRYLTRNL |
| AFT-27 | MAADGYLPDWLEDNLSEGIREWWALKPGAPQPKANQQHQDNARGLVLP |
| Capsid + | GYKYLGPGNGLDKGEPVNAADAAALEHDKAYDQQLKAGDNPYLKYNHA |
| targeting | DAEFQERLKEDTSFGGNLGRAVFQAKKRLLEPLGLVEEAAKTAPGKKRPV |
| peptide | EQSPQEPDSSAGIGKSGAQPAKKRLNFGQTGDTESVPDPQPIGEPPAAPSGV |
| SEQ ID | GSLTMASGGGAPVADNNEGADGVGSSSGNWHCDSQWLGDRVITTSTRTW |
| NO: 55843 | ALPTYNNHLYKQISNSTSGGSSNDNAYFGYSTPWGYFDFNRFHCHFSPRD |
| | WQRLINNNWGFRPKRLNFKLFNIQVKEVTDNNGVKTIANNLTSTVQVFTD |
| | SDYQLPYVLGSAHEGCLPPFPADVFMIPQYGYLTLNDGSQAVGRSSFYCLE |
| | YFPSQMLRTGNNFQFSYEFENVPFHSSYAHSQSLDRLMNPLIDQYLYYLSK |
| | TINGSGQNQQTLKFSVAGPSNMAVQGRNYIPGPSYRQQRVSTTVTQNNNSE |
| | FAWPGASSWALNGRNSLMNPGPAMASHKEGEDRFFPLSGSLIFGKQGTGR |
| | DNVDADKVMITNEEEIKTTNPVATESYGQVATNHQSPLQGAVHVYAQAQT |
| | GWVQNQGILPGMVWQDRDVYLQGPIWAKIPHTDGNFHPSPLMGGFGMKH |
| | PPPQILIKNTPVPADPPTAFNKDKLNSFITQYSTGQVSVEIEWELQKENSKR |
| | WNPEIQYTSNYYKSNNVEFAVNTEGVYSEPRPIGTRYLTRNL |
| AFT-28 | MAADGYLPDWLEDNLSEGIREWWALKPGAPQPKANQQHQDNARGLVLP |
| Capsid + | GYKYLGPGNGLDKGEPVNAADAAALEHDKAYDQQLKAGDNPYLKYNHA |
| targeting | DAEFQERLKEDTSFGGNLGRAVFQAKKRLLEPLGLVEEAAKTAPGKKRPV |
| peptide | EQSPQEPDSSAGIGKSGAQPAKKRLNFGQTGDTESVPDPQPIGEPPAAPSGV |
| SEQ ID | GSLTMASGGGAPVADNNEGADGVGSSSGNWHCDSQWLGDRVITTSTRTW |
| NO: 55844 | ALPTYNNHLYKQISNSTSGGSSNDNAYFGYSTPWGYFDFNRFHCHFSPRD |
| | WQRLINNNWGFRPKRLNFKLFNIQVKEVTDNNGVKTIANNLTSTVQVFTD |
| | SDYQLPYVLGSAHEGCLPPFPADVFMIPQYGYLTLNDGSQAVGRSSFYCLE |
| | YFPSQMLRTGNNFQFSYEFENVPFHSSYAHSQSLDRLMNPLIDQYLYYLSK |
| | TINGSGQNQQTLKFSVAGPSNMAVQGRNYIPGPSYRQQRVSTTVTQNNNSE |
| | FAWPGASSWALNGRNSLMNPGPAMASHKEGEDRFFPLSGSLIFGKQGTGR |
| | DNVDADKVMITNEEEIKTTNPVATESYGQVATNHQSPSQGAVTLRAQAQT |
| | GWVQNQGILPGMVWQDRDVYLQGPIWAKIPHTDGNFHPSPLMGGFGMKH |
| | PPPQILIKNTPVPADPPTAFNKDKLNSFITQYSTGQVSVEIEWELQKENSKR |
| | WNPEIQYTSNYYKSNNVEFAVNTEGVYSEPRPIGTRYLTRNL |
| AFT-29 | MAADGYLPDWLEDNLSEGIREWWALKPGAPQPKANQQHQDNARGLVLP |
| Capsid + | GYKYLGPGNGLDKGEPVNAADAAALEHDKAYDQQLKAGDNPYLKYNHA |
| targeting | DAEFQERLKEDTSFGGNLGRAVFQAKKRLLEPLGLVEEAAKTAPGKKRPV |
| peptide | EQSPQEPDSSAGIGKSGAQPAKKRLNFGQTGDTESVPDPQPIGEPPAAPSGV |
| SEQ ID | GSLTMASGGGAPVADNNEGADGVGSSSGNWHCDSQWLGDRVITTSTRTW |
| NO: 55845 | ALPTYNNHLYKQISNSTSGGSSNDNAYFGYSTPWGYFDFNRFHCHFSPRD |
| | WQRLINNNWGFRPKRLNFKLFNIQVKEVTDNNGVKTIANNLTSTVQVFTD |
| | SDYQLPYVLGSAHEGCLPPFPADVFMIPQYGYLTLNDGSQAVGRSSFYCLE |
| | YFPSQMLRTGNNFQFSYEFENVPFHSSYAHSQSLDRLMNPLIDQYLYYLSK |
| | TINGSGQNQQTLKFSVAGPSNMAVQGRNYIPGPSYRQQRVSTTVTQNNNSE |
| | FAWPGASSWALNGRNSLMNPGPAMASHKEGEDRFFPLSGSLIFGKQGTGR |
| | DNVDADKVMITNEEEIKTTNPVATESYGQVATNHQSPLQGAVTLRAQAQT |
| | GWVQNQGILPGMVWQDRDVYLQGPIWAKIPHTDGNFHPSPLMGGFGMKH |
| | PPPQILIKNTPVPADPPTAFNKDKLNSFITQYSTGQVSVEIEWELQKENSKR |
| | WNPEIQYTSNYYKSNNVEFAVNTEGVYSEPRPIGTRYLTRNL |
| AFT-30 | MAADGYLPDWLEDNLSEGIREWWALKPGAPQPKANQQHQDNARGLVLP |
| Capsid + | GYKYLGPGNGLDKGEPVNAADAAALEHDKAYDQQLKAGDNPYLKYNHA |
| targeting | DAEFQERLKEDTSFGGNLGRAVFQAKKRLLEPLGLVEEAAKTAPGKKRPV |
| peptide | EQSPQEPDSSAGIGKSGAQPAKKRLNFGQTGDTESVPDPQPIGEPPAAPSGV |
| SEQ ID | GSLTMASGGGAPVADNNEGADGVGSSSGNWHCDSQWLGDRVITTSTRTW |
| NO: 55846 | ALPTYNNHLYKQISNSTSGGSSNDNAYFGYSTPWGYFDFNRFHCHFSPRD |
| | WQRLINNNWGFRPKRLNFKLFNIQVKEVTDNNGVKTIANNLTSTVQVFTD |
| | SDYQLPYVLGSAHEGCLPPFPADVFMIPQYGYLTLNDGSQAVGRSSFYCLE |
| | YFPSQMLRTGNNFQFSYEFENVPFHSSYAHSQSLDRLMNPLIDQYLYYLSK |
| | TINGSGQNQQTLKFSVAGPSNMAVQGRNYIPGPSYRQQRVSTTVTQNNNSE |
| | FAWPGASSWALNGRNSLMNPGPAMASHKEGEDRFFPLSGSLIFGKQGTGR |
| | DNVDADKVMITNEEEIKTTNPVATESYGQVATNHQSPLQGAVHLRAQAQT |
| | GWVQNQGILPGMVWQDRDVYLQGPIWAKIPHTDGNFHPSPLMGGFGMKH |
| | PPPQILIKNTPVPADPPTAFNKDKLNSFITQYSTGQVSVEIEWELQKENSKR |
| | WNPEIQYTSNYYKSNNVEFAVNTEGVYSEPRPIGTRYLTRNL |
| AFT-31 | MAADGYLPDWLEDNLSEGIREWWALKPGAPQPKANQQHQDNARGLVLP |
| Capsid + | GYKYLGPGNGLDKGEPVNAADAAALEHDKAYDQQLKAGDNPYLKYNHA |
| targeting | DAEFQERLKEDTSFGGNLGRAVFQAKKRLLEPLGLVEEAAKTAPGKKRPV |
| peptide | EQSPQEPDSSAGIGKSGAQPAKKRLNFGQTGDTESVPDPQPIGEPPAAPSGV |
| SEQ ID | GSLTMASGGGAPVADNNEGADGVGSSSGNWHCDSQWLGDRVITTSTRTW |
| NO: 55847 | ALPTYNNHLYKQISNSTSGGSSNDNAYFGYSTPWGYFDFNRFHCHFSPRD |
| | WQRLINNNWGFRPKRLNFKLFNIQVKEVTDNNGVKTIANNLTSTVQVFTD |
| | SDYQLPYVLGSAHEGCLPPFPADVFMIPQYGYLTLNDGSQAVGRSSFYCLE |
| | YFPSQMLRTGNNFQFSYEFENVPFHSSYAHSQSLDRLMNPLIDQYLYYLSK |
| | TINGSGQNQQTLKFSVAGPSNMAVQGRNYIPGPSYRQQRVSTTVTQNNNSE |
| | FAWPGASSWALNGRNSLMNPGPAMASHKEGEDRFFPLSGSLIFGKQGTGR |
| | DNVDADKVMITNEEEIKTTNPVATESYGQVATNHQSPTQGAVTLRAQAQT |
| | GWVQNQGILPGMVWQDRDVYLQGPIWAKIPHTDGNFHPSPLMGGFGMKH |
| | PPPQILIKNTPVPADPPTAFNKDKLNSFITQYSTGQVSVEIEWELQKENSKR |
| | WNPEIQYTSNYYKSNNVEFAVNTEGVYSEPRPIGTRYLTRNL |
| AAV9 N- | SYGQVATNHQS |
| terminal | |
| flanking | |
| region | |
| SEQ ID | |
| NO: 55848 | |
| AAV9 N- | B₁YGB₂VATNB₃QS |
| terminal | |
| flanking | |
| region- | |
| consensus | |
| SEQ ID | |
| NO: 55849 | |
| AAV9 C- | AQAQTGWVQNQGI |
| terminal | |
| flanking | |
| region | |
| SEQ ID | |
| NO: 55850 | |
| AAV9 C- | AQAQTGZ₁VZ₂Z₃QGZ4 |
| terminal | |
| flanking | |
| region- | |
| consensus | |
| SEQ ID | |
| NO: 55851 | |
| SEQ ID | B₁YGB₂VATNB₃QSPLMGAVHLYAQAQTGZ₁VZ₂Z₃QGZ₄ |
| NO: 55852 | |
| SEQ ID | GXLIFGKQGXGXXNVDXDXVMITNEEEIKTTNPVATEXYGXVATNXQSAX |
| NO: 55853 | XXXXTGXVXXQGXLPGMVWQDRDVYLQGPIWAKIPHTDGXFHPSPLMGG |
| | FG |
| SEQ ID | PTQGTVR |
| NO: 55854 | |
| SEQ ID | PSQGTLR |
| NO: 55855 | |
| SEQ ID | PTQGTLR |
| NO: 55856 | |

### 9. EQUIVALENTS AND INCORPORATION BY REFERENCE

[0570] While the invention has been particularly shown and described with reference to a preferred embodiment and various alternate embodiments, it will be understood by persons skilled in the relevant art that various changes in form and details can be made therein without departing from the spirit and scope of the invention.

[0571] All references, issued patents and patent applications cited within the body of the instant specification are hereby incorporated by reference in their entirety, for all purposes.

APPENDIX A

| SEQ | ICM | logFC |
|---|---|---|
| ID NO | peptide sequence | mean |
| 518 | TDFRSPQ | 1.83 |
| 396 | MPGRAPI | 1.23 |
| 393 | LTVSALK | 1.07 |
| 186 | AQTNRTIQTAQ | 1.07 |
| 368 | LGRLTAN | 1.01 |
| 493 | SGSLAVPFKAQ | 0.99 |
| 179 | AQSVSKPFLAQ | 0.79 |
| 217 | CTDIKGKC | 0.7 |
| 614 | YGSRSVD | 0.59 |
| 475 | RQPTTIP | 0.58 |
| 523 | TGAFSST | 0.56 |
| 411 | NIPKAYG | 0.52 |
| 443 | PYASITG | 0.51 |
| 192 | ATTLATPFKAQ | 0.51 |
| 403 | MTLTRQE | 0.45 |
| 266 | FGQKASS | 0.43 |
| 416 | NQTLAVPFKAQ | 0.4 |
| 579 | VQSGRRGDMSMLNS | 0.35 |
| 619 | YTIWMPENPRPGTP | 0.35 |
| 589 | VSNPLNQ | 0.35 |
| 247 | EGTLAVPFKAQ | 0.31 |
| 367 | LGNGKMTVQP | 0.3 |
| 263 | EVRGGPS | 0.26 |
| 410 | NEARVRE | 0.23 |
| 615 | YLPDQQLTWFPS | 0.17 |
| 597 | VTKSEWQQGFV | 0.13 |
| 184 | AQTLSTPFKAQ | −0.05 |
| 268 | FNSPVIQ | −0.05 |
| 586 | VRSEHRGDLSALNT | −0.05 |
| 259 | ESTLAVPFKAQ | −0.07 |
| 322 | HSPGKO | −0.08 |
| 273 | FTVSALK | −0.11 |
| 333 | ISDTRIS | −0.14 |
| 181 | AQTLATPFKAQ | −0.19 |
| 616 | YPGRNPD | −0.2 |
| 539 | TQSERRGDLAALNT | −0.2 |
| 565 | VGARLSA | −0.24 |
| 471 | RPLTAND | −0.27 |
| 257 | ERVGFAQ | −0.28 |
| 445 | QAVRTSL | −0.33 |
| 587 | VSALK | −0.38 |
| 185 | AQTLTMPFKAQ | −0.41 |
| 293 | GLNLPQNKVSFS | −0.41 |
| 354 | KVDISSQISSMNQS | −0.43 |
| 255 | EQFRNLA | −0.45 |
| 504 | SRAGTVP | −0.45 |
| 335 | ISTHSPP | −0.45 |
| 190 | ATDIKGKEV | −0.48 |
| 341 | KDSTAFG | −0.53 |
| 173 | AKEGANVAG | −0.56 |
| 568 | VISDRSS | −0.59 |
| 236 | DVGIRPS | −0.61 |
| 206 | CLSSRLDAC | −0.61 |
| 212 | CPQVKPGIKLEC | −0.66 |
| 557 | TVSALK | −0.68 |
| 492 | SGNLAVPFKAQ | −0.71 |
| 440 | PVGQPSHAPSVHLA | −0.73 |
| 379 | LPVGQPSHAPSVHL | −0.76 |
| 572 | VPALR | −0.77 |
| 172 | AHSLKSITNHGL | −0.78 |
| 425 | PAIKTYS | −0.78 |
| 512 | SYGTEWSSYKT | −0.81 |
| 464 | RGDLGLS | −0.81 |

APPENDIX B

| targeting | SEQ | CNS | DRG | Liver |
|---|---|---|---|---|
| peptide | ID NO | median | median | median |
| GINGAVKVK | 41077 | 16.12 | 2.48 | −1.75 |
| PAQGGLKLK | 46272 | 15.79 | #N/A | 4.18 |
| GLQGVLHVF | 3563 | 15.28 | 3.02 | 3.15 |
| GAQGVLRVR | 46143 | 14.97 | #N/A | −0.16 |
| PTNGSVHVH | 12416 | 14.31 | 6.46 | 3.53 |
| GTNGAIRLH | 37190 | 14.18 | 1.30 | −0.25 |
| PSPGTARLY | 19617 | 14.18 | 3.79 | 3.42 |
| GSQGSIRLR | 46035 | 14.16 | #N/A | 0.41 |
| GINGAVRVK | 46161 | 14.09 | 0.66 | 0.42 |
| GIPATLRLR | 6566 | 14.02 | #N/A | 1.27 |
| PVNAGLRVF | 36248 | 13.93 | 4.47 | 3.27 |
| PTQAVGKLR | 13308 | 13.60 | #N/A | −1.43 |
| GVPASGKVH | 9054 | 13.55 | 3.51 | 4.82 |
| PSPGTLKLH | 13781 | 13.43 | 3.58 | −0.18 |
| PSPGSIRVK | 46268 | 13.37 | #N/A | 1.86 |
| PVQGVVRVR | 46004 | 13.27 | #N/A | −0.23 |
| PLPGTLRLK | 41473 | 13.24 | #N/A | −0.05 |
| PVPGVIHVY | 2457 | 13.23 | 7.26 | 4.16 |
| GVQGVGKLH | 8980 | 13.18 | 4.86 | 3.86 |
| PLQAVLHVF | 41448 | 13.17 | #N/A | −1.11 |
| GAPATGRVR | 8848 | 12.89 | #N/A | −0.35 |
| GAPASLHVY | 38330 | 12.87 | #N/A | 3.14 |
| GVQAGVHLK | 31460 | 12.80 | 3.18 | −0.51 |
| GLQATAHLE | 8417 | 12.77 | #N/A | 0.73 |
| PSNAAVKVK | 35475 | 12.76 | 3.01 | 0.69 |
| PLNAGLKLF | 9763 | 12.69 | 1.61 | −1.67 |
| GSQGVVKLK | 43744 | 12.68 | #N/A | 2.55 |
| PSPGTLRLK | 41419 | 12.64 | #N/A | #N/A |
| GAPGAARLR | 46237 | 12.60 | #N/A | #N/A |
| GAPGAVHLF | 30029 | 12.60 | 4.50 | 1.81 |
| GINAVLRVY | 46293 | 12.47 | 0.59 | 2.15 |
| PSQGGVHVY | 35644 | 12.46 | 1.43 | −0.68 |
| PTNGVLRLY | 38876 | 12.44 | 1.17 | −0.70 |
| GTPGGGRVF | 27391 | 12.39 | 5.38 | 4.71 |
| PIQAGVHLY | 24062 | 12.33 | 4.86 | 1.59 |
| PSPGAVKVK | 46084 | 12.31 | #N/A | 1.68 |
| PIQGSARVF | 40066 | 12.30 | 5.08 | 3.41 |
| GSPGAIRLH | 37823 | 12.29 | 0.49 | 0.63 |
| GSQATLRVF | 28464 | 12.28 | 3.37 | −1.17 |
| GLQGALRIF | 3524 | 12.24 | #N/A | 1.04 |
| PLPGGLRLY | 46124 | 12.23 | #N/A | #N/A |
| PAPGVLRLY | 41427 | 12.18 | #N/A | 2.72 |
| PSQATVRLY | 46083 | 12.18 | #N/A | 2.07 |
| PSPGAGKVH | 19589 | 12.13 | 8.57 | 2.25 |
| GVQGVLRŁY | 41516 | 12.05 | #N/A | 1.60 |
| PTQAGVRVH | 7090 | 12.05 | 3.68 | 0.10 |
| PAQGAVRVK | 39802 | 11.98 | 2.66 | 3.70 |
| GTQGAGRVK | 26706 | 11.97 | 2.82 | 2.82 |
| PAQAGVKVK | 21019 | 11.94 | 3.93 | 2.89 |
| PSPGSLKLF | 46181 | 11.92 | #N/A | #N/A |
| GAPGVVKLY | 30183 | 11.88 | 2.49 | 0.25 |
| GVPGAGKVR | 45916 | 11.82 | #N/A | 2.88 |
| GINASGHVR | 46248 | 11.80 | 4.30 | 0.93 |
| GLPGAARLR | 46218 | 11.78 | #N/A | −0.53 |
| PSPGTLHLR | 46089 | 11.78 | #N/A | 1.41 |
| GLNAGIKLH | 8390 | 11.75 | 3.22 | 3.64 |
| PTQGVGRVK | 45692 | 11.73 | #N/A | 1.12 |
| PSPGAGHVF | 749 | 11.71 | 3.20 | 0.42 |
| PSPATGRVR | 7686 | 11.70 | #N/A | 1.80 |
| GTNAGGKVF | 26636 | 11.68 | 4.59 | 4.05 |
| GIQGSGHLK | 45223 | 11.67 | 0.95 | 1.09 |
| GVPATIKVF | 9042 | 11.66 | 1.47 | −0.01 |
| PTNGSLRVH | 31643 | 11.64 | 3.51 | 0.94 |
| PSPAAIRLF | 7669 | 11.61 | 5.56 | 2.35 |
| GINGVVKLY | 38890 | 11.54 | 4.80 | 3.80 |
| GANGVIKLK | 44051 | 11.53 | #N/A | 7.86 |
| PSPGTVKLK | 46087 | 11.53 | #N/A | 0.08 |
| PSPAVVKVR | 35840 | 11.50 | 3.49 | 2.13 |
| PVNGAVRVK | 46098 | 11.49 | 2.77 | 0.28 |
| PANGAVKLK | 35863 | 11.48 | 4.59 | 2.56 |
| GSPAGVHVY | 29139 | 11.46 | 2.70 | −2.78 |
| PSPAVVRVR | 45987 | 11.43 | #N/A | −1.70 |
| PSPGALHVR | 19546 | 11.41 | 0.85 | −3.41 |
| PANGTIKVR | 13978 | 11.39 | 1.49 | −0.97 |
| PVQGAIKVR | 36268 | 11.35 | 1.08 | 1.43 |
| GLQGVAKLY | 25326 | 11.33 | 2.31 | −0.63 |
| GTNATIKVR | 46022 | 11.32 | #N/A | #N/A |
| GLQAAIHVY | 25427 | 11.32 | 3.35 | 1.84 |
| PIPAGIRVR | 3352 | 11.30 | 1.65 | −3.28 |
| PINATIKVR | 42509 | 11.30 | #N/A | 4.93 |
| GTQGTIRVH | 37317 | 11.29 | 5.46 | 2.09 |
| GLNAALKLR | 24910 | 11.29 | 5.67 | 1.84 |
| PAPGTLKVY | 1512 | 11.29 | 5.53 | 3.86 |
| PLQGALKLF | 1310 | 11.26 | 2.27 | 1.16 |
| PLPGSLHLY | 8564 | 11.26 | 2.53 | 2.51 |
| GUNGVARLY | 45890 | 11.25 | #N/A | #N/A |
| PANGTLRLK | 39765 | 11.23 | #N/A | 0.28 |
| GSNGAVRVK | 27692 | 11.22 | 1.80 | 0.48 |
| PANAVIKVF | 35959 | 11.22 | 2.46 | −0.73 |
| GSPGTLKLH | 16894 | 11.19 | 1.98 | 1.15 |
| PLPGVLRVK | 27289 | 11.19 | 2.98 | #N/A |
| GINGVIHLH | 32185 | 11.18 | 0.47 | −1.59 |
| PLQGGLKLH | 22779 | 11.18 | 1.28 | −0.12 |
| PAPGAARLR | 36082 | 11.15 | #N/A | #N/A |
| PLNGGARVR | 18583 | 11.14 | #N/A | −0.18 |
| GVPAGARVK | 6014 | 11.11 | 9.00 | 3.41 |
| GVPGGARVK | 9030 | 11.10 | #N/A | #N/A |
| PSQGVGHVF | 46082 | 11.09 | 2.24 | 1.20 |
| PSQASIKVY | 46180 | 11.08 | #N/A | 1.48 |
| PTNGGIRLR | 18174 | 11.07 | 4.44 | 5.23 |
| GVNGSARLH | 8881 | 11.07 | #N/A | 2.07 |
| GTQASAHVY | 26965 | 11.06 | 5.70 | 2.26 |
| GAPATIRVF | 30384 | 11.06 | #N/A | 6.73 |
| PANGAVRVR | 39758 | 11.05 | #N/A | −0.08 |
| GTNASVRLK | 11390 | 11.04 | 4.36 | 1.06 |
| GTQGGIKVR | 4002 | 11.03 | 5.17 | 2.50 |
| GVNAVVHLK | 38489 | 11.03 | #N/A | 1.16 |
| PLNGGAHVK | 9242 | 11.02 | 5.38 | 3.02 |
| PANAVGRVK | 46185 | 11.01 | #N/A | 0.01 |
| PLNGSIRVE | 4074 | 10.99 | 4.32 | 1.19 |
| PSPAAVHLY | 46269 | 10.98 | 2.33 | −0.14 |
| GTPGAGHLK | 4083 | 10.97 | 5.45 | 3.13 |
| GINGAVHVH | 38834 | 10.96 | 5.77 | 2.27 |
| PSQAAIKVY | 35681 | 10.95 | 6.56 | 1.67 |
| GSQGVLHLH | 28308 | 10.93 | 3.97 | 0.54 |
| PTQGSIRLR | 18519 | 10.92 | #N/A | −1.84 |
| GVNAGLHVY | 30959 | 10.92 | 3.46 | −2.95 |
| GLNGTLKLK | 46111 | 10.91 | 1.21 | 0.32 |
| PAQAGIKLH | 7859 | 10.91 | 1.96 | 0.31 |
| GSNASVHVR | 37632 | 10.90 | 2.07 | 1.75 |
| PVPATLHLR | 22935 | 10.90 | 1.72 | −1.37 |
| GSNATLHLR | 4415 | 10.87 | 3.55 | 2.03 |
| GANGAAHVE | 37941 | 10.84 | 5.85 | 3.42 |
| GVNASGHLK | 30887 | 10.73 | 0.77 | −0.57 |
| PSPATARLY | 19893 | 10.72 | 1.13 | 1.89 |
| GAPGTARLR | 46147 | 10.71 | #N/A | 2.08 |
| PANASARLR | 46094 | 10.67 | #N/A | 1.31 |
| PTQAVARLY | 45928 | 10.63 | #N/A | 1.09 |
| GAQATARLF | 5195 | 10.63 | 3.29 | 1.42 |
| PTQAVAHLR | 13274 | 10.62 | 2.83 | −2.74 |
| PINGSGKLH | 10690 | 10.62 | 6.44 | 2.90 |
| PSPGAGHLY | 746 | 10.62 | 4.49 | 0.12 |
| PSPAGIHVY | 7695 | 10.62 | 2.30 | −0.64 |
| PLNGVGRVK | 46255 | 10.61 | #N/A | 0.99 |
| PLPAGLKVR | 46046 | 10.60 | #N/A | #N/A |
| GINAVVHLK | 32450 | 10.58 | 4.14 | 2.50 |
| PLPATLRVF | 41504 | 10.57 | 3.41 | 7.66 |
| GSPGTARLK | 46129 | 10.57 | #N/A | 1.34 |
| GIPGAARVR | 33147 | 10.56 | #N/A | 0.95 |
| PSPGALHLR | 46085 | 10.55 | 1.35 | 1.38 |
| PAQGTLHLY | 35978 | 10.55 | 1.83 | −1.49 |
| PIQGVVKLK | 46207 | 10.55 | #N/A | 1.00 |
| GTQATVKVR | 11496 | 10.54 | #N/A | 1.37 |
| PIPATLRLR | 3315 | 10.51 | #N/A | −1.07 |
| PAQGSIRLK | 41889 | 10.50 | #N/A | 6.73 |
| PLNGSLHVY | 26771 | 10.49 | 2.97 | −0.02 |
| GSNGVVRLY | 46030 | 10.48 | −1.10 | −0.24 |
| PLNGVLHLF | 31625 | 10.47 | 2.04 | −3.53 |
| GSQGVLRVK | 46126 | 10.46 | #N/A | 1.52 |
| GINAGGHLY | 6232 | 10.45 | 3.72 | 1.90 |
| PIQAVVRVR | 4601 | 10.43 | #N/A | #N/A |
| GIPGTVRLK | 41526 | 10.41 | #N/A | 2.16 |
| PVQGVGRLK | 46196 | 10.40 | 3.43 | 0.36 |
| PINGALKVH | 2624 | 10.39 | 4.20 | 1.85 |
| GAPGTAKLF | 30105 | 10.39 | 2.87 | 1.76 |
| PSPAVVRLY | 13912 | 10.38 | #N/A | −1.61 |
| PSPAAVRVY | 35809 | 10.38 | 5.57 | 2.02 |
| PLNGAVKLK | 8179 | 10.38 | 1.90 | 0.29 |
| PINAVARVF | 2871 | 10.38 | 4.58 | 2.10 |
| GAPATIKVR | 46048 | 10.36 | #N/A | 0.95 |
| PAPAVVKVY | 10174 | 10.36 | 5.54 | −0.12 |
| GIPGTLRLK | 6458 | 10.35 | 9.51 | 8.25 |
| PLNAAVHVF | 7119 | 10.35 | 2.42 | 2.21 |
| GAPGSLRVY | 30146 | 10.35 | 4.01 | 1.17 |
| PINAGLHVK | 23518 | 10.34 | 3.13 | −1.78 |
| GANGVLRVK | 46138 | 10.33 | #N/A | −1.86 |
| GVQAGGHVH | 46152 | 10.33 | 3.82 | 1.61 |
| GAQGTLRLR | 5074 | 10.33 | #N/A | #N/A |
| PVNGTVRVK | 42099 | 10.33 | #N/A | 2.85 |
| PLQGGLKLF | 22789 | 10.32 | 2.54 | 0.13 |
| GANGAVHVR | 43987 | 10.30 | 2.51 | 3.54 |
| GAPAGIRLF | 8855 | 10.30 | 4.42 | 2.85 |
| PSPGAGHVY | 19581 | 10.29 | 5.81 | 1.97 |
| GVNGTLHLF | 38384 | 10.25 | #N/A | −0.77 |
| PANAGLKLH | 1192 | 10.24 | 3.79 | 1.27 |
| GTNAVLHVF | 41477 | 10.24 | #N/A | −1.14 |
| GAPAGGKLY | 30577 | 10.23 | 4.56 | 4.39 |
| GTQATVHLF | 46225 | 10.23 | 1.71 | −0.31 |
| PTPATLKVY | 13488 | 10.22 | #N/A | 6.32 |
| GSPATARLK | 40701 | 10.21 | #N/A | 1.93 |
| PANGTAKVR | 45994 | 10.21 | #N/A | 0.38 |
| PAPATVKLK | 10132 | 10.21 | #N/A | 2.58 |
| PTQGVLRLY | 34452 | 10.20 | #N/A | 0.88 |
| GIPASIKVH | 6608 | 10.20 | 5.98 | 8.96 |
| PAQGVGRLR | 36012 | 10.18 | #N/A | 2.71 |
| GINGAVKLK | 38835 | 10.18 | 6.14 | −1.06 |
| PTQGAARLR | 45660 | 10.18 | 2.89 | 2.54 |
| GSQASARVK | 16836 | 10.17 | #N/A | −0.41 |
| PSQAGARVE | 19501 | 10.17 | 5.93 | 3.80 |
| GSNAVAHVY | 4478 | 10.17 | 0.09 | 4.07 |
| PTNGAVKLK | 8874 | 10.17 | 6.07 | 1.97 |
| GINGALKLH | 31991 | 10.17 | 2.91 | 1.47 |
| GSPGTAKVK | 11892 | 10.16 | 3.27 | −1.17 |
| PAPATVKVK | 10134 | 10.15 | −1.46 | −0.24 |
| GIPGAGRLR | 46251 | 10.15 | #N/A | 0.84 |
| PSPATIRVF | 19906 | 10.15 | 5.27 | 1.21 |
| PTNAVVRVR | 46073 | 10.15 | #N/A | #N/A |
| GVQATVKLF | 5778 | 10.13 | 6.78 | 4.80 |
| GSQAGVRLY | 28568 | 10.12 | 5.11 | 6.51 |
| PIQAGIRLY | 46012 | 10.12 | #N/A | 4.25 |
| GVQGTVHVF | 31051 | 10.12 | 5.17 | 2.91 |
| PVQAGVRLY | 2362 | 10.09 | 5.62 | 3.78 |
| GTPASIRVK | 46283 | 10.09 | #N/A | 1.42 |
| GANAGLHVH | 5030 | 10.09 | #N/A | 0.85 |
| GANAGGHVR | 5045 | 10.08 | 2.52 | 1.07 |
| GANGGIHLF | 29341 | 10.07 | 1.99 | −1.16 |
| GVNGVVHLF | 30675 | 10.06 | 1.15 | −3.85 |
| GTNGGIKVR | 40382 | 10.06 | #N/A | 3.06 |
| GTNGTARVR | 43117 | 10.05 | 2.15 | 2.22 |
| GSPAAVHVH | 4788 | 10.05 | 4.26 | 8.95 |
| GANGGLHLY | 46139 | 10.05 | #N/A | −2.16 |
| GAQGAVKVY | 29573 | 10.04 | 3.18 | 0.72 |
| PTNGVAKVK | 32355 | 10.03 | #N/A | #N/A |
| GLPAVGRVF | 26089 | 10.02 | 3.19 | 3.84 |
| PVPGSIRVK | 46275 | 10.01 | #N/A | 1.64 |
| GSNGSGKVY | 27847 | 10.00 | 3.70 | 3.37 |
| PSNAGIRLE | 7637 | 10.00 | 2.20 | 0.07 |
| PTQGSGHLK | 34434 | 9.99 | 3.75 | 1.15 |
| PTNATIKVR | 41298 | 9.99 | 4.41 | −0.08 |
| PIPGVLKLY | 11022 | 9.97 | 2.39 | 1.94 |
| PLQGGIRVY | 22979 | 9.97 | 4.82 | 6.69 |
| PTQGSAKLH | 9225 | 9.97 | 4.47 | 1.77 |
| GVQGGAHVK | 8987 | 9.97 | 5.75 | 4.65 |
| PSQATGKVR | 41417 | 9.96 | #N/A | 0.92 |
| PTQGGLRLH | 34495 | 9.95 | 2.65 | 0.94 |
| PSNGGLHVR | 9419 | 9.94 | 2.75 | −1.58 |
| PSQATIHLK | 19389 | 9.93 | 6.76 | 3.52 |
| PANGGGKVR | 39781 | 9.93 | #N/A | 1.00 |
| PVPGAVKLK | 8090 | 9.89 | 3.43 | 1.04 |
| GAPAVIHLK | 17492 | 9.89 | 3.25 | 1.21 |
| PAPGVIRVF | 36104 | 9.89 | 2.86 | 1.20 |
| GTPAALHLK | 27407 | 9.89 | 2.27 | #N/A |
| PVNGGLHLK | 7984 | 9.88 | 5.09 | 1.45 |
| PTPATLRVR | 7338 | 9.88 | #N/A | 2.72 |
| PAQAGLHVH | 1447 | 9.87 | 2.62 | 2.48 |
| PINGSIHLR | 2718 | 9.86 | 3.43 | −0.82 |
| GSNAGGKVF | 16664 | 9.86 | 4.60 | 5.12 |
| GVNGSVKVR | 30646 | 9.86 | 3.56 | 1.46 |
| GSQAGIRLY | 11862 | 9.86 | −0.21 | −0.58 |
| GSNGGGHVF | 16553 | 9.85 | 1.00 | 1.36 |
| GINASVHLK | 18001 | 9.85 | 3.23 | 2.89 |
| PLNGATRVY | 41241 | 9.84 | 2.92 | 5.24 |
| PLPGTAHLF | 16045 | 9.84 | 4.35 | 0.36 |
| GAQAGIRLR | 30005 | 9.84 | #N/A | #N/A |
| GTNAALRIK | 43164 | 9.82 | #N/A | 1.50 |
| GVPATLRLR | 5965 | 9.82 | #N/A | −1.20 |
| GAPGGGHVF | 17439 | 9.80 | 3.33 | 0.71 |
| GSPAVVHLH | 8768 | 9.80 | #N/A | 1.62 |
| GIQGSAKLY | 41156 | 9.79 | 5.10 | 3.23 |
| PVPASIRLK | 23011 | 9.78 | #N/A | 0.85 |
| PLQGALKLY | 45874 | 9.78 | 4.65 | 2.89 |
| PLQGTLRLY | 21189 | 9.77 | 4.72 | 9.00 |
| GVQGTLHLK | 38538 | 9.77 | 3.19 | −1.22 |
| PAPASIRVY | 1700 | 9.76 | 4.32 | 1.78 |
| GIQGGLKVF | 18114 | 9.75 | 4.23 | 3.32 |
| PANAVAKVH | 20443 | 9.75 | 4.38 | 3.20 |
| GVQGAIHVY | 40975 | 9.74 | −0.14 | 1.21 |
| PINGTGRVH | 10674 | 9.73 | 4.12 | 2.27 |
| GLNAVIRVF | 46215 | 9.73 | #N/A | −2.86 |
| PINGAVRLY | 5380 | 9.72 | 3.97 | −0.56 |
| PSPAVVRLR | 45986 | 9.71 | #N/A | 1.22 |
| PSQGTLHLH | 39672 | 9.70 | #N/A | −1.27 |
| PVPGAVRVK | 46102 | 9.70 | #N/A | −0.12 |
| PVQATLRVY | 39947 | 9.70 | 3.59 | 2.01 |
| PVNAALRLF | 36215 | 9.69 | 1.16 | −0.11 |
| GLQATAHVF | 46115 | 9.69 | #N/A | 4.68 |
| PVNATGRVR | 8024 | 9.69 | 3.26 | −0.28 |
| GVPAVIRVF | 46245 | 9.68 | #N/A | −1.30 |
| PSQGGVRVF | 39701 | 9.68 | 4.78 | 4.61 |
| GTQGVLRVK | 43308 | 9.68 | #N/A | 2.27 |
| GSPATAKLK | 40702 | 9.67 | #N/A | 0.84 |
| PLNATIKVR | 45977 | 9.66 | #N/A | #N/A |
| GTNAVLKVY | 26520 | 9.65 | 1.16 | 0.02 |
| PLNGVVHLY | 5363 | 9.64 | 7.85 | 2.11 |
| PSQGTVHLF | 46174 | 9.64 | #N/A | #N/A |
| PSNGSLKVH | 46076 | 9.64 | 5.00 | 1.97 |
| PTNGVIHLH | 32369 | 9.64 | 0.92 | 0.18 |
| PLQGVLKVY | 22233 | 9.63 | 4.84 | 2.60 |
| GIPGAARLR | 6434 | 9.63 | #N/A | 2.49 |
| PVNGVIHVF | 21733 | 9.63 | 3.82 | 0.26 |
| PIQGGGHLR | 23825 | 9.62 | 5.53 | 3.74 |
| GIQASVHLF | 18184 | 9.62 | 4.61 | 2.18 |
| GANGAVRVK | 46136 | 9.61 | #N/A | 1.00 |
| PVNAALHLK | 39898 | 9.61 | 7.06 | 0.39 |
| PVQGSARVK | 46195 | 9.60 | #N/A | −1.25 |
| PINASGKLR | 46107 | 9.59 | #N/A | 0.86 |
| PSPASARVF | 19946 | 9.58 | 2.98 | 0.55 |
| GTNAAGHLK | 3832 | 9.58 | 7.47 | 4.05 |
| PLPAVVRVR | 44226 | 9.58 | #N/A | 1.34 |
| PANAVIHLY | 1157 | 9.57 | 3.78 | 1.63 |
| PSNAGVKVK | 19081 | 9.56 | 3.50 | 2.29 |
| GLQAAGRVY | 25448 | 9.56 | 2.17 | 2.86 |
| PLNASIRLK | 46264 | 9.55 | 0.18 | 0.79 |
| GLQGSARVH | 41458 | 9.55 | #N/A | 1.65 |
| GSQGVGRVK | 43759 | 9.55 | #N/A | 4.19 |
| PTQGTIKLR | 45927 | 9.55 | 1.54 | 1.14 |
| PSNGVLHLY | 45933 | 9.54 | #N/A | −0.21 |
| GANATVRLF | 44099 | 9.54 | #N/A | 0.97 |
| PLNASLRLF | 9543 | 9.54 | #N/A | −0.55 |
| PTPATLKLR | 7340 | 9.54 | #N/A | 2.55 |
| GVNAGGHLK | 5649 | 9.53 | 4.23 | 3.73 |
| GSNAAIRLH | 27997 | 9.53 | 2.68 | 2.22 |
| GUNGTARLK | 46112 | 9.52 | #N/A | 0.76 |
| PLNGAGRVF | 946 | 9.51 | 3.30 | 4.00 |
| GIPAGVKVR | 46166 | 9.51 | #N/A | #N/A |
| PTQGVVRLK | 41316 | 9.51 | #N/A | 0.56 |
| PLNASIRLE | 46265 | 9.51 | 0.26 | −1.56 |
| PTQGTVRLR | 34374 | 9.51 | 3.19 | 1.43 |
| GVQATIHVE | 38625 | 9.50 | 5.48 | 2.53 |
| PVPASIRVK | 42410 | 9.49 | #N/A | 1.91 |
| GTNGVAHLR | 8479 | 9.49 | 4.57 | 2.84 |
| PTNGAAKVK | 17646 | 9.49 | 3.34 | 1.34 |
| GIPAAIKVR | 6555 | 9.49 | 2.06 | 0.62 |
| GIPGTLRVK | 33208 | 9.49 | #N/A | −0.06 |
| PINGAVRVY | 23157 | 9.49 | 1.82 | 0.01 |
| PLNAVIHVF | 9663 | 9.48 | 6.00 | −0.41 |
| GTPAAIRVF | 37516 | 9.48 | 2.06 | 0.54 |
| GVPGVIHLF | 38754 | 9.48 | 2.42 | 0.67 |
| GVQGAGHVK | 8965 | 9.47 | 4.83 | 3.09 |
| GVNGVGKVY | 5487 | 9.47 | 1.75 | 1.12 |
| PAQATIHVF | 14208 | 9.47 | 3.78 | 3.59 |
| GIPGAAKLR | 33151 | 9.46 | 1.86 | 0.24 |
| PTQGALKLH | 34335 | 9.46 | 1.83 | −1.12 |
| GANGVLRVF | 40752 | 9.45 | 1.42 | 4.37 |
| PANASIRLR | 45872 | 9.45 | #N/A | −0.76 |
| GSQATLHVR | 40632 | 9.45 | 4.40 | 3.43 |
| GLNAVVRLH | 46214 | 9.45 | 2.31 | −2.24 |
| PANGTGKVR | 41424 | 9.44 | #N/A | 1.30 |
| GAQAGAHLF | 44410 | 9.44 | #N/A | 3.38 |
| PLNAALKVY | 34931 | 9.43 | 0.09 | −1.54 |
| PLPGTLRVF | 46223 | 9.43 | #N/A | #N/A |
| PAPGTLKLY | 1509 | 9.43 | 2.80 | 8.95 |
| PLNGTVRLK | 7846 | 9.43 | −0.47 | 2.33 |
| GLQAGAHLF | 8421 | 9.41 | #N/A | −0.08 |
| GINATLHLY | 32374 | 9.40 | 1.91 | −2.66 |
| GIPAAIHVK | 6551 | 9.40 | 1.17 | −1.17 |
| PIQATLHLH | 40079 | 9.40 | 1.59 | 0.04 |
| PVNGGVHLK | 1927 | 9.39 | 2.22 | 0.03 |
| GSPGVVHLH | 28791 | 9.39 | 4.29 | #N/A |
| PINGGIKLH | 15021 | 9.39 | 2.04 | 0.55 |
| GAPGAARLK | 46145 | 9.38 | #N/A | 3.26 |
| PLQASGHVF | 15461 | 9.37 | 3.87 | −1.67 |
| GSNGALRVY | 27712 | 9.37 | 4.36 | 0.83 |
| GVPAAVRLR | 5931 | 9.36 | #N/A | 1.80 |
| PINAVIRVF | 46205 | 9.35 | #N/A | −0.05 |
| PAPGSVRLY | 10078 | 9.34 | 3.42 | 0.98 |
| PVPGTGKVR | 42349 | 9.32 | #N/A | 1.85 |
| PTPATIRVY | 7353 | 9.32 | 7.16 | 2.54 |
| GSNAAVKVK | 27974 | 9.32 | 2.03 | 0.28 |
| GVNGSGHVK | 38413 | 9.31 | 2.06 | 5.75 |
| PLQGAARLF | 20775 | 9.31 | 4.98 | 2.84 |
| GTQASIRLK | 45959 | 9.31 | #N/A | 0.32 |
| PSQGGAHVH | 46262 | 9.30 | 3.40 | 3.33 |
| PLNGSGKVR | 41512 | 9.30 | #N/A | −0.14 |
| GANGVIRLH | 11997 | 9.29 | 1.34 | 1.47 |
| GTQAVVKVH | 27011 | 9.29 | 3.70 | 1.46 |
| PAQAGIKLF | 7860 | 9.29 | 3.75 | 1.72 |
| GSPGVLRLK | 28811 | 9.29 | 1.93 | −3.12 |
| GTQGAVHLF | 26640 | 9.29 | 2.98 | 1.42 |
| PLQGVGRVK | 42337 | 9.28 | #N/A | 3.25 |
| PTQGVVHVY | 6979 | 9.28 | 3.93 | 2.59 |
| PLNASIRVK | 45980 | 9.27 | #N/A | −2.00 |
| GSNAVIRLY | 46032 | 9.25 | #N/A | 2.36 |
| GVQAVIRLF | 38662 | 9.24 | #N/A | 3.80 |
| PLNATGKLK | 45979 | 9.24 | #N/A | 3.15 |
| PLPGGVKVF | 4304 | 9.23 | 2.25 | 3.19 |
| PLNGTVHLY | 1232 | 9.23 | 4.70 | 3.08 |
| GSPGGGHVH | 40692 | 9.22 | 5.12 | 3.12 |
| GVPAAGKLR | 38783 | 9.22 | 4.60 | 1.96 |
| PTNASARLR | 46172 | 9.22 | #N/A | #N/A |
| PVQGVVRVK | 46101 | 9.22 | #N/A | 1.14 |
| PTQGVGKLK | 13146 | 9.21 | #N/A | 1.44 |
| PLQGSGRLH | 10321 | 9.21 | 3.57 | 4.59 |
| PSQAAVHVY | 46263 | 9.20 | 4.38 | 2.28 |
| GSNGTIKVY | 16504 | 9.19 | 3.36 | 2.19 |
| PTQATVRVR | 13215 | 9.19 | #N/A | 3.94 |
| GSPGGIKVR | 4783 | 9.19 | 3.54 | 2.26 |
| GSNGSIHLE | 43556 | 9.19 | #N/A | 0.20 |
| GANGAVHLH | 37930 | 9.18 | 2.90 | −2.38 |
| PLPAGVRLY | 30064 | 9.18 | 4.37 | 1.18 |
| PANGVLRLY | 41425 | 9.18 | 2.20 | −0.28 |
| PINASLHLR | 46105 | 9.18 | 0.87 | −1.91 |
| GVNGAVRVK | 40908 | 9.17 | #N/A | −2.34 |
| PVNGSGKVH | 1872 | 9.17 | 1.49 | 0.22 |
| GTPGGGHLR | 27378 | 9.16 | 3.07 | 1.02 |
| PSNGSGHLR | 18883 | 9.15 | 3.80 | 3.11 |
| GAQGTLRVE | 46142 | 9.15 | 1.07 | 1.20 |
| GAPGAIKLK | 45966 | 9.14 | #N/A | #N/A |
| PANGTVRVK | 41734 | 9.14 | #N/A | 2.39 |
| GTPATAHVY | 16420 | 9.14 | 5.97 | 1.72 |
| GIQGALHLF | 38994 | 9.14 | 1.24 | −2.17 |
| GLQGSGKLY | 25298 | 9.14 | #N/A | 5.37 |
| PVPAALRVF | 2516 | 9.13 | 3.58 | 1.43 |
| GVPGAGKLF | 5832 | 9.13 | 4.94 | 3.88 |
| GTQGAVRLH | 26646 | 9.13 | 4.59 | 2.21 |
| GVNAVLRLY | 40958 | 9.12 | 1.78 | #N/A |
| GSQATGRLH | 4652 | 9.12 | 3.69 | 4.53 |
| GLNGVAHVK | 3434 | 9.11 | 1.57 | 3.39 |
| PANGVGRVK | 20249 | 9.11 | #N/A | −1.48 |
| PLPAAVHLR | 28186 | 9.11 | 3.59 | −0.11 |
| PLQATIKLH | 10900 | 9.10 | 2.26 | 1.54 |
| PVQAGLKLY | 2369 | 9.10 | 6.11 | 1.07 |
| GVQGAGHLH | 5676 | 9.10 | 2.28 | 1.68 |
| PSPAALRVF | 804 | 9.09 | #N/A | 0.70 |
| GTQGAVHVR | 26641 | 9.09 | 3.28 | 1.58 |
| PAPASIRLF | 1699 | 9.08 | 3.24 | 0.98 |
| GIQAVAKVF | 9120 | 9.08 | 3.99 | 0.70 |
| PLNATIRVK | 46259 | 9.08 | #N/A | −0.45 |
| PSPGALRVF | 738 | 9.07 | 5.12 | 0.74 |
| PAPAGAHVK | 1728 | 9.06 | 7.13 | 0.07 |
| GVQAVARVE | 38656 | 9.06 | #N/A | 3.73 |
| PSPGAAHLR | 19555 | 9.06 | 5.86 | 3.74 |
| PTPGAGKLY | 13390 | 9.05 | 2.85 | 2.76 |
| PIPAGIKVR | 3356 | 9.05 | 1.46 | −1.16 |
| PVQGVGKVK | 42258 | 9.05 | #N/A | 0.24 |
| GIPAVLKLH | 6622 | 9.05 | 0.79 | #N/A |
| GLNATLKLK | 46017 | 9.05 | #N/A | −0.65 |
| GSPGVVRVK | 28799 | 9.04 | 2.00 | −1.37 |
| PLNGVTRLY | 46068 | 9.04 | #N/A | −0.59 |
| PTQAGLHVH | 7091 | 9.04 | 2.29 | 0.53 |
| PTNGVGHLR | 32454 | 9.03 | 5.43 | 1.64 |
| PVNAGVRVH | 10324 | 9.03 | 5.77 | 5.29 |
| PSNASLHVH | 35538 | 9.03 | 3.97 | −0.83 |
| GVNGTARLK | 46151 | 9.03 | #N/A | 1.67 |
| GTPGAAKLY | 27122 | 9.02 | 2.89 | 0.88 |
| GINATIHLF | 38947 | 9.01 | 0.90 | −4.84 |
| PINAGARVR | 23526 | 9.01 | 3.59 | 0.74 |
| GANGGAKVH | 38039 | 9.00 | 5.88 | 3.67 |
| PLNATGRLR | 19049 | 9.00 | #N/A | 0.97 |
| PLPGGIKVY | 28088 | 9.00 | 3.69 | 0.45 |
| GANGTIHLF | 37960 | 8.99 | 4.60 | 2.83 |
| GTPAGGRLY | 27676 | 8.99 | 5.25 | 4.93 |
| PVNAGVHVH | 2097 | 8.98 | #N/A | 2.35 |
| GVNAAVHLY | 44633 | 8.98 | 2.13 | 0.02 |
| GSPGSLKVY | 11900 | 8.98 | 4.72 | 3.49 |
| PVNGVGHVK | 1917 | 8.98 | 4.76 | 8.37 |
| PVQASAKVK | 39957 | 8.97 | #N/A | −1.33 |
| PSNGGAKLY | 9428 | 8.97 | 6.48 | 2.95 |
| PLPGVVHLH | 4064 | 8.97 | 1.33 | −4.92 |
| PLPGGVRLY | 11661 | 8.97 | 1.82 | 0.81 |
| GAPGTAKLY | 30104 | 8.97 | 2.07 | 1.40 |
| PIQATIHLF | 10888 | 8.96 | 3.45 | 1.69 |
| GTNATLKLK | 45899 | 8.96 | 3.11 | 0.79 |
| GIQASVRLR | 12702 | 8.96 | #N/A | −0.48 |
| PSQGGVHVR | 19260 | 8.96 | 3.38 | 2.20 |
| PLNGGARVH | 13178 | 8.96 | 3.44 | 2.28 |
| GVQGALKVF | 5667 | 8.95 | 2.93 | 3.86 |
| PTNGGVKLY | 6285 | 8.95 | 5.73 | 3.38 |
| GAQGGAKVF | 5158 | 8.95 | 4.17 | 3.64 |
| GTPGAVKLK | 40440 | 8.95 | 2.71 | −0.16 |
| GIPATARVY | 6571 | 8.95 | 1.82 | 0.23 |
| PTQGVGRLR | 13142 | 8.95 | #N/A | −1.11 |
| GANATVHVK | 12015 | 8.94 | 1.78 | 2.10 |
| GTNGTLHLY | 3732 | 8.94 | 4.04 | 3.46 |
| PTPATLKVH | 7341 | 8.93 | #N/A | 5.38 |
| GTPGTARLK | 43429 | 8.93 | #N/A | 6.55 |
| GTNASIRVK | 43216 | 8.93 | #N/A | 3.47 |
| PVQASIRLK | 22443 | 8.93 | #N/A | 4.14 |
| PSQASGRVH | 19456 | 8.92 | 3.32 | 1.52 |
| GAPGAVRVF | 40841 | 8.92 | #N/A | 2.49 |
| PIQAGVRLY | 24069 | 8.92 | 3.02 | 3.74 |
| GTNAGAHLK | 26575 | 8.91 | 2.52 | 1.10 |
| PVQGTAHLH | 2157 | 8.91 | 5.10 | 1.31 |
| GANASIHVY | 4983 | 8.91 | 2.80 | 0.30 |
| PVNAAGRVR | 8007 | 8.91 | 2.09 | 1.69 |
| PTPGGVHLR | 9291 | 8.91 | 4.29 | 0.74 |
| GANAGAKLE | 5038 | 8.90 | 2.92 | 2.12 |
| PIPGSVRVY | 10994 | 8.90 | 1.87 | 1.88 |
| GVQAVIHVH | 31437 | 8.89 | 7.62 | 1.18 |
| PVNASIRVK | 42166 | 8.88 | #N/A | 2.66 |
| GSNGAVRVH | 8639 | 8.88 | 1.06 | −1.49 |
| GTPGALHLH | 404 | 8.88 | 2.33 | 2.54 |
| PVNAAVRVK | 21797 | 8.88 | #N/A | 2.60 |
| PLNASLKLF | 9549 | 8.88 | 5.58 | −2.03 |
| PAPATIKLF | 42049 | 8.88 | 0.68 | 1.47 |
| PLNGSVHLY | 3603 | 8.87 | 3.89 | −0.60 |
| PINGSARVK | 46204 | 8.87 | #N/A | 0.23 |
| PSPAGIRLF | 851 | 8.86 | 2.63 | 8.76 |
| GANAALKLK | 38068 | 8.86 | 1.84 | −0.01 |
| PINGSLRLF | 46009 | 8.85 | #N/A | 2.39 |
| GAQAGARVY | 29997 | 8.85 | 3.00 | 2.75 |
| GTPGAVKVK | 40441 | 8.85 | −0.50 | 0.87 |
| PAPGVARLR | 46190 | 8.84 | 4.71 | 2.39 |
| GAPGTARLY | 30099 | 8.83 | 0.74 | −0.77 |
| GINAGVHLR | 32515 | 8.83 | #N/A | 1.38 |
| PLNGVIKLK | 41303 | 8.83 | #N/A | −1.66 |
| PTQATIKVR | 45716 | 8.83 | #N/A | 2.43 |
| PTPGGLHLH | 13456 | 8.82 | 5.64 | −0.98 |
| PSPGAGHLR | 19580 | 8.82 | 5.59 | −0.62 |
| GVQGVLRVY | 41517 | 8.81 | #N/A | 4.11 |
| GSQATLHLF | 37750 | 8.81 | 1.79 | 0.21 |
| PLNGSLKLF | 11593 | 8.80 | 3.09 | −0.44 |
| PIPAGVHVY | 3342 | 8.80 | 5.13 | #N/A |
| GLNAALHLK | 24907 | 8.80 | 4.84 | #N/A |
| GANATIHLF | 46038 | 8.80 | #N/A | 0.10 |
| GLNAAGKVR | 41453 | 8.79 | #N/A | 2.26 |
| PANGGAHVH | 999 | 8.79 | 4.07 | 2.54 |
| GVQGGARLH | 8988 | 8.79 | #N/A | 0.44 |
| GLNGAVHVR | 42758 | 8.79 | #N/A | 3.87 |
| GVPAVAKLK | 46160 | 8.79 | #N/A | 1.76 |
| GVPATVRLY | 5963 | 8.79 | 1.44 | 0.47 |
| GVQGTAHLY | 5697 | 8.78 | 4.66 | 2.34 |
| GTPATLRLK | 41489 | 8.78 | 1.44 | −0.86 |
| GAPGAVKVR | 45913 | 8.78 | #N/A | −1.22 |
| PSNGVLRVH | 46258 | 8.78 | 2.22 | 1.03 |
| GANGAIRLK | 4865 | 8.78 | #N/A | 3.96 |
| PIQGVGKVR | 2989 | 8.78 | #N/A | 0.64 |
| PSPGAAHVY | 19558 | 8.78 | 6.02 | 3.08 |
| GIPAGGHVH | 12873 | 8.77 | 1.69 | 2.90 |
| GINAVVHLH | 32449 | 8.77 | 4.09 | 0.70 |
| PLQATLHLH | 15189 | 8.77 | 2.26 | −2.25 |
| GVPGTGKVK | 41045 | 8.76 | #N/A | 1.47 |
| GANGTIKVR | 46037 | 8.76 | 2.57 | #N/A |
| GTPGVGHLH | 11557 | 8.76 | 2.92 | 2.54 |
| PAQGGVHLH | 1316 | 8.76 | 6.55 | 2.59 |
| PVNAGLKVK | 10328 | 8.76 | #N/A | −0.68 |
| GSNAVLHLY | 46031 | 8.75 | #N/A | −0.14 |
| PLQGALHLK | 20632 | 8.75 | 2.68 | −0.92 |
| GSQGVIKVH | 4591 | 8.75 | 2.20 | 6.86 |
| PLPAVLKLH | 5134 | 8.75 | 2.39 | −0.34 |
| PSPAVAHVR | 13915 | 8.75 | 2.21 | 6.14 |
| PVQAGVHLH | 46005 | 8.75 | #N/A | #N/A |
| PTQAGAHVY | 13336 | 8.75 | 3.15 | 1.83 |
| PTNAVIRLH | 34224 | 8.74 | #N/A | 1.02 |
| PAQGVGKLK | 41908 | 8.74 | #N/A | 2.14 |
| PAQGSARVK | 46187 | 8.74 | #N/A | 2.73 |
| GLNGTVHVK | 3382 | 8.74 | 1.46 | −0.16 |
| PTNGVIHVY | 6164 | 8.74 | 3.88 | 3.49 |
| GTQASIKVR | 46027 | 8.74 | #N/A | 0.41 |
| GANGTVKVK | 40727 | 8.73 | 2.68 | 2.41 |
| GAQGALHVK | 29580 | 8.73 | 5.68 | 2.73 |
| GLQGTGRVH | 15687 | 8.73 | 2.50 | 1.71 |
| PTQAGGRVY | 13367 | 8.73 | #N/A | 5.48 |
| GVNAVLRVF | 30910 | 8.72 | 6.41 | 2.34 |
| GIPGSLHLY | 33269 | 8.72 | 0.19 | −2.23 |
| GANGVVRLF | 29301 | 8.72 | 1.38 | 0.22 |
| GLNAAVKLK | 36902 | 8.72 | #N/A | 0.06 |
| PLQGSAHVK | 10261 | 8.72 | 3.94 | 0.72 |
| GIQASARVK | 46250 | 8.71 | #N/A | −0.27 |
| GSNATGKVR | 41499 | 8.71 | #N/A | 0.67 |
| GVQAGARVY | 38675 | 8.71 | 1.17 | 2.14 |
| GTPAAVHLK | 11574 | 8.71 | 3.86 | 1.42 |
| GTNAVGKLF | 26548 | 8.71 | 4.28 | 4.33 |
| PLQGVGRLF | 22520 | 8.70 | 4.80 | 3.28 |
| PAPGTGKVR | 21160 | 8.69 | #N/A | 0.15 |
| PLQGASKVH | 12903 | 8.69 | #N/A | 11.52 |
| PSQATVKVY | 19364 | 8.69 | 3.50 | 3.27 |
| PSQATAHLY | 19374 | 8.68 | 4.34 | 1.45 |
| PTPATVRLR | 7329 | 8.68 | #N/A | 1.54 |
| PVQGVGRVK | 2226 | 8.68 | 2.06 | 1.33 |
| PTNATIKVK | 41299 | 8.68 | #N/A | 1.10 |
| GIQATVRLY | 32907 | 8.67 | 1.81 | 1.34 |
| GAQGVIRLF | 5143 | 8.66 | 14.24 | 1.58 |
| GLPGVVHVF | 41470 | 8.66 | 0.49 | 0.59 |
| PTQGVIKER | 45690 | 8.66 | #N/A | 3.03 |
| GVQGGVHLY | 31196 | 8.65 | 0.55 | −0.74 |
| PSNGGIHVR | 9435 | 8.65 | 3.01 | 3.77 |
| PVNGAVKLK | 36170 | 8.64 | 4.79 | 3.71 |
| GANAGAHLY | 29536 | 8.64 | 5.15 | 3.38 |
| PVQAGVKLR | 36391 | 8.64 | #N/A | 1.85 |
| GSPAGVRLY | 29142 | 8.64 | 6.32 | 3.40 |
| PVNAAVKVK | 21801 | 8.63 | 3.14 | 0.29 |
| GANGSIRLF | 4900 | 8.62 | 1.81 | 0.38 |
| GIQGSGKLK | 46163 | 8.62 | #N/A | 0.74 |
| GTQAVAHLH | 16309 | 8.62 | 4.38 | 0.25 |
| PSPGGLKVF | 13860 | 8.62 | 2.58 | −0.59 |
| GSPATVRLY | 29000 | 8.61 | 1.88 | 0.78 |
| GIPGGARLR | 33438 | 8.61 | 2.64 | −1.87 |
| PSPAAGRVR | 7677 | 8.61 | #N/A | 1.53 |
| GANGVVHVK | 37989 | 8.60 | 3.44 | 1.65 |
| PSQATVHLF | 46179 | 8.60 | 0.81 | #N/A |
| GTPGGLHVF | 37492 | 8.59 | 3.90 | 1.02 |
| GANGSVRLF | 37963 | 8.59 | 2.59 | 1.74 |
| PVQASGHLY | 2331 | 8.59 | 0.23 | 4.97 |
| GSQGVAKVR | 4582 | 8.59 | #N/A | 0.27 |
| PLPAALHLY | 37682 | 8.59 | #N/A | 1.14 |
| PLNGSAHLY | 4253 | 8.58 | 1.99 | −2.81 |
| PSPAVIHLR | 45991 | 8.58 | 4.02 | −0.05 |
| PSPGSLHVR | 35782 | 8.57 | 1.80 | 0.33 |
| GTNGTARVK | 46117 | 8.57 | #N/A | 1.48 |
| GTPGVARLF | 27304 | 8.57 | 1.52 | 1.94 |
| PSNGGIHVH | 7554 | 8.56 | 2.30 | −0.07 |
| PIQGGIRLK | 41438 | 8.56 | 1.72 | −0.67 |
| GTPAVVRVR | 46029 | 8.56 | #N/A | 0.37 |
| GLNATLHLR | 3470 | 8.56 | 1.27 | −0.40 |
| PLPGAIRVH | 25998 | 8.55 | 2.40 | −1.42 |
| PANGGIKLK | 45938 | 8.55 | 1.81 | −0.02 |
| PLNAVVKLF | 9616 | 8.55 | 1.43 | 7.11 |
| PTQAAVHVY | 7020 | 8.54 | 5.97 | −0.11 |
| PVNASIRVH | 36237 | 8.54 | 0.45 | 0.21 |
| PSPGVGHVH | 13855 | 8.54 | 2.40 | −0.04 |
| GLNAVIKVF | 11180 | 8.54 | 1.56 | 0.90 |
| GAQGVGHVH | 5150 | 8.53 | 0.77 | −1.08 |
| PAPGTVKVK | 36088 | 8.53 | 2.37 | 0.54 |
| GAPATGRLF | 30394 | 8.53 | 3.93 | 3.20 |
| GAQGTARLF | 5082 | 8.53 | 2.61 | 1.72 |
| GTPAVVRVF | 27595 | 8.52 | 1.05 | 0.83 |
| PLQGVVKLK | 42223 | 8.51 | #N/A | 5.90 |
| GLNGALKLH | 15495 | 8.51 | 4.51 | 1.96 |
| PAQATLHLY | 9975 | 8.51 | 1.15 | −4.51 |
| PSPAVVHVY | 19983 | 8.51 | #N/A | −0.03 |
| GIQAVVHLR | 9112 | 8.51 | 2.40 | 5.13 |
| PSQGGVKVF | 697 | 8.50 | 2.93 | 4.27 |
| PTNGVSKLK | 46171 | 8.50 | #N/A | −1.37 |
| GIPAGGKLK | 46168 | 8.50 | #N/A | −0.77 |
| PIQGTLHLF | 46206 | 8.49 | 1.30 | −1.34 |
| GVNGSIHVH | 5440 | 8.49 | 6.59 | 1.23 |
| GLQAVVHVF | 8419 | 8.49 | #N/A | 0.44 |
| PLNGVTHVR | 33837 | 8.49 | 1.94 | −0.38 |
| GSQAVAKVF | 40650 | 8.49 | 1.33 | −0.30 |
| GVNAAVKVK | 30736 | 8.48 | 3.45 | 0.20 |
| GVQAVIKLH | 44853 | 8.48 | 2.18 | 2.14 |
| GSQASIRVY | 28512 | 8.48 | #N/A | 1.32 |
| GLNAVARVF | 3509 | 8.48 | #N/A | −0.53 |
| PINGTLRLR | 2661 | 8.48 | #N/A | 0.21 |
| PTPAAAHLH | 7298 | 8.48 | 3.50 | 0.62 |
| PIPAGGRVF | 11124 | 8.47 | 4.74 | 3.53 |
| GVPGGGHVK | 12460 | 8.47 | 5.85 | 2.03 |
| GLPASGHLK | 26038 | 8.47 | 2.49 | 1.43 |
| PSNASGKVR | 41414 | 8.47 | #N/A | −0.14 |
| GINASAKVH | 32433 | 8.46 | 3.41 | 1.84 |
| GLNAVVHLF | 40213 | 8.46 | 2.74 | −1.07 |
| PSQGSVHLK | 35606 | 8.46 | 5.09 | #N/A |
| PTPGTLRLR | 7137 | 8.45 | #N/A | −0.17 |
| GIPGTARLR | 46252 | 8.45 | #N/A | 2.00 |
| PLPGAGHLR | 15930 | 8.45 | 5.26 | 1.84 |
| PSQGVIKLK | 19251 | 8.45 | 3.16 | 2.13 |
| GTPAGVKLY | 40506 | 8.45 | 4.16 | 4.93 |
| PSNGSARLY | 7516 | 8.45 | 3.14 | 2.30 |
| GIPAALRER | 6540 | 8.45 | #N/A | 1.26 |
| PVNATIKVR | 46000 | 8.45 | #N/A | −0.62 |
| PLNGSVKLK | 8512 | 8.45 | #N/A | 0.92 |
| PSQGAGRVY | 19150 | 8.44 | 4.34 | 3.49 |
| PIQGAIKLY | 2928 | 8.44 | 3.21 | −0.61 |
| GVPAVAKVY | 45013 | 8.44 | −1.96 | 0.25 |
| GTQGALHLR | 37297 | 8.43 | 3.47 | 0.05 |
| PAPAVIRVF | 1720 | 8.43 | #N/A | 7.73 |
| PVQAGIHLY | 2377 | 8.42 | 1.81 | 2.13 |
| PAPGGVRVY | 21298 | 8.42 | 1.08 | 2.46 |
| PSNAAGRVR | 9464 | 8.42 | 3.18 | 2.30 |
| PINATARLH | 8230 | 8.42 | 1.06 | 0.03 |
| GAQGVLHLF | 5130 | 8.42 | 11.36 | 2.43 |
| GAPGVAKLR | 8828 | 8.41 | 5.49 | 1.79 |
| GAPGVAKLF | 12175 | 8.41 | 1.67 | 2.18 |
| GIQAVLHVF | 9117 | 8.40 | #N/A | 4.74 |
| GLQATAHVR | 37007 | 8.39 | 4.43 | 2.94 |
| GSPGGLKLF | 37863 | 8.38 | 7.32 | 1.07 |
| PIQATVRLY | 42617 | 8.38 | 1.18 | 1.25 |
| PTQGAIRLR | 45926 | 8.38 | 2.85 | 0.38 |
| PLPASARLY | 29342 | 8.38 | 3.16 | 0.84 |
| GLNGALRVF | 46209 | 8.37 | 0.07 | −2.65 |
| GIQGVGKLR | 12671 | 8.37 | 0.74 | −0.24 |
| PIPAAIKVR | 3299 | 8.36 | 1.44 | 0.13 |
| GVNGGVHVY | 5490 | 8.35 | 3.25 | 0.50 |
| PVQATARVK | 46198 | 8.35 | 4.32 | 2.92 |
| PLNAVVRLH | 19579 | 8.35 | 6.04 | 2.43 |
| GVQGSARLF | 44749 | 8.34 | #N/A | 3.54 |
| PLPAVLKVY | 12087 | 8.34 | 3.30 | 0.05 |
| PSNATGKVR | 41412 | 8.34 | #N/A | 0.67 |
| GVNGSVKLK | 38401 | 8.34 | #N/A | 1.87 |
| GTNGTIKVR | 46021 | 8.33 | 1.05 | −0.30 |
| PLPGSGHVY | 27014 | 8.33 | 1.38 | −1.14 |
| PLNGSVRLF | 40352 | 8.33 | 2.93 | −1.29 |
| GTQGGIHVH | 3998 | 8.33 | 1.71 | 0.15 |
| PAQAGIRVK | 45940 | 8.33 | #N/A | 1.30 |
| GLQGALRVF | 3525 | 8.32 | 2.44 | 3.12 |
| PSPATVKLK | 9657 | 8.32 | #N/A | 4.42 |
| PLNAGGHLY | 1133 | 8.32 | 3.08 | 3.00 |
| GINAVLHVH | 46059 | 8.32 | 1.94 | −0.44 |
| GIPAGGHLY | 6654 | 8.32 | 5.31 | 1.55 |
| PTPATGHVY | 13496 | 8.31 | 4.16 | 7.25 |
| GINGSIKLF | 6080 | 8.31 | 1.68 | −0.79 |
| PVQGSLHVY | 46003 | 8.31 | 3.39 | #N/A |
| GVNGTGHVR | 44588 | 8.31 | 4.60 | 3.52 |
| GLNGGVKLY | 3444 | 8.31 | 3.13 | 1.07 |
| GVQAVLHVK | 31419 | 8.31 | 7.70 | 2.41 |
| GTNGTVRLF | 26210 | 8.31 | 3.25 | 1.14 |
| GINAVGKVY | 32511 | 8.30 | 1.04 | −0.21 |
| PANGGVRLY | 988 | 8.30 | 2.83 | 2.59 |
| PANGGGHVH | 7763 | 8.30 | 4.17 | 0.79 |
| GANGAIKLK | 43994 | 8.29 | #N/A | 12.37 |
| GVNGSIRVE | 5441 | 8.29 | 1.79 | 0.94 |
| GINGTVRLF | 32051 | 8.29 | 0.51 | −1.97 |
| GIQGSGRVK | 18084 | 8.29 | #N/A | 4.75 |
| GTQAAIRVR | 4017 | 8.29 | 6.29 | 2.76 |
| PSQGGIRVY | 41620 | 8.28 | #N/A | 2.11 |
| GVPGAARLR | 38703 | 8.28 | #N/A | 0.05 |
| GVPGGGKLR | 12464 | 8.28 | #N/A | 0.13 |
| GSQGVLKVY | 11781 | 8.28 | 0.84 | −0.95 |
| GLNAAAKVR | 46279 | 8.28 | 3.12 | −0.60 |
| PVQGAAKVR | 42208 | 8.28 | 3.15 | 3.16 |
| GLQAAIKLH | 25434 | 8.27 | 2.74 | 0.07 |
| GSNGVIRLY | 11705 | 8.27 | 2.62 | 1.22 |
| GANGSVHLH | 29266 | 8.27 | 2.36 | 5.90 |
| GIQAGIKVY | 33079 | 8.27 | 3.90 | 3.61 |
| GTPATVRLK | 41488 | 8.27 | #N/A | 1.28 |
| GLPATVHLY | 15887 | 8.27 | 5.01 | 2.51 |
| GTQGTVKVR | 11422 | 8.26 | #N/A | 0.89 |
| PTNGSLHLR | 5859 | 8.26 | 2.23 | 6.14 |
| PSPAGIKLF | 7704 | 8.26 | 0.98 | 3.72 |
| GANGAIRLH | 37947 | 8.26 | #N/A | 3.04 |
| PTPAVVRVR | 46074 | 8.26 | #N/A | −1.69 |
| PLQASIRVK | 46277 | 8.26 | #N/A | −1.89 |
| GLQGALKVY | 11187 | 8.25 | 1.39 | 0.22 |
| PVNGSIHVK | 1860 | 8.25 | 3.82 | 2.88 |
| PLPGSARVF | 26847 | 8.25 | 1.18 | 0.36 |
| PSNGTGHLF | 7501 | 8.25 | 1.85 | −1.31 |
| GVNGSVRVH | 30644 | 8.24 | 5.87 | 2.99 |
| PTQGGVHLR | 9236 | 8.24 | 7.43 | 1.52 |
| GLQATGHLF | 8418 | 8.24 | #N/A | −2.18 |
| GAQGGGHVY | 44332 | 8.24 | #N/A | 2.96 |
| GVPAGIKVF | 9064 | 8.23 | 2.77 | 0.34 |
| GLNAGVRLY | 25125 | 8.23 | 2.14 | 7.74 |
| PVNAAGKVR | 21839 | 8.23 | 0.98 | 0.74 |
| PIQGVARLH | 36647 | 8.23 | 2.92 | 0.83 |
| GSQGTVHLF | 16696 | 8.23 | #N/A | −2.02 |
| GVNGGIKLY | 12289 | 8.22 | 3.69 | 0.13 |
| PVNGGVRVK | 21757 | 8.22 | #N/A | 4.33 |
| PLNASARVK | 46178 | 8.22 | 2.24 | 0.41 |
| PINGVAKLK | 32328 | 8.22 | #N/A | −1.43 |
| GANASIRVK | 44139 | 8.21 | #N/A | 1.87 |
| GLNASIHVH | 3495 | 8.21 | 3.71 | 0.82 |
| GANAGGHVY | 5044 | 8.20 | 1.53 | −0.60 |
| PSNGTIKVR | 39593 | 8.20 | #N/A | 0.02 |
| GLQGSIHVY | 46113 | 8.20 | −0.43 | −1.81 |
| GANASIRLF | 4987 | 8.20 | #N/A | 2.15 |
| GSNGVLRLY | 27870 | 8.20 | 2.18 | 1.88 |
| GTQGSIRLK | 41480 | 8.20 | #N/A | 0.92 |
| PTPATLRLR | 7335 | 8.20 | #N/A | 9.83 |
| GSNAGIHVF | 37654 | 8.19 | 1.16 | 1.23 |
| PANAALRVF | 1023 | 8.19 | 2.90 | 2.81 |
| GLNGAVRLH | 24666 | 8.19 | 2.03 | −2.01 |
| GAQAVIHVH | 29948 | 8.19 | 0.24 | −2.12 |
| PLNAVARVF | 802 | 8.18 | 3.79 | −0.07 |
| PINGASHLR | 33954 | 8.17 | 1.54 | −1.39 |
| PANASIRLY | 7772 | 8.17 | #N/A | −0.41 |
| GVQAVIHLY | 46242 | 8.17 | #N/A | 0.60 |
| PSNGGARLY | 13607 | 8.16 | 5.30 | 4.17 |
| PLNAGVRVR | 20134 | 8.16 | 2.20 | 0.86 |
| PVNASGKVR | 41431 | 8.15 | #N/A | 0.64 |
| PLQASAHLY | 3233 | 8.15 | −1.12 | −1.97 |
| PVQASLHVH | 2319 | 8.15 | 4.04 | #N/A |
| PLNGGAKVY | 13201 | 8.15 | 5.29 | 1.90 |
| GVPGSIRLY | 46158 | 8.15 | 1.97 | 0.39 |
| GIQGALHVF | 32572 | 8.15 | #N/A | 2.54 |
| PINAGGKLK | 36614 | 8.14 | 2.45 | 0.49 |
| GLPGTIRLY | 15832 | 8.14 | #N/A | −0.91 |
| PLNGAVHLY | 7599 | 8.14 | 1.52 | 1.54 |
| PLQGAVHLH | 1238 | 8.13 | 2.96 | −0.21 |

What is claimed is:

1. A modified adeno-associated virus (AAV) capsid protein, comprising a targeting peptide within variable region VIII (VR VIII),
wherein the targeting peptide has a sequence of X₁X₂X₃X₄X₅X₆X₇X₈X₉ and X₁, X₂, X₃, X₄, X₅, X₆, X₇, X₈, and X₉ are each independently selected from any amino acid residue.

2. The modified AAV capsid protein of claim 1, wherein
(i) X₁ is independently selected from a proline (P) and a glycine (G);
(ii) X₂ is independently selected from a lysine (L), a threonine (T), a serine (S), an alanine (A), a valine (V), and an isoleucine (I);
(iii) X₃ is independently selected from an asparagine (N), a glutamine (Q), and a proline (P);
(iv) X₄ is independently selected from a glycine (G) and an alanine (A);
(v) X₅ is independently selected from an alanine (A), a threonine (T), a serine (S), a valine (V), and a glycine (G);
(vi) X₆ is independently selected from a valine (V), a leucine (L), an alanine (A), an isoleucine (I), a glycine (G), a serine (S), and a threonine (T);
(vii) X₇ is independently selected from a histidine (H), an arginine (R), and a lysine (K);
(viii) X₈ is independently selected from a leucine (L) and a valine (V); and
(ix) X₉ is independently selected from a tyrosine (Y), an arginine (R), a histidine (H), a lysine (K), and a phenylalanine (F).

3. The modified AAV capsid protein of claim 1 or 2, wherein a targeting peptide within VR VIII has a sequence selected from SEQ ID NO: 160-55819 and 55857-55859.

4. The modified AAV capsid protein of any one of claims 1-3, wherein the targeting peptide has a sequence of PX₂X₃GAVX₇LY (SEQ ID NO: 2) and X₂, X₃, and X₇ are independently selected from any amino acid residue.

5. The modified AAV capsid protein of claim 3, wherein
(i) X₂ is independently selected from a lysine (L), an isoleucine (I), a valine (V), and an alanine (A);
(ii) X₃ is an asparagine (N) or a glutamine (Q); and
(iii) X₇ is independently selected from a histidine (H), an arginine (R) and a lysine (K).

6. The modified AAV capsid protein of claim 4 or 5, wherein the targeting peptide is:
(i)
(SEQ ID NO: 3)
PLQGAVHLY;
(ii)
(SEQ ID NO: 4)
PLQGAVRLY;
(iii)
(SEQ ID NO: 5)
PLQGAVKLY;
(iv)
(SEQ ID NO: 6)
PINGAVHLY;
(v)
(SEQ ID NO: 7)
PVNGAVHLY;
(vi)
(SEQ ID NO: 8)
PANGAVHLY;
or
(vii)
(SEQ ID NO: 9)
PLNGAVHLY.

7. The modified AAV capsid protein of any one of claims 1-6, wherein the targeting peptide is inserted between S586 and A589 of an AAV9 capsid protein, thereby replacing A587 and Q588 of the AAV9 capsid protein.

8. The modified AAV capsid protein of any one of claims 1-7, having at least 90%, 95%, 96%, 97%, 98% or 99% sequence identity to an AAV9 capsid protein.

9. The modified AAV capsid protein of any one of claims 1-6, wherein the targeting peptide is inserted
(i) between S586 and T589 of an Anc80L65 capsid protein, thereby replacing A587 and N588 of the Anc80L65 capsid protein;
(ii) between Q585 and N588 of an Anc80L65 capsid protein, thereby replacing S586 and A587 of the Anc80L65 capsid protein;
(iii) between L584 and A587 of an Anc80L65 capsid protein, thereby replacing Q585 and S586 of the Anc80L65 capsid protein;
(iv) between A587 and A590 of an Anc80L65 capsid protein, thereby replacing N588 and T589 of the Anc80L65 capsid protein; or
(v) between S586 and A587 of an Anc80L65 capsid protein.

10. The modified AAV capsid protein of claim 9, wherein the targeting peptide comprises: PLNGAVHLY (SEQ ID NO: 9).

11. The modified AAV capsid protein of claim 9 or 10, having at least 90%, 95%, 96%, 97%, 98% or 99% sequence identity to an Anc80L65 capsid protein.

12. The modified AAV capsid protein of claim 1 or 2, wherein the targeting peptide has a sequence of PX₂X₃GX₅X₆X₇LY (SEQ ID NO: 10) and X₂, X₃, X₅, X₆, and X₇ are independently selected from any amino acid residue.

13. The modified AAV capsid protein of claim 12, wherein
(i) X₂ is independently selected from a leucine (L), a threonine (T), or a serine (S);
(ii) X₃ is independently selected from an asparagine (N) and a glutamine (Q);
(iii) X₅ is independently selected from an alanine (A) and a threonine (T);
(iv) X₆ is independently selected from a valine (V) and a leucine (L); and
(v) X₇ is independently selected from a histidine (H), an arginine (R), and a lysine (K).

14. The modified AAV capsid protein of claim 12 or 13, wherein the targeting peptide is:
(i)
(SEQ ID NO: 11)
PTNGTVRLY;
(ii)
(SEQ ID NO: 12)
PTNGTVHLY;
(iii)
(SEQ ID NO: 13)
PTNGTVKLY;
(iv)
(SEQ ID NO: 14)
PSNGTLRLY;
(v)
(SEQ ID NO: 15)
PSNGTLHLY;
(vi)
(SEQ ID NO: 16)
PSNGTLKLY
(vii)
(SEQ ID NO: 17)
PTNGTLRLY;
(viii)
(SEQ ID NO: 18)
PTNGTLHLY;
or
(ix)
(SEQ ID NO: 19)
PTNGTLKLY.

15. The modified AAV capsid protein of claim 1 or 2, wherein the targeting peptide has a sequence of PX₂X₃GAVX₇X₈X₉ (SEQ ID NO: 20) and X₂, X₃, X₅, X₆, and X₇ are independently selected from any amino acid residue.

16. The modified AAV capsid protein of claim 15, wherein
(i) X₂ is independently selected from a leucine (L), a threonine (T), or a serine (S);
(ii) X₃ is independently selected from an asparagine (N) and a glutamine (Q);
(iii) X₇ is independently selected from a histidine (H) and a threonine (T);
(iv) X₈ is independently selected from a valine (V) and a leucine (L); and
(v) X₉ is independently selected from a tyrosine (Y) and an arginine (R).

17. The modified AAV capsid protein of claim 15 or 16, wherein the targeting peptide is:
(i)
(SEQ ID NO: 21)
PTQGAVTVR;
(ii)
(SEQ ID NO: 22)
PLQGAVTVR;
(iii)
(SEQ ID NO: 23)
PLQGAVHVR;
(iv)
(SEQ ID NO: 24)
PLQGAVHVY;
(v)
(SEQ ID NO: 25)
PSQGAVTLR;
(vi)
(SEQ ID NO: 26)
PLQGAVTLR;
(vii)
(SEQ ID NO: 27)
PLQGAVHLR;
or
(viii)
(SEQ ID NO: 28)
PTQGAVTLR.

18. The modified AAV capsid protein of any one of claims 1-17, wherein the targeting peptide does not comprise PLNGAVHLY (SEQ ID NO: 9).

19. The modified AAV capsid protein of any one of claims 1-17, wherein the targeting peptide comprises PLNGSVHLY (SEQ ID NO: 3603) or PLNGTVHLY (SEQ ID NO: 1232).

20. The modified AAV capsid protein of any one of claims 12-19, wherein the targeting peptide is inserted between S586 and A589 of an AAV9 capsid protein, thereby replacing A587 and Q588 of the AAV9 capsid protein.

21. A modified adeno-associated virus (AAV) capsid protein, comprising:
a targeting peptide within VR VIII wherein the targeting peptide has a sequence selected from SEQ ID NO: 160-619.

22. The modified AAV capsid protein of any one of claims 1-21, having at least 90%, 91%, 92%, 93%, 94%, 95%, 96%, 97%, 98%, 99% or 99.5% sequence identity to a sequence of a reference AAV capsid protein.

23. The modified AAV capsid protein of claim 22, wherein the reference AAV capsid protein is selected from VP1, VP2 and VP3.

24. The modified AAV capsid protein of claim 22 or 23, wherein the reference AAV capsid protein is a capsid protein of an AAV selected from the group consisting of: AAV9; Anc80L65; Anc80-55, Anc80-129, Anc80-156, Anc80-751, Anc80-1029, Anc80-1712, AAV2; AAV1; AAV6; AAV3; AAV LK03; AAV7; AAV8; AAV hu.37; AAV rh.10; AAV hu.68; AAV10; AAV5; AAV3-3; AAV4-4; AAV1-A; hu.46-A; hu.48-A; hu.44-A; hu.43-A; AAV6-A; hu.34-B; hu.47-B; hu.29-B; rh.63-B; hu.56-B; hu.45-B; rh.57-B; rh.35-B; rh.58-B; rh.28-B; rh.51-B; rh.19-B; rh.49-B; rh.52-B; rh.13-B; AAV2-B; rh.20-B; rh.24-B; rh.64-B; hu.27-B; hu.21-B; hu.22-B; hu.23-B; hu.7-C; hu.61-C; rh.56-C; hu. 9-C; hu.54-C; hu.53-C; hu.60-C; hu.55-C; hu.2-C; hu.1-C; hu.18-C; hu.3-C; hu.25-C; hu.15-C; hu.16-C; hu.11-C; hu.10-C; hu.4-C; rh.54-D; rh.48-D; rh.55-D; rh.62-D; AAV7-D; rh.52-E; rh.51-E; hu.39-E; rh.53-E; hu.37-E; rh.43-E; rh.50-E; rh.49-E; rh.61-E; hu.41-E; rh.64-E; rh74; hu.42-E; rh.57-E; rh.40-E; hu.67-E; hu.17-E; hu.6-E; hu.66-E; rh.38-E; hu.32-F; AAV9/hu; hu.31-F; Anc80; Anc81; Anc82; Anc83; Anc84; Anc94; Anc113; Anc126; Anc127; Anc80L27; Anc80L59; Anc80L60; Anc80L62; Anc80L33; Anc80L36; Anc80L44; Anc80L1; Anc110; and Anc80DI.

25. The modified AAV capsid protein of any one of claims 22-24, wherein the reference AAV capsid protein is a capsid protein having a sequence selected from SEQ ID Nos: 54-158, or a fragment thereof.

26. The modified AAV capsid protein of any one of claims 22-25, wherein the reference AAV capsid protein is a capsid protein having a sequence of SEQ ID NO: 61 or a fragment thereof.

27. The modified AAV capsid protein of any one of claims 22-26, wherein the reference AAV capsid protein is a capsid protein having a sequence of SEQ ID NO: 142 or a fragment thereof.

28. The modified AAV capsid protein of any one of claims 22-27, wherein the targeting peptide is positioned between 576 and 601 within VR VIII of the modified AAV capsid protein.

29. The modified AAV capsid protein of any one of claims 1-28, further comprising an N-terminal flanking region on the N-terminal end of the targeting peptide.

30. The modified AAV capsid protein of claim 29, wherein the N-terminal flanking region comprises at least four consecutive amino acids from amino acid residues 576-585 of the reference AAV capsid protein, wherein the amino acid residues are numbered according to the amino acid sequence of the reference AAV capsid protein.

31. The modified AAV capsid protein of claim 29 or 30, wherein the N-terminal flanking region has the sequence of B₁YGB₂VATNB₃QS (SEQ ID NO: 55849), and B₁, B₂, and B₃ are each independently selected from any amino acid residue.

32. The modified AAV capsid protein of claim 31, wherein B₁ is selected from a glutamate (E) or a serine (S), B₂ is selected from a threonine (T) or a glutamine (Q), and B₃ is selected from a leucine (L) or a histidine (H).

33. The modified AAV capsid protein of any one of claims 29-32, wherein the N-terminal flanking region has the sequence of SYGQVATNHQS (SEQ ID NO: 55848).

34. The modified AAV capsid protein of any one of claims 29-33, wherein the N-terminal flanking region replaces N-terminal reference sequence of the reference AAV capsid protein, wherein the N-terminal reference sequence has at least 60% sequence identity to the N-terminal flanking region and positioned at N-terminal end of an insertion site of the targeting peptide within the reference AAV capsid protein.

35. The modified AAV capsid protein of claim 34, wherein the N-terminal reference sequence has the sequence of B₁YGB₂VATNB₃QS (SEQ ID NO: 55849).

36. The modified AAV capsid protein of any one of claims 1-35, further comprising a C-terminal flanking region on the C-terminal end of the targeting peptide.

37. The modified AAV capsid protein of claim 36, wherein the C-terminal flanking region comprises at least four consecutive amino acids from amino acid residues 589-602 of the reference AAV capsid protein, wherein the amino acid residues are numbered according to the amino acid sequence of the reference AAV capsid protein.

38. The modified AAV capsid protein of claim 36 or 37, wherein the C-terminal flanking region has the sequence of AQAQTGZ₁VZ₂Z₃QGZ₄ (SEQ ID NO: 55851), and Z₁, Z₂, Z₃, and Z₄ are each independently selected from any amino acid residue.

39. The modified AAV capsid protein of claim 38, wherein Z₁ is selected from a threonine (T) or a tryptophan (W), Z₂ is selected from an asparagine (N) or a glutamine (Q), Z₃ is selected from a serine (S) or an asparagine (N), and Z₄ is selected from an alanine (A) or an isoleucine (I).

40. The modified AAV capsid protein of any one of claims 36-39, wherein the C-terminal flanking region has the sequence of AQAQTGWVQNQGI (SEQ ID NO: 55850).

41. The modified AAV capsid protein of any one of claims 36-40, wherein the C-terminal flanking region replaces C-terminal reference sequence of the reference AAV capsid protein, wherein the C-terminal reference sequence has at least 60% sequence identity to the C-terminal flanking region and positioned at C-terminal end of an insertion site of the targeting peptide within the reference AAV capsid protein.

42. The modified AAV capsid protein of claim 41, wherein the C-terminal reference sequence has the sequence of AQAQTGZ₁VZ₂Z₃QGZ₄ (SEQ ID NO: 55851).

43. The modified AAV capsid protein of any one of claims 1-28, further comprising:
(i) a N-terminal flanking region having the sequence of B₁YGB₂VATNB₃QS (SEQ ID NO: 55849, where B₁, B₂, and B₃ are each independently selected from any amino acid residue; and
(ii) a C-terminal flanking region having the sequence of AQAQTGZ₁VZ₂Z₃QGZ₄ (SEQ ID NO: 55851), where Z₁, Z₂, Z₃, and Z₄ are each independently selected from any amino acid residue.

44. The modified AAV capsid protein of any one of claims 1-28, further comprising:
(i) a N-terminal flanking region having the sequence of B₁YGB₂VATNB₃QS (SEQ ID NO: 55860) and B₁ is selected from a glutamate (E) or a serine (S), B₂ is selected from a threonine (T) or a glutamine (Q), and B₃ is selected from a leucine (L) or a histidine (H); and
(ii) a C-terminal flanking region having the sequence of AQAQTGZ₁VZ₂Z₃QGZ₄ (SEQ ID NO: 55861) and Z₁ is selected from a threonine (T) or a tryptophan (W), Z₂ is selected from an asparagine (N) or a glutamine (Q), Z₃ is selected from a serine (S) or an asparagine (N), and Z₄ is selected from an alanine (A) or an isoleucine (I).

45. The modified AAV capsid protein of any one of claims 1-28, further comprising:
(i) a N-terminal flanking region having the sequence of SYGQVATNHQS (SEQ ID NO: 55848), and
(ii) a C-terminal flanking region having the sequence of AQAQTGWVQNQGI (SEQ ID NO: 55850).

46. The modified AAV capsid protein of any one of claims 1-28, comprising an amino acid sequence of B₁YGB₂VATNB₃QSPLMGAVHLYAQAQTGZ₁VZ₂Z₃QGZ₄ (SEQ ID NO: 55852), where B₁, B₂, B₃, Z₁, Z₂, Z₃, and Z₄ are each independently selected from any amino acid residue.

47. The modified AAV capsid protein of claim 46, wherein B₁ is selected from a glutamate (E) or a serine (S), B₂ is selected from a threonine (T) or a glutamine (Q), B₃ is selected from a leucine (L) or a histidine (H), Z₁ is selected from a threonine (T) or a tryptophan (W), Z₂ is selected from an asparagine (N) or a glutamine (Q), Z₃ is selected from a serine (S) or an asparagine (N), and Z₄ is selected from an alanine (A) or an isoleucine (I).

48. The modified capsid protein of any one of claims 1-28, wherein the targeting peptide is a peptide having 1, 2, 3, 4, 5, 6, 7, 8, 9, 10, or more amino acid residues different to a sequence of SEQ LD NO: 29, wherein the different amino acid comprise an insertion, a deletion, or a substitution compared to the sequence of SEQ ID NO: 29.

49. The modified AAV capsid protein of claim 48, wherein the targeting peptide has the sequence of SEQ ID NO: 29.

50. The modified AAV capsid protein of any one of claims 22-49, wherein the modified AAV capsid protein has one or more modifications comprising amino acid insertions, deletions, substitutions or combinations thereof as compared to a reference AAV capsid protein.

51. The modified AAV capsid protein of any one of claims 22-50, wherein the one or more modifications comprises an amino acid insertion, deletion, substitution, or a combination thereof to introduce the targeting peptide into VR VIII of the reference AAV capsid protein.

52. The modified AAV capsid protein of any one of claim 22-50, wherein the one or more modifications comprises an amino acid modification outside of VR VIII of the reference AAV capsid protein.

53. The modified AAV capsid protein of claim 52, wherein the one or more modifications outside of VR VIII of the reference AAV capsid protein comprise one or more modifications in VR I, VR II, VR III, VR IV, VR V, VR VI, or VR VII.

54. The modified AAV capsid protein of claim 53, wherein the one or more modifications outside of VR VIII of the reference AAV capsid protein comprise one or more modifications in VR IV and VR V.

55. The modified AAV capsid protein of any one of claims 52-54, wherein the one or more modifications in VR IV result in introduction of a sequence of SEQ ID NO: 30.

56. The modified AAV capsid protein of any one of claims 52-55, wherein the one or more modifications in VR V result in introduction of a sequence of SEQ ID NO: 31.

57. The modified AAV capsid protein of any one of claims 1-52, wherein the one or more modifications comprises one or more amino acid deletions within VR VIII.

58. The modified AAV capsid protein of claim 57, wherein the one or more amino acid deletions comprise a deletion of one, two, three, four, or five or more amino acid residues immediately adjacent to the N terminal end of the targeting peptide within VR VIII.

59. The modified AAV capsid protein of claim 57 or 58, wherein the one or more amino acid deletions comprise a deletion of at least one amino acid residue at a position selected from 584, 585, 586, 587, or 588, or a combination thereof, relative to a reference sequence numbered according to the amino acid sequence of the reference AAV capsid protein.

60. The modified AAV capsid protein of claim 59, wherein the one or more amino acid deletions comprises a deletion of the amino acid residue at position 587, relative to a reference sequence numbered according to the amino acid sequence of the reference AAV capsid protein.

61. The modified AAV capsid protein of claim 59, wherein the one or more amino acid deletions comprises a deletion of the amino acid residue at position 588, relative to a reference sequence numbered according to the amino acid sequence of the reference AAV capsid protein.

62. The modified AAV capsid protein of any one of claims 57-61, wherein the amino acid deletion comprises deletion of one, two, three, four, or five or more amino acid residues immediately adjacent to the C terminal end of the targeting peptide within VR VIII.

63. The modified AAV capsid protein of claim 62, wherein the amino acid deletion comprises deletion of an amino acid residue at position 589, 590, or 591, or a combination thereof, relative to a reference sequence numbered according to the amino acid sequence of the reference AAV capsid protein.

64. The modified AAV capsid protein of any one of claims 50-63, wherein the amino acid insertion comprises insertion of one, two, three, four, or five or more amino acid residues immediately adjacent to C terminal end of the targeting peptide within VR VIII.

65. The modified AAV capsid protein of claim 64, wherein the inserted amino acid residue is independently selected from any amino acid residue.

66. The modified AAV capsid protein of claim 64 or 65, wherein the inserted amino acid residue(s) is identical to the amino acid residue deleted adjacent to the N terminal end or C terminal end of the targeting peptide within VR VIII.

67. The modified AAV capsid protein of any one of claims 64-66, wherein the inserted amino acid residue is an alanine (A) or an asparagine (N).

68. The modified AAV capsid protein of claim 65, wherein the inserted amino acids are an alanine (A) at the position immediately adjacent to the C terminal end of the targeting peptide and an asparagine (N) at the next subsequent position, thereby having an amino acid sequence of AN immediately adjacent to the C terminal end of the targeting peptide.

69. The modified AAV capsid protein of any one of claims 22-61, wherein the targeting peptide is:
(i)
(SEQ ID NO: 32)
PLNGAVHLYN;
or
(ii)
(SEQ ID NO: 33)
PLNGAVHLYAN.

70. The modified AAV capsid protein of any one of claims 1-69, wherein
(i) the reference AAV capsid protein is a capsid protein of AAV1 or a modification thereof and the targeting peptide is between S586 and T589 of the reference AAV capsid protein, thereby replacing residues S587 and S588 of the reference capsid protein;
(ii) the reference AAV capsid protein is a capsid protein of AAV2 or a modification thereof and the targeting peptide is between R585 and R588 of the reference AAV capsid protein, thereby replacing residues G586 and N587 of the reference capsid protein;
(iii) the reference AAV capsid protein is a capsid protein of AAV3 or a modification thereof and the targeting peptide is between S586 and T589 of the reference AAV capsid protein, thereby replacing residues S587 and N588 of the reference capsid protein;
(iv) the reference AAV capsid protein is a capsid protein of AAV4 or a modification thereof and the targeting peptide is between D582 and N585 of the reference AAV capsid protein, thereby replacing residues Q583 and S584 of the reference capsid protein;
(v) the reference AAV capsid protein is a capsid protein of AAV5 or a modification thereof and the targeting peptide is between S575 and T578 of the reference AAV capsid protein, thereby replacing residues S576 and S577 of the reference capsid protein;
(vi) the reference AAV capsid protein is a capsid protein of AAV6 or a modification thereof and the targeting peptide is between S586 and T589 of the reference AAV capsid protein, thereby replacing residues S587 and S588 of the reference capsid protein;
(vii) the reference AAV capsid protein is a capsid protein of AAV7 or a modification thereof and the targeting peptide is between A587 and T590 of the reference AAV capsid protein, thereby replacing residues A588 and N589 of the reference capsid protein;
(viii) the reference AAV capsid protein is a capsid protein of AAV8 or a modification thereof and the targeting peptide is between Q588 and A591 of the modified AAV capsid protein thereby replacing residues Q589 and N590 of the reference capsid protein;
(ix) the reference AAV capsid protein is a capsid protein of AAV9 or a modification thereof and the targeting peptide is between S586 and A589 of the reference AAV capsid protein thereby replacing residues A587 and Q588 of the reference capsid protein;
(x) the reference AAV capsid protein is a capsid protein of AAVrh10 or a modification thereof and the targeting peptide is between Q588 and A591 of the reference AAV capsid protein thereby replacing residues Q589 and N590 of the reference capsid protein;
(xi) the reference AAV capsid protein is a capsid protein of AAVpo.1 or a modification thereof and the targeting peptide is between N565 and S568 of the reference AAV capsid protein thereby replacing residues Q566 and N567 of the reference capsid protein;
(xii) the reference AAV capsid protein is a capsid protein of AAV12 or a modification thereof and the targeting peptide is between N590 and A593 of the reference AAV capsid protein thereby replacing residues Q591 and N592 of the reference capsid protein;
(xiii) the reference AAV capsid protein is a capsid protein of Anc80 or a modification thereof and the targeting peptide is between S586 and T589 of the reference AAV capsid protein thereby replacing residues S587 and N588 of the reference capsid protein;
(xiv) the reference AAV capsid protein is a capsid protein of Anc80-55 or a modification thereof and the targeting peptide is between S586 and T589 of the reference AAV capsid protein thereby replacing residues S587 and N588 of the reference capsid protein;
(xv) the reference AAV capsid protein is a capsid protein of Anc80-129 or a modification thereof and the targeting peptide is between S586 and T589 of the reference AAV capsid protein thereby replacing residues A587 and N588 of the reference capsid protein;
(xvi) the reference AAV capsid protein is a capsid protein of Anc80-156 or a modification thereof and the targeting peptide is between S586 and T589 of the reference AAV capsid protein thereby replacing residues A587 and N588 of the reference capsid protein;
(xvii) the reference AAV capsid protein is a capsid protein of Anc80-751 or a modification thereof and the targeting peptide is between S586 and T589 of the reference AAV capsid protein thereby replacing residues A587 and N588 of the reference capsid protein;
(xviii) the reference AAV capsid protein is a capsid protein of Anc80-1029 or a modification thereof and the targeting peptide is between S586 and T589 of the reference AAV capsid protein thereby replacing residues A587 and N588 of the reference capsid protein; or
(xix) the reference AAV capsid protein is a capsid protein of Anc80-1712 or a modification thereof and the targeting peptide is between S586 and T589 of the reference AAV capsid protein thereby replacing residues A587 and N588 of the reference capsid protein.

71. The modified AAV capsid protein of any one of claims 1-69, wherein:
(i) the reference AAV capsid protein is a capsid protein of AAV1 or a modification thereof and the targeting peptide is between D590 and P591 or between S588 and T589 of the reference AAV capsid protein;
(ii) the reference AAV capsid protein is a capsid protein of AAV2 or a modification thereof and the targeting peptide is between R588 and Q589 or between N587 and R588 of the reference AAV capsid protein;
(iii) the reference AAV capsid protein is a capsid protein of AAV3 or a modification thereof and the targeting peptide is between S586 and S587 or between N588 and T589 of the reference AAV capsid protein;
(iv) the reference AAV capsid protein is a capsid protein of AAV4 or a modification thereof and the targeting peptide is between S584 and N585 or between S586 and N587 of the reference AAV capsid protein;
(v) the reference AAV capsid protein is a capsid protein of AAV5 or a modification thereof and the targeting peptide is between S575 and S576 or between T577 and T578 of the reference AAV capsid protein;
(vi) the reference AAV capsid protein is a capsid protein of AAV6 or a modification thereof and the targeting peptide is between D590 and P591 or S588 and T589 of the reference AAV capsid protein;
(vii) the reference AAV capsid protein is a capsid protein of AAV7 or a modification thereof and the targeting peptide is between N589 and T590 of the reference AAV capsid protein;
(viii) the reference AAV capsid protein is a capsid protein of AAV8 or a modification thereof and the targeting peptide is between N590 and T591 of the modified AAV capsid protein;
(ix) the reference AAV capsid protein is a capsid protein of AAV9 or a modification thereof and the targeting peptide is between Q588 and A589 of the reference AAV capsid protein;
(x) the reference AAV capsid protein is a capsid protein of AAVrh10 or a modification thereof and the targeting peptide is between N590 and A591 of the reference AAV capsid protein;
(xi) the reference AAV capsid protein is a capsid protein of AAVpo.1 or a modification thereof and the targeting peptide is between N567 and S568 or between N569 and T570 of the reference AAV capsid protein;
(xii) the reference AAV capsid protein is a capsid protein of AAV12 or a modification thereof and the targeting peptide is between N592 and A593 or between T594 and T595 of the reference AAV capsid protein;
(xiii) the reference AAV capsid protein is a capsid protein of Anc80 or a modification thereof and the targeting peptide is between T589 and A590, between N588 and T589, or between N587 and T588 of the reference AAV capsid protein;
(xiv) the reference AAV capsid protein is a capsid protein of Anc80-55 or a modification thereof and the targeting peptide is between T589 and A590 or between N587 and T588 of the reference AAV capsid protein;
(xv) the reference AAV capsid protein is a capsid protein of Anc80-129 or a modification thereof and the targeting peptide is between T589 and A590 or between N587 and T588 of the reference AAV capsid protein;
(xvi) the reference AAV capsid protein is a capsid protein of Anc80-156 or a modification thereof and the targeting peptide is between T589 and A590 or between N587 and T588 of the reference AAV capsid protein;
(xvii) the reference AAV capsid protein is a capsid protein of Anc80-751 or a modification thereof and the targeting peptide is between T589 and A590 or between N587 and T588 of the reference AAV capsid protein;
(xviii) the reference AAV capsid protein is a capsid protein of Anc80-1029 or a modification thereof and the targeting peptide is between T589 and A590 or between N587 and T588 of the reference AAV capsid protein; or
(xix) the reference AAV capsid protein is a capsid protein of Anc80-1712 or a modification thereof and the targeting peptide is between T589 and A590 or between N587 and T588 of the reference AAV capsid protein.

72. A modified AAV capsid protein having a sequence selected from SEQ ID NO: 34-39.

73. A polynucleotide encoding the modified AAV capsid protein of any one of claims 1-72.

74. A vector comprising the polynucleotide of claim 72.

75. The vector of claim 74, further comprising a promoter operably linked to the polynucleotide.

76. A host cell comprising the modified AAV capsid protein of any one of claims 1-71, the polynucleotide specified in claim 72, or the vector of claim 74 or 75.

77. A recombinant AAV virion (rAAV) comprising the modified AAV capsid protein of any one of claims 1-71.

78. The AAV virion of claim 77, further comprising an exogenous polynucleotide.

79. The AAV virion of claim 78, wherein the exogenous polynucleotide comprises a template for homology directed repair.

80. The AAV virion of claim 78, wherein the exogenous polynucleotide comprises an expressible polynucleotide encoding a therapeutic tRNA, miRNA, gene editing guide RNA, or RNA-editing guide RNA.

81. The AAV virion of claim 80, wherein the exogenous polynucleotide comprises an expressible polynucleotide encoding a therapeutic protein.

82. The AAV virion of claim 81, wherein the therapeutic protein is used for treating and/or preventing a disease of the central nervous system (CNS).

83. The AAV virion of any one of claims 77-82, wherein the AAV virion, when administered in a therapeutically effective amount to a subject, has increased specificity to a central nervous system (CNS) tissue, relative to a reference AAV virion comprising a reference AAV capsid protein without the targeting peptide.

84. The AAV virion of any one of claims 77-83, wherein the AAV virion, when administered in a therapeutically effective amount to a subject, has increased transduction efficiency in the CNS, relative to a reference AAV virion comprising a reference AAV capsid protein without the targeting peptide.

85. The AAV virion of any one of claims 77-84, wherein the AAV virion, when administered in a therapeutically effective amount to a subject, has increased blood brain barrier penetration in the subject, relative to a reference AAV virion comprising a reference capsid protein without the targeting peptide.

86. A pharmaceutical composition comprising the AAV virion of any one of claims 77-85.

87. A method for treating or ameliorating or preventing a disease or condition in a subject, comprising administering a therapeutically effective amount of the AAV virion of any one of claims 77-85 or the pharmaceutical composition of claim 86.

88. The method of treating or ameliorating or preventing a disease according to claim 87, wherein the disease is a disease of the central nervous system (CNS).

89. The method of treating or ameliorating or preventing a disease according to claim 88, the CNS disease is a lysosomal storage disease (LSD).

90. The method of treating or ameliorating or preventing a disease according to claim 88, wherein the CNS disease is a leukodystrophy.

91. The method of treating or ameliorating or preventing a disease according to claim 88, wherein the CNS disease is metachromatic leukodystrophy (MILD).

92. The method of treating or ameliorating or preventing a disease according to claim 88, wherein the CNS disease is Krabbe.

93. The method of treating or ameliorating or preventing a disease according to claim 88, wherein the CNS disease is cancer.

94. The method of treating or ameliorating or preventing a disease according to claim 88, wherein the CNS disease is metastatic breast cancer.

95. The modified adeno-associated virus (AAV) capsid protein of any one of claims 1-71, for use in treating and/or preventing a disease of the central nervous system (CNS).

96. An AAV virion comprising the modified AAV capsid protein of any one of claims 1-71 or an AAV virion of any one of claims 77-85 for use in treating and/or preventing a disease of the central nervous system (CNS).

97. A pharmaceutical composition comprising the modified AAV capsid protein of any one of claims 1-71, and/or the AAV virion specified in any one of claims 77-85 for use in treating and/or preventing a disease of the central nervous system (CNS).

98. A method of transferring an exogenous polynucleotide to the central nervous system (CNS), comprising the step of administering the AAV virion specified in any one of claims 77-85 to a subject.

99. The method of claim 98, wherein the administration results in transfer of the exogenous polynucleotide in the CNS, at a CNS:liver infection ratio of greater than 1 when measured by genome copies of the AAV virion.

100. The method of claim 98 or 99, wherein the administration results in expression of the exogenous polynucleotide in CNS, at a CNS:liver expression ratio of greater than 10.

101. The method of any one of claims 98-100, wherein the CNS:liver expression ratio of greater than 10 when measured by protein expression.

102. Use of the modified AAV capsid protein of any one of claims 1-71, and/or the AAV virion specified in any one of claims 77-85 for transferring an exogenous polynucleotide to the central nervous system.

103. The use according to claim 102, wherein said use is a non-therapeutic use.

The application's sequence listing, which the Patent Office published only in electronic form, follows.

SEQUENCE LISTING (55921 sequences)

SEQ ID NO: 1 - skipped

SEQ ID NO: 2 - protein, 9 aa, synthetic construct
  VARIANT 2: note = Any amino acid
  VARIANT 3: note = Any amino acid
  VARIANT 7: note = Any amino acid
PXXGAVXLY

SEQ ID NO: 3 - protein, 9 aa, synthetic construct
PLQGAVHLY

SEQ ID NO: 4 - protein, 9 aa, synthetic construct
PLQGAVRLY

SEQ ID NO: 5 - protein, 9 aa, synthetic construct
PLQGAVKLY

SEQ ID NO: 6 - protein, 9 aa, synthetic construct
PINGAVHLY

SEQ ID NO: 7 - protein, 9 aa, synthetic construct
PVNGAVHLY

SEQ ID NO: 8 - protein, 9 aa, synthetic construct
PANGAVHLY

SEQ ID NO: 9 - protein, 9 aa, synthetic construct
PLNGAVHLY

SEQ ID NO: 10 - protein, 9 aa, synthetic construct
  VARIANT 2: note = Any amino acid
  VARIANT 3: note = Any amino acid
  VARIANT 5: note = Any amino acid
  VARIANT 6: note = Any amino acid
  VARIANT 7: note = Any amino acid
PXXGXXXLY

SEQ ID NO: 11 - protein, 9 aa, synthetic construct
PTNGTVRLY

SEQ ID NO: 12 - protein, 9 aa, synthetic construct
PTNGTVHLY

SEQ ID NO: 13 - protein, 9 aa, synthetic construct
PTNGTVKLY

SEQ ID NO: 14 - protein, 9 aa, synthetic construct
PSNGTLRLY

SEQ ID NO: 15 - protein, 9 aa, synthetic construct
PSNGTLHLY

SEQ ID NO: 16 - protein, 9 aa, synthetic construct
PSNGTLKLY

SEQ ID NO: 17 - protein, 9 aa, synthetic construct
PTNGTLRLY

SEQ ID NO: 18 - protein, 9 aa, synthetic construct
PTNGTLHLY

SEQ ID NO: 19 - protein, 9 aa, synthetic construct
PTNGTLKLY

SEQ ID NO: 20 - protein, 9 aa, synthetic construct
  VARIANT 2: note = Any amino acid
  VARIANT 3: note = Any amino acid
  VARIANT 7: note = Any amino acid
  VARIANT 8: note = Any amino acid
  VARIANT 9: note = Any amino acid
PXXGAVXXX

SEQ ID NO: 21 - protein, 9 aa, synthetic construct
PTQGAVTVR

SEQ ID NO: 22 - protein, 9 aa, synthetic construct
PLQGAVTVR

SEQ ID NO: 23 - protein, 9 aa, synthetic construct
PLQGAVHVR

SEQ ID NO: 24 - protein, 9 aa, synthetic construct
PLQGAVHVY

SEQ ID NO: 25 - protein, 9 aa, synthetic construct
PSQGAVTLR

SEQ ID NO: 26 - protein, 9 aa, synthetic construct
PLQGAVTLR

SEQ ID NO: 27 - protein, 9 aa, synthetic construct
PLQGAVHLR

SEQ ID NO: 28 - protein, 9 aa, synthetic construct
PTQGAVTLR

SEQ ID NO: 29 - protein, 33 aa, synthetic construct
SYGQVATNHQSPLNGAVHLYAQAQTGWVQNQGI

SEQ ID NO: 30 - protein, 17 aa, synthetic construct
KTINGSGQNQQTLKFSV

SEQ ID NO: 31 - protein, 20 aa, synthetic construct
TTVTQNNNSEFAWPGASSWA

SEQ ID NO: 32 - protein, 10 aa, synthetic construct
PLNGAVHLYN

SEQ ID NO: 33 - protein, 11 aa, synthetic construct
PLNGAVHLYAN

SEQ ID NO: 34 - protein, 743 aa, synthetic construct
MAADGYLPDWLEDNLSEGIREWWDLKPGAPKPKANQQKQDDGRGLVLPGYKYLGPFNGLDKGEPVNAADAAALEHDKAYDQQLKAGDNPYLRYNHADAEFQERLQEDTSFGGNLGRAVFQAKKRVLEPLGLVEEGAKTAPGKKRPVEQSPQEPDSSSGIGKKGQQPARKRLNFGQTGDSESVPDPQPLGEPPAAPSGVGSNTMAAGGGAPMADNNEGADGVGNASGNWHCDSTWLGDRVITTSTRTWALPTYNNHLYKQISSQSGGSTNDNTYFGYSTPWGYFDFNRFHCHFSPRDWQRLINNNWGFRPKKLNFKLFNIQVKEVTTNDGTTTIANNLTSTVQVFTDSEYQLPYVLGSAHQGCLPPFPADVFMIPQYGYLTLNNGSQAVGRSSFYCLEYFPSQMLRTGNNFQFSYTFEDVPFHSSYAHSQSLDRLMNPLIDQYLYYLSRTQTTSGTAGNRTLQFSQAGPSSMANQAKNWLPGPCYRQQRVSKTTNQNNNSNFAWTGATKYHLNGRDSLVNPGPAMATHKDDEDKFFPMSGVLIFGKQGAGNSNVDLDNVMITNEEEIKTTNPVATEEYGTVATNLQSPLNGAVHLYTAPATGTVNSQGALPGMVWQDRDVYLQGPIWAKIPHTDGHFHPSPLMGGFGLKHPPPQILIKNTPVPANPPTTFSPAKFASFITQYSTGQVSVEIEWELQKENSKRWNPEIQYTSNYNKSTNVDFAVDTNGVYSEPRPIGTRYLTRNL

SEQ ID NO: 35 - protein, 743 aa, synthetic construct
MAADGYLPDWLEDNLSEGIREWWDLKPGAPKPKANQQKQDDGRGLVLPGYKYLGPFNGLDKGEPVNAADAAALEHDKAYDQQLKAGDNPYLRYNHADAEFQERLQEDTSFGGNLGRAVFQAKKRVLEPLGLVEEGAKTAPGKKRPVEQSPQEPDSSSGIGKKGQQPARKRLNFGQTGDSESVPDPQPLGEPPAAPSGVGSNTMAAGGGAPMADNNEGADGVGNASGNWHCDSTWLGDRVITTSTRTWALPTYNNHLYKQISSQSGGSTNDNTYFGYSTPWGYFDFNRFHCHFSPRDWQRLINNNWGFRPKKLNFKLFNIQVKEVTTNDGTTTIANNLTSTVQVFTDSEYQLPYVLGSAHQGCLPPFPADVFMIPQYGYLTLNNGSQAVGRSSFYCLEYFPSQMLRTGNNFQFSYTFEDVPFHSSYAHSQSLDRLMNPLIDQYLYYLSRTQTTSGTAGNRTLQFSQAGPSSMANQAKNWLPGPCYRQQRVSKTTNQNNNSNFAWTGATKYHLNGRDSLVNPGPAMATHKDDEDKFFPMSGVLIFGKQGAGNSNVDLDNVMITNEEEIKTTNPVATEEYGTVATNLQPLNGAVHLYNTAPATGTVNSQGALPGMVWQDRDVYLQGPIWAKIPHTDGHFHPSPLMGGFGLKHPPPQILIKNTPVPANPPTTFSPAKFASFITQYSTGQVSVEIEWELQKENSKRWNPEIQYTSNYNKSTNVDFAVDTNGVYSEPRPIGTRYLTRNL

SEQ ID NO: 36 - protein, 743 aa, synthetic construct
MAADGYLPDWLEDNLSEGIREWWDLKPGAPKPKANQQKQDDGRGLVLPGYKYLGPFNGLDKGEPVNAADAAALEHDKAYDQQLKAGDNPYLRYNHADAEFQERLQEDTSFGGNLGRAVFQAKKRVLEPLGLVEEGAKTAPGKKRPVEQSPQEPDSSSGIGKKGQQPARKRLNFGQTGDSESVPDPQPLGEPPAAPSGVGSNTMAAGGGAPMADNNEGADGVGNASGNWHCDSTWLGDRVITTSTRTWALPTYNNHLYKQISSQSGGSTNDNTYFGYSTPWGYFDFNRFHCHFSPRDWQRLINNNWGFRPKKLNFKLFNIQVKEVTTNDGTTTIANNLTSTVQVFTDSEYQLPYVLGSAHQGCLPPFPADVFMIPQYGYLTLNNGSQAVGRSSFYCLEYFPSQMLRTGNNFQFSYTFEDVPFHSSYAHSQSLDRLMNPLIDQYLYYLSRTQTTSGTAGNRTLQFSQAGPSSMANQAKNWLPGPCYRQQRVSKTTNQNNNSNFAWTGATKYHLNGRDSLVNPGPAMATHKDDEDKFFPMSGVLIFGKQGAGNSNVDLDNVMITNEEEIKTTNPVATEEYGTVATNLPLNGAVHLYANTAPATGTVNSQGALPGMVWQDRDVYLQGPIWAKIPHTDGHFHPSPLMGGFGLKHPPPQILIKNTPVPANPPTTFSPAKFASFITQYSTGQVSVEIEWELQKENSKRWNPEIQYTSNYNKSTNVDFAVDTNGVYSEPRPIGTRYLTRNL

SEQ ID NO: 37 - protein, 743 aa, synthetic construct
MAADGYLPDWLEDNLSEGIREWWDLKPGAPKPKANQQKQDDGRGLVLPGYKYLGPFNGLDKGEPVNAADAAALEHDKAYDQQLKAGDNPYLRYNHADAEFQERLQEDTSFGGNLGRAVFQAKKRVLEPLGLVEEGAKTAPGKKRPVEQSPQEPDSSSGIGKKGQQPARKRLNFGQTGDSESVPDPQPLGEPPAAPSGVGSNTMAAGGGAPMADNNEGADGVGNASGNWHCDSTWLGDRVITTSTRTWALPTYNNHLYKQISSQSGGSTNDNTYFGYSTPWGYFDFNRFHCHFSPRDWQRLINNNWGFRPKKLNFKLFNIQVKEVTTNDGTTTIANNLTSTVQVFTDSEYQLPYVLGSAHQGCLPPFPADVFMIPQYGYLTLNNGSQAVGRSSFYCLEYFPSQMLRTGNNFQFSYTFEDVPFHSSYAHSQSLDRLMNPLIDQYLYYLSRTQTTSGTAGNRTLQFSQAGPSSMANQAKNWLPGPCYRQQRVSKTTNQNNNSNFAWTGATKYHLNGRDSLVNPGPAMATHKDDEDKFFPMSGVLIFGKQGAGNSNVDLDNVMITNEEEIKTTNPVATEEYGTVATNLQSAPLNGAVHLYAPATGTVNSQGALPGMVWQDRDVYLQGPIWAKIPHTDGHFHPSPLMGGFGLKHPPPQILIKNTPVPANPPTTFSPAKFASFITQYSTGQVSVEIEWELQKENSKRWNPEIQYTSNYNKSTNVDFAVDTNGVYSEPRPIGTRYLTRNL

SEQ ID NO: 38 - protein, 745 aa, synthetic construct
MAADGYLPDWLEDNLSEGIREWWDLKPGAPKPKANQQKQDDGRGLVLPGYKYLGPFNGLDKGEPVNAADAAALEHDKAYDQQLKAGDNPYLRYNHADAEFQERLQEDTSFGGNLGRAVFQAKKRVLEPLGLVEEGAKTAPGKKRPVEQSPQEPDSSSGIGKKGQQPARKRLNFGQTGDSESVPDPQPLGEPPAAPSGVGSNTMAAGGGAPMADNNEGADGVGNASGNWHCDSTWLGDRVITTSTRTWALPTYNNHLYKQISSQSGGSTNDNTYFGYSTPWGYFDFNRFHCHFSPRDWQRLINNNWGFRPKKLNFKLFNIQVKEVTTNDGTTTIANNLTSTVQVFTDSEYQLPYVLGSAHQGCLPPFPADVFMIPQYGYLTLNNGSQAVGRSSFYCLEYFPSQMLRTGNNFQFSYTFEDVPFHSSYAHSQSLDRLMNPLIDQYLYYLSRTQTTSGTAGNRTLQFSQAGPSSMANQAKNWLPGPCYRQQRVSKTTNQNNNSNFAWTGATKYHLNGRDSLVNPGPAMATHKDDEDKFFPMSGVLIFGKQGAGNSNVDLDNVMITNEEEIKTTNPVATEEYGTVATNLQSPLNGAVHLYANTAPATGTVNSQGALPGMVWQDRDVYLQGPIWAKIPHTDGHFHPSPLMGGFGLKHPPPQILIKNTPVPANPPTTFSPAKFASFITQYSTGQVSVEIEWELQKENSKRWNPEIQYTSNYNKSTNVDFAVDTNGVYSEPRPIGTRYLTRNL

SEQ ID NO: 39 - protein, 746 aa, synthetic construct
MAADGYLPDWLEDNLSEGIREWWALKPGAPQPKANQQHQDNARGLVLPGYKYLGPGNGLDKGEPVNAADAAALEHDKAYDQQLKAGDNPYLKYNHADAEFQERLKEDTSFGGNLGRAVFQAKKRLLEPLGLVEEAAKTAPGKKRPVEQSPQEPDSSAGIGKSGAQPAKKRLNFGQTGDTESVPDPQPIGEPPAAPSGVGSLTMASGGGAPVADNNEGADGVGSSSGNWHCDSQWLGDRVITTSTRTWALPTYNNHLYKQISNSTSGGSSNDNAYFGYSTPWGYFDFNRFHCHFSPRDWQRLINNNWGFRPKRLNFKLFNIQVKEVTDNNGVKTIANNLTSTVQVFTDSDYQLPYVLGSAHEGCLPPFPADVFMIPQYGYLTLNDGSQAVGRSSFYCLEYFPSQMLRTGNNFQFSYEFENVPFHSSYAHSQSLDRLMNPLIDQYLYYLSKTINGSGQNQQTLKFSVAGPSNMAVQGRNYIPGPSYRQQRVSTTVTQNNNSEFAWPGASSWALNGRNSLMNPGPAMASHKEGEDRFFPLSGSLIFGKQGTGRDNVDADKVMITNEEEIKTTNPVATESYGQVATNHQSAQLADQDYTKTAAQAQTGWVQNQGILPGMVWQDRDVYLQGPIWAKIPHTDGNFHPSPLMGGFGMKHPPPQILIKNTPVPADPPTAFNKDKLNSFITQYSTGQVSVEIEWELQKENSKRWNPEIQYTSNYYKSNNVEFAVNTEGVYSEPRPIGTRYLTRNL

SEQ ID NO: 40-53 - skipped (14 entries)

SEQ ID NO: 54 - protein, 736 aa, Adeno-associated virus 1
MAADGYLPDWLEDNLSEGIREWWDLKPGAPKPKANQQKQDDGRGLVLPGYKYLGPFNGLDKGEPVNAADAAALEHDKAYDQQLKAGDNPYLRYNHADAEFQERLQEDTSFGGNLGRAVFQAKKRVLEPLGLVEEGAKTAPGKKRPVEQSPQEPDSSSGIGKTGQQPAKKRLNFGQTGDSESVPDPQPLGEPPATPAAVGPTTMASGGGAPMADNNEGADGVGNASGNWHCDSTWLGDRVITTSTRTWALPTYNNHLYKQISSASTGASNDNHYFGYSTPWGYFDFNRFHCHFSPRDWQRLINNNWGFRPKRLNFKLFNIQVKEVTTNDGVTTIANNLTSTVQVFSDSEYQLPYVLGSAHQGCLPPFPADVFMIPQYGYLTLNNGSQAVGRSSFYCLEYFPSQMLRTGNNFTFSYTFEEVPFHSSYAHSQSLDRLMNPLIDQYLYYLNRTQNQSGSAQNKDLLFSRGSPAGMSVQPKNWLPGPCYRQQRVSKTKTDNNNSNFTWTGASKYNLNGRESIINPGTAMASHKDDEDKFFPMSGVMIFGKESAGASNTALDNVMITDEEEIKATNPVATERFGTVAVNFQSSSTDPATGDVHAMGALPGMVWQDRDVYLQGPIWAKIPHTDGHFHPSPLMGGFGLKNPPPQILIKNTPVPANPPAEFSATKFASFITQYSTGQVSVEIEWELQKENSKRWNPEVQYTSNYAKSANVDFTVDNNGLYTEPRPIGTRYLTRPL

SEQ ID NO: 55 - protein, 735 aa, Adeno-associated virus 2 [sequence omitted]

SEQ ID NO: 56 - protein, 736 aa, Adeno-assocuated virus 3
MAADGYLPDWLEDNLSEGIREWWALKPGVPQPKANQQHQDNRRGLVLPGYKYLGPGNGLDKGEPVNEADAAALEHDKAYDQQLKAGDNPYLKYNHADAEFQERLQEDTSFGGNLGRAVFQAKKRILEPLGLVEEAAKTAPGKKGAVDQSPQEPDSSSGVGKSGKQPARKRLNFGQTGDSESVPDPQPLGEPPAAPTSLGSNTMASGGGAPMADNNEGADGVGNSSGNWHCDSQWLGDRVITTSTRTWALPTYNNHLYKQISSQSGASNDNHYFGYSTPWGYFDFNRFHCHFSPRDWQRLINNNWGFRPKKLSFKLFNIQVRGVTQNDGTTTIANNLTSTVQVFTDSEYQLPYVLGSAHQGCLPPFPADVFMVPQYGYLTLNNGSQAVGRSSFYCLEYFPSQMLRTGNNFQFSYTFEDVPFHSSYAHSQSLDRLMNPLIDQYLYYLNRTQGTTSGTTNQSRLLFSQAGPQSMSLQARNWLPGPCYRQQRLSKTANDNNNSNFPWTAASKYHLNGRDSLVNPGPAMASHKDDEEKFFPMHGNLIFGKEGTTASNAELDNVMITDEEEIRTTNPVATEQYGTVANNLQSSNTAPTTGTVNHQGALPGMVWQDRDVYLQGPIWAKIPHTDGHFHPSPLMGGFGLKHPPPQIMIKNTPVPANPPTTFSPAKFASFITQYSTGQVSVEIEWELQKENSKRWNPEIQYTSNYNKSVNVDFTVDTNGVYSEPRPIGTRYLTRNL

SEQ ID NO: 57 - protein, 724 aa, Adeno-associated virus 5
MSFVDHPPDWLEEVGEGLREFLGLEAGPPKPKPNQQHQDQARGLVLPGYNYLGPGNGLDRGEPVNRADEVAREHDISYNEQLEAGDNPYLKYNHADAEFQEKLADDTSFGGNLGKAVFQAKKRVLEPFGLVEEGAKTAPTGKRIDDHFPKRKKARTEEDSKPSTSSDAEAGPSGSQQLQIPAQPASSLGADTMSAGGGGPLGDNNQGADGVGNASGDWHCDSTWMGDRVVTKSTRTWVLPSYNNHQYREIKSGSVDGSNANAYFGYSTPWGYFDFNRFHSHWSPRDWQRLINNYWGFRPRSLRVKIFNIQVKEVTVQDSTTTIANNLTSTVQVFTDDDYQLPYVVGNGTEGCLPAFPPQVFTLPQYGYATLNRDNTENPTERSSFFCLEYFPSKMLRTGNNFEFTYNFEEVPFHSSFAPSQNLFKLANPLVDQYLYRFVSTNNTGGVQFNKNLAGRYANTYKNWFPGPMGRTQGWNLGSGVNRASVSAFATTNRMELEGASYQVPPQPNGMTNNLQGSNTYALENTMIFNSQPANPGTTATYLEGNMLITSESETQPVNRVAYNVGGQMATNNQSSTTAPATGTYNLQEIVPGSVWMERDVYLQGPIWAKIPETGAHFHPSPAMGGFGLKHPPPMMLIKNTPVPGNITSFSDVPVSSFITQYSTGQVTVEMEWELKKENSKRWNPEIQYTNNYNDPQFVDFAPDSTGEYRTTRPIGTRYLTRPL

SEQ ID NO: 58 - protein, 736 aa, Adeno-associated virus 6
MAADGYLPDWLEDNLSEGIREWWDLKPGAPKPKANQQKQDDGRGLVLPGYKYLGPFNGLDKGEPVNAADAAALEHDKAYDQQLKAGDNPYLRYNHADAEFQERLQEDTSFGGNLGRAVFQAKKRVLEPFGLVEEGAKTAPGKKRPVEQSPQEPDSSSGIGKTGQQPAKKRLNFGQTGDSESVPDPQPLGEPPATPAAVGPTTMASGGGAPMADNNEGADGVGNASGNWHCDSTWLGDRVITTSTRTWALPTYNNHLYKQISSASTGASNDNHYFGYSTPWGYFDFNRFHCHFSPRDWQRLINNNWGFRPKRLNFKLFNIQVKEVTTNDGVTTIANNLTSTVQVFSDSEYQLPYVLGSAHQGCLPPFPADVFMIPQYGYLTLNNGSQAVGRSSFYCLEYFPSQMLRTGNNFTFSYTFEDVPFHSSYAHSQSLDRLMNPLIDQYLYYLNRTQNQSGSAQNKDLLFSRGSPAGMSVQPKNWLPGPCYRQQRVSKTKTDNNNSNFTWTGASKYNLNGRESIINPGTAMASHKDDKDKFFPMSGVMIFGKESAGASNTALDNVMITDEEEIKATNPVATERFGTVAVNLQSSSTDPATGDVHVMGALPGMVWQDRDVYLQGPIWAKIPHTDGHFHPSPLMGGFGLKHPPPQILIKNTPVPANPPAEFSATKFASFITQYSTGQVSVEIEWELQKENSKRWNPEVQYTSNYAKSANVDFTVDNNGLYTEPRPIGTRYLTRPL

SEQ ID NO: 59 - protein, 737 aa, Adeno-asociated virus 7
MAADGYLPDWLEDNLSEGIREWWDLKPGAPKPKANQQKQDNGRGLVLPGYKYLGPFNGLDKGEPVNAADAAALEHDKAYDQQLKAGDNPYLRYNHADAEFQERLQEDTSFGGNLGRAVFQAKKRVLEPLGLVEEGAKTAPAKKRPVEPSPQRSPDSSTGIGKKGQQPARKRLNFGQTGDSESVPDPQPLGEPPAAPSSVGSGTVAAGGGAPMADNNEGADGVGNASGNWHCDSTWLGDRVITTSTRTWALPTYNNHLYKQISSETAGSTNDNTYFGYSTPWGYFDFNRFHCHFSPRDWQRLINNNWGFRPKKLRFKLFNIQVKEVTTNDGVTTIANNLTSTIQVFSDSEYQLPYVLGSAHQGCLPPFPADVFMIPQYGYLTLNNGSQSVGRSSFYCLEYFPSQMLRTGNNFEFSYSFEDVPFHSSYAHSQSLDRLMNPLIDQYLYYLARTQSNPGGTAGNRELQFYQGGPSTMAEQAKNWLPGPCFRQQRVSKTLDQNNNSNFAWTGATKYHLNGRNSLVNPGVAMATHKDDEDRFFPSSGVLIFGKTGATNKTTLENVLMTNEEEIRPTNPVATEEYGIVSSNLQAANTAAQTQVVNNQGALPGMVWQNRDVYLQGPIWAKIPHTDGNFHPSPLMGGFGLKHPPPQILIKNTPVPANPPEVFTPAKFASFITQYSTGQVSVEIEWELQKENSKRWNPEIQYTSNFEKQTGVDFAVDSQGVYSEPRPIGTRYLTRNL

SEQ ID NO: 60 - protein, 738 aa, Adeno-associated virus 8
MAADGYLPDWLEDNLSEGIREWWALKPGAPKPKANQQKQDDGRGLVLPGYKYLGPFNGLDKGEPVNAADAAALEHDKAYDQQLQAGDNPYLRYNHADAEFQERLQEDTSFGGNLGRAVFQAKKRVLEPLGLVEEGAKTAPGKKRPVEPSPQRSPDSSTGIGKKGQQPARKRLNFGQTGDSESVPDPQPLGEPPAAPSGVGPNTMAAGGGAPMADNNEGADGVGSSSGNWHCDSTWLGDRVITTSTRTWALPTYNNHLYKQISNGTSGGATNDNTYFGYSTPWGYFDFNRFHCHFSPRDWQRLINNNWGFRPKRLSFKLFNIQVKEVTQNEGTKTIANNLTSTIQVFTDSEYQLPYVLGSAHQGCLPPFPADVFMIPQYGYLTLNNGSQAVGRSSFYCLEYFPSQMLRTGNNFQFTYTFEDVPFHSSYAHSQSLDRLMNPLIDQYLYYLSRTQTTGGTANTQTLGFSQGGPNTMANQAKNWLPGPCYRQQRVSTTTGQNNNSNFAWTAGTKYHLNGRNSLANPGIAMATHKDDEERFFPSNGILIFGKQNAARDNADYSDVMLTSEEEIKTTNPVATEEYGIVADNLQQQNTAPQIGTVNSQGALPGMVWQNRDVYLQGPIWAKIPHTDGNFHPSPLMGGFGLKHPPPQILIKNTPVPADPPTTFNQSKLNSFITQYSTGQVSVEIEWELQKENSKRWNPEIQYTSNYYKSTSVDFAVNTEGVYSEPRPIGTRYLTRNL

SEQ ID NO: 61 - protein, 736 aa, Adeno-associated virus 9
MAADGYLPDWLEDNLSEGIREWWALKPGAPQPKANQQHQDNARGLVLPGYKYLGPGNGLDKGEPVNAADAAALEHDKAYDQQLKAGDNPYLKYNHADAEFQERLKEDTSFGGNLGRAVFQAKKRLLEPLGLVEEAAKTAPGKKRPVEQSPQEPDSSAGIGKSGAQPAKKRLNFGQTGDTESVPDPQPIGEPPAAPSGVGSLTMASGGGAPVADNNEGADGVGSSSGNWHCDSQWLGDRVITTSTRTWALPTYNNHLYKQISNSTSGGSSNDNAYFGYSTPWGYFDFNRFHCHFSPRDWQRLINNNWGFRPKRLNFKLFNIQVKEVTDNNGVKTIANNLTSTVQVFTDSDYQLPYVLGSAHEGCLPPFPADVFMIPQYGYLTLNDGSQAVGRSSFYCLEYFPSQMLRTGNNFQFSYEFENVPFHSSYAHSQSLDRLMNPLIDQYLYYLSKTINGSGQNQQTLKFSVAGPSNMAVQGRNYIPGPSYRQQRVSTTVTQNNNSEFAWPGASSWALNGRNSLMNPGPAMASHKEGEDRFFPLSGSLIFGKQGTGRDNVDADKVMITNEEEIKTTNPVATESYGQVATNHQSAQAQAQTGWVQNQGILPGMVWQDRDVYLQGPIWAKIPHTDGNFHPSPLMGGFGMKHPPPQILIKNTPVPADPPTAFNKDKLNSFITQYSTGQVSVEIEWELQKENSKRWNPEIQYTSNYYKSNNVEFAVNTEGVYSEPRPIGTRYLTRNL

SEQ ID NO: 62 - protein, 738 aa, Adeno-associated virus
MAADGYLPDWLEDNLSEGIREWWDLKPGAPKPKANQQKQDDGRGLVLPGYKYLGPFNGLDKGEPVNAADAAALEHDKAYDQQLKAGDNPYLRYNHADAEFQERLQEDTSFGGNLGRAVFQAKKRVLEPLGLVEEAAKTAPGKKRPVEPSPQRSPDSSTGIGKKGQQPAKKRLNFGQTGESESVPDPQPIGEPPAGPSGLGSGTMAAGGGAPMADNNEGADGVGSSSGNWHCDSTWLGDRVITTSTRTWALPTYNNHLYKQISNGTSGGSTNDNTYFGYSTPWGYFDFNRFHCHFSPRDWQRLINNNWGFRPKRLSFKLFNIQVKEVTQNEGTKTIANNLTSTIQVFTDSEYQLPYVLGSAHQGCLPPFPADVFMIPQYGYLTLNNGSQAVGRSSFYCLEYFPSQMLRTGNNFEFSYTFEDVPFHSSYAHSQSLDRLMNPLIDQYLYYLSRTQSTGGTQGTQQLLFSQAGPANMSAQAKNWLPGPCYRQQRVSTTLSQNNNSNFAWTGATKYHLNGRDSLVNPGVAMATHKDDEERFFPSSGVLMFGKQGAGRDNVDYSSVMLTSEEEIKTTNPVATEQYGVVADNLQQANTGPIVGNVNSQGALPGMVWQNRDVYLQGPIWAKIPHTDGNFHPSPLMGGFGLKHPPPQILIKNTPVPADPPTTFSQAKLASFITQYSTGQVSVEIEWELQKENSKRWNPEIQYTSNYYKSTNVDFAVNTEGTYSEPRPIGTRYLTRNL

SEQ ID NO: 63 - protein, 736 aa, Adeno-associated virus
MAADGYLPDWLEDNLSEGIREWWALKPGAPQPKANQQHQDNARGLVLPGYKYLGPGNGLDKGEPVNEADAAALEHDKAYDQQLKAGDNPYLKYNHADAEFQERLKEDTSFGGNLGRAVFQAKKRLLEPLGLVEEAAKTAPGKKRPVEQSPQEPDSSVGIGKSGAQPAKKRLNFGQTGDTESVPDPQPIGEPPAAPSGVGSLTMASGGGAPVADNNEGADGVGSSSGNWHCDSQWLGDRVITTSTRTWALPTYNNHLYKQISNSTSGGSSNDNAYFGYSTPWGYFDFNRFHCHFSPRDWQRLINNNWGFRPKRLNFKLFNIQVKEVTDNNGVKTIANNLTSTVQVFTDSDYQLPYVLGSAHEGCLPPFPADVFMIPQYGYLTLNDGSQAVGRSSFYCLEYFPSQMLRTGNNFQFSYEFENVPFHSSYAHSQSLDRLMNPLIDQYLYYLSKTINGSGQNQQTLKFSVAGPSNMAVQGRNYIPGPSYRQQRVSTTVTQNNNSEFAWPGASSWALNGRNSLMNPGPAMASHKEGEDRFFPLSGSLIFGKQGTGRDNVDADKVMITNEEEIKTTNPVATESYGQVATNHQSAQAQAQTGWVQNQGILPGMVWQDRDVYLQGPIWAKIPHTDGNFHPSPLMGGFGMKHPPPQILIKNTPVPADPPTAFNKDKLNSFITQYSTGQVSVEIEWELQKENSKRWNPEIQYTSNYYKSNNVEFAVNTEGVYSEPRPIGTRYLTRNL

SEQ ID NO: 64 - protein, 736 aa, Adeno-associated virus
MAADGYLPDWLEDNLSEGIREWWALQPGAPKPKANQQHQDNARGLVLPGYKYLGPGNGLDKGEPVNAADAAALEHDKAYDQQLKAGDNPYLKYNHADAEFQERLKEDTSFGGNLGRAVFQAKKRLLEPLGLVEEAAKTAPGKKRPVDQSPQEPDSSSGVGKSGKQPARKRLNFGQTGDSESVPDPQPLGEPPAAPTSLGSNTMASGGGAPMADNNEGADGVGNSSGNWHCDSQWLGDRVITTSTRTWALPTYNNHLYKQISSQSGASNDNHYFGYSTPWGYFDFNRFHCHFSPRDWQRLINNNWGFRPKKLSFKLFNIQVKEVTQNDGTTTIANNLTSTVQVFTDSEYQLPYVLGSAHQGCLPPFPADVFMVPQYGYLTLNNGSQAVGRSSFYCLEYFPSQMLRTGNNFQFSYTFEDVPFHSSYAHSQSLDRLMNPLIDQYLYYLNRTQGTTSGTTNQSRLLFSQAGPQSMSLQARNWLPGPCYRQQRLSKTANDNNNSNFPWTAASKYHLNGRDSLVNPGPAMASHKDDEEKFFPMHGNLIFGKEGTTASNAELDNVMITDEEEIRTTNPVATEQYGTVANNLQSSNTAPTTRTVNDQGALPGMVWQDRDVYLQGPIWAKIPHTDGHFHPSPLMGGFGLKHPPPQIMIKNTPVPANPPTTFSPAKFASFITQYSTGQVSVEIEWELQKENSKRWNPEIQYTSNYNKSVNVDFTVDTNGVYSEPRPIGTRYLTRPL

SEQ ID NO: 65 - protein, 735 aa, Adeno-associated virus
MAADGYLPDWLEDTLSEGIRQWWKLKPGPPPPKPAERHKDDSRGLVLPGYKYLGPFNGLDKGEPVNEADAAALEHDKAYDRQLDSGDNPYLKYNHADAEFQERLKEDTSFGGNLGRAVFQAKKRVLEPLGLVEEPVKTAPGKKRPVEHSPVEPDSSSGTGKAGQQPARKRLNFGQTGDADSVPDPQPLGQPPAAPSGLGSTTMATGSGAPMADNNEGADGVGNSSGNWHCDSQWLGDRVITTSTRTWALPTYNNHLYKQISSQSGASNDNHYFGYSTPWGYFDFNRFHCHFSPRDWQRLINNNWGFRPKRLNFKLFNIQVKEVTQNGGTTTIANNLTSTVQVFTDSEYQLPYVLGSAHQGCLPPFPADVFMVPQYGYLTLNNGSQAVGRSSFYCLEYFPSQMLRTGNNFQFSYTFEDVPFHSSYAHSQSLDRLMNPLIDQYLYYLNKTQTNSGTLQQSRLLFSQAGPTNMSLQAKNWLPGPCYRQQRLSKQANGNNNSNFPWTAATKYHLNGRDSLVNPGPAMASHKDDEEKFFPMHGTLIFGKQGTNANDADLENVMITDEEEIRATNPVATEQYGTVSNNLQNSNTGPTTGTVNHQGALPGMVWQDRDVYLQGPIWAKIPHTDGHFHPSPLTGGFGLKHPPPQIMIKNTPVPANPPTNFSSAKFASFITQYSTGQVSVEIEWELQKENSKRWNPEIQYTSNYNKSVNVDFTVDTNGVYSEPRPIGTRYLTRNL

SEQ ID NO: 66 - protein, 735 aa, Adeno-associated virus
MAADGYPPDWLEDTLSEGIRQWWKLKPGPPPPKPAERHKDDSRGLVLPGYKYLGPFNGLDKGEPVNEADAAALEHDKAYDRQLDSGDNPYLKYNHADAEFQERLKEDTSFGGNLGRAVFQAKKRVLEPLGLVEEPVKTAPGKKRPVEHSPVEPDSSSGTGKAGQRPARKRLNFGQTGDADSVPDPQPLGQPPAAPSGLGSTTMATGSGAPMADNNEGADGVGNSSGNWHCDSQWLGDRVITTSTRTWALPTYNNHLYKQISSQSGASNDNHYFGYSTPWGYFDFNRFHCHFSPRDWQRLINNNWGFRPKRLNFKLFNIQVKEVTQNDGTTTIANNLTSTVQVFTDSEYQLPYVLGSAHQGCLPPFPADVFMVPQYGYLTLNNGSQAVGRSSFYCLEYFPSQMLRTGNNFQFSYTFEDVPFHSSYAHSQSLDRLMNPLIDQYLYYLNKTQTNSGTLQQSRLLFSQAGPTNMSLQAKNWLPGPCYRQQRLSKQANDNNNSNFPWTAATKYHLNGRDSLVNPGPAMASHKDDEEKFFPMHGTLIFGKQGTNANDADLENVMITDEEEIRATNPVATEQYGTVSNNLQNSNTGPTTGTVNRQGALPGMVWQDRDVYLQGPIWAKIPHTDGHFHPSPLMGGFGLKHPPPQIMIKNTPVPANPPTNFSSAKFASFITQYSTGQVSVEIEWELQKENSKRWNPEIQYTSNYNKSVNVDFTVDTNGVYSEPRPIGTRYLTRNL

SEQ ID NO: 67 - protein, 736 aa, Adeno-associated virus
MAADGYLPDWLEDTLSEGIRQWWKLKPGPPPPKPAERHKDDSRGLVLPGYKYLGPFNGLDKGEPVNEADAAALEHDKAYDRQLDSGDNPYLKYNHADAEFQERLKEDTSFGGNLGRAVFQAKKRVLEPLRPGLRKPVKTAPGKKRPVEHSPVEPDSSSGTGKAGQQPARKRLNFGQTGDADSVPDPQPLGQPPAAPSGLGSTTMATGSGAPMADNNEGADGVGNSSGNWHCDSQWLDDRVIATSTRTWALPTYNNHLYKQISSQSGACNDNHYFGYSTPWGYFDFNRFHCHFSPRDWQRLINSNWGFRPKRLNFKLFNIQVKEVTQNDGTTTIANNLTSTVQVFTDSEYQLPYVPGSAHQGCLPPFPADVFMVPQYGYLTLNNGSQAVGRSSFYCLEYFPSQMLRTGNNFQFSYTFEDVPFHSSYAHCQSLDRLMNPLIDQYLYYLNKTQTNSGTLQQSRLLFSQAGPTNMSLQAKNWLPGPCYRQQRLSKQANDNNNCNFPWTAATKYHLNGRDSLVNPGPAMASHKDDEEKFFPMHGTLIFGKQGTNANDADLENVMITDEEEIRPTNPVATEQYGTVSNNLQNSNTGPTTGTVNHQGALPGMVWQDRDVYLQGPIWAKIPHTDGHFHPSPLMGGFGLKHPPPQIMIKSTPVPANPPTNFSSAKFASSITQYSTGQVSVEIEWELQKENSKRWNPEIQYTSNYNKSVNVDFTVDTNGVYSEPRPIGTRYLTRNL

SEQ ID NO: 68 - protein, 735 aa, Adeno-associated virus
MAADGYLPDWLEDTLSEGIRQWWKLKPGPPPPKPAERHKDDSRGLVLPGYKYLGPFNGLDKGEPVNEADAAALEHDKAYDRQLDSGDNPYLKYNHADAEFQERLKEDTSFGGNLGRAVFQAKKRVLEPLGLVEEPVKTAPGKKRPVEHSPVEPDSSSGTGKAGQQPARKRLNFGQTGDADSVPDPQPLGQPPAAPSGLGSTTMATGSGAPMADNNEGADGVGNSSGNWHCDSQWLGDRVITTSTRTWALPTYNNHLYKQISSQSGASNDNHYFGYSTPWGYFDFNRFHCHFSPRDWQRLVNNNRGFRPKRLNFKLFNIQVKEVTQNDGTTTIANNLTSTVQVFTDSEYQLPYVLGSAHQGCLPPFPADVFMVPQYGYLTLNNGSQAVGRSSFYCLEYFPSQMLRTGNNFQFSYTFEDVPFHSSYAHSQSLDRLMNPLIDQYLYYLNKTQTNSGTLQQSRLLFSQAGPTNMSLQAKNWLPGPCYRQQRLSKQANDNNNSNFPWTAATKYHLNGRDSLVNPGPAMASHKDDEEKFFPMHGTLIFGKQGTNANDADLENVMITDEEEIRATNPVATEQYGTVSNNLQNSNTGPTTGTVNHQGALPGMVWQDRDVYLQGPIWAKIPHTDGHFHPSPLMGGFGLKHPPPQIMIKNTPVPANPPTNFSSAKFASFITQYSTGQVSVEIEWELQKENSKRWNPEIQYTSNYNKSVNVDFTVDTNGVYSEPRPIGTRYLTRNL

SEQ ID NO: 69 - protein, 738 aa, Adeno-associated virus
MAADGYLPDWLEDNLSEGIREWWDLKPGAPKPKANQQKQDDGRGLVLPGYKYLGPFNGLDKGEPVNAADAAALEHDKAYDQQLKAGDNPYLRYNHADAEFQERLQEDTSFGGNLGRAVFQAKKRVLEPLGLVEEGAKTAPGKKRPVEPSPQRSPDSSTGIGKTGQQPAKKRLNFGQTGDSESVPDPQPIGEPPAGPSGLGSGTMAAGGGAPMADNNEGADGVGSSSGNWHCDSAWLGDRVITTSTRPWALPTYNNHLYKQISNGTSGGSTNDNTYFGYSTPWGYFDFNRFHCHFSPRDWQRLINNNWGFRPKRLNFKLFNIQVKEVTQNEGTKTIANNLTSTIQVFTDSEYQLPYVLGSAHQGCPPPFPADVFMIPQYGYLTLNNGSQAVGRSSFYCLEYFPSQMRRTGNNFEFSYQFEDVPFHSSYAHSQSLDRLMNPLIDQYLYYLSRTQSTGGTAGTQQLLFSQAGPNNMSAQAKNWLPGPCYRQQRVSTTLSQNNNSNFAWTGATKYHLNGRDSLVNPGVAMATHKDDEERFFPSSGVLMFGKQGAGKDNVDYSSVMLTSEEEIKTTNPVATEQYGVVADNLQQQNAAPIVGAVNSQGALPGMVWQNRDVYLQGPIWAKIPHTDGNFHPSPLMGGFGLKHPPPQILIKNTPVPADPPTTFSQAKLASFITQYSTGQVSVEIEWELQKENSKRWNPEIQYTSNYYKSTNVDFAVNTEGTYSEPRPIGTRYLTRNL

SEQ ID NO: 70 - protein, 735 aa, Adeno-associated virus
MAADGYLPDWLEDTLSEGIRQWWKLKPGPPPPKPAERHKDDSRGLVLPGYKYLGPFNGLDKGEPVNEADAAALEHDKAYDRQLDSGDNPYLKYNHADAEFQERLKEDTSFGGNLGRAVFQAKKRVLEPLGLVEGPVKTAPGKKRPVEHSPAEPDSSSGTGKAGQQPARKRLNFGQTGDADSVPDPQPLGQPPAAPSGLGSTTMATGSGAPMADNNEGADGVGNSSGNWHCDSQWLGDRVITTSTRTWALPTYNNHLYKQISSQSGASNDNHYFGYSTPWGYFDFNRFHCHFSPRDWQRLINNNWGFRPKRLNFKLFNIQVKEVTQNDGTTTIANNLTSTVQVFTDSEYQLPYVLGSAHQGCLPPFPADVFMVPQYGYLTLNNGSQAVGRSSFYCLEYFPSQMLRTGNNFQFSYTFEDVPFHSSYAHSQSLDRLMNPLIDQYLYYLNKTQSNSGTLQQSRLLFSQAGPTSMSLQAKNWLPGPCYRQQRLSKQANDNNNSNFPWTAATKYHLNGRDSLVNPGPAMASHKDDEEKFFPMHGTLIFGKQGTNANDADLDNVMITDEEEIRTTNPVATEQYGYVSNNLQNSNTGPTTGTVNHQGALPGMVWQDRDVYLQGPIWAKIPHTDGHFHPSPLMGGFGLKHPPPQIMIKNTPVPANPPTNFSSAKFASFITQYSTGQVSVEIEWELQKENSKRWNPEIQYTSNYNKSVNVDFTVDTNGVYSEPRPIGTRYLTRNL

SEQ ID NO: 71 - protein, 735 aa, Adeno-associated virus
MAADGYLPDWLEDTLSEGIRQWWKLKPGPPPPKPAERHQDNSRGLVLPGYKYLGPSNGLDKGEPVNEADAAALEHDKAYDRQLDSGDNPYLKYNHADAEFQERLKEDTSFGGNLGRAVFQAKKRVLEPLGLVEEPVKTAPGKKRPVEHSPVEPDSSSGTGKAGHQPARKRLNFGQTGDADSVPDPQPLGQPPAAPTSLGSTTMATGSGAPMADNNEGADGVGNSSGNWHCDSQWLGDRVITTSTRTWALPTYNNHLYKQISSQSGASNDNHYFGCSTPWGYFDFNRFHCHFSPRDWQRLINNNWGFRPKRLNFKLFNIQVKEVTQNDGTTTIANNLTSTVQVFTDSEYPLPYVLGSAHQGCLPPFPADVFMVPQYGYLTLNNGSQAVGRSSFYCLEYFPSQMLRTGNNFTFSYTFEDVPFHSSYAHSQSLDRLMNPLIDQYLYYLNRTQSNSGTLQQSRLLFSQAGPTSMSLQAKNWLPGPCYRQQRLSKQANDNNNSNFPWTAATKYHLNGRDSLVNPGPAMASHKDDEEKFFPMHGTLIFGKQGTNANDADLEHVMITDEEEIRTTNPVATEQYGNVSNNLQNSNTGPTTENVNHQGALPGMVWQDRDVYLQGPIWAKIPHTDGHFHPSPLMGGFGLKHPPPQIMIKNTPVPANPPTNFSSAKFASFITQYSTGQVSVEIEWELQKENSKRWNPEIQYTSNYNKSVNVDFTVDTNGVYSEPCPIGTRYLTRNL

SEQ ID NO: 72 - protein, 735 aa, Adeno-associated virus
MAADGYLPDWLEDTLSEGIRQWWKLKPGPPPPKLAERHQDDSRGLVLPGYKYLGPFNGLDKGEPVNEADAAALEHDKAYDRQLDSGDNPYLKYNHADAEFQERLKEDTSFGGNLGRAVFQAKKRVLEPLGLVEEPVKTAPGKKRPVEHSPVEPDSSSGTGKAGHQPARKRLNFGQTGDADSVPDPQPLGQPPAAPTSLGSTTMATGSGAPMADNNEGADGVGNSSGNWHCDSQWLGDRVITTSTRTWALPTYNNHLYKQISSQSGASNDNHYFGYSTPWGYFDFNRFHCHFSPRDWQRLINNNWGFRPKRLNFKLFNIQVKEVTQNDGTTTIANNLTSTVQVFTDSEYQLPYVLGSAHQGCLPPFPADVFTVPQYGYLTLNNGSQAVGRSSFYCLEYFPSQMLRTGNNLTFSYTFEDVPFHSSYAHSQSLDRLMNPLIDQYLYYLNRTQSNSGTLQQSRLLFSQAGPTSMSLQAKNWLPGPCYRQQRLSKQANDNNNSNFPWTAATKYHLNGRDSLVNPGPAMASHKDDEEKFFPMHGTLIFGKQGTNANDADLEHVMITDEEEIRTTNPVATEQYGNVSNNLQNSNTGPTTENVNHQGALPGMVWQDRDVYLQGPIWAKIPHTDGHFHPSPLMGGFGLKHPPPQIMIKNTPVPANPPTNYSSAKFASFITQYSTGQVSVEIEWELRKENSKRWNPEIQYTSNYNKSVNVDFTVDTNGVYSEPRPIGTRYLTRNL

SEQ ID NO: 73 - protein, 735 aa, Adeno-associated virus
MAADGYLPDWLEDTLSEGIRQWWKLKPGPPPPKPAERHQDDSRGLVLPGYKYLGPFNGLDKGEPVNEADAAALEHDKAYDRQLDSGDNPYLKYNHADAEFQERLKEDTSFGGNLGRAVFQAKKRVLEPLGLVEEPVKTAPGKKRPVEHSPVEPDSSSGTGKAGHQPARKRLNFGQTGDADSVPDPQPLGQPPAAPTSLGSTTMATGSGAPMADNNEGADGVGNSSGNWHCDSQWLGDRVITTSTRTWALPTYNNHLYKQISSQSGASNDNHYFGYSTPWGYFDFNRFHCHFSPRDWQRLINNNWGFRPKRLNFKLFNIQVKEVTQNDGTTTIANNLTSTVQVFTDSEYQLPYVLGSAHQGCLPPFPADVFMVPQYGYLTLNNGSQAVGRSSFYCLEYFPSQMLRTGNNFTFSYTFEDVPFHSSYAHSQSLDRLMNPLIDQYLYYLNRTQSNSGTLQQSRLLFSQAGPTSMSLQAKNWLPGPCYRQQRLSKQANDNNNSNFPWTAATKYRLNGRDSLVNPGPAMASHKDDEEKFFPMHGTLIFGKQGTNANDADLEHVMITDEEEIRTTNPVATEQYGNVSNNLQNSNTGPTTENVNHQGALPGMVWQDRDVYLQGPIWAKIPHTDGHFHPSPLMGGFGLKHPPPQIMIKNTPVPANPPTNFSSAKFASFITQYSTGQVSVEIEWELQKENSKRWNPEIQYTSNYNKSVNVDFTVDTNGVYSEPRPIGTRYLTRNL

SEQ ID NO: 74 - protein, 735 aa, Adeno-associated virus
MAADGYLPDWLEDTLSEGIRQWWKLKPGPPPPKPAERHKDDSRGLVLPGYKYLGPFNGLYKGEPVDEADAAALEHDKAYDRQLDSGDNPYLKYNHADAEFQERLKEDTSFGGNLGRAVFQAKKRVLEPLGLVGEPVKTAPGKKRPVEHSPVEPDSSSGTGKAGNQPARKRLNFGQTGDADSVPDPQPLGQPPAAPSGLGSTTMATGSGAPVADNNEGADGVGNSSGNWHCDSQWLGDRVITTSTRTWALPTYNNHLYKQISSQSGASNDNHYFGYSTPWGYFDFNRFHCHFSPRDRQRLINNNWGFRPKRLNFKLFNIQVKEVTQNDGTTTIANNLTSTVQVFTDSGYQLPYVLGLAHQGCLPPFPADVFMVPQYGYLTLNNGSQAVGRSSFYCLEYFPSQMLRTGNNFQFSYTFEDVPFHSSYAHSQSLDRLMNPLIDQYLYYLNKTQSNSGTLQQSRLLFSQAGPTSMSLQAKNWLPGPCYRQQRLSKQANDNNNSNFPWTAATKYHLNGRDSLVNPGPAMASHKDDEEKFFPMHGTLIFGKQGTNANDADLDNVMITDEEEIRTTNPVATEQYGYVSNNLQNSNTGPTTGTVNHQGALPGMVWQDRDVYLQGPIWAKIPHTDGHFHPSPLMGGFGLKHPPPQIMIKNTPVPANPPTNFSSAKFASFITQYSTGQVSVEIEWELQKEDSKRWNPEIQYTSNYNKPVNVDFTVDTNGVYSEPRPIGTRYLTRNL

SEQ ID NO: 75 - protein, 735 aa, Adeno-associated virus
MAADGYLPDWLEDTLSEGIRQWWKLKPGPPPPKPAERHKDDSRGLVLPGYKYLGPFNGLYKGEPVNEADAAALEHDKAYDRQLDSGDNPYLKYNHAGAEFQERLKEDTSFGGNLGRAVFQAKKRVLEPLGLVEEPVKTAPGKKRPVEHSPVEPDSSSGTGKAGNQPARKRLNFGQTGDADSVPDPQPLGQPPAAPSGLGSTTMATGSGAPVADNNEGADGVGNSSGNWHCDSQWLGDRVITTSTRTWALPTYNNHLYKQISSQSGASNDNHYFGYSTPWGYFDFNRFHCHFSPRDWQRLINNNWGFRPKRLNFKLFNIQVKEVTQNDGTTTIANNLTSTVQVFTDSEYQLPYVLGSAHQGCLPPFPADVFMVPQYGYLTLNNGSQAVGRSSFYCLEYFPSQMLRTGNNFQFSYTFEDVPFHSSYAHSQSLDRLMNPLIDQYLYYLNKTQSNSGTLQQSRLLFSQAGPTSMSLQAKNWLPGPCYRQQRLSKQANDNNNSNFPWTAATKYHLNGRDSLVNPGPAMASHKDDEEKFFPMHGTLIFGKQGTNANDADLDNVMITDEEEIRTTNPVATEQYGYVSNNLQDSNTGPTTGTVNHQGALPGMVWQDRDVYLQGPIWAKIPHTDGHFHPSPLMGGFGLKHPPPQIMIKNTPVPANPPTNFSSAKFASFITQYSTGQVSVEIEWELQKENSKRWNPEIQYTSNYNKSVNVDFTVDTNGVYSEPRPIGTRYLTRNL

SEQ ID NO: 76 - protein, 738 aa, Adeno-associated virus
MAADGYLPDWLEDNLSEGIREWWDLKPGAPKPKANQQKQDDGRGLVLPGCKYLGPFNGLDKGEPVNAADAAALEHDKAYDQQLKAGDNPYLRYNHADAEFQERLQEDTSFGGNLGRAVFQAKKRVLEPLGLVEEGAKTAPGKKRPVEPSPQRSPDSSTGIGKTGQQPAKKRLNFGQTGDSESVPDPQPIGEPPAGPSGLGSGTMAAGGGAPMADNNEGADGVGSSSGNWHCDSTWLGDRVITTSTRTWALPTYNNHLYKQISNGTSGGSTNDNTYFGYSTPWGYFDFNRFHCHFSPRDWQRLINNNWGFRPKRLNFKLFNIQVKEVTQNEGTKTIANNLTSTIQVFTDSEYQLPYVLGSAHQGCPPPFPADVFMIPQYGYLTLNNGSQAVGRSSFYCLEYFPSQMRRTGNNFEFSYQFEDVPFHSSYAHSQSLDRLMNPLIDQYLYYLSRTQSTGGTAGTQQLLFSQAGPNNMSAQAKNWLPGPCYRQQRVSTTLSQNNNSNFAWTGATKYHLNGRDSLVNPGVAMATHKDDEERFFPSSGVLMFGKQGAGKDNVDYSSVMLTSEEEIKTTNPVATEQYGVVADNLQQQNAAPIVGAVNSQGALPGMVWQNRDVYLQGPIWAKIPHTDGNFHPSPLMGGFGLKHPPPQILIKNTPVPADPPTTFSQAKLASFITQYSTGQVSVEIEWELQKENSKRWNPEIQYTSNYNKSVNVDFTVDTNGVYSEPRPIGTRYLTRNL

SEQ ID NO: 77 - protein, 735 aa, Adeno-associated virus
MAADGYLPDWLEDTLSEGIRQWWKLKPGPPPPKPAERHKDDSRGLVLPGYKYLGPFNGLDKGEPVNEADAAALEHDKAYDRQLESGDNPYLKYNHADAEFQERLKEDTSFGGNLGRAVFQAKKRVLEPLGLVEEPVKTAPGKKRPVEHSPVEPDSSSGTGKAGQQPARKRLNFGQTGDADSVPDPQPLGQPPAAPSGLGSTTMASGSGAPVADNNEGADGVGNSSGNWHCDSQWLGDRVITTSTRTWALPTYNNHLYKQISSQSGASNDNHYFGYSTPWGYFDFNRFHCHFSPRDWQRLINNSWGFRPKRLNFKLFNIQVKEVTQNDGTTTIANNLTSTVQVFTDSEYQLPYVLGSAHQGCLPPFPADVFMVPQYGYLTLNNGSQAVGRSSFYCLEYFPSQMLRTGNNFQFSYTFEDVPFHSSYAHSQSLDRLLNPLIDQYLYYLNKTQSNSGTLQQSRLLFSQAGPTSMSLQAKNWLPGPCYRQQRLSKQANDNNNSNFPWTAATKYHLNGRDSLVNPGPAMASHKDDEEKFFPMHGTLIFGKQGTNANDADLDNVMITDEEEIRTTNPVATEQYGYVSNNLQNSNTGPTTGTVNHQGALPGMVWQDRDVYLQGPIWAKIPHTDGHFHPSPLMGGFGLKHPPPQIMIKNTPVPANPPTNFSSSKFASFITQYSTGQVSVEIEWELQKENSKRWNPEIQYTSNYNKSVNVDFTVDTNGVYSEPRPIGTRYPTRNL

SEQ ID NO: 78 - protein, 735 aa, Adeno-associated virus
MAADGYLPDWLEDTLSEGIRQWWKLKPGPPPPKPAERHKDDSRGLVLPGYRYLGPFNGLDKGEPVNEADAAALEHDKAYDRQLDSGDNPYLKYNHVDAEFQERLKEDTSFGGNLGRAVFQAKKRILEPLGLVEEPVKAAPGEKRPVEHSPAEPDSSSGTGKAGQQPARKRLNFGQTGDADSVPDPQPLGQPPAAPSGLGTNTMASGSGAPMADNNEGADGVGNSSGNWHCDSTWMGDRVITTSTRTWALPTYNNHLYKQISSQSGASNDNHYFGYSTPWGHFDFNRFHCHFSPRDWQRLINNNWGFRPKRLSFKLFNIQVKEVTQNDGTTTIANNLTSTVQVFTDSEYQLPYVLGSAHQGCLPPFPADVFMVPQYGYLTLNNGSQAVGRSSFYCLEYFPSQMLRTGNNFTFSYTFEDVPFHSSYAHSQSLDRLMNPLIDQYLYYLSRTNTPSGTTTMSRLQFSQAGASDIRDQSRNWLPGPCYRQQRVSKTAADNNNSDYSWTGATKYHLNGRDSLVNPGPAMASHKDDEEKYFPQSGVLIFGKQDSGKTNVDIEKVMITDEEEIRTTNPVATEQYGSVSTNLQSGNTQAATSDVNTQGVLPGMVWQDRDVYLQGPIWAKIPHTDGHFHPSPPMGGFGLKHPPPQILIKNTPVPANPSTTFSAAKFASFITQYSTGQVSVEIEWELQKENSKRWNPEIQYTSNYNKSVNVDFTVDTNGVYSEPRPIGARYLTRNL

SEQ ID NO: 79 - protein, 735 aa, Adeno-associated virus
MAADGYLPDWLEDTLSEGIRQWWKLKPGPPPPKPAERHKDDSRGLVLPGYKYLGPFNGLDKGEPVNEADAAALEHDKAYDRQLDSGDNPYLKYNHADAEFQERLKEDTSFGGNLGRAVFQAKKRILEPLGLVEEPVKTAPGKKRPVEHSPAEPDSSSGTGKAGQQPARKRLNFGQTGDADSVPDPRPLGQPPAAPSGLGTNTMASGSGAPMADNNEGADGVGNSSGNWHCDSTWMGDRVITTSTRTWALPTYNNHLYKQISSQSGASNDNHYFGYSTPWGYFDFNRFHCHFSPRDWQRLINNNWGFRPKRLSFKLFNIQVKEVTQNDGTTTIANNLTSTVQVFTDSEYQLPYVLGSAHQGCLPPFPADVFMVPQYGYLTLNNGSQAVGRSSFYCLEYFPSQMLRTGNNFTFSYTFEDVPFHSSYAHSQSLDRLMNPLIDQYLYYLSRTNTPSGTTTMSRLQFSQAGASDIRDQSRNWLPGPCYRQQRVSKTAADNNNSDYSWTGATKYHLNGRDSLVNPGPAMASHKDDEEKYFPQSGVLIFGKQDSGKTNVDIEKVMITDEEEIRTTNPVATEQYGSVSTNLQSGNTQAATSDVNTQGVLPGMVWQDRDVYLQGPIWAKIPHTDGHFHPSPLMGGFGLKHPPPQILIKNTPVPANPSTTFSAAKFASFITQYSTGQVSVEIEWELQKENSKRWNPEIQYTSNYNKSVNVDFTVDTNGVYSEPRPIGTRYLTRNL

SEQ ID NO: 80 - protein, 735 aa, Adeno-associated virus
MAADGYLPDWLEDTLSEGIRQWWKLKPGPPPPKPAERHKDDSRGLVLPGYKYLGPFNGLDKGEPVNEADAAALEHDKAYDRQLDSGDNPYLKYNHADAEFQERLKGDTSFGGNLGRAVFQAKKRILEPLGLVEEPVKTAPGKKRPVEHSPAEPDSSSGTGKAGQQPARKRLNFGQTGDADSVPDPQPLGQPPAAPSGLGTNTMASGSGAPMADNNEGADGVGNSSGNWHCDSTWMGGRVITTSTRTWALPTYNNHLYKQISSQSGASNDNHYFGYSTPWGYFDFNRFHCHFSPRDWQRLINNNWGFRPKRLSFKLFNIQVKEVTQNDGTTTIANNLTSTVQVFTDSEYQLPYVLGSAHQGCLPPFPADVFMVPQYGYLTLNNGSQAVGRSSFYCLEYFPSQTLRTGNNFTFSYTFEDVPFHSSYAHSQSLDRLMNPLIDQYLYYLSRTNTPSGTTTMSRLQFSQAGASDIRDQSRNWLPGPCYRQQRVSKTAADNNNSDYSWTGATKYHLNGRDSLVNPGPAMASHKDDEEKYFPQSGVLIFGKQDSGKTNVDIEKVMITDEEEIRTTNPVATEQYGSVSTNLQSGNTQAATSDVNTQGVLPGMVWQDRDVYLQGPIWAKIPHTDGHFHPSPLMGGFGLKHPPPQILIKNTPVPANPSTTFSAAKFASFITQYSTGQVSVEIEWELQKENSKRWNPEIQYTSNYNKSVNVDFTVDTNGVYSEPRPIGTRYLTRNL

SEQ ID NO: 81 - protein, 735 aa, Adeno-associated virus
MAADGYLPDWLEDTLSEGIRQWWKLKPGPPPPKPAERHKDDSRGLVLPGYKYLGPFNGLDKGEPVNEADAAALEHDKAYDRQLDSGDNPYLKYNHADAEFQERLKEDTSFGGNLGRAVFQAKKRILEPLGLVEEPVKTAPGKKRPVEHSPAEPDSSSGTGKAGQQPARKRLNFGQTGDADSVPDPQPLGQPPAAPSGLGTNTMASGSGAPMADNNEGADGVGNSSGNWHCDSTWMGDRVITTSTRTWALPTCNNHLYKQISSQSGASNDNHYFGYSTPWGYFDFNRFHCHFSPRDWQRLINNNWGFRPKRLSFKLFNIQVKEVTQNDGTTTIANNLTSTVQVFTDSEYQLPYVLGSAHQGCLPPFPADVFMVPQYGYLTLNNGSQAVGRSSFYCLEYFPSQMLRTGNNFTFSYTFEDVPFHSSYAHSQSLDRLMNPLIDQYLYYLSRTNTPSGTTTMSRLQFSQAGASDIRDQSRNWLPGPCYRQQRVSKTAADNNNSDYSWTGATKYHLNGRDSLVNPGPAMASHKDDEEKYFPQSGVLIFGKQDSGKTNVDIEKVMITDEEEIRTTNPVATEQYGSVSTYLQSGNTQAATSDVNTQGVLPGMVWQDRDVYLRGPIWAKIPHTDGHFHPSPLMGGFGLKHPPPQILIKNTPVPANPSTTFSAAKFASFITQYSTGQVSVEIEWELQKENSKRWNPEIQYTSNYNKSVNVDFTVDTNGVYSEPRPIGTRYLTRNL

SEQ ID NO: 82 - protein, 735 aa, Adeno-associated virus
MAADGYLPDWLEDTLSEGIRQWWKLKPGPPPPKPAERHKDGSRGLVLPGYKYLGPFNGLDKGEPVNEADAAALEHDKAYDRQLNSGDNPYLKYNHADAEFQERLKEDTSFGGNLGRAVFQAKKRVLEPLGLVEEPVKTAPGKKRPVEHSPAEPDSSSGTGKAGQQPARKRLNFGQTGDADSVPDPQPLGQPPAAPSGLGSTTMATGSGAPMADNNEGADGVGNSSGNWHCDSQWLGDRVITTSTRTWALPTYNNHLYKQISSQSGASNDNHYFGYSTPWGYFDFNRFHCHFSPRDWQRLINNNWGFRPKRLNFKLFNIQVKEVTQNDGTTTIANNLTSTVQVFTDSEYQLPYVLGSAHQGCLPPFPADVFMVPQYGYLTLNNGSQAVGRSPFYCLEYFPSQMLRTGNNFQFSYTFEDVPFHSSYAHSQSLDRLMNPLIDQYLYYLNKTQTNSGTLQQSRLLFSQAGPTNMSLQAKNWLPGPCYRQQRLSKQANDNNNSNFPWTAATKYHLNGRDSLVNPGPAMASHKDDEEKFFPMHGTLIFGKQGTNANDADLENVMITDEEEIRTTNPVATEQYGTVSNNLQNSNTGPTTGTVNHQGALPGMVWQDRDVYLQGPIWAKIPHTDGHFHPSPLMGGFGLKHPPPQIMIKNTPVPANPPTNFSSAKFASFITQYSTGQVSVEIEWELQKENSKRWNPEIQYTSNYNKSVNVDFTVDNNGVYSEPRPIGTRYLTRNL

SEQ ID NO: 83 - protein, 735 aa, Adeno-associated virus
MAADGYLPDWLEDTLSEGIRQWWKLKPGPPPPKPAERHKDDSRGLVLPGYKYLGPFNGLDKGEPVNEADAAALEHDKAYDRQLDSGDNPYLKYNHADAEFQERLKEDTSFGGNLGRAVFQAKKRILEPLGLVEEPVKTAPGKKRPVEHSPAEPDSSSGTGKAGQQPARKRLNFGQTGDADSVPDPQPLGQPPAAPSGLGTNTMASGSGAPMADNNEGADGVGNSSGNWHCDSTWMGDRVITTSTRTWALPTYNNHLYKQISSQSGASNDNHYFGYSTPWGYFDFNRFHCHFSPRDWQRLINNNWGFRPKRLSFKLFNIQVKEVTQNDGTTTIANNLTSTVQVFTDSGYQLPYVLGSAHQGCLPPFPADVFMVPQYGYLTLNNGSQAVGRSSFYCLEYFPSQMLRTGNNFTFSYTFEDVPFHSSYAHGQSLDRLMNPLIDQYLYYLSRTNTPSGTTTMSRLQFSQAGASDVRDQSRNWLPGPCYRQQRVSKTAADNNNSDYSWTGATKYHLNGRDSLVNPGPAMASHKDDEEKYFPQSGVLVFGKQDSGKTNVDIEKVMITDEEEIRTTNPAATEQYGSVSTNLQSGNTQAATSDVNTQGVLPGMVWQDRDVYLQGPIWAKIPHTDGHFHPSPLMGGFGLKHPPPQILIKNTPVPANPSTTFSAAKFVSFITQYSTGQVSVEIEWELQKENSKRWNPEIQYTSNYNKSVNVDFTVDTNGVYSEPRPIGTRYLTRNL

SEQ ID NO: 84 - protein, 735 aa, Adeno-associated virus
MAADGYLPDWLEDTLSEGIRQWWKLKPGPPPPKPAERHKDDSRGLVLPGYKYLGPFNGLDKGEPVNEADAAALEHDKAYDRQLDSGDNPYLKYNHADAEFQERLKEDTSFGGNLGRAVFQAKKRVLEPLSLVEEPVKTAPGKKRPVEHSPAEPDSSSGTGKSGNQPARKRLNFGQTGDSDSVPDPQPLGQPPAAPSGLGTNTMATGSGAPMADNNEGADGVGNSSGNWHCDSTWMGDRVITTSTRTWALPTYNNHLYKQISSQSGASNDNHYFGYSTPWGYFDFNRFHCHFSPRDWQRLINNNWGFRPKRLNFKLFNIQVKEVTQNDGTTTIANNLTSTVQVFTDSEYQLPYVLGSAHQGCLPPFPADVFMVPQYGYLTLNNGSQAVGRSSFYCLEYFPSQMLRTGNNFTFSYTFEDVPFHSSYAHSQSLDRLMNPLIDQYLYYLSRTNTPSGTTTQSRLQFSQAGASDIQDQSRNWLPGPCYRQQRVSKTSADNNNSEYSWTGATKYHLNGRDSLVNPGPAMASHKDDEEKFFPQSGVLIFGKQGSEKTNVDIEKVMITDEEEIRTTNPVATEQYGSVSTNLQSGNTQAATADVNTQGVLPGMVGQDRDVYLQGPTWAKIPHTDGHFHPSPLMGGFGLKHPPPQILIKNTPVPANPSTTFSAAKFASFITQYSTGQVSVEIEWELQKENSKRWNPEIQYTSNYNKSVNVDFTVDTNGVYSEPRPIGTRYLTRNL

SEQ ID NO: 85 - protein, 735 aa, Adeno-associated virus
MAADGYLPDWLEDTLSEGIRQWWKLKPGPPPPKPAERHKDDSRGLVLPGYKYLGPFNGLDKGEPVNEADAAALEHDKAYDRQLDSGDNPYLKYNHADAEFQERLKEDTSFGGNLGRAVFQAKKRVLEPLGLVEEPVKTAPGKKRPVEHSPAEPDSSSGTGKSGNQPARKRLNFGQTGDSDSVPDPQPLGQPPAAPSGLGTNTMATGSGAPMADNNEGADGVGNSSGNWHCDSTWMGDRVITTSTRTWALPTYNNHLYKQISSQSGASNDNHYFGYSTPWGYFDFNRFHCHFSPRDWQRLINNNWGFRPKRLNFKLFNIQVKEVTQNDGTTTIANNLTSTVQVFTDSEYQLPYVLGSAHQGCLPPFPADVFMVPQYGYLTLNNGSQAVGRSSFYCLGYFPSQMLRTGNNFTFSYTFEDVPFHSSYAHSQSLDRLMNPLIDQYLYYLSRTNTPSGTTTQSRLQFSQAGASDIRDQSRNWLPGPCYRQQRVSKTSADNNNSEYSWTGATKYHLNGRDSLVNPGPAMASHKDDEEKFFPQSGVLIFGKQGPEKTNVDIEKVMITDEEEIRTTNPVATEQYGSVSTNLQSGNTQAATADVNTQGVLPGMVWQDRDVYLQGPIWAKIPHTDGHFHPSPLMGGFGLKHPPPQILIKNTPVPANPSTTFSAAKFASFITQYSTGQVSVEIEWELQKENSKRWNPEIQYTSNYNKSVNVDFTVDTNGVYSEPRPIGTRYLTRNL

SEQ ID NO: 86 - protein, 736 aa, Adeno-associated virus
MAADGYLPDWLEDTLSEGIRQWWKLKPGPPPPKPAERHKDDSRGLVLPGYKYLGPGNGLDKGEPVNAADAAALEHDKAYDQQLKAGDNPYLKYNHADAEFQERLKEDTSFGGNLGRAVFQAKKRLLEPLGLVEEAAKTAPGKKRPVEQSPQEPDSSAGIGKSGSQPAKKKLNFGQTGDTESVPDPQPIGEPPAAPSGVGSLTMASGGGAPVADNNEGADGVGSSSGNWHCDSQWLGDRVITTSTRTWALPTYNNHLYKQISNSTSGGSSNDNAYFGYSTPWGYFDFNRFHCHFSPRDWQRLINNNWGFRPKRLNFKLFNIQVKEVTDNNGVKTIANNLTSTVQVFTDSDYQLPYVLGSAHEGCLPPFPADVFMIPQYGYLTLNDGGQAVGRSSFYCLEYFPSQMLRTGNNFQFSYEFENVPFHSSYAHSQSLDRLMNPLIDQYLYYLSKTINGSGQNQQTLKFSVAGPSNMAVQGRNYIPGPSYRQQRVSTTVTQNNNSEFAWPGASSWALNGRNSLMNPGPAMASHKEGEDRFFPLSGSLIFGKQGTGRDNVDADKVMITNEEEIKTTNPVATESYGQVATNHQSAQAQAQTGWVQNQGILPGMVWQDRDVYLQGPIWAKIPHTDGNFHPSPLMGGFGMKHPPPQILIKNTPVPADPPTAFNKDKLNSFITQYSTGQVSVEIEWELQKENSKRWNPEIQYTSNYYKSNNVEFAVSTEGVYSEPRPIGTRYLTRNL

SEQ ID NO: 87 - protein, 736 aa, Adeno-associated virus
MAADGYLPDWLEDTLSEGIRQWWKLKPGPPPPKPAERHKDDSRGLVLPGYKYLGPGNGLDKGEPVNAADAAALEHDKAYDQQLKAGDNPYLKYNHADAEFQERLKEDTSFGGNLGRAVFQAKKRLLEPLGLVEEAAKTAPGKKRPVEQSPQEPDSSAGIGKSGSQPAKKKLNFGQTGDTESVPDPQPIGEPPAAPSGVGSLTMASGGGAPVADNNEGADGVGSSSGNWHCDSQWLGDRVITTSTRTWALPTYNNHLYKQISNSTSGGSSNDNAYFGYSTPWGYFDFNRFHCHFSPRDWQRLINNNWGFRPKRLNFKLFNIQVKEVTDNNGVKTIANNLTSTVQVFTDSDYQLPYVLGSAHEGCLPPFPADVFMIPQYGYLTLNDGSQAVGRSSFYCLEYFPSQMLRTGNNFQFSYEFENVPFHSSYAHSQSLDRLMNPLIDQYLYYLSKTINGSGQNQQTLKFSVAGPSNMAVQGRNYIPGPSYRQQRVSTTVTQNNNSEFAWPGASSWALNGRNSLMNPGPAMASHKEGEDRFFPLSGSLIFGKQGTGRDNVDADKVMITNEEEIKTTNPVATESYGQVATNHQSAQAQAQTGWVQNQGILPGMVWQDRDVYLQGPIWAKIPHTDGNFHPSPLMGGFGMKHPPPQILIKNTPVPADPPTAFNKDKLNSFITQYSTGQVSVEIEWELQKENSKRWNPEIQYTSNYYKSNNVEFAVNTEGVYSEPRPIGTRYLTRNL

SEQ ID NO: 88 - protein, 735 aa, Adeno-associated virus
MAADGYLPDWLEDTLSEGIRQRWKLKPGPPPPEPAERHKDDSRGLVLPGYKYLGPFNGLDKGEPVNEADAAALEHDKAYDRQLDSGDNPYLKYNHADAEFQERLKEDTSFGGNLGRAVFQAKKRVLEPLGLVEEPVKTAPGKKRPVEHSPVEPDSSSGTGKAGQQPARKRLNFGQTGDADSVPDPQPLGQPPAAPSGLGTNTMATGSGAPMADNNEGADGVGNSSGNWHCDSTWMGDRVITTSTRTWALPTYNNHLYKQISSQSGASNDNHYFGYSTPWGYFDFNRFHCHFSPRDWQRLINNNWGFRPKRLNFKLFNIQVKEVTQNDGTTTIANNLTSTVQVFTDSEYQLPYVLGSAHQGCLPPFPADVFMVPQYGYLTLNNESQAVGRSSFYCLEYFPSQMLRTGNNFTFSYTFEDVPFHSSYAHSQSLGRLMNPLIDQYLYYLSRTNTPSGTTTQSRLQFSQAGASDIRDQSRNWLPGPCYRQQRVSKTSADNNNSEYSWTGATKYHLNGRDSLVNPGPAMASHKDDEEKFFPQSGVLIFGKQGSEKTNVDIEKVMITDEEEIRTTNPVATEQYGSVSTNLQRGNRQAATADVNTQGVLPGMVWQDRDVYLQGPIWAKIPHTDGHFHPSPLMGGFGLKHPPPQILIKNTPVPANPSTTFSAAKFASFITQYSTGQVSVEIEWELQKENSKRWNPEIQYTSNYNKSVNVDFTVDTNGVYSEPRPIGTRYLTRNL

SEQ ID NO: 89 - protein, 738 aa, Adeno-associated virus
MAADGYLPDWLEDNLSEGIREWWDLKPGAPKPKANQQKQDDGRGLVLPGYKYLGPFNGLDKGEPVNAADAAALEHDKAYDQQLKAGDNPYLRYNHADAEFQERLQEDTSFGGNLGRAVFQAKKRVLEPLGLVEEAAKTAPGKKRPVEPSPQRSPDSSTGIGKKGQQPAKKRLNFGQTGDSESVPDPQPIGEPPAGPSGLGSGTMAAGGGAPMADNNEGADGVGSSSGNWHCDSTWLGDRVITTSTRTWALPTYNNHLYKQISNGTSGGSTNDNTYFGYSTPWGYFDFNRFHCHFSPRDWQRLINNNWGFRPKRLSFKLFNIQVKEVTQNEGTKTIANNLTSTIQVFTDSEYQLPYVLGSAHQGCLPPFPADVFMIPQYGYLTLNNGSQAVGRSSFYCLEYFPSQMLRTGNNFEFSYTFEDVPFHSSYAHSQSLDRLMNPLIDQYLYYLSRTQSTGGTQGTQQLLFSQAGPANMSAQAKNWLPGPCYRQQRVSTTLSQNNNSNFAWTGATKYHLNGRDSLVNPGVAMATHKDDEERFFPSSGVLMFGKQGAGRDNVDYSSVMLTSEEEIKTTNPVATEQYGVVADNLQQTNTGPIVGNVNSQGALPGMVWQNRDVYLQGPIWAKIPHTDGNFHPSPLMGGFGLKHPPPQILIKNTPVPADPPTTFSQAKLASFITQYSTGQVSVEIEWELQKENSKRWNPEIQYTSNYYKSTNVDFAVNTEGTYSEPRPIGTRYLTRNL

SEQ ID NO: 90 - protein, 738 aa, Adeno-associated virus
MAADGYLPDWLEDNLSEGIREWWDLKPGAPKPKANQQKQDDGRGLVLPGYKYLGPFNGLDKGEPVNAADAAALEHDKAYDQQLKAGDNPYLRYNHADAEFQERLQEDTSFGGNLGRAVFQAKKRVLEPLGLVEEGAKTAPGKKRPVEPSPQRSPDSSTGIGKKGQQPARKRLNFGRTGDSESVPDPQPIGEPPAAPSSVGSGTMAAGGGAPMADNNEGADGVGSSSGNWHCDSTWLGDRVITTSTRTWALPTYNNHLYKQISNGTSGGSTNDNTYFGYSTPWGYLDFNRFHCHFSPRDWQRLINNNWGFRPKRLSFKLFNIQVKEVTQNEGTKTIANNLASTIQVFTDSEYQPPYVLGSAHQGCLPPFPADVFMIPQYGYLTLNNGSQAVGRSSFYCLEYFPSQMLRTGNNFSFSYTFEDVPFHSSYAHSQSLDRLMNPLIDQYLYYLSRTQSTGGTAGTQQLLFSRAGPSNMSAQARNWLPGPCYRQQRVSTTLSQNNNSNFAWTGATKYHLNGRDSLVNPGVAMATNKDDEDRFFPSSGILMFGKQGAGKDNVDYSNVMLTSEEEIKTTNPVATEQYGVVADNLQQQNTAPTVGAVNSQGALPGMVWQNRDVYLQGPIWAKIPHTDGNFHPSPLMGGFGLKHPPPQILIKNTPVPADPPTAFNQAKLNSFIAQYSTGQVSVEIEWELQKENSKRWNPEIQYTSNYYKSTNADFAVNTEGVYSEPRPIGTRYLTRNL

SEQ ID NO: 91 - protein, 738 aa, Adeno-associated virus
MAADGYLPDWLEDNLSEGIREWWDLKPGAPKPKANQQKQDDGRGLVLPGYKYLGPFNGLDKGEPVNAADAAALEHDKAYDQQLKAGDNPYLRYNHADAEFQERLQEDTSFGGNLGRAVFQAKKRVLEPLGPVEEAAKTAPGKKRPVEPPPQRSPDSSTGIGKKGQQPAKKRLNFGQTGDSESVPDPQPIGEPPAGPSGLGSGTMAAGGGAPMADNNEGADGVGSSSGNWHCDSTWLGDRVITTSTRTWALPTYNNHLYKQISNGTSGGSTNDNTYFGYSTPWGYFDFNRFHCHFSPRDWQRLINNNWGFRPKRLSFKLFNIQVKEVTQNEGTKTVANNLTSTIQVFTDSEYQLPYVLGSAHQGCLPPFPADVFMIPQYGYLTLNNGSQAVGRSSFYCLEYFPSQMLRTGNNFEFSYTFEDVPFHSSYAHSQSLDRLMNPLIDQYLYYLSRTQSTGGTQGTQQLLFSQAGPANMSAQAKNWLPGPCYRQQRVSTTLSQNNNSNFAWTGATKYHLNGRDSLVNPGVAMATHKDDEERFFPSSGVLMFGKQGAGRDNVDYSSVMLTSEEEIKTTNPVATEQYGVVADNLQQTNTGPIVGNVNSQGALPGMVWQNRDVYLQGPIWAKIPHTDGNFHPSPLMGGFGLKHPPPQILIKNTPVPADPPTTFSQAKLASFITQYSTGQVSVEIEWELQKENSKRWNPEIQYTSNYYKSTNVDFAVNTEGTYSEPRPIGTRYLTRNL

SEQ ID NO: 92 - protein, 738 aa, Adeno-associated virus
MAADGYLPDWLEDNLSEGIREWWDLKPGAPKPKANQQKQDDGRGLVLPGYKYLGPFNGLDKGEPVNAADAAALEHDKAYDQQLKAGDNPYLRYNHADAEFQERLQEDTSFGGNLGRAVFQAKKRVLEPLGLVEEAAKTAPGKKRPVEPSPQRSPDSSTGIGKKGQQPAKKRLNFGQTGDSESVPDPQPIGEPPAGPSGLGSGTMAAGGGAPMADNNEGADGVGSSSGNWHCDSTWLGDRVITTSTRTWALPTYNNHLYKQISNGTSGGSTNDNTYFGYSTPWGYFDFNRFHCHFSPRDWQRLINNNWGFRPKRLSFKLFNIQVKEVTQNEGTKTIANNLTSTIQVFTDSEYQLPYVLGSAHQGCLPPFPADVFMIPQYGYLTLNNGSQAVGRSSFYCLEYFPSQMLRTGNNFEFSYTFEDVPFHSSYAHSQSLDRLMNPLIDQYLYYLSRTQSTGGTQGTQQLLFSQAGPANMSAQAKNWLPGPCYRQQRVSTTLSQSNNSNFAWTGATKYHLNGRDSLVNPGVAMATHKDDEERFFPSSGVLMFGKQGAGRDNVDYSSVMLTSEEEIKTTNPVATEQYGVVADNLQQTNTGPIVGNVNSQGALPGMVWQNRDVYLQGPIWAKIPHTDGNFHPSPLMGGLGLKHPPPQILIKNTPVPADPPTTFSQAKLASFITQYSTGQVSVEIEWELQKENSKRWNPEIQYTSNYYKSTNVDFAVNTEGTYSEPRPIGTRYLTRNL

SEQ ID NO: 93 - protein, 737 aa, Adeno-associated virus
MAADGYLPDWLEDNLSEGIREWWDLKPGAPKPKANQQKQDDGRGLVLPGYKYLGPFNGLDKGEPVNAADAAALEHDKAYDQQLKAGDNPYPRYNHADAEFQERLQEDTPFGGNLGRAVFQAKKRVLEPLGLVEEAAKTAPGKKRPVEPSPQRSPDSSTGIGKKGQQPAKKRLNFGQTGDSESVPDPQPIGEPPAGPSGLGSGTMAAGGGAPMADNNEGADGVGNASGNWHCDSTWLGDRVITTSTRTWALPTYNNHLYKQISSASTGASNDNHYFGYSTPWGYFDFNRFHCHFSPRDWQRLINNNWGFRPKRLNFKLFNIQVKEVTTNDGVTTIANNLTSTVQVFSDSEYQLPYVLGSAHQGCLPPFPADVFMIPQYGYLTLNNGSQAVGRSSFYCLEYFPSQMLRTGNNFTFSYTFEEVPLHSSYAHSQSLDRLMNPLIVQYLYYLNRTQNQSGSAQNKDLLFSRGSPAGMSVQPKNWLPGPCYRQQRVSKTKTDNNNSNFTWTGASKYNLNGRESIINPGTAMASHKDDEDKFFPMSGVMIFGKESAGASNTALDNVMITDEEEIKATNPVATERFGTVAVNFQSSSTDPATGDVHAMGALPGMVWQDRDVYLQGPIWAKIPHTDGHFHPSPLMGGFGLKNPPPQILIKNTPVPANPPAEFSATKFASFITQYSTGQVSVEIEWELQKENSKRWNPEVQYTSNYAKSASVDFTVDNNGLYTEPRPIGTRYLTRPL

SEQ ID NO: 94 - protein, 736 aa, Adeno-associated virus
MAADGYLPDWLEDTLSEGIRQWWKLRPGPPPPKPAERHKDDSRGLVLPGYKYLGPFNGLDKGEPVNEADAAALEHDKAYDRQLDSGDNPYLKYNHADAEFQERLKEDTSFGGNLGRAVFQAKKRVLEPLGLVEEGAETAPGKKRPVEQSPQGPDSSSGIGKTGQQPAKKRLNFGQTGDSESVPDPQPLGEPPATPAAVGPTTMASGGGAPMADNNEGADGVGNASGNWHCDSTWLGDRVITTSTRTWALPTYNNHLYKQISSASTGASNDNHYFGYSTPWGYFDFNRFHCHFSPRDWQRLINNNWGFRPKRLNFKLFNIQVKEVTTNDGVTTIANNLTSTVQVFSDSEYQLPYVLGSAHQGCLPPFPADVFMIPQYGYLTLNNGSQAVGRSSFYCLEYFPSQMLRTGNNFTFSYTFEEVPFHSSYAHSQSLDRLMNPLIDQYLYYPNRTQNQSGSAQNKDLLFSRGSPAGMSVQPKNWLPGPCYRQQRVSKTKTDNNNSNFTWTGASKYNLNGRESIINPGTAMASHKDDEDKFFPMSGVMIFGKESAGASNTALDNVMITDEEEIKATNPVATERFGTVAVNFQSSSTDPATGDVHAMGALPGMVWQGRDVYLQGPIWAKIPHTDGHFHPSPLMGGFGLKNPPPQILIKNTPVPANPPAEFSATKFASFITQYSTGQVSVEIEWELQKENSKRWNPEVQYTSNYAKSANVDFTVDNNGLYTEPRPIGTRYLTRPL

SEQ ID NO: 95 - protein, 735 aa, Adeno-associated virus
MAADGYLPDWLEDTLSEGIRQWWKLKPGPPPPKPAERHRDDSRGLVLPGYKYLGPFNGLDKGEPVNEADAAALEHDKAYDRQLDSGDNPYLKYNHADAEFQERLKEDTSFGGNLGRAVFQAKKRVLEPLGLVEEPVKTAPGKKRPVEHSPVEPDSSSGTGKAGQQPARKRLNFGQTGDADSVPDPQPLGQPPAAPSGLGTNTMATGSGAPMADNNEGADGVGNSSGNWHCDSTWMGDRVITTSTRTWALPTYNNHLYKQISSQSGASNDNHYFGYSTPWGYFDFNRFHCHFSPRDWQRLINNNWGFRPKRLNFKLFNIQVKEVTQNDGTTTIANNLTSTVQVFTDSGYQLPYVLGSAHQGCLPPFPADVFMVPQYGYPTLNNGSQAVGRSSFYCLEYFPSQMLRTGNNFTFSYTFEDVPFHSSYAHSQSLDRLMNPLIDQYLYYLSTTNTPSGTTTQSRLQFSQAGASDIRDQSRNWLPGPCYRQQRVSKTSADNNNSEYSWTGATKYHLNGRDSLVNPGPAVASHKDDEEKFFPQSGVLIFGKQGSEKTNVDIEKVMITDEEEIRTTNPVATEQYGSVSTNLQRGNRQAATADVNTQGVLPGMVWQDRDVYLQGPIWAKIPHTDGHFHPSPLMGGFGLKHPPPQILIKNTPVPANPSTTFSAAKFASFITQYSTGQVSVEIEWELQKENSKRWNPEIQYTSNYNKSVNVDFTVDTNGVYSEPRPIGTRYLTRNL

SEQ ID NO: 96 - protein, 736 aa, Adeno-associated virus
MAADGYLPDWLEDTLSEGIRQWWKLKPGPPPPKPAERHKDDSRGLVLPGYKYLGPFNGLDKGEPVNEADAAALEHDKAYDRQLDSGDNPYLKYNHADAEFQERLKEDTSFGGNLGRAVFQAKKRVLEPLGLVEEGAKTAPGKKRPVEQSPQEPDSPSGIGKTGQQPAKKRLNFGQTGDSESVPDPQPLGEPPATPAAVGPTTMASGGGAPMADNNEGADGVGNASGNWHCDSTWLGDRVITTSTRTWALPTYNNHLYKQISSASTGASNDNHYFGYSTPWGYFDFNRFHCHFSPRDWQRLINNNWGFRPKRLNFKLFNIQVKEVTTNDGVTTIANNLTSTVQVFSDSEYQLPYVLGSAHQGRLPPFPADVFMIPQYGYLTLNNGSQAVGRSSSYCLEYFPSQMLRTGNNFTFSYTFEEVPLHSSCAHSQSLDRLMNPLIDQYLYYLNRTQNQSGSAQNRDLLFSRGSPAGMSVQPKNWLPGPCYRQQRVSKTKTDNNNSNFTWTGASKYNLNGRESIINPGTAMASHKDDEDKFFPMSGVMIFGKESAGASNTALDNVMITDEEEIKATNPVATERFGTVAVNFQSSSTDPATGDVHAMGALPGMVWQDRDVYLQGPIWAKIPHTDGHFHPSPLMGGFGLKNPPPQILIKNTPVPANPPAEFSATKFASFITQYSAGQVSVEIEWELQKENSKRWNPEVQYTSNYAKSANVDFTVDNNGLYTEPRPIGTRYLTRPL

SEQ ID NO: 97 - protein, 735 aa, Adeno-associated virus
MAADGYLPDWLEDTLSEGIRQWWKLKPGPPPPKPAERHRDDSRGLVLPGYKYLGPFNGLDKGEPVNEADAAALEHDKAYDRQLDSGDNPYLKYNHADAEFQERLKEDTSFGGNLGRAVFQAKKRVLEPLGLVGEPVKTAPGKKRPVEHSPVEPDSSSGTGKAGQQPARKRLNFGQTGDADSVPDPQPLGQPPAAPSGLGTNTMATGSGAPMADNNEGADGVGNSSGNWHCDSTWMGDRVITTSTRTWALPTYNNHLYKQISSQSGASNDSHYFGYSTPWGYFDFNRFHCHFSPRDWQRLINNNWGFRPKRLNFKLFNIQVKEVTQNDGTTTIANNLTSTVQVFTDSEYQLPYVLGSAHQGCLPPFPADVFMVPQYGYLTLNNGSQAVGRSSFYCLEYFPSQMLRTGNNFTFSYTFEDVPFHSSYAHSQSLDRLMNPLIDQYLYYLSTTNTPSGTTTQSRLQFSQAGASDIRDQSRNWLPGPCYRQQRVSKTSADNNNSEYSWTGATKYHLNGRDSLVNPGPAMASHKDNEEKFFPQSGVLIFGKQGSEKTNVDIEKVMITDEEEIRTTNPVATEQYGSVSTNLQRGNRQAATADVNTQGVLPGMVWQDRDVYLQGPIWAKIPHTDGHFHPSPLMGGFGLKHPPPQILIKNTPVPANPSTTFSAAKFASFITQYSTGQVSVEIEWELQKENSKRWNPEIQYTSNYNKSVNVDFTVDTNGVYSEPRPIGTRYLTRNL

SEQ ID NO: 98 - protein, 736 aa, Adeno-associated virus
MAADGYLPDWLEDNLSEGIREWWDLKPGAPKPKANQQKQDDGRGLVLPGYKYLGPFNGLDKGEPVNAADAAALEHDKAYDQQLKAGDNPYLRYNHADAEFQERLQEDTSFGGNLGRAVFQAKKRVLEPLGLVEEGAKTAPGKKRPVEQSPQEPDSSSGIGKTGQQPAKKRLNFGQTGDSESVPDPQPLGEPPATPAAVGPTTMASGGGAPMADNNEGADGVGNASGNWHCDSTWLGDRVITTSTRTWALPTYNNHLYKQISSTSTGASNDNHYFGYGTPWGYFDFNRFHCHFSPRDWQRLINNNWGFRPKRLNFKLFNIQVEEVTTNDGVTTIANNLTSTVQVFSDSEYQLPYVLGSAHQGCLPPFPADVFMIPQYGYLTLNNGSQAVGRSSFYCLEYFPSQMLRTGNNFTFSYTFEEVPFHSSYAHSQSLDRLMNPLIDQYLYYLNRTQNQSGSAQNKDLLFSRGSPAGMSVQPKNWLPGPCYRQQRVSKTKTDNNNSNFTWTGASKYNLNGRESIINPGTAVASHKDDEDKFFPMSGVMIFGKESAGASSTALDNVMITDEEEIKATNPVATERFGTVAVNFQSSSTDPATGDVHAMGALPGMVWQDRDVYLQGPIWAKIPHTDGHFHPSPLMGGFGLKNPPPQILIKNTPVPANPPAEFSATKFASFITQYSTGQVSVEIEWELQKENSKRWNPEVQYTSNYAKSANVDFTVDNNGLYTEPRPIGTRYLTRPL

SEQ ID NO: 99 - protein, 735 aa, Adeno-associated virus
MAADGYLPDWLEDTLSEGIRQWWKLKPGPPPPKPAERHKDDSRGLVLPGYKYLGPFNGLDKGEPVNEADAAALEHDKAYDRQLDSGDNPYLKYNHADAEFQERLKEDTSFGGNLGRAVFQAKKRVLEPLGLVGEPVKTAPGKKRPVEHSPVEPDSSSGTGKAGQQPARKRLNFGQTGDADSVPDPQPLGQPPAAPSGLGTNTMATGSGAPMADNNEGADGVGNSSGNWHCDSTWMGDRVITTSTRTWALPTYNNHLYKQISSQSGASNDNHYFGYSTPWGYFDFNRFHCHFSPRDWQRLINNNWGFRPKRLNFKLFNIQVKEVTQNDGTTTIANNLTSTVQVFTDSEYQLPYVLGSAHQGCLPPFPADVFMVPQYGYLTLNNGSQAVGRSSFYCLEYFPSQMLRTGNNFTFSYTFEDVPFHSGYAHSQSLDRLMNPLIDQYLYYLSTTNTPSGTTTQSRLQFSQAGASDIRDQSRNWLPGPCYRQQRVSKTSADNNNSEYSWTGATKYHLNGRDSLVNPGPAMASHKDNEEKFFPQSGVLIFGKQGSEKTNVDIEKVMITDEEEIRTTNPVATEQYGSVSTNLQRGNRQAATADVNTQGVLPGMVWQDRDVYLQGPIWAKIPHTDGHFHPSPLMGGFGLKHPPPQILIKNTPVPANPSTTFSAAKFASFITQYSTGQVSVEIEWELQKENSKRWNPEIQYTSNYNKSVNVDFTVDTNGVYSEPRPIGTRYLTRNL

SEQ ID NO: 100 - protein, 735 aa, Adeno-associated virus
MAADGYLPDWLEDTLSEGIRQWWKLKPGPPPPKPAERHKDDSRGLVLPGYKYLGPFNGLDKGEPVNEADAAALEHDKAYDRQLDSGDNPYLKYNHADAEFQERLKEDTSFGGNLGRAVFQAKKRVLEPLGLVGEPVKTAPGKKRPVEHSPVEPDSSSGTGKAGQQPARKRLNFGQTGDADSVPDPQPLGQPPAAPSGLGTNTMATGSGAPMADNNEGADGVGNSSGNRHCDSTWMGDRVITTSTRTWALPTYNNHLYRQISSQSGASNDNHYFGYSTPWGYFDFNRFHCHFSPRDWQRLINNNWGFRPKRLNFKLFNIQVKEVTQNDGTTTIANNLTSTVQVFTDSEYQLPYVLGSAHQGCLPPFPADVFMVPQYGYLTLSNGSQAVGRSSFYCPEYFPSQMLRTGNNFTFSYTFEDVPFHSSYAHSQSLDRLMNPLIDQYLYYLSTTNTPSGTTTQSRLQFSQAGASDIRDQSRNWLPGPCYRQQRVSKTSADNNNSEYSWTGATKYHLNGRDSLVNPGPAMASHKDNEEKFFPQSGVLIFGKQGSEKTNVDIEKVMITDEEEIRTTNPVATEQYGSVSTNLQRGNRQAATADVNTQGVLPGMVWQDRDVYLQGPIWAKIPHTDGHFHPSPLMGGFGPKHPPPQILIKNTPVPANPSTTFSAAKFASFITQYSTGQVSVEIEWELQKENSKRWNPEIQYTSNYNKSVNVDFTVDTNGVYSEPRPIGTRYLTRNL

SEQ ID NO: 101 - protein, 734 aa, Adeno-associated virus
MAADGYLPDWLEDTLSEGIRQWWKLKPGPPPPKPAERHKDDSRGLVLPGYKYLGPFNGLDKGEPVNEADAAALEHDKAYDRQLDSGDNPYLKYNHADAEFQERLKEDTSFGGNLGRAVFQAKKRVLEPLGLVEEPVKTAPGKKRPVEHSPAEPDSSSGTGKAGQQPARKRLNFGQTGDADSVPDPQPLRQPPAAPTSLGSTTMATGSGAPMADNNEGADGVGNSSGNWHCDSQWLGDRVITTSTRTWALPTYNNHLYKQISSQSGASNDNHYFGYSTPWGYFDFNRFHCHFSPRDWQRLINNNWGFRPKRLNFKLFNIQVKEVTQNDGTTTIANNLTSTVQVFTDSEYQLPYVLGSAHQGCLPPFPADVFMVPQYGYLTLNNGSQAVGRSSFYCLEYFPSQMLRTGNNFQFSYTFEDVPFHSSYAHSQSLDRLMNPLIDQYLYYLNRTQTASGTQQSRLLFSQAGPTSMSLQAKNWLPGPCYRQQRLSKQANDNNNSNFPWTGATKYYLNGRDSLVNPGPAMASHKDDEEKFFPMHGTLIFGKEGTNATNAELENVMITDEEEIRTTNPVATEQYGYVSNNLQNSNTAASTETVNHQGALPGMVWQDRDVYLQGPIWAKIPHTDGHFHPSPLMGGFGLKHPPPQIMIKNTPVPANPPTNFSSAKFASFITQYSTGQVSVEIEWELQKENSKRWNPEIQYTSNYNKSVNVDFTVDTNGVYSEPRPIGTRYLTRNL

SEQ ID NO: 102 - protein, 734 aa, Adeno-associated virus
MAADGYLPDWLEDTLSEGIRQWWKLKPGPPPPKPAERHKDDSRGLVLPGYKYLGPFNGLDKGEPVNEADAAALEHDKAYDRQLDSGDNPYLKYNHADAEFQERLKEDTSFGGNLGRAVFQAKKRVLEPLGLVEEPVKTAPGKKRPVEHSPAEPDSSSGTGKAGQQPARKRLNFGQTGDADSVPDPQPLGQPPAAPTSLGSTTMATGSGAPMADNNEGADGVGNSSGNWHCDSQWLGDRVITTSTRTWALPTYNNHLYKQISSQSGASNDNHYFGYSTPWGYFDFNRFHCRFSPRDWQRLINNNWGFRPKRLNFKLFNIQVKEVTQNDGTTTIANNLTSTVQVFTDSEYQLPYVLGSAHQGCLPPFPADVFMVPQYGYLTLNNGSQAVGRSSFYCLEYFPSQMLRTGNNFQFSYTFEDVPFHSSYAHSQGLDRLMNPLIDQYLYYLNRTQTASGTQQSRLLFSQAGPTSMSLQAKNWLPGPCYRQQRLSKQANDNNNSNFPWTGATKYHLNGGDSLVNPGPAMASHKDDEEKFFPMHGTLIFGKEGTNATNAELENVMITDEEEIRTTNPVATEQYGYVSNNLQNSNTAASTETVNHQGALPGMVWQDRDVYLRGPIWAKIPHADGHFHPSPLMGGFGLKHPPPQIMIKNTPVPANPPTNFSSAKFASFITQYSTGQVSVEIEWELQKENSKRWNPEIQYTSNYNKSVNVDFTVDTNGVYSEPRPIGTRYLTRNL

SEQ ID NO: 103 - protein, 734 aa, Adeno-associated virus
MAADGYLPDWLEDTLSEGIRQWWKLKPGPPPPKPAERHKDDSRGLVLPGYKYLGPFNGLDKGEPVNEADAAALEHDKAYDRQLDSGDNPYLKYNHADAEFQERLKEDTSFGGNLGRAVFQAKKRVLEPLGLVEEPVKTAPGKKRPVEHSPAEPDSSSGTGKAGQQPARKRLNFGQTGDADSVPDPQPLGQPPAAPTSLGSTTMATGSGAPMADNNEGADGVGNSSGNWHCDSQWLGDRVITTSTRTWALPTYNNHLYKQISSQSGASNDNHYFGYSTPWGYFDFNRFHCHFSPRDWQRLINNNWGFRPKRLNFKLFNIQVKEVTQNDGTTTIANNLTSTVQVFTDSEYQLPYVLGSAHQGCLPPFPADVFMVPQYGYLTLNNGSQAVGRSSFYCLECFPSQMLRTGNNFQFSYTFEDVPFHSSYAHSQSLDRLMNPLIDQYLYYLNRTQTASGTQQSRLLFSQAGPTSMSLQAKNWLPGPCYRQQRLSKQANDNNNSNFPWTGATKYHLNGRDSLVNPGPAMASHKDDEEKFFPMHGTLIFGKEGTNATNAELENVMITDEEEIRTTNPVATEQYGYVSNNLQNSNTAASTETVNHQGALPGMVWQDRDVYLQGPIWAKIPHTDGHFHPSPLMGGFGLKHPPPQIMIKNTPVPANPPTNFSSAKFASFITQYSTGQVSVEIEWELQKENSKRWNPEIQYTSNYNKSVNVDFTVDTNGVYSEPRPIGTRYLTRNL

SEQ ID NO: 104 - protein, 735 aa, Adeno-associated virus
MAADGYLPDWLEDTLSEGIRQWWKLKPGPPPPKPAERHKDDSRGLVLPGYKYLGPFNGLDKGEPVNEADAAALEHDKAYDRQLDSGDNPYLKYNHADAEFQERLKEDTSFGGNLGRAVFQAKKRVLEPLGLVEEPVKTAPGKKRPVEHSPVEPDSSSGTGKAGNQPARKRLNFGQTGDADSVPDPQPLGQPPASPSGLGTNTMATGSGAPMADNNEGADGVGNSSGNWHCDSTWMGDRVVTTSTRTWALPTYNNHLYKQISSQSGASNDNHYFGYSTPWGYFDFNRFHCHFSPRDWQRLINNNWGFRPKRLNFKLFNIQVKEVTQNDGTTTIANNLTSTVQVFTDLEYQLPYVLGSAHQGCLPPFPADVFMVPQYGYLTLNNGSQAVGRSSFYCLEYFPSQMLRTGNNFTFSYTFEDVPFHSSYAHSQSLDRLMNPLIDQYLYYLSRTNTPSGTTTQSRLQFSQAGASDIRDQSRNWLPGPCYRQQRVSKTAADNNNSEYSWTGATKYHLNGRDSLVNPGPAMASHKDDEEKFFPQSGVLIFGKQGSEKTNVDIEKVMITDEEEIRTTNPVATEQYGSVSTNLQSGNTQAATSDVNTQGVLPGMVWQDRDVYLQGPIWAKIPHTDGHFHPSPLMGGFGLKHPPPQILIKNTPVPANPSTTFSAAKFASFITQYSTGQVSVEIEWELQKENSKRWNPEIQYTSNYNKSVNVDFTVDTNGVYSEPRPIGTRYLTRNL

SEQ ID NO: 105 - protein, 734 aa, Adeno-associated virus
MAADGYLPDWLEDTLSEGIRQWWKLKPGPPPKPAERHKDDSRGLVLPGYKYLGPFNGLDKGEPVNEADAAALEHDKAYDRQLDSGDNPYLKYNHADAEFQERLKEDTSFGGNLGRAVFQAKKRVLEPLGLVEEPVKTAPGKKRPVEHSPVEPDSSSGTGKAGNQPARKRLNFGQTGDADSVPDPQPLGQPPAAPSGLGTNTMATGSGAPMADNNEGADGVGNSSGDWHCDSTWMGDRVITTSTRTWALPTYNNHLYKQISSQSGASNDNHYFGYSTPWGYFDFNRFHCHFSPRDWQRLINNNWGFRPKRLNLKLFNIQVKEVTQNDGTTTIANNLTSTVQVFTDLEYQLPYVLGSAHQGCLPPFPADVFMVPQYGYLTLNNGSQAVGRSSFYCLEYFPSQMLRTGNNFTFSYTFEDVPFHSSYAHSQSLDRLMNPLIDQYLYYLSRTNTPSGTTTQSRLQFSQAGASDIRDQSRNWLPGPCYRQQRVSKTAADNNNGEYSWTGATKYHLNGRDSLVNPGPAMASHKDDEEKFFPQSGVLIFGKQGSEKTNVDIEKVMITDEEEIRTTNPVATEQYGSVSTNLQSGNTRAATSDVNTQGVLPGMVWQDRDVYLQGPIWAKIPHTDGHFHPSPLMGGFGLKHPPPQILIKNTPVPANPSTTFSAAKFASFITQYSTGQVSVEIEWELQKENSKRWNPEIQYTSNYNKSVNVDFTVDTNGVYSEPRPIGTRYLTRNL

SEQ ID NO: 106 - protein, 735 aa, Adeno-associated virus
MAADGYLPDWLEDTLSEGIRQWWKLKPGPPPPKPAERHKDDSRGLVLPGYKYLGPFNGLDKGEPVNEADAAALEHDKAYDRQLDSGDNPYLKYNHADAEFQERLKEDTSFGGNLGRAVFQAKKRVLEPLGLVEEPVKTAPGKKRPVEHSPVEPDSSSGTGKAGQQPARKRLNFGQTGDADSVPDPQPLGQPPAAPSGLGSTTMATGSGAPMADNNEGADGVGNSSGNWHCDSQWLGDRVITTSTRTWALPTYNNHLYKQISSQSGASNDNHYFGYSTPWGYFDFNRFHCHFSPRDWQRLINNNWGFRPKRLNFKLFNIQVKEVTQNDGTTTIANNLTSTVQVFTDSEYQLPYVLGSAHQGCLPPFPADVFMVPQYGYLTLNNGSQAVGRSSFYCLEYFPSQMLRTGNNFQFSYTFEDVPFHSSYAHSQSLDRLMNPLVDQYLYYLNKTQTNSGTLQQSRLLFSQAGPTNMSLQAKNWLPGPCYRQQRLSKQANDNNNSNFPWTAATKYHLNGRDSLVNPGPAMASHKDDEEKFFPMHGTLIFGKQGTNANDADLENVMITDEEEIRTTNPVATEQYGTVSNNLQNSNTGPTTGTVNHQGALPGMVWQDRDVYLQGPIWAKIPHTDGHFHPSPLMGGFGLKHPPPQIMIKNTPVPANPPTNFSSAKFASFITQYSTGQVSVEIEWELQKENSKRWNPEIQYTSNYNKSVNVDFTVDTNGVYSEPRPIGTRYLTRNL

SEQ ID NO: 107 - protein, 735 aa, Adeno-associated virus
MAADGYLPDWLEDTLSEGIRQWWKLKPGPPPPKPAERHKDDSRGLVLPGYKYLGPFNGLDKGEPVNEADAAALEHDKAYDRQLDSGDNPYLKYNHADAEFQERLKEDTSFGGNLGRAVFQAKKRVLEPLGLVEEPVKTAPGKKRPVEHPPVEPDSSSGTGKAGQQPARKRLNFGQTGDADSVPDPQPLGQPPAAPSGLGSTTMATGSGAPMADNNEGADGVGNSSGNWHCDSQWLGDRVITTSTRTWALPTYNNHLYKQISSQSGASNDNHYFGYSTPWGYFDFNRFHCHFSPRDWQRLINNNWGFRPKRLNFKLFNIQVKEVTQNDGTTTIANNLTSTVQVFTDSEYQLPYVLGSAHQGCLPPFPADVFMVPQYGYLTLNNGSQAVGRSSFYCLEYFPSQMLRTGNNFQFSYTFEDVPFHSSYAHSQSLDRLMNPLIDQYLYYLNKTQTNSGTLQQSRLLFSQAGPTNMSLQAKNRLPGPCYRQQRLSKQANDNNNSNFPWTAATKYHLNGRDSLVNPGPAMASHKDDEEKFFPMHGTLIFGKQGTNANDADLENVMITDEEEIRTTNPVATEQYGTVSNNLQNSNTGPTTGTVNHQGALPGMVWQDRDVYLQGPIWAKIPHTDGHFHPSPLVGGFGLKHPPPQIMIKNTPVPANPPTNFSSAKFASFITQYSTGQVSVEIEWELQKENSKRWNPEIQYTSNYNKSVNVDFTVDTNGVYSEPRPIGTRYLTRNL

SEQ ID NO: 108 - protein, 735 aa, Adeno-associated virus
MAADGYLPDWLEDTLSEGIRQWWKLKPGPPPPKPAERHKDDSRGLVLPGYKYLGPFNGLDKGEPVNEADAAALEHDKAYDRQLDSGDNPYPKYNHADAEFQERLKEDTSFGGNLGRAVFQAKKRVLEPLGLVEEPVKTAPGKKRPVEHSPAEPDSSSGTGKAGQQPARKRLNFGQTGDADSVPDPQPLGQPPAAPSGLGTNTMATGSGAPMADNNEGADGVGNSSGNWHCDSTWMGDRVITTSTRTWALPTYNNHLYKQISSQSGASNDNHYFGYSTPWGYFDFNRFHCHFSPRDWQRLINNNWGFRPKRLNFKLFNIQVKEVTQNDGTTTIANNLTSTVQVFTDSEYQLPYVLGSAHQGCLPPFPADVFMVPQYGYLTLNNGSQAVGRSSFYCLEYFPSQMLRTGNNFTFSYTFEDVPFHSSYAHSQSLDRLMNPLIDQYLYYLSRTNTPSGTTTQSRLQFSQAGASDIRDQSRNWLPGPCYRQQRVSKTSADNNNSEYSWTGATKYHLNGRDSLVNPGPAMASHKDDEEKFFPQSGVLIFGKQDSGKTNVDIEKVMITDEEEIRTTNPVATEQYGSVSTNLQSGNTQAATSDVNTQGVLPGMVWQDRDVYLQGPIWAKIPHTDGHFHPSPLMGGFGLKHPPPQILIKNTPVPANPSTTFSAAKFASFITQYSTGQVSVEIEWELQKENSKRWNPEIQYTSNYNKSVNVDFTVDTNGVYSEPRPIGTRYLTRNL

SEQ ID NO: 109 - protein, 738 aa, Adeno-associated virus
MAADGYLPDWLEDNLSEGIREWWDLKPGAPKPKANQQKQDDGRGLVLPGYKYLGPFNGLDKGEPVNAADAAALEHDKAYDQQLKAGDNPYLRYNHADAEFQERLQEDTSFGGNLGRAVFQAKKRVLEPLGLVEEAAKTAPGKKRPVEPSPQRSPDSSAGIGKKGQQPAKKRLNFGQTGDSESVPDPQPIGEPPAGPSGLGSGTMAAGGGAPMADNNEGADGVGSSSGNWHCDSTWLGDRVITTSTRTWALPTYNNHLYKQISNGTSGGSTNDNTYFGYSTPWGYFDFNRFHCHFSPRDWQRLINNNWGFRPKRLSFKLFNIQVKEVTQNEGTETIANNLTSTIQVFTDSEYQLPYVLGSAHQGCLPPFPADVFMIPQYGYLTLNNGSQAVGRSSFYCLEYFPSQMLRTGNNFEFSYTFEDVPFHSSCAHSQSSDRLMNPLIDQYLYYLSRTRSTGGTQGTQQLLFSQAGPANMSAQAKNWLPGPCYRQQRVSTTLSQNNNSNFAWTGATKYHLNGRDSLVNPGVAMATHKDDEERFFPSSGVLMFGKQGAGRDNVDYSSVMLTSEEEIKTTNPVATEQYGVVADNLQQTNTGPIVGNVNSQGALPGMVWQNRDVYLQGPIWAKIPHTDGNFHPSPLMGGFGLKHPPPQILIKNTPVPADPPTTFSQAKLASFITQYSTGQVSVEIEWELQKENSKRWNPEIQYTSNYYKSTNVDFAVNTEGTYSEPRPIGTRYLTRNL

SEQ ID NO: 110 - protein, 738 aa, Adeno-associated virus
MAADGYLPDWLEDNLSEGIREWWDLKPGAPKPKANQQKQDDGRGLVLLGYKYLGPFNGLDKGEPVNAADAAALEHDKAYDQQLKAGDNPYLRYNHADAEFQERLQEDTSFGGNLGRAVFQAKKRVLEPLGLVEEAAKTAPGKKRPVEPSPQRSPDSSTGIGKKGQQPAKKRLNFGQTGDSESVPDPQPIGEPPAGPSGLGSGTMAAGGGAPMADNNEGADGVGSSSGNWHCDSTWLGDRVITTSTRTWALPTYNNHLYKQISNGTSGGSTNDNTYFGYSTPWGYFDFNRFHCHFSPRDWQRLINNNWGFRPKRLSFKLFNIQVKEVTQNEGTKTIANNLTSTIQVFTDSEYQLPYVLGSAHQGCLPPFPADVFMIPQYGYLTLNNGSQAVGRSSFYCLEYFPSQMLRTGNNFEFSYTFEDVPFHSGYAHSQSLDRLMNPLIDQYLYYLSRTQSTGGTQGTQQLLFSQAGPANMSAQAKNWLPGPCYRQQRVSTTLSQNNNSNFAWTGATKYHLNGRDSLVNPGVAMATHKDDEERFFPSSGVLMFGKQGAGRDNVDYSSVMLTSEEEIKTTNPVATEQYGVVADNLQQTNTGPIVGNVNSQGALPGMVWQNRDVYLQGPIWAKIPHTDGNFHPSPLMGGFGLKHPPPQILIKNTPVPADPPTTFSQAKLASFITQYSTGQVSVEIEWELQKENSKRWNPEIQYTSNYYKSTNVDFAVNTEGTYSEPRPIGTRYLTRNL

SEQ ID NO: 111 - protein, 738 aa, Adeno-associated virus
MAADGYLPDWLEDNLSEGIREWWDLKPGAPKPKANQQKQDDGRGLVLPGYKYLGPFNGLDKGEPVNAADAAALEHDKAYDQQLKAGDNPYLRYNHADAEFQERLQEDTSFGGNLGRAVFQAKKRVLEPLGLVEEGAKTAPGKKRPVEPSPQRSPDSSTGIGKKGQQPAKKRLNFGQTGDSESVPDPQPIGEPPAGPSGLGSGTMAAGGGAPMADNNEGADGVGSSSGNWHCDSTWLGDRVITTSTRTWALPTYNNHLYKQISNGTSGGSTNDNTYFGYSTPWGYFDFNRFHCHFSPRDWQRLINNNWGFRPKRLNFKLFNIQVKEVTQNEGTKTIANNLTSTIQVFTDSEYQLPYVLGSAHQGCLPPFPADVFMIPQYGYLTLNNGSQAVGRSSFYCLEYFPSQMLRTGNNFEFSYQFEDVPFHSSYAHSQSLDRLMNPLIDQYLYYLSRTQSTGGTAGTQQLLFSQAGPNNMSAQAKNWLPGPCYRQQRVSTTLSQNNNSNFAWTGATKYHLNGRDSLVNPGVAMATHKDDEERFFPSSGVLMFGKQGAGKDNVDYSSVMLTSEEEIKTTNPVATEQYGVVADNLQQQNAAPIVGAVNSQGALPGMVWQNRDVYLQGPIWAKIPHTDGNFHPSPLMGGFGLKHPPPQILIKNTPVPADPPTTFSQAKLASFITQYSTGQVSVEIEWELQKENSKRWNPEIQYTSNYYKSTNVDFAVNTDGTYSEPRPIGTRYLTRNL

SEQ ID NO: 112 - protein, 728 aa, Adeno-associated virus
MAADGYLPDWLEDNLSEGIREWWDLKPGAPKPKANQQKQDDGRGLVLPGYKYLGPFNGLDKGEPVNEADAAALEHDKAYDKQLEQGDNPYLKYNHADAEFQERLQEDTSFGGNLGRAVFQAKKRVLEPLGLVEEGAKTAPGKKRPIESPDSSTGIGKKGQQPAKKKLNFGQTGDSESVPDPQPLGEPPAAPSGLGSGTMAAGGGAPMADNNEGADGVGNASGNWHCDSTWLGDRVITTSTRTWALPTYNNHLYKQISSQSGATNDNHFFGYSTPWGYFDFNRFHCHFSPRDWQRLINNNWGFRPRKLRFKLFNIQVKEVTTNDGVTTIANNLTSTIQVFSDSEYQLPYVLGSAHQGCLPPFPADVFMIPQYGYLTLNNGSQSVGRSSFYCLEYFPSQMLRTGNNFEFSYTFEEVPFHSSYAHSQSLDRLMNPLIDQYLYYLARTQSTTGSTRELQFHQAGPNTMAEQSKNWLPGPCYRQQRLSKNIDSNNNSNFAWTGATKYHLNGRNSLTNPGVAMATNKDDEDQFFPINGVLVFGETGAANKTTLENVLMTSEEEIKTTNPVATEEYGVVSSNLQSSTAGPQTQTVNSQGALPGMVWQNRDVYLQGPIWAKIPHTDGNFHPSPLMGGFGLKHPPPQILIKNTPVPANPPEVFTPAKFASFITQYSTGQVSVEIEWELQKENSKRWNPEIQYTSNYAKSNNVEFAVNNEGVYTEPRPIGTRYLTRNL

SEQ ID NO: 113 - protein, 735 aa, Adeno-associated virus
MAADGYLPDWLEDNLSEGIREWWDLKPGAPKPKANQQKQDDGRGLVLPGYKYLGPFNGLDKGEPVNEADAAALEHDKAYDKQLEQGDNPYLKYNHADAEFQERLQEDTSFGGNLGRAVFQAKKRVLEPLGLVEEGAKTAPGKKRPVEPSPQRSPDSSTGIGKTGQQPAKKRLNFGQTGDSESVPDPQPIGEPPAGPSGLGSGTMAAGGGAPMADNNEGADGVGSSSGNWHCDSTWLGDRVITTSTRTWALPTYNNHLYKQISNGTSGGSTNDNTYFGYSTPWGYFDFNRFHCHFSPRDWQRLINNNWGFRPRKLRFKLFNIQVKEVTTDDGVTTIANNLTSTIQVFSDSEYQLPYVLGSAHQGCLPPFPADVFMIPQYGYLTLNNGSQSVGRSSFYCLEYFPSQMLRTGNNFEFSYTFEEVPFHSSYAHSQSLDRLMNPLIDQYLYYLARTQSTTGSTRELQFHQAGPNTMAEQSKNWLPGPCYRQQRLSKNIDSNNNSNFAWTGATKYHLNGRNSLTNPGVAMATNKDDEDQFFPINGVLVFGKTGAANKTTLENVLMTSEEEIKTTNPVATEEYGVVSSNLQSSTAGPQTQTVNSQGALPGMVWQNRDVYLQGPIWAKIPHTDGNFHPSPLMDGFGLKHPPPQILIKNTPVPANPPEVFTPAKFASFITQYSTGQVSVEIEWELQKENSKRWNPEIQYTSNYAKSNNVEFAVNNEGVYTEPRPIGTRYLTRNL

SEQ ID NO: 114 - protein, 728 aa, Adeno-associated virus
MAADGYLPDWLEDNLSEGIREWWDLKPGAPKPKANQQKQDDGRGLVLPGYKYLGPFNGLDKGEPVNAADAAALEHDKAYDQQLKAGDNPYLRYNHADAEFQERLQEDTSFGGNLGRAVFQAKKRVLEPLGLVEEGAKTAPGKKRPIESPDSSTGIGKKGQQPAKKKLNFGQTGDSESVPDPQPIGEPPAGPSGLGSGTMAAGGGAPMADNNEGADGVGNASGNWHCDSTWLGDRVITTSTRTWALPTYNNHLYKQISSQSGATNDNHFFGYSTPWGYFDFNRFHCHFSPRDWQRLINNNWGFRPRKLRFKLFNIQVKEVTTNDGVTTIANNLTSTIQVFSDSEYQLPYVLGSAHQGCLPPFPADVFMIPQYGYLTLNNGSQSVGRSSFYCLEYFPSQMLRTGNNFEFSYTFEEVPFHSSYAHSQSLDRLMNPLIDQYLYYLARTQSTTGSTRELQFHQAGPNTMAEQSKNWLPGPCYRRQRLSKDIDSNNNSNFAWTGATKYHLNGRNSLTNPGVAMATNKDDEDQFFPINGVLVFGKTGAANKTTLENVLMTSEEEIKTTNPVATEEYGVVSSNLQSSTAGPQTQTVNSQGALPGMVWQNRDVYLQGPIWAKIPHTDGNFHPSPLMGGFGLKHPPPQILIKNTPVPANPPEVFTPAKFASFITQYSTGQVSVEIEWELQKENSKRWNPEIQYTSNYAKSNNVEFAVNNEGVYTEPRPIGTRYLTRNL

SEQ ID NO: 115 - protein, 685 aa, Adeno-associated virus
MAADGYLPDWLEDNLSEGIREWWDLKPGAPKPKANQQKQDDGRGLVLPGYKYLGPFNGLDKGEPVNEADAAALEHDKAYDKQLEQGDNPYLKYNHADAEFQERLQEDTSFGGNLGRAVFQAKKRVLEPLGLVEEGAKTAPGKKRPVEPSPQRSPDSSTGIGKTGQQPAKKRLNFGQTGDSESVPDPQPIGEPPAGPSGLGSGTMAAGGGAPMADNNEGADGVGSSSGNWHCDSTWLGDRVITTSTRTWALPTYNNHLYKQISNGTSGGSTNDNTYFGYSTPWGYFDFNRFHCHFSPRDWQRLINNNWGFRPKRLNFKLFNIQVKEVTQNEGTKTIANNLTSTIQVFTDSEYQLPYVLGSAHQGCLPPFPADVFMIPQYGYLTLNNGSQAVGRSSFYCLEYFPSQMLRTGNNFEFSYQFEDVPFHSSYAHSQSLDRLTNPLIDQYLYYLARTQSTTGSTRGLQFHQAGPNTMAEQSKNWLPGPCYRQQRLSKNIDSNNNSNFAWTGATKYHLNGRNSLTNPGVAMATNKDDEDQFFPINGVLVFGKTGAANKTTLENVLMTSEEEIKTTNPVATEEYGVVSSNLQSSTAGPQTQTVNSQGALPGMVWQNRDVYLQGPIWAKIPHTDGNFHPSPLMGGFGLKHPPPQILIKYTSNYYKSTNVDFAVNTEGTYSEPRPIGTRYLTRNL

SEQ ID NO: 116 - protein, 733 aa, Adeno-associated virus
MAADGYLPDWLEDNLSEGIREWWDLKPGAPKPKANQQKQDDGRGLVLPGYKYLGPFNGLDKGEPVNAADAAALEHDKAYDQQLKAGDNPYLRYNHADAEFQERLQEDTSFGGNLGRAVFQAKKRVLEPLGLVEEGAKTAPGKKRPIESPDSSTGIGKKGQQPAKKKLNFGQTGDSESVPDPQPIGEPPAGPSGLGSGTMAAGGGAPMADNNEGADGVGSSSGNWHCDSTWLGDRVITTSTRTWALPTYNNHLYKQISNGTSGGSTNDNTYFGYSTPWGYFDFNRFHCHFSPRDWQRLINNNWGFRPKRLNFKLFNIQVKEVTQNEGTKTIANNLTSTIQVFTDSEYQLPYVLGSAHQGCLPPFPADVFMIPQYGYLTLNNGSQAVGRSSFYCLEYFPSQMLRTGNNFEFSYQFEDVPFHSSYAHSQSLDRLMNPLIDQYLYYLSRTQSTGGTAGTQQLLFSQAGPNNMSAQAKNWLPGPCYRQQRVSTTVSQNNNSNFAWTGATKYHLNGRDSLVNPGVAMATHKGDEERFFPSSGVLMFGKQGAGKDNVDYSSVMLTSEEEIKTTNPVATEQYGVVADNLQQQNAAPIVGAVNSQGALPGMVWQNRDVYLQGPIWAKIPHTDGNFHPSPLMGGFGLKHPPPQILIKNTPVPADPPTTFSQAKLASFITQYSTGQVSVEIEWELQKENSKRWNPEIQYTSNYYKSTNVDFAVNTEGTYSEPRPIGTRYLTRSL

SEQ ID NO: 117 - protein, 729 aa, Adeno-associated virus
MAADGYLPDWLEDNLSEGIREWWDLKPGAPKPKANQQKQDDGRGLVLPGYKYLGPFNGLDKGEPVNAADAAALEHDKAYDQQLKAGDNPYLRYNHADAEFQERLQEDTSFGGNLGRAVFQAKKRVLEPLGLVEEGAKTAPGKKRPIDSPDSSTGIGKKGQQPAKKKLNFGQTGDSESVPDPQPLGEPPAAPSSVGSGTMAAGGGAPMADNNEGADGVGNASGNWHCDSTWLGDRVITTSTRTWALPTYNNHLYKQISSSSSGATNDNHYFGYSTPWGYFDFNRFHCHFSPRDWQRLINNNWGFRPKKLRFKLFNIQVKEVTTNDGVTTIANNLTSTVQVFSDSEYQLPYVLGSAHQGCLPPFPADVFMIPQYGYLTLNNGSQSVGRSSFYCLEYFPSQMLRTGNNFEFSYSFEDVPFHSSYAHSQSLDRLMNPLIDQYLYYLARTQSTTGSTRELQFHQAGPNTMAEQSKNWLPGPCYRQQGLSKNLDFNNNSNFAWTAATKYHLNGRNSLTNPGIPMATNKDDEDQFFPINGVLVFGKTGAANKTTLENVLMTSEEEIKTTNPVATEEYGVVSSNLQPSTAGPQSQTINSQGALPGMVWQNRDVYLQGPIWAKIPHTDGNFHPSPLMGGFGLKHPPPQILIKNTPVPANPPEVFTPAKFASFITQYSTGQVSVEIEWELQKENSKRWNPEIQYTSNYAKSNNVEFAVNPDGVYTEPRPIGTRYLPRNL

SEQ ID NO: 118 - protein, 736 aa, Adeno-associated virus
MAADGYLPDWLEDNLSEGIREWWDLKPGAPKPKANQQKQDDGRGLVLPGYKYLGPFNGLDKGEPVNAADAAALEHDKAYDQQLEAGDNPYLRYNHADAEFQERLQEDTSFGGNLGRAVFQAKKRVLEPLGLVEEGAKTAPGKKRPVEQSPQEPDSSSGIGKKGQQPARKRLNFGQTGDSESVPDPQPLGEPPAAPSGVGPNTMAAGGGAPMADNNEGADGVGSSSGNWHCDSTWLGDRVITTSTRTWALPTYNNHLYKQISNGTSGGATNDNTYFGYSTPWGYFDFNRFHCHFSPRDWQRLINNNWGFRPKRLSFKLFNIQVKEVTQNEGTKTIANNLTSTIQVFTDSEYQLPYVLGSAHQGCLPPFPADVFMIPQYGYLTLNNGSQAVGRSSFYCLEYFPSQMLRTGNNFQFTYTFEDVPFHSSYAHSQSLDRLMNPLIDQYLYYLSRTQTTGGTANTQTLGFSQGGPNTMANQAKNWLPGPCYRQQRVSTTTGQNNNSNFAWTAGTKYHLNGRNSLANPGIAMATHKDDEERFFPVTGSCFWQQNAARDNADYSDVMLTSEEEIKTTNPVATEEYGIVADNLQQQNTAPQIGTVNSQGALPGMVWQNRDVYLQGPIWAKIPHTDGNFHPSPLMGGFGLKHPPPQILIKNTPVPADPPTTFNQSKLNSFITQYSTGQVSVEIEWELQKENSKRWNPEIQYTSNYYKSTSVDFAVNTEGVYSEPRPIGTRYLTRNL

SEQ ID NO: 119 - protein, 737 aa, Adeno-associated virus
MAADGYLPDWLEDNLSEGIREWWDLKPGAPKPKANQQKQDDGRGLVLPGYKYLGPFNGLDKGEPVNAADAAALEHDKAYDQQLKAGDNPYLRYNHADAEFQERLQEDTSFGGNLGRAVFQAKKRVLEPLGLVEEAAKTAPGKKRPVEPSPQRSPDSSTGIGKKGQQPARKRLNFGQTGDSESVPDPQPIGEPPAGPSGLGSGTMAAGGGAPMADNNKGADGVGNASGNWHCDSTWLGDRVITTSTRTWALPTYNNHLYKQISSQSAGSTNDNVYFGYSTPWGYFDFNRFHCHFSPRDWQRLINSNWGFRPKKLNFKLFNIQVKEVTTNDGVTTIANNLTSTVQVFSDSEYQLPYVLGSAHQGCLPPFPADVFMIPQYGYLTLNNGSQSVGRSSFYCLEYFPSQMLRTGNNFTFSYTFEDVPFHSSYAHSQSLDRLMNPLIDQYLYYLARTQSNAGGTAGNRELQFYQGGPTTMAEQAKNWLPGPCFRQQRVSKTLDQNNNSNFAWTGATKYHLNGRNSLVNPGVAMATHKDDEERFFPSSGVLIFGKTGAANKTTLENVLMTNEEEIRPTNPVATEEYGTVSSNLQAANTAAQTQVVNNQGALPGMVWQNRDVYLQGPIWAKIPHTDGNFHPSPLMGGFGLKHPPPQILIKNTPVPANPPEVFTPAKFASFITQYSTGQVSVEIEWELQKENSKRWNPEIQYTSNFDKQTGVDFAVDSQGVYSEPRPIGTRYLTRNL

SEQ ID NO: 120 - protein, 738 aa, Adeno-associated virus
MAADGYLPDWLEDNLSEGIREWWDLKPGAPKPKANQQKQDDGRGLVLPGYKYLGPFNGLDKGEPVNAADAAALEHDKAYDQQLKAGDNPHLRYNHADAEFQERLQEDTSFGGNLGRAVFQAKKRVLEPLGLVEEGAKTAPGKKRPVEPSPQRSPDSSTGIGKKGQQPARKRLNFGQTGDSESVPDPQLIGEPPAAPSSVGSGTMAAGGGAPMADNNEGADGVGSSSGNWHCDSTWLGDRVITTSTRTWALPTYNNHLYKQISNGTSGGSTNDNTYFGYSTPWGYFDFNRFHCHFSPRDWQRLINNNWGFRPKRLSFKLFNIQVKEVTQNEGTKTIANNLTSTIQVFTDSEYQLPYVLGSAHQGCLPPFPADVFMIPQYGNLTLNNGSQAVGRSSFYCLEYFPSQMLRTGNNFSFSYTFEDVPFHSSYAHSQSLDRLMNPLIDQYLYYLSRTQSTGGTAGTQQLLFSQAGPSNMSAQARNWLPGPCYRQQRVSTTLSQNNNSNFAWTGATKYHLNGRDSLVNPGVAMATNKDDEDRFFPSSGILMFGKQGAGKDNMGYSNVMLTSEEEIKTTNPVATEQYGVVADNLQQQNTAPIVGAVNSQGALPGMVWQNRDVYLQGPIWAKIPHTDGNFHPSPLMGGFGLKHPPPQILIKNTPVPADPPTAFNQAKLNSFITQYGTGQVSVEIEWELQKENSKRWNPEIQYTSNYYKSTNVDFAVNTEGVYSEPRPIGTRYLTRNL

SEQ ID NO: 121 - protein, 738 aa, Adeno-associated virus
MAADGYLPDWLEDNLSEGIREWWDLKPGAPKPKANQQKQDDGRGLVLPGYKYLGPFNGLDKGEPVNAADAAALEHDKAYDQQLKAGDNPYLRYNHADAEFQERLQEDTSFGGNLGRAVFQAKKRVLEPLGLVEEGAKTAPGKKRPVEPSPQRSPDSSTGIGKKGQQPAGKRLNFGQTGDSESVPDPQPIGEPPAAPSSVGSGTMAAGGGAPMADNNEGADGVGSSSGNWHCDSTWLGDRVITTSTRTWALPTYNNHLYKQISNGTSGGSTNDNTYFGYSTPWGYFDFNRFHCHFSPRDWQRLINNNWGFRPKRLSFKLFNIQVKEVTQNEGTKTIANNLTSTIQVFTDSEYQLPYVLGSAHQGCLPPFPADVFMIPQYGYLTLNNGSQAVGRSSFYCLEYFPSQMLRTGNNFSFSYTFEDVPFHSSYAHSQSLDRLMNPLVDQYLYYLSRTQSTGGTAGTQQLLFSQAGPSNMSAQARNWLPGPCYRQQRVSTTLSQNNNSNFAWTGATKYHLNGRDSLVNPGVAMATNKDDEDRFFPSSGILMFGKQGAGKDNVDYSNVMLTSEEEIKTTNPVATEQYGVVADNLQQQNTAPIVGAVNSQGALPGMVWQNRDVYLQGPIWAKIPHTDGNFHPSPLMGGFGLKHPPPQILIKNTPVPADPPTAFNQAKLNSFITQYSTGQVSVEIEWELQKENSKRWSPEIQYTSNYYKSTNVDFAVNTEGVYSEPRPIGTRYLTRNL

SEQ ID NO: 122 - protein, 738 aa, Adeno-associated virus
MVADGYLPDWLEDNLSEGIREWWDLKPGAPKPKANQQKQGDGRGLVLPGYKYLGPFNGLDKGEPVNAADAAALEHDKAYDQQLKAGDNPYLRYNHADAELQERLQEDTSFGGNLGRAVFQAKKRVLEPLGLVEEGAKTAPGKKRPVEPSPQRSPDSSTGIGKKGQQPARKRLNFGQTGDSESVPDPQPIGEPPAAPSSVGSGTMAAGGGAPMADNNEGADGVGSSSGNWHCDSTWLGDRVITTSTRTWALPTYNNHLYKQISNGTSGGSTNDNTYFGYSTPWGYFDFNRFHCHFSPRDWQRLINNNWGFRPKRLSFKLFNIQVKEVTQNEGTKTIANNLTSTIQVFTDSEYQLPYVLGSAHQGCQPPFPADVFMIPQYGYLTLNNGSQAVGRSSFYCLEYFPSQMLRTGNNFSFSYTFEDVPFHSSYAHSQSLDRLMNPLIDQYLYYLSRTQSTGGTAGTQQLLFSQAGPSNMSAQARNWLPGPCYRQQRVSTTLSQNNNSNFAWTGATKYHLNGRDSLVNPGVAMATNKDDEDRFFPSSGILMFGKQGAGKDNVDYSNVMLTSEEEIKTTNPVATEQYGVVADNLQQQNTAPIVGAVNSQGALPGMVWQNRDVYLQGPIWAKIPHTDGNFHPSPLMGGFGLKHPPPQILIKNTPVPADPPTAFNQAKLNSFITQYSTGQVSVEIEWEPQKENSKRWNPEIQYTSNYYKSTNVDFAVNTEGVYSEPRPIGTRYLTRNL

SEQ ID NO: 123 - protein, 738 aa, Adeno-associated virus
MAADGYLPDWLEDNLSEGIREWWDLKPGAPKPKANQQKQDDGRGLVLPGYKYLGPFNGLDKGEPVNAADAAALEHDKAYDQQLKAGDNPYLRYNHADAEFQERLQEDTSFGGNLGRAVFQAKKRVLEPLGLVEEGAKTAPGKKRPVEPSPQRSPDSSTGIGKKGQQPARKRLNFGQTGDSESVPDPQPIGEPPAAPSSVGSGTMAAGGGAPMADNNEGADGVGSSSGNWHCDSTWLGDRVITTSTRTWALPTYNNHLYKQISNGTSGGSTNDNTYFGYSTPWGYFDFNRFHCHFSPRDWQRLINNNWGFRPKRLSFKLFNIQVKEVTQNEGTKTIANSLTSTIQVFTDSEYQLPYVLGSAHQGCLPPFPADVFMIPQYGYLTPNNGSQAVGRSSFYCLEYFPSQMLRTGNNFSFSYTFEDVPFHSSYAHSQSLDRLMNPLIDQYLYYLSRTQSTGGTAGTQQLLSSQAGPSNMSAQARNWLPGPCYRQQRVSTTLSQNNNSNFAWTGATKYHLNGRDSLVNPGVAMATNKDDEDRFFPSSGILMFGKQGAGKDNVDYSNVMLTSEEEIKTTNPVATEQYGVVADNLQQQNTAPIVGAVNSQGALPGMVWQNRDVYLQGPIWAKIPHTDGNFHPSPLMGGFGLKHPPPQILIKNTPVPADPPTAFNQAKLNSFITQYSTGQVSVEIEWELQKENSKRWNPEIQYTSNYYKSTNVDFAVNTEGVYSEPRPIGTRYLTRNL

SEQ ID NO: 124 - protein, 738 aa, Adeno-associated virus
MAADGYLPDWLEDNLSEGIREWWDLKPGAPKPKANQQKQDDGRGLVLPGYKYLGPFNGLDKGEPVNAADAAALEHDKAYDQQLKAGDNPYLRYNHADAEFQERLQEDTSFGGNLGRAVFQAKKRVLEPLGLVEEGAKTAPGKKRPVEPSPQRSPDSSTGIGKKGQQPARKRLNFGQTGDSESVPDPQPIGEPPAAPSSVGSGTMAAGGGAPMADNNEGADGVGSSSGNWHCDSTWLGDRVITTSTRTWALPTYNNHLYKQISNGTSGGSTNDNTYFGYSTPWGYFDFNRFHCHFSPRDWQRLINNNWGFRPKRLSFKLFNIQVKEVTQNEGTKTIANNLTSTIQVFTDSEYQLPYVLGSAHQGCLPPFPADVFMIPQYGYLTLNNGSQAVGRSSFYCLEYFPSQMLRTGNNFSFSYTFEDVPFHSSYVHSQSLDRLMNPLIDQYLYYLSRTQSTGGTAGTQQLLFSQAGPSNMSAQARNWLPGPCYRQQRVSTTLSQNNNSNFAWTGATKYHLNGRDSLVNSGVAMATNKDDEDRFFPSSGILMFGKQGAGKDNVDYSNVMLTSEEEIKTTNPVATEQYGVVADNLQQQNTAPIVGAVNSQGALPGMVWQNRDVYLQGPIWAKIPHTDGNFHPSPLMGGFGLKHPPPQILIKNTPVPADPPTAFNQAKLNSFITQYSTGQVSVEIEWELQKENSKRWNPEIQYTSNYYKSTNVDFAVNTEGVYSEPRPIGTRYPTRNL

SEQ ID NO: 125 - protein, 737 aa, Adeno-associated virus
MAADGYLPDWLEDNLSEGIREWWDLKPGAPKPKANQQKQDDGRGLVLPGYKYLGPFNGLDKGEPVNAADAAALEHDKAYDQQLKAGDNPYLRYNHADAEFQERLQEDTSFGGNLGRAVFQAKKRVLEPLGLVEEAAKTAPGKKRPVEPSPQRSPDSSTGIGKKGQQPARKRLNFGQTGDSESVPDPQPLGEPPAGPSGLGSGTMAAGGGAPMADNNEGADGVGNASGNWHCDSTWLGDRVITTSTRTWALPTYNNHLYKQISSQSAGSTNDNVYFGYSTPWGYFDFNRFHCHFSPRDWQRLINNNWGFRPKKLNFKLFNIQVKEVTTNDGVTTIANNLTSTVQVFSDSEYQLPYVLGSAHQGCLPPFPADVFMIPQYGYLTLNNGSQSVGRSSFYCLEYFPSQVLRTGNNFTFSYTFEDVPFHSSYAHSQSLDRLMNPLIDQYLYYLARTQSNPGGTSGNRELQFYQGGPSTMAEQAKNWLPGPCFRQQRVSKTLDQNNNSNFAWTGATKYHLNGRNSLVNPGVAMATHKDDEDRFFPSSGVLIFGKTGATNKTTLENVLMTNEEEIRPTNPVATEEYGIVSSNLQAANTAAQTQVVNNQGALPGMVWQNRDVYLQGPIWAKIPHTDGNFHPSPLMGGFGLKHPPPQILIKNTPVPANPPEVFTPAKFASFITQYSTGQVSVEIEWELQKENSKRWNPEIQYTSNFDKQTGVDFAVDSQGVYSEPRPIGTRYLTRNL

SEQ ID NO: 126 - protein, 737 aa, Adeno-associated virus
MAADGYLPDWLEDNLSEGIREWWDLKPGAPKPKANQQKQDDGRGLVLPGYKYLGPFNGLDKGEPVNAADAAALEHDKAYDQQLKAGDNPYLRYNHADAEFQERLQEDTSFGGNLGRAVFQAKKRVLEPLGLVEEGAKTAPGKKRPVEPSPQRSPDSSTGIGKKGQQPARKRLNFGQTGDSESVPDPQPIGEPPAAPSSVGSGTMAAGGGAPMADNNEGADGVGSSSGNWHCDSTRLGDRVITTSTRTWALPTYNNHLYKQISSQSAGSTNDNVYFGYSTPWGYFDFNRFHCHFSPRDWQRLINNNWGFRPKKLNFKLFNIQVKEVTTNDGVTTIANNLTSTVQVFSDSEYQLPYVLGSAHQGCLPPFPADVFMIPQYGYLTLNNGSQSVGRSSFYCLEYFPSQMLRTGNNFTFSYTFEDVPFHSSYAHSQSLDRLMNPLIDQYLYYLARTQSNAGGTAGNRELQFYQGGPTTMAEQAKNWLPGPCFRQRRVSKTLDQNNNSNFAWTGATKYHLNGRNSLVNPGVAMATHKDDEERFFPSSGVLIFGKTGAANKTTLENVLMTNEEEIRPTNPVATEEYGTVSSNLQAANTAAQTQVVNNQGALPGMVWQNRDVYLQGPIWAKIPHTDGNFHPSPLMGGFGLKHPPPQILIKNTPVPANPPEVFTPAKFASFITQYSTGQVSVEIEWELQKENSKRWNPEIQYTSNFDKQTGVDFAVDSQGVYSEPRPIGTRYLTRNL

SEQ ID NO: 127 - protein, 738 aa, Adeno-associated virus
MAADGYLPDWLEDNLSEGIREWWALKPGAPKPKANQQKQDDGRGLVLPGYKYLGPFNGLDKGEPVNAADAAALEHDKAYDQQLQAGDNPYLRYNHADAEFQERLQEDTSFGGNLGRAVFQAKKRVLEPLGLVEEGAKTAPGKKRPVEPSPQRSPDSSTGIGKKGQQPARKRLNFGQTGDSESVPDPQPIGEPPAAPSSVGSGTMAAGGGAPMADNNEGADGVGSSSGNWHCDSTWLGDRVITTSTRTWALPTYNNHLYKQTSNGTSGGSTNDNTYFGYSTPWGYFDFNRFHCHFSPRDWQRLINNNWGFRPKRLSFKLFNIQVKEVTQNEGTKTIANNLTSTIQVFTDSEYQLPYVLGSAHQGCLPPFPADVFMIPQYGYLTLNNGSQAVGRSSFYCLEYFPSQMLRTGNNFSFSYTFEDVPFHSSYAHSQSLDRLMNPLIDQYLYYLSRTQSTGGTAGTQQLLFSQAGPSNMSAQARNWLPGPCYRQQRVSTTLSQNNNSNFAWTGATKYHLNGRDSLVNPGVAMATNKDDEDRFFPSSGILMFGKQGAGKDNVDYSNVMLTSEEEIKTTNPVATEQYGVVADNLQQQNTAPIVGAVNSQGALPGMVWQNRDVYLQGPIWAKIPHTDGNFHPSPLMGGFGLKHPPPQILIKNTPVPADPPTAFNQAKLNSFITQYSTGQVSAEIEWELQKENSKRWNPEIQYTSNYYKSTNVDFAVNTEGVYSEPRPIGTRYLTRNL

SEQ ID NO: 128 - protein, 738 aa, Adeno-associated virus
MAADGYLPDWLEDNLSEGIREWWDLKPGAPKPKANQQKQDDGRGLVLPGYKYLGPFNGLDKGEPVNAADAAALEHDKAYDQQLKAGDNPYLRYNHADAEFQERLQEDTSFGGNLGRAVFQAKKRVLEPLGLVEEAAKTAPGKKRPVEPSPQRSPDSSTGIGKKGQQPARKRLNFGQTGDSESVPDPQPIGEPPAAPSSVGSGTMAAGGGAPMADNNEGADGVGSSSGNWHCDSTWLGDRVITTSTRTWALPTYNNHLYKQISNGTSGGSTNDNTYFGYSTPWGYFDFNRFHCHFSPRDWQRLINNNWGFRPKRLSFKLFNIQVKEVTQNEGTKTIANNLTSTIQVFTDSEYQLPYVLGSAHQGCLPPFPADVFMIPQYGYLTLNNGSQAVGRSSFYCLEYFPSQMLRTGNNFSFSYTFEDVPFHSSYAHSQSLDRLMNPLIDQYLYYLSRTQSTGGTAGTQQLLFSQAGPSNMSAQARNWLPGPCYRQQRVSTTLSQNNNSNFAWTGATKYHLNGRDSLVNPGVAMATNKDDEDRFFPSSGILMFGKQGAGKDNVDYSNVMLTSEEEIKTTNPVATEQYGVVADNLQQQNTAPIVGAVNSQGALPGMVWQNRDVYLQGPIWAKIPHTDGNFHPSPLMGGFGLKHPPPQILIKSTPVPADPPTAFNQAKLNSFITQYSTGQVSVEIEWELQKENSKCWNPEIQYTSNYYKSTNVDFAVNTEGVYSEPRPIGTRYLTRNL

SEQ ID NO: 129 - protein, 737 aa, Adeno-associated virus
MAADGYLPDWLEDNLSEGIREWWDLKPGAPKPKANQQKQDDGRGLVLPGYKYLGPFNGLDKGEPVNAADAAALEHDKAYDQQLKAGDNPYLRYNHADAEFQERLQEDTSFGGNLGRAVFQAKKRVLEPLGLAEEAAKTAPGKKRPVEPSPQRSPDSSTGIGKKGQQPARKRLNFGQTGDSESVPDPQPIGEPPAGPSGLGSGTMAAGGGAPMADNNKGADGVGNASGNWHCDSTWLGDRVITTSTRTWALPTYNNHLYKQISSQSAGSTNDNVYFGYSTPWGYFDFNRFHCHFSPRDWQRLINNNWGFRPKKLNFKLFNIQVKEVTTGDGVTTIANNLTSTVQVFSDSEYQLPYVLGSAHQGCLPPFPADVFMIPQYGYLTLNNDSQSVGRSSFYCLEYFPSQMLRTGNNFTFSYTFEDVPFHSSYAHSQSLDRLMNPLIDQYLYYLARTQSNAGGTAGNRELQFYQGGPTTMAEQAKNWLPGPCFRQQRVSKTLDQNNNSNFAWTGATKYHLNGRNSLVNPGVAMATHKDDEERFFPSSGVLIFGKTGAANKTTLENVLMTNEEEIRPTNPVATEEYGTVSSNLQAANTAAQTQVVNNQGALPGMVWQNRDVYLQGPIWAKIPHTDGNFHPSPLMGGFGLKHPPPQILIKNTPVPANPPEVFTPAKFASFITQYSTGQVSVEIEWELQKENSKRWNPEIQYTSNFDKQTGVDFAVDSQGVYSEPRPIGTRYLTRNL

SEQ ID NO: 130 - protein, 738 aa, Adeno-associated virus
MAADGYLPDWLEDNLSEGIREWWDLKPGAPKPKANQQKQDDGRGLVLPGYKYLGPFNGLDKGEPVNAADAAALEHDKAYDQQLKAGDNPYLRYNHADAEFQERLQEDTSFGGNLGRAVFQAKKRVLEPLGLVEEGAKTAPGKKRPVEPSPQRSPDSSTGIGKKGQQPARKRLNFGQTGDSESVPDPQPIGEPPAAPSSVGSGTMAAGGGAPMADNNEGADGVGSSSGNWHCDSTWLGDRVITTSTRTWALPTYNNHLYKQISNGTSGGSTNDNTYFGYSTPWGYFDFNRFHCHFSPRDWQRLINNNWGFRPKRLSFKLFNIQVKEVTQNEGTKTIANNLTSTIQVFTDSEYQLPYVLGSAHQGCLPPFPADVFMIPQYGYLTLNNGSQAVGRSSFYCLEYFPSQMLRTGNNFSFSYTFEDVPFHSSYAHSQSLDRLMNPLIDQYLYYLSRTQSTGGTAGTQQLLFSQAGPSNMSAQARNWLPGPCYRQQRVSTTLSQNNNSNFAWTGATKYHLNGRDSLVNPGVAMATNKDDEDRFFPSSGILMFGKQGAGKDNVDYSNVMLTSEEEIKTTNPVATEQYGVVADNLQQQNTAPIVGAVNSQGALPGMVWQNRDVYLQGPIWAKIPHTDGNFHPSPLMGGFGLKHPPPQILIKNTPVPADPPTAFNQAKLNSFITQYSTGQVSVEIVWELQKENSKRRNPEIQYTSNYYKSTNVDFAVNTEGVYSEPRPIGTRYLTRNL

SEQ ID NO: 131 - protein, 735 aa, Adeno-associated virus
MAADGYLPDWLEDTLSEGIRQWWKLKPGPPPPKPAERHKDDSRGLVLPGYKYLGPFNGLDKGEPVNEADAAALEHDKAYDRQLDSGDNPYLKYNHADAEFQERLKEDTSFGGNLGRAVFQAKKRVLEPLGLVEEPVKTAPGKKRPVEHSPAEPDSSSGTGKAGQQPARKRLNFGQTGDADSVPDPQPLGQPPAAPSGLGSTTMATGSGAPMADNNEGADGVGNSSGNWHCDSQWLGDRVITTSTRTWAQPTYNNHLYKQISSQSGASNDNHYFGYSTPWGYFDFNRFHCHFSPRDWQRLINNNWGFRPKRLNFKLFNIQVKEVTQNDGTTTIANNLTSTVQVFTDSEYQLPYVLGSAHQGCLPPFPADVFMVPQYGYLTLNNGSQAVGRSSFYCLEYFPSQMLRTGNNFQFSYTFEDVPFHSSYAHSQSLDRLMNPLIDQYLYYLNKTQSNSGALQQSRLLFSQAGPTSMSLQAKNWLPGPCYRQQRLSKQANDNNNSNFPWTAATKYHLNGRDSLVNPGPAMASHKDDEEKFFPMHGTLIFGKQGTNANDADLDNVMITDEEEIRTTNPVATEQYGYVSNNLQNSNTGPTTGTVNHRGALPGMVWQDRDVYLQGPIWAKIPHTDGHFHPSPLMGGFGLKHPPPQIMIKNTPVPANPPTNFSSAKFASFITQYSTGQVSVEIEWELQKENSKRWNPEIQYTSNYNKSVNVDFTVDTNGVYSEPRPIGTRYLTRNL

SEQ ID NO: 132 - protein, 736 aa, synthetic construct
  VARIANT 168: note = K or R
  VARIANT 205: note = A or S
  VARIANT 266: note = A or G
  VARIANT 311: note = R or K
  VARIANT 411: note = E or Q
  VARIANT 460: note = T or E
  VARIANT 493: note = A or T
  VARIANT 562: note = S or N
  VARIANT 576: note = E or Q
  VARIANT 587: note = S or A
  VARIANT 609: note = N or D
MAADGYLPDWLEDNLSEGIREWWDLKPGAPKPKANQQKQDDGRGLVLPGYKYLGPFNGLDKGEPVNAADAAALEHDKAYDQQLKAGDNPYLRYNHADAEFQERLQEDTSFGGNLGRAVFQAKKRVLEPLGLVEEGAKTAPGKKRPVEQSPQEPDSSSGIGKKGQQPAXKRLNFGQTGDSESVPDPQPLGEPPAAPSGVGSNTMAXGGGAPMADNNEGADGVGNASGNWHCDSTWLGDRVITTSTRTWALPTYNNHLYKQISSQSGXSTNDNTYFGYSTPWGYFDFNRFHCHFSPRDWQRLINNNWGFRPKXLNFKLFNIQVKEVTTNDGTTTIANNLTSTVQVFTDSEYQLPYVLGSAHQGCLPPFPADVFMIPQYGYLTLNNGSQAVGRSSFYCLEYFPSQMLRTGNNFXFSYTFEDVPFHSSYAHSQSLDRLMNPLIDQYLYYLSRTQTTSGTAGNRXLQFSQAGPSSMANQAKNWLPGPCYRQQRVSKTXNQNNNSNFAWTGATKYHLNGRDSLVNPGPAMATHKDDEDKFFPMSGVLIFGKQGAGNSNVDLDNVMITXEEEIKTTNPVATEXYGTVATNLQSXNTAPATGTVNSQGALPGMVWQXRDVYLQGPIWAKIPHTDGHFHPSPLMGGFGLKHPPPQILIKNTPVPANPPTTFSPAKFASFITQYSTGQVSVEIEWELQKENSKRWNPEIQYTSNYNKSTNVDFAVDTNGVYSEPRPIGTRYLTRNL

SEQ ID NO: 133 - protein, 737 aa, synthetic construct
  VARIANT 157: note = T or S
  VARIANT 168: note = K or R
  VARIANT 262: note = N or S
  VARIANT 263: note = S or H
  VARIANT 312: note = R or K
  VARIANT 412: note = E or Q
  VARIANT 460: note = R or Q
  VARIANT 461: note = T or E
  VARIANT 552: note = D or S
  VARIANT 556: note = L or Y
  VARIANT 557: note = D or S
  VARIANT 563: note = S or N
  VARIANT 580: note = V or I
  VARIANT 588: note = N or S
  VARIANT 664: note = S or T
MAADGYLPDWLEDNLSEGIREWWDLKPGAPKPKANQQKQDDGRGLVLPGYKYLGPFNGLDKGEPVNAADAAALEHDKAYDQQLKAGDNPYLRYNHADAEFQERLQEDTSFGGNLGRAVFQAKKRVLEPLGLVEEGAKTAPGKKRPVEQSPQEPDSSXGIGKKGQQPAXKRLNFGQTGDSESVPDPQPLGEPPAAPSGVGSNTMAAGGGAPMADNNEGADGVGNASGNWHCDSTWLGDRVITTSTRTWALPTYNNHLYKQISXXQSGGSTNDNTYFGYSTPWGYFDFNRFHCHFSPRDWQRLINNNWGFRPKXLNFKLFNIQVKEVTTNDGTTTIANNLTSTVQVFTDSEYQLPYVLGSAHQGCLPPFPADVFMIPQYGYLTLNNGSQAVGRSSFYCLEYFPSQMLRTGNNFXFSYTFEDVPFHSSYAHSQSLDRLMNPLIDQYLYYLSRTQTTGGTAGNXXLQFSQAGPSSMANQAKNWLPGPCYRQQRVSKTTNQNNNSNFAWTGATKYHLNGRDSLVNPGVAMATHKDDEDRFFPSSGVLIFGKQGAGNXNVDXXNVMITXEEEIKTTNPVATEEYGXVATNLQSXNTAPQTGTVNSQGALPGMVWQNRDVYLQGPIWAKIPHTDGNFHPSPLMGGFGLKHPPPQILIKNTPVPANPPTTFXPAKFASFITQYSTGQVSVEIEWELQKENSKRWNPEIQYTSNYNKSTNVDFAVDTEGVYSEPRPIGTRYLTRNL

SEQ ID NO: 134 - protein, 738 aa, synthetic construct
  VARIANT 158: note = T or S
  VARIANT 169: note = K or R
  VARIANT 564: note = S or N
MAADGYLPDWLEDNLSEGIREWWDLKPGAPKPKANQQKQDDGRGLVLPGYKYLGPFNGLDKGEPVNAADAAALEHDKAYDQQLKAGDNPYLRYNHADAEFQERLQEDTSFGGNLGRAVFQAKKRVLEPLGLVEEGAKTAPGKKRPVEQSPQREPDSSXGIGKKGQQPAXKRLNFGQTGDSESVPDPQPLGEPPAAPSGVGSNTMAAGGGAPMADNNEGADGVGNSSGNWHCDSTWLGDRVITTSTRTWALPTYNNHLYKQISNGTSGGSTNDNTYFGYSTPWGYFDFNRFHCHFSPRDWQRLINNNWGFRPKRLNFKLFNIQVKEVTTNEGTKTIANNLTSTVQVFTDSEYQLPYVLGSAHQGCLPPFPADVFMIPQYGYLTLNNGSQAVGRSSFYCLEYFPSQMLRTGNNFQFSYTFEDVPFHSSYAHSQSLDRLMNPLIDQYLYYLSRTQTTGGTAGTQTLQFSQAGPSSMANQAKNWLPGPCYRQQRVSTTTNQNNNSNFAWTGATKYHLNGRDSLVNPGVAMATHKDDEDRFFPSSGVLIFGKQGAGNDNVDYSNVMITXEEEIKTTNPVATEEYGVVATNLQSANTAPQTGTVNSQGALPGMVWQNRDVYLQGPIWAKIPHTDGNFHPSPLMGGFGLKHPPPQILIKNTPVPADPPTTFNQAKLNSFITQYSTGQVSVEIEWELQKENSKRWNPEIQYTSNYYKSTNVDFAVNTEGVYSEPRPIGTRYLTRNL

SEQ ID NO: 135 - protein, 738 aa, synthetic construct
  VARIANT 158: note = T or S
  VARIANT 169: note = R or K
  VARIANT 315: note = N or S
  VARIANT 413: note = E or Q
  VARIANT 472: note = N, T, or S
  VARIANT 534: note = D or E
  VARIANT 542: note = I or V
  VARIANT 595: note = I or V
MAADGYLPDWLEDNLSEGIREWWDLKPGAPKPKANQQKQDDGRGLVLPGYKYLGPFNGLDKGEPVNAADAAALEHDKAYDQQLKAGDNPYLRYNHADAEFQERLQEDTSFGGNLGRAVFQAKKRVLEPLGLVEEGAKTAPGKKRPVEQSPQREPDSSXGIGKKGQQPAXKRLNFGQTGDSESVPDPQPLGEPPAAPSGVGSNTMAAGGGAPMADNNEGADGVGSSSGNWHCDSTWLGDRVITTSTRTWALPTYNNHLYKQISNGTSGGSTNDNTYFGYSTPWGYFDFNRFHCHFSPRDWQRLINNNWGFRPKRLXFKLFNIQVKEVTQNEGTKTIANNLTSTIQVFTDSEYQLPYVLGSAHQGCLPPFPADVFMIPQYGYLTLNNGSQAVGRSSFYCLEYFPSQMLRTGNNFXFSYTFEDVPFHSSYAHSQSLDRLMNPLIDQYLYYLSRTQTTGGTAGTQTLQFSQAGPSXMANQAKNWLPGPCYRQQRVSTTTSQNNNSNFAWTGATKYHLNGRDSLVNPGVAMATHKDDEXRFFPSSGXLIFGKQGAGKDNVDYSNVMLTSEEEIKTTNPVATEEYGVVADNLQQQNTAPQXGTVNSQGALPGMVWQNRDVYLQGPIWAKIPHTDGNFHPSPLMGGFGLKHPPPQILIKNTPVPADPPTTFNQAKLNSFITQYSTGQVSVEIEWELQKENSKRWNPEIQYTSNYYKSTNVDFAVNTEGVYSEPRPIGTRYLTRNL

SEQ ID NO: 136 - protein, 738 aa, synthetic construct
  VARIANT 169: note = R or K
  VARIANT 315: note = N or S
  VARIANT 534: note = D or E
  VARIANT 542: note = I or V
MAADGYLPDWLEDNLSEGIREWWDLKPGAPKPKANQQKQDDGRGLVLPGYKYLGPFNGLDKGEPVNAADAAALEHDKAYDQQLKAGDNPYLRYNHADAEFQERLQEDTSFGGNLGRAVFQAKKRVLEPLGLVEEGAKTAPGKKRPVEPSPQRSPDSSTGIGKKGQQPAXKRLNFGQTGDSESVPDPQPIGEPPAAPSGVGSGTMAAGGGAPMADNNEGADGVGSSSGNWHCDSTWLGDRVITTSTRTWALPTYNNHLYKQISNGTSGGSTNDNTYFGYSTPWGYFDFNRFHCHFSPRDWQRLINNNWGFRPKRLXFKLFNIQVKEVTQNEGTKTIANNLTSTIQVFTDSEYQLPYVLGSAHQGCLPPFPADVFMIPQYGYLTLNNGSQAVGRSSFYCLEYFPSQMLRTGNNFEFSYTFEDVPFHSSYAHSQSLDRLMNPLIDQYLYYLSRTQSTGGTAGTQQLLFSQAGPSNMSAQAKNWLPGPCYRQQRVSTTLSQNNNSNFAWTGATKYHLNGRDSLVNPGVAMATHKDDEXRFFPSSGXLMFGKQGAGKDNVDYSNVMLTSEEEIKTTNPVATEQYGVVADNLQQQNTAPIVGAVNSQGALPGMVWQNRDVYLQGPIWAKIPHTDGNFHPSPLMGGFGLKHPPPQILIKNTPVPADPPTTFNQAKLNSFITQYSTGQVSVEIEWELQKENSKRWNPEIQYTSNYYKSTNVDFAVNTEGVYSEPRPIGTRYLTRNL

SEQ ID NO: 137 - protein, 738 aa, synthetic construct
  VARIANT 471: note = S or N
MAADGYLPDWLEDNLSEGIREWWDLKPGAPKPKANQQKQDDGRGLVLPGYKYLGPFNGLDKGEPVNAADAAALEHDKAYDQQLKAGDNPYLRYNHADAEFQERLQEDTSFGGNLGRAVFQAKKRVLEPLGLVEEGAKTAPGKKRPVEPSPQRSPDSSTGIGKKGQQPAKKRLNFGQTGDSESVPDPQPIGEPPAGPSGLGSGTMAAGGGAPMADNNEGADGVGSSSGNWHCDSTWLGDRVITTSTRTWALPTYNNHLYKQISNGTSGGSTNDNTYFGYSTPWGYFDFNRFHCHFSPRDWQRLINNNWGFRPKRLNFKLFNIQVKEVTQNEGTKTIANNLTSTIQVFTDSEYQLPYVLGSAHQGCLPPFPADVFMIPQYGYLTLNNGSQAVGRSSFYCLEYFPSQMLRTGNNFEFSYTFEDVPFHSSYAHSQSLDRLMNPLIDQYLYYLSRTQSTGGTAGTQQLLFSQAGPXNMSAQAKNWLPGPCYRQQRVSTTLSQNNNSNFAWTGATKYHLNGRDSLVNPGVAMATHKDDEERFFPSSGVLMFGKQGAGKDNVDYSSVMLTSEEEIKTTNPVATEQYGVVADNLQQQNTAPIVGAVNSQGALPGMVWQNRDVYLQGPIWAKIPHTDGNFHPSPLMGGFGLKHPPPQILIKNTPVPADPPTTFSQAKLASFITQYSTGQVSVEIEWELQKENSKRWNPEIQYTSNYYKSTNVDFAVNTEGTYSEPRPIGTRYLTRNL

SEQ ID NO: 138 - protein, 738 aa, synthetic construct
  VARIANT 157: note = S or T
  VARIANT 169: note = K or R
  VARIANT 457: note = A or G
  VARIANT 463: note = Q or A
  VARIANT 508: note = T or A
  VARIANT 510: note = Y or F
  VARIANT 511: note = H or K
  VARIANT 558: note = Q or N
  VARIANT 585: note = N or H
  VARIANT 587: note = S or A
MAADGYLPDWLEDNLSEGIREWWDLKPGAPKPKANQQKQDDGRGLVLPGYKYLGPFNGLDKGEPVNAADAAALEHDKAYDQQLKAGDNPYLRYNHADAEFQERLQEDTSFGGNLGRAVFQAKKRVLEPLGLVEEGAKTAPGKKRPVEQSPQEPDSSXLGIGKTGQQPAXKRLNFGQTGDSESVPDPQPLGEPPAAPSGVGSNTMASGGGAPMADNNEGADGVGNSSGNWHCDSTWLGDRVITTSTRTWALPTYNNHLYKQISNGTSGGSTNDNTYFGYSTPWGYFDFNRFHCHFSPRDWQRLINNNWGFRPKRLNFKLFNIQVKEVTTNEGTKTIANNLTSTVQVFTDSEYQLPYVLGSAHQGCLPPFPADVFMIPQYGYLTLNNGSQAVGRSSFYCLEYFPSQMLRTGNNFQFSYTFEDVPFHSSYAHSQSLDRLMNPLIDQYLYYLSRTQTTGTXGTQTLXFSQAGPSSMANQARNWVPGPCYRQQRVSTTTNQNNNSNFAWTGAXKXXLNGRDSLMNPGVAMASHKDDEDRFFPSSGVLIFGKQGAGNDNVDYSXVMITNEEEIKTTNPVATEEYGAVATNXQXLANTQAQTGLVHNQGVLPGMVWQNRDVYLQGPIWAKIPHTDGNFHPSPLMGGFGLKHPPPQILIKNTPVPADPPTTFNQAKLNSFITQYSTGQVSVEIEWELQKENSKRWNPEIQYTSNYYKSTNVDFAVNTEGVYSEPRPIGTRYLTRNL

SEQ ID NO: 139 - protein, 737 aa, synthetic construct
  VARIANT 148: note = P or Q
  VARIANT 169: note = K or R
  VARIANT 314: note = R or N
  VARIANT 466: note = Y or H
  VARIANT 563: note = N or S
  VARIANT 580: note = V or I
  VARIANT 588: note = A or S
MAADGYLPDWLEDNLSEGIREWWDLKPGAPKPKANQQKQDDGRGLVLPGYKYLGPFNGLDKGEPVNAADAAALEHDKAYDQQLKAGDNPYLRYNHADAEFQERLQEDTSFGGNLGRAVFQAKKRVLEPLGLVEEGAKTAPGKKRPVEXSPQRSPDSSTGIGKKGQQPAXKRLNFGQTGDSESVPDPQPLGEPPAAPSGVGSGTMAAGGGAPMADNNEGADGVGNASGNWHCDSTWLGDRVITTSTRTWALPTYNNHLYKQISSQSAGSTNDNTYFGYSTPWGYFDFNRFHCHFSPRDWQRLINNNWGFRPKKLXFKLFNIQVKEVTTNDGVTTIANNLTSTVQVFSDSEYQLPYVLGSAHQGCLPPFPADVFMIPQYGYLTLNNGSQSVGRSSFYCLEYFPSQMLRTGNNFEFSYTFEDVPFHSSYAHSQSLDRLMNPLIDQYLYYLARTQSTTGGTAGNRELQFXQAGPSTMAEQAKNWLPGPCYRQQRVSKTLDQNNNSNFAWTGATKYHLNGRNSLVNPGVAMATHKDDEDRFFPSSGVLIFGKTGAANKTTLENVLMTXEEEIKTTNPVATEEYGXVSSNLQSXNTAPQTQTVNSQGALPGMVWQNRDVYLQGPIWAKIPHTDGNFHPSPLMGGFGLKHPPPQILIKNTPVPANPPEVFTPAKFASFITQYSTGQVSVEIEWELQKENSKRWNPEIQYTSNYDKSTNVDFAVDSEGVYSEPRPIGTRYLTRNL

SEQ ID NO: 140 - protein, 735 aa, synthetic construct
  VARIANT 162: note = S or T
  VARIANT 168: note = K or R
  VARIANT 224: note = A or S
  VARIANT 310: note = R or K
  VARIANT 410: note = T or Q
  VARIANT 446: note = S or N
  VARIANT 461: note = Q or L
  VARIANT 471: note = A or S
  VARIANT 708: note = A or T
MAADGYLPDWLEDNLSEGIREWWDLKPGAPKPKANQQKQDDGRGLVLPGYKYLGPFNGLDKGEPVNAADAAALEHDKAYDQQLKAGDNPYLRYNHADAEFQERLQEDTSFGGNLGRAVFQAKKRVLEPLGLVEEGAKTAPGKKRPVEQSPQEPDSSSGIGKXGQQPAXKRLNFGQTGDSESVPDPQPLGEPPAAPSGVGSNTMASGGGAPMADNNEGADGVGNXSGNWHCDSTWLGDRVITTSTRTWALPTYNNHLYKQISSQSGASNDNHYFGYSTPWGYFDFNRFHCHFSPRDWQRLINNNWGFRPKXLNFKLFNIQVKEVTTNDGTTTIANNLTSTVQVFTDSEYQLPYVLGSAHQGCLPPFPADVFMIPQYGYLTLNNGSQAVGRSSFYCLEYFPSQMLRTGNNFXFSYTFEDVPFHSSYAHSQSLDRLMNPLIDQYLYYLXRTQTTSGTAQNRELXFSQAGPSSMXNQAKNWLPGPCYRQQRVSKTANDNNNSNFAWTGATKYHLNGRDSLVNPGPAMASHKDDEDKFFPMSGVLIFGKQGAGASNVDLDNVMITDEEEIKTTNPVATEQYGTVATNLQSSNTAPATGTVNSQGALPGMVWQDRDVYLQGPIWAKIPHTDGHFHPSPLMGGFGLKHPPPQILIKNTPVPANPPTTFSPAKFASFITQYSTGQVSVEIEWELQKENSKRWNPEIQYTSNYNKSXNVDFTVDTNGVYSEPRPIGTRYLTRNL

SEQ ID NO: 141 - protein, 735 aa, synthetic construct
  VARIANT 42: note = G or S
  VARIANT 168: note = R or K
  VARIANT 310: note = K or R
  VARIANT 410: note = T or Q
  VARIANT 446: note = S or R
  VARIANT 461: note = Q or L
  VARIANT 471: note = A or S
  VARIANT 475: note = K or R
  VARIANT 504: note = G or A
  VARIANT 539: note = V or N
MAADGYLPDWLEDNLSEGIREWWDLKPGAPQPKANQQHQDDXRGLVLPGYKYLGPFNGLDKGEPVNEADAAALEHDKAYDQQLKAGDNPYLKYNHADAEFQERLQEDTSFGGNLGRAVFQAKKRVLEPLGLVEEAAKTAPGKKRPVEQSPQEPDSSSGIGKSGQQPAXKRLNFGQTGDSESVPDPQPLGEPPAAPSGVGSNTMASGGGAPMADNNEGADGVGNSSGNWHCDSTWLGDRVITTSTRTWALPTYNNHLYKQISSQSGASNDNHYFGYSTPWGYFDFNRFHCHFSPRDWQRLINNNWGFRPKXLNFKLFNIQVKEVTQNDGTTTIANNLTSTVQVFTDSEYQLPYVLGSAHQGCLPPFPADVFMIPQYGYLTLNNGSQAVGRSSFYCLEYFPSQMLRTGNNFXFSYTFEDVPFHSSYAHSQSLDRLMNPLIDQYLYYLXRTQTTSGTTQQSRLXFSQAGPSSMXQQAXNWLPGPCYRQQRVSKTANDNNNSNFAWTXATKYHLNGRDSLVNPGPAMASHKDDEEKFFPMHGXLIFGKQGTGASNVDLDNVMITDEEEIRTTNPVATEQYGTVATNLQSSNTAPATGTVNSQGALPGMVWQDRDVYLQGPIWAKIPHTDGHFHPSPLMGGFGLKHPPPQILIKNTPVPANPPTTFSPAKFASFITQYSTGQVSVEIEWELQKENSKRWNPEIQYTSNYNKSVNVDFTVDTNGVYSEPRPIGTRYLTRNL

SEQ ID NO: 142 - protein, 736 aa, synthetic construct
MAADGYLPDWLEDNLSEGIREWWDLKPGAPKPKANQQKQDDGRGLVLPGYKYLGPFNGLDKGEPVNAADAAALEHDKAYDQQLKAGDNPYLRYNHADAEFQERLQEDTSFGGNLGRAVFQAKKRVLEPLGLVEEGAKTAPGKKRPVEQSPQEPDSSSGIGKKGQQPARKRLNFGQTGDSESVPDPQPLGEPPAAPSGVGSNTMAAGGGAPMADNNEGADGVGNASGNWHCDSTWLGDRVITTSTRTWALPTYNNHLYKQISSQSGGSTNDNTYFGYSTPWGYFDFNRFHCHFSPRDWQRLINNNWGFRPKKLNFKLFNIQVKEVTTNDGTTTIANNLTSTVQVFTDSEYQLPYVLGSAHQGCLPPFPADVFMIPQYGYLTLNNGSQAVGRSSFYCLEYFPSQMLRTGNNFQFSYTFEDVPFHSSYAHSQSLDRLMNPLIDQYLYYLSRTQTTSGTAGNRTLQFSQAGPSSMANQAKNWLPGPCYRQQRVSKTTNQNNNSNFAWTGATKYHLNGRDSLVNPGPAMATHKDDEDKFFPMSGVLIFGKQGAGNSNVDLDNVMITNEEEIKTTNPVATEEYGTVATNLQSANTAPATGTVNSQGALPGMVWQDRDVYLQGPIWAKIPHTDGHFHPSPLMGGFGLKHPPPQILIKNTPVPANPPTTFSPAKFASFITQYSTGQVSVEIEWELQKENSKRWNPEIQYTSNYNKSTNVDFAVDTNGVYSEPRPIGTRYLTRNL

SEQ ID NO: 143 - protein, 736 aa, synthetic construct
MAADGYLPDWLEDNLSEGIREWWDLKPGAPKPKANQQKQDDGRGLVLPGYKYLGPFNGLDKGEPVNAADAAALEHDKAYDQQLKAGDNPYLRYNHADAEFQERLQEDTSFGGNLGRAVFQAKKRVLEPLGLVEEGAKTAPGKKRPVEQSPQEPDSSSGIGKKGQQPAKKRLNFGQTGDSESVPDPQPLGEPPAAPSGVGSNTMAAGGGAPMADNNEGADGVGNASGNWHCDSTWLGDRVITTSTRTWALPTYNNHLYKQISSQSGASTNDNTYFGYSTPWGYFDFNRFHCHFSPRDWQRLINNNWGFRPKRLNFKLFNIQVKEVTTNDGTTTIANNLTSTVQVFTDSEYQLPYVLGSAHQGCLPPFPADVFMIPQYGYLTLNNGSQAVGRSSFYCLEYFPSQMLRTGNNFEFSYTFEDVPFHSSYAHSQSLDRLMNPLIDQYLYYLSRTQTTSGTAGNRTLQFSQAGPSSMANQAKNWLPGPCYRQQRVSKTANQNNNSNFAWTGATKYHLNGRDSLVNPGPAMATHKDDEDKFFPMSGVLIFGKQGAGNSNVDLDNVMITSEEEIKTTNPVATEQYGTVATNLQSSNTAPATGTVNSQGALPGMVWQNRDVYLQGPIWAKIPHTDGHFHPSPLMGGFGLKHPPPQILIKNTPVPANPPTTFSPAKFASFITQYSTGQVSVEIEWELQKENSKRWNPEIQYTSNYNKSTNVDFAVDTNGVYSEPRPIGTRYLTRNL

SEQ ID NO: 144 - protein, 736 aa, synthetic construct
MAADGYLPDWLEDNLSEGIREWWDLKPGAPKPKANQQKQDDGRGLVLPGYKYLGPFNGLDKGEPVNAADAAALEHDKAYDQQLKAGDNPYLRYNHADAEFQERLQEDTSFGGNLGRAVFQAKKRVLEPLGLVEEGAKTAPGKKRPVEQSPQEPDSSSGIGKKGQQPARKRLNFGQTGDSESVPDPQPLGEPPAAPSGVGSNTMAAGGGAPMADNNEGADGVGNASGNWHCDSTWLGDRVITTSTRTWALPTYNNHLYKQISSQSGGSTNDNTYFGYSTPWGYFDFNRFHCHFSPRDWQRLINNNWGFRPKRLNFKLFNIQVKEVTTNDGTTTIANNLTSTVQVFTDSEYQLPYVLGSAHQGCLPPFPADVFMIPQYGYLTLNNGSQAVGRSSFYCLEYFPSQMLRTGNNFEFSYTFEDVPFHSSYAHSQSLDRLMNPLIDQYLYYLSRTQTTSGTAGNRTLQFSQAGPSSMANQAKNWLPGPCYRQQRVSKTANQNNNSNFAWTGATKYHLNGRDSLVNPGPAMATHKDDEDKFFPMSGVLIFGKQGAGNSNVDLDNVMITNEEEIKTTNPVATEQYGTVATNLQSANTAPATGTVNSQGALPGMVWQDRDVYLQGPIWAKIPHTDGHFHPSPLMGGFGLKHPPPQILIKNTPVPANPPTTFSPAKFASFITQYSTGQVSVEIEWELQKENSKRWNPEIQYTSNYNKSTNVDFAVDTNGVYSEPRPIGTRYLTRNL

SEQ ID NO: 145 - protein, 736 aa, synthetic construct
MAADGYLPDWLEDNLSEGIREWWDLKPGAPKPKANQQKQDDGRGLVLPGYKYLGPFNGLDKGEPVNAADAAALEHDKAYDQQLKAGDNPYLRYNHADAEFQERLQEDTSFGGNLGRAVFQAKKRVLEPLGLVEEGAKTAPGKKRPVEQSPQEPDSSSGIGKKGQQPAKKRLNFGQTGDSESVPDPQPLGEPPAAPSGVGSNTMAAGGGAPMADNNEGADGVGNASGNWHCDSTWLGDRVITTSTRTWALPTYNNHLYKQISSQSGGSTNDNTYFGYSTPWGYFDFNRFHCHFSPRDWQRLINNNWGFRPKKLNFKLFNIQVKEVTTNDGTTTIANNLTSTVQVFTDSEYQLPYVLGSAHQGCLPPFPADVFMIPQYGYLTLNNGSQAVGRSSFYCLEYFPSQMLRTGNNFEFSYTFEDVPFHSSYAHSQSLDRLMNPLIDQYLYYLSRTQTTSGTAGNRTLQFSQAGPSSMANQAKNWLPGPCYRQQRVSKTANQNNNSNFAWTGATKYHLNGRDSLVNPGPAMATHKDDEDKFFPMSGVLIFGKQGAGNSNVDLDNVMITSEEEIKTTNPVATEQYGTVATNLQSSNTAPATGTVNSQGALPGMVWQNRDVYLQGPIWAKIPHTDGHFHPSPLMGGFGLKHPPPQILIKNTPVPANPPTTFSPAKFASFITQYSTGQVSVEIEWELQKENSKRWNPEIQYTSNYNKSTNVDFAVDTNGVYSEPRPIGTRYLTRNL

SEQ ID NO: 146 - protein, 736 aa, synthetic construct
MAADGYLPDWLEDNLSEGIREWWDLKPGAPKPKANQQKQDDGRGLVLPGYKYLGPFNGLDKGEPVNAADAAALEHDKAYDQQLKAGDNPYLRYNHADAEFQERLQEDTSFGGNLGRAVFQAKKRVLEPLGLVEEGAKTAPGKKRPVEQSPQEPDSSSGIGKKGQQPAKKRLNFGQTGDSESVPDPQPLGEPPAAPSGVGSNTMASGGGAPMADNNEGADGVGNASGNWHCDSTWLGDRVITTSTRTWALPTYNNHLYKQISSQSGGSTNDNTYFGYSTPWGYFDFNRFHCHFSPRDWQRLINNNWGFRPKKLNFKLFNIQVKEVTTNDGTTTIANNLTSTVQVFTDSEYQLPYVLGSAHQGCLPPFPADVFMIPQYGYLTLNNGSQAVGRSSFYCLEYFPSQMLRTGNNFEFSYTFEDVPFHSSYAHSQSLDRLMNPLIDQYLYYLSRTQTTSGTAGNRTLQFSQAGPSSMANQAKNWLPGPCYRQQRVSKTANQNNNSNFAWTGATKYHLNGRDSLVNPGPAMATHKDDEDKFFPMSGVLIFGKQGAGNSNVDLDNVMITSEEEIKTTNPVATEEYGTVATNLQSSNTAPATGTVNSQGALPGMVWQNRDVYLQGPIWAKIPHTDGHFHPSPLMGGFGLKHPPPQILIKNTPVPANPPTTFSPAKFASFITQYSTGQVSVEIEWELQKENSKRWNPEIQYTSNYNKSTNVDFAVDTNGVYSEPRPIGTRYLTRNL

SEQ ID NO: 147 - protein, 736 aa, synthetic construct
MAADGYLPDWLEDNLSEGIREWWDLKPGAPKPKANQQKQDDGRGLVLPGYKYLGPFNGLDKGEPVNAADAAALEHDKAYDQQLKAGDNPYLRYNHADAEFQERLQEDTSFGGNLGRAVFQAKKRVLEPLGLVEEGAKTAPGKKRPVEQSPQEPDSSSGIGKKGQQPAKKRLNFGQTGDSESVPDPQPLGEPPAAPSGVGSNTMASGGGAPMADNNEGADGVGNASGNWHCDSTWLGDRVITTSTRTWALPTYNNHLYKQISSQSGGSTNDNTYFGYSTPWGYFDFNRFHCHFSPRDWQRLINNNWGFRPKKLNFKLFNIQVKEVTTNDGTTTIANNLTSTVQVFTDSEYQLPYVLGSAHQGCLPPFPADVFMIPQYGYLTLNNGSQAVGRSSFYCLEYFPSQMLRTGNNFQFSYTFEDVPFHSSYAHSQSLDRLMNPLIDQYLYYLSRTQTTSGTAGNRELQFSQAGPSSMANQAKNWLPGPCYRQQRVSKTTNQNNNSNFAWTGATKYHLNGRDSLVNPGPAMATHKDDEDKFFPMSGVLIFGKQGAGNSNVDLDNVMITNEEEIKTTNPVATEQYGTVATNLQSANTAPATGTVNSQGALPGMVWQDRDVYLQGPIWAKIPHTDGHFHPSPLMGGFGLKHPPPQILIKNTPVPANPPTTFSPAKFASFITQYSTGQVSVEIEWELQKENSKRWNPEIQYTSNYNKSTNVDFAVDTNGVYSEPRPIGTRYLTRNL

SEQ ID NO: 148 - protein, 736 aa, synthetic construct
MAADGYLPDWLEDNLSEGIREWWDLKPGAPKPKANQQKQDDGRGLVLPGYKYLGPFNGLDKGEPVNAADAAALEHDKAYDQQLKAGDNPYLRYNHADAEFQERLQEDTSFGGNLGRAVFQAKKRVLEPLGLVEEGAKTAPGKKRPVEQSPQEPDSSSGIGKKGQQPAKKRLNFGQTGDSESVPDPQPLGEPPAAPSGVGSNTMASGGGAPMADNNEGADGVGNASGNWHCDSTWLGDRVITTSTRTWALPTYNNHLYKQISSQSGASTNDNTYFGYSTPWGYFDFNRFHCHFSPRDWQRLINNNWGFRPKRLNFKLFNIQVKEVTTNDGTTTIANNLTSTVQVFTDSEYQLPYVLGSAHQGCLPPFPADVFMIPQYGYLTLNNGSQAVGRSSFYCLEYFPSQMLRTGNNFQFSYTFEDVPFHSSYAHSQSLDRLMNPLIDQYLYYLSRTQTTSGTAGNRELQFSQAGPSSMANQAKNWLPGPCYRQQRVSKTTNQNNNSNFAWTGATKYHLNGRDSLVNPGPAMATHKDDEDKFFPMSGVLIFGKQGAGNSNVDLDNVMITNEEEIKTTNPVATEEYGTVATNLQSANTAPATGTVNSQGALPGMVWQNRDVYLQGPIWAKIPHTDGHFHPSPLMGGFGLKHPPPQILIKNTPVPANPPTTFSPAKFASFITQYSTGQVSVEIEWELQKENSKRWNPEIQYTSNYNKSTNVDFAVDTNGVYSEPRPIGTRYLTRNL

SEQ ID NO: 149 - protein, 736 aa, synthetic construct
MAADGYLPDWLEDNLSEGIREWWDLKPGAPKPKANQQKQDDGRGLVLPGYKYLGPFNGLDKGEPVNAADAAALEHDKAYDQQLKAGDNPYLRYNHADAEFQERLQEDTSFGGNLGRAVFQAKKRVLEPLGLVEEGAKTAPGKKRPVEQSPQEPDSSSGIGKKGQQPARKRLNFGQTGDSESVPDPQPLGEPPAAPSGVGSNTMAAGGGAPMADNNEGADGVGNASGNWHCDSTWLGDRVITTSTRTWALPTYNNHLYKQISSQSGGSTNDNTYFGYSTPWGYFDFNRFHCHFSPRDWQRLINNNWGFRPKRLNFKLFNIQVKEVTTNDGTTTIANNLTSTVQVFTDSEYQLPYVLGSAHQGCLPPFPADVFMIPQYGYLTLNNGSQAVGRSSFYCLEYFPSQMLRTGNNFEFSYTFEDVPFHSSYAHSQSLDRLMNPLIDQYLYYLSRTQTTSGTAGNRELQFSQAGPSSMANQAKNWLPGPCYRQQRVSKTTNQNNNSNFAWTGATKYHLNGRDSLVNPGPAMATHKDDEDKFFPMSGVLIFGKQGAGNSNVDLDNVMITSEEEIKTTNPVATEEYGTVATNLQSSNTAPATGTVNSQGALPGMVWQERDVYLQGPIWAKIPHTDGHFHPSPLMGGFGLKHPPPQILIKNTPVPANPPTTFSPAKFASFITQYSTGQVSVEIEWELQKENSKRWNPEIQYTSNYNKSTNVDFAVDTNGVYSEPRPIGTRYLTRNL

SEQ ID NO: 150 - protein, 736 aa, synthetic construct
MAADGYLPDWLEDNLSEGIREWWDLKPGAPKPKANQQKQDDGRGLVLPGYKYLGPFNGLDKGEPVNAADAAALEHDKAYDQQLKAGDNPYLRYNHADAEFQERLQEDTSFGGNLGRAVFQAKKRVLEPLGLVEEGAKTAPGKKRPVEQSPQEPDSSSGIGKKGQQPARKRLNFGQTGDSESVPDPQPLGEPPAAPSGVGSNTMASGGGAPMADNNEGADGVGNASGNWHCDSTWLGDRVITTSTRTWALPTYNNHLYKQISSQSGGSTNDNTYFGYSTPWGYFDFNRFHCHFSPRDWQRLINNNWGFRPKKLNFKLFNIQVKEVTTNDGTTTIANNLTSTVQVFTDSEYQLPYVLGSAHQGCLPPFPADVFMIPQYGYLTLNNGSQAVGRSSFYCLEYFPSQMLRTGNNFEFSYTFEDVPFHSSYAHSQSLDRLMNPLIDQYLYYLSRTQTTSGTAGNRELQFSQAGPSSMANQAKNWLPGPCYRQQRVSKTTNQNNNSNFAWTGATKYHLNGRDSLVNPGPAMATHKDDEDKFFPMSGVLIFGKQGAGNSNVDLDNVMITSEEEIKTTNPVATEEYGTVATNLQSANTAPATGTVNSQGALPGMVWQDRDVYLQGPIWAKIPHTDGHFHPSPLMGGFGLKHPPPQILIKNTPVPANPPTTFSPAKFASFITQYSTGQVSVEIEWELQKENSKRWNPEIQYTSNYNKSTNVDFAVDTNGVYSEPRPIGTRYLTRNL

SEQ ID NO: 151 - protein, 738 aa, synthetic construct
MAADGYLPDWLEDNLSEGIREWWDLKPGAPKPKANQQKQDDGRGLVLPGYKYLGPFNGLDKGEPVNAADAAALEHDKAYDQQLKAGDNPYLRYNHADAEFQERLQEDTSFGGNLGRAVFQAKKRVLEPLGLVEEGAKTAPGKKRPVEQSPQREPDSSTGIGKSGQQPAKKRLNFGQTGDSESVPDPQPLGEPPAAPSGVGSNTMASGGGAPMADNNEGADGVGNSSGNWHCDSTWLGDRVITTSTRTWALPTYNNHLYKQISNGTSGGSTNDNTYFGYSTPWGYFDFNRFHCHFSPRDWQRLINNNWGFRPKRLNFKLFNIQVKEVTTNEGTKTIANNLTSTVQVFTDSEYQLPYVLGSAHQGCLPPFPADVFMIPQYGYLTLNNGSQAVGRSSFYCLEYFPSQMLRTGNNFQFSYTFEDVPFHSSYAHSQSLDRLMNPLIDQYLYYLSRTQTTGGTAGTQTLQFSQAGPSSMANQARNWVPGPCYRQQRVSTTTNQNNNSNFAWTGATKYHLNGRDSLMNPGVAMASHKDDEDRFFPSSGVLIFGKQGAGNDNVDYSNVMITSEEEIKTTNPVATEEYGVVATNHQSANTQAQTGTVQNQGILPGMVWQNRDVYLQGPIWAKIPHTDGNFHPSPLMGGFGLKHPPPQILIKNTPVPADPPTTFNQAKLNSFITQYSTGQVSVEIEWELQKENSKRWNPEIQYTSNYYKSTNVDFAVNTEGVYSEPRPIGTRYLTRNL

SEQ ID NO: 152 - protein, 738 aa, synthetic construct
MAADGYLPDWLEDNLSEGIREWWDLKPGAPKPKANQQKQDNGRGLVLPGYKYLGPFNGLDKGEPVNAADAAALEHDKAYDQQLQAGDNPYLRYNHADAEFQERLQEDTSFGGNLGRAVFQAKKRVLEPLGLVESPVKTAPGKKRPVEPSPQRSPDSSTGIGKKGQQPAKKRLNFGQTGDSESVPDPQPIGEPPAGPSGLGSGTMAAGGGAPMADNNEGADGVGSSSGNWHCDSTWLGDRVITTSTRTWALPTYNNHLYKQISNGTSGGSTNDNTYFGYSTPWGYFDFNRFHCHFSPRDWQRLINNNWGFRPKRLNFKLFNIQVKEVTQNEGTKTIANNLTSTIQVFTDSEYQLPYVLGSAHQGCLPPFPADVFMIPQYGYLTLNNGSQAVGRSSFYCLEYFPSQMLRTGNNFEFSYNFEDVPFHSSYAHSQSLDRLMNPLIDQYLYYLSRTQSTGGTAGTQQLLFSQAGPNNMSAQAKNWLPGPCYRQQRVSTTLSQNNNSNFAWTGATKYHLNGRDSLVNPGVAMATHKDDEERFFPSSGVLMFGKQGAGKDNVDYSSVMLTSEEEIKTTNPVATEQYGVVADNLQQQNAAPIVGAVNSQGALPGMVWQNRDVYLQGPIWAKIPHTDGNFHPSPLMGGFGLKHPPPQLLIKNTPVPADPPTTFNQAKLASFLTQYSTGQVSVEIEWELQKENSKRWNPEIQYTSNYYKSTNVDFAVNTEGTYSEPRPIGTRYLTRNL

SEQ ID NO: 153 - protein, 736 aa, synthetic construct
MAADGYLPDWLEDNLSEGIREWWDLKPGAPKPKANQQKQDDGRGLVLPGYKYLGPFNGLDKGEPVNAADAAALEHDKAYDQQLKAGDNPYLRYNHADAEFQERLQEDTSFGGNLGRAVFQAKKRVLEPLGLVEEGAKTAPGKKRPVEQSPQEPDSSSGIGKKGQQPAKKRLNFGQTGDSESVPDPQPLGEPPAAPSGVGSNTMAAGGGAPMADNNEGADGVGNASGNWHCDSTWLGDRVITTSTRTWALPTYNNHLYKQISSQSGASTNDNTYFGYSTPWGYFDFNRFHCHFSPRDWQRLINNNWGFRPKKLNFKLFNIQVKEVTTNDGTTTIANNLTSTVQVFTDSEYQLPYVLGSAHQGCLPPFPADVFMIPQYGYLTLNNGSQAVGRSSFYCLEYFPSQMLRTGNNFQFSYTFEDVPFHSSYAHSQSLDRLMNPLIDQYLYYLSRTQTTSGTAGNRELQFSQAGPSSMANQAKNWLPGPCYRQQRVSKTANQNNNSNFAWTGATKYHLNGRDSLVNPGPAMATHKDDEDKFFPMSGVLIFGKQGAGNSNVDLDNVMITNEEEIKTTNPVATEEYGTVATNLQSSNTAPATGTVNSQGALPGMVWQDRDVYLQGPIWAKIPHTDGHFHPSPLMGGFGLKHPPPQILIKNTPVPANPPTTFSPAKFASFITQYSTGQVSVEIEWELQKENSKRWNPEIQYTSNYNKSTNVDFAVDTNGVYSEPRPIGTRYLTRNL

SEQ ID NO: 154 - protein, 736 aa, synthetic construct
MAADGYLPDWLEDNLSEGIREWWDLKPGAPKPKANQQKQDDGRGLVLPGYKYLGPFNGLDKGEPVNAADAAALEHDKAYDQQLKAGDNPYLRYNHADAEFQERLQEDTSFGGNLGRAVFQAKKRVLEPLGLVEEGAKTAPGKKRPVEQSPQEPDSSSGIGKKGQQPAKKRLNFGQTGDSESVPDPQPLGEPPAAPSGVGSNTMAAGGGAPMADNNEGADGVGNASGNWHCDSTWLGDRVITTSTRTWALPTYNNHLYKQISSQSGASTNDNTYFGYSTPWGYFDFNRFHCHFSPRDWQRLINNNWGFRPKRLNFKLFNIQVKEVTTNDGTTTIANNLTSTVQVFTDSEYQLPYVLGSAHQGCLPPFPADVFMIPQYGYLTLNNGSQAVGRSSFYCLEYFPSQMLRTGNNFQFSYTFEDVPFHSSYAHSQSLDRLMNPLIDQYLYYLSRTQTTSGTAGNRTLQFSQAGPSSMANQAKNWLPGPCYRQQRVSKTTNQNNNSNFAWTGATKYHLNGRDSLVNPGPAMATHKDDEDKFFPMSGVLIFGKQGAGNSNVDLDNVMITNEEEIKTTNPVATEQYGTVATNLQSANTAPATGTVNSQGALPGMVWQDRDVYLQGPIWAKIPHTDGHFHPSPLMGGFGLKHPPPQILIKNTPVPANPPTTFSPAKFASFITQYSTGQVSVEIEWELQKENSKRWNPEIQYTSNYNKSTNVDFAVDTNGVYSEPRPIGTRYLTRNL

SEQ ID NO: 155 - protein, 736 aa, synthetic construct
MAADGYLPDWLEDNLSEGIREWWDLKPGAPKPKANQQKQDDGRGLVLPGYKYLGPFNGLDKGEPVNAADAAALEHDKAYDQQLKAGDNPYLRYNHADAEFQERLQEDTSFGGNLGRAVFQAKKRVLEPLGLVEEGAKTAPGKKRPVEQSPQEPDSSSGIGKKGQQPAKKRLNFGQTGDSESVPDPQPLGEPPAAPSGVGSNTMAAGGGAPMADNNEGADGVGNASGNWHCDSTWLGDRVITTSTRTWALPTYNNHLYKQISSQSGASTNDNTYFGYSTPWGYFDFNRFHCHFSPRDWQRLINNNWGFRPKRLNFKLFNIQVKEVTTNDGTTTIANNLTSTVQVFTDSEYQLPYVLGSAHQGCLPPFPADVFMIPQYGYLTLNNGSQAVGRSSFYCLEYFPSQMLRTGNNFQFSYTFEDVPFHSSYAHSQSLDRLMNPLIDQYLYYLSRTQTTSGTAGNRTLQFSQAGPSSMANQAKNWLPGPCYRQQRVSKTANQNNNSNFAWTGATKYHLNGRDSLVNPGPAMATHKDDEDKFFPMSGVLIFGKQGAGNSNVDLDNVMITSEEEIKTTNPVATEEYGTVATNLQSANTAPATGTVNSQGALPGMVWQNRDVYLQGPIWAKIPHTDGHFHPSPLMGGFGLKHPPPQILIKNTPVPANPPTTFSPAKFASFITQYSTGQVSVEIEWELQKENSKRWNPEIQYTSNYNKSTNVDFAVDTNGVYSEPRPIGTRYLTRNL

SEQ ID NO: 156 - protein, 736 aa, synthetic construct
MAADGYLPDWLEDNLSEGIREWWDLKPGAPKPKANQQKQDDGRGLVLPGYKYLGPFNGLDKGEPVNAADAAALEHDKAYDQQLKAGDNPYLRYNHADAEFQERLQEDTSFGGNLGRAVFQAKKRVLEPLGLVEEGAKTAPGKKRPVEQSPQEPDSSSGIGKKGQQPAKKRLNFGQTGDSESVPDPQPLGEPPAAPSGVGSNTMASGGGAPMADNNEGADGVGNASGNWHCDSTWLGDRVITTSTRTWALPTYNNHLYKQISSQSGASTNDNTYFGYSTPWGYFDFNRFHCHFSPRDWQRLINNNWGFRPKRLNFKLFNIQVKEVTTNDGTTTIANNLTSTVQVFTDSEYQLPYVLGSAHQGCLPPFPADVFMIPQYGYLTLNNGSQAVGRSSFYCLEYFPSQMLRTGNNFEFSYTFEDVPFHSSYAHSQSLDRLMNPLIDQYLYYLSRTQTTSGTAGNRELQFSQAGPSSMANQAKNWLPGPCYRQQRVSKTTNQNNNSNFAWTGATKYHLNGRDSLVNPGPAMATHKDDEDKFFPMSGVLIFGKQGAGNSNVDLDNVMITSEEEIKTTNPVATEEYGTVATNLQSSNTAPATGTVNSQGALPGMVWQDRDVYLQGPIWAKIPHTDGHFHPSPLMGGFGLKHPPPQILIKNTPVPANPPTTFSPAKFASFITQYSTGQVSVEIEWELQKENSKRWNPEIQYTSNYNKSTNVDFAVDTNGVYSEPRPIGTRYLTRNL

SEQ ID NO: 157 - protein, 736 aa, synthetic construct
MAADGYLPDWLEDNLSEGIREWWDLKPGAPKPKANQQKQDDGRGLVLPGYKYLGPFNGLDKGEPVNAADAAALEHDKAYDQQLKAGDNPYLRYNHADAEFQERLQEDTSFGGNLGRAVFQAKKRVLEPLGLVEEGAKTAPGKKRPVEQSPQEPDSSSGIGKKGQQPARKRLNFGQTGDSESVPDPQPLGEPPAAPSGVGSNTMAAGGGAPMADNNEGADGVGNASGNWHCDSTWLGDRVITTSTRTWALPTYNNHLYKQISSQSGASTNDNTYFGYSTPWGYFDFNRFHCHFSPRDWQRLINNNWGFRPKKLNFKLFNIQVKEVTTNDGTTTIANNLTSTVQVFTDSEYQLPYVLGSAHQGCLPPFPADVFMIPQYGYLTLNNGSQAVGRSSFYCLEYFPSQMLRTGNNFQFSYTFEDVPFHSSYAHSQSLDRLMNPLIDQYLYYLSRTQTTSGTAGNRTLQFSQAGPSSMANQAKNWLPGPCYRQQRVSKTTNQNNNSNFAWTGATKYHLNGRDSLVNPGPAMATHKDDEDKFFPMSGVLIFGKQGAGNSNVDLDNVMITNEEEIKTTNPVATEEYGTVATNLQSANTAPATGTVNSQGALPGMVWQDRDVYLQGPIWAKIPHTDGHFHPSPLMGGFGLKHPPPQILIKNTPVPANPPTTFSPAKFASFITQYSTGQVSVEIEWELQKENSKRWNPEIQYTSNYNKSTNVDFAVDTNGVYSEPRPIGTRYLTRNL

SEQ ID NO: 158 - protein, 736 aa, synthetic construct
MAADGYLPDWLEDNLSEGIREWWDLKPGAPKPKANQQKQDDGRGLVLPGYKYLGPFNGLDKGEPVNAADAAALEHDKAYDQQLKAGDNPYLRYNHADAEFQERLQEDTSFGGNLGRAVFQAKKRVLEPLGLVEEGAKTAPGKKRPVEQSPQEPDSSSGIGKKGQQPARKRLNFGQTGDSESVPDPQPLGEPPAAPSGVGSNTMASGGGAPMADNNEGADGVGNASGNWHCDSTWLGDRVITTSTRTWALPTYNNHLYKQISSQSGASTNDNTYFGYSTPWGYFDFNRFHCHFSPRDWQRLINNNWGFRPKRLNFKLFNIQVKEVTTNDGTTTIANNLTSTVQVFTDSEYQLPYVLGSAHQGCLPPFPADVFMIPQYGYLTLNNGSQAVGRSSFYCLEYFPSQMLRTGNNFQFSYTFEDVPFHSSYAHSQSLDRLMNPLIDQYLYYLSRTQTTSGTAGNRELQFSQAGPSSMANQAKNWLPGPCYRQQRVSKTANQNNNSNFAWTGATKYHLNGRDSLVNPGPAMATHKDDEDKFFPMSGVLIFGKQGAGNSNVDLDNVMITNEEEIKTTNPVATEQYGTVATNLQSANTAPATGTVNSQGALPGMVWQNRDVYLQGPIWAKIPHTDGHFHPSPLMGGFGLKHPPPQILIKNTPVPANPPTTFSPAKFASFITQYSTGQVSVEIEWELQKENSKRWNPEIQYTSNYNKSTNVDFAVDTNGVYSEPRPIGTRYLTRNL

SEQ ID NO: 159 - protein, 746 aa, synthetic construct; identical to SEQ ID NO: 39

SEQ ID NO: 160 - protein, 14 aa, synthetic construct
AAVALLPAVLLALL

SEQ ID NO: 161 - protein, 12 aa, synthetic construct
AAVLLPVLLAAP

SEQ ID NO: 162 - protein, 11 aa, synthetic construct
ACSSSPSKHCG

SEQ ID NO: 163 - protein, 11 aa, synthetic construct
ACTTPHAWLCG

SEQ ID NO: 164 - protein, 7 aa, synthetic construct
ADGVQWT

SEQ ID NO: 165 - protein, 14 aa, synthetic construct
ADIFPAKAFPVRFE

SEQ ID NO: 166 - protein, 14 aa, synthetic construct
ADSESGGHITHSGM

SEQ ID NO: 167 - protein, 12 aa, synthetic construct
AERRRRGDQSTL

SEQ ID NO: 168 - protein, 7 aa, synthetic construct
AGILKRW

SEQ ID NO: 169 - protein, 10 aa, synthetic construct
AGVKDGKLDF

SEQ ID NO: 170 - protein, 12 aa, synthetic construct
AGYLLGKINLKA

SEQ ID NO: 171 - protein, 14 aa, synthetic construct
AGYLLGKINLKALA

SEQ ID NO: 172 - protein, 12 aa, synthetic construct
AHSLKSITNHGL

SEQ ID NO: 173 - protein, 9 aa, synthetic construct
AKEGANVAG

SEQ ID NO: 174 - protein, 14 aa, synthetic construct
ALFLGFLGAAGSTM

SEQ ID NO: 175 - protein, 14 aa, synthetic construct
ALLPVGQPSHAPSV

SEQ ID NO: 176 - protein, 12 aa, synthetic construct
APTAYNKNDWAL

SEQ ID NO: 177 - protein, 11 aa, synthetic construct
AQFTLTTPKAQ

SEQ ID NO: 178 - protein, 11 aa, synthetic construct
AQMNSTKNVAQ

SEQ ID NO: 179 - protein, 11 aa, synthetic construct
AQSVSKPFLAQ

SEQ ID NO: 180 - protein, 11 aa, synthetic construct
AQTLAQPFKAQ

SEQ ID NO: 181 - protein, 11 aa, synthetic construct
AQTLATPFKAQ

SEQ ID NO: 182 - protein, 11 aa, synthetic construct
AQTLSNPFKAQ

SEQ ID NO: 183 - protein, 11 aa, synthetic construct
AQTLSQPFKAQ

SEQ ID NO: 184 - protein, 11 aa, synthetic construct
AQTLSTPFKAQ

SEQ ID NO: 185 - protein, 11 aa, synthetic construct
AQTLTMPFKAQ

SEQ ID NO: 186 - protein, 11 aa, synthetic construct
AQTNRTIQTAQ

SEQ ID NO: 187 - protein, 11 aa, synthetic construct
AQTTLKPFSNP

SEQ ID NO: 188 - protein, 14 aa, synthetic construct
ASHRCGGQSANVEP

SEQ ID NO: 189 - protein, 11 aa, synthetic construct
ASKKPKRNIKA

SEQ ID NO: 190 - protein, 9 aa, synthetic construct
ATDIKGKEV

SEQ ID NO: 191 - protein, 14 aa, synthetic construct
ATRSETPVEVLAQQ

SEQ ID NO: 192 - protein, 11 aa, synthetic construct
ATTLATPFKAQ

SEQ ID NO: 193 - protein, 11 aa, synthetic construct
ATTLAVPFKAQ

SEQ ID NO: 194 - protein, 14 aa, synthetic construct
AVALLPAVLLALLA

SEQ ID NO: 195 - protein, 14 aa, synthetic construct
AVDLEAFLQEFGLL

SEQ ID NO: 196 - protein, 14 aa, synthetic construct
AVTDQLGEDFFAVD

SEQ ID NO: 197 - protein, 12 aa, synthetic construct
AYPQKFNNNFMS

SEQ ID NO: 198 - protein, 10 aa, synthetic construct
CATDIKGAEC

SEQ ID NO: 199 - protein, 9 aa, synthetic construct
CDCRGDCFC

SEQ ID NO: 200 - protein, 6 aa, synthetic construct
CDGKQC

SEQ ID NO: 201 - protein, 14 aa, synthetic construct
CDIFTNSRGKRASN

SEQ ID NO: 202 - protein, 9 aa, synthetic construct
CENWWGDVC

SEQ ID NO: 203 - protein, 12 aa, synthetic construct
CHPPCHYIPRPK

SEQ ID NO: 204 - protein, 14 aa, synthetic construct
CIGKDARDAMDRIF

SEQ ID NO: 205 - protein, 8 aa, synthetic construct
CKDWGRIC

SEQ ID NO: 206 - protein, 9 aa, synthetic construct
CLSSRLDAC

SEQ ID NO: 207 - protein, 7 aa, synthetic construct
CNGRCGG

SEQ ID NO: 208 - protein, 14 aa, synthetic construct
CNGRCGGKKLKLLL

SEQ ID NO: 209 - protein, 14 aa, synthetic construct
CNGRCGGKLAKLAK

SEQ ID NO: 210 - protein, 11 aa, synthetic construct
CNGRCGGLVTT

SEQ ID NO: 211 - protein, 9 aa, synthetic construct
CNSRLHLRC

SEQ ID NO: 212 - protein, 12 aa, synthetic construct
CPQVKPGIKLEC

SEQ ID NO: 213 - protein, 9 aa, synthetic construct
CRTIGPSVC

SEQ ID NO: 214 - protein, 14 aa, synthetic construct
CSFNISTSIRGKVQ

SEQ ID NO: 215 - protein, 13 aa, synthetic construct
CSIPPEVKFNKPF

SEQ ID NO: 216 - protein, 7 aa, synthetic construct
CTDEKQC

SEQ ID NO: 217 - protein, 8 aa, synthetic construct
CTDIKGKC

SEQ ID NO: 218 - protein, 8 aa, synthetic construct
CTRITESC

SEQ ID NO: 219 - protein, 9 aa, synthetic construct
CTSTSAPYC

SEQ ID NO: 220 - protein, 14 aa, synthetic construct
CVLREGPAGGCAWF

SEQ ID NO: 221 - protein, 8 aa, synthetic construct
CVLRGGRC

SEQ ID NO: 222 - protein, 10 aa, synthetic construct
DAFCSSRGKV

SEQ ID NO: 223 - protein, 7 aa, synthetic construct
DDGVSWK

SEQ ID NO: 224 - protein, 7 aa, synthetic construct
DGAATKN

SEQ ID NO: 225 - protein, 10 aa, synthetic construct
DGFCSSRGKR

SEQ ID NO: 226 - protein, 7 aa, synthetic construct
DGPWRKM

SEQ ID NO: 227 - protein, 11 aa, synthetic construct
DGTALKPFLAQ

SEQ ID NO: 228 - protein, 11 aa, synthetic construct
DGTLATPFKAQ

SEQ ID NO: 229 - protein, 9 aa, synthetic construct
DGTLAVPFK

SEQ ID NO: 230 - protein, 11 aa, synthetic construct
DGTLAVPFSNP

SEQ ID NO: 231 - protein, 10 aa, synthetic construct
DIFTNSRGKR

SEQ ID NO: 232 - protein, 14 aa, synthetic construct
DKTTQTVAVEFDTF

SEQ ID NO: 233 - protein, 14 aa, synthetic construct
DNPASTTNKLFAVR

SEQ ID NO: 234 - protein, 14 aa, synthetic construct
DPGYAETPYASVSH

SEQ ID NO: 235 - protein, 11 aa, synthetic construct
DSTLAVPFKAQ

SEQ ID NO: 236 - protein, 7 aa, synthetic construct
DVGIRPS

SEQ ID NO: 237 - protein, 14 aa, synthetic construct
DVPPAGPGEIQATW

SEQ ID NO: 238 - protein, 14 aa, synthetic construct
EAFLQEFGLLPEKE

SEQ ID NO: 239 - protein, 14 aa, synthetic construct
EASHRCGGQSANVE

SEQ ID NO: 240 - protein, 14 aa, synthetic construct
EDENGTLKVTFPTP

SEQ ID NO: 241 - protein, 14 aa, synthetic construct
EDNRGINQKLAFNY

SEQ ID NO: 242 - protein, 5 aa, synthetic construct
EDTVL

SEQ ID NO: 243 - protein, 14 aa, synthetic construct
EEAQIQQEKNMYEL

SEQ ID NO: 244 - protein, 14 aa, synthetic construct
EENITALLEEAQIQ

SEQ ID NO: 245 - protein, 14 aa, synthetic construct
EESQNQQEKNEQEL

SEQ ID NO: 246 - protein, 14 aa, synthetic construct
EGPAGGCAWFNRHR

SEQ ID NO: 247 - protein, 11 aa, synthetic construct
EGTLAVPFKAQ

SEQ ID NO: 248 - protein, 14 aa, synthetic construct
EIDNYTDYIYDLLE

SEQ ID NO: 249 - protein, 14 aa, synthetic construct
EINNYTSLIHSLIE

SEQ ID NO: 250 - protein, 14 aa, synthetic construct
EIRTGRAERWSEKF

SEQ ID NO: 251 - protein, 14 aa, synthetic construct
EKSQTQQEKNEKEL

SEQ ID NO: 252 - protein, 7 aa, synthetic construct
ENFSKVA

SEQ ID NO: 253 - protein, 6 aa, synthetic construct
ENRAKV

SEQ ID NO: 254 - protein, 14 aa, synthetic construct
ENSFRFLADIFPAK

SEQ ID NO: 255 - protein, 7 aa, synthetic construct
EQFRNLA

SEQ ID NO: 256 - protein, 14 aa, synthetic construct
EQSEHRGDLAALNT

SEQ ID NO: 257 - protein, 7 aa, synthetic construct
ERVGFAQ

SEQ ID NO: 258 - protein, 7 aa, synthetic construct
ESGHGFY

SEQ ID NO: 259 - protein, 11 aa, synthetic construct
ESTLAVPFKAQ

SEQ ID NO: 260 - protein, 9 aa, synthetic construct
ESYGTEWSS

SEQ ID NO: 261 - protein, 12 aa, synthetic construct
ESYGTEWSSYKT

SEQ ID NO: 262 - protein, 12 aa, synthetic construct
ESYGTEWSSYRT

SEQ ID NO: 263 - protein, 7 aa, synthetic construct
EVRGGPS

SEQ ID NO: 264 - protein, 14 aa, synthetic construct
EVYVVAENQQGKSK

SEQ ID NO: 265 - protein, 14 aa, synthetic construct
FATDETIMKLSIAI

SEQ ID NO: 266 - protein, 7 aa, synthetic construct
FGQKASS

SEQ ID NO: 267 - protein, 14 aa, synthetic construct
FNISTSIRGKVQKE

SEQ ID NO: 268 - protein, 7 aa, synthetic construct
FNSPVIQ

SEQ ID NO: 269 - protein, 7 aa, synthetic construct
FRLSSPQ

SEQ ID NO: 270 - protein, 14 aa, synthetic construct
FSKVSAETQASPPE

SEQ ID NO: 271 - protein, 7 aa, synthetic construct
FSRPAFL

SEQ ID NO: 272 - protein, 14 aa, synthetic construct
FTGHLKCRLRMDKL

SEQ ID NO: 273 - protein, 7 aa, synthetic construct
FTVSALK

SEQ ID NO: 274 - protein, 12 aa, synthetic construct
GAILARGEINFK

SEQ ID NO: 275 - protein, 14 aa, synthetic construct
GALFLGFLGAAGST

SEQ ID NO: 276 - protein, 14 aa, synthetic construct
GGAYVTRSSAVRLR

SEQ ID NO: 277 - protein, 10 aa, synthetic construct
GGGKGGKGGG

SEQ ID NO: 278 - protein, 10 aa, synthetic construct
GGGYSKGGKG

SEQ ID NO: 279 - protein, 7 aa, synthetic construct
GGIQVDG

SEQ ID NO: 280 - protein, 10 aa, synthetic construct
GGKGGGKGGK

SEQ ID NO: 281 - protein, 10 aa, synthetic construct
GGKGGKGGGK

SEQ ID NO: 282 - protein, 11 aa, synthetic construct
GGTLATPFKAQ

SEQ ID NO: 283 - protein, 11 aa, synthetic construct
GGTLAVPFKAQ

SEQ ID NO: 284 - protein, 9 aa, synthetic construct
GHKAKGPRK

SEQ ID NO: 285 - protein, 14 aa, synthetic construct
GHLKCRLRMDKLQL

SEQ ID NO: 286 - protein, 10 aa, synthetic construct
GKGGGKGGKG

SEQ ID NO: 287 - protein, 10 aa, synthetic construct
GKGGKGGGKG

SEQ ID NO: 288 - protein, 7 aa, synthetic construct
GKSTQTG

SEQ ID NO: 289 - protein, 14 aa, synthetic construct
GLAHSFSDFARDFV

SEQ ID NO: 290 - protein, 12 aa, synthetic construct
GLHTSATNLYLH

SEQ ID NO: 291 - protein, 14 aa, synthetic construct
GLIQSDQELFSSPN

SEQ ID NO: 292 - protein, 12 aa, synthetic construct
GLLFYMARINHA

SEQ ID NO: 293 - protein, 12 aa, synthetic construct
GLNLPQNKVSFS

SEQ ID NO: 294 - protein, 14 aa, synthetic construct
GLRKRLRKFRNKIK

SEQ ID NO: 295 - protein, 14 aa, synthetic construct
GMIGYETDENRAKV

SEQ ID NO: 296 - protein, 14 aa, synthetic construct
GPAGGCAWFNRHRL

SEQ ID NO: 297 - protein, 14 aa, synthetic construct
GPRFSNLVLQALLV

SEQ ID NO: 298 - protein, 12 aa, synthetic construct
GPSYLHRLVPAF

SEQ ID NO: 299 - protein, 14 aa, synthetic construct
GQTGDSESVPDPQP

SEQ ID NO: 300 - protein, 12 aa, synthetic construct
GRALARGEINFK

SEQ ID NO: 301 - protein, 14 aa, synthetic construct
GREIRTGRAERWSE

SEQ ID NO: 302 - protein, 12 aa, synthetic construct
GRILARGEANFK

SEQ ID NO: 303 - protein, 12 aa, synthetic construct
GRILARGEINFA

SEQ ID NO: 304 - protein, 12 aa, synthetic construct
GRILARGEINFK

SEQ ID NO: 305 - protein, 10 aa, synthetic construct
GRLSYSRRRF

SEQ ID NO: 306 - protein, 10 aa, synthetic construct
GRNTVGLSSA

SEQ ID NO: 307 - protein, 7 aa, synthetic construct
GSKCSRG

SEQ ID NO: 308 - protein, 11 aa, synthetic construct
GSNKGAIIGLM

SEQ ID NO: 309 - protein, 12 aa, synthetic construct
GSWGLNDSSAAY

SEQ ID NO: 310 - protein, 14 aa, synthetic construct
GYRPVHNIRGHWAP

SEQ ID NO: 311 - protein, 12 aa, synthetic construct
HAEHSQVRGAAN

SEQ ID NO: 312 - protein, 7 aa, synthetic construct
HAIYPRH

SEQ ID NO: 313 - protein, 12 aa, synthetic construct
HASGSISGFWPN

SEQ ID NO: 314 - protein, 14 aa, synthetic construct
HLKCRLRMDKLQLK

SEQ ID NO: 315 - protein, 13 aa, synthetic construct
HLNILSTLWKYRC

SEQ ID NO: 316 - protein, 9 aa, synthetic construct
HLRKLRKRL

SEQ ID NO: 317 - protein, 9 aa, synthetic construct
HLRLLRLRL

SEQ ID NO: 318 - protein, 14 aa, synthetic construct
HPKNIQSLEVIGKG

SEQ ID NO: 319 - protein, 12 aa, synthetic construct
HPWCCGLRLDLR

SEQ ID NO: 320 - protein, 14 aa, synthetic construct
HRCGGQSANVEPRI

SEQ ID NO: 321 - protein, 14 aa, synthetic construct
HRDDHETDMELKPA

SEQ ID NO: 322 - protein, 6 aa, synthetic construct
HSPGKO

SEQ ID NO: 323 - protein, 8 aa, synthetic construct
IDGQSSKS

SEQ ID NO: 324 - protein, 12 aa, synthetic construct
IDLRPKDDLPQP

SEQ ID NO: 325 - protein, 12 aa, synthetic construct
IEASFYDAPRGG

SEQ ID NO: 326 - protein, 10 aa, synthetic construct
IEKPNTSTKK

SEQ ID NO: 327 - protein, 14 aa, synthetic construct
IFRRAFASRVFPPE

SEQ ID NO: 328 - protein, 12 aa, synthetic construct
IGVRGCIWDPQP

SEQ ID NO: 329 - protein, 14 aa, synthetic construct
IKIWFQNRRMKWKK

SEQ ID NO: 330 - protein, 14 aa, synthetic construct
IKTTSGIHPKNIQS

SEQ ID NO: 331 - protein, 14 aa, synthetic construct
INLKALAALAKKIL

SEQ ID NO: 332 - protein, 14 aa, synthetic construct
IRIWFQNRRMRWRR

SEQ ID NO: 333 - protein, 7 aa, synthetic construct
ISDTRIS

SEQ ID NO: 334 - protein, 14 aa, synthetic construct
ISNDLENLRDLLHV

SEQ ID NO: 335 - protein, 7 aa, synthetic construct
ISTHSPP

SEQ ID NO: 336 - protein, 13 aa, synthetic construct
IWCDIFTNSRGKR

SEQ ID NO: 337 - protein, 14 aa, synthetic construct
KAAAVLLPVLLAAP

SEQ ID NO: 338 - protein, 8 aa, synthetic construct
KAPETALD

SEQ ID NO: 339 - protein, 14 aa, synthetic construct
KCRLRMDKLQLKGM

SEQ ID NO: 340 - protein, 14 aa, synthetic construct
KDARDAMDRIFARR

SEQ ID NO: 341 - protein, 7 aa, synthetic construct
KDSTAFG

SEQ ID NO: 342 - protein, 14 aa, synthetic construct
KEAQRLLDTVNPSL

SEQ ID NO: 343 - protein, 12 aa, synthetic construct
KETWWETWWTEW

SEQ ID NO: 344 - protein, 8 aa, synthetic construct
KFTVSALK

SEQ ID NO: 345 - protein, 10 aa, synthetic construct
KGGGKGGKGG

SEQ ID NO: 346 - protein, 10 aa, synthetic construct
KGGKGGGKGG

SEQ ID NO: 347 - protein, 14 aa, synthetic construct
KKAAAVLLPVLLAA

SEQ ID NO: 348 - protein, 12 aa, synthetic construct
KKTWWKTWWTKW

SEQ ID NO: 349 - protein, 14 aa, synthetic construct
KKWKMRRNQFWVKV

SEQ ID NO: 350 - protein, 14 aa, synthetic construct
KLSFRARAYGFRGP

SEQ ID NO: 351 - protein, 14 aa, synthetic construct
KMRRNQFWVKVQRG

SEQ ID NO: 352 - protein, 14 aa, synthetic construct
KRNNFLRGIRSRGD

SEQ ID NO: 353 - protein, 14 aa, synthetic construct
KVDFLEENITALLE

SEQ ID NO: 354 - protein, 14 aa, synthetic construct
KVDISSQISSMNQS

SEQ ID NO: 355 - protein, 6 aa, synthetic construct
KYSFNY

SEQ ID NO: 356 - protein, 7 aa, synthetic construct
KYSFNYD

SEQ ID NO: 357 - protein, 10 aa, synthetic construct
KYSFNYDGSE

SEQ ID NO: 358 - protein, 10 aa, synthetic construct
LADQDYTKTA

SEQ ID NO: 359 - protein, 14 aa, synthetic construct
LAHSFSDFARDFVA

SEQ ID NO: 360 - protein, 12 aa, synthetic construct
LAKNNLKDCGLF

SEQ ID NO: 361 - protein, 12 aa, synthetic construct
LAKNNLKECGLY

SEQ ID NO: 362 - protein, 14 aa, synthetic construct
LALKLALKALKAAL

SEQ ID NO: 363 - protein, 14 aa, synthetic construct
LDKEFNSIFRRAFA

SEQ ID NO: 364 - protein, 14 aa, synthetic construct
LDYVPIGPRFSNLV

SEQ ID NO: 365 - protein, 14 aa, synthetic construct
LFLGFLGAAGSTMG

SEQ ID NO: 366 - protein, 14 aa, synthetic construct
LFTGHLKCRLRMDK

SEQ ID NO: 367 - protein, 10 aa, synthetic construct
LGNGKMTVQP

SEQ ID NO: 368 - protein, 7 aa, synthetic construct
LGRLTAN

SEQ ID NO: 369 - protein, 14 aa, synthetic construct
LKCRLRMDKLQLKG

SEQ ID NO: 370 - protein, 14 aa, synthetic construct
LLELDKWASLWNWF

SEQ ID NO: 371 - protein, 14 aa, synthetic construct
LLELDKWAVFGNWF

SEQ ID NO: 372 - protein, 14 aa, synthetic construct
LLIILRRRIRKQAH

SEQ ID NO: 373 - protein, 14 aa, synthetic construct
LLPAVLLALLAVTD

SEQ ID NO: 374 - protein, 14 aa, synthetic construct
LLPVGQPSHAPSVH

SEQ ID NO: 375 - protein, 11 aa, synthetic construct
LLRAALRKAAL

SEQ ID NO: 376 - protein, 7 aa, synthetic construct
LNERGLG

SEQ ID NO: 377 - protein, 12 aa, synthetic construct
LNTNSQLQTNNA

SEQ ID NO: 378 - protein, 12 aa, synthetic construct
LPDPHATNILFR

SEQ ID NO: 379 - protein, 14 aa, synthetic construct
LPVGQPSHAPSVHL

SEQ ID NO: 380 - protein, 14 aa, synthetic construct
LQFPVGRVHRLLRK

SEQ ID NO: 381 - protein, 14 aa, synthetic construct
LRCMCIKTTSGIHP

SEQ ID NO: 382 - protein, 14 aa, synthetic construct
LREGPAGGCAWFNR

SEQ ID NO: 383 - protein, 8 aa, synthetic construct
LRKLRKRL

SEQ ID NO: 384 - protein, 9 aa, synthetic construct
LRKLRKRLL

SEQ ID NO: 385 - protein, 10 aa, synthetic construct
LRKLRKRLLR

SEQ ID NO: 386 - protein, 14 aa, synthetic construct
LRKRLRKFRNKIKE

SEQ ID NO: 387 - protein, 8 aa, synthetic construct
LRLLRLRL

SEQ ID NO: 388 - protein, 12 aa, synthetic construct
LRPCHPPCHYIP

SEQ ID NO: 389 - protein, 14 aa, synthetic construct
LRRRIRKQAHAHSK

SEQ ID NO: 390 - protein, 8 aa, synthetic construct
LSSIESDV

SEQ ID NO: 391 - protein, 14 aa, synthetic construct
LSYSRRRFSTSTGR

SEQ ID NO: 392 - protein, 14 aa, synthetic construct
LTSGHLKCRVKMEK

SEQ ID NO: 393 - protein, 7 aa, synthetic construct
LTVSALK

SEQ ID NO: 394 - protein, 14 aa, synthetic construct
MNLLRKIVKNRRDE

SEQ ID NO: 395 - protein, 14 aa, synthetic construct
MNYTLKGQGRTLYG

SEQ ID NO: 396 - protein, 7 aa, synthetic construct
MPGRAPI

SEQ ID NO: 397 - protein, 13 aa, synthetic construct
MPKKKPTPIQLNP

SEQ ID NO: 398 - protein, 7 aa, synthetic construct
MPRLRGC

SEQ ID NO: 399 - protein, 14 aa, synthetic construct
MQSGRRGDLTALNT

SEQ ID NO: 400 - protein, 13 aa, synthetic construct
MRRKVELFTYMRF

SEQ ID NO: 401 - protein, 13 aa, synthetic construct
MSCDIFTNSDGKR

SEQ ID NO: 402 - protein, 13 aa, synthetic construct
MSCDIFTNSRGKR

SEQ ID NO: 403 - protein, 7 aa, synthetic construct
MTLTRQE

SEQ ID NO: 404 - protein, 13 aa, synthetic construct
MWCDAFCSSRGKV

SEQ ID NO: 405 - protein, 7 aa, synthetic construct
MYSLMKD

SEQ ID NO: 406 - protein, 14 aa, synthetic construct
NDLENLRDLLHVLA

SEQ ID NO: 407 - protein, 14 aa, synthetic construct
NDTGHETDENRAKV

SEQ ID NO: 408 - protein, 7 aa, synthetic construct
NDVRAVS

SEQ ID NO: 409 - protein, 7 aa, synthetic construct
NDVRSAN

SEQ ID NO: 410 - protein, 7 aa, synthetic construct
NEARVRE

SEQ ID NO: 411 - protein, 7 aa, synthetic construct
NIPKAYG

SEQ ID NO: 412 - protein, 14 aa, synthetic construct
NLTEYSLSRVDLGD

SEQ ID NO: 413 - protein, 10 aa, synthetic construct
NMLKRARNRV

SEQ ID NO: 414 - protein, 14 aa, synthetic construct
NPASTTNKLFAVRK

SEQ ID NO: 415 - protein, 14 aa, synthetic construct
NQSLQQSKDYIKEA

SEQ ID NO: 416 - protein, 11 aa, synthetic construct
NQTLAVPFKAQ

SEQ ID NO: 417 - protein, 7 aa, synthetic construct
NRGTEWD

SEQ ID NO: 418 - protein, 12 aa, synthetic construct
NRPDSAQFWLHH

SEQ ID NO: 419 - protein, 14 aa, synthetic construct
NSIFRRAFASRVFP

SEQ ID NO: 420 - protein, 14 aa, synthetic construct
NTLEWIPRFKVSPY

SEQ ID NO: 421 - protein, 14 aa, synthetic construct
NTLVDTSGYNAEVS

SEQ ID NO: 422 - protein, 7 aa, synthetic construct
NYSRGVD

SEQ ID NO: 423 - protein, 14 aa, synthetic construct
NYTLKGQGRTLYGF

SEQ ID NO: 424 - protein, 14 aa, synthetic construct
PAHLVNVSEGANFT

SEQ ID NO: 425 - protein, 7 aa, synthetic construct
PAIKTYS

SEQ ID NO: 426 - protein, 5 aa, synthetic construct
PAKKR

SEQ ID NO: 427 - protein, 11 aa, synthetic construct
PCHYIPRPKPR

SEQ ID NO: 428 - protein, 14 aa, synthetic construct
PEASHRCGGQSANV

SEQ ID NO: 429 - protein, 7 aa, synthetic construct
PKKKRKV

SEQ ID NO: 430 - protein, 12 aa, synthetic construct
PKKKRKVEDPYC

SEQ ID NO: 431 - protein, 7 aa, synthetic construct
PLRMVNE

SEQ ID NO: 432 - protein, 14 aa, synthetic construct
PPEVKFNKPFVYLI

SEQ ID NO: 433 - protein, 7 aa, synthetic construct
PPRPPRK

SEQ ID NO: 434 - protein, 9 aa, synthetic construct
PPRPPRPPR

SEQ ID NO: 435 - protein, 7 aa, synthetic construct
PRDTFNG

SEQ ID NO: 436 - protein, 8 aa, synthetic construct
PRHLSDLA

SEQ ID NO: 437 - protein, 6 aa, synthetic construct
PRSADL

SEQ ID NO: 438 - protein, 7 aa, synthetic construct
PRSVDLS

SEQ ID NO: 439 - protein, 14 aa, synthetic construct
PSHAPSVHLAAATQ

SEQ ID NO: 440 - protein, 14 aa, synthetic construct
PVGQPSHAPSVHLA

SEQ ID NO: 441 - protein, 12 aa, synthetic construct
PWVPEWMPPRHT

SEQ ID NO: 442 - protein, 12 aa, synthetic construct
PWVPSWMPPRHT

SEQ ID NO: 443 - protein, 7 aa, synthetic construct
PYASITG

SEQ ID NO: 444 - protein, 14 aa, synthetic construct
QATRSETPVEVLAQ

SEQ ID NO: 445 - protein, 7 aa, synthetic construct
QAVRTSL

SEQ ID NO: 446 - protein, 14 aa, synthetic construct
QDGCKYFATDETIM

SEQ ID NO: 447 - protein, 11 aa, synthetic construct
QGTLAVPFKAQ

SEQ ID NO: 448 - protein, 14 aa, synthetic construct
QIKIWFQNRRMKWK

SEQ ID NO: 449 - protein, 14 aa, synthetic construct
QISNDLENLRDLLH

SEQ ID NO: 450 - protein, 14 aa, synthetic construct
QKVQDDTKTLIKTI

SEQ ID NO: 451 - protein, 14 aa, synthetic construct
QPSHAPSVHLAAAT

SEQ ID NO: 452 - protein, 14 aa, synthetic construct
QQIAAGPTEGAPSV

SEQ ID NO: 453 - protein, 7 aa, synthetic construct
QRARPDT

SEQ ID NO: 454 - protein, 14 aa, synthetic construct
QSSSTDPATGDVHV

SEQ ID NO: 455 - protein, 12 aa, synthetic construct
QTFSRPDWTMYL

SEQ ID NO: 456 - protein, 14 aa, synthetic construct
RARAYGFRGPGPQL

SEQ ID NO: 457 - protein, 14 aa, synthetic construct
RCGGQSANVEPRIL

SEQ ID NO: 458 - protein, 14 aa, synthetic construct
RCVLREGPAGGCAW

SEQ ID NO: 459 - protein, 10 aa, synthetic construct
RDALSGLRPE

SEQ ID NO: 460 - protein, 14 aa, synthetic construct
RDAMDRIFARRYNA

SEQ ID NO: 461 - protein, 14 aa, synthetic construct
RDDHETDMELKPAN

SEQ ID NO: 462 - protein, 14 aa, synthetic construct
REGPAGGCAWFNRH

SEQ ID NO: 463 - protein, 14 aa, synthetic construct
REIRTGRAERWSEK

SEQ ID NO: 464 - protein, 7 aa, synthetic construct
RGDLGLS

SEQ ID NO: 465 - protein, 14 aa, synthetic construct
RGGRLSYSRRRFST

SEQ ID NO: 466 - protein, 14 aa, synthetic construct
RKIVKNRRDEDTQK

SEQ ID NO: 467 - protein, 9 aa, synthetic construct
RKKRRQRRR

SEQ ID NO: 468 - protein, 14 aa, synthetic construct
RKRLRKFRNKIKEK

SEQ ID NO: 469 - protein, 14 aa, synthetic construct
RLDLNLVVLLLAQL

SEQ ID NO: 470 - protein, 11 aa, synthetic construct
RPKPQQFFGLM

SEQ ID NO: 471 - protein, 7 aa, synthetic construct
RPLTAND

SEQ ID NO: 472 - protein, 8 aa, synthetic construct
RPRSAADI

SEQ ID NO: 473 - protein, 12 aa, synthetic construct
RPRTRLHTHRNR

SEQ ID NO: 474 - protein, 14 aa, synthetic construct
RQIKIWFQNRRMKW

SEQ ID NO: 475 - protein, 7 aa, synthetic construct
RQPTTIP

SEQ ID NO: 476 - protein, 14 aa, synthetic construct
RQSGRRGDMSALNT

SEQ ID NO: 477 - protein, 11 aa, synthetic construct
RRKVELFTYMR

SEQ ID NO: 478 - protein, 10 aa, synthetic construct
RRLSYSRRRF

SEQ ID NO: 479 - protein, 7 aa, synthetic construct
RRRRRRR

SEQ ID NO: 480 - protein, 14 aa, synthetic construct
RSETPVEVLAQQTH

SEQ ID NO: 481 - protein, 7 aa, synthetic construct
RSTSSLL

SEQ ID NO: 482 - protein, 14 aa, synthetic construct
RTPGDEPAPAVAAQ

SEQ ID NO: 483 - protein, 14 aa, synthetic construct
SALLEDPVGTVAPQ

SEQ ID NO: 484 - protein, 14 aa, synthetic construct
SALLPVGQPSHAPS

SEQ ID NO: 485 - protein, 7 aa, synthetic construct
SCNTATC

SEQ ID NO: 486 - protein, 7 aa, synthetic construct
SDGLAWV

SEQ ID NO: 487 - protein, 7 aa, synthetic construct
SDGLTWS

SEQ ID NO: 488 - protein, 12 aa, synthetic construct
SEAVRHLAGPPR

SEQ ID NO: 489 - protein, 14 aa, synthetic construct
SETPVEVLAQQTHG

SEQ ID NO: 490 - protein, 14 aa, synthetic construct
SFNISTSIRGKVQK

SEQ ID NO: 491 - protein, 14 aa, synthetic construct
SFTSPLHKNENTVS

SEQ ID NO: 492 - protein, 11 aa, synthetic construct
SGNLAVPFKAQ

SEQ ID NO: 493 - protein, 11 aa, synthetic construct
SGSLAVPFKAQ

SEQ ID NO: 494 - protein, 12 aa, synthetic construct
SGVYKVAYDWQH

SEQ ID NO: 495 - protein, 14 aa, synthetic construct
SHRCGGQSANVEPR

SEQ ID NO: 496 - protein, 14 aa, synthetic construct
SIPGFPAEGSIPLP

SEQ ID NO: 497 - protein, 12 aa, synthetic construct
SISTSFHAYKLK

SEQ ID NO: 498 - protein, 7 aa, synthetic construct
SLSHSPQ

SEQ ID NO: 499 - protein, 14 aa, synthetic construct
SNYTLKGQGRTLYG

SEQ ID NO: 500 - protein, 7 aa, synthetic construct
SPGARAF

SEQ ID NO: 501 - protein, 9 aa, synthetic construct
SQPKKKRKV

SEQ ID NO: 502 - protein, 9 aa, synthetic construct
SQPKSKRKV

SEQ ID NO: 503 - protein, 14 aa, synthetic construct
SRAGLQFPVGRVHR

SEQ ID NO: 504 - protein, 7 aa, synthetic construct
SRAGTVP

SEQ ID NO: 505 - protein, 14 aa, synthetic construct
SRNVIQISNDLENL

SEQ ID NO: 506 - protein, 12 aa, synthetic construct
SSLELSRSSAAS

SEQ ID NO: 507 - protein, 14 aa, synthetic construct
SSMKLSFRARAYGF

SEQ ID NO: 508 - protein, 14 aa, synthetic construct
SSSHPIFHRGEFSV

SEQ ID NO: 509 - protein, 14 aa, synthetic construct
STLLPPELSDTTNA

SEQ ID NO: 510 - protein, 15 aa, synthetic construct
SVVVSSDSSKRPRNL

SEQ ID NO: 511 - protein, 7 aa, synthetic construct
SYGTEWS

SEQ ID NO: 512 - protein, 11 aa, synthetic construct
SYGTEWSSYKT

SEQ ID NO: 513 - protein, 11 aa, synthetic construct
SYGTEWSSYRT

SEQ ID NO: 514 - protein, 7 aa, synthetic construct
SYSTSRS

SEQ ID NO: 515 - protein, 7 aa, synthetic construct
SYTSSTM

SEQ ID NO: 516 - protein, 7 aa, synthetic construct
TALKPFL

SEQ ID NO: 517 - protein, 14 aa, synthetic construct
TDDGVSAPILPNFH

SEQ ID NO: 518 - protein, 7 aa, synthetic construct
TDFRSPQ

SEQ ID NO: 519 - protein, 14 aa, synthetic construct
TDMELKPANAATRT

SEQ ID NO: 520 - protein, 14 aa, synthetic construct
TDYIYDLLEKSQTQ

SEQ ID NO: 521 - protein, 7 aa, synthetic construct
TFVSALK

SEQ ID NO: 522 - protein, 14 aa, synthetic construct
TFYGGRPKRNNFLR

SEQ ID NO: 523 - protein, 7 aa, synthetic construct
TGAFSST

SEQ ID NO: 524 - protein, 10 aa, synthetic construct
TGDRISSRTL

SEQ ID NO: 525 - protein, 14 aa, synthetic construct
TGDYVAANETHSGR

SEQ ID NO: 526 - protein, 14 aa, synthetic construct
TGHLKCRLRMDKLQ

SEQ ID NO: 527 - protein, 12 aa, synthetic construct
TGNYKALHPHNG

SEQ ID NO: 528 - protein, 12 aa, synthetic construct
THRPPEWSPVWP

SEQ ID NO: 529 - protein, 12 aa, synthetic construct
THRPPMWSPVWP

SEQ ID NO: 530 - protein, 7 aa, synthetic construct
TITLPCK

SEQ ID NO: 531 - protein, 14 aa, synthetic construct
TKTLIKTIVTRIND

SEQ ID NO: 532 - protein, 7 aa, synthetic construct
TLAVPFK

SEQ ID NO: 533 - protein, 9 aa, synthetic construct
TLAVPFSNP

SEQ ID NO: 534 - protein, 14 aa, synthetic construct
TLNSAGYLLGKINL

SEQ ID NO: 535 - protein, 13 aa, synthetic construct
TPCDIFTNSRGKR

SEQ ID NO: 536 - protein, 14 aa, synthetic construct
TPCDIFTNSRGKRA

SEQ ID NO: 537 - protein, 12 aa, synthetic construct
TPQLPIDVNADR

SEQ ID NO: 538 - protein, 14 aa, synthetic construct
TQKSSPASAPLDDG

SEQ ID NO: 539 - protein, 14 aa, synthetic construct
TQSERRGDLAALNT

SEQ ID NO: 540 - protein, 14 aa, synthetic construct
TQSGRRGDLSTFNT

SEQ ID NO: 541 - protein, 14 aa, synthetic construct
TQSGRRGDMSELNT

SEQ ID NO: 542 - protein, 14 aa, synthetic construct
TQSGRRGDMSELST

SEQ ID NO: 543 - protein, 14 aa, synthetic construct
TQSGRRGDMSTFNT

SEQ ID NO: 544 - protein, 14 aa, synthetic construct
TRINDISHTQSVSS

SEQ ID NO: 545 - protein, 7 aa, synthetic construct
TRPSSTN

SEQ ID NO: 546 - protein, 14 aa, synthetic construct
TRSETPVEVLAQQT

SEQ ID NO: 547 - protein, 14 aa, synthetic construct
TRSSAVRLRSSVPG

SEQ ID NO: 548 - protein, 14 aa, synthetic construct
TRSSRAGLQFPVGR

SEQ ID NO: 549 - protein, 14 aa, synthetic construct
TSCDIFTNSRGKRA

SEQ ID NO: 550 - protein, 14 aa, synthetic construct
TSLIHSLIEESQNQ

SEQ ID NO: 551 - protein, 7 aa, synthetic construct
TSNSRTE

SEQ ID NO: 552 - protein, 7 aa, synthetic construct
TTLKPFL

SEQ ID NO: 553 - protein, 14 aa, synthetic construct
TVDNPASTTNKLFA

SEQ ID NO: 554 - protein, 6 aa, synthetic construct
TVPALR

SEQ ID NO: 555 - protein, 7 aa, synthetic construct
TVPALRK

SEQ ID NO: 556 - protein, 7 aa, synthetic construct
TVSALFK

SEQ ID NO: 557 - protein, 6 aa, synthetic construct
TVSALK

SEQ ID NO: 558 - protein, 14 aa, synthetic construct
TWCDGFCSSRGKRI

SEQ ID NO: 559 - protein, 12 aa, synthetic construct
VAARTGEIYVPW

SEQ ID NO: 560 - protein, 14 aa, synthetic construct
VALLPAVLLALLAK

SEQ ID NO: 561 - protein, 14 aa, synthetic construct
VDGIPVSWDADARA

SEQ ID NO: 562 - protein, 14 aa, synthetic construct
VDNPASTTNKLFAV

SEQ ID NO: 563 - protein, 7 aa, synthetic construct
VELPPPK

SEQ ID NO: 564 - protein, 18 aa, synthetic construct
VELPPPVELPPPVELPPP

SEQ ID NO: 565 - protein, 7 aa, synthetic construct
VGARLSA

SEQ ID NO: 566 - protein, 7 aa, synthetic construct
VGHAGNP

SEQ ID NO: 567 - protein, 12 aa, synthetic construct
VIGPLDRHAHLK

SEQ ID NO: 568 - protein, 7 aa, synthetic construct
VISDRSS

SEQ ID NO: 569 - protein, 14 aa, synthetic construct
VLREGPAGGCAWFN

SEQ ID NO: 570 - protein, 14 aa, synthetic construct
VMSVLLVDTDATQQ

SEQ ID NO: 571 - protein, 12 aa, synthetic construct
VNMVPIGGNQVV

SEQ ID NO: 572 - protein, 5 aa, synthetic construct
VPALR

SEQ ID NO: 573 - protein, 6 aa, synthetic construct
VPALRK

SEQ ID NO: 574 - protein, 7 aa, synthetic construct
VPQSSSR

SEQ ID NO: 575 - protein, 12 aa, synthetic construct
VQLRNGFPYFSY

SEQ ID NO: 576 - protein, 14 aa, synthetic construct
VQSEHRGDLSALIT

SEQ ID NO: 577 - protein, 14 aa, synthetic construct
VQSEHRGDLSALNT

SEQ ID NO: 578 - protein, 14 aa, synthetic construct
VQSGRRGDLTALNT

SEQ ID NO: 579 - protein, 14 aa, synthetic construct
VQSGRRGDMSMLNS

SEQ ID NO: 580 - protein, 14 aa, synthetic construct
VQSGRRGDMSMLNT

SEQ ID NO: 581 - protein, 14 aa, synthetic construct
VQSKRRGDLAALNT

SEQ ID NO: 582 - protein, 14 aa, synthetic construct
VQSVRRGDMTALNT

SEQ ID NO: 583 - protein, 7 aa, synthetic construct
VRLPPPK

SEQ ID NO: 584 - protein, 18 aa, synthetic construct
VRLPPPVRLPPPVRLPPP

SEQ ID NO: 585 - protein, 14 aa, synthetic construct
VRLRSSVPGVRLLQ

SEQ ID NO: 586 - protein, 14 aa, synthetic construct
VRSEHRGDLSALNT

SEQ ID NO: 587 - protein, 5 aa, synthetic construct
VSALK

SEQ ID NO: 588 - protein, 6 aa, synthetic construct
VSALKK

SEQ ID NO: 589 - protein, 7 aa, synthetic construct
VSNPLNQ

SEQ ID NO: 590 - protein, 7 aa, synthetic construct
VSRSYPA

SEQ ID NO: 591 - protein, 11 aa, synthetic construct
VTKEEWQQGFV

SEQ ID NO: 592 - protein, 12 aa, synthetic construct
VTKEEWQQGFVF

SEQ ID NO: 593 - protein, 13 aa, synthetic construct
VTKEEWQQGFVFS

SEQ ID NO: 594 - protein, 11 aa, synthetic construct
VTKREWQQGFV

SEQ ID NO: 595 - protein, 12 aa, synthetic construct
VTKREWQQGFVF

SEQ ID NO: 596 - protein, 13 aa, synthetic construct
VTKREWQQGFVFS

SEQ ID NO: 597 - protein, 11 aa, synthetic construct
VTKSEWQQGFV

SEQ ID NO: 598 - protein, 12 aa, synthetic construct
VTKSEWQQGFVF

SEQ ID NO: 599 - protein, 13 aa, synthetic construct
VTKSEWQQGFVFS

SEQ ID NO: 600 - protein, 14 aa, synthetic construct
VYFSRLDLNLVVLL

SEQ ID NO: 601 - protein, 14 aa, synthetic construct
WDREINNYTSLIHS

SEQ ID NO: 602 - protein, 14 aa, synthetic construct
WEREIDNYTDYIYD

SEQ ID NO: 603 - protein, 14 aa, synthetic construct
WERKVDFLEENITA

SEQ ID NO: 604 - protein, 14 aa, synthetic construct
WMEWDREINNYTSL

SEQ ID NO: 605 - protein, 14 aa, synthetic construct
WMEWEREIDNYTDY

SEQ ID NO: 606 - protein, 14 aa, synthetic construct
WQEWERKVDFLEEN

SEQ ID NO: 607 - protein, 14 aa, synthetic construct
WRCVLREGPAGGCA

SEQ ID NO: 608 - protein, 7 aa, synthetic construct
WSTNAGY

SEQ ID NO: 609 - protein, 14 aa, synthetic construct
YAALRCMCIKTTSG

SEQ ID NO: 610 - protein, 11 aa, synthetic construct
YGRKKRRQRRR

SEQ ID NO: 611 - protein, 12 aa, synthetic construct
YGRKKRRQRRRK

SEQ ID NO: 612 - protein, 14 aa, synthetic construct
YGRKKRRQRRRPPQ

SEQ ID NO: 613 - protein, 11 aa, synthetic construct
YGRRARRRRRR

SEQ ID NO: 614 - protein, 7 aa, synthetic construct
YGSRSVD

SEQ ID NO: 615 - protein, 12 aa, synthetic construct
YLPDQQLTWFPS

SEQ ID NO: 616 - protein, 7 aa, synthetic construct
YPGRNPD

SEQ ID NO: 617 - protein, 14 aa, synthetic construct
YQQILTSMPSRNVI

SEQ ID NO: 618 - protein, 14 aa, synthetic construct
YRPVHNIRGHWAPG

SEQ ID NO: 619 - protein, 14 aa, synthetic construct
YTIWMPENPRPGTP

SEQ ID NO: 620 - protein, 9 aa, synthetic construct
PLNGAVRLY

SEQ ID NO: 621 - protein, 9 aa, synthetic construct
PSNATIRVF

SEQ ID NO: 622 - protein, 9 aa, synthetic construct
PSNATGHVY

SEQ ID NO: 623 - protein, 9 aa, synthetic construct
PSNATGHVH

SEQ ID NO: 624 - protein, 9 aa, synthetic construct
PSNATGHVK

SEQ ID NO: 625 - protein, 9 aa, synthetic construct
PSNATGKVF

SEQ ID NO: 626 - protein, 9 aa, synthetic construct
PSNASVRVF

SEQ ID NO: 627 - protein, 9 aa, synthetic construct
PSNASVKLY

SEQ ID NO: 628 - protein, 9 aa, synthetic construct
PSNASVKLF

SEQ ID NO: 629 - protein, 9 aa, synthetic construct
PSNASAHVH

SEQ ID NO: 630 - protein, 9 aa, synthetic construct
PSNASAHVF

SEQ ID NO: 631 - protein, 9 aa, synthetic construct
PSNASIRLH

SEQ ID NO: 632 - protein, 9 aa, synthetic construct
PSNASIKVF

SEQ ID NO: 633 - protein, 9 aa, synthetic construct
PSNASGHLY

SEQ ID NO: 634 - protein, 9 aa, synthetic construct
PSNASGHLK

SEQ ID NO: 635 - protein, 9 aa, synthetic construct
PSNASGHVK

SEQ ID NO: 636 - protein, 9 aa, synthetic construct
PSNASGRVF

SEQ ID NO: 637 - protein, 9 aa, synthetic construct
PLNATGHLY

SEQ ID NO: 638 - protein, 9 aa, synthetic construct
PLNATGHLR

SEQ ID NO: 639 - protein, 9 aa, synthetic construct
PSNAVVKLY

SEQ ID NO: 640 - protein, 9 aa, synthetic construct
PSNAVVKVF

SEQ ID NO: 641 - protein, 9 aa, synthetic construct
PLNATGHLK

SEQ ID NO: 642 - protein, 9 aa, synthetic construct
PSNAVLKLF

SEQ ID NO: 643 - protein, 9 aa, synthetic construct
PLNATGHVH

SEQ ID NO: 644 - protein, 9 aa, synthetic construct
PSNAVARLR

SEQ ID NO: 645 - protein, 9 aa, synthetic construct
PSNAVARVF

SEQ ID NO: 646 - protein, 9 aa, synthetic construct
PSNAVAKLY

SEQ ID NO: 647 - protein, 9 aa, synthetic construct
PSNAVAKLH

SEQ ID NO: 648 - protein, 9 aa, synthetic construct
PSNAVIHLY

SEQ ID NO: 649 - protein, 9 aa, synthetic construct
PSNAVIHVK

SEQ ID NO: 650 - protein, 9 aa, synthetic construct
PSNAVGHVK

SEQ ID NO: 651 - protein, 9 aa, synthetic construct
PSNAVGRLF

SEQ ID NO: 652 - protein, 9 aa, synthetic construct
PSNAVGRVF

SEQ ID NO: 653 - protein, 9 aa, synthetic construct
PSNAGVHVK

SEQ ID NO: 654 - protein, 9 aa, synthetic construct
PSNAGVKLY

SEQ ID NO: 655 - protein, 9 aa, synthetic construct
PSNAGVKLF

SEQ ID NO: 656 - protein, 9 aa, synthetic construct
PLNATGRVF

SEQ ID NO: 657 - protein, 9 aa, synthetic construct
PLNATGKLY

SEQ ID NO: 658 - protein, 9 aa, synthetic construct
PSNAGLKVF

SEQ ID NO: 659 - protein, 9 aa, synthetic construct
PSNAGAHLH

SEQ ID NO: 660 - protein, 9 aa, synthetic construct
PSNAGAHLK

SEQ ID NO: 661 - protein, 9 aa, synthetic construct
PSNAGAHVH

SEQ ID NO: 662 - protein, 9 aa, synthetic construct
PSNAGAHVK

SEQ ID NO: 663 - protein, 9 aa, synthetic construct
PSNAGAHVF

SEQ ID NO: 664 - protein, 9 aa, synthetic construct
PSNAGAKLF

SEQ ID NO: 665 - protein, 9 aa, synthetic construct
PSNAGAKVH

SEQ ID NO: 666 - protein, 9 aa, synthetic construct
PSNAGAKVF

SEQ ID NO: 667 - protein, 9 aa, synthetic construct
PSNAGIHVK

SEQ ID NO: 668 - protein, 9 aa, synthetic construct
PSNAGIRVY

SEQ ID NO: 669 - protein, 9 aa, synthetic construct
PSNAGGHLY

SEQ ID NO: 670 - protein, 9 aa, synthetic construct
PSNAGGHLR

SEQ ID NO: 671 - protein, 9 aa, synthetic construct
PSNAGGHLH

SEQ ID NO: 672 - protein, 9 aa, synthetic construct
PSNAGGHLK

SEQ ID NO: 673 - protein, 9 aa, synthetic construct
PSNAGGHLF

SEQ ID NO: 674 - protein, 9 aa, synthetic construct
PSNAGGHVY

SEQ ID NO: 675 - protein, 9 aa, synthetic construct
PSNAGGHVR

SEQ ID NO: 676 - protein, 9 aa, synthetic construct
PSNAGGHVH

SEQ ID NO: 677 - protein, 9 aa, synthetic construct
PSNAGGHVK

SEQ ID NO: 678 - protein, 9 aa, synthetic construct
PSNAGGHVF

SEQ ID NO: 679 - protein, 9 aa, synthetic construct
PSNAGGRLY

SEQ ID NO: 680 - protein, 9 aa, synthetic construct
PSNAGGRLH

SEQ ID NO: 681 - protein, 9 aa, synthetic construct
PSNAGGRVF

SEQ ID NO: 682 - protein, 9 aa, synthetic construct
PSNAGGKLH

SEQ ID NO: 683 - protein, 9 aa, synthetic construct
PSNAGGKLF

SEQ ID NO: 684 - protein, 9 aa, synthetic construct
PLNASVHLY

SEQ ID NO: 685 - protein, 9 aa, synthetic construct
PSQGAIKLY

SEQ ID NO: 686 - protein, 9 aa, synthetic construct
PSQGTVHVY

SEQ ID NO: 687 - protein, 9 aa, synthetic construct
PSQGTVHVH

SEQ ID NO: 688 - protein, 9 aa, synthetic construct
PSQGTAHLY

SEQ ID NO: 689 - protein, 9 aa, synthetic construct
PSQGTAHVY

SEQ ID NO: 690 - protein, 9 aa, synthetic construct
PSQGTAKVY

SEQ ID NO: 691 - protein, 9 aa, synthetic construct
PSQGTGHLY

SEQ ID NO: 692 - protein, 9 aa, synthetic construct
PSQGTGHLK

SEQ ID NO: 693 - protein, 9 aa, synthetic construct
PSQGTGRVF

SEQ ID NO: 694 - protein, 9 aa, synthetic construct
PSQGSVKLF

SEQ ID NO: 695 - protein, 9 aa, synthetic construct
PLNASLHVR

SEQ ID NO: 696 - protein, 9 aa, synthetic construct
PLNASAHLY

SEQ ID NO: 697 - protein, 9 aa, synthetic construct
PSQGGVKVF

SEQ ID NO: 698 - protein, 9 aa, synthetic construct
PLNASAHLK

SEQ ID NO: 699 - protein, 9 aa, synthetic construct
PSQGGLHVH

SEQ ID NO: 700 - protein, 9 aa, synthetic construct
PLNASAHVH

SEQ ID NO: 701 - protein, 9 aa, synthetic construct
PLNASAHVF

SEQ ID NO: 702 - protein, 9 aa, synthetic construct
PLNGAIKLH

SEQ ID NO: 703 - protein, 9 aa, synthetic construct
PLNASARLH

SEQ ID NO: 704 - protein, 9 aa, synthetic construct
PSQGGGRVY

SEQ ID NO: 705 - protein, 9 aa, synthetic construct
PSQAAVRLH

SEQ ID NO: 706 - protein, 9 aa, synthetic construct
PLNASARVH

SEQ ID NO: 707 - protein, 9 aa, synthetic construct
PSQAALHVH

SEQ ID NO: 708 - protein, 9 aa, synthetic construct
PSQAAGHLH

SEQ ID NO: 709 - protein, 9 aa, synthetic construct
PLNASIHLR

SEQ ID NO: 710 - protein, 9 aa, synthetic construct
PSQATVRVF

SEQ ID NO: 711 - protein, 9 aa, synthetic construct
PLNASIHLH

SEQ ID NO: 712 - protein, 9 aa, synthetic construct
PLNASIHLK

SEQ ID NO: 713 - protein, 9 aa, synthetic construct
PSQATAHLK

SEQ ID NO: 714 - protein, 9 aa, synthetic construct
PLNASIHVK

SEQ ID NO: 715 - protein, 9 aa, synthetic construct
PSQATIHVR

SEQ ID NO: 716 - protein, 9 aa, synthetic construct
PSQATGHVH

SEQ ID NO: 717 - protein, 9 aa, synthetic construct
PSQASVHVK

SEQ ID NO: 718 - protein, 9 aa, synthetic construct
PSQASVHVF

SEQ ID NO: 719 - protein, 9 aa, synthetic construct
PSQASVKVH

SEQ ID NO: 720 - protein, 9 aa, synthetic construct
PSQASLHLK

SEQ ID NO: 721 - protein, 9 aa, synthetic construct
PSQASGHLY

SEQ ID NO: 722 - protein, 9 aa, synthetic construct
PLNASGHLY

SEQ ID NO: 723 - protein, 9 aa, synthetic construct
PLNASGHLH

SEQ ID NO: 724 - protein, 9 aa, synthetic construct
PLNASGHVR

SEQ ID NO: 725 - protein, 9 aa, synthetic construct
PSQAVAHLK

SEQ ID NO: 726 - protein, 9 aa, synthetic construct
PSQAGVHVY

SEQ ID NO: 727 - protein, 9 aa, synthetic construct
PSQAGVKLY

SEQ ID NO: 728 - protein, 9 aa, synthetic construct
PSQAGLHVY

SEQ ID NO: 729 - protein, 9 aa, synthetic construct
PSQAGLHVH

SEQ ID NO: 730 - protein, 9 aa, synthetic construct
PLNASGRVF

SEQ ID NO: 731 - protein, 9 aa, synthetic construct
PLNASGKLY

SEQ ID NO: 732 - protein, 9 aa, synthetic construct
PSQAGAKLF

SEQ ID NO: 733 - protein, 9 aa, synthetic construct
PSQAGIHVK

SEQ ID NO: 734 - protein, 9 aa, synthetic construct
PLNGAGHLY

SEQ ID NO: 735 - protein, 9 aa, synthetic construct
PSPGAVHLY

SEQ ID NO: 736 - protein, 9 aa, synthetic construct
PSPGAVHVH

SEQ ID NO: 737 - protein, 9 aa, synthetic construct
PSPGAVKVF

SEQ ID NO: 738 - protein, 9 aa, synthetic construct
PSPGALRVF

SEQ ID NO: 739 - protein, 9 aa, synthetic construct
PLNAVVHVH

SEQ ID NO: 740 - protein, 9 aa, synthetic construct
PSPGAAKLF

SEQ ID NO: 741 - protein, 9 aa, synthetic construct
PSPGAAKVF

SEQ ID NO: 742 - protein, 9 aa, synthetic construct
PLNAVVHVF

SEQ ID NO: 743 - protein, 9 aa, synthetic construct
PSPGAIHLK

SEQ ID NO: 744 - protein, 9 aa, synthetic construct
PSPGAIKLY

SEQ ID NO: 745 - protein, 9 aa, synthetic construct
PSPGAIKLH

SEQ ID NO: 746 - protein, 9 aa, synthetic construct
PSPGAGHLY

SEQ ID NO: 747 - protein, 9 aa, synthetic construct
PSPGAGHLK

SEQ ID NO: 748 - protein, 9 aa, synthetic construct
PSPGAGHLF

SEQ ID NO: 749 - protein, 9 aa, synthetic construct
PSPGAGHVF

SEQ ID NO: 750 - protein, 9 aa, synthetic construct
PSPGAGRLY

SEQ ID NO: 751 - protein, 9 aa, synthetic construct
PSPGAGRLF

SEQ ID NO: 752 - protein, 9 aa, synthetic construct
PSPGAGKLY

SEQ ID NO: 753 - protein, 9 aa, synthetic construct
PSPGAGKLH

SEQ ID NO: 754 - protein, 9 aa, synthetic construct
PSPGAGKLF

SEQ ID NO: 755 - protein, 9 aa, synthetic construct
PSPGAGKVF

SEQ ID NO: 756 - protein, 9 aa, synthetic construct
PLNGAGHLH

SEQ ID NO: 757 - protein, 9 aa, synthetic construct
PSPGTLKLY

SEQ ID NO: 758 - protein, 9 aa, synthetic construct
PSPGTAHLR

SEQ ID NO: 759 - protein, 9 aa, synthetic construct
PSPGTAHVY

SEQ ID NO: 760 - protein, 9 aa, synthetic construct
PSPGTAKVF

SEQ ID NO: 761 - protein, 9 aa, synthetic construct
PSPGTIHLK

SEQ ID NO: 762 - protein, 9 aa, synthetic construct
PSPGTGHLY

SEQ ID NO: 763 - protein, 9 aa, synthetic construct
PSPGTGHLK

SEQ ID NO: 764 - protein, 9 aa, synthetic construct
PSPGTGHVH

SEQ ID NO: 765 - protein, 9 aa, synthetic construct
PSPGTGKLF

SEQ ID NO: 766 - protein, 9 aa, synthetic construct
PSPGTGKVF

SEQ ID NO: 767 - protein, 9 aa, synthetic construct
PLNGAGHLK

SEQ ID NO: 768 - protein, 9 aa, synthetic construct
PSPGSVKVY

SEQ ID NO: 769 - protein, 9 aa, synthetic construct
PSPGSAHLK

SEQ ID NO: 770 - protein, 9 aa, synthetic construct
PSPGSAHVH

SEQ ID NO: 771 - protein, 9 aa, synthetic construct
PSPGSIHLR

SEQ ID NO: 772 - protein, 9 aa, synthetic construct
PLNGAGHLF

SEQ ID NO: 773 - protein, 9 aa, synthetic construct
PSPGSIRVY

SEQ ID NO: 774 - protein, 9 aa, synthetic construct
PSPGSGHLY

SEQ ID NO: 775 - protein, 9 aa, synthetic construct
PSPGSGRLY

SEQ ID NO: 776 - protein, 9 aa, synthetic construct
PSPGSGKLF

SEQ ID NO: 777 - protein, 9 aa, synthetic construct
PSPGVVHVH

SEQ ID NO: 778 - protein, 9 aa, synthetic construct
PLNAVLRVH

SEQ ID NO: 779 - protein, 9 aa, synthetic construct
PSPGVVKLY

SEQ ID NO: 780 - protein, 9 aa, synthetic construct
PSPGVARVF

SEQ ID NO: 781 - protein, 9 aa, synthetic construct
PSPGVAKLY

SEQ ID NO: 782 - protein, 9 aa, synthetic construct
PSPGVIHVY

SEQ ID NO: 783 - protein, 9 aa, synthetic construct
PSPGVIHVK

SEQ ID NO: 784 - protein, 9 aa, synthetic construct
PSPGVGKLF

SEQ ID NO: 785 - protein, 9 aa, synthetic construct
PSPGVGKVY

SEQ ID NO: 786 - protein, 9 aa, synthetic construct
PSPGVGKVH

SEQ ID NO: 787 - protein, 9 aa, synthetic construct
PSPGGVHVK

SEQ ID NO: 788 - protein, 9 aa, synthetic construct
PSPGGVKLY

SEQ ID NO: 789 - protein, 9 aa, synthetic construct
PSPGGVKVR

SEQ ID NO: 790 - protein, 9 aa, synthetic construct
PLNAVAHVH

SEQ ID NO: 791 - protein, 9 aa, synthetic construct
PSPGGIHVH

SEQ ID NO: 792 - protein, 9 aa, synthetic construct
PSPGGIHVK

SEQ ID NO: 793 - protein, 9 aa, synthetic construct
PLNGAGHVH

SEQ ID NO: 794 - protein, 9 aa, synthetic construct
PLNAVARLY

SEQ ID NO: 795 - protein, 9 aa, synthetic construct
PSPGGGHLY

SEQ ID NO: 796 - protein, 9 aa, synthetic construct
PSPGGGHVY

SEQ ID NO: 797 - protein, 9 aa, synthetic construct
PSPGGGRLY

SEQ ID NO: 798 - protein, 9 aa, synthetic construct
PLNAVARLF

SEQ ID NO: 799 - protein, 9 aa, synthetic construct
PSPGGGKLF

SEQ ID NO: 800 - protein, 9 aa, synthetic construct
PLNAVARVY

SEQ ID NO: 801 - protein, 9 aa, synthetic construct
PLNAVARVH

SEQ ID NO: 802 - protein, 9 aa, synthetic construct
PLNAVARVF

SEQ ID NO: 803 - protein, 9 aa, synthetic construct
PSPAALRLF

SEQ ID NO: 804 - protein, 9 aa, synthetic construct
PSPAALRVF

SEQ ID NO: 805 - protein, 9 aa, synthetic construct
PLNGAGHVK

SEQ ID NO: 806 - protein, 9 aa, synthetic construct
PLNAVAKLY

SEQ ID NO: 807 - protein, 9 aa, synthetic construct
PLNAVAKLH

SEQ ID NO: 808 - protein, 9 aa, synthetic construct
PSPAAIHLK

SEQ ID NO: 809 - protein, 9 aa, synthetic construct
PSPAAIKVF

SEQ ID NO: 810 - protein, 9 aa, synthetic construct
PSPAAGHLH

SEQ ID NO: 811 - protein, 9 aa, synthetic construct
PSPAAGHLK

SEQ ID NO: 812 - protein, 9 aa, synthetic construct
PSPAAGHVH

SEQ ID NO: 813 - protein, 9 aa, synthetic construct
PSPAAGRLY

SEQ ID NO: 814 - protein, 9 aa, synthetic construct
PLNAVAKVF

SEQ ID NO: 815 - protein, 9 aa, synthetic construct
PSPAAGKLF

SEQ ID NO: 816 - protein, 9 aa, synthetic construct
PSPAAGKVF

SEQ ID NO: 817 - protein, 9 aa, synthetic construct
PLNGAGHVF

SEQ ID NO: 818 - protein, 9 aa, synthetic construct
PSPATVRVH

SEQ ID NO: 819 - protein, 9 aa, synthetic construct
PSPATLRLR

SEQ ID NO: 820 - protein, 9 aa, synthetic construct
PSPATARVH

SEQ ID NO: 821 - protein, 9 aa, synthetic construct
PLNAVIHVK

SEQ ID NO: 822 - protein, 9 aa, synthetic construct
PSPATAKLY

SEQ ID NO: 823 - protein, 9 aa, synthetic construct
PSPATIHLY

SEQ ID NO: 824 - protein, 9 aa, synthetic construct
PSPATIHLR

SEQ ID NO: 825 - protein, 9 aa, synthetic construct
PSPATIHLH

SEQ ID NO: 826 - protein, 9 aa, synthetic construct
PSPATIHLK

SEQ ID NO: 827 - protein, 9 aa, synthetic construct
PSPATIHLF

SEQ ID NO: 828 - protein, 9 aa, synthetic construct
PSPATIHVY

SEQ ID NO: 829 - protein, 9 aa, synthetic construct
PSPATIHVR

SEQ ID NO: 830 - protein, 9 aa, synthetic construct
PSPATIHVK

SEQ ID NO: 831 - protein, 9 aa, synthetic construct
PSPATIRVY

SEQ ID NO: 832 - protein, 9 aa, synthetic construct
PSPATIKVF

SEQ ID NO: 833 - protein, 9 aa, synthetic construct
PSPATGHLR

SEQ ID NO: 834 - protein, 9 aa, synthetic construct
PSPATGRVF

SEQ ID NO: 835 - protein, 9 aa, synthetic construct
PSPATGKVF

SEQ ID NO: 836 - protein, 9 aa, synthetic construct
PSPASVKLF

SEQ ID NO: 837 - protein, 9 aa, synthetic construct
PSPASVKVF

SEQ ID NO: 838 - protein, 9 aa, synthetic construct
PSPASAHLY

SEQ ID NO: 839 - protein, 9 aa, synthetic construct
PSPASAHLK

SEQ ID NO: 840 - protein, 9 aa, synthetic construct
PSPASIHLK

SEQ ID NO: 841 - protein, 9 aa, synthetic construct
PLNAVIKVH

SEQ ID NO: 842 - protein, 9 aa, synthetic construct
PSPASGKVF

SEQ ID NO: 843 - protein, 9 aa, synthetic construct
PSPAVLKLH

SEQ ID NO: 844 - protein, 9 aa, synthetic construct
PLNAVGHVR

SEQ ID NO: 845 - protein, 9 aa, synthetic construct
PLNAVGHVF

SEQ ID NO: 846 - protein, 9 aa, synthetic construct
PLNAVGRVY

SEQ ID NO: 847 - protein, 9 aa, synthetic construct
PLNAVGRVF

SEQ ID NO: 848 - protein, 9 aa, synthetic construct
PLNGAGRLF

SEQ ID NO: 849 - protein, 9 aa, synthetic construct
PLNAVGKLY

SEQ ID NO: 850 - protein, 9 aa, synthetic construct
PLNAVGKLF

SEQ ID NO: 851 - protein, 9 aa, synthetic construct
PSPAGIRLF

SEQ ID NO: 852 - protein, 9 aa, synthetic construct
PSPAGIKVR

SEQ ID NO: 853 - protein, 9 aa, synthetic construct
PSPAGGHLY

SEQ ID NO: 854 - protein, 9 aa, synthetic construct
PSPAGGRLF

SEQ ID NO: 855 - protein, 9 aa, synthetic construct
PLNAVGKVF

SEQ ID NO: 856 - protein, 9 aa, synthetic construct
PSPAGGKVH

SEQ ID NO: 857 - protein, 9 aa, synthetic construct
PANGAVRVH

SEQ ID NO: 858 - protein, 9 aa, synthetic construct
PANGAVKLH

SEQ ID NO: 859 - protein, 9 aa, synthetic construct
PANGAVKVF

SEQ ID NO: 860 - protein, 9 aa, synthetic construct
PANGAAHLH

SEQ ID NO: 861 - protein, 9 aa, synthetic construct
PANGAAHVR

SEQ ID NO: 862 - protein, 9 aa, synthetic construct
PANGAAHVK

SEQ ID NO: 863 - protein, 9 aa, synthetic construct
PANGAARVH

SEQ ID NO: 864 - protein, 9 aa, synthetic construct
PANGAARVF

SEQ ID NO: 865 - protein, 9 aa, synthetic construct
PANGAAKLY

SEQ ID NO: 866 - protein, 9 aa, synthetic construct
PANGAAKVH

SEQ ID NO: 867 - protein, 9 aa, synthetic construct
PANGAAKVF

SEQ ID NO: 868 - protein, 9 aa, synthetic construct
PANGAIHLK

SEQ ID NO: 869 - protein, 9 aa, synthetic construct
PANGAIHVR

SEQ ID NO: 870 - protein, 9 aa, synthetic construct
PANGAIHVH

SEQ ID NO: 871 - protein, 9 aa, synthetic construct
PANGAIRLY

SEQ ID NO: 872 - protein, 9 aa, synthetic construct
PANGAIRLR

SEQ ID NO: 873 - protein, 9 aa, synthetic construct
PANGAIRLK

SEQ ID NO: 874 - protein, 9 aa, synthetic construct
PANGAIRLF

SEQ ID NO: 875 - protein, 9 aa, synthetic construct
PANGAIRVK

SEQ ID NO: 876 - protein, 9 aa, synthetic construct
PANGAIKLH

SEQ ID NO: 877 - protein, 9 aa, synthetic construct
PANGAIKVY

SEQ ID NO: 878 - protein, 9 aa, synthetic construct
PANGAIKVH

SEQ ID NO: 879 - protein, 9 aa, synthetic construct
PANGAGHVF

SEQ ID NO: 880 - protein, 9 aa, synthetic construct
PANGAGRVY

SEQ ID NO: 881 - protein, 9 aa, synthetic construct
PANGAGRVH

SEQ ID NO: 882 - protein, 9 aa, synthetic construct
PANGAGKVH

SEQ ID NO: 883 - protein, 9 aa, synthetic construct
PANGAGKVK

SEQ ID NO: 884 - protein, 9 aa, synthetic construct
PANGTVHLY

SEQ ID NO: 885 - protein, 9 aa, synthetic construct
PANGTVHLK

SEQ ID NO: 886 - protein, 9 aa, synthetic construct
PANGTVRLY

SEQ ID NO: 887 - protein, 9 aa, synthetic construct
PLNAGVRVH

SEQ ID NO: 888 - protein, 9 aa, synthetic construct
PANGTVKLF

SEQ ID NO: 889 - protein, 9 aa, synthetic construct
PLNAGVRVK

SEQ ID NO: 890 - protein, 9 aa, synthetic construct
PANGTLHLK

SEQ ID NO: 891 - protein, 9 aa, synthetic construct
PANGTLHVY

SEQ ID NO: 892 - protein, 9 aa, synthetic construct
PLNAGVRVF

SEQ ID NO: 893 - protein, 9 aa, synthetic construct
PLNAGVKLY

SEQ ID NO: 894 - protein, 9 aa, synthetic construct
PANGTLKLH

SEQ ID NO: 895 - protein, 9 aa, synthetic construct
PANGTLKVH

SEQ ID NO: 896 - protein, 9 aa, synthetic construct
PANGTLKVF

SEQ ID NO: 897 - protein, 9 aa, synthetic construct
PANGTAHVR

SEQ ID NO: 898 - protein, 9 aa, synthetic construct
PANGTAHVH

SEQ ID NO: 899 - protein, 9 aa, synthetic construct
PANGTAHVK

SEQ ID NO: 900 - protein, 9 aa, synthetic construct
PLNAGVKLH

SEQ ID NO: 901 - protein, 9 aa, synthetic construct
PANGTAKLY

SEQ ID NO: 902 - protein, 9 aa, synthetic construct
PANGTAKVF

SEQ ID NO: 903 - protein, 9 aa, synthetic construct
PLNAGVKLF

SEQ ID NO: 904 - protein, 9 aa, synthetic construct
PANGTIHVR

SEQ ID NO: 905 - protein, 9 aa, synthetic construct
PANGTIHVH

SEQ ID NO: 906 - protein, 9 aa, synthetic construct
PANGTIHVK

SEQ ID NO: 907 - protein, 9 aa, synthetic construct
PANGTIRLK

SEQ ID NO: 908 - protein, 9 aa, synthetic construct
PANGTIKLY

SEQ ID NO: 909 - protein, 9 aa, synthetic construct
PANGTIKVH

SEQ ID NO: 910 - protein, 9 aa, synthetic construct
PANGTGHLY

SEQ ID NO: 911 - protein, 9 aa, synthetic construct
PANGTGHLK

SEQ ID NO: 912 - protein, 9 aa, synthetic construct
PANGTGHVK

SEQ ID NO: 913 - protein, 9 aa, synthetic construct
PANGTGRVY

SEQ ID NO: 914 - protein, 9 aa, synthetic construct
PANGTGKLY

SEQ ID NO: 915 - protein, 9 aa, synthetic construct
PANGTGKLK

SEQ ID NO: 916 - protein, 9 aa, synthetic construct
PANGTGKLF

SEQ ID NO: 917 - protein, 9 aa, synthetic construct
PANGTGKVF

SEQ ID NO: 918 - protein, 9 aa, synthetic construct
PANGSVHLY

SEQ ID NO: 919 - protein, 9 aa, synthetic construct
PANGSVHLR

SEQ ID NO: 920 - protein, 9 aa, synthetic construct
PANGSVHLH

SEQ ID NO: 921 - protein, 9 aa, synthetic construct
PANGSVHLK

SEQ ID NO: 922 - protein, 9 aa, synthetic construct
PANGSVHVY

SEQ ID NO: 923 - protein, 9 aa, synthetic construct
PANGSVHVH

SEQ ID NO: 924 - protein, 9 aa, synthetic construct
PANGSVHVK

SEQ ID NO: 925 - protein, 9 aa, synthetic construct
PANGSVHVF

SEQ ID NO: 926 - protein, 9 aa, synthetic construct
PANGSVKLY

SEQ ID NO: 927 - protein, 9 aa, synthetic construct
PANGSVKLF

SEQ ID NO: 928 - protein, 9 aa, synthetic construct
PANGSVKVY

SEQ ID NO: 929 - protein, 9 aa, synthetic construct
PANGSVKVH

SEQ ID NO: 930 - protein, 9 aa, synthetic construct
PANGSLHLK

SEQ ID NO: 931 - protein, 9 aa, synthetic construct
PANGSLRVK

SEQ ID NO: 932 - protein, 9 aa, synthetic construct
PANGSLKLF

SEQ ID NO: 933 - protein, 9 aa, synthetic construct
PANGSLKVF

SEQ ID NO: 934 - protein, 9 aa, synthetic construct
PANGSAHLY

SEQ ID NO: 935 - protein, 9 aa, synthetic construct
PANGSAHLK

SEQ ID NO: 936 - protein, 9 aa, synthetic construct
PANGSAHLF

SEQ ID NO: 937 - protein, 9 aa, synthetic construct
PANGSAHVH

SEQ ID NO: 938 - protein, 9 aa, synthetic construct
PANGSAHVK

SEQ ID NO: 939 - protein, 9 aa, synthetic construct
PANGSAHVF

SEQ ID NO: 940 - protein, 9 aa, synthetic construct
PANGSAKLF

SEQ ID NO: 941 - protein, 9 aa, synthetic construct
PANGSAKVF

SEQ ID NO: 942 - protein, 9 aa, synthetic construct
PANGSIHLR

SEQ ID NO: 943 - protein, 9 aa, synthetic construct
PANGSIHVY

SEQ ID NO: 944 - protein, 9 aa, synthetic construct
PANGSIHVH

SEQ ID NO: 945 - protein, 9 aa, synthetic construct
PANGSIHVK

SEQ ID NO: 946 - protein, 9 aa, synthetic construct
PLNGAGRVF

SEQ ID NO: 947 - protein, 9 aa, synthetic construct
PANGSIRVY

SEQ ID NO: 948 - protein, 9 aa, synthetic construct
PANGSIRVH

SEQ ID NO: 949 - protein, 9 aa, synthetic construct
PANGSIKLY

SEQ ID NO: 950 - protein, 9 aa, synthetic construct
PANGSIKLH

SEQ ID NO: 951 - protein, 9 aa, synthetic construct
PANGSIKVY

SEQ ID NO: 952 - protein, 9 aa, synthetic construct
PANGSIKVH

SEQ ID NO: 953 - protein, 9 aa, synthetic construct
PANGSIKVF

SEQ ID NO: 954 - protein, 9 aa, synthetic construct
PANGSGHLY

SEQ ID NO: 955 - protein, 9 aa, synthetic construct
PANGSGRLF

SEQ ID NO: 956 - protein, 9 aa, synthetic construct
PANGSGRVF

SEQ ID NO: 957 - protein, 9 aa, synthetic construct
PANGSGKLF

SEQ ID NO: 958 - protein, 9 aa, synthetic construct
PANGSGKVY

SEQ ID NO: 959 - protein, 9 aa, synthetic construct
PANGSGKVF

SEQ ID NO: 960 - protein, 9 aa, synthetic construct
PANGVVHVH

SEQ ID NO: 961 - protein, 9 aa, synthetic construct
PANGVLHVR

SEQ ID NO: 962 - protein, 9 aa, synthetic construct
PANGVLKLH

SEQ ID NO: 963 - protein, 9 aa, synthetic construct
PANGVLKVH

SEQ ID NO: 964 - protein, 9 aa, synthetic construct
PANGVAHLH

SEQ ID NO: 965 - protein, 9 aa, synthetic construct
PANGVAHVY

SEQ ID NO: 966 - protein, 9 aa, synthetic construct
PANGVAHVK

SEQ ID NO: 967 - protein, 9 aa, synthetic construct
PANGVAKLY

SEQ ID NO: 968 - protein, 9 aa, synthetic construct
PANGVAKVH

SEQ ID NO: 969 - protein, 9 aa, synthetic construct
PANGVIHLY

SEQ ID NO: 970 - protein, 9 aa, synthetic construct
PANGVIHLH

SEQ ID NO: 971 - protein, 9 aa, synthetic construct
PANGVIHLK

SEQ ID NO: 972 - protein, 9 aa, synthetic construct
PANGVIHVY

SEQ ID NO: 973 - protein, 9 aa, synthetic construct
PANGVIHVR

SEQ ID NO: 974 - protein, 9 aa, synthetic construct
PANGVIHVH

SEQ ID NO: 975 - protein, 9 aa, synthetic construct
PANGVIHVK

SEQ ID NO: 976 - protein, 9 aa, synthetic construct
PANGVIHVF

SEQ ID NO: 977 - protein, 9 aa, synthetic construct
PANGVGHLY

SEQ ID NO: 978 - protein, 9 aa, synthetic construct
PANGVGHLF

SEQ ID NO: 979 - protein, 9 aa, synthetic construct
PANGVGHVY

SEQ ID NO: 980 - protein, 9 aa, synthetic construct
PANGVGHVH

SEQ ID NO: 981 - protein, 9 aa, synthetic construct
PANGVGRVY

SEQ ID NO: 982 - protein, 9 aa, synthetic construct
PLNAGLKVF

SEQ ID NO: 983 - protein, 9 aa, synthetic construct
PANGVGKLF

SEQ ID NO: 984 - protein, 9 aa, synthetic construct
PANGVGKVY

SEQ ID NO: 985 - protein, 9 aa, synthetic construct
PLNAGAHLY

SEQ ID NO: 986 - protein, 9 aa, synthetic construct
PANGGVHLK

SEQ ID NO: 987 - protein, 9 aa, synthetic construct
PANGGVHVK

SEQ ID NO: 988 - protein, 9 aa, synthetic construct
PANGGVRLY

SEQ ID NO: 989 - protein, 9 aa, synthetic construct
PANGGVRLH

SEQ ID NO: 990 - protein, 9 aa, synthetic construct
PANGGVRLF

SEQ ID NO: 991 - protein, 9 aa, synthetic construct
PANGGVRVF

SEQ ID NO: 992 - protein, 9 aa, synthetic construct
PLNAGAHLH

SEQ ID NO: 993 - protein, 9 aa, synthetic construct
PANGGVKLY

SEQ ID NO: 994 - protein, 9 aa, synthetic construct
PANGGVKLF

SEQ ID NO: 995 - protein, 9 aa, synthetic construct
PLNAGAHLK

SEQ ID NO: 996 - protein, 9 aa, synthetic construct
PANGGLKVF

SEQ ID NO: 997 - protein, 9 aa, synthetic construct
PLNAGAHVR

SEQ ID NO: 998 - protein, 9 aa, synthetic construct
PANGGAHLY

SEQ ID NO: 999 - protein, 9 aa, synthetic construct
PANGGAHVH

SEQ ID NO: 1000 - protein, 9 aa, synthetic construct
PLNAGAHVH

SEQ ID NO: 1001 - protein, 9 aa, synthetic construct
PLNAGAHVK

SEQ ID NO: 1002 - protein, 9 aa, synthetic construct
PANGGAKVY

SEQ ID NO: 1003 - protein, 9 aa, synthetic construct
PANGGAKVF

SEQ ID NO: 1004 - protein, 9 aa, synthetic construct
PLNAGAHVF

SEQ ID NO: 1005 - protein, 9 aa, synthetic construct
PANGGIHVY

SEQ ID NO: 1006 - protein, 9 aa, synthetic construct
PANGGIHVH

SEQ ID NO: 1007 - protein, 9 aa, synthetic construct
PANGGIHVK

SEQ ID NO: 1008 - protein, 9 aa, synthetic construct
PANGGIRLR

SEQ ID NO: 1009 - protein, 9 aa, synthetic construct
PANGGIKVH

SEQ ID NO: 1010 - protein, 9 aa, synthetic construct
PANGGGRVY

SEQ ID NO: 1011 - protein, 9 aa, synthetic construct
PANGGGKLY

SEQ ID NO: 1012 - protein, 9 aa, synthetic construct
PANGGGKLF

SEQ ID NO: 1013 - protein, 9 aa, synthetic construct
PLNAGARVY

SEQ ID NO: 1014 - protein, 9 aa, synthetic construct
PANAAVHVY

SEQ ID NO: 1015 - protein, 9 aa, synthetic construct
PANAAVHVH

SEQ ID NO: 1016 - protein, 9 aa, synthetic construct
PANAAVRVY

SEQ ID NO: 1017 - protein, 9 aa, synthetic construct
PANAAVRVH

SEQ ID NO: 1018 - protein, 9 aa, synthetic construct
PANAAVKLH

SEQ ID NO: 1019 - protein, 9 aa, synthetic construct
PANAAVKVY

SEQ ID NO: 1020 - protein, 9 aa, synthetic construct
PANAAVKVF

SEQ ID NO: 1021 - protein, 9 aa, synthetic construct
PANAALHLR

SEQ ID NO: 1022 - protein, 9 aa, synthetic construct
PANAALRVR

SEQ ID NO: 1023 - protein, 9 aa, synthetic construct
PANAALRVF

SEQ ID NO: 1024 - protein, 9 aa, synthetic construct
PANAALKVF

SEQ ID NO: 1025 - protein, 9 aa, synthetic construct
PANAAAHVH

SEQ ID NO: 1026 - protein, 9 aa, synthetic construct
PANAAARLF

SEQ ID NO: 1027 - protein, 9 aa, synthetic construct
PANAAARVH

SEQ ID NO: 1028 - protein, 9 aa, synthetic construct
PANAAARVF

SEQ ID NO: 1029 - protein, 9 aa, synthetic construct
PANAAAKLY

SEQ ID NO: 1030 - protein, 9 aa, synthetic construct
PANAAAKLH

SEQ ID NO: 1031 - protein, 9 aa, synthetic construct
PANAAAKVF

SEQ ID NO: 1032 - protein, 9 aa, synthetic construct
PLNAGAKLF

SEQ ID NO: 1033 - protein, 9 aa, synthetic construct
PANAAIHVH

SEQ ID NO: 1034 - protein, 9 aa, synthetic construct
PANAAIHVK

SEQ ID NO: 1035 - protein, 9 aa, synthetic construct
PANAAIRLY

SEQ ID NO: 1036 - protein, 9 aa, synthetic construct
PANAAIRVY

SEQ ID NO: 1037 - protein, 9 aa, synthetic construct
PANAAIKLY

SEQ ID NO: 1038 - protein, 9 aa, synthetic construct
PANAAIKLH

SEQ ID NO: 1039 - protein, 9 aa, synthetic construct
PANAAIKVF

SEQ ID NO: 1040 - protein, 9 aa, synthetic construct
PLNAGAKVH

SEQ ID NO: 1041 - protein, 9 aa, synthetic construct
PANAAGHLH

SEQ ID NO: 1042 - protein, 9 aa, synthetic construct
PANAAGHVF

SEQ ID NO: 1043 - protein, 9 aa, synthetic construct
PANAAGRLY

SEQ ID NO: 1044 - protein, 9 aa, synthetic construct
PANAAGRLH

SEQ ID NO: 1045 - protein, 9 aa, synthetic construct
PANAAGRLF

SEQ ID NO: 1046 - protein, 9 aa, synthetic construct
PANAAGRVY

SEQ ID NO: 1047 - protein, 9 aa, synthetic construct
PANAAGRVH

SEQ ID NO: 1048 - protein, 9 aa, synthetic construct
PANAAGRVF

SEQ ID NO: 1049 - protein, 9 aa, synthetic construct
PLNAGAKVF

SEQ ID NO: 1050 - protein, 9 aa, synthetic construct
PANAAGKLH

SEQ ID NO: 1051 - protein, 9 aa, synthetic construct
PANAAGKVY

SEQ ID NO: 1052 - protein, 9 aa, synthetic construct
PANAAGKVH

SEQ ID NO: 1053 - protein, 9 aa, synthetic construct
PANAAGKVF

SEQ ID NO: 1054 - protein, 9 aa, synthetic construct
PLNGAGKLF

SEQ ID NO: 1055 - protein, 9 aa, synthetic construct
PANATVHVY

SEQ ID NO: 1056 - protein, 9 aa, synthetic construct
PANATVHVH

SEQ ID NO: 1057 - protein, 9 aa, synthetic construct
PANATVRVH

SEQ ID NO: 1058 - protein, 9 aa, synthetic construct
PANATVKLH

SEQ ID NO: 1059 - protein, 9 aa, synthetic construct
PANATVKLF

SEQ ID NO: 1060 - protein, 9 aa, synthetic construct
PANATVKVH

SEQ ID NO: 1061 - protein, 9 aa, synthetic construct
PANATLRLR

SEQ ID NO: 1062 - protein, 9 aa, synthetic construct
PANATLKLY

SEQ ID NO: 1063 - protein, 9 aa, synthetic construct
PANATAHLY

SEQ ID NO: 1064 - protein, 9 aa, synthetic construct
PANATAHLK

SEQ ID NO: 1065 - protein, 9 aa, synthetic construct
PANATAHVY

SEQ ID NO: 1066 - protein, 9 aa, synthetic construct
PANATARLY

SEQ ID NO: 1067 - protein, 9 aa, synthetic construct
PANATARLF

SEQ ID NO: 1068 - protein, 9 aa, synthetic construct
PANATARVF

SEQ ID NO: 1069 - protein, 9 aa, synthetic construct
PLNAGIHVK

SEQ ID NO: 1070 - protein, 9 aa, synthetic construct
PANATAKLY

SEQ ID NO: 1071 - protein, 9 aa, synthetic construct
PANATAKLH

SEQ ID NO: 1072 - protein, 9 aa, synthetic construct
PANATAKLF

SEQ ID NO: 1073 - protein, 9 aa, synthetic construct
PANATAKVY

SEQ ID NO: 1074 - protein, 9 aa, synthetic construct
PANATAKVH

SEQ ID NO: 1075 - protein, 9 aa, synthetic construct
PANATAKVF

SEQ ID NO: 1076 - protein, 9 aa, synthetic construct
PANATIHLK

SEQ ID NO: 1077 - protein, 9 aa, synthetic construct
PANATIHVK

SEQ ID NO: 1078 - protein, 9 aa, synthetic construct
PLNGAGKVY

SEQ ID NO: 1079 - protein, 9 aa, synthetic construct
PANATIRVY

SEQ ID NO: 1080 - protein, 9 aa, synthetic construct
PANATIKLY

SEQ ID NO: 1081 - protein, 9 aa, synthetic construct
PANATGHLH

SEQ ID NO: 1082 - protein, 9 aa, synthetic construct
PANATGHLK

SEQ ID NO: 1083 - protein, 9 aa, synthetic construct
PANATGHVH

SEQ ID NO: 1084 - protein, 9 aa, synthetic construct
PANATGHVK

SEQ ID NO: 1085 - protein, 9 aa, synthetic construct
PANATGRLY

SEQ ID NO: 1086 - protein, 9 aa, synthetic construct
PANATGRVH

SEQ ID NO: 1087 - protein, 9 aa, synthetic construct
PANATGRVF

SEQ ID NO: 1088 - protein, 9 aa, synthetic construct
PANATGKLY

SEQ ID NO: 1089 - protein, 9 aa, synthetic construct
PANATGKLH

SEQ ID NO: 1090 - protein, 9 aa, synthetic construct
PANATGKLF

SEQ ID NO: 1091 - protein, 9 aa, synthetic construct
PANATGKVY

SEQ ID NO: 1092 - protein, 9 aa, synthetic construct
PANATGKVH

SEQ ID NO: 1093 - protein, 9 aa, synthetic construct
PANASVHLK

SEQ ID NO: 1094 - protein, 9 aa, synthetic construct
PANASVHVK

SEQ ID NO: 1095 - protein, 9 aa, synthetic construct
PANASVHVF

SEQ ID NO: 1096 - protein, 9 aa, synthetic construct
PANASVRVH

SEQ ID NO: 1097 - protein, 9 aa, synthetic construct
PANASVKLY

SEQ ID NO: 1098 - protein, 9 aa, synthetic construct
PANASVKLF

SEQ ID NO: 1099 - protein, 9 aa, synthetic construct
PANASVKVH

SEQ ID NO: 1100 - protein, 9 aa, synthetic construct
PANASVKVF

SEQ ID NO: 1101 - protein, 9 aa, synthetic construct
PANASLHVK

SEQ ID NO: 1102 - protein, 9 aa, synthetic construct
PANASLKVF

SEQ ID NO: 1103 - protein, 9 aa, synthetic construct
PANASAHLK

SEQ ID NO: 1104 - protein, 9 aa, synthetic construct
PANASAHVH

SEQ ID NO: 1105 - protein, 9 aa, synthetic construct
PANASAHVF

SEQ ID NO: 1106 - protein, 9 aa, synthetic construct
PANASARVF

SEQ ID NO: 1107 - protein, 9 aa, synthetic construct
PANASAKLY

SEQ ID NO: 1108 - protein, 9 aa, synthetic construct
PANASAKVF

SEQ ID NO: 1109 - protein, 9 aa, synthetic construct
PANASIHLR

SEQ ID NO: 1110 - protein, 9 aa, synthetic construct
PANASIHLK

SEQ ID NO: 1111 - protein, 9 aa, synthetic construct
PANASIHVF

SEQ ID NO: 1112 - protein, 9 aa, synthetic construct
PANASIRLF

SEQ ID NO: 1113 - protein, 9 aa, synthetic construct
PANASIRVY

SEQ ID NO: 1114 - protein, 9 aa, synthetic construct
PANASIKLF

SEQ ID NO: 1115 - protein, 9 aa, synthetic construct
PANASIKVH

SEQ ID NO: 1116 - protein, 9 aa, synthetic construct
PANASGHLY

SEQ ID NO: 1117 - protein, 9 aa, synthetic construct
PANASGHVY

SEQ ID NO: 1118 - protein, 9 aa, synthetic construct
PANASGHVR

SEQ ID NO: 1119 - protein, 9 aa, synthetic construct
PANASGHVH

SEQ ID NO: 1120 - protein, 9 aa, synthetic construct
PANASGHVK

SEQ ID NO: 1121 - protein, 9 aa, synthetic construct
PANASGHVF

SEQ ID NO: 1122 - protein, 9 aa, synthetic construct
PANASGRLY

SEQ ID NO: 1123 - protein, 9 aa, synthetic construct
PANASGRLF

SEQ ID NO: 1124 - protein, 9 aa, synthetic construct
PANASGRVY

SEQ ID NO: 1125 - protein, 9 aa, synthetic construct
PANASGRVH

SEQ ID NO: 1126 - protein, 9 aa, synthetic construct
PANASGRVF

SEQ ID NO: 1127 - protein, 9 aa, synthetic construct
PLNAGIKVF

SEQ ID NO: 1128 - protein, 9 aa, synthetic construct
PANASGKLY

SEQ ID NO: 1129 - protein, 9 aa, synthetic construct
PANASGKLH

SEQ ID NO: 1130 - protein, 9 aa, synthetic construct
PANASGKLF

SEQ ID NO: 1131 - protein, 9 aa, synthetic construct
PANASGKVF

SEQ ID NO: 1132 - protein, 9 aa, synthetic construct
PLNGAGKVH

SEQ ID NO: 1133 - protein, 9 aa, synthetic construct
PLNAGGHLY

SEQ ID NO: 1134 - protein, 9 aa, synthetic construct
PANAVVHLH

SEQ ID NO: 1135 - protein, 9 aa, synthetic construct
PANAVVHVR

SEQ ID NO: 1136 - protein, 9 aa, synthetic construct
PLNAGGHLR

SEQ ID NO: 1137 - protein, 9 aa, synthetic construct
PANAVVRLH

SEQ ID NO: 1138 - protein, 9 aa, synthetic construct
PANAVVRVF

SEQ ID NO: 1139 - protein, 9 aa, synthetic construct
PLNAGGHLH

SEQ ID NO: 1140 - protein, 9 aa, synthetic construct
PANAVVKLF

SEQ ID NO: 1141 - protein, 9 aa, synthetic construct
PLNAGGHLK

SEQ ID NO: 1142 - protein, 9 aa, synthetic construct
PLNAGGHLF

SEQ ID NO: 1143 - protein, 9 aa, synthetic construct
PANAVLRVH

SEQ ID NO: 1144 - protein, 9 aa, synthetic construct
PLNAGGHVY

SEQ ID NO: 1145 - protein, 9 aa, synthetic construct
PANAVLKVY

SEQ ID NO: 1146 - protein, 9 aa, synthetic construct
PANAVLKVF

SEQ ID NO: 1147 - protein, 9 aa, synthetic construct
PLNAGGHVR

SEQ ID NO: 1148 - protein, 9 aa, synthetic construct
PANAVAHVH

SEQ ID NO: 1149 - protein, 9 aa, synthetic construct
PANAVAHVK

SEQ ID NO: 1150 - protein, 9 aa, synthetic construct
PANAVAHVF

SEQ ID NO: 1151 - protein, 9 aa, synthetic construct
PLNAGGHVH

SEQ ID NO: 1152 - protein, 9 aa, synthetic construct
PANAVARVF

SEQ ID NO: 1153 - protein, 9 aa, synthetic construct
PLNAGGHVK

SEQ ID NO: 1154 - protein, 9 aa, synthetic construct
PANAVAKLH

SEQ ID NO: 1155 - protein, 9 aa, synthetic construct
PANAVAKVF

SEQ ID NO: 1156 - protein, 9 aa, synthetic construct
PLNAGGHVF

SEQ ID NO: 1157 - protein, 9 aa, synthetic construct
PANAVIHLY

SEQ ID NO: 1158 - protein, 9 aa, synthetic construct
PANAVIHLH

SEQ ID NO: 1159 - protein, 9 aa, synthetic construct
PANAVIHLK

SEQ ID NO: 1160 - protein, 9 aa, synthetic construct
PANAVIHVY

SEQ ID NO: 1161 - protein, 9 aa, synthetic construct
PANAVIHVR

SEQ ID NO: 1162 - protein, 9 aa, synthetic construct
PANAVIHVH

SEQ ID NO: 1163 - protein, 9 aa, synthetic construct
PANAVIHVK

SEQ ID NO: 1164 - protein, 9 aa, synthetic construct
PANAVIHVF

SEQ ID NO: 1165 - protein, 9 aa, synthetic construct
PLNAGGRLY

SEQ ID NO: 1166 - protein, 9 aa, synthetic construct
PANAVGHLY

SEQ ID NO: 1167 - protein, 9 aa, synthetic construct
PANAVGHLR

SEQ ID NO: 1168 - protein, 9 aa, synthetic construct
PANAVGHLH

SEQ ID NO: 1169 - protein, 9 aa, synthetic construct
PANAVGHVY

SEQ ID NO: 1170 - protein, 9 aa, synthetic construct
PANAVGHVR

SEQ ID NO: 1171 - protein, 9 aa, synthetic construct
PANAVGHVH

SEQ ID NO: 1172 - protein, 9 aa, synthetic construct
PANAVGHVK

SEQ ID NO: 1173 - protein, 9 aa, synthetic construct
PANAVGHVF

SEQ ID NO: 1174 - protein, 9 aa, synthetic construct
PANAVGRLH

SEQ ID NO: 1175 - protein, 9 aa, synthetic construct
PANAVGRVH

SEQ ID NO: 1176 - protein, 9 aa, synthetic construct
PANAVGKLY

SEQ ID NO: 1177 - protein, 9 aa, synthetic construct
PANAVGKLF

SEQ ID NO: 1178 - protein, 9 aa, synthetic construct
PANAVGKVY

SEQ ID NO: 1179 - protein, 9 aa, synthetic construct
PANAVGKVH

SEQ ID NO: 1180 - protein, 9 aa, synthetic construct
PANAGVHLY

SEQ ID NO: 1181 - protein, 9 aa, synthetic construct
PANAGVHVY

SEQ ID NO: 1182 - protein, 9 aa, synthetic construct
PANAGVRVY

SEQ ID NO: 1183 - protein, 9 aa, synthetic construct
PANAGVKLY

SEQ ID NO: 1184 - protein, 9 aa, synthetic construct
PANAGVKLF

SEQ ID NO: 1185 - protein, 9 aa, synthetic construct
PANAGVKVY

SEQ ID NO: 1186 - protein, 9 aa, synthetic construct
PANAGVKVF

SEQ ID NO: 1187 - protein, 9 aa, synthetic construct
PANAGLHVH

SEQ ID NO: 1188 - protein, 9 aa, synthetic construct
PLNAGGRVF

SEQ ID NO: 1189 - protein, 9 aa, synthetic construct
PANAGLRVF

SEQ ID NO: 1190 - protein, 9 aa, synthetic construct
PLNGAGKVF

SEQ ID NO: 1191 - protein, 9 aa, synthetic construct
PANAGLKLY

SEQ ID NO: 1192 - protein, 9 aa, synthetic construct
PANAGLKLH

SEQ ID NO: 1193 - protein, 9 aa, synthetic construct
PANAGLKLF

SEQ ID NO: 1194 - protein, 9 aa, synthetic construct
PANAGLKVY

SEQ ID NO: 1195 - protein, 9 aa, synthetic construct
PANAGLKVH

SEQ ID NO: 1196 - protein, 9 aa, synthetic construct
PANAGLKVF

SEQ ID NO: 1197 - protein, 9 aa, synthetic construct
PANAGAHLY

SEQ ID NO: 1198 - protein, 9 aa, synthetic construct
PANAGAHLH

SEQ ID NO: 1199 - protein, 9 aa, synthetic construct
PANAGAHLK

SEQ ID NO: 1200 - protein, 9 aa, synthetic construct
PANAGAHVH

SEQ ID NO: 1201 - protein, 9 aa, synthetic construct
PANAGAHVF

SEQ ID NO: 1202 - protein, 9 aa, synthetic construct
PLNAGGKLH

SEQ ID NO: 1203 - protein, 9 aa, synthetic construct
PANAGARVF

SEQ ID NO: 1204 - protein, 9 aa, synthetic construct
PANAGAKLY

SEQ ID NO: 1205 - protein, 9 aa, synthetic construct
PANAGAKLH

SEQ ID NO: 1206 - protein, 9 aa, synthetic construct
PANAGAKLF

SEQ ID NO: 1207 - protein, 9 aa, synthetic construct
PANAGAKVY

SEQ ID NO: 1208 - protein, 9 aa, synthetic construct
PANAGAKVR

SEQ ID NO: 1209 - protein, 9 aa, synthetic construct
PANAGAKVH

SEQ ID NO: 1210 - protein, 9 aa, synthetic construct
PANAGAKVF

SEQ ID NO: 1211 - protein, 9 aa, synthetic construct
PLNAGGKLF

SEQ ID NO: 1212 - protein, 9 aa, synthetic construct
PANAGIHLK

SEQ ID NO: 1213 - protein, 9 aa, synthetic construct
PANAGIHVK

SEQ ID NO: 1214 - protein, 9 aa, synthetic construct
PANAGIRLF

SEQ ID NO: 1215 - protein, 9 aa, synthetic construct
PANAGIRVH

SEQ ID NO: 1216 - protein, 9 aa, synthetic construct
PANAGIRVF

SEQ ID NO: 1217 - protein, 9 aa, synthetic construct
PANAGIKLY

SEQ ID NO: 1218 - protein, 9 aa, synthetic construct
PANAGIKVR

SEQ ID NO: 1219 - protein, 9 aa, synthetic construct
PANAGIKVF

SEQ ID NO: 1220 - protein, 9 aa, synthetic construct
PANAGGHLY

SEQ ID NO: 1221 - protein, 9 aa, synthetic construct
PANAGGHLH

SEQ ID NO: 1222 - protein, 9 aa, synthetic construct
PANAGGHVY

SEQ ID NO: 1223 - protein, 9 aa, synthetic construct
PANAGGHVR

SEQ ID NO: 1224 - protein, 9 aa, synthetic construct
PANAGGHVK

SEQ ID NO: 1225 - protein, 9 aa, synthetic construct
PANAGGRLF

SEQ ID NO: 1226 - protein, 9 aa, synthetic construct
PANAGGRVH

SEQ ID NO: 1227 - protein, 9 aa, synthetic construct
PANAGGRVF

SEQ ID NO: 1228 - protein, 9 aa, synthetic construct
PANAGGKLY

SEQ ID NO: 1229 - protein, 9 aa, synthetic construct
PANAGGKLF

SEQ ID NO: 1230 - protein, 9 aa, synthetic construct
PANAGGKVY

SEQ ID NO: 1231 - protein, 9 aa, synthetic construct
PANAGGKVF

SEQ ID NO: 1232 - protein, 9 aa, synthetic construct
PLNGTVHLY

SEQ ID NO: 1233 - protein, 9 aa, synthetic construct
PLQGAVHLY

SEQ ID NO: 1234 - protein, 9 aa, synthetic construct
PAQGAVHVY

SEQ ID NO: 1235 - protein, 9 aa, synthetic construct
PAQGAVHVH

SEQ ID NO: 1236 - protein, 9 aa, synthetic construct
PAQGAVRVY

SEQ ID NO: 1237 - protein, 9 aa, synthetic construct
PAQGAVRVR

SEQ ID NO: 1238 - protein, 9 aa, synthetic construct
PLQGAVHLH

SEQ ID NO: 1239 - protein, 9 aa, synthetic construct
PAQGAVKLK

SEQ ID NO: 1240 - protein, 9 aa, synthetic construct
PAQGAVKLF

SEQ ID NO: 1241 - protein, 9 aa, synthetic construct
PLQGAVHVY

SEQ ID NO: 1242 - protein, 9 aa, synthetic construct
PAQGAAHVY

SEQ ID NO: 1243 - protein, 9 aa, synthetic construct
PAQGAARVH

SEQ ID NO: 1244 - protein, 9 aa, synthetic construct
PAQGAIHLK

SEQ ID NO: 1245 - protein, 9 aa, synthetic construct
PAQGAIHLF

SEQ ID NO: 1246 - protein, 9 aa, synthetic construct
PAQGAIRVH

SEQ ID NO: 1247 - protein, 9 aa, synthetic construct
PAQGAIKLY

SEQ ID NO: 1248 - protein, 9 aa, synthetic construct
PAQGAIKLR

SEQ ID NO: 1249 - protein, 9 aa, synthetic construct
PAQGAGRLF

SEQ ID NO: 1250 - protein, 9 aa, synthetic construct
PAQGTVHLY

SEQ ID NO: 1251 - protein, 9 aa, synthetic construct
PAQGTVHLH

SEQ ID NO: 1252 - protein, 9 aa, synthetic construct
PAQGTVHVY

SEQ ID NO: 1253 - protein, 9 aa, synthetic construct
PAQGTVHVR

SEQ ID NO: 1254 - protein, 9 aa, synthetic construct
PAQGTVHVH

SEQ ID NO: 1255 - protein, 9 aa, synthetic construct
PAQGTVHVK

SEQ ID NO: 1256 - protein, 9 aa, synthetic construct
PAQGTVHVF

SEQ ID NO: 1257 - protein, 9 aa, synthetic construct
PAQGTVRLY

SEQ ID NO: 1258 - protein, 9 aa, synthetic construct
PAQGTVKVY

SEQ ID NO: 1259 - protein, 9 aa, synthetic construct
PAQGTVKVH

SEQ ID NO: 1260 - protein, 9 aa, synthetic construct
PAQGTLHVR

SEQ ID NO: 1261 - protein, 9 aa, synthetic construct
PAQGTLHVH

SEQ ID NO: 1262 - protein, 9 aa, synthetic construct
PAQGTLKLY

SEQ ID NO: 1263 - protein, 9 aa, synthetic construct
PAQGTAHLY

SEQ ID NO: 1264 - protein, 9 aa, synthetic construct
PAQGTAHLR

SEQ ID NO: 1265 - protein, 9 aa, synthetic construct
PAQGTAHLK

SEQ ID NO: 1266 - protein, 9 aa, synthetic construct
PAQGTAHVY

SEQ ID NO: 1267 - protein, 9 aa, synthetic construct
PAQGTAHVR

SEQ ID NO: 1268 - protein, 9 aa, synthetic construct
PAQGTAHVH

SEQ ID NO: 1269 - protein, 9 aa, synthetic construct
PAQGTAHVK

SEQ ID NO: 1270 - protein, 9 aa, synthetic construct
PAQGTAHVF

SEQ ID NO: 1271 - protein, 9 aa, synthetic construct
PAQGTARLH

SEQ ID NO: 1272 - protein, 9 aa, synthetic construct
PAQGTAKLY

SEQ ID NO: 1273 - protein, 9 aa, synthetic construct
PAQGTAKLH

SEQ ID NO: 1274 - protein, 9 aa, synthetic construct
PAQGTAKVF

SEQ ID NO: 1275 - protein, 9 aa, synthetic construct
PAQGTIHVR

SEQ ID NO: 1276 - protein, 9 aa, synthetic construct
PAQGTGHLY

SEQ ID NO: 1277 - protein, 9 aa, synthetic construct
PAQGTGHVY

SEQ ID NO: 1278 - protein, 9 aa, synthetic construct
PAQGTGHVH

SEQ ID NO: 1279 - protein, 9 aa, synthetic construct
PAQGTGHVK

SEQ ID NO: 1280 - protein, 9 aa, synthetic construct
PAQGTGRVY

SEQ ID NO: 1281 - protein, 9 aa, synthetic construct
PAQGTGRVF

SEQ ID NO: 1282 - protein, 9 aa, synthetic construct
PAQGTGKLY

SEQ ID NO: 1283 - protein, 9 aa, synthetic construct
PAQGTGKLF

SEQ ID NO: 1284 - protein, 9 aa, synthetic construct
PAQGTGKVF

SEQ ID NO: 1285 - protein, 9 aa, synthetic construct
PAQGSVHVY

SEQ ID NO: 1286 - protein, 9 aa, synthetic construct
PAQGSVHVH

SEQ ID NO: 1287 - protein, 9 aa, synthetic construct
PAQGSVRVF

SEQ ID NO: 1288 - protein, 9 aa, synthetic construct
PAQGSVKLF

SEQ ID NO: 1289 - protein, 9 aa, synthetic construct
PAQGSVKVH

SEQ ID NO: 1290 - protein, 9 aa, synthetic construct
PAQGSVKVF

SEQ ID NO: 1291 - protein, 9 aa, synthetic construct
PAQGSLHVR

SEQ ID NO: 1292 - protein, 9 aa, synthetic construct
PAQGSAHLR

SEQ ID NO: 1293 - protein, 9 aa, synthetic construct
PAQGSAHVY

SEQ ID NO: 1294 - protein, 9 aa, synthetic construct
PAQGSARVY

SEQ ID NO: 1295 - protein, 9 aa, synthetic construct
PAQGSAKVY

SEQ ID NO: 1296 - protein, 9 aa, synthetic construct
PAQGSAKVF

SEQ ID NO: 1297 - protein, 9 aa, synthetic construct
PAQGSIHLY

SEQ ID NO: 1298 - protein, 9 aa, synthetic construct
PAQGSIHVY

SEQ ID NO: 1299 - protein, 9 aa, synthetic construct
PAQGSIHVF

SEQ ID NO: 1300 - protein, 9 aa, synthetic construct
PAQGSIKVF

SEQ ID NO: 1301 - protein, 9 aa, synthetic construct
PAQGVVHLR

SEQ ID NO: 1302 - protein, 9 aa, synthetic construct
PAQGVVHVY

SEQ ID NO: 1303 - protein, 9 aa, synthetic construct
PAQGVVHVK

SEQ ID NO: 1304 - protein, 9 aa, synthetic construct
PAQGVLRVH

SEQ ID NO: 1305 - protein, 9 aa, synthetic construct
PLNGTVHVY

SEQ ID NO: 1306 - protein, 9 aa, synthetic construct
PAQGVLKVH

SEQ ID NO: 1307 - protein, 9 aa, synthetic construct
PAQGVAHLR

SEQ ID NO: 1308 - protein, 9 aa, synthetic construct
PAQGVAHVR

SEQ ID NO: 1309 - protein, 9 aa, synthetic construct
PAQGVAKVK

SEQ ID NO: 1310 - protein, 9 aa, synthetic construct
PLQGALKLF

SEQ ID NO: 1311 - protein, 9 aa, synthetic construct
PAQGVIHVK

SEQ ID NO: 1312 - protein, 9 aa, synthetic construct
PAQGVIKLF

SEQ ID NO: 1313 - protein, 9 aa, synthetic construct
PAQGVGHLH

SEQ ID NO: 1314 - protein, 9 aa, synthetic construct
PAQGVGHVH

SEQ ID NO: 1315 - protein, 9 aa, synthetic construct
PAQGVGKVF

SEQ ID NO: 1316 - protein, 9 aa, synthetic construct
PAQGGVHLH

SEQ ID NO: 1317 - protein, 9 aa, synthetic construct
PAQGGVHVK

SEQ ID NO: 1318 - protein, 9 aa, synthetic construct
PAQGGVRLY

SEQ ID NO: 1319 - protein, 9 aa, synthetic construct
PAQGGVKLH

SEQ ID NO: 1320 - protein, 9 aa, synthetic construct
PAQGGVKLF

SEQ ID NO: 1321 - protein, 9 aa, synthetic construct
PAQGGVKVF

SEQ ID NO: 1322 - protein, 9 aa, synthetic construct
PLQGAAHLF

SEQ ID NO: 1323 - protein, 9 aa, synthetic construct
PAQGGLKVY

SEQ ID NO: 1324 - protein, 9 aa, synthetic construct
PAQGGAHLF

SEQ ID NO: 1325 - protein, 9 aa, synthetic construct
PAQGGAHVR

SEQ ID NO: 1326 - protein, 9 aa, synthetic construct
PAQGGARVR

SEQ ID NO: 1327 - protein, 9 aa, synthetic construct
PAQGGARVF

SEQ ID NO: 1328 - protein, 9 aa, synthetic construct
PLQGAAHVK

SEQ ID NO: 1329 - protein, 9 aa, synthetic construct
PAQGGAKLY

SEQ ID NO: 1330 - protein, 9 aa, synthetic construct
PAQGGAKVF

SEQ ID NO: 1331 - protein, 9 aa, synthetic construct
PAQGGIHVY

SEQ ID NO: 1332 - protein, 9 aa, synthetic construct
PAQGGIHVR

SEQ ID NO: 1333 - protein, 9 aa, synthetic construct
PAQGGIHVH

SEQ ID NO: 1334 - protein, 9 aa, synthetic construct
PLNGTVHVH

SEQ ID NO: 1335 - protein, 9 aa, synthetic construct
PAQGGGHVY

SEQ ID NO: 1336 - protein, 9 aa, synthetic construct
PAQGGGHVF

SEQ ID NO: 1337 - protein, 9 aa, synthetic construct
PAQGGGRVY

SEQ ID NO: 1338 - protein, 9 aa, synthetic construct
PAQGGGKVY

SEQ ID NO: 1339 - protein, 9 aa, synthetic construct
PAQAAVHLK

SEQ ID NO: 1340 - protein, 9 aa, synthetic construct
PAQAAVHVK

SEQ ID NO: 1341 - protein, 9 aa, synthetic construct
PAQAAVRLY

SEQ ID NO: 1342 - protein, 9 aa, synthetic construct
PAQAAVKLY

SEQ ID NO: 1343 - protein, 9 aa, synthetic construct
PAQAAVKVY

SEQ ID NO: 1344 - protein, 9 aa, synthetic construct
PAQAAVKVH

SEQ ID NO: 1345 - protein, 9 aa, synthetic construct
PAQAAVKVF

SEQ ID NO: 1346 - protein, 9 aa, synthetic construct
PAQAALKVK

SEQ ID NO: 1347 - protein, 9 aa, synthetic construct
PAQAAAHVY

SEQ ID NO: 1348 - protein, 9 aa, synthetic construct
PAQAAAHVH

SEQ ID NO: 1349 - protein, 9 aa, synthetic construct
PAQAAARLY

SEQ ID NO: 1350 - protein, 9 aa, synthetic construct
PAQAAARLH

SEQ ID NO: 1351 - protein, 9 aa, synthetic construct
PAQAAARVY

SEQ ID NO: 1352 - protein, 9 aa, synthetic construct
PAQAAARVH

SEQ ID NO: 1353 - protein, 9 aa, synthetic construct
PAQAAARVF

SEQ ID NO: 1354 - protein, 9 aa, synthetic construct
PAQAAAKLY

SEQ ID NO: 1355 - protein, 9 aa, synthetic construct
PAQAAAKVY

SEQ ID NO: 1356 - protein, 9 aa, synthetic construct
PAQAAAKVH

SEQ ID NO: 1357 - protein, 9 aa, synthetic construct
PAQAAAKVF

SEQ ID NO: 1358 - protein, 9 aa, synthetic construct
PAQAAIHVK

SEQ ID NO: 1359 - protein, 9 aa, synthetic construct
PAQAAIHVF

SEQ ID NO: 1360 - protein, 9 aa, synthetic construct
PAQAAIRVY

SEQ ID NO: 1361 - protein, 9 aa, synthetic construct
PAQAAIRVF

SEQ ID NO: 1362 - protein, 9 aa, synthetic construct
PAQAAIKLH

SEQ ID NO: 1363 - protein, 9 aa, synthetic construct
PAQAAGHLR

SEQ ID NO: 1364 - protein, 9 aa, synthetic construct
PAQAAGHLH

SEQ ID NO: 1365 - protein, 9 aa, synthetic construct
PAQAAGHVH

SEQ ID NO: 1366 - protein, 9 aa, synthetic construct
PAQAAGHVK

SEQ ID NO: 1367 - protein, 9 aa, synthetic construct
PAQAAGHVF

SEQ ID NO: 1368 - protein, 9 aa, synthetic construct
PAQAAGRLY

SEQ ID NO: 1369 - protein, 9 aa, synthetic construct
PAQAAGRVY

SEQ ID NO: 1370 - protein, 9 aa, synthetic construct
PAQAAGRVH

SEQ ID NO: 1371 - protein, 9 aa, synthetic construct
PAQAAGRVF

SEQ ID NO: 1372 - protein, 9 aa, synthetic construct
PAQAAGKLY

SEQ ID NO: 1373 - protein, 9 aa, synthetic construct
PAQAAGKLH

SEQ ID NO: 1374 - protein, 9 aa, synthetic construct
PAQAAGKLF

SEQ ID NO: 1375 - protein, 9 aa, synthetic construct
PAQAAGKVH

SEQ ID NO: 1376 - protein, 9 aa, synthetic construct
PAQAAGKVF

SEQ ID NO: 1377 - protein, 9 aa, synthetic construct
PAQATVHVY

SEQ ID NO: 1378 - protein, 9 aa, synthetic construct
PAQATVHVH

SEQ ID NO: 1379 - protein, 9 aa, synthetic construct
PAQATVRVH

SEQ ID NO: 1380 - protein, 9 aa, synthetic construct
PAQATVKLF

SEQ ID NO: 1381 - protein, 9 aa, synthetic construct
PAQATVKVH

SEQ ID NO: 1382 - protein, 9 aa, synthetic construct
PAQATVKVF

SEQ ID NO: 1383 - protein, 9 aa, synthetic construct
PLQGAIHLK

SEQ ID NO: 1384 - protein, 9 aa, synthetic construct
PAQATLHVK

SEQ ID NO: 1385 - protein, 9 aa, synthetic construct
PLQGAIHVY

SEQ ID NO: 1386 - protein, 9 aa, synthetic construct
PAQATAHLR

SEQ ID NO: 1387 - protein, 9 aa, synthetic construct
PAQATAHVY

SEQ ID NO: 1388 - protein, 9 aa, synthetic construct
PAQATAHVK

SEQ ID NO: 1389 - protein, 9 aa, synthetic construct
PLQGAIHVH

SEQ ID NO: 1390 - protein, 9 aa, synthetic construct
PAQATARLH

SEQ ID NO: 1391 - protein, 9 aa, synthetic construct
PAQATARLF

SEQ ID NO: 1392 - protein, 9 aa, synthetic construct
PAQATARVH

SEQ ID NO: 1393 - protein, 9 aa, synthetic construct
PAQATAKLY

SEQ ID NO: 1394 - protein, 9 aa, synthetic construct
PAQATAKVH

SEQ ID NO: 1395 - protein, 9 aa, synthetic construct
PAQATAKVF

SEQ ID NO: 1396 - protein, 9 aa, synthetic construct
PAQATIHVR

SEQ ID NO: 1397 - protein, 9 aa, synthetic construct
PLNGTVRLY

SEQ ID NO: 1398 - protein, 9 aa, synthetic construct
PAQATIRVY

SEQ ID NO: 1399 - protein, 9 aa, synthetic construct
PAQATIKVF

SEQ ID NO: 1400 - protein, 9 aa, synthetic construct
PAQATGHLH

SEQ ID NO: 1401 - protein, 9 aa, synthetic construct
PAQATGHVH

SEQ ID NO: 1402 - protein, 9 aa, synthetic construct
PAQATGKLH

SEQ ID NO: 1403 - protein, 9 aa, synthetic construct
PLQGAIRVY

SEQ ID NO: 1404 - protein, 9 aa, synthetic construct
PAQASVHVY

SEQ ID NO: 1405 - protein, 9 aa, synthetic construct
PAQASVHVR

SEQ ID NO: 1406 - protein, 9 aa, synthetic construct
PAQASVHVH

SEQ ID NO: 1407 - protein, 9 aa, synthetic construct
PAQASVRLY

SEQ ID NO: 1408 - protein, 9 aa, synthetic construct
PAQASVRVH

SEQ ID NO: 1409 - protein, 9 aa, synthetic construct
PAQASVKLY

SEQ ID NO: 1410 - protein, 9 aa, synthetic construct
PAQASVKLH

SEQ ID NO: 1411 - protein, 9 aa, synthetic construct
PAQASVKVY

SEQ ID NO: 1412 - protein, 9 aa, synthetic construct
PAQASVKVH

SEQ ID NO: 1413 - protein, 9 aa, synthetic construct
PAQASVKVK

SEQ ID NO: 1414 - protein, 9 aa, synthetic construct
PAQASVKVF

SEQ ID NO: 1415 - protein, 9 aa, synthetic construct
PAQASLHVK

SEQ ID NO: 1416 - protein, 9 aa, synthetic construct
PLQGAIKLY

SEQ ID NO: 1417 - protein, 9 aa, synthetic construct
PAQASLKVH

SEQ ID NO: 1418 - protein, 9 aa, synthetic construct
PAQASAHVR

SEQ ID NO: 1419 - protein, 9 aa, synthetic construct
PAQASAHVK

SEQ ID NO: 1420 - protein, 9 aa, synthetic construct
PLQGAIKLH

SEQ ID NO: 1421 - protein, 9 aa, synthetic construct
PAQASARVF

SEQ ID NO: 1422 - protein, 9 aa, synthetic construct
PAQASAKLY

SEQ ID NO: 1423 - protein, 9 aa, synthetic construct
PAQASAKLH

SEQ ID NO: 1424 - protein, 9 aa, synthetic construct
PAQASAKVF

SEQ ID NO: 1425 - protein, 9 aa, synthetic construct
PAQASIHLK

SEQ ID NO: 1426 - protein, 9 aa, synthetic construct
PAQASIHVF

SEQ ID NO: 1427 - protein, 9 aa, synthetic construct
PAQASIRLF

SEQ ID NO: 1428 - protein, 9 aa, synthetic construct
PAQASGHLY

SEQ ID NO: 1429 - protein, 9 aa, synthetic construct
PAQASGKVF

SEQ ID NO: 1430 - protein, 9 aa, synthetic construct
PAQAVVHLY

SEQ ID NO: 1431 - protein, 9 aa, synthetic construct
PAQAVVRLK

SEQ ID NO: 1432 - protein, 9 aa, synthetic construct
PAQAVVRVF

SEQ ID NO: 1433 - protein, 9 aa, synthetic construct
PAQAVVKVF

SEQ ID NO: 1434 - protein, 9 aa, synthetic construct
PLQGAGHVR

SEQ ID NO: 1435 - protein, 9 aa, synthetic construct
PAQAVAHVF

SEQ ID NO: 1436 - protein, 9 aa, synthetic construct
PAQAVAKLF

SEQ ID NO: 1437 - protein, 9 aa, synthetic construct
PAQAVIHLR

SEQ ID NO: 1438 - protein, 9 aa, synthetic construct
PAQAVIHVK

SEQ ID NO: 1439 - protein, 9 aa, synthetic construct
PAQAVIRLF

SEQ ID NO: 1440 - protein, 9 aa, synthetic construct
PAQAVGHVY

SEQ ID NO: 1441 - protein, 9 aa, synthetic construct
PAQAVGHVK

SEQ ID NO: 1442 - protein, 9 aa, synthetic construct
PAQAVGRVF

SEQ ID NO: 1443 - protein, 9 aa, synthetic construct
PAQAVGKLF

SEQ ID NO: 1444 - protein, 9 aa, synthetic construct
PAQAGVHLK

SEQ ID NO: 1445 - protein, 9 aa, synthetic construct
PAQAGVKLY

SEQ ID NO: 1446 - protein, 9 aa, synthetic construct
PAQAGVKVH

SEQ ID NO: 1447 - protein, 9 aa, synthetic construct
PAQAGLHVH

SEQ ID NO: 1448 - protein, 9 aa, synthetic construct
PAQAGARLY

SEQ ID NO: 1449 - protein, 9 aa, synthetic construct
PAQAGARVH

SEQ ID NO: 1450 - protein, 9 aa, synthetic construct
PAQAGIHLH

SEQ ID NO: 1451 - protein, 9 aa, synthetic construct
PAQAGIHVY

SEQ ID NO: 1452 - protein, 9 aa, synthetic construct
PAQAGIHVK

SEQ ID NO: 1453 - protein, 9 aa, synthetic construct
PAQAGIRLF

SEQ ID NO: 1454 - protein, 9 aa, synthetic construct
PAQAGIRVH

SEQ ID NO: 1455 - protein, 9 aa, synthetic construct
PAQAGIRVF

SEQ ID NO: 1456 - protein, 9 aa, synthetic construct
PAQAGIKVY

SEQ ID NO: 1457 - protein, 9 aa, synthetic construct
PAQAGIKVR

SEQ ID NO: 1458 - protein, 9 aa, synthetic construct
PAQAGIKVF

SEQ ID NO: 1459 - protein, 9 aa, synthetic construct
PAQAGGHVR

SEQ ID NO: 1460 - protein, 9 aa, synthetic construct
PLQGAGKVF

SEQ ID NO: 1461 - protein, 9 aa, synthetic construct
PAQAGGKVH

SEQ ID NO: 1462 - protein, 9 aa, synthetic construct
PAQAGGKVF

SEQ ID NO: 1463 - protein, 9 aa, synthetic construct
PLQGTVHLY

SEQ ID NO: 1464 - protein, 9 aa, synthetic construct
PAPGAVHVR

SEQ ID NO: 1465 - protein, 9 aa, synthetic construct
PAPGAVHVH

SEQ ID NO: 1466 - protein, 9 aa, synthetic construct
PAPGAVHVK

SEQ ID NO: 1467 - protein, 9 aa, synthetic construct
PLQGTVHLH

SEQ ID NO: 1468 - protein, 9 aa, synthetic construct
PAPGAVKVF

SEQ ID NO: 1469 - protein, 9 aa, synthetic construct
PAPGALHVK

SEQ ID NO: 1470 - protein, 9 aa, synthetic construct
PAPGALRVF

SEQ ID NO: 1471 - protein, 9 aa, synthetic construct
PLQGTVHVY

SEQ ID NO: 1472 - protein, 9 aa, synthetic construct
PAPGALKLY

SEQ ID NO: 1473 - protein, 9 aa, synthetic construct
PAPGAAHLK

SEQ ID NO: 1474 - protein, 9 aa, synthetic construct
PAPGAAHVY

SEQ ID NO: 1475 - protein, 9 aa, synthetic construct
PAPGAAHVK

SEQ ID NO: 1476 - protein, 9 aa, synthetic construct
PAPGAAHVF

SEQ ID NO: 1477 - protein, 9 aa, synthetic construct
PAPGAARVH

SEQ ID NO: 1478 - protein, 9 aa, synthetic construct
PAPGAAKVH

SEQ ID NO: 1479 - protein, 9 aa, synthetic construct
PAPGAAKVF

SEQ ID NO: 1480 - protein, 9 aa, synthetic construct
PAPGAIHLY

SEQ ID NO: 1481 - protein, 9 aa, synthetic construct
PAPGAIHLR

SEQ ID NO: 1482 - protein, 9 aa, synthetic construct
PAPGAIHLH

SEQ ID NO: 1483 - protein, 9 aa, synthetic construct
PAPGAIHLK

SEQ ID NO: 1484 - protein, 9 aa, synthetic construct
PAPGAIHLF

SEQ ID NO: 1485 - protein, 9 aa, synthetic construct
PAPGAIHVY

SEQ ID NO: 1486 - protein, 9 aa, synthetic construct
PAPGAIHVH

SEQ ID NO: 1487 - protein, 9 aa, synthetic construct
PAPGAIHVK

SEQ ID NO: 1488 - protein, 9 aa, synthetic construct
PAPGAIHVF

SEQ ID NO: 1489 - protein, 9 aa, synthetic construct
PAPGAIKLY

SEQ ID NO: 1490 - protein, 9 aa, synthetic construct
PAPGAIKLH

SEQ ID NO: 1491 - protein, 9 aa, synthetic construct
PAPGAGHLK

SEQ ID NO: 1492 - protein, 9 aa, synthetic construct
PAPGAGHLF

SEQ ID NO: 1493 - protein, 9 aa, synthetic construct
PAPGAGHVF

SEQ ID NO: 1494 - protein, 9 aa, synthetic construct
PAPGAGRVR

SEQ ID NO: 1495 - protein, 9 aa, synthetic construct
PAPGAGRVF

SEQ ID NO: 1496 - protein, 9 aa, synthetic construct
PAPGAGKLY

SEQ ID NO: 1497 - protein, 9 aa, synthetic construct
PAPGAGKLF

SEQ ID NO: 1498 - protein, 9 aa, synthetic construct
PAPGAGKVF

SEQ ID NO: 1499 - protein, 9 aa, synthetic construct
PAPGTVHLY

SEQ ID NO: 1500 - protein, 9 aa, synthetic construct
PAPGTVHLR

SEQ ID NO: 1501 - protein, 9 aa, synthetic construct
PAPGTVHVY

SEQ ID NO: 1502 - protein, 9 aa, synthetic construct
PAPGTVHVH

SEQ ID NO: 1503 - protein, 9 aa, synthetic construct
PAPGTVRLY

SEQ ID NO: 1504 - protein, 9 aa, synthetic construct
PAPGTVRVY

SEQ ID NO: 1505 - protein, 9 aa, synthetic construct
PAPGTVKLY

SEQ ID NO: 1506 - protein, 9 aa, synthetic construct
PAPGTLHVY

SEQ ID NO: 1507 - protein, 9 aa, synthetic construct
PAPGTLRLY

SEQ ID NO: 1508 - protein, 9 aa, synthetic construct
PLNGTVRVH

SEQ ID NO: 1509 - protein, 9 aa, synthetic construct
PAPGTLKLY

SEQ ID NO: 1510 - protein, 9 aa, synthetic construct
PAPGTLKLH

SEQ ID NO: 1511 - protein, 9 aa, synthetic construct
PAPGTLKLF

SEQ ID NO: 1512 - protein, 9 aa, synthetic construct
PAPGTLKVY

SEQ ID NO: 1513 - protein, 9 aa, synthetic construct
PAPGTLKVH

SEQ ID NO: 1514 - protein, 9 aa, synthetic construct
PAPGTLKVF

SEQ ID NO: 1515 - protein, 9 aa, synthetic construct
PAPGTAHLY

SEQ ID NO: 1516 - protein, 9 aa, synthetic construct
PAPGTAHLH

SEQ ID NO: 1517 - protein, 9 aa, synthetic construct
PAPGTAHLK

SEQ ID NO: 1518 - protein, 9 aa, synthetic construct
PAPGTAHVY

SEQ ID NO: 1519 - protein, 9 aa, synthetic construct
PAPGTAHVR

SEQ ID NO: 1520 - protein, 9 aa, synthetic construct
PAPGTAHVK

SEQ ID NO: 1521 - protein, 9 aa, synthetic construct
PAPGTARLF

SEQ ID NO: 1522 - protein, 9 aa, synthetic construct
PAPGTAKLY

SEQ ID NO: 1523 - protein, 9 aa, synthetic construct
PAPGTAKLF

SEQ ID NO: 1524 - protein, 9 aa, synthetic construct
PAPGTAKVY

SEQ ID NO: 1525 - protein, 9 aa, synthetic construct
PAPGTAKVF

SEQ ID NO: 1526 - protein, 9 aa, synthetic construct
PAPGTIHLK

SEQ ID NO: 1527 - protein, 9 aa, synthetic construct
PAPGTIHVR

SEQ ID NO: 1528 - protein, 9 aa, synthetic construct
PAPGTIHVH

SEQ ID NO: 1529 - protein, 9 aa, synthetic construct
PAPGTIHVK

SEQ ID NO: 1530 - protein, 9 aa, synthetic construct
PAPGTIRLK

SEQ ID NO: 1531 - protein, 9 aa, synthetic construct
PAPGTIRVY

SEQ ID NO: 1532 - protein, 9 aa, synthetic construct
PAPGTIRVH

SEQ ID NO: 1533 - protein, 9 aa, synthetic construct
PAPGTGHLY

SEQ ID NO: 1534 - protein, 9 aa, synthetic construct
PAPGTGHLR

SEQ ID NO: 1535 - protein, 9 aa, synthetic construct
PAPGTGHLH

SEQ ID NO: 1536 - protein, 9 aa, synthetic construct
PAPGTGHLK

SEQ ID NO: 1537 - protein, 9 aa, synthetic construct
PAPGTGHVY

SEQ ID NO: 1538 - protein, 9 aa, synthetic construct
PAPGTGHVH

SEQ ID NO: 1539 - protein, 9 aa, synthetic construct
PAPGTGHVK

SEQ ID NO: 1540 - protein, 9 aa, synthetic construct
PAPGTGHVF

SEQ ID NO: 1541 - protein, 9 aa, synthetic construct
PAPGTGRLY

SEQ ID NO: 1542 - protein, 9 aa, synthetic construct
PAPGTGRLF

SEQ ID NO: 1543 - protein, 9 aa, synthetic construct
PAPGTGRVF

SEQ ID NO: 1544 - protein, 9 aa, synthetic construct
PAPGTGKLY

SEQ ID NO: 1545 - protein, 9 aa, synthetic construct
PAPGTGKLH

SEQ ID NO: 1546 - protein, 9 aa, synthetic construct
PAPGTGKLF

SEQ ID NO: 1547 - protein, 9 aa, synthetic construct
PAPGTGKVY

SEQ ID NO: 1548 - protein, 9 aa, synthetic construct
PAPGTGKVF

SEQ ID NO: 1549 - protein, 9 aa, synthetic construct
PAPGSVHLK

SEQ ID NO: 1550 - protein, 9 aa, synthetic construct
PAPGSVHVR

SEQ ID NO: 1551 - protein, 9 aa, synthetic construct
PAPGSVHVK

SEQ ID NO: 1552 - protein, 9 aa, synthetic construct
PAPGSVRVF

SEQ ID NO: 1553 - protein, 9 aa, synthetic construct
PAPGSVKLF

SEQ ID NO: 1554 - protein, 9 aa, synthetic construct
PAPGSVKVY

SEQ ID NO: 1555 - protein, 9 aa, synthetic construct
PAPGSVKVF

SEQ ID NO: 1556 - protein, 9 aa, synthetic construct
PAPGSLHVK

SEQ ID NO: 1557 - protein, 9 aa, synthetic construct
PLQGTLHVY

SEQ ID NO: 1558 - protein, 9 aa, synthetic construct
PAPGSLKLY

SEQ ID NO: 1559 - protein, 9 aa, synthetic construct
PAPGSAHLY

SEQ ID NO: 1560 - protein, 9 aa, synthetic construct
PAPGSAHLR

SEQ ID NO: 1561 - protein, 9 aa, synthetic construct
PAPGSAHLH

SEQ ID NO: 1562 - protein, 9 aa, synthetic construct
PAPGSAHLK

SEQ ID NO: 1563 - protein, 9 aa, synthetic construct
PAPGSAHLF

SEQ ID NO: 1564 - protein, 9 aa, synthetic construct
PAPGSAHVY

SEQ ID NO: 1565 - protein, 9 aa, synthetic construct
PAPGSAHVR

SEQ ID NO: 1566 - protein, 9 aa, synthetic construct
PAPGSAHVH

SEQ ID NO: 1567 - protein, 9 aa, synthetic construct
PAPGSAHVK

SEQ ID NO: 1568 - protein, 9 aa, synthetic construct
PAPGSAHVF

SEQ ID NO: 1569 - protein, 9 aa, synthetic construct
PAPGSAKLH

SEQ ID NO: 1570 - protein, 9 aa, synthetic construct
PAPGSAKLF

SEQ ID NO: 1571 - protein, 9 aa, synthetic construct
PAPGSIHLR

SEQ ID NO: 1572 - protein, 9 aa, synthetic construct
PAPGSIHLK

SEQ ID NO: 1573 - protein, 9 aa, synthetic construct
PAPGSIHVH

SEQ ID NO: 1574 - protein, 9 aa, synthetic construct
PAPGSIHVK

SEQ ID NO: 1575 - protein, 9 aa, synthetic construct
PAPGSIRLY

SEQ ID NO: 1576 - protein, 9 aa, synthetic construct
PAPGSIRVY

SEQ ID NO: 1577 - protein, 9 aa, synthetic construct
PAPGSIRVH

SEQ ID NO: 1578 - protein, 9 aa, synthetic construct
PAPGSIRVF

SEQ ID NO: 1579 - protein, 9 aa, synthetic construct
PAPGSIKLY

SEQ ID NO: 1580 - protein, 9 aa, synthetic construct
PAPGSIKLH

SEQ ID NO: 1581 - protein, 9 aa, synthetic construct
PAPGSIKLF

SEQ ID NO: 1582 - protein, 9 aa, synthetic construct
PAPGSIKVY

SEQ ID NO: 1583 - protein, 9 aa, synthetic construct
PAPGSIKVH

SEQ ID NO: 1584 - protein, 9 aa, synthetic construct
PAPGSGHLY

SEQ ID NO: 1585 - protein, 9 aa, synthetic construct
PAPGSGHLK

SEQ ID NO: 1586 - protein, 9 aa, synthetic construct
PAPGSGHVH

SEQ ID NO: 1587 - protein, 9 aa, synthetic construct
PAPGSGRLY

SEQ ID NO: 1588 - protein, 9 aa, synthetic construct
PAPGSGRVF

SEQ ID NO: 1589 - protein, 9 aa, synthetic construct
PAPGSGKLY

SEQ ID NO: 1590 - protein, 9 aa, synthetic construct
PAPGSGKVF

SEQ ID NO: 1591 - protein, 9 aa, synthetic construct
PAPGVVHVH

SEQ ID NO: 1592 - protein, 9 aa, synthetic construct
PAPGVVHVK

SEQ ID NO: 1593 - protein, 9 aa, synthetic construct
PAPGVVRVH

SEQ ID NO: 1594 - protein, 9 aa, synthetic construct
PAPGVLHVK

SEQ ID NO: 1595 - protein, 9 aa, synthetic construct
PLNGAVRVH

SEQ ID NO: 1596 - protein, 9 aa, synthetic construct
PAPGVAHVR

SEQ ID NO: 1597 - protein, 9 aa, synthetic construct
PAPGVARLY

SEQ ID NO: 1598 - protein, 9 aa, synthetic construct
PAPGVAKLY

SEQ ID NO: 1599 - protein, 9 aa, synthetic construct
PAPGVAKLH

SEQ ID NO: 1600 - protein, 9 aa, synthetic construct
PLQGTLKLF

SEQ ID NO: 1601 - protein, 9 aa, synthetic construct
PAPGVIHVY

SEQ ID NO: 1602 - protein, 9 aa, synthetic construct
PAPGVIRLR

SEQ ID NO: 1603 - protein, 9 aa, synthetic construct
PAPGVGHLR

SEQ ID NO: 1604 - protein, 9 aa, synthetic construct
PAPGVGHLK

SEQ ID NO: 1605 - protein, 9 aa, synthetic construct
PAPGVGKVY

SEQ ID NO: 1606 - protein, 9 aa, synthetic construct
PAPGGVHVR

SEQ ID NO: 1607 - protein, 9 aa, synthetic construct
PAPGGVHVK

SEQ ID NO: 1608 - protein, 9 aa, synthetic construct
PAPGGVHVF

SEQ ID NO: 1609 - protein, 9 aa, synthetic construct
PAPGGVRLY

SEQ ID NO: 1610 - protein, 9 aa, synthetic construct
PAPGGVKLY

SEQ ID NO: 1611 - protein, 9 aa, synthetic construct
PAPGGVKVY

SEQ ID NO: 1612 - protein, 9 aa, synthetic construct
PAPGGVKVH

SEQ ID NO: 1613 - protein, 9 aa, synthetic construct
PAPGGVKVF

SEQ ID NO: 1614 - protein, 9 aa, synthetic construct
PLQGTAHLK

SEQ ID NO: 1615 - protein, 9 aa, synthetic construct
PLQGTAHVR

SEQ ID NO: 1616 - protein, 9 aa, synthetic construct
PAPGGAHLR

SEQ ID NO: 1617 - protein, 9 aa, synthetic construct
PAPGGAHLK

SEQ ID NO: 1618 - protein, 9 aa, synthetic construct
PLQGTAHVH

SEQ ID NO: 1619 - protein, 9 aa, synthetic construct
PAPGGIHLK

SEQ ID NO: 1620 - protein, 9 aa, synthetic construct
PAPGGIHVH

SEQ ID NO: 1621 - protein, 9 aa, synthetic construct
PAPGGIHVK

SEQ ID NO: 1622 - protein, 9 aa, synthetic construct
PAPGGIRVY

SEQ ID NO: 1623 - protein, 9 aa, synthetic construct
PAPGGGHLY

SEQ ID NO: 1624 - protein, 9 aa, synthetic construct
PAPGGGHVR

SEQ ID NO: 1625 - protein, 9 aa, synthetic construct
PAPGGGRLY

SEQ ID NO: 1626 - protein, 9 aa, synthetic construct
PAPGGGRLF

SEQ ID NO: 1627 - protein, 9 aa, synthetic construct
PAPGGGRVF

SEQ ID NO: 1628 - protein, 9 aa, synthetic construct
PAPAALRVF

SEQ ID NO: 1629 - protein, 9 aa, synthetic construct
PLNGTVKLK

SEQ ID NO: 1630 - protein, 9 aa, synthetic construct
PLQGTAKLY

SEQ ID NO: 1631 - protein, 9 aa, synthetic construct
PAPAALKLH

SEQ ID NO: 1632 - protein, 9 aa, synthetic construct
PAPAAAHVR

SEQ ID NO: 1633 - protein, 9 aa, synthetic construct
PAPAAARVH

SEQ ID NO: 1634 - protein, 9 aa, synthetic construct
PAPAAAKLH

SEQ ID NO: 1635 - protein, 9 aa, synthetic construct
PAPAAAKVY

SEQ ID NO: 1636 - protein, 9 aa, synthetic construct
PAPAAAKVF

SEQ ID NO: 1637 - protein, 9 aa, synthetic construct
PAPAAIHLK

SEQ ID NO: 1638 - protein, 9 aa, synthetic construct
PAPAAGHLH

SEQ ID NO: 1639 - protein, 9 aa, synthetic construct
PAPAAGHVK

SEQ ID NO: 1640 - protein, 9 aa, synthetic construct
PAPAAGHVF

SEQ ID NO: 1641 - protein, 9 aa, synthetic construct
PAPAAGRLH

SEQ ID NO: 1642 - protein, 9 aa, synthetic construct
PAPAAGRLF

SEQ ID NO: 1643 - protein, 9 aa, synthetic construct
PAPAAGRVY

SEQ ID NO: 1644 - protein, 9 aa, synthetic construct
PAPAAGKLF

SEQ ID NO: 1645 - protein, 9 aa, synthetic construct
PLQGTIHLY

SEQ ID NO: 1646 - protein, 9 aa, synthetic construct
PLQGTIHLR

SEQ ID NO: 1647 - protein, 9 aa, synthetic construct
PAPATVRVH

SEQ ID NO: 1648 - protein, 9 aa, synthetic construct
PLQGTIHLH

SEQ ID NO: 1649 - protein, 9 aa, synthetic construct
PAPATVKVY

SEQ ID NO: 1650 - protein, 9 aa, synthetic construct
PLQGTIHLK

SEQ ID NO: 1651 - protein, 9 aa, synthetic construct
PAPATLHVR

SEQ ID NO: 1652 - protein, 9 aa, synthetic construct
PAPATLRLR

SEQ ID NO: 1653 - protein, 9 aa, synthetic construct
PAPATLRLF

SEQ ID NO: 1654 - protein, 9 aa, synthetic construct
PLQGTIHVY

SEQ ID NO: 1655 - protein, 9 aa, synthetic construct
PAPATLKLY

SEQ ID NO: 1656 - protein, 9 aa, synthetic construct
PAPATLKLF

SEQ ID NO: 1657 - protein, 9 aa, synthetic construct
PAPATLKVK

SEQ ID NO: 1658 - protein, 9 aa, synthetic construct
PLQGTIHVR

SEQ ID NO: 1659 - protein, 9 aa, synthetic construct
PAPATAHLK

SEQ ID NO: 1660 - protein, 9 aa, synthetic construct
PLQGTIHVH

SEQ ID NO: 1661 - protein, 9 aa, synthetic construct
PLQGTIHVK

SEQ ID NO: 1662 - protein, 9 aa, synthetic construct
PAPATAKLY

SEQ ID NO: 1663 - protein, 9 aa, synthetic construct
PAPATAKLF

SEQ ID NO: 1664 - protein, 9 aa, synthetic construct
PAPATAKVY

SEQ ID NO: 1665 - protein, 9 aa, synthetic construct
PAPATAKVH

SEQ ID NO: 1666 - protein, 9 aa, synthetic construct
PAPATAKVF

SEQ ID NO: 1667 - protein, 9 aa, synthetic construct
PLQGTIHVF

SEQ ID NO: 1668 - protein, 9 aa, synthetic construct
PAPATIHLK

SEQ ID NO: 1669 - protein, 9 aa, synthetic construct
PAPATIHVH

SEQ ID NO: 1670 - protein, 9 aa, synthetic construct
PAPATIRVY

SEQ ID NO: 1671 - protein, 9 aa, synthetic construct
PAPATIKLH

SEQ ID NO: 1672 - protein, 9 aa, synthetic construct
PAPATGHLK

SEQ ID NO: 1673 - protein, 9 aa, synthetic construct
PAPATGHLF

SEQ ID NO: 1674 - protein, 9 aa, synthetic construct
PAPATGRVF

SEQ ID NO: 1675 - protein, 9 aa, synthetic construct
PAPATGKLY

SEQ ID NO: 1676 - protein, 9 aa, synthetic construct
PAPATGKLH

SEQ ID NO: 1677 - protein, 9 aa, synthetic construct
PAPATGKLF

SEQ ID NO: 1678 - protein, 9 aa, synthetic construct
PAPATGKVF

SEQ ID NO: 1679 - protein, 9 aa, synthetic construct
PAPASVRVF

SEQ ID NO: 1680 - protein, 9 aa, synthetic construct
PAPASVKLF

SEQ ID NO: 1681 - protein, 9 aa, synthetic construct
PAPASVKVH

SEQ ID NO: 1682 - protein, 9 aa, synthetic construct
PAPASLHVK

SEQ ID NO: 1683 - protein, 9 aa, synthetic construct
PLNGTVKVR

SEQ ID NO: 1684 - protein, 9 aa, synthetic construct
PLQGTIKLY

SEQ ID NO: 1685 - protein, 9 aa, synthetic construct
PAPASAHLY

SEQ ID NO: 1686 - protein, 9 aa, synthetic construct
PAPASAHLK

SEQ ID NO: 1687 - protein, 9 aa, synthetic construct
PAPASAHVR

SEQ ID NO: 1688 - protein, 9 aa, synthetic construct
PAPASAHVH

SEQ ID NO: 1689 - protein, 9 aa, synthetic construct
PAPASAHVF

SEQ ID NO: 1690 - protein, 9 aa, synthetic construct
PLQGTIKLH

SEQ ID NO: 1691 - protein, 9 aa, synthetic construct
PAPASAKLY

SEQ ID NO: 1692 - protein, 9 aa, synthetic construct
PAPASAKLF

SEQ ID NO: 1693 - protein, 9 aa, synthetic construct
PAPASAKVY

SEQ ID NO: 1694 - protein, 9 aa, synthetic construct
PAPASAKVH

SEQ ID NO: 1695 - protein, 9 aa, synthetic construct
PAPASAKVF

SEQ ID NO: 1696 - protein, 9 aa, synthetic construct
PLQGTIKLF

SEQ ID NO: 1697 - protein, 9 aa, synthetic construct
PAPASIHLK

SEQ ID NO: 1698 - protein, 9 aa, synthetic construct
PLQGTIKVY

SEQ ID NO: 1699 - protein, 9 aa, synthetic construct
PAPASIRLF

SEQ ID NO: 1700 - protein, 9 aa, synthetic construct
PAPASIRVY

SEQ ID NO: 1701 - protein, 9 aa, synthetic construct
PAPASIKLF

SEQ ID NO: 1702 - protein, 9 aa, synthetic construct
PAPASGHLH

SEQ ID NO: 1703 - protein, 9 aa, synthetic construct
PAPASGHVH

SEQ ID NO: 1704 - protein, 9 aa, synthetic construct
PAPASGHVK

SEQ ID NO: 1705 - protein, 9 aa, synthetic construct
PAPASGHVF

SEQ ID NO: 1706 - protein, 9 aa, synthetic construct
PAPASGRLF

SEQ ID NO: 1707 - protein, 9 aa, synthetic construct
PAPASGRVF

SEQ ID NO: 1708 - protein, 9 aa, synthetic construct
PAPASGKLY

SEQ ID NO: 1709 - protein, 9 aa, synthetic construct
PAPASGKLF

SEQ ID NO: 1710 - protein, 9 aa, synthetic construct
PAPASGKVY

SEQ ID NO: 1711 - protein, 9 aa, synthetic construct
PAPASGKVH

SEQ ID NO: 1712 - protein, 9 aa, synthetic construct
PAPASGKVF

SEQ ID NO: 1713 - protein, 9 aa, synthetic construct
PLQGTGHLY

SEQ ID NO: 1714 - protein, 9 aa, synthetic construct
PAPAVVHLH

SEQ ID NO: 1715 - protein, 9 aa, synthetic construct
PLQGTGHLK

SEQ ID NO: 1716 - protein, 9 aa, synthetic construct
PAPAVLKLH

SEQ ID NO: 1717 - protein, 9 aa, synthetic construct
PAPAVAHVH

SEQ ID NO: 1718 - protein, 9 aa, synthetic construct
PAPAVAHVK

SEQ ID NO: 1719 - protein, 9 aa, synthetic construct
PLQGTGHVK

SEQ ID NO: 1720 - protein, 9 aa, synthetic construct
PAPAVIRVF

SEQ ID NO: 1721 - protein, 9 aa, synthetic construct
PAPAVIKVR

SEQ ID NO: 1722 - protein, 9 aa, synthetic construct
PAPAVGHVH

SEQ ID NO: 1723 - protein, 9 aa, synthetic construct
PLQGTGRLF

SEQ ID NO: 1724 - protein, 9 aa, synthetic construct
PAPAVGKLY

SEQ ID NO: 1725 - protein, 9 aa, synthetic construct
PAPAVGKLF

SEQ ID NO: 1726 - protein, 9 aa, synthetic construct
PAPAVGKVH

SEQ ID NO: 1727 - protein, 9 aa, synthetic construct
PAPAGAHVH

SEQ ID NO: 1728 - protein, 9 aa, synthetic construct
PAPAGAHVK

SEQ ID NO: 1729 - protein, 9 aa, synthetic construct
PLQGTGKLH

SEQ ID NO: 1730 - protein, 9 aa, synthetic construct
PAPAGAKLY

SEQ ID NO: 1731 - protein, 9 aa, synthetic construct
PAPAGAKLF

SEQ ID NO: 1732 - protein, 9 aa, synthetic construct
PLQGTGKLF

SEQ ID NO: 1733 - protein, 9 aa, synthetic construct
PAPAGIHVR

SEQ ID NO: 1734 - protein, 9 aa, synthetic construct
PAPAGIKVF

SEQ ID NO: 1735 - protein, 9 aa, synthetic construct
PAPAGGHLY

SEQ ID NO: 1736 - protein, 9 aa, synthetic construct
PAPAGGHVR

SEQ ID NO: 1737 - protein, 9 aa, synthetic construct
PAPAGGRLF

SEQ ID NO: 1738 - protein, 9 aa, synthetic construct
PAPAGGKLF

SEQ ID NO: 1739 - protein, 9 aa, synthetic construct
PAPAGGKVF

SEQ ID NO: 1740 - protein, 9 aa, synthetic construct
PVNGAVHLY

SEQ ID NO: 1741 - protein, 9 aa, synthetic construct
PVNGAVHVY

SEQ ID NO: 1742 - protein, 9 aa, synthetic construct
PVNGAVHVH

SEQ ID NO: 1743 - protein, 9 aa, synthetic construct
PVNGAVHVF

SEQ ID NO: 1744 - protein, 9 aa, synthetic construct
PVNGAVRLY

SEQ ID NO: 1745 - protein, 9 aa, synthetic construct
PVNGAVRLF

SEQ ID NO: 1746 - protein, 9 aa, synthetic construct
PVNGAVRVF

SEQ ID NO: 1747 - protein, 9 aa, synthetic construct
PVNGAVKLY

SEQ ID NO: 1748 - protein, 9 aa, synthetic construct
PVNGAVKLH

SEQ ID NO: 1749 - protein, 9 aa, synthetic construct
PVNGAVKLF

SEQ ID NO: 1750 - protein, 9 aa, synthetic construct
PVNGAVKVY

SEQ ID NO: 1751 - protein, 9 aa, synthetic construct
PVNGAVKVH

SEQ ID NO: 1752 - protein, 9 aa, synthetic construct
PVNGAVKVF

SEQ ID NO: 1753 - protein, 9 aa, synthetic construct
PVNGALHLR

SEQ ID NO: 1754 - protein, 9 aa, synthetic construct
PVNGALRVF

SEQ ID NO: 1755 - protein, 9 aa, synthetic construct
PVNGALKLF

SEQ ID NO: 1756 - protein, 9 aa, synthetic construct
PVNGALKVF

SEQ ID NO: 1757 - protein, 9 aa, synthetic construct
PVNGAAHLY

SEQ ID NO: 1758 - protein, 9 aa, synthetic construct
PVNGAAHLK

SEQ ID NO: 1759 - protein, 9 aa, synthetic construct
PVNGAAHVY

SEQ ID NO: 1760 - protein, 9 aa, synthetic construct
PVNGAAHVR

SEQ ID NO: 1761 - protein, 9 aa, synthetic construct
PVNGAAHVH

SEQ ID NO: 1762 - protein, 9 aa, synthetic construct
PVNGAAHVF

SEQ ID NO: 1763 - protein, 9 aa, synthetic construct
PVNGAARVH

SEQ ID NO: 1764 - protein, 9 aa, synthetic construct
PVNGAARVF

SEQ ID NO: 1765 - protein, 9 aa, synthetic construct
PLQGSVHVK

SEQ ID NO: 1766 - protein, 9 aa, synthetic construct
PVNGAAKLY

SEQ ID NO: 1767 - protein, 9 aa, synthetic construct
PVNGAAKLH

SEQ ID NO: 1768 - protein, 9 aa, synthetic construct
PVNGAAKLF

SEQ ID NO: 1769 - protein, 9 aa, synthetic construct
PVNGAAKVY

SEQ ID NO: 1770 - protein, 9 aa, synthetic construct
PVNGAAKVR

SEQ ID NO: 1771 - protein, 9 aa, synthetic construct
PVNGAAKVH

SEQ ID NO: 1772 - protein, 9 aa, synthetic construct
PVNGAAKVF

SEQ ID NO: 1773 - protein, 9 aa, synthetic construct
PLQGSVHVF

SEQ ID NO: 1774 - protein, 9 aa, synthetic construct
PVNGAIHLH

SEQ ID NO: 1775 - protein, 9 aa, synthetic construct
PVNGAIHLK

SEQ ID NO: 1776 - protein, 9 aa, synthetic construct
PVNGAIHVR

SEQ ID NO: 1777 - protein, 9 aa, synthetic construct
PVNGAIHVH

SEQ ID NO: 1778 - protein, 9 aa, synthetic construct
PVNGAIHVK

SEQ ID NO: 1779 - protein, 9 aa, synthetic construct
PLNGTLHLR

SEQ ID NO: 1780 - protein, 9 aa, synthetic construct
PVNGAIRLR

SEQ ID NO: 1781 - protein, 9 aa, synthetic construct
PVNGAIRLK

SEQ ID NO: 1782 - protein, 9 aa, synthetic construct
PVNGAIRVF

SEQ ID NO: 1783 - protein, 9 aa, synthetic construct
PVNGAIKLY

SEQ ID NO: 1784 - protein, 9 aa, synthetic construct
PVNGAIKLH

SEQ ID NO: 1785 - protein, 9 aa, synthetic construct
PVNGAIKLF

SEQ ID NO: 1786 - protein, 9 aa, synthetic construct
PVNGAIKVK

SEQ ID NO: 1787 - protein, 9 aa, synthetic construct
PVNGAGHLY

SEQ ID NO: 1788 - protein, 9 aa, synthetic construct
PVNGAGHLH

SEQ ID NO: 1789 - protein, 9 aa, synthetic construct
PVNGAGHLK

SEQ ID NO: 1790 - protein, 9 aa, synthetic construct
PVNGAGHLF

SEQ ID NO: 1791 - protein, 9 aa, synthetic construct
PVNGAGHVY

SEQ ID NO: 1792 - protein, 9 aa, synthetic construct
PVNGAGHVR

SEQ ID NO: 1793 - protein, 9 aa, synthetic construct
PVNGAGHVH

SEQ ID NO: 1794 - protein, 9 aa, synthetic construct
PVNGAGHVK

SEQ ID NO: 1795 - protein, 9 aa, synthetic construct
PVNGAGHVF

SEQ ID NO: 1796 - protein, 9 aa, synthetic construct
PVNGAGRLY

SEQ ID NO: 1797 - protein, 9 aa, synthetic construct
PVNGAGRLH

SEQ ID NO: 1798 - protein, 9 aa, synthetic construct
PVNGAGRVH

SEQ ID NO: 1799 - protein, 9 aa, synthetic construct
PVNGAGKLY

SEQ ID NO: 1800 - protein, 9 aa, synthetic construct
PVNGAGKLH

SEQ ID NO: 1801 - protein, 9 aa, synthetic construct
PVNGAGKLF

SEQ ID NO: 1802 - protein, 9 aa, synthetic construct
PVNGAGKVY

SEQ ID NO: 1803 - protein, 9 aa, synthetic construct
PVNGAGKVR

SEQ ID NO: 1804 - protein, 9 aa, synthetic construct
PVNGAGKVH

SEQ ID NO: 1805 - protein, 9 aa, synthetic construct
PVNGAGKVF

SEQ ID NO: 1806 - protein, 9 aa, synthetic construct
PVNGTVHLY

SEQ ID NO: 1807 - protein, 9 aa, synthetic construct
PVNGTVHVY

SEQ ID NO: 1808 - protein, 9 aa, synthetic construct
PVNGTVHVH

SEQ ID NO: 1809 - protein, 9 aa, synthetic construct
PVNGTVHVK

SEQ ID NO: 1810 - protein, 9 aa, synthetic construct
PVNGTVRLY

SEQ ID NO: 1811 - protein, 9 aa, synthetic construct
PVNGTVRVY

SEQ ID NO: 1812 - protein, 9 aa, synthetic construct
PVNGTVKLY

SEQ ID NO: 1813 - protein, 9 aa, synthetic construct
PVNGTVKVF

SEQ ID NO: 1814 - protein, 9 aa, synthetic construct
PVNGTLHVY

SEQ ID NO: 1815 - protein, 9 aa, synthetic construct
PVNGTLHVF

SEQ ID NO: 1816 - protein, 9 aa, synthetic construct
PLQGSVKLY

SEQ ID NO: 1817 - protein, 9 aa, synthetic construct
PVNGTLKLY

SEQ ID NO: 1818 - protein, 9 aa, synthetic construct
PVNGTLKLH

SEQ ID NO: 1819 - protein, 9 aa, synthetic construct
PVNGTLKVH

SEQ ID NO: 1820 - protein, 9 aa, synthetic construct
PVNGTAHLY

SEQ ID NO: 1821 - protein, 9 aa, synthetic construct
PVNGTAHLR

SEQ ID NO: 1822 - protein, 9 aa, synthetic construct
PVNGTAHVR

SEQ ID NO: 1823 - protein, 9 aa, synthetic construct
PVNGTAKLY

SEQ ID NO: 1824 - protein, 9 aa, synthetic construct
PVNGTAKVF

SEQ ID NO: 1825 - protein, 9 aa, synthetic construct
PVNGTIHVY

SEQ ID NO: 1826 - protein, 9 aa, synthetic construct
PVNGTIHVR

SEQ ID NO: 1827 - protein, 9 aa, synthetic construct
PVNGTIHVH

SEQ ID NO: 1828 - protein, 9 aa, synthetic construct
PVNGTIHVK

SEQ ID NO: 1829 - protein, 9 aa, synthetic construct
PVNGTIRVF

SEQ ID NO: 1830 - protein, 9 aa, synthetic construct
PVNGTGHLY

SEQ ID NO: 1831 - protein, 9 aa, synthetic construct
PVNGTGHLK

SEQ ID NO: 1832 - protein, 9 aa, synthetic construct
PVNGTGHVY

SEQ ID NO: 1833 - protein, 9 aa, synthetic construct
PVNGTGHVK

SEQ ID NO: 1834 - protein, 9 aa, synthetic construct
PVNGTGHVF

SEQ ID NO: 1835 - protein, 9 aa, synthetic construct
PVNGTGKLY

SEQ ID NO: 1836 - protein, 9 aa, synthetic construct
PVNGTGKLF

SEQ ID NO: 1837 - protein, 9 aa, synthetic construct
PVNGTGKVH

SEQ ID NO: 1838 - protein, 9 aa, synthetic construct
PVNGSVHLY

SEQ ID NO: 1839 - protein, 9 aa, synthetic construct
PVNGSVHLK

SEQ ID NO: 1840 - protein, 9 aa, synthetic construct
PVNGSVHVY

SEQ ID NO: 1841 - protein, 9 aa, synthetic construct
PVNGSVHVR

SEQ ID NO: 1842 - protein, 9 aa, synthetic construct
PVNGSVHVK

SEQ ID NO: 1843 - protein, 9 aa, synthetic construct
PVNGSVHVF

SEQ ID NO: 1844 - protein, 9 aa, synthetic construct
PVNGSVRVK

SEQ ID NO: 1845 - protein, 9 aa, synthetic construct
PVNGSVKVY

SEQ ID NO: 1846 - protein, 9 aa, synthetic construct
PVNGSVKVF

SEQ ID NO: 1847 - protein, 9 aa, synthetic construct
PVNGSLHLK

SEQ ID NO: 1848 - protein, 9 aa, synthetic construct
PVNGSLHVK

SEQ ID NO: 1849 - protein, 9 aa, synthetic construct
PVNGSLKLF

SEQ ID NO: 1850 - protein, 9 aa, synthetic construct
PVNGSAHLY

SEQ ID NO: 1851 - protein, 9 aa, synthetic construct
PVNGSAHLK

SEQ ID NO: 1852 - protein, 9 aa, synthetic construct
PVNGSAHVK

SEQ ID NO: 1853 - protein, 9 aa, synthetic construct
PLQGSLHVK

SEQ ID NO: 1854 - protein, 9 aa, synthetic construct
PVNGSAKLF

SEQ ID NO: 1855 - protein, 9 aa, synthetic construct
PVNGSAKVH

SEQ ID NO: 1856 - protein, 9 aa, synthetic construct
PVNGSIHLR

SEQ ID NO: 1857 - protein, 9 aa, synthetic construct
PVNGSIHLH

SEQ ID NO: 1858 - protein, 9 aa, synthetic construct
PVNGSIHLK

SEQ ID NO: 1859 - protein, 9 aa, synthetic construct
PVNGSIHVY

SEQ ID NO: 1860 - protein, 9 aa, synthetic construct
PVNGSIHVK

SEQ ID NO: 1861 - protein, 9 aa, synthetic construct
PVNGSIRVY

SEQ ID NO: 1862 - protein, 9 aa, synthetic construct
PVNGSIRVH

SEQ ID NO: 1863 - protein, 9 aa, synthetic construct
PVNGSIKLK

SEQ ID NO: 1864 - protein, 9 aa, synthetic construct
PVNGSIKLF

SEQ ID NO: 1865 - protein, 9 aa, synthetic construct
PVNGSIKVH

SEQ ID NO: 1866 - protein, 9 aa, synthetic construct
PVNGSGHLY

SEQ ID NO: 1867 - protein, 9 aa, synthetic construct
PVNGSGHVY

SEQ ID NO: 1868 - protein, 9 aa, synthetic construct
PVNGSGRVF

SEQ ID NO: 1869 - protein, 9 aa, synthetic construct
PVNGSGKLH

SEQ ID NO: 1870 - protein, 9 aa, synthetic construct
PVNGSGKLF

SEQ ID NO: 1871 - protein, 9 aa, synthetic construct
PVNGSGKVY

SEQ ID NO: 1872 - protein, 9 aa, synthetic construct
PVNGSGKVH

SEQ ID NO: 1873 - protein, 9 aa, synthetic construct
PVNGSGKVK

SEQ ID NO: 1874 - protein, 9 aa, synthetic construct
PVNGVVHVH

SEQ ID NO: 1875 - protein, 9 aa, synthetic construct
PVNGVVHVF

SEQ ID NO: 1876 - protein, 9 aa, synthetic construct
PVNGVVRVH

SEQ ID NO: 1877 - protein, 9 aa, synthetic construct
PVNGVVKLF

SEQ ID NO: 1878 - protein, 9 aa, synthetic construct
PVNGVVKVH

SEQ ID NO: 1879 - protein, 9 aa, synthetic construct
PVNGVVKVK

SEQ ID NO: 1880 - protein, 9 aa, synthetic construct
PVNGVLHVR

SEQ ID NO: 1881 - protein, 9 aa, synthetic construct
PVNGVLHVK

SEQ ID NO: 1882 - protein, 9 aa, synthetic construct
PVNGVLRVH

SEQ ID NO: 1883 - protein, 9 aa, synthetic construct
PLNGTLHVY

SEQ ID NO: 1884 - protein, 9 aa, synthetic construct
PVNGVLKLY

SEQ ID NO: 1885 - protein, 9 aa, synthetic construct
PVNGVLKLH

SEQ ID NO: 1886 - protein, 9 aa, synthetic construct
PVNGVLKLF

SEQ ID NO: 1887 - protein, 9 aa, synthetic construct
PVNGVLKVY

SEQ ID NO: 1888 - protein, 9 aa, synthetic construct
PVNGVLKVR

SEQ ID NO: 1889 - protein, 9 aa, synthetic construct
PVNGVLKVH

SEQ ID NO: 1890 - protein, 9 aa, synthetic construct
PVNGVLKVF

SEQ ID NO: 1891 - protein, 9 aa, synthetic construct
PVNGVAHLR

SEQ ID NO: 1892 - protein, 9 aa, synthetic construct
PVNGVAHLK

SEQ ID NO: 1893 - protein, 9 aa, synthetic construct
PVNGVAHVY

SEQ ID NO: 1894 - protein, 9 aa, synthetic construct
PVNGVAHVH

SEQ ID NO: 1895 - protein, 9 aa, synthetic construct
PVNGVAHVK

SEQ ID NO: 1896 - protein, 9 aa, synthetic construct
PVNGVARVY

SEQ ID NO: 1897 - protein, 9 aa, synthetic construct
PVNGVARVF

SEQ ID NO: 1898 - protein, 9 aa, synthetic construct
PVNGVAKLY

SEQ ID NO: 1899 - protein, 9 aa, synthetic construct
PVNGVAKLH

SEQ ID NO: 1900 - protein, 9 aa, synthetic construct
PVNGVAKLF

SEQ ID NO: 1901 - protein, 9 aa, synthetic construct
PVNGVAKVY

SEQ ID NO: 1902 - protein, 9 aa, synthetic construct
PVNGVAKVR

SEQ ID NO: 1903 - protein, 9 aa, synthetic construct
PVNGVAKVH

SEQ ID NO: 1904 - protein, 9 aa, synthetic construct
PVNGVAKVF

SEQ ID NO: 1905 - protein, 9 aa, synthetic construct
PVNGVIHLK

SEQ ID NO: 1906 - protein, 9 aa, synthetic construct
PVNGVIHVY

SEQ ID NO: 1907 - protein, 9 aa, synthetic construct
PVNGVIHVR

SEQ ID NO: 1908 - protein, 9 aa, synthetic construct
PVNGVIHVH

SEQ ID NO: 1909 - protein, 9 aa, synthetic construct
PVNGVIHVK

SEQ ID NO: 1910 - protein, 9 aa, synthetic construct
PVNGVIRLY

SEQ ID NO: 1911 - protein, 9 aa, synthetic construct
PVNGVIRLF

SEQ ID NO: 1912 - protein, 9 aa, synthetic construct
PVNGVIKLF

SEQ ID NO: 1913 - protein, 9 aa, synthetic construct
PVNGVIKVH

SEQ ID NO: 1914 - protein, 9 aa, synthetic construct
PVNGVIKVF

SEQ ID NO: 1915 - protein, 9 aa, synthetic construct
PVNGVGHLY

SEQ ID NO: 1916 - protein, 9 aa, synthetic construct
PVNGVGHVY

SEQ ID NO: 1917 - protein, 9 aa, synthetic construct
PVNGVGHVK

SEQ ID NO: 1918 - protein, 9 aa, synthetic construct
PVNGVGRLY

SEQ ID NO: 1919 - protein, 9 aa, synthetic construct
PVNGVGRLF

SEQ ID NO: 1920 - protein, 9 aa, synthetic construct
PVNGVGRVY

SEQ ID NO: 1921 - protein, 9 aa, synthetic construct
PVNGVGRVF

SEQ ID NO: 1922 - protein, 9 aa, synthetic construct
PVNGVGKLY

SEQ ID NO: 1923 - protein, 9 aa, synthetic construct
PVNGVGKLH

SEQ ID NO: 1924 - protein, 9 aa, synthetic construct
PVNGVGKLF

SEQ ID NO: 1925 - protein, 9 aa, synthetic construct
PVNGVGKVY

SEQ ID NO: 1926 - protein, 9 aa, synthetic construct
PLNGTLHVR

SEQ ID NO: 1927 - protein, 9 aa, synthetic construct
PVNGGVHLK

SEQ ID NO: 1928 - protein, 9 aa, synthetic construct
PVNGGVHVY

SEQ ID NO: 1929 - protein, 9 aa, synthetic construct
PVNGGVHVR

SEQ ID NO: 1930 - protein, 9 aa, synthetic construct
PVNGGVHVK

SEQ ID NO: 1931 - protein, 9 aa, synthetic construct
PVNGGVKLY

SEQ ID NO: 1932 - protein, 9 aa, synthetic construct
PVNGGVKLK

SEQ ID NO: 1933 - protein, 9 aa, synthetic construct
PVNGGVKLF

SEQ ID NO: 1934 - protein, 9 aa, synthetic construct
PVNGGVKVY

SEQ ID NO: 1935 - protein, 9 aa, synthetic construct
PVNGGVKVF

SEQ ID NO: 1936 - protein, 9 aa, synthetic construct
PVNGGLKVF

SEQ ID NO: 1937 - protein, 9 aa, synthetic construct
PVNGGAHLY

SEQ ID NO: 1938 - protein, 9 aa, synthetic construct
PVNGGAHLR

SEQ ID NO: 1939 - protein, 9 aa, synthetic construct
PVNGGAHLH

SEQ ID NO: 1940 - protein, 9 aa, synthetic construct
PVNGGAHLK

SEQ ID NO: 1941 - protein, 9 aa, synthetic construct
PVNGGAHVH

SEQ ID NO: 1942 - protein, 9 aa, synthetic construct
PVNGGAHVK

SEQ ID NO: 1943 - protein, 9 aa, synthetic construct
PVNGGARLY

SEQ ID NO: 1944 - protein, 9 aa, synthetic construct
PVNGGAKLF

SEQ ID NO: 1945 - protein, 9 aa, synthetic construct
PVNGGAKVH

SEQ ID NO: 1946 - protein, 9 aa, synthetic construct
PVNGGAKVF

SEQ ID NO: 1947 - protein, 9 aa, synthetic construct
PVNGGIHLY

SEQ ID NO: 1948 - protein, 9 aa, synthetic construct
PVNGGIHLR

SEQ ID NO: 1949 - protein, 9 aa, synthetic construct
PVNGGIHLH

SEQ ID NO: 1950 - protein, 9 aa, synthetic construct
PVNGGIHLK

SEQ ID NO: 1951 - protein, 9 aa, synthetic construct
PVNGGIHLF

SEQ ID NO: 1952 - protein, 9 aa, synthetic construct
PVNGGIHVY

SEQ ID NO: 1953 - protein, 9 aa, synthetic construct
PVNGGIHVR

SEQ ID NO: 1954 - protein, 9 aa, synthetic construct
PVNGGIHVH

SEQ ID NO: 1955 - protein, 9 aa, synthetic construct
PVNGGIHVK

SEQ ID NO: 1956 - protein, 9 aa, synthetic construct
PVNGGIHVF

SEQ ID NO: 1957 - protein, 9 aa, synthetic construct
PLNGTLHVH

SEQ ID NO: 1958 - protein, 9 aa, synthetic construct
PVNGGIRVY

SEQ ID NO: 1959 - protein, 9 aa, synthetic construct
PVNGGIRVF

SEQ ID NO: 1960 - protein, 9 aa, synthetic construct
PVNGGIKLH

SEQ ID NO: 1961 - protein, 9 aa, synthetic construct
PVNGGIKLK

SEQ ID NO: 1962 - protein, 9 aa, synthetic construct
PVNGGIKVR

SEQ ID NO: 1963 - protein, 9 aa, synthetic construct
PVNGGIKVH

SEQ ID NO: 1964 - protein, 9 aa, synthetic construct
PVNGGGHLY

SEQ ID NO: 1965 - protein, 9 aa, synthetic construct
PVNGGGHLK

SEQ ID NO: 1966 - protein, 9 aa, synthetic construct
PVNGGGHLF

SEQ ID NO: 1967 - protein, 9 aa, synthetic construct
PVNGGGHVY

SEQ ID NO: 1968 - protein, 9 aa, synthetic construct
PVNGGGHVR

SEQ ID NO: 1969 - protein, 9 aa, synthetic construct
PVNGGGHVK

SEQ ID NO: 1970 - protein, 9 aa, synthetic construct
PVNGGGHVF

SEQ ID NO: 1971 - protein, 9 aa, synthetic construct
PVNGGGRLY

SEQ ID NO: 1972 - protein, 9 aa, synthetic construct
PVNGGGRLF

SEQ ID NO: 1973 - protein, 9 aa, synthetic construct
PVNGGGRVF

SEQ ID NO: 1974 - protein, 9 aa, synthetic construct
PVNGGGKLY

SEQ ID NO: 1975 - protein, 9 aa, synthetic construct
PVNGGGKLR

SEQ ID NO: 1976 - protein, 9 aa, synthetic construct
PVNGGGKLH

SEQ ID NO: 1977 - protein, 9 aa, synthetic construct
PVNGGGKLF

SEQ ID NO: 1978 - protein, 9 aa, synthetic construct
PVNGGGKVH

SEQ ID NO: 1979 - protein, 9 aa, synthetic construct
PVNGGGKVF

SEQ ID NO: 1980 - protein, 9 aa, synthetic construct
PVNAAVHVH

SEQ ID NO: 1981 - protein, 9 aa, synthetic construct
PVNAAVRVF

SEQ ID NO: 1982 - protein, 9 aa, synthetic construct
PVNAAVKLH

SEQ ID NO: 1983 - protein, 9 aa, synthetic construct
PVNAAVKVY

SEQ ID NO: 1984 - protein, 9 aa, synthetic construct
PVNAAVKVF

SEQ ID NO: 1985 - protein, 9 aa, synthetic construct
PVNAALRVH

SEQ ID NO: 1986 - protein, 9 aa, synthetic construct
PVNAALRVF

SEQ ID NO: 1987 - protein, 9 aa, synthetic construct
PVNAAAHLY

SEQ ID NO: 1988 - protein, 9 aa, synthetic construct
PVNAAAHLR

SEQ ID NO: 1989 - protein, 9 aa, synthetic construct
PVNAAAHLH

SEQ ID NO: 1990 - protein, 9 aa, synthetic construct
PVNAAAHLK

SEQ ID NO: 1991 - protein, 9 aa, synthetic construct
PVNAAAHLF

SEQ ID NO: 1992 - protein, 9 aa, synthetic construct
PVNAAAHVY

SEQ ID NO: 1993 - protein, 9 aa, synthetic construct
PVNAAAHVR

SEQ ID NO: 1994 - protein, 9 aa, synthetic construct
PVNAAAHVH

SEQ ID NO: 1995 - protein, 9 aa, synthetic construct
PVNAAAHVK

SEQ ID NO: 1996 - protein, 9 aa, synthetic construct
PVNAAAHVF

SEQ ID NO: 1997 - protein, 9 aa, synthetic construct
PVNAAARVH

SEQ ID NO: 1998 - protein, 9 aa, synthetic construct
PVNAAAKLY

SEQ ID NO: 1999 - protein, 9 aa, synthetic construct
PVNAAAKVF

SEQ ID NO: 2000 - protein, 9 aa, synthetic construct
PVNAAIHLR

SEQ ID NO: 2001 - protein, 9 aa, synthetic construct
PVNAAIHLK

SEQ ID NO: 2002 - protein, 9 aa, synthetic construct
PVNAAIHVH

SEQ ID NO: 2003 - protein, 9 aa, synthetic construct
PVNAAIHVK

SEQ ID NO: 2004 - protein, 9 aa, synthetic construct
PLQGSAKVY

SEQ ID NO: 2005 - protein, 9 aa, synthetic construct
PVNAAIKLH

SEQ ID NO: 2006 - protein, 9 aa, synthetic construct
PVNAAIKVH

SEQ ID NO: 2007 - protein, 9 aa, synthetic construct
PVNAAGHLY

SEQ ID NO: 2008 - protein, 9 aa, synthetic construct
PVNAAGHLF

SEQ ID NO: 2009 - protein, 9 aa, synthetic construct
PVNAAGHVR

SEQ ID NO: 2010 - protein, 9 aa, synthetic construct
PVNAAGHVK

SEQ ID NO: 2011 - protein, 9 aa, synthetic construct
PVNAAGHVF

SEQ ID NO: 2012 - protein, 9 aa, synthetic construct
PVNAAGRLF

SEQ ID NO: 2013 - protein, 9 aa, synthetic construct
PVNAAGRVY

SEQ ID NO: 2014 - protein, 9 aa, synthetic construct
PVNAAGRVH

SEQ ID NO: 2015 - protein, 9 aa, synthetic construct
PVNAAGKLY

SEQ ID NO: 2016 - protein, 9 aa, synthetic construct
PVNAAGKLF

SEQ ID NO: 2017 - protein, 9 aa, synthetic construct
PVNAAGKVH

SEQ ID NO: 2018 - protein, 9 aa, synthetic construct
PVNAAGKVF

SEQ ID NO: 2019 - protein, 9 aa, synthetic construct
PVNATVHLR

SEQ ID NO: 2020 - protein, 9 aa, synthetic construct
PVNATVHVH

SEQ ID NO: 2021 - protein, 9 aa, synthetic construct
PLQGSIHLR

SEQ ID NO: 2022 - protein, 9 aa, synthetic construct
PVNATVRVH

SEQ ID NO: 2023 - protein, 9 aa, synthetic construct
PVNATVKLY

SEQ ID NO: 2024 - protein, 9 aa, synthetic construct
PVNATVKLR

SEQ ID NO: 2025 - protein, 9 aa, synthetic construct
PVNATVKLH

SEQ ID NO: 2026 - protein, 9 aa, synthetic construct
PVNATVKVR

SEQ ID NO: 2027 - protein, 9 aa, synthetic construct
PVNATLKVK

SEQ ID NO: 2028 - protein, 9 aa, synthetic construct
PVNATAHLR

SEQ ID NO: 2029 - protein, 9 aa, synthetic construct
PVNATAHLK

SEQ ID NO: 2030 - protein, 9 aa, synthetic construct
PVNATAHVR

SEQ ID NO: 2031 - protein, 9 aa, synthetic construct
PVNATAHVH

SEQ ID NO: 2032 - protein, 9 aa, synthetic construct
PLQGSIHVH

SEQ ID NO: 2033 - protein, 9 aa, synthetic construct
PVNATARLF

SEQ ID NO: 2034 - protein, 9 aa, synthetic construct
PVNATARVY

SEQ ID NO: 2035 - protein, 9 aa, synthetic construct
PVNATAKLY

SEQ ID NO: 2036 - protein, 9 aa, synthetic construct
PVNATAKLH

SEQ ID NO: 2037 - protein, 9 aa, synthetic construct
PVNATAKVF

SEQ ID NO: 2038 - protein, 9 aa, synthetic construct
PLQGSIHVF

SEQ ID NO: 2039 - protein, 9 aa, synthetic construct
PVNATIHLR

SEQ ID NO: 2040 - protein, 9 aa, synthetic construct
PVNATIHLH

SEQ ID NO: 2041 - protein, 9 aa, synthetic construct
PVNATIHLK

SEQ ID NO: 2042 - protein, 9 aa, synthetic construct
PVNATIHLF

SEQ ID NO: 2043 - protein, 9 aa, synthetic construct
PVNATIHVY

SEQ ID NO: 2044 - protein, 9 aa, synthetic construct
PVNATIHVR

SEQ ID NO: 2045 - protein, 9 aa, synthetic construct
PVNATIHVH

SEQ ID NO: 2046 - protein, 9 aa, synthetic construct
PVNATIHVK

SEQ ID NO: 2047 - protein, 9 aa, synthetic construct
PVNATIHVF

SEQ ID NO: 2048 - protein, 9 aa, synthetic construct
PVNATIKVH

SEQ ID NO: 2049 - protein, 9 aa, synthetic construct
PVNATGHVH

SEQ ID NO: 2050 - protein, 9 aa, synthetic construct
PVNATGRVF

SEQ ID NO: 2051 - protein, 9 aa, synthetic construct
PVNATGKLY

SEQ ID NO: 2052 - protein, 9 aa, synthetic construct
PVNATGKLF

SEQ ID NO: 2053 - protein, 9 aa, synthetic construct
PVNATGKVR

SEQ ID NO: 2054 - protein, 9 aa, synthetic construct
PVNATGKVF

SEQ ID NO: 2055 - protein, 9 aa, synthetic construct
PVNASVHVK

SEQ ID NO: 2056 - protein, 9 aa, synthetic construct
PVNASVKVF

SEQ ID NO: 2057 - protein, 9 aa, synthetic construct
PLNGTLRLR

SEQ ID NO: 2058 - protein, 9 aa, synthetic construct
PVNASAHVH

SEQ ID NO: 2059 - protein, 9 aa, synthetic construct
PVNASAHVF

SEQ ID NO: 2060 - protein, 9 aa, synthetic construct
PVNASARVF

SEQ ID NO: 2061 - protein, 9 aa, synthetic construct
PVNASAKLY

SEQ ID NO: 2062 - protein, 9 aa, synthetic construct
PVNASAKVY

SEQ ID NO: 2063 - protein, 9 aa, synthetic construct
PVNASIHLK

SEQ ID NO: 2064 - protein, 9 aa, synthetic construct
PVNASIHVK

SEQ ID NO: 2065 - protein, 9 aa, synthetic construct
PVNASIRLF

SEQ ID NO: 2066 - protein, 9 aa, synthetic construct
PVNASIKLY

SEQ ID NO: 2067 - protein, 9 aa, synthetic construct
PVNASGHLY

SEQ ID NO: 2068 - protein, 9 aa, synthetic construct
PVNASGRLY

SEQ ID NO: 2069 - protein, 9 aa, synthetic construct
PVNASGRLF

SEQ ID NO: 2070 - protein, 9 aa, synthetic construct
PVNASGRVF

SEQ ID NO: 2071 - protein, 9 aa, synthetic construct
PVNASGKLH

SEQ ID NO: 2072 - protein, 9 aa, synthetic construct
PVNASGKLF

SEQ ID NO: 2073 - protein, 9 aa, synthetic construct
PVNASGKVF

SEQ ID NO: 2074 - protein, 9 aa, synthetic construct
PVNAVVHVF

SEQ ID NO: 2075 - protein, 9 aa, synthetic construct
PVNAVVRVF

SEQ ID NO: 2076 - protein, 9 aa, synthetic construct
PVNAVLKLY

SEQ ID NO: 2077 - protein, 9 aa, synthetic construct
PVNAVLKVH

SEQ ID NO: 2078 - protein, 9 aa, synthetic construct
PVNAVAHLY

SEQ ID NO: 2079 - protein, 9 aa, synthetic construct
PVNAVAHVH

SEQ ID NO: 2080 - protein, 9 aa, synthetic construct
PVNAVARVF

SEQ ID NO: 2081 - protein, 9 aa, synthetic construct
PVNAVAKVY

SEQ ID NO: 2082 - protein, 9 aa, synthetic construct
PVNAVAKVF

SEQ ID NO: 2083 - protein, 9 aa, synthetic construct
PVNAVIHVK

SEQ ID NO: 2084 - protein, 9 aa, synthetic construct
PLQGSGRLY

SEQ ID NO: 2085 - protein, 9 aa, synthetic construct
PVNAVIRVR

SEQ ID NO: 2086 - protein, 9 aa, synthetic construct
PVNAVIKVH

SEQ ID NO: 2087 - protein, 9 aa, synthetic construct
PVNAVIKVF

SEQ ID NO: 2088 - protein, 9 aa, synthetic construct
PVNAVGHVH

SEQ ID NO: 2089 - protein, 9 aa, synthetic construct
PVNAVGRLH

SEQ ID NO: 2090 - protein, 9 aa, synthetic construct
PVNAVGRVH

SEQ ID NO: 2091 - protein, 9 aa, synthetic construct
PVNAVGRVF

SEQ ID NO: 2092 - protein, 9 aa, synthetic construct
PLQGSGRLF

SEQ ID NO: 2093 - protein, 9 aa, synthetic construct
PVNAVGKLY

SEQ ID NO: 2094 - protein, 9 aa, synthetic construct
PVNAVGKLH

SEQ ID NO: 2095 - protein, 9 aa, synthetic construct
PVNAVGKVY

SEQ ID NO: 2096 - protein, 9 aa, synthetic construct
PVNAGVHVR

SEQ ID NO: 2097 - protein, 9 aa, synthetic construct
PVNAGVHVH

SEQ ID NO: 2098 - protein, 9 aa, synthetic construct
PVNAGVRLF

SEQ ID NO: 2099 - protein, 9 aa, synthetic construct
PVNAGVKLY

SEQ ID NO: 2100 - protein, 9 aa, synthetic construct
PVNAGVKLR

SEQ ID NO: 2101 - protein, 9 aa, synthetic construct
PVNAGVKLH

SEQ ID NO: 2102 - protein, 9 aa, synthetic construct
PVNAGVKVH

SEQ ID NO: 2103 - protein, 9 aa, synthetic construct
PVNAGVKVF

SEQ ID NO: 2104 - protein, 9 aa, synthetic construct
PVNAGLKVF

SEQ ID NO: 2105 - protein, 9 aa, synthetic construct
PVNAGAHLH

SEQ ID NO: 2106 - protein, 9 aa, synthetic construct
PVNAGAHLK

SEQ ID NO: 2107 - protein, 9 aa, synthetic construct
PVNAGAHVH

SEQ ID NO: 2108 - protein, 9 aa, synthetic construct
PVNAGAKLF

SEQ ID NO: 2109 - protein, 9 aa, synthetic construct
PVNAGAKVH

SEQ ID NO: 2110 - protein, 9 aa, synthetic construct
PVNAGAKVF

SEQ ID NO: 2111 - protein, 9 aa, synthetic construct
PVNAGIHVY

SEQ ID NO: 2112 - protein, 9 aa, synthetic construct
PVNAGIHVK

SEQ ID NO: 2113 - protein, 9 aa, synthetic construct
PVNAGIKLF

SEQ ID NO: 2114 - protein, 9 aa, synthetic construct
PVNAGIKVY

SEQ ID NO: 2115 - protein, 9 aa, synthetic construct
PLQGSGKVH

SEQ ID NO: 2116 - protein, 9 aa, synthetic construct
PVNAGGHLY

SEQ ID NO: 2117 - protein, 9 aa, synthetic construct
PVNAGGHVY

SEQ ID NO: 2118 - protein, 9 aa, synthetic construct
PVNAGGHVR

SEQ ID NO: 2119 - protein, 9 aa, synthetic construct
PVNAGGHVK

SEQ ID NO: 2120 - protein, 9 aa, synthetic construct
PLQGSGKVK

SEQ ID NO: 2121 - protein, 9 aa, synthetic construct
PVNAGGRLF

SEQ ID NO: 2122 - protein, 9 aa, synthetic construct
PVNAGGRVF

SEQ ID NO: 2123 - protein, 9 aa, synthetic construct
PVNAGGKLF

SEQ ID NO: 2124 - protein, 9 aa, synthetic construct
PVQGAVHLH

SEQ ID NO: 2125 - protein, 9 aa, synthetic construct
PVQGAVHVY

SEQ ID NO: 2126 - protein, 9 aa, synthetic construct
PVQGAVKVF

SEQ ID NO: 2127 - protein, 9 aa, synthetic construct
PVQGALKLF

SEQ ID NO: 2128 - protein, 9 aa, synthetic construct
PVQGAAHLK

SEQ ID NO: 2129 - protein, 9 aa, synthetic construct
PVQGAAHLF

SEQ ID NO: 2130 - protein, 9 aa, synthetic construct
PVQGAARVH

SEQ ID NO: 2131 - protein, 9 aa, synthetic construct
PVQGAARVF

SEQ ID NO: 2132 - protein, 9 aa, synthetic construct
PVQGAAKVH

SEQ ID NO: 2133 - protein, 9 aa, synthetic construct
PVQGAAKVF

SEQ ID NO: 2134 - protein, 9 aa, synthetic construct
PVQGAIHLK

SEQ ID NO: 2135 - protein, 9 aa, synthetic construct
PVQGAIHVR

SEQ ID NO: 2136 - protein, 9 aa, synthetic construct
PVQGAIKLY

SEQ ID NO: 2137 - protein, 9 aa, synthetic construct
PVQGAIKLH

SEQ ID NO: 2138 - protein, 9 aa, synthetic construct
PVQGAIKLK

SEQ ID NO: 2139 - protein, 9 aa, synthetic construct
PVQGAIKVY

SEQ ID NO: 2140 - protein, 9 aa, synthetic construct
PVQGAIKVF

SEQ ID NO: 2141 - protein, 9 aa, synthetic construct
PVQGAGHVF

SEQ ID NO: 2142 - protein, 9 aa, synthetic construct
PVQGAGRLY

SEQ ID NO: 2143 - protein, 9 aa, synthetic construct
PVQGAGRLF

SEQ ID NO: 2144 - protein, 9 aa, synthetic construct
PVQGAGRVH

SEQ ID NO: 2145 - protein, 9 aa, synthetic construct
PVQGAGKVH

SEQ ID NO: 2146 - protein, 9 aa, synthetic construct
PVQGAGKVF

SEQ ID NO: 2147 - protein, 9 aa, synthetic construct
PVQGTVHLY

SEQ ID NO: 2148 - protein, 9 aa, synthetic construct
PVQGTVHLK

SEQ ID NO: 2149 - protein, 9 aa, synthetic construct
PVQGTVHVY

SEQ ID NO: 2150 - protein, 9 aa, synthetic construct
PVQGTVHVR

SEQ ID NO: 2151 - protein, 9 aa, synthetic construct
PVQGTVHVH

SEQ ID NO: 2152 - protein, 9 aa, synthetic construct
PVQGTVHVK

SEQ ID NO: 2153 - protein, 9 aa, synthetic construct
PVQGTVHVF

SEQ ID NO: 2154 - protein, 9 aa, synthetic construct
PVQGTVRLY

SEQ ID NO: 2155 - protein, 9 aa, synthetic construct
PVQGTVKVY

SEQ ID NO: 2156 - protein, 9 aa, synthetic construct
PVQGTAHLY

SEQ ID NO: 2157 - protein, 9 aa, synthetic construct
PVQGTAHLH

SEQ ID NO: 2158 - protein, 9 aa, synthetic construct
PVQGTAHLK

SEQ ID NO: 2159 - protein, 9 aa, synthetic construct
PVQGTAHVY

SEQ ID NO: 2160 - protein, 9 aa, synthetic construct
PVQGTARVY

SEQ ID NO: 2161 - protein, 9 aa, synthetic construct
PVQGTARVF

SEQ ID NO: 2162 - protein, 9 aa, synthetic construct
PVQGTAKLY

SEQ ID NO: 2163 - protein, 9 aa, synthetic construct
PVQGTAKLF

SEQ ID NO: 2164 - protein, 9 aa, synthetic construct
PVQGTAKVY

SEQ ID NO: 2165 - protein, 9 aa, synthetic construct
PVQGTAKVF

SEQ ID NO: 2166 - protein, 9 aa, synthetic construct
PVQGTIHVY

SEQ ID NO: 2167 - protein, 9 aa, synthetic construct
PVQGTIHVR

SEQ ID NO: 2168 - protein, 9 aa, synthetic construct
PVQGTIHVH

SEQ ID NO: 2169 - protein, 9 aa, synthetic construct
PVQGTGHLY

SEQ ID NO: 2170 - protein, 9 aa, synthetic construct
PVQGTGHLR

SEQ ID NO: 2171 - protein, 9 aa, synthetic construct
PVQGTGHLK

SEQ ID NO: 2172 - protein, 9 aa, synthetic construct
PVQGTGHVF

SEQ ID NO: 2173 - protein, 9 aa, synthetic construct
PLQGVVKVK

SEQ ID NO: 2174 - protein, 9 aa, synthetic construct
PVQGTGRLY

SEQ ID NO: 2175 - protein, 9 aa, synthetic construct
PVQGTGRLF

SEQ ID NO: 2176 - protein, 9 aa, synthetic construct
PVQGTGKLY

SEQ ID NO: 2177 - protein, 9 aa, synthetic construct
PVQGTGKLH

SEQ ID NO: 2178 - protein, 9 aa, synthetic construct
PVQGTGKLF

SEQ ID NO: 2179 - protein, 9 aa, synthetic construct
PVQGSVHVY

SEQ ID NO: 2180 - protein, 9 aa, synthetic construct
PVQGSVHVK

SEQ ID NO: 2181 - protein, 9 aa, synthetic construct
PVQGSVRLF

SEQ ID NO: 2182 - protein, 9 aa, synthetic construct
PVQGSVRVY

SEQ ID NO: 2183 - protein, 9 aa, synthetic construct
PVQGSVKVY

SEQ ID NO: 2184 - protein, 9 aa, synthetic construct
PVQGSVKVF

SEQ ID NO: 2185 - protein, 9 aa, synthetic construct
PVQGSLHVK

SEQ ID NO: 2186 - protein, 9 aa, synthetic construct
PVQGSAHLY

SEQ ID NO: 2187 - protein, 9 aa, synthetic construct
PVQGSAHVK

SEQ ID NO: 2188 - protein, 9 aa, synthetic construct
PVQGSAHVF

SEQ ID NO: 2189 - protein, 9 aa, synthetic construct
PVQGSAKLF

SEQ ID NO: 2190 - protein, 9 aa, synthetic construct
PVQGSIHVH

SEQ ID NO: 2191 - protein, 9 aa, synthetic construct
PVQGSIHVF

SEQ ID NO: 2192 - protein, 9 aa, synthetic construct
PVQGSIRVY

SEQ ID NO: 2193 - protein, 9 aa, synthetic construct
PVQGSIKLY

SEQ ID NO: 2194 - protein, 9 aa, synthetic construct
PVQGSIKVH

SEQ ID NO: 2195 - protein, 9 aa, synthetic construct
PVQGSIKVF

SEQ ID NO: 2196 - protein, 9 aa, synthetic construct
PVQGSGHLY

SEQ ID NO: 2197 - protein, 9 aa, synthetic construct
PVQGSGRLY

SEQ ID NO: 2198 - protein, 9 aa, synthetic construct
PVQGSGRLF

SEQ ID NO: 2199 - protein, 9 aa, synthetic construct
PVQGSGRVY

SEQ ID NO: 2200 - protein, 9 aa, synthetic construct
PVQGSGRVF

SEQ ID NO: 2201 - protein, 9 aa, synthetic construct
PLQGVLRLF

SEQ ID NO: 2202 - protein, 9 aa, synthetic construct
PVQGSGKVF

SEQ ID NO: 2203 - protein, 9 aa, synthetic construct
PVQGVVKLH

SEQ ID NO: 2204 - protein, 9 aa, synthetic construct
PVQGVVKLF

SEQ ID NO: 2205 - protein, 9 aa, synthetic construct
PVQGVVKVY

SEQ ID NO: 2206 - protein, 9 aa, synthetic construct
PVQGVVKVF

SEQ ID NO: 2207 - protein, 9 aa, synthetic construct
PVQGVLHVF

SEQ ID NO: 2208 - protein, 9 aa, synthetic construct
PLNGAVHLH

SEQ ID NO: 2209 - protein, 9 aa, synthetic construct
PVQGVAHVF

SEQ ID NO: 2210 - protein, 9 aa, synthetic construct
PVQGVARVF

SEQ ID NO: 2211 - protein, 9 aa, synthetic construct
PVQGVAKLF

SEQ ID NO: 2212 - protein, 9 aa, synthetic construct
PVQGVAKVR

SEQ ID NO: 2213 - protein, 9 aa, synthetic construct
PVQGVAKVH

SEQ ID NO: 2214 - protein, 9 aa, synthetic construct
PVQGVIHLY

SEQ ID NO: 2215 - protein, 9 aa, synthetic construct
PVQGVIHLR

SEQ ID NO: 2216 - protein, 9 aa, synthetic construct
PVQGVIHLH

SEQ ID NO: 2217 - protein, 9 aa, synthetic construct
PVQGVIHLK

SEQ ID NO: 2218 - protein, 9 aa, synthetic construct
PVQGVIHVY

SEQ ID NO: 2219 - protein, 9 aa, synthetic construct
PVQGVIHVR

SEQ ID NO: 2220 - protein, 9 aa, synthetic construct
PVQGVIHVH

SEQ ID NO: 2221 - protein, 9 aa, synthetic construct
PVQGVIHVK

SEQ ID NO: 2222 - protein, 9 aa, synthetic construct
PVQGVIHVF

SEQ ID NO: 2223 - protein, 9 aa, synthetic construct
PVQGVIKVR

SEQ ID NO: 2224 - protein, 9 aa, synthetic construct
PVQGVIKVK

SEQ ID NO: 2225 - protein, 9 aa, synthetic construct
PVQGVGHVY

SEQ ID NO: 2226 - protein, 9 aa, synthetic construct
PVQGVGRVK

SEQ ID NO: 2227 - protein, 9 aa, synthetic construct
PVQGVGKLY

SEQ ID NO: 2228 - protein, 9 aa, synthetic construct
PVQGVGKLH

SEQ ID NO: 2229 - protein, 9 aa, synthetic construct
PVQGVGKLF

SEQ ID NO: 2230 - protein, 9 aa, synthetic construct
PVQGVGKVF

SEQ ID NO: 2231 - protein, 9 aa, synthetic construct
PVQGGVRLY

SEQ ID NO: 2232 - protein, 9 aa, synthetic construct
PVQGGVRLF

SEQ ID NO: 2233 - protein, 9 aa, synthetic construct
PVQGGVRVF

SEQ ID NO: 2234 - protein, 9 aa, synthetic construct
PVQGGVKLY

SEQ ID NO: 2235 - protein, 9 aa, synthetic construct
PVQGGVKLF

SEQ ID NO: 2236 - protein, 9 aa, synthetic construct
PVQGGVKVY

SEQ ID NO: 2237 - protein, 9 aa, synthetic construct
PVQGGVKVF

SEQ ID NO: 2238 - protein, 9 aa, synthetic construct
PVQGGAKLF

SEQ ID NO: 2239 - protein, 9 aa, synthetic construct
PVQGGAKVF

SEQ ID NO: 2240 - protein, 9 aa, synthetic construct
PVQGGIHLF

SEQ ID NO: 2241 - protein, 9 aa, synthetic construct
PVQGGIHVH

SEQ ID NO: 2242 - protein, 9 aa, synthetic construct
PVQGGIKLF

SEQ ID NO: 2243 - protein, 9 aa, synthetic construct
PLQGVARLH

SEQ ID NO: 2244 - protein, 9 aa, synthetic construct
PVQGGGHLF

SEQ ID NO: 2245 - protein, 9 aa, synthetic construct
PVQGGGRVF

SEQ ID NO: 2246 - protein, 9 aa, synthetic construct
PVQGGGKVF

SEQ ID NO: 2247 - protein, 9 aa, synthetic construct
PVQAAVHVH

SEQ ID NO: 2248 - protein, 9 aa, synthetic construct
PLQGVARVR

SEQ ID NO: 2249 - protein, 9 aa, synthetic construct
PVQAAVRVR

SEQ ID NO: 2250 - protein, 9 aa, synthetic construct
PVQAAVKLY

SEQ ID NO: 2251 - protein, 9 aa, synthetic construct
PVQAAVKLH

SEQ ID NO: 2252 - protein, 9 aa, synthetic construct
PVQAAVKVY

SEQ ID NO: 2253 - protein, 9 aa, synthetic construct
PVQAAVKVH

SEQ ID NO: 2254 - protein, 9 aa, synthetic construct
PLQGVARVF

SEQ ID NO: 2255 - protein, 9 aa, synthetic construct
PLNGTLKLK

SEQ ID NO: 2256 - protein, 9 aa, synthetic construct
PVQAALKLH

SEQ ID NO: 2257 - protein, 9 aa, synthetic construct
PVQAAAHLY

SEQ ID NO: 2258 - protein, 9 aa, synthetic construct
PVQAAAHVH

SEQ ID NO: 2259 - protein, 9 aa, synthetic construct
PVQAAARVH

SEQ ID NO: 2260 - protein, 9 aa, synthetic construct
PVQAAAKLY

SEQ ID NO: 2261 - protein, 9 aa, synthetic construct
PVQAAAKVY

SEQ ID NO: 2262 - protein, 9 aa, synthetic construct
PVQAAAKVF

SEQ ID NO: 2263 - protein, 9 aa, synthetic construct
PVQAAIHVR

SEQ ID NO: 2264 - protein, 9 aa, synthetic construct
PVQAAIRLK

SEQ ID NO: 2265 - protein, 9 aa, synthetic construct
PLQGVAKVR

SEQ ID NO: 2266 - protein, 9 aa, synthetic construct
PVQAAIKVH

SEQ ID NO: 2267 - protein, 9 aa, synthetic construct
PVQAAIKVK

SEQ ID NO: 2268 - protein, 9 aa, synthetic construct
PVQAAGHLH

SEQ ID NO: 2269 - protein, 9 aa, synthetic construct
PVQAAGHVY

SEQ ID NO: 2270 - protein, 9 aa, synthetic construct
PVQAAGHVF

SEQ ID NO: 2271 - protein, 9 aa, synthetic construct
PVQAAGRVY

SEQ ID NO: 2272 - protein, 9 aa, synthetic construct
PVQAAGRVH

SEQ ID NO: 2273 - protein, 9 aa, synthetic construct
PVQAAGRVF

SEQ ID NO: 2274 - protein, 9 aa, synthetic construct
PVQAAGKLY

SEQ ID NO: 2275 - protein, 9 aa, synthetic construct
PVQAAGKVY

SEQ ID NO: 2276 - protein, 9 aa, synthetic construct
PVQAAGKVR

SEQ ID NO: 2277 - protein, 9 aa, synthetic construct
PVQAAGKVH

SEQ ID NO: 2278 - protein, 9 aa, synthetic construct
PVQAAGKVF

SEQ ID NO: 2279 - protein, 9 aa, synthetic construct
PLNGTLKLF

SEQ ID NO: 2280 - protein, 9 aa, synthetic construct
PVQATVHVY

SEQ ID NO: 2281 - protein, 9 aa, synthetic construct
PVQATVHVH

SEQ ID NO: 2282 - protein, 9 aa, synthetic construct
PVQATVRVF

SEQ ID NO: 2283 - protein, 9 aa, synthetic construct
PVQATVKLF

SEQ ID NO: 2284 - protein, 9 aa, synthetic construct
PLQGVIHLK

SEQ ID NO: 2285 - protein, 9 aa, synthetic construct
PVQATLHVK

SEQ ID NO: 2286 - protein, 9 aa, synthetic construct
PVQATLRLR

SEQ ID NO: 2287 - protein, 9 aa, synthetic construct
PVQATAHVY

SEQ ID NO: 2288 - protein, 9 aa, synthetic construct
PVQATAHVK

SEQ ID NO: 2289 - protein, 9 aa, synthetic construct
PVQATARLF

SEQ ID NO: 2290 - protein, 9 aa, synthetic construct
PLQGVIHVK

SEQ ID NO: 2291 - protein, 9 aa, synthetic construct
PVQATAKLY

SEQ ID NO: 2292 - protein, 9 aa, synthetic construct
PVQATAKVH

SEQ ID NO: 2293 - protein, 9 aa, synthetic construct
PVQATAKVF

SEQ ID NO: 2294 - protein, 9 aa, synthetic construct
PVQATIHLR

SEQ ID NO: 2295 - protein, 9 aa, synthetic construct
PVQATIHLK

SEQ ID NO: 2296 - protein, 9 aa, synthetic construct
PVQATIHVY

SEQ ID NO: 2297 - protein, 9 aa, synthetic construct
PVQATIHVR

SEQ ID NO: 2298 - protein, 9 aa, synthetic construct
PVQATIHVH

SEQ ID NO: 2299 - protein, 9 aa, synthetic construct
PVQATIHVK

SEQ ID NO: 2300 - protein, 9 aa, synthetic construct
PVQATIHVF

SEQ ID NO: 2301 - protein, 9 aa, synthetic construct
PVQATIRVY

SEQ ID NO: 2302 - protein, 9 aa, synthetic construct
PVQATIKVR

SEQ ID NO: 2303 - protein, 9 aa, synthetic construct
PVQATGHLY

SEQ ID NO: 2304 - protein, 9 aa, synthetic construct
PVQATGHLK

SEQ ID NO: 2305 - protein, 9 aa, synthetic construct
PVQATGHVH

SEQ ID NO: 2306 - protein, 9 aa, synthetic construct
PLQGVIRLK

SEQ ID NO: 2307 - protein, 9 aa, synthetic construct
PVQATGRLY

SEQ ID NO: 2308 - protein, 9 aa, synthetic construct
PVQATGRVH

SEQ ID NO: 2309 - protein, 9 aa, synthetic construct
PVQATGRVF

SEQ ID NO: 2310 - protein, 9 aa, synthetic construct
PLQGVIRLF

SEQ ID NO: 2311 - protein, 9 aa, synthetic construct
PVQATGKLH

SEQ ID NO: 2312 - protein, 9 aa, synthetic construct
PVQASVHLY

SEQ ID NO: 2313 - protein, 9 aa, synthetic construct
PVQASVHLH

SEQ ID NO: 2314 - protein, 9 aa, synthetic construct
PVQASVHVK

SEQ ID NO: 2315 - protein, 9 aa, synthetic construct
PVQASVHVF

SEQ ID NO: 2316 - protein, 9 aa, synthetic construct
PVQASVKLY

SEQ ID NO: 2317 - protein, 9 aa, synthetic construct
PVQASVKVH

SEQ ID NO: 2318 - protein, 9 aa, synthetic construct
PVQASLHLK

SEQ ID NO: 2319 - protein, 9 aa, synthetic construct
PVQASLHVH

SEQ ID NO: 2320 - protein, 9 aa, synthetic construct
PVQASLKVH

SEQ ID NO: 2321 - protein, 9 aa, synthetic construct
PVQASAHLY

SEQ ID NO: 2322 - protein, 9 aa, synthetic construct
PVQASAHVH

SEQ ID NO: 2323 - protein, 9 aa, synthetic construct
PVQASARLY

SEQ ID NO: 2324 - protein, 9 aa, synthetic construct
PVQASARLF

SEQ ID NO: 2325 - protein, 9 aa, synthetic construct
PVQASARVK

SEQ ID NO: 2326 - protein, 9 aa, synthetic construct
PVQASIHLK

SEQ ID NO: 2327 - protein, 9 aa, synthetic construct
PVQASIHVR

SEQ ID NO: 2328 - protein, 9 aa, synthetic construct
PVQASIHVF

SEQ ID NO: 2329 - protein, 9 aa, synthetic construct
PVQASIKVR

SEQ ID NO: 2330 - protein, 9 aa, synthetic construct
PVQASIKVH

SEQ ID NO: 2331 - protein, 9 aa, synthetic construct
PVQASGHLY

SEQ ID NO: 2332 - protein, 9 aa, synthetic construct
PVQASGHLH

SEQ ID NO: 2333 - protein, 9 aa, synthetic construct
PVQASGHLK

SEQ ID NO: 2334 - protein, 9 aa, synthetic construct
PVQASGHLF

SEQ ID NO: 2335 - protein, 9 aa, synthetic construct
PVQASGHVY

SEQ ID NO: 2336 - protein, 9 aa, synthetic construct
PVQASGHVH

SEQ ID NO: 2337 - protein, 9 aa, synthetic construct
PVQASGHVF

SEQ ID NO: 2338 - protein, 9 aa, synthetic construct
PVQASGRLY

SEQ ID NO: 2339 - protein, 9 aa, synthetic construct
PVQASGRLF

SEQ ID NO: 2340 - protein, 9 aa, synthetic construct
PVQASGRVH

SEQ ID NO: 2341 - protein, 9 aa, synthetic construct
PVQASGRVF

SEQ ID NO: 2342 - protein, 9 aa, synthetic construct
PVQASGKLF

SEQ ID NO: 2343 - protein, 9 aa, synthetic construct
PVQASGKVF

SEQ ID NO: 2344 - protein, 9 aa, synthetic construct
PLNGTLKVH

SEQ ID NO: 2345 - protein, 9 aa, synthetic construct
PVQAVVHVY

SEQ ID NO: 2346 - protein, 9 aa, synthetic construct
PVQAVVRLK

SEQ ID NO: 2347 - protein, 9 aa, synthetic construct
PVQAVVKVH

SEQ ID NO: 2348 - protein, 9 aa, synthetic construct
PVQAVVKVK

SEQ ID NO: 2349 - protein, 9 aa, synthetic construct
PVQAVLKVR

SEQ ID NO: 2350 - protein, 9 aa, synthetic construct
PVQAVAHVH

SEQ ID NO: 2351 - protein, 9 aa, synthetic construct
PVQAVIHLK

SEQ ID NO: 2352 - protein, 9 aa, synthetic construct
PVQAVIHVK

SEQ ID NO: 2353 - protein, 9 aa, synthetic construct
PVQAVIKVH

SEQ ID NO: 2354 - protein, 9 aa, synthetic construct
PVQAVGHLH

SEQ ID NO: 2355 - protein, 9 aa, synthetic construct
PVQAVGHVF

SEQ ID NO: 2356 - protein, 9 aa, synthetic construct
PVQAVGRLF

SEQ ID NO: 2357 - protein, 9 aa, synthetic construct
PVQAVGKLY

SEQ ID NO: 2358 - protein, 9 aa, synthetic construct
PVQAVGKVH

SEQ ID NO: 2359 - protein, 9 aa, synthetic construct
PVQAVGKVF

SEQ ID NO: 2360 - protein, 9 aa, synthetic construct
PVQAGVHVY

SEQ ID NO: 2361 - protein, 9 aa, synthetic construct
PVQAGVHVR

SEQ ID NO: 2362 - protein, 9 aa, synthetic construct
PVQAGVRLY

SEQ ID NO: 2363 - protein, 9 aa, synthetic construct
PVQAGVKLY

SEQ ID NO: 2364 - protein, 9 aa, synthetic construct
PVQAGVKLH

SEQ ID NO: 2365 - protein, 9 aa, synthetic construct
PVQAGVKLF

SEQ ID NO: 2366 - protein, 9 aa, synthetic construct
PVQAGVKVY

SEQ ID NO: 2367 - protein, 9 aa, synthetic construct
PVQAGVKVH

SEQ ID NO: 2368 - protein, 9 aa, synthetic construct
PVQAGVKVF

SEQ ID NO: 2369 - protein, 9 aa, synthetic construct
PVQAGLKLY

SEQ ID NO: 2370 - protein, 9 aa, synthetic construct
PVQAGLKVF

SEQ ID NO: 2371 - protein, 9 aa, synthetic construct
PVQAGAHLK

SEQ ID NO: 2372 - protein, 9 aa, synthetic construct
PVQAGAHVR

SEQ ID NO: 2373 - protein, 9 aa, synthetic construct
PVQAGAHVK

SEQ ID NO: 2374 - protein, 9 aa, synthetic construct
PVQAGAKLF

SEQ ID NO: 2375 - protein, 9 aa, synthetic construct
PVQAGAKVY

SEQ ID NO: 2376 - protein, 9 aa, synthetic construct
PVQAGAKVH

SEQ ID NO: 2377 - protein, 9 aa, synthetic construct
PVQAGIHLY

SEQ ID NO: 2378 - protein, 9 aa, synthetic construct
PVQAGIHLH

SEQ ID NO: 2379 - protein, 9 aa, synthetic construct
PVQAGIHVK

SEQ ID NO: 2380 - protein, 9 aa, synthetic construct
PLQGVGKVH

SEQ ID NO: 2381 - protein, 9 aa, synthetic construct
PVQAGGHLY

SEQ ID NO: 2382 - protein, 9 aa, synthetic construct
PVQAGGRLF

SEQ ID NO: 2383 - protein, 9 aa, synthetic construct
PVQAGGRVF

SEQ ID NO: 2384 - protein, 9 aa, synthetic construct
PLQGVGKVF

SEQ ID NO: 2385 - protein, 9 aa, synthetic construct
PVQAGGKLF

SEQ ID NO: 2386 - protein, 9 aa, synthetic construct
PVQAGGKVY

SEQ ID NO: 2387 - protein, 9 aa, synthetic construct
PVQAGGKVF

SEQ ID NO: 2388 - protein, 9 aa, synthetic construct
PLNGTAHLY

SEQ ID NO: 2389 - protein, 9 aa, synthetic construct
PVPGAVKLH

SEQ ID NO: 2390 - protein, 9 aa, synthetic construct
PVPGAVKVY

SEQ ID NO: 2391 - protein, 9 aa, synthetic construct
PVPGAVKVK

SEQ ID NO: 2392 - protein, 9 aa, synthetic construct
PVPGAVKVF

SEQ ID NO: 2393 - protein, 9 aa, synthetic construct
PVPGALRVF

SEQ ID NO: 2394 - protein, 9 aa, synthetic construct
PVPGAAHVH

SEQ ID NO: 2395 - protein, 9 aa, synthetic construct
PVPGAAKLH

SEQ ID NO: 2396 - protein, 9 aa, synthetic construct
PVPGAAKVF

SEQ ID NO: 2397 - protein, 9 aa, synthetic construct
PVPGAIHLK

SEQ ID NO: 2398 - protein, 9 aa, synthetic construct
PVPGAIHVK

SEQ ID NO: 2399 - protein, 9 aa, synthetic construct
PLNGTAHLR

SEQ ID NO: 2400 - protein, 9 aa, synthetic construct
PVPGAIKLY

SEQ ID NO: 2401 - protein, 9 aa, synthetic construct
PVPGAIKLH

SEQ ID NO: 2402 - protein, 9 aa, synthetic construct
PVPGAGRLY

SEQ ID NO: 2403 - protein, 9 aa, synthetic construct
PVPGAGKLF

SEQ ID NO: 2404 - protein, 9 aa, synthetic construct
PVPGAGKVH

SEQ ID NO: 2405 - protein, 9 aa, synthetic construct
PVPGAGKVF

SEQ ID NO: 2406 - protein, 9 aa, synthetic construct
PVPGTVHLY

SEQ ID NO: 2407 - protein, 9 aa, synthetic construct
PVPGTVHLH

SEQ ID NO: 2408 - protein, 9 aa, synthetic construct
PVPGTVHVY

SEQ ID NO: 2409 - protein, 9 aa, synthetic construct
PVPGTVHVH

SEQ ID NO: 2410 - protein, 9 aa, synthetic construct
PVPGTVKVY

SEQ ID NO: 2411 - protein, 9 aa, synthetic construct
PLQGGVRVF

SEQ ID NO: 2412 - protein, 9 aa, synthetic construct
PVPGTLKLY

SEQ ID NO: 2413 - protein, 9 aa, synthetic construct
PVPGTAHLH

SEQ ID NO: 2414 - protein, 9 aa, synthetic construct
PVPGTAHVY

SEQ ID NO: 2415 - protein, 9 aa, synthetic construct
PVPGTAHVH

SEQ ID NO: 2416 - protein, 9 aa, synthetic construct
PVPGTAKVF

SEQ ID NO: 2417 - protein, 9 aa, synthetic construct
PVPGTIHVR

SEQ ID NO: 2418 - protein, 9 aa, synthetic construct
PVPGTIHVH

SEQ ID NO: 2419 - protein, 9 aa, synthetic construct
PVPGTGHLY

SEQ ID NO: 2420 - protein, 9 aa, synthetic construct
PVPGTGHLK

SEQ ID NO: 2421 - protein, 9 aa, synthetic construct
PVPGTGRVF

SEQ ID NO: 2422 - protein, 9 aa, synthetic construct
PVPGTGKLY

SEQ ID NO: 2423 - protein, 9 aa, synthetic construct
PLNGTAHLK

SEQ ID NO: 2424 - protein, 9 aa, synthetic construct
PVPGSVHLK

SEQ ID NO: 2425 - protein, 9 aa, synthetic construct
PVPGSVHVR

SEQ ID NO: 2426 - protein, 9 aa, synthetic construct
PVPGSVHVK

SEQ ID NO: 2427 - protein, 9 aa, synthetic construct
PVPGSVKVY

SEQ ID NO: 2428 - protein, 9 aa, synthetic construct
PVPGSLKLF

SEQ ID NO: 2429 - protein, 9 aa, synthetic construct
PVPGSAHLK

SEQ ID NO: 2430 - protein, 9 aa, synthetic construct
PVPGSARLY

SEQ ID NO: 2431 - protein, 9 aa, synthetic construct
PVPGSAKLY

SEQ ID NO: 2432 - protein, 9 aa, synthetic construct
PVPGSAKLF

SEQ ID NO: 2433 - protein, 9 aa, synthetic construct
PVPGSIHLR

SEQ ID NO: 2434 - protein, 9 aa, synthetic construct
PVPGSIHVY

SEQ ID NO: 2435 - protein, 9 aa, synthetic construct
PVPGSIHVK

SEQ ID NO: 2436 - protein, 9 aa, synthetic construct
PVPGSIRVY

SEQ ID NO: 2437 - protein, 9 aa, synthetic construct
PVPGSIKVY

SEQ ID NO: 2438 - protein, 9 aa, synthetic construct
PVPGSGHLY

SEQ ID NO: 2439 - protein, 9 aa, synthetic construct
PVPGSGHLH

SEQ ID NO: 2440 - protein, 9 aa, synthetic construct
PVPGSGRLY

SEQ ID NO: 2441 - protein, 9 aa, synthetic construct
PVPGSGRVF

SEQ ID NO: 2442 - protein, 9 aa, synthetic construct
PVPGSGKLH

SEQ ID NO: 2443 - protein, 9 aa, synthetic construct
PVPGSGKVY

SEQ ID NO: 2444 - protein, 9 aa, synthetic construct
PVPGSGKVF

SEQ ID NO: 2445 - protein, 9 aa, synthetic construct
PVPGVVHLK

SEQ ID NO: 2446 - protein, 9 aa, synthetic construct
PVPGVVHVK

SEQ ID NO: 2447 - protein, 9 aa, synthetic construct
PVPGVVRLF

SEQ ID NO: 2448 - protein, 9 aa, synthetic construct
PVPGVVKVK

SEQ ID NO: 2449 - protein, 9 aa, synthetic construct
PVPGVLKLH

SEQ ID NO: 2450 - protein, 9 aa, synthetic construct
PVPGVLKVH

SEQ ID NO: 2451 - protein, 9 aa, synthetic construct
PVPGVLKVF

SEQ ID NO: 2452 - protein, 9 aa, synthetic construct
PVPGVAHVH

SEQ ID NO: 2453 - protein, 9 aa, synthetic construct
PVPGVAHVK

SEQ ID NO: 2454 - protein, 9 aa, synthetic construct
PVPGVAKLY

SEQ ID NO: 2455 - protein, 9 aa, synthetic construct
PVPGVAKVY

SEQ ID NO: 2456 - protein, 9 aa, synthetic construct
PVPGVIHLK

SEQ ID NO: 2457 - protein, 9 aa, synthetic construct
PVPGVIHVY

SEQ ID NO: 2458 - protein, 9 aa, synthetic construct
PVPGVIHVH

SEQ ID NO: 2459 - protein, 9 aa, synthetic construct
PVPGVIHVK

SEQ ID NO: 2460 - protein, 9 aa, synthetic construct
PVPGVIHVF

SEQ ID NO: 2461 - protein, 9 aa, synthetic construct
PVPGVIRVR

SEQ ID NO: 2462 - protein, 9 aa, synthetic construct
PVPGVIKLK

SEQ ID NO: 2463 - protein, 9 aa, synthetic construct
PVPGVGHVK

SEQ ID NO: 2464 - protein, 9 aa, synthetic construct
PVPGVGRLY

SEQ ID NO: 2465 - protein, 9 aa, synthetic construct
PVPGVGKLY

SEQ ID NO: 2466 - protein, 9 aa, synthetic construct
PVPGVGKLH

SEQ ID NO: 2467 - protein, 9 aa, synthetic construct
PVPGVGKVY

SEQ ID NO: 2468 - protein, 9 aa, synthetic construct
PLNGTAHVR

SEQ ID NO: 2469 - protein, 9 aa, synthetic construct
PVPGGVHLR

SEQ ID NO: 2470 - protein, 9 aa, synthetic construct
PVPGGVHLK

SEQ ID NO: 2471 - protein, 9 aa, synthetic construct
PVPGGVHVY

SEQ ID NO: 2472 - protein, 9 aa, synthetic construct
PVPGGVHVR

SEQ ID NO: 2473 - protein, 9 aa, synthetic construct
PVPGGVHVK

SEQ ID NO: 2474 - protein, 9 aa, synthetic construct
PVPGGVHVF

SEQ ID NO: 2475 - protein, 9 aa, synthetic construct
PVPGGVRLY

SEQ ID NO: 2476 - protein, 9 aa, synthetic construct
PVPGGVKLY

SEQ ID NO: 2477 - protein, 9 aa, synthetic construct
PVPGGVKLH

SEQ ID NO: 2478 - protein, 9 aa, synthetic construct
PVPGGVKVY

SEQ ID NO: 2479 - protein, 9 aa, synthetic construct
PVPGGVKVH

SEQ ID NO: 2480 - protein, 9 aa, synthetic construct
PVPGGVKVF

SEQ ID NO: 2481 - protein, 9 aa, synthetic construct
PVPGGLHVR

SEQ ID NO: 2482 - protein, 9 aa, synthetic construct
PVPGGLHVH

SEQ ID NO: 2483 - protein, 9 aa, synthetic construct
PVPGGAHLH

SEQ ID NO: 2484 - protein, 9 aa, synthetic construct
PVPGGAHLK

SEQ ID NO: 2485 - protein, 9 aa, synthetic construct
PVPGGAHVR

SEQ ID NO: 2486 - protein, 9 aa, synthetic construct
PVPGGAHVH

SEQ ID NO: 2487 - protein, 9 aa, synthetic construct
PVPGGARLY

SEQ ID NO: 2488 - protein, 9 aa, synthetic construct
PVPGGAKLF

SEQ ID NO: 2489 - protein, 9 aa, synthetic construct
PVPGGAKVH

SEQ ID NO: 2490 - protein, 9 aa, synthetic construct
PVPGGAKVF

SEQ ID NO: 2491 - protein, 9 aa, synthetic construct
PVPGGIHVH

SEQ ID NO: 2492 - protein, 9 aa, synthetic construct
PVPGGIHVK

SEQ ID NO: 2493 - protein, 9 aa, synthetic construct
PLNGTAHVH

SEQ ID NO: 2494 - protein, 9 aa, synthetic construct
PVPGGIRVY

SEQ ID NO: 2495 - protein, 9 aa, synthetic construct
PVPGGIKVR

SEQ ID NO: 2496 - protein, 9 aa, synthetic construct
PVPGGGHLY

SEQ ID NO: 2497 - protein, 9 aa, synthetic construct
PVPGGGHLK

SEQ ID NO: 2498 - protein, 9 aa, synthetic construct
PVPGGGHLF

SEQ ID NO: 2499 - protein, 9 aa, synthetic construct
PVPGGGHVY

SEQ ID NO: 2500 - protein, 9 aa, synthetic construct
PVPGGGHVR

SEQ ID NO: 2501 - protein, 9 aa, synthetic construct
PVPGGGHVK

SEQ ID NO: 2502 - protein, 9 aa, synthetic construct
PVPGGGHVF

SEQ ID NO: 2503 - protein, 9 aa, synthetic construct
PVPGGGRLY

SEQ ID NO: 2504 - protein, 9 aa, synthetic construct
PVPGGGRLH

SEQ ID NO: 2505 - protein, 9 aa, synthetic construct
PVPGGGRLF

SEQ ID NO: 2506 - protein, 9 aa, synthetic construct
PVPGGGRVY

SEQ ID NO: 2507 - protein, 9 aa, synthetic construct
PVPGGGRVF

SEQ ID NO: 2508 - protein, 9 aa, synthetic construct
PVPGGGKLY

SEQ ID NO: 2509 - protein, 9 aa, synthetic construct
PVPGGGKLH

SEQ ID NO: 2510 - protein, 9 aa, synthetic construct
PVPGGGKLF

SEQ ID NO: 2511 - protein, 9 aa, synthetic construct
PVPGGGKVF

SEQ ID NO: 2512 - protein, 9 aa, synthetic construct
PLQGGARVY

SEQ ID NO: 2513 - protein, 9 aa, synthetic construct
PVPAAVHVH

SEQ ID NO: 2514 - protein, 9 aa, synthetic construct
PVPAAVRLY

SEQ ID NO: 2515 - protein, 9 aa, synthetic construct
PVPAAVKVY

SEQ ID NO: 2516 - protein, 9 aa, synthetic construct
PVPAALRVF

SEQ ID NO: 2517 - protein, 9 aa, synthetic construct
PLNGTAHVK

SEQ ID NO: 2518 - protein, 9 aa, synthetic construct
PVPAAAHVH

SEQ ID NO: 2519 - protein, 9 aa, synthetic construct
PVPAAAHVF

SEQ ID NO: 2520 - protein, 9 aa, synthetic construct
PVPAAARLH

SEQ ID NO: 2521 - protein, 9 aa, synthetic construct
PVPAAARVY

SEQ ID NO: 2522 - protein, 9 aa, synthetic construct
PVPAAAKVF

SEQ ID NO: 2523 - protein, 9 aa, synthetic construct
PVPAAIHVH

SEQ ID NO: 2524 - protein, 9 aa, synthetic construct
PVPAAIHVK

SEQ ID NO: 2525 - protein, 9 aa, synthetic construct
PVPAAGHLH

SEQ ID NO: 2526 - protein, 9 aa, synthetic construct
PVPAAGKLY

SEQ ID NO: 2527 - protein, 9 aa, synthetic construct
PVPAAGKVF

SEQ ID NO: 2528 - protein, 9 aa, synthetic construct
PVPATVKLR

SEQ ID NO: 2529 - protein, 9 aa, synthetic construct
PLQGGIHLK

SEQ ID NO: 2530 - protein, 9 aa, synthetic construct
PVPATLRLR

SEQ ID NO: 2531 - protein, 9 aa, synthetic construct
PVPATAHLK

SEQ ID NO: 2532 - protein, 9 aa, synthetic construct
PVPATAKLY

SEQ ID NO: 2533 - protein, 9 aa, synthetic construct
PVPATAKLH

SEQ ID NO: 2534 - protein, 9 aa, synthetic construct
PVPATAKLF

SEQ ID NO: 2535 - protein, 9 aa, synthetic construct
PVPATIHLY

SEQ ID NO: 2536 - protein, 9 aa, synthetic construct
PVPATIHLR

SEQ ID NO: 2537 - protein, 9 aa, synthetic construct
PVPATIHLH

SEQ ID NO: 2538 - protein, 9 aa, synthetic construct
PVPATIHLK

SEQ ID NO: 2539 - protein, 9 aa, synthetic construct
PVPATIHVY

SEQ ID NO: 2540 - protein, 9 aa, synthetic construct
PVPATIHVR

SEQ ID NO: 2541 - protein, 9 aa, synthetic construct
PVPATIHVH

SEQ ID NO: 2542 - protein, 9 aa, synthetic construct
PVPATIHVK

SEQ ID NO: 2543 - protein, 9 aa, synthetic construct
PVPATIHVF

SEQ ID NO: 2544 - protein, 9 aa, synthetic construct
PLNGAVKLH

SEQ ID NO: 2545 - protein, 9 aa, synthetic construct
PVPATIRVY

SEQ ID NO: 2546 - protein, 9 aa, synthetic construct
PVPATGHLY

SEQ ID NO: 2547 - protein, 9 aa, synthetic construct
PVPATGHLK

SEQ ID NO: 2548 - protein, 9 aa, synthetic construct
PVPATGHVR

SEQ ID NO: 2549 - protein, 9 aa, synthetic construct
PVPATGHVH

SEQ ID NO: 2550 - protein, 9 aa, synthetic construct
PVPATGRLY

SEQ ID NO: 2551 - protein, 9 aa, synthetic construct
PVPATGRVY

SEQ ID NO: 2552 - protein, 9 aa, synthetic construct
PVPATGRVF

SEQ ID NO: 2553 - protein, 9 aa, synthetic construct
PVPATGKLY

SEQ ID NO: 2554 - protein, 9 aa, synthetic construct
PVPATGKLH

SEQ ID NO: 2555 - protein, 9 aa, synthetic construct
PVPATGKLF

SEQ ID NO: 2556 - protein, 9 aa, synthetic construct
PVPATGKVY

SEQ ID NO: 2557 - protein, 9 aa, synthetic construct
PVPASVRLF

SEQ ID NO: 2558 - protein, 9 aa, synthetic construct
PVPASVKLF

SEQ ID NO: 2559 - protein, 9 aa, synthetic construct
PVPASVKVF

SEQ ID NO: 2560 - protein, 9 aa, synthetic construct
PVPASAHVH

SEQ ID NO: 2561 - protein, 9 aa, synthetic construct
PLQGGIKLH

SEQ ID NO: 2562 - protein, 9 aa, synthetic construct
PLQGGIKLF

SEQ ID NO: 2563 - protein, 9 aa, synthetic construct
PVPASIHVY

SEQ ID NO: 2564 - protein, 9 aa, synthetic construct
PVPASIHVH

SEQ ID NO: 2565 - protein, 9 aa, synthetic construct
PVPASGHVR

SEQ ID NO: 2566 - protein, 9 aa, synthetic construct
PVPASGRLY

SEQ ID NO: 2567 - protein, 9 aa, synthetic construct
PVPASGRLF

SEQ ID NO: 2568 - protein, 9 aa, synthetic construct
PVPASGRVF

SEQ ID NO: 2569 - protein, 9 aa, synthetic construct
PVPASGKLY

SEQ ID NO: 2570 - protein, 9 aa, synthetic construct
PVPASGKVF

SEQ ID NO: 2571 - protein, 9 aa, synthetic construct
PVPAVVHLR

SEQ ID NO: 2572 - protein, 9 aa, synthetic construct
PVPAVVHVR

SEQ ID NO: 2573 - protein, 9 aa, synthetic construct
PVPAVVHVK

SEQ ID NO: 2574 - protein, 9 aa, synthetic construct
PVPAVVRVK

SEQ ID NO: 2575 - protein, 9 aa, synthetic construct
PVPAVVKLY

SEQ ID NO: 2576 - protein, 9 aa, synthetic construct
PVPAVVKLH

SEQ ID NO: 2577 - protein, 9 aa, synthetic construct
PVPAVVKLK

SEQ ID NO: 2578 - protein, 9 aa, synthetic construct
PVPAVVKVY

SEQ ID NO: 2579 - protein, 9 aa, synthetic construct
PVPAVVKVR

SEQ ID NO: 2580 - protein, 9 aa, synthetic construct
PVPAVVKVH

SEQ ID NO: 2581 - protein, 9 aa, synthetic construct
PVPAVVKVK

SEQ ID NO: 2582 - protein, 9 aa, synthetic construct
PVPAVVKVF

SEQ ID NO: 2583 - protein, 9 aa, synthetic construct
PVPAVLKLH

SEQ ID NO: 2584 - protein, 9 aa, synthetic construct
PVPAVLKVK

SEQ ID NO: 2585 - protein, 9 aa, synthetic construct
PVPAVAHLY

SEQ ID NO: 2586 - protein, 9 aa, synthetic construct
PVPAVAHLH

SEQ ID NO: 2587 - protein, 9 aa, synthetic construct
PVPAVAHLK

SEQ ID NO: 2588 - protein, 9 aa, synthetic construct
PVPAVAHVY

SEQ ID NO: 2589 - protein, 9 aa, synthetic construct
PVPAVAHVR

SEQ ID NO: 2590 - protein, 9 aa, synthetic construct
PVPAVAHVH

SEQ ID NO: 2591 - protein, 9 aa, synthetic construct
PVPAVAHVK

SEQ ID NO: 2592 - protein, 9 aa, synthetic construct
PVPAVAHVF

SEQ ID NO: 2593 - protein, 9 aa, synthetic construct
PVPAVAKVY

SEQ ID NO: 2594 - protein, 9 aa, synthetic construct
PLQGGGHVF

SEQ ID NO: 2595 - protein, 9 aa, synthetic construct
PLQGGGRLY

SEQ ID NO: 2596 - protein, 9 aa, synthetic construct
PVPAVIKVH

SEQ ID NO: 2597 - protein, 9 aa, synthetic construct
PVPAVGHLY

SEQ ID NO: 2598 - protein, 9 aa, synthetic construct
PVPAVGHVH

SEQ ID NO: 2599 - protein, 9 aa, synthetic construct
PVPAVGRVY

SEQ ID NO: 2600 - protein, 9 aa, synthetic construct
PLQGGGRVY

SEQ ID NO: 2601 - protein, 9 aa, synthetic construct
PVPAGVRVK

SEQ ID NO: 2602 - protein, 9 aa, synthetic construct
PLQGGGKLY

SEQ ID NO: 2603 - protein, 9 aa, synthetic construct
PVPAGLKVF

SEQ ID NO: 2604 - protein, 9 aa, synthetic construct
PVPAGAHLK

SEQ ID NO: 2605 - protein, 9 aa, synthetic construct
PVPAGAHVH

SEQ ID NO: 2606 - protein, 9 aa, synthetic construct
PVPAGAHVK

SEQ ID NO: 2607 - protein, 9 aa, synthetic construct
PVPAGARVH

SEQ ID NO: 2608 - protein, 9 aa, synthetic construct
PVPAGAKVY

SEQ ID NO: 2609 - protein, 9 aa, synthetic construct
PVPAGAKVH

SEQ ID NO: 2610 - protein, 9 aa, synthetic construct
PVPAGAKVF

SEQ ID NO: 2611 - protein, 9 aa, synthetic construct
PVPAGIHVK

SEQ ID NO: 2612 - protein, 9 aa, synthetic construct
PVPAGIKVR

SEQ ID NO: 2613 - protein, 9 aa, synthetic construct
PVPAGGRLY

SEQ ID NO: 2614 - protein, 9 aa, synthetic construct
PVPAGGRLF

SEQ ID NO: 2615 - protein, 9 aa, synthetic construct
PVPAGGRVY

SEQ ID NO: 2616 - protein, 9 aa, synthetic construct
PVPAGGKVY

SEQ ID NO: 2617 - protein, 9 aa, synthetic construct
PVPAGGKVF

SEQ ID NO: 2618 - protein, 9 aa, synthetic construct
PINGAVHLY

SEQ ID NO: 2619 - protein, 9 aa, synthetic construct
PINGAVHLK

SEQ ID NO: 2620 - protein, 9 aa, synthetic construct
PINGAVHVH

SEQ ID NO: 2621 - protein, 9 aa, synthetic construct
PINGAVRVH

SEQ ID NO: 2622 - protein, 9 aa, synthetic construct
PINGAVKVF

SEQ ID NO: 2623 - protein, 9 aa, synthetic construct
PINGALHVY

SEQ ID NO: 2624 - protein, 9 aa, synthetic construct
PINGALKVH

SEQ ID NO: 2625 - protein, 9 aa, synthetic construct
PINGAAHLH

SEQ ID NO: 2626 - protein, 9 aa, synthetic construct
PINGAARVF

SEQ ID NO: 2627 - protein, 9 aa, synthetic construct
PINGAAKLY

SEQ ID NO: 2628 - protein, 9 aa, synthetic construct
PINGAAKVF

SEQ ID NO: 2629 - protein, 9 aa, synthetic construct
PINGAIHLK

SEQ ID NO: 2630 - protein, 9 aa, synthetic construct
PINGAIHVR

SEQ ID NO: 2631 - protein, 9 aa, synthetic construct
PINGAIRLK

SEQ ID NO: 2632 - protein, 9 aa, synthetic construct
PINGAIKLH

SEQ ID NO: 2633 - protein, 9 aa, synthetic construct
PINGAIKLF

SEQ ID NO: 2634 - protein, 9 aa, synthetic construct
PINGAIKVF

SEQ ID NO: 2635 - protein, 9 aa, synthetic construct
PINGAGHLK

SEQ ID NO: 2636 - protein, 9 aa, synthetic construct
PINGAGHLF

SEQ ID NO: 2637 - protein, 9 aa, synthetic construct
PINGAGHVF

SEQ ID NO: 2638 - protein, 9 aa, synthetic construct
PINGAGRVY

SEQ ID NO: 2639 - protein, 9 aa, synthetic construct
PINGAGKLH

SEQ ID NO: 2640 - protein, 9 aa, synthetic construct
PINGAGKLF

SEQ ID NO: 2641 - protein, 9 aa, synthetic construct
PINGAGKVH

SEQ ID NO: 2642 - protein, 9 aa, synthetic construct
PINGAGKVF

SEQ ID NO: 2643 - protein, 9 aa, synthetic construct
PINGTVHLY

SEQ ID NO: 2644 - protein, 9 aa, synthetic construct
PINGTVHLR

SEQ ID NO: 2645 - protein, 9 aa, synthetic construct
PINGTVHLH

SEQ ID NO: 2646 - protein, 9 aa, synthetic construct
PINGTVHLK

SEQ ID NO: 2647 - protein, 9 aa, synthetic construct
PINGTVHLF

SEQ ID NO: 2648 - protein, 9 aa, synthetic construct
PINGTVHVY

SEQ ID NO: 2649 - protein, 9 aa, synthetic construct
PINGTVHVH

SEQ ID NO: 2650 - protein, 9 aa, synthetic construct
PINGTVHVK

SEQ ID NO: 2651 - protein, 9 aa, synthetic construct
PINGTVHVF

SEQ ID NO: 2652 - protein, 9 aa, synthetic construct
PINGTVRLY

SEQ ID NO: 2653 - protein, 9 aa, synthetic construct
PINGTVRVH

SEQ ID NO: 2654 - protein, 9 aa, synthetic construct
PINGTVKVH

SEQ ID NO: 2655 - protein, 9 aa, synthetic construct
PINGTLHLY

SEQ ID NO: 2656 - protein, 9 aa, synthetic construct
PINGTLHVY

SEQ ID NO: 2657 - protein, 9 aa, synthetic construct
PINGTLHVR

SEQ ID NO: 2658 - protein, 9 aa, synthetic construct
PINGTLHVH

SEQ ID NO: 2659 - protein, 9 aa, synthetic construct
PINGTLHVK

SEQ ID NO: 2660 - protein, 9 aa, synthetic construct
PINGTLHVF

SEQ ID NO: 2661 - protein, 9 aa, synthetic construct
PINGTLRLR

SEQ ID NO: 2662 - protein, 9 aa, synthetic construct
PINGTLRVH

SEQ ID NO: 2663 - protein, 9 aa, synthetic construct
PINGTLKLY

SEQ ID NO: 2664 - protein, 9 aa, synthetic construct
PINGTLKLH

SEQ ID NO: 2665 - protein, 9 aa, synthetic construct
PINGTLKVY

SEQ ID NO: 2666 - protein, 9 aa, synthetic construct
PINGTLKVH

SEQ ID NO: 2667 - protein, 9 aa, synthetic construct
PINGTLKVF

SEQ ID NO: 2668 - protein, 9 aa, synthetic construct
PINGTAHLY

SEQ ID NO: 2669 - protein, 9 aa, synthetic construct
PINGTAHLK

SEQ ID NO: 2670 - protein, 9 aa, synthetic construct
PINGTAHVY

SEQ ID NO: 2671 - protein, 9 aa, synthetic construct
PINGTAHVR

SEQ ID NO: 2672 - protein, 9 aa, synthetic construct
PINGTAHVK

SEQ ID NO: 2673 - protein, 9 aa, synthetic construct
PINGTARLY

SEQ ID NO: 2674 - protein, 9 aa, synthetic construct
PINGTAKLY

SEQ ID NO: 2675 - protein, 9 aa, synthetic construct
PINGTAKLH

SEQ ID NO: 2676 - protein, 9 aa, synthetic construct
PINGTAKLF

SEQ ID NO: 2677 - protein, 9 aa, synthetic construct
PINGTAKVY

SEQ ID NO: 2678 - protein, 9 aa, synthetic construct
PINGTAKVH

SEQ ID NO: 2679 - protein, 9 aa, synthetic construct
PINGTAKVF

SEQ ID NO: 2680 - protein, 9 aa, synthetic construct
PINGTIHLR

SEQ ID NO: 2681 - protein, 9 aa, synthetic construct
PINGTIHLK

SEQ ID NO: 2682 - protein, 9 aa, synthetic construct
PINGTIHVR

SEQ ID NO: 2683 - protein, 9 aa, synthetic construct
PINGTIHVH

SEQ ID NO: 2684 - protein, 9 aa, synthetic construct
PINGTIHVK

SEQ ID NO: 2685 - protein, 9 aa, synthetic construct
PINGTIRVY

SEQ ID NO: 2686 - protein, 9 aa, synthetic construct
PINGTIKLH

SEQ ID NO: 2687 - protein, 9 aa, synthetic construct
PINGTGHLY

SEQ ID NO: 2688 - protein, 9 aa, synthetic construct
PINGTGHLK

SEQ ID NO: 2689 - protein, 9 aa, synthetic construct
PINGTGHVH

SEQ ID NO: 2690 - protein, 9 aa, synthetic construct
PINGTGHVK

SEQ ID NO: 2691 - protein, 9 aa, synthetic construct
PINGTGRVF

SEQ ID NO: 2692 - protein, 9 aa, synthetic construct
PLQAAVKVF

SEQ ID NO: 2693 - protein, 9 aa, synthetic construct
PINGTGKLY

SEQ ID NO: 2694 - protein, 9 aa, synthetic construct
PINGTGKVK

SEQ ID NO: 2695 - protein, 9 aa, synthetic construct
PINGSVHLY

SEQ ID NO: 2696 - protein, 9 aa, synthetic construct
PINGSVHLK

SEQ ID NO: 2697 - protein, 9 aa, synthetic construct
PINGSVHVK

SEQ ID NO: 2698 - protein, 9 aa, synthetic construct
PINGSVKLY

SEQ ID NO: 2699 - protein, 9 aa, synthetic construct
PINGSVKLH

SEQ ID NO: 2700 - protein, 9 aa, synthetic construct
PINGSVKLF

SEQ ID NO: 2701 - protein, 9 aa, synthetic construct
PINGSVKVY

SEQ ID NO: 2702 - protein, 9 aa, synthetic construct
PINGSVKVH

SEQ ID NO: 2703 - protein, 9 aa, synthetic construct
PINGSVKVF

SEQ ID NO: 2704 - protein, 9 aa, synthetic construct
PINGSLHVY

SEQ ID NO: 2705 - protein, 9 aa, synthetic construct
PINGSLKLF

SEQ ID NO: 2706 - protein, 9 aa, synthetic construct
PINGSLKVH

SEQ ID NO: 2707 - protein, 9 aa, synthetic construct
PINGSAHLY

SEQ ID NO: 2708 - protein, 9 aa, synthetic construct
PINGSAHLH

SEQ ID NO: 2709 - protein, 9 aa, synthetic construct
PINGSAHLK

SEQ ID NO: 2710 - protein, 9 aa, synthetic construct
PINGSAHVR

SEQ ID NO: 2711 - protein, 9 aa, synthetic construct
PINGSAHVH

SEQ ID NO: 2712 - protein, 9 aa, synthetic construct
PINGSAHVK

SEQ ID NO: 2713 - protein, 9 aa, synthetic construct
PINGSAHVF

SEQ ID NO: 2714 - protein, 9 aa, synthetic construct
PINGSAKLY

SEQ ID NO: 2715 - protein, 9 aa, synthetic construct
PINGSAKLF

SEQ ID NO: 2716 - protein, 9 aa, synthetic construct
PINGSAKVF

SEQ ID NO: 2717 - protein, 9 aa, synthetic construct
PINGSIHLY

SEQ ID NO: 2718 - protein, 9 aa, synthetic construct
PINGSIHLR

SEQ ID NO: 2719 - protein, 9 aa, synthetic construct
PINGSIHLH

SEQ ID NO: 2720 - protein, 9 aa, synthetic construct
PINGSIHLK

SEQ ID NO: 2721 - protein, 9 aa, synthetic construct
PINGSIHLF

SEQ ID NO: 2722 - protein, 9 aa, synthetic construct
PINGSIHVY

SEQ ID NO: 2723 - protein, 9 aa, synthetic construct
PINGSIHVR

SEQ ID NO: 2724 - protein, 9 aa, synthetic construct
PINGSIHVH

SEQ ID NO: 2725 - protein, 9 aa, synthetic construct
PINGSIHVK

SEQ ID NO: 2726 - protein, 9 aa, synthetic construct
PINGSIHVF

SEQ ID NO: 2727 - protein, 9 aa, synthetic construct
PINGSIRVY

SEQ ID NO: 2728 - protein, 9 aa, synthetic construct
PINGSIRVH

SEQ ID NO: 2729 - protein, 9 aa, synthetic construct
PINGSIKLH

SEQ ID NO: 2730 - protein, 9 aa, synthetic construct
PINGSIKLF

SEQ ID NO: 2731 - protein, 9 aa, synthetic construct
PINGSIKVH

SEQ ID NO: 2732 - protein, 9 aa, synthetic construct
PINGSGHLY

SEQ ID NO: 2733 - protein, 9 aa, synthetic construct
PINGSGHLH

SEQ ID NO: 2734 - protein, 9 aa, synthetic construct
PINGSGHVY

SEQ ID NO: 2735 - protein, 9 aa, synthetic construct
PINGSGHVK

SEQ ID NO: 2736 - protein, 9 aa, synthetic construct
PINGSGRVF

SEQ ID NO: 2737 - protein, 9 aa, synthetic construct
PINGSGKLF

SEQ ID NO: 2738 - protein, 9 aa, synthetic construct
PINGSGKVF

SEQ ID NO: 2739 - protein, 9 aa, synthetic construct
PINGVVHVH

SEQ ID NO: 2740 - protein, 9 aa, synthetic construct
PINGVVRLK

SEQ ID NO: 2741 - protein, 9 aa, synthetic construct
PINGVLRLF

SEQ ID NO: 2742 - protein, 9 aa, synthetic construct
PINGVLKVH

SEQ ID NO: 2743 - protein, 9 aa, synthetic construct
PINGVAHVY

SEQ ID NO: 2744 - protein, 9 aa, synthetic construct
PINGVARVY

SEQ ID NO: 2745 - protein, 9 aa, synthetic construct
PINGVAKLY

SEQ ID NO: 2746 - protein, 9 aa, synthetic construct
PINGVAKLH

SEQ ID NO: 2747 - protein, 9 aa, synthetic construct
PINGVAKVY

SEQ ID NO: 2748 - protein, 9 aa, synthetic construct
PINGVIHVY

SEQ ID NO: 2749 - protein, 9 aa, synthetic construct
PINGVIKLR

SEQ ID NO: 2750 - protein, 9 aa, synthetic construct
PINGVGHLH

SEQ ID NO: 2751 - protein, 9 aa, synthetic construct
PINGVGRLY

SEQ ID NO: 2752 - protein, 9 aa, synthetic construct
PINGVGKLY

SEQ ID NO: 2753 - protein, 9 aa, synthetic construct
PINGVGKVY

SEQ ID NO: 2754 - protein, 9 aa, synthetic construct
PINGGVHLR

SEQ ID NO: 2755 - protein, 9 aa, synthetic construct
PINGGVHVK

SEQ ID NO: 2756 - protein, 9 aa, synthetic construct
PINGGVKLY

SEQ ID NO: 2757 - protein, 9 aa, synthetic construct
PINGGVKVY

SEQ ID NO: 2758 - protein, 9 aa, synthetic construct
PINGGVKVF

SEQ ID NO: 2759 - protein, 9 aa, synthetic construct
PLQAAAHLK

SEQ ID NO: 2760 - protein, 9 aa, synthetic construct
PINGGLHLK

SEQ ID NO: 2761 - protein, 9 aa, synthetic construct
PINGGLKVF

SEQ ID NO: 2762 - protein, 9 aa, synthetic construct
PINGGAHLH

SEQ ID NO: 2763 - protein, 9 aa, synthetic construct
PINGGAHVH

SEQ ID NO: 2764 - protein, 9 aa, synthetic construct
PINGGAKLK

SEQ ID NO: 2765 - protein, 9 aa, synthetic construct
PINGGAKLF

SEQ ID NO: 2766 - protein, 9 aa, synthetic construct
PINGGAKVR

SEQ ID NO: 2767 - protein, 9 aa, synthetic construct
PINGGAKVH

SEQ ID NO: 2768 - protein, 9 aa, synthetic construct
PINGGAKVF

SEQ ID NO: 2769 - protein, 9 aa, synthetic construct
PINGGIHLR

SEQ ID NO: 2770 - protein, 9 aa, synthetic construct
PINGGIHVH

SEQ ID NO: 2771 - protein, 9 aa, synthetic construct
PINGGIHVK

SEQ ID NO: 2772 - protein, 9 aa, synthetic construct
PLNGTAKLH

SEQ ID NO: 2773 - protein, 9 aa, synthetic construct
PINGGIRLY

SEQ ID NO: 2774 - protein, 9 aa, synthetic construct
PINGGIRVY

SEQ ID NO: 2775 - protein, 9 aa, synthetic construct
PINGGGHLF

SEQ ID NO: 2776 - protein, 9 aa, synthetic construct
PINGGGHVY

SEQ ID NO: 2777 - protein, 9 aa, synthetic construct
PINGGGHVK

SEQ ID NO: 2778 - protein, 9 aa, synthetic construct
PINGGGRLY

SEQ ID NO: 2779 - protein, 9 aa, synthetic construct
PINGGGRVH

SEQ ID NO: 2780 - protein, 9 aa, synthetic construct
PINGGGRVF

SEQ ID NO: 2781 - protein, 9 aa, synthetic construct
PINGGGKLR

SEQ ID NO: 2782 - protein, 9 aa, synthetic construct
PINGGGKLF

SEQ ID NO: 2783 - protein, 9 aa, synthetic construct
PINAAVHLY

SEQ ID NO: 2784 - protein, 9 aa, synthetic construct
PINAAVHLH

SEQ ID NO: 2785 - protein, 9 aa, synthetic construct
PINAAVHLK

SEQ ID NO: 2786 - protein, 9 aa, synthetic construct
PINAAVHVY

SEQ ID NO: 2787 - protein, 9 aa, synthetic construct
PINAAVHVR

SEQ ID NO: 2788 - protein, 9 aa, synthetic construct
PINAAVHVH

SEQ ID NO: 2789 - protein, 9 aa, synthetic construct
PINAAVHVK

SEQ ID NO: 2790 - protein, 9 aa, synthetic construct
PINAAVHVF

SEQ ID NO: 2791 - protein, 9 aa, synthetic construct
PINAAVRVF

SEQ ID NO: 2792 - protein, 9 aa, synthetic construct
PINAAVKLH

SEQ ID NO: 2793 - protein, 9 aa, synthetic construct
PINAAVKVY

SEQ ID NO: 2794 - protein, 9 aa, synthetic construct
PINAAVKVF

SEQ ID NO: 2795 - protein, 9 aa, synthetic construct
PINAALHVH

SEQ ID NO: 2796 - protein, 9 aa, synthetic construct
PINAALRVY

SEQ ID NO: 2797 - protein, 9 aa, synthetic construct
PINAALRVF

SEQ ID NO: 2798 - protein, 9 aa, synthetic construct
PINAAAHLK

SEQ ID NO: 2799 - protein, 9 aa, synthetic construct
PINAAARLY

SEQ ID NO: 2800 - protein, 9 aa, synthetic construct
PINAAARVF

SEQ ID NO: 2801 - protein, 9 aa, synthetic construct
PINAAAKLF

SEQ ID NO: 2802 - protein, 9 aa, synthetic construct
PINAAAKVF

SEQ ID NO: 2803 - protein, 9 aa, synthetic construct
PINAAIKLH

SEQ ID NO: 2804 - protein, 9 aa, synthetic construct
PINAAIKVH

SEQ ID NO: 2805 - protein, 9 aa, synthetic construct
PLQAAAKVH

SEQ ID NO: 2806 - protein, 9 aa, synthetic construct
PINAAGHLH

SEQ ID NO: 2807 - protein, 9 aa, synthetic construct
PINAAGHVF

SEQ ID NO: 2808 - protein, 9 aa, synthetic construct
PINAAGRLF

SEQ ID NO: 2809 - protein, 9 aa, synthetic construct
PLQAAAKVF

SEQ ID NO: 2810 - protein, 9 aa, synthetic construct
PINATVHLY

SEQ ID NO: 2811 - protein, 9 aa, synthetic construct
PINATVHVH

SEQ ID NO: 2812 - protein, 9 aa, synthetic construct
PINATVRLH

SEQ ID NO: 2813 - protein, 9 aa, synthetic construct
PINATVRVH

SEQ ID NO: 2814 - protein, 9 aa, synthetic construct
PINATLHVY

SEQ ID NO: 2815 - protein, 9 aa, synthetic construct
PINATLKVH

SEQ ID NO: 2816 - protein, 9 aa, synthetic construct
PINATAHLH

SEQ ID NO: 2817 - protein, 9 aa, synthetic construct
PINATAHLK

SEQ ID NO: 2818 - protein, 9 aa, synthetic construct
PINATAHVH

SEQ ID NO: 2819 - protein, 9 aa, synthetic construct
PINATAHVK

SEQ ID NO: 2820 - protein, 9 aa, synthetic construct
PINATAHVF

SEQ ID NO: 2821 - protein, 9 aa, synthetic construct
PINATARVH

SEQ ID NO: 2822 - protein, 9 aa, synthetic construct
PINATAKLY

SEQ ID NO: 2823 - protein, 9 aa, synthetic construct
PINATAKLH

SEQ ID NO: 2824 - protein, 9 aa, synthetic construct
PINATIHLK

SEQ ID NO: 2825 - protein, 9 aa, synthetic construct
PINATIHVH

SEQ ID NO: 2826 - protein, 9 aa, synthetic construct
PINATIHVK

SEQ ID NO: 2827 - protein, 9 aa, synthetic construct
PINATGHVK

SEQ ID NO: 2828 - protein, 9 aa, synthetic construct
PLQAAIRLK

SEQ ID NO: 2829 - protein, 9 aa, synthetic construct
PINATGRLY

SEQ ID NO: 2830 - protein, 9 aa, synthetic construct
PINASVHLK

SEQ ID NO: 2831 - protein, 9 aa, synthetic construct
PINASVHVF

SEQ ID NO: 2832 - protein, 9 aa, synthetic construct
PINASVRVF

SEQ ID NO: 2833 - protein, 9 aa, synthetic construct
PINASVKLH

SEQ ID NO: 2834 - protein, 9 aa, synthetic construct
PINASVKLF

SEQ ID NO: 2835 - protein, 9 aa, synthetic construct
PINASVKVK

SEQ ID NO: 2836 - protein, 9 aa, synthetic construct
PINASAHLY

SEQ ID NO: 2837 - protein, 9 aa, synthetic construct
PINASAHLR

SEQ ID NO: 2838 - protein, 9 aa, synthetic construct
PINASAHLH

SEQ ID NO: 2839 - protein, 9 aa, synthetic construct
PINASAHLK

SEQ ID NO: 2840 - protein, 9 aa, synthetic construct
PINASAHVY

SEQ ID NO: 2841 - protein, 9 aa, synthetic construct
PINASAHVR

SEQ ID NO: 2842 - protein, 9 aa, synthetic construct
PINASAHVH

SEQ ID NO: 2843 - protein, 9 aa, synthetic construct
PINASAHVK

SEQ ID NO: 2844 - protein, 9 aa, synthetic construct
PINASAHVF

SEQ ID NO: 2845 - protein, 9 aa, synthetic construct
PLQAAIKLH

SEQ ID NO: 2846 - protein, 9 aa, synthetic construct
PINASAKLF

SEQ ID NO: 2847 - protein, 9 aa, synthetic construct
PINASAKVF

SEQ ID NO: 2848 - protein, 9 aa, synthetic construct
PINASIHLR

SEQ ID NO: 2849 - protein, 9 aa, synthetic construct
PINASIHLK

SEQ ID NO: 2850 - protein, 9 aa, synthetic construct
PINASIHVF

SEQ ID NO: 2851 - protein, 9 aa, synthetic construct
PLQAAIKVY

SEQ ID NO: 2852 - protein, 9 aa, synthetic construct
PINASIRLF

SEQ ID NO: 2853 - protein, 9 aa, synthetic construct
PINASIKVH

SEQ ID NO: 2854 - protein, 9 aa, synthetic construct
PINASIKVK

SEQ ID NO: 2855 - protein, 9 aa, synthetic construct
PLQAAIKVH

SEQ ID NO: 2856 - protein, 9 aa, synthetic construct
PINASGHLY

SEQ ID NO: 2857 - protein, 9 aa, synthetic construct
PINASGHVY

SEQ ID NO: 2858 - protein, 9 aa, synthetic construct
PINASGHVH

SEQ ID NO: 2859 - protein, 9 aa, synthetic construct
PINASGHVK

SEQ ID NO: 2860 - protein, 9 aa, synthetic construct
PINASGRVF

SEQ ID NO: 2861 - protein, 9 aa, synthetic construct
PINASGKVH

SEQ ID NO: 2862 - protein, 9 aa, synthetic construct
PINASGKVF

SEQ ID NO: 2863 - protein, 9 aa, synthetic construct
PINAVVHVR

SEQ ID NO: 2864 - protein, 9 aa, synthetic construct
PINAVVHVF

SEQ ID NO: 2865 - protein, 9 aa, synthetic construct
PINAVVKLH

SEQ ID NO: 2866 - protein, 9 aa, synthetic construct
PLQAAGHLF

SEQ ID NO: 2867 - protein, 9 aa, synthetic construct
PINAVLRLF

SEQ ID NO: 2868 - protein, 9 aa, synthetic construct
PINAVLKLR

SEQ ID NO: 2869 - protein, 9 aa, synthetic construct
PINAVLKLH

SEQ ID NO: 2870 - protein, 9 aa, synthetic construct
PINAVLKVH

SEQ ID NO: 2871 - protein, 9 aa, synthetic construct
PINAVARVF

SEQ ID NO: 2872 - protein, 9 aa, synthetic construct
PINAVIHLR

SEQ ID NO: 2873 - protein, 9 aa, synthetic construct
PINAVIHVK

SEQ ID NO: 2874 - protein, 9 aa, synthetic construct
PINAVIKVK

SEQ ID NO: 2875 - protein, 9 aa, synthetic construct
PINAVGHVR

SEQ ID NO: 2876 - protein, 9 aa, synthetic construct
PINAVGKVY

SEQ ID NO: 2877 - protein, 9 aa, synthetic construct
PINAVGKVF

SEQ ID NO: 2878 - protein, 9 aa, synthetic construct
PLQAAGRVY

SEQ ID NO: 2879 - protein, 9 aa, synthetic construct
PINAGVHVK

SEQ ID NO: 2880 - protein, 9 aa, synthetic construct
PINAGVKLY

SEQ ID NO: 2881 - protein, 9 aa, synthetic construct
PINAGVKLF

SEQ ID NO: 2882 - protein, 9 aa, synthetic construct
PINAGVKVY

SEQ ID NO: 2883 - protein, 9 aa, synthetic construct
PINAGLHLF

SEQ ID NO: 2884 - protein, 9 aa, synthetic construct
PLNGTAKVF

SEQ ID NO: 2885 - protein, 9 aa, synthetic construct
PINAGLKVF

SEQ ID NO: 2886 - protein, 9 aa, synthetic construct
PINAGAHLH

SEQ ID NO: 2887 - protein, 9 aa, synthetic construct
PINAGAHLK

SEQ ID NO: 2888 - protein, 9 aa, synthetic construct
PINAGAHVR

SEQ ID NO: 2889 - protein, 9 aa, synthetic construct
PINAGAHVH

SEQ ID NO: 2890 - protein, 9 aa, synthetic construct
PINAGARLF

SEQ ID NO: 2891 - protein, 9 aa, synthetic construct
PINAGAKLY

SEQ ID NO: 2892 - protein, 9 aa, synthetic construct
PINAGAKLH

SEQ ID NO: 2893 - protein, 9 aa, synthetic construct
PINAGAKLK

SEQ ID NO: 2894 - protein, 9 aa, synthetic construct
PINAGAKLF

SEQ ID NO: 2895 - protein, 9 aa, synthetic construct
PINAGAKVY

SEQ ID NO: 2896 - protein, 9 aa, synthetic construct
PINAGAKVH

SEQ ID NO: 2897 - protein, 9 aa, synthetic construct
PINAGAKVF

SEQ ID NO: 2898 - protein, 9 aa, synthetic construct
PLQAAGKLF

SEQ ID NO: 2899 - protein, 9 aa, synthetic construct
PINAGIHVK

SEQ ID NO: 2900 - protein, 9 aa, synthetic construct
PINAGIRLF

SEQ ID NO: 2901 - protein, 9 aa, synthetic construct
PINAGIKVR

SEQ ID NO: 2902 - protein, 9 aa, synthetic construct
PLQAAGKVH

SEQ ID NO: 2903 - protein, 9 aa, synthetic construct
PINAGGHLY

SEQ ID NO: 2904 - protein, 9 aa, synthetic construct
PINAGGHLH

SEQ ID NO: 2905 - protein, 9 aa, synthetic construct
PINAGGHVY

SEQ ID NO: 2906 - protein, 9 aa, synthetic construct
PINAGGHVR

SEQ ID NO: 2907 - protein, 9 aa, synthetic construct
PINAGGHVK

SEQ ID NO: 2908 - protein, 9 aa, synthetic construct
PINAGGRLF

SEQ ID NO: 2909 - protein, 9 aa, synthetic construct
PINAGGKLF

SEQ ID NO: 2910 - protein, 9 aa, synthetic construct
PINAGGKVY

SEQ ID NO: 2911 - protein, 9 aa, synthetic construct
PINAGGKVF

SEQ ID NO: 2912 - protein, 9 aa, synthetic construct
PLNGTIHLY

SEQ ID NO: 2913 - protein, 9 aa, synthetic construct
PIQGAVHLR

SEQ ID NO: 2914 - protein, 9 aa, synthetic construct
PIQGAVRVH

SEQ ID NO: 2915 - protein, 9 aa, synthetic construct
PIQGAVKVF

SEQ ID NO: 2916 - protein, 9 aa, synthetic construct
PIQGALHVR

SEQ ID NO: 2917 - protein, 9 aa, synthetic construct
PIQGAAHLK

SEQ ID NO: 2918 - protein, 9 aa, synthetic construct
PIQGAAHVR

SEQ ID NO: 2919 - protein, 9 aa, synthetic construct
PIQGAAHVH

SEQ ID NO: 2920 - protein, 9 aa, synthetic construct
PIQGAAHVF

SEQ ID NO: 2921 - protein, 9 aa, synthetic construct
PIQGAARVH

SEQ ID NO: 2922 - protein, 9 aa, synthetic construct
PIQGAAKLH

SEQ ID NO: 2923 - protein, 9 aa, synthetic construct
PIQGAAKLF

SEQ ID NO: 2924 - protein, 9 aa, synthetic construct
PIQGAAKVF

SEQ ID NO: 2925 - protein, 9 aa, synthetic construct
PIQGAIHVK

SEQ ID NO: 2926 - protein, 9 aa, synthetic construct
PLNGTIHLR

SEQ ID NO: 2927 - protein, 9 aa, synthetic construct
PIQGAIRVH

SEQ ID NO: 2928 - protein, 9 aa, synthetic construct
PIQGAIKLY

SEQ ID NO: 2929 - protein, 9 aa, synthetic construct
PIQGAGHLY

SEQ ID NO: 2930 - protein, 9 aa, synthetic construct
PIQGAGHLF

SEQ ID NO: 2931 - protein, 9 aa, synthetic construct
PIQGTVHVY

SEQ ID NO: 2932 - protein, 9 aa, synthetic construct
PIQGTVHVH

SEQ ID NO: 2933 - protein, 9 aa, synthetic construct
PIQGTVHVK

SEQ ID NO: 2934 - protein, 9 aa, synthetic construct
PIQGTVRLY

SEQ ID NO: 2935 - protein, 9 aa, synthetic construct
PIQGTLHLH

SEQ ID NO: 2936 - protein, 9 aa, synthetic construct
PIQGTLHVK

SEQ ID NO: 2937 - protein, 9 aa, synthetic construct
PLNGTIHLH

SEQ ID NO: 2938 - protein, 9 aa, synthetic construct
PIQGTLKVH

SEQ ID NO: 2939 - protein, 9 aa, synthetic construct
PIQGTAHLY

SEQ ID NO: 2940 - protein, 9 aa, synthetic construct
PIQGTAHVY

SEQ ID NO: 2941 - protein, 9 aa, synthetic construct
PIQGTAHVK

SEQ ID NO: 2942 - protein, 9 aa, synthetic construct
PIQGTARLF

SEQ ID NO: 2943 - protein, 9 aa, synthetic construct
PIQGTARVH

SEQ ID NO: 2944 - protein, 9 aa, synthetic construct
PIQGTAKLY

SEQ ID NO: 2945 - protein, 9 aa, synthetic construct
PIQGTAKLF

SEQ ID NO: 2946 - protein, 9 aa, synthetic construct
PIQGTAKVF

SEQ ID NO: 2947 - protein, 9 aa, synthetic construct
PIQGTIHVH

SEQ ID NO: 2948 - protein, 9 aa, synthetic construct
PIQGTIHVF

SEQ ID NO: 2949 - protein, 9 aa, synthetic construct
PIQGTGHLY

SEQ ID NO: 2950 - protein, 9 aa, synthetic construct
PIQGTGHLK

SEQ ID NO: 2951 - protein, 9 aa, synthetic construct
PIQGTGHVH

SEQ ID NO: 2952 - protein, 9 aa, synthetic construct
PIQGTGRLF

SEQ ID NO: 2953 - protein, 9 aa, synthetic construct
PIQGTGKLF

SEQ ID NO: 2954 - protein, 9 aa, synthetic construct
PLNGTIHLK

SEQ ID NO: 2955 - protein, 9 aa, synthetic construct
PIQGSVHVY

SEQ ID NO: 2956 - protein, 9 aa, synthetic construct
PIQGSVHVF

SEQ ID NO: 2957 - protein, 9 aa, synthetic construct
PIQGSVRLY

SEQ ID NO: 2958 - protein, 9 aa, synthetic construct
PIQGSVRLH

SEQ ID NO: 2959 - protein, 9 aa, synthetic construct
PIQGSVKLY

SEQ ID NO: 2960 - protein, 9 aa, synthetic construct
PIQGSVKVF

SEQ ID NO: 2961 - protein, 9 aa, synthetic construct
PIQGSAKVY

SEQ ID NO: 2962 - protein, 9 aa, synthetic construct
PIQGSAKVF

SEQ ID NO: 2963 - protein, 9 aa, synthetic construct
PIQGSIHLK

SEQ ID NO: 2964 - protein, 9 aa, synthetic construct
PIQGSIRVH

SEQ ID NO: 2965 - protein, 9 aa, synthetic construct
PIQGSGRLF

SEQ ID NO: 2966 - protein, 9 aa, synthetic construct
PIQGSGRVY

SEQ ID NO: 2967 - protein, 9 aa, synthetic construct
PIQGSGKVF

SEQ ID NO: 2968 - protein, 9 aa, synthetic construct
PIQGVVHVY

SEQ ID NO: 2969 - protein, 9 aa, synthetic construct
PIQGVVHVH

SEQ ID NO: 2970 - protein, 9 aa, synthetic construct
PIQGVLHVK

SEQ ID NO: 2971 - protein, 9 aa, synthetic construct
PLNGTIHVY

SEQ ID NO: 2972 - protein, 9 aa, synthetic construct
PIQGVAHLH

SEQ ID NO: 2973 - protein, 9 aa, synthetic construct
PIQGVARVR

SEQ ID NO: 2974 - protein, 9 aa, synthetic construct
PIQGVARVF

SEQ ID NO: 2975 - protein, 9 aa, synthetic construct
PLQATLKLK

SEQ ID NO: 2976 - protein, 9 aa, synthetic construct
PIQGVAKLY

SEQ ID NO: 2977 - protein, 9 aa, synthetic construct
PIQGVAKLR

SEQ ID NO: 2978 - protein, 9 aa, synthetic construct
PIQGVAKVR

SEQ ID NO: 2979 - protein, 9 aa, synthetic construct
PIQGVAKVH

SEQ ID NO: 2980 - protein, 9 aa, synthetic construct
PIQGVAKVK

SEQ ID NO: 2981 - protein, 9 aa, synthetic construct
PIQGVAKVF

SEQ ID NO: 2982 - protein, 9 aa, synthetic construct
PIQGVIHVY

SEQ ID NO: 2983 - protein, 9 aa, synthetic construct
PIQGVIRLF

SEQ ID NO: 2984 - protein, 9 aa, synthetic construct
PIQGVIKVK

SEQ ID NO: 2985 - protein, 9 aa, synthetic construct
PIQGVGHLH

SEQ ID NO: 2986 - protein, 9 aa, synthetic construct
PIQGVGKLY

SEQ ID NO: 2987 - protein, 9 aa, synthetic construct
PIQGVGKLF

SEQ ID NO: 2988 - protein, 9 aa, synthetic construct
PIQGVGKVY

SEQ ID NO: 2989 - protein, 9 aa, synthetic construct
PIQGVGKVR

SEQ ID NO: 2990 - protein, 9 aa, synthetic construct
PLNGTIHVR

SEQ ID NO: 2991 - protein, 9 aa, synthetic construct
PIQGGVHVY

SEQ ID NO: 2992 - protein, 9 aa, synthetic construct
PIQGGVHVR

SEQ ID NO: 2993 - protein, 9 aa, synthetic construct
PIQGGVHVK

SEQ ID NO: 2994 - protein, 9 aa, synthetic construct
PIQGGVHVF

SEQ ID NO: 2995 - protein, 9 aa, synthetic construct
PIQGGVRLY

SEQ ID NO: 2996 - protein, 9 aa, synthetic construct
PIQGGVRLH

SEQ ID NO: 2997 - protein, 9 aa, synthetic construct
PIQGGVRVF

SEQ ID NO: 2998 - protein, 9 aa, synthetic construct
PIQGGVKLY

SEQ ID NO: 2999 - protein, 9 aa, synthetic construct
PIQGGVKLH

SEQ ID NO: 3000 - protein, 9 aa, synthetic construct
PIQGGVKLF

SEQ ID NO: 3001 - protein, 9 aa, synthetic construct
PIQGGVKVY

SEQ ID NO: 3002 - protein, 9 aa, synthetic construct
PIQGGVKVH

SEQ ID NO: 3003 - protein, 9 aa, synthetic construct
PIQGGVKVK

SEQ ID NO: 3004 - protein, 9 aa, synthetic construct
PIQGGVKVF

SEQ ID NO: 3005 - protein, 9 aa, synthetic construct
PIQGGLHLK

SEQ ID NO: 3006 - protein, 9 aa, synthetic construct
PIQGGLHVH

SEQ ID NO: 3007 - protein, 9 aa, synthetic construct
PIQGGLKVF

SEQ ID NO: 3008 - protein, 9 aa, synthetic construct
PIQGGAHLF

SEQ ID NO: 3009 - protein, 9 aa, synthetic construct
PIQGGAHVY

SEQ ID NO: 3010 - protein, 9 aa, synthetic construct
PIQGGAHVR

SEQ ID NO: 3011 - protein, 9 aa, synthetic construct
PIQGGAKLF

SEQ ID NO: 3012 - protein, 9 aa, synthetic construct
PIQGGAKVH

SEQ ID NO: 3013 - protein, 9 aa, synthetic construct
PIQGGAKVF

SEQ ID NO: 3014 - protein, 9 aa, synthetic construct
PIQGGIHLH

SEQ ID NO: 3015 - protein, 9 aa, synthetic construct
PIQGGIHVR

SEQ ID NO: 3016 - protein, 9 aa, synthetic construct
PIQGGIHVH

SEQ ID NO: 3017 - protein, 9 aa, synthetic construct
PIQGGIHVK

SEQ ID NO: 3018 - protein, 9 aa, synthetic construct
PLNGTIHVH

SEQ ID NO: 3019 - protein, 9 aa, synthetic construct
PIQGGIKLY

SEQ ID NO: 3020 - protein, 9 aa, synthetic construct
PIQGGIKVR

SEQ ID NO: 3021 - protein, 9 aa, synthetic construct
PIQGGIKVF

SEQ ID NO: 3022 - protein, 9 aa, synthetic construct
PLQATARLH

SEQ ID NO: 3023 - protein, 9 aa, synthetic construct
PIQGGGHLK

SEQ ID NO: 3024 - protein, 9 aa, synthetic construct
PIQGGGRLY

SEQ ID NO: 3025 - protein, 9 aa, synthetic construct
PIQGGGRLF

SEQ ID NO: 3026 - protein, 9 aa, synthetic construct
PIQGGGKLF

SEQ ID NO: 3027 - protein, 9 aa, synthetic construct
PIQGGGKVF

SEQ ID NO: 3028 - protein, 9 aa, synthetic construct
PIQAAVHVH

SEQ ID NO: 3029 - protein, 9 aa, synthetic construct
PIQAAVHVK

SEQ ID NO: 3030 - protein, 9 aa, synthetic construct
PIQAAVRLH

SEQ ID NO: 3031 - protein, 9 aa, synthetic construct
PIQAAVKVF

SEQ ID NO: 3032 - protein, 9 aa, synthetic construct
PLNGTIHVK

SEQ ID NO: 3033 - protein, 9 aa, synthetic construct
PIQAAAKLH

SEQ ID NO: 3034 - protein, 9 aa, synthetic construct
PLQATAKLF

SEQ ID NO: 3035 - protein, 9 aa, synthetic construct
PIQAAIHVK

SEQ ID NO: 3036 - protein, 9 aa, synthetic construct
PIQAAIRVY

SEQ ID NO: 3037 - protein, 9 aa, synthetic construct
PIQAAIKLH

SEQ ID NO: 3038 - protein, 9 aa, synthetic construct
PIQAAIKVR

SEQ ID NO: 3039 - protein, 9 aa, synthetic construct
PIQAAIKVH

SEQ ID NO: 3040 - protein, 9 aa, synthetic construct
PIQAAGHLH

SEQ ID NO: 3041 - protein, 9 aa, synthetic construct
PIQAAGHVH

SEQ ID NO: 3042 - protein, 9 aa, synthetic construct
PIQAAGRLK

SEQ ID NO: 3043 - protein, 9 aa, synthetic construct
PIQAAGRVY

SEQ ID NO: 3044 - protein, 9 aa, synthetic construct
PIQAAGRVH

SEQ ID NO: 3045 - protein, 9 aa, synthetic construct
PLQATAKVF

SEQ ID NO: 3046 - protein, 9 aa, synthetic construct
PLNGTIHVF

SEQ ID NO: 3047 - protein, 9 aa, synthetic construct
PIQATVHLY

SEQ ID NO: 3048 - protein, 9 aa, synthetic construct
PIQATVHVY

SEQ ID NO: 3049 - protein, 9 aa, synthetic construct
PIQATVHVH

SEQ ID NO: 3050 - protein, 9 aa, synthetic construct
PIQATVHVF

SEQ ID NO: 3051 - protein, 9 aa, synthetic construct
PIQATLHLK

SEQ ID NO: 3052 - protein, 9 aa, synthetic construct
PLQATIHVR

SEQ ID NO: 3053 - protein, 9 aa, synthetic construct
PIQATAHLY

SEQ ID NO: 3054 - protein, 9 aa, synthetic construct
PIQATAHLH

SEQ ID NO: 3055 - protein, 9 aa, synthetic construct
PIQATAHLK

SEQ ID NO: 3056 - protein, 9 aa, synthetic construct
PIQATAHVY

SEQ ID NO: 3057 - protein, 9 aa, synthetic construct
PIQATAHVH

SEQ ID NO: 3058 - protein, 9 aa, synthetic construct
PLQATIHVH

SEQ ID NO: 3059 - protein, 9 aa, synthetic construct
PLQATIHVK

SEQ ID NO: 3060 - protein, 9 aa, synthetic construct
PIQATAKLY

SEQ ID NO: 3061 - protein, 9 aa, synthetic construct
PIQATIHLK

SEQ ID NO: 3062 - protein, 9 aa, synthetic construct
PIQATIHVR

SEQ ID NO: 3063 - protein, 9 aa, synthetic construct
PIQATIHVH

SEQ ID NO: 3064 - protein, 9 aa, synthetic construct
PIQATIHVK

SEQ ID NO: 3065 - protein, 9 aa, synthetic construct
PIQATIRVK

SEQ ID NO: 3066 - protein, 9 aa, synthetic construct
PIQATIKVH

SEQ ID NO: 3067 - protein, 9 aa, synthetic construct
PIQATGHLY

SEQ ID NO: 3068 - protein, 9 aa, synthetic construct
PIQATGHLH

SEQ ID NO: 3069 - protein, 9 aa, synthetic construct
PIQATGHVY

SEQ ID NO: 3070 - protein, 9 aa, synthetic construct
PIQATGHVR

SEQ ID NO: 3071 - protein, 9 aa, synthetic construct
PIQATGHVH

SEQ ID NO: 3072 - protein, 9 aa, synthetic construct
PIQATGHVK

SEQ ID NO: 3073 - protein, 9 aa, synthetic construct
PIQATGHVF

SEQ ID NO: 3074 - protein, 9 aa, synthetic construct
PIQATGRLY

SEQ ID NO: 3075 - protein, 9 aa, synthetic construct
PIQATGRLH

SEQ ID NO: 3076 - protein, 9 aa, synthetic construct
PIQATGRLF

SEQ ID NO: 3077 - protein, 9 aa, synthetic construct
PIQATGRVH

SEQ ID NO: 3078 - protein, 9 aa, synthetic construct
PIQATGRVF

SEQ ID NO: 3079 - protein, 9 aa, synthetic construct
PLQATIRLF

SEQ ID NO: 3080 - protein, 9 aa, synthetic construct
PIQATGKLY

SEQ ID NO: 3081 - protein, 9 aa, synthetic construct
PIQATGKLH

SEQ ID NO: 3082 - protein, 9 aa, synthetic construct
PIQASVHLY

SEQ ID NO: 3083 - protein, 9 aa, synthetic construct
PIQASVHLR

SEQ ID NO: 3084 - protein, 9 aa, synthetic construct
PIQASVHLK

SEQ ID NO: 3085 - protein, 9 aa, synthetic construct
PIQASVHLF

SEQ ID NO: 3086 - protein, 9 aa, synthetic construct
PIQASVHVY

SEQ ID NO: 3087 - protein, 9 aa, synthetic construct
PIQASVHVK

SEQ ID NO: 3088 - protein, 9 aa, synthetic construct
PIQASVHVF

SEQ ID NO: 3089 - protein, 9 aa, synthetic construct
PIQASVKLF

SEQ ID NO: 3090 - protein, 9 aa, synthetic construct
PIQASVKVH

SEQ ID NO: 3091 - protein, 9 aa, synthetic construct
PIQASVKVF

SEQ ID NO: 3092 - protein, 9 aa, synthetic construct
PLQATIRVK

SEQ ID NO: 3093 - protein, 9 aa, synthetic construct
PIQASLHVK

SEQ ID NO: 3094 - protein, 9 aa, synthetic construct
PIQASLHVF

SEQ ID NO: 3095 - protein, 9 aa, synthetic construct
PIQASAHVH

SEQ ID NO: 3096 - protein, 9 aa, synthetic construct
PIQASAHVK

SEQ ID NO: 3097 - protein, 9 aa, synthetic construct
PIQASAHVF

SEQ ID NO: 3098 - protein, 9 aa, synthetic construct
PIQASIHLK

SEQ ID NO: 3099 - protein, 9 aa, synthetic construct
PIQASIHVY

SEQ ID NO: 3100 - protein, 9 aa, synthetic construct
PIQASIHVK

SEQ ID NO: 3101 - protein, 9 aa, synthetic construct
PIQASGHLY

SEQ ID NO: 3102 - protein, 9 aa, synthetic construct
PIQASGHVH

SEQ ID NO: 3103 - protein, 9 aa, synthetic construct
PIQASGRVH

SEQ ID NO: 3104 - protein, 9 aa, synthetic construct
PIQASGRVF

SEQ ID NO: 3105 - protein, 9 aa, synthetic construct
PIQASGKLY

SEQ ID NO: 3106 - protein, 9 aa, synthetic construct
PIQASGKLH

SEQ ID NO: 3107 - protein, 9 aa, synthetic construct
PIQASGKVK

SEQ ID NO: 3108 - protein, 9 aa, synthetic construct
PIQAVLKLH

SEQ ID NO: 3109 - protein, 9 aa, synthetic construct
PIQAVAKVR

SEQ ID NO: 3110 - protein, 9 aa, synthetic construct
PIQAVIKLH

SEQ ID NO: 3111 - protein, 9 aa, synthetic construct
PIQAVGHVF

SEQ ID NO: 3112 - protein, 9 aa, synthetic construct
PIQAVGRVF

SEQ ID NO: 3113 - protein, 9 aa, synthetic construct
PIQAVGKVH

SEQ ID NO: 3114 - protein, 9 aa, synthetic construct
PIQAGVHVF

SEQ ID NO: 3115 - protein, 9 aa, synthetic construct
PIQAGVKLY

SEQ ID NO: 3116 - protein, 9 aa, synthetic construct
PIQAGVKLH

SEQ ID NO: 3117 - protein, 9 aa, synthetic construct
PIQAGVKVH

SEQ ID NO: 3118 - protein, 9 aa, synthetic construct
PIQAGVKVF

SEQ ID NO: 3119 - protein, 9 aa, synthetic construct
PIQAGLHVH

SEQ ID NO: 3120 - protein, 9 aa, synthetic construct
PIQAGLKVY

SEQ ID NO: 3121 - protein, 9 aa, synthetic construct
PIQAGLKVF

SEQ ID NO: 3122 - protein, 9 aa, synthetic construct
PIQAGAHVR

SEQ ID NO: 3123 - protein, 9 aa, synthetic construct
PIQAGAHVK

SEQ ID NO: 3124 - protein, 9 aa, synthetic construct
PLQATGKLH

SEQ ID NO: 3125 - protein, 9 aa, synthetic construct
PIQAGAKLF

SEQ ID NO: 3126 - protein, 9 aa, synthetic construct
PIQAGAKVF

SEQ ID NO: 3127 - protein, 9 aa, synthetic construct
PIQAGIHLY

SEQ ID NO: 3128 - protein, 9 aa, synthetic construct
PIQAGIHLK

SEQ ID NO: 3129 - protein, 9 aa, synthetic construct
PIQAGIHVY

SEQ ID NO: 3130 - protein, 9 aa, synthetic construct
PIQAGIHVR

SEQ ID NO: 3131 - protein, 9 aa, synthetic construct
PIQAGIHVH

SEQ ID NO: 3132 - protein, 9 aa, synthetic construct
PIQAGIHVK

SEQ ID NO: 3133 - protein, 9 aa, synthetic construct
PIQAGIRVH

SEQ ID NO: 3134 - protein, 9 aa, synthetic construct
PIQAGIKVR

SEQ ID NO: 3135 - protein, 9 aa, synthetic construct
PIQAGGHLY

SEQ ID NO: 3136 - protein, 9 aa, synthetic construct
PIQAGGRLY

SEQ ID NO: 3137 - protein, 9 aa, synthetic construct
PIQAGGRLF

SEQ ID NO: 3138 - protein, 9 aa, synthetic construct
PIQAGGKVF

SEQ ID NO: 3139 - protein, 9 aa, synthetic construct
PLNGTIRVY

SEQ ID NO: 3140 - protein, 9 aa, synthetic construct
PIPGAVHVK

SEQ ID NO: 3141 - protein, 9 aa, synthetic construct
PLQASVHLR

SEQ ID NO: 3142 - protein, 9 aa, synthetic construct
PIPGAVKVH

SEQ ID NO: 3143 - protein, 9 aa, synthetic construct
PIPGAVKVK

SEQ ID NO: 3144 - protein, 9 aa, synthetic construct
PIPGAVKVF

SEQ ID NO: 3145 - protein, 9 aa, synthetic construct
PIPGALHLK

SEQ ID NO: 3146 - protein, 9 aa, synthetic construct
PIPGAARVK

SEQ ID NO: 3147 - protein, 9 aa, synthetic construct
PIPGAAKVH

SEQ ID NO: 3148 - protein, 9 aa, synthetic construct
PIPGAAKVF

SEQ ID NO: 3149 - protein, 9 aa, synthetic construct
PLQASVHVF

SEQ ID NO: 3150 - protein, 9 aa, synthetic construct
PIPGAIHLK

SEQ ID NO: 3151 - protein, 9 aa, synthetic construct
PIPGAIHVK

SEQ ID NO: 3152 - protein, 9 aa, synthetic construct
PIPGAIKLH

SEQ ID NO: 3153 - protein, 9 aa, synthetic construct
PIPGAGHLH

SEQ ID NO: 3154 - protein, 9 aa, synthetic construct
PIPGAGHVK

SEQ ID NO: 3155 - protein, 9 aa, synthetic construct
PIPGAGHVF

SEQ ID NO: 3156 - protein, 9 aa, synthetic construct
PIPGAGKLY

SEQ ID NO: 3157 - protein, 9 aa, synthetic construct
PIPGAGKLF

SEQ ID NO: 3158 - protein, 9 aa, synthetic construct
PIPGAGKVY

SEQ ID NO: 3159 - protein, 9 aa, synthetic construct
PIPGAGKVH

SEQ ID NO: 3160 - protein, 9 aa, synthetic construct
PIPGTVHLY

SEQ ID NO: 3161 - protein, 9 aa, synthetic construct
PIPGTVHVY

SEQ ID NO: 3162 - protein, 9 aa, synthetic construct
PIPGTVRLY

SEQ ID NO: 3163 - protein, 9 aa, synthetic construct
PIPGTVKVY

SEQ ID NO: 3164 - protein, 9 aa, synthetic construct
PIPGTLHVY

SEQ ID NO: 3165 - protein, 9 aa, synthetic construct
PIPGTLRLR

SEQ ID NO: 3166 - protein, 9 aa, synthetic construct
PIPGTLKLY

SEQ ID NO: 3167 - protein, 9 aa, synthetic construct
PIPGTLKVH

SEQ ID NO: 3168 - protein, 9 aa, synthetic construct
PIPGTAHLY

SEQ ID NO: 3169 - protein, 9 aa, synthetic construct
PIPGTAHVK

SEQ ID NO: 3170 - protein, 9 aa, synthetic construct
PLQASVKLH

SEQ ID NO: 3171 - protein, 9 aa, synthetic construct
PIPGTARLY

SEQ ID NO: 3172 - protein, 9 aa, synthetic construct
PIPGTARVH

SEQ ID NO: 3173 - protein, 9 aa, synthetic construct
PIPGTARVF

SEQ ID NO: 3174 - protein, 9 aa, synthetic construct
PIPGTAKLY

SEQ ID NO: 3175 - protein, 9 aa, synthetic construct
PIPGTAKLH

SEQ ID NO: 3176 - protein, 9 aa, synthetic construct
PIPGTAKLK

SEQ ID NO: 3177 - protein, 9 aa, synthetic construct
PIPGTAKLF

SEQ ID NO: 3178 - protein, 9 aa, synthetic construct
PIPGTAKVY

SEQ ID NO: 3179 - protein, 9 aa, synthetic construct
PIPGTAKVR

SEQ ID NO: 3180 - protein, 9 aa, synthetic construct
PIPGTAKVH

SEQ ID NO: 3181 - protein, 9 aa, synthetic construct
PIPGTAKVF

SEQ ID NO: 3182 - protein, 9 aa, synthetic construct
PLQASVKLF

SEQ ID NO: 3183 - protein, 9 aa, synthetic construct
PIPGTIHVR

SEQ ID NO: 3184 - protein, 9 aa, synthetic construct
PIPGTIHVH

SEQ ID NO: 3185 - protein, 9 aa, synthetic construct
PIPGTIHVK

SEQ ID NO: 3186 - protein, 9 aa, synthetic construct
PIPGTIRVY

SEQ ID NO: 3187 - protein, 9 aa, synthetic construct
PIPGTGHLH

SEQ ID NO: 3188 - protein, 9 aa, synthetic construct
PIPGTGHLK

SEQ ID NO: 3189 - protein, 9 aa, synthetic construct
PIPGTGHVH

SEQ ID NO: 3190 - protein, 9 aa, synthetic construct
PIPGTGRLY

SEQ ID NO: 3191 - protein, 9 aa, synthetic construct
PIPGTGRVF

SEQ ID NO: 3192 - protein, 9 aa, synthetic construct
PIPGTGKLY

SEQ ID NO: 3193 - protein, 9 aa, synthetic construct
PIPGTGKLR

SEQ ID NO: 3194 - protein, 9 aa, synthetic construct
PIPGTGKVY

SEQ ID NO: 3195 - protein, 9 aa, synthetic construct
PIPGTGKVH

SEQ ID NO: 3196 - protein, 9 aa, synthetic construct
PIPGTGKVF

SEQ ID NO: 3197 - protein, 9 aa, synthetic construct
PIPGSVHLK

SEQ ID NO: 3198 - protein, 9 aa, synthetic construct
PIPGSVHVR

SEQ ID NO: 3199 - protein, 9 aa, synthetic construct
PIPGSVHVK

SEQ ID NO: 3200 - protein, 9 aa, synthetic construct
PIPGSVKLF

SEQ ID NO: 3201 - protein, 9 aa, synthetic construct
PIPGSVKVY

SEQ ID NO: 3202 - protein, 9 aa, synthetic construct
PIPGSAHLY

SEQ ID NO: 3203 - protein, 9 aa, synthetic construct
PIPGSAHLH

SEQ ID NO: 3204 - protein, 9 aa, synthetic construct
PIPGSAHLK

SEQ ID NO: 3205 - protein, 9 aa, synthetic construct
PIPGSAHVH

SEQ ID NO: 3206 - protein, 9 aa, synthetic construct
PIPGSARLY

SEQ ID NO: 3207 - protein, 9 aa, synthetic construct
PIPGSARVY

SEQ ID NO: 3208 - protein, 9 aa, synthetic construct
PIPGSAKVF

SEQ ID NO: 3209 - protein, 9 aa, synthetic construct
PIPGSIHLR

SEQ ID NO: 3210 - protein, 9 aa, synthetic construct
PIPGSIHVY

SEQ ID NO: 3211 - protein, 9 aa, synthetic construct
PIPGSIHVK

SEQ ID NO: 3212 - protein, 9 aa, synthetic construct
PIPGSIRLH

SEQ ID NO: 3213 - protein, 9 aa, synthetic construct
PIPGSIRVY

SEQ ID NO: 3214 - protein, 9 aa, synthetic construct
PIPGSIKLF

SEQ ID NO: 3215 - protein, 9 aa, synthetic construct
PIPGSGHLY

SEQ ID NO: 3216 - protein, 9 aa, synthetic construct
PIPGSGHLH

SEQ ID NO: 3217 - protein, 9 aa, synthetic construct
PIPGSGHLK

SEQ ID NO: 3218 - protein, 9 aa, synthetic construct
PIPGSGHVH

SEQ ID NO: 3219 - protein, 9 aa, synthetic construct
PIPGSGHVF

SEQ ID NO: 3220 - protein, 9 aa, synthetic construct
PIPGSGRLY

SEQ ID NO: 3221 - protein, 9 aa, synthetic construct
PIPGSGKLY

SEQ ID NO: 3222 - protein, 9 aa, synthetic construct
PIPGSGKVH

SEQ ID NO: 3223 - protein, 9 aa, synthetic construct
PIPGSGKVF

SEQ ID NO: 3224 - protein, 9 aa, synthetic construct
PIPGVVHVH

SEQ ID NO: 3225 - protein, 9 aa, synthetic construct
PIPGVVKLR

SEQ ID NO: 3226 - protein, 9 aa, synthetic construct
PIPGVVKVH

SEQ ID NO: 3227 - protein, 9 aa, synthetic construct
PIPGVLKLH

SEQ ID NO: 3228 - protein, 9 aa, synthetic construct
PIPGVARVH

SEQ ID NO: 3229 - protein, 9 aa, synthetic construct
PIPGVAKLY

SEQ ID NO: 3230 - protein, 9 aa, synthetic construct
PIPGVIHVY

SEQ ID NO: 3231 - protein, 9 aa, synthetic construct
PIPGVGHLH

SEQ ID NO: 3232 - protein, 9 aa, synthetic construct
PIPGVGKVY

SEQ ID NO: 3233 - protein, 9 aa, synthetic construct
PLQASAHLY

SEQ ID NO: 3234 - protein, 9 aa, synthetic construct
PIPGGVHLY

SEQ ID NO: 3235 - protein, 9 aa, synthetic construct
PIPGGVHLR

SEQ ID NO: 3236 - protein, 9 aa, synthetic construct
PIPGGVHLK

SEQ ID NO: 3237 - protein, 9 aa, synthetic construct
PIPGGVHVY

SEQ ID NO: 3238 - protein, 9 aa, synthetic construct
PIPGGVHVR

SEQ ID NO: 3239 - protein, 9 aa, synthetic construct
PIPGGVHVK

SEQ ID NO: 3240 - protein, 9 aa, synthetic construct
PIPGGVHVF

SEQ ID NO: 3241 - protein, 9 aa, synthetic construct
PIPGGVKLY

SEQ ID NO: 3242 - protein, 9 aa, synthetic construct
PIPGGVKLF

SEQ ID NO: 3243 - protein, 9 aa, synthetic construct
PIPGGVKVY

SEQ ID NO: 3244 - protein, 9 aa, synthetic construct
PIPGGVKVH

SEQ ID NO: 3245 - protein, 9 aa, synthetic construct
PIPGGVKVF

SEQ ID NO: 3246 - protein, 9 aa, synthetic construct
PIPGGLHVK

SEQ ID NO: 3247 - protein, 9 aa, synthetic construct
PIPGGAHLH

SEQ ID NO: 3248 - protein, 9 aa, synthetic construct
PIPGGAHLK

SEQ ID NO: 3249 - protein, 9 aa, synthetic construct
PIPGGAHVR

SEQ ID NO: 3250 - protein, 9 aa, synthetic construct
PIPGGAHVH

SEQ ID NO: 3251 - protein, 9 aa, synthetic construct
PIPGGAHVK

SEQ ID NO: 3252 - protein, 9 aa, synthetic construct
PIPGGAHVF

SEQ ID NO: 3253 - protein, 9 aa, synthetic construct
PIPGGARLH

SEQ ID NO: 3254 - protein, 9 aa, synthetic construct
PIPGGAKLF

SEQ ID NO: 3255 - protein, 9 aa, synthetic construct
PIPGGAKVH

SEQ ID NO: 3256 - protein, 9 aa, synthetic construct
PIPGGAKVF

SEQ ID NO: 3257 - protein, 9 aa, synthetic construct
PLQASAHVF

SEQ ID NO: 3258 - protein, 9 aa, synthetic construct
PIPGGIHLY

SEQ ID NO: 3259 - protein, 9 aa, synthetic construct
PIPGGIHLR

SEQ ID NO: 3260 - protein, 9 aa, synthetic construct
PIPGGIHLH

SEQ ID NO: 3261 - protein, 9 aa, synthetic construct
PIPGGIHLK

SEQ ID NO: 3262 - protein, 9 aa, synthetic construct
PIPGGIHVY

SEQ ID NO: 3263 - protein, 9 aa, synthetic construct
PIPGGIHVR

SEQ ID NO: 3264 - protein, 9 aa, synthetic construct
PIPGGIHVH

SEQ ID NO: 3265 - protein, 9 aa, synthetic construct
PIPGGIHVK

SEQ ID NO: 3266 - protein, 9 aa, synthetic construct
PIPGGIHVF

SEQ ID NO: 3267 - protein, 9 aa, synthetic construct
PIPGGIRVH

SEQ ID NO: 3268 - protein, 9 aa, synthetic construct
PLQASARLR

SEQ ID NO: 3269 - protein, 9 aa, synthetic construct
PIPGGIKLH

SEQ ID NO: 3270 - protein, 9 aa, synthetic construct
PIPGGIKLF

SEQ ID NO: 3271 - protein, 9 aa, synthetic construct
PIPGGIKVR

SEQ ID NO: 3272 - protein, 9 aa, synthetic construct
PIPGGIKVH

SEQ ID NO: 3273 - protein, 9 aa, synthetic construct
PIPGGGHLY

SEQ ID NO: 3274 - protein, 9 aa, synthetic construct
PIPGGGHLH

SEQ ID NO: 3275 - protein, 9 aa, synthetic construct
PIPGGGHVH

SEQ ID NO: 3276 - protein, 9 aa, synthetic construct
PIPGGGHVK

SEQ ID NO: 3277 - protein, 9 aa, synthetic construct
PIPGGGHVF

SEQ ID NO: 3278 - protein, 9 aa, synthetic construct
PIPGGGRLY

SEQ ID NO: 3279 - protein, 9 aa, synthetic construct
PIPGGGRLF

SEQ ID NO: 3280 - protein, 9 aa, synthetic construct
PIPGGGRVY

SEQ ID NO: 3281 - protein, 9 aa, synthetic construct
PIPGGGRVF

SEQ ID NO: 3282 - protein, 9 aa, synthetic construct
PIPGGGKLH

SEQ ID NO: 3283 - protein, 9 aa, synthetic construct
PIPGGGKLF

SEQ ID NO: 3284 - protein, 9 aa, synthetic construct
PIPGGGKVY

SEQ ID NO: 3285 - protein, 9 aa, synthetic construct
PIPGGGKVR

SEQ ID NO: 3286 - protein, 9 aa, synthetic construct
PIPGGGKVH

SEQ ID NO: 3287 - protein, 9 aa, synthetic construct
PIPAAVHVY

SEQ ID NO: 3288 - protein, 9 aa, synthetic construct
PIPAAVRLY

SEQ ID NO: 3289 - protein, 9 aa, synthetic construct
PIPAAVKVH

SEQ ID NO: 3290 - protein, 9 aa, synthetic construct
PIPAALRVF

SEQ ID NO: 3291 - protein, 9 aa, synthetic construct
PIPAAAHLK

SEQ ID NO: 3292 - protein, 9 aa, synthetic construct
PIPAAARVY

SEQ ID NO: 3293 - protein, 9 aa, synthetic construct
PIPAAARVF

SEQ ID NO: 3294 - protein, 9 aa, synthetic construct
PIPAAAKLF

SEQ ID NO: 3295 - protein, 9 aa, synthetic construct
PIPAAIHVY

SEQ ID NO: 3296 - protein, 9 aa, synthetic construct
PIPAAIHVR

SEQ ID NO: 3297 - protein, 9 aa, synthetic construct
PIPAAIHVK

SEQ ID NO: 3298 - protein, 9 aa, synthetic construct
PIPAAIKLR

SEQ ID NO: 3299 - protein, 9 aa, synthetic construct
PIPAAIKVR

SEQ ID NO: 3300 - protein, 9 aa, synthetic construct
PLQASAKVH

SEQ ID NO: 3301 - protein, 9 aa, synthetic construct
PIPAAGHLH

SEQ ID NO: 3302 - protein, 9 aa, synthetic construct
PIPAAGRVY

SEQ ID NO: 3303 - protein, 9 aa, synthetic construct
PIPAAGRVH

SEQ ID NO: 3304 - protein, 9 aa, synthetic construct
PIPAAGKVF

SEQ ID NO: 3305 - protein, 9 aa, synthetic construct
PLQASIHLY

SEQ ID NO: 3306 - protein, 9 aa, synthetic construct
PIPATVHLY

SEQ ID NO: 3307 - protein, 9 aa, synthetic construct
PIPATVHVY

SEQ ID NO: 3308 - protein, 9 aa, synthetic construct
PIPATVHVR

SEQ ID NO: 3309 - protein, 9 aa, synthetic construct
PIPATVHVH

SEQ ID NO: 3310 - protein, 9 aa, synthetic construct
PIPATVHVK

SEQ ID NO: 3311 - protein, 9 aa, synthetic construct
PIPATVHVF

SEQ ID NO: 3312 - protein, 9 aa, synthetic construct
PIPATVKVY

SEQ ID NO: 3313 - protein, 9 aa, synthetic construct
PIPATVKVF

SEQ ID NO: 3314 - protein, 9 aa, synthetic construct
PIPATLHVY

SEQ ID NO: 3315 - protein, 9 aa, synthetic construct
PIPATLRLR

SEQ ID NO: 3316 - protein, 9 aa, synthetic construct
PIPATLRLF

SEQ ID NO: 3317 - protein, 9 aa, synthetic construct
PIPATARLF

SEQ ID NO: 3318 - protein, 9 aa, synthetic construct
PIPATAKLF

SEQ ID NO: 3319 - protein, 9 aa, synthetic construct
PIPATAKVF

SEQ ID NO: 3320 - protein, 9 aa, synthetic construct
PIPATIHLK

SEQ ID NO: 3321 - protein, 9 aa, synthetic construct
PIPATIHVH

SEQ ID NO: 3322 - protein, 9 aa, synthetic construct
PIPATIRVY

SEQ ID NO: 3323 - protein, 9 aa, synthetic construct
PIPATIKVY

SEQ ID NO: 3324 - protein, 9 aa, synthetic construct
PIPATGHVH

SEQ ID NO: 3325 - protein, 9 aa, synthetic construct
PIPASVHVY

SEQ ID NO: 3326 - protein, 9 aa, synthetic construct
PIPASVHVR

SEQ ID NO: 3327 - protein, 9 aa, synthetic construct
PIPASVKLF

SEQ ID NO: 3328 - protein, 9 aa, synthetic construct
PIPASAHVH

SEQ ID NO: 3329 - protein, 9 aa, synthetic construct
PIPASIKLH

SEQ ID NO: 3330 - protein, 9 aa, synthetic construct
PIPASIKVR

SEQ ID NO: 3331 - protein, 9 aa, synthetic construct
PIPASIKVH

SEQ ID NO: 3332 - protein, 9 aa, synthetic construct
PIPASGHLY

SEQ ID NO: 3333 - protein, 9 aa, synthetic construct
PIPASGHLH

SEQ ID NO: 3334 - protein, 9 aa, synthetic construct
PIPASGKVF

SEQ ID NO: 3335 - protein, 9 aa, synthetic construct
PLQASGHLY

SEQ ID NO: 3336 - protein, 9 aa, synthetic construct
PIPAVVHVY

SEQ ID NO: 3337 - protein, 9 aa, synthetic construct
PLQASGHLH

SEQ ID NO: 3338 - protein, 9 aa, synthetic construct
PIPAVVKVF

SEQ ID NO: 3339 - protein, 9 aa, synthetic construct
PIPAVLKLH

SEQ ID NO: 3340 - protein, 9 aa, synthetic construct
PIPAVIKLK

SEQ ID NO: 3341 - protein, 9 aa, synthetic construct
PLQASGRLF

SEQ ID NO: 3342 - protein, 9 aa, synthetic construct
PIPAGVHVY

SEQ ID NO: 3343 - protein, 9 aa, synthetic construct
PIPAGVHVK

SEQ ID NO: 3344 - protein, 9 aa, synthetic construct
PIPAGVRLF

SEQ ID NO: 3345 - protein, 9 aa, synthetic construct
PIPAGAHLY

SEQ ID NO: 3346 - protein, 9 aa, synthetic construct
PIPAGIHLH

SEQ ID NO: 3347 - protein, 9 aa, synthetic construct
PIPAGIHVY

SEQ ID NO: 3348 - protein, 9 aa, synthetic construct
PIPAGIHVR

SEQ ID NO: 3349 - protein, 9 aa, synthetic construct
PIPAGIHVH

SEQ ID NO: 3350 - protein, 9 aa, synthetic construct
PIPAGIHVK

SEQ ID NO: 3351 - protein, 9 aa, synthetic construct
PIPAGIRVY

SEQ ID NO: 3352 - protein, 9 aa, synthetic construct
PIPAGIRVR

SEQ ID NO: 3353 - protein, 9 aa, synthetic construct
PIPAGIKLY

SEQ ID NO: 3354 - protein, 9 aa, synthetic construct
PIPAGIKLR

SEQ ID NO: 3355 - protein, 9 aa, synthetic construct
PIPAGIKVY

SEQ ID NO: 3356 - protein, 9 aa, synthetic construct
PIPAGIKVR

SEQ ID NO: 3357 - protein, 9 aa, synthetic construct
PIPAGIKVH

SEQ ID NO: 3358 - protein, 9 aa, synthetic construct
PIPAGIKVK

SEQ ID NO: 3359 - protein, 9 aa, synthetic construct
PIPAGIKVF

SEQ ID NO: 3360 - protein, 9 aa, synthetic construct
PIPAGGHLY

SEQ ID NO: 3361 - protein, 9 aa, synthetic construct
PIPAGGRLF

SEQ ID NO: 3362 - protein, 9 aa, synthetic construct
PIPAGGRVY

SEQ ID NO: 3363 - protein, 9 aa, synthetic construct
PIPAGGKVY

SEQ ID NO: 3364 - protein, 9 aa, synthetic construct
PLQAVVHLY

SEQ ID NO: 3365 - protein, 9 aa, synthetic construct
GLNGAVHLY

SEQ ID NO: 3366 - protein, 9 aa, synthetic construct
GLNGAVHVH

SEQ ID NO: 3367 - protein, 9 aa, synthetic construct
GLNGAVRVY

SEQ ID NO: 3368 - protein, 9 aa, synthetic construct
GLNGAVKVY

SEQ ID NO: 3369 - protein, 9 aa, synthetic construct
GLNGAVKVF

SEQ ID NO: 3370 - protein, 9 aa, synthetic construct
GLNGALHLH

SEQ ID NO: 3371 - protein, 9 aa, synthetic construct
GLNGAAHVF

SEQ ID NO: 3372 - protein, 9 aa, synthetic construct
GLNGAAKLF

SEQ ID NO: 3373 - protein, 9 aa, synthetic construct
GLNGAAKVF

SEQ ID NO: 3374 - protein, 9 aa, synthetic construct
GLNGAIRVK

SEQ ID NO: 3375 - protein, 9 aa, synthetic construct
GLNGAIKVY

SEQ ID NO: 3376 - protein, 9 aa, synthetic construct
GLNGAGHLF

SEQ ID NO: 3377 - protein, 9 aa, synthetic construct
GLNGAGRLH

SEQ ID NO: 3378 - protein, 9 aa, synthetic construct
GLNGAGRVH

SEQ ID NO: 3379 - protein, 9 aa, synthetic construct
GLNGAGRVF

SEQ ID NO: 3380 - protein, 9 aa, synthetic construct
GLNGTVHLY

SEQ ID NO: 3381 - protein, 9 aa, synthetic construct
GLNGTVHVY

SEQ ID NO: 3382 - protein, 9 aa, synthetic construct
GLNGTVHVK

SEQ ID NO: 3383 - protein, 9 aa, synthetic construct
GLNGTVKVY

SEQ ID NO: 3384 - protein, 9 aa, synthetic construct
GLNGTLHVY

SEQ ID NO: 3385 - protein, 9 aa, synthetic construct
GLNGTLKLH

SEQ ID NO: 3386 - protein, 9 aa, synthetic construct
GLNGTAHLY

SEQ ID NO: 3387 - protein, 9 aa, synthetic construct
GLNGTAHVR

SEQ ID NO: 3388 - protein, 9 aa, synthetic construct
GLNGTARLY

SEQ ID NO: 3389 - protein, 9 aa, synthetic construct
GLNGTGHLK

SEQ ID NO: 3390 - protein, 9 aa, synthetic construct
GLNGTGKLF

SEQ ID NO: 3391 - protein, 9 aa, synthetic construct
GLNGSVHLY

SEQ ID NO: 3392 - protein, 9 aa, synthetic construct
GLNGSVHLR

SEQ ID NO: 3393 - protein, 9 aa, synthetic construct
GLNGSVHLK

SEQ ID NO: 3394 - protein, 9 aa, synthetic construct
GLNGSVHVH

SEQ ID NO: 3395 - protein, 9 aa, synthetic construct
GLNGSVHVK

SEQ ID NO: 3396 - protein, 9 aa, synthetic construct
GLNGSVHVF

SEQ ID NO: 3397 - protein, 9 aa, synthetic construct
GLNGSVRVY

SEQ ID NO: 3398 - protein, 9 aa, synthetic construct
GLNGSVRVH

SEQ ID NO: 3399 - protein, 9 aa, synthetic construct
GLNGSVKLY

SEQ ID NO: 3400 - protein, 9 aa, synthetic construct
GLNGSVKLF

SEQ ID NO: 3401 - protein, 9 aa, synthetic construct
GLNGSVKVY

SEQ ID NO: 3402 - protein, 9 aa, synthetic construct
GLNGSVKVH

SEQ ID NO: 3403 - protein, 9 aa, synthetic construct
GLNGSVKVF

SEQ ID NO: 3404 - protein, 9 aa, synthetic construct
GLNGSLKLF

SEQ ID NO: 3405 - protein, 9 aa, synthetic construct
GLNGSLKVY

SEQ ID NO: 3406 - protein, 9 aa, synthetic construct
GLNGSLKVH

SEQ ID NO: 3407 - protein, 9 aa, synthetic construct
GLNGSAHLY

SEQ ID NO: 3408 - protein, 9 aa, synthetic construct
GLNGSAHLR

SEQ ID NO: 3409 - protein, 9 aa, synthetic construct
GLNGSAHLK

SEQ ID NO: 3410 - protein, 9 aa, synthetic construct
GLNGSAHLF

SEQ ID NO: 3411 - protein, 9 aa, synthetic construct
GLNGSAHVH

SEQ ID NO: 3412 - protein, 9 aa, synthetic construct
GLNGSAHVF

SEQ ID NO: 3413 - protein, 9 aa, synthetic construct
GLNGSARVH

SEQ ID NO: 3414 - protein, 9 aa, synthetic construct
GLNGSAKVF

SEQ ID NO: 3415 - protein, 9 aa, synthetic construct
GLNGSIHLR

SEQ ID NO: 3416 - protein, 9 aa, synthetic construct
GLNGSIHLK

SEQ ID NO: 3417 - protein, 9 aa, synthetic construct
GLNGSIRVY

SEQ ID NO: 3418 - protein, 9 aa, synthetic construct
GLNGSIKVH

SEQ ID NO: 3419 - protein, 9 aa, synthetic construct
GLNGSGHLY

SEQ ID NO: 3420 - protein, 9 aa, synthetic construct
GLNGSGHLK

SEQ ID NO: 3421 - protein, 9 aa, synthetic construct
GLNGSGRLY

SEQ ID NO: 3422 - protein, 9 aa, synthetic construct
GLNGSGRVF

SEQ ID NO: 3423 - protein, 9 aa, synthetic construct
GLNGSGKLF

SEQ ID NO: 3424 - protein, 9 aa, synthetic construct
GLNGVVHLY

SEQ ID NO: 3425 - protein, 9 aa, synthetic construct
GLNGVVHVH

SEQ ID NO: 3426 - protein, 9 aa, synthetic construct
GLNGVVRVH

SEQ ID NO: 3427 - protein, 9 aa, synthetic construct
GLNGVLKVH

SEQ ID NO: 3428 - protein, 9 aa, synthetic construct
GLNGVAHLY

SEQ ID NO: 3429 - protein, 9 aa, synthetic construct
GLNGVAHLH

SEQ ID NO: 3430 - protein, 9 aa, synthetic construct
GLNGVAHLK

SEQ ID NO: 3431 - protein, 9 aa, synthetic construct
GLNGVAHVY

SEQ ID NO: 3432 - protein, 9 aa, synthetic construct
GLNGVAHVR

SEQ ID NO: 3433 - protein, 9 aa, synthetic construct
GLNGVAHVH

SEQ ID NO: 3434 - protein, 9 aa, synthetic construct
GLNGVAHVK

SEQ ID NO: 3435 - protein, 9 aa, synthetic construct
GLNGVAHVF

SEQ ID NO: 3436 - protein, 9 aa, synthetic construct
GLNGVAKVY

SEQ ID NO: 3437 - protein, 9 aa, synthetic construct
GLNGVIHLR

SEQ ID NO: 3438 - protein, 9 aa, synthetic construct
GLNGVIHVY

SEQ ID NO: 3439 - protein, 9 aa, synthetic construct
GLNGVGHVH

SEQ ID NO: 3440 - protein, 9 aa, synthetic construct
GLNGVGHVK

SEQ ID NO: 3441 - protein, 9 aa, synthetic construct
GLNGVGKLY

SEQ ID NO: 3442 - protein, 9 aa, synthetic construct
GLNGGVHLY

SEQ ID NO: 3443 - protein, 9 aa, synthetic construct
GLNGGVRVF

SEQ ID NO: 3444 - protein, 9 aa, synthetic construct
GLNGGVKLY

SEQ ID NO: 3445 - protein, 9 aa, synthetic construct
GLNGGVKVY

SEQ ID NO: 3446 - protein, 9 aa, synthetic construct
GLNGGVKVF

SEQ ID NO: 3447 - protein, 9 aa, synthetic construct
GLNGGAHLH

SEQ ID NO: 3448 - protein, 9 aa, synthetic construct
GLNGGAKVY

SEQ ID NO: 3449 - protein, 9 aa, synthetic construct
GLNGGAKVH

SEQ ID NO: 3450 - protein, 9 aa, synthetic construct
GLNGGIHVK

SEQ ID NO: 3451 - protein, 9 aa, synthetic construct
PLNGTGHVH

SEQ ID NO: 3452 - protein, 9 aa, synthetic construct
GLNGGIRVK

SEQ ID NO: 3453 - protein, 9 aa, synthetic construct
GLNGGIKVY

SEQ ID NO: 3454 - protein, 9 aa, synthetic construct
GLNGGGRVY

SEQ ID NO: 3455 - protein, 9 aa, synthetic construct
GLNGGGKLF

SEQ ID NO: 3456 - protein, 9 aa, synthetic construct
GLNGGGKVY

SEQ ID NO: 3457 - protein, 9 aa, synthetic construct
GLNGGGKVF

SEQ ID NO: 3458 - protein, 9 aa, synthetic construct
GLNAAVHVF

SEQ ID NO: 3459 - protein, 9 aa, synthetic construct
GLNAAVKLH

SEQ ID NO: 3460 - protein, 9 aa, synthetic construct
GLNAAAHVF

SEQ ID NO: 3461 - protein, 9 aa, synthetic construct
GLNAAARVF

SEQ ID NO: 3462 - protein, 9 aa, synthetic construct
GLNAAAKLH

SEQ ID NO: 3463 - protein, 9 aa, synthetic construct
GLNAAGRVH

SEQ ID NO: 3464 - protein, 9 aa, synthetic construct
GLNAAGKLH

SEQ ID NO: 3465 - protein, 9 aa, synthetic construct
GLNAAGKLF

SEQ ID NO: 3466 - protein, 9 aa, synthetic construct
PLNGTGHVF

SEQ ID NO: 3467 - protein, 9 aa, synthetic construct
GLNATVHLF

SEQ ID NO: 3468 - protein, 9 aa, synthetic construct
GLNATVHVH

SEQ ID NO: 3469 - protein, 9 aa, synthetic construct
GLNATVKLF

SEQ ID NO: 3470 - protein, 9 aa, synthetic construct
GLNATLHLR

SEQ ID NO: 3471 - protein, 9 aa, synthetic construct
GLNATLKVY

SEQ ID NO: 3472 - protein, 9 aa, synthetic construct
GLNATAHLK

SEQ ID NO: 3473 - protein, 9 aa, synthetic construct
GLNATARVR

SEQ ID NO: 3474 - protein, 9 aa, synthetic construct
GLNATAKLY

SEQ ID NO: 3475 - protein, 9 aa, synthetic construct
GLNATIHLK

SEQ ID NO: 3476 - protein, 9 aa, synthetic construct
GLNATIHVR

SEQ ID NO: 3477 - protein, 9 aa, synthetic construct
GLNATIHVK

SEQ ID NO: 3478 - protein, 9 aa, synthetic construct
PLNGTGRLY

SEQ ID NO: 3479 - protein, 9 aa, synthetic construct
PLQAVIRLH

SEQ ID NO: 3480 - protein, 9 aa, synthetic construct
GLNATGRVF

SEQ ID NO: 3481 - protein, 9 aa, synthetic construct
GLNASVKVY

SEQ ID NO: 3482 - protein, 9 aa, synthetic construct
GLNASAHLR

SEQ ID NO: 3483 - protein, 9 aa, synthetic construct
GLNASAHLH

SEQ ID NO: 3484 - protein, 9 aa, synthetic construct
GLNASAHVH

SEQ ID NO: 3485 - protein, 9 aa, synthetic construct
GLNASAHVK

SEQ ID NO: 3486 - protein, 9 aa, synthetic construct
GLNASAHVF

SEQ ID NO: 3487 - protein, 9 aa, synthetic construct
GLNASAKVY

SEQ ID NO: 3488 - protein, 9 aa, synthetic construct
GLNASIHLY

SEQ ID NO: 3489 - protein, 9 aa, synthetic construct
GLNASIHLR

SEQ ID NO: 3490 - protein, 9 aa, synthetic construct
GLNASIHLH

SEQ ID NO: 3491 - protein, 9 aa, synthetic construct
GLNASIHLK

SEQ ID NO: 3492 - protein, 9 aa, synthetic construct
GLNASIHLF

SEQ ID NO: 3493 - protein, 9 aa, synthetic construct
GLNASIHVY

SEQ ID NO: 3494 - protein, 9 aa, synthetic construct
GLNASIHVR

SEQ ID NO: 3495 - protein, 9 aa, synthetic construct
GLNASIHVH

SEQ ID NO: 3496 - protein, 9 aa, synthetic construct
GLNASIHVK

SEQ ID NO: 3497 - protein, 9 aa, synthetic construct
GLNASIRLF

SEQ ID NO: 3498 - protein, 9 aa, synthetic construct
GLNASIKLF

SEQ ID NO: 3499 - protein, 9 aa, synthetic construct
GLNASGRLH

SEQ ID NO: 3500 - protein, 9 aa, synthetic construct
GLNASGRVF

SEQ ID NO: 3501 - protein, 9 aa, synthetic construct
GLNASGKVF

SEQ ID NO: 3502 - protein, 9 aa, synthetic construct
PLNGTGRLH

SEQ ID NO: 3503 - protein, 9 aa, synthetic construct
GLNAVVHLK

SEQ ID NO: 3504 - protein, 9 aa, synthetic construct
GLNAVVHVR

SEQ ID NO: 3505 - protein, 9 aa, synthetic construct
GLNAVVKVH

SEQ ID NO: 3506 - protein, 9 aa, synthetic construct
GLNAVLKVK

SEQ ID NO: 3507 - protein, 9 aa, synthetic construct
GLNAVAHLK

SEQ ID NO: 3508 - protein, 9 aa, synthetic construct
GLNAVAHVK

SEQ ID NO: 3509 - protein, 9 aa, synthetic construct
GLNAVARVF

SEQ ID NO: 3510 - protein, 9 aa, synthetic construct
GLNAVIKVH

SEQ ID NO: 3511 - protein, 9 aa, synthetic construct
GLNAVGHVH

SEQ ID NO: 3512 - protein, 9 aa, synthetic construct
GLNAGAHLK

SEQ ID NO: 3513 - protein, 9 aa, synthetic construct
PLQAVGKLH

SEQ ID NO: 3514 - protein, 9 aa, synthetic construct
GLNAGIHLY

SEQ ID NO: 3515 - protein, 9 aa, synthetic construct
GLNAGIHLK

SEQ ID NO: 3516 - protein, 9 aa, synthetic construct
GLNAGIHVK

SEQ ID NO: 3517 - protein, 9 aa, synthetic construct
GLNAGIRVY

SEQ ID NO: 3518 - protein, 9 aa, synthetic construct
GLNAGGHVR

SEQ ID NO: 3519 - protein, 9 aa, synthetic construct
GLQGAVHVY

SEQ ID NO: 3520 - protein, 9 aa, synthetic construct
GLQGAVHVH

SEQ ID NO: 3521 - protein, 9 aa, synthetic construct
GLQGAVKLF

SEQ ID NO: 3522 - protein, 9 aa, synthetic construct
GLQGAVKVF

SEQ ID NO: 3523 - protein, 9 aa, synthetic construct
GLQGALHVY

SEQ ID NO: 3524 - protein, 9 aa, synthetic construct
GLQGALRLF

SEQ ID NO: 3525 - protein, 9 aa, synthetic construct
GLQGALRVF

SEQ ID NO: 3526 - protein, 9 aa, synthetic construct
GLQGALKLY

SEQ ID NO: 3527 - protein, 9 aa, synthetic construct
GLQGALKLH

SEQ ID NO: 3528 - protein, 9 aa, synthetic construct
GLQGALKLF

SEQ ID NO: 3529 - protein, 9 aa, synthetic construct
GLQGALKVF

SEQ ID NO: 3530 - protein, 9 aa, synthetic construct
GLQGAAHVF

SEQ ID NO: 3531 - protein, 9 aa, synthetic construct
GLQGAAKVH

SEQ ID NO: 3532 - protein, 9 aa, synthetic construct
GLQGAIHLK

SEQ ID NO: 3533 - protein, 9 aa, synthetic construct
GLQGAIHVH

SEQ ID NO: 3534 - protein, 9 aa, synthetic construct
GLQGAIHVK

SEQ ID NO: 3535 - protein, 9 aa, synthetic construct
GLQGAIKLY

SEQ ID NO: 3536 - protein, 9 aa, synthetic construct
GLQGAIKLH

SEQ ID NO: 3537 - protein, 9 aa, synthetic construct
GLQGAGHLY

SEQ ID NO: 3538 - protein, 9 aa, synthetic construct
GLQGAGHLF

SEQ ID NO: 3539 - protein, 9 aa, synthetic construct
GLQGAGHVF

SEQ ID NO: 3540 - protein, 9 aa, synthetic construct
GLQGAGKLH

SEQ ID NO: 3541 - protein, 9 aa, synthetic construct
GLQGAGKLF

SEQ ID NO: 3542 - protein, 9 aa, synthetic construct
GLQGTVHVY

SEQ ID NO: 3543 - protein, 9 aa, synthetic construct
GLQGTVRLY

SEQ ID NO: 3544 - protein, 9 aa, synthetic construct
GLQGTLHVR

SEQ ID NO: 3545 - protein, 9 aa, synthetic construct
PLQAGVKLY

SEQ ID NO: 3546 - protein, 9 aa, synthetic construct
GLQGTLKLF

SEQ ID NO: 3547 - protein, 9 aa, synthetic construct
GLQGTAHVK

SEQ ID NO: 3548 - protein, 9 aa, synthetic construct
PLQAGVKLH

SEQ ID NO: 3549 - protein, 9 aa, synthetic construct
GLQGTIHLK

SEQ ID NO: 3550 - protein, 9 aa, synthetic construct
GLQGTIHVH

SEQ ID NO: 3551 - protein, 9 aa, synthetic construct
GLQGTGHLY

SEQ ID NO: 3552 - protein, 9 aa, synthetic construct
GLQGTGHVK

SEQ ID NO: 3553 - protein, 9 aa, synthetic construct
GLQGSVRVY

SEQ ID NO: 3554 - protein, 9 aa, synthetic construct
GLQGSVRVF

SEQ ID NO: 3555 - protein, 9 aa, synthetic construct
GLQGSGRVH

SEQ ID NO: 3556 - protein, 9 aa, synthetic construct
GLQGSGRVF

SEQ ID NO: 3557 - protein, 9 aa, synthetic construct
GLQGSGKLF

SEQ ID NO: 3558 - protein, 9 aa, synthetic construct
GLQGSGKVH

SEQ ID NO: 3559 - protein, 9 aa, synthetic construct
GLQGVVRLF

SEQ ID NO: 3560 - protein, 9 aa, synthetic construct
GLQGVLHVY

SEQ ID NO: 3561 - protein, 9 aa, synthetic construct
GLQGVLHVH

SEQ ID NO: 3562 - protein, 9 aa, synthetic construct
GLQGVLHVK

SEQ ID NO: 3563 - protein, 9 aa, synthetic construct
GLQGVLHVF

SEQ ID NO: 3564 - protein, 9 aa, synthetic construct
PLNGAVKVF

SEQ ID NO: 3565 - protein, 9 aa, synthetic construct
GLQGVAHVK

SEQ ID NO: 3566 - protein, 9 aa, synthetic construct
GLQGVAKLH

SEQ ID NO: 3567 - protein, 9 aa, synthetic construct
GLQGVAKVR

SEQ ID NO: 3568 - protein, 9 aa, synthetic construct
GLQGVGHLR

SEQ ID NO: 3569 - protein, 9 aa, synthetic construct
GLQGVGKLK

SEQ ID NO: 3570 - protein, 9 aa, synthetic construct
GLQGVGKVY

SEQ ID NO: 3571 - protein, 9 aa, synthetic construct
GLQGGVHVK

SEQ ID NO: 3572 - protein, 9 aa, synthetic construct
GLQGGLKLF

SEQ ID NO: 3573 - protein, 9 aa, synthetic construct
GLQGGLKVY

SEQ ID NO: 3574 - protein, 9 aa, synthetic construct
GLQGGAHLK

SEQ ID NO: 3575 - protein, 9 aa, synthetic construct
GLQGGAKLF

SEQ ID NO: 3576 - protein, 9 aa, synthetic construct
GLQGGAKVH

SEQ ID NO: 3577 - protein, 9 aa, synthetic construct
GLQGGIHLF

SEQ ID NO: 3578 - protein, 9 aa, synthetic construct
GLQGGIHVK

SEQ ID NO: 3579 - protein, 9 aa, synthetic construct
GLQGGGRLY

SEQ ID NO: 3580 - protein, 9 aa, synthetic construct
GLQGGGRVY

SEQ ID NO: 3581 - protein, 9 aa, synthetic construct
GLQGGGKVY

SEQ ID NO: 3582 - protein, 9 aa, synthetic construct
GLQAALRVF

SEQ ID NO: 3583 - protein, 9 aa, synthetic construct
GLQAAAHLF

SEQ ID NO: 3584 - protein, 9 aa, synthetic construct
GLQAAARVF

SEQ ID NO: 3585 - protein, 9 aa, synthetic construct
GLQAAAKLH

SEQ ID NO: 3586 - protein, 9 aa, synthetic construct
GLQAAAKVH

SEQ ID NO: 3587 - protein, 9 aa, synthetic construct
GLQAAGRLY

SEQ ID NO: 3588 - protein, 9 aa, synthetic construct
GLQATVKLF

SEQ ID NO: 3589 - protein, 9 aa, synthetic construct
PLQAGIRLY

SEQ ID NO: 3590 - protein, 9 aa, synthetic construct
PLNGTGKVH

SEQ ID NO: 3591 - protein, 9 aa, synthetic construct
PLQAGGHLK

SEQ ID NO: 3592 - protein, 9 aa, synthetic construct
GLQAVAHVH

SEQ ID NO: 3593 - protein, 9 aa, synthetic construct
GLQAVGRVF

SEQ ID NO: 3594 - protein, 9 aa, synthetic construct
GLQAVGKLY

SEQ ID NO: 3595 - protein, 9 aa, synthetic construct
GLQAVGKLK

SEQ ID NO: 3596 - protein, 9 aa, synthetic construct
GLQAGVRLR

SEQ ID NO: 3597 - protein, 9 aa, synthetic construct
GLQAGVKVF

SEQ ID NO: 3598 - protein, 9 aa, synthetic construct
PLQAGGRVK

SEQ ID NO: 3599 - protein, 9 aa, synthetic construct
PLQAGGKLH

SEQ ID NO: 3600 - protein, 9 aa, synthetic construct
GLQAGGHLK

SEQ ID NO: 3601 - protein, 9 aa, synthetic construct
GLQAGGKLY

SEQ ID NO: 3602 - protein, 9 aa, synthetic construct
PLNGAVHLK

SEQ ID NO: 3603 - protein, 9 aa, synthetic construct
PLNGSVHLY

SEQ ID NO: 3604 - protein, 9 aa, synthetic construct
GLPGAVHVY

SEQ ID NO: 3605 - protein, 9 aa, synthetic construct
GLPGAVHVK

SEQ ID NO: 3606 - protein, 9 aa, synthetic construct
GLPGAVKLY

SEQ ID NO: 3607 - protein, 9 aa, synthetic construct
GLPGAIHLK

SEQ ID NO: 3608 - protein, 9 aa, synthetic construct
GLPGAIKVF

SEQ ID NO: 3609 - protein, 9 aa, synthetic construct
GLPGAGHLY

SEQ ID NO: 3610 - protein, 9 aa, synthetic construct
GLPGAGHLK

SEQ ID NO: 3611 - protein, 9 aa, synthetic construct
GLPGAGHLF

SEQ ID NO: 3612 - protein, 9 aa, synthetic construct
GLPGAGHVF

SEQ ID NO: 3613 - protein, 9 aa, synthetic construct
GLPGAGKLF

SEQ ID NO: 3614 - protein, 9 aa, synthetic construct
GLPGAGKVF

SEQ ID NO: 3615 - protein, 9 aa, synthetic construct
GLPGTVHLY

SEQ ID NO: 3616 - protein, 9 aa, synthetic construct
GLPGTVHVY

SEQ ID NO: 3617 - protein, 9 aa, synthetic construct
GLPGTVHVH

SEQ ID NO: 3618 - protein, 9 aa, synthetic construct
GLPGTVHVF

SEQ ID NO: 3619 - protein, 9 aa, synthetic construct
GLPGTLHVY

SEQ ID NO: 3620 - protein, 9 aa, synthetic construct
PLNGSVHLH

SEQ ID NO: 3621 - protein, 9 aa, synthetic construct
GLPGTAHLR

SEQ ID NO: 3622 - protein, 9 aa, synthetic construct
GLPGTAHLH

SEQ ID NO: 3623 - protein, 9 aa, synthetic construct
GLPGTAHLK

SEQ ID NO: 3624 - protein, 9 aa, synthetic construct
GLPGTAHVR

SEQ ID NO: 3625 - protein, 9 aa, synthetic construct
GLPGTAKVF

SEQ ID NO: 3626 - protein, 9 aa, synthetic construct
GLPGTIHVH

SEQ ID NO: 3627 - protein, 9 aa, synthetic construct
GLPGTIHVK

SEQ ID NO: 3628 - protein, 9 aa, synthetic construct
GLPGTGHLY

SEQ ID NO: 3629 - protein, 9 aa, synthetic construct
GLPGTGHLR

SEQ ID NO: 3630 - protein, 9 aa, synthetic construct
GLPGTGHLH

SEQ ID NO: 3631 - protein, 9 aa, synthetic construct
GLPGTGHLK

SEQ ID NO: 3632 - protein, 9 aa, synthetic construct
GLPGTGHLF

SEQ ID NO: 3633 - protein, 9 aa, synthetic construct
GLPGTGHVY

SEQ ID NO: 3634 - protein, 9 aa, synthetic construct
GLPGTGHVR

SEQ ID NO: 3635 - protein, 9 aa, synthetic construct
GLPGTGHVH

SEQ ID NO: 3636 - protein, 9 aa, synthetic construct
GLPGTGHVK

SEQ ID NO: 3637 - protein, 9 aa, synthetic construct
GLPGTGHVF

SEQ ID NO: 3638 - protein, 9 aa, synthetic construct
GLPGTGKLY

SEQ ID NO: 3639 - protein, 9 aa, synthetic construct
GLPGTGKLH

SEQ ID NO: 3640 - protein, 9 aa, synthetic construct
GLPGTGKLF

SEQ ID NO: 3641 - protein, 9 aa, synthetic construct
PLNGSVHLK

SEQ ID NO: 3642 - protein, 9 aa, synthetic construct
GLPGSVHVY

SEQ ID NO: 3643 - protein, 9 aa, synthetic construct
GLPGSAHLK

SEQ ID NO: 3644 - protein, 9 aa, synthetic construct
GLPGSAHVH

SEQ ID NO: 3645 - protein, 9 aa, synthetic construct
GLPGSAKLF

SEQ ID NO: 3646 - protein, 9 aa, synthetic construct
GLPGSAKVF

SEQ ID NO: 3647 - protein, 9 aa, synthetic construct
GLPGSIHLR

SEQ ID NO: 3648 - protein, 9 aa, synthetic construct
PLNGSVHLF

SEQ ID NO: 3649 - protein, 9 aa, synthetic construct
GLPGSGHLY

SEQ ID NO: 3650 - protein, 9 aa, synthetic construct
GLPGSGHVF

SEQ ID NO: 3651 - protein, 9 aa, synthetic construct
GLPGVVHVK

SEQ ID NO: 3652 - protein, 9 aa, synthetic construct
GLPGVLHVH

SEQ ID NO: 3653 - protein, 9 aa, synthetic construct
PLNGSVHVY

SEQ ID NO: 3654 - protein, 9 aa, synthetic construct
GLPGVLKLH

SEQ ID NO: 3655 - protein, 9 aa, synthetic construct
GLPGVAHVF

SEQ ID NO: 3656 - protein, 9 aa, synthetic construct
GLPGVAKLY

SEQ ID NO: 3657 - protein, 9 aa, synthetic construct
GLPGVIHVY

SEQ ID NO: 3658 - protein, 9 aa, synthetic construct
GLPGVIHVK

SEQ ID NO: 3659 - protein, 9 aa, synthetic construct
PLPGALKVR

SEQ ID NO: 3660 - protein, 9 aa, synthetic construct
GLPGVGKVY

SEQ ID NO: 3661 - protein, 9 aa, synthetic construct
GLPGGVHLY

SEQ ID NO: 3662 - protein, 9 aa, synthetic construct
GLPGGVHVY

SEQ ID NO: 3663 - protein, 9 aa, synthetic construct
GLPGGVHVR

SEQ ID NO: 3664 - protein, 9 aa, synthetic construct
GLPGGVHVK

SEQ ID NO: 3665 - protein, 9 aa, synthetic construct
GLPGGVHVF

SEQ ID NO: 3666 - protein, 9 aa, synthetic construct
GLPGGVKLY

SEQ ID NO: 3667 - protein, 9 aa, synthetic construct
GLPGGVKLH

SEQ ID NO: 3668 - protein, 9 aa, synthetic construct
GLPGGVKVY

SEQ ID NO: 3669 - protein, 9 aa, synthetic construct
GLPGGVKVF

SEQ ID NO: 3670 - protein, 9 aa, synthetic construct
GLPGGLHVY

SEQ ID NO: 3671 - protein, 9 aa, synthetic construct
GLPGGAHLK

SEQ ID NO: 3672 - protein, 9 aa, synthetic construct
GLPGGAHVR

SEQ ID NO: 3673 - protein, 9 aa, synthetic construct
GLPGGAKLF

SEQ ID NO: 3674 - protein, 9 aa, synthetic construct
GLPGGAKVH

SEQ ID NO: 3675 - protein, 9 aa, synthetic construct
GLPGGIHVK

SEQ ID NO: 3676 - protein, 9 aa, synthetic construct
GLPGGGRLY

SEQ ID NO: 3677 - protein, 9 aa, synthetic construct
GLPGGGRLF

SEQ ID NO: 3678 - protein, 9 aa, synthetic construct
GLPAAVHVK

SEQ ID NO: 3679 - protein, 9 aa, synthetic construct
GLPAAVRLY

SEQ ID NO: 3680 - protein, 9 aa, synthetic construct
PLNGSVHVK

SEQ ID NO: 3681 - protein, 9 aa, synthetic construct
GLPAAGHLH

SEQ ID NO: 3682 - protein, 9 aa, synthetic construct
GLPAAGRVH

SEQ ID NO: 3683 - protein, 9 aa, synthetic construct
GLPATAHLK

SEQ ID NO: 3684 - protein, 9 aa, synthetic construct
GLPATAKVY

SEQ ID NO: 3685 - protein, 9 aa, synthetic construct
GLPATIHVH

SEQ ID NO: 3686 - protein, 9 aa, synthetic construct
PLNGSVRLY

SEQ ID NO: 3687 - protein, 9 aa, synthetic construct
GLPATGHLK

SEQ ID NO: 3688 - protein, 9 aa, synthetic construct
GLPATGHVR

SEQ ID NO: 3689 - protein, 9 aa, synthetic construct
GLPATGRVF

SEQ ID NO: 3690 - protein, 9 aa, synthetic construct
GLPATGKLY

SEQ ID NO: 3691 - protein, 9 aa, synthetic construct
GLPATGKLK

SEQ ID NO: 3692 - protein, 9 aa, synthetic construct
GLPASAHLH

SEQ ID NO: 3693 - protein, 9 aa, synthetic construct
GLPASAHVH

SEQ ID NO: 3694 - protein, 9 aa, synthetic construct
GLPASAHVK

SEQ ID NO: 3695 - protein, 9 aa, synthetic construct
GLPASGKLR

SEQ ID NO: 3696 - protein, 9 aa, synthetic construct
GLPASGKLH

SEQ ID NO: 3697 - protein, 9 aa, synthetic construct
GLPAVLKLH

SEQ ID NO: 3698 - protein, 9 aa, synthetic construct
GLPAVAHVH

SEQ ID NO: 3699 - protein, 9 aa, synthetic construct
GLPAVIKVH

SEQ ID NO: 3700 - protein, 9 aa, synthetic construct
GLPAVGKVF

SEQ ID NO: 3701 - protein, 9 aa, synthetic construct
GLPAGVHVY

SEQ ID NO: 3702 - protein, 9 aa, synthetic construct
GLPAGVRVF

SEQ ID NO: 3703 - protein, 9 aa, synthetic construct
GLPAGVKLF

SEQ ID NO: 3704 - protein, 9 aa, synthetic construct
PLPGAGRVF

SEQ ID NO: 3705 - protein, 9 aa, synthetic construct
PLPGAGKLR

SEQ ID NO: 3706 - protein, 9 aa, synthetic construct
GLPAGAHVK

SEQ ID NO: 3707 - protein, 9 aa, synthetic construct
GLPAGAHVF

SEQ ID NO: 3708 - protein, 9 aa, synthetic construct
PLPGAGKLH

SEQ ID NO: 3709 - protein, 9 aa, synthetic construct
GLPAGARLH

SEQ ID NO: 3710 - protein, 9 aa, synthetic construct
GLPAGARLF

SEQ ID NO: 3711 - protein, 9 aa, synthetic construct
GLPAGARVY

SEQ ID NO: 3712 - protein, 9 aa, synthetic construct
GLPAGAKVY

SEQ ID NO: 3713 - protein, 9 aa, synthetic construct
GLPAGGRVF

SEQ ID NO: 3714 - protein, 9 aa, synthetic construct
PLPGAGKVF

SEQ ID NO: 3715 - protein, 9 aa, synthetic construct
GLPAGGKVY

SEQ ID NO: 3716 - protein, 9 aa, synthetic construct
GTNGAVHLK

SEQ ID NO: 3717 - protein, 9 aa, synthetic construct
GTNGAVHVH

SEQ ID NO: 3718 - protein, 9 aa, synthetic construct
GTNGAVHVK

SEQ ID NO: 3719 - protein, 9 aa, synthetic construct
GTNGAVKLH

SEQ ID NO: 3720 - protein, 9 aa, synthetic construct
GTNGAVKVF

SEQ ID NO: 3721 - protein, 9 aa, synthetic construct
GTNGAARLF

SEQ ID NO: 3722 - protein, 9 aa, synthetic construct
GTNGAIHLK

SEQ ID NO: 3723 - protein, 9 aa, synthetic construct
GTNGAIKLH

SEQ ID NO: 3724 - protein, 9 aa, synthetic construct
GTNGAGHLF

SEQ ID NO: 3725 - protein, 9 aa, synthetic construct
GTNGAGHVF

SEQ ID NO: 3726 - protein, 9 aa, synthetic construct
GTNGAGRVY

SEQ ID NO: 3727 - protein, 9 aa, synthetic construct
GTNGAGKLH

SEQ ID NO: 3728 - protein, 9 aa, synthetic construct
GTNGAGKLF

SEQ ID NO: 3729 - protein, 9 aa, synthetic construct
GTNGAGKVK

SEQ ID NO: 3730 - protein, 9 aa, synthetic construct
GTNGTVHLY

SEQ ID NO: 3731 - protein, 9 aa, synthetic construct
GTNGTVRLY

SEQ ID NO: 3732 - protein, 9 aa, synthetic construct
GTNGTLHLY

SEQ ID NO: 3733 - protein, 9 aa, synthetic construct
GTNGTLHVY

SEQ ID NO: 3734 - protein, 9 aa, synthetic construct
GTNGTLHVF

SEQ ID NO: 3735 - protein, 9 aa, synthetic construct
GTNGTLKLY

SEQ ID NO: 3736 - protein, 9 aa, synthetic construct
GTNGTLKLF

SEQ ID NO: 3737 - protein, 9 aa, synthetic construct
GTNGTAHVR

SEQ ID NO: 3738 - protein, 9 aa, synthetic construct
GTNGTARVH

SEQ ID NO: 3739 - protein, 9 aa, synthetic construct
GTNGTIHVK

SEQ ID NO: 3740 - protein, 9 aa, synthetic construct
GTNGTGHLY

SEQ ID NO: 3741 - protein, 9 aa, synthetic construct
GTNGTGRVF

SEQ ID NO: 3742 - protein, 9 aa, synthetic construct
GTNGSVHLK

SEQ ID NO: 3743 - protein, 9 aa, synthetic construct
GTNGSVHVK

SEQ ID NO: 3744 - protein, 9 aa, synthetic construct
GTNGSVRVY

SEQ ID NO: 3745 - protein, 9 aa, synthetic construct
GTNGSVKLF

SEQ ID NO: 3746 - protein, 9 aa, synthetic construct
GTNGSVKVY

SEQ ID NO: 3747 - protein, 9 aa, synthetic construct
GTNGSLHVY

SEQ ID NO: 3748 - protein, 9 aa, synthetic construct
GTNGSLHVK

SEQ ID NO: 3749 - protein, 9 aa, synthetic construct
GTNGSLRVF

SEQ ID NO: 3750 - protein, 9 aa, synthetic construct
GTNGSLKLY

SEQ ID NO: 3751 - protein, 9 aa, synthetic construct
GTNGSLKLH

SEQ ID NO: 3752 - protein, 9 aa, synthetic construct
GTNGSLKLF

SEQ ID NO: 3753 - protein, 9 aa, synthetic construct
GTNGSLKVF

SEQ ID NO: 3754 - protein, 9 aa, synthetic construct
GTNGSAHLK

SEQ ID NO: 3755 - protein, 9 aa, synthetic construct
GTNGSAHVR

SEQ ID NO: 3756 - protein, 9 aa, synthetic construct
GTNGSAHVH

SEQ ID NO: 3757 - protein, 9 aa, synthetic construct
GTNGSAHVF

SEQ ID NO: 3758 - protein, 9 aa, synthetic construct
GTNGSAKVH

SEQ ID NO: 3759 - protein, 9 aa, synthetic construct
GTNGSIHLR

SEQ ID NO: 3760 - protein, 9 aa, synthetic construct
GTNGSIHVY

SEQ ID NO: 3761 - protein, 9 aa, synthetic construct
GTNGSIRVY

SEQ ID NO: 3762 - protein, 9 aa, synthetic construct
GTNGSIKLH

SEQ ID NO: 3763 - protein, 9 aa, synthetic construct
GTNGSIKLF

SEQ ID NO: 3764 - protein, 9 aa, synthetic construct
GTNGSIKVH

SEQ ID NO: 3765 - protein, 9 aa, synthetic construct
GTNGSGHLY

SEQ ID NO: 3766 - protein, 9 aa, synthetic construct
GTNGSGRVF

SEQ ID NO: 3767 - protein, 9 aa, synthetic construct
GTNGVVHVH

SEQ ID NO: 3768 - protein, 9 aa, synthetic construct
GTNGVLRLH

SEQ ID NO: 3769 - protein, 9 aa, synthetic construct
PLNGSVKLY

SEQ ID NO: 3770 - protein, 9 aa, synthetic construct
GTNGVAHVY

SEQ ID NO: 3771 - protein, 9 aa, synthetic construct
GTNGVAKVY

SEQ ID NO: 3772 - protein, 9 aa, synthetic construct
GTNGVIHLR

SEQ ID NO: 3773 - protein, 9 aa, synthetic construct
GTNGVIHLK

SEQ ID NO: 3774 - protein, 9 aa, synthetic construct
GTNGVIHVY

SEQ ID NO: 3775 - protein, 9 aa, synthetic construct
GTNGVGHVH

SEQ ID NO: 3776 - protein, 9 aa, synthetic construct
GTNGVGRLY

SEQ ID NO: 3777 - protein, 9 aa, synthetic construct
GTNGGVHLY

SEQ ID NO: 3778 - protein, 9 aa, synthetic construct
GTNGGVHLR

SEQ ID NO: 3779 - protein, 9 aa, synthetic construct
GTNGGVHLK

SEQ ID NO: 3780 - protein, 9 aa, synthetic construct
GTNGGVHVY

SEQ ID NO: 3781 - protein, 9 aa, synthetic construct
GTNGGVHVR

SEQ ID NO: 3782 - protein, 9 aa, synthetic construct
GTNGGVHVK

SEQ ID NO: 3783 - protein, 9 aa, synthetic construct
GTNGGVHVF

SEQ ID NO: 3784 - protein, 9 aa, synthetic construct
GTNGGVKLY

SEQ ID NO: 3785 - protein, 9 aa, synthetic construct
GTNGGLKLF

SEQ ID NO: 3786 - protein, 9 aa, synthetic construct
PLPGTAHVR

SEQ ID NO: 3787 - protein, 9 aa, synthetic construct
GTNGGAHLH

SEQ ID NO: 3788 - protein, 9 aa, synthetic construct
GTNGGAHVH

SEQ ID NO: 3789 - protein, 9 aa, synthetic construct
GTNGGAHVF

SEQ ID NO: 3790 - protein, 9 aa, synthetic construct
PLPGTAHVH

SEQ ID NO: 3791 - protein, 9 aa, synthetic construct
GTNGGARVY

SEQ ID NO: 3792 - protein, 9 aa, synthetic construct
GTNGGARVF

SEQ ID NO: 3793 - protein, 9 aa, synthetic construct
PLPGTAHVK

SEQ ID NO: 3794 - protein, 9 aa, synthetic construct
GTNGGAKVF

SEQ ID NO: 3795 - protein, 9 aa, synthetic construct
GTNGGIHLR

SEQ ID NO: 3796 - protein, 9 aa, synthetic construct
GTNGGIHVH

SEQ ID NO: 3797 - protein, 9 aa, synthetic construct
GTNGGIHVK

SEQ ID NO: 3798 - protein, 9 aa, synthetic construct
GTNGGIRVR

SEQ ID NO: 3799 - protein, 9 aa, synthetic construct
GTNGGIRVF

SEQ ID NO: 3800 - protein, 9 aa, synthetic construct
GTNGGIKLH

SEQ ID NO: 3801 - protein, 9 aa, synthetic construct
GTNGGIKVF

SEQ ID NO: 3802 - protein, 9 aa, synthetic construct
GTNGGGHLY

SEQ ID NO: 3803 - protein, 9 aa, synthetic construct
GTNGGGHVY

SEQ ID NO: 3804 - protein, 9 aa, synthetic construct
GTNGGGHVR

SEQ ID NO: 3805 - protein, 9 aa, synthetic construct
GTNGGGHVK

SEQ ID NO: 3806 - protein, 9 aa, synthetic construct
GTNGGGHVF

SEQ ID NO: 3807 - protein, 9 aa, synthetic construct
GTNGGGRLY

SEQ ID NO: 3808 - protein, 9 aa, synthetic construct
GTNGGGRLF

SEQ ID NO: 3809 - protein, 9 aa, synthetic construct
GTNGGGRVR

SEQ ID NO: 3810 - protein, 9 aa, synthetic construct
GTNGGGRVF

SEQ ID NO: 3811 - protein, 9 aa, synthetic construct
GTNGGGKLY

SEQ ID NO: 3812 - protein, 9 aa, synthetic construct
GTNGGGKLF

SEQ ID NO: 3813 - protein, 9 aa, synthetic construct
GTNAAVHVH

SEQ ID NO: 3814 - protein, 9 aa, synthetic construct
GTNAAVRVY

SEQ ID NO: 3815 - protein, 9 aa, synthetic construct
GTNAAVRVF

SEQ ID NO: 3816 - protein, 9 aa, synthetic construct
PLPGTARVH

SEQ ID NO: 3817 - protein, 9 aa, synthetic construct
GTNAAVKVY

SEQ ID NO: 3818 - protein, 9 aa, synthetic construct
GTNAALHLR

SEQ ID NO: 3819 - protein, 9 aa, synthetic construct
GTNAALHLK

SEQ ID NO: 3820 - protein, 9 aa, synthetic construct
GTNAALHVR

SEQ ID NO: 3821 - protein, 9 aa, synthetic construct
GTNAALKVY

SEQ ID NO: 3822 - protein, 9 aa, synthetic construct
GTNAAAHLR

SEQ ID NO: 3823 - protein, 9 aa, synthetic construct
GTNAAAHLH

SEQ ID NO: 3824 - protein, 9 aa, synthetic construct
GTNAAARVY

SEQ ID NO: 3825 - protein, 9 aa, synthetic construct
GTNAAAKLK

SEQ ID NO: 3826 - protein, 9 aa, synthetic construct
GTNAAAKVF

SEQ ID NO: 3827 - protein, 9 aa, synthetic construct
GTNAAIRLH

SEQ ID NO: 3828 - protein, 9 aa, synthetic construct
GTNAAIRVF

SEQ ID NO: 3829 - protein, 9 aa, synthetic construct
GTNAAIKLY

SEQ ID NO: 3830 - protein, 9 aa, synthetic construct
GTNAAIKVY

SEQ ID NO: 3831 - protein, 9 aa, synthetic construct
GTNAAGHLR

SEQ ID NO: 3832 - protein, 9 aa, synthetic construct
GTNAAGHLK

SEQ ID NO: 3833 - protein, 9 aa, synthetic construct
GTNAAGHVF

SEQ ID NO: 3834 - protein, 9 aa, synthetic construct
GTNAAGRLK

SEQ ID NO: 3835 - protein, 9 aa, synthetic construct
GTNAAGRVH

SEQ ID NO: 3836 - protein, 9 aa, synthetic construct
PLPGTAKVF

SEQ ID NO: 3837 - protein, 9 aa, synthetic construct
GTNATVHVH

SEQ ID NO: 3838 - protein, 9 aa, synthetic construct
GTNATVRVH

SEQ ID NO: 3839 - protein, 9 aa, synthetic construct
GTNATVKVH

SEQ ID NO: 3840 - protein, 9 aa, synthetic construct
GTNATLKVH

SEQ ID NO: 3841 - protein, 9 aa, synthetic construct
GTNATAHLK

SEQ ID NO: 3842 - protein, 9 aa, synthetic construct
GTNATAHLF

SEQ ID NO: 3843 - protein, 9 aa, synthetic construct
GTNATAHVR

SEQ ID NO: 3844 - protein, 9 aa, synthetic construct
GTNATAHVH

SEQ ID NO: 3845 - protein, 9 aa, synthetic construct
GTNATAKVF

SEQ ID NO: 3846 - protein, 9 aa, synthetic construct
PLNGSVKVY

SEQ ID NO: 3847 - protein, 9 aa, synthetic construct
GTNATGHLY

SEQ ID NO: 3848 - protein, 9 aa, synthetic construct
GTNATGHVF

SEQ ID NO: 3849 - protein, 9 aa, synthetic construct
GTNASVHVF

SEQ ID NO: 3850 - protein, 9 aa, synthetic construct
GTNASLHVK

SEQ ID NO: 3851 - protein, 9 aa, synthetic construct
GTNASLKLF

SEQ ID NO: 3852 - protein, 9 aa, synthetic construct
GTNASAHVR

SEQ ID NO: 3853 - protein, 9 aa, synthetic construct
GTNASAHVH

SEQ ID NO: 3854 - protein, 9 aa, synthetic construct
GTNASAHVF

SEQ ID NO: 3855 - protein, 9 aa, synthetic construct
GTNASARVF

SEQ ID NO: 3856 - protein, 9 aa, synthetic construct
GTNASIHVR

SEQ ID NO: 3857 - protein, 9 aa, synthetic construct
GTNASIRLF

SEQ ID NO: 3858 - protein, 9 aa, synthetic construct
GTNASIKLY

SEQ ID NO: 3859 - protein, 9 aa, synthetic construct
GTNASGRLF

SEQ ID NO: 3860 - protein, 9 aa, synthetic construct
GTNASGRVF

SEQ ID NO: 3861 - protein, 9 aa, synthetic construct
GTNASGKVF

SEQ ID NO: 3862 - protein, 9 aa, synthetic construct
GTNAVVHVK

SEQ ID NO: 3863 - protein, 9 aa, synthetic construct
GTNAVVKLY

SEQ ID NO: 3864 - protein, 9 aa, synthetic construct
GTNAVVKVH

SEQ ID NO: 3865 - protein, 9 aa, synthetic construct
PLPGTGHLK

SEQ ID NO: 3866 - protein, 9 aa, synthetic construct
GTNAVLKLY

SEQ ID NO: 3867 - protein, 9 aa, synthetic construct
GTNAVAHLY

SEQ ID NO: 3868 - protein, 9 aa, synthetic construct
PLPGTGHVH

SEQ ID NO: 3869 - protein, 9 aa, synthetic construct
GTNAVAKLY

SEQ ID NO: 3870 - protein, 9 aa, synthetic construct
GTNAVIHVK

SEQ ID NO: 3871 - protein, 9 aa, synthetic construct
GTNAVIRVY

SEQ ID NO: 3872 - protein, 9 aa, synthetic construct
GTNAVIKVH

SEQ ID NO: 3873 - protein, 9 aa, synthetic construct
GTNAVGHLK

SEQ ID NO: 3874 - protein, 9 aa, synthetic construct
GTNAVGHVR

SEQ ID NO: 3875 - protein, 9 aa, synthetic construct
GTNAVGRVY

SEQ ID NO: 3876 - protein, 9 aa, synthetic construct
GTNAGVHVK

SEQ ID NO: 3877 - protein, 9 aa, synthetic construct
GTNAGVKVH

SEQ ID NO: 3878 - protein, 9 aa, synthetic construct
PLPGTGRVF

SEQ ID NO: 3879 - protein, 9 aa, synthetic construct
GTNAGAHLH

SEQ ID NO: 3880 - protein, 9 aa, synthetic construct
GTNAGARLY

SEQ ID NO: 3881 - protein, 9 aa, synthetic construct
GTNAGARLH

SEQ ID NO: 3882 - protein, 9 aa, synthetic construct
GTNAGAKVF

SEQ ID NO: 3883 - protein, 9 aa, synthetic construct
PLPGTGKLF

SEQ ID NO: 3884 - protein, 9 aa, synthetic construct
GTNAGIRVY

SEQ ID NO: 3885 - protein, 9 aa, synthetic construct
GTNAGGHVY

SEQ ID NO: 3886 - protein, 9 aa, synthetic construct
GTNAGGHVK

SEQ ID NO: 3887 - protein, 9 aa, synthetic construct
PLNGSLHLY

SEQ ID NO: 3888 - protein, 9 aa, synthetic construct
GTQGAVHVY

SEQ ID NO: 3889 - protein, 9 aa, synthetic construct
GTQGAVHVF

SEQ ID NO: 3890 - protein, 9 aa, synthetic construct
GTQGAVRLF

SEQ ID NO: 3891 - protein, 9 aa, synthetic construct
GTQGAVKVR

SEQ ID NO: 3892 - protein, 9 aa, synthetic construct
GTQGAVKVH

SEQ ID NO: 3893 - protein, 9 aa, synthetic construct
GTQGALKVH

SEQ ID NO: 3894 - protein, 9 aa, synthetic construct
GTQGAAHVR

SEQ ID NO: 3895 - protein, 9 aa, synthetic construct
GTQGAAHVH

SEQ ID NO: 3896 - protein, 9 aa, synthetic construct
GTQGAAHVF

SEQ ID NO: 3897 - protein, 9 aa, synthetic construct
GTQGAARVH

SEQ ID NO: 3898 - protein, 9 aa, synthetic construct
GTQGAARVF

SEQ ID NO: 3899 - protein, 9 aa, synthetic construct
GTQGAIHVY

SEQ ID NO: 3900 - protein, 9 aa, synthetic construct
GTQGAIHVR

SEQ ID NO: 3901 - protein, 9 aa, synthetic construct
GTQGAIHVH

SEQ ID NO: 3902 - protein, 9 aa, synthetic construct
GTQGAIHVK

SEQ ID NO: 3903 - protein, 9 aa, synthetic construct
GTQGAIRVH

SEQ ID NO: 3904 - protein, 9 aa, synthetic construct
GTQGAIKLY

SEQ ID NO: 3905 - protein, 9 aa, synthetic construct
GTQGAGHLY

SEQ ID NO: 3906 - protein, 9 aa, synthetic construct
GTQGAGHLH

SEQ ID NO: 3907 - protein, 9 aa, synthetic construct
GTQGAGHVF

SEQ ID NO: 3908 - protein, 9 aa, synthetic construct
GTQGAGRLF

SEQ ID NO: 3909 - protein, 9 aa, synthetic construct
GTQGAGRVY

SEQ ID NO: 3910 - protein, 9 aa, synthetic construct
GTQGAGKVH

SEQ ID NO: 3911 - protein, 9 aa, synthetic construct
GTQGTVHLY

SEQ ID NO: 3912 - protein, 9 aa, synthetic construct
GTQGTVHLH

SEQ ID NO: 3913 - protein, 9 aa, synthetic construct
GTQGTVHLF

SEQ ID NO: 3914 - protein, 9 aa, synthetic construct
GTQGTVHVY

SEQ ID NO: 3915 - protein, 9 aa, synthetic construct
GTQGTVHVR

SEQ ID NO: 3916 - protein, 9 aa, synthetic construct
GTQGTVHVH

SEQ ID NO: 3917 - protein, 9 aa, synthetic construct
GTQGTVHVK

SEQ ID NO: 3918 - protein, 9 aa, synthetic construct
GTQGTVHVF

SEQ ID NO: 3919 - protein, 9 aa, synthetic construct
GTQGTVRLY

SEQ ID NO: 3920 - protein, 9 aa, synthetic construct
GTQGTVKLY

SEQ ID NO: 3921 - protein, 9 aa, synthetic construct
GTQGTVKVY

SEQ ID NO: 3922 - protein, 9 aa, synthetic construct
GTQGTVKVH

SEQ ID NO: 3923 - protein, 9 aa, synthetic construct
GTQGTLHVY

SEQ ID NO: 3924 - protein, 9 aa, synthetic construct
GTQGTLHVH

SEQ ID NO: 3925 - protein, 9 aa, synthetic construct
GTQGTLKLY

SEQ ID NO: 3926 - protein, 9 aa, synthetic construct
GTQGTLKLH

SEQ ID NO: 3927 - protein, 9 aa, synthetic construct
GTQGTAHLY

SEQ ID NO: 3928 - protein, 9 aa, synthetic construct
GTQGTAHVY

SEQ ID NO: 3929 - protein, 9 aa, synthetic construct
GTQGTARVY

SEQ ID NO: 3930 - protein, 9 aa, synthetic construct
GTQGTAKLY

SEQ ID NO: 3931 - protein, 9 aa, synthetic construct
GTQGTAKVF

SEQ ID NO: 3932 - protein, 9 aa, synthetic construct
GTQGTIHVR

SEQ ID NO: 3933 - protein, 9 aa, synthetic construct
GTQGTIHVK

SEQ ID NO: 3934 - protein, 9 aa, synthetic construct
GTQGTIKLF

SEQ ID NO: 3935 - protein, 9 aa, synthetic construct
GTQGTIKVY

SEQ ID NO: 3936 - protein, 9 aa, synthetic construct
GTQGTGHLY

SEQ ID NO: 3937 - protein, 9 aa, synthetic construct
GTQGTGHVH

SEQ ID NO: 3938 - protein, 9 aa, synthetic construct
GTQGTGHVK

SEQ ID NO: 3939 - protein, 9 aa, synthetic construct
GTQGTGKLY

SEQ ID NO: 3940 - protein, 9 aa, synthetic construct
GTQGTGKLF

SEQ ID NO: 3941 - protein, 9 aa, synthetic construct
GTQGSVHVY

SEQ ID NO: 3942 - protein, 9 aa, synthetic construct
GTQGSVKLY

SEQ ID NO: 3943 - protein, 9 aa, synthetic construct
GTQGSVKVH

SEQ ID NO: 3944 - protein, 9 aa, synthetic construct
GTQGSVKVF

SEQ ID NO: 3945 - protein, 9 aa, synthetic construct
GTQGSLHLH

SEQ ID NO: 3946 - protein, 9 aa, synthetic construct
GTQGSAHVR

SEQ ID NO: 3947 - protein, 9 aa, synthetic construct
PLPGSLHVK

SEQ ID NO: 3948 - protein, 9 aa, synthetic construct
GTQGSAKVF

SEQ ID NO: 3949 - protein, 9 aa, synthetic construct
GTQGSIHVY

SEQ ID NO: 3950 - protein, 9 aa, synthetic construct
GTQGSIHVH

SEQ ID NO: 3951 - protein, 9 aa, synthetic construct
GTQGSIKVY

SEQ ID NO: 3952 - protein, 9 aa, synthetic construct
GTQGSGHLY

SEQ ID NO: 3953 - protein, 9 aa, synthetic construct
GTQGSGRVY

SEQ ID NO: 3954 - protein, 9 aa, synthetic construct
GTQGSGRVF

SEQ ID NO: 3955 - protein, 9 aa, synthetic construct
GTQGSGKLF

SEQ ID NO: 3956 - protein, 9 aa, synthetic construct
GTQGVVKVF

SEQ ID NO: 3957 - protein, 9 aa, synthetic construct
PLPGSLKLY

SEQ ID NO: 3958 - protein, 9 aa, synthetic construct
GTQGVLKLY

SEQ ID NO: 3959 - protein, 9 aa, synthetic construct
GTQGVLKVH

SEQ ID NO: 3960 - protein, 9 aa, synthetic construct
GTQGVIHLK

SEQ ID NO: 3961 - protein, 9 aa, synthetic construct
GTQGVIHVY

SEQ ID NO: 3962 - protein, 9 aa, synthetic construct
GTQGVIHVK

SEQ ID NO: 3963 - protein, 9 aa, synthetic construct
GTQGVIRLF

SEQ ID NO: 3964 - protein, 9 aa, synthetic construct
GTQGVIKVF

SEQ ID NO: 3965 - protein, 9 aa, synthetic construct
GTQGVGHLH

SEQ ID NO: 3966 - protein, 9 aa, synthetic construct
GTQGVGHVY

SEQ ID NO: 3967 - protein, 9 aa, synthetic construct
GTQGVGHVK

SEQ ID NO: 3968 - protein, 9 aa, synthetic construct
GTQGVGHVF

SEQ ID NO: 3969 - protein, 9 aa, synthetic construct
GTQGVGRLH

SEQ ID NO: 3970 - protein, 9 aa, synthetic construct
GTQGVGKLY

SEQ ID NO: 3971 - protein, 9 aa, synthetic construct
GTQGVGKVY

SEQ ID NO: 3972 - protein, 9 aa, synthetic construct
GTQGGVHVY

SEQ ID NO: 3973 - protein, 9 aa, synthetic construct
GTQGGVHVR

SEQ ID NO: 3974 - protein, 9 aa, synthetic construct
GTQGGVHVF

SEQ ID NO: 3975 - protein, 9 aa, synthetic construct
GTQGGVRVH

SEQ ID NO: 3976 - protein, 9 aa, synthetic construct
GTQGGVKLY

SEQ ID NO: 3977 - protein, 9 aa, synthetic construct
GTQGGVKVY

SEQ ID NO: 3978 - protein, 9 aa, synthetic construct
GTQGGVKVH

SEQ ID NO: 3979 - protein, 9 aa, synthetic construct
GTQGGVKVF

SEQ ID NO: 3980 - protein, 9 aa, synthetic construct
GTQGGLHVH

SEQ ID NO: 3981 - protein, 9 aa, synthetic construct
GTQGGAHLY

SEQ ID NO: 3982 - protein, 9 aa, synthetic construct
GTQGGAHLR

SEQ ID NO: 3983 - protein, 9 aa, synthetic construct
GTQGGAHLK

SEQ ID NO: 3984 - protein, 9 aa, synthetic construct
GTQGGAHVY

SEQ ID NO: 3985 - protein, 9 aa, synthetic construct
GTQGGAHVR

SEQ ID NO: 3986 - protein, 9 aa, synthetic construct
GTQGGAHVH

SEQ ID NO: 3987 - protein, 9 aa, synthetic construct
GTQGGAHVK

SEQ ID NO: 3988 - protein, 9 aa, synthetic construct
GTQGGAHVF

SEQ ID NO: 3989 - protein, 9 aa, synthetic construct
GTQGGAKLY

SEQ ID NO: 3990 - protein, 9 aa, synthetic construct
GTQGGAKLF

SEQ ID NO: 3991 - protein, 9 aa, synthetic construct
GTQGGAKVH

SEQ ID NO: 3992 - protein, 9 aa, synthetic construct
GTQGGAKVF

SEQ ID NO: 3993 - protein, 9 aa, synthetic construct
GTQGGIHLY

SEQ ID NO: 3994 - protein, 9 aa, synthetic construct
GTQGGIHLH

SEQ ID NO: 3995 - protein, 9 aa, synthetic construct
GTQGGIHLK

SEQ ID NO: 3996 - protein, 9 aa, synthetic construct
GTQGGIHVY

SEQ ID NO: 3997 - protein, 9 aa, synthetic construct
GTQGGIHVR

SEQ ID NO: 3998 - protein, 9 aa, synthetic construct
GTQGGIHVH

SEQ ID NO: 3999 - protein, 9 aa, synthetic construct
GTQGGIHVK

SEQ ID NO: 4000 - protein, 9 aa, synthetic construct
GTQGGIHVF

SEQ ID NO: 4001 - protein, 9 aa, synthetic construct
GTQGGIRVY

SEQ ID NO: 4002 - protein, 9 aa, synthetic construct
GTQGGIKVR

SEQ ID NO: 4003 - protein, 9 aa, synthetic construct
PLPGSARLH

SEQ ID NO: 4004 - protein, 9 aa, synthetic construct
GTQGGGHVR

SEQ ID NO: 4005 - protein, 9 aa, synthetic construct
GTQGGGRLF

SEQ ID NO: 4006 - protein, 9 aa, synthetic construct
GTQGGGRVY

SEQ ID NO: 4007 - protein, 9 aa, synthetic construct
GTQGGGRVF

SEQ ID NO: 4008 - protein, 9 aa, synthetic construct
PLPGSARVY

SEQ ID NO: 4009 - protein, 9 aa, synthetic construct
GTQAAVHVY

SEQ ID NO: 4010 - protein, 9 aa, synthetic construct
GTQAAVKLY

SEQ ID NO: 4011 - protein, 9 aa, synthetic construct
GTQAAARVH

SEQ ID NO: 4012 - protein, 9 aa, synthetic construct
GTQAAAKVF

SEQ ID NO: 4013 - protein, 9 aa, synthetic construct
GTQAAIHLH

SEQ ID NO: 4014 - protein, 9 aa, synthetic construct
GTQAAIHLK

SEQ ID NO: 4015 - protein, 9 aa, synthetic construct
GTQAAIHVK

SEQ ID NO: 4016 - protein, 9 aa, synthetic construct
GTQAAIRLF

SEQ ID NO: 4017 - protein, 9 aa, synthetic construct
GTQAAIRVR

SEQ ID NO: 4018 - protein, 9 aa, synthetic construct
GTQAAIKVH

SEQ ID NO: 4019 - protein, 9 aa, synthetic construct
GTQAAGHVF

SEQ ID NO: 4020 - protein, 9 aa, synthetic construct
GTQAAGRLH

SEQ ID NO: 4021 - protein, 9 aa, synthetic construct
GTQAAGRVH

SEQ ID NO: 4022 - protein, 9 aa, synthetic construct
GTQATVHLR

SEQ ID NO: 4023 - protein, 9 aa, synthetic construct
GTQATVHVY

SEQ ID NO: 4024 - protein, 9 aa, synthetic construct
GTQATVKVF

SEQ ID NO: 4025 - protein, 9 aa, synthetic construct
GTQATLRLF

SEQ ID NO: 4026 - protein, 9 aa, synthetic construct
GTQATARLF

SEQ ID NO: 4027 - protein, 9 aa, synthetic construct
GTQATARVF

SEQ ID NO: 4028 - protein, 9 aa, synthetic construct
GTQATIHVR

SEQ ID NO: 4029 - protein, 9 aa, synthetic construct
GTQATGHLK

SEQ ID NO: 4030 - protein, 9 aa, synthetic construct
GTQATGHVH

SEQ ID NO: 4031 - protein, 9 aa, synthetic construct
GTQATGRLF

SEQ ID NO: 4032 - protein, 9 aa, synthetic construct
GTQATGKLH

SEQ ID NO: 4033 - protein, 9 aa, synthetic construct
PLPGSIRVH

SEQ ID NO: 4034 - protein, 9 aa, synthetic construct
GTQASVKVH

SEQ ID NO: 4035 - protein, 9 aa, synthetic construct
GTQASVKVF

SEQ ID NO: 4036 - protein, 9 aa, synthetic construct
GTQASLKVY

SEQ ID NO: 4037 - protein, 9 aa, synthetic construct
GTQASIHLH

SEQ ID NO: 4038 - protein, 9 aa, synthetic construct
GTQASIHVY

SEQ ID NO: 4039 - protein, 9 aa, synthetic construct
GTQASIKLY

SEQ ID NO: 4040 - protein, 9 aa, synthetic construct
GTQASGHLY

SEQ ID NO: 4041 - protein, 9 aa, synthetic construct
GTQAVVHVF

SEQ ID NO: 4042 - protein, 9 aa, synthetic construct
PLPGSGHLH

SEQ ID NO: 4043 - protein, 9 aa, synthetic construct
GTQAVAKLF

SEQ ID NO: 4044 - protein, 9 aa, synthetic construct
GTQAVGRLF

SEQ ID NO: 4045 - protein, 9 aa, synthetic construct
GTQAGVHVF

SEQ ID NO: 4046 - protein, 9 aa, synthetic construct
PLPGSGKLY

SEQ ID NO: 4047 - protein, 9 aa, synthetic construct
GTQAGAHLF

SEQ ID NO: 4048 - protein, 9 aa, synthetic construct
GTQAGAHVR

SEQ ID NO: 4049 - protein, 9 aa, synthetic construct
GTQAGIHLY

SEQ ID NO: 4050 - protein, 9 aa, synthetic construct
GTQAGIHLH

SEQ ID NO: 4051 - protein, 9 aa, synthetic construct
GTQAGIHLK

SEQ ID NO: 4052 - protein, 9 aa, synthetic construct
GTQAGIHVY

SEQ ID NO: 4053 - protein, 9 aa, synthetic construct
GTQAGIHVR

SEQ ID NO: 4054 - protein, 9 aa, synthetic construct
GTQAGIHVH

SEQ ID NO: 4055 - protein, 9 aa, synthetic construct
GTQAGIHVK

SEQ ID NO: 4056 - protein, 9 aa, synthetic construct
GTQAGIKVR

SEQ ID NO: 4057 - protein, 9 aa, synthetic construct
GTQAGGHLY

SEQ ID NO: 4058 - protein, 9 aa, synthetic construct
GTQAGGHVH

SEQ ID NO: 4059 - protein, 9 aa, synthetic construct
PLPGSGKVF

SEQ ID NO: 4060 - protein, 9 aa, synthetic construct
GTQAGGKLF

SEQ ID NO: 4061 - protein, 9 aa, synthetic construct
GTQAGGKVH

SEQ ID NO: 4062 - protein, 9 aa, synthetic construct
GTPGAVHLY

SEQ ID NO: 4063 - protein, 9 aa, synthetic construct
GTPGAVHVH

SEQ ID NO: 4064 - protein, 9 aa, synthetic construct
PLPGVVHLH

SEQ ID NO: 4065 - protein, 9 aa, synthetic construct
GTPGAVKVF

SEQ ID NO: 4066 - protein, 9 aa, synthetic construct
GTPGALRVF

SEQ ID NO: 4067 - protein, 9 aa, synthetic construct
GTPGAAHLY

SEQ ID NO: 4068 - protein, 9 aa, synthetic construct
GTPGAAHLH

SEQ ID NO: 4069 - protein, 9 aa, synthetic construct
GTPGAAHLK

SEQ ID NO: 4070 - protein, 9 aa, synthetic construct
GTPGAAHVR

SEQ ID NO: 4071 - protein, 9 aa, synthetic construct
GTPGAAHVH

SEQ ID NO: 4072 - protein, 9 aa, synthetic construct
GTPGAAHVF

SEQ ID NO: 4073 - protein, 9 aa, synthetic construct
GTPGAAKVF

SEQ ID NO: 4074 - protein, 9 aa, synthetic construct
GTPGAIHLR

SEQ ID NO: 4075 - protein, 9 aa, synthetic construct
GTPGAIHLK

SEQ ID NO: 4076 - protein, 9 aa, synthetic construct
GTPGAIHVK

SEQ ID NO: 4077 - protein, 9 aa, synthetic construct
GTPGAIRVR

SEQ ID NO: 4078 - protein, 9 aa, synthetic construct
GTPGAIKLY

SEQ ID NO: 4079 - protein, 9 aa, synthetic construct
GTPGAIKLH

SEQ ID NO: 4080 - protein, 9 aa, synthetic construct
GTPGAIKVY

SEQ ID NO: 4081 - protein, 9 aa, synthetic construct
GTPGAGHLY

SEQ ID NO: 4082 - protein, 9 aa, synthetic construct
GTPGAGHLH

SEQ ID NO: 4083 - protein, 9 aa, synthetic construct
GTPGAGHLK

SEQ ID NO: 4084 - protein, 9 aa, synthetic construct
GTPGAGHLF

SEQ ID NO: 4085 - protein, 9 aa, synthetic construct
GTPGAGHVY

SEQ ID NO: 4086 - protein, 9 aa, synthetic construct
GTPGAGHVR

SEQ ID NO: 4087 - protein, 9 aa, synthetic construct
GTPGAGHVH

SEQ ID NO: 4088 - protein, 9 aa, synthetic construct
GTPGAGHVK

SEQ ID NO: 4089 - protein, 9 aa, synthetic construct
GTPGAGHVF

SEQ ID NO: 4090 - protein, 9 aa, synthetic construct
GTPGAGRLY

SEQ ID NO: 4091 - protein, 9 aa, synthetic construct
PLPGVVRLF

SEQ ID NO: 4092 - protein, 9 aa, synthetic construct
GTPGAGKLY

SEQ ID NO: 4093 - protein, 9 aa, synthetic construct
GTPGAGKLH

SEQ ID NO: 4094 - protein, 9 aa, synthetic construct
GTPGAGKLF

SEQ ID NO: 4095 - protein, 9 aa, synthetic construct
GTPGTVHLY

SEQ ID NO: 4096 - protein, 9 aa, synthetic construct
GTPGTVKVY

SEQ ID NO: 4097 - protein, 9 aa, synthetic construct
GTPGTLHVY

SEQ ID NO: 4098 - protein, 9 aa, synthetic construct
GTPGTLHVH

SEQ ID NO: 4099 - protein, 9 aa, synthetic construct
GTPGTAHVR

SEQ ID NO: 4100 - protein, 9 aa, synthetic construct
GTPGTAKVF

SEQ ID NO: 4101 - protein, 9 aa, synthetic construct
GTPGTIHVH

SEQ ID NO: 4102 - protein, 9 aa, synthetic construct
GTPGTGHLY

SEQ ID NO: 4103 - protein, 9 aa, synthetic construct
GTPGTGHLK

SEQ ID NO: 4104 - protein, 9 aa, synthetic construct
GTPGTGHVH

SEQ ID NO: 4105 - protein, 9 aa, synthetic construct
GTPGTGHVF

SEQ ID NO: 4106 - protein, 9 aa, synthetic construct
GTPGTGKLY

SEQ ID NO: 4107 - protein, 9 aa, synthetic construct
GTPGTGKLF

SEQ ID NO: 4108 - protein, 9 aa, synthetic construct
GTPGTGKVF

SEQ ID NO: 4109 - protein, 9 aa, synthetic construct
GTPGSVKLF

SEQ ID NO: 4110 - protein, 9 aa, synthetic construct
GTPGSVKVY

SEQ ID NO: 4111 - protein, 9 aa, synthetic construct
GTPGSVKVF

SEQ ID NO: 4112 - protein, 9 aa, synthetic construct
GTPGSAHLY

SEQ ID NO: 4113 - protein, 9 aa, synthetic construct
GTPGSAHLK

SEQ ID NO: 4114 - protein, 9 aa, synthetic construct
GTPGSAHVH

SEQ ID NO: 4115 - protein, 9 aa, synthetic construct
GTPGSARLY

SEQ ID NO: 4116 - protein, 9 aa, synthetic construct
GTPGSAKVF

SEQ ID NO: 4117 - protein, 9 aa, synthetic construct
GTPGSIHLH

SEQ ID NO: 4118 - protein, 9 aa, synthetic construct
GTPGSIRVY

SEQ ID NO: 4119 - protein, 9 aa, synthetic construct
GTPGSIRVR

SEQ ID NO: 4120 - protein, 9 aa, synthetic construct
GTPGSGHLY

SEQ ID NO: 4121 - protein, 9 aa, synthetic construct
GTPGSGHLH

SEQ ID NO: 4122 - protein, 9 aa, synthetic construct
GTPGSGHVH

SEQ ID NO: 4123 - protein, 9 aa, synthetic construct
GTPGSGRLY

SEQ ID NO: 4124 - protein, 9 aa, synthetic construct
GTPGSGRVH

SEQ ID NO: 4125 - protein, 9 aa, synthetic construct
GTPGSGRVF

SEQ ID NO: 4126 - protein, 9 aa, synthetic construct
GTPGSGKLY

SEQ ID NO: 4127 - protein, 9 aa, synthetic construct
GTPGSGKLF

SEQ ID NO: 4128 - protein, 9 aa, synthetic construct
GTPGSGKVY

SEQ ID NO: 4129 - protein, 9 aa, synthetic construct
GTPGSGKVR

SEQ ID NO: 4130 - protein, 9 aa, synthetic construct
GTPGSGKVH

SEQ ID NO: 4131 - protein, 9 aa, synthetic construct
GTPGSGKVF

SEQ ID NO: 4132 - protein, 9 aa, synthetic construct
GTPGVVHLK

SEQ ID NO: 4133 - protein, 9 aa, synthetic construct
GTPGVVHVH

SEQ ID NO: 4134 - protein, 9 aa, synthetic construct
GTPGVVRLR

SEQ ID NO: 4135 - protein, 9 aa, synthetic construct
GTPGVVRVH

SEQ ID NO: 4136 - protein, 9 aa, synthetic construct
GTPGVAKLY

SEQ ID NO: 4137 - protein, 9 aa, synthetic construct
GTPGVIHLY

SEQ ID NO: 4138 - protein, 9 aa, synthetic construct
GTPGVIHLR

SEQ ID NO: 4139 - protein, 9 aa, synthetic construct
GTPGVIHLH

SEQ ID NO: 4140 - protein, 9 aa, synthetic construct
GTPGVIHLK

SEQ ID NO: 4141 - protein, 9 aa, synthetic construct
GTPGVIHVY

SEQ ID NO: 4142 - protein, 9 aa, synthetic construct
GTPGVIHVR

SEQ ID NO: 4143 - protein, 9 aa, synthetic construct
GTPGVIHVH

SEQ ID NO: 4144 - protein, 9 aa, synthetic construct
GTPGVIHVK

SEQ ID NO: 4145 - protein, 9 aa, synthetic construct
GTPGVIHVF

SEQ ID NO: 4146 - protein, 9 aa, synthetic construct
GTPGVIKVH

SEQ ID NO: 4147 - protein, 9 aa, synthetic construct
GTPGVGKVY

SEQ ID NO: 4148 - protein, 9 aa, synthetic construct
GTPGVGKVH

SEQ ID NO: 4149 - protein, 9 aa, synthetic construct
GTPGGVHVK

SEQ ID NO: 4150 - protein, 9 aa, synthetic construct
GTPGGVHVF

SEQ ID NO: 4151 - protein, 9 aa, synthetic construct
GTPGGVKLY

SEQ ID NO: 4152 - protein, 9 aa, synthetic construct
GTPGGVKVY

SEQ ID NO: 4153 - protein, 9 aa, synthetic construct
GTPGGLHVK

SEQ ID NO: 4154 - protein, 9 aa, synthetic construct
GTPGGIHVY

SEQ ID NO: 4155 - protein, 9 aa, synthetic construct
GTPGGIHVH

SEQ ID NO: 4156 - protein, 9 aa, synthetic construct
GTPGGIHVK

SEQ ID NO: 4157 - protein, 9 aa, synthetic construct
GTPGGIKLH

SEQ ID NO: 4158 - protein, 9 aa, synthetic construct
GTPGGGHLY

SEQ ID NO: 4159 - protein, 9 aa, synthetic construct
GTPGGGHLH

SEQ ID NO: 4160 - protein, 9 aa, synthetic construct
GTPGGGHVF

SEQ ID NO: 4161 - protein, 9 aa, synthetic construct
GTPGGGRLY

SEQ ID NO: 4162 - protein, 9 aa, synthetic construct
GTPGGGRLF

SEQ ID NO: 4163 - protein, 9 aa, synthetic construct
GTPGGGKLF

SEQ ID NO: 4164 - protein, 9 aa, synthetic construct
GTPGGGKVH

SEQ ID NO: 4165 - protein, 9 aa, synthetic construct
GTPGGGKVF

SEQ ID NO: 4166 - protein, 9 aa, synthetic construct
GTPAAVHLH

SEQ ID NO: 4167 - protein, 9 aa, synthetic construct
GTPAAVHVR

SEQ ID NO: 4168 - protein, 9 aa, synthetic construct
GTPAAVHVH

SEQ ID NO: 4169 - protein, 9 aa, synthetic construct
GTPAAVRLY

SEQ ID NO: 4170 - protein, 9 aa, synthetic construct
GTPAAVKLF

SEQ ID NO: 4171 - protein, 9 aa, synthetic construct
GTPAALRVF

SEQ ID NO: 4172 - protein, 9 aa, synthetic construct
GTPAALKVK

SEQ ID NO: 4173 - protein, 9 aa, synthetic construct
GTPAAARVH

SEQ ID NO: 4174 - protein, 9 aa, synthetic construct
GTPAAAKVF

SEQ ID NO: 4175 - protein, 9 aa, synthetic construct
GTPAAIHVK

SEQ ID NO: 4176 - protein, 9 aa, synthetic construct
GTPAAIHVF

SEQ ID NO: 4177 - protein, 9 aa, synthetic construct
GTPAAGHLH

SEQ ID NO: 4178 - protein, 9 aa, synthetic construct
GTPAAGHVH

SEQ ID NO: 4179 - protein, 9 aa, synthetic construct
GTPAAGHVF

SEQ ID NO: 4180 - protein, 9 aa, synthetic construct
GTPAAGRVY

SEQ ID NO: 4181 - protein, 9 aa, synthetic construct
GTPAAGRVH

SEQ ID NO: 4182 - protein, 9 aa, synthetic construct
GTPAAGKVY

SEQ ID NO: 4183 - protein, 9 aa, synthetic construct
GTPAAGKVF

SEQ ID NO: 4184 - protein, 9 aa, synthetic construct
GTPATVHLK

SEQ ID NO: 4185 - protein, 9 aa, synthetic construct
GTPATVHVY

SEQ ID NO: 4186 - protein, 9 aa, synthetic construct
GTPATVRLY

SEQ ID NO: 4187 - protein, 9 aa, synthetic construct
GTPATVRLF

SEQ ID NO: 4188 - protein, 9 aa, synthetic construct
GTPATVRVH

SEQ ID NO: 4189 - protein, 9 aa, synthetic construct
GTPATVKVY

SEQ ID NO: 4190 - protein, 9 aa, synthetic construct
GTPATVKVF

SEQ ID NO: 4191 - protein, 9 aa, synthetic construct
GTPATLRLR

SEQ ID NO: 4192 - protein, 9 aa, synthetic construct
GTPATLRLH

SEQ ID NO: 4193 - protein, 9 aa, synthetic construct
PLPGVIHVY

SEQ ID NO: 4194 - protein, 9 aa, synthetic construct
GTPATLKLY

SEQ ID NO: 4195 - protein, 9 aa, synthetic construct
GTPATAHLY

SEQ ID NO: 4196 - protein, 9 aa, synthetic construct
GTPATAHVH

SEQ ID NO: 4197 - protein, 9 aa, synthetic construct
GTPATAHVF

SEQ ID NO: 4198 - protein, 9 aa, synthetic construct
GTPATAKVF

SEQ ID NO: 4199 - protein, 9 aa, synthetic construct
GTPATIHVH

SEQ ID NO: 4200 - protein, 9 aa, synthetic construct
GTPATIHVK

SEQ ID NO: 4201 - protein, 9 aa, synthetic construct
GTPATIRVY

SEQ ID NO: 4202 - protein, 9 aa, synthetic construct
GTPATIRVH

SEQ ID NO: 4203 - protein, 9 aa, synthetic construct
GTPATIKLY

SEQ ID NO: 4204 - protein, 9 aa, synthetic construct
GTPATIKVY

SEQ ID NO: 4205 - protein, 9 aa, synthetic construct
GTPATGHLY

SEQ ID NO: 4206 - protein, 9 aa, synthetic construct
GTPATGHLH

SEQ ID NO: 4207 - protein, 9 aa, synthetic construct
GTPATGHVY

SEQ ID NO: 4208 - protein, 9 aa, synthetic construct
GTPATGHVR

SEQ ID NO: 4209 - protein, 9 aa, synthetic construct
GTPATGHVH

SEQ ID NO: 4210 - protein, 9 aa, synthetic construct
GTPATGHVK

SEQ ID NO: 4211 - protein, 9 aa, synthetic construct
GTPATGHVF

SEQ ID NO: 4212 - protein, 9 aa, synthetic construct
GTPATGRVR

SEQ ID NO: 4213 - protein, 9 aa, synthetic construct
GTPATGRVH

SEQ ID NO: 4214 - protein, 9 aa, synthetic construct
GTPATGRVK

SEQ ID NO: 4215 - protein, 9 aa, synthetic construct
GTPATGRVF

SEQ ID NO: 4216 - protein, 9 aa, synthetic construct
GTPATGKLY

SEQ ID NO: 4217 - protein, 9 aa, synthetic construct
GTPASVKLF

SEQ ID NO: 4218 - protein, 9 aa, synthetic construct
GTPASLHVR

SEQ ID NO: 4219 - protein, 9 aa, synthetic construct
GTPASAHVH

SEQ ID NO: 4220 - protein, 9 aa, synthetic construct
GTPASARVY

SEQ ID NO: 4221 - protein, 9 aa, synthetic construct
GTPASAKLH

SEQ ID NO: 4222 - protein, 9 aa, synthetic construct
GTPASAKVH

SEQ ID NO: 4223 - protein, 9 aa, synthetic construct
PLPGVIKVH

SEQ ID NO: 4224 - protein, 9 aa, synthetic construct
GTPASGHLY

SEQ ID NO: 4225 - protein, 9 aa, synthetic construct
GTPASGHVH

SEQ ID NO: 4226 - protein, 9 aa, synthetic construct
GTPASGKLY

SEQ ID NO: 4227 - protein, 9 aa, synthetic construct
GTPASGKLH

SEQ ID NO: 4228 - protein, 9 aa, synthetic construct
GTPASGKVF

SEQ ID NO: 4229 - protein, 9 aa, synthetic construct
GTPAVVKLF

SEQ ID NO: 4230 - protein, 9 aa, synthetic construct
GTPAVLHVY

SEQ ID NO: 4231 - protein, 9 aa, synthetic construct
GTPAVLHVH

SEQ ID NO: 4232 - protein, 9 aa, synthetic construct
GTPAVLRVH

SEQ ID NO: 4233 - protein, 9 aa, synthetic construct
GTPAVLKLH

SEQ ID NO: 4234 - protein, 9 aa, synthetic construct
GTPAVAHLR

SEQ ID NO: 4235 - protein, 9 aa, synthetic construct
GTPAVIHVY

SEQ ID NO: 4236 - protein, 9 aa, synthetic construct
GTPAVIHVK

SEQ ID NO: 4237 - protein, 9 aa, synthetic construct
GTPAVIRLK

SEQ ID NO: 4238 - protein, 9 aa, synthetic construct
GTPAVGHLH

SEQ ID NO: 4239 - protein, 9 aa, synthetic construct
GTPAVGKLY

SEQ ID NO: 4240 - protein, 9 aa, synthetic construct
GTPAVGKVY

SEQ ID NO: 4241 - protein, 9 aa, synthetic construct
GTPAVGKVF

SEQ ID NO: 4242 - protein, 9 aa, synthetic construct
GTPAGVKVH

SEQ ID NO: 4243 - protein, 9 aa, synthetic construct
GTPAGAHVF

SEQ ID NO: 4244 - protein, 9 aa, synthetic construct
GTPAGARLH

SEQ ID NO: 4245 - protein, 9 aa, synthetic construct
GTPAGAKVH

SEQ ID NO: 4246 - protein, 9 aa, synthetic construct
PLPGVGKLF

SEQ ID NO: 4247 - protein, 9 aa, synthetic construct
PLPGVGKVY

SEQ ID NO: 4248 - protein, 9 aa, synthetic construct
GTPAGIKVR

SEQ ID NO: 4249 - protein, 9 aa, synthetic construct
GTPAGGHLY

SEQ ID NO: 4250 - protein, 9 aa, synthetic construct
GTPAGGRLF

SEQ ID NO: 4251 - protein, 9 aa, synthetic construct
GTPAGGKLY

SEQ ID NO: 4252 - protein, 9 aa, synthetic construct
GTPAGGKVF

SEQ ID NO: 4253 - protein, 9 aa, synthetic construct
PLNGSAHLY

SEQ ID NO: 4254 - protein, 9 aa, synthetic construct
GSNGAVHLR

SEQ ID NO: 4255 - protein, 9 aa, synthetic construct
GSNGAVHVK

SEQ ID NO: 4256 - protein, 9 aa, synthetic construct
GSNGAVHVF

SEQ ID NO: 4257 - protein, 9 aa, synthetic construct
GSNGAVRVF

SEQ ID NO: 4258 - protein, 9 aa, synthetic construct
GSNGAVKLH

SEQ ID NO: 4259 - protein, 9 aa, synthetic construct
GSNGALHLR

SEQ ID NO: 4260 - protein, 9 aa, synthetic construct
GSNGALRVH

SEQ ID NO: 4261 - protein, 9 aa, synthetic construct
GSNGALRVF

SEQ ID NO: 4262 - protein, 9 aa, synthetic construct
PLPGGVHVY

SEQ ID NO: 4263 - protein, 9 aa, synthetic construct
GSNGALKLH

SEQ ID NO: 4264 - protein, 9 aa, synthetic construct
GSNGALKVY

SEQ ID NO: 4265 - protein, 9 aa, synthetic construct
PLPGGVHVR

SEQ ID NO: 4266 - protein, 9 aa, synthetic construct
GSNGAAHLH

SEQ ID NO: 4267 - protein, 9 aa, synthetic construct
GSNGAAHLK

SEQ ID NO: 4268 - protein, 9 aa, synthetic construct
GSNGAAHLF

SEQ ID NO: 4269 - protein, 9 aa, synthetic construct
GSNGAAHVF

SEQ ID NO: 4270 - protein, 9 aa, synthetic construct
GSNGAARLF

SEQ ID NO: 4271 - protein, 9 aa, synthetic construct
GSNGAARVY

SEQ ID NO: 4272 - protein, 9 aa, synthetic construct
GSNGAARVH

SEQ ID NO: 4273 - protein, 9 aa, synthetic construct
PLPGGVHVK

SEQ ID NO: 4274 - protein, 9 aa, synthetic construct
GSNGAAKLH

SEQ ID NO: 4275 - protein, 9 aa, synthetic construct
GSNGAAKVF

SEQ ID NO: 4276 - protein, 9 aa, synthetic construct
GSNGAIHLY

SEQ ID NO: 4277 - protein, 9 aa, synthetic construct
GSNGAIHLR

SEQ ID NO: 4278 - protein, 9 aa, synthetic construct
GSNGAIHVK

SEQ ID NO: 4279 - protein, 9 aa, synthetic construct
GSNGAIHVF

SEQ ID NO: 4280 - protein, 9 aa, synthetic construct
GSNGAIRLH

SEQ ID NO: 4281 - protein, 9 aa, synthetic construct
GSNGAIKLH

SEQ ID NO: 4282 - protein, 9 aa, synthetic construct
GSNGAGHVF

SEQ ID NO: 4283 - protein, 9 aa, synthetic construct
GSNGAGRLF

SEQ ID NO: 4284 - protein, 9 aa, synthetic construct
GSNGAGRVH

SEQ ID NO: 4285 - protein, 9 aa, synthetic construct
PLPGGVRLF

SEQ ID NO: 4286 - protein, 9 aa, synthetic construct
GSNGAGKLH

SEQ ID NO: 4287 - protein, 9 aa, synthetic construct
GSNGAGKVF

SEQ ID NO: 4288 - protein, 9 aa, synthetic construct
GSNGTVHLY

SEQ ID NO: 4289 - protein, 9 aa, synthetic construct
GSNGTVHVH

SEQ ID NO: 4290 - protein, 9 aa, synthetic construct
PLPGGVRVH

SEQ ID NO: 4291 - protein, 9 aa, synthetic construct
GSNGTVKLF

SEQ ID NO: 4292 - protein, 9 aa, synthetic construct
GSNGTLHVY

SEQ ID NO: 4293 - protein, 9 aa, synthetic construct
PLNGSAHLH

SEQ ID NO: 4294 - protein, 9 aa, synthetic construct
GSNGTLKLF

SEQ ID NO: 4295 - protein, 9 aa, synthetic construct
GSNGTLKVK

SEQ ID NO: 4296 - protein, 9 aa, synthetic construct
GSNGTAHVR

SEQ ID NO: 4297 - protein, 9 aa, synthetic construct
GSNGTAHVK

SEQ ID NO: 4298 - protein, 9 aa, synthetic construct
GSNGTAKLY

SEQ ID NO: 4299 - protein, 9 aa, synthetic construct
GSNGTAKVK

SEQ ID NO: 4300 - protein, 9 aa, synthetic construct
PLPGGVKLF

SEQ ID NO: 4301 - protein, 9 aa, synthetic construct
GSNGTIHVK

SEQ ID NO: 4302 - protein, 9 aa, synthetic construct
PLPGGVKVY

SEQ ID NO: 4303 - protein, 9 aa, synthetic construct
GSNGTGHVK

SEQ ID NO: 4304 - protein, 9 aa, synthetic construct
PLPGGVKVF

SEQ ID NO: 4305 - protein, 9 aa, synthetic construct
PLNGSAHLK

SEQ ID NO: 4306 - protein, 9 aa, synthetic construct
GSNGSVHLF

SEQ ID NO: 4307 - protein, 9 aa, synthetic construct
GSNGSVRLH

SEQ ID NO: 4308 - protein, 9 aa, synthetic construct
GSNGSVRLF

SEQ ID NO: 4309 - protein, 9 aa, synthetic construct
GSNGSVRVH

SEQ ID NO: 4310 - protein, 9 aa, synthetic construct
GSNGSVKVK

SEQ ID NO: 4311 - protein, 9 aa, synthetic construct
GSNGSVKVF

SEQ ID NO: 4312 - protein, 9 aa, synthetic construct
GSNGSLHVH

SEQ ID NO: 4313 - protein, 9 aa, synthetic construct
GSNGSLKLF

SEQ ID NO: 4314 - protein, 9 aa, synthetic construct
GSNGSAHVF

SEQ ID NO: 4315 - protein, 9 aa, synthetic construct
GSNGSAKLF

SEQ ID NO: 4316 - protein, 9 aa, synthetic construct
GSNGSAKVY

SEQ ID NO: 4317 - protein, 9 aa, synthetic construct
GSNGSIHLR

SEQ ID NO: 4318 - protein, 9 aa, synthetic construct
GSNGSIHLK

SEQ ID NO: 4319 - protein, 9 aa, synthetic construct
GSNGSIHVY

SEQ ID NO: 4320 - protein, 9 aa, synthetic construct
GSNGSIHVR

SEQ ID NO: 4321 - protein, 9 aa, synthetic construct
PLNGSAHLF

SEQ ID NO: 4322 - protein, 9 aa, synthetic construct
GSNGSIKLY

SEQ ID NO: 4323 - protein, 9 aa, synthetic construct
GSNGSIKLH

SEQ ID NO: 4324 - protein, 9 aa, synthetic construct
GSNGSIKLF

SEQ ID NO: 4325 - protein, 9 aa, synthetic construct
GSNGSGHVH

SEQ ID NO: 4326 - protein, 9 aa, synthetic construct
GSNGSGKLY

SEQ ID NO: 4327 - protein, 9 aa, synthetic construct
GSNGSGKLR

SEQ ID NO: 4328 - protein, 9 aa, synthetic construct
GSNGVVHVH

SEQ ID NO: 4329 - protein, 9 aa, synthetic construct
GSNGVVRVF

SEQ ID NO: 4330 - protein, 9 aa, synthetic construct
GSNGVLHVK

SEQ ID NO: 4331 - protein, 9 aa, synthetic construct
GSNGVLRVF

SEQ ID NO: 4332 - protein, 9 aa, synthetic construct
PLNGSAHVY

SEQ ID NO: 4333 - protein, 9 aa, synthetic construct
GSNGVAHLY

SEQ ID NO: 4334 - protein, 9 aa, synthetic construct
GSNGVAHVY

SEQ ID NO: 4335 - protein, 9 aa, synthetic construct
GSNGVAHVH

SEQ ID NO: 4336 - protein, 9 aa, synthetic construct
GSNGVAHVK

SEQ ID NO: 4337 - protein, 9 aa, synthetic construct
GSNGVARVR

SEQ ID NO: 4338 - protein, 9 aa, synthetic construct
GSNGVIHVH

SEQ ID NO: 4339 - protein, 9 aa, synthetic construct
GSNGVIRLH

SEQ ID NO: 4340 - protein, 9 aa, synthetic construct
GSNGVIRVH

SEQ ID NO: 4341 - protein, 9 aa, synthetic construct
GSNGVIRVK

SEQ ID NO: 4342 - protein, 9 aa, synthetic construct
GSNGVIKLH

SEQ ID NO: 4343 - protein, 9 aa, synthetic construct
GSNGVGRVY

SEQ ID NO: 4344 - protein, 9 aa, synthetic construct
GSNGVGKVH

SEQ ID NO: 4345 - protein, 9 aa, synthetic construct
GSNGVGKVF

SEQ ID NO: 4346 - protein, 9 aa, synthetic construct
PLNGSAHVR

SEQ ID NO: 4347 - protein, 9 aa, synthetic construct
GSNGGVHLY

SEQ ID NO: 4348 - protein, 9 aa, synthetic construct
GSNGGVHLK

SEQ ID NO: 4349 - protein, 9 aa, synthetic construct
GSNGGVHVK

SEQ ID NO: 4350 - protein, 9 aa, synthetic construct
GSNGGVHVF

SEQ ID NO: 4351 - protein, 9 aa, synthetic construct
GSNGGVRLY

SEQ ID NO: 4352 - protein, 9 aa, synthetic construct
GSNGGVRLF

SEQ ID NO: 4353 - protein, 9 aa, synthetic construct
GSNGGVRVF

SEQ ID NO: 4354 - protein, 9 aa, synthetic construct
GSNGGVKLY

SEQ ID NO: 4355 - protein, 9 aa, synthetic construct
GSNGGVKLF

SEQ ID NO: 4356 - protein, 9 aa, synthetic construct
GSNGGLKVY

SEQ ID NO: 4357 - protein, 9 aa, synthetic construct
PLNGSAHVH

SEQ ID NO: 4358 - protein, 9 aa, synthetic construct
GSNGGGRLY

SEQ ID NO: 4359 - protein, 9 aa, synthetic construct
GSNGGGKLF

SEQ ID NO: 4360 - protein, 9 aa, synthetic construct
GSNGGGKVY

SEQ ID NO: 4361 - protein, 9 aa, synthetic construct
GSNAAVHLY

SEQ ID NO: 4362 - protein, 9 aa, synthetic construct
GSNAAVHLR

SEQ ID NO: 4363 - protein, 9 aa, synthetic construct
GSNAAVHVR

SEQ ID NO: 4364 - protein, 9 aa, synthetic construct
GSNAAVHVH

SEQ ID NO: 4365 - protein, 9 aa, synthetic construct
GSNAAVKLY

SEQ ID NO: 4366 - protein, 9 aa, synthetic construct
GSNAAVKLH

SEQ ID NO: 4367 - protein, 9 aa, synthetic construct
GSNAAVKVY

SEQ ID NO: 4368 - protein, 9 aa, synthetic construct
GSNAALHLY

SEQ ID NO: 4369 - protein, 9 aa, synthetic construct
GSNAALHLR

SEQ ID NO: 4370 - protein, 9 aa, synthetic construct
GSNAALHLK

SEQ ID NO: 4371 - protein, 9 aa, synthetic construct
GSNAALHVR

SEQ ID NO: 4372 - protein, 9 aa, synthetic construct
GSNAALHVH

SEQ ID NO: 4373 - protein, 9 aa, synthetic construct
GSNAALRVF

SEQ ID NO: 4374 - protein, 9 aa, synthetic construct
PLNGSAHVK

SEQ ID NO: 4375 - protein, 9 aa, synthetic construct
GSNAALKLH

SEQ ID NO: 4376 - protein, 9 aa, synthetic construct
GSNAALKVY

SEQ ID NO: 4377 - protein, 9 aa, synthetic construct
GSNAALKVF

SEQ ID NO: 4378 - protein, 9 aa, synthetic construct
GSNAAAHVY

SEQ ID NO: 4379 - protein, 9 aa, synthetic construct
GSNAAAHVH

SEQ ID NO: 4380 - protein, 9 aa, synthetic construct
GSNAAAHVF

SEQ ID NO: 4381 - protein, 9 aa, synthetic construct
GSNAAARVH

SEQ ID NO: 4382 - protein, 9 aa, synthetic construct
GSNAAAKLY

SEQ ID NO: 4383 - protein, 9 aa, synthetic construct
GSNAAAKVY

SEQ ID NO: 4384 - protein, 9 aa, synthetic construct
PLPGGAKLF

SEQ ID NO: 4385 - protein, 9 aa, synthetic construct
GSNAAIHLY

SEQ ID NO: 4386 - protein, 9 aa, synthetic construct
GSNAAIHVR

SEQ ID NO: 4387 - protein, 9 aa, synthetic construct
PLPGGAKVY

SEQ ID NO: 4388 - protein, 9 aa, synthetic construct
GSNAAIRLF

SEQ ID NO: 4389 - protein, 9 aa, synthetic construct
GSNAAIKLH

SEQ ID NO: 4390 - protein, 9 aa, synthetic construct
GSNAAIKLF

SEQ ID NO: 4391 - protein, 9 aa, synthetic construct
GSNAAGHLY

SEQ ID NO: 4392 - protein, 9 aa, synthetic construct
GSNAAGHLH

SEQ ID NO: 4393 - protein, 9 aa, synthetic construct
GSNAAGHLK

SEQ ID NO: 4394 - protein, 9 aa, synthetic construct
GSNAAGHLF

SEQ ID NO: 4395 - protein, 9 aa, synthetic construct
GSNAAGHVY

SEQ ID NO: 4396 - protein, 9 aa, synthetic construct
GSNAAGHVR

SEQ ID NO: 4397 - protein, 9 aa, synthetic construct
GSNAAGHVH

SEQ ID NO: 4398 - protein, 9 aa, synthetic construct
GSNAAGHVK

SEQ ID NO: 4399 - protein, 9 aa, synthetic construct
GSNAAGHVF

SEQ ID NO: 4400 - protein, 9 aa, synthetic construct
GSNAAGRLF

SEQ ID NO: 4401 - protein, 9 aa, synthetic construct
GSNAAGRVH

SEQ ID NO: 4402 - protein, 9 aa, synthetic construct
GSNAAGRVF

SEQ ID NO: 4403 - protein, 9 aa, synthetic construct
GSNAAGKLH

SEQ ID NO: 4404 - protein, 9 aa, synthetic construct
GSNAAGKLF

SEQ ID NO: 4405 - protein, 9 aa, synthetic construct
PLNGSAHVF

SEQ ID NO: 4406 - protein, 9 aa, synthetic construct
GSNATVHLR

SEQ ID NO: 4407 - protein, 9 aa, synthetic construct
GSNATVHLH

SEQ ID NO: 4408 - protein, 9 aa, synthetic construct
GSNATVHVY

SEQ ID NO: 4409 - protein, 9 aa, synthetic construct
GSNATVHVR

SEQ ID NO: 4410 - protein, 9 aa, synthetic construct
GSNATVHVH

SEQ ID NO: 4411 - protein, 9 aa, synthetic construct
GSNATVHVK

SEQ ID NO: 4412 - protein, 9 aa, synthetic construct
GSNATVHVF

SEQ ID NO: 4413 - protein, 9 aa, synthetic construct
GSNATVKLH

SEQ ID NO: 4414 - protein, 9 aa, synthetic construct
GSNATVKVY

SEQ ID NO: 4415 - protein, 9 aa, synthetic construct
GSNATLHLR

SEQ ID NO: 4416 - protein, 9 aa, synthetic construct
GSNATLHVH

SEQ ID NO: 4417 - protein, 9 aa, synthetic construct
GSNATLRVY

SEQ ID NO: 4418 - protein, 9 aa, synthetic construct
GSNATLRVH

SEQ ID NO: 4419 - protein, 9 aa, synthetic construct
GSNATLKLY

SEQ ID NO: 4420 - protein, 9 aa, synthetic construct
GSNATLKLH

SEQ ID NO: 4421 - protein, 9 aa, synthetic construct
PLPGGIHVR

SEQ ID NO: 4422 - protein, 9 aa, synthetic construct
GSNATAHLK

SEQ ID NO: 4423 - protein, 9 aa, synthetic construct
GSNATAHVY

SEQ ID NO: 4424 - protein, 9 aa, synthetic construct
GSNATAHVF

SEQ ID NO: 4425 - protein, 9 aa, synthetic construct
GSNATARVH

SEQ ID NO: 4426 - protein, 9 aa, synthetic construct
PLPGGIHVK

SEQ ID NO: 4427 - protein, 9 aa, synthetic construct
GSNATAKLY

SEQ ID NO: 4428 - protein, 9 aa, synthetic construct
GSNATIHLK

SEQ ID NO: 4429 - protein, 9 aa, synthetic construct
GSNATIHVR

SEQ ID NO: 4430 - protein, 9 aa, synthetic construct
GSNATIHVH

SEQ ID NO: 4431 - protein, 9 aa, synthetic construct
GSNATIHVK

SEQ ID NO: 4432 - protein, 9 aa, synthetic construct
PLNGALHVH

SEQ ID NO: 4433 - protein, 9 aa, synthetic construct
PLNGSARLY

SEQ ID NO: 4434 - protein, 9 aa, synthetic construct
PLPGGIRLY

SEQ ID NO: 4435 - protein, 9 aa, synthetic construct
GSNATIRVY

SEQ ID NO: 4436 - protein, 9 aa, synthetic construct
GSNATIKLY

SEQ ID NO: 4437 - protein, 9 aa, synthetic construct
GSNATGHVH

SEQ ID NO: 4438 - protein, 9 aa, synthetic construct
GSNATGHVK

SEQ ID NO: 4439 - protein, 9 aa, synthetic construct
GSNATGHVF

SEQ ID NO: 4440 - protein, 9 aa, synthetic construct
GSNATGRLF

SEQ ID NO: 4441 - protein, 9 aa, synthetic construct
GSNATGRVF

SEQ ID NO: 4442 - protein, 9 aa, synthetic construct
GSNATGKLY

SEQ ID NO: 4443 - protein, 9 aa, synthetic construct
GSNATGKLH

SEQ ID NO: 4444 - protein, 9 aa, synthetic construct
GSNASVHVF

SEQ ID NO: 4445 - protein, 9 aa, synthetic construct
GSNASVRLH

SEQ ID NO: 4446 - protein, 9 aa, synthetic construct
GSNASVRVF

SEQ ID NO: 4447 - protein, 9 aa, synthetic construct
GSNASVKLF

SEQ ID NO: 4448 - protein, 9 aa, synthetic construct
GSNASLKLF

SEQ ID NO: 4449 - protein, 9 aa, synthetic construct
GSNASAHLY

SEQ ID NO: 4450 - protein, 9 aa, synthetic construct
GSNASAHLR

SEQ ID NO: 4451 - protein, 9 aa, synthetic construct
GSNASAHLH

SEQ ID NO: 4452 - protein, 9 aa, synthetic construct
GSNASAHLK

SEQ ID NO: 4453 - protein, 9 aa, synthetic construct
GSNASAHLF

SEQ ID NO: 4454 - protein, 9 aa, synthetic construct
GSNASAHVY

SEQ ID NO: 4455 - protein, 9 aa, synthetic construct
GSNASAHVR

SEQ ID NO: 4456 - protein, 9 aa, synthetic construct
GSNASAHVH

SEQ ID NO: 4457 - protein, 9 aa, synthetic construct
GSNASAHVK

SEQ ID NO: 4458 - protein, 9 aa, synthetic construct
GSNASAHVF

SEQ ID NO: 4459 - protein, 9 aa, synthetic construct
GSNASAKVF

SEQ ID NO: 4460 - protein, 9 aa, synthetic construct
GSNASIHLR

SEQ ID NO: 4461 - protein, 9 aa, synthetic construct
GSNASIHLK

SEQ ID NO: 4462 - protein, 9 aa, synthetic construct
GSNASIRLF

SEQ ID NO: 4463 - protein, 9 aa, synthetic construct
PLPGGIKVR

SEQ ID NO: 4464 - protein, 9 aa, synthetic construct
GSNASIKLH

SEQ ID NO: 4465 - protein, 9 aa, synthetic construct
GSNASGHLY

SEQ ID NO: 4466 - protein, 9 aa, synthetic construct
GSNASGHLH

SEQ ID NO: 4467 - protein, 9 aa, synthetic construct
GSNASGHVY

SEQ ID NO: 4468 - protein, 9 aa, synthetic construct
GSNASGHVR

SEQ ID NO: 4469 - protein, 9 aa, synthetic construct
GSNASGHVK

SEQ ID NO: 4470 - protein, 9 aa, synthetic construct
GSNASGHVF

SEQ ID NO: 4471 - protein, 9 aa, synthetic construct
GSNASGRVF

SEQ ID NO: 4472 - protein, 9 aa, synthetic construct
GSNASGKLY

SEQ ID NO: 4473 - protein, 9 aa, synthetic construct
GSNAVVHVR

SEQ ID NO: 4474 - protein, 9 aa, synthetic construct
GSNAVVHVH

SEQ ID NO: 4475 - protein, 9 aa, synthetic construct
GSNAVVHVF

SEQ ID NO: 4476 - protein, 9 aa, synthetic construct
PLPGGGHLH

SEQ ID NO: 4477 - protein, 9 aa, synthetic construct
GSNAVLKLH

SEQ ID NO: 4478 - protein, 9 aa, synthetic construct
GSNAVAHVY

SEQ ID NO: 4479 - protein, 9 aa, synthetic construct
GSNAVAHVH

SEQ ID NO: 4480 - protein, 9 aa, synthetic construct
GSNAVAHVK

SEQ ID NO: 4481 - protein, 9 aa, synthetic construct
GSNAVAHVF

SEQ ID NO: 4482 - protein, 9 aa, synthetic construct
GSNAVARVF

SEQ ID NO: 4483 - protein, 9 aa, synthetic construct
GSNAVIHVR

SEQ ID NO: 4484 - protein, 9 aa, synthetic construct
GSNAVIHVK

SEQ ID NO: 4485 - protein, 9 aa, synthetic construct
PLPGGGRLY

SEQ ID NO: 4486 - protein, 9 aa, synthetic construct
GSNAVIKLF

SEQ ID NO: 4487 - protein, 9 aa, synthetic construct
GSNAGVRVF

SEQ ID NO: 4488 - protein, 9 aa, synthetic construct
PLPGGGRVH

SEQ ID NO: 4489 - protein, 9 aa, synthetic construct
GSNAGVKLF

SEQ ID NO: 4490 - protein, 9 aa, synthetic construct
PLPGGGRVF

SEQ ID NO: 4491 - protein, 9 aa, synthetic construct
GSNAGLKVF

SEQ ID NO: 4492 - protein, 9 aa, synthetic construct
GSNAGAHLH

SEQ ID NO: 4493 - protein, 9 aa, synthetic construct
GSNAGAHLK

SEQ ID NO: 4494 - protein, 9 aa, synthetic construct
GSNAGAHLF

SEQ ID NO: 4495 - protein, 9 aa, synthetic construct
GSNAGAHVF

SEQ ID NO: 4496 - protein, 9 aa, synthetic construct
PLPGGGKLH

SEQ ID NO: 4497 - protein, 9 aa, synthetic construct
GSNAGAKLF

SEQ ID NO: 4498 - protein, 9 aa, synthetic construct
GSNAGAKVF

SEQ ID NO: 4499 - protein, 9 aa, synthetic construct
PLPGGGKVY

SEQ ID NO: 4500 - protein, 9 aa, synthetic construct
GSNAGIRVY

SEQ ID NO: 4501 - protein, 9 aa, synthetic construct
GSNAGIRVF

SEQ ID NO: 4502 - protein, 9 aa, synthetic construct
GSNAGIKLH

SEQ ID NO: 4503 - protein, 9 aa, synthetic construct
GSNAGGHLY

SEQ ID NO: 4504 - protein, 9 aa, synthetic construct
GSNAGGHVY

SEQ ID NO: 4505 - protein, 9 aa, synthetic construct
GSNAGGHVR

SEQ ID NO: 4506 - protein, 9 aa, synthetic construct
GSNAGGHVK

SEQ ID NO: 4507 - protein, 9 aa, synthetic construct
GSNAGGHVF

SEQ ID NO: 4508 - protein, 9 aa, synthetic construct
GSNAGGRLY

SEQ ID NO: 4509 - protein, 9 aa, synthetic construct
GSNAGGRLF

SEQ ID NO: 4510 - protein, 9 aa, synthetic construct
GSNAGGRVF

SEQ ID NO: 4511 - protein, 9 aa, synthetic construct
GSNAGGKLF

SEQ ID NO: 4512 - protein, 9 aa, synthetic construct
GSQGAVHVY

SEQ ID NO: 4513 - protein, 9 aa, synthetic construct
GSQGAVHVH

SEQ ID NO: 4514 - protein, 9 aa, synthetic construct
GSQGAVRVF

SEQ ID NO: 4515 - protein, 9 aa, synthetic construct
GSQGALKLF

SEQ ID NO: 4516 - protein, 9 aa, synthetic construct
GSQGAAHLY

SEQ ID NO: 4517 - protein, 9 aa, synthetic construct
GSQGAAHLH

SEQ ID NO: 4518 - protein, 9 aa, synthetic construct
GSQGAAHLK

SEQ ID NO: 4519 - protein, 9 aa, synthetic construct
GSQGAARVH

SEQ ID NO: 4520 - protein, 9 aa, synthetic construct
GSQGAARVF

SEQ ID NO: 4521 - protein, 9 aa, synthetic construct
GSQGAAKLH

SEQ ID NO: 4522 - protein, 9 aa, synthetic construct
GSQGAAKVF

SEQ ID NO: 4523 - protein, 9 aa, synthetic construct
GSQGAIHLK

SEQ ID NO: 4524 - protein, 9 aa, synthetic construct
GSQGAIHVH

SEQ ID NO: 4525 - protein, 9 aa, synthetic construct
PLPAAVRLY

SEQ ID NO: 4526 - protein, 9 aa, synthetic construct
GSQGAIRVH

SEQ ID NO: 4527 - protein, 9 aa, synthetic construct
GSQGAIKLY

SEQ ID NO: 4528 - protein, 9 aa, synthetic construct
GSQGAIKLH

SEQ ID NO: 4529 - protein, 9 aa, synthetic construct
GSQGAGHLY

SEQ ID NO: 4530 - protein, 9 aa, synthetic construct
GSQGAGHLR

SEQ ID NO: 4531 - protein, 9 aa, synthetic construct
GSQGAGHLH

SEQ ID NO: 4532 - protein, 9 aa, synthetic construct
GSQGAGHLK

SEQ ID NO: 4533 - protein, 9 aa, synthetic construct
GSQGAGHLF

SEQ ID NO: 4534 - protein, 9 aa, synthetic construct
GSQGAGHVY

SEQ ID NO: 4535 - protein, 9 aa, synthetic construct
GSQGAGHVR

SEQ ID NO: 4536 - protein, 9 aa, synthetic construct
GSQGAGHVH

SEQ ID NO: 4537 - protein, 9 aa, synthetic construct
GSQGAGHVF

SEQ ID NO: 4538 - protein, 9 aa, synthetic construct
GSQGAGKLH

SEQ ID NO: 4539 - protein, 9 aa, synthetic construct
GSQGAGKLF

SEQ ID NO: 4540 - protein, 9 aa, synthetic construct
GSQGTVHVY

SEQ ID NO: 4541 - protein, 9 aa, synthetic construct
GSQGTVRVY

SEQ ID NO: 4542 - protein, 9 aa, synthetic construct
GSQGTVRVF

SEQ ID NO: 4543 - protein, 9 aa, synthetic construct
GSQGTLHVH

SEQ ID NO: 4544 - protein, 9 aa, synthetic construct
PLPAAVKLY

SEQ ID NO: 4545 - protein, 9 aa, synthetic construct
GSQGTLKLH

SEQ ID NO: 4546 - protein, 9 aa, synthetic construct
GSQGTAHLY

SEQ ID NO: 4547 - protein, 9 aa, synthetic construct
GSQGTARVH

SEQ ID NO: 4548 - protein, 9 aa, synthetic construct
GSQGTIHLF

SEQ ID NO: 4549 - protein, 9 aa, synthetic construct
GSQGTIHVH

SEQ ID NO: 4550 - protein, 9 aa, synthetic construct
PLPAAVKVY

SEQ ID NO: 4551 - protein, 9 aa, synthetic construct
GSQGTIRVF

SEQ ID NO: 4552 - protein, 9 aa, synthetic construct
GSQGTIKLH

SEQ ID NO: 4553 - protein, 9 aa, synthetic construct
GSQGTGHLY

SEQ ID NO: 4554 - protein, 9 aa, synthetic construct
GSQGTGHLR

SEQ ID NO: 4555 - protein, 9 aa, synthetic construct
GSQGTGHLK

SEQ ID NO: 4556 - protein, 9 aa, synthetic construct
GSQGTGHVF

SEQ ID NO: 4557 - protein, 9 aa, synthetic construct
GSQGTGRVH

SEQ ID NO: 4558 - protein, 9 aa, synthetic construct
GSQGTGKLH

SEQ ID NO: 4559 - protein, 9 aa, synthetic construct
GSQGTGKVH

SEQ ID NO: 4560 - protein, 9 aa, synthetic construct
GSQGTGKVF

SEQ ID NO: 4561 - protein, 9 aa, synthetic construct
GSQGSVHVF

SEQ ID NO: 4562 - protein, 9 aa, synthetic construct
GSQGSVKLF

SEQ ID NO: 4563 - protein, 9 aa, synthetic construct
GSQGSAKLF

SEQ ID NO: 4564 - protein, 9 aa, synthetic construct
GSQGSAKVY

SEQ ID NO: 4565 - protein, 9 aa, synthetic construct
GSQGSIHLR

SEQ ID NO: 4566 - protein, 9 aa, synthetic construct
GSQGSIHVF

SEQ ID NO: 4567 - protein, 9 aa, synthetic construct
PLNGSARVF

SEQ ID NO: 4568 - protein, 9 aa, synthetic construct
GSQGSIRVH

SEQ ID NO: 4569 - protein, 9 aa, synthetic construct
GSQGSIKLK

SEQ ID NO: 4570 - protein, 9 aa, synthetic construct
GSQGSIKVF

SEQ ID NO: 4571 - protein, 9 aa, synthetic construct
GSQGSGHLY

SEQ ID NO: 4572 - protein, 9 aa, synthetic construct
GSQGSGRVY

SEQ ID NO: 4573 - protein, 9 aa, synthetic construct
GSQGSGKLY

SEQ ID NO: 4574 - protein, 9 aa, synthetic construct
GSQGSGKLF

SEQ ID NO: 4575 - protein, 9 aa, synthetic construct
GSQGSGKVY

SEQ ID NO: 4576 - protein, 9 aa, synthetic construct
GSQGSGKVF

SEQ ID NO: 4577 - protein, 9 aa, synthetic construct
GSQGVLHVY

SEQ ID NO: 4578 - protein, 9 aa, synthetic construct
GSQGVAHLY

SEQ ID NO: 4579 - protein, 9 aa, synthetic construct
GSQGVAHVY

SEQ ID NO: 4580 - protein, 9 aa, synthetic construct
GSQGVAHVK

SEQ ID NO: 4581 - protein, 9 aa, synthetic construct
GSQGVAHVF

SEQ ID NO: 4582 - protein, 9 aa, synthetic construct
GSQGVAKVR

SEQ ID NO: 4583 - protein, 9 aa, synthetic construct
GSQGVAKVF

SEQ ID NO: 4584 - protein, 9 aa, synthetic construct
GSQGVIHLH

SEQ ID NO: 4585 - protein, 9 aa, synthetic construct
GSQGVIHLK

SEQ ID NO: 4586 - protein, 9 aa, synthetic construct
GSQGVIHVY

SEQ ID NO: 4587 - protein, 9 aa, synthetic construct
GSQGVIHVK

SEQ ID NO: 4588 - protein, 9 aa, synthetic construct
GSQGVIHVF

SEQ ID NO: 4589 - protein, 9 aa, synthetic construct
GSQGVIRVK

SEQ ID NO: 4590 - protein, 9 aa, synthetic construct
GSQGVIKVY

SEQ ID NO: 4591 - protein, 9 aa, synthetic construct
GSQGVIKVH

SEQ ID NO: 4592 - protein, 9 aa, synthetic construct
GSQGVGHLY

SEQ ID NO: 4593 - protein, 9 aa, synthetic construct
GSQGVGHLH

SEQ ID NO: 4594 - protein, 9 aa, synthetic construct
GSQGVGHLK

SEQ ID NO: 4595 - protein, 9 aa, synthetic construct
GSQGVGHVY

SEQ ID NO: 4596 - protein, 9 aa, synthetic construct
GSQGVGHVR

SEQ ID NO: 4597 - protein, 9 aa, synthetic construct
GSQGVGHVH

SEQ ID NO: 4598 - protein, 9 aa, synthetic construct
GSQGVGHVK

SEQ ID NO: 4599 - protein, 9 aa, synthetic construct
GSQGVGHVF

SEQ ID NO: 4600 - protein, 9 aa, synthetic construct
GSQGVGRLF

SEQ ID NO: 4601 - protein, 9 aa, synthetic construct
GSQGVGRVF

SEQ ID NO: 4602 - protein, 9 aa, synthetic construct
GSQGVGKVF

SEQ ID NO: 4603 - protein, 9 aa, synthetic construct
GSQGGVHVK

SEQ ID NO: 4604 - protein, 9 aa, synthetic construct
PLPAAAHLH

SEQ ID NO: 4605 - protein, 9 aa, synthetic construct
GSQGGVKLF

SEQ ID NO: 4606 - protein, 9 aa, synthetic construct
GSQGGLKVH

SEQ ID NO: 4607 - protein, 9 aa, synthetic construct
GSQGGAHVR

SEQ ID NO: 4608 - protein, 9 aa, synthetic construct
GSQGGAHVK

SEQ ID NO: 4609 - protein, 9 aa, synthetic construct
PLPAAAHVK

SEQ ID NO: 4610 - protein, 9 aa, synthetic construct
GSQGGAKVY

SEQ ID NO: 4611 - protein, 9 aa, synthetic construct
GSQGGAKVH

SEQ ID NO: 4612 - protein, 9 aa, synthetic construct
GSQGGIHLK

SEQ ID NO: 4613 - protein, 9 aa, synthetic construct
GSQGGIHVH

SEQ ID NO: 4614 - protein, 9 aa, synthetic construct
GSQGGIHVK

SEQ ID NO: 4615 - protein, 9 aa, synthetic construct
GSQGGIKLF

SEQ ID NO: 4616 - protein, 9 aa, synthetic construct
GSQGGGHLY

SEQ ID NO: 4617 - protein, 9 aa, synthetic construct
GSQGGGRLY

SEQ ID NO: 4618 - protein, 9 aa, synthetic construct
GSQGGGRLH

SEQ ID NO: 4619 - protein, 9 aa, synthetic construct
GSQGGGRVH

SEQ ID NO: 4620 - protein, 9 aa, synthetic construct
GSQGGGRVK

SEQ ID NO: 4621 - protein, 9 aa, synthetic construct
GSQGGGRVF

SEQ ID NO: 4622 - protein, 9 aa, synthetic construct
GSQGGGKLY

SEQ ID NO: 4623 - protein, 9 aa, synthetic construct
PLPAAARVH

SEQ ID NO: 4624 - protein, 9 aa, synthetic construct
GSQAAVKVF

SEQ ID NO: 4625 - protein, 9 aa, synthetic construct
GSQAALRVF

SEQ ID NO: 4626 - protein, 9 aa, synthetic construct
GSQAAAHLF

SEQ ID NO: 4627 - protein, 9 aa, synthetic construct
GSQAAARVH

SEQ ID NO: 4628 - protein, 9 aa, synthetic construct
GSQAAAKLY

SEQ ID NO: 4629 - protein, 9 aa, synthetic construct
GSQAAAKVY

SEQ ID NO: 4630 - protein, 9 aa, synthetic construct
GSQAAIHVK

SEQ ID NO: 4631 - protein, 9 aa, synthetic construct
GSQAAIHVF

SEQ ID NO: 4632 - protein, 9 aa, synthetic construct
PLPAAAKVY

SEQ ID NO: 4633 - protein, 9 aa, synthetic construct
GSQAAGHLY

SEQ ID NO: 4634 - protein, 9 aa, synthetic construct
GSQAAGHLF

SEQ ID NO: 4635 - protein, 9 aa, synthetic construct
GSQAAGRVH

SEQ ID NO: 4636 - protein, 9 aa, synthetic construct
GSQAAGKLH

SEQ ID NO: 4637 - protein, 9 aa, synthetic construct
GSQATVRVF

SEQ ID NO: 4638 - protein, 9 aa, synthetic construct
GSQATLHLH

SEQ ID NO: 4639 - protein, 9 aa, synthetic construct
GSQATLKLY

SEQ ID NO: 4640 - protein, 9 aa, synthetic construct
GSQATAHLK

SEQ ID NO: 4641 - protein, 9 aa, synthetic construct
PLPAAIHVH

SEQ ID NO: 4642 - protein, 9 aa, synthetic construct
PLPAAIHVK

SEQ ID NO: 4643 - protein, 9 aa, synthetic construct
GSQATAKLY

SEQ ID NO: 4644 - protein, 9 aa, synthetic construct
GSQATAKLH

SEQ ID NO: 4645 - protein, 9 aa, synthetic construct
GSQATIHVH

SEQ ID NO: 4646 - protein, 9 aa, synthetic construct
GSQATIRLH

SEQ ID NO: 4647 - protein, 9 aa, synthetic construct
GSQATGHLY

SEQ ID NO: 4648 - protein, 9 aa, synthetic construct
GSQATGHLK

SEQ ID NO: 4649 - protein, 9 aa, synthetic construct
GSQATGHLF

SEQ ID NO: 4650 - protein, 9 aa, synthetic construct
GSQATGHVF

SEQ ID NO: 4651 - protein, 9 aa, synthetic construct
GSQATGRLY

SEQ ID NO: 4652 - protein, 9 aa, synthetic construct
GSQATGRLH

SEQ ID NO: 4653 - protein, 9 aa, synthetic construct
GSQATGRVF

SEQ ID NO: 4654 - protein, 9 aa, synthetic construct
GSQATGKLY

SEQ ID NO: 4655 - protein, 9 aa, synthetic construct
GSQATGKLH

SEQ ID NO: 4656 - protein, 9 aa, synthetic construct
GSQATGKLK

SEQ ID NO: 4657 - protein, 9 aa, synthetic construct
GSQATGKLF

SEQ ID NO: 4658 - protein, 9 aa, synthetic construct
GSQATGKVH

SEQ ID NO: 4659 - protein, 9 aa, synthetic construct
GSQASVHVF

SEQ ID NO: 4660 - protein, 9 aa, synthetic construct
GSQASVKLF

SEQ ID NO: 4661 - protein, 9 aa, synthetic construct
GSQASAHLH

SEQ ID NO: 4662 - protein, 9 aa, synthetic construct
GSQASAHVH

SEQ ID NO: 4663 - protein, 9 aa, synthetic construct
GSQASAHVF

SEQ ID NO: 4664 - protein, 9 aa, synthetic construct
GSQASIHVY

SEQ ID NO: 4665 - protein, 9 aa, synthetic construct
GSQASIHVH

SEQ ID NO: 4666 - protein, 9 aa, synthetic construct
GSQASIKVY

SEQ ID NO: 4667 - protein, 9 aa, synthetic construct
GSQASGHLY

SEQ ID NO: 4668 - protein, 9 aa, synthetic construct
GSQASGKLH

SEQ ID NO: 4669 - protein, 9 aa, synthetic construct
PLPAAGHLH

SEQ ID NO: 4670 - protein, 9 aa, synthetic construct
GSQAVVKVY

SEQ ID NO: 4671 - protein, 9 aa, synthetic construct
GSQAVVKVH

SEQ ID NO: 4672 - protein, 9 aa, synthetic construct
PLPAAGHVH

SEQ ID NO: 4673 - protein, 9 aa, synthetic construct
GSQAVIHLR

SEQ ID NO: 4674 - protein, 9 aa, synthetic construct
GSQAVIKLH

SEQ ID NO: 4675 - protein, 9 aa, synthetic construct
GSQAVGHVY

SEQ ID NO: 4676 - protein, 9 aa, synthetic construct
GSQAVGHVF

SEQ ID NO: 4677 - protein, 9 aa, synthetic construct
GSQAVGKVH

SEQ ID NO: 4678 - protein, 9 aa, synthetic construct
PLPAAGRVH

SEQ ID NO: 4679 - protein, 9 aa, synthetic construct
GSQAGVKVF

SEQ ID NO: 4680 - protein, 9 aa, synthetic construct
PLPAAGRVF

SEQ ID NO: 4681 - protein, 9 aa, synthetic construct
PLNGSAKVF

SEQ ID NO: 4682 - protein, 9 aa, synthetic construct
GSQAGAHVY

SEQ ID NO: 4683 - protein, 9 aa, synthetic construct
GSQAGARVH

SEQ ID NO: 4684 - protein, 9 aa, synthetic construct
GSQAGAKLF

SEQ ID NO: 4685 - protein, 9 aa, synthetic construct
GSQAGIHLH

SEQ ID NO: 4686 - protein, 9 aa, synthetic construct
GSQAGIKLY

SEQ ID NO: 4687 - protein, 9 aa, synthetic construct
GSQAGGHLY

SEQ ID NO: 4688 - protein, 9 aa, synthetic construct
GSPGAVHVF

SEQ ID NO: 4689 - protein, 9 aa, synthetic construct
GSPGAVKVF

SEQ ID NO: 4690 - protein, 9 aa, synthetic construct
GSPGALHVK

SEQ ID NO: 4691 - protein, 9 aa, synthetic construct
PLPATVHLF

SEQ ID NO: 4692 - protein, 9 aa, synthetic construct
GSPGALKVY

SEQ ID NO: 4693 - protein, 9 aa, synthetic construct
GSPGAAHLR

SEQ ID NO: 4694 - protein, 9 aa, synthetic construct
GSPGAAHLF

SEQ ID NO: 4695 - protein, 9 aa, synthetic construct
GSPGAAHVK

SEQ ID NO: 4696 - protein, 9 aa, synthetic construct
PLPATVHVH

SEQ ID NO: 4697 - protein, 9 aa, synthetic construct
GSPGAAKLH

SEQ ID NO: 4698 - protein, 9 aa, synthetic construct
GSPGAAKVY

SEQ ID NO: 4699 - protein, 9 aa, synthetic construct
GSPGAIHVK

SEQ ID NO: 4700 - protein, 9 aa, synthetic construct
PLNGSIHLR

SEQ ID NO: 4701 - protein, 9 aa, synthetic construct
PLPATVRLY

SEQ ID NO: 4702 - protein, 9 aa, synthetic construct
GSPGAIRVH

SEQ ID NO: 4703 - protein, 9 aa, synthetic construct
GSPGAIRVK

SEQ ID NO: 4704 - protein, 9 aa, synthetic construct
GSPGAGHLH

SEQ ID NO: 4705 - protein, 9 aa, synthetic construct
GSPGAGHVF

SEQ ID NO: 4706 - protein, 9 aa, synthetic construct
GSPGAGRVH

SEQ ID NO: 4707 - protein, 9 aa, synthetic construct
GSPGAGKLF

SEQ ID NO: 4708 - protein, 9 aa, synthetic construct
GSPGTVHLY

SEQ ID NO: 4709 - protein, 9 aa, synthetic construct
GSPGTVHVY

SEQ ID NO: 4710 - protein, 9 aa, synthetic construct
GSPGTVHVH

SEQ ID NO: 4711 - protein, 9 aa, synthetic construct
GSPGTVRLY

SEQ ID NO: 4712 - protein, 9 aa, synthetic construct
PLPATVRVH

SEQ ID NO: 4713 - protein, 9 aa, synthetic construct
GSPGTLHLK

SEQ ID NO: 4714 - protein, 9 aa, synthetic construct
PLPATVRVF

SEQ ID NO: 4715 - protein, 9 aa, synthetic construct
GSPGTLKLY

SEQ ID NO: 4716 - protein, 9 aa, synthetic construct
GSPGTAHVY

SEQ ID NO: 4717 - protein, 9 aa, synthetic construct
GSPGTARLY

SEQ ID NO: 4718 - protein, 9 aa, synthetic construct
GSPGTAKVF

SEQ ID NO: 4719 - protein, 9 aa, synthetic construct
GSPGTIRVY

SEQ ID NO: 4720 - protein, 9 aa, synthetic construct
GSPGTIRVK

SEQ ID NO: 4721 - protein, 9 aa, synthetic construct
GSPGTGHVH

SEQ ID NO: 4722 - protein, 9 aa, synthetic construct
GSPGTGRLY

SEQ ID NO: 4723 - protein, 9 aa, synthetic construct
GSPGTGKLY

SEQ ID NO: 4724 - protein, 9 aa, synthetic construct
GSPGSVHVF

SEQ ID NO: 4725 - protein, 9 aa, synthetic construct
GSPGSVKVY

SEQ ID NO: 4726 - protein, 9 aa, synthetic construct
PLPATLHLK

SEQ ID NO: 4727 - protein, 9 aa, synthetic construct
GSPGSLKLY

SEQ ID NO: 4728 - protein, 9 aa, synthetic construct
GSPGSAHLY

SEQ ID NO: 4729 - protein, 9 aa, synthetic construct
GSPGSARLY

SEQ ID NO: 4730 - protein, 9 aa, synthetic construct
GSPGSARLH

SEQ ID NO: 4731 - protein, 9 aa, synthetic construct
GSPGSARLF

SEQ ID NO: 4732 - protein, 9 aa, synthetic construct
GSPGSARVY

SEQ ID NO: 4733 - protein, 9 aa, synthetic construct
GSPGSARVH

SEQ ID NO: 4734 - protein, 9 aa, synthetic construct
GSPGSAKLY

SEQ ID NO: 4735 - protein, 9 aa, synthetic construct
GSPGSAKLF

SEQ ID NO: 4736 - protein, 9 aa, synthetic construct
GSPGSAKVF

SEQ ID NO: 4737 - protein, 9 aa, synthetic construct
PLPATLRLR

SEQ ID NO: 4738 - protein, 9 aa, synthetic construct
GSPGSIKLK

SEQ ID NO: 4739 - protein, 9 aa, synthetic construct
GSPGSIKVH

SEQ ID NO: 4740 - protein, 9 aa, synthetic construct
GSPGSIKVF

SEQ ID NO: 4741 - protein, 9 aa, synthetic construct
GSPGSGHLY

SEQ ID NO: 4742 - protein, 9 aa, synthetic construct
GSPGSGHLH

SEQ ID NO: 4743 - protein, 9 aa, synthetic construct
GSPGSGHVH

SEQ ID NO: 4744 - protein, 9 aa, synthetic construct
GSPGSGRLY

SEQ ID NO: 4745 - protein, 9 aa, synthetic construct
GSPGSGRLH

SEQ ID NO: 4746 - protein, 9 aa, synthetic construct
GSPGSGRLF

SEQ ID NO: 4747 - protein, 9 aa, synthetic construct
GSPGSGRVY

SEQ ID NO: 4748 - protein, 9 aa, synthetic construct
GSPGSGRVH

SEQ ID NO: 4749 - protein, 9 aa, synthetic construct
GSPGSGRVF

SEQ ID NO: 4750 - protein, 9 aa, synthetic construct
GSPGSGKLY

SEQ ID NO: 4751 - protein, 9 aa, synthetic construct
GSPGSGKVH

SEQ ID NO: 4752 - protein, 9 aa, synthetic construct
GSPGSGKVF

SEQ ID NO: 4753 - protein, 9 aa, synthetic construct
GSPGVLRVK

SEQ ID NO: 4754 - protein, 9 aa, synthetic construct
GSPGVLKLH

SEQ ID NO: 4755 - protein, 9 aa, synthetic construct
GSPGVIHVY

SEQ ID NO: 4756 - protein, 9 aa, synthetic construct
GSPGVIRVK

SEQ ID NO: 4757 - protein, 9 aa, synthetic construct
GSPGVIRVF

SEQ ID NO: 4758 - protein, 9 aa, synthetic construct
GSPGVGKVY

SEQ ID NO: 4759 - protein, 9 aa, synthetic construct
GSPGVGKVH

SEQ ID NO: 4760 - protein, 9 aa, synthetic construct
PLNGSIHVR

SEQ ID NO: 4761 - protein, 9 aa, synthetic construct
PLPATAHLY

SEQ ID NO: 4762 - protein, 9 aa, synthetic construct
GSPGGVHLF

SEQ ID NO: 4763 - protein, 9 aa, synthetic construct
GSPGGVHVY

SEQ ID NO: 4764 - protein, 9 aa, synthetic construct
GSPGGVHVR

SEQ ID NO: 4765 - protein, 9 aa, synthetic construct
GSPGGVHVK

SEQ ID NO: 4766 - protein, 9 aa, synthetic construct
GSPGGVHVF

SEQ ID NO: 4767 - protein, 9 aa, synthetic construct
PLPATAHLR

SEQ ID NO: 4768 - protein, 9 aa, synthetic construct
GSPGGVRLY

SEQ ID NO: 4769 - protein, 9 aa, synthetic construct
GSPGGVKLY

SEQ ID NO: 4770 - protein, 9 aa, synthetic construct
GSPGGVKLK

SEQ ID NO: 4771 - protein, 9 aa, synthetic construct
GSPGGVKVY

SEQ ID NO: 4772 - protein, 9 aa, synthetic construct
GSPGGVKVF

SEQ ID NO: 4773 - protein, 9 aa, synthetic construct
PLPATAHLK

SEQ ID NO: 4774 - protein, 9 aa, synthetic construct
GSPGGLHVF

SEQ ID NO: 4775 - protein, 9 aa, synthetic construct
GSPGGAHLK

SEQ ID NO: 4776 - protein, 9 aa, synthetic construct
GSPGGAHVR

SEQ ID NO: 4777 - protein, 9 aa, synthetic construct
PLPATAHVH

SEQ ID NO: 4778 - protein, 9 aa, synthetic construct
GSPGGARLY

SEQ ID NO: 4779 - protein, 9 aa, synthetic construct
GSPGGAKLF

SEQ ID NO: 4780 - protein, 9 aa, synthetic construct
GSPGGAKVH

SEQ ID NO: 4781 - protein, 9 aa, synthetic construct
GSPGGIHVY

SEQ ID NO: 4782 - protein, 9 aa, synthetic construct
GSPGGIHVK

SEQ ID NO: 4783 - protein, 9 aa, synthetic construct
GSPGGIKVR

SEQ ID NO: 4784 - protein, 9 aa, synthetic construct
GSPGGGRLY

SEQ ID NO: 4785 - protein, 9 aa, synthetic construct
GSPGGGRLF

SEQ ID NO: 4786 - protein, 9 aa, synthetic construct
GSPGGGKVH

SEQ ID NO: 4787 - protein, 9 aa, synthetic construct
GSPAAVHLK

SEQ ID NO: 4788 - protein, 9 aa, synthetic construct
GSPAAVHVH

SEQ ID NO: 4789 - protein, 9 aa, synthetic construct
GSPAAVKVF

SEQ ID NO: 4790 - protein, 9 aa, synthetic construct
GSPAALHVR

SEQ ID NO: 4791 - protein, 9 aa, synthetic construct
PLPATARVF

SEQ ID NO: 4792 - protein, 9 aa, synthetic construct
PLPATAKLY

SEQ ID NO: 4793 - protein, 9 aa, synthetic construct
GSPAAAHLY

SEQ ID NO: 4794 - protein, 9 aa, synthetic construct
GSPAAARLY

SEQ ID NO: 4795 - protein, 9 aa, synthetic construct
GSPAAARVF

SEQ ID NO: 4796 - protein, 9 aa, synthetic construct
GSPAAAKLF

SEQ ID NO: 4797 - protein, 9 aa, synthetic construct
GSPAAAKVH

SEQ ID NO: 4798 - protein, 9 aa, synthetic construct
PLPATAKLF

SEQ ID NO: 4799 - protein, 9 aa, synthetic construct
GSPAAIHVR

SEQ ID NO: 4800 - protein, 9 aa, synthetic construct
GSPAAIHVK

SEQ ID NO: 4801 - protein, 9 aa, synthetic construct
GSPAAIKLY

SEQ ID NO: 4802 - protein, 9 aa, synthetic construct
GSPAAIKVH

SEQ ID NO: 4803 - protein, 9 aa, synthetic construct
GSPAAGHLH

SEQ ID NO: 4804 - protein, 9 aa, synthetic construct
PLPATAKVF

SEQ ID NO: 4805 - protein, 9 aa, synthetic construct
GSPAAGKLY

SEQ ID NO: 4806 - protein, 9 aa, synthetic construct
GSPATVRVY

SEQ ID NO: 4807 - protein, 9 aa, synthetic construct
PLPATIHLK

SEQ ID NO: 4808 - protein, 9 aa, synthetic construct
GSPATLHVH

SEQ ID NO: 4809 - protein, 9 aa, synthetic construct
GSPATLRLR

SEQ ID NO: 4810 - protein, 9 aa, synthetic construct
GSPATLKVH

SEQ ID NO: 4811 - protein, 9 aa, synthetic construct
GSPATAHVR

SEQ ID NO: 4812 - protein, 9 aa, synthetic construct
GSPATAHVK

SEQ ID NO: 4813 - protein, 9 aa, synthetic construct
GSPATAHVF

SEQ ID NO: 4814 - protein, 9 aa, synthetic construct
PLPATIHVH

SEQ ID NO: 4815 - protein, 9 aa, synthetic construct
GSPATARVH

SEQ ID NO: 4816 - protein, 9 aa, synthetic construct
PLPATIHVK

SEQ ID NO: 4817 - protein, 9 aa, synthetic construct
GSPATAKVH

SEQ ID NO: 4818 - protein, 9 aa, synthetic construct
GSPATAKVK

SEQ ID NO: 4819 - protein, 9 aa, synthetic construct
GSPATIHLK

SEQ ID NO: 4820 - protein, 9 aa, synthetic construct
GSPATIHVH

SEQ ID NO: 4821 - protein, 9 aa, synthetic construct
GSPATIRVY

SEQ ID NO: 4822 - protein, 9 aa, synthetic construct
GSPATGHVH

SEQ ID NO: 4823 - protein, 9 aa, synthetic construct
PLPATIRLF

SEQ ID NO: 4824 - protein, 9 aa, synthetic construct
PLPATIRVY

SEQ ID NO: 4825 - protein, 9 aa, synthetic construct
GSPASVHVY

SEQ ID NO: 4826 - protein, 9 aa, synthetic construct
GSPASLHVY

SEQ ID NO: 4827 - protein, 9 aa, synthetic construct
GSPASAHVY

SEQ ID NO: 4828 - protein, 9 aa, synthetic construct
GSPASAHVH

SEQ ID NO: 4829 - protein, 9 aa, synthetic construct
GSPASARLY

SEQ ID NO: 4830 - protein, 9 aa, synthetic construct
GSPASIRVY

SEQ ID NO: 4831 - protein, 9 aa, synthetic construct
GSPASIKVK

SEQ ID NO: 4832 - protein, 9 aa, synthetic construct
GSPASGHLY

SEQ ID NO: 4833 - protein, 9 aa, synthetic construct
GSPASGRLY

SEQ ID NO: 4834 - protein, 9 aa, synthetic construct
GSPASGKVF

SEQ ID NO: 4835 - protein, 9 aa, synthetic construct
PLPATGHLY

SEQ ID NO: 4836 - protein, 9 aa, synthetic construct
PLPATGHLH

SEQ ID NO: 4837 - protein, 9 aa, synthetic construct
GSPAVVKVF

SEQ ID NO: 4838 - protein, 9 aa, synthetic construct
PLPATGHVY

SEQ ID NO: 4839 - protein, 9 aa, synthetic construct
GSPAVLKLH

SEQ ID NO: 4840 - protein, 9 aa, synthetic construct
GSPAVLKVY

SEQ ID NO: 4841 - protein, 9 aa, synthetic construct
PLPATGHVR

SEQ ID NO: 4842 - protein, 9 aa, synthetic construct
PLPATGHVH

SEQ ID NO: 4843 - protein, 9 aa, synthetic construct
GSPAVARLH

SEQ ID NO: 4844 - protein, 9 aa, synthetic construct
PLPATGHVK

SEQ ID NO: 4845 - protein, 9 aa, synthetic construct
PLPATGHVF

SEQ ID NO: 4846 - protein, 9 aa, synthetic construct
GSPAVIHVK

SEQ ID NO: 4847 - protein, 9 aa, synthetic construct
GSPAVIRVK

SEQ ID NO: 4848 - protein, 9 aa, synthetic construct
GSPAVGHVK

SEQ ID NO: 4849 - protein, 9 aa, synthetic construct
PLPATGRLF

SEQ ID NO: 4850 - protein, 9 aa, synthetic construct
GSPAVGKVY

SEQ ID NO: 4851 - protein, 9 aa, synthetic construct
PLPATGRVY

SEQ ID NO: 4852 - protein, 9 aa, synthetic construct
GSPAGVHVF

SEQ ID NO: 4853 - protein, 9 aa, synthetic construct
PLPATGRVH

SEQ ID NO: 4854 - protein, 9 aa, synthetic construct
PLPATGRVF

SEQ ID NO: 4855 - protein, 9 aa, synthetic construct
PLPATGKLY

SEQ ID NO: 4856 - protein, 9 aa, synthetic construct
GSPAGAHVK

SEQ ID NO: 4857 - protein, 9 aa, synthetic construct
GSPAGAKLY

SEQ ID NO: 4858 - protein, 9 aa, synthetic construct
PLPATGKVY

SEQ ID NO: 4859 - protein, 9 aa, synthetic construct
GSPAGIKVR

SEQ ID NO: 4860 - protein, 9 aa, synthetic construct
PLPATGKVH

SEQ ID NO: 4861 - protein, 9 aa, synthetic construct
GSPAGGRLF

SEQ ID NO: 4862 - protein, 9 aa, synthetic construct
GSPAGGRVF

SEQ ID NO: 4863 - protein, 9 aa, synthetic construct
PLPATGKVF

SEQ ID NO: 4864 - protein, 9 aa, synthetic construct
GANGAVRLH

SEQ ID NO: 4865 - protein, 9 aa, synthetic construct
GANGAIRLK

SEQ ID NO: 4866 - protein, 9 aa, synthetic construct
GANGAIKLH

SEQ ID NO: 4867 - protein, 9 aa, synthetic construct
GANGTVHLY

SEQ ID NO: 4868 - protein, 9 aa, synthetic construct
GANGTVHVY

SEQ ID NO: 4869 - protein, 9 aa, synthetic construct
GANGTVHVH

SEQ ID NO: 4870 - protein, 9 aa, synthetic construct
GANGTVRVY

SEQ ID NO: 4871 - protein, 9 aa, synthetic construct
GANGTLHVY

SEQ ID NO: 4872 - protein, 9 aa, synthetic construct
PLNGSIRVH

SEQ ID NO: 4873 - protein, 9 aa, synthetic construct
GANGTLKLY

SEQ ID NO: 4874 - protein, 9 aa, synthetic construct
GANGTAHLK

SEQ ID NO: 4875 - protein, 9 aa, synthetic construct
GANGTAHVR

SEQ ID NO: 4876 - protein, 9 aa, synthetic construct
GANGTAHVH

SEQ ID NO: 4877 - protein, 9 aa, synthetic construct
GANGTARVR

SEQ ID NO: 4878 - protein, 9 aa, synthetic construct
GANGTAKLY

SEQ ID NO: 4879 - protein, 9 aa, synthetic construct
GANGTAKVF

SEQ ID NO: 4880 - protein, 9 aa, synthetic construct
GANGTIHVY

SEQ ID NO: 4881 - protein, 9 aa, synthetic construct
GANGTGHVK

SEQ ID NO: 4882 - protein, 9 aa, synthetic construct
GANGTGKLY

SEQ ID NO: 4883 - protein, 9 aa, synthetic construct
GANGTGKVK

SEQ ID NO: 4884 - protein, 9 aa, synthetic construct
GANGSVHLK

SEQ ID NO: 4885 - protein, 9 aa, synthetic construct
GANGSVKVF

SEQ ID NO: 4886 - protein, 9 aa, synthetic construct
GANGSLKLF

SEQ ID NO: 4887 - protein, 9 aa, synthetic construct
GANGSAHVR

SEQ ID NO: 4888 - protein, 9 aa, synthetic construct
GANGSARLH

SEQ ID NO: 4889 - protein, 9 aa, synthetic construct
GANGSAKLF

SEQ ID NO: 4890 - protein, 9 aa, synthetic construct
GANGSAKVF

SEQ ID NO: 4891 - protein, 9 aa, synthetic construct
GANGSIHLY

SEQ ID NO: 4892 - protein, 9 aa, synthetic construct
GANGSIHLR

SEQ ID NO: 4893 - protein, 9 aa, synthetic construct
GANGSIHLK

SEQ ID NO: 4894 - protein, 9 aa, synthetic construct
GANGSIHLF

SEQ ID NO: 4895 - protein, 9 aa, synthetic construct
GANGSIHVY

SEQ ID NO: 4896 - protein, 9 aa, synthetic construct
GANGSIHVR

SEQ ID NO: 4897 - protein, 9 aa, synthetic construct
GANGSIHVH

SEQ ID NO: 4898 - protein, 9 aa, synthetic construct
GANGSIHVK

SEQ ID NO: 4899 - protein, 9 aa, synthetic construct
GANGSIHVF

SEQ ID NO: 4900 - protein, 9 aa, synthetic construct
GANGSIRLF

SEQ ID NO: 4901 - protein, 9 aa, synthetic construct
GANGSIKLF

SEQ ID NO: 4902 - protein, 9 aa, synthetic construct
GANGSIKVH

SEQ ID NO: 4903 - protein, 9 aa, synthetic construct
GANGSGRLK

SEQ ID NO: 4904 - protein, 9 aa, synthetic construct
GANGSGKVF

SEQ ID NO: 4905 - protein, 9 aa, synthetic construct
GANGVVHVH

SEQ ID NO: 4906 - protein, 9 aa, synthetic construct
GANGVVKVH

SEQ ID NO: 4907 - protein, 9 aa, synthetic construct
GANGVAHVY

SEQ ID NO: 4908 - protein, 9 aa, synthetic construct
GANGVARVY

SEQ ID NO: 4909 - protein, 9 aa, synthetic construct
GANGVIHVY

SEQ ID NO: 4910 - protein, 9 aa, synthetic construct
GANGVIHVK

SEQ ID NO: 4911 - protein, 9 aa, synthetic construct
GANGVIKLF

SEQ ID NO: 4912 - protein, 9 aa, synthetic construct
GANGVGRVF

SEQ ID NO: 4913 - protein, 9 aa, synthetic construct
GANGVGKLY

SEQ ID NO: 4914 - protein, 9 aa, synthetic construct
GANGVGKLF

SEQ ID NO: 4915 - protein, 9 aa, synthetic construct
GANGGVHVK

SEQ ID NO: 4916 - protein, 9 aa, synthetic construct
GANGGVKLY

SEQ ID NO: 4917 - protein, 9 aa, synthetic construct
GANGGLHVY

SEQ ID NO: 4918 - protein, 9 aa, synthetic construct
GANGGIHVY

SEQ ID NO: 4919 - protein, 9 aa, synthetic construct
GANGGIHVR

SEQ ID NO: 4920 - protein, 9 aa, synthetic construct
GANGGIHVK

SEQ ID NO: 4921 - protein, 9 aa, synthetic construct
GANGGIRVH

SEQ ID NO: 4922 - protein, 9 aa, synthetic construct
PLPASARLH

SEQ ID NO: 4923 - protein, 9 aa, synthetic construct
GANGGGHLF

SEQ ID NO: 4924 - protein, 9 aa, synthetic construct
GANGGGRLF

SEQ ID NO: 4925 - protein, 9 aa, synthetic construct
GANGGGRVY

SEQ ID NO: 4926 - protein, 9 aa, synthetic construct
GANGGGRVK

SEQ ID NO: 4927 - protein, 9 aa, synthetic construct
GANAAVHVH

SEQ ID NO: 4928 - protein, 9 aa, synthetic construct
GANAAVHVK

SEQ ID NO: 4929 - protein, 9 aa, synthetic construct
GANAAVRLY

SEQ ID NO: 4930 - protein, 9 aa, synthetic construct
GANAAVRVF

SEQ ID NO: 4931 - protein, 9 aa, synthetic construct
GANAAVKLF

SEQ ID NO: 4932 - protein, 9 aa, synthetic construct
GANAAVKVY

SEQ ID NO: 4933 - protein, 9 aa, synthetic construct
GANAAVKVH

SEQ ID NO: 4934 - protein, 9 aa, synthetic construct
GANAALHLR

SEQ ID NO: 4935 - protein, 9 aa, synthetic construct
GANAALHLK

SEQ ID NO: 4936 - protein, 9 aa, synthetic construct
GANAALRVH

SEQ ID NO: 4937 - protein, 9 aa, synthetic construct
GANAALRVF

SEQ ID NO: 4938 - protein, 9 aa, synthetic construct
GANAALKVH

SEQ ID NO: 4939 - protein, 9 aa, synthetic construct
GANAAAHVY

SEQ ID NO: 4940 - protein, 9 aa, synthetic construct
PLPASAKLH

SEQ ID NO: 4941 - protein, 9 aa, synthetic construct
GANAAARVH

SEQ ID NO: 4942 - protein, 9 aa, synthetic construct
GANAAAKVY

SEQ ID NO: 4943 - protein, 9 aa, synthetic construct
GANAAAKVH

SEQ ID NO: 4944 - protein, 9 aa, synthetic construct
PLPASAKLF

SEQ ID NO: 4945 - protein, 9 aa, synthetic construct
GANAAIHLY

SEQ ID NO: 4946 - protein, 9 aa, synthetic construct
GANAAIHLR

SEQ ID NO: 4947 - protein, 9 aa, synthetic construct
GANAAIHLH

SEQ ID NO: 4948 - protein, 9 aa, synthetic construct
GANAAIHLK

SEQ ID NO: 4949 - protein, 9 aa, synthetic construct
GANAAIHVR

SEQ ID NO: 4950 - protein, 9 aa, synthetic construct
GANAAIHVH

SEQ ID NO: 4951 - protein, 9 aa, synthetic construct
GANAAIHVK

SEQ ID NO: 4952 - protein, 9 aa, synthetic construct
GANAAIRLH

SEQ ID NO: 4953 - protein, 9 aa, synthetic construct
GANAAIRVH

SEQ ID NO: 4954 - protein, 9 aa, synthetic construct
GANAAIKVF

SEQ ID NO: 4955 - protein, 9 aa, synthetic construct
GANAAGHLH

SEQ ID NO: 4956 - protein, 9 aa, synthetic construct
GANAAGHVF

SEQ ID NO: 4957 - protein, 9 aa, synthetic construct
GANAAGRVY

SEQ ID NO: 4958 - protein, 9 aa, synthetic construct
GANAAGRVH

SEQ ID NO: 4959 - protein, 9 aa, synthetic construct
GANAAGRVF

SEQ ID NO: 4960 - protein, 9 aa, synthetic construct
GANATVHLR

SEQ ID NO: 4961 - protein, 9 aa, synthetic construct
GANATVHVH

SEQ ID NO: 4962 - protein, 9 aa, synthetic construct
GANATLKVH

SEQ ID NO: 4963 - protein, 9 aa, synthetic construct
GANATAHLK

SEQ ID NO: 4964 - protein, 9 aa, synthetic construct
GANATAKLY

SEQ ID NO: 4965 - protein, 9 aa, synthetic construct
GANATIHLK

SEQ ID NO: 4966 - protein, 9 aa, synthetic construct
GANATIHVH

SEQ ID NO: 4967 - protein, 9 aa, synthetic construct
GANATIHVK

SEQ ID NO: 4968 - protein, 9 aa, synthetic construct
GANATIRLF

SEQ ID NO: 4969 - protein, 9 aa, synthetic construct
GANATGKLY

SEQ ID NO: 4970 - protein, 9 aa, synthetic construct
GANASVHLY

SEQ ID NO: 4971 - protein, 9 aa, synthetic construct
GANASVHVF

SEQ ID NO: 4972 - protein, 9 aa, synthetic construct
GANASVRLY

SEQ ID NO: 4973 - protein, 9 aa, synthetic construct
GANASVKLF

SEQ ID NO: 4974 - protein, 9 aa, synthetic construct
GANASVKVH

SEQ ID NO: 4975 - protein, 9 aa, synthetic construct
PLPASIRVK

SEQ ID NO: 4976 - protein, 9 aa, synthetic construct
GANASLHLH

SEQ ID NO: 4977 - protein, 9 aa, synthetic construct
GANASAHLH

SEQ ID NO: 4978 - protein, 9 aa, synthetic construct
GANASAHLK

SEQ ID NO: 4979 - protein, 9 aa, synthetic construct
GANASAHVH

SEQ ID NO: 4980 - protein, 9 aa, synthetic construct
GANASAHVF

SEQ ID NO: 4981 - protein, 9 aa, synthetic construct
GANASAKLY

SEQ ID NO: 4982 - protein, 9 aa, synthetic construct
GANASIHLK

SEQ ID NO: 4983 - protein, 9 aa, synthetic construct
GANASIHVY

SEQ ID NO: 4984 - protein, 9 aa, synthetic construct
GANASIHVK

SEQ ID NO: 4985 - protein, 9 aa, synthetic construct
GANASIRLY

SEQ ID NO: 4986 - protein, 9 aa, synthetic construct
GANASIRLH

SEQ ID NO: 4987 - protein, 9 aa, synthetic construct
GANASIRLF

SEQ ID NO: 4988 - protein, 9 aa, synthetic construct
GANASIRVH

SEQ ID NO: 4989 - protein, 9 aa, synthetic construct
GANASIRVF

SEQ ID NO: 4990 - protein, 9 aa, synthetic construct
GANASIKLF

SEQ ID NO: 4991 - protein, 9 aa, synthetic construct
GANASIKVF

SEQ ID NO: 4992 - protein, 9 aa, synthetic construct
GANASGHLK

SEQ ID NO: 4993 - protein, 9 aa, synthetic construct
GANASGRVF

SEQ ID NO: 4994 - protein, 9 aa, synthetic construct
GANASGKVF

SEQ ID NO: 4995 - protein, 9 aa, synthetic construct
PLPASGHLY

SEQ ID NO: 4996 - protein, 9 aa, synthetic construct
GANAVVHVR

SEQ ID NO: 4997 - protein, 9 aa, synthetic construct
GANAVVHVH

SEQ ID NO: 4998 - protein, 9 aa, synthetic construct
GANAVVHVF

SEQ ID NO: 4999 - protein, 9 aa, synthetic construct
GANAVVRLK

SEQ ID NO: 5000 - protein, 9 aa, synthetic construct
GANAVLKLH

SEQ ID NO: 5001 - protein, 9 aa, synthetic construct
GANAVAHLK

SEQ ID NO: 5002 - protein, 9 aa, synthetic construct
GANAVAHVR

SEQ ID NO: 5003 - protein, 9 aa, synthetic construct
PLPASGHVH

SEQ ID NO: 5004 - protein, 9 aa, synthetic construct
GANAVARVR

SEQ ID NO: 5005 - protein, 9 aa, synthetic construct
GANAVARVF

SEQ ID NO: 5006 - protein, 9 aa, synthetic construct
GANAVAKVH

SEQ ID NO: 5007 - protein, 9 aa, synthetic construct
GANAVIHLY

SEQ ID NO: 5008 - protein, 9 aa, synthetic construct
GANAVIHLR

SEQ ID NO: 5009 - protein, 9 aa, synthetic construct
GANAVIHLK

SEQ ID NO: 5010 - protein, 9 aa, synthetic construct
GANAVIHVY

SEQ ID NO: 5011 - protein, 9 aa, synthetic construct
GANAVIHVR

SEQ ID NO: 5012 - protein, 9 aa, synthetic construct
GANAVIHVH

SEQ ID NO: 5013 - protein, 9 aa, synthetic construct
GANAVIHVK

SEQ ID NO: 5014 - protein, 9 aa, synthetic construct
GANAVIHVF

SEQ ID NO: 5015 - protein, 9 aa, synthetic construct
GANAVIRVY

SEQ ID NO: 5016 - protein, 9 aa, synthetic construct
GANAVGHVH

SEQ ID NO: 5017 - protein, 9 aa, synthetic construct
GANAVGRLY

SEQ ID NO: 5018 - protein, 9 aa, synthetic construct
GANAVGRVF

SEQ ID NO: 5019 - protein, 9 aa, synthetic construct
GANAVGKVF

SEQ ID NO: 5020 - protein, 9 aa, synthetic construct
GANAGVHLY

SEQ ID NO: 5021 - protein, 9 aa, synthetic construct
GANAGVHLK

SEQ ID NO: 5022 - protein, 9 aa, synthetic construct
GANAGVHVY

SEQ ID NO: 5023 - protein, 9 aa, synthetic construct
GANAGVHVR

SEQ ID NO: 5024 - protein, 9 aa, synthetic construct
GANAGVHVK

SEQ ID NO: 5025 - protein, 9 aa, synthetic construct
GANAGVHVF

SEQ ID NO: 5026 - protein, 9 aa, synthetic construct
GANAGVKLY

SEQ ID NO: 5027 - protein, 9 aa, synthetic construct
GANAGVKLF

SEQ ID NO: 5028 - protein, 9 aa, synthetic construct
GANAGVKVY

SEQ ID NO: 5029 - protein, 9 aa, synthetic construct
GANAGVKVF

SEQ ID NO: 5030 - protein, 9 aa, synthetic construct
GANAGLHVH

SEQ ID NO: 5031 - protein, 9 aa, synthetic construct
PLPASGRVF

SEQ ID NO: 5032 - protein, 9 aa, synthetic construct
PLPASGKLY

SEQ ID NO: 5033 - protein, 9 aa, synthetic construct
GANAGLKVF

SEQ ID NO: 5034 - protein, 9 aa, synthetic construct
GANAGAHLH

SEQ ID NO: 5035 - protein, 9 aa, synthetic construct
GANAGAHLK

SEQ ID NO: 5036 - protein, 9 aa, synthetic construct
GANAGAHVH

SEQ ID NO: 5037 - protein, 9 aa, synthetic construct
GANAGAHVF

SEQ ID NO: 5038 - protein, 9 aa, synthetic construct
GANAGAKLF

SEQ ID NO: 5039 - protein, 9 aa, synthetic construct
GANAGAKVF

SEQ ID NO: 5040 - protein, 9 aa, synthetic construct
GANAGIHVH

SEQ ID NO: 5041 - protein, 9 aa, synthetic construct
GANAGIHVK

SEQ ID NO: 5042 - protein, 9 aa, synthetic construct
GANAGIRLF

SEQ ID NO: 5043 - protein, 9 aa, synthetic construct
GANAGGHLY

SEQ ID NO: 5044 - protein, 9 aa, synthetic construct
GANAGGHVY

SEQ ID NO: 5045 - protein, 9 aa, synthetic construct
GANAGGHVR

SEQ ID NO: 5046 - protein, 9 aa, synthetic construct
GANAGGHVK

SEQ ID NO: 5047 - protein, 9 aa, synthetic construct
GANAGGRLF

SEQ ID NO: 5048 - protein, 9 aa, synthetic construct
GANAGGRVF

SEQ ID NO: 5049 - protein, 9 aa, synthetic construct
PLPASGKVF

SEQ ID NO: 5050 - protein, 9 aa, synthetic construct
GANAGGKVF

SEQ ID NO: 5051 - protein, 9 aa, synthetic construct
PLNGSGHLY

SEQ ID NO: 5052 - protein, 9 aa, synthetic construct
GAQGAVHLH

SEQ ID NO: 5053 - protein, 9 aa, synthetic construct
GAQGAVHVK

SEQ ID NO: 5054 - protein, 9 aa, synthetic construct
GAQGALHVH

SEQ ID NO: 5055 - protein, 9 aa, synthetic construct
PLPAVVHVF

SEQ ID NO: 5056 - protein, 9 aa, synthetic construct
GAQGAIHLK

SEQ ID NO: 5057 - protein, 9 aa, synthetic construct
GAQGAIRVH

SEQ ID NO: 5058 - protein, 9 aa, synthetic construct
GAQGAGRLF

SEQ ID NO: 5059 - protein, 9 aa, synthetic construct
GAQGTVHLH

SEQ ID NO: 5060 - protein, 9 aa, synthetic construct
GAQGTVHVY

SEQ ID NO: 5061 - protein, 9 aa, synthetic construct
GAQGTVHVR

SEQ ID NO: 5062 - protein, 9 aa, synthetic construct
GAQGTVHVH

SEQ ID NO: 5063 - protein, 9 aa, synthetic construct
GAQGTVHVK

SEQ ID NO: 5064 - protein, 9 aa, synthetic construct
GAQGTVRLY

SEQ ID NO: 5065 - protein, 9 aa, synthetic construct
GAQGTVKLH

SEQ ID NO: 5066 - protein, 9 aa, synthetic construct
GAQGTLHLY

SEQ ID NO: 5067 - protein, 9 aa, synthetic construct
GAQGTLHLR

SEQ ID NO: 5068 - protein, 9 aa, synthetic construct
GAQGTLHLH

SEQ ID NO: 5069 - protein, 9 aa, synthetic construct
GAQGTLHVY

SEQ ID NO: 5070 - protein, 9 aa, synthetic construct
GAQGTLHVR

SEQ ID NO: 5071 - protein, 9 aa, synthetic construct
GAQGTLHVH

SEQ ID NO: 5072 - protein, 9 aa, synthetic construct
GAQGTLHVK

SEQ ID NO: 5073 - protein, 9 aa, synthetic construct
GAQGTLHVF

SEQ ID NO: 5074 - protein, 9 aa, synthetic construct
GAQGTLRLR

SEQ ID NO: 5075 - protein, 9 aa, synthetic construct
PLNGSGHLH

SEQ ID NO: 5076 - protein, 9 aa, synthetic construct
GAQGTLKLY

SEQ ID NO: 5077 - protein, 9 aa, synthetic construct
GAQGTLKVH

SEQ ID NO: 5078 - protein, 9 aa, synthetic construct
GAQGTAHLY

SEQ ID NO: 5079 - protein, 9 aa, synthetic construct
GAQGTAHVY

SEQ ID NO: 5080 - protein, 9 aa, synthetic construct
GAQGTAHVH

SEQ ID NO: 5081 - protein, 9 aa, synthetic construct
GAQGTARLH

SEQ ID NO: 5082 - protein, 9 aa, synthetic construct
GAQGTARLF

SEQ ID NO: 5083 - protein, 9 aa, synthetic construct
GAQGTARVH

SEQ ID NO: 5084 - protein, 9 aa, synthetic construct
GAQGTAKLY

SEQ ID NO: 5085 - protein, 9 aa, synthetic construct
GAQGTAKLF

SEQ ID NO: 5086 - protein, 9 aa, synthetic construct
GAQGTAKVH

SEQ ID NO: 5087 - protein, 9 aa, synthetic construct
GAQGTAKVF

SEQ ID NO: 5088 - protein, 9 aa, synthetic construct
GAQGTIHVR

SEQ ID NO: 5089 - protein, 9 aa, synthetic construct
GAQGTIHVH

SEQ ID NO: 5090 - protein, 9 aa, synthetic construct
GAQGTIHVK

SEQ ID NO: 5091 - protein, 9 aa, synthetic construct
GAQGTIRVY

SEQ ID NO: 5092 - protein, 9 aa, synthetic construct
GAQGTIKLY

SEQ ID NO: 5093 - protein, 9 aa, synthetic construct
GAQGTGHLY

SEQ ID NO: 5094 - protein, 9 aa, synthetic construct
GAQGTGHVH

SEQ ID NO: 5095 - protein, 9 aa, synthetic construct
PLPAVVKVK

SEQ ID NO: 5096 - protein, 9 aa, synthetic construct
GAQGTGRLH

SEQ ID NO: 5097 - protein, 9 aa, synthetic construct
GAQGTGRVF

SEQ ID NO: 5098 - protein, 9 aa, synthetic construct
GAQGSVHVY

SEQ ID NO: 5099 - protein, 9 aa, synthetic construct
GAQGSVKLF

SEQ ID NO: 5100 - protein, 9 aa, synthetic construct
GAQGSVKVY

SEQ ID NO: 5101 - protein, 9 aa, synthetic construct
GAQGSVKVH

SEQ ID NO: 5102 - protein, 9 aa, synthetic construct
GAQGSVKVF

SEQ ID NO: 5103 - protein, 9 aa, synthetic construct
GAQGSLHVH

SEQ ID NO: 5104 - protein, 9 aa, synthetic construct
GAQGSLRVH

SEQ ID NO: 5105 - protein, 9 aa, synthetic construct
GAQGSLKLH

SEQ ID NO: 5106 - protein, 9 aa, synthetic construct
GAQGSAHLY

SEQ ID NO: 5107 - protein, 9 aa, synthetic construct
GAQGSAHLH

SEQ ID NO: 5108 - protein, 9 aa, synthetic construct
GAQGSAHLK

SEQ ID NO: 5109 - protein, 9 aa, synthetic construct
GAQGSAHVY

SEQ ID NO: 5110 - protein, 9 aa, synthetic construct
GAQGSAHVR

SEQ ID NO: 5111 - protein, 9 aa, synthetic construct
GAQGSARVF

SEQ ID NO: 5112 - protein, 9 aa, synthetic construct
GAQGSAKLY

SEQ ID NO: 5113 - protein, 9 aa, synthetic construct
GAQGSAKLF

SEQ ID NO: 5114 - protein, 9 aa, synthetic construct
GAQGSAKVY

SEQ ID NO: 5115 - protein, 9 aa, synthetic construct
GAQGSAKVH

SEQ ID NO: 5116 - protein, 9 aa, synthetic construct
GAQGSAKVF

SEQ ID NO: 5117 - protein, 9 aa, synthetic construct
GAQGSIHVY

SEQ ID NO: 5118 - protein, 9 aa, synthetic construct
GAQGSIHVK

SEQ ID NO: 5119 - protein, 9 aa, synthetic construct
GAQGSIRLF

SEQ ID NO: 5120 - protein, 9 aa, synthetic construct
GAQGSIRVY

SEQ ID NO: 5121 - protein, 9 aa, synthetic construct
GAQGSIKLF

SEQ ID NO: 5122 - protein, 9 aa, synthetic construct
GAQGSGHLF

SEQ ID NO: 5123 - protein, 9 aa, synthetic construct
GAQGSGRLR

SEQ ID NO: 5124 - protein, 9 aa, synthetic construct
GAQGSGRVF

SEQ ID NO: 5125 - protein, 9 aa, synthetic construct
GAQGSGKVF

SEQ ID NO: 5126 - protein, 9 aa, synthetic construct
GAQGVVHLR

SEQ ID NO: 5127 - protein, 9 aa, synthetic construct
GAQGVVHVY

SEQ ID NO: 5128 - protein, 9 aa, synthetic construct
GAQGVVHVK

SEQ ID NO: 5129 - protein, 9 aa, synthetic construct
GAQGVVRVF

SEQ ID NO: 5130 - protein, 9 aa, synthetic construct
GAQGVLHLF

SEQ ID NO: 5131 - protein, 9 aa, synthetic construct
GAQGVLKLH

SEQ ID NO: 5132 - protein, 9 aa, synthetic construct
GAQGVAHLK

SEQ ID NO: 5133 - protein, 9 aa, synthetic construct
GAQGVAHVY

SEQ ID NO: 5134 - protein, 9 aa, synthetic construct
PLPAVLKLH

SEQ ID NO: 5135 - protein, 9 aa, synthetic construct
GAQGVAKLH

SEQ ID NO: 5136 - protein, 9 aa, synthetic construct
GAQGVAKVY

SEQ ID NO: 5137 - protein, 9 aa, synthetic construct
GAQGVAKVH

SEQ ID NO: 5138 - protein, 9 aa, synthetic construct
GAQGVAKVF

SEQ ID NO: 5139 - protein, 9 aa, synthetic construct
GAQGVIHLK

SEQ ID NO: 5140 - protein, 9 aa, synthetic construct
GAQGVIRLY

SEQ ID NO: 5141 - protein, 9 aa, synthetic construct
GAQGVIRLH

SEQ ID NO: 5142 - protein, 9 aa, synthetic construct
GAQGVIRLK

SEQ ID NO: 5143 - protein, 9 aa, synthetic construct
GAQGVIRLF

SEQ ID NO: 5144 - protein, 9 aa, synthetic construct
GAQGVIRVH

SEQ ID NO: 5145 - protein, 9 aa, synthetic construct
GAQGVIRVF

SEQ ID NO: 5146 - protein, 9 aa, synthetic construct
GAQGVIKLF

SEQ ID NO: 5147 - protein, 9 aa, synthetic construct
GAQGVIKVH

SEQ ID NO: 5148 - protein, 9 aa, synthetic construct
GAQGVGHLY

SEQ ID NO: 5149 - protein, 9 aa, synthetic construct
GAQGVGHVY

SEQ ID NO: 5150 - protein, 9 aa, synthetic construct
GAQGVGHVH

SEQ ID NO: 5151 - protein, 9 aa, synthetic construct
GAQGVGHVF

SEQ ID NO: 5152 - protein, 9 aa, synthetic construct
GAQGVGKLY

SEQ ID NO: 5153 - protein, 9 aa, synthetic construct
GAQGVGKVY

SEQ ID NO: 5154 - protein, 9 aa, synthetic construct
GAQGGVHVF

SEQ ID NO: 5155 - protein, 9 aa, synthetic construct
GAQGGVRLH

SEQ ID NO: 5156 - protein, 9 aa, synthetic construct
GAQGGVKVF

SEQ ID NO: 5157 - protein, 9 aa, synthetic construct
PLPAVAHVH

SEQ ID NO: 5158 - protein, 9 aa, synthetic construct
GAQGGAKVF

SEQ ID NO: 5159 - protein, 9 aa, synthetic construct
GAQGGIHVH

SEQ ID NO: 5160 - protein, 9 aa, synthetic construct
PLNGSGHVH

SEQ ID NO: 5161 - protein, 9 aa, synthetic construct
GAQGGIRLF

SEQ ID NO: 5162 - protein, 9 aa, synthetic construct
GAQGGIKLF

SEQ ID NO: 5163 - protein, 9 aa, synthetic construct
GAQGGGRLF

SEQ ID NO: 5164 - protein, 9 aa, synthetic construct
GAQGGGRVY

SEQ ID NO: 5165 - protein, 9 aa, synthetic construct
GAQAAVKLH

SEQ ID NO: 5166 - protein, 9 aa, synthetic construct
GAQAAVKVF

SEQ ID NO: 5167 - protein, 9 aa, synthetic construct
PLPAVAKLY

SEQ ID NO: 5168 - protein, 9 aa, synthetic construct
GAQAALKVH

SEQ ID NO: 5169 - protein, 9 aa, synthetic construct
GAQAALKVF

SEQ ID NO: 5170 - protein, 9 aa, synthetic construct
GAQAAAHVF

SEQ ID NO: 5171 - protein, 9 aa, synthetic construct
GAQAAARLF

SEQ ID NO: 5172 - protein, 9 aa, synthetic construct
GAQAAARVH

SEQ ID NO: 5173 - protein, 9 aa, synthetic construct
GAQAAARVF

SEQ ID NO: 5174 - protein, 9 aa, synthetic construct
GAQAAAKVY

SEQ ID NO: 5175 - protein, 9 aa, synthetic construct
GAQAAIHVY

SEQ ID NO: 5176 - protein, 9 aa, synthetic construct
PLPAVAKVY

SEQ ID NO: 5177 - protein, 9 aa, synthetic construct
GAQAAIKLY

SEQ ID NO: 5178 - protein, 9 aa, synthetic construct
GAQAAGHVR

SEQ ID NO: 5179 - protein, 9 aa, synthetic construct
GAQAAGRLF

SEQ ID NO: 5180 - protein, 9 aa, synthetic construct
GAQAAGRVY

SEQ ID NO: 5181 - protein, 9 aa, synthetic construct
GAQAAGRVH

SEQ ID NO: 5182 - protein, 9 aa, synthetic construct
GAQAAGKLY

SEQ ID NO: 5183 - protein, 9 aa, synthetic construct
GAQAAGKLH

SEQ ID NO: 5184 - protein, 9 aa, synthetic construct
GAQAAGKLF

SEQ ID NO: 5185 - protein, 9 aa, synthetic construct
GAQAAGKVY

SEQ ID NO: 5186 - protein, 9 aa, synthetic construct
GAQAAGKVF

SEQ ID NO: 5187 - protein, 9 aa, synthetic construct
GAQATVHVY

SEQ ID NO: 5188 - protein, 9 aa, synthetic construct
GAQATVKLF

SEQ ID NO: 5189 - protein, 9 aa, synthetic construct
GAQATVKVK

SEQ ID NO: 5190 - protein, 9 aa, synthetic construct
GAQATLHVH

SEQ ID NO: 5191 - protein, 9 aa, synthetic construct
GAQATLHVK

SEQ ID NO: 5192 - protein, 9 aa, synthetic construct
GAQATLKLF

SEQ ID NO: 5193 - protein, 9 aa, synthetic construct
GAQATARLY

SEQ ID NO: 5194 - protein, 9 aa, synthetic construct
GAQATARLH

SEQ ID NO: 5195 - protein, 9 aa, synthetic construct
GAQATARLF

SEQ ID NO: 5196 - protein, 9 aa, synthetic construct
GAQATARVY

SEQ ID NO: 5197 - protein, 9 aa, synthetic construct
GAQATARVH

SEQ ID NO: 5198 - protein, 9 aa, synthetic construct
GAQATARVF

SEQ ID NO: 5199 - protein, 9 aa, synthetic construct
GAQATAKLF

SEQ ID NO: 5200 - protein, 9 aa, synthetic construct
PLNGSGRLY

SEQ ID NO: 5201 - protein, 9 aa, synthetic construct
PLPAVIRLY

SEQ ID NO: 5202 - protein, 9 aa, synthetic construct
GAQATIRLY

SEQ ID NO: 5203 - protein, 9 aa, synthetic construct
GAQATIKLF

SEQ ID NO: 5204 - protein, 9 aa, synthetic construct
GAQATGHLH

SEQ ID NO: 5205 - protein, 9 aa, synthetic construct
GAQATGHVR

SEQ ID NO: 5206 - protein, 9 aa, synthetic construct
GAQATGRLF

SEQ ID NO: 5207 - protein, 9 aa, synthetic construct
GAQATGRVH

SEQ ID NO: 5208 - protein, 9 aa, synthetic construct
PLPAVIRLF

SEQ ID NO: 5209 - protein, 9 aa, synthetic construct
GAQASVHLF

SEQ ID NO: 5210 - protein, 9 aa, synthetic construct
PLPAVIRVH

SEQ ID NO: 5211 - protein, 9 aa, synthetic construct
GAQASVKLF

SEQ ID NO: 5212 - protein, 9 aa, synthetic construct
GAQASVKVH

SEQ ID NO: 5213 - protein, 9 aa, synthetic construct
PLPAVIKLY

SEQ ID NO: 5214 - protein, 9 aa, synthetic construct
GAQASLKLF

SEQ ID NO: 5215 - protein, 9 aa, synthetic construct
GAQASLKVF

SEQ ID NO: 5216 - protein, 9 aa, synthetic construct
GAQASAHLH

SEQ ID NO: 5217 - protein, 9 aa, synthetic construct
PLPAVIKLH

SEQ ID NO: 5218 - protein, 9 aa, synthetic construct
GAQASARLF

SEQ ID NO: 5219 - protein, 9 aa, synthetic construct
GAQASAKVF

SEQ ID NO: 5220 - protein, 9 aa, synthetic construct
PLPAVIKLF

SEQ ID NO: 5221 - protein, 9 aa, synthetic construct
PLPAVIKVY

SEQ ID NO: 5222 - protein, 9 aa, synthetic construct
GAQASIRVK

SEQ ID NO: 5223 - protein, 9 aa, synthetic construct
GAQASIKLR

SEQ ID NO: 5224 - protein, 9 aa, synthetic construct
GAQASIKVF

SEQ ID NO: 5225 - protein, 9 aa, synthetic construct
PLPAVIKVH

SEQ ID NO: 5226 - protein, 9 aa, synthetic construct
PLPAVIKVF

SEQ ID NO: 5227 - protein, 9 aa, synthetic construct
GAQAVVHLK

SEQ ID NO: 5228 - protein, 9 aa, synthetic construct
GAQAVAKLH

SEQ ID NO: 5229 - protein, 9 aa, synthetic construct
GAQAVIRLH

SEQ ID NO: 5230 - protein, 9 aa, synthetic construct
GAQAVIRLF

SEQ ID NO: 5231 - protein, 9 aa, synthetic construct
PLPAVGRLR

SEQ ID NO: 5232 - protein, 9 aa, synthetic construct
GAQAVIKLH

SEQ ID NO: 5233 - protein, 9 aa, synthetic construct
GAQAVIKVF

SEQ ID NO: 5234 - protein, 9 aa, synthetic construct
GAQAVGHVH

SEQ ID NO: 5235 - protein, 9 aa, synthetic construct
GAQAVGHVK

SEQ ID NO: 5236 - protein, 9 aa, synthetic construct
GAQAVGRLY

SEQ ID NO: 5237 - protein, 9 aa, synthetic construct
GAQAVGRVR

SEQ ID NO: 5238 - protein, 9 aa, synthetic construct
GAQAVGKLF

SEQ ID NO: 5239 - protein, 9 aa, synthetic construct
GAQAVGKVY

SEQ ID NO: 5240 - protein, 9 aa, synthetic construct
GAQAGVRVH

SEQ ID NO: 5241 - protein, 9 aa, synthetic construct
PLPAVGKLH

SEQ ID NO: 5242 - protein, 9 aa, synthetic construct
GAQAGAKLF

SEQ ID NO: 5243 - protein, 9 aa, synthetic construct
GAQAGIHLH

SEQ ID NO: 5244 - protein, 9 aa, synthetic construct
GAQAGIRVY

SEQ ID NO: 5245 - protein, 9 aa, synthetic construct
GAQAGGHLK

SEQ ID NO: 5246 - protein, 9 aa, synthetic construct
PLPAVGKVF

SEQ ID NO: 5247 - protein, 9 aa, synthetic construct
GAPGAGHVF

SEQ ID NO: 5248 - protein, 9 aa, synthetic construct
GAPGTVHVR

SEQ ID NO: 5249 - protein, 9 aa, synthetic construct
PLPAGVRVH

SEQ ID NO: 5250 - protein, 9 aa, synthetic construct
GAPGTVKLY

SEQ ID NO: 5251 - protein, 9 aa, synthetic construct
GAPGTVKLH

SEQ ID NO: 5252 - protein, 9 aa, synthetic construct
GAPGTVKVY

SEQ ID NO: 5253 - protein, 9 aa, synthetic construct
GAPGTLKLY

SEQ ID NO: 5254 - protein, 9 aa, synthetic construct
GAPGTARLH

SEQ ID NO: 5255 - protein, 9 aa, synthetic construct
GAPGTAKLH

SEQ ID NO: 5256 - protein, 9 aa, synthetic construct
GAPGTAKVY

SEQ ID NO: 5257 - protein, 9 aa, synthetic construct
GAPGTAKVF

SEQ ID NO: 5258 - protein, 9 aa, synthetic construct
GAPGTIHVK

SEQ ID NO: 5259 - protein, 9 aa, synthetic construct
GAPGTGHLH

SEQ ID NO: 5260 - protein, 9 aa, synthetic construct
GAPGTGHVY

SEQ ID NO: 5261 - protein, 9 aa, synthetic construct
GAPGTGHVF

SEQ ID NO: 5262 - protein, 9 aa, synthetic construct
GAPGTGKLY

SEQ ID NO: 5263 - protein, 9 aa, synthetic construct
GAPGSVHVY

SEQ ID NO: 5264 - protein, 9 aa, synthetic construct
GAPGSVKVY

SEQ ID NO: 5265 - protein, 9 aa, synthetic construct
GAPGSVKVF

SEQ ID NO: 5266 - protein, 9 aa, synthetic construct
GAPGSAHLK

SEQ ID NO: 5267 - protein, 9 aa, synthetic construct
GAPGSARVF

SEQ ID NO: 5268 - protein, 9 aa, synthetic construct
GAPGSIHLK

SEQ ID NO: 5269 - protein, 9 aa, synthetic construct
PLNGSGRVF

SEQ ID NO: 5270 - protein, 9 aa, synthetic construct
GAPGSIRVY

SEQ ID NO: 5271 - protein, 9 aa, synthetic construct
GAPGSIKVK

SEQ ID NO: 5272 - protein, 9 aa, synthetic construct
GAPGSGHVF

SEQ ID NO: 5273 - protein, 9 aa, synthetic construct
GAPGSGKLY

SEQ ID NO: 5274 - protein, 9 aa, synthetic construct
GAPGSGKVF

SEQ ID NO: 5275 - protein, 9 aa, synthetic construct
GAPGVVHLY

SEQ ID NO: 5276 - protein, 9 aa, synthetic construct
GAPGVVHVH

SEQ ID NO: 5277 - protein, 9 aa, synthetic construct
GAPGVVKLF

SEQ ID NO: 5278 - protein, 9 aa, synthetic construct
GAPGVLHVK

SEQ ID NO: 5279 - protein, 9 aa, synthetic construct
GAPGVLKVY

SEQ ID NO: 5280 - protein, 9 aa, synthetic construct
GAPGVAHLH

SEQ ID NO: 5281 - protein, 9 aa, synthetic construct
GAPGVAHLK

SEQ ID NO: 5282 - protein, 9 aa, synthetic construct
GAPGVARLF

SEQ ID NO: 5283 - protein, 9 aa, synthetic construct
GAPGVAKVF

SEQ ID NO: 5284 - protein, 9 aa, synthetic construct
GAPGVIHVY

SEQ ID NO: 5285 - protein, 9 aa, synthetic construct
GAPGVIKLH

SEQ ID NO: 5286 - protein, 9 aa, synthetic construct
GAPGVGHLH

SEQ ID NO: 5287 - protein, 9 aa, synthetic construct
GAPGVGHVY

SEQ ID NO: 5288 - protein, 9 aa, synthetic construct
GAPGVGRVK

SEQ ID NO: 5289 - protein, 9 aa, synthetic construct
GAPGVGKVY

SEQ ID NO: 5290 - protein, 9 aa, synthetic construct
PLPAGAHLH

SEQ ID NO: 5291 - protein, 9 aa, synthetic construct
GAPGGVKLY

SEQ ID NO: 5292 - protein, 9 aa, synthetic construct
GAPGGVKVY

SEQ ID NO: 5293 - protein, 9 aa, synthetic construct
GAPGGLKVY

SEQ ID NO: 5294 - protein, 9 aa, synthetic construct
GAPGGAKLY

SEQ ID NO: 5295 - protein, 9 aa, synthetic construct
GAPGGIHVH

SEQ ID NO: 5296 - protein, 9 aa, synthetic construct
PLNGSGKLH

SEQ ID NO: 5297 - protein, 9 aa, synthetic construct
GAPGGIRLY

SEQ ID NO: 5298 - protein, 9 aa, synthetic construct
GAPGGGRLF

SEQ ID NO: 5299 - protein, 9 aa, synthetic construct
GAPGGGRVF

SEQ ID NO: 5300 - protein, 9 aa, synthetic construct
GAPGGGKVY

SEQ ID NO: 5301 - protein, 9 aa, synthetic construct
GAPGGGKVF

SEQ ID NO: 5302 - protein, 9 aa, synthetic construct
GAPAAVHVR

SEQ ID NO: 5303 - protein, 9 aa, synthetic construct
GAPAAVHVK

SEQ ID NO: 5304 - protein, 9 aa, synthetic construct
GAPAAVHVF

SEQ ID NO: 5305 - protein, 9 aa, synthetic construct
GAPAAVKLY

SEQ ID NO: 5306 - protein, 9 aa, synthetic construct
GAPAALHVK

SEQ ID NO: 5307 - protein, 9 aa, synthetic construct
GAPAAAHLY

SEQ ID NO: 5308 - protein, 9 aa, synthetic construct
GAPAAAHLH

SEQ ID NO: 5309 - protein, 9 aa, synthetic construct
GAPAAAHVR

SEQ ID NO: 5310 - protein, 9 aa, synthetic construct
GAPAAAHVK

SEQ ID NO: 5311 - protein, 9 aa, synthetic construct
GAPAAIHVK

SEQ ID NO: 5312 - protein, 9 aa, synthetic construct
GAPAAIRVR

SEQ ID NO: 5313 - protein, 9 aa, synthetic construct
GAPAAIKVH

SEQ ID NO: 5314 - protein, 9 aa, synthetic construct
GAPAAIKVF

SEQ ID NO: 5315 - protein, 9 aa, synthetic construct
GAPAAGHLH

SEQ ID NO: 5316 - protein, 9 aa, synthetic construct
GAPAAGRLF

SEQ ID NO: 5317 - protein, 9 aa, synthetic construct
GAPAAGKVF

SEQ ID NO: 5318 - protein, 9 aa, synthetic construct
GAPATVHVH

SEQ ID NO: 5319 - protein, 9 aa, synthetic construct
GAPATVKLY

SEQ ID NO: 5320 - protein, 9 aa, synthetic construct
PLPAGIHLK

SEQ ID NO: 5321 - protein, 9 aa, synthetic construct
GAPATAHLK

SEQ ID NO: 5322 - protein, 9 aa, synthetic construct
GAPATAHVK

SEQ ID NO: 5323 - protein, 9 aa, synthetic construct
GAPATARLF

SEQ ID NO: 5324 - protein, 9 aa, synthetic construct
GAPATIHLK

SEQ ID NO: 5325 - protein, 9 aa, synthetic construct
GAPATIHVK

SEQ ID NO: 5326 - protein, 9 aa, synthetic construct
GAPATIRVY

SEQ ID NO: 5327 - protein, 9 aa, synthetic construct
GAPATGHVH

SEQ ID NO: 5328 - protein, 9 aa, synthetic construct
GAPATGKLF

SEQ ID NO: 5329 - protein, 9 aa, synthetic construct
PLPAGIRVY

SEQ ID NO: 5330 - protein, 9 aa, synthetic construct
GAPASVKLF

SEQ ID NO: 5331 - protein, 9 aa, synthetic construct
GAPASVKVF

SEQ ID NO: 5332 - protein, 9 aa, synthetic construct
GAPASLHVK

SEQ ID NO: 5333 - protein, 9 aa, synthetic construct
PLPAGIRVF

SEQ ID NO: 5334 - protein, 9 aa, synthetic construct
GAPASLRVH

SEQ ID NO: 5335 - protein, 9 aa, synthetic construct
GAPASAKVY

SEQ ID NO: 5336 - protein, 9 aa, synthetic construct
GAPASIHVR

SEQ ID NO: 5337 - protein, 9 aa, synthetic construct
GAPASIHVK

SEQ ID NO: 5338 - protein, 9 aa, synthetic construct
GAPASIRVY

SEQ ID NO: 5339 - protein, 9 aa, synthetic construct
PLPAGIKVR

SEQ ID NO: 5340 - protein, 9 aa, synthetic construct
GAPASGKLH

SEQ ID NO: 5341 - protein, 9 aa, synthetic construct
GAPASGKVF

SEQ ID NO: 5342 - protein, 9 aa, synthetic construct
PLPAGGHLH

SEQ ID NO: 5343 - protein, 9 aa, synthetic construct
PLPAGGHVR

SEQ ID NO: 5344 - protein, 9 aa, synthetic construct
GAPAVAHVY

SEQ ID NO: 5345 - protein, 9 aa, synthetic construct
GAPAVAHVK

SEQ ID NO: 5346 - protein, 9 aa, synthetic construct
GAPAVIHLY

SEQ ID NO: 5347 - protein, 9 aa, synthetic construct
GAPAVIHVR

SEQ ID NO: 5348 - protein, 9 aa, synthetic construct
GAPAVIRVR

SEQ ID NO: 5349 - protein, 9 aa, synthetic construct
GAPAVGRLH

SEQ ID NO: 5350 - protein, 9 aa, synthetic construct
GAPAVGRVH

SEQ ID NO: 5351 - protein, 9 aa, synthetic construct
PLPAGGRLF

SEQ ID NO: 5352 - protein, 9 aa, synthetic construct
GAPAVGKLY

SEQ ID NO: 5353 - protein, 9 aa, synthetic construct
GAPAVGKVH

SEQ ID NO: 5354 - protein, 9 aa, synthetic construct
GAPAVGKVF

SEQ ID NO: 5355 - protein, 9 aa, synthetic construct
GAPAGVKVF

SEQ ID NO: 5356 - protein, 9 aa, synthetic construct
PLNGSGKVF

SEQ ID NO: 5357 - protein, 9 aa, synthetic construct
PLPAGGKLY

SEQ ID NO: 5358 - protein, 9 aa, synthetic construct
PLPAGGKLH

SEQ ID NO: 5359 - protein, 9 aa, synthetic construct
GAPAGARVY

SEQ ID NO: 5360 - protein, 9 aa, synthetic construct
PLPAGGKLF

SEQ ID NO: 5361 - protein, 9 aa, synthetic construct
GAPAGGRLF

SEQ ID NO: 5362 - protein, 9 aa, synthetic construct
GAPAGGRVY

SEQ ID NO: 5363 - protein, 9 aa, synthetic construct
PLNGVVHLY

SEQ ID NO: 5364 - protein, 9 aa, synthetic construct
PTNGAVHLY

SEQ ID NO: 5365 - protein, 9 aa, synthetic construct
GVNGAVHLY

SEQ ID NO: 5366 - protein, 9 aa, synthetic construct
GVNGAVHVH

SEQ ID NO: 5367 - protein, 9 aa, synthetic construct
GVNGAVHVK

SEQ ID NO: 5368 - protein, 9 aa, synthetic construct
GVNGAVKVF

SEQ ID NO: 5369 - protein, 9 aa, synthetic construct
GVNGALRLF

SEQ ID NO: 5370 - protein, 9 aa, synthetic construct
PTNGAVHVY

SEQ ID NO: 5371 - protein, 9 aa, synthetic construct
PTNGAVHVR

SEQ ID NO: 5372 - protein, 9 aa, synthetic construct
GVNGAAHLH

SEQ ID NO: 5373 - protein, 9 aa, synthetic construct
GVNGAAHLK

SEQ ID NO: 5374 - protein, 9 aa, synthetic construct
GVNGAAHLF

SEQ ID NO: 5375 - protein, 9 aa, synthetic construct
PTNGAVHVH

SEQ ID NO: 5376 - protein, 9 aa, synthetic construct
GVNGAAKVH

SEQ ID NO: 5377 - protein, 9 aa, synthetic construct
GVNGAAKVF

SEQ ID NO: 5378 - protein, 9 aa, synthetic construct
GVNGAIHLY

SEQ ID NO: 5379 - protein, 9 aa, synthetic construct
GVNGAIHLK

SEQ ID NO: 5380 - protein, 9 aa, synthetic construct
PTNGAVRLY

SEQ ID NO: 5381 - protein, 9 aa, synthetic construct
GVNGAIRLK

SEQ ID NO: 5382 - protein, 9 aa, synthetic construct
GVNGAIRVH

SEQ ID NO: 5383 - protein, 9 aa, synthetic construct
GVNGAIRVF

SEQ ID NO: 5384 - protein, 9 aa, synthetic construct
GVNGAIKLH

SEQ ID NO: 5385 - protein, 9 aa, synthetic construct
GVNGAGHLY

SEQ ID NO: 5386 - protein, 9 aa, synthetic construct
GVNGAGHLR

SEQ ID NO: 5387 - protein, 9 aa, synthetic construct
GVNGAGHLH

SEQ ID NO: 5388 - protein, 9 aa, synthetic construct
GVNGAGHLK

SEQ ID NO: 5389 - protein, 9 aa, synthetic construct
GVNGAGHLF

SEQ ID NO: 5390 - protein, 9 aa, synthetic construct
GVNGAGHVY

SEQ ID NO: 5391 - protein, 9 aa, synthetic construct
GVNGAGHVR

SEQ ID NO: 5392 - protein, 9 aa, synthetic construct
GVNGAGHVH

SEQ ID NO: 5393 - protein, 9 aa, synthetic construct
GVNGAGHVK

SEQ ID NO: 5394 - protein, 9 aa, synthetic construct
GVNGAGHVF

SEQ ID NO: 5395 - protein, 9 aa, synthetic construct
GVNGAGRLY

SEQ ID NO: 5396 - protein, 9 aa, synthetic construct
GVNGAGKLR

SEQ ID NO: 5397 - protein, 9 aa, synthetic construct
GVNGAGKLH

SEQ ID NO: 5398 - protein, 9 aa, synthetic construct
GVNGAGKLF

SEQ ID NO: 5399 - protein, 9 aa, synthetic construct
GVNGAGKVH

SEQ ID NO: 5400 - protein, 9 aa, synthetic construct
GVNGTVHLY

SEQ ID NO: 5401 - protein, 9 aa, synthetic construct
GVNGTVHVK

SEQ ID NO: 5402 - protein, 9 aa, synthetic construct
GVNGTVKLH

SEQ ID NO: 5403 - protein, 9 aa, synthetic construct
GVNGTLHVY

SEQ ID NO: 5404 - protein, 9 aa, synthetic construct
PTNGAVKLY

SEQ ID NO: 5405 - protein, 9 aa, synthetic construct
GVNGTAHLR

SEQ ID NO: 5406 - protein, 9 aa, synthetic construct
GVNGTAHLH

SEQ ID NO: 5407 - protein, 9 aa, synthetic construct
GVNGTAHVR

SEQ ID NO: 5408 - protein, 9 aa, synthetic construct
GVNGTAHVH

SEQ ID NO: 5409 - protein, 9 aa, synthetic construct
GVNGTARLH

SEQ ID NO: 5410 - protein, 9 aa, synthetic construct
GVNGTAKLY

SEQ ID NO: 5411 - protein, 9 aa, synthetic construct
GVNGTAKVF

SEQ ID NO: 5412 - protein, 9 aa, synthetic construct
GVNGTIHVK

SEQ ID NO: 5413 - protein, 9 aa, synthetic construct
PTNGAVKVY

SEQ ID NO: 5414 - protein, 9 aa, synthetic construct
GVNGTIKLF

SEQ ID NO: 5415 - protein, 9 aa, synthetic construct
GVNGTIKVH

SEQ ID NO: 5416 - protein, 9 aa, synthetic construct
GVNGTGHLY

SEQ ID NO: 5417 - protein, 9 aa, synthetic construct
GVNGTGHLK

SEQ ID NO: 5418 - protein, 9 aa, synthetic construct
GVNGTGHLF

SEQ ID NO: 5419 - protein, 9 aa, synthetic construct
GVNGTGHVK

SEQ ID NO: 5420 - protein, 9 aa, synthetic construct
GVNGTGRLF

SEQ ID NO: 5421 - protein, 9 aa, synthetic construct
PTNGAVKVF

SEQ ID NO: 5422 - protein, 9 aa, synthetic construct
GVNGSVHLK

SEQ ID NO: 5423 - protein, 9 aa, synthetic construct
GVNGSVHVK

SEQ ID NO: 5424 - protein, 9 aa, synthetic construct
GVNGSVKLY

SEQ ID NO: 5425 - protein, 9 aa, synthetic construct
GVNGSVKVY

SEQ ID NO: 5426 - protein, 9 aa, synthetic construct
GVNGSLHVH

SEQ ID NO: 5427 - protein, 9 aa, synthetic construct
PTNGALHLF

SEQ ID NO: 5428 - protein, 9 aa, synthetic construct
PTNGALHVY

SEQ ID NO: 5429 - protein, 9 aa, synthetic construct
GVNGSLKLF

SEQ ID NO: 5430 - protein, 9 aa, synthetic construct
GVNGSLKVR

SEQ ID NO: 5431 - protein, 9 aa, synthetic construct
GVNGSAHLY

SEQ ID NO: 5432 - protein, 9 aa, synthetic construct
GVNGSAHLH

SEQ ID NO: 5433 - protein, 9 aa, synthetic construct
GVNGSAHLK

SEQ ID NO: 5434 - protein, 9 aa, synthetic construct
GVNGSAKLF

SEQ ID NO: 5435 - protein, 9 aa, synthetic construct
GVNGSAKVH

SEQ ID NO: 5436 - protein, 9 aa, synthetic construct
GVNGSAKVF

SEQ ID NO: 5437 - protein, 9 aa, synthetic construct
GVNGSIHLY

SEQ ID NO: 5438 - protein, 9 aa, synthetic construct
GVNGSIHLR

SEQ ID NO: 5439 - protein, 9 aa, synthetic construct
GVNGSIHVY

SEQ ID NO: 5440 - protein, 9 aa, synthetic construct
GVNGSIHVH

SEQ ID NO: 5441 - protein, 9 aa, synthetic construct
GVNGSIRVF

SEQ ID NO: 5442 - protein, 9 aa, synthetic construct
GVNGSIKLF

SEQ ID NO: 5443 - protein, 9 aa, synthetic construct
GVNGSIKVH

SEQ ID NO: 5444 - protein, 9 aa, synthetic construct
GVNGSGHLY

SEQ ID NO: 5445 - protein, 9 aa, synthetic construct
GVNGSGKVF

SEQ ID NO: 5446 - protein, 9 aa, synthetic construct
GVNGVVHVR

SEQ ID NO: 5447 - protein, 9 aa, synthetic construct
GVNGVVHVH

SEQ ID NO: 5448 - protein, 9 aa, synthetic construct
GVNGVVHVF

SEQ ID NO: 5449 - protein, 9 aa, synthetic construct
GVNGVVRLY

SEQ ID NO: 5450 - protein, 9 aa, synthetic construct
GVNGVVRLH

SEQ ID NO: 5451 - protein, 9 aa, synthetic construct
GVNGVVRVY

SEQ ID NO: 5452 - protein, 9 aa, synthetic construct
GVNGVVRVH

SEQ ID NO: 5453 - protein, 9 aa, synthetic construct
GVNGVVRVF

SEQ ID NO: 5454 - protein, 9 aa, synthetic construct
GVNGVVKLY

SEQ ID NO: 5455 - protein, 9 aa, synthetic construct
GVNGVVKVH

SEQ ID NO: 5456 - protein, 9 aa, synthetic construct
GVNGVVKVF

SEQ ID NO: 5457 - protein, 9 aa, synthetic construct
PTNGALRVF

SEQ ID NO: 5458 - protein, 9 aa, synthetic construct
GVNGVLRLK

SEQ ID NO: 5459 - protein, 9 aa, synthetic construct
GVNGVLRVH

SEQ ID NO: 5460 - protein, 9 aa, synthetic construct
GVNGVLKLH

SEQ ID NO: 5461 - protein, 9 aa, synthetic construct
GVNGVLKVY

SEQ ID NO: 5462 - protein, 9 aa, synthetic construct
GVNGVLKVH

SEQ ID NO: 5463 - protein, 9 aa, synthetic construct
GVNGVAHVY

SEQ ID NO: 5464 - protein, 9 aa, synthetic construct
GVNGVAHVH

SEQ ID NO: 5465 - protein, 9 aa, synthetic construct
GVNGVAHVK

SEQ ID NO: 5466 - protein, 9 aa, synthetic construct
GVNGVARVF

SEQ ID NO: 5467 - protein, 9 aa, synthetic construct
GVNGVAKLY

SEQ ID NO: 5468 - protein, 9 aa, synthetic construct
GVNGVAKLF

SEQ ID NO: 5469 - protein, 9 aa, synthetic construct
GVNGVAKVY

SEQ ID NO: 5470 - protein, 9 aa, synthetic construct
GVNGVAKVR

SEQ ID NO: 5471 - protein, 9 aa, synthetic construct
PTNGALKLF

SEQ ID NO: 5472 - protein, 9 aa, synthetic construct
GVNGVIHVY

SEQ ID NO: 5473 - protein, 9 aa, synthetic construct
GVNGVIHVK

SEQ ID NO: 5474 - protein, 9 aa, synthetic construct
PTNGALKVY

SEQ ID NO: 5475 - protein, 9 aa, synthetic construct
GVNGVIRLY

SEQ ID NO: 5476 - protein, 9 aa, synthetic construct
GVNGVIRLF

SEQ ID NO: 5477 - protein, 9 aa, synthetic construct
GVNGVIRVF

SEQ ID NO: 5478 - protein, 9 aa, synthetic construct
PTNGALKVH

SEQ ID NO: 5479 - protein, 9 aa, synthetic construct
GVNGVGHLF

SEQ ID NO: 5480 - protein, 9 aa, synthetic construct
GVNGVGRLY

SEQ ID NO: 5481 - protein, 9 aa, synthetic construct
GVNGVGRLF

SEQ ID NO: 5482 - protein, 9 aa, synthetic construct
GVNGVGRVH

SEQ ID NO: 5483 - protein, 9 aa, synthetic construct
GVNGVGRVF

SEQ ID NO: 5484 - protein, 9 aa, synthetic construct
GVNGVGKLY

SEQ ID NO: 5485 - protein, 9 aa, synthetic construct
GVNGVGKLH

SEQ ID NO: 5486 - protein, 9 aa, synthetic construct
GVNGVGKLF

SEQ ID NO: 5487 - protein, 9 aa, synthetic construct
GVNGVGKVY

SEQ ID NO: 5488 - protein, 9 aa, synthetic construct
GVNGVGKVH

SEQ ID NO: 5489 - protein, 9 aa, synthetic construct
GVNGVGKVF

SEQ ID NO: 5490 - protein, 9 aa, synthetic construct
GVNGGVHVY

SEQ ID NO: 5491 - protein, 9 aa, synthetic construct
GVNGGVHVR

SEQ ID NO: 5492 - protein, 9 aa, synthetic construct
GVNGGVHVK

SEQ ID NO: 5493 - protein, 9 aa, synthetic construct
GVNGGVHVF

SEQ ID NO: 5494 - protein, 9 aa, synthetic construct
GVNGGVRVK

SEQ ID NO: 5495 - protein, 9 aa, synthetic construct
GVNGGVKLY

SEQ ID NO: 5496 - protein, 9 aa, synthetic construct
GVNGGVKVY

SEQ ID NO: 5497 - protein, 9 aa, synthetic construct
GVNGGVKVF

SEQ ID NO: 5498 - protein, 9 aa, synthetic construct
GVNGGLKLH

SEQ ID NO: 5499 - protein, 9 aa, synthetic construct
GVNGGLKVF

SEQ ID NO: 5500 - protein, 9 aa, synthetic construct
PTNGAAHVR

SEQ ID NO: 5501 - protein, 9 aa, synthetic construct
GVNGGAHLY

SEQ ID NO: 5502 - protein, 9 aa, synthetic construct
GVNGGAHLR

SEQ ID NO: 5503 - protein, 9 aa, synthetic construct
GVNGGAHLH

SEQ ID NO: 5504 - protein, 9 aa, synthetic construct
GVNGGAHLK

SEQ ID NO: 5505 - protein, 9 aa, synthetic construct
GVNGGAHLF

SEQ ID NO: 5506 - protein, 9 aa, synthetic construct
GVNGGAHVY

SEQ ID NO: 5507 - protein, 9 aa, synthetic construct
GVNGGAHVR

SEQ ID NO: 5508 - protein, 9 aa, synthetic construct
GVNGGAHVH

SEQ ID NO: 5509 - protein, 9 aa, synthetic construct
GVNGGAHVK

SEQ ID NO: 5510 - protein, 9 aa, synthetic construct
GVNGGAHVF

SEQ ID NO: 5511 - protein, 9 aa, synthetic construct
GVNGGARLY

SEQ ID NO: 5512 - protein, 9 aa, synthetic construct
GVNGGARLH

SEQ ID NO: 5513 - protein, 9 aa, synthetic construct
GVNGGARVH

SEQ ID NO: 5514 - protein, 9 aa, synthetic construct
GVNGGARVF

SEQ ID NO: 5515 - protein, 9 aa, synthetic construct
GVNGGAKLY

SEQ ID NO: 5516 - protein, 9 aa, synthetic construct
GVNGGAKLH

SEQ ID NO: 5517 - protein, 9 aa, synthetic construct
GVNGGAKLF

SEQ ID NO: 5518 - protein, 9 aa, synthetic construct
GVNGGAKVY

SEQ ID NO: 5519 - protein, 9 aa, synthetic construct
GVNGGAKVH

SEQ ID NO: 5520 - protein, 9 aa, synthetic construct
GVNGGAKVF

SEQ ID NO: 5521 - protein, 9 aa, synthetic construct
GVNGGIHLR

SEQ ID NO: 5522 - protein, 9 aa, synthetic construct
GVNGGIHVY

SEQ ID NO: 5523 - protein, 9 aa, synthetic construct
GVNGGIHVH

SEQ ID NO: 5524 - protein, 9 aa, synthetic construct
GVNGGIHVK

SEQ ID NO: 5525 - protein, 9 aa, synthetic construct
PLNGVVHVH

SEQ ID NO: 5526 - protein, 9 aa, synthetic construct
GVNGGIKLF

SEQ ID NO: 5527 - protein, 9 aa, synthetic construct
GVNGGGHLY

SEQ ID NO: 5528 - protein, 9 aa, synthetic construct
GVNGGGHLH

SEQ ID NO: 5529 - protein, 9 aa, synthetic construct
GVNGGGHLF

SEQ ID NO: 5530 - protein, 9 aa, synthetic construct
GVNGGGHVY

SEQ ID NO: 5531 - protein, 9 aa, synthetic construct
GVNGGGHVR

SEQ ID NO: 5532 - protein, 9 aa, synthetic construct
GVNGGGHVK

SEQ ID NO: 5533 - protein, 9 aa, synthetic construct
PTNGAARLK

SEQ ID NO: 5534 - protein, 9 aa, synthetic construct
GVNGGGRLY

SEQ ID NO: 5535 - protein, 9 aa, synthetic construct
GVNGGGRVK

SEQ ID NO: 5536 - protein, 9 aa, synthetic construct
GVNGGGKLF

SEQ ID NO: 5537 - protein, 9 aa, synthetic construct
GVNGGGKVH

SEQ ID NO: 5538 - protein, 9 aa, synthetic construct
GVNGGGKVF

SEQ ID NO: 5539 - protein, 9 aa, synthetic construct
PTNGAARVY

SEQ ID NO: 5540 - protein, 9 aa, synthetic construct
GVNAAVHLR

SEQ ID NO: 5541 - protein, 9 aa, synthetic construct
GVNAAVHLK

SEQ ID NO: 5542 - protein, 9 aa, synthetic construct
GVNAAVHVH

SEQ ID NO: 5543 - protein, 9 aa, synthetic construct
GVNAAVRLY

SEQ ID NO: 5544 - protein, 9 aa, synthetic construct
GVNAAVKLY

SEQ ID NO: 5545 - protein, 9 aa, synthetic construct
GVNAAVKLH

SEQ ID NO: 5546 - protein, 9 aa, synthetic construct
GVNAAVKLF

SEQ ID NO: 5547 - protein, 9 aa, synthetic construct
GVNAAVKVY

SEQ ID NO: 5548 - protein, 9 aa, synthetic construct
GVNAAVKVF

SEQ ID NO: 5549 - protein, 9 aa, synthetic construct
GVNAALHLR

SEQ ID NO: 5550 - protein, 9 aa, synthetic construct
GVNAALHVY

SEQ ID NO: 5551 - protein, 9 aa, synthetic construct
GVNAALKLR

SEQ ID NO: 5552 - protein, 9 aa, synthetic construct
GVNAALKLH

SEQ ID NO: 5553 - protein, 9 aa, synthetic construct
GVNAALKVF

SEQ ID NO: 5554 - protein, 9 aa, synthetic construct
GVNAAAHLK

SEQ ID NO: 5555 - protein, 9 aa, synthetic construct
GVNAAAKVY

SEQ ID NO: 5556 - protein, 9 aa, synthetic construct
PTNGAAKLF

SEQ ID NO: 5557 - protein, 9 aa, synthetic construct
GVNAAIHVK

SEQ ID NO: 5558 - protein, 9 aa, synthetic construct
GVNAAIRVY

SEQ ID NO: 5559 - protein, 9 aa, synthetic construct
GVNAAIKLY

SEQ ID NO: 5560 - protein, 9 aa, synthetic construct
GVNAAIKVK

SEQ ID NO: 5561 - protein, 9 aa, synthetic construct
GVNAAGHLH

SEQ ID NO: 5562 - protein, 9 aa, synthetic construct
GVNAAGHLF

SEQ ID NO: 5563 - protein, 9 aa, synthetic construct
GVNAAGHVF

SEQ ID NO: 5564 - protein, 9 aa, synthetic construct
GVNAAGRVK

SEQ ID NO: 5565 - protein, 9 aa, synthetic construct
PTNGAAKVF

SEQ ID NO: 5566 - protein, 9 aa, synthetic construct
GVNAAGKLH

SEQ ID NO: 5567 - protein, 9 aa, synthetic construct
GVNATVHVH

SEQ ID NO: 5568 - protein, 9 aa, synthetic construct
PTNGAIHLR

SEQ ID NO: 5569 - protein, 9 aa, synthetic construct
GVNATVKVY

SEQ ID NO: 5570 - protein, 9 aa, synthetic construct
PTNGAIHLK

SEQ ID NO: 5571 - protein, 9 aa, synthetic construct
GVNATLHLR

SEQ ID NO: 5572 - protein, 9 aa, synthetic construct
GVNATLKLF

SEQ ID NO: 5573 - protein, 9 aa, synthetic construct
PTNGAIHVR

SEQ ID NO: 5574 - protein, 9 aa, synthetic construct
GVNATAHLK

SEQ ID NO: 5575 - protein, 9 aa, synthetic construct
PTNGAIHVH

SEQ ID NO: 5576 - protein, 9 aa, synthetic construct
PTNGAIHVK

SEQ ID NO: 5577 - protein, 9 aa, synthetic construct
GVNATAKLY

SEQ ID NO: 5578 - protein, 9 aa, synthetic construct
GVNATAKLH

SEQ ID NO: 5579 - protein, 9 aa, synthetic construct
GVNATIHLK

SEQ ID NO: 5580 - protein, 9 aa, synthetic construct
GVNATIHVK

SEQ ID NO: 5581 - protein, 9 aa, synthetic construct
PTNGAIRLH

SEQ ID NO: 5582 - protein, 9 aa, synthetic construct
PTNGAIRLK

SEQ ID NO: 5583 - protein, 9 aa, synthetic construct
GVNASVHVF

SEQ ID NO: 5584 - protein, 9 aa, synthetic construct
GVNASVRVR

SEQ ID NO: 5585 - protein, 9 aa, synthetic construct
GVNASLHLY

SEQ ID NO: 5586 - protein, 9 aa, synthetic construct
GVNASLHVH

SEQ ID NO: 5587 - protein, 9 aa, synthetic construct
PTNGAIKLY

SEQ ID NO: 5588 - protein, 9 aa, synthetic construct
GVNASLKLY

SEQ ID NO: 5589 - protein, 9 aa, synthetic construct
PTNGAIKLR

SEQ ID NO: 5590 - protein, 9 aa, synthetic construct
GVNASAHLR

SEQ ID NO: 5591 - protein, 9 aa, synthetic construct
GVNASAHLK

SEQ ID NO: 5592 - protein, 9 aa, synthetic construct
GVNASAHLF

SEQ ID NO: 5593 - protein, 9 aa, synthetic construct
GVNASAHVH

SEQ ID NO: 5594 - protein, 9 aa, synthetic construct
GVNASAHVF

SEQ ID NO: 5595 - protein, 9 aa, synthetic construct
PTNGAIKLH

SEQ ID NO: 5596 - protein, 9 aa, synthetic construct
PTNGAIKLK

SEQ ID NO: 5597 - protein, 9 aa, synthetic construct
PTNGAIKLF

SEQ ID NO: 5598 - protein, 9 aa, synthetic construct
GVNASIHLK

SEQ ID NO: 5599 - protein, 9 aa, synthetic construct
GVNASIHVR

SEQ ID NO: 5600 - protein, 9 aa, synthetic construct
GVNASIRLF

SEQ ID NO: 5601 - protein, 9 aa, synthetic construct
GVNASIRVK

SEQ ID NO: 5602 - protein, 9 aa, synthetic construct
GVNASIKLY

SEQ ID NO: 5603 - protein, 9 aa, synthetic construct
GVNASIKVY

SEQ ID NO: 5604 - protein, 9 aa, synthetic construct
PTNGAIKVH

SEQ ID NO: 5605 - protein, 9 aa, synthetic construct
GVNASGRLH

SEQ ID NO: 5606 - protein, 9 aa, synthetic construct
GVNASGRVF

SEQ ID NO: 5607 - protein, 9 aa, synthetic construct
GVNASGKLF

SEQ ID NO: 5608 - protein, 9 aa, synthetic construct
PLNGVVRLH

SEQ ID NO: 5609 - protein, 9 aa, synthetic construct
PTNGAGHLY

SEQ ID NO: 5610 - protein, 9 aa, synthetic construct
GVNAVVHVF

SEQ ID NO: 5611 - protein, 9 aa, synthetic construct
GVNAVVRVH

SEQ ID NO: 5612 - protein, 9 aa, synthetic construct
GVNAVLHVH

SEQ ID NO: 5613 - protein, 9 aa, synthetic construct
PTNGAGHLF

SEQ ID NO: 5614 - protein, 9 aa, synthetic construct
GVNAVLKLH

SEQ ID NO: 5615 - protein, 9 aa, synthetic construct
GVNAVAHVH

SEQ ID NO: 5616 - protein, 9 aa, synthetic construct
GVNAVARVF

SEQ ID NO: 5617 - protein, 9 aa, synthetic construct
PTNGAGHVF

SEQ ID NO: 5618 - protein, 9 aa, synthetic construct
GVNAVIHVK

SEQ ID NO: 5619 - protein, 9 aa, synthetic construct
GVNAVGHVY

SEQ ID NO: 5620 - protein, 9 aa, synthetic construct
GVNAVGKLY

SEQ ID NO: 5621 - protein, 9 aa, synthetic construct
GVNAVGKVH

SEQ ID NO: 5622 - protein, 9 aa, synthetic construct
GVNAGVRVF

SEQ ID NO: 5623 - protein, 9 aa, synthetic construct
PTNGAGRVH

SEQ ID NO: 5624 - protein, 9 aa, synthetic construct
GVNAGVKLY

SEQ ID NO: 5625 - protein, 9 aa, synthetic construct
GVNAGVKVY

SEQ ID NO: 5626 - protein, 9 aa, synthetic construct
GVNAGVKVF

SEQ ID NO: 5627 - protein, 9 aa, synthetic construct
GVNAGLKLY

SEQ ID NO: 5628 - protein, 9 aa, synthetic construct
GVNAGLKVY

SEQ ID NO: 5629 - protein, 9 aa, synthetic construct
GVNAGLKVF

SEQ ID NO: 5630 - protein, 9 aa, synthetic construct
GVNAGAHLY

SEQ ID NO: 5631 - protein, 9 aa, synthetic construct
GVNAGAHLR

SEQ ID NO: 5632 - protein, 9 aa, synthetic construct
GVNAGAHLH

SEQ ID NO: 5633 - protein, 9 aa, synthetic construct
GVNAGAHLK

SEQ ID NO: 5634 - protein, 9 aa, synthetic construct
GVNAGAHVY

SEQ ID NO: 5635 - protein, 9 aa, synthetic construct
GVNAGAHVR

SEQ ID NO: 5636 - protein, 9 aa, synthetic construct
GVNAGAHVH

SEQ ID NO: 5637 - protein, 9 aa, synthetic construct
GVNAGAHVK

SEQ ID NO: 5638 - protein, 9 aa, synthetic construct
GVNAGAKLY

SEQ ID NO: 5639 - protein, 9 aa, synthetic construct
GVNAGAKLF

SEQ ID NO: 5640 - protein, 9 aa, synthetic construct
GVNAGAKVY

SEQ ID NO: 5641 - protein, 9 aa, synthetic construct
GVNAGAKVH

SEQ ID NO: 5642 - protein, 9 aa, synthetic construct
GVNAGAKVF

SEQ ID NO: 5643 - protein, 9 aa, synthetic construct
PTNGAGKLF

SEQ ID NO: 5644 - protein, 9 aa, synthetic construct
GVNAGIHVK

SEQ ID NO: 5645 - protein, 9 aa, synthetic construct
GVNAGIHVF

SEQ ID NO: 5646 - protein, 9 aa, synthetic construct
GVNAGIKLH

SEQ ID NO: 5647 - protein, 9 aa, synthetic construct
GVNAGIKVR

SEQ ID NO: 5648 - protein, 9 aa, synthetic construct
PTNGAGKVH

SEQ ID NO: 5649 - protein, 9 aa, synthetic construct
GVNAGGHLK

SEQ ID NO: 5650 - protein, 9 aa, synthetic construct
GVNAGGHVY

SEQ ID NO: 5651 - protein, 9 aa, synthetic construct
GVNAGGHVR

SEQ ID NO: 5652 - protein, 9 aa, synthetic construct
GVNAGGHVK

SEQ ID NO: 5653 - protein, 9 aa, synthetic construct
GVNAGGHVF

SEQ ID NO: 5654 - protein, 9 aa, synthetic construct
GVNAGGRLY

SEQ ID NO: 5655 - protein, 9 aa, synthetic construct
GVNAGGRLH

SEQ ID NO: 5656 - protein, 9 aa, synthetic construct
GVNAGGRLF

SEQ ID NO: 5657 - protein, 9 aa, synthetic construct
GVNAGGRVY

SEQ ID NO: 5658 - protein, 9 aa, synthetic construct
GVNAGGKVY

SEQ ID NO: 5659 - protein, 9 aa, synthetic construct
PTNGTVHLY

SEQ ID NO: 5660 - protein, 9 aa, synthetic construct
GVQGAVHLY

SEQ ID NO: 5661 - protein, 9 aa, synthetic construct
GVQGAVHVK

SEQ ID NO: 5662 - protein, 9 aa, synthetic construct
GVQGAVRLY

SEQ ID NO: 5663 - protein, 9 aa, synthetic construct
GVQGAVKLF

SEQ ID NO: 5664 - protein, 9 aa, synthetic construct
GVQGALRVF

SEQ ID NO: 5665 - protein, 9 aa, synthetic construct
PTNGTVHVY

SEQ ID NO: 5666 - protein, 9 aa, synthetic construct
GVQGALKLF

SEQ ID NO: 5667 - protein, 9 aa, synthetic construct
GVQGALKVF

SEQ ID NO: 5668 - protein, 9 aa, synthetic construct
GVQGAAHLY

SEQ ID NO: 5669 - protein, 9 aa, synthetic construct
GVQGAAHVF

SEQ ID NO: 5670 - protein, 9 aa, synthetic construct
GVQGAARLY

SEQ ID NO: 5671 - protein, 9 aa, synthetic construct
GVQGAIHVR

SEQ ID NO: 5672 - protein, 9 aa, synthetic construct
PTNGTVRLY

SEQ ID NO: 5673 - protein, 9 aa, synthetic construct
GVQGAIRVH

SEQ ID NO: 5674 - protein, 9 aa, synthetic construct
PTNGTVRLR

SEQ ID NO: 5675 - protein, 9 aa, synthetic construct
PTNGTVRLH

SEQ ID NO: 5676 - protein, 9 aa, synthetic construct
GVQGAGHLH

SEQ ID NO: 5677 - protein, 9 aa, synthetic construct
PTNGTVRLF

SEQ ID NO: 5678 - protein, 9 aa, synthetic construct
GVQGAGKVY

SEQ ID NO: 5679 - protein, 9 aa, synthetic construct
PTNGTVRVY

SEQ ID NO: 5680 - protein, 9 aa, synthetic construct
GVQGTVHVY

SEQ ID NO: 5681 - protein, 9 aa, synthetic construct
GVQGTVHVH

SEQ ID NO: 5682 - protein, 9 aa, synthetic construct
GVQGTVRLY

SEQ ID NO: 5683 - protein, 9 aa, synthetic construct
GVQGTVRLH

SEQ ID NO: 5684 - protein, 9 aa, synthetic construct
GVQGTVRLF

SEQ ID NO: 5685 - protein, 9 aa, synthetic construct
GVQGTVRVY

SEQ ID NO: 5686 - protein, 9 aa, synthetic construct
PTNGTVRVH

SEQ ID NO: 5687 - protein, 9 aa, synthetic construct
GVQGTVKLY

SEQ ID NO: 5688 - protein, 9 aa, synthetic construct
GVQGTVKLH

SEQ ID NO: 5689 - protein, 9 aa, synthetic construct
GVQGTVKLF

SEQ ID NO: 5690 - protein, 9 aa, synthetic construct
GVQGTVKVY

SEQ ID NO: 5691 - protein, 9 aa, synthetic construct
GVQGTLRLY

SEQ ID NO: 5692 - protein, 9 aa, synthetic construct
PLNGVVRVH

SEQ ID NO: 5693 - protein, 9 aa, synthetic construct
PTNGTVKLY

SEQ ID NO: 5694 - protein, 9 aa, synthetic construct
GVQGTLKLY

SEQ ID NO: 5695 - protein, 9 aa, synthetic construct
GVQGTLKLH

SEQ ID NO: 5696 - protein, 9 aa, synthetic construct
GVQGTLKVK

SEQ ID NO: 5697 - protein, 9 aa, synthetic construct
GVQGTAHLY

SEQ ID NO: 5698 - protein, 9 aa, synthetic construct
GVQGTAHVY

SEQ ID NO: 5699 - protein, 9 aa, synthetic construct
GVQGTAKLY

SEQ ID NO: 5700 - protein, 9 aa, synthetic construct
GVQGTAKVF

SEQ ID NO: 5701 - protein, 9 aa, synthetic construct
GVQGTIHLY

SEQ ID NO: 5702 - protein, 9 aa, synthetic construct
GVQGTIHLK

SEQ ID NO: 5703 - protein, 9 aa, synthetic construct
GVQGTIHVR

SEQ ID NO: 5704 - protein, 9 aa, synthetic construct
GVQGTIHVH

SEQ ID NO: 5705 - protein, 9 aa, synthetic construct
PTNGTVKVY

SEQ ID NO: 5706 - protein, 9 aa, synthetic construct
GVQGTGHVH

SEQ ID NO: 5707 - protein, 9 aa, synthetic construct
GVQGTGRLY

SEQ ID NO: 5708 - protein, 9 aa, synthetic construct
GVQGTGRLF

SEQ ID NO: 5709 - protein, 9 aa, synthetic construct
GVQGTGRVF

SEQ ID NO: 5710 - protein, 9 aa, synthetic construct
PTNGTVKVF

SEQ ID NO: 5711 - protein, 9 aa, synthetic construct
GVQGTGKLY

SEQ ID NO: 5712 - protein, 9 aa, synthetic construct
GVQGTGKLF

SEQ ID NO: 5713 - protein, 9 aa, synthetic construct
GVQGSVRLY

SEQ ID NO: 5714 - protein, 9 aa, synthetic construct
GVQGSVRLF

SEQ ID NO: 5715 - protein, 9 aa, synthetic construct
GVQGSVRVY

SEQ ID NO: 5716 - protein, 9 aa, synthetic construct
PTNGTLHVY

SEQ ID NO: 5717 - protein, 9 aa, synthetic construct
PTNGTLHVH

SEQ ID NO: 5718 - protein, 9 aa, synthetic construct
PTNGTLHVK

SEQ ID NO: 5719 - protein, 9 aa, synthetic construct
GVQGSAKLF

SEQ ID NO: 5720 - protein, 9 aa, synthetic construct
GVQGSAKVF

SEQ ID NO: 5721 - protein, 9 aa, synthetic construct
PTNGTLRLY

SEQ ID NO: 5722 - protein, 9 aa, synthetic construct
PTNGTLRLR

SEQ ID NO: 5723 - protein, 9 aa, synthetic construct
GVQGSIKLY

SEQ ID NO: 5724 - protein, 9 aa, synthetic construct
GVQGSGRLY

SEQ ID NO: 5725 - protein, 9 aa, synthetic construct
GVQGSGKLF

SEQ ID NO: 5726 - protein, 9 aa, synthetic construct
GVQGVVHVK

SEQ ID NO: 5727 - protein, 9 aa, synthetic construct
GVQGVVKLY

SEQ ID NO: 5728 - protein, 9 aa, synthetic construct
GVQGVLHVF

SEQ ID NO: 5729 - protein, 9 aa, synthetic construct
GVQGVLRLR

SEQ ID NO: 5730 - protein, 9 aa, synthetic construct
GVQGVLRVF

SEQ ID NO: 5731 - protein, 9 aa, synthetic construct
PTNGTLKLY

SEQ ID NO: 5732 - protein, 9 aa, synthetic construct
GVQGVLKVY

SEQ ID NO: 5733 - protein, 9 aa, synthetic construct
GVQGVLKVK

SEQ ID NO: 5734 - protein, 9 aa, synthetic construct
GVQGVARLF

SEQ ID NO: 5735 - protein, 9 aa, synthetic construct
GVQGVARVH

SEQ ID NO: 5736 - protein, 9 aa, synthetic construct
GVQGVIHLK

SEQ ID NO: 5737 - protein, 9 aa, synthetic construct
GVQGVIHVH

SEQ ID NO: 5738 - protein, 9 aa, synthetic construct
GVQGVIHVK

SEQ ID NO: 5739 - protein, 9 aa, synthetic construct
GVQGVIRLF

SEQ ID NO: 5740 - protein, 9 aa, synthetic construct
GVQGVIKLH

SEQ ID NO: 5741 - protein, 9 aa, synthetic construct
GVQGVIKLF

SEQ ID NO: 5742 - protein, 9 aa, synthetic construct
PTNGTLKVH

SEQ ID NO: 5743 - protein, 9 aa, synthetic construct
GVQGVGRVH

SEQ ID NO: 5744 - protein, 9 aa, synthetic construct
GVQGVGKLK

SEQ ID NO: 5745 - protein, 9 aa, synthetic construct
PTNGTAHLY

SEQ ID NO: 5746 - protein, 9 aa, synthetic construct
PTNGTAHLR

SEQ ID NO: 5747 - protein, 9 aa, synthetic construct
GVQGGVRLF

SEQ ID NO: 5748 - protein, 9 aa, synthetic construct
PTNGTAHLH

SEQ ID NO: 5749 - protein, 9 aa, synthetic construct
GVQGGVKVF

SEQ ID NO: 5750 - protein, 9 aa, synthetic construct
PTNGTAHLK

SEQ ID NO: 5751 - protein, 9 aa, synthetic construct
GVQGGLRVH

SEQ ID NO: 5752 - protein, 9 aa, synthetic construct
PTNGTAHVY

SEQ ID NO: 5753 - protein, 9 aa, synthetic construct
GVQGGLKLH

SEQ ID NO: 5754 - protein, 9 aa, synthetic construct
GVQGGLKVH

SEQ ID NO: 5755 - protein, 9 aa, synthetic construct
PTNGTAHVR

SEQ ID NO: 5756 - protein, 9 aa, synthetic construct
GVQGGAHVR

SEQ ID NO: 5757 - protein, 9 aa, synthetic construct
GVQGGAHVF

SEQ ID NO: 5758 - protein, 9 aa, synthetic construct
PTNGTAHVH

SEQ ID NO: 5759 - protein, 9 aa, synthetic construct
PTNGTAHVK

SEQ ID NO: 5760 - protein, 9 aa, synthetic construct
PTNGTAHVF

SEQ ID NO: 5761 - protein, 9 aa, synthetic construct
GVQGGIRLF

SEQ ID NO: 5762 - protein, 9 aa, synthetic construct
GVQGGIKLK

SEQ ID NO: 5763 - protein, 9 aa, synthetic construct
GVQGGGRVY

SEQ ID NO: 5764 - protein, 9 aa, synthetic construct
GVQGGGRVF

SEQ ID NO: 5765 - protein, 9 aa, synthetic construct
GVQGGGKLY

SEQ ID NO: 5766 - protein, 9 aa, synthetic construct
GVQAAVRVK

SEQ ID NO: 5767 - protein, 9 aa, synthetic construct
PTNGTARVH

SEQ ID NO: 5768 - protein, 9 aa, synthetic construct
GVQAAVKLH

SEQ ID NO: 5769 - protein, 9 aa, synthetic construct
PTNGTARVF

SEQ ID NO: 5770 - protein, 9 aa, synthetic construct
GVQAALRVH

SEQ ID NO: 5771 - protein, 9 aa, synthetic construct
PTNGTAKLY

SEQ ID NO: 5772 - protein, 9 aa, synthetic construct
GVQAALKLK

SEQ ID NO: 5773 - protein, 9 aa, synthetic construct
GVQAAAKLH

SEQ ID NO: 5774 - protein, 9 aa, synthetic construct
PTNGTAKVY

SEQ ID NO: 5775 - protein, 9 aa, synthetic construct
GVQAAGHVF

SEQ ID NO: 5776 - protein, 9 aa, synthetic construct
PTNGTAKVF

SEQ ID NO: 5777 - protein, 9 aa, synthetic construct
GVQATVRLY

SEQ ID NO: 5778 - protein, 9 aa, synthetic construct
GVQATVKLF

SEQ ID NO: 5779 - protein, 9 aa, synthetic construct
PTNGTIHLK

SEQ ID NO: 5780 - protein, 9 aa, synthetic construct
GVQATLKLY

SEQ ID NO: 5781 - protein, 9 aa, synthetic construct
PTNGTIHVR

SEQ ID NO: 5782 - protein, 9 aa, synthetic construct
PTNGTIHVH

SEQ ID NO: 5783 - protein, 9 aa, synthetic construct
GVQATARLF

SEQ ID NO: 5784 - protein, 9 aa, synthetic construct
PTNGTIHVK

SEQ ID NO: 5785 - protein, 9 aa, synthetic construct
GVQATAKLY

SEQ ID NO: 5786 - protein, 9 aa, synthetic construct
PTNGTIHVF

SEQ ID NO: 5787 - protein, 9 aa, synthetic construct
GVQATIHVR

SEQ ID NO: 5788 - protein, 9 aa, synthetic construct
GVQATGHVH

SEQ ID NO: 5789 - protein, 9 aa, synthetic construct
PTNGTIRVY

SEQ ID NO: 5790 - protein, 9 aa, synthetic construct
GVQASVHLK

SEQ ID NO: 5791 - protein, 9 aa, synthetic construct
GVQASVRVR

SEQ ID NO: 5792 - protein, 9 aa, synthetic construct
GVQASVKLH

SEQ ID NO: 5793 - protein, 9 aa, synthetic construct
GVQASVKLF

SEQ ID NO: 5794 - protein, 9 aa, synthetic construct
GVQASVKVH

SEQ ID NO: 5795 - protein, 9 aa, synthetic construct
GVQASAHVK

SEQ ID NO: 5796 - protein, 9 aa, synthetic construct
PTNGTIKLH

SEQ ID NO: 5797 - protein, 9 aa, synthetic construct
PTNGTIKVH

SEQ ID NO: 5798 - protein, 9 aa, synthetic construct
GVQASGHLY

SEQ ID NO: 5799 - protein, 9 aa, synthetic construct
PLNGVVKVH

SEQ ID NO: 5800 - protein, 9 aa, synthetic construct
PTNGTGHLY

SEQ ID NO: 5801 - protein, 9 aa, synthetic construct
GVQAVVRVY

SEQ ID NO: 5802 - protein, 9 aa, synthetic construct
PTNGTGHLK

SEQ ID NO: 5803 - protein, 9 aa, synthetic construct
PTNGTGHVR

SEQ ID NO: 5804 - protein, 9 aa, synthetic construct
PTNGTGHVH

SEQ ID NO: 5805 - protein, 9 aa, synthetic construct
PTNGTGHVK

SEQ ID NO: 5806 - protein, 9 aa, synthetic construct
GVQAVAKVY

SEQ ID NO: 5807 - protein, 9 aa, synthetic construct
PTNGTGHVF

SEQ ID NO: 5808 - protein, 9 aa, synthetic construct
GVQAVIHLH

SEQ ID NO: 5809 - protein, 9 aa, synthetic construct
GVQAVIHVK

SEQ ID NO: 5810 - protein, 9 aa, synthetic construct
GVQAVGHVK

SEQ ID NO: 5811 - protein, 9 aa, synthetic construct
GVQAVGRVY

SEQ ID NO: 5812 - protein, 9 aa, synthetic construct
GVQAVGRVK

SEQ ID NO: 5813 - protein, 9 aa, synthetic construct
PTNGTGRLF

SEQ ID NO: 5814 - protein, 9 aa, synthetic construct
PTNGTGRVY

SEQ ID NO: 5815 - protein, 9 aa, synthetic construct
GVQAGVKLY

SEQ ID NO: 5816 - protein, 9 aa, synthetic construct
PTNGTGKLY

SEQ ID NO: 5817 - protein, 9 aa, synthetic construct
GVQAGAHLK

SEQ ID NO: 5818 - protein, 9 aa, synthetic construct
GVQAGARVF

SEQ ID NO: 5819 - protein, 9 aa, synthetic construct
GVQAGIHLF

SEQ ID NO: 5820 - protein, 9 aa, synthetic construct
GVQAGIKVY

SEQ ID NO: 5821 - protein, 9 aa, synthetic construct
PTNGTGKVH

SEQ ID NO: 5822 - protein, 9 aa, synthetic construct
GVPGAVRLY

SEQ ID NO: 5823 - protein, 9 aa, synthetic construct
GVPGAVKLY

SEQ ID NO: 5824 - protein, 9 aa, synthetic construct
GVPGAVKVF

SEQ ID NO: 5825 - protein, 9 aa, synthetic construct
PTNGSVHLK

SEQ ID NO: 5826 - protein, 9 aa, synthetic construct
GVPGAAHLY

SEQ ID NO: 5827 - protein, 9 aa, synthetic construct
GVPGAAHVH

SEQ ID NO: 5828 - protein, 9 aa, synthetic construct
GVPGAAKVF

SEQ ID NO: 5829 - protein, 9 aa, synthetic construct
GVPGAIHLR

SEQ ID NO: 5830 - protein, 9 aa, synthetic construct
GVPGAIHLK

SEQ ID NO: 5831 - protein, 9 aa, synthetic construct
PTNGSVRLY

SEQ ID NO: 5832 - protein, 9 aa, synthetic construct
GVPGAGKLF

SEQ ID NO: 5833 - protein, 9 aa, synthetic construct
GVPGTVHLY

SEQ ID NO: 5834 - protein, 9 aa, synthetic construct
GVPGTVHVY

SEQ ID NO: 5835 - protein, 9 aa, synthetic construct
GVPGTVKLF

SEQ ID NO: 5836 - protein, 9 aa, synthetic construct
GVPGTLHVY

SEQ ID NO: 5837 - protein, 9 aa, synthetic construct
GVPGTLRLH

SEQ ID NO: 5838 - protein, 9 aa, synthetic construct
PTNGSVKLY

SEQ ID NO: 5839 - protein, 9 aa, synthetic construct
GVPGTLKLY

SEQ ID NO: 5840 - protein, 9 aa, synthetic construct
GVPGTLKVY

SEQ ID NO: 5841 - protein, 9 aa, synthetic construct
GVPGTAHVR

SEQ ID NO: 5842 - protein, 9 aa, synthetic construct
GVPGTAKLY

SEQ ID NO: 5843 - protein, 9 aa, synthetic construct
GVPGTAKLF

SEQ ID NO: 5844 - protein, 9 aa, synthetic construct
GVPGTAKVF

SEQ ID NO: 5845 - protein, 9 aa, synthetic construct
GVPGTIHVY

SEQ ID NO: 5846 - protein, 9 aa, synthetic construct
GVPGTIHVH

SEQ ID NO: 5847 - protein, 9 aa, synthetic construct
GVPGTIHVK

SEQ ID NO: 5848 - protein, 9 aa, synthetic construct
PTNGSVKVY

SEQ ID NO: 5849 - protein, 9 aa, synthetic construct
GVPGTGHLY

SEQ ID NO: 5850 - protein, 9 aa, synthetic construct
GVPGTGHLK

SEQ ID NO: 5851 - protein, 9 aa, synthetic construct
GVPGTGHLF

SEQ ID NO: 5852 - protein, 9 aa, synthetic construct
GVPGTGRLF

SEQ ID NO: 5853 - protein, 9 aa, synthetic construct
PTNGSVKVF

SEQ ID NO: 5854 - protein, 9 aa, synthetic construct
GVPGTGKLY

SEQ ID NO: 5855 - protein, 9 aa, synthetic construct
GVPGTGKVF

SEQ ID NO: 5856 - protein, 9 aa, synthetic construct
GVPGSVHLK

SEQ ID NO: 5857 - protein, 9 aa, synthetic construct
GVPGSVHVK

SEQ ID NO: 5858 - protein, 9 aa, synthetic construct
GVPGSVHVF

SEQ ID NO: 5859 - protein, 9 aa, synthetic construct
PTNGSLHLR

SEQ ID NO: 5860 - protein, 9 aa, synthetic construct
GVPGSVKLF

SEQ ID NO: 5861 - protein, 9 aa, synthetic construct
GVPGSVKVY

SEQ ID NO: 5862 - protein, 9 aa, synthetic construct
GVPGSLKLF

SEQ ID NO: 5863 - protein, 9 aa, synthetic construct
GVPGSAHLY

SEQ ID NO: 5864 - protein, 9 aa, synthetic construct
GVPGSAHLH

SEQ ID NO: 5865 - protein, 9 aa, synthetic construct
GVPGSAHLK

SEQ ID NO: 5866 - protein, 9 aa, synthetic construct
GVPGSAHVH

SEQ ID NO: 5867 - protein, 9 aa, synthetic construct
GVPGSAHVF

SEQ ID NO: 5868 - protein, 9 aa, synthetic construct
GVPGSARLF

SEQ ID NO: 5869 - protein, 9 aa, synthetic construct
GVPGSAKLY

SEQ ID NO: 5870 - protein, 9 aa, synthetic construct
GVPGSAKLH

SEQ ID NO: 5871 - protein, 9 aa, synthetic construct
GVPGSAKLF

SEQ ID NO: 5872 - protein, 9 aa, synthetic construct
GVPGSAKVY

SEQ ID NO: 5873 - protein, 9 aa, synthetic construct
GVPGSAKVH

SEQ ID NO: 5874 - protein, 9 aa, synthetic construct
GVPGSAKVF

SEQ ID NO: 5875 - protein, 9 aa, synthetic construct
GVPGSIHLR

SEQ ID NO: 5876 - protein, 9 aa, synthetic construct
GVPGSIHVY

SEQ ID NO: 5877 - protein, 9 aa, synthetic construct
GVPGSIHVH

SEQ ID NO: 5878 - protein, 9 aa, synthetic construct
GVPGSIHVF

SEQ ID NO: 5879 - protein, 9 aa, synthetic construct
GVPGSIRLF

SEQ ID NO: 5880 - protein, 9 aa, synthetic construct
GVPGSIRVY

SEQ ID NO: 5881 - protein, 9 aa, synthetic construct
GVPGSIKLF

SEQ ID NO: 5882 - protein, 9 aa, synthetic construct
GVPGSIKVH

SEQ ID NO: 5883 - protein, 9 aa, synthetic construct
GVPGSGHLY

SEQ ID NO: 5884 - protein, 9 aa, synthetic construct
GVPGSGHLR

SEQ ID NO: 5885 - protein, 9 aa, synthetic construct
GVPGSGHLH

SEQ ID NO: 5886 - protein, 9 aa, synthetic construct
GVPGSGHLK

SEQ ID NO: 5887 - protein, 9 aa, synthetic construct
GVPGSGHLF

SEQ ID NO: 5888 - protein, 9 aa, synthetic construct
GVPGSGHVY

SEQ ID NO: 5889 - protein, 9 aa, synthetic construct
GVPGSGHVR

SEQ ID NO: 5890 - protein, 9 aa, synthetic construct
GVPGSGHVH

SEQ ID NO: 5891 - protein, 9 aa, synthetic construct
GVPGSGHVK

SEQ ID NO: 5892 - protein, 9 aa, synthetic construct
GVPGSGHVF

SEQ ID NO: 5893 - protein, 9 aa, synthetic construct
GVPGSGRLY

SEQ ID NO: 5894 - protein, 9 aa, synthetic construct
GVPGSGRVF

SEQ ID NO: 5895 - protein, 9 aa, synthetic construct
GVPGSGKLY

SEQ ID NO: 5896 - protein, 9 aa, synthetic construct
GVPGSGKLH

SEQ ID NO: 5897 - protein, 9 aa, synthetic construct
GVPGSGKLF

SEQ ID NO: 5898 - protein, 9 aa, synthetic construct
GVPGSGKVF

SEQ ID NO: 5899 - protein, 9 aa, synthetic construct
GVPGVVRVY

SEQ ID NO: 5900 - protein, 9 aa, synthetic construct
GVPGVVRVH

SEQ ID NO: 5901 - protein, 9 aa, synthetic construct
GVPGVLKVH

SEQ ID NO: 5902 - protein, 9 aa, synthetic construct
GVPGVAKLY

SEQ ID NO: 5903 - protein, 9 aa, synthetic construct
PTNGSLKLF

SEQ ID NO: 5904 - protein, 9 aa, synthetic construct
GVPGVIHVY

SEQ ID NO: 5905 - protein, 9 aa, synthetic construct
GVPGVIHVR

SEQ ID NO: 5906 - protein, 9 aa, synthetic construct
GVPGVIHVK

SEQ ID NO: 5907 - protein, 9 aa, synthetic construct
GVPGVGKLY

SEQ ID NO: 5908 - protein, 9 aa, synthetic construct
PTNGSAHLY

SEQ ID NO: 5909 - protein, 9 aa, synthetic construct
GVPGGVHVY

SEQ ID NO: 5910 - protein, 9 aa, synthetic construct
GVPGGVHVR

SEQ ID NO: 5911 - protein, 9 aa, synthetic construct
GVPGGVHVK

SEQ ID NO: 5912 - protein, 9 aa, synthetic construct
GVPGGVRVY

SEQ ID NO: 5913 - protein, 9 aa, synthetic construct
GVPGGVKLY

SEQ ID NO: 5914 - protein, 9 aa, synthetic construct
GVPGGVKVY

SEQ ID NO: 5915 - protein, 9 aa, synthetic construct
PTNGSAHLK

SEQ ID NO: 5916 - protein, 9 aa, synthetic construct
PTNGSAHVR

SEQ ID NO: 5917 - protein, 9 aa, synthetic construct
GVPGGAHLH

SEQ ID NO: 5918 - protein, 9 aa, synthetic construct
GVPGGAHLK

SEQ ID NO: 5919 - protein, 9 aa, synthetic construct
PTNGSAHVH

SEQ ID NO: 5920 - protein, 9 aa, synthetic construct
GVPGGAKLF

SEQ ID NO: 5921 - protein, 9 aa, synthetic construct
GVPGGAKVH

SEQ ID NO: 5922 - protein, 9 aa, synthetic construct
PTNGSAHVF

SEQ ID NO: 5923 - protein, 9 aa, synthetic construct
GVPGGIHVR

SEQ ID NO: 5924 - protein, 9 aa, synthetic construct
GVPGGIHVH

SEQ ID NO: 5925 - protein, 9 aa, synthetic construct
GVPGGIHVK

SEQ ID NO: 5926 - protein, 9 aa, synthetic construct
GVPGGGHLY

SEQ ID NO: 5927 - protein, 9 aa, synthetic construct
GVPGGGRLY

SEQ ID NO: 5928 - protein, 9 aa, synthetic construct
GVPGGGKLF

SEQ ID NO: 5929 - protein, 9 aa, synthetic construct
GVPAAVHLR

SEQ ID NO: 5930 - protein, 9 aa, synthetic construct
GVPAAVRLY

SEQ ID NO: 5931 - protein, 9 aa, synthetic construct
GVPAAVRLR

SEQ ID NO: 5932 - protein, 9 aa, synthetic construct
GVPAAVRLH

SEQ ID NO: 5933 - protein, 9 aa, synthetic construct
GVPAAVRLF

SEQ ID NO: 5934 - protein, 9 aa, synthetic construct
GVPAAVRVY

SEQ ID NO: 5935 - protein, 9 aa, synthetic construct
GVPAAVRVH

SEQ ID NO: 5936 - protein, 9 aa, synthetic construct
GVPAAVKLY

SEQ ID NO: 5937 - protein, 9 aa, synthetic construct
GVPAAVKVY

SEQ ID NO: 5938 - protein, 9 aa, synthetic construct
GVPAALRLY

SEQ ID NO: 5939 - protein, 9 aa, synthetic construct
GVPAALRVF

SEQ ID NO: 5940 - protein, 9 aa, synthetic construct
PLNGVLHVK

SEQ ID NO: 5941 - protein, 9 aa, synthetic construct
GVPAALKVY

SEQ ID NO: 5942 - protein, 9 aa, synthetic construct
GVPAAAHLY

SEQ ID NO: 5943 - protein, 9 aa, synthetic construct
GVPAAAHLR

SEQ ID NO: 5944 - protein, 9 aa, synthetic construct
GVPAAAHLH

SEQ ID NO: 5945 - protein, 9 aa, synthetic construct
GVPAAAHLF

SEQ ID NO: 5946 - protein, 9 aa, synthetic construct
GVPAAARVH

SEQ ID NO: 5947 - protein, 9 aa, synthetic construct
GVPAAAKVY

SEQ ID NO: 5948 - protein, 9 aa, synthetic construct
GVPAAIHVK

SEQ ID NO: 5949 - protein, 9 aa, synthetic construct
GVPAAIKLH

SEQ ID NO: 5950 - protein, 9 aa, synthetic construct
GVPAAGHLY

SEQ ID NO: 5951 - protein, 9 aa, synthetic construct
GVPAAGHLH

SEQ ID NO: 5952 - protein, 9 aa, synthetic construct
GVPAAGHLK

SEQ ID NO: 5953 - protein, 9 aa, synthetic construct
GVPAAGHVH

SEQ ID NO: 5954 - protein, 9 aa, synthetic construct
GVPAAGRLF

SEQ ID NO: 5955 - protein, 9 aa, synthetic construct
GVPAAGRVY

SEQ ID NO: 5956 - protein, 9 aa, synthetic construct
GVPAAGRVH

SEQ ID NO: 5957 - protein, 9 aa, synthetic construct
GVPAAGRVF

SEQ ID NO: 5958 - protein, 9 aa, synthetic construct
GVPAAGKLH

SEQ ID NO: 5959 - protein, 9 aa, synthetic construct
GVPAAGKLF

SEQ ID NO: 5960 - protein, 9 aa, synthetic construct
GVPAAGKVH

SEQ ID NO: 5961 - protein, 9 aa, synthetic construct
GVPATVHVK

SEQ ID NO: 5962 - protein, 9 aa, synthetic construct
PTNGSIHLR

SEQ ID NO: 5963 - protein, 9 aa, synthetic construct
GVPATVRLY

SEQ ID NO: 5964 - protein, 9 aa, synthetic construct
GVPATVRVH

SEQ ID NO: 5965 - protein, 9 aa, synthetic construct
GVPATLRLR

SEQ ID NO: 5966 - protein, 9 aa, synthetic construct
PTNGSIHVY

SEQ ID NO: 5967 - protein, 9 aa, synthetic construct
GVPATAHLK

SEQ ID NO: 5968 - protein, 9 aa, synthetic construct
GVPATARVY

SEQ ID NO: 5969 - protein, 9 aa, synthetic construct
GVPATAKLH

SEQ ID NO: 5970 - protein, 9 aa, synthetic construct
GVPATAKVF

SEQ ID NO: 5971 - protein, 9 aa, synthetic construct
GVPATIHVH

SEQ ID NO: 5972 - protein, 9 aa, synthetic construct
GVPATIRLY

SEQ ID NO: 5973 - protein, 9 aa, synthetic construct
GVPATIRVY

SEQ ID NO: 5974 - protein, 9 aa, synthetic construct
GVPATIKLH

SEQ ID NO: 5975 - protein, 9 aa, synthetic construct
GVPATGHLH

SEQ ID NO: 5976 - protein, 9 aa, synthetic construct
GVPATGHVH

SEQ ID NO: 5977 - protein, 9 aa, synthetic construct
GVPATGRVF

SEQ ID NO: 5978 - protein, 9 aa, synthetic construct
GVPATGKLY

SEQ ID NO: 5979 - protein, 9 aa, synthetic construct
PTNGSIRVY

SEQ ID NO: 5980 - protein, 9 aa, synthetic construct
GVPASVHLR

SEQ ID NO: 5981 - protein, 9 aa, synthetic construct
GVPASVKLF

SEQ ID NO: 5982 - protein, 9 aa, synthetic construct
GVPASLHVK

SEQ ID NO: 5983 - protein, 9 aa, synthetic construct
PTNGSIKLY

SEQ ID NO: 5984 - protein, 9 aa, synthetic construct
GVPASLKLH

SEQ ID NO: 5985 - protein, 9 aa, synthetic construct
GVPASAHVH

SEQ ID NO: 5986 - protein, 9 aa, synthetic construct
GVPASAHVF

SEQ ID NO: 5987 - protein, 9 aa, synthetic construct
GVPASAKLY

SEQ ID NO: 5988 - protein, 9 aa, synthetic construct
GVPASAKLF

SEQ ID NO: 5989 - protein, 9 aa, synthetic construct
GVPASAKVF

SEQ ID NO: 5990 - protein, 9 aa, synthetic construct
PTNGSIKLF

SEQ ID NO: 5991 - protein, 9 aa, synthetic construct
GVPASIKVY

SEQ ID NO: 5992 - protein, 9 aa, synthetic construct
GVPASIKVF

SEQ ID NO: 5993 - protein, 9 aa, synthetic construct
PTNGSIKVH

SEQ ID NO: 5994 - protein, 9 aa, synthetic construct
GVPASGHLY

SEQ ID NO: 5995 - protein, 9 aa, synthetic construct
GVPASGRVF

SEQ ID NO: 5996 - protein, 9 aa, synthetic construct
PTNGSIKVF

SEQ ID NO: 5997 - protein, 9 aa, synthetic construct
GVPASGKVY

SEQ ID NO: 5998 - protein, 9 aa, synthetic construct
GVPASGKVF

SEQ ID NO: 5999 - protein, 9 aa, synthetic construct
PTNGSGHLY

SEQ ID NO: 6000 - protein, 9 aa, synthetic construct
GVPAVVKVH

SEQ ID NO: 6001 - protein, 9 aa, synthetic construct
GVPAVVKVK

SEQ ID NO: 6002 - protein, 9 aa, synthetic construct
GVPAVLHLK

SEQ ID NO: 6003 - protein, 9 aa, synthetic construct
GVPAVLKLH

SEQ ID NO: 6004 - protein, 9 aa, synthetic construct
GVPAVLKLK

SEQ ID NO: 6005 - protein, 9 aa, synthetic construct
GVPAVAHVH

SEQ ID NO: 6006 - protein, 9 aa, synthetic construct
PTNGSGRLY

SEQ ID NO: 6007 - protein, 9 aa, synthetic construct
GVPAVIKVH

SEQ ID NO: 6008 - protein, 9 aa, synthetic construct
GVPAVGHVY

SEQ ID NO: 6009 - protein, 9 aa, synthetic construct
GVPAGVRLY

SEQ ID NO: 6010 - protein, 9 aa, synthetic construct
GVPAGVRVF

SEQ ID NO: 6011 - protein, 9 aa, synthetic construct
GVPAGVKLF

SEQ ID NO: 6012 - protein, 9 aa, synthetic construct
PTNGSGRVF

SEQ ID NO: 6013 - protein, 9 aa, synthetic construct
GVPAGAHLR

SEQ ID NO: 6014 - protein, 9 aa, synthetic construct
GVPAGARVK

SEQ ID NO: 6015 - protein, 9 aa, synthetic construct
GVPAGARVF

SEQ ID NO: 6016 - protein, 9 aa, synthetic construct
GVPAGIHVR

SEQ ID NO: 6017 - protein, 9 aa, synthetic construct
GVPAGIHVK

SEQ ID NO: 6018 - protein, 9 aa, synthetic construct
GVPAGIKVR

SEQ ID NO: 6019 - protein, 9 aa, synthetic construct
GVPAGGRVH

SEQ ID NO: 6020 - protein, 9 aa, synthetic construct
GVPAGGRVK

SEQ ID NO: 6021 - protein, 9 aa, synthetic construct
PTNGSGKVF

SEQ ID NO: 6022 - protein, 9 aa, synthetic construct
PTNGVVHLY

SEQ ID NO: 6023 - protein, 9 aa, synthetic construct
GINGAVHLR

SEQ ID NO: 6024 - protein, 9 aa, synthetic construct
PTNGVVHLH

SEQ ID NO: 6025 - protein, 9 aa, synthetic construct
GINGAVKLH

SEQ ID NO: 6026 - protein, 9 aa, synthetic construct
PTNGVVHLK

SEQ ID NO: 6027 - protein, 9 aa, synthetic construct
PTNGVVHVY

SEQ ID NO: 6028 - protein, 9 aa, synthetic construct
GINGALKVK

SEQ ID NO: 6029 - protein, 9 aa, synthetic construct
PTNGVVHVR

SEQ ID NO: 6030 - protein, 9 aa, synthetic construct
PTNGVVHVH

SEQ ID NO: 6031 - protein, 9 aa, synthetic construct
GINGAARVY

SEQ ID NO: 6032 - protein, 9 aa, synthetic construct
PTNGVVHVK

SEQ ID NO: 6033 - protein, 9 aa, synthetic construct
PTNGVVHVF

SEQ ID NO: 6034 - protein, 9 aa, synthetic construct
GINGAIRVF

SEQ ID NO: 6035 - protein, 9 aa, synthetic construct
GINGAIKLH

SEQ ID NO: 6036 - protein, 9 aa, synthetic construct
GINGAGRLY

SEQ ID NO: 6037 - protein, 9 aa, synthetic construct
GINGAGRVY

SEQ ID NO: 6038 - protein, 9 aa, synthetic construct
GINGTVHLY

SEQ ID NO: 6039 - protein, 9 aa, synthetic construct
GINGTVHLH

SEQ ID NO: 6040 - protein, 9 aa, synthetic construct
GINGTVHVH

SEQ ID NO: 6041 - protein, 9 aa, synthetic construct
GINGTVRLY

SEQ ID NO: 6042 - protein, 9 aa, synthetic construct
GINGTVRVH

SEQ ID NO: 6043 - protein, 9 aa, synthetic construct
PTNGVVRVH

SEQ ID NO: 6044 - protein, 9 aa, synthetic construct
GINGTLHVY

SEQ ID NO: 6045 - protein, 9 aa, synthetic construct
GINGTLKLY

SEQ ID NO: 6046 - protein, 9 aa, synthetic construct
GINGTLKVH

SEQ ID NO: 6047 - protein, 9 aa, synthetic construct
GINGTAHLK

SEQ ID NO: 6048 - protein, 9 aa, synthetic construct
GINGTAHVR

SEQ ID NO: 6049 - protein, 9 aa, synthetic construct
GINGTAKLY

SEQ ID NO: 6050 - protein, 9 aa, synthetic construct
GINGTAKLF

SEQ ID NO: 6051 - protein, 9 aa, synthetic construct
GINGTAKVF

SEQ ID NO: 6052 - protein, 9 aa, synthetic construct
GINGTIKLY

SEQ ID NO: 6053 - protein, 9 aa, synthetic construct
GINGTIKLF

SEQ ID NO: 6054 - protein, 9 aa, synthetic construct
PTNGVVKVH

SEQ ID NO: 6055 - protein, 9 aa, synthetic construct
GINGTGHVK

SEQ ID NO: 6056 - protein, 9 aa, synthetic construct
PTNGVVKVF

SEQ ID NO: 6057 - protein, 9 aa, synthetic construct
GINGTGKVK

SEQ ID NO: 6058 - protein, 9 aa, synthetic construct
GINGTGKVF

SEQ ID NO: 6059 - protein, 9 aa, synthetic construct
GINGSVHVK

SEQ ID NO: 6060 - protein, 9 aa, synthetic construct
GINGSVRVH

SEQ ID NO: 6061 - protein, 9 aa, synthetic construct
GINGSVKVY

SEQ ID NO: 6062 - protein, 9 aa, synthetic construct
GINGSLHVR

SEQ ID NO: 6063 - protein, 9 aa, synthetic construct
GINGSLKLF

SEQ ID NO: 6064 - protein, 9 aa, synthetic construct
GINGSLKVK

SEQ ID NO: 6065 - protein, 9 aa, synthetic construct
PTNGVLHVH

SEQ ID NO: 6066 - protein, 9 aa, synthetic construct
GINGSAKLY

SEQ ID NO: 6067 - protein, 9 aa, synthetic construct
GINGSAKLH

SEQ ID NO: 6068 - protein, 9 aa, synthetic construct
GINGSAKLF

SEQ ID NO: 6069 - protein, 9 aa, synthetic construct
GINGSAKVH

SEQ ID NO: 6070 - protein, 9 aa, synthetic construct
GINGSAKVF

SEQ ID NO: 6071 - protein, 9 aa, synthetic construct
GINGSIHLR

SEQ ID NO: 6072 - protein, 9 aa, synthetic construct
GINGSIHLK

SEQ ID NO: 6073 - protein, 9 aa, synthetic construct
GINGSIHVY

SEQ ID NO: 6074 - protein, 9 aa, synthetic construct
GINGSIHVK

SEQ ID NO: 6075 - protein, 9 aa, synthetic construct
GINGSIRLF

SEQ ID NO: 6076 - protein, 9 aa, synthetic construct
GINGSIRVY

SEQ ID NO: 6077 - protein, 9 aa, synthetic construct
GINGSIKLY

SEQ ID NO: 6078 - protein, 9 aa, synthetic construct
GINGSIKLH

SEQ ID NO: 6079 - protein, 9 aa, synthetic construct
GINGSIKLK

SEQ ID NO: 6080 - protein, 9 aa, synthetic construct
GINGSIKLF

SEQ ID NO: 6081 - protein, 9 aa, synthetic construct
GINGSIKVY

SEQ ID NO: 6082 - protein, 9 aa, synthetic construct
GINGSIKVF

SEQ ID NO: 6083 - protein, 9 aa, synthetic construct
GINGSGHVK

SEQ ID NO: 6084 - protein, 9 aa, synthetic construct
GINGSGKVF

SEQ ID NO: 6085 - protein, 9 aa, synthetic construct
GINGVVHVH

SEQ ID NO: 6086 - protein, 9 aa, synthetic construct
GINGVVRVR

SEQ ID NO: 6087 - protein, 9 aa, synthetic construct
GINGVVRVK

SEQ ID NO: 6088 - protein, 9 aa, synthetic construct
PLNGAVHVY

SEQ ID NO: 6089 - protein, 9 aa, synthetic construct
GINGVLKVH

SEQ ID NO: 6090 - protein, 9 aa, synthetic construct
GINGVLKVK

SEQ ID NO: 6091 - protein, 9 aa, synthetic construct
PTNGVLKLR

SEQ ID NO: 6092 - protein, 9 aa, synthetic construct
GINGVAHVY

SEQ ID NO: 6093 - protein, 9 aa, synthetic construct
PTNGVLKLK

SEQ ID NO: 6094 - protein, 9 aa, synthetic construct
GINGVIRLK

SEQ ID NO: 6095 - protein, 9 aa, synthetic construct
PTNGVLKVH

SEQ ID NO: 6096 - protein, 9 aa, synthetic construct
GINGVGKLY

SEQ ID NO: 6097 - protein, 9 aa, synthetic construct
PTNGVAHLY

SEQ ID NO: 6098 - protein, 9 aa, synthetic construct
GINGGVHVK

SEQ ID NO: 6099 - protein, 9 aa, synthetic construct
GINGGVHVF

SEQ ID NO: 6100 - protein, 9 aa, synthetic construct
GINGGVRVH

SEQ ID NO: 6101 - protein, 9 aa, synthetic construct
GINGGVRVK

SEQ ID NO: 6102 - protein, 9 aa, synthetic construct
GINGGVRVF

SEQ ID NO: 6103 - protein, 9 aa, synthetic construct
PTNGVAHLH

SEQ ID NO: 6104 - protein, 9 aa, synthetic construct
GINGGVKLY

SEQ ID NO: 6105 - protein, 9 aa, synthetic construct
GINGGVKVY

SEQ ID NO: 6106 - protein, 9 aa, synthetic construct
PTNGVAHLK

SEQ ID NO: 6107 - protein, 9 aa, synthetic construct
PTNGVAHVY

SEQ ID NO: 6108 - protein, 9 aa, synthetic construct
PTNGVAHVR

SEQ ID NO: 6109 - protein, 9 aa, synthetic construct
GINGGAHLH

SEQ ID NO: 6110 - protein, 9 aa, synthetic construct
PTNGVAHVH

SEQ ID NO: 6111 - protein, 9 aa, synthetic construct
PTNGVAHVK

SEQ ID NO: 6112 - protein, 9 aa, synthetic construct
GINGGAKLF

SEQ ID NO: 6113 - protein, 9 aa, synthetic construct
GINGGAKVH

SEQ ID NO: 6114 - protein, 9 aa, synthetic construct
PTNGVAHVF

SEQ ID NO: 6115 - protein, 9 aa, synthetic construct
GINGGIHLK

SEQ ID NO: 6116 - protein, 9 aa, synthetic construct
GINGGIHVK

SEQ ID NO: 6117 - protein, 9 aa, synthetic construct
GINGGIRLY

SEQ ID NO: 6118 - protein, 9 aa, synthetic construct
GINGGIKLY

SEQ ID NO: 6119 - protein, 9 aa, synthetic construct
GINGGIKLH

SEQ ID NO: 6120 - protein, 9 aa, synthetic construct
GINGGIKLF

SEQ ID NO: 6121 - protein, 9 aa, synthetic construct
GINGGIKVR

SEQ ID NO: 6122 - protein, 9 aa, synthetic construct
GINGGGHVY

SEQ ID NO: 6123 - protein, 9 aa, synthetic construct
GINGGGRLY

SEQ ID NO: 6124 - protein, 9 aa, synthetic construct
GINGGGRVH

SEQ ID NO: 6125 - protein, 9 aa, synthetic construct
GINGGGKLK

SEQ ID NO: 6126 - protein, 9 aa, synthetic construct
GINGGGKLF

SEQ ID NO: 6127 - protein, 9 aa, synthetic construct
GINAAVHVR

SEQ ID NO: 6128 - protein, 9 aa, synthetic construct
GINAAVHVH

SEQ ID NO: 6129 - protein, 9 aa, synthetic construct
GINAAVRLY

SEQ ID NO: 6130 - protein, 9 aa, synthetic construct
GINAAVRVH

SEQ ID NO: 6131 - protein, 9 aa, synthetic construct
GINAAVRVF

SEQ ID NO: 6132 - protein, 9 aa, synthetic construct
GINAAVKVY

SEQ ID NO: 6133 - protein, 9 aa, synthetic construct
GINAALHLR

SEQ ID NO: 6134 - protein, 9 aa, synthetic construct
GINAALHVR

SEQ ID NO: 6135 - protein, 9 aa, synthetic construct
PTNGVARVF

SEQ ID NO: 6136 - protein, 9 aa, synthetic construct
GINAALRVF

SEQ ID NO: 6137 - protein, 9 aa, synthetic construct
PTNGVAKLY

SEQ ID NO: 6138 - protein, 9 aa, synthetic construct
GINAAAHLH

SEQ ID NO: 6139 - protein, 9 aa, synthetic construct
GINAAARLH

SEQ ID NO: 6140 - protein, 9 aa, synthetic construct
GINAAARVH

SEQ ID NO: 6141 - protein, 9 aa, synthetic construct
GINAAAKVY

SEQ ID NO: 6142 - protein, 9 aa, synthetic construct
GINAAAKVF

SEQ ID NO: 6143 - protein, 9 aa, synthetic construct
GINAAIHVK

SEQ ID NO: 6144 - protein, 9 aa, synthetic construct
PTNGVAKVY

SEQ ID NO: 6145 - protein, 9 aa, synthetic construct
GINAAIRVH

SEQ ID NO: 6146 - protein, 9 aa, synthetic construct
PTNGVAKVR

SEQ ID NO: 6147 - protein, 9 aa, synthetic construct
GINAAIKVH

SEQ ID NO: 6148 - protein, 9 aa, synthetic construct
GINAAGHVY

SEQ ID NO: 6149 - protein, 9 aa, synthetic construct
GINAAGHVF

SEQ ID NO: 6150 - protein, 9 aa, synthetic construct
GINAAGRVY

SEQ ID NO: 6151 - protein, 9 aa, synthetic construct
GINAAGKLY

SEQ ID NO: 6152 - protein, 9 aa, synthetic construct
GINATVHLY

SEQ ID NO: 6153 - protein, 9 aa, synthetic construct
GINATVHVH

SEQ ID NO: 6154 - protein, 9 aa, synthetic construct
GINATVRLY

SEQ ID NO: 6155 - protein, 9 aa, synthetic construct
GINATVRLR

SEQ ID NO: 6156 - protein, 9 aa, synthetic construct
GINATVRLH

SEQ ID NO: 6157 - protein, 9 aa, synthetic construct
GINATVRVY

SEQ ID NO: 6158 - protein, 9 aa, synthetic construct
GINATVRVH

SEQ ID NO: 6159 - protein, 9 aa, synthetic construct
GINATVRVF

SEQ ID NO: 6160 - protein, 9 aa, synthetic construct
GINATVKVY

SEQ ID NO: 6161 - protein, 9 aa, synthetic construct
GINATVKVH

SEQ ID NO: 6162 - protein, 9 aa, synthetic construct
GINATLRLR

SEQ ID NO: 6163 - protein, 9 aa, synthetic construct
GINATLRVH

SEQ ID NO: 6164 - protein, 9 aa, synthetic construct
PTNGVIHVY

SEQ ID NO: 6165 - protein, 9 aa, synthetic construct
GINATLKVH

SEQ ID NO: 6166 - protein, 9 aa, synthetic construct
GINATAHLK

SEQ ID NO: 6167 - protein, 9 aa, synthetic construct
GINATAHVR

SEQ ID NO: 6168 - protein, 9 aa, synthetic construct
GINATARVH

SEQ ID NO: 6169 - protein, 9 aa, synthetic construct
PTNGVIHVK

SEQ ID NO: 6170 - protein, 9 aa, synthetic construct
GINATAKLY

SEQ ID NO: 6171 - protein, 9 aa, synthetic construct
GINATAKVF

SEQ ID NO: 6172 - protein, 9 aa, synthetic construct
GINATIHVH

SEQ ID NO: 6173 - protein, 9 aa, synthetic construct
GINATIHVK

SEQ ID NO: 6174 - protein, 9 aa, synthetic construct
GINATIRVY

SEQ ID NO: 6175 - protein, 9 aa, synthetic construct
GINATGHLH

SEQ ID NO: 6176 - protein, 9 aa, synthetic construct
GINATGHVH

SEQ ID NO: 6177 - protein, 9 aa, synthetic construct
GINATGRVF

SEQ ID NO: 6178 - protein, 9 aa, synthetic construct
GINATGKVF

SEQ ID NO: 6179 - protein, 9 aa, synthetic construct
GINASVHVF

SEQ ID NO: 6180 - protein, 9 aa, synthetic construct
GINASVRVH

SEQ ID NO: 6181 - protein, 9 aa, synthetic construct
GINASVKVF

SEQ ID NO: 6182 - protein, 9 aa, synthetic construct
GINASLHVH

SEQ ID NO: 6183 - protein, 9 aa, synthetic construct
GINASLHVK

SEQ ID NO: 6184 - protein, 9 aa, synthetic construct
GINASLKLF

SEQ ID NO: 6185 - protein, 9 aa, synthetic construct
GINASAHLH

SEQ ID NO: 6186 - protein, 9 aa, synthetic construct
GINASAHVH

SEQ ID NO: 6187 - protein, 9 aa, synthetic construct
GINASAHVF

SEQ ID NO: 6188 - protein, 9 aa, synthetic construct
GINASIHLK

SEQ ID NO: 6189 - protein, 9 aa, synthetic construct
GINASIHVK

SEQ ID NO: 6190 - protein, 9 aa, synthetic construct
GINASIRLH

SEQ ID NO: 6191 - protein, 9 aa, synthetic construct
GINASIRLF

SEQ ID NO: 6192 - protein, 9 aa, synthetic construct
GINASIKLF

SEQ ID NO: 6193 - protein, 9 aa, synthetic construct
GINASGHLY

SEQ ID NO: 6194 - protein, 9 aa, synthetic construct
GINASGHVY

SEQ ID NO: 6195 - protein, 9 aa, synthetic construct
GINASGRVF

SEQ ID NO: 6196 - protein, 9 aa, synthetic construct
GINASGKLK

SEQ ID NO: 6197 - protein, 9 aa, synthetic construct
GINASGKVK

SEQ ID NO: 6198 - protein, 9 aa, synthetic construct
PLNGVLKVH

SEQ ID NO: 6199 - protein, 9 aa, synthetic construct
GINAVVHVF

SEQ ID NO: 6200 - protein, 9 aa, synthetic construct
GINAVVRLK

SEQ ID NO: 6201 - protein, 9 aa, synthetic construct
PTNGVGHVY

SEQ ID NO: 6202 - protein, 9 aa, synthetic construct
GINAVLKLH

SEQ ID NO: 6203 - protein, 9 aa, synthetic construct
GINAVARVF

SEQ ID NO: 6204 - protein, 9 aa, synthetic construct
GINAVAKVF

SEQ ID NO: 6205 - protein, 9 aa, synthetic construct
GINAVIHVK

SEQ ID NO: 6206 - protein, 9 aa, synthetic construct
GINAVIKLH

SEQ ID NO: 6207 - protein, 9 aa, synthetic construct
GINAVGKLH

SEQ ID NO: 6208 - protein, 9 aa, synthetic construct
GINAGVHLK

SEQ ID NO: 6209 - protein, 9 aa, synthetic construct
GINAGVHVK

SEQ ID NO: 6210 - protein, 9 aa, synthetic construct
GINAGVKLY

SEQ ID NO: 6211 - protein, 9 aa, synthetic construct
GINAGVKLF

SEQ ID NO: 6212 - protein, 9 aa, synthetic construct
PTNGVGKLY

SEQ ID NO: 6213 - protein, 9 aa, synthetic construct
GINAGAHLY

SEQ ID NO: 6214 - protein, 9 aa, synthetic construct
GINAGAHLR

SEQ ID NO: 6215 - protein, 9 aa, synthetic construct
GINAGAHLH

SEQ ID NO: 6216 - protein, 9 aa, synthetic construct
GINAGAHLK

SEQ ID NO: 6217 - protein, 9 aa, synthetic construct
GINAGAHLF

SEQ ID NO: 6218 - protein, 9 aa, synthetic construct
GINAGAHVY

SEQ ID NO: 6219 - protein, 9 aa, synthetic construct
GINAGAHVR

SEQ ID NO: 6220 - protein, 9 aa, synthetic construct
GINAGAHVH

SEQ ID NO: 6221 - protein, 9 aa, synthetic construct
GINAGAHVF

SEQ ID NO: 6222 - protein, 9 aa, synthetic construct
GINAGARVF

SEQ ID NO: 6223 - protein, 9 aa, synthetic construct
GINAGAKLF

SEQ ID NO: 6224 - protein, 9 aa, synthetic construct
GINAGAKVH

SEQ ID NO: 6225 - protein, 9 aa, synthetic construct
GINAGAKVF

SEQ ID NO: 6226 - protein, 9 aa, synthetic construct
PTNGVGKLF

SEQ ID NO: 6227 - protein, 9 aa, synthetic construct
GINAGIHVH

SEQ ID NO: 6228 - protein, 9 aa, synthetic construct
GINAGIHVK

SEQ ID NO: 6229 - protein, 9 aa, synthetic construct
GINAGIHVF

SEQ ID NO: 6230 - protein, 9 aa, synthetic construct
PTNGVGKVY

SEQ ID NO: 6231 - protein, 9 aa, synthetic construct
GINAGIKVR

SEQ ID NO: 6232 - protein, 9 aa, synthetic construct
GINAGGHLY

SEQ ID NO: 6233 - protein, 9 aa, synthetic construct
GINAGGHLR

SEQ ID NO: 6234 - protein, 9 aa, synthetic construct
GINAGGHLH

SEQ ID NO: 6235 - protein, 9 aa, synthetic construct
GINAGGHLK

SEQ ID NO: 6236 - protein, 9 aa, synthetic construct
GINAGGHLF

SEQ ID NO: 6237 - protein, 9 aa, synthetic construct
GINAGGHVY

SEQ ID NO: 6238 - protein, 9 aa, synthetic construct
GINAGGHVR

SEQ ID NO: 6239 - protein, 9 aa, synthetic construct
GINAGGHVH

SEQ ID NO: 6240 - protein, 9 aa, synthetic construct
GINAGGHVK

SEQ ID NO: 6241 - protein, 9 aa, synthetic construct
GINAGGHVF

SEQ ID NO: 6242 - protein, 9 aa, synthetic construct
GINAGGRLY

SEQ ID NO: 6243 - protein, 9 aa, synthetic construct
GINAGGRVF

SEQ ID NO: 6244 - protein, 9 aa, synthetic construct
PTNGVGKVF

SEQ ID NO: 6245 - protein, 9 aa, synthetic construct
GINAGGKLY

SEQ ID NO: 6246 - protein, 9 aa, synthetic construct
GINAGGKLF

SEQ ID NO: 6247 - protein, 9 aa, synthetic construct
PTNGGVHLY

SEQ ID NO: 6248 - protein, 9 aa, synthetic construct
GIQGAVHVY

SEQ ID NO: 6249 - protein, 9 aa, synthetic construct
GIQGAVHVH

SEQ ID NO: 6250 - protein, 9 aa, synthetic construct
GIQGAVRLY

SEQ ID NO: 6251 - protein, 9 aa, synthetic construct
PTNGGVHLK

SEQ ID NO: 6252 - protein, 9 aa, synthetic construct
GIQGALHVH

SEQ ID NO: 6253 - protein, 9 aa, synthetic construct
GIQGALRVH

SEQ ID NO: 6254 - protein, 9 aa, synthetic construct
GIQGALKVF

SEQ ID NO: 6255 - protein, 9 aa, synthetic construct
PTNGGVHVR

SEQ ID NO: 6256 - protein, 9 aa, synthetic construct
GIQGAAHLY

SEQ ID NO: 6257 - protein, 9 aa, synthetic construct
GIQGAAHVF

SEQ ID NO: 6258 - protein, 9 aa, synthetic construct
GIQGAARLH

SEQ ID NO: 6259 - protein, 9 aa, synthetic construct
PTNGGVHVK

SEQ ID NO: 6260 - protein, 9 aa, synthetic construct
GIQGAAKLH

SEQ ID NO: 6261 - protein, 9 aa, synthetic construct
GIQGAAKLF

SEQ ID NO: 6262 - protein, 9 aa, synthetic construct
PTNGGVHVF

SEQ ID NO: 6263 - protein, 9 aa, synthetic construct
GIQGAIHLK

SEQ ID NO: 6264 - protein, 9 aa, synthetic construct
GIQGAIHLF

SEQ ID NO: 6265 - protein, 9 aa, synthetic construct
GIQGAIHVR

SEQ ID NO: 6266 - protein, 9 aa, synthetic construct
GIQGAIHVK

SEQ ID NO: 6267 - protein, 9 aa, synthetic construct
PTNGGVRLY

SEQ ID NO: 6268 - protein, 9 aa, synthetic construct
GIQGAIRLY

SEQ ID NO: 6269 - protein, 9 aa, synthetic construct
GIQGAIRLH

SEQ ID NO: 6270 - protein, 9 aa, synthetic construct
GIQGAIRLK

SEQ ID NO: 6271 - protein, 9 aa, synthetic construct
GIQGAIRLF

SEQ ID NO: 6272 - protein, 9 aa, synthetic construct
GIQGAIRVY

SEQ ID NO: 6273 - protein, 9 aa, synthetic construct
GIQGAIRVH

SEQ ID NO: 6274 - protein, 9 aa, synthetic construct
GIQGAIRVF

SEQ ID NO: 6275 - protein, 9 aa, synthetic construct
GIQGAIKLF

SEQ ID NO: 6276 - protein, 9 aa, synthetic construct
GIQGAIKVH

SEQ ID NO: 6277 - protein, 9 aa, synthetic construct
GIQGAGHLY

SEQ ID NO: 6278 - protein, 9 aa, synthetic construct
GIQGAGKLF

SEQ ID NO: 6279 - protein, 9 aa, synthetic construct
GIQGTVHVY

SEQ ID NO: 6280 - protein, 9 aa, synthetic construct
GIQGTVHVH

SEQ ID NO: 6281 - protein, 9 aa, synthetic construct
GIQGTVKLF

SEQ ID NO: 6282 - protein, 9 aa, synthetic construct
GIQGTVKVY

SEQ ID NO: 6283 - protein, 9 aa, synthetic construct
GIQGTLHVH

SEQ ID NO: 6284 - protein, 9 aa, synthetic construct
GIQGTLHVK

SEQ ID NO: 6285 - protein, 9 aa, synthetic construct
PTNGGVKLY

SEQ ID NO: 6286 - protein, 9 aa, synthetic construct
GIQGTAHLY

SEQ ID NO: 6287 - protein, 9 aa, synthetic construct
GIQGTAHLK

SEQ ID NO: 6288 - protein, 9 aa, synthetic construct
GIQGTAHVY

SEQ ID NO: 6289 - protein, 9 aa, synthetic construct
PTNGGVKLH

SEQ ID NO: 6290 - protein, 9 aa, synthetic construct
PTNGGVKLK

SEQ ID NO: 6291 - protein, 9 aa, synthetic construct
GIQGTAKVK

SEQ ID NO: 6292 - protein, 9 aa, synthetic construct
PTNGGVKLF

SEQ ID NO: 6293 - protein, 9 aa, synthetic construct
GIQGTIHVK

SEQ ID NO: 6294 - protein, 9 aa, synthetic construct
PTNGGVKVY

SEQ ID NO: 6295 - protein, 9 aa, synthetic construct
GIQGTIRVH

SEQ ID NO: 6296 - protein, 9 aa, synthetic construct
GIQGTIKLH

SEQ ID NO: 6297 - protein, 9 aa, synthetic construct
PTNGGVKVH

SEQ ID NO: 6298 - protein, 9 aa, synthetic construct
GIQGTGHLY

SEQ ID NO: 6299 - protein, 9 aa, synthetic construct
GIQGTGRLK

SEQ ID NO: 6300 - protein, 9 aa, synthetic construct
GIQGTGRVF

SEQ ID NO: 6301 - protein, 9 aa, synthetic construct
PTNGGVKVF

SEQ ID NO: 6302 - protein, 9 aa, synthetic construct
GIQGTGKLY

SEQ ID NO: 6303 - protein, 9 aa, synthetic construct
GIQGTGKLF

SEQ ID NO: 6304 - protein, 9 aa, synthetic construct
GIQGTGKVF

SEQ ID NO: 6305 - protein, 9 aa, synthetic construct
GIQGSVHVF

SEQ ID NO: 6306 - protein, 9 aa, synthetic construct
GIQGSVRVF

SEQ ID NO: 6307 - protein, 9 aa, synthetic construct
GIQGSVKLF

SEQ ID NO: 6308 - protein, 9 aa, synthetic construct
GIQGSAHVR

SEQ ID NO: 6309 - protein, 9 aa, synthetic construct
GIQGSAHVK

SEQ ID NO: 6310 - protein, 9 aa, synthetic construct
GIQGSAKVF

SEQ ID NO: 6311 - protein, 9 aa, synthetic construct
GIQGSIHVR

SEQ ID NO: 6312 - protein, 9 aa, synthetic construct
GIQGSIRLK

SEQ ID NO: 6313 - protein, 9 aa, synthetic construct
GIQGSIRLF

SEQ ID NO: 6314 - protein, 9 aa, synthetic construct
GIQGSIKLY

SEQ ID NO: 6315 - protein, 9 aa, synthetic construct
GIQGSGRVF

SEQ ID NO: 6316 - protein, 9 aa, synthetic construct
GIQGSGKLF

SEQ ID NO: 6317 - protein, 9 aa, synthetic construct
GIQGVVRVH

SEQ ID NO: 6318 - protein, 9 aa, synthetic construct
GIQGVLRVH

SEQ ID NO: 6319 - protein, 9 aa, synthetic construct
PTNGGLKLY

SEQ ID NO: 6320 - protein, 9 aa, synthetic construct
GIQGVARVF

SEQ ID NO: 6321 - protein, 9 aa, synthetic construct
GIQGVAKVR

SEQ ID NO: 6322 - protein, 9 aa, synthetic construct
GIQGVAKVH

SEQ ID NO: 6323 - protein, 9 aa, synthetic construct
PTNGGLKLF

SEQ ID NO: 6324 - protein, 9 aa, synthetic construct
GIQGVIRLF

SEQ ID NO: 6325 - protein, 9 aa, synthetic construct
GIQGVGHVY

SEQ ID NO: 6326 - protein, 9 aa, synthetic construct
GIQGVGRLY

SEQ ID NO: 6327 - protein, 9 aa, synthetic construct
GIQGVGKLY

SEQ ID NO: 6328 - protein, 9 aa, synthetic construct
GIQGVGKLH

SEQ ID NO: 6329 - protein, 9 aa, synthetic construct
GIQGVGKVY

SEQ ID NO: 6330 - protein, 9 aa, synthetic construct
GIQGVGKVH

SEQ ID NO: 6331 - protein, 9 aa, synthetic construct
GIQGGVRLF

SEQ ID NO: 6332 - protein, 9 aa, synthetic construct
PTNGGAHLH

SEQ ID NO: 6333 - protein, 9 aa, synthetic construct
GIQGGVKLY

SEQ ID NO: 6334 - protein, 9 aa, synthetic construct
GIQGGVKVY

SEQ ID NO: 6335 - protein, 9 aa, synthetic construct
GIQGGVKVF

SEQ ID NO: 6336 - protein, 9 aa, synthetic construct
PTNGGAHLK

SEQ ID NO: 6337 - protein, 9 aa, synthetic construct
GIQGGAHVR

SEQ ID NO: 6338 - protein, 9 aa, synthetic construct
PTNGGAHVH

SEQ ID NO: 6339 - protein, 9 aa, synthetic construct
GIQGGARVY

SEQ ID NO: 6340 - protein, 9 aa, synthetic construct
GIQGGARVF

SEQ ID NO: 6341 - protein, 9 aa, synthetic construct
GIQGGAKLF

SEQ ID NO: 6342 - protein, 9 aa, synthetic construct
GIQGGAKVF

SEQ ID NO: 6343 - protein, 9 aa, synthetic construct
GIQGGIHLY

SEQ ID NO: 6344 - protein, 9 aa, synthetic construct
GIQGGIHVH

SEQ ID NO: 6345 - protein, 9 aa, synthetic construct
GIQGGIHVK

SEQ ID NO: 6346 - protein, 9 aa, synthetic construct
GIQGGIRVY

SEQ ID NO: 6347 - protein, 9 aa, synthetic construct
GIQGGIRVH

SEQ ID NO: 6348 - protein, 9 aa, synthetic construct
GIQGGIKVH

SEQ ID NO: 6349 - protein, 9 aa, synthetic construct
GIQGGGRVF

SEQ ID NO: 6350 - protein, 9 aa, synthetic construct
GIQGGGKLY

SEQ ID NO: 6351 - protein, 9 aa, synthetic construct
GIQGGGKVY

SEQ ID NO: 6352 - protein, 9 aa, synthetic construct
GIQAAVRLH

SEQ ID NO: 6353 - protein, 9 aa, synthetic construct
GIQAAVRVH

SEQ ID NO: 6354 - protein, 9 aa, synthetic construct
GIQAAVKLF

SEQ ID NO: 6355 - protein, 9 aa, synthetic construct
PTNGGARVK

SEQ ID NO: 6356 - protein, 9 aa, synthetic construct
PTNGGARVF

SEQ ID NO: 6357 - protein, 9 aa, synthetic construct
PLNGVAHVK

SEQ ID NO: 6358 - protein, 9 aa, synthetic construct
GIQAALKLH

SEQ ID NO: 6359 - protein, 9 aa, synthetic construct
GIQAALKVF

SEQ ID NO: 6360 - protein, 9 aa, synthetic construct
GIQAAAKVY

SEQ ID NO: 6361 - protein, 9 aa, synthetic construct
PTNGGAKLF

SEQ ID NO: 6362 - protein, 9 aa, synthetic construct
GIQAAIHLR

SEQ ID NO: 6363 - protein, 9 aa, synthetic construct
GIQAAIHLK

SEQ ID NO: 6364 - protein, 9 aa, synthetic construct
PTNGGAKVY

SEQ ID NO: 6365 - protein, 9 aa, synthetic construct
GIQAAIRVH

SEQ ID NO: 6366 - protein, 9 aa, synthetic construct
GIQAAIKVR

SEQ ID NO: 6367 - protein, 9 aa, synthetic construct
GIQAAGRVR

SEQ ID NO: 6368 - protein, 9 aa, synthetic construct
GIQAAGRVH

SEQ ID NO: 6369 - protein, 9 aa, synthetic construct
GIQAAGRVF

SEQ ID NO: 6370 - protein, 9 aa, synthetic construct
PTNGGAKVF

SEQ ID NO: 6371 - protein, 9 aa, synthetic construct
GIQAAGKLF

SEQ ID NO: 6372 - protein, 9 aa, synthetic construct
GIQAAGKVF

SEQ ID NO: 6373 - protein, 9 aa, synthetic construct
PTNGGIHLR

SEQ ID NO: 6374 - protein, 9 aa, synthetic construct
PTNGGIHLK

SEQ ID NO: 6375 - protein, 9 aa, synthetic construct
PTNGGIHVR

SEQ ID NO: 6376 - protein, 9 aa, synthetic construct
GIQATAHLR

SEQ ID NO: 6377 - protein, 9 aa, synthetic construct
GIQATAHVR

SEQ ID NO: 6378 - protein, 9 aa, synthetic construct
PTNGGIHVH

SEQ ID NO: 6379 - protein, 9 aa, synthetic construct
GIQATARLF

SEQ ID NO: 6380 - protein, 9 aa, synthetic construct
PTNGGIHVK

SEQ ID NO: 6381 - protein, 9 aa, synthetic construct
GIQATAKLY

SEQ ID NO: 6382 - protein, 9 aa, synthetic construct
GIQATAKLF

SEQ ID NO: 6383 - protein, 9 aa, synthetic construct
GIQATGHVH

SEQ ID NO: 6384 - protein, 9 aa, synthetic construct
GIQATGHVK

SEQ ID NO: 6385 - protein, 9 aa, synthetic construct
PTNGGIRLF

SEQ ID NO: 6386 - protein, 9 aa, synthetic construct
GIQATGKLH

SEQ ID NO: 6387 - protein, 9 aa, synthetic construct
PTNGGIRVY

SEQ ID NO: 6388 - protein, 9 aa, synthetic construct
GIQASVHVR

SEQ ID NO: 6389 - protein, 9 aa, synthetic construct
GIQASVHVF

SEQ ID NO: 6390 - protein, 9 aa, synthetic construct
GIQASVKVF

SEQ ID NO: 6391 - protein, 9 aa, synthetic construct
PTNGGIKLH

SEQ ID NO: 6392 - protein, 9 aa, synthetic construct
GIQASAKLY

SEQ ID NO: 6393 - protein, 9 aa, synthetic construct
GIQASAKLF

SEQ ID NO: 6394 - protein, 9 aa, synthetic construct
PTNGGIKVY

SEQ ID NO: 6395 - protein, 9 aa, synthetic construct
PTNGGIKVH

SEQ ID NO: 6396 - protein, 9 aa, synthetic construct
GIQASGHVR

SEQ ID NO: 6397 - protein, 9 aa, synthetic construct
PTNGGIKVK

SEQ ID NO: 6398 - protein, 9 aa, synthetic construct
PTNGGGHLY

SEQ ID NO: 6399 - protein, 9 aa, synthetic construct
GIQAVVHVF

SEQ ID NO: 6400 - protein, 9 aa, synthetic construct
PTNGGGHLF

SEQ ID NO: 6401 - protein, 9 aa, synthetic construct
PTNGGGHVY

SEQ ID NO: 6402 - protein, 9 aa, synthetic construct
GIQAVLKLY

SEQ ID NO: 6403 - protein, 9 aa, synthetic construct
PTNGGGHVR

SEQ ID NO: 6404 - protein, 9 aa, synthetic construct
PTNGGGHVK

SEQ ID NO: 6405 - protein, 9 aa, synthetic construct
PTNGGGHVF

SEQ ID NO: 6406 - protein, 9 aa, synthetic construct
PTNGGGRLY

SEQ ID NO: 6407 - protein, 9 aa, synthetic construct
PTNGGGRLH

SEQ ID NO: 6408 - protein, 9 aa, synthetic construct
PTNGGGRLF

SEQ ID NO: 6409 - protein, 9 aa, synthetic construct
GIQAVGKVH

SEQ ID NO: 6410 - protein, 9 aa, synthetic construct
GIQAGLHVH

SEQ ID NO: 6411 - protein, 9 aa, synthetic construct
PTNGGGRVF

SEQ ID NO: 6412 - protein, 9 aa, synthetic construct
PTNGGGKLY

SEQ ID NO: 6413 - protein, 9 aa, synthetic construct
GIQAGAHVR

SEQ ID NO: 6414 - protein, 9 aa, synthetic construct
PTNGGGKLF

SEQ ID NO: 6415 - protein, 9 aa, synthetic construct
GIQAGIHLH

SEQ ID NO: 6416 - protein, 9 aa, synthetic construct
GIQAGIHVK

SEQ ID NO: 6417 - protein, 9 aa, synthetic construct
PTNGGGKVY

SEQ ID NO: 6418 - protein, 9 aa, synthetic construct
GIQAGIKVH

SEQ ID NO: 6419 - protein, 9 aa, synthetic construct
GIQAGGHLH

SEQ ID NO: 6420 - protein, 9 aa, synthetic construct
GIQAGGHVK

SEQ ID NO: 6421 - protein, 9 aa, synthetic construct
GIPGAVHLY

SEQ ID NO: 6422 - protein, 9 aa, synthetic construct
GIPGAVHVR

SEQ ID NO: 6423 - protein, 9 aa, synthetic construct
GIPGAVHVK

SEQ ID NO: 6424 - protein, 9 aa, synthetic construct
GIPGAVRLY

SEQ ID NO: 6425 - protein, 9 aa, synthetic construct
GIPGAVRLF

SEQ ID NO: 6426 - protein, 9 aa, synthetic construct
GIPGAVRVF

SEQ ID NO: 6427 - protein, 9 aa, synthetic construct
GIPGAVKVY

SEQ ID NO: 6428 - protein, 9 aa, synthetic construct
GIPGALHVH

SEQ ID NO: 6429 - protein, 9 aa, synthetic construct
PTNAAVHVY

SEQ ID NO: 6430 - protein, 9 aa, synthetic construct
GIPGAAHLY

SEQ ID NO: 6431 - protein, 9 aa, synthetic construct
GIPGAAHLH

SEQ ID NO: 6432 - protein, 9 aa, synthetic construct
GIPGAAHVF

SEQ ID NO: 6433 - protein, 9 aa, synthetic construct
PTNAAVHVH

SEQ ID NO: 6434 - protein, 9 aa, synthetic construct
GIPGAARLR

SEQ ID NO: 6435 - protein, 9 aa, synthetic construct
GIPGAARVY

SEQ ID NO: 6436 - protein, 9 aa, synthetic construct
GIPGAARVH

SEQ ID NO: 6437 - protein, 9 aa, synthetic construct
GIPGAAKVF

SEQ ID NO: 6438 - protein, 9 aa, synthetic construct
PTNAAVHVF

SEQ ID NO: 6439 - protein, 9 aa, synthetic construct
GIPGAIHLK

SEQ ID NO: 6440 - protein, 9 aa, synthetic construct
GIPGAIHVR

SEQ ID NO: 6441 - protein, 9 aa, synthetic construct
GIPGAIHVK

SEQ ID NO: 6442 - protein, 9 aa, synthetic construct
GIPGAGHLY

SEQ ID NO: 6443 - protein, 9 aa, synthetic construct
GIPGAGHLH

SEQ ID NO: 6444 - protein, 9 aa, synthetic construct
GIPGAGHLK

SEQ ID NO: 6445 - protein, 9 aa, synthetic construct
GIPGAGHVR

SEQ ID NO: 6446 - protein, 9 aa, synthetic construct
GIPGAGHVH

SEQ ID NO: 6447 - protein, 9 aa, synthetic construct
GIPGAGHVK

SEQ ID NO: 6448 - protein, 9 aa, synthetic construct
GIPGAGHVF

SEQ ID NO: 6449 - protein, 9 aa, synthetic construct
GIPGAGRVH

SEQ ID NO: 6450 - protein, 9 aa, synthetic construct
GIPGAGKLF

SEQ ID NO: 6451 - protein, 9 aa, synthetic construct
GIPGAGKVH

SEQ ID NO: 6452 - protein, 9 aa, synthetic construct
PTNAAVRVY

SEQ ID NO: 6453 - protein, 9 aa, synthetic construct
GIPGTVHLR

SEQ ID NO: 6454 - protein, 9 aa, synthetic construct
GIPGTVHVY

SEQ ID NO: 6455 - protein, 9 aa, synthetic construct
GIPGTVHVR

SEQ ID NO: 6456 - protein, 9 aa, synthetic construct
GIPGTVRLY

SEQ ID NO: 6457 - protein, 9 aa, synthetic construct
GIPGTVKVF

SEQ ID NO: 6458 - protein, 9 aa, synthetic construct
GIPGTLRLK

SEQ ID NO: 6459 - protein, 9 aa, synthetic construct
PTNAAVKLY

SEQ ID NO: 6460 - protein, 9 aa, synthetic construct
GIPGTLKLY

SEQ ID NO: 6461 - protein, 9 aa, synthetic construct
GIPGTAHLK

SEQ ID NO: 6462 - protein, 9 aa, synthetic construct
GIPGTAHVK

SEQ ID NO: 6463 - protein, 9 aa, synthetic construct
PTNAAVKLH

SEQ ID NO: 6464 - protein, 9 aa, synthetic construct
GIPGTARVF

SEQ ID NO: 6465 - protein, 9 aa, synthetic construct
GIPGTAKLY

SEQ ID NO: 6466 - protein, 9 aa, synthetic construct
GIPGTAKVF

SEQ ID NO: 6467 - protein, 9 aa, synthetic construct
PTNAAVKLF

SEQ ID NO: 6468 - protein, 9 aa, synthetic construct
GIPGTIHVR

SEQ ID NO: 6469 - protein, 9 aa, synthetic construct
PTNAAVKVY

SEQ ID NO: 6470 - protein, 9 aa, synthetic construct
GIPGTIRLH

SEQ ID NO: 6471 - protein, 9 aa, synthetic construct
PTNAAVKVH

SEQ ID NO: 6472 - protein, 9 aa, synthetic construct
GIPGTGHLH

SEQ ID NO: 6473 - protein, 9 aa, synthetic construct
GIPGTGHLK

SEQ ID NO: 6474 - protein, 9 aa, synthetic construct
GIPGTGHVR

SEQ ID NO: 6475 - protein, 9 aa, synthetic construct
PTNAAVKVF

SEQ ID NO: 6476 - protein, 9 aa, synthetic construct
GIPGTGKLY

SEQ ID NO: 6477 - protein, 9 aa, synthetic construct
GIPGTGKVF

SEQ ID NO: 6478 - protein, 9 aa, synthetic construct
PTNAALHLR

SEQ ID NO: 6479 - protein, 9 aa, synthetic construct
GIPGSVKVY

SEQ ID NO: 6480 - protein, 9 aa, synthetic construct
GIPGSLKVF

SEQ ID NO: 6481 - protein, 9 aa, synthetic construct
GIPGSAHLY

SEQ ID NO: 6482 - protein, 9 aa, synthetic construct
GIPGSAHLK

SEQ ID NO: 6483 - protein, 9 aa, synthetic construct
GIPGSAHVH

SEQ ID NO: 6484 - protein, 9 aa, synthetic construct
GIPGSARLY

SEQ ID NO: 6485 - protein, 9 aa, synthetic construct
GIPGSAKLF

SEQ ID NO: 6486 - protein, 9 aa, synthetic construct
PLNGVARVF

SEQ ID NO: 6487 - protein, 9 aa, synthetic construct
GIPGSIRVY

SEQ ID NO: 6488 - protein, 9 aa, synthetic construct
GIPGSIKLF

SEQ ID NO: 6489 - protein, 9 aa, synthetic construct
GIPGSIKVF

SEQ ID NO: 6490 - protein, 9 aa, synthetic construct
GIPGSGHLY

SEQ ID NO: 6491 - protein, 9 aa, synthetic construct
GIPGSGHLH

SEQ ID NO: 6492 - protein, 9 aa, synthetic construct
GIPGSGRLY

SEQ ID NO: 6493 - protein, 9 aa, synthetic construct
GIPGSGRLH

SEQ ID NO: 6494 - protein, 9 aa, synthetic construct
GIPGSGKVF

SEQ ID NO: 6495 - protein, 9 aa, synthetic construct
GIPGVLHVF

SEQ ID NO: 6496 - protein, 9 aa, synthetic construct
GIPGVLKLH

SEQ ID NO: 6497 - protein, 9 aa, synthetic construct
GIPGVLKVR

SEQ ID NO: 6498 - protein, 9 aa, synthetic construct
GIPGVAHVK

SEQ ID NO: 6499 - protein, 9 aa, synthetic construct
GIPGVAKLY

SEQ ID NO: 6500 - protein, 9 aa, synthetic construct
GIPGVIHVY

SEQ ID NO: 6501 - protein, 9 aa, synthetic construct
PTNAALKVY

SEQ ID NO: 6502 - protein, 9 aa, synthetic construct
GIPGVIKLH

SEQ ID NO: 6503 - protein, 9 aa, synthetic construct
GIPGVGKVY

SEQ ID NO: 6504 - protein, 9 aa, synthetic construct
GIPGGVHVY

SEQ ID NO: 6505 - protein, 9 aa, synthetic construct
GIPGGVHVR

SEQ ID NO: 6506 - protein, 9 aa, synthetic construct
GIPGGVHVK

SEQ ID NO: 6507 - protein, 9 aa, synthetic construct
GIPGGVHVF

SEQ ID NO: 6508 - protein, 9 aa, synthetic construct
GIPGGVRLY

SEQ ID NO: 6509 - protein, 9 aa, synthetic construct
GIPGGVRVY

SEQ ID NO: 6510 - protein, 9 aa, synthetic construct
GIPGGVKLY

SEQ ID NO: 6511 - protein, 9 aa, synthetic construct
GIPGGVKLH

SEQ ID NO: 6512 - protein, 9 aa, synthetic construct
GIPGGVKLF

SEQ ID NO: 6513 - protein, 9 aa, synthetic construct
GIPGGVKVY

SEQ ID NO: 6514 - protein, 9 aa, synthetic construct
GIPGGVKVH

SEQ ID NO: 6515 - protein, 9 aa, synthetic construct
GIPGGVKVK

SEQ ID NO: 6516 - protein, 9 aa, synthetic construct
GIPGGVKVF

SEQ ID NO: 6517 - protein, 9 aa, synthetic construct
PTNAAAHVY

SEQ ID NO: 6518 - protein, 9 aa, synthetic construct
GIPGGLKVY

SEQ ID NO: 6519 - protein, 9 aa, synthetic construct
GIPGGLKVF

SEQ ID NO: 6520 - protein, 9 aa, synthetic construct
GIPGGAHLK

SEQ ID NO: 6521 - protein, 9 aa, synthetic construct
GIPGGAHVR

SEQ ID NO: 6522 - protein, 9 aa, synthetic construct
PTNAAAHVK

SEQ ID NO: 6523 - protein, 9 aa, synthetic construct
GIPGGAKLF

SEQ ID NO: 6524 - protein, 9 aa, synthetic construct
GIPGGAKVH

SEQ ID NO: 6525 - protein, 9 aa, synthetic construct
GIPGGAKVF

SEQ ID NO: 6526 - protein, 9 aa, synthetic construct
GIPGGIHVH

SEQ ID NO: 6527 - protein, 9 aa, synthetic construct
GIPGGIHVK

SEQ ID NO: 6528 - protein, 9 aa, synthetic construct
PTNAAARLY

SEQ ID NO: 6529 - protein, 9 aa, synthetic construct
GIPGGIRLF

SEQ ID NO: 6530 - protein, 9 aa, synthetic construct
GIPGGIRVF

SEQ ID NO: 6531 - protein, 9 aa, synthetic construct
GIPGGIKVR

SEQ ID NO: 6532 - protein, 9 aa, synthetic construct
GIPGGGHLH

SEQ ID NO: 6533 - protein, 9 aa, synthetic construct
GIPGGGRLF

SEQ ID NO: 6534 - protein, 9 aa, synthetic construct
PTNAAARLF

SEQ ID NO: 6535 - protein, 9 aa, synthetic construct
GIPGGGKVF

SEQ ID NO: 6536 - protein, 9 aa, synthetic construct
PTNAAARVY

SEQ ID NO: 6537 - protein, 9 aa, synthetic construct
GIPAAVRLY

SEQ ID NO: 6538 - protein, 9 aa, synthetic construct
GIPAAVRVH

SEQ ID NO: 6539 - protein, 9 aa, synthetic construct
GIPAALHVK

SEQ ID NO: 6540 - protein, 9 aa, synthetic construct
GIPAALRLR

SEQ ID NO: 6541 - protein, 9 aa, synthetic construct
GIPAALRVF

SEQ ID NO: 6542 - protein, 9 aa, synthetic construct
PTNAAAKLY

SEQ ID NO: 6543 - protein, 9 aa, synthetic construct
GIPAAAKLH

SEQ ID NO: 6544 - protein, 9 aa, synthetic construct
GIPAAAKVF

SEQ ID NO: 6545 - protein, 9 aa, synthetic construct
GIPAAIHLY

SEQ ID NO: 6546 - protein, 9 aa, synthetic construct
GIPAAIHLH

SEQ ID NO: 6547 - protein, 9 aa, synthetic construct
GIPAAIHLK

SEQ ID NO: 6548 - protein, 9 aa, synthetic construct
GIPAAIHVY

SEQ ID NO: 6549 - protein, 9 aa, synthetic construct
GIPAAIHVR

SEQ ID NO: 6550 - protein, 9 aa, synthetic construct
GIPAAIHVH

SEQ ID NO: 6551 - protein, 9 aa, synthetic construct
GIPAAIHVK

SEQ ID NO: 6552 - protein, 9 aa, synthetic construct
GIPAAIHVF

SEQ ID NO: 6553 - protein, 9 aa, synthetic construct
GIPAAIRVY

SEQ ID NO: 6554 - protein, 9 aa, synthetic construct
GIPAAIKLF

SEQ ID NO: 6555 - protein, 9 aa, synthetic construct
GIPAAIKVR

SEQ ID NO: 6556 - protein, 9 aa, synthetic construct
GIPAAGHLH

SEQ ID NO: 6557 - protein, 9 aa, synthetic construct
GIPAAGHVH

SEQ ID NO: 6558 - protein, 9 aa, synthetic construct
GIPAAGRVH

SEQ ID NO: 6559 - protein, 9 aa, synthetic construct
PTNAAAKVF

SEQ ID NO: 6560 - protein, 9 aa, synthetic construct
GIPAAGKLR

SEQ ID NO: 6561 - protein, 9 aa, synthetic construct
GIPAAGKVY

SEQ ID NO: 6562 - protein, 9 aa, synthetic construct
GIPATVHLK

SEQ ID NO: 6563 - protein, 9 aa, synthetic construct
GIPATVHVY

SEQ ID NO: 6564 - protein, 9 aa, synthetic construct
GIPATVRVH

SEQ ID NO: 6565 - protein, 9 aa, synthetic construct
GIPATLHVK

SEQ ID NO: 6566 - protein, 9 aa, synthetic construct
GIPATLRLR

SEQ ID NO: 6567 - protein, 9 aa, synthetic construct
PTNAAIHVY

SEQ ID NO: 6568 - protein, 9 aa, synthetic construct
GIPATAHLK

SEQ ID NO: 6569 - protein, 9 aa, synthetic construct
GIPATAHVH

SEQ ID NO: 6570 - protein, 9 aa, synthetic construct
GIPATARLF

SEQ ID NO: 6571 - protein, 9 aa, synthetic construct
GIPATARVY

SEQ ID NO: 6572 - protein, 9 aa, synthetic construct
GIPATARVH

SEQ ID NO: 6573 - protein, 9 aa, synthetic construct
GIPATARVF

SEQ ID NO: 6574 - protein, 9 aa, synthetic construct
PTNAAIHVK

SEQ ID NO: 6575 - protein, 9 aa, synthetic construct
GIPATAKLH

SEQ ID NO: 6576 - protein, 9 aa, synthetic construct
GIPATAKVF

SEQ ID NO: 6577 - protein, 9 aa, synthetic construct
GIPATIHLK

SEQ ID NO: 6578 - protein, 9 aa, synthetic construct
GIPATIHVR

SEQ ID NO: 6579 - protein, 9 aa, synthetic construct
GIPATIHVH

SEQ ID NO: 6580 - protein, 9 aa, synthetic construct
GIPATIHVK

SEQ ID NO: 6581 - protein, 9 aa, synthetic construct
PLNGVAKVY

SEQ ID NO: 6582 - protein, 9 aa, synthetic construct
GIPATIRVY

SEQ ID NO: 6583 - protein, 9 aa, synthetic construct
GIPATGHLH

SEQ ID NO: 6584 - protein, 9 aa, synthetic construct
GIPATGHLF

SEQ ID NO: 6585 - protein, 9 aa, synthetic construct
GIPATGHVY

SEQ ID NO: 6586 - protein, 9 aa, synthetic construct
GIPATGHVH

SEQ ID NO: 6587 - protein, 9 aa, synthetic construct
GIPATGRLY

SEQ ID NO: 6588 - protein, 9 aa, synthetic construct
GIPATGRVF

SEQ ID NO: 6589 - protein, 9 aa, synthetic construct
GIPATGKLY

SEQ ID NO: 6590 - protein, 9 aa, synthetic construct
GIPASVHVF

SEQ ID NO: 6591 - protein, 9 aa, synthetic construct
GIPASVRLH

SEQ ID NO: 6592 - protein, 9 aa, synthetic construct
GIPASVKLF

SEQ ID NO: 6593 - protein, 9 aa, synthetic construct
GIPASAHLY

SEQ ID NO: 6594 - protein, 9 aa, synthetic construct
GIPASAHLR

SEQ ID NO: 6595 - protein, 9 aa, synthetic construct
GIPASAHLH

SEQ ID NO: 6596 - protein, 9 aa, synthetic construct
GIPASAHLK

SEQ ID NO: 6597 - protein, 9 aa, synthetic construct
GIPASAHVY

SEQ ID NO: 6598 - protein, 9 aa, synthetic construct
GIPASAHVR

SEQ ID NO: 6599 - protein, 9 aa, synthetic construct
GIPASAHVH

SEQ ID NO: 6600 - protein, 9 aa, synthetic construct
GIPASAHVK

SEQ ID NO: 6601 - protein, 9 aa, synthetic construct
GIPASAHVF

SEQ ID NO: 6602 - protein, 9 aa, synthetic construct
PTNAAIKLH

SEQ ID NO: 6603 - protein, 9 aa, synthetic construct
GIPASARLK

SEQ ID NO: 6604 - protein, 9 aa, synthetic construct
GIPASIHLR

SEQ ID NO: 6605 - protein, 9 aa, synthetic construct
GIPASIHVH

SEQ ID NO: 6606 - protein, 9 aa, synthetic construct
GIPASIHVF

SEQ ID NO: 6607 - protein, 9 aa, synthetic construct
GIPASIRLF

SEQ ID NO: 6608 - protein, 9 aa, synthetic construct
GIPASIKVH

SEQ ID NO: 6609 - protein, 9 aa, synthetic construct
PTNAAIKVH

SEQ ID NO: 6610 - protein, 9 aa, synthetic construct
GIPASGHLY

SEQ ID NO: 6611 - protein, 9 aa, synthetic construct
GIPASGHVY

SEQ ID NO: 6612 - protein, 9 aa, synthetic construct
GIPASGHVH

SEQ ID NO: 6613 - protein, 9 aa, synthetic construct
GIPASGHVF

SEQ ID NO: 6614 - protein, 9 aa, synthetic construct
GIPASGRVF

SEQ ID NO: 6615 - protein, 9 aa, synthetic construct
GIPASGKVF

SEQ ID NO: 6616 - protein, 9 aa, synthetic construct
GIPAVVHLH

SEQ ID NO: 6617 - protein, 9 aa, synthetic construct
PTNAAGHLH

SEQ ID NO: 6618 - protein, 9 aa, synthetic construct
GIPAVVKLH

SEQ ID NO: 6619 - protein, 9 aa, synthetic construct
GIPAVVKVH

SEQ ID NO: 6620 - protein, 9 aa, synthetic construct
GIPAVVKVK

SEQ ID NO: 6621 - protein, 9 aa, synthetic construct
GIPAVLKLY

SEQ ID NO: 6622 - protein, 9 aa, synthetic construct
GIPAVLKLH

SEQ ID NO: 6623 - protein, 9 aa, synthetic construct
GIPAVLKLF

SEQ ID NO: 6624 - protein, 9 aa, synthetic construct
GIPAVLKVY

SEQ ID NO: 6625 - protein, 9 aa, synthetic construct
GIPAVLKVH

SEQ ID NO: 6626 - protein, 9 aa, synthetic construct
GIPAVLKVK

SEQ ID NO: 6627 - protein, 9 aa, synthetic construct
GIPAVLKVF

SEQ ID NO: 6628 - protein, 9 aa, synthetic construct
GIPAVAHVR

SEQ ID NO: 6629 - protein, 9 aa, synthetic construct
GIPAVAHVH

SEQ ID NO: 6630 - protein, 9 aa, synthetic construct
GIPAVARLF

SEQ ID NO: 6631 - protein, 9 aa, synthetic construct
GIPAVAKLF

SEQ ID NO: 6632 - protein, 9 aa, synthetic construct
PTNAAGHVF

SEQ ID NO: 6633 - protein, 9 aa, synthetic construct
GIPAVIHVK

SEQ ID NO: 6634 - protein, 9 aa, synthetic construct
GIPAVIRLY

SEQ ID NO: 6635 - protein, 9 aa, synthetic construct
GIPAVIKVH

SEQ ID NO: 6636 - protein, 9 aa, synthetic construct
PTNAAGRLF

SEQ ID NO: 6637 - protein, 9 aa, synthetic construct
GIPAVGKVF

SEQ ID NO: 6638 - protein, 9 aa, synthetic construct
PTNAAGRVH

SEQ ID NO: 6639 - protein, 9 aa, synthetic construct
GIPAGVKVY

SEQ ID NO: 6640 - protein, 9 aa, synthetic construct
PTNAAGRVF

SEQ ID NO: 6641 - protein, 9 aa, synthetic construct
GIPAGLRVF

SEQ ID NO: 6642 - protein, 9 aa, synthetic construct
GIPAGLKVF

SEQ ID NO: 6643 - protein, 9 aa, synthetic construct
GIPAGAHLH

SEQ ID NO: 6644 - protein, 9 aa, synthetic construct
GIPAGAHVH

SEQ ID NO: 6645 - protein, 9 aa, synthetic construct
GIPAGAKLF

SEQ ID NO: 6646 - protein, 9 aa, synthetic construct
GIPAGAKVF

SEQ ID NO: 6647 - protein, 9 aa, synthetic construct
PTNAAGKLF

SEQ ID NO: 6648 - protein, 9 aa, synthetic construct
GIPAGIHLH

SEQ ID NO: 6649 - protein, 9 aa, synthetic construct
GIPAGIHLF

SEQ ID NO: 6650 - protein, 9 aa, synthetic construct
GIPAGIHVK

SEQ ID NO: 6651 - protein, 9 aa, synthetic construct
PTNAAGKVY

SEQ ID NO: 6652 - protein, 9 aa, synthetic construct
GIPAGIKVR

SEQ ID NO: 6653 - protein, 9 aa, synthetic construct
PTNAAGKVH

SEQ ID NO: 6654 - protein, 9 aa, synthetic construct
GIPAGGHLY

SEQ ID NO: 6655 - protein, 9 aa, synthetic construct
GIPAGGHVY

SEQ ID NO: 6656 - protein, 9 aa, synthetic construct
GIPAGGHVR

SEQ ID NO: 6657 - protein, 9 aa, synthetic construct
GIPAGGHVK

SEQ ID NO: 6658 - protein, 9 aa, synthetic construct
GIPAGGRLF

SEQ ID NO: 6659 - protein, 9 aa, synthetic construct
PTNAAGKVF

SEQ ID NO: 6660 - protein, 9 aa, synthetic construct
PTNATVHVH

SEQ ID NO: 6661 - protein, 9 aa, synthetic construct
PLNGTSKLF

SEQ ID NO: 6662 - protein, 9 aa, synthetic construct
PTNATVHVF

SEQ ID NO: 6663 - protein, 9 aa, synthetic construct
PLNGTTHLF

SEQ ID NO: 6664 - protein, 9 aa, synthetic construct
PTNATVRLY

SEQ ID NO: 6665 - protein, 9 aa, synthetic construct
PLNGTTKLR

SEQ ID NO: 6666 - protein, 9 aa, synthetic construct
PLNGTTKLF

SEQ ID NO: 6667 - protein, 9 aa, synthetic construct
PLNGSSRVH

SEQ ID NO: 6668 - protein, 9 aa, synthetic construct
PLNGSSKVF

SEQ ID NO: 6669 - protein, 9 aa, synthetic construct
PLNGSTHLH

SEQ ID NO: 6670 - protein, 9 aa, synthetic construct
PTNATVRVH

SEQ ID NO: 6671 - protein, 9 aa, synthetic construct
PLNGVTHLR

SEQ ID NO: 6672 - protein, 9 aa, synthetic construct
PTNATVKVY

SEQ ID NO: 6673 - protein, 9 aa, synthetic construct
PLNGGSRLY

SEQ ID NO: 6674 - protein, 9 aa, synthetic construct
PLNGGSKVF

SEQ ID NO: 6675 - protein, 9 aa, synthetic construct
PLNGGTKVY

SEQ ID NO: 6676 - protein, 9 aa, synthetic construct
PLQGASHLF

SEQ ID NO: 6677 - protein, 9 aa, synthetic construct
PLQGASHVR

SEQ ID NO: 6678 - protein, 9 aa, synthetic construct
PLQGASHVK

SEQ ID NO: 6679 - protein, 9 aa, synthetic construct
PLQGATHLF

SEQ ID NO: 6680 - protein, 9 aa, synthetic construct
PLQGATHVH

SEQ ID NO: 6681 - protein, 9 aa, synthetic construct
PTNATLHLF

SEQ ID NO: 6682 - protein, 9 aa, synthetic construct
PLQGATRVF

SEQ ID NO: 6683 - protein, 9 aa, synthetic construct
PLQGTSKLH

SEQ ID NO: 6684 - protein, 9 aa, synthetic construct
PLQGTSKLF

SEQ ID NO: 6685 - protein, 9 aa, synthetic construct
PLQGTTHLR

SEQ ID NO: 6686 - protein, 9 aa, synthetic construct
PLQGTTHVK

SEQ ID NO: 6687 - protein, 9 aa, synthetic construct
PLQGTTRVF

SEQ ID NO: 6688 - protein, 9 aa, synthetic construct
PTNATLRLR

SEQ ID NO: 6689 - protein, 9 aa, synthetic construct
PLQGSSHLH

SEQ ID NO: 6690 - protein, 9 aa, synthetic construct
PLQGSSHLK

SEQ ID NO: 6691 - protein, 9 aa, synthetic construct
PLQGSSKVF

SEQ ID NO: 6692 - protein, 9 aa, synthetic construct
PLQGSTHLR

SEQ ID NO: 6693 - protein, 9 aa, synthetic construct
PLQGSTHVR

SEQ ID NO: 6694 - protein, 9 aa, synthetic construct
PTNATLRVH

SEQ ID NO: 6695 - protein, 9 aa, synthetic construct
PLQGSTKLF

SEQ ID NO: 6696 - protein, 9 aa, synthetic construct
PLQGSTKVY

SEQ ID NO: 6697 - protein, 9 aa, synthetic construct
PLQGSTKVF

SEQ ID NO: 6698 - protein, 9 aa, synthetic construct
PLNGVIHVY

SEQ ID NO: 6699 - protein, 9 aa, synthetic construct
PLQGVTHLK

SEQ ID NO: 6700 - protein, 9 aa, synthetic construct
PLQGVTRLF

SEQ ID NO: 6701 - protein, 9 aa, synthetic construct
PLQGVTKLF

SEQ ID NO: 6702 - protein, 9 aa, synthetic construct
PLQGVTKVF

SEQ ID NO: 6703 - protein, 9 aa, synthetic construct
PLQGGSHVK

SEQ ID NO: 6704 - protein, 9 aa, synthetic construct
PLQGGSRLF

SEQ ID NO: 6705 - protein, 9 aa, synthetic construct
PLQGGSRVY

SEQ ID NO: 6706 - protein, 9 aa, synthetic construct
PLQGGSKVY

SEQ ID NO: 6707 - protein, 9 aa, synthetic construct
PLQGGSKVF

SEQ ID NO: 6708 - protein, 9 aa, synthetic construct
PLQGGTHLR

SEQ ID NO: 6709 - protein, 9 aa, synthetic construct
PLQGGTHVR

SEQ ID NO: 6710 - protein, 9 aa, synthetic construct
PLQGGTKVF

SEQ ID NO: 6711 - protein, 9 aa, synthetic construct
PTNGASHLF

SEQ ID NO: 6712 - protein, 9 aa, synthetic construct
PTNGASRLF

SEQ ID NO: 6713 - protein, 9 aa, synthetic construct
PTNGASKLF

SEQ ID NO: 6714 - protein, 9 aa, synthetic construct
PTNGASKVY

SEQ ID NO: 6715 - protein, 9 aa, synthetic construct
PTNATAHLK

SEQ ID NO: 6716 - protein, 9 aa, synthetic construct
PTNGATRLY

SEQ ID NO: 6717 - protein, 9 aa, synthetic construct
PTNGATRVY

SEQ ID NO: 6718 - protein, 9 aa, synthetic construct
PTNGATRVF

SEQ ID NO: 6719 - protein, 9 aa, synthetic construct
PTNGATKLY

SEQ ID NO: 6720 - protein, 9 aa, synthetic construct
PTNATAHVR

SEQ ID NO: 6721 - protein, 9 aa, synthetic construct
PTNGTSHLY

SEQ ID NO: 6722 - protein, 9 aa, synthetic construct
PTNGTSHLH

SEQ ID NO: 6723 - protein, 9 aa, synthetic construct
PTNGTSHLK

SEQ ID NO: 6724 - protein, 9 aa, synthetic construct
PTNGTSHLF

SEQ ID NO: 6725 - protein, 9 aa, synthetic construct
PTNGTSHVK

SEQ ID NO: 6726 - protein, 9 aa, synthetic construct
PTNGTSHVF

SEQ ID NO: 6727 - protein, 9 aa, synthetic construct
PTNGTSRLF

SEQ ID NO: 6728 - protein, 9 aa, synthetic construct
PTNATAHVK

SEQ ID NO: 6729 - protein, 9 aa, synthetic construct
PTNGTTHLR

SEQ ID NO: 6730 - protein, 9 aa, synthetic construct
PTNGTTHLF

SEQ ID NO: 6731 - protein, 9 aa, synthetic construct
PTNGTTHVY

SEQ ID NO: 6732 - protein, 9 aa, synthetic construct
PLNGVIHVH

SEQ ID NO: 6733 - protein, 9 aa, synthetic construct
PTNGSSHLR

SEQ ID NO: 6734 - protein, 9 aa, synthetic construct
PTNGSSHLF

SEQ ID NO: 6735 - protein, 9 aa, synthetic construct
PTNGSSRLY

SEQ ID NO: 6736 - protein, 9 aa, synthetic construct
PTNGSSRLF

SEQ ID NO: 6737 - protein, 9 aa, synthetic construct
PTNGSSRVF

SEQ ID NO: 6738 - protein, 9 aa, synthetic construct
PTNGSSKLF

SEQ ID NO: 6739 - protein, 9 aa, synthetic construct
PTNGSTHVR

SEQ ID NO: 6740 - protein, 9 aa, synthetic construct
PTNGSTRVY

SEQ ID NO: 6741 - protein, 9 aa, synthetic construct
PTNGSTRVF

SEQ ID NO: 6742 - protein, 9 aa, synthetic construct
PTNGVSHLR

SEQ ID NO: 6743 - protein, 9 aa, synthetic construct
PTNATARVF

SEQ ID NO: 6744 - protein, 9 aa, synthetic construct
PTNGVSRLF

SEQ ID NO: 6745 - protein, 9 aa, synthetic construct
PTNATAKLY

SEQ ID NO: 6746 - protein, 9 aa, synthetic construct
PTNGVTRVY

SEQ ID NO: 6747 - protein, 9 aa, synthetic construct
PTNGVTKLF

SEQ ID NO: 6748 - protein, 9 aa, synthetic construct
PTNATAKVY

SEQ ID NO: 6749 - protein, 9 aa, synthetic construct
PTNGGSRVY

SEQ ID NO: 6750 - protein, 9 aa, synthetic construct
PTNGGTKLF

SEQ ID NO: 6751 - protein, 9 aa, synthetic construct
PTNGGTKVK

SEQ ID NO: 6752 - protein, 9 aa, synthetic construct
PTNGGTKVF

SEQ ID NO: 6753 - protein, 9 aa, synthetic construct
PTQGASHLY

SEQ ID NO: 6754 - protein, 9 aa, synthetic construct
PTQGASHLF

SEQ ID NO: 6755 - protein, 9 aa, synthetic construct
PTQGASHVY

SEQ ID NO: 6756 - protein, 9 aa, synthetic construct
PTQGASHVR

SEQ ID NO: 6757 - protein, 9 aa, synthetic construct
PTQGASKVH

SEQ ID NO: 6758 - protein, 9 aa, synthetic construct
PTQGASKVF

SEQ ID NO: 6759 - protein, 9 aa, synthetic construct
PTQGATHLY

SEQ ID NO: 6760 - protein, 9 aa, synthetic construct
PTQGATHLR

SEQ ID NO: 6761 - protein, 9 aa, synthetic construct
PTQGATHLH

SEQ ID NO: 6762 - protein, 9 aa, synthetic construct
PTQGATHLK

SEQ ID NO: 6763 - protein, 9 aa, synthetic construct
PTQGATHVY

SEQ ID NO: 6764 - protein, 9 aa, synthetic construct
PTQGATHVR

SEQ ID NO: 6765 - protein, 9 aa, synthetic construct
PTQGATHVH

SEQ ID NO: 6766 - protein, 9 aa, synthetic construct
PTQGATHVK

SEQ ID NO: 6767 - protein, 9 aa, synthetic construct
PTQGATHVF

SEQ ID NO: 6768 - protein, 9 aa, synthetic construct
PTQGATRLF

SEQ ID NO: 6769 - protein, 9 aa, synthetic construct
PTQGATKLF

SEQ ID NO: 6770 - protein, 9 aa, synthetic construct
PTQGATKVF

SEQ ID NO: 6771 - protein, 9 aa, synthetic construct
PTQGTSHLH

SEQ ID NO: 6772 - protein, 9 aa, synthetic construct
PTQGTSHLK

SEQ ID NO: 6773 - protein, 9 aa, synthetic construct
PTQGTSHVH

SEQ ID NO: 6774 - protein, 9 aa, synthetic construct
PTQGTSKLY

SEQ ID NO: 6775 - protein, 9 aa, synthetic construct
PTQGTTHLY

SEQ ID NO: 6776 - protein, 9 aa, synthetic construct
PTQGTTHLR

SEQ ID NO: 6777 - protein, 9 aa, synthetic construct
PTQGTTHLH

SEQ ID NO: 6778 - protein, 9 aa, synthetic construct
PTQGTTHLK

SEQ ID NO: 6779 - protein, 9 aa, synthetic construct
PTQGTTHLF

SEQ ID NO: 6780 - protein, 9 aa, synthetic construct
PTQGTTHVY

SEQ ID NO: 6781 - protein, 9 aa, synthetic construct
PTQGTTHVR

SEQ ID NO: 6782 - protein, 9 aa, synthetic construct
PTQGTTHVH

SEQ ID NO: 6783 - protein, 9 aa, synthetic construct
PTQGTTKVY

SEQ ID NO: 6784 - protein, 9 aa, synthetic construct
PTQGSTHLH

SEQ ID NO: 6785 - protein, 9 aa, synthetic construct
PTQGSTHVR

SEQ ID NO: 6786 - protein, 9 aa, synthetic construct
PTQGSTKLF

SEQ ID NO: 6787 - protein, 9 aa, synthetic construct
PTQGSTKVF

SEQ ID NO: 6788 - protein, 9 aa, synthetic construct
PTQGVSHLK

SEQ ID NO: 6789 - protein, 9 aa, synthetic construct
PTQGVSHVY

SEQ ID NO: 6790 - protein, 9 aa, synthetic construct
PTQGVSRLK

SEQ ID NO: 6791 - protein, 9 aa, synthetic construct
PTQGVSRVF

SEQ ID NO: 6792 - protein, 9 aa, synthetic construct
PTQGVSKLY

SEQ ID NO: 6793 - protein, 9 aa, synthetic construct
PTQGVSKLF

SEQ ID NO: 6794 - protein, 9 aa, synthetic construct
PTQGVSKVY

SEQ ID NO: 6795 - protein, 9 aa, synthetic construct
PTQGVTHLK

SEQ ID NO: 6796 - protein, 9 aa, synthetic construct
PTQGVTKVY

SEQ ID NO: 6797 - protein, 9 aa, synthetic construct
PTQGVTKVF

SEQ ID NO: 6798 - protein, 9 aa, synthetic construct
PTQGGSHVF

SEQ ID NO: 6799 - protein, 9 aa, synthetic construct
PTQGGSRVY

SEQ ID NO: 6800 - protein, 9 aa, synthetic construct
PTQGGSRVK

SEQ ID NO: 6801 - protein, 9 aa, synthetic construct
PTQGGSKLF

SEQ ID NO: 6802 - protein, 9 aa, synthetic construct
PTQGGSKVF

SEQ ID NO: 6803 - protein, 9 aa, synthetic construct
PTQGGTHLR

SEQ ID NO: 6804 - protein, 9 aa, synthetic construct
PTQGGTHVY

SEQ ID NO: 6805 - protein, 9 aa, synthetic construct
PTQGGTHVR

SEQ ID NO: 6806 - protein, 9 aa, synthetic construct
PTNATGRLF

SEQ ID NO: 6807 - protein, 9 aa, synthetic construct
PTNATGKLH

SEQ ID NO: 6808 - protein, 9 aa, synthetic construct
PTNATGKVH

SEQ ID NO: 6809 - protein, 9 aa, synthetic construct
PTNASVHVH

SEQ ID NO: 6810 - protein, 9 aa, synthetic construct
PTNASVKLF

SEQ ID NO: 6811 - protein, 9 aa, synthetic construct
PTNASVKVF

SEQ ID NO: 6812 - protein, 9 aa, synthetic construct
PTNASLHVR

SEQ ID NO: 6813 - protein, 9 aa, synthetic construct
PTNASAHVH

SEQ ID NO: 6814 - protein, 9 aa, synthetic construct
PTNASAHVF

SEQ ID NO: 6815 - protein, 9 aa, synthetic construct
PTNASARVY

SEQ ID NO: 6816 - protein, 9 aa, synthetic construct
PTNASARVF

SEQ ID NO: 6817 - protein, 9 aa, synthetic construct
PTNASAKLF

SEQ ID NO: 6818 - protein, 9 aa, synthetic construct
PTNASAKVH

SEQ ID NO: 6819 - protein, 9 aa, synthetic construct
PTNASAKVF

SEQ ID NO: 6820 - protein, 9 aa, synthetic construct
PTNASIHLY

SEQ ID NO: 6821 - protein, 9 aa, synthetic construct
PTNASIRLF

SEQ ID NO: 6822 - protein, 9 aa, synthetic construct
PTNASIKLK

SEQ ID NO: 6823 - protein, 9 aa, synthetic construct
PTNASIKLF

SEQ ID NO: 6824 - protein, 9 aa, synthetic construct
PTNASGRLY

SEQ ID NO: 6825 - protein, 9 aa, synthetic construct
PTNASGRLF

SEQ ID NO: 6826 - protein, 9 aa, synthetic construct
PTNASGRVF

SEQ ID NO: 6827 - protein, 9 aa, synthetic construct
PTNASGKLF

SEQ ID NO: 6828 - protein, 9 aa, synthetic construct
PTNASGKVY

SEQ ID NO: 6829 - protein, 9 aa, synthetic construct
PTNASGKVF

SEQ ID NO: 6830 - protein, 9 aa, synthetic construct
PTNAVVHVH

SEQ ID NO: 6831 - protein, 9 aa, synthetic construct
PTNAVVHVF

SEQ ID NO: 6832 - protein, 9 aa, synthetic construct
PTNAVVKVH

SEQ ID NO: 6833 - protein, 9 aa, synthetic construct
PTNAVAHVY

SEQ ID NO: 6834 - protein, 9 aa, synthetic construct
PTNAVARLF

SEQ ID NO: 6835 - protein, 9 aa, synthetic construct
PTNAVARVF

SEQ ID NO: 6836 - protein, 9 aa, synthetic construct
PTNAVIHVK

SEQ ID NO: 6837 - protein, 9 aa, synthetic construct
PLNGALKVK

SEQ ID NO: 6838 - protein, 9 aa, synthetic construct
PLNGVGRLY

SEQ ID NO: 6839 - protein, 9 aa, synthetic construct
PTNAVIKLK

SEQ ID NO: 6840 - protein, 9 aa, synthetic construct
PTNAVGHVH

SEQ ID NO: 6841 - protein, 9 aa, synthetic construct
PTNAVGRLF

SEQ ID NO: 6842 - protein, 9 aa, synthetic construct
PTNAVGRVY

SEQ ID NO: 6843 - protein, 9 aa, synthetic construct
PTNAVGKLY

SEQ ID NO: 6844 - protein, 9 aa, synthetic construct
PTNAVGKLF

SEQ ID NO: 6845 - protein, 9 aa, synthetic construct
PTNAVGKVY

SEQ ID NO: 6846 - protein, 9 aa, synthetic construct
PTNAGVHVY

SEQ ID NO: 6847 - protein, 9 aa, synthetic construct
PTNAGVHVK

SEQ ID NO: 6848 - protein, 9 aa, synthetic construct
PTNAGVRVF

SEQ ID NO: 6849 - protein, 9 aa, synthetic construct
PTNAGVKLY

SEQ ID NO: 6850 - protein, 9 aa, synthetic construct
PTNAGVKLK

SEQ ID NO: 6851 - protein, 9 aa, synthetic construct
PTNAGVKLF

SEQ ID NO: 6852 - protein, 9 aa, synthetic construct
PTNAGVKVY

SEQ ID NO: 6853 - protein, 9 aa, synthetic construct
PLNGVGKLY

SEQ ID NO: 6854 - protein, 9 aa, synthetic construct
PTNAGLKVF

SEQ ID NO: 6855 - protein, 9 aa, synthetic construct
PTNAGAHLY

SEQ ID NO: 6856 - protein, 9 aa, synthetic construct
PTNAGAHLH

SEQ ID NO: 6857 - protein, 9 aa, synthetic construct
PTNAGARLH

SEQ ID NO: 6858 - protein, 9 aa, synthetic construct
PTNAGARVF

SEQ ID NO: 6859 - protein, 9 aa, synthetic construct
PTNAGAKLY

SEQ ID NO: 6860 - protein, 9 aa, synthetic construct
PTNAGAKLH

SEQ ID NO: 6861 - protein, 9 aa, synthetic construct
PTNAGAKLF

SEQ ID NO: 6862 - protein, 9 aa, synthetic construct
PTNAGAKVF

SEQ ID NO: 6863 - protein, 9 aa, synthetic construct
PTNAGIHLR

SEQ ID NO: 6864 - protein, 9 aa, synthetic construct
PTNAGIKVY

SEQ ID NO: 6865 - protein, 9 aa, synthetic construct
PTNAGGHVY

SEQ ID NO: 6866 - protein, 9 aa, synthetic construct
PTNAGGHVR

SEQ ID NO: 6867 - protein, 9 aa, synthetic construct
PTNAGGHVK

SEQ ID NO: 6868 - protein, 9 aa, synthetic construct
PTNAGGRLR

SEQ ID NO: 6869 - protein, 9 aa, synthetic construct
PTNAGGRLF

SEQ ID NO: 6870 - protein, 9 aa, synthetic construct
PTNAGGRVF

SEQ ID NO: 6871 - protein, 9 aa, synthetic construct
PTNAGGKVF

SEQ ID NO: 6872 - protein, 9 aa, synthetic construct
PLNGAVHVR

SEQ ID NO: 6873 - protein, 9 aa, synthetic construct
PLNGGVHLY

SEQ ID NO: 6874 - protein, 9 aa, synthetic construct
PTQGAVHLY

SEQ ID NO: 6875 - protein, 9 aa, synthetic construct
PTQGAVRVF

SEQ ID NO: 6876 - protein, 9 aa, synthetic construct
PTQGAVKLF

SEQ ID NO: 6877 - protein, 9 aa, synthetic construct
PTQGAVKVY

SEQ ID NO: 6878 - protein, 9 aa, synthetic construct
PTQGALRLH

SEQ ID NO: 6879 - protein, 9 aa, synthetic construct
PTQGALRVF

SEQ ID NO: 6880 - protein, 9 aa, synthetic construct
PTQGALKLF

SEQ ID NO: 6881 - protein, 9 aa, synthetic construct
PTQGALKVH

SEQ ID NO: 6882 - protein, 9 aa, synthetic construct
PTQGAAHLY

SEQ ID NO: 6883 - protein, 9 aa, synthetic construct
PLNGGVHVK

SEQ ID NO: 6884 - protein, 9 aa, synthetic construct
PTQGAAKVH

SEQ ID NO: 6885 - protein, 9 aa, synthetic construct
PTQGAAKVF

SEQ ID NO: 6886 - protein, 9 aa, synthetic construct
PLNGGVHVF

SEQ ID NO: 6887 - protein, 9 aa, synthetic construct
PTQGAIHLK

SEQ ID NO: 6888 - protein, 9 aa, synthetic construct
PTQGAIHVH

SEQ ID NO: 6889 - protein, 9 aa, synthetic construct
PTQGAIHVK

SEQ ID NO: 6890 - protein, 9 aa, synthetic construct
PTQGAIRLY

SEQ ID NO: 6891 - protein, 9 aa, synthetic construct
PTQGAIRVH

SEQ ID NO: 6892 - protein, 9 aa, synthetic construct
PTQGAIRVK

SEQ ID NO: 6893 - protein, 9 aa, synthetic construct
PTQGAIKLY

SEQ ID NO: 6894 - protein, 9 aa, synthetic construct
PTQGAIKLH

SEQ ID NO: 6895 - protein, 9 aa, synthetic construct
PTQGAIKLF

SEQ ID NO: 6896 - protein, 9 aa, synthetic construct
PTQGAIKVY

SEQ ID NO: 6897 - protein, 9 aa, synthetic construct
PTQGAGHLY

SEQ ID NO: 6898 - protein, 9 aa, synthetic construct
PTQGAGHLF

SEQ ID NO: 6899 - protein, 9 aa, synthetic construct
PTQGAGHVK

SEQ ID NO: 6900 - protein, 9 aa, synthetic construct
PTQGAGHVF

SEQ ID NO: 6901 - protein, 9 aa, synthetic construct
PTQGAGRLF

SEQ ID NO: 6902 - protein, 9 aa, synthetic construct
PTQGAGRVH

SEQ ID NO: 6903 - protein, 9 aa, synthetic construct
PTQGAGKLF

SEQ ID NO: 6904 - protein, 9 aa, synthetic construct
PTQGTVHLY

SEQ ID NO: 6905 - protein, 9 aa, synthetic construct
PTQGTVHLF

SEQ ID NO: 6906 - protein, 9 aa, synthetic construct
PTQGTVHVY

SEQ ID NO: 6907 - protein, 9 aa, synthetic construct
PTQGTVHVH

SEQ ID NO: 6908 - protein, 9 aa, synthetic construct
PTQGTVHVK

SEQ ID NO: 6909 - protein, 9 aa, synthetic construct
PTQGTVHVF

SEQ ID NO: 6910 - protein, 9 aa, synthetic construct
PTQGTVRLY

SEQ ID NO: 6911 - protein, 9 aa, synthetic construct
PTQGTVKLY

SEQ ID NO: 6912 - protein, 9 aa, synthetic construct
PTQGTVKVY

SEQ ID NO: 6913 - protein, 9 aa, synthetic construct
PTQGTLHLK

SEQ ID NO: 6914 - protein, 9 aa, synthetic construct
PTQGTLHVY

SEQ ID NO: 6915 - protein, 9 aa, synthetic construct
PTQGTLHVH

SEQ ID NO: 6916 - protein, 9 aa, synthetic construct
PLNGGVKLY

SEQ ID NO: 6917 - protein, 9 aa, synthetic construct
PTQGTLKLY

SEQ ID NO: 6918 - protein, 9 aa, synthetic construct
PTQGTAHLY

SEQ ID NO: 6919 - protein, 9 aa, synthetic construct
PTQGTAHLR

SEQ ID NO: 6920 - protein, 9 aa, synthetic construct
PTQGTAHLH

SEQ ID NO: 6921 - protein, 9 aa, synthetic construct
PTQGTAHLK

SEQ ID NO: 6922 - protein, 9 aa, synthetic construct
PTQGTAHLF

SEQ ID NO: 6923 - protein, 9 aa, synthetic construct
PTQGTAHVY

SEQ ID NO: 6924 - protein, 9 aa, synthetic construct
PTQGTAHVR

SEQ ID NO: 6925 - protein, 9 aa, synthetic construct
PTQGTAHVH

SEQ ID NO: 6926 - protein, 9 aa, synthetic construct
PTQGTAKLY

SEQ ID NO: 6927 - protein, 9 aa, synthetic construct
PTQGTAKLF

SEQ ID NO: 6928 - protein, 9 aa, synthetic construct
PTQGTAKVY

SEQ ID NO: 6929 - protein, 9 aa, synthetic construct
PTQGTAKVF

SEQ ID NO: 6930 - protein, 9 aa, synthetic construct
PTQGTIHVR

SEQ ID NO: 6931 - protein, 9 aa, synthetic construct
PTQGTIHVH

SEQ ID NO: 6932 - protein, 9 aa, synthetic construct
PTQGTIHVK

SEQ ID NO: 6933 - protein, 9 aa, synthetic construct
PTQGTIRVF

SEQ ID NO: 6934 - protein, 9 aa, synthetic construct
PTQGTIKLY

SEQ ID NO: 6935 - protein, 9 aa, synthetic construct
PTQGTIKVY

SEQ ID NO: 6936 - protein, 9 aa, synthetic construct
PTQGTGHLY

SEQ ID NO: 6937 - protein, 9 aa, synthetic construct
PTQGTGHLR

SEQ ID NO: 6938 - protein, 9 aa, synthetic construct
PTQGTGHLH

SEQ ID NO: 6939 - protein, 9 aa, synthetic construct
PTQGTGHLK

SEQ ID NO: 6940 - protein, 9 aa, synthetic construct
PTQGTGHLF

SEQ ID NO: 6941 - protein, 9 aa, synthetic construct
PTQGTGHVY

SEQ ID NO: 6942 - protein, 9 aa, synthetic construct
PTQGTGHVR

SEQ ID NO: 6943 - protein, 9 aa, synthetic construct
PTQGTGHVH

SEQ ID NO: 6944 - protein, 9 aa, synthetic construct
PTQGTGHVK

SEQ ID NO: 6945 - protein, 9 aa, synthetic construct
PTQGTGHVF

SEQ ID NO: 6946 - protein, 9 aa, synthetic construct
PLNGGVKVK

SEQ ID NO: 6947 - protein, 9 aa, synthetic construct
PTQGTGRVF

SEQ ID NO: 6948 - protein, 9 aa, synthetic construct
PTQGTGKLY

SEQ ID NO: 6949 - protein, 9 aa, synthetic construct
PTQGTGKLH

SEQ ID NO: 6950 - protein, 9 aa, synthetic construct
PTQGTGKLF

SEQ ID NO: 6951 - protein, 9 aa, synthetic construct
PTQGTGKVR

SEQ ID NO: 6952 - protein, 9 aa, synthetic construct
PTQGTGKVF

SEQ ID NO: 6953 - protein, 9 aa, synthetic construct
PLNGAAHLK

SEQ ID NO: 6954 - protein, 9 aa, synthetic construct
PTQGSVHLR

SEQ ID NO: 6955 - protein, 9 aa, synthetic construct
PTQGSVHVY

SEQ ID NO: 6956 - protein, 9 aa, synthetic construct
PTQGSVHVR

SEQ ID NO: 6957 - protein, 9 aa, synthetic construct
PTQGSVHVK

SEQ ID NO: 6958 - protein, 9 aa, synthetic construct
PTQGSVHVF

SEQ ID NO: 6959 - protein, 9 aa, synthetic construct
PTQGSVKLY

SEQ ID NO: 6960 - protein, 9 aa, synthetic construct
PTQGSVKLF

SEQ ID NO: 6961 - protein, 9 aa, synthetic construct
PTQGSVKVH

SEQ ID NO: 6962 - protein, 9 aa, synthetic construct
PTQGSVKVF

SEQ ID NO: 6963 - protein, 9 aa, synthetic construct
PTQGSLHLH

SEQ ID NO: 6964 - protein, 9 aa, synthetic construct
PTQGSLHVK

SEQ ID NO: 6965 - protein, 9 aa, synthetic construct
PTQGSLKLH

SEQ ID NO: 6966 - protein, 9 aa, synthetic construct
PTQGSAHLY

SEQ ID NO: 6967 - protein, 9 aa, synthetic construct
PTQGSAHLK

SEQ ID NO: 6968 - protein, 9 aa, synthetic construct
PTQGSAHLF

SEQ ID NO: 6969 - protein, 9 aa, synthetic construct
PTQGSARLF

SEQ ID NO: 6970 - protein, 9 aa, synthetic construct
PTQGSAKVF

SEQ ID NO: 6971 - protein, 9 aa, synthetic construct
PTQGSIHLR

SEQ ID NO: 6972 - protein, 9 aa, synthetic construct
PTQGSIHVR

SEQ ID NO: 6973 - protein, 9 aa, synthetic construct
PTQGSIHVK

SEQ ID NO: 6974 - protein, 9 aa, synthetic construct
PTQGSIRVY

SEQ ID NO: 6975 - protein, 9 aa, synthetic construct
PTQGSIRVH

SEQ ID NO: 6976 - protein, 9 aa, synthetic construct
PTQGSIKVY

SEQ ID NO: 6977 - protein, 9 aa, synthetic construct
PTQGSGHLY

SEQ ID NO: 6978 - protein, 9 aa, synthetic construct
PTQGSGRVY

SEQ ID NO: 6979 - protein, 9 aa, synthetic construct
PTQGVVHVY

SEQ ID NO: 6980 - protein, 9 aa, synthetic construct
PTQGVVHVH

SEQ ID NO: 6981 - protein, 9 aa, synthetic construct
PTQGVVHVK

SEQ ID NO: 6982 - protein, 9 aa, synthetic construct
PTQGVVHVF

SEQ ID NO: 6983 - protein, 9 aa, synthetic construct
PTQGVVRLH

SEQ ID NO: 6984 - protein, 9 aa, synthetic construct
PTQGVVKLH

SEQ ID NO: 6985 - protein, 9 aa, synthetic construct
PTQGVVKLK

SEQ ID NO: 6986 - protein, 9 aa, synthetic construct
PTQGVVKVY

SEQ ID NO: 6987 - protein, 9 aa, synthetic construct
PTQGVLHLK

SEQ ID NO: 6988 - protein, 9 aa, synthetic construct
PTQGVLRVY

SEQ ID NO: 6989 - protein, 9 aa, synthetic construct
PTQGVLKVY

SEQ ID NO: 6990 - protein, 9 aa, synthetic construct
PTQGVAHLH

SEQ ID NO: 6991 - protein, 9 aa, synthetic construct
PTQGVAKLY

SEQ ID NO: 6992 - protein, 9 aa, synthetic construct
PTQGVAKLF

SEQ ID NO: 6993 - protein, 9 aa, synthetic construct
PTQGVAKVR

SEQ ID NO: 6994 - protein, 9 aa, synthetic construct
PTQGVIRLY

SEQ ID NO: 6995 - protein, 9 aa, synthetic construct
PTQGVIRLF

SEQ ID NO: 6996 - protein, 9 aa, synthetic construct
PTQGVIKLH

SEQ ID NO: 6997 - protein, 9 aa, synthetic construct
PTQGVIKLK

SEQ ID NO: 6998 - protein, 9 aa, synthetic construct
PTQGVGKLF

SEQ ID NO: 6999 - protein, 9 aa, synthetic construct
PLNGGAHLY

SEQ ID NO: 7000 - protein, 9 aa, synthetic construct
PTQGGVHLY

SEQ ID NO: 7001 - protein, 9 aa, synthetic construct
PLNGGAHLH

SEQ ID NO: 7002 - protein, 9 aa, synthetic construct
PTQGGVKLY

SEQ ID NO: 7003 - protein, 9 aa, synthetic construct
PTQGGVKLH

SEQ ID NO: 7004 - protein, 9 aa, synthetic construct
PTQGGVKLF

SEQ ID NO: 7005 - protein, 9 aa, synthetic construct
PTQGGVKVF

SEQ ID NO: 7006 - protein, 9 aa, synthetic construct
PTQGGAHVR

SEQ ID NO: 7007 - protein, 9 aa, synthetic construct
PTQGGAHVF

SEQ ID NO: 7008 - protein, 9 aa, synthetic construct
PTQGGAKLF

SEQ ID NO: 7009 - protein, 9 aa, synthetic construct
PTQGGAKVY

SEQ ID NO: 7010 - protein, 9 aa, synthetic construct
PTQGGAKVH

SEQ ID NO: 7011 - protein, 9 aa, synthetic construct
PTQGGIHLF

SEQ ID NO: 7012 - protein, 9 aa, synthetic construct
PTQGGIHVH

SEQ ID NO: 7013 - protein, 9 aa, synthetic construct
PTQGGIKLY

SEQ ID NO: 7014 - protein, 9 aa, synthetic construct
PTQGGIKVY

SEQ ID NO: 7015 - protein, 9 aa, synthetic construct
PTQGGIKVF

SEQ ID NO: 7016 - protein, 9 aa, synthetic construct
PTQGGGHVR

SEQ ID NO: 7017 - protein, 9 aa, synthetic construct
PTQGGGRVY

SEQ ID NO: 7018 - protein, 9 aa, synthetic construct
PTQGGGKVY

SEQ ID NO: 7019 - protein, 9 aa, synthetic construct
PTQGGGKVF

SEQ ID NO: 7020 - protein, 9 aa, synthetic construct
PTQAAVHVY

SEQ ID NO: 7021 - protein, 9 aa, synthetic construct
PTQAAVHVK

SEQ ID NO: 7022 - protein, 9 aa, synthetic construct
PTQAAVRLY

SEQ ID NO: 7023 - protein, 9 aa, synthetic construct
PTQAALRLY

SEQ ID NO: 7024 - protein, 9 aa, synthetic construct
PLNGAAHVK

SEQ ID NO: 7025 - protein, 9 aa, synthetic construct
PTQAALKVY

SEQ ID NO: 7026 - protein, 9 aa, synthetic construct
PLNGGAKLR

SEQ ID NO: 7027 - protein, 9 aa, synthetic construct
PTQAAAHLF

SEQ ID NO: 7028 - protein, 9 aa, synthetic construct
PTQAAARVH

SEQ ID NO: 7029 - protein, 9 aa, synthetic construct
PTQAAARVF

SEQ ID NO: 7030 - protein, 9 aa, synthetic construct
PTQAAIHVH

SEQ ID NO: 7031 - protein, 9 aa, synthetic construct
PTQAAIHVK

SEQ ID NO: 7032 - protein, 9 aa, synthetic construct
PTQAAIKLY

SEQ ID NO: 7033 - protein, 9 aa, synthetic construct
PTQAAGHLH

SEQ ID NO: 7034 - protein, 9 aa, synthetic construct
PTQAAGHLF

SEQ ID NO: 7035 - protein, 9 aa, synthetic construct
PTQAAGHVH

SEQ ID NO: 7036 - protein, 9 aa, synthetic construct
PTQAAGHVF

SEQ ID NO: 7037 - protein, 9 aa, synthetic construct
PTQAAGRLY

SEQ ID NO: 7038 - protein, 9 aa, synthetic construct
PTQAAGRLH

SEQ ID NO: 7039 - protein, 9 aa, synthetic construct
PTQAAGRVY

SEQ ID NO: 7040 - protein, 9 aa, synthetic construct
PTQAAGRVH

SEQ ID NO: 7041 - protein, 9 aa, synthetic construct
PTQAAGRVF

SEQ ID NO: 7042 - protein, 9 aa, synthetic construct
PTQAAGKLY

SEQ ID NO: 7043 - protein, 9 aa, synthetic construct
PTQAAGKVY

SEQ ID NO: 7044 - protein, 9 aa, synthetic construct
PTQAAGKVH

SEQ ID NO: 7045 - protein, 9 aa, synthetic construct
PTQAAGKVF

SEQ ID NO: 7046 - protein, 9 aa, synthetic construct
PLNGGIHLR

SEQ ID NO: 7047 - protein, 9 aa, synthetic construct
PTQATVRVH

SEQ ID NO: 7048 - protein, 9 aa, synthetic construct
PLNGGIHLK

SEQ ID NO: 7049 - protein, 9 aa, synthetic construct
PTQATLRVH

SEQ ID NO: 7050 - protein, 9 aa, synthetic construct
PTQATLKLF

SEQ ID NO: 7051 - protein, 9 aa, synthetic construct
PTQATLKVF

SEQ ID NO: 7052 - protein, 9 aa, synthetic construct
PLNGGIHVR

SEQ ID NO: 7053 - protein, 9 aa, synthetic construct
PTQATAHLY

SEQ ID NO: 7054 - protein, 9 aa, synthetic construct
PTQATAHLR

SEQ ID NO: 7055 - protein, 9 aa, synthetic construct
PTQATAHLK

SEQ ID NO: 7056 - protein, 9 aa, synthetic construct
PLNGGIHVH

SEQ ID NO: 7057 - protein, 9 aa, synthetic construct
PTQATARLF

SEQ ID NO: 7058 - protein, 9 aa, synthetic construct
PLNGGIHVK

SEQ ID NO: 7059 - protein, 9 aa, synthetic construct
PTQATAKVY

SEQ ID NO: 7060 - protein, 9 aa, synthetic construct
PTQATAKVK

SEQ ID NO: 7061 - protein, 9 aa, synthetic construct
PTQATAKVF

SEQ ID NO: 7062 - protein, 9 aa, synthetic construct
PLNGGIHVF

SEQ ID NO: 7063 - protein, 9 aa, synthetic construct
PLNGAVHVH

SEQ ID NO: 7064 - protein, 9 aa, synthetic construct
PTQATIRLY

SEQ ID NO: 7065 - protein, 9 aa, synthetic construct
PTQATIRVY

SEQ ID NO: 7066 - protein, 9 aa, synthetic construct
PTQATGHLY

SEQ ID NO: 7067 - protein, 9 aa, synthetic construct
PTQATGHVY

SEQ ID NO: 7068 - protein, 9 aa, synthetic construct
PTQATGHVH

SEQ ID NO: 7069 - protein, 9 aa, synthetic construct
PTQATGRVH

SEQ ID NO: 7070 - protein, 9 aa, synthetic construct
PTQATGKLH

SEQ ID NO: 7071 - protein, 9 aa, synthetic construct
PTQASVHLR

SEQ ID NO: 7072 - protein, 9 aa, synthetic construct
PTQASVHVF

SEQ ID NO: 7073 - protein, 9 aa, synthetic construct
PLNGGIRVH

SEQ ID NO: 7074 - protein, 9 aa, synthetic construct
PTQASVKLF

SEQ ID NO: 7075 - protein, 9 aa, synthetic construct
PTQASVKVH

SEQ ID NO: 7076 - protein, 9 aa, synthetic construct
PTQASARLF

SEQ ID NO: 7077 - protein, 9 aa, synthetic construct
PTQASARVH

SEQ ID NO: 7078 - protein, 9 aa, synthetic construct
PTQASIKVH

SEQ ID NO: 7079 - protein, 9 aa, synthetic construct
PTQASIKVF

SEQ ID NO: 7080 - protein, 9 aa, synthetic construct
PTQASGHLY

SEQ ID NO: 7081 - protein, 9 aa, synthetic construct
PTQASGRLF

SEQ ID NO: 7082 - protein, 9 aa, synthetic construct
PTQASGRVF

SEQ ID NO: 7083 - protein, 9 aa, synthetic construct
PTQASGKLF

SEQ ID NO: 7084 - protein, 9 aa, synthetic construct
PLNGGGHLR

SEQ ID NO: 7085 - protein, 9 aa, synthetic construct
PTQAVLKVK

SEQ ID NO: 7086 - protein, 9 aa, synthetic construct
PLNGGGHVR

SEQ ID NO: 7087 - protein, 9 aa, synthetic construct
PLNGGGRLY

SEQ ID NO: 7088 - protein, 9 aa, synthetic construct
PTQAVGHVF

SEQ ID NO: 7089 - protein, 9 aa, synthetic construct
PTQAVGKVF

SEQ ID NO: 7090 - protein, 9 aa, synthetic construct
PTQAGVRVH

SEQ ID NO: 7091 - protein, 9 aa, synthetic construct
PTQAGLHVH

SEQ ID NO: 7092 - protein, 9 aa, synthetic construct
PLNGGGRVF

SEQ ID NO: 7093 - protein, 9 aa, synthetic construct
PLNGAARLF

SEQ ID NO: 7094 - protein, 9 aa, synthetic construct
PTQAGAKVF

SEQ ID NO: 7095 - protein, 9 aa, synthetic construct
PLNGGGKLF

SEQ ID NO: 7096 - protein, 9 aa, synthetic construct
PTQAGIHLH

SEQ ID NO: 7097 - protein, 9 aa, synthetic construct
PTQAGIHVK

SEQ ID NO: 7098 - protein, 9 aa, synthetic construct
PLNGGGKVR

SEQ ID NO: 7099 - protein, 9 aa, synthetic construct
PTQAGIKVY

SEQ ID NO: 7100 - protein, 9 aa, synthetic construct
PTQAGGHLY

SEQ ID NO: 7101 - protein, 9 aa, synthetic construct
PTQAGGRVH

SEQ ID NO: 7102 - protein, 9 aa, synthetic construct
PTQAGGRVF

SEQ ID NO: 7103 - protein, 9 aa, synthetic construct
PTQAGGKLY

SEQ ID NO: 7104 - protein, 9 aa, synthetic construct
PTQAGGKLF

SEQ ID NO: 7105 - protein, 9 aa, synthetic construct
PTPGAVHLR

SEQ ID NO: 7106 - protein, 9 aa, synthetic construct
PTPGAVHLK

SEQ ID NO: 7107 - protein, 9 aa, synthetic construct
PTPGAVHVH

SEQ ID NO: 7108 - protein, 9 aa, synthetic construct
PTPGAVHVK

SEQ ID NO: 7109 - protein, 9 aa, synthetic construct
PLNAAVHLR

SEQ ID NO: 7110 - protein, 9 aa, synthetic construct
PTPGAVKVY

SEQ ID NO: 7111 - protein, 9 aa, synthetic construct
PTPGALRVF

SEQ ID NO: 7112 - protein, 9 aa, synthetic construct
PTPGALKLH

SEQ ID NO: 7113 - protein, 9 aa, synthetic construct
PTPGAAHLK

SEQ ID NO: 7114 - protein, 9 aa, synthetic construct
PTPGAAHVH

SEQ ID NO: 7115 - protein, 9 aa, synthetic construct
PLNAAVHVH

SEQ ID NO: 7116 - protein, 9 aa, synthetic construct
PLNAAVHVK

SEQ ID NO: 7117 - protein, 9 aa, synthetic construct
PTPGAAKVH

SEQ ID NO: 7118 - protein, 9 aa, synthetic construct
PTPGAAKVF

SEQ ID NO: 7119 - protein, 9 aa, synthetic construct
PLNAAVHVF

SEQ ID NO: 7120 - protein, 9 aa, synthetic construct
PTPGAIHLK

SEQ ID NO: 7121 - protein, 9 aa, synthetic construct
PTPGAIHVY

SEQ ID NO: 7122 - protein, 9 aa, synthetic construct
PTPGAIHVH

SEQ ID NO: 7123 - protein, 9 aa, synthetic construct
PTPGAIHVK

SEQ ID NO: 7124 - protein, 9 aa, synthetic construct
PLNAAVRLY

SEQ ID NO: 7125 - protein, 9 aa, synthetic construct
PTPGAIRVH

SEQ ID NO: 7126 - protein, 9 aa, synthetic construct
PTPGAIKLH

SEQ ID NO: 7127 - protein, 9 aa, synthetic construct
PTPGAIKVF

SEQ ID NO: 7128 - protein, 9 aa, synthetic construct
PLNAAVRLH

SEQ ID NO: 7129 - protein, 9 aa, synthetic construct
PTPGAGHLH

SEQ ID NO: 7130 - protein, 9 aa, synthetic construct
PTPGAGHVF

SEQ ID NO: 7131 - protein, 9 aa, synthetic construct
PTPGAGKLF

SEQ ID NO: 7132 - protein, 9 aa, synthetic construct
PTPGTVHVY

SEQ ID NO: 7133 - protein, 9 aa, synthetic construct
PTPGTVHVH

SEQ ID NO: 7134 - protein, 9 aa, synthetic construct
PTPGTVRLY

SEQ ID NO: 7135 - protein, 9 aa, synthetic construct
PTPGTVKVY

SEQ ID NO: 7136 - protein, 9 aa, synthetic construct
PTPGTLHVH

SEQ ID NO: 7137 - protein, 9 aa, synthetic construct
PTPGTLRLR

SEQ ID NO: 7138 - protein, 9 aa, synthetic construct
PLNAAVKLY

SEQ ID NO: 7139 - protein, 9 aa, synthetic construct
PTPGTLKLY

SEQ ID NO: 7140 - protein, 9 aa, synthetic construct
PTPGTLKVH

SEQ ID NO: 7141 - protein, 9 aa, synthetic construct
PTPGTAHLY

SEQ ID NO: 7142 - protein, 9 aa, synthetic construct
PTPGTAHVY

SEQ ID NO: 7143 - protein, 9 aa, synthetic construct
PTPGTAHVH

SEQ ID NO: 7144 - protein, 9 aa, synthetic construct
PLNAAVKLH

SEQ ID NO: 7145 - protein, 9 aa, synthetic construct
PTPGTARLF

SEQ ID NO: 7146 - protein, 9 aa, synthetic construct
PTPGTARVF

SEQ ID NO: 7147 - protein, 9 aa, synthetic construct
PTPGTAKLY

SEQ ID NO: 7148 - protein, 9 aa, synthetic construct
PTPGTAKLF

SEQ ID NO: 7149 - protein, 9 aa, synthetic construct
PTPGTAKVY

SEQ ID NO: 7150 - protein, 9 aa, synthetic construct
PTPGTAKVH

SEQ ID NO: 7151 - protein, 9 aa, synthetic construct
PTPGTAKVF

SEQ ID NO: 7152 - protein, 9 aa, synthetic construct
PLNAAVKLF

SEQ ID NO: 7153 - protein, 9 aa, synthetic construct
PTPGTIHLK

SEQ ID NO: 7154 - protein, 9 aa, synthetic construct
PTPGTIHVH

SEQ ID NO: 7155 - protein, 9 aa, synthetic construct
PLNAAVKVY

SEQ ID NO: 7156 - protein, 9 aa, synthetic construct
PTPGTIRVY

SEQ ID NO: 7157 - protein, 9 aa, synthetic construct
PTPGTIRVF

SEQ ID NO: 7158 - protein, 9 aa, synthetic construct
PTPGTIKLH

SEQ ID NO: 7159 - protein, 9 aa, synthetic construct
PLNAAVKVH

SEQ ID NO: 7160 - protein, 9 aa, synthetic construct
PTPGTGHLR

SEQ ID NO: 7161 - protein, 9 aa, synthetic construct
PTPGTGHLH

SEQ ID NO: 7162 - protein, 9 aa, synthetic construct
PTPGTGHLK

SEQ ID NO: 7163 - protein, 9 aa, synthetic construct
PTPGTGHVK

SEQ ID NO: 7164 - protein, 9 aa, synthetic construct
PTPGTGRLY

SEQ ID NO: 7165 - protein, 9 aa, synthetic construct
PTPGTGRVH

SEQ ID NO: 7166 - protein, 9 aa, synthetic construct
PTPGTGRVF

SEQ ID NO: 7167 - protein, 9 aa, synthetic construct
PLNAAVKVF

SEQ ID NO: 7168 - protein, 9 aa, synthetic construct
PTPGTGKLY

SEQ ID NO: 7169 - protein, 9 aa, synthetic construct
PTPGTGKVF

SEQ ID NO: 7170 - protein, 9 aa, synthetic construct
PTPGSVHVY

SEQ ID NO: 7171 - protein, 9 aa, synthetic construct
PTPGSVHVK

SEQ ID NO: 7172 - protein, 9 aa, synthetic construct
PLNAALHLR

SEQ ID NO: 7173 - protein, 9 aa, synthetic construct
PTPGSVRLY

SEQ ID NO: 7174 - protein, 9 aa, synthetic construct
PTPGSVRVY

SEQ ID NO: 7175 - protein, 9 aa, synthetic construct
PTPGSVRVH

SEQ ID NO: 7176 - protein, 9 aa, synthetic construct
PTPGSVKLY

SEQ ID NO: 7177 - protein, 9 aa, synthetic construct
PTPGSVKLF

SEQ ID NO: 7178 - protein, 9 aa, synthetic construct
PTPGSVKVY

SEQ ID NO: 7179 - protein, 9 aa, synthetic construct
PTPGSVKVR

SEQ ID NO: 7180 - protein, 9 aa, synthetic construct
PTPGSVKVH

SEQ ID NO: 7181 - protein, 9 aa, synthetic construct
PTPGSVKVF

SEQ ID NO: 7182 - protein, 9 aa, synthetic construct
PTPGSLKVY

SEQ ID NO: 7183 - protein, 9 aa, synthetic construct
PTPGSAHLY

SEQ ID NO: 7184 - protein, 9 aa, synthetic construct
PTPGSAHLR

SEQ ID NO: 7185 - protein, 9 aa, synthetic construct
PTPGSAHLK

SEQ ID NO: 7186 - protein, 9 aa, synthetic construct
PTPGSAHVK

SEQ ID NO: 7187 - protein, 9 aa, synthetic construct
PTPGSAHVF

SEQ ID NO: 7188 - protein, 9 aa, synthetic construct
PTPGSARLY

SEQ ID NO: 7189 - protein, 9 aa, synthetic construct
PTPGSAKLH

SEQ ID NO: 7190 - protein, 9 aa, synthetic construct
PTPGSAKLF

SEQ ID NO: 7191 - protein, 9 aa, synthetic construct
PTPGSAKVF

SEQ ID NO: 7192 - protein, 9 aa, synthetic construct
PTPGSIHLY

SEQ ID NO: 7193 - protein, 9 aa, synthetic construct
PTPGSIHLR

SEQ ID NO: 7194 - protein, 9 aa, synthetic construct
PTPGSIHLK

SEQ ID NO: 7195 - protein, 9 aa, synthetic construct
PTPGSIHVY

SEQ ID NO: 7196 - protein, 9 aa, synthetic construct
PTPGSIHVH

SEQ ID NO: 7197 - protein, 9 aa, synthetic construct
PTPGSIRVY

SEQ ID NO: 7198 - protein, 9 aa, synthetic construct
PTPGSGHLY

SEQ ID NO: 7199 - protein, 9 aa, synthetic construct
PTPGSGHLH

SEQ ID NO: 7200 - protein, 9 aa, synthetic construct
PTPGSGHVH

SEQ ID NO: 7201 - protein, 9 aa, synthetic construct
PTPGSGRLY

SEQ ID NO: 7202 - protein, 9 aa, synthetic construct
PTPGSGKVF

SEQ ID NO: 7203 - protein, 9 aa, synthetic construct
PTPGVVHVH

SEQ ID NO: 7204 - protein, 9 aa, synthetic construct
PTPGVVRVH

SEQ ID NO: 7205 - protein, 9 aa, synthetic construct
PTPGVVKVK

SEQ ID NO: 7206 - protein, 9 aa, synthetic construct
PTPGVLHLK

SEQ ID NO: 7207 - protein, 9 aa, synthetic construct
PTPGVLRLY

SEQ ID NO: 7208 - protein, 9 aa, synthetic construct
PTPGVLRVH

SEQ ID NO: 7209 - protein, 9 aa, synthetic construct
PLNGAVHVK

SEQ ID NO: 7210 - protein, 9 aa, synthetic construct
PTPGVLKLH

SEQ ID NO: 7211 - protein, 9 aa, synthetic construct
PTPGVLKLF

SEQ ID NO: 7212 - protein, 9 aa, synthetic construct
PTPGVLKVH

SEQ ID NO: 7213 - protein, 9 aa, synthetic construct
PTPGVAHVY

SEQ ID NO: 7214 - protein, 9 aa, synthetic construct
PTPGVAHVH

SEQ ID NO: 7215 - protein, 9 aa, synthetic construct
PLNAALKLH

SEQ ID NO: 7216 - protein, 9 aa, synthetic construct
PTPGVARLY

SEQ ID NO: 7217 - protein, 9 aa, synthetic construct
PTPGVARVF

SEQ ID NO: 7218 - protein, 9 aa, synthetic construct
PTPGVAKLY

SEQ ID NO: 7219 - protein, 9 aa, synthetic construct
PTPGVAKLH

SEQ ID NO: 7220 - protein, 9 aa, synthetic construct
PTPGVAKLF

SEQ ID NO: 7221 - protein, 9 aa, synthetic construct
PTPGVAKVY

SEQ ID NO: 7222 - protein, 9 aa, synthetic construct
PTPGVAKVR

SEQ ID NO: 7223 - protein, 9 aa, synthetic construct
PTPGVAKVH

SEQ ID NO: 7224 - protein, 9 aa, synthetic construct
PTPGVAKVF

SEQ ID NO: 7225 - protein, 9 aa, synthetic construct
PTPGVIHVY

SEQ ID NO: 7226 - protein, 9 aa, synthetic construct
PTPGVIRLF

SEQ ID NO: 7227 - protein, 9 aa, synthetic construct
PTPGVIKVY

SEQ ID NO: 7228 - protein, 9 aa, synthetic construct
PTPGVIKVH

SEQ ID NO: 7229 - protein, 9 aa, synthetic construct
PTPGVIKVK

SEQ ID NO: 7230 - protein, 9 aa, synthetic construct
PTPGVGHLH

SEQ ID NO: 7231 - protein, 9 aa, synthetic construct
PTPGVGRLF

SEQ ID NO: 7232 - protein, 9 aa, synthetic construct
PTPGVGRVY

SEQ ID NO: 7233 - protein, 9 aa, synthetic construct
PTPGVGRVF

SEQ ID NO: 7234 - protein, 9 aa, synthetic construct
PTPGVGKLY

SEQ ID NO: 7235 - protein, 9 aa, synthetic construct
PTPGVGKLH

SEQ ID NO: 7236 - protein, 9 aa, synthetic construct
PTPGVGKLF

SEQ ID NO: 7237 - protein, 9 aa, synthetic construct
PTPGVGKVY

SEQ ID NO: 7238 - protein, 9 aa, synthetic construct
PTPGVGKVH

SEQ ID NO: 7239 - protein, 9 aa, synthetic construct
PTPGVGKVF

SEQ ID NO: 7240 - protein, 9 aa, synthetic construct
PTPGGVHVY

SEQ ID NO: 7241 - protein, 9 aa, synthetic construct
PTPGGVHVR

SEQ ID NO: 7242 - protein, 9 aa, synthetic construct
PTPGGVHVK

SEQ ID NO: 7243 - protein, 9 aa, synthetic construct
PTPGGVHVF

SEQ ID NO: 7244 - protein, 9 aa, synthetic construct
PTPGGVRLY

SEQ ID NO: 7245 - protein, 9 aa, synthetic construct
PTPGGVRVF

SEQ ID NO: 7246 - protein, 9 aa, synthetic construct
PTPGGVKLY

SEQ ID NO: 7247 - protein, 9 aa, synthetic construct
PTPGGVKLF

SEQ ID NO: 7248 - protein, 9 aa, synthetic construct
PTPGGVKVY

SEQ ID NO: 7249 - protein, 9 aa, synthetic construct
PTPGGVKVF

SEQ ID NO: 7250 - protein, 9 aa, synthetic construct
PLNAAAHLK

SEQ ID NO: 7251 - protein, 9 aa, synthetic construct
PTPGGAHLH

SEQ ID NO: 7252 - protein, 9 aa, synthetic construct
PTPGGAHLK

SEQ ID NO: 7253 - protein, 9 aa, synthetic construct
PTPGGAHVH

SEQ ID NO: 7254 - protein, 9 aa, synthetic construct
PTPGGAKLF

SEQ ID NO: 7255 - protein, 9 aa, synthetic construct
PTPGGAKVF

SEQ ID NO: 7256 - protein, 9 aa, synthetic construct
PTPGGIHLY

SEQ ID NO: 7257 - protein, 9 aa, synthetic construct
PTPGGIHLR

SEQ ID NO: 7258 - protein, 9 aa, synthetic construct
PTPGGIHLH

SEQ ID NO: 7259 - protein, 9 aa, synthetic construct
PTPGGIHLK

SEQ ID NO: 7260 - protein, 9 aa, synthetic construct
PTPGGIHVY

SEQ ID NO: 7261 - protein, 9 aa, synthetic construct
PTPGGIHVR

SEQ ID NO: 7262 - protein, 9 aa, synthetic construct
PTPGGIHVH

SEQ ID NO: 7263 - protein, 9 aa, synthetic construct
PTPGGIHVK

SEQ ID NO: 7264 - protein, 9 aa, synthetic construct
PTPGGIHVF

SEQ ID NO: 7265 - protein, 9 aa, synthetic construct
PTPGGIRVY

SEQ ID NO: 7266 - protein, 9 aa, synthetic construct
PTPGGIKLH

SEQ ID NO: 7267 - protein, 9 aa, synthetic construct
PTPGGIKVR

SEQ ID NO: 7268 - protein, 9 aa, synthetic construct
PTPGGIKVH

SEQ ID NO: 7269 - protein, 9 aa, synthetic construct
PTPGGGHLY

SEQ ID NO: 7270 - protein, 9 aa, synthetic construct
PTPGGGHLR

SEQ ID NO: 7271 - protein, 9 aa, synthetic construct
PTPGGGHVF

SEQ ID NO: 7272 - protein, 9 aa, synthetic construct
PTPGGGRLY

SEQ ID NO: 7273 - protein, 9 aa, synthetic construct
PTPGGGRLF

SEQ ID NO: 7274 - protein, 9 aa, synthetic construct
PTPGGGKLY

SEQ ID NO: 7275 - protein, 9 aa, synthetic construct
PTPGGGKLF

SEQ ID NO: 7276 - protein, 9 aa, synthetic construct
PTPGGGKVH

SEQ ID NO: 7277 - protein, 9 aa, synthetic construct
PTPGGGKVF

SEQ ID NO: 7278 - protein, 9 aa, synthetic construct
PTPAAVHVH

SEQ ID NO: 7279 - protein, 9 aa, synthetic construct
PTPAAVRLY

SEQ ID NO: 7280 - protein, 9 aa, synthetic construct
PTPAAVRLF

SEQ ID NO: 7281 - protein, 9 aa, synthetic construct
PTPAAVRVH

SEQ ID NO: 7282 - protein, 9 aa, synthetic construct
PTPAAVRVF

SEQ ID NO: 7283 - protein, 9 aa, synthetic construct
PTPAAVKLY

SEQ ID NO: 7284 - protein, 9 aa, synthetic construct
PTPAAVKLH

SEQ ID NO: 7285 - protein, 9 aa, synthetic construct
PTPAAVKLF

SEQ ID NO: 7286 - protein, 9 aa, synthetic construct
PTPAAVKVY

SEQ ID NO: 7287 - protein, 9 aa, synthetic construct
PTPAALRLY

SEQ ID NO: 7288 - protein, 9 aa, synthetic construct
PTPAALRLR

SEQ ID NO: 7289 - protein, 9 aa, synthetic construct
PTPAALRLF

SEQ ID NO: 7290 - protein, 9 aa, synthetic construct
PTPAALRVY

SEQ ID NO: 7291 - protein, 9 aa, synthetic construct
PTPAALRVH

SEQ ID NO: 7292 - protein, 9 aa, synthetic construct
PTPAALRVF

SEQ ID NO: 7293 - protein, 9 aa, synthetic construct
PLNAAAKLY

SEQ ID NO: 7294 - protein, 9 aa, synthetic construct
PTPAALKLH

SEQ ID NO: 7295 - protein, 9 aa, synthetic construct
PTPAALKLF

SEQ ID NO: 7296 - protein, 9 aa, synthetic construct
PTPAALKVF

SEQ ID NO: 7297 - protein, 9 aa, synthetic construct
PTPAAAHLY

SEQ ID NO: 7298 - protein, 9 aa, synthetic construct
PTPAAAHLH

SEQ ID NO: 7299 - protein, 9 aa, synthetic construct
PTPAAAHLK

SEQ ID NO: 7300 - protein, 9 aa, synthetic construct
PTPAAAHVH

SEQ ID NO: 7301 - protein, 9 aa, synthetic construct
PTPAAARVY

SEQ ID NO: 7302 - protein, 9 aa, synthetic construct
PTPAAAKLY

SEQ ID NO: 7303 - protein, 9 aa, synthetic construct
PTPAAAKLF

SEQ ID NO: 7304 - protein, 9 aa, synthetic construct
PTPAAAKVF

SEQ ID NO: 7305 - protein, 9 aa, synthetic construct
PTPAAIHLK

SEQ ID NO: 7306 - protein, 9 aa, synthetic construct
PTPAAIHVY

SEQ ID NO: 7307 - protein, 9 aa, synthetic construct
PTPAAIHVR

SEQ ID NO: 7308 - protein, 9 aa, synthetic construct
PTPAAIHVH

SEQ ID NO: 7309 - protein, 9 aa, synthetic construct
PTPAAIHVK

SEQ ID NO: 7310 - protein, 9 aa, synthetic construct
PTPAAIHVF

SEQ ID NO: 7311 - protein, 9 aa, synthetic construct
PTPAAIRVY

SEQ ID NO: 7312 - protein, 9 aa, synthetic construct
PTPAAGHLY

SEQ ID NO: 7313 - protein, 9 aa, synthetic construct
PTPAAGHLH

SEQ ID NO: 7314 - protein, 9 aa, synthetic construct
PTPAAGHLK

SEQ ID NO: 7315 - protein, 9 aa, synthetic construct
PTPAAGHLF

SEQ ID NO: 7316 - protein, 9 aa, synthetic construct
PTPAAGHVY

SEQ ID NO: 7317 - protein, 9 aa, synthetic construct
PTPAAGHVH

SEQ ID NO: 7318 - protein, 9 aa, synthetic construct
PTPAAGHVK

SEQ ID NO: 7319 - protein, 9 aa, synthetic construct
PTPAAGHVF

SEQ ID NO: 7320 - protein, 9 aa, synthetic construct
PTPAAGRLF

SEQ ID NO: 7321 - protein, 9 aa, synthetic construct
PTPAAGRVY

SEQ ID NO: 7322 - protein, 9 aa, synthetic construct
PTPAAGRVF

SEQ ID NO: 7323 - protein, 9 aa, synthetic construct
PLNAAAKVF

SEQ ID NO: 7324 - protein, 9 aa, synthetic construct
PTPAAGKLY

SEQ ID NO: 7325 - protein, 9 aa, synthetic construct
PTPAAGKLF

SEQ ID NO: 7326 - protein, 9 aa, synthetic construct
PLNGAAKLF

SEQ ID NO: 7327 - protein, 9 aa, synthetic construct
PTPATVHLH

SEQ ID NO: 7328 - protein, 9 aa, synthetic construct
PTPATVHVY

SEQ ID NO: 7329 - protein, 9 aa, synthetic construct
PTPATVRLR

SEQ ID NO: 7330 - protein, 9 aa, synthetic construct
PTPATVRVH

SEQ ID NO: 7331 - protein, 9 aa, synthetic construct
PTPATVKLH

SEQ ID NO: 7332 - protein, 9 aa, synthetic construct
PTPATVKLF

SEQ ID NO: 7333 - protein, 9 aa, synthetic construct
PTPATLHLR

SEQ ID NO: 7334 - protein, 9 aa, synthetic construct
PTPATLRLY

SEQ ID NO: 7335 - protein, 9 aa, synthetic construct
PTPATLRLR

SEQ ID NO: 7336 - protein, 9 aa, synthetic construct
PTPATLRLH

SEQ ID NO: 7337 - protein, 9 aa, synthetic construct
PTPATLRLK

SEQ ID NO: 7338 - protein, 9 aa, synthetic construct
PTPATLRVR

SEQ ID NO: 7339 - protein, 9 aa, synthetic construct
PTPATLRVF

SEQ ID NO: 7340 - protein, 9 aa, synthetic construct
PTPATLKLR

SEQ ID NO: 7341 - protein, 9 aa, synthetic construct
PTPATLKVH

SEQ ID NO: 7342 - protein, 9 aa, synthetic construct
PLNAAIHVR

SEQ ID NO: 7343 - protein, 9 aa, synthetic construct
PTPATAHLK

SEQ ID NO: 7344 - protein, 9 aa, synthetic construct
PTPATAHVH

SEQ ID NO: 7345 - protein, 9 aa, synthetic construct
PTPATAHVK

SEQ ID NO: 7346 - protein, 9 aa, synthetic construct
PTPATARLF

SEQ ID NO: 7347 - protein, 9 aa, synthetic construct
PLNAAIHVK

SEQ ID NO: 7348 - protein, 9 aa, synthetic construct
PTPATAKLY

SEQ ID NO: 7349 - protein, 9 aa, synthetic construct
PTPATAKLH

SEQ ID NO: 7350 - protein, 9 aa, synthetic construct
PTPATAKVH

SEQ ID NO: 7351 - protein, 9 aa, synthetic construct
PTPATAKVF

SEQ ID NO: 7352 - protein, 9 aa, synthetic construct
PTPATIHLK

SEQ ID NO: 7353 - protein, 9 aa, synthetic construct
PTPATIRVY

SEQ ID NO: 7354 - protein, 9 aa, synthetic construct
PTPATIRVR

SEQ ID NO: 7355 - protein, 9 aa, synthetic construct
PTPATIRVF

SEQ ID NO: 7356 - protein, 9 aa, synthetic construct
PLNAAIRLR

SEQ ID NO: 7357 - protein, 9 aa, synthetic construct
PTPATIKVR

SEQ ID NO: 7358 - protein, 9 aa, synthetic construct
PTPATGHLH

SEQ ID NO: 7359 - protein, 9 aa, synthetic construct
PTPATGHVH

SEQ ID NO: 7360 - protein, 9 aa, synthetic construct
PTPATGHVK

SEQ ID NO: 7361 - protein, 9 aa, synthetic construct
PTPATGRVY

SEQ ID NO: 7362 - protein, 9 aa, synthetic construct
PTPATGRVF

SEQ ID NO: 7363 - protein, 9 aa, synthetic construct
PTPATGKLY

SEQ ID NO: 7364 - protein, 9 aa, synthetic construct
PTPATGKLH

SEQ ID NO: 7365 - protein, 9 aa, synthetic construct
PTPASVHLK

SEQ ID NO: 7366 - protein, 9 aa, synthetic construct
PTPASVHVK

SEQ ID NO: 7367 - protein, 9 aa, synthetic construct
PTPASVHVF

SEQ ID NO: 7368 - protein, 9 aa, synthetic construct
PTPASVRLF

SEQ ID NO: 7369 - protein, 9 aa, synthetic construct
PTPASVKLY

SEQ ID NO: 7370 - protein, 9 aa, synthetic construct
PTPASVKLH

SEQ ID NO: 7371 - protein, 9 aa, synthetic construct
PTPASVKLF

SEQ ID NO: 7372 - protein, 9 aa, synthetic construct
PTPASVKVY

SEQ ID NO: 7373 - protein, 9 aa, synthetic construct
PTPASVKVH

SEQ ID NO: 7374 - protein, 9 aa, synthetic construct
PTPASVKVF

SEQ ID NO: 7375 - protein, 9 aa, synthetic construct
PTPASLKLF

SEQ ID NO: 7376 - protein, 9 aa, synthetic construct
PTPASAHLK

SEQ ID NO: 7377 - protein, 9 aa, synthetic construct
PTPASAHVH

SEQ ID NO: 7378 - protein, 9 aa, synthetic construct
PTPASAHVF

SEQ ID NO: 7379 - protein, 9 aa, synthetic construct
PTPASARLY

SEQ ID NO: 7380 - protein, 9 aa, synthetic construct
PTPASARVY

SEQ ID NO: 7381 - protein, 9 aa, synthetic construct
PTPASARVH

SEQ ID NO: 7382 - protein, 9 aa, synthetic construct
PTPASIRLF

SEQ ID NO: 7383 - protein, 9 aa, synthetic construct
PTPASIRVY

SEQ ID NO: 7384 - protein, 9 aa, synthetic construct
PTPASGHLY

SEQ ID NO: 7385 - protein, 9 aa, synthetic construct
PTPASGHLF

SEQ ID NO: 7386 - protein, 9 aa, synthetic construct
PTPASGRLF

SEQ ID NO: 7387 - protein, 9 aa, synthetic construct
PTPASGRVH

SEQ ID NO: 7388 - protein, 9 aa, synthetic construct
PTPASGRVF

SEQ ID NO: 7389 - protein, 9 aa, synthetic construct
PTPASGKLY

SEQ ID NO: 7390 - protein, 9 aa, synthetic construct
PTPASGKLF

SEQ ID NO: 7391 - protein, 9 aa, synthetic construct
PTPASGKVF

SEQ ID NO: 7392 - protein, 9 aa, synthetic construct
PLNAAGHLH

SEQ ID NO: 7393 - protein, 9 aa, synthetic construct
PTPAVVKVK

SEQ ID NO: 7394 - protein, 9 aa, synthetic construct
PTPAVLKLH

SEQ ID NO: 7395 - protein, 9 aa, synthetic construct
PLNAAGHVR

SEQ ID NO: 7396 - protein, 9 aa, synthetic construct
PTPAVAHVH

SEQ ID NO: 7397 - protein, 9 aa, synthetic construct
PTPAVARVF

SEQ ID NO: 7398 - protein, 9 aa, synthetic construct
PTPAVAKLY

SEQ ID NO: 7399 - protein, 9 aa, synthetic construct
PTPAVAKLF

SEQ ID NO: 7400 - protein, 9 aa, synthetic construct
PLNAAGHVF

SEQ ID NO: 7401 - protein, 9 aa, synthetic construct
PTPAVIKVH

SEQ ID NO: 7402 - protein, 9 aa, synthetic construct
PTPAVGRVF

SEQ ID NO: 7403 - protein, 9 aa, synthetic construct
PTPAVGKLH

SEQ ID NO: 7404 - protein, 9 aa, synthetic construct
PTPAVGKVY

SEQ ID NO: 7405 - protein, 9 aa, synthetic construct
PTPAVGKVH

SEQ ID NO: 7406 - protein, 9 aa, synthetic construct
PTPAGVHVK

SEQ ID NO: 7407 - protein, 9 aa, synthetic construct
PTPAGVRLY

SEQ ID NO: 7408 - protein, 9 aa, synthetic construct
PLNAAGRVH

SEQ ID NO: 7409 - protein, 9 aa, synthetic construct
PTPAGVKLY

SEQ ID NO: 7410 - protein, 9 aa, synthetic construct
PTPAGVKLF

SEQ ID NO: 7411 - protein, 9 aa, synthetic construct
PLNAAGRVF

SEQ ID NO: 7412 - protein, 9 aa, synthetic construct
PTPAGLRVF

SEQ ID NO: 7413 - protein, 9 aa, synthetic construct
PLNGAAKVF

SEQ ID NO: 7414 - protein, 9 aa, synthetic construct
PLNAAGKLY

SEQ ID NO: 7415 - protein, 9 aa, synthetic construct
PTPAGLKVF

SEQ ID NO: 7416 - protein, 9 aa, synthetic construct
PTPAGAHLY

SEQ ID NO: 7417 - protein, 9 aa, synthetic construct
PTPAGAHLH

SEQ ID NO: 7418 - protein, 9 aa, synthetic construct
PTPAGAHLK

SEQ ID NO: 7419 - protein, 9 aa, synthetic construct
PTPAGAHVH

SEQ ID NO: 7420 - protein, 9 aa, synthetic construct
PTPAGAHVK

SEQ ID NO: 7421 - protein, 9 aa, synthetic construct
PTPAGAHVF

SEQ ID NO: 7422 - protein, 9 aa, synthetic construct
PTPAGARLF

SEQ ID NO: 7423 - protein, 9 aa, synthetic construct
PTPAGARVH

SEQ ID NO: 7424 - protein, 9 aa, synthetic construct
PTPAGARVF

SEQ ID NO: 7425 - protein, 9 aa, synthetic construct
PTPAGAKLF

SEQ ID NO: 7426 - protein, 9 aa, synthetic construct
PTPAGAKVF

SEQ ID NO: 7427 - protein, 9 aa, synthetic construct
PTPAGIHVH

SEQ ID NO: 7428 - protein, 9 aa, synthetic construct
PTPAGIHVK

SEQ ID NO: 7429 - protein, 9 aa, synthetic construct
PTPAGIKVR

SEQ ID NO: 7430 - protein, 9 aa, synthetic construct
PTPAGIKVF

SEQ ID NO: 7431 - protein, 9 aa, synthetic construct
PLNAAGKVH

SEQ ID NO: 7432 - protein, 9 aa, synthetic construct
PTPAGGHLY

SEQ ID NO: 7433 - protein, 9 aa, synthetic construct
PTPAGGHLR

SEQ ID NO: 7434 - protein, 9 aa, synthetic construct
PTPAGGHLH

SEQ ID NO: 7435 - protein, 9 aa, synthetic construct
PTPAGGHLK

SEQ ID NO: 7436 - protein, 9 aa, synthetic construct
PTPAGGHLF

SEQ ID NO: 7437 - protein, 9 aa, synthetic construct
PTPAGGHVY

SEQ ID NO: 7438 - protein, 9 aa, synthetic construct
PTPAGGHVR

SEQ ID NO: 7439 - protein, 9 aa, synthetic construct
PTPAGGHVH

SEQ ID NO: 7440 - protein, 9 aa, synthetic construct
PTPAGGHVK

SEQ ID NO: 7441 - protein, 9 aa, synthetic construct
PTPAGGHVF

SEQ ID NO: 7442 - protein, 9 aa, synthetic construct
PTPAGGRLY

SEQ ID NO: 7443 - protein, 9 aa, synthetic construct
PTPAGGRLH

SEQ ID NO: 7444 - protein, 9 aa, synthetic construct
PTPAGGRLF

SEQ ID NO: 7445 - protein, 9 aa, synthetic construct
PTPAGGRVF

SEQ ID NO: 7446 - protein, 9 aa, synthetic construct
PTPAGGKLY

SEQ ID NO: 7447 - protein, 9 aa, synthetic construct
PTPAGGKLF

SEQ ID NO: 7448 - protein, 9 aa, synthetic construct
PTPAGGKVF

SEQ ID NO: 7449 - protein, 9 aa, synthetic construct
PLNGAVHVF

SEQ ID NO: 7450 - protein, 9 aa, synthetic construct
PLNGAIHLY

SEQ ID NO: 7451 - protein, 9 aa, synthetic construct
PLNATVHVY

SEQ ID NO: 7452 - protein, 9 aa, synthetic construct
PLNATVHVH

SEQ ID NO: 7453 - protein, 9 aa, synthetic construct
PSNGAARVF

SEQ ID NO: 7454 - protein, 9 aa, synthetic construct
PLNATVHVK

SEQ ID NO: 7455 - protein, 9 aa, synthetic construct
PSNGAAKLY

SEQ ID NO: 7456 - protein, 9 aa, synthetic construct
PSNGAIHLK

SEQ ID NO: 7457 - protein, 9 aa, synthetic construct
PSNGAIHVR

SEQ ID NO: 7458 - protein, 9 aa, synthetic construct
PSNGAIHVK

SEQ ID NO: 7459 - protein, 9 aa, synthetic construct
PLNGAIHLR

SEQ ID NO: 7460 - protein, 9 aa, synthetic construct
PSNGAIKLH

SEQ ID NO: 7461 - protein, 9 aa, synthetic construct
PSNGAGHLH

SEQ ID NO: 7462 - protein, 9 aa, synthetic construct
PSNGAGHLF

SEQ ID NO: 7463 - protein, 9 aa, synthetic construct
PSNGAGHVK

SEQ ID NO: 7464 - protein, 9 aa, synthetic construct
PSNGAGHVF

SEQ ID NO: 7465 - protein, 9 aa, synthetic construct
PSNGAGRLF

SEQ ID NO: 7466 - protein, 9 aa, synthetic construct
PSNGAGKVH

SEQ ID NO: 7467 - protein, 9 aa, synthetic construct
PSNGTVHLY

SEQ ID NO: 7468 - protein, 9 aa, synthetic construct
PSNGTVHVY

SEQ ID NO: 7469 - protein, 9 aa, synthetic construct
PSNGTVHVH

SEQ ID NO: 7470 - protein, 9 aa, synthetic construct
PSNGTVHVF

SEQ ID NO: 7471 - protein, 9 aa, synthetic construct
PSNGTVRLY

SEQ ID NO: 7472 - protein, 9 aa, synthetic construct
PSNGTVKVR

SEQ ID NO: 7473 - protein, 9 aa, synthetic construct
PSNGTLHVY

SEQ ID NO: 7474 - protein, 9 aa, synthetic construct
PLNGAIHLH

SEQ ID NO: 7475 - protein, 9 aa, synthetic construct
PSNGTLKLY

SEQ ID NO: 7476 - protein, 9 aa, synthetic construct
PSNGTLKVY

SEQ ID NO: 7477 - protein, 9 aa, synthetic construct
PSNGTLKVH

SEQ ID NO: 7478 - protein, 9 aa, synthetic construct
PSNGTAHLY

SEQ ID NO: 7479 - protein, 9 aa, synthetic construct
PSNGTAHLH

SEQ ID NO: 7480 - protein, 9 aa, synthetic construct
PSNGTAHVY

SEQ ID NO: 7481 - protein, 9 aa, synthetic construct
PSNGTAHVR

SEQ ID NO: 7482 - protein, 9 aa, synthetic construct
PSNGTAHVK

SEQ ID NO: 7483 - protein, 9 aa, synthetic construct
PLNATVKLH

SEQ ID NO: 7484 - protein, 9 aa, synthetic construct
PSNGTARLF

SEQ ID NO: 7485 - protein, 9 aa, synthetic construct
PSNGTARVF

SEQ ID NO: 7486 - protein, 9 aa, synthetic construct
PSNGTAKLY

SEQ ID NO: 7487 - protein, 9 aa, synthetic construct
PSNGTAKVF

SEQ ID NO: 7488 - protein, 9 aa, synthetic construct
PSNGTIHLY

SEQ ID NO: 7489 - protein, 9 aa, synthetic construct
PSNGTIHLR

SEQ ID NO: 7490 - protein, 9 aa, synthetic construct
PSNGTIHLK

SEQ ID NO: 7491 - protein, 9 aa, synthetic construct
PSNGTIHVY

SEQ ID NO: 7492 - protein, 9 aa, synthetic construct
PSNGTIHVR

SEQ ID NO: 7493 - protein, 9 aa, synthetic construct
PSNGTIHVH

SEQ ID NO: 7494 - protein, 9 aa, synthetic construct
PSNGTIHVK

SEQ ID NO: 7495 - protein, 9 aa, synthetic construct
PSNGTIHVF

SEQ ID NO: 7496 - protein, 9 aa, synthetic construct
PSNGTIRLH

SEQ ID NO: 7497 - protein, 9 aa, synthetic construct
PSNGTIKLH

SEQ ID NO: 7498 - protein, 9 aa, synthetic construct
PSNGTGHLY

SEQ ID NO: 7499 - protein, 9 aa, synthetic construct
PSNGTGHLH

SEQ ID NO: 7500 - protein, 9 aa, synthetic construct
PSNGTGHLK

SEQ ID NO: 7501 - protein, 9 aa, synthetic construct
PSNGTGHLF

SEQ ID NO: 7502 - protein, 9 aa, synthetic construct
PSNGTGHVY

SEQ ID NO: 7503 - protein, 9 aa, synthetic construct
PSNGTGHVR

SEQ ID NO: 7504 - protein, 9 aa, synthetic construct
PSNGTGHVH

SEQ ID NO: 7505 - protein, 9 aa, synthetic construct
PSNGTGHVK

SEQ ID NO: 7506 - protein, 9 aa, synthetic construct
PSNGTGRLF

SEQ ID NO: 7507 - protein, 9 aa, synthetic construct
PSNGTGRVF

SEQ ID NO: 7508 - protein, 9 aa, synthetic construct
PSNGTGKLY

SEQ ID NO: 7509 - protein, 9 aa, synthetic construct
PSNGTGKVF

SEQ ID NO: 7510 - protein, 9 aa, synthetic construct
PLNGAIHLK

SEQ ID NO: 7511 - protein, 9 aa, synthetic construct
PSNGSVHLK

SEQ ID NO: 7512 - protein, 9 aa, synthetic construct
PSNGSVKLF

SEQ ID NO: 7513 - protein, 9 aa, synthetic construct
PSNGSVKVY

SEQ ID NO: 7514 - protein, 9 aa, synthetic construct
PSNGSLHVR

SEQ ID NO: 7515 - protein, 9 aa, synthetic construct
PSNGSAHLY

SEQ ID NO: 7516 - protein, 9 aa, synthetic construct
PSNGSARLY

SEQ ID NO: 7517 - protein, 9 aa, synthetic construct
PSNGSIHLR

SEQ ID NO: 7518 - protein, 9 aa, synthetic construct
PSNGSIHVY

SEQ ID NO: 7519 - protein, 9 aa, synthetic construct
PSNGSIHVK

SEQ ID NO: 7520 - protein, 9 aa, synthetic construct
PSNGSIKLF

SEQ ID NO: 7521 - protein, 9 aa, synthetic construct
PSNGSIKVH

SEQ ID NO: 7522 - protein, 9 aa, synthetic construct
PSNGSGHLH

SEQ ID NO: 7523 - protein, 9 aa, synthetic construct
PSNGSGRLY

SEQ ID NO: 7524 - protein, 9 aa, synthetic construct
PSNGVVHVH

SEQ ID NO: 7525 - protein, 9 aa, synthetic construct
PLNGAIHVY

SEQ ID NO: 7526 - protein, 9 aa, synthetic construct
PSNGVAHLR

SEQ ID NO: 7527 - protein, 9 aa, synthetic construct
PSNGVAHLH

SEQ ID NO: 7528 - protein, 9 aa, synthetic construct
PSNGVAHVY

SEQ ID NO: 7529 - protein, 9 aa, synthetic construct
PSNGVAKVY

SEQ ID NO: 7530 - protein, 9 aa, synthetic construct
PSNGVIHLK

SEQ ID NO: 7531 - protein, 9 aa, synthetic construct
PSNGVIHVY

SEQ ID NO: 7532 - protein, 9 aa, synthetic construct
PSNGVIHVK

SEQ ID NO: 7533 - protein, 9 aa, synthetic construct
PSNGVIKLH

SEQ ID NO: 7534 - protein, 9 aa, synthetic construct
PSNGVIKVK

SEQ ID NO: 7535 - protein, 9 aa, synthetic construct
PSNGVGHVY

SEQ ID NO: 7536 - protein, 9 aa, synthetic construct
PSNGVGRLH

SEQ ID NO: 7537 - protein, 9 aa, synthetic construct
PSNGVGRVY

SEQ ID NO: 7538 - protein, 9 aa, synthetic construct
PSNGVGKLH

SEQ ID NO: 7539 - protein, 9 aa, synthetic construct
PSNGVGKVF

SEQ ID NO: 7540 - protein, 9 aa, synthetic construct
PLNGAIHVR

SEQ ID NO: 7541 - protein, 9 aa, synthetic construct
PLNATAHLY

SEQ ID NO: 7542 - protein, 9 aa, synthetic construct
PSNGGVHVK

SEQ ID NO: 7543 - protein, 9 aa, synthetic construct
PLNATAHLR

SEQ ID NO: 7544 - protein, 9 aa, synthetic construct
PSNGGVRVF

SEQ ID NO: 7545 - protein, 9 aa, synthetic construct
PLNATAHLH

SEQ ID NO: 7546 - protein, 9 aa, synthetic construct
PSNGGVKLY

SEQ ID NO: 7547 - protein, 9 aa, synthetic construct
PSNGGVKLF

SEQ ID NO: 7548 - protein, 9 aa, synthetic construct
PSNGGVKVY

SEQ ID NO: 7549 - protein, 9 aa, synthetic construct
PLNATAHLK

SEQ ID NO: 7550 - protein, 9 aa, synthetic construct
PLNATAHVR

SEQ ID NO: 7551 - protein, 9 aa, synthetic construct
PLNATAHVH

SEQ ID NO: 7552 - protein, 9 aa, synthetic construct
PLNATAHVK

SEQ ID NO: 7553 - protein, 9 aa, synthetic construct
PLNATAHVF

SEQ ID NO: 7554 - protein, 9 aa, synthetic construct
PSNGGIHVH

SEQ ID NO: 7555 - protein, 9 aa, synthetic construct
PSNGGIHVK

SEQ ID NO: 7556 - protein, 9 aa, synthetic construct
PLNGAIHVH

SEQ ID NO: 7557 - protein, 9 aa, synthetic construct
PSNGGIKLY

SEQ ID NO: 7558 - protein, 9 aa, synthetic construct
PSNGGIKLF

SEQ ID NO: 7559 - protein, 9 aa, synthetic construct
PSNGGIKVR

SEQ ID NO: 7560 - protein, 9 aa, synthetic construct
PSNGGGHVK

SEQ ID NO: 7561 - protein, 9 aa, synthetic construct
PSNAAVHVH

SEQ ID NO: 7562 - protein, 9 aa, synthetic construct
PSNAAVRLY

SEQ ID NO: 7563 - protein, 9 aa, synthetic construct
PSNAAVRLH

SEQ ID NO: 7564 - protein, 9 aa, synthetic construct
PSNAAVKLH

SEQ ID NO: 7565 - protein, 9 aa, synthetic construct
PSNAAVKVY

SEQ ID NO: 7566 - protein, 9 aa, synthetic construct
PSNAALHLR

SEQ ID NO: 7567 - protein, 9 aa, synthetic construct
PSNAALHVK

SEQ ID NO: 7568 - protein, 9 aa, synthetic construct
PSNAALRVF

SEQ ID NO: 7569 - protein, 9 aa, synthetic construct
PLNGAIHVK

SEQ ID NO: 7570 - protein, 9 aa, synthetic construct
PLNATAKLY

SEQ ID NO: 7571 - protein, 9 aa, synthetic construct
PSNAAARVF

SEQ ID NO: 7572 - protein, 9 aa, synthetic construct
PSNAAAKVF

SEQ ID NO: 7573 - protein, 9 aa, synthetic construct
PSNAAIHVR

SEQ ID NO: 7574 - protein, 9 aa, synthetic construct
PSNAAIHVH

SEQ ID NO: 7575 - protein, 9 aa, synthetic construct
PSNAAIHVF

SEQ ID NO: 7576 - protein, 9 aa, synthetic construct
PSNAAIRVY

SEQ ID NO: 7577 - protein, 9 aa, synthetic construct
PSNAAGHVK

SEQ ID NO: 7578 - protein, 9 aa, synthetic construct
PSNAAGHVF

SEQ ID NO: 7579 - protein, 9 aa, synthetic construct
PSNAAGKVF

SEQ ID NO: 7580 - protein, 9 aa, synthetic construct
PLNGAIHVF

SEQ ID NO: 7581 - protein, 9 aa, synthetic construct
PSNATVHVH

SEQ ID NO: 7582 - protein, 9 aa, synthetic construct
PSNATVKLY

SEQ ID NO: 7583 - protein, 9 aa, synthetic construct
PSNATLRVY

SEQ ID NO: 7584 - protein, 9 aa, synthetic construct
PSNATLRVF

SEQ ID NO: 7585 - protein, 9 aa, synthetic construct
PSNATLKLF

SEQ ID NO: 7586 - protein, 9 aa, synthetic construct
PLNATIHVR

SEQ ID NO: 7587 - protein, 9 aa, synthetic construct
PSNATAHLK

SEQ ID NO: 7588 - protein, 9 aa, synthetic construct
PSNATAHVY

SEQ ID NO: 7589 - protein, 9 aa, synthetic construct
PSNATAHVH

SEQ ID NO: 7590 - protein, 9 aa, synthetic construct
PLNATIHVH

SEQ ID NO: 7591 - protein, 9 aa, synthetic construct
PLNATIHVK

SEQ ID NO: 7592 - protein, 9 aa, synthetic construct
PSNATAKLY

SEQ ID NO: 7593 - protein, 9 aa, synthetic construct
PSNATAKVF

SEQ ID NO: 7594 - protein, 9 aa, synthetic construct
PSNATIHVY

SEQ ID NO: 7595 - protein, 9 aa, synthetic construct
PSNATIHVR

SEQ ID NO: 7596 - protein, 9 aa, synthetic construct
PSNATIHVH

SEQ ID NO: 7597 - protein, 9 aa, synthetic construct
PSNATIHVK

SEQ ID NO: 7598 - skipped

SEQ ID NO: 7599 - protein, 9 aa, synthetic construct
PLNGAVHLY

SEQ ID NO: 7600 - protein, 9 aa, synthetic construct
PLNGAVHLR

SEQ ID NO: 7601 - protein, 9 aa, synthetic construct
PSNATGHLY

SEQ ID NO: 7602 - protein, 9 aa, synthetic construct
PSNATGHLF

SEQ ID NO: 7603 - protein, 9 aa, synthetic construct
PSNATGRVR

SEQ ID NO: 7604 - protein, 9 aa, synthetic construct
PSNASLHVR

SEQ ID NO: 7605 - protein, 9 aa, synthetic construct
PSNASAHLY

SEQ ID NO: 7606 - protein, 9 aa, synthetic construct
PSNASAKLY

SEQ ID NO: 7607 - protein, 9 aa, synthetic construct
PSNASIKLY

SEQ ID NO: 7608 - protein, 9 aa, synthetic construct
PSNASIKLH

SEQ ID NO: 7609 - protein, 9 aa, synthetic construct
PSNASGHLR

SEQ ID NO: 7610 - protein, 9 aa, synthetic construct
PSNASGHLH

SEQ ID NO: 7611 - protein, 9 aa, synthetic construct
PSNASGHLF

SEQ ID NO: 7612 - protein, 9 aa, synthetic construct
PSNASGHVY

SEQ ID NO: 7613 - protein, 9 aa, synthetic construct
PSNASGHVH

SEQ ID NO: 7614 - protein, 9 aa, synthetic construct
PSNASGHVF

SEQ ID NO: 7615 - protein, 9 aa, synthetic construct
PSNAVVHLH

SEQ ID NO: 7616 - protein, 9 aa, synthetic construct
PLNATGHLH

SEQ ID NO: 7617 - protein, 9 aa, synthetic construct
PSNAVAHLR

SEQ ID NO: 7618 - protein, 9 aa, synthetic construct
PSNAVAHLH

SEQ ID NO: 7619 - protein, 9 aa, synthetic construct
PSNAVAHVH

SEQ ID NO: 7620 - protein, 9 aa, synthetic construct
PSNAVARLH

SEQ ID NO: 7621 - protein, 9 aa, synthetic construct
PSNAVAKLR

SEQ ID NO: 7622 - protein, 9 aa, synthetic construct
PSNAVAKLK

SEQ ID NO: 7623 - protein, 9 aa, synthetic construct
PSNAVAKLF

SEQ ID NO: 7624 - protein, 9 aa, synthetic construct
PSNAVAKVH

SEQ ID NO: 7625 - protein, 9 aa, synthetic construct
PSNAVAKVF

SEQ ID NO: 7626 - protein, 9 aa, synthetic construct
PLNATGRLY

SEQ ID NO: 7627 - protein, 9 aa, synthetic construct
PSNAVIKLH

SEQ ID NO: 7628 - protein, 9 aa, synthetic construct
PSNAVGHVY

SEQ ID NO: 7629 - protein, 9 aa, synthetic construct
PSNAVGHVH

SEQ ID NO: 7630 - protein, 9 aa, synthetic construct
PSNAVGKLH

SEQ ID NO: 7631 - protein, 9 aa, synthetic construct
PSNAVGKLF

SEQ ID NO: 7632 - protein, 9 aa, synthetic construct
PSNAGARVF

SEQ ID NO: 7633 - protein, 9 aa, synthetic construct
PSNAGAKLY

SEQ ID NO: 7634 - protein, 9 aa, synthetic construct
PSNAGIHLY

SEQ ID NO: 7635 - protein, 9 aa, synthetic construct
PSNAGIHVH

SEQ ID NO: 7636 - protein, 9 aa, synthetic construct
PSNAGIRLY

SEQ ID NO: 7637 - protein, 9 aa, synthetic construct
PSNAGIRLF

SEQ ID NO: 7638 - protein, 9 aa, synthetic construct
PSNAGIKLH

SEQ ID NO: 7639 - protein, 9 aa, synthetic construct
PSQGSVHLR

SEQ ID NO: 7640 - protein, 9 aa, synthetic construct
PSQGSLHLH

SEQ ID NO: 7641 - protein, 9 aa, synthetic construct
PSQGSAHLF

SEQ ID NO: 7642 - protein, 9 aa, synthetic construct
PSQGGAHVK

SEQ ID NO: 7643 - protein, 9 aa, synthetic construct
PSQGGIKLY

SEQ ID NO: 7644 - protein, 9 aa, synthetic construct
PLNASAKLY

SEQ ID NO: 7645 - protein, 9 aa, synthetic construct
PSQAAIKLH

SEQ ID NO: 7646 - protein, 9 aa, synthetic construct
PSQAAIKLF

SEQ ID NO: 7647 - protein, 9 aa, synthetic construct
PLNASAKVF

SEQ ID NO: 7648 - protein, 9 aa, synthetic construct
PLNASIKLY

SEQ ID NO: 7649 - protein, 9 aa, synthetic construct
PLNGAIKVH

SEQ ID NO: 7650 - protein, 9 aa, synthetic construct
PSQAVGHLK

SEQ ID NO: 7651 - protein, 9 aa, synthetic construct
PSQAGAHVK

SEQ ID NO: 7652 - protein, 9 aa, synthetic construct
PSQAGIHLH

SEQ ID NO: 7653 - protein, 9 aa, synthetic construct
PLNGAVRLH

SEQ ID NO: 7654 - protein, 9 aa, synthetic construct
PSPGAVKLY

SEQ ID NO: 7655 - protein, 9 aa, synthetic construct
PLNGAGHLR

SEQ ID NO: 7656 - protein, 9 aa, synthetic construct
PSPGAGHVH

SEQ ID NO: 7657 - protein, 9 aa, synthetic construct
PSPGSIRVH

SEQ ID NO: 7658 - protein, 9 aa, synthetic construct
PSPGSGHVF

SEQ ID NO: 7659 - protein, 9 aa, synthetic construct
PSPGVLHLK

SEQ ID NO: 7660 - protein, 9 aa, synthetic construct
PLNGAGHVY

SEQ ID NO: 7661 - protein, 9 aa, synthetic construct
PSPGGIRLF

SEQ ID NO: 7662 - protein, 9 aa, synthetic construct
PSPGGGRLH

SEQ ID NO: 7663 - protein, 9 aa, synthetic construct
PSPAAAHLH

SEQ ID NO: 7664 - protein, 9 aa, synthetic construct
PSPAAAHLK

SEQ ID NO: 7665 - protein, 9 aa, synthetic construct
PSPAAAHLF

SEQ ID NO: 7666 - protein, 9 aa, synthetic construct
PSPAAAHVH

SEQ ID NO: 7667 - protein, 9 aa, synthetic construct
PSPAAARVF

SEQ ID NO: 7668 - protein, 9 aa, synthetic construct
PSPAAAKLH

SEQ ID NO: 7669 - protein, 9 aa, synthetic construct
PSPAAIRLF

SEQ ID NO: 7670 - protein, 9 aa, synthetic construct
PSPAAGHLY

SEQ ID NO: 7671 - protein, 9 aa, synthetic construct
PSPAAGHLF

SEQ ID NO: 7672 - protein, 9 aa, synthetic construct
PSPAAGHVY

SEQ ID NO: 7673 - protein, 9 aa, synthetic construct
PSPAAGHVR

SEQ ID NO: 7674 - protein, 9 aa, synthetic construct
PSPAAGHVK

SEQ ID NO: 7675 - protein, 9 aa, synthetic construct
PSPAAGHVF

SEQ ID NO: 7676 - protein, 9 aa, synthetic construct
PSPAAGRLF

SEQ ID NO: 7677 - protein, 9 aa, synthetic construct
PSPAAGRVR

SEQ ID NO: 7678 - protein, 9 aa, synthetic construct
PSPAAGRVF

SEQ ID NO: 7679 - protein, 9 aa, synthetic construct
PSPATVRVK

SEQ ID NO: 7680 - protein, 9 aa, synthetic construct
PSPATVKLF

SEQ ID NO: 7681 - protein, 9 aa, synthetic construct
PSPATAHLK

SEQ ID NO: 7682 - protein, 9 aa, synthetic construct
PSPATAKLH

SEQ ID NO: 7683 - protein, 9 aa, synthetic construct
PLNGAGRLY

SEQ ID NO: 7684 - protein, 9 aa, synthetic construct
PSPATGHLF

SEQ ID NO: 7685 - protein, 9 aa, synthetic construct
PSPATGHVH

SEQ ID NO: 7686 - protein, 9 aa, synthetic construct
PSPATGRVR

SEQ ID NO: 7687 - protein, 9 aa, synthetic construct
PSPASIRLF

SEQ ID NO: 7688 - protein, 9 aa, synthetic construct
PSPASIKLH

SEQ ID NO: 7689 - protein, 9 aa, synthetic construct
PLNGAGRLH

SEQ ID NO: 7690 - protein, 9 aa, synthetic construct
PLNAVGHVY

SEQ ID NO: 7691 - protein, 9 aa, synthetic construct
PSPAVGHVY

SEQ ID NO: 7692 - protein, 9 aa, synthetic construct
PSPAGAHLH

SEQ ID NO: 7693 - protein, 9 aa, synthetic construct
PSPAGAKLY

SEQ ID NO: 7694 - protein, 9 aa, synthetic construct
PSPAGIHLY

SEQ ID NO: 7695 - protein, 9 aa, synthetic construct
PSPAGIHVY

SEQ ID NO: 7696 - protein, 9 aa, synthetic construct
PSPAGIHVR

SEQ ID NO: 7697 - protein, 9 aa, synthetic construct
PSPAGIHVK

SEQ ID NO: 7698 - protein, 9 aa, synthetic construct
PSPAGIRLY

SEQ ID NO: 7699 - protein, 9 aa, synthetic construct
PSPAGIRLH

SEQ ID NO: 7700 - protein, 9 aa, synthetic construct
PSPAGIRVY

SEQ ID NO: 7701 - protein, 9 aa, synthetic construct
PSPAGIRVF

SEQ ID NO: 7702 - protein, 9 aa, synthetic construct
PSPAGIKLY

SEQ ID NO: 7703 - protein, 9 aa, synthetic construct
PSPAGIKLH

SEQ ID NO: 7704 - protein, 9 aa, synthetic construct
PSPAGIKLF

SEQ ID NO: 7705 - protein, 9 aa, synthetic construct
PLNAVGKVH

SEQ ID NO: 7706 - protein, 9 aa, synthetic construct
PSPAGGHVH

SEQ ID NO: 7707 - protein, 9 aa, synthetic construct
PANGAVHLY

SEQ ID NO: 7708 - protein, 9 aa, synthetic construct
PANGAVHLK

SEQ ID NO: 7709 - protein, 9 aa, synthetic construct
PANGAVKLY

SEQ ID NO: 7710 - protein, 9 aa, synthetic construct
PANGALHLR

SEQ ID NO: 7711 - protein, 9 aa, synthetic construct
PANGAAHLR

SEQ ID NO: 7712 - protein, 9 aa, synthetic construct
PANGAAHVH

SEQ ID NO: 7713 - protein, 9 aa, synthetic construct
PANGAARVY

SEQ ID NO: 7714 - protein, 9 aa, synthetic construct
PANGAAKLH

SEQ ID NO: 7715 - protein, 9 aa, synthetic construct
PANGAAKLF

SEQ ID NO: 7716 - protein, 9 aa, synthetic construct
PANGAIHVK

SEQ ID NO: 7717 - protein, 9 aa, synthetic construct
PANGAIRVH

SEQ ID NO: 7718 - protein, 9 aa, synthetic construct
PANGAIKLY

SEQ ID NO: 7719 - protein, 9 aa, synthetic construct
PANGAIKVK

SEQ ID NO: 7720 - protein, 9 aa, synthetic construct
PANGAIKVF

SEQ ID NO: 7721 - protein, 9 aa, synthetic construct
PANGAGHLF

SEQ ID NO: 7722 - protein, 9 aa, synthetic construct
PANGAGKLH

SEQ ID NO: 7723 - protein, 9 aa, synthetic construct
PANGAGKVF

SEQ ID NO: 7724 - protein, 9 aa, synthetic construct
PANGTLHLR

SEQ ID NO: 7725 - protein, 9 aa, synthetic construct
PANGTLHVK

SEQ ID NO: 7726 - protein, 9 aa, synthetic construct
PANGTAHLR

SEQ ID NO: 7727 - protein, 9 aa, synthetic construct
PANGTAHVY

SEQ ID NO: 7728 - protein, 9 aa, synthetic construct
PANGTIHLK

SEQ ID NO: 7729 - protein, 9 aa, synthetic construct
PANGTGHLF

SEQ ID NO: 7730 - protein, 9 aa, synthetic construct
PANGTGRLY

SEQ ID NO: 7731 - protein, 9 aa, synthetic construct
PANGTGRLH

SEQ ID NO: 7732 - protein, 9 aa, synthetic construct
PANGSVKVF

SEQ ID NO: 7733 - protein, 9 aa, synthetic construct
PANGSLHLR

SEQ ID NO: 7734 - protein, 9 aa, synthetic construct
PANGSLHVR

SEQ ID NO: 7735 - protein, 9 aa, synthetic construct
PANGSLHVK

SEQ ID NO: 7736 - protein, 9 aa, synthetic construct
PANGSLKLH

SEQ ID NO: 7737 - protein, 9 aa, synthetic construct
PANGSAHVY

SEQ ID NO: 7738 - protein, 9 aa, synthetic construct
PANGVLHLK

SEQ ID NO: 7739 - protein, 9 aa, synthetic construct
PLNGAVRLF

SEQ ID NO: 7740 - protein, 9 aa, synthetic construct
PLNGAGKLY

SEQ ID NO: 7741 - protein, 9 aa, synthetic construct
PANGVAHLY

SEQ ID NO: 7742 - protein, 9 aa, synthetic construct
PANGVAHLR

SEQ ID NO: 7743 - protein, 9 aa, synthetic construct
PANGVAHVH

SEQ ID NO: 7744 - protein, 9 aa, synthetic construct
PANGVAKLH

SEQ ID NO: 7745 - protein, 9 aa, synthetic construct
PANGVAKVF

SEQ ID NO: 7746 - protein, 9 aa, synthetic construct
PANGVGHLH

SEQ ID NO: 7747 - protein, 9 aa, synthetic construct
PANGGVHLR

SEQ ID NO: 7748 - protein, 9 aa, synthetic construct
PANGGLHVK

SEQ ID NO: 7749 - protein, 9 aa, synthetic construct
PANGGAHLR

SEQ ID NO: 7750 - protein, 9 aa, synthetic construct
PANGGAHLH

SEQ ID NO: 7751 - protein, 9 aa, synthetic construct
PANGGAHLK

SEQ ID NO: 7752 - protein, 9 aa, synthetic construct
PANGGAHVY

SEQ ID NO: 7753 - protein, 9 aa, synthetic construct
PANGGAHVK

SEQ ID NO: 7754 - protein, 9 aa, synthetic construct
PANGGAHVF

SEQ ID NO: 7755 - protein, 9 aa, synthetic construct
PANGGARLH

SEQ ID NO: 7756 - protein, 9 aa, synthetic construct
PANGGAKLY

SEQ ID NO: 7757 - protein, 9 aa, synthetic construct
PANGGAKLH

SEQ ID NO: 7758 - protein, 9 aa, synthetic construct
PANGGAKLF

SEQ ID NO: 7759 - protein, 9 aa, synthetic construct
PANGGIHVR

SEQ ID NO: 7760 - protein, 9 aa, synthetic construct
PLNGAGKLH

SEQ ID NO: 7761 - protein, 9 aa, synthetic construct
PANGGGHLY

SEQ ID NO: 7762 - protein, 9 aa, synthetic construct
PANGGGHLH

SEQ ID NO: 7763 - protein, 9 aa, synthetic construct
PANGGGHVH

SEQ ID NO: 7764 - protein, 9 aa, synthetic construct
PANGGGKVF

SEQ ID NO: 7765 - protein, 9 aa, synthetic construct
PLNAGAKLY

SEQ ID NO: 7766 - protein, 9 aa, synthetic construct
PANAAIKVH

SEQ ID NO: 7767 - protein, 9 aa, synthetic construct
PLNAGIHLY

SEQ ID NO: 7768 - protein, 9 aa, synthetic construct
PANATVHLF

SEQ ID NO: 7769 - protein, 9 aa, synthetic construct
PANATVKLY

SEQ ID NO: 7770 - protein, 9 aa, synthetic construct
PANATLRLH

SEQ ID NO: 7771 - protein, 9 aa, synthetic construct
PLNAGIHVH

SEQ ID NO: 7772 - protein, 9 aa, synthetic construct
PANASIRLY

SEQ ID NO: 7773 - protein, 9 aa, synthetic construct
PANASIKLH

SEQ ID NO: 7774 - protein, 9 aa, synthetic construct
PANASGHLH

SEQ ID NO: 7775 - protein, 9 aa, synthetic construct
PANAVAHLH

SEQ ID NO: 7776 - protein, 9 aa, synthetic construct
PLNGAGKVK

SEQ ID NO: 7777 - protein, 9 aa, synthetic construct
PANAGIHVH

SEQ ID NO: 7778 - protein, 9 aa, synthetic construct
PANAGIRLY

SEQ ID NO: 7779 - protein, 9 aa, synthetic construct
PANAGIRLH

SEQ ID NO: 7780 - protein, 9 aa, synthetic construct
PANAGIRVY

SEQ ID NO: 7781 - protein, 9 aa, synthetic construct
PANAGGHLK

SEQ ID NO: 7782 - protein, 9 aa, synthetic construct
PLNAGGKVF

SEQ ID NO: 7783 - protein, 9 aa, synthetic construct
PLNGAVRVY

SEQ ID NO: 7784 - protein, 9 aa, synthetic construct
PAQGAVRLH

SEQ ID NO: 7785 - protein, 9 aa, synthetic construct
PAQGALKVF

SEQ ID NO: 7786 - protein, 9 aa, synthetic construct
PAQGAAKLH

SEQ ID NO: 7787 - protein, 9 aa, synthetic construct
PAQGAIHVY

SEQ ID NO: 7788 - protein, 9 aa, synthetic construct
PLNGTVHLR

SEQ ID NO: 7789 - protein, 9 aa, synthetic construct
PAQGAGHLH

SEQ ID NO: 7790 - protein, 9 aa, synthetic construct
PLNGTVHLH

SEQ ID NO: 7791 - protein, 9 aa, synthetic construct
PLQGAVKLY

SEQ ID NO: 7792 - protein, 9 aa, synthetic construct
PAQGTAHLF

SEQ ID NO: 7793 - protein, 9 aa, synthetic construct
PAQGTARVY

SEQ ID NO: 7794 - protein, 9 aa, synthetic construct
PAQGTARVF

SEQ ID NO: 7795 - protein, 9 aa, synthetic construct
PAQGTAKLF

SEQ ID NO: 7796 - protein, 9 aa, synthetic construct
PAQGTAKVH

SEQ ID NO: 7797 - protein, 9 aa, synthetic construct
PAQGTGKLH

SEQ ID NO: 7798 - protein, 9 aa, synthetic construct
PLNGTVHLK

SEQ ID NO: 7799 - protein, 9 aa, synthetic construct
PAQGSVHLR

SEQ ID NO: 7800 - protein, 9 aa, synthetic construct
PAQGSVRLF

SEQ ID NO: 7801 - protein, 9 aa, synthetic construct
PAQGSLHLH

SEQ ID NO: 7802 - protein, 9 aa, synthetic construct
PAQGSAHLF

SEQ ID NO: 7803 - protein, 9 aa, synthetic construct
PAQGSAKLH

SEQ ID NO: 7804 - protein, 9 aa, synthetic construct
PLNGTVHLF

SEQ ID NO: 7805 - protein, 9 aa, synthetic construct
PAQGSIRVF

SEQ ID NO: 7806 - protein, 9 aa, synthetic construct
PAQGSIKVY

SEQ ID NO: 7807 - protein, 9 aa, synthetic construct
PAQGSGHLY

SEQ ID NO: 7808 - protein, 9 aa, synthetic construct
PAQGVVHLH

SEQ ID NO: 7809 - protein, 9 aa, synthetic construct
PAQGVVHVF

SEQ ID NO: 7810 - protein, 9 aa, synthetic construct
PAQGVLHLK

SEQ ID NO: 7811 - protein, 9 aa, synthetic construct
PAQGVAHLH

SEQ ID NO: 7812 - protein, 9 aa, synthetic construct
PAQGVAHVH

SEQ ID NO: 7813 - protein, 9 aa, synthetic construct
PAQGVAKLH

SEQ ID NO: 7814 - protein, 9 aa, synthetic construct
PAQGVIHLY

SEQ ID NO: 7815 - protein, 9 aa, synthetic construct
PAQGVIHLR

SEQ ID NO: 7816 - protein, 9 aa, synthetic construct
PAQGVIHLH

SEQ ID NO: 7817 - protein, 9 aa, synthetic construct
PAQGVIHLK

SEQ ID NO: 7818 - protein, 9 aa, synthetic construct
PAQGVIHVY

SEQ ID NO: 7819 - protein, 9 aa, synthetic construct
PAQGVIHVR

SEQ ID NO: 7820 - protein, 9 aa, synthetic construct
PAQGVIHVH

SEQ ID NO: 7821 - protein, 9 aa, synthetic construct
PAQGVIHVF

SEQ ID NO: 7822 - protein, 9 aa, synthetic construct
PAQGVIKLH

SEQ ID NO: 7823 - protein, 9 aa, synthetic construct
PAQGVGHLY

SEQ ID NO: 7824 - protein, 9 aa, synthetic construct
PAQGVGHLF

SEQ ID NO: 7825 - protein, 9 aa, synthetic construct
PAQGVGHVY

SEQ ID NO: 7826 - protein, 9 aa, synthetic construct
PAQGVGHVR

SEQ ID NO: 7827 - protein, 9 aa, synthetic construct
PAQGVGHVK

SEQ ID NO: 7828 - protein, 9 aa, synthetic construct
PAQGVGHVF

SEQ ID NO: 7829 - protein, 9 aa, synthetic construct
PAQGVGKLH

SEQ ID NO: 7830 - protein, 9 aa, synthetic construct
PAQGGAHVH

SEQ ID NO: 7831 - protein, 9 aa, synthetic construct
PAQGGIRLF

SEQ ID NO: 7832 - protein, 9 aa, synthetic construct
PAQGGIKLY

SEQ ID NO: 7833 - protein, 9 aa, synthetic construct
PAQGGGHLY

SEQ ID NO: 7834 - protein, 9 aa, synthetic construct
PLNGTVHVK

SEQ ID NO: 7835 - protein, 9 aa, synthetic construct
PAQAAAHLF

SEQ ID NO: 7836 - protein, 9 aa, synthetic construct
PAQAAIHVY

SEQ ID NO: 7837 - protein, 9 aa, synthetic construct
PAQAAIRLF

SEQ ID NO: 7838 - protein, 9 aa, synthetic construct
PLNGTVHVF

SEQ ID NO: 7839 - protein, 9 aa, synthetic construct
PAQATAKLH

SEQ ID NO: 7840 - protein, 9 aa, synthetic construct
PAQATGHLF

SEQ ID NO: 7841 - protein, 9 aa, synthetic construct
PAQATGKVH

SEQ ID NO: 7842 - protein, 9 aa, synthetic construct
PAQASIHVY

SEQ ID NO: 7843 - protein, 9 aa, synthetic construct
PAQASIKLH

SEQ ID NO: 7844 - protein, 9 aa, synthetic construct
PAQAVVHVF

SEQ ID NO: 7845 - protein, 9 aa, synthetic construct
PAQAVAKLH

SEQ ID NO: 7846 - protein, 9 aa, synthetic construct
PLNGTVRLK

SEQ ID NO: 7847 - protein, 9 aa, synthetic construct
PAQAVGHVH

SEQ ID NO: 7848 - protein, 9 aa, synthetic construct
PAQAGAHLF

SEQ ID NO: 7849 - protein, 9 aa, synthetic construct
PAQAGARVF

SEQ ID NO: 7850 - protein, 9 aa, synthetic construct
PAQAGIHLY

SEQ ID NO: 7851 - protein, 9 aa, synthetic construct
PAQAGIHLF

SEQ ID NO: 7852 - protein, 9 aa, synthetic construct
PAQAGIHVR

SEQ ID NO: 7853 - protein, 9 aa, synthetic construct
PAQAGIHVH

SEQ ID NO: 7854 - protein, 9 aa, synthetic construct
PAQAGIHVF

SEQ ID NO: 7855 - protein, 9 aa, synthetic construct
PAQAGIRLY

SEQ ID NO: 7856 - protein, 9 aa, synthetic construct
PAQAGIRLH

SEQ ID NO: 7857 - protein, 9 aa, synthetic construct
PAQAGIRVY

SEQ ID NO: 7858 - protein, 9 aa, synthetic construct
PAQAGIKLY

SEQ ID NO: 7859 - protein, 9 aa, synthetic construct
PAQAGIKLH

SEQ ID NO: 7860 - protein, 9 aa, synthetic construct
PAQAGIKLF

SEQ ID NO: 7861 - protein, 9 aa, synthetic construct
PAQAGGRLY

SEQ ID NO: 7862 - protein, 9 aa, synthetic construct
PAPGAVHLK

SEQ ID NO: 7863 - protein, 9 aa, synthetic construct
PAPGAVKLH

SEQ ID NO: 7864 - protein, 9 aa, synthetic construct
PAPGAGHLY

SEQ ID NO: 7865 - protein, 9 aa, synthetic construct
PAPGTVKLF

SEQ ID NO: 7866 - protein, 9 aa, synthetic construct
PAPGTLHVK

SEQ ID NO: 7867 - protein, 9 aa, synthetic construct
PAPGSVHLR

SEQ ID NO: 7868 - protein, 9 aa, synthetic construct
PAPGSLHLY

SEQ ID NO: 7869 - protein, 9 aa, synthetic construct
PAPGSLHLR

SEQ ID NO: 7870 - protein, 9 aa, synthetic construct
PAPGSLHLH

SEQ ID NO: 7871 - protein, 9 aa, synthetic construct
PAPGSLHLK

SEQ ID NO: 7872 - protein, 9 aa, synthetic construct
PAPGSLHVY

SEQ ID NO: 7873 - protein, 9 aa, synthetic construct
PAPGSLHVR

SEQ ID NO: 7874 - protein, 9 aa, synthetic construct
PAPGSLHVH

SEQ ID NO: 7875 - protein, 9 aa, synthetic construct
PAPGSLHVF

SEQ ID NO: 7876 - protein, 9 aa, synthetic construct
PAPGSLKVH

SEQ ID NO: 7877 - protein, 9 aa, synthetic construct
PAPGVVHLH

SEQ ID NO: 7878 - protein, 9 aa, synthetic construct
PAPGVLHLK

SEQ ID NO: 7879 - protein, 9 aa, synthetic construct
PLNGTVKLY

SEQ ID NO: 7880 - protein, 9 aa, synthetic construct
PLNGTVKLR

SEQ ID NO: 7881 - protein, 9 aa, synthetic construct
PLQGTAHLH

SEQ ID NO: 7882 - protein, 9 aa, synthetic construct
PAPGGLHVK

SEQ ID NO: 7883 - protein, 9 aa, synthetic construct
PAPGGAKLY

SEQ ID NO: 7884 - protein, 9 aa, synthetic construct
PLQGTAHVF

SEQ ID NO: 7885 - protein, 9 aa, synthetic construct
PLNGTVKLH

SEQ ID NO: 7886 - protein, 9 aa, synthetic construct
PAPAAAHLH

SEQ ID NO: 7887 - protein, 9 aa, synthetic construct
PAPAAAHLK

SEQ ID NO: 7888 - protein, 9 aa, synthetic construct
PAPAAAKLY

SEQ ID NO: 7889 - protein, 9 aa, synthetic construct
PAPAAGHLR

SEQ ID NO: 7890 - protein, 9 aa, synthetic construct
PAPAAGKLH

SEQ ID NO: 7891 - protein, 9 aa, synthetic construct
PLNGTVKLF

SEQ ID NO: 7892 - protein, 9 aa, synthetic construct
PAPATVKLF

SEQ ID NO: 7893 - protein, 9 aa, synthetic construct
PAPASIKLY

SEQ ID NO: 7894 - protein, 9 aa, synthetic construct
PAPASIKLH

SEQ ID NO: 7895 - protein, 9 aa, synthetic construct
PAPASGHLY

SEQ ID NO: 7896 - protein, 9 aa, synthetic construct
PLNGTVKVH

SEQ ID NO: 7897 - protein, 9 aa, synthetic construct
PAPAVVHLY

SEQ ID NO: 7898 - protein, 9 aa, synthetic construct
PAPAVVHLR

SEQ ID NO: 7899 - protein, 9 aa, synthetic construct
PAPAVVHLK

SEQ ID NO: 7900 - protein, 9 aa, synthetic construct
PAPAVVHVH

SEQ ID NO: 7901 - protein, 9 aa, synthetic construct
PAPAVAHLR

SEQ ID NO: 7902 - protein, 9 aa, synthetic construct
PAPAVAKLH

SEQ ID NO: 7903 - protein, 9 aa, synthetic construct
PAPAVIHLH

SEQ ID NO: 7904 - protein, 9 aa, synthetic construct
PLNGTVKVK

SEQ ID NO: 7905 - protein, 9 aa, synthetic construct
PAPAVGKVF

SEQ ID NO: 7906 - protein, 9 aa, synthetic construct
PLNGTVKVF

SEQ ID NO: 7907 - protein, 9 aa, synthetic construct
PAPAGAHLH

SEQ ID NO: 7908 - protein, 9 aa, synthetic construct
PAPAGAHLK

SEQ ID NO: 7909 - protein, 9 aa, synthetic construct
PAPAGAHVY

SEQ ID NO: 7910 - protein, 9 aa, synthetic construct
PAPAGAHVF

SEQ ID NO: 7911 - protein, 9 aa, synthetic construct
PAPAGARLY

SEQ ID NO: 7912 - protein, 9 aa, synthetic construct
PAPAGARLH

SEQ ID NO: 7913 - protein, 9 aa, synthetic construct
PAPAGARVK

SEQ ID NO: 7914 - protein, 9 aa, synthetic construct
PAPAGAKLH

SEQ ID NO: 7915 - protein, 9 aa, synthetic construct
PAPAGAKVY

SEQ ID NO: 7916 - protein, 9 aa, synthetic construct
PAPAGAKVF

SEQ ID NO: 7917 - protein, 9 aa, synthetic construct
PAPAGIHVK

SEQ ID NO: 7918 - protein, 9 aa, synthetic construct
PAPAGIRLY

SEQ ID NO: 7919 - protein, 9 aa, synthetic construct
PAPAGGHLH

SEQ ID NO: 7920 - protein, 9 aa, synthetic construct
PAPAGGHVY

SEQ ID NO: 7921 - protein, 9 aa, synthetic construct
PAPAGGKLY

SEQ ID NO: 7922 - protein, 9 aa, synthetic construct
PLNGTLHLY

SEQ ID NO: 7923 - protein, 9 aa, synthetic construct
PVNGAVHLR

SEQ ID NO: 7924 - protein, 9 aa, synthetic construct
PVNGAVHLK

SEQ ID NO: 7925 - protein, 9 aa, synthetic construct
PVNGAVRVH

SEQ ID NO: 7926 - protein, 9 aa, synthetic construct
PVNGAAHLF

SEQ ID NO: 7927 - protein, 9 aa, synthetic construct
PVNGAAHVK

SEQ ID NO: 7928 - protein, 9 aa, synthetic construct
PVNGAARVY

SEQ ID NO: 7929 - protein, 9 aa, synthetic construct
PVNGAIHVY

SEQ ID NO: 7930 - protein, 9 aa, synthetic construct
PVNGAGRLF

SEQ ID NO: 7931 - protein, 9 aa, synthetic construct
PVNGTVHLR

SEQ ID NO: 7932 - protein, 9 aa, synthetic construct
PVNGTVHLH

SEQ ID NO: 7933 - protein, 9 aa, synthetic construct
PVNGTVHLK

SEQ ID NO: 7934 - protein, 9 aa, synthetic construct
PVNGTVHLF

SEQ ID NO: 7935 - protein, 9 aa, synthetic construct
PVNGTVHVF

SEQ ID NO: 7936 - protein, 9 aa, synthetic construct
PVNGTVRVH

SEQ ID NO: 7937 - protein, 9 aa, synthetic construct
PVNGTVKLK

SEQ ID NO: 7938 - protein, 9 aa, synthetic construct
PVNGTLHLY

SEQ ID NO: 7939 - protein, 9 aa, synthetic construct
PVNGTLHLR

SEQ ID NO: 7940 - protein, 9 aa, synthetic construct
PVNGTLHVK

SEQ ID NO: 7941 - protein, 9 aa, synthetic construct
PLNGTLHLH

SEQ ID NO: 7942 - protein, 9 aa, synthetic construct
PVNGTAHLK

SEQ ID NO: 7943 - protein, 9 aa, synthetic construct
PVNGTAHLF

SEQ ID NO: 7944 - protein, 9 aa, synthetic construct
PVNGTAHVY

SEQ ID NO: 7945 - protein, 9 aa, synthetic construct
PVNGTARVY

SEQ ID NO: 7946 - protein, 9 aa, synthetic construct
PVNGTARVF

SEQ ID NO: 7947 - protein, 9 aa, synthetic construct
PVNGTAKLH

SEQ ID NO: 7948 - protein, 9 aa, synthetic construct
PLQGSVKVH

SEQ ID NO: 7949 - protein, 9 aa, synthetic construct
PVNGTGHLF

SEQ ID NO: 7950 - protein, 9 aa, synthetic construct
PVNGTGRLY

SEQ ID NO: 7951 - protein, 9 aa, synthetic construct
PVNGTGRLF

SEQ ID NO: 7952 - protein, 9 aa, synthetic construct
PVNGTGRVR

SEQ ID NO: 7953 - protein, 9 aa, synthetic construct
PVNGTGKVF

SEQ ID NO: 7954 - protein, 9 aa, synthetic construct
PLNGTLHLK

SEQ ID NO: 7955 - protein, 9 aa, synthetic construct
PVNGSVHLR

SEQ ID NO: 7956 - protein, 9 aa, synthetic construct
PVNGSLHLH

SEQ ID NO: 7957 - protein, 9 aa, synthetic construct
PVNGSAHLF

SEQ ID NO: 7958 - protein, 9 aa, synthetic construct
PVNGSAHVF

SEQ ID NO: 7959 - protein, 9 aa, synthetic construct
PVNGSAKLY

SEQ ID NO: 7960 - protein, 9 aa, synthetic construct
PLNGTLHLF

SEQ ID NO: 7961 - protein, 9 aa, synthetic construct
PVNGSIKLY

SEQ ID NO: 7962 - protein, 9 aa, synthetic construct
PVNGSGKLY

SEQ ID NO: 7963 - protein, 9 aa, synthetic construct
PVNGVVHLR

SEQ ID NO: 7964 - protein, 9 aa, synthetic construct
PVNGVVHLH

SEQ ID NO: 7965 - protein, 9 aa, synthetic construct
PVNGVLHLK

SEQ ID NO: 7966 - protein, 9 aa, synthetic construct
PVNGVLHVY

SEQ ID NO: 7967 - protein, 9 aa, synthetic construct
PVNGVAHLY

SEQ ID NO: 7968 - protein, 9 aa, synthetic construct
PVNGVAHLH

SEQ ID NO: 7969 - protein, 9 aa, synthetic construct
PVNGVAHVR

SEQ ID NO: 7970 - protein, 9 aa, synthetic construct
PVNGVAHVF

SEQ ID NO: 7971 - protein, 9 aa, synthetic construct
PVNGVIKLR

SEQ ID NO: 7972 - protein, 9 aa, synthetic construct
PVNGVIKLH

SEQ ID NO: 7973 - protein, 9 aa, synthetic construct
PVNGVGHLR

SEQ ID NO: 7974 - protein, 9 aa, synthetic construct
PVNGVGHLH

SEQ ID NO: 7975 - protein, 9 aa, synthetic construct
PVNGVGHVH

SEQ ID NO: 7976 - protein, 9 aa, synthetic construct
PVNGVGKLR

SEQ ID NO: 7977 - protein, 9 aa, synthetic construct
PVNGVGKVF

SEQ ID NO: 7978 - protein, 9 aa, synthetic construct
PVNGGVHLY

SEQ ID NO: 7979 - protein, 9 aa, synthetic construct
PVNGGVHLR

SEQ ID NO: 7980 - protein, 9 aa, synthetic construct
PVNGGVHLH

SEQ ID NO: 7981 - protein, 9 aa, synthetic construct
PVNGGVHLF

SEQ ID NO: 7982 - protein, 9 aa, synthetic construct
PVNGGVHVF

SEQ ID NO: 7983 - protein, 9 aa, synthetic construct
PVNGGVKLH

SEQ ID NO: 7984 - protein, 9 aa, synthetic construct
PVNGGLHLK

SEQ ID NO: 7985 - protein, 9 aa, synthetic construct
PVNGGLHVK

SEQ ID NO: 7986 - protein, 9 aa, synthetic construct
PVNGGAHVY

SEQ ID NO: 7987 - protein, 9 aa, synthetic construct
PVNGGAHVR

SEQ ID NO: 7988 - protein, 9 aa, synthetic construct
PVNGGAHVF

SEQ ID NO: 7989 - protein, 9 aa, synthetic construct
PVNGGARLH

SEQ ID NO: 7990 - protein, 9 aa, synthetic construct
PVNGGARVY

SEQ ID NO: 7991 - protein, 9 aa, synthetic construct
PVNGGAKLY

SEQ ID NO: 7992 - protein, 9 aa, synthetic construct
PVNGGIRLY

SEQ ID NO: 7993 - protein, 9 aa, synthetic construct
PVNGGIKLY

SEQ ID NO: 7994 - protein, 9 aa, synthetic construct
PVNGGGHLH

SEQ ID NO: 7995 - protein, 9 aa, synthetic construct
PVNAAVHLY

SEQ ID NO: 7996 - protein, 9 aa, synthetic construct
PVNAAVHLR

SEQ ID NO: 7997 - protein, 9 aa, synthetic construct
PVNAAVRVH

SEQ ID NO: 7998 - protein, 9 aa, synthetic construct
PVNAAVKLY

SEQ ID NO: 7999 - protein, 9 aa, synthetic construct
PLNGTLHVK

SEQ ID NO: 8000 - protein, 9 aa, synthetic construct
PVNAALKLK

SEQ ID NO: 8001 - protein, 9 aa, synthetic construct
PVNAAARLF

SEQ ID NO: 8002 - protein, 9 aa, synthetic construct
PVNAAARVF

SEQ ID NO: 8003 - protein, 9 aa, synthetic construct
PVNAAAKLH

SEQ ID NO: 8004 - protein, 9 aa, synthetic construct
PVNAAGHVH

SEQ ID NO: 8005 - protein, 9 aa, synthetic construct
PVNAAGRLY

SEQ ID NO: 8006 - protein, 9 aa, synthetic construct
PVNAAGRLH

SEQ ID NO: 8007 - protein, 9 aa, synthetic construct
PVNAAGRVR

SEQ ID NO: 8008 - protein, 9 aa, synthetic construct
PVNAAGRVF

SEQ ID NO: 8009 - protein, 9 aa, synthetic construct
PVNATVHLY

SEQ ID NO: 8010 - protein, 9 aa, synthetic construct
PVNATVKLK

SEQ ID NO: 8011 - protein, 9 aa, synthetic construct
PVNATVKLF

SEQ ID NO: 8012 - protein, 9 aa, synthetic construct
PVNATAHLH

SEQ ID NO: 8013 - protein, 9 aa, synthetic construct
PVNATAHLF

SEQ ID NO: 8014 - protein, 9 aa, synthetic construct
PVNATARLH

SEQ ID NO: 8015 - protein, 9 aa, synthetic construct
PVNATARVK

SEQ ID NO: 8016 - protein, 9 aa, synthetic construct
PVNATARVF

SEQ ID NO: 8017 - protein, 9 aa, synthetic construct
PVNATAKLF

SEQ ID NO: 8018 - protein, 9 aa, synthetic construct
PVNATAKVH

SEQ ID NO: 8019 - protein, 9 aa, synthetic construct
PVNATIHLY

SEQ ID NO: 8020 - protein, 9 aa, synthetic construct
PLNGAVRVF

SEQ ID NO: 8021 - protein, 9 aa, synthetic construct
PVNATGHLF

SEQ ID NO: 8022 - protein, 9 aa, synthetic construct
PVNATGRLY

SEQ ID NO: 8023 - protein, 9 aa, synthetic construct
PVNATGRLF

SEQ ID NO: 8024 - protein, 9 aa, synthetic construct
PVNATGRVR

SEQ ID NO: 8025 - protein, 9 aa, synthetic construct
PVNATGKLH

SEQ ID NO: 8026 - protein, 9 aa, synthetic construct
PVNASARVH

SEQ ID NO: 8027 - protein, 9 aa, synthetic construct
PVNASAKLH

SEQ ID NO: 8028 - protein, 9 aa, synthetic construct
PVNASIKLH

SEQ ID NO: 8029 - protein, 9 aa, synthetic construct
PVNASGHLH

SEQ ID NO: 8030 - protein, 9 aa, synthetic construct
PVNASGHVF

SEQ ID NO: 8031 - protein, 9 aa, synthetic construct
PVNAVVHLH

SEQ ID NO: 8032 - protein, 9 aa, synthetic construct
PVNAVAHLR

SEQ ID NO: 8033 - protein, 9 aa, synthetic construct
PVNAVAHLH

SEQ ID NO: 8034 - protein, 9 aa, synthetic construct
PVNAVARVY

SEQ ID NO: 8035 - protein, 9 aa, synthetic construct
PVNAVAKLY

SEQ ID NO: 8036 - protein, 9 aa, synthetic construct
PVNAVAKLH

SEQ ID NO: 8037 - protein, 9 aa, synthetic construct
PVNAVAKLF

SEQ ID NO: 8038 - protein, 9 aa, synthetic construct
PVNAVAKVH

SEQ ID NO: 8039 - protein, 9 aa, synthetic construct
PVNAVGHVY

SEQ ID NO: 8040 - protein, 9 aa, synthetic construct
PVNAVGKLF

SEQ ID NO: 8041 - protein, 9 aa, synthetic construct
PVNAVGKVF

SEQ ID NO: 8042 - protein, 9 aa, synthetic construct
PVNAGLKVH

SEQ ID NO: 8043 - protein, 9 aa, synthetic construct
PVNAGAHVK

SEQ ID NO: 8044 - protein, 9 aa, synthetic construct
PVNAGARVF

SEQ ID NO: 8045 - protein, 9 aa, synthetic construct
PVNAGAKLY

SEQ ID NO: 8046 - protein, 9 aa, synthetic construct
PVNAGIHLY

SEQ ID NO: 8047 - protein, 9 aa, synthetic construct
PVNAGIRLY

SEQ ID NO: 8048 - protein, 9 aa, synthetic construct
PVNAGIRLF

SEQ ID NO: 8049 - protein, 9 aa, synthetic construct
PVNAGIKVR

SEQ ID NO: 8050 - protein, 9 aa, synthetic construct
PVNAGGHLH

SEQ ID NO: 8051 - protein, 9 aa, synthetic construct
PVQGAVKLH

SEQ ID NO: 8052 - protein, 9 aa, synthetic construct
PVQGALKVF

SEQ ID NO: 8053 - protein, 9 aa, synthetic construct
PVQGAAKLF

SEQ ID NO: 8054 - protein, 9 aa, synthetic construct
PVQGAGHLH

SEQ ID NO: 8055 - protein, 9 aa, synthetic construct
PVQGSVHLR

SEQ ID NO: 8056 - protein, 9 aa, synthetic construct
PVQGSVRLK

SEQ ID NO: 8057 - protein, 9 aa, synthetic construct
PLQGVLHLK

SEQ ID NO: 8058 - protein, 9 aa, synthetic construct
PVQGSIHLH

SEQ ID NO: 8059 - protein, 9 aa, synthetic construct
PVQGVVHLH

SEQ ID NO: 8060 - protein, 9 aa, synthetic construct
PVQGVLHLK

SEQ ID NO: 8061 - protein, 9 aa, synthetic construct
PLNGAVKLY

SEQ ID NO: 8062 - protein, 9 aa, synthetic construct
PVQGVAHLR

SEQ ID NO: 8063 - protein, 9 aa, synthetic construct
PVQGVAHVY

SEQ ID NO: 8064 - protein, 9 aa, synthetic construct
PVQGVAKLH

SEQ ID NO: 8065 - protein, 9 aa, synthetic construct
PVQGVGHLR

SEQ ID NO: 8066 - protein, 9 aa, synthetic construct
PVQGVGHLH

SEQ ID NO: 8067 - protein, 9 aa, synthetic construct
PVQGVGHVH

SEQ ID NO: 8068 - protein, 9 aa, synthetic construct
PVQGVGRLY

SEQ ID NO: 8069 - protein, 9 aa, synthetic construct
PVQGVGRLH

SEQ ID NO: 8070 - protein, 9 aa, synthetic construct
PVQGVGKVH

SEQ ID NO: 8071 - protein, 9 aa, synthetic construct
PVQGGVHLK

SEQ ID NO: 8072 - protein, 9 aa, synthetic construct
PVQGGLHLF

SEQ ID NO: 8073 - protein, 9 aa, synthetic construct
PVQGGAHLY

SEQ ID NO: 8074 - protein, 9 aa, synthetic construct
PVQGGAHVK

SEQ ID NO: 8075 - protein, 9 aa, synthetic construct
PVQAALKVH

SEQ ID NO: 8076 - protein, 9 aa, synthetic construct
PVQAAGKLH

SEQ ID NO: 8077 - protein, 9 aa, synthetic construct
PLQGVIHVR

SEQ ID NO: 8078 - protein, 9 aa, synthetic construct
PVQATARVR

SEQ ID NO: 8079 - protein, 9 aa, synthetic construct
PVQASVHLK

SEQ ID NO: 8080 - protein, 9 aa, synthetic construct
PVQAVVHLH

SEQ ID NO: 8081 - protein, 9 aa, synthetic construct
PLQGVGHLK

SEQ ID NO: 8082 - protein, 9 aa, synthetic construct
PVQAVLHVK

SEQ ID NO: 8083 - protein, 9 aa, synthetic construct
PVQAVAKLH

SEQ ID NO: 8084 - protein, 9 aa, synthetic construct
PVQAVGKLH

SEQ ID NO: 8085 - protein, 9 aa, synthetic construct
PLQGVGKLH

SEQ ID NO: 8086 - protein, 9 aa, synthetic construct
PVQAGIHVY

SEQ ID NO: 8087 - protein, 9 aa, synthetic construct
PVQAGIRVH

SEQ ID NO: 8088 - protein, 9 aa, synthetic construct
PVPGAVRLH

SEQ ID NO: 8089 - protein, 9 aa, synthetic construct
PVPGAVKLY

SEQ ID NO: 8090 - protein, 9 aa, synthetic construct
PVPGAVKLK

SEQ ID NO: 8091 - protein, 9 aa, synthetic construct
PVPGAVKLF

SEQ ID NO: 8092 - protein, 9 aa, synthetic construct
PVPGAVKVH

SEQ ID NO: 8093 - protein, 9 aa, synthetic construct
PVPGALKLH

SEQ ID NO: 8094 - protein, 9 aa, synthetic construct
PVPGALKVY

SEQ ID NO: 8095 - protein, 9 aa, synthetic construct
PVPGALKVF

SEQ ID NO: 8096 - protein, 9 aa, synthetic construct
PVPGAAHLR

SEQ ID NO: 8097 - protein, 9 aa, synthetic construct
PVPGAAHVY

SEQ ID NO: 8098 - protein, 9 aa, synthetic construct
PVPGAAKLF

SEQ ID NO: 8099 - protein, 9 aa, synthetic construct
PVPGAGKLH

SEQ ID NO: 8100 - protein, 9 aa, synthetic construct
PVPGTVKLH

SEQ ID NO: 8101 - protein, 9 aa, synthetic construct
PVPGTVKLK

SEQ ID NO: 8102 - protein, 9 aa, synthetic construct
PLNGTAHLH

SEQ ID NO: 8103 - protein, 9 aa, synthetic construct
PVPGTLKVH

SEQ ID NO: 8104 - protein, 9 aa, synthetic construct
PVPGTAHVK

SEQ ID NO: 8105 - protein, 9 aa, synthetic construct
PVPGSLHVK

SEQ ID NO: 8106 - protein, 9 aa, synthetic construct
PVPGSAHVR

SEQ ID NO: 8107 - protein, 9 aa, synthetic construct
PLNGTAHLF

SEQ ID NO: 8108 - protein, 9 aa, synthetic construct
PVPGVVHLY

SEQ ID NO: 8109 - protein, 9 aa, synthetic construct
PVPGVVHLH

SEQ ID NO: 8110 - protein, 9 aa, synthetic construct
PVPGVVHVY

SEQ ID NO: 8111 - protein, 9 aa, synthetic construct
PVPGVLHLK

SEQ ID NO: 8112 - protein, 9 aa, synthetic construct
PVPGVLHVR

SEQ ID NO: 8113 - protein, 9 aa, synthetic construct
PLNGTAHVY

SEQ ID NO: 8114 - protein, 9 aa, synthetic construct
PVPGVAHLH

SEQ ID NO: 8115 - protein, 9 aa, synthetic construct
PVPGVAHVY

SEQ ID NO: 8116 - protein, 9 aa, synthetic construct
PVPGVIHLY

SEQ ID NO: 8117 - protein, 9 aa, synthetic construct
PVPGVIHLH

SEQ ID NO: 8118 - protein, 9 aa, synthetic construct
PVPGVIHVR

SEQ ID NO: 8119 - protein, 9 aa, synthetic construct
PVPGVGHVF

SEQ ID NO: 8120 - protein, 9 aa, synthetic construct
PVPGGAHVK

SEQ ID NO: 8121 - protein, 9 aa, synthetic construct
PVPGGARVK

SEQ ID NO: 8122 - protein, 9 aa, synthetic construct
PVPGGAKLY

SEQ ID NO: 8123 - protein, 9 aa, synthetic construct
PVPAAVKLH

SEQ ID NO: 8124 - protein, 9 aa, synthetic construct
PVPAAVKVF

SEQ ID NO: 8125 - protein, 9 aa, synthetic construct
PVPAAARLF

SEQ ID NO: 8126 - protein, 9 aa, synthetic construct
PVPAAGRVY

SEQ ID NO: 8127 - protein, 9 aa, synthetic construct
PVPAAGKLH

SEQ ID NO: 8128 - protein, 9 aa, synthetic construct
PLNGTAHVF

SEQ ID NO: 8129 - protein, 9 aa, synthetic construct
PVPATVHVK

SEQ ID NO: 8130 - protein, 9 aa, synthetic construct
PVPATVKLF

SEQ ID NO: 8131 - protein, 9 aa, synthetic construct
PVPATAHLF

SEQ ID NO: 8132 - protein, 9 aa, synthetic construct
PLNGTARLY

SEQ ID NO: 8133 - protein, 9 aa, synthetic construct
PVPASLKVF

SEQ ID NO: 8134 - protein, 9 aa, synthetic construct
PVPASIKVF

SEQ ID NO: 8135 - protein, 9 aa, synthetic construct
PLNGTARLH

SEQ ID NO: 8136 - protein, 9 aa, synthetic construct
PVPAVVHLH

SEQ ID NO: 8137 - protein, 9 aa, synthetic construct
PVPAVIHLH

SEQ ID NO: 8138 - protein, 9 aa, synthetic construct
PVPAVIHVY

SEQ ID NO: 8139 - protein, 9 aa, synthetic construct
PVPAGAHVF

SEQ ID NO: 8140 - protein, 9 aa, synthetic construct
PVPAGARVK

SEQ ID NO: 8141 - protein, 9 aa, synthetic construct
PVPAGAKLY

SEQ ID NO: 8142 - protein, 9 aa, synthetic construct
PVPAGIRLH

SEQ ID NO: 8143 - protein, 9 aa, synthetic construct
PINGAVHLR

SEQ ID NO: 8144 - protein, 9 aa, synthetic construct
PINGAVHLH

SEQ ID NO: 8145 - protein, 9 aa, synthetic construct
PINGAVHLF

SEQ ID NO: 8146 - protein, 9 aa, synthetic construct
PINGAVHVR

SEQ ID NO: 8147 - protein, 9 aa, synthetic construct
PINGAVHVK

SEQ ID NO: 8148 - protein, 9 aa, synthetic construct
PINGAVKLY

SEQ ID NO: 8149 - protein, 9 aa, synthetic construct
PINGAVKLH

SEQ ID NO: 8150 - protein, 9 aa, synthetic construct
PINGALHLR

SEQ ID NO: 8151 - protein, 9 aa, synthetic construct
PINGALHLK

SEQ ID NO: 8152 - protein, 9 aa, synthetic construct
PINGALHVK

SEQ ID NO: 8153 - protein, 9 aa, synthetic construct
PINGALKVF

SEQ ID NO: 8154 - protein, 9 aa, synthetic construct
PINGAAKLF

SEQ ID NO: 8155 - protein, 9 aa, synthetic construct
PINGAAKVY

SEQ ID NO: 8156 - protein, 9 aa, synthetic construct
PINGAIHVK

SEQ ID NO: 8157 - protein, 9 aa, synthetic construct
PINGAIKVH

SEQ ID NO: 8158 - protein, 9 aa, synthetic construct
PINGTVKLY

SEQ ID NO: 8159 - protein, 9 aa, synthetic construct
PINGTVKLK

SEQ ID NO: 8160 - protein, 9 aa, synthetic construct
PINGTVKLF

SEQ ID NO: 8161 - protein, 9 aa, synthetic construct
PINGTLHLR

SEQ ID NO: 8162 - protein, 9 aa, synthetic construct
PINGTLHLH

SEQ ID NO: 8163 - protein, 9 aa, synthetic construct
PINGTLHLK

SEQ ID NO: 8164 - protein, 9 aa, synthetic construct
PINGTLKLK

SEQ ID NO: 8165 - protein, 9 aa, synthetic construct
PINGTLKLF

SEQ ID NO: 8166 - protein, 9 aa, synthetic construct
PINGTAHLR

SEQ ID NO: 8167 - protein, 9 aa, synthetic construct
PINGTGHLF

SEQ ID NO: 8168 - protein, 9 aa, synthetic construct
PINGTGRLY

SEQ ID NO: 8169 - protein, 9 aa, synthetic construct
PINGTGKLH

SEQ ID NO: 8170 - protein, 9 aa, synthetic construct
PINGTGKVF

SEQ ID NO: 8171 - protein, 9 aa, synthetic construct
PINGSVHLR

SEQ ID NO: 8172 - protein, 9 aa, synthetic construct
PINGSLHLR

SEQ ID NO: 8173 - protein, 9 aa, synthetic construct
PINGSLHLH

SEQ ID NO: 8174 - protein, 9 aa, synthetic construct
PINGSLHVR

SEQ ID NO: 8175 - protein, 9 aa, synthetic construct
PINGSLHVK

SEQ ID NO: 8176 - protein, 9 aa, synthetic construct
PINGSARVF

SEQ ID NO: 8177 - protein, 9 aa, synthetic construct
PINGVVHLH

SEQ ID NO: 8178 - protein, 9 aa, synthetic construct
PINGVLHLK

SEQ ID NO: 8179 - protein, 9 aa, synthetic construct
PLNGAVKLK

SEQ ID NO: 8180 - protein, 9 aa, synthetic construct
PINGVAHLR

SEQ ID NO: 8181 - protein, 9 aa, synthetic construct
PINGVAHLH

SEQ ID NO: 8182 - protein, 9 aa, synthetic construct
PINGVARLH

SEQ ID NO: 8183 - protein, 9 aa, synthetic construct
PINGVAKLF

SEQ ID NO: 8184 - protein, 9 aa, synthetic construct
PINGVAKVH

SEQ ID NO: 8185 - protein, 9 aa, synthetic construct
PINGVAKVF

SEQ ID NO: 8186 - protein, 9 aa, synthetic construct
PINGVIKLH

SEQ ID NO: 8187 - protein, 9 aa, synthetic construct
PINGVGHLY

SEQ ID NO: 8188 - protein, 9 aa, synthetic construct
PINGVGHVH

SEQ ID NO: 8189 - protein, 9 aa, synthetic construct
PINGVGKLH

SEQ ID NO: 8190 - protein, 9 aa, synthetic construct
PINGVGKLF

SEQ ID NO: 8191 - protein, 9 aa, synthetic construct
PINGGVHLY

SEQ ID NO: 8192 - protein, 9 aa, synthetic construct
PINGGVHLH

SEQ ID NO: 8193 - protein, 9 aa, synthetic construct
PINGGVHLK

SEQ ID NO: 8194 - protein, 9 aa, synthetic construct
PINGGVHVR

SEQ ID NO: 8195 - protein, 9 aa, synthetic construct
PINGGVHVF

SEQ ID NO: 8196 - protein, 9 aa, synthetic construct
PINGGVKLH

SEQ ID NO: 8197 - protein, 9 aa, synthetic construct
PINGGVKLK

SEQ ID NO: 8198 - protein, 9 aa, synthetic construct
PINGGVKLF

SEQ ID NO: 8199 - protein, 9 aa, synthetic construct
PINGGLHLR

SEQ ID NO: 8200 - protein, 9 aa, synthetic construct
PLQAAAHLF

SEQ ID NO: 8201 - protein, 9 aa, synthetic construct
PINGGAHVK

SEQ ID NO: 8202 - protein, 9 aa, synthetic construct
PINGGAHVF

SEQ ID NO: 8203 - protein, 9 aa, synthetic construct
PINGGARLH

SEQ ID NO: 8204 - protein, 9 aa, synthetic construct
PINGGARVY

SEQ ID NO: 8205 - protein, 9 aa, synthetic construct
PLQAAAHVK

SEQ ID NO: 8206 - protein, 9 aa, synthetic construct
PINGGAKLY

SEQ ID NO: 8207 - protein, 9 aa, synthetic construct
PINGGIHVR

SEQ ID NO: 8208 - protein, 9 aa, synthetic construct
PINGGGHLY

SEQ ID NO: 8209 - protein, 9 aa, synthetic construct
PINGGGHLH

SEQ ID NO: 8210 - protein, 9 aa, synthetic construct
PINGGGKVF

SEQ ID NO: 8211 - protein, 9 aa, synthetic construct
PINAAVHLR

SEQ ID NO: 8212 - protein, 9 aa, synthetic construct
PINAAVRVH

SEQ ID NO: 8213 - protein, 9 aa, synthetic construct
PINAAVKLY

SEQ ID NO: 8214 - protein, 9 aa, synthetic construct
PINAAAHLH

SEQ ID NO: 8215 - protein, 9 aa, synthetic construct
PINAAAHLF

SEQ ID NO: 8216 - protein, 9 aa, synthetic construct
PINAAARLF

SEQ ID NO: 8217 - protein, 9 aa, synthetic construct
PINAAARVY

SEQ ID NO: 8218 - protein, 9 aa, synthetic construct
PINAAARVR

SEQ ID NO: 8219 - protein, 9 aa, synthetic construct
PINAAARVH

SEQ ID NO: 8220 - protein, 9 aa, synthetic construct
PINAAAKLH

SEQ ID NO: 8221 - protein, 9 aa, synthetic construct
PINAAGHVH

SEQ ID NO: 8222 - protein, 9 aa, synthetic construct
PINAAGRVF

SEQ ID NO: 8223 - protein, 9 aa, synthetic construct
PINAAGKVF

SEQ ID NO: 8224 - protein, 9 aa, synthetic construct
PLNGTAKLF

SEQ ID NO: 8225 - protein, 9 aa, synthetic construct
PINATVKLY

SEQ ID NO: 8226 - protein, 9 aa, synthetic construct
PINATLHLR

SEQ ID NO: 8227 - protein, 9 aa, synthetic construct
PINATLHVK

SEQ ID NO: 8228 - protein, 9 aa, synthetic construct
PINATAHLF

SEQ ID NO: 8229 - protein, 9 aa, synthetic construct
PINATAHVY

SEQ ID NO: 8230 - protein, 9 aa, synthetic construct
PINATARLH

SEQ ID NO: 8231 - protein, 9 aa, synthetic construct
PINATARVF

SEQ ID NO: 8232 - protein, 9 aa, synthetic construct
PINATAKLF

SEQ ID NO: 8233 - protein, 9 aa, synthetic construct
PINATAKVH

SEQ ID NO: 8234 - protein, 9 aa, synthetic construct
PINATGHLF

SEQ ID NO: 8235 - protein, 9 aa, synthetic construct
PINATGHVH

SEQ ID NO: 8236 - protein, 9 aa, synthetic construct
PINATGRLF

SEQ ID NO: 8237 - protein, 9 aa, synthetic construct
PINATGRVR

SEQ ID NO: 8238 - protein, 9 aa, synthetic construct
PINATGKLH

SEQ ID NO: 8239 - protein, 9 aa, synthetic construct
PINASAKLH

SEQ ID NO: 8240 - protein, 9 aa, synthetic construct
PINASIKLH

SEQ ID NO: 8241 - protein, 9 aa, synthetic construct
PINASGHLH

SEQ ID NO: 8242 - protein, 9 aa, synthetic construct
PINAVAKLH

SEQ ID NO: 8243 - protein, 9 aa, synthetic construct
PINAVAKVF

SEQ ID NO: 8244 - protein, 9 aa, synthetic construct
PINAVGHVY

SEQ ID NO: 8245 - protein, 9 aa, synthetic construct
PINAVGHVH

SEQ ID NO: 8246 - protein, 9 aa, synthetic construct
PINAGVHLR

SEQ ID NO: 8247 - protein, 9 aa, synthetic construct
PLQAAGKLH

SEQ ID NO: 8248 - protein, 9 aa, synthetic construct
PINAGARVF

SEQ ID NO: 8249 - protein, 9 aa, synthetic construct
PINAGIHLY

SEQ ID NO: 8250 - protein, 9 aa, synthetic construct
PINAGIHLK

SEQ ID NO: 8251 - protein, 9 aa, synthetic construct
PINAGIRLY

SEQ ID NO: 8252 - protein, 9 aa, synthetic construct
PINAGGHVF

SEQ ID NO: 8253 - protein, 9 aa, synthetic construct
PLNGAVKLF

SEQ ID NO: 8254 - protein, 9 aa, synthetic construct
PIQGAVKLY

SEQ ID NO: 8255 - protein, 9 aa, synthetic construct
PIQGTLHVH

SEQ ID NO: 8256 - protein, 9 aa, synthetic construct
PIQGTAHLK

SEQ ID NO: 8257 - protein, 9 aa, synthetic construct
PIQGTAKLH

SEQ ID NO: 8258 - protein, 9 aa, synthetic construct
PIQGTAKLK

SEQ ID NO: 8259 - protein, 9 aa, synthetic construct
PIQGSVHLR

SEQ ID NO: 8260 - protein, 9 aa, synthetic construct
PIQGSVHLK

SEQ ID NO: 8261 - protein, 9 aa, synthetic construct
PIQGSLHLH

SEQ ID NO: 8262 - protein, 9 aa, synthetic construct
PIQGSAHLF

SEQ ID NO: 8263 - protein, 9 aa, synthetic construct
PIQGSIKLY

SEQ ID NO: 8264 - protein, 9 aa, synthetic construct
PIQGVVHVR

SEQ ID NO: 8265 - protein, 9 aa, synthetic construct
PIQGVVHVF

SEQ ID NO: 8266 - protein, 9 aa, synthetic construct
PIQGVAHLF

SEQ ID NO: 8267 - protein, 9 aa, synthetic construct
PIQGVAHVK

SEQ ID NO: 8268 - protein, 9 aa, synthetic construct
PIQGVIHLH

SEQ ID NO: 8269 - protein, 9 aa, synthetic construct
PIQGVIKLH

SEQ ID NO: 8270 - protein, 9 aa, synthetic construct
PIQGVGHVH

SEQ ID NO: 8271 - protein, 9 aa, synthetic construct
PLQATAHVR

SEQ ID NO: 8272 - protein, 9 aa, synthetic construct
PIQGGARVY

SEQ ID NO: 8273 - protein, 9 aa, synthetic construct
PIQGGIHLY

SEQ ID NO: 8274 - protein, 9 aa, synthetic construct
PIQGGIHVY

SEQ ID NO: 8275 - protein, 9 aa, synthetic construct
PIQGGIRLY

SEQ ID NO: 8276 - protein, 9 aa, synthetic construct
PIQGGIRLF

SEQ ID NO: 8277 - protein, 9 aa, synthetic construct
PIQGGIKLH

SEQ ID NO: 8278 - protein, 9 aa, synthetic construct
PIQGGIKLF

SEQ ID NO: 8279 - protein, 9 aa, synthetic construct
PIQGGIKVY

SEQ ID NO: 8280 - protein, 9 aa, synthetic construct
PIQAAVKLF

SEQ ID NO: 8281 - protein, 9 aa, synthetic construct
PIQAAAHLH

SEQ ID NO: 8282 - protein, 9 aa, synthetic construct
PIQAAAHLF

SEQ ID NO: 8283 - protein, 9 aa, synthetic construct
PIQAAAHVK

SEQ ID NO: 8284 - protein, 9 aa, synthetic construct
PIQAVVHVF

SEQ ID NO: 8285 - protein, 9 aa, synthetic construct
PIQAVIKLY

SEQ ID NO: 8286 - protein, 9 aa, synthetic construct
PIQAVIKLR

SEQ ID NO: 8287 - protein, 9 aa, synthetic construct
PIQAGAKVR

SEQ ID NO: 8288 - protein, 9 aa, synthetic construct
PIQAGIRLF

SEQ ID NO: 8289 - protein, 9 aa, synthetic construct
PIQAGIKLY

SEQ ID NO: 8290 - protein, 9 aa, synthetic construct
PIPGAGKVF

SEQ ID NO: 8291 - protein, 9 aa, synthetic construct
PIPGTLHVF

SEQ ID NO: 8292 - protein, 9 aa, synthetic construct
PIPGTIHVY

SEQ ID NO: 8293 - protein, 9 aa, synthetic construct
PIPGTGKLH

SEQ ID NO: 8294 - protein, 9 aa, synthetic construct
PIPGSLHVH

SEQ ID NO: 8295 - protein, 9 aa, synthetic construct
PIPGSIKLH

SEQ ID NO: 8296 - protein, 9 aa, synthetic construct
PIPGVLHLK

SEQ ID NO: 8297 - protein, 9 aa, synthetic construct
PIPGVAKLF

SEQ ID NO: 8298 - protein, 9 aa, synthetic construct
PIPAAAHLH

SEQ ID NO: 8299 - protein, 9 aa, synthetic construct
PIPAAAHVK

SEQ ID NO: 8300 - protein, 9 aa, synthetic construct
PIPAAARLY

SEQ ID NO: 8301 - protein, 9 aa, synthetic construct
PIPAAIRLF

SEQ ID NO: 8302 - protein, 9 aa, synthetic construct
PIPAAGHVH

SEQ ID NO: 8303 - protein, 9 aa, synthetic construct
PIPAAGKLH

SEQ ID NO: 8304 - protein, 9 aa, synthetic construct
PIPATVKLY

SEQ ID NO: 8305 - protein, 9 aa, synthetic construct
PIPATVKLF

SEQ ID NO: 8306 - protein, 9 aa, synthetic construct
PIPATAHLR

SEQ ID NO: 8307 - protein, 9 aa, synthetic construct
PIPATAHLK

SEQ ID NO: 8308 - protein, 9 aa, synthetic construct
PIPATAHVK

SEQ ID NO: 8309 - protein, 9 aa, synthetic construct
PIPATAKLH

SEQ ID NO: 8310 - protein, 9 aa, synthetic construct
PIPATIKLH

SEQ ID NO: 8311 - protein, 9 aa, synthetic construct
PIPATGRVR

SEQ ID NO: 8312 - protein, 9 aa, synthetic construct
PIPASVRLY

SEQ ID NO: 8313 - protein, 9 aa, synthetic construct
PIPASAHLH

SEQ ID NO: 8314 - protein, 9 aa, synthetic construct
PIPASAHLK

SEQ ID NO: 8315 - protein, 9 aa, synthetic construct
PIPASAKLH

SEQ ID NO: 8316 - protein, 9 aa, synthetic construct
PIPASIHLY

SEQ ID NO: 8317 - protein, 9 aa, synthetic construct
PIPASIHVY

SEQ ID NO: 8318 - protein, 9 aa, synthetic construct
PIPASIHVK

SEQ ID NO: 8319 - protein, 9 aa, synthetic construct
PIPASIRLH

SEQ ID NO: 8320 - protein, 9 aa, synthetic construct
PIPASIRLF

SEQ ID NO: 8321 - protein, 9 aa, synthetic construct
PIPASIKLY

SEQ ID NO: 8322 - protein, 9 aa, synthetic construct
PIPASIKLF

SEQ ID NO: 8323 - protein, 9 aa, synthetic construct
PIPASGRVR

SEQ ID NO: 8324 - protein, 9 aa, synthetic construct
PLNGTIKVH

SEQ ID NO: 8325 - protein, 9 aa, synthetic construct
PIPAVVKVK

SEQ ID NO: 8326 - protein, 9 aa, synthetic construct
PIPAVIKLH

SEQ ID NO: 8327 - protein, 9 aa, synthetic construct
PIPAGAHLH

SEQ ID NO: 8328 - protein, 9 aa, synthetic construct
PIPAGAHLF

SEQ ID NO: 8329 - protein, 9 aa, synthetic construct
PIPAGIHLR

SEQ ID NO: 8330 - protein, 9 aa, synthetic construct
PIPAGIHLK

SEQ ID NO: 8331 - protein, 9 aa, synthetic construct
PIPAGIHLF

SEQ ID NO: 8332 - protein, 9 aa, synthetic construct
PIPAGIHVF

SEQ ID NO: 8333 - protein, 9 aa, synthetic construct
PIPAGIRLH

SEQ ID NO: 8334 - protein, 9 aa, synthetic construct
PIPAGIRLF

SEQ ID NO: 8335 - protein, 9 aa, synthetic construct
PIPAGIKLH

SEQ ID NO: 8336 - protein, 9 aa, synthetic construct
PIPAGIKLF

SEQ ID NO: 8337 - protein, 9 aa, synthetic construct
PIPAGGHVH

SEQ ID NO: 8338 - protein, 9 aa, synthetic construct
PLNGAVKVH

SEQ ID NO: 8339 - protein, 9 aa, synthetic construct
PLNGTGHLY

SEQ ID NO: 8340 - protein, 9 aa, synthetic construct
GLNGAVRVH

SEQ ID NO: 8341 - protein, 9 aa, synthetic construct
PLNGTGHLR

SEQ ID NO: 8342 - protein, 9 aa, synthetic construct
GLNGAGKVF

SEQ ID NO: 8343 - protein, 9 aa, synthetic construct
GLNGTLHLR

SEQ ID NO: 8344 - protein, 9 aa, synthetic construct
PLNGTGHLH

SEQ ID NO: 8345 - protein, 9 aa, synthetic construct
GLNGTAHVH

SEQ ID NO: 8346 - protein, 9 aa, synthetic construct
GLNGTGHLF

SEQ ID NO: 8347 - protein, 9 aa, synthetic construct
PLNGTGHLF

SEQ ID NO: 8348 - protein, 9 aa, synthetic construct
GLNGGLKLH

SEQ ID NO: 8349 - protein, 9 aa, synthetic construct
GLNGGAHLK

SEQ ID NO: 8350 - protein, 9 aa, synthetic construct
GLNGGARLH

SEQ ID NO: 8351 - protein, 9 aa, synthetic construct
GLNGGIHLY

SEQ ID NO: 8352 - protein, 9 aa, synthetic construct
GLNGGIHVR

SEQ ID NO: 8353 - protein, 9 aa, synthetic construct
GLNAALHLR

SEQ ID NO: 8354 - protein, 9 aa, synthetic construct
GLNAAAHLF

SEQ ID NO: 8355 - protein, 9 aa, synthetic construct
GLNAAIHLY

SEQ ID NO: 8356 - protein, 9 aa, synthetic construct
GLNAAIHLH

SEQ ID NO: 8357 - protein, 9 aa, synthetic construct
GLNAAGRLF

SEQ ID NO: 8358 - protein, 9 aa, synthetic construct
GLNAAGKLY

SEQ ID NO: 8359 - protein, 9 aa, synthetic construct
GLNATVHLY

SEQ ID NO: 8360 - protein, 9 aa, synthetic construct
GLNATVHLR

SEQ ID NO: 8361 - protein, 9 aa, synthetic construct
GLNATLHLY

SEQ ID NO: 8362 - protein, 9 aa, synthetic construct
GLNATLHLH

SEQ ID NO: 8363 - protein, 9 aa, synthetic construct
GLNATLHLK

SEQ ID NO: 8364 - protein, 9 aa, synthetic construct
GLNATLHLF

SEQ ID NO: 8365 - protein, 9 aa, synthetic construct
GLNATLHVR

SEQ ID NO: 8366 - protein, 9 aa, synthetic construct
GLNATLHVK

SEQ ID NO: 8367 - protein, 9 aa, synthetic construct
GLNATAHLH

SEQ ID NO: 8368 - protein, 9 aa, synthetic construct
GLNATAKLH

SEQ ID NO: 8369 - protein, 9 aa, synthetic construct
GLNATGHLF

SEQ ID NO: 8370 - protein, 9 aa, synthetic construct
GLNASVRVF

SEQ ID NO: 8371 - protein, 9 aa, synthetic construct
GLNASLHLH

SEQ ID NO: 8372 - protein, 9 aa, synthetic construct
GLNASIKLY

SEQ ID NO: 8373 - protein, 9 aa, synthetic construct
GLNASIKLH

SEQ ID NO: 8374 - protein, 9 aa, synthetic construct
GLNASIKVF

SEQ ID NO: 8375 - protein, 9 aa, synthetic construct
GLNAVAHVH

SEQ ID NO: 8376 - protein, 9 aa, synthetic construct
PLQAVGHVH

SEQ ID NO: 8377 - protein, 9 aa, synthetic construct
GLNAVAKVF

SEQ ID NO: 8378 - protein, 9 aa, synthetic construct
GLNAVGHVY

SEQ ID NO: 8379 - protein, 9 aa, synthetic construct
PLNGTGRLF

SEQ ID NO: 8380 - protein, 9 aa, synthetic construct
GLNAGARVY

SEQ ID NO: 8381 - protein, 9 aa, synthetic construct
GLNAGARVF

SEQ ID NO: 8382 - protein, 9 aa, synthetic construct
GLNAGIHLR

SEQ ID NO: 8383 - protein, 9 aa, synthetic construct
GLNAGIHLH

SEQ ID NO: 8384 - protein, 9 aa, synthetic construct
GLNAGIHLF

SEQ ID NO: 8385 - protein, 9 aa, synthetic construct
GLNAGIHVY

SEQ ID NO: 8386 - protein, 9 aa, synthetic construct
GLNAGIHVR

SEQ ID NO: 8387 - protein, 9 aa, synthetic construct
GLNAGIHVH

SEQ ID NO: 8388 - protein, 9 aa, synthetic construct
GLNAGIRLF

SEQ ID NO: 8389 - protein, 9 aa, synthetic construct
GLNAGIKLY

SEQ ID NO: 8390 - protein, 9 aa, synthetic construct
GLNAGIKLH

SEQ ID NO: 8391 - protein, 9 aa, synthetic construct
GLNAGGRLF

SEQ ID NO: 8392 - protein, 9 aa, synthetic construct
PLNGTGRVY

SEQ ID NO: 8393 - protein, 9 aa, synthetic construct
GLQGAAHLF

SEQ ID NO: 8394 - protein, 9 aa, synthetic construct
PLNGTGRVR

SEQ ID NO: 8395 - protein, 9 aa, synthetic construct
GLQGAGHLH

SEQ ID NO: 8396 - protein, 9 aa, synthetic construct
PLQAGVKVY

SEQ ID NO: 8397 - protein, 9 aa, synthetic construct
GLQGTGHVF

SEQ ID NO: 8398 - protein, 9 aa, synthetic construct
PLNGTGRVF

SEQ ID NO: 8399 - protein, 9 aa, synthetic construct
GLQGVLHLY

SEQ ID NO: 8400 - protein, 9 aa, synthetic construct
GLQGVLHVR

SEQ ID NO: 8401 - protein, 9 aa, synthetic construct
PLNGTGKLY

SEQ ID NO: 8402 - protein, 9 aa, synthetic construct
PLNGTGKLH

SEQ ID NO: 8403 - protein, 9 aa, synthetic construct
GLQAAVHLR

SEQ ID NO: 8404 - protein, 9 aa, synthetic construct
GLQAAAHLY

SEQ ID NO: 8405 - protein, 9 aa, synthetic construct
GLQAAAHLR

SEQ ID NO: 8406 - protein, 9 aa, synthetic construct
GLQAAAHLH

SEQ ID NO: 8407 - protein, 9 aa, synthetic construct
GLQAAAHLK

SEQ ID NO: 8408 - protein, 9 aa, synthetic construct
GLQAAAHVY

SEQ ID NO: 8409 - protein, 9 aa, synthetic construct
GLQAAAHVH

SEQ ID NO: 8410 - protein, 9 aa, synthetic construct
GLQAAAHVF

SEQ ID NO: 8411 - protein, 9 aa, synthetic construct
GLQAAGHLF

SEQ ID NO: 8412 - protein, 9 aa, synthetic construct
GLQAAGHVH

SEQ ID NO: 8413 - protein, 9 aa, synthetic construct
GLQAAGRLF

SEQ ID NO: 8414 - protein, 9 aa, synthetic construct
GLQAAGRVR

SEQ ID NO: 8415 - protein, 9 aa, synthetic construct
GLQAAGKVF

SEQ ID NO: 8416 - protein, 9 aa, synthetic construct
PLNGTGKLF

SEQ ID NO: 8417 - protein, 9 aa, synthetic construct
GLQATAHLF

SEQ ID NO: 8418 - protein, 9 aa, synthetic construct
GLQATGHLF

SEQ ID NO: 8419 - protein, 9 aa, synthetic construct
GLQAVVHVF

SEQ ID NO: 8420 - protein, 9 aa, synthetic construct
PLNGTGKVF

SEQ ID NO: 8421 - protein, 9 aa, synthetic construct
GLQAGAHLF

SEQ ID NO: 8422 - protein, 9 aa, synthetic construct
GLQAGIHLY

SEQ ID NO: 8423 - protein, 9 aa, synthetic construct
GLQAGIHVY

SEQ ID NO: 8424 - protein, 9 aa, synthetic construct
GLQAGIRLF

SEQ ID NO: 8425 - protein, 9 aa, synthetic construct
PLNGALHLY

SEQ ID NO: 8426 - protein, 9 aa, synthetic construct
PLPGAVHLY

SEQ ID NO: 8427 - protein, 9 aa, synthetic construct
PLPGAVHLR

SEQ ID NO: 8428 - protein, 9 aa, synthetic construct
PLNGSVHLR

SEQ ID NO: 8429 - protein, 9 aa, synthetic construct
PLPGAVRVH

SEQ ID NO: 8430 - protein, 9 aa, synthetic construct
PLPGAVKLY

SEQ ID NO: 8431 - protein, 9 aa, synthetic construct
PLPGAVKLH

SEQ ID NO: 8432 - protein, 9 aa, synthetic construct
GLPGSLHVK

SEQ ID NO: 8433 - protein, 9 aa, synthetic construct
PLPGALKVY

SEQ ID NO: 8434 - protein, 9 aa, synthetic construct
PLPGALKVH

SEQ ID NO: 8435 - protein, 9 aa, synthetic construct
PLPGAAHLK

SEQ ID NO: 8436 - protein, 9 aa, synthetic construct
PLPGAAHLF

SEQ ID NO: 8437 - protein, 9 aa, synthetic construct
PLPGAARVF

SEQ ID NO: 8438 - protein, 9 aa, synthetic construct
PLPGAAKLH

SEQ ID NO: 8439 - protein, 9 aa, synthetic construct
PLPGAAKVF

SEQ ID NO: 8440 - protein, 9 aa, synthetic construct
PLNGSVHVF

SEQ ID NO: 8441 - protein, 9 aa, synthetic construct
PLNGALHLR

SEQ ID NO: 8442 - protein, 9 aa, synthetic construct
GLPASAHLF

SEQ ID NO: 8443 - protein, 9 aa, synthetic construct
GLPASIKVF

SEQ ID NO: 8444 - protein, 9 aa, synthetic construct
PLPGAGHLF

SEQ ID NO: 8445 - protein, 9 aa, synthetic construct
PLPGAGHVY

SEQ ID NO: 8446 - protein, 9 aa, synthetic construct
PLPGAGHVH

SEQ ID NO: 8447 - protein, 9 aa, synthetic construct
GLPAVIHVH

SEQ ID NO: 8448 - protein, 9 aa, synthetic construct
PLPGAGRLF

SEQ ID NO: 8449 - protein, 9 aa, synthetic construct
PLPGAGRVR

SEQ ID NO: 8450 - protein, 9 aa, synthetic construct
PLPGAGKLY

SEQ ID NO: 8451 - protein, 9 aa, synthetic construct
PLPGAGKLF

SEQ ID NO: 8452 - protein, 9 aa, synthetic construct
PLPGAGKVY

SEQ ID NO: 8453 - protein, 9 aa, synthetic construct
PLPGAGKVR

SEQ ID NO: 8454 - protein, 9 aa, synthetic construct
PLPGAGKVH

SEQ ID NO: 8455 - protein, 9 aa, synthetic construct
PLPGTVHLY

SEQ ID NO: 8456 - protein, 9 aa, synthetic construct
GTNGAVHLY

SEQ ID NO: 8457 - protein, 9 aa, synthetic construct
GTNGAVHLR

SEQ ID NO: 8458 - protein, 9 aa, synthetic construct
GTNGAVRVH

SEQ ID NO: 8459 - protein, 9 aa, synthetic construct
GTNGAVKLY

SEQ ID NO: 8460 - protein, 9 aa, synthetic construct
GTNGAARVY

SEQ ID NO: 8461 - protein, 9 aa, synthetic construct
GTNGAARVF

SEQ ID NO: 8462 - protein, 9 aa, synthetic construct
GTNGAAKLF

SEQ ID NO: 8463 - protein, 9 aa, synthetic construct
GTNGAGHLH

SEQ ID NO: 8464 - protein, 9 aa, synthetic construct
GTNGAGKVF

SEQ ID NO: 8465 - protein, 9 aa, synthetic construct
GTNGTLHVK

SEQ ID NO: 8466 - protein, 9 aa, synthetic construct
PLNGSVRVH

SEQ ID NO: 8467 - protein, 9 aa, synthetic construct
GTNGTLKVH

SEQ ID NO: 8468 - protein, 9 aa, synthetic construct
GTNGTAHLR

SEQ ID NO: 8469 - protein, 9 aa, synthetic construct
GTNGTAHLK

SEQ ID NO: 8470 - protein, 9 aa, synthetic construct
GTNGTAHVY

SEQ ID NO: 8471 - protein, 9 aa, synthetic construct
GTNGSVHLY

SEQ ID NO: 8472 - protein, 9 aa, synthetic construct
PLPGTLHLR

SEQ ID NO: 8473 - protein, 9 aa, synthetic construct
GTNGSAHLF

SEQ ID NO: 8474 - protein, 9 aa, synthetic construct
GTNGSARVY

SEQ ID NO: 8475 - protein, 9 aa, synthetic construct
PLPGTLHVK

SEQ ID NO: 8476 - protein, 9 aa, synthetic construct
GTNGVVHLH

SEQ ID NO: 8477 - protein, 9 aa, synthetic construct
GTNGVLHLK

SEQ ID NO: 8478 - protein, 9 aa, synthetic construct
GTNGVLRVH

SEQ ID NO: 8479 - protein, 9 aa, synthetic construct
GTNGVAHLR

SEQ ID NO: 8480 - protein, 9 aa, synthetic construct
GTNGVAHLH

SEQ ID NO: 8481 - protein, 9 aa, synthetic construct
GTNGVAHVH

SEQ ID NO: 8482 - protein, 9 aa, synthetic construct
GTNGVAHVK

SEQ ID NO: 8483 - protein, 9 aa, synthetic construct
GTNGVAHVF

SEQ ID NO: 8484 - protein, 9 aa, synthetic construct
GTNGVAKLH

SEQ ID NO: 8485 - protein, 9 aa, synthetic construct
GTNGVIHVK

SEQ ID NO: 8486 - protein, 9 aa, synthetic construct
GTNGVIKLH

SEQ ID NO: 8487 - protein, 9 aa, synthetic construct
GTNGVGHLY

SEQ ID NO: 8488 - protein, 9 aa, synthetic construct
GTNGVGHLR

SEQ ID NO: 8489 - protein, 9 aa, synthetic construct
GTNGVGHLH

SEQ ID NO: 8490 - protein, 9 aa, synthetic construct
GTNGVGHVY

SEQ ID NO: 8491 - protein, 9 aa, synthetic construct
GTNGVGHVK

SEQ ID NO: 8492 - protein, 9 aa, synthetic construct
GTNGVGHVF

SEQ ID NO: 8493 - protein, 9 aa, synthetic construct
GTNGVGKLH

SEQ ID NO: 8494 - protein, 9 aa, synthetic construct
GTNGVGKLF

SEQ ID NO: 8495 - protein, 9 aa, synthetic construct
GTNGVGKVF

SEQ ID NO: 8496 - protein, 9 aa, synthetic construct
GTNGGVRVH

SEQ ID NO: 8497 - protein, 9 aa, synthetic construct
GTNGGAHLK

SEQ ID NO: 8498 - protein, 9 aa, synthetic construct
GTNGGAHLF

SEQ ID NO: 8499 - protein, 9 aa, synthetic construct
GTNGGAHVK

SEQ ID NO: 8500 - protein, 9 aa, synthetic construct
GTNGGARLY

SEQ ID NO: 8501 - protein, 9 aa, synthetic construct
GTNGGARLH

SEQ ID NO: 8502 - protein, 9 aa, synthetic construct
GTNGGARLF

SEQ ID NO: 8503 - protein, 9 aa, synthetic construct
GTNGGARVH

SEQ ID NO: 8504 - protein, 9 aa, synthetic construct
GTNGGAKLH

SEQ ID NO: 8505 - protein, 9 aa, synthetic construct
GTNGGAKVY

SEQ ID NO: 8506 - protein, 9 aa, synthetic construct
GTNGGIHLY

SEQ ID NO: 8507 - protein, 9 aa, synthetic construct
GTNGGIHVR

SEQ ID NO: 8508 - protein, 9 aa, synthetic construct
GTNGGIRLF

SEQ ID NO: 8509 - protein, 9 aa, synthetic construct
GTNGGIKLY

SEQ ID NO: 8510 - protein, 9 aa, synthetic construct
GTNGGGRVY

SEQ ID NO: 8511 - protein, 9 aa, synthetic construct
GTNGGGKVF

SEQ ID NO: 8512 - protein, 9 aa, synthetic construct
PLNGSVKLK

SEQ ID NO: 8513 - protein, 9 aa, synthetic construct
GTNAAAHLK

SEQ ID NO: 8514 - protein, 9 aa, synthetic construct
GTNAAAHVY

SEQ ID NO: 8515 - protein, 9 aa, synthetic construct
PLPGTAKLH

SEQ ID NO: 8516 - protein, 9 aa, synthetic construct
GTNAAARVF

SEQ ID NO: 8517 - protein, 9 aa, synthetic construct
GTNAAGRLF

SEQ ID NO: 8518 - protein, 9 aa, synthetic construct
GTNATVRVY

SEQ ID NO: 8519 - protein, 9 aa, synthetic construct
GTNATVKLY

SEQ ID NO: 8520 - protein, 9 aa, synthetic construct
GTNATVKLF

SEQ ID NO: 8521 - protein, 9 aa, synthetic construct
GTNATAHLY

SEQ ID NO: 8522 - protein, 9 aa, synthetic construct
GTNATAHLR

SEQ ID NO: 8523 - protein, 9 aa, synthetic construct
GTNATAHLH

SEQ ID NO: 8524 - protein, 9 aa, synthetic construct
GTNATAHVY

SEQ ID NO: 8525 - protein, 9 aa, synthetic construct
GTNATAHVK

SEQ ID NO: 8526 - protein, 9 aa, synthetic construct
GTNATAHVF

SEQ ID NO: 8527 - protein, 9 aa, synthetic construct
GTNATAKLH

SEQ ID NO: 8528 - protein, 9 aa, synthetic construct
GTNATGHLK

SEQ ID NO: 8529 - protein, 9 aa, synthetic construct
GTNATGKLH

SEQ ID NO: 8530 - protein, 9 aa, synthetic construct
GTNASAHLK

SEQ ID NO: 8531 - protein, 9 aa, synthetic construct
GTNASIKLH

SEQ ID NO: 8532 - protein, 9 aa, synthetic construct
GTNASGHLY

SEQ ID NO: 8533 - protein, 9 aa, synthetic construct
GTNASGHLH

SEQ ID NO: 8534 - protein, 9 aa, synthetic construct
PLPGTGHLF

SEQ ID NO: 8535 - protein, 9 aa, synthetic construct
GTNAVLKLH

SEQ ID NO: 8536 - protein, 9 aa, synthetic construct
GTNAVAKLH

SEQ ID NO: 8537 - protein, 9 aa, synthetic construct
GTNAVAKVF

SEQ ID NO: 8538 - protein, 9 aa, synthetic construct
GTNAVGHVH

SEQ ID NO: 8539 - protein, 9 aa, synthetic construct
PLPGTGKLH

SEQ ID NO: 8540 - protein, 9 aa, synthetic construct
GTNAGARVY

SEQ ID NO: 8541 - protein, 9 aa, synthetic construct
GTNAGIHLY

SEQ ID NO: 8542 - protein, 9 aa, synthetic construct
PLPGTGKVF

SEQ ID NO: 8543 - protein, 9 aa, synthetic construct
PLPGSVHLY

SEQ ID NO: 8544 - protein, 9 aa, synthetic construct
GTQGALKVF

SEQ ID NO: 8545 - protein, 9 aa, synthetic construct
PLPGSVHVK

SEQ ID NO: 8546 - protein, 9 aa, synthetic construct
PLNGSLHLR

SEQ ID NO: 8547 - protein, 9 aa, synthetic construct
GTQGAIRVY

SEQ ID NO: 8548 - protein, 9 aa, synthetic construct
GTQGAGKVF

SEQ ID NO: 8549 - protein, 9 aa, synthetic construct
GTQGTVKLK

SEQ ID NO: 8550 - protein, 9 aa, synthetic construct
GTQGTVKLF

SEQ ID NO: 8551 - protein, 9 aa, synthetic construct
GTQGTLKVF

SEQ ID NO: 8552 - protein, 9 aa, synthetic construct
GTQGTAHLR

SEQ ID NO: 8553 - protein, 9 aa, synthetic construct
GTQGTAHLK

SEQ ID NO: 8554 - protein, 9 aa, synthetic construct
GTQGTAKLH

SEQ ID NO: 8555 - protein, 9 aa, synthetic construct
GTQGTAKLF

SEQ ID NO: 8556 - protein, 9 aa, synthetic construct
GTQGTGHLR

SEQ ID NO: 8557 - protein, 9 aa, synthetic construct
GTQGTGHLH

SEQ ID NO: 8558 - protein, 9 aa, synthetic construct
GTQGTGHLK

SEQ ID NO: 8559 - protein, 9 aa, synthetic construct
GTQGTGHVY

SEQ ID NO: 8560 - protein, 9 aa, synthetic construct
GTQGTGHVF

SEQ ID NO: 8561 - protein, 9 aa, synthetic construct
GTQGTGRLY

SEQ ID NO: 8562 - protein, 9 aa, synthetic construct
GTQGTGKLH

SEQ ID NO: 8563 - protein, 9 aa, synthetic construct
GTQGTGKVF

SEQ ID NO: 8564 - protein, 9 aa, synthetic construct
PLPGSLHLY

SEQ ID NO: 8565 - protein, 9 aa, synthetic construct
GTQGSVHLR

SEQ ID NO: 8566 - protein, 9 aa, synthetic construct
PLPGSLHLR

SEQ ID NO: 8567 - protein, 9 aa, synthetic construct
PLPGSLHLK

SEQ ID NO: 8568 - protein, 9 aa, synthetic construct
PLPGSLHVY

SEQ ID NO: 8569 - protein, 9 aa, synthetic construct
PLPGSLHVR

SEQ ID NO: 8570 - protein, 9 aa, synthetic construct
GTQGSAHLF

SEQ ID NO: 8571 - protein, 9 aa, synthetic construct
GTQGSAHVF

SEQ ID NO: 8572 - protein, 9 aa, synthetic construct
PLPGSLHVH

SEQ ID NO: 8573 - protein, 9 aa, synthetic construct
GTQGSGHLF

SEQ ID NO: 8574 - protein, 9 aa, synthetic construct
PLNGSLHVR

SEQ ID NO: 8575 - protein, 9 aa, synthetic construct
PLNGSLHVK

SEQ ID NO: 8576 - protein, 9 aa, synthetic construct
GTQATVKLY

SEQ ID NO: 8577 - protein, 9 aa, synthetic construct
GTQATVKLF

SEQ ID NO: 8578 - protein, 9 aa, synthetic construct
GTQATAHLK

SEQ ID NO: 8579 - protein, 9 aa, synthetic construct
GTQASVHLR

SEQ ID NO: 8580 - protein, 9 aa, synthetic construct
GTQASVKLY

SEQ ID NO: 8581 - protein, 9 aa, synthetic construct
GTQASVKLK

SEQ ID NO: 8582 - protein, 9 aa, synthetic construct
GTQASVKLF

SEQ ID NO: 8583 - protein, 9 aa, synthetic construct
GTQASLHLH

SEQ ID NO: 8584 - protein, 9 aa, synthetic construct
GTQASAHLK

SEQ ID NO: 8585 - protein, 9 aa, synthetic construct
PLPGSIKLH

SEQ ID NO: 8586 - protein, 9 aa, synthetic construct
GTQASGHLH

SEQ ID NO: 8587 - protein, 9 aa, synthetic construct
PLPGSIKVF

SEQ ID NO: 8588 - protein, 9 aa, synthetic construct
PLPGSGHLF

SEQ ID NO: 8589 - protein, 9 aa, synthetic construct
GTQAVIKLY

SEQ ID NO: 8590 - protein, 9 aa, synthetic construct
PLPGSGKVH

SEQ ID NO: 8591 - protein, 9 aa, synthetic construct
GTPGALKVH

SEQ ID NO: 8592 - protein, 9 aa, synthetic construct
GTPGAIHVH

SEQ ID NO: 8593 - protein, 9 aa, synthetic construct
GTPGAGKVF

SEQ ID NO: 8594 - protein, 9 aa, synthetic construct
GTPGTAHVY

SEQ ID NO: 8595 - protein, 9 aa, synthetic construct
GTPGTGRVR

SEQ ID NO: 8596 - protein, 9 aa, synthetic construct
GTPGSLHLH

SEQ ID NO: 8597 - protein, 9 aa, synthetic construct
GTPGSLHVR

SEQ ID NO: 8598 - protein, 9 aa, synthetic construct
GTPGSLHVK

SEQ ID NO: 8599 - protein, 9 aa, synthetic construct
GTPGSGHVY

SEQ ID NO: 8600 - protein, 9 aa, synthetic construct
GTPGVLHLK

SEQ ID NO: 8601 - protein, 9 aa, synthetic construct
GTPGGAHLY

SEQ ID NO: 8602 - protein, 9 aa, synthetic construct
GTPAAAHLH

SEQ ID NO: 8603 - protein, 9 aa, synthetic construct
GTPAAAHVH

SEQ ID NO: 8604 - protein, 9 aa, synthetic construct
GTPAAARVF

SEQ ID NO: 8605 - protein, 9 aa, synthetic construct
GTPAAIKVY

SEQ ID NO: 8606 - protein, 9 aa, synthetic construct
PLPGVAKVH

SEQ ID NO: 8607 - protein, 9 aa, synthetic construct
GTPAAGRLF

SEQ ID NO: 8608 - protein, 9 aa, synthetic construct
GTPAAGRVR

SEQ ID NO: 8609 - protein, 9 aa, synthetic construct
GTPATVKLF

SEQ ID NO: 8610 - protein, 9 aa, synthetic construct
GTPATLHVH

SEQ ID NO: 8611 - protein, 9 aa, synthetic construct
GTPATAHLK

SEQ ID NO: 8612 - protein, 9 aa, synthetic construct
GTPATARVY

SEQ ID NO: 8613 - protein, 9 aa, synthetic construct
GTPATARVR

SEQ ID NO: 8614 - protein, 9 aa, synthetic construct
GTPATARVF

SEQ ID NO: 8615 - protein, 9 aa, synthetic construct
GTPATAKLH

SEQ ID NO: 8616 - protein, 9 aa, synthetic construct
GTPATGHLF

SEQ ID NO: 8617 - protein, 9 aa, synthetic construct
GTPATGRLR

SEQ ID NO: 8618 - protein, 9 aa, synthetic construct
GTPATGRLF

SEQ ID NO: 8619 - protein, 9 aa, synthetic construct
GTPATGRVY

SEQ ID NO: 8620 - protein, 9 aa, synthetic construct
GTPATGKLH

SEQ ID NO: 8621 - protein, 9 aa, synthetic construct
GTPATGKVR

SEQ ID NO: 8622 - protein, 9 aa, synthetic construct
GTPATGKVF

SEQ ID NO: 8623 - protein, 9 aa, synthetic construct
GTPASVRVF

SEQ ID NO: 8624 - protein, 9 aa, synthetic construct
GTPASAHVY

SEQ ID NO: 8625 - protein, 9 aa, synthetic construct
GTPASIKLH

SEQ ID NO: 8626 - protein, 9 aa, synthetic construct
GTPASGRVR

SEQ ID NO: 8627 - protein, 9 aa, synthetic construct
GTPAVVHLH

SEQ ID NO: 8628 - protein, 9 aa, synthetic construct
GTPAGAHLH

SEQ ID NO: 8629 - protein, 9 aa, synthetic construct
GTPAGAKLY

SEQ ID NO: 8630 - protein, 9 aa, synthetic construct
GTPAGAKLF

SEQ ID NO: 8631 - protein, 9 aa, synthetic construct
GTPAGIHVK

SEQ ID NO: 8632 - protein, 9 aa, synthetic construct
GTPAGIRLF

SEQ ID NO: 8633 - protein, 9 aa, synthetic construct
GSNGAVHLY

SEQ ID NO: 8634 - protein, 9 aa, synthetic construct
GSNGAVHLH

SEQ ID NO: 8635 - protein, 9 aa, synthetic construct
GSNGAVHLK

SEQ ID NO: 8636 - protein, 9 aa, synthetic construct
GSNGAVHLF

SEQ ID NO: 8637 - protein, 9 aa, synthetic construct
GSNGAVHVR

SEQ ID NO: 8638 - protein, 9 aa, synthetic construct
GSNGAVHVH

SEQ ID NO: 8639 - protein, 9 aa, synthetic construct
GSNGAVRVH

SEQ ID NO: 8640 - protein, 9 aa, synthetic construct
GSNGAVKLY

SEQ ID NO: 8641 - protein, 9 aa, synthetic construct
GSNGAARVF

SEQ ID NO: 8642 - protein, 9 aa, synthetic construct
GSNGAAKLF

SEQ ID NO: 8643 - protein, 9 aa, synthetic construct
PLNGSAHLR

SEQ ID NO: 8644 - protein, 9 aa, synthetic construct
GSNGAIKVH

SEQ ID NO: 8645 - protein, 9 aa, synthetic construct
GSNGAGHLF

SEQ ID NO: 8646 - protein, 9 aa, synthetic construct
GSNGAGHVH

SEQ ID NO: 8647 - protein, 9 aa, synthetic construct
GSNGAGRVR

SEQ ID NO: 8648 - protein, 9 aa, synthetic construct
GSNGTVHLR

SEQ ID NO: 8649 - protein, 9 aa, synthetic construct
GSNGTLHVK

SEQ ID NO: 8650 - protein, 9 aa, synthetic construct
GSNGTLKVH

SEQ ID NO: 8651 - protein, 9 aa, synthetic construct
GSNGTAKLH

SEQ ID NO: 8652 - protein, 9 aa, synthetic construct
GSNGTGHLF

SEQ ID NO: 8653 - protein, 9 aa, synthetic construct
GSNGSVHLY

SEQ ID NO: 8654 - protein, 9 aa, synthetic construct
GSNGSLHLR

SEQ ID NO: 8655 - protein, 9 aa, synthetic construct
GSNGSLHVR

SEQ ID NO: 8656 - protein, 9 aa, synthetic construct
GSNGSLKLY

SEQ ID NO: 8657 - protein, 9 aa, synthetic construct
PLPGGLHVK

SEQ ID NO: 8658 - protein, 9 aa, synthetic construct
GSNGSGHLH

SEQ ID NO: 8659 - protein, 9 aa, synthetic construct
GSNGVAHLH

SEQ ID NO: 8660 - protein, 9 aa, synthetic construct
GSNGVAKLH

SEQ ID NO: 8661 - protein, 9 aa, synthetic construct
GSNGVIHVY

SEQ ID NO: 8662 - protein, 9 aa, synthetic construct
GSNGVGHLR

SEQ ID NO: 8663 - protein, 9 aa, synthetic construct
GSNGVGHVY

SEQ ID NO: 8664 - protein, 9 aa, synthetic construct
GSNGVGHVH

SEQ ID NO: 8665 - protein, 9 aa, synthetic construct
GSNGGVHLR

SEQ ID NO: 8666 - protein, 9 aa, synthetic construct
GSNGGVKVH

SEQ ID NO: 8667 - protein, 9 aa, synthetic construct
GSNGGARVY

SEQ ID NO: 8668 - protein, 9 aa, synthetic construct
GSNGGIHLY

SEQ ID NO: 8669 - protein, 9 aa, synthetic construct
GSNGGIHVR

SEQ ID NO: 8670 - protein, 9 aa, synthetic construct
GSNGGIHVH

SEQ ID NO: 8671 - protein, 9 aa, synthetic construct
GSNGGIRLF

SEQ ID NO: 8672 - protein, 9 aa, synthetic construct
GSNGGGKVF

SEQ ID NO: 8673 - protein, 9 aa, synthetic construct
GSNAAAHLH

SEQ ID NO: 8674 - protein, 9 aa, synthetic construct
GSNAAAHLF

SEQ ID NO: 8675 - protein, 9 aa, synthetic construct
GSNAAARVF

SEQ ID NO: 8676 - protein, 9 aa, synthetic construct
GSNAAAKVF

SEQ ID NO: 8677 - protein, 9 aa, synthetic construct
GSNAAIHVK

SEQ ID NO: 8678 - protein, 9 aa, synthetic construct
GSNATVKLY

SEQ ID NO: 8679 - protein, 9 aa, synthetic construct
GSNATVKLF

SEQ ID NO: 8680 - protein, 9 aa, synthetic construct
GSNATAKLH

SEQ ID NO: 8681 - protein, 9 aa, synthetic construct
GSNATIKLH

SEQ ID NO: 8682 - protein, 9 aa, synthetic construct
GSNATGHLH

SEQ ID NO: 8683 - protein, 9 aa, synthetic construct
GSNASLHLR

SEQ ID NO: 8684 - protein, 9 aa, synthetic construct
GSNASLHVR

SEQ ID NO: 8685 - protein, 9 aa, synthetic construct
PLPGGIKLY

SEQ ID NO: 8686 - protein, 9 aa, synthetic construct
GSNASAKLY

SEQ ID NO: 8687 - protein, 9 aa, synthetic construct
GSNASIHVK

SEQ ID NO: 8688 - protein, 9 aa, synthetic construct
GSNASIRLH

SEQ ID NO: 8689 - protein, 9 aa, synthetic construct
GSNASIRVF

SEQ ID NO: 8690 - protein, 9 aa, synthetic construct
GSNASIKLY

SEQ ID NO: 8691 - protein, 9 aa, synthetic construct
GSNASIKLF

SEQ ID NO: 8692 - protein, 9 aa, synthetic construct
GSNASIKVH

SEQ ID NO: 8693 - protein, 9 aa, synthetic construct
GSNASIKVF

SEQ ID NO: 8694 - protein, 9 aa, synthetic construct
GSNASGHLR

SEQ ID NO: 8695 - protein, 9 aa, synthetic construct
GSNASGHLK

SEQ ID NO: 8696 - protein, 9 aa, synthetic construct
GSNASGHLF

SEQ ID NO: 8697 - protein, 9 aa, synthetic construct
GSNASGHVH

SEQ ID NO: 8698 - protein, 9 aa, synthetic construct
GSNASGKVH

SEQ ID NO: 8699 - protein, 9 aa, synthetic construct
GSNAVVKVY

SEQ ID NO: 8700 - protein, 9 aa, synthetic construct
GSNAVLHVK

SEQ ID NO: 8701 - protein, 9 aa, synthetic construct
GSNAVAHLH

SEQ ID NO: 8702 - protein, 9 aa, synthetic construct
GSNAVAKLH

SEQ ID NO: 8703 - protein, 9 aa, synthetic construct
GSNAVIHVY

SEQ ID NO: 8704 - protein, 9 aa, synthetic construct
GSNAGAHVH

SEQ ID NO: 8705 - protein, 9 aa, synthetic construct
GSNAGAKLY

SEQ ID NO: 8706 - protein, 9 aa, synthetic construct
GSNAGIHLY

SEQ ID NO: 8707 - protein, 9 aa, synthetic construct
GSNAGGHLH

SEQ ID NO: 8708 - protein, 9 aa, synthetic construct
PLPGGGKVF

SEQ ID NO: 8709 - protein, 9 aa, synthetic construct
GSQGTAKVF

SEQ ID NO: 8710 - protein, 9 aa, synthetic construct
GSQGSGRLY

SEQ ID NO: 8711 - protein, 9 aa, synthetic construct
GSQGVVHLK

SEQ ID NO: 8712 - protein, 9 aa, synthetic construct
GSQGVVKVY

SEQ ID NO: 8713 - protein, 9 aa, synthetic construct
PLNGALHVK

SEQ ID NO: 8714 - protein, 9 aa, synthetic construct
PLPAAAHLF

SEQ ID NO: 8715 - protein, 9 aa, synthetic construct
GSQGGIRLK

SEQ ID NO: 8716 - protein, 9 aa, synthetic construct
PLPAAARVF

SEQ ID NO: 8717 - protein, 9 aa, synthetic construct
GSQATAHVF

SEQ ID NO: 8718 - protein, 9 aa, synthetic construct
GSQATIKVY

SEQ ID NO: 8719 - protein, 9 aa, synthetic construct
GSQASVKLY

SEQ ID NO: 8720 - protein, 9 aa, synthetic construct
GSQAVAHLY

SEQ ID NO: 8721 - protein, 9 aa, synthetic construct
PLPAAGRLF

SEQ ID NO: 8722 - protein, 9 aa, synthetic construct
PLPAAGKVF

SEQ ID NO: 8723 - protein, 9 aa, synthetic construct
GSPGAVKLH

SEQ ID NO: 8724 - protein, 9 aa, synthetic construct
PLPATVHVY

SEQ ID NO: 8725 - protein, 9 aa, synthetic construct
GSPGAAHVY

SEQ ID NO: 8726 - protein, 9 aa, synthetic construct
GSPGAAKLF

SEQ ID NO: 8727 - protein, 9 aa, synthetic construct
GSPGAGKVF

SEQ ID NO: 8728 - protein, 9 aa, synthetic construct
GSPGTVKLH

SEQ ID NO: 8729 - protein, 9 aa, synthetic construct
GSPGTVKLK

SEQ ID NO: 8730 - protein, 9 aa, synthetic construct
GSPGTVKLF

SEQ ID NO: 8731 - protein, 9 aa, synthetic construct
GSPGTLHVK

SEQ ID NO: 8732 - protein, 9 aa, synthetic construct
GSPGTLKVH

SEQ ID NO: 8733 - protein, 9 aa, synthetic construct
GSPGTAHLY

SEQ ID NO: 8734 - protein, 9 aa, synthetic construct
GSPGTAHLR

SEQ ID NO: 8735 - protein, 9 aa, synthetic construct
GSPGTAHLH

SEQ ID NO: 8736 - protein, 9 aa, synthetic construct
GSPGTAHLK

SEQ ID NO: 8737 - protein, 9 aa, synthetic construct
GSPGTAHVH

SEQ ID NO: 8738 - protein, 9 aa, synthetic construct
GSPGTAHVK

SEQ ID NO: 8739 - protein, 9 aa, synthetic construct
GSPGTAHVF

SEQ ID NO: 8740 - protein, 9 aa, synthetic construct
GSPGTGHVY

SEQ ID NO: 8741 - protein, 9 aa, synthetic construct
GSPGTGKVF

SEQ ID NO: 8742 - protein, 9 aa, synthetic construct
GSPGSLHVK

SEQ ID NO: 8743 - protein, 9 aa, synthetic construct
GSPGSAHVY

SEQ ID NO: 8744 - protein, 9 aa, synthetic construct
GSPGSAHVH

SEQ ID NO: 8745 - protein, 9 aa, synthetic construct
GSPGSAHVF

SEQ ID NO: 8746 - protein, 9 aa, synthetic construct
PLPATLHVH

SEQ ID NO: 8747 - protein, 9 aa, synthetic construct
GSPGVLHLK

SEQ ID NO: 8748 - protein, 9 aa, synthetic construct
GSPGGAKLY

SEQ ID NO: 8749 - protein, 9 aa, synthetic construct
PLPATAHVF

SEQ ID NO: 8750 - protein, 9 aa, synthetic construct
GSPGGGHLY

SEQ ID NO: 8751 - protein, 9 aa, synthetic construct
GSPAAVHVY

SEQ ID NO: 8752 - protein, 9 aa, synthetic construct
GSPAAVHVK

SEQ ID NO: 8753 - protein, 9 aa, synthetic construct
PLPATAKLH

SEQ ID NO: 8754 - protein, 9 aa, synthetic construct
GSPAAAKLY

SEQ ID NO: 8755 - protein, 9 aa, synthetic construct
GSPAAAKVF

SEQ ID NO: 8756 - protein, 9 aa, synthetic construct
GSPAAGHVH

SEQ ID NO: 8757 - protein, 9 aa, synthetic construct
GSPAAGKLH

SEQ ID NO: 8758 - protein, 9 aa, synthetic construct
GSPATVKLY

SEQ ID NO: 8759 - protein, 9 aa, synthetic construct
GSPATVKLF

SEQ ID NO: 8760 - protein, 9 aa, synthetic construct
GSPATAHLK

SEQ ID NO: 8761 - protein, 9 aa, synthetic construct
GSPATAHVY

SEQ ID NO: 8762 - protein, 9 aa, synthetic construct
PLNGAVHLF

SEQ ID NO: 8763 - protein, 9 aa, synthetic construct
GSPATGRVR

SEQ ID NO: 8764 - protein, 9 aa, synthetic construct
GSPATGKLF

SEQ ID NO: 8765 - protein, 9 aa, synthetic construct
GSPASAKLY

SEQ ID NO: 8766 - protein, 9 aa, synthetic construct
GSPASIKLH

SEQ ID NO: 8767 - protein, 9 aa, synthetic construct
GSPASGHLH

SEQ ID NO: 8768 - protein, 9 aa, synthetic construct
GSPAVVHLH

SEQ ID NO: 8769 - protein, 9 aa, synthetic construct
GSPAVVRLR

SEQ ID NO: 8770 - protein, 9 aa, synthetic construct
GSPAVAKLH

SEQ ID NO: 8771 - protein, 9 aa, synthetic construct
PLPATGRVR

SEQ ID NO: 8772 - protein, 9 aa, synthetic construct
GSPAGAHLK

SEQ ID NO: 8773 - protein, 9 aa, synthetic construct
GSPAGAHVY

SEQ ID NO: 8774 - protein, 9 aa, synthetic construct
GSPAGAHVH

SEQ ID NO: 8775 - protein, 9 aa, synthetic construct
GSPAGAHVF

SEQ ID NO: 8776 - protein, 9 aa, synthetic construct
GSPAGARLY

SEQ ID NO: 8777 - protein, 9 aa, synthetic construct
GSPAGARLH

SEQ ID NO: 8778 - protein, 9 aa, synthetic construct
GSPAGAKLH

SEQ ID NO: 8779 - protein, 9 aa, synthetic construct
GSPAGAKLF

SEQ ID NO: 8780 - protein, 9 aa, synthetic construct
GSPAGAKVY

SEQ ID NO: 8781 - protein, 9 aa, synthetic construct
GSPAGAKVF

SEQ ID NO: 8782 - protein, 9 aa, synthetic construct
GSPAGIRLF

SEQ ID NO: 8783 - protein, 9 aa, synthetic construct
GSPAGGHLY

SEQ ID NO: 8784 - protein, 9 aa, synthetic construct
GSPAGGHLH

SEQ ID NO: 8785 - protein, 9 aa, synthetic construct
PLPATGKVK

SEQ ID NO: 8786 - protein, 9 aa, synthetic construct
GSPAGGKLY

SEQ ID NO: 8787 - protein, 9 aa, synthetic construct
GANGAIKVH

SEQ ID NO: 8788 - protein, 9 aa, synthetic construct
GANGTLHVK

SEQ ID NO: 8789 - protein, 9 aa, synthetic construct
GANGSAHVF

SEQ ID NO: 8790 - protein, 9 aa, synthetic construct
PLPASLHVK

SEQ ID NO: 8791 - protein, 9 aa, synthetic construct
GANGVAHLH

SEQ ID NO: 8792 - protein, 9 aa, synthetic construct
GANGVGHVH

SEQ ID NO: 8793 - protein, 9 aa, synthetic construct
GANGVGKVY

SEQ ID NO: 8794 - protein, 9 aa, synthetic construct
GANGGAHVH

SEQ ID NO: 8795 - protein, 9 aa, synthetic construct
GANGGARVY

SEQ ID NO: 8796 - protein, 9 aa, synthetic construct
PLNGSIKLH

SEQ ID NO: 8797 - protein, 9 aa, synthetic construct
PLPASIKLH

SEQ ID NO: 8798 - protein, 9 aa, synthetic construct
PLPASIKVF

SEQ ID NO: 8799 - protein, 9 aa, synthetic construct
PLPASGKVH

SEQ ID NO: 8800 - protein, 9 aa, synthetic construct
GAQGTAKLH

SEQ ID NO: 8801 - protein, 9 aa, synthetic construct
GAQGTIKVY

SEQ ID NO: 8802 - protein, 9 aa, synthetic construct
GAQGSVRVH

SEQ ID NO: 8803 - protein, 9 aa, synthetic construct
GAQGSLHLH

SEQ ID NO: 8804 - protein, 9 aa, synthetic construct
GAQGSAHLF

SEQ ID NO: 8805 - protein, 9 aa, synthetic construct
GAQGSIRLH

SEQ ID NO: 8806 - protein, 9 aa, synthetic construct
GAQGVIHVK

SEQ ID NO: 8807 - protein, 9 aa, synthetic construct
GAQGVIKLH

SEQ ID NO: 8808 - protein, 9 aa, synthetic construct
GAQGGIHVY

SEQ ID NO: 8809 - protein, 9 aa, synthetic construct
GAQGGIKLY

SEQ ID NO: 8810 - protein, 9 aa, synthetic construct
GAQAAVRVY

SEQ ID NO: 8811 - protein, 9 aa, synthetic construct
GAQATLKLH

SEQ ID NO: 8812 - protein, 9 aa, synthetic construct
GAQASGKVF

SEQ ID NO: 8813 - protein, 9 aa, synthetic construct
GAQAVVRLH

SEQ ID NO: 8814 - protein, 9 aa, synthetic construct
PLPAVGHLH

SEQ ID NO: 8815 - protein, 9 aa, synthetic construct
PLPAVGHVK

SEQ ID NO: 8816 - protein, 9 aa, synthetic construct
GAQAVIHLY

SEQ ID NO: 8817 - protein, 9 aa, synthetic construct
PLPAVGRLY

SEQ ID NO: 8818 - protein, 9 aa, synthetic construct
PLPAVGRLH

SEQ ID NO: 8819 - protein, 9 aa, synthetic construct
GAQAGAKVF

SEQ ID NO: 8820 - protein, 9 aa, synthetic construct
GAQAGIHVY

SEQ ID NO: 8821 - protein, 9 aa, synthetic construct
GAQAGIRLF

SEQ ID NO: 8822 - protein, 9 aa, synthetic construct
GAPGTLHLR

SEQ ID NO: 8823 - protein, 9 aa, synthetic construct
GAPGTAHLK

SEQ ID NO: 8824 - protein, 9 aa, synthetic construct
GAPGTAHVH

SEQ ID NO: 8825 - protein, 9 aa, synthetic construct
GAPGSLHVK

SEQ ID NO: 8826 - protein, 9 aa, synthetic construct
GAPGSAHVY

SEQ ID NO: 8827 - protein, 9 aa, synthetic construct
GAPGSIHVH

SEQ ID NO: 8828 - protein, 9 aa, synthetic construct
GAPGVAKLR

SEQ ID NO: 8829 - protein, 9 aa, synthetic construct
GAPGVIRVF

SEQ ID NO: 8830 - protein, 9 aa, synthetic construct
GAPGVGHVF

SEQ ID NO: 8831 - protein, 9 aa, synthetic construct
GAPGGIKLY

SEQ ID NO: 8832 - protein, 9 aa, synthetic construct
GAPAAAHLK

SEQ ID NO: 8833 - protein, 9 aa, synthetic construct
GAPAAAHLF

SEQ ID NO: 8834 - protein, 9 aa, synthetic construct
GAPAAARVF

SEQ ID NO: 8835 - protein, 9 aa, synthetic construct
GAPAAGHVH

SEQ ID NO: 8836 - protein, 9 aa, synthetic construct
GAPATVKLH

SEQ ID NO: 8837 - protein, 9 aa, synthetic construct
GAPATVKLF

SEQ ID NO: 8838 - protein, 9 aa, synthetic construct
GAPATAHLY

SEQ ID NO: 8839 - protein, 9 aa, synthetic construct
GAPATAHLR

SEQ ID NO: 8840 - protein, 9 aa, synthetic construct
GAPATAHLH

SEQ ID NO: 8841 - protein, 9 aa, synthetic construct
GAPATAHLF

SEQ ID NO: 8842 - protein, 9 aa, synthetic construct
GAPATAHVH

SEQ ID NO: 8843 - protein, 9 aa, synthetic construct
GAPATARVF

SEQ ID NO: 8844 - protein, 9 aa, synthetic construct
PLPAGIHVK

SEQ ID NO: 8845 - protein, 9 aa, synthetic construct
GAPATAKLH

SEQ ID NO: 8846 - protein, 9 aa, synthetic construct
GAPATGHLK

SEQ ID NO: 8847 - protein, 9 aa, synthetic construct
GAPATGHLF

SEQ ID NO: 8848 - protein, 9 aa, synthetic construct
GAPATGRVR

SEQ ID NO: 8849 - protein, 9 aa, synthetic construct
GAPASAHLK

SEQ ID NO: 8850 - protein, 9 aa, synthetic construct
GAPASIKLH

SEQ ID NO: 8851 - protein, 9 aa, synthetic construct
GAPAVVHLH

SEQ ID NO: 8852 - protein, 9 aa, synthetic construct
GAPAVIKLF

SEQ ID NO: 8853 - protein, 9 aa, synthetic construct
GAPAGAKLY

SEQ ID NO: 8854 - protein, 9 aa, synthetic construct
GAPAGIHVK

SEQ ID NO: 8855 - protein, 9 aa, synthetic construct
GAPAGIRLF

SEQ ID NO: 8856 - protein, 9 aa, synthetic construct
GVNGAVHLR

SEQ ID NO: 8857 - protein, 9 aa, synthetic construct
GVNGAVHVY

SEQ ID NO: 8858 - protein, 9 aa, synthetic construct
PTNGAVHLR

SEQ ID NO: 8859 - protein, 9 aa, synthetic construct
GVNGAVRVH

SEQ ID NO: 8860 - protein, 9 aa, synthetic construct
GVNGAVKLH

SEQ ID NO: 8861 - protein, 9 aa, synthetic construct
PTNGAVHLK

SEQ ID NO: 8862 - protein, 9 aa, synthetic construct
GVNGALKVF

SEQ ID NO: 8863 - protein, 9 aa, synthetic construct
GVNGAARLH

SEQ ID NO: 8864 - protein, 9 aa, synthetic construct
PTNGAVHVK

SEQ ID NO: 8865 - protein, 9 aa, synthetic construct
GVNGAAKLF

SEQ ID NO: 8866 - protein, 9 aa, synthetic construct
GVNGAGKVF

SEQ ID NO: 8867 - protein, 9 aa, synthetic construct
PTNGAVRVH

SEQ ID NO: 8868 - protein, 9 aa, synthetic construct
GVNGTVKLK

SEQ ID NO: 8869 - protein, 9 aa, synthetic construct
GVNGTLHLR

SEQ ID NO: 8870 - protein, 9 aa, synthetic construct
GVNGTLHVK

SEQ ID NO: 8871 - protein, 9 aa, synthetic construct
GVNGTLKVH

SEQ ID NO: 8872 - protein, 9 aa, synthetic construct
GVNGTAHVY

SEQ ID NO: 8873 - protein, 9 aa, synthetic construct
PTNGAVKLH

SEQ ID NO: 8874 - protein, 9 aa, synthetic construct
PTNGAVKLK

SEQ ID NO: 8875 - protein, 9 aa, synthetic construct
PTNGAVKLF

SEQ ID NO: 8876 - protein, 9 aa, synthetic construct
GVNGTIKVY

SEQ ID NO: 8877 - protein, 9 aa, synthetic construct
GVNGTGRLY

SEQ ID NO: 8878 - protein, 9 aa, synthetic construct
GVNGSVHLY

SEQ ID NO: 8879 - protein, 9 aa, synthetic construct
GVNGSLRVH

SEQ ID NO: 8880 - protein, 9 aa, synthetic construct
GVNGSAHVF

SEQ ID NO: 8881 - protein, 9 aa, synthetic construct
GVNGSARLH

SEQ ID NO: 8882 - protein, 9 aa, synthetic construct
PTNGALHVK

SEQ ID NO: 8883 - protein, 9 aa, synthetic construct
GVNGSIKLY

SEQ ID NO: 8884 - protein, 9 aa, synthetic construct
GVNGSGKLY

SEQ ID NO: 8885 - protein, 9 aa, synthetic construct
PLNGVVHVY

SEQ ID NO: 8886 - protein, 9 aa, synthetic construct
GVNGVLKVF

SEQ ID NO: 8887 - protein, 9 aa, synthetic construct
GVNGVAHLR

SEQ ID NO: 8888 - protein, 9 aa, synthetic construct
GVNGVAHLH

SEQ ID NO: 8889 - protein, 9 aa, synthetic construct
GVNGVAKLH

SEQ ID NO: 8890 - protein, 9 aa, synthetic construct
GVNGVGHVY

SEQ ID NO: 8891 - protein, 9 aa, synthetic construct
GVNGVGHVH

SEQ ID NO: 8892 - protein, 9 aa, synthetic construct
PLNGVVHVR

SEQ ID NO: 8893 - protein, 9 aa, synthetic construct
GVNGGVHLR

SEQ ID NO: 8894 - protein, 9 aa, synthetic construct
GVNGGVHLK

SEQ ID NO: 8895 - protein, 9 aa, synthetic construct
PTNGAAHLR

SEQ ID NO: 8896 - protein, 9 aa, synthetic construct
PTNGAAHLH

SEQ ID NO: 8897 - protein, 9 aa, synthetic construct
PTNGAAHLK

SEQ ID NO: 8898 - protein, 9 aa, synthetic construct
PTNGAAHVY

SEQ ID NO: 8899 - protein, 9 aa, synthetic construct
PTNGAAHVH

SEQ ID NO: 8900 - protein, 9 aa, synthetic construct
GVNGGARLF

SEQ ID NO: 8901 - protein, 9 aa, synthetic construct
GVNGGARVY

SEQ ID NO: 8902 - protein, 9 aa, synthetic construct
PTNGAAHVK

SEQ ID NO: 8903 - protein, 9 aa, synthetic construct
PTNGAAHVF

SEQ ID NO: 8904 - protein, 9 aa, synthetic construct
PTNGAARLH

SEQ ID NO: 8905 - protein, 9 aa, synthetic construct
GVNGGGRLH

SEQ ID NO: 8906 - protein, 9 aa, synthetic construct
PTNGAARLF

SEQ ID NO: 8907 - protein, 9 aa, synthetic construct
PTNGAARVF

SEQ ID NO: 8908 - protein, 9 aa, synthetic construct
PTNGAAKLY

SEQ ID NO: 8909 - protein, 9 aa, synthetic construct
GVNAAAHLF

SEQ ID NO: 8910 - protein, 9 aa, synthetic construct
PTNGAAKLH

SEQ ID NO: 8911 - protein, 9 aa, synthetic construct
GVNAAARVF

SEQ ID NO: 8912 - protein, 9 aa, synthetic construct
GVNAAAKVF

SEQ ID NO: 8913 - protein, 9 aa, synthetic construct
GVNAAGHVH

SEQ ID NO: 8914 - protein, 9 aa, synthetic construct
GVNAAGRLF

SEQ ID NO: 8915 - protein, 9 aa, synthetic construct
GVNATVKLY

SEQ ID NO: 8916 - protein, 9 aa, synthetic construct
GVNATIKLY

SEQ ID NO: 8917 - protein, 9 aa, synthetic construct
GVNASVHVK

SEQ ID NO: 8918 - protein, 9 aa, synthetic construct
GVNASARLF

SEQ ID NO: 8919 - protein, 9 aa, synthetic construct
GVNASIRLY

SEQ ID NO: 8920 - protein, 9 aa, synthetic construct
GVNASIKLH

SEQ ID NO: 8921 - protein, 9 aa, synthetic construct
GVNASIKLF

SEQ ID NO: 8922 - protein, 9 aa, synthetic construct
GVNASIKVF

SEQ ID NO: 8923 - protein, 9 aa, synthetic construct
GVNASGHLY

SEQ ID NO: 8924 - protein, 9 aa, synthetic construct
GVNASGHLH

SEQ ID NO: 8925 - protein, 9 aa, synthetic construct
PTNGAGHLH

SEQ ID NO: 8926 - protein, 9 aa, synthetic construct
GVNAVAHLH

SEQ ID NO: 8927 - protein, 9 aa, synthetic construct
GVNAVAHLF

SEQ ID NO: 8928 - protein, 9 aa, synthetic construct
GVNAVAHVK

SEQ ID NO: 8929 - protein, 9 aa, synthetic construct
GVNAVAHVF

SEQ ID NO: 8930 - protein, 9 aa, synthetic construct
GVNAVAKLH

SEQ ID NO: 8931 - protein, 9 aa, synthetic construct
GVNAVAKVF

SEQ ID NO: 8932 - protein, 9 aa, synthetic construct
PTNGAGRLY

SEQ ID NO: 8933 - protein, 9 aa, synthetic construct
GVNAVGHLY

SEQ ID NO: 8934 - protein, 9 aa, synthetic construct
GVNAVGHLH

SEQ ID NO: 8935 - protein, 9 aa, synthetic construct
GVNAVGHLF

SEQ ID NO: 8936 - protein, 9 aa, synthetic construct
GVNAVGHVR

SEQ ID NO: 8937 - protein, 9 aa, synthetic construct
GVNAVGHVH

SEQ ID NO: 8938 - protein, 9 aa, synthetic construct
GVNAVGHVK

SEQ ID NO: 8939 - protein, 9 aa, synthetic construct
GVNAVGHVF

SEQ ID NO: 8940 - protein, 9 aa, synthetic construct
GVNAVGRLF

SEQ ID NO: 8941 - protein, 9 aa, synthetic construct
GVNAGARLH

SEQ ID NO: 8942 - protein, 9 aa, synthetic construct
GVNAGARVK

SEQ ID NO: 8943 - protein, 9 aa, synthetic construct
GVNAGIHLY

SEQ ID NO: 8944 - protein, 9 aa, synthetic construct
GVNAGIKLY

SEQ ID NO: 8945 - protein, 9 aa, synthetic construct
GVNAGGHLH

SEQ ID NO: 8946 - protein, 9 aa, synthetic construct
PTNGAGKVF

SEQ ID NO: 8947 - protein, 9 aa, synthetic construct
GVQGAVKLH

SEQ ID NO: 8948 - protein, 9 aa, synthetic construct
GVQGAVKVF

SEQ ID NO: 8949 - protein, 9 aa, synthetic construct
GVQGALKLY

SEQ ID NO: 8950 - protein, 9 aa, synthetic construct
GVQGALKLH

SEQ ID NO: 8951 - protein, 9 aa, synthetic construct
GVQGALKVY

SEQ ID NO: 8952 - protein, 9 aa, synthetic construct
GVQGALKVH

SEQ ID NO: 8953 - protein, 9 aa, synthetic construct
GVQGAAHLR

SEQ ID NO: 8954 - protein, 9 aa, synthetic construct
GVQGAAHLH

SEQ ID NO: 8955 - protein, 9 aa, synthetic construct
GVQGAAHLK

SEQ ID NO: 8956 - protein, 9 aa, synthetic construct
GVQGAAHVY

SEQ ID NO: 8957 - protein, 9 aa, synthetic construct
GVQGAAKLF

SEQ ID NO: 8958 - protein, 9 aa, synthetic construct
GVQGAAKVF

SEQ ID NO: 8959 - protein, 9 aa, synthetic construct
GVQGAGHLY

SEQ ID NO: 8960 - protein, 9 aa, synthetic construct
GVQGAGHLR

SEQ ID NO: 8961 - protein, 9 aa, synthetic construct
GVQGAGHLK

SEQ ID NO: 8962 - protein, 9 aa, synthetic construct
GVQGAGHLF

SEQ ID NO: 8963 - protein, 9 aa, synthetic construct
GVQGAGHVY

SEQ ID NO: 8964 - protein, 9 aa, synthetic construct
GVQGAGHVH

SEQ ID NO: 8965 - protein, 9 aa, synthetic construct
GVQGAGHVK

SEQ ID NO: 8966 - protein, 9 aa, synthetic construct
GVQGAGRLY

SEQ ID NO: 8967 - protein, 9 aa, synthetic construct
GVQGAGKLH

SEQ ID NO: 8968 - protein, 9 aa, synthetic construct
GVQGAGKVF

SEQ ID NO: 8969 - protein, 9 aa, synthetic construct
GVQGTLKVH

SEQ ID NO: 8970 - protein, 9 aa, synthetic construct
GVQGTLKVF

SEQ ID NO: 8971 - protein, 9 aa, synthetic construct
GVQGTAHLR

SEQ ID NO: 8972 - protein, 9 aa, synthetic construct
GVQGTIHLF

SEQ ID NO: 8973 - protein, 9 aa, synthetic construct
GVQGTIHVK

SEQ ID NO: 8974 - protein, 9 aa, synthetic construct
GVQGTGHLH

SEQ ID NO: 8975 - protein, 9 aa, synthetic construct
GVQGSVHLR

SEQ ID NO: 8976 - protein, 9 aa, synthetic construct
PTNGTLHLR

SEQ ID NO: 8977 - protein, 9 aa, synthetic construct
GVQGSIHLK

SEQ ID NO: 8978 - protein, 9 aa, synthetic construct
PLNGALRVH

SEQ ID NO: 8979 - protein, 9 aa, synthetic construct
GVQGVAHLR

SEQ ID NO: 8980 - protein, 9 aa, synthetic construct
GVQGVGKLH

SEQ ID NO: 8981 - protein, 9 aa, synthetic construct
GVQGVGKLF

SEQ ID NO: 8982 - protein, 9 aa, synthetic construct
GVQGGVHLK

SEQ ID NO: 8983 - protein, 9 aa, synthetic construct
GVQGGVKVY

SEQ ID NO: 8984 - protein, 9 aa, synthetic construct
PTNGTAHLF

SEQ ID NO: 8985 - protein, 9 aa, synthetic construct
GVQGGLKVF

SEQ ID NO: 8986 - protein, 9 aa, synthetic construct
GVQGGAHVH

SEQ ID NO: 8987 - protein, 9 aa, synthetic construct
GVQGGAHVK

SEQ ID NO: 8988 - protein, 9 aa, synthetic construct
GVQGGARLH

SEQ ID NO: 8989 - protein, 9 aa, synthetic construct
GVQGGIHVH

SEQ ID NO: 8990 - protein, 9 aa, synthetic construct
GVQGGGHLY

SEQ ID NO: 8991 - protein, 9 aa, synthetic construct
GVQGGGHLH

SEQ ID NO: 8992 - protein, 9 aa, synthetic construct
GVQAALKVF

SEQ ID NO: 8993 - protein, 9 aa, synthetic construct
GVQAAAHLF

SEQ ID NO: 8994 - protein, 9 aa, synthetic construct
PTNGTAKLF

SEQ ID NO: 8995 - protein, 9 aa, synthetic construct
GVQATVHLR

SEQ ID NO: 8996 - protein, 9 aa, synthetic construct
PTNGTGHLF

SEQ ID NO: 8997 - protein, 9 aa, synthetic construct
PTNGTGRLY

SEQ ID NO: 8998 - protein, 9 aa, synthetic construct
PTNGTGKLK

SEQ ID NO: 8999 - protein, 9 aa, synthetic construct
PTNGSVHLY

SEQ ID NO: 9000 - protein, 9 aa, synthetic construct
PTNGSVHLR

SEQ ID NO: 9001 - protein, 9 aa, synthetic construct
GVPGAVKLH

SEQ ID NO: 9002 - protein, 9 aa, synthetic construct
GVPGAAHVF

SEQ ID NO: 9003 - protein, 9 aa, synthetic construct
GVPGAARLF

SEQ ID NO: 9004 - protein, 9 aa, synthetic construct
GVPGAIHVK

SEQ ID NO: 9005 - protein, 9 aa, synthetic construct
GVPGTLHLR

SEQ ID NO: 9006 - protein, 9 aa, synthetic construct
PTNGSVRVF

SEQ ID NO: 9007 - protein, 9 aa, synthetic construct
GVPGTAHLH

SEQ ID NO: 9008 - protein, 9 aa, synthetic construct
GVPGTAHLF

SEQ ID NO: 9009 - protein, 9 aa, synthetic construct
GVPGTAHVY

SEQ ID NO: 9010 - protein, 9 aa, synthetic construct
PTNGSVKLK

SEQ ID NO: 9011 - protein, 9 aa, synthetic construct
PTNGSVKLF

SEQ ID NO: 9012 - protein, 9 aa, synthetic construct
GVPGTGHLR

SEQ ID NO: 9013 - protein, 9 aa, synthetic construct
GVPGTGHLH

SEQ ID NO: 9014 - protein, 9 aa, synthetic construct
GVPGTGHVF

SEQ ID NO: 9015 - protein, 9 aa, synthetic construct
GVPGTGKVH

SEQ ID NO: 9016 - protein, 9 aa, synthetic construct
PLNGVLHLK

SEQ ID NO: 9017 - protein, 9 aa, synthetic construct
PTNGSLHLY

SEQ ID NO: 9018 - protein, 9 aa, synthetic construct
PTNGSLHLH

SEQ ID NO: 9019 - protein, 9 aa, synthetic construct
PTNGSLHLK

SEQ ID NO: 9020 - protein, 9 aa, synthetic construct
GVPGSLHVK

SEQ ID NO: 9021 - protein, 9 aa, synthetic construct
PTNGSLHLF

SEQ ID NO: 9022 - protein, 9 aa, synthetic construct
PTNGSLHVR

SEQ ID NO: 9023 - protein, 9 aa, synthetic construct
PTNGSLHVK

SEQ ID NO: 9024 - protein, 9 aa, synthetic construct
GVPGSIKVF

SEQ ID NO: 9025 - protein, 9 aa, synthetic construct
PTNGSLKVH

SEQ ID NO: 9026 - protein, 9 aa, synthetic construct
PTNGSAHLR

SEQ ID NO: 9027 - protein, 9 aa, synthetic construct
PTNGSAHLH

SEQ ID NO: 9028 - protein, 9 aa, synthetic construct
PTNGSAHLF

SEQ ID NO: 9029 - protein, 9 aa, synthetic construct
PTNGSAHVY

SEQ ID NO: 9030 - protein, 9 aa, synthetic construct
GVPGGARVK

SEQ ID NO: 9031 - protein, 9 aa, synthetic construct
PTNGSAHVK

SEQ ID NO: 9032 - protein, 9 aa, synthetic construct
PTNGSARLH

SEQ ID NO: 9033 - protein, 9 aa, synthetic construct
PTNGSAKLY

SEQ ID NO: 9034 - protein, 9 aa, synthetic construct
PTNGSAKLH

SEQ ID NO: 9035 - protein, 9 aa, synthetic construct
GVPAAARVK

SEQ ID NO: 9036 - protein, 9 aa, synthetic construct
PTNGSAKLF

SEQ ID NO: 9037 - protein, 9 aa, synthetic construct
PTNGSAKVF

SEQ ID NO: 9038 - protein, 9 aa, synthetic construct
GVPATLHLR

SEQ ID NO: 9039 - protein, 9 aa, synthetic construct
PTNGSIHVR

SEQ ID NO: 9040 - protein, 9 aa, synthetic construct
PTNGSIHVH

SEQ ID NO: 9041 - protein, 9 aa, synthetic construct
GVPATIKVH

SEQ ID NO: 9042 - protein, 9 aa, synthetic construct
GVPATIKVF

SEQ ID NO: 9043 - protein, 9 aa, synthetic construct
GVPATGHLF

SEQ ID NO: 9044 - protein, 9 aa, synthetic construct
GVPASAHLH

SEQ ID NO: 9045 - protein, 9 aa, synthetic construct
PTNGSIKLH

SEQ ID NO: 9046 - protein, 9 aa, synthetic construct
GVPASARVK

SEQ ID NO: 9047 - protein, 9 aa, synthetic construct
GVPASIHVK

SEQ ID NO: 9048 - protein, 9 aa, synthetic construct
GVPASIRVF

SEQ ID NO: 9049 - protein, 9 aa, synthetic construct
GVPASIKLH

SEQ ID NO: 9050 - protein, 9 aa, synthetic construct
GVPASIKLF

SEQ ID NO: 9051 - protein, 9 aa, synthetic construct
GVPASIKVH

SEQ ID NO: 9052 - protein, 9 aa, synthetic construct
GVPASIKVK

SEQ ID NO: 9053 - protein, 9 aa, synthetic construct
GVPASGRVY

SEQ ID NO: 9054 - protein, 9 aa, synthetic construct
GVPASGKVH

SEQ ID NO: 9055 - protein, 9 aa, synthetic construct
PTNGSGHLH

SEQ ID NO: 9056 - protein, 9 aa, synthetic construct
PTNGSGHLF

SEQ ID NO: 9057 - protein, 9 aa, synthetic construct
PTNGSGHVF

SEQ ID NO: 9058 - protein, 9 aa, synthetic construct
GVPAVIHVY

SEQ ID NO: 9059 - protein, 9 aa, synthetic construct
GVPAGAHLH

SEQ ID NO: 9060 - protein, 9 aa, synthetic construct
GVPAGARLF

SEQ ID NO: 9061 - protein, 9 aa, synthetic construct
GVPAGARVY

SEQ ID NO: 9062 - protein, 9 aa, synthetic construct
GVPAGARVR

SEQ ID NO: 9063 - protein, 9 aa, synthetic construct
GVPAGARVH

SEQ ID NO: 9064 - protein, 9 aa, synthetic construct
GVPAGIKVF

SEQ ID NO: 9065 - protein, 9 aa, synthetic construct
PTNGSGKVH

SEQ ID NO: 9066 - protein, 9 aa, synthetic construct
GINGAVHLK

SEQ ID NO: 9067 - protein, 9 aa, synthetic construct
GINGAIRLF

SEQ ID NO: 9068 - protein, 9 aa, synthetic construct
GINGTGHLF

SEQ ID NO: 9069 - protein, 9 aa, synthetic construct
PTNGVLHLK

SEQ ID NO: 9070 - protein, 9 aa, synthetic construct
GINGVGHVH

SEQ ID NO: 9071 - protein, 9 aa, synthetic construct
PTNGVAHLR

SEQ ID NO: 9072 - protein, 9 aa, synthetic construct
GINGGLHVR

SEQ ID NO: 9073 - protein, 9 aa, synthetic construct
GINGGARVY

SEQ ID NO: 9074 - protein, 9 aa, synthetic construct
PTNGVAKLH

SEQ ID NO: 9075 - protein, 9 aa, synthetic construct
GINAAARVF

SEQ ID NO: 9076 - protein, 9 aa, synthetic construct
GINATAKLH

SEQ ID NO: 9077 - protein, 9 aa, synthetic construct
GINASVKVY

SEQ ID NO: 9078 - protein, 9 aa, synthetic construct
PTNGVIKLH

SEQ ID NO: 9079 - protein, 9 aa, synthetic construct
GINASIKLH

SEQ ID NO: 9080 - protein, 9 aa, synthetic construct
GINASGHLH

SEQ ID NO: 9081 - protein, 9 aa, synthetic construct
PTNGVGHVH

SEQ ID NO: 9082 - protein, 9 aa, synthetic construct
GINAGIHVY

SEQ ID NO: 9083 - protein, 9 aa, synthetic construct
PTNGGVHLR

SEQ ID NO: 9084 - protein, 9 aa, synthetic construct
PLNGVAHLR

SEQ ID NO: 9085 - protein, 9 aa, synthetic construct
PLNGVAHLH

SEQ ID NO: 9086 - protein, 9 aa, synthetic construct
GIQGTAKLH

SEQ ID NO: 9087 - protein, 9 aa, synthetic construct
PTNGGLHLR

SEQ ID NO: 9088 - protein, 9 aa, synthetic construct
GIQGSAHLF

SEQ ID NO: 9089 - protein, 9 aa, synthetic construct
GIQGVVHVF

SEQ ID NO: 9090 - protein, 9 aa, synthetic construct
PLNGVAHVY

SEQ ID NO: 9091 - protein, 9 aa, synthetic construct
GIQGVGHVH

SEQ ID NO: 9092 - protein, 9 aa, synthetic construct
GIQGVGKLF

SEQ ID NO: 9093 - protein, 9 aa, synthetic construct
GIQGGVRLH

SEQ ID NO: 9094 - protein, 9 aa, synthetic construct
PTNGGAHVK

SEQ ID NO: 9095 - protein, 9 aa, synthetic construct
PTNGGAHVF

SEQ ID NO: 9096 - protein, 9 aa, synthetic construct
GIQGGIKLY

SEQ ID NO: 9097 - protein, 9 aa, synthetic construct
PTNGGARLH

SEQ ID NO: 9098 - protein, 9 aa, synthetic construct
PTNGGARVY

SEQ ID NO: 9099 - protein, 9 aa, synthetic construct
GIQAAAHLF

SEQ ID NO: 9100 - protein, 9 aa, synthetic construct
GIQAAAKLF

SEQ ID NO: 9101 - protein, 9 aa, synthetic construct
PTNGGIHLY

SEQ ID NO: 9102 - protein, 9 aa, synthetic construct
PTNGGIHLF

SEQ ID NO: 9103 - protein, 9 aa, synthetic construct
PTNGGIHVY

SEQ ID NO: 9104 - protein, 9 aa, synthetic construct
PTNGGIHVF

SEQ ID NO: 9105 - protein, 9 aa, synthetic construct
PTNGGIKLY

SEQ ID NO: 9106 - protein, 9 aa, synthetic construct
GIQASIHLH

SEQ ID NO: 9107 - protein, 9 aa, synthetic construct
GIQASIHLF

SEQ ID NO: 9108 - protein, 9 aa, synthetic construct
GIQASIKLH

SEQ ID NO: 9109 - protein, 9 aa, synthetic construct
GIQASGRLY

SEQ ID NO: 9110 - protein, 9 aa, synthetic construct
GIQASGKVH

SEQ ID NO: 9111 - protein, 9 aa, synthetic construct
GIQAVVHLY

SEQ ID NO: 9112 - protein, 9 aa, synthetic construct
GIQAVVHLR

SEQ ID NO: 9113 - protein, 9 aa, synthetic construct
GIQAVVHVY

SEQ ID NO: 9114 - protein, 9 aa, synthetic construct
GIQAVVHVR

SEQ ID NO: 9115 - protein, 9 aa, synthetic construct
GIQAVVHVH

SEQ ID NO: 9116 - protein, 9 aa, synthetic construct
GIQAVVHVK

SEQ ID NO: 9117 - protein, 9 aa, synthetic construct
GIQAVLHVF

SEQ ID NO: 9118 - protein, 9 aa, synthetic construct
GIQAVAHLH

SEQ ID NO: 9119 - protein, 9 aa, synthetic construct
GIQAVAHVH

SEQ ID NO: 9120 - protein, 9 aa, synthetic construct
GIQAVAKVF

SEQ ID NO: 9121 - protein, 9 aa, synthetic construct
GIQAVGHVY

SEQ ID NO: 9122 - protein, 9 aa, synthetic construct
GIQAVGHVH

SEQ ID NO: 9123 - protein, 9 aa, synthetic construct
GIQAGIHLY

SEQ ID NO: 9124 - protein, 9 aa, synthetic construct
GIQAGIHVY

SEQ ID NO: 9125 - protein, 9 aa, synthetic construct
GIQAGIRLF

SEQ ID NO: 9126 - protein, 9 aa, synthetic construct
GIPGAVKVH

SEQ ID NO: 9127 - protein, 9 aa, synthetic construct
GIPGALHVY

SEQ ID NO: 9128 - protein, 9 aa, synthetic construct
GIPGAIHLY

SEQ ID NO: 9129 - protein, 9 aa, synthetic construct
GIPGTAHVY

SEQ ID NO: 9130 - protein, 9 aa, synthetic construct
GIPGVVKLF

SEQ ID NO: 9131 - protein, 9 aa, synthetic construct
GIPGVAKLH

SEQ ID NO: 9132 - protein, 9 aa, synthetic construct
PTNAAAHLH

SEQ ID NO: 9133 - protein, 9 aa, synthetic construct
PTNAAAHVR

SEQ ID NO: 9134 - protein, 9 aa, synthetic construct
PLNGVAKLH

SEQ ID NO: 9135 - protein, 9 aa, synthetic construct
GIPAAVKVF

SEQ ID NO: 9136 - protein, 9 aa, synthetic construct
PTNAAARVF

SEQ ID NO: 9137 - protein, 9 aa, synthetic construct
GIPAAAHLH

SEQ ID NO: 9138 - protein, 9 aa, synthetic construct
PTNAAAKLF

SEQ ID NO: 9139 - protein, 9 aa, synthetic construct
GIPAAIHLR

SEQ ID NO: 9140 - protein, 9 aa, synthetic construct
GIPAAIHLF

SEQ ID NO: 9141 - protein, 9 aa, synthetic construct
GIPAAIKVH

SEQ ID NO: 9142 - protein, 9 aa, synthetic construct
GIPAAGKLH

SEQ ID NO: 9143 - protein, 9 aa, synthetic construct
PTNAAIHVH

SEQ ID NO: 9144 - protein, 9 aa, synthetic construct
GIPATGRVR

SEQ ID NO: 9145 - protein, 9 aa, synthetic construct
GIPASIKLH

SEQ ID NO: 9146 - protein, 9 aa, synthetic construct
GIPASIKVF

SEQ ID NO: 9147 - protein, 9 aa, synthetic construct
GIPASGKVH

SEQ ID NO: 9148 - protein, 9 aa, synthetic construct
GIPAVLHVH

SEQ ID NO: 9149 - protein, 9 aa, synthetic construct
PLNGVAKVF

SEQ ID NO: 9150 - protein, 9 aa, synthetic construct
GIPAGAKLY

SEQ ID NO: 9151 - protein, 9 aa, synthetic construct
PLNGTTRLH

SEQ ID NO: 9152 - protein, 9 aa, synthetic construct
PTNATVKLY

SEQ ID NO: 9153 - protein, 9 aa, synthetic construct
PLNGVSKLF

SEQ ID NO: 9154 - protein, 9 aa, synthetic construct
PLNGVTRLH

SEQ ID NO: 9155 - protein, 9 aa, synthetic construct
PLNGVTRLF

SEQ ID NO: 9156 - protein, 9 aa, synthetic construct
PLNGGSHVR

SEQ ID NO: 9157 - protein, 9 aa, synthetic construct
PLNGGTHVR

SEQ ID NO: 9158 - protein, 9 aa, synthetic construct
PTNATLHLR

SEQ ID NO: 9159 - protein, 9 aa, synthetic construct
PLQGVSKVF

SEQ ID NO: 9160 - protein, 9 aa, synthetic construct
PLQGVTRVY

SEQ ID NO: 9161 - protein, 9 aa, synthetic construct
PLQGVTKLH

SEQ ID NO: 9162 - protein, 9 aa, synthetic construct
PTNGASRVY

SEQ ID NO: 9163 - protein, 9 aa, synthetic construct
PTNGATRLH

SEQ ID NO: 9164 - protein, 9 aa, synthetic construct
PTNGATRLF

SEQ ID NO: 9165 - protein, 9 aa, synthetic construct
PTNGATRVR

SEQ ID NO: 9166 - protein, 9 aa, synthetic construct
PTNGATRVH

SEQ ID NO: 9167 - protein, 9 aa, synthetic construct
PTNGATKLH

SEQ ID NO: 9168 - protein, 9 aa, synthetic construct
PTNGATKVY

SEQ ID NO: 9169 - protein, 9 aa, synthetic construct
PTNGATKVF

SEQ ID NO: 9170 - protein, 9 aa, synthetic construct
PTNGTTRVY

SEQ ID NO: 9171 - protein, 9 aa, synthetic construct
PTNGSTHVY

SEQ ID NO: 9172 - protein, 9 aa, synthetic construct
PTNGVTHVH

SEQ ID NO: 9173 - protein, 9 aa, synthetic construct
PTNGVTHVK

SEQ ID NO: 9174 - protein, 9 aa, synthetic construct
PTNATAKLH

SEQ ID NO: 9175 - protein, 9 aa, synthetic construct
PTNGGTRVY

SEQ ID NO: 9176 - protein, 9 aa, synthetic construct
PTQGASHLK

SEQ ID NO: 9177 - protein, 9 aa, synthetic construct
PTNATGHLH

SEQ ID NO: 9178 - protein, 9 aa, synthetic construct
PTNASLHLR

SEQ ID NO: 9179 - protein, 9 aa, synthetic construct
PLNGVIKLH

SEQ ID NO: 9180 - protein, 9 aa, synthetic construct
PTNASIKLH

SEQ ID NO: 9181 - protein, 9 aa, synthetic construct
PTNASGHLY

SEQ ID NO: 9182 - protein, 9 aa, synthetic construct
PTNASGHLH

SEQ ID NO: 9183 - protein, 9 aa, synthetic construct
PLNGALKVH

SEQ ID NO: 9184 - protein, 9 aa, synthetic construct
PLNGVGHVY

SEQ ID NO: 9185 - protein, 9 aa, synthetic construct
PLNGVGHVH

SEQ ID NO: 9186 - protein, 9 aa, synthetic construct
PTNAVAKLH

SEQ ID NO: 9187 - protein, 9 aa, synthetic construct
PLNGALKVF

SEQ ID NO: 9188 - protein, 9 aa, synthetic construct
PTNAGLKLF

SEQ ID NO: 9189 - protein, 9 aa, synthetic construct
PLNGVGKLH

SEQ ID NO: 9190 - protein, 9 aa, synthetic construct
PLNGVGKLF

SEQ ID NO: 9191 - protein, 9 aa, synthetic construct
PTNAGIHLY

SEQ ID NO: 9192 - protein, 9 aa, synthetic construct
PTNAGIHVR

SEQ ID NO: 9193 - protein, 9 aa, synthetic construct
PTNAGIHVK

SEQ ID NO: 9194 - protein, 9 aa, synthetic construct
PTNAGIRLY

SEQ ID NO: 9195 - protein, 9 aa, synthetic construct
PTNAGIKVH

SEQ ID NO: 9196 - protein, 9 aa, synthetic construct
PLNGVGKVF

SEQ ID NO: 9197 - protein, 9 aa, synthetic construct
PLNGGVHLR

SEQ ID NO: 9198 - protein, 9 aa, synthetic construct
PLNGGVHLK

SEQ ID NO: 9199 - protein, 9 aa, synthetic construct
PLNGAAHLR

SEQ ID NO: 9200 - protein, 9 aa, synthetic construct
PTQGAGHLH

SEQ ID NO: 9201 - protein, 9 aa, synthetic construct
PTQGTVHLR

SEQ ID NO: 9202 - protein, 9 aa, synthetic construct
PLNGGVRVH

SEQ ID NO: 9203 - protein, 9 aa, synthetic construct
PTQGTVKLK

SEQ ID NO: 9204 - protein, 9 aa, synthetic construct
PTQGTLHLH

SEQ ID NO: 9205 - protein, 9 aa, synthetic construct
PTQGTLHVK

SEQ ID NO: 9206 - protein, 9 aa, synthetic construct
PLNGAAHLH

SEQ ID NO: 9207 - protein, 9 aa, synthetic construct
PTQGTLKVH

SEQ ID NO: 9208 - protein, 9 aa, synthetic construct
PTQGTAKLH

SEQ ID NO: 9209 - protein, 9 aa, synthetic construct
PTQGTIKLF

SEQ ID NO: 9210 - protein, 9 aa, synthetic construct
PTQGTIKVF

SEQ ID NO: 9211 - protein, 9 aa, synthetic construct
PTQGTGRVH

SEQ ID NO: 9212 - protein, 9 aa, synthetic construct
PTQGSVHLY

SEQ ID NO: 9213 - protein, 9 aa, synthetic construct
PTQGSVHLH

SEQ ID NO: 9214 - protein, 9 aa, synthetic construct
PTQGSVHLK

SEQ ID NO: 9215 - protein, 9 aa, synthetic construct
PTQGSLHLY

SEQ ID NO: 9216 - protein, 9 aa, synthetic construct
PTQGSLHLR

SEQ ID NO: 9217 - protein, 9 aa, synthetic construct
PTQGSLHLK

SEQ ID NO: 9218 - protein, 9 aa, synthetic construct
PTQGSLHVH

SEQ ID NO: 9219 - protein, 9 aa, synthetic construct
PTQGSLKLY

SEQ ID NO: 9220 - protein, 9 aa, synthetic construct
PTQGSLKVH

SEQ ID NO: 9221 - protein, 9 aa, synthetic construct
PTQGSAHLH

SEQ ID NO: 9222 - protein, 9 aa, synthetic construct
PTQGSAHVY

SEQ ID NO: 9223 - protein, 9 aa, synthetic construct
PTQGSAHVF

SEQ ID NO: 9224 - protein, 9 aa, synthetic construct
PTQGSARVY

SEQ ID NO: 9225 - protein, 9 aa, synthetic construct
PTQGSAKLH

SEQ ID NO: 9226 - protein, 9 aa, synthetic construct
PLNGAAHLF

SEQ ID NO: 9227 - protein, 9 aa, synthetic construct
PTQGSIKLY

SEQ ID NO: 9228 - protein, 9 aa, synthetic construct
PTQGSIKLH

SEQ ID NO: 9229 - protein, 9 aa, synthetic construct
PTQGSGHLF

SEQ ID NO: 9230 - protein, 9 aa, synthetic construct
PTQGVVKVH

SEQ ID NO: 9231 - protein, 9 aa, synthetic construct
PLNGAAHVY

SEQ ID NO: 9232 - protein, 9 aa, synthetic construct
PTQGVAHVY

SEQ ID NO: 9233 - protein, 9 aa, synthetic construct
PTQGVIHVY

SEQ ID NO: 9234 - protein, 9 aa, synthetic construct
PTQGVIHVK

SEQ ID NO: 9235 - protein, 9 aa, synthetic construct
PTQGVGHVH

SEQ ID NO: 9236 - protein, 9 aa, synthetic construct
PTQGGVHLR

SEQ ID NO: 9237 - protein, 9 aa, synthetic construct
PTQGGVHLK

SEQ ID NO: 9238 - protein, 9 aa, synthetic construct
PTQGGLHLH

SEQ ID NO: 9239 - protein, 9 aa, synthetic construct
PTQGGLKVY

SEQ ID NO: 9240 - protein, 9 aa, synthetic construct
PTQGGAHLF

SEQ ID NO: 9241 - protein, 9 aa, synthetic construct
PLNGGAHVH

SEQ ID NO: 9242 - protein, 9 aa, synthetic construct
PLNGGAHVK

SEQ ID NO: 9243 - protein, 9 aa, synthetic construct
PLNGGAHVF

SEQ ID NO: 9244 - protein, 9 aa, synthetic construct
PTQGGIHVY

SEQ ID NO: 9245 - protein, 9 aa, synthetic construct
PTQGGIRLF

SEQ ID NO: 9246 - protein, 9 aa, synthetic construct
PLNGGARLH

SEQ ID NO: 9247 - protein, 9 aa, synthetic construct
PLNGGARVY

SEQ ID NO: 9248 - protein, 9 aa, synthetic construct
PTQAAVHLR

SEQ ID NO: 9249 - protein, 9 aa, synthetic construct
PTQAAAHLH

SEQ ID NO: 9250 - protein, 9 aa, synthetic construct
PLNGAAHVF

SEQ ID NO: 9251 - protein, 9 aa, synthetic construct
PLNGGIHLY

SEQ ID NO: 9252 - protein, 9 aa, synthetic construct
PTQASLHLH

SEQ ID NO: 9253 - protein, 9 aa, synthetic construct
PTQASAHLF

SEQ ID NO: 9254 - protein, 9 aa, synthetic construct
PTQASGKVY

SEQ ID NO: 9255 - protein, 9 aa, synthetic construct
PLNGAARLH

SEQ ID NO: 9256 - protein, 9 aa, synthetic construct
PLNGGGHLY

SEQ ID NO: 9257 - protein, 9 aa, synthetic construct
PLNGGGHLH

SEQ ID NO: 9258 - protein, 9 aa, synthetic construct
PTQAVIHLK

SEQ ID NO: 9259 - protein, 9 aa, synthetic construct
PTQAGVRVY

SEQ ID NO: 9260 - protein, 9 aa, synthetic construct
PTQAGVKLY

SEQ ID NO: 9261 - protein, 9 aa, synthetic construct
PTQAGIHVY

SEQ ID NO: 9262 - protein, 9 aa, synthetic construct
PTQAGIRLF

SEQ ID NO: 9263 - protein, 9 aa, synthetic construct
PLNGGGKVF

SEQ ID NO: 9264 - protein, 9 aa, synthetic construct
PLNAAVHLY

SEQ ID NO: 9265 - protein, 9 aa, synthetic construct
PTPGAVHLY

SEQ ID NO: 9266 - protein, 9 aa, synthetic construct
PTPGAVKLH

SEQ ID NO: 9267 - protein, 9 aa, synthetic construct
PTPGALHVY

SEQ ID NO: 9268 - protein, 9 aa, synthetic construct
PLNAAVHVY

SEQ ID NO: 9269 - protein, 9 aa, synthetic construct
PTPGAAHLH

SEQ ID NO: 9270 - protein, 9 aa, synthetic construct
PTPGAAKLF

SEQ ID NO: 9271 - protein, 9 aa, synthetic construct
PTPGAIRLH

SEQ ID NO: 9272 - protein, 9 aa, synthetic construct
PTPGAGHLY

SEQ ID NO: 9273 - protein, 9 aa, synthetic construct
PTPGAGKVF

SEQ ID NO: 9274 - protein, 9 aa, synthetic construct
PLNAAVRVH

SEQ ID NO: 9275 - protein, 9 aa, synthetic construct
PTPGTVKLF

SEQ ID NO: 9276 - protein, 9 aa, synthetic construct
PTPGTAHLR

SEQ ID NO: 9277 - protein, 9 aa, synthetic construct
PTPGTIRLY

SEQ ID NO: 9278 - protein, 9 aa, synthetic construct
PTPGTGHLF

SEQ ID NO: 9279 - protein, 9 aa, synthetic construct
PTPGSLHVK

SEQ ID NO: 9280 - protein, 9 aa, synthetic construct
PLNGAARVF

SEQ ID NO: 9281 - protein, 9 aa, synthetic construct
PTPGVVHLH

SEQ ID NO: 9282 - protein, 9 aa, synthetic construct
PTPGVVHLK

SEQ ID NO: 9283 - protein, 9 aa, synthetic construct
PTPGVLHLY

SEQ ID NO: 9284 - protein, 9 aa, synthetic construct
PTPGVLHLR

SEQ ID NO: 9285 - protein, 9 aa, synthetic construct
PTPGVLHLH

SEQ ID NO: 9286 - protein, 9 aa, synthetic construct
PTPGVLHVK

SEQ ID NO: 9287 - protein, 9 aa, synthetic construct
PLNGAAKLY

SEQ ID NO: 9288 - protein, 9 aa, synthetic construct
PTPGVAHLR

SEQ ID NO: 9289 - protein, 9 aa, synthetic construct
PTPGVIHVK

SEQ ID NO: 9290 - protein, 9 aa, synthetic construct
PTPGVGHVH

SEQ ID NO: 9291 - protein, 9 aa, synthetic construct
PTPGGVHLR

SEQ ID NO: 9292 - protein, 9 aa, synthetic construct
PTPGGVHLK

SEQ ID NO: 9293 - protein, 9 aa, synthetic construct
PLNAAAHLH

SEQ ID NO: 9294 - protein, 9 aa, synthetic construct
PTPGGLHVK

SEQ ID NO: 9295 - protein, 9 aa, synthetic construct
PTPGGAHLY

SEQ ID NO: 9296 - protein, 9 aa, synthetic construct
PTPGGAHLF

SEQ ID NO: 9297 - protein, 9 aa, synthetic construct
PTPGGAHVK

SEQ ID NO: 9298 - protein, 9 aa, synthetic construct
PTPGGAHVF

SEQ ID NO: 9299 - protein, 9 aa, synthetic construct
PTPGGARLH

SEQ ID NO: 9300 - protein, 9 aa, synthetic construct
PTPGGAKLY

SEQ ID NO: 9301 - protein, 9 aa, synthetic construct
PLNGAAKLH

SEQ ID NO: 9302 - protein, 9 aa, synthetic construct
PTPGGGHLH

SEQ ID NO: 9303 - protein, 9 aa, synthetic construct
PTPGGGHLK

SEQ ID NO: 9304 - protein, 9 aa, synthetic construct
PTPGGGHLF

SEQ ID NO: 9305 - protein, 9 aa, synthetic construct
PTPGGGHVY

SEQ ID NO: 9306 - protein, 9 aa, synthetic construct
PTPGGGHVH

SEQ ID NO: 9307 - protein, 9 aa, synthetic construct
PTPGGGHVK

SEQ ID NO: 9308 - protein, 9 aa, synthetic construct
PTPGGGKLH

SEQ ID NO: 9309 - protein, 9 aa, synthetic construct
PTPAAVHLY

SEQ ID NO: 9310 - protein, 9 aa, synthetic construct
PTPAAVHLK

SEQ ID NO: 9311 - protein, 9 aa, synthetic construct
PTPAAVKVH

SEQ ID NO: 9312 - protein, 9 aa, synthetic construct
PTPAALHVY

SEQ ID NO: 9313 - protein, 9 aa, synthetic construct
PLNAAARVF

SEQ ID NO: 9314 - protein, 9 aa, synthetic construct
PTPAAAHLR

SEQ ID NO: 9315 - protein, 9 aa, synthetic construct
PTPAAAHLF

SEQ ID NO: 9316 - protein, 9 aa, synthetic construct
PTPAAAHVK

SEQ ID NO: 9317 - protein, 9 aa, synthetic construct
PTPAAGKLH

SEQ ID NO: 9318 - protein, 9 aa, synthetic construct
PTPATVHLY

SEQ ID NO: 9319 - protein, 9 aa, synthetic construct
PTPATVHLK

SEQ ID NO: 9320 - protein, 9 aa, synthetic construct
PTPATVRLF

SEQ ID NO: 9321 - protein, 9 aa, synthetic construct
PTPATVKLY

SEQ ID NO: 9322 - protein, 9 aa, synthetic construct
PTPATVKVF

SEQ ID NO: 9323 - protein, 9 aa, synthetic construct
PTPATLKLF

SEQ ID NO: 9324 - protein, 9 aa, synthetic construct
PTPATAHLH

SEQ ID NO: 9325 - protein, 9 aa, synthetic construct
PTPATAHVY

SEQ ID NO: 9326 - protein, 9 aa, synthetic construct
PLNGAAKVY

SEQ ID NO: 9327 - protein, 9 aa, synthetic construct
PTPATGHLF

SEQ ID NO: 9328 - protein, 9 aa, synthetic construct
PTPATGRVR

SEQ ID NO: 9329 - protein, 9 aa, synthetic construct
PTPASAHLH

SEQ ID NO: 9330 - protein, 9 aa, synthetic construct
PTPASIHLK

SEQ ID NO: 9331 - protein, 9 aa, synthetic construct
PTPASIKLH

SEQ ID NO: 9332 - protein, 9 aa, synthetic construct
PTPASIKVY

SEQ ID NO: 9333 - protein, 9 aa, synthetic construct
PTPASIKVF

SEQ ID NO: 9334 - protein, 9 aa, synthetic construct
PTPASGKLH

SEQ ID NO: 9335 - protein, 9 aa, synthetic construct
PTPASGKVH

SEQ ID NO: 9336 - protein, 9 aa, synthetic construct
PTPAVVHLH

SEQ ID NO: 9337 - protein, 9 aa, synthetic construct
PLNAAGHLF

SEQ ID NO: 9338 - protein, 9 aa, synthetic construct
PLNAAGHVH

SEQ ID NO: 9339 - protein, 9 aa, synthetic construct
PTPAVGHVY

SEQ ID NO: 9340 - protein, 9 aa, synthetic construct
PLNAAGRLF

SEQ ID NO: 9341 - protein, 9 aa, synthetic construct
PTPAVGKLY

SEQ ID NO: 9342 - protein, 9 aa, synthetic construct
PTPAGAHLR

SEQ ID NO: 9343 - protein, 9 aa, synthetic construct
PTPAGAHLF

SEQ ID NO: 9344 - protein, 9 aa, synthetic construct
PLNAAGKLH

SEQ ID NO: 9345 - protein, 9 aa, synthetic construct
PTPAGAKLY

SEQ ID NO: 9346 - protein, 9 aa, synthetic construct
PTPAGIRLF

SEQ ID NO: 9347 - protein, 9 aa, synthetic construct
PTPAGIKLH

SEQ ID NO: 9348 - protein, 9 aa, synthetic construct
PLNAAGKVF

SEQ ID NO: 9349 - protein, 9 aa, synthetic construct
PTPAGGKVH

SEQ ID NO: 9350 - protein, 9 aa, synthetic construct
PLNATVHLY

SEQ ID NO: 9351 - protein, 9 aa, synthetic construct
PSNGAVHLY

SEQ ID NO: 9352 - protein, 9 aa, synthetic construct
PSNGAVHLR

SEQ ID NO: 9353 - protein, 9 aa, synthetic construct
PSNGAVHLK

SEQ ID NO: 9354 - protein, 9 aa, synthetic construct
PSNGAVRVH

SEQ ID NO: 9355 - protein, 9 aa, synthetic construct
PSNGAVKLY

SEQ ID NO: 9356 - protein, 9 aa, synthetic construct
PSNGAVKLH

SEQ ID NO: 9357 - protein, 9 aa, synthetic construct
PSNGAAHLH

SEQ ID NO: 9358 - protein, 9 aa, synthetic construct
PSNGAAKLF

SEQ ID NO: 9359 - protein, 9 aa, synthetic construct
PSNGAAKVF

SEQ ID NO: 9360 - protein, 9 aa, synthetic construct
PSNGAIHVH

SEQ ID NO: 9361 - protein, 9 aa, synthetic construct
PSNGAIKVH

SEQ ID NO: 9362 - protein, 9 aa, synthetic construct
PSNGAGHLY

SEQ ID NO: 9363 - protein, 9 aa, synthetic construct
PSNGAGKVF

SEQ ID NO: 9364 - protein, 9 aa, synthetic construct
PSNGTVHLK

SEQ ID NO: 9365 - protein, 9 aa, synthetic construct
PSNGTVRLF

SEQ ID NO: 9366 - protein, 9 aa, synthetic construct
PSNGTVKLY

SEQ ID NO: 9367 - protein, 9 aa, synthetic construct
PSNGTVKLK

SEQ ID NO: 9368 - protein, 9 aa, synthetic construct
PSNGTLHLR

SEQ ID NO: 9369 - protein, 9 aa, synthetic construct
PSNGTLHVR

SEQ ID NO: 9370 - protein, 9 aa, synthetic construct
PSNGTLHVK

SEQ ID NO: 9371 - protein, 9 aa, synthetic construct
PLNATVKLY

SEQ ID NO: 9372 - protein, 9 aa, synthetic construct
PSNGTAHLR

SEQ ID NO: 9373 - protein, 9 aa, synthetic construct
PSNGTAHLF

SEQ ID NO: 9374 - protein, 9 aa, synthetic construct
PLNATVKLK

SEQ ID NO: 9375 - protein, 9 aa, synthetic construct
PSNGTAKLH

SEQ ID NO: 9376 - protein, 9 aa, synthetic construct
PLNATVKLF

SEQ ID NO: 9377 - protein, 9 aa, synthetic construct
PSNGTIRLY

SEQ ID NO: 9378 - protein, 9 aa, synthetic construct
PSNGTIKVH

SEQ ID NO: 9379 - protein, 9 aa, synthetic construct
PSNGTGHLR

SEQ ID NO: 9380 - protein, 9 aa, synthetic construct
PSNGTGHVF

SEQ ID NO: 9381 - protein, 9 aa, synthetic construct
PSNGTGRLY

SEQ ID NO: 9382 - protein, 9 aa, synthetic construct
PSNGTGKLF

SEQ ID NO: 9383 - protein, 9 aa, synthetic construct
PSNGTGKVH

SEQ ID NO: 9384 - protein, 9 aa, synthetic construct
PSNGSVHLY

SEQ ID NO: 9385 - protein, 9 aa, synthetic construct
PSNGSVHVR

SEQ ID NO: 9386 - protein, 9 aa, synthetic construct
PLNATLHLR

SEQ ID NO: 9387 - protein, 9 aa, synthetic construct
PSNGSLHLY

SEQ ID NO: 9388 - protein, 9 aa, synthetic construct
PSNGSLHLR

SEQ ID NO: 9389 - protein, 9 aa, synthetic construct
PSNGSLHLK

SEQ ID NO: 9390 - protein, 9 aa, synthetic construct
PSNGSLHVK

SEQ ID NO: 9391 - protein, 9 aa, synthetic construct
PSNGSAHLF

SEQ ID NO: 9392 - protein, 9 aa, synthetic construct
PSNGSAHVF

SEQ ID NO: 9393 - protein, 9 aa, synthetic construct
PSNGSIHVH

SEQ ID NO: 9394 - protein, 9 aa, synthetic construct
PSNGSIKLH

SEQ ID NO: 9395 - protein, 9 aa, synthetic construct
PSNGSIKVF

SEQ ID NO: 9396 - protein, 9 aa, synthetic construct
PSNGSGHLY

SEQ ID NO: 9397 - protein, 9 aa, synthetic construct
PSNGSGHLF

SEQ ID NO: 9398 - protein, 9 aa, synthetic construct
PSNGVLHLK

SEQ ID NO: 9399 - protein, 9 aa, synthetic construct
PSNGVAHLY

SEQ ID NO: 9400 - protein, 9 aa, synthetic construct
PSNGVAHLK

SEQ ID NO: 9401 - protein, 9 aa, synthetic construct
PSNGVAHLF

SEQ ID NO: 9402 - protein, 9 aa, synthetic construct
PSNGVAHVH

SEQ ID NO: 9403 - protein, 9 aa, synthetic construct
PSNGVARVF

SEQ ID NO: 9404 - protein, 9 aa, synthetic construct
PSNGVAKLH

SEQ ID NO: 9405 - protein, 9 aa, synthetic construct
PSNGVAKVF

SEQ ID NO: 9406 - protein, 9 aa, synthetic construct
PSNGVIRLH

SEQ ID NO: 9407 - protein, 9 aa, synthetic construct
PSNGVIRLF

SEQ ID NO: 9408 - protein, 9 aa, synthetic construct
PSNGVIKLY

SEQ ID NO: 9409 - protein, 9 aa, synthetic construct
PSNGVIKLF

SEQ ID NO: 9410 - protein, 9 aa, synthetic construct
PSNGVIKVH

SEQ ID NO: 9411 - protein, 9 aa, synthetic construct
PSNGVGHLH

SEQ ID NO: 9412 - protein, 9 aa, synthetic construct
PSNGVGHVH

SEQ ID NO: 9413 - protein, 9 aa, synthetic construct
PSNGVGHVK

SEQ ID NO: 9414 - protein, 9 aa, synthetic construct
PSNGVGHVF

SEQ ID NO: 9415 - protein, 9 aa, synthetic construct
PSNGVGKLF

SEQ ID NO: 9416 - protein, 9 aa, synthetic construct
PSNGGVHLY

SEQ ID NO: 9417 - protein, 9 aa, synthetic construct
PSNGGVHLR

SEQ ID NO: 9418 - protein, 9 aa, synthetic construct
PSNGGVHLK

SEQ ID NO: 9419 - protein, 9 aa, synthetic construct
PSNGGLHVR

SEQ ID NO: 9420 - protein, 9 aa, synthetic construct
PSNGGLHVH

SEQ ID NO: 9421 - protein, 9 aa, synthetic construct
PSNGGLHVK

SEQ ID NO: 9422 - protein, 9 aa, synthetic construct
PSNGGAHLH

SEQ ID NO: 9423 - protein, 9 aa, synthetic construct
PSNGGAHVH

SEQ ID NO: 9424 - protein, 9 aa, synthetic construct
PSNGGAHVK

SEQ ID NO: 9425 - protein, 9 aa, synthetic construct
PSNGGAHVF

SEQ ID NO: 9426 - protein, 9 aa, synthetic construct
PSNGGARLH

SEQ ID NO: 9427 - protein, 9 aa, synthetic construct
PSNGGARVY

SEQ ID NO: 9428 - protein, 9 aa, synthetic construct
PSNGGAKLY

SEQ ID NO: 9429 - protein, 9 aa, synthetic construct
PSNGGAKLF

SEQ ID NO: 9430 - protein, 9 aa, synthetic construct
PSNGGIHLY

SEQ ID NO: 9431 - protein, 9 aa, synthetic construct
PSNGGIHLR

SEQ ID NO: 9432 - protein, 9 aa, synthetic construct
PSNGGIHLH

SEQ ID NO: 9433 - protein, 9 aa, synthetic construct
PSNGGIHLK

SEQ ID NO: 9434 - protein, 9 aa, synthetic construct
PSNGGIHVY

SEQ ID NO: 9435 - protein, 9 aa, synthetic construct
PSNGGIHVR

SEQ ID NO: 9436 - protein, 9 aa, synthetic construct
PSNGGIHVF

SEQ ID NO: 9437 - protein, 9 aa, synthetic construct
PSNGGIRLY

SEQ ID NO: 9438 - protein, 9 aa, synthetic construct
PSNGGIRLF

SEQ ID NO: 9439 - protein, 9 aa, synthetic construct
PSNGGGHLY

SEQ ID NO: 9440 - protein, 9 aa, synthetic construct
PSNGGGHLH

SEQ ID NO: 9441 - protein, 9 aa, synthetic construct
PSNGGGKVF

SEQ ID NO: 9442 - protein, 9 aa, synthetic construct
PSNAAVHLY

SEQ ID NO: 9443 - protein, 9 aa, synthetic construct
PSNAAVHLR

SEQ ID NO: 9444 - protein, 9 aa, synthetic construct
PSNAAVRVH

SEQ ID NO: 9445 - protein, 9 aa, synthetic construct
PSNAAVKLY

SEQ ID NO: 9446 - protein, 9 aa, synthetic construct
PSNAAVKLF

SEQ ID NO: 9447 - protein, 9 aa, synthetic construct
PSNAAAHLR

SEQ ID NO: 9448 - protein, 9 aa, synthetic construct
PSNAAAHLH

SEQ ID NO: 9449 - protein, 9 aa, synthetic construct
PSNAAAHLK

SEQ ID NO: 9450 - protein, 9 aa, synthetic construct
PSNAAAHLF

SEQ ID NO: 9451 - protein, 9 aa, synthetic construct
PSNAAAHVY

SEQ ID NO: 9452 - protein, 9 aa, synthetic construct
PLNATAKLH

SEQ ID NO: 9453 - protein, 9 aa, synthetic construct
PSNAAARLF

SEQ ID NO: 9454 - protein, 9 aa, synthetic construct
PSNAAARVY

SEQ ID NO: 9455 - protein, 9 aa, synthetic construct
PSNAAARVR

SEQ ID NO: 9456 - protein, 9 aa, synthetic construct
PSNAAARVH

SEQ ID NO: 9457 - protein, 9 aa, synthetic construct
PSNAAAKLY

SEQ ID NO: 9458 - protein, 9 aa, synthetic construct
PSNAAAKLH

SEQ ID NO: 9459 - protein, 9 aa, synthetic construct
PSNAAAKLF

SEQ ID NO: 9460 - protein, 9 aa, synthetic construct
PSNAAAKVY

SEQ ID NO: 9461 - protein, 9 aa, synthetic construct
PSNAAAKVH

SEQ ID NO: 9462 - protein, 9 aa, synthetic construct
PSNAAGHVH

SEQ ID NO: 9463 - protein, 9 aa, synthetic construct
PSNAAGRLF

SEQ ID NO: 9464 - protein, 9 aa, synthetic construct
PSNAAGRVR

SEQ ID NO: 9465 - protein, 9 aa, synthetic construct
PSNAAGRVF

SEQ ID NO: 9466 - protein, 9 aa, synthetic construct
PSNAAGKLH

SEQ ID NO: 9467 - protein, 9 aa, synthetic construct
PSNATVHLY

SEQ ID NO: 9468 - protein, 9 aa, synthetic construct
PSNATVRLY

SEQ ID NO: 9469 - protein, 9 aa, synthetic construct
PSNATVKLH

SEQ ID NO: 9470 - protein, 9 aa, synthetic construct
PSNATVKLK

SEQ ID NO: 9471 - protein, 9 aa, synthetic construct
PSNATVKLF

SEQ ID NO: 9472 - protein, 9 aa, synthetic construct
PSNATVKVY

SEQ ID NO: 9473 - protein, 9 aa, synthetic construct
PSNATVKVH

SEQ ID NO: 9474 - protein, 9 aa, synthetic construct
PSNATVKVF

SEQ ID NO: 9475 - protein, 9 aa, synthetic construct
PSNATLHLR

SEQ ID NO: 9476 - protein, 9 aa, synthetic construct
PSNATLHVK

SEQ ID NO: 9477 - protein, 9 aa, synthetic construct
PLNATIHVY

SEQ ID NO: 9478 - protein, 9 aa, synthetic construct
PSNATLKLY

SEQ ID NO: 9479 - protein, 9 aa, synthetic construct
PSNATAHLH

SEQ ID NO: 9480 - protein, 9 aa, synthetic construct
PSNATARVF

SEQ ID NO: 9481 - protein, 9 aa, synthetic construct
PSNATAKLH

SEQ ID NO: 9482 - protein, 9 aa, synthetic construct
PSNATIHLF

SEQ ID NO: 9483 - protein, 9 aa, synthetic construct
PSNATIRLH

SEQ ID NO: 9484 - protein, 9 aa, synthetic construct
PSNATIKLY

SEQ ID NO: 9485 - protein, 9 aa, synthetic construct
PSNATIKLH

SEQ ID NO: 9486 - protein, 9 aa, synthetic construct
PSNATIKLK

SEQ ID NO: 9487 - protein, 9 aa, synthetic construct
PSNATIKLF

SEQ ID NO: 9488 - protein, 9 aa, synthetic construct
PSNATIKVY

SEQ ID NO: 9489 - protein, 9 aa, synthetic construct
PSNATIKVH

SEQ ID NO: 9490 - protein, 9 aa, synthetic construct
PSNATIKVF

SEQ ID NO: 9491 - protein, 9 aa, synthetic construct
PSNATGHLH

SEQ ID NO: 9492 - protein, 9 aa, synthetic construct
PSNATGHVF

SEQ ID NO: 9493 - protein, 9 aa, synthetic construct
PSNATGRLF

SEQ ID NO: 9494 - protein, 9 aa, synthetic construct
PSNATGKLH

SEQ ID NO: 9495 - protein, 9 aa, synthetic construct
PSNASVRLH

SEQ ID NO: 9496 - protein, 9 aa, synthetic construct
PSNASLHLK

SEQ ID NO: 9497 - protein, 9 aa, synthetic construct
PLNATIKLH

SEQ ID NO: 9498 - protein, 9 aa, synthetic construct
PSNASAKLF

SEQ ID NO: 9499 - protein, 9 aa, synthetic construct
PSNASIHLK

SEQ ID NO: 9500 - protein, 9 aa, synthetic construct
PSNASIHLF

SEQ ID NO: 9501 - protein, 9 aa, synthetic construct
PSNASIKLF

SEQ ID NO: 9502 - protein, 9 aa, synthetic construct
PSNASGKVF

SEQ ID NO: 9503 - protein, 9 aa, synthetic construct
PSNAVVHVH

SEQ ID NO: 9504 - protein, 9 aa, synthetic construct
PSNAVVKVY

SEQ ID NO: 9505 - protein, 9 aa, synthetic construct
PSNAVAHVR

SEQ ID NO: 9506 - protein, 9 aa, synthetic construct
PLNATGHVK

SEQ ID NO: 9507 - protein, 9 aa, synthetic construct
PSNAVGHLF

SEQ ID NO: 9508 - protein, 9 aa, synthetic construct
PSNAVGKVF

SEQ ID NO: 9509 - protein, 9 aa, synthetic construct
PSNAGVHLR

SEQ ID NO: 9510 - protein, 9 aa, synthetic construct
PSNAGVRVH

SEQ ID NO: 9511 - protein, 9 aa, synthetic construct
PSNAGVKVF

SEQ ID NO: 9512 - protein, 9 aa, synthetic construct
PSNAGLRLH

SEQ ID NO: 9513 - protein, 9 aa, synthetic construct
PSNAGAHLY

SEQ ID NO: 9514 - protein, 9 aa, synthetic construct
PSNAGAHLR

SEQ ID NO: 9515 - protein, 9 aa, synthetic construct
PLNATGKLH

SEQ ID NO: 9516 - protein, 9 aa, synthetic construct
PSNAGARVY

SEQ ID NO: 9517 - protein, 9 aa, synthetic construct
PSNAGAKLH

SEQ ID NO: 9518 - protein, 9 aa, synthetic construct
PLNATGKVY

SEQ ID NO: 9519 - protein, 9 aa, synthetic construct
PSQGAVHVK

SEQ ID NO: 9520 - protein, 9 aa, synthetic construct
PLNASVHLK

SEQ ID NO: 9521 - protein, 9 aa, synthetic construct
PSQGAAHVK

SEQ ID NO: 9522 - protein, 9 aa, synthetic construct
PLNASVHVK

SEQ ID NO: 9523 - protein, 9 aa, synthetic construct
PSQGAIHVH

SEQ ID NO: 9524 - protein, 9 aa, synthetic construct
PLNASVRLH

SEQ ID NO: 9525 - protein, 9 aa, synthetic construct
PSQGTVRLY

SEQ ID NO: 9526 - protein, 9 aa, synthetic construct
PLNASVRVH

SEQ ID NO: 9527 - protein, 9 aa, synthetic construct
PLNASVRVK

SEQ ID NO: 9528 - protein, 9 aa, synthetic construct
PLNASVRVF

SEQ ID NO: 9529 - protein, 9 aa, synthetic construct
PSQGTLRVY

SEQ ID NO: 9530 - protein, 9 aa, synthetic construct
PSQGTAHLR

SEQ ID NO: 9531 - protein, 9 aa, synthetic construct
PSQGTAHLH

SEQ ID NO: 9532 - protein, 9 aa, synthetic construct
PSQGTAHLK

SEQ ID NO: 9533 - protein, 9 aa, synthetic construct
PSQGTARLY

SEQ ID NO: 9534 - protein, 9 aa, synthetic construct
PLNASVKLF

SEQ ID NO: 9535 - protein, 9 aa, synthetic construct
PSQGTIHVY

SEQ ID NO: 9536 - protein, 9 aa, synthetic construct
PSQGTIKLY

SEQ ID NO: 9537 - protein, 9 aa, synthetic construct
PSQGTIKVH

SEQ ID NO: 9538 - protein, 9 aa, synthetic construct
PLNASVKVF

SEQ ID NO: 9539 - protein, 9 aa, synthetic construct
PSQGTGKVY

SEQ ID NO: 9540 - protein, 9 aa, synthetic construct
PLNASLHLH

SEQ ID NO: 9541 - protein, 9 aa, synthetic construct
PLNASLHVK

SEQ ID NO: 9542 - protein, 9 aa, synthetic construct
PSQGSGHLF

SEQ ID NO: 9543 - protein, 9 aa, synthetic construct
PLNASLRLF

SEQ ID NO: 9544 - protein, 9 aa, synthetic construct
PSQGVVHLY

SEQ ID NO: 9545 - protein, 9 aa, synthetic construct
PSQGVVKVF

SEQ ID NO: 9546 - protein, 9 aa, synthetic construct
PLNASLKLY

SEQ ID NO: 9547 - protein, 9 aa, synthetic construct
PSQGVAHLR

SEQ ID NO: 9548 - protein, 9 aa, synthetic construct
PLNASLKLH

SEQ ID NO: 9549 - protein, 9 aa, synthetic construct
PLNASLKLF

SEQ ID NO: 9550 - protein, 9 aa, synthetic construct
PSQGVIKLH

SEQ ID NO: 9551 - protein, 9 aa, synthetic construct
PSQGVIKVH

SEQ ID NO: 9552 - protein, 9 aa, synthetic construct
PLNASLKVF

SEQ ID NO: 9553 - protein, 9 aa, synthetic construct
PSQGVGKLR

SEQ ID NO: 9554 - protein, 9 aa, synthetic construct
PLNASAHLR

SEQ ID NO: 9555 - protein, 9 aa, synthetic construct
PSQGGVRVH

SEQ ID NO: 9556 - protein, 9 aa, synthetic construct
PSQGGVKLY

SEQ ID NO: 9557 - protein, 9 aa, synthetic construct
PLNASAHLF

SEQ ID NO: 9558 - protein, 9 aa, synthetic construct
PLNASAHVR

SEQ ID NO: 9559 - protein, 9 aa, synthetic construct
PSQGGIHLK

SEQ ID NO: 9560 - protein, 9 aa, synthetic construct
PSQAALHVR

SEQ ID NO: 9561 - protein, 9 aa, synthetic construct
PSQAAAHLF

SEQ ID NO: 9562 - protein, 9 aa, synthetic construct
PLNASAKLF

SEQ ID NO: 9563 - protein, 9 aa, synthetic construct
PSQAAIRLH

SEQ ID NO: 9564 - protein, 9 aa, synthetic construct
PSQAAIKVR

SEQ ID NO: 9565 - protein, 9 aa, synthetic construct
PLNGAIKLF

SEQ ID NO: 9566 - protein, 9 aa, synthetic construct
PSQATLKVH

SEQ ID NO: 9567 - protein, 9 aa, synthetic construct
PSQATAHVH

SEQ ID NO: 9568 - protein, 9 aa, synthetic construct
PSQATARLY

SEQ ID NO: 9569 - protein, 9 aa, synthetic construct
PSQATARVF

SEQ ID NO: 9570 - protein, 9 aa, synthetic construct
PSQATAKVF

SEQ ID NO: 9571 - protein, 9 aa, synthetic construct
PLNASIRLH

SEQ ID NO: 9572 - protein, 9 aa, synthetic construct
PSQATGHVY

SEQ ID NO: 9573 - protein, 9 aa, synthetic construct
PSQATGHVF

SEQ ID NO: 9574 - protein, 9 aa, synthetic construct
PSQATGRVY

SEQ ID NO: 9575 - protein, 9 aa, synthetic construct
PSQATGKLY

SEQ ID NO: 9576 - protein, 9 aa, synthetic construct
PSQASVKLF

SEQ ID NO: 9577 - protein, 9 aa, synthetic construct
PSQASAHVH

SEQ ID NO: 9578 - protein, 9 aa, synthetic construct
PSQASIHVF

SEQ ID NO: 9579 - protein, 9 aa, synthetic construct
PSQASIRVH

SEQ ID NO: 9580 - protein, 9 aa, synthetic construct
PLNASIKVH

SEQ ID NO: 9581 - protein, 9 aa, synthetic construct
PSQAVVHVH

SEQ ID NO: 9582 - protein, 9 aa, synthetic construct
PLNASGHLR

SEQ ID NO: 9583 - protein, 9 aa, synthetic construct
PSQAVAHVR

SEQ ID NO: 9584 - protein, 9 aa, synthetic construct
PSQAVAKLY

SEQ ID NO: 9585 - protein, 9 aa, synthetic construct
PLNASGHVF

SEQ ID NO: 9586 - protein, 9 aa, synthetic construct
PSQAVIHVK

SEQ ID NO: 9587 - protein, 9 aa, synthetic construct
PSQAVIKLH

SEQ ID NO: 9588 - protein, 9 aa, synthetic construct
PSQAVGKVF

SEQ ID NO: 9589 - protein, 9 aa, synthetic construct
PSQAGVHVF

SEQ ID NO: 9590 - protein, 9 aa, synthetic construct
PSQAGVRVH

SEQ ID NO: 9591 - protein, 9 aa, synthetic construct
PLNASGRVH

SEQ ID NO: 9592 - protein, 9 aa, synthetic construct
PSQAGIHVH

SEQ ID NO: 9593 - protein, 9 aa, synthetic construct
PLNASGKVF

SEQ ID NO: 9594 - protein, 9 aa, synthetic construct
PLNAVVHLY

SEQ ID NO: 9595 - protein, 9 aa, synthetic construct
PSPGAVRLY

SEQ ID NO: 9596 - protein, 9 aa, synthetic construct
PSPGAVRVH

SEQ ID NO: 9597 - protein, 9 aa, synthetic construct
PLNAVVHLH

SEQ ID NO: 9598 - protein, 9 aa, synthetic construct
PLNAVVHLK

SEQ ID NO: 9599 - protein, 9 aa, synthetic construct
PLNAVVHLF

SEQ ID NO: 9600 - protein, 9 aa, synthetic construct
PSPGALRVH

SEQ ID NO: 9601 - protein, 9 aa, synthetic construct
PLNAVVHVY

SEQ ID NO: 9602 - protein, 9 aa, synthetic construct
PLNAVVHVR

SEQ ID NO: 9603 - protein, 9 aa, synthetic construct
PSPGAAHLF

SEQ ID NO: 9604 - protein, 9 aa, synthetic construct
PLNAVVHVK

SEQ ID NO: 9605 - protein, 9 aa, synthetic construct
PSPGAGHLH

SEQ ID NO: 9606 - protein, 9 aa, synthetic construct
PSPGAGKVY

SEQ ID NO: 9607 - protein, 9 aa, synthetic construct
PSPGTVKVY

SEQ ID NO: 9608 - protein, 9 aa, synthetic construct
PSPGTLHVR

SEQ ID NO: 9609 - protein, 9 aa, synthetic construct
PSPGTLHVH

SEQ ID NO: 9610 - protein, 9 aa, synthetic construct
PSPGTLKVY

SEQ ID NO: 9611 - protein, 9 aa, synthetic construct
PSPGTLKVF

SEQ ID NO: 9612 - protein, 9 aa, synthetic construct
PLNAVVKLR

SEQ ID NO: 9613 - protein, 9 aa, synthetic construct
PSPGTAHLH

SEQ ID NO: 9614 - protein, 9 aa, synthetic construct
PSPGTAHLF

SEQ ID NO: 9615 - protein, 9 aa, synthetic construct
PSPGTAHVK

SEQ ID NO: 9616 - protein, 9 aa, synthetic construct
PLNAVVKLF

SEQ ID NO: 9617 - protein, 9 aa, synthetic construct
PSPGTIHLH

SEQ ID NO: 9618 - protein, 9 aa, synthetic construct
PSPGTIHVH

SEQ ID NO: 9619 - protein, 9 aa, synthetic construct
PLNAVVKVY

SEQ ID NO: 9620 - protein, 9 aa, synthetic construct
PSPGTGHVY

SEQ ID NO: 9621 - protein, 9 aa, synthetic construct
PSPGTGHVK

SEQ ID NO: 9622 - protein, 9 aa, synthetic construct
PSPGTGRVY

SEQ ID NO: 9623 - protein, 9 aa, synthetic construct
PSPGSVHLK

SEQ ID NO: 9624 - protein, 9 aa, synthetic construct
PSPGSLHLH

SEQ ID NO: 9625 - protein, 9 aa, synthetic construct
PSPGSAHLH

SEQ ID NO: 9626 - protein, 9 aa, synthetic construct
PLNAVLHVH

SEQ ID NO: 9627 - protein, 9 aa, synthetic construct
PSPGSIHVY

SEQ ID NO: 9628 - protein, 9 aa, synthetic construct
PSPGSGHVR

SEQ ID NO: 9629 - protein, 9 aa, synthetic construct
PSPGSGRLH

SEQ ID NO: 9630 - protein, 9 aa, synthetic construct
PSPGVAHLH

SEQ ID NO: 9631 - protein, 9 aa, synthetic construct
PSPGVAHLK

SEQ ID NO: 9632 - protein, 9 aa, synthetic construct
PSPGVIHLR

SEQ ID NO: 9633 - protein, 9 aa, synthetic construct
PSPGVIHLH

SEQ ID NO: 9634 - protein, 9 aa, synthetic construct
PSPGVGRLF

SEQ ID NO: 9635 - protein, 9 aa, synthetic construct
PLNAVAHLY

SEQ ID NO: 9636 - protein, 9 aa, synthetic construct
PSPGGLHLF

SEQ ID NO: 9637 - protein, 9 aa, synthetic construct
PSPGGAHVH

SEQ ID NO: 9638 - protein, 9 aa, synthetic construct
PSPGGARVF

SEQ ID NO: 9639 - protein, 9 aa, synthetic construct
PLNAVAHVK

SEQ ID NO: 9640 - protein, 9 aa, synthetic construct
PSPGGIHLH

SEQ ID NO: 9641 - protein, 9 aa, synthetic construct
PSPGGGHLH

SEQ ID NO: 9642 - protein, 9 aa, synthetic construct
PSPGGGHVH

SEQ ID NO: 9643 - protein, 9 aa, synthetic construct
PSPGGGRLF

SEQ ID NO: 9644 - protein, 9 aa, synthetic construct
PSPGGGRVY

SEQ ID NO: 9645 - protein, 9 aa, synthetic construct
PSPGGGKVY

SEQ ID NO: 9646 - protein, 9 aa, synthetic construct
PSPAAVRLF

SEQ ID NO: 9647 - protein, 9 aa, synthetic construct
PSPAAAHLY

SEQ ID NO: 9648 - protein, 9 aa, synthetic construct
PSPAAAHLR

SEQ ID NO: 9649 - protein, 9 aa, synthetic construct
PSPAAAHVY

SEQ ID NO: 9650 - protein, 9 aa, synthetic construct
PSPAAAHVR

SEQ ID NO: 9651 - protein, 9 aa, synthetic construct
PSPAAAHVK

SEQ ID NO: 9652 - protein, 9 aa, synthetic construct
PSPAAAHVF

SEQ ID NO: 9653 - protein, 9 aa, synthetic construct
PLNAVAKVH

SEQ ID NO: 9654 - protein, 9 aa, synthetic construct
PSPAAGRVH

SEQ ID NO: 9655 - protein, 9 aa, synthetic construct
PSPAAGKLH

SEQ ID NO: 9656 - protein, 9 aa, synthetic construct
PLNAVIHLR

SEQ ID NO: 9657 - protein, 9 aa, synthetic construct
PSPATVKLK

SEQ ID NO: 9658 - protein, 9 aa, synthetic construct
PLNAVIHVR

SEQ ID NO: 9659 - protein, 9 aa, synthetic construct
PSPATAHLY

SEQ ID NO: 9660 - protein, 9 aa, synthetic construct
PSPATAHLF

SEQ ID NO: 9661 - protein, 9 aa, synthetic construct
PLNAVIHVH

SEQ ID NO: 9662 - protein, 9 aa, synthetic construct
PSPATARVR

SEQ ID NO: 9663 - protein, 9 aa, synthetic construct
PLNAVIHVF

SEQ ID NO: 9664 - protein, 9 aa, synthetic construct
PSPATIHVH

SEQ ID NO: 9665 - protein, 9 aa, synthetic construct
PSPATIRLR

SEQ ID NO: 9666 - protein, 9 aa, synthetic construct
PSPATIKLH

SEQ ID NO: 9667 - protein, 9 aa, synthetic construct
PSPATIKVY

SEQ ID NO: 9668 - protein, 9 aa, synthetic construct
PLNAVIRVR

SEQ ID NO: 9669 - protein, 9 aa, synthetic construct
PSPASAHVH

SEQ ID NO: 9670 - protein, 9 aa, synthetic construct
PSPASARLH

SEQ ID NO: 9671 - protein, 9 aa, synthetic construct
PSPASIKVY

SEQ ID NO: 9672 - protein, 9 aa, synthetic construct
PSPASIKVF

SEQ ID NO: 9673 - protein, 9 aa, synthetic construct
PSPASGHLH

SEQ ID NO: 9674 - protein, 9 aa, synthetic construct
PSPAVVKVY

SEQ ID NO: 9675 - protein, 9 aa, synthetic construct
PLNAVGHLF

SEQ ID NO: 9676 - protein, 9 aa, synthetic construct
PSPAVAHLH

SEQ ID NO: 9677 - protein, 9 aa, synthetic construct
PSPAVAHLK

SEQ ID NO: 9678 - protein, 9 aa, synthetic construct
PSPAVAHVH

SEQ ID NO: 9679 - protein, 9 aa, synthetic construct
PSPAVIHVK

SEQ ID NO: 9680 - protein, 9 aa, synthetic construct
PSPAVGHLK

SEQ ID NO: 9681 - protein, 9 aa, synthetic construct
PSPAVGKLY

SEQ ID NO: 9682 - protein, 9 aa, synthetic construct
PSPAVGKLF

SEQ ID NO: 9683 - protein, 9 aa, synthetic construct
PSPAGVHVK

SEQ ID NO: 9684 - protein, 9 aa, synthetic construct
PSPAGVRLF

SEQ ID NO: 9685 - protein, 9 aa, synthetic construct
PSPAGVRVH

SEQ ID NO: 9686 - protein, 9 aa, synthetic construct
PSPAGVKLF

SEQ ID NO: 9687 - protein, 9 aa, synthetic construct
PSPAGLKLY

SEQ ID NO: 9688 - protein, 9 aa, synthetic construct
PSPAGAHLY

SEQ ID NO: 9689 - protein, 9 aa, synthetic construct
PLNAVGKLH

SEQ ID NO: 9690 - protein, 9 aa, synthetic construct
PSPAGIHLF

SEQ ID NO: 9691 - protein, 9 aa, synthetic construct
PLNAVGKVY

SEQ ID NO: 9692 - protein, 9 aa, synthetic construct
PSPAGIKVH

SEQ ID NO: 9693 - protein, 9 aa, synthetic construct
PANGAVHLR

SEQ ID NO: 9694 - protein, 9 aa, synthetic construct
PANGAVHLH

SEQ ID NO: 9695 - protein, 9 aa, synthetic construct
PANGAVHVH

SEQ ID NO: 9696 - protein, 9 aa, synthetic construct
PANGAVHVK

SEQ ID NO: 9697 - protein, 9 aa, synthetic construct
PANGAVRLF

SEQ ID NO: 9698 - protein, 9 aa, synthetic construct
PANGAVKLF

SEQ ID NO: 9699 - protein, 9 aa, synthetic construct
PANGALHLK

SEQ ID NO: 9700 - protein, 9 aa, synthetic construct
PANGALHVR

SEQ ID NO: 9701 - protein, 9 aa, synthetic construct
PANGALKLH

SEQ ID NO: 9702 - protein, 9 aa, synthetic construct
PANGALKVY

SEQ ID NO: 9703 - protein, 9 aa, synthetic construct
PANGAAHLY

SEQ ID NO: 9704 - protein, 9 aa, synthetic construct
PANGAAHLF

SEQ ID NO: 9705 - protein, 9 aa, synthetic construct
PANGAAHVY

SEQ ID NO: 9706 - protein, 9 aa, synthetic construct
PANGAAHVF

SEQ ID NO: 9707 - protein, 9 aa, synthetic construct
PANGAARLY

SEQ ID NO: 9708 - protein, 9 aa, synthetic construct
PANGAARLH

SEQ ID NO: 9709 - protein, 9 aa, synthetic construct
PANGAARLF

SEQ ID NO: 9710 - protein, 9 aa, synthetic construct
PLNAGVHVK

SEQ ID NO: 9711 - protein, 9 aa, synthetic construct
PANGAIHLY

SEQ ID NO: 9712 - protein, 9 aa, synthetic construct
PANGAIHVF

SEQ ID NO: 9713 - protein, 9 aa, synthetic construct
PANGAIKLK

SEQ ID NO: 9714 - protein, 9 aa, synthetic construct
PANGAGHLH

SEQ ID NO: 9715 - protein, 9 aa, synthetic construct
PANGAGHVH

SEQ ID NO: 9716 - protein, 9 aa, synthetic construct
PANGAGRLH

SEQ ID NO: 9717 - protein, 9 aa, synthetic construct
PANGAGKLY

SEQ ID NO: 9718 - protein, 9 aa, synthetic construct
PANGTVHLF

SEQ ID NO: 9719 - protein, 9 aa, synthetic construct
PANGTVRLH

SEQ ID NO: 9720 - protein, 9 aa, synthetic construct
PANGTVRVH

SEQ ID NO: 9721 - protein, 9 aa, synthetic construct
PANGTVKLH

SEQ ID NO: 9722 - protein, 9 aa, synthetic construct
PANGTVKLK

SEQ ID NO: 9723 - protein, 9 aa, synthetic construct
PANGTVKVF

SEQ ID NO: 9724 - protein, 9 aa, synthetic construct
PANGTLHLH

SEQ ID NO: 9725 - protein, 9 aa, synthetic construct
PANGTLHVR

SEQ ID NO: 9726 - protein, 9 aa, synthetic construct
PANGTLHVH

SEQ ID NO: 9727 - protein, 9 aa, synthetic construct
PANGTLRVY

SEQ ID NO: 9728 - protein, 9 aa, synthetic construct
PANGTLRVH

SEQ ID NO: 9729 - protein, 9 aa, synthetic construct
PLNGAGRVH

SEQ ID NO: 9730 - protein, 9 aa, synthetic construct
PANGTLKLY

SEQ ID NO: 9731 - protein, 9 aa, synthetic construct
PANGTLKLF

SEQ ID NO: 9732 - protein, 9 aa, synthetic construct
PANGTLKVY

SEQ ID NO: 9733 - protein, 9 aa, synthetic construct
PANGTAHLY

SEQ ID NO: 9734 - protein, 9 aa, synthetic construct
PANGTAHLH

SEQ ID NO: 9735 - protein, 9 aa, synthetic construct
PANGTAHVF

SEQ ID NO: 9736 - protein, 9 aa, synthetic construct
PANGTARLY

SEQ ID NO: 9737 - protein, 9 aa, synthetic construct
PANGTARVH

SEQ ID NO: 9738 - protein, 9 aa, synthetic construct
PANGTAKVY

SEQ ID NO: 9739 - protein, 9 aa, synthetic construct
PANGTAKVH

SEQ ID NO: 9740 - protein, 9 aa, synthetic construct
PANGTIHLF

SEQ ID NO: 9741 - protein, 9 aa, synthetic construct
PLNAGVKVR

SEQ ID NO: 9742 - protein, 9 aa, synthetic construct
PANGTIKLH

SEQ ID NO: 9743 - protein, 9 aa, synthetic construct
PANGTIKVY

SEQ ID NO: 9744 - protein, 9 aa, synthetic construct
PANGTGHLH

SEQ ID NO: 9745 - protein, 9 aa, synthetic construct
PANGTGHVY

SEQ ID NO: 9746 - protein, 9 aa, synthetic construct
PANGTGHVH

SEQ ID NO: 9747 - protein, 9 aa, synthetic construct
PANGTGHVF

SEQ ID NO: 9748 - protein, 9 aa, synthetic construct
PANGSVHLF

SEQ ID NO: 9749 - protein, 9 aa, synthetic construct
PANGSVHVR

SEQ ID NO: 9750 - protein, 9 aa, synthetic construct
PANGSVRVY

SEQ ID NO: 9751 - protein, 9 aa, synthetic construct
PANGSLRVH

SEQ ID NO: 9752 - protein, 9 aa, synthetic construct
PANGSAHLR

SEQ ID NO: 9753 - protein, 9 aa, synthetic construct
PANGSAHLH

SEQ ID NO: 9754 - protein, 9 aa, synthetic construct
PANGSARLY

SEQ ID NO: 9755 - protein, 9 aa, synthetic construct
PANGSIHLH

SEQ ID NO: 9756 - protein, 9 aa, synthetic construct
PANGSGKLY

SEQ ID NO: 9757 - protein, 9 aa, synthetic construct
PANGVVRVY

SEQ ID NO: 9758 - protein, 9 aa, synthetic construct
PANGVVRVH

SEQ ID NO: 9759 - protein, 9 aa, synthetic construct
PANGVVRVF

SEQ ID NO: 9760 - protein, 9 aa, synthetic construct
PANGVVKVY

SEQ ID NO: 9761 - protein, 9 aa, synthetic construct
PANGVLHVY

SEQ ID NO: 9762 - protein, 9 aa, synthetic construct
PANGVLHVK

SEQ ID NO: 9763 - protein, 9 aa, synthetic construct
PLNAGLKLF

SEQ ID NO: 9764 - protein, 9 aa, synthetic construct
PANGVIRLY

SEQ ID NO: 9765 - protein, 9 aa, synthetic construct
PANGVIRLH

SEQ ID NO: 9766 - protein, 9 aa, synthetic construct
PANGVIRVH

SEQ ID NO: 9767 - protein, 9 aa, synthetic construct
PANGVIKLH

SEQ ID NO: 9768 - protein, 9 aa, synthetic construct
PANGVGHLK

SEQ ID NO: 9769 - protein, 9 aa, synthetic construct
PANGVGRVF

SEQ ID NO: 9770 - protein, 9 aa, synthetic construct
PANGVGKLH

SEQ ID NO: 9771 - protein, 9 aa, synthetic construct
PANGGVHLF

SEQ ID NO: 9772 - protein, 9 aa, synthetic construct
PANGGVHVR

SEQ ID NO: 9773 - protein, 9 aa, synthetic construct
PANGGVRVH

SEQ ID NO: 9774 - protein, 9 aa, synthetic construct
PANGGVKVF

SEQ ID NO: 9775 - protein, 9 aa, synthetic construct
PANGGLHLR

SEQ ID NO: 9776 - protein, 9 aa, synthetic construct
PANGGLHVY

SEQ ID NO: 9777 - protein, 9 aa, synthetic construct
PANGGLHVR

SEQ ID NO: 9778 - protein, 9 aa, synthetic construct
PANGGLHVH

SEQ ID NO: 9779 - protein, 9 aa, synthetic construct
PANGGLHVF

SEQ ID NO: 9780 - protein, 9 aa, synthetic construct
PANGGLKVY

SEQ ID NO: 9781 - protein, 9 aa, synthetic construct
PANGGARLY

SEQ ID NO: 9782 - protein, 9 aa, synthetic construct
PANGGGHLF

SEQ ID NO: 9783 - protein, 9 aa, synthetic construct
PANGGGHVY

SEQ ID NO: 9784 - protein, 9 aa, synthetic construct
PANGGGHVR

SEQ ID NO: 9785 - protein, 9 aa, synthetic construct
PANGGGKVH

SEQ ID NO: 9786 - protein, 9 aa, synthetic construct
PANAAVHLK

SEQ ID NO: 9787 - protein, 9 aa, synthetic construct
PANAAVHLF

SEQ ID NO: 9788 - protein, 9 aa, synthetic construct
PANAAVHVR

SEQ ID NO: 9789 - protein, 9 aa, synthetic construct
PANAAVRLF

SEQ ID NO: 9790 - protein, 9 aa, synthetic construct
PANAAVKLF

SEQ ID NO: 9791 - protein, 9 aa, synthetic construct
PANAAVKVH

SEQ ID NO: 9792 - protein, 9 aa, synthetic construct
PANAAVKVK

SEQ ID NO: 9793 - protein, 9 aa, synthetic construct
PLNAGARVK

SEQ ID NO: 9794 - protein, 9 aa, synthetic construct
PANAALHLH

SEQ ID NO: 9795 - protein, 9 aa, synthetic construct
PANAAAHLY

SEQ ID NO: 9796 - protein, 9 aa, synthetic construct
PANAAAHLH

SEQ ID NO: 9797 - protein, 9 aa, synthetic construct
PANAAAHVY

SEQ ID NO: 9798 - protein, 9 aa, synthetic construct
PANAAAHVK

SEQ ID NO: 9799 - protein, 9 aa, synthetic construct
PANAAAHVF

SEQ ID NO: 9800 - protein, 9 aa, synthetic construct
PLNAGAKLH

SEQ ID NO: 9801 - protein, 9 aa, synthetic construct
PANAAAKLF

SEQ ID NO: 9802 - protein, 9 aa, synthetic construct
PANAAIHLK

SEQ ID NO: 9803 - protein, 9 aa, synthetic construct
PANAAIRVH

SEQ ID NO: 9804 - protein, 9 aa, synthetic construct
PANAAGHLY

SEQ ID NO: 9805 - protein, 9 aa, synthetic construct
PANAAGHLK

SEQ ID NO: 9806 - protein, 9 aa, synthetic construct
PANAAGHLF

SEQ ID NO: 9807 - protein, 9 aa, synthetic construct
PANAAGHVY

SEQ ID NO: 9808 - protein, 9 aa, synthetic construct
PANAAGHVH

SEQ ID NO: 9809 - protein, 9 aa, synthetic construct
PANAAGHVK

SEQ ID NO: 9810 - protein, 9 aa, synthetic construct
PANATVHLY

SEQ ID NO: 9811 - protein, 9 aa, synthetic construct
PANATVHLH

SEQ ID NO: 9812 - protein, 9 aa, synthetic construct
PANATVHLK

SEQ ID NO: 9813 - protein, 9 aa, synthetic construct
PANATVHVK

SEQ ID NO: 9814 - protein, 9 aa, synthetic construct
PANATVKVF

SEQ ID NO: 9815 - protein, 9 aa, synthetic construct
PLNAGIHLK

SEQ ID NO: 9816 - protein, 9 aa, synthetic construct
PANATLKLH

SEQ ID NO: 9817 - protein, 9 aa, synthetic construct
PANATLKVY

SEQ ID NO: 9818 - protein, 9 aa, synthetic construct
PLNAGIHVR

SEQ ID NO: 9819 - protein, 9 aa, synthetic construct
PANATAHLR

SEQ ID NO: 9820 - protein, 9 aa, synthetic construct
PANATAHLH

SEQ ID NO: 9821 - protein, 9 aa, synthetic construct
PANATAHLF

SEQ ID NO: 9822 - protein, 9 aa, synthetic construct
PANATAHVH

SEQ ID NO: 9823 - protein, 9 aa, synthetic construct
PANATAHVK

SEQ ID NO: 9824 - protein, 9 aa, synthetic construct
PANATAHVF

SEQ ID NO: 9825 - protein, 9 aa, synthetic construct
PANATARVY

SEQ ID NO: 9826 - protein, 9 aa, synthetic construct
PANATIHLH

SEQ ID NO: 9827 - protein, 9 aa, synthetic construct
PANATIHVH

SEQ ID NO: 9828 - protein, 9 aa, synthetic construct
PANATIRVH

SEQ ID NO: 9829 - protein, 9 aa, synthetic construct
PANATIKLH

SEQ ID NO: 9830 - protein, 9 aa, synthetic construct
PANATGHLY

SEQ ID NO: 9831 - protein, 9 aa, synthetic construct
PANATGKVF

SEQ ID NO: 9832 - protein, 9 aa, synthetic construct
PANASVHVR

SEQ ID NO: 9833 - protein, 9 aa, synthetic construct
PLNAGIRVR

SEQ ID NO: 9834 - protein, 9 aa, synthetic construct
PANASVRLY

SEQ ID NO: 9835 - protein, 9 aa, synthetic construct
PANASVRLH

SEQ ID NO: 9836 - protein, 9 aa, synthetic construct
PANASVKLH

SEQ ID NO: 9837 - protein, 9 aa, synthetic construct
PANASLHLH

SEQ ID NO: 9838 - protein, 9 aa, synthetic construct
PLNAGIKLY

SEQ ID NO: 9839 - protein, 9 aa, synthetic construct
PANASLKLF

SEQ ID NO: 9840 - protein, 9 aa, synthetic construct
PANASAHLY

SEQ ID NO: 9841 - protein, 9 aa, synthetic construct
PANASAHLH

SEQ ID NO: 9842 - protein, 9 aa, synthetic construct
PANASAHLF

SEQ ID NO: 9843 - protein, 9 aa, synthetic construct
PANASAHVY

SEQ ID NO: 9844 - protein, 9 aa, synthetic construct
PANASAHVK

SEQ ID NO: 9845 - protein, 9 aa, synthetic construct
PANASARVY

SEQ ID NO: 9846 - protein, 9 aa, synthetic construct
PLNAGIKLK

SEQ ID NO: 9847 - protein, 9 aa, synthetic construct
PANASAKLF

SEQ ID NO: 9848 - protein, 9 aa, synthetic construct
PANASIHVY

SEQ ID NO: 9849 - protein, 9 aa, synthetic construct
PANASIHVH

SEQ ID NO: 9850 - protein, 9 aa, synthetic construct
PLNAGIKVY

SEQ ID NO: 9851 - protein, 9 aa, synthetic construct
PANASIKLY

SEQ ID NO: 9852 - protein, 9 aa, synthetic construct
PANASGHLF

SEQ ID NO: 9853 - protein, 9 aa, synthetic construct
PANAVVHLY

SEQ ID NO: 9854 - protein, 9 aa, synthetic construct
PANAVVHVH

SEQ ID NO: 9855 - protein, 9 aa, synthetic construct
PANAVVKVR

SEQ ID NO: 9856 - protein, 9 aa, synthetic construct
PANAVLRVF

SEQ ID NO: 9857 - protein, 9 aa, synthetic construct
PANAVLKLH

SEQ ID NO: 9858 - protein, 9 aa, synthetic construct
PANAVAKLY

SEQ ID NO: 9859 - protein, 9 aa, synthetic construct
PANAVIRLH

SEQ ID NO: 9860 - protein, 9 aa, synthetic construct
PANAVGRVY

SEQ ID NO: 9861 - protein, 9 aa, synthetic construct
PANAGVRLH

SEQ ID NO: 9862 - protein, 9 aa, synthetic construct
PANAGVRVH

SEQ ID NO: 9863 - protein, 9 aa, synthetic construct
PANAGVKVR

SEQ ID NO: 9864 - protein, 9 aa, synthetic construct
PANAGAHLF

SEQ ID NO: 9865 - protein, 9 aa, synthetic construct
PANAGAHVY

SEQ ID NO: 9866 - protein, 9 aa, synthetic construct
PANAGAHVK

SEQ ID NO: 9867 - protein, 9 aa, synthetic construct
PANAGARLY

SEQ ID NO: 9868 - protein, 9 aa, synthetic construct
PANAGARVY

SEQ ID NO: 9869 - protein, 9 aa, synthetic construct
PLNAGGKLK

SEQ ID NO: 9870 - protein, 9 aa, synthetic construct
PANAGIHLH

SEQ ID NO: 9871 - protein, 9 aa, synthetic construct
PANAGIKLH

SEQ ID NO: 9872 - protein, 9 aa, synthetic construct
PANAGIKVH

SEQ ID NO: 9873 - protein, 9 aa, synthetic construct
PANAGGHLF

SEQ ID NO: 9874 - protein, 9 aa, synthetic construct
PANAGGHVH

SEQ ID NO: 9875 - protein, 9 aa, synthetic construct
PAQGAVKLY

SEQ ID NO: 9876 - protein, 9 aa, synthetic construct
PLQGAVHLK

SEQ ID NO: 9877 - protein, 9 aa, synthetic construct
PAQGALHLH

SEQ ID NO: 9878 - protein, 9 aa, synthetic construct
PAQGALHVY

SEQ ID NO: 9879 - protein, 9 aa, synthetic construct
PAQGALHVH

SEQ ID NO: 9880 - protein, 9 aa, synthetic construct
PAQGALHVK

SEQ ID NO: 9881 - protein, 9 aa, synthetic construct
PAQGALHVF

SEQ ID NO: 9882 - protein, 9 aa, synthetic construct
PAQGALRLH

SEQ ID NO: 9883 - protein, 9 aa, synthetic construct
PAQGAAHVK

SEQ ID NO: 9884 - protein, 9 aa, synthetic construct
PAQGAAHVF

SEQ ID NO: 9885 - protein, 9 aa, synthetic construct
PAQGAARVF

SEQ ID NO: 9886 - protein, 9 aa, synthetic construct
PAQGAAKLF

SEQ ID NO: 9887 - protein, 9 aa, synthetic construct
PAQGAAKVH

SEQ ID NO: 9888 - protein, 9 aa, synthetic construct
PAQGAAKVF

SEQ ID NO: 9889 - protein, 9 aa, synthetic construct
PAQGAIHVR

SEQ ID NO: 9890 - protein, 9 aa, synthetic construct
PAQGAIRVY

SEQ ID NO: 9891 - protein, 9 aa, synthetic construct
PAQGAGHVH

SEQ ID NO: 9892 - protein, 9 aa, synthetic construct
PAQGAGRVY

SEQ ID NO: 9893 - protein, 9 aa, synthetic construct
PAQGTVRLH

SEQ ID NO: 9894 - protein, 9 aa, synthetic construct
PAQGTVKVF

SEQ ID NO: 9895 - protein, 9 aa, synthetic construct
PAQGTAHLH

SEQ ID NO: 9896 - protein, 9 aa, synthetic construct
PAQGTARLY

SEQ ID NO: 9897 - protein, 9 aa, synthetic construct
PAQGTIHLK

SEQ ID NO: 9898 - protein, 9 aa, synthetic construct
PAQGTIHLF

SEQ ID NO: 9899 - protein, 9 aa, synthetic construct
PAQGTIHVK

SEQ ID NO: 9900 - protein, 9 aa, synthetic construct
PAQGTIRLF

SEQ ID NO: 9901 - protein, 9 aa, synthetic construct
PAQGTIKVF

SEQ ID NO: 9902 - protein, 9 aa, synthetic construct
PAQGTGHLH

SEQ ID NO: 9903 - protein, 9 aa, synthetic construct
PAQGTGHVR

SEQ ID NO: 9904 - protein, 9 aa, synthetic construct
PAQGTGRLF

SEQ ID NO: 9905 - protein, 9 aa, synthetic construct
PAQGSVHVR

SEQ ID NO: 9906 - protein, 9 aa, synthetic construct
PAQGSVHVF

SEQ ID NO: 9907 - protein, 9 aa, synthetic construct
PAQGSVKLY

SEQ ID NO: 9908 - protein, 9 aa, synthetic construct
PAQGSVKVY

SEQ ID NO: 9909 - protein, 9 aa, synthetic construct
PAQGSLHLR

SEQ ID NO: 9910 - protein, 9 aa, synthetic construct
PAQGSLRVH

SEQ ID NO: 9911 - protein, 9 aa, synthetic construct
PAQGSAHLK

SEQ ID NO: 9912 - protein, 9 aa, synthetic construct
PLQGALHVK

SEQ ID NO: 9913 - protein, 9 aa, synthetic construct
PAQGSIHVK

SEQ ID NO: 9914 - protein, 9 aa, synthetic construct
PAQGSIRVY

SEQ ID NO: 9915 - protein, 9 aa, synthetic construct
PAQGSIRVK

SEQ ID NO: 9916 - protein, 9 aa, synthetic construct
PAQGSIKVH

SEQ ID NO: 9917 - protein, 9 aa, synthetic construct
PAQGSGKLF

SEQ ID NO: 9918 - protein, 9 aa, synthetic construct
PAQGVVHLK

SEQ ID NO: 9919 - protein, 9 aa, synthetic construct
PAQGVVHVR

SEQ ID NO: 9920 - protein, 9 aa, synthetic construct
PAQGVVHVH

SEQ ID NO: 9921 - protein, 9 aa, synthetic construct
PAQGVVRLH

SEQ ID NO: 9922 - protein, 9 aa, synthetic construct
PAQGVVKVY

SEQ ID NO: 9923 - protein, 9 aa, synthetic construct
PAQGVLRVY

SEQ ID NO: 9924 - protein, 9 aa, synthetic construct
PAQGVLKLH

SEQ ID NO: 9925 - protein, 9 aa, synthetic construct
PAQGVAHLY

SEQ ID NO: 9926 - protein, 9 aa, synthetic construct
PAQGVAHLK

SEQ ID NO: 9927 - protein, 9 aa, synthetic construct
PAQGVAHLF

SEQ ID NO: 9928 - protein, 9 aa, synthetic construct
PAQGVAHVY

SEQ ID NO: 9929 - protein, 9 aa, synthetic construct
PAQGVAHVK

SEQ ID NO: 9930 - protein, 9 aa, synthetic construct
PAQGVAHVF

SEQ ID NO: 9931 - protein, 9 aa, synthetic construct
PAQGVARVY

SEQ ID NO: 9932 - protein, 9 aa, synthetic construct
PAQGVARVH

SEQ ID NO: 9933 - protein, 9 aa, synthetic construct
PAQGVIRLY

SEQ ID NO: 9934 - protein, 9 aa, synthetic construct
PAQGVIRLH

SEQ ID NO: 9935 - protein, 9 aa, synthetic construct
PAQGVIRVH

SEQ ID NO: 9936 - protein, 9 aa, synthetic construct
PAQGVIKVH

SEQ ID NO: 9937 - protein, 9 aa, synthetic construct
PAQGVGHLR

SEQ ID NO: 9938 - protein, 9 aa, synthetic construct
PAQGVGKLR

SEQ ID NO: 9939 - protein, 9 aa, synthetic construct
PLNGTVHVR

SEQ ID NO: 9940 - protein, 9 aa, synthetic construct
PAQGGVRVH

SEQ ID NO: 9941 - protein, 9 aa, synthetic construct
PLQGAAHLH

SEQ ID NO: 9942 - protein, 9 aa, synthetic construct
PAQGGVKLY

SEQ ID NO: 9943 - protein, 9 aa, synthetic construct
PAQGGLHVR

SEQ ID NO: 9944 - protein, 9 aa, synthetic construct
PAQGGLHVH

SEQ ID NO: 9945 - protein, 9 aa, synthetic construct
PLQGAAHVR

SEQ ID NO: 9946 - protein, 9 aa, synthetic construct
PAQGGAHVK

SEQ ID NO: 9947 - protein, 9 aa, synthetic construct
PAQGGAKVY

SEQ ID NO: 9948 - protein, 9 aa, synthetic construct
PAQGGIHLH

SEQ ID NO: 9949 - protein, 9 aa, synthetic construct
PAQGGGHLK

SEQ ID NO: 9950 - protein, 9 aa, synthetic construct
PAQAAVRVY

SEQ ID NO: 9951 - protein, 9 aa, synthetic construct
PAQAAVRVH

SEQ ID NO: 9952 - protein, 9 aa, synthetic construct
PAQAAVKLH

SEQ ID NO: 9953 - protein, 9 aa, synthetic construct
PAQAALHLK

SEQ ID NO: 9954 - protein, 9 aa, synthetic construct
PAQAALHVR

SEQ ID NO: 9955 - protein, 9 aa, synthetic construct
PAQAALHVH

SEQ ID NO: 9956 - protein, 9 aa, synthetic construct
PAQAALHVK

SEQ ID NO: 9957 - protein, 9 aa, synthetic construct
PAQAALKVF

SEQ ID NO: 9958 - protein, 9 aa, synthetic construct
PAQAAAHLH

SEQ ID NO: 9959 - protein, 9 aa, synthetic construct
PAQAAAHLK

SEQ ID NO: 9960 - protein, 9 aa, synthetic construct
PAQAAAHVK

SEQ ID NO: 9961 - protein, 9 aa, synthetic construct
PAQAAIHLF

SEQ ID NO: 9962 - protein, 9 aa, synthetic construct
PAQAAIHVH

SEQ ID NO: 9963 - protein, 9 aa, synthetic construct
PAQAAIRLH

SEQ ID NO: 9964 - protein, 9 aa, synthetic construct
PAQAAIKVY

SEQ ID NO: 9965 - protein, 9 aa, synthetic construct
PAQAAIKVH

SEQ ID NO: 9966 - protein, 9 aa, synthetic construct
PAQAAGHVR

SEQ ID NO: 9967 - protein, 9 aa, synthetic construct
PAQAAGRLR

SEQ ID NO: 9968 - protein, 9 aa, synthetic construct
PAQAAGRVK

SEQ ID NO: 9969 - protein, 9 aa, synthetic construct
PAQATVHLR

SEQ ID NO: 9970 - protein, 9 aa, synthetic construct
PAQATVHLH

SEQ ID NO: 9971 - protein, 9 aa, synthetic construct
PAQATVHLK

SEQ ID NO: 9972 - protein, 9 aa, synthetic construct
PAQATVRLY

SEQ ID NO: 9973 - protein, 9 aa, synthetic construct
PAQATVKLY

SEQ ID NO: 9974 - protein, 9 aa, synthetic construct
PAQATVKVR

SEQ ID NO: 9975 - protein, 9 aa, synthetic construct
PAQATLHLY

SEQ ID NO: 9976 - protein, 9 aa, synthetic construct
PAQATLHVF

SEQ ID NO: 9977 - protein, 9 aa, synthetic construct
PAQATLRLH

SEQ ID NO: 9978 - protein, 9 aa, synthetic construct
PAQATAHLY

SEQ ID NO: 9979 - protein, 9 aa, synthetic construct
PAQATAHLH

SEQ ID NO: 9980 - protein, 9 aa, synthetic construct
PAQATAHLK

SEQ ID NO: 9981 - protein, 9 aa, synthetic construct
PAQATAHLF

SEQ ID NO: 9982 - protein, 9 aa, synthetic construct
PAQATAHVH

SEQ ID NO: 9983 - protein, 9 aa, synthetic construct
PAQATAHVF

SEQ ID NO: 9984 - protein, 9 aa, synthetic construct
PAQATAKLF

SEQ ID NO: 9985 - protein, 9 aa, synthetic construct
PAQATIHLH

SEQ ID NO: 9986 - protein, 9 aa, synthetic construct
PAQATIHLK

SEQ ID NO: 9987 - protein, 9 aa, synthetic construct
PLQGAIRLR

SEQ ID NO: 9988 - protein, 9 aa, synthetic construct
PAQATIKLH

SEQ ID NO: 9989 - protein, 9 aa, synthetic construct
PAQATGHLY

SEQ ID NO: 9990 - protein, 9 aa, synthetic construct
PAQATGHLR

SEQ ID NO: 9991 - protein, 9 aa, synthetic construct
PAQATGHLK

SEQ ID NO: 9992 - protein, 9 aa, synthetic construct
PAQATGHVK

SEQ ID NO: 9993 - protein, 9 aa, synthetic construct
PAQATGHVF

SEQ ID NO: 9994 - protein, 9 aa, synthetic construct
PAQATGRLH

SEQ ID NO: 9995 - protein, 9 aa, synthetic construct
PAQATGRVR

SEQ ID NO: 9996 - protein, 9 aa, synthetic construct
PAQATGKLY

SEQ ID NO: 9997 - protein, 9 aa, synthetic construct
PAQATGKLF

SEQ ID NO: 9998 - protein, 9 aa, synthetic construct
PAQASVHLY

SEQ ID NO: 9999 - protein, 9 aa, synthetic construct
PAQASVHVK

SEQ ID NO: 10000 - protein, 9 aa, synthetic construct
PLQGAIRVH

SEQ ID NO: 10001 - protein, 9 aa, synthetic construct
PAQASVKLF

SEQ ID NO: 10002 - protein, 9 aa, synthetic construct
PAQASLHVF

SEQ ID NO: 10003 - protein, 9 aa, synthetic construct
PAQASLRVH

SEQ ID NO: 10004 - protein, 9 aa, synthetic construct
PAQASAHLY

SEQ ID NO: 10005 - protein, 9 aa, synthetic construct
PAQASAHLK

SEQ ID NO: 10006 - protein, 9 aa, synthetic construct
PAQASARLF

SEQ ID NO: 10007 - protein, 9 aa, synthetic construct
PAQASIHVR

SEQ ID NO: 10008 - protein, 9 aa, synthetic construct
PAQASIHVH

SEQ ID NO: 10009 - protein, 9 aa, synthetic construct
PAQASIRVK

SEQ ID NO: 10010 - protein, 9 aa, synthetic construct
PAQASIRVF

SEQ ID NO: 10011 - protein, 9 aa, synthetic construct
PAQASIKLF

SEQ ID NO: 10012 - protein, 9 aa, synthetic construct
PAQASIKVY

SEQ ID NO: 10013 - protein, 9 aa, synthetic construct
PAQASIKVF

SEQ ID NO: 10014 - protein, 9 aa, synthetic construct
PAQASGHLH

SEQ ID NO: 10015 - protein, 9 aa, synthetic construct
PAQASGHLK

SEQ ID NO: 10016 - protein, 9 aa, synthetic construct
PAQASGHVY

SEQ ID NO: 10017 - protein, 9 aa, synthetic construct
PAQASGHVR

SEQ ID NO: 10018 - protein, 9 aa, synthetic construct
PAQASGHVH

SEQ ID NO: 10019 - protein, 9 aa, synthetic construct
PAQASGHVK

SEQ ID NO: 10020 - protein, 9 aa, synthetic construct
PAQASGHVF

SEQ ID NO: 10021 - protein, 9 aa, synthetic construct
PAQASGRVF

SEQ ID NO: 10022 - protein, 9 aa, synthetic construct
PAQASGKLH

SEQ ID NO: 10023 - protein, 9 aa, synthetic construct
PAQASGKLF

SEQ ID NO: 10024 - protein, 9 aa, synthetic construct
PLNGTVRLH

SEQ ID NO: 10025 - protein, 9 aa, synthetic construct
PAQAVVHVH

SEQ ID NO: 10026 - protein, 9 aa, synthetic construct
PAQAVVRLF

SEQ ID NO: 10027 - protein, 9 aa, synthetic construct
PAQAVLKLY

SEQ ID NO: 10028 - protein, 9 aa, synthetic construct
PAQAVLKLH

SEQ ID NO: 10029 - protein, 9 aa, synthetic construct
PAQAVAHVY

SEQ ID NO: 10030 - protein, 9 aa, synthetic construct
PLQGAGHVH

SEQ ID NO: 10031 - protein, 9 aa, synthetic construct
PAQAVIHVR

SEQ ID NO: 10032 - protein, 9 aa, synthetic construct
PAQAVIRVF

SEQ ID NO: 10033 - protein, 9 aa, synthetic construct
PAQAVIKLY

SEQ ID NO: 10034 - protein, 9 aa, synthetic construct
PAQAVIKLH

SEQ ID NO: 10035 - protein, 9 aa, synthetic construct
PAQAVIKVY

SEQ ID NO: 10036 - protein, 9 aa, synthetic construct
PAQAVGRVK

SEQ ID NO: 10037 - protein, 9 aa, synthetic construct
PAQAVGKVY

SEQ ID NO: 10038 - protein, 9 aa, synthetic construct
PAQAVGKVF

SEQ ID NO: 10039 - protein, 9 aa, synthetic construct
PLQGAGRVY

SEQ ID NO: 10040 - protein, 9 aa, synthetic construct
PAQAGVRVH

SEQ ID NO: 10041 - protein, 9 aa, synthetic construct
PLQGAGRVH

SEQ ID NO: 10042 - protein, 9 aa, synthetic construct
PLQGAGKLH

SEQ ID NO: 10043 - protein, 9 aa, synthetic construct
PAQAGAKLF

SEQ ID NO: 10044 - protein, 9 aa, synthetic construct
PLQGAGKVH

SEQ ID NO: 10045 - protein, 9 aa, synthetic construct
PAQAGGHLH

SEQ ID NO: 10046 - protein, 9 aa, synthetic construct
PAQAGGHVK

SEQ ID NO: 10047 - protein, 9 aa, synthetic construct
PAQAGGKLF

SEQ ID NO: 10048 - protein, 9 aa, synthetic construct
PAPGAVHLY

SEQ ID NO: 10049 - protein, 9 aa, synthetic construct
PAPGAVHLR

SEQ ID NO: 10050 - protein, 9 aa, synthetic construct
PAPGAVHLH

SEQ ID NO: 10051 - protein, 9 aa, synthetic construct
PAPGAVRLF

SEQ ID NO: 10052 - protein, 9 aa, synthetic construct
PAPGALHLY

SEQ ID NO: 10053 - protein, 9 aa, synthetic construct
PAPGALHLK

SEQ ID NO: 10054 - protein, 9 aa, synthetic construct
PAPGALHVH

SEQ ID NO: 10055 - protein, 9 aa, synthetic construct
PAPGALKVF

SEQ ID NO: 10056 - protein, 9 aa, synthetic construct
PLQGTVHVR

SEQ ID NO: 10057 - protein, 9 aa, synthetic construct
PAPGAAHLY

SEQ ID NO: 10058 - protein, 9 aa, synthetic construct
PAPGAAHLH

SEQ ID NO: 10059 - protein, 9 aa, synthetic construct
PAPGAAHLF

SEQ ID NO: 10060 - protein, 9 aa, synthetic construct
PAPGAAHVR

SEQ ID NO: 10061 - protein, 9 aa, synthetic construct
PAPGAAHVH

SEQ ID NO: 10062 - protein, 9 aa, synthetic construct
PAPGAARLY

SEQ ID NO: 10063 - protein, 9 aa, synthetic construct
PLQGTVHVK

SEQ ID NO: 10064 - protein, 9 aa, synthetic construct
PAPGAAKLF

SEQ ID NO: 10065 - protein, 9 aa, synthetic construct
PAPGAGHLR

SEQ ID NO: 10066 - protein, 9 aa, synthetic construct
PAPGAGHLH

SEQ ID NO: 10067 - protein, 9 aa, synthetic construct
PAPGAGHVY

SEQ ID NO: 10068 - protein, 9 aa, synthetic construct
PAPGAGHVH

SEQ ID NO: 10069 - protein, 9 aa, synthetic construct
PAPGAGHVK

SEQ ID NO: 10070 - protein, 9 aa, synthetic construct
PAPGAGRLH

SEQ ID NO: 10071 - protein, 9 aa, synthetic construct
PAPGAGRVY

SEQ ID NO: 10072 - protein, 9 aa, synthetic construct
PAPGAGKLH

SEQ ID NO: 10073 - protein, 9 aa, synthetic construct
PAPGTVHLF

SEQ ID NO: 10074 - protein, 9 aa, synthetic construct
PAPGTVRVF

SEQ ID NO: 10075 - protein, 9 aa, synthetic construct
PAPGTLHVH

SEQ ID NO: 10076 - protein, 9 aa, synthetic construct
PAPGTAHVF

SEQ ID NO: 10077 - protein, 9 aa, synthetic construct
PAPGTGKVH

SEQ ID NO: 10078 - protein, 9 aa, synthetic construct
PAPGSVRLY

SEQ ID NO: 10079 - protein, 9 aa, synthetic construct
PAPGSVRVY

SEQ ID NO: 10080 - protein, 9 aa, synthetic construct
PLQGTLHLH

SEQ ID NO: 10081 - protein, 9 aa, synthetic construct
PAPGSLKLR

SEQ ID NO: 10082 - protein, 9 aa, synthetic construct
PAPGSARLY

SEQ ID NO: 10083 - protein, 9 aa, synthetic construct
PLQGTLHVK

SEQ ID NO: 10084 - protein, 9 aa, synthetic construct
PAPGSIHLY

SEQ ID NO: 10085 - protein, 9 aa, synthetic construct
PAPGSIHVF

SEQ ID NO: 10086 - protein, 9 aa, synthetic construct
PLNGTVRVF

SEQ ID NO: 10087 - protein, 9 aa, synthetic construct
PAPGSIRLH

SEQ ID NO: 10088 - protein, 9 aa, synthetic construct
PAPGVVHLK

SEQ ID NO: 10089 - protein, 9 aa, synthetic construct
PAPGVVKLF

SEQ ID NO: 10090 - protein, 9 aa, synthetic construct
PAPGVVKVY

SEQ ID NO: 10091 - protein, 9 aa, synthetic construct
PAPGVLRVH

SEQ ID NO: 10092 - protein, 9 aa, synthetic construct
PLQGTLKLY

SEQ ID NO: 10093 - protein, 9 aa, synthetic construct
PAPGVAHVK

SEQ ID NO: 10094 - protein, 9 aa, synthetic construct
PAPGVIHVH

SEQ ID NO: 10095 - protein, 9 aa, synthetic construct
PAPGVIHVK

SEQ ID NO: 10096 - protein, 9 aa, synthetic construct
PAPGVGHVR

SEQ ID NO: 10097 - protein, 9 aa, synthetic construct
PAPGVGHVF

SEQ ID NO: 10098 - protein, 9 aa, synthetic construct
PAPGVGRVH

SEQ ID NO: 10099 - protein, 9 aa, synthetic construct
PAPGVGKLF

SEQ ID NO: 10100 - protein, 9 aa, synthetic construct
PAPGGVHLK

SEQ ID NO: 10101 - protein, 9 aa, synthetic construct
PLQGTAHLF

SEQ ID NO: 10102 - protein, 9 aa, synthetic construct
PLQGTAHVY

SEQ ID NO: 10103 - protein, 9 aa, synthetic construct
PAPGGAHLY

SEQ ID NO: 10104 - protein, 9 aa, synthetic construct
PAPGGAHLH

SEQ ID NO: 10105 - protein, 9 aa, synthetic construct
PAPGGAHVY

SEQ ID NO: 10106 - protein, 9 aa, synthetic construct
PAPGGAHVH

SEQ ID NO: 10107 - protein, 9 aa, synthetic construct
PAPGGAHVF

SEQ ID NO: 10108 - protein, 9 aa, synthetic construct
PAPGGARLH

SEQ ID NO: 10109 - protein, 9 aa, synthetic construct
PAPGGARVH

SEQ ID NO: 10110 - protein, 9 aa, synthetic construct
PAPGGAKLH

SEQ ID NO: 10111 - protein, 9 aa, synthetic construct
PAPGGIHVR

SEQ ID NO: 10112 - protein, 9 aa, synthetic construct
PAPGGIKLH

SEQ ID NO: 10113 - protein, 9 aa, synthetic construct
PAPGGIKLK

SEQ ID NO: 10114 - protein, 9 aa, synthetic construct
PAPGGGHLH

SEQ ID NO: 10115 - protein, 9 aa, synthetic construct
PAPAAVHLK

SEQ ID NO: 10116 - protein, 9 aa, synthetic construct
PAPAAVRLF

SEQ ID NO: 10117 - protein, 9 aa, synthetic construct
PAPAALHVK

SEQ ID NO: 10118 - protein, 9 aa, synthetic construct
PAPAAAHLY

SEQ ID NO: 10119 - protein, 9 aa, synthetic construct
PAPAAAHVY

SEQ ID NO: 10120 - protein, 9 aa, synthetic construct
PAPAAAHVH

SEQ ID NO: 10121 - protein, 9 aa, synthetic construct
PAPAAAHVK

SEQ ID NO: 10122 - protein, 9 aa, synthetic construct
PAPAAAHVF

SEQ ID NO: 10123 - protein, 9 aa, synthetic construct
PAPAAIKVY

SEQ ID NO: 10124 - protein, 9 aa, synthetic construct
PAPAAGHVR

SEQ ID NO: 10125 - protein, 9 aa, synthetic construct
PAPAAGHVH

SEQ ID NO: 10126 - protein, 9 aa, synthetic construct
PAPAAGKVF

SEQ ID NO: 10127 - protein, 9 aa, synthetic construct
PAPATVHLH

SEQ ID NO: 10128 - protein, 9 aa, synthetic construct
PAPATVRLY

SEQ ID NO: 10129 - protein, 9 aa, synthetic construct
PAPATVRLH

SEQ ID NO: 10130 - protein, 9 aa, synthetic construct
PAPATVKLY

SEQ ID NO: 10131 - protein, 9 aa, synthetic construct
PAPATVKLH

SEQ ID NO: 10132 - protein, 9 aa, synthetic construct
PAPATVKLK

SEQ ID NO: 10133 - protein, 9 aa, synthetic construct
PAPATVKVR

SEQ ID NO: 10134 - protein, 9 aa, synthetic construct
PAPATVKVK

SEQ ID NO: 10135 - protein, 9 aa, synthetic construct
PAPATLHLY

SEQ ID NO: 10136 - protein, 9 aa, synthetic construct
PAPATLHLK

SEQ ID NO: 10137 - protein, 9 aa, synthetic construct
PAPATLHVH

SEQ ID NO: 10138 - protein, 9 aa, synthetic construct
PAPATLHVK

SEQ ID NO: 10139 - protein, 9 aa, synthetic construct
PAPATAHLY

SEQ ID NO: 10140 - protein, 9 aa, synthetic construct
PAPATAHLH

SEQ ID NO: 10141 - protein, 9 aa, synthetic construct
PAPATAHVY

SEQ ID NO: 10142 - protein, 9 aa, synthetic construct
PAPATAHVH

SEQ ID NO: 10143 - protein, 9 aa, synthetic construct
PAPATAHVK

SEQ ID NO: 10144 - protein, 9 aa, synthetic construct
PAPATARLY

SEQ ID NO: 10145 - protein, 9 aa, synthetic construct
PAPATARVY

SEQ ID NO: 10146 - protein, 9 aa, synthetic construct
PAPATARVH

SEQ ID NO: 10147 - protein, 9 aa, synthetic construct
PAPATAKLH

SEQ ID NO: 10148 - protein, 9 aa, synthetic construct
PAPATAKVK

SEQ ID NO: 10149 - protein, 9 aa, synthetic construct
PAPATIHVK

SEQ ID NO: 10150 - protein, 9 aa, synthetic construct
PAPATIRVH

SEQ ID NO: 10151 - protein, 9 aa, synthetic construct
PLQGTIRLH

SEQ ID NO: 10152 - protein, 9 aa, synthetic construct
PAPATGHLY

SEQ ID NO: 10153 - protein, 9 aa, synthetic construct
PAPATGHVH

SEQ ID NO: 10154 - protein, 9 aa, synthetic construct
PAPATGHVF

SEQ ID NO: 10155 - protein, 9 aa, synthetic construct
PAPATGRLY

SEQ ID NO: 10156 - protein, 9 aa, synthetic construct
PAPATGKVY

SEQ ID NO: 10157 - protein, 9 aa, synthetic construct
PLQGTIRVH

SEQ ID NO: 10158 - protein, 9 aa, synthetic construct
PAPASVKLH

SEQ ID NO: 10159 - protein, 9 aa, synthetic construct
PAPASAHLR

SEQ ID NO: 10160 - protein, 9 aa, synthetic construct
PAPASAHVY

SEQ ID NO: 10161 - protein, 9 aa, synthetic construct
PAPASIHLY

SEQ ID NO: 10162 - protein, 9 aa, synthetic construct
PAPASIHLH

SEQ ID NO: 10163 - protein, 9 aa, synthetic construct
PAPASIHVY

SEQ ID NO: 10164 - protein, 9 aa, synthetic construct
PAPASIHVH

SEQ ID NO: 10165 - protein, 9 aa, synthetic construct
PAPASIHVF

SEQ ID NO: 10166 - protein, 9 aa, synthetic construct
PAPASIRLK

SEQ ID NO: 10167 - protein, 9 aa, synthetic construct
PAPASIKVH

SEQ ID NO: 10168 - protein, 9 aa, synthetic construct
PLQGTIKVH

SEQ ID NO: 10169 - protein, 9 aa, synthetic construct
PAPASGHLK

SEQ ID NO: 10170 - protein, 9 aa, synthetic construct
PAPASGHLF

SEQ ID NO: 10171 - protein, 9 aa, synthetic construct
PAPAVVHVK

SEQ ID NO: 10172 - protein, 9 aa, synthetic construct
PAPAVVRVY

SEQ ID NO: 10173 - protein, 9 aa, synthetic construct
PLQGTGHLH

SEQ ID NO: 10174 - protein, 9 aa, synthetic construct
PAPAVVKVY

SEQ ID NO: 10175 - protein, 9 aa, synthetic construct
PLQGTGHVR

SEQ ID NO: 10176 - protein, 9 aa, synthetic construct
PAPAVAHVR

SEQ ID NO: 10177 - protein, 9 aa, synthetic construct
PLQGTGHVH

SEQ ID NO: 10178 - protein, 9 aa, synthetic construct
PLQGTGHVF

SEQ ID NO: 10179 - protein, 9 aa, synthetic construct
PAPAVIHVF

SEQ ID NO: 10180 - protein, 9 aa, synthetic construct
PLQGTGRLY

SEQ ID NO: 10181 - protein, 9 aa, synthetic construct
PAPAVIRVR

SEQ ID NO: 10182 - protein, 9 aa, synthetic construct
PAPAVGHLH

SEQ ID NO: 10183 - protein, 9 aa, synthetic construct
PAPAVGHLF

SEQ ID NO: 10184 - protein, 9 aa, synthetic construct
PAPAVGHVY

SEQ ID NO: 10185 - protein, 9 aa, synthetic construct
PAPAGVRVH

SEQ ID NO: 10186 - protein, 9 aa, synthetic construct
PAPAGVKLY

SEQ ID NO: 10187 - protein, 9 aa, synthetic construct
PAPAGVKLF

SEQ ID NO: 10188 - protein, 9 aa, synthetic construct
PAPAGVKVF

SEQ ID NO: 10189 - protein, 9 aa, synthetic construct
PAPAGARVY

SEQ ID NO: 10190 - protein, 9 aa, synthetic construct
PAPAGARVF

SEQ ID NO: 10191 - protein, 9 aa, synthetic construct
PAPAGIHVH

SEQ ID NO: 10192 - protein, 9 aa, synthetic construct
PAPAGIKVY

SEQ ID NO: 10193 - protein, 9 aa, synthetic construct
PAPAGGHVH

SEQ ID NO: 10194 - protein, 9 aa, synthetic construct
PVNGAVHVK

SEQ ID NO: 10195 - protein, 9 aa, synthetic construct
PVNGALHVH

SEQ ID NO: 10196 - protein, 9 aa, synthetic construct
PVNGALRVH

SEQ ID NO: 10197 - protein, 9 aa, synthetic construct
PVNGALKLH

SEQ ID NO: 10198 - protein, 9 aa, synthetic construct
PVNGALKVK

SEQ ID NO: 10199 - protein, 9 aa, synthetic construct
PVNGAAHLR

SEQ ID NO: 10200 - protein, 9 aa, synthetic construct
PVNGAARLH

SEQ ID NO: 10201 - protein, 9 aa, synthetic construct
PVNGAIHLR

SEQ ID NO: 10202 - protein, 9 aa, synthetic construct
PVNGAIHVF

SEQ ID NO: 10203 - protein, 9 aa, synthetic construct
PVNGAIRLY

SEQ ID NO: 10204 - protein, 9 aa, synthetic construct
PVNGAIRLF

SEQ ID NO: 10205 - protein, 9 aa, synthetic construct
PVNGAIKVY

SEQ ID NO: 10206 - protein, 9 aa, synthetic construct
PVNGAGRVR

SEQ ID NO: 10207 - protein, 9 aa, synthetic construct
PVNGTVHVR

SEQ ID NO: 10208 - protein, 9 aa, synthetic construct
PVNGTVKVK

SEQ ID NO: 10209 - protein, 9 aa, synthetic construct
PVNGTLHVR

SEQ ID NO: 10210 - protein, 9 aa, synthetic construct
PVNGTLRVK

SEQ ID NO: 10211 - protein, 9 aa, synthetic construct
PVNGTLKLK

SEQ ID NO: 10212 - protein, 9 aa, synthetic construct
PVNGTLKLF

SEQ ID NO: 10213 - protein, 9 aa, synthetic construct
PVNGTLKVY

SEQ ID NO: 10214 - protein, 9 aa, synthetic construct
PVNGTLKVR

SEQ ID NO: 10215 - protein, 9 aa, synthetic construct
PVNGTLKVK

SEQ ID NO: 10216 - protein, 9 aa, synthetic construct
PVNGTLKVF

SEQ ID NO: 10217 - protein, 9 aa, synthetic construct
PVNGTAHLH

SEQ ID NO: 10218 - protein, 9 aa, synthetic construct
PVNGTAHVK

SEQ ID NO: 10219 - protein, 9 aa, synthetic construct
PVNGTARLH

SEQ ID NO: 10220 - protein, 9 aa, synthetic construct
PVNGTARVH

SEQ ID NO: 10221 - protein, 9 aa, synthetic construct
PVNGTAKLF

SEQ ID NO: 10222 - protein, 9 aa, synthetic construct
PVNGTIHLH

SEQ ID NO: 10223 - protein, 9 aa, synthetic construct
PVNGTIHLK

SEQ ID NO: 10224 - protein, 9 aa, synthetic construct
PLQGSVKVY

SEQ ID NO: 10225 - protein, 9 aa, synthetic construct
PVNGTIKLY

SEQ ID NO: 10226 - protein, 9 aa, synthetic construct
PVNGTIKLH

SEQ ID NO: 10227 - protein, 9 aa, synthetic construct
PVNGTGHLH

SEQ ID NO: 10228 - protein, 9 aa, synthetic construct
PVNGTGKLH

SEQ ID NO: 10229 - protein, 9 aa, synthetic construct
PLQGSLHLR

SEQ ID NO: 10230 - protein, 9 aa, synthetic construct
PVNGSVRVH

SEQ ID NO: 10231 - protein, 9 aa, synthetic construct
PVNGSLHVY

SEQ ID NO: 10232 - protein, 9 aa, synthetic construct
PVNGSLHVR

SEQ ID NO: 10233 - protein, 9 aa, synthetic construct
PVNGSLHVH

SEQ ID NO: 10234 - protein, 9 aa, synthetic construct
PVNGSLHVF

SEQ ID NO: 10235 - protein, 9 aa, synthetic construct
PVNGSLRVH

SEQ ID NO: 10236 - protein, 9 aa, synthetic construct
PVNGSLKVK

SEQ ID NO: 10237 - protein, 9 aa, synthetic construct
PVNGSAHLH

SEQ ID NO: 10238 - protein, 9 aa, synthetic construct
PVNGSAHVR

SEQ ID NO: 10239 - protein, 9 aa, synthetic construct
PVNGSAHVH

SEQ ID NO: 10240 - protein, 9 aa, synthetic construct
PVNGSARLF

SEQ ID NO: 10241 - protein, 9 aa, synthetic construct
PVNGSARVF

SEQ ID NO: 10242 - protein, 9 aa, synthetic construct
PVNGSAKLH

SEQ ID NO: 10243 - protein, 9 aa, synthetic construct
PVNGSIHLF

SEQ ID NO: 10244 - protein, 9 aa, synthetic construct
PVNGSIHVR

SEQ ID NO: 10245 - protein, 9 aa, synthetic construct
PVNGSIRLH

SEQ ID NO: 10246 - protein, 9 aa, synthetic construct
PVNGSIKVF

SEQ ID NO: 10247 - protein, 9 aa, synthetic construct
PVNGSGHLR

SEQ ID NO: 10248 - protein, 9 aa, synthetic construct
PVNGSGHLH

SEQ ID NO: 10249 - protein, 9 aa, synthetic construct
PVNGSGRLH

SEQ ID NO: 10250 - protein, 9 aa, synthetic construct
PVNGVVHVY

SEQ ID NO: 10251 - protein, 9 aa, synthetic construct
PVNGVVKVY

SEQ ID NO: 10252 - protein, 9 aa, synthetic construct
PVNGVLHVF

SEQ ID NO: 10253 - protein, 9 aa, synthetic construct
PVNGVGHLK

SEQ ID NO: 10254 - protein, 9 aa, synthetic construct
PVNGVGHVF

SEQ ID NO: 10255 - protein, 9 aa, synthetic construct
PVNGVGRVH

SEQ ID NO: 10256 - protein, 9 aa, synthetic construct
PVNGGVRLF

SEQ ID NO: 10257 - protein, 9 aa, synthetic construct
PVNGGVRVH

SEQ ID NO: 10258 - protein, 9 aa, synthetic construct
PVNGGVKVH

SEQ ID NO: 10259 - protein, 9 aa, synthetic construct
PVNGGLRVH

SEQ ID NO: 10260 - protein, 9 aa, synthetic construct
PVNGGLKVY

SEQ ID NO: 10261 - protein, 9 aa, synthetic construct
PLQGSAHVK

SEQ ID NO: 10262 - protein, 9 aa, synthetic construct
PVNGGAKVY

SEQ ID NO: 10263 - protein, 9 aa, synthetic construct
PVNGGGRVH

SEQ ID NO: 10264 - protein, 9 aa, synthetic construct
PVNAAVHLH

SEQ ID NO: 10265 - protein, 9 aa, synthetic construct
PVNAAVHLK

SEQ ID NO: 10266 - protein, 9 aa, synthetic construct
PVNAAVHVK

SEQ ID NO: 10267 - protein, 9 aa, synthetic construct
PLQGSAKLY

SEQ ID NO: 10268 - protein, 9 aa, synthetic construct
PVNAAIHLH

SEQ ID NO: 10269 - protein, 9 aa, synthetic construct
PVNAAIHVY

SEQ ID NO: 10270 - protein, 9 aa, synthetic construct
PVNAAIHVR

SEQ ID NO: 10271 - protein, 9 aa, synthetic construct
PVNAAIHVF

SEQ ID NO: 10272 - protein, 9 aa, synthetic construct
PVNAAIRLH

SEQ ID NO: 10273 - protein, 9 aa, synthetic construct
PVNAAIRVH

SEQ ID NO: 10274 - protein, 9 aa, synthetic construct
PVNAAIKLY

SEQ ID NO: 10275 - protein, 9 aa, synthetic construct
PVNAAGHLR

SEQ ID NO: 10276 - protein, 9 aa, synthetic construct
PVNAAGHLH

SEQ ID NO: 10277 - protein, 9 aa, synthetic construct
PVNAAGHLK

SEQ ID NO: 10278 - protein, 9 aa, synthetic construct
PVNAAGKVY

SEQ ID NO: 10279 - protein, 9 aa, synthetic construct
PVNATVRLH

SEQ ID NO: 10280 - protein, 9 aa, synthetic construct
PLQGSIHLH

SEQ ID NO: 10281 - protein, 9 aa, synthetic construct
PVNATVKVY

SEQ ID NO: 10282 - protein, 9 aa, synthetic construct
PLQGSIHLK

SEQ ID NO: 10283 - protein, 9 aa, synthetic construct
PVNATLHLK

SEQ ID NO: 10284 - protein, 9 aa, synthetic construct
PVNATLKVH

SEQ ID NO: 10285 - protein, 9 aa, synthetic construct
PVNATAHLY

SEQ ID NO: 10286 - protein, 9 aa, synthetic construct
PVNATAHVY

SEQ ID NO: 10287 - protein, 9 aa, synthetic construct
PLQGSIHVK

SEQ ID NO: 10288 - protein, 9 aa, synthetic construct
PVNATIKLH

SEQ ID NO: 10289 - protein, 9 aa, synthetic construct
PVNASVRVY

SEQ ID NO: 10290 - protein, 9 aa, synthetic construct
PVNASLHVR

SEQ ID NO: 10291 - protein, 9 aa, synthetic construct
PVNASLHVK

SEQ ID NO: 10292 - protein, 9 aa, synthetic construct
PVNASLKLF

SEQ ID NO: 10293 - protein, 9 aa, synthetic construct
PVNASAHLF

SEQ ID NO: 10294 - protein, 9 aa, synthetic construct
PVNASAHVK

SEQ ID NO: 10295 - protein, 9 aa, synthetic construct
PVNASARLY

SEQ ID NO: 10296 - protein, 9 aa, synthetic construct
PVNASARLF

SEQ ID NO: 10297 - protein, 9 aa, synthetic construct
PVNASARVY

SEQ ID NO: 10298 - protein, 9 aa, synthetic construct
PVNASIHVF

SEQ ID NO: 10299 - protein, 9 aa, synthetic construct
PLQGSIKVY

SEQ ID NO: 10300 - protein, 9 aa, synthetic construct
PVNASIRLY

SEQ ID NO: 10301 - protein, 9 aa, synthetic construct
PVNASIRLH

SEQ ID NO: 10302 - protein, 9 aa, synthetic construct
PVNASIKLF

SEQ ID NO: 10303 - protein, 9 aa, synthetic construct
PVNASIKVH

SEQ ID NO: 10304 - protein, 9 aa, synthetic construct
PVNASGKVH

SEQ ID NO: 10305 - protein, 9 aa, synthetic construct
PVNAVVHLK

SEQ ID NO: 10306 - protein, 9 aa, synthetic construct
PVNAVVHVH

SEQ ID NO: 10307 - protein, 9 aa, synthetic construct
PVNAVVRLH

SEQ ID NO: 10308 - protein, 9 aa, synthetic construct
PVNAVVKLY

SEQ ID NO: 10309 - protein, 9 aa, synthetic construct
PVNAVVKVF

SEQ ID NO: 10310 - protein, 9 aa, synthetic construct
PLQGSGHLF

SEQ ID NO: 10311 - protein, 9 aa, synthetic construct
PVNAVLRVR

SEQ ID NO: 10312 - protein, 9 aa, synthetic construct
PVNAVLRVK

SEQ ID NO: 10313 - protein, 9 aa, synthetic construct
PVNAVLKLR

SEQ ID NO: 10314 - protein, 9 aa, synthetic construct
PVNAVARVH

SEQ ID NO: 10315 - protein, 9 aa, synthetic construct
PLQGSGHVK

SEQ ID NO: 10316 - protein, 9 aa, synthetic construct
PVNAVIHLY

SEQ ID NO: 10317 - protein, 9 aa, synthetic construct
PVNAVIHLR

SEQ ID NO: 10318 - protein, 9 aa, synthetic construct
PVNAVIHLH

SEQ ID NO: 10319 - protein, 9 aa, synthetic construct
PVNAVIHLK

SEQ ID NO: 10320 - protein, 9 aa, synthetic construct
PVNAVIKLH

SEQ ID NO: 10321 - protein, 9 aa, synthetic construct
PLQGSGRLH

SEQ ID NO: 10322 - protein, 9 aa, synthetic construct
PVNAVGRLF

SEQ ID NO: 10323 - protein, 9 aa, synthetic construct
PLQGSGRVY

SEQ ID NO: 10324 - protein, 9 aa, synthetic construct
PVNAGVRVH

SEQ ID NO: 10325 - protein, 9 aa, synthetic construct
PVNAGVRVF

SEQ ID NO: 10326 - protein, 9 aa, synthetic construct
PLQGSGKLY

SEQ ID NO: 10327 - protein, 9 aa, synthetic construct
PVNAGLKVY

SEQ ID NO: 10328 - protein, 9 aa, synthetic construct
PVNAGLKVK

SEQ ID NO: 10329 - protein, 9 aa, synthetic construct
PVNAGAHVF

SEQ ID NO: 10330 - protein, 9 aa, synthetic construct
PVNAGARLY

SEQ ID NO: 10331 - protein, 9 aa, synthetic construct
PLQGSGKLF

SEQ ID NO: 10332 - protein, 9 aa, synthetic construct
PVNAGIHLK

SEQ ID NO: 10333 - protein, 9 aa, synthetic construct
PVNAGIHVH

SEQ ID NO: 10334 - protein, 9 aa, synthetic construct
PVNAGIKLY

SEQ ID NO: 10335 - protein, 9 aa, synthetic construct
PVNAGIKLH

SEQ ID NO: 10336 - protein, 9 aa, synthetic construct
PVNAGGHVH

SEQ ID NO: 10337 - protein, 9 aa, synthetic construct
PVQGAVHLK

SEQ ID NO: 10338 - protein, 9 aa, synthetic construct
PVQGAVKLF

SEQ ID NO: 10339 - protein, 9 aa, synthetic construct
PLQGVVHVY

SEQ ID NO: 10340 - protein, 9 aa, synthetic construct
PVQGAAHLH

SEQ ID NO: 10341 - protein, 9 aa, synthetic construct
PVQGAAHVY

SEQ ID NO: 10342 - protein, 9 aa, synthetic construct
PVQGAAHVR

SEQ ID NO: 10343 - protein, 9 aa, synthetic construct
PVQGAAHVK

SEQ ID NO: 10344 - protein, 9 aa, synthetic construct
PLQGVVHVH

SEQ ID NO: 10345 - protein, 9 aa, synthetic construct
PVQGAAKLH

SEQ ID NO: 10346 - protein, 9 aa, synthetic construct
PVQGAIHLH

SEQ ID NO: 10347 - protein, 9 aa, synthetic construct
PVQGAIKLF

SEQ ID NO: 10348 - protein, 9 aa, synthetic construct
PVQGAGHLY

SEQ ID NO: 10349 - protein, 9 aa, synthetic construct
PVQGAGRVF

SEQ ID NO: 10350 - protein, 9 aa, synthetic construct
PVQGTVHLH

SEQ ID NO: 10351 - protein, 9 aa, synthetic construct
PVQGTVKLH

SEQ ID NO: 10352 - protein, 9 aa, synthetic construct
PVQGTLHLH

SEQ ID NO: 10353 - protein, 9 aa, synthetic construct
PVQGTAHLR

SEQ ID NO: 10354 - protein, 9 aa, synthetic construct
PVQGTAHLF

SEQ ID NO: 10355 - protein, 9 aa, synthetic construct
PVQGTAHVR

SEQ ID NO: 10356 - protein, 9 aa, synthetic construct
PVQGTAHVH

SEQ ID NO: 10357 - protein, 9 aa, synthetic construct
PVQGTAHVK

SEQ ID NO: 10358 - protein, 9 aa, synthetic construct
PVQGTAHVF

SEQ ID NO: 10359 - protein, 9 aa, synthetic construct
PLQGVVKLH

SEQ ID NO: 10360 - protein, 9 aa, synthetic construct
PVQGTARVH

SEQ ID NO: 10361 - protein, 9 aa, synthetic construct
PVQGTAKLH

SEQ ID NO: 10362 - protein, 9 aa, synthetic construct
PVQGTAKVH

SEQ ID NO: 10363 - protein, 9 aa, synthetic construct
PVQGTIHLK

SEQ ID NO: 10364 - protein, 9 aa, synthetic construct
PVQGTIHVK

SEQ ID NO: 10365 - protein, 9 aa, synthetic construct
PVQGTIRLH

SEQ ID NO: 10366 - protein, 9 aa, synthetic construct
PVQGTIKLF

SEQ ID NO: 10367 - protein, 9 aa, synthetic construct
PVQGTGHLH

SEQ ID NO: 10368 - protein, 9 aa, synthetic construct
PVQGTGHVR

SEQ ID NO: 10369 - protein, 9 aa, synthetic construct
PVQGTGKVY

SEQ ID NO: 10370 - protein, 9 aa, synthetic construct
PVQGSVHLY

SEQ ID NO: 10371 - protein, 9 aa, synthetic construct
PVQGSVHVR

SEQ ID NO: 10372 - protein, 9 aa, synthetic construct
PVQGSVRVH

SEQ ID NO: 10373 - protein, 9 aa, synthetic construct
PVQGSLKVH

SEQ ID NO: 10374 - protein, 9 aa, synthetic construct
PVQGSAHLH

SEQ ID NO: 10375 - protein, 9 aa, synthetic construct
PVQGSARLY

SEQ ID NO: 10376 - protein, 9 aa, synthetic construct
PVQGSARLH

SEQ ID NO: 10377 - protein, 9 aa, synthetic construct
PVQGSARLF

SEQ ID NO: 10378 - protein, 9 aa, synthetic construct
PVQGSIHLK

SEQ ID NO: 10379 - protein, 9 aa, synthetic construct
PVQGSIHVY

SEQ ID NO: 10380 - protein, 9 aa, synthetic construct
PVQGSIHVR

SEQ ID NO: 10381 - protein, 9 aa, synthetic construct
PVQGSIHVK

SEQ ID NO: 10382 - protein, 9 aa, synthetic construct
PVQGSIRVH

SEQ ID NO: 10383 - protein, 9 aa, synthetic construct
PVQGSIKLF

SEQ ID NO: 10384 - protein, 9 aa, synthetic construct
PVQGSGRLR

SEQ ID NO: 10385 - protein, 9 aa, synthetic construct
PVQGVVHLY

SEQ ID NO: 10386 - protein, 9 aa, synthetic construct
PVQGVVHLK

SEQ ID NO: 10387 - protein, 9 aa, synthetic construct
PVQGVVHVY

SEQ ID NO: 10388 - protein, 9 aa, synthetic construct
PVQGVVHVR

SEQ ID NO: 10389 - protein, 9 aa, synthetic construct
PVQGVVHVH

SEQ ID NO: 10390 - protein, 9 aa, synthetic construct
PVQGVVHVK

SEQ ID NO: 10391 - protein, 9 aa, synthetic construct
PVQGVVHVF

SEQ ID NO: 10392 - protein, 9 aa, synthetic construct
PVQGVVRLH

SEQ ID NO: 10393 - protein, 9 aa, synthetic construct
PLQGVLRVH

SEQ ID NO: 10394 - protein, 9 aa, synthetic construct
PVQGVVKLY

SEQ ID NO: 10395 - protein, 9 aa, synthetic construct
PVQGVLHLF

SEQ ID NO: 10396 - protein, 9 aa, synthetic construct
PVQGVLHVY

SEQ ID NO: 10397 - protein, 9 aa, synthetic construct
PVQGVLRLK

SEQ ID NO: 10398 - protein, 9 aa, synthetic construct
PVQGVAHLK

SEQ ID NO: 10399 - protein, 9 aa, synthetic construct
PVQGVAKVY

SEQ ID NO: 10400 - protein, 9 aa, synthetic construct
PVQGVAKVF

SEQ ID NO: 10401 - protein, 9 aa, synthetic construct
PVQGVIRLY

SEQ ID NO: 10402 - protein, 9 aa, synthetic construct
PVQGVIRLH

SEQ ID NO: 10403 - protein, 9 aa, synthetic construct
PVQGVIRLF

SEQ ID NO: 10404 - protein, 9 aa, synthetic construct
PVQGVIRVH

SEQ ID NO: 10405 - protein, 9 aa, synthetic construct
PVQGVIKLH

SEQ ID NO: 10406 - protein, 9 aa, synthetic construct
PVQGVIKVH

SEQ ID NO: 10407 - protein, 9 aa, synthetic construct
PVQGVGHLY

SEQ ID NO: 10408 - protein, 9 aa, synthetic construct
PVQGVGHLF

SEQ ID NO: 10409 - protein, 9 aa, synthetic construct
PVQGVGRVH

SEQ ID NO: 10410 - protein, 9 aa, synthetic construct
PVQGVGKLR

SEQ ID NO: 10411 - protein, 9 aa, synthetic construct
PVQGVGKVY

SEQ ID NO: 10412 - protein, 9 aa, synthetic construct
PVQGGVRVH

SEQ ID NO: 10413 - protein, 9 aa, synthetic construct
PVQGGLHLY

SEQ ID NO: 10414 - protein, 9 aa, synthetic construct
PVQGGLHVK

SEQ ID NO: 10415 - protein, 9 aa, synthetic construct
PLQGVAHVY

SEQ ID NO: 10416 - protein, 9 aa, synthetic construct
PVQGGLKLY

SEQ ID NO: 10417 - protein, 9 aa, synthetic construct
PVQGGLKVK

SEQ ID NO: 10418 - protein, 9 aa, synthetic construct
PVQGGAHLH

SEQ ID NO: 10419 - protein, 9 aa, synthetic construct
PVQGGAHVR

SEQ ID NO: 10420 - protein, 9 aa, synthetic construct
PVQGGAHVH

SEQ ID NO: 10421 - protein, 9 aa, synthetic construct
PVQGGARVH

SEQ ID NO: 10422 - protein, 9 aa, synthetic construct
PVQGGIHLY

SEQ ID NO: 10423 - protein, 9 aa, synthetic construct
PVQGGIHLK

SEQ ID NO: 10424 - protein, 9 aa, synthetic construct
PVQGGIHVK

SEQ ID NO: 10425 - protein, 9 aa, synthetic construct
PVQGGIHVF

SEQ ID NO: 10426 - protein, 9 aa, synthetic construct
PVQGGIRLK

SEQ ID NO: 10427 - protein, 9 aa, synthetic construct
PVQGGGKLF

SEQ ID NO: 10428 - protein, 9 aa, synthetic construct
PVQAAVHLY

SEQ ID NO: 10429 - protein, 9 aa, synthetic construct
PVQAAVHLH

SEQ ID NO: 10430 - protein, 9 aa, synthetic construct
PVQAAVHLK

SEQ ID NO: 10431 - protein, 9 aa, synthetic construct
PVQAAVRLF

SEQ ID NO: 10432 - protein, 9 aa, synthetic construct
PVQAAVRVY

SEQ ID NO: 10433 - protein, 9 aa, synthetic construct
PVQAAVRVH

SEQ ID NO: 10434 - protein, 9 aa, synthetic construct
PVQAAVKVF

SEQ ID NO: 10435 - protein, 9 aa, synthetic construct
PVQAALRVH

SEQ ID NO: 10436 - protein, 9 aa, synthetic construct
PVQAALRVF

SEQ ID NO: 10437 - protein, 9 aa, synthetic construct
PVQAAAHLR

SEQ ID NO: 10438 - protein, 9 aa, synthetic construct
PVQAAAHLH

SEQ ID NO: 10439 - protein, 9 aa, synthetic construct
PVQAAAHLK

SEQ ID NO: 10440 - protein, 9 aa, synthetic construct
PVQAAAHLF

SEQ ID NO: 10441 - protein, 9 aa, synthetic construct
PVQAAAHVY

SEQ ID NO: 10442 - protein, 9 aa, synthetic construct
PVQAAAHVR

SEQ ID NO: 10443 - protein, 9 aa, synthetic construct
PVQAAAHVK

SEQ ID NO: 10444 - protein, 9 aa, synthetic construct
PVQAAAHVF

SEQ ID NO: 10445 - protein, 9 aa, synthetic construct
PVQAAARLY

SEQ ID NO: 10446 - protein, 9 aa, synthetic construct
PVQAAARVF

SEQ ID NO: 10447 - protein, 9 aa, synthetic construct
PVQAAAKVH

SEQ ID NO: 10448 - protein, 9 aa, synthetic construct
PVQAAIHLF

SEQ ID NO: 10449 - protein, 9 aa, synthetic construct
PVQAAIRLH

SEQ ID NO: 10450 - protein, 9 aa, synthetic construct
PVQAAIRVY

SEQ ID NO: 10451 - protein, 9 aa, synthetic construct
PVQAAIKLH

SEQ ID NO: 10452 - protein, 9 aa, synthetic construct
PVQAAIKVF

SEQ ID NO: 10453 - protein, 9 aa, synthetic construct
PVQAAGHLR

SEQ ID NO: 10454 - protein, 9 aa, synthetic construct
PVQAAGHVK

SEQ ID NO: 10455 - protein, 9 aa, synthetic construct
PVQAAGRLF

SEQ ID NO: 10456 - protein, 9 aa, synthetic construct
PLQGVIHLY

SEQ ID NO: 10457 - protein, 9 aa, synthetic construct
PVQATVHLH

SEQ ID NO: 10458 - protein, 9 aa, synthetic construct
PLQGVIHLH

SEQ ID NO: 10459 - protein, 9 aa, synthetic construct
PVQATVKLK

SEQ ID NO: 10460 - protein, 9 aa, synthetic construct
PVQATVKVR

SEQ ID NO: 10461 - protein, 9 aa, synthetic construct
PLQGVIHLF

SEQ ID NO: 10462 - protein, 9 aa, synthetic construct
PVQATLRVH

SEQ ID NO: 10463 - protein, 9 aa, synthetic construct
PLQGVIHVY

SEQ ID NO: 10464 - protein, 9 aa, synthetic construct
PVQATLKLH

SEQ ID NO: 10465 - protein, 9 aa, synthetic construct
PVQATAHLY

SEQ ID NO: 10466 - protein, 9 aa, synthetic construct
PVQATAHLH

SEQ ID NO: 10467 - protein, 9 aa, synthetic construct
PVQATAHLK

SEQ ID NO: 10468 - protein, 9 aa, synthetic construct
PVQATAHLF

SEQ ID NO: 10469 - protein, 9 aa, synthetic construct
PVQATAHVR

SEQ ID NO: 10470 - protein, 9 aa, synthetic construct
PLQGVIHVH

SEQ ID NO: 10471 - protein, 9 aa, synthetic construct
PVQATARLY

SEQ ID NO: 10472 - protein, 9 aa, synthetic construct
PVQATARVY

SEQ ID NO: 10473 - protein, 9 aa, synthetic construct
PVQATARVH

SEQ ID NO: 10474 - protein, 9 aa, synthetic construct
PLQGVIHVF

SEQ ID NO: 10475 - protein, 9 aa, synthetic construct
PVQATIKVH

SEQ ID NO: 10476 - protein, 9 aa, synthetic construct
PLQGVIRLH

SEQ ID NO: 10477 - protein, 9 aa, synthetic construct
PVQATGHLH

SEQ ID NO: 10478 - protein, 9 aa, synthetic construct
PVQATGHLF

SEQ ID NO: 10479 - protein, 9 aa, synthetic construct
PVQASVHLR

SEQ ID NO: 10480 - protein, 9 aa, synthetic construct
PVQASVKLF

SEQ ID NO: 10481 - protein, 9 aa, synthetic construct
PVQASLKVF

SEQ ID NO: 10482 - protein, 9 aa, synthetic construct
PLQGVIKLH

SEQ ID NO: 10483 - protein, 9 aa, synthetic construct
PVQASIHVK

SEQ ID NO: 10484 - protein, 9 aa, synthetic construct
PVQASIKVF

SEQ ID NO: 10485 - protein, 9 aa, synthetic construct
PLQGVIKVH

SEQ ID NO: 10486 - protein, 9 aa, synthetic construct
PVQASGHVK

SEQ ID NO: 10487 - protein, 9 aa, synthetic construct
PVQAVVHLF

SEQ ID NO: 10488 - protein, 9 aa, synthetic construct
PVQAVVHVH

SEQ ID NO: 10489 - protein, 9 aa, synthetic construct
PVQAVVHVK

SEQ ID NO: 10490 - protein, 9 aa, synthetic construct
PVQAVVKVY

SEQ ID NO: 10491 - protein, 9 aa, synthetic construct
PVQAVIHVR

SEQ ID NO: 10492 - protein, 9 aa, synthetic construct
PLNGTLKVK

SEQ ID NO: 10493 - protein, 9 aa, synthetic construct
PVQAVIKLR

SEQ ID NO: 10494 - protein, 9 aa, synthetic construct
PVQAVIKVY

SEQ ID NO: 10495 - protein, 9 aa, synthetic construct
PVQAVGHVK

SEQ ID NO: 10496 - protein, 9 aa, synthetic construct
PVQAVGKLF

SEQ ID NO: 10497 - protein, 9 aa, synthetic construct
PVQAGVRVH

SEQ ID NO: 10498 - protein, 9 aa, synthetic construct
PLQGVGRVF

SEQ ID NO: 10499 - protein, 9 aa, synthetic construct
PVQAGAHLY

SEQ ID NO: 10500 - protein, 9 aa, synthetic construct
PVQAGAHLR

SEQ ID NO: 10501 - protein, 9 aa, synthetic construct
PVQAGAHVY

SEQ ID NO: 10502 - protein, 9 aa, synthetic construct
PVQAGARVF

SEQ ID NO: 10503 - protein, 9 aa, synthetic construct
PVQAGIRVF

SEQ ID NO: 10504 - protein, 9 aa, synthetic construct
PVQAGIKVH

SEQ ID NO: 10505 - protein, 9 aa, synthetic construct
PVPGAAHLK

SEQ ID NO: 10506 - protein, 9 aa, synthetic construct
PVPGAAHVK

SEQ ID NO: 10507 - protein, 9 aa, synthetic construct
PVPGAAHVF

SEQ ID NO: 10508 - protein, 9 aa, synthetic construct
PVPGAARVY

SEQ ID NO: 10509 - protein, 9 aa, synthetic construct
PLQGGVHVK

SEQ ID NO: 10510 - protein, 9 aa, synthetic construct
PVPGAAKLY

SEQ ID NO: 10511 - protein, 9 aa, synthetic construct
PVPGAAKVY

SEQ ID NO: 10512 - protein, 9 aa, synthetic construct
PVPGAAKVH

SEQ ID NO: 10513 - protein, 9 aa, synthetic construct
PVPGAIHLR

SEQ ID NO: 10514 - protein, 9 aa, synthetic construct
PVPGAIHLH

SEQ ID NO: 10515 - protein, 9 aa, synthetic construct
PVPGTVRLH

SEQ ID NO: 10516 - protein, 9 aa, synthetic construct
PVPGTVRVH

SEQ ID NO: 10517 - protein, 9 aa, synthetic construct
PLQGGVRVH

SEQ ID NO: 10518 - protein, 9 aa, synthetic construct
PVPGTLHVH

SEQ ID NO: 10519 - protein, 9 aa, synthetic construct
PVPGTLHVF

SEQ ID NO: 10520 - protein, 9 aa, synthetic construct
PVPGTLRLY

SEQ ID NO: 10521 - protein, 9 aa, synthetic construct
PVPGTAHLR

SEQ ID NO: 10522 - protein, 9 aa, synthetic construct
PVPGTAHLK

SEQ ID NO: 10523 - protein, 9 aa, synthetic construct
PVPGTAHVR

SEQ ID NO: 10524 - protein, 9 aa, synthetic construct
PVPGTAHVF

SEQ ID NO: 10525 - protein, 9 aa, synthetic construct
PVPGTARVF

SEQ ID NO: 10526 - protein, 9 aa, synthetic construct
PVPGTAKVY

SEQ ID NO: 10527 - protein, 9 aa, synthetic construct
PVPGTIHLY

SEQ ID NO: 10528 - protein, 9 aa, synthetic construct
PVPGTIHLR

SEQ ID NO: 10529 - protein, 9 aa, synthetic construct
PVPGTIKVH

SEQ ID NO: 10530 - protein, 9 aa, synthetic construct
PVPGTGHVR

SEQ ID NO: 10531 - protein, 9 aa, synthetic construct
PVPGTGHVK

SEQ ID NO: 10532 - protein, 9 aa, synthetic construct
PVPGTGHVF

SEQ ID NO: 10533 - protein, 9 aa, synthetic construct
PVPGTGKVY

SEQ ID NO: 10534 - protein, 9 aa, synthetic construct
PVPGTGKVF

SEQ ID NO: 10535 - protein, 9 aa, synthetic construct
PVPGSVHLY

SEQ ID NO: 10536 - protein, 9 aa, synthetic construct
PVPGSVHLR

SEQ ID NO: 10537 - protein, 9 aa, synthetic construct
PVPGSVHLH

SEQ ID NO: 10538 - protein, 9 aa, synthetic construct
PVPGSVHVF

SEQ ID NO: 10539 - protein, 9 aa, synthetic construct
PVPGSVRVF

SEQ ID NO: 10540 - protein, 9 aa, synthetic construct
PVPGSVKLF

SEQ ID NO: 10541 - protein, 9 aa, synthetic construct
PLQGGLHLK

SEQ ID NO: 10542 - protein, 9 aa, synthetic construct
PVPGSLHLY

SEQ ID NO: 10543 - protein, 9 aa, synthetic construct
PVPGSLHLR

SEQ ID NO: 10544 - protein, 9 aa, synthetic construct
PVPGSLHVR

SEQ ID NO: 10545 - protein, 9 aa, synthetic construct
PLQGGLHVY

SEQ ID NO: 10546 - protein, 9 aa, synthetic construct
PLQGGLHVR

SEQ ID NO: 10547 - protein, 9 aa, synthetic construct
PVPGSAHVK

SEQ ID NO: 10548 - protein, 9 aa, synthetic construct
PVPGSAHVF

SEQ ID NO: 10549 - protein, 9 aa, synthetic construct
PLQGGLHVH

SEQ ID NO: 10550 - protein, 9 aa, synthetic construct
PVPGSARVH

SEQ ID NO: 10551 - protein, 9 aa, synthetic construct
PLQGGLHVK

SEQ ID NO: 10552 - protein, 9 aa, synthetic construct
PLQGGLHVF

SEQ ID NO: 10553 - protein, 9 aa, synthetic construct
PVPGSIHLK

SEQ ID NO: 10554 - protein, 9 aa, synthetic construct
PVPGSIKLY

SEQ ID NO: 10555 - protein, 9 aa, synthetic construct
PVPGSIKVF

SEQ ID NO: 10556 - protein, 9 aa, synthetic construct
PLQGGLRVH

SEQ ID NO: 10557 - protein, 9 aa, synthetic construct
PVPGVVKLH

SEQ ID NO: 10558 - protein, 9 aa, synthetic construct
PVPGVLKLR

SEQ ID NO: 10559 - protein, 9 aa, synthetic construct
PVPGVAHLR

SEQ ID NO: 10560 - protein, 9 aa, synthetic construct
PVPGVAHLK

SEQ ID NO: 10561 - protein, 9 aa, synthetic construct
PVPGVGHLR

SEQ ID NO: 10562 - protein, 9 aa, synthetic construct
PVPGVGHVH

SEQ ID NO: 10563 - protein, 9 aa, synthetic construct
PVPGGVRVH

SEQ ID NO: 10564 - protein, 9 aa, synthetic construct
PLQGGAHLK

SEQ ID NO: 10565 - protein, 9 aa, synthetic construct
PVPGGLKVF

SEQ ID NO: 10566 - protein, 9 aa, synthetic construct
PLQGGAHVH

SEQ ID NO: 10567 - protein, 9 aa, synthetic construct
PVPGGARVY

SEQ ID NO: 10568 - protein, 9 aa, synthetic construct
PVPGGIHLK

SEQ ID NO: 10569 - protein, 9 aa, synthetic construct
PVPGGIRLH

SEQ ID NO: 10570 - protein, 9 aa, synthetic construct
PVPAAVHLR

SEQ ID NO: 10571 - protein, 9 aa, synthetic construct
PVPAAVHLH

SEQ ID NO: 10572 - protein, 9 aa, synthetic construct
PVPAAVKLY

SEQ ID NO: 10573 - protein, 9 aa, synthetic construct
PVPAAAHLY

SEQ ID NO: 10574 - protein, 9 aa, synthetic construct
PVPAAAHLH

SEQ ID NO: 10575 - protein, 9 aa, synthetic construct
PVPAAAHLK

SEQ ID NO: 10576 - protein, 9 aa, synthetic construct
PVPAAAHVY

SEQ ID NO: 10577 - protein, 9 aa, synthetic construct
PVPAAAHVK

SEQ ID NO: 10578 - protein, 9 aa, synthetic construct
PVPAAAKLF

SEQ ID NO: 10579 - protein, 9 aa, synthetic construct
PVPAAIHLK

SEQ ID NO: 10580 - protein, 9 aa, synthetic construct
PVPAAGHLK

SEQ ID NO: 10581 - protein, 9 aa, synthetic construct
PVPAAGRLF

SEQ ID NO: 10582 - protein, 9 aa, synthetic construct
PVPATVHLR

SEQ ID NO: 10583 - protein, 9 aa, synthetic construct
PVPATVHLH

SEQ ID NO: 10584 - protein, 9 aa, synthetic construct
PVPATVHLK

SEQ ID NO: 10585 - protein, 9 aa, synthetic construct
PVPATVRVK

SEQ ID NO: 10586 - protein, 9 aa, synthetic construct
PLQGGIHVY

SEQ ID NO: 10587 - protein, 9 aa, synthetic construct
PLQGGIHVR

SEQ ID NO: 10588 - protein, 9 aa, synthetic construct
PVPATAHLY

SEQ ID NO: 10589 - protein, 9 aa, synthetic construct
PVPATAHLR

SEQ ID NO: 10590 - protein, 9 aa, synthetic construct
PVPATAHVH

SEQ ID NO: 10591 - protein, 9 aa, synthetic construct
PVPATAHVK

SEQ ID NO: 10592 - protein, 9 aa, synthetic construct
PVPATARVF

SEQ ID NO: 10593 - protein, 9 aa, synthetic construct
PVPATAKVY

SEQ ID NO: 10594 - protein, 9 aa, synthetic construct
PVPATIRLH

SEQ ID NO: 10595 - protein, 9 aa, synthetic construct
PVPASVHLR

SEQ ID NO: 10596 - protein, 9 aa, synthetic construct
PVPASAHLF

SEQ ID NO: 10597 - protein, 9 aa, synthetic construct
PVPASAHVY

SEQ ID NO: 10598 - protein, 9 aa, synthetic construct
PVPASAHVR

SEQ ID NO: 10599 - protein, 9 aa, synthetic construct
PVPASARLH

SEQ ID NO: 10600 - protein, 9 aa, synthetic construct
PVPASARVH

SEQ ID NO: 10601 - protein, 9 aa, synthetic construct
PVPASAKLY

SEQ ID NO: 10602 - protein, 9 aa, synthetic construct
PVPASIHLR

SEQ ID NO: 10603 - protein, 9 aa, synthetic construct
PVPASIRLH

SEQ ID NO: 10604 - protein, 9 aa, synthetic construct
PVPASIKLF

SEQ ID NO: 10605 - protein, 9 aa, synthetic construct
PVPASGRVY

SEQ ID NO: 10606 - protein, 9 aa, synthetic construct
PVPAVAHLR

SEQ ID NO: 10607 - protein, 9 aa, synthetic construct
PVPAVAHLF

SEQ ID NO: 10608 - protein, 9 aa, synthetic construct
PVPAVAKLF

SEQ ID NO: 10609 - protein, 9 aa, synthetic construct
PVPAVGHLR

SEQ ID NO: 10610 - protein, 9 aa, synthetic construct
PVPAVGKLH

SEQ ID NO: 10611 - protein, 9 aa, synthetic construct
PVPAVGKVF

SEQ ID NO: 10612 - protein, 9 aa, synthetic construct
PVPAGVRVY

SEQ ID NO: 10613 - protein, 9 aa, synthetic construct
PVPAGVRVH

SEQ ID NO: 10614 - protein, 9 aa, synthetic construct
PVPAGVKVF

SEQ ID NO: 10615 - protein, 9 aa, synthetic construct
PVPAGARVY

SEQ ID NO: 10616 - protein, 9 aa, synthetic construct
PVPAGARVF

SEQ ID NO: 10617 - protein, 9 aa, synthetic construct
PVPAGAKVR

SEQ ID NO: 10618 - protein, 9 aa, synthetic construct
PINGAVRLY

SEQ ID NO: 10619 - protein, 9 aa, synthetic construct
PINGAVRLH

SEQ ID NO: 10620 - protein, 9 aa, synthetic construct
PINGAVRLF

SEQ ID NO: 10621 - protein, 9 aa, synthetic construct
PINGAVKLF

SEQ ID NO: 10622 - protein, 9 aa, synthetic construct
PINGALHLY

SEQ ID NO: 10623 - protein, 9 aa, synthetic construct
PINGALRLF

SEQ ID NO: 10624 - protein, 9 aa, synthetic construct
PINGALKLY

SEQ ID NO: 10625 - protein, 9 aa, synthetic construct
PINGALKLH

SEQ ID NO: 10626 - protein, 9 aa, synthetic construct
PINGAAHLY

SEQ ID NO: 10627 - protein, 9 aa, synthetic construct
PINGAAHVY

SEQ ID NO: 10628 - protein, 9 aa, synthetic construct
PINGAAHVH

SEQ ID NO: 10629 - protein, 9 aa, synthetic construct
PINGAAHVK

SEQ ID NO: 10630 - protein, 9 aa, synthetic construct
PINGAAHVF

SEQ ID NO: 10631 - protein, 9 aa, synthetic construct
PINGAARLY

SEQ ID NO: 10632 - protein, 9 aa, synthetic construct
PINGAARLH

SEQ ID NO: 10633 - protein, 9 aa, synthetic construct
PINGAARVH

SEQ ID NO: 10634 - protein, 9 aa, synthetic construct
PLQAAVHVK

SEQ ID NO: 10635 - protein, 9 aa, synthetic construct
PINGAAKLH

SEQ ID NO: 10636 - protein, 9 aa, synthetic construct
PINGAAKLK

SEQ ID NO: 10637 - protein, 9 aa, synthetic construct
PINGAAKVH

SEQ ID NO: 10638 - protein, 9 aa, synthetic construct
PINGAIHLF

SEQ ID NO: 10639 - protein, 9 aa, synthetic construct
PLQAAVRLY

SEQ ID NO: 10640 - protein, 9 aa, synthetic construct
PINGAIRVH

SEQ ID NO: 10641 - protein, 9 aa, synthetic construct
PINGAIKLY

SEQ ID NO: 10642 - protein, 9 aa, synthetic construct
PINGAIKVY

SEQ ID NO: 10643 - protein, 9 aa, synthetic construct
PINGAGHLR

SEQ ID NO: 10644 - protein, 9 aa, synthetic construct
PINGAGHLH

SEQ ID NO: 10645 - protein, 9 aa, synthetic construct
PINGAGHVR

SEQ ID NO: 10646 - protein, 9 aa, synthetic construct
PINGAGHVH

SEQ ID NO: 10647 - protein, 9 aa, synthetic construct
PINGAGHVK

SEQ ID NO: 10648 - protein, 9 aa, synthetic construct
PINGAGRLY

SEQ ID NO: 10649 - protein, 9 aa, synthetic construct
PINGAGRLH

SEQ ID NO: 10650 - protein, 9 aa, synthetic construct
PINGAGRVH

SEQ ID NO: 10651 - protein, 9 aa, synthetic construct
PINGAGRVF

SEQ ID NO: 10652 - protein, 9 aa, synthetic construct
PINGAGKLY

SEQ ID NO: 10653 - protein, 9 aa, synthetic construct
PINGTVRLH

SEQ ID NO: 10654 - protein, 9 aa, synthetic construct
PINGTVRLF

SEQ ID NO: 10655 - protein, 9 aa, synthetic construct
PINGTVKLR

SEQ ID NO: 10656 - protein, 9 aa, synthetic construct
PINGTVKLH

SEQ ID NO: 10657 - protein, 9 aa, synthetic construct
PINGTVKVY

SEQ ID NO: 10658 - protein, 9 aa, synthetic construct
PLNGTARVH

SEQ ID NO: 10659 - protein, 9 aa, synthetic construct
PINGTAHLH

SEQ ID NO: 10660 - protein, 9 aa, synthetic construct
PINGTAHVH

SEQ ID NO: 10661 - protein, 9 aa, synthetic construct
PINGTARLH

SEQ ID NO: 10662 - protein, 9 aa, synthetic construct
PINGTARVH

SEQ ID NO: 10663 - protein, 9 aa, synthetic construct
PINGTIRLY

SEQ ID NO: 10664 - protein, 9 aa, synthetic construct
PINGTIRLR

SEQ ID NO: 10665 - protein, 9 aa, synthetic construct
PINGTIKLY

SEQ ID NO: 10666 - protein, 9 aa, synthetic construct
PINGTIKLF

SEQ ID NO: 10667 - protein, 9 aa, synthetic construct
PINGTIKVY

SEQ ID NO: 10668 - protein, 9 aa, synthetic construct
PINGTIKVR

SEQ ID NO: 10669 - protein, 9 aa, synthetic construct
PINGTGHLH

SEQ ID NO: 10670 - protein, 9 aa, synthetic construct
PINGTGHVR

SEQ ID NO: 10671 - protein, 9 aa, synthetic construct
PINGTGHVF

SEQ ID NO: 10672 - protein, 9 aa, synthetic construct
PINGTGRLH

SEQ ID NO: 10673 - protein, 9 aa, synthetic construct
PINGTGRLF

SEQ ID NO: 10674 - protein, 9 aa, synthetic construct
PINGTGRVH

SEQ ID NO: 10675 - protein, 9 aa, synthetic construct
PINGTGKLF

SEQ ID NO: 10676 - protein, 9 aa, synthetic construct
PINGSVHLF

SEQ ID NO: 10677 - protein, 9 aa, synthetic construct
PINGSVHVF

SEQ ID NO: 10678 - protein, 9 aa, synthetic construct
PINGSVRLH

SEQ ID NO: 10679 - protein, 9 aa, synthetic construct
PINGSVRVH

SEQ ID NO: 10680 - protein, 9 aa, synthetic construct
PINGSAHLF

SEQ ID NO: 10681 - protein, 9 aa, synthetic construct
PINGSARLY

SEQ ID NO: 10682 - protein, 9 aa, synthetic construct
PINGSARVH

SEQ ID NO: 10683 - protein, 9 aa, synthetic construct
PLNGTARVF

SEQ ID NO: 10684 - protein, 9 aa, synthetic construct
PINGSIKLY

SEQ ID NO: 10685 - protein, 9 aa, synthetic construct
PINGSIKVF

SEQ ID NO: 10686 - protein, 9 aa, synthetic construct
PINGSGHLF

SEQ ID NO: 10687 - protein, 9 aa, synthetic construct
PINGSGRLY

SEQ ID NO: 10688 - protein, 9 aa, synthetic construct
PINGSGRLH

SEQ ID NO: 10689 - protein, 9 aa, synthetic construct
PINGSGKLY

SEQ ID NO: 10690 - protein, 9 aa, synthetic construct
PINGSGKLH

SEQ ID NO: 10691 - protein, 9 aa, synthetic construct
PINGVVHVK

SEQ ID NO: 10692 - protein, 9 aa, synthetic construct
PINGVVRLF

SEQ ID NO: 10693 - protein, 9 aa, synthetic construct
PINGVVRVY

SEQ ID NO: 10694 - protein, 9 aa, synthetic construct
PINGVVRVH

SEQ ID NO: 10695 - protein, 9 aa, synthetic construct
PINGVVRVF

SEQ ID NO: 10696 - protein, 9 aa, synthetic construct
PINGVVKLH

SEQ ID NO: 10697 - protein, 9 aa, synthetic construct
PINGVVKVH

SEQ ID NO: 10698 - protein, 9 aa, synthetic construct
PINGVVKVF

SEQ ID NO: 10699 - protein, 9 aa, synthetic construct
PINGVLRVF

SEQ ID NO: 10700 - protein, 9 aa, synthetic construct
PINGVLKLK

SEQ ID NO: 10701 - protein, 9 aa, synthetic construct
PINGVIHVH

SEQ ID NO: 10702 - protein, 9 aa, synthetic construct
PINGVIRLH

SEQ ID NO: 10703 - protein, 9 aa, synthetic construct
PINGVGHVK

SEQ ID NO: 10704 - protein, 9 aa, synthetic construct
PLQAAAHLH

SEQ ID NO: 10705 - protein, 9 aa, synthetic construct
PINGGLHVR

SEQ ID NO: 10706 - protein, 9 aa, synthetic construct
PINGGLRLH

SEQ ID NO: 10707 - protein, 9 aa, synthetic construct
PINGGLRVR

SEQ ID NO: 10708 - protein, 9 aa, synthetic construct
PLQAAAHVY

SEQ ID NO: 10709 - protein, 9 aa, synthetic construct
PINGGAHLY

SEQ ID NO: 10710 - protein, 9 aa, synthetic construct
PINGGAKLH

SEQ ID NO: 10711 - protein, 9 aa, synthetic construct
PINGGIRLH

SEQ ID NO: 10712 - protein, 9 aa, synthetic construct
PINGGIKLF

SEQ ID NO: 10713 - protein, 9 aa, synthetic construct
PINGGGHLR

SEQ ID NO: 10714 - protein, 9 aa, synthetic construct
PINGGGKLY

SEQ ID NO: 10715 - protein, 9 aa, synthetic construct
PINAAVRLF

SEQ ID NO: 10716 - protein, 9 aa, synthetic construct
PLQAAARVH

SEQ ID NO: 10717 - protein, 9 aa, synthetic construct
PINAAVKLF

SEQ ID NO: 10718 - protein, 9 aa, synthetic construct
PLQAAARVF

SEQ ID NO: 10719 - protein, 9 aa, synthetic construct
PINAAAHLY

SEQ ID NO: 10720 - protein, 9 aa, synthetic construct
PINAAAHLR

SEQ ID NO: 10721 - protein, 9 aa, synthetic construct
PINAAAHVY

SEQ ID NO: 10722 - protein, 9 aa, synthetic construct
PINAAAHVR

SEQ ID NO: 10723 - protein, 9 aa, synthetic construct
PINAAAHVH

SEQ ID NO: 10724 - protein, 9 aa, synthetic construct
PINAAAHVK

SEQ ID NO: 10725 - protein, 9 aa, synthetic construct
PINAAAHVF

SEQ ID NO: 10726 - protein, 9 aa, synthetic construct
PINAAAKLY

SEQ ID NO: 10727 - protein, 9 aa, synthetic construct
PINAAIHLH

SEQ ID NO: 10728 - protein, 9 aa, synthetic construct
PINAAIHVH

SEQ ID NO: 10729 - protein, 9 aa, synthetic construct
PINAAIRLR

SEQ ID NO: 10730 - protein, 9 aa, synthetic construct
PINAAIRLK

SEQ ID NO: 10731 - protein, 9 aa, synthetic construct
PINAAIKVF

SEQ ID NO: 10732 - protein, 9 aa, synthetic construct
PINAAGHLF

SEQ ID NO: 10733 - protein, 9 aa, synthetic construct
PINAAGKLH

SEQ ID NO: 10734 - protein, 9 aa, synthetic construct
PINAAGKVY

SEQ ID NO: 10735 - protein, 9 aa, synthetic construct
PINATVHLF

SEQ ID NO: 10736 - protein, 9 aa, synthetic construct
PINATVKVY

SEQ ID NO: 10737 - protein, 9 aa, synthetic construct
PINATVKVF

SEQ ID NO: 10738 - protein, 9 aa, synthetic construct
PINATAHLY

SEQ ID NO: 10739 - protein, 9 aa, synthetic construct
PLQAAIHVK

SEQ ID NO: 10740 - protein, 9 aa, synthetic construct
PINATAKVY

SEQ ID NO: 10741 - protein, 9 aa, synthetic construct
PLNGTAKVY

SEQ ID NO: 10742 - protein, 9 aa, synthetic construct
PINATIKLY

SEQ ID NO: 10743 - protein, 9 aa, synthetic construct
PINATIKLH

SEQ ID NO: 10744 - protein, 9 aa, synthetic construct
PINATGHVR

SEQ ID NO: 10745 - protein, 9 aa, synthetic construct
PINATGRLH

SEQ ID NO: 10746 - protein, 9 aa, synthetic construct
PLQAAIRLF

SEQ ID NO: 10747 - protein, 9 aa, synthetic construct
PINATGKLY

SEQ ID NO: 10748 - protein, 9 aa, synthetic construct
PINATGKVH

SEQ ID NO: 10749 - protein, 9 aa, synthetic construct
PINATGKVF

SEQ ID NO: 10750 - protein, 9 aa, synthetic construct
PINASVHVY

SEQ ID NO: 10751 - protein, 9 aa, synthetic construct
PLQAAIRVH

SEQ ID NO: 10752 - protein, 9 aa, synthetic construct
PINASLHLY

SEQ ID NO: 10753 - protein, 9 aa, synthetic construct
PINASLHLH

SEQ ID NO: 10754 - protein, 9 aa, synthetic construct
PINASLHVR

SEQ ID NO: 10755 - protein, 9 aa, synthetic construct
PINASLKLF

SEQ ID NO: 10756 - protein, 9 aa, synthetic construct
PINASAHLF

SEQ ID NO: 10757 - protein, 9 aa, synthetic construct
PINASAKLY

SEQ ID NO: 10758 - protein, 9 aa, synthetic construct
PINASIHVK

SEQ ID NO: 10759 - protein, 9 aa, synthetic construct
PINASIRVH

SEQ ID NO: 10760 - protein, 9 aa, synthetic construct
PINASGHLF

SEQ ID NO: 10761 - protein, 9 aa, synthetic construct
PINASGKLY

SEQ ID NO: 10762 - protein, 9 aa, synthetic construct
PINASGKLH

SEQ ID NO: 10763 - protein, 9 aa, synthetic construct
PINASGKLK

SEQ ID NO: 10764 - protein, 9 aa, synthetic construct
PINAVVHLF

SEQ ID NO: 10765 - protein, 9 aa, synthetic construct
PINAVVHVH

SEQ ID NO: 10766 - protein, 9 aa, synthetic construct
PINAVVHVK

SEQ ID NO: 10767 - protein, 9 aa, synthetic construct
PINAVVRVF

SEQ ID NO: 10768 - protein, 9 aa, synthetic construct
PLQAAGHLK

SEQ ID NO: 10769 - protein, 9 aa, synthetic construct
PINAVLHVR

SEQ ID NO: 10770 - protein, 9 aa, synthetic construct
PINAVLRLH

SEQ ID NO: 10771 - protein, 9 aa, synthetic construct
PINAVLRVH

SEQ ID NO: 10772 - protein, 9 aa, synthetic construct
PINAVLKVK

SEQ ID NO: 10773 - protein, 9 aa, synthetic construct
PLQAAGHVH

SEQ ID NO: 10774 - protein, 9 aa, synthetic construct
PINAVAKLY

SEQ ID NO: 10775 - protein, 9 aa, synthetic construct
PINAVAKLF

SEQ ID NO: 10776 - protein, 9 aa, synthetic construct
PLQAAGHVF

SEQ ID NO: 10777 - protein, 9 aa, synthetic construct
PINAVGHLR

SEQ ID NO: 10778 - protein, 9 aa, synthetic construct
PLQAAGRLF

SEQ ID NO: 10779 - protein, 9 aa, synthetic construct
PINAGVRVH

SEQ ID NO: 10780 - protein, 9 aa, synthetic construct
PLQAAGRVH

SEQ ID NO: 10781 - protein, 9 aa, synthetic construct
PINAGVKVF

SEQ ID NO: 10782 - protein, 9 aa, synthetic construct
PINAGAHLY

SEQ ID NO: 10783 - protein, 9 aa, synthetic construct
PINAGAHLF

SEQ ID NO: 10784 - protein, 9 aa, synthetic construct
PINAGAHVY

SEQ ID NO: 10785 - protein, 9 aa, synthetic construct
PINAGAHVK

SEQ ID NO: 10786 - protein, 9 aa, synthetic construct
PINAGAHVF

SEQ ID NO: 10787 - protein, 9 aa, synthetic construct
PINAGARLY

SEQ ID NO: 10788 - protein, 9 aa, synthetic construct
PINAGARLH

SEQ ID NO: 10789 - protein, 9 aa, synthetic construct
PINAGIHVY

SEQ ID NO: 10790 - protein, 9 aa, synthetic construct
PINAGIHVR

SEQ ID NO: 10791 - protein, 9 aa, synthetic construct
PINAGIHVH

SEQ ID NO: 10792 - protein, 9 aa, synthetic construct
PLQAAGKVY

SEQ ID NO: 10793 - protein, 9 aa, synthetic construct
PINAGIKVF

SEQ ID NO: 10794 - protein, 9 aa, synthetic construct
PINAGGHLK

SEQ ID NO: 10795 - protein, 9 aa, synthetic construct
PINAGGHLF

SEQ ID NO: 10796 - protein, 9 aa, synthetic construct
PINAGGHVH

SEQ ID NO: 10797 - protein, 9 aa, synthetic construct
PINAGGKLY

SEQ ID NO: 10798 - protein, 9 aa, synthetic construct
PINAGGKLH

SEQ ID NO: 10799 - protein, 9 aa, synthetic construct
PIQGAVHVK

SEQ ID NO: 10800 - protein, 9 aa, synthetic construct
PLQATVHLH

SEQ ID NO: 10801 - protein, 9 aa, synthetic construct
PIQGAVKVH

SEQ ID NO: 10802 - protein, 9 aa, synthetic construct
PIQGALHVH

SEQ ID NO: 10803 - protein, 9 aa, synthetic construct
PIQGALHVK

SEQ ID NO: 10804 - protein, 9 aa, synthetic construct
PIQGALKVF

SEQ ID NO: 10805 - protein, 9 aa, synthetic construct
PLQATVHVR

SEQ ID NO: 10806 - protein, 9 aa, synthetic construct
PIQGAAHLH

SEQ ID NO: 10807 - protein, 9 aa, synthetic construct
PIQGAAHVK

SEQ ID NO: 10808 - protein, 9 aa, synthetic construct
PIQGAARLY

SEQ ID NO: 10809 - protein, 9 aa, synthetic construct
PIQGAGHLH

SEQ ID NO: 10810 - protein, 9 aa, synthetic construct
PIQGAGRLH

SEQ ID NO: 10811 - protein, 9 aa, synthetic construct
PIQGAGRVY

SEQ ID NO: 10812 - protein, 9 aa, synthetic construct
PLQATVRVH

SEQ ID NO: 10813 - protein, 9 aa, synthetic construct
PIQGTVKLR

SEQ ID NO: 10814 - protein, 9 aa, synthetic construct
PIQGTVKLF

SEQ ID NO: 10815 - protein, 9 aa, synthetic construct
PIQGTVKVY

SEQ ID NO: 10816 - protein, 9 aa, synthetic construct
PIQGTLHVR

SEQ ID NO: 10817 - protein, 9 aa, synthetic construct
PIQGTAHLH

SEQ ID NO: 10818 - protein, 9 aa, synthetic construct
PIQGTARLH

SEQ ID NO: 10819 - protein, 9 aa, synthetic construct
PIQGTIHLK

SEQ ID NO: 10820 - protein, 9 aa, synthetic construct
PIQGTIHVR

SEQ ID NO: 10821 - protein, 9 aa, synthetic construct
PIQGTIRLY

SEQ ID NO: 10822 - protein, 9 aa, synthetic construct
PIQGSVHLF

SEQ ID NO: 10823 - protein, 9 aa, synthetic construct
PIQGSVRVH

SEQ ID NO: 10824 - protein, 9 aa, synthetic construct
PIQGSVKVY

SEQ ID NO: 10825 - protein, 9 aa, synthetic construct
PIQGSLKVF

SEQ ID NO: 10826 - protein, 9 aa, synthetic construct
PIQGSAHVH

SEQ ID NO: 10827 - protein, 9 aa, synthetic construct
PIQGSAKVH

SEQ ID NO: 10828 - protein, 9 aa, synthetic construct
PIQGSIHLY

SEQ ID NO: 10829 - protein, 9 aa, synthetic construct
PIQGSIHLR

SEQ ID NO: 10830 - protein, 9 aa, synthetic construct
PIQGSIHLH

SEQ ID NO: 10831 - protein, 9 aa, synthetic construct
PIQGSIHVR

SEQ ID NO: 10832 - protein, 9 aa, synthetic construct
PIQGSIHVK

SEQ ID NO: 10833 - protein, 9 aa, synthetic construct
PIQGSIHVF

SEQ ID NO: 10834 - protein, 9 aa, synthetic construct
PIQGSGKLY

SEQ ID NO: 10835 - protein, 9 aa, synthetic construct
PIQGSGKLF

SEQ ID NO: 10836 - protein, 9 aa, synthetic construct
PIQGVVHLH

SEQ ID NO: 10837 - protein, 9 aa, synthetic construct
PIQGVVRLH

SEQ ID NO: 10838 - protein, 9 aa, synthetic construct
PIQGVVRLF

SEQ ID NO: 10839 - protein, 9 aa, synthetic construct
PIQGVVRVH

SEQ ID NO: 10840 - protein, 9 aa, synthetic construct
PIQGVVKLH

SEQ ID NO: 10841 - protein, 9 aa, synthetic construct
PIQGVLKLY

SEQ ID NO: 10842 - protein, 9 aa, synthetic construct
PIQGVLKVH

SEQ ID NO: 10843 - protein, 9 aa, synthetic construct
PIQGVAHVY

SEQ ID NO: 10844 - protein, 9 aa, synthetic construct
PIQGVARVH

SEQ ID NO: 10845 - protein, 9 aa, synthetic construct
PIQGVIHLK

SEQ ID NO: 10846 - protein, 9 aa, synthetic construct
PIQGVIHVH

SEQ ID NO: 10847 - protein, 9 aa, synthetic construct
PIQGVIHVK

SEQ ID NO: 10848 - protein, 9 aa, synthetic construct
PIQGVIHVF

SEQ ID NO: 10849 - protein, 9 aa, synthetic construct
PIQGVIKVH

SEQ ID NO: 10850 - protein, 9 aa, synthetic construct
PIQGVIKVF

SEQ ID NO: 10851 - protein, 9 aa, synthetic construct
PIQGVGHLR

SEQ ID NO: 10852 - protein, 9 aa, synthetic construct
PIQGVGHLK

SEQ ID NO: 10853 - protein, 9 aa, synthetic construct
PIQGVGRVH

SEQ ID NO: 10854 - protein, 9 aa, synthetic construct
PIQGVGKLR

SEQ ID NO: 10855 - protein, 9 aa, synthetic construct
PLQATAHLY

SEQ ID NO: 10856 - protein, 9 aa, synthetic construct
PIQGGVRVH

SEQ ID NO: 10857 - protein, 9 aa, synthetic construct
PLQATAHLK

SEQ ID NO: 10858 - protein, 9 aa, synthetic construct
PIQGGLHLH

SEQ ID NO: 10859 - protein, 9 aa, synthetic construct
PIQGGAHLY

SEQ ID NO: 10860 - protein, 9 aa, synthetic construct
PIQGGAHLH

SEQ ID NO: 10861 - protein, 9 aa, synthetic construct
PIQGGAHLK

SEQ ID NO: 10862 - protein, 9 aa, synthetic construct
PIQGGAHVH

SEQ ID NO: 10863 - protein, 9 aa, synthetic construct
PIQGGAHVK

SEQ ID NO: 10864 - protein, 9 aa, synthetic construct
PIQGGAHVF

SEQ ID NO: 10865 - protein, 9 aa, synthetic construct
PIQGGIHLK

SEQ ID NO: 10866 - protein, 9 aa, synthetic construct
PIQGGGKVY

SEQ ID NO: 10867 - protein, 9 aa, synthetic construct
PIQAAVHLR

SEQ ID NO: 10868 - protein, 9 aa, synthetic construct
PIQAAVHVR

SEQ ID NO: 10869 - protein, 9 aa, synthetic construct
PIQAAVRVH

SEQ ID NO: 10870 - protein, 9 aa, synthetic construct
PIQAAVKLY

SEQ ID NO: 10871 - protein, 9 aa, synthetic construct
PIQAALKVY

SEQ ID NO: 10872 - protein, 9 aa, synthetic construct
PIQAAAHLY

SEQ ID NO: 10873 - protein, 9 aa, synthetic construct
PIQAAAHLK

SEQ ID NO: 10874 - protein, 9 aa, synthetic construct
PIQAAAHVY

SEQ ID NO: 10875 - protein, 9 aa, synthetic construct
PIQAAAHVR

SEQ ID NO: 10876 - protein, 9 aa, synthetic construct
PIQAAIHLY

SEQ ID NO: 10877 - protein, 9 aa, synthetic construct
PIQAAIHLH

SEQ ID NO: 10878 - protein, 9 aa, synthetic construct
PIQAAIHLK

SEQ ID NO: 10879 - protein, 9 aa, synthetic construct
PIQAAIHLF

SEQ ID NO: 10880 - protein, 9 aa, synthetic construct
PIQAAIHVF

SEQ ID NO: 10881 - protein, 9 aa, synthetic construct
PIQAAIKLR

SEQ ID NO: 10882 - protein, 9 aa, synthetic construct
PIQATVHVK

SEQ ID NO: 10883 - protein, 9 aa, synthetic construct
PIQATVKVR

SEQ ID NO: 10884 - protein, 9 aa, synthetic construct
PIQATLRLF

SEQ ID NO: 10885 - protein, 9 aa, synthetic construct
PIQATLKLR

SEQ ID NO: 10886 - protein, 9 aa, synthetic construct
PIQATAHVR

SEQ ID NO: 10887 - protein, 9 aa, synthetic construct
PIQATIHLH

SEQ ID NO: 10888 - protein, 9 aa, synthetic construct
PIQATIHLF

SEQ ID NO: 10889 - protein, 9 aa, synthetic construct
PIQATIHVF

SEQ ID NO: 10890 - protein, 9 aa, synthetic construct
PIQATIRLH

SEQ ID NO: 10891 - protein, 9 aa, synthetic construct
PIQATIKLH

SEQ ID NO: 10892 - protein, 9 aa, synthetic construct
PIQATGKVF

SEQ ID NO: 10893 - protein, 9 aa, synthetic construct
PIQASVHVR

SEQ ID NO: 10894 - protein, 9 aa, synthetic construct
PIQASVKLH

SEQ ID NO: 10895 - protein, 9 aa, synthetic construct
PIQASLHLK

SEQ ID NO: 10896 - protein, 9 aa, synthetic construct
PLNGTIRLR

SEQ ID NO: 10897 - protein, 9 aa, synthetic construct
PIQASAHLY

SEQ ID NO: 10898 - protein, 9 aa, synthetic construct
PIQASAHLH

SEQ ID NO: 10899 - protein, 9 aa, synthetic construct
PIQASAHVY

SEQ ID NO: 10900 - protein, 9 aa, synthetic construct
PLQATIKLH

SEQ ID NO: 10901 - protein, 9 aa, synthetic construct
PLQATIKLK

SEQ ID NO: 10902 - protein, 9 aa, synthetic construct
PIQASIHLY

SEQ ID NO: 10903 - protein, 9 aa, synthetic construct
PIQASIHLH

SEQ ID NO: 10904 - protein, 9 aa, synthetic construct
PIQASIHLF

SEQ ID NO: 10905 - protein, 9 aa, synthetic construct
PIQASIHVH

SEQ ID NO: 10906 - protein, 9 aa, synthetic construct
PIQASIHVF

SEQ ID NO: 10907 - protein, 9 aa, synthetic construct
PIQASIKLR

SEQ ID NO: 10908 - protein, 9 aa, synthetic construct
PIQASIKLH

SEQ ID NO: 10909 - protein, 9 aa, synthetic construct
PIQASIKVF

SEQ ID NO: 10910 - protein, 9 aa, synthetic construct
PIQASGHVK

SEQ ID NO: 10911 - protein, 9 aa, synthetic construct
PIQASGKLF

SEQ ID NO: 10912 - protein, 9 aa, synthetic construct
PIQAVVHLY

SEQ ID NO: 10913 - protein, 9 aa, synthetic construct
PIQAVVHLH

SEQ ID NO: 10914 - protein, 9 aa, synthetic construct
PIQAVVHVY

SEQ ID NO: 10915 - protein, 9 aa, synthetic construct
PIQAVVHVH

SEQ ID NO: 10916 - protein, 9 aa, synthetic construct
PIQAVVHVK

SEQ ID NO: 10917 - protein, 9 aa, synthetic construct
PLQATGHLK

SEQ ID NO: 10918 - protein, 9 aa, synthetic construct
PIQAVLHVH

SEQ ID NO: 10919 - protein, 9 aa, synthetic construct
PLQATGHLF

SEQ ID NO: 10920 - protein, 9 aa, synthetic construct
PIQAVIHVR

SEQ ID NO: 10921 - protein, 9 aa, synthetic construct
PIQAVIHVH

SEQ ID NO: 10922 - protein, 9 aa, synthetic construct
PIQAVIHVF

SEQ ID NO: 10923 - protein, 9 aa, synthetic construct
PIQAVIRLY

SEQ ID NO: 10924 - protein, 9 aa, synthetic construct
PIQAVIRVH

SEQ ID NO: 10925 - protein, 9 aa, synthetic construct
PIQAVGRVY

SEQ ID NO: 10926 - protein, 9 aa, synthetic construct
PIQAVGRVH

SEQ ID NO: 10927 - protein, 9 aa, synthetic construct
PIQAVGKVF

SEQ ID NO: 10928 - protein, 9 aa, synthetic construct
PIQAGVRVH

SEQ ID NO: 10929 - protein, 9 aa, synthetic construct
PIQAGAHLK

SEQ ID NO: 10930 - protein, 9 aa, synthetic construct
PIQAGAHVH

SEQ ID NO: 10931 - protein, 9 aa, synthetic construct
PLQATGKLF

SEQ ID NO: 10932 - protein, 9 aa, synthetic construct
PIQAGIHVF

SEQ ID NO: 10933 - protein, 9 aa, synthetic construct
PIQAGIKVY

SEQ ID NO: 10934 - protein, 9 aa, synthetic construct
PIQAGGHLK

SEQ ID NO: 10935 - protein, 9 aa, synthetic construct
PIQAGGHVF

SEQ ID NO: 10936 - protein, 9 aa, synthetic construct
PIQAGGRVY

SEQ ID NO: 10937 - protein, 9 aa, synthetic construct
PIQAGGRVF

SEQ ID NO: 10938 - protein, 9 aa, synthetic construct
PIQAGGKLY

SEQ ID NO: 10939 - protein, 9 aa, synthetic construct
PIQAGGKLR

SEQ ID NO: 10940 - protein, 9 aa, synthetic construct
PIQAGGKLH

SEQ ID NO: 10941 - protein, 9 aa, synthetic construct
PIQAGGKVY

SEQ ID NO: 10942 - protein, 9 aa, synthetic construct
PIPGAVRLH

SEQ ID NO: 10943 - protein, 9 aa, synthetic construct
PIPGAVRVH

SEQ ID NO: 10944 - protein, 9 aa, synthetic construct
PLQASVHLK

SEQ ID NO: 10945 - protein, 9 aa, synthetic construct
PIPGALKVY

SEQ ID NO: 10946 - protein, 9 aa, synthetic construct
PIPGALKVH

SEQ ID NO: 10947 - protein, 9 aa, synthetic construct
PIPGALKVF

SEQ ID NO: 10948 - protein, 9 aa, synthetic construct
PIPGAAHLY

SEQ ID NO: 10949 - protein, 9 aa, synthetic construct
PIPGAAHLH

SEQ ID NO: 10950 - protein, 9 aa, synthetic construct
PIPGAAHVY

SEQ ID NO: 10951 - protein, 9 aa, synthetic construct
PIPGAAHVK

SEQ ID NO: 10952 - protein, 9 aa, synthetic construct
PIPGAAHVF

SEQ ID NO: 10953 - protein, 9 aa, synthetic construct
PIPGAARVH

SEQ ID NO: 10954 - protein, 9 aa, synthetic construct
PIPGAAKLH

SEQ ID NO: 10955 - protein, 9 aa, synthetic construct
PIPGAAKVY

SEQ ID NO: 10956 - protein, 9 aa, synthetic construct
PIPGAIHVH

SEQ ID NO: 10957 - protein, 9 aa, synthetic construct
PIPGAIRLR

SEQ ID NO: 10958 - protein, 9 aa, synthetic construct
PIPGAGHVR

SEQ ID NO: 10959 - protein, 9 aa, synthetic construct
PIPGAGHVH

SEQ ID NO: 10960 - protein, 9 aa, synthetic construct
PIPGAGKLH

SEQ ID NO: 10961 - protein, 9 aa, synthetic construct
PIPGTVHVK

SEQ ID NO: 10962 - protein, 9 aa, synthetic construct
PIPGTVRLR

SEQ ID NO: 10963 - protein, 9 aa, synthetic construct
PIPGTVRLH

SEQ ID NO: 10964 - protein, 9 aa, synthetic construct
PLQASVRVH

SEQ ID NO: 10965 - protein, 9 aa, synthetic construct
PIPGTVKLK

SEQ ID NO: 10966 - protein, 9 aa, synthetic construct
PIPGTVKVF

SEQ ID NO: 10967 - protein, 9 aa, synthetic construct
PIPGTLHVH

SEQ ID NO: 10968 - protein, 9 aa, synthetic construct
PLNGTIRVH

SEQ ID NO: 10969 - protein, 9 aa, synthetic construct
PIPGTLKLK

SEQ ID NO: 10970 - protein, 9 aa, synthetic construct
PIPGTLKVF

SEQ ID NO: 10971 - protein, 9 aa, synthetic construct
PIPGTAHLH

SEQ ID NO: 10972 - protein, 9 aa, synthetic construct
PIPGTAHLK

SEQ ID NO: 10973 - protein, 9 aa, synthetic construct
PIPGTAHVY

SEQ ID NO: 10974 - protein, 9 aa, synthetic construct
PIPGTAHVR

SEQ ID NO: 10975 - protein, 9 aa, synthetic construct
PIPGTAHVH

SEQ ID NO: 10976 - protein, 9 aa, synthetic construct
PIPGTIHLH

SEQ ID NO: 10977 - protein, 9 aa, synthetic construct
PIPGTIHLK

SEQ ID NO: 10978 - protein, 9 aa, synthetic construct
PIPGTIHLF

SEQ ID NO: 10979 - protein, 9 aa, synthetic construct
PIPGTIHVF

SEQ ID NO: 10980 - protein, 9 aa, synthetic construct
PIPGTIRLR

SEQ ID NO: 10981 - protein, 9 aa, synthetic construct
PIPGTIRVH

SEQ ID NO: 10982 - protein, 9 aa, synthetic construct
PIPGTIKLY

SEQ ID NO: 10983 - protein, 9 aa, synthetic construct
PLQASVKVH

SEQ ID NO: 10984 - protein, 9 aa, synthetic construct
PIPGTGHLY

SEQ ID NO: 10985 - protein, 9 aa, synthetic construct
PIPGTGHVY

SEQ ID NO: 10986 - protein, 9 aa, synthetic construct
PIPGTGHVR

SEQ ID NO: 10987 - protein, 9 aa, synthetic construct
PIPGTGHVK

SEQ ID NO: 10988 - protein, 9 aa, synthetic construct
PIPGTGHVF

SEQ ID NO: 10989 - protein, 9 aa, synthetic construct
PIPGTGRLF

SEQ ID NO: 10990 - protein, 9 aa, synthetic construct
PIPGTGRVH

SEQ ID NO: 10991 - protein, 9 aa, synthetic construct
PLQASVKVF

SEQ ID NO: 10992 - protein, 9 aa, synthetic construct
PIPGSVHVF

SEQ ID NO: 10993 - protein, 9 aa, synthetic construct
PIPGSVRLH

SEQ ID NO: 10994 - protein, 9 aa, synthetic construct
PIPGSVRVY

SEQ ID NO: 10995 - protein, 9 aa, synthetic construct
PIPGSVKLY

SEQ ID NO: 10996 - protein, 9 aa, synthetic construct
PIPGSVKLH

SEQ ID NO: 10997 - protein, 9 aa, synthetic construct
PIPGSVKLK

SEQ ID NO: 10998 - protein, 9 aa, synthetic construct
PIPGSVKVH

SEQ ID NO: 10999 - protein, 9 aa, synthetic construct
PIPGSVKVF

SEQ ID NO: 11000 - protein, 9 aa, synthetic construct
PIPGSLHLH

SEQ ID NO: 11001 - protein, 9 aa, synthetic construct
PIPGSLHVY

SEQ ID NO: 11002 - protein, 9 aa, synthetic construct
PIPGSLHVK

SEQ ID NO: 11003 - protein, 9 aa, synthetic construct
PIPGSLKVY

SEQ ID NO: 11004 - protein, 9 aa, synthetic construct
PIPGSLKVF

SEQ ID NO: 11005 - protein, 9 aa, synthetic construct
PIPGSAHVY

SEQ ID NO: 11006 - protein, 9 aa, synthetic construct
PIPGSAHVR

SEQ ID NO: 11007 - protein, 9 aa, synthetic construct
PIPGSAHVK

SEQ ID NO: 11008 - protein, 9 aa, synthetic construct
PIPGSARLH

SEQ ID NO: 11009 - protein, 9 aa, synthetic construct
PIPGSARLF

SEQ ID NO: 11010 - protein, 9 aa, synthetic construct
PIPGSAKLY

SEQ ID NO: 11011 - protein, 9 aa, synthetic construct
PIPGSAKLH

SEQ ID NO: 11012 - protein, 9 aa, synthetic construct
PIPGSAKVY

SEQ ID NO: 11013 - protein, 9 aa, synthetic construct
PIPGSIHVH

SEQ ID NO: 11014 - protein, 9 aa, synthetic construct
PIPGSIRLF

SEQ ID NO: 11015 - protein, 9 aa, synthetic construct
PIPGSIKLY

SEQ ID NO: 11016 - protein, 9 aa, synthetic construct
PIPGSIKVH

SEQ ID NO: 11017 - protein, 9 aa, synthetic construct
PIPGSGKLF

SEQ ID NO: 11018 - protein, 9 aa, synthetic construct
PIPGVVHLH

SEQ ID NO: 11019 - protein, 9 aa, synthetic construct
PIPGVVHVR

SEQ ID NO: 11020 - protein, 9 aa, synthetic construct
PIPGVVKLF

SEQ ID NO: 11021 - protein, 9 aa, synthetic construct
PIPGVLRVR

SEQ ID NO: 11022 - protein, 9 aa, synthetic construct
PIPGVLKLY

SEQ ID NO: 11023 - protein, 9 aa, synthetic construct
PIPGVAHVH

SEQ ID NO: 11024 - protein, 9 aa, synthetic construct
PIPGVIHLR

SEQ ID NO: 11025 - protein, 9 aa, synthetic construct
PIPGVIHVR

SEQ ID NO: 11026 - protein, 9 aa, synthetic construct
PIPGVIHVF

SEQ ID NO: 11027 - protein, 9 aa, synthetic construct
PIPGVGHLK

SEQ ID NO: 11028 - protein, 9 aa, synthetic construct
PIPGVGHVR

SEQ ID NO: 11029 - protein, 9 aa, synthetic construct
PIPGVGHVH

SEQ ID NO: 11030 - protein, 9 aa, synthetic construct
PIPGVGRVY

SEQ ID NO: 11031 - protein, 9 aa, synthetic construct
PIPGGVRVH

SEQ ID NO: 11032 - protein, 9 aa, synthetic construct
PIPGGLRLY

SEQ ID NO: 11033 - protein, 9 aa, synthetic construct
PIPGGLKVF

SEQ ID NO: 11034 - protein, 9 aa, synthetic construct
PIPGGARLY

SEQ ID NO: 11035 - protein, 9 aa, synthetic construct
PIPAAVHLH

SEQ ID NO: 11036 - protein, 9 aa, synthetic construct
PIPAAVHLK

SEQ ID NO: 11037 - protein, 9 aa, synthetic construct
PIPAAVHVK

SEQ ID NO: 11038 - protein, 9 aa, synthetic construct
PIPAAVRLF

SEQ ID NO: 11039 - protein, 9 aa, synthetic construct
PIPAAVKLH

SEQ ID NO: 11040 - protein, 9 aa, synthetic construct
PIPAAVKLF

SEQ ID NO: 11041 - protein, 9 aa, synthetic construct
PIPAALHVK

SEQ ID NO: 11042 - protein, 9 aa, synthetic construct
PIPAALKVY

SEQ ID NO: 11043 - protein, 9 aa, synthetic construct
PIPAAAHLY

SEQ ID NO: 11044 - protein, 9 aa, synthetic construct
PIPAAAHLR

SEQ ID NO: 11045 - protein, 9 aa, synthetic construct
PIPAAAHLF

SEQ ID NO: 11046 - protein, 9 aa, synthetic construct
PIPAAAHVY

SEQ ID NO: 11047 - protein, 9 aa, synthetic construct
PIPAAAHVR

SEQ ID NO: 11048 - protein, 9 aa, synthetic construct
PIPAAAHVH

SEQ ID NO: 11049 - protein, 9 aa, synthetic construct
PIPAAAHVF

SEQ ID NO: 11050 - protein, 9 aa, synthetic construct
PIPAAARLH

SEQ ID NO: 11051 - protein, 9 aa, synthetic construct
PIPAAAKLY

SEQ ID NO: 11052 - protein, 9 aa, synthetic construct
PIPAAAKLR

SEQ ID NO: 11053 - protein, 9 aa, synthetic construct
PIPAAAKLH

SEQ ID NO: 11054 - protein, 9 aa, synthetic construct
PIPAAAKVH

SEQ ID NO: 11055 - protein, 9 aa, synthetic construct
PIPAAAKVK

SEQ ID NO: 11056 - protein, 9 aa, synthetic construct
PIPAAIHLH

SEQ ID NO: 11057 - protein, 9 aa, synthetic construct
PIPAAIHLK

SEQ ID NO: 11058 - protein, 9 aa, synthetic construct
PIPAAIHLF

SEQ ID NO: 11059 - protein, 9 aa, synthetic construct
PIPAAGHLK

SEQ ID NO: 11060 - protein, 9 aa, synthetic construct
PIPAAGHLF

SEQ ID NO: 11061 - protein, 9 aa, synthetic construct
PIPAAGHVK

SEQ ID NO: 11062 - protein, 9 aa, synthetic construct
PIPAAGHVF

SEQ ID NO: 11063 - protein, 9 aa, synthetic construct
PIPAAGRLF

SEQ ID NO: 11064 - protein, 9 aa, synthetic construct
PIPAAGRVK

SEQ ID NO: 11065 - protein, 9 aa, synthetic construct
PIPAAGKVY

SEQ ID NO: 11066 - protein, 9 aa, synthetic construct
PIPATVHLH

SEQ ID NO: 11067 - protein, 9 aa, synthetic construct
PIPATVRVH

SEQ ID NO: 11068 - protein, 9 aa, synthetic construct
PIPATVKLK

SEQ ID NO: 11069 - protein, 9 aa, synthetic construct
PIPATVKVH

SEQ ID NO: 11070 - protein, 9 aa, synthetic construct
PIPATLRVK

SEQ ID NO: 11071 - protein, 9 aa, synthetic construct
PLQASIHVY

SEQ ID NO: 11072 - protein, 9 aa, synthetic construct
PIPATAHLY

SEQ ID NO: 11073 - protein, 9 aa, synthetic construct
PIPATAHVH

SEQ ID NO: 11074 - protein, 9 aa, synthetic construct
PIPATARVH

SEQ ID NO: 11075 - protein, 9 aa, synthetic construct
PIPATARVF

SEQ ID NO: 11076 - protein, 9 aa, synthetic construct
PIPATAKLY

SEQ ID NO: 11077 - protein, 9 aa, synthetic construct
PIPATAKVY

SEQ ID NO: 11078 - protein, 9 aa, synthetic construct
PLQASIHVF

SEQ ID NO: 11079 - protein, 9 aa, synthetic construct
PIPATIHLH

SEQ ID NO: 11080 - protein, 9 aa, synthetic construct
PLNGTIKVY

SEQ ID NO: 11081 - protein, 9 aa, synthetic construct
PIPATGHLR

SEQ ID NO: 11082 - protein, 9 aa, synthetic construct
PIPATGHVY

SEQ ID NO: 11083 - protein, 9 aa, synthetic construct
PIPATGHVK

SEQ ID NO: 11084 - protein, 9 aa, synthetic construct
PIPATGKLY

SEQ ID NO: 11085 - protein, 9 aa, synthetic construct
PIPATGKVR

SEQ ID NO: 11086 - protein, 9 aa, synthetic construct
PIPASVHVK

SEQ ID NO: 11087 - protein, 9 aa, synthetic construct
PIPASVKVY

SEQ ID NO: 11088 - protein, 9 aa, synthetic construct
PIPASVKVF

SEQ ID NO: 11089 - protein, 9 aa, synthetic construct
PIPASLHVK

SEQ ID NO: 11090 - protein, 9 aa, synthetic construct
PIPASARLY

SEQ ID NO: 11091 - protein, 9 aa, synthetic construct
PIPASARVH

SEQ ID NO: 11092 - protein, 9 aa, synthetic construct
PIPASAKVY

SEQ ID NO: 11093 - protein, 9 aa, synthetic construct
PIPASIHVH

SEQ ID NO: 11094 - protein, 9 aa, synthetic construct
PIPASIHVF

SEQ ID NO: 11095 - protein, 9 aa, synthetic construct
PIPASGHLK

SEQ ID NO: 11096 - protein, 9 aa, synthetic construct
PIPASGHVH

SEQ ID NO: 11097 - protein, 9 aa, synthetic construct
PIPASGHVK

SEQ ID NO: 11098 - protein, 9 aa, synthetic construct
PIPAVVHLY

SEQ ID NO: 11099 - protein, 9 aa, synthetic construct
PIPAVVHVH

SEQ ID NO: 11100 - protein, 9 aa, synthetic construct
PIPAVVRVF

SEQ ID NO: 11101 - protein, 9 aa, synthetic construct
PIPAVVKVY

SEQ ID NO: 11102 - protein, 9 aa, synthetic construct
PIPAVARLF

SEQ ID NO: 11103 - protein, 9 aa, synthetic construct
PLQASGRLY

SEQ ID NO: 11104 - protein, 9 aa, synthetic construct
PIPAVIRVR

SEQ ID NO: 11105 - protein, 9 aa, synthetic construct
PIPAVGHLK

SEQ ID NO: 11106 - protein, 9 aa, synthetic construct
PIPAVGHLF

SEQ ID NO: 11107 - protein, 9 aa, synthetic construct
PIPAVGKVH

SEQ ID NO: 11108 - protein, 9 aa, synthetic construct
PLQASGRVR

SEQ ID NO: 11109 - protein, 9 aa, synthetic construct
PIPAGVRVH

SEQ ID NO: 11110 - protein, 9 aa, synthetic construct
PLQASGRVH

SEQ ID NO: 11111 - protein, 9 aa, synthetic construct
PIPAGVKLY

SEQ ID NO: 11112 - protein, 9 aa, synthetic construct
PIPAGVKLH

SEQ ID NO: 11113 - protein, 9 aa, synthetic construct
PIPAGVKLF

SEQ ID NO: 11114 - protein, 9 aa, synthetic construct
PIPAGVKVF

SEQ ID NO: 11115 - protein, 9 aa, synthetic construct
PIPAGLHVK

SEQ ID NO: 11116 - protein, 9 aa, synthetic construct
PIPAGAHVH

SEQ ID NO: 11117 - protein, 9 aa, synthetic construct
PIPAGAHVK

SEQ ID NO: 11118 - protein, 9 aa, synthetic construct
PIPAGAKLH

SEQ ID NO: 11119 - protein, 9 aa, synthetic construct
PIPAGAKLF

SEQ ID NO: 11120 - protein, 9 aa, synthetic construct
PIPAGAKVF

SEQ ID NO: 11121 - protein, 9 aa, synthetic construct
PIPAGGHLH

SEQ ID NO: 11122 - protein, 9 aa, synthetic construct
PIPAGGHLK

SEQ ID NO: 11123 - protein, 9 aa, synthetic construct
PIPAGGHLF

SEQ ID NO: 11124 - protein, 9 aa, synthetic construct
PIPAGGRVF

SEQ ID NO: 11125 - protein, 9 aa, synthetic construct
PIPAGGKLF

SEQ ID NO: 11126 - protein, 9 aa, synthetic construct
PIPAGGKVF

SEQ ID NO: 11127 - protein, 9 aa, synthetic construct
GLNGALHLR

SEQ ID NO: 11128 - protein, 9 aa, synthetic construct
PLQAVVHVH

SEQ ID NO: 11129 - protein, 9 aa, synthetic construct
GLNGAAKLY

SEQ ID NO: 11130 - protein, 9 aa, synthetic construct
GLNGAIHLK

SEQ ID NO: 11131 - protein, 9 aa, synthetic construct
GLNGAIKLY

SEQ ID NO: 11132 - protein, 9 aa, synthetic construct
GLNGAGKLH

SEQ ID NO: 11133 - protein, 9 aa, synthetic construct
GLNGTLKLF

SEQ ID NO: 11134 - protein, 9 aa, synthetic construct
GLNGTAHLH

SEQ ID NO: 11135 - protein, 9 aa, synthetic construct
GLNGTAHVK

SEQ ID NO: 11136 - protein, 9 aa, synthetic construct
GLNGTIHLK

SEQ ID NO: 11137 - protein, 9 aa, synthetic construct
GLNGTIHVR

SEQ ID NO: 11138 - protein, 9 aa, synthetic construct
GLNGSLHVH

SEQ ID NO: 11139 - protein, 9 aa, synthetic construct
GLNGSLHVK

SEQ ID NO: 11140 - protein, 9 aa, synthetic construct
GLNGSLKVF

SEQ ID NO: 11141 - protein, 9 aa, synthetic construct
GLNGSIHVH

SEQ ID NO: 11142 - protein, 9 aa, synthetic construct
GLNGSIHVK

SEQ ID NO: 11143 - protein, 9 aa, synthetic construct
GLNGSIKVF

SEQ ID NO: 11144 - protein, 9 aa, synthetic construct
GLNGSGKLK

SEQ ID NO: 11145 - protein, 9 aa, synthetic construct
GLNGVVHLF

SEQ ID NO: 11146 - protein, 9 aa, synthetic construct
GLNGVLHLK

SEQ ID NO: 11147 - protein, 9 aa, synthetic construct
GLNGVIHVR

SEQ ID NO: 11148 - protein, 9 aa, synthetic construct
GLNGVIRLY

SEQ ID NO: 11149 - protein, 9 aa, synthetic construct
GLNGGVRVH

SEQ ID NO: 11150 - protein, 9 aa, synthetic construct
GLNGGLKVK

SEQ ID NO: 11151 - protein, 9 aa, synthetic construct
GLNGGAHVK

SEQ ID NO: 11152 - protein, 9 aa, synthetic construct
GLNGGARLY

SEQ ID NO: 11153 - protein, 9 aa, synthetic construct
GLNGGIRLY

SEQ ID NO: 11154 - protein, 9 aa, synthetic construct
GLNGGGHLH

SEQ ID NO: 11155 - protein, 9 aa, synthetic construct
GLNGGGKVH

SEQ ID NO: 11156 - protein, 9 aa, synthetic construct
GLNAAVHVK

SEQ ID NO: 11157 - protein, 9 aa, synthetic construct
GLNAALRLH

SEQ ID NO: 11158 - protein, 9 aa, synthetic construct
PLNGTGHVK

SEQ ID NO: 11159 - protein, 9 aa, synthetic construct
PLQAVAKLY

SEQ ID NO: 11160 - protein, 9 aa, synthetic construct
GLNAALKLH

SEQ ID NO: 11161 - protein, 9 aa, synthetic construct
GLNAAAHLY

SEQ ID NO: 11162 - protein, 9 aa, synthetic construct
GLNAAIHVY

SEQ ID NO: 11163 - protein, 9 aa, synthetic construct
GLNAAGHLH

SEQ ID NO: 11164 - protein, 9 aa, synthetic construct
GLNATVHLK

SEQ ID NO: 11165 - protein, 9 aa, synthetic construct
GLNATVRVF

SEQ ID NO: 11166 - protein, 9 aa, synthetic construct
PLQAVIHVF

SEQ ID NO: 11167 - protein, 9 aa, synthetic construct
GLNATIHLH

SEQ ID NO: 11168 - protein, 9 aa, synthetic construct
GLNATIHVH

SEQ ID NO: 11169 - protein, 9 aa, synthetic construct
GLNATGRLY

SEQ ID NO: 11170 - protein, 9 aa, synthetic construct
GLNATGRVR

SEQ ID NO: 11171 - protein, 9 aa, synthetic construct
GLNASVHLR

SEQ ID NO: 11172 - protein, 9 aa, synthetic construct
PLQAVIRVF

SEQ ID NO: 11173 - protein, 9 aa, synthetic construct
GLNASLKVF

SEQ ID NO: 11174 - protein, 9 aa, synthetic construct
GLNASIHVF

SEQ ID NO: 11175 - protein, 9 aa, synthetic construct
PLQAVIKVH

SEQ ID NO: 11176 - protein, 9 aa, synthetic construct
GLNAVVHVH

SEQ ID NO: 11177 - protein, 9 aa, synthetic construct
PLQAVGHVK

SEQ ID NO: 11178 - protein, 9 aa, synthetic construct
GLNAVIHVK

SEQ ID NO: 11179 - protein, 9 aa, synthetic construct
PLQAVGRLY

SEQ ID NO: 11180 - protein, 9 aa, synthetic construct
GLNAVIKVF

SEQ ID NO: 11181 - protein, 9 aa, synthetic construct
GLNAVGHLK

SEQ ID NO: 11182 - protein, 9 aa, synthetic construct
GLNAGVRVH

SEQ ID NO: 11183 - protein, 9 aa, synthetic construct
GLNAGVKLY

SEQ ID NO: 11184 - protein, 9 aa, synthetic construct
PLQAVGKLY

SEQ ID NO: 11185 - protein, 9 aa, synthetic construct
PLQAVGKVF

SEQ ID NO: 11186 - protein, 9 aa, synthetic construct
GLQGALHLH

SEQ ID NO: 11187 - protein, 9 aa, synthetic construct
GLQGALKVY

SEQ ID NO: 11188 - protein, 9 aa, synthetic construct
GLQGAAHLH

SEQ ID NO: 11189 - protein, 9 aa, synthetic construct
GLQGAARVF

SEQ ID NO: 11190 - protein, 9 aa, synthetic construct
PLQAGVHVK

SEQ ID NO: 11191 - protein, 9 aa, synthetic construct
GLQGAAKVY

SEQ ID NO: 11192 - protein, 9 aa, synthetic construct
GLQGAIRLH

SEQ ID NO: 11193 - protein, 9 aa, synthetic construct
GLQGTVHLY

SEQ ID NO: 11194 - protein, 9 aa, synthetic construct
GLQGTVRLH

SEQ ID NO: 11195 - protein, 9 aa, synthetic construct
PLQAGVRVH

SEQ ID NO: 11196 - protein, 9 aa, synthetic construct
GLQGTLHLY

SEQ ID NO: 11197 - protein, 9 aa, synthetic construct
GLQGTLHLH

SEQ ID NO: 11198 - protein, 9 aa, synthetic construct
GLQGTLHLK

SEQ ID NO: 11199 - protein, 9 aa, synthetic construct
GLQGTLHVH

SEQ ID NO: 11200 - protein, 9 aa, synthetic construct
GLQGTAHLH

SEQ ID NO: 11201 - protein, 9 aa, synthetic construct
GLQGTAHLK

SEQ ID NO: 11202 - protein, 9 aa, synthetic construct
GLQGTAHVF

SEQ ID NO: 11203 - protein, 9 aa, synthetic construct
GLQGTIHLH

SEQ ID NO: 11204 - protein, 9 aa, synthetic construct
GLQGTIRLY

SEQ ID NO: 11205 - protein, 9 aa, synthetic construct
GLQGTIRLH

SEQ ID NO: 11206 - protein, 9 aa, synthetic construct
GLQGTIRVH

SEQ ID NO: 11207 - protein, 9 aa, synthetic construct
GLQGTIKLH

SEQ ID NO: 11208 - protein, 9 aa, synthetic construct
GLQGTGRLF

SEQ ID NO: 11209 - protein, 9 aa, synthetic construct
PLQAGVKVF

SEQ ID NO: 11210 - protein, 9 aa, synthetic construct
GLQGTGKVH

SEQ ID NO: 11211 - protein, 9 aa, synthetic construct
GLQGSVKLH

SEQ ID NO: 11212 - protein, 9 aa, synthetic construct
GLQGSLHLH

SEQ ID NO: 11213 - protein, 9 aa, synthetic construct
GLQGSLRVH

SEQ ID NO: 11214 - protein, 9 aa, synthetic construct
GLQGSAHLY

SEQ ID NO: 11215 - protein, 9 aa, synthetic construct
GLQGSAHLH

SEQ ID NO: 11216 - protein, 9 aa, synthetic construct
GLQGSIHLY

SEQ ID NO: 11217 - protein, 9 aa, synthetic construct
GLQGSGHVF

SEQ ID NO: 11218 - protein, 9 aa, synthetic construct
GLQGVLKLY

SEQ ID NO: 11219 - protein, 9 aa, synthetic construct
GLQGVLKVK

SEQ ID NO: 11220 - protein, 9 aa, synthetic construct
GLQGVAHVR

SEQ ID NO: 11221 - protein, 9 aa, synthetic construct
GLQGVIHVH

SEQ ID NO: 11222 - protein, 9 aa, synthetic construct
GLQGVIHVF

SEQ ID NO: 11223 - protein, 9 aa, synthetic construct
GLQGVIKVH

SEQ ID NO: 11224 - protein, 9 aa, synthetic construct
GLQGVGHLH

SEQ ID NO: 11225 - protein, 9 aa, synthetic construct
GLQGVGHLK

SEQ ID NO: 11226 - protein, 9 aa, synthetic construct
GLQGVGKLH

SEQ ID NO: 11227 - protein, 9 aa, synthetic construct
GLQGGVKLY

SEQ ID NO: 11228 - protein, 9 aa, synthetic construct
GLQGGLHLR

SEQ ID NO: 11229 - protein, 9 aa, synthetic construct
GLQGGLHVH

SEQ ID NO: 11230 - protein, 9 aa, synthetic construct
GLQGGLHVF

SEQ ID NO: 11231 - protein, 9 aa, synthetic construct
GLQGGIHVY

SEQ ID NO: 11232 - protein, 9 aa, synthetic construct
PLQAGARLY

SEQ ID NO: 11233 - protein, 9 aa, synthetic construct
GLQAALHVH

SEQ ID NO: 11234 - protein, 9 aa, synthetic construct
GLQAAGRLH

SEQ ID NO: 11235 - protein, 9 aa, synthetic construct
GLQAAGKLF

SEQ ID NO: 11236 - protein, 9 aa, synthetic construct
PLQAGIHVY

SEQ ID NO: 11237 - protein, 9 aa, synthetic construct
PLQAGIHVK

SEQ ID NO: 11238 - protein, 9 aa, synthetic construct
GLQASAKVY

SEQ ID NO: 11239 - protein, 9 aa, synthetic construct
GLQAVVKLF

SEQ ID NO: 11240 - protein, 9 aa, synthetic construct
GLQAVLKVH

SEQ ID NO: 11241 - protein, 9 aa, synthetic construct
PLQAGGHVK

SEQ ID NO: 11242 - protein, 9 aa, synthetic construct
GLQAVIKVH

SEQ ID NO: 11243 - protein, 9 aa, synthetic construct
PLQAGGRLH

SEQ ID NO: 11244 - protein, 9 aa, synthetic construct
GLQAVGRVH

SEQ ID NO: 11245 - protein, 9 aa, synthetic construct
GLQAGVHLK

SEQ ID NO: 11246 - protein, 9 aa, synthetic construct
GLQAGVRVH

SEQ ID NO: 11247 - protein, 9 aa, synthetic construct
GLQAGLKLF

SEQ ID NO: 11248 - protein, 9 aa, synthetic construct
GLQAGAHVK

SEQ ID NO: 11249 - protein, 9 aa, synthetic construct
GLQAGAKVY

SEQ ID NO: 11250 - protein, 9 aa, synthetic construct
GLQAGIHLR

SEQ ID NO: 11251 - protein, 9 aa, synthetic construct
GLQAGIHLK

SEQ ID NO: 11252 - protein, 9 aa, synthetic construct
PLQAGGKVH

SEQ ID NO: 11253 - protein, 9 aa, synthetic construct
GLQAGGRLF

SEQ ID NO: 11254 - protein, 9 aa, synthetic construct
GLPGAVRLY

SEQ ID NO: 11255 - protein, 9 aa, synthetic construct
GLPGAVKLH

SEQ ID NO: 11256 - protein, 9 aa, synthetic construct
GLPGAVKVY

SEQ ID NO: 11257 - protein, 9 aa, synthetic construct
GLPGAVKVH

SEQ ID NO: 11258 - protein, 9 aa, synthetic construct
GLPGALKVF

SEQ ID NO: 11259 - protein, 9 aa, synthetic construct
GLPGAAHLR

SEQ ID NO: 11260 - protein, 9 aa, synthetic construct
GLPGAAHLH

SEQ ID NO: 11261 - protein, 9 aa, synthetic construct
PLPGAVHVH

SEQ ID NO: 11262 - protein, 9 aa, synthetic construct
GLPGAGHLH

SEQ ID NO: 11263 - protein, 9 aa, synthetic construct
GLPGTVKLH

SEQ ID NO: 11264 - protein, 9 aa, synthetic construct
GLPGTLHVR

SEQ ID NO: 11265 - protein, 9 aa, synthetic construct
GLPGTLRLH

SEQ ID NO: 11266 - protein, 9 aa, synthetic construct
GLPGTIHLH

SEQ ID NO: 11267 - protein, 9 aa, synthetic construct
GLPGTIHVF

SEQ ID NO: 11268 - protein, 9 aa, synthetic construct
GLPGTIRLR

SEQ ID NO: 11269 - protein, 9 aa, synthetic construct
PLPGALHLH

SEQ ID NO: 11270 - protein, 9 aa, synthetic construct
PLPGALHLK

SEQ ID NO: 11271 - protein, 9 aa, synthetic construct
GLPGSIHVF

SEQ ID NO: 11272 - protein, 9 aa, synthetic construct
GLPGSIRVR

SEQ ID NO: 11273 - protein, 9 aa, synthetic construct
GLPGVLHLK

SEQ ID NO: 11274 - protein, 9 aa, synthetic construct
GLPGVAHLH

SEQ ID NO: 11275 - protein, 9 aa, synthetic construct
GLPGVARLF

SEQ ID NO: 11276 - protein, 9 aa, synthetic construct
GLPGVIKLY

SEQ ID NO: 11277 - protein, 9 aa, synthetic construct
GLPGGVHLK

SEQ ID NO: 11278 - protein, 9 aa, synthetic construct
GLPGGVKVH

SEQ ID NO: 11279 - protein, 9 aa, synthetic construct
GLPGGIHVF

SEQ ID NO: 11280 - protein, 9 aa, synthetic construct
GLPGGGKLF

SEQ ID NO: 11281 - protein, 9 aa, synthetic construct
GLPAAVRVF

SEQ ID NO: 11282 - protein, 9 aa, synthetic construct
GLPAAARLF

SEQ ID NO: 11283 - protein, 9 aa, synthetic construct
GLPAAAKVF

SEQ ID NO: 11284 - protein, 9 aa, synthetic construct
GLPAAIRVF

SEQ ID NO: 11285 - protein, 9 aa, synthetic construct
GLPAAIKVK

SEQ ID NO: 11286 - protein, 9 aa, synthetic construct
GLPAAGHVF

SEQ ID NO: 11287 - protein, 9 aa, synthetic construct
GLPAAGRVF

SEQ ID NO: 11288 - protein, 9 aa, synthetic construct
GLPATVHLH

SEQ ID NO: 11289 - protein, 9 aa, synthetic construct
GLPATVKVF

SEQ ID NO: 11290 - protein, 9 aa, synthetic construct
GLPATAHVK

SEQ ID NO: 11291 - protein, 9 aa, synthetic construct
PLPGAIHVK

SEQ ID NO: 11292 - protein, 9 aa, synthetic construct
GLPATGHVH

SEQ ID NO: 11293 - protein, 9 aa, synthetic construct
GLPASVKLY

SEQ ID NO: 11294 - protein, 9 aa, synthetic construct
GLPASIHLK

SEQ ID NO: 11295 - protein, 9 aa, synthetic construct
GLPASGRVF

SEQ ID NO: 11296 - protein, 9 aa, synthetic construct
GLPASGKLY

SEQ ID NO: 11297 - protein, 9 aa, synthetic construct
GLPAVVHVH

SEQ ID NO: 11298 - protein, 9 aa, synthetic construct
GLPAVAHLH

SEQ ID NO: 11299 - protein, 9 aa, synthetic construct
GLPAVAHLF

SEQ ID NO: 11300 - protein, 9 aa, synthetic construct
PLPGAGRLH

SEQ ID NO: 11301 - protein, 9 aa, synthetic construct
GLPAVGHLY

SEQ ID NO: 11302 - protein, 9 aa, synthetic construct
GLPAVGHLH

SEQ ID NO: 11303 - protein, 9 aa, synthetic construct
GLPAVGHLK

SEQ ID NO: 11304 - protein, 9 aa, synthetic construct
GLPAVGHLF

SEQ ID NO: 11305 - protein, 9 aa, synthetic construct
GLPAVGHVR

SEQ ID NO: 11306 - protein, 9 aa, synthetic construct
GLPAVGHVF

SEQ ID NO: 11307 - protein, 9 aa, synthetic construct
GLPAGIHVK

SEQ ID NO: 11308 - protein, 9 aa, synthetic construct
PLPGTVHLH

SEQ ID NO: 11309 - protein, 9 aa, synthetic construct
GTNGALRVH

SEQ ID NO: 11310 - protein, 9 aa, synthetic construct
GTNGALKLF

SEQ ID NO: 11311 - protein, 9 aa, synthetic construct
GTNGAAHVF

SEQ ID NO: 11312 - protein, 9 aa, synthetic construct
PLPGTVHVH

SEQ ID NO: 11313 - protein, 9 aa, synthetic construct
GTNGAARLY

SEQ ID NO: 11314 - protein, 9 aa, synthetic construct
PLPGTVHVK

SEQ ID NO: 11315 - protein, 9 aa, synthetic construct
GTNGAIHLH

SEQ ID NO: 11316 - protein, 9 aa, synthetic construct
GTNGAIHVK

SEQ ID NO: 11317 - protein, 9 aa, synthetic construct
GTNGAIKVF

SEQ ID NO: 11318 - protein, 9 aa, synthetic construct
GTNGAGRLH

SEQ ID NO: 11319 - protein, 9 aa, synthetic construct
PLPGTVRVH

SEQ ID NO: 11320 - protein, 9 aa, synthetic construct
GTNGTVKLH

SEQ ID NO: 11321 - protein, 9 aa, synthetic construct
GTNGTLHVR

SEQ ID NO: 11322 - protein, 9 aa, synthetic construct
PLPGTVKLY

SEQ ID NO: 11323 - protein, 9 aa, synthetic construct
GTNGTAHLF

SEQ ID NO: 11324 - protein, 9 aa, synthetic construct
GTNGTAHVH

SEQ ID NO: 11325 - protein, 9 aa, synthetic construct
PLPGTVKLH

SEQ ID NO: 11326 - protein, 9 aa, synthetic construct
GTNGTAKLY

SEQ ID NO: 11327 - protein, 9 aa, synthetic construct
GTNGTIHLK

SEQ ID NO: 11328 - protein, 9 aa, synthetic construct
GTNGTGRVH

SEQ ID NO: 11329 - protein, 9 aa, synthetic construct
GTNGTGKLY

SEQ ID NO: 11330 - protein, 9 aa, synthetic construct
GTNGSVHLF

SEQ ID NO: 11331 - protein, 9 aa, synthetic construct
GTNGSVHVY

SEQ ID NO: 11332 - protein, 9 aa, synthetic construct
GTNGSVRLY

SEQ ID NO: 11333 - protein, 9 aa, synthetic construct
GTNGSLHVF

SEQ ID NO: 11334 - protein, 9 aa, synthetic construct
GTNGSAHLH

SEQ ID NO: 11335 - protein, 9 aa, synthetic construct
PLPGTLHVH

SEQ ID NO: 11336 - protein, 9 aa, synthetic construct
GTNGSAKLH

SEQ ID NO: 11337 - protein, 9 aa, synthetic construct
GTNGSAKVF

SEQ ID NO: 11338 - protein, 9 aa, synthetic construct
GTNGSIRLH

SEQ ID NO: 11339 - protein, 9 aa, synthetic construct
GTNGSIRVF

SEQ ID NO: 11340 - protein, 9 aa, synthetic construct
GTNGSIKLY

SEQ ID NO: 11341 - protein, 9 aa, synthetic construct
GTNGSIKVF

SEQ ID NO: 11342 - protein, 9 aa, synthetic construct
GTNGVVHVR

SEQ ID NO: 11343 - protein, 9 aa, synthetic construct
GTNGVVRVH

SEQ ID NO: 11344 - protein, 9 aa, synthetic construct
GTNGVVKLF

SEQ ID NO: 11345 - protein, 9 aa, synthetic construct
GTNGVLKLH

SEQ ID NO: 11346 - protein, 9 aa, synthetic construct
GTNGVLKLF

SEQ ID NO: 11347 - protein, 9 aa, synthetic construct
GTNGVAKVH

SEQ ID NO: 11348 - protein, 9 aa, synthetic construct
GTNGVIHLY

SEQ ID NO: 11349 - protein, 9 aa, synthetic construct
GTNGVIHLH

SEQ ID NO: 11350 - protein, 9 aa, synthetic construct
GTNGVIHVH

SEQ ID NO: 11351 - protein, 9 aa, synthetic construct
GTNGVIHVF

SEQ ID NO: 11352 - protein, 9 aa, synthetic construct
GTNGVGHVR

SEQ ID NO: 11353 - protein, 9 aa, synthetic construct
GTNGVGRVF

SEQ ID NO: 11354 - protein, 9 aa, synthetic construct
GTNGGVRVK

SEQ ID NO: 11355 - protein, 9 aa, synthetic construct
GTNGGVKLF

SEQ ID NO: 11356 - protein, 9 aa, synthetic construct
PLPGTAHVY

SEQ ID NO: 11357 - protein, 9 aa, synthetic construct
GTNGGLKVH

SEQ ID NO: 11358 - protein, 9 aa, synthetic construct
GTNGGAKLY

SEQ ID NO: 11359 - protein, 9 aa, synthetic construct
GTNGGIKLF

SEQ ID NO: 11360 - protein, 9 aa, synthetic construct
GTNGGGHLH

SEQ ID NO: 11361 - protein, 9 aa, synthetic construct
GTNAAVHVK

SEQ ID NO: 11362 - protein, 9 aa, synthetic construct
GTNAAVRLH

SEQ ID NO: 11363 - protein, 9 aa, synthetic construct
GTNAAVKLF

SEQ ID NO: 11364 - protein, 9 aa, synthetic construct
GTNAALHVY

SEQ ID NO: 11365 - protein, 9 aa, synthetic construct
GTNAAAHVK

SEQ ID NO: 11366 - protein, 9 aa, synthetic construct
GTNAAAKLF

SEQ ID NO: 11367 - protein, 9 aa, synthetic construct
GTNAAIHLH

SEQ ID NO: 11368 - protein, 9 aa, synthetic construct
GTNAAIHVH

SEQ ID NO: 11369 - protein, 9 aa, synthetic construct
GTNAAIKVF

SEQ ID NO: 11370 - protein, 9 aa, synthetic construct
GTNAAGHLH

SEQ ID NO: 11371 - protein, 9 aa, synthetic construct
GTNAAGHVH

SEQ ID NO: 11372 - protein, 9 aa, synthetic construct
GTNAAGRLH

SEQ ID NO: 11373 - protein, 9 aa, synthetic construct
GTNAAGKVY

SEQ ID NO: 11374 - protein, 9 aa, synthetic construct
GTNATVHLK

SEQ ID NO: 11375 - protein, 9 aa, synthetic construct
GTNATVHLF

SEQ ID NO: 11376 - protein, 9 aa, synthetic construct
GTNATVHVY

SEQ ID NO: 11377 - protein, 9 aa, synthetic construct
GTNATVHVR

SEQ ID NO: 11378 - protein, 9 aa, synthetic construct
GTNATVHVK

SEQ ID NO: 11379 - protein, 9 aa, synthetic construct
GTNATVHVF

SEQ ID NO: 11380 - protein, 9 aa, synthetic construct
GTNATVKVF

SEQ ID NO: 11381 - protein, 9 aa, synthetic construct
PLPGTIHVH

SEQ ID NO: 11382 - protein, 9 aa, synthetic construct
PLPGTIHVK

SEQ ID NO: 11383 - protein, 9 aa, synthetic construct
GTNATIHLK

SEQ ID NO: 11384 - protein, 9 aa, synthetic construct
GTNATIHVK

SEQ ID NO: 11385 - protein, 9 aa, synthetic construct
PLPGTIRLR

SEQ ID NO: 11386 - protein, 9 aa, synthetic construct
GTNATIKLH

SEQ ID NO: 11387 - protein, 9 aa, synthetic construct
GTNATGHLH

SEQ ID NO: 11388 - protein, 9 aa, synthetic construct
GTNATGHVK

SEQ ID NO: 11389 - protein, 9 aa, synthetic construct
GTNATGKVH

SEQ ID NO: 11390 - protein, 9 aa, synthetic construct
GTNASVRLK

SEQ ID NO: 11391 - protein, 9 aa, synthetic construct
PLPGTIRVH

SEQ ID NO: 11392 - protein, 9 aa, synthetic construct
GTNASVKVY

SEQ ID NO: 11393 - protein, 9 aa, synthetic construct
GTNASLKLY

SEQ ID NO: 11394 - protein, 9 aa, synthetic construct
GTNASIKLK

SEQ ID NO: 11395 - protein, 9 aa, synthetic construct
PLNGSVKVH

SEQ ID NO: 11396 - protein, 9 aa, synthetic construct
GTNAVVHLK

SEQ ID NO: 11397 - protein, 9 aa, synthetic construct
GTNAVVHVH

SEQ ID NO: 11398 - protein, 9 aa, synthetic construct
GTNAVVRLH

SEQ ID NO: 11399 - protein, 9 aa, synthetic construct
GTNAVAHVK

SEQ ID NO: 11400 - protein, 9 aa, synthetic construct
PLPGTGHVK

SEQ ID NO: 11401 - protein, 9 aa, synthetic construct
GTNAVIHLH

SEQ ID NO: 11402 - protein, 9 aa, synthetic construct
GTNAVIHVH

SEQ ID NO: 11403 - protein, 9 aa, synthetic construct
GTNAVIKLH

SEQ ID NO: 11404 - protein, 9 aa, synthetic construct
GTNAVGHLY

SEQ ID NO: 11405 - protein, 9 aa, synthetic construct
GTNAVGKLY

SEQ ID NO: 11406 - protein, 9 aa, synthetic construct
GTNAGVRVH

SEQ ID NO: 11407 - protein, 9 aa, synthetic construct
PLPGTGRVK

SEQ ID NO: 11408 - protein, 9 aa, synthetic construct
PLPGTGKLY

SEQ ID NO: 11409 - protein, 9 aa, synthetic construct
GTNAGAHLY

SEQ ID NO: 11410 - protein, 9 aa, synthetic construct
GTNAGAHVH

SEQ ID NO: 11411 - protein, 9 aa, synthetic construct
GTNAGAKLH

SEQ ID NO: 11412 - protein, 9 aa, synthetic construct
GTNAGIKVH

SEQ ID NO: 11413 - protein, 9 aa, synthetic construct
GTNAGGHLY

SEQ ID NO: 11414 - protein, 9 aa, synthetic construct
GTNAGGKVH

SEQ ID NO: 11415 - protein, 9 aa, synthetic construct
PLPGSVHLH

SEQ ID NO: 11416 - protein, 9 aa, synthetic construct
GTQGALHVH

SEQ ID NO: 11417 - protein, 9 aa, synthetic construct
GTQGAAHLH

SEQ ID NO: 11418 - protein, 9 aa, synthetic construct
GTQGAAHVK

SEQ ID NO: 11419 - protein, 9 aa, synthetic construct
GTQGAIHLK

SEQ ID NO: 11420 - protein, 9 aa, synthetic construct
GTQGAIKLH

SEQ ID NO: 11421 - protein, 9 aa, synthetic construct
GTQGTVRVY

SEQ ID NO: 11422 - protein, 9 aa, synthetic construct
GTQGTVKVR

SEQ ID NO: 11423 - protein, 9 aa, synthetic construct
GTQGTLHLH

SEQ ID NO: 11424 - protein, 9 aa, synthetic construct
GTQGTLHVR

SEQ ID NO: 11425 - protein, 9 aa, synthetic construct
GTQGTLRLY

SEQ ID NO: 11426 - protein, 9 aa, synthetic construct
GTQGTLRVF

SEQ ID NO: 11427 - protein, 9 aa, synthetic construct
GTQGTIHLY

SEQ ID NO: 11428 - protein, 9 aa, synthetic construct
GTQGTIHLR

SEQ ID NO: 11429 - protein, 9 aa, synthetic construct
GTQGTIHLH

SEQ ID NO: 11430 - protein, 9 aa, synthetic construct
GTQGTIHLK

SEQ ID NO: 11431 - protein, 9 aa, synthetic construct
GTQGTIHLF

SEQ ID NO: 11432 - protein, 9 aa, synthetic construct
GTQGTIHVY

SEQ ID NO: 11433 - protein, 9 aa, synthetic construct
GTQGTIHVH

SEQ ID NO: 11434 - protein, 9 aa, synthetic construct
GTQGTIHVF

SEQ ID NO: 11435 - protein, 9 aa, synthetic construct
PLPGSVKVY

SEQ ID NO: 11436 - protein, 9 aa, synthetic construct
GTQGTIRLH

SEQ ID NO: 11437 - protein, 9 aa, synthetic construct
GTQGTIRVK

SEQ ID NO: 11438 - protein, 9 aa, synthetic construct
GTQGTIKLY

SEQ ID NO: 11439 - protein, 9 aa, synthetic construct
GTQGTIKLH

SEQ ID NO: 11440 - protein, 9 aa, synthetic construct
GTQGTIKVF

SEQ ID NO: 11441 - protein, 9 aa, synthetic construct
PLPGSVKVH

SEQ ID NO: 11442 - protein, 9 aa, synthetic construct
GTQGSVHVF

SEQ ID NO: 11443 - protein, 9 aa, synthetic construct
GTQGSVRVF

SEQ ID NO: 11444 - protein, 9 aa, synthetic construct
GTQGSAHLH

SEQ ID NO: 11445 - protein, 9 aa, synthetic construct
GTQGSIHLK

SEQ ID NO: 11446 - protein, 9 aa, synthetic construct
GTQGSIHVK

SEQ ID NO: 11447 - protein, 9 aa, synthetic construct
GTQGSIHVF

SEQ ID NO: 11448 - protein, 9 aa, synthetic construct
GTQGSIKLY

SEQ ID NO: 11449 - protein, 9 aa, synthetic construct
GTQGSIKVH

SEQ ID NO: 11450 - protein, 9 aa, synthetic construct
GTQGSIKVF

SEQ ID NO: 11451 - protein, 9 aa, synthetic construct
GTQGSGRLF

SEQ ID NO: 11452 - protein, 9 aa, synthetic construct
GTQGVVHLY

SEQ ID NO: 11453 - protein, 9 aa, synthetic construct
GTQGVVHLR

SEQ ID NO: 11454 - protein, 9 aa, synthetic construct
GTQGVVHLK

SEQ ID NO: 11455 - protein, 9 aa, synthetic construct
GTQGVVHVY

SEQ ID NO: 11456 - protein, 9 aa, synthetic construct
GTQGVVHVR

SEQ ID NO: 11457 - protein, 9 aa, synthetic construct
GTQGVVHVK

SEQ ID NO: 11458 - protein, 9 aa, synthetic construct
GTQGVVRVH

SEQ ID NO: 11459 - protein, 9 aa, synthetic construct
GTQGVVKVY

SEQ ID NO: 11460 - protein, 9 aa, synthetic construct
GTQGVVKVH

SEQ ID NO: 11461 - protein, 9 aa, synthetic construct
GTQGVLHLK

SEQ ID NO: 11462 - protein, 9 aa, synthetic construct
GTQGVLHLF

SEQ ID NO: 11463 - protein, 9 aa, synthetic construct
GTQGVLHVR

SEQ ID NO: 11464 - protein, 9 aa, synthetic construct
GTQGVAHLR

SEQ ID NO: 11465 - protein, 9 aa, synthetic construct
GTQGVAHLH

SEQ ID NO: 11466 - protein, 9 aa, synthetic construct
GTQGVAHVY

SEQ ID NO: 11467 - protein, 9 aa, synthetic construct
GTQGVIHLY

SEQ ID NO: 11468 - protein, 9 aa, synthetic construct
GTQGVIHLH

SEQ ID NO: 11469 - protein, 9 aa, synthetic construct
GTQGVIHVR

SEQ ID NO: 11470 - protein, 9 aa, synthetic construct
GTQGVIHVH

SEQ ID NO: 11471 - protein, 9 aa, synthetic construct
GTQGVIHVF

SEQ ID NO: 11472 - protein, 9 aa, synthetic construct
GTQGVIKVR

SEQ ID NO: 11473 - protein, 9 aa, synthetic construct
GTQGVIKVH

SEQ ID NO: 11474 - protein, 9 aa, synthetic construct
GTQGVGHLY

SEQ ID NO: 11475 - protein, 9 aa, synthetic construct
GTQGVGKLR

SEQ ID NO: 11476 - protein, 9 aa, synthetic construct
GTQGVGKLH

SEQ ID NO: 11477 - protein, 9 aa, synthetic construct
GTQGVGKVH

SEQ ID NO: 11478 - protein, 9 aa, synthetic construct
GTQGVGKVF

SEQ ID NO: 11479 - protein, 9 aa, synthetic construct
PLPGSAHLK

SEQ ID NO: 11480 - protein, 9 aa, synthetic construct
PLPGSAHVH

SEQ ID NO: 11481 - protein, 9 aa, synthetic construct
PLPGSAHVK

SEQ ID NO: 11482 - protein, 9 aa, synthetic construct
GTQGGAKLH

SEQ ID NO: 11483 - protein, 9 aa, synthetic construct
PLPGSARLY

SEQ ID NO: 11484 - protein, 9 aa, synthetic construct
GTQGGIRLF

SEQ ID NO: 11485 - protein, 9 aa, synthetic construct
GTQGGIKLH

SEQ ID NO: 11486 - protein, 9 aa, synthetic construct
GTQGGGRLH

SEQ ID NO: 11487 - protein, 9 aa, synthetic construct
GTQGGGKVK

SEQ ID NO: 11488 - protein, 9 aa, synthetic construct
GTQGGGKVF

SEQ ID NO: 11489 - protein, 9 aa, synthetic construct
GTQAAVRVH

SEQ ID NO: 11490 - protein, 9 aa, synthetic construct
GTQAAAHLH

SEQ ID NO: 11491 - protein, 9 aa, synthetic construct
GTQAAAHLF

SEQ ID NO: 11492 - protein, 9 aa, synthetic construct
GTQAAAHVY

SEQ ID NO: 11493 - protein, 9 aa, synthetic construct
GTQAAIHLF

SEQ ID NO: 11494 - protein, 9 aa, synthetic construct
GTQAAGHLF

SEQ ID NO: 11495 - protein, 9 aa, synthetic construct
GTQAAGKLH

SEQ ID NO: 11496 - protein, 9 aa, synthetic construct
GTQATVKVR

SEQ ID NO: 11497 - protein, 9 aa, synthetic construct
GTQATLHLH

SEQ ID NO: 11498 - protein, 9 aa, synthetic construct
GTQATLHVK

SEQ ID NO: 11499 - protein, 9 aa, synthetic construct
PLPGSIHLF

SEQ ID NO: 11500 - protein, 9 aa, synthetic construct
GTQATLRLY

SEQ ID NO: 11501 - protein, 9 aa, synthetic construct
PLPGSIHVR

SEQ ID NO: 11502 - protein, 9 aa, synthetic construct
GTQATAHLY

SEQ ID NO: 11503 - protein, 9 aa, synthetic construct
GTQATAHLH

SEQ ID NO: 11504 - protein, 9 aa, synthetic construct
GTQATAHVH

SEQ ID NO: 11505 - protein, 9 aa, synthetic construct
PLPGSIHVH

SEQ ID NO: 11506 - protein, 9 aa, synthetic construct
GTQATARLY

SEQ ID NO: 11507 - protein, 9 aa, synthetic construct
GTQATIHLH

SEQ ID NO: 11508 - protein, 9 aa, synthetic construct
GTQATIHLK

SEQ ID NO: 11509 - protein, 9 aa, synthetic construct
GTQATIHVH

SEQ ID NO: 11510 - protein, 9 aa, synthetic construct
GTQATIHVK

SEQ ID NO: 11511 - protein, 9 aa, synthetic construct
GTQATIKLH

SEQ ID NO: 11512 - protein, 9 aa, synthetic construct
GTQATIKVF

SEQ ID NO: 11513 - protein, 9 aa, synthetic construct
GTQATGHLH

SEQ ID NO: 11514 - protein, 9 aa, synthetic construct
GTQASAHLY

SEQ ID NO: 11515 - protein, 9 aa, synthetic construct
GTQASIHLY

SEQ ID NO: 11516 - protein, 9 aa, synthetic construct
GTQASIHLR

SEQ ID NO: 11517 - protein, 9 aa, synthetic construct
GTQASIHLK

SEQ ID NO: 11518 - protein, 9 aa, synthetic construct
GTQASIHVF

SEQ ID NO: 11519 - protein, 9 aa, synthetic construct
GTQASIKLH

SEQ ID NO: 11520 - protein, 9 aa, synthetic construct
GTQASIKVF

SEQ ID NO: 11521 - protein, 9 aa, synthetic construct
GTQASGHVK

SEQ ID NO: 11522 - protein, 9 aa, synthetic construct
GTQASGKVH

SEQ ID NO: 11523 - protein, 9 aa, synthetic construct
GTQAVVHVH

SEQ ID NO: 11524 - protein, 9 aa, synthetic construct
GTQAVIHVR

SEQ ID NO: 11525 - protein, 9 aa, synthetic construct
GTQAVGHLY

SEQ ID NO: 11526 - protein, 9 aa, synthetic construct
GTQAVGHLR

SEQ ID NO: 11527 - protein, 9 aa, synthetic construct
GTQAVGRLY

SEQ ID NO: 11528 - protein, 9 aa, synthetic construct
GTQAVGKVF

SEQ ID NO: 11529 - protein, 9 aa, synthetic construct
GTQAGVRVH

SEQ ID NO: 11530 - protein, 9 aa, synthetic construct
GTQAGAHVH

SEQ ID NO: 11531 - protein, 9 aa, synthetic construct
GTQAGIKLY

SEQ ID NO: 11532 - protein, 9 aa, synthetic construct
GTQAGIKVY

SEQ ID NO: 11533 - protein, 9 aa, synthetic construct
GTPGAVKVR

SEQ ID NO: 11534 - protein, 9 aa, synthetic construct
GTPGALKVY

SEQ ID NO: 11535 - protein, 9 aa, synthetic construct
GTPGALKVF

SEQ ID NO: 11536 - protein, 9 aa, synthetic construct
GTPGAIHVR

SEQ ID NO: 11537 - protein, 9 aa, synthetic construct
GTPGAGRVH

SEQ ID NO: 11538 - protein, 9 aa, synthetic construct
GTPGTVKVR

SEQ ID NO: 11539 - protein, 9 aa, synthetic construct
GTPGTLKVF

SEQ ID NO: 11540 - protein, 9 aa, synthetic construct
GTPGTAHVH

SEQ ID NO: 11541 - protein, 9 aa, synthetic construct
GTPGTIHLH

SEQ ID NO: 11542 - protein, 9 aa, synthetic construct
PLPGVVKVY

SEQ ID NO: 11543 - protein, 9 aa, synthetic construct
PLPGVVKVH

SEQ ID NO: 11544 - protein, 9 aa, synthetic construct
GTPGTGHVK

SEQ ID NO: 11545 - protein, 9 aa, synthetic construct
GTPGSVHVK

SEQ ID NO: 11546 - protein, 9 aa, synthetic construct
GTPGSLHLR

SEQ ID NO: 11547 - protein, 9 aa, synthetic construct
GTPGSAHLH

SEQ ID NO: 11548 - protein, 9 aa, synthetic construct
GTPGSAHVR

SEQ ID NO: 11549 - protein, 9 aa, synthetic construct
GTPGSIHVH

SEQ ID NO: 11550 - protein, 9 aa, synthetic construct
GTPGSIHVK

SEQ ID NO: 11551 - protein, 9 aa, synthetic construct
GTPGSIKLY

SEQ ID NO: 11552 - protein, 9 aa, synthetic construct
GTPGVVHVY

SEQ ID NO: 11553 - protein, 9 aa, synthetic construct
GTPGVVRVF

SEQ ID NO: 11554 - protein, 9 aa, synthetic construct
GTPGVVKLF

SEQ ID NO: 11555 - protein, 9 aa, synthetic construct
GTPGVLHVK

SEQ ID NO: 11556 - protein, 9 aa, synthetic construct
GTPGVIKLF

SEQ ID NO: 11557 - protein, 9 aa, synthetic construct
GTPGVGHLH

SEQ ID NO: 11558 - protein, 9 aa, synthetic construct
GTPGVGHVR

SEQ ID NO: 11559 - protein, 9 aa, synthetic construct
PLPGVAHLR

SEQ ID NO: 11560 - protein, 9 aa, synthetic construct
GTPGGVRLY

SEQ ID NO: 11561 - protein, 9 aa, synthetic construct
GTPGGVRVH

SEQ ID NO: 11562 - protein, 9 aa, synthetic construct
GTPGGVKLH

SEQ ID NO: 11563 - protein, 9 aa, synthetic construct
GTPGGVKVF

SEQ ID NO: 11564 - protein, 9 aa, synthetic construct
PLPGVAHLK

SEQ ID NO: 11565 - protein, 9 aa, synthetic construct
GTPGGLKVY

SEQ ID NO: 11566 - protein, 9 aa, synthetic construct
GTPGGLKVF

SEQ ID NO: 11567 - protein, 9 aa, synthetic construct
GTPGGAHVY

SEQ ID NO: 11568 - protein, 9 aa, synthetic construct
GTPGGAHVH

SEQ ID NO: 11569 - protein, 9 aa, synthetic construct
GTPGGAHVK

SEQ ID NO: 11570 - protein, 9 aa, synthetic construct
PLPGVAHVH

SEQ ID NO: 11571 - protein, 9 aa, synthetic construct
GTPGGIHLR

SEQ ID NO: 11572 - protein, 9 aa, synthetic construct
GTPGGIHLK

SEQ ID NO: 11573 - protein, 9 aa, synthetic construct
GTPGGIKVY

SEQ ID NO: 11574 - protein, 9 aa, synthetic construct
GTPAAVHLK

SEQ ID NO: 11575 - protein, 9 aa, synthetic construct
GTPAAVHVK

SEQ ID NO: 11576 - protein, 9 aa, synthetic construct
PLPGVARVR

SEQ ID NO: 11577 - protein, 9 aa, synthetic construct
GTPAAVRLF

SEQ ID NO: 11578 - protein, 9 aa, synthetic construct
PLPGVARVH

SEQ ID NO: 11579 - protein, 9 aa, synthetic construct
GTPAAVKVY

SEQ ID NO: 11580 - protein, 9 aa, synthetic construct
GTPAALHLH

SEQ ID NO: 11581 - protein, 9 aa, synthetic construct
GTPAALHVH

SEQ ID NO: 11582 - protein, 9 aa, synthetic construct
GTPAALRLH

SEQ ID NO: 11583 - protein, 9 aa, synthetic construct
GTPAAAHLY

SEQ ID NO: 11584 - protein, 9 aa, synthetic construct
GTPAAAHVY

SEQ ID NO: 11585 - protein, 9 aa, synthetic construct
GTPAAAHVK

SEQ ID NO: 11586 - protein, 9 aa, synthetic construct
GTPAAAHVF

SEQ ID NO: 11587 - protein, 9 aa, synthetic construct
GTPAAAKLH

SEQ ID NO: 11588 - protein, 9 aa, synthetic construct
GTPAAIHLH

SEQ ID NO: 11589 - protein, 9 aa, synthetic construct
GTPAAIRLY

SEQ ID NO: 11590 - protein, 9 aa, synthetic construct
GTPAAIRLH

SEQ ID NO: 11591 - protein, 9 aa, synthetic construct
GTPAAGHVK

SEQ ID NO: 11592 - protein, 9 aa, synthetic construct
GTPAAGKLK

SEQ ID NO: 11593 - protein, 9 aa, synthetic construct
PLNGSLKLF

SEQ ID NO: 11594 - protein, 9 aa, synthetic construct
GTPATVKVH

SEQ ID NO: 11595 - protein, 9 aa, synthetic construct
GTPATLHLH

SEQ ID NO: 11596 - protein, 9 aa, synthetic construct
GTPATLHVF

SEQ ID NO: 11597 - protein, 9 aa, synthetic construct
GTPATLKLH

SEQ ID NO: 11598 - protein, 9 aa, synthetic construct
GTPATLKVH

SEQ ID NO: 11599 - protein, 9 aa, synthetic construct
GTPATAHLH

SEQ ID NO: 11600 - protein, 9 aa, synthetic construct
PLPGVIHVH

SEQ ID NO: 11601 - protein, 9 aa, synthetic construct
GTPATARLY

SEQ ID NO: 11602 - protein, 9 aa, synthetic construct
GTPATAKVY

SEQ ID NO: 11603 - protein, 9 aa, synthetic construct
GTPATIHLY

SEQ ID NO: 11604 - protein, 9 aa, synthetic construct
GTPATIHLH

SEQ ID NO: 11605 - protein, 9 aa, synthetic construct
GTPATIHLK

SEQ ID NO: 11606 - protein, 9 aa, synthetic construct
GTPATIHLF

SEQ ID NO: 11607 - protein, 9 aa, synthetic construct
GTPATIHVY

SEQ ID NO: 11608 - protein, 9 aa, synthetic construct
GTPATIHVF

SEQ ID NO: 11609 - protein, 9 aa, synthetic construct
GTPATIKLH

SEQ ID NO: 11610 - protein, 9 aa, synthetic construct
GTPATIKVF

SEQ ID NO: 11611 - protein, 9 aa, synthetic construct
PLPGVIRVF

SEQ ID NO: 11612 - protein, 9 aa, synthetic construct
GTPASAHLR

SEQ ID NO: 11613 - protein, 9 aa, synthetic construct
GTPASAKLY

SEQ ID NO: 11614 - protein, 9 aa, synthetic construct
GTPASAKLF

SEQ ID NO: 11615 - protein, 9 aa, synthetic construct
PLPGVIKLF

SEQ ID NO: 11616 - protein, 9 aa, synthetic construct
GTPASIHLH

SEQ ID NO: 11617 - protein, 9 aa, synthetic construct
GTPASIHVH

SEQ ID NO: 11618 - protein, 9 aa, synthetic construct
GTPASIHVF

SEQ ID NO: 11619 - protein, 9 aa, synthetic construct
PLPGVIKVY

SEQ ID NO: 11620 - protein, 9 aa, synthetic construct
GTPASIRLF

SEQ ID NO: 11621 - protein, 9 aa, synthetic construct
GTPASIRVY

SEQ ID NO: 11622 - protein, 9 aa, synthetic construct
GTPASIKLY

SEQ ID NO: 11623 - protein, 9 aa, synthetic construct
GTPASIKLF

SEQ ID NO: 11624 - protein, 9 aa, synthetic construct
GTPASIKVY

SEQ ID NO: 11625 - protein, 9 aa, synthetic construct
PLNGSLKVH

SEQ ID NO: 11626 - protein, 9 aa, synthetic construct
GTPAVVHVH

SEQ ID NO: 11627 - protein, 9 aa, synthetic construct
GTPAVVKVK

SEQ ID NO: 11628 - protein, 9 aa, synthetic construct
GTPAVVKVF

SEQ ID NO: 11629 - protein, 9 aa, synthetic construct
PLPGVGHLF

SEQ ID NO: 11630 - protein, 9 aa, synthetic construct
PLPGVGHVY

SEQ ID NO: 11631 - protein, 9 aa, synthetic construct
GTPAVLKLY

SEQ ID NO: 11632 - protein, 9 aa, synthetic construct
GTPAVAHLY

SEQ ID NO: 11633 - protein, 9 aa, synthetic construct
GTPAVAHLH

SEQ ID NO: 11634 - protein, 9 aa, synthetic construct
GTPAVARVH

SEQ ID NO: 11635 - protein, 9 aa, synthetic construct
PLPGVGHVK

SEQ ID NO: 11636 - protein, 9 aa, synthetic construct
GTPAVAKLY

SEQ ID NO: 11637 - protein, 9 aa, synthetic construct
GTPAVIHLK

SEQ ID NO: 11638 - protein, 9 aa, synthetic construct
GTPAVIHVR

SEQ ID NO: 11639 - protein, 9 aa, synthetic construct
GTPAVIHVH

SEQ ID NO: 11640 - protein, 9 aa, synthetic construct
GTPAVIRLF

SEQ ID NO: 11641 - protein, 9 aa, synthetic construct
GTPAVIRVR

SEQ ID NO: 11642 - protein, 9 aa, synthetic construct
GTPAVIKVF

SEQ ID NO: 11643 - protein, 9 aa, synthetic construct
GTPAVGHLY

SEQ ID NO: 11644 - protein, 9 aa, synthetic construct
GTPAVGHLK

SEQ ID NO: 11645 - protein, 9 aa, synthetic construct
GTPAVGHLF

SEQ ID NO: 11646 - protein, 9 aa, synthetic construct
GTPAVGHVY

SEQ ID NO: 11647 - protein, 9 aa, synthetic construct
GTPAVGHVR

SEQ ID NO: 11648 - protein, 9 aa, synthetic construct
GTPAVGHVH

SEQ ID NO: 11649 - protein, 9 aa, synthetic construct
GTPAVGHVK

SEQ ID NO: 11650 - protein, 9 aa, synthetic construct
GTPAVGHVF

SEQ ID NO: 11651 - protein, 9 aa, synthetic construct
GTPAGVRVH

SEQ ID NO: 11652 - protein, 9 aa, synthetic construct
GTPAGVKLF

SEQ ID NO: 11653 - protein, 9 aa, synthetic construct
PLPGVGKLY

SEQ ID NO: 11654 - protein, 9 aa, synthetic construct
GTPAGAHLK

SEQ ID NO: 11655 - protein, 9 aa, synthetic construct
GTPAGARLY

SEQ ID NO: 11656 - protein, 9 aa, synthetic construct
GTPAGIKLF

SEQ ID NO: 11657 - protein, 9 aa, synthetic construct
GTPAGIKVH

SEQ ID NO: 11658 - protein, 9 aa, synthetic construct
GTPAGGKVY

SEQ ID NO: 11659 - protein, 9 aa, synthetic construct
GSNGALHLF

SEQ ID NO: 11660 - protein, 9 aa, synthetic construct
GSNGAIHVH

SEQ ID NO: 11661 - protein, 9 aa, synthetic construct
PLPGGVRLY

SEQ ID NO: 11662 - protein, 9 aa, synthetic construct
GSNGAIRLY

SEQ ID NO: 11663 - protein, 9 aa, synthetic construct
GSNGAIRVF

SEQ ID NO: 11664 - protein, 9 aa, synthetic construct
GSNGAGKLY

SEQ ID NO: 11665 - protein, 9 aa, synthetic construct
GSNGTVHLH

SEQ ID NO: 11666 - protein, 9 aa, synthetic construct
GSNGTVRLH

SEQ ID NO: 11667 - protein, 9 aa, synthetic construct
GSNGTVRVH

SEQ ID NO: 11668 - protein, 9 aa, synthetic construct
GSNGTLHLY

SEQ ID NO: 11669 - protein, 9 aa, synthetic construct
GSNGTLHVH

SEQ ID NO: 11670 - protein, 9 aa, synthetic construct
GSNGTAHLH

SEQ ID NO: 11671 - protein, 9 aa, synthetic construct
GSNGTAHVY

SEQ ID NO: 11672 - protein, 9 aa, synthetic construct
GSNGTAHVH

SEQ ID NO: 11673 - protein, 9 aa, synthetic construct
GSNGTARVY

SEQ ID NO: 11674 - protein, 9 aa, synthetic construct
GSNGTARVH

SEQ ID NO: 11675 - protein, 9 aa, synthetic construct
GSNGTAKLF

SEQ ID NO: 11676 - protein, 9 aa, synthetic construct
GSNGTIHVR

SEQ ID NO: 11677 - protein, 9 aa, synthetic construct
GSNGTIHVH

SEQ ID NO: 11678 - protein, 9 aa, synthetic construct
GSNGTIKLR

SEQ ID NO: 11679 - protein, 9 aa, synthetic construct
GSNGTIKVH

SEQ ID NO: 11680 - protein, 9 aa, synthetic construct
GSNGTGHLH

SEQ ID NO: 11681 - protein, 9 aa, synthetic construct
GSNGTGHVF

SEQ ID NO: 11682 - protein, 9 aa, synthetic construct
GSNGTGRLY

SEQ ID NO: 11683 - protein, 9 aa, synthetic construct
GSNGTGRLH

SEQ ID NO: 11684 - protein, 9 aa, synthetic construct
GSNGTGRVH

SEQ ID NO: 11685 - protein, 9 aa, synthetic construct
GSNGTGKLY

SEQ ID NO: 11686 - protein, 9 aa, synthetic construct
GSNGTGKLH

SEQ ID NO: 11687 - protein, 9 aa, synthetic construct
GSNGTGKLF

SEQ ID NO: 11688 - protein, 9 aa, synthetic construct
GSNGTGKVY

SEQ ID NO: 11689 - protein, 9 aa, synthetic construct
GSNGTGKVF

SEQ ID NO: 11690 - protein, 9 aa, synthetic construct
GSNGSLHLH

SEQ ID NO: 11691 - protein, 9 aa, synthetic construct
GSNGSLRVF

SEQ ID NO: 11692 - protein, 9 aa, synthetic construct
GSNGSAHLF

SEQ ID NO: 11693 - protein, 9 aa, synthetic construct
GSNGSAKLY

SEQ ID NO: 11694 - protein, 9 aa, synthetic construct
GSNGSAKVH

SEQ ID NO: 11695 - protein, 9 aa, synthetic construct
GSNGSIHLH

SEQ ID NO: 11696 - protein, 9 aa, synthetic construct
GSNGVVKVY

SEQ ID NO: 11697 - protein, 9 aa, synthetic construct
GSNGVLHLH

SEQ ID NO: 11698 - protein, 9 aa, synthetic construct
GSNGVARLH

SEQ ID NO: 11699 - protein, 9 aa, synthetic construct
GSNGVAKLF

SEQ ID NO: 11700 - protein, 9 aa, synthetic construct
GSNGVIHLH

SEQ ID NO: 11701 - protein, 9 aa, synthetic construct
GSNGVIHLK

SEQ ID NO: 11702 - protein, 9 aa, synthetic construct
GSNGVIHVR

SEQ ID NO: 11703 - protein, 9 aa, synthetic construct
GSNGVIHVK

SEQ ID NO: 11704 - protein, 9 aa, synthetic construct
GSNGVIHVF

SEQ ID NO: 11705 - protein, 9 aa, synthetic construct
GSNGVIRLY

SEQ ID NO: 11706 - protein, 9 aa, synthetic construct
GSNGVIKLF

SEQ ID NO: 11707 - protein, 9 aa, synthetic construct
GSNGVGHLY

SEQ ID NO: 11708 - protein, 9 aa, synthetic construct
GSNGGLHLY

SEQ ID NO: 11709 - protein, 9 aa, synthetic construct
GSNGGLHVR

SEQ ID NO: 11710 - protein, 9 aa, synthetic construct
GSNGGLRLF

SEQ ID NO: 11711 - protein, 9 aa, synthetic construct
GSNGGLRVF

SEQ ID NO: 11712 - protein, 9 aa, synthetic construct
GSNGGLKLY

SEQ ID NO: 11713 - protein, 9 aa, synthetic construct
GSNGGLKVF

SEQ ID NO: 11714 - protein, 9 aa, synthetic construct
GSNGGAHVH

SEQ ID NO: 11715 - protein, 9 aa, synthetic construct
GSNGGAHVK

SEQ ID NO: 11716 - protein, 9 aa, synthetic construct
GSNGGAHVF

SEQ ID NO: 11717 - protein, 9 aa, synthetic construct
GSNGGIHVF

SEQ ID NO: 11718 - protein, 9 aa, synthetic construct
GSNGGGHLH

SEQ ID NO: 11719 - protein, 9 aa, synthetic construct
GSNGGGHLF

SEQ ID NO: 11720 - protein, 9 aa, synthetic construct
GSNAAVHLK

SEQ ID NO: 11721 - protein, 9 aa, synthetic construct
GSNAAVKVF

SEQ ID NO: 11722 - protein, 9 aa, synthetic construct
GSNAAAHVK

SEQ ID NO: 11723 - protein, 9 aa, synthetic construct
GSNAAIHVH

SEQ ID NO: 11724 - protein, 9 aa, synthetic construct
GSNAAIRVY

SEQ ID NO: 11725 - protein, 9 aa, synthetic construct
GSNATAHLY

SEQ ID NO: 11726 - protein, 9 aa, synthetic construct
GSNATAHVH

SEQ ID NO: 11727 - protein, 9 aa, synthetic construct
GSNATGRLH

SEQ ID NO: 11728 - protein, 9 aa, synthetic construct
GSNASVHVY

SEQ ID NO: 11729 - protein, 9 aa, synthetic construct
PLPGGIRVH

SEQ ID NO: 11730 - protein, 9 aa, synthetic construct
GSNASLHVY

SEQ ID NO: 11731 - protein, 9 aa, synthetic construct
GSNASLRLH

SEQ ID NO: 11732 - protein, 9 aa, synthetic construct
GSNASIRVY

SEQ ID NO: 11733 - protein, 9 aa, synthetic construct
PLPGGIKVH

SEQ ID NO: 11734 - protein, 9 aa, synthetic construct
GSNASGKVF

SEQ ID NO: 11735 - protein, 9 aa, synthetic construct
GSNAVVHVK

SEQ ID NO: 11736 - protein, 9 aa, synthetic construct
GSNAVLKVH

SEQ ID NO: 11737 - protein, 9 aa, synthetic construct
GSNAVIHVH

SEQ ID NO: 11738 - protein, 9 aa, synthetic construct
PLPGGGRVY

SEQ ID NO: 11739 - protein, 9 aa, synthetic construct
GSNAGARLF

SEQ ID NO: 11740 - protein, 9 aa, synthetic construct
GSNAGAKLH

SEQ ID NO: 11741 - protein, 9 aa, synthetic construct
GSNAGIKVY

SEQ ID NO: 11742 - protein, 9 aa, synthetic construct
PLPGGGKVH

SEQ ID NO: 11743 - protein, 9 aa, synthetic construct
GSNAGGHVH

SEQ ID NO: 11744 - protein, 9 aa, synthetic construct
GSNAGGRVY

SEQ ID NO: 11745 - protein, 9 aa, synthetic construct
GSQGAVHVK

SEQ ID NO: 11746 - protein, 9 aa, synthetic construct
GSQGALHVY

SEQ ID NO: 11747 - protein, 9 aa, synthetic construct
GSQGALHVR

SEQ ID NO: 11748 - protein, 9 aa, synthetic construct
PLPAAVHLF

SEQ ID NO: 11749 - protein, 9 aa, synthetic construct
GSQGALKVH

SEQ ID NO: 11750 - protein, 9 aa, synthetic construct
GSQGAAHVH

SEQ ID NO: 11751 - protein, 9 aa, synthetic construct
GSQGAGKVF

SEQ ID NO: 11752 - protein, 9 aa, synthetic construct
GSQGTVKLY

SEQ ID NO: 11753 - protein, 9 aa, synthetic construct
GSQGTLKVF

SEQ ID NO: 11754 - protein, 9 aa, synthetic construct
GSQGTAHLH

SEQ ID NO: 11755 - protein, 9 aa, synthetic construct
GSQGTAHVH

SEQ ID NO: 11756 - protein, 9 aa, synthetic construct
PLPAAVKLH

SEQ ID NO: 11757 - protein, 9 aa, synthetic construct
GSQGTARLY

SEQ ID NO: 11758 - protein, 9 aa, synthetic construct
GSQGTARVY

SEQ ID NO: 11759 - protein, 9 aa, synthetic construct
GSQGTARVF

SEQ ID NO: 11760 - protein, 9 aa, synthetic construct
GSQGTIHLK

SEQ ID NO: 11761 - protein, 9 aa, synthetic construct
GSQGTIHVK

SEQ ID NO: 11762 - protein, 9 aa, synthetic construct
PLPAAVKVF

SEQ ID NO: 11763 - protein, 9 aa, synthetic construct
GSQGTGKVY

SEQ ID NO: 11764 - protein, 9 aa, synthetic construct
GSQGSVHVR

SEQ ID NO: 11765 - protein, 9 aa, synthetic construct
PLPAALHLK

SEQ ID NO: 11766 - protein, 9 aa, synthetic construct
GSQGSAHLH

SEQ ID NO: 11767 - protein, 9 aa, synthetic construct
GSQGSIHLH

SEQ ID NO: 11768 - protein, 9 aa, synthetic construct
GSQGSIHLK

SEQ ID NO: 11769 - protein, 9 aa, synthetic construct
GSQGSIHVY

SEQ ID NO: 11770 - protein, 9 aa, synthetic construct
GSQGSIHVR

SEQ ID NO: 11771 - protein, 9 aa, synthetic construct
GSQGSIHVH

SEQ ID NO: 11772 - protein, 9 aa, synthetic construct
GSQGSIHVK

SEQ ID NO: 11773 - protein, 9 aa, synthetic construct
GSQGSIKVH

SEQ ID NO: 11774 - protein, 9 aa, synthetic construct
GSQGSGRVF

SEQ ID NO: 11775 - protein, 9 aa, synthetic construct
GSQGVVHVY

SEQ ID NO: 11776 - protein, 9 aa, synthetic construct
GSQGVVHVR

SEQ ID NO: 11777 - protein, 9 aa, synthetic construct
GSQGVVKLY

SEQ ID NO: 11778 - protein, 9 aa, synthetic construct
GSQGVLHLF

SEQ ID NO: 11779 - protein, 9 aa, synthetic construct
GSQGVLRVH

SEQ ID NO: 11780 - protein, 9 aa, synthetic construct
GSQGVLKLF

SEQ ID NO: 11781 - protein, 9 aa, synthetic construct
GSQGVLKVY

SEQ ID NO: 11782 - protein, 9 aa, synthetic construct
GSQGVAHLR

SEQ ID NO: 11783 - protein, 9 aa, synthetic construct
GSQGVAHLH

SEQ ID NO: 11784 - protein, 9 aa, synthetic construct
GSQGVAHLK

SEQ ID NO: 11785 - protein, 9 aa, synthetic construct
GSQGVAHVH

SEQ ID NO: 11786 - protein, 9 aa, synthetic construct
GSQGVIHVH

SEQ ID NO: 11787 - protein, 9 aa, synthetic construct
GSQGVIRVY

SEQ ID NO: 11788 - protein, 9 aa, synthetic construct
GSQGVIRVH

SEQ ID NO: 11789 - protein, 9 aa, synthetic construct
GSQGVIKLY

SEQ ID NO: 11790 - protein, 9 aa, synthetic construct
GSQGVIKLH

SEQ ID NO: 11791 - protein, 9 aa, synthetic construct
GSQGVIKLF

SEQ ID NO: 11792 - protein, 9 aa, synthetic construct
GSQGVIKVR

SEQ ID NO: 11793 - protein, 9 aa, synthetic construct
GSQGVIKVF

SEQ ID NO: 11794 - protein, 9 aa, synthetic construct
GSQGVGHLR

SEQ ID NO: 11795 - protein, 9 aa, synthetic construct
GSQGVGKLR

SEQ ID NO: 11796 - protein, 9 aa, synthetic construct
GSQGVGKVY

SEQ ID NO: 11797 - protein, 9 aa, synthetic construct
GSQGVGKVH

SEQ ID NO: 11798 - protein, 9 aa, synthetic construct
PLPAAAHLY

SEQ ID NO: 11799 - protein, 9 aa, synthetic construct
GSQGGVRVH

SEQ ID NO: 11800 - protein, 9 aa, synthetic construct
GSQGGVKVF

SEQ ID NO: 11801 - protein, 9 aa, synthetic construct
PLPAAAHLK

SEQ ID NO: 11802 - protein, 9 aa, synthetic construct
PLPAAAHVY

SEQ ID NO: 11803 - protein, 9 aa, synthetic construct
PLPAAAHVH

SEQ ID NO: 11804 - protein, 9 aa, synthetic construct
GSQGGARVF

SEQ ID NO: 11805 - protein, 9 aa, synthetic construct
GSQGGIHVR

SEQ ID NO: 11806 - protein, 9 aa, synthetic construct
GSQGGIKLY

SEQ ID NO: 11807 - protein, 9 aa, synthetic construct
GSQGGIKVH

SEQ ID NO: 11808 - protein, 9 aa, synthetic construct
PLPAAARLH

SEQ ID NO: 11809 - protein, 9 aa, synthetic construct
GSQGGGRVY

SEQ ID NO: 11810 - protein, 9 aa, synthetic construct
GSQAAVHLH

SEQ ID NO: 11811 - protein, 9 aa, synthetic construct
GSQAAVHLF

SEQ ID NO: 11812 - protein, 9 aa, synthetic construct
GSQAAVHVK

SEQ ID NO: 11813 - protein, 9 aa, synthetic construct
GSQAAVRVF

SEQ ID NO: 11814 - protein, 9 aa, synthetic construct
GSQAAVKVH

SEQ ID NO: 11815 - protein, 9 aa, synthetic construct
GSQAALHLK

SEQ ID NO: 11816 - protein, 9 aa, synthetic construct
PLPAAAKLH

SEQ ID NO: 11817 - protein, 9 aa, synthetic construct
GSQAAARVR

SEQ ID NO: 11818 - protein, 9 aa, synthetic construct
GSQAAAKLF

SEQ ID NO: 11819 - protein, 9 aa, synthetic construct
GSQAAAKVH

SEQ ID NO: 11820 - protein, 9 aa, synthetic construct
GSQAAIHLH

SEQ ID NO: 11821 - protein, 9 aa, synthetic construct
GSQAAIHVH

SEQ ID NO: 11822 - protein, 9 aa, synthetic construct
GSQAAIKLY

SEQ ID NO: 11823 - protein, 9 aa, synthetic construct
GSQAAGHLR

SEQ ID NO: 11824 - protein, 9 aa, synthetic construct
GSQAAGRVY

SEQ ID NO: 11825 - protein, 9 aa, synthetic construct
GSQAAGKLY

SEQ ID NO: 11826 - protein, 9 aa, synthetic construct
GSQAAGKVF

SEQ ID NO: 11827 - protein, 9 aa, synthetic construct
PLNGSAKLF

SEQ ID NO: 11828 - protein, 9 aa, synthetic construct
GSQATLHVK

SEQ ID NO: 11829 - protein, 9 aa, synthetic construct
GSQATLHVF

SEQ ID NO: 11830 - protein, 9 aa, synthetic construct
GSQATLRLH

SEQ ID NO: 11831 - protein, 9 aa, synthetic construct
PLPAAIRLY

SEQ ID NO: 11832 - protein, 9 aa, synthetic construct
GSQATIRLK

SEQ ID NO: 11833 - protein, 9 aa, synthetic construct
GSQATGHVK

SEQ ID NO: 11834 - protein, 9 aa, synthetic construct
GSQASVHLF

SEQ ID NO: 11835 - protein, 9 aa, synthetic construct
GSQASAHLY

SEQ ID NO: 11836 - protein, 9 aa, synthetic construct
GSQASIHVK

SEQ ID NO: 11837 - protein, 9 aa, synthetic construct
GSQASIHVF

SEQ ID NO: 11838 - protein, 9 aa, synthetic construct
GSQASIKLY

SEQ ID NO: 11839 - protein, 9 aa, synthetic construct
GSQASIKLH

SEQ ID NO: 11840 - protein, 9 aa, synthetic construct
GSQASGHLF

SEQ ID NO: 11841 - protein, 9 aa, synthetic construct
GSQASGRVK

SEQ ID NO: 11842 - protein, 9 aa, synthetic construct
GSQASGKVY

SEQ ID NO: 11843 - protein, 9 aa, synthetic construct
PLPAAGHLY

SEQ ID NO: 11844 - protein, 9 aa, synthetic construct
GSQAVVHVH

SEQ ID NO: 11845 - protein, 9 aa, synthetic construct
GSQAVVHVK

SEQ ID NO: 11846 - protein, 9 aa, synthetic construct
PLPAAGHLK

SEQ ID NO: 11847 - protein, 9 aa, synthetic construct
GSQAVLRLY

SEQ ID NO: 11848 - protein, 9 aa, synthetic construct
GSQAVLKLH

SEQ ID NO: 11849 - protein, 9 aa, synthetic construct
PLPAAGHVR

SEQ ID NO: 11850 - protein, 9 aa, synthetic construct
GSQAVIHVR

SEQ ID NO: 11851 - protein, 9 aa, synthetic construct
GSQAVIKVH

SEQ ID NO: 11852 - protein, 9 aa, synthetic construct
GSQAVGRVF

SEQ ID NO: 11853 - protein, 9 aa, synthetic construct
GSQAVGKVF

SEQ ID NO: 11854 - protein, 9 aa, synthetic construct
GSQAGVRVH

SEQ ID NO: 11855 - protein, 9 aa, synthetic construct
GSQAGAHLH

SEQ ID NO: 11856 - protein, 9 aa, synthetic construct
GSQAGAHLK

SEQ ID NO: 11857 - protein, 9 aa, synthetic construct
GSQAGAHVH

SEQ ID NO: 11858 - protein, 9 aa, synthetic construct
PLPAAGKLH

SEQ ID NO: 11859 - protein, 9 aa, synthetic construct
GSQAGARVY

SEQ ID NO: 11860 - protein, 9 aa, synthetic construct
GSQAGAKLY

SEQ ID NO: 11861 - protein, 9 aa, synthetic construct
GSQAGIHVH

SEQ ID NO: 11862 - protein, 9 aa, synthetic construct
GSQAGIRLY

SEQ ID NO: 11863 - protein, 9 aa, synthetic construct
GSQAGIKLH

SEQ ID NO: 11864 - protein, 9 aa, synthetic construct
GSQAGIKLF

SEQ ID NO: 11865 - protein, 9 aa, synthetic construct
GSQAGIKVY

SEQ ID NO: 11866 - protein, 9 aa, synthetic construct
GSQAGIKVH

SEQ ID NO: 11867 - protein, 9 aa, synthetic construct
GSQAGIKVF

SEQ ID NO: 11868 - protein, 9 aa, synthetic construct
GSQAGGHVH

SEQ ID NO: 11869 - protein, 9 aa, synthetic construct
GSQAGGKVH

SEQ ID NO: 11870 - protein, 9 aa, synthetic construct
GSPGAVHLY

SEQ ID NO: 11871 - protein, 9 aa, synthetic construct
PLPATVHLR

SEQ ID NO: 11872 - protein, 9 aa, synthetic construct
GSPGAVRVY

SEQ ID NO: 11873 - protein, 9 aa, synthetic construct
GSPGAVKVY

SEQ ID NO: 11874 - protein, 9 aa, synthetic construct
GSPGALHVY

SEQ ID NO: 11875 - protein, 9 aa, synthetic construct
GSPGALHVH

SEQ ID NO: 11876 - protein, 9 aa, synthetic construct
GSPGALRVY

SEQ ID NO: 11877 - protein, 9 aa, synthetic construct
GSPGALKLY

SEQ ID NO: 11878 - protein, 9 aa, synthetic construct
GSPGALKVH

SEQ ID NO: 11879 - protein, 9 aa, synthetic construct
GSPGALKVF

SEQ ID NO: 11880 - protein, 9 aa, synthetic construct
GSPGAAKLY

SEQ ID NO: 11881 - protein, 9 aa, synthetic construct
PLPATVHVF

SEQ ID NO: 11882 - protein, 9 aa, synthetic construct
GSPGAIHVY

SEQ ID NO: 11883 - protein, 9 aa, synthetic construct
GSPGAIHVH

SEQ ID NO: 11884 - protein, 9 aa, synthetic construct
GSPGAIKLY

SEQ ID NO: 11885 - protein, 9 aa, synthetic construct
GSPGAGHVH

SEQ ID NO: 11886 - protein, 9 aa, synthetic construct
GSPGAGRLF

SEQ ID NO: 11887 - protein, 9 aa, synthetic construct
GSPGTLHLY

SEQ ID NO: 11888 - protein, 9 aa, synthetic construct
GSPGTLHLH

SEQ ID NO: 11889 - protein, 9 aa, synthetic construct
GSPGTLHVH

SEQ ID NO: 11890 - protein, 9 aa, synthetic construct
GSPGTLKVY

SEQ ID NO: 11891 - protein, 9 aa, synthetic construct
PLPATVKLK

SEQ ID NO: 11892 - protein, 9 aa, synthetic construct
GSPGTAKVK

SEQ ID NO: 11893 - protein, 9 aa, synthetic construct
GSPGTIHVH

SEQ ID NO: 11894 - protein, 9 aa, synthetic construct
GSPGTGHLY

SEQ ID NO: 11895 - protein, 9 aa, synthetic construct
GSPGTGHVF

SEQ ID NO: 11896 - protein, 9 aa, synthetic construct
GSPGSVHVK

SEQ ID NO: 11897 - protein, 9 aa, synthetic construct
GSPGSVRLY

SEQ ID NO: 11898 - protein, 9 aa, synthetic construct
GSPGSVRVY

SEQ ID NO: 11899 - protein, 9 aa, synthetic construct
PLPATLHLH

SEQ ID NO: 11900 - protein, 9 aa, synthetic construct
GSPGSLKVY

SEQ ID NO: 11901 - protein, 9 aa, synthetic construct
GSPGSAHLH

SEQ ID NO: 11902 - protein, 9 aa, synthetic construct
GSPGSIHVY

SEQ ID NO: 11903 - protein, 9 aa, synthetic construct
GSPGSIRVF

SEQ ID NO: 11904 - protein, 9 aa, synthetic construct
GSPGSIKVR

SEQ ID NO: 11905 - protein, 9 aa, synthetic construct
GSPGVAHVR

SEQ ID NO: 11906 - protein, 9 aa, synthetic construct
PLPATLKLK

SEQ ID NO: 11907 - protein, 9 aa, synthetic construct
GSPGVAKLY

SEQ ID NO: 11908 - protein, 9 aa, synthetic construct
GSPGVIHLY

SEQ ID NO: 11909 - protein, 9 aa, synthetic construct
GSPGVIHLH

SEQ ID NO: 11910 - protein, 9 aa, synthetic construct
GSPGVGHLR

SEQ ID NO: 11911 - protein, 9 aa, synthetic construct
GSPGVGHLH

SEQ ID NO: 11912 - protein, 9 aa, synthetic construct
GSPGVGHLK

SEQ ID NO: 11913 - protein, 9 aa, synthetic construct
GSPGVGHVY

SEQ ID NO: 11914 - protein, 9 aa, synthetic construct
GSPGVGHVR

SEQ ID NO: 11915 - protein, 9 aa, synthetic construct
GSPGVGHVH

SEQ ID NO: 11916 - protein, 9 aa, synthetic construct
GSPGVGHVK

SEQ ID NO: 11917 - protein, 9 aa, synthetic construct
GSPGVGHVF

SEQ ID NO: 11918 - protein, 9 aa, synthetic construct
GSPGGVRVH

SEQ ID NO: 11919 - protein, 9 aa, synthetic construct
PLPATAHLH

SEQ ID NO: 11920 - protein, 9 aa, synthetic construct
GSPGGLHLH

SEQ ID NO: 11921 - protein, 9 aa, synthetic construct
GSPGGLHVH

SEQ ID NO: 11922 - protein, 9 aa, synthetic construct
GSPGGLRLH

SEQ ID NO: 11923 - protein, 9 aa, synthetic construct
GSPGGAHLF

SEQ ID NO: 11924 - protein, 9 aa, synthetic construct
GSPGGAHVH

SEQ ID NO: 11925 - protein, 9 aa, synthetic construct
GSPGGIKLH

SEQ ID NO: 11926 - protein, 9 aa, synthetic construct
PLPATARLF

SEQ ID NO: 11927 - protein, 9 aa, synthetic construct
GSPGGGKLF

SEQ ID NO: 11928 - protein, 9 aa, synthetic construct
GSPAAVHLR

SEQ ID NO: 11929 - protein, 9 aa, synthetic construct
PLNGSIHVK

SEQ ID NO: 11930 - protein, 9 aa, synthetic construct
GSPAALKLR

SEQ ID NO: 11931 - protein, 9 aa, synthetic construct
GSPAALKVY

SEQ ID NO: 11932 - protein, 9 aa, synthetic construct
GSPAAAHVH

SEQ ID NO: 11933 - protein, 9 aa, synthetic construct
GSPAAAHVK

SEQ ID NO: 11934 - protein, 9 aa, synthetic construct
GSPAAARLH

SEQ ID NO: 11935 - protein, 9 aa, synthetic construct
GSPAAIHVH

SEQ ID NO: 11936 - protein, 9 aa, synthetic construct
PLPATAKVY

SEQ ID NO: 11937 - protein, 9 aa, synthetic construct
GSPAAIRVH

SEQ ID NO: 11938 - protein, 9 aa, synthetic construct
GSPAAGHVF

SEQ ID NO: 11939 - protein, 9 aa, synthetic construct
GSPAAGRLF

SEQ ID NO: 11940 - protein, 9 aa, synthetic construct
GSPAAGRVY

SEQ ID NO: 11941 - protein, 9 aa, synthetic construct
GSPAAGKLF

SEQ ID NO: 11942 - protein, 9 aa, synthetic construct
PLPATIHLY

SEQ ID NO: 11943 - protein, 9 aa, synthetic construct
GSPATVKLK

SEQ ID NO: 11944 - protein, 9 aa, synthetic construct
PLPATIHVR

SEQ ID NO: 11945 - protein, 9 aa, synthetic construct
GSPATAHLY

SEQ ID NO: 11946 - protein, 9 aa, synthetic construct
GSPATARVF

SEQ ID NO: 11947 - protein, 9 aa, synthetic construct
GSPATAKLY

SEQ ID NO: 11948 - protein, 9 aa, synthetic construct
GSPATAKVY

SEQ ID NO: 11949 - protein, 9 aa, synthetic construct
GSPATIHLY

SEQ ID NO: 11950 - protein, 9 aa, synthetic construct
GSPATIHLH

SEQ ID NO: 11951 - protein, 9 aa, synthetic construct
GSPATIHVY

SEQ ID NO: 11952 - protein, 9 aa, synthetic construct
GSPATIHVK

SEQ ID NO: 11953 - protein, 9 aa, synthetic construct
GSPATIHVF

SEQ ID NO: 11954 - protein, 9 aa, synthetic construct
GSPATIKLH

SEQ ID NO: 11955 - protein, 9 aa, synthetic construct
GSPATGRVF

SEQ ID NO: 11956 - protein, 9 aa, synthetic construct
GSPATGKVY

SEQ ID NO: 11957 - protein, 9 aa, synthetic construct
GSPASVHLY

SEQ ID NO: 11958 - protein, 9 aa, synthetic construct
GSPASVKVH

SEQ ID NO: 11959 - protein, 9 aa, synthetic construct
GSPASLHLY

SEQ ID NO: 11960 - protein, 9 aa, synthetic construct
PLPATIKLY

SEQ ID NO: 11961 - protein, 9 aa, synthetic construct
GSPASAHLY

SEQ ID NO: 11962 - protein, 9 aa, synthetic construct
GSPASAHLH

SEQ ID NO: 11963 - protein, 9 aa, synthetic construct
GSPASIHVF

SEQ ID NO: 11964 - protein, 9 aa, synthetic construct
GSPASIRLH

SEQ ID NO: 11965 - protein, 9 aa, synthetic construct
GSPAVVHVY

SEQ ID NO: 11966 - protein, 9 aa, synthetic construct
PLPATGHLK

SEQ ID NO: 11967 - protein, 9 aa, synthetic construct
GSPAVAKVY

SEQ ID NO: 11968 - protein, 9 aa, synthetic construct
GSPAGVRVH

SEQ ID NO: 11969 - protein, 9 aa, synthetic construct
GSPAGLRLY

SEQ ID NO: 11970 - protein, 9 aa, synthetic construct
GSPAGAHLH

SEQ ID NO: 11971 - protein, 9 aa, synthetic construct
PLPATGKLH

SEQ ID NO: 11972 - protein, 9 aa, synthetic construct
GSPAGIRLH

SEQ ID NO: 11973 - protein, 9 aa, synthetic construct
GANGALHLK

SEQ ID NO: 11974 - protein, 9 aa, synthetic construct
PLPASVHVK

SEQ ID NO: 11975 - protein, 9 aa, synthetic construct
GANGAIHLH

SEQ ID NO: 11976 - protein, 9 aa, synthetic construct
GANGAGRLH

SEQ ID NO: 11977 - protein, 9 aa, synthetic construct
GANGTLHLH

SEQ ID NO: 11978 - protein, 9 aa, synthetic construct
GANGTLHVH

SEQ ID NO: 11979 - protein, 9 aa, synthetic construct
GANGTLRLH

SEQ ID NO: 11980 - protein, 9 aa, synthetic construct
GANGTLKLH

SEQ ID NO: 11981 - protein, 9 aa, synthetic construct
GANGTLKVR

SEQ ID NO: 11982 - protein, 9 aa, synthetic construct
GANGTAHVY

SEQ ID NO: 11983 - protein, 9 aa, synthetic construct
GANGTAKVK

SEQ ID NO: 11984 - protein, 9 aa, synthetic construct
GANGTIRLY

SEQ ID NO: 11985 - protein, 9 aa, synthetic construct
PLPASVKVH

SEQ ID NO: 11986 - protein, 9 aa, synthetic construct
GANGTGHVF

SEQ ID NO: 11987 - protein, 9 aa, synthetic construct
PLPASVKVF

SEQ ID NO: 11988 - protein, 9 aa, synthetic construct
GANGTGKLH

SEQ ID NO: 11989 - protein, 9 aa, synthetic construct
GANGTGKVY

SEQ ID NO: 11990 - protein, 9 aa, synthetic construct
GANGSVHVY

SEQ ID NO: 11991 - protein, 9 aa, synthetic construct
GANGSLKVF

SEQ ID NO: 11992 - protein, 9 aa, synthetic construct
GANGSIKLH

SEQ ID NO: 11993 - protein, 9 aa, synthetic construct
GANGSGKVY

SEQ ID NO: 11994 - protein, 9 aa, synthetic construct
GANGVVRVF

SEQ ID NO: 11995 - protein, 9 aa, synthetic construct
GANGVAHLK

SEQ ID NO: 11996 - protein, 9 aa, synthetic construct
GANGVIHVH

SEQ ID NO: 11997 - protein, 9 aa, synthetic construct
GANGVIRLH

SEQ ID NO: 11998 - protein, 9 aa, synthetic construct
GANGVGHLH

SEQ ID NO: 11999 - protein, 9 aa, synthetic construct
GANGVGRLH

SEQ ID NO: 12000 - protein, 9 aa, synthetic construct
PLPASAHLY

SEQ ID NO: 12001 - protein, 9 aa, synthetic construct
GANGGVKVF

SEQ ID NO: 12002 - protein, 9 aa, synthetic construct
GANGGLHLH

SEQ ID NO: 12003 - protein, 9 aa, synthetic construct
GANGGLHVR

SEQ ID NO: 12004 - protein, 9 aa, synthetic construct
GANGGAHVK

SEQ ID NO: 12005 - protein, 9 aa, synthetic construct
PLPASAHVK

SEQ ID NO: 12006 - protein, 9 aa, synthetic construct
GANGGIHLR

SEQ ID NO: 12007 - protein, 9 aa, synthetic construct
GANGGGHLH

SEQ ID NO: 12008 - protein, 9 aa, synthetic construct
GANAAVRVH

SEQ ID NO: 12009 - protein, 9 aa, synthetic construct
GANAALHLY

SEQ ID NO: 12010 - protein, 9 aa, synthetic construct
GANAAAHVH

SEQ ID NO: 12011 - protein, 9 aa, synthetic construct
GANAAIKLY

SEQ ID NO: 12012 - protein, 9 aa, synthetic construct
PLPASAKVH

SEQ ID NO: 12013 - protein, 9 aa, synthetic construct
GANAAGHVH

SEQ ID NO: 12014 - protein, 9 aa, synthetic construct
GANATVHLH

SEQ ID NO: 12015 - protein, 9 aa, synthetic construct
GANATVHVK

SEQ ID NO: 12016 - protein, 9 aa, synthetic construct
GANATAHLY

SEQ ID NO: 12017 - protein, 9 aa, synthetic construct
GANATAKVY

SEQ ID NO: 12018 - protein, 9 aa, synthetic construct
GANATAKVF

SEQ ID NO: 12019 - protein, 9 aa, synthetic construct
GANATGHVR

SEQ ID NO: 12020 - protein, 9 aa, synthetic construct
GANATGRVF

SEQ ID NO: 12021 - protein, 9 aa, synthetic construct
PLPASIRVY

SEQ ID NO: 12022 - protein, 9 aa, synthetic construct
GANASVHVR

SEQ ID NO: 12023 - protein, 9 aa, synthetic construct
GANASVRVH

SEQ ID NO: 12024 - protein, 9 aa, synthetic construct
PLPASIRVH

SEQ ID NO: 12025 - protein, 9 aa, synthetic construct
GANASLHLR

SEQ ID NO: 12026 - protein, 9 aa, synthetic construct
GANASAHLF

SEQ ID NO: 12027 - protein, 9 aa, synthetic construct
GANASIHLH

SEQ ID NO: 12028 - protein, 9 aa, synthetic construct
PLPASIKVY

SEQ ID NO: 12029 - protein, 9 aa, synthetic construct
GANASIRLK

SEQ ID NO: 12030 - protein, 9 aa, synthetic construct
GANASGHLY

SEQ ID NO: 12031 - protein, 9 aa, synthetic construct
GANASGHLF

SEQ ID NO: 12032 - protein, 9 aa, synthetic construct
GANASGHVH

SEQ ID NO: 12033 - protein, 9 aa, synthetic construct
GANASGRVY

SEQ ID NO: 12034 - protein, 9 aa, synthetic construct
GANAVVHVY

SEQ ID NO: 12035 - protein, 9 aa, synthetic construct
PLPASGHLH

SEQ ID NO: 12036 - protein, 9 aa, synthetic construct
GANAVVKVF

SEQ ID NO: 12037 - protein, 9 aa, synthetic construct
GANAVAHLH

SEQ ID NO: 12038 - protein, 9 aa, synthetic construct
GANAVARLH

SEQ ID NO: 12039 - protein, 9 aa, synthetic construct
PLNGSIKVK

SEQ ID NO: 12040 - protein, 9 aa, synthetic construct
GANAVGHVF

SEQ ID NO: 12041 - protein, 9 aa, synthetic construct
GANAGLHVR

SEQ ID NO: 12042 - protein, 9 aa, synthetic construct
GANAGAHVY

SEQ ID NO: 12043 - protein, 9 aa, synthetic construct
GANAGAHVR

SEQ ID NO: 12044 - protein, 9 aa, synthetic construct
GANAGAHVK

SEQ ID NO: 12045 - protein, 9 aa, synthetic construct
GANAGARVH

SEQ ID NO: 12046 - protein, 9 aa, synthetic construct
GANAGAKLY

SEQ ID NO: 12047 - protein, 9 aa, synthetic construct
GANAGAKVY

SEQ ID NO: 12048 - protein, 9 aa, synthetic construct
GANAGIRLY

SEQ ID NO: 12049 - protein, 9 aa, synthetic construct
GANAGIKLY

SEQ ID NO: 12050 - protein, 9 aa, synthetic construct
GANAGGHVH

SEQ ID NO: 12051 - protein, 9 aa, synthetic construct
GAQGAVHLK

SEQ ID NO: 12052 - protein, 9 aa, synthetic construct
GAQGALRVY

SEQ ID NO: 12053 - protein, 9 aa, synthetic construct
PLPAVVHVY

SEQ ID NO: 12054 - protein, 9 aa, synthetic construct
PLPAVVHVR

SEQ ID NO: 12055 - protein, 9 aa, synthetic construct
GAQGAAHVK

SEQ ID NO: 12056 - protein, 9 aa, synthetic construct
PLNGSGHLR

SEQ ID NO: 12057 - protein, 9 aa, synthetic construct
PLPAVVRLH

SEQ ID NO: 12058 - protein, 9 aa, synthetic construct
GAQGAGHLY

SEQ ID NO: 12059 - protein, 9 aa, synthetic construct
PLPAVVRVY

SEQ ID NO: 12060 - protein, 9 aa, synthetic construct
PLPAVVRVH

SEQ ID NO: 12061 - protein, 9 aa, synthetic construct
GAQGTVKLF

SEQ ID NO: 12062 - protein, 9 aa, synthetic construct
PLPAVVKLY

SEQ ID NO: 12063 - protein, 9 aa, synthetic construct
GAQGTAHLH

SEQ ID NO: 12064 - protein, 9 aa, synthetic construct
GAQGTAHLF

SEQ ID NO: 12065 - protein, 9 aa, synthetic construct
PLPAVVKLH

SEQ ID NO: 12066 - protein, 9 aa, synthetic construct
PLPAVVKLF

SEQ ID NO: 12067 - protein, 9 aa, synthetic construct
GAQGTIHLK

SEQ ID NO: 12068 - protein, 9 aa, synthetic construct
GAQGTIHVY

SEQ ID NO: 12069 - protein, 9 aa, synthetic construct
PLPAVVKVY

SEQ ID NO: 12070 - protein, 9 aa, synthetic construct
GAQGTIKLH

SEQ ID NO: 12071 - protein, 9 aa, synthetic construct
PLPAVVKVH

SEQ ID NO: 12072 - protein, 9 aa, synthetic construct
PLPAVVKVF

SEQ ID NO: 12073 - protein, 9 aa, synthetic construct
GAQGSVRLY

SEQ ID NO: 12074 - protein, 9 aa, synthetic construct
GAQGSVRVF

SEQ ID NO: 12075 - protein, 9 aa, synthetic construct
GAQGSLKVF

SEQ ID NO: 12076 - protein, 9 aa, synthetic construct
GAQGSIHLK

SEQ ID NO: 12077 - protein, 9 aa, synthetic construct
GAQGSIRVH

SEQ ID NO: 12078 - protein, 9 aa, synthetic construct
GAQGSGRVH

SEQ ID NO: 12079 - protein, 9 aa, synthetic construct
GAQGVVHLK

SEQ ID NO: 12080 - protein, 9 aa, synthetic construct
GAQGVVRVY

SEQ ID NO: 12081 - protein, 9 aa, synthetic construct
GAQGVVKVH

SEQ ID NO: 12082 - protein, 9 aa, synthetic construct
GAQGVLHLY

SEQ ID NO: 12083 - protein, 9 aa, synthetic construct
GAQGVLHLH

SEQ ID NO: 12084 - protein, 9 aa, synthetic construct
PLNGSGHVY

SEQ ID NO: 12085 - protein, 9 aa, synthetic construct
GAQGVIHLH

SEQ ID NO: 12086 - protein, 9 aa, synthetic construct
GAQGVIHVH

SEQ ID NO: 12087 - protein, 9 aa, synthetic construct
PLPAVLKVY

SEQ ID NO: 12088 - protein, 9 aa, synthetic construct
GAQGVGRVY

SEQ ID NO: 12089 - protein, 9 aa, synthetic construct
GAQGVGRVH

SEQ ID NO: 12090 - protein, 9 aa, synthetic construct
GAQGVGKLF

SEQ ID NO: 12091 - protein, 9 aa, synthetic construct
PLPAVAHLR

SEQ ID NO: 12092 - protein, 9 aa, synthetic construct
GAQGGVRVH

SEQ ID NO: 12093 - protein, 9 aa, synthetic construct
PLPAVAHVY

SEQ ID NO: 12094 - protein, 9 aa, synthetic construct
GAQGGLKVY

SEQ ID NO: 12095 - protein, 9 aa, synthetic construct
PLPAVAHVK

SEQ ID NO: 12096 - protein, 9 aa, synthetic construct
PLPAVARLY

SEQ ID NO: 12097 - protein, 9 aa, synthetic construct
GAQGGGKLF

SEQ ID NO: 12098 - protein, 9 aa, synthetic construct
GAQAAVRLR

SEQ ID NO: 12099 - protein, 9 aa, synthetic construct
GAQAAVRVF

SEQ ID NO: 12100 - protein, 9 aa, synthetic construct
GAQAALHVK

SEQ ID NO: 12101 - protein, 9 aa, synthetic construct
GAQAAAHVY

SEQ ID NO: 12102 - protein, 9 aa, synthetic construct
GAQAAAHVH

SEQ ID NO: 12103 - protein, 9 aa, synthetic construct
GAQAAIHVH

SEQ ID NO: 12104 - protein, 9 aa, synthetic construct
GAQAAIRVF

SEQ ID NO: 12105 - protein, 9 aa, synthetic construct
GAQAAGHLF

SEQ ID NO: 12106 - protein, 9 aa, synthetic construct
GAQAAGHVH

SEQ ID NO: 12107 - protein, 9 aa, synthetic construct
GAQAAGHVF

SEQ ID NO: 12108 - protein, 9 aa, synthetic construct
GAQATVHLY

SEQ ID NO: 12109 - protein, 9 aa, synthetic construct
GAQATVRLY

SEQ ID NO: 12110 - protein, 9 aa, synthetic construct
GAQATVKLH

SEQ ID NO: 12111 - protein, 9 aa, synthetic construct
GAQATLHVR

SEQ ID NO: 12112 - protein, 9 aa, synthetic construct
GAQATAHLY

SEQ ID NO: 12113 - protein, 9 aa, synthetic construct
GAQATIHLK

SEQ ID NO: 12114 - protein, 9 aa, synthetic construct
GAQATGKLH

SEQ ID NO: 12115 - protein, 9 aa, synthetic construct
GAQASVHLY

SEQ ID NO: 12116 - protein, 9 aa, synthetic construct
GAQASVKVF

SEQ ID NO: 12117 - protein, 9 aa, synthetic construct
GAQASAHLY

SEQ ID NO: 12118 - protein, 9 aa, synthetic construct
GAQASAHLK

SEQ ID NO: 12119 - protein, 9 aa, synthetic construct
GAQASAHLF

SEQ ID NO: 12120 - protein, 9 aa, synthetic construct
GAQASAHVY

SEQ ID NO: 12121 - protein, 9 aa, synthetic construct
GAQASIHVF

SEQ ID NO: 12122 - protein, 9 aa, synthetic construct
GAQAVVHLY

SEQ ID NO: 12123 - protein, 9 aa, synthetic construct
PLPAVGHLR

SEQ ID NO: 12124 - protein, 9 aa, synthetic construct
GAQAVVKLY

SEQ ID NO: 12125 - protein, 9 aa, synthetic construct
PLPAVGHLF

SEQ ID NO: 12126 - protein, 9 aa, synthetic construct
GAQAVAHVF

SEQ ID NO: 12127 - protein, 9 aa, synthetic construct
GAQAVIHLK

SEQ ID NO: 12128 - protein, 9 aa, synthetic construct
GAQAVIKLY

SEQ ID NO: 12129 - protein, 9 aa, synthetic construct
GAQAVGKVF

SEQ ID NO: 12130 - protein, 9 aa, synthetic construct
GAQAGVHVK

SEQ ID NO: 12131 - protein, 9 aa, synthetic construct
GAQAGVKLH

SEQ ID NO: 12132 - protein, 9 aa, synthetic construct
GAQAGVKVH

SEQ ID NO: 12133 - protein, 9 aa, synthetic construct
GAQAGAHLY

SEQ ID NO: 12134 - protein, 9 aa, synthetic construct
PLPAVGKVY

SEQ ID NO: 12135 - protein, 9 aa, synthetic construct
GAPGAARVH

SEQ ID NO: 12136 - protein, 9 aa, synthetic construct
GAPGAGHLH

SEQ ID NO: 12137 - protein, 9 aa, synthetic construct
GAPGAGRVH

SEQ ID NO: 12138 - protein, 9 aa, synthetic construct
GAPGTVRVY

SEQ ID NO: 12139 - protein, 9 aa, synthetic construct
GAPGTVRVH

SEQ ID NO: 12140 - protein, 9 aa, synthetic construct
GAPGTLHVY

SEQ ID NO: 12141 - protein, 9 aa, synthetic construct
GAPGTLHVR

SEQ ID NO: 12142 - protein, 9 aa, synthetic construct
GAPGTLHVH

SEQ ID NO: 12143 - protein, 9 aa, synthetic construct
PLPAGVRVF

SEQ ID NO: 12144 - protein, 9 aa, synthetic construct
GAPGTAHLH

SEQ ID NO: 12145 - protein, 9 aa, synthetic construct
GAPGTAHVF

SEQ ID NO: 12146 - protein, 9 aa, synthetic construct
PLPAGVKLH

SEQ ID NO: 12147 - protein, 9 aa, synthetic construct
PLPAGVKLK

SEQ ID NO: 12148 - protein, 9 aa, synthetic construct
PLPAGVKLF

SEQ ID NO: 12149 - protein, 9 aa, synthetic construct
PLPAGVKVY

SEQ ID NO: 12150 - protein, 9 aa, synthetic construct
GAPGTGHLF

SEQ ID NO: 12151 - protein, 9 aa, synthetic construct
GAPGTGHVH

SEQ ID NO: 12152 - protein, 9 aa, synthetic construct
PLPAGVKVF

SEQ ID NO: 12153 - protein, 9 aa, synthetic construct
GAPGSVHLR

SEQ ID NO: 12154 - protein, 9 aa, synthetic construct
GAPGSVHLH

SEQ ID NO: 12155 - protein, 9 aa, synthetic construct
GAPGSVHLK

SEQ ID NO: 12156 - protein, 9 aa, synthetic construct
GAPGSLHLH

SEQ ID NO: 12157 - protein, 9 aa, synthetic construct
GAPGSLRLY

SEQ ID NO: 12158 - protein, 9 aa, synthetic construct
GAPGSLKVY

SEQ ID NO: 12159 - protein, 9 aa, synthetic construct
GAPGSLKVF

SEQ ID NO: 12160 - protein, 9 aa, synthetic construct
GAPGSAHLH

SEQ ID NO: 12161 - protein, 9 aa, synthetic construct
GAPGSAKLF

SEQ ID NO: 12162 - protein, 9 aa, synthetic construct
GAPGSIHVR

SEQ ID NO: 12163 - protein, 9 aa, synthetic construct
GAPGSGRVK

SEQ ID NO: 12164 - protein, 9 aa, synthetic construct
GAPGVVRLF

SEQ ID NO: 12165 - protein, 9 aa, synthetic construct
GAPGVVRVY

SEQ ID NO: 12166 - protein, 9 aa, synthetic construct
GAPGVVRVH

SEQ ID NO: 12167 - protein, 9 aa, synthetic construct
GAPGVVRVF

SEQ ID NO: 12168 - protein, 9 aa, synthetic construct
GAPGVVKLH

SEQ ID NO: 12169 - protein, 9 aa, synthetic construct
GAPGVVKVF

SEQ ID NO: 12170 - protein, 9 aa, synthetic construct
GAPGVLRVF

SEQ ID NO: 12171 - protein, 9 aa, synthetic construct
PLNGSGKLY

SEQ ID NO: 12172 - protein, 9 aa, synthetic construct
GAPGVAHLR

SEQ ID NO: 12173 - protein, 9 aa, synthetic construct
GAPGVAHVK

SEQ ID NO: 12174 - protein, 9 aa, synthetic construct
GAPGVARLH

SEQ ID NO: 12175 - protein, 9 aa, synthetic construct
GAPGVAKLF

SEQ ID NO: 12176 - protein, 9 aa, synthetic construct
GAPGVAKVY

SEQ ID NO: 12177 - protein, 9 aa, synthetic construct
GAPGVIHLK

SEQ ID NO: 12178 - protein, 9 aa, synthetic construct
GAPGVIRLH

SEQ ID NO: 12179 - protein, 9 aa, synthetic construct
PLPAGLKVF

SEQ ID NO: 12180 - protein, 9 aa, synthetic construct
GAPGGVRVF

SEQ ID NO: 12181 - protein, 9 aa, synthetic construct
GAPGGVKVF

SEQ ID NO: 12182 - protein, 9 aa, synthetic construct
GAPGGAHLY

SEQ ID NO: 12183 - protein, 9 aa, synthetic construct
PLPAGAHVH

SEQ ID NO: 12184 - protein, 9 aa, synthetic construct
PLPAGAHVK

SEQ ID NO: 12185 - protein, 9 aa, synthetic construct
PLPAGAHVF

SEQ ID NO: 12186 - protein, 9 aa, synthetic construct
GAPGGIHVK

SEQ ID NO: 12187 - protein, 9 aa, synthetic construct
GAPGGGHLH

SEQ ID NO: 12188 - protein, 9 aa, synthetic construct
GAPGGGRVY

SEQ ID NO: 12189 - protein, 9 aa, synthetic construct
GAPGGGKVH

SEQ ID NO: 12190 - protein, 9 aa, synthetic construct
GAPAAVHLH

SEQ ID NO: 12191 - protein, 9 aa, synthetic construct
PLPAGARVR

SEQ ID NO: 12192 - protein, 9 aa, synthetic construct
GAPAAVKLF

SEQ ID NO: 12193 - protein, 9 aa, synthetic construct
PLPAGAKLY

SEQ ID NO: 12194 - protein, 9 aa, synthetic construct
PLPAGAKLR

SEQ ID NO: 12195 - protein, 9 aa, synthetic construct
GAPAAAHVY

SEQ ID NO: 12196 - protein, 9 aa, synthetic construct
GAPAAAHVH

SEQ ID NO: 12197 - protein, 9 aa, synthetic construct
PLPAGAKLH

SEQ ID NO: 12198 - protein, 9 aa, synthetic construct
GAPAAIHLK

SEQ ID NO: 12199 - protein, 9 aa, synthetic construct
PLPAGAKVH

SEQ ID NO: 12200 - protein, 9 aa, synthetic construct
GAPAAGKLH

SEQ ID NO: 12201 - protein, 9 aa, synthetic construct
GAPATLHVF

SEQ ID NO: 12202 - protein, 9 aa, synthetic construct
PLPAGIHVH

SEQ ID NO: 12203 - protein, 9 aa, synthetic construct
GAPATAKLY

SEQ ID NO: 12204 - protein, 9 aa, synthetic construct
GAPATAKVY

SEQ ID NO: 12205 - protein, 9 aa, synthetic construct
GAPATIHLH

SEQ ID NO: 12206 - protein, 9 aa, synthetic construct
PLNGSGKVY

SEQ ID NO: 12207 - protein, 9 aa, synthetic construct
GAPATIKVY

SEQ ID NO: 12208 - protein, 9 aa, synthetic construct
GAPATGRLY

SEQ ID NO: 12209 - protein, 9 aa, synthetic construct
GAPASVHLY

SEQ ID NO: 12210 - protein, 9 aa, synthetic construct
GAPASVKLH

SEQ ID NO: 12211 - protein, 9 aa, synthetic construct
GAPASAHLH

SEQ ID NO: 12212 - protein, 9 aa, synthetic construct
GAPASIHLH

SEQ ID NO: 12213 - protein, 9 aa, synthetic construct
GAPASIKLF

SEQ ID NO: 12214 - protein, 9 aa, synthetic construct
GAPAVVHVH

SEQ ID NO: 12215 - protein, 9 aa, synthetic construct
PLPAGGHLR

SEQ ID NO: 12216 - protein, 9 aa, synthetic construct
GAPAVVRVF

SEQ ID NO: 12217 - protein, 9 aa, synthetic construct
PLPAGGHVH

SEQ ID NO: 12218 - protein, 9 aa, synthetic construct
GAPAVIHVH

SEQ ID NO: 12219 - protein, 9 aa, synthetic construct
PLPAGGRLY

SEQ ID NO: 12220 - protein, 9 aa, synthetic construct
GAPAVIRLR

SEQ ID NO: 12221 - protein, 9 aa, synthetic construct
GAPAVIRVK

SEQ ID NO: 12222 - protein, 9 aa, synthetic construct
GAPAVIKVR

SEQ ID NO: 12223 - protein, 9 aa, synthetic construct
GAPAVIKVH

SEQ ID NO: 12224 - protein, 9 aa, synthetic construct
PLPAGGRLH

SEQ ID NO: 12225 - protein, 9 aa, synthetic construct
GAPAGVRLY

SEQ ID NO: 12226 - protein, 9 aa, synthetic construct
PLPAGGKVH

SEQ ID NO: 12227 - protein, 9 aa, synthetic construct
GVNGALRLY

SEQ ID NO: 12228 - protein, 9 aa, synthetic construct
GVNGALKLY

SEQ ID NO: 12229 - protein, 9 aa, synthetic construct
GVNGAIHLH

SEQ ID NO: 12230 - protein, 9 aa, synthetic construct
PLNGVVHLR

SEQ ID NO: 12231 - protein, 9 aa, synthetic construct
GVNGAIKLF

SEQ ID NO: 12232 - protein, 9 aa, synthetic construct
PTNGAVRLH

SEQ ID NO: 12233 - protein, 9 aa, synthetic construct
GVNGAGRLF

SEQ ID NO: 12234 - protein, 9 aa, synthetic construct
PTNGAVRLF

SEQ ID NO: 12235 - protein, 9 aa, synthetic construct
GVNGAGKLY

SEQ ID NO: 12236 - protein, 9 aa, synthetic construct
GVNGAGKVY

SEQ ID NO: 12237 - protein, 9 aa, synthetic construct
GVNGTVRLH

SEQ ID NO: 12238 - protein, 9 aa, synthetic construct
GVNGTVRLF

SEQ ID NO: 12239 - protein, 9 aa, synthetic construct
GVNGTVKLF

SEQ ID NO: 12240 - protein, 9 aa, synthetic construct
GVNGTLHLK

SEQ ID NO: 12241 - protein, 9 aa, synthetic construct
GVNGTLHVH

SEQ ID NO: 12242 - protein, 9 aa, synthetic construct
PLNGVVHLH

SEQ ID NO: 12243 - protein, 9 aa, synthetic construct
GVNGTAHVK

SEQ ID NO: 12244 - protein, 9 aa, synthetic construct
GVNGTARLY

SEQ ID NO: 12245 - protein, 9 aa, synthetic construct
GVNGTIHLY

SEQ ID NO: 12246 - protein, 9 aa, synthetic construct
GVNGTIHLH

SEQ ID NO: 12247 - protein, 9 aa, synthetic construct
GVNGTIHLK

SEQ ID NO: 12248 - protein, 9 aa, synthetic construct
GVNGTIHVR

SEQ ID NO: 12249 - protein, 9 aa, synthetic construct
GVNGTIHVH

SEQ ID NO: 12250 - protein, 9 aa, synthetic construct
GVNGTIRLR

SEQ ID NO: 12251 - protein, 9 aa, synthetic construct
GVNGTGHVF

SEQ ID NO: 12252 - protein, 9 aa, synthetic construct
PLNGVVHLK

SEQ ID NO: 12253 - protein, 9 aa, synthetic construct
PTNGALHLY

SEQ ID NO: 12254 - protein, 9 aa, synthetic construct
PTNGALHLH

SEQ ID NO: 12255 - protein, 9 aa, synthetic construct
GVNGSLHLK

SEQ ID NO: 12256 - protein, 9 aa, synthetic construct
GVNGSLHVY

SEQ ID NO: 12257 - protein, 9 aa, synthetic construct
GVNGSLHVR

SEQ ID NO: 12258 - protein, 9 aa, synthetic construct
GVNGSLHVK

SEQ ID NO: 12259 - protein, 9 aa, synthetic construct
GVNGSLHVF

SEQ ID NO: 12260 - protein, 9 aa, synthetic construct
PTNGALHVR

SEQ ID NO: 12261 - protein, 9 aa, synthetic construct
GVNGSAHLR

SEQ ID NO: 12262 - protein, 9 aa, synthetic construct
GVNGSAHVK

SEQ ID NO: 12263 - protein, 9 aa, synthetic construct
GVNGSIHVR

SEQ ID NO: 12264 - protein, 9 aa, synthetic construct
GVNGSGHLH

SEQ ID NO: 12265 - protein, 9 aa, synthetic construct
GVNGSGHVF

SEQ ID NO: 12266 - protein, 9 aa, synthetic construct
GVNGSGKLH

SEQ ID NO: 12267 - protein, 9 aa, synthetic construct
GVNGSGKLF

SEQ ID NO: 12268 - protein, 9 aa, synthetic construct
GVNGVVHLK

SEQ ID NO: 12269 - protein, 9 aa, synthetic construct
GVNGVVHVY

SEQ ID NO: 12270 - protein, 9 aa, synthetic construct
GVNGVVKLF

SEQ ID NO: 12271 - protein, 9 aa, synthetic construct
GVNGVVKVY

SEQ ID NO: 12272 - protein, 9 aa, synthetic construct
GVNGVLRLY

SEQ ID NO: 12273 - protein, 9 aa, synthetic construct
GVNGVAHLY

SEQ ID NO: 12274 - protein, 9 aa, synthetic construct
GVNGVAKVF

SEQ ID NO: 12275 - protein, 9 aa, synthetic construct
GVNGVIHLK

SEQ ID NO: 12276 - protein, 9 aa, synthetic construct
GVNGVIHVH

SEQ ID NO: 12277 - protein, 9 aa, synthetic construct
GVNGVIRLR

SEQ ID NO: 12278 - protein, 9 aa, synthetic construct
GVNGVIRLH

SEQ ID NO: 12279 - protein, 9 aa, synthetic construct
GVNGVIRVH

SEQ ID NO: 12280 - protein, 9 aa, synthetic construct
GVNGVIKLY

SEQ ID NO: 12281 - protein, 9 aa, synthetic construct
GVNGVIKLH

SEQ ID NO: 12282 - protein, 9 aa, synthetic construct
GVNGVGHLY

SEQ ID NO: 12283 - protein, 9 aa, synthetic construct
GVNGGLHVR

SEQ ID NO: 12284 - protein, 9 aa, synthetic construct
GVNGGLHVK

SEQ ID NO: 12285 - protein, 9 aa, synthetic construct
GVNGGLKLF

SEQ ID NO: 12286 - protein, 9 aa, synthetic construct
GVNGGIHVR

SEQ ID NO: 12287 - protein, 9 aa, synthetic construct
PTNGAARLY

SEQ ID NO: 12288 - protein, 9 aa, synthetic construct
GVNGGIRVF

SEQ ID NO: 12289 - protein, 9 aa, synthetic construct
GVNGGIKLY

SEQ ID NO: 12290 - protein, 9 aa, synthetic construct
GVNGGGRLR

SEQ ID NO: 12291 - protein, 9 aa, synthetic construct
PTNGAARVH

SEQ ID NO: 12292 - protein, 9 aa, synthetic construct
PTNGAARVK

SEQ ID NO: 12293 - protein, 9 aa, synthetic construct
PLNGVVHVK

SEQ ID NO: 12294 - protein, 9 aa, synthetic construct
GVNAAIHVH

SEQ ID NO: 12295 - protein, 9 aa, synthetic construct
GVNAAIRVF

SEQ ID NO: 12296 - protein, 9 aa, synthetic construct
GVNAAIKVF

SEQ ID NO: 12297 - protein, 9 aa, synthetic construct
PTNGAAKVH

SEQ ID NO: 12298 - protein, 9 aa, synthetic construct
GVNATVHLY

SEQ ID NO: 12299 - protein, 9 aa, synthetic construct
GVNATVRVF

SEQ ID NO: 12300 - protein, 9 aa, synthetic construct
GVNATAHLY

SEQ ID NO: 12301 - protein, 9 aa, synthetic construct
GVNATAHLH

SEQ ID NO: 12302 - protein, 9 aa, synthetic construct
GVNATAHVH

SEQ ID NO: 12303 - protein, 9 aa, synthetic construct
PTNGAIHVF

SEQ ID NO: 12304 - protein, 9 aa, synthetic construct
GVNATIHLH

SEQ ID NO: 12305 - protein, 9 aa, synthetic construct
GVNATIKLH

SEQ ID NO: 12306 - protein, 9 aa, synthetic construct
GVNASVHLR

SEQ ID NO: 12307 - protein, 9 aa, synthetic construct
GVNASLHVK

SEQ ID NO: 12308 - protein, 9 aa, synthetic construct
GVNASAHLY

SEQ ID NO: 12309 - protein, 9 aa, synthetic construct
GVNASAHLH

SEQ ID NO: 12310 - protein, 9 aa, synthetic construct
GVNASAHVY

SEQ ID NO: 12311 - protein, 9 aa, synthetic construct
GVNASAHVK

SEQ ID NO: 12312 - protein, 9 aa, synthetic construct
GVNASAKLF

SEQ ID NO: 12313 - protein, 9 aa, synthetic construct
GVNASIHVH

SEQ ID NO: 12314 - protein, 9 aa, synthetic construct
PTNGAIKVF

SEQ ID NO: 12315 - protein, 9 aa, synthetic construct
GVNASGKVF

SEQ ID NO: 12316 - protein, 9 aa, synthetic construct
GVNAVVHVH

SEQ ID NO: 12317 - protein, 9 aa, synthetic construct
GVNAVLRVY

SEQ ID NO: 12318 - protein, 9 aa, synthetic construct
PTNGAGHVH

SEQ ID NO: 12319 - protein, 9 aa, synthetic construct
GVNAVIHVY

SEQ ID NO: 12320 - protein, 9 aa, synthetic construct
GVNAVIHVH

SEQ ID NO: 12321 - protein, 9 aa, synthetic construct
GVNAVIRLY

SEQ ID NO: 12322 - protein, 9 aa, synthetic construct
GVNAVIKLF

SEQ ID NO: 12323 - protein, 9 aa, synthetic construct
PTNGAGRLH

SEQ ID NO: 12324 - protein, 9 aa, synthetic construct
GVNAVGRLY

SEQ ID NO: 12325 - protein, 9 aa, synthetic construct
GVNAVGRVF

SEQ ID NO: 12326 - protein, 9 aa, synthetic construct
GVNAGVRVY

SEQ ID NO: 12327 - protein, 9 aa, synthetic construct
PTNGAGKLY

SEQ ID NO: 12328 - protein, 9 aa, synthetic construct
GVNAGLKLF

SEQ ID NO: 12329 - protein, 9 aa, synthetic construct
PTNGAGKLH

SEQ ID NO: 12330 - protein, 9 aa, synthetic construct
GVNAGGRVF

SEQ ID NO: 12331 - protein, 9 aa, synthetic construct
GVNAGGKLF

SEQ ID NO: 12332 - protein, 9 aa, synthetic construct
PLNGVVRVY

SEQ ID NO: 12333 - protein, 9 aa, synthetic construct
GVQGAVRLK

SEQ ID NO: 12334 - protein, 9 aa, synthetic construct
GVQGAAHLF

SEQ ID NO: 12335 - protein, 9 aa, synthetic construct
GVQGAARLF

SEQ ID NO: 12336 - protein, 9 aa, synthetic construct
GVQGAAKLY

SEQ ID NO: 12337 - protein, 9 aa, synthetic construct
GVQGAGRLF

SEQ ID NO: 12338 - protein, 9 aa, synthetic construct
GVQGTVHVK

SEQ ID NO: 12339 - protein, 9 aa, synthetic construct
GVQGTLKVR

SEQ ID NO: 12340 - protein, 9 aa, synthetic construct
GVQGTAHLH

SEQ ID NO: 12341 - protein, 9 aa, synthetic construct
GVQGTARVR

SEQ ID NO: 12342 - protein, 9 aa, synthetic construct
GVQGTAKLH

SEQ ID NO: 12343 - protein, 9 aa, synthetic construct
GVQGTIRLH

SEQ ID NO: 12344 - protein, 9 aa, synthetic construct
GVQGTGHLY

SEQ ID NO: 12345 - protein, 9 aa, synthetic construct
GVQGTGHLK

SEQ ID NO: 12346 - protein, 9 aa, synthetic construct
GVQGTGHLF

SEQ ID NO: 12347 - protein, 9 aa, synthetic construct
GVQGTGHVY

SEQ ID NO: 12348 - protein, 9 aa, synthetic construct
GVQGTGHVK

SEQ ID NO: 12349 - protein, 9 aa, synthetic construct
GVQGTGHVF

SEQ ID NO: 12350 - protein, 9 aa, synthetic construct
GVQGTGKLH

SEQ ID NO: 12351 - protein, 9 aa, synthetic construct
GVQGTGKVF

SEQ ID NO: 12352 - protein, 9 aa, synthetic construct
GVQGSVHLY

SEQ ID NO: 12353 - protein, 9 aa, synthetic construct
GVQGSVKLF

SEQ ID NO: 12354 - protein, 9 aa, synthetic construct
PTNGTLHLK

SEQ ID NO: 12355 - protein, 9 aa, synthetic construct
PTNGTLHVR

SEQ ID NO: 12356 - protein, 9 aa, synthetic construct
GVQGSAHVY

SEQ ID NO: 12357 - protein, 9 aa, synthetic construct
PTNGTLHVF

SEQ ID NO: 12358 - protein, 9 aa, synthetic construct
GVQGSIHVK

SEQ ID NO: 12359 - protein, 9 aa, synthetic construct
PLNGVVRVF

SEQ ID NO: 12360 - protein, 9 aa, synthetic construct
GVQGSGHLY

SEQ ID NO: 12361 - protein, 9 aa, synthetic construct
GVQGSGHVR

SEQ ID NO: 12362 - protein, 9 aa, synthetic construct
GVQGSGHVH

SEQ ID NO: 12363 - protein, 9 aa, synthetic construct
GVQGVVHVY

SEQ ID NO: 12364 - protein, 9 aa, synthetic construct
GVQGVVRLY

SEQ ID NO: 12365 - protein, 9 aa, synthetic construct
GVQGVVKLH

SEQ ID NO: 12366 - protein, 9 aa, synthetic construct
PLNGVVKLY

SEQ ID NO: 12367 - protein, 9 aa, synthetic construct
GVQGVAHLF

SEQ ID NO: 12368 - protein, 9 aa, synthetic construct
PTNGTLKLH

SEQ ID NO: 12369 - protein, 9 aa, synthetic construct
PTNGTLKLF

SEQ ID NO: 12370 - protein, 9 aa, synthetic construct
GVQGVIHVY

SEQ ID NO: 12371 - protein, 9 aa, synthetic construct
GVQGVIHVR

SEQ ID NO: 12372 - protein, 9 aa, synthetic construct
GVQGVIHVF

SEQ ID NO: 12373 - protein, 9 aa, synthetic construct
PTNGTLKVY

SEQ ID NO: 12374 - protein, 9 aa, synthetic construct
GVQGVIKVH

SEQ ID NO: 12375 - protein, 9 aa, synthetic construct
GVQGGVRVH

SEQ ID NO: 12376 - protein, 9 aa, synthetic construct
GVQGGVKVH

SEQ ID NO: 12377 - protein, 9 aa, synthetic construct
GVQGGARVR

SEQ ID NO: 12378 - protein, 9 aa, synthetic construct
GVQGGAKVH

SEQ ID NO: 12379 - protein, 9 aa, synthetic construct
GVQGGIHVR

SEQ ID NO: 12380 - protein, 9 aa, synthetic construct
PLNGVVKLH

SEQ ID NO: 12381 - protein, 9 aa, synthetic construct
GVQGGIRVF

SEQ ID NO: 12382 - protein, 9 aa, synthetic construct
GVQGGGRLK

SEQ ID NO: 12383 - protein, 9 aa, synthetic construct
GVQGGGRLF

SEQ ID NO: 12384 - protein, 9 aa, synthetic construct
GVQAAVKVF

SEQ ID NO: 12385 - protein, 9 aa, synthetic construct
GVQAALKLY

SEQ ID NO: 12386 - protein, 9 aa, synthetic construct
GVQAAAHLH

SEQ ID NO: 12387 - protein, 9 aa, synthetic construct
GVQAAAHVY

SEQ ID NO: 12388 - protein, 9 aa, synthetic construct
GVQAAIRVH

SEQ ID NO: 12389 - protein, 9 aa, synthetic construct
GVQAAIKVY

SEQ ID NO: 12390 - protein, 9 aa, synthetic construct
GVQATVHVK

SEQ ID NO: 12391 - protein, 9 aa, synthetic construct
PTNGTIHLF

SEQ ID NO: 12392 - protein, 9 aa, synthetic construct
GVQATAHLH

SEQ ID NO: 12393 - protein, 9 aa, synthetic construct
GVQATIHLK

SEQ ID NO: 12394 - protein, 9 aa, synthetic construct
PLNGVVKVY

SEQ ID NO: 12395 - protein, 9 aa, synthetic construct
PTNGTIRLH

SEQ ID NO: 12396 - protein, 9 aa, synthetic construct
GVQATGHLY

SEQ ID NO: 12397 - protein, 9 aa, synthetic construct
PTNGTIKLY

SEQ ID NO: 12398 - protein, 9 aa, synthetic construct
GVQASAHLH

SEQ ID NO: 12399 - protein, 9 aa, synthetic construct
GVQASAKLF

SEQ ID NO: 12400 - protein, 9 aa, synthetic construct
GVQASAKVR

SEQ ID NO: 12401 - protein, 9 aa, synthetic construct
GVQASIHLF

SEQ ID NO: 12402 - protein, 9 aa, synthetic construct
GVQASIHVY

SEQ ID NO: 12403 - protein, 9 aa, synthetic construct
GVQAVLHVR

SEQ ID NO: 12404 - protein, 9 aa, synthetic construct
GVQAVAHVF

SEQ ID NO: 12405 - protein, 9 aa, synthetic construct
PTNGTGRLH

SEQ ID NO: 12406 - protein, 9 aa, synthetic construct
GVQAVGKVY

SEQ ID NO: 12407 - protein, 9 aa, synthetic construct
GVQAVGKVF

SEQ ID NO: 12408 - protein, 9 aa, synthetic construct
PLNGVVKVF

SEQ ID NO: 12409 - protein, 9 aa, synthetic construct
GVQAGAHVH

SEQ ID NO: 12410 - protein, 9 aa, synthetic construct
PTNGTGKLF

SEQ ID NO: 12411 - protein, 9 aa, synthetic construct
PTNGTGKVY

SEQ ID NO: 12412 - protein, 9 aa, synthetic construct
GVQAGGHVK

SEQ ID NO: 12413 - protein, 9 aa, synthetic construct
GVPGAVRVH

SEQ ID NO: 12414 - protein, 9 aa, synthetic construct
PTNGSVHLF

SEQ ID NO: 12415 - protein, 9 aa, synthetic construct
GVPGALKVY

SEQ ID NO: 12416 - protein, 9 aa, synthetic construct
PTNGSVHVH

SEQ ID NO: 12417 - protein, 9 aa, synthetic construct
GVPGAARVY

SEQ ID NO: 12418 - protein, 9 aa, synthetic construct
GVPGAAKLH

SEQ ID NO: 12419 - protein, 9 aa, synthetic construct
PTNGSVHVF

SEQ ID NO: 12420 - protein, 9 aa, synthetic construct
GVPGAIHLH

SEQ ID NO: 12421 - protein, 9 aa, synthetic construct
GVPGAIHVR

SEQ ID NO: 12422 - protein, 9 aa, synthetic construct
GVPGAIKLF

SEQ ID NO: 12423 - protein, 9 aa, synthetic construct
GVPGAGKLY

SEQ ID NO: 12424 - protein, 9 aa, synthetic construct
GVPGTVHLF

SEQ ID NO: 12425 - protein, 9 aa, synthetic construct
GVPGTVKVY

SEQ ID NO: 12426 - protein, 9 aa, synthetic construct
GVPGTVKVH

SEQ ID NO: 12427 - protein, 9 aa, synthetic construct
GVPGTLHVH

SEQ ID NO: 12428 - protein, 9 aa, synthetic construct
GVPGTAHLY

SEQ ID NO: 12429 - protein, 9 aa, synthetic construct
GVPGTAHVK

SEQ ID NO: 12430 - protein, 9 aa, synthetic construct
GVPGTAKVY

SEQ ID NO: 12431 - protein, 9 aa, synthetic construct
GVPGTIHLR

SEQ ID NO: 12432 - protein, 9 aa, synthetic construct
GVPGTIHLK

SEQ ID NO: 12433 - protein, 9 aa, synthetic construct
GVPGTIRLY

SEQ ID NO: 12434 - protein, 9 aa, synthetic construct
GVPGTIRLR

SEQ ID NO: 12435 - protein, 9 aa, synthetic construct
GVPGSVRLR

SEQ ID NO: 12436 - protein, 9 aa, synthetic construct
GVPGSARLY

SEQ ID NO: 12437 - protein, 9 aa, synthetic construct
PTNGSLHVF

SEQ ID NO: 12438 - protein, 9 aa, synthetic construct
GVPGVVKVY

SEQ ID NO: 12439 - protein, 9 aa, synthetic construct
GVPGVAHVR

SEQ ID NO: 12440 - protein, 9 aa, synthetic construct
GVPGVIHLK

SEQ ID NO: 12441 - protein, 9 aa, synthetic construct
GVPGVIHVH

SEQ ID NO: 12442 - protein, 9 aa, synthetic construct
PTNGSLKVY

SEQ ID NO: 12443 - protein, 9 aa, synthetic construct
GVPGVIRLY

SEQ ID NO: 12444 - protein, 9 aa, synthetic construct
GVPGVIKLF

SEQ ID NO: 12445 - protein, 9 aa, synthetic construct
GVPGVGHLH

SEQ ID NO: 12446 - protein, 9 aa, synthetic construct
PTNGSLKVF

SEQ ID NO: 12447 - protein, 9 aa, synthetic construct
GVPGGVKVF

SEQ ID NO: 12448 - protein, 9 aa, synthetic construct
GVPGGLHVH

SEQ ID NO: 12449 - protein, 9 aa, synthetic construct
GVPGGLKVH

SEQ ID NO: 12450 - protein, 9 aa, synthetic construct
GVPGGAHLF

SEQ ID NO: 12451 - protein, 9 aa, synthetic construct
GVPGGAHVH

SEQ ID NO: 12452 - protein, 9 aa, synthetic construct
GVPGGAHVK

SEQ ID NO: 12453 - protein, 9 aa, synthetic construct
GVPGGARLY

SEQ ID NO: 12454 - protein, 9 aa, synthetic construct
GVPGGAKLY

SEQ ID NO: 12455 - protein, 9 aa, synthetic construct
PLNGVLHVH

SEQ ID NO: 12456 - protein, 9 aa, synthetic construct
GVPGGIRLH

SEQ ID NO: 12457 - protein, 9 aa, synthetic construct
GVPGGIKLY

SEQ ID NO: 12458 - protein, 9 aa, synthetic construct
GVPGGGHLF

SEQ ID NO: 12459 - protein, 9 aa, synthetic construct
GVPGGGHVH

SEQ ID NO: 12460 - protein, 9 aa, synthetic construct
GVPGGGHVK

SEQ ID NO: 12461 - protein, 9 aa, synthetic construct
GVPGGGHVF

SEQ ID NO: 12462 - protein, 9 aa, synthetic construct
GVPGGGRLF

SEQ ID NO: 12463 - protein, 9 aa, synthetic construct
GVPGGGKLY

SEQ ID NO: 12464 - protein, 9 aa, synthetic construct
GVPGGGKLR

SEQ ID NO: 12465 - protein, 9 aa, synthetic construct
GVPGGGKLH

SEQ ID NO: 12466 - protein, 9 aa, synthetic construct
GVPGGGKVY

SEQ ID NO: 12467 - protein, 9 aa, synthetic construct
GVPGGGKVF

SEQ ID NO: 12468 - protein, 9 aa, synthetic construct
GVPAAVKLF

SEQ ID NO: 12469 - protein, 9 aa, synthetic construct
GVPAALHVK

SEQ ID NO: 12470 - protein, 9 aa, synthetic construct
GVPAAAHVY

SEQ ID NO: 12471 - protein, 9 aa, synthetic construct
GVPAAAHVK

SEQ ID NO: 12472 - protein, 9 aa, synthetic construct
PTNGSAKVH

SEQ ID NO: 12473 - protein, 9 aa, synthetic construct
GVPAAGHLF

SEQ ID NO: 12474 - protein, 9 aa, synthetic construct
GVPAAGKLY

SEQ ID NO: 12475 - protein, 9 aa, synthetic construct
GVPAAGKVY

SEQ ID NO: 12476 - protein, 9 aa, synthetic construct
GVPAAGKVF

SEQ ID NO: 12477 - protein, 9 aa, synthetic construct
PTNGSIHLY

SEQ ID NO: 12478 - protein, 9 aa, synthetic construct
GVPATVRVF

SEQ ID NO: 12479 - protein, 9 aa, synthetic construct
GVPATAHLY

SEQ ID NO: 12480 - protein, 9 aa, synthetic construct
GVPATAHVR

SEQ ID NO: 12481 - protein, 9 aa, synthetic construct
GVPATAHVH

SEQ ID NO: 12482 - protein, 9 aa, synthetic construct
PTNGSIHVK

SEQ ID NO: 12483 - protein, 9 aa, synthetic construct
GVPATAKVY

SEQ ID NO: 12484 - protein, 9 aa, synthetic construct
PTNGSIHVF

SEQ ID NO: 12485 - protein, 9 aa, synthetic construct
GVPATIHLK

SEQ ID NO: 12486 - protein, 9 aa, synthetic construct
GVPATGHLY

SEQ ID NO: 12487 - protein, 9 aa, synthetic construct
GVPATGHLR

SEQ ID NO: 12488 - protein, 9 aa, synthetic construct
GVPATGHLK

SEQ ID NO: 12489 - protein, 9 aa, synthetic construct
GVPATGHVY

SEQ ID NO: 12490 - protein, 9 aa, synthetic construct
GVPATGHVK

SEQ ID NO: 12491 - protein, 9 aa, synthetic construct
GVPATGKLH

SEQ ID NO: 12492 - protein, 9 aa, synthetic construct
PTNGSIRVH

SEQ ID NO: 12493 - protein, 9 aa, synthetic construct
GVPASVKLY

SEQ ID NO: 12494 - protein, 9 aa, synthetic construct
GVPASVKVH

SEQ ID NO: 12495 - protein, 9 aa, synthetic construct
PTNGSIRVF

SEQ ID NO: 12496 - protein, 9 aa, synthetic construct
GVPASAHLR

SEQ ID NO: 12497 - protein, 9 aa, synthetic construct
GVPASIHLR

SEQ ID NO: 12498 - protein, 9 aa, synthetic construct
GVPASGHVY

SEQ ID NO: 12499 - protein, 9 aa, synthetic construct
PTNGSGHLR

SEQ ID NO: 12500 - protein, 9 aa, synthetic construct
GVPAVVRVK

SEQ ID NO: 12501 - protein, 9 aa, synthetic construct
GVPAVVKLY

SEQ ID NO: 12502 - protein, 9 aa, synthetic construct
GVPAVVKVY

SEQ ID NO: 12503 - protein, 9 aa, synthetic construct
GVPAVAHLR

SEQ ID NO: 12504 - protein, 9 aa, synthetic construct
GVPAVARLH

SEQ ID NO: 12505 - protein, 9 aa, synthetic construct
GVPAVAKLY

SEQ ID NO: 12506 - protein, 9 aa, synthetic construct
GVPAVIHVK

SEQ ID NO: 12507 - protein, 9 aa, synthetic construct
GVPAVGHLY

SEQ ID NO: 12508 - protein, 9 aa, synthetic construct
GVPAVGHLF

SEQ ID NO: 12509 - protein, 9 aa, synthetic construct
PTNGSGRVY

SEQ ID NO: 12510 - protein, 9 aa, synthetic construct
GVPAGVRLF

SEQ ID NO: 12511 - protein, 9 aa, synthetic construct
GVPAGVRVH

SEQ ID NO: 12512 - protein, 9 aa, synthetic construct
GVPAGVKVF

SEQ ID NO: 12513 - protein, 9 aa, synthetic construct
PTNGSGKLY

SEQ ID NO: 12514 - protein, 9 aa, synthetic construct
GVPAGAHVF

SEQ ID NO: 12515 - protein, 9 aa, synthetic construct
GVPAGAKLY

SEQ ID NO: 12516 - protein, 9 aa, synthetic construct
GVPAGIRLH

SEQ ID NO: 12517 - protein, 9 aa, synthetic construct
GVPAGIKLF

SEQ ID NO: 12518 - protein, 9 aa, synthetic construct
GVPAGGKLY

SEQ ID NO: 12519 - protein, 9 aa, synthetic construct
GVPAGGKLF

SEQ ID NO: 12520 - protein, 9 aa, synthetic construct
GINGAVKVH

SEQ ID NO: 12521 - protein, 9 aa, synthetic construct
GINGAAKLY

SEQ ID NO: 12522 - protein, 9 aa, synthetic construct
GINGAIHLK

SEQ ID NO: 12523 - protein, 9 aa, synthetic construct
GINGAIHVH

SEQ ID NO: 12524 - protein, 9 aa, synthetic construct
GINGAIRLH

SEQ ID NO: 12525 - protein, 9 aa, synthetic construct
GINGAIKLF

SEQ ID NO: 12526 - protein, 9 aa, synthetic construct
GINGAIKVY

SEQ ID NO: 12527 - protein, 9 aa, synthetic construct
GINGAIKVF

SEQ ID NO: 12528 - protein, 9 aa, synthetic construct
GINGAGHLH

SEQ ID NO: 12529 - protein, 9 aa, synthetic construct
GINGAGRLH

SEQ ID NO: 12530 - protein, 9 aa, synthetic construct
GINGAGKLH

SEQ ID NO: 12531 - protein, 9 aa, synthetic construct
GINGTVRLH

SEQ ID NO: 12532 - protein, 9 aa, synthetic construct
GINGTVKLY

SEQ ID NO: 12533 - protein, 9 aa, synthetic construct
GINGTVKVR

SEQ ID NO: 12534 - protein, 9 aa, synthetic construct
PTNGVVRVF

SEQ ID NO: 12535 - protein, 9 aa, synthetic construct
GINGTLKLF

SEQ ID NO: 12536 - protein, 9 aa, synthetic construct
GINGTARLY

SEQ ID NO: 12537 - protein, 9 aa, synthetic construct
GINGTARVH

SEQ ID NO: 12538 - protein, 9 aa, synthetic construct
PTNGVVKLF

SEQ ID NO: 12539 - protein, 9 aa, synthetic construct
GINGTIHLK

SEQ ID NO: 12540 - protein, 9 aa, synthetic construct
GINGTIHVH

SEQ ID NO: 12541 - protein, 9 aa, synthetic construct
PTNGVVKVY

SEQ ID NO: 12542 - protein, 9 aa, synthetic construct
GINGTIKVF

SEQ ID NO: 12543 - protein, 9 aa, synthetic construct
GINGTGRLH

SEQ ID NO: 12544 - protein, 9 aa, synthetic construct
GINGTGKLY

SEQ ID NO: 12545 - protein, 9 aa, synthetic construct
GINGSVRVK

SEQ ID NO: 12546 - protein, 9 aa, synthetic construct
PTNGVLHLH

SEQ ID NO: 12547 - protein, 9 aa, synthetic construct
GINGSVKLY

SEQ ID NO: 12548 - protein, 9 aa, synthetic construct
GINGSVKVH

SEQ ID NO: 12549 - protein, 9 aa, synthetic construct
GINGSLKVF

SEQ ID NO: 12550 - protein, 9 aa, synthetic construct
GINGSAHLH

SEQ ID NO: 12551 - protein, 9 aa, synthetic construct
PTNGVLHVK

SEQ ID NO: 12552 - protein, 9 aa, synthetic construct
GINGSIHLH

SEQ ID NO: 12553 - protein, 9 aa, synthetic construct
GINGSIHVF

SEQ ID NO: 12554 - protein, 9 aa, synthetic construct
GINGSIRVF

SEQ ID NO: 12555 - protein, 9 aa, synthetic construct
GINGSIKVH

SEQ ID NO: 12556 - protein, 9 aa, synthetic construct
GINGSGKLY

SEQ ID NO: 12557 - protein, 9 aa, synthetic construct
GINGSGKLF

SEQ ID NO: 12558 - protein, 9 aa, synthetic construct
GINGVVRVF

SEQ ID NO: 12559 - protein, 9 aa, synthetic construct
GINGVLHVR

SEQ ID NO: 12560 - protein, 9 aa, synthetic construct
GINGVLRLH

SEQ ID NO: 12561 - protein, 9 aa, synthetic construct
GINGVAHLK

SEQ ID NO: 12562 - protein, 9 aa, synthetic construct
GINGVIHLK

SEQ ID NO: 12563 - protein, 9 aa, synthetic construct
GINGVIHVH

SEQ ID NO: 12564 - protein, 9 aa, synthetic construct
GINGVIKVY

SEQ ID NO: 12565 - protein, 9 aa, synthetic construct
GINGVGRLH

SEQ ID NO: 12566 - protein, 9 aa, synthetic construct
GINGVGKVY

SEQ ID NO: 12567 - protein, 9 aa, synthetic construct
GINGGVHVR

SEQ ID NO: 12568 - protein, 9 aa, synthetic construct
GINGGVRVR

SEQ ID NO: 12569 - protein, 9 aa, synthetic construct
GINGGVKLF

SEQ ID NO: 12570 - protein, 9 aa, synthetic construct
GINGGLRVF

SEQ ID NO: 12571 - protein, 9 aa, synthetic construct
GINGGAHVY

SEQ ID NO: 12572 - protein, 9 aa, synthetic construct
GINGGARLF

SEQ ID NO: 12573 - protein, 9 aa, synthetic construct
GINGGARVH

SEQ ID NO: 12574 - protein, 9 aa, synthetic construct
GINGGIHLY

SEQ ID NO: 12575 - protein, 9 aa, synthetic construct
GINGGIHVF

SEQ ID NO: 12576 - protein, 9 aa, synthetic construct
GINGGIRVF

SEQ ID NO: 12577 - protein, 9 aa, synthetic construct
GINGGIKVF

SEQ ID NO: 12578 - protein, 9 aa, synthetic construct
GINGGGHLH

SEQ ID NO: 12579 - protein, 9 aa, synthetic construct
GINGGGRLH

SEQ ID NO: 12580 - protein, 9 aa, synthetic construct
GINGGGRVF

SEQ ID NO: 12581 - protein, 9 aa, synthetic construct
GINAAVKLH

SEQ ID NO: 12582 - protein, 9 aa, synthetic construct
GINAAAKVH

SEQ ID NO: 12583 - protein, 9 aa, synthetic construct
GINAAGRLY

SEQ ID NO: 12584 - protein, 9 aa, synthetic construct
GINATVHLK

SEQ ID NO: 12585 - protein, 9 aa, synthetic construct
GINATVHVK

SEQ ID NO: 12586 - protein, 9 aa, synthetic construct
GINATVKLY

SEQ ID NO: 12587 - protein, 9 aa, synthetic construct
GINATAHLY

SEQ ID NO: 12588 - protein, 9 aa, synthetic construct
GINATAHVY

SEQ ID NO: 12589 - protein, 9 aa, synthetic construct
PTNGVIHVH

SEQ ID NO: 12590 - protein, 9 aa, synthetic construct
GINATARLH

SEQ ID NO: 12591 - protein, 9 aa, synthetic construct
PTNGVIHVF

SEQ ID NO: 12592 - protein, 9 aa, synthetic construct
PLNGVLKVY

SEQ ID NO: 12593 - protein, 9 aa, synthetic construct
GINATIRVH

SEQ ID NO: 12594 - protein, 9 aa, synthetic construct
GINATIKLH

SEQ ID NO: 12595 - protein, 9 aa, synthetic construct
PTNGVIRLH

SEQ ID NO: 12596 - protein, 9 aa, synthetic construct
GINATGHLF

SEQ ID NO: 12597 - protein, 9 aa, synthetic construct
GINASVRLH

SEQ ID NO: 12598 - protein, 9 aa, synthetic construct
PTNGVIKLY

SEQ ID NO: 12599 - protein, 9 aa, synthetic construct
PTNGVIKLF

SEQ ID NO: 12600 - protein, 9 aa, synthetic construct
PTNGVIKVY

SEQ ID NO: 12601 - protein, 9 aa, synthetic construct
GINASIKVF

SEQ ID NO: 12602 - protein, 9 aa, synthetic construct
PTNGVIKVH

SEQ ID NO: 12603 - protein, 9 aa, synthetic construct
GINASGHLK

SEQ ID NO: 12604 - protein, 9 aa, synthetic construct
GINASGRLR

SEQ ID NO: 12605 - protein, 9 aa, synthetic construct
PTNGVGHLY

SEQ ID NO: 12606 - protein, 9 aa, synthetic construct
GINAVVKVF

SEQ ID NO: 12607 - protein, 9 aa, synthetic construct
GINAVLHVR

SEQ ID NO: 12608 - protein, 9 aa, synthetic construct
GINAVLKLF

SEQ ID NO: 12609 - protein, 9 aa, synthetic construct
GINAVGHLK

SEQ ID NO: 12610 - protein, 9 aa, synthetic construct
GINAVGRVY

SEQ ID NO: 12611 - protein, 9 aa, synthetic construct
GINAGVRLH

SEQ ID NO: 12612 - protein, 9 aa, synthetic construct
GINAGVRLF

SEQ ID NO: 12613 - protein, 9 aa, synthetic construct
GINAGVRVH

SEQ ID NO: 12614 - protein, 9 aa, synthetic construct
GINAGVKVY

SEQ ID NO: 12615 - protein, 9 aa, synthetic construct
GINAGLRVH

SEQ ID NO: 12616 - protein, 9 aa, synthetic construct
GINAGLKVF

SEQ ID NO: 12617 - protein, 9 aa, synthetic construct
PTNGVGKLH

SEQ ID NO: 12618 - protein, 9 aa, synthetic construct
GINAGAKLY

SEQ ID NO: 12619 - protein, 9 aa, synthetic construct
GINAGAKLH

SEQ ID NO: 12620 - protein, 9 aa, synthetic construct
GINAGGRVH

SEQ ID NO: 12621 - protein, 9 aa, synthetic construct
GINAGGKLH

SEQ ID NO: 12622 - protein, 9 aa, synthetic construct
GIQGAVRVY

SEQ ID NO: 12623 - protein, 9 aa, synthetic construct
GIQGALHLH

SEQ ID NO: 12624 - protein, 9 aa, synthetic construct
GIQGALHVR

SEQ ID NO: 12625 - protein, 9 aa, synthetic construct
GIQGALKVY

SEQ ID NO: 12626 - protein, 9 aa, synthetic construct
GIQGAAHVH

SEQ ID NO: 12627 - protein, 9 aa, synthetic construct
GIQGAAHVK

SEQ ID NO: 12628 - protein, 9 aa, synthetic construct
GIQGAARVH

SEQ ID NO: 12629 - protein, 9 aa, synthetic construct
GIQGAARVF

SEQ ID NO: 12630 - protein, 9 aa, synthetic construct
GIQGTVHLH

SEQ ID NO: 12631 - protein, 9 aa, synthetic construct
PTNGGVRVH

SEQ ID NO: 12632 - protein, 9 aa, synthetic construct
GIQGTVKVH

SEQ ID NO: 12633 - protein, 9 aa, synthetic construct
GIQGTLHVY

SEQ ID NO: 12634 - protein, 9 aa, synthetic construct
PTNGGVRVF

SEQ ID NO: 12635 - protein, 9 aa, synthetic construct
GIQGTAHVR

SEQ ID NO: 12636 - protein, 9 aa, synthetic construct
GIQGTAHVK

SEQ ID NO: 12637 - protein, 9 aa, synthetic construct
GIQGTAHVF

SEQ ID NO: 12638 - protein, 9 aa, synthetic construct
GIQGTARVY

SEQ ID NO: 12639 - protein, 9 aa, synthetic construct
GIQGTARVH

SEQ ID NO: 12640 - protein, 9 aa, synthetic construct
GIQGTAKVF

SEQ ID NO: 12641 - protein, 9 aa, synthetic construct
GIQGTIHLK

SEQ ID NO: 12642 - protein, 9 aa, synthetic construct
GIQGSVHLY

SEQ ID NO: 12643 - protein, 9 aa, synthetic construct
PTNGGLHLH

SEQ ID NO: 12644 - protein, 9 aa, synthetic construct
GIQGSVKVF

SEQ ID NO: 12645 - protein, 9 aa, synthetic construct
PTNGGLHVR

SEQ ID NO: 12646 - protein, 9 aa, synthetic construct
GIQGSAHLR

SEQ ID NO: 12647 - protein, 9 aa, synthetic construct
GIQGSIHLK

SEQ ID NO: 12648 - protein, 9 aa, synthetic construct
GIQGSIHVK

SEQ ID NO: 12649 - protein, 9 aa, synthetic construct
GIQGVVHLR

SEQ ID NO: 12650 - protein, 9 aa, synthetic construct
GIQGVVHLK

SEQ ID NO: 12651 - protein, 9 aa, synthetic construct
GIQGVVHVY

SEQ ID NO: 12652 - protein, 9 aa, synthetic construct
GIQGVVHVR

SEQ ID NO: 12653 - protein, 9 aa, synthetic construct
GIQGVVHVH

SEQ ID NO: 12654 - protein, 9 aa, synthetic construct
GIQGVVHVK

SEQ ID NO: 12655 - protein, 9 aa, synthetic construct
GIQGVVKLF

SEQ ID NO: 12656 - protein, 9 aa, synthetic construct
GIQGVVKVY

SEQ ID NO: 12657 - protein, 9 aa, synthetic construct
GIQGVVKVK

SEQ ID NO: 12658 - protein, 9 aa, synthetic construct
GIQGVLHVY

SEQ ID NO: 12659 - protein, 9 aa, synthetic construct
GIQGVLHVR

SEQ ID NO: 12660 - protein, 9 aa, synthetic construct
GIQGVLRLH

SEQ ID NO: 12661 - protein, 9 aa, synthetic construct
GIQGVAHLR

SEQ ID NO: 12662 - protein, 9 aa, synthetic construct
GIQGVAHVY

SEQ ID NO: 12663 - protein, 9 aa, synthetic construct
GIQGVAHVH

SEQ ID NO: 12664 - protein, 9 aa, synthetic construct
GIQGVAHVF

SEQ ID NO: 12665 - protein, 9 aa, synthetic construct
GIQGVAKLF

SEQ ID NO: 12666 - protein, 9 aa, synthetic construct
GIQGVAKVY

SEQ ID NO: 12667 - protein, 9 aa, synthetic construct
GIQGVIHLK

SEQ ID NO: 12668 - protein, 9 aa, synthetic construct
GIQGVIHVR

SEQ ID NO: 12669 - protein, 9 aa, synthetic construct
GIQGVIKVH

SEQ ID NO: 12670 - protein, 9 aa, synthetic construct
GIQGVGRVY

SEQ ID NO: 12671 - protein, 9 aa, synthetic construct
GIQGVGKLR

SEQ ID NO: 12672 - protein, 9 aa, synthetic construct
GIQGVGKVF

SEQ ID NO: 12673 - protein, 9 aa, synthetic construct
PLNGVAHVR

SEQ ID NO: 12674 - protein, 9 aa, synthetic construct
PTNGGAHLY

SEQ ID NO: 12675 - protein, 9 aa, synthetic construct
GIQGGVHVY

SEQ ID NO: 12676 - protein, 9 aa, synthetic construct
GIQGGVHVK

SEQ ID NO: 12677 - protein, 9 aa, synthetic construct
GIQGGVRVH

SEQ ID NO: 12678 - protein, 9 aa, synthetic construct
GIQGGLHVK

SEQ ID NO: 12679 - protein, 9 aa, synthetic construct
PTNGGAHLF

SEQ ID NO: 12680 - protein, 9 aa, synthetic construct
GIQGGAHVH

SEQ ID NO: 12681 - protein, 9 aa, synthetic construct
GIQGGAHVK

SEQ ID NO: 12682 - protein, 9 aa, synthetic construct
GIQGGIHLK

SEQ ID NO: 12683 - protein, 9 aa, synthetic construct
GIQGGIKLH

SEQ ID NO: 12684 - protein, 9 aa, synthetic construct
GIQGGGRVY

SEQ ID NO: 12685 - protein, 9 aa, synthetic construct
PTNGGARLF

SEQ ID NO: 12686 - protein, 9 aa, synthetic construct
GIQGGGKLF

SEQ ID NO: 12687 - protein, 9 aa, synthetic construct
GIQGGGKVF

SEQ ID NO: 12688 - protein, 9 aa, synthetic construct
GIQAAVHLK

SEQ ID NO: 12689 - protein, 9 aa, synthetic construct
GIQAAVHVR

SEQ ID NO: 12690 - protein, 9 aa, synthetic construct
GIQAAVRLF

SEQ ID NO: 12691 - protein, 9 aa, synthetic construct
PTNGGARVH

SEQ ID NO: 12692 - protein, 9 aa, synthetic construct
GIQAAIRLH

SEQ ID NO: 12693 - protein, 9 aa, synthetic construct
GIQAAIKVY

SEQ ID NO: 12694 - protein, 9 aa, synthetic construct
GIQATVKVF

SEQ ID NO: 12695 - protein, 9 aa, synthetic construct
GIQATLKLR

SEQ ID NO: 12696 - protein, 9 aa, synthetic construct
GIQATAHLK

SEQ ID NO: 12697 - protein, 9 aa, synthetic construct
GIQATAKVY

SEQ ID NO: 12698 - protein, 9 aa, synthetic construct
GIQATIRVH

SEQ ID NO: 12699 - protein, 9 aa, synthetic construct
PTNGGIRLH

SEQ ID NO: 12700 - protein, 9 aa, synthetic construct
GIQASVHVY

SEQ ID NO: 12701 - protein, 9 aa, synthetic construct
GIQASVRLY

SEQ ID NO: 12702 - protein, 9 aa, synthetic construct
GIQASVRLR

SEQ ID NO: 12703 - protein, 9 aa, synthetic construct
GIQASVRLH

SEQ ID NO: 12704 - protein, 9 aa, synthetic construct
PTNGGIRVH

SEQ ID NO: 12705 - protein, 9 aa, synthetic construct
GIQASVKLK

SEQ ID NO: 12706 - protein, 9 aa, synthetic construct
GIQASVKVY

SEQ ID NO: 12707 - protein, 9 aa, synthetic construct
GIQASVKVR

SEQ ID NO: 12708 - protein, 9 aa, synthetic construct
GIQASLKLY

SEQ ID NO: 12709 - protein, 9 aa, synthetic construct
PTNGGIKLR

SEQ ID NO: 12710 - protein, 9 aa, synthetic construct
GIQASAHLY

SEQ ID NO: 12711 - protein, 9 aa, synthetic construct
GIQASARLY

SEQ ID NO: 12712 - protein, 9 aa, synthetic construct
GIQASAKVY

SEQ ID NO: 12713 - protein, 9 aa, synthetic construct
PTNGGIKLF

SEQ ID NO: 12714 - protein, 9 aa, synthetic construct
GIQASIHLR

SEQ ID NO: 12715 - protein, 9 aa, synthetic construct
GIQASIHVF

SEQ ID NO: 12716 - protein, 9 aa, synthetic construct
GIQASIKLY

SEQ ID NO: 12717 - protein, 9 aa, synthetic construct
GIQASIKVH

SEQ ID NO: 12718 - protein, 9 aa, synthetic construct
GIQAVVRVY

SEQ ID NO: 12719 - protein, 9 aa, synthetic construct
PTNGGGHLH

SEQ ID NO: 12720 - protein, 9 aa, synthetic construct
GIQAVVKLH

SEQ ID NO: 12721 - protein, 9 aa, synthetic construct
PTNGGGHLK

SEQ ID NO: 12722 - protein, 9 aa, synthetic construct
GIQAVAHVR

SEQ ID NO: 12723 - protein, 9 aa, synthetic construct
PTNGGGHVH

SEQ ID NO: 12724 - protein, 9 aa, synthetic construct
GIQAVIHVR

SEQ ID NO: 12725 - protein, 9 aa, synthetic construct
GIQAVIRLF

SEQ ID NO: 12726 - protein, 9 aa, synthetic construct
GIQAVIKVH

SEQ ID NO: 12727 - protein, 9 aa, synthetic construct
GIQAVGRLK

SEQ ID NO: 12728 - protein, 9 aa, synthetic construct
GIQAVGRVY

SEQ ID NO: 12729 - protein, 9 aa, synthetic construct
GIQAVGKVY

SEQ ID NO: 12730 - protein, 9 aa, synthetic construct
GIQAVGKVF

SEQ ID NO: 12731 - protein, 9 aa, synthetic construct
GIQAGVRVH

SEQ ID NO: 12732 - protein, 9 aa, synthetic construct
PTNGGGRVH

SEQ ID NO: 12733 - protein, 9 aa, synthetic construct
GIQAGAHVH

SEQ ID NO: 12734 - protein, 9 aa, synthetic construct
GIQAGAHVF

SEQ ID NO: 12735 - protein, 9 aa, synthetic construct
PTNGGGKLH

SEQ ID NO: 12736 - protein, 9 aa, synthetic construct
GIQAGAKVY

SEQ ID NO: 12737 - protein, 9 aa, synthetic construct
GIQAGIKLY

SEQ ID NO: 12738 - protein, 9 aa, synthetic construct
GIQAGGHLF

SEQ ID NO: 12739 - protein, 9 aa, synthetic construct
GIPGAVHLK

SEQ ID NO: 12740 - protein, 9 aa, synthetic construct
PTNAAVHLH

SEQ ID NO: 12741 - protein, 9 aa, synthetic construct
GIPGAVKLF

SEQ ID NO: 12742 - protein, 9 aa, synthetic construct
PTNAAVHLK

SEQ ID NO: 12743 - protein, 9 aa, synthetic construct
GIPGALRVF

SEQ ID NO: 12744 - protein, 9 aa, synthetic construct
GIPGALKVY

SEQ ID NO: 12745 - protein, 9 aa, synthetic construct
GIPGALKVR

SEQ ID NO: 12746 - protein, 9 aa, synthetic construct
GIPGALKVF

SEQ ID NO: 12747 - protein, 9 aa, synthetic construct
GIPGAAHVK

SEQ ID NO: 12748 - protein, 9 aa, synthetic construct
GIPGAARLF

SEQ ID NO: 12749 - protein, 9 aa, synthetic construct
GIPGAAKVH

SEQ ID NO: 12750 - protein, 9 aa, synthetic construct
PTNAAVRLY

SEQ ID NO: 12751 - protein, 9 aa, synthetic construct
GIPGAIKLF

SEQ ID NO: 12752 - protein, 9 aa, synthetic construct
PTNAAVRLF

SEQ ID NO: 12753 - protein, 9 aa, synthetic construct
GIPGTVHLY

SEQ ID NO: 12754 - protein, 9 aa, synthetic construct
GIPGTVRVF

SEQ ID NO: 12755 - protein, 9 aa, synthetic construct
GIPGTVKLY

SEQ ID NO: 12756 - protein, 9 aa, synthetic construct
GIPGTVKLH

SEQ ID NO: 12757 - protein, 9 aa, synthetic construct
GIPGTVKLF

SEQ ID NO: 12758 - protein, 9 aa, synthetic construct
GIPGTVKVY

SEQ ID NO: 12759 - protein, 9 aa, synthetic construct
GIPGTLHVH

SEQ ID NO: 12760 - protein, 9 aa, synthetic construct
PLNGVARVH

SEQ ID NO: 12761 - protein, 9 aa, synthetic construct
GIPGTLKLH

SEQ ID NO: 12762 - protein, 9 aa, synthetic construct
GIPGTLKVF

SEQ ID NO: 12763 - protein, 9 aa, synthetic construct
GIPGTAHLY

SEQ ID NO: 12764 - protein, 9 aa, synthetic construct
GIPGTAHLH

SEQ ID NO: 12765 - protein, 9 aa, synthetic construct
PTNAAVKLK

SEQ ID NO: 12766 - protein, 9 aa, synthetic construct
GIPGTAKVH

SEQ ID NO: 12767 - protein, 9 aa, synthetic construct
GIPGTIHVH

SEQ ID NO: 12768 - protein, 9 aa, synthetic construct
GIPGTIKLY

SEQ ID NO: 12769 - protein, 9 aa, synthetic construct
GIPGTIKLR

SEQ ID NO: 12770 - protein, 9 aa, synthetic construct
GIPGTGHVK

SEQ ID NO: 12771 - protein, 9 aa, synthetic construct
PTNAAVKVK

SEQ ID NO: 12772 - protein, 9 aa, synthetic construct
GIPGTGRVK

SEQ ID NO: 12773 - protein, 9 aa, synthetic construct
PTNAALHLH

SEQ ID NO: 12774 - protein, 9 aa, synthetic construct
GIPGSVKVR

SEQ ID NO: 12775 - protein, 9 aa, synthetic construct
GIPGSAHLH

SEQ ID NO: 12776 - protein, 9 aa, synthetic construct
GIPGSIKLH

SEQ ID NO: 12777 - protein, 9 aa, synthetic construct
GIPGSGHVH

SEQ ID NO: 12778 - protein, 9 aa, synthetic construct
GIPGSGHVF

SEQ ID NO: 12779 - protein, 9 aa, synthetic construct
GIPGVVHVH

SEQ ID NO: 12780 - protein, 9 aa, synthetic construct
GIPGVVRLF

SEQ ID NO: 12781 - protein, 9 aa, synthetic construct
GIPGVVKLY

SEQ ID NO: 12782 - protein, 9 aa, synthetic construct
GIPGVVKLH

SEQ ID NO: 12783 - protein, 9 aa, synthetic construct
GIPGVVKVY

SEQ ID NO: 12784 - protein, 9 aa, synthetic construct
GIPGVVKVH

SEQ ID NO: 12785 - protein, 9 aa, synthetic construct
GIPGVVKVF

SEQ ID NO: 12786 - protein, 9 aa, synthetic construct
GIPGVLRVY

SEQ ID NO: 12787 - protein, 9 aa, synthetic construct
GIPGVLKLF

SEQ ID NO: 12788 - protein, 9 aa, synthetic construct
GIPGVAHLK

SEQ ID NO: 12789 - protein, 9 aa, synthetic construct
GIPGVIHVH

SEQ ID NO: 12790 - protein, 9 aa, synthetic construct
GIPGVIHVK

SEQ ID NO: 12791 - protein, 9 aa, synthetic construct
GIPGVGHVR

SEQ ID NO: 12792 - protein, 9 aa, synthetic construct
GIPGVGHVH

SEQ ID NO: 12793 - protein, 9 aa, synthetic construct
GIPGVGKLK

SEQ ID NO: 12794 - protein, 9 aa, synthetic construct
PTNAAAHLY

SEQ ID NO: 12795 - protein, 9 aa, synthetic construct
PTNAAAHLR

SEQ ID NO: 12796 - protein, 9 aa, synthetic construct
GIPGGVRVH

SEQ ID NO: 12797 - protein, 9 aa, synthetic construct
PTNAAAHLK

SEQ ID NO: 12798 - protein, 9 aa, synthetic construct
PTNAAAHVH

SEQ ID NO: 12799 - protein, 9 aa, synthetic construct
GIPGGARLY

SEQ ID NO: 12800 - protein, 9 aa, synthetic construct
GIPGGARVY

SEQ ID NO: 12801 - protein, 9 aa, synthetic construct
GIPGGARVK

SEQ ID NO: 12802 - protein, 9 aa, synthetic construct
PTNAAAHVF

SEQ ID NO: 12803 - protein, 9 aa, synthetic construct
GIPGGIHLR

SEQ ID NO: 12804 - protein, 9 aa, synthetic construct
GIPGGIKVY

SEQ ID NO: 12805 - protein, 9 aa, synthetic construct
GIPAAVHLY

SEQ ID NO: 12806 - protein, 9 aa, synthetic construct
GIPAAVHLR

SEQ ID NO: 12807 - protein, 9 aa, synthetic construct
GIPAAVHLH

SEQ ID NO: 12808 - protein, 9 aa, synthetic construct
GIPAAVHLK

SEQ ID NO: 12809 - protein, 9 aa, synthetic construct
GIPAAVHLF

SEQ ID NO: 12810 - protein, 9 aa, synthetic construct
GIPAAVHVR

SEQ ID NO: 12811 - protein, 9 aa, synthetic construct
GIPAAVHVH

SEQ ID NO: 12812 - protein, 9 aa, synthetic construct
GIPAAVHVK

SEQ ID NO: 12813 - protein, 9 aa, synthetic construct
GIPAAVRLF

SEQ ID NO: 12814 - protein, 9 aa, synthetic construct
GIPAAVKLF

SEQ ID NO: 12815 - protein, 9 aa, synthetic construct
GIPAALHLK

SEQ ID NO: 12816 - protein, 9 aa, synthetic construct
GIPAAAHLY

SEQ ID NO: 12817 - protein, 9 aa, synthetic construct
GIPAAAHLR

SEQ ID NO: 12818 - protein, 9 aa, synthetic construct
GIPAAAHVY

SEQ ID NO: 12819 - protein, 9 aa, synthetic construct
GIPAAAHVH

SEQ ID NO: 12820 - protein, 9 aa, synthetic construct
GIPAAAHVK

SEQ ID NO: 12821 - protein, 9 aa, synthetic construct
GIPAAAHVF

SEQ ID NO: 12822 - protein, 9 aa, synthetic construct
GIPAAARLH

SEQ ID NO: 12823 - protein, 9 aa, synthetic construct
GIPAAAKLY

SEQ ID NO: 12824 - protein, 9 aa, synthetic construct
PTNAAAKVY

SEQ ID NO: 12825 - protein, 9 aa, synthetic construct
GIPAAIRLR

SEQ ID NO: 12826 - protein, 9 aa, synthetic construct
GIPAAIRLK

SEQ ID NO: 12827 - protein, 9 aa, synthetic construct
GIPAAIKLY

SEQ ID NO: 12828 - protein, 9 aa, synthetic construct
GIPAAGKVF

SEQ ID NO: 12829 - protein, 9 aa, synthetic construct
GIPATVHVK

SEQ ID NO: 12830 - protein, 9 aa, synthetic construct
PTNAAIHLR

SEQ ID NO: 12831 - protein, 9 aa, synthetic construct
GIPATVRLY

SEQ ID NO: 12832 - protein, 9 aa, synthetic construct
GIPATVRVF

SEQ ID NO: 12833 - protein, 9 aa, synthetic construct
GIPATLRVF

SEQ ID NO: 12834 - protein, 9 aa, synthetic construct
GIPATAHLY

SEQ ID NO: 12835 - protein, 9 aa, synthetic construct
GIPATAHVF

SEQ ID NO: 12836 - protein, 9 aa, synthetic construct
GIPATAKVY

SEQ ID NO: 12837 - protein, 9 aa, synthetic construct
GIPATIHLH

SEQ ID NO: 12838 - protein, 9 aa, synthetic construct
GIPATIRVH

SEQ ID NO: 12839 - protein, 9 aa, synthetic construct
GIPATIKLF

SEQ ID NO: 12840 - protein, 9 aa, synthetic construct
GIPASVHVK

SEQ ID NO: 12841 - protein, 9 aa, synthetic construct
PTNAAIRVH

SEQ ID NO: 12842 - protein, 9 aa, synthetic construct
GIPASLHVR

SEQ ID NO: 12843 - protein, 9 aa, synthetic construct
GIPASLHVK

SEQ ID NO: 12844 - protein, 9 aa, synthetic construct
GIPASIHLY

SEQ ID NO: 12845 - protein, 9 aa, synthetic construct
GIPASIHLK

SEQ ID NO: 12846 - protein, 9 aa, synthetic construct
GIPASIRLH

SEQ ID NO: 12847 - protein, 9 aa, synthetic construct
GIPASIRVH

SEQ ID NO: 12848 - protein, 9 aa, synthetic construct
GIPASIKLF

SEQ ID NO: 12849 - protein, 9 aa, synthetic construct
GIPASIKVY

SEQ ID NO: 12850 - protein, 9 aa, synthetic construct
GIPASIKVK

SEQ ID NO: 12851 - protein, 9 aa, synthetic construct
GIPASGRLY

SEQ ID NO: 12852 - protein, 9 aa, synthetic construct
PLNGVAKVH

SEQ ID NO: 12853 - protein, 9 aa, synthetic construct
PTNAAGHLY

SEQ ID NO: 12854 - protein, 9 aa, synthetic construct
PTNAAGHLR

SEQ ID NO: 12855 - protein, 9 aa, synthetic construct
GIPAVVRLH

SEQ ID NO: 12856 - protein, 9 aa, synthetic construct
GIPAVVKLF

SEQ ID NO: 12857 - protein, 9 aa, synthetic construct
PTNAAGHLF

SEQ ID NO: 12858 - protein, 9 aa, synthetic construct
PTNAAGHVY

SEQ ID NO: 12859 - protein, 9 aa, synthetic construct
PTNAAGHVR

SEQ ID NO: 12860 - protein, 9 aa, synthetic construct
GIPAVAHVK

SEQ ID NO: 12861 - protein, 9 aa, synthetic construct
PTNAAGHVH

SEQ ID NO: 12862 - protein, 9 aa, synthetic construct
PTNAAGHVK

SEQ ID NO: 12863 - protein, 9 aa, synthetic construct
GIPAVIRVR

SEQ ID NO: 12864 - protein, 9 aa, synthetic construct
GIPAVIKVF

SEQ ID NO: 12865 - protein, 9 aa, synthetic construct
GIPAVGRVH

SEQ ID NO: 12866 - protein, 9 aa, synthetic construct
GIPAGVRVF

SEQ ID NO: 12867 - protein, 9 aa, synthetic construct
GIPAGVKLF

SEQ ID NO: 12868 - protein, 9 aa, synthetic construct
PTNAAGKLY

SEQ ID NO: 12869 - protein, 9 aa, synthetic construct
PTNAAGKLH

SEQ ID NO: 12870 - protein, 9 aa, synthetic construct
GIPAGAKVK

SEQ ID NO: 12871 - protein, 9 aa, synthetic construct
GIPAGIRVR

SEQ ID NO: 12872 - protein, 9 aa, synthetic construct
GIPAGIKVH

SEQ ID NO: 12873 - protein, 9 aa, synthetic construct
GIPAGGHVH

SEQ ID NO: 12874 - protein, 9 aa, synthetic construct
PLNGASKLY

SEQ ID NO: 12875 - protein, 9 aa, synthetic construct
PLNGASKVY

SEQ ID NO: 12876 - protein, 9 aa, synthetic construct
PLNGATHLH

SEQ ID NO: 12877 - protein, 9 aa, synthetic construct
PTNATVHLF

SEQ ID NO: 12878 - protein, 9 aa, synthetic construct
PLNGATKVY

SEQ ID NO: 12879 - protein, 9 aa, synthetic construct
PLNGTSHLH

SEQ ID NO: 12880 - protein, 9 aa, synthetic construct
PLNGTSHVY

SEQ ID NO: 12881 - protein, 9 aa, synthetic construct
PLNGTSRVH

SEQ ID NO: 12882 - protein, 9 aa, synthetic construct
PTNATVHVK

SEQ ID NO: 12883 - protein, 9 aa, synthetic construct
PLNGTTHLR

SEQ ID NO: 12884 - protein, 9 aa, synthetic construct
PLNGTTHVK

SEQ ID NO: 12885 - protein, 9 aa, synthetic construct
PLNGTTKLH

SEQ ID NO: 12886 - protein, 9 aa, synthetic construct
PLNGTTKVH

SEQ ID NO: 12887 - protein, 9 aa, synthetic construct
PLNGSTHVF

SEQ ID NO: 12888 - protein, 9 aa, synthetic construct
PLNGSTRVF

SEQ ID NO: 12889 - protein, 9 aa, synthetic construct
PLNGVSHLH

SEQ ID NO: 12890 - protein, 9 aa, synthetic construct
PLNGVSHVK

SEQ ID NO: 12891 - protein, 9 aa, synthetic construct
PTNATVRVF

SEQ ID NO: 12892 - protein, 9 aa, synthetic construct
PLNGVSKLR

SEQ ID NO: 12893 - protein, 9 aa, synthetic construct
PLNGVTHLK

SEQ ID NO: 12894 - protein, 9 aa, synthetic construct
PLNGVTHVF

SEQ ID NO: 12895 - protein, 9 aa, synthetic construct
PTNATVKLK

SEQ ID NO: 12896 - protein, 9 aa, synthetic construct
PTNATVKLF

SEQ ID NO: 12897 - protein, 9 aa, synthetic construct
PLNGGSHLR

SEQ ID NO: 12898 - protein, 9 aa, synthetic construct
PLNGGSKLF

SEQ ID NO: 12899 - protein, 9 aa, synthetic construct
PTNATVKVF

SEQ ID NO: 12900 - protein, 9 aa, synthetic construct
PLNGVIHLK

SEQ ID NO: 12901 - protein, 9 aa, synthetic construct
PTNATLHLY

SEQ ID NO: 12902 - protein, 9 aa, synthetic construct
PLQGASHLK

SEQ ID NO: 12903 - protein, 9 aa, synthetic construct
PLQGASKVH

SEQ ID NO: 12904 - protein, 9 aa, synthetic construct
PLQGATHLK

SEQ ID NO: 12905 - protein, 9 aa, synthetic construct
PLQGATKLF

SEQ ID NO: 12906 - protein, 9 aa, synthetic construct
PLQGTSKVY

SEQ ID NO: 12907 - protein, 9 aa, synthetic construct
PLQGTTHVH

SEQ ID NO: 12908 - protein, 9 aa, synthetic construct
PLQGTTKLH

SEQ ID NO: 12909 - protein, 9 aa, synthetic construct
PLQGSSHVY

SEQ ID NO: 12910 - protein, 9 aa, synthetic construct
PLQGSSHVR

SEQ ID NO: 12911 - protein, 9 aa, synthetic construct
PLQGSSHVH

SEQ ID NO: 12912 - protein, 9 aa, synthetic construct
PLQGSSHVK

SEQ ID NO: 12913 - protein, 9 aa, synthetic construct
PLQGSSHVF

SEQ ID NO: 12914 - protein, 9 aa, synthetic construct
PLQGSSKLY

SEQ ID NO: 12915 - protein, 9 aa, synthetic construct
PLQGSSKLH

SEQ ID NO: 12916 - protein, 9 aa, synthetic construct
PLQGSSKLF

SEQ ID NO: 12917 - protein, 9 aa, synthetic construct
PLQGSTHLH

SEQ ID NO: 12918 - protein, 9 aa, synthetic construct
PLQGSTHLK

SEQ ID NO: 12919 - protein, 9 aa, synthetic construct
PLQGSTHVY

SEQ ID NO: 12920 - protein, 9 aa, synthetic construct
PLQGVSRVY

SEQ ID NO: 12921 - protein, 9 aa, synthetic construct
PLQGVSRVF

SEQ ID NO: 12922 - protein, 9 aa, synthetic construct
PLQGVSKLF

SEQ ID NO: 12923 - protein, 9 aa, synthetic construct
PLQGVSKVY

SEQ ID NO: 12924 - protein, 9 aa, synthetic construct
PLQGVTHVF

SEQ ID NO: 12925 - protein, 9 aa, synthetic construct
PTNATLKLH

SEQ ID NO: 12926 - protein, 9 aa, synthetic construct
PLQGVTKLR

SEQ ID NO: 12927 - protein, 9 aa, synthetic construct
PLQGVTKVR

SEQ ID NO: 12928 - protein, 9 aa, synthetic construct
PTNATLKLF

SEQ ID NO: 12929 - protein, 9 aa, synthetic construct
PLQGGSHLK

SEQ ID NO: 12930 - protein, 9 aa, synthetic construct
PLQGGSHVR

SEQ ID NO: 12931 - protein, 9 aa, synthetic construct
PLQGGSRVF

SEQ ID NO: 12932 - protein, 9 aa, synthetic construct
PLQGGSKLY

SEQ ID NO: 12933 - protein, 9 aa, synthetic construct
PLQGGSKLH

SEQ ID NO: 12934 - protein, 9 aa, synthetic construct
PLQGGSKLF

SEQ ID NO: 12935 - protein, 9 aa, synthetic construct
PLQGGTHLY

SEQ ID NO: 12936 - protein, 9 aa, synthetic construct
PLQGGTHLH

SEQ ID NO: 12937 - protein, 9 aa, synthetic construct
PLQGGTHLK

SEQ ID NO: 12938 - protein, 9 aa, synthetic construct
PLQGGTHVY

SEQ ID NO: 12939 - protein, 9 aa, synthetic construct
PLQGGTHVK

SEQ ID NO: 12940 - protein, 9 aa, synthetic construct
PLQGGTHVF

SEQ ID NO: 12941 - protein, 9 aa, synthetic construct
PLQGGTKLF

SEQ ID NO: 12942 - protein, 9 aa, synthetic construct
PTNATAHLY

SEQ ID NO: 12943 - protein, 9 aa, synthetic construct
PTNGASHLY

SEQ ID NO: 12944 - protein, 9 aa, synthetic construct
PTNGASHVH

SEQ ID NO: 12945 - protein, 9 aa, synthetic construct
PTNATAHLR

SEQ ID NO: 12946 - protein, 9 aa, synthetic construct
PTNGASKVF

SEQ ID NO: 12947 - protein, 9 aa, synthetic construct
PTNGATHLR

SEQ ID NO: 12948 - protein, 9 aa, synthetic construct
PTNGATHVH

SEQ ID NO: 12949 - protein, 9 aa, synthetic construct
PTNGATHVF

SEQ ID NO: 12950 - protein, 9 aa, synthetic construct
PTNGTSHLR

SEQ ID NO: 12951 - protein, 9 aa, synthetic construct
PTNATAHVH

SEQ ID NO: 12952 - protein, 9 aa, synthetic construct
PTNGTSRVF

SEQ ID NO: 12953 - protein, 9 aa, synthetic construct
PTNGTTHLK

SEQ ID NO: 12954 - protein, 9 aa, synthetic construct
PTNGTTRLY

SEQ ID NO: 12955 - protein, 9 aa, synthetic construct
PTNGTTKLF

SEQ ID NO: 12956 - protein, 9 aa, synthetic construct
PTNGSSHLY

SEQ ID NO: 12957 - protein, 9 aa, synthetic construct
PTNGSSRVY

SEQ ID NO: 12958 - protein, 9 aa, synthetic construct
PTNGSTHVF

SEQ ID NO: 12959 - protein, 9 aa, synthetic construct
PTNGSTRVH

SEQ ID NO: 12960 - protein, 9 aa, synthetic construct
PTNGSTKLF

SEQ ID NO: 12961 - protein, 9 aa, synthetic construct
PTNGVSHLK

SEQ ID NO: 12962 - protein, 9 aa, synthetic construct
PTNGVSRVF

SEQ ID NO: 12963 - protein, 9 aa, synthetic construct
PLNGVIHVK

SEQ ID NO: 12964 - protein, 9 aa, synthetic construct
PTNGVSKLF

SEQ ID NO: 12965 - protein, 9 aa, synthetic construct
PTNGVTRVF

SEQ ID NO: 12966 - protein, 9 aa, synthetic construct
PTNATAKLK

SEQ ID NO: 12967 - protein, 9 aa, synthetic construct
PTNGVTKLY

SEQ ID NO: 12968 - protein, 9 aa, synthetic construct
PTNGGSHLK

SEQ ID NO: 12969 - protein, 9 aa, synthetic construct
PTNGGSKLH

SEQ ID NO: 12970 - protein, 9 aa, synthetic construct
PTNGGSKVY

SEQ ID NO: 12971 - protein, 9 aa, synthetic construct
PTNGGTHLR

SEQ ID NO: 12972 - protein, 9 aa, synthetic construct
PTNGGTHLK

SEQ ID NO: 12973 - protein, 9 aa, synthetic construct
PTNGGTHVY

SEQ ID NO: 12974 - protein, 9 aa, synthetic construct
PTNGGTKLY

SEQ ID NO: 12975 - protein, 9 aa, synthetic construct
PTNGGTKVY

SEQ ID NO: 12976 - protein, 9 aa, synthetic construct
PTNATIHLH

SEQ ID NO: 12977 - protein, 9 aa, synthetic construct
PTNATIHVH

SEQ ID NO: 12978 - protein, 9 aa, synthetic construct
PTQGTSRLY

SEQ ID NO: 12979 - protein, 9 aa, synthetic construct
PTQGTSKLF

SEQ ID NO: 12980 - protein, 9 aa, synthetic construct
PTQGTTHVF

SEQ ID NO: 12981 - protein, 9 aa, synthetic construct
PLNGVIRLY

SEQ ID NO: 12982 - protein, 9 aa, synthetic construct
PTNATIRLY

SEQ ID NO: 12983 - protein, 9 aa, synthetic construct
PTQGTTKLF

SEQ ID NO: 12984 - protein, 9 aa, synthetic construct
PTQGTTKVH

SEQ ID NO: 12985 - protein, 9 aa, synthetic construct
PTQGSSHVR

SEQ ID NO: 12986 - protein, 9 aa, synthetic construct
PTNATIRVY

SEQ ID NO: 12987 - protein, 9 aa, synthetic construct
PTQGSTHLR

SEQ ID NO: 12988 - protein, 9 aa, synthetic construct
PTQGSTHVK

SEQ ID NO: 12989 - protein, 9 aa, synthetic construct
PTQGSTKVR

SEQ ID NO: 12990 - protein, 9 aa, synthetic construct
PTQGVSHLH

SEQ ID NO: 12991 - protein, 9 aa, synthetic construct
PTQGVSRVY

SEQ ID NO: 12992 - protein, 9 aa, synthetic construct
PTQGVTHVF

SEQ ID NO: 12993 - protein, 9 aa, synthetic construct
PTNATIKLH

SEQ ID NO: 12994 - protein, 9 aa, synthetic construct
PTQGVTRVY

SEQ ID NO: 12995 - protein, 9 aa, synthetic construct
PTQGVTKLF

SEQ ID NO: 12996 - protein, 9 aa, synthetic construct
PTNATIKLF

SEQ ID NO: 12997 - protein, 9 aa, synthetic construct
PTQGGSHLY

SEQ ID NO: 12998 - protein, 9 aa, synthetic construct
PTQGGSHLK

SEQ ID NO: 12999 - protein, 9 aa, synthetic construct
PTQGGSHVY

SEQ ID NO: 13000 - protein, 9 aa, synthetic construct
PTQGGSHVH

SEQ ID NO: 13001 - protein, 9 aa, synthetic construct
PLNGVIRLH

SEQ ID NO: 13002 - protein, 9 aa, synthetic construct
PTNATGHLK

SEQ ID NO: 13003 - protein, 9 aa, synthetic construct
PTNATGHVY

SEQ ID NO: 13004 - protein, 9 aa, synthetic construct
PTNATGHVH

SEQ ID NO: 13005 - protein, 9 aa, synthetic construct
PTNATGHVK

SEQ ID NO: 13006 - protein, 9 aa, synthetic construct
PTNATGHVF

SEQ ID NO: 13007 - protein, 9 aa, synthetic construct
PTNATGKLF

SEQ ID NO: 13008 - protein, 9 aa, synthetic construct
PTNASVRLH

SEQ ID NO: 13009 - protein, 9 aa, synthetic construct
PTNASVKLH

SEQ ID NO: 13010 - protein, 9 aa, synthetic construct
PTNASLHLY

SEQ ID NO: 13011 - protein, 9 aa, synthetic construct
PTNASLKVH

SEQ ID NO: 13012 - protein, 9 aa, synthetic construct
PTNASAHLY

SEQ ID NO: 13013 - protein, 9 aa, synthetic construct
PTNASAHLH

SEQ ID NO: 13014 - protein, 9 aa, synthetic construct
PTNASAHLF

SEQ ID NO: 13015 - protein, 9 aa, synthetic construct
PTNASAKLH

SEQ ID NO: 13016 - protein, 9 aa, synthetic construct
PTNASIHVH

SEQ ID NO: 13017 - protein, 9 aa, synthetic construct
PTNASIHVK

SEQ ID NO: 13018 - protein, 9 aa, synthetic construct
PTNASIHVF

SEQ ID NO: 13019 - protein, 9 aa, synthetic construct
PTNASIRLY

SEQ ID NO: 13020 - protein, 9 aa, synthetic construct
PTNASIKVF

SEQ ID NO: 13021 - protein, 9 aa, synthetic construct
PTNASGHVF

SEQ ID NO: 13022 - protein, 9 aa, synthetic construct
PTNASGKLH

SEQ ID NO: 13023 - protein, 9 aa, synthetic construct
PTNASGKVH

SEQ ID NO: 13024 - protein, 9 aa, synthetic construct
PLNGVGHLY

SEQ ID NO: 13025 - protein, 9 aa, synthetic construct
PTNAVVHVR

SEQ ID NO: 13026 - protein, 9 aa, synthetic construct
PLNGVGHLH

SEQ ID NO: 13027 - protein, 9 aa, synthetic construct
PTNAVVKVY

SEQ ID NO: 13028 - protein, 9 aa, synthetic construct
PTNAVLHVY

SEQ ID NO: 13029 - protein, 9 aa, synthetic construct
PTNAVAKLY

SEQ ID NO: 13030 - protein, 9 aa, synthetic construct
PTNAVAKVY

SEQ ID NO: 13031 - protein, 9 aa, synthetic construct
PTNAVIHLR

SEQ ID NO: 13032 - protein, 9 aa, synthetic construct
PTNAVIHVF

SEQ ID NO: 13033 - protein, 9 aa, synthetic construct
PTNAVIKLH

SEQ ID NO: 13034 - protein, 9 aa, synthetic construct
PLNGVGRLH

SEQ ID NO: 13035 - protein, 9 aa, synthetic construct
PTNAVGKLH

SEQ ID NO: 13036 - protein, 9 aa, synthetic construct
PTNAVGKVH

SEQ ID NO: 13037 - protein, 9 aa, synthetic construct
PTNAVGKVF

SEQ ID NO: 13038 - protein, 9 aa, synthetic construct
PTNAGVRVH

SEQ ID NO: 13039 - protein, 9 aa, synthetic construct
PTNAGLKLY

SEQ ID NO: 13040 - protein, 9 aa, synthetic construct
PTNAGLKVY

SEQ ID NO: 13041 - protein, 9 aa, synthetic construct
PLNGVGKLR

SEQ ID NO: 13042 - protein, 9 aa, synthetic construct
PTNAGAHLK

SEQ ID NO: 13043 - protein, 9 aa, synthetic construct
PTNAGAHLF

SEQ ID NO: 13044 - protein, 9 aa, synthetic construct
PTNAGAHVY

SEQ ID NO: 13045 - protein, 9 aa, synthetic construct
PTNAGAHVH

SEQ ID NO: 13046 - protein, 9 aa, synthetic construct
PTNAGAHVK

SEQ ID NO: 13047 - protein, 9 aa, synthetic construct
PTNAGAHVF

SEQ ID NO: 13048 - protein, 9 aa, synthetic construct
PTNAGARLY

SEQ ID NO: 13049 - protein, 9 aa, synthetic construct
PTNAGIRLF

SEQ ID NO: 13050 - protein, 9 aa, synthetic construct
PTNAGIKLF

SEQ ID NO: 13051 - protein, 9 aa, synthetic construct
PTNAGIKVF

SEQ ID NO: 13052 - protein, 9 aa, synthetic construct
PTNAGGHLH

SEQ ID NO: 13053 - protein, 9 aa, synthetic construct
PTNAGGHLF

SEQ ID NO: 13054 - protein, 9 aa, synthetic construct
PTNAGGHVH

SEQ ID NO: 13055 - protein, 9 aa, synthetic construct
PTNAGGHVF

SEQ ID NO: 13056 - protein, 9 aa, synthetic construct
PTNAGGKLH

SEQ ID NO: 13057 - protein, 9 aa, synthetic construct
PLNGAAHLY

SEQ ID NO: 13058 - protein, 9 aa, synthetic construct
PTQGAVHVH

SEQ ID NO: 13059 - protein, 9 aa, synthetic construct
PTQGAVRLY

SEQ ID NO: 13060 - protein, 9 aa, synthetic construct
PTQGAVRVY

SEQ ID NO: 13061 - protein, 9 aa, synthetic construct
PTQGALHLH

SEQ ID NO: 13062 - protein, 9 aa, synthetic construct
PTQGALHVR

SEQ ID NO: 13063 - protein, 9 aa, synthetic construct
PTQGALHVH

SEQ ID NO: 13064 - protein, 9 aa, synthetic construct
PTQGALRVR

SEQ ID NO: 13065 - protein, 9 aa, synthetic construct
PTQGALKVY

SEQ ID NO: 13066 - protein, 9 aa, synthetic construct
PTQGALKVF

SEQ ID NO: 13067 - protein, 9 aa, synthetic construct
PTQGAAHLH

SEQ ID NO: 13068 - protein, 9 aa, synthetic construct
PTQGAAHLK

SEQ ID NO: 13069 - protein, 9 aa, synthetic construct
PTQGAAHLF

SEQ ID NO: 13070 - protein, 9 aa, synthetic construct
PTQGAAHVR

SEQ ID NO: 13071 - protein, 9 aa, synthetic construct
PTQGAAHVH

SEQ ID NO: 13072 - protein, 9 aa, synthetic construct
PTQGAAHVK

SEQ ID NO: 13073 - protein, 9 aa, synthetic construct
PTQGAAHVF

SEQ ID NO: 13074 - protein, 9 aa, synthetic construct
PTQGAARVH

SEQ ID NO: 13075 - protein, 9 aa, synthetic construct
PTQGAARVF

SEQ ID NO: 13076 - protein, 9 aa, synthetic construct
PTQGAAKLH

SEQ ID NO: 13077 - protein, 9 aa, synthetic construct
PTQGAIHLR

SEQ ID NO: 13078 - protein, 9 aa, synthetic construct
PTQGAIHVR

SEQ ID NO: 13079 - protein, 9 aa, synthetic construct
PTQGAGRLY

SEQ ID NO: 13080 - protein, 9 aa, synthetic construct
PTQGAGRLH

SEQ ID NO: 13081 - protein, 9 aa, synthetic construct
PTQGAGRVY

SEQ ID NO: 13082 - protein, 9 aa, synthetic construct
PTQGAGRVF

SEQ ID NO: 13083 - protein, 9 aa, synthetic construct
PLNGGVRLF

SEQ ID NO: 13084 - protein, 9 aa, synthetic construct
PTQGAGKVY

SEQ ID NO: 13085 - protein, 9 aa, synthetic construct
PTQGTVHLH

SEQ ID NO: 13086 - protein, 9 aa, synthetic construct
PTQGTVRLH

SEQ ID NO: 13087 - protein, 9 aa, synthetic construct
PTQGTVRLF

SEQ ID NO: 13088 - protein, 9 aa, synthetic construct
PTQGTVRVY

SEQ ID NO: 13089 - protein, 9 aa, synthetic construct
PTQGTLHLF

SEQ ID NO: 13090 - protein, 9 aa, synthetic construct
PTQGTLHVF

SEQ ID NO: 13091 - protein, 9 aa, synthetic construct
PTQGTLKLF

SEQ ID NO: 13092 - protein, 9 aa, synthetic construct
PTQGTLKVY

SEQ ID NO: 13093 - protein, 9 aa, synthetic construct
PTQGTAHVK

SEQ ID NO: 13094 - protein, 9 aa, synthetic construct
PTQGTARLY

SEQ ID NO: 13095 - protein, 9 aa, synthetic construct
PTQGTARLF

SEQ ID NO: 13096 - protein, 9 aa, synthetic construct
PTQGTIHLK

SEQ ID NO: 13097 - protein, 9 aa, synthetic construct
PLNGGVKVY

SEQ ID NO: 13098 - protein, 9 aa, synthetic construct
PTQGTIRVY

SEQ ID NO: 13099 - protein, 9 aa, synthetic construct
PTQGTIKLH

SEQ ID NO: 13100 - protein, 9 aa, synthetic construct
PLNGGVKVH

SEQ ID NO: 13101 - protein, 9 aa, synthetic construct
PTQGTGRVY

SEQ ID NO: 13102 - protein, 9 aa, synthetic construct
PLNGGVKVF

SEQ ID NO: 13103 - protein, 9 aa, synthetic construct
PTQGTGKVY

SEQ ID NO: 13104 - protein, 9 aa, synthetic construct
PTQGSVHLF

SEQ ID NO: 13105 - protein, 9 aa, synthetic construct
PLNGGLHLR

SEQ ID NO: 13106 - protein, 9 aa, synthetic construct
PTQGSVRLY

SEQ ID NO: 13107 - protein, 9 aa, synthetic construct
PTQGSVRLF

SEQ ID NO: 13108 - protein, 9 aa, synthetic construct
PTQGSVRVH

SEQ ID NO: 13109 - protein, 9 aa, synthetic construct
PTQGSVRVF

SEQ ID NO: 13110 - protein, 9 aa, synthetic construct
PTQGSVKVY

SEQ ID NO: 13111 - protein, 9 aa, synthetic construct
PTQGSLKVF

SEQ ID NO: 13112 - protein, 9 aa, synthetic construct
PLNGGLHVR

SEQ ID NO: 13113 - protein, 9 aa, synthetic construct
PTQGSAHLR

SEQ ID NO: 13114 - protein, 9 aa, synthetic construct
PLNGGLHVK

SEQ ID NO: 13115 - protein, 9 aa, synthetic construct
PTQGSAKVY

SEQ ID NO: 13116 - protein, 9 aa, synthetic construct
PTQGSIHLK

SEQ ID NO: 13117 - protein, 9 aa, synthetic construct
PTQGSIHVY

SEQ ID NO: 13118 - protein, 9 aa, synthetic construct
PTQGSIRLK

SEQ ID NO: 13119 - protein, 9 aa, synthetic construct
PTQGSIRVF

SEQ ID NO: 13120 - protein, 9 aa, synthetic construct
PTQGSIKVR

SEQ ID NO: 13121 - protein, 9 aa, synthetic construct
PTQGSGRLF

SEQ ID NO: 13122 - protein, 9 aa, synthetic construct
PTQGVVHLH

SEQ ID NO: 13123 - protein, 9 aa, synthetic construct
PTQGVVHLK

SEQ ID NO: 13124 - protein, 9 aa, synthetic construct
PTQGVVHVR

SEQ ID NO: 13125 - protein, 9 aa, synthetic construct
PTQGVVKLF

SEQ ID NO: 13126 - protein, 9 aa, synthetic construct
PTQGVLHLF

SEQ ID NO: 13127 - protein, 9 aa, synthetic construct
PTQGVLHVY

SEQ ID NO: 13128 - protein, 9 aa, synthetic construct
PTQGVLHVH

SEQ ID NO: 13129 - protein, 9 aa, synthetic construct
PTQGVLKLH

SEQ ID NO: 13130 - protein, 9 aa, synthetic construct
PTQGVAHLR

SEQ ID NO: 13131 - protein, 9 aa, synthetic construct
PTQGVAHLK

SEQ ID NO: 13132 - protein, 9 aa, synthetic construct
PTQGVAHVF

SEQ ID NO: 13133 - protein, 9 aa, synthetic construct
PTQGVAKLR

SEQ ID NO: 13134 - protein, 9 aa, synthetic construct
PTQGVAKVF

SEQ ID NO: 13135 - protein, 9 aa, synthetic construct
PTQGVIHLK

SEQ ID NO: 13136 - protein, 9 aa, synthetic construct
PTQGVIHVR

SEQ ID NO: 13137 - protein, 9 aa, synthetic construct
PTQGVIHVF

SEQ ID NO: 13138 - protein, 9 aa, synthetic construct
PTQGVIKVH

SEQ ID NO: 13139 - protein, 9 aa, synthetic construct
PTQGVGHLY

SEQ ID NO: 13140 - protein, 9 aa, synthetic construct
PTQGVGHLK

SEQ ID NO: 13141 - protein, 9 aa, synthetic construct
PTQGVGHVR

SEQ ID NO: 13142 - protein, 9 aa, synthetic construct
PTQGVGRLR

SEQ ID NO: 13143 - protein, 9 aa, synthetic construct
PTQGVGKLY

SEQ ID NO: 13144 - protein, 9 aa, synthetic construct
PTQGVGKLR

SEQ ID NO: 13145 - protein, 9 aa, synthetic construct
PTQGVGKLH

SEQ ID NO: 13146 - protein, 9 aa, synthetic construct
PTQGVGKLK

SEQ ID NO: 13147 - protein, 9 aa, synthetic construct
PTQGVGKVR

SEQ ID NO: 13148 - protein, 9 aa, synthetic construct
PTQGVGKVF

SEQ ID NO: 13149 - protein, 9 aa, synthetic construct
PTQGGVHVY

SEQ ID NO: 13150 - protein, 9 aa, synthetic construct
PLNGGAHLR

SEQ ID NO: 13151 - protein, 9 aa, synthetic construct
PTQGGVRVH

SEQ ID NO: 13152 - protein, 9 aa, synthetic construct
PLNGGAHLK

SEQ ID NO: 13153 - protein, 9 aa, synthetic construct
PTQGGLHLK

SEQ ID NO: 13154 - protein, 9 aa, synthetic construct
PLNGGAHLF

SEQ ID NO: 13155 - protein, 9 aa, synthetic construct
PLNGGAHVY

SEQ ID NO: 13156 - protein, 9 aa, synthetic construct
PTQGGLKLY

SEQ ID NO: 13157 - protein, 9 aa, synthetic construct
PLNGGAHVR

SEQ ID NO: 13158 - protein, 9 aa, synthetic construct
PTQGGAHVH

SEQ ID NO: 13159 - protein, 9 aa, synthetic construct
PTQGGAHVK

SEQ ID NO: 13160 - protein, 9 aa, synthetic construct
PTQGGARVY

SEQ ID NO: 13161 - protein, 9 aa, synthetic construct
PTQGGIHLY

SEQ ID NO: 13162 - protein, 9 aa, synthetic construct
PTQGGIHVR

SEQ ID NO: 13163 - protein, 9 aa, synthetic construct
PTQGGIHVK

SEQ ID NO: 13164 - protein, 9 aa, synthetic construct
PLNGGARLY

SEQ ID NO: 13165 - protein, 9 aa, synthetic construct
PTQGGIKLH

SEQ ID NO: 13166 - protein, 9 aa, synthetic construct
PTQGGGHLH

SEQ ID NO: 13167 - protein, 9 aa, synthetic construct
PTQGGGHLF

SEQ ID NO: 13168 - protein, 9 aa, synthetic construct
PTQGGGHVY

SEQ ID NO: 13169 - protein, 9 aa, synthetic construct
PTQGGGHVF

SEQ ID NO: 13170 - protein, 9 aa, synthetic construct
PTQGGGKLH

SEQ ID NO: 13171 - protein, 9 aa, synthetic construct
PTQAAVHVH

SEQ ID NO: 13172 - protein, 9 aa, synthetic construct
PTQAAVHVF

SEQ ID NO: 13173 - protein, 9 aa, synthetic construct
PTQAAVRLH

SEQ ID NO: 13174 - protein, 9 aa, synthetic construct
PTQAAVRLF

SEQ ID NO: 13175 - protein, 9 aa, synthetic construct
PTQAAVRVY

SEQ ID NO: 13176 - protein, 9 aa, synthetic construct
PTQAAVRVH

SEQ ID NO: 13177 - protein, 9 aa, synthetic construct
PTQAAVRVF

SEQ ID NO: 13178 - protein, 9 aa, synthetic construct
PLNGGARVH

SEQ ID NO: 13179 - protein, 9 aa, synthetic construct
PTQAAVKLY

SEQ ID NO: 13180 - protein, 9 aa, synthetic construct
PTQAAVKLH

SEQ ID NO: 13181 - protein, 9 aa, synthetic construct
PTQAAVKVY

SEQ ID NO: 13182 - protein, 9 aa, synthetic construct
PTQAAVKVR

SEQ ID NO: 13183 - protein, 9 aa, synthetic construct
PTQAAVKVH

SEQ ID NO: 13184 - protein, 9 aa, synthetic construct
PTQAAVKVF

SEQ ID NO: 13185 - protein, 9 aa, synthetic construct
PTQAALHVY

SEQ ID NO: 13186 - protein, 9 aa, synthetic construct
PTQAALHVK

SEQ ID NO: 13187 - protein, 9 aa, synthetic construct
PTQAALRVF

SEQ ID NO: 13188 - protein, 9 aa, synthetic construct
PLNGGAKLY

SEQ ID NO: 13189 - protein, 9 aa, synthetic construct
PTQAALKLF

SEQ ID NO: 13190 - protein, 9 aa, synthetic construct
PTQAALKVF

SEQ ID NO: 13191 - protein, 9 aa, synthetic construct
PTQAAAHLK

SEQ ID NO: 13192 - protein, 9 aa, synthetic construct
PTQAAAHVY

SEQ ID NO: 13193 - protein, 9 aa, synthetic construct
PTQAAAHVH

SEQ ID NO: 13194 - protein, 9 aa, synthetic construct
PTQAAAHVK

SEQ ID NO: 13195 - protein, 9 aa, synthetic construct
PTQAAAHVF

SEQ ID NO: 13196 - protein, 9 aa, synthetic construct
PTQAAARVY

SEQ ID NO: 13197 - protein, 9 aa, synthetic construct
PTQAAAKVY

SEQ ID NO: 13198 - protein, 9 aa, synthetic construct
PTQAAAKVF

SEQ ID NO: 13199 - protein, 9 aa, synthetic construct
PTQAAIHLK

SEQ ID NO: 13200 - protein, 9 aa, synthetic construct
PTQAAIHLF

SEQ ID NO: 13201 - protein, 9 aa, synthetic construct
PLNGGAKVY

SEQ ID NO: 13202 - protein, 9 aa, synthetic construct
PTQAAIRLH

SEQ ID NO: 13203 - protein, 9 aa, synthetic construct
PTQAAIRVH

SEQ ID NO: 13204 - protein, 9 aa, synthetic construct
PTQAAIKLH

SEQ ID NO: 13205 - protein, 9 aa, synthetic construct
PTQAAIKVR

SEQ ID NO: 13206 - protein, 9 aa, synthetic construct
PTQAAIKVH

SEQ ID NO: 13207 - protein, 9 aa, synthetic construct
PTQAAIKVF

SEQ ID NO: 13208 - protein, 9 aa, synthetic construct
PLNGGAKVH

SEQ ID NO: 13209 - protein, 9 aa, synthetic construct
PTQAAGHLR

SEQ ID NO: 13210 - protein, 9 aa, synthetic construct
PTQAAGHVK

SEQ ID NO: 13211 - protein, 9 aa, synthetic construct
PTQAAGKLF

SEQ ID NO: 13212 - protein, 9 aa, synthetic construct
PTQATVHLK

SEQ ID NO: 13213 - protein, 9 aa, synthetic construct
PTQATVHVF

SEQ ID NO: 13214 - protein, 9 aa, synthetic construct
PTQATVRLY

SEQ ID NO: 13215 - protein, 9 aa, synthetic construct
PTQATVRVR

SEQ ID NO: 13216 - protein, 9 aa, synthetic construct
PTQATVKLF

SEQ ID NO: 13217 - protein, 9 aa, synthetic construct
PTQATVKVR

SEQ ID NO: 13218 - protein, 9 aa, synthetic construct
PTQATVKVK

SEQ ID NO: 13219 - protein, 9 aa, synthetic construct
PTQATVKVF

SEQ ID NO: 13220 - protein, 9 aa, synthetic construct
PTQATLHVK

SEQ ID NO: 13221 - protein, 9 aa, synthetic construct
PTQATAHLH

SEQ ID NO: 13222 - protein, 9 aa, synthetic construct
PTQATAHLF

SEQ ID NO: 13223 - protein, 9 aa, synthetic construct
PTQATAHVY

SEQ ID NO: 13224 - protein, 9 aa, synthetic construct
PTQATARLH

SEQ ID NO: 13225 - protein, 9 aa, synthetic construct
PTQATAKLF

SEQ ID NO: 13226 - protein, 9 aa, synthetic construct
PTQATAKVH

SEQ ID NO: 13227 - protein, 9 aa, synthetic construct
PTQATIHLH

SEQ ID NO: 13228 - protein, 9 aa, synthetic construct
PTQATIHLK

SEQ ID NO: 13229 - protein, 9 aa, synthetic construct
PTQATIHVR

SEQ ID NO: 13230 - protein, 9 aa, synthetic construct
PTQATIHVK

SEQ ID NO: 13231 - protein, 9 aa, synthetic construct
PTQATIKLH

SEQ ID NO: 13232 - protein, 9 aa, synthetic construct
PTQATIKLK

SEQ ID NO: 13233 - protein, 9 aa, synthetic construct
PTQATIKVY

SEQ ID NO: 13234 - protein, 9 aa, synthetic construct
PTQATGHLR

SEQ ID NO: 13235 - protein, 9 aa, synthetic construct
PTQATGHLH

SEQ ID NO: 13236 - protein, 9 aa, synthetic construct
PTQATGHLK

SEQ ID NO: 13237 - protein, 9 aa, synthetic construct
PTQATGHLF

SEQ ID NO: 13238 - protein, 9 aa, synthetic construct
PTQATGHVF

SEQ ID NO: 13239 - protein, 9 aa, synthetic construct
PTQATGRLY

SEQ ID NO: 13240 - protein, 9 aa, synthetic construct
PTQATGKLF

SEQ ID NO: 13241 - protein, 9 aa, synthetic construct
PTQATGKVY

SEQ ID NO: 13242 - protein, 9 aa, synthetic construct
PTQATGKVH

SEQ ID NO: 13243 - protein, 9 aa, synthetic construct
PTQASVHLF

SEQ ID NO: 13244 - protein, 9 aa, synthetic construct
PTQASVHVY

SEQ ID NO: 13245 - protein, 9 aa, synthetic construct
PTQASVRLF

SEQ ID NO: 13246 - protein, 9 aa, synthetic construct
PTQASVRVH

SEQ ID NO: 13247 - protein, 9 aa, synthetic construct
PTQASVKLY

SEQ ID NO: 13248 - protein, 9 aa, synthetic construct
PTQASVKLH

SEQ ID NO: 13249 - protein, 9 aa, synthetic construct
PTQASVKVF

SEQ ID NO: 13250 - protein, 9 aa, synthetic construct
PTQASLHVH

SEQ ID NO: 13251 - protein, 9 aa, synthetic construct
PTQASLKLH

SEQ ID NO: 13252 - protein, 9 aa, synthetic construct
PTQASLKLF

SEQ ID NO: 13253 - protein, 9 aa, synthetic construct
PTQASAHLY

SEQ ID NO: 13254 - protein, 9 aa, synthetic construct
PTQASAHLH

SEQ ID NO: 13255 - protein, 9 aa, synthetic construct
PTQASAKVY

SEQ ID NO: 13256 - protein, 9 aa, synthetic construct
PTQASIHLK

SEQ ID NO: 13257 - protein, 9 aa, synthetic construct
PTQASIHVH

SEQ ID NO: 13258 - protein, 9 aa, synthetic construct
PTQASIHVK

SEQ ID NO: 13259 - protein, 9 aa, synthetic construct
PTQASIHVF

SEQ ID NO: 13260 - protein, 9 aa, synthetic construct
PTQASIRLH

SEQ ID NO: 13261 - protein, 9 aa, synthetic construct
PTQASIRVH

SEQ ID NO: 13262 - protein, 9 aa, synthetic construct
PTQASIKLF

SEQ ID NO: 13263 - protein, 9 aa, synthetic construct
PTQASGHVK

SEQ ID NO: 13264 - protein, 9 aa, synthetic construct
PTQASGKVF

SEQ ID NO: 13265 - protein, 9 aa, synthetic construct
PTQAVVHLH

SEQ ID NO: 13266 - protein, 9 aa, synthetic construct
PTQAVVHLK

SEQ ID NO: 13267 - protein, 9 aa, synthetic construct
PTQAVVHVY

SEQ ID NO: 13268 - protein, 9 aa, synthetic construct
PTQAVVHVR

SEQ ID NO: 13269 - protein, 9 aa, synthetic construct
PTQAVVHVH

SEQ ID NO: 13270 - protein, 9 aa, synthetic construct
PTQAVVHVK

SEQ ID NO: 13271 - protein, 9 aa, synthetic construct
PTQAVVRLK

SEQ ID NO: 13272 - protein, 9 aa, synthetic construct
PTQAVVKVY

SEQ ID NO: 13273 - protein, 9 aa, synthetic construct
PLNGGGHLF

SEQ ID NO: 13274 - protein, 9 aa, synthetic construct
PTQAVAHLR

SEQ ID NO: 13275 - protein, 9 aa, synthetic construct
PTQAVAHLK

SEQ ID NO: 13276 - protein, 9 aa, synthetic construct
PTQAVAHLF

SEQ ID NO: 13277 - protein, 9 aa, synthetic construct
PTQAVAHVY

SEQ ID NO: 13278 - protein, 9 aa, synthetic construct
PTQAVAHVK

SEQ ID NO: 13279 - protein, 9 aa, synthetic construct
PLNGGGHVH

SEQ ID NO: 13280 - protein, 9 aa, synthetic construct
PLNGGGHVK

SEQ ID NO: 13281 - protein, 9 aa, synthetic construct
PTQAVAKLY

SEQ ID NO: 13282 - protein, 9 aa, synthetic construct
PTQAVAKLH

SEQ ID NO: 13283 - protein, 9 aa, synthetic construct
PTQAVAKVY

SEQ ID NO: 13284 - protein, 9 aa, synthetic construct
PTQAVAKVF

SEQ ID NO: 13285 - protein, 9 aa, synthetic construct
PLNGGGHVF

SEQ ID NO: 13286 - protein, 9 aa, synthetic construct
PTQAVIHLR

SEQ ID NO: 13287 - protein, 9 aa, synthetic construct
PTQAVIHVY

SEQ ID NO: 13288 - protein, 9 aa, synthetic construct
PTQAVIHVR

SEQ ID NO: 13289 - protein, 9 aa, synthetic construct
PTQAVIHVH

SEQ ID NO: 13290 - protein, 9 aa, synthetic construct
PTQAVIHVK

SEQ ID NO: 13291 - protein, 9 aa, synthetic construct
PTQAVIHVF

SEQ ID NO: 13292 - protein, 9 aa, synthetic construct
PLNGAARLK

SEQ ID NO: 13293 - protein, 9 aa, synthetic construct
PTQAVIRLY

SEQ ID NO: 13294 - protein, 9 aa, synthetic construct
PTQAVIRLH

SEQ ID NO: 13295 - protein, 9 aa, synthetic construct
PTQAVIRLF

SEQ ID NO: 13296 - protein, 9 aa, synthetic construct
PTQAVIRVF

SEQ ID NO: 13297 - protein, 9 aa, synthetic construct
PTQAVIKLH

SEQ ID NO: 13298 - protein, 9 aa, synthetic construct
PTQAVIKVY

SEQ ID NO: 13299 - protein, 9 aa, synthetic construct
PTQAVGHLY

SEQ ID NO: 13300 - protein, 9 aa, synthetic construct
PTQAVGHLR

SEQ ID NO: 13301 - protein, 9 aa, synthetic construct
PTQAVGHVY

SEQ ID NO: 13302 - protein, 9 aa, synthetic construct
PTQAVGHVH

SEQ ID NO: 13303 - protein, 9 aa, synthetic construct
PTQAVGHVK

SEQ ID NO: 13304 - protein, 9 aa, synthetic construct
PTQAVGRLY

SEQ ID NO: 13305 - protein, 9 aa, synthetic construct
PTQAVGRVH

SEQ ID NO: 13306 - protein, 9 aa, synthetic construct
PTQAVGRVF

SEQ ID NO: 13307 - protein, 9 aa, synthetic construct
PTQAVGKLY

SEQ ID NO: 13308 - protein, 9 aa, synthetic construct
PTQAVGKLR

SEQ ID NO: 13309 - protein, 9 aa, synthetic construct
PTQAVGKLH

SEQ ID NO: 13310 - protein, 9 aa, synthetic construct
PTQAVGKLK

SEQ ID NO: 13311 - protein, 9 aa, synthetic construct
PTQAVGKLF

SEQ ID NO: 13312 - protein, 9 aa, synthetic construct
PTQAVGKVY

SEQ ID NO: 13313 - protein, 9 aa, synthetic construct
PTQAVGKVR

SEQ ID NO: 13314 - protein, 9 aa, synthetic construct
PTQAVGKVH

SEQ ID NO: 13315 - protein, 9 aa, synthetic construct
PTQAGVHLH

SEQ ID NO: 13316 - protein, 9 aa, synthetic construct
PTQAGVHVK

SEQ ID NO: 13317 - protein, 9 aa, synthetic construct
PTQAGVHVF

SEQ ID NO: 13318 - protein, 9 aa, synthetic construct
PTQAGVRLY

SEQ ID NO: 13319 - protein, 9 aa, synthetic construct
PTQAGVRLH

SEQ ID NO: 13320 - protein, 9 aa, synthetic construct
PTQAGVRLF

SEQ ID NO: 13321 - protein, 9 aa, synthetic construct
PTQAGVRVR

SEQ ID NO: 13322 - protein, 9 aa, synthetic construct
PTQAGVRVK

SEQ ID NO: 13323 - protein, 9 aa, synthetic construct
PTQAGVRVF

SEQ ID NO: 13324 - protein, 9 aa, synthetic construct
PTQAGVKLH

SEQ ID NO: 13325 - protein, 9 aa, synthetic construct
PTQAGVKLF

SEQ ID NO: 13326 - protein, 9 aa, synthetic construct
PTQAGVKVY

SEQ ID NO: 13327 - protein, 9 aa, synthetic construct
PTQAGVKVR

SEQ ID NO: 13328 - protein, 9 aa, synthetic construct
PTQAGVKVH

SEQ ID NO: 13329 - protein, 9 aa, synthetic construct
PTQAGVKVK

SEQ ID NO: 13330 - protein, 9 aa, synthetic construct
PTQAGVKVF

SEQ ID NO: 13331 - protein, 9 aa, synthetic construct
PTQAGLRVH

SEQ ID NO: 13332 - protein, 9 aa, synthetic construct
PTQAGAHLY

SEQ ID NO: 13333 - protein, 9 aa, synthetic construct
PTQAGAHLR

SEQ ID NO: 13334 - protein, 9 aa, synthetic construct
PTQAGAHLH

SEQ ID NO: 13335 - protein, 9 aa, synthetic construct
PTQAGAHLK

SEQ ID NO: 13336 - protein, 9 aa, synthetic construct
PTQAGAHVY

SEQ ID NO: 13337 - protein, 9 aa, synthetic construct
PTQAGAHVH

SEQ ID NO: 13338 - protein, 9 aa, synthetic construct
PTQAGAHVF

SEQ ID NO: 13339 - protein, 9 aa, synthetic construct
PLNGGGKLH

SEQ ID NO: 13340 - protein, 9 aa, synthetic construct
PTQAGARLY

SEQ ID NO: 13341 - protein, 9 aa, synthetic construct
PTQAGARVY

SEQ ID NO: 13342 - protein, 9 aa, synthetic construct
PTQAGARVH

SEQ ID NO: 13343 - protein, 9 aa, synthetic construct
PTQAGARVF

SEQ ID NO: 13344 - protein, 9 aa, synthetic construct
PTQAGAKLY

SEQ ID NO: 13345 - protein, 9 aa, synthetic construct
PTQAGAKLH

SEQ ID NO: 13346 - protein, 9 aa, synthetic construct
PTQAGAKLF

SEQ ID NO: 13347 - protein, 9 aa, synthetic construct
PTQAGAKVY

SEQ ID NO: 13348 - protein, 9 aa, synthetic construct
PTQAGAKVH

SEQ ID NO: 13349 - protein, 9 aa, synthetic construct
PTQAGIHLK

SEQ ID NO: 13350 - protein, 9 aa, synthetic construct
PTQAGIHVR

SEQ ID NO: 13351 - protein, 9 aa, synthetic construct
PTQAGIHVH

SEQ ID NO: 13352 - protein, 9 aa, synthetic construct
PTQAGIHVF

SEQ ID NO: 13353 - protein, 9 aa, synthetic construct
PTQAGIRLH

SEQ ID NO: 13354 - protein, 9 aa, synthetic construct
PTQAGIKLY

SEQ ID NO: 13355 - protein, 9 aa, synthetic construct
PTQAGIKLF

SEQ ID NO: 13356 - protein, 9 aa, synthetic construct
PTQAGIKVH

SEQ ID NO: 13357 - protein, 9 aa, synthetic construct
PTQAGIKVF

SEQ ID NO: 13358 - protein, 9 aa, synthetic construct
PTQAGGHLH

SEQ ID NO: 13359 - protein, 9 aa, synthetic construct
PTQAGGHLK

SEQ ID NO: 13360 - protein, 9 aa, synthetic construct
PTQAGGHLF

SEQ ID NO: 13361 - protein, 9 aa, synthetic construct
PTQAGGHVR

SEQ ID NO: 13362 - protein, 9 aa, synthetic construct
PTQAGGHVH

SEQ ID NO: 13363 - protein, 9 aa, synthetic construct
PTQAGGHVK

SEQ ID NO: 13364 - protein, 9 aa, synthetic construct
PTQAGGHVF

SEQ ID NO: 13365 - protein, 9 aa, synthetic construct
PTQAGGRLY

SEQ ID NO: 13366 - protein, 9 aa, synthetic construct
PTQAGGRLF

SEQ ID NO: 13367 - protein, 9 aa, synthetic construct
PTQAGGRVY

SEQ ID NO: 13368 - protein, 9 aa, synthetic construct
PTQAGGKLR

SEQ ID NO: 13369 - protein, 9 aa, synthetic construct
PTQAGGKLH

SEQ ID NO: 13370 - protein, 9 aa, synthetic construct
PTQAGGKVY

SEQ ID NO: 13371 - protein, 9 aa, synthetic construct
PTQAGGKVH

SEQ ID NO: 13372 - protein, 9 aa, synthetic construct
PTQAGGKVF

SEQ ID NO: 13373 - protein, 9 aa, synthetic construct
PLNGAARVY

SEQ ID NO: 13374 - protein, 9 aa, synthetic construct
PTPGAVRLF

SEQ ID NO: 13375 - protein, 9 aa, synthetic construct
PLNAAVHLK

SEQ ID NO: 13376 - protein, 9 aa, synthetic construct
PTPGALHLR

SEQ ID NO: 13377 - protein, 9 aa, synthetic construct
PTPGALHVH

SEQ ID NO: 13378 - protein, 9 aa, synthetic construct
PTPGALKVY

SEQ ID NO: 13379 - protein, 9 aa, synthetic construct
PTPGALKVF

SEQ ID NO: 13380 - protein, 9 aa, synthetic construct
PLNAAVHVR

SEQ ID NO: 13381 - protein, 9 aa, synthetic construct
PTPGAAHLR

SEQ ID NO: 13382 - protein, 9 aa, synthetic construct
PTPGAAHVK

SEQ ID NO: 13383 - protein, 9 aa, synthetic construct
PTPGAAHVF

SEQ ID NO: 13384 - protein, 9 aa, synthetic construct
PTPGAARVH

SEQ ID NO: 13385 - protein, 9 aa, synthetic construct
PTPGAIHVF

SEQ ID NO: 13386 - protein, 9 aa, synthetic construct
PTPGAIRLF

SEQ ID NO: 13387 - protein, 9 aa, synthetic construct
PTPGAGHVY

SEQ ID NO: 13388 - protein, 9 aa, synthetic construct
PTPGAGHVK

SEQ ID NO: 13389 - protein, 9 aa, synthetic construct
PLNAAVRLF

SEQ ID NO: 13390 - protein, 9 aa, synthetic construct
PTPGAGKLY

SEQ ID NO: 13391 - protein, 9 aa, synthetic construct
PTPGAGKVY

SEQ ID NO: 13392 - protein, 9 aa, synthetic construct
PTPGTVHLR

SEQ ID NO: 13393 - protein, 9 aa, synthetic construct
PTPGTVRLH

SEQ ID NO: 13394 - protein, 9 aa, synthetic construct
PTPGTVRVH

SEQ ID NO: 13395 - protein, 9 aa, synthetic construct
PTPGTVKLK

SEQ ID NO: 13396 - protein, 9 aa, synthetic construct
PTPGTVKVF

SEQ ID NO: 13397 - protein, 9 aa, synthetic construct
PTPGTLHLH

SEQ ID NO: 13398 - protein, 9 aa, synthetic construct
PTPGTLHLK

SEQ ID NO: 13399 - protein, 9 aa, synthetic construct
PTPGTLHVY

SEQ ID NO: 13400 - protein, 9 aa, synthetic construct
PTPGTLHVR

SEQ ID NO: 13401 - protein, 9 aa, synthetic construct
PTPGTLHVK

SEQ ID NO: 13402 - protein, 9 aa, synthetic construct
PTPGTLHVF

SEQ ID NO: 13403 - protein, 9 aa, synthetic construct
PTPGTLRVF

SEQ ID NO: 13404 - protein, 9 aa, synthetic construct
PLNGAARVH

SEQ ID NO: 13405 - protein, 9 aa, synthetic construct
PTPGTLKVY

SEQ ID NO: 13406 - protein, 9 aa, synthetic construct
PTPGTLKVF

SEQ ID NO: 13407 - protein, 9 aa, synthetic construct
PTPGTAHLH

SEQ ID NO: 13408 - protein, 9 aa, synthetic construct
PTPGTAHLF

SEQ ID NO: 13409 - protein, 9 aa, synthetic construct
PTPGTAHVK

SEQ ID NO: 13410 - protein, 9 aa, synthetic construct
PTPGTAHVF

SEQ ID NO: 13411 - protein, 9 aa, synthetic construct
PTPGTARVH

SEQ ID NO: 13412 - protein, 9 aa, synthetic construct
PTPGTIHLR

SEQ ID NO: 13413 - protein, 9 aa, synthetic construct
PTPGTIHLH

SEQ ID NO: 13414 - protein, 9 aa, synthetic construct
PTPGTIHVR

SEQ ID NO: 13415 - protein, 9 aa, synthetic construct
PTPGTIHVK

SEQ ID NO: 13416 - protein, 9 aa, synthetic construct
PTPGTIRLR

SEQ ID NO: 13417 - protein, 9 aa, synthetic construct
PTPGTIRLF

SEQ ID NO: 13418 - protein, 9 aa, synthetic construct
PTPGTIRVH

SEQ ID NO: 13419 - protein, 9 aa, synthetic construct
PTPGTGHVH

SEQ ID NO: 13420 - protein, 9 aa, synthetic construct
PTPGTGHVF

SEQ ID NO: 13421 - protein, 9 aa, synthetic construct
PTPGTGRLH

SEQ ID NO: 13422 - protein, 9 aa, synthetic construct
PTPGTGKLF

SEQ ID NO: 13423 - protein, 9 aa, synthetic construct
PTPGTGKVH

SEQ ID NO: 13424 - protein, 9 aa, synthetic construct
PTPGSVHLH

SEQ ID NO: 13425 - protein, 9 aa, synthetic construct
PLNAALHLK

SEQ ID NO: 13426 - protein, 9 aa, synthetic construct
PTPGSLHLY

SEQ ID NO: 13427 - protein, 9 aa, synthetic construct
PTPGSLHLH

SEQ ID NO: 13428 - protein, 9 aa, synthetic construct
PTPGSLHLF

SEQ ID NO: 13429 - protein, 9 aa, synthetic construct
PTPGSLHVH

SEQ ID NO: 13430 - protein, 9 aa, synthetic construct
PTPGSLKLF

SEQ ID NO: 13431 - protein, 9 aa, synthetic construct
PTPGSAHLH

SEQ ID NO: 13432 - protein, 9 aa, synthetic construct
PTPGSAHLF

SEQ ID NO: 13433 - protein, 9 aa, synthetic construct
PTPGSAHVY

SEQ ID NO: 13434 - protein, 9 aa, synthetic construct
PTPGSAHVH

SEQ ID NO: 13435 - protein, 9 aa, synthetic construct
PTPGSARLK

SEQ ID NO: 13436 - protein, 9 aa, synthetic construct
PLNAALHVK

SEQ ID NO: 13437 - protein, 9 aa, synthetic construct
PTPGSIHLH

SEQ ID NO: 13438 - protein, 9 aa, synthetic construct
PTPGSIHVK

SEQ ID NO: 13439 - protein, 9 aa, synthetic construct
PTPGSIHVF

SEQ ID NO: 13440 - protein, 9 aa, synthetic construct
PTPGSIKVY

SEQ ID NO: 13441 - protein, 9 aa, synthetic construct
PTPGSIKVF

SEQ ID NO: 13442 - protein, 9 aa, synthetic construct
PTPGSGHVK

SEQ ID NO: 13443 - protein, 9 aa, synthetic construct
PTPGSGHVF

SEQ ID NO: 13444 - protein, 9 aa, synthetic construct
PLNAALRLK

SEQ ID NO: 13445 - protein, 9 aa, synthetic construct
PTPGVVHVK

SEQ ID NO: 13446 - protein, 9 aa, synthetic construct
PTPGVVRVF

SEQ ID NO: 13447 - protein, 9 aa, synthetic construct
PTPGVVKLF

SEQ ID NO: 13448 - protein, 9 aa, synthetic construct
PLNAALKLR

SEQ ID NO: 13449 - protein, 9 aa, synthetic construct
PTPGVAHLK

SEQ ID NO: 13450 - protein, 9 aa, synthetic construct
PTPGVARLF

SEQ ID NO: 13451 - protein, 9 aa, synthetic construct
PLNAALKLF

SEQ ID NO: 13452 - protein, 9 aa, synthetic construct
PTPGVGRVH

SEQ ID NO: 13453 - protein, 9 aa, synthetic construct
PLNAAAHLY

SEQ ID NO: 13454 - protein, 9 aa, synthetic construct
PTPGGVRLH

SEQ ID NO: 13455 - protein, 9 aa, synthetic construct
PTPGGVRVH

SEQ ID NO: 13456 - protein, 9 aa, synthetic construct
PTPGGLHLH

SEQ ID NO: 13457 - protein, 9 aa, synthetic construct
PTPGGLHVR

SEQ ID NO: 13458 - protein, 9 aa, synthetic construct
PLNAAAHVY

SEQ ID NO: 13459 - protein, 9 aa, synthetic construct
PTPGGAHVY

SEQ ID NO: 13460 - protein, 9 aa, synthetic construct
PTPGGAHVR

SEQ ID NO: 13461 - protein, 9 aa, synthetic construct
PLNAAAHVH

SEQ ID NO: 13462 - protein, 9 aa, synthetic construct
PTPGGARLY

SEQ ID NO: 13463 - protein, 9 aa, synthetic construct
PLNAAAHVK

SEQ ID NO: 13464 - protein, 9 aa, synthetic construct
PTPGGAKVY

SEQ ID NO: 13465 - protein, 9 aa, synthetic construct
PTPGGAKVH

SEQ ID NO: 13466 - protein, 9 aa, synthetic construct
PLNAAAHVF

SEQ ID NO: 13467 - protein, 9 aa, synthetic construct
PTPGGIHLF

SEQ ID NO: 13468 - protein, 9 aa, synthetic construct
PTPGGIRLF

SEQ ID NO: 13469 - protein, 9 aa, synthetic construct
PTPAAVHVY

SEQ ID NO: 13470 - protein, 9 aa, synthetic construct
PTPAAVHVK

SEQ ID NO: 13471 - protein, 9 aa, synthetic construct
PTPAAVRLH

SEQ ID NO: 13472 - protein, 9 aa, synthetic construct
PLNAAARVH

SEQ ID NO: 13473 - protein, 9 aa, synthetic construct
PTPAAVKLK

SEQ ID NO: 13474 - protein, 9 aa, synthetic construct
PTPAAAHVY

SEQ ID NO: 13475 - protein, 9 aa, synthetic construct
PTPAAAHVF

SEQ ID NO: 13476 - protein, 9 aa, synthetic construct
PTPAAARLK

SEQ ID NO: 13477 - protein, 9 aa, synthetic construct
PTPAAARVH

SEQ ID NO: 13478 - protein, 9 aa, synthetic construct
PTPAAIRVH

SEQ ID NO: 13479 - protein, 9 aa, synthetic construct
PLNAAAKVH

SEQ ID NO: 13480 - protein, 9 aa, synthetic construct
PTPAAGHVR

SEQ ID NO: 13481 - protein, 9 aa, synthetic construct
PTPAAGKVF

SEQ ID NO: 13482 - protein, 9 aa, synthetic construct
PTPATVRLH

SEQ ID NO: 13483 - protein, 9 aa, synthetic construct
PTPATVKVY

SEQ ID NO: 13484 - protein, 9 aa, synthetic construct
PTPATVKVH

SEQ ID NO: 13485 - protein, 9 aa, synthetic construct
PTPATLHLK

SEQ ID NO: 13486 - protein, 9 aa, synthetic construct
PTPATLHVH

SEQ ID NO: 13487 - protein, 9 aa, synthetic construct
PLNAAIHLF

SEQ ID NO: 13488 - protein, 9 aa, synthetic construct
PTPATLKVY

SEQ ID NO: 13489 - protein, 9 aa, synthetic construct
PTPATAHLY

SEQ ID NO: 13490 - protein, 9 aa, synthetic construct
PTPATAHVR

SEQ ID NO: 13491 - protein, 9 aa, synthetic construct
PTPATAHVF

SEQ ID NO: 13492 - protein, 9 aa, synthetic construct
PLNAAIHVH

SEQ ID NO: 13493 - protein, 9 aa, synthetic construct
PTPATARVY

SEQ ID NO: 13494 - protein, 9 aa, synthetic construct
PTPATAKVY

SEQ ID NO: 13495 - protein, 9 aa, synthetic construct
PLNAAIHVF

SEQ ID NO: 13496 - protein, 9 aa, synthetic construct
PTPATGHVY

SEQ ID NO: 13497 - protein, 9 aa, synthetic construct
PTPATGHVF

SEQ ID NO: 13498 - protein, 9 aa, synthetic construct
PTPATGKLF

SEQ ID NO: 13499 - protein, 9 aa, synthetic construct
PTPASVHLY

SEQ ID NO: 13500 - protein, 9 aa, synthetic construct
PTPASVHLF

SEQ ID NO: 13501 - protein, 9 aa, synthetic construct
PTPASLHLH

SEQ ID NO: 13502 - protein, 9 aa, synthetic construct
PLNAAIKLR

SEQ ID NO: 13503 - protein, 9 aa, synthetic construct
PTPASAHLF

SEQ ID NO: 13504 - protein, 9 aa, synthetic construct
PLNAAIKLH

SEQ ID NO: 13505 - protein, 9 aa, synthetic construct
PTPASARVF

SEQ ID NO: 13506 - protein, 9 aa, synthetic construct
PLNAAIKLF

SEQ ID NO: 13507 - protein, 9 aa, synthetic construct
PTPASIHVH

SEQ ID NO: 13508 - protein, 9 aa, synthetic construct
PTPASIRLH

SEQ ID NO: 13509 - protein, 9 aa, synthetic construct
PTPASIKLF

SEQ ID NO: 13510 - protein, 9 aa, synthetic construct
PTPASGHLR

SEQ ID NO: 13511 - protein, 9 aa, synthetic construct
PTPASGHVR

SEQ ID NO: 13512 - protein, 9 aa, synthetic construct
PTPASGHVH

SEQ ID NO: 13513 - protein, 9 aa, synthetic construct
PLNGAAKVH

SEQ ID NO: 13514 - protein, 9 aa, synthetic construct
PLNAAGHLY

SEQ ID NO: 13515 - protein, 9 aa, synthetic construct
PLNAAGHLR

SEQ ID NO: 13516 - protein, 9 aa, synthetic construct
PTPAVVRVH

SEQ ID NO: 13517 - protein, 9 aa, synthetic construct
PTPAVVKVY

SEQ ID NO: 13518 - protein, 9 aa, synthetic construct
PLNAAGHLK

SEQ ID NO: 13519 - protein, 9 aa, synthetic construct
PLNAAGHVY

SEQ ID NO: 13520 - protein, 9 aa, synthetic construct
PTPAVLKLK

SEQ ID NO: 13521 - protein, 9 aa, synthetic construct
PTPAVAHLH

SEQ ID NO: 13522 - protein, 9 aa, synthetic construct
PTPAVAHVK

SEQ ID NO: 13523 - protein, 9 aa, synthetic construct
PLNAAGHVK

SEQ ID NO: 13524 - protein, 9 aa, synthetic construct
PTPAVIHVK

SEQ ID NO: 13525 - protein, 9 aa, synthetic construct
PLNAAGRLY

SEQ ID NO: 13526 - protein, 9 aa, synthetic construct
PTPAVIKVY

SEQ ID NO: 13527 - protein, 9 aa, synthetic construct
PLNAAGRLH

SEQ ID NO: 13528 - protein, 9 aa, synthetic construct
PTPAVGHLK

SEQ ID NO: 13529 - protein, 9 aa, synthetic construct
PTPAVGHVH

SEQ ID NO: 13530 - protein, 9 aa, synthetic construct
PTPAVGHVK

SEQ ID NO: 13531 - protein, 9 aa, synthetic construct
PTPAVGKLF

SEQ ID NO: 13532 - protein, 9 aa, synthetic construct
PTPAGVRLF

SEQ ID NO: 13533 - protein, 9 aa, synthetic construct
PTPAGVRVH

SEQ ID NO: 13534 - protein, 9 aa, synthetic construct
PLNAAGKLR

SEQ ID NO: 13535 - protein, 9 aa, synthetic construct
PTPAGIRVY

SEQ ID NO: 13536 - protein, 9 aa, synthetic construct
PSNGAVHVK

SEQ ID NO: 13537 - protein, 9 aa, synthetic construct
PSNGAVRLF

SEQ ID NO: 13538 - protein, 9 aa, synthetic construct
PSNGALHLY

SEQ ID NO: 13539 - protein, 9 aa, synthetic construct
PSNGALHLH

SEQ ID NO: 13540 - protein, 9 aa, synthetic construct
PSNGALHLK

SEQ ID NO: 13541 - protein, 9 aa, synthetic construct
PSNGALHLF

SEQ ID NO: 13542 - protein, 9 aa, synthetic construct
PSNGALHVY

SEQ ID NO: 13543 - protein, 9 aa, synthetic construct
PLNATVHLF

SEQ ID NO: 13544 - protein, 9 aa, synthetic construct
PSNGALKVY

SEQ ID NO: 13545 - protein, 9 aa, synthetic construct
PSNGAAKLH

SEQ ID NO: 13546 - protein, 9 aa, synthetic construct
PSNGAAKVH

SEQ ID NO: 13547 - protein, 9 aa, synthetic construct
PSNGAIRVY

SEQ ID NO: 13548 - protein, 9 aa, synthetic construct
PSNGAIKVF

SEQ ID NO: 13549 - protein, 9 aa, synthetic construct
PSNGAGHVH

SEQ ID NO: 13550 - protein, 9 aa, synthetic construct
PSNGAGRLH

SEQ ID NO: 13551 - protein, 9 aa, synthetic construct
PSNGAGKLH

SEQ ID NO: 13552 - protein, 9 aa, synthetic construct
PSNGTVHLR

SEQ ID NO: 13553 - protein, 9 aa, synthetic construct
PSNGTVHLF

SEQ ID NO: 13554 - protein, 9 aa, synthetic construct
PSNGTVHVR

SEQ ID NO: 13555 - protein, 9 aa, synthetic construct
PSNGTVRLH

SEQ ID NO: 13556 - protein, 9 aa, synthetic construct
PSNGTVRVH

SEQ ID NO: 13557 - protein, 9 aa, synthetic construct
PSNGTVKLH

SEQ ID NO: 13558 - protein, 9 aa, synthetic construct
PSNGTVKVY

SEQ ID NO: 13559 - protein, 9 aa, synthetic construct
PSNGTLHLY

SEQ ID NO: 13560 - protein, 9 aa, synthetic construct
PSNGTLHVH

SEQ ID NO: 13561 - protein, 9 aa, synthetic construct
PSNGTLRLH

SEQ ID NO: 13562 - protein, 9 aa, synthetic construct
PSNGTAHVH

SEQ ID NO: 13563 - protein, 9 aa, synthetic construct
PSNGTAHVF

SEQ ID NO: 13564 - protein, 9 aa, synthetic construct
PSNGTAKVY

SEQ ID NO: 13565 - protein, 9 aa, synthetic construct
PSNGTIHLH

SEQ ID NO: 13566 - protein, 9 aa, synthetic construct
PSNGTIRLR

SEQ ID NO: 13567 - protein, 9 aa, synthetic construct
PSNGTIRVH

SEQ ID NO: 13568 - protein, 9 aa, synthetic construct
PSNGTIKLY

SEQ ID NO: 13569 - protein, 9 aa, synthetic construct
PSNGTGRLK

SEQ ID NO: 13570 - protein, 9 aa, synthetic construct
PSNGTGRVR

SEQ ID NO: 13571 - protein, 9 aa, synthetic construct
PLNATVKVF

SEQ ID NO: 13572 - protein, 9 aa, synthetic construct
PSNGTGKVY

SEQ ID NO: 13573 - protein, 9 aa, synthetic construct
PSNGSVHLR

SEQ ID NO: 13574 - protein, 9 aa, synthetic construct
PSNGSVHLF

SEQ ID NO: 13575 - protein, 9 aa, synthetic construct
PSNGSVHVF

SEQ ID NO: 13576 - protein, 9 aa, synthetic construct
PSNGSVKLY

SEQ ID NO: 13577 - protein, 9 aa, synthetic construct
PSNGSLRVK

SEQ ID NO: 13578 - protein, 9 aa, synthetic construct
PLNATLHVH

SEQ ID NO: 13579 - protein, 9 aa, synthetic construct
PLNATLHVK

SEQ ID NO: 13580 - protein, 9 aa, synthetic construct
PSNGSIHVR

SEQ ID NO: 13581 - protein, 9 aa, synthetic construct
PSNGSIRLH

SEQ ID NO: 13582 - protein, 9 aa, synthetic construct
PSNGSIRVF

SEQ ID NO: 13583 - protein, 9 aa, synthetic construct
PSNGSGHVF

SEQ ID NO: 13584 - protein, 9 aa, synthetic construct
PSNGSGKLY

SEQ ID NO: 13585 - protein, 9 aa, synthetic construct
PSNGSGKLH

SEQ ID NO: 13586 - protein, 9 aa, synthetic construct
PSNGVVHLR

SEQ ID NO: 13587 - protein, 9 aa, synthetic construct
PSNGVVHLK

SEQ ID NO: 13588 - protein, 9 aa, synthetic construct
PSNGVVHVR

SEQ ID NO: 13589 - protein, 9 aa, synthetic construct
PSNGVVRVK

SEQ ID NO: 13590 - protein, 9 aa, synthetic construct
PSNGVVRVF

SEQ ID NO: 13591 - protein, 9 aa, synthetic construct
PSNGVVKVY

SEQ ID NO: 13592 - protein, 9 aa, synthetic construct
PLNATLRVK

SEQ ID NO: 13593 - protein, 9 aa, synthetic construct
PLNATLRVF

SEQ ID NO: 13594 - protein, 9 aa, synthetic construct
PLNATLKLF

SEQ ID NO: 13595 - protein, 9 aa, synthetic construct
PSNGVIHVH

SEQ ID NO: 13596 - protein, 9 aa, synthetic construct
PSNGVIRLY

SEQ ID NO: 13597 - protein, 9 aa, synthetic construct
PSNGVGHLY

SEQ ID NO: 13598 - protein, 9 aa, synthetic construct
PSNGVGRVF

SEQ ID NO: 13599 - protein, 9 aa, synthetic construct
PSNGGVHLH

SEQ ID NO: 13600 - protein, 9 aa, synthetic construct
PSNGGVKLH

SEQ ID NO: 13601 - protein, 9 aa, synthetic construct
PSNGGVKVF

SEQ ID NO: 13602 - protein, 9 aa, synthetic construct
PSNGGLHLR

SEQ ID NO: 13603 - protein, 9 aa, synthetic construct
PLNATAHLF

SEQ ID NO: 13604 - protein, 9 aa, synthetic construct
PLNATAHVY

SEQ ID NO: 13605 - protein, 9 aa, synthetic construct
PSNGGAHLR

SEQ ID NO: 13606 - protein, 9 aa, synthetic construct
PSNGGAHLF

SEQ ID NO: 13607 - protein, 9 aa, synthetic construct
PSNGGARLY

SEQ ID NO: 13608 - protein, 9 aa, synthetic construct
PSNGGIKVY

SEQ ID NO: 13609 - protein, 9 aa, synthetic construct
PSNGGIKVH

SEQ ID NO: 13610 - protein, 9 aa, synthetic construct
PSNGGIKVK

SEQ ID NO: 13611 - protein, 9 aa, synthetic construct
PSNGGGHLR

SEQ ID NO: 13612 - protein, 9 aa, synthetic construct
PSNGGGHLF

SEQ ID NO: 13613 - protein, 9 aa, synthetic construct
PSNGGGHVY

SEQ ID NO: 13614 - protein, 9 aa, synthetic construct
PSNGGGHVR

SEQ ID NO: 13615 - protein, 9 aa, synthetic construct
PSNGGGHVH

SEQ ID NO: 13616 - protein, 9 aa, synthetic construct
PSNGGGHVF

SEQ ID NO: 13617 - protein, 9 aa, synthetic construct
PSNGGGRLY

SEQ ID NO: 13618 - protein, 9 aa, synthetic construct
PSNGGGKLF

SEQ ID NO: 13619 - protein, 9 aa, synthetic construct
PSNAAVHVR

SEQ ID NO: 13620 - protein, 9 aa, synthetic construct
PSNAAVHVK

SEQ ID NO: 13621 - protein, 9 aa, synthetic construct
PSNAAVRLF

SEQ ID NO: 13622 - protein, 9 aa, synthetic construct
PSNAAVKLK

SEQ ID NO: 13623 - protein, 9 aa, synthetic construct
PSNAAVKVH

SEQ ID NO: 13624 - protein, 9 aa, synthetic construct
PSNAALHVF

SEQ ID NO: 13625 - protein, 9 aa, synthetic construct
PLNATARVF

SEQ ID NO: 13626 - protein, 9 aa, synthetic construct
PSNAAAHLY

SEQ ID NO: 13627 - protein, 9 aa, synthetic construct
PSNAAAHVK

SEQ ID NO: 13628 - protein, 9 aa, synthetic construct
PSNAAAHVF

SEQ ID NO: 13629 - protein, 9 aa, synthetic construct
PSNAAIHLR

SEQ ID NO: 13630 - protein, 9 aa, synthetic construct
PSNAAIHLH

SEQ ID NO: 13631 - protein, 9 aa, synthetic construct
PSNAAIHLK

SEQ ID NO: 13632 - protein, 9 aa, synthetic construct
PSNAAIHVY

SEQ ID NO: 13633 - protein, 9 aa, synthetic construct
PSNAAIHVK

SEQ ID NO: 13634 - protein, 9 aa, synthetic construct
PLNATAKVY

SEQ ID NO: 13635 - protein, 9 aa, synthetic construct
PSNAAIRVH

SEQ ID NO: 13636 - protein, 9 aa, synthetic construct
PSNAAIRVK

SEQ ID NO: 13637 - protein, 9 aa, synthetic construct
PSNAAIRVF

SEQ ID NO: 13638 - protein, 9 aa, synthetic construct
PSNAAIKLH

SEQ ID NO: 13639 - protein, 9 aa, synthetic construct
PSNAAIKVR

SEQ ID NO: 13640 - protein, 9 aa, synthetic construct
PSNAAGHLH

SEQ ID NO: 13641 - protein, 9 aa, synthetic construct
PSNAAGKLY

SEQ ID NO: 13642 - protein, 9 aa, synthetic construct
PSNATVHLF

SEQ ID NO: 13643 - protein, 9 aa, synthetic construct
PSNATVHVK

SEQ ID NO: 13644 - protein, 9 aa, synthetic construct
PSNATVRVF

SEQ ID NO: 13645 - protein, 9 aa, synthetic construct
PLNATIHLH

SEQ ID NO: 13646 - protein, 9 aa, synthetic construct
PLNATIHLK

SEQ ID NO: 13647 - protein, 9 aa, synthetic construct
PSNATLHVH

SEQ ID NO: 13648 - protein, 9 aa, synthetic construct
PSNATAHLY

SEQ ID NO: 13649 - protein, 9 aa, synthetic construct
PSNATAHVK

SEQ ID NO: 13650 - protein, 9 aa, synthetic construct
PSNATAKVY

SEQ ID NO: 13651 - protein, 9 aa, synthetic construct
PSNATAKVH

SEQ ID NO: 13652 - protein, 9 aa, synthetic construct
PSNATIHLR

SEQ ID NO: 13653 - protein, 9 aa, synthetic construct
PSNATIHLH

SEQ ID NO: 13654 - protein, 9 aa, synthetic construct
PSNATIHLK

SEQ ID NO: 13655 - protein, 9 aa, synthetic construct
PSNATIHVF

SEQ ID NO: 13656 - protein, 7 aa, synthetic construct
PTQGTLR

SEQ ID NO: 13657 - protein, 9 aa, synthetic construct
PLNGAIRLY

SEQ ID NO: 13658 - protein, 9 aa, synthetic construct
PSNATIRLY

SEQ ID NO: 13659 - protein, 9 aa, synthetic construct
PSNATIRLR

SEQ ID NO: 13660 - protein, 9 aa, synthetic construct
PSNATIRVY

SEQ ID NO: 13661 - protein, 9 aa, synthetic construct
PSNATIRVH

SEQ ID NO: 13662 - protein, 9 aa, synthetic construct
PSNATIKVR

SEQ ID NO: 13663 - protein, 9 aa, synthetic construct
PSNATGKLY

SEQ ID NO: 13664 - protein, 9 aa, synthetic construct
PSNATGKVY

SEQ ID NO: 13665 - protein, 9 aa, synthetic construct
PSNATGKVH

SEQ ID NO: 13666 - protein, 9 aa, synthetic construct
PLNATIRVY

SEQ ID NO: 13667 - protein, 9 aa, synthetic construct
PSNASVHLF

SEQ ID NO: 13668 - protein, 9 aa, synthetic construct
PSNASVHVK

SEQ ID NO: 13669 - protein, 9 aa, synthetic construct
PSNASVKVF

SEQ ID NO: 13670 - protein, 9 aa, synthetic construct
PSNASLHLY

SEQ ID NO: 13671 - protein, 9 aa, synthetic construct
PLNGAIRLR

SEQ ID NO: 13672 - protein, 9 aa, synthetic construct
PSNASLKLY

SEQ ID NO: 13673 - protein, 9 aa, synthetic construct
PLNATIKLR

SEQ ID NO: 13674 - protein, 9 aa, synthetic construct
PSNASAHLH

SEQ ID NO: 13675 - protein, 9 aa, synthetic construct
PSNASAHLF

SEQ ID NO: 13676 - protein, 9 aa, synthetic construct
PSNASAHVY

SEQ ID NO: 13677 - protein, 9 aa, synthetic construct
PSNASARVH

SEQ ID NO: 13678 - protein, 9 aa, synthetic construct
PSNASAKVF

SEQ ID NO: 13679 - protein, 9 aa, synthetic construct
PLNATIKVY

SEQ ID NO: 13680 - protein, 9 aa, synthetic construct
PSNASIRVY

SEQ ID NO: 13681 - protein, 9 aa, synthetic construct
PLNGAIRLH

SEQ ID NO: 13682 - protein, 9 aa, synthetic construct
PSNAVVRLF

SEQ ID NO: 13683 - protein, 9 aa, synthetic construct
PSNAVVRVH

SEQ ID NO: 13684 - protein, 9 aa, synthetic construct
PSNAVLHVK

SEQ ID NO: 13685 - protein, 9 aa, synthetic construct
PLNATGHLF

SEQ ID NO: 13686 - protein, 9 aa, synthetic construct
PSNAVAHLY

SEQ ID NO: 13687 - protein, 9 aa, synthetic construct
PSNAVAHLK

SEQ ID NO: 13688 - protein, 9 aa, synthetic construct
PSNAVAHLF

SEQ ID NO: 13689 - protein, 9 aa, synthetic construct
PSNAVAHVY

SEQ ID NO: 13690 - protein, 9 aa, synthetic construct
PSNAVAHVK

SEQ ID NO: 13691 - protein, 9 aa, synthetic construct
PSNAVAHVF

SEQ ID NO: 13692 - protein, 9 aa, synthetic construct
PSNAVIRLY

SEQ ID NO: 13693 - protein, 9 aa, synthetic construct
PSNAVIRLH

SEQ ID NO: 13694 - protein, 9 aa, synthetic construct
PSNAVIRVH

SEQ ID NO: 13695 - protein, 9 aa, synthetic construct
PSNAVIKLY

SEQ ID NO: 13696 - protein, 9 aa, synthetic construct
PSNAVIKLR

SEQ ID NO: 13697 - protein, 9 aa, synthetic construct
PSNAVIKLF

SEQ ID NO: 13698 - protein, 9 aa, synthetic construct
PSNAVIKVH

SEQ ID NO: 13699 - protein, 9 aa, synthetic construct
PSNAVGHLY

SEQ ID NO: 13700 - protein, 9 aa, synthetic construct
PSNAVGHVR

SEQ ID NO: 13701 - protein, 9 aa, synthetic construct
PSNAVGRVH

SEQ ID NO: 13702 - protein, 9 aa, synthetic construct
PSNAGLKLY

SEQ ID NO: 13703 - protein, 9 aa, synthetic construct
PSNAGAHLF

SEQ ID NO: 13704 - protein, 9 aa, synthetic construct
PSNAGAHVY

SEQ ID NO: 13705 - protein, 9 aa, synthetic construct
PSNAGAHVR

SEQ ID NO: 13706 - protein, 9 aa, synthetic construct
PSNAGARLH

SEQ ID NO: 13707 - protein, 9 aa, synthetic construct
PSNAGARVR

SEQ ID NO: 13708 - protein, 9 aa, synthetic construct
PSNAGARVH

SEQ ID NO: 13709 - protein, 9 aa, synthetic construct
PSNAGAKLR

SEQ ID NO: 13710 - protein, 9 aa, synthetic construct
PSNAGAKVY

SEQ ID NO: 13711 - protein, 9 aa, synthetic construct
PSNAGIHVY

SEQ ID NO: 13712 - protein, 9 aa, synthetic construct
PSNAGIRLH

SEQ ID NO: 13713 - protein, 9 aa, synthetic construct
PSNAGIRVH

SEQ ID NO: 13714 - protein, 9 aa, synthetic construct
PLNATGKVH

SEQ ID NO: 13715 - protein, 9 aa, synthetic construct
PLNATGKVF

SEQ ID NO: 13716 - protein, 9 aa, synthetic construct
PSNAGGKVF

SEQ ID NO: 13717 - protein, 9 aa, synthetic construct
PLNASVHVY

SEQ ID NO: 13718 - protein, 9 aa, synthetic construct
PLNASVHVH

SEQ ID NO: 13719 - protein, 9 aa, synthetic construct
PLNASVRLY

SEQ ID NO: 13720 - protein, 9 aa, synthetic construct
PLNASVRLF

SEQ ID NO: 13721 - protein, 9 aa, synthetic construct
PLNASVRVY

SEQ ID NO: 13722 - protein, 9 aa, synthetic construct
PSQGTVKLY

SEQ ID NO: 13723 - protein, 9 aa, synthetic construct
PSQGTARVF

SEQ ID NO: 13724 - protein, 9 aa, synthetic construct
PLNASVKVY

SEQ ID NO: 13725 - protein, 9 aa, synthetic construct
PSQGTIRLY

SEQ ID NO: 13726 - protein, 9 aa, synthetic construct
PSQGTIRVY

SEQ ID NO: 13727 - protein, 9 aa, synthetic construct
PSQGTGHVF

SEQ ID NO: 13728 - protein, 9 aa, synthetic construct
PSQGSVHVY

SEQ ID NO: 13729 - protein, 9 aa, synthetic construct
PSQGSAKVF

SEQ ID NO: 13730 - protein, 9 aa, synthetic construct
PLNASLRVY

SEQ ID NO: 13731 - protein, 9 aa, synthetic construct
PSQGVVKLF

SEQ ID NO: 13732 - protein, 9 aa, synthetic construct
PSQGVLHVH

SEQ ID NO: 13733 - protein, 9 aa, synthetic construct
PSQGVAHLH

SEQ ID NO: 13734 - protein, 9 aa, synthetic construct
PSQGVAHLF

SEQ ID NO: 13735 - protein, 9 aa, synthetic construct
PSQGVIRLY

SEQ ID NO: 13736 - protein, 9 aa, synthetic construct
PSQGVGHLK

SEQ ID NO: 13737 - protein, 9 aa, synthetic construct
PSQGVGHVR

SEQ ID NO: 13738 - protein, 9 aa, synthetic construct
PLNGAIKLR

SEQ ID NO: 13739 - protein, 9 aa, synthetic construct
PLNASAHLH

SEQ ID NO: 13740 - protein, 9 aa, synthetic construct
PLNASAHVY

SEQ ID NO: 13741 - protein, 9 aa, synthetic construct
PLNASAHVK

SEQ ID NO: 13742 - protein, 9 aa, synthetic construct
PSQGGIHVK

SEQ ID NO: 13743 - protein, 9 aa, synthetic construct
PLNASARVY

SEQ ID NO: 13744 - protein, 9 aa, synthetic construct
PSQAAVRVF

SEQ ID NO: 13745 - protein, 9 aa, synthetic construct
PLNASARVF

SEQ ID NO: 13746 - protein, 9 aa, synthetic construct
PLNASAKLR

SEQ ID NO: 13747 - protein, 9 aa, synthetic construct
PSQATAHLH

SEQ ID NO: 13748 - protein, 9 aa, synthetic construct
PSQATAHLF

SEQ ID NO: 13749 - protein, 9 aa, synthetic construct
PSQATIHVK

SEQ ID NO: 13750 - protein, 9 aa, synthetic construct
PLNGAIKVY

SEQ ID NO: 13751 - protein, 9 aa, synthetic construct
PSQATGHLR

SEQ ID NO: 13752 - protein, 9 aa, synthetic construct
PSQATGHLF

SEQ ID NO: 13753 - protein, 9 aa, synthetic construct
PSQATGHVK

SEQ ID NO: 13754 - protein, 9 aa, synthetic construct
PLNASIRVY

SEQ ID NO: 13755 - protein, 9 aa, synthetic construct
PSQASAKLY

SEQ ID NO: 13756 - protein, 9 aa, synthetic construct
PLNASIKVK

SEQ ID NO: 13757 - protein, 9 aa, synthetic construct
PLNASGHLK

SEQ ID NO: 13758 - protein, 9 aa, synthetic construct
PLNASGHLF

SEQ ID NO: 13759 - protein, 9 aa, synthetic construct
PLNASGHVY

SEQ ID NO: 13760 - protein, 9 aa, synthetic construct
PLNASGHVH

SEQ ID NO: 13761 - protein, 9 aa, synthetic construct
PLNASGHVK

SEQ ID NO: 13762 - protein, 9 aa, synthetic construct
PLNASGRVK

SEQ ID NO: 13763 - protein, 9 aa, synthetic construct
PLNGAIKVF

SEQ ID NO: 13764 - protein, 9 aa, synthetic construct
PLNASGKLH

SEQ ID NO: 13765 - protein, 9 aa, synthetic construct
PSQAGIKVH

SEQ ID NO: 13766 - protein, 9 aa, synthetic construct
PSPGAVKVY

SEQ ID NO: 13767 - protein, 9 aa, synthetic construct
PSPGALHLK

SEQ ID NO: 13768 - protein, 9 aa, synthetic construct
PSPGAAHVH

SEQ ID NO: 13769 - protein, 9 aa, synthetic construct
PSPGAARVY

SEQ ID NO: 13770 - protein, 9 aa, synthetic construct
PSPGAAKLY

SEQ ID NO: 13771 - protein, 9 aa, synthetic construct
PSPGAAKVH

SEQ ID NO: 13772 - protein, 9 aa, synthetic construct
PSPGAIHVH

SEQ ID NO: 13773 - protein, 9 aa, synthetic construct
PSPGAIHVK

SEQ ID NO: 13774 - protein, 9 aa, synthetic construct
PSPGAIHVF

SEQ ID NO: 13775 - protein, 9 aa, synthetic construct
PSPGTVHLY

SEQ ID NO: 13776 - protein, 9 aa, synthetic construct
PSPGTVHLH

SEQ ID NO: 13777 - protein, 9 aa, synthetic construct
PSPGTVRLY

SEQ ID NO: 13778 - protein, 9 aa, synthetic construct
PLNAVVRVH

SEQ ID NO: 13779 - protein, 9 aa, synthetic construct
PSPGTVKLY

SEQ ID NO: 13780 - protein, 9 aa, synthetic construct
PSPGTVKLF

SEQ ID NO: 13781 - protein, 9 aa, synthetic construct
PSPGTLKLH

SEQ ID NO: 13782 - protein, 9 aa, synthetic construct
PSPGTAHLY

SEQ ID NO: 13783 - protein, 9 aa, synthetic construct
PSPGTAHLK

SEQ ID NO: 13784 - protein, 9 aa, synthetic construct
PSPGTAHVR

SEQ ID NO: 13785 - protein, 9 aa, synthetic construct
PSPGTAHVH

SEQ ID NO: 13786 - protein, 9 aa, synthetic construct
PSPGTAHVF

SEQ ID NO: 13787 - protein, 9 aa, synthetic construct
PSPGTARLH

SEQ ID NO: 13788 - protein, 9 aa, synthetic construct
PSPGTARVY

SEQ ID NO: 13789 - protein, 9 aa, synthetic construct
PSPGTARVH

SEQ ID NO: 13790 - protein, 9 aa, synthetic construct
PSPGTARVF

SEQ ID NO: 13791 - protein, 9 aa, synthetic construct
PSPGTAKLY

SEQ ID NO: 13792 - protein, 9 aa, synthetic construct
PSPGTAKLR

SEQ ID NO: 13793 - protein, 9 aa, synthetic construct
PSPGTAKVY

SEQ ID NO: 13794 - protein, 9 aa, synthetic construct
PSPGTAKVH

SEQ ID NO: 13795 - protein, 9 aa, synthetic construct
PSPGTAKVK

SEQ ID NO: 13796 - protein, 9 aa, synthetic construct
PSPGTIHVY

SEQ ID NO: 13797 - protein, 9 aa, synthetic construct
PSPGTIHVK

SEQ ID NO: 13798 - protein, 9 aa, synthetic construct
PSPGTIRLY

SEQ ID NO: 13799 - protein, 9 aa, synthetic construct
PSPGTIKVY

SEQ ID NO: 13800 - protein, 9 aa, synthetic construct
PSPGTGHLR

SEQ ID NO: 13801 - protein, 9 aa, synthetic construct
PSPGTGHLH

SEQ ID NO: 13802 - protein, 9 aa, synthetic construct
PSPGTGHLF

SEQ ID NO: 13803 - protein, 9 aa, synthetic construct
PSPGTGRLF

SEQ ID NO: 13804 - protein, 9 aa, synthetic construct
PLNAVVKVF

SEQ ID NO: 13805 - protein, 9 aa, synthetic construct
PSPGTGKLY

SEQ ID NO: 13806 - protein, 9 aa, synthetic construct
PSPGTGKVY

SEQ ID NO: 13807 - protein, 9 aa, synthetic construct
PSPGSVHLY

SEQ ID NO: 13808 - protein, 9 aa, synthetic construct
PSPGSVHLF

SEQ ID NO: 13809 - protein, 9 aa, synthetic construct
PSPGSVHVK

SEQ ID NO: 13810 - protein, 9 aa, synthetic construct
PSPGSVHVF

SEQ ID NO: 13811 - protein, 9 aa, synthetic construct
PSPGSVKVH

SEQ ID NO: 13812 - protein, 9 aa, synthetic construct
PSPGSLHLY

SEQ ID NO: 13813 - protein, 9 aa, synthetic construct
PSPGSLKVF

SEQ ID NO: 13814 - protein, 9 aa, synthetic construct
PSPGSAHLY

SEQ ID NO: 13815 - protein, 9 aa, synthetic construct
PSPGSAHLF

SEQ ID NO: 13816 - protein, 9 aa, synthetic construct
PSPGSAHVY

SEQ ID NO: 13817 - protein, 9 aa, synthetic construct
PSPGSAHVR

SEQ ID NO: 13818 - protein, 9 aa, synthetic construct
PSPGSAHVK

SEQ ID NO: 13819 - protein, 9 aa, synthetic construct
PSPGSAHVF

SEQ ID NO: 13820 - protein, 9 aa, synthetic construct
PSPGSARVY

SEQ ID NO: 13821 - protein, 9 aa, synthetic construct
PSPGSARVH

SEQ ID NO: 13822 - protein, 9 aa, synthetic construct
PSPGSAKVF

SEQ ID NO: 13823 - protein, 9 aa, synthetic construct
PSPGSIHLY

SEQ ID NO: 13824 - protein, 9 aa, synthetic construct
PSPGSIHLH

SEQ ID NO: 13825 - protein, 9 aa, synthetic construct
PSPGSIHLK

SEQ ID NO: 13826 - protein, 9 aa, synthetic construct
PSPGSIHLF

SEQ ID NO: 13827 - protein, 9 aa, synthetic construct
PSPGSIHVR

SEQ ID NO: 13828 - protein, 9 aa, synthetic construct
PSPGSIHVH

SEQ ID NO: 13829 - protein, 9 aa, synthetic construct
PSPGSIHVK

SEQ ID NO: 13830 - protein, 9 aa, synthetic construct
PSPGSIHVF

SEQ ID NO: 13831 - protein, 9 aa, synthetic construct
PSPGSIRLY

SEQ ID NO: 13832 - protein, 9 aa, synthetic construct
PSPGSIRLH

SEQ ID NO: 13833 - protein, 9 aa, synthetic construct
PSPGSIKVY

SEQ ID NO: 13834 - protein, 9 aa, synthetic construct
PSPGSIKVR

SEQ ID NO: 13835 - protein, 9 aa, synthetic construct
PSPGVVHVY

SEQ ID NO: 13836 - protein, 9 aa, synthetic construct
PSPGVVHVK

SEQ ID NO: 13837 - protein, 9 aa, synthetic construct
PSPGVVRVH

SEQ ID NO: 13838 - protein, 9 aa, synthetic construct
PSPGVVKLF

SEQ ID NO: 13839 - protein, 9 aa, synthetic construct
PSPGVVKVY

SEQ ID NO: 13840 - protein, 9 aa, synthetic construct
PSPGVLHVK

SEQ ID NO: 13841 - protein, 9 aa, synthetic construct
PSPGVLKVH

SEQ ID NO: 13842 - protein, 9 aa, synthetic construct
PSPGVAHLY

SEQ ID NO: 13843 - protein, 9 aa, synthetic construct
PSPGVAHLR

SEQ ID NO: 13844 - protein, 9 aa, synthetic construct
PSPGVAHLF

SEQ ID NO: 13845 - protein, 9 aa, synthetic construct
PSPGVAHVY

SEQ ID NO: 13846 - protein, 9 aa, synthetic construct
PSPGVAHVR

SEQ ID NO: 13847 - protein, 9 aa, synthetic construct
PSPGVAHVH

SEQ ID NO: 13848 - protein, 9 aa, synthetic construct
PSPGVAHVK

SEQ ID NO: 13849 - protein, 9 aa, synthetic construct
PSPGVAHVF

SEQ ID NO: 13850 - protein, 9 aa, synthetic construct
PSPGVAKLF

SEQ ID NO: 13851 - protein, 9 aa, synthetic construct
PSPGVIHLK

SEQ ID NO: 13852 - protein, 9 aa, synthetic construct
PSPGVGHLH

SEQ ID NO: 13853 - protein, 9 aa, synthetic construct
PSPGVGHLK

SEQ ID NO: 13854 - protein, 9 aa, synthetic construct
PSPGVGHVY

SEQ ID NO: 13855 - protein, 9 aa, synthetic construct
PSPGVGHVH

SEQ ID NO: 13856 - protein, 9 aa, synthetic construct
PSPGVGRVY

SEQ ID NO: 13857 - protein, 9 aa, synthetic construct
PSPGVGRVH

SEQ ID NO: 13858 - protein, 9 aa, synthetic construct
PSPGVGKLH

SEQ ID NO: 13859 - protein, 9 aa, synthetic construct
PLNAVAHLH

SEQ ID NO: 13860 - protein, 9 aa, synthetic construct
PSPGGLKVF

SEQ ID NO: 13861 - protein, 9 aa, synthetic construct
PSPGGAHLH

SEQ ID NO: 13862 - protein, 9 aa, synthetic construct
PSPGGAHLK

SEQ ID NO: 13863 - protein, 9 aa, synthetic construct
PSPGGIHLY

SEQ ID NO: 13864 - protein, 9 aa, synthetic construct
PSPGGIHVY

SEQ ID NO: 13865 - protein, 9 aa, synthetic construct
PSPGGIRLH

SEQ ID NO: 13866 - protein, 9 aa, synthetic construct
PSPGGIKLH

SEQ ID NO: 13867 - protein, 9 aa, synthetic construct
PSPAAVHLR

SEQ ID NO: 13868 - protein, 9 aa, synthetic construct
PSPAAVHLH

SEQ ID NO: 13869 - protein, 9 aa, synthetic construct
PSPAAVKVY

SEQ ID NO: 13870 - protein, 9 aa, synthetic construct
PSPAALHLF

SEQ ID NO: 13871 - protein, 9 aa, synthetic construct
PSPAALKLK

SEQ ID NO: 13872 - protein, 9 aa, synthetic construct
PSPAAARVY

SEQ ID NO: 13873 - protein, 9 aa, synthetic construct
PSPAAIHLF

SEQ ID NO: 13874 - protein, 9 aa, synthetic construct
PSPAAIHVH

SEQ ID NO: 13875 - protein, 9 aa, synthetic construct
PSPAAIHVK

SEQ ID NO: 13876 - protein, 9 aa, synthetic construct
PSPAAIKVY

SEQ ID NO: 13877 - protein, 9 aa, synthetic construct
PSPAAGHLR

SEQ ID NO: 13878 - protein, 9 aa, synthetic construct
PSPAAGRLH

SEQ ID NO: 13879 - protein, 9 aa, synthetic construct
PSPAAGKLY

SEQ ID NO: 13880 - protein, 9 aa, synthetic construct
PSPAAGKLR

SEQ ID NO: 13881 - protein, 9 aa, synthetic construct
PSPAAGKLK

SEQ ID NO: 13882 - protein, 9 aa, synthetic construct
PSPAAGKVH

SEQ ID NO: 13883 - protein, 9 aa, synthetic construct
PSPATLRVF

SEQ ID NO: 13884 - protein, 9 aa, synthetic construct
PSPATLKLK

SEQ ID NO: 13885 - protein, 9 aa, synthetic construct
PSPATAHLR

SEQ ID NO: 13886 - protein, 9 aa, synthetic construct
PSPATAHLH

SEQ ID NO: 13887 - protein, 9 aa, synthetic construct
PSPATAHVY

SEQ ID NO: 13888 - protein, 9 aa, synthetic construct
PSPATAHVH

SEQ ID NO: 13889 - protein, 9 aa, synthetic construct
PSPATAHVK

SEQ ID NO: 13890 - protein, 9 aa, synthetic construct
PSPATARVF

SEQ ID NO: 13891 - protein, 9 aa, synthetic construct
PSPATAKVY

SEQ ID NO: 13892 - protein, 9 aa, synthetic construct
PSPATIKLF

SEQ ID NO: 13893 - protein, 9 aa, synthetic construct
PSPATGHLY

SEQ ID NO: 13894 - protein, 9 aa, synthetic construct
PSPATGHLH

SEQ ID NO: 13895 - protein, 9 aa, synthetic construct
PSPATGHLK

SEQ ID NO: 13896 - protein, 9 aa, synthetic construct
PSPATGHVR

SEQ ID NO: 13897 - protein, 9 aa, synthetic construct
PSPATGHVK

SEQ ID NO: 13898 - protein, 9 aa, synthetic construct
PSPATGHVF

SEQ ID NO: 13899 - protein, 9 aa, synthetic construct
PSPATGKLH

SEQ ID NO: 13900 - protein, 9 aa, synthetic construct
PSPATGKLF

SEQ ID NO: 13901 - protein, 9 aa, synthetic construct
PSPATGKVY

SEQ ID NO: 13902 - protein, 9 aa, synthetic construct
PSPATGKVH

SEQ ID NO: 13903 - protein, 9 aa, synthetic construct
PSPASVHVK

SEQ ID NO: 13904 - protein, 9 aa, synthetic construct
PSPASLHLY

SEQ ID NO: 13905 - protein, 9 aa, synthetic construct
PSPASAHLF

SEQ ID NO: 13906 - protein, 9 aa, synthetic construct
PSPASAHVY

SEQ ID NO: 13907 - protein, 9 aa, synthetic construct
PLNAVIKLH

SEQ ID NO: 13908 - protein, 9 aa, synthetic construct
PSPASIHVY

SEQ ID NO: 13909 - protein, 9 aa, synthetic construct
PSPASGHLR

SEQ ID NO: 13910 - protein, 9 aa, synthetic construct
PSPASGHVH

SEQ ID NO: 13911 - protein, 9 aa, synthetic construct
PSPAVVHVH

SEQ ID NO: 13912 - protein, 9 aa, synthetic construct
PSPAVVRLY

SEQ ID NO: 13913 - protein, 9 aa, synthetic construct
PSPAVVRVH

SEQ ID NO: 13914 - protein, 9 aa, synthetic construct
PSPAVLKLY

SEQ ID NO: 13915 - protein, 9 aa, synthetic construct
PSPAVAHVR

SEQ ID NO: 13916 - protein, 9 aa, synthetic construct
PSPAVAKLF

SEQ ID NO: 13917 - protein, 9 aa, synthetic construct
PSPAVIKVH

SEQ ID NO: 13918 - protein, 9 aa, synthetic construct
PSPAVGRVH

SEQ ID NO: 13919 - protein, 9 aa, synthetic construct
PSPAGAHVY

SEQ ID NO: 13920 - protein, 9 aa, synthetic construct
PSPAGAKLH

SEQ ID NO: 13921 - protein, 9 aa, synthetic construct
PSPAGGKLH

SEQ ID NO: 13922 - protein, 9 aa, synthetic construct
PLNGAGRVY

SEQ ID NO: 13923 - protein, 9 aa, synthetic construct
PLNAGVHLY

SEQ ID NO: 13924 - protein, 9 aa, synthetic construct
PANGAVRLY

SEQ ID NO: 13925 - protein, 9 aa, synthetic construct
PANGAVKVY

SEQ ID NO: 13926 - protein, 9 aa, synthetic construct
PANGALHVY

SEQ ID NO: 13927 - protein, 9 aa, synthetic construct
PLNAGVHVR

SEQ ID NO: 13928 - protein, 9 aa, synthetic construct
PANGAAHLK

SEQ ID NO: 13929 - protein, 9 aa, synthetic construct
PANGAAKLR

SEQ ID NO: 13930 - protein, 9 aa, synthetic construct
PANGAAKVY

SEQ ID NO: 13931 - protein, 9 aa, synthetic construct
PANGAAKVK

SEQ ID NO: 13932 - protein, 9 aa, synthetic construct
PANGAIHLR

SEQ ID NO: 13933 - protein, 9 aa, synthetic construct
PANGAIHLH

SEQ ID NO: 13934 - protein, 9 aa, synthetic construct
PANGAIHLF

SEQ ID NO: 13935 - protein, 9 aa, synthetic construct
PANGAIHVY

SEQ ID NO: 13936 - protein, 9 aa, synthetic construct
PANGAIRLH

SEQ ID NO: 13937 - protein, 9 aa, synthetic construct
PANGAIRVY

SEQ ID NO: 13938 - protein, 9 aa, synthetic construct
PANGAIKLF

SEQ ID NO: 13939 - protein, 9 aa, synthetic construct
PANGAGHLY

SEQ ID NO: 13940 - protein, 9 aa, synthetic construct
PANGAGHLR

SEQ ID NO: 13941 - protein, 9 aa, synthetic construct
PANGAGHLK

SEQ ID NO: 13942 - protein, 9 aa, synthetic construct
PANGAGRLF

SEQ ID NO: 13943 - protein, 9 aa, synthetic construct
PANGAGRVF

SEQ ID NO: 13944 - protein, 9 aa, synthetic construct
PANGAGKLF

SEQ ID NO: 13945 - protein, 9 aa, synthetic construct
PANGAGKVY

SEQ ID NO: 13946 - protein, 9 aa, synthetic construct
PLNAGVRVY

SEQ ID NO: 13947 - protein, 9 aa, synthetic construct
PANGTVHLR

SEQ ID NO: 13948 - protein, 9 aa, synthetic construct
PANGTVHLH

SEQ ID NO: 13949 - protein, 9 aa, synthetic construct
PANGTVHVH

SEQ ID NO: 13950 - protein, 9 aa, synthetic construct
PANGTVHVK

SEQ ID NO: 13951 - protein, 9 aa, synthetic construct
PANGTVHVF

SEQ ID NO: 13952 - protein, 9 aa, synthetic construct
PANGTVRLF

SEQ ID NO: 13953 - protein, 9 aa, synthetic construct
PANGTVKLY

SEQ ID NO: 13954 - protein, 9 aa, synthetic construct
PANGTVKVY

SEQ ID NO: 13955 - protein, 9 aa, synthetic construct
PANGTLKVR

SEQ ID NO: 13956 - protein, 9 aa, synthetic construct
PANGTAHLK

SEQ ID NO: 13957 - protein, 9 aa, synthetic construct
PANGTAHLF

SEQ ID NO: 13958 - protein, 9 aa, synthetic construct
PANGTARLH

SEQ ID NO: 13959 - protein, 9 aa, synthetic construct
PANGTARLF

SEQ ID NO: 13960 - protein, 9 aa, synthetic construct
PANGTARVY

SEQ ID NO: 13961 - protein, 9 aa, synthetic construct
PANGTARVR

SEQ ID NO: 13962 - protein, 9 aa, synthetic construct
PANGTARVK

SEQ ID NO: 13963 - protein, 9 aa, synthetic construct
PANGTARVF

SEQ ID NO: 13964 - protein, 9 aa, synthetic construct
PANGTAKLR

SEQ ID NO: 13965 - protein, 9 aa, synthetic construct
PANGTAKLH

SEQ ID NO: 13966 - protein, 9 aa, synthetic construct
PANGTAKVK

SEQ ID NO: 13967 - protein, 9 aa, synthetic construct
PANGTIHLR

SEQ ID NO: 13968 - protein, 9 aa, synthetic construct
PANGTIHLH

SEQ ID NO: 13969 - protein, 9 aa, synthetic construct
PANGTIHVY

SEQ ID NO: 13970 - protein, 9 aa, synthetic construct
PANGTIHVF

SEQ ID NO: 13971 - protein, 9 aa, synthetic construct
PANGTIRLY

SEQ ID NO: 13972 - protein, 9 aa, synthetic construct
PANGTIRLR

SEQ ID NO: 13973 - protein, 9 aa, synthetic construct
PANGTIRLH

SEQ ID NO: 13974 - protein, 9 aa, synthetic construct
PANGTIRVY

SEQ ID NO: 13975 - protein, 9 aa, synthetic construct
PANGTIRVH

SEQ ID NO: 13976 - protein, 9 aa, synthetic construct
PANGTIKLR

SEQ ID NO: 13977 - protein, 9 aa, synthetic construct
PANGTIKLF

SEQ ID NO: 13978 - protein, 9 aa, synthetic construct
PANGTIKVR

SEQ ID NO: 13979 - protein, 9 aa, synthetic construct
PANGTIKVK

SEQ ID NO: 13980 - protein, 9 aa, synthetic construct
PANGTIKVF

SEQ ID NO: 13981 - protein, 9 aa, synthetic construct
PANGTGHLR

SEQ ID NO: 13982 - protein, 9 aa, synthetic construct
PANGTGRLF

SEQ ID NO: 13983 - protein, 9 aa, synthetic construct
PANGTGKLH

SEQ ID NO: 13984 - protein, 9 aa, synthetic construct
PANGTGKVY

SEQ ID NO: 13985 - protein, 9 aa, synthetic construct
PANGTGKVH

SEQ ID NO: 13986 - protein, 9 aa, synthetic construct
PANGSLKLY

SEQ ID NO: 13987 - protein, 9 aa, synthetic construct
PANGSAHVR

SEQ ID NO: 13988 - protein, 9 aa, synthetic construct
PANGSARVY

SEQ ID NO: 13989 - protein, 9 aa, synthetic construct
PANGSARVH

SEQ ID NO: 13990 - protein, 9 aa, synthetic construct
PANGSAKLY

SEQ ID NO: 13991 - protein, 9 aa, synthetic construct
PANGSAKVY

SEQ ID NO: 13992 - protein, 9 aa, synthetic construct
PANGSIHLY

SEQ ID NO: 13993 - protein, 9 aa, synthetic construct
PANGSIHLK

SEQ ID NO: 13994 - protein, 9 aa, synthetic construct
PANGSIHLF

SEQ ID NO: 13995 - protein, 9 aa, synthetic construct
PANGSIHVF

SEQ ID NO: 13996 - protein, 9 aa, synthetic construct
PANGSIRLY

SEQ ID NO: 13997 - protein, 9 aa, synthetic construct
PANGSIRLH

SEQ ID NO: 13998 - protein, 9 aa, synthetic construct
PANGSIKLF

SEQ ID NO: 13999 - protein, 9 aa, synthetic construct
PANGSIKVR

SEQ ID NO: 14000 - protein, 9 aa, synthetic construct
PANGSGHLR

SEQ ID NO: 14001 - protein, 9 aa, synthetic construct
PANGSGHLH

SEQ ID NO: 14002 - protein, 9 aa, synthetic construct
PANGVVHVY

SEQ ID NO: 14003 - protein, 9 aa, synthetic construct
PANGVVHVK

SEQ ID NO: 14004 - protein, 9 aa, synthetic construct
PANGVVKLF

SEQ ID NO: 14005 - protein, 9 aa, synthetic construct
PANGVVKVF

SEQ ID NO: 14006 - protein, 9 aa, synthetic construct
PANGVLHVH

SEQ ID NO: 14007 - protein, 9 aa, synthetic construct
PLNAGLKLY

SEQ ID NO: 14008 - protein, 9 aa, synthetic construct
PANGVLKVY

SEQ ID NO: 14009 - protein, 9 aa, synthetic construct
PANGVAKLR

SEQ ID NO: 14010 - protein, 9 aa, synthetic construct
PANGVAKLF

SEQ ID NO: 14011 - protein, 9 aa, synthetic construct
PANGVGHLR

SEQ ID NO: 14012 - protein, 9 aa, synthetic construct
PANGVGHVR

SEQ ID NO: 14013 - protein, 9 aa, synthetic construct
PANGVGRLH

SEQ ID NO: 14014 - protein, 9 aa, synthetic construct
PANGVGRLF

SEQ ID NO: 14015 - protein, 9 aa, synthetic construct
PANGVGRVH

SEQ ID NO: 14016 - protein, 9 aa, synthetic construct
PANGVGKLY

SEQ ID NO: 14017 - protein, 9 aa, synthetic construct
PANGVGKLR

SEQ ID NO: 14018 - protein, 9 aa, synthetic construct
PANGVGKLK

SEQ ID NO: 14019 - protein, 9 aa, synthetic construct
PANGVGKVH

SEQ ID NO: 14020 - protein, 9 aa, synthetic construct
PANGVGKVK

SEQ ID NO: 14021 - protein, 9 aa, synthetic construct
PANGVGKVF

SEQ ID NO: 14022 - protein, 9 aa, synthetic construct
PLNGAGKLR

SEQ ID NO: 14023 - protein, 9 aa, synthetic construct
PANGGVHLY

SEQ ID NO: 14024 - protein, 9 aa, synthetic construct
PANGGVHVF

SEQ ID NO: 14025 - protein, 9 aa, synthetic construct
PANGGVKVY

SEQ ID NO: 14026 - protein, 9 aa, synthetic construct
PLNAGAHVY

SEQ ID NO: 14027 - protein, 9 aa, synthetic construct
PANGGLKLY

SEQ ID NO: 14028 - protein, 9 aa, synthetic construct
PANGGAHLF

SEQ ID NO: 14029 - protein, 9 aa, synthetic construct
PANGGAHVR

SEQ ID NO: 14030 - protein, 9 aa, synthetic construct
PANGGARVY

SEQ ID NO: 14031 - protein, 9 aa, synthetic construct
PANGGARVR

SEQ ID NO: 14032 - protein, 9 aa, synthetic construct
PANGGARVH

SEQ ID NO: 14033 - protein, 9 aa, synthetic construct
PANGGARVF

SEQ ID NO: 14034 - protein, 9 aa, synthetic construct
PANGGAKLR

SEQ ID NO: 14035 - protein, 9 aa, synthetic construct
PANGGAKVH

SEQ ID NO: 14036 - protein, 9 aa, synthetic construct
PANGGAKVK

SEQ ID NO: 14037 - protein, 9 aa, synthetic construct
PANGGIHLY

SEQ ID NO: 14038 - protein, 9 aa, synthetic construct
PANGGIHLH

SEQ ID NO: 14039 - protein, 9 aa, synthetic construct
PANGGIHLK

SEQ ID NO: 14040 - protein, 9 aa, synthetic construct
PANGGIHVF

SEQ ID NO: 14041 - protein, 9 aa, synthetic construct
PANGGIRLY

SEQ ID NO: 14042 - protein, 9 aa, synthetic construct
PANGGIRLH

SEQ ID NO: 14043 - protein, 9 aa, synthetic construct
PANGGIRVY

SEQ ID NO: 14044 - protein, 9 aa, synthetic construct
PANGGIRVH

SEQ ID NO: 14045 - protein, 9 aa, synthetic construct
PANGGIKLH

SEQ ID NO: 14046 - protein, 9 aa, synthetic construct
PANGGGRLH

SEQ ID NO: 14047 - protein, 9 aa, synthetic construct
PANGGGKLH

SEQ ID NO: 14048 - protein, 9 aa, synthetic construct
PANAAVHLH

SEQ ID NO: 14049 - protein, 9 aa, synthetic construct
PANAAVHVK

SEQ ID NO: 14050 - protein, 9 aa, synthetic construct
PLNAGARVR

SEQ ID NO: 14051 - protein, 9 aa, synthetic construct
PANAALHLY

SEQ ID NO: 14052 - protein, 9 aa, synthetic construct
PANAALHLF

SEQ ID NO: 14053 - protein, 9 aa, synthetic construct
PANAALRLY

SEQ ID NO: 14054 - protein, 9 aa, synthetic construct
PLNAGAKLR

SEQ ID NO: 14055 - protein, 9 aa, synthetic construct
PANAAIHVF

SEQ ID NO: 14056 - protein, 9 aa, synthetic construct
PANAAIRLR

SEQ ID NO: 14057 - protein, 9 aa, synthetic construct
PANAAIRVF

SEQ ID NO: 14058 - protein, 9 aa, synthetic construct
PANAAIKVY

SEQ ID NO: 14059 - protein, 9 aa, synthetic construct
PANAAGHLR

SEQ ID NO: 14060 - protein, 9 aa, synthetic construct
PANAAGKLF

SEQ ID NO: 14061 - protein, 9 aa, synthetic construct
PANATVKVY

SEQ ID NO: 14062 - protein, 9 aa, synthetic construct
PANATLHLF

SEQ ID NO: 14063 - protein, 9 aa, synthetic construct
PANATARLH

SEQ ID NO: 14064 - protein, 9 aa, synthetic construct
PANATIKVY

SEQ ID NO: 14065 - protein, 9 aa, synthetic construct
PANATGHLR

SEQ ID NO: 14066 - protein, 9 aa, synthetic construct
PANATGHLF

SEQ ID NO: 14067 - protein, 9 aa, synthetic construct
PANATGHVF

SEQ ID NO: 14068 - protein, 9 aa, synthetic construct
PANASVRVY

SEQ ID NO: 14069 - protein, 9 aa, synthetic construct
PLNGAGKVR

SEQ ID NO: 14070 - protein, 9 aa, synthetic construct
PANASLKLY

SEQ ID NO: 14071 - protein, 9 aa, synthetic construct
PLNAGIKLH

SEQ ID NO: 14072 - protein, 9 aa, synthetic construct
PANASAKLH

SEQ ID NO: 14073 - protein, 9 aa, synthetic construct
PANAVVKVF

SEQ ID NO: 14074 - protein, 9 aa, synthetic construct
PANAVAKLF

SEQ ID NO: 14075 - protein, 9 aa, synthetic construct
PANAVIRLY

SEQ ID NO: 14076 - protein, 9 aa, synthetic construct
PANAVIKLH

SEQ ID NO: 14077 - protein, 9 aa, synthetic construct
PANAVIKVH

SEQ ID NO: 14078 - protein, 9 aa, synthetic construct
PANAVGKLH

SEQ ID NO: 14079 - protein, 9 aa, synthetic construct
PANAVGKVF

SEQ ID NO: 14080 - protein, 9 aa, synthetic construct
PANAGAKLR

SEQ ID NO: 14081 - protein, 9 aa, synthetic construct
PAQGALKVY

SEQ ID NO: 14082 - protein, 9 aa, synthetic construct
PAQGAAHLK

SEQ ID NO: 14083 - protein, 9 aa, synthetic construct
PAQGAAHVH

SEQ ID NO: 14084 - protein, 9 aa, synthetic construct
PAQGAARVY

SEQ ID NO: 14085 - protein, 9 aa, synthetic construct
PAQGAIHVH

SEQ ID NO: 14086 - protein, 9 aa, synthetic construct
PAQGAIHVK

SEQ ID NO: 14087 - protein, 9 aa, synthetic construct
PAQGAIHVF

SEQ ID NO: 14088 - protein, 9 aa, synthetic construct
PAQGAIRLY

SEQ ID NO: 14089 - protein, 9 aa, synthetic construct
PAQGAGHLR

SEQ ID NO: 14090 - protein, 9 aa, synthetic construct
PAQGAGKVF

SEQ ID NO: 14091 - protein, 9 aa, synthetic construct
PAQGTVHLR

SEQ ID NO: 14092 - protein, 9 aa, synthetic construct
PAQGTVRLF

SEQ ID NO: 14093 - protein, 9 aa, synthetic construct
PAQGTVKLY

SEQ ID NO: 14094 - protein, 9 aa, synthetic construct
PAQGTVKLF

SEQ ID NO: 14095 - protein, 9 aa, synthetic construct
PAQGTLKLH

SEQ ID NO: 14096 - protein, 9 aa, synthetic construct
PAQGTLKVY

SEQ ID NO: 14097 - protein, 9 aa, synthetic construct
PAQGTIHLH

SEQ ID NO: 14098 - protein, 9 aa, synthetic construct
PAQGTIRLY

SEQ ID NO: 14099 - protein, 9 aa, synthetic construct
PAQGTIRVY

SEQ ID NO: 14100 - protein, 9 aa, synthetic construct
PAQGTIKVY

SEQ ID NO: 14101 - protein, 9 aa, synthetic construct
PAQGTGHLR

SEQ ID NO: 14102 - protein, 9 aa, synthetic construct
PAQGTGHLK

SEQ ID NO: 14103 - protein, 9 aa, synthetic construct
PAQGTGHVF

SEQ ID NO: 14104 - protein, 9 aa, synthetic construct
PAQGTGKVH

SEQ ID NO: 14105 - protein, 9 aa, synthetic construct
PAQGSVHLY

SEQ ID NO: 14106 - protein, 9 aa, synthetic construct
PAQGSVHLF

SEQ ID NO: 14107 - protein, 9 aa, synthetic construct
PAQGSVHVK

SEQ ID NO: 14108 - protein, 9 aa, synthetic construct
PAQGSVRLY

SEQ ID NO: 14109 - protein, 9 aa, synthetic construct
PAQGSVRVY

SEQ ID NO: 14110 - protein, 9 aa, synthetic construct
PAQGSVKLR

SEQ ID NO: 14111 - protein, 9 aa, synthetic construct
PAQGSVKLH

SEQ ID NO: 14112 - protein, 9 aa, synthetic construct
PAQGSLHLY

SEQ ID NO: 14113 - protein, 9 aa, synthetic construct
PAQGSLKLY

SEQ ID NO: 14114 - protein, 9 aa, synthetic construct
PAQGSAHLY

SEQ ID NO: 14115 - protein, 9 aa, synthetic construct
PAQGSAHLH

SEQ ID NO: 14116 - protein, 9 aa, synthetic construct
PAQGSAHVR

SEQ ID NO: 14117 - protein, 9 aa, synthetic construct
PAQGSAHVF

SEQ ID NO: 14118 - protein, 9 aa, synthetic construct
PAQGSARLH

SEQ ID NO: 14119 - protein, 9 aa, synthetic construct
PAQGSARVH

SEQ ID NO: 14120 - protein, 9 aa, synthetic construct
PAQGSARVF

SEQ ID NO: 14121 - protein, 9 aa, synthetic construct
PAQGSAKLY

SEQ ID NO: 14122 - protein, 9 aa, synthetic construct
PAQGSAKLF

SEQ ID NO: 14123 - protein, 9 aa, synthetic construct
PAQGSAKVH

SEQ ID NO: 14124 - protein, 9 aa, synthetic construct
PAQGSIHLH

SEQ ID NO: 14125 - protein, 9 aa, synthetic construct
PAQGSIHLK

SEQ ID NO: 14126 - protein, 9 aa, synthetic construct
PAQGSIRLY

SEQ ID NO: 14127 - protein, 9 aa, synthetic construct
PAQGSIRLH

SEQ ID NO: 14128 - protein, 9 aa, synthetic construct
PAQGSIRLF

SEQ ID NO: 14129 - protein, 9 aa, synthetic construct
PAQGSIRVR

SEQ ID NO: 14130 - protein, 9 aa, synthetic construct
PAQGSIRVH

SEQ ID NO: 14131 - protein, 9 aa, synthetic construct
PAQGSIKLR

SEQ ID NO: 14132 - protein, 9 aa, synthetic construct
PAQGSIKLH

SEQ ID NO: 14133 - protein, 9 aa, synthetic construct
PAQGSIKVR

SEQ ID NO: 14134 - protein, 9 aa, synthetic construct
PAQGSGHLR

SEQ ID NO: 14135 - protein, 9 aa, synthetic construct
PAQGSGHLH

SEQ ID NO: 14136 - protein, 9 aa, synthetic construct
PAQGSGHLF

SEQ ID NO: 14137 - protein, 9 aa, synthetic construct
PAQGSGHVH

SEQ ID NO: 14138 - protein, 9 aa, synthetic construct
PAQGSGRVK

SEQ ID NO: 14139 - protein, 9 aa, synthetic construct
PAQGSGRVF

SEQ ID NO: 14140 - protein, 9 aa, synthetic construct
PAQGSGKVR

SEQ ID NO: 14141 - protein, 9 aa, synthetic construct
PAQGSGKVF

SEQ ID NO: 14142 - protein, 9 aa, synthetic construct
PAQGVVRVH

SEQ ID NO: 14143 - protein, 9 aa, synthetic construct
PAQGVVKLF

SEQ ID NO: 14144 - protein, 9 aa, synthetic construct
PAQGVLHVY

SEQ ID NO: 14145 - protein, 9 aa, synthetic construct
PAQGVLHVH

SEQ ID NO: 14146 - protein, 9 aa, synthetic construct
PAQGVLHVK

SEQ ID NO: 14147 - protein, 9 aa, synthetic construct
PLQGALKVY

SEQ ID NO: 14148 - protein, 9 aa, synthetic construct
PAQGVIRVF

SEQ ID NO: 14149 - protein, 9 aa, synthetic construct
PAQGVGHLK

SEQ ID NO: 14150 - protein, 9 aa, synthetic construct
PAQGVGRVY

SEQ ID NO: 14151 - protein, 9 aa, synthetic construct
PAQGVGRVH

SEQ ID NO: 14152 - protein, 9 aa, synthetic construct
PLQGALKVF

SEQ ID NO: 14153 - protein, 9 aa, synthetic construct
PAQGGVHLY

SEQ ID NO: 14154 - protein, 9 aa, synthetic construct
PAQGGVHVF

SEQ ID NO: 14155 - protein, 9 aa, synthetic construct
PAQGGVKVY

SEQ ID NO: 14156 - protein, 9 aa, synthetic construct
PAQGGLRLF

SEQ ID NO: 14157 - protein, 9 aa, synthetic construct
PAQGGAHLH

SEQ ID NO: 14158 - protein, 9 aa, synthetic construct
PAQGGAHVF

SEQ ID NO: 14159 - protein, 9 aa, synthetic construct
PAQGGIHLY

SEQ ID NO: 14160 - protein, 9 aa, synthetic construct
PAQGGIHLK

SEQ ID NO: 14161 - protein, 9 aa, synthetic construct
PAQGGIHVK

SEQ ID NO: 14162 - protein, 9 aa, synthetic construct
PAQGGIRLY

SEQ ID NO: 14163 - protein, 9 aa, synthetic construct
PAQGGIRLH

SEQ ID NO: 14164 - protein, 9 aa, synthetic construct
PAQGGIRVY

SEQ ID NO: 14165 - protein, 9 aa, synthetic construct
PAQGGIRVH

SEQ ID NO: 14166 - protein, 9 aa, synthetic construct
PAQGGIKLH

SEQ ID NO: 14167 - protein, 9 aa, synthetic construct
PLQGAARVY

SEQ ID NO: 14168 - protein, 9 aa, synthetic construct
PAQAAVHLY

SEQ ID NO: 14169 - protein, 9 aa, synthetic construct
PAQAAVHLR

SEQ ID NO: 14170 - protein, 9 aa, synthetic construct
PAQAAVHLH

SEQ ID NO: 14171 - protein, 9 aa, synthetic construct
PAQAAVRVF

SEQ ID NO: 14172 - protein, 9 aa, synthetic construct
PLQGAARVF

SEQ ID NO: 14173 - protein, 9 aa, synthetic construct
PAQAAAHLY

SEQ ID NO: 14174 - protein, 9 aa, synthetic construct
PAQAAAHLR

SEQ ID NO: 14175 - protein, 9 aa, synthetic construct
PAQAAAHVR

SEQ ID NO: 14176 - protein, 9 aa, synthetic construct
PAQAAAHVF

SEQ ID NO: 14177 - protein, 9 aa, synthetic construct
PAQAAAKLH

SEQ ID NO: 14178 - protein, 9 aa, synthetic construct
PAQAAIHLH

SEQ ID NO: 14179 - protein, 9 aa, synthetic construct
PAQAAIRVH

SEQ ID NO: 14180 - protein, 9 aa, synthetic construct
PAQAAGHLY

SEQ ID NO: 14181 - protein, 9 aa, synthetic construct
PAQAAGHLK

SEQ ID NO: 14182 - protein, 9 aa, synthetic construct
PAQAAGHLF

SEQ ID NO: 14183 - protein, 9 aa, synthetic construct
PAQAAGHVY

SEQ ID NO: 14184 - protein, 9 aa, synthetic construct
PAQAAGRLH

SEQ ID NO: 14185 - protein, 9 aa, synthetic construct
PAQAAGRLF

SEQ ID NO: 14186 - protein, 9 aa, synthetic construct
PAQAAGKVY

SEQ ID NO: 14187 - protein, 9 aa, synthetic construct
PAQATVHLY

SEQ ID NO: 14188 - protein, 9 aa, synthetic construct
PAQATVHLF

SEQ ID NO: 14189 - protein, 9 aa, synthetic construct
PAQATVHVR

SEQ ID NO: 14190 - protein, 9 aa, synthetic construct
PAQATVHVK

SEQ ID NO: 14191 - protein, 9 aa, synthetic construct
PAQATVHVF

SEQ ID NO: 14192 - protein, 9 aa, synthetic construct
PAQATVRVF

SEQ ID NO: 14193 - protein, 9 aa, synthetic construct
PAQATVKVY

SEQ ID NO: 14194 - protein, 9 aa, synthetic construct
PAQATLHLR

SEQ ID NO: 14195 - protein, 9 aa, synthetic construct
PAQATLHLH

SEQ ID NO: 14196 - protein, 9 aa, synthetic construct
PAQATLRLF

SEQ ID NO: 14197 - protein, 9 aa, synthetic construct
PAQATLKLK

SEQ ID NO: 14198 - protein, 9 aa, synthetic construct
PAQATAHVR

SEQ ID NO: 14199 - protein, 9 aa, synthetic construct
PAQATARVF

SEQ ID NO: 14200 - protein, 9 aa, synthetic construct
PLQGAIHVK

SEQ ID NO: 14201 - protein, 9 aa, synthetic construct
PAQATAKVY

SEQ ID NO: 14202 - protein, 9 aa, synthetic construct
PLQGAIHVF

SEQ ID NO: 14203 - protein, 9 aa, synthetic construct
PAQATIHLY

SEQ ID NO: 14204 - protein, 9 aa, synthetic construct
PAQATIHLR

SEQ ID NO: 14205 - protein, 9 aa, synthetic construct
PAQATIHLF

SEQ ID NO: 14206 - protein, 9 aa, synthetic construct
PAQATIHVH

SEQ ID NO: 14207 - protein, 9 aa, synthetic construct
PAQATIHVK

SEQ ID NO: 14208 - protein, 9 aa, synthetic construct
PAQATIHVF

SEQ ID NO: 14209 - protein, 9 aa, synthetic construct
PAQATIRLY

SEQ ID NO: 14210 - protein, 9 aa, synthetic construct
PAQATIRVH

SEQ ID NO: 14211 - protein, 9 aa, synthetic construct
PAQATIKVY

SEQ ID NO: 14212 - protein, 9 aa, synthetic construct
PAQATGHVY

SEQ ID NO: 14213 - protein, 9 aa, synthetic construct
PAQATGHVR

SEQ ID NO: 14214 - protein, 9 aa, synthetic construct
PAQATGRLF

SEQ ID NO: 14215 - protein, 9 aa, synthetic construct
PAQATGRVK

SEQ ID NO: 14216 - protein, 9 aa, synthetic construct
PAQATGRVF

SEQ ID NO: 14217 - protein, 9 aa, synthetic construct
PAQATGKVY

SEQ ID NO: 14218 - protein, 9 aa, synthetic construct
PAQATGKVF

SEQ ID NO: 14219 - protein, 9 aa, synthetic construct
PAQASVHLR

SEQ ID NO: 14220 - protein, 9 aa, synthetic construct
PAQASLRLY

SEQ ID NO: 14221 - protein, 9 aa, synthetic construct
PAQASLKLY

SEQ ID NO: 14222 - protein, 9 aa, synthetic construct
PAQASLKLH

SEQ ID NO: 14223 - protein, 9 aa, synthetic construct
PAQASLKLF

SEQ ID NO: 14224 - protein, 9 aa, synthetic construct
PAQASAHLH

SEQ ID NO: 14225 - protein, 9 aa, synthetic construct
PAQASAHLF

SEQ ID NO: 14226 - protein, 9 aa, synthetic construct
PAQASAHVY

SEQ ID NO: 14227 - protein, 9 aa, synthetic construct
PAQASARVY

SEQ ID NO: 14228 - protein, 9 aa, synthetic construct
PAQASARVR

SEQ ID NO: 14229 - protein, 9 aa, synthetic construct
PAQASARVH

SEQ ID NO: 14230 - protein, 9 aa, synthetic construct
PAQASIHLH

SEQ ID NO: 14231 - protein, 9 aa, synthetic construct
PAQASIRVY

SEQ ID NO: 14232 - protein, 9 aa, synthetic construct
PAQASIKLR

SEQ ID NO: 14233 - protein, 9 aa, synthetic construct
PAQASIKVR

SEQ ID NO: 14234 - protein, 9 aa, synthetic construct
PAQASGHLR

SEQ ID NO: 14235 - protein, 9 aa, synthetic construct
PAQASGHLF

SEQ ID NO: 14236 - protein, 9 aa, synthetic construct
PAQASGRLY

SEQ ID NO: 14237 - protein, 9 aa, synthetic construct
PAQASGRLH

SEQ ID NO: 14238 - protein, 9 aa, synthetic construct
PAQASGRLF

SEQ ID NO: 14239 - protein, 9 aa, synthetic construct
PAQASGRVY

SEQ ID NO: 14240 - protein, 9 aa, synthetic construct
PAQASGRVR

SEQ ID NO: 14241 - protein, 9 aa, synthetic construct
PAQASGRVH

SEQ ID NO: 14242 - protein, 9 aa, synthetic construct
PAQASGRVK

SEQ ID NO: 14243 - protein, 9 aa, synthetic construct
PAQASGKVY

SEQ ID NO: 14244 - protein, 9 aa, synthetic construct
PAQASGKVH

SEQ ID NO: 14245 - protein, 9 aa, synthetic construct
PAQAVVHLH

SEQ ID NO: 14246 - protein, 9 aa, synthetic construct
PAQAVVKLF

SEQ ID NO: 14247 - protein, 9 aa, synthetic construct
PLQGAGHLK

SEQ ID NO: 14248 - protein, 9 aa, synthetic construct
PAQAVIRVH

SEQ ID NO: 14249 - protein, 9 aa, synthetic construct
PAQAVIKVH

SEQ ID NO: 14250 - protein, 9 aa, synthetic construct
PLQGAGRLF

SEQ ID NO: 14251 - protein, 9 aa, synthetic construct
PAQAVGKLY

SEQ ID NO: 14252 - protein, 9 aa, synthetic construct
PAQAGVKVF

SEQ ID NO: 14253 - protein, 9 aa, synthetic construct
PAQAGLKLY

SEQ ID NO: 14254 - protein, 9 aa, synthetic construct
PAQAGAHVF

SEQ ID NO: 14255 - protein, 9 aa, synthetic construct
PAQAGARVR

SEQ ID NO: 14256 - protein, 9 aa, synthetic construct
PLQGAGKLF

SEQ ID NO: 14257 - protein, 9 aa, synthetic construct
PAQAGIKVH

SEQ ID NO: 14258 - protein, 9 aa, synthetic construct
PAQAGGHLR

SEQ ID NO: 14259 - protein, 9 aa, synthetic construct
PAQAGGHLK

SEQ ID NO: 14260 - protein, 9 aa, synthetic construct
PAQAGGRVF

SEQ ID NO: 14261 - protein, 9 aa, synthetic construct
PAPGAVHLF

SEQ ID NO: 14262 - protein, 9 aa, synthetic construct
PLQGTVHLR

SEQ ID NO: 14263 - protein, 9 aa, synthetic construct
PAPGALHLR

SEQ ID NO: 14264 - protein, 9 aa, synthetic construct
PAPGALHLH

SEQ ID NO: 14265 - protein, 9 aa, synthetic construct
PAPGALKLK

SEQ ID NO: 14266 - protein, 9 aa, synthetic construct
PLQGTVHVH

SEQ ID NO: 14267 - protein, 9 aa, synthetic construct
PAPGAARVY

SEQ ID NO: 14268 - protein, 9 aa, synthetic construct
PAPGAAKLY

SEQ ID NO: 14269 - protein, 9 aa, synthetic construct
PAPGAAKLH

SEQ ID NO: 14270 - protein, 9 aa, synthetic construct
PAPGAGRLF

SEQ ID NO: 14271 - protein, 9 aa, synthetic construct
PAPGAGKVH

SEQ ID NO: 14272 - protein, 9 aa, synthetic construct
PAPGTVHLH

SEQ ID NO: 14273 - protein, 9 aa, synthetic construct
PAPGTVHVK

SEQ ID NO: 14274 - protein, 9 aa, synthetic construct
PAPGTVRVH

SEQ ID NO: 14275 - protein, 9 aa, synthetic construct
PAPGTVKLH

SEQ ID NO: 14276 - protein, 9 aa, synthetic construct
PAPGTVKVF

SEQ ID NO: 14277 - protein, 9 aa, synthetic construct
PAPGTLHLK

SEQ ID NO: 14278 - protein, 9 aa, synthetic construct
PLQGTVKLY

SEQ ID NO: 14279 - protein, 9 aa, synthetic construct
PAPGTAHLR

SEQ ID NO: 14280 - protein, 9 aa, synthetic construct
PAPGTAHLF

SEQ ID NO: 14281 - protein, 9 aa, synthetic construct
PAPGTAHVH

SEQ ID NO: 14282 - protein, 9 aa, synthetic construct
PAPGTARVF

SEQ ID NO: 14283 - protein, 9 aa, synthetic construct
PLQGTVKLF

SEQ ID NO: 14284 - protein, 9 aa, synthetic construct
PAPGTIHLH

SEQ ID NO: 14285 - protein, 9 aa, synthetic construct
PAPGTIKLR

SEQ ID NO: 14286 - protein, 9 aa, synthetic construct
PAPGSVHLY

SEQ ID NO: 14287 - protein, 9 aa, synthetic construct
PAPGSVHLH

SEQ ID NO: 14288 - protein, 9 aa, synthetic construct
PAPGSVHLF

SEQ ID NO: 14289 - protein, 9 aa, synthetic construct
PAPGSVHVY

SEQ ID NO: 14290 - protein, 9 aa, synthetic construct
PAPGSVRVH

SEQ ID NO: 14291 - protein, 9 aa, synthetic construct
PAPGSVKLR

SEQ ID NO: 14292 - protein, 9 aa, synthetic construct
PAPGSVKLH

SEQ ID NO: 14293 - protein, 9 aa, synthetic construct
PAPGSVKVH

SEQ ID NO: 14294 - protein, 9 aa, synthetic construct
PAPGSVKVK

SEQ ID NO: 14295 - protein, 9 aa, synthetic construct
PLQGTLHLK

SEQ ID NO: 14296 - protein, 9 aa, synthetic construct
PAPGSLKLH

SEQ ID NO: 14297 - protein, 9 aa, synthetic construct
PAPGSLKLK

SEQ ID NO: 14298 - protein, 9 aa, synthetic construct
PAPGSLKLF

SEQ ID NO: 14299 - protein, 9 aa, synthetic construct
PAPGSLKVF

SEQ ID NO: 14300 - protein, 9 aa, synthetic construct
PAPGSARVY

SEQ ID NO: 14301 - protein, 9 aa, synthetic construct
PAPGSARVR

SEQ ID NO: 14302 - protein, 9 aa, synthetic construct
PAPGSARVH

SEQ ID NO: 14303 - protein, 9 aa, synthetic construct
PAPGSAKVF

SEQ ID NO: 14304 - protein, 9 aa, synthetic construct
PAPGSIKVK

SEQ ID NO: 14305 - protein, 9 aa, synthetic construct
PLQGTLRLF

SEQ ID NO: 14306 - protein, 9 aa, synthetic construct
PAPGVVHVY

SEQ ID NO: 14307 - protein, 9 aa, synthetic construct
PAPGVVKLK

SEQ ID NO: 14308 - protein, 9 aa, synthetic construct
PAPGVVKVH

SEQ ID NO: 14309 - protein, 9 aa, synthetic construct
PAPGVAHLH

SEQ ID NO: 14310 - protein, 9 aa, synthetic construct
PLQGTLKLK

SEQ ID NO: 14311 - protein, 9 aa, synthetic construct
PAPGVIHLK

SEQ ID NO: 14312 - protein, 9 aa, synthetic construct
PLQGTLKVY

SEQ ID NO: 14313 - protein, 9 aa, synthetic construct
PAPGVGHLH

SEQ ID NO: 14314 - protein, 9 aa, synthetic construct
PAPGVGHVH

SEQ ID NO: 14315 - protein, 9 aa, synthetic construct
PAPGVGRVY

SEQ ID NO: 14316 - protein, 9 aa, synthetic construct
PLQGTAHLY

SEQ ID NO: 14317 - protein, 9 aa, synthetic construct
PAPGGVHLY

SEQ ID NO: 14318 - protein, 9 aa, synthetic construct
PAPGGVHLR

SEQ ID NO: 14319 - protein, 9 aa, synthetic construct
PAPGGVHLH

SEQ ID NO: 14320 - protein, 9 aa, synthetic construct
PAPGGVHLF

SEQ ID NO: 14321 - protein, 9 aa, synthetic construct
PAPGGVHVY

SEQ ID NO: 14322 - protein, 9 aa, synthetic construct
PLQGTAHLR

SEQ ID NO: 14323 - protein, 9 aa, synthetic construct
PAPGGVKLF

SEQ ID NO: 14324 - protein, 9 aa, synthetic construct
PAPGGLHLK

SEQ ID NO: 14325 - protein, 9 aa, synthetic construct
PAPGGLKLF

SEQ ID NO: 14326 - protein, 9 aa, synthetic construct
PAPGGLKVK

SEQ ID NO: 14327 - protein, 9 aa, synthetic construct
PAPGGLKVF

SEQ ID NO: 14328 - protein, 9 aa, synthetic construct
PAPGGARVY

SEQ ID NO: 14329 - protein, 9 aa, synthetic construct
PAPGGARVF

SEQ ID NO: 14330 - protein, 9 aa, synthetic construct
PLQGTAHVK

SEQ ID NO: 14331 - protein, 9 aa, synthetic construct
PAPGGAKLF

SEQ ID NO: 14332 - protein, 9 aa, synthetic construct
PAPGGAKVH

SEQ ID NO: 14333 - protein, 9 aa, synthetic construct
PLQGTARLY

SEQ ID NO: 14334 - protein, 9 aa, synthetic construct
PAPGGGRVY

SEQ ID NO: 14335 - protein, 9 aa, synthetic construct
PAPGGGRVH

SEQ ID NO: 14336 - protein, 9 aa, synthetic construct
PLQGTARVY

SEQ ID NO: 14337 - protein, 9 aa, synthetic construct
PAPAAVHLY

SEQ ID NO: 14338 - protein, 9 aa, synthetic construct
PAPAAVHLH

SEQ ID NO: 14339 - protein, 9 aa, synthetic construct
PAPAAVHVH

SEQ ID NO: 14340 - protein, 9 aa, synthetic construct
PAPAAVRVF

SEQ ID NO: 14341 - protein, 9 aa, synthetic construct
PAPAAVKLY

SEQ ID NO: 14342 - protein, 9 aa, synthetic construct
PAPAAVKVY

SEQ ID NO: 14343 - protein, 9 aa, synthetic construct
PAPAAVKVH

SEQ ID NO: 14344 - protein, 9 aa, synthetic construct
PAPAAVKVF

SEQ ID NO: 14345 - protein, 9 aa, synthetic construct
PLQGTARVF

SEQ ID NO: 14346 - protein, 9 aa, synthetic construct
PAPAAAHLR

SEQ ID NO: 14347 - protein, 9 aa, synthetic construct
PLQGTAKLH

SEQ ID NO: 14348 - protein, 9 aa, synthetic construct
PAPAAARLH

SEQ ID NO: 14349 - protein, 9 aa, synthetic construct
PAPAAARVF

SEQ ID NO: 14350 - protein, 9 aa, synthetic construct
PAPAAAKLR

SEQ ID NO: 14351 - protein, 9 aa, synthetic construct
PAPAAAKLF

SEQ ID NO: 14352 - protein, 9 aa, synthetic construct
PAPAAAKVH

SEQ ID NO: 14353 - protein, 9 aa, synthetic construct
PAPAAAKVK

SEQ ID NO: 14354 - protein, 9 aa, synthetic construct
PLQGTAKLF

SEQ ID NO: 14355 - protein, 9 aa, synthetic construct
PAPAAIHLH

SEQ ID NO: 14356 - protein, 9 aa, synthetic construct
PAPAAIHLF

SEQ ID NO: 14357 - protein, 9 aa, synthetic construct
PAPAAIHVR

SEQ ID NO: 14358 - protein, 9 aa, synthetic construct
PAPAAIHVK

SEQ ID NO: 14359 - protein, 9 aa, synthetic construct
PAPAAIHVF

SEQ ID NO: 14360 - protein, 9 aa, synthetic construct
PLQGTAKVY

SEQ ID NO: 14361 - protein, 9 aa, synthetic construct
PAPAAIRLY

SEQ ID NO: 14362 - protein, 9 aa, synthetic construct
PAPAAIRLR

SEQ ID NO: 14363 - protein, 9 aa, synthetic construct
PAPAAIRLH

SEQ ID NO: 14364 - protein, 9 aa, synthetic construct
PAPAAIRVY

SEQ ID NO: 14365 - protein, 9 aa, synthetic construct
PAPAAIRVH

SEQ ID NO: 14366 - protein, 9 aa, synthetic construct
PAPAAIKLY

SEQ ID NO: 14367 - protein, 9 aa, synthetic construct
PAPAAIKLR

SEQ ID NO: 14368 - protein, 9 aa, synthetic construct
PAPAAIKLH

SEQ ID NO: 14369 - protein, 9 aa, synthetic construct
PAPAAIKLF

SEQ ID NO: 14370 - protein, 9 aa, synthetic construct
PAPAAIKVR

SEQ ID NO: 14371 - protein, 9 aa, synthetic construct
PAPAAIKVH

SEQ ID NO: 14372 - protein, 9 aa, synthetic construct
PAPAAIKVK

SEQ ID NO: 14373 - protein, 9 aa, synthetic construct
PAPAAIKVF

SEQ ID NO: 14374 - protein, 9 aa, synthetic construct
PAPAAGHLY

SEQ ID NO: 14375 - protein, 9 aa, synthetic construct
PAPAAGHLK

SEQ ID NO: 14376 - protein, 9 aa, synthetic construct
PAPAAGHLF

SEQ ID NO: 14377 - protein, 9 aa, synthetic construct
PAPAAGHVY

SEQ ID NO: 14378 - protein, 9 aa, synthetic construct
PAPAAGRLY

SEQ ID NO: 14379 - protein, 9 aa, synthetic construct
PAPAAGRVH

SEQ ID NO: 14380 - protein, 9 aa, synthetic construct
PAPAAGRVK

SEQ ID NO: 14381 - protein, 9 aa, synthetic construct
PAPAAGRVF

SEQ ID NO: 14382 - protein, 9 aa, synthetic construct
PAPAAGKLY

SEQ ID NO: 14383 - protein, 9 aa, synthetic construct
PAPAAGKLR

SEQ ID NO: 14384 - protein, 9 aa, synthetic construct
PAPAAGKVY

SEQ ID NO: 14385 - protein, 9 aa, synthetic construct
PAPAAGKVR

SEQ ID NO: 14386 - protein, 9 aa, synthetic construct
PAPAAGKVH

SEQ ID NO: 14387 - protein, 9 aa, synthetic construct
PAPAAGKVK

SEQ ID NO: 14388 - protein, 9 aa, synthetic construct
PAPATVHLY

SEQ ID NO: 14389 - protein, 9 aa, synthetic construct
PAPATVHLK

SEQ ID NO: 14390 - protein, 9 aa, synthetic construct
PAPATVHVH

SEQ ID NO: 14391 - protein, 9 aa, synthetic construct
PAPATLRVF

SEQ ID NO: 14392 - protein, 9 aa, synthetic construct
PAPATLKLK

SEQ ID NO: 14393 - protein, 9 aa, synthetic construct
PAPATAHLR

SEQ ID NO: 14394 - protein, 9 aa, synthetic construct
PAPATAHLF

SEQ ID NO: 14395 - protein, 9 aa, synthetic construct
PAPATAHVR

SEQ ID NO: 14396 - protein, 9 aa, synthetic construct
PAPATARVF

SEQ ID NO: 14397 - protein, 9 aa, synthetic construct
PLNGTVKVY

SEQ ID NO: 14398 - protein, 9 aa, synthetic construct
PLQGTIRLY

SEQ ID NO: 14399 - protein, 9 aa, synthetic construct
PAPATIKVY

SEQ ID NO: 14400 - protein, 9 aa, synthetic construct
PAPATGHLR

SEQ ID NO: 14401 - protein, 9 aa, synthetic construct
PAPATGHLH

SEQ ID NO: 14402 - protein, 9 aa, synthetic construct
PAPATGHVY

SEQ ID NO: 14403 - protein, 9 aa, synthetic construct
PAPATGHVR

SEQ ID NO: 14404 - protein, 9 aa, synthetic construct
PAPATGHVK

SEQ ID NO: 14405 - protein, 9 aa, synthetic construct
PAPATGKVH

SEQ ID NO: 14406 - protein, 9 aa, synthetic construct
PAPASVHLY

SEQ ID NO: 14407 - protein, 9 aa, synthetic construct
PAPASVHLR

SEQ ID NO: 14408 - protein, 9 aa, synthetic construct
PAPASVHLK

SEQ ID NO: 14409 - protein, 9 aa, synthetic construct
PAPASVHVY

SEQ ID NO: 14410 - protein, 9 aa, synthetic construct
PAPASVHVR

SEQ ID NO: 14411 - protein, 9 aa, synthetic construct
PAPASVHVK

SEQ ID NO: 14412 - protein, 9 aa, synthetic construct
PAPASVHVF

SEQ ID NO: 14413 - protein, 9 aa, synthetic construct
PAPASVRLF

SEQ ID NO: 14414 - protein, 9 aa, synthetic construct
PAPASVKLY

SEQ ID NO: 14415 - protein, 9 aa, synthetic construct
PAPASVKVF

SEQ ID NO: 14416 - protein, 9 aa, synthetic construct
PAPASLHLY

SEQ ID NO: 14417 - protein, 9 aa, synthetic construct
PAPASLKLH

SEQ ID NO: 14418 - protein, 9 aa, synthetic construct
PAPASLKLF

SEQ ID NO: 14419 - protein, 9 aa, synthetic construct
PAPASAHLF

SEQ ID NO: 14420 - protein, 9 aa, synthetic construct
PAPASARVY

SEQ ID NO: 14421 - protein, 9 aa, synthetic construct
PAPASARVH

SEQ ID NO: 14422 - protein, 9 aa, synthetic construct
PAPASGHLR

SEQ ID NO: 14423 - protein, 9 aa, synthetic construct
PLQGTGHLR

SEQ ID NO: 14424 - protein, 9 aa, synthetic construct
PAPAVVRLF

SEQ ID NO: 14425 - protein, 9 aa, synthetic construct
PAPAVVRVH

SEQ ID NO: 14426 - protein, 9 aa, synthetic construct
PAPAVVKLY

SEQ ID NO: 14427 - protein, 9 aa, synthetic construct
PAPAVVKLH

SEQ ID NO: 14428 - protein, 9 aa, synthetic construct
PAPAVVKLF

SEQ ID NO: 14429 - protein, 9 aa, synthetic construct
PAPAVVKVF

SEQ ID NO: 14430 - protein, 9 aa, synthetic construct
PLQGTGHLF

SEQ ID NO: 14431 - protein, 9 aa, synthetic construct
PAPAVLKLY

SEQ ID NO: 14432 - protein, 9 aa, synthetic construct
PAPAVAKLF

SEQ ID NO: 14433 - protein, 9 aa, synthetic construct
PAPAVIKVH

SEQ ID NO: 14434 - protein, 9 aa, synthetic construct
PAPAVGRVH

SEQ ID NO: 14435 - protein, 9 aa, synthetic construct
PLQGTGRVY

SEQ ID NO: 14436 - protein, 9 aa, synthetic construct
PAPAGVHVK

SEQ ID NO: 14437 - protein, 9 aa, synthetic construct
PLQGTGRVH

SEQ ID NO: 14438 - protein, 9 aa, synthetic construct
PLQGTGKLY

SEQ ID NO: 14439 - protein, 9 aa, synthetic construct
PAPAGLKLY

SEQ ID NO: 14440 - protein, 9 aa, synthetic construct
PAPAGARVR

SEQ ID NO: 14441 - protein, 9 aa, synthetic construct
PLQGTGKLK

SEQ ID NO: 14442 - protein, 9 aa, synthetic construct
PAPAGAKLR

SEQ ID NO: 14443 - protein, 9 aa, synthetic construct
PAPAGIHLF

SEQ ID NO: 14444 - protein, 9 aa, synthetic construct
PLQGTGKVH

SEQ ID NO: 14445 - protein, 9 aa, synthetic construct
PLQGTGKVF

SEQ ID NO: 14446 - protein, 9 aa, synthetic construct
PAPAGGKLH

SEQ ID NO: 14447 - protein, 9 aa, synthetic construct
PVNGAVHLH

SEQ ID NO: 14448 - protein, 9 aa, synthetic construct
PVNGAVHVR

SEQ ID NO: 14449 - protein, 9 aa, synthetic construct
PVNGALHLK

SEQ ID NO: 14450 - protein, 9 aa, synthetic construct
PVNGALHVY

SEQ ID NO: 14451 - protein, 9 aa, synthetic construct
PVNGALRLY

SEQ ID NO: 14452 - protein, 9 aa, synthetic construct
PVNGALRLH

SEQ ID NO: 14453 - protein, 9 aa, synthetic construct
PVNGALRVY

SEQ ID NO: 14454 - protein, 9 aa, synthetic construct
PVNGALKVY

SEQ ID NO: 14455 - protein, 9 aa, synthetic construct
PVNGALKVH

SEQ ID NO: 14456 - protein, 9 aa, synthetic construct
PVNGAAHLH

SEQ ID NO: 14457 - protein, 9 aa, synthetic construct
PVNGAARLY

SEQ ID NO: 14458 - protein, 9 aa, synthetic construct
PVNGAARLF

SEQ ID NO: 14459 - protein, 9 aa, synthetic construct
PVNGAIHLY

SEQ ID NO: 14460 - protein, 9 aa, synthetic construct
PVNGAIHLF

SEQ ID NO: 14461 - protein, 9 aa, synthetic construct
PVNGAIRLH

SEQ ID NO: 14462 - protein, 9 aa, synthetic construct
PVNGAIKVF

SEQ ID NO: 14463 - protein, 9 aa, synthetic construct
PVNGAGHLR

SEQ ID NO: 14464 - protein, 9 aa, synthetic construct
PVNGAGRVY

SEQ ID NO: 14465 - protein, 9 aa, synthetic construct
PVNGAGRVF

SEQ ID NO: 14466 - protein, 9 aa, synthetic construct
PLQGSVRVY

SEQ ID NO: 14467 - protein, 9 aa, synthetic construct
PVNGTVKLH

SEQ ID NO: 14468 - protein, 9 aa, synthetic construct
PVNGTVKLF

SEQ ID NO: 14469 - protein, 9 aa, synthetic construct
PVNGTVKVY

SEQ ID NO: 14470 - protein, 9 aa, synthetic construct
PVNGTLHLK

SEQ ID NO: 14471 - protein, 9 aa, synthetic construct
PVNGTLRLF

SEQ ID NO: 14472 - protein, 9 aa, synthetic construct
PVNGTLRVH

SEQ ID NO: 14473 - protein, 9 aa, synthetic construct
PVNGTAHVH

SEQ ID NO: 14474 - protein, 9 aa, synthetic construct
PVNGTARLY

SEQ ID NO: 14475 - protein, 9 aa, synthetic construct
PVNGTAKVK

SEQ ID NO: 14476 - protein, 9 aa, synthetic construct
PVNGTIHVF

SEQ ID NO: 14477 - protein, 9 aa, synthetic construct
PVNGTIKLR

SEQ ID NO: 14478 - protein, 9 aa, synthetic construct
PVNGTIKVY

SEQ ID NO: 14479 - protein, 9 aa, synthetic construct
PVNGTIKVF

SEQ ID NO: 14480 - protein, 9 aa, synthetic construct
PLQGSVKVF

SEQ ID NO: 14481 - protein, 9 aa, synthetic construct
PVNGSVHLH

SEQ ID NO: 14482 - protein, 9 aa, synthetic construct
PVNGSVHLF

SEQ ID NO: 14483 - protein, 9 aa, synthetic construct
PVNGSVRVY

SEQ ID NO: 14484 - protein, 9 aa, synthetic construct
PVNGSVKVH

SEQ ID NO: 14485 - protein, 9 aa, synthetic construct
PVNGSARVY

SEQ ID NO: 14486 - protein, 9 aa, synthetic construct
PVNGSAKVY

SEQ ID NO: 14487 - protein, 9 aa, synthetic construct
PVNGSAKVF

SEQ ID NO: 14488 - protein, 9 aa, synthetic construct
PVNGSIHVH

SEQ ID NO: 14489 - protein, 9 aa, synthetic construct
PVNGSIRVF

SEQ ID NO: 14490 - protein, 9 aa, synthetic construct
PVNGSIKLH

SEQ ID NO: 14491 - protein, 9 aa, synthetic construct
PVNGSIKVY

SEQ ID NO: 14492 - protein, 9 aa, synthetic construct
PVNGSIKVK

SEQ ID NO: 14493 - protein, 9 aa, synthetic construct
PVNGSGHVF

SEQ ID NO: 14494 - protein, 9 aa, synthetic construct
PVNGSGRVH

SEQ ID NO: 14495 - protein, 9 aa, synthetic construct
PVNGVVHVK

SEQ ID NO: 14496 - protein, 9 aa, synthetic construct
PVNGVVRVY

SEQ ID NO: 14497 - protein, 9 aa, synthetic construct
PVNGVVRVF

SEQ ID NO: 14498 - protein, 9 aa, synthetic construct
PVNGVVKLY

SEQ ID NO: 14499 - protein, 9 aa, synthetic construct
PVNGVVKLH

SEQ ID NO: 14500 - protein, 9 aa, synthetic construct
PVNGVVKVF

SEQ ID NO: 14501 - protein, 9 aa, synthetic construct
PVNGVLHVH

SEQ ID NO: 14502 - protein, 9 aa, synthetic construct
PVNGVAHLF

SEQ ID NO: 14503 - protein, 9 aa, synthetic construct
PVNGVARVH

SEQ ID NO: 14504 - protein, 9 aa, synthetic construct
PVNGVGKVH

SEQ ID NO: 14505 - protein, 9 aa, synthetic construct
PVNGGLHVH

SEQ ID NO: 14506 - protein, 9 aa, synthetic construct
PVNGGLKLY

SEQ ID NO: 14507 - protein, 9 aa, synthetic construct
PVNGGAHLF

SEQ ID NO: 14508 - protein, 9 aa, synthetic construct
PVNGGARVR

SEQ ID NO: 14509 - protein, 9 aa, synthetic construct
PVNGGARVH

SEQ ID NO: 14510 - protein, 9 aa, synthetic construct
PVNGGARVF

SEQ ID NO: 14511 - protein, 9 aa, synthetic construct
PVNGGAKLR

SEQ ID NO: 14512 - protein, 9 aa, synthetic construct
PVNGGAKLH

SEQ ID NO: 14513 - protein, 9 aa, synthetic construct
PVNGGAKVR

SEQ ID NO: 14514 - protein, 9 aa, synthetic construct
PVNGGAKVK

SEQ ID NO: 14515 - protein, 9 aa, synthetic construct
PVNGGIRLH

SEQ ID NO: 14516 - protein, 9 aa, synthetic construct
PVNGGIRVH

SEQ ID NO: 14517 - protein, 9 aa, synthetic construct
PVNGGIKVF

SEQ ID NO: 14518 - protein, 9 aa, synthetic construct
PVNGGGRLH

SEQ ID NO: 14519 - protein, 9 aa, synthetic construct
PVNGGGRVY

SEQ ID NO: 14520 - protein, 9 aa, synthetic construct
PVNGGGKVY

SEQ ID NO: 14521 - protein, 9 aa, synthetic construct
PVNAAVHVY

SEQ ID NO: 14522 - protein, 9 aa, synthetic construct
PVNAAVHVR

SEQ ID NO: 14523 - protein, 9 aa, synthetic construct
PVNAALRLY

SEQ ID NO: 14524 - protein, 9 aa, synthetic construct
PVNAAARLH

SEQ ID NO: 14525 - protein, 9 aa, synthetic construct
PVNAAAKVY

SEQ ID NO: 14526 - protein, 9 aa, synthetic construct
PVNAAAKVH

SEQ ID NO: 14527 - protein, 9 aa, synthetic construct
PVNAAIHLY

SEQ ID NO: 14528 - protein, 9 aa, synthetic construct
PVNAAIRLR

SEQ ID NO: 14529 - protein, 9 aa, synthetic construct
PVNAAIRVY

SEQ ID NO: 14530 - protein, 9 aa, synthetic construct
PVNAAIKVY

SEQ ID NO: 14531 - protein, 9 aa, synthetic construct
PVNAAIKVF

SEQ ID NO: 14532 - protein, 9 aa, synthetic construct
PVNAAGKLH

SEQ ID NO: 14533 - protein, 9 aa, synthetic construct
PLQGSIHLY

SEQ ID NO: 14534 - protein, 9 aa, synthetic construct
PVNATVHLK

SEQ ID NO: 14535 - protein, 9 aa, synthetic construct
PVNATVHVY

SEQ ID NO: 14536 - protein, 9 aa, synthetic construct
PLQGSIHLF

SEQ ID NO: 14537 - protein, 9 aa, synthetic construct
PLQGSIHVY

SEQ ID NO: 14538 - protein, 9 aa, synthetic construct
PVNATLKLK

SEQ ID NO: 14539 - protein, 9 aa, synthetic construct
PVNATAHVK

SEQ ID NO: 14540 - protein, 9 aa, synthetic construct
PVNATAHVF

SEQ ID NO: 14541 - protein, 9 aa, synthetic construct
PVNATARVH

SEQ ID NO: 14542 - protein, 9 aa, synthetic construct
PVNATAKVY

SEQ ID NO: 14543 - protein, 9 aa, synthetic construct
PVNATIKVY

SEQ ID NO: 14544 - protein, 9 aa, synthetic construct
PVNATGHLY

SEQ ID NO: 14545 - protein, 9 aa, synthetic construct
PVNATGHLH

SEQ ID NO: 14546 - protein, 9 aa, synthetic construct
PVNATGHLK

SEQ ID NO: 14547 - protein, 9 aa, synthetic construct
PVNATGKVY

SEQ ID NO: 14548 - protein, 9 aa, synthetic construct
PVNATGKVH

SEQ ID NO: 14549 - protein, 9 aa, synthetic construct
PLQGSIRVY

SEQ ID NO: 14550 - protein, 9 aa, synthetic construct
PVNASVHLY

SEQ ID NO: 14551 - protein, 9 aa, synthetic construct
PVNASVHLF

SEQ ID NO: 14552 - protein, 9 aa, synthetic construct
PVNASVHVY

SEQ ID NO: 14553 - protein, 9 aa, synthetic construct
PVNASVHVR

SEQ ID NO: 14554 - protein, 9 aa, synthetic construct
PVNASVRVF

SEQ ID NO: 14555 - protein, 9 aa, synthetic construct
PVNASVKVY

SEQ ID NO: 14556 - protein, 9 aa, synthetic construct
PVNASLHLY

SEQ ID NO: 14557 - protein, 9 aa, synthetic construct
PVNASLKLY

SEQ ID NO: 14558 - protein, 9 aa, synthetic construct
PVNASAHLY

SEQ ID NO: 14559 - protein, 9 aa, synthetic construct
PVNASAHLR

SEQ ID NO: 14560 - protein, 9 aa, synthetic construct
PVNASAHLH

SEQ ID NO: 14561 - protein, 9 aa, synthetic construct
PVNASAHLK

SEQ ID NO: 14562 - protein, 9 aa, synthetic construct
PVNASAHVY

SEQ ID NO: 14563 - protein, 9 aa, synthetic construct
PVNASAHVR

SEQ ID NO: 14564 - protein, 9 aa, synthetic construct
PVNASARVR

SEQ ID NO: 14565 - protein, 9 aa, synthetic construct
PVNASAKLR

SEQ ID NO: 14566 - protein, 9 aa, synthetic construct
PLQGSIKLF

SEQ ID NO: 14567 - protein, 9 aa, synthetic construct
PVNASIHLH

SEQ ID NO: 14568 - protein, 9 aa, synthetic construct
PLQGSIKVR

SEQ ID NO: 14569 - protein, 9 aa, synthetic construct
PVNASIKVF

SEQ ID NO: 14570 - protein, 9 aa, synthetic construct
PVNASGHLR

SEQ ID NO: 14571 - protein, 9 aa, synthetic construct
PVNASGHLK

SEQ ID NO: 14572 - protein, 9 aa, synthetic construct
PVNASGHLF

SEQ ID NO: 14573 - protein, 9 aa, synthetic construct
PVNASGHVY

SEQ ID NO: 14574 - protein, 9 aa, synthetic construct
PVNASGHVR

SEQ ID NO: 14575 - protein, 9 aa, synthetic construct
PVNASGHVH

SEQ ID NO: 14576 - protein, 9 aa, synthetic construct
PVNASGHVK

SEQ ID NO: 14577 - protein, 9 aa, synthetic construct
PVNASGRVH

SEQ ID NO: 14578 - protein, 9 aa, synthetic construct
PVNASGKVY

SEQ ID NO: 14579 - protein, 9 aa, synthetic construct
PVNAVVHVK

SEQ ID NO: 14580 - protein, 9 aa, synthetic construct
PVNAVVRVH

SEQ ID NO: 14581 - protein, 9 aa, synthetic construct
PVNAVVKLH

SEQ ID NO: 14582 - protein, 9 aa, synthetic construct
PVNAVVKLF

SEQ ID NO: 14583 - protein, 9 aa, synthetic construct
PVNAVVKVY

SEQ ID NO: 14584 - protein, 9 aa, synthetic construct
PVNAVVKVH

SEQ ID NO: 14585 - protein, 9 aa, synthetic construct
PVNAVLKVF

SEQ ID NO: 14586 - protein, 9 aa, synthetic construct
PVNAVAHVR

SEQ ID NO: 14587 - protein, 9 aa, synthetic construct
PVNAGVHLR

SEQ ID NO: 14588 - protein, 9 aa, synthetic construct
PVNAGVHLH

SEQ ID NO: 14589 - protein, 9 aa, synthetic construct
PVNAGVHVY

SEQ ID NO: 14590 - protein, 9 aa, synthetic construct
PVNAGVHVK

SEQ ID NO: 14591 - protein, 9 aa, synthetic construct
PVNAGVHVF

SEQ ID NO: 14592 - protein, 9 aa, synthetic construct
PLQGSGRVH

SEQ ID NO: 14593 - protein, 9 aa, synthetic construct
PVNAGVKLF

SEQ ID NO: 14594 - protein, 9 aa, synthetic construct
PVNAGLKLY

SEQ ID NO: 14595 - protein, 9 aa, synthetic construct
PVNAGAHVY

SEQ ID NO: 14596 - protein, 9 aa, synthetic construct
PVNAGARVR

SEQ ID NO: 14597 - protein, 9 aa, synthetic construct
PVNAGAKLR

SEQ ID NO: 14598 - protein, 9 aa, synthetic construct
PVNAGAKLH

SEQ ID NO: 14599 - protein, 9 aa, synthetic construct
PVNAGAKVY

SEQ ID NO: 14600 - protein, 9 aa, synthetic construct
PVNAGIHLF

SEQ ID NO: 14601 - protein, 9 aa, synthetic construct
PVNAGIRLH

SEQ ID NO: 14602 - protein, 9 aa, synthetic construct
PVNAGIKLR

SEQ ID NO: 14603 - protein, 9 aa, synthetic construct
PVNAGIKVH

SEQ ID NO: 14604 - protein, 9 aa, synthetic construct
PVNAGGHLK

SEQ ID NO: 14605 - protein, 9 aa, synthetic construct
PVNAGGKLY

SEQ ID NO: 14606 - protein, 9 aa, synthetic construct
PVNAGGKLH

SEQ ID NO: 14607 - protein, 9 aa, synthetic construct
PVQGALKVY

SEQ ID NO: 14608 - protein, 9 aa, synthetic construct
PVQGALKVK

SEQ ID NO: 14609 - protein, 9 aa, synthetic construct
PLQGVVHVK

SEQ ID NO: 14610 - protein, 9 aa, synthetic construct
PVQGAIHLY

SEQ ID NO: 14611 - protein, 9 aa, synthetic construct
PVQGAIHLF

SEQ ID NO: 14612 - protein, 9 aa, synthetic construct
PVQGAIHVF

SEQ ID NO: 14613 - protein, 9 aa, synthetic construct
PVQGAIRLY

SEQ ID NO: 14614 - protein, 9 aa, synthetic construct
PLQGVVRVH

SEQ ID NO: 14615 - protein, 9 aa, synthetic construct
PVQGTVKLY

SEQ ID NO: 14616 - protein, 9 aa, synthetic construct
PVQGTLRLH

SEQ ID NO: 14617 - protein, 9 aa, synthetic construct
PVQGTLRVY

SEQ ID NO: 14618 - protein, 9 aa, synthetic construct
PVQGTLKLY

SEQ ID NO: 14619 - protein, 9 aa, synthetic construct
PVQGTLKVY

SEQ ID NO: 14620 - protein, 9 aa, synthetic construct
PVQGTLKVH

SEQ ID NO: 14621 - protein, 9 aa, synthetic construct
PVQGTLKVF

SEQ ID NO: 14622 - protein, 9 aa, synthetic construct
PVQGTAKVR

SEQ ID NO: 14623 - protein, 9 aa, synthetic construct
PLQGVVKLF

SEQ ID NO: 14624 - protein, 9 aa, synthetic construct
PVQGTIHLH

SEQ ID NO: 14625 - protein, 9 aa, synthetic construct
PVQGTIRLY

SEQ ID NO: 14626 - protein, 9 aa, synthetic construct
PVQGTGKVH

SEQ ID NO: 14627 - protein, 9 aa, synthetic construct
PVQGSVKLY

SEQ ID NO: 14628 - protein, 9 aa, synthetic construct
PVQGSVKLF

SEQ ID NO: 14629 - protein, 9 aa, synthetic construct
PVQGSLKVK

SEQ ID NO: 14630 - protein, 9 aa, synthetic construct
PLQGVLHVH

SEQ ID NO: 14631 - protein, 9 aa, synthetic construct
PVQGSAKLY

SEQ ID NO: 14632 - protein, 9 aa, synthetic construct
PVQGSAKVF

SEQ ID NO: 14633 - protein, 9 aa, synthetic construct
PVQGSIHLY

SEQ ID NO: 14634 - protein, 9 aa, synthetic construct
PVQGSIKVR

SEQ ID NO: 14635 - protein, 9 aa, synthetic construct
PVQGVVRVH

SEQ ID NO: 14636 - protein, 9 aa, synthetic construct
PVQGVVRVF

SEQ ID NO: 14637 - protein, 9 aa, synthetic construct
PVQGVLHVH

SEQ ID NO: 14638 - protein, 9 aa, synthetic construct
PVQGVLKLH

SEQ ID NO: 14639 - protein, 9 aa, synthetic construct
PVQGVAHLH

SEQ ID NO: 14640 - protein, 9 aa, synthetic construct
PVQGVAHLF

SEQ ID NO: 14641 - protein, 9 aa, synthetic construct
PVQGVAHVH

SEQ ID NO: 14642 - protein, 9 aa, synthetic construct
PLQGVLKLH

SEQ ID NO: 14643 - protein, 9 aa, synthetic construct
PVQGVIRVF

SEQ ID NO: 14644 - protein, 9 aa, synthetic construct
PVQGVGHLK

SEQ ID NO: 14645 - protein, 9 aa, synthetic construct
PVQGVGHVR

SEQ ID NO: 14646 - protein, 9 aa, synthetic construct
PVQGVGRVY

SEQ ID NO: 14647 - protein, 9 aa, synthetic construct
PVQGGVHLY

SEQ ID NO: 14648 - protein, 9 aa, synthetic construct
PVQGGVHVY

SEQ ID NO: 14649 - protein, 9 aa, synthetic construct
PVQGGVHVK

SEQ ID NO: 14650 - protein, 9 aa, synthetic construct
PVQGGVRVY

SEQ ID NO: 14651 - protein, 9 aa, synthetic construct
PVQGGLHVH

SEQ ID NO: 14652 - protein, 9 aa, synthetic construct
PLQGVAHLF

SEQ ID NO: 14653 - protein, 9 aa, synthetic construct
PVQGGLRLY

SEQ ID NO: 14654 - protein, 9 aa, synthetic construct
PVQGGLRVK

SEQ ID NO: 14655 - protein, 9 aa, synthetic construct
PVQGGLKLR

SEQ ID NO: 14656 - protein, 9 aa, synthetic construct
PVQGGLKLF

SEQ ID NO: 14657 - protein, 9 aa, synthetic construct
PVQGGLKVY

SEQ ID NO: 14658 - protein, 9 aa, synthetic construct
PVQGGLKVR

SEQ ID NO: 14659 - protein, 9 aa, synthetic construct
PVQGGLKVF

SEQ ID NO: 14660 - protein, 9 aa, synthetic construct
PVQGGAHLK

SEQ ID NO: 14661 - protein, 9 aa, synthetic construct
PVQGGAHVF

SEQ ID NO: 14662 - protein, 9 aa, synthetic construct
PLQGVAHVH

SEQ ID NO: 14663 - protein, 9 aa, synthetic construct
PVQGGARLY

SEQ ID NO: 14664 - protein, 9 aa, synthetic construct
PVQGGARVR

SEQ ID NO: 14665 - protein, 9 aa, synthetic construct
PVQGGAKLY

SEQ ID NO: 14666 - protein, 9 aa, synthetic construct
PVQGGAKVY

SEQ ID NO: 14667 - protein, 9 aa, synthetic construct
PVQGGIHLR

SEQ ID NO: 14668 - protein, 9 aa, synthetic construct
PVQGGIHLH

SEQ ID NO: 14669 - protein, 9 aa, synthetic construct
PVQGGIHVY

SEQ ID NO: 14670 - protein, 9 aa, synthetic construct
PVQGGIHVR

SEQ ID NO: 14671 - protein, 9 aa, synthetic construct
PLNGTLKLH

SEQ ID NO: 14672 - protein, 9 aa, synthetic construct
PVQGGIRLY

SEQ ID NO: 14673 - protein, 9 aa, synthetic construct
PVQGGIRLH

SEQ ID NO: 14674 - protein, 9 aa, synthetic construct
PVQGGIRVY

SEQ ID NO: 14675 - protein, 9 aa, synthetic construct
PVQGGIRVH

SEQ ID NO: 14676 - protein, 9 aa, synthetic construct
PVQGGIKLR

SEQ ID NO: 14677 - protein, 9 aa, synthetic construct
PVQGGIKLH

SEQ ID NO: 14678 - protein, 9 aa, synthetic construct
PVQGGIKVY

SEQ ID NO: 14679 - protein, 9 aa, synthetic construct
PVQGGIKVR

SEQ ID NO: 14680 - protein, 9 aa, synthetic construct
PVQGGGHLK

SEQ ID NO: 14681 - protein, 9 aa, synthetic construct
PVQGGGRVY

SEQ ID NO: 14682 - protein, 9 aa, synthetic construct
PVQGGGKLH

SEQ ID NO: 14683 - protein, 9 aa, synthetic construct
PVQAAVRVF

SEQ ID NO: 14684 - protein, 9 aa, synthetic construct
PVQAAIRVH

SEQ ID NO: 14685 - protein, 9 aa, synthetic construct
PVQAAGHLK

SEQ ID NO: 14686 - protein, 9 aa, synthetic construct
PVQAAGHVR

SEQ ID NO: 14687 - protein, 9 aa, synthetic construct
PVQAAGHVH

SEQ ID NO: 14688 - protein, 9 aa, synthetic construct
PVQAAGKLF

SEQ ID NO: 14689 - protein, 9 aa, synthetic construct
PVQATLRLF

SEQ ID NO: 14690 - protein, 9 aa, synthetic construct
PVQATARLH

SEQ ID NO: 14691 - protein, 9 aa, synthetic construct
PVQATIHLH

SEQ ID NO: 14692 - protein, 9 aa, synthetic construct
PLQGVIRLY

SEQ ID NO: 14693 - protein, 9 aa, synthetic construct
PLQGVIRLR

SEQ ID NO: 14694 - protein, 9 aa, synthetic construct
PVQATGHVK

SEQ ID NO: 14695 - protein, 9 aa, synthetic construct
PLQGVIRVH

SEQ ID NO: 14696 - protein, 9 aa, synthetic construct
PLQGVIRVF

SEQ ID NO: 14697 - protein, 9 aa, synthetic construct
PVQASIHVY

SEQ ID NO: 14698 - protein, 9 aa, synthetic construct
PVQASIKLR

SEQ ID NO: 14699 - protein, 9 aa, synthetic construct
PLQGVGHLH

SEQ ID NO: 14700 - protein, 9 aa, synthetic construct
PLQGVGHVY

SEQ ID NO: 14701 - protein, 9 aa, synthetic construct
PVQAVLKLR

SEQ ID NO: 14702 - protein, 9 aa, synthetic construct
PLQGVGHVR

SEQ ID NO: 14703 - protein, 9 aa, synthetic construct
PLQGVGHVH

SEQ ID NO: 14704 - protein, 9 aa, synthetic construct
PVQAVIRVH

SEQ ID NO: 14705 - protein, 9 aa, synthetic construct
PLQGVGKVY

SEQ ID NO: 14706 - protein, 9 aa, synthetic construct
PVQAGGHLK

SEQ ID NO: 14707 - protein, 9 aa, synthetic construct
PVPGALHLR

SEQ ID NO: 14708 - protein, 9 aa, synthetic construct
PVPGALHLK

SEQ ID NO: 14709 - protein, 9 aa, synthetic construct
PVPGALHVY

SEQ ID NO: 14710 - protein, 9 aa, synthetic construct
PVPGALKLK

SEQ ID NO: 14711 - protein, 9 aa, synthetic construct
PVPGAAHLY

SEQ ID NO: 14712 - protein, 9 aa, synthetic construct
PVPGAAHLH

SEQ ID NO: 14713 - protein, 9 aa, synthetic construct
PVPGAARLY

SEQ ID NO: 14714 - protein, 9 aa, synthetic construct
PVPGAARLH

SEQ ID NO: 14715 - protein, 9 aa, synthetic construct
PVPGAARLF

SEQ ID NO: 14716 - protein, 9 aa, synthetic construct
PVPGAARVH

SEQ ID NO: 14717 - protein, 9 aa, synthetic construct
PVPGAARVF

SEQ ID NO: 14718 - protein, 9 aa, synthetic construct
PVPGAIHVH

SEQ ID NO: 14719 - protein, 9 aa, synthetic construct
PVPGAIHVF

SEQ ID NO: 14720 - protein, 9 aa, synthetic construct
PVPGAIRLY

SEQ ID NO: 14721 - protein, 9 aa, synthetic construct
PVPGAIKVY

SEQ ID NO: 14722 - protein, 9 aa, synthetic construct
PVPGAGRLH

SEQ ID NO: 14723 - protein, 9 aa, synthetic construct
PVPGAGRLF

SEQ ID NO: 14724 - protein, 9 aa, synthetic construct
PVPGAGRVY

SEQ ID NO: 14725 - protein, 9 aa, synthetic construct
PVPGAGKVY

SEQ ID NO: 14726 - protein, 9 aa, synthetic construct
PVPGTVRLY

SEQ ID NO: 14727 - protein, 9 aa, synthetic construct
PVPGTVKLY

SEQ ID NO: 14728 - protein, 9 aa, synthetic construct
PVPGTVKLF

SEQ ID NO: 14729 - protein, 9 aa, synthetic construct
PVPGTLHLK

SEQ ID NO: 14730 - protein, 9 aa, synthetic construct
PVPGTLKLH

SEQ ID NO: 14731 - protein, 9 aa, synthetic construct
PVPGTAHLY

SEQ ID NO: 14732 - protein, 9 aa, synthetic construct
PVPGTAHLF

SEQ ID NO: 14733 - protein, 9 aa, synthetic construct
PVPGTARLY

SEQ ID NO: 14734 - protein, 9 aa, synthetic construct
PVPGTARLH

SEQ ID NO: 14735 - protein, 9 aa, synthetic construct
PVPGTARVY

SEQ ID NO: 14736 - protein, 9 aa, synthetic construct
PVPGTARVH

SEQ ID NO: 14737 - protein, 9 aa, synthetic construct
PVPGTAKLY

SEQ ID NO: 14738 - protein, 9 aa, synthetic construct
PVPGTAKLR

SEQ ID NO: 14739 - protein, 9 aa, synthetic construct
PVPGTAKLH

SEQ ID NO: 14740 - protein, 9 aa, synthetic construct
PVPGTAKVH

SEQ ID NO: 14741 - protein, 9 aa, synthetic construct
PVPGTAKVK

SEQ ID NO: 14742 - protein, 9 aa, synthetic construct
PVPGTIHLH

SEQ ID NO: 14743 - protein, 9 aa, synthetic construct
PVPGTIHLK

SEQ ID NO: 14744 - protein, 9 aa, synthetic construct
PVPGTIHVK

SEQ ID NO: 14745 - protein, 9 aa, synthetic construct
PVPGTIRLY

SEQ ID NO: 14746 - protein, 9 aa, synthetic construct
PVPGTIKVY

SEQ ID NO: 14747 - protein, 9 aa, synthetic construct
PVPGTGHLH

SEQ ID NO: 14748 - protein, 9 aa, synthetic construct
PVPGTGHLF

SEQ ID NO: 14749 - protein, 9 aa, synthetic construct
PVPGTGHVH

SEQ ID NO: 14750 - protein, 9 aa, synthetic construct
PVPGTGRLF

SEQ ID NO: 14751 - protein, 9 aa, synthetic construct
PLQGGVKVF

SEQ ID NO: 14752 - protein, 9 aa, synthetic construct
PVPGTGKVH

SEQ ID NO: 14753 - protein, 9 aa, synthetic construct
PVPGSVKVH

SEQ ID NO: 14754 - protein, 9 aa, synthetic construct
PVPGSVKVF

SEQ ID NO: 14755 - protein, 9 aa, synthetic construct
PVPGSLKVF

SEQ ID NO: 14756 - protein, 9 aa, synthetic construct
PVPGSAHLH

SEQ ID NO: 14757 - protein, 9 aa, synthetic construct
PVPGSAHLF

SEQ ID NO: 14758 - protein, 9 aa, synthetic construct
PVPGSAHVY

SEQ ID NO: 14759 - protein, 9 aa, synthetic construct
PVPGSARVY

SEQ ID NO: 14760 - protein, 9 aa, synthetic construct
PVPGSAKVF

SEQ ID NO: 14761 - protein, 9 aa, synthetic construct
PVPGSIHLH

SEQ ID NO: 14762 - protein, 9 aa, synthetic construct
PVPGSGHLR

SEQ ID NO: 14763 - protein, 9 aa, synthetic construct
PVPGVVHVH

SEQ ID NO: 14764 - protein, 9 aa, synthetic construct
PVPGVVRVH

SEQ ID NO: 14765 - protein, 9 aa, synthetic construct
PVPGVVKVY

SEQ ID NO: 14766 - protein, 9 aa, synthetic construct
PVPGVAKVH

SEQ ID NO: 14767 - protein, 9 aa, synthetic construct
PVPGVGHLH

SEQ ID NO: 14768 - protein, 9 aa, synthetic construct
PVPGVGHLK

SEQ ID NO: 14769 - protein, 9 aa, synthetic construct
PVPGVGHVY

SEQ ID NO: 14770 - protein, 9 aa, synthetic construct
PLQGGLKVK

SEQ ID NO: 14771 - protein, 9 aa, synthetic construct
PVPGVGRVY

SEQ ID NO: 14772 - protein, 9 aa, synthetic construct
PLQGGLKVF

SEQ ID NO: 14773 - protein, 9 aa, synthetic construct
PVPGVGKVF

SEQ ID NO: 14774 - protein, 9 aa, synthetic construct
PVPGGVHLY

SEQ ID NO: 14775 - protein, 9 aa, synthetic construct
PVPGGVKLF

SEQ ID NO: 14776 - protein, 9 aa, synthetic construct
PVPGGLHLY

SEQ ID NO: 14777 - protein, 9 aa, synthetic construct
PVPGGLHLR

SEQ ID NO: 14778 - protein, 9 aa, synthetic construct
PVPGGLHLK

SEQ ID NO: 14779 - protein, 9 aa, synthetic construct
PVPGGLHVY

SEQ ID NO: 14780 - protein, 9 aa, synthetic construct
PVPGGLHVK

SEQ ID NO: 14781 - protein, 9 aa, synthetic construct
PVPGGLRLF

SEQ ID NO: 14782 - protein, 9 aa, synthetic construct
PVPGGLRVF

SEQ ID NO: 14783 - protein, 9 aa, synthetic construct
PVPGGLKLY

SEQ ID NO: 14784 - protein, 9 aa, synthetic construct
PVPGGLKLH

SEQ ID NO: 14785 - protein, 9 aa, synthetic construct
PVPGGLKLF

SEQ ID NO: 14786 - protein, 9 aa, synthetic construct
PVPGGLKVY

SEQ ID NO: 14787 - protein, 9 aa, synthetic construct
PVPGGLKVH

SEQ ID NO: 14788 - protein, 9 aa, synthetic construct
PVPGGAHLY

SEQ ID NO: 14789 - protein, 9 aa, synthetic construct
PVPGGAHLF

SEQ ID NO: 14790 - protein, 9 aa, synthetic construct
PVPGGAHVY

SEQ ID NO: 14791 - protein, 9 aa, synthetic construct
PVPGGAHVF

SEQ ID NO: 14792 - protein, 9 aa, synthetic construct
PVPGGARLH

SEQ ID NO: 14793 - protein, 9 aa, synthetic construct
PVPGGARVH

SEQ ID NO: 14794 - protein, 9 aa, synthetic construct
PVPGGAKLR

SEQ ID NO: 14795 - protein, 9 aa, synthetic construct
PVPGGAKLH

SEQ ID NO: 14796 - protein, 9 aa, synthetic construct
PVPGGAKLK

SEQ ID NO: 14797 - protein, 9 aa, synthetic construct
PVPGGAKVY

SEQ ID NO: 14798 - protein, 9 aa, synthetic construct
PVPGGIHLY

SEQ ID NO: 14799 - protein, 9 aa, synthetic construct
PVPGGIHLH

SEQ ID NO: 14800 - protein, 9 aa, synthetic construct
PVPGGIHLF

SEQ ID NO: 14801 - protein, 9 aa, synthetic construct
PVPGGIHVY

SEQ ID NO: 14802 - protein, 9 aa, synthetic construct
PVPGGIRLY

SEQ ID NO: 14803 - protein, 9 aa, synthetic construct
PVPGGIRVH

SEQ ID NO: 14804 - protein, 9 aa, synthetic construct
PVPGGIKLH

SEQ ID NO: 14805 - protein, 9 aa, synthetic construct
PVPGGGHLR

SEQ ID NO: 14806 - protein, 9 aa, synthetic construct
PVPGGGHLH

SEQ ID NO: 14807 - protein, 9 aa, synthetic construct
PVPAAVRVF

SEQ ID NO: 14808 - protein, 9 aa, synthetic construct
PVPAALRLY

SEQ ID NO: 14809 - protein, 9 aa, synthetic construct
PVPAAAHLR

SEQ ID NO: 14810 - protein, 9 aa, synthetic construct
PVPAAAHLF

SEQ ID NO: 14811 - protein, 9 aa, synthetic construct
PVPAAAHVR

SEQ ID NO: 14812 - protein, 9 aa, synthetic construct
PVPAAARVF

SEQ ID NO: 14813 - protein, 9 aa, synthetic construct
PVPAAAKLY

SEQ ID NO: 14814 - protein, 9 aa, synthetic construct
PVPAAAKLR

SEQ ID NO: 14815 - protein, 9 aa, synthetic construct
PVPAAAKLH

SEQ ID NO: 14816 - protein, 9 aa, synthetic construct
PVPAAAKVY

SEQ ID NO: 14817 - protein, 9 aa, synthetic construct
PVPAAAKVH

SEQ ID NO: 14818 - protein, 9 aa, synthetic construct
PVPAAIHLF

SEQ ID NO: 14819 - protein, 9 aa, synthetic construct
PVPAAIHVF

SEQ ID NO: 14820 - protein, 9 aa, synthetic construct
PVPAAIRLR

SEQ ID NO: 14821 - protein, 9 aa, synthetic construct
PVPAAIRVH

SEQ ID NO: 14822 - protein, 9 aa, synthetic construct
PVPAAIKVY

SEQ ID NO: 14823 - protein, 9 aa, synthetic construct
PVPAAIKVF

SEQ ID NO: 14824 - protein, 9 aa, synthetic construct
PVPAAGHLY

SEQ ID NO: 14825 - protein, 9 aa, synthetic construct
PVPAAGHLR

SEQ ID NO: 14826 - protein, 9 aa, synthetic construct
PVPAAGHLF

SEQ ID NO: 14827 - protein, 9 aa, synthetic construct
PVPAAGHVH

SEQ ID NO: 14828 - protein, 9 aa, synthetic construct
PVPAAGRLH

SEQ ID NO: 14829 - protein, 9 aa, synthetic construct
PVPAAGRVF

SEQ ID NO: 14830 - protein, 9 aa, synthetic construct
PVPAAGKLR

SEQ ID NO: 14831 - protein, 9 aa, synthetic construct
PVPAAGKLF

SEQ ID NO: 14832 - protein, 9 aa, synthetic construct
PVPAAGKVY

SEQ ID NO: 14833 - protein, 9 aa, synthetic construct
PVPAAGKVH

SEQ ID NO: 14834 - protein, 9 aa, synthetic construct
PLQGGIHLY

SEQ ID NO: 14835 - protein, 9 aa, synthetic construct
PVPATVHLY

SEQ ID NO: 14836 - protein, 9 aa, synthetic construct
PVPATVHVH

SEQ ID NO: 14837 - protein, 9 aa, synthetic construct
PLQGGIHLH

SEQ ID NO: 14838 - protein, 9 aa, synthetic construct
PVPATVKVY

SEQ ID NO: 14839 - protein, 9 aa, synthetic construct
PVPATLKLK

SEQ ID NO: 14840 - protein, 9 aa, synthetic construct
PVPATAHLH

SEQ ID NO: 14841 - protein, 9 aa, synthetic construct
PVPATAHVY

SEQ ID NO: 14842 - protein, 9 aa, synthetic construct
PVPATAHVR

SEQ ID NO: 14843 - protein, 9 aa, synthetic construct
PVPATAHVF

SEQ ID NO: 14844 - protein, 9 aa, synthetic construct
PVPATARLH

SEQ ID NO: 14845 - protein, 9 aa, synthetic construct
PVPATARVY

SEQ ID NO: 14846 - protein, 9 aa, synthetic construct
PVPATARVR

SEQ ID NO: 14847 - protein, 9 aa, synthetic construct
PVPATARVH

SEQ ID NO: 14848 - protein, 9 aa, synthetic construct
PLQGGIHVK

SEQ ID NO: 14849 - protein, 9 aa, synthetic construct
PVPATAKLR

SEQ ID NO: 14850 - protein, 9 aa, synthetic construct
PVPATAKVR

SEQ ID NO: 14851 - protein, 9 aa, synthetic construct
PVPATAKVH

SEQ ID NO: 14852 - protein, 9 aa, synthetic construct
PVPATAKVK

SEQ ID NO: 14853 - protein, 9 aa, synthetic construct
PVPATAKVF

SEQ ID NO: 14854 - protein, 9 aa, synthetic construct
PVPATIKVY

SEQ ID NO: 14855 - protein, 9 aa, synthetic construct
PVPATGHLH

SEQ ID NO: 14856 - protein, 9 aa, synthetic construct
PVPATGHLF

SEQ ID NO: 14857 - protein, 9 aa, synthetic construct
PVPATGHVF

SEQ ID NO: 14858 - protein, 9 aa, synthetic construct
PVPATGKVF

SEQ ID NO: 14859 - protein, 9 aa, synthetic construct
PVPASVHLK

SEQ ID NO: 14860 - protein, 9 aa, synthetic construct
PVPASVHVY

SEQ ID NO: 14861 - protein, 9 aa, synthetic construct
PVPASVHVK

SEQ ID NO: 14862 - protein, 9 aa, synthetic construct
PVPASLHLY

SEQ ID NO: 14863 - protein, 9 aa, synthetic construct
PVPASLKLY

SEQ ID NO: 14864 - protein, 9 aa, synthetic construct
PVPASAHLY

SEQ ID NO: 14865 - protein, 9 aa, synthetic construct
PVPASAHLR

SEQ ID NO: 14866 - protein, 9 aa, synthetic construct
PVPASAHLH

SEQ ID NO: 14867 - protein, 9 aa, synthetic construct
PVPASAHLK

SEQ ID NO: 14868 - protein, 9 aa, synthetic construct
PVPASAHVK

SEQ ID NO: 14869 - protein, 9 aa, synthetic construct
PVPASAHVF

SEQ ID NO: 14870 - protein, 9 aa, synthetic construct
PVPASARLY

SEQ ID NO: 14871 - protein, 9 aa, synthetic construct
PVPASARVY

SEQ ID NO: 14872 - protein, 9 aa, synthetic construct
PVPASARVR

SEQ ID NO: 14873 - protein, 9 aa, synthetic construct
PVPASARVK

SEQ ID NO: 14874 - protein, 9 aa, synthetic construct
PVPASARVF

SEQ ID NO: 14875 - protein, 9 aa, synthetic construct
PVPASAKLR

SEQ ID NO: 14876 - protein, 9 aa, synthetic construct
PVPASAKLH

SEQ ID NO: 14877 - protein, 9 aa, synthetic construct
PVPASAKVY

SEQ ID NO: 14878 - protein, 9 aa, synthetic construct
PVPASAKVH

SEQ ID NO: 14879 - protein, 9 aa, synthetic construct
PVPASAKVK

SEQ ID NO: 14880 - protein, 9 aa, synthetic construct
PVPASAKVF

SEQ ID NO: 14881 - protein, 9 aa, synthetic construct
PVPASIHLK

SEQ ID NO: 14882 - protein, 9 aa, synthetic construct
PVPASGHLY

SEQ ID NO: 14883 - protein, 9 aa, synthetic construct
PVPASGHLR

SEQ ID NO: 14884 - protein, 9 aa, synthetic construct
PVPASGHLH

SEQ ID NO: 14885 - protein, 9 aa, synthetic construct
PVPASGHVF

SEQ ID NO: 14886 - protein, 9 aa, synthetic construct
PVPASGRVH

SEQ ID NO: 14887 - protein, 9 aa, synthetic construct
PVPASGRVK

SEQ ID NO: 14888 - protein, 9 aa, synthetic construct
PVPAVVHVH

SEQ ID NO: 14889 - protein, 9 aa, synthetic construct
PVPAVVRVY

SEQ ID NO: 14890 - protein, 9 aa, synthetic construct
PVPAVVRVH

SEQ ID NO: 14891 - protein, 9 aa, synthetic construct
PLQGGGHLK

SEQ ID NO: 14892 - protein, 9 aa, synthetic construct
PVPAVIHVK

SEQ ID NO: 14893 - protein, 9 aa, synthetic construct
PVPAVGHVF

SEQ ID NO: 14894 - protein, 9 aa, synthetic construct
PVPAVGRVH

SEQ ID NO: 14895 - protein, 9 aa, synthetic construct
PVPAVGKLY

SEQ ID NO: 14896 - protein, 9 aa, synthetic construct
PVPAGVKLF

SEQ ID NO: 14897 - protein, 9 aa, synthetic construct
PVPAGLKLY

SEQ ID NO: 14898 - protein, 9 aa, synthetic construct
PVPAGAHLH

SEQ ID NO: 14899 - protein, 9 aa, synthetic construct
PVPAGAHVY

SEQ ID NO: 14900 - protein, 9 aa, synthetic construct
PLQGGGKLH

SEQ ID NO: 14901 - protein, 9 aa, synthetic construct
PVPAGARVR

SEQ ID NO: 14902 - protein, 9 aa, synthetic construct
PVPAGAKLR

SEQ ID NO: 14903 - protein, 9 aa, synthetic construct
PVPAGAKLH

SEQ ID NO: 14904 - protein, 9 aa, synthetic construct
PVPAGAKLK

SEQ ID NO: 14905 - protein, 9 aa, synthetic construct
PLNGTARVY

SEQ ID NO: 14906 - protein, 9 aa, synthetic construct
PLQAAVHLY

SEQ ID NO: 14907 - protein, 9 aa, synthetic construct
PINGAVHVY

SEQ ID NO: 14908 - protein, 9 aa, synthetic construct
PLQAAVHLR

SEQ ID NO: 14909 - protein, 9 aa, synthetic construct
PLQAAVHLH

SEQ ID NO: 14910 - protein, 9 aa, synthetic construct
PINGAVKVY

SEQ ID NO: 14911 - protein, 9 aa, synthetic construct
PINGALKVY

SEQ ID NO: 14912 - protein, 9 aa, synthetic construct
PINGAAHLR

SEQ ID NO: 14913 - protein, 9 aa, synthetic construct
PINGAAHLK

SEQ ID NO: 14914 - protein, 9 aa, synthetic construct
PINGAAHLF

SEQ ID NO: 14915 - protein, 9 aa, synthetic construct
PINGAAHVR

SEQ ID NO: 14916 - protein, 9 aa, synthetic construct
PLQAAVHVH

SEQ ID NO: 14917 - protein, 9 aa, synthetic construct
PINGAARVY

SEQ ID NO: 14918 - protein, 9 aa, synthetic construct
PINGAAKLR

SEQ ID NO: 14919 - protein, 9 aa, synthetic construct
PINGAAKVK

SEQ ID NO: 14920 - protein, 9 aa, synthetic construct
PINGAIHVY

SEQ ID NO: 14921 - protein, 9 aa, synthetic construct
PINGAIHVH

SEQ ID NO: 14922 - protein, 9 aa, synthetic construct
PINGAIHVF

SEQ ID NO: 14923 - protein, 9 aa, synthetic construct
PINGAIRLY

SEQ ID NO: 14924 - protein, 9 aa, synthetic construct
PINGAIRLH

SEQ ID NO: 14925 - protein, 9 aa, synthetic construct
PINGAGHLY

SEQ ID NO: 14926 - protein, 9 aa, synthetic construct
PINGAGHVY

SEQ ID NO: 14927 - protein, 9 aa, synthetic construct
PINGAGRLR

SEQ ID NO: 14928 - protein, 9 aa, synthetic construct
PINGAGRLF

SEQ ID NO: 14929 - protein, 9 aa, synthetic construct
PINGAGKVY

SEQ ID NO: 14930 - protein, 9 aa, synthetic construct
PINGTVHVR

SEQ ID NO: 14931 - protein, 9 aa, synthetic construct
PINGTVRVY

SEQ ID NO: 14932 - protein, 9 aa, synthetic construct
PINGTVRVF

SEQ ID NO: 14933 - protein, 9 aa, synthetic construct
PLQAAVRVF

SEQ ID NO: 14934 - protein, 9 aa, synthetic construct
PINGTLRLF

SEQ ID NO: 14935 - protein, 9 aa, synthetic construct
PINGTAHLF

SEQ ID NO: 14936 - protein, 9 aa, synthetic construct
PINGTARVY

SEQ ID NO: 14937 - protein, 9 aa, synthetic construct
PINGTARVF

SEQ ID NO: 14938 - protein, 9 aa, synthetic construct
PINGTAKLR

SEQ ID NO: 14939 - protein, 9 aa, synthetic construct
PINGTAKVK

SEQ ID NO: 14940 - protein, 9 aa, synthetic construct
PINGTIHLY

SEQ ID NO: 14941 - protein, 9 aa, synthetic construct
PINGTIHLH

SEQ ID NO: 14942 - protein, 9 aa, synthetic construct
PLQAAVKVY

SEQ ID NO: 14943 - protein, 9 aa, synthetic construct
PINGTIKVF

SEQ ID NO: 14944 - protein, 9 aa, synthetic construct
PINGTGHVY

SEQ ID NO: 14945 - protein, 9 aa, synthetic construct
PINGTGKLR

SEQ ID NO: 14946 - protein, 9 aa, synthetic construct
PINGTGKVY

SEQ ID NO: 14947 - protein, 9 aa, synthetic construct
PINGTGKVH

SEQ ID NO: 14948 - protein, 9 aa, synthetic construct
PINGSVHLH

SEQ ID NO: 14949 - protein, 9 aa, synthetic construct
PINGSVHVY

SEQ ID NO: 14950 - protein, 9 aa, synthetic construct
PINGSVHVR

SEQ ID NO: 14951 - protein, 9 aa, synthetic construct
PINGSVHVH

SEQ ID NO: 14952 - protein, 9 aa, synthetic construct
PINGSVRLY

SEQ ID NO: 14953 - protein, 9 aa, synthetic construct
PINGSVRVY

SEQ ID NO: 14954 - protein, 9 aa, synthetic construct
PINGSLHVF

SEQ ID NO: 14955 - protein, 9 aa, synthetic construct
PINGSLKLY

SEQ ID NO: 14956 - protein, 9 aa, synthetic construct
PINGSAHLR

SEQ ID NO: 14957 - protein, 9 aa, synthetic construct
PINGSAHVY

SEQ ID NO: 14958 - protein, 9 aa, synthetic construct
PINGSARVY

SEQ ID NO: 14959 - protein, 9 aa, synthetic construct
PINGSAKVY

SEQ ID NO: 14960 - protein, 9 aa, synthetic construct
PINGSIRLY

SEQ ID NO: 14961 - protein, 9 aa, synthetic construct
PINGSIRLH

SEQ ID NO: 14962 - protein, 9 aa, synthetic construct
PINGSIKVR

SEQ ID NO: 14963 - protein, 9 aa, synthetic construct
PINGSGHLR

SEQ ID NO: 14964 - protein, 9 aa, synthetic construct
PINGSGHVF

SEQ ID NO: 14965 - protein, 9 aa, synthetic construct
PLQAALRLF

SEQ ID NO: 14966 - protein, 9 aa, synthetic construct
PINGVVHVY

SEQ ID NO: 14967 - protein, 9 aa, synthetic construct
PINGVVHVR

SEQ ID NO: 14968 - protein, 9 aa, synthetic construct
PINGVVRLY

SEQ ID NO: 14969 - protein, 9 aa, synthetic construct
PINGVVKLF

SEQ ID NO: 14970 - protein, 9 aa, synthetic construct
PINGVVKVY

SEQ ID NO: 14971 - protein, 9 aa, synthetic construct
PINGVLHVY

SEQ ID NO: 14972 - protein, 9 aa, synthetic construct
PINGVLHVH

SEQ ID NO: 14973 - protein, 9 aa, synthetic construct
PINGVLHVK

SEQ ID NO: 14974 - protein, 9 aa, synthetic construct
PINGVLRVH

SEQ ID NO: 14975 - protein, 9 aa, synthetic construct
PLNGTAKLY

SEQ ID NO: 14976 - protein, 9 aa, synthetic construct
PINGVLKLY

SEQ ID NO: 14977 - protein, 9 aa, synthetic construct
PINGVLKLH

SEQ ID NO: 14978 - protein, 9 aa, synthetic construct
PINGVLKLF

SEQ ID NO: 14979 - protein, 9 aa, synthetic construct
PINGVLKVY

SEQ ID NO: 14980 - protein, 9 aa, synthetic construct
PINGVLKVF

SEQ ID NO: 14981 - protein, 9 aa, synthetic construct
PINGVAHLF

SEQ ID NO: 14982 - protein, 9 aa, synthetic construct
PINGVAHVH

SEQ ID NO: 14983 - protein, 9 aa, synthetic construct
PLQAALKLK

SEQ ID NO: 14984 - protein, 9 aa, synthetic construct
PINGVIHLK

SEQ ID NO: 14985 - protein, 9 aa, synthetic construct
PLQAALKVY

SEQ ID NO: 14986 - protein, 9 aa, synthetic construct
PINGVIRLY

SEQ ID NO: 14987 - protein, 9 aa, synthetic construct
PINGVGHLK

SEQ ID NO: 14988 - protein, 9 aa, synthetic construct
PINGVGRVY

SEQ ID NO: 14989 - protein, 9 aa, synthetic construct
PINGVGRVH

SEQ ID NO: 14990 - protein, 9 aa, synthetic construct
PINGVGKVF

SEQ ID NO: 14991 - protein, 9 aa, synthetic construct
PLQAAAHLY

SEQ ID NO: 14992 - protein, 9 aa, synthetic construct
PINGGVHLF

SEQ ID NO: 14993 - protein, 9 aa, synthetic construct
PLQAAAHLR

SEQ ID NO: 14994 - protein, 9 aa, synthetic construct
PINGGLHVH

SEQ ID NO: 14995 - protein, 9 aa, synthetic construct
PINGGLKLY

SEQ ID NO: 14996 - protein, 9 aa, synthetic construct
PINGGLKVY

SEQ ID NO: 14997 - protein, 9 aa, synthetic construct
PINGGAHLR

SEQ ID NO: 14998 - protein, 9 aa, synthetic construct
PINGGAHLK

SEQ ID NO: 14999 - protein, 9 aa, synthetic construct
PINGGAHLF

SEQ ID NO: 15000 - protein, 9 aa, synthetic construct
PINGGAHVY

SEQ ID NO: 15001 - protein, 9 aa, synthetic construct
PINGGAHVR

SEQ ID NO: 15002 - protein, 9 aa, synthetic construct
PLQAAAHVH

SEQ ID NO: 15003 - protein, 9 aa, synthetic construct
PINGGARVR

SEQ ID NO: 15004 - protein, 9 aa, synthetic construct
PINGGARVH

SEQ ID NO: 15005 - protein, 9 aa, synthetic construct
PINGGARVF

SEQ ID NO: 15006 - protein, 9 aa, synthetic construct
PINGGAKLR

SEQ ID NO: 15007 - protein, 9 aa, synthetic construct
PINGGAKVY

SEQ ID NO: 15008 - protein, 9 aa, synthetic construct
PINGGAKVK

SEQ ID NO: 15009 - protein, 9 aa, synthetic construct
PINGGIHLY

SEQ ID NO: 15010 - protein, 9 aa, synthetic construct
PINGGIHLH

SEQ ID NO: 15011 - protein, 9 aa, synthetic construct
PINGGIHLK

SEQ ID NO: 15012 - protein, 9 aa, synthetic construct
PINGGIHLF

SEQ ID NO: 15013 - protein, 9 aa, synthetic construct
PINGGIHVY

SEQ ID NO: 15014 - protein, 9 aa, synthetic construct
PINGGIHVF

SEQ ID NO: 15015 - protein, 9 aa, synthetic construct
PINGGIRLR

SEQ ID NO: 15016 - protein, 9 aa, synthetic construct
PINGGIRLF

SEQ ID NO: 15017 - protein, 9 aa, synthetic construct
PINGGIRVH

SEQ ID NO: 15018 - protein, 9 aa, synthetic construct
PINGGIRVF

SEQ ID NO: 15019 - protein, 9 aa, synthetic construct
PINGGIKLY

SEQ ID NO: 15020 - protein, 9 aa, synthetic construct
PINGGIKLR

SEQ ID NO: 15021 - protein, 9 aa, synthetic construct
PINGGIKLH

SEQ ID NO: 15022 - protein, 9 aa, synthetic construct
PINGGIKVY

SEQ ID NO: 15023 - protein, 9 aa, synthetic construct
PINGGIKVR

SEQ ID NO: 15024 - protein, 9 aa, synthetic construct
PINGGIKVF

SEQ ID NO: 15025 - protein, 9 aa, synthetic construct
PLQAAARLH

SEQ ID NO: 15026 - protein, 9 aa, synthetic construct
PINGGGHLK

SEQ ID NO: 15027 - protein, 9 aa, synthetic construct
PINGGGRLH

SEQ ID NO: 15028 - protein, 9 aa, synthetic construct
PINGGGRLF

SEQ ID NO: 15029 - protein, 9 aa, synthetic construct
PINGGGRVY

SEQ ID NO: 15030 - protein, 9 aa, synthetic construct
PINGGGKLH

SEQ ID NO: 15031 - protein, 9 aa, synthetic construct
PLQAAARVY

SEQ ID NO: 15032 - protein, 9 aa, synthetic construct
PINAALHVK

SEQ ID NO: 15033 - protein, 9 aa, synthetic construct
PLQAAAKLY

SEQ ID NO: 15034 - protein, 9 aa, synthetic construct
PLQAAAKLH

SEQ ID NO: 15035 - protein, 9 aa, synthetic construct
PINAAARLH

SEQ ID NO: 15036 - protein, 9 aa, synthetic construct
PINAAAKVH

SEQ ID NO: 15037 - protein, 9 aa, synthetic construct
PLQAAAKLF

SEQ ID NO: 15038 - protein, 9 aa, synthetic construct
PINAAIHLK

SEQ ID NO: 15039 - protein, 9 aa, synthetic construct
PINAAIHLF

SEQ ID NO: 15040 - protein, 9 aa, synthetic construct
PINAAIHVY

SEQ ID NO: 15041 - protein, 9 aa, synthetic construct
PINAAIHVK

SEQ ID NO: 15042 - protein, 9 aa, synthetic construct
PINAAIHVF

SEQ ID NO: 15043 - protein, 9 aa, synthetic construct
PLQAAAKVY

SEQ ID NO: 15044 - protein, 9 aa, synthetic construct
PINAAIRLY

SEQ ID NO: 15045 - protein, 9 aa, synthetic construct
PINAAIRLH

SEQ ID NO: 15046 - protein, 9 aa, synthetic construct
PINAAIRLF

SEQ ID NO: 15047 - protein, 9 aa, synthetic construct
PINAAIRVH

SEQ ID NO: 15048 - protein, 9 aa, synthetic construct
PINAAIRVF

SEQ ID NO: 15049 - protein, 9 aa, synthetic construct
PINAAIKLY

SEQ ID NO: 15050 - protein, 9 aa, synthetic construct
PINAAIKLR

SEQ ID NO: 15051 - protein, 9 aa, synthetic construct
PINAAIKLF

SEQ ID NO: 15052 - protein, 9 aa, synthetic construct
PINAAIKVY

SEQ ID NO: 15053 - protein, 9 aa, synthetic construct
PINAAIKVR

SEQ ID NO: 15054 - protein, 9 aa, synthetic construct
PINAAGHLY

SEQ ID NO: 15055 - protein, 9 aa, synthetic construct
PINAAGHLR

SEQ ID NO: 15056 - protein, 9 aa, synthetic construct
PINAAGHLK

SEQ ID NO: 15057 - protein, 9 aa, synthetic construct
PINAAGHVY

SEQ ID NO: 15058 - protein, 9 aa, synthetic construct
PINAAGHVK

SEQ ID NO: 15059 - protein, 9 aa, synthetic construct
PINAAGRLH

SEQ ID NO: 15060 - protein, 9 aa, synthetic construct
PINAAGKLF

SEQ ID NO: 15061 - protein, 9 aa, synthetic construct
PINATVHLK

SEQ ID NO: 15062 - protein, 9 aa, synthetic construct
PINATVHVK

SEQ ID NO: 15063 - protein, 9 aa, synthetic construct
PINATVRLY

SEQ ID NO: 15064 - protein, 9 aa, synthetic construct
PLQAAIHLH

SEQ ID NO: 15065 - protein, 9 aa, synthetic construct
PINATVKLF

SEQ ID NO: 15066 - protein, 9 aa, synthetic construct
PLQAAIHLK

SEQ ID NO: 15067 - protein, 9 aa, synthetic construct
PLQAAIHLF

SEQ ID NO: 15068 - protein, 9 aa, synthetic construct
PINATLRLF

SEQ ID NO: 15069 - protein, 9 aa, synthetic construct
PINATAHLR

SEQ ID NO: 15070 - protein, 9 aa, synthetic construct
PINATAHVR

SEQ ID NO: 15071 - protein, 9 aa, synthetic construct
PLQAAIHVH

SEQ ID NO: 15072 - protein, 9 aa, synthetic construct
PINATARVY

SEQ ID NO: 15073 - protein, 9 aa, synthetic construct
PINATAKVK

SEQ ID NO: 15074 - protein, 9 aa, synthetic construct
PINATAKVF

SEQ ID NO: 15075 - protein, 9 aa, synthetic construct
PLQAAIHVF

SEQ ID NO: 15076 - protein, 9 aa, synthetic construct
PINATIHLY

SEQ ID NO: 15077 - protein, 9 aa, synthetic construct
PINATIHLR

SEQ ID NO: 15078 - protein, 9 aa, synthetic construct
PINATIHLH

SEQ ID NO: 15079 - protein, 9 aa, synthetic construct
PINATIHLF

SEQ ID NO: 15080 - protein, 9 aa, synthetic construct
PINATIHVY

SEQ ID NO: 15081 - protein, 9 aa, synthetic construct
PINATIHVR

SEQ ID NO: 15082 - protein, 9 aa, synthetic construct
PINATIHVF

SEQ ID NO: 15083 - protein, 9 aa, synthetic construct
PLQAAIRLY

SEQ ID NO: 15084 - protein, 9 aa, synthetic construct
PINATIRLY

SEQ ID NO: 15085 - protein, 9 aa, synthetic construct
PINATIRLR

SEQ ID NO: 15086 - protein, 9 aa, synthetic construct
PLQAAIRLR

SEQ ID NO: 15087 - protein, 9 aa, synthetic construct
PINATIKVY

SEQ ID NO: 15088 - protein, 9 aa, synthetic construct
PINATIKVF

SEQ ID NO: 15089 - protein, 9 aa, synthetic construct
PLQAAIRLH

SEQ ID NO: 15090 - protein, 9 aa, synthetic construct
PINATGHLY

SEQ ID NO: 15091 - protein, 9 aa, synthetic construct
PINATGHLH

SEQ ID NO: 15092 - protein, 9 aa, synthetic construct
PINATGHVF

SEQ ID NO: 15093 - protein, 9 aa, synthetic construct
PINATGKVY

SEQ ID NO: 15094 - protein, 9 aa, synthetic construct
PLQAAIRVY

SEQ ID NO: 15095 - protein, 9 aa, synthetic construct
PINASVHVK

SEQ ID NO: 15096 - protein, 9 aa, synthetic construct
PINASVKVF

SEQ ID NO: 15097 - protein, 9 aa, synthetic construct
PLQAAIRVF

SEQ ID NO: 15098 - protein, 9 aa, synthetic construct
PINASLKLY

SEQ ID NO: 15099 - protein, 9 aa, synthetic construct
PLQAAIKVR

SEQ ID NO: 15100 - protein, 9 aa, synthetic construct
PINASGHLR

SEQ ID NO: 15101 - protein, 9 aa, synthetic construct
PINASGHVF

SEQ ID NO: 15102 - protein, 9 aa, synthetic construct
PLQAAIKVF

SEQ ID NO: 15103 - protein, 9 aa, synthetic construct
PLNGTAKVH

SEQ ID NO: 15104 - protein, 9 aa, synthetic construct
PLQAAGHLY

SEQ ID NO: 15105 - protein, 9 aa, synthetic construct
PLQAAGHLR

SEQ ID NO: 15106 - protein, 9 aa, synthetic construct
PLQAAGHLH

SEQ ID NO: 15107 - protein, 9 aa, synthetic construct
PINAVVKVF

SEQ ID NO: 15108 - protein, 9 aa, synthetic construct
PLQAAGHVY

SEQ ID NO: 15109 - protein, 9 aa, synthetic construct
PLQAAGHVR

SEQ ID NO: 15110 - protein, 9 aa, synthetic construct
PINAVAHLH

SEQ ID NO: 15111 - protein, 9 aa, synthetic construct
PINAVAHVR

SEQ ID NO: 15112 - protein, 9 aa, synthetic construct
PLQAAGHVK

SEQ ID NO: 15113 - protein, 9 aa, synthetic construct
PLNGTAKVK

SEQ ID NO: 15114 - protein, 9 aa, synthetic construct
PINAVIKLH

SEQ ID NO: 15115 - protein, 9 aa, synthetic construct
PLQAAGRLH

SEQ ID NO: 15116 - protein, 9 aa, synthetic construct
PINAVGRVH

SEQ ID NO: 15117 - protein, 9 aa, synthetic construct
PINAGVHVR

SEQ ID NO: 15118 - protein, 9 aa, synthetic construct
PLQAAGKLY

SEQ ID NO: 15119 - protein, 9 aa, synthetic construct
PINAGLKLY

SEQ ID NO: 15120 - protein, 9 aa, synthetic construct
PINAGAKLR

SEQ ID NO: 15121 - protein, 9 aa, synthetic construct
PINAGIRLH

SEQ ID NO: 15122 - protein, 9 aa, synthetic construct
PLQAAGKVF

SEQ ID NO: 15123 - protein, 9 aa, synthetic construct
PLQATVHLY

SEQ ID NO: 15124 - protein, 9 aa, synthetic construct
PIQGAVHVH

SEQ ID NO: 15125 - protein, 9 aa, synthetic construct
PLQATVHLR

SEQ ID NO: 15126 - protein, 9 aa, synthetic construct
PLQATVHLK

SEQ ID NO: 15127 - protein, 9 aa, synthetic construct
PIQGALHVY

SEQ ID NO: 15128 - protein, 9 aa, synthetic construct
PIQGALKVY

SEQ ID NO: 15129 - protein, 9 aa, synthetic construct
PIQGAAHVY

SEQ ID NO: 15130 - protein, 9 aa, synthetic construct
PLQATVHVH

SEQ ID NO: 15131 - protein, 9 aa, synthetic construct
PIQGAARVF

SEQ ID NO: 15132 - protein, 9 aa, synthetic construct
PLQATVHVK

SEQ ID NO: 15133 - protein, 9 aa, synthetic construct
PIQGAAKLY

SEQ ID NO: 15134 - protein, 9 aa, synthetic construct
PIQGAAKVH

SEQ ID NO: 15135 - protein, 9 aa, synthetic construct
PIQGAIHVH

SEQ ID NO: 15136 - protein, 9 aa, synthetic construct
PIQGAIHVF

SEQ ID NO: 15137 - protein, 9 aa, synthetic construct
PIQGAIRLY

SEQ ID NO: 15138 - protein, 9 aa, synthetic construct
PIQGAGRLF

SEQ ID NO: 15139 - protein, 9 aa, synthetic construct
PIQGTVHLY

SEQ ID NO: 15140 - protein, 9 aa, synthetic construct
PIQGTVHLR

SEQ ID NO: 15141 - protein, 9 aa, synthetic construct
PIQGTVHLH

SEQ ID NO: 15142 - protein, 9 aa, synthetic construct
PIQGTVHLK

SEQ ID NO: 15143 - protein, 9 aa, synthetic construct
PIQGTVHVR

SEQ ID NO: 15144 - protein, 9 aa, synthetic construct
PIQGTVHVF

SEQ ID NO: 15145 - protein, 9 aa, synthetic construct
PIQGTVRVF

SEQ ID NO: 15146 - protein, 9 aa, synthetic construct
PIQGTVKLY

SEQ ID NO: 15147 - protein, 9 aa, synthetic construct
PIQGTVKLH

SEQ ID NO: 15148 - protein, 9 aa, synthetic construct
PLQATVRVF

SEQ ID NO: 15149 - protein, 9 aa, synthetic construct
PIQGTLRLF

SEQ ID NO: 15150 - protein, 9 aa, synthetic construct
PIQGTLKLH

SEQ ID NO: 15151 - protein, 9 aa, synthetic construct
PIQGTLKVY

SEQ ID NO: 15152 - protein, 9 aa, synthetic construct
PIQGTAHLR

SEQ ID NO: 15153 - protein, 9 aa, synthetic construct
PIQGTAHLF

SEQ ID NO: 15154 - protein, 9 aa, synthetic construct
PIQGTAHVR

SEQ ID NO: 15155 - protein, 9 aa, synthetic construct
PIQGTAHVH

SEQ ID NO: 15156 - protein, 9 aa, synthetic construct
PIQGTAHVF

SEQ ID NO: 15157 - protein, 9 aa, synthetic construct
PIQGTARVY

SEQ ID NO: 15158 - protein, 9 aa, synthetic construct
PIQGTARVF

SEQ ID NO: 15159 - protein, 9 aa, synthetic construct
PIQGTAKVY

SEQ ID NO: 15160 - protein, 9 aa, synthetic construct
PIQGTAKVH

SEQ ID NO: 15161 - protein, 9 aa, synthetic construct
PIQGTAKVK

SEQ ID NO: 15162 - protein, 9 aa, synthetic construct
PIQGTIHLH

SEQ ID NO: 15163 - protein, 9 aa, synthetic construct
PIQGTIHVK

SEQ ID NO: 15164 - protein, 9 aa, synthetic construct
PLQATVKVY

SEQ ID NO: 15165 - protein, 9 aa, synthetic construct
PIQGTIRLR

SEQ ID NO: 15166 - protein, 9 aa, synthetic construct
PIQGTIRLH

SEQ ID NO: 15167 - protein, 9 aa, synthetic construct
PIQGTIRLF

SEQ ID NO: 15168 - protein, 9 aa, synthetic construct
PIQGTIRVY

SEQ ID NO: 15169 - protein, 9 aa, synthetic construct
PIQGTIRVH

SEQ ID NO: 15170 - protein, 9 aa, synthetic construct
PIQGTIKLY

SEQ ID NO: 15171 - protein, 9 aa, synthetic construct
PIQGTIKLR

SEQ ID NO: 15172 - protein, 9 aa, synthetic construct
PIQGTIKLH

SEQ ID NO: 15173 - protein, 9 aa, synthetic construct
PIQGTIKVY

SEQ ID NO: 15174 - protein, 9 aa, synthetic construct
PIQGTIKVR

SEQ ID NO: 15175 - protein, 9 aa, synthetic construct
PIQGTIKVF

SEQ ID NO: 15176 - protein, 9 aa, synthetic construct
PIQGTGHLR

SEQ ID NO: 15177 - protein, 9 aa, synthetic construct
PIQGTGHLH

SEQ ID NO: 15178 - protein, 9 aa, synthetic construct
PIQGTGHLF

SEQ ID NO: 15179 - protein, 9 aa, synthetic construct
PIQGTGHVY

SEQ ID NO: 15180 - protein, 9 aa, synthetic construct
PIQGTGHVF

SEQ ID NO: 15181 - protein, 9 aa, synthetic construct
PIQGTGRLY

SEQ ID NO: 15182 - protein, 9 aa, synthetic construct
PIQGTGRLH

SEQ ID NO: 15183 - protein, 9 aa, synthetic construct
PIQGTGRVF

SEQ ID NO: 15184 - protein, 9 aa, synthetic construct
PIQGTGKLY

SEQ ID NO: 15185 - protein, 9 aa, synthetic construct
PIQGTGKVH

SEQ ID NO: 15186 - protein, 9 aa, synthetic construct
PIQGSVHVH

SEQ ID NO: 15187 - protein, 9 aa, synthetic construct
PIQGSVHVK

SEQ ID NO: 15188 - protein, 9 aa, synthetic construct
PIQGSVRVY

SEQ ID NO: 15189 - protein, 9 aa, synthetic construct
PLQATLHLH

SEQ ID NO: 15190 - protein, 9 aa, synthetic construct
PIQGSAHVY

SEQ ID NO: 15191 - protein, 9 aa, synthetic construct
PIQGSAHVR

SEQ ID NO: 15192 - protein, 9 aa, synthetic construct
PIQGSAHVF

SEQ ID NO: 15193 - protein, 9 aa, synthetic construct
PIQGSARVY

SEQ ID NO: 15194 - protein, 9 aa, synthetic construct
PIQGSIHVY

SEQ ID NO: 15195 - protein, 9 aa, synthetic construct
PIQGSIRLY

SEQ ID NO: 15196 - protein, 9 aa, synthetic construct
PIQGSIRVY

SEQ ID NO: 15197 - protein, 9 aa, synthetic construct
PIQGSIKLR

SEQ ID NO: 15198 - protein, 9 aa, synthetic construct
PIQGSIKLF

SEQ ID NO: 15199 - protein, 9 aa, synthetic construct
PIQGSIKVR

SEQ ID NO: 15200 - protein, 9 aa, synthetic construct
PIQGSGRVF

SEQ ID NO: 15201 - protein, 9 aa, synthetic construct
PLQATLRLF

SEQ ID NO: 15202 - protein, 9 aa, synthetic construct
PIQGVVKLF

SEQ ID NO: 15203 - protein, 9 aa, synthetic construct
PIQGVVKVY

SEQ ID NO: 15204 - protein, 9 aa, synthetic construct
PIQGVLHLK

SEQ ID NO: 15205 - protein, 9 aa, synthetic construct
PIQGVLHVY

SEQ ID NO: 15206 - protein, 9 aa, synthetic construct
PIQGVLHVH

SEQ ID NO: 15207 - protein, 9 aa, synthetic construct
PIQGVLKLH

SEQ ID NO: 15208 - protein, 9 aa, synthetic construct
PIQGVAHLY

SEQ ID NO: 15209 - protein, 9 aa, synthetic construct
PIQGVAHLR

SEQ ID NO: 15210 - protein, 9 aa, synthetic construct
PIQGVAHLK

SEQ ID NO: 15211 - protein, 9 aa, synthetic construct
PIQGVAHVR

SEQ ID NO: 15212 - protein, 9 aa, synthetic construct
PIQGVAHVH

SEQ ID NO: 15213 - protein, 9 aa, synthetic construct
PIQGVAHVF

SEQ ID NO: 15214 - protein, 9 aa, synthetic construct
PIQGVIRLY

SEQ ID NO: 15215 - protein, 9 aa, synthetic construct
PIQGVIRVH

SEQ ID NO: 15216 - protein, 9 aa, synthetic construct
PIQGVGHLF

SEQ ID NO: 15217 - protein, 9 aa, synthetic construct
PIQGVGHVY

SEQ ID NO: 15218 - protein, 9 aa, synthetic construct
PIQGVGHVR

SEQ ID NO: 15219 - protein, 9 aa, synthetic construct
PIQGVGRLY

SEQ ID NO: 15220 - protein, 9 aa, synthetic construct
PIQGVGRVY

SEQ ID NO: 15221 - protein, 9 aa, synthetic construct
PIQGVGKVF

SEQ ID NO: 15222 - protein, 9 aa, synthetic construct
PLQATAHLR

SEQ ID NO: 15223 - protein, 9 aa, synthetic construct
PLQATAHLH

SEQ ID NO: 15224 - protein, 9 aa, synthetic construct
PLQATAHLF

SEQ ID NO: 15225 - protein, 9 aa, synthetic construct
PLQATAHVY

SEQ ID NO: 15226 - protein, 9 aa, synthetic construct
PLQATAHVH

SEQ ID NO: 15227 - protein, 9 aa, synthetic construct
PLQATAHVK

SEQ ID NO: 15228 - protein, 9 aa, synthetic construct
PLQATAHVF

SEQ ID NO: 15229 - protein, 9 aa, synthetic construct
PIQGGIHLR

SEQ ID NO: 15230 - protein, 9 aa, synthetic construct
PIQGGIHLF

SEQ ID NO: 15231 - protein, 9 aa, synthetic construct
PIQGGIHVF

SEQ ID NO: 15232 - protein, 9 aa, synthetic construct
PIQGGIRLH

SEQ ID NO: 15233 - protein, 9 aa, synthetic construct
PIQGGIKVH

SEQ ID NO: 15234 - protein, 9 aa, synthetic construct
PIQGGGHLH

SEQ ID NO: 15235 - protein, 9 aa, synthetic construct
PIQAAVRVF

SEQ ID NO: 15236 - protein, 9 aa, synthetic construct
PLQATARVF

SEQ ID NO: 15237 - protein, 9 aa, synthetic construct
PIQAALRLF

SEQ ID NO: 15238 - protein, 9 aa, synthetic construct
PLQATAKLY

SEQ ID NO: 15239 - protein, 9 aa, synthetic construct
PIQAAAHVH

SEQ ID NO: 15240 - protein, 9 aa, synthetic construct
PLQATAKLH

SEQ ID NO: 15241 - protein, 9 aa, synthetic construct
PLQATAKVY

SEQ ID NO: 15242 - protein, 9 aa, synthetic construct
PIQAAIRLY

SEQ ID NO: 15243 - protein, 9 aa, synthetic construct
PIQAAIRVH

SEQ ID NO: 15244 - protein, 9 aa, synthetic construct
PIQAAIKVF

SEQ ID NO: 15245 - protein, 9 aa, synthetic construct
PIQAAGHLR

SEQ ID NO: 15246 - protein, 9 aa, synthetic construct
PIQAAGHLK

SEQ ID NO: 15247 - protein, 9 aa, synthetic construct
PIQAAGKLF

SEQ ID NO: 15248 - protein, 9 aa, synthetic construct
PIQAAGKVF

SEQ ID NO: 15249 - protein, 9 aa, synthetic construct
PIQATVHLR

SEQ ID NO: 15250 - protein, 9 aa, synthetic construct
PIQATVHLH

SEQ ID NO: 15251 - protein, 9 aa, synthetic construct
PIQATVRVF

SEQ ID NO: 15252 - protein, 9 aa, synthetic construct
PLQATIHLH

SEQ ID NO: 15253 - protein, 9 aa, synthetic construct
PLQATIHLK

SEQ ID NO: 15254 - protein, 9 aa, synthetic construct
PIQATLRLY

SEQ ID NO: 15255 - protein, 9 aa, synthetic construct
PIQATLRLH

SEQ ID NO: 15256 - protein, 9 aa, synthetic construct
PIQATLKLY

SEQ ID NO: 15257 - protein, 9 aa, synthetic construct
PIQATLKLH

SEQ ID NO: 15258 - protein, 9 aa, synthetic construct
PIQATLKLF

SEQ ID NO: 15259 - protein, 9 aa, synthetic construct
PIQATAHVK

SEQ ID NO: 15260 - protein, 9 aa, synthetic construct
PIQATARLH

SEQ ID NO: 15261 - protein, 9 aa, synthetic construct
PIQATARVF

SEQ ID NO: 15262 - protein, 9 aa, synthetic construct
PIQATAKVY

SEQ ID NO: 15263 - protein, 9 aa, synthetic construct
PLNGAVKVY

SEQ ID NO: 15264 - protein, 9 aa, synthetic construct
PLNGTIRLY

SEQ ID NO: 15265 - protein, 9 aa, synthetic construct
PLQATIRLY

SEQ ID NO: 15266 - protein, 9 aa, synthetic construct
PIQATIRLY

SEQ ID NO: 15267 - protein, 9 aa, synthetic construct
PIQATIKLR

SEQ ID NO: 15268 - protein, 9 aa, synthetic construct
PIQATIKVY

SEQ ID NO: 15269 - protein, 9 aa, synthetic construct
PIQATGHLK

SEQ ID NO: 15270 - protein, 9 aa, synthetic construct
PIQATGHLF

SEQ ID NO: 15271 - protein, 9 aa, synthetic construct
PIQATGKVY

SEQ ID NO: 15272 - protein, 9 aa, synthetic construct
PIQATGKVK

SEQ ID NO: 15273 - protein, 9 aa, synthetic construct
PLQATIRVH

SEQ ID NO: 15274 - protein, 9 aa, synthetic construct
PIQASLKLY

SEQ ID NO: 15275 - protein, 9 aa, synthetic construct
PIQASAKLY

SEQ ID NO: 15276 - protein, 9 aa, synthetic construct
PLQATIKVY

SEQ ID NO: 15277 - protein, 9 aa, synthetic construct
PIQASIRLY

SEQ ID NO: 15278 - protein, 9 aa, synthetic construct
PIQASIRLR

SEQ ID NO: 15279 - protein, 9 aa, synthetic construct
PIQASIRLH

SEQ ID NO: 15280 - protein, 9 aa, synthetic construct
PIQASIRVY

SEQ ID NO: 15281 - protein, 9 aa, synthetic construct
PIQASIKLY

SEQ ID NO: 15282 - protein, 9 aa, synthetic construct
PIQASIKLK

SEQ ID NO: 15283 - protein, 9 aa, synthetic construct
PIQASIKLF

SEQ ID NO: 15284 - protein, 9 aa, synthetic construct
PIQASIKVY

SEQ ID NO: 15285 - protein, 9 aa, synthetic construct
PIQASIKVR

SEQ ID NO: 15286 - protein, 9 aa, synthetic construct
PIQASGHLR

SEQ ID NO: 15287 - protein, 9 aa, synthetic construct
PIQASGHLH

SEQ ID NO: 15288 - protein, 9 aa, synthetic construct
PIQASGHLF

SEQ ID NO: 15289 - protein, 9 aa, synthetic construct
PIQASGRVK

SEQ ID NO: 15290 - protein, 9 aa, synthetic construct
PLQATGHLY

SEQ ID NO: 15291 - protein, 9 aa, synthetic construct
PLQATGHLH

SEQ ID NO: 15292 - protein, 9 aa, synthetic construct
PIQAVVKLF

SEQ ID NO: 15293 - protein, 9 aa, synthetic construct
PIQAVLRLR

SEQ ID NO: 15294 - protein, 9 aa, synthetic construct
PIQAVLKLR

SEQ ID NO: 15295 - protein, 9 aa, synthetic construct
PIQAVLKLK

SEQ ID NO: 15296 - protein, 9 aa, synthetic construct
PIQAVLKLF

SEQ ID NO: 15297 - protein, 9 aa, synthetic construct
PIQAVAHLF

SEQ ID NO: 15298 - protein, 9 aa, synthetic construct
PLQATGHVH

SEQ ID NO: 15299 - protein, 9 aa, synthetic construct
PIQAVAKLF

SEQ ID NO: 15300 - protein, 9 aa, synthetic construct
PLQATGHVF

SEQ ID NO: 15301 - protein, 9 aa, synthetic construct
PLQATGRLY

SEQ ID NO: 15302 - protein, 9 aa, synthetic construct
PIQAVIRLH

SEQ ID NO: 15303 - protein, 9 aa, synthetic construct
PIQAVIRVY

SEQ ID NO: 15304 - protein, 9 aa, synthetic construct
PIQAVIRVF

SEQ ID NO: 15305 - protein, 9 aa, synthetic construct
PIQAVIKVY

SEQ ID NO: 15306 - protein, 9 aa, synthetic construct
PIQAVIKVH

SEQ ID NO: 15307 - protein, 9 aa, synthetic construct
PIQAVGHLK

SEQ ID NO: 15308 - protein, 9 aa, synthetic construct
PLQATGRVH

SEQ ID NO: 15309 - protein, 9 aa, synthetic construct
PLQATGKVY

SEQ ID NO: 15310 - protein, 9 aa, synthetic construct
PIQAGIKLR

SEQ ID NO: 15311 - protein, 9 aa, synthetic construct
PIQAGIKVH

SEQ ID NO: 15312 - protein, 9 aa, synthetic construct
PLQATGKVH

SEQ ID NO: 15313 - protein, 9 aa, synthetic construct
PIPGAVHLH

SEQ ID NO: 15314 - protein, 9 aa, synthetic construct
PIPGAVKVY

SEQ ID NO: 15315 - protein, 9 aa, synthetic construct
PLQASVHVY

SEQ ID NO: 15316 - protein, 9 aa, synthetic construct
PIPGAAHVH

SEQ ID NO: 15317 - protein, 9 aa, synthetic construct
PIPGAARVY

SEQ ID NO: 15318 - protein, 9 aa, synthetic construct
PLQASVHVK

SEQ ID NO: 15319 - protein, 9 aa, synthetic construct
PIPGAAKLY

SEQ ID NO: 15320 - protein, 9 aa, synthetic construct
PIPGAIHLH

SEQ ID NO: 15321 - protein, 9 aa, synthetic construct
PIPGAIHLF

SEQ ID NO: 15322 - protein, 9 aa, synthetic construct
PIPGAIHVY

SEQ ID NO: 15323 - protein, 9 aa, synthetic construct
PIPGAIHVR

SEQ ID NO: 15324 - protein, 9 aa, synthetic construct
PIPGAIHVF

SEQ ID NO: 15325 - protein, 9 aa, synthetic construct
PIPGAIKVY

SEQ ID NO: 15326 - protein, 9 aa, synthetic construct
PIPGAGRLH

SEQ ID NO: 15327 - protein, 9 aa, synthetic construct
PIPGAGRLF

SEQ ID NO: 15328 - protein, 9 aa, synthetic construct
PLQASVRVY

SEQ ID NO: 15329 - protein, 9 aa, synthetic construct
PIPGTVHLR

SEQ ID NO: 15330 - protein, 9 aa, synthetic construct
PIPGTVRVH

SEQ ID NO: 15331 - protein, 9 aa, synthetic construct
PIPGTLKLH

SEQ ID NO: 15332 - protein, 9 aa, synthetic construct
PIPGTAHLR

SEQ ID NO: 15333 - protein, 9 aa, synthetic construct
PIPGTAHLF

SEQ ID NO: 15334 - protein, 9 aa, synthetic construct
PIPGSVRVH

SEQ ID NO: 15335 - protein, 9 aa, synthetic construct
PIPGSLKVH

SEQ ID NO: 15336 - protein, 9 aa, synthetic construct
PIPGSAHVF

SEQ ID NO: 15337 - protein, 9 aa, synthetic construct
PIPGSIKVR

SEQ ID NO: 15338 - protein, 9 aa, synthetic construct
PIPGSIKVF

SEQ ID NO: 15339 - protein, 9 aa, synthetic construct
PIPGSGHLR

SEQ ID NO: 15340 - protein, 9 aa, synthetic construct
PIPGVVHVY

SEQ ID NO: 15341 - protein, 9 aa, synthetic construct
PIPGVVHVK

SEQ ID NO: 15342 - protein, 9 aa, synthetic construct
PIPGVVRLK

SEQ ID NO: 15343 - protein, 9 aa, synthetic construct
PIPGVVRVH

SEQ ID NO: 15344 - protein, 9 aa, synthetic construct
PIPGVVKLK

SEQ ID NO: 15345 - protein, 9 aa, synthetic construct
PIPGVVKVY

SEQ ID NO: 15346 - protein, 9 aa, synthetic construct
PIPGVLHVH

SEQ ID NO: 15347 - protein, 9 aa, synthetic construct
PIPGVLHVK

SEQ ID NO: 15348 - protein, 9 aa, synthetic construct
PLNGTIKLY

SEQ ID NO: 15349 - protein, 9 aa, synthetic construct
PIPGVLKVH

SEQ ID NO: 15350 - protein, 9 aa, synthetic construct
PIPGVAHLY

SEQ ID NO: 15351 - protein, 9 aa, synthetic construct
PIPGVAHLH

SEQ ID NO: 15352 - protein, 9 aa, synthetic construct
PIPGVAHLF

SEQ ID NO: 15353 - protein, 9 aa, synthetic construct
PIPGVAHVY

SEQ ID NO: 15354 - protein, 9 aa, synthetic construct
PIPGVAHVR

SEQ ID NO: 15355 - protein, 9 aa, synthetic construct
PIPGVAHVK

SEQ ID NO: 15356 - protein, 9 aa, synthetic construct
PIPGVAHVF

SEQ ID NO: 15357 - protein, 9 aa, synthetic construct
PIPGVARVY

SEQ ID NO: 15358 - protein, 9 aa, synthetic construct
PIPGVAKVH

SEQ ID NO: 15359 - protein, 9 aa, synthetic construct
PIPGVIHLK

SEQ ID NO: 15360 - protein, 9 aa, synthetic construct
PIPGVIHVK

SEQ ID NO: 15361 - protein, 9 aa, synthetic construct
PIPGVIKVH

SEQ ID NO: 15362 - protein, 9 aa, synthetic construct
PIPGVGHLY

SEQ ID NO: 15363 - protein, 9 aa, synthetic construct
PIPGVGHLR

SEQ ID NO: 15364 - protein, 9 aa, synthetic construct
PIPGVGHLF

SEQ ID NO: 15365 - protein, 9 aa, synthetic construct
PIPGVGHVY

SEQ ID NO: 15366 - protein, 9 aa, synthetic construct
PIPGVGHVK

SEQ ID NO: 15367 - protein, 9 aa, synthetic construct
PIPGVGHVF

SEQ ID NO: 15368 - protein, 9 aa, synthetic construct
PIPGVGRLY

SEQ ID NO: 15369 - protein, 9 aa, synthetic construct
PIPGVGRLF

SEQ ID NO: 15370 - protein, 9 aa, synthetic construct
PIPGVGRVH

SEQ ID NO: 15371 - protein, 9 aa, synthetic construct
PIPGVGRVF

SEQ ID NO: 15372 - protein, 9 aa, synthetic construct
PIPGVGKLY

SEQ ID NO: 15373 - protein, 9 aa, synthetic construct
PIPGVGKLH

SEQ ID NO: 15374 - protein, 9 aa, synthetic construct
PIPGVGKLF

SEQ ID NO: 15375 - protein, 9 aa, synthetic construct
PIPGVGKVF

SEQ ID NO: 15376 - protein, 9 aa, synthetic construct
PLNGTIKLR

SEQ ID NO: 15377 - protein, 9 aa, synthetic construct
PLQASAHLH

SEQ ID NO: 15378 - protein, 9 aa, synthetic construct
PIPGGVKVK

SEQ ID NO: 15379 - protein, 9 aa, synthetic construct
PIPGGLHVH

SEQ ID NO: 15380 - protein, 9 aa, synthetic construct
PLQASAHLF

SEQ ID NO: 15381 - protein, 9 aa, synthetic construct
PLQASAHVY

SEQ ID NO: 15382 - protein, 9 aa, synthetic construct
PIPGGAHLY

SEQ ID NO: 15383 - protein, 9 aa, synthetic construct
PIPGGAHLR

SEQ ID NO: 15384 - protein, 9 aa, synthetic construct
PIPGGAHLF

SEQ ID NO: 15385 - protein, 9 aa, synthetic construct
PIPGGAHVY

SEQ ID NO: 15386 - protein, 9 aa, synthetic construct
PIPGGARVY

SEQ ID NO: 15387 - protein, 9 aa, synthetic construct
PIPGGARVR

SEQ ID NO: 15388 - protein, 9 aa, synthetic construct
PIPGGARVH

SEQ ID NO: 15389 - protein, 9 aa, synthetic construct
PIPGGAKLY

SEQ ID NO: 15390 - protein, 9 aa, synthetic construct
PIPGGAKLR

SEQ ID NO: 15391 - protein, 9 aa, synthetic construct
PIPGGAKLH

SEQ ID NO: 15392 - protein, 9 aa, synthetic construct
PIPGGAKVY

SEQ ID NO: 15393 - protein, 9 aa, synthetic construct
PLNGTIKLH

SEQ ID NO: 15394 - protein, 9 aa, synthetic construct
PIPGGIRLY

SEQ ID NO: 15395 - protein, 9 aa, synthetic construct
PIPGGIRLH

SEQ ID NO: 15396 - protein, 9 aa, synthetic construct
PIPGGGHLR

SEQ ID NO: 15397 - protein, 9 aa, synthetic construct
PIPGGGHLK

SEQ ID NO: 15398 - protein, 9 aa, synthetic construct
PIPGGGKVF

SEQ ID NO: 15399 - protein, 9 aa, synthetic construct
PLQASARVY

SEQ ID NO: 15400 - protein, 9 aa, synthetic construct
PIPAAVHLY

SEQ ID NO: 15401 - protein, 9 aa, synthetic construct
PIPAAVHLR

SEQ ID NO: 15402 - protein, 9 aa, synthetic construct
PIPAAVHLF

SEQ ID NO: 15403 - protein, 9 aa, synthetic construct
PIPAAVHVR

SEQ ID NO: 15404 - protein, 9 aa, synthetic construct
PIPAAVHVH

SEQ ID NO: 15405 - protein, 9 aa, synthetic construct
PIPAAVHVF

SEQ ID NO: 15406 - protein, 9 aa, synthetic construct
PLQASARVH

SEQ ID NO: 15407 - protein, 9 aa, synthetic construct
PIPAAVKVY

SEQ ID NO: 15408 - protein, 9 aa, synthetic construct
PIPAALHLH

SEQ ID NO: 15409 - protein, 9 aa, synthetic construct
PIPAALRLY

SEQ ID NO: 15410 - protein, 9 aa, synthetic construct
PLQASAKLY

SEQ ID NO: 15411 - protein, 9 aa, synthetic construct
PIPAALKLK

SEQ ID NO: 15412 - protein, 9 aa, synthetic construct
PIPAAIHVH

SEQ ID NO: 15413 - protein, 9 aa, synthetic construct
PIPAAIRLR

SEQ ID NO: 15414 - protein, 9 aa, synthetic construct
PIPAAIKVY

SEQ ID NO: 15415 - protein, 9 aa, synthetic construct
PIPAAGHLY

SEQ ID NO: 15416 - protein, 9 aa, synthetic construct
PIPAAGHLR

SEQ ID NO: 15417 - protein, 9 aa, synthetic construct
PIPAAGKLF

SEQ ID NO: 15418 - protein, 9 aa, synthetic construct
PIPAAGKVH

SEQ ID NO: 15419 - protein, 9 aa, synthetic construct
PLNGTIKLF

SEQ ID NO: 15420 - protein, 9 aa, synthetic construct
PIPATVHLR

SEQ ID NO: 15421 - protein, 9 aa, synthetic construct
PLQASIHLH

SEQ ID NO: 15422 - protein, 9 aa, synthetic construct
PIPATVKLR

SEQ ID NO: 15423 - protein, 9 aa, synthetic construct
PIPATLRVF

SEQ ID NO: 15424 - protein, 9 aa, synthetic construct
PIPATLKLR

SEQ ID NO: 15425 - protein, 9 aa, synthetic construct
PIPATLKLK

SEQ ID NO: 15426 - protein, 9 aa, synthetic construct
PIPATIHVK

SEQ ID NO: 15427 - protein, 9 aa, synthetic construct
PIPATIKLF

SEQ ID NO: 15428 - protein, 9 aa, synthetic construct
PIPATGHLY

SEQ ID NO: 15429 - protein, 9 aa, synthetic construct
PIPATGHLF

SEQ ID NO: 15430 - protein, 9 aa, synthetic construct
PIPATGHVF

SEQ ID NO: 15431 - protein, 9 aa, synthetic construct
PIPATGRLF

SEQ ID NO: 15432 - protein, 9 aa, synthetic construct
PIPATGKLH

SEQ ID NO: 15433 - protein, 9 aa, synthetic construct
PIPATGKLF

SEQ ID NO: 15434 - protein, 9 aa, synthetic construct
PIPATGKVY

SEQ ID NO: 15435 - protein, 9 aa, synthetic construct
PIPATGKVH

SEQ ID NO: 15436 - protein, 9 aa, synthetic construct
PIPASVKVH

SEQ ID NO: 15437 - protein, 9 aa, synthetic construct
PLNGTIKVR

SEQ ID NO: 15438 - protein, 9 aa, synthetic construct
PIPASLKLH

SEQ ID NO: 15439 - protein, 9 aa, synthetic construct
PLQASIKLR

SEQ ID NO: 15440 - protein, 9 aa, synthetic construct
PIPASAHLY

SEQ ID NO: 15441 - protein, 9 aa, synthetic construct
PIPASAHLF

SEQ ID NO: 15442 - protein, 9 aa, synthetic construct
PIPASAHVY

SEQ ID NO: 15443 - protein, 9 aa, synthetic construct
PIPASAKLF

SEQ ID NO: 15444 - protein, 9 aa, synthetic construct
PIPASGHLR

SEQ ID NO: 15445 - protein, 9 aa, synthetic construct
PIPAVVHLH

SEQ ID NO: 15446 - protein, 9 aa, synthetic construct
PIPAVVHLF

SEQ ID NO: 15447 - protein, 9 aa, synthetic construct
PIPAVVHVK

SEQ ID NO: 15448 - protein, 9 aa, synthetic construct
PIPAVVHVF

SEQ ID NO: 15449 - protein, 9 aa, synthetic construct
PLQASGHLR

SEQ ID NO: 15450 - protein, 9 aa, synthetic construct
PIPAVVRVH

SEQ ID NO: 15451 - protein, 9 aa, synthetic construct
PLQASGHLK

SEQ ID NO: 15452 - protein, 9 aa, synthetic construct
PIPAVLHVH

SEQ ID NO: 15453 - protein, 9 aa, synthetic construct
PIPAVLHVK

SEQ ID NO: 15454 - protein, 9 aa, synthetic construct
PIPAVLKLY

SEQ ID NO: 15455 - protein, 9 aa, synthetic construct
PIPAVAHLH

SEQ ID NO: 15456 - protein, 9 aa, synthetic construct
PIPAVAHVR

SEQ ID NO: 15457 - protein, 9 aa, synthetic construct
PIPAVAHVH

SEQ ID NO: 15458 - protein, 9 aa, synthetic construct
PIPAVAHVK

SEQ ID NO: 15459 - protein, 9 aa, synthetic construct
PLQASGHVH

SEQ ID NO: 15460 - protein, 9 aa, synthetic construct
PIPAVAKLF

SEQ ID NO: 15461 - protein, 9 aa, synthetic construct
PLQASGHVF

SEQ ID NO: 15462 - protein, 9 aa, synthetic construct
PIPAVIHVK

SEQ ID NO: 15463 - protein, 9 aa, synthetic construct
PLNGTIKVK

SEQ ID NO: 15464 - protein, 9 aa, synthetic construct
PIPAVIKVH

SEQ ID NO: 15465 - protein, 9 aa, synthetic construct
PLQASGRLH

SEQ ID NO: 15466 - protein, 9 aa, synthetic construct
PIPAVGHVH

SEQ ID NO: 15467 - protein, 9 aa, synthetic construct
PIPAVGRVH

SEQ ID NO: 15468 - protein, 9 aa, synthetic construct
PIPAVGKLY

SEQ ID NO: 15469 - protein, 9 aa, synthetic construct
PLQASGRVY

SEQ ID NO: 15470 - protein, 9 aa, synthetic construct
PIPAGVHLH

SEQ ID NO: 15471 - protein, 9 aa, synthetic construct
PLQASGRVK

SEQ ID NO: 15472 - protein, 9 aa, synthetic construct
PLQASGRVF

SEQ ID NO: 15473 - protein, 9 aa, synthetic construct
PLNGTIKVF

SEQ ID NO: 15474 - protein, 9 aa, synthetic construct
PIPAGAHVY

SEQ ID NO: 15475 - protein, 9 aa, synthetic construct
PIPAGAHVF

SEQ ID NO: 15476 - protein, 9 aa, synthetic construct
PLQASGKLH

SEQ ID NO: 15477 - protein, 9 aa, synthetic construct
PIPAGARVR

SEQ ID NO: 15478 - protein, 9 aa, synthetic construct
PIPAGAKLY

SEQ ID NO: 15479 - protein, 9 aa, synthetic construct
PIPAGAKLR

SEQ ID NO: 15480 - protein, 9 aa, synthetic construct
PLQASGKLF

SEQ ID NO: 15481 - protein, 9 aa, synthetic construct
PLQASGKVH

SEQ ID NO: 15482 - protein, 9 aa, synthetic construct
PLQASGKVF

SEQ ID NO: 15483 - protein, 9 aa, synthetic construct
GLNGAVHLR

SEQ ID NO: 15484 - protein, 9 aa, synthetic construct
GLNGAVHLH

SEQ ID NO: 15485 - protein, 9 aa, synthetic construct
GLNGAVRLY

SEQ ID NO: 15486 - protein, 9 aa, synthetic construct
GLNGAVKLF

SEQ ID NO: 15487 - protein, 9 aa, synthetic construct
GLNGALHLY

SEQ ID NO: 15488 - protein, 9 aa, synthetic construct
GLNGALHLK

SEQ ID NO: 15489 - protein, 9 aa, synthetic construct
GLNGALHLF

SEQ ID NO: 15490 - protein, 9 aa, synthetic construct
GLNGALHVY

SEQ ID NO: 15491 - protein, 9 aa, synthetic construct
GLNGALHVR

SEQ ID NO: 15492 - protein, 9 aa, synthetic construct
GLNGALHVH

SEQ ID NO: 15493 - protein, 9 aa, synthetic construct
GLNGALHVK

SEQ ID NO: 15494 - protein, 9 aa, synthetic construct
GLNGALHVF

SEQ ID NO: 15495 - protein, 9 aa, synthetic construct
GLNGALKLH

SEQ ID NO: 15496 - protein, 9 aa, synthetic construct
GLNGALKVY

SEQ ID NO: 15497 - protein, 9 aa, synthetic construct
GLNGALKVH

SEQ ID NO: 15498 - protein, 9 aa, synthetic construct
GLNGALKVF

SEQ ID NO: 15499 - protein, 9 aa, synthetic construct
GLNGAAHLY

SEQ ID NO: 15500 - protein, 9 aa, synthetic construct
GLNGAAHLR

SEQ ID NO: 15501 - protein, 9 aa, synthetic construct
GLNGAAHLH

SEQ ID NO: 15502 - protein, 9 aa, synthetic construct
GLNGAAHVY

SEQ ID NO: 15503 - protein, 9 aa, synthetic construct
GLNGAAHVR

SEQ ID NO: 15504 - protein, 9 aa, synthetic construct
GLNGAAHVH

SEQ ID NO: 15505 - protein, 9 aa, synthetic construct
GLNGAAHVK

SEQ ID NO: 15506 - protein, 9 aa, synthetic construct
GLNGAARLH

SEQ ID NO: 15507 - protein, 9 aa, synthetic construct
GLNGAARVF

SEQ ID NO: 15508 - protein, 9 aa, synthetic construct
GLNGAAKLR

SEQ ID NO: 15509 - protein, 9 aa, synthetic construct
GLNGAAKLH

SEQ ID NO: 15510 - protein, 9 aa, synthetic construct
GLNGAAKVY

SEQ ID NO: 15511 - protein, 9 aa, synthetic construct
GLNGAAKVH

SEQ ID NO: 15512 - protein, 9 aa, synthetic construct
GLNGAAKVK

SEQ ID NO: 15513 - protein, 9 aa, synthetic construct
GLNGAIHLH

SEQ ID NO: 15514 - protein, 9 aa, synthetic construct
GLNGAIHLF

SEQ ID NO: 15515 - protein, 9 aa, synthetic construct
GLNGAIHVY

SEQ ID NO: 15516 - protein, 9 aa, synthetic construct
GLNGAIHVK

SEQ ID NO: 15517 - protein, 9 aa, synthetic construct
GLNGAIHVF

SEQ ID NO: 15518 - protein, 9 aa, synthetic construct
GLNGAIRLY

SEQ ID NO: 15519 - protein, 9 aa, synthetic construct
GLNGAIRLR

SEQ ID NO: 15520 - protein, 9 aa, synthetic construct
GLNGAIKVF

SEQ ID NO: 15521 - protein, 9 aa, synthetic construct
GLNGAGHLH

SEQ ID NO: 15522 - protein, 9 aa, synthetic construct
GLNGAGHLK

SEQ ID NO: 15523 - protein, 9 aa, synthetic construct
GLNGAGHVH

SEQ ID NO: 15524 - protein, 9 aa, synthetic construct
GLNGAGRLF

SEQ ID NO: 15525 - protein, 9 aa, synthetic construct
GLNGAGKLY

SEQ ID NO: 15526 - protein, 9 aa, synthetic construct
GLNGAGKVY

SEQ ID NO: 15527 - protein, 9 aa, synthetic construct
GLNGTVHLH

SEQ ID NO: 15528 - protein, 9 aa, synthetic construct
GLNGTVHVH

SEQ ID NO: 15529 - protein, 9 aa, synthetic construct
GLNGTVHVF

SEQ ID NO: 15530 - protein, 9 aa, synthetic construct
GLNGTVRLY

SEQ ID NO: 15531 - protein, 9 aa, synthetic construct
PLQAVVRVH

SEQ ID NO: 15532 - protein, 9 aa, synthetic construct
GLNGTVKLH

SEQ ID NO: 15533 - protein, 9 aa, synthetic construct
GLNGTVKLF

SEQ ID NO: 15534 - protein, 9 aa, synthetic construct
GLNGTLHLK

SEQ ID NO: 15535 - protein, 9 aa, synthetic construct
GLNGTAHLR

SEQ ID NO: 15536 - protein, 9 aa, synthetic construct
GLNGTAHLF

SEQ ID NO: 15537 - protein, 9 aa, synthetic construct
GLNGTAHVY

SEQ ID NO: 15538 - protein, 9 aa, synthetic construct
GLNGTARVF

SEQ ID NO: 15539 - protein, 9 aa, synthetic construct
GLNGTAKVK

SEQ ID NO: 15540 - protein, 9 aa, synthetic construct
GLNGTIHLH

SEQ ID NO: 15541 - protein, 9 aa, synthetic construct
GLNGTIHVK

SEQ ID NO: 15542 - protein, 9 aa, synthetic construct
GLNGTIKVY

SEQ ID NO: 15543 - protein, 9 aa, synthetic construct
GLNGTGKLY

SEQ ID NO: 15544 - protein, 9 aa, synthetic construct
GLNGSVHLF

SEQ ID NO: 15545 - protein, 9 aa, synthetic construct
GLNGSARVY

SEQ ID NO: 15546 - protein, 9 aa, synthetic construct
GLNGSIHLH

SEQ ID NO: 15547 - protein, 9 aa, synthetic construct
GLNGSIHVY

SEQ ID NO: 15548 - protein, 9 aa, synthetic construct
GLNGSGHLH

SEQ ID NO: 15549 - protein, 9 aa, synthetic construct
GLNGVVHVK

SEQ ID NO: 15550 - protein, 9 aa, synthetic construct
GLNGVVKLY

SEQ ID NO: 15551 - protein, 9 aa, synthetic construct
GLNGVVKLF

SEQ ID NO: 15552 - protein, 9 aa, synthetic construct
GLNGVVKVY

SEQ ID NO: 15553 - protein, 9 aa, synthetic construct
GLNGVVKVF

SEQ ID NO: 15554 - protein, 9 aa, synthetic construct
GLNGVLHVK

SEQ ID NO: 15555 - protein, 9 aa, synthetic construct
GLNGVIHLK

SEQ ID NO: 15556 - protein, 9 aa, synthetic construct
GLNGVGKLH

SEQ ID NO: 15557 - protein, 9 aa, synthetic construct
GLNGVGKVF

SEQ ID NO: 15558 - protein, 9 aa, synthetic construct
GLNGGVHLF

SEQ ID NO: 15559 - protein, 9 aa, synthetic construct
GLNGGVHVK

SEQ ID NO: 15560 - protein, 9 aa, synthetic construct
GLNGGVHVF

SEQ ID NO: 15561 - protein, 9 aa, synthetic construct
PLQAVAHLH

SEQ ID NO: 15562 - protein, 9 aa, synthetic construct
GLNGGVKLF

SEQ ID NO: 15563 - protein, 9 aa, synthetic construct
GLNGGLHLR

SEQ ID NO: 15564 - protein, 9 aa, synthetic construct
GLNGGLHVH

SEQ ID NO: 15565 - protein, 9 aa, synthetic construct
GLNGGLKLY

SEQ ID NO: 15566 - protein, 9 aa, synthetic construct
GLNGGLKVF

SEQ ID NO: 15567 - protein, 9 aa, synthetic construct
GLNGGAHLF

SEQ ID NO: 15568 - protein, 9 aa, synthetic construct
GLNGGAHVF

SEQ ID NO: 15569 - protein, 9 aa, synthetic construct
GLNGGARVY

SEQ ID NO: 15570 - protein, 9 aa, synthetic construct
GLNGGARVR

SEQ ID NO: 15571 - protein, 9 aa, synthetic construct
GLNGGAKLY

SEQ ID NO: 15572 - protein, 9 aa, synthetic construct
GLNGGAKLR

SEQ ID NO: 15573 - protein, 9 aa, synthetic construct
GLNGGAKVF

SEQ ID NO: 15574 - protein, 9 aa, synthetic construct
GLNGGIHLR

SEQ ID NO: 15575 - protein, 9 aa, synthetic construct
GLNGGIHLH

SEQ ID NO: 15576 - protein, 9 aa, synthetic construct
GLNGGIHLK

SEQ ID NO: 15577 - protein, 9 aa, synthetic construct
GLNGGIHLF

SEQ ID NO: 15578 - protein, 9 aa, synthetic construct
GLNGGIHVY

SEQ ID NO: 15579 - protein, 9 aa, synthetic construct
GLNGGIHVH

SEQ ID NO: 15580 - protein, 9 aa, synthetic construct
GLNGGIHVF

SEQ ID NO: 15581 - protein, 9 aa, synthetic construct
GLNGGIRLR

SEQ ID NO: 15582 - protein, 9 aa, synthetic construct
GLNGGIRLH

SEQ ID NO: 15583 - protein, 9 aa, synthetic construct
GLNGGIRVH

SEQ ID NO: 15584 - protein, 9 aa, synthetic construct
GLNGGIKVR

SEQ ID NO: 15585 - protein, 9 aa, synthetic construct
GLNGGIKVF

SEQ ID NO: 15586 - protein, 9 aa, synthetic construct
GLNGGGHVF

SEQ ID NO: 15587 - protein, 9 aa, synthetic construct
GLNGGGRLH

SEQ ID NO: 15588 - protein, 9 aa, synthetic construct
GLNGGGRLF

SEQ ID NO: 15589 - protein, 9 aa, synthetic construct
GLNGGGKLY

SEQ ID NO: 15590 - protein, 9 aa, synthetic construct
GLNGGGKLH

SEQ ID NO: 15591 - protein, 9 aa, synthetic construct
GLNAAAHLH

SEQ ID NO: 15592 - protein, 9 aa, synthetic construct
GLNAAAKLY

SEQ ID NO: 15593 - protein, 9 aa, synthetic construct
GLNAAIRLR

SEQ ID NO: 15594 - protein, 9 aa, synthetic construct
GLNAAIKVF

SEQ ID NO: 15595 - protein, 9 aa, synthetic construct
GLNAAGRLH

SEQ ID NO: 15596 - protein, 9 aa, synthetic construct
GLNAAGKVF

SEQ ID NO: 15597 - protein, 9 aa, synthetic construct
GLNATAHVY

SEQ ID NO: 15598 - protein, 9 aa, synthetic construct
GLNATAHVH

SEQ ID NO: 15599 - protein, 9 aa, synthetic construct
GLNATAHVK

SEQ ID NO: 15600 - protein, 9 aa, synthetic construct
GLNATARVY

SEQ ID NO: 15601 - protein, 9 aa, synthetic construct
GLNATARVF

SEQ ID NO: 15602 - protein, 9 aa, synthetic construct
PLQAVIRVH

SEQ ID NO: 15603 - protein, 9 aa, synthetic construct
GLNASGHLH

SEQ ID NO: 15604 - protein, 9 aa, synthetic construct
GLNASGHVF

SEQ ID NO: 15605 - protein, 9 aa, synthetic construct
GLNAVVKVF

SEQ ID NO: 15606 - protein, 9 aa, synthetic construct
GLNAGVKLF

SEQ ID NO: 15607 - protein, 9 aa, synthetic construct
GLNAGAHVF

SEQ ID NO: 15608 - protein, 9 aa, synthetic construct
PLQAGVHLY

SEQ ID NO: 15609 - protein, 9 aa, synthetic construct
GLQGAVHLY

SEQ ID NO: 15610 - protein, 9 aa, synthetic construct
GLQGAVHLH

SEQ ID NO: 15611 - protein, 9 aa, synthetic construct
GLQGAVRVF

SEQ ID NO: 15612 - protein, 9 aa, synthetic construct
GLQGAVKLY

SEQ ID NO: 15613 - protein, 9 aa, synthetic construct
GLQGAVKVY

SEQ ID NO: 15614 - protein, 9 aa, synthetic construct
GLQGALHLY

SEQ ID NO: 15615 - protein, 9 aa, synthetic construct
GLQGALHLR

SEQ ID NO: 15616 - protein, 9 aa, synthetic construct
GLQGALHLK

SEQ ID NO: 15617 - protein, 9 aa, synthetic construct
GLQGALHVH

SEQ ID NO: 15618 - protein, 9 aa, synthetic construct
GLQGALHVF

SEQ ID NO: 15619 - protein, 9 aa, synthetic construct
PLQAGVHLF

SEQ ID NO: 15620 - protein, 9 aa, synthetic construct
GLQGALRVY

SEQ ID NO: 15621 - protein, 9 aa, synthetic construct
PLQAGVHVY

SEQ ID NO: 15622 - protein, 9 aa, synthetic construct
GLQGALKVH

SEQ ID NO: 15623 - protein, 9 aa, synthetic construct
GLQGAAHLY

SEQ ID NO: 15624 - protein, 9 aa, synthetic construct
GLQGAAHLK

SEQ ID NO: 15625 - protein, 9 aa, synthetic construct
GLQGAAHVY

SEQ ID NO: 15626 - protein, 9 aa, synthetic construct
GLQGAAHVH

SEQ ID NO: 15627 - protein, 9 aa, synthetic construct
GLQGAAHVK

SEQ ID NO: 15628 - protein, 9 aa, synthetic construct
GLQGAARLH

SEQ ID NO: 15629 - protein, 9 aa, synthetic construct
GLQGAARLF

SEQ ID NO: 15630 - protein, 9 aa, synthetic construct
GLQGAARVY

SEQ ID NO: 15631 - protein, 9 aa, synthetic construct
GLQGAARVH

SEQ ID NO: 15632 - protein, 9 aa, synthetic construct
GLQGAAKLY

SEQ ID NO: 15633 - protein, 9 aa, synthetic construct
GLQGAAKVF

SEQ ID NO: 15634 - protein, 9 aa, synthetic construct
GLQGAIHLH

SEQ ID NO: 15635 - protein, 9 aa, synthetic construct
GLQGAIHLF

SEQ ID NO: 15636 - protein, 9 aa, synthetic construct
GLQGAIHVF

SEQ ID NO: 15637 - protein, 9 aa, synthetic construct
GLQGAIRLY

SEQ ID NO: 15638 - protein, 9 aa, synthetic construct
GLQGAIRVH

SEQ ID NO: 15639 - protein, 9 aa, synthetic construct
GLQGAIKVY

SEQ ID NO: 15640 - protein, 9 aa, synthetic construct
GLQGAIKVF

SEQ ID NO: 15641 - protein, 9 aa, synthetic construct
GLQGAGHLK

SEQ ID NO: 15642 - protein, 9 aa, synthetic construct
GLQGAGHVH

SEQ ID NO: 15643 - protein, 9 aa, synthetic construct
GLQGAGRLH

SEQ ID NO: 15644 - protein, 9 aa, synthetic construct
GLQGAGRLF

SEQ ID NO: 15645 - protein, 9 aa, synthetic construct
GLQGAGKVH

SEQ ID NO: 15646 - protein, 9 aa, synthetic construct
GLQGAGKVF

SEQ ID NO: 15647 - protein, 9 aa, synthetic construct
PLQAGVRVY

SEQ ID NO: 15648 - protein, 9 aa, synthetic construct
GLQGTVHLR

SEQ ID NO: 15649 - protein, 9 aa, synthetic construct
GLQGTVHLH

SEQ ID NO: 15650 - protein, 9 aa, synthetic construct
GLQGTVHLK

SEQ ID NO: 15651 - protein, 9 aa, synthetic construct
GLQGTVHLF

SEQ ID NO: 15652 - protein, 9 aa, synthetic construct
GLQGTVHVH

SEQ ID NO: 15653 - protein, 9 aa, synthetic construct
GLQGTVHVK

SEQ ID NO: 15654 - protein, 9 aa, synthetic construct
GLQGTVHVF

SEQ ID NO: 15655 - protein, 9 aa, synthetic construct
GLQGTVKLY

SEQ ID NO: 15656 - protein, 9 aa, synthetic construct
GLQGTVKLH

SEQ ID NO: 15657 - protein, 9 aa, synthetic construct
GLQGTVKLF

SEQ ID NO: 15658 - protein, 9 aa, synthetic construct
GLQGTVKVY

SEQ ID NO: 15659 - protein, 9 aa, synthetic construct
GLQGTLHVY

SEQ ID NO: 15660 - protein, 9 aa, synthetic construct
PLQAGVRVF

SEQ ID NO: 15661 - protein, 9 aa, synthetic construct
GLQGTLRLF

SEQ ID NO: 15662 - protein, 9 aa, synthetic construct
GLQGTLKLH

SEQ ID NO: 15663 - protein, 9 aa, synthetic construct
GLQGTLKVY

SEQ ID NO: 15664 - protein, 9 aa, synthetic construct
GLQGTAHLY

SEQ ID NO: 15665 - protein, 9 aa, synthetic construct
GLQGTAHLR

SEQ ID NO: 15666 - protein, 9 aa, synthetic construct
GLQGTAHLF

SEQ ID NO: 15667 - protein, 9 aa, synthetic construct
GLQGTAHVY

SEQ ID NO: 15668 - protein, 9 aa, synthetic construct
GLQGTAHVR

SEQ ID NO: 15669 - protein, 9 aa, synthetic construct
GLQGTAHVH

SEQ ID NO: 15670 - protein, 9 aa, synthetic construct
GLQGTARVF

SEQ ID NO: 15671 - protein, 9 aa, synthetic construct
GLQGTAKLY

SEQ ID NO: 15672 - protein, 9 aa, synthetic construct
GLQGTAKLR

SEQ ID NO: 15673 - protein, 9 aa, synthetic construct
GLQGTAKLH

SEQ ID NO: 15674 - protein, 9 aa, synthetic construct
GLQGTAKVY

SEQ ID NO: 15675 - protein, 9 aa, synthetic construct
GLQGTAKVH

SEQ ID NO: 15676 - protein, 9 aa, synthetic construct
GLQGTAKVK

SEQ ID NO: 15677 - protein, 9 aa, synthetic construct
GLQGTAKVF

SEQ ID NO: 15678 - protein, 9 aa, synthetic construct
PLQAGVKLF

SEQ ID NO: 15679 - protein, 9 aa, synthetic construct
GLQGTIHVK

SEQ ID NO: 15680 - protein, 9 aa, synthetic construct
GLQGTIKVY

SEQ ID NO: 15681 - protein, 9 aa, synthetic construct
PLQAGVKVH

SEQ ID NO: 15682 - protein, 9 aa, synthetic construct
GLQGTGHLH

SEQ ID NO: 15683 - protein, 9 aa, synthetic construct
GLQGTGHLK

SEQ ID NO: 15684 - protein, 9 aa, synthetic construct
GLQGTGHLF

SEQ ID NO: 15685 - protein, 9 aa, synthetic construct
GLQGTGHVH

SEQ ID NO: 15686 - protein, 9 aa, synthetic construct
GLQGTGRLH

SEQ ID NO: 15687 - protein, 9 aa, synthetic construct
GLQGTGRVH

SEQ ID NO: 15688 - protein, 9 aa, synthetic construct
GLQGTGKLY

SEQ ID NO: 15689 - protein, 9 aa, synthetic construct
GLQGTGKLH

SEQ ID NO: 15690 - protein, 9 aa, synthetic construct
GLQGTGKLF

SEQ ID NO: 15691 - protein, 9 aa, synthetic construct
GLQGTGKVY

SEQ ID NO: 15692 - protein, 9 aa, synthetic construct
GLQGTGKVK

SEQ ID NO: 15693 - protein, 9 aa, synthetic construct
GLQGTGKVF

SEQ ID NO: 15694 - protein, 9 aa, synthetic construct
GLQGSVHLY

SEQ ID NO: 15695 - protein, 9 aa, synthetic construct
GLQGSVHLF

SEQ ID NO: 15696 - protein, 9 aa, synthetic construct
GLQGSVHVY

SEQ ID NO: 15697 - protein, 9 aa, synthetic construct
GLQGSVHVF

SEQ ID NO: 15698 - protein, 9 aa, synthetic construct
GLQGSVRVH

SEQ ID NO: 15699 - protein, 9 aa, synthetic construct
GLQGSVKLY

SEQ ID NO: 15700 - protein, 9 aa, synthetic construct
GLQGSVKLF

SEQ ID NO: 15701 - protein, 9 aa, synthetic construct
GLQGSVKVF

SEQ ID NO: 15702 - protein, 9 aa, synthetic construct
GLQGSARVY

SEQ ID NO: 15703 - protein, 9 aa, synthetic construct
GLQGSAKVF

SEQ ID NO: 15704 - protein, 9 aa, synthetic construct
GLQGSIRVY

SEQ ID NO: 15705 - protein, 9 aa, synthetic construct
GLQGSIKVR

SEQ ID NO: 15706 - protein, 9 aa, synthetic construct
GLQGVVHVH

SEQ ID NO: 15707 - protein, 9 aa, synthetic construct
GLQGVVRVH

SEQ ID NO: 15708 - protein, 9 aa, synthetic construct
GLQGVVKLF

SEQ ID NO: 15709 - protein, 9 aa, synthetic construct
PLQAGLKLY

SEQ ID NO: 15710 - protein, 9 aa, synthetic construct
GLQGVLKLH

SEQ ID NO: 15711 - protein, 9 aa, synthetic construct
GLQGVAHVH

SEQ ID NO: 15712 - protein, 9 aa, synthetic construct
GLQGVIRLY

SEQ ID NO: 15713 - protein, 9 aa, synthetic construct
GLQGVIRVF

SEQ ID NO: 15714 - protein, 9 aa, synthetic construct
GLQGVGHVY

SEQ ID NO: 15715 - protein, 9 aa, synthetic construct
GLQGVGHVR

SEQ ID NO: 15716 - protein, 9 aa, synthetic construct
PLQAGLKVF

SEQ ID NO: 15717 - protein, 9 aa, synthetic construct
PLQAGAHLY

SEQ ID NO: 15718 - protein, 9 aa, synthetic construct
GLQGGVHLY

SEQ ID NO: 15719 - protein, 9 aa, synthetic construct
GLQGGVHVF

SEQ ID NO: 15720 - protein, 9 aa, synthetic construct
PLQAGAHLR

SEQ ID NO: 15721 - protein, 9 aa, synthetic construct
PLQAGAHLH

SEQ ID NO: 15722 - protein, 9 aa, synthetic construct
GLQGGVKVF

SEQ ID NO: 15723 - protein, 9 aa, synthetic construct
PLQAGAHLK

SEQ ID NO: 15724 - protein, 9 aa, synthetic construct
PLQAGAHLF

SEQ ID NO: 15725 - protein, 9 aa, synthetic construct
PLQAGAHVY

SEQ ID NO: 15726 - protein, 9 aa, synthetic construct
GLQGGLKVF

SEQ ID NO: 15727 - protein, 9 aa, synthetic construct
PLQAGAHVF

SEQ ID NO: 15728 - protein, 9 aa, synthetic construct
GLQGGIHLY

SEQ ID NO: 15729 - protein, 9 aa, synthetic construct
GLQGGIHLH

SEQ ID NO: 15730 - protein, 9 aa, synthetic construct
GLQGGIHLK

SEQ ID NO: 15731 - protein, 9 aa, synthetic construct
GLQGGIKLH

SEQ ID NO: 15732 - protein, 9 aa, synthetic construct
GLQGGGHLK

SEQ ID NO: 15733 - protein, 9 aa, synthetic construct
GLQGGGKLH

SEQ ID NO: 15734 - protein, 9 aa, synthetic construct
PLQAGARVR

SEQ ID NO: 15735 - protein, 9 aa, synthetic construct
GLQAAVRVF

SEQ ID NO: 15736 - protein, 9 aa, synthetic construct
PLQAGARVH

SEQ ID NO: 15737 - protein, 9 aa, synthetic construct
GLQAALRLY

SEQ ID NO: 15738 - protein, 9 aa, synthetic construct
PLQAGAKLY

SEQ ID NO: 15739 - protein, 9 aa, synthetic construct
GLQAALKVY

SEQ ID NO: 15740 - protein, 9 aa, synthetic construct
PLQAGAKLH

SEQ ID NO: 15741 - protein, 9 aa, synthetic construct
PLQAGAKVY

SEQ ID NO: 15742 - protein, 9 aa, synthetic construct
GLQAAIRVH

SEQ ID NO: 15743 - protein, 9 aa, synthetic construct
GLQAAGHLK

SEQ ID NO: 15744 - protein, 9 aa, synthetic construct
PLQAGAKVF

SEQ ID NO: 15745 - protein, 9 aa, synthetic construct
PLQAGIHLY

SEQ ID NO: 15746 - protein, 9 aa, synthetic construct
GLQATVHLY

SEQ ID NO: 15747 - protein, 9 aa, synthetic construct
PLQAGIHLK

SEQ ID NO: 15748 - protein, 9 aa, synthetic construct
GLQATAHLY

SEQ ID NO: 15749 - protein, 9 aa, synthetic construct
GLQATIHLK

SEQ ID NO: 15750 - protein, 9 aa, synthetic construct
PLNGTGKVY

SEQ ID NO: 15751 - protein, 9 aa, synthetic construct
PLQAGIRLH

SEQ ID NO: 15752 - protein, 9 aa, synthetic construct
GLQATGHVH

SEQ ID NO: 15753 - protein, 9 aa, synthetic construct
GLQASVHVY

SEQ ID NO: 15754 - protein, 9 aa, synthetic construct
PLQAGIRVH

SEQ ID NO: 15755 - protein, 9 aa, synthetic construct
PLQAGIKLR

SEQ ID NO: 15756 - protein, 9 aa, synthetic construct
GLQASIHVY

SEQ ID NO: 15757 - protein, 9 aa, synthetic construct
PLQAGIKVH

SEQ ID NO: 15758 - protein, 9 aa, synthetic construct
GLQASGHLH

SEQ ID NO: 15759 - protein, 9 aa, synthetic construct
GLQASGRVK

SEQ ID NO: 15760 - protein, 9 aa, synthetic construct
PLQAGGHLY

SEQ ID NO: 15761 - protein, 9 aa, synthetic construct
PLQAGGHLR

SEQ ID NO: 15762 - protein, 9 aa, synthetic construct
PLQAGGHLH

SEQ ID NO: 15763 - protein, 9 aa, synthetic construct
PLQAGGHLF

SEQ ID NO: 15764 - protein, 9 aa, synthetic construct
PLQAGGHVY

SEQ ID NO: 15765 - protein, 9 aa, synthetic construct
PLQAGGHVR

SEQ ID NO: 15766 - protein, 9 aa, synthetic construct
PLQAGGHVH

SEQ ID NO: 15767 - protein, 9 aa, synthetic construct
PLQAGGHVF

SEQ ID NO: 15768 - protein, 9 aa, synthetic construct
PLQAGGRLF

SEQ ID NO: 15769 - protein, 9 aa, synthetic construct
PLQAGGRVY

SEQ ID NO: 15770 - protein, 9 aa, synthetic construct
PLQAGGRVR

SEQ ID NO: 15771 - protein, 9 aa, synthetic construct
PLQAGGRVH

SEQ ID NO: 15772 - protein, 9 aa, synthetic construct
GLQAGVKVY

SEQ ID NO: 15773 - protein, 9 aa, synthetic construct
PLQAGGRVF

SEQ ID NO: 15774 - protein, 9 aa, synthetic construct
PLQAGGKLR

SEQ ID NO: 15775 - protein, 9 aa, synthetic construct
PLQAGGKLF

SEQ ID NO: 15776 - protein, 9 aa, synthetic construct
GLQAGGHLR

SEQ ID NO: 15777 - protein, 9 aa, synthetic construct
GLQAGGHLH

SEQ ID NO: 15778 - protein, 9 aa, synthetic construct
PLQAGGKVF

SEQ ID NO: 15779 - protein, 9 aa, synthetic construct
GLPGAVHLY

SEQ ID NO: 15780 - protein, 9 aa, synthetic construct
GLPGAVHLH

SEQ ID NO: 15781 - protein, 9 aa, synthetic construct
PLPGAVHLH

SEQ ID NO: 15782 - protein, 9 aa, synthetic construct
GLPGALHLR

SEQ ID NO: 15783 - protein, 9 aa, synthetic construct
GLPGALKVY

SEQ ID NO: 15784 - protein, 9 aa, synthetic construct
GLPGAAHLY

SEQ ID NO: 15785 - protein, 9 aa, synthetic construct
GLPGAAHLF

SEQ ID NO: 15786 - protein, 9 aa, synthetic construct
GLPGAAHVY

SEQ ID NO: 15787 - protein, 9 aa, synthetic construct
GLPGAAHVH

SEQ ID NO: 15788 - protein, 9 aa, synthetic construct
GLPGAAHVK

SEQ ID NO: 15789 - protein, 9 aa, synthetic construct
GLPGAARLH

SEQ ID NO: 15790 - protein, 9 aa, synthetic construct
GLPGAAKLY

SEQ ID NO: 15791 - protein, 9 aa, synthetic construct
GLPGAAKLH

SEQ ID NO: 15792 - protein, 9 aa, synthetic construct
GLPGAAKVY

SEQ ID NO: 15793 - protein, 9 aa, synthetic construct
GLPGAAKVH

SEQ ID NO: 15794 - protein, 9 aa, synthetic construct
GLPGAAKVF

SEQ ID NO: 15795 - protein, 9 aa, synthetic construct
GLPGAIHLH

SEQ ID NO: 15796 - protein, 9 aa, synthetic construct
GLPGAIHLF

SEQ ID NO: 15797 - protein, 9 aa, synthetic construct
GLPGAIHVK

SEQ ID NO: 15798 - protein, 9 aa, synthetic construct
GLPGAIHVF

SEQ ID NO: 15799 - protein, 9 aa, synthetic construct
GLPGAIRLY

SEQ ID NO: 15800 - protein, 9 aa, synthetic construct
GLPGAIKVY

SEQ ID NO: 15801 - protein, 9 aa, synthetic construct
GLPGAGHLR

SEQ ID NO: 15802 - protein, 9 aa, synthetic construct
GLPGAGHVY

SEQ ID NO: 15803 - protein, 9 aa, synthetic construct
GLPGAGHVR

SEQ ID NO: 15804 - protein, 9 aa, synthetic construct
GLPGAGHVH

SEQ ID NO: 15805 - protein, 9 aa, synthetic construct
GLPGAGHVK

SEQ ID NO: 15806 - protein, 9 aa, synthetic construct
GLPGAGRLH

SEQ ID NO: 15807 - protein, 9 aa, synthetic construct
GLPGAGRLF

SEQ ID NO: 15808 - protein, 9 aa, synthetic construct
GLPGAGKLH

SEQ ID NO: 15809 - protein, 9 aa, synthetic construct
GLPGAGKVY

SEQ ID NO: 15810 - protein, 9 aa, synthetic construct
GLPGAGKVH

SEQ ID NO: 15811 - protein, 9 aa, synthetic construct
GLPGTVHLH

SEQ ID NO: 15812 - protein, 9 aa, synthetic construct
GLPGTVRLY

SEQ ID NO: 15813 - protein, 9 aa, synthetic construct
GLPGTVKLY

SEQ ID NO: 15814 - protein, 9 aa, synthetic construct
GLPGTVKLF

SEQ ID NO: 15815 - protein, 9 aa, synthetic construct
GLPGTLHLK

SEQ ID NO: 15816 - protein, 9 aa, synthetic construct
GLPGTLKLH

SEQ ID NO: 15817 - protein, 9 aa, synthetic construct
GLPGTAHLY

SEQ ID NO: 15818 - protein, 9 aa, synthetic construct
GLPGTAHLF

SEQ ID NO: 15819 - protein, 9 aa, synthetic construct
GLPGTAHVY

SEQ ID NO: 15820 - protein, 9 aa, synthetic construct
GLPGTAHVH

SEQ ID NO: 15821 - protein, 9 aa, synthetic construct
GLPGTAHVK

SEQ ID NO: 15822 - protein, 9 aa, synthetic construct
GLPGTARVF

SEQ ID NO: 15823 - protein, 9 aa, synthetic construct
GLPGTAKVY

SEQ ID NO: 15824 - protein, 9 aa, synthetic construct
GLPGTAKVK

SEQ ID NO: 15825 - protein, 9 aa, synthetic construct
PLPGAVKLF

SEQ ID NO: 15826 - protein, 9 aa, synthetic construct
GLPGTIHLY

SEQ ID NO: 15827 - protein, 9 aa, synthetic construct
GLPGTIHLR

SEQ ID NO: 15828 - protein, 9 aa, synthetic construct
GLPGTIHLK

SEQ ID NO: 15829 - protein, 9 aa, synthetic construct
GLPGTIHLF

SEQ ID NO: 15830 - protein, 9 aa, synthetic construct
GLPGTIHVY

SEQ ID NO: 15831 - protein, 9 aa, synthetic construct
PLPGAVKVY

SEQ ID NO: 15832 - protein, 9 aa, synthetic construct
GLPGTIRLY

SEQ ID NO: 15833 - protein, 9 aa, synthetic construct
GLPGTIKVY

SEQ ID NO: 15834 - protein, 9 aa, synthetic construct
GLPGTGRLF

SEQ ID NO: 15835 - protein, 9 aa, synthetic construct
GLPGTGKVY

SEQ ID NO: 15836 - protein, 9 aa, synthetic construct
GLPGTGKVH

SEQ ID NO: 15837 - protein, 9 aa, synthetic construct
GLPGSVHVK

SEQ ID NO: 15838 - protein, 9 aa, synthetic construct
GLPGSAHLF

SEQ ID NO: 15839 - protein, 9 aa, synthetic construct
GLPGSAHVY

SEQ ID NO: 15840 - protein, 9 aa, synthetic construct
GLPGSAHVR

SEQ ID NO: 15841 - protein, 9 aa, synthetic construct
GLPGSARVY

SEQ ID NO: 15842 - protein, 9 aa, synthetic construct
GLPGSARVH

SEQ ID NO: 15843 - protein, 9 aa, synthetic construct
GLPGSIHLH

SEQ ID NO: 15844 - protein, 9 aa, synthetic construct
GLPGSIHVY

SEQ ID NO: 15845 - protein, 9 aa, synthetic construct
GLPGVVHVY

SEQ ID NO: 15846 - protein, 9 aa, synthetic construct
GLPGVVHVH

SEQ ID NO: 15847 - protein, 9 aa, synthetic construct
GLPGVAHVH

SEQ ID NO: 15848 - protein, 9 aa, synthetic construct
GLPGVIHLK

SEQ ID NO: 15849 - protein, 9 aa, synthetic construct
GLPGVGHLH

SEQ ID NO: 15850 - protein, 9 aa, synthetic construct
GLPGVGHVH

SEQ ID NO: 15851 - protein, 9 aa, synthetic construct
GLPGVGRVH

SEQ ID NO: 15852 - protein, 9 aa, synthetic construct
PLNGSVHVR

SEQ ID NO: 15853 - protein, 9 aa, synthetic construct
PLPGAAHLY

SEQ ID NO: 15854 - protein, 9 aa, synthetic construct
PLPGAAHLR

SEQ ID NO: 15855 - protein, 9 aa, synthetic construct
PLPGAAHLH

SEQ ID NO: 15856 - protein, 9 aa, synthetic construct
GLPGGLHVH

SEQ ID NO: 15857 - protein, 9 aa, synthetic construct
GLPGGLKVF

SEQ ID NO: 15858 - protein, 9 aa, synthetic construct
PLPGAAHVR

SEQ ID NO: 15859 - protein, 9 aa, synthetic construct
GLPGGAHLH

SEQ ID NO: 15860 - protein, 9 aa, synthetic construct
PLPGAAHVH

SEQ ID NO: 15861 - protein, 9 aa, synthetic construct
GLPGGARVR

SEQ ID NO: 15862 - protein, 9 aa, synthetic construct
PLPGAAHVK

SEQ ID NO: 15863 - protein, 9 aa, synthetic construct
GLPGGAKLR

SEQ ID NO: 15864 - protein, 9 aa, synthetic construct
PLNGSVHVH

SEQ ID NO: 15865 - protein, 9 aa, synthetic construct
PLPGAARLH

SEQ ID NO: 15866 - protein, 9 aa, synthetic construct
GLPGGGRVY

SEQ ID NO: 15867 - protein, 9 aa, synthetic construct
PLPGAARLF

SEQ ID NO: 15868 - protein, 9 aa, synthetic construct
GLPGGGKLH

SEQ ID NO: 15869 - protein, 9 aa, synthetic construct
PLPGAARVY

SEQ ID NO: 15870 - protein, 9 aa, synthetic construct
GLPAAVHLH

SEQ ID NO: 15871 - protein, 9 aa, synthetic construct
GLPAAVKVY

SEQ ID NO: 15872 - protein, 9 aa, synthetic construct
PLPGAAKLY

SEQ ID NO: 15873 - protein, 9 aa, synthetic construct
PLPGAAKLR

SEQ ID NO: 15874 - protein, 9 aa, synthetic construct
GLPAAAHLH

SEQ ID NO: 15875 - protein, 9 aa, synthetic construct
GLPAAARLH

SEQ ID NO: 15876 - protein, 9 aa, synthetic construct
GLPAAAKLY

SEQ ID NO: 15877 - protein, 9 aa, synthetic construct
GLPAAAKLH

SEQ ID NO: 15878 - protein, 9 aa, synthetic construct
GLPAAIHLF

SEQ ID NO: 15879 - protein, 9 aa, synthetic construct
GLPAAIHVK

SEQ ID NO: 15880 - protein, 9 aa, synthetic construct
PLPGAAKVY

SEQ ID NO: 15881 - protein, 9 aa, synthetic construct
GLPAAIKVY

SEQ ID NO: 15882 - protein, 9 aa, synthetic construct
PLPGAAKVH

SEQ ID NO: 15883 - protein, 9 aa, synthetic construct
GLPAAGHLK

SEQ ID NO: 15884 - protein, 9 aa, synthetic construct
GLPAAGHLF

SEQ ID NO: 15885 - protein, 9 aa, synthetic construct
GLPAAGRLH

SEQ ID NO: 15886 - protein, 9 aa, synthetic construct
GLPAAGKVF

SEQ ID NO: 15887 - protein, 9 aa, synthetic construct
GLPATVHLY

SEQ ID NO: 15888 - protein, 9 aa, synthetic construct
PLPGAIHLH

SEQ ID NO: 15889 - protein, 9 aa, synthetic construct
PLPGAIHLK

SEQ ID NO: 15890 - protein, 9 aa, synthetic construct
PLPGAIHLF

SEQ ID NO: 15891 - protein, 9 aa, synthetic construct
GLPATLKLK

SEQ ID NO: 15892 - protein, 9 aa, synthetic construct
GLPATAHLY

SEQ ID NO: 15893 - protein, 9 aa, synthetic construct
GLPATAHLR

SEQ ID NO: 15894 - protein, 9 aa, synthetic construct
GLPATAHLH

SEQ ID NO: 15895 - protein, 9 aa, synthetic construct
GLPATAHLF

SEQ ID NO: 15896 - protein, 9 aa, synthetic construct
GLPATAHVY

SEQ ID NO: 15897 - protein, 9 aa, synthetic construct
GLPATAHVH

SEQ ID NO: 15898 - protein, 9 aa, synthetic construct
GLPATARVF

SEQ ID NO: 15899 - protein, 9 aa, synthetic construct
PLPGAIHVF

SEQ ID NO: 15900 - protein, 9 aa, synthetic construct
GLPATIHLR

SEQ ID NO: 15901 - protein, 9 aa, synthetic construct
GLPATIHLH

SEQ ID NO: 15902 - protein, 9 aa, synthetic construct
GLPATIHLK

SEQ ID NO: 15903 - protein, 9 aa, synthetic construct
PLPGAIRLY

SEQ ID NO: 15904 - protein, 9 aa, synthetic construct
GLPATGHLY

SEQ ID NO: 15905 - protein, 9 aa, synthetic construct
GLPATGHLH

SEQ ID NO: 15906 - protein, 9 aa, synthetic construct
GLPATGHLF

SEQ ID NO: 15907 - protein, 9 aa, synthetic construct
GLPATGKVY

SEQ ID NO: 15908 - protein, 9 aa, synthetic construct
GLPASVHVY

SEQ ID NO: 15909 - protein, 9 aa, synthetic construct
GLPASVHVK

SEQ ID NO: 15910 - protein, 9 aa, synthetic construct
GLPASVKVF

SEQ ID NO: 15911 - protein, 9 aa, synthetic construct
GLPASLHLY

SEQ ID NO: 15912 - protein, 9 aa, synthetic construct
GLPASAHLY

SEQ ID NO: 15913 - protein, 9 aa, synthetic construct
GLPASAHLR

SEQ ID NO: 15914 - protein, 9 aa, synthetic construct
GLPASAHLK

SEQ ID NO: 15915 - protein, 9 aa, synthetic construct
GLPASAHVY

SEQ ID NO: 15916 - protein, 9 aa, synthetic construct
GLPASAHVR

SEQ ID NO: 15917 - protein, 9 aa, synthetic construct
GLPASAHVF

SEQ ID NO: 15918 - protein, 9 aa, synthetic construct
GLPASARVY

SEQ ID NO: 15919 - protein, 9 aa, synthetic construct
GLPASARVH

SEQ ID NO: 15920 - protein, 9 aa, synthetic construct
GLPASARVF

SEQ ID NO: 15921 - protein, 9 aa, synthetic construct
GLPASAKLR

SEQ ID NO: 15922 - protein, 9 aa, synthetic construct
GLPASAKVY

SEQ ID NO: 15923 - protein, 9 aa, synthetic construct
GLPASAKVF

SEQ ID NO: 15924 - protein, 9 aa, synthetic construct
PLPGAIKVY

SEQ ID NO: 15925 - protein, 9 aa, synthetic construct
GLPASGHLR

SEQ ID NO: 15926 - protein, 9 aa, synthetic construct
GLPASGHLH

SEQ ID NO: 15927 - protein, 9 aa, synthetic construct
GLPASGHVF

SEQ ID NO: 15928 - protein, 9 aa, synthetic construct
GLPASGKVY

SEQ ID NO: 15929 - protein, 9 aa, synthetic construct
PLPGAGHLY

SEQ ID NO: 15930 - protein, 9 aa, synthetic construct
PLPGAGHLR

SEQ ID NO: 15931 - protein, 9 aa, synthetic construct
GLPAVVRVH

SEQ ID NO: 15932 - protein, 9 aa, synthetic construct
PLPGAGHLH

SEQ ID NO: 15933 - protein, 9 aa, synthetic construct
PLPGAGHLK

SEQ ID NO: 15934 - protein, 9 aa, synthetic construct
PLPGAGHVK

SEQ ID NO: 15935 - protein, 9 aa, synthetic construct
GLPAVAKLF

SEQ ID NO: 15936 - protein, 9 aa, synthetic construct
GLPAVIHVK

SEQ ID NO: 15937 - protein, 9 aa, synthetic construct
PLPGAGRLY

SEQ ID NO: 15938 - protein, 9 aa, synthetic construct
PLPGAGRLR

SEQ ID NO: 15939 - protein, 9 aa, synthetic construct
GLPAVGRVH

SEQ ID NO: 15940 - protein, 9 aa, synthetic construct
PLPGAGRVY

SEQ ID NO: 15941 - protein, 9 aa, synthetic construct
PLPGAGRVH

SEQ ID NO: 15942 - protein, 9 aa, synthetic construct
GLPAGAHLF

SEQ ID NO: 15943 - protein, 9 aa, synthetic construct
GLPAGARVR

SEQ ID NO: 15944 - protein, 9 aa, synthetic construct
GLPAGAKLY

SEQ ID NO: 15945 - protein, 9 aa, synthetic construct
GLPAGAKLR

SEQ ID NO: 15946 - protein, 9 aa, synthetic construct
GLPAGAKLH

SEQ ID NO: 15947 - protein, 9 aa, synthetic construct
GLPAGAKLK

SEQ ID NO: 15948 - protein, 9 aa, synthetic construct
PLNGSVRVY

SEQ ID NO: 15949 - protein, 9 aa, synthetic construct
GTNGAVHVR

SEQ ID NO: 15950 - protein, 9 aa, synthetic construct
GTNGALHLR

SEQ ID NO: 15951 - protein, 9 aa, synthetic construct
GTNGALRLY

SEQ ID NO: 15952 - protein, 9 aa, synthetic construct
GTNGAAHVY

SEQ ID NO: 15953 - protein, 9 aa, synthetic construct
GTNGAAHVH

SEQ ID NO: 15954 - protein, 9 aa, synthetic construct
GTNGAARVH

SEQ ID NO: 15955 - protein, 9 aa, synthetic construct
GTNGAAKLY

SEQ ID NO: 15956 - protein, 9 aa, synthetic construct
GTNGAAKLR

SEQ ID NO: 15957 - protein, 9 aa, synthetic construct
GTNGAAKLH

SEQ ID NO: 15958 - protein, 9 aa, synthetic construct
GTNGAAKVY

SEQ ID NO: 15959 - protein, 9 aa, synthetic construct
GTNGAAKVH

SEQ ID NO: 15960 - protein, 9 aa, synthetic construct
GTNGAAKVF

SEQ ID NO: 15961 - protein, 9 aa, synthetic construct
GTNGAIHVH

SEQ ID NO: 15962 - protein, 9 aa, synthetic construct
GTNGAIHVF

SEQ ID NO: 15963 - protein, 9 aa, synthetic construct
PLPGTVRLY

SEQ ID NO: 15964 - protein, 9 aa, synthetic construct
GTNGAIRLY

SEQ ID NO: 15965 - protein, 9 aa, synthetic construct
GTNGAIRVY

SEQ ID NO: 15966 - protein, 9 aa, synthetic construct
GTNGAIRVF

SEQ ID NO: 15967 - protein, 9 aa, synthetic construct
GTNGAGRLF

SEQ ID NO: 15968 - protein, 9 aa, synthetic construct
GTNGAGRVF

SEQ ID NO: 15969 - protein, 9 aa, synthetic construct
GTNGAGKLY

SEQ ID NO: 15970 - protein, 9 aa, synthetic construct
GTNGTVHLH

SEQ ID NO: 15971 - protein, 9 aa, synthetic construct
GTNGTVHLK

SEQ ID NO: 15972 - protein, 9 aa, synthetic construct
GTNGTVHVH

SEQ ID NO: 15973 - protein, 9 aa, synthetic construct
GTNGTVKLY

SEQ ID NO: 15974 - protein, 9 aa, synthetic construct
GTNGTVKLF

SEQ ID NO: 15975 - protein, 9 aa, synthetic construct
GTNGTLHLK

SEQ ID NO: 15976 - protein, 9 aa, synthetic construct
GTNGTLKLH

SEQ ID NO: 15977 - protein, 9 aa, synthetic construct
GTNGTLKVR

SEQ ID NO: 15978 - protein, 9 aa, synthetic construct
GTNGTAHLY

SEQ ID NO: 15979 - protein, 9 aa, synthetic construct
GTNGTAHLH

SEQ ID NO: 15980 - protein, 9 aa, synthetic construct
GTNGTAHVK

SEQ ID NO: 15981 - protein, 9 aa, synthetic construct
GTNGTAHVF

SEQ ID NO: 15982 - protein, 9 aa, synthetic construct
GTNGTARLY

SEQ ID NO: 15983 - protein, 9 aa, synthetic construct
GTNGTARLF

SEQ ID NO: 15984 - protein, 9 aa, synthetic construct
GTNGTARVY

SEQ ID NO: 15985 - protein, 9 aa, synthetic construct
GTNGTARVF

SEQ ID NO: 15986 - protein, 9 aa, synthetic construct
GTNGTAKVY

SEQ ID NO: 15987 - protein, 9 aa, synthetic construct
GTNGTAKVK

SEQ ID NO: 15988 - protein, 9 aa, synthetic construct
GTNGTAKVF

SEQ ID NO: 15989 - protein, 9 aa, synthetic construct
PLPGTVKLF

SEQ ID NO: 15990 - protein, 9 aa, synthetic construct
GTNGTIHLH

SEQ ID NO: 15991 - protein, 9 aa, synthetic construct
GTNGTIHVF

SEQ ID NO: 15992 - protein, 9 aa, synthetic construct
PLPGTVKVY

SEQ ID NO: 15993 - protein, 9 aa, synthetic construct
GTNGTIRVF

SEQ ID NO: 15994 - protein, 9 aa, synthetic construct
GTNGTIKLR

SEQ ID NO: 15995 - protein, 9 aa, synthetic construct
GTNGTIKVY

SEQ ID NO: 15996 - protein, 9 aa, synthetic construct
GTNGTGHLH

SEQ ID NO: 15997 - protein, 9 aa, synthetic construct
GTNGTGKVH

SEQ ID NO: 15998 - protein, 9 aa, synthetic construct
GTNGSVHLH

SEQ ID NO: 15999 - protein, 9 aa, synthetic construct
GTNGSVHVH

SEQ ID NO: 16000 - protein, 9 aa, synthetic construct
GTNGSVHVF

SEQ ID NO: 16001 - protein, 9 aa, synthetic construct
GTNGSVKLY

SEQ ID NO: 16002 - protein, 9 aa, synthetic construct
GTNGSVKVF

SEQ ID NO: 16003 - protein, 9 aa, synthetic construct
PLPGTLHLK

SEQ ID NO: 16004 - protein, 9 aa, synthetic construct
GTNGSLHLY

SEQ ID NO: 16005 - protein, 9 aa, synthetic construct
GTNGSAHLY

SEQ ID NO: 16006 - protein, 9 aa, synthetic construct
GTNGSAHLR

SEQ ID NO: 16007 - protein, 9 aa, synthetic construct
GTNGSAHVY

SEQ ID NO: 16008 - protein, 9 aa, synthetic construct
GTNGSAHVK

SEQ ID NO: 16009 - protein, 9 aa, synthetic construct
GTNGSARLY

SEQ ID NO: 16010 - protein, 9 aa, synthetic construct
GTNGSARLH

SEQ ID NO: 16011 - protein, 9 aa, synthetic construct
GTNGSARVH

SEQ ID NO: 16012 - protein, 9 aa, synthetic construct
GTNGSARVF

SEQ ID NO: 16013 - protein, 9 aa, synthetic construct
GTNGSAKLY

SEQ ID NO: 16014 - protein, 9 aa, synthetic construct
GTNGSAKLR

SEQ ID NO: 16015 - protein, 9 aa, synthetic construct
GTNGSAKLF

SEQ ID NO: 16016 - protein, 9 aa, synthetic construct
GTNGSAKVY

SEQ ID NO: 16017 - protein, 9 aa, synthetic construct
GTNGSAKVR

SEQ ID NO: 16018 - protein, 9 aa, synthetic construct
GTNGSAKVK

SEQ ID NO: 16019 - protein, 9 aa, synthetic construct
GTNGSIHLH

SEQ ID NO: 16020 - protein, 9 aa, synthetic construct
GTNGSIHVK

SEQ ID NO: 16021 - protein, 9 aa, synthetic construct
GTNGSIKVY

SEQ ID NO: 16022 - protein, 9 aa, synthetic construct
GTNGSIKVR

SEQ ID NO: 16023 - protein, 9 aa, synthetic construct
GTNGSGHLR

SEQ ID NO: 16024 - protein, 9 aa, synthetic construct
GTNGSGHLH

SEQ ID NO: 16025 - protein, 9 aa, synthetic construct
GTNGSGHVH

SEQ ID NO: 16026 - protein, 9 aa, synthetic construct
GTNGSGHVF

SEQ ID NO: 16027 - protein, 9 aa, synthetic construct
GTNGSGRVY

SEQ ID NO: 16028 - protein, 9 aa, synthetic construct
GTNGSGKLY

SEQ ID NO: 16029 - protein, 9 aa, synthetic construct
GTNGSGKLH

SEQ ID NO: 16030 - protein, 9 aa, synthetic construct
GTNGSGKLF

SEQ ID NO: 16031 - protein, 9 aa, synthetic construct
GTNGSGKVF

SEQ ID NO: 16032 - protein, 9 aa, synthetic construct
GTNGVVHVY

SEQ ID NO: 16033 - protein, 9 aa, synthetic construct
GTNGVLHVK

SEQ ID NO: 16034 - protein, 9 aa, synthetic construct
PLNGALHLH

SEQ ID NO: 16035 - protein, 9 aa, synthetic construct
GTNGVLKVH

SEQ ID NO: 16036 - protein, 9 aa, synthetic construct
PLPGTLKLH

SEQ ID NO: 16037 - protein, 9 aa, synthetic construct
PLPGTLKLK

SEQ ID NO: 16038 - protein, 9 aa, synthetic construct
PLPGTAHLY

SEQ ID NO: 16039 - protein, 9 aa, synthetic construct
GTNGGVHLF

SEQ ID NO: 16040 - protein, 9 aa, synthetic construct
PLPGTAHLR

SEQ ID NO: 16041 - protein, 9 aa, synthetic construct
PLPGTAHLH

SEQ ID NO: 16042 - protein, 9 aa, synthetic construct
GTNGGVKVF

SEQ ID NO: 16043 - protein, 9 aa, synthetic construct
PLPGTAHLK

SEQ ID NO: 16044 - protein, 9 aa, synthetic construct
GTNGGLHVH

SEQ ID NO: 16045 - protein, 9 aa, synthetic construct
PLPGTAHLF

SEQ ID NO: 16046 - protein, 9 aa, synthetic construct
GTNGGLKLY

SEQ ID NO: 16047 - protein, 9 aa, synthetic construct
GTNGGLKVF

SEQ ID NO: 16048 - protein, 9 aa, synthetic construct
GTNGGAHLY

SEQ ID NO: 16049 - protein, 9 aa, synthetic construct
GTNGGAHLR

SEQ ID NO: 16050 - protein, 9 aa, synthetic construct
GTNGGAHVY

SEQ ID NO: 16051 - protein, 9 aa, synthetic construct
GTNGGAHVR

SEQ ID NO: 16052 - protein, 9 aa, synthetic construct
GTNGGAKLR

SEQ ID NO: 16053 - protein, 9 aa, synthetic construct
GTNGGAKVH

SEQ ID NO: 16054 - protein, 9 aa, synthetic construct
GTNGGAKVK

SEQ ID NO: 16055 - protein, 9 aa, synthetic construct
PLPGTAHVF

SEQ ID NO: 16056 - protein, 9 aa, synthetic construct
GTNGGIHVY

SEQ ID NO: 16057 - protein, 9 aa, synthetic construct
GTNGGIRLY

SEQ ID NO: 16058 - protein, 9 aa, synthetic construct
GTNGGIRLH

SEQ ID NO: 16059 - protein, 9 aa, synthetic construct
GTNGGIRVH

SEQ ID NO: 16060 - protein, 9 aa, synthetic construct
PLPGTARLH

SEQ ID NO: 16061 - protein, 9 aa, synthetic construct
GTNGGGHLR

SEQ ID NO: 16062 - protein, 9 aa, synthetic construct
GTNGGGRLH

SEQ ID NO: 16063 - protein, 9 aa, synthetic construct
GTNGGGKLH

SEQ ID NO: 16064 - protein, 9 aa, synthetic construct
PLPGTARVY

SEQ ID NO: 16065 - protein, 9 aa, synthetic construct
GTNAAVHLH

SEQ ID NO: 16066 - protein, 9 aa, synthetic construct
GTNAAVHLK

SEQ ID NO: 16067 - protein, 9 aa, synthetic construct
PLPGTARVF

SEQ ID NO: 16068 - protein, 9 aa, synthetic construct
GTNAALRLY

SEQ ID NO: 16069 - protein, 9 aa, synthetic construct
PLPGTAKLY

SEQ ID NO: 16070 - protein, 9 aa, synthetic construct
GTNAALKLK

SEQ ID NO: 16071 - protein, 9 aa, synthetic construct
PLPGTAKLR

SEQ ID NO: 16072 - protein, 9 aa, synthetic construct
GTNAAAHVH

SEQ ID NO: 16073 - protein, 9 aa, synthetic construct
GTNAAARLH

SEQ ID NO: 16074 - protein, 9 aa, synthetic construct
GTNAAAKLY

SEQ ID NO: 16075 - protein, 9 aa, synthetic construct
GTNAAAKLH

SEQ ID NO: 16076 - protein, 9 aa, synthetic construct
GTNAAAKVY

SEQ ID NO: 16077 - protein, 9 aa, synthetic construct
GTNAAAKVH

SEQ ID NO: 16078 - protein, 9 aa, synthetic construct
GTNAAIHLK

SEQ ID NO: 16079 - protein, 9 aa, synthetic construct
GTNAAIHLF

SEQ ID NO: 16080 - protein, 9 aa, synthetic construct
GTNAAIHVY

SEQ ID NO: 16081 - protein, 9 aa, synthetic construct
GTNAAIHVK

SEQ ID NO: 16082 - protein, 9 aa, synthetic construct
PLPGTAKVY

SEQ ID NO: 16083 - protein, 9 aa, synthetic construct
GTNAAIRLY

SEQ ID NO: 16084 - protein, 9 aa, synthetic construct
GTNAAIRLR

SEQ ID NO: 16085 - protein, 9 aa, synthetic construct
GTNAAIRVY

SEQ ID NO: 16086 - protein, 9 aa, synthetic construct
GTNAAIRVH

SEQ ID NO: 16087 - protein, 9 aa, synthetic construct
PLPGTAKVH

SEQ ID NO: 16088 - protein, 9 aa, synthetic construct
GTNAAGHLY

SEQ ID NO: 16089 - protein, 9 aa, synthetic construct
GTNAAGHLF

SEQ ID NO: 16090 - protein, 9 aa, synthetic construct
GTNAAGHVK

SEQ ID NO: 16091 - protein, 9 aa, synthetic construct
PLPGTAKVK

SEQ ID NO: 16092 - protein, 9 aa, synthetic construct
GTNAAGRLY

SEQ ID NO: 16093 - protein, 9 aa, synthetic construct
GTNAAGRLR

SEQ ID NO: 16094 - protein, 9 aa, synthetic construct
GTNAAGRVY

SEQ ID NO: 16095 - protein, 9 aa, synthetic construct
GTNAAGRVF

SEQ ID NO: 16096 - protein, 9 aa, synthetic construct
GTNAAGKLY

SEQ ID NO: 16097 - protein, 9 aa, synthetic construct
GTNAAGKLH

SEQ ID NO: 16098 - protein, 9 aa, synthetic construct
GTNAAGKVH

SEQ ID NO: 16099 - protein, 9 aa, synthetic construct
GTNAAGKVF

SEQ ID NO: 16100 - protein, 9 aa, synthetic construct
PLNGSVKLF

SEQ ID NO: 16101 - protein, 9 aa, synthetic construct
GTNATVHLY

SEQ ID NO: 16102 - protein, 9 aa, synthetic construct
GTNATVHLH

SEQ ID NO: 16103 - protein, 9 aa, synthetic construct
PLPGTIHLH

SEQ ID NO: 16104 - protein, 9 aa, synthetic construct
GTNATVKLH

SEQ ID NO: 16105 - protein, 9 aa, synthetic construct
GTNATVKVY

SEQ ID NO: 16106 - protein, 9 aa, synthetic construct
PLPGTIHLK

SEQ ID NO: 16107 - protein, 9 aa, synthetic construct
GTNATLRLY

SEQ ID NO: 16108 - protein, 9 aa, synthetic construct
GTNATLRLF

SEQ ID NO: 16109 - protein, 9 aa, synthetic construct
GTNATLRVF

SEQ ID NO: 16110 - protein, 9 aa, synthetic construct
GTNATLKLY

SEQ ID NO: 16111 - protein, 9 aa, synthetic construct
GTNATARLH

SEQ ID NO: 16112 - protein, 9 aa, synthetic construct
GTNATARVY

SEQ ID NO: 16113 - protein, 9 aa, synthetic construct
GTNATARVH

SEQ ID NO: 16114 - protein, 9 aa, synthetic construct
GTNATARVF

SEQ ID NO: 16115 - protein, 9 aa, synthetic construct
GTNATAKLY

SEQ ID NO: 16116 - protein, 9 aa, synthetic construct
GTNATAKLR

SEQ ID NO: 16117 - protein, 9 aa, synthetic construct
GTNATAKLF

SEQ ID NO: 16118 - protein, 9 aa, synthetic construct
GTNATAKVY

SEQ ID NO: 16119 - protein, 9 aa, synthetic construct
GTNATAKVH

SEQ ID NO: 16120 - protein, 9 aa, synthetic construct
GTNATAKVK

SEQ ID NO: 16121 - protein, 9 aa, synthetic construct
GTNATIHLH

SEQ ID NO: 16122 - protein, 9 aa, synthetic construct
PLPGTIRLY

SEQ ID NO: 16123 - protein, 9 aa, synthetic construct
GTNATIKLR

SEQ ID NO: 16124 - protein, 9 aa, synthetic construct
GTNATIKVY

SEQ ID NO: 16125 - protein, 9 aa, synthetic construct
GTNATIKVF

SEQ ID NO: 16126 - protein, 9 aa, synthetic construct
GTNATGHLR

SEQ ID NO: 16127 - protein, 9 aa, synthetic construct
GTNATGHLF

SEQ ID NO: 16128 - protein, 9 aa, synthetic construct
GTNATGHVH

SEQ ID NO: 16129 - protein, 9 aa, synthetic construct
GTNATGRLH

SEQ ID NO: 16130 - protein, 9 aa, synthetic construct
GTNATGRLF

SEQ ID NO: 16131 - protein, 9 aa, synthetic construct
GTNATGRVH

SEQ ID NO: 16132 - protein, 9 aa, synthetic construct
GTNATGRVF

SEQ ID NO: 16133 - protein, 9 aa, synthetic construct
GTNATGKLY

SEQ ID NO: 16134 - protein, 9 aa, synthetic construct
GTNATGKLR

SEQ ID NO: 16135 - protein, 9 aa, synthetic construct
GTNATGKLF

SEQ ID NO: 16136 - protein, 9 aa, synthetic construct
GTNATGKVY

SEQ ID NO: 16137 - protein, 9 aa, synthetic construct
GTNATGKVF

SEQ ID NO: 16138 - protein, 9 aa, synthetic construct
GTNASVHVK

SEQ ID NO: 16139 - protein, 9 aa, synthetic construct
GTNASVRVF

SEQ ID NO: 16140 - protein, 9 aa, synthetic construct
GTNASVKLF

SEQ ID NO: 16141 - protein, 9 aa, synthetic construct
GTNASVKVF

SEQ ID NO: 16142 - protein, 9 aa, synthetic construct
GTNASLHLY

SEQ ID NO: 16143 - protein, 9 aa, synthetic construct
GTNASLRLY

SEQ ID NO: 16144 - protein, 9 aa, synthetic construct
GTNASLRLF

SEQ ID NO: 16145 - protein, 9 aa, synthetic construct
GTNASLKLH

SEQ ID NO: 16146 - protein, 9 aa, synthetic construct
GTNASLKVY

SEQ ID NO: 16147 - protein, 9 aa, synthetic construct
GTNASLKVF

SEQ ID NO: 16148 - protein, 9 aa, synthetic construct
GTNASAHLY

SEQ ID NO: 16149 - protein, 9 aa, synthetic construct
GTNASAHLH

SEQ ID NO: 16150 - protein, 9 aa, synthetic construct
GTNASAHLF

SEQ ID NO: 16151 - protein, 9 aa, synthetic construct
GTNASAHVY

SEQ ID NO: 16152 - protein, 9 aa, synthetic construct
GTNASAHVK

SEQ ID NO: 16153 - protein, 9 aa, synthetic construct
GTNASARLR

SEQ ID NO: 16154 - protein, 9 aa, synthetic construct
GTNASARVH

SEQ ID NO: 16155 - protein, 9 aa, synthetic construct
GTNASAKVF

SEQ ID NO: 16156 - protein, 9 aa, synthetic construct
GTNASIHLK

SEQ ID NO: 16157 - protein, 9 aa, synthetic construct
PLPGTIKVY

SEQ ID NO: 16158 - protein, 9 aa, synthetic construct
GTNASIRVY

SEQ ID NO: 16159 - protein, 9 aa, synthetic construct
GTNASGHLR

SEQ ID NO: 16160 - protein, 9 aa, synthetic construct
GTNASGHVF

SEQ ID NO: 16161 - protein, 9 aa, synthetic construct
GTNASGKVH

SEQ ID NO: 16162 - protein, 9 aa, synthetic construct
PLPGTGHLY

SEQ ID NO: 16163 - protein, 9 aa, synthetic construct
PLPGTGHLH

SEQ ID NO: 16164 - protein, 9 aa, synthetic construct
GTNAVVKLF

SEQ ID NO: 16165 - protein, 9 aa, synthetic construct
GTNAVAHLH

SEQ ID NO: 16166 - protein, 9 aa, synthetic construct
GTNAVAKLF

SEQ ID NO: 16167 - protein, 9 aa, synthetic construct
GTNAVGHLR

SEQ ID NO: 16168 - protein, 9 aa, synthetic construct
GTNAVGHLH

SEQ ID NO: 16169 - protein, 9 aa, synthetic construct
GTNAVGHLF

SEQ ID NO: 16170 - protein, 9 aa, synthetic construct
GTNAVGHVY

SEQ ID NO: 16171 - protein, 9 aa, synthetic construct
GTNAVGRVH

SEQ ID NO: 16172 - protein, 9 aa, synthetic construct
PLPGTGRLF

SEQ ID NO: 16173 - protein, 9 aa, synthetic construct
GTNAGVKLF

SEQ ID NO: 16174 - protein, 9 aa, synthetic construct
PLNGSVKVF

SEQ ID NO: 16175 - protein, 9 aa, synthetic construct
GTNAGLKLY

SEQ ID NO: 16176 - protein, 9 aa, synthetic construct
GTNAGAHVF

SEQ ID NO: 16177 - protein, 9 aa, synthetic construct
GTNAGAKLF

SEQ ID NO: 16178 - protein, 9 aa, synthetic construct
PLPGTGKVY

SEQ ID NO: 16179 - protein, 9 aa, synthetic construct
PLPGTGKVH

SEQ ID NO: 16180 - protein, 9 aa, synthetic construct
GTNAGGHLH

SEQ ID NO: 16181 - protein, 9 aa, synthetic construct
PLNGALHLK

SEQ ID NO: 16182 - protein, 9 aa, synthetic construct
GTQGAVHLH

SEQ ID NO: 16183 - protein, 9 aa, synthetic construct
GTQGALHLK

SEQ ID NO: 16184 - protein, 9 aa, synthetic construct
GTQGALHVY

SEQ ID NO: 16185 - protein, 9 aa, synthetic construct
GTQGALKVY

SEQ ID NO: 16186 - protein, 9 aa, synthetic construct
GTQGAAHVY

SEQ ID NO: 16187 - protein, 9 aa, synthetic construct
GTQGAARVY

SEQ ID NO: 16188 - protein, 9 aa, synthetic construct
GTQGTVRLF

SEQ ID NO: 16189 - protein, 9 aa, synthetic construct
GTQGTVKLH

SEQ ID NO: 16190 - protein, 9 aa, synthetic construct
GTQGTVKVF

SEQ ID NO: 16191 - protein, 9 aa, synthetic construct
GTQGTAHVH

SEQ ID NO: 16192 - protein, 9 aa, synthetic construct
GTQGTAHVK

SEQ ID NO: 16193 - protein, 9 aa, synthetic construct
GTQGTARVF

SEQ ID NO: 16194 - protein, 9 aa, synthetic construct
GTQGTIRLY

SEQ ID NO: 16195 - protein, 9 aa, synthetic construct
GTQGTIRVY

SEQ ID NO: 16196 - protein, 9 aa, synthetic construct
GTQGTGRLF

SEQ ID NO: 16197 - protein, 9 aa, synthetic construct
PLPGSVKVF

SEQ ID NO: 16198 - protein, 9 aa, synthetic construct
PLNGSLHLK

SEQ ID NO: 16199 - protein, 9 aa, synthetic construct
GTQGSVHLY

SEQ ID NO: 16200 - protein, 9 aa, synthetic construct
GTQGSVHLH

SEQ ID NO: 16201 - protein, 9 aa, synthetic construct
GTQGSVHLK

SEQ ID NO: 16202 - protein, 9 aa, synthetic construct
GTQGSVHLF

SEQ ID NO: 16203 - protein, 9 aa, synthetic construct
GTQGSVHVK

SEQ ID NO: 16204 - protein, 9 aa, synthetic construct
GTQGSVRLY

SEQ ID NO: 16205 - protein, 9 aa, synthetic construct
GTQGSVRVY

SEQ ID NO: 16206 - protein, 9 aa, synthetic construct
GTQGSVRVH

SEQ ID NO: 16207 - protein, 9 aa, synthetic construct
GTQGSVKLH

SEQ ID NO: 16208 - protein, 9 aa, synthetic construct
GTQGSVKLF

SEQ ID NO: 16209 - protein, 9 aa, synthetic construct
GTQGSVKVY

SEQ ID NO: 16210 - protein, 9 aa, synthetic construct
GTQGSVKVR

SEQ ID NO: 16211 - protein, 9 aa, synthetic construct
GTQGSLKLY

SEQ ID NO: 16212 - protein, 9 aa, synthetic construct
GTQGSLKVF

SEQ ID NO: 16213 - protein, 9 aa, synthetic construct
GTQGSAHLY

SEQ ID NO: 16214 - protein, 9 aa, synthetic construct
GTQGSAHVY

SEQ ID NO: 16215 - protein, 9 aa, synthetic construct
GTQGSAHVH

SEQ ID NO: 16216 - protein, 9 aa, synthetic construct
GTQGSAHVK

SEQ ID NO: 16217 - protein, 9 aa, synthetic construct
GTQGSARVY

SEQ ID NO: 16218 - protein, 9 aa, synthetic construct
GTQGSAKVY

SEQ ID NO: 16219 - protein, 9 aa, synthetic construct
GTQGSIRLY

SEQ ID NO: 16220 - protein, 9 aa, synthetic construct
GTQGSIRVY

SEQ ID NO: 16221 - protein, 9 aa, synthetic construct
GTQGSIKLR

SEQ ID NO: 16222 - protein, 9 aa, synthetic construct
GTQGSIKLH

SEQ ID NO: 16223 - protein, 9 aa, synthetic construct
GTQGSIKVR

SEQ ID NO: 16224 - protein, 9 aa, synthetic construct
GTQGSGHLR

SEQ ID NO: 16225 - protein, 9 aa, synthetic construct
GTQGSGHLH

SEQ ID NO: 16226 - protein, 9 aa, synthetic construct
GTQGSGHVH

SEQ ID NO: 16227 - protein, 9 aa, synthetic construct
GTQGSGKVH

SEQ ID NO: 16228 - protein, 9 aa, synthetic construct
GTQGVVHVH

SEQ ID NO: 16229 - protein, 9 aa, synthetic construct
GTQGVVRLY

SEQ ID NO: 16230 - protein, 9 aa, synthetic construct
GTQGVVRLH

SEQ ID NO: 16231 - protein, 9 aa, synthetic construct
GTQGVVRLF

SEQ ID NO: 16232 - protein, 9 aa, synthetic construct
GTQGVVRVY

SEQ ID NO: 16233 - protein, 9 aa, synthetic construct
GTQGVVRVK

SEQ ID NO: 16234 - protein, 9 aa, synthetic construct
GTQGVVRVF

SEQ ID NO: 16235 - protein, 9 aa, synthetic construct
GTQGVVKLY

SEQ ID NO: 16236 - protein, 9 aa, synthetic construct
GTQGVVKLH

SEQ ID NO: 16237 - protein, 9 aa, synthetic construct
GTQGVVKLF

SEQ ID NO: 16238 - protein, 9 aa, synthetic construct
GTQGVLHVY

SEQ ID NO: 16239 - protein, 9 aa, synthetic construct
GTQGVLHVH

SEQ ID NO: 16240 - protein, 9 aa, synthetic construct
GTQGVLHVK

SEQ ID NO: 16241 - protein, 9 aa, synthetic construct
GTQGVLRVH

SEQ ID NO: 16242 - protein, 9 aa, synthetic construct
GTQGVLKLR

SEQ ID NO: 16243 - protein, 9 aa, synthetic construct
GTQGVLKLH

SEQ ID NO: 16244 - protein, 9 aa, synthetic construct
GTQGVAHLY

SEQ ID NO: 16245 - protein, 9 aa, synthetic construct
GTQGVAHLK

SEQ ID NO: 16246 - protein, 9 aa, synthetic construct
GTQGVAHLF

SEQ ID NO: 16247 - protein, 9 aa, synthetic construct
GTQGVAHVH

SEQ ID NO: 16248 - protein, 9 aa, synthetic construct
GTQGVAKLF

SEQ ID NO: 16249 - protein, 9 aa, synthetic construct
GTQGVIHLF

SEQ ID NO: 16250 - protein, 9 aa, synthetic construct
GTQGVIRLY

SEQ ID NO: 16251 - protein, 9 aa, synthetic construct
GTQGVIRLH

SEQ ID NO: 16252 - protein, 9 aa, synthetic construct
GTQGVIRVH

SEQ ID NO: 16253 - protein, 9 aa, synthetic construct
GTQGVIRVF

SEQ ID NO: 16254 - protein, 9 aa, synthetic construct
GTQGVGHLR

SEQ ID NO: 16255 - protein, 9 aa, synthetic construct
GTQGVGHLK

SEQ ID NO: 16256 - protein, 9 aa, synthetic construct
GTQGVGHVR

SEQ ID NO: 16257 - protein, 9 aa, synthetic construct
GTQGVGHVH

SEQ ID NO: 16258 - protein, 9 aa, synthetic construct
GTQGVGRVY

SEQ ID NO: 16259 - protein, 9 aa, synthetic construct
GTQGVGRVH

SEQ ID NO: 16260 - protein, 9 aa, synthetic construct
GTQGGVHLR

SEQ ID NO: 16261 - protein, 9 aa, synthetic construct
GTQGGVHLK

SEQ ID NO: 16262 - protein, 9 aa, synthetic construct
GTQGGVHLF

SEQ ID NO: 16263 - protein, 9 aa, synthetic construct
GTQGGVHVK

SEQ ID NO: 16264 - protein, 9 aa, synthetic construct
GTQGGLHVF

SEQ ID NO: 16265 - protein, 9 aa, synthetic construct
PLPGSAHLF

SEQ ID NO: 16266 - protein, 9 aa, synthetic construct
PLPGSAHVY

SEQ ID NO: 16267 - protein, 9 aa, synthetic construct
GTQGGLKVK

SEQ ID NO: 16268 - protein, 9 aa, synthetic construct
GTQGGLKVF

SEQ ID NO: 16269 - protein, 9 aa, synthetic construct
PLPGSAHVR

SEQ ID NO: 16270 - protein, 9 aa, synthetic construct
GTQGGAHLH

SEQ ID NO: 16271 - protein, 9 aa, synthetic construct
GTQGGARVY

SEQ ID NO: 16272 - protein, 9 aa, synthetic construct
GTQGGARVH

SEQ ID NO: 16273 - protein, 9 aa, synthetic construct
PLPGSAHVF

SEQ ID NO: 16274 - protein, 9 aa, synthetic construct
GTQGGIHLF

SEQ ID NO: 16275 - protein, 9 aa, synthetic construct
GTQGGIKVH

SEQ ID NO: 16276 - protein, 9 aa, synthetic construct
GTQGGGHLR

SEQ ID NO: 16277 - protein, 9 aa, synthetic construct
GTQGGGHLH

SEQ ID NO: 16278 - protein, 9 aa, synthetic construct
GTQGGGHVH

SEQ ID NO: 16279 - protein, 9 aa, synthetic construct
GTQGGGRLY

SEQ ID NO: 16280 - protein, 9 aa, synthetic construct
GTQGGGRVH

SEQ ID NO: 16281 - protein, 9 aa, synthetic construct
GTQGGGKVY

SEQ ID NO: 16282 - protein, 9 aa, synthetic construct
GTQAAVRVF

SEQ ID NO: 16283 - protein, 9 aa, synthetic construct
PLPGSARVH

SEQ ID NO: 16284 - protein, 9 aa, synthetic construct
GTQAAAHVH

SEQ ID NO: 16285 - protein, 9 aa, synthetic construct
GTQAAARVF

SEQ ID NO: 16286 - protein, 9 aa, synthetic construct
GTQAAIHVH

SEQ ID NO: 16287 - protein, 9 aa, synthetic construct
GTQAAIRVH

SEQ ID NO: 16288 - protein, 9 aa, synthetic construct
GTQAAGHLR

SEQ ID NO: 16289 - protein, 9 aa, synthetic construct
GTQAAGHVH

SEQ ID NO: 16290 - protein, 9 aa, synthetic construct
PLPGSAKVF

SEQ ID NO: 16291 - protein, 9 aa, synthetic construct
GTQAAGKLF

SEQ ID NO: 16292 - protein, 9 aa, synthetic construct
PLPGSIHLY

SEQ ID NO: 16293 - protein, 9 aa, synthetic construct
GTQATVHLY

SEQ ID NO: 16294 - protein, 9 aa, synthetic construct
GTQATVHLH

SEQ ID NO: 16295 - protein, 9 aa, synthetic construct
PLPGSIHLH

SEQ ID NO: 16296 - protein, 9 aa, synthetic construct
PLPGSIHVY

SEQ ID NO: 16297 - protein, 9 aa, synthetic construct
GTQATARLH

SEQ ID NO: 16298 - protein, 9 aa, synthetic construct
GTQATIHVY

SEQ ID NO: 16299 - protein, 9 aa, synthetic construct
GTQATGHLY

SEQ ID NO: 16300 - protein, 9 aa, synthetic construct
GTQATGHLF

SEQ ID NO: 16301 - protein, 9 aa, synthetic construct
GTQATGHVF

SEQ ID NO: 16302 - protein, 9 aa, synthetic construct
GTQATGKVY

SEQ ID NO: 16303 - protein, 9 aa, synthetic construct
GTQASVHVY

SEQ ID NO: 16304 - protein, 9 aa, synthetic construct
GTQASAKLY

SEQ ID NO: 16305 - protein, 9 aa, synthetic construct
GTQASIKLR

SEQ ID NO: 16306 - protein, 9 aa, synthetic construct
GTQASGRVK

SEQ ID NO: 16307 - protein, 9 aa, synthetic construct
GTQASGRVF

SEQ ID NO: 16308 - protein, 9 aa, synthetic construct
GTQAVVRVH

SEQ ID NO: 16309 - protein, 9 aa, synthetic construct
GTQAVAHLH

SEQ ID NO: 16310 - protein, 9 aa, synthetic construct
GTQAVIHVH

SEQ ID NO: 16311 - protein, 9 aa, synthetic construct
GTQAVIRVH

SEQ ID NO: 16312 - protein, 9 aa, synthetic construct
GTQAGVKVF

SEQ ID NO: 16313 - protein, 9 aa, synthetic construct
GTQAGIKVH

SEQ ID NO: 16314 - protein, 9 aa, synthetic construct
GTPGAVKVY

SEQ ID NO: 16315 - protein, 9 aa, synthetic construct
PLPGVVHVY

SEQ ID NO: 16316 - protein, 9 aa, synthetic construct
PLPGVVHVH

SEQ ID NO: 16317 - protein, 9 aa, synthetic construct
PLPGVVHVK

SEQ ID NO: 16318 - protein, 9 aa, synthetic construct
GTPGAIHVF

SEQ ID NO: 16319 - protein, 9 aa, synthetic construct
GTPGAGRLF

SEQ ID NO: 16320 - protein, 9 aa, synthetic construct
GTPGAGKLR

SEQ ID NO: 16321 - protein, 9 aa, synthetic construct
GTPGTVHLR

SEQ ID NO: 16322 - protein, 9 aa, synthetic construct
GTPGTVRVH

SEQ ID NO: 16323 - protein, 9 aa, synthetic construct
PLPGVVRVH

SEQ ID NO: 16324 - protein, 9 aa, synthetic construct
GTPGTLKLH

SEQ ID NO: 16325 - protein, 9 aa, synthetic construct
GTPGTAHLY

SEQ ID NO: 16326 - protein, 9 aa, synthetic construct
GTPGTAHLR

SEQ ID NO: 16327 - protein, 9 aa, synthetic construct
GTPGTAHLH

SEQ ID NO: 16328 - protein, 9 aa, synthetic construct
GTPGTAHLF

SEQ ID NO: 16329 - protein, 9 aa, synthetic construct
GTPGTAHVK

SEQ ID NO: 16330 - protein, 9 aa, synthetic construct
PLPGVVKLH

SEQ ID NO: 16331 - protein, 9 aa, synthetic construct
PLPGVVKLF

SEQ ID NO: 16332 - protein, 9 aa, synthetic construct
GTPGTIHVK

SEQ ID NO: 16333 - protein, 9 aa, synthetic construct
GTPGTGHLH

SEQ ID NO: 16334 - protein, 9 aa, synthetic construct
PLPGVVKVF

SEQ ID NO: 16335 - protein, 9 aa, synthetic construct
GTPGSVHLY

SEQ ID NO: 16336 - protein, 9 aa, synthetic construct
GTPGSVHLF

SEQ ID NO: 16337 - protein, 9 aa, synthetic construct
GTPGSVHVF

SEQ ID NO: 16338 - protein, 9 aa, synthetic construct
GTPGSLHLY

SEQ ID NO: 16339 - protein, 9 aa, synthetic construct
GTPGSAHLR

SEQ ID NO: 16340 - protein, 9 aa, synthetic construct
GTPGSAHLF

SEQ ID NO: 16341 - protein, 9 aa, synthetic construct
GTPGSAHVY

SEQ ID NO: 16342 - protein, 9 aa, synthetic construct
GTPGSAHVK

SEQ ID NO: 16343 - protein, 9 aa, synthetic construct
GTPGSAHVF

SEQ ID NO: 16344 - protein, 9 aa, synthetic construct
PLPGVLHVH

SEQ ID NO: 16345 - protein, 9 aa, synthetic construct
GTPGSARVY

SEQ ID NO: 16346 - protein, 9 aa, synthetic construct
GTPGSARVR

SEQ ID NO: 16347 - protein, 9 aa, synthetic construct
GTPGSARVF

SEQ ID NO: 16348 - protein, 9 aa, synthetic construct
PLPGVLHVK

SEQ ID NO: 16349 - protein, 9 aa, synthetic construct
GTPGSAKLY

SEQ ID NO: 16350 - protein, 9 aa, synthetic construct
GTPGSAKLR

SEQ ID NO: 16351 - protein, 9 aa, synthetic construct
GTPGSAKVY

SEQ ID NO: 16352 - protein, 9 aa, synthetic construct
GTPGSAKVK

SEQ ID NO: 16353 - protein, 9 aa, synthetic construct
GTPGSIHVY

SEQ ID NO: 16354 - protein, 9 aa, synthetic construct
GTPGSGHLR

SEQ ID NO: 16355 - protein, 9 aa, synthetic construct
GTPGVVHLY

SEQ ID NO: 16356 - protein, 9 aa, synthetic construct
GTPGVVHLH

SEQ ID NO: 16357 - protein, 9 aa, synthetic construct
GTPGVVHLF

SEQ ID NO: 16358 - protein, 9 aa, synthetic construct
GTPGVVHVK

SEQ ID NO: 16359 - protein, 9 aa, synthetic construct
GTPGVVHVF

SEQ ID NO: 16360 - protein, 9 aa, synthetic construct
GTPGVVKVY

SEQ ID NO: 16361 - protein, 9 aa, synthetic construct
GTPGVLHVY

SEQ ID NO: 16362 - protein, 9 aa, synthetic construct
GTPGVLHVR

SEQ ID NO: 16363 - protein, 9 aa, synthetic construct
GTPGVLHVH

SEQ ID NO: 16364 - protein, 9 aa, synthetic construct
PLNGALHVY

SEQ ID NO: 16365 - protein, 9 aa, synthetic construct
GTPGVLKLY

SEQ ID NO: 16366 - protein, 9 aa, synthetic construct
GTPGVLKVH

SEQ ID NO: 16367 - protein, 9 aa, synthetic construct
GTPGVAHLH

SEQ ID NO: 16368 - protein, 9 aa, synthetic construct
GTPGVAHVH

SEQ ID NO: 16369 - protein, 9 aa, synthetic construct
GTPGVAKLF

SEQ ID NO: 16370 - protein, 9 aa, synthetic construct
PLPGVLKVH

SEQ ID NO: 16371 - protein, 9 aa, synthetic construct
GTPGVGHLK

SEQ ID NO: 16372 - protein, 9 aa, synthetic construct
GTPGVGHVH

SEQ ID NO: 16373 - protein, 9 aa, synthetic construct
GTPGVGRVY

SEQ ID NO: 16374 - protein, 9 aa, synthetic construct
GTPGVGRVH

SEQ ID NO: 16375 - protein, 9 aa, synthetic construct
GTPGVGKLH

SEQ ID NO: 16376 - protein, 9 aa, synthetic construct
PLPGVAHLY

SEQ ID NO: 16377 - protein, 9 aa, synthetic construct
GTPGGVHLK

SEQ ID NO: 16378 - protein, 9 aa, synthetic construct
PLPGVAHLH

SEQ ID NO: 16379 - protein, 9 aa, synthetic construct
GTPGGLHVH

SEQ ID NO: 16380 - protein, 9 aa, synthetic construct
PLPGVAHLF

SEQ ID NO: 16381 - protein, 9 aa, synthetic construct
GTPGGLRLH

SEQ ID NO: 16382 - protein, 9 aa, synthetic construct
PLPGVAHVY

SEQ ID NO: 16383 - protein, 9 aa, synthetic construct
PLPGVAHVR

SEQ ID NO: 16384 - protein, 9 aa, synthetic construct
GTPGGAHLH

SEQ ID NO: 16385 - protein, 9 aa, synthetic construct
GTPGGAHLK

SEQ ID NO: 16386 - protein, 9 aa, synthetic construct
GTPGGAHVR

SEQ ID NO: 16387 - protein, 9 aa, synthetic construct
GTPGGAHVF

SEQ ID NO: 16388 - protein, 9 aa, synthetic construct
GTPGGARVH

SEQ ID NO: 16389 - protein, 9 aa, synthetic construct
PLPGVAHVK

SEQ ID NO: 16390 - protein, 9 aa, synthetic construct
PLPGVAHVF

SEQ ID NO: 16391 - protein, 9 aa, synthetic construct
PLPGVARLH

SEQ ID NO: 16392 - protein, 9 aa, synthetic construct
GTPGGGRVY

SEQ ID NO: 16393 - protein, 9 aa, synthetic construct
GTPAAVHLY

SEQ ID NO: 16394 - protein, 9 aa, synthetic construct
GTPAAVRVY

SEQ ID NO: 16395 - protein, 9 aa, synthetic construct
GTPAAVRVF

SEQ ID NO: 16396 - protein, 9 aa, synthetic construct
GTPAAVKLY

SEQ ID NO: 16397 - protein, 9 aa, synthetic construct
GTPAAVKLH

SEQ ID NO: 16398 - protein, 9 aa, synthetic construct
GTPAAVKVH

SEQ ID NO: 16399 - protein, 9 aa, synthetic construct
GTPAAVKVF

SEQ ID NO: 16400 - protein, 9 aa, synthetic construct
GTPAALKVY

SEQ ID NO: 16401 - protein, 9 aa, synthetic construct
PLPGVAKLR

SEQ ID NO: 16402 - protein, 9 aa, synthetic construct
GTPAAARLH

SEQ ID NO: 16403 - protein, 9 aa, synthetic construct
GTPAAAKLY

SEQ ID NO: 16404 - protein, 9 aa, synthetic construct
GTPAAAKVY

SEQ ID NO: 16405 - protein, 9 aa, synthetic construct
GTPAAAKVH

SEQ ID NO: 16406 - protein, 9 aa, synthetic construct
PLPGVAKLF

SEQ ID NO: 16407 - protein, 9 aa, synthetic construct
GTPAAIHLK

SEQ ID NO: 16408 - protein, 9 aa, synthetic construct
GTPAAIHLF

SEQ ID NO: 16409 - protein, 9 aa, synthetic construct
GTPAAIRLR

SEQ ID NO: 16410 - protein, 9 aa, synthetic construct
GTPAAIKVF

SEQ ID NO: 16411 - protein, 9 aa, synthetic construct
GTPAAGHLY

SEQ ID NO: 16412 - protein, 9 aa, synthetic construct
GTPAAGHLK

SEQ ID NO: 16413 - protein, 9 aa, synthetic construct
GTPAAGHLF

SEQ ID NO: 16414 - protein, 9 aa, synthetic construct
GTPAAGRLH

SEQ ID NO: 16415 - protein, 9 aa, synthetic construct
GTPAAGKLH

SEQ ID NO: 16416 - protein, 9 aa, synthetic construct
GTPATVHVH

SEQ ID NO: 16417 - protein, 9 aa, synthetic construct
PLPGVIHLK

SEQ ID NO: 16418 - protein, 9 aa, synthetic construct
GTPATLRVF

SEQ ID NO: 16419 - protein, 9 aa, synthetic construct
GTPATLKLK

SEQ ID NO: 16420 - protein, 9 aa, synthetic construct
GTPATAHVY

SEQ ID NO: 16421 - protein, 9 aa, synthetic construct
GTPATAHVK

SEQ ID NO: 16422 - protein, 9 aa, synthetic construct
GTPATIKLF

SEQ ID NO: 16423 - protein, 9 aa, synthetic construct
GTPATGHLR

SEQ ID NO: 16424 - protein, 9 aa, synthetic construct
GTPATGKVY

SEQ ID NO: 16425 - protein, 9 aa, synthetic construct
GTPASVHVY

SEQ ID NO: 16426 - protein, 9 aa, synthetic construct
GTPASVHVR

SEQ ID NO: 16427 - protein, 9 aa, synthetic construct
GTPASVHVK

SEQ ID NO: 16428 - protein, 9 aa, synthetic construct
GTPASLHLY

SEQ ID NO: 16429 - protein, 9 aa, synthetic construct
GTPASLKLH

SEQ ID NO: 16430 - protein, 9 aa, synthetic construct
GTPASAHLY

SEQ ID NO: 16431 - protein, 9 aa, synthetic construct
GTPASAHLH

SEQ ID NO: 16432 - protein, 9 aa, synthetic construct
GTPASAHLF

SEQ ID NO: 16433 - protein, 9 aa, synthetic construct
GTPASAHVR

SEQ ID NO: 16434 - protein, 9 aa, synthetic construct
GTPASARVH

SEQ ID NO: 16435 - protein, 9 aa, synthetic construct
GTPASGHLR

SEQ ID NO: 16436 - protein, 9 aa, synthetic construct
GTPASGHLH

SEQ ID NO: 16437 - protein, 9 aa, synthetic construct
GTPASGHLF

SEQ ID NO: 16438 - protein, 9 aa, synthetic construct
GTPASGHVY

SEQ ID NO: 16439 - protein, 9 aa, synthetic construct
GTPASGHVK

SEQ ID NO: 16440 - protein, 9 aa, synthetic construct
GTPASGHVF

SEQ ID NO: 16441 - protein, 9 aa, synthetic construct
GTPASGRVH

SEQ ID NO: 16442 - protein, 9 aa, synthetic construct
GTPAVVRVH

SEQ ID NO: 16443 - protein, 9 aa, synthetic construct
PLPGVGHLH

SEQ ID NO: 16444 - protein, 9 aa, synthetic construct
GTPAVVKLY

SEQ ID NO: 16445 - protein, 9 aa, synthetic construct
PLPGVGHLK

SEQ ID NO: 16446 - protein, 9 aa, synthetic construct
GTPAVLHLK

SEQ ID NO: 16447 - protein, 9 aa, synthetic construct
GTPAVLRLY

SEQ ID NO: 16448 - protein, 9 aa, synthetic construct
GTPAVLKLK

SEQ ID NO: 16449 - protein, 9 aa, synthetic construct
GTPAVLKLF

SEQ ID NO: 16450 - protein, 9 aa, synthetic construct
GTPAVLKVY

SEQ ID NO: 16451 - protein, 9 aa, synthetic construct
PLPGVGHVR

SEQ ID NO: 16452 - protein, 9 aa, synthetic construct
PLPGVGHVH

SEQ ID NO: 16453 - protein, 9 aa, synthetic construct
GTPAVAKLF

SEQ ID NO: 16454 - protein, 9 aa, synthetic construct
GTPAVIKVH

SEQ ID NO: 16455 - protein, 9 aa, synthetic construct
GTPAVGRVH

SEQ ID NO: 16456 - protein, 9 aa, synthetic construct
PLPGVGRVY

SEQ ID NO: 16457 - protein, 9 aa, synthetic construct
PLPGVGRVH

SEQ ID NO: 16458 - protein, 9 aa, synthetic construct
GTPAGAHVY

SEQ ID NO: 16459 - protein, 9 aa, synthetic construct
PLPGVGKLH

SEQ ID NO: 16460 - protein, 9 aa, synthetic construct
GTPAGARVR

SEQ ID NO: 16461 - protein, 9 aa, synthetic construct
GTPAGAKLH

SEQ ID NO: 16462 - protein, 9 aa, synthetic construct
GTPAGIHLF

SEQ ID NO: 16463 - protein, 9 aa, synthetic construct
GTPAGGHVH

SEQ ID NO: 16464 - protein, 9 aa, synthetic construct
PLPGGVHLY

SEQ ID NO: 16465 - protein, 9 aa, synthetic construct
PLPGGVHLK

SEQ ID NO: 16466 - protein, 9 aa, synthetic construct
GSNGAAHVY

SEQ ID NO: 16467 - protein, 9 aa, synthetic construct
GSNGAAHVH

SEQ ID NO: 16468 - protein, 9 aa, synthetic construct
GSNGAAHVK

SEQ ID NO: 16469 - protein, 9 aa, synthetic construct
GSNGAAKLY

SEQ ID NO: 16470 - protein, 9 aa, synthetic construct
GSNGAAKVH

SEQ ID NO: 16471 - protein, 9 aa, synthetic construct
GSNGAIKLR

SEQ ID NO: 16472 - protein, 9 aa, synthetic construct
GSNGAGHLH

SEQ ID NO: 16473 - protein, 9 aa, synthetic construct
GSNGAGRLY

SEQ ID NO: 16474 - protein, 9 aa, synthetic construct
GSNGAGRLH

SEQ ID NO: 16475 - protein, 9 aa, synthetic construct
GSNGAGRVF

SEQ ID NO: 16476 - protein, 9 aa, synthetic construct
GSNGTVHLK

SEQ ID NO: 16477 - protein, 9 aa, synthetic construct
GSNGTVHLF

SEQ ID NO: 16478 - protein, 9 aa, synthetic construct
GSNGTVHVY

SEQ ID NO: 16479 - protein, 9 aa, synthetic construct
GSNGTVHVK

SEQ ID NO: 16480 - protein, 9 aa, synthetic construct
GSNGTVHVF

SEQ ID NO: 16481 - protein, 9 aa, synthetic construct
GSNGTVRLY

SEQ ID NO: 16482 - protein, 9 aa, synthetic construct
GSNGTVKLY

SEQ ID NO: 16483 - protein, 9 aa, synthetic construct
GSNGTVKLH

SEQ ID NO: 16484 - protein, 9 aa, synthetic construct
GSNGTVKVY

SEQ ID NO: 16485 - protein, 9 aa, synthetic construct
GSNGTLHLH

SEQ ID NO: 16486 - protein, 9 aa, synthetic construct
GSNGTLHLK

SEQ ID NO: 16487 - protein, 9 aa, synthetic construct
GSNGTLRVF

SEQ ID NO: 16488 - protein, 9 aa, synthetic construct
GSNGTLKLH

SEQ ID NO: 16489 - protein, 9 aa, synthetic construct
GSNGTAHLY

SEQ ID NO: 16490 - protein, 9 aa, synthetic construct
GSNGTAHLR

SEQ ID NO: 16491 - protein, 9 aa, synthetic construct
GSNGTAHLF

SEQ ID NO: 16492 - protein, 9 aa, synthetic construct
GSNGTARVF

SEQ ID NO: 16493 - protein, 9 aa, synthetic construct
GSNGTAKVY

SEQ ID NO: 16494 - protein, 9 aa, synthetic construct
GSNGTAKVH

SEQ ID NO: 16495 - protein, 9 aa, synthetic construct
GSNGTIHLY

SEQ ID NO: 16496 - protein, 9 aa, synthetic construct
GSNGTIHLH

SEQ ID NO: 16497 - protein, 9 aa, synthetic construct
GSNGTIHLK

SEQ ID NO: 16498 - protein, 9 aa, synthetic construct
GSNGTIRLR

SEQ ID NO: 16499 - protein, 9 aa, synthetic construct
GSNGTIRVY

SEQ ID NO: 16500 - protein, 9 aa, synthetic construct
GSNGTIKLY

SEQ ID NO: 16501 - protein, 9 aa, synthetic construct
GSNGTIKLH

SEQ ID NO: 16502 - protein, 9 aa, synthetic construct
GSNGTIKLK

SEQ ID NO: 16503 - protein, 9 aa, synthetic construct
GSNGTIKLF

SEQ ID NO: 16504 - protein, 9 aa, synthetic construct
GSNGTIKVY

SEQ ID NO: 16505 - protein, 9 aa, synthetic construct
GSNGTIKVR

SEQ ID NO: 16506 - protein, 9 aa, synthetic construct
GSNGTGHLY

SEQ ID NO: 16507 - protein, 9 aa, synthetic construct
GSNGTGHVH

SEQ ID NO: 16508 - protein, 9 aa, synthetic construct
GSNGTGKVH

SEQ ID NO: 16509 - protein, 9 aa, synthetic construct
GSNGSVHLH

SEQ ID NO: 16510 - protein, 9 aa, synthetic construct
GSNGSVHLK

SEQ ID NO: 16511 - protein, 9 aa, synthetic construct
GSNGSVHVY

SEQ ID NO: 16512 - protein, 9 aa, synthetic construct
GSNGSVHVK

SEQ ID NO: 16513 - protein, 9 aa, synthetic construct
GSNGSVHVF

SEQ ID NO: 16514 - protein, 9 aa, synthetic construct
GSNGSAHVR

SEQ ID NO: 16515 - protein, 9 aa, synthetic construct
PLPGGLHVH

SEQ ID NO: 16516 - protein, 9 aa, synthetic construct
GSNGSARVY

SEQ ID NO: 16517 - protein, 9 aa, synthetic construct
GSNGSAKVF

SEQ ID NO: 16518 - protein, 9 aa, synthetic construct
GSNGSIHVK

SEQ ID NO: 16519 - protein, 9 aa, synthetic construct
GSNGSIRVY

SEQ ID NO: 16520 - protein, 9 aa, synthetic construct
GSNGSIKLR

SEQ ID NO: 16521 - protein, 9 aa, synthetic construct
GSNGSGHLF

SEQ ID NO: 16522 - protein, 9 aa, synthetic construct
GSNGSGKLF

SEQ ID NO: 16523 - protein, 9 aa, synthetic construct
GSNGVVKLF

SEQ ID NO: 16524 - protein, 9 aa, synthetic construct
GSNGVLKVH

SEQ ID NO: 16525 - protein, 9 aa, synthetic construct
PLPGGLKVY

SEQ ID NO: 16526 - protein, 9 aa, synthetic construct
PLPGGLKVF

SEQ ID NO: 16527 - protein, 9 aa, synthetic construct
GSNGVGKLH

SEQ ID NO: 16528 - protein, 9 aa, synthetic construct
GSNGGVHLF

SEQ ID NO: 16529 - protein, 9 aa, synthetic construct
PLPGGAHLH

SEQ ID NO: 16530 - protein, 9 aa, synthetic construct
PLPGGAHLK

SEQ ID NO: 16531 - protein, 9 aa, synthetic construct
GSNGGLHVH

SEQ ID NO: 16532 - protein, 9 aa, synthetic construct
GSNGGAHLY

SEQ ID NO: 16533 - protein, 9 aa, synthetic construct
GSNGGAHLH

SEQ ID NO: 16534 - protein, 9 aa, synthetic construct
GSNGGAHLK

SEQ ID NO: 16535 - protein, 9 aa, synthetic construct
GSNGGAHVR

SEQ ID NO: 16536 - protein, 9 aa, synthetic construct
GSNGGAKLY

SEQ ID NO: 16537 - protein, 9 aa, synthetic construct
GSNGGAKLR

SEQ ID NO: 16538 - protein, 9 aa, synthetic construct
GSNGGAKLH

SEQ ID NO: 16539 - protein, 9 aa, synthetic construct
GSNGGAKVY

SEQ ID NO: 16540 - protein, 9 aa, synthetic construct
GSNGGAKVF

SEQ ID NO: 16541 - protein, 9 aa, synthetic construct
PLPGGAHVF

SEQ ID NO: 16542 - protein, 9 aa, synthetic construct
GSNGGIHVY

SEQ ID NO: 16543 - protein, 9 aa, synthetic construct
GSNGGIHVK

SEQ ID NO: 16544 - protein, 9 aa, synthetic construct
GSNGGIRLY

SEQ ID NO: 16545 - protein, 9 aa, synthetic construct
GSNGGIRLH

SEQ ID NO: 16546 - protein, 9 aa, synthetic construct
GSNGGIRVH

SEQ ID NO: 16547 - protein, 9 aa, synthetic construct
GSNGGIKLH

SEQ ID NO: 16548 - protein, 9 aa, synthetic construct
GSNGGIKLF

SEQ ID NO: 16549 - protein, 9 aa, synthetic construct
GSNGGGHLY

SEQ ID NO: 16550 - protein, 9 aa, synthetic construct
GSNGGGHLR

SEQ ID NO: 16551 - protein, 9 aa, synthetic construct
GSNGGGHLK

SEQ ID NO: 16552 - protein, 9 aa, synthetic construct
GSNGGGHVH

SEQ ID NO: 16553 - protein, 9 aa, synthetic construct
GSNGGGHVF

SEQ ID NO: 16554 - protein, 9 aa, synthetic construct
GSNGGGRLH

SEQ ID NO: 16555 - protein, 9 aa, synthetic construct
GSNGGGRLF

SEQ ID NO: 16556 - protein, 9 aa, synthetic construct
GSNGGGRVY

SEQ ID NO: 16557 - protein, 9 aa, synthetic construct
GSNGGGRVK

SEQ ID NO: 16558 - protein, 9 aa, synthetic construct
GSNGGGKLY

SEQ ID NO: 16559 - protein, 9 aa, synthetic construct
GSNGGGKLR

SEQ ID NO: 16560 - protein, 9 aa, synthetic construct
GSNGGGKLH

SEQ ID NO: 16561 - protein, 9 aa, synthetic construct
GSNGGGKVH

SEQ ID NO: 16562 - protein, 9 aa, synthetic construct
GSNGGGKVK

SEQ ID NO: 16563 - protein, 9 aa, synthetic construct
GSNAAVHLH

SEQ ID NO: 16564 - protein, 9 aa, synthetic construct
PLPGGARVR

SEQ ID NO: 16565 - protein, 9 aa, synthetic construct
GSNAAVRVF

SEQ ID NO: 16566 - protein, 9 aa, synthetic construct
GSNAAVKLF

SEQ ID NO: 16567 - protein, 9 aa, synthetic construct
GSNAALRLY

SEQ ID NO: 16568 - protein, 9 aa, synthetic construct
PLPGGAKLY

SEQ ID NO: 16569 - protein, 9 aa, synthetic construct
GSNAALKLK

SEQ ID NO: 16570 - protein, 9 aa, synthetic construct
PLPGGAKLR

SEQ ID NO: 16571 - protein, 9 aa, synthetic construct
GSNAAAHLY

SEQ ID NO: 16572 - protein, 9 aa, synthetic construct
GSNAAAHLR

SEQ ID NO: 16573 - protein, 9 aa, synthetic construct
GSNAAAHLK

SEQ ID NO: 16574 - protein, 9 aa, synthetic construct
GSNAAAHVR

SEQ ID NO: 16575 - protein, 9 aa, synthetic construct
PLPGGAKLH

SEQ ID NO: 16576 - protein, 9 aa, synthetic construct
GSNAAARLH

SEQ ID NO: 16577 - protein, 9 aa, synthetic construct
GSNAAARVY

SEQ ID NO: 16578 - protein, 9 aa, synthetic construct
GSNAAAKLH

SEQ ID NO: 16579 - protein, 9 aa, synthetic construct
GSNAAIHLF

SEQ ID NO: 16580 - protein, 9 aa, synthetic construct
GSNAAIRLR

SEQ ID NO: 16581 - protein, 9 aa, synthetic construct
GSNAAIKVY

SEQ ID NO: 16582 - protein, 9 aa, synthetic construct
GSNAAIKVF

SEQ ID NO: 16583 - protein, 9 aa, synthetic construct
GSNAAGHLR

SEQ ID NO: 16584 - protein, 9 aa, synthetic construct
GSNAAGRLH

SEQ ID NO: 16585 - protein, 9 aa, synthetic construct
GSNAAGKVF

SEQ ID NO: 16586 - protein, 9 aa, synthetic construct
PLPGGIHLY

SEQ ID NO: 16587 - protein, 9 aa, synthetic construct
GSNATVHLY

SEQ ID NO: 16588 - protein, 9 aa, synthetic construct
GSNATVHLK

SEQ ID NO: 16589 - protein, 9 aa, synthetic construct
GSNATAHLH

SEQ ID NO: 16590 - protein, 9 aa, synthetic construct
GSNATAHVR

SEQ ID NO: 16591 - protein, 9 aa, synthetic construct
GSNATAHVK

SEQ ID NO: 16592 - protein, 9 aa, synthetic construct
GSNATARVF

SEQ ID NO: 16593 - protein, 9 aa, synthetic construct
GSNATAKVY

SEQ ID NO: 16594 - protein, 9 aa, synthetic construct
GSNATIKLR

SEQ ID NO: 16595 - protein, 9 aa, synthetic construct
GSNATIKLF

SEQ ID NO: 16596 - protein, 9 aa, synthetic construct
GSNATIKVY

SEQ ID NO: 16597 - protein, 9 aa, synthetic construct
PLPGGIRLH

SEQ ID NO: 16598 - protein, 9 aa, synthetic construct
GSNATGHLY

SEQ ID NO: 16599 - protein, 9 aa, synthetic construct
GSNATGHLR

SEQ ID NO: 16600 - protein, 9 aa, synthetic construct
GSNATGHLF

SEQ ID NO: 16601 - protein, 9 aa, synthetic construct
GSNATGKVY

SEQ ID NO: 16602 - protein, 9 aa, synthetic construct
GSNATGKVH

SEQ ID NO: 16603 - protein, 9 aa, synthetic construct
GSNASVHVK

SEQ ID NO: 16604 - protein, 9 aa, synthetic construct
GSNASVKVF

SEQ ID NO: 16605 - protein, 9 aa, synthetic construct
GSNASLHLY

SEQ ID NO: 16606 - protein, 9 aa, synthetic construct
GSNASLKLY

SEQ ID NO: 16607 - protein, 9 aa, synthetic construct
GSNASARVY

SEQ ID NO: 16608 - protein, 9 aa, synthetic construct
GSNASARVF

SEQ ID NO: 16609 - protein, 9 aa, synthetic construct
GSNASAKLH

SEQ ID NO: 16610 - protein, 9 aa, synthetic construct
GSNASAKLF

SEQ ID NO: 16611 - protein, 9 aa, synthetic construct
GSNASAKVY

SEQ ID NO: 16612 - protein, 9 aa, synthetic construct
GSNASIRLY

SEQ ID NO: 16613 - protein, 9 aa, synthetic construct
GSNASIRVH

SEQ ID NO: 16614 - protein, 9 aa, synthetic construct
GSNASIKVY

SEQ ID NO: 16615 - protein, 9 aa, synthetic construct
GSNAVVKVF

SEQ ID NO: 16616 - protein, 9 aa, synthetic construct
GSNAVLKLY

SEQ ID NO: 16617 - protein, 9 aa, synthetic construct
GSNAVAHVR

SEQ ID NO: 16618 - protein, 9 aa, synthetic construct
GSNAVAKLF

SEQ ID NO: 16619 - protein, 9 aa, synthetic construct
GSNAVIKLH

SEQ ID NO: 16620 - protein, 9 aa, synthetic construct
GSNAVIKVH

SEQ ID NO: 16621 - protein, 9 aa, synthetic construct
GSNAVGHLY

SEQ ID NO: 16622 - protein, 9 aa, synthetic construct
GSNAVGRVH

SEQ ID NO: 16623 - protein, 9 aa, synthetic construct
GSNAVGKLY

SEQ ID NO: 16624 - protein, 9 aa, synthetic construct
GSNAGVHLY

SEQ ID NO: 16625 - protein, 9 aa, synthetic construct
GSNAGVHLH

SEQ ID NO: 16626 - protein, 9 aa, synthetic construct
GSNAGVHLF

SEQ ID NO: 16627 - protein, 9 aa, synthetic construct
GSNAGVHVY

SEQ ID NO: 16628 - protein, 9 aa, synthetic construct
GSNAGVHVR

SEQ ID NO: 16629 - protein, 9 aa, synthetic construct
GSNAGVHVK

SEQ ID NO: 16630 - protein, 9 aa, synthetic construct
GSNAGVHVF

SEQ ID NO: 16631 - protein, 9 aa, synthetic construct
GSNAGVRLY

SEQ ID NO: 16632 - protein, 9 aa, synthetic construct
GSNAGVRLF

SEQ ID NO: 16633 - protein, 9 aa, synthetic construct
GSNAGVRVY

SEQ ID NO: 16634 - protein, 9 aa, synthetic construct
GSNAGVKLY

SEQ ID NO: 16635 - protein, 9 aa, synthetic construct
GSNAGVKLR

SEQ ID NO: 16636 - protein, 9 aa, synthetic construct
GSNAGVKLH

SEQ ID NO: 16637 - protein, 9 aa, synthetic construct
GSNAGVKLK

SEQ ID NO: 16638 - protein, 9 aa, synthetic construct
GSNAGVKVY

SEQ ID NO: 16639 - protein, 9 aa, synthetic construct
GSNAGVKVK

SEQ ID NO: 16640 - protein, 9 aa, synthetic construct
GSNAGVKVF

SEQ ID NO: 16641 - protein, 9 aa, synthetic construct
GSNAGLKLY

SEQ ID NO: 16642 - protein, 9 aa, synthetic construct
GSNAGLKLF

SEQ ID NO: 16643 - protein, 9 aa, synthetic construct
GSNAGAHLY

SEQ ID NO: 16644 - protein, 9 aa, synthetic construct
GSNAGAHVY

SEQ ID NO: 16645 - protein, 9 aa, synthetic construct
GSNAGAHVR

SEQ ID NO: 16646 - protein, 9 aa, synthetic construct
GSNAGAHVK

SEQ ID NO: 16647 - protein, 9 aa, synthetic construct
GSNAGARLH

SEQ ID NO: 16648 - protein, 9 aa, synthetic construct
GSNAGARVR

SEQ ID NO: 16649 - protein, 9 aa, synthetic construct
GSNAGARVH

SEQ ID NO: 16650 - protein, 9 aa, synthetic construct
GSNAGAKLR

SEQ ID NO: 16651 - protein, 9 aa, synthetic construct
GSNAGAKVY

SEQ ID NO: 16652 - protein, 9 aa, synthetic construct
GSNAGAKVH

SEQ ID NO: 16653 - protein, 9 aa, synthetic construct
PLPGGGKLF

SEQ ID NO: 16654 - protein, 9 aa, synthetic construct
GSNAGIHVK

SEQ ID NO: 16655 - protein, 9 aa, synthetic construct
GSNAGIRLY

SEQ ID NO: 16656 - protein, 9 aa, synthetic construct
GSNAGIRLH

SEQ ID NO: 16657 - protein, 9 aa, synthetic construct
GSNAGIRVH

SEQ ID NO: 16658 - protein, 9 aa, synthetic construct
GSNAGIKVH

SEQ ID NO: 16659 - protein, 9 aa, synthetic construct
GSNAGGHLR

SEQ ID NO: 16660 - protein, 9 aa, synthetic construct
GSNAGGHLK

SEQ ID NO: 16661 - protein, 9 aa, synthetic construct
GSNAGGRLH

SEQ ID NO: 16662 - protein, 9 aa, synthetic construct
GSNAGGRVK

SEQ ID NO: 16663 - protein, 9 aa, synthetic construct
GSNAGGKLH

SEQ ID NO: 16664 - protein, 9 aa, synthetic construct
GSNAGGKVF

SEQ ID NO: 16665 - protein, 9 aa, synthetic construct
PLNGSARVY

SEQ ID NO: 16666 - protein, 9 aa, synthetic construct
GSQGAVHLY

SEQ ID NO: 16667 - protein, 9 aa, synthetic construct
GSQGAVRLF

SEQ ID NO: 16668 - protein, 9 aa, synthetic construct
PLPAAVHLH

SEQ ID NO: 16669 - protein, 9 aa, synthetic construct
GSQGAVKLY

SEQ ID NO: 16670 - protein, 9 aa, synthetic construct
GSQGAVKVY

SEQ ID NO: 16671 - protein, 9 aa, synthetic construct
GSQGALHLY

SEQ ID NO: 16672 - protein, 9 aa, synthetic construct
GSQGALHLR

SEQ ID NO: 16673 - protein, 9 aa, synthetic construct
GSQGALHLH

SEQ ID NO: 16674 - protein, 9 aa, synthetic construct
GSQGALHLK

SEQ ID NO: 16675 - protein, 9 aa, synthetic construct
GSQGALHLF

SEQ ID NO: 16676 - protein, 9 aa, synthetic construct
GSQGALHVH

SEQ ID NO: 16677 - protein, 9 aa, synthetic construct
GSQGALHVK

SEQ ID NO: 16678 - protein, 9 aa, synthetic construct
GSQGALHVF

SEQ ID NO: 16679 - protein, 9 aa, synthetic construct
GSQGALRLF

SEQ ID NO: 16680 - protein, 9 aa, synthetic construct
GSQGALKLH

SEQ ID NO: 16681 - protein, 9 aa, synthetic construct
GSQGALKVY

SEQ ID NO: 16682 - protein, 9 aa, synthetic construct
GSQGALKVF

SEQ ID NO: 16683 - protein, 9 aa, synthetic construct
GSQGAAHVY

SEQ ID NO: 16684 - protein, 9 aa, synthetic construct
PLPAAVHVH

SEQ ID NO: 16685 - protein, 9 aa, synthetic construct
GSQGAARVY

SEQ ID NO: 16686 - protein, 9 aa, synthetic construct
GSQGAAKLY

SEQ ID NO: 16687 - protein, 9 aa, synthetic construct
GSQGAAKVH

SEQ ID NO: 16688 - protein, 9 aa, synthetic construct
GSQGAIHVK

SEQ ID NO: 16689 - protein, 9 aa, synthetic construct
GSQGAIHVF

SEQ ID NO: 16690 - protein, 9 aa, synthetic construct
GSQGAIRLY

SEQ ID NO: 16691 - protein, 9 aa, synthetic construct
GSQGAGRLH

SEQ ID NO: 16692 - protein, 9 aa, synthetic construct
GSQGAGRLF

SEQ ID NO: 16693 - protein, 9 aa, synthetic construct
GSQGTVHLY

SEQ ID NO: 16694 - protein, 9 aa, synthetic construct
GSQGTVHLH

SEQ ID NO: 16695 - protein, 9 aa, synthetic construct
GSQGTVHLK

SEQ ID NO: 16696 - protein, 9 aa, synthetic construct
GSQGTVHLF

SEQ ID NO: 16697 - protein, 9 aa, synthetic construct
GSQGTVHVH

SEQ ID NO: 16698 - protein, 9 aa, synthetic construct
GSQGTVHVK

SEQ ID NO: 16699 - protein, 9 aa, synthetic construct
GSQGTVRLY

SEQ ID NO: 16700 - protein, 9 aa, synthetic construct
GSQGTVRLH

SEQ ID NO: 16701 - protein, 9 aa, synthetic construct
GSQGTVRLF

SEQ ID NO: 16702 - protein, 9 aa, synthetic construct
GSQGTVRVH

SEQ ID NO: 16703 - protein, 9 aa, synthetic construct
GSQGTVKLR

SEQ ID NO: 16704 - protein, 9 aa, synthetic construct
GSQGTVKLH

SEQ ID NO: 16705 - protein, 9 aa, synthetic construct
GSQGTVKLK

SEQ ID NO: 16706 - protein, 9 aa, synthetic construct
GSQGTVKLF

SEQ ID NO: 16707 - protein, 9 aa, synthetic construct
GSQGTVKVY

SEQ ID NO: 16708 - protein, 9 aa, synthetic construct
GSQGTVKVH

SEQ ID NO: 16709 - protein, 9 aa, synthetic construct
GSQGTVKVF

SEQ ID NO: 16710 - protein, 9 aa, synthetic construct
GSQGTLHLK

SEQ ID NO: 16711 - protein, 9 aa, synthetic construct
GSQGTLHVY

SEQ ID NO: 16712 - protein, 9 aa, synthetic construct
PLPAAVRVF

SEQ ID NO: 16713 - protein, 9 aa, synthetic construct
GSQGTLRLF

SEQ ID NO: 16714 - protein, 9 aa, synthetic construct
GSQGTLRVF

SEQ ID NO: 16715 - protein, 9 aa, synthetic construct
PLNGSARVH

SEQ ID NO: 16716 - protein, 9 aa, synthetic construct
GSQGTLKLY

SEQ ID NO: 16717 - protein, 9 aa, synthetic construct
GSQGTLKVY

SEQ ID NO: 16718 - protein, 9 aa, synthetic construct
GSQGTAHLR

SEQ ID NO: 16719 - protein, 9 aa, synthetic construct
GSQGTAHLK

SEQ ID NO: 16720 - protein, 9 aa, synthetic construct
GSQGTAHLF

SEQ ID NO: 16721 - protein, 9 aa, synthetic construct
GSQGTAHVY

SEQ ID NO: 16722 - protein, 9 aa, synthetic construct
GSQGTAHVR

SEQ ID NO: 16723 - protein, 9 aa, synthetic construct
GSQGTAHVK

SEQ ID NO: 16724 - protein, 9 aa, synthetic construct
GSQGTAHVF

SEQ ID NO: 16725 - protein, 9 aa, synthetic construct
GSQGTARLH

SEQ ID NO: 16726 - protein, 9 aa, synthetic construct
GSQGTARLF

SEQ ID NO: 16727 - protein, 9 aa, synthetic construct
GSQGTAKLY

SEQ ID NO: 16728 - protein, 9 aa, synthetic construct
GSQGTAKLR

SEQ ID NO: 16729 - protein, 9 aa, synthetic construct
GSQGTAKLH

SEQ ID NO: 16730 - protein, 9 aa, synthetic construct
GSQGTAKLF

SEQ ID NO: 16731 - protein, 9 aa, synthetic construct
GSQGTAKVY

SEQ ID NO: 16732 - protein, 9 aa, synthetic construct
GSQGTAKVK

SEQ ID NO: 16733 - protein, 9 aa, synthetic construct
GSQGTIHLH

SEQ ID NO: 16734 - protein, 9 aa, synthetic construct
GSQGTIRLY

SEQ ID NO: 16735 - protein, 9 aa, synthetic construct
GSQGTIRLH

SEQ ID NO: 16736 - protein, 9 aa, synthetic construct
GSQGTIKLR

SEQ ID NO: 16737 - protein, 9 aa, synthetic construct
GSQGTIKVY

SEQ ID NO: 16738 - protein, 9 aa, synthetic construct
GSQGTGHLH

SEQ ID NO: 16739 - protein, 9 aa, synthetic construct
GSQGTGHLF

SEQ ID NO: 16740 - protein, 9 aa, synthetic construct
GSQGTGHVY

SEQ ID NO: 16741 - protein, 9 aa, synthetic construct
GSQGTGHVH

SEQ ID NO: 16742 - protein, 9 aa, synthetic construct
GSQGTGRLF

SEQ ID NO: 16743 - protein, 9 aa, synthetic construct
GSQGTGRVY

SEQ ID NO: 16744 - protein, 9 aa, synthetic construct
GSQGTGKLY

SEQ ID NO: 16745 - protein, 9 aa, synthetic construct
GSQGSVHLY

SEQ ID NO: 16746 - protein, 9 aa, synthetic construct
GSQGSVHLF

SEQ ID NO: 16747 - protein, 9 aa, synthetic construct
GSQGSVHVY

SEQ ID NO: 16748 - protein, 9 aa, synthetic construct
GSQGSVRVY

SEQ ID NO: 16749 - protein, 9 aa, synthetic construct
GSQGSVKLY

SEQ ID NO: 16750 - protein, 9 aa, synthetic construct
GSQGSVKVY

SEQ ID NO: 16751 - protein, 9 aa, synthetic construct
GSQGSVKVF

SEQ ID NO: 16752 - protein, 9 aa, synthetic construct
GSQGSAHVR

SEQ ID NO: 16753 - protein, 9 aa, synthetic construct
GSQGSARVY

SEQ ID NO: 16754 - protein, 9 aa, synthetic construct
GSQGSARVF

SEQ ID NO: 16755 - protein, 9 aa, synthetic construct
GSQGSAKVF

SEQ ID NO: 16756 - protein, 9 aa, synthetic construct
GSQGSIRVY

SEQ ID NO: 16757 - protein, 9 aa, synthetic construct
GSQGSIKLR

SEQ ID NO: 16758 - protein, 9 aa, synthetic construct
GSQGSIKVR

SEQ ID NO: 16759 - protein, 9 aa, synthetic construct
GSQGSGRVK

SEQ ID NO: 16760 - protein, 9 aa, synthetic construct
GSQGVVHVH

SEQ ID NO: 16761 - protein, 9 aa, synthetic construct
GSQGVVRVY

SEQ ID NO: 16762 - protein, 9 aa, synthetic construct
GSQGVVRVH

SEQ ID NO: 16763 - protein, 9 aa, synthetic construct
GSQGVVKLF

SEQ ID NO: 16764 - protein, 9 aa, synthetic construct
GSQGVLHVH

SEQ ID NO: 16765 - protein, 9 aa, synthetic construct
PLNGSAKLY

SEQ ID NO: 16766 - protein, 9 aa, synthetic construct
GSQGVLKLH

SEQ ID NO: 16767 - protein, 9 aa, synthetic construct
GSQGVAHLF

SEQ ID NO: 16768 - protein, 9 aa, synthetic construct
PLPAALKLK

SEQ ID NO: 16769 - protein, 9 aa, synthetic construct
GSQGVIRLY

SEQ ID NO: 16770 - protein, 9 aa, synthetic construct
GSQGVIRVF

SEQ ID NO: 16771 - protein, 9 aa, synthetic construct
GSQGVGRVY

SEQ ID NO: 16772 - protein, 9 aa, synthetic construct
PLNGSAKLR

SEQ ID NO: 16773 - protein, 9 aa, synthetic construct
GSQGGVHVF

SEQ ID NO: 16774 - protein, 9 aa, synthetic construct
PLPAAAHLR

SEQ ID NO: 16775 - protein, 9 aa, synthetic construct
GSQGGAHVF

SEQ ID NO: 16776 - protein, 9 aa, synthetic construct
GSQGGIHLY

SEQ ID NO: 16777 - protein, 9 aa, synthetic construct
PLPAAARLY

SEQ ID NO: 16778 - protein, 9 aa, synthetic construct
PLPAAARLR

SEQ ID NO: 16779 - protein, 9 aa, synthetic construct
GSQGGIKLH

SEQ ID NO: 16780 - protein, 9 aa, synthetic construct
PLPAAARLF

SEQ ID NO: 16781 - protein, 9 aa, synthetic construct
PLPAAARVY

SEQ ID NO: 16782 - protein, 9 aa, synthetic construct
PLPAAARVR

SEQ ID NO: 16783 - protein, 9 aa, synthetic construct
GSQAAVKVY

SEQ ID NO: 16784 - protein, 9 aa, synthetic construct
PLPAAAKLY

SEQ ID NO: 16785 - protein, 9 aa, synthetic construct
PLPAAAKLR

SEQ ID NO: 16786 - protein, 9 aa, synthetic construct
GSQAAAHVH

SEQ ID NO: 16787 - protein, 9 aa, synthetic construct
GSQAAAHVK

SEQ ID NO: 16788 - protein, 9 aa, synthetic construct
GSQAAARVF

SEQ ID NO: 16789 - protein, 9 aa, synthetic construct
GSQAAIRVH

SEQ ID NO: 16790 - protein, 9 aa, synthetic construct
GSQAAIKVH

SEQ ID NO: 16791 - protein, 9 aa, synthetic construct
PLPAAAKVH

SEQ ID NO: 16792 - protein, 9 aa, synthetic construct
GSQAAGHLK

SEQ ID NO: 16793 - protein, 9 aa, synthetic construct
GSQAAGHVH

SEQ ID NO: 16794 - protein, 9 aa, synthetic construct
GSQAAGRLH

SEQ ID NO: 16795 - protein, 9 aa, synthetic construct
PLPAAAKVF

SEQ ID NO: 16796 - protein, 9 aa, synthetic construct
GSQAAGKLF

SEQ ID NO: 16797 - protein, 9 aa, synthetic construct
GSQATVHLY

SEQ ID NO: 16798 - protein, 9 aa, synthetic construct
GSQATVHLR

SEQ ID NO: 16799 - protein, 9 aa, synthetic construct
GSQATVHLH

SEQ ID NO: 16800 - protein, 9 aa, synthetic construct
GSQATVHLK

SEQ ID NO: 16801 - protein, 9 aa, synthetic construct
GSQATVKLY

SEQ ID NO: 16802 - protein, 9 aa, synthetic construct
GSQATVKVY

SEQ ID NO: 16803 - protein, 9 aa, synthetic construct
PLPAAIHLK

SEQ ID NO: 16804 - protein, 9 aa, synthetic construct
PLPAAIHLF

SEQ ID NO: 16805 - protein, 9 aa, synthetic construct
GSQATLRLF

SEQ ID NO: 16806 - protein, 9 aa, synthetic construct
GSQATAHLY

SEQ ID NO: 16807 - protein, 9 aa, synthetic construct
GSQATAHLH

SEQ ID NO: 16808 - protein, 9 aa, synthetic construct
GSQATAHVY

SEQ ID NO: 16809 - protein, 9 aa, synthetic construct
GSQATAHVH

SEQ ID NO: 16810 - protein, 9 aa, synthetic construct
GSQATAHVK

SEQ ID NO: 16811 - protein, 9 aa, synthetic construct
GSQATARLH

SEQ ID NO: 16812 - protein, 9 aa, synthetic construct
GSQATARVY

SEQ ID NO: 16813 - protein, 9 aa, synthetic construct
GSQATARVF

SEQ ID NO: 16814 - protein, 9 aa, synthetic construct
GSQATAKVY

SEQ ID NO: 16815 - protein, 9 aa, synthetic construct
GSQATIHLH

SEQ ID NO: 16816 - protein, 9 aa, synthetic construct
GSQATIHLK

SEQ ID NO: 16817 - protein, 9 aa, synthetic construct
PLNGSAKVY

SEQ ID NO: 16818 - protein, 9 aa, synthetic construct
PLPAAIRLR

SEQ ID NO: 16819 - protein, 9 aa, synthetic construct
GSQATGHLH

SEQ ID NO: 16820 - protein, 9 aa, synthetic construct
GSQATGHVH

SEQ ID NO: 16821 - protein, 9 aa, synthetic construct
GSQATGRVK

SEQ ID NO: 16822 - protein, 9 aa, synthetic construct
GSQATGKVY

SEQ ID NO: 16823 - protein, 9 aa, synthetic construct
GSQASVHLY

SEQ ID NO: 16824 - protein, 9 aa, synthetic construct
GSQASVHVY

SEQ ID NO: 16825 - protein, 9 aa, synthetic construct
GSQASVHVK

SEQ ID NO: 16826 - protein, 9 aa, synthetic construct
GSQASVRVY

SEQ ID NO: 16827 - protein, 9 aa, synthetic construct
PLPAAIRVH

SEQ ID NO: 16828 - protein, 9 aa, synthetic construct
GSQASVKVF

SEQ ID NO: 16829 - protein, 9 aa, synthetic construct
GSQASLHLY

SEQ ID NO: 16830 - protein, 9 aa, synthetic construct
GSQASLKLY

SEQ ID NO: 16831 - protein, 9 aa, synthetic construct
GSQASAHLF

SEQ ID NO: 16832 - protein, 9 aa, synthetic construct
GSQASAHVY

SEQ ID NO: 16833 - protein, 9 aa, synthetic construct
GSQASARVY

SEQ ID NO: 16834 - protein, 9 aa, synthetic construct
GSQASARVR

SEQ ID NO: 16835 - protein, 9 aa, synthetic construct
GSQASARVH

SEQ ID NO: 16836 - protein, 9 aa, synthetic construct
GSQASARVK

SEQ ID NO: 16837 - protein, 9 aa, synthetic construct
GSQASARVF

SEQ ID NO: 16838 - protein, 9 aa, synthetic construct
GSQASAKLR

SEQ ID NO: 16839 - protein, 9 aa, synthetic construct
GSQASAKVF

SEQ ID NO: 16840 - protein, 9 aa, synthetic construct
PLPAAIKVY

SEQ ID NO: 16841 - protein, 9 aa, synthetic construct
GSQASIKLR

SEQ ID NO: 16842 - protein, 9 aa, synthetic construct
GSQASIKVR

SEQ ID NO: 16843 - protein, 9 aa, synthetic construct
GSQASIKVH

SEQ ID NO: 16844 - protein, 9 aa, synthetic construct
GSQASGHLR

SEQ ID NO: 16845 - protein, 9 aa, synthetic construct
GSQASGHLH

SEQ ID NO: 16846 - protein, 9 aa, synthetic construct
GSQASGHLK

SEQ ID NO: 16847 - protein, 9 aa, synthetic construct
GSQASGHVH

SEQ ID NO: 16848 - protein, 9 aa, synthetic construct
GSQASGHVF

SEQ ID NO: 16849 - protein, 9 aa, synthetic construct
GSQASGRLR

SEQ ID NO: 16850 - protein, 9 aa, synthetic construct
GSQASGRLH

SEQ ID NO: 16851 - protein, 9 aa, synthetic construct
GSQASGRLF

SEQ ID NO: 16852 - protein, 9 aa, synthetic construct
GSQASGRVY

SEQ ID NO: 16853 - protein, 9 aa, synthetic construct
GSQASGRVH

SEQ ID NO: 16854 - protein, 9 aa, synthetic construct
GSQASGRVF

SEQ ID NO: 16855 - protein, 9 aa, synthetic construct
PLPAAIKVF

SEQ ID NO: 16856 - protein, 9 aa, synthetic construct
GSQASGKVH

SEQ ID NO: 16857 - protein, 9 aa, synthetic construct
GSQASGKVK

SEQ ID NO: 16858 - protein, 9 aa, synthetic construct
GSQASGKVF

SEQ ID NO: 16859 - protein, 9 aa, synthetic construct
PLPAAGHLF

SEQ ID NO: 16860 - protein, 9 aa, synthetic construct
GSQAVLKLY

SEQ ID NO: 16861 - protein, 9 aa, synthetic construct
GSQAVAKLF

SEQ ID NO: 16862 - protein, 9 aa, synthetic construct
GSQAVIRVH

SEQ ID NO: 16863 - protein, 9 aa, synthetic construct
PLPAAGRLH

SEQ ID NO: 16864 - protein, 9 aa, synthetic construct
GSQAVGRVH

SEQ ID NO: 16865 - protein, 9 aa, synthetic construct
GSQAGVHVF

SEQ ID NO: 16866 - protein, 9 aa, synthetic construct
GSQAGARVR

SEQ ID NO: 16867 - protein, 9 aa, synthetic construct
GSQAGAKLR

SEQ ID NO: 16868 - protein, 9 aa, synthetic construct
GSQAGAKLH

SEQ ID NO: 16869 - protein, 9 aa, synthetic construct
GSQAGIHLF

SEQ ID NO: 16870 - protein, 9 aa, synthetic construct
GSQAGIHVY

SEQ ID NO: 16871 - protein, 9 aa, synthetic construct
GSQAGIHVK

SEQ ID NO: 16872 - protein, 9 aa, synthetic construct
PLPAAGKVY

SEQ ID NO: 16873 - protein, 9 aa, synthetic construct
GSQAGIRVH

SEQ ID NO: 16874 - protein, 9 aa, synthetic construct
GSQAGGHLR

SEQ ID NO: 16875 - protein, 9 aa, synthetic construct
GSQAGGHLH

SEQ ID NO: 16876 - protein, 9 aa, synthetic construct
GSQAGGHLK

SEQ ID NO: 16877 - protein, 9 aa, synthetic construct
GSQAGGRVH

SEQ ID NO: 16878 - protein, 9 aa, synthetic construct
GSQAGGRVK

SEQ ID NO: 16879 - protein, 9 aa, synthetic construct
PLNGSIHLY

SEQ ID NO: 16880 - protein, 9 aa, synthetic construct
PLPATVHLY

SEQ ID NO: 16881 - protein, 9 aa, synthetic construct
PLPATVHLH

SEQ ID NO: 16882 - protein, 9 aa, synthetic construct
PLPATVHLK

SEQ ID NO: 16883 - protein, 9 aa, synthetic construct
GSPGAAHLY

SEQ ID NO: 16884 - protein, 9 aa, synthetic construct
GSPGAAHVH

SEQ ID NO: 16885 - protein, 9 aa, synthetic construct
GSPGAARVY

SEQ ID NO: 16886 - protein, 9 aa, synthetic construct
GSPGAAKVH

SEQ ID NO: 16887 - protein, 9 aa, synthetic construct
GSPGAAKVF

SEQ ID NO: 16888 - protein, 9 aa, synthetic construct
GSPGAIKLH

SEQ ID NO: 16889 - protein, 9 aa, synthetic construct
GSPGTVHLR

SEQ ID NO: 16890 - protein, 9 aa, synthetic construct
GSPGTVHLH

SEQ ID NO: 16891 - protein, 9 aa, synthetic construct
GSPGTVRVH

SEQ ID NO: 16892 - protein, 9 aa, synthetic construct
GSPGTVKLY

SEQ ID NO: 16893 - protein, 9 aa, synthetic construct
PLNGSIHLH

SEQ ID NO: 16894 - protein, 9 aa, synthetic construct
GSPGTLKLH

SEQ ID NO: 16895 - protein, 9 aa, synthetic construct
GSPGTAHLF

SEQ ID NO: 16896 - protein, 9 aa, synthetic construct
GSPGTAHVR

SEQ ID NO: 16897 - protein, 9 aa, synthetic construct
GSPGTARLH

SEQ ID NO: 16898 - protein, 9 aa, synthetic construct
GSPGTARVY

SEQ ID NO: 16899 - protein, 9 aa, synthetic construct
GSPGTARVF

SEQ ID NO: 16900 - protein, 9 aa, synthetic construct
GSPGTAKLY

SEQ ID NO: 16901 - protein, 9 aa, synthetic construct
GSPGTAKLR

SEQ ID NO: 16902 - protein, 9 aa, synthetic construct
GSPGTAKVY

SEQ ID NO: 16903 - protein, 9 aa, synthetic construct
GSPGTAKVH

SEQ ID NO: 16904 - protein, 9 aa, synthetic construct
GSPGTIHLH

SEQ ID NO: 16905 - protein, 9 aa, synthetic construct
GSPGTIHLK

SEQ ID NO: 16906 - protein, 9 aa, synthetic construct
GSPGTIHVK

SEQ ID NO: 16907 - protein, 9 aa, synthetic construct
PLPATVKVY

SEQ ID NO: 16908 - protein, 9 aa, synthetic construct
GSPGTIKVY

SEQ ID NO: 16909 - protein, 9 aa, synthetic construct
GSPGTGHLH

SEQ ID NO: 16910 - protein, 9 aa, synthetic construct
GSPGTGHLF

SEQ ID NO: 16911 - protein, 9 aa, synthetic construct
GSPGTGKVY

SEQ ID NO: 16912 - protein, 9 aa, synthetic construct
GSPGSVRLR

SEQ ID NO: 16913 - protein, 9 aa, synthetic construct
GSPGSVKLR

SEQ ID NO: 16914 - protein, 9 aa, synthetic construct
GSPGSVKLH

SEQ ID NO: 16915 - protein, 9 aa, synthetic construct
GSPGSVKLK

SEQ ID NO: 16916 - protein, 9 aa, synthetic construct
GSPGSVKVH

SEQ ID NO: 16917 - protein, 9 aa, synthetic construct
GSPGSVKVF

SEQ ID NO: 16918 - protein, 9 aa, synthetic construct
GSPGSAHLK

SEQ ID NO: 16919 - protein, 9 aa, synthetic construct
GSPGSAHLF

SEQ ID NO: 16920 - protein, 9 aa, synthetic construct
GSPGSAHVR

SEQ ID NO: 16921 - protein, 9 aa, synthetic construct
GSPGSAHVK

SEQ ID NO: 16922 - protein, 9 aa, synthetic construct
GSPGSARVF

SEQ ID NO: 16923 - protein, 9 aa, synthetic construct
GSPGSIKLH

SEQ ID NO: 16924 - protein, 9 aa, synthetic construct
GSPGSIKLF

SEQ ID NO: 16925 - protein, 9 aa, synthetic construct
PLPATLRLK

SEQ ID NO: 16926 - protein, 9 aa, synthetic construct
GSPGVVHVY

SEQ ID NO: 16927 - protein, 9 aa, synthetic construct
GSPGVVHVH

SEQ ID NO: 16928 - protein, 9 aa, synthetic construct
GSPGVLHVK

SEQ ID NO: 16929 - protein, 9 aa, synthetic construct
PLNGSIHVY

SEQ ID NO: 16930 - protein, 9 aa, synthetic construct
PLPATLKLY

SEQ ID NO: 16931 - protein, 9 aa, synthetic construct
PLPATLKLR

SEQ ID NO: 16932 - protein, 9 aa, synthetic construct
GSPGVAHLH

SEQ ID NO: 16933 - protein, 9 aa, synthetic construct
PLPATLKLH

SEQ ID NO: 16934 - protein, 9 aa, synthetic construct
PLPATLKLF

SEQ ID NO: 16935 - protein, 9 aa, synthetic construct
GSPGVIHLK

SEQ ID NO: 16936 - protein, 9 aa, synthetic construct
PLPATLKVK

SEQ ID NO: 16937 - protein, 9 aa, synthetic construct
GSPGGVHLK

SEQ ID NO: 16938 - protein, 9 aa, synthetic construct
GSPGGVKLR

SEQ ID NO: 16939 - protein, 9 aa, synthetic construct
PLPATAHLF

SEQ ID NO: 16940 - protein, 9 aa, synthetic construct
PLPATAHVY

SEQ ID NO: 16941 - protein, 9 aa, synthetic construct
GSPGGAHLH

SEQ ID NO: 16942 - protein, 9 aa, synthetic construct
GSPGGAHVF

SEQ ID NO: 16943 - protein, 9 aa, synthetic construct
PLPATAHVK

SEQ ID NO: 16944 - protein, 9 aa, synthetic construct
GSPGGIRLH

SEQ ID NO: 16945 - protein, 9 aa, synthetic construct
GSPGGIKLY

SEQ ID NO: 16946 - protein, 9 aa, synthetic construct
GSPGGIKLR

SEQ ID NO: 16947 - protein, 9 aa, synthetic construct
GSPGGIKLF

SEQ ID NO: 16948 - protein, 9 aa, synthetic construct
GSPGGIKVH

SEQ ID NO: 16949 - protein, 9 aa, synthetic construct
PLPATARLH

SEQ ID NO: 16950 - protein, 9 aa, synthetic construct
GSPGGGRVY

SEQ ID NO: 16951 - protein, 9 aa, synthetic construct
PLPATARVY

SEQ ID NO: 16952 - protein, 9 aa, synthetic construct
GSPAAVHLH

SEQ ID NO: 16953 - protein, 9 aa, synthetic construct
GSPAAVKVY

SEQ ID NO: 16954 - protein, 9 aa, synthetic construct
PLPATAKLR

SEQ ID NO: 16955 - protein, 9 aa, synthetic construct
GSPAAAHLH

SEQ ID NO: 16956 - protein, 9 aa, synthetic construct
GSPAAARVY

SEQ ID NO: 16957 - protein, 9 aa, synthetic construct
GSPAAAKLH

SEQ ID NO: 16958 - protein, 9 aa, synthetic construct
GSPAAIHLF

SEQ ID NO: 16959 - protein, 9 aa, synthetic construct
GSPAAIRLR

SEQ ID NO: 16960 - protein, 9 aa, synthetic construct
GSPAAIKLF

SEQ ID NO: 16961 - protein, 9 aa, synthetic construct
GSPAAIKVY

SEQ ID NO: 16962 - protein, 9 aa, synthetic construct
GSPAAIKVF

SEQ ID NO: 16963 - protein, 9 aa, synthetic construct
PLPATAKVH

SEQ ID NO: 16964 - protein, 9 aa, synthetic construct
GSPAAGHLK

SEQ ID NO: 16965 - protein, 9 aa, synthetic construct
GSPAAGHLF

SEQ ID NO: 16966 - protein, 9 aa, synthetic construct
GSPAAGRLH

SEQ ID NO: 16967 - protein, 9 aa, synthetic construct
GSPAAGKVY

SEQ ID NO: 16968 - protein, 9 aa, synthetic construct
GSPAAGKVF

SEQ ID NO: 16969 - protein, 9 aa, synthetic construct
GSPATVHLY

SEQ ID NO: 16970 - protein, 9 aa, synthetic construct
GSPATVHLK

SEQ ID NO: 16971 - protein, 9 aa, synthetic construct
GSPATVHVH

SEQ ID NO: 16972 - protein, 9 aa, synthetic construct
PLPATIHLR

SEQ ID NO: 16973 - protein, 9 aa, synthetic construct
PLPATIHLH

SEQ ID NO: 16974 - protein, 9 aa, synthetic construct
GSPATVKVY

SEQ ID NO: 16975 - protein, 9 aa, synthetic construct
GSPATLHLY

SEQ ID NO: 16976 - protein, 9 aa, synthetic construct
PLPATIHLF

SEQ ID NO: 16977 - protein, 9 aa, synthetic construct
GSPATLRLF

SEQ ID NO: 16978 - protein, 9 aa, synthetic construct
GSPATLRVF

SEQ ID NO: 16979 - protein, 9 aa, synthetic construct
PLPATIHVY

SEQ ID NO: 16980 - protein, 9 aa, synthetic construct
GSPATLKLK

SEQ ID NO: 16981 - protein, 9 aa, synthetic construct
GSPATAHLR

SEQ ID NO: 16982 - protein, 9 aa, synthetic construct
GSPATAHLH

SEQ ID NO: 16983 - protein, 9 aa, synthetic construct
GSPATAHLF

SEQ ID NO: 16984 - protein, 9 aa, synthetic construct
GSPATAHVH

SEQ ID NO: 16985 - protein, 9 aa, synthetic construct
GSPATARLH

SEQ ID NO: 16986 - protein, 9 aa, synthetic construct
GSPATAKLR

SEQ ID NO: 16987 - protein, 9 aa, synthetic construct
GSPATAKLH

SEQ ID NO: 16988 - protein, 9 aa, synthetic construct
GSPATAKVF

SEQ ID NO: 16989 - protein, 9 aa, synthetic construct
PLPATIHVF

SEQ ID NO: 16990 - protein, 9 aa, synthetic construct
PLNGALRLY

SEQ ID NO: 16991 - protein, 9 aa, synthetic construct
GSPATIRLF

SEQ ID NO: 16992 - protein, 9 aa, synthetic construct
GSPATIKLY

SEQ ID NO: 16993 - protein, 9 aa, synthetic construct
GSPATIKLF

SEQ ID NO: 16994 - protein, 9 aa, synthetic construct
GSPATIKVY

SEQ ID NO: 16995 - protein, 9 aa, synthetic construct
GSPATGHLY

SEQ ID NO: 16996 - protein, 9 aa, synthetic construct
GSPATGHLR

SEQ ID NO: 16997 - protein, 9 aa, synthetic construct
GSPATGHLH

SEQ ID NO: 16998 - protein, 9 aa, synthetic construct
GSPATGHLK

SEQ ID NO: 16999 - protein, 9 aa, synthetic construct
GSPATGHLF

SEQ ID NO: 17000 - protein, 9 aa, synthetic construct
GSPATGHVK

SEQ ID NO: 17001 - protein, 9 aa, synthetic construct
GSPATGHVF

SEQ ID NO: 17002 - protein, 9 aa, synthetic construct
GSPATGRLH

SEQ ID NO: 17003 - protein, 9 aa, synthetic construct
GSPATGRLF

SEQ ID NO: 17004 - protein, 9 aa, synthetic construct
GSPATGRVY

SEQ ID NO: 17005 - protein, 9 aa, synthetic construct
GSPATGRVK

SEQ ID NO: 17006 - protein, 9 aa, synthetic construct
GSPATGKLY

SEQ ID NO: 17007 - protein, 9 aa, synthetic construct
GSPATGKLR

SEQ ID NO: 17008 - protein, 9 aa, synthetic construct
GSPATGKLH

SEQ ID NO: 17009 - protein, 9 aa, synthetic construct
GSPATGKVR

SEQ ID NO: 17010 - protein, 9 aa, synthetic construct
GSPATGKVH

SEQ ID NO: 17011 - protein, 9 aa, synthetic construct
GSPATGKVK

SEQ ID NO: 17012 - protein, 9 aa, synthetic construct
GSPATGKVF

SEQ ID NO: 17013 - protein, 9 aa, synthetic construct
GSPASVHLF

SEQ ID NO: 17014 - protein, 9 aa, synthetic construct
GSPASVHVK

SEQ ID NO: 17015 - protein, 9 aa, synthetic construct
PLPATIRVH

SEQ ID NO: 17016 - protein, 9 aa, synthetic construct
GSPASVKLF

SEQ ID NO: 17017 - protein, 9 aa, synthetic construct
GSPASVKVF

SEQ ID NO: 17018 - protein, 9 aa, synthetic construct
GSPASLHLR

SEQ ID NO: 17019 - protein, 9 aa, synthetic construct
GSPASLHLH

SEQ ID NO: 17020 - protein, 9 aa, synthetic construct
GSPASLHLK

SEQ ID NO: 17021 - protein, 9 aa, synthetic construct
GSPASLHLF

SEQ ID NO: 17022 - protein, 9 aa, synthetic construct
GSPASLHVH

SEQ ID NO: 17023 - protein, 9 aa, synthetic construct
GSPASLHVK

SEQ ID NO: 17024 - protein, 9 aa, synthetic construct
GSPASLKLY

SEQ ID NO: 17025 - protein, 9 aa, synthetic construct
GSPASAHLR

SEQ ID NO: 17026 - protein, 9 aa, synthetic construct
GSPASAHLK

SEQ ID NO: 17027 - protein, 9 aa, synthetic construct
GSPASAHLF

SEQ ID NO: 17028 - protein, 9 aa, synthetic construct
GSPASAHVR

SEQ ID NO: 17029 - protein, 9 aa, synthetic construct
GSPASAHVK

SEQ ID NO: 17030 - protein, 9 aa, synthetic construct
GSPASAHVF

SEQ ID NO: 17031 - protein, 9 aa, synthetic construct
GSPASARLH

SEQ ID NO: 17032 - protein, 9 aa, synthetic construct
GSPASARVY

SEQ ID NO: 17033 - protein, 9 aa, synthetic construct
GSPASARVR

SEQ ID NO: 17034 - protein, 9 aa, synthetic construct
GSPASARVH

SEQ ID NO: 17035 - protein, 9 aa, synthetic construct
GSPASARVF

SEQ ID NO: 17036 - protein, 9 aa, synthetic construct
GSPASAKLF

SEQ ID NO: 17037 - protein, 9 aa, synthetic construct
GSPASAKVY

SEQ ID NO: 17038 - protein, 9 aa, synthetic construct
GSPASAKVK

SEQ ID NO: 17039 - protein, 9 aa, synthetic construct
GSPASAKVF

SEQ ID NO: 17040 - protein, 9 aa, synthetic construct
PLPATIKLF

SEQ ID NO: 17041 - protein, 9 aa, synthetic construct
GSPASIHLK

SEQ ID NO: 17042 - protein, 9 aa, synthetic construct
GSPASIHVY

SEQ ID NO: 17043 - protein, 9 aa, synthetic construct
PLPATIKVY

SEQ ID NO: 17044 - protein, 9 aa, synthetic construct
GSPASGHLR

SEQ ID NO: 17045 - protein, 9 aa, synthetic construct
GSPASGHLK

SEQ ID NO: 17046 - protein, 9 aa, synthetic construct
GSPASGHVH

SEQ ID NO: 17047 - protein, 9 aa, synthetic construct
GSPASGHVF

SEQ ID NO: 17048 - protein, 9 aa, synthetic construct
GSPASGRVK

SEQ ID NO: 17049 - protein, 9 aa, synthetic construct
GSPASGRVF

SEQ ID NO: 17050 - protein, 9 aa, synthetic construct
GSPASGKVY

SEQ ID NO: 17051 - protein, 9 aa, synthetic construct
GSPAVVHVH

SEQ ID NO: 17052 - protein, 9 aa, synthetic construct
GSPAVVRVH

SEQ ID NO: 17053 - protein, 9 aa, synthetic construct
GSPAVVKLF

SEQ ID NO: 17054 - protein, 9 aa, synthetic construct
PLPATGHLF

SEQ ID NO: 17055 - protein, 9 aa, synthetic construct
GSPAVLKLY

SEQ ID NO: 17056 - protein, 9 aa, synthetic construct
GSPAVAKLF

SEQ ID NO: 17057 - protein, 9 aa, synthetic construct
GSPAVIKVH

SEQ ID NO: 17058 - protein, 9 aa, synthetic construct
GSPAVGRVH

SEQ ID NO: 17059 - protein, 9 aa, synthetic construct
GSPAGVKLF

SEQ ID NO: 17060 - protein, 9 aa, synthetic construct
GSPAGAHLY

SEQ ID NO: 17061 - protein, 9 aa, synthetic construct
GSPAGAHLR

SEQ ID NO: 17062 - protein, 9 aa, synthetic construct
GSPAGARVR

SEQ ID NO: 17063 - protein, 9 aa, synthetic construct
GSPAGAKLR

SEQ ID NO: 17064 - protein, 9 aa, synthetic construct
PLPATGKLF

SEQ ID NO: 17065 - protein, 9 aa, synthetic construct
GSPAGIKLH

SEQ ID NO: 17066 - protein, 9 aa, synthetic construct
PLPASVHVY

SEQ ID NO: 17067 - protein, 9 aa, synthetic construct
GANGAAHVH

SEQ ID NO: 17068 - protein, 9 aa, synthetic construct
GANGAIHVF

SEQ ID NO: 17069 - protein, 9 aa, synthetic construct
GANGAGHLH

SEQ ID NO: 17070 - protein, 9 aa, synthetic construct
GANGAGKVF

SEQ ID NO: 17071 - protein, 9 aa, synthetic construct
GANGTVHLH

SEQ ID NO: 17072 - protein, 9 aa, synthetic construct
GANGTVHLK

SEQ ID NO: 17073 - protein, 9 aa, synthetic construct
GANGTVRLY

SEQ ID NO: 17074 - protein, 9 aa, synthetic construct
GANGTVKLY

SEQ ID NO: 17075 - protein, 9 aa, synthetic construct
GANGTVKLH

SEQ ID NO: 17076 - protein, 9 aa, synthetic construct
GANGTVKLF

SEQ ID NO: 17077 - protein, 9 aa, synthetic construct
GANGTVKVY

SEQ ID NO: 17078 - protein, 9 aa, synthetic construct
GANGTLHLK

SEQ ID NO: 17079 - protein, 9 aa, synthetic construct
GANGTLRLY

SEQ ID NO: 17080 - protein, 9 aa, synthetic construct
GANGTLRVR

SEQ ID NO: 17081 - protein, 9 aa, synthetic construct
GANGTLRVF

SEQ ID NO: 17082 - protein, 9 aa, synthetic construct
GANGTLKVK

SEQ ID NO: 17083 - protein, 9 aa, synthetic construct
GANGTLKVF

SEQ ID NO: 17084 - protein, 9 aa, synthetic construct
GANGTAHLY

SEQ ID NO: 17085 - protein, 9 aa, synthetic construct
GANGTAHLR

SEQ ID NO: 17086 - protein, 9 aa, synthetic construct
GANGTAHLH

SEQ ID NO: 17087 - protein, 9 aa, synthetic construct
GANGTAHLF

SEQ ID NO: 17088 - protein, 9 aa, synthetic construct
GANGTAHVK

SEQ ID NO: 17089 - protein, 9 aa, synthetic construct
GANGTAHVF

SEQ ID NO: 17090 - protein, 9 aa, synthetic construct
GANGTARVY

SEQ ID NO: 17091 - protein, 9 aa, synthetic construct
GANGTARVH

SEQ ID NO: 17092 - protein, 9 aa, synthetic construct
GANGTARVK

SEQ ID NO: 17093 - protein, 9 aa, synthetic construct
GANGTARVF

SEQ ID NO: 17094 - protein, 9 aa, synthetic construct
GANGTAKLR

SEQ ID NO: 17095 - protein, 9 aa, synthetic construct
GANGTAKLH

SEQ ID NO: 17096 - protein, 9 aa, synthetic construct
GANGTAKVY

SEQ ID NO: 17097 - protein, 9 aa, synthetic construct
GANGTAKVR

SEQ ID NO: 17098 - protein, 9 aa, synthetic construct
GANGTAKVH

SEQ ID NO: 17099 - protein, 9 aa, synthetic construct
GANGTIHLH

SEQ ID NO: 17100 - protein, 9 aa, synthetic construct
GANGTIHLK

SEQ ID NO: 17101 - protein, 9 aa, synthetic construct
GANGTIHVK

SEQ ID NO: 17102 - protein, 9 aa, synthetic construct
GANGTIHVF

SEQ ID NO: 17103 - protein, 9 aa, synthetic construct
GANGTIKLR

SEQ ID NO: 17104 - protein, 9 aa, synthetic construct
GANGTIKVY

SEQ ID NO: 17105 - protein, 9 aa, synthetic construct
GANGTGHLY

SEQ ID NO: 17106 - protein, 9 aa, synthetic construct
GANGTGHLH

SEQ ID NO: 17107 - protein, 9 aa, synthetic construct
GANGTGHLF

SEQ ID NO: 17108 - protein, 9 aa, synthetic construct
GANGTGHVH

SEQ ID NO: 17109 - protein, 9 aa, synthetic construct
GANGTGKVH

SEQ ID NO: 17110 - protein, 9 aa, synthetic construct
GANGTGKVF

SEQ ID NO: 17111 - protein, 9 aa, synthetic construct
PLNGSIRVK

SEQ ID NO: 17112 - protein, 9 aa, synthetic construct
PLPASLHLY

SEQ ID NO: 17113 - protein, 9 aa, synthetic construct
GANGSVHLF

SEQ ID NO: 17114 - protein, 9 aa, synthetic construct
GANGSVHVF

SEQ ID NO: 17115 - protein, 9 aa, synthetic construct
GANGSAHVH

SEQ ID NO: 17116 - protein, 9 aa, synthetic construct
GANGSARVY

SEQ ID NO: 17117 - protein, 9 aa, synthetic construct
GANGSAKVY

SEQ ID NO: 17118 - protein, 9 aa, synthetic construct
GANGSIHLH

SEQ ID NO: 17119 - protein, 9 aa, synthetic construct
GANGVLHVK

SEQ ID NO: 17120 - protein, 9 aa, synthetic construct
GANGVLKVH

SEQ ID NO: 17121 - protein, 9 aa, synthetic construct
GANGVAHVH

SEQ ID NO: 17122 - protein, 9 aa, synthetic construct
PLPASLKLK

SEQ ID NO: 17123 - protein, 9 aa, synthetic construct
GANGVIHLK

SEQ ID NO: 17124 - protein, 9 aa, synthetic construct
GANGVGKLH

SEQ ID NO: 17125 - protein, 9 aa, synthetic construct
PLNGSIKLR

SEQ ID NO: 17126 - protein, 9 aa, synthetic construct
PLPASAHLH

SEQ ID NO: 17127 - protein, 9 aa, synthetic construct
PLPASAHLF

SEQ ID NO: 17128 - protein, 9 aa, synthetic construct
PLPASAHVY

SEQ ID NO: 17129 - protein, 9 aa, synthetic construct
GANGGAHLH

SEQ ID NO: 17130 - protein, 9 aa, synthetic construct
GANGGAHVF

SEQ ID NO: 17131 - protein, 9 aa, synthetic construct
PLPASAHVH

SEQ ID NO: 17132 - protein, 9 aa, synthetic construct
GANGGAKVY

SEQ ID NO: 17133 - protein, 9 aa, synthetic construct
GANGGIRLY

SEQ ID NO: 17134 - protein, 9 aa, synthetic construct
GANGGIRLH

SEQ ID NO: 17135 - protein, 9 aa, synthetic construct
GANGGIKLH

SEQ ID NO: 17136 - protein, 9 aa, synthetic construct
GANGGIKVR

SEQ ID NO: 17137 - protein, 9 aa, synthetic construct
GANGGGKLH

SEQ ID NO: 17138 - protein, 9 aa, synthetic construct
GANGGGKLF

SEQ ID NO: 17139 - protein, 9 aa, synthetic construct
PLPASARVY

SEQ ID NO: 17140 - protein, 9 aa, synthetic construct
PLPASARVR

SEQ ID NO: 17141 - protein, 9 aa, synthetic construct
PLPASARVH

SEQ ID NO: 17142 - protein, 9 aa, synthetic construct
PLPASAKLR

SEQ ID NO: 17143 - protein, 9 aa, synthetic construct
GANAAAHLH

SEQ ID NO: 17144 - protein, 9 aa, synthetic construct
GANAAARLH

SEQ ID NO: 17145 - protein, 9 aa, synthetic construct
GANAAAKLY

SEQ ID NO: 17146 - protein, 9 aa, synthetic construct
GANAAAKLH

SEQ ID NO: 17147 - protein, 9 aa, synthetic construct
GANAAIRLR

SEQ ID NO: 17148 - protein, 9 aa, synthetic construct
GANAAIKVY

SEQ ID NO: 17149 - protein, 9 aa, synthetic construct
GANAAGHLR

SEQ ID NO: 17150 - protein, 9 aa, synthetic construct
GANAAGRLH

SEQ ID NO: 17151 - protein, 9 aa, synthetic construct
PLPASAKVF

SEQ ID NO: 17152 - protein, 9 aa, synthetic construct
GANAAGKVF

SEQ ID NO: 17153 - protein, 9 aa, synthetic construct
PLNGSIKLF

SEQ ID NO: 17154 - protein, 9 aa, synthetic construct
GANATVHLK

SEQ ID NO: 17155 - protein, 9 aa, synthetic construct
GANATVKVY

SEQ ID NO: 17156 - protein, 9 aa, synthetic construct
PLPASIHLK

SEQ ID NO: 17157 - protein, 9 aa, synthetic construct
GANATLKVR

SEQ ID NO: 17158 - protein, 9 aa, synthetic construct
GANATAHLH

SEQ ID NO: 17159 - protein, 9 aa, synthetic construct
GANATAHVY

SEQ ID NO: 17160 - protein, 9 aa, synthetic construct
GANATAHVH

SEQ ID NO: 17161 - protein, 9 aa, synthetic construct
GANATAHVK

SEQ ID NO: 17162 - protein, 9 aa, synthetic construct
GANATARVF

SEQ ID NO: 17163 - protein, 9 aa, synthetic construct
GANATAKLH

SEQ ID NO: 17164 - protein, 9 aa, synthetic construct
GANATAKVK

SEQ ID NO: 17165 - protein, 9 aa, synthetic construct
GANATIKVY

SEQ ID NO: 17166 - protein, 9 aa, synthetic construct
GANATGHLY

SEQ ID NO: 17167 - protein, 9 aa, synthetic construct
GANATGHLH

SEQ ID NO: 17168 - protein, 9 aa, synthetic construct
GANATGHVH

SEQ ID NO: 17169 - protein, 9 aa, synthetic construct
GANATGKVY

SEQ ID NO: 17170 - protein, 9 aa, synthetic construct
GANATGKVH

SEQ ID NO: 17171 - protein, 9 aa, synthetic construct
GANASVHVK

SEQ ID NO: 17172 - protein, 9 aa, synthetic construct
GANASVKVF

SEQ ID NO: 17173 - protein, 9 aa, synthetic construct
PLNGSIKVR

SEQ ID NO: 17174 - protein, 9 aa, synthetic construct
GANASLKLY

SEQ ID NO: 17175 - protein, 9 aa, synthetic construct
PLPASIKLR

SEQ ID NO: 17176 - protein, 9 aa, synthetic construct
GANASAHLY

SEQ ID NO: 17177 - protein, 9 aa, synthetic construct
GANASGHLR

SEQ ID NO: 17178 - protein, 9 aa, synthetic construct
GANASGHLH

SEQ ID NO: 17179 - protein, 9 aa, synthetic construct
GANASGHVF

SEQ ID NO: 17180 - protein, 9 aa, synthetic construct
PLPASGHLR

SEQ ID NO: 17181 - protein, 9 aa, synthetic construct
GANAVVRVH

SEQ ID NO: 17182 - protein, 9 aa, synthetic construct
PLPASGHLK

SEQ ID NO: 17183 - protein, 9 aa, synthetic construct
GANAVAHLY

SEQ ID NO: 17184 - protein, 9 aa, synthetic construct
GANAVAHLR

SEQ ID NO: 17185 - protein, 9 aa, synthetic construct
GANAVAHLF

SEQ ID NO: 17186 - protein, 9 aa, synthetic construct
GANAVAHVY

SEQ ID NO: 17187 - protein, 9 aa, synthetic construct
GANAVAHVH

SEQ ID NO: 17188 - protein, 9 aa, synthetic construct
GANAVAHVK

SEQ ID NO: 17189 - protein, 9 aa, synthetic construct
GANAVAHVF

SEQ ID NO: 17190 - protein, 9 aa, synthetic construct
GANAVAKLF

SEQ ID NO: 17191 - protein, 9 aa, synthetic construct
PLPASGHVF

SEQ ID NO: 17192 - protein, 9 aa, synthetic construct
GANAVIKLH

SEQ ID NO: 17193 - protein, 9 aa, synthetic construct
GANAVGHLY

SEQ ID NO: 17194 - protein, 9 aa, synthetic construct
GANAVGHLH

SEQ ID NO: 17195 - protein, 9 aa, synthetic construct
GANAVGHLK

SEQ ID NO: 17196 - protein, 9 aa, synthetic construct
GANAVGRVH

SEQ ID NO: 17197 - protein, 9 aa, synthetic construct
GANAVGKLH

SEQ ID NO: 17198 - protein, 9 aa, synthetic construct
PLNGSIKVF

SEQ ID NO: 17199 - protein, 9 aa, synthetic construct
GANAGLKLY

SEQ ID NO: 17200 - protein, 9 aa, synthetic construct
GANAGIRVY

SEQ ID NO: 17201 - protein, 9 aa, synthetic construct
GAQGAAHVY

SEQ ID NO: 17202 - protein, 9 aa, synthetic construct
PLPAVVHVH

SEQ ID NO: 17203 - protein, 9 aa, synthetic construct
GAQGAARVY

SEQ ID NO: 17204 - protein, 9 aa, synthetic construct
PLPAVVRLY

SEQ ID NO: 17205 - protein, 9 aa, synthetic construct
PLPAVVRLF

SEQ ID NO: 17206 - protein, 9 aa, synthetic construct
GAQGTVHLY

SEQ ID NO: 17207 - protein, 9 aa, synthetic construct
GAQGTVHLR

SEQ ID NO: 17208 - protein, 9 aa, synthetic construct
GAQGTVHLK

SEQ ID NO: 17209 - protein, 9 aa, synthetic construct
GAQGTVKLY

SEQ ID NO: 17210 - protein, 9 aa, synthetic construct
PLPAVVRVF

SEQ ID NO: 17211 - protein, 9 aa, synthetic construct
GAQGTAHLK

SEQ ID NO: 17212 - protein, 9 aa, synthetic construct
GAQGTAHVK

SEQ ID NO: 17213 - protein, 9 aa, synthetic construct
GAQGTIRLY

SEQ ID NO: 17214 - protein, 9 aa, synthetic construct
GAQGTGKLF

SEQ ID NO: 17215 - protein, 9 aa, synthetic construct
GAQGSVKLY

SEQ ID NO: 17216 - protein, 9 aa, synthetic construct
PLPAVLHVH

SEQ ID NO: 17217 - protein, 9 aa, synthetic construct
GAQGSIKVR

SEQ ID NO: 17218 - protein, 9 aa, synthetic construct
GAQGVVRVH

SEQ ID NO: 17219 - protein, 9 aa, synthetic construct
GAQGVVKLF

SEQ ID NO: 17220 - protein, 9 aa, synthetic construct
GAQGVVKVY

SEQ ID NO: 17221 - protein, 9 aa, synthetic construct
GAQGVLHVH

SEQ ID NO: 17222 - protein, 9 aa, synthetic construct
PLPAVLKLY

SEQ ID NO: 17223 - protein, 9 aa, synthetic construct
GAQGVLKLY

SEQ ID NO: 17224 - protein, 9 aa, synthetic construct
GAQGVAHLY

SEQ ID NO: 17225 - protein, 9 aa, synthetic construct
GAQGVAHLH

SEQ ID NO: 17226 - protein, 9 aa, synthetic construct
GAQGVAHLF

SEQ ID NO: 17227 - protein, 9 aa, synthetic construct
GAQGVAHVR

SEQ ID NO: 17228 - protein, 9 aa, synthetic construct
GAQGVAHVH

SEQ ID NO: 17229 - protein, 9 aa, synthetic construct
GAQGVAHVK

SEQ ID NO: 17230 - protein, 9 aa, synthetic construct
GAQGVAHVF

SEQ ID NO: 17231 - protein, 9 aa, synthetic construct
GAQGVARVY

SEQ ID NO: 17232 - protein, 9 aa, synthetic construct
PLPAVLKVH

SEQ ID NO: 17233 - protein, 9 aa, synthetic construct
GAQGVGHLH

SEQ ID NO: 17234 - protein, 9 aa, synthetic construct
GAQGVGHLK

SEQ ID NO: 17235 - protein, 9 aa, synthetic construct
GAQGVGHVR

SEQ ID NO: 17236 - protein, 9 aa, synthetic construct
GAQGVGRLY

SEQ ID NO: 17237 - protein, 9 aa, synthetic construct
GAQGVGRLF

SEQ ID NO: 17238 - protein, 9 aa, synthetic construct
GAQGVGRVF

SEQ ID NO: 17239 - protein, 9 aa, synthetic construct
GAQGVGKLH

SEQ ID NO: 17240 - protein, 9 aa, synthetic construct
GAQGVGKVF

SEQ ID NO: 17241 - protein, 9 aa, synthetic construct
GAQGGVHVK

SEQ ID NO: 17242 - protein, 9 aa, synthetic construct
PLPAVAHLH

SEQ ID NO: 17243 - protein, 9 aa, synthetic construct
GAQGGIHLK

SEQ ID NO: 17244 - protein, 9 aa, synthetic construct
GAQGGIHVK

SEQ ID NO: 17245 - protein, 9 aa, synthetic construct
GAQGGIKVH

SEQ ID NO: 17246 - protein, 9 aa, synthetic construct
GAQGGGKLY

SEQ ID NO: 17247 - protein, 9 aa, synthetic construct
GAQAAVHLY

SEQ ID NO: 17248 - protein, 9 aa, synthetic construct
GAQAAVHLR

SEQ ID NO: 17249 - protein, 9 aa, synthetic construct
GAQAAVKVY

SEQ ID NO: 17250 - protein, 9 aa, synthetic construct
GAQAALHVY

SEQ ID NO: 17251 - protein, 9 aa, synthetic construct
GAQAAAHLY

SEQ ID NO: 17252 - protein, 9 aa, synthetic construct
GAQAAAHLR

SEQ ID NO: 17253 - protein, 9 aa, synthetic construct
GAQAAAHLH

SEQ ID NO: 17254 - protein, 9 aa, synthetic construct
GAQAAAHLK

SEQ ID NO: 17255 - protein, 9 aa, synthetic construct
GAQAAAHLF

SEQ ID NO: 17256 - protein, 9 aa, synthetic construct
GAQAAAHVR

SEQ ID NO: 17257 - protein, 9 aa, synthetic construct
GAQAAAHVK

SEQ ID NO: 17258 - protein, 9 aa, synthetic construct
GAQAAARLH

SEQ ID NO: 17259 - protein, 9 aa, synthetic construct
GAQAAARVY

SEQ ID NO: 17260 - protein, 9 aa, synthetic construct
GAQAAAKLY

SEQ ID NO: 17261 - protein, 9 aa, synthetic construct
GAQAAAKLH

SEQ ID NO: 17262 - protein, 9 aa, synthetic construct
GAQAAAKVH

SEQ ID NO: 17263 - protein, 9 aa, synthetic construct
GAQAAAKVK

SEQ ID NO: 17264 - protein, 9 aa, synthetic construct
GAQAAAKVF

SEQ ID NO: 17265 - protein, 9 aa, synthetic construct
PLPAVAKLF

SEQ ID NO: 17266 - protein, 9 aa, synthetic construct
GAQAAIHVK

SEQ ID NO: 17267 - protein, 9 aa, synthetic construct
GAQAAIHVF

SEQ ID NO: 17268 - protein, 9 aa, synthetic construct
GAQAAIRVH

SEQ ID NO: 17269 - protein, 9 aa, synthetic construct
GAQAAIKVY

SEQ ID NO: 17270 - protein, 9 aa, synthetic construct
GAQAAGHLY

SEQ ID NO: 17271 - protein, 9 aa, synthetic construct
GAQAAGHLR

SEQ ID NO: 17272 - protein, 9 aa, synthetic construct
GAQAAGHLH

SEQ ID NO: 17273 - protein, 9 aa, synthetic construct
GAQAAGHLK

SEQ ID NO: 17274 - protein, 9 aa, synthetic construct
GAQAAGRLH

SEQ ID NO: 17275 - protein, 9 aa, synthetic construct
GAQAAGRVF

SEQ ID NO: 17276 - protein, 9 aa, synthetic construct
PLNGSGHVF

SEQ ID NO: 17277 - protein, 9 aa, synthetic construct
GAQATVHLR

SEQ ID NO: 17278 - protein, 9 aa, synthetic construct
GAQATVHLH

SEQ ID NO: 17279 - protein, 9 aa, synthetic construct
GAQATVHLK

SEQ ID NO: 17280 - protein, 9 aa, synthetic construct
GAQATVHLF

SEQ ID NO: 17281 - protein, 9 aa, synthetic construct
GAQATVHVH

SEQ ID NO: 17282 - protein, 9 aa, synthetic construct
GAQATVHVK

SEQ ID NO: 17283 - protein, 9 aa, synthetic construct
GAQATVRVF

SEQ ID NO: 17284 - protein, 9 aa, synthetic construct
GAQATVKLY

SEQ ID NO: 17285 - protein, 9 aa, synthetic construct
GAQATVKVY

SEQ ID NO: 17286 - protein, 9 aa, synthetic construct
GAQATLRLF

SEQ ID NO: 17287 - protein, 9 aa, synthetic construct
GAQATAHLR

SEQ ID NO: 17288 - protein, 9 aa, synthetic construct
GAQATAHLH

SEQ ID NO: 17289 - protein, 9 aa, synthetic construct
GAQATAHLF

SEQ ID NO: 17290 - protein, 9 aa, synthetic construct
GAQATAHVY

SEQ ID NO: 17291 - protein, 9 aa, synthetic construct
GAQATAHVH

SEQ ID NO: 17292 - protein, 9 aa, synthetic construct
GAQATAHVK

SEQ ID NO: 17293 - protein, 9 aa, synthetic construct
PLPAVIHVK

SEQ ID NO: 17294 - protein, 9 aa, synthetic construct
GAQATAKVY

SEQ ID NO: 17295 - protein, 9 aa, synthetic construct
GAQATIHLH

SEQ ID NO: 17296 - protein, 9 aa, synthetic construct
GAQATIHVH

SEQ ID NO: 17297 - protein, 9 aa, synthetic construct
GAQATGHLY

SEQ ID NO: 17298 - protein, 9 aa, synthetic construct
GAQATGHLK

SEQ ID NO: 17299 - protein, 9 aa, synthetic construct
GAQATGHLF

SEQ ID NO: 17300 - protein, 9 aa, synthetic construct
GAQATGHVH

SEQ ID NO: 17301 - protein, 9 aa, synthetic construct
GAQATGKVY

SEQ ID NO: 17302 - protein, 9 aa, synthetic construct
GAQATGKVF

SEQ ID NO: 17303 - protein, 9 aa, synthetic construct
GAQASVHVY

SEQ ID NO: 17304 - protein, 9 aa, synthetic construct
GAQASVHVK

SEQ ID NO: 17305 - protein, 9 aa, synthetic construct
GAQASLKLY

SEQ ID NO: 17306 - protein, 9 aa, synthetic construct
GAQASGHLR

SEQ ID NO: 17307 - protein, 9 aa, synthetic construct
GAQASGRVK

SEQ ID NO: 17308 - protein, 9 aa, synthetic construct
GAQASGRVF

SEQ ID NO: 17309 - protein, 9 aa, synthetic construct
GAQAVAHLH

SEQ ID NO: 17310 - protein, 9 aa, synthetic construct
GAQAVAHVY

SEQ ID NO: 17311 - protein, 9 aa, synthetic construct
PLPAVGHVH

SEQ ID NO: 17312 - protein, 9 aa, synthetic construct
GAQAVIRVH

SEQ ID NO: 17313 - protein, 9 aa, synthetic construct
GAQAVIKVH

SEQ ID NO: 17314 - protein, 9 aa, synthetic construct
GAQAGVKVF

SEQ ID NO: 17315 - protein, 9 aa, synthetic construct
PLPAVGKLY

SEQ ID NO: 17316 - protein, 9 aa, synthetic construct
GAQAGAHVF

SEQ ID NO: 17317 - protein, 9 aa, synthetic construct
GAQAGIKVH

SEQ ID NO: 17318 - protein, 9 aa, synthetic construct
GAPGAVKVY

SEQ ID NO: 17319 - protein, 9 aa, synthetic construct
GAPGALHLK

SEQ ID NO: 17320 - protein, 9 aa, synthetic construct
PLPAGVHVR

SEQ ID NO: 17321 - protein, 9 aa, synthetic construct
GAPGAAHVH

SEQ ID NO: 17322 - protein, 9 aa, synthetic construct
PLPAGVHVK

SEQ ID NO: 17323 - protein, 9 aa, synthetic construct
GAPGAAKLY

SEQ ID NO: 17324 - protein, 9 aa, synthetic construct
GAPGAAKVH

SEQ ID NO: 17325 - protein, 9 aa, synthetic construct
GAPGAAKVF

SEQ ID NO: 17326 - protein, 9 aa, synthetic construct
GAPGAIHVH

SEQ ID NO: 17327 - protein, 9 aa, synthetic construct
GAPGAIHVK

SEQ ID NO: 17328 - protein, 9 aa, synthetic construct
GAPGAIRLY

SEQ ID NO: 17329 - protein, 9 aa, synthetic construct
GAPGAGRLF

SEQ ID NO: 17330 - protein, 9 aa, synthetic construct
GAPGAGKLH

SEQ ID NO: 17331 - protein, 9 aa, synthetic construct
GAPGAGKVF

SEQ ID NO: 17332 - protein, 9 aa, synthetic construct
GAPGTVHLY

SEQ ID NO: 17333 - protein, 9 aa, synthetic construct
GAPGTVHLH

SEQ ID NO: 17334 - protein, 9 aa, synthetic construct
GAPGTVRLY

SEQ ID NO: 17335 - protein, 9 aa, synthetic construct
GAPGTVKLF

SEQ ID NO: 17336 - protein, 9 aa, synthetic construct
GAPGTLKLH

SEQ ID NO: 17337 - protein, 9 aa, synthetic construct
GAPGTAHLY

SEQ ID NO: 17338 - protein, 9 aa, synthetic construct
GAPGTAHLR

SEQ ID NO: 17339 - protein, 9 aa, synthetic construct
GAPGTAHLF

SEQ ID NO: 17340 - protein, 9 aa, synthetic construct
GAPGTAHVY

SEQ ID NO: 17341 - protein, 9 aa, synthetic construct
GAPGTAHVR

SEQ ID NO: 17342 - protein, 9 aa, synthetic construct
GAPGTAHVK

SEQ ID NO: 17343 - protein, 9 aa, synthetic construct
GAPGTAKVK

SEQ ID NO: 17344 - protein, 9 aa, synthetic construct
GAPGTIHLH

SEQ ID NO: 17345 - protein, 9 aa, synthetic construct
GAPGTIHLK

SEQ ID NO: 17346 - protein, 9 aa, synthetic construct
GAPGTIRLY

SEQ ID NO: 17347 - protein, 9 aa, synthetic construct
GAPGTIKVY

SEQ ID NO: 17348 - protein, 9 aa, synthetic construct
GAPGTGHLY

SEQ ID NO: 17349 - protein, 9 aa, synthetic construct
GAPGTGHLR

SEQ ID NO: 17350 - protein, 9 aa, synthetic construct
GAPGTGHLK

SEQ ID NO: 17351 - protein, 9 aa, synthetic construct
GAPGTGHVR

SEQ ID NO: 17352 - protein, 9 aa, synthetic construct
GAPGTGHVK

SEQ ID NO: 17353 - protein, 9 aa, synthetic construct
GAPGTGRLF

SEQ ID NO: 17354 - protein, 9 aa, synthetic construct
GAPGTGKVY

SEQ ID NO: 17355 - protein, 9 aa, synthetic construct
GAPGTGKVH

SEQ ID NO: 17356 - protein, 9 aa, synthetic construct
GAPGTGKVF

SEQ ID NO: 17357 - protein, 9 aa, synthetic construct
GAPGSVHLY

SEQ ID NO: 17358 - protein, 9 aa, synthetic construct
GAPGSVHLF

SEQ ID NO: 17359 - protein, 9 aa, synthetic construct
GAPGSVHVK

SEQ ID NO: 17360 - protein, 9 aa, synthetic construct
GAPGSAHLY

SEQ ID NO: 17361 - protein, 9 aa, synthetic construct
GAPGSAHVR

SEQ ID NO: 17362 - protein, 9 aa, synthetic construct
GAPGSAHVH

SEQ ID NO: 17363 - protein, 9 aa, synthetic construct
GAPGSAHVF

SEQ ID NO: 17364 - protein, 9 aa, synthetic construct
GAPGSARVY

SEQ ID NO: 17365 - protein, 9 aa, synthetic construct
GAPGSARVH

SEQ ID NO: 17366 - protein, 9 aa, synthetic construct
GAPGSAKVF

SEQ ID NO: 17367 - protein, 9 aa, synthetic construct
GAPGSIHLH

SEQ ID NO: 17368 - protein, 9 aa, synthetic construct
GAPGSIHVY

SEQ ID NO: 17369 - protein, 9 aa, synthetic construct
GAPGSIHVK

SEQ ID NO: 17370 - protein, 9 aa, synthetic construct
GAPGSGHLR

SEQ ID NO: 17371 - protein, 9 aa, synthetic construct
GAPGSGRVY

SEQ ID NO: 17372 - protein, 9 aa, synthetic construct
GAPGVVHVY

SEQ ID NO: 17373 - protein, 9 aa, synthetic construct
GAPGVVHVK

SEQ ID NO: 17374 - protein, 9 aa, synthetic construct
GAPGVVKVY

SEQ ID NO: 17375 - protein, 9 aa, synthetic construct
GAPGVLHLK

SEQ ID NO: 17376 - protein, 9 aa, synthetic construct
GAPGVLHVH

SEQ ID NO: 17377 - protein, 9 aa, synthetic construct
PLPAGLKLY

SEQ ID NO: 17378 - protein, 9 aa, synthetic construct
GAPGVLKVH

SEQ ID NO: 17379 - protein, 9 aa, synthetic construct
GAPGVAHLY

SEQ ID NO: 17380 - protein, 9 aa, synthetic construct
GAPGVAHVH

SEQ ID NO: 17381 - protein, 9 aa, synthetic construct
GAPGVIHLY

SEQ ID NO: 17382 - protein, 9 aa, synthetic construct
GAPGVIHLR

SEQ ID NO: 17383 - protein, 9 aa, synthetic construct
GAPGVIHLH

SEQ ID NO: 17384 - protein, 9 aa, synthetic construct
GAPGVIHLF

SEQ ID NO: 17385 - protein, 9 aa, synthetic construct
GAPGVIHVH

SEQ ID NO: 17386 - protein, 9 aa, synthetic construct
GAPGVIHVK

SEQ ID NO: 17387 - protein, 9 aa, synthetic construct
GAPGVIHVF

SEQ ID NO: 17388 - protein, 9 aa, synthetic construct
GAPGVIRLY

SEQ ID NO: 17389 - protein, 9 aa, synthetic construct
GAPGVIKVH

SEQ ID NO: 17390 - protein, 9 aa, synthetic construct
GAPGVGHLY

SEQ ID NO: 17391 - protein, 9 aa, synthetic construct
GAPGVGHLR

SEQ ID NO: 17392 - protein, 9 aa, synthetic construct
GAPGVGHLK

SEQ ID NO: 17393 - protein, 9 aa, synthetic construct
GAPGVGHLF

SEQ ID NO: 17394 - protein, 9 aa, synthetic construct
GAPGVGHVR

SEQ ID NO: 17395 - protein, 9 aa, synthetic construct
GAPGVGHVH

SEQ ID NO: 17396 - protein, 9 aa, synthetic construct
GAPGVGRVH

SEQ ID NO: 17397 - protein, 9 aa, synthetic construct
GAPGVGKLH

SEQ ID NO: 17398 - protein, 9 aa, synthetic construct
GAPGVGKVF

SEQ ID NO: 17399 - protein, 9 aa, synthetic construct
PLPAGAHLY

SEQ ID NO: 17400 - protein, 9 aa, synthetic construct
GAPGGVHLY

SEQ ID NO: 17401 - protein, 9 aa, synthetic construct
GAPGGVHVK

SEQ ID NO: 17402 - protein, 9 aa, synthetic construct
PLPAGAHLR

SEQ ID NO: 17403 - protein, 9 aa, synthetic construct
GAPGGVKLF

SEQ ID NO: 17404 - protein, 9 aa, synthetic construct
PLPAGAHLK

SEQ ID NO: 17405 - protein, 9 aa, synthetic construct
GAPGGLHVH

SEQ ID NO: 17406 - protein, 9 aa, synthetic construct
PLPAGAHLF

SEQ ID NO: 17407 - protein, 9 aa, synthetic construct
PLPAGAHVY

SEQ ID NO: 17408 - protein, 9 aa, synthetic construct
GAPGGLKVF

SEQ ID NO: 17409 - protein, 9 aa, synthetic construct
PLPAGAHVR

SEQ ID NO: 17410 - protein, 9 aa, synthetic construct
GAPGGAHLH

SEQ ID NO: 17411 - protein, 9 aa, synthetic construct
GAPGGAHLK

SEQ ID NO: 17412 - protein, 9 aa, synthetic construct
GAPGGAHVR

SEQ ID NO: 17413 - protein, 9 aa, synthetic construct
GAPGGAHVF

SEQ ID NO: 17414 - protein, 9 aa, synthetic construct
GAPGGARVY

SEQ ID NO: 17415 - protein, 9 aa, synthetic construct
GAPGGARVH

SEQ ID NO: 17416 - protein, 9 aa, synthetic construct
GAPGGARVF

SEQ ID NO: 17417 - protein, 9 aa, synthetic construct
GAPGGAKVF

SEQ ID NO: 17418 - protein, 9 aa, synthetic construct
GAPGGIHLY

SEQ ID NO: 17419 - protein, 9 aa, synthetic construct
GAPGGIHLR

SEQ ID NO: 17420 - protein, 9 aa, synthetic construct
GAPGGIHLH

SEQ ID NO: 17421 - protein, 9 aa, synthetic construct
GAPGGIHLK

SEQ ID NO: 17422 - protein, 9 aa, synthetic construct
GAPGGIHLF

SEQ ID NO: 17423 - protein, 9 aa, synthetic construct
GAPGGIHVY

SEQ ID NO: 17424 - protein, 9 aa, synthetic construct
GAPGGIHVR

SEQ ID NO: 17425 - protein, 9 aa, synthetic construct
GAPGGIHVF

SEQ ID NO: 17426 - protein, 9 aa, synthetic construct
PLPAGARLY

SEQ ID NO: 17427 - protein, 9 aa, synthetic construct
GAPGGIRLH

SEQ ID NO: 17428 - protein, 9 aa, synthetic construct
GAPGGIRVY

SEQ ID NO: 17429 - protein, 9 aa, synthetic construct
GAPGGIRVH

SEQ ID NO: 17430 - protein, 9 aa, synthetic construct
PLPAGARLR

SEQ ID NO: 17431 - protein, 9 aa, synthetic construct
GAPGGIKLH

SEQ ID NO: 17432 - protein, 9 aa, synthetic construct
GAPGGIKVY

SEQ ID NO: 17433 - protein, 9 aa, synthetic construct
GAPGGIKVR

SEQ ID NO: 17434 - protein, 9 aa, synthetic construct
PLPAGARLH

SEQ ID NO: 17435 - protein, 9 aa, synthetic construct
GAPGGGHLY

SEQ ID NO: 17436 - protein, 9 aa, synthetic construct
GAPGGGHLR

SEQ ID NO: 17437 - protein, 9 aa, synthetic construct
GAPGGGHLK

SEQ ID NO: 17438 - protein, 9 aa, synthetic construct
GAPGGGHVH

SEQ ID NO: 17439 - protein, 9 aa, synthetic construct
GAPGGGHVF

SEQ ID NO: 17440 - protein, 9 aa, synthetic construct
GAPGGGRLY

SEQ ID NO: 17441 - protein, 9 aa, synthetic construct
GAPGGGRLH

SEQ ID NO: 17442 - protein, 9 aa, synthetic construct
GAPGGGRVH

SEQ ID NO: 17443 - protein, 9 aa, synthetic construct
GAPGGGRVK

SEQ ID NO: 17444 - protein, 9 aa, synthetic construct
GAPGGGKLY

SEQ ID NO: 17445 - protein, 9 aa, synthetic construct
GAPGGGKLR

SEQ ID NO: 17446 - protein, 9 aa, synthetic construct
GAPGGGKLH

SEQ ID NO: 17447 - protein, 9 aa, synthetic construct
GAPGGGKLF

SEQ ID NO: 17448 - protein, 9 aa, synthetic construct
PLPAGARVY

SEQ ID NO: 17449 - protein, 9 aa, synthetic construct
PLPAGARVH

SEQ ID NO: 17450 - protein, 9 aa, synthetic construct
GAPAAVKVY

SEQ ID NO: 17451 - protein, 9 aa, synthetic construct
GAPAAVKVF

SEQ ID NO: 17452 - protein, 9 aa, synthetic construct
PLPAGARVK

SEQ ID NO: 17453 - protein, 9 aa, synthetic construct
PLPAGARVF

SEQ ID NO: 17454 - protein, 9 aa, synthetic construct
GAPAAARLH

SEQ ID NO: 17455 - protein, 9 aa, synthetic construct
GAPAAAKLY

SEQ ID NO: 17456 - protein, 9 aa, synthetic construct
GAPAAAKVY

SEQ ID NO: 17457 - protein, 9 aa, synthetic construct
PLPAGAKLF

SEQ ID NO: 17458 - protein, 9 aa, synthetic construct
GAPAAIHLF

SEQ ID NO: 17459 - protein, 9 aa, synthetic construct
PLPAGAKVY

SEQ ID NO: 17460 - protein, 9 aa, synthetic construct
PLPAGAKVR

SEQ ID NO: 17461 - protein, 9 aa, synthetic construct
GAPAAIKVY

SEQ ID NO: 17462 - protein, 9 aa, synthetic construct
GAPAAGHLK

SEQ ID NO: 17463 - protein, 9 aa, synthetic construct
PLPAGAKVK

SEQ ID NO: 17464 - protein, 9 aa, synthetic construct
GAPAAGRLH

SEQ ID NO: 17465 - protein, 9 aa, synthetic construct
PLPAGAKVF

SEQ ID NO: 17466 - protein, 9 aa, synthetic construct
GAPAAGKVY

SEQ ID NO: 17467 - protein, 9 aa, synthetic construct
GAPAAGKVH

SEQ ID NO: 17468 - protein, 9 aa, synthetic construct
PLNGSGKLF

SEQ ID NO: 17469 - protein, 9 aa, synthetic construct
PLPAGIHLF

SEQ ID NO: 17470 - protein, 9 aa, synthetic construct
GAPATAHVY

SEQ ID NO: 17471 - protein, 9 aa, synthetic construct
GAPATIKLF

SEQ ID NO: 17472 - protein, 9 aa, synthetic construct
GAPATGHLY

SEQ ID NO: 17473 - protein, 9 aa, synthetic construct
GAPATGHLH

SEQ ID NO: 17474 - protein, 9 aa, synthetic construct
GAPATGHVF

SEQ ID NO: 17475 - protein, 9 aa, synthetic construct
GAPATGKVY

SEQ ID NO: 17476 - protein, 9 aa, synthetic construct
GAPASVHVK

SEQ ID NO: 17477 - protein, 9 aa, synthetic construct
GAPASLHLY

SEQ ID NO: 17478 - protein, 9 aa, synthetic construct
GAPASAHLY

SEQ ID NO: 17479 - protein, 9 aa, synthetic construct
GAPASAHLF

SEQ ID NO: 17480 - protein, 9 aa, synthetic construct
GAPASAHVY

SEQ ID NO: 17481 - protein, 9 aa, synthetic construct
GAPASARVH

SEQ ID NO: 17482 - protein, 9 aa, synthetic construct
PLPAGIKVH

SEQ ID NO: 17483 - protein, 9 aa, synthetic construct
GAPASGHLR

SEQ ID NO: 17484 - protein, 9 aa, synthetic construct
GAPASGHLH

SEQ ID NO: 17485 - protein, 9 aa, synthetic construct
GAPASGHVH

SEQ ID NO: 17486 - protein, 9 aa, synthetic construct
GAPAVVRVH

SEQ ID NO: 17487 - protein, 9 aa, synthetic construct
PLPAGGHLK

SEQ ID NO: 17488 - protein, 9 aa, synthetic construct
GAPAVLKLY

SEQ ID NO: 17489 - protein, 9 aa, synthetic construct
GAPAVAHLH

SEQ ID NO: 17490 - protein, 9 aa, synthetic construct
GAPAVAKLF

SEQ ID NO: 17491 - protein, 9 aa, synthetic construct
PLPAGGHVF

SEQ ID NO: 17492 - protein, 9 aa, synthetic construct
GAPAVIHLK

SEQ ID NO: 17493 - protein, 9 aa, synthetic construct
GAPAVIHVK

SEQ ID NO: 17494 - protein, 9 aa, synthetic construct
GAPAVIRVH

SEQ ID NO: 17495 - protein, 9 aa, synthetic construct
GAPAVIKLH

SEQ ID NO: 17496 - protein, 9 aa, synthetic construct
GAPAVIKVY

SEQ ID NO: 17497 - protein, 9 aa, synthetic construct
GAPAVIKVF

SEQ ID NO: 17498 - protein, 9 aa, synthetic construct
PLPAGGKLR

SEQ ID NO: 17499 - protein, 9 aa, synthetic construct
GAPAGAHVF

SEQ ID NO: 17500 - protein, 9 aa, synthetic construct
GAPAGAKLR

SEQ ID NO: 17501 - protein, 9 aa, synthetic construct
GAPAGAKLH

SEQ ID NO: 17502 - protein, 9 aa, synthetic construct
GAPAGIHLF

SEQ ID NO: 17503 - protein, 9 aa, synthetic construct
GAPAGIKVH

SEQ ID NO: 17504 - protein, 9 aa, synthetic construct
PLPAGGKVF

SEQ ID NO: 17505 - protein, 9 aa, synthetic construct
GVNGAVHLH

SEQ ID NO: 17506 - protein, 9 aa, synthetic construct
GVNGAVHVR

SEQ ID NO: 17507 - protein, 9 aa, synthetic construct
GVNGAVHVF

SEQ ID NO: 17508 - protein, 9 aa, synthetic construct
PTNGAVHLH

SEQ ID NO: 17509 - protein, 9 aa, synthetic construct
GVNGALHLR

SEQ ID NO: 17510 - protein, 9 aa, synthetic construct
GVNGALHLK

SEQ ID NO: 17511 - protein, 9 aa, synthetic construct
GVNGALRVH

SEQ ID NO: 17512 - protein, 9 aa, synthetic construct
GVNGALKVY

SEQ ID NO: 17513 - protein, 9 aa, synthetic construct
GVNGAAHVY

SEQ ID NO: 17514 - protein, 9 aa, synthetic construct
GVNGAAHVH

SEQ ID NO: 17515 - protein, 9 aa, synthetic construct
GVNGAARLY

SEQ ID NO: 17516 - protein, 9 aa, synthetic construct
GVNGAARVY

SEQ ID NO: 17517 - protein, 9 aa, synthetic construct
GVNGAAKLY

SEQ ID NO: 17518 - protein, 9 aa, synthetic construct
GVNGAIHVY

SEQ ID NO: 17519 - protein, 9 aa, synthetic construct
GVNGAIHVK

SEQ ID NO: 17520 - protein, 9 aa, synthetic construct
GVNGAIHVF

SEQ ID NO: 17521 - protein, 9 aa, synthetic construct
GVNGAIRLY

SEQ ID NO: 17522 - protein, 9 aa, synthetic construct
GVNGAGRLH

SEQ ID NO: 17523 - protein, 9 aa, synthetic construct
GVNGAGRVF

SEQ ID NO: 17524 - protein, 9 aa, synthetic construct
GVNGTVHLR

SEQ ID NO: 17525 - protein, 9 aa, synthetic construct
GVNGTVHLH

SEQ ID NO: 17526 - protein, 9 aa, synthetic construct
GVNGTVHLK

SEQ ID NO: 17527 - protein, 9 aa, synthetic construct
GVNGTVHLF

SEQ ID NO: 17528 - protein, 9 aa, synthetic construct
GVNGTVHVY

SEQ ID NO: 17529 - protein, 9 aa, synthetic construct
GVNGTVHVR

SEQ ID NO: 17530 - protein, 9 aa, synthetic construct
GVNGTVHVH

SEQ ID NO: 17531 - protein, 9 aa, synthetic construct
GVNGTVHVF

SEQ ID NO: 17532 - protein, 9 aa, synthetic construct
GVNGTVRLY

SEQ ID NO: 17533 - protein, 9 aa, synthetic construct
GVNGTVRVH

SEQ ID NO: 17534 - protein, 9 aa, synthetic construct
GVNGTVKLY

SEQ ID NO: 17535 - protein, 9 aa, synthetic construct
GVNGTVKLR

SEQ ID NO: 17536 - protein, 9 aa, synthetic construct
GVNGTVKVH

SEQ ID NO: 17537 - protein, 9 aa, synthetic construct
GVNGTVKVF

SEQ ID NO: 17538 - protein, 9 aa, synthetic construct
GVNGTLHVF

SEQ ID NO: 17539 - protein, 9 aa, synthetic construct
PTNGAVRVF

SEQ ID NO: 17540 - protein, 9 aa, synthetic construct
GVNGTLRLH

SEQ ID NO: 17541 - protein, 9 aa, synthetic construct
GVNGTLRVF

SEQ ID NO: 17542 - protein, 9 aa, synthetic construct
GVNGTLKLH

SEQ ID NO: 17543 - protein, 9 aa, synthetic construct
GVNGTLKLK

SEQ ID NO: 17544 - protein, 9 aa, synthetic construct
GVNGTLKLF

SEQ ID NO: 17545 - protein, 9 aa, synthetic construct
GVNGTLKVR

SEQ ID NO: 17546 - protein, 9 aa, synthetic construct
GVNGTAHLY

SEQ ID NO: 17547 - protein, 9 aa, synthetic construct
GVNGTAHLK

SEQ ID NO: 17548 - protein, 9 aa, synthetic construct
GVNGTAHLF

SEQ ID NO: 17549 - protein, 9 aa, synthetic construct
GVNGTARLF

SEQ ID NO: 17550 - protein, 9 aa, synthetic construct
GVNGTARVY

SEQ ID NO: 17551 - protein, 9 aa, synthetic construct
GVNGTARVH

SEQ ID NO: 17552 - protein, 9 aa, synthetic construct
GVNGTARVF

SEQ ID NO: 17553 - protein, 9 aa, synthetic construct
GVNGTAKLH

SEQ ID NO: 17554 - protein, 9 aa, synthetic construct
GVNGTAKVY

SEQ ID NO: 17555 - protein, 9 aa, synthetic construct
GVNGTAKVK

SEQ ID NO: 17556 - protein, 9 aa, synthetic construct
GVNGTIHLR

SEQ ID NO: 17557 - protein, 9 aa, synthetic construct
GVNGTIHLF

SEQ ID NO: 17558 - protein, 9 aa, synthetic construct
GVNGTIHVY

SEQ ID NO: 17559 - protein, 9 aa, synthetic construct
GVNGTIHVF

SEQ ID NO: 17560 - protein, 9 aa, synthetic construct
GVNGTIRLY

SEQ ID NO: 17561 - protein, 9 aa, synthetic construct
GVNGTIKLR

SEQ ID NO: 17562 - protein, 9 aa, synthetic construct
GVNGTGHLR

SEQ ID NO: 17563 - protein, 9 aa, synthetic construct
GVNGTGHLH

SEQ ID NO: 17564 - protein, 9 aa, synthetic construct
GVNGTGHVH

SEQ ID NO: 17565 - protein, 9 aa, synthetic construct
GVNGTGRVF

SEQ ID NO: 17566 - protein, 9 aa, synthetic construct
GVNGTGKLY

SEQ ID NO: 17567 - protein, 9 aa, synthetic construct
GVNGTGKLF

SEQ ID NO: 17568 - protein, 9 aa, synthetic construct
GVNGTGKVY

SEQ ID NO: 17569 - protein, 9 aa, synthetic construct
GVNGTGKVH

SEQ ID NO: 17570 - protein, 9 aa, synthetic construct
GVNGSVHLF

SEQ ID NO: 17571 - protein, 9 aa, synthetic construct
GVNGSVHVF

SEQ ID NO: 17572 - protein, 9 aa, synthetic construct
PTNGALHLR

SEQ ID NO: 17573 - protein, 9 aa, synthetic construct
GVNGSVRVY

SEQ ID NO: 17574 - protein, 9 aa, synthetic construct
GVNGSVKLH

SEQ ID NO: 17575 - protein, 9 aa, synthetic construct
GVNGSVKVF

SEQ ID NO: 17576 - protein, 9 aa, synthetic construct
PTNGALHLK

SEQ ID NO: 17577 - protein, 9 aa, synthetic construct
GVNGSLKLY

SEQ ID NO: 17578 - protein, 9 aa, synthetic construct
GVNGSLKVF

SEQ ID NO: 17579 - protein, 9 aa, synthetic construct
GVNGSAHLF

SEQ ID NO: 17580 - protein, 9 aa, synthetic construct
GVNGSAHVY

SEQ ID NO: 17581 - protein, 9 aa, synthetic construct
GVNGSAHVR

SEQ ID NO: 17582 - protein, 9 aa, synthetic construct
GVNGSAHVH

SEQ ID NO: 17583 - protein, 9 aa, synthetic construct
GVNGSARLY

SEQ ID NO: 17584 - protein, 9 aa, synthetic construct
GVNGSARVY

SEQ ID NO: 17585 - protein, 9 aa, synthetic construct
GVNGSARVH

SEQ ID NO: 17586 - protein, 9 aa, synthetic construct
GVNGSARVF

SEQ ID NO: 17587 - protein, 9 aa, synthetic construct
GVNGSAKLY

SEQ ID NO: 17588 - protein, 9 aa, synthetic construct
GVNGSAKLR

SEQ ID NO: 17589 - protein, 9 aa, synthetic construct
GVNGSAKVY

SEQ ID NO: 17590 - protein, 9 aa, synthetic construct
GVNGSAKVK

SEQ ID NO: 17591 - protein, 9 aa, synthetic construct
GVNGSIHLH

SEQ ID NO: 17592 - protein, 9 aa, synthetic construct
GVNGSIHVK

SEQ ID NO: 17593 - protein, 9 aa, synthetic construct
GVNGSIHVF

SEQ ID NO: 17594 - protein, 9 aa, synthetic construct
PLNGVVHLF

SEQ ID NO: 17595 - protein, 9 aa, synthetic construct
GVNGSIKVK

SEQ ID NO: 17596 - protein, 9 aa, synthetic construct
GVNGSIKVF

SEQ ID NO: 17597 - protein, 9 aa, synthetic construct
GVNGSGRLF

SEQ ID NO: 17598 - protein, 9 aa, synthetic construct
GVNGVVHLY

SEQ ID NO: 17599 - protein, 9 aa, synthetic construct
GVNGVVHVK

SEQ ID NO: 17600 - protein, 9 aa, synthetic construct
GVNGVVRLF

SEQ ID NO: 17601 - protein, 9 aa, synthetic construct
GVNGVVKLH

SEQ ID NO: 17602 - protein, 9 aa, synthetic construct
GVNGVLHVH

SEQ ID NO: 17603 - protein, 9 aa, synthetic construct
GVNGVLHVK

SEQ ID NO: 17604 - protein, 9 aa, synthetic construct
GVNGVLKLF

SEQ ID NO: 17605 - protein, 9 aa, synthetic construct
GVNGVAHLK

SEQ ID NO: 17606 - protein, 9 aa, synthetic construct
GVNGVAHLF

SEQ ID NO: 17607 - protein, 9 aa, synthetic construct
GVNGVAHVF

SEQ ID NO: 17608 - protein, 9 aa, synthetic construct
GVNGVAKVH

SEQ ID NO: 17609 - protein, 9 aa, synthetic construct
GVNGVIKVH

SEQ ID NO: 17610 - protein, 9 aa, synthetic construct
GVNGVGHLH

SEQ ID NO: 17611 - protein, 9 aa, synthetic construct
GVNGVGHLK

SEQ ID NO: 17612 - protein, 9 aa, synthetic construct
GVNGVGRVY

SEQ ID NO: 17613 - protein, 9 aa, synthetic construct
PTNGAAHLY

SEQ ID NO: 17614 - protein, 9 aa, synthetic construct
GVNGGVHLY

SEQ ID NO: 17615 - protein, 9 aa, synthetic construct
GVNGGVKLF

SEQ ID NO: 17616 - protein, 9 aa, synthetic construct
GVNGGLHVH

SEQ ID NO: 17617 - protein, 9 aa, synthetic construct
PTNGAAHLF

SEQ ID NO: 17618 - protein, 9 aa, synthetic construct
GVNGGAKLR

SEQ ID NO: 17619 - protein, 9 aa, synthetic construct
GVNGGIHLY

SEQ ID NO: 17620 - protein, 9 aa, synthetic construct
GVNGGIHLH

SEQ ID NO: 17621 - protein, 9 aa, synthetic construct
GVNGGIHLK

SEQ ID NO: 17622 - protein, 9 aa, synthetic construct
GVNGGIHLF

SEQ ID NO: 17623 - protein, 9 aa, synthetic construct
GVNGGIHVF

SEQ ID NO: 17624 - protein, 9 aa, synthetic construct
GVNGGIRLY

SEQ ID NO: 17625 - protein, 9 aa, synthetic construct
GVNGGIRLH

SEQ ID NO: 17626 - protein, 9 aa, synthetic construct
GVNGGIRVH

SEQ ID NO: 17627 - protein, 9 aa, synthetic construct
GVNGGIKLH

SEQ ID NO: 17628 - protein, 9 aa, synthetic construct
GVNGGIKVY

SEQ ID NO: 17629 - protein, 9 aa, synthetic construct
GVNGGGRVY

SEQ ID NO: 17630 - protein, 9 aa, synthetic construct
GVNGGGRVH

SEQ ID NO: 17631 - protein, 9 aa, synthetic construct
GVNGGGKLY

SEQ ID NO: 17632 - protein, 9 aa, synthetic construct
GVNGGGKLH

SEQ ID NO: 17633 - protein, 9 aa, synthetic construct
GVNAAVHLH

SEQ ID NO: 17634 - protein, 9 aa, synthetic construct
GVNAALHVH

SEQ ID NO: 17635 - protein, 9 aa, synthetic construct
GVNAALRLY

SEQ ID NO: 17636 - protein, 9 aa, synthetic construct
PTNGAAKLR

SEQ ID NO: 17637 - protein, 9 aa, synthetic construct
GVNAAAHLH

SEQ ID NO: 17638 - protein, 9 aa, synthetic construct
GVNAAAHVK

SEQ ID NO: 17639 - protein, 9 aa, synthetic construct
PTNGAAKLK

SEQ ID NO: 17640 - protein, 9 aa, synthetic construct
GVNAAIHLH

SEQ ID NO: 17641 - protein, 9 aa, synthetic construct
GVNAAIHVY

SEQ ID NO: 17642 - protein, 9 aa, synthetic construct
GVNAAIHVF

SEQ ID NO: 17643 - protein, 9 aa, synthetic construct
PTNGAAKVY

SEQ ID NO: 17644 - protein, 9 aa, synthetic construct
GVNAAIRLR

SEQ ID NO: 17645 - protein, 9 aa, synthetic construct
PTNGAAKVR

SEQ ID NO: 17646 - protein, 9 aa, synthetic construct
PTNGAAKVK

SEQ ID NO: 17647 - protein, 9 aa, synthetic construct
PLNGVVHVF

SEQ ID NO: 17648 - protein, 9 aa, synthetic construct
GVNATVHLK

SEQ ID NO: 17649 - protein, 9 aa, synthetic construct
GVNATVHVF

SEQ ID NO: 17650 - protein, 9 aa, synthetic construct
PTNGAIHLH

SEQ ID NO: 17651 - protein, 9 aa, synthetic construct
GVNATVKLH

SEQ ID NO: 17652 - protein, 9 aa, synthetic construct
PTNGAIHLF

SEQ ID NO: 17653 - protein, 9 aa, synthetic construct
PTNGAIHVY

SEQ ID NO: 17654 - protein, 9 aa, synthetic construct
GVNATAHVY

SEQ ID NO: 17655 - protein, 9 aa, synthetic construct
GVNATAHVK

SEQ ID NO: 17656 - protein, 9 aa, synthetic construct
GVNATARLY

SEQ ID NO: 17657 - protein, 9 aa, synthetic construct
GVNATARVY

SEQ ID NO: 17658 - protein, 9 aa, synthetic construct
GVNATARVF

SEQ ID NO: 17659 - protein, 9 aa, synthetic construct
GVNATIHVY

SEQ ID NO: 17660 - protein, 9 aa, synthetic construct
PTNGAIRLY

SEQ ID NO: 17661 - protein, 9 aa, synthetic construct
PTNGAIRLR

SEQ ID NO: 17662 - protein, 9 aa, synthetic construct
GVNATIKVY

SEQ ID NO: 17663 - protein, 9 aa, synthetic construct
PTNGAIRLF

SEQ ID NO: 17664 - protein, 9 aa, synthetic construct
GVNATGKVH

SEQ ID NO: 17665 - protein, 9 aa, synthetic construct
GVNASVRVY

SEQ ID NO: 17666 - protein, 9 aa, synthetic construct
GVNASVRVF

SEQ ID NO: 17667 - protein, 9 aa, synthetic construct
PTNGAIRVH

SEQ ID NO: 17668 - protein, 9 aa, synthetic construct
GVNASVKVF

SEQ ID NO: 17669 - protein, 9 aa, synthetic construct
GVNASLKLF

SEQ ID NO: 17670 - protein, 9 aa, synthetic construct
PTNGAIKVY

SEQ ID NO: 17671 - protein, 9 aa, synthetic construct
GVNASGHLR

SEQ ID NO: 17672 - protein, 9 aa, synthetic construct
GVNASGHVF

SEQ ID NO: 17673 - protein, 9 aa, synthetic construct
PTNGAGHLR

SEQ ID NO: 17674 - protein, 9 aa, synthetic construct
GVNAVVKVF

SEQ ID NO: 17675 - protein, 9 aa, synthetic construct
PTNGAGHLK

SEQ ID NO: 17676 - protein, 9 aa, synthetic construct
GVNAVAHLY

SEQ ID NO: 17677 - protein, 9 aa, synthetic construct
GVNAVIKLH

SEQ ID NO: 17678 - protein, 9 aa, synthetic construct
PTNGAGRLF

SEQ ID NO: 17679 - protein, 9 aa, synthetic construct
GVNAGVHVR

SEQ ID NO: 17680 - protein, 9 aa, synthetic construct
GVNAGVKLF

SEQ ID NO: 17681 - protein, 9 aa, synthetic construct
PTNGAGRVF

SEQ ID NO: 17682 - protein, 9 aa, synthetic construct
PTNGAGKLR

SEQ ID NO: 17683 - protein, 9 aa, synthetic construct
GVNAGAHVF

SEQ ID NO: 17684 - protein, 9 aa, synthetic construct
PTNGAGKVY

SEQ ID NO: 17685 - protein, 9 aa, synthetic construct
PTNGTVHLH

SEQ ID NO: 17686 - protein, 9 aa, synthetic construct
GVQGALRLH

SEQ ID NO: 17687 - protein, 9 aa, synthetic construct
GVQGAARVF

SEQ ID NO: 17688 - protein, 9 aa, synthetic construct
GVQGTVHLY

SEQ ID NO: 17689 - protein, 9 aa, synthetic construct
GVQGTLRLH

SEQ ID NO: 17690 - protein, 9 aa, synthetic construct
GVQGTLKVY

SEQ ID NO: 17691 - protein, 9 aa, synthetic construct
GVQGTAHLK

SEQ ID NO: 17692 - protein, 9 aa, synthetic construct
GVQGTAHVH

SEQ ID NO: 17693 - protein, 9 aa, synthetic construct
GVQGTAHVK

SEQ ID NO: 17694 - protein, 9 aa, synthetic construct
PTNGTVKLH

SEQ ID NO: 17695 - protein, 9 aa, synthetic construct
GVQGTARVY

SEQ ID NO: 17696 - protein, 9 aa, synthetic construct
GVQGTARVF

SEQ ID NO: 17697 - protein, 9 aa, synthetic construct
PTNGTVKLF

SEQ ID NO: 17698 - protein, 9 aa, synthetic construct
GVQGTIHLH

SEQ ID NO: 17699 - protein, 9 aa, synthetic construct
GVQGTIRLY

SEQ ID NO: 17700 - protein, 9 aa, synthetic construct
GVQGTGKVH

SEQ ID NO: 17701 - protein, 9 aa, synthetic construct
GVQGSVHLH

SEQ ID NO: 17702 - protein, 9 aa, synthetic construct
GVQGSVHLF

SEQ ID NO: 17703 - protein, 9 aa, synthetic construct
GVQGSVHVY

SEQ ID NO: 17704 - protein, 9 aa, synthetic construct
GVQGSVHVK

SEQ ID NO: 17705 - protein, 9 aa, synthetic construct
GVQGSVHVF

SEQ ID NO: 17706 - protein, 9 aa, synthetic construct
GVQGSVRLH

SEQ ID NO: 17707 - protein, 9 aa, synthetic construct
GVQGSVRVH

SEQ ID NO: 17708 - protein, 9 aa, synthetic construct
GVQGSVRVK

SEQ ID NO: 17709 - protein, 9 aa, synthetic construct
GVQGSVRVF

SEQ ID NO: 17710 - protein, 9 aa, synthetic construct
GVQGSVKLY

SEQ ID NO: 17711 - protein, 9 aa, synthetic construct
GVQGSVKLH

SEQ ID NO: 17712 - protein, 9 aa, synthetic construct
GVQGSVKVY

SEQ ID NO: 17713 - protein, 9 aa, synthetic construct
GVQGSVKVH

SEQ ID NO: 17714 - protein, 9 aa, synthetic construct
GVQGSVKVF

SEQ ID NO: 17715 - protein, 9 aa, synthetic construct
GVQGSLKLY

SEQ ID NO: 17716 - protein, 9 aa, synthetic construct
GVQGSLKLF

SEQ ID NO: 17717 - protein, 9 aa, synthetic construct
GVQGSAHLY

SEQ ID NO: 17718 - protein, 9 aa, synthetic construct
GVQGSAHLH

SEQ ID NO: 17719 - protein, 9 aa, synthetic construct
GVQGSAHLF

SEQ ID NO: 17720 - protein, 9 aa, synthetic construct
GVQGSAHVR

SEQ ID NO: 17721 - protein, 9 aa, synthetic construct
GVQGSAHVF

SEQ ID NO: 17722 - protein, 9 aa, synthetic construct
GVQGSARLY

SEQ ID NO: 17723 - protein, 9 aa, synthetic construct
GVQGSARVY

SEQ ID NO: 17724 - protein, 9 aa, synthetic construct
GVQGSARVH

SEQ ID NO: 17725 - protein, 9 aa, synthetic construct
GVQGSAKVY

SEQ ID NO: 17726 - protein, 9 aa, synthetic construct
GVQGSIHLY

SEQ ID NO: 17727 - protein, 9 aa, synthetic construct
GVQGSIHLH

SEQ ID NO: 17728 - protein, 9 aa, synthetic construct
GVQGSIHVY

SEQ ID NO: 17729 - protein, 9 aa, synthetic construct
GVQGSIRVY

SEQ ID NO: 17730 - protein, 9 aa, synthetic construct
GVQGSIKLR

SEQ ID NO: 17731 - protein, 9 aa, synthetic construct
GVQGSIKVR

SEQ ID NO: 17732 - protein, 9 aa, synthetic construct
GVQGSGHLH

SEQ ID NO: 17733 - protein, 9 aa, synthetic construct
GVQGSGRVK

SEQ ID NO: 17734 - protein, 9 aa, synthetic construct
GVQGSGRVF

SEQ ID NO: 17735 - protein, 9 aa, synthetic construct
GVQGSGKVH

SEQ ID NO: 17736 - protein, 9 aa, synthetic construct
GVQGVVRVH

SEQ ID NO: 17737 - protein, 9 aa, synthetic construct
GVQGVVKLF

SEQ ID NO: 17738 - protein, 9 aa, synthetic construct
GVQGVLHVH

SEQ ID NO: 17739 - protein, 9 aa, synthetic construct
GVQGVAHLH

SEQ ID NO: 17740 - protein, 9 aa, synthetic construct
GVQGVAHVY

SEQ ID NO: 17741 - protein, 9 aa, synthetic construct
GVQGVIRLY

SEQ ID NO: 17742 - protein, 9 aa, synthetic construct
GVQGVIRVF

SEQ ID NO: 17743 - protein, 9 aa, synthetic construct
GVQGVGHLH

SEQ ID NO: 17744 - protein, 9 aa, synthetic construct
GVQGVGHLK

SEQ ID NO: 17745 - protein, 9 aa, synthetic construct
GVQGVGHVY

SEQ ID NO: 17746 - protein, 9 aa, synthetic construct
GVQGVGKVY

SEQ ID NO: 17747 - protein, 9 aa, synthetic construct
GVQGGVHVK

SEQ ID NO: 17748 - protein, 9 aa, synthetic construct
GVQGGVHVF

SEQ ID NO: 17749 - protein, 9 aa, synthetic construct
GVQGGVRVY

SEQ ID NO: 17750 - protein, 9 aa, synthetic construct
GVQGGVKLF

SEQ ID NO: 17751 - protein, 9 aa, synthetic construct
GVQGGLKVK

SEQ ID NO: 17752 - protein, 9 aa, synthetic construct
GVQGGIHLY

SEQ ID NO: 17753 - protein, 9 aa, synthetic construct
GVQGGIHLK

SEQ ID NO: 17754 - protein, 9 aa, synthetic construct
PTNGTARLY

SEQ ID NO: 17755 - protein, 9 aa, synthetic construct
GVQGGIKLH

SEQ ID NO: 17756 - protein, 9 aa, synthetic construct
PTNGTARVY

SEQ ID NO: 17757 - protein, 9 aa, synthetic construct
GVQAAVRVF

SEQ ID NO: 17758 - protein, 9 aa, synthetic construct
PLNGVVKLK

SEQ ID NO: 17759 - protein, 9 aa, synthetic construct
GVQAAAHVH

SEQ ID NO: 17760 - protein, 9 aa, synthetic construct
PTNGTAKLH

SEQ ID NO: 17761 - protein, 9 aa, synthetic construct
PTNGTAKVH

SEQ ID NO: 17762 - protein, 9 aa, synthetic construct
GVQAAGHLR

SEQ ID NO: 17763 - protein, 9 aa, synthetic construct
GVQAAGHLK

SEQ ID NO: 17764 - protein, 9 aa, synthetic construct
GVQAAGHVH

SEQ ID NO: 17765 - protein, 9 aa, synthetic construct
PTNGTAKVK

SEQ ID NO: 17766 - protein, 9 aa, synthetic construct
GVQAAGKLF

SEQ ID NO: 17767 - protein, 9 aa, synthetic construct
PLNGVVKLF

SEQ ID NO: 17768 - protein, 9 aa, synthetic construct
PTNGTIHLY

SEQ ID NO: 17769 - protein, 9 aa, synthetic construct
GVQATVHLY

SEQ ID NO: 17770 - protein, 9 aa, synthetic construct
PTNGTIHLH

SEQ ID NO: 17771 - protein, 9 aa, synthetic construct
GVQATLRLF

SEQ ID NO: 17772 - protein, 9 aa, synthetic construct
GVQATAHLY

SEQ ID NO: 17773 - protein, 9 aa, synthetic construct
GVQATIHLH

SEQ ID NO: 17774 - protein, 9 aa, synthetic construct
PTNGTIRLY

SEQ ID NO: 17775 - protein, 9 aa, synthetic construct
GVQATGHLH

SEQ ID NO: 17776 - protein, 9 aa, synthetic construct
GVQATGHLF

SEQ ID NO: 17777 - protein, 9 aa, synthetic construct
GVQASVHVY

SEQ ID NO: 17778 - protein, 9 aa, synthetic construct
GVQASVRVY

SEQ ID NO: 17779 - protein, 9 aa, synthetic construct
PTNGTIKLR

SEQ ID NO: 17780 - protein, 9 aa, synthetic construct
PTNGTIKLF

SEQ ID NO: 17781 - protein, 9 aa, synthetic construct
GVQASIHLY

SEQ ID NO: 17782 - protein, 9 aa, synthetic construct
GVQASIHLH

SEQ ID NO: 17783 - protein, 9 aa, synthetic construct
GVQASIHVH

SEQ ID NO: 17784 - protein, 9 aa, synthetic construct
GVQASIHVK

SEQ ID NO: 17785 - protein, 9 aa, synthetic construct
GVQASIHVF

SEQ ID NO: 17786 - protein, 9 aa, synthetic construct
PTNGTIKVY

SEQ ID NO: 17787 - protein, 9 aa, synthetic construct
GVQASGRVH

SEQ ID NO: 17788 - protein, 9 aa, synthetic construct
GVQASGRVK

SEQ ID NO: 17789 - protein, 9 aa, synthetic construct
GVQASGRVF

SEQ ID NO: 17790 - protein, 9 aa, synthetic construct
PTNGTGHLH

SEQ ID NO: 17791 - protein, 9 aa, synthetic construct
GVQAGVKVF

SEQ ID NO: 17792 - protein, 9 aa, synthetic construct
GVQAGIHVY

SEQ ID NO: 17793 - protein, 9 aa, synthetic construct
GVQAGIKVH

SEQ ID NO: 17794 - protein, 9 aa, synthetic construct
GVQAGGHLK

SEQ ID NO: 17795 - protein, 9 aa, synthetic construct
PTNGSVHLH

SEQ ID NO: 17796 - protein, 9 aa, synthetic construct
GVPGAVKVY

SEQ ID NO: 17797 - protein, 9 aa, synthetic construct
GVPGALHLR

SEQ ID NO: 17798 - protein, 9 aa, synthetic construct
GVPGALHLK

SEQ ID NO: 17799 - protein, 9 aa, synthetic construct
GVPGALHVY

SEQ ID NO: 17800 - protein, 9 aa, synthetic construct
PTNGSVHVY

SEQ ID NO: 17801 - protein, 9 aa, synthetic construct
PTNGSVHVK

SEQ ID NO: 17802 - protein, 9 aa, synthetic construct
GVPGAAKLY

SEQ ID NO: 17803 - protein, 9 aa, synthetic construct
GVPGAAKVH

SEQ ID NO: 17804 - protein, 9 aa, synthetic construct
GVPGAIHLF

SEQ ID NO: 17805 - protein, 9 aa, synthetic construct
GVPGAIHVF

SEQ ID NO: 17806 - protein, 9 aa, synthetic construct
GVPGAGRLH

SEQ ID NO: 17807 - protein, 9 aa, synthetic construct
GVPGAGRLF

SEQ ID NO: 17808 - protein, 9 aa, synthetic construct
GVPGAGKVF

SEQ ID NO: 17809 - protein, 9 aa, synthetic construct
PTNGSVRVY

SEQ ID NO: 17810 - protein, 9 aa, synthetic construct
GVPGTVHLH

SEQ ID NO: 17811 - protein, 9 aa, synthetic construct
GVPGTVKLR

SEQ ID NO: 17812 - protein, 9 aa, synthetic construct
GVPGTLHLK

SEQ ID NO: 17813 - protein, 9 aa, synthetic construct
GVPGTLKLH

SEQ ID NO: 17814 - protein, 9 aa, synthetic construct
GVPGTAHLR

SEQ ID NO: 17815 - protein, 9 aa, synthetic construct
GVPGTAHVH

SEQ ID NO: 17816 - protein, 9 aa, synthetic construct
GVPGTAHVF

SEQ ID NO: 17817 - protein, 9 aa, synthetic construct
GVPGTIHLH

SEQ ID NO: 17818 - protein, 9 aa, synthetic construct
PTNGSVKVH

SEQ ID NO: 17819 - protein, 9 aa, synthetic construct
GVPGTGHVY

SEQ ID NO: 17820 - protein, 9 aa, synthetic construct
GVPGTGHVH

SEQ ID NO: 17821 - protein, 9 aa, synthetic construct
GVPGSLHVH

SEQ ID NO: 17822 - protein, 9 aa, synthetic construct
GVPGSAHVY

SEQ ID NO: 17823 - protein, 9 aa, synthetic construct
GVPGSAHVR

SEQ ID NO: 17824 - protein, 9 aa, synthetic construct
GVPGSARVY

SEQ ID NO: 17825 - protein, 9 aa, synthetic construct
GVPGVVHVY

SEQ ID NO: 17826 - protein, 9 aa, synthetic construct
GVPGVVHVH

SEQ ID NO: 17827 - protein, 9 aa, synthetic construct
GVPGVVKLF

SEQ ID NO: 17828 - protein, 9 aa, synthetic construct
GVPGVLHVH

SEQ ID NO: 17829 - protein, 9 aa, synthetic construct
PTNGSLKLY

SEQ ID NO: 17830 - protein, 9 aa, synthetic construct
GVPGVAHLH

SEQ ID NO: 17831 - protein, 9 aa, synthetic construct
GVPGVAHVH

SEQ ID NO: 17832 - protein, 9 aa, synthetic construct
GVPGVAKLF

SEQ ID NO: 17833 - protein, 9 aa, synthetic construct
GVPGVGHVH

SEQ ID NO: 17834 - protein, 9 aa, synthetic construct
GVPGVGRVH

SEQ ID NO: 17835 - protein, 9 aa, synthetic construct
GVPGGVHLY

SEQ ID NO: 17836 - protein, 9 aa, synthetic construct
GVPGGVKLF

SEQ ID NO: 17837 - protein, 9 aa, synthetic construct
GVPGGLHLY

SEQ ID NO: 17838 - protein, 9 aa, synthetic construct
GVPGGLHLR

SEQ ID NO: 17839 - protein, 9 aa, synthetic construct
GVPGGLHLH

SEQ ID NO: 17840 - protein, 9 aa, synthetic construct
GVPGGLHVY

SEQ ID NO: 17841 - protein, 9 aa, synthetic construct
GVPGGLHVK

SEQ ID NO: 17842 - protein, 9 aa, synthetic construct
GVPGGLHVF

SEQ ID NO: 17843 - protein, 9 aa, synthetic construct
GVPGGLKLY

SEQ ID NO: 17844 - protein, 9 aa, synthetic construct
GVPGGLKVF

SEQ ID NO: 17845 - protein, 9 aa, synthetic construct
GVPGGAHVF

SEQ ID NO: 17846 - protein, 9 aa, synthetic construct
GVPGGARVY

SEQ ID NO: 17847 - protein, 9 aa, synthetic construct
GVPGGAKVY

SEQ ID NO: 17848 - protein, 9 aa, synthetic construct
GVPGGIHLY

SEQ ID NO: 17849 - protein, 9 aa, synthetic construct
GVPGGIHVY

SEQ ID NO: 17850 - protein, 9 aa, synthetic construct
GVPGGIRLY

SEQ ID NO: 17851 - protein, 9 aa, synthetic construct
GVPGGIRVH

SEQ ID NO: 17852 - protein, 9 aa, synthetic construct
GVPGGGRVY

SEQ ID NO: 17853 - protein, 9 aa, synthetic construct
PTNGSARVY

SEQ ID NO: 17854 - protein, 9 aa, synthetic construct
GVPAAVHLH

SEQ ID NO: 17855 - protein, 9 aa, synthetic construct
PTNGSARVH

SEQ ID NO: 17856 - protein, 9 aa, synthetic construct
GVPAALHLR

SEQ ID NO: 17857 - protein, 9 aa, synthetic construct
GVPAALHVY

SEQ ID NO: 17858 - protein, 9 aa, synthetic construct
GVPAAAHLK

SEQ ID NO: 17859 - protein, 9 aa, synthetic construct
GVPAAAHVH

SEQ ID NO: 17860 - protein, 9 aa, synthetic construct
GVPAAARLH

SEQ ID NO: 17861 - protein, 9 aa, synthetic construct
GVPAAARVY

SEQ ID NO: 17862 - protein, 9 aa, synthetic construct
GVPAAAKLY

SEQ ID NO: 17863 - protein, 9 aa, synthetic construct
GVPAAAKLH

SEQ ID NO: 17864 - protein, 9 aa, synthetic construct
GVPAAAKVF

SEQ ID NO: 17865 - protein, 9 aa, synthetic construct
GVPAAIHLY

SEQ ID NO: 17866 - protein, 9 aa, synthetic construct
GVPAAIHLR

SEQ ID NO: 17867 - protein, 9 aa, synthetic construct
GVPAAIHLH

SEQ ID NO: 17868 - protein, 9 aa, synthetic construct
GVPAAIHLK

SEQ ID NO: 17869 - protein, 9 aa, synthetic construct
GVPAAIHLF

SEQ ID NO: 17870 - protein, 9 aa, synthetic construct
GVPAAIHVY

SEQ ID NO: 17871 - protein, 9 aa, synthetic construct
GVPAAIHVR

SEQ ID NO: 17872 - protein, 9 aa, synthetic construct
GVPAAIHVH

SEQ ID NO: 17873 - protein, 9 aa, synthetic construct
GVPAAIHVF

SEQ ID NO: 17874 - protein, 9 aa, synthetic construct
PTNGSAKVY

SEQ ID NO: 17875 - protein, 9 aa, synthetic construct
GVPAAIRLR

SEQ ID NO: 17876 - protein, 9 aa, synthetic construct
GVPAAIRVH

SEQ ID NO: 17877 - protein, 9 aa, synthetic construct
GVPAAIKVY

SEQ ID NO: 17878 - protein, 9 aa, synthetic construct
GVPAAIKVF

SEQ ID NO: 17879 - protein, 9 aa, synthetic construct
GVPAAGRLH

SEQ ID NO: 17880 - protein, 9 aa, synthetic construct
GVPATVHLK

SEQ ID NO: 17881 - protein, 9 aa, synthetic construct
GVPATVHVH

SEQ ID NO: 17882 - protein, 9 aa, synthetic construct
PTNGSIHLH

SEQ ID NO: 17883 - protein, 9 aa, synthetic construct
PTNGSIHLK

SEQ ID NO: 17884 - protein, 9 aa, synthetic construct
GVPATLHVH

SEQ ID NO: 17885 - protein, 9 aa, synthetic construct
PTNGSIHLF

SEQ ID NO: 17886 - protein, 9 aa, synthetic construct
GVPATLKLK

SEQ ID NO: 17887 - protein, 9 aa, synthetic construct
GVPATAHVY

SEQ ID NO: 17888 - protein, 9 aa, synthetic construct
GVPATAHVK

SEQ ID NO: 17889 - protein, 9 aa, synthetic construct
GVPATARVF

SEQ ID NO: 17890 - protein, 9 aa, synthetic construct
GVPATAKVH

SEQ ID NO: 17891 - protein, 9 aa, synthetic construct
GVPATIHLR

SEQ ID NO: 17892 - protein, 9 aa, synthetic construct
GVPATIHLH

SEQ ID NO: 17893 - protein, 9 aa, synthetic construct
GVPATIHVK

SEQ ID NO: 17894 - protein, 9 aa, synthetic construct
PTNGSIRLY

SEQ ID NO: 17895 - protein, 9 aa, synthetic construct
GVPATIKVY

SEQ ID NO: 17896 - protein, 9 aa, synthetic construct
PTNGSIRLH

SEQ ID NO: 17897 - protein, 9 aa, synthetic construct
GVPATGHVF

SEQ ID NO: 17898 - protein, 9 aa, synthetic construct
PTNGSIRLF

SEQ ID NO: 17899 - protein, 9 aa, synthetic construct
GVPATGKVY

SEQ ID NO: 17900 - protein, 9 aa, synthetic construct
GVPASLHLY

SEQ ID NO: 17901 - protein, 9 aa, synthetic construct
PTNGSIKLR

SEQ ID NO: 17902 - protein, 9 aa, synthetic construct
GVPASAHLY

SEQ ID NO: 17903 - protein, 9 aa, synthetic construct
GVPASAHLF

SEQ ID NO: 17904 - protein, 9 aa, synthetic construct
GVPASAHVY

SEQ ID NO: 17905 - protein, 9 aa, synthetic construct
GVPASARVH

SEQ ID NO: 17906 - protein, 9 aa, synthetic construct
PTNGSIKVY

SEQ ID NO: 17907 - protein, 9 aa, synthetic construct
GVPASGHLR

SEQ ID NO: 17908 - protein, 9 aa, synthetic construct
GVPASGHLH

SEQ ID NO: 17909 - protein, 9 aa, synthetic construct
GVPASGHVH

SEQ ID NO: 17910 - protein, 9 aa, synthetic construct
GVPAVVHVH

SEQ ID NO: 17911 - protein, 9 aa, synthetic construct
GVPAVVRVH

SEQ ID NO: 17912 - protein, 9 aa, synthetic construct
GVPAVVKVF

SEQ ID NO: 17913 - protein, 9 aa, synthetic construct
GVPAVLKLY

SEQ ID NO: 17914 - protein, 9 aa, synthetic construct
PTNGSGHVH

SEQ ID NO: 17915 - protein, 9 aa, synthetic construct
GVPAVAKLF

SEQ ID NO: 17916 - protein, 9 aa, synthetic construct
GVPAVIHLY

SEQ ID NO: 17917 - protein, 9 aa, synthetic construct
GVPAVIHLR

SEQ ID NO: 17918 - protein, 9 aa, synthetic construct
GVPAVIHLH

SEQ ID NO: 17919 - protein, 9 aa, synthetic construct
GVPAVIHLK

SEQ ID NO: 17920 - protein, 9 aa, synthetic construct
GVPAVIHLF

SEQ ID NO: 17921 - protein, 9 aa, synthetic construct
GVPAVIHVR

SEQ ID NO: 17922 - protein, 9 aa, synthetic construct
GVPAVIHVH

SEQ ID NO: 17923 - protein, 9 aa, synthetic construct
GVPAVIHVF

SEQ ID NO: 17924 - protein, 9 aa, synthetic construct
GVPAVGRVH

SEQ ID NO: 17925 - protein, 9 aa, synthetic construct
GVPAVGKLY

SEQ ID NO: 17926 - protein, 9 aa, synthetic construct
GVPAGLKLY

SEQ ID NO: 17927 - protein, 9 aa, synthetic construct
GVPAGAHVY

SEQ ID NO: 17928 - protein, 9 aa, synthetic construct
PTNGSGKLH

SEQ ID NO: 17929 - protein, 9 aa, synthetic construct
GVPAGAKLR

SEQ ID NO: 17930 - protein, 9 aa, synthetic construct
GVPAGAKLH

SEQ ID NO: 17931 - protein, 9 aa, synthetic construct
GVPAGIHLF

SEQ ID NO: 17932 - protein, 9 aa, synthetic construct
GINGAVHVR

SEQ ID NO: 17933 - protein, 9 aa, synthetic construct
GINGAAHVY

SEQ ID NO: 17934 - protein, 9 aa, synthetic construct
GINGAAKVH

SEQ ID NO: 17935 - protein, 9 aa, synthetic construct
GINGAAKVF

SEQ ID NO: 17936 - protein, 9 aa, synthetic construct
GINGTVKLF

SEQ ID NO: 17937 - protein, 9 aa, synthetic construct
GINGTAHLR

SEQ ID NO: 17938 - protein, 9 aa, synthetic construct
GINGTAHLH

SEQ ID NO: 17939 - protein, 9 aa, synthetic construct
GINGTAHVH

SEQ ID NO: 17940 - protein, 9 aa, synthetic construct
GINGTIHVK

SEQ ID NO: 17941 - protein, 9 aa, synthetic construct
GINGTIKLR

SEQ ID NO: 17942 - protein, 9 aa, synthetic construct
PTNGVLHLY

SEQ ID NO: 17943 - protein, 9 aa, synthetic construct
GINGSVHLY

SEQ ID NO: 17944 - protein, 9 aa, synthetic construct
GINGSVHLF

SEQ ID NO: 17945 - protein, 9 aa, synthetic construct
GINGSVHVF

SEQ ID NO: 17946 - protein, 9 aa, synthetic construct
PTNGVLHLR

SEQ ID NO: 17947 - protein, 9 aa, synthetic construct
PTNGVLHVY

SEQ ID NO: 17948 - protein, 9 aa, synthetic construct
PTNGVLHVR

SEQ ID NO: 17949 - protein, 9 aa, synthetic construct
PTNGVLHVF

SEQ ID NO: 17950 - protein, 9 aa, synthetic construct
GINGSIHVR

SEQ ID NO: 17951 - protein, 9 aa, synthetic construct
GINGSIHVH

SEQ ID NO: 17952 - protein, 9 aa, synthetic construct
GINGVLHVK

SEQ ID NO: 17953 - protein, 9 aa, synthetic construct
PLNGVLKLY

SEQ ID NO: 17954 - protein, 9 aa, synthetic construct
PTNGVLKLY

SEQ ID NO: 17955 - protein, 9 aa, synthetic construct
GINGVAHVH

SEQ ID NO: 17956 - protein, 9 aa, synthetic construct
PTNGVLKLH

SEQ ID NO: 17957 - protein, 9 aa, synthetic construct
PTNGVAHLF

SEQ ID NO: 17958 - protein, 9 aa, synthetic construct
GINGGAHVF

SEQ ID NO: 17959 - protein, 9 aa, synthetic construct
GINGGIRLH

SEQ ID NO: 17960 - protein, 9 aa, synthetic construct
GINGGIRVH

SEQ ID NO: 17961 - protein, 9 aa, synthetic construct
GINGGGKLH

SEQ ID NO: 17962 - protein, 9 aa, synthetic construct
GINAAVHLH

SEQ ID NO: 17963 - protein, 9 aa, synthetic construct
GINAAVHLK

SEQ ID NO: 17964 - protein, 9 aa, synthetic construct
GINAAVKVH

SEQ ID NO: 17965 - protein, 9 aa, synthetic construct
GINAAAHVK

SEQ ID NO: 17966 - protein, 9 aa, synthetic construct
GINAAAKLY

SEQ ID NO: 17967 - protein, 9 aa, synthetic construct
GINAAAKLH

SEQ ID NO: 17968 - protein, 9 aa, synthetic construct
GINAAIHLF

SEQ ID NO: 17969 - protein, 9 aa, synthetic construct
GINAAIHVH

SEQ ID NO: 17970 - protein, 9 aa, synthetic construct
GINAAIRLR

SEQ ID NO: 17971 - protein, 9 aa, synthetic construct
GINAAIKVF

SEQ ID NO: 17972 - protein, 9 aa, synthetic construct
PTNGVAKVH

SEQ ID NO: 17973 - protein, 9 aa, synthetic construct
GINAAGHLH

SEQ ID NO: 17974 - protein, 9 aa, synthetic construct
GINAAGHLK

SEQ ID NO: 17975 - protein, 9 aa, synthetic construct
GINAAGHVH

SEQ ID NO: 17976 - protein, 9 aa, synthetic construct
GINAAGRLH

SEQ ID NO: 17977 - protein, 9 aa, synthetic construct
GINAAGKLH

SEQ ID NO: 17978 - protein, 9 aa, synthetic construct
GINAAGKVF

SEQ ID NO: 17979 - protein, 9 aa, synthetic construct
GINATVHLR

SEQ ID NO: 17980 - protein, 9 aa, synthetic construct
GINATVHLH

SEQ ID NO: 17981 - protein, 9 aa, synthetic construct
GINATVHLF

SEQ ID NO: 17982 - protein, 9 aa, synthetic construct
GINATVHVY

SEQ ID NO: 17983 - protein, 9 aa, synthetic construct
GINATVHVF

SEQ ID NO: 17984 - protein, 9 aa, synthetic construct
PTNGVIHLK

SEQ ID NO: 17985 - protein, 9 aa, synthetic construct
GINATLHLK

SEQ ID NO: 17986 - protein, 9 aa, synthetic construct
GINATAHLR

SEQ ID NO: 17987 - protein, 9 aa, synthetic construct
GINATAHLH

SEQ ID NO: 17988 - protein, 9 aa, synthetic construct
GINATAHVH

SEQ ID NO: 17989 - protein, 9 aa, synthetic construct
GINATAHVK

SEQ ID NO: 17990 - protein, 9 aa, synthetic construct
GINATARVF

SEQ ID NO: 17991 - protein, 9 aa, synthetic construct
GINATAKVY

SEQ ID NO: 17992 - protein, 9 aa, synthetic construct
GINATIHLH

SEQ ID NO: 17993 - protein, 9 aa, synthetic construct
GINATIHLK

SEQ ID NO: 17994 - protein, 9 aa, synthetic construct
PTNGVIRLY

SEQ ID NO: 17995 - protein, 9 aa, synthetic construct
GINATIKVY

SEQ ID NO: 17996 - protein, 9 aa, synthetic construct
GINATGHLY

SEQ ID NO: 17997 - protein, 9 aa, synthetic construct
GINATGKVY

SEQ ID NO: 17998 - protein, 9 aa, synthetic construct
GINATGKVH

SEQ ID NO: 17999 - protein, 9 aa, synthetic construct
GINASVHLY

SEQ ID NO: 18000 - protein, 9 aa, synthetic construct
GINASVHLH

SEQ ID NO: 18001 - protein, 9 aa, synthetic construct
GINASVHLK

SEQ ID NO: 18002 - protein, 9 aa, synthetic construct
GINASVHLF

SEQ ID NO: 18003 - protein, 9 aa, synthetic construct
GINASVHVY

SEQ ID NO: 18004 - protein, 9 aa, synthetic construct
GINASVHVH

SEQ ID NO: 18005 - protein, 9 aa, synthetic construct
GINASVHVK

SEQ ID NO: 18006 - protein, 9 aa, synthetic construct
GINASVRLY

SEQ ID NO: 18007 - protein, 9 aa, synthetic construct
GINASVRVY

SEQ ID NO: 18008 - protein, 9 aa, synthetic construct
GINASVRVF

SEQ ID NO: 18009 - protein, 9 aa, synthetic construct
GINASVKLY

SEQ ID NO: 18010 - protein, 9 aa, synthetic construct
GINASVKLH

SEQ ID NO: 18011 - protein, 9 aa, synthetic construct
GINASVKLF

SEQ ID NO: 18012 - protein, 9 aa, synthetic construct
GINASVKVH

SEQ ID NO: 18013 - protein, 9 aa, synthetic construct
GINASLHLY

SEQ ID NO: 18014 - protein, 9 aa, synthetic construct
GINASLKLY

SEQ ID NO: 18015 - protein, 9 aa, synthetic construct
GINASLKVF

SEQ ID NO: 18016 - protein, 9 aa, synthetic construct
GINASAHLY

SEQ ID NO: 18017 - protein, 9 aa, synthetic construct
GINASAHLF

SEQ ID NO: 18018 - protein, 9 aa, synthetic construct
GINASAHVY

SEQ ID NO: 18019 - protein, 9 aa, synthetic construct
GINASAHVR

SEQ ID NO: 18020 - protein, 9 aa, synthetic construct
GINASAHVK

SEQ ID NO: 18021 - protein, 9 aa, synthetic construct
GINASARLY

SEQ ID NO: 18022 - protein, 9 aa, synthetic construct
GINASARLR

SEQ ID NO: 18023 - protein, 9 aa, synthetic construct
GINASARVY

SEQ ID NO: 18024 - protein, 9 aa, synthetic construct
GINASARVH

SEQ ID NO: 18025 - protein, 9 aa, synthetic construct
GINASAKVF

SEQ ID NO: 18026 - protein, 9 aa, synthetic construct
GINASIRVY

SEQ ID NO: 18027 - protein, 9 aa, synthetic construct
GINASGHLR

SEQ ID NO: 18028 - protein, 9 aa, synthetic construct
GINASGHVF

SEQ ID NO: 18029 - protein, 9 aa, synthetic construct
GINASGRVK

SEQ ID NO: 18030 - protein, 9 aa, synthetic construct
GINASGKVY

SEQ ID NO: 18031 - protein, 9 aa, synthetic construct
GINAVVHVH

SEQ ID NO: 18032 - protein, 9 aa, synthetic construct
PTNGVGHLH

SEQ ID NO: 18033 - protein, 9 aa, synthetic construct
PTNGVGHLK

SEQ ID NO: 18034 - protein, 9 aa, synthetic construct
PTNGVGHVR

SEQ ID NO: 18035 - protein, 9 aa, synthetic construct
GINAVAHLH

SEQ ID NO: 18036 - protein, 9 aa, synthetic construct
GINAVAKLF

SEQ ID NO: 18037 - protein, 9 aa, synthetic construct
PTNGVGRLY

SEQ ID NO: 18038 - protein, 9 aa, synthetic construct
PTNGVGRLH

SEQ ID NO: 18039 - protein, 9 aa, synthetic construct
GINAVGHLY

SEQ ID NO: 18040 - protein, 9 aa, synthetic construct
GINAVGRVH

SEQ ID NO: 18041 - protein, 9 aa, synthetic construct
PTNGVGRVY

SEQ ID NO: 18042 - protein, 9 aa, synthetic construct
GINAGVHVR

SEQ ID NO: 18043 - protein, 9 aa, synthetic construct
GINAGVKVF

SEQ ID NO: 18044 - protein, 9 aa, synthetic construct
GINAGLKLY

SEQ ID NO: 18045 - protein, 9 aa, synthetic construct
GINAGARLR

SEQ ID NO: 18046 - protein, 9 aa, synthetic construct
PLNGVAHLY

SEQ ID NO: 18047 - protein, 9 aa, synthetic construct
GIQGAVHVK

SEQ ID NO: 18048 - protein, 9 aa, synthetic construct
GIQGALHLR

SEQ ID NO: 18049 - protein, 9 aa, synthetic construct
GIQGALHVY

SEQ ID NO: 18050 - protein, 9 aa, synthetic construct
PTNGGVHLF

SEQ ID NO: 18051 - protein, 9 aa, synthetic construct
PTNGGVHVY

SEQ ID NO: 18052 - protein, 9 aa, synthetic construct
GIQGAAKLY

SEQ ID NO: 18053 - protein, 9 aa, synthetic construct
GIQGAIHVF

SEQ ID NO: 18054 - protein, 9 aa, synthetic construct
GIQGAIKLH

SEQ ID NO: 18055 - protein, 9 aa, synthetic construct
PTNGGVRLF

SEQ ID NO: 18056 - protein, 9 aa, synthetic construct
GIQGTVHLY

SEQ ID NO: 18057 - protein, 9 aa, synthetic construct
GIQGTVHLR

SEQ ID NO: 18058 - protein, 9 aa, synthetic construct
GIQGTVRLF

SEQ ID NO: 18059 - protein, 9 aa, synthetic construct
GIQGTVKLY

SEQ ID NO: 18060 - protein, 9 aa, synthetic construct
GIQGTVKLH

SEQ ID NO: 18061 - protein, 9 aa, synthetic construct
GIQGTAHLR

SEQ ID NO: 18062 - protein, 9 aa, synthetic construct
GIQGTAHLH

SEQ ID NO: 18063 - protein, 9 aa, synthetic construct
GIQGTAHLF

SEQ ID NO: 18064 - protein, 9 aa, synthetic construct
GIQGTAHVH

SEQ ID NO: 18065 - protein, 9 aa, synthetic construct
GIQGTARVF

SEQ ID NO: 18066 - protein, 9 aa, synthetic construct
GIQGTIHLH

SEQ ID NO: 18067 - protein, 9 aa, synthetic construct
GIQGTIRLY

SEQ ID NO: 18068 - protein, 9 aa, synthetic construct
GIQGTIRLH

SEQ ID NO: 18069 - protein, 9 aa, synthetic construct
GIQGTGRLF

SEQ ID NO: 18070 - protein, 9 aa, synthetic construct
GIQGTGKVH

SEQ ID NO: 18071 - protein, 9 aa, synthetic construct
GIQGSVHLF

SEQ ID NO: 18072 - protein, 9 aa, synthetic construct
GIQGSVHVY

SEQ ID NO: 18073 - protein, 9 aa, synthetic construct
GIQGSVHVK

SEQ ID NO: 18074 - protein, 9 aa, synthetic construct
GIQGSVRVY

SEQ ID NO: 18075 - protein, 9 aa, synthetic construct
GIQGSVKLY

SEQ ID NO: 18076 - protein, 9 aa, synthetic construct
PTNGGLHVH

SEQ ID NO: 18077 - protein, 9 aa, synthetic construct
GIQGSARVY

SEQ ID NO: 18078 - protein, 9 aa, synthetic construct
GIQGSIHLH

SEQ ID NO: 18079 - protein, 9 aa, synthetic construct
GIQGSIHVY

SEQ ID NO: 18080 - protein, 9 aa, synthetic construct
PLNGVAHLF

SEQ ID NO: 18081 - protein, 9 aa, synthetic construct
GIQGSIRVY

SEQ ID NO: 18082 - protein, 9 aa, synthetic construct
GIQGSIKLH

SEQ ID NO: 18083 - protein, 9 aa, synthetic construct
GIQGSIKVR

SEQ ID NO: 18084 - protein, 9 aa, synthetic construct
GIQGSGRVK

SEQ ID NO: 18085 - protein, 9 aa, synthetic construct
GIQGSGKLY

SEQ ID NO: 18086 - protein, 9 aa, synthetic construct
GIQGVLHVH

SEQ ID NO: 18087 - protein, 9 aa, synthetic construct
GIQGVLRVF

SEQ ID NO: 18088 - protein, 9 aa, synthetic construct
GIQGVLKLH

SEQ ID NO: 18089 - protein, 9 aa, synthetic construct
GIQGVAHLH

SEQ ID NO: 18090 - protein, 9 aa, synthetic construct
GIQGVAHLF

SEQ ID NO: 18091 - protein, 9 aa, synthetic construct
GIQGVARLF

SEQ ID NO: 18092 - protein, 9 aa, synthetic construct
GIQGVAKLY

SEQ ID NO: 18093 - protein, 9 aa, synthetic construct
GIQGVAKLH

SEQ ID NO: 18094 - protein, 9 aa, synthetic construct
GIQGVIHVH

SEQ ID NO: 18095 - protein, 9 aa, synthetic construct
GIQGVIRLY

SEQ ID NO: 18096 - protein, 9 aa, synthetic construct
GIQGVIRVF

SEQ ID NO: 18097 - protein, 9 aa, synthetic construct
GIQGVGHLH

SEQ ID NO: 18098 - protein, 9 aa, synthetic construct
GIQGVGHLK

SEQ ID NO: 18099 - protein, 9 aa, synthetic construct
GIQGVGHVR

SEQ ID NO: 18100 - protein, 9 aa, synthetic construct
PTNGGLKVF

SEQ ID NO: 18101 - protein, 9 aa, synthetic construct
GIQGGVHLY

SEQ ID NO: 18102 - protein, 9 aa, synthetic construct
GIQGGVHLR

SEQ ID NO: 18103 - protein, 9 aa, synthetic construct
GIQGGVHLH

SEQ ID NO: 18104 - protein, 9 aa, synthetic construct
GIQGGVHLK

SEQ ID NO: 18105 - protein, 9 aa, synthetic construct
GIQGGVHLF

SEQ ID NO: 18106 - protein, 9 aa, synthetic construct
GIQGGVHVR

SEQ ID NO: 18107 - protein, 9 aa, synthetic construct
GIQGGVHVF

SEQ ID NO: 18108 - protein, 9 aa, synthetic construct
GIQGGVRVY

SEQ ID NO: 18109 - protein, 9 aa, synthetic construct
GIQGGVRVF

SEQ ID NO: 18110 - protein, 9 aa, synthetic construct
GIQGGVKLF

SEQ ID NO: 18111 - protein, 9 aa, synthetic construct
GIQGGLHVY

SEQ ID NO: 18112 - protein, 9 aa, synthetic construct
GIQGGLHVH

SEQ ID NO: 18113 - protein, 9 aa, synthetic construct
GIQGGLKVY

SEQ ID NO: 18114 - protein, 9 aa, synthetic construct
GIQGGLKVF

SEQ ID NO: 18115 - protein, 9 aa, synthetic construct
GIQGGAHLY

SEQ ID NO: 18116 - protein, 9 aa, synthetic construct
GIQGGAHLH

SEQ ID NO: 18117 - protein, 9 aa, synthetic construct
GIQGGAHLK

SEQ ID NO: 18118 - protein, 9 aa, synthetic construct
GIQGGAHVY

SEQ ID NO: 18119 - protein, 9 aa, synthetic construct
GIQGGAHVF

SEQ ID NO: 18120 - protein, 9 aa, synthetic construct
GIQGGAKLY

SEQ ID NO: 18121 - protein, 9 aa, synthetic construct
GIQGGAKLR

SEQ ID NO: 18122 - protein, 9 aa, synthetic construct
GIQGGAKVY

SEQ ID NO: 18123 - protein, 9 aa, synthetic construct
GIQGGIHLR

SEQ ID NO: 18124 - protein, 9 aa, synthetic construct
GIQGGIHLH

SEQ ID NO: 18125 - protein, 9 aa, synthetic construct
GIQGGIHLF

SEQ ID NO: 18126 - protein, 9 aa, synthetic construct
GIQGGIHVY

SEQ ID NO: 18127 - protein, 9 aa, synthetic construct
GIQGGIHVF

SEQ ID NO: 18128 - protein, 9 aa, synthetic construct
PLNGVAHVH

SEQ ID NO: 18129 - protein, 9 aa, synthetic construct
GIQGGIRLY

SEQ ID NO: 18130 - protein, 9 aa, synthetic construct
GIQGGIRLR

SEQ ID NO: 18131 - protein, 9 aa, synthetic construct
GIQGGIRLH

SEQ ID NO: 18132 - protein, 9 aa, synthetic construct
GIQGGIKLR

SEQ ID NO: 18133 - protein, 9 aa, synthetic construct
GIQGGIKLF

SEQ ID NO: 18134 - protein, 9 aa, synthetic construct
GIQGGIKVY

SEQ ID NO: 18135 - protein, 9 aa, synthetic construct
GIQGGIKVR

SEQ ID NO: 18136 - protein, 9 aa, synthetic construct
GIQGGIKVF

SEQ ID NO: 18137 - protein, 9 aa, synthetic construct
GIQGGGHLR

SEQ ID NO: 18138 - protein, 9 aa, synthetic construct
GIQGGGHLK

SEQ ID NO: 18139 - protein, 9 aa, synthetic construct
GIQGGGRLH

SEQ ID NO: 18140 - protein, 9 aa, synthetic construct
GIQGGGRLF

SEQ ID NO: 18141 - protein, 9 aa, synthetic construct
GIQGGGRVK

SEQ ID NO: 18142 - protein, 9 aa, synthetic construct
GIQGGGKLH

SEQ ID NO: 18143 - protein, 9 aa, synthetic construct
PTNGGARVR

SEQ ID NO: 18144 - protein, 9 aa, synthetic construct
GIQAAVRVF

SEQ ID NO: 18145 - protein, 9 aa, synthetic construct
PTNGGAKLY

SEQ ID NO: 18146 - protein, 9 aa, synthetic construct
PTNGGAKLR

SEQ ID NO: 18147 - protein, 9 aa, synthetic construct
GIQAAAHLK

SEQ ID NO: 18148 - protein, 9 aa, synthetic construct
GIQAAAHVH

SEQ ID NO: 18149 - protein, 9 aa, synthetic construct
PTNGGAKLH

SEQ ID NO: 18150 - protein, 9 aa, synthetic construct
PTNGGAKVH

SEQ ID NO: 18151 - protein, 9 aa, synthetic construct
GIQAAGHLK

SEQ ID NO: 18152 - protein, 9 aa, synthetic construct
GIQAAGHVH

SEQ ID NO: 18153 - protein, 9 aa, synthetic construct
GIQATVHLY

SEQ ID NO: 18154 - protein, 9 aa, synthetic construct
GIQATVHLR

SEQ ID NO: 18155 - protein, 9 aa, synthetic construct
GIQATVHLK

SEQ ID NO: 18156 - protein, 9 aa, synthetic construct
GIQATVHVY

SEQ ID NO: 18157 - protein, 9 aa, synthetic construct
GIQATVHVH

SEQ ID NO: 18158 - protein, 9 aa, synthetic construct
PTNGGIHLH

SEQ ID NO: 18159 - protein, 9 aa, synthetic construct
GIQATVKVY

SEQ ID NO: 18160 - protein, 9 aa, synthetic construct
GIQATLRLF

SEQ ID NO: 18161 - protein, 9 aa, synthetic construct
GIQATAHLY

SEQ ID NO: 18162 - protein, 9 aa, synthetic construct
GIQATAHLH

SEQ ID NO: 18163 - protein, 9 aa, synthetic construct
GIQATAHVY

SEQ ID NO: 18164 - protein, 9 aa, synthetic construct
GIQATAHVH

SEQ ID NO: 18165 - protein, 9 aa, synthetic construct
GIQATAHVK

SEQ ID NO: 18166 - protein, 9 aa, synthetic construct
GIQATARLH

SEQ ID NO: 18167 - protein, 9 aa, synthetic construct
GIQATARVF

SEQ ID NO: 18168 - protein, 9 aa, synthetic construct
GIQATIHLH

SEQ ID NO: 18169 - protein, 9 aa, synthetic construct
GIQATIHLK

SEQ ID NO: 18170 - protein, 9 aa, synthetic construct
GIQATIHVH

SEQ ID NO: 18171 - protein, 9 aa, synthetic construct
GIQATIHVK

SEQ ID NO: 18172 - protein, 9 aa, synthetic construct
PLNGVARLY

SEQ ID NO: 18173 - protein, 9 aa, synthetic construct
PTNGGIRLY

SEQ ID NO: 18174 - protein, 9 aa, synthetic construct
PTNGGIRLR

SEQ ID NO: 18175 - protein, 9 aa, synthetic construct
GIQATGHLY

SEQ ID NO: 18176 - protein, 9 aa, synthetic construct
GIQATGHLH

SEQ ID NO: 18177 - protein, 9 aa, synthetic construct
GIQATGHLF

SEQ ID NO: 18178 - protein, 9 aa, synthetic construct
GIQATGKVY

SEQ ID NO: 18179 - protein, 9 aa, synthetic construct
GIQATGKVH

SEQ ID NO: 18180 - protein, 9 aa, synthetic construct
GIQASVHLY

SEQ ID NO: 18181 - protein, 9 aa, synthetic construct
GIQASVHLR

SEQ ID NO: 18182 - protein, 9 aa, synthetic construct
GIQASVHLH

SEQ ID NO: 18183 - protein, 9 aa, synthetic construct
GIQASVHLK

SEQ ID NO: 18184 - protein, 9 aa, synthetic construct
GIQASVHLF

SEQ ID NO: 18185 - protein, 9 aa, synthetic construct
GIQASVHVK

SEQ ID NO: 18186 - protein, 9 aa, synthetic construct
GIQASVRVY

SEQ ID NO: 18187 - protein, 9 aa, synthetic construct
GIQASVKLY

SEQ ID NO: 18188 - protein, 9 aa, synthetic construct
GIQASLHLY

SEQ ID NO: 18189 - protein, 9 aa, synthetic construct
GIQASLHVY

SEQ ID NO: 18190 - protein, 9 aa, synthetic construct
PTNGGIRVF

SEQ ID NO: 18191 - protein, 9 aa, synthetic construct
GIQASAHLH

SEQ ID NO: 18192 - protein, 9 aa, synthetic construct
GIQASAHLF

SEQ ID NO: 18193 - protein, 9 aa, synthetic construct
GIQASAHVY

SEQ ID NO: 18194 - protein, 9 aa, synthetic construct
GIQASAHVR

SEQ ID NO: 18195 - protein, 9 aa, synthetic construct
GIQASAHVH

SEQ ID NO: 18196 - protein, 9 aa, synthetic construct
GIQASAHVF

SEQ ID NO: 18197 - protein, 9 aa, synthetic construct
GIQASARVH

SEQ ID NO: 18198 - protein, 9 aa, synthetic construct
GIQASIHVY

SEQ ID NO: 18199 - protein, 9 aa, synthetic construct
PTNGGIKVR

SEQ ID NO: 18200 - protein, 9 aa, synthetic construct
GIQASGHLR

SEQ ID NO: 18201 - protein, 9 aa, synthetic construct
GIQASGHLH

SEQ ID NO: 18202 - protein, 9 aa, synthetic construct
GIQASGHLF

SEQ ID NO: 18203 - protein, 9 aa, synthetic construct
GIQASGHVH

SEQ ID NO: 18204 - protein, 9 aa, synthetic construct
GIQASGHVF

SEQ ID NO: 18205 - protein, 9 aa, synthetic construct
GIQASGRVK

SEQ ID NO: 18206 - protein, 9 aa, synthetic construct
GIQASGRVF

SEQ ID NO: 18207 - protein, 9 aa, synthetic construct
PTNGGIKVF

SEQ ID NO: 18208 - protein, 9 aa, synthetic construct
PTNGGGHLR

SEQ ID NO: 18209 - protein, 9 aa, synthetic construct
GIQAVLKLR

SEQ ID NO: 18210 - protein, 9 aa, synthetic construct
GIQAVAKLF

SEQ ID NO: 18211 - protein, 9 aa, synthetic construct
GIQAVIRVH

SEQ ID NO: 18212 - protein, 9 aa, synthetic construct
PTNGGGRVY

SEQ ID NO: 18213 - protein, 9 aa, synthetic construct
GIQAGVHVY

SEQ ID NO: 18214 - protein, 9 aa, synthetic construct
GIQAGVHVK

SEQ ID NO: 18215 - protein, 9 aa, synthetic construct
GIQAGVKVF

SEQ ID NO: 18216 - protein, 9 aa, synthetic construct
GIQAGIHLK

SEQ ID NO: 18217 - protein, 9 aa, synthetic construct
GIQAGGHLK

SEQ ID NO: 18218 - protein, 9 aa, synthetic construct
PTNGGGKVF

SEQ ID NO: 18219 - protein, 9 aa, synthetic construct
GIPGAVHVY

SEQ ID NO: 18220 - protein, 9 aa, synthetic construct
GIPGALHLR

SEQ ID NO: 18221 - protein, 9 aa, synthetic construct
GIPGALHLK

SEQ ID NO: 18222 - protein, 9 aa, synthetic construct
GIPGAAHVY

SEQ ID NO: 18223 - protein, 9 aa, synthetic construct
GIPGAAHVH

SEQ ID NO: 18224 - protein, 9 aa, synthetic construct
GIPGAIHLF

SEQ ID NO: 18225 - protein, 9 aa, synthetic construct
GIPGAIHVH

SEQ ID NO: 18226 - protein, 9 aa, synthetic construct
GIPGAIHVF

SEQ ID NO: 18227 - protein, 9 aa, synthetic construct
GIPGAGRLF

SEQ ID NO: 18228 - protein, 9 aa, synthetic construct
GIPGAGKLH

SEQ ID NO: 18229 - protein, 9 aa, synthetic construct
GIPGAGKVF

SEQ ID NO: 18230 - protein, 9 aa, synthetic construct
GIPGTVHLH

SEQ ID NO: 18231 - protein, 9 aa, synthetic construct
GIPGTVHVH

SEQ ID NO: 18232 - protein, 9 aa, synthetic construct
GIPGTVHVF

SEQ ID NO: 18233 - protein, 9 aa, synthetic construct
GIPGTLRVF

SEQ ID NO: 18234 - protein, 9 aa, synthetic construct
GIPGTLKLK

SEQ ID NO: 18235 - protein, 9 aa, synthetic construct
GIPGTAHLR

SEQ ID NO: 18236 - protein, 9 aa, synthetic construct
GIPGTAHLF

SEQ ID NO: 18237 - protein, 9 aa, synthetic construct
GIPGTAHVH

SEQ ID NO: 18238 - protein, 9 aa, synthetic construct
GIPGTAHVF

SEQ ID NO: 18239 - protein, 9 aa, synthetic construct
GIPGTARLY

SEQ ID NO: 18240 - protein, 9 aa, synthetic construct
GIPGTARVY

SEQ ID NO: 18241 - protein, 9 aa, synthetic construct
GIPGTAKLH

SEQ ID NO: 18242 - protein, 9 aa, synthetic construct
GIPGTIHLH

SEQ ID NO: 18243 - protein, 9 aa, synthetic construct
GIPGTIHVK

SEQ ID NO: 18244 - protein, 9 aa, synthetic construct
GIPGTIKLF

SEQ ID NO: 18245 - protein, 9 aa, synthetic construct
GIPGTGHVF

SEQ ID NO: 18246 - protein, 9 aa, synthetic construct
GIPGTGKLF

SEQ ID NO: 18247 - protein, 9 aa, synthetic construct
GIPGTGKVY

SEQ ID NO: 18248 - protein, 9 aa, synthetic construct
GIPGSVHVK

SEQ ID NO: 18249 - protein, 9 aa, synthetic construct
GIPGSVKVH

SEQ ID NO: 18250 - protein, 9 aa, synthetic construct
GIPGSVKVF

SEQ ID NO: 18251 - protein, 9 aa, synthetic construct
PTNAALHLF

SEQ ID NO: 18252 - protein, 9 aa, synthetic construct
GIPGSAHVR

SEQ ID NO: 18253 - protein, 9 aa, synthetic construct
GIPGSARVY

SEQ ID NO: 18254 - protein, 9 aa, synthetic construct
GIPGSAKVF

SEQ ID NO: 18255 - protein, 9 aa, synthetic construct
GIPGSIHLF

SEQ ID NO: 18256 - protein, 9 aa, synthetic construct
GIPGSIHVY

SEQ ID NO: 18257 - protein, 9 aa, synthetic construct
PTNAALRLY

SEQ ID NO: 18258 - protein, 9 aa, synthetic construct
GIPGVVHLY

SEQ ID NO: 18259 - protein, 9 aa, synthetic construct
GIPGVVHLR

SEQ ID NO: 18260 - protein, 9 aa, synthetic construct
GIPGVVHLH

SEQ ID NO: 18261 - protein, 9 aa, synthetic construct
GIPGVVHLK

SEQ ID NO: 18262 - protein, 9 aa, synthetic construct
GIPGVVHLF

SEQ ID NO: 18263 - protein, 9 aa, synthetic construct
GIPGVVHVY

SEQ ID NO: 18264 - protein, 9 aa, synthetic construct
GIPGVVHVR

SEQ ID NO: 18265 - protein, 9 aa, synthetic construct
GIPGVVHVK

SEQ ID NO: 18266 - protein, 9 aa, synthetic construct
GIPGVVHVF

SEQ ID NO: 18267 - protein, 9 aa, synthetic construct
GIPGVVRVH

SEQ ID NO: 18268 - protein, 9 aa, synthetic construct
GIPGVLHLK

SEQ ID NO: 18269 - protein, 9 aa, synthetic construct
GIPGVLHVH

SEQ ID NO: 18270 - protein, 9 aa, synthetic construct
GIPGVLHVK

SEQ ID NO: 18271 - protein, 9 aa, synthetic construct
GIPGVLKLY

SEQ ID NO: 18272 - protein, 9 aa, synthetic construct
GIPGVLKVH

SEQ ID NO: 18273 - protein, 9 aa, synthetic construct
GIPGVAHLH

SEQ ID NO: 18274 - protein, 9 aa, synthetic construct
GIPGVAHVH

SEQ ID NO: 18275 - protein, 9 aa, synthetic construct
GIPGVAKLF

SEQ ID NO: 18276 - protein, 9 aa, synthetic construct
GIPGVIHLK

SEQ ID NO: 18277 - protein, 9 aa, synthetic construct
GIPGVGHLH

SEQ ID NO: 18278 - protein, 9 aa, synthetic construct
GIPGVGHLK

SEQ ID NO: 18279 - protein, 9 aa, synthetic construct
GIPGVGHVY

SEQ ID NO: 18280 - protein, 9 aa, synthetic construct
GIPGVGRVY

SEQ ID NO: 18281 - protein, 9 aa, synthetic construct
GIPGVGRVH

SEQ ID NO: 18282 - protein, 9 aa, synthetic construct
GIPGVGKLH

SEQ ID NO: 18283 - protein, 9 aa, synthetic construct
GIPGGVHLY

SEQ ID NO: 18284 - protein, 9 aa, synthetic construct
GIPGGLHVH

SEQ ID NO: 18285 - protein, 9 aa, synthetic construct
GIPGGAHVF

SEQ ID NO: 18286 - protein, 9 aa, synthetic construct
GIPGGIKLH

SEQ ID NO: 18287 - protein, 9 aa, synthetic construct
PTNAAARLH

SEQ ID NO: 18288 - protein, 9 aa, synthetic construct
GIPGGGRVY

SEQ ID NO: 18289 - protein, 9 aa, synthetic construct
GIPGGGKLH

SEQ ID NO: 18290 - protein, 9 aa, synthetic construct
GIPAAVKVY

SEQ ID NO: 18291 - protein, 9 aa, synthetic construct
GIPAALRLY

SEQ ID NO: 18292 - protein, 9 aa, synthetic construct
PTNAAAKLH

SEQ ID NO: 18293 - protein, 9 aa, synthetic construct
GIPAAARVF

SEQ ID NO: 18294 - protein, 9 aa, synthetic construct
GIPAAAKVY

SEQ ID NO: 18295 - protein, 9 aa, synthetic construct
GIPAAIRLY

SEQ ID NO: 18296 - protein, 9 aa, synthetic construct
GIPAAIRLH

SEQ ID NO: 18297 - protein, 9 aa, synthetic construct
GIPAAIRVH

SEQ ID NO: 18298 - protein, 9 aa, synthetic construct
GIPAAIKLR

SEQ ID NO: 18299 - protein, 9 aa, synthetic construct
GIPAAIKVY

SEQ ID NO: 18300 - protein, 9 aa, synthetic construct
GIPAAIKVF

SEQ ID NO: 18301 - protein, 9 aa, synthetic construct
GIPAAGHLY

SEQ ID NO: 18302 - protein, 9 aa, synthetic construct
GIPAAGHLK

SEQ ID NO: 18303 - protein, 9 aa, synthetic construct
GIPAAGHLF

SEQ ID NO: 18304 - protein, 9 aa, synthetic construct
GIPAAGRLH

SEQ ID NO: 18305 - protein, 9 aa, synthetic construct
GIPAAGKVH

SEQ ID NO: 18306 - protein, 9 aa, synthetic construct
GIPATLRLY

SEQ ID NO: 18307 - protein, 9 aa, synthetic construct
GIPATLRLH

SEQ ID NO: 18308 - protein, 9 aa, synthetic construct
GIPATLRLF

SEQ ID NO: 18309 - protein, 9 aa, synthetic construct
GIPATLRVY

SEQ ID NO: 18310 - protein, 9 aa, synthetic construct
GIPATLRVH

SEQ ID NO: 18311 - protein, 9 aa, synthetic construct
GIPATLKLK

SEQ ID NO: 18312 - protein, 9 aa, synthetic construct
GIPATLKVF

SEQ ID NO: 18313 - protein, 9 aa, synthetic construct
GIPATAHLH

SEQ ID NO: 18314 - protein, 9 aa, synthetic construct
GIPATIHLF

SEQ ID NO: 18315 - protein, 9 aa, synthetic construct
GIPATIRLR

SEQ ID NO: 18316 - protein, 9 aa, synthetic construct
PTNAAIRLR

SEQ ID NO: 18317 - protein, 9 aa, synthetic construct
GIPATGHLY

SEQ ID NO: 18318 - protein, 9 aa, synthetic construct
GIPATGHLR

SEQ ID NO: 18319 - protein, 9 aa, synthetic construct
GIPATGHVF

SEQ ID NO: 18320 - protein, 9 aa, synthetic construct
GIPATGKVY

SEQ ID NO: 18321 - protein, 9 aa, synthetic construct
GIPATGKVH

SEQ ID NO: 18322 - protein, 9 aa, synthetic construct
PTNAAIRVY

SEQ ID NO: 18323 - protein, 9 aa, synthetic construct
GIPASLHLY

SEQ ID NO: 18324 - protein, 9 aa, synthetic construct
GIPASAHLF

SEQ ID NO: 18325 - protein, 9 aa, synthetic construct
GIPASARVH

SEQ ID NO: 18326 - protein, 9 aa, synthetic construct
PTNAAIKVY

SEQ ID NO: 18327 - protein, 9 aa, synthetic construct
GIPASGHLR

SEQ ID NO: 18328 - protein, 9 aa, synthetic construct
GIPASGHLH

SEQ ID NO: 18329 - protein, 9 aa, synthetic construct
PTNAAIKVF

SEQ ID NO: 18330 - protein, 9 aa, synthetic construct
GIPAVVHVY

SEQ ID NO: 18331 - protein, 9 aa, synthetic construct
GIPAVVHVH

SEQ ID NO: 18332 - protein, 9 aa, synthetic construct
GIPAVVRVH

SEQ ID NO: 18333 - protein, 9 aa, synthetic construct
GIPAVVKVF

SEQ ID NO: 18334 - protein, 9 aa, synthetic construct
PTNAAGHLK

SEQ ID NO: 18335 - protein, 9 aa, synthetic construct
GIPAVAHLY

SEQ ID NO: 18336 - protein, 9 aa, synthetic construct
GIPAVAHLH

SEQ ID NO: 18337 - protein, 9 aa, synthetic construct
GIPAVARLH

SEQ ID NO: 18338 - protein, 9 aa, synthetic construct
GIPAVARVY

SEQ ID NO: 18339 - protein, 9 aa, synthetic construct
GIPAVARVH

SEQ ID NO: 18340 - protein, 9 aa, synthetic construct
GIPAVARVF

SEQ ID NO: 18341 - protein, 9 aa, synthetic construct
GIPAVAKLY

SEQ ID NO: 18342 - protein, 9 aa, synthetic construct
GIPAVAKLR

SEQ ID NO: 18343 - protein, 9 aa, synthetic construct
GIPAVAKLH

SEQ ID NO: 18344 - protein, 9 aa, synthetic construct
GIPAVAKVY

SEQ ID NO: 18345 - protein, 9 aa, synthetic construct
GIPAVAKVF

SEQ ID NO: 18346 - protein, 9 aa, synthetic construct
GIPAVIHLK

SEQ ID NO: 18347 - protein, 9 aa, synthetic construct
PTNAAGRLY

SEQ ID NO: 18348 - protein, 9 aa, synthetic construct
GIPAVIRVH

SEQ ID NO: 18349 - protein, 9 aa, synthetic construct
GIPAVIKLH

SEQ ID NO: 18350 - protein, 9 aa, synthetic construct
PTNAAGRLH

SEQ ID NO: 18351 - protein, 9 aa, synthetic construct
GIPAVGHLH

SEQ ID NO: 18352 - protein, 9 aa, synthetic construct
GIPAVGHLK

SEQ ID NO: 18353 - protein, 9 aa, synthetic construct
GIPAVGHVH

SEQ ID NO: 18354 - protein, 9 aa, synthetic construct
GIPAVGRLY

SEQ ID NO: 18355 - protein, 9 aa, synthetic construct
GIPAVGRLH

SEQ ID NO: 18356 - protein, 9 aa, synthetic construct
GIPAVGRLF

SEQ ID NO: 18357 - protein, 9 aa, synthetic construct
GIPAVGRVY

SEQ ID NO: 18358 - protein, 9 aa, synthetic construct
GIPAVGRVR

SEQ ID NO: 18359 - protein, 9 aa, synthetic construct
GIPAVGRVK

SEQ ID NO: 18360 - protein, 9 aa, synthetic construct
GIPAVGRVF

SEQ ID NO: 18361 - protein, 9 aa, synthetic construct
GIPAVGKLY

SEQ ID NO: 18362 - protein, 9 aa, synthetic construct
GIPAVGKLH

SEQ ID NO: 18363 - protein, 9 aa, synthetic construct
GIPAVGKLF

SEQ ID NO: 18364 - protein, 9 aa, synthetic construct
GIPAVGKVY

SEQ ID NO: 18365 - protein, 9 aa, synthetic construct
GIPAVGKVH

SEQ ID NO: 18366 - protein, 9 aa, synthetic construct
GIPAGARVR

SEQ ID NO: 18367 - protein, 9 aa, synthetic construct
GIPAGAKLR

SEQ ID NO: 18368 - protein, 9 aa, synthetic construct
GIPAGIRVF

SEQ ID NO: 18369 - protein, 9 aa, synthetic construct
PTNATVHLR

SEQ ID NO: 18370 - protein, 9 aa, synthetic construct
PTNATVHLH

SEQ ID NO: 18371 - protein, 9 aa, synthetic construct
PTNATVHLK

SEQ ID NO: 18372 - protein, 9 aa, synthetic construct
PLNGATHVH

SEQ ID NO: 18373 - protein, 9 aa, synthetic construct
PLNGATHVF

SEQ ID NO: 18374 - protein, 9 aa, synthetic construct
PLNGSSHLR

SEQ ID NO: 18375 - protein, 9 aa, synthetic construct
PLNGVSHLY

SEQ ID NO: 18376 - protein, 9 aa, synthetic construct
PLNGVSHLR

SEQ ID NO: 18377 - protein, 9 aa, synthetic construct
PLNGVSHLK

SEQ ID NO: 18378 - protein, 9 aa, synthetic construct
PLNGVSHLF

SEQ ID NO: 18379 - protein, 9 aa, synthetic construct
PLNGVSHVY

SEQ ID NO: 18380 - protein, 9 aa, synthetic construct
PLNGVSHVR

SEQ ID NO: 18381 - protein, 9 aa, synthetic construct
PLNGVSHVH

SEQ ID NO: 18382 - protein, 9 aa, synthetic construct
PLNGVSHVF

SEQ ID NO: 18383 - protein, 9 aa, synthetic construct
PLNGVSRLY

SEQ ID NO: 18384 - protein, 9 aa, synthetic construct
PLNGVSKVF

SEQ ID NO: 18385 - protein, 9 aa, synthetic construct
PLNGVTHLH

SEQ ID NO: 18386 - protein, 9 aa, synthetic construct
PLNGVTHVK

SEQ ID NO: 18387 - protein, 9 aa, synthetic construct
PLNGVTKLY

SEQ ID NO: 18388 - protein, 9 aa, synthetic construct
PLNGGSRVY

SEQ ID NO: 18389 - protein, 9 aa, synthetic construct
PLNGGTHLH

SEQ ID NO: 18390 - protein, 9 aa, synthetic construct
PLNGGTHVF

SEQ ID NO: 18391 - protein, 9 aa, synthetic construct
PLNGGTRLH

SEQ ID NO: 18392 - protein, 9 aa, synthetic construct
PLNGGTKLY

SEQ ID NO: 18393 - protein, 9 aa, synthetic construct
PLNGGTKLR

SEQ ID NO: 18394 - protein, 9 aa, synthetic construct
PLNGGTKLH

SEQ ID NO: 18395 - protein, 9 aa, synthetic construct
PLNGGTKVH

SEQ ID NO: 18396 - protein, 9 aa, synthetic construct
PLNGGTKVF

SEQ ID NO: 18397 - protein, 9 aa, synthetic construct
PTNATLKLK

SEQ ID NO: 18398 - protein, 9 aa, synthetic construct
PTNATAHLH

SEQ ID NO: 18399 - protein, 9 aa, synthetic construct
PTNGATHLY

SEQ ID NO: 18400 - protein, 9 aa, synthetic construct
PTNGATHLH

SEQ ID NO: 18401 - protein, 9 aa, synthetic construct
PTNGATHLK

SEQ ID NO: 18402 - protein, 9 aa, synthetic construct
PTNGATHLF

SEQ ID NO: 18403 - protein, 9 aa, synthetic construct
PTNGATHVY

SEQ ID NO: 18404 - protein, 9 aa, synthetic construct
PTNGATHVR

SEQ ID NO: 18405 - protein, 9 aa, synthetic construct
PTNGATHVK

SEQ ID NO: 18406 - protein, 9 aa, synthetic construct
PTNATAHVY

SEQ ID NO: 18407 - protein, 9 aa, synthetic construct
PTNGTTHVH

SEQ ID NO: 18408 - protein, 9 aa, synthetic construct
PTNGTTHVF

SEQ ID NO: 18409 - protein, 9 aa, synthetic construct
PTNATARLY

SEQ ID NO: 18410 - protein, 9 aa, synthetic construct
PTNATARLH

SEQ ID NO: 18411 - protein, 9 aa, synthetic construct
PTNGSSHLH

SEQ ID NO: 18412 - protein, 9 aa, synthetic construct
PTNGSSHLK

SEQ ID NO: 18413 - protein, 9 aa, synthetic construct
PTNGSSHVY

SEQ ID NO: 18414 - protein, 9 aa, synthetic construct
PTNGSSHVR

SEQ ID NO: 18415 - protein, 9 aa, synthetic construct
PTNGSSHVH

SEQ ID NO: 18416 - protein, 9 aa, synthetic construct
PTNGSSHVK

SEQ ID NO: 18417 - protein, 9 aa, synthetic construct
PTNGSSHVF

SEQ ID NO: 18418 - protein, 9 aa, synthetic construct
PTNATARVY

SEQ ID NO: 18419 - protein, 9 aa, synthetic construct
PTNGSTHLR

SEQ ID NO: 18420 - protein, 9 aa, synthetic construct
PTNGVSHLH

SEQ ID NO: 18421 - protein, 9 aa, synthetic construct
PTNGVSKLY

SEQ ID NO: 18422 - protein, 9 aa, synthetic construct
PTNGVTHLH

SEQ ID NO: 18423 - protein, 9 aa, synthetic construct
PTNGVTRLY

SEQ ID NO: 18424 - protein, 9 aa, synthetic construct
PTNGVTKLR

SEQ ID NO: 18425 - protein, 9 aa, synthetic construct
PTNGVTKLH

SEQ ID NO: 18426 - protein, 9 aa, synthetic construct
PTNGVTKVY

SEQ ID NO: 18427 - protein, 9 aa, synthetic construct
PTNGVTKVH

SEQ ID NO: 18428 - protein, 9 aa, synthetic construct
PTNGVTKVF

SEQ ID NO: 18429 - protein, 9 aa, synthetic construct
PTNATAKLF

SEQ ID NO: 18430 - protein, 9 aa, synthetic construct
PTNGGSHLR

SEQ ID NO: 18431 - protein, 9 aa, synthetic construct
PTNGGSRVH

SEQ ID NO: 18432 - protein, 9 aa, synthetic construct
PTNGGSRVF

SEQ ID NO: 18433 - protein, 9 aa, synthetic construct
PTNATAKVH

SEQ ID NO: 18434 - protein, 9 aa, synthetic construct
PTNGGTHVH

SEQ ID NO: 18435 - protein, 9 aa, synthetic construct
PTQGASHLH

SEQ ID NO: 18436 - protein, 9 aa, synthetic construct
PTQGASHVH

SEQ ID NO: 18437 - protein, 9 aa, synthetic construct
PTQGASHVF

SEQ ID NO: 18438 - protein, 9 aa, synthetic construct
PTNATIHLR

SEQ ID NO: 18439 - protein, 9 aa, synthetic construct
PTNATIHLK

SEQ ID NO: 18440 - protein, 9 aa, synthetic construct
PTQGTSHLY

SEQ ID NO: 18441 - protein, 9 aa, synthetic construct
PTQGTSHLR

SEQ ID NO: 18442 - protein, 9 aa, synthetic construct
PTQGTSHLF

SEQ ID NO: 18443 - protein, 9 aa, synthetic construct
PTQGTSHVY

SEQ ID NO: 18444 - protein, 9 aa, synthetic construct
PTQGTSHVK

SEQ ID NO: 18445 - protein, 9 aa, synthetic construct
PTQGTSHVF

SEQ ID NO: 18446 - protein, 9 aa, synthetic construct
PTNATIHVK

SEQ ID NO: 18447 - protein, 9 aa, synthetic construct
PTQGTTHVK

SEQ ID NO: 18448 - protein, 9 aa, synthetic construct
PLNGALKVY

SEQ ID NO: 18449 - protein, 9 aa, synthetic construct
PTQGSTHVY

SEQ ID NO: 18450 - protein, 9 aa, synthetic construct
PTNATIKVY

SEQ ID NO: 18451 - protein, 9 aa, synthetic construct
PTNATGHLY

SEQ ID NO: 18452 - protein, 9 aa, synthetic construct
PTNATGHLR

SEQ ID NO: 18453 - protein, 9 aa, synthetic construct
PTNASVHVK

SEQ ID NO: 18454 - protein, 9 aa, synthetic construct
PTNASLKLY

SEQ ID NO: 18455 - protein, 9 aa, synthetic construct
PLNGVIKVH

SEQ ID NO: 18456 - protein, 9 aa, synthetic construct
PTNASGHLR

SEQ ID NO: 18457 - protein, 9 aa, synthetic construct
PTNAVVKVF

SEQ ID NO: 18458 - protein, 9 aa, synthetic construct
PLNGVGHLK

SEQ ID NO: 18459 - protein, 9 aa, synthetic construct
PTNAVLHVK

SEQ ID NO: 18460 - protein, 9 aa, synthetic construct
PLNGVGHVR

SEQ ID NO: 18461 - protein, 9 aa, synthetic construct
PTNAVAHLH

SEQ ID NO: 18462 - protein, 9 aa, synthetic construct
PTNAVAHVR

SEQ ID NO: 18463 - protein, 9 aa, synthetic construct
PTNAVAHVH

SEQ ID NO: 18464 - protein, 9 aa, synthetic construct
PLNGVGHVK

SEQ ID NO: 18465 - protein, 9 aa, synthetic construct
PTNAVGHLY

SEQ ID NO: 18466 - protein, 9 aa, synthetic construct
PLNGVGRLF

SEQ ID NO: 18467 - protein, 9 aa, synthetic construct
PLNGVGRVY

SEQ ID NO: 18468 - protein, 9 aa, synthetic construct
PLNGVGRVH

SEQ ID NO: 18469 - protein, 9 aa, synthetic construct
PTNAGVKVF

SEQ ID NO: 18470 - protein, 9 aa, synthetic construct
PLNGVGRVF

SEQ ID NO: 18471 - protein, 9 aa, synthetic construct
PTNAGLKLH

SEQ ID NO: 18472 - protein, 9 aa, synthetic construct
PTNAGARVR

SEQ ID NO: 18473 - protein, 9 aa, synthetic construct
PTNAGAKLR

SEQ ID NO: 18474 - protein, 9 aa, synthetic construct
PLNGVGKVY

SEQ ID NO: 18475 - protein, 9 aa, synthetic construct
PTNAGIRLH

SEQ ID NO: 18476 - protein, 9 aa, synthetic construct
PTNAGIRVH

SEQ ID NO: 18477 - protein, 9 aa, synthetic construct
PTNAGIKLH

SEQ ID NO: 18478 - protein, 9 aa, synthetic construct
PLNGVGKVH

SEQ ID NO: 18479 - protein, 9 aa, synthetic construct
PTNAGGHLR

SEQ ID NO: 18480 - protein, 9 aa, synthetic construct
PTQGAVHVK

SEQ ID NO: 18481 - protein, 9 aa, synthetic construct
PLNGGVHLH

SEQ ID NO: 18482 - protein, 9 aa, synthetic construct
PTQGALHLR

SEQ ID NO: 18483 - protein, 9 aa, synthetic construct
PTQGALHVY

SEQ ID NO: 18484 - protein, 9 aa, synthetic construct
PLNGGVHLF

SEQ ID NO: 18485 - protein, 9 aa, synthetic construct
PLNGGVHVY

SEQ ID NO: 18486 - protein, 9 aa, synthetic construct
PLNGGVHVR

SEQ ID NO: 18487 - protein, 9 aa, synthetic construct
PTQGAAHVY

SEQ ID NO: 18488 - protein, 9 aa, synthetic construct
PTQGAAKLY

SEQ ID NO: 18489 - protein, 9 aa, synthetic construct
PTQGAIHVF

SEQ ID NO: 18490 - protein, 9 aa, synthetic construct
PTQGAGKVF

SEQ ID NO: 18491 - protein, 9 aa, synthetic construct
PTQGTVRLK

SEQ ID NO: 18492 - protein, 9 aa, synthetic construct
PTQGTVKLH

SEQ ID NO: 18493 - protein, 9 aa, synthetic construct
PTQGTVKLF

SEQ ID NO: 18494 - protein, 9 aa, synthetic construct
PTQGTLRLF

SEQ ID NO: 18495 - protein, 9 aa, synthetic construct
PTQGTLKLH

SEQ ID NO: 18496 - protein, 9 aa, synthetic construct
PTQGTAHVF

SEQ ID NO: 18497 - protein, 9 aa, synthetic construct
PTQGTARLH

SEQ ID NO: 18498 - protein, 9 aa, synthetic construct
PTQGTARVY

SEQ ID NO: 18499 - protein, 9 aa, synthetic construct
PTQGTARVF

SEQ ID NO: 18500 - protein, 9 aa, synthetic construct
PLNGGVKLF

SEQ ID NO: 18501 - protein, 9 aa, synthetic construct
PTQGTIHLY

SEQ ID NO: 18502 - protein, 9 aa, synthetic construct
PTQGTIHLH

SEQ ID NO: 18503 - protein, 9 aa, synthetic construct
PTQGTIHVF

SEQ ID NO: 18504 - protein, 9 aa, synthetic construct
PTQGTIRLY

SEQ ID NO: 18505 - protein, 9 aa, synthetic construct
PTQGTIRLH

SEQ ID NO: 18506 - protein, 9 aa, synthetic construct
PTQGTIRLF

SEQ ID NO: 18507 - protein, 9 aa, synthetic construct
PTQGTIKVR

SEQ ID NO: 18508 - protein, 9 aa, synthetic construct
PTQGTGRLF

SEQ ID NO: 18509 - protein, 9 aa, synthetic construct
PTQGTGKVH

SEQ ID NO: 18510 - protein, 9 aa, synthetic construct
PTQGSVRVY

SEQ ID NO: 18511 - protein, 9 aa, synthetic construct
PTQGSVKLH

SEQ ID NO: 18512 - protein, 9 aa, synthetic construct
PTQGSLHVY

SEQ ID NO: 18513 - protein, 9 aa, synthetic construct
PTQGSAHVR

SEQ ID NO: 18514 - protein, 9 aa, synthetic construct
PTQGSAHVK

SEQ ID NO: 18515 - protein, 9 aa, synthetic construct
PLNGGLHVH

SEQ ID NO: 18516 - protein, 9 aa, synthetic construct
PTQGSIHLY

SEQ ID NO: 18517 - protein, 9 aa, synthetic construct
PTQGSIHLH

SEQ ID NO: 18518 - protein, 9 aa, synthetic construct
PTQGSIRLY

SEQ ID NO: 18519 - protein, 9 aa, synthetic construct
PTQGSIRLR

SEQ ID NO: 18520 - protein, 9 aa, synthetic construct
PTQGSIRLH

SEQ ID NO: 18521 - protein, 9 aa, synthetic construct
PTQGSIRVR

SEQ ID NO: 18522 - protein, 9 aa, synthetic construct
PTQGSIKLR

SEQ ID NO: 18523 - protein, 9 aa, synthetic construct
PTQGSIKVH

SEQ ID NO: 18524 - protein, 9 aa, synthetic construct
PTQGSIKVK

SEQ ID NO: 18525 - protein, 9 aa, synthetic construct
PTQGSIKVF

SEQ ID NO: 18526 - protein, 9 aa, synthetic construct
PTQGSGHLR

SEQ ID NO: 18527 - protein, 9 aa, synthetic construct
PTQGSGHLH

SEQ ID NO: 18528 - protein, 9 aa, synthetic construct
PTQGSGHVH

SEQ ID NO: 18529 - protein, 9 aa, synthetic construct
PTQGSGRVK

SEQ ID NO: 18530 - protein, 9 aa, synthetic construct
PTQGSGRVF

SEQ ID NO: 18531 - protein, 9 aa, synthetic construct
PTQGVVRLF

SEQ ID NO: 18532 - protein, 9 aa, synthetic construct
PTQGVVRVY

SEQ ID NO: 18533 - protein, 9 aa, synthetic construct
PTQGVVRVH

SEQ ID NO: 18534 - protein, 9 aa, synthetic construct
PTQGVVRVF

SEQ ID NO: 18535 - protein, 9 aa, synthetic construct
PTQGVVKLY

SEQ ID NO: 18536 - protein, 9 aa, synthetic construct
PTQGVVKVF

SEQ ID NO: 18537 - protein, 9 aa, synthetic construct
PTQGVLHLY

SEQ ID NO: 18538 - protein, 9 aa, synthetic construct
PTQGVLHLR

SEQ ID NO: 18539 - protein, 9 aa, synthetic construct
PTQGVLHLH

SEQ ID NO: 18540 - protein, 9 aa, synthetic construct
PTQGVLHVR

SEQ ID NO: 18541 - protein, 9 aa, synthetic construct
PTQGVLHVK

SEQ ID NO: 18542 - protein, 9 aa, synthetic construct
PTQGVLHVF

SEQ ID NO: 18543 - protein, 9 aa, synthetic construct
PTQGVLRLH

SEQ ID NO: 18544 - protein, 9 aa, synthetic construct
PLNGGLKLY

SEQ ID NO: 18545 - protein, 9 aa, synthetic construct
PTQGVLKLY

SEQ ID NO: 18546 - protein, 9 aa, synthetic construct
PTQGVLKLF

SEQ ID NO: 18547 - protein, 9 aa, synthetic construct
PTQGVLKVH

SEQ ID NO: 18548 - protein, 9 aa, synthetic construct
PTQGVAHLY

SEQ ID NO: 18549 - protein, 9 aa, synthetic construct
PTQGVAHLF

SEQ ID NO: 18550 - protein, 9 aa, synthetic construct
PTQGVAHVR

SEQ ID NO: 18551 - protein, 9 aa, synthetic construct
PTQGVAHVH

SEQ ID NO: 18552 - protein, 9 aa, synthetic construct
PLNGGLKVY

SEQ ID NO: 18553 - protein, 9 aa, synthetic construct
PTQGVIRLR

SEQ ID NO: 18554 - protein, 9 aa, synthetic construct
PTQGVIRLH

SEQ ID NO: 18555 - protein, 9 aa, synthetic construct
PTQGVIRVY

SEQ ID NO: 18556 - protein, 9 aa, synthetic construct
PTQGVIRVH

SEQ ID NO: 18557 - protein, 9 aa, synthetic construct
PTQGVIRVF

SEQ ID NO: 18558 - protein, 9 aa, synthetic construct
PTQGVIKLY

SEQ ID NO: 18559 - protein, 9 aa, synthetic construct
PTQGVGHLR

SEQ ID NO: 18560 - protein, 9 aa, synthetic construct
PTQGVGHLH

SEQ ID NO: 18561 - protein, 9 aa, synthetic construct
PTQGVGHLF

SEQ ID NO: 18562 - protein, 9 aa, synthetic construct
PTQGVGHVY

SEQ ID NO: 18563 - protein, 9 aa, synthetic construct
PTQGVGHVK

SEQ ID NO: 18564 - protein, 9 aa, synthetic construct
PTQGVGHVF

SEQ ID NO: 18565 - protein, 9 aa, synthetic construct
PTQGVGRVH

SEQ ID NO: 18566 - protein, 9 aa, synthetic construct
PLNGGLKVF

SEQ ID NO: 18567 - protein, 9 aa, synthetic construct
PTQGVGKVY

SEQ ID NO: 18568 - protein, 9 aa, synthetic construct
PLNGAAHVR

SEQ ID NO: 18569 - protein, 9 aa, synthetic construct
PTQGGVHVK

SEQ ID NO: 18570 - protein, 9 aa, synthetic construct
PTQGGVHVF

SEQ ID NO: 18571 - protein, 9 aa, synthetic construct
PTQGGLHVH

SEQ ID NO: 18572 - protein, 9 aa, synthetic construct
PTQGGLKVF

SEQ ID NO: 18573 - protein, 9 aa, synthetic construct
PTQGGAHLH

SEQ ID NO: 18574 - protein, 9 aa, synthetic construct
PTQGGAHLK

SEQ ID NO: 18575 - protein, 9 aa, synthetic construct
PTQGGIHLK

SEQ ID NO: 18576 - protein, 9 aa, synthetic construct
PLNGAAHVH

SEQ ID NO: 18577 - protein, 9 aa, synthetic construct
PTQGGIRLY

SEQ ID NO: 18578 - protein, 9 aa, synthetic construct
PTQGGIRLH

SEQ ID NO: 18579 - protein, 9 aa, synthetic construct
PTQGGIRVH

SEQ ID NO: 18580 - protein, 9 aa, synthetic construct
PTQGGIKVR

SEQ ID NO: 18581 - protein, 9 aa, synthetic construct
PTQAAVHLY

SEQ ID NO: 18582 - protein, 9 aa, synthetic construct
PTQAAVHLK

SEQ ID NO: 18583 - protein, 9 aa, synthetic construct
PLNGGARVR

SEQ ID NO: 18584 - protein, 9 aa, synthetic construct
PTQAAVKLF

SEQ ID NO: 18585 - protein, 9 aa, synthetic construct
PTQAALRLF

SEQ ID NO: 18586 - protein, 9 aa, synthetic construct
PTQAAAHLY

SEQ ID NO: 18587 - protein, 9 aa, synthetic construct
PLNGGAKLH

SEQ ID NO: 18588 - protein, 9 aa, synthetic construct
PTQAAARLH

SEQ ID NO: 18589 - protein, 9 aa, synthetic construct
PTQAAAKLY

SEQ ID NO: 18590 - protein, 9 aa, synthetic construct
PTQAAAKLH

SEQ ID NO: 18591 - protein, 9 aa, synthetic construct
PLNGGAKLF

SEQ ID NO: 18592 - protein, 9 aa, synthetic construct
PTQAAIHLH

SEQ ID NO: 18593 - protein, 9 aa, synthetic construct
PTQAAIRLR

SEQ ID NO: 18594 - protein, 9 aa, synthetic construct
PTQAAIKVY

SEQ ID NO: 18595 - protein, 9 aa, synthetic construct
PTQAAGHLY

SEQ ID NO: 18596 - protein, 9 aa, synthetic construct
PTQAAGHLK

SEQ ID NO: 18597 - protein, 9 aa, synthetic construct
PLNGGAKVF

SEQ ID NO: 18598 - protein, 9 aa, synthetic construct
PTQATVHLY

SEQ ID NO: 18599 - protein, 9 aa, synthetic construct
PTQATVHLR

SEQ ID NO: 18600 - protein, 9 aa, synthetic construct
PTQATVHLH

SEQ ID NO: 18601 - protein, 9 aa, synthetic construct
PTQATVHVH

SEQ ID NO: 18602 - protein, 9 aa, synthetic construct
PTQATVRVF

SEQ ID NO: 18603 - protein, 9 aa, synthetic construct
PLNGGIHLH

SEQ ID NO: 18604 - protein, 9 aa, synthetic construct
PTQATVKLY

SEQ ID NO: 18605 - protein, 9 aa, synthetic construct
PTQATVKVY

SEQ ID NO: 18606 - protein, 9 aa, synthetic construct
PTQATLRLF

SEQ ID NO: 18607 - protein, 9 aa, synthetic construct
PTQATLRVF

SEQ ID NO: 18608 - protein, 9 aa, synthetic construct
PLNGGIHVY

SEQ ID NO: 18609 - protein, 9 aa, synthetic construct
PTQATAHVR

SEQ ID NO: 18610 - protein, 9 aa, synthetic construct
PTQATAHVH

SEQ ID NO: 18611 - protein, 9 aa, synthetic construct
PTQATAHVK

SEQ ID NO: 18612 - protein, 9 aa, synthetic construct
PTQATAHVF

SEQ ID NO: 18613 - protein, 9 aa, synthetic construct
PTQATARLY

SEQ ID NO: 18614 - protein, 9 aa, synthetic construct
PTQATARVY

SEQ ID NO: 18615 - protein, 9 aa, synthetic construct
PTQATARVH

SEQ ID NO: 18616 - protein, 9 aa, synthetic construct
PTQATARVF

SEQ ID NO: 18617 - protein, 9 aa, synthetic construct
PTQATAKLY

SEQ ID NO: 18618 - protein, 9 aa, synthetic construct
PTQATAKLH

SEQ ID NO: 18619 - protein, 9 aa, synthetic construct
PTQATIHLY

SEQ ID NO: 18620 - protein, 9 aa, synthetic construct
PTQATIHVH

SEQ ID NO: 18621 - protein, 9 aa, synthetic construct
PLNGAARLY

SEQ ID NO: 18622 - protein, 9 aa, synthetic construct
PLNGGIRLY

SEQ ID NO: 18623 - protein, 9 aa, synthetic construct
PTQATIRVH

SEQ ID NO: 18624 - protein, 9 aa, synthetic construct
PLNGGIRLH

SEQ ID NO: 18625 - protein, 9 aa, synthetic construct
PTQATGHVR

SEQ ID NO: 18626 - protein, 9 aa, synthetic construct
PTQATGHVK

SEQ ID NO: 18627 - protein, 9 aa, synthetic construct
PTQATGRLH

SEQ ID NO: 18628 - protein, 9 aa, synthetic construct
PTQATGRVY

SEQ ID NO: 18629 - protein, 9 aa, synthetic construct
PTQATGRVK

SEQ ID NO: 18630 - protein, 9 aa, synthetic construct
PTQATGRVF

SEQ ID NO: 18631 - protein, 9 aa, synthetic construct
PTQATGKLY

SEQ ID NO: 18632 - protein, 9 aa, synthetic construct
PTQATGKVF

SEQ ID NO: 18633 - protein, 9 aa, synthetic construct
PTQASVHVK

SEQ ID NO: 18634 - protein, 9 aa, synthetic construct
PTQASLKLY

SEQ ID NO: 18635 - protein, 9 aa, synthetic construct
PTQASLKVY

SEQ ID NO: 18636 - protein, 9 aa, synthetic construct
PTQASLKVH

SEQ ID NO: 18637 - protein, 9 aa, synthetic construct
PTQASLKVK

SEQ ID NO: 18638 - protein, 9 aa, synthetic construct
PTQASLKVF

SEQ ID NO: 18639 - protein, 9 aa, synthetic construct
PTQASAHVY

SEQ ID NO: 18640 - protein, 9 aa, synthetic construct
PLNGGIKLH

SEQ ID NO: 18641 - protein, 9 aa, synthetic construct
PTQASARLY

SEQ ID NO: 18642 - protein, 9 aa, synthetic construct
PTQASARLH

SEQ ID NO: 18643 - protein, 9 aa, synthetic construct
PTQASAKLY

SEQ ID NO: 18644 - protein, 9 aa, synthetic construct
PTQASAKLH

SEQ ID NO: 18645 - protein, 9 aa, synthetic construct
PTQASAKLF

SEQ ID NO: 18646 - protein, 9 aa, synthetic construct
PTQASIKLR

SEQ ID NO: 18647 - protein, 9 aa, synthetic construct
PTQASIKVR

SEQ ID NO: 18648 - protein, 9 aa, synthetic construct
PTQASGHLR

SEQ ID NO: 18649 - protein, 9 aa, synthetic construct
PTQASGHLH

SEQ ID NO: 18650 - protein, 9 aa, synthetic construct
PTQASGHLF

SEQ ID NO: 18651 - protein, 9 aa, synthetic construct
PTQASGHVH

SEQ ID NO: 18652 - protein, 9 aa, synthetic construct
PTQASGHVF

SEQ ID NO: 18653 - protein, 9 aa, synthetic construct
PLNGGIKVK

SEQ ID NO: 18654 - protein, 9 aa, synthetic construct
PTQASGRVY

SEQ ID NO: 18655 - protein, 9 aa, synthetic construct
PTQASGRVH

SEQ ID NO: 18656 - protein, 9 aa, synthetic construct
PLNGGGHLK

SEQ ID NO: 18657 - protein, 9 aa, synthetic construct
PTQAVLHVH

SEQ ID NO: 18658 - protein, 9 aa, synthetic construct
PLNGGGHVY

SEQ ID NO: 18659 - protein, 9 aa, synthetic construct
PTQAVLKLR

SEQ ID NO: 18660 - protein, 9 aa, synthetic construct
PTQAVLKLH

SEQ ID NO: 18661 - protein, 9 aa, synthetic construct
PTQAVAHLH

SEQ ID NO: 18662 - protein, 9 aa, synthetic construct
PTQAVIRVH

SEQ ID NO: 18663 - protein, 9 aa, synthetic construct
PLNGGGRLH

SEQ ID NO: 18664 - protein, 9 aa, synthetic construct
PTQAVGHLK

SEQ ID NO: 18665 - protein, 9 aa, synthetic construct
PLNGGGRLF

SEQ ID NO: 18666 - protein, 9 aa, synthetic construct
PLNGGGRVY

SEQ ID NO: 18667 - protein, 9 aa, synthetic construct
PLNGGGRVR

SEQ ID NO: 18668 - protein, 9 aa, synthetic construct
PLNGGGRVH

SEQ ID NO: 18669 - protein, 9 aa, synthetic construct
PLNGGGRVK

SEQ ID NO: 18670 - protein, 9 aa, synthetic construct
PLNGGGKLY

SEQ ID NO: 18671 - protein, 9 aa, synthetic construct
PTQAGLKLY

SEQ ID NO: 18672 - protein, 9 aa, synthetic construct
PLNGGGKLR

SEQ ID NO: 18673 - protein, 9 aa, synthetic construct
PLNGGGKLK

SEQ ID NO: 18674 - protein, 9 aa, synthetic construct
PLNGGGKVY

SEQ ID NO: 18675 - protein, 9 aa, synthetic construct
PLNGGGKVH

SEQ ID NO: 18676 - protein, 9 aa, synthetic construct
PLNGGGKVK

SEQ ID NO: 18677 - protein, 9 aa, synthetic construct
PTPGAVHLH

SEQ ID NO: 18678 - protein, 9 aa, synthetic construct
PTPGAVRVH

SEQ ID NO: 18679 - protein, 9 aa, synthetic construct
PTPGALHLK

SEQ ID NO: 18680 - protein, 9 aa, synthetic construct
PTPGAAHVY

SEQ ID NO: 18681 - protein, 9 aa, synthetic construct
PTPGAARVY

SEQ ID NO: 18682 - protein, 9 aa, synthetic construct
PTPGAAKLY

SEQ ID NO: 18683 - protein, 9 aa, synthetic construct
PTPGAIHLH

SEQ ID NO: 18684 - protein, 9 aa, synthetic construct
PTPGAGRLF

SEQ ID NO: 18685 - protein, 9 aa, synthetic construct
PTPGAGKLH

SEQ ID NO: 18686 - protein, 9 aa, synthetic construct
PTPGTVHLY

SEQ ID NO: 18687 - protein, 9 aa, synthetic construct
PTPGTVHLH

SEQ ID NO: 18688 - protein, 9 aa, synthetic construct
PTPGTVHLK

SEQ ID NO: 18689 - protein, 9 aa, synthetic construct
PTPGTVHLF

SEQ ID NO: 18690 - protein, 9 aa, synthetic construct
PTPGTVHVK

SEQ ID NO: 18691 - protein, 9 aa, synthetic construct
PTPGTVRVY

SEQ ID NO: 18692 - protein, 9 aa, synthetic construct
PTPGTVKLH

SEQ ID NO: 18693 - protein, 9 aa, synthetic construct
PTPGTVKVH

SEQ ID NO: 18694 - protein, 9 aa, synthetic construct
PTPGTLHLR

SEQ ID NO: 18695 - protein, 9 aa, synthetic construct
PLNAAVRVF

SEQ ID NO: 18696 - protein, 9 aa, synthetic construct
PTPGTLKLH

SEQ ID NO: 18697 - protein, 9 aa, synthetic construct
PTPGTAHLK

SEQ ID NO: 18698 - protein, 9 aa, synthetic construct
PTPGTAHVR

SEQ ID NO: 18699 - protein, 9 aa, synthetic construct
PTPGTARLH

SEQ ID NO: 18700 - protein, 9 aa, synthetic construct
PTPGTARVY

SEQ ID NO: 18701 - protein, 9 aa, synthetic construct
PTPGTAKLR

SEQ ID NO: 18702 - protein, 9 aa, synthetic construct
PTPGTAKVK

SEQ ID NO: 18703 - protein, 9 aa, synthetic construct
PTPGTIHLY

SEQ ID NO: 18704 - protein, 9 aa, synthetic construct
PTPGTIHLF

SEQ ID NO: 18705 - protein, 9 aa, synthetic construct
PTPGTIHVY

SEQ ID NO: 18706 - protein, 9 aa, synthetic construct
PTPGTIHVF

SEQ ID NO: 18707 - protein, 9 aa, synthetic construct
PTPGTIKLR

SEQ ID NO: 18708 - protein, 9 aa, synthetic construct
PTPGTIKVY

SEQ ID NO: 18709 - protein, 9 aa, synthetic construct
PTPGTGHLY

SEQ ID NO: 18710 - protein, 9 aa, synthetic construct
PTPGTGRLF

SEQ ID NO: 18711 - protein, 9 aa, synthetic construct
PTPGTGKVY

SEQ ID NO: 18712 - protein, 9 aa, synthetic construct
PTPGSLKLR

SEQ ID NO: 18713 - protein, 9 aa, synthetic construct
PTPGSAHVR

SEQ ID NO: 18714 - protein, 9 aa, synthetic construct
PTPGSARVY

SEQ ID NO: 18715 - protein, 9 aa, synthetic construct
PTPGSARVR

SEQ ID NO: 18716 - protein, 9 aa, synthetic construct
PTPGSARVH

SEQ ID NO: 18717 - protein, 9 aa, synthetic construct
PTPGSARVF

SEQ ID NO: 18718 - protein, 9 aa, synthetic construct
PTPGSAKVR

SEQ ID NO: 18719 - protein, 9 aa, synthetic construct
PLNAALRLY

SEQ ID NO: 18720 - protein, 9 aa, synthetic construct
PTPGSIKLF

SEQ ID NO: 18721 - protein, 9 aa, synthetic construct
PTPGSGHLR

SEQ ID NO: 18722 - protein, 9 aa, synthetic construct
PTPGVVHVY

SEQ ID NO: 18723 - protein, 9 aa, synthetic construct
PTPGVVKLK

SEQ ID NO: 18724 - protein, 9 aa, synthetic construct
PTPGVVKVY

SEQ ID NO: 18725 - protein, 9 aa, synthetic construct
PTPGVLHLF

SEQ ID NO: 18726 - protein, 9 aa, synthetic construct
PTPGVLKLY

SEQ ID NO: 18727 - protein, 9 aa, synthetic construct
PTPGVAHLH

SEQ ID NO: 18728 - protein, 9 aa, synthetic construct
PTPGVIHLK

SEQ ID NO: 18729 - protein, 9 aa, synthetic construct
PTPGVGHVY

SEQ ID NO: 18730 - protein, 9 aa, synthetic construct
PLNGAAKLR

SEQ ID NO: 18731 - protein, 9 aa, synthetic construct
PLNAAAHLR

SEQ ID NO: 18732 - protein, 9 aa, synthetic construct
PLNAAAHLF

SEQ ID NO: 18733 - protein, 9 aa, synthetic construct
PTPGGLKLF

SEQ ID NO: 18734 - protein, 9 aa, synthetic construct
PTPGGLKVF

SEQ ID NO: 18735 - protein, 9 aa, synthetic construct
PLNAAAHVR

SEQ ID NO: 18736 - protein, 9 aa, synthetic construct
PTPGGARVR

SEQ ID NO: 18737 - protein, 9 aa, synthetic construct
PTPGGARVH

SEQ ID NO: 18738 - protein, 9 aa, synthetic construct
PLNAAARLH

SEQ ID NO: 18739 - protein, 9 aa, synthetic construct
PTPGGGRVY

SEQ ID NO: 18740 - protein, 9 aa, synthetic construct
PTPAAVHLH

SEQ ID NO: 18741 - protein, 9 aa, synthetic construct
PTPAAVKVF

SEQ ID NO: 18742 - protein, 9 aa, synthetic construct
PLNAAAKLR

SEQ ID NO: 18743 - protein, 9 aa, synthetic construct
PLNAAAKLH

SEQ ID NO: 18744 - protein, 9 aa, synthetic construct
PTPAAARLH

SEQ ID NO: 18745 - protein, 9 aa, synthetic construct
PTPAAAKLH

SEQ ID NO: 18746 - protein, 9 aa, synthetic construct
PTPAAAKVY

SEQ ID NO: 18747 - protein, 9 aa, synthetic construct
PTPAAAKVH

SEQ ID NO: 18748 - protein, 9 aa, synthetic construct
PTPAAIHLF

SEQ ID NO: 18749 - protein, 9 aa, synthetic construct
PLNAAAKVY

SEQ ID NO: 18750 - protein, 9 aa, synthetic construct
PTPAAIRLR

SEQ ID NO: 18751 - protein, 9 aa, synthetic construct
PTPAAIKVY

SEQ ID NO: 18752 - protein, 9 aa, synthetic construct
PTPAAIKVF

SEQ ID NO: 18753 - protein, 9 aa, synthetic construct
PTPAAGRLH

SEQ ID NO: 18754 - protein, 9 aa, synthetic construct
PTPAAGKVY

SEQ ID NO: 18755 - protein, 9 aa, synthetic construct
PTPAAGKVH

SEQ ID NO: 18756 - protein, 9 aa, synthetic construct
PTPATVHLR

SEQ ID NO: 18757 - protein, 9 aa, synthetic construct
PTPATVHVH

SEQ ID NO: 18758 - protein, 9 aa, synthetic construct
PTPATVHVK

SEQ ID NO: 18759 - protein, 9 aa, synthetic construct
PLNAAIHLK

SEQ ID NO: 18760 - protein, 9 aa, synthetic construct
PLNAAIHVY

SEQ ID NO: 18761 - protein, 9 aa, synthetic construct
PTPATLKLK

SEQ ID NO: 18762 - protein, 9 aa, synthetic construct
PTPATAHLR

SEQ ID NO: 18763 - protein, 9 aa, synthetic construct
PTPATARVF

SEQ ID NO: 18764 - protein, 9 aa, synthetic construct
PTPATGHLY

SEQ ID NO: 18765 - protein, 9 aa, synthetic construct
PTPATGHLR

SEQ ID NO: 18766 - protein, 9 aa, synthetic construct
PTPATGHLK

SEQ ID NO: 18767 - protein, 9 aa, synthetic construct
PTPATGKVY

SEQ ID NO: 18768 - protein, 9 aa, synthetic construct
PTPATGKVF

SEQ ID NO: 18769 - protein, 9 aa, synthetic construct
PLNAAIRVY

SEQ ID NO: 18770 - protein, 9 aa, synthetic construct
PTPASVHLR

SEQ ID NO: 18771 - protein, 9 aa, synthetic construct
PTPASVHLH

SEQ ID NO: 18772 - protein, 9 aa, synthetic construct
PTPASVHVY

SEQ ID NO: 18773 - protein, 9 aa, synthetic construct
PTPASVHVR

SEQ ID NO: 18774 - protein, 9 aa, synthetic construct
PLNAAIRVH

SEQ ID NO: 18775 - protein, 9 aa, synthetic construct
PTPASLHLY

SEQ ID NO: 18776 - protein, 9 aa, synthetic construct
PTPASLHVK

SEQ ID NO: 18777 - protein, 9 aa, synthetic construct
PTPASLRLH

SEQ ID NO: 18778 - protein, 9 aa, synthetic construct
PTPASLKLY

SEQ ID NO: 18779 - protein, 9 aa, synthetic construct
PTPASLKLH

SEQ ID NO: 18780 - protein, 9 aa, synthetic construct
PTPASAHLY

SEQ ID NO: 18781 - protein, 9 aa, synthetic construct
PTPASAHLR

SEQ ID NO: 18782 - protein, 9 aa, synthetic construct
PTPASAHVY

SEQ ID NO: 18783 - protein, 9 aa, synthetic construct
PTPASAHVR

SEQ ID NO: 18784 - protein, 9 aa, synthetic construct
PTPASAHVK

SEQ ID NO: 18785 - protein, 9 aa, synthetic construct
PTPASARVR

SEQ ID NO: 18786 - protein, 9 aa, synthetic construct
PTPASAKLR

SEQ ID NO: 18787 - protein, 9 aa, synthetic construct
PTPASAKVY

SEQ ID NO: 18788 - protein, 9 aa, synthetic construct
PTPASAKVF

SEQ ID NO: 18789 - protein, 9 aa, synthetic construct
PTPASIHVY

SEQ ID NO: 18790 - protein, 9 aa, synthetic construct
PTPASIHVK

SEQ ID NO: 18791 - protein, 9 aa, synthetic construct
PLNAAIKVY

SEQ ID NO: 18792 - protein, 9 aa, synthetic construct
PTPASIKLR

SEQ ID NO: 18793 - protein, 9 aa, synthetic construct
PTPASGHLH

SEQ ID NO: 18794 - protein, 9 aa, synthetic construct
PTPASGHLK

SEQ ID NO: 18795 - protein, 9 aa, synthetic construct
PTPASGHVY

SEQ ID NO: 18796 - protein, 9 aa, synthetic construct
PTPASGHVK

SEQ ID NO: 18797 - protein, 9 aa, synthetic construct
PTPASGHVF

SEQ ID NO: 18798 - protein, 9 aa, synthetic construct
PTPASGRVY

SEQ ID NO: 18799 - protein, 9 aa, synthetic construct
PLNAAIKVF

SEQ ID NO: 18800 - protein, 9 aa, synthetic construct
PTPASGKVY

SEQ ID NO: 18801 - protein, 9 aa, synthetic construct
PTPAVVHVH

SEQ ID NO: 18802 - protein, 9 aa, synthetic construct
PTPAVVKLF

SEQ ID NO: 18803 - protein, 9 aa, synthetic construct
PTPAVLKLY

SEQ ID NO: 18804 - protein, 9 aa, synthetic construct
PTPAVAHLF

SEQ ID NO: 18805 - protein, 9 aa, synthetic construct
PLNGAAKVK

SEQ ID NO: 18806 - protein, 9 aa, synthetic construct
PTPAVGRLY

SEQ ID NO: 18807 - protein, 9 aa, synthetic construct
PTPAVGRVY

SEQ ID NO: 18808 - protein, 9 aa, synthetic construct
PTPAVGRVH

SEQ ID NO: 18809 - protein, 9 aa, synthetic construct
PTPAVGKVF

SEQ ID NO: 18810 - protein, 9 aa, synthetic construct
PTPAGLKLH

SEQ ID NO: 18811 - protein, 9 aa, synthetic construct
PTPAGAKLR

SEQ ID NO: 18812 - protein, 9 aa, synthetic construct
PTPAGAKLH

SEQ ID NO: 18813 - protein, 9 aa, synthetic construct
PTPAGIHLF

SEQ ID NO: 18814 - protein, 9 aa, synthetic construct
PSNGAVHLH

SEQ ID NO: 18815 - protein, 9 aa, synthetic construct
PSNGAVHVR

SEQ ID NO: 18816 - protein, 9 aa, synthetic construct
PLNATVHLR

SEQ ID NO: 18817 - protein, 9 aa, synthetic construct
PLNATVHLH

SEQ ID NO: 18818 - protein, 9 aa, synthetic construct
PLNATVHLK

SEQ ID NO: 18819 - protein, 9 aa, synthetic construct
PSNGALHLR

SEQ ID NO: 18820 - protein, 9 aa, synthetic construct
PSNGALRVH

SEQ ID NO: 18821 - protein, 9 aa, synthetic construct
PLNATVHVR

SEQ ID NO: 18822 - protein, 9 aa, synthetic construct
PSNGAAHVY

SEQ ID NO: 18823 - protein, 9 aa, synthetic construct
PSNGAAHVR

SEQ ID NO: 18824 - protein, 9 aa, synthetic construct
PSNGAAHVH

SEQ ID NO: 18825 - protein, 9 aa, synthetic construct
PSNGAARVY

SEQ ID NO: 18826 - protein, 9 aa, synthetic construct
PSNGAAKVY

SEQ ID NO: 18827 - protein, 9 aa, synthetic construct
PLNATVHVF

SEQ ID NO: 18828 - protein, 9 aa, synthetic construct
PSNGAIHLY

SEQ ID NO: 18829 - protein, 9 aa, synthetic construct
PSNGAIHVF

SEQ ID NO: 18830 - protein, 9 aa, synthetic construct
PSNGAIRLY

SEQ ID NO: 18831 - protein, 9 aa, synthetic construct
PSNGAIRLR

SEQ ID NO: 18832 - protein, 9 aa, synthetic construct
PSNGAIRVF

SEQ ID NO: 18833 - protein, 9 aa, synthetic construct
PSNGAGHLR

SEQ ID NO: 18834 - protein, 9 aa, synthetic construct
PSNGAGRLY

SEQ ID NO: 18835 - protein, 9 aa, synthetic construct
PSNGAGRVF

SEQ ID NO: 18836 - protein, 9 aa, synthetic construct
PSNGAGKLY

SEQ ID NO: 18837 - protein, 9 aa, synthetic construct
PLNATVRVY

SEQ ID NO: 18838 - protein, 9 aa, synthetic construct
PSNGTVHLH

SEQ ID NO: 18839 - protein, 9 aa, synthetic construct
PSNGTVKLF

SEQ ID NO: 18840 - protein, 9 aa, synthetic construct
PSNGTLHLK

SEQ ID NO: 18841 - protein, 9 aa, synthetic construct
PSNGTLKLH

SEQ ID NO: 18842 - protein, 9 aa, synthetic construct
PSNGTLKLK

SEQ ID NO: 18843 - protein, 9 aa, synthetic construct
PSNGTLKLF

SEQ ID NO: 18844 - protein, 9 aa, synthetic construct
PSNGTLKVR

SEQ ID NO: 18845 - protein, 9 aa, synthetic construct
PSNGTAHLK

SEQ ID NO: 18846 - protein, 9 aa, synthetic construct
PSNGTARLY

SEQ ID NO: 18847 - protein, 9 aa, synthetic construct
PSNGTARVY

SEQ ID NO: 18848 - protein, 9 aa, synthetic construct
PSNGTAKVH

SEQ ID NO: 18849 - protein, 9 aa, synthetic construct
PSNGTAKVK

SEQ ID NO: 18850 - protein, 9 aa, synthetic construct
PSNGTIHLF

SEQ ID NO: 18851 - protein, 9 aa, synthetic construct
PLNATVKVY

SEQ ID NO: 18852 - protein, 9 aa, synthetic construct
PSNGTIKLR

SEQ ID NO: 18853 - protein, 9 aa, synthetic construct
PSNGTIKVY

SEQ ID NO: 18854 - protein, 9 aa, synthetic construct
PSNGTGRLH

SEQ ID NO: 18855 - protein, 9 aa, synthetic construct
PSNGTGKLH

SEQ ID NO: 18856 - protein, 9 aa, synthetic construct
PSNGSVHLH

SEQ ID NO: 18857 - protein, 9 aa, synthetic construct
PSNGSVHVY

SEQ ID NO: 18858 - protein, 9 aa, synthetic construct
PSNGSVHVK

SEQ ID NO: 18859 - protein, 9 aa, synthetic construct
PSNGSVRLY

SEQ ID NO: 18860 - protein, 9 aa, synthetic construct
PSNGSVRVY

SEQ ID NO: 18861 - protein, 9 aa, synthetic construct
PSNGSVKVF

SEQ ID NO: 18862 - protein, 9 aa, synthetic construct
PLNATLHLK

SEQ ID NO: 18863 - protein, 9 aa, synthetic construct
PSNGSLHLF

SEQ ID NO: 18864 - protein, 9 aa, synthetic construct
PSNGSLKLY

SEQ ID NO: 18865 - protein, 9 aa, synthetic construct
PSNGSLKLR

SEQ ID NO: 18866 - protein, 9 aa, synthetic construct
PSNGSAHLR

SEQ ID NO: 18867 - protein, 9 aa, synthetic construct
PSNGSAHLH

SEQ ID NO: 18868 - protein, 9 aa, synthetic construct
PSNGSAHLK

SEQ ID NO: 18869 - protein, 9 aa, synthetic construct
PSNGSAHVY

SEQ ID NO: 18870 - protein, 9 aa, synthetic construct
PSNGSAHVR

SEQ ID NO: 18871 - protein, 9 aa, synthetic construct
PSNGSAHVH

SEQ ID NO: 18872 - protein, 9 aa, synthetic construct
PSNGSAHVK

SEQ ID NO: 18873 - protein, 9 aa, synthetic construct
PSNGSARVY

SEQ ID NO: 18874 - protein, 9 aa, synthetic construct
PSNGSARVH

SEQ ID NO: 18875 - protein, 9 aa, synthetic construct
PSNGSAKLY

SEQ ID NO: 18876 - protein, 9 aa, synthetic construct
PSNGSAKVY

SEQ ID NO: 18877 - protein, 9 aa, synthetic construct
PSNGSAKVF

SEQ ID NO: 18878 - protein, 9 aa, synthetic construct
PSNGSIHLY

SEQ ID NO: 18879 - protein, 9 aa, synthetic construct
PSNGSIHLH

SEQ ID NO: 18880 - protein, 9 aa, synthetic construct
PSNGSIKVY

SEQ ID NO: 18881 - protein, 9 aa, synthetic construct
PSNGSIKVR

SEQ ID NO: 18882 - protein, 9 aa, synthetic construct
PSNGSIKVK

SEQ ID NO: 18883 - protein, 9 aa, synthetic construct
PSNGSGHLR

SEQ ID NO: 18884 - protein, 9 aa, synthetic construct
PLNATLRLF

SEQ ID NO: 18885 - protein, 9 aa, synthetic construct
PSNGVVKLK

SEQ ID NO: 18886 - protein, 9 aa, synthetic construct
PSNGVVKVH

SEQ ID NO: 18887 - protein, 9 aa, synthetic construct
PSNGVLHVK

SEQ ID NO: 18888 - protein, 9 aa, synthetic construct
PSNGVLKVH

SEQ ID NO: 18889 - protein, 9 aa, synthetic construct
PSNGVAHVR

SEQ ID NO: 18890 - protein, 9 aa, synthetic construct
PLNATLKLK

SEQ ID NO: 18891 - protein, 9 aa, synthetic construct
PSNGGVHLF

SEQ ID NO: 18892 - protein, 9 aa, synthetic construct
PSNGGVHVY

SEQ ID NO: 18893 - protein, 9 aa, synthetic construct
PSNGGVHVR

SEQ ID NO: 18894 - protein, 9 aa, synthetic construct
PSNGGVHVF

SEQ ID NO: 18895 - protein, 9 aa, synthetic construct
PSNGGVRVH

SEQ ID NO: 18896 - protein, 9 aa, synthetic construct
PSNGGVKLR

SEQ ID NO: 18897 - protein, 9 aa, synthetic construct
PSNGGLKLY

SEQ ID NO: 18898 - protein, 9 aa, synthetic construct
PSNGGLKLF

SEQ ID NO: 18899 - protein, 9 aa, synthetic construct
PSNGGLKVK

SEQ ID NO: 18900 - protein, 9 aa, synthetic construct
PSNGGAHLK

SEQ ID NO: 18901 - protein, 9 aa, synthetic construct
PSNGGARVH

SEQ ID NO: 18902 - protein, 9 aa, synthetic construct
PSNGGAKLH

SEQ ID NO: 18903 - protein, 9 aa, synthetic construct
PLNATARLY

SEQ ID NO: 18904 - protein, 9 aa, synthetic construct
PSNGGIRLH

SEQ ID NO: 18905 - protein, 9 aa, synthetic construct
PSNGGIRVH

SEQ ID NO: 18906 - protein, 9 aa, synthetic construct
PSNGGIKLH

SEQ ID NO: 18907 - protein, 9 aa, synthetic construct
PLNATARLH

SEQ ID NO: 18908 - protein, 9 aa, synthetic construct
PSNGGGRVY

SEQ ID NO: 18909 - protein, 9 aa, synthetic construct
PSNGGGRVH

SEQ ID NO: 18910 - protein, 9 aa, synthetic construct
PSNGGGRVF

SEQ ID NO: 18911 - protein, 9 aa, synthetic construct
PLNATARLF

SEQ ID NO: 18912 - protein, 9 aa, synthetic construct
PSNGGGKLY

SEQ ID NO: 18913 - protein, 9 aa, synthetic construct
PSNGGGKLH

SEQ ID NO: 18914 - protein, 9 aa, synthetic construct
PLNATARVY

SEQ ID NO: 18915 - protein, 9 aa, synthetic construct
PSNAAVHLH

SEQ ID NO: 18916 - protein, 9 aa, synthetic construct
PSNAAVHLK

SEQ ID NO: 18917 - protein, 9 aa, synthetic construct
PLNATARVR

SEQ ID NO: 18918 - protein, 9 aa, synthetic construct
PSNAAVRVF

SEQ ID NO: 18919 - protein, 9 aa, synthetic construct
PLNATARVH

SEQ ID NO: 18920 - protein, 9 aa, synthetic construct
PLNATARVK

SEQ ID NO: 18921 - protein, 9 aa, synthetic construct
PSNAALRLY

SEQ ID NO: 18922 - protein, 9 aa, synthetic construct
PLNATAKLR

SEQ ID NO: 18923 - protein, 9 aa, synthetic construct
PSNAAAHVR

SEQ ID NO: 18924 - protein, 9 aa, synthetic construct
PSNAAAHVH

SEQ ID NO: 18925 - protein, 9 aa, synthetic construct
PSNAAARLY

SEQ ID NO: 18926 - protein, 9 aa, synthetic construct
PSNAAARLH

SEQ ID NO: 18927 - protein, 9 aa, synthetic construct
PSNAAAKLR

SEQ ID NO: 18928 - protein, 9 aa, synthetic construct
PSNAAAKVK

SEQ ID NO: 18929 - protein, 9 aa, synthetic construct
PLNATAKLF

SEQ ID NO: 18930 - protein, 9 aa, synthetic construct
PSNAAIHLF

SEQ ID NO: 18931 - protein, 9 aa, synthetic construct
PSNAAIRLY

SEQ ID NO: 18932 - protein, 9 aa, synthetic construct
PSNAAIRLR

SEQ ID NO: 18933 - protein, 9 aa, synthetic construct
PSNAAIKVY

SEQ ID NO: 18934 - protein, 9 aa, synthetic construct
PSNAAIKVF

SEQ ID NO: 18935 - protein, 9 aa, synthetic construct
PLNATAKVH

SEQ ID NO: 18936 - protein, 9 aa, synthetic construct
PSNAAGHLY

SEQ ID NO: 18937 - protein, 9 aa, synthetic construct
PSNAAGHLR

SEQ ID NO: 18938 - protein, 9 aa, synthetic construct
PSNAAGHLK

SEQ ID NO: 18939 - protein, 9 aa, synthetic construct
PSNAAGHLF

SEQ ID NO: 18940 - protein, 9 aa, synthetic construct
PLNATAKVK

SEQ ID NO: 18941 - protein, 9 aa, synthetic construct
PSNAAGRLH

SEQ ID NO: 18942 - protein, 9 aa, synthetic construct
PSNAAGRVY

SEQ ID NO: 18943 - protein, 9 aa, synthetic construct
PLNATAKVF

SEQ ID NO: 18944 - protein, 9 aa, synthetic construct
PSNAAGKLF

SEQ ID NO: 18945 - protein, 9 aa, synthetic construct
PSNAAGKVY

SEQ ID NO: 18946 - protein, 9 aa, synthetic construct
PSNAAGKVR

SEQ ID NO: 18947 - protein, 9 aa, synthetic construct
PSNAAGKVH

SEQ ID NO: 18948 - protein, 9 aa, synthetic construct
PSNAAGKVK

SEQ ID NO: 18949 - protein, 9 aa, synthetic construct
PLNATIHLY

SEQ ID NO: 18950 - protein, 9 aa, synthetic construct
PSNATVHLH

SEQ ID NO: 18951 - protein, 9 aa, synthetic construct
PSNATVHLK

SEQ ID NO: 18952 - protein, 9 aa, synthetic construct
PLNATIHLR

SEQ ID NO: 18953 - protein, 9 aa, synthetic construct
PSNATVRVY

SEQ ID NO: 18954 - protein, 9 aa, synthetic construct
PSNATLRLY

SEQ ID NO: 18955 - protein, 9 aa, synthetic construct
PSNATLRLF

SEQ ID NO: 18956 - protein, 9 aa, synthetic construct
PSNATAHLR

SEQ ID NO: 18957 - protein, 9 aa, synthetic construct
PSNATAHLF

SEQ ID NO: 18958 - protein, 9 aa, synthetic construct
PSNATAHVR

SEQ ID NO: 18959 - protein, 9 aa, synthetic construct
PSNATAHVF

SEQ ID NO: 18960 - protein, 9 aa, synthetic construct
PLNATIHVF

SEQ ID NO: 18961 - protein, 9 aa, synthetic construct
PSNATIHLY

SEQ ID NO: 18962 - protein, 9 aa, synthetic construct
PSNATIRLF

SEQ ID NO: 18963 - protein, 9 aa, synthetic construct
PLNATIRLR

SEQ ID NO: 18964 - protein, 9 aa, synthetic construct
PSNATGHLK

SEQ ID NO: 18965 - protein, 9 aa, synthetic construct
PSNATGHVR

SEQ ID NO: 18966 - protein, 9 aa, synthetic construct
PSNATGRLY

SEQ ID NO: 18967 - protein, 9 aa, synthetic construct
PSNATGRLR

SEQ ID NO: 18968 - protein, 9 aa, synthetic construct
PSNATGRLH

SEQ ID NO: 18969 - protein, 9 aa, synthetic construct
PSNATGRLK

SEQ ID NO: 18970 - protein, 9 aa, synthetic construct
PSNATGRVY

SEQ ID NO: 18971 - protein, 9 aa, synthetic construct
PSNATGRVF

SEQ ID NO: 18972 - protein, 9 aa, synthetic construct
PLNATIRLF

SEQ ID NO: 18973 - protein, 9 aa, synthetic construct
PSNATGKLF

SEQ ID NO: 18974 - protein, 9 aa, synthetic construct
PSNASVHLY

SEQ ID NO: 18975 - protein, 9 aa, synthetic construct
PSNASVHLR

SEQ ID NO: 18976 - protein, 9 aa, synthetic construct
PSNASVHLK

SEQ ID NO: 18977 - protein, 9 aa, synthetic construct
PSNASVHVY

SEQ ID NO: 18978 - protein, 9 aa, synthetic construct
PSNASVHVR

SEQ ID NO: 18979 - protein, 9 aa, synthetic construct
PSNASVHVF

SEQ ID NO: 18980 - protein, 9 aa, synthetic construct
PSNASVRLY

SEQ ID NO: 18981 - protein, 9 aa, synthetic construct
PSNASVRVH

SEQ ID NO: 18982 - protein, 9 aa, synthetic construct
PLNATIRVH

SEQ ID NO: 18983 - protein, 9 aa, synthetic construct
PSNASLHVK

SEQ ID NO: 18984 - protein, 9 aa, synthetic construct
PLNATIRVF

SEQ ID NO: 18985 - protein, 9 aa, synthetic construct
PSNASLRLH

SEQ ID NO: 18986 - protein, 9 aa, synthetic construct
PSNASLRVF

SEQ ID NO: 18987 - protein, 9 aa, synthetic construct
PSNASLKLH

SEQ ID NO: 18988 - protein, 9 aa, synthetic construct
PSNASLKLF

SEQ ID NO: 18989 - protein, 9 aa, synthetic construct
PSNASLKVY

SEQ ID NO: 18990 - protein, 9 aa, synthetic construct
PSNASLKVH

SEQ ID NO: 18991 - protein, 9 aa, synthetic construct
PSNASLKVF

SEQ ID NO: 18992 - protein, 9 aa, synthetic construct
PSNASAHLR

SEQ ID NO: 18993 - protein, 9 aa, synthetic construct
PSNASAHLK

SEQ ID NO: 18994 - protein, 9 aa, synthetic construct
PSNASAHVR

SEQ ID NO: 18995 - protein, 9 aa, synthetic construct
PSNASAHVK

SEQ ID NO: 18996 - protein, 9 aa, synthetic construct
PSNASARLY

SEQ ID NO: 18997 - protein, 9 aa, synthetic construct
PSNASARLH

SEQ ID NO: 18998 - protein, 9 aa, synthetic construct
PSNASARLF

SEQ ID NO: 18999 - protein, 9 aa, synthetic construct
PSNASARVY

SEQ ID NO: 19000 - protein, 9 aa, synthetic construct
PSNASARVF

SEQ ID NO: 19001 - protein, 9 aa, synthetic construct
PLNATIKLK

SEQ ID NO: 19002 - protein, 9 aa, synthetic construct
PSNASAKLR

SEQ ID NO: 19003 - protein, 9 aa, synthetic construct
PSNASAKVY

SEQ ID NO: 19004 - protein, 9 aa, synthetic construct
PSNASAKVH

SEQ ID NO: 19005 - protein, 9 aa, synthetic construct
PSNASIHLY

SEQ ID NO: 19006 - protein, 9 aa, synthetic construct
PSNASIHLR

SEQ ID NO: 19007 - protein, 9 aa, synthetic construct
PSNASIHVY

SEQ ID NO: 19008 - protein, 9 aa, synthetic construct
PSNASIHVR

SEQ ID NO: 19009 - protein, 9 aa, synthetic construct
PSNASIHVH

SEQ ID NO: 19010 - protein, 9 aa, synthetic construct
PSNASIHVK

SEQ ID NO: 19011 - protein, 9 aa, synthetic construct
PSNASIHVF

SEQ ID NO: 19012 - protein, 9 aa, synthetic construct
PSNASIRLF

SEQ ID NO: 19013 - protein, 9 aa, synthetic construct
PSNASIRVF

SEQ ID NO: 19014 - protein, 9 aa, synthetic construct
PSNASIKVY

SEQ ID NO: 19015 - protein, 9 aa, synthetic construct
PSNASIKVH

SEQ ID NO: 19016 - protein, 9 aa, synthetic construct
PSNASIKVK

SEQ ID NO: 19017 - protein, 9 aa, synthetic construct
PSNASGRLY

SEQ ID NO: 19018 - protein, 9 aa, synthetic construct
PSNASGRLR

SEQ ID NO: 19019 - protein, 9 aa, synthetic construct
PSNASGRLF

SEQ ID NO: 19020 - protein, 9 aa, synthetic construct
PSNASGKLY

SEQ ID NO: 19021 - protein, 9 aa, synthetic construct
PSNASGKLH

SEQ ID NO: 19022 - protein, 9 aa, synthetic construct
PSNASGKLF

SEQ ID NO: 19023 - protein, 9 aa, synthetic construct
PSNASGKVY

SEQ ID NO: 19024 - protein, 9 aa, synthetic construct
PSNASGKVH

SEQ ID NO: 19025 - protein, 9 aa, synthetic construct
PSNAVVHLY

SEQ ID NO: 19026 - protein, 9 aa, synthetic construct
PSNAVVHLK

SEQ ID NO: 19027 - protein, 9 aa, synthetic construct
PSNAVVHLF

SEQ ID NO: 19028 - protein, 9 aa, synthetic construct
PSNAVVHVR

SEQ ID NO: 19029 - protein, 9 aa, synthetic construct
PSNAVVHVK

SEQ ID NO: 19030 - protein, 9 aa, synthetic construct
PSNAVVHVF

SEQ ID NO: 19031 - protein, 9 aa, synthetic construct
PSNAVVRLY

SEQ ID NO: 19032 - protein, 9 aa, synthetic construct
PSNAVVRLH

SEQ ID NO: 19033 - protein, 9 aa, synthetic construct
PSNAVVRVF

SEQ ID NO: 19034 - protein, 9 aa, synthetic construct
PSNAVVKLF

SEQ ID NO: 19035 - protein, 9 aa, synthetic construct
PSNAVVKVK

SEQ ID NO: 19036 - protein, 9 aa, synthetic construct
PSNAVLRLF

SEQ ID NO: 19037 - protein, 9 aa, synthetic construct
PSNAVLRVH

SEQ ID NO: 19038 - protein, 9 aa, synthetic construct
PSNAVLRVF

SEQ ID NO: 19039 - protein, 9 aa, synthetic construct
PLNATGHVY

SEQ ID NO: 19040 - protein, 9 aa, synthetic construct
PSNAVLKLH

SEQ ID NO: 19041 - protein, 9 aa, synthetic construct
PSNAVLKVY

SEQ ID NO: 19042 - protein, 9 aa, synthetic construct
PLNATGHVR

SEQ ID NO: 19043 - protein, 9 aa, synthetic construct
PSNAVAKVR

SEQ ID NO: 19044 - protein, 9 aa, synthetic construct
PLNATGHVF

SEQ ID NO: 19045 - protein, 9 aa, synthetic construct
PSNAVIHVR

SEQ ID NO: 19046 - protein, 9 aa, synthetic construct
PSNAVIHVH

SEQ ID NO: 19047 - protein, 9 aa, synthetic construct
PSNAVIHVF

SEQ ID NO: 19048 - protein, 9 aa, synthetic construct
PSNAVIRLR

SEQ ID NO: 19049 - protein, 9 aa, synthetic construct
PLNATGRLR

SEQ ID NO: 19050 - protein, 9 aa, synthetic construct
PSNAVIKVY

SEQ ID NO: 19051 - protein, 9 aa, synthetic construct
PSNAVGHLR

SEQ ID NO: 19052 - protein, 9 aa, synthetic construct
PSNAVGHLH

SEQ ID NO: 19053 - protein, 9 aa, synthetic construct
PSNAVGHLK

SEQ ID NO: 19054 - protein, 9 aa, synthetic construct
PSNAVGHVF

SEQ ID NO: 19055 - protein, 9 aa, synthetic construct
PSNAVGRLY

SEQ ID NO: 19056 - protein, 9 aa, synthetic construct
PSNAVGRVY

SEQ ID NO: 19057 - protein, 9 aa, synthetic construct
PLNATGRLF

SEQ ID NO: 19058 - protein, 9 aa, synthetic construct
PSNAVGKLY

SEQ ID NO: 19059 - protein, 9 aa, synthetic construct
PSNAVGKLR

SEQ ID NO: 19060 - protein, 9 aa, synthetic construct
PSNAVGKVY

SEQ ID NO: 19061 - protein, 9 aa, synthetic construct
PSNAVGKVH

SEQ ID NO: 19062 - protein, 9 aa, synthetic construct
PLNATGRVY

SEQ ID NO: 19063 - protein, 9 aa, synthetic construct
PSNAGVHLY

SEQ ID NO: 19064 - protein, 9 aa, synthetic construct
PSNAGVHLH

SEQ ID NO: 19065 - protein, 9 aa, synthetic construct
PSNAGVHLK

SEQ ID NO: 19066 - protein, 9 aa, synthetic construct
PSNAGVHLF

SEQ ID NO: 19067 - protein, 9 aa, synthetic construct
PSNAGVHVY

SEQ ID NO: 19068 - protein, 9 aa, synthetic construct
PSNAGVHVR

SEQ ID NO: 19069 - protein, 9 aa, synthetic construct
PSNAGVHVF

SEQ ID NO: 19070 - protein, 9 aa, synthetic construct
PSNAGVRLY

SEQ ID NO: 19071 - protein, 9 aa, synthetic construct
PSNAGVRLH

SEQ ID NO: 19072 - protein, 9 aa, synthetic construct
PSNAGVRLF

SEQ ID NO: 19073 - protein, 9 aa, synthetic construct
PSNAGVRVY

SEQ ID NO: 19074 - protein, 9 aa, synthetic construct
PSNAGVRVR

SEQ ID NO: 19075 - protein, 9 aa, synthetic construct
PSNAGVRVK

SEQ ID NO: 19076 - protein, 9 aa, synthetic construct
PSNAGVRVF

SEQ ID NO: 19077 - protein, 9 aa, synthetic construct
PSNAGVKLR

SEQ ID NO: 19078 - protein, 9 aa, synthetic construct
PSNAGVKLH

SEQ ID NO: 19079 - protein, 9 aa, synthetic construct
PSNAGVKVY

SEQ ID NO: 19080 - protein, 9 aa, synthetic construct
PSNAGVKVH

SEQ ID NO: 19081 - protein, 9 aa, synthetic construct
PSNAGVKVK

SEQ ID NO: 19082 - protein, 9 aa, synthetic construct
PSNAGLHLF

SEQ ID NO: 19083 - protein, 9 aa, synthetic construct
PSNAGLHVY

SEQ ID NO: 19084 - protein, 9 aa, synthetic construct
PSNAGLHVH

SEQ ID NO: 19085 - protein, 9 aa, synthetic construct
PSNAGLHVK

SEQ ID NO: 19086 - protein, 9 aa, synthetic construct
PSNAGLRVY

SEQ ID NO: 19087 - protein, 9 aa, synthetic construct
PSNAGLRVH

SEQ ID NO: 19088 - protein, 9 aa, synthetic construct
PSNAGLRVK

SEQ ID NO: 19089 - protein, 9 aa, synthetic construct
PSNAGLRVF

SEQ ID NO: 19090 - protein, 9 aa, synthetic construct
PLNGAIRLF

SEQ ID NO: 19091 - protein, 9 aa, synthetic construct
PSNAGLKLH

SEQ ID NO: 19092 - protein, 9 aa, synthetic construct
PSNAGLKLF

SEQ ID NO: 19093 - protein, 9 aa, synthetic construct
PSNAGLKVY

SEQ ID NO: 19094 - protein, 9 aa, synthetic construct
PSNAGLKVH

SEQ ID NO: 19095 - protein, 9 aa, synthetic construct
PLNATGKLR

SEQ ID NO: 19096 - protein, 9 aa, synthetic construct
PSNAGARLY

SEQ ID NO: 19097 - protein, 9 aa, synthetic construct
PSNAGARLF

SEQ ID NO: 19098 - protein, 9 aa, synthetic construct
PSNAGARVK

SEQ ID NO: 19099 - protein, 9 aa, synthetic construct
PSNAGAKVR

SEQ ID NO: 19100 - protein, 9 aa, synthetic construct
PLNATGKLF

SEQ ID NO: 19101 - protein, 9 aa, synthetic construct
PSNAGIHLR

SEQ ID NO: 19102 - protein, 9 aa, synthetic construct
PSNAGIHLH

SEQ ID NO: 19103 - protein, 9 aa, synthetic construct
PSNAGIHLK

SEQ ID NO: 19104 - protein, 9 aa, synthetic construct
PSNAGIHLF

SEQ ID NO: 19105 - protein, 9 aa, synthetic construct
PSNAGIHVR

SEQ ID NO: 19106 - protein, 9 aa, synthetic construct
PSNAGIHVF

SEQ ID NO: 19107 - protein, 9 aa, synthetic construct
PSNAGIRVF

SEQ ID NO: 19108 - protein, 9 aa, synthetic construct
PSNAGIKLY

SEQ ID NO: 19109 - protein, 9 aa, synthetic construct
PSNAGIKLF

SEQ ID NO: 19110 - protein, 9 aa, synthetic construct
PSNAGIKVY

SEQ ID NO: 19111 - protein, 9 aa, synthetic construct
PSNAGIKVH

SEQ ID NO: 19112 - protein, 9 aa, synthetic construct
PSNAGIKVF

SEQ ID NO: 19113 - protein, 9 aa, synthetic construct
PSNAGGRLF

SEQ ID NO: 19114 - protein, 9 aa, synthetic construct
PSNAGGRVY

SEQ ID NO: 19115 - protein, 9 aa, synthetic construct
PSNAGGRVR

SEQ ID NO: 19116 - protein, 9 aa, synthetic construct
PSNAGGRVH

SEQ ID NO: 19117 - protein, 9 aa, synthetic construct
PSNAGGKLY

SEQ ID NO: 19118 - protein, 9 aa, synthetic construct
PSNAGGKVY

SEQ ID NO: 19119 - protein, 9 aa, synthetic construct
PSNAGGKVH

SEQ ID NO: 19120 - protein, 9 aa, synthetic construct
PSNAGGKVK

SEQ ID NO: 19121 - protein, 9 aa, synthetic construct
PLNGAIRVY

SEQ ID NO: 19122 - protein, 9 aa, synthetic construct
PSQGAVHVR

SEQ ID NO: 19123 - protein, 9 aa, synthetic construct
PSQGAVHVH

SEQ ID NO: 19124 - protein, 9 aa, synthetic construct
PLNASVHLR

SEQ ID NO: 19125 - protein, 9 aa, synthetic construct
PLNASVHLH

SEQ ID NO: 19126 - protein, 9 aa, synthetic construct
PSQGAVKLF

SEQ ID NO: 19127 - protein, 9 aa, synthetic construct
PSQGAVKVY

SEQ ID NO: 19128 - protein, 9 aa, synthetic construct
PSQGALHVK

SEQ ID NO: 19129 - protein, 9 aa, synthetic construct
PLNASVHLF

SEQ ID NO: 19130 - protein, 9 aa, synthetic construct
PSQGALKVH

SEQ ID NO: 19131 - protein, 9 aa, synthetic construct
PLNASVHVR

SEQ ID NO: 19132 - protein, 9 aa, synthetic construct
PSQGAAHVF

SEQ ID NO: 19133 - protein, 9 aa, synthetic construct
PSQGAARLF

SEQ ID NO: 19134 - protein, 9 aa, synthetic construct
PSQGAARVF

SEQ ID NO: 19135 - protein, 9 aa, synthetic construct
PSQGAAKLF

SEQ ID NO: 19136 - protein, 9 aa, synthetic construct
PSQGAAKVY

SEQ ID NO: 19137 - protein, 9 aa, synthetic construct
PSQGAAKVF

SEQ ID NO: 19138 - protein, 9 aa, synthetic construct
PLNASVHVF

SEQ ID NO: 19139 - protein, 9 aa, synthetic construct
PSQGAIHLK

SEQ ID NO: 19140 - protein, 9 aa, synthetic construct
PSQGAIHLF

SEQ ID NO: 19141 - protein, 9 aa, synthetic construct
PSQGAIHVF

SEQ ID NO: 19142 - protein, 9 aa, synthetic construct
PLNGAIRVR

SEQ ID NO: 19143 - protein, 9 aa, synthetic construct
PSQGAIRVY

SEQ ID NO: 19144 - protein, 9 aa, synthetic construct
PSQGAIKLH

SEQ ID NO: 19145 - protein, 9 aa, synthetic construct
PSQGAIKVY

SEQ ID NO: 19146 - protein, 9 aa, synthetic construct
PSQGAIKVH

SEQ ID NO: 19147 - protein, 9 aa, synthetic construct
PSQGAIKVF

SEQ ID NO: 19148 - protein, 9 aa, synthetic construct
PSQGAGHVK

SEQ ID NO: 19149 - protein, 9 aa, synthetic construct
PSQGAGRLF

SEQ ID NO: 19150 - protein, 9 aa, synthetic construct
PSQGAGRVY

SEQ ID NO: 19151 - protein, 9 aa, synthetic construct
PSQGAGRVH

SEQ ID NO: 19152 - protein, 9 aa, synthetic construct
PSQGAGKVY

SEQ ID NO: 19153 - protein, 9 aa, synthetic construct
PSQGTVHLH

SEQ ID NO: 19154 - protein, 9 aa, synthetic construct
PSQGTVHLK

SEQ ID NO: 19155 - protein, 9 aa, synthetic construct
PSQGTVHVR

SEQ ID NO: 19156 - protein, 9 aa, synthetic construct
PSQGTVHVK

SEQ ID NO: 19157 - protein, 9 aa, synthetic construct
PSQGTVHVF

SEQ ID NO: 19158 - protein, 9 aa, synthetic construct
PLNASVRVR

SEQ ID NO: 19159 - protein, 9 aa, synthetic construct
PSQGTVRVY

SEQ ID NO: 19160 - protein, 9 aa, synthetic construct
PSQGTVRVH

SEQ ID NO: 19161 - protein, 9 aa, synthetic construct
PSQGTVRVF

SEQ ID NO: 19162 - protein, 9 aa, synthetic construct
PSQGTVKLH

SEQ ID NO: 19163 - protein, 9 aa, synthetic construct
PSQGTVKVY

SEQ ID NO: 19164 - protein, 9 aa, synthetic construct
PSQGTVKVF

SEQ ID NO: 19165 - protein, 9 aa, synthetic construct
PSQGTLHVR

SEQ ID NO: 19166 - protein, 9 aa, synthetic construct
PSQGTLHVH

SEQ ID NO: 19167 - protein, 9 aa, synthetic construct
PSQGTLHVK

SEQ ID NO: 19168 - protein, 9 aa, synthetic construct
PLNGAIRVH

SEQ ID NO: 19169 - protein, 9 aa, synthetic construct
PLNASVKLY

SEQ ID NO: 19170 - protein, 9 aa, synthetic construct
PSQGTAHLF

SEQ ID NO: 19171 - protein, 9 aa, synthetic construct
PSQGTAHVR

SEQ ID NO: 19172 - protein, 9 aa, synthetic construct
PSQGTAHVH

SEQ ID NO: 19173 - protein, 9 aa, synthetic construct
PSQGTAHVK

SEQ ID NO: 19174 - protein, 9 aa, synthetic construct
PSQGTAHVF

SEQ ID NO: 19175 - protein, 9 aa, synthetic construct
PLNASVKLH

SEQ ID NO: 19176 - protein, 9 aa, synthetic construct
PSQGTARLF

SEQ ID NO: 19177 - protein, 9 aa, synthetic construct
PSQGTAKLY

SEQ ID NO: 19178 - protein, 9 aa, synthetic construct
PSQGTAKLH

SEQ ID NO: 19179 - protein, 9 aa, synthetic construct
PSQGTAKVF

SEQ ID NO: 19180 - protein, 9 aa, synthetic construct
PSQGTIHLY

SEQ ID NO: 19181 - protein, 9 aa, synthetic construct
PSQGTIHLR

SEQ ID NO: 19182 - protein, 9 aa, synthetic construct
PSQGTIHLH

SEQ ID NO: 19183 - protein, 9 aa, synthetic construct
PSQGTIHLK

SEQ ID NO: 19184 - protein, 9 aa, synthetic construct
PSQGTIHLF

SEQ ID NO: 19185 - protein, 9 aa, synthetic construct
PSQGTIHVR

SEQ ID NO: 19186 - protein, 9 aa, synthetic construct
PSQGTIHVH

SEQ ID NO: 19187 - protein, 9 aa, synthetic construct
PSQGTIHVK

SEQ ID NO: 19188 - protein, 9 aa, synthetic construct
PSQGTIRLH

SEQ ID NO: 19189 - protein, 9 aa, synthetic construct
PSQGTIRVH

SEQ ID NO: 19190 - protein, 9 aa, synthetic construct
PSQGTIKLH

SEQ ID NO: 19191 - protein, 9 aa, synthetic construct
PSQGTIKLF

SEQ ID NO: 19192 - protein, 9 aa, synthetic construct
PSQGTIKVY

SEQ ID NO: 19193 - protein, 9 aa, synthetic construct
PSQGTIKVF

SEQ ID NO: 19194 - protein, 9 aa, synthetic construct
PLNASVKVH

SEQ ID NO: 19195 - protein, 9 aa, synthetic construct
PSQGTGHLR

SEQ ID NO: 19196 - protein, 9 aa, synthetic construct
PSQGTGHLH

SEQ ID NO: 19197 - protein, 9 aa, synthetic construct
PSQGTGHLF

SEQ ID NO: 19198 - protein, 9 aa, synthetic construct
PSQGTGHVR

SEQ ID NO: 19199 - protein, 9 aa, synthetic construct
PSQGTGHVH

SEQ ID NO: 19200 - protein, 9 aa, synthetic construct
PSQGTGHVK

SEQ ID NO: 19201 - protein, 9 aa, synthetic construct
PLNASVKVK

SEQ ID NO: 19202 - protein, 9 aa, synthetic construct
PSQGTGRLY

SEQ ID NO: 19203 - protein, 9 aa, synthetic construct
PSQGTGRLF

SEQ ID NO: 19204 - protein, 9 aa, synthetic construct
PSQGTGRVY

SEQ ID NO: 19205 - protein, 9 aa, synthetic construct
PSQGTGKLY

SEQ ID NO: 19206 - protein, 9 aa, synthetic construct
PSQGTGKLF

SEQ ID NO: 19207 - protein, 9 aa, synthetic construct
PSQGTGKVF

SEQ ID NO: 19208 - protein, 9 aa, synthetic construct
PSQGSVHVR

SEQ ID NO: 19209 - protein, 9 aa, synthetic construct
PSQGSVRVY

SEQ ID NO: 19210 - protein, 9 aa, synthetic construct
PSQGSVRVF

SEQ ID NO: 19211 - protein, 9 aa, synthetic construct
PSQGSVKVH

SEQ ID NO: 19212 - protein, 9 aa, synthetic construct
PSQGSVKVF

SEQ ID NO: 19213 - protein, 9 aa, synthetic construct
PSQGSLKVH

SEQ ID NO: 19214 - protein, 9 aa, synthetic construct
PSQGSLKVF

SEQ ID NO: 19215 - protein, 9 aa, synthetic construct
PSQGSAHLY

SEQ ID NO: 19216 - protein, 9 aa, synthetic construct
PSQGSAHVF

SEQ ID NO: 19217 - protein, 9 aa, synthetic construct
PSQGSARLY

SEQ ID NO: 19218 - protein, 9 aa, synthetic construct
PSQGSIHLY

SEQ ID NO: 19219 - protein, 9 aa, synthetic construct
PSQGSIHLK

SEQ ID NO: 19220 - protein, 9 aa, synthetic construct
PLNGAIRVF

SEQ ID NO: 19221 - protein, 9 aa, synthetic construct
PSQGSIKLF

SEQ ID NO: 19222 - protein, 9 aa, synthetic construct
PSQGSGRLF

SEQ ID NO: 19223 - protein, 9 aa, synthetic construct
PSQGSGRVH

SEQ ID NO: 19224 - protein, 9 aa, synthetic construct
PSQGSGKLF

SEQ ID NO: 19225 - protein, 9 aa, synthetic construct
PSQGVVHLH

SEQ ID NO: 19226 - protein, 9 aa, synthetic construct
PSQGVVHLF

SEQ ID NO: 19227 - protein, 9 aa, synthetic construct
PSQGVVHVR

SEQ ID NO: 19228 - protein, 9 aa, synthetic construct
PSQGVVHVK

SEQ ID NO: 19229 - protein, 9 aa, synthetic construct
PSQGVVHVF

SEQ ID NO: 19230 - protein, 9 aa, synthetic construct
PSQGVVRVH

SEQ ID NO: 19231 - protein, 9 aa, synthetic construct
PSQGVVRVF

SEQ ID NO: 19232 - protein, 9 aa, synthetic construct
PLNASLRVH

SEQ ID NO: 19233 - protein, 9 aa, synthetic construct
PSQGVVKLY

SEQ ID NO: 19234 - protein, 9 aa, synthetic construct
PSQGVVKLH

SEQ ID NO: 19235 - protein, 9 aa, synthetic construct
PSQGVVKVY

SEQ ID NO: 19236 - protein, 9 aa, synthetic construct
PSQGVVKVH

SEQ ID NO: 19237 - protein, 9 aa, synthetic construct
PSQGVLHLK

SEQ ID NO: 19238 - protein, 9 aa, synthetic construct
PSQGVLHVK

SEQ ID NO: 19239 - protein, 9 aa, synthetic construct
PLNASLRVF

SEQ ID NO: 19240 - protein, 9 aa, synthetic construct
PLNGAIKLY

SEQ ID NO: 19241 - protein, 9 aa, synthetic construct
PSQGVAHLK

SEQ ID NO: 19242 - protein, 9 aa, synthetic construct
PSQGVAHVY

SEQ ID NO: 19243 - protein, 9 aa, synthetic construct
PSQGVAHVK

SEQ ID NO: 19244 - protein, 9 aa, synthetic construct
PSQGVAHVF

SEQ ID NO: 19245 - protein, 9 aa, synthetic construct
PSQGVIHLR

SEQ ID NO: 19246 - protein, 9 aa, synthetic construct
PSQGVIHVR

SEQ ID NO: 19247 - protein, 9 aa, synthetic construct
PSQGVIHVH

SEQ ID NO: 19248 - protein, 9 aa, synthetic construct
PSQGVIHVK

SEQ ID NO: 19249 - protein, 9 aa, synthetic construct
PSQGVIRLH

SEQ ID NO: 19250 - protein, 9 aa, synthetic construct
PSQGVIKLY

SEQ ID NO: 19251 - protein, 9 aa, synthetic construct
PSQGVIKLK

SEQ ID NO: 19252 - protein, 9 aa, synthetic construct
PSQGVIKLF

SEQ ID NO: 19253 - protein, 9 aa, synthetic construct
PSQGVGHLR

SEQ ID NO: 19254 - protein, 9 aa, synthetic construct
PSQGVGHLH

SEQ ID NO: 19255 - protein, 9 aa, synthetic construct
PSQGVGHVH

SEQ ID NO: 19256 - protein, 9 aa, synthetic construct
PSQGVGRLY

SEQ ID NO: 19257 - protein, 9 aa, synthetic construct
PSQGVGKLH

SEQ ID NO: 19258 - protein, 9 aa, synthetic construct
PSQGVGKLF

SEQ ID NO: 19259 - protein, 9 aa, synthetic construct
PSQGVGKVY

SEQ ID NO: 19260 - protein, 9 aa, synthetic construct
PSQGGVHVR

SEQ ID NO: 19261 - protein, 9 aa, synthetic construct
PSQGGVHVF

SEQ ID NO: 19262 - protein, 9 aa, synthetic construct
PSQGGVKLH

SEQ ID NO: 19263 - protein, 9 aa, synthetic construct
PSQGGVKVY

SEQ ID NO: 19264 - protein, 9 aa, synthetic construct
PSQGGAHVF

SEQ ID NO: 19265 - protein, 9 aa, synthetic construct
PSQGGAKLY

SEQ ID NO: 19266 - protein, 9 aa, synthetic construct
PSQGGAKLF

SEQ ID NO: 19267 - protein, 9 aa, synthetic construct
PSQGGIHLY

SEQ ID NO: 19268 - protein, 9 aa, synthetic construct
PSQGGIHLH

SEQ ID NO: 19269 - protein, 9 aa, synthetic construct
PSQGGIHLF

SEQ ID NO: 19270 - protein, 9 aa, synthetic construct
PSQGGIHVR

SEQ ID NO: 19271 - protein, 9 aa, synthetic construct
PSQGGIHVH

SEQ ID NO: 19272 - protein, 9 aa, synthetic construct
PSQGGIHVF

SEQ ID NO: 19273 - protein, 9 aa, synthetic construct
PLNASARLY

SEQ ID NO: 19274 - protein, 9 aa, synthetic construct
PSQGGIRLF

SEQ ID NO: 19275 - protein, 9 aa, synthetic construct
PLNASARLR

SEQ ID NO: 19276 - protein, 9 aa, synthetic construct
PSQGGIKLH

SEQ ID NO: 19277 - protein, 9 aa, synthetic construct
PSQGGIKLF

SEQ ID NO: 19278 - protein, 9 aa, synthetic construct
PSQGGGHLH

SEQ ID NO: 19279 - protein, 9 aa, synthetic construct
PSQGGGRLF

SEQ ID NO: 19280 - protein, 9 aa, synthetic construct
PLNASARLF

SEQ ID NO: 19281 - protein, 9 aa, synthetic construct
PSQAAVHVR

SEQ ID NO: 19282 - protein, 9 aa, synthetic construct
PSQAAVHVH

SEQ ID NO: 19283 - protein, 9 aa, synthetic construct
PSQAAVHVK

SEQ ID NO: 19284 - protein, 9 aa, synthetic construct
PSQAAVHVF

SEQ ID NO: 19285 - protein, 9 aa, synthetic construct
PSQAAVRLY

SEQ ID NO: 19286 - protein, 9 aa, synthetic construct
PSQAAVRLF

SEQ ID NO: 19287 - protein, 9 aa, synthetic construct
PSQAAVKLY

SEQ ID NO: 19288 - protein, 9 aa, synthetic construct
PSQAAVKLH

SEQ ID NO: 19289 - protein, 9 aa, synthetic construct
PSQAAVKLF

SEQ ID NO: 19290 - protein, 9 aa, synthetic construct
PSQAAVKVY

SEQ ID NO: 19291 - protein, 9 aa, synthetic construct
PSQAAVKVH

SEQ ID NO: 19292 - protein, 9 aa, synthetic construct
PSQAAVKVF

SEQ ID NO: 19293 - protein, 9 aa, synthetic construct
PSQAALHLY

SEQ ID NO: 19294 - protein, 9 aa, synthetic construct
PSQAALHLH

SEQ ID NO: 19295 - protein, 9 aa, synthetic construct
PSQAALHLK

SEQ ID NO: 19296 - protein, 9 aa, synthetic construct
PSQAALHVY

SEQ ID NO: 19297 - protein, 9 aa, synthetic construct
PSQAALHVK

SEQ ID NO: 19298 - protein, 9 aa, synthetic construct
PSQAALRLH

SEQ ID NO: 19299 - protein, 9 aa, synthetic construct
PSQAALRVK

SEQ ID NO: 19300 - protein, 9 aa, synthetic construct
PSQAALRVF

SEQ ID NO: 19301 - protein, 9 aa, synthetic construct
PSQAALKLR

SEQ ID NO: 19302 - protein, 9 aa, synthetic construct
PSQAALKLH

SEQ ID NO: 19303 - protein, 9 aa, synthetic construct
PSQAALKVY

SEQ ID NO: 19304 - protein, 9 aa, synthetic construct
PSQAALKVF

SEQ ID NO: 19305 - protein, 9 aa, synthetic construct
PSQAAAHLY

SEQ ID NO: 19306 - protein, 9 aa, synthetic construct
PSQAAAHLH

SEQ ID NO: 19307 - protein, 9 aa, synthetic construct
PSQAAAHLK

SEQ ID NO: 19308 - protein, 9 aa, synthetic construct
PSQAAAHVY

SEQ ID NO: 19309 - protein, 9 aa, synthetic construct
PSQAAAHVH

SEQ ID NO: 19310 - protein, 9 aa, synthetic construct
PSQAAAHVK

SEQ ID NO: 19311 - protein, 9 aa, synthetic construct
PSQAAAHVF

SEQ ID NO: 19312 - protein, 9 aa, synthetic construct
PLNASAKLH

SEQ ID NO: 19313 - protein, 9 aa, synthetic construct
PSQAAARLH

SEQ ID NO: 19314 - protein, 9 aa, synthetic construct
PSQAAARLF

SEQ ID NO: 19315 - protein, 9 aa, synthetic construct
PSQAAARVH

SEQ ID NO: 19316 - protein, 9 aa, synthetic construct
PSQAAARVF

SEQ ID NO: 19317 - protein, 9 aa, synthetic construct
PLNASAKLK

SEQ ID NO: 19318 - protein, 9 aa, synthetic construct
PSQAAAKLY

SEQ ID NO: 19319 - protein, 9 aa, synthetic construct
PSQAAAKLH

SEQ ID NO: 19320 - protein, 9 aa, synthetic construct
PSQAAAKVY

SEQ ID NO: 19321 - protein, 9 aa, synthetic construct
PSQAAAKVF

SEQ ID NO: 19322 - protein, 9 aa, synthetic construct
PSQAAIHLY

SEQ ID NO: 19323 - protein, 9 aa, synthetic construct
PSQAAIHLH

SEQ ID NO: 19324 - protein, 9 aa, synthetic construct
PSQAAIHLK

SEQ ID NO: 19325 - protein, 9 aa, synthetic construct
PSQAAIHVR

SEQ ID NO: 19326 - protein, 9 aa, synthetic construct
PSQAAIHVH

SEQ ID NO: 19327 - protein, 9 aa, synthetic construct
PSQAAIHVK

SEQ ID NO: 19328 - protein, 9 aa, synthetic construct
PLNASAKVY

SEQ ID NO: 19329 - protein, 9 aa, synthetic construct
PSQAAIRLF

SEQ ID NO: 19330 - protein, 9 aa, synthetic construct
PSQAAIRVY

SEQ ID NO: 19331 - protein, 9 aa, synthetic construct
PSQAAIRVH

SEQ ID NO: 19332 - protein, 9 aa, synthetic construct
PSQAAIRVF

SEQ ID NO: 19333 - protein, 9 aa, synthetic construct
PLNASAKVR

SEQ ID NO: 19334 - protein, 9 aa, synthetic construct
PSQAAIKLY

SEQ ID NO: 19335 - protein, 9 aa, synthetic construct
PSQAAIKLK

SEQ ID NO: 19336 - protein, 9 aa, synthetic construct
PSQAAIKVH

SEQ ID NO: 19337 - protein, 9 aa, synthetic construct
PSQAAIKVK

SEQ ID NO: 19338 - protein, 9 aa, synthetic construct
PSQAAIKVF

SEQ ID NO: 19339 - protein, 9 aa, synthetic construct
PLNASAKVH

SEQ ID NO: 19340 - protein, 9 aa, synthetic construct
PSQAAGHLY

SEQ ID NO: 19341 - protein, 9 aa, synthetic construct
PSQAAGHLR

SEQ ID NO: 19342 - protein, 9 aa, synthetic construct
PSQAAGHLK

SEQ ID NO: 19343 - protein, 9 aa, synthetic construct
PSQAAGHLF

SEQ ID NO: 19344 - protein, 9 aa, synthetic construct
PSQAAGHVR

SEQ ID NO: 19345 - protein, 9 aa, synthetic construct
PSQAAGHVK

SEQ ID NO: 19346 - protein, 9 aa, synthetic construct
PSQAAGRLY

SEQ ID NO: 19347 - protein, 9 aa, synthetic construct
PSQAAGRLH

SEQ ID NO: 19348 - protein, 9 aa, synthetic construct
PSQAAGRLF

SEQ ID NO: 19349 - protein, 9 aa, synthetic construct
PSQAAGRVF

SEQ ID NO: 19350 - protein, 9 aa, synthetic construct
PSQAAGKLY

SEQ ID NO: 19351 - protein, 9 aa, synthetic construct
PSQAAGKLH

SEQ ID NO: 19352 - protein, 9 aa, synthetic construct
PSQAAGKLF

SEQ ID NO: 19353 - protein, 9 aa, synthetic construct
PSQAAGKVY

SEQ ID NO: 19354 - protein, 9 aa, synthetic construct
PSQAAGKVH

SEQ ID NO: 19355 - protein, 9 aa, synthetic construct
PSQAAGKVF

SEQ ID NO: 19356 - protein, 9 aa, synthetic construct
PLNASIHLY

SEQ ID NO: 19357 - protein, 9 aa, synthetic construct
PSQATVHLR

SEQ ID NO: 19358 - protein, 9 aa, synthetic construct
PSQATVHLK

SEQ ID NO: 19359 - protein, 9 aa, synthetic construct
PSQATVHVK

SEQ ID NO: 19360 - protein, 9 aa, synthetic construct
PSQATVRLH

SEQ ID NO: 19361 - protein, 9 aa, synthetic construct
PSQATVKLY

SEQ ID NO: 19362 - protein, 9 aa, synthetic construct
PSQATVKLH

SEQ ID NO: 19363 - protein, 9 aa, synthetic construct
PSQATVKLF

SEQ ID NO: 19364 - protein, 9 aa, synthetic construct
PSQATVKVY

SEQ ID NO: 19365 - protein, 9 aa, synthetic construct
PSQATVKVH

SEQ ID NO: 19366 - protein, 9 aa, synthetic construct
PSQATVKVF

SEQ ID NO: 19367 - protein, 9 aa, synthetic construct
PSQATLHVR

SEQ ID NO: 19368 - protein, 9 aa, synthetic construct
PSQATLHVH

SEQ ID NO: 19369 - protein, 9 aa, synthetic construct
PSQATLHVK

SEQ ID NO: 19370 - protein, 9 aa, synthetic construct
PLNASIHLF

SEQ ID NO: 19371 - protein, 9 aa, synthetic construct
PLNASIHVY

SEQ ID NO: 19372 - protein, 9 aa, synthetic construct
PSQATLKLH

SEQ ID NO: 19373 - protein, 9 aa, synthetic construct
PLNASIHVR

SEQ ID NO: 19374 - protein, 9 aa, synthetic construct
PSQATAHLY

SEQ ID NO: 19375 - protein, 9 aa, synthetic construct
PSQATAHLR

SEQ ID NO: 19376 - protein, 9 aa, synthetic construct
PSQATAHVY

SEQ ID NO: 19377 - protein, 9 aa, synthetic construct
PSQATAHVR

SEQ ID NO: 19378 - protein, 9 aa, synthetic construct
PSQATAHVK

SEQ ID NO: 19379 - protein, 9 aa, synthetic construct
PSQATAHVF

SEQ ID NO: 19380 - protein, 9 aa, synthetic construct
PLNASIHVH

SEQ ID NO: 19381 - protein, 9 aa, synthetic construct
PSQATARLF

SEQ ID NO: 19382 - protein, 9 aa, synthetic construct
PSQATARVY

SEQ ID NO: 19383 - protein, 9 aa, synthetic construct
PSQATAKLY

SEQ ID NO: 19384 - protein, 9 aa, synthetic construct
PSQATAKLF

SEQ ID NO: 19385 - protein, 9 aa, synthetic construct
PSQATAKVY

SEQ ID NO: 19386 - protein, 9 aa, synthetic construct
PSQATAKVH

SEQ ID NO: 19387 - protein, 9 aa, synthetic construct
PSQATIHLY

SEQ ID NO: 19388 - protein, 9 aa, synthetic construct
PSQATIHLH

SEQ ID NO: 19389 - protein, 9 aa, synthetic construct
PSQATIHLK

SEQ ID NO: 19390 - protein, 9 aa, synthetic construct
PSQATIHLF

SEQ ID NO: 19391 - protein, 9 aa, synthetic construct
PSQATIHVY

SEQ ID NO: 19392 - protein, 9 aa, synthetic construct
PSQATIHVH

SEQ ID NO: 19393 - protein, 9 aa, synthetic construct
PSQATIRLY

SEQ ID NO: 19394 - protein, 9 aa, synthetic construct
PSQATIRLR

SEQ ID NO: 19395 - protein, 9 aa, synthetic construct
PSQATIRLF

SEQ ID NO: 19396 - protein, 9 aa, synthetic construct
PSQATIRVY

SEQ ID NO: 19397 - protein, 9 aa, synthetic construct
PSQATIKLY

SEQ ID NO: 19398 - protein, 9 aa, synthetic construct
PSQATIKVR

SEQ ID NO: 19399 - protein, 9 aa, synthetic construct
PSQATIKVH

SEQ ID NO: 19400 - protein, 9 aa, synthetic construct
PSQATGHLY

SEQ ID NO: 19401 - protein, 9 aa, synthetic construct
PSQATGHLH

SEQ ID NO: 19402 - protein, 9 aa, synthetic construct
PSQATGHLK

SEQ ID NO: 19403 - protein, 9 aa, synthetic construct
PSQATGHVR

SEQ ID NO: 19404 - protein, 9 aa, synthetic construct
PSQATGRLY

SEQ ID NO: 19405 - protein, 9 aa, synthetic construct
PSQATGRLH

SEQ ID NO: 19406 - protein, 9 aa, synthetic construct
PSQATGRLK

SEQ ID NO: 19407 - protein, 9 aa, synthetic construct
PSQATGRLF

SEQ ID NO: 19408 - protein, 9 aa, synthetic construct
PSQATGRVH

SEQ ID NO: 19409 - protein, 9 aa, synthetic construct
PSQATGRVF

SEQ ID NO: 19410 - protein, 9 aa, synthetic construct
PSQATGKLR

SEQ ID NO: 19411 - protein, 9 aa, synthetic construct
PSQATGKLH

SEQ ID NO: 19412 - protein, 9 aa, synthetic construct
PSQATGKLF

SEQ ID NO: 19413 - protein, 9 aa, synthetic construct
PSQATGKVY

SEQ ID NO: 19414 - protein, 9 aa, synthetic construct
PSQATGKVH

SEQ ID NO: 19415 - protein, 9 aa, synthetic construct
PSQATGKVF

SEQ ID NO: 19416 - protein, 9 aa, synthetic construct
PSQASVHLR

SEQ ID NO: 19417 - protein, 9 aa, synthetic construct
PSQASVHVR

SEQ ID NO: 19418 - protein, 9 aa, synthetic construct
PSQASVRLY

SEQ ID NO: 19419 - protein, 9 aa, synthetic construct
PSQASVRVF

SEQ ID NO: 19420 - protein, 9 aa, synthetic construct
PSQASVKLH

SEQ ID NO: 19421 - protein, 9 aa, synthetic construct
PSQASVKVY

SEQ ID NO: 19422 - protein, 9 aa, synthetic construct
PSQASVKVF

SEQ ID NO: 19423 - protein, 9 aa, synthetic construct
PSQASLHVY

SEQ ID NO: 19424 - protein, 9 aa, synthetic construct
PSQASLHVR

SEQ ID NO: 19425 - protein, 9 aa, synthetic construct
PSQASAHLH

SEQ ID NO: 19426 - protein, 9 aa, synthetic construct
PSQASAHLK

SEQ ID NO: 19427 - protein, 9 aa, synthetic construct
PSQASAHLF

SEQ ID NO: 19428 - protein, 9 aa, synthetic construct
PSQASAHVR

SEQ ID NO: 19429 - protein, 9 aa, synthetic construct
PLNASIKLH

SEQ ID NO: 19430 - protein, 9 aa, synthetic construct
PSQASARLY

SEQ ID NO: 19431 - protein, 9 aa, synthetic construct
PLNASIKLK

SEQ ID NO: 19432 - protein, 9 aa, synthetic construct
PSQASAKLF

SEQ ID NO: 19433 - protein, 9 aa, synthetic construct
PSQASAKVY

SEQ ID NO: 19434 - protein, 9 aa, synthetic construct
PSQASAKVF

SEQ ID NO: 19435 - protein, 9 aa, synthetic construct
PLNASIKLF

SEQ ID NO: 19436 - protein, 9 aa, synthetic construct
PSQASIHLY

SEQ ID NO: 19437 - protein, 9 aa, synthetic construct
PSQASIHLR

SEQ ID NO: 19438 - protein, 9 aa, synthetic construct
PSQASIHLH

SEQ ID NO: 19439 - protein, 9 aa, synthetic construct
PSQASIHLK

SEQ ID NO: 19440 - protein, 9 aa, synthetic construct
PSQASIHLF

SEQ ID NO: 19441 - protein, 9 aa, synthetic construct
PSQASIHVR

SEQ ID NO: 19442 - protein, 9 aa, synthetic construct
PSQASIHVH

SEQ ID NO: 19443 - protein, 9 aa, synthetic construct
PSQASIHVK

SEQ ID NO: 19444 - protein, 9 aa, synthetic construct
PLNASIKVY

SEQ ID NO: 19445 - protein, 9 aa, synthetic construct
PSQASIRLH

SEQ ID NO: 19446 - protein, 9 aa, synthetic construct
PSQASIRLF

SEQ ID NO: 19447 - protein, 9 aa, synthetic construct
PSQASIRVY

SEQ ID NO: 19448 - protein, 9 aa, synthetic construct
PSQASIKLH

SEQ ID NO: 19449 - protein, 9 aa, synthetic construct
PSQASIKLF

SEQ ID NO: 19450 - protein, 9 aa, synthetic construct
PSQASGHLR

SEQ ID NO: 19451 - protein, 9 aa, synthetic construct
PSQASGHLH

SEQ ID NO: 19452 - protein, 9 aa, synthetic construct
PSQASGHLF

SEQ ID NO: 19453 - protein, 9 aa, synthetic construct
PSQASGHVF

SEQ ID NO: 19454 - protein, 9 aa, synthetic construct
PSQASGRLY

SEQ ID NO: 19455 - protein, 9 aa, synthetic construct
PSQASGRVR

SEQ ID NO: 19456 - protein, 9 aa, synthetic construct
PSQASGRVH

SEQ ID NO: 19457 - protein, 9 aa, synthetic construct
PLNASIKVF

SEQ ID NO: 19458 - protein, 9 aa, synthetic construct
PSQASGKLY

SEQ ID NO: 19459 - protein, 9 aa, synthetic construct
PSQASGKLH

SEQ ID NO: 19460 - protein, 9 aa, synthetic construct
PSQASGKLF

SEQ ID NO: 19461 - protein, 9 aa, synthetic construct
PSQASGKVY

SEQ ID NO: 19462 - protein, 9 aa, synthetic construct
PSQASGKVH

SEQ ID NO: 19463 - protein, 9 aa, synthetic construct
PSQASGKVF

SEQ ID NO: 19464 - protein, 9 aa, synthetic construct
PSQAVVHVF

SEQ ID NO: 19465 - protein, 9 aa, synthetic construct
PSQAVVRVF

SEQ ID NO: 19466 - protein, 9 aa, synthetic construct
PSQAVVKLF

SEQ ID NO: 19467 - protein, 9 aa, synthetic construct
PSQAVVKVH

SEQ ID NO: 19468 - protein, 9 aa, synthetic construct
PSQAVLRLH

SEQ ID NO: 19469 - protein, 9 aa, synthetic construct
PSQAVLKVY

SEQ ID NO: 19470 - protein, 9 aa, synthetic construct
PSQAVAHLY

SEQ ID NO: 19471 - protein, 9 aa, synthetic construct
PSQAVAHLR

SEQ ID NO: 19472 - protein, 9 aa, synthetic construct
PSQAVAHLH

SEQ ID NO: 19473 - protein, 9 aa, synthetic construct
PSQAVAHLF

SEQ ID NO: 19474 - protein, 9 aa, synthetic construct
PSQAVAHVH

SEQ ID NO: 19475 - protein, 9 aa, synthetic construct
PSQAVAHVF

SEQ ID NO: 19476 - protein, 9 aa, synthetic construct
PSQAVARVY

SEQ ID NO: 19477 - protein, 9 aa, synthetic construct
PSQAVAKLF

SEQ ID NO: 19478 - protein, 9 aa, synthetic construct
PSQAVIHVY

SEQ ID NO: 19479 - protein, 9 aa, synthetic construct
PSQAVIHVH

SEQ ID NO: 19480 - protein, 9 aa, synthetic construct
PSQAVIHVF

SEQ ID NO: 19481 - protein, 9 aa, synthetic construct
PLNASGRLY

SEQ ID NO: 19482 - protein, 9 aa, synthetic construct
PSQAVIRLH

SEQ ID NO: 19483 - protein, 9 aa, synthetic construct
PLNASGRLR

SEQ ID NO: 19484 - protein, 9 aa, synthetic construct
PSQAVIKLY

SEQ ID NO: 19485 - protein, 9 aa, synthetic construct
PLNASGRLH

SEQ ID NO: 19486 - protein, 9 aa, synthetic construct
PSQAVGHLH

SEQ ID NO: 19487 - protein, 9 aa, synthetic construct
PSQAVGHVK

SEQ ID NO: 19488 - protein, 9 aa, synthetic construct
PSQAVGRVH

SEQ ID NO: 19489 - protein, 9 aa, synthetic construct
PSQAVGRVF

SEQ ID NO: 19490 - protein, 9 aa, synthetic construct
PLNASGRLF

SEQ ID NO: 19491 - protein, 9 aa, synthetic construct
PSQAVGKLF

SEQ ID NO: 19492 - protein, 9 aa, synthetic construct
PSQAGVHVR

SEQ ID NO: 19493 - protein, 9 aa, synthetic construct
PSQAGVHVK

SEQ ID NO: 19494 - protein, 9 aa, synthetic construct
PSQAGVKLH

SEQ ID NO: 19495 - protein, 9 aa, synthetic construct
PSQAGVKLF

SEQ ID NO: 19496 - protein, 9 aa, synthetic construct
PSQAGLHLK

SEQ ID NO: 19497 - protein, 9 aa, synthetic construct
PLNASGKLR

SEQ ID NO: 19498 - protein, 9 aa, synthetic construct
PSQAGAHLK

SEQ ID NO: 19499 - protein, 9 aa, synthetic construct
PSQAGAHVY

SEQ ID NO: 19500 - protein, 9 aa, synthetic construct
PSQAGARVH

SEQ ID NO: 19501 - protein, 9 aa, synthetic construct
PSQAGARVF

SEQ ID NO: 19502 - protein, 9 aa, synthetic construct
PSQAGAKLY

SEQ ID NO: 19503 - protein, 9 aa, synthetic construct
PLNASGKLF

SEQ ID NO: 19504 - protein, 9 aa, synthetic construct
PSQAGIHLY

SEQ ID NO: 19505 - protein, 9 aa, synthetic construct
PSQAGIHLK

SEQ ID NO: 19506 - protein, 9 aa, synthetic construct
PSQAGIHLF

SEQ ID NO: 19507 - protein, 9 aa, synthetic construct
PSQAGIHVR

SEQ ID NO: 19508 - protein, 9 aa, synthetic construct
PSQAGIHVF

SEQ ID NO: 19509 - protein, 9 aa, synthetic construct
PLNASGKVY

SEQ ID NO: 19510 - protein, 9 aa, synthetic construct
PSQAGIRLR

SEQ ID NO: 19511 - protein, 9 aa, synthetic construct
PSQAGIRLH

SEQ ID NO: 19512 - protein, 9 aa, synthetic construct
PSQAGIRLK

SEQ ID NO: 19513 - protein, 9 aa, synthetic construct
PSQAGIRLF

SEQ ID NO: 19514 - protein, 9 aa, synthetic construct
PSQAGIRVY

SEQ ID NO: 19515 - protein, 9 aa, synthetic construct
PSQAGIRVH

SEQ ID NO: 19516 - protein, 9 aa, synthetic construct
PSQAGIRVF

SEQ ID NO: 19517 - protein, 9 aa, synthetic construct
PSQAGIKLY

SEQ ID NO: 19518 - protein, 9 aa, synthetic construct
PSQAGIKLH

SEQ ID NO: 19519 - protein, 9 aa, synthetic construct
PSQAGIKLF

SEQ ID NO: 19520 - protein, 9 aa, synthetic construct
PSQAGIKVY

SEQ ID NO: 19521 - protein, 9 aa, synthetic construct
PSQAGIKVF

SEQ ID NO: 19522 - protein, 9 aa, synthetic construct
PLNASGKVH

SEQ ID NO: 19523 - protein, 9 aa, synthetic construct
PSQAGGHLF

SEQ ID NO: 19524 - protein, 9 aa, synthetic construct
PSQAGGHVR

SEQ ID NO: 19525 - protein, 9 aa, synthetic construct
PSQAGGHVH

SEQ ID NO: 19526 - protein, 9 aa, synthetic construct
PSQAGGHVK

SEQ ID NO: 19527 - protein, 9 aa, synthetic construct
PSQAGGRLY

SEQ ID NO: 19528 - protein, 9 aa, synthetic construct
PSQAGGRVF

SEQ ID NO: 19529 - protein, 9 aa, synthetic construct
PSQAGGKLR

SEQ ID NO: 19530 - protein, 9 aa, synthetic construct
PSQAGGKVY

SEQ ID NO: 19531 - protein, 9 aa, synthetic construct
PSQAGGKVH

SEQ ID NO: 19532 - protein, 9 aa, synthetic construct
PSPGAVHLR

SEQ ID NO: 19533 - protein, 9 aa, synthetic construct
PSPGAVHLH

SEQ ID NO: 19534 - protein, 9 aa, synthetic construct
PSPGAVHLK

SEQ ID NO: 19535 - protein, 9 aa, synthetic construct
PSPGAVHLF

SEQ ID NO: 19536 - protein, 9 aa, synthetic construct
PSPGAVHVR

SEQ ID NO: 19537 - protein, 9 aa, synthetic construct
PSPGAVHVK

SEQ ID NO: 19538 - protein, 9 aa, synthetic construct
PSPGAVHVF

SEQ ID NO: 19539 - protein, 9 aa, synthetic construct
PSPGAVRLK

SEQ ID NO: 19540 - protein, 9 aa, synthetic construct
PSPGAVRLF

SEQ ID NO: 19541 - protein, 9 aa, synthetic construct
PSPGAVRVY

SEQ ID NO: 19542 - protein, 9 aa, synthetic construct
PSPGAVRVF

SEQ ID NO: 19543 - protein, 9 aa, synthetic construct
PSPGAVKLH

SEQ ID NO: 19544 - protein, 9 aa, synthetic construct
PSPGAVKLF

SEQ ID NO: 19545 - protein, 9 aa, synthetic construct
PSPGAVKVH

SEQ ID NO: 19546 - protein, 9 aa, synthetic construct
PSPGALHVR

SEQ ID NO: 19547 - protein, 9 aa, synthetic construct
PSPGALHVK

SEQ ID NO: 19548 - protein, 9 aa, synthetic construct
PSPGALRLY

SEQ ID NO: 19549 - protein, 9 aa, synthetic construct
PSPGALKLH

SEQ ID NO: 19550 - protein, 9 aa, synthetic construct
PSPGALKLF

SEQ ID NO: 19551 - protein, 9 aa, synthetic construct
PSPGALKVY

SEQ ID NO: 19552 - protein, 9 aa, synthetic construct
PSPGALKVH

SEQ ID NO: 19553 - protein, 9 aa, synthetic construct
PSPGALKVF

SEQ ID NO: 19554 - protein, 9 aa, synthetic construct
PSPGAAHLY

SEQ ID NO: 19555 - protein, 9 aa, synthetic construct
PSPGAAHLR

SEQ ID NO: 19556 - protein, 9 aa, synthetic construct
PSPGAAHLH

SEQ ID NO: 19557 - protein, 9 aa, synthetic construct
PSPGAAHLK

SEQ ID NO: 19558 - protein, 9 aa, synthetic construct
PSPGAAHVY

SEQ ID NO: 19559 - protein, 9 aa, synthetic construct
PSPGAAHVK

SEQ ID NO: 19560 - protein, 9 aa, synthetic construct
PSPGAAHVF

SEQ ID NO: 19561 - protein, 9 aa, synthetic construct
PSPGAARLH

SEQ ID NO: 19562 - protein, 9 aa, synthetic construct
PSPGAARLF

SEQ ID NO: 19563 - protein, 9 aa, synthetic construct
PSPGAARVF

SEQ ID NO: 19564 - protein, 9 aa, synthetic construct
PSPGAAKLR

SEQ ID NO: 19565 - protein, 9 aa, synthetic construct
PSPGAAKLH

SEQ ID NO: 19566 - protein, 9 aa, synthetic construct
PSPGAAKVY

SEQ ID NO: 19567 - protein, 9 aa, synthetic construct
PSPGAAKVR

SEQ ID NO: 19568 - protein, 9 aa, synthetic construct
PSPGAIHLY

SEQ ID NO: 19569 - protein, 9 aa, synthetic construct
PSPGAIHLR

SEQ ID NO: 19570 - protein, 9 aa, synthetic construct
PSPGAIHLH

SEQ ID NO: 19571 - protein, 9 aa, synthetic construct
PSPGAIHVR

SEQ ID NO: 19572 - protein, 9 aa, synthetic construct
PSPGAIRLY

SEQ ID NO: 19573 - protein, 9 aa, synthetic construct
PSPGAIRLH

SEQ ID NO: 19574 - protein, 9 aa, synthetic construct
PSPGAIRVH

SEQ ID NO: 19575 - protein, 9 aa, synthetic construct
PSPGAIRVF

SEQ ID NO: 19576 - protein, 9 aa, synthetic construct
PSPGAIKLF

SEQ ID NO: 19577 - protein, 9 aa, synthetic construct
PSPGAIKVH

SEQ ID NO: 19578 - protein, 9 aa, synthetic construct
PSPGAIKVF

SEQ ID NO: 19579 - protein, 9 aa, synthetic construct
PLNAVVRLH

SEQ ID NO: 19580 - protein, 9 aa, synthetic construct
PSPGAGHLR

SEQ ID NO: 19581 - protein, 9 aa, synthetic construct
PSPGAGHVY

SEQ ID NO: 19582 - protein, 9 aa, synthetic construct
PSPGAGHVK

SEQ ID NO: 19583 - protein, 9 aa, synthetic construct
PSPGAGRLH

SEQ ID NO: 19584 - protein, 9 aa, synthetic construct
PSPGAGRVY

SEQ ID NO: 19585 - protein, 9 aa, synthetic construct
PSPGAGRVR

SEQ ID NO: 19586 - protein, 9 aa, synthetic construct
PSPGAGRVH

SEQ ID NO: 19587 - protein, 9 aa, synthetic construct
PSPGAGRVK

SEQ ID NO: 19588 - protein, 9 aa, synthetic construct
PSPGAGRVF

SEQ ID NO: 19589 - protein, 9 aa, synthetic construct
PSPGAGKVH

SEQ ID NO: 19590 - protein, 9 aa, synthetic construct
PLNAVVRVY

SEQ ID NO: 19591 - protein, 9 aa, synthetic construct
PSPGTVHLR

SEQ ID NO: 19592 - protein, 9 aa, synthetic construct
PSPGTVHLK

SEQ ID NO: 19593 - protein, 9 aa, synthetic construct
PSPGTVHVY

SEQ ID NO: 19594 - protein, 9 aa, synthetic construct
PSPGTVHVR

SEQ ID NO: 19595 - protein, 9 aa, synthetic construct
PSPGTVHVH

SEQ ID NO: 19596 - protein, 9 aa, synthetic construct
PSPGTVHVK

SEQ ID NO: 19597 - protein, 9 aa, synthetic construct
PSPGTVHVF

SEQ ID NO: 19598 - protein, 9 aa, synthetic construct
PSPGTVRLH

SEQ ID NO: 19599 - protein, 9 aa, synthetic construct
PSPGTVRVY

SEQ ID NO: 19600 - protein, 9 aa, synthetic construct
PSPGTVRVH

SEQ ID NO: 19601 - protein, 9 aa, synthetic construct
PSPGTVRVF

SEQ ID NO: 19602 - protein, 9 aa, synthetic construct
PSPGTVKLH

SEQ ID NO: 19603 - protein, 9 aa, synthetic construct
PSPGTVKVR

SEQ ID NO: 19604 - protein, 9 aa, synthetic construct
PSPGTVKVH

SEQ ID NO: 19605 - protein, 9 aa, synthetic construct
PSPGTVKVF

SEQ ID NO: 19606 - protein, 9 aa, synthetic construct
PSPGTLHLK

SEQ ID NO: 19607 - protein, 9 aa, synthetic construct
PSPGTLHVY

SEQ ID NO: 19608 - protein, 9 aa, synthetic construct
PSPGTLHVK

SEQ ID NO: 19609 - protein, 9 aa, synthetic construct
PSPGTLHVF

SEQ ID NO: 19610 - protein, 9 aa, synthetic construct
PLNAVVRVF

SEQ ID NO: 19611 - protein, 9 aa, synthetic construct
PSPGTLRLF

SEQ ID NO: 19612 - protein, 9 aa, synthetic construct
PSPGTLRVF

SEQ ID NO: 19613 - protein, 9 aa, synthetic construct
PLNAVVKLY

SEQ ID NO: 19614 - protein, 9 aa, synthetic construct
PSPGTLKLR

SEQ ID NO: 19615 - protein, 9 aa, synthetic construct
PSPGTLKLF

SEQ ID NO: 19616 - protein, 9 aa, synthetic construct
PSPGTLKVH

SEQ ID NO: 19617 - protein, 9 aa, synthetic construct
PSPGTARLY

SEQ ID NO: 19618 - protein, 9 aa, synthetic construct
PSPGTARLF

SEQ ID NO: 19619 - protein, 9 aa, synthetic construct
PSPGTAKLH

SEQ ID NO: 19620 - protein, 9 aa, synthetic construct
PSPGTAKLF

SEQ ID NO: 19621 - protein, 9 aa, synthetic construct
PSPGTIHLY

SEQ ID NO: 19622 - protein, 9 aa, synthetic construct
PSPGTIHLR

SEQ ID NO: 19623 - protein, 9 aa, synthetic construct
PSPGTIHLF

SEQ ID NO: 19624 - protein, 9 aa, synthetic construct
PSPGTIHVR

SEQ ID NO: 19625 - protein, 9 aa, synthetic construct
PSPGTIHVF

SEQ ID NO: 19626 - protein, 9 aa, synthetic construct
PSPGTIRLR

SEQ ID NO: 19627 - protein, 9 aa, synthetic construct
PSPGTIRLH

SEQ ID NO: 19628 - protein, 9 aa, synthetic construct
PSPGTIRLF

SEQ ID NO: 19629 - protein, 9 aa, synthetic construct
PSPGTIRVY

SEQ ID NO: 19630 - protein, 9 aa, synthetic construct
PSPGTIRVH

SEQ ID NO: 19631 - protein, 9 aa, synthetic construct
PSPGTIKLY

SEQ ID NO: 19632 - protein, 9 aa, synthetic construct
PSPGTIKLR

SEQ ID NO: 19633 - protein, 9 aa, synthetic construct
PSPGTIKLH

SEQ ID NO: 19634 - protein, 9 aa, synthetic construct
PSPGTIKLF

SEQ ID NO: 19635 - protein, 9 aa, synthetic construct
PSPGTIKVH

SEQ ID NO: 19636 - protein, 9 aa, synthetic construct
PSPGTIKVF

SEQ ID NO: 19637 - protein, 9 aa, synthetic construct
PSPGTGHVR

SEQ ID NO: 19638 - protein, 9 aa, synthetic construct
PSPGTGHVF

SEQ ID NO: 19639 - protein, 9 aa, synthetic construct
PSPGTGRLY

SEQ ID NO: 19640 - protein, 9 aa, synthetic construct
PSPGTGRLR

SEQ ID NO: 19641 - protein, 9 aa, synthetic construct
PSPGTGRLH

SEQ ID NO: 19642 - protein, 9 aa, synthetic construct
PSPGTGRLK

SEQ ID NO: 19643 - protein, 9 aa, synthetic construct
PSPGTGRVH

SEQ ID NO: 19644 - protein, 9 aa, synthetic construct
PSPGTGRVF

SEQ ID NO: 19645 - protein, 9 aa, synthetic construct
PSPGTGKLH

SEQ ID NO: 19646 - protein, 9 aa, synthetic construct
PSPGTGKVH

SEQ ID NO: 19647 - protein, 9 aa, synthetic construct
PSPGSVHLR

SEQ ID NO: 19648 - protein, 9 aa, synthetic construct
PSPGSVHLH

SEQ ID NO: 19649 - protein, 9 aa, synthetic construct
PSPGSVHVY

SEQ ID NO: 19650 - protein, 9 aa, synthetic construct
PSPGSVHVR

SEQ ID NO: 19651 - protein, 9 aa, synthetic construct
PSPGSVKLY

SEQ ID NO: 19652 - protein, 9 aa, synthetic construct
PSPGSVKVF

SEQ ID NO: 19653 - protein, 9 aa, synthetic construct
PSPGSLHLK

SEQ ID NO: 19654 - protein, 9 aa, synthetic construct
PSPGSLHLF

SEQ ID NO: 19655 - protein, 9 aa, synthetic construct
PSPGSLHVH

SEQ ID NO: 19656 - protein, 9 aa, synthetic construct
PSPGSLRVY

SEQ ID NO: 19657 - protein, 9 aa, synthetic construct
PSPGSLRVF

SEQ ID NO: 19658 - protein, 9 aa, synthetic construct
PSPGSLKLH

SEQ ID NO: 19659 - protein, 9 aa, synthetic construct
PSPGSLKVY

SEQ ID NO: 19660 - protein, 9 aa, synthetic construct
PSPGSARLH

SEQ ID NO: 19661 - protein, 9 aa, synthetic construct
PSPGSARVF

SEQ ID NO: 19662 - protein, 9 aa, synthetic construct
PSPGSAKVH

SEQ ID NO: 19663 - protein, 9 aa, synthetic construct
PLNAVLHVF

SEQ ID NO: 19664 - protein, 9 aa, synthetic construct
PSPGSIRLF

SEQ ID NO: 19665 - protein, 9 aa, synthetic construct
PSPGSIKLH

SEQ ID NO: 19666 - protein, 9 aa, synthetic construct
PSPGSIKLF

SEQ ID NO: 19667 - protein, 9 aa, synthetic construct
PSPGSIKVH

SEQ ID NO: 19668 - protein, 9 aa, synthetic construct
PSPGSIKVF

SEQ ID NO: 19669 - protein, 9 aa, synthetic construct
PSPGSGHLK

SEQ ID NO: 19670 - protein, 9 aa, synthetic construct
PSPGSGHLF

SEQ ID NO: 19671 - protein, 9 aa, synthetic construct
PSPGSGHVY

SEQ ID NO: 19672 - protein, 9 aa, synthetic construct
PSPGSGHVK

SEQ ID NO: 19673 - protein, 9 aa, synthetic construct
PSPGSGRLF

SEQ ID NO: 19674 - protein, 9 aa, synthetic construct
PSPGSGRVF

SEQ ID NO: 19675 - protein, 9 aa, synthetic construct
PLNAVLRLF

SEQ ID NO: 19676 - protein, 9 aa, synthetic construct
PSPGSGKLY

SEQ ID NO: 19677 - protein, 9 aa, synthetic construct
PSPGSGKLH

SEQ ID NO: 19678 - protein, 9 aa, synthetic construct
PSPGSGKVY

SEQ ID NO: 19679 - protein, 9 aa, synthetic construct
PSPGSGKVH

SEQ ID NO: 19680 - protein, 9 aa, synthetic construct
PSPGSGKVF

SEQ ID NO: 19681 - protein, 9 aa, synthetic construct
PSPGVVHLY

SEQ ID NO: 19682 - protein, 9 aa, synthetic construct
PSPGVVHLH

SEQ ID NO: 19683 - protein, 9 aa, synthetic construct
PSPGVVHLK

SEQ ID NO: 19684 - protein, 9 aa, synthetic construct
PSPGVVHVR

SEQ ID NO: 19685 - protein, 9 aa, synthetic construct
PSPGVVHVF

SEQ ID NO: 19686 - protein, 9 aa, synthetic construct
PSPGVVRLF

SEQ ID NO: 19687 - protein, 9 aa, synthetic construct
PSPGVVRVF

SEQ ID NO: 19688 - protein, 9 aa, synthetic construct
PSPGVVKLH

SEQ ID NO: 19689 - protein, 9 aa, synthetic construct
PSPGVVKVH

SEQ ID NO: 19690 - protein, 9 aa, synthetic construct
PSPGVVKVK

SEQ ID NO: 19691 - protein, 9 aa, synthetic construct
PSPGVVKVF

SEQ ID NO: 19692 - protein, 9 aa, synthetic construct
PSPGVLHLY

SEQ ID NO: 19693 - protein, 9 aa, synthetic construct
PSPGVLHLH

SEQ ID NO: 19694 - protein, 9 aa, synthetic construct
PSPGVLHVR

SEQ ID NO: 19695 - protein, 9 aa, synthetic construct
PSPGVLHVH

SEQ ID NO: 19696 - protein, 9 aa, synthetic construct
PSPGVLRLF

SEQ ID NO: 19697 - protein, 9 aa, synthetic construct
PSPGVLKLY

SEQ ID NO: 19698 - protein, 9 aa, synthetic construct
PSPGVLKLR

SEQ ID NO: 19699 - protein, 9 aa, synthetic construct
PSPGVLKLH

SEQ ID NO: 19700 - protein, 9 aa, synthetic construct
PSPGVLKLF

SEQ ID NO: 19701 - protein, 9 aa, synthetic construct
PSPGVLKVY

SEQ ID NO: 19702 - protein, 9 aa, synthetic construct
PSPGVLKVF

SEQ ID NO: 19703 - protein, 9 aa, synthetic construct
PLNAVLKLR

SEQ ID NO: 19704 - protein, 9 aa, synthetic construct
PLNAVLKLH

SEQ ID NO: 19705 - protein, 9 aa, synthetic construct
PSPGVARLY

SEQ ID NO: 19706 - protein, 9 aa, synthetic construct
PSPGVARLF

SEQ ID NO: 19707 - protein, 9 aa, synthetic construct
PSPGVARVH

SEQ ID NO: 19708 - protein, 9 aa, synthetic construct
PSPGVAKLH

SEQ ID NO: 19709 - protein, 9 aa, synthetic construct
PSPGVAKVR

SEQ ID NO: 19710 - protein, 9 aa, synthetic construct
PSPGVAKVH

SEQ ID NO: 19711 - protein, 9 aa, synthetic construct
PSPGVAKVF

SEQ ID NO: 19712 - protein, 9 aa, synthetic construct
PSPGVIHVR

SEQ ID NO: 19713 - protein, 9 aa, synthetic construct
PSPGVIHVH

SEQ ID NO: 19714 - protein, 9 aa, synthetic construct
PSPGVIRLY

SEQ ID NO: 19715 - protein, 9 aa, synthetic construct
PSPGVIRLR

SEQ ID NO: 19716 - protein, 9 aa, synthetic construct
PSPGVIRLF

SEQ ID NO: 19717 - protein, 9 aa, synthetic construct
PSPGVIRVY

SEQ ID NO: 19718 - protein, 9 aa, synthetic construct
PSPGVIRVH

SEQ ID NO: 19719 - protein, 9 aa, synthetic construct
PSPGVIRVF

SEQ ID NO: 19720 - protein, 9 aa, synthetic construct
PSPGVIKLY

SEQ ID NO: 19721 - protein, 9 aa, synthetic construct
PSPGVIKVY

SEQ ID NO: 19722 - protein, 9 aa, synthetic construct
PSPGVIKVH

SEQ ID NO: 19723 - protein, 9 aa, synthetic construct
PSPGVIKVF

SEQ ID NO: 19724 - protein, 9 aa, synthetic construct
PLNAVLKVH

SEQ ID NO: 19725 - protein, 9 aa, synthetic construct
PSPGVGHLR

SEQ ID NO: 19726 - protein, 9 aa, synthetic construct
PSPGVGHVR

SEQ ID NO: 19727 - protein, 9 aa, synthetic construct
PSPGVGHVK

SEQ ID NO: 19728 - protein, 9 aa, synthetic construct
PSPGVGRLY

SEQ ID NO: 19729 - protein, 9 aa, synthetic construct
PSPGVGRVK

SEQ ID NO: 19730 - protein, 9 aa, synthetic construct
PSPGVGRVF

SEQ ID NO: 19731 - protein, 9 aa, synthetic construct
PSPGVGKLY

SEQ ID NO: 19732 - protein, 9 aa, synthetic construct
PSPGVGKLR

SEQ ID NO: 19733 - protein, 9 aa, synthetic construct
PSPGVGKLK

SEQ ID NO: 19734 - protein, 9 aa, synthetic construct
PSPGVGKVF

SEQ ID NO: 19735 - protein, 9 aa, synthetic construct
PLNGAGHVR

SEQ ID NO: 19736 - protein, 9 aa, synthetic construct
PSPGGVHLY

SEQ ID NO: 19737 - protein, 9 aa, synthetic construct
PSPGGVHLH

SEQ ID NO: 19738 - protein, 9 aa, synthetic construct
PSPGGVHLK

SEQ ID NO: 19739 - protein, 9 aa, synthetic construct
PSPGGVHLF

SEQ ID NO: 19740 - protein, 9 aa, synthetic construct
PSPGGVHVY

SEQ ID NO: 19741 - protein, 9 aa, synthetic construct
PSPGGVHVR

SEQ ID NO: 19742 - protein, 9 aa, synthetic construct
PSPGGVHVF

SEQ ID NO: 19743 - protein, 9 aa, synthetic construct
PSPGGVRLY

SEQ ID NO: 19744 - protein, 9 aa, synthetic construct
PSPGGVRLF

SEQ ID NO: 19745 - protein, 9 aa, synthetic construct
PSPGGVRVY

SEQ ID NO: 19746 - protein, 9 aa, synthetic construct
PSPGGVRVR

SEQ ID NO: 19747 - protein, 9 aa, synthetic construct
PSPGGVKLH

SEQ ID NO: 19748 - protein, 9 aa, synthetic construct
PSPGGVKLF

SEQ ID NO: 19749 - protein, 9 aa, synthetic construct
PSPGGVKVY

SEQ ID NO: 19750 - protein, 9 aa, synthetic construct
PSPGGVKVH

SEQ ID NO: 19751 - protein, 9 aa, synthetic construct
PSPGGVKVK

SEQ ID NO: 19752 - protein, 9 aa, synthetic construct
PSPGGVKVF

SEQ ID NO: 19753 - protein, 9 aa, synthetic construct
PLNAVAHLK

SEQ ID NO: 19754 - protein, 9 aa, synthetic construct
PSPGGLHLY

SEQ ID NO: 19755 - protein, 9 aa, synthetic construct
PSPGGLHLH

SEQ ID NO: 19756 - protein, 9 aa, synthetic construct
PSPGGLHLK

SEQ ID NO: 19757 - protein, 9 aa, synthetic construct
PSPGGLHVY

SEQ ID NO: 19758 - protein, 9 aa, synthetic construct
PSPGGLHVR

SEQ ID NO: 19759 - protein, 9 aa, synthetic construct
PSPGGLHVH

SEQ ID NO: 19760 - protein, 9 aa, synthetic construct
PSPGGLHVK

SEQ ID NO: 19761 - protein, 9 aa, synthetic construct
PSPGGLHVF

SEQ ID NO: 19762 - protein, 9 aa, synthetic construct
PLNAVAHVY

SEQ ID NO: 19763 - protein, 9 aa, synthetic construct
PSPGGLKVH

SEQ ID NO: 19764 - protein, 9 aa, synthetic construct
PLNAVAHVR

SEQ ID NO: 19765 - protein, 9 aa, synthetic construct
PSPGGAHLY

SEQ ID NO: 19766 - protein, 9 aa, synthetic construct
PSPGGAHLR

SEQ ID NO: 19767 - protein, 9 aa, synthetic construct
PSPGGAHLF

SEQ ID NO: 19768 - protein, 9 aa, synthetic construct
PSPGGAHVY

SEQ ID NO: 19769 - protein, 9 aa, synthetic construct
PSPGGAHVR

SEQ ID NO: 19770 - protein, 9 aa, synthetic construct
PSPGGAHVK

SEQ ID NO: 19771 - protein, 9 aa, synthetic construct
PSPGGAHVF

SEQ ID NO: 19772 - protein, 9 aa, synthetic construct
PSPGGARLY

SEQ ID NO: 19773 - protein, 9 aa, synthetic construct
PSPGGARVY

SEQ ID NO: 19774 - protein, 9 aa, synthetic construct
PSPGGARVH

SEQ ID NO: 19775 - protein, 9 aa, synthetic construct
PSPGGAKLY

SEQ ID NO: 19776 - protein, 9 aa, synthetic construct
PSPGGAKLH

SEQ ID NO: 19777 - protein, 9 aa, synthetic construct
PSPGGAKLF

SEQ ID NO: 19778 - protein, 9 aa, synthetic construct
PSPGGAKVY

SEQ ID NO: 19779 - protein, 9 aa, synthetic construct
PSPGGAKVH

SEQ ID NO: 19780 - protein, 9 aa, synthetic construct
PSPGGAKVF

SEQ ID NO: 19781 - protein, 9 aa, synthetic construct
PLNAVAHVF

SEQ ID NO: 19782 - protein, 9 aa, synthetic construct
PSPGGIHLR

SEQ ID NO: 19783 - protein, 9 aa, synthetic construct
PSPGGIHLK

SEQ ID NO: 19784 - protein, 9 aa, synthetic construct
PSPGGIHLF

SEQ ID NO: 19785 - protein, 9 aa, synthetic construct
PSPGGIHVR

SEQ ID NO: 19786 - protein, 9 aa, synthetic construct
PSPGGIHVF

SEQ ID NO: 19787 - protein, 9 aa, synthetic construct
PSPGGIRLY

SEQ ID NO: 19788 - protein, 9 aa, synthetic construct
PSPGGIRVH

SEQ ID NO: 19789 - protein, 9 aa, synthetic construct
PSPGGIKLY

SEQ ID NO: 19790 - protein, 9 aa, synthetic construct
PSPGGIKLR

SEQ ID NO: 19791 - protein, 9 aa, synthetic construct
PSPGGIKLF

SEQ ID NO: 19792 - protein, 9 aa, synthetic construct
PSPGGIKVH

SEQ ID NO: 19793 - protein, 9 aa, synthetic construct
PSPGGIKVF

SEQ ID NO: 19794 - protein, 9 aa, synthetic construct
PSPGGGHLR

SEQ ID NO: 19795 - protein, 9 aa, synthetic construct
PSPGGGHLK

SEQ ID NO: 19796 - protein, 9 aa, synthetic construct
PSPGGGHLF

SEQ ID NO: 19797 - protein, 9 aa, synthetic construct
PSPGGGHVR

SEQ ID NO: 19798 - protein, 9 aa, synthetic construct
PSPGGGHVK

SEQ ID NO: 19799 - protein, 9 aa, synthetic construct
PSPGGGHVF

SEQ ID NO: 19800 - protein, 9 aa, synthetic construct
PSPGGGRVH

SEQ ID NO: 19801 - protein, 9 aa, synthetic construct
PSPGGGRVF

SEQ ID NO: 19802 - protein, 9 aa, synthetic construct
PSPGGGKLY

SEQ ID NO: 19803 - protein, 9 aa, synthetic construct
PSPGGGKLH

SEQ ID NO: 19804 - protein, 9 aa, synthetic construct
PSPGGGKVH

SEQ ID NO: 19805 - protein, 9 aa, synthetic construct
PSPGGGKVF

SEQ ID NO: 19806 - protein, 9 aa, synthetic construct
PSPAAVHLK

SEQ ID NO: 19807 - protein, 9 aa, synthetic construct
PSPAAVHVY

SEQ ID NO: 19808 - protein, 9 aa, synthetic construct
PSPAAVHVR

SEQ ID NO: 19809 - protein, 9 aa, synthetic construct
PSPAAVHVH

SEQ ID NO: 19810 - protein, 9 aa, synthetic construct
PSPAAVHVK

SEQ ID NO: 19811 - protein, 9 aa, synthetic construct
PSPAAVHVF

SEQ ID NO: 19812 - protein, 9 aa, synthetic construct
PSPAAVRLY

SEQ ID NO: 19813 - protein, 9 aa, synthetic construct
PSPAAVRLH

SEQ ID NO: 19814 - protein, 9 aa, synthetic construct
PSPAAVRVH

SEQ ID NO: 19815 - protein, 9 aa, synthetic construct
PSPAAVKLY

SEQ ID NO: 19816 - protein, 9 aa, synthetic construct
PSPAAVKLR

SEQ ID NO: 19817 - protein, 9 aa, synthetic construct
PSPAAVKLH

SEQ ID NO: 19818 - protein, 9 aa, synthetic construct
PSPAAVKLK

SEQ ID NO: 19819 - protein, 9 aa, synthetic construct
PSPAAVKLF

SEQ ID NO: 19820 - protein, 9 aa, synthetic construct
PSPAAVKVH

SEQ ID NO: 19821 - protein, 9 aa, synthetic construct
PSPAAVKVF

SEQ ID NO: 19822 - protein, 9 aa, synthetic construct
PSPAALHLH

SEQ ID NO: 19823 - protein, 9 aa, synthetic construct
PSPAALHLK

SEQ ID NO: 19824 - protein, 9 aa, synthetic construct
PSPAALHVY

SEQ ID NO: 19825 - protein, 9 aa, synthetic construct
PSPAALHVR

SEQ ID NO: 19826 - protein, 9 aa, synthetic construct
PSPAALHVH

SEQ ID NO: 19827 - protein, 9 aa, synthetic construct
PSPAALHVK

SEQ ID NO: 19828 - protein, 9 aa, synthetic construct
PSPAALHVF

SEQ ID NO: 19829 - protein, 9 aa, synthetic construct
PSPAALKLY

SEQ ID NO: 19830 - protein, 9 aa, synthetic construct
PSPAALKLH

SEQ ID NO: 19831 - protein, 9 aa, synthetic construct
PSPAALKVY

SEQ ID NO: 19832 - protein, 9 aa, synthetic construct
PSPAALKVF

SEQ ID NO: 19833 - protein, 9 aa, synthetic construct
PSPAAARLY

SEQ ID NO: 19834 - protein, 9 aa, synthetic construct
PSPAAARLF

SEQ ID NO: 19835 - protein, 9 aa, synthetic construct
PSPAAARVR

SEQ ID NO: 19836 - protein, 9 aa, synthetic construct
PSPAAARVH

SEQ ID NO: 19837 - protein, 9 aa, synthetic construct
PSPAAAKLY

SEQ ID NO: 19838 - protein, 9 aa, synthetic construct
PSPAAAKLF

SEQ ID NO: 19839 - protein, 9 aa, synthetic construct
PSPAAAKVY

SEQ ID NO: 19840 - protein, 9 aa, synthetic construct
PSPAAAKVR

SEQ ID NO: 19841 - protein, 9 aa, synthetic construct
PSPAAAKVH

SEQ ID NO: 19842 - protein, 9 aa, synthetic construct
PSPAAAKVF

SEQ ID NO: 19843 - protein, 9 aa, synthetic construct
PLNAVAKLF

SEQ ID NO: 19844 - protein, 9 aa, synthetic construct
PSPAAIHLY

SEQ ID NO: 19845 - protein, 9 aa, synthetic construct
PSPAAIHLH

SEQ ID NO: 19846 - protein, 9 aa, synthetic construct
PSPAAIHVY

SEQ ID NO: 19847 - protein, 9 aa, synthetic construct
PSPAAIHVR

SEQ ID NO: 19848 - protein, 9 aa, synthetic construct
PSPAAIHVF

SEQ ID NO: 19849 - protein, 9 aa, synthetic construct
PSPAAIRLY

SEQ ID NO: 19850 - protein, 9 aa, synthetic construct
PSPAAIRLH

SEQ ID NO: 19851 - protein, 9 aa, synthetic construct
PSPAAIRVY

SEQ ID NO: 19852 - protein, 9 aa, synthetic construct
PSPAAIRVH

SEQ ID NO: 19853 - protein, 9 aa, synthetic construct
PSPAAIKLY

SEQ ID NO: 19854 - protein, 9 aa, synthetic construct
PSPAAIKLH

SEQ ID NO: 19855 - protein, 9 aa, synthetic construct
PSPAAIKLF

SEQ ID NO: 19856 - protein, 9 aa, synthetic construct
PSPAAIKVH

SEQ ID NO: 19857 - protein, 9 aa, synthetic construct
PLNAVAKVK

SEQ ID NO: 19858 - protein, 9 aa, synthetic construct
PSPAAGRVY

SEQ ID NO: 19859 - protein, 9 aa, synthetic construct
PSPAAGKVY

SEQ ID NO: 19860 - protein, 9 aa, synthetic construct
PSPATVHLY

SEQ ID NO: 19861 - protein, 9 aa, synthetic construct
PSPATVHLR

SEQ ID NO: 19862 - protein, 9 aa, synthetic construct
PSPATVHLH

SEQ ID NO: 19863 - protein, 9 aa, synthetic construct
PSPATVHLK

SEQ ID NO: 19864 - protein, 9 aa, synthetic construct
PSPATVHLF

SEQ ID NO: 19865 - protein, 9 aa, synthetic construct
PSPATVHVY

SEQ ID NO: 19866 - protein, 9 aa, synthetic construct
PSPATVHVR

SEQ ID NO: 19867 - protein, 9 aa, synthetic construct
PSPATVHVK

SEQ ID NO: 19868 - protein, 9 aa, synthetic construct
PSPATVHVF

SEQ ID NO: 19869 - protein, 9 aa, synthetic construct
PSPATVRLY

SEQ ID NO: 19870 - protein, 9 aa, synthetic construct
PSPATVRLH

SEQ ID NO: 19871 - protein, 9 aa, synthetic construct
PSPATVRVY

SEQ ID NO: 19872 - protein, 9 aa, synthetic construct
PSPATVRVF

SEQ ID NO: 19873 - protein, 9 aa, synthetic construct
PSPATVKLY

SEQ ID NO: 19874 - protein, 9 aa, synthetic construct
PSPATVKLH

SEQ ID NO: 19875 - protein, 9 aa, synthetic construct
PSPATVKVY

SEQ ID NO: 19876 - protein, 9 aa, synthetic construct
PSPATVKVH

SEQ ID NO: 19877 - protein, 9 aa, synthetic construct
PSPATVKVF

SEQ ID NO: 19878 - protein, 9 aa, synthetic construct
PSPATLHLY

SEQ ID NO: 19879 - protein, 9 aa, synthetic construct
PSPATLHLH

SEQ ID NO: 19880 - protein, 9 aa, synthetic construct
PSPATLHLK

SEQ ID NO: 19881 - protein, 9 aa, synthetic construct
PSPATLHVY

SEQ ID NO: 19882 - protein, 9 aa, synthetic construct
PSPATLHVR

SEQ ID NO: 19883 - protein, 9 aa, synthetic construct
PSPATLHVH

SEQ ID NO: 19884 - protein, 9 aa, synthetic construct
PSPATLHVK

SEQ ID NO: 19885 - protein, 9 aa, synthetic construct
PSPATLHVF

SEQ ID NO: 19886 - protein, 9 aa, synthetic construct
PSPATLRLY

SEQ ID NO: 19887 - protein, 9 aa, synthetic construct
PSPATLRLH

SEQ ID NO: 19888 - protein, 9 aa, synthetic construct
PSPATLKLY

SEQ ID NO: 19889 - protein, 9 aa, synthetic construct
PSPATLKLH

SEQ ID NO: 19890 - protein, 9 aa, synthetic construct
PSPATLKVF

SEQ ID NO: 19891 - protein, 9 aa, synthetic construct
PSPATAHVR

SEQ ID NO: 19892 - protein, 9 aa, synthetic construct
PSPATAHVF

SEQ ID NO: 19893 - protein, 9 aa, synthetic construct
PSPATARLY

SEQ ID NO: 19894 - protein, 9 aa, synthetic construct
PSPATARLF

SEQ ID NO: 19895 - protein, 9 aa, synthetic construct
PSPATARVY

SEQ ID NO: 19896 - protein, 9 aa, synthetic construct
PSPATAKLF

SEQ ID NO: 19897 - protein, 9 aa, synthetic construct
PSPATAKVH

SEQ ID NO: 19898 - protein, 9 aa, synthetic construct
PSPATAKVF

SEQ ID NO: 19899 - protein, 9 aa, synthetic construct
PSPATIHVF

SEQ ID NO: 19900 - protein, 9 aa, synthetic construct
PLNGAVRLK

SEQ ID NO: 19901 - protein, 9 aa, synthetic construct
PSPATIRLY

SEQ ID NO: 19902 - protein, 9 aa, synthetic construct
PSPATIRLH

SEQ ID NO: 19903 - protein, 9 aa, synthetic construct
PSPATIRLF

SEQ ID NO: 19904 - protein, 9 aa, synthetic construct
PSPATIRVR

SEQ ID NO: 19905 - protein, 9 aa, synthetic construct
PSPATIRVH

SEQ ID NO: 19906 - protein, 9 aa, synthetic construct
PSPATIRVF

SEQ ID NO: 19907 - protein, 9 aa, synthetic construct
PLNAVIRLR

SEQ ID NO: 19908 - protein, 9 aa, synthetic construct
PSPATIKLY

SEQ ID NO: 19909 - protein, 9 aa, synthetic construct
PSPATIKLR

SEQ ID NO: 19910 - protein, 9 aa, synthetic construct
PSPATIKLK

SEQ ID NO: 19911 - protein, 9 aa, synthetic construct
PSPATIKVH

SEQ ID NO: 19912 - protein, 9 aa, synthetic construct
PLNAVIRLH

SEQ ID NO: 19913 - protein, 9 aa, synthetic construct
PSPATGHVY

SEQ ID NO: 19914 - protein, 9 aa, synthetic construct
PSPATGRLY

SEQ ID NO: 19915 - protein, 9 aa, synthetic construct
PSPATGRLH

SEQ ID NO: 19916 - protein, 9 aa, synthetic construct
PSPATGRLF

SEQ ID NO: 19917 - protein, 9 aa, synthetic construct
PSPATGRVY

SEQ ID NO: 19918 - protein, 9 aa, synthetic construct
PSPATGKLY

SEQ ID NO: 19919 - protein, 9 aa, synthetic construct
PSPASVHLY

SEQ ID NO: 19920 - protein, 9 aa, synthetic construct
PSPASVHLK

SEQ ID NO: 19921 - protein, 9 aa, synthetic construct
PSPASVHVY

SEQ ID NO: 19922 - protein, 9 aa, synthetic construct
PSPASVRLY

SEQ ID NO: 19923 - protein, 9 aa, synthetic construct
PLNAVIRVH

SEQ ID NO: 19924 - protein, 9 aa, synthetic construct
PSPASVKLY

SEQ ID NO: 19925 - protein, 9 aa, synthetic construct
PSPASVKVY

SEQ ID NO: 19926 - protein, 9 aa, synthetic construct
PSPASLHLR

SEQ ID NO: 19927 - protein, 9 aa, synthetic construct
PSPASLHLH

SEQ ID NO: 19928 - protein, 9 aa, synthetic construct
PSPASLHLK

SEQ ID NO: 19929 - protein, 9 aa, synthetic construct
PSPASLHVR

SEQ ID NO: 19930 - protein, 9 aa, synthetic construct
PSPASLHVK

SEQ ID NO: 19931 - protein, 9 aa, synthetic construct
PSPASLRLY

SEQ ID NO: 19932 - protein, 9 aa, synthetic construct
PSPASLRLH

SEQ ID NO: 19933 - protein, 9 aa, synthetic construct
PSPASLRLF

SEQ ID NO: 19934 - protein, 9 aa, synthetic construct
PLNAVIKLY

SEQ ID NO: 19935 - protein, 9 aa, synthetic construct
PSPASLKLY

SEQ ID NO: 19936 - protein, 9 aa, synthetic construct
PSPASLKLH

SEQ ID NO: 19937 - protein, 9 aa, synthetic construct
PSPASLKVY

SEQ ID NO: 19938 - protein, 9 aa, synthetic construct
PSPASAHLR

SEQ ID NO: 19939 - protein, 9 aa, synthetic construct
PSPASAHLH

SEQ ID NO: 19940 - protein, 9 aa, synthetic construct
PSPASAHVR

SEQ ID NO: 19941 - protein, 9 aa, synthetic construct
PSPASAHVK

SEQ ID NO: 19942 - protein, 9 aa, synthetic construct
PSPASAHVF

SEQ ID NO: 19943 - protein, 9 aa, synthetic construct
PSPASARLY

SEQ ID NO: 19944 - protein, 9 aa, synthetic construct
PSPASARVY

SEQ ID NO: 19945 - protein, 9 aa, synthetic construct
PSPASARVH

SEQ ID NO: 19946 - protein, 9 aa, synthetic construct
PSPASARVF

SEQ ID NO: 19947 - protein, 9 aa, synthetic construct
PSPASAKLY

SEQ ID NO: 19948 - protein, 9 aa, synthetic construct
PSPASAKLF

SEQ ID NO: 19949 - protein, 9 aa, synthetic construct
PSPASAKVY

SEQ ID NO: 19950 - protein, 9 aa, synthetic construct
PSPASAKVR

SEQ ID NO: 19951 - protein, 9 aa, synthetic construct
PSPASAKVH

SEQ ID NO: 19952 - protein, 9 aa, synthetic construct
PSPASAKVF

SEQ ID NO: 19953 - protein, 9 aa, synthetic construct
PLNAVIKLF

SEQ ID NO: 19954 - protein, 9 aa, synthetic construct
PSPASIHLY

SEQ ID NO: 19955 - protein, 9 aa, synthetic construct
PSPASIHLR

SEQ ID NO: 19956 - protein, 9 aa, synthetic construct
PSPASIHLH

SEQ ID NO: 19957 - protein, 9 aa, synthetic construct
PSPASIHLF

SEQ ID NO: 19958 - protein, 9 aa, synthetic construct
PSPASIHVR

SEQ ID NO: 19959 - protein, 9 aa, synthetic construct
PSPASIHVH

SEQ ID NO: 19960 - protein, 9 aa, synthetic construct
PSPASIHVK

SEQ ID NO: 19961 - protein, 9 aa, synthetic construct
PLNAVIKVY

SEQ ID NO: 19962 - protein, 9 aa, synthetic construct
PSPASIRVY

SEQ ID NO: 19963 - protein, 9 aa, synthetic construct
PSPASIRVF

SEQ ID NO: 19964 - protein, 9 aa, synthetic construct
PSPASIKLK

SEQ ID NO: 19965 - protein, 9 aa, synthetic construct
PSPASIKLF

SEQ ID NO: 19966 - protein, 9 aa, synthetic construct
PSPASIKVH

SEQ ID NO: 19967 - protein, 9 aa, synthetic construct
PSPASGHLY

SEQ ID NO: 19968 - protein, 9 aa, synthetic construct
PSPASGHLK

SEQ ID NO: 19969 - protein, 9 aa, synthetic construct
PSPASGHVK

SEQ ID NO: 19970 - protein, 9 aa, synthetic construct
PSPASGRLY

SEQ ID NO: 19971 - protein, 9 aa, synthetic construct
PSPASGRLH

SEQ ID NO: 19972 - protein, 9 aa, synthetic construct
PSPASGRVF

SEQ ID NO: 19973 - protein, 9 aa, synthetic construct
PLNAVIKVF

SEQ ID NO: 19974 - protein, 9 aa, synthetic construct
PSPASGKLY

SEQ ID NO: 19975 - protein, 9 aa, synthetic construct
PSPASGKLH

SEQ ID NO: 19976 - protein, 9 aa, synthetic construct
PSPASGKLF

SEQ ID NO: 19977 - protein, 9 aa, synthetic construct
PSPASGKVY

SEQ ID NO: 19978 - protein, 9 aa, synthetic construct
PSPAVVHLY

SEQ ID NO: 19979 - protein, 9 aa, synthetic construct
PSPAVVHLR

SEQ ID NO: 19980 - protein, 9 aa, synthetic construct
PSPAVVHLH

SEQ ID NO: 19981 - protein, 9 aa, synthetic construct
PSPAVVHLK

SEQ ID NO: 19982 - protein, 9 aa, synthetic construct
PSPAVVHLF

SEQ ID NO: 19983 - protein, 9 aa, synthetic construct
PSPAVVHVY

SEQ ID NO: 19984 - protein, 9 aa, synthetic construct
PSPAVVHVR

SEQ ID NO: 19985 - protein, 9 aa, synthetic construct
PSPAVVHVK

SEQ ID NO: 19986 - protein, 9 aa, synthetic construct
PSPAVVHVF

SEQ ID NO: 19987 - protein, 9 aa, synthetic construct
PLNAVGHLR

SEQ ID NO: 19988 - protein, 9 aa, synthetic construct
PSPAVVRLF

SEQ ID NO: 19989 - protein, 9 aa, synthetic construct
PSPAVVRVY

SEQ ID NO: 19990 - protein, 9 aa, synthetic construct
PSPAVVRVF

SEQ ID NO: 19991 - protein, 9 aa, synthetic construct
PLNAVGHLH

SEQ ID NO: 19992 - protein, 9 aa, synthetic construct
PSPAVVKLY

SEQ ID NO: 19993 - protein, 9 aa, synthetic construct
PSPAVVKLR

SEQ ID NO: 19994 - protein, 9 aa, synthetic construct
PSPAVVKLH

SEQ ID NO: 19995 - protein, 9 aa, synthetic construct
PSPAVVKLK

SEQ ID NO: 19996 - protein, 9 aa, synthetic construct
PSPAVVKLF

SEQ ID NO: 19997 - protein, 9 aa, synthetic construct
PSPAVVKVH

SEQ ID NO: 19998 - protein, 9 aa, synthetic construct
PSPAVVKVK

SEQ ID NO: 19999 - protein, 9 aa, synthetic construct
PSPAVVKVF

SEQ ID NO: 20000 - protein, 9 aa, synthetic construct
PLNAVGHLK

SEQ ID NO: 20001 - protein, 9 aa, synthetic construct
PSPAVLRLF

SEQ ID NO: 20002 - protein, 9 aa, synthetic construct
PSPAVLRVK

SEQ ID NO: 20003 - protein, 9 aa, synthetic construct
PSPAVLKLF

SEQ ID NO: 20004 - protein, 9 aa, synthetic construct
PSPAVLKVY

SEQ ID NO: 20005 - protein, 9 aa, synthetic construct
PSPAVLKVH

SEQ ID NO: 20006 - protein, 9 aa, synthetic construct
PSPAVAHLR

SEQ ID NO: 20007 - protein, 9 aa, synthetic construct
PSPAVAHVK

SEQ ID NO: 20008 - protein, 9 aa, synthetic construct
PLNAVGHVH

SEQ ID NO: 20009 - protein, 9 aa, synthetic construct
PSPAVARLH

SEQ ID NO: 20010 - protein, 9 aa, synthetic construct
PLNAVGHVK

SEQ ID NO: 20011 - protein, 9 aa, synthetic construct
PSPAVAKLY

SEQ ID NO: 20012 - protein, 9 aa, synthetic construct
PSPAVAKLH

SEQ ID NO: 20013 - protein, 9 aa, synthetic construct
PSPAVAKVF

SEQ ID NO: 20014 - protein, 9 aa, synthetic construct
PSPAVIHLH

SEQ ID NO: 20015 - protein, 9 aa, synthetic construct
PSPAVIHLF

SEQ ID NO: 20016 - protein, 9 aa, synthetic construct
PSPAVIHVY

SEQ ID NO: 20017 - protein, 9 aa, synthetic construct
PSPAVIHVH

SEQ ID NO: 20018 - protein, 9 aa, synthetic construct
PSPAVIHVF

SEQ ID NO: 20019 - protein, 9 aa, synthetic construct
PLNAVGRLY

SEQ ID NO: 20020 - protein, 9 aa, synthetic construct
PSPAVIRLR

SEQ ID NO: 20021 - protein, 9 aa, synthetic construct
PSPAVIRVH

SEQ ID NO: 20022 - protein, 9 aa, synthetic construct
PSPAVIKLY

SEQ ID NO: 20023 - protein, 9 aa, synthetic construct
PSPAVIKLH

SEQ ID NO: 20024 - protein, 9 aa, synthetic construct
PSPAVIKLF

SEQ ID NO: 20025 - protein, 9 aa, synthetic construct
PSPAVIKVY

SEQ ID NO: 20026 - protein, 9 aa, synthetic construct
PSPAVIKVF

SEQ ID NO: 20027 - protein, 9 aa, synthetic construct
PLNAVGRLH

SEQ ID NO: 20028 - protein, 9 aa, synthetic construct
PSPAVGHLR

SEQ ID NO: 20029 - protein, 9 aa, synthetic construct
PSPAVGHLH

SEQ ID NO: 20030 - protein, 9 aa, synthetic construct
PSPAVGHVR

SEQ ID NO: 20031 - protein, 9 aa, synthetic construct
PSPAVGHVK

SEQ ID NO: 20032 - protein, 9 aa, synthetic construct
PSPAVGHVF

SEQ ID NO: 20033 - protein, 9 aa, synthetic construct
PSPAVGRLY

SEQ ID NO: 20034 - protein, 9 aa, synthetic construct
PSPAVGRLF

SEQ ID NO: 20035 - protein, 9 aa, synthetic construct
PSPAVGRVY

SEQ ID NO: 20036 - protein, 9 aa, synthetic construct
PSPAVGRVK

SEQ ID NO: 20037 - protein, 9 aa, synthetic construct
PSPAVGRVF

SEQ ID NO: 20038 - protein, 9 aa, synthetic construct
PLNAVGRLF

SEQ ID NO: 20039 - protein, 9 aa, synthetic construct
PSPAVGKVY

SEQ ID NO: 20040 - protein, 9 aa, synthetic construct
PSPAVGKVR

SEQ ID NO: 20041 - protein, 9 aa, synthetic construct
PSPAVGKVH

SEQ ID NO: 20042 - protein, 9 aa, synthetic construct
PSPAVGKVF

SEQ ID NO: 20043 - protein, 9 aa, synthetic construct
PSPAGVHLY

SEQ ID NO: 20044 - protein, 9 aa, synthetic construct
PSPAGVHVY

SEQ ID NO: 20045 - protein, 9 aa, synthetic construct
PSPAGVHVR

SEQ ID NO: 20046 - protein, 9 aa, synthetic construct
PSPAGVHVF

SEQ ID NO: 20047 - protein, 9 aa, synthetic construct
PSPAGVRLY

SEQ ID NO: 20048 - protein, 9 aa, synthetic construct
PSPAGVRLR

SEQ ID NO: 20049 - protein, 9 aa, synthetic construct
PSPAGVRLH

SEQ ID NO: 20050 - protein, 9 aa, synthetic construct
PSPAGVRVY

SEQ ID NO: 20051 - protein, 9 aa, synthetic construct
PSPAGVRVK

SEQ ID NO: 20052 - protein, 9 aa, synthetic construct
PSPAGVRVF

SEQ ID NO: 20053 - protein, 9 aa, synthetic construct
PLNAVGRVH

SEQ ID NO: 20054 - protein, 9 aa, synthetic construct
PSPAGVKLY

SEQ ID NO: 20055 - protein, 9 aa, synthetic construct
PSPAGVKLH

SEQ ID NO: 20056 - protein, 9 aa, synthetic construct
PSPAGVKVY

SEQ ID NO: 20057 - protein, 9 aa, synthetic construct
PSPAGVKVH

SEQ ID NO: 20058 - protein, 9 aa, synthetic construct
PSPAGVKVK

SEQ ID NO: 20059 - protein, 9 aa, synthetic construct
PSPAGVKVF

SEQ ID NO: 20060 - protein, 9 aa, synthetic construct
PSPAGLHVH

SEQ ID NO: 20061 - protein, 9 aa, synthetic construct
PSPAGLKVY

SEQ ID NO: 20062 - protein, 9 aa, synthetic construct
PSPAGLKVF

SEQ ID NO: 20063 - protein, 9 aa, synthetic construct
PLNAVGKLR

SEQ ID NO: 20064 - protein, 9 aa, synthetic construct
PSPAGAHLR

SEQ ID NO: 20065 - protein, 9 aa, synthetic construct
PSPAGAHLK

SEQ ID NO: 20066 - protein, 9 aa, synthetic construct
PSPAGAHLF

SEQ ID NO: 20067 - protein, 9 aa, synthetic construct
PSPAGAHVR

SEQ ID NO: 20068 - protein, 9 aa, synthetic construct
PSPAGAHVK

SEQ ID NO: 20069 - protein, 9 aa, synthetic construct
PSPAGAHVF

SEQ ID NO: 20070 - protein, 9 aa, synthetic construct
PSPAGARLY

SEQ ID NO: 20071 - protein, 9 aa, synthetic construct
PSPAGARVY

SEQ ID NO: 20072 - protein, 9 aa, synthetic construct
PSPAGARVF

SEQ ID NO: 20073 - protein, 9 aa, synthetic construct
PSPAGAKLF

SEQ ID NO: 20074 - protein, 9 aa, synthetic construct
PSPAGAKVY

SEQ ID NO: 20075 - protein, 9 aa, synthetic construct
PSPAGAKVH

SEQ ID NO: 20076 - protein, 9 aa, synthetic construct
PSPAGAKVF

SEQ ID NO: 20077 - protein, 9 aa, synthetic construct
PSPAGIHLR

SEQ ID NO: 20078 - protein, 9 aa, synthetic construct
PSPAGIHLH

SEQ ID NO: 20079 - protein, 9 aa, synthetic construct
PSPAGIHLK

SEQ ID NO: 20080 - protein, 9 aa, synthetic construct
PSPAGIHVH

SEQ ID NO: 20081 - protein, 9 aa, synthetic construct
PSPAGIHVF

SEQ ID NO: 20082 - protein, 9 aa, synthetic construct
PSPAGIRVH

SEQ ID NO: 20083 - protein, 9 aa, synthetic construct
PLNAVGKVR

SEQ ID NO: 20084 - protein, 9 aa, synthetic construct
PSPAGIKVY

SEQ ID NO: 20085 - protein, 9 aa, synthetic construct
PSPAGIKVF

SEQ ID NO: 20086 - protein, 9 aa, synthetic construct
PSPAGGHLR

SEQ ID NO: 20087 - protein, 9 aa, synthetic construct
PSPAGGHLH

SEQ ID NO: 20088 - protein, 9 aa, synthetic construct
PSPAGGHLK

SEQ ID NO: 20089 - protein, 9 aa, synthetic construct
PSPAGGHLF

SEQ ID NO: 20090 - protein, 9 aa, synthetic construct
PSPAGGHVY

SEQ ID NO: 20091 - protein, 9 aa, synthetic construct
PSPAGGHVR

SEQ ID NO: 20092 - protein, 9 aa, synthetic construct
PSPAGGHVF

SEQ ID NO: 20093 - protein, 9 aa, synthetic construct
PSPAGGRLY

SEQ ID NO: 20094 - protein, 9 aa, synthetic construct
PSPAGGRVY

SEQ ID NO: 20095 - protein, 9 aa, synthetic construct
PSPAGGRVR

SEQ ID NO: 20096 - protein, 9 aa, synthetic construct
PSPAGGRVH

SEQ ID NO: 20097 - protein, 9 aa, synthetic construct
PSPAGGRVF

SEQ ID NO: 20098 - protein, 9 aa, synthetic construct
PSPAGGKLY

SEQ ID NO: 20099 - protein, 9 aa, synthetic construct
PSPAGGKLF

SEQ ID NO: 20100 - protein, 9 aa, synthetic construct
PSPAGGKVY

SEQ ID NO: 20101 - protein, 9 aa, synthetic construct
PSPAGGKVK

SEQ ID NO: 20102 - protein, 9 aa, synthetic construct
PSPAGGKVF

SEQ ID NO: 20103 - protein, 9 aa, synthetic construct
PANGAVHVY

SEQ ID NO: 20104 - protein, 9 aa, synthetic construct
PANGAVHVR

SEQ ID NO: 20105 - protein, 9 aa, synthetic construct
PANGAVRLH

SEQ ID NO: 20106 - protein, 9 aa, synthetic construct
PANGAVRVF

SEQ ID NO: 20107 - protein, 9 aa, synthetic construct
PANGAVKVH

SEQ ID NO: 20108 - protein, 9 aa, synthetic construct
PANGAVKVK

SEQ ID NO: 20109 - protein, 9 aa, synthetic construct
PANGALHLH

SEQ ID NO: 20110 - protein, 9 aa, synthetic construct
PANGALHLF

SEQ ID NO: 20111 - protein, 9 aa, synthetic construct
PANGALHVK

SEQ ID NO: 20112 - protein, 9 aa, synthetic construct
PANGALRLY

SEQ ID NO: 20113 - protein, 9 aa, synthetic construct
PANGALRLH

SEQ ID NO: 20114 - protein, 9 aa, synthetic construct
PANGALRVR

SEQ ID NO: 20115 - protein, 9 aa, synthetic construct
PANGALRVK

SEQ ID NO: 20116 - protein, 9 aa, synthetic construct
PLNAGVHVY

SEQ ID NO: 20117 - protein, 9 aa, synthetic construct
PANGALKLY

SEQ ID NO: 20118 - protein, 9 aa, synthetic construct
PANGALKLR

SEQ ID NO: 20119 - protein, 9 aa, synthetic construct
PANGALKLF

SEQ ID NO: 20120 - protein, 9 aa, synthetic construct
PANGALKVR

SEQ ID NO: 20121 - protein, 9 aa, synthetic construct
PANGALKVF

SEQ ID NO: 20122 - protein, 9 aa, synthetic construct
PLNGAGRVR

SEQ ID NO: 20123 - protein, 9 aa, synthetic construct
PLNAGVRLY

SEQ ID NO: 20124 - protein, 9 aa, synthetic construct
PANGAIRVF

SEQ ID NO: 20125 - protein, 9 aa, synthetic construct
PLNAGVRLH

SEQ ID NO: 20126 - protein, 9 aa, synthetic construct
PANGAGHVY

SEQ ID NO: 20127 - protein, 9 aa, synthetic construct
PANGAGHVR

SEQ ID NO: 20128 - protein, 9 aa, synthetic construct
PANGAGHVK

SEQ ID NO: 20129 - protein, 9 aa, synthetic construct
PANGAGRLY

SEQ ID NO: 20130 - protein, 9 aa, synthetic construct
PANGAGRVK

SEQ ID NO: 20131 - protein, 9 aa, synthetic construct
PLNAGVRLF

SEQ ID NO: 20132 - protein, 9 aa, synthetic construct
PANGTVHVY

SEQ ID NO: 20133 - protein, 9 aa, synthetic construct
PANGTVHVR

SEQ ID NO: 20134 - protein, 9 aa, synthetic construct
PLNAGVRVR

SEQ ID NO: 20135 - protein, 9 aa, synthetic construct
PANGTVRVY

SEQ ID NO: 20136 - protein, 9 aa, synthetic construct
PANGTVRVF

SEQ ID NO: 20137 - protein, 9 aa, synthetic construct
PANGTVKLR

SEQ ID NO: 20138 - protein, 9 aa, synthetic construct
PANGTVKVH

SEQ ID NO: 20139 - protein, 9 aa, synthetic construct
PANGTVKVK

SEQ ID NO: 20140 - protein, 9 aa, synthetic construct
PANGTLHLY

SEQ ID NO: 20141 - protein, 9 aa, synthetic construct
PANGTLHVF

SEQ ID NO: 20142 - protein, 9 aa, synthetic construct
PANGTLRLY

SEQ ID NO: 20143 - protein, 9 aa, synthetic construct
PANGTLRLH

SEQ ID NO: 20144 - protein, 9 aa, synthetic construct
PANGTLRVF

SEQ ID NO: 20145 - protein, 9 aa, synthetic construct
PANGTLKLR

SEQ ID NO: 20146 - protein, 9 aa, synthetic construct
PANGTAKLF

SEQ ID NO: 20147 - protein, 9 aa, synthetic construct
PANGTIHLY

SEQ ID NO: 20148 - protein, 9 aa, synthetic construct
PLNAGVKVY

SEQ ID NO: 20149 - protein, 9 aa, synthetic construct
PANGTIRLF

SEQ ID NO: 20150 - protein, 9 aa, synthetic construct
PANGTIRVF

SEQ ID NO: 20151 - protein, 9 aa, synthetic construct
PANGTIKLK

SEQ ID NO: 20152 - protein, 9 aa, synthetic construct
PLNAGVKVH

SEQ ID NO: 20153 - protein, 9 aa, synthetic construct
PANGTGHVR

SEQ ID NO: 20154 - protein, 9 aa, synthetic construct
PLNAGVKVK

SEQ ID NO: 20155 - protein, 9 aa, synthetic construct
PANGTGRVH

SEQ ID NO: 20156 - protein, 9 aa, synthetic construct
PANGTGRVF

SEQ ID NO: 20157 - protein, 9 aa, synthetic construct
PLNAGVKVF

SEQ ID NO: 20158 - protein, 9 aa, synthetic construct
PLNGAGRVK

SEQ ID NO: 20159 - protein, 9 aa, synthetic construct
PANGSVRLY

SEQ ID NO: 20160 - protein, 9 aa, synthetic construct
PANGSVRVF

SEQ ID NO: 20161 - protein, 9 aa, synthetic construct
PANGSVKLH

SEQ ID NO: 20162 - protein, 9 aa, synthetic construct
PANGSLHLY

SEQ ID NO: 20163 - protein, 9 aa, synthetic construct
PANGSLHLH

SEQ ID NO: 20164 - protein, 9 aa, synthetic construct
PANGSLHVY

SEQ ID NO: 20165 - protein, 9 aa, synthetic construct
PANGSLHVH

SEQ ID NO: 20166 - protein, 9 aa, synthetic construct
PANGSLHVF

SEQ ID NO: 20167 - protein, 9 aa, synthetic construct
PANGSLRVY

SEQ ID NO: 20168 - protein, 9 aa, synthetic construct
PANGSLRVF

SEQ ID NO: 20169 - protein, 9 aa, synthetic construct
PANGSLKVY

SEQ ID NO: 20170 - protein, 9 aa, synthetic construct
PANGSARLH

SEQ ID NO: 20171 - protein, 9 aa, synthetic construct
PANGSARVF

SEQ ID NO: 20172 - protein, 9 aa, synthetic construct
PANGSAKLR

SEQ ID NO: 20173 - protein, 9 aa, synthetic construct
PANGSAKLH

SEQ ID NO: 20174 - protein, 9 aa, synthetic construct
PANGSAKLK

SEQ ID NO: 20175 - protein, 9 aa, synthetic construct
PANGSAKVH

SEQ ID NO: 20176 - protein, 9 aa, synthetic construct
PANGSIHVR

SEQ ID NO: 20177 - protein, 9 aa, synthetic construct
PANGSIRLK

SEQ ID NO: 20178 - protein, 9 aa, synthetic construct
PANGSIRLF

SEQ ID NO: 20179 - protein, 9 aa, synthetic construct
PANGSIRVR

SEQ ID NO: 20180 - protein, 9 aa, synthetic construct
PANGSIRVF

SEQ ID NO: 20181 - protein, 9 aa, synthetic construct
PANGSGHLK

SEQ ID NO: 20182 - protein, 9 aa, synthetic construct
PANGSGHLF

SEQ ID NO: 20183 - protein, 9 aa, synthetic construct
PANGSGHVY

SEQ ID NO: 20184 - protein, 9 aa, synthetic construct
PANGSGRLY

SEQ ID NO: 20185 - protein, 9 aa, synthetic construct
PANGSGRLR

SEQ ID NO: 20186 - protein, 9 aa, synthetic construct
PANGSGRLK

SEQ ID NO: 20187 - protein, 9 aa, synthetic construct
PANGSGRVH

SEQ ID NO: 20188 - protein, 9 aa, synthetic construct
PANGSGKLH

SEQ ID NO: 20189 - protein, 9 aa, synthetic construct
PANGSGKVR

SEQ ID NO: 20190 - protein, 9 aa, synthetic construct
PANGSGKVH

SEQ ID NO: 20191 - protein, 9 aa, synthetic construct
PLNAGLRVY

SEQ ID NO: 20192 - protein, 9 aa, synthetic construct
PANGVVHLY

SEQ ID NO: 20193 - protein, 9 aa, synthetic construct
PANGVVHLR

SEQ ID NO: 20194 - protein, 9 aa, synthetic construct
PANGVVHLH

SEQ ID NO: 20195 - protein, 9 aa, synthetic construct
PANGVVHLK

SEQ ID NO: 20196 - protein, 9 aa, synthetic construct
PANGVVHVR

SEQ ID NO: 20197 - protein, 9 aa, synthetic construct
PANGVVHVF

SEQ ID NO: 20198 - protein, 9 aa, synthetic construct
PANGVVRLY

SEQ ID NO: 20199 - protein, 9 aa, synthetic construct
PANGVVRLR

SEQ ID NO: 20200 - protein, 9 aa, synthetic construct
PANGVVRLH

SEQ ID NO: 20201 - protein, 9 aa, synthetic construct
PANGVVRLF

SEQ ID NO: 20202 - protein, 9 aa, synthetic construct
PANGVVRVR

SEQ ID NO: 20203 - protein, 9 aa, synthetic construct
PANGVVRVK

SEQ ID NO: 20204 - protein, 9 aa, synthetic construct
PLNAGLRVH

SEQ ID NO: 20205 - protein, 9 aa, synthetic construct
PANGVVKLY

SEQ ID NO: 20206 - protein, 9 aa, synthetic construct
PANGVVKLR

SEQ ID NO: 20207 - protein, 9 aa, synthetic construct
PANGVVKLH

SEQ ID NO: 20208 - protein, 9 aa, synthetic construct
PANGVVKVR

SEQ ID NO: 20209 - protein, 9 aa, synthetic construct
PANGVVKVH

SEQ ID NO: 20210 - protein, 9 aa, synthetic construct
PANGVLHLR

SEQ ID NO: 20211 - protein, 9 aa, synthetic construct
PANGVLHLH

SEQ ID NO: 20212 - protein, 9 aa, synthetic construct
PANGVLHVF

SEQ ID NO: 20213 - protein, 9 aa, synthetic construct
PLNAGLRVF

SEQ ID NO: 20214 - protein, 9 aa, synthetic construct
PANGVLRLH

SEQ ID NO: 20215 - protein, 9 aa, synthetic construct
PANGVLRLF

SEQ ID NO: 20216 - protein, 9 aa, synthetic construct
PANGVLRVY

SEQ ID NO: 20217 - protein, 9 aa, synthetic construct
PANGVLRVH

SEQ ID NO: 20218 - protein, 9 aa, synthetic construct
PANGVLRVK

SEQ ID NO: 20219 - protein, 9 aa, synthetic construct
PANGVLRVF

SEQ ID NO: 20220 - protein, 9 aa, synthetic construct
PANGVLKLY

SEQ ID NO: 20221 - protein, 9 aa, synthetic construct
PANGVLKLR

SEQ ID NO: 20222 - protein, 9 aa, synthetic construct
PANGVLKLF

SEQ ID NO: 20223 - protein, 9 aa, synthetic construct
PANGVLKVR

SEQ ID NO: 20224 - protein, 9 aa, synthetic construct
PANGVLKVF

SEQ ID NO: 20225 - protein, 9 aa, synthetic construct
PANGVAHLK

SEQ ID NO: 20226 - protein, 9 aa, synthetic construct
PANGVAHLF

SEQ ID NO: 20227 - protein, 9 aa, synthetic construct
PANGVAHVR

SEQ ID NO: 20228 - protein, 9 aa, synthetic construct
PANGVAHVF

SEQ ID NO: 20229 - protein, 9 aa, synthetic construct
PANGVARLH

SEQ ID NO: 20230 - protein, 9 aa, synthetic construct
PANGVARLF

SEQ ID NO: 20231 - protein, 9 aa, synthetic construct
PANGVARVY

SEQ ID NO: 20232 - protein, 9 aa, synthetic construct
PANGVARVH

SEQ ID NO: 20233 - protein, 9 aa, synthetic construct
PANGVARVF

SEQ ID NO: 20234 - protein, 9 aa, synthetic construct
PANGVAKLK

SEQ ID NO: 20235 - protein, 9 aa, synthetic construct
PANGVAKVY

SEQ ID NO: 20236 - protein, 9 aa, synthetic construct
PANGVAKVR

SEQ ID NO: 20237 - protein, 9 aa, synthetic construct
PANGVIHLF

SEQ ID NO: 20238 - protein, 9 aa, synthetic construct
PLNAGLKVY

SEQ ID NO: 20239 - protein, 9 aa, synthetic construct
PANGVIRLR

SEQ ID NO: 20240 - protein, 9 aa, synthetic construct
PANGVIRVY

SEQ ID NO: 20241 - protein, 9 aa, synthetic construct
PANGVIKLY

SEQ ID NO: 20242 - protein, 9 aa, synthetic construct
PANGVIKLF

SEQ ID NO: 20243 - protein, 9 aa, synthetic construct
PANGVIKVY

SEQ ID NO: 20244 - protein, 9 aa, synthetic construct
PANGVIKVH

SEQ ID NO: 20245 - protein, 9 aa, synthetic construct
PANGVGHVK

SEQ ID NO: 20246 - protein, 9 aa, synthetic construct
PANGVGHVF

SEQ ID NO: 20247 - protein, 9 aa, synthetic construct
PANGVGRLY

SEQ ID NO: 20248 - protein, 9 aa, synthetic construct
PANGVGRVR

SEQ ID NO: 20249 - protein, 9 aa, synthetic construct
PANGVGRVK

SEQ ID NO: 20250 - protein, 9 aa, synthetic construct
PANGVGKVR

SEQ ID NO: 20251 - protein, 9 aa, synthetic construct
PANGGVHLH

SEQ ID NO: 20252 - protein, 9 aa, synthetic construct
PANGGVHVY

SEQ ID NO: 20253 - protein, 9 aa, synthetic construct
PLNAGAHLR

SEQ ID NO: 20254 - protein, 9 aa, synthetic construct
PANGGVRVY

SEQ ID NO: 20255 - protein, 9 aa, synthetic construct
PANGGVRVK

SEQ ID NO: 20256 - protein, 9 aa, synthetic construct
PANGGVKLR

SEQ ID NO: 20257 - protein, 9 aa, synthetic construct
PANGGVKLH

SEQ ID NO: 20258 - protein, 9 aa, synthetic construct
PANGGVKLK

SEQ ID NO: 20259 - protein, 9 aa, synthetic construct
PANGGVKVH

SEQ ID NO: 20260 - protein, 9 aa, synthetic construct
PANGGVKVK

SEQ ID NO: 20261 - protein, 9 aa, synthetic construct
PANGGLHLK

SEQ ID NO: 20262 - protein, 9 aa, synthetic construct
PANGGLHLF

SEQ ID NO: 20263 - protein, 9 aa, synthetic construct
PLNAGAHLF

SEQ ID NO: 20264 - protein, 9 aa, synthetic construct
PANGGLKLH

SEQ ID NO: 20265 - protein, 9 aa, synthetic construct
PANGGLKVH

SEQ ID NO: 20266 - protein, 9 aa, synthetic construct
PANGGARLF

SEQ ID NO: 20267 - protein, 9 aa, synthetic construct
PANGGIHLR

SEQ ID NO: 20268 - protein, 9 aa, synthetic construct
PANGGIHLF

SEQ ID NO: 20269 - protein, 9 aa, synthetic construct
PLNAGARLY

SEQ ID NO: 20270 - protein, 9 aa, synthetic construct
PANGGIRLF

SEQ ID NO: 20271 - protein, 9 aa, synthetic construct
PANGGIKLY

SEQ ID NO: 20272 - protein, 9 aa, synthetic construct
PANGGIKLR

SEQ ID NO: 20273 - protein, 9 aa, synthetic construct
PANGGIKLF

SEQ ID NO: 20274 - protein, 9 aa, synthetic construct
PANGGIKVY

SEQ ID NO: 20275 - protein, 9 aa, synthetic construct
PANGGIKVK

SEQ ID NO: 20276 - protein, 9 aa, synthetic construct
PANGGIKVF

SEQ ID NO: 20277 - protein, 9 aa, synthetic construct
PANGGGHLR

SEQ ID NO: 20278 - protein, 9 aa, synthetic construct
PANGGGHVK

SEQ ID NO: 20279 - protein, 9 aa, synthetic construct
PANGGGHVF

SEQ ID NO: 20280 - protein, 9 aa, synthetic construct
PANGGGRLY

SEQ ID NO: 20281 - protein, 9 aa, synthetic construct
PANGGGRLF

SEQ ID NO: 20282 - protein, 9 aa, synthetic construct
PANGGGRVR

SEQ ID NO: 20283 - protein, 9 aa, synthetic construct
PANGGGRVH

SEQ ID NO: 20284 - protein, 9 aa, synthetic construct
PANGGGRVF

SEQ ID NO: 20285 - protein, 9 aa, synthetic construct
PLNAGARLF

SEQ ID NO: 20286 - protein, 9 aa, synthetic construct
PANGGGKVY

SEQ ID NO: 20287 - protein, 9 aa, synthetic construct
PANAAVHLY

SEQ ID NO: 20288 - protein, 9 aa, synthetic construct
PANAAVHLR

SEQ ID NO: 20289 - protein, 9 aa, synthetic construct
PANAAVHVF

SEQ ID NO: 20290 - protein, 9 aa, synthetic construct
PANAAVRLY

SEQ ID NO: 20291 - protein, 9 aa, synthetic construct
PANAAVRLH

SEQ ID NO: 20292 - protein, 9 aa, synthetic construct
PANAAVRVK

SEQ ID NO: 20293 - protein, 9 aa, synthetic construct
PANAAVRVF

SEQ ID NO: 20294 - protein, 9 aa, synthetic construct
PLNAGARVH

SEQ ID NO: 20295 - protein, 9 aa, synthetic construct
PANAAVKLY

SEQ ID NO: 20296 - protein, 9 aa, synthetic construct
PANAAVKLR

SEQ ID NO: 20297 - protein, 9 aa, synthetic construct
PANAAVKLK

SEQ ID NO: 20298 - protein, 9 aa, synthetic construct
PANAAVKVR

SEQ ID NO: 20299 - protein, 9 aa, synthetic construct
PANAALHLK

SEQ ID NO: 20300 - protein, 9 aa, synthetic construct
PANAALHVY

SEQ ID NO: 20301 - protein, 9 aa, synthetic construct
PANAALHVR

SEQ ID NO: 20302 - protein, 9 aa, synthetic construct
PANAALHVH

SEQ ID NO: 20303 - protein, 9 aa, synthetic construct
PANAALHVK

SEQ ID NO: 20304 - protein, 9 aa, synthetic construct
PANAALHVF

SEQ ID NO: 20305 - protein, 9 aa, synthetic construct
PLNAGARVF

SEQ ID NO: 20306 - protein, 9 aa, synthetic construct
PANAALRLH

SEQ ID NO: 20307 - protein, 9 aa, synthetic construct
PANAALRVH

SEQ ID NO: 20308 - protein, 9 aa, synthetic construct
PANAALKLH

SEQ ID NO: 20309 - protein, 9 aa, synthetic construct
PANAALKLF

SEQ ID NO: 20310 - protein, 9 aa, synthetic construct
PANAALKVY

SEQ ID NO: 20311 - protein, 9 aa, synthetic construct
PANAALKVK

SEQ ID NO: 20312 - protein, 9 aa, synthetic construct
PANAAAHLR

SEQ ID NO: 20313 - protein, 9 aa, synthetic construct
PANAAAHLK

SEQ ID NO: 20314 - protein, 9 aa, synthetic construct
PANAAAHLF

SEQ ID NO: 20315 - protein, 9 aa, synthetic construct
PANAAAHVR

SEQ ID NO: 20316 - protein, 9 aa, synthetic construct
PANAAARLY

SEQ ID NO: 20317 - protein, 9 aa, synthetic construct
PANAAARLH

SEQ ID NO: 20318 - protein, 9 aa, synthetic construct
PANAAARVY

SEQ ID NO: 20319 - protein, 9 aa, synthetic construct
PANAAARVR

SEQ ID NO: 20320 - protein, 9 aa, synthetic construct
PANAAAKVY

SEQ ID NO: 20321 - protein, 9 aa, synthetic construct
PANAAAKVH

SEQ ID NO: 20322 - protein, 9 aa, synthetic construct
PANAAIHLY

SEQ ID NO: 20323 - protein, 9 aa, synthetic construct
PANAAIHLR

SEQ ID NO: 20324 - protein, 9 aa, synthetic construct
PANAAIHLH

SEQ ID NO: 20325 - protein, 9 aa, synthetic construct
PANAAIHLF

SEQ ID NO: 20326 - protein, 9 aa, synthetic construct
PANAAIHVY

SEQ ID NO: 20327 - protein, 9 aa, synthetic construct
PANAAIHVR

SEQ ID NO: 20328 - protein, 9 aa, synthetic construct
PLNAGAKVY

SEQ ID NO: 20329 - protein, 9 aa, synthetic construct
PANAAIRLH

SEQ ID NO: 20330 - protein, 9 aa, synthetic construct
PANAAIRLF

SEQ ID NO: 20331 - protein, 9 aa, synthetic construct
PANAAIKLK

SEQ ID NO: 20332 - protein, 9 aa, synthetic construct
PANAAIKLF

SEQ ID NO: 20333 - protein, 9 aa, synthetic construct
PANAAIKVR

SEQ ID NO: 20334 - protein, 9 aa, synthetic construct
PANAAGHVR

SEQ ID NO: 20335 - protein, 9 aa, synthetic construct
PANAAGRLR

SEQ ID NO: 20336 - protein, 9 aa, synthetic construct
PANAAGRLK

SEQ ID NO: 20337 - protein, 9 aa, synthetic construct
PANAAGRVR

SEQ ID NO: 20338 - protein, 9 aa, synthetic construct
PANAAGRVK

SEQ ID NO: 20339 - protein, 9 aa, synthetic construct
PANAAGKLY

SEQ ID NO: 20340 - protein, 9 aa, synthetic construct
PANAAGKVK

SEQ ID NO: 20341 - protein, 9 aa, synthetic construct
PANATVHLR

SEQ ID NO: 20342 - protein, 9 aa, synthetic construct
PANATVHVR

SEQ ID NO: 20343 - protein, 9 aa, synthetic construct
PANATVHVF

SEQ ID NO: 20344 - protein, 9 aa, synthetic construct
PLNAGIHLR

SEQ ID NO: 20345 - protein, 9 aa, synthetic construct
PANATVRLY

SEQ ID NO: 20346 - protein, 9 aa, synthetic construct
PANATVRLH

SEQ ID NO: 20347 - protein, 9 aa, synthetic construct
PANATVRVF

SEQ ID NO: 20348 - protein, 9 aa, synthetic construct
PLNAGIHLH

SEQ ID NO: 20349 - protein, 9 aa, synthetic construct
PANATVKLR

SEQ ID NO: 20350 - protein, 9 aa, synthetic construct
PANATVKVK

SEQ ID NO: 20351 - protein, 9 aa, synthetic construct
PANATLHLY

SEQ ID NO: 20352 - protein, 9 aa, synthetic construct
PANATLHLR

SEQ ID NO: 20353 - protein, 9 aa, synthetic construct
PANATLHLK

SEQ ID NO: 20354 - protein, 9 aa, synthetic construct
PANATLHVH

SEQ ID NO: 20355 - protein, 9 aa, synthetic construct
PANATLHVK

SEQ ID NO: 20356 - protein, 9 aa, synthetic construct
PLNAGIHLF

SEQ ID NO: 20357 - protein, 9 aa, synthetic construct
PLNAGIHVY

SEQ ID NO: 20358 - protein, 9 aa, synthetic construct
PANATLKLF

SEQ ID NO: 20359 - protein, 9 aa, synthetic construct
PANATAHVR

SEQ ID NO: 20360 - protein, 9 aa, synthetic construct
PANATARVR

SEQ ID NO: 20361 - protein, 9 aa, synthetic construct
PANATARVH

SEQ ID NO: 20362 - protein, 9 aa, synthetic construct
PANATAKLR

SEQ ID NO: 20363 - protein, 9 aa, synthetic construct
PANATAKLK

SEQ ID NO: 20364 - protein, 9 aa, synthetic construct
PLNAGIHVF

SEQ ID NO: 20365 - protein, 9 aa, synthetic construct
PANATIHLY

SEQ ID NO: 20366 - protein, 9 aa, synthetic construct
PANATIHLR

SEQ ID NO: 20367 - protein, 9 aa, synthetic construct
PANATIHVY

SEQ ID NO: 20368 - protein, 9 aa, synthetic construct
PANATIHVF

SEQ ID NO: 20369 - protein, 9 aa, synthetic construct
PLNAGIRLY

SEQ ID NO: 20370 - protein, 9 aa, synthetic construct
PANATIRLY

SEQ ID NO: 20371 - protein, 9 aa, synthetic construct
PANATIRLF

SEQ ID NO: 20372 - protein, 9 aa, synthetic construct
PANATIRVF

SEQ ID NO: 20373 - protein, 9 aa, synthetic construct
PANATIKLK

SEQ ID NO: 20374 - protein, 9 aa, synthetic construct
PANATIKLF

SEQ ID NO: 20375 - protein, 9 aa, synthetic construct
PANATIKVF

SEQ ID NO: 20376 - protein, 9 aa, synthetic construct
PANATGHVY

SEQ ID NO: 20377 - protein, 9 aa, synthetic construct
PANATGHVR

SEQ ID NO: 20378 - protein, 9 aa, synthetic construct
PANATGRLR

SEQ ID NO: 20379 - protein, 9 aa, synthetic construct
PANATGRLF

SEQ ID NO: 20380 - protein, 9 aa, synthetic construct
PANATGRVY

SEQ ID NO: 20381 - protein, 9 aa, synthetic construct
PANASVHLY

SEQ ID NO: 20382 - protein, 9 aa, synthetic construct
PANASVHLR

SEQ ID NO: 20383 - protein, 9 aa, synthetic construct
PANASVRVF

SEQ ID NO: 20384 - protein, 9 aa, synthetic construct
PLNAGIRVH

SEQ ID NO: 20385 - protein, 9 aa, synthetic construct
PANASVKVY

SEQ ID NO: 20386 - protein, 9 aa, synthetic construct
PANASVKVR

SEQ ID NO: 20387 - protein, 9 aa, synthetic construct
PANASLHVR

SEQ ID NO: 20388 - protein, 9 aa, synthetic construct
PANASLRVF

SEQ ID NO: 20389 - protein, 9 aa, synthetic construct
PANASLKLH

SEQ ID NO: 20390 - protein, 9 aa, synthetic construct
PANASLKVY

SEQ ID NO: 20391 - protein, 9 aa, synthetic construct
PANASLKVH

SEQ ID NO: 20392 - protein, 9 aa, synthetic construct
PANASAHLR

SEQ ID NO: 20393 - protein, 9 aa, synthetic construct
PANASAHVR

SEQ ID NO: 20394 - protein, 9 aa, synthetic construct
PANASARLY

SEQ ID NO: 20395 - protein, 9 aa, synthetic construct
PANASARLF

SEQ ID NO: 20396 - protein, 9 aa, synthetic construct
PANASARVH

SEQ ID NO: 20397 - protein, 9 aa, synthetic construct
PANASAKLR

SEQ ID NO: 20398 - protein, 9 aa, synthetic construct
PANASAKVY

SEQ ID NO: 20399 - protein, 9 aa, synthetic construct
PANASAKVH

SEQ ID NO: 20400 - protein, 9 aa, synthetic construct
PLNAGIKLF

SEQ ID NO: 20401 - protein, 9 aa, synthetic construct
PANASIHLY

SEQ ID NO: 20402 - protein, 9 aa, synthetic construct
PANASIHLH

SEQ ID NO: 20403 - protein, 9 aa, synthetic construct
PANASIHVR

SEQ ID NO: 20404 - protein, 9 aa, synthetic construct
PANASIHVK

SEQ ID NO: 20405 - protein, 9 aa, synthetic construct
PANASIRLK

SEQ ID NO: 20406 - protein, 9 aa, synthetic construct
PANASIRVF

SEQ ID NO: 20407 - protein, 9 aa, synthetic construct
PANASIKLK

SEQ ID NO: 20408 - protein, 9 aa, synthetic construct
PANASIKVF

SEQ ID NO: 20409 - protein, 9 aa, synthetic construct
PLNAGIKVH

SEQ ID NO: 20410 - protein, 9 aa, synthetic construct
PANASGHLR

SEQ ID NO: 20411 - protein, 9 aa, synthetic construct
PANASGHLK

SEQ ID NO: 20412 - protein, 9 aa, synthetic construct
PANASGRLR

SEQ ID NO: 20413 - protein, 9 aa, synthetic construct
PANASGRLH

SEQ ID NO: 20414 - protein, 9 aa, synthetic construct
PANASGKVY

SEQ ID NO: 20415 - protein, 9 aa, synthetic construct
PANASGKVH

SEQ ID NO: 20416 - protein, 9 aa, synthetic construct
PANAVVHLR

SEQ ID NO: 20417 - protein, 9 aa, synthetic construct
PANAVVHLK

SEQ ID NO: 20418 - protein, 9 aa, synthetic construct
PANAVVHLF

SEQ ID NO: 20419 - protein, 9 aa, synthetic construct
PANAVVHVY

SEQ ID NO: 20420 - protein, 9 aa, synthetic construct
PANAVVHVK

SEQ ID NO: 20421 - protein, 9 aa, synthetic construct
PANAVVHVF

SEQ ID NO: 20422 - protein, 9 aa, synthetic construct
PANAVVRLY

SEQ ID NO: 20423 - protein, 9 aa, synthetic construct
PANAVVRLF

SEQ ID NO: 20424 - protein, 9 aa, synthetic construct
PANAVVRVY

SEQ ID NO: 20425 - protein, 9 aa, synthetic construct
PANAVVRVH

SEQ ID NO: 20426 - protein, 9 aa, synthetic construct
PANAVVKLY

SEQ ID NO: 20427 - protein, 9 aa, synthetic construct
PANAVVKLR

SEQ ID NO: 20428 - protein, 9 aa, synthetic construct
PANAVVKVY

SEQ ID NO: 20429 - protein, 9 aa, synthetic construct
PANAVVKVH

SEQ ID NO: 20430 - protein, 9 aa, synthetic construct
PANAVVKVK

SEQ ID NO: 20431 - protein, 9 aa, synthetic construct
PANAVLHLH

SEQ ID NO: 20432 - protein, 9 aa, synthetic construct
PANAVLRLH

SEQ ID NO: 20433 - protein, 9 aa, synthetic construct
PANAVLRVY

SEQ ID NO: 20434 - protein, 9 aa, synthetic construct
PANAVLKLY

SEQ ID NO: 20435 - protein, 9 aa, synthetic construct
PANAVLKLR

SEQ ID NO: 20436 - protein, 9 aa, synthetic construct
PANAVLKLF

SEQ ID NO: 20437 - protein, 9 aa, synthetic construct
PANAVAHLR

SEQ ID NO: 20438 - protein, 9 aa, synthetic construct
PANAVAHLK

SEQ ID NO: 20439 - protein, 9 aa, synthetic construct
PANAVAHVR

SEQ ID NO: 20440 - protein, 9 aa, synthetic construct
PANAVARLH

SEQ ID NO: 20441 - protein, 9 aa, synthetic construct
PANAVAKLK

SEQ ID NO: 20442 - protein, 9 aa, synthetic construct
PANAVAKVR

SEQ ID NO: 20443 - protein, 9 aa, synthetic construct
PANAVAKVH

SEQ ID NO: 20444 - protein, 9 aa, synthetic construct
PANAVAKVK

SEQ ID NO: 20445 - protein, 9 aa, synthetic construct
PANAVIHLR

SEQ ID NO: 20446 - protein, 9 aa, synthetic construct
PANAVIHLF

SEQ ID NO: 20447 - protein, 9 aa, synthetic construct
PANAVIRLR

SEQ ID NO: 20448 - protein, 9 aa, synthetic construct
PANAVIRLF

SEQ ID NO: 20449 - protein, 9 aa, synthetic construct
PANAVIRVY

SEQ ID NO: 20450 - protein, 9 aa, synthetic construct
PANAVIRVH

SEQ ID NO: 20451 - protein, 9 aa, synthetic construct
PANAVIRVF

SEQ ID NO: 20452 - protein, 9 aa, synthetic construct
PANAVIKLY

SEQ ID NO: 20453 - protein, 9 aa, synthetic construct
PANAVIKLF

SEQ ID NO: 20454 - protein, 9 aa, synthetic construct
PANAVIKVY

SEQ ID NO: 20455 - protein, 9 aa, synthetic construct
PLNAGGRLH

SEQ ID NO: 20456 - protein, 9 aa, synthetic construct
PANAVGHLK

SEQ ID NO: 20457 - protein, 9 aa, synthetic construct
PANAVGHLF

SEQ ID NO: 20458 - protein, 9 aa, synthetic construct
PANAVGRLY

SEQ ID NO: 20459 - protein, 9 aa, synthetic construct
PANAVGRLF

SEQ ID NO: 20460 - protein, 9 aa, synthetic construct
PANAVGRVF

SEQ ID NO: 20461 - protein, 9 aa, synthetic construct
PANAVGKLR

SEQ ID NO: 20462 - protein, 9 aa, synthetic construct
PLNAGGRVY

SEQ ID NO: 20463 - protein, 9 aa, synthetic construct
PANAGVHLF

SEQ ID NO: 20464 - protein, 9 aa, synthetic construct
PANAGVHVR

SEQ ID NO: 20465 - protein, 9 aa, synthetic construct
PANAGVHVK

SEQ ID NO: 20466 - protein, 9 aa, synthetic construct
PANAGVHVF

SEQ ID NO: 20467 - protein, 9 aa, synthetic construct
PLNAGGRVR

SEQ ID NO: 20468 - protein, 9 aa, synthetic construct
PANAGVRLY

SEQ ID NO: 20469 - protein, 9 aa, synthetic construct
PANAGVRLF

SEQ ID NO: 20470 - protein, 9 aa, synthetic construct
PANAGVRVR

SEQ ID NO: 20471 - protein, 9 aa, synthetic construct
PANAGVRVK

SEQ ID NO: 20472 - protein, 9 aa, synthetic construct
PANAGVRVF

SEQ ID NO: 20473 - protein, 9 aa, synthetic construct
PANAGVKLH

SEQ ID NO: 20474 - protein, 9 aa, synthetic construct
PANAGVKVH

SEQ ID NO: 20475 - protein, 9 aa, synthetic construct
PANAGVKVK

SEQ ID NO: 20476 - protein, 9 aa, synthetic construct
PANAGLHVK

SEQ ID NO: 20477 - protein, 9 aa, synthetic construct
PANAGLRVH

SEQ ID NO: 20478 - protein, 9 aa, synthetic construct
PLNAGGKLY

SEQ ID NO: 20479 - protein, 9 aa, synthetic construct
PANAGAHLR

SEQ ID NO: 20480 - protein, 9 aa, synthetic construct
PANAGAHVR

SEQ ID NO: 20481 - protein, 9 aa, synthetic construct
PANAGARLH

SEQ ID NO: 20482 - protein, 9 aa, synthetic construct
PANAGARLF

SEQ ID NO: 20483 - protein, 9 aa, synthetic construct
PANAGARVR

SEQ ID NO: 20484 - protein, 9 aa, synthetic construct
PANAGARVH

SEQ ID NO: 20485 - protein, 9 aa, synthetic construct
PANAGARVK

SEQ ID NO: 20486 - protein, 9 aa, synthetic construct
PANAGIHLY

SEQ ID NO: 20487 - protein, 9 aa, synthetic construct
PANAGIHLR

SEQ ID NO: 20488 - protein, 9 aa, synthetic construct
PANAGIHLF

SEQ ID NO: 20489 - protein, 9 aa, synthetic construct
PANAGIHVY

SEQ ID NO: 20490 - protein, 9 aa, synthetic construct
PANAGIHVR

SEQ ID NO: 20491 - protein, 9 aa, synthetic construct
PANAGIHVF

SEQ ID NO: 20492 - protein, 9 aa, synthetic construct
PLNAGGKVY

SEQ ID NO: 20493 - protein, 9 aa, synthetic construct
PANAGIKLK

SEQ ID NO: 20494 - protein, 9 aa, synthetic construct
PANAGIKLF

SEQ ID NO: 20495 - protein, 9 aa, synthetic construct
PANAGIKVY

SEQ ID NO: 20496 - protein, 9 aa, synthetic construct
PANAGGHLR

SEQ ID NO: 20497 - protein, 9 aa, synthetic construct
PANAGGHVF

SEQ ID NO: 20498 - protein, 9 aa, synthetic construct
PLNAGGKVK

SEQ ID NO: 20499 - protein, 9 aa, synthetic construct
PANAGGRLY

SEQ ID NO: 20500 - protein, 9 aa, synthetic construct
PANAGGRLR

SEQ ID NO: 20501 - protein, 9 aa, synthetic construct
PANAGGRVY

SEQ ID NO: 20502 - protein, 9 aa, synthetic construct
PANAGGRVR

SEQ ID NO: 20503 - protein, 9 aa, synthetic construct
PANAGGKLH

SEQ ID NO: 20504 - protein, 9 aa, synthetic construct
PANAGGKVK

SEQ ID NO: 20505 - protein, 9 aa, synthetic construct
PAQGAVHLY

SEQ ID NO: 20506 - protein, 9 aa, synthetic construct
PAQGAVHLR

SEQ ID NO: 20507 - protein, 9 aa, synthetic construct
PAQGAVHLH

SEQ ID NO: 20508 - protein, 9 aa, synthetic construct
PAQGAVHLK

SEQ ID NO: 20509 - protein, 9 aa, synthetic construct
PAQGAVHVR

SEQ ID NO: 20510 - protein, 9 aa, synthetic construct
PAQGAVHVK

SEQ ID NO: 20511 - protein, 9 aa, synthetic construct
PAQGAVHVF

SEQ ID NO: 20512 - protein, 9 aa, synthetic construct
PLQGAVHLR

SEQ ID NO: 20513 - protein, 9 aa, synthetic construct
PAQGAVRLY

SEQ ID NO: 20514 - protein, 9 aa, synthetic construct
PAQGAVRLF

SEQ ID NO: 20515 - protein, 9 aa, synthetic construct
PAQGAVRVH

SEQ ID NO: 20516 - protein, 9 aa, synthetic construct
PAQGAVRVF

SEQ ID NO: 20517 - protein, 9 aa, synthetic construct
PAQGAVKLR

SEQ ID NO: 20518 - protein, 9 aa, synthetic construct
PAQGAVKLH

SEQ ID NO: 20519 - protein, 9 aa, synthetic construct
PAQGAVKVY

SEQ ID NO: 20520 - protein, 9 aa, synthetic construct
PAQGAVKVH

SEQ ID NO: 20521 - protein, 9 aa, synthetic construct
PAQGAVKVK

SEQ ID NO: 20522 - protein, 9 aa, synthetic construct
PAQGAVKVF

SEQ ID NO: 20523 - protein, 9 aa, synthetic construct
PAQGALHLY

SEQ ID NO: 20524 - protein, 9 aa, synthetic construct
PAQGALHLR

SEQ ID NO: 20525 - protein, 9 aa, synthetic construct
PAQGALHLK

SEQ ID NO: 20526 - protein, 9 aa, synthetic construct
PAQGALHVR

SEQ ID NO: 20527 - protein, 9 aa, synthetic construct
PLQGAVHLF

SEQ ID NO: 20528 - protein, 9 aa, synthetic construct
PAQGALRLY

SEQ ID NO: 20529 - protein, 9 aa, synthetic construct
PAQGALRVH

SEQ ID NO: 20530 - protein, 9 aa, synthetic construct
PAQGALRVK

SEQ ID NO: 20531 - protein, 9 aa, synthetic construct
PAQGALRVF

SEQ ID NO: 20532 - protein, 9 aa, synthetic construct
PAQGALKLY

SEQ ID NO: 20533 - protein, 9 aa, synthetic construct
PAQGALKLR

SEQ ID NO: 20534 - protein, 9 aa, synthetic construct
PAQGALKLH

SEQ ID NO: 20535 - protein, 9 aa, synthetic construct
PAQGALKLF

SEQ ID NO: 20536 - protein, 9 aa, synthetic construct
PAQGALKVH

SEQ ID NO: 20537 - protein, 9 aa, synthetic construct
PLQGAVHVR

SEQ ID NO: 20538 - protein, 9 aa, synthetic construct
PAQGAAHLY

SEQ ID NO: 20539 - protein, 9 aa, synthetic construct
PAQGAAHLR

SEQ ID NO: 20540 - protein, 9 aa, synthetic construct
PAQGAAHLH

SEQ ID NO: 20541 - protein, 9 aa, synthetic construct
PAQGAAHLF

SEQ ID NO: 20542 - protein, 9 aa, synthetic construct
PAQGAAHVR

SEQ ID NO: 20543 - protein, 9 aa, synthetic construct
PLQGAVHVH

SEQ ID NO: 20544 - protein, 9 aa, synthetic construct
PAQGAARLY

SEQ ID NO: 20545 - protein, 9 aa, synthetic construct
PAQGAARLH

SEQ ID NO: 20546 - protein, 9 aa, synthetic construct
PAQGAARLF

SEQ ID NO: 20547 - protein, 9 aa, synthetic construct
PAQGAARVR

SEQ ID NO: 20548 - protein, 9 aa, synthetic construct
PLQGAVHVK

SEQ ID NO: 20549 - protein, 9 aa, synthetic construct
PAQGAAKLY

SEQ ID NO: 20550 - protein, 9 aa, synthetic construct
PAQGAAKVY

SEQ ID NO: 20551 - protein, 9 aa, synthetic construct
PLQGAVHVF

SEQ ID NO: 20552 - protein, 9 aa, synthetic construct
PAQGAIHLY

SEQ ID NO: 20553 - protein, 9 aa, synthetic construct
PAQGAIHLR

SEQ ID NO: 20554 - protein, 9 aa, synthetic construct
PAQGAIHLH

SEQ ID NO: 20555 - protein, 9 aa, synthetic construct
PLQGAVRLY

SEQ ID NO: 20556 - protein, 9 aa, synthetic construct
PAQGAIRLH

SEQ ID NO: 20557 - protein, 9 aa, synthetic construct
PAQGAIRLF

SEQ ID NO: 20558 - protein, 9 aa, synthetic construct
PAQGAIRVF

SEQ ID NO: 20559 - protein, 9 aa, synthetic construct
PAQGAIKLH

SEQ ID NO: 20560 - protein, 9 aa, synthetic construct
PAQGAIKLK

SEQ ID NO: 20561 - protein, 9 aa, synthetic construct
PAQGAIKLF

SEQ ID NO: 20562 - protein, 9 aa, synthetic construct
PAQGAIKVY

SEQ ID NO: 20563 - protein, 9 aa, synthetic construct
PAQGAIKVR

SEQ ID NO: 20564 - protein, 9 aa, synthetic construct
PAQGAIKVH

SEQ ID NO: 20565 - protein, 9 aa, synthetic construct
PAQGAIKVK

SEQ ID NO: 20566 - protein, 9 aa, synthetic construct
PAQGAIKVF

SEQ ID NO: 20567 - protein, 9 aa, synthetic construct
PLQGAVRLH

SEQ ID NO: 20568 - protein, 9 aa, synthetic construct
PAQGAGHLY

SEQ ID NO: 20569 - protein, 9 aa, synthetic construct
PAQGAGHLK

SEQ ID NO: 20570 - protein, 9 aa, synthetic construct
PAQGAGHLF

SEQ ID NO: 20571 - protein, 9 aa, synthetic construct
PAQGAGHVY

SEQ ID NO: 20572 - protein, 9 aa, synthetic construct
PAQGAGHVR

SEQ ID NO: 20573 - protein, 9 aa, synthetic construct
PAQGAGHVK

SEQ ID NO: 20574 - protein, 9 aa, synthetic construct
PAQGAGHVF

SEQ ID NO: 20575 - protein, 9 aa, synthetic construct
PAQGAGRLY

SEQ ID NO: 20576 - protein, 9 aa, synthetic construct
PAQGAGRLH

SEQ ID NO: 20577 - protein, 9 aa, synthetic construct
PAQGAGRVH

SEQ ID NO: 20578 - protein, 9 aa, synthetic construct
PAQGAGRVK

SEQ ID NO: 20579 - protein, 9 aa, synthetic construct
PAQGAGRVF

SEQ ID NO: 20580 - protein, 9 aa, synthetic construct
PLQGAVRLF

SEQ ID NO: 20581 - protein, 9 aa, synthetic construct
PAQGAGKLY

SEQ ID NO: 20582 - protein, 9 aa, synthetic construct
PAQGAGKLH

SEQ ID NO: 20583 - protein, 9 aa, synthetic construct
PAQGAGKLF

SEQ ID NO: 20584 - protein, 9 aa, synthetic construct
PAQGAGKVY

SEQ ID NO: 20585 - protein, 9 aa, synthetic construct
PAQGAGKVH

SEQ ID NO: 20586 - protein, 9 aa, synthetic construct
PLQGAVRVY

SEQ ID NO: 20587 - protein, 9 aa, synthetic construct
PAQGTVHLK

SEQ ID NO: 20588 - protein, 9 aa, synthetic construct
PAQGTVRVY

SEQ ID NO: 20589 - protein, 9 aa, synthetic construct
PAQGTVRVH

SEQ ID NO: 20590 - protein, 9 aa, synthetic construct
PAQGTVRVF

SEQ ID NO: 20591 - protein, 9 aa, synthetic construct
PLQGAVRVH

SEQ ID NO: 20592 - protein, 9 aa, synthetic construct
PAQGTVKLH

SEQ ID NO: 20593 - protein, 9 aa, synthetic construct
PAQGTLHLR

SEQ ID NO: 20594 - protein, 9 aa, synthetic construct
PAQGTLHLK

SEQ ID NO: 20595 - protein, 9 aa, synthetic construct
PAQGTLHVY

SEQ ID NO: 20596 - protein, 9 aa, synthetic construct
PAQGTLHVK

SEQ ID NO: 20597 - protein, 9 aa, synthetic construct
PAQGTLHVF

SEQ ID NO: 20598 - protein, 9 aa, synthetic construct
PAQGTLRLY

SEQ ID NO: 20599 - protein, 9 aa, synthetic construct
PAQGTLKLF

SEQ ID NO: 20600 - protein, 9 aa, synthetic construct
PAQGTLKVH

SEQ ID NO: 20601 - protein, 9 aa, synthetic construct
PAQGTLKVF

SEQ ID NO: 20602 - protein, 9 aa, synthetic construct
PLQGAVKLH

SEQ ID NO: 20603 - protein, 9 aa, synthetic construct
PAQGTARLF

SEQ ID NO: 20604 - protein, 9 aa, synthetic construct
PAQGTAKVY

SEQ ID NO: 20605 - protein, 9 aa, synthetic construct
PLQGAVKLF

SEQ ID NO: 20606 - protein, 9 aa, synthetic construct
PAQGTIHLY

SEQ ID NO: 20607 - protein, 9 aa, synthetic construct
PAQGTIHLR

SEQ ID NO: 20608 - protein, 9 aa, synthetic construct
PAQGTIHVY

SEQ ID NO: 20609 - protein, 9 aa, synthetic construct
PAQGTIHVH

SEQ ID NO: 20610 - protein, 9 aa, synthetic construct
PAQGTIHVF

SEQ ID NO: 20611 - protein, 9 aa, synthetic construct
PLQGAVKVY

SEQ ID NO: 20612 - protein, 9 aa, synthetic construct
PAQGTIRLH

SEQ ID NO: 20613 - protein, 9 aa, synthetic construct
PAQGTIRVH

SEQ ID NO: 20614 - protein, 9 aa, synthetic construct
PAQGTIKLY

SEQ ID NO: 20615 - protein, 9 aa, synthetic construct
PAQGTIKLH

SEQ ID NO: 20616 - protein, 9 aa, synthetic construct
PAQGTIKLF

SEQ ID NO: 20617 - protein, 9 aa, synthetic construct
PAQGTIKVH

SEQ ID NO: 20618 - protein, 9 aa, synthetic construct
PLQGAVKVH

SEQ ID NO: 20619 - protein, 9 aa, synthetic construct
PAQGTGHLF

SEQ ID NO: 20620 - protein, 9 aa, synthetic construct
PAQGTGRLY

SEQ ID NO: 20621 - protein, 9 aa, synthetic construct
PAQGTGRVH

SEQ ID NO: 20622 - protein, 9 aa, synthetic construct
PLQGAVKVF

SEQ ID NO: 20623 - protein, 9 aa, synthetic construct
PAQGTGKVY

SEQ ID NO: 20624 - protein, 9 aa, synthetic construct
PLQGALHLY

SEQ ID NO: 20625 - protein, 9 aa, synthetic construct
PAQGSVHLK

SEQ ID NO: 20626 - protein, 9 aa, synthetic construct
PAQGSVRLR

SEQ ID NO: 20627 - protein, 9 aa, synthetic construct
PAQGSVRLH

SEQ ID NO: 20628 - protein, 9 aa, synthetic construct
PAQGSVRLK

SEQ ID NO: 20629 - protein, 9 aa, synthetic construct
PAQGSVRVH

SEQ ID NO: 20630 - protein, 9 aa, synthetic construct
PLQGALHLH

SEQ ID NO: 20631 - protein, 9 aa, synthetic construct
PAQGSVKLK

SEQ ID NO: 20632 - protein, 9 aa, synthetic construct
PLQGALHLK

SEQ ID NO: 20633 - protein, 9 aa, synthetic construct
PAQGSLHLK

SEQ ID NO: 20634 - protein, 9 aa, synthetic construct
PAQGSLHVH

SEQ ID NO: 20635 - protein, 9 aa, synthetic construct
PAQGSLHVK

SEQ ID NO: 20636 - protein, 9 aa, synthetic construct
PAQGSLHVF

SEQ ID NO: 20637 - protein, 9 aa, synthetic construct
PAQGSLRVF

SEQ ID NO: 20638 - protein, 9 aa, synthetic construct
PLQGALHVY

SEQ ID NO: 20639 - protein, 9 aa, synthetic construct
PAQGSLKLH

SEQ ID NO: 20640 - protein, 9 aa, synthetic construct
PAQGSLKVY

SEQ ID NO: 20641 - protein, 9 aa, synthetic construct
PAQGSLKVH

SEQ ID NO: 20642 - protein, 9 aa, synthetic construct
PAQGSLKVF

SEQ ID NO: 20643 - protein, 9 aa, synthetic construct
PLQGALHVR

SEQ ID NO: 20644 - protein, 9 aa, synthetic construct
PAQGSAHVH

SEQ ID NO: 20645 - protein, 9 aa, synthetic construct
PAQGSAHVK

SEQ ID NO: 20646 - protein, 9 aa, synthetic construct
PLQGALHVH

SEQ ID NO: 20647 - protein, 9 aa, synthetic construct
PAQGSARLY

SEQ ID NO: 20648 - protein, 9 aa, synthetic construct
PAQGSARLF

SEQ ID NO: 20649 - protein, 9 aa, synthetic construct
PAQGSAKLR

SEQ ID NO: 20650 - protein, 9 aa, synthetic construct
PAQGSAKVR

SEQ ID NO: 20651 - protein, 9 aa, synthetic construct
PLQGALHVF

SEQ ID NO: 20652 - protein, 9 aa, synthetic construct
PAQGSIHLR

SEQ ID NO: 20653 - protein, 9 aa, synthetic construct
PAQGSIHLF

SEQ ID NO: 20654 - protein, 9 aa, synthetic construct
PAQGSIHVR

SEQ ID NO: 20655 - protein, 9 aa, synthetic construct
PAQGSIHVH

SEQ ID NO: 20656 - protein, 9 aa, synthetic construct
PAQGSIKLY

SEQ ID NO: 20657 - protein, 9 aa, synthetic construct
PAQGSIKLF

SEQ ID NO: 20658 - protein, 9 aa, synthetic construct
PAQGSGHLK

SEQ ID NO: 20659 - protein, 9 aa, synthetic construct
PAQGSGHVY

SEQ ID NO: 20660 - protein, 9 aa, synthetic construct
PAQGSGHVK

SEQ ID NO: 20661 - protein, 9 aa, synthetic construct
PAQGSGHVF

SEQ ID NO: 20662 - protein, 9 aa, synthetic construct
PAQGSGRLY

SEQ ID NO: 20663 - protein, 9 aa, synthetic construct
PAQGSGRLF

SEQ ID NO: 20664 - protein, 9 aa, synthetic construct
PAQGSGRVH

SEQ ID NO: 20665 - protein, 9 aa, synthetic construct
PAQGSGKLY

SEQ ID NO: 20666 - protein, 9 aa, synthetic construct
PAQGSGKLH

SEQ ID NO: 20667 - protein, 9 aa, synthetic construct
PAQGSGKVY

SEQ ID NO: 20668 - protein, 9 aa, synthetic construct
PAQGSGKVH

SEQ ID NO: 20669 - protein, 9 aa, synthetic construct
PAQGVVHLY

SEQ ID NO: 20670 - protein, 9 aa, synthetic construct
PAQGVVRLF

SEQ ID NO: 20671 - protein, 9 aa, synthetic construct
PAQGVVRVY

SEQ ID NO: 20672 - protein, 9 aa, synthetic construct
PAQGVVRVF

SEQ ID NO: 20673 - protein, 9 aa, synthetic construct
PAQGVVKLY

SEQ ID NO: 20674 - protein, 9 aa, synthetic construct
PAQGVVKLH

SEQ ID NO: 20675 - protein, 9 aa, synthetic construct
PAQGVVKVR

SEQ ID NO: 20676 - protein, 9 aa, synthetic construct
PAQGVVKVH

SEQ ID NO: 20677 - protein, 9 aa, synthetic construct
PAQGVVKVF

SEQ ID NO: 20678 - protein, 9 aa, synthetic construct
PLQGALRVK

SEQ ID NO: 20679 - protein, 9 aa, synthetic construct
PAQGVLHLF

SEQ ID NO: 20680 - protein, 9 aa, synthetic construct
PAQGVLHVF

SEQ ID NO: 20681 - protein, 9 aa, synthetic construct
PAQGVLRLY

SEQ ID NO: 20682 - protein, 9 aa, synthetic construct
PAQGVLRLH

SEQ ID NO: 20683 - protein, 9 aa, synthetic construct
PAQGVLRLF

SEQ ID NO: 20684 - protein, 9 aa, synthetic construct
PAQGVLRVR

SEQ ID NO: 20685 - protein, 9 aa, synthetic construct
PAQGVLKLY

SEQ ID NO: 20686 - protein, 9 aa, synthetic construct
PAQGVLKLF

SEQ ID NO: 20687 - protein, 9 aa, synthetic construct
PAQGVLKVY

SEQ ID NO: 20688 - protein, 9 aa, synthetic construct
PLQGALKLH

SEQ ID NO: 20689 - protein, 9 aa, synthetic construct
PAQGVARLF

SEQ ID NO: 20690 - protein, 9 aa, synthetic construct
PAQGVARVR

SEQ ID NO: 20691 - protein, 9 aa, synthetic construct
PAQGVAKLY

SEQ ID NO: 20692 - protein, 9 aa, synthetic construct
PAQGVAKVY

SEQ ID NO: 20693 - protein, 9 aa, synthetic construct
PAQGVAKVH

SEQ ID NO: 20694 - protein, 9 aa, synthetic construct
PAQGVAKVF

SEQ ID NO: 20695 - protein, 9 aa, synthetic construct
PAQGVIHLF

SEQ ID NO: 20696 - protein, 9 aa, synthetic construct
PAQGVIRLR

SEQ ID NO: 20697 - protein, 9 aa, synthetic construct
PAQGVIRLF

SEQ ID NO: 20698 - protein, 9 aa, synthetic construct
PAQGVIRVY

SEQ ID NO: 20699 - protein, 9 aa, synthetic construct
PAQGVIKLY

SEQ ID NO: 20700 - protein, 9 aa, synthetic construct
PAQGVIKLK

SEQ ID NO: 20701 - protein, 9 aa, synthetic construct
PAQGVIKVY

SEQ ID NO: 20702 - protein, 9 aa, synthetic construct
PAQGVIKVF

SEQ ID NO: 20703 - protein, 9 aa, synthetic construct
PLQGALKVH

SEQ ID NO: 20704 - protein, 9 aa, synthetic construct
PAQGVGRLY

SEQ ID NO: 20705 - protein, 9 aa, synthetic construct
PAQGVGKLY

SEQ ID NO: 20706 - protein, 9 aa, synthetic construct
PAQGVGKLF

SEQ ID NO: 20707 - protein, 9 aa, synthetic construct
PAQGVGKVY

SEQ ID NO: 20708 - protein, 9 aa, synthetic construct
PAQGVGKVH

SEQ ID NO: 20709 - protein, 9 aa, synthetic construct
PLQGAAHLY

SEQ ID NO: 20710 - protein, 9 aa, synthetic construct
PAQGGVHLR

SEQ ID NO: 20711 - protein, 9 aa, synthetic construct
PAQGGVHLK

SEQ ID NO: 20712 - protein, 9 aa, synthetic construct
PAQGGVHLF

SEQ ID NO: 20713 - protein, 9 aa, synthetic construct
PAQGGVHVY

SEQ ID NO: 20714 - protein, 9 aa, synthetic construct
PAQGGVHVR

SEQ ID NO: 20715 - protein, 9 aa, synthetic construct
PLQGAAHLR

SEQ ID NO: 20716 - protein, 9 aa, synthetic construct
PAQGGVRLR

SEQ ID NO: 20717 - protein, 9 aa, synthetic construct
PAQGGVRLH

SEQ ID NO: 20718 - protein, 9 aa, synthetic construct
PAQGGVRLF

SEQ ID NO: 20719 - protein, 9 aa, synthetic construct
PAQGGVRVY

SEQ ID NO: 20720 - protein, 9 aa, synthetic construct
PAQGGVRVR

SEQ ID NO: 20721 - protein, 9 aa, synthetic construct
PAQGGVRVK

SEQ ID NO: 20722 - protein, 9 aa, synthetic construct
PAQGGVRVF

SEQ ID NO: 20723 - protein, 9 aa, synthetic construct
PAQGGVKLR

SEQ ID NO: 20724 - protein, 9 aa, synthetic construct
PAQGGVKVH

SEQ ID NO: 20725 - protein, 9 aa, synthetic construct
PLQGAAHLK

SEQ ID NO: 20726 - protein, 9 aa, synthetic construct
PAQGGLHVY

SEQ ID NO: 20727 - protein, 9 aa, synthetic construct
PAQGGLHVK

SEQ ID NO: 20728 - protein, 9 aa, synthetic construct
PAQGGLRLH

SEQ ID NO: 20729 - protein, 9 aa, synthetic construct
PAQGGLRVK

SEQ ID NO: 20730 - protein, 9 aa, synthetic construct
PAQGGLRVF

SEQ ID NO: 20731 - protein, 9 aa, synthetic construct
PLQGAAHVY

SEQ ID NO: 20732 - protein, 9 aa, synthetic construct
PAQGGLKLY

SEQ ID NO: 20733 - protein, 9 aa, synthetic construct
PAQGGLKLH

SEQ ID NO: 20734 - protein, 9 aa, synthetic construct
PAQGGLKLF

SEQ ID NO: 20735 - protein, 9 aa, synthetic construct
PAQGGLKVH

SEQ ID NO: 20736 - protein, 9 aa, synthetic construct
PAQGGLKVF

SEQ ID NO: 20737 - protein, 9 aa, synthetic construct
PAQGGAHLY

SEQ ID NO: 20738 - protein, 9 aa, synthetic construct
PAQGGAHLR

SEQ ID NO: 20739 - protein, 9 aa, synthetic construct
PAQGGAHLK

SEQ ID NO: 20740 - protein, 9 aa, synthetic construct
PAQGGAHVY

SEQ ID NO: 20741 - protein, 9 aa, synthetic construct
PLQGAAHVH

SEQ ID NO: 20742 - protein, 9 aa, synthetic construct
PAQGGARLY

SEQ ID NO: 20743 - protein, 9 aa, synthetic construct
PAQGGARLR

SEQ ID NO: 20744 - protein, 9 aa, synthetic construct
PAQGGARLF

SEQ ID NO: 20745 - protein, 9 aa, synthetic construct
PAQGGARVY

SEQ ID NO: 20746 - protein, 9 aa, synthetic construct
PAQGGAKLH

SEQ ID NO: 20747 - protein, 9 aa, synthetic construct
PAQGGAKLF

SEQ ID NO: 20748 - protein, 9 aa, synthetic construct
PAQGGAKVH

SEQ ID NO: 20749 - protein, 9 aa, synthetic construct
PLQGAAHVF

SEQ ID NO: 20750 - protein, 9 aa, synthetic construct
PAQGGIHLR

SEQ ID NO: 20751 - protein, 9 aa, synthetic construct
PAQGGIHLF

SEQ ID NO: 20752 - protein, 9 aa, synthetic construct
PAQGGIHVF

SEQ ID NO: 20753 - protein, 9 aa, synthetic construct
PAQGGIRLK

SEQ ID NO: 20754 - protein, 9 aa, synthetic construct
PAQGGIRVR

SEQ ID NO: 20755 - protein, 9 aa, synthetic construct
PAQGGIRVF

SEQ ID NO: 20756 - protein, 9 aa, synthetic construct
PAQGGIKLR

SEQ ID NO: 20757 - protein, 9 aa, synthetic construct
PAQGGIKLF

SEQ ID NO: 20758 - protein, 9 aa, synthetic construct
PAQGGIKVY

SEQ ID NO: 20759 - protein, 9 aa, synthetic construct
PAQGGIKVH

SEQ ID NO: 20760 - protein, 9 aa, synthetic construct
PAQGGIKVF

SEQ ID NO: 20761 - protein, 9 aa, synthetic construct
PLQGAARLH

SEQ ID NO: 20762 - protein, 9 aa, synthetic construct
PAQGGGHLR

SEQ ID NO: 20763 - protein, 9 aa, synthetic construct
PAQGGGHLH

SEQ ID NO: 20764 - protein, 9 aa, synthetic construct
PAQGGGHLF

SEQ ID NO: 20765 - protein, 9 aa, synthetic construct
PAQGGGHVR

SEQ ID NO: 20766 - protein, 9 aa, synthetic construct
PAQGGGHVH

SEQ ID NO: 20767 - protein, 9 aa, synthetic construct
PAQGGGHVK

SEQ ID NO: 20768 - protein, 9 aa, synthetic construct
PAQGGGRLY

SEQ ID NO: 20769 - protein, 9 aa, synthetic construct
PAQGGGRLH

SEQ ID NO: 20770 - protein, 9 aa, synthetic construct
PAQGGGRLF

SEQ ID NO: 20771 - protein, 9 aa, synthetic construct
PAQGGGRVR

SEQ ID NO: 20772 - protein, 9 aa, synthetic construct
PAQGGGRVH

SEQ ID NO: 20773 - protein, 9 aa, synthetic construct
PAQGGGRVK

SEQ ID NO: 20774 - protein, 9 aa, synthetic construct
PAQGGGRVF

SEQ ID NO: 20775 - protein, 9 aa, synthetic construct
PLQGAARLF

SEQ ID NO: 20776 - protein, 9 aa, synthetic construct
PAQGGGKLY

SEQ ID NO: 20777 - protein, 9 aa, synthetic construct
PAQGGGKLH

SEQ ID NO: 20778 - protein, 9 aa, synthetic construct
PAQGGGKLF

SEQ ID NO: 20779 - protein, 9 aa, synthetic construct
PAQGGGKVH

SEQ ID NO: 20780 - protein, 9 aa, synthetic construct
PAQGGGKVK

SEQ ID NO: 20781 - protein, 9 aa, synthetic construct
PAQGGGKVF

SEQ ID NO: 20782 - protein, 9 aa, synthetic construct
PAQAAVHLF

SEQ ID NO: 20783 - protein, 9 aa, synthetic construct
PAQAAVHVY

SEQ ID NO: 20784 - protein, 9 aa, synthetic construct
PAQAAVHVR

SEQ ID NO: 20785 - protein, 9 aa, synthetic construct
PAQAAVHVH

SEQ ID NO: 20786 - protein, 9 aa, synthetic construct
PAQAAVHVF

SEQ ID NO: 20787 - protein, 9 aa, synthetic construct
PLQGAARVR

SEQ ID NO: 20788 - protein, 9 aa, synthetic construct
PAQAAVRLR

SEQ ID NO: 20789 - protein, 9 aa, synthetic construct
PAQAAVRLH

SEQ ID NO: 20790 - protein, 9 aa, synthetic construct
PAQAAVRLF

SEQ ID NO: 20791 - protein, 9 aa, synthetic construct
PAQAAVRVR

SEQ ID NO: 20792 - protein, 9 aa, synthetic construct
PAQAAVRVK

SEQ ID NO: 20793 - protein, 9 aa, synthetic construct
PLQGAARVH

SEQ ID NO: 20794 - protein, 9 aa, synthetic construct
PAQAAVKLR

SEQ ID NO: 20795 - protein, 9 aa, synthetic construct
PAQAAVKLK

SEQ ID NO: 20796 - protein, 9 aa, synthetic construct
PAQAAVKLF

SEQ ID NO: 20797 - protein, 9 aa, synthetic construct
PAQAAVKVR

SEQ ID NO: 20798 - protein, 9 aa, synthetic construct
PAQAAVKVK

SEQ ID NO: 20799 - protein, 9 aa, synthetic construct
PAQAALHLY

SEQ ID NO: 20800 - protein, 9 aa, synthetic construct
PAQAALHLR

SEQ ID NO: 20801 - protein, 9 aa, synthetic construct
PAQAALHLH

SEQ ID NO: 20802 - protein, 9 aa, synthetic construct
PAQAALHLF

SEQ ID NO: 20803 - protein, 9 aa, synthetic construct
PAQAALHVY

SEQ ID NO: 20804 - protein, 9 aa, synthetic construct
PAQAALHVF

SEQ ID NO: 20805 - protein, 9 aa, synthetic construct
PAQAALRLH

SEQ ID NO: 20806 - protein, 9 aa, synthetic construct
PAQAALRVY

SEQ ID NO: 20807 - protein, 9 aa, synthetic construct
PAQAALRVH

SEQ ID NO: 20808 - protein, 9 aa, synthetic construct
PAQAALRVF

SEQ ID NO: 20809 - protein, 9 aa, synthetic construct
PLQGAAKLY

SEQ ID NO: 20810 - protein, 9 aa, synthetic construct
PAQAALKLY

SEQ ID NO: 20811 - protein, 9 aa, synthetic construct
PAQAALKLR

SEQ ID NO: 20812 - protein, 9 aa, synthetic construct
PAQAALKLH

SEQ ID NO: 20813 - protein, 9 aa, synthetic construct
PAQAALKLF

SEQ ID NO: 20814 - protein, 9 aa, synthetic construct
PAQAALKVY

SEQ ID NO: 20815 - protein, 9 aa, synthetic construct
PAQAALKVH

SEQ ID NO: 20816 - protein, 9 aa, synthetic construct
PLQGAAKLH

SEQ ID NO: 20817 - protein, 9 aa, synthetic construct
PAQAAARLF

SEQ ID NO: 20818 - protein, 9 aa, synthetic construct
PAQAAARVR

SEQ ID NO: 20819 - protein, 9 aa, synthetic construct
PAQAAAKLF

SEQ ID NO: 20820 - protein, 9 aa, synthetic construct
PAQAAAKVR

SEQ ID NO: 20821 - protein, 9 aa, synthetic construct
PLQGAAKLF

SEQ ID NO: 20822 - protein, 9 aa, synthetic construct
PAQAAIHLY

SEQ ID NO: 20823 - protein, 9 aa, synthetic construct
PAQAAIHLR

SEQ ID NO: 20824 - protein, 9 aa, synthetic construct
PAQAAIHLK

SEQ ID NO: 20825 - protein, 9 aa, synthetic construct
PAQAAIHVR

SEQ ID NO: 20826 - protein, 9 aa, synthetic construct
PLQGAAKVY

SEQ ID NO: 20827 - protein, 9 aa, synthetic construct
PAQAAIRLY

SEQ ID NO: 20828 - protein, 9 aa, synthetic construct
PAQAAIRVK

SEQ ID NO: 20829 - protein, 9 aa, synthetic construct
PAQAAIKLY

SEQ ID NO: 20830 - protein, 9 aa, synthetic construct
PAQAAIKLR

SEQ ID NO: 20831 - protein, 9 aa, synthetic construct
PAQAAIKLK

SEQ ID NO: 20832 - protein, 9 aa, synthetic construct
PAQAAIKLF

SEQ ID NO: 20833 - protein, 9 aa, synthetic construct
PAQAAIKVR

SEQ ID NO: 20834 - protein, 9 aa, synthetic construct
PAQAAIKVK

SEQ ID NO: 20835 - protein, 9 aa, synthetic construct
PAQAAIKVF

SEQ ID NO: 20836 - protein, 9 aa, synthetic construct
PLQGAAKVH

SEQ ID NO: 20837 - protein, 9 aa, synthetic construct
PAQAAGRLK

SEQ ID NO: 20838 - protein, 9 aa, synthetic construct
PLQGAAKVF

SEQ ID NO: 20839 - protein, 9 aa, synthetic construct
PLQGAIHLY

SEQ ID NO: 20840 - protein, 9 aa, synthetic construct
PAQATVRLR

SEQ ID NO: 20841 - protein, 9 aa, synthetic construct
PAQATVRLH

SEQ ID NO: 20842 - protein, 9 aa, synthetic construct
PAQATVRLF

SEQ ID NO: 20843 - protein, 9 aa, synthetic construct
PAQATVRVY

SEQ ID NO: 20844 - protein, 9 aa, synthetic construct
PLQGAIHLH

SEQ ID NO: 20845 - protein, 9 aa, synthetic construct
PAQATVKLR

SEQ ID NO: 20846 - protein, 9 aa, synthetic construct
PAQATVKLH

SEQ ID NO: 20847 - protein, 9 aa, synthetic construct
PAQATLHLK

SEQ ID NO: 20848 - protein, 9 aa, synthetic construct
PAQATLHLF

SEQ ID NO: 20849 - protein, 9 aa, synthetic construct
PAQATLHVY

SEQ ID NO: 20850 - protein, 9 aa, synthetic construct
PAQATLHVR

SEQ ID NO: 20851 - protein, 9 aa, synthetic construct
PAQATLHVH

SEQ ID NO: 20852 - protein, 9 aa, synthetic construct
PLQGAIHLF

SEQ ID NO: 20853 - protein, 9 aa, synthetic construct
PAQATLRLY

SEQ ID NO: 20854 - protein, 9 aa, synthetic construct
PAQATLRVH

SEQ ID NO: 20855 - protein, 9 aa, synthetic construct
PAQATLRVF

SEQ ID NO: 20856 - protein, 9 aa, synthetic construct
PAQATLKLY

SEQ ID NO: 20857 - protein, 9 aa, synthetic construct
PAQATLKLH

SEQ ID NO: 20858 - protein, 9 aa, synthetic construct
PAQATLKLF

SEQ ID NO: 20859 - protein, 9 aa, synthetic construct
PAQATLKVH

SEQ ID NO: 20860 - protein, 9 aa, synthetic construct
PAQATLKVK

SEQ ID NO: 20861 - protein, 9 aa, synthetic construct
PAQATLKVF

SEQ ID NO: 20862 - protein, 9 aa, synthetic construct
PLQGAIHVR

SEQ ID NO: 20863 - protein, 9 aa, synthetic construct
PAQATARLY

SEQ ID NO: 20864 - protein, 9 aa, synthetic construct
PAQATARVY

SEQ ID NO: 20865 - protein, 9 aa, synthetic construct
PAQATARVR

SEQ ID NO: 20866 - protein, 9 aa, synthetic construct
PAQATIHVY

SEQ ID NO: 20867 - protein, 9 aa, synthetic construct
PLQGAIRLY

SEQ ID NO: 20868 - protein, 9 aa, synthetic construct
PAQATIRLR

SEQ ID NO: 20869 - protein, 9 aa, synthetic construct
PAQATIRLH

SEQ ID NO: 20870 - protein, 9 aa, synthetic construct
PAQATIRLF

SEQ ID NO: 20871 - protein, 9 aa, synthetic construct
PAQATIRVF

SEQ ID NO: 20872 - protein, 9 aa, synthetic construct
PAQATIKLY

SEQ ID NO: 20873 - protein, 9 aa, synthetic construct
PAQATIKLR

SEQ ID NO: 20874 - protein, 9 aa, synthetic construct
PAQATIKLK

SEQ ID NO: 20875 - protein, 9 aa, synthetic construct
PAQATIKLF

SEQ ID NO: 20876 - protein, 9 aa, synthetic construct
PAQATIKVH

SEQ ID NO: 20877 - protein, 9 aa, synthetic construct
PLQGAIRLH

SEQ ID NO: 20878 - protein, 9 aa, synthetic construct
PLQGAIRLK

SEQ ID NO: 20879 - protein, 9 aa, synthetic construct
PAQATGRLY

SEQ ID NO: 20880 - protein, 9 aa, synthetic construct
PAQATGRLK

SEQ ID NO: 20881 - protein, 9 aa, synthetic construct
PAQATGRVY

SEQ ID NO: 20882 - protein, 9 aa, synthetic construct
PAQATGRVH

SEQ ID NO: 20883 - protein, 9 aa, synthetic construct
PLQGAIRLF

SEQ ID NO: 20884 - protein, 9 aa, synthetic construct
PAQASVHLK

SEQ ID NO: 20885 - protein, 9 aa, synthetic construct
PAQASVHLF

SEQ ID NO: 20886 - protein, 9 aa, synthetic construct
PAQASVRLR

SEQ ID NO: 20887 - protein, 9 aa, synthetic construct
PAQASVRLH

SEQ ID NO: 20888 - protein, 9 aa, synthetic construct
PAQASVRLK

SEQ ID NO: 20889 - protein, 9 aa, synthetic construct
PAQASVRLF

SEQ ID NO: 20890 - protein, 9 aa, synthetic construct
PAQASVRVY

SEQ ID NO: 20891 - protein, 9 aa, synthetic construct
PAQASVRVF

SEQ ID NO: 20892 - protein, 9 aa, synthetic construct
PAQASLHLY

SEQ ID NO: 20893 - protein, 9 aa, synthetic construct
PAQASLHLR

SEQ ID NO: 20894 - protein, 9 aa, synthetic construct
PAQASLHLH

SEQ ID NO: 20895 - protein, 9 aa, synthetic construct
PAQASLHLK

SEQ ID NO: 20896 - protein, 9 aa, synthetic construct
PAQASLHVY

SEQ ID NO: 20897 - protein, 9 aa, synthetic construct
PAQASLHVR

SEQ ID NO: 20898 - protein, 9 aa, synthetic construct
PAQASLHVH

SEQ ID NO: 20899 - protein, 9 aa, synthetic construct
PLQGAIRVF

SEQ ID NO: 20900 - protein, 9 aa, synthetic construct
PAQASLRLH

SEQ ID NO: 20901 - protein, 9 aa, synthetic construct
PAQASLRVY

SEQ ID NO: 20902 - protein, 9 aa, synthetic construct
PAQASLRVF

SEQ ID NO: 20903 - protein, 9 aa, synthetic construct
PAQASLKVY

SEQ ID NO: 20904 - protein, 9 aa, synthetic construct
PAQASLKVF

SEQ ID NO: 20905 - protein, 9 aa, synthetic construct
PAQASAHLR

SEQ ID NO: 20906 - protein, 9 aa, synthetic construct
PAQASAHVH

SEQ ID NO: 20907 - protein, 9 aa, synthetic construct
PAQASAHVF

SEQ ID NO: 20908 - protein, 9 aa, synthetic construct
PAQASARLY

SEQ ID NO: 20909 - protein, 9 aa, synthetic construct
PAQASAKLR

SEQ ID NO: 20910 - protein, 9 aa, synthetic construct
PAQASAKLF

SEQ ID NO: 20911 - protein, 9 aa, synthetic construct
PAQASAKVY

SEQ ID NO: 20912 - protein, 9 aa, synthetic construct
PAQASAKVH

SEQ ID NO: 20913 - protein, 9 aa, synthetic construct
PLQGAIKLF

SEQ ID NO: 20914 - protein, 9 aa, synthetic construct
PAQASIHLY

SEQ ID NO: 20915 - protein, 9 aa, synthetic construct
PAQASIHLR

SEQ ID NO: 20916 - protein, 9 aa, synthetic construct
PAQASIHLF

SEQ ID NO: 20917 - protein, 9 aa, synthetic construct
PAQASIHVK

SEQ ID NO: 20918 - protein, 9 aa, synthetic construct
PLQGAIKVY

SEQ ID NO: 20919 - protein, 9 aa, synthetic construct
PAQASIRLY

SEQ ID NO: 20920 - protein, 9 aa, synthetic construct
PAQASIRLH

SEQ ID NO: 20921 - protein, 9 aa, synthetic construct
PAQASIRLK

SEQ ID NO: 20922 - protein, 9 aa, synthetic construct
PAQASIRVR

SEQ ID NO: 20923 - protein, 9 aa, synthetic construct
PAQASIRVH

SEQ ID NO: 20924 - protein, 9 aa, synthetic construct
PAQASIKLY

SEQ ID NO: 20925 - protein, 9 aa, synthetic construct
PAQASIKLK

SEQ ID NO: 20926 - protein, 9 aa, synthetic construct
PAQASIKVH

SEQ ID NO: 20927 - protein, 9 aa, synthetic construct
PLQGAIKVH

SEQ ID NO: 20928 - protein, 9 aa, synthetic construct
PLQGAIKVK

SEQ ID NO: 20929 - protein, 9 aa, synthetic construct
PAQASGRLR

SEQ ID NO: 20930 - protein, 9 aa, synthetic construct
PLQGAIKVF

SEQ ID NO: 20931 - protein, 9 aa, synthetic construct
PAQASGKLY

SEQ ID NO: 20932 - protein, 9 aa, synthetic construct
PLQGAGHLY

SEQ ID NO: 20933 - protein, 9 aa, synthetic construct
PAQAVVHLR

SEQ ID NO: 20934 - protein, 9 aa, synthetic construct
PAQAVVHLF

SEQ ID NO: 20935 - protein, 9 aa, synthetic construct
PAQAVVHVY

SEQ ID NO: 20936 - protein, 9 aa, synthetic construct
PAQAVVHVR

SEQ ID NO: 20937 - protein, 9 aa, synthetic construct
PAQAVVHVK

SEQ ID NO: 20938 - protein, 9 aa, synthetic construct
PLQGAGHLR

SEQ ID NO: 20939 - protein, 9 aa, synthetic construct
PAQAVVRLY

SEQ ID NO: 20940 - protein, 9 aa, synthetic construct
PAQAVVRLH

SEQ ID NO: 20941 - protein, 9 aa, synthetic construct
PAQAVVRVY

SEQ ID NO: 20942 - protein, 9 aa, synthetic construct
PAQAVVRVH

SEQ ID NO: 20943 - protein, 9 aa, synthetic construct
PLQGAGHLH

SEQ ID NO: 20944 - protein, 9 aa, synthetic construct
PAQAVVKLY

SEQ ID NO: 20945 - protein, 9 aa, synthetic construct
PAQAVVKLR

SEQ ID NO: 20946 - protein, 9 aa, synthetic construct
PAQAVVKLH

SEQ ID NO: 20947 - protein, 9 aa, synthetic construct
PAQAVVKVY

SEQ ID NO: 20948 - protein, 9 aa, synthetic construct
PAQAVVKVR

SEQ ID NO: 20949 - protein, 9 aa, synthetic construct
PAQAVVKVH

SEQ ID NO: 20950 - protein, 9 aa, synthetic construct
PAQAVVKVK

SEQ ID NO: 20951 - protein, 9 aa, synthetic construct
PAQAVLHLH

SEQ ID NO: 20952 - protein, 9 aa, synthetic construct
PAQAVLHVF

SEQ ID NO: 20953 - protein, 9 aa, synthetic construct
PLQGAGHLF

SEQ ID NO: 20954 - protein, 9 aa, synthetic construct
PAQAVLRLY

SEQ ID NO: 20955 - protein, 9 aa, synthetic construct
PAQAVLRLH

SEQ ID NO: 20956 - protein, 9 aa, synthetic construct
PAQAVLRVH

SEQ ID NO: 20957 - protein, 9 aa, synthetic construct
PAQAVLRVF

SEQ ID NO: 20958 - protein, 9 aa, synthetic construct
PLQGAGHVY

SEQ ID NO: 20959 - protein, 9 aa, synthetic construct
PAQAVLKLF

SEQ ID NO: 20960 - protein, 9 aa, synthetic construct
PAQAVLKVY

SEQ ID NO: 20961 - protein, 9 aa, synthetic construct
PAQAVLKVH

SEQ ID NO: 20962 - protein, 9 aa, synthetic construct
PAQAVAHLY

SEQ ID NO: 20963 - protein, 9 aa, synthetic construct
PAQAVAHLR

SEQ ID NO: 20964 - protein, 9 aa, synthetic construct
PAQAVAHLH

SEQ ID NO: 20965 - protein, 9 aa, synthetic construct
PAQAVAHLK

SEQ ID NO: 20966 - protein, 9 aa, synthetic construct
PAQAVAHLF

SEQ ID NO: 20967 - protein, 9 aa, synthetic construct
PAQAVAHVR

SEQ ID NO: 20968 - protein, 9 aa, synthetic construct
PAQAVAHVH

SEQ ID NO: 20969 - protein, 9 aa, synthetic construct
PAQAVAHVK

SEQ ID NO: 20970 - protein, 9 aa, synthetic construct
PAQAVARVY

SEQ ID NO: 20971 - protein, 9 aa, synthetic construct
PAQAVARVH

SEQ ID NO: 20972 - protein, 9 aa, synthetic construct
PLQGAGHVK

SEQ ID NO: 20973 - protein, 9 aa, synthetic construct
PAQAVAKLY

SEQ ID NO: 20974 - protein, 9 aa, synthetic construct
PAQAVAKVY

SEQ ID NO: 20975 - protein, 9 aa, synthetic construct
PAQAVAKVR

SEQ ID NO: 20976 - protein, 9 aa, synthetic construct
PAQAVAKVH

SEQ ID NO: 20977 - protein, 9 aa, synthetic construct
PAQAVAKVF

SEQ ID NO: 20978 - protein, 9 aa, synthetic construct
PLQGAGHVF

SEQ ID NO: 20979 - protein, 9 aa, synthetic construct
PAQAVIHLH

SEQ ID NO: 20980 - protein, 9 aa, synthetic construct
PAQAVIHLK

SEQ ID NO: 20981 - protein, 9 aa, synthetic construct
PAQAVIHLF

SEQ ID NO: 20982 - protein, 9 aa, synthetic construct
PAQAVIHVY

SEQ ID NO: 20983 - protein, 9 aa, synthetic construct
PAQAVIHVH

SEQ ID NO: 20984 - protein, 9 aa, synthetic construct
PAQAVIHVF

SEQ ID NO: 20985 - protein, 9 aa, synthetic construct
PLQGAGRLY

SEQ ID NO: 20986 - protein, 9 aa, synthetic construct
PAQAVIRLY

SEQ ID NO: 20987 - protein, 9 aa, synthetic construct
PAQAVIRLR

SEQ ID NO: 20988 - protein, 9 aa, synthetic construct
PAQAVIRLH

SEQ ID NO: 20989 - protein, 9 aa, synthetic construct
PAQAVIRVY

SEQ ID NO: 20990 - protein, 9 aa, synthetic construct
PAQAVIKLF

SEQ ID NO: 20991 - protein, 9 aa, synthetic construct
PAQAVIKVF

SEQ ID NO: 20992 - protein, 9 aa, synthetic construct
PAQAVGHLR

SEQ ID NO: 20993 - protein, 9 aa, synthetic construct
PAQAVGHLH

SEQ ID NO: 20994 - protein, 9 aa, synthetic construct
PAQAVGHLK

SEQ ID NO: 20995 - protein, 9 aa, synthetic construct
PAQAVGHVR

SEQ ID NO: 20996 - protein, 9 aa, synthetic construct
PAQAVGHVF

SEQ ID NO: 20997 - protein, 9 aa, synthetic construct
PAQAVGRLY

SEQ ID NO: 20998 - protein, 9 aa, synthetic construct
PAQAVGRLF

SEQ ID NO: 20999 - protein, 9 aa, synthetic construct
PAQAVGRVY

SEQ ID NO: 21000 - protein, 9 aa, synthetic construct
PAQAVGRVH

SEQ ID NO: 21001 - protein, 9 aa, synthetic construct
PAQAVGKLH

SEQ ID NO: 21002 - protein, 9 aa, synthetic construct
PAQAVGKLK

SEQ ID NO: 21003 - protein, 9 aa, synthetic construct
PAQAVGKVH

SEQ ID NO: 21004 - protein, 9 aa, synthetic construct
PAQAGVHLR

SEQ ID NO: 21005 - protein, 9 aa, synthetic construct
PAQAGVHVY

SEQ ID NO: 21006 - protein, 9 aa, synthetic construct
PAQAGVHVR

SEQ ID NO: 21007 - protein, 9 aa, synthetic construct
PAQAGVHVK

SEQ ID NO: 21008 - protein, 9 aa, synthetic construct
PAQAGVHVF

SEQ ID NO: 21009 - protein, 9 aa, synthetic construct
PAQAGVRLY

SEQ ID NO: 21010 - protein, 9 aa, synthetic construct
PAQAGVRLH

SEQ ID NO: 21011 - protein, 9 aa, synthetic construct
PAQAGVRVY

SEQ ID NO: 21012 - protein, 9 aa, synthetic construct
PAQAGVRVR

SEQ ID NO: 21013 - protein, 9 aa, synthetic construct
PAQAGVRVK

SEQ ID NO: 21014 - protein, 9 aa, synthetic construct
PAQAGVRVF

SEQ ID NO: 21015 - protein, 9 aa, synthetic construct
PAQAGVKLH

SEQ ID NO: 21016 - protein, 9 aa, synthetic construct
PAQAGVKLF

SEQ ID NO: 21017 - protein, 9 aa, synthetic construct
PAQAGVKVY

SEQ ID NO: 21018 - protein, 9 aa, synthetic construct
PAQAGVKVR

SEQ ID NO: 21019 - protein, 9 aa, synthetic construct
PAQAGVKVK

SEQ ID NO: 21020 - protein, 9 aa, synthetic construct
PLQGAGRVK

SEQ ID NO: 21021 - protein, 9 aa, synthetic construct
PLQGAGRVF

SEQ ID NO: 21022 - protein, 9 aa, synthetic construct
PAQAGLRVY

SEQ ID NO: 21023 - protein, 9 aa, synthetic construct
PAQAGLRVF

SEQ ID NO: 21024 - protein, 9 aa, synthetic construct
PLNGTVRLF

SEQ ID NO: 21025 - protein, 9 aa, synthetic construct
PLQGAGKLY

SEQ ID NO: 21026 - protein, 9 aa, synthetic construct
PAQAGLKLF

SEQ ID NO: 21027 - protein, 9 aa, synthetic construct
PAQAGLKVY

SEQ ID NO: 21028 - protein, 9 aa, synthetic construct
PAQAGLKVF

SEQ ID NO: 21029 - protein, 9 aa, synthetic construct
PAQAGAHLY

SEQ ID NO: 21030 - protein, 9 aa, synthetic construct
PAQAGAHLR

SEQ ID NO: 21031 - protein, 9 aa, synthetic construct
PAQAGAHLH

SEQ ID NO: 21032 - protein, 9 aa, synthetic construct
PAQAGAHLK

SEQ ID NO: 21033 - protein, 9 aa, synthetic construct
PAQAGAHVY

SEQ ID NO: 21034 - protein, 9 aa, synthetic construct
PAQAGAHVR

SEQ ID NO: 21035 - protein, 9 aa, synthetic construct
PAQAGAHVK

SEQ ID NO: 21036 - protein, 9 aa, synthetic construct
PAQAGARLF

SEQ ID NO: 21037 - protein, 9 aa, synthetic construct
PAQAGAKLY

SEQ ID NO: 21038 - protein, 9 aa, synthetic construct
PAQAGAKVY

SEQ ID NO: 21039 - protein, 9 aa, synthetic construct
PAQAGAKVR

SEQ ID NO: 21040 - protein, 9 aa, synthetic construct
PAQAGAKVH

SEQ ID NO: 21041 - protein, 9 aa, synthetic construct
PAQAGAKVF

SEQ ID NO: 21042 - protein, 9 aa, synthetic construct
PAQAGIHLR

SEQ ID NO: 21043 - protein, 9 aa, synthetic construct
PAQAGIHLK

SEQ ID NO: 21044 - protein, 9 aa, synthetic construct
PLQGAGKVY

SEQ ID NO: 21045 - protein, 9 aa, synthetic construct
PAQAGGHLF

SEQ ID NO: 21046 - protein, 9 aa, synthetic construct
PAQAGGHVY

SEQ ID NO: 21047 - protein, 9 aa, synthetic construct
PAQAGGHVH

SEQ ID NO: 21048 - protein, 9 aa, synthetic construct
PAQAGGHVF

SEQ ID NO: 21049 - protein, 9 aa, synthetic construct
PAQAGGRLF

SEQ ID NO: 21050 - protein, 9 aa, synthetic construct
PAQAGGRVY

SEQ ID NO: 21051 - protein, 9 aa, synthetic construct
PAQAGGRVR

SEQ ID NO: 21052 - protein, 9 aa, synthetic construct
PAQAGGRVH

SEQ ID NO: 21053 - protein, 9 aa, synthetic construct
PAQAGGKLY

SEQ ID NO: 21054 - protein, 9 aa, synthetic construct
PAQAGGKLR

SEQ ID NO: 21055 - protein, 9 aa, synthetic construct
PAQAGGKLH

SEQ ID NO: 21056 - protein, 9 aa, synthetic construct
PAQAGGKVY

SEQ ID NO: 21057 - protein, 9 aa, synthetic construct
PAQAGGKVK

SEQ ID NO: 21058 - protein, 9 aa, synthetic construct
PLNGTVRVY

SEQ ID NO: 21059 - protein, 9 aa, synthetic construct
PAPGAVHVY

SEQ ID NO: 21060 - protein, 9 aa, synthetic construct
PAPGAVHVF

SEQ ID NO: 21061 - protein, 9 aa, synthetic construct
PAPGAVRLY

SEQ ID NO: 21062 - protein, 9 aa, synthetic construct
PAPGAVRLH

SEQ ID NO: 21063 - protein, 9 aa, synthetic construct
PAPGAVRLK

SEQ ID NO: 21064 - protein, 9 aa, synthetic construct
PAPGAVRVY

SEQ ID NO: 21065 - protein, 9 aa, synthetic construct
PAPGAVRVH

SEQ ID NO: 21066 - protein, 9 aa, synthetic construct
PAPGAVRVF

SEQ ID NO: 21067 - protein, 9 aa, synthetic construct
PAPGAVKLY

SEQ ID NO: 21068 - protein, 9 aa, synthetic construct
PAPGAVKLF

SEQ ID NO: 21069 - protein, 9 aa, synthetic construct
PAPGAVKVY

SEQ ID NO: 21070 - protein, 9 aa, synthetic construct
PAPGAVKVH

SEQ ID NO: 21071 - protein, 9 aa, synthetic construct
PLQGTVHLK

SEQ ID NO: 21072 - protein, 9 aa, synthetic construct
PAPGALHVY

SEQ ID NO: 21073 - protein, 9 aa, synthetic construct
PAPGALHVR

SEQ ID NO: 21074 - protein, 9 aa, synthetic construct
PAPGALHVF

SEQ ID NO: 21075 - protein, 9 aa, synthetic construct
PLQGTVHLF

SEQ ID NO: 21076 - protein, 9 aa, synthetic construct
PAPGALRLY

SEQ ID NO: 21077 - protein, 9 aa, synthetic construct
PAPGALRVK

SEQ ID NO: 21078 - protein, 9 aa, synthetic construct
PAPGALKLR

SEQ ID NO: 21079 - protein, 9 aa, synthetic construct
PAPGALKLH

SEQ ID NO: 21080 - protein, 9 aa, synthetic construct
PAPGALKLF

SEQ ID NO: 21081 - protein, 9 aa, synthetic construct
PAPGALKVY

SEQ ID NO: 21082 - protein, 9 aa, synthetic construct
PAPGALKVH

SEQ ID NO: 21083 - protein, 9 aa, synthetic construct
PAPGAAHLR

SEQ ID NO: 21084 - protein, 9 aa, synthetic construct
PAPGAARLH

SEQ ID NO: 21085 - protein, 9 aa, synthetic construct
PAPGAARLF

SEQ ID NO: 21086 - protein, 9 aa, synthetic construct
PAPGAARVR

SEQ ID NO: 21087 - protein, 9 aa, synthetic construct
PAPGAARVF

SEQ ID NO: 21088 - protein, 9 aa, synthetic construct
PAPGAAKLR

SEQ ID NO: 21089 - protein, 9 aa, synthetic construct
PAPGAAKVY

SEQ ID NO: 21090 - protein, 9 aa, synthetic construct
PAPGAAKVR

SEQ ID NO: 21091 - protein, 9 aa, synthetic construct
PAPGAAKVK

SEQ ID NO: 21092 - protein, 9 aa, synthetic construct
PLQGTVHVF

SEQ ID NO: 21093 - protein, 9 aa, synthetic construct
PAPGAIHVR

SEQ ID NO: 21094 - protein, 9 aa, synthetic construct
PAPGAIRLY

SEQ ID NO: 21095 - protein, 9 aa, synthetic construct
PAPGAIRLH

SEQ ID NO: 21096 - protein, 9 aa, synthetic construct
PAPGAIRLF

SEQ ID NO: 21097 - protein, 9 aa, synthetic construct
PAPGAIRVY

SEQ ID NO: 21098 - protein, 9 aa, synthetic construct
PAPGAIRVH

SEQ ID NO: 21099 - protein, 9 aa, synthetic construct
PAPGAIRVF

SEQ ID NO: 21100 - protein, 9 aa, synthetic construct
PAPGAIKLF

SEQ ID NO: 21101 - protein, 9 aa, synthetic construct
PAPGAIKVY

SEQ ID NO: 21102 - protein, 9 aa, synthetic construct
PAPGAIKVH

SEQ ID NO: 21103 - protein, 9 aa, synthetic construct
PAPGAIKVF

SEQ ID NO: 21104 - protein, 9 aa, synthetic construct
PLQGTVRLH

SEQ ID NO: 21105 - protein, 9 aa, synthetic construct
PAPGAGHVR

SEQ ID NO: 21106 - protein, 9 aa, synthetic construct
PAPGAGRLY

SEQ ID NO: 21107 - protein, 9 aa, synthetic construct
PAPGAGRVH

SEQ ID NO: 21108 - protein, 9 aa, synthetic construct
PAPGAGRVK

SEQ ID NO: 21109 - protein, 9 aa, synthetic construct
PAPGAGKVY

SEQ ID NO: 21110 - protein, 9 aa, synthetic construct
PLQGTVRVY

SEQ ID NO: 21111 - protein, 9 aa, synthetic construct
PAPGTVHLK

SEQ ID NO: 21112 - protein, 9 aa, synthetic construct
PAPGTVHVR

SEQ ID NO: 21113 - protein, 9 aa, synthetic construct
PAPGTVHVF

SEQ ID NO: 21114 - protein, 9 aa, synthetic construct
PAPGTVRLH

SEQ ID NO: 21115 - protein, 9 aa, synthetic construct
PAPGTVRLF

SEQ ID NO: 21116 - protein, 9 aa, synthetic construct
PLQGTVRVH

SEQ ID NO: 21117 - protein, 9 aa, synthetic construct
PAPGTVKVY

SEQ ID NO: 21118 - protein, 9 aa, synthetic construct
PAPGTVKVR

SEQ ID NO: 21119 - protein, 9 aa, synthetic construct
PAPGTVKVH

SEQ ID NO: 21120 - protein, 9 aa, synthetic construct
PAPGTLHVR

SEQ ID NO: 21121 - protein, 9 aa, synthetic construct
PAPGTLHVF

SEQ ID NO: 21122 - protein, 9 aa, synthetic construct
PLQGTVRVF

SEQ ID NO: 21123 - protein, 9 aa, synthetic construct
PAPGTLRLH

SEQ ID NO: 21124 - protein, 9 aa, synthetic construct
PAPGTLRLF

SEQ ID NO: 21125 - protein, 9 aa, synthetic construct
PAPGTLKLR

SEQ ID NO: 21126 - protein, 9 aa, synthetic construct
PLQGTVKLH

SEQ ID NO: 21127 - protein, 9 aa, synthetic construct
PAPGTARLY

SEQ ID NO: 21128 - protein, 9 aa, synthetic construct
PAPGTARVY

SEQ ID NO: 21129 - protein, 9 aa, synthetic construct
PAPGTARVH

SEQ ID NO: 21130 - protein, 9 aa, synthetic construct
PAPGTAKLR

SEQ ID NO: 21131 - protein, 9 aa, synthetic construct
PAPGTAKLH

SEQ ID NO: 21132 - protein, 9 aa, synthetic construct
PAPGTAKVH

SEQ ID NO: 21133 - protein, 9 aa, synthetic construct
PAPGTIHLY

SEQ ID NO: 21134 - protein, 9 aa, synthetic construct
PAPGTIHLR

SEQ ID NO: 21135 - protein, 9 aa, synthetic construct
PAPGTIHLF

SEQ ID NO: 21136 - protein, 9 aa, synthetic construct
PAPGTIHVY

SEQ ID NO: 21137 - protein, 9 aa, synthetic construct
PAPGTIHVF

SEQ ID NO: 21138 - protein, 9 aa, synthetic construct
PLQGTVKVY

SEQ ID NO: 21139 - protein, 9 aa, synthetic construct
PAPGTIRLY

SEQ ID NO: 21140 - protein, 9 aa, synthetic construct
PAPGTIRLR

SEQ ID NO: 21141 - protein, 9 aa, synthetic construct
PAPGTIRLH

SEQ ID NO: 21142 - protein, 9 aa, synthetic construct
PAPGTIRLF

SEQ ID NO: 21143 - protein, 9 aa, synthetic construct
PAPGTIRVF

SEQ ID NO: 21144 - protein, 9 aa, synthetic construct
PAPGTIKLY

SEQ ID NO: 21145 - protein, 9 aa, synthetic construct
PAPGTIKLH

SEQ ID NO: 21146 - protein, 9 aa, synthetic construct
PAPGTIKLK

SEQ ID NO: 21147 - protein, 9 aa, synthetic construct
PAPGTIKLF

SEQ ID NO: 21148 - protein, 9 aa, synthetic construct
PAPGTIKVY

SEQ ID NO: 21149 - protein, 9 aa, synthetic construct
PAPGTIKVR

SEQ ID NO: 21150 - protein, 9 aa, synthetic construct
PAPGTIKVH

SEQ ID NO: 21151 - protein, 9 aa, synthetic construct
PAPGTIKVF

SEQ ID NO: 21152 - protein, 9 aa, synthetic construct
PLQGTVKVH

SEQ ID NO: 21153 - protein, 9 aa, synthetic construct
PAPGTGHLF

SEQ ID NO: 21154 - protein, 9 aa, synthetic construct
PAPGTGHVR

SEQ ID NO: 21155 - protein, 9 aa, synthetic construct
PAPGTGRLH

SEQ ID NO: 21156 - protein, 9 aa, synthetic construct
PAPGTGRLK

SEQ ID NO: 21157 - protein, 9 aa, synthetic construct
PAPGTGRVY

SEQ ID NO: 21158 - protein, 9 aa, synthetic construct
PAPGTGRVH

SEQ ID NO: 21159 - protein, 9 aa, synthetic construct
PLQGTVKVF

SEQ ID NO: 21160 - protein, 9 aa, synthetic construct
PAPGTGKVR

SEQ ID NO: 21161 - protein, 9 aa, synthetic construct
PAPGSVHVF

SEQ ID NO: 21162 - protein, 9 aa, synthetic construct
PLQGTLHLR

SEQ ID NO: 21163 - protein, 9 aa, synthetic construct
PAPGSVRLH

SEQ ID NO: 21164 - protein, 9 aa, synthetic construct
PAPGSVRLF

SEQ ID NO: 21165 - protein, 9 aa, synthetic construct
PAPGSVKLY

SEQ ID NO: 21166 - protein, 9 aa, synthetic construct
PAPGSLHLF

SEQ ID NO: 21167 - protein, 9 aa, synthetic construct
PAPGSLRLH

SEQ ID NO: 21168 - protein, 9 aa, synthetic construct
PAPGSLRVY

SEQ ID NO: 21169 - protein, 9 aa, synthetic construct
PAPGSLRVH

SEQ ID NO: 21170 - protein, 9 aa, synthetic construct
PAPGSLRVF

SEQ ID NO: 21171 - protein, 9 aa, synthetic construct
PAPGSLKVY

SEQ ID NO: 21172 - protein, 9 aa, synthetic construct
PLQGTLHVR

SEQ ID NO: 21173 - protein, 9 aa, synthetic construct
PLQGTLHVH

SEQ ID NO: 21174 - protein, 9 aa, synthetic construct
PAPGSARLR

SEQ ID NO: 21175 - protein, 9 aa, synthetic construct
PAPGSARLH

SEQ ID NO: 21176 - protein, 9 aa, synthetic construct
PAPGSARLK

SEQ ID NO: 21177 - protein, 9 aa, synthetic construct
PAPGSARLF

SEQ ID NO: 21178 - protein, 9 aa, synthetic construct
PAPGSARVK

SEQ ID NO: 21179 - protein, 9 aa, synthetic construct
PAPGSARVF

SEQ ID NO: 21180 - protein, 9 aa, synthetic construct
PAPGSAKLY

SEQ ID NO: 21181 - protein, 9 aa, synthetic construct
PAPGSAKLR

SEQ ID NO: 21182 - protein, 9 aa, synthetic construct
PAPGSAKLK

SEQ ID NO: 21183 - protein, 9 aa, synthetic construct
PAPGSAKVY

SEQ ID NO: 21184 - protein, 9 aa, synthetic construct
PAPGSAKVH

SEQ ID NO: 21185 - protein, 9 aa, synthetic construct
PAPGSIHLH

SEQ ID NO: 21186 - protein, 9 aa, synthetic construct
PAPGSIHLF

SEQ ID NO: 21187 - protein, 9 aa, synthetic construct
PAPGSIHVY

SEQ ID NO: 21188 - protein, 9 aa, synthetic construct
PAPGSIHVR

SEQ ID NO: 21189 - protein, 9 aa, synthetic construct
PLQGTLRLY

SEQ ID NO: 21190 - protein, 9 aa, synthetic construct
PAPGSIRLF

SEQ ID NO: 21191 - protein, 9 aa, synthetic construct
PAPGSIRVR

SEQ ID NO: 21192 - protein, 9 aa, synthetic construct
PAPGSIKLR

SEQ ID NO: 21193 - protein, 9 aa, synthetic construct
PAPGSIKLK

SEQ ID NO: 21194 - protein, 9 aa, synthetic construct
PAPGSIKVR

SEQ ID NO: 21195 - protein, 9 aa, synthetic construct
PAPGSIKVF

SEQ ID NO: 21196 - protein, 9 aa, synthetic construct
PLQGTLRLH

SEQ ID NO: 21197 - protein, 9 aa, synthetic construct
PAPGSGHLR

SEQ ID NO: 21198 - protein, 9 aa, synthetic construct
PAPGSGHLH

SEQ ID NO: 21199 - protein, 9 aa, synthetic construct
PAPGSGHLF

SEQ ID NO: 21200 - protein, 9 aa, synthetic construct
PAPGSGHVY

SEQ ID NO: 21201 - protein, 9 aa, synthetic construct
PAPGSGHVR

SEQ ID NO: 21202 - protein, 9 aa, synthetic construct
PAPGSGHVK

SEQ ID NO: 21203 - protein, 9 aa, synthetic construct
PAPGSGHVF

SEQ ID NO: 21204 - protein, 9 aa, synthetic construct
PAPGSGRLR

SEQ ID NO: 21205 - protein, 9 aa, synthetic construct
PAPGSGRLH

SEQ ID NO: 21206 - protein, 9 aa, synthetic construct
PAPGSGRLK

SEQ ID NO: 21207 - protein, 9 aa, synthetic construct
PAPGSGRLF

SEQ ID NO: 21208 - protein, 9 aa, synthetic construct
PAPGSGRVY

SEQ ID NO: 21209 - protein, 9 aa, synthetic construct
PAPGSGRVH

SEQ ID NO: 21210 - protein, 9 aa, synthetic construct
PAPGSGRVK

SEQ ID NO: 21211 - protein, 9 aa, synthetic construct
PAPGSGKLR

SEQ ID NO: 21212 - protein, 9 aa, synthetic construct
PAPGSGKLH

SEQ ID NO: 21213 - protein, 9 aa, synthetic construct
PAPGSGKLK

SEQ ID NO: 21214 - protein, 9 aa, synthetic construct
PAPGSGKLF

SEQ ID NO: 21215 - protein, 9 aa, synthetic construct
PAPGSGKVY

SEQ ID NO: 21216 - protein, 9 aa, synthetic construct
PAPGSGKVH

SEQ ID NO: 21217 - protein, 9 aa, synthetic construct
PAPGSGKVK

SEQ ID NO: 21218 - protein, 9 aa, synthetic construct
PAPGVVHLY

SEQ ID NO: 21219 - protein, 9 aa, synthetic construct
PAPGVVHLR

SEQ ID NO: 21220 - protein, 9 aa, synthetic construct
PAPGVVHLF

SEQ ID NO: 21221 - protein, 9 aa, synthetic construct
PAPGVVHVR

SEQ ID NO: 21222 - protein, 9 aa, synthetic construct
PAPGVVHVF

SEQ ID NO: 21223 - protein, 9 aa, synthetic construct
PAPGVVRLY

SEQ ID NO: 21224 - protein, 9 aa, synthetic construct
PAPGVVRLH

SEQ ID NO: 21225 - protein, 9 aa, synthetic construct
PAPGVVRLF

SEQ ID NO: 21226 - protein, 9 aa, synthetic construct
PAPGVVRVY

SEQ ID NO: 21227 - protein, 9 aa, synthetic construct
PAPGVVRVF

SEQ ID NO: 21228 - protein, 9 aa, synthetic construct
PAPGVVKLY

SEQ ID NO: 21229 - protein, 9 aa, synthetic construct
PAPGVVKLH

SEQ ID NO: 21230 - protein, 9 aa, synthetic construct
PAPGVVKVR

SEQ ID NO: 21231 - protein, 9 aa, synthetic construct
PAPGVVKVK

SEQ ID NO: 21232 - protein, 9 aa, synthetic construct
PAPGVVKVF

SEQ ID NO: 21233 - protein, 9 aa, synthetic construct
PAPGVLHLY

SEQ ID NO: 21234 - protein, 9 aa, synthetic construct
PAPGVLHLH

SEQ ID NO: 21235 - protein, 9 aa, synthetic construct
PAPGVLHVR

SEQ ID NO: 21236 - protein, 9 aa, synthetic construct
PAPGVLHVH

SEQ ID NO: 21237 - protein, 9 aa, synthetic construct
PAPGVLRLK

SEQ ID NO: 21238 - protein, 9 aa, synthetic construct
PAPGVLRVY

SEQ ID NO: 21239 - protein, 9 aa, synthetic construct
PAPGVLRVR

SEQ ID NO: 21240 - protein, 9 aa, synthetic construct
PAPGVLKLY

SEQ ID NO: 21241 - protein, 9 aa, synthetic construct
PAPGVLKLF

SEQ ID NO: 21242 - protein, 9 aa, synthetic construct
PAPGVLKVY

SEQ ID NO: 21243 - protein, 9 aa, synthetic construct
PAPGVLKVH

SEQ ID NO: 21244 - protein, 9 aa, synthetic construct
PAPGVLKVF

SEQ ID NO: 21245 - protein, 9 aa, synthetic construct
PLQGTLKLR

SEQ ID NO: 21246 - protein, 9 aa, synthetic construct
PAPGVAHLY

SEQ ID NO: 21247 - protein, 9 aa, synthetic construct
PAPGVAHLR

SEQ ID NO: 21248 - protein, 9 aa, synthetic construct
PAPGVAHLK

SEQ ID NO: 21249 - protein, 9 aa, synthetic construct
PAPGVAHLF

SEQ ID NO: 21250 - protein, 9 aa, synthetic construct
PAPGVAHVY

SEQ ID NO: 21251 - protein, 9 aa, synthetic construct
PAPGVAHVH

SEQ ID NO: 21252 - protein, 9 aa, synthetic construct
PAPGVAHVF

SEQ ID NO: 21253 - protein, 9 aa, synthetic construct
PLQGTLKLH

SEQ ID NO: 21254 - protein, 9 aa, synthetic construct
PAPGVARLH

SEQ ID NO: 21255 - protein, 9 aa, synthetic construct
PAPGVARLF

SEQ ID NO: 21256 - protein, 9 aa, synthetic construct
PAPGVARVY

SEQ ID NO: 21257 - protein, 9 aa, synthetic construct
PAPGVARVR

SEQ ID NO: 21258 - protein, 9 aa, synthetic construct
PAPGVARVH

SEQ ID NO: 21259 - protein, 9 aa, synthetic construct
PAPGVARVK

SEQ ID NO: 21260 - protein, 9 aa, synthetic construct
PAPGVARVF

SEQ ID NO: 21261 - protein, 9 aa, synthetic construct
PAPGVAKLF

SEQ ID NO: 21262 - protein, 9 aa, synthetic construct
PAPGVAKVY

SEQ ID NO: 21263 - protein, 9 aa, synthetic construct
PAPGVAKVR

SEQ ID NO: 21264 - protein, 9 aa, synthetic construct
PAPGVAKVH

SEQ ID NO: 21265 - protein, 9 aa, synthetic construct
PAPGVAKVF

SEQ ID NO: 21266 - protein, 9 aa, synthetic construct
PAPGVIHLR

SEQ ID NO: 21267 - protein, 9 aa, synthetic construct
PAPGVIHLH

SEQ ID NO: 21268 - protein, 9 aa, synthetic construct
PAPGVIHLF

SEQ ID NO: 21269 - protein, 9 aa, synthetic construct
PAPGVIHVR

SEQ ID NO: 21270 - protein, 9 aa, synthetic construct
PAPGVIHVF

SEQ ID NO: 21271 - protein, 9 aa, synthetic construct
PAPGVIRLY

SEQ ID NO: 21272 - protein, 9 aa, synthetic construct
PAPGVIRVY

SEQ ID NO: 21273 - protein, 9 aa, synthetic construct
PAPGVIRVH

SEQ ID NO: 21274 - protein, 9 aa, synthetic construct
PAPGVIKLY

SEQ ID NO: 21275 - protein, 9 aa, synthetic construct
PAPGVIKLR

SEQ ID NO: 21276 - protein, 9 aa, synthetic construct
PAPGVIKLH

SEQ ID NO: 21277 - protein, 9 aa, synthetic construct
PAPGVIKLF

SEQ ID NO: 21278 - protein, 9 aa, synthetic construct
PAPGVIKVY

SEQ ID NO: 21279 - protein, 9 aa, synthetic construct
PAPGVIKVH

SEQ ID NO: 21280 - protein, 9 aa, synthetic construct
PLQGTLKVH

SEQ ID NO: 21281 - protein, 9 aa, synthetic construct
PAPGVGHLY

SEQ ID NO: 21282 - protein, 9 aa, synthetic construct
PAPGVGHLF

SEQ ID NO: 21283 - protein, 9 aa, synthetic construct
PAPGVGHVY

SEQ ID NO: 21284 - protein, 9 aa, synthetic construct
PAPGVGHVK

SEQ ID NO: 21285 - protein, 9 aa, synthetic construct
PAPGVGRLY

SEQ ID NO: 21286 - protein, 9 aa, synthetic construct
PAPGVGRLH

SEQ ID NO: 21287 - protein, 9 aa, synthetic construct
PAPGVGRLF

SEQ ID NO: 21288 - protein, 9 aa, synthetic construct
PAPGVGRVK

SEQ ID NO: 21289 - protein, 9 aa, synthetic construct
PAPGVGRVF

SEQ ID NO: 21290 - protein, 9 aa, synthetic construct
PAPGVGKLY

SEQ ID NO: 21291 - protein, 9 aa, synthetic construct
PAPGVGKLR

SEQ ID NO: 21292 - protein, 9 aa, synthetic construct
PAPGVGKLH

SEQ ID NO: 21293 - protein, 9 aa, synthetic construct
PAPGVGKVR

SEQ ID NO: 21294 - protein, 9 aa, synthetic construct
PAPGVGKVH

SEQ ID NO: 21295 - protein, 9 aa, synthetic construct
PAPGVGKVF

SEQ ID NO: 21296 - protein, 9 aa, synthetic construct
PAPGGVRLH

SEQ ID NO: 21297 - protein, 9 aa, synthetic construct
PAPGGVRLK

SEQ ID NO: 21298 - protein, 9 aa, synthetic construct
PAPGGVRVY

SEQ ID NO: 21299 - protein, 9 aa, synthetic construct
PAPGGVRVH

SEQ ID NO: 21300 - protein, 9 aa, synthetic construct
PAPGGVRVF

SEQ ID NO: 21301 - protein, 9 aa, synthetic construct
PAPGGVKLH

SEQ ID NO: 21302 - protein, 9 aa, synthetic construct
PAPGGVKVK

SEQ ID NO: 21303 - protein, 9 aa, synthetic construct
PAPGGLHLY

SEQ ID NO: 21304 - protein, 9 aa, synthetic construct
PAPGGLHLR

SEQ ID NO: 21305 - protein, 9 aa, synthetic construct
PAPGGLHLH

SEQ ID NO: 21306 - protein, 9 aa, synthetic construct
PAPGGLHLF

SEQ ID NO: 21307 - protein, 9 aa, synthetic construct
PAPGGLHVY

SEQ ID NO: 21308 - protein, 9 aa, synthetic construct
PAPGGLHVR

SEQ ID NO: 21309 - protein, 9 aa, synthetic construct
PAPGGLHVH

SEQ ID NO: 21310 - protein, 9 aa, synthetic construct
PAPGGLHVF

SEQ ID NO: 21311 - protein, 9 aa, synthetic construct
PAPGGLRLY

SEQ ID NO: 21312 - protein, 9 aa, synthetic construct
PAPGGLRLH

SEQ ID NO: 21313 - protein, 9 aa, synthetic construct
PAPGGLRLK

SEQ ID NO: 21314 - protein, 9 aa, synthetic construct
PAPGGLRLF

SEQ ID NO: 21315 - protein, 9 aa, synthetic construct
PAPGGLRVY

SEQ ID NO: 21316 - protein, 9 aa, synthetic construct
PAPGGLRVH

SEQ ID NO: 21317 - protein, 9 aa, synthetic construct
PAPGGLRVK

SEQ ID NO: 21318 - protein, 9 aa, synthetic construct
PAPGGLRVF

SEQ ID NO: 21319 - protein, 9 aa, synthetic construct
PAPGGLKLY

SEQ ID NO: 21320 - protein, 9 aa, synthetic construct
PAPGGLKLH

SEQ ID NO: 21321 - protein, 9 aa, synthetic construct
PAPGGLKLK

SEQ ID NO: 21322 - protein, 9 aa, synthetic construct
PAPGGLKVY

SEQ ID NO: 21323 - protein, 9 aa, synthetic construct
PAPGGLKVH

SEQ ID NO: 21324 - protein, 9 aa, synthetic construct
PAPGGAHLF

SEQ ID NO: 21325 - protein, 9 aa, synthetic construct
PAPGGAHVR

SEQ ID NO: 21326 - protein, 9 aa, synthetic construct
PAPGGAHVK

SEQ ID NO: 21327 - protein, 9 aa, synthetic construct
PAPGGARLY

SEQ ID NO: 21328 - protein, 9 aa, synthetic construct
PAPGGARLF

SEQ ID NO: 21329 - protein, 9 aa, synthetic construct
PAPGGAKLR

SEQ ID NO: 21330 - protein, 9 aa, synthetic construct
PAPGGAKVY

SEQ ID NO: 21331 - protein, 9 aa, synthetic construct
PAPGGAKVF

SEQ ID NO: 21332 - protein, 9 aa, synthetic construct
PAPGGIHLY

SEQ ID NO: 21333 - protein, 9 aa, synthetic construct
PAPGGIHLR

SEQ ID NO: 21334 - protein, 9 aa, synthetic construct
PAPGGIHLH

SEQ ID NO: 21335 - protein, 9 aa, synthetic construct
PAPGGIHLF

SEQ ID NO: 21336 - protein, 9 aa, synthetic construct
PAPGGIHVY

SEQ ID NO: 21337 - protein, 9 aa, synthetic construct
PAPGGIHVF

SEQ ID NO: 21338 - protein, 9 aa, synthetic construct
PAPGGIRLY

SEQ ID NO: 21339 - protein, 9 aa, synthetic construct
PAPGGIRLH

SEQ ID NO: 21340 - protein, 9 aa, synthetic construct
PAPGGIRLF

SEQ ID NO: 21341 - protein, 9 aa, synthetic construct
PAPGGIRVH

SEQ ID NO: 21342 - protein, 9 aa, synthetic construct
PAPGGIKLY

SEQ ID NO: 21343 - protein, 9 aa, synthetic construct
PAPGGIKLR

SEQ ID NO: 21344 - protein, 9 aa, synthetic construct
PAPGGIKLF

SEQ ID NO: 21345 - protein, 9 aa, synthetic construct
PAPGGIKVY

SEQ ID NO: 21346 - protein, 9 aa, synthetic construct
PAPGGIKVR

SEQ ID NO: 21347 - protein, 9 aa, synthetic construct
PAPGGIKVH

SEQ ID NO: 21348 - protein, 9 aa, synthetic construct
PAPGGIKVF

SEQ ID NO: 21349 - protein, 9 aa, synthetic construct
PLQGTARLH

SEQ ID NO: 21350 - protein, 9 aa, synthetic construct
PAPGGGHLR

SEQ ID NO: 21351 - protein, 9 aa, synthetic construct
PAPGGGHLK

SEQ ID NO: 21352 - protein, 9 aa, synthetic construct
PAPGGGHLF

SEQ ID NO: 21353 - protein, 9 aa, synthetic construct
PAPGGGHVY

SEQ ID NO: 21354 - protein, 9 aa, synthetic construct
PAPGGGHVH

SEQ ID NO: 21355 - protein, 9 aa, synthetic construct
PAPGGGHVK

SEQ ID NO: 21356 - protein, 9 aa, synthetic construct
PAPGGGHVF

SEQ ID NO: 21357 - protein, 9 aa, synthetic construct
PAPGGGRLH

SEQ ID NO: 21358 - protein, 9 aa, synthetic construct
PAPGGGRVR

SEQ ID NO: 21359 - protein, 9 aa, synthetic construct
PAPGGGRVK

SEQ ID NO: 21360 - protein, 9 aa, synthetic construct
PLQGTARLF

SEQ ID NO: 21361 - protein, 9 aa, synthetic construct
PAPGGGKLY

SEQ ID NO: 21362 - protein, 9 aa, synthetic construct
PAPGGGKLH

SEQ ID NO: 21363 - protein, 9 aa, synthetic construct
PAPGGGKLF

SEQ ID NO: 21364 - protein, 9 aa, synthetic construct
PAPGGGKVY

SEQ ID NO: 21365 - protein, 9 aa, synthetic construct
PAPGGGKVH

SEQ ID NO: 21366 - protein, 9 aa, synthetic construct
PAPGGGKVF

SEQ ID NO: 21367 - protein, 9 aa, synthetic construct
PAPAAVHLR

SEQ ID NO: 21368 - protein, 9 aa, synthetic construct
PAPAAVHLF

SEQ ID NO: 21369 - protein, 9 aa, synthetic construct
PAPAAVHVY

SEQ ID NO: 21370 - protein, 9 aa, synthetic construct
PAPAAVHVR

SEQ ID NO: 21371 - protein, 9 aa, synthetic construct
PAPAAVHVK

SEQ ID NO: 21372 - protein, 9 aa, synthetic construct
PAPAAVHVF

SEQ ID NO: 21373 - protein, 9 aa, synthetic construct
PAPAAVRLY

SEQ ID NO: 21374 - protein, 9 aa, synthetic construct
PAPAAVRLH

SEQ ID NO: 21375 - protein, 9 aa, synthetic construct
PAPAAVRVY

SEQ ID NO: 21376 - protein, 9 aa, synthetic construct
PAPAAVRVH

SEQ ID NO: 21377 - protein, 9 aa, synthetic construct
PLQGTARVH

SEQ ID NO: 21378 - protein, 9 aa, synthetic construct
PAPAAVKLR

SEQ ID NO: 21379 - protein, 9 aa, synthetic construct
PAPAAVKLH

SEQ ID NO: 21380 - protein, 9 aa, synthetic construct
PAPAAVKLF

SEQ ID NO: 21381 - protein, 9 aa, synthetic construct
PAPAALHLH

SEQ ID NO: 21382 - protein, 9 aa, synthetic construct
PAPAALHVR

SEQ ID NO: 21383 - protein, 9 aa, synthetic construct
PAPAALHVF

SEQ ID NO: 21384 - protein, 9 aa, synthetic construct
PAPAALRLF

SEQ ID NO: 21385 - protein, 9 aa, synthetic construct
PAPAALKLY

SEQ ID NO: 21386 - protein, 9 aa, synthetic construct
PAPAALKVY

SEQ ID NO: 21387 - protein, 9 aa, synthetic construct
PAPAALKVF

SEQ ID NO: 21388 - protein, 9 aa, synthetic construct
PLQGTAKLR

SEQ ID NO: 21389 - protein, 9 aa, synthetic construct
PAPAAAHLF

SEQ ID NO: 21390 - protein, 9 aa, synthetic construct
PAPAAARLY

SEQ ID NO: 21391 - protein, 9 aa, synthetic construct
PAPAAARLF

SEQ ID NO: 21392 - protein, 9 aa, synthetic construct
PAPAAARVY

SEQ ID NO: 21393 - protein, 9 aa, synthetic construct
PAPAAARVR

SEQ ID NO: 21394 - protein, 9 aa, synthetic construct
PAPAAAKVR

SEQ ID NO: 21395 - protein, 9 aa, synthetic construct
PAPAAIHLY

SEQ ID NO: 21396 - protein, 9 aa, synthetic construct
PAPAAIHLR

SEQ ID NO: 21397 - protein, 9 aa, synthetic construct
PAPAAIHVY

SEQ ID NO: 21398 - protein, 9 aa, synthetic construct
PAPAAIHVH

SEQ ID NO: 21399 - protein, 9 aa, synthetic construct
PAPAAIRLF

SEQ ID NO: 21400 - protein, 9 aa, synthetic construct
PAPAAIRVK

SEQ ID NO: 21401 - protein, 9 aa, synthetic construct
PAPAAIKLK

SEQ ID NO: 21402 - protein, 9 aa, synthetic construct
PLQGTAKVH

SEQ ID NO: 21403 - protein, 9 aa, synthetic construct
PLQGTAKVF

SEQ ID NO: 21404 - protein, 9 aa, synthetic construct
PAPAAGKLK

SEQ ID NO: 21405 - protein, 9 aa, synthetic construct
PAPATVHLR

SEQ ID NO: 21406 - protein, 9 aa, synthetic construct
PAPATVHLF

SEQ ID NO: 21407 - protein, 9 aa, synthetic construct
PAPATVHVY

SEQ ID NO: 21408 - protein, 9 aa, synthetic construct
PAPATVHVR

SEQ ID NO: 21409 - protein, 9 aa, synthetic construct
PAPATVHVK

SEQ ID NO: 21410 - protein, 9 aa, synthetic construct
PAPATVHVF

SEQ ID NO: 21411 - protein, 9 aa, synthetic construct
PAPATVRLF

SEQ ID NO: 21412 - protein, 9 aa, synthetic construct
PAPATVRVY

SEQ ID NO: 21413 - protein, 9 aa, synthetic construct
PAPATVRVF

SEQ ID NO: 21414 - protein, 9 aa, synthetic construct
PAPATVKLR

SEQ ID NO: 21415 - protein, 9 aa, synthetic construct
PAPATVKVH

SEQ ID NO: 21416 - protein, 9 aa, synthetic construct
PAPATVKVF

SEQ ID NO: 21417 - protein, 9 aa, synthetic construct
PAPATLHLR

SEQ ID NO: 21418 - protein, 9 aa, synthetic construct
PAPATLHLH

SEQ ID NO: 21419 - protein, 9 aa, synthetic construct
PAPATLHLF

SEQ ID NO: 21420 - protein, 9 aa, synthetic construct
PAPATLHVY

SEQ ID NO: 21421 - protein, 9 aa, synthetic construct
PAPATLHVF

SEQ ID NO: 21422 - protein, 9 aa, synthetic construct
PLQGTIHLF

SEQ ID NO: 21423 - protein, 9 aa, synthetic construct
PAPATLRLY

SEQ ID NO: 21424 - protein, 9 aa, synthetic construct
PAPATLRLH

SEQ ID NO: 21425 - protein, 9 aa, synthetic construct
PAPATLRLK

SEQ ID NO: 21426 - protein, 9 aa, synthetic construct
PAPATLRVY

SEQ ID NO: 21427 - protein, 9 aa, synthetic construct
PAPATLKLR

SEQ ID NO: 21428 - protein, 9 aa, synthetic construct
PAPATLKLH

SEQ ID NO: 21429 - protein, 9 aa, synthetic construct
PAPATLKVY

SEQ ID NO: 21430 - protein, 9 aa, synthetic construct
PAPATLKVH

SEQ ID NO: 21431 - protein, 9 aa, synthetic construct
PAPATLKVF

SEQ ID NO: 21432 - protein, 9 aa, synthetic construct
PAPATAHVF

SEQ ID NO: 21433 - protein, 9 aa, synthetic construct
PAPATARLH

SEQ ID NO: 21434 - protein, 9 aa, synthetic construct
PAPATARLF

SEQ ID NO: 21435 - protein, 9 aa, synthetic construct
PAPATARVR

SEQ ID NO: 21436 - protein, 9 aa, synthetic construct
PAPATAKLR

SEQ ID NO: 21437 - protein, 9 aa, synthetic construct
PAPATIHLR

SEQ ID NO: 21438 - protein, 9 aa, synthetic construct
PAPATIHLF

SEQ ID NO: 21439 - protein, 9 aa, synthetic construct
PAPATIHVY

SEQ ID NO: 21440 - protein, 9 aa, synthetic construct
PAPATIHVR

SEQ ID NO: 21441 - protein, 9 aa, synthetic construct
PAPATIHVF

SEQ ID NO: 21442 - protein, 9 aa, synthetic construct
PAPATIRLY

SEQ ID NO: 21443 - protein, 9 aa, synthetic construct
PAPATIRLR

SEQ ID NO: 21444 - protein, 9 aa, synthetic construct
PAPATIRLH

SEQ ID NO: 21445 - protein, 9 aa, synthetic construct
PAPATIRLF

SEQ ID NO: 21446 - protein, 9 aa, synthetic construct
PAPATIRVF

SEQ ID NO: 21447 - protein, 9 aa, synthetic construct
PAPATIKLY

SEQ ID NO: 21448 - protein, 9 aa, synthetic construct
PAPATIKLR

SEQ ID NO: 21449 - protein, 9 aa, synthetic construct
PAPATIKLK

SEQ ID NO: 21450 - protein, 9 aa, synthetic construct
PAPATIKVH

SEQ ID NO: 21451 - protein, 9 aa, synthetic construct
PAPATIKVF

SEQ ID NO: 21452 - protein, 9 aa, synthetic construct
PAPATGRLH

SEQ ID NO: 21453 - protein, 9 aa, synthetic construct
PAPATGRLK

SEQ ID NO: 21454 - protein, 9 aa, synthetic construct
PAPATGRLF

SEQ ID NO: 21455 - protein, 9 aa, synthetic construct
PAPATGRVY

SEQ ID NO: 21456 - protein, 9 aa, synthetic construct
PAPATGRVR

SEQ ID NO: 21457 - protein, 9 aa, synthetic construct
PAPATGRVH

SEQ ID NO: 21458 - protein, 9 aa, synthetic construct
PAPATGRVK

SEQ ID NO: 21459 - protein, 9 aa, synthetic construct
PLQGTIRLF

SEQ ID NO: 21460 - protein, 9 aa, synthetic construct
PAPATGKLR

SEQ ID NO: 21461 - protein, 9 aa, synthetic construct
PLQGTIRVY

SEQ ID NO: 21462 - protein, 9 aa, synthetic construct
PAPASVRLY

SEQ ID NO: 21463 - protein, 9 aa, synthetic construct
PAPASVRVK

SEQ ID NO: 21464 - protein, 9 aa, synthetic construct
PAPASLHLH

SEQ ID NO: 21465 - protein, 9 aa, synthetic construct
PAPASLHLK

SEQ ID NO: 21466 - protein, 9 aa, synthetic construct
PAPASLHVY

SEQ ID NO: 21467 - protein, 9 aa, synthetic construct
PAPASLHVR

SEQ ID NO: 21468 - protein, 9 aa, synthetic construct
PAPASLHVH

SEQ ID NO: 21469 - protein, 9 aa, synthetic construct
PAPASLHVF

SEQ ID NO: 21470 - protein, 9 aa, synthetic construct
PLQGTIRVF

SEQ ID NO: 21471 - protein, 9 aa, synthetic construct
PAPASLRLH

SEQ ID NO: 21472 - protein, 9 aa, synthetic construct
PAPASLRVK

SEQ ID NO: 21473 - protein, 9 aa, synthetic construct
PAPASLRVF

SEQ ID NO: 21474 - protein, 9 aa, synthetic construct
PAPASLKLY

SEQ ID NO: 21475 - protein, 9 aa, synthetic construct
PAPASLKVY

SEQ ID NO: 21476 - protein, 9 aa, synthetic construct
PAPASAHLH

SEQ ID NO: 21477 - protein, 9 aa, synthetic construct
PAPASAHVK

SEQ ID NO: 21478 - protein, 9 aa, synthetic construct
PAPASARLY

SEQ ID NO: 21479 - protein, 9 aa, synthetic construct
PAPASARLF

SEQ ID NO: 21480 - protein, 9 aa, synthetic construct
PAPASARVF

SEQ ID NO: 21481 - protein, 9 aa, synthetic construct
PAPASAKLH

SEQ ID NO: 21482 - protein, 9 aa, synthetic construct
PAPASIHVR

SEQ ID NO: 21483 - protein, 9 aa, synthetic construct
PAPASIHVK

SEQ ID NO: 21484 - protein, 9 aa, synthetic construct
PAPASIRLY

SEQ ID NO: 21485 - protein, 9 aa, synthetic construct
PAPASIRLR

SEQ ID NO: 21486 - protein, 9 aa, synthetic construct
PAPASIRLH

SEQ ID NO: 21487 - protein, 9 aa, synthetic construct
PAPASIRVH

SEQ ID NO: 21488 - protein, 9 aa, synthetic construct
PAPASIRVF

SEQ ID NO: 21489 - protein, 9 aa, synthetic construct
PAPASIKLK

SEQ ID NO: 21490 - protein, 9 aa, synthetic construct
PAPASIKVY

SEQ ID NO: 21491 - protein, 9 aa, synthetic construct
PAPASGHVR

SEQ ID NO: 21492 - protein, 9 aa, synthetic construct
PAPASGRLY

SEQ ID NO: 21493 - protein, 9 aa, synthetic construct
PAPASGRLR

SEQ ID NO: 21494 - protein, 9 aa, synthetic construct
PAPASGRLH

SEQ ID NO: 21495 - protein, 9 aa, synthetic construct
PAPASGRVY

SEQ ID NO: 21496 - protein, 9 aa, synthetic construct
PAPASGRVK

SEQ ID NO: 21497 - protein, 9 aa, synthetic construct
PLQGTIKVF

SEQ ID NO: 21498 - protein, 9 aa, synthetic construct
PAPASGKLH

SEQ ID NO: 21499 - protein, 9 aa, synthetic construct
PAPASGKVK

SEQ ID NO: 21500 - protein, 9 aa, synthetic construct
PAPAVVHVY

SEQ ID NO: 21501 - protein, 9 aa, synthetic construct
PAPAVVHVR

SEQ ID NO: 21502 - protein, 9 aa, synthetic construct
PAPAVVHVF

SEQ ID NO: 21503 - protein, 9 aa, synthetic construct
PAPAVVRLY

SEQ ID NO: 21504 - protein, 9 aa, synthetic construct
PAPAVVRLH

SEQ ID NO: 21505 - protein, 9 aa, synthetic construct
PAPAVVRVF

SEQ ID NO: 21506 - protein, 9 aa, synthetic construct
PAPAVVKLR

SEQ ID NO: 21507 - protein, 9 aa, synthetic construct
PAPAVVKVH

SEQ ID NO: 21508 - protein, 9 aa, synthetic construct
PAPAVVKVK

SEQ ID NO: 21509 - protein, 9 aa, synthetic construct
PAPAVLRVK

SEQ ID NO: 21510 - protein, 9 aa, synthetic construct
PLQGTGHVY

SEQ ID NO: 21511 - protein, 9 aa, synthetic construct
PAPAVLKLF

SEQ ID NO: 21512 - protein, 9 aa, synthetic construct
PAPAVLKVY

SEQ ID NO: 21513 - protein, 9 aa, synthetic construct
PAPAVLKVH

SEQ ID NO: 21514 - protein, 9 aa, synthetic construct
PAPAVAHLH

SEQ ID NO: 21515 - protein, 9 aa, synthetic construct
PAPAVAHLK

SEQ ID NO: 21516 - protein, 9 aa, synthetic construct
PAPAVAHVY

SEQ ID NO: 21517 - protein, 9 aa, synthetic construct
PAPAVAHVF

SEQ ID NO: 21518 - protein, 9 aa, synthetic construct
PAPAVARLH

SEQ ID NO: 21519 - protein, 9 aa, synthetic construct
PAPAVARLF

SEQ ID NO: 21520 - protein, 9 aa, synthetic construct
PAPAVARVY

SEQ ID NO: 21521 - protein, 9 aa, synthetic construct
PAPAVARVH

SEQ ID NO: 21522 - protein, 9 aa, synthetic construct
PAPAVAKLY

SEQ ID NO: 21523 - protein, 9 aa, synthetic construct
PAPAVAKLK

SEQ ID NO: 21524 - protein, 9 aa, synthetic construct
PAPAVAKVR

SEQ ID NO: 21525 - protein, 9 aa, synthetic construct
PAPAVAKVH

SEQ ID NO: 21526 - protein, 9 aa, synthetic construct
PAPAVAKVF

SEQ ID NO: 21527 - protein, 9 aa, synthetic construct
PAPAVIHLY

SEQ ID NO: 21528 - protein, 9 aa, synthetic construct
PAPAVIHLR

SEQ ID NO: 21529 - protein, 9 aa, synthetic construct
PAPAVIHLK

SEQ ID NO: 21530 - protein, 9 aa, synthetic construct
PAPAVIHLF

SEQ ID NO: 21531 - protein, 9 aa, synthetic construct
PAPAVIHVY

SEQ ID NO: 21532 - protein, 9 aa, synthetic construct
PAPAVIHVR

SEQ ID NO: 21533 - protein, 9 aa, synthetic construct
PAPAVIHVH

SEQ ID NO: 21534 - protein, 9 aa, synthetic construct
PAPAVIHVK

SEQ ID NO: 21535 - protein, 9 aa, synthetic construct
PAPAVIRLR

SEQ ID NO: 21536 - protein, 9 aa, synthetic construct
PAPAVIRVH

SEQ ID NO: 21537 - protein, 9 aa, synthetic construct
PAPAVIRVK

SEQ ID NO: 21538 - protein, 9 aa, synthetic construct
PAPAVIKLY

SEQ ID NO: 21539 - protein, 9 aa, synthetic construct
PAPAVIKLH

SEQ ID NO: 21540 - protein, 9 aa, synthetic construct
PAPAVIKLF

SEQ ID NO: 21541 - protein, 9 aa, synthetic construct
PAPAVIKVY

SEQ ID NO: 21542 - protein, 9 aa, synthetic construct
PAPAVGHLY

SEQ ID NO: 21543 - protein, 9 aa, synthetic construct
PAPAVGHLR

SEQ ID NO: 21544 - protein, 9 aa, synthetic construct
PAPAVGHLK

SEQ ID NO: 21545 - protein, 9 aa, synthetic construct
PAPAVGHVR

SEQ ID NO: 21546 - protein, 9 aa, synthetic construct
PAPAVGHVK

SEQ ID NO: 21547 - protein, 9 aa, synthetic construct
PAPAVGHVF

SEQ ID NO: 21548 - protein, 9 aa, synthetic construct
PAPAVGRLF

SEQ ID NO: 21549 - protein, 9 aa, synthetic construct
PAPAVGRVY

SEQ ID NO: 21550 - protein, 9 aa, synthetic construct
PAPAVGRVK

SEQ ID NO: 21551 - protein, 9 aa, synthetic construct
PAPAVGRVF

SEQ ID NO: 21552 - protein, 9 aa, synthetic construct
PAPAVGKLH

SEQ ID NO: 21553 - protein, 9 aa, synthetic construct
PAPAVGKVY

SEQ ID NO: 21554 - protein, 9 aa, synthetic construct
PAPAVGKVR

SEQ ID NO: 21555 - protein, 9 aa, synthetic construct
PAPAGVHLY

SEQ ID NO: 21556 - protein, 9 aa, synthetic construct
PAPAGVHLF

SEQ ID NO: 21557 - protein, 9 aa, synthetic construct
PAPAGVHVY

SEQ ID NO: 21558 - protein, 9 aa, synthetic construct
PAPAGVHVR

SEQ ID NO: 21559 - protein, 9 aa, synthetic construct
PAPAGVHVF

SEQ ID NO: 21560 - protein, 9 aa, synthetic construct
PAPAGVRLY

SEQ ID NO: 21561 - protein, 9 aa, synthetic construct
PAPAGVRVY

SEQ ID NO: 21562 - protein, 9 aa, synthetic construct
PAPAGVRVF

SEQ ID NO: 21563 - protein, 9 aa, synthetic construct
PAPAGVKVY

SEQ ID NO: 21564 - protein, 9 aa, synthetic construct
PAPAGVKVH

SEQ ID NO: 21565 - protein, 9 aa, synthetic construct
PAPAGVKVK

SEQ ID NO: 21566 - protein, 9 aa, synthetic construct
PLQGTGRVF

SEQ ID NO: 21567 - protein, 9 aa, synthetic construct
PAPAGLRLF

SEQ ID NO: 21568 - protein, 9 aa, synthetic construct
PAPAGLRVF

SEQ ID NO: 21569 - protein, 9 aa, synthetic construct
PAPAGLKVF

SEQ ID NO: 21570 - protein, 9 aa, synthetic construct
PAPAGAHLY

SEQ ID NO: 21571 - protein, 9 aa, synthetic construct
PAPAGAHLR

SEQ ID NO: 21572 - protein, 9 aa, synthetic construct
PAPAGAHLF

SEQ ID NO: 21573 - protein, 9 aa, synthetic construct
PAPAGAHVR

SEQ ID NO: 21574 - protein, 9 aa, synthetic construct
PAPAGARLF

SEQ ID NO: 21575 - protein, 9 aa, synthetic construct
PAPAGAKVR

SEQ ID NO: 21576 - protein, 9 aa, synthetic construct
PAPAGAKVH

SEQ ID NO: 21577 - protein, 9 aa, synthetic construct
PAPAGIHLR

SEQ ID NO: 21578 - protein, 9 aa, synthetic construct
PAPAGIHLK

SEQ ID NO: 21579 - protein, 9 aa, synthetic construct
PAPAGIHVF

SEQ ID NO: 21580 - protein, 9 aa, synthetic construct
PLQGTGKVY

SEQ ID NO: 21581 - protein, 9 aa, synthetic construct
PAPAGIRLH

SEQ ID NO: 21582 - protein, 9 aa, synthetic construct
PAPAGIRLK

SEQ ID NO: 21583 - protein, 9 aa, synthetic construct
PAPAGIRLF

SEQ ID NO: 21584 - protein, 9 aa, synthetic construct
PAPAGIRVH

SEQ ID NO: 21585 - protein, 9 aa, synthetic construct
PAPAGIKLY

SEQ ID NO: 21586 - protein, 9 aa, synthetic construct
PAPAGIKVH

SEQ ID NO: 21587 - protein, 9 aa, synthetic construct
PAPAGGHLR

SEQ ID NO: 21588 - protein, 9 aa, synthetic construct
PAPAGGHLK

SEQ ID NO: 21589 - protein, 9 aa, synthetic construct
PAPAGGHLF

SEQ ID NO: 21590 - protein, 9 aa, synthetic construct
PAPAGGHVK

SEQ ID NO: 21591 - protein, 9 aa, synthetic construct
PAPAGGHVF

SEQ ID NO: 21592 - protein, 9 aa, synthetic construct
PAPAGGRLY

SEQ ID NO: 21593 - protein, 9 aa, synthetic construct
PAPAGGRLH

SEQ ID NO: 21594 - protein, 9 aa, synthetic construct
PAPAGGRVY

SEQ ID NO: 21595 - protein, 9 aa, synthetic construct
PAPAGGRVR

SEQ ID NO: 21596 - protein, 9 aa, synthetic construct
PAPAGGRVH

SEQ ID NO: 21597 - protein, 9 aa, synthetic construct
PAPAGGRVF

SEQ ID NO: 21598 - protein, 9 aa, synthetic construct
PAPAGGKLR

SEQ ID NO: 21599 - protein, 9 aa, synthetic construct
PAPAGGKVY

SEQ ID NO: 21600 - protein, 9 aa, synthetic construct
PAPAGGKVH

SEQ ID NO: 21601 - protein, 9 aa, synthetic construct
PAPAGGKVK

SEQ ID NO: 21602 - protein, 9 aa, synthetic construct
PLQGSVHLY

SEQ ID NO: 21603 - protein, 9 aa, synthetic construct
PVNGAVHLF

SEQ ID NO: 21604 - protein, 9 aa, synthetic construct
PLQGSVHLR

SEQ ID NO: 21605 - protein, 9 aa, synthetic construct
PVNGAVRLH

SEQ ID NO: 21606 - protein, 9 aa, synthetic construct
PVNGAVRVY

SEQ ID NO: 21607 - protein, 9 aa, synthetic construct
PLQGSVHLH

SEQ ID NO: 21608 - protein, 9 aa, synthetic construct
PLQGSVHLK

SEQ ID NO: 21609 - protein, 9 aa, synthetic construct
PVNGALHLY

SEQ ID NO: 21610 - protein, 9 aa, synthetic construct
PVNGALHLH

SEQ ID NO: 21611 - protein, 9 aa, synthetic construct
PVNGALHLF

SEQ ID NO: 21612 - protein, 9 aa, synthetic construct
PVNGALHVR

SEQ ID NO: 21613 - protein, 9 aa, synthetic construct
PVNGALHVK

SEQ ID NO: 21614 - protein, 9 aa, synthetic construct
PVNGALRVK

SEQ ID NO: 21615 - protein, 9 aa, synthetic construct
PLQGSVHVY

SEQ ID NO: 21616 - protein, 9 aa, synthetic construct
PVNGALKLY

SEQ ID NO: 21617 - protein, 9 aa, synthetic construct
PVNGALKLR

SEQ ID NO: 21618 - protein, 9 aa, synthetic construct
PVNGALKVR

SEQ ID NO: 21619 - protein, 9 aa, synthetic construct
PLQGSVHVR

SEQ ID NO: 21620 - protein, 9 aa, synthetic construct
PLQGSVHVH

SEQ ID NO: 21621 - protein, 9 aa, synthetic construct
PVNGAARLR

SEQ ID NO: 21622 - protein, 9 aa, synthetic construct
PVNGAARVR

SEQ ID NO: 21623 - protein, 9 aa, synthetic construct
PVNGAAKLR

SEQ ID NO: 21624 - protein, 9 aa, synthetic construct
PLQGSVRLY

SEQ ID NO: 21625 - protein, 9 aa, synthetic construct
PVNGAIRVH

SEQ ID NO: 21626 - protein, 9 aa, synthetic construct
PVNGAIKVH

SEQ ID NO: 21627 - protein, 9 aa, synthetic construct
PVNGAGRLR

SEQ ID NO: 21628 - protein, 9 aa, synthetic construct
PVNGAGRVK

SEQ ID NO: 21629 - protein, 9 aa, synthetic construct
PVNGAGKLR

SEQ ID NO: 21630 - protein, 9 aa, synthetic construct
PVNGTVRLH

SEQ ID NO: 21631 - protein, 9 aa, synthetic construct
PVNGTVRVF

SEQ ID NO: 21632 - protein, 9 aa, synthetic construct
PVNGTVKLR

SEQ ID NO: 21633 - protein, 9 aa, synthetic construct
PVNGTVKVH

SEQ ID NO: 21634 - protein, 9 aa, synthetic construct
PVNGTLHLH

SEQ ID NO: 21635 - protein, 9 aa, synthetic construct
PVNGTLHVH

SEQ ID NO: 21636 - protein, 9 aa, synthetic construct
PLQGSVRVF

SEQ ID NO: 21637 - protein, 9 aa, synthetic construct
PVNGTLRLY

SEQ ID NO: 21638 - protein, 9 aa, synthetic construct
PVNGTLRVF

SEQ ID NO: 21639 - protein, 9 aa, synthetic construct
PVNGTLKLR

SEQ ID NO: 21640 - protein, 9 aa, synthetic construct
PVNGTAHVF

SEQ ID NO: 21641 - protein, 9 aa, synthetic construct
PVNGTARLF

SEQ ID NO: 21642 - protein, 9 aa, synthetic construct
PVNGTARVR

SEQ ID NO: 21643 - protein, 9 aa, synthetic construct
PLQGSVKLK

SEQ ID NO: 21644 - protein, 9 aa, synthetic construct
PVNGTAKLR

SEQ ID NO: 21645 - protein, 9 aa, synthetic construct
PVNGTAKVY

SEQ ID NO: 21646 - protein, 9 aa, synthetic construct
PVNGTAKVH

SEQ ID NO: 21647 - protein, 9 aa, synthetic construct
PLQGSVKLF

SEQ ID NO: 21648 - protein, 9 aa, synthetic construct
PVNGTIHLY

SEQ ID NO: 21649 - protein, 9 aa, synthetic construct
PVNGTIHLR

SEQ ID NO: 21650 - protein, 9 aa, synthetic construct
PVNGTIHLF

SEQ ID NO: 21651 - protein, 9 aa, synthetic construct
PVNGTIRLY

SEQ ID NO: 21652 - protein, 9 aa, synthetic construct
PVNGTIRLH

SEQ ID NO: 21653 - protein, 9 aa, synthetic construct
PVNGTIRLF

SEQ ID NO: 21654 - protein, 9 aa, synthetic construct
PVNGTIRVY

SEQ ID NO: 21655 - protein, 9 aa, synthetic construct
PVNGTIRVR

SEQ ID NO: 21656 - protein, 9 aa, synthetic construct
PVNGTIRVH

SEQ ID NO: 21657 - protein, 9 aa, synthetic construct
PVNGTIKLK

SEQ ID NO: 21658 - protein, 9 aa, synthetic construct
PVNGTIKLF

SEQ ID NO: 21659 - protein, 9 aa, synthetic construct
PVNGTIKVH

SEQ ID NO: 21660 - protein, 9 aa, synthetic construct
PVNGTGHLR

SEQ ID NO: 21661 - protein, 9 aa, synthetic construct
PVNGTGHVR

SEQ ID NO: 21662 - protein, 9 aa, synthetic construct
PVNGTGHVH

SEQ ID NO: 21663 - protein, 9 aa, synthetic construct
PVNGTGRLH

SEQ ID NO: 21664 - protein, 9 aa, synthetic construct
PVNGTGRVY

SEQ ID NO: 21665 - protein, 9 aa, synthetic construct
PVNGTGRVH

SEQ ID NO: 21666 - protein, 9 aa, synthetic construct
PVNGTGRVF

SEQ ID NO: 21667 - protein, 9 aa, synthetic construct
PVNGTGKVY

SEQ ID NO: 21668 - protein, 9 aa, synthetic construct
PVNGSVRLY

SEQ ID NO: 21669 - protein, 9 aa, synthetic construct
PVNGSVRLH

SEQ ID NO: 21670 - protein, 9 aa, synthetic construct
PVNGSVRVF

SEQ ID NO: 21671 - protein, 9 aa, synthetic construct
PLQGSLHLH

SEQ ID NO: 21672 - protein, 9 aa, synthetic construct
PVNGSVKLY

SEQ ID NO: 21673 - protein, 9 aa, synthetic construct
PVNGSVKLR

SEQ ID NO: 21674 - protein, 9 aa, synthetic construct
PVNGSVKLH

SEQ ID NO: 21675 - protein, 9 aa, synthetic construct
PVNGSVKLF

SEQ ID NO: 21676 - protein, 9 aa, synthetic construct
PVNGSVKVR

SEQ ID NO: 21677 - protein, 9 aa, synthetic construct
PVNGSVKVK

SEQ ID NO: 21678 - protein, 9 aa, synthetic construct
PLQGSLHLK

SEQ ID NO: 21679 - protein, 9 aa, synthetic construct
PVNGSLHLY

SEQ ID NO: 21680 - protein, 9 aa, synthetic construct
PVNGSLHLR

SEQ ID NO: 21681 - protein, 9 aa, synthetic construct
PVNGSLHLF

SEQ ID NO: 21682 - protein, 9 aa, synthetic construct
PLQGSLHLF

SEQ ID NO: 21683 - protein, 9 aa, synthetic construct
PVNGSLRVY

SEQ ID NO: 21684 - protein, 9 aa, synthetic construct
PVNGSLRVF

SEQ ID NO: 21685 - protein, 9 aa, synthetic construct
PLQGSLHVY

SEQ ID NO: 21686 - protein, 9 aa, synthetic construct
PVNGSLKLY

SEQ ID NO: 21687 - protein, 9 aa, synthetic construct
PVNGSLKLR

SEQ ID NO: 21688 - protein, 9 aa, synthetic construct
PVNGSLKLH

SEQ ID NO: 21689 - protein, 9 aa, synthetic construct
PVNGSLKVH

SEQ ID NO: 21690 - protein, 9 aa, synthetic construct
PVNGSLKVF

SEQ ID NO: 21691 - protein, 9 aa, synthetic construct
PLQGSLHVR

SEQ ID NO: 21692 - protein, 9 aa, synthetic construct
PVNGSAHLR

SEQ ID NO: 21693 - protein, 9 aa, synthetic construct
PVNGSAHVY

SEQ ID NO: 21694 - protein, 9 aa, synthetic construct
PVNGSARLY

SEQ ID NO: 21695 - protein, 9 aa, synthetic construct
PVNGSARLH

SEQ ID NO: 21696 - protein, 9 aa, synthetic construct
PVNGSAKLR

SEQ ID NO: 21697 - protein, 9 aa, synthetic construct
PVNGSAKLK

SEQ ID NO: 21698 - protein, 9 aa, synthetic construct
PVNGSIHLY

SEQ ID NO: 21699 - protein, 9 aa, synthetic construct
PVNGSIHVF

SEQ ID NO: 21700 - protein, 9 aa, synthetic construct
PVNGSIRLY

SEQ ID NO: 21701 - protein, 9 aa, synthetic construct
PVNGSIRLF

SEQ ID NO: 21702 - protein, 9 aa, synthetic construct
PVNGSIRVR

SEQ ID NO: 21703 - protein, 9 aa, synthetic construct
PVNGSGHLK

SEQ ID NO: 21704 - protein, 9 aa, synthetic construct
PVNGSGHLF

SEQ ID NO: 21705 - protein, 9 aa, synthetic construct
PVNGSGHVR

SEQ ID NO: 21706 - protein, 9 aa, synthetic construct
PVNGSGHVK

SEQ ID NO: 21707 - protein, 9 aa, synthetic construct
PVNGSGRLY

SEQ ID NO: 21708 - protein, 9 aa, synthetic construct
PVNGSGRLR

SEQ ID NO: 21709 - protein, 9 aa, synthetic construct
PVNGSGRLK

SEQ ID NO: 21710 - protein, 9 aa, synthetic construct
PVNGSGRLF

SEQ ID NO: 21711 - protein, 9 aa, synthetic construct
PVNGSGRVY

SEQ ID NO: 21712 - protein, 9 aa, synthetic construct
PVNGSGKVF

SEQ ID NO: 21713 - protein, 9 aa, synthetic construct
PLQGSLRVY

SEQ ID NO: 21714 - protein, 9 aa, synthetic construct
PVNGVVHLY

SEQ ID NO: 21715 - protein, 9 aa, synthetic construct
PVNGVVHLK

SEQ ID NO: 21716 - protein, 9 aa, synthetic construct
PVNGVVHVR

SEQ ID NO: 21717 - protein, 9 aa, synthetic construct
PVNGVVRLY

SEQ ID NO: 21718 - protein, 9 aa, synthetic construct
PVNGVVRLH

SEQ ID NO: 21719 - protein, 9 aa, synthetic construct
PVNGVVRLF

SEQ ID NO: 21720 - protein, 9 aa, synthetic construct
PVNGVLHLH

SEQ ID NO: 21721 - protein, 9 aa, synthetic construct
PVNGVLHLF

SEQ ID NO: 21722 - protein, 9 aa, synthetic construct
PVNGVLRLY

SEQ ID NO: 21723 - protein, 9 aa, synthetic construct
PVNGVLRLR

SEQ ID NO: 21724 - protein, 9 aa, synthetic construct
PVNGVLRVR

SEQ ID NO: 21725 - protein, 9 aa, synthetic construct
PLQGSLKLY

SEQ ID NO: 21726 - protein, 9 aa, synthetic construct
PVNGVLKLR

SEQ ID NO: 21727 - protein, 9 aa, synthetic construct
PLQGSLKLH

SEQ ID NO: 21728 - protein, 9 aa, synthetic construct
PVNGVARLH

SEQ ID NO: 21729 - protein, 9 aa, synthetic construct
PVNGVARLF

SEQ ID NO: 21730 - protein, 9 aa, synthetic construct
PVNGVARVR

SEQ ID NO: 21731 - protein, 9 aa, synthetic construct
PVNGVIHLR

SEQ ID NO: 21732 - protein, 9 aa, synthetic construct
PVNGVIHLH

SEQ ID NO: 21733 - protein, 9 aa, synthetic construct
PVNGVIHVF

SEQ ID NO: 21734 - protein, 9 aa, synthetic construct
PVNGVIRLR

SEQ ID NO: 21735 - protein, 9 aa, synthetic construct
PVNGVIRLH

SEQ ID NO: 21736 - protein, 9 aa, synthetic construct
PVNGVIRVY

SEQ ID NO: 21737 - protein, 9 aa, synthetic construct
PVNGVIRVH

SEQ ID NO: 21738 - protein, 9 aa, synthetic construct
PVNGVIRVF

SEQ ID NO: 21739 - protein, 9 aa, synthetic construct
PVNGVIKLY

SEQ ID NO: 21740 - protein, 9 aa, synthetic construct
PVNGVIKLK

SEQ ID NO: 21741 - protein, 9 aa, synthetic construct
PVNGVIKVY

SEQ ID NO: 21742 - protein, 9 aa, synthetic construct
PLQGSLKVH

SEQ ID NO: 21743 - protein, 9 aa, synthetic construct
PVNGVGHVR

SEQ ID NO: 21744 - protein, 9 aa, synthetic construct
PVNGVGRLR

SEQ ID NO: 21745 - protein, 9 aa, synthetic construct
PVNGVGRLH

SEQ ID NO: 21746 - protein, 9 aa, synthetic construct
PVNGVGRVR

SEQ ID NO: 21747 - protein, 9 aa, synthetic construct
PVNGVGRVK

SEQ ID NO: 21748 - protein, 9 aa, synthetic construct
PLQGSLKVF

SEQ ID NO: 21749 - protein, 9 aa, synthetic construct
PVNGVGKLK

SEQ ID NO: 21750 - protein, 9 aa, synthetic construct
PVNGVGKVR

SEQ ID NO: 21751 - protein, 9 aa, synthetic construct
PLQGSAHLY

SEQ ID NO: 21752 - protein, 9 aa, synthetic construct
PLQGSAHLR

SEQ ID NO: 21753 - protein, 9 aa, synthetic construct
PVNGGVRLY

SEQ ID NO: 21754 - protein, 9 aa, synthetic construct
PVNGGVRLH

SEQ ID NO: 21755 - protein, 9 aa, synthetic construct
PVNGGVRLK

SEQ ID NO: 21756 - protein, 9 aa, synthetic construct
PVNGGVRVY

SEQ ID NO: 21757 - protein, 9 aa, synthetic construct
PVNGGVRVK

SEQ ID NO: 21758 - protein, 9 aa, synthetic construct
PVNGGVRVF

SEQ ID NO: 21759 - protein, 9 aa, synthetic construct
PLQGSAHLH

SEQ ID NO: 21760 - protein, 9 aa, synthetic construct
PVNGGVKVR

SEQ ID NO: 21761 - protein, 9 aa, synthetic construct
PVNGGVKVK

SEQ ID NO: 21762 - protein, 9 aa, synthetic construct
PLQGSAHLK

SEQ ID NO: 21763 - protein, 9 aa, synthetic construct
PVNGGLHLY

SEQ ID NO: 21764 - protein, 9 aa, synthetic construct
PVNGGLHLR

SEQ ID NO: 21765 - protein, 9 aa, synthetic construct
PVNGGLHLH

SEQ ID NO: 21766 - protein, 9 aa, synthetic construct
PVNGGLHLF

SEQ ID NO: 21767 - protein, 9 aa, synthetic construct
PVNGGLHVY

SEQ ID NO: 21768 - protein, 9 aa, synthetic construct
PVNGGLHVR

SEQ ID NO: 21769 - protein, 9 aa, synthetic construct
PVNGGLHVF

SEQ ID NO: 21770 - protein, 9 aa, synthetic construct
PLQGSAHLF

SEQ ID NO: 21771 - protein, 9 aa, synthetic construct
PVNGGLRLF

SEQ ID NO: 21772 - protein, 9 aa, synthetic construct
PVNGGLRVK

SEQ ID NO: 21773 - protein, 9 aa, synthetic construct
PLQGSAHVY

SEQ ID NO: 21774 - protein, 9 aa, synthetic construct
PVNGGLKLH

SEQ ID NO: 21775 - protein, 9 aa, synthetic construct
PVNGGLKVH

SEQ ID NO: 21776 - protein, 9 aa, synthetic construct
PLQGSAHVH

SEQ ID NO: 21777 - protein, 9 aa, synthetic construct
PVNGGARLF

SEQ ID NO: 21778 - protein, 9 aa, synthetic construct
PVNGGARVK

SEQ ID NO: 21779 - protein, 9 aa, synthetic construct
PLQGSAHVF

SEQ ID NO: 21780 - protein, 9 aa, synthetic construct
PVNGGIRLF

SEQ ID NO: 21781 - protein, 9 aa, synthetic construct
PVNGGIKLR

SEQ ID NO: 21782 - protein, 9 aa, synthetic construct
PVNGGIKLF

SEQ ID NO: 21783 - protein, 9 aa, synthetic construct
PVNGGIKVY

SEQ ID NO: 21784 - protein, 9 aa, synthetic construct
PLQGSARLH

SEQ ID NO: 21785 - protein, 9 aa, synthetic construct
PVNGGGHLR

SEQ ID NO: 21786 - protein, 9 aa, synthetic construct
PVNGGGHVH

SEQ ID NO: 21787 - protein, 9 aa, synthetic construct
PVNGGGRLK

SEQ ID NO: 21788 - protein, 9 aa, synthetic construct
PVNGGGRVR

SEQ ID NO: 21789 - protein, 9 aa, synthetic construct
PVNGGGRVK

SEQ ID NO: 21790 - protein, 9 aa, synthetic construct
PLQGSARLF

SEQ ID NO: 21791 - protein, 9 aa, synthetic construct
PVNAAVHLF

SEQ ID NO: 21792 - protein, 9 aa, synthetic construct
PVNAAVHVF

SEQ ID NO: 21793 - protein, 9 aa, synthetic construct
PVNAAVRLY

SEQ ID NO: 21794 - protein, 9 aa, synthetic construct
PVNAAVRLH

SEQ ID NO: 21795 - protein, 9 aa, synthetic construct
PVNAAVRLF

SEQ ID NO: 21796 - protein, 9 aa, synthetic construct
PVNAAVRVY

SEQ ID NO: 21797 - protein, 9 aa, synthetic construct
PVNAAVRVK

SEQ ID NO: 21798 - protein, 9 aa, synthetic construct
PVNAAVKLR

SEQ ID NO: 21799 - protein, 9 aa, synthetic construct
PVNAAVKLF

SEQ ID NO: 21800 - protein, 9 aa, synthetic construct
PVNAAVKVH

SEQ ID NO: 21801 - protein, 9 aa, synthetic construct
PVNAAVKVK

SEQ ID NO: 21802 - protein, 9 aa, synthetic construct
PVNAALHLY

SEQ ID NO: 21803 - protein, 9 aa, synthetic construct
PVNAALHLH

SEQ ID NO: 21804 - protein, 9 aa, synthetic construct
PVNAALHVY

SEQ ID NO: 21805 - protein, 9 aa, synthetic construct
PVNAALHVR

SEQ ID NO: 21806 - protein, 9 aa, synthetic construct
PVNAALHVH

SEQ ID NO: 21807 - protein, 9 aa, synthetic construct
PVNAALHVK

SEQ ID NO: 21808 - protein, 9 aa, synthetic construct
PVNAALHVF

SEQ ID NO: 21809 - protein, 9 aa, synthetic construct
PVNAALRLH

SEQ ID NO: 21810 - protein, 9 aa, synthetic construct
PVNAALKLY

SEQ ID NO: 21811 - protein, 9 aa, synthetic construct
PVNAALKLH

SEQ ID NO: 21812 - protein, 9 aa, synthetic construct
PVNAALKLF

SEQ ID NO: 21813 - protein, 9 aa, synthetic construct
PVNAALKVY

SEQ ID NO: 21814 - protein, 9 aa, synthetic construct
PVNAALKVH

SEQ ID NO: 21815 - protein, 9 aa, synthetic construct
PVNAALKVF

SEQ ID NO: 21816 - protein, 9 aa, synthetic construct
PLQGSAKLH

SEQ ID NO: 21817 - protein, 9 aa, synthetic construct
PVNAAARLY

SEQ ID NO: 21818 - protein, 9 aa, synthetic construct
PVNAAARLR

SEQ ID NO: 21819 - protein, 9 aa, synthetic construct
PVNAAARVY

SEQ ID NO: 21820 - protein, 9 aa, synthetic construct
PVNAAARVR

SEQ ID NO: 21821 - protein, 9 aa, synthetic construct
PVNAAARVK

SEQ ID NO: 21822 - protein, 9 aa, synthetic construct
PVNAAAKLR

SEQ ID NO: 21823 - protein, 9 aa, synthetic construct
PVNAAAKLF

SEQ ID NO: 21824 - protein, 9 aa, synthetic construct
PVNAAAKVR

SEQ ID NO: 21825 - protein, 9 aa, synthetic construct
PLQGSAKLF

SEQ ID NO: 21826 - protein, 9 aa, synthetic construct
PVNAAIRLY

SEQ ID NO: 21827 - protein, 9 aa, synthetic construct
PVNAAIRLF

SEQ ID NO: 21828 - protein, 9 aa, synthetic construct
PVNAAIRVF

SEQ ID NO: 21829 - protein, 9 aa, synthetic construct
PVNAAIKLK

SEQ ID NO: 21830 - protein, 9 aa, synthetic construct
PVNAAIKLF

SEQ ID NO: 21831 - protein, 9 aa, synthetic construct
PVNAAIKVR

SEQ ID NO: 21832 - protein, 9 aa, synthetic construct
PVNAAIKVK

SEQ ID NO: 21833 - protein, 9 aa, synthetic construct
PVNAAGHVY

SEQ ID NO: 21834 - protein, 9 aa, synthetic construct
PVNAAGRLK

SEQ ID NO: 21835 - protein, 9 aa, synthetic construct
PVNAAGRVK

SEQ ID NO: 21836 - protein, 9 aa, synthetic construct
PLQGSAKVF

SEQ ID NO: 21837 - protein, 9 aa, synthetic construct
PVNAAGKLR

SEQ ID NO: 21838 - protein, 9 aa, synthetic construct
PVNAAGKLK

SEQ ID NO: 21839 - protein, 9 aa, synthetic construct
PVNAAGKVR

SEQ ID NO: 21840 - protein, 9 aa, synthetic construct
PVNAAGKVK

SEQ ID NO: 21841 - protein, 9 aa, synthetic construct
PLNGTLHVF

SEQ ID NO: 21842 - protein, 9 aa, synthetic construct
PVNATVHLH

SEQ ID NO: 21843 - protein, 9 aa, synthetic construct
PVNATVHLF

SEQ ID NO: 21844 - protein, 9 aa, synthetic construct
PVNATVHVR

SEQ ID NO: 21845 - protein, 9 aa, synthetic construct
PVNATVHVK

SEQ ID NO: 21846 - protein, 9 aa, synthetic construct
PVNATVHVF

SEQ ID NO: 21847 - protein, 9 aa, synthetic construct
PVNATVRLY

SEQ ID NO: 21848 - protein, 9 aa, synthetic construct
PVNATVRVF

SEQ ID NO: 21849 - protein, 9 aa, synthetic construct
PVNATVKVH

SEQ ID NO: 21850 - protein, 9 aa, synthetic construct
PVNATVKVF

SEQ ID NO: 21851 - protein, 9 aa, synthetic construct
PVNATLHVR

SEQ ID NO: 21852 - protein, 9 aa, synthetic construct
PVNATLHVH

SEQ ID NO: 21853 - protein, 9 aa, synthetic construct
PVNATLHVK

SEQ ID NO: 21854 - protein, 9 aa, synthetic construct
PVNATLRVH

SEQ ID NO: 21855 - protein, 9 aa, synthetic construct
PVNATLRVK

SEQ ID NO: 21856 - protein, 9 aa, synthetic construct
PVNATLKLY

SEQ ID NO: 21857 - protein, 9 aa, synthetic construct
PVNATLKLF

SEQ ID NO: 21858 - protein, 9 aa, synthetic construct
PVNATLKVY

SEQ ID NO: 21859 - protein, 9 aa, synthetic construct
PVNATLKVR

SEQ ID NO: 21860 - protein, 9 aa, synthetic construct
PLQGSIHVR

SEQ ID NO: 21861 - protein, 9 aa, synthetic construct
PVNATARLY

SEQ ID NO: 21862 - protein, 9 aa, synthetic construct
PVNATARVR

SEQ ID NO: 21863 - protein, 9 aa, synthetic construct
PVNATAKVK

SEQ ID NO: 21864 - protein, 9 aa, synthetic construct
PLQGSIRLY

SEQ ID NO: 21865 - protein, 9 aa, synthetic construct
PVNATIRLY

SEQ ID NO: 21866 - protein, 9 aa, synthetic construct
PVNATIRLR

SEQ ID NO: 21867 - protein, 9 aa, synthetic construct
PVNATIRLH

SEQ ID NO: 21868 - protein, 9 aa, synthetic construct
PVNATIRLF

SEQ ID NO: 21869 - protein, 9 aa, synthetic construct
PVNATIRVY

SEQ ID NO: 21870 - protein, 9 aa, synthetic construct
PVNATIRVH

SEQ ID NO: 21871 - protein, 9 aa, synthetic construct
PVNATIRVF

SEQ ID NO: 21872 - protein, 9 aa, synthetic construct
PVNATIKLY

SEQ ID NO: 21873 - protein, 9 aa, synthetic construct
PLQGSIRLH

SEQ ID NO: 21874 - protein, 9 aa, synthetic construct
PVNATGHLR

SEQ ID NO: 21875 - protein, 9 aa, synthetic construct
PVNATGHVY

SEQ ID NO: 21876 - protein, 9 aa, synthetic construct
PVNATGHVR

SEQ ID NO: 21877 - protein, 9 aa, synthetic construct
PVNATGHVK

SEQ ID NO: 21878 - protein, 9 aa, synthetic construct
PVNATGHVF

SEQ ID NO: 21879 - protein, 9 aa, synthetic construct
PVNATGRLR

SEQ ID NO: 21880 - protein, 9 aa, synthetic construct
PVNATGRVY

SEQ ID NO: 21881 - protein, 9 aa, synthetic construct
PVNATGRVH

SEQ ID NO: 21882 - protein, 9 aa, synthetic construct
PVNATGRVK

SEQ ID NO: 21883 - protein, 9 aa, synthetic construct
PLQGSIRLF

SEQ ID NO: 21884 - protein, 9 aa, synthetic construct
PVNASVHLR

SEQ ID NO: 21885 - protein, 9 aa, synthetic construct
PVNASVHLH

SEQ ID NO: 21886 - protein, 9 aa, synthetic construct
PVNASVHLK

SEQ ID NO: 21887 - protein, 9 aa, synthetic construct
PVNASVHVH

SEQ ID NO: 21888 - protein, 9 aa, synthetic construct
PVNASVHVF

SEQ ID NO: 21889 - protein, 9 aa, synthetic construct
PLQGSIRVR

SEQ ID NO: 21890 - protein, 9 aa, synthetic construct
PVNASVRLY

SEQ ID NO: 21891 - protein, 9 aa, synthetic construct
PVNASVRLH

SEQ ID NO: 21892 - protein, 9 aa, synthetic construct
PVNASVRVH

SEQ ID NO: 21893 - protein, 9 aa, synthetic construct
PVNASVRVK

SEQ ID NO: 21894 - protein, 9 aa, synthetic construct
PLQGSIRVH

SEQ ID NO: 21895 - protein, 9 aa, synthetic construct
PVNASVKLY

SEQ ID NO: 21896 - protein, 9 aa, synthetic construct
PVNASVKLR

SEQ ID NO: 21897 - protein, 9 aa, synthetic construct
PVNASVKLH

SEQ ID NO: 21898 - protein, 9 aa, synthetic construct
PVNASVKLF

SEQ ID NO: 21899 - protein, 9 aa, synthetic construct
PVNASVKVR

SEQ ID NO: 21900 - protein, 9 aa, synthetic construct
PVNASVKVH

SEQ ID NO: 21901 - protein, 9 aa, synthetic construct
PVNASVKVK

SEQ ID NO: 21902 - protein, 9 aa, synthetic construct
PLQGSIRVK

SEQ ID NO: 21903 - protein, 9 aa, synthetic construct
PVNASLHLR

SEQ ID NO: 21904 - protein, 9 aa, synthetic construct
PVNASLHLK

SEQ ID NO: 21905 - protein, 9 aa, synthetic construct
PVNASLHVY

SEQ ID NO: 21906 - protein, 9 aa, synthetic construct
PVNASLHVH

SEQ ID NO: 21907 - protein, 9 aa, synthetic construct
PLQGSIRVF

SEQ ID NO: 21908 - protein, 9 aa, synthetic construct
PVNASLRLY

SEQ ID NO: 21909 - protein, 9 aa, synthetic construct
PVNASLRVY

SEQ ID NO: 21910 - protein, 9 aa, synthetic construct
PVNASLRVH

SEQ ID NO: 21911 - protein, 9 aa, synthetic construct
PVNASLRVF

SEQ ID NO: 21912 - protein, 9 aa, synthetic construct
PLQGSIKLY

SEQ ID NO: 21913 - protein, 9 aa, synthetic construct
PVNASLKLH

SEQ ID NO: 21914 - protein, 9 aa, synthetic construct
PVNASLKVY

SEQ ID NO: 21915 - protein, 9 aa, synthetic construct
PVNASLKVH

SEQ ID NO: 21916 - protein, 9 aa, synthetic construct
PVNASLKVF

SEQ ID NO: 21917 - protein, 9 aa, synthetic construct
PLQGSIKLH

SEQ ID NO: 21918 - protein, 9 aa, synthetic construct
PVNASAKLF

SEQ ID NO: 21919 - protein, 9 aa, synthetic construct
PVNASAKVH

SEQ ID NO: 21920 - protein, 9 aa, synthetic construct
PVNASAKVF

SEQ ID NO: 21921 - protein, 9 aa, synthetic construct
PVNASIHLY

SEQ ID NO: 21922 - protein, 9 aa, synthetic construct
PVNASIHLR

SEQ ID NO: 21923 - protein, 9 aa, synthetic construct
PVNASIHVY

SEQ ID NO: 21924 - protein, 9 aa, synthetic construct
PVNASIHVR

SEQ ID NO: 21925 - protein, 9 aa, synthetic construct
PVNASIRLK

SEQ ID NO: 21926 - protein, 9 aa, synthetic construct
PVNASIRVF

SEQ ID NO: 21927 - protein, 9 aa, synthetic construct
PLQGSIKVH

SEQ ID NO: 21928 - protein, 9 aa, synthetic construct
PVNASGRLR

SEQ ID NO: 21929 - protein, 9 aa, synthetic construct
PVNASGRLH

SEQ ID NO: 21930 - protein, 9 aa, synthetic construct
PVNASGRLK

SEQ ID NO: 21931 - protein, 9 aa, synthetic construct
PVNASGRVY

SEQ ID NO: 21932 - protein, 9 aa, synthetic construct
PVNASGRVR

SEQ ID NO: 21933 - protein, 9 aa, synthetic construct
PLQGSIKVF

SEQ ID NO: 21934 - protein, 9 aa, synthetic construct
PVNASGKLY

SEQ ID NO: 21935 - protein, 9 aa, synthetic construct
PLQGSGHLY

SEQ ID NO: 21936 - protein, 9 aa, synthetic construct
PVNAVVHLY

SEQ ID NO: 21937 - protein, 9 aa, synthetic construct
PVNAVVHVR

SEQ ID NO: 21938 - protein, 9 aa, synthetic construct
PLQGSGHLR

SEQ ID NO: 21939 - protein, 9 aa, synthetic construct
PVNAVVRLY

SEQ ID NO: 21940 - protein, 9 aa, synthetic construct
PVNAVVKLR

SEQ ID NO: 21941 - protein, 9 aa, synthetic construct
PVNAVVKVK

SEQ ID NO: 21942 - protein, 9 aa, synthetic construct
PVNAVLHVF

SEQ ID NO: 21943 - protein, 9 aa, synthetic construct
PVNAVLRLR

SEQ ID NO: 21944 - protein, 9 aa, synthetic construct
PVNAVLRLF

SEQ ID NO: 21945 - protein, 9 aa, synthetic construct
PVNAVLRVH

SEQ ID NO: 21946 - protein, 9 aa, synthetic construct
PVNAVLRVF

SEQ ID NO: 21947 - protein, 9 aa, synthetic construct
PVNAVLKLH

SEQ ID NO: 21948 - protein, 9 aa, synthetic construct
PVNAVLKLK

SEQ ID NO: 21949 - protein, 9 aa, synthetic construct
PVNAVLKLF

SEQ ID NO: 21950 - protein, 9 aa, synthetic construct
PVNAVLKVY

SEQ ID NO: 21951 - protein, 9 aa, synthetic construct
PVNAVLKVR

SEQ ID NO: 21952 - protein, 9 aa, synthetic construct
PVNAVLKVK

SEQ ID NO: 21953 - protein, 9 aa, synthetic construct
PVNAVAHLK

SEQ ID NO: 21954 - protein, 9 aa, synthetic construct
PVNAVAHVY

SEQ ID NO: 21955 - protein, 9 aa, synthetic construct
PVNAVAHVK

SEQ ID NO: 21956 - protein, 9 aa, synthetic construct
PLQGSGHVH

SEQ ID NO: 21957 - protein, 9 aa, synthetic construct
PVNAVARLH

SEQ ID NO: 21958 - protein, 9 aa, synthetic construct
PVNAVARLF

SEQ ID NO: 21959 - protein, 9 aa, synthetic construct
PVNAVARVR

SEQ ID NO: 21960 - protein, 9 aa, synthetic construct
PVNAVAKLK

SEQ ID NO: 21961 - protein, 9 aa, synthetic construct
PVNAVAKVR

SEQ ID NO: 21962 - protein, 9 aa, synthetic construct
PVNAVAKVK

SEQ ID NO: 21963 - protein, 9 aa, synthetic construct
PVNAVIHLF

SEQ ID NO: 21964 - protein, 9 aa, synthetic construct
PVNAVIHVY

SEQ ID NO: 21965 - protein, 9 aa, synthetic construct
PVNAVIHVR

SEQ ID NO: 21966 - protein, 9 aa, synthetic construct
PVNAVIHVH

SEQ ID NO: 21967 - protein, 9 aa, synthetic construct
PVNAVIHVF

SEQ ID NO: 21968 - protein, 9 aa, synthetic construct
PVNAVIRLY

SEQ ID NO: 21969 - protein, 9 aa, synthetic construct
PVNAVIRLR

SEQ ID NO: 21970 - protein, 9 aa, synthetic construct
PVNAVIRLH

SEQ ID NO: 21971 - protein, 9 aa, synthetic construct
PVNAVIRLF

SEQ ID NO: 21972 - protein, 9 aa, synthetic construct
PVNAVIRVH

SEQ ID NO: 21973 - protein, 9 aa, synthetic construct
PVNAVIKLF

SEQ ID NO: 21974 - protein, 9 aa, synthetic construct
PVNAVGHLY

SEQ ID NO: 21975 - protein, 9 aa, synthetic construct
PVNAVGHLR

SEQ ID NO: 21976 - protein, 9 aa, synthetic construct
PVNAVGHLH

SEQ ID NO: 21977 - protein, 9 aa, synthetic construct
PVNAVGHLK

SEQ ID NO: 21978 - protein, 9 aa, synthetic construct
PVNAVGHLF

SEQ ID NO: 21979 - protein, 9 aa, synthetic construct
PVNAVGHVR

SEQ ID NO: 21980 - protein, 9 aa, synthetic construct
PVNAVGHVK

SEQ ID NO: 21981 - protein, 9 aa, synthetic construct
PVNAVGHVF

SEQ ID NO: 21982 - protein, 9 aa, synthetic construct
PVNAVGRLY

SEQ ID NO: 21983 - protein, 9 aa, synthetic construct
PVNAVGRLR

SEQ ID NO: 21984 - protein, 9 aa, synthetic construct
PVNAVGRVY

SEQ ID NO: 21985 - protein, 9 aa, synthetic construct
PVNAVGRVR

SEQ ID NO: 21986 - protein, 9 aa, synthetic construct
PVNAVGRVK

SEQ ID NO: 21987 - protein, 9 aa, synthetic construct
PVNAVGKLR

SEQ ID NO: 21988 - protein, 9 aa, synthetic construct
PVNAVGKLK

SEQ ID NO: 21989 - protein, 9 aa, synthetic construct
PVNAVGKVR

SEQ ID NO: 21990 - protein, 9 aa, synthetic construct
PVNAVGKVH

SEQ ID NO: 21991 - protein, 9 aa, synthetic construct
PVNAGVHLY

SEQ ID NO: 21992 - protein, 9 aa, synthetic construct
PVNAGVHLF

SEQ ID NO: 21993 - protein, 9 aa, synthetic construct
PVNAGVRLY

SEQ ID NO: 21994 - protein, 9 aa, synthetic construct
PVNAGVRLH

SEQ ID NO: 21995 - protein, 9 aa, synthetic construct
PVNAGVRVY

SEQ ID NO: 21996 - protein, 9 aa, synthetic construct
PVNAGVRVR

SEQ ID NO: 21997 - protein, 9 aa, synthetic construct
PVNAGVRVK

SEQ ID NO: 21998 - protein, 9 aa, synthetic construct
PVNAGVKVY

SEQ ID NO: 21999 - protein, 9 aa, synthetic construct
PVNAGVKVR

SEQ ID NO: 22000 - protein, 9 aa, synthetic construct
PVNAGVKVK

SEQ ID NO: 22001 - protein, 9 aa, synthetic construct
PVNAGLHVY

SEQ ID NO: 22002 - protein, 9 aa, synthetic construct
PLQGSGRVF

SEQ ID NO: 22003 - protein, 9 aa, synthetic construct
PVNAGLRVY

SEQ ID NO: 22004 - protein, 9 aa, synthetic construct
PVNAGLRVH

SEQ ID NO: 22005 - protein, 9 aa, synthetic construct
PVNAGAHLY

SEQ ID NO: 22006 - protein, 9 aa, synthetic construct
PVNAGAHLR

SEQ ID NO: 22007 - protein, 9 aa, synthetic construct
PVNAGAHLF

SEQ ID NO: 22008 - protein, 9 aa, synthetic construct
PVNAGAHVR

SEQ ID NO: 22009 - protein, 9 aa, synthetic construct
PLQGSGKLH

SEQ ID NO: 22010 - protein, 9 aa, synthetic construct
PVNAGARLH

SEQ ID NO: 22011 - protein, 9 aa, synthetic construct
PVNAGARLF

SEQ ID NO: 22012 - protein, 9 aa, synthetic construct
PVNAGARVY

SEQ ID NO: 22013 - protein, 9 aa, synthetic construct
PVNAGARVH

SEQ ID NO: 22014 - protein, 9 aa, synthetic construct
PVNAGARVK

SEQ ID NO: 22015 - protein, 9 aa, synthetic construct
PVNAGIHLR

SEQ ID NO: 22016 - protein, 9 aa, synthetic construct
PVNAGIHLH

SEQ ID NO: 22017 - protein, 9 aa, synthetic construct
PVNAGIHVR

SEQ ID NO: 22018 - protein, 9 aa, synthetic construct
PVNAGIHVF

SEQ ID NO: 22019 - protein, 9 aa, synthetic construct
PLQGSGKVY

SEQ ID NO: 22020 - protein, 9 aa, synthetic construct
PVNAGIRVH

SEQ ID NO: 22021 - protein, 9 aa, synthetic construct
PVNAGIKLK

SEQ ID NO: 22022 - protein, 9 aa, synthetic construct
PVNAGIKVF

SEQ ID NO: 22023 - protein, 9 aa, synthetic construct
PVNAGGHLR

SEQ ID NO: 22024 - protein, 9 aa, synthetic construct
PVNAGGHVF

SEQ ID NO: 22025 - protein, 9 aa, synthetic construct
PVNAGGRLY

SEQ ID NO: 22026 - protein, 9 aa, synthetic construct
PVNAGGRLH

SEQ ID NO: 22027 - protein, 9 aa, synthetic construct
PVNAGGRLK

SEQ ID NO: 22028 - protein, 9 aa, synthetic construct
PVNAGGRVY

SEQ ID NO: 22029 - protein, 9 aa, synthetic construct
PVNAGGRVR

SEQ ID NO: 22030 - protein, 9 aa, synthetic construct
PVNAGGRVH

SEQ ID NO: 22031 - protein, 9 aa, synthetic construct
PLQGSGKVF

SEQ ID NO: 22032 - protein, 9 aa, synthetic construct
PVNAGGKVY

SEQ ID NO: 22033 - protein, 9 aa, synthetic construct
PVNAGGKVH

SEQ ID NO: 22034 - protein, 9 aa, synthetic construct
PVNAGGKVK

SEQ ID NO: 22035 - protein, 9 aa, synthetic construct
PVNAGGKVF

SEQ ID NO: 22036 - protein, 9 aa, synthetic construct
PLQGVVHLY

SEQ ID NO: 22037 - protein, 9 aa, synthetic construct
PVQGAVHLY

SEQ ID NO: 22038 - protein, 9 aa, synthetic construct
PVQGAVHLR

SEQ ID NO: 22039 - protein, 9 aa, synthetic construct
PVQGAVHLF

SEQ ID NO: 22040 - protein, 9 aa, synthetic construct
PVQGAVHVR

SEQ ID NO: 22041 - protein, 9 aa, synthetic construct
PVQGAVHVH

SEQ ID NO: 22042 - protein, 9 aa, synthetic construct
PVQGAVHVK

SEQ ID NO: 22043 - protein, 9 aa, synthetic construct
PVQGAVHVF

SEQ ID NO: 22044 - protein, 9 aa, synthetic construct
PLQGVVHLR

SEQ ID NO: 22045 - protein, 9 aa, synthetic construct
PVQGAVRLY

SEQ ID NO: 22046 - protein, 9 aa, synthetic construct
PVQGAVRLF

SEQ ID NO: 22047 - protein, 9 aa, synthetic construct
PVQGAVRVY

SEQ ID NO: 22048 - protein, 9 aa, synthetic construct
PVQGAVRVH

SEQ ID NO: 22049 - protein, 9 aa, synthetic construct
PVQGAVRVF

SEQ ID NO: 22050 - protein, 9 aa, synthetic construct
PLQGVVHLH

SEQ ID NO: 22051 - protein, 9 aa, synthetic construct
PVQGAVKLY

SEQ ID NO: 22052 - protein, 9 aa, synthetic construct
PVQGAVKVY

SEQ ID NO: 22053 - protein, 9 aa, synthetic construct
PVQGAVKVH

SEQ ID NO: 22054 - protein, 9 aa, synthetic construct
PLQGVVHLK

SEQ ID NO: 22055 - protein, 9 aa, synthetic construct
PLQGVVHLF

SEQ ID NO: 22056 - protein, 9 aa, synthetic construct
PVQGALKLY

SEQ ID NO: 22057 - protein, 9 aa, synthetic construct
PVQGALKLH

SEQ ID NO: 22058 - protein, 9 aa, synthetic construct
PVQGALKVH

SEQ ID NO: 22059 - protein, 9 aa, synthetic construct
PLQGVVHVR

SEQ ID NO: 22060 - protein, 9 aa, synthetic construct
PVQGAAHLY

SEQ ID NO: 22061 - protein, 9 aa, synthetic construct
PVQGAAHLR

SEQ ID NO: 22062 - protein, 9 aa, synthetic construct
PVQGAAHVH

SEQ ID NO: 22063 - protein, 9 aa, synthetic construct
PVQGAAHVF

SEQ ID NO: 22064 - protein, 9 aa, synthetic construct
PVQGAARLY

SEQ ID NO: 22065 - protein, 9 aa, synthetic construct
PVQGAARLH

SEQ ID NO: 22066 - protein, 9 aa, synthetic construct
PVQGAARLF

SEQ ID NO: 22067 - protein, 9 aa, synthetic construct
PVQGAARVY

SEQ ID NO: 22068 - protein, 9 aa, synthetic construct
PVQGAARVR

SEQ ID NO: 22069 - protein, 9 aa, synthetic construct
PVQGAAKLY

SEQ ID NO: 22070 - protein, 9 aa, synthetic construct
PVQGAAKVY

SEQ ID NO: 22071 - protein, 9 aa, synthetic construct
PLQGVVHVF

SEQ ID NO: 22072 - protein, 9 aa, synthetic construct
PVQGAIHLR

SEQ ID NO: 22073 - protein, 9 aa, synthetic construct
PVQGAIHVY

SEQ ID NO: 22074 - protein, 9 aa, synthetic construct
PVQGAIHVH

SEQ ID NO: 22075 - protein, 9 aa, synthetic construct
PVQGAIHVK

SEQ ID NO: 22076 - protein, 9 aa, synthetic construct
PLQGVVRLY

SEQ ID NO: 22077 - protein, 9 aa, synthetic construct
PVQGAIRLH

SEQ ID NO: 22078 - protein, 9 aa, synthetic construct
PVQGAIRLF

SEQ ID NO: 22079 - protein, 9 aa, synthetic construct
PVQGAIRVY

SEQ ID NO: 22080 - protein, 9 aa, synthetic construct
PVQGAIRVH

SEQ ID NO: 22081 - protein, 9 aa, synthetic construct
PVQGAIRVF

SEQ ID NO: 22082 - protein, 9 aa, synthetic construct
PVQGAIKLR

SEQ ID NO: 22083 - protein, 9 aa, synthetic construct
PVQGAIKVH

SEQ ID NO: 22084 - protein, 9 aa, synthetic construct
PVQGAIKVK

SEQ ID NO: 22085 - protein, 9 aa, synthetic construct
PLQGVVRLH

SEQ ID NO: 22086 - protein, 9 aa, synthetic construct
PVQGAGHLR

SEQ ID NO: 22087 - protein, 9 aa, synthetic construct
PVQGAGHLK

SEQ ID NO: 22088 - protein, 9 aa, synthetic construct
PVQGAGHLF

SEQ ID NO: 22089 - protein, 9 aa, synthetic construct
PVQGAGHVY

SEQ ID NO: 22090 - protein, 9 aa, synthetic construct
PVQGAGHVR

SEQ ID NO: 22091 - protein, 9 aa, synthetic construct
PVQGAGHVH

SEQ ID NO: 22092 - protein, 9 aa, synthetic construct
PVQGAGHVK

SEQ ID NO: 22093 - protein, 9 aa, synthetic construct
PVQGAGRLR

SEQ ID NO: 22094 - protein, 9 aa, synthetic construct
PVQGAGRLH

SEQ ID NO: 22095 - protein, 9 aa, synthetic construct
PVQGAGRVY

SEQ ID NO: 22096 - protein, 9 aa, synthetic construct
PVQGAGRVK

SEQ ID NO: 22097 - protein, 9 aa, synthetic construct
PLQGVVRLF

SEQ ID NO: 22098 - protein, 9 aa, synthetic construct
PVQGAGKLY

SEQ ID NO: 22099 - protein, 9 aa, synthetic construct
PVQGAGKLH

SEQ ID NO: 22100 - protein, 9 aa, synthetic construct
PVQGAGKLF

SEQ ID NO: 22101 - protein, 9 aa, synthetic construct
PVQGAGKVY

SEQ ID NO: 22102 - protein, 9 aa, synthetic construct
PVQGTVHLR

SEQ ID NO: 22103 - protein, 9 aa, synthetic construct
PVQGTVHLF

SEQ ID NO: 22104 - protein, 9 aa, synthetic construct
PVQGTVRLH

SEQ ID NO: 22105 - protein, 9 aa, synthetic construct
PVQGTVRVY

SEQ ID NO: 22106 - protein, 9 aa, synthetic construct
PVQGTVRVF

SEQ ID NO: 22107 - protein, 9 aa, synthetic construct
PVQGTVKLF

SEQ ID NO: 22108 - protein, 9 aa, synthetic construct
PVQGTVKVH

SEQ ID NO: 22109 - protein, 9 aa, synthetic construct
PVQGTVKVF

SEQ ID NO: 22110 - protein, 9 aa, synthetic construct
PVQGTLHLK

SEQ ID NO: 22111 - protein, 9 aa, synthetic construct
PLQGVVRVF

SEQ ID NO: 22112 - protein, 9 aa, synthetic construct
PVQGTLRLY

SEQ ID NO: 22113 - protein, 9 aa, synthetic construct
PLQGVVKLY

SEQ ID NO: 22114 - protein, 9 aa, synthetic construct
PVQGTLKLR

SEQ ID NO: 22115 - protein, 9 aa, synthetic construct
PVQGTLKLH

SEQ ID NO: 22116 - protein, 9 aa, synthetic construct
PVQGTLKLK

SEQ ID NO: 22117 - protein, 9 aa, synthetic construct
PVQGTLKLF

SEQ ID NO: 22118 - protein, 9 aa, synthetic construct
PVQGTARLY

SEQ ID NO: 22119 - protein, 9 aa, synthetic construct
PVQGTARLF

SEQ ID NO: 22120 - protein, 9 aa, synthetic construct
PVQGTIHLY

SEQ ID NO: 22121 - protein, 9 aa, synthetic construct
PVQGTIHLR

SEQ ID NO: 22122 - protein, 9 aa, synthetic construct
PVQGTIHLF

SEQ ID NO: 22123 - protein, 9 aa, synthetic construct
PLQGVVKVY

SEQ ID NO: 22124 - protein, 9 aa, synthetic construct
PVQGTIRVH

SEQ ID NO: 22125 - protein, 9 aa, synthetic construct
PVQGTIRVF

SEQ ID NO: 22126 - protein, 9 aa, synthetic construct
PLQGVVKVR

SEQ ID NO: 22127 - protein, 9 aa, synthetic construct
PVQGTIKLY

SEQ ID NO: 22128 - protein, 9 aa, synthetic construct
PVQGTIKLH

SEQ ID NO: 22129 - protein, 9 aa, synthetic construct
PVQGTIKVY

SEQ ID NO: 22130 - protein, 9 aa, synthetic construct
PVQGTIKVH

SEQ ID NO: 22131 - protein, 9 aa, synthetic construct
PVQGTIKVF

SEQ ID NO: 22132 - protein, 9 aa, synthetic construct
PLQGVVKVH

SEQ ID NO: 22133 - protein, 9 aa, synthetic construct
PVQGTGHLF

SEQ ID NO: 22134 - protein, 9 aa, synthetic construct
PVQGTGHVH

SEQ ID NO: 22135 - protein, 9 aa, synthetic construct
PVQGTGHVK

SEQ ID NO: 22136 - protein, 9 aa, synthetic construct
PVQGTGRVY

SEQ ID NO: 22137 - protein, 9 aa, synthetic construct
PVQGTGRVH

SEQ ID NO: 22138 - protein, 9 aa, synthetic construct
PVQGTGRVF

SEQ ID NO: 22139 - protein, 9 aa, synthetic construct
PLQGVVKVF

SEQ ID NO: 22140 - protein, 9 aa, synthetic construct
PVQGTGKVF

SEQ ID NO: 22141 - protein, 9 aa, synthetic construct
PVQGSVHLH

SEQ ID NO: 22142 - protein, 9 aa, synthetic construct
PVQGSVHLK

SEQ ID NO: 22143 - protein, 9 aa, synthetic construct
PVQGSVHLF

SEQ ID NO: 22144 - protein, 9 aa, synthetic construct
PVQGSVHVF

SEQ ID NO: 22145 - protein, 9 aa, synthetic construct
PVQGSVRLY

SEQ ID NO: 22146 - protein, 9 aa, synthetic construct
PVQGSVRLR

SEQ ID NO: 22147 - protein, 9 aa, synthetic construct
PVQGSVRLH

SEQ ID NO: 22148 - protein, 9 aa, synthetic construct
PVQGSVRVF

SEQ ID NO: 22149 - protein, 9 aa, synthetic construct
PLQGVLHLH

SEQ ID NO: 22150 - protein, 9 aa, synthetic construct
PVQGSVKLR

SEQ ID NO: 22151 - protein, 9 aa, synthetic construct
PVQGSVKLH

SEQ ID NO: 22152 - protein, 9 aa, synthetic construct
PVQGSVKLK

SEQ ID NO: 22153 - protein, 9 aa, synthetic construct
PVQGSVKVR

SEQ ID NO: 22154 - protein, 9 aa, synthetic construct
PVQGSVKVH

SEQ ID NO: 22155 - protein, 9 aa, synthetic construct
PVQGSLHLY

SEQ ID NO: 22156 - protein, 9 aa, synthetic construct
PVQGSLHLR

SEQ ID NO: 22157 - protein, 9 aa, synthetic construct
PVQGSLHLK

SEQ ID NO: 22158 - protein, 9 aa, synthetic construct
PVQGSLHLF

SEQ ID NO: 22159 - protein, 9 aa, synthetic construct
PVQGSLHVR

SEQ ID NO: 22160 - protein, 9 aa, synthetic construct
PLQGVLHLF

SEQ ID NO: 22161 - protein, 9 aa, synthetic construct
PVQGSLRVY

SEQ ID NO: 22162 - protein, 9 aa, synthetic construct
PVQGSLRVH

SEQ ID NO: 22163 - protein, 9 aa, synthetic construct
PLQGVLHVY

SEQ ID NO: 22164 - protein, 9 aa, synthetic construct
PVQGSLKLY

SEQ ID NO: 22165 - protein, 9 aa, synthetic construct
PVQGSLKLH

SEQ ID NO: 22166 - protein, 9 aa, synthetic construct
PVQGSLKVY

SEQ ID NO: 22167 - protein, 9 aa, synthetic construct
PVQGSLKVF

SEQ ID NO: 22168 - protein, 9 aa, synthetic construct
PVQGSAHLR

SEQ ID NO: 22169 - protein, 9 aa, synthetic construct
PVQGSAHLK

SEQ ID NO: 22170 - protein, 9 aa, synthetic construct
PVQGSAHLF

SEQ ID NO: 22171 - protein, 9 aa, synthetic construct
PVQGSAHVY

SEQ ID NO: 22172 - protein, 9 aa, synthetic construct
PVQGSAHVR

SEQ ID NO: 22173 - protein, 9 aa, synthetic construct
PVQGSAHVH

SEQ ID NO: 22174 - protein, 9 aa, synthetic construct
PVQGSARVY

SEQ ID NO: 22175 - protein, 9 aa, synthetic construct
PVQGSARVF

SEQ ID NO: 22176 - protein, 9 aa, synthetic construct
PVQGSAKLH

SEQ ID NO: 22177 - protein, 9 aa, synthetic construct
PVQGSAKVY

SEQ ID NO: 22178 - protein, 9 aa, synthetic construct
PVQGSIHLR

SEQ ID NO: 22179 - protein, 9 aa, synthetic construct
PVQGSIHLF

SEQ ID NO: 22180 - protein, 9 aa, synthetic construct
PLQGVLRLY

SEQ ID NO: 22181 - protein, 9 aa, synthetic construct
PVQGSIRLY

SEQ ID NO: 22182 - protein, 9 aa, synthetic construct
PVQGSIRLH

SEQ ID NO: 22183 - protein, 9 aa, synthetic construct
PVQGSIRLF

SEQ ID NO: 22184 - protein, 9 aa, synthetic construct
PVQGSIRVR

SEQ ID NO: 22185 - protein, 9 aa, synthetic construct
PVQGSIRVK

SEQ ID NO: 22186 - protein, 9 aa, synthetic construct
PVQGSIRVF

SEQ ID NO: 22187 - protein, 9 aa, synthetic construct
PVQGSIKLR

SEQ ID NO: 22188 - protein, 9 aa, synthetic construct
PVQGSIKLH

SEQ ID NO: 22189 - protein, 9 aa, synthetic construct
PVQGSIKLK

SEQ ID NO: 22190 - protein, 9 aa, synthetic construct
PVQGSIKVY

SEQ ID NO: 22191 - protein, 9 aa, synthetic construct
PLQGVLRLH

SEQ ID NO: 22192 - protein, 9 aa, synthetic construct
PVQGSGHLR

SEQ ID NO: 22193 - protein, 9 aa, synthetic construct
PVQGSGHLH

SEQ ID NO: 22194 - protein, 9 aa, synthetic construct
PVQGSGHLK

SEQ ID NO: 22195 - protein, 9 aa, synthetic construct
PVQGSGHLF

SEQ ID NO: 22196 - protein, 9 aa, synthetic construct
PVQGSGHVY

SEQ ID NO: 22197 - protein, 9 aa, synthetic construct
PVQGSGHVR

SEQ ID NO: 22198 - protein, 9 aa, synthetic construct
PVQGSGHVH

SEQ ID NO: 22199 - protein, 9 aa, synthetic construct
PVQGSGHVK

SEQ ID NO: 22200 - protein, 9 aa, synthetic construct
PVQGSGHVF

SEQ ID NO: 22201 - protein, 9 aa, synthetic construct
PVQGSGRLK

SEQ ID NO: 22202 - protein, 9 aa, synthetic construct
PVQGSGRVH

SEQ ID NO: 22203 - protein, 9 aa, synthetic construct
PVQGSGKLY

SEQ ID NO: 22204 - protein, 9 aa, synthetic construct
PVQGSGKLH

SEQ ID NO: 22205 - protein, 9 aa, synthetic construct
PVQGSGKLF

SEQ ID NO: 22206 - protein, 9 aa, synthetic construct
PVQGSGKVY

SEQ ID NO: 22207 - protein, 9 aa, synthetic construct
PVQGSGKVH

SEQ ID NO: 22208 - protein, 9 aa, synthetic construct
PLQGVLRVY

SEQ ID NO: 22209 - protein, 9 aa, synthetic construct
PVQGVVRLY

SEQ ID NO: 22210 - protein, 9 aa, synthetic construct
PVQGVVRLF

SEQ ID NO: 22211 - protein, 9 aa, synthetic construct
PVQGVVKVR

SEQ ID NO: 22212 - protein, 9 aa, synthetic construct
PVQGVVKVH

SEQ ID NO: 22213 - protein, 9 aa, synthetic construct
PLQGVLRVK

SEQ ID NO: 22214 - protein, 9 aa, synthetic construct
PLQGVLRVF

SEQ ID NO: 22215 - protein, 9 aa, synthetic construct
PVQGVLRLY

SEQ ID NO: 22216 - protein, 9 aa, synthetic construct
PVQGVLRLF

SEQ ID NO: 22217 - protein, 9 aa, synthetic construct
PVQGVLRVY

SEQ ID NO: 22218 - protein, 9 aa, synthetic construct
PVQGVLRVH

SEQ ID NO: 22219 - protein, 9 aa, synthetic construct
PLQGVLKLY

SEQ ID NO: 22220 - protein, 9 aa, synthetic construct
PVQGVLKLY

SEQ ID NO: 22221 - protein, 9 aa, synthetic construct
PVQGVLKVY

SEQ ID NO: 22222 - protein, 9 aa, synthetic construct
PVQGVAHLY

SEQ ID NO: 22223 - protein, 9 aa, synthetic construct
PVQGVAHVR

SEQ ID NO: 22224 - protein, 9 aa, synthetic construct
PVQGVAHVK

SEQ ID NO: 22225 - protein, 9 aa, synthetic construct
PVQGVARLK

SEQ ID NO: 22226 - protein, 9 aa, synthetic construct
PVQGVARLF

SEQ ID NO: 22227 - protein, 9 aa, synthetic construct
PVQGVARVY

SEQ ID NO: 22228 - protein, 9 aa, synthetic construct
PVQGVARVR

SEQ ID NO: 22229 - protein, 9 aa, synthetic construct
PVQGVARVH

SEQ ID NO: 22230 - protein, 9 aa, synthetic construct
PVQGVAKLY

SEQ ID NO: 22231 - protein, 9 aa, synthetic construct
PLQGVLKLF

SEQ ID NO: 22232 - protein, 9 aa, synthetic construct
PVQGVIHLF

SEQ ID NO: 22233 - protein, 9 aa, synthetic construct
PLQGVLKVY

SEQ ID NO: 22234 - protein, 9 aa, synthetic construct
PVQGVIRVY

SEQ ID NO: 22235 - protein, 9 aa, synthetic construct
PVQGVIKLY

SEQ ID NO: 22236 - protein, 9 aa, synthetic construct
PVQGVIKLK

SEQ ID NO: 22237 - protein, 9 aa, synthetic construct
PVQGVIKLF

SEQ ID NO: 22238 - protein, 9 aa, synthetic construct
PVQGVIKVY

SEQ ID NO: 22239 - protein, 9 aa, synthetic construct
PVQGVIKVF

SEQ ID NO: 22240 - protein, 9 aa, synthetic construct
PLQGVLKVH

SEQ ID NO: 22241 - protein, 9 aa, synthetic construct
PVQGVGHVK

SEQ ID NO: 22242 - protein, 9 aa, synthetic construct
PVQGVGHVF

SEQ ID NO: 22243 - protein, 9 aa, synthetic construct
PVQGVGRLF

SEQ ID NO: 22244 - protein, 9 aa, synthetic construct
PVQGVGRVF

SEQ ID NO: 22245 - protein, 9 aa, synthetic construct
PLNGTLKLR

SEQ ID NO: 22246 - protein, 9 aa, synthetic construct
PLQGVAHLY

SEQ ID NO: 22247 - protein, 9 aa, synthetic construct
PVQGGVHLR

SEQ ID NO: 22248 - protein, 9 aa, synthetic construct
PVQGGVHLH

SEQ ID NO: 22249 - protein, 9 aa, synthetic construct
PVQGGVHLF

SEQ ID NO: 22250 - protein, 9 aa, synthetic construct
PVQGGVHVR

SEQ ID NO: 22251 - protein, 9 aa, synthetic construct
PVQGGVHVF

SEQ ID NO: 22252 - protein, 9 aa, synthetic construct
PLQGVAHLR

SEQ ID NO: 22253 - protein, 9 aa, synthetic construct
PVQGGVRLH

SEQ ID NO: 22254 - protein, 9 aa, synthetic construct
PVQGGVRVR

SEQ ID NO: 22255 - protein, 9 aa, synthetic construct
PVQGGVRVK

SEQ ID NO: 22256 - protein, 9 aa, synthetic construct
PLQGVAHLH

SEQ ID NO: 22257 - protein, 9 aa, synthetic construct
PVQGGVKLH

SEQ ID NO: 22258 - protein, 9 aa, synthetic construct
PVQGGVKVH

SEQ ID NO: 22259 - protein, 9 aa, synthetic construct
PVQGGVKVK

SEQ ID NO: 22260 - protein, 9 aa, synthetic construct
PLQGVAHLK

SEQ ID NO: 22261 - protein, 9 aa, synthetic construct
PVQGGLHVY

SEQ ID NO: 22262 - protein, 9 aa, synthetic construct
PVQGGLRLH

SEQ ID NO: 22263 - protein, 9 aa, synthetic construct
PVQGGLRVF

SEQ ID NO: 22264 - protein, 9 aa, synthetic construct
PVQGGLKVH

SEQ ID NO: 22265 - protein, 9 aa, synthetic construct
PVQGGAHLR

SEQ ID NO: 22266 - protein, 9 aa, synthetic construct
PVQGGAHLF

SEQ ID NO: 22267 - protein, 9 aa, synthetic construct
PVQGGAHVY

SEQ ID NO: 22268 - protein, 9 aa, synthetic construct
PVQGGARLH

SEQ ID NO: 22269 - protein, 9 aa, synthetic construct
PVQGGARLF

SEQ ID NO: 22270 - protein, 9 aa, synthetic construct
PVQGGARVY

SEQ ID NO: 22271 - protein, 9 aa, synthetic construct
PVQGGARVF

SEQ ID NO: 22272 - protein, 9 aa, synthetic construct
PLQGVAHVK

SEQ ID NO: 22273 - protein, 9 aa, synthetic construct
PVQGGAKLH

SEQ ID NO: 22274 - protein, 9 aa, synthetic construct
PVQGGAKVH

SEQ ID NO: 22275 - protein, 9 aa, synthetic construct
PLQGVAHVF

SEQ ID NO: 22276 - protein, 9 aa, synthetic construct
PVQGGIRLF

SEQ ID NO: 22277 - protein, 9 aa, synthetic construct
PVQGGIRVR

SEQ ID NO: 22278 - protein, 9 aa, synthetic construct
PVQGGIRVK

SEQ ID NO: 22279 - protein, 9 aa, synthetic construct
PVQGGIKLY

SEQ ID NO: 22280 - protein, 9 aa, synthetic construct
PVQGGIKVH

SEQ ID NO: 22281 - protein, 9 aa, synthetic construct
PVQGGIKVF

SEQ ID NO: 22282 - protein, 9 aa, synthetic construct
PVQGGGHLY

SEQ ID NO: 22283 - protein, 9 aa, synthetic construct
PVQGGGHVY

SEQ ID NO: 22284 - protein, 9 aa, synthetic construct
PVQGGGHVR

SEQ ID NO: 22285 - protein, 9 aa, synthetic construct
PVQGGGRLY

SEQ ID NO: 22286 - protein, 9 aa, synthetic construct
PVQGGGRLK

SEQ ID NO: 22287 - protein, 9 aa, synthetic construct
PVQGGGRLF

SEQ ID NO: 22288 - protein, 9 aa, synthetic construct
PVQGGGRVH

SEQ ID NO: 22289 - protein, 9 aa, synthetic construct
PVQGGGRVK

SEQ ID NO: 22290 - protein, 9 aa, synthetic construct
PVQGGGKLY

SEQ ID NO: 22291 - protein, 9 aa, synthetic construct
PVQGGGKVH

SEQ ID NO: 22292 - protein, 9 aa, synthetic construct
PVQAAVHLR

SEQ ID NO: 22293 - protein, 9 aa, synthetic construct
PVQAAVHLF

SEQ ID NO: 22294 - protein, 9 aa, synthetic construct
PVQAAVHVR

SEQ ID NO: 22295 - protein, 9 aa, synthetic construct
PVQAAVHVK

SEQ ID NO: 22296 - protein, 9 aa, synthetic construct
PVQAAVHVF

SEQ ID NO: 22297 - protein, 9 aa, synthetic construct
PVQAAVRLY

SEQ ID NO: 22298 - protein, 9 aa, synthetic construct
PVQAAVRLH

SEQ ID NO: 22299 - protein, 9 aa, synthetic construct
PVQAAVKLF

SEQ ID NO: 22300 - protein, 9 aa, synthetic construct
PVQAAVKVK

SEQ ID NO: 22301 - protein, 9 aa, synthetic construct
PVQAALHLR

SEQ ID NO: 22302 - protein, 9 aa, synthetic construct
PVQAALRVY

SEQ ID NO: 22303 - protein, 9 aa, synthetic construct
PVQAALKLF

SEQ ID NO: 22304 - protein, 9 aa, synthetic construct
PVQAALKVY

SEQ ID NO: 22305 - protein, 9 aa, synthetic construct
PVQAALKVF

SEQ ID NO: 22306 - protein, 9 aa, synthetic construct
PLQGVAKLH

SEQ ID NO: 22307 - protein, 9 aa, synthetic construct
PVQAAARLH

SEQ ID NO: 22308 - protein, 9 aa, synthetic construct
PVQAAARLF

SEQ ID NO: 22309 - protein, 9 aa, synthetic construct
PVQAAARVY

SEQ ID NO: 22310 - protein, 9 aa, synthetic construct
PVQAAARVR

SEQ ID NO: 22311 - protein, 9 aa, synthetic construct
PVQAAARVK

SEQ ID NO: 22312 - protein, 9 aa, synthetic construct
PVQAAAKLH

SEQ ID NO: 22313 - protein, 9 aa, synthetic construct
PVQAAAKLF

SEQ ID NO: 22314 - protein, 9 aa, synthetic construct
PVQAAIHLY

SEQ ID NO: 22315 - protein, 9 aa, synthetic construct
PVQAAIHLR

SEQ ID NO: 22316 - protein, 9 aa, synthetic construct
PVQAAIHLH

SEQ ID NO: 22317 - protein, 9 aa, synthetic construct
PVQAAIHLK

SEQ ID NO: 22318 - protein, 9 aa, synthetic construct
PVQAAIHVY

SEQ ID NO: 22319 - protein, 9 aa, synthetic construct
PVQAAIHVH

SEQ ID NO: 22320 - protein, 9 aa, synthetic construct
PVQAAIHVK

SEQ ID NO: 22321 - protein, 9 aa, synthetic construct
PVQAAIHVF

SEQ ID NO: 22322 - protein, 9 aa, synthetic construct
PVQAAIRLY

SEQ ID NO: 22323 - protein, 9 aa, synthetic construct
PVQAAIRLR

SEQ ID NO: 22324 - protein, 9 aa, synthetic construct
PVQAAIRLF

SEQ ID NO: 22325 - protein, 9 aa, synthetic construct
PVQAAIRVF

SEQ ID NO: 22326 - protein, 9 aa, synthetic construct
PVQAAIKLY

SEQ ID NO: 22327 - protein, 9 aa, synthetic construct
PVQAAIKLK

SEQ ID NO: 22328 - protein, 9 aa, synthetic construct
PVQAAIKLF

SEQ ID NO: 22329 - protein, 9 aa, synthetic construct
PVQAAIKVY

SEQ ID NO: 22330 - protein, 9 aa, synthetic construct
PVQAAIKVR

SEQ ID NO: 22331 - protein, 9 aa, synthetic construct
PLQGVAKVH

SEQ ID NO: 22332 - protein, 9 aa, synthetic construct
PVQAAGHLY

SEQ ID NO: 22333 - protein, 9 aa, synthetic construct
PVQAAGHLF

SEQ ID NO: 22334 - protein, 9 aa, synthetic construct
PVQAAGRLY

SEQ ID NO: 22335 - protein, 9 aa, synthetic construct
PVQAAGRLH

SEQ ID NO: 22336 - protein, 9 aa, synthetic construct
PVQAAGRLK

SEQ ID NO: 22337 - protein, 9 aa, synthetic construct
PLQGVAKVF

SEQ ID NO: 22338 - protein, 9 aa, synthetic construct
PVQATVHLY

SEQ ID NO: 22339 - protein, 9 aa, synthetic construct
PVQATVHLR

SEQ ID NO: 22340 - protein, 9 aa, synthetic construct
PVQATVHLK

SEQ ID NO: 22341 - protein, 9 aa, synthetic construct
PVQATVHVR

SEQ ID NO: 22342 - protein, 9 aa, synthetic construct
PVQATVHVK

SEQ ID NO: 22343 - protein, 9 aa, synthetic construct
PVQATVHVF

SEQ ID NO: 22344 - protein, 9 aa, synthetic construct
PLQGVIHLR

SEQ ID NO: 22345 - protein, 9 aa, synthetic construct
PVQATVRLR

SEQ ID NO: 22346 - protein, 9 aa, synthetic construct
PVQATVRLH

SEQ ID NO: 22347 - protein, 9 aa, synthetic construct
PVQATVRVY

SEQ ID NO: 22348 - protein, 9 aa, synthetic construct
PVQATVRVH

SEQ ID NO: 22349 - protein, 9 aa, synthetic construct
PVQATVKLY

SEQ ID NO: 22350 - protein, 9 aa, synthetic construct
PVQATVKLR

SEQ ID NO: 22351 - protein, 9 aa, synthetic construct
PVQATVKLH

SEQ ID NO: 22352 - protein, 9 aa, synthetic construct
PVQATVKVY

SEQ ID NO: 22353 - protein, 9 aa, synthetic construct
PVQATVKVH

SEQ ID NO: 22354 - protein, 9 aa, synthetic construct
PVQATVKVF

SEQ ID NO: 22355 - protein, 9 aa, synthetic construct
PVQATLHLY

SEQ ID NO: 22356 - protein, 9 aa, synthetic construct
PVQATLHLK

SEQ ID NO: 22357 - protein, 9 aa, synthetic construct
PVQATLHLF

SEQ ID NO: 22358 - protein, 9 aa, synthetic construct
PVQATLRVF

SEQ ID NO: 22359 - protein, 9 aa, synthetic construct
PVQATLKLY

SEQ ID NO: 22360 - protein, 9 aa, synthetic construct
PVQATLKLF

SEQ ID NO: 22361 - protein, 9 aa, synthetic construct
PVQATLKVH

SEQ ID NO: 22362 - protein, 9 aa, synthetic construct
PVQATAHLR

SEQ ID NO: 22363 - protein, 9 aa, synthetic construct
PVQATAHVH

SEQ ID NO: 22364 - protein, 9 aa, synthetic construct
PVQATAHVF

SEQ ID NO: 22365 - protein, 9 aa, synthetic construct
PVQATARVF

SEQ ID NO: 22366 - protein, 9 aa, synthetic construct
PVQATAKLH

SEQ ID NO: 22367 - protein, 9 aa, synthetic construct
PVQATAKLF

SEQ ID NO: 22368 - protein, 9 aa, synthetic construct
PVQATAKVY

SEQ ID NO: 22369 - protein, 9 aa, synthetic construct
PVQATIHLY

SEQ ID NO: 22370 - protein, 9 aa, synthetic construct
PVQATIRLY

SEQ ID NO: 22371 - protein, 9 aa, synthetic construct
PVQATIRLH

SEQ ID NO: 22372 - protein, 9 aa, synthetic construct
PVQATIRLF

SEQ ID NO: 22373 - protein, 9 aa, synthetic construct
PVQATIRVH

SEQ ID NO: 22374 - protein, 9 aa, synthetic construct
PVQATIRVF

SEQ ID NO: 22375 - protein, 9 aa, synthetic construct
PVQATIKLY

SEQ ID NO: 22376 - protein, 9 aa, synthetic construct
PVQATIKLH

SEQ ID NO: 22377 - protein, 9 aa, synthetic construct
PVQATIKLK

SEQ ID NO: 22378 - protein, 9 aa, synthetic construct
PVQATIKLF

SEQ ID NO: 22379 - protein, 9 aa, synthetic construct
PVQATIKVF

SEQ ID NO: 22380 - protein, 9 aa, synthetic construct
PVQATGHLR

SEQ ID NO: 22381 - protein, 9 aa, synthetic construct
PVQATGHVY

SEQ ID NO: 22382 - protein, 9 aa, synthetic construct
PVQATGHVR

SEQ ID NO: 22383 - protein, 9 aa, synthetic construct
PVQATGHVF

SEQ ID NO: 22384 - protein, 9 aa, synthetic construct
PVQATGRLH

SEQ ID NO: 22385 - protein, 9 aa, synthetic construct
PVQATGRLF

SEQ ID NO: 22386 - protein, 9 aa, synthetic construct
PVQATGRVY

SEQ ID NO: 22387 - protein, 9 aa, synthetic construct
PVQATGKLY

SEQ ID NO: 22388 - protein, 9 aa, synthetic construct
PVQATGKLR

SEQ ID NO: 22389 - protein, 9 aa, synthetic construct
PVQATGKLF

SEQ ID NO: 22390 - protein, 9 aa, synthetic construct
PVQATGKVY

SEQ ID NO: 22391 - protein, 9 aa, synthetic construct
PVQATGKVH

SEQ ID NO: 22392 - protein, 9 aa, synthetic construct
PVQATGKVF

SEQ ID NO: 22393 - protein, 9 aa, synthetic construct
PVQASVHLF

SEQ ID NO: 22394 - protein, 9 aa, synthetic construct
PVQASVHVY

SEQ ID NO: 22395 - protein, 9 aa, synthetic construct
PVQASVHVR

SEQ ID NO: 22396 - protein, 9 aa, synthetic construct
PVQASVRLY

SEQ ID NO: 22397 - protein, 9 aa, synthetic construct
PVQASVRLR

SEQ ID NO: 22398 - protein, 9 aa, synthetic construct
PVQASVRLK

SEQ ID NO: 22399 - protein, 9 aa, synthetic construct
PVQASVRLF

SEQ ID NO: 22400 - protein, 9 aa, synthetic construct
PVQASVRVY

SEQ ID NO: 22401 - protein, 9 aa, synthetic construct
PVQASVRVR

SEQ ID NO: 22402 - protein, 9 aa, synthetic construct
PVQASVRVH

SEQ ID NO: 22403 - protein, 9 aa, synthetic construct
PVQASVRVF

SEQ ID NO: 22404 - protein, 9 aa, synthetic construct
PVQASVKLH

SEQ ID NO: 22405 - protein, 9 aa, synthetic construct
PVQASVKVY

SEQ ID NO: 22406 - protein, 9 aa, synthetic construct
PVQASVKVK

SEQ ID NO: 22407 - protein, 9 aa, synthetic construct
PVQASVKVF

SEQ ID NO: 22408 - protein, 9 aa, synthetic construct
PVQASLRLR

SEQ ID NO: 22409 - protein, 9 aa, synthetic construct
PVQASLRVY

SEQ ID NO: 22410 - protein, 9 aa, synthetic construct
PVQASLRVF

SEQ ID NO: 22411 - protein, 9 aa, synthetic construct
PLQGVIKLY

SEQ ID NO: 22412 - protein, 9 aa, synthetic construct
PVQASLKLY

SEQ ID NO: 22413 - protein, 9 aa, synthetic construct
PVQASLKLH

SEQ ID NO: 22414 - protein, 9 aa, synthetic construct
PVQASLKLF

SEQ ID NO: 22415 - protein, 9 aa, synthetic construct
PVQASLKVY

SEQ ID NO: 22416 - protein, 9 aa, synthetic construct
PVQASAHLR

SEQ ID NO: 22417 - protein, 9 aa, synthetic construct
PVQASAHLH

SEQ ID NO: 22418 - protein, 9 aa, synthetic construct
PVQASAHLK

SEQ ID NO: 22419 - protein, 9 aa, synthetic construct
PVQASAHLF

SEQ ID NO: 22420 - protein, 9 aa, synthetic construct
PVQASAHVY

SEQ ID NO: 22421 - protein, 9 aa, synthetic construct
PVQASAHVR

SEQ ID NO: 22422 - protein, 9 aa, synthetic construct
PVQASAHVK

SEQ ID NO: 22423 - protein, 9 aa, synthetic construct
PVQASAHVF

SEQ ID NO: 22424 - protein, 9 aa, synthetic construct
PVQASARVY

SEQ ID NO: 22425 - protein, 9 aa, synthetic construct
PVQASARVF

SEQ ID NO: 22426 - protein, 9 aa, synthetic construct
PLQGVIKLK

SEQ ID NO: 22427 - protein, 9 aa, synthetic construct
PVQASAKLY

SEQ ID NO: 22428 - protein, 9 aa, synthetic construct
PVQASAKLR

SEQ ID NO: 22429 - protein, 9 aa, synthetic construct
PVQASAKLH

SEQ ID NO: 22430 - protein, 9 aa, synthetic construct
PVQASAKLF

SEQ ID NO: 22431 - protein, 9 aa, synthetic construct
PVQASAKVY

SEQ ID NO: 22432 - protein, 9 aa, synthetic construct
PVQASAKVH

SEQ ID NO: 22433 - protein, 9 aa, synthetic construct
PVQASAKVF

SEQ ID NO: 22434 - protein, 9 aa, synthetic construct
PLQGVIKLF

SEQ ID NO: 22435 - protein, 9 aa, synthetic construct
PVQASIHLY

SEQ ID NO: 22436 - protein, 9 aa, synthetic construct
PVQASIHLR

SEQ ID NO: 22437 - protein, 9 aa, synthetic construct
PVQASIHLH

SEQ ID NO: 22438 - protein, 9 aa, synthetic construct
PVQASIHVH

SEQ ID NO: 22439 - protein, 9 aa, synthetic construct
PLQGVIKVY

SEQ ID NO: 22440 - protein, 9 aa, synthetic construct
PVQASIRLY

SEQ ID NO: 22441 - protein, 9 aa, synthetic construct
PVQASIRLR

SEQ ID NO: 22442 - protein, 9 aa, synthetic construct
PVQASIRLH

SEQ ID NO: 22443 - protein, 9 aa, synthetic construct
PVQASIRLK

SEQ ID NO: 22444 - protein, 9 aa, synthetic construct
PVQASIRLF

SEQ ID NO: 22445 - protein, 9 aa, synthetic construct
PVQASIRVY

SEQ ID NO: 22446 - protein, 9 aa, synthetic construct
PVQASIRVR

SEQ ID NO: 22447 - protein, 9 aa, synthetic construct
PVQASIRVH

SEQ ID NO: 22448 - protein, 9 aa, synthetic construct
PVQASIRVK

SEQ ID NO: 22449 - protein, 9 aa, synthetic construct
PVQASIRVF

SEQ ID NO: 22450 - protein, 9 aa, synthetic construct
PVQASIKLY

SEQ ID NO: 22451 - protein, 9 aa, synthetic construct
PVQASIKLH

SEQ ID NO: 22452 - protein, 9 aa, synthetic construct
PVQASIKLK

SEQ ID NO: 22453 - protein, 9 aa, synthetic construct
PVQASIKLF

SEQ ID NO: 22454 - protein, 9 aa, synthetic construct
PVQASIKVY

SEQ ID NO: 22455 - protein, 9 aa, synthetic construct
PVQASGHLR

SEQ ID NO: 22456 - protein, 9 aa, synthetic construct
PVQASGHVR

SEQ ID NO: 22457 - protein, 9 aa, synthetic construct
PLQGVIKVK

SEQ ID NO: 22458 - protein, 9 aa, synthetic construct
PVQASGRLR

SEQ ID NO: 22459 - protein, 9 aa, synthetic construct
PVQASGRLH

SEQ ID NO: 22460 - protein, 9 aa, synthetic construct
PVQASGRLK

SEQ ID NO: 22461 - protein, 9 aa, synthetic construct
PVQASGRVY

SEQ ID NO: 22462 - protein, 9 aa, synthetic construct
PVQASGRVR

SEQ ID NO: 22463 - protein, 9 aa, synthetic construct
PLQGVIKVF

SEQ ID NO: 22464 - protein, 9 aa, synthetic construct
PVQASGKLY

SEQ ID NO: 22465 - protein, 9 aa, synthetic construct
PVQASGKLH

SEQ ID NO: 22466 - protein, 9 aa, synthetic construct
PVQASGKVY

SEQ ID NO: 22467 - protein, 9 aa, synthetic construct
PVQASGKVH

SEQ ID NO: 22468 - protein, 9 aa, synthetic construct
PLQGVGHLY

SEQ ID NO: 22469 - protein, 9 aa, synthetic construct
PVQAVVHLY

SEQ ID NO: 22470 - protein, 9 aa, synthetic construct
PVQAVVHLR

SEQ ID NO: 22471 - protein, 9 aa, synthetic construct
PVQAVVHLK

SEQ ID NO: 22472 - protein, 9 aa, synthetic construct
PVQAVVHVR

SEQ ID NO: 22473 - protein, 9 aa, synthetic construct
PVQAVVHVF

SEQ ID NO: 22474 - protein, 9 aa, synthetic construct
PLQGVGHLR

SEQ ID NO: 22475 - protein, 9 aa, synthetic construct
PVQAVVRLR

SEQ ID NO: 22476 - protein, 9 aa, synthetic construct
PVQAVVRVF

SEQ ID NO: 22477 - protein, 9 aa, synthetic construct
PVQAVVKLY

SEQ ID NO: 22478 - protein, 9 aa, synthetic construct
PVQAVVKLH

SEQ ID NO: 22479 - protein, 9 aa, synthetic construct
PVQAVLHVY

SEQ ID NO: 22480 - protein, 9 aa, synthetic construct
PVQAVLHVR

SEQ ID NO: 22481 - protein, 9 aa, synthetic construct
PVQAVLHVF

SEQ ID NO: 22482 - protein, 9 aa, synthetic construct
PLQGVGHLF

SEQ ID NO: 22483 - protein, 9 aa, synthetic construct
PVQAVLKLF

SEQ ID NO: 22484 - protein, 9 aa, synthetic construct
PVQAVAHLY

SEQ ID NO: 22485 - protein, 9 aa, synthetic construct
PVQAVAHLR

SEQ ID NO: 22486 - protein, 9 aa, synthetic construct
PVQAVAHLH

SEQ ID NO: 22487 - protein, 9 aa, synthetic construct
PVQAVAHLK

SEQ ID NO: 22488 - protein, 9 aa, synthetic construct
PVQAVAHLF

SEQ ID NO: 22489 - protein, 9 aa, synthetic construct
PVQAVAHVY

SEQ ID NO: 22490 - protein, 9 aa, synthetic construct
PVQAVAHVR

SEQ ID NO: 22491 - protein, 9 aa, synthetic construct
PVQAVAHVK

SEQ ID NO: 22492 - protein, 9 aa, synthetic construct
PVQAVAHVF

SEQ ID NO: 22493 - protein, 9 aa, synthetic construct
PLQGVGHVK

SEQ ID NO: 22494 - protein, 9 aa, synthetic construct
PVQAVAKLY

SEQ ID NO: 22495 - protein, 9 aa, synthetic construct
PVQAVAKLF

SEQ ID NO: 22496 - protein, 9 aa, synthetic construct
PVQAVAKVY

SEQ ID NO: 22497 - protein, 9 aa, synthetic construct
PVQAVAKVR

SEQ ID NO: 22498 - protein, 9 aa, synthetic construct
PVQAVAKVH

SEQ ID NO: 22499 - protein, 9 aa, synthetic construct
PVQAVAKVF

SEQ ID NO: 22500 - protein, 9 aa, synthetic construct
PLQGVGHVF

SEQ ID NO: 22501 - protein, 9 aa, synthetic construct
PVQAVIHLR

SEQ ID NO: 22502 - protein, 9 aa, synthetic construct
PVQAVIHVH

SEQ ID NO: 22503 - protein, 9 aa, synthetic construct
PVQAVIRLH

SEQ ID NO: 22504 - protein, 9 aa, synthetic construct
PVQAVIRVF

SEQ ID NO: 22505 - protein, 9 aa, synthetic construct
PVQAVIKLY

SEQ ID NO: 22506 - protein, 9 aa, synthetic construct
PVQAVIKLH

SEQ ID NO: 22507 - protein, 9 aa, synthetic construct
PVQAVIKLF

SEQ ID NO: 22508 - protein, 9 aa, synthetic construct
PVQAVGHLR

SEQ ID NO: 22509 - protein, 9 aa, synthetic construct
PVQAVGHLK

SEQ ID NO: 22510 - protein, 9 aa, synthetic construct
PVQAVGHVY

SEQ ID NO: 22511 - protein, 9 aa, synthetic construct
PVQAVGHVR

SEQ ID NO: 22512 - protein, 9 aa, synthetic construct
PVQAVGHVH

SEQ ID NO: 22513 - protein, 9 aa, synthetic construct
PVQAVGRLY

SEQ ID NO: 22514 - protein, 9 aa, synthetic construct
PVQAVGRLH

SEQ ID NO: 22515 - protein, 9 aa, synthetic construct
PVQAVGRLK

SEQ ID NO: 22516 - protein, 9 aa, synthetic construct
PVQAVGRVY

SEQ ID NO: 22517 - protein, 9 aa, synthetic construct
PVQAVGRVH

SEQ ID NO: 22518 - protein, 9 aa, synthetic construct
PVQAVGRVK

SEQ ID NO: 22519 - protein, 9 aa, synthetic construct
PVQAVGRVF

SEQ ID NO: 22520 - protein, 9 aa, synthetic construct
PLQGVGRLF

SEQ ID NO: 22521 - protein, 9 aa, synthetic construct
PVQAVGKLK

SEQ ID NO: 22522 - protein, 9 aa, synthetic construct
PVQAVGKVY

SEQ ID NO: 22523 - protein, 9 aa, synthetic construct
PVQAGVHLY

SEQ ID NO: 22524 - protein, 9 aa, synthetic construct
PVQAGVHLK

SEQ ID NO: 22525 - protein, 9 aa, synthetic construct
PVQAGVHVK

SEQ ID NO: 22526 - protein, 9 aa, synthetic construct
PVQAGVHVF

SEQ ID NO: 22527 - protein, 9 aa, synthetic construct
PVQAGVRLH

SEQ ID NO: 22528 - protein, 9 aa, synthetic construct
PVQAGVRLF

SEQ ID NO: 22529 - protein, 9 aa, synthetic construct
PVQAGVRVY

SEQ ID NO: 22530 - protein, 9 aa, synthetic construct
PVQAGVRVR

SEQ ID NO: 22531 - protein, 9 aa, synthetic construct
PVQAGVRVK

SEQ ID NO: 22532 - protein, 9 aa, synthetic construct
PLQGVGRVH

SEQ ID NO: 22533 - protein, 9 aa, synthetic construct
PVQAGVKVK

SEQ ID NO: 22534 - protein, 9 aa, synthetic construct
PVQAGLRLH

SEQ ID NO: 22535 - protein, 9 aa, synthetic construct
PLNGTLKVF

SEQ ID NO: 22536 - protein, 9 aa, synthetic construct
PLQGVGKLY

SEQ ID NO: 22537 - protein, 9 aa, synthetic construct
PVQAGLKLF

SEQ ID NO: 22538 - protein, 9 aa, synthetic construct
PVQAGLKVY

SEQ ID NO: 22539 - protein, 9 aa, synthetic construct
PLQGVGKLR

SEQ ID NO: 22540 - protein, 9 aa, synthetic construct
PVQAGAHLH

SEQ ID NO: 22541 - protein, 9 aa, synthetic construct
PVQAGAHVH

SEQ ID NO: 22542 - protein, 9 aa, synthetic construct
PVQAGARLY

SEQ ID NO: 22543 - protein, 9 aa, synthetic construct
PVQAGARLH

SEQ ID NO: 22544 - protein, 9 aa, synthetic construct
PVQAGARLF

SEQ ID NO: 22545 - protein, 9 aa, synthetic construct
PVQAGARVY

SEQ ID NO: 22546 - protein, 9 aa, synthetic construct
PVQAGARVH

SEQ ID NO: 22547 - protein, 9 aa, synthetic construct
PVQAGAKLY

SEQ ID NO: 22548 - protein, 9 aa, synthetic construct
PVQAGAKLH

SEQ ID NO: 22549 - protein, 9 aa, synthetic construct
PVQAGAKVF

SEQ ID NO: 22550 - protein, 9 aa, synthetic construct
PLQGVGKLF

SEQ ID NO: 22551 - protein, 9 aa, synthetic construct
PVQAGIHLR

SEQ ID NO: 22552 - protein, 9 aa, synthetic construct
PVQAGIHLK

SEQ ID NO: 22553 - protein, 9 aa, synthetic construct
PVQAGIHLF

SEQ ID NO: 22554 - protein, 9 aa, synthetic construct
PVQAGIHVR

SEQ ID NO: 22555 - protein, 9 aa, synthetic construct
PVQAGIHVH

SEQ ID NO: 22556 - protein, 9 aa, synthetic construct
PVQAGIRLH

SEQ ID NO: 22557 - protein, 9 aa, synthetic construct
PVQAGIRLF

SEQ ID NO: 22558 - protein, 9 aa, synthetic construct
PVQAGIKLY

SEQ ID NO: 22559 - protein, 9 aa, synthetic construct
PVQAGIKLH

SEQ ID NO: 22560 - protein, 9 aa, synthetic construct
PVQAGIKLF

SEQ ID NO: 22561 - protein, 9 aa, synthetic construct
PVQAGIKVY

SEQ ID NO: 22562 - protein, 9 aa, synthetic construct
PVQAGIKVF

SEQ ID NO: 22563 - protein, 9 aa, synthetic construct
PVQAGGHLR

SEQ ID NO: 22564 - protein, 9 aa, synthetic construct
PVQAGGHLH

SEQ ID NO: 22565 - protein, 9 aa, synthetic construct
PVQAGGHLF

SEQ ID NO: 22566 - protein, 9 aa, synthetic construct
PVQAGGHVR

SEQ ID NO: 22567 - protein, 9 aa, synthetic construct
PVQAGGHVH

SEQ ID NO: 22568 - protein, 9 aa, synthetic construct
PVQAGGHVK

SEQ ID NO: 22569 - protein, 9 aa, synthetic construct
PVQAGGHVF

SEQ ID NO: 22570 - protein, 9 aa, synthetic construct
PVQAGGRLY

SEQ ID NO: 22571 - protein, 9 aa, synthetic construct
PVQAGGRLH

SEQ ID NO: 22572 - protein, 9 aa, synthetic construct
PVQAGGRLK

SEQ ID NO: 22573 - protein, 9 aa, synthetic construct
PVQAGGRVY

SEQ ID NO: 22574 - protein, 9 aa, synthetic construct
PVQAGGRVR

SEQ ID NO: 22575 - protein, 9 aa, synthetic construct
PVQAGGRVH

SEQ ID NO: 22576 - protein, 9 aa, synthetic construct
PVQAGGKLY

SEQ ID NO: 22577 - protein, 9 aa, synthetic construct
PVQAGGKLR

SEQ ID NO: 22578 - protein, 9 aa, synthetic construct
PVQAGGKLH

SEQ ID NO: 22579 - protein, 9 aa, synthetic construct
PVQAGGKVH

SEQ ID NO: 22580 - protein, 9 aa, synthetic construct
PVQAGGKVK

SEQ ID NO: 22581 - protein, 9 aa, synthetic construct
PLNGAVKLR

SEQ ID NO: 22582 - protein, 9 aa, synthetic construct
PLQGGVHLY

SEQ ID NO: 22583 - protein, 9 aa, synthetic construct
PLQGGVHLR

SEQ ID NO: 22584 - protein, 9 aa, synthetic construct
PVPGAVRLY

SEQ ID NO: 22585 - protein, 9 aa, synthetic construct
PVPGAVRLF

SEQ ID NO: 22586 - protein, 9 aa, synthetic construct
PVPGAVRVY

SEQ ID NO: 22587 - protein, 9 aa, synthetic construct
PVPGAVRVH

SEQ ID NO: 22588 - protein, 9 aa, synthetic construct
PVPGAVRVF

SEQ ID NO: 22589 - protein, 9 aa, synthetic construct
PLQGGVHLH

SEQ ID NO: 22590 - protein, 9 aa, synthetic construct
PLQGGVHLK

SEQ ID NO: 22591 - protein, 9 aa, synthetic construct
PVPGALHLH

SEQ ID NO: 22592 - protein, 9 aa, synthetic construct
PVPGALHVR

SEQ ID NO: 22593 - protein, 9 aa, synthetic construct
PVPGALHVH

SEQ ID NO: 22594 - protein, 9 aa, synthetic construct
PVPGALHVK

SEQ ID NO: 22595 - protein, 9 aa, synthetic construct
PVPGALHVF

SEQ ID NO: 22596 - protein, 9 aa, synthetic construct
PLQGGVHLF

SEQ ID NO: 22597 - protein, 9 aa, synthetic construct
PVPGALRLY

SEQ ID NO: 22598 - protein, 9 aa, synthetic construct
PVPGALRLF

SEQ ID NO: 22599 - protein, 9 aa, synthetic construct
PVPGALRVK

SEQ ID NO: 22600 - protein, 9 aa, synthetic construct
PLQGGVHVY

SEQ ID NO: 22601 - protein, 9 aa, synthetic construct
PVPGALKLR

SEQ ID NO: 22602 - protein, 9 aa, synthetic construct
PVPGALKLF

SEQ ID NO: 22603 - protein, 9 aa, synthetic construct
PVPGALKVH

SEQ ID NO: 22604 - protein, 9 aa, synthetic construct
PLQGGVHVR

SEQ ID NO: 22605 - protein, 9 aa, synthetic construct
PVPGAAHLF

SEQ ID NO: 22606 - protein, 9 aa, synthetic construct
PVPGAAHVR

SEQ ID NO: 22607 - protein, 9 aa, synthetic construct
PVPGAAKLR

SEQ ID NO: 22608 - protein, 9 aa, synthetic construct
PVPGAAKVR

SEQ ID NO: 22609 - protein, 9 aa, synthetic construct
PLQGGVHVF

SEQ ID NO: 22610 - protein, 9 aa, synthetic construct
PVPGAIHLY

SEQ ID NO: 22611 - protein, 9 aa, synthetic construct
PVPGAIHVY

SEQ ID NO: 22612 - protein, 9 aa, synthetic construct
PVPGAIHVR

SEQ ID NO: 22613 - protein, 9 aa, synthetic construct
PLQGGVRLY

SEQ ID NO: 22614 - protein, 9 aa, synthetic construct
PVPGAIRLH

SEQ ID NO: 22615 - protein, 9 aa, synthetic construct
PVPGAIRLF

SEQ ID NO: 22616 - protein, 9 aa, synthetic construct
PVPGAIRVR

SEQ ID NO: 22617 - protein, 9 aa, synthetic construct
PVPGAIRVH

SEQ ID NO: 22618 - protein, 9 aa, synthetic construct
PVPGAIRVF

SEQ ID NO: 22619 - protein, 9 aa, synthetic construct
PVPGAIKLR

SEQ ID NO: 22620 - protein, 9 aa, synthetic construct
PVPGAIKLF

SEQ ID NO: 22621 - protein, 9 aa, synthetic construct
PVPGAIKVH

SEQ ID NO: 22622 - protein, 9 aa, synthetic construct
PVPGAIKVF

SEQ ID NO: 22623 - protein, 9 aa, synthetic construct
PLQGGVRLH

SEQ ID NO: 22624 - protein, 9 aa, synthetic construct
PVPGAGRVR

SEQ ID NO: 22625 - protein, 9 aa, synthetic construct
PVPGAGRVH

SEQ ID NO: 22626 - protein, 9 aa, synthetic construct
PVPGAGRVF

SEQ ID NO: 22627 - protein, 9 aa, synthetic construct
PLQGGVRLF

SEQ ID NO: 22628 - protein, 9 aa, synthetic construct
PVPGAGKLY

SEQ ID NO: 22629 - protein, 9 aa, synthetic construct
PLQGGVRVY

SEQ ID NO: 22630 - protein, 9 aa, synthetic construct
PVPGTVHLR

SEQ ID NO: 22631 - protein, 9 aa, synthetic construct
PVPGTVHLK

SEQ ID NO: 22632 - protein, 9 aa, synthetic construct
PVPGTVHLF

SEQ ID NO: 22633 - protein, 9 aa, synthetic construct
PVPGTVHVR

SEQ ID NO: 22634 - protein, 9 aa, synthetic construct
PVPGTVHVK

SEQ ID NO: 22635 - protein, 9 aa, synthetic construct
PVPGTVHVF

SEQ ID NO: 22636 - protein, 9 aa, synthetic construct
PLQGGVRVR

SEQ ID NO: 22637 - protein, 9 aa, synthetic construct
PVPGTVRVY

SEQ ID NO: 22638 - protein, 9 aa, synthetic construct
PVPGTVRVF

SEQ ID NO: 22639 - protein, 9 aa, synthetic construct
PVPGTVKLR

SEQ ID NO: 22640 - protein, 9 aa, synthetic construct
PVPGTVKVR

SEQ ID NO: 22641 - protein, 9 aa, synthetic construct
PVPGTVKVH

SEQ ID NO: 22642 - protein, 9 aa, synthetic construct
PVPGTVKVK

SEQ ID NO: 22643 - protein, 9 aa, synthetic construct
PVPGTVKVF

SEQ ID NO: 22644 - protein, 9 aa, synthetic construct
PVPGTLHLR

SEQ ID NO: 22645 - protein, 9 aa, synthetic construct
PVPGTLHVY

SEQ ID NO: 22646 - protein, 9 aa, synthetic construct
PVPGTLHVR

SEQ ID NO: 22647 - protein, 9 aa, synthetic construct
PVPGTLHVK

SEQ ID NO: 22648 - protein, 9 aa, synthetic construct
PVPGTLRLR

SEQ ID NO: 22649 - protein, 9 aa, synthetic construct
PVPGTLRLH

SEQ ID NO: 22650 - protein, 9 aa, synthetic construct
PVPGTLRLF

SEQ ID NO: 22651 - protein, 9 aa, synthetic construct
PVPGTLRVY

SEQ ID NO: 22652 - protein, 9 aa, synthetic construct
PVPGTLRVK

SEQ ID NO: 22653 - protein, 9 aa, synthetic construct
PLQGGVKLY

SEQ ID NO: 22654 - protein, 9 aa, synthetic construct
PVPGTLKLR

SEQ ID NO: 22655 - protein, 9 aa, synthetic construct
PVPGTLKLK

SEQ ID NO: 22656 - protein, 9 aa, synthetic construct
PVPGTLKLF

SEQ ID NO: 22657 - protein, 9 aa, synthetic construct
PVPGTLKVY

SEQ ID NO: 22658 - protein, 9 aa, synthetic construct
PVPGTLKVR

SEQ ID NO: 22659 - protein, 9 aa, synthetic construct
PVPGTLKVK

SEQ ID NO: 22660 - protein, 9 aa, synthetic construct
PVPGTLKVF

SEQ ID NO: 22661 - protein, 9 aa, synthetic construct
PLQGGVKLH

SEQ ID NO: 22662 - protein, 9 aa, synthetic construct
PVPGTARLF

SEQ ID NO: 22663 - protein, 9 aa, synthetic construct
PVPGTARVR

SEQ ID NO: 22664 - protein, 9 aa, synthetic construct
PVPGTAKLF

SEQ ID NO: 22665 - protein, 9 aa, synthetic construct
PLQGGVKLF

SEQ ID NO: 22666 - protein, 9 aa, synthetic construct
PVPGTIHLF

SEQ ID NO: 22667 - protein, 9 aa, synthetic construct
PVPGTIHVY

SEQ ID NO: 22668 - protein, 9 aa, synthetic construct
PVPGTIHVF

SEQ ID NO: 22669 - protein, 9 aa, synthetic construct
PLQGGVKVY

SEQ ID NO: 22670 - protein, 9 aa, synthetic construct
PVPGTIRLR

SEQ ID NO: 22671 - protein, 9 aa, synthetic construct
PVPGTIRLH

SEQ ID NO: 22672 - protein, 9 aa, synthetic construct
PVPGTIRVY

SEQ ID NO: 22673 - protein, 9 aa, synthetic construct
PVPGTIRVR

SEQ ID NO: 22674 - protein, 9 aa, synthetic construct
PVPGTIRVH

SEQ ID NO: 22675 - protein, 9 aa, synthetic construct
PVPGTIKLY

SEQ ID NO: 22676 - protein, 9 aa, synthetic construct
PVPGTIKLH

SEQ ID NO: 22677 - protein, 9 aa, synthetic construct
PVPGTIKLF

SEQ ID NO: 22678 - protein, 9 aa, synthetic construct
PVPGTIKVF

SEQ ID NO: 22679 - protein, 9 aa, synthetic construct
PLQGGVKVH

SEQ ID NO: 22680 - protein, 9 aa, synthetic construct
PVPGTGHLR

SEQ ID NO: 22681 - protein, 9 aa, synthetic construct
PVPGTGHVY

SEQ ID NO: 22682 - protein, 9 aa, synthetic construct
PLQGGVKVK

SEQ ID NO: 22683 - protein, 9 aa, synthetic construct
PVPGTGRLY

SEQ ID NO: 22684 - protein, 9 aa, synthetic construct
PVPGTGRLR

SEQ ID NO: 22685 - protein, 9 aa, synthetic construct
PVPGTGRLH

SEQ ID NO: 22686 - protein, 9 aa, synthetic construct
PVPGTGRLK

SEQ ID NO: 22687 - protein, 9 aa, synthetic construct
PVPGTGRVY

SEQ ID NO: 22688 - protein, 9 aa, synthetic construct
PVPGTGRVH

SEQ ID NO: 22689 - protein, 9 aa, synthetic construct
PVPGTGRVK

SEQ ID NO: 22690 - protein, 9 aa, synthetic construct
PVPGTGKLR

SEQ ID NO: 22691 - protein, 9 aa, synthetic construct
PVPGTGKLH

SEQ ID NO: 22692 - protein, 9 aa, synthetic construct
PVPGTGKLK

SEQ ID NO: 22693 - protein, 9 aa, synthetic construct
PVPGTGKLF

SEQ ID NO: 22694 - protein, 9 aa, synthetic construct
PVPGSVHLF

SEQ ID NO: 22695 - protein, 9 aa, synthetic construct
PVPGSVHVY

SEQ ID NO: 22696 - protein, 9 aa, synthetic construct
PLQGGLHLR

SEQ ID NO: 22697 - protein, 9 aa, synthetic construct
PVPGSVRLY

SEQ ID NO: 22698 - protein, 9 aa, synthetic construct
PVPGSVRVY

SEQ ID NO: 22699 - protein, 9 aa, synthetic construct
PVPGSVRVH

SEQ ID NO: 22700 - protein, 9 aa, synthetic construct
PVPGSVRVK

SEQ ID NO: 22701 - protein, 9 aa, synthetic construct
PVPGSVKLY

SEQ ID NO: 22702 - protein, 9 aa, synthetic construct
PVPGSVKLH

SEQ ID NO: 22703 - protein, 9 aa, synthetic construct
PVPGSLHLH

SEQ ID NO: 22704 - protein, 9 aa, synthetic construct
PVPGSLHLK

SEQ ID NO: 22705 - protein, 9 aa, synthetic construct
PVPGSLHLF

SEQ ID NO: 22706 - protein, 9 aa, synthetic construct
PVPGSLHVY

SEQ ID NO: 22707 - protein, 9 aa, synthetic construct
PVPGSLHVH

SEQ ID NO: 22708 - protein, 9 aa, synthetic construct
PVPGSLHVF

SEQ ID NO: 22709 - protein, 9 aa, synthetic construct
PVPGSLRLY

SEQ ID NO: 22710 - protein, 9 aa, synthetic construct
PVPGSLRLH

SEQ ID NO: 22711 - protein, 9 aa, synthetic construct
PVPGSLRLF

SEQ ID NO: 22712 - protein, 9 aa, synthetic construct
PVPGSLRVY

SEQ ID NO: 22713 - protein, 9 aa, synthetic construct
PVPGSLRVH

SEQ ID NO: 22714 - protein, 9 aa, synthetic construct
PVPGSLRVK

SEQ ID NO: 22715 - protein, 9 aa, synthetic construct
PVPGSLRVF

SEQ ID NO: 22716 - protein, 9 aa, synthetic construct
PVPGSLKLY

SEQ ID NO: 22717 - protein, 9 aa, synthetic construct
PVPGSLKLR

SEQ ID NO: 22718 - protein, 9 aa, synthetic construct
PVPGSLKLH

SEQ ID NO: 22719 - protein, 9 aa, synthetic construct
PVPGSLKVY

SEQ ID NO: 22720 - protein, 9 aa, synthetic construct
PVPGSLKVH

SEQ ID NO: 22721 - protein, 9 aa, synthetic construct
PVPGSAHLY

SEQ ID NO: 22722 - protein, 9 aa, synthetic construct
PVPGSAHLR

SEQ ID NO: 22723 - protein, 9 aa, synthetic construct
PVPGSAHVH

SEQ ID NO: 22724 - protein, 9 aa, synthetic construct
PVPGSARLH

SEQ ID NO: 22725 - protein, 9 aa, synthetic construct
PVPGSARLF

SEQ ID NO: 22726 - protein, 9 aa, synthetic construct
PVPGSARVF

SEQ ID NO: 22727 - protein, 9 aa, synthetic construct
PVPGSAKLH

SEQ ID NO: 22728 - protein, 9 aa, synthetic construct
PVPGSAKVH

SEQ ID NO: 22729 - protein, 9 aa, synthetic construct
PVPGSIHLY

SEQ ID NO: 22730 - protein, 9 aa, synthetic construct
PVPGSIHLF

SEQ ID NO: 22731 - protein, 9 aa, synthetic construct
PVPGSIHVR

SEQ ID NO: 22732 - protein, 9 aa, synthetic construct
PVPGSIHVH

SEQ ID NO: 22733 - protein, 9 aa, synthetic construct
PVPGSIHVF

SEQ ID NO: 22734 - protein, 9 aa, synthetic construct
PVPGSIRLH

SEQ ID NO: 22735 - protein, 9 aa, synthetic construct
PVPGSIRLF

SEQ ID NO: 22736 - protein, 9 aa, synthetic construct
PVPGSIRVF

SEQ ID NO: 22737 - protein, 9 aa, synthetic construct
PVPGSIKLR

SEQ ID NO: 22738 - protein, 9 aa, synthetic construct
PVPGSIKLH

SEQ ID NO: 22739 - protein, 9 aa, synthetic construct
PVPGSIKLK

SEQ ID NO: 22740 - protein, 9 aa, synthetic construct
PVPGSIKLF

SEQ ID NO: 22741 - protein, 9 aa, synthetic construct
PVPGSIKVH

SEQ ID NO: 22742 - protein, 9 aa, synthetic construct
PLQGGLRLH

SEQ ID NO: 22743 - protein, 9 aa, synthetic construct
PVPGSGHLK

SEQ ID NO: 22744 - protein, 9 aa, synthetic construct
PVPGSGHLF

SEQ ID NO: 22745 - protein, 9 aa, synthetic construct
PVPGSGHVY

SEQ ID NO: 22746 - protein, 9 aa, synthetic construct
PVPGSGHVR

SEQ ID NO: 22747 - protein, 9 aa, synthetic construct
PVPGSGHVH

SEQ ID NO: 22748 - protein, 9 aa, synthetic construct
PVPGSGHVK

SEQ ID NO: 22749 - protein, 9 aa, synthetic construct
PVPGSGRLF

SEQ ID NO: 22750 - protein, 9 aa, synthetic construct
PVPGSGRVY

SEQ ID NO: 22751 - protein, 9 aa, synthetic construct
PVPGSGKLY

SEQ ID NO: 22752 - protein, 9 aa, synthetic construct
PVPGSGKLF

SEQ ID NO: 22753 - protein, 9 aa, synthetic construct
PVPGVVHLR

SEQ ID NO: 22754 - protein, 9 aa, synthetic construct
PVPGVVHLF

SEQ ID NO: 22755 - protein, 9 aa, synthetic construct
PVPGVVHVR

SEQ ID NO: 22756 - protein, 9 aa, synthetic construct
PVPGVVHVF

SEQ ID NO: 22757 - protein, 9 aa, synthetic construct
PVPGVVRVY

SEQ ID NO: 22758 - protein, 9 aa, synthetic construct
PVPGVVRVK

SEQ ID NO: 22759 - protein, 9 aa, synthetic construct
PVPGVVRVF

SEQ ID NO: 22760 - protein, 9 aa, synthetic construct
PVPGVVKLY

SEQ ID NO: 22761 - protein, 9 aa, synthetic construct
PVPGVVKVH

SEQ ID NO: 22762 - protein, 9 aa, synthetic construct
PVPGVVKVF

SEQ ID NO: 22763 - protein, 9 aa, synthetic construct
PLQGGLRVK

SEQ ID NO: 22764 - protein, 9 aa, synthetic construct
PVPGVLHLH

SEQ ID NO: 22765 - protein, 9 aa, synthetic construct
PVPGVLHLF

SEQ ID NO: 22766 - protein, 9 aa, synthetic construct
PVPGVLHVK

SEQ ID NO: 22767 - protein, 9 aa, synthetic construct
PLQGGLRVF

SEQ ID NO: 22768 - protein, 9 aa, synthetic construct
PVPGVLRVR

SEQ ID NO: 22769 - protein, 9 aa, synthetic construct
PVPGVLRVH

SEQ ID NO: 22770 - protein, 9 aa, synthetic construct
PVPGVLRVF

SEQ ID NO: 22771 - protein, 9 aa, synthetic construct
PVPGVLKLY

SEQ ID NO: 22772 - protein, 9 aa, synthetic construct
PVPGVLKLK

SEQ ID NO: 22773 - protein, 9 aa, synthetic construct
PVPGVLKLF

SEQ ID NO: 22774 - protein, 9 aa, synthetic construct
PVPGVLKVY

SEQ ID NO: 22775 - protein, 9 aa, synthetic construct
PVPGVAHLY

SEQ ID NO: 22776 - protein, 9 aa, synthetic construct
PVPGVAHLF

SEQ ID NO: 22777 - protein, 9 aa, synthetic construct
PVPGVAHVR

SEQ ID NO: 22778 - protein, 9 aa, synthetic construct
PVPGVAHVF

SEQ ID NO: 22779 - protein, 9 aa, synthetic construct
PLQGGLKLH

SEQ ID NO: 22780 - protein, 9 aa, synthetic construct
PVPGVARLF

SEQ ID NO: 22781 - protein, 9 aa, synthetic construct
PVPGVARVY

SEQ ID NO: 22782 - protein, 9 aa, synthetic construct
PVPGVARVR

SEQ ID NO: 22783 - protein, 9 aa, synthetic construct
PVPGVARVH

SEQ ID NO: 22784 - protein, 9 aa, synthetic construct
PVPGVARVF

SEQ ID NO: 22785 - protein, 9 aa, synthetic construct
PVPGVAKLH

SEQ ID NO: 22786 - protein, 9 aa, synthetic construct
PVPGVAKLF

SEQ ID NO: 22787 - protein, 9 aa, synthetic construct
PVPGVAKVR

SEQ ID NO: 22788 - protein, 9 aa, synthetic construct
PVPGVAKVF

SEQ ID NO: 22789 - protein, 9 aa, synthetic construct
PLQGGLKLF

SEQ ID NO: 22790 - protein, 9 aa, synthetic construct
PVPGVIHLR

SEQ ID NO: 22791 - protein, 9 aa, synthetic construct
PVPGVIRLY

SEQ ID NO: 22792 - protein, 9 aa, synthetic construct
PVPGVIRLR

SEQ ID NO: 22793 - protein, 9 aa, synthetic construct
PVPGVIRLH

SEQ ID NO: 22794 - protein, 9 aa, synthetic construct
PVPGVIRLF

SEQ ID NO: 22795 - protein, 9 aa, synthetic construct
PVPGVIRVY

SEQ ID NO: 22796 - protein, 9 aa, synthetic construct
PVPGVIRVH

SEQ ID NO: 22797 - protein, 9 aa, synthetic construct
PVPGVIRVF

SEQ ID NO: 22798 - protein, 9 aa, synthetic construct
PVPGVIKLH

SEQ ID NO: 22799 - protein, 9 aa, synthetic construct
PVPGVIKLF

SEQ ID NO: 22800 - protein, 9 aa, synthetic construct
PVPGVIKVY

SEQ ID NO: 22801 - protein, 9 aa, synthetic construct
PVPGVIKVH

SEQ ID NO: 22802 - protein, 9 aa, synthetic construct
PVPGVGHLY

SEQ ID NO: 22803 - protein, 9 aa, synthetic construct
PVPGVGHLF

SEQ ID NO: 22804 - protein, 9 aa, synthetic construct
PVPGVGHVR

SEQ ID NO: 22805 - protein, 9 aa, synthetic construct
PVPGVGRLH

SEQ ID NO: 22806 - protein, 9 aa, synthetic construct
PVPGVGRLF

SEQ ID NO: 22807 - protein, 9 aa, synthetic construct
PVPGVGRVH

SEQ ID NO: 22808 - protein, 9 aa, synthetic construct
PVPGVGRVK

SEQ ID NO: 22809 - protein, 9 aa, synthetic construct
PVPGVGRVF

SEQ ID NO: 22810 - protein, 9 aa, synthetic construct
PVPGVGKLR

SEQ ID NO: 22811 - protein, 9 aa, synthetic construct
PVPGVGKLK

SEQ ID NO: 22812 - protein, 9 aa, synthetic construct
PVPGVGKLF

SEQ ID NO: 22813 - protein, 9 aa, synthetic construct
PVPGVGKVR

SEQ ID NO: 22814 - protein, 9 aa, synthetic construct
PVPGVGKVH

SEQ ID NO: 22815 - protein, 9 aa, synthetic construct
PLQGGAHLY

SEQ ID NO: 22816 - protein, 9 aa, synthetic construct
PVPGGVHLH

SEQ ID NO: 22817 - protein, 9 aa, synthetic construct
PVPGGVHLF

SEQ ID NO: 22818 - protein, 9 aa, synthetic construct
PLQGGAHLR

SEQ ID NO: 22819 - protein, 9 aa, synthetic construct
PVPGGVRLH

SEQ ID NO: 22820 - protein, 9 aa, synthetic construct
PVPGGVRLF

SEQ ID NO: 22821 - protein, 9 aa, synthetic construct
PVPGGVRVY

SEQ ID NO: 22822 - protein, 9 aa, synthetic construct
PVPGGVRVK

SEQ ID NO: 22823 - protein, 9 aa, synthetic construct
PVPGGVRVF

SEQ ID NO: 22824 - protein, 9 aa, synthetic construct
PLQGGAHLH

SEQ ID NO: 22825 - protein, 9 aa, synthetic construct
PVPGGVKVK

SEQ ID NO: 22826 - protein, 9 aa, synthetic construct
PVPGGLHLH

SEQ ID NO: 22827 - protein, 9 aa, synthetic construct
PVPGGLHLF

SEQ ID NO: 22828 - protein, 9 aa, synthetic construct
PLQGGAHLF

SEQ ID NO: 22829 - protein, 9 aa, synthetic construct
PLQGGAHVY

SEQ ID NO: 22830 - protein, 9 aa, synthetic construct
PLQGGAHVR

SEQ ID NO: 22831 - protein, 9 aa, synthetic construct
PVPGGAHLR

SEQ ID NO: 22832 - protein, 9 aa, synthetic construct
PVPGGARLR

SEQ ID NO: 22833 - protein, 9 aa, synthetic construct
PVPGGARLF

SEQ ID NO: 22834 - protein, 9 aa, synthetic construct
PVPGGARVF

SEQ ID NO: 22835 - protein, 9 aa, synthetic construct
PLQGGAHVK

SEQ ID NO: 22836 - protein, 9 aa, synthetic construct
PLQGGAHVF

SEQ ID NO: 22837 - protein, 9 aa, synthetic construct
PVPGGIHLR

SEQ ID NO: 22838 - protein, 9 aa, synthetic construct
PVPGGIHVR

SEQ ID NO: 22839 - protein, 9 aa, synthetic construct
PVPGGIHVF

SEQ ID NO: 22840 - protein, 9 aa, synthetic construct
PLQGGARLY

SEQ ID NO: 22841 - protein, 9 aa, synthetic construct
PVPGGIRLR

SEQ ID NO: 22842 - protein, 9 aa, synthetic construct
PVPGGIRLF

SEQ ID NO: 22843 - protein, 9 aa, synthetic construct
PVPGGIRVF

SEQ ID NO: 22844 - protein, 9 aa, synthetic construct
PVPGGIKLY

SEQ ID NO: 22845 - protein, 9 aa, synthetic construct
PVPGGIKLR

SEQ ID NO: 22846 - protein, 9 aa, synthetic construct
PVPGGIKLK

SEQ ID NO: 22847 - protein, 9 aa, synthetic construct
PVPGGIKLF

SEQ ID NO: 22848 - protein, 9 aa, synthetic construct
PVPGGIKVY

SEQ ID NO: 22849 - protein, 9 aa, synthetic construct
PVPGGIKVH

SEQ ID NO: 22850 - protein, 9 aa, synthetic construct
PVPGGIKVF

SEQ ID NO: 22851 - protein, 9 aa, synthetic construct
PLQGGARLH

SEQ ID NO: 22852 - protein, 9 aa, synthetic construct
PVPGGGHVH

SEQ ID NO: 22853 - protein, 9 aa, synthetic construct
PVPGGGRVR

SEQ ID NO: 22854 - protein, 9 aa, synthetic construct
PVPGGGRVH

SEQ ID NO: 22855 - protein, 9 aa, synthetic construct
PLQGGARLF

SEQ ID NO: 22856 - protein, 9 aa, synthetic construct
PVPGGGKVY

SEQ ID NO: 22857 - protein, 9 aa, synthetic construct
PVPGGGKVH

SEQ ID NO: 22858 - protein, 9 aa, synthetic construct
PVPGGGKVK

SEQ ID NO: 22859 - protein, 9 aa, synthetic construct
PVPAAVHLK

SEQ ID NO: 22860 - protein, 9 aa, synthetic construct
PLQGGARVR

SEQ ID NO: 22861 - protein, 9 aa, synthetic construct
PVPAAVRLH

SEQ ID NO: 22862 - protein, 9 aa, synthetic construct
PVPAAVRLF

SEQ ID NO: 22863 - protein, 9 aa, synthetic construct
PVPAAVRVY

SEQ ID NO: 22864 - protein, 9 aa, synthetic construct
PVPAAVRVH

SEQ ID NO: 22865 - protein, 9 aa, synthetic construct
PVPAAVRVK

SEQ ID NO: 22866 - protein, 9 aa, synthetic construct
PVPAAVKLR

SEQ ID NO: 22867 - protein, 9 aa, synthetic construct
PVPAAVKLF

SEQ ID NO: 22868 - protein, 9 aa, synthetic construct
PVPAAVKVH

SEQ ID NO: 22869 - protein, 9 aa, synthetic construct
PVPAAVKVK

SEQ ID NO: 22870 - protein, 9 aa, synthetic construct
PVPAALHLH

SEQ ID NO: 22871 - protein, 9 aa, synthetic construct
PVPAALHLK

SEQ ID NO: 22872 - protein, 9 aa, synthetic construct
PVPAALHVY

SEQ ID NO: 22873 - protein, 9 aa, synthetic construct
PVPAALHVR

SEQ ID NO: 22874 - protein, 9 aa, synthetic construct
PVPAALHVH

SEQ ID NO: 22875 - protein, 9 aa, synthetic construct
PVPAALHVK

SEQ ID NO: 22876 - protein, 9 aa, synthetic construct
PVPAALHVF

SEQ ID NO: 22877 - protein, 9 aa, synthetic construct
PLQGGARVF

SEQ ID NO: 22878 - protein, 9 aa, synthetic construct
PVPAALRLH

SEQ ID NO: 22879 - protein, 9 aa, synthetic construct
PLQGGAKLY

SEQ ID NO: 22880 - protein, 9 aa, synthetic construct
PVPAALKLY

SEQ ID NO: 22881 - protein, 9 aa, synthetic construct
PVPAALKLR

SEQ ID NO: 22882 - protein, 9 aa, synthetic construct
PVPAALKLH

SEQ ID NO: 22883 - protein, 9 aa, synthetic construct
PVPAALKLK

SEQ ID NO: 22884 - protein, 9 aa, synthetic construct
PVPAALKLF

SEQ ID NO: 22885 - protein, 9 aa, synthetic construct
PVPAALKVY

SEQ ID NO: 22886 - protein, 9 aa, synthetic construct
PVPAALKVH

SEQ ID NO: 22887 - protein, 9 aa, synthetic construct
PVPAALKVF

SEQ ID NO: 22888 - protein, 9 aa, synthetic construct
PLQGGAKLH

SEQ ID NO: 22889 - protein, 9 aa, synthetic construct
PVPAAARLY

SEQ ID NO: 22890 - protein, 9 aa, synthetic construct
PVPAAARVR

SEQ ID NO: 22891 - protein, 9 aa, synthetic construct
PVPAAARVH

SEQ ID NO: 22892 - protein, 9 aa, synthetic construct
PVPAAAKVR

SEQ ID NO: 22893 - protein, 9 aa, synthetic construct
PLQGGAKLF

SEQ ID NO: 22894 - protein, 9 aa, synthetic construct
PVPAAIHLY

SEQ ID NO: 22895 - protein, 9 aa, synthetic construct
PVPAAIHLR

SEQ ID NO: 22896 - protein, 9 aa, synthetic construct
PVPAAIHLH

SEQ ID NO: 22897 - protein, 9 aa, synthetic construct
PVPAAIHVY

SEQ ID NO: 22898 - protein, 9 aa, synthetic construct
PVPAAIHVR

SEQ ID NO: 22899 - protein, 9 aa, synthetic construct
PLQGGAKVY

SEQ ID NO: 22900 - protein, 9 aa, synthetic construct
PVPAAIRLY

SEQ ID NO: 22901 - protein, 9 aa, synthetic construct
PVPAAIRLH

SEQ ID NO: 22902 - protein, 9 aa, synthetic construct
PVPAAIRLK

SEQ ID NO: 22903 - protein, 9 aa, synthetic construct
PVPAAIRLF

SEQ ID NO: 22904 - protein, 9 aa, synthetic construct
PVPAAIRVY

SEQ ID NO: 22905 - protein, 9 aa, synthetic construct
PVPAAIRVK

SEQ ID NO: 22906 - protein, 9 aa, synthetic construct
PVPAAIRVF

SEQ ID NO: 22907 - protein, 9 aa, synthetic construct
PLQGGAKVR

SEQ ID NO: 22908 - protein, 9 aa, synthetic construct
PVPAAIKLY

SEQ ID NO: 22909 - protein, 9 aa, synthetic construct
PVPAAIKLH

SEQ ID NO: 22910 - protein, 9 aa, synthetic construct
PVPAAIKLK

SEQ ID NO: 22911 - protein, 9 aa, synthetic construct
PVPAAIKLF

SEQ ID NO: 22912 - protein, 9 aa, synthetic construct
PVPAAIKVR

SEQ ID NO: 22913 - protein, 9 aa, synthetic construct
PVPAAIKVH

SEQ ID NO: 22914 - protein, 9 aa, synthetic construct
PVPAAIKVK

SEQ ID NO: 22915 - protein, 9 aa, synthetic construct
PLQGGAKVH

SEQ ID NO: 22916 - protein, 9 aa, synthetic construct
PVPAAGRLY

SEQ ID NO: 22917 - protein, 9 aa, synthetic construct
PVPAAGRVH

SEQ ID NO: 22918 - protein, 9 aa, synthetic construct
PLQGGAKVF

SEQ ID NO: 22919 - protein, 9 aa, synthetic construct
PVPATVHLF

SEQ ID NO: 22920 - protein, 9 aa, synthetic construct
PVPATVHVY

SEQ ID NO: 22921 - protein, 9 aa, synthetic construct
PVPATVHVR

SEQ ID NO: 22922 - protein, 9 aa, synthetic construct
PVPATVHVF

SEQ ID NO: 22923 - protein, 9 aa, synthetic construct
PLQGGIHLR

SEQ ID NO: 22924 - protein, 9 aa, synthetic construct
PVPATVRLY

SEQ ID NO: 22925 - protein, 9 aa, synthetic construct
PVPATVRLR

SEQ ID NO: 22926 - protein, 9 aa, synthetic construct
PVPATVRLH

SEQ ID NO: 22927 - protein, 9 aa, synthetic construct
PVPATVRVY

SEQ ID NO: 22928 - protein, 9 aa, synthetic construct
PVPATVRVH

SEQ ID NO: 22929 - protein, 9 aa, synthetic construct
PVPATVRVF

SEQ ID NO: 22930 - protein, 9 aa, synthetic construct
PVPATVKLY

SEQ ID NO: 22931 - protein, 9 aa, synthetic construct
PVPATVKLH

SEQ ID NO: 22932 - protein, 9 aa, synthetic construct
PVPATVKLK

SEQ ID NO: 22933 - protein, 9 aa, synthetic construct
PVPATVKVH

SEQ ID NO: 22934 - protein, 9 aa, synthetic construct
PVPATVKVF

SEQ ID NO: 22935 - protein, 9 aa, synthetic construct
PVPATLHLR

SEQ ID NO: 22936 - protein, 9 aa, synthetic construct
PVPATLHLH

SEQ ID NO: 22937 - protein, 9 aa, synthetic construct
PVPATLHLK

SEQ ID NO: 22938 - protein, 9 aa, synthetic construct
PVPATLHVY

SEQ ID NO: 22939 - protein, 9 aa, synthetic construct
PVPATLHVR

SEQ ID NO: 22940 - protein, 9 aa, synthetic construct
PVPATLHVH

SEQ ID NO: 22941 - protein, 9 aa, synthetic construct
PVPATLHVK

SEQ ID NO: 22942 - protein, 9 aa, synthetic construct
PLQGGIHLF

SEQ ID NO: 22943 - protein, 9 aa, synthetic construct
PVPATLRLY

SEQ ID NO: 22944 - protein, 9 aa, synthetic construct
PVPATLRLK

SEQ ID NO: 22945 - protein, 9 aa, synthetic construct
PVPATLRVY

SEQ ID NO: 22946 - protein, 9 aa, synthetic construct
PVPATLRVH

SEQ ID NO: 22947 - protein, 9 aa, synthetic construct
PVPATLKLY

SEQ ID NO: 22948 - protein, 9 aa, synthetic construct
PVPATLKLR

SEQ ID NO: 22949 - protein, 9 aa, synthetic construct
PVPATLKLH

SEQ ID NO: 22950 - protein, 9 aa, synthetic construct
PVPATLKVY

SEQ ID NO: 22951 - protein, 9 aa, synthetic construct
PVPATLKVH

SEQ ID NO: 22952 - protein, 9 aa, synthetic construct
PVPATLKVK

SEQ ID NO: 22953 - protein, 9 aa, synthetic construct
PVPATLKVF

SEQ ID NO: 22954 - protein, 9 aa, synthetic construct
PLQGGIHVH

SEQ ID NO: 22955 - protein, 9 aa, synthetic construct
PVPATARLY

SEQ ID NO: 22956 - protein, 9 aa, synthetic construct
PVPATARLF

SEQ ID NO: 22957 - protein, 9 aa, synthetic construct
PLQGGIHVF

SEQ ID NO: 22958 - protein, 9 aa, synthetic construct
PLQGGIRLY

SEQ ID NO: 22959 - protein, 9 aa, synthetic construct
PVPATIRLY

SEQ ID NO: 22960 - protein, 9 aa, synthetic construct
PVPATIRLR

SEQ ID NO: 22961 - protein, 9 aa, synthetic construct
PVPATIRLK

SEQ ID NO: 22962 - protein, 9 aa, synthetic construct
PVPATIRLF

SEQ ID NO: 22963 - protein, 9 aa, synthetic construct
PVPATIRVH

SEQ ID NO: 22964 - protein, 9 aa, synthetic construct
PVPATIRVF

SEQ ID NO: 22965 - protein, 9 aa, synthetic construct
PVPATIKLY

SEQ ID NO: 22966 - protein, 9 aa, synthetic construct
PVPATIKLR

SEQ ID NO: 22967 - protein, 9 aa, synthetic construct
PVPATIKLH

SEQ ID NO: 22968 - protein, 9 aa, synthetic construct
PLQGGIRLH

SEQ ID NO: 22969 - protein, 9 aa, synthetic construct
PVPATGHLR

SEQ ID NO: 22970 - protein, 9 aa, synthetic construct
PVPATGHVY

SEQ ID NO: 22971 - protein, 9 aa, synthetic construct
PVPATGHVK

SEQ ID NO: 22972 - protein, 9 aa, synthetic construct
PVPATGRLR

SEQ ID NO: 22973 - protein, 9 aa, synthetic construct
PVPATGRLH

SEQ ID NO: 22974 - protein, 9 aa, synthetic construct
PVPATGRLF

SEQ ID NO: 22975 - protein, 9 aa, synthetic construct
PVPATGRVH

SEQ ID NO: 22976 - protein, 9 aa, synthetic construct
PLQGGIRLF

SEQ ID NO: 22977 - protein, 9 aa, synthetic construct
PVPATGKLR

SEQ ID NO: 22978 - protein, 9 aa, synthetic construct
PVPATGKVH

SEQ ID NO: 22979 - protein, 9 aa, synthetic construct
PLQGGIRVY

SEQ ID NO: 22980 - protein, 9 aa, synthetic construct
PVPASVHLY

SEQ ID NO: 22981 - protein, 9 aa, synthetic construct
PVPASVHLF

SEQ ID NO: 22982 - protein, 9 aa, synthetic construct
PLQGGIRVR

SEQ ID NO: 22983 - protein, 9 aa, synthetic construct
PVPASVRLY

SEQ ID NO: 22984 - protein, 9 aa, synthetic construct
PVPASVRVK

SEQ ID NO: 22985 - protein, 9 aa, synthetic construct
PLQGGIRVH

SEQ ID NO: 22986 - protein, 9 aa, synthetic construct
PVPASVKLY

SEQ ID NO: 22987 - protein, 9 aa, synthetic construct
PVPASVKLH

SEQ ID NO: 22988 - protein, 9 aa, synthetic construct
PVPASVKVY

SEQ ID NO: 22989 - protein, 9 aa, synthetic construct
PVPASVKVH

SEQ ID NO: 22990 - protein, 9 aa, synthetic construct
PVPASVKVK

SEQ ID NO: 22991 - protein, 9 aa, synthetic construct
PLQGGIRVK

SEQ ID NO: 22992 - protein, 9 aa, synthetic construct
PVPASLHLH

SEQ ID NO: 22993 - protein, 9 aa, synthetic construct
PVPASLHVR

SEQ ID NO: 22994 - protein, 9 aa, synthetic construct
PVPASLHVK

SEQ ID NO: 22995 - protein, 9 aa, synthetic construct
PLQGGIRVF

SEQ ID NO: 22996 - protein, 9 aa, synthetic construct
PVPASLRLH

SEQ ID NO: 22997 - protein, 9 aa, synthetic construct
PVPASLRVF

SEQ ID NO: 22998 - protein, 9 aa, synthetic construct
PLQGGIKLY

SEQ ID NO: 22999 - protein, 9 aa, synthetic construct
PVPASLKVY

SEQ ID NO: 23000 - protein, 9 aa, synthetic construct
PVPASLKVH

SEQ ID NO: 23001 - protein, 9 aa, synthetic construct
PLQGGIKLR

SEQ ID NO: 23002 - protein, 9 aa, synthetic construct
PVPASARLF

SEQ ID NO: 23003 - protein, 9 aa, synthetic construct
PVPASAKLF

SEQ ID NO: 23004 - protein, 9 aa, synthetic construct
PVPASIHLY

SEQ ID NO: 23005 - protein, 9 aa, synthetic construct
PVPASIHLH

SEQ ID NO: 23006 - protein, 9 aa, synthetic construct
PVPASIHVR

SEQ ID NO: 23007 - protein, 9 aa, synthetic construct
PVPASIHVK

SEQ ID NO: 23008 - protein, 9 aa, synthetic construct
PVPASIHVF

SEQ ID NO: 23009 - protein, 9 aa, synthetic construct
PLQGGIKVY

SEQ ID NO: 23010 - protein, 9 aa, synthetic construct
PVPASIRLY

SEQ ID NO: 23011 - protein, 9 aa, synthetic construct
PVPASIRLK

SEQ ID NO: 23012 - protein, 9 aa, synthetic construct
PVPASIRVY

SEQ ID NO: 23013 - protein, 9 aa, synthetic construct
PVPASIRVH

SEQ ID NO: 23014 - protein, 9 aa, synthetic construct
PVPASIRVF

SEQ ID NO: 23015 - protein, 9 aa, synthetic construct
PVPASIKLY

SEQ ID NO: 23016 - protein, 9 aa, synthetic construct
PVPASIKLH

SEQ ID NO: 23017 - protein, 9 aa, synthetic construct
PVPASIKLK

SEQ ID NO: 23018 - protein, 9 aa, synthetic construct
PVPASIKVY

SEQ ID NO: 23019 - protein, 9 aa, synthetic construct
PVPASIKVH

SEQ ID NO: 23020 - protein, 9 aa, synthetic construct
PLQGGIKVH

SEQ ID NO: 23021 - protein, 9 aa, synthetic construct
PVPASGHLK

SEQ ID NO: 23022 - protein, 9 aa, synthetic construct
PVPASGHLF

SEQ ID NO: 23023 - protein, 9 aa, synthetic construct
PVPASGHVH

SEQ ID NO: 23024 - protein, 9 aa, synthetic construct
PVPASGRLR

SEQ ID NO: 23025 - protein, 9 aa, synthetic construct
PVPASGRLH

SEQ ID NO: 23026 - protein, 9 aa, synthetic construct
PLQGGIKVF

SEQ ID NO: 23027 - protein, 9 aa, synthetic construct
PVPASGKLH

SEQ ID NO: 23028 - protein, 9 aa, synthetic construct
PVPASGKLK

SEQ ID NO: 23029 - protein, 9 aa, synthetic construct
PVPASGKLF

SEQ ID NO: 23030 - protein, 9 aa, synthetic construct
PVPASGKVY

SEQ ID NO: 23031 - protein, 9 aa, synthetic construct
PVPASGKVK

SEQ ID NO: 23032 - protein, 9 aa, synthetic construct
PLQGGGHLY

SEQ ID NO: 23033 - protein, 9 aa, synthetic construct
PVPAVVHLY

SEQ ID NO: 23034 - protein, 9 aa, synthetic construct
PVPAVVHVF

SEQ ID NO: 23035 - protein, 9 aa, synthetic construct
PVPAVVRLY

SEQ ID NO: 23036 - protein, 9 aa, synthetic construct
PVPAVVRLF

SEQ ID NO: 23037 - protein, 9 aa, synthetic construct
PVPAVVRVF

SEQ ID NO: 23038 - protein, 9 aa, synthetic construct
PLQGGGHLH

SEQ ID NO: 23039 - protein, 9 aa, synthetic construct
PVPAVVKLF

SEQ ID NO: 23040 - protein, 9 aa, synthetic construct
PLQGGGHLF

SEQ ID NO: 23041 - protein, 9 aa, synthetic construct
PVPAVLRLF

SEQ ID NO: 23042 - protein, 9 aa, synthetic construct
PVPAVLRVR

SEQ ID NO: 23043 - protein, 9 aa, synthetic construct
PVPAVLRVH

SEQ ID NO: 23044 - protein, 9 aa, synthetic construct
PVPAVLRVK

SEQ ID NO: 23045 - protein, 9 aa, synthetic construct
PVPAVLRVF

SEQ ID NO: 23046 - protein, 9 aa, synthetic construct
PLQGGGHVY

SEQ ID NO: 23047 - protein, 9 aa, synthetic construct
PVPAVLKLF

SEQ ID NO: 23048 - protein, 9 aa, synthetic construct
PVPAVLKVY

SEQ ID NO: 23049 - protein, 9 aa, synthetic construct
PLQGGGHVR

SEQ ID NO: 23050 - protein, 9 aa, synthetic construct
PLQGGGHVH

SEQ ID NO: 23051 - protein, 9 aa, synthetic construct
PVPAVARLY

SEQ ID NO: 23052 - protein, 9 aa, synthetic construct
PVPAVARLH

SEQ ID NO: 23053 - protein, 9 aa, synthetic construct
PVPAVARVH

SEQ ID NO: 23054 - protein, 9 aa, synthetic construct
PLQGGGHVK

SEQ ID NO: 23055 - protein, 9 aa, synthetic construct
PVPAVAKLH

SEQ ID NO: 23056 - protein, 9 aa, synthetic construct
PVPAVAKVH

SEQ ID NO: 23057 - protein, 9 aa, synthetic construct
PVPAVAKVF

SEQ ID NO: 23058 - protein, 9 aa, synthetic construct
PVPAVIHLR

SEQ ID NO: 23059 - protein, 9 aa, synthetic construct
PVPAVIHLF

SEQ ID NO: 23060 - protein, 9 aa, synthetic construct
PVPAVIHVH

SEQ ID NO: 23061 - protein, 9 aa, synthetic construct
PVPAVIHVF

SEQ ID NO: 23062 - protein, 9 aa, synthetic construct
PVPAVIRLR

SEQ ID NO: 23063 - protein, 9 aa, synthetic construct
PVPAVIRLF

SEQ ID NO: 23064 - protein, 9 aa, synthetic construct
PVPAVIRVR

SEQ ID NO: 23065 - protein, 9 aa, synthetic construct
PVPAVIRVH

SEQ ID NO: 23066 - protein, 9 aa, synthetic construct
PVPAVIKLY

SEQ ID NO: 23067 - protein, 9 aa, synthetic construct
PVPAVIKLH

SEQ ID NO: 23068 - protein, 9 aa, synthetic construct
PVPAVIKLF

SEQ ID NO: 23069 - protein, 9 aa, synthetic construct
PVPAVIKVY

SEQ ID NO: 23070 - protein, 9 aa, synthetic construct
PVPAVGHLH

SEQ ID NO: 23071 - protein, 9 aa, synthetic construct
PVPAVGHLK

SEQ ID NO: 23072 - protein, 9 aa, synthetic construct
PVPAVGHLF

SEQ ID NO: 23073 - protein, 9 aa, synthetic construct
PVPAVGHVY

SEQ ID NO: 23074 - protein, 9 aa, synthetic construct
PVPAVGHVR

SEQ ID NO: 23075 - protein, 9 aa, synthetic construct
PVPAVGHVK

SEQ ID NO: 23076 - protein, 9 aa, synthetic construct
PVPAVGRLY

SEQ ID NO: 23077 - protein, 9 aa, synthetic construct
PVPAVGRLH

SEQ ID NO: 23078 - protein, 9 aa, synthetic construct
PVPAVGRLK

SEQ ID NO: 23079 - protein, 9 aa, synthetic construct
PVPAVGRLF

SEQ ID NO: 23080 - protein, 9 aa, synthetic construct
PVPAVGRVF

SEQ ID NO: 23081 - protein, 9 aa, synthetic construct
PLQGGGRLF

SEQ ID NO: 23082 - protein, 9 aa, synthetic construct
PVPAVGKLR

SEQ ID NO: 23083 - protein, 9 aa, synthetic construct
PVPAVGKLF

SEQ ID NO: 23084 - protein, 9 aa, synthetic construct
PVPAVGKVY

SEQ ID NO: 23085 - protein, 9 aa, synthetic construct
PVPAVGKVR

SEQ ID NO: 23086 - protein, 9 aa, synthetic construct
PVPAVGKVH

SEQ ID NO: 23087 - protein, 9 aa, synthetic construct
PVPAGVHLR

SEQ ID NO: 23088 - protein, 9 aa, synthetic construct
PVPAGVHLH

SEQ ID NO: 23089 - protein, 9 aa, synthetic construct
PVPAGVHLK

SEQ ID NO: 23090 - protein, 9 aa, synthetic construct
PVPAGVRLY

SEQ ID NO: 23091 - protein, 9 aa, synthetic construct
PVPAGVRLH

SEQ ID NO: 23092 - protein, 9 aa, synthetic construct
PVPAGVRLF

SEQ ID NO: 23093 - protein, 9 aa, synthetic construct
PVPAGVRVR

SEQ ID NO: 23094 - protein, 9 aa, synthetic construct
PVPAGVRVF

SEQ ID NO: 23095 - protein, 9 aa, synthetic construct
PLQGGGRVH

SEQ ID NO: 23096 - protein, 9 aa, synthetic construct
PVPAGVKLY

SEQ ID NO: 23097 - protein, 9 aa, synthetic construct
PVPAGVKLR

SEQ ID NO: 23098 - protein, 9 aa, synthetic construct
PVPAGVKLH

SEQ ID NO: 23099 - protein, 9 aa, synthetic construct
PVPAGVKVY

SEQ ID NO: 23100 - protein, 9 aa, synthetic construct
PVPAGVKVR

SEQ ID NO: 23101 - protein, 9 aa, synthetic construct
PVPAGVKVH

SEQ ID NO: 23102 - protein, 9 aa, synthetic construct
PVPAGVKVK

SEQ ID NO: 23103 - protein, 9 aa, synthetic construct
PLQGGGRVK

SEQ ID NO: 23104 - protein, 9 aa, synthetic construct
PVPAGLHVY

SEQ ID NO: 23105 - protein, 9 aa, synthetic construct
PVPAGLHVK

SEQ ID NO: 23106 - protein, 9 aa, synthetic construct
PLQGGGRVF

SEQ ID NO: 23107 - protein, 9 aa, synthetic construct
PVPAGLRVK

SEQ ID NO: 23108 - protein, 9 aa, synthetic construct
PLNGTARLF

SEQ ID NO: 23109 - protein, 9 aa, synthetic construct
PVPAGLKLH

SEQ ID NO: 23110 - protein, 9 aa, synthetic construct
PVPAGLKVY

SEQ ID NO: 23111 - protein, 9 aa, synthetic construct
PVPAGAHLY

SEQ ID NO: 23112 - protein, 9 aa, synthetic construct
PVPAGAHLR

SEQ ID NO: 23113 - protein, 9 aa, synthetic construct
PVPAGAHLF

SEQ ID NO: 23114 - protein, 9 aa, synthetic construct
PVPAGAHVR

SEQ ID NO: 23115 - protein, 9 aa, synthetic construct
PVPAGARLY

SEQ ID NO: 23116 - protein, 9 aa, synthetic construct
PVPAGARLH

SEQ ID NO: 23117 - protein, 9 aa, synthetic construct
PVPAGARLF

SEQ ID NO: 23118 - protein, 9 aa, synthetic construct
PVPAGAKLF

SEQ ID NO: 23119 - protein, 9 aa, synthetic construct
PLQGGGKLF

SEQ ID NO: 23120 - protein, 9 aa, synthetic construct
PVPAGIHLY

SEQ ID NO: 23121 - protein, 9 aa, synthetic construct
PVPAGIHLR

SEQ ID NO: 23122 - protein, 9 aa, synthetic construct
PVPAGIHLH

SEQ ID NO: 23123 - protein, 9 aa, synthetic construct
PVPAGIHLK

SEQ ID NO: 23124 - protein, 9 aa, synthetic construct
PVPAGIHLF

SEQ ID NO: 23125 - protein, 9 aa, synthetic construct
PVPAGIHVY

SEQ ID NO: 23126 - protein, 9 aa, synthetic construct
PVPAGIHVR

SEQ ID NO: 23127 - protein, 9 aa, synthetic construct
PVPAGIHVH

SEQ ID NO: 23128 - protein, 9 aa, synthetic construct
PVPAGIHVF

SEQ ID NO: 23129 - protein, 9 aa, synthetic construct
PLQGGGKVY

SEQ ID NO: 23130 - protein, 9 aa, synthetic construct
PVPAGIRLY

SEQ ID NO: 23131 - protein, 9 aa, synthetic construct
PVPAGIRLF

SEQ ID NO: 23132 - protein, 9 aa, synthetic construct
PVPAGIRVY

SEQ ID NO: 23133 - protein, 9 aa, synthetic construct
PVPAGIRVH

SEQ ID NO: 23134 - protein, 9 aa, synthetic construct
PVPAGIRVF

SEQ ID NO: 23135 - protein, 9 aa, synthetic construct
PVPAGIKLY

SEQ ID NO: 23136 - protein, 9 aa, synthetic construct
PVPAGIKLR

SEQ ID NO: 23137 - protein, 9 aa, synthetic construct
PVPAGIKLH

SEQ ID NO: 23138 - protein, 9 aa, synthetic construct
PVPAGIKLF

SEQ ID NO: 23139 - protein, 9 aa, synthetic construct
PVPAGIKVY

SEQ ID NO: 23140 - protein, 9 aa, synthetic construct
PVPAGIKVH

SEQ ID NO: 23141 - protein, 9 aa, synthetic construct
PVPAGIKVF

SEQ ID NO: 23142 - protein, 9 aa, synthetic construct
PLQGGGKVH

SEQ ID NO: 23143 - protein, 9 aa, synthetic construct
PVPAGGRLR

SEQ ID NO: 23144 - protein, 9 aa, synthetic construct
PVPAGGRLH

SEQ ID NO: 23145 - protein, 9 aa, synthetic construct
PVPAGGRVR

SEQ ID NO: 23146 - protein, 9 aa, synthetic construct
PVPAGGRVH

SEQ ID NO: 23147 - protein, 9 aa, synthetic construct
PVPAGGRVK

SEQ ID NO: 23148 - protein, 9 aa, synthetic construct
PVPAGGRVF

SEQ ID NO: 23149 - protein, 9 aa, synthetic construct
PLQGGGKVF

SEQ ID NO: 23150 - protein, 9 aa, synthetic construct
PVPAGGKLY

SEQ ID NO: 23151 - protein, 9 aa, synthetic construct
PVPAGGKLH

SEQ ID NO: 23152 - protein, 9 aa, synthetic construct
PVPAGGKLF

SEQ ID NO: 23153 - protein, 9 aa, synthetic construct
PVPAGGKVR

SEQ ID NO: 23154 - protein, 9 aa, synthetic construct
PVPAGGKVH

SEQ ID NO: 23155 - protein, 9 aa, synthetic construct
PVPAGGKVK

SEQ ID NO: 23156 - protein, 9 aa, synthetic construct
PINGAVHVF

SEQ ID NO: 23157 - protein, 9 aa, synthetic construct
PINGAVRVY

SEQ ID NO: 23158 - protein, 9 aa, synthetic construct
PINGAVRVF

SEQ ID NO: 23159 - protein, 9 aa, synthetic construct
PINGAVKVH

SEQ ID NO: 23160 - protein, 9 aa, synthetic construct
PLQAAVHLK

SEQ ID NO: 23161 - protein, 9 aa, synthetic construct
PINGALHLH

SEQ ID NO: 23162 - protein, 9 aa, synthetic construct
PINGALHLF

SEQ ID NO: 23163 - protein, 9 aa, synthetic construct
PINGALHVR

SEQ ID NO: 23164 - protein, 9 aa, synthetic construct
PINGALHVH

SEQ ID NO: 23165 - protein, 9 aa, synthetic construct
PINGALRLY

SEQ ID NO: 23166 - protein, 9 aa, synthetic construct
PINGALRLH

SEQ ID NO: 23167 - protein, 9 aa, synthetic construct
PINGALRVK

SEQ ID NO: 23168 - protein, 9 aa, synthetic construct
PINGALKLR

SEQ ID NO: 23169 - protein, 9 aa, synthetic construct
PINGALKLK

SEQ ID NO: 23170 - protein, 9 aa, synthetic construct
PINGALKLF

SEQ ID NO: 23171 - protein, 9 aa, synthetic construct
PINGALKVR

SEQ ID NO: 23172 - protein, 9 aa, synthetic construct
PLQAAVHVR

SEQ ID NO: 23173 - protein, 9 aa, synthetic construct
PINGAARLF

SEQ ID NO: 23174 - protein, 9 aa, synthetic construct
PINGAARVR

SEQ ID NO: 23175 - protein, 9 aa, synthetic construct
PLQAAVHVF

SEQ ID NO: 23176 - protein, 9 aa, synthetic construct
PINGAIHLR

SEQ ID NO: 23177 - protein, 9 aa, synthetic construct
PINGAIHLH

SEQ ID NO: 23178 - protein, 9 aa, synthetic construct
PINGAIRVF

SEQ ID NO: 23179 - protein, 9 aa, synthetic construct
PINGAIKLK

SEQ ID NO: 23180 - protein, 9 aa, synthetic construct
PINGAIKVR

SEQ ID NO: 23181 - protein, 9 aa, synthetic construct
PLQAAVRLH

SEQ ID NO: 23182 - protein, 9 aa, synthetic construct
PINGAGRVK

SEQ ID NO: 23183 - protein, 9 aa, synthetic construct
PLQAAVRLF

SEQ ID NO: 23184 - protein, 9 aa, synthetic construct
PINGAGKLR

SEQ ID NO: 23185 - protein, 9 aa, synthetic construct
PINGAGKLK

SEQ ID NO: 23186 - protein, 9 aa, synthetic construct
PINGAGKVK

SEQ ID NO: 23187 - protein, 9 aa, synthetic construct
PLQAAVRVY

SEQ ID NO: 23188 - protein, 9 aa, synthetic construct
PLQAAVRVH

SEQ ID NO: 23189 - protein, 9 aa, synthetic construct
PINGTVKVF

SEQ ID NO: 23190 - protein, 9 aa, synthetic construct
PINGTLRLH

SEQ ID NO: 23191 - protein, 9 aa, synthetic construct
PINGTLRVK

SEQ ID NO: 23192 - protein, 9 aa, synthetic construct
PINGTLRVF

SEQ ID NO: 23193 - protein, 9 aa, synthetic construct
PLQAAVKLY

SEQ ID NO: 23194 - protein, 9 aa, synthetic construct
PINGTLKLR

SEQ ID NO: 23195 - protein, 9 aa, synthetic construct
PLQAAVKLR

SEQ ID NO: 23196 - protein, 9 aa, synthetic construct
PINGTAHVF

SEQ ID NO: 23197 - protein, 9 aa, synthetic construct
PLQAAVKLH

SEQ ID NO: 23198 - protein, 9 aa, synthetic construct
PINGTARLF

SEQ ID NO: 23199 - protein, 9 aa, synthetic construct
PINGTARVR

SEQ ID NO: 23200 - protein, 9 aa, synthetic construct
PINGTAKLK

SEQ ID NO: 23201 - protein, 9 aa, synthetic construct
PLQAAVKLF

SEQ ID NO: 23202 - protein, 9 aa, synthetic construct
PINGTIHVY

SEQ ID NO: 23203 - protein, 9 aa, synthetic construct
PINGTIHVF

SEQ ID NO: 23204 - protein, 9 aa, synthetic construct
PINGTIRLH

SEQ ID NO: 23205 - protein, 9 aa, synthetic construct
PINGTIRLF

SEQ ID NO: 23206 - protein, 9 aa, synthetic construct
PINGTIRVH

SEQ ID NO: 23207 - protein, 9 aa, synthetic construct
PINGTIRVK

SEQ ID NO: 23208 - protein, 9 aa, synthetic construct
PINGTIRVF

SEQ ID NO: 23209 - protein, 9 aa, synthetic construct
PINGTIKLK

SEQ ID NO: 23210 - protein, 9 aa, synthetic construct
PLQAAVKVH

SEQ ID NO: 23211 - protein, 9 aa, synthetic construct
PINGTGHLR

SEQ ID NO: 23212 - protein, 9 aa, synthetic construct
PINGTGRLR

SEQ ID NO: 23213 - protein, 9 aa, synthetic construct
PINGTGRLK

SEQ ID NO: 23214 - protein, 9 aa, synthetic construct
PINGTGRVY

SEQ ID NO: 23215 - protein, 9 aa, synthetic construct
PLQAALHLY

SEQ ID NO: 23216 - protein, 9 aa, synthetic construct
PLQAALHLR

SEQ ID NO: 23217 - protein, 9 aa, synthetic construct
PINGSVRVF

SEQ ID NO: 23218 - protein, 9 aa, synthetic construct
PLQAALHLH

SEQ ID NO: 23219 - protein, 9 aa, synthetic construct
PLQAALHLK

SEQ ID NO: 23220 - protein, 9 aa, synthetic construct
PINGSLHLY

SEQ ID NO: 23221 - protein, 9 aa, synthetic construct
PINGSLHLK

SEQ ID NO: 23222 - protein, 9 aa, synthetic construct
PINGSLHVH

SEQ ID NO: 23223 - protein, 9 aa, synthetic construct
PINGSLRVF

SEQ ID NO: 23224 - protein, 9 aa, synthetic construct
PLQAALHVY

SEQ ID NO: 23225 - protein, 9 aa, synthetic construct
PINGSLKLH

SEQ ID NO: 23226 - protein, 9 aa, synthetic construct
PINGSLKVY

SEQ ID NO: 23227 - protein, 9 aa, synthetic construct
PINGSLKVF

SEQ ID NO: 23228 - protein, 9 aa, synthetic construct
PLQAALHVR

SEQ ID NO: 23229 - protein, 9 aa, synthetic construct
PLQAALHVH

SEQ ID NO: 23230 - protein, 9 aa, synthetic construct
PINGSARLH

SEQ ID NO: 23231 - protein, 9 aa, synthetic construct
PINGSARLF

SEQ ID NO: 23232 - protein, 9 aa, synthetic construct
PLQAALHVK

SEQ ID NO: 23233 - protein, 9 aa, synthetic construct
PINGSAKLR

SEQ ID NO: 23234 - protein, 9 aa, synthetic construct
PINGSAKLH

SEQ ID NO: 23235 - protein, 9 aa, synthetic construct
PINGSAKLK

SEQ ID NO: 23236 - protein, 9 aa, synthetic construct
PINGSAKVH

SEQ ID NO: 23237 - protein, 9 aa, synthetic construct
PLQAALHVF

SEQ ID NO: 23238 - protein, 9 aa, synthetic construct
PINGSIRLF

SEQ ID NO: 23239 - protein, 9 aa, synthetic construct
PINGSIRVF

SEQ ID NO: 23240 - protein, 9 aa, synthetic construct
PINGSIKVY

SEQ ID NO: 23241 - protein, 9 aa, synthetic construct
PINGSGHLK

SEQ ID NO: 23242 - protein, 9 aa, synthetic construct
PINGSGRLR

SEQ ID NO: 23243 - protein, 9 aa, synthetic construct
PINGSGRLK

SEQ ID NO: 23244 - protein, 9 aa, synthetic construct
PINGSGRLF

SEQ ID NO: 23245 - protein, 9 aa, synthetic construct
PINGSGKVY

SEQ ID NO: 23246 - protein, 9 aa, synthetic construct
PINGVVHLY

SEQ ID NO: 23247 - protein, 9 aa, synthetic construct
PINGVVHLR

SEQ ID NO: 23248 - protein, 9 aa, synthetic construct
PINGVVHLK

SEQ ID NO: 23249 - protein, 9 aa, synthetic construct
PINGVVHVF

SEQ ID NO: 23250 - protein, 9 aa, synthetic construct
PINGVVRLR

SEQ ID NO: 23251 - protein, 9 aa, synthetic construct
PINGVVRLH

SEQ ID NO: 23252 - protein, 9 aa, synthetic construct
PINGVVKLY

SEQ ID NO: 23253 - protein, 9 aa, synthetic construct
PINGVVKVK

SEQ ID NO: 23254 - protein, 9 aa, synthetic construct
PINGVLHLH

SEQ ID NO: 23255 - protein, 9 aa, synthetic construct
PINGVLHVR

SEQ ID NO: 23256 - protein, 9 aa, synthetic construct
PLQAALRVF

SEQ ID NO: 23257 - protein, 9 aa, synthetic construct
PINGVLRLY

SEQ ID NO: 23258 - protein, 9 aa, synthetic construct
PINGVLRVK

SEQ ID NO: 23259 - protein, 9 aa, synthetic construct
PINGVLKLR

SEQ ID NO: 23260 - protein, 9 aa, synthetic construct
PINGVAHLY

SEQ ID NO: 23261 - protein, 9 aa, synthetic construct
PINGVAHLK

SEQ ID NO: 23262 - protein, 9 aa, synthetic construct
PINGVAHVR

SEQ ID NO: 23263 - protein, 9 aa, synthetic construct
PINGVAHVK

SEQ ID NO: 23264 - protein, 9 aa, synthetic construct
PINGVAHVF

SEQ ID NO: 23265 - protein, 9 aa, synthetic construct
PLQAALKLH

SEQ ID NO: 23266 - protein, 9 aa, synthetic construct
PINGVARLY

SEQ ID NO: 23267 - protein, 9 aa, synthetic construct
PINGVARLF

SEQ ID NO: 23268 - protein, 9 aa, synthetic construct
PINGVARVR

SEQ ID NO: 23269 - protein, 9 aa, synthetic construct
PINGVARVH

SEQ ID NO: 23270 - protein, 9 aa, synthetic construct
PINGVARVF

SEQ ID NO: 23271 - protein, 9 aa, synthetic construct
PINGVAKLK

SEQ ID NO: 23272 - protein, 9 aa, synthetic construct
PINGVAKVR

SEQ ID NO: 23273 - protein, 9 aa, synthetic construct
PLQAALKLF

SEQ ID NO: 23274 - protein, 9 aa, synthetic construct
PINGVIHVR

SEQ ID NO: 23275 - protein, 9 aa, synthetic construct
PINGVIHVK

SEQ ID NO: 23276 - protein, 9 aa, synthetic construct
PINGVIRLR

SEQ ID NO: 23277 - protein, 9 aa, synthetic construct
PINGVIRVH

SEQ ID NO: 23278 - protein, 9 aa, synthetic construct
PINGVIKVH

SEQ ID NO: 23279 - protein, 9 aa, synthetic construct
PINGVGHLR

SEQ ID NO: 23280 - protein, 9 aa, synthetic construct
PINGVGHLF

SEQ ID NO: 23281 - protein, 9 aa, synthetic construct
PINGVGHVY

SEQ ID NO: 23282 - protein, 9 aa, synthetic construct
PINGVGHVF

SEQ ID NO: 23283 - protein, 9 aa, synthetic construct
PINGVGRLH

SEQ ID NO: 23284 - protein, 9 aa, synthetic construct
PINGVGRLF

SEQ ID NO: 23285 - protein, 9 aa, synthetic construct
PINGVGRVR

SEQ ID NO: 23286 - protein, 9 aa, synthetic construct
PINGVGRVK

SEQ ID NO: 23287 - protein, 9 aa, synthetic construct
PINGVGRVF

SEQ ID NO: 23288 - protein, 9 aa, synthetic construct
PLQAALKVF

SEQ ID NO: 23289 - protein, 9 aa, synthetic construct
PINGVGKLR

SEQ ID NO: 23290 - protein, 9 aa, synthetic construct
PINGVGKVH

SEQ ID NO: 23291 - protein, 9 aa, synthetic construct
PLNGTAKLR

SEQ ID NO: 23292 - protein, 9 aa, synthetic construct
PINGGVHVY

SEQ ID NO: 23293 - protein, 9 aa, synthetic construct
PINGGVRLY

SEQ ID NO: 23294 - protein, 9 aa, synthetic construct
PINGGVRLH

SEQ ID NO: 23295 - protein, 9 aa, synthetic construct
PINGGVRLF

SEQ ID NO: 23296 - protein, 9 aa, synthetic construct
PINGGVRVY

SEQ ID NO: 23297 - protein, 9 aa, synthetic construct
PINGGVRVH

SEQ ID NO: 23298 - protein, 9 aa, synthetic construct
PINGGVRVK

SEQ ID NO: 23299 - protein, 9 aa, synthetic construct
PINGGVRVF

SEQ ID NO: 23300 - protein, 9 aa, synthetic construct
PINGGVKVH

SEQ ID NO: 23301 - protein, 9 aa, synthetic construct
PINGGLHLH

SEQ ID NO: 23302 - protein, 9 aa, synthetic construct
PINGGLHLF

SEQ ID NO: 23303 - protein, 9 aa, synthetic construct
PINGGLHVY

SEQ ID NO: 23304 - protein, 9 aa, synthetic construct
PINGGLHVK

SEQ ID NO: 23305 - protein, 9 aa, synthetic construct
PINGGLHVF

SEQ ID NO: 23306 - protein, 9 aa, synthetic construct
PINGGLRLF

SEQ ID NO: 23307 - protein, 9 aa, synthetic construct
PINGGLKLH

SEQ ID NO: 23308 - protein, 9 aa, synthetic construct
PLQAAAHVR

SEQ ID NO: 23309 - protein, 9 aa, synthetic construct
PINGGARLY

SEQ ID NO: 23310 - protein, 9 aa, synthetic construct
PINGGARLF

SEQ ID NO: 23311 - protein, 9 aa, synthetic construct
PINGGARVK

SEQ ID NO: 23312 - protein, 9 aa, synthetic construct
PLQAAAHVF

SEQ ID NO: 23313 - protein, 9 aa, synthetic construct
PLQAAARLY

SEQ ID NO: 23314 - protein, 9 aa, synthetic construct
PINGGIKVH

SEQ ID NO: 23315 - protein, 9 aa, synthetic construct
PINGGIKVK

SEQ ID NO: 23316 - protein, 9 aa, synthetic construct
PINGGGHVR

SEQ ID NO: 23317 - protein, 9 aa, synthetic construct
PINGGGRVR

SEQ ID NO: 23318 - protein, 9 aa, synthetic construct
PINGGGRVK

SEQ ID NO: 23319 - protein, 9 aa, synthetic construct
PLQAAARLF

SEQ ID NO: 23320 - protein, 9 aa, synthetic construct
PINGGGKVY

SEQ ID NO: 23321 - protein, 9 aa, synthetic construct
PINGGGKVH

SEQ ID NO: 23322 - protein, 9 aa, synthetic construct
PINGGGKVK

SEQ ID NO: 23323 - protein, 9 aa, synthetic construct
PLQAAARVR

SEQ ID NO: 23324 - protein, 9 aa, synthetic construct
PINAAVRLY

SEQ ID NO: 23325 - protein, 9 aa, synthetic construct
PINAAVRLH

SEQ ID NO: 23326 - protein, 9 aa, synthetic construct
PINAAVRVY

SEQ ID NO: 23327 - protein, 9 aa, synthetic construct
PINAAVKLR

SEQ ID NO: 23328 - protein, 9 aa, synthetic construct
PINAAVKLK

SEQ ID NO: 23329 - protein, 9 aa, synthetic construct
PINAAVKVH

SEQ ID NO: 23330 - protein, 9 aa, synthetic construct
PINAAVKVK

SEQ ID NO: 23331 - protein, 9 aa, synthetic construct
PLQAAARVK

SEQ ID NO: 23332 - protein, 9 aa, synthetic construct
PINAALHLY

SEQ ID NO: 23333 - protein, 9 aa, synthetic construct
PINAALHLH

SEQ ID NO: 23334 - protein, 9 aa, synthetic construct
PINAALHLK

SEQ ID NO: 23335 - protein, 9 aa, synthetic construct
PINAALHLF

SEQ ID NO: 23336 - protein, 9 aa, synthetic construct
PINAALHVY

SEQ ID NO: 23337 - protein, 9 aa, synthetic construct
PINAALHVF

SEQ ID NO: 23338 - protein, 9 aa, synthetic construct
PINAALRLH

SEQ ID NO: 23339 - protein, 9 aa, synthetic construct
PINAALRVR

SEQ ID NO: 23340 - protein, 9 aa, synthetic construct
PINAALRVH

SEQ ID NO: 23341 - protein, 9 aa, synthetic construct
PINAALRVK

SEQ ID NO: 23342 - protein, 9 aa, synthetic construct
PINAALKLH

SEQ ID NO: 23343 - protein, 9 aa, synthetic construct
PINAALKLF

SEQ ID NO: 23344 - protein, 9 aa, synthetic construct
PINAALKVY

SEQ ID NO: 23345 - protein, 9 aa, synthetic construct
PINAALKVH

SEQ ID NO: 23346 - protein, 9 aa, synthetic construct
PINAALKVF

SEQ ID NO: 23347 - protein, 9 aa, synthetic construct
PLQAAAKLR

SEQ ID NO: 23348 - protein, 9 aa, synthetic construct
PINAAAKVY

SEQ ID NO: 23349 - protein, 9 aa, synthetic construct
PINAAAKVR

SEQ ID NO: 23350 - protein, 9 aa, synthetic construct
PINAAAKVK

SEQ ID NO: 23351 - protein, 9 aa, synthetic construct
PINAAIHLR

SEQ ID NO: 23352 - protein, 9 aa, synthetic construct
PINAAIHVR

SEQ ID NO: 23353 - protein, 9 aa, synthetic construct
PLQAAAKVR

SEQ ID NO: 23354 - protein, 9 aa, synthetic construct
PINAAIKLK

SEQ ID NO: 23355 - protein, 9 aa, synthetic construct
PINAAGHVR

SEQ ID NO: 23356 - protein, 9 aa, synthetic construct
PINAAGRLY

SEQ ID NO: 23357 - protein, 9 aa, synthetic construct
PINAAGRVY

SEQ ID NO: 23358 - protein, 9 aa, synthetic construct
PINAAGRVH

SEQ ID NO: 23359 - protein, 9 aa, synthetic construct
PINAAGRVK

SEQ ID NO: 23360 - protein, 9 aa, synthetic construct
PINAAGKLY

SEQ ID NO: 23361 - protein, 9 aa, synthetic construct
PINAAGKVH

SEQ ID NO: 23362 - protein, 9 aa, synthetic construct
PLQAAIHLY

SEQ ID NO: 23363 - protein, 9 aa, synthetic construct
PINATVHLR

SEQ ID NO: 23364 - protein, 9 aa, synthetic construct
PINATVHLH

SEQ ID NO: 23365 - protein, 9 aa, synthetic construct
PINATVHVY

SEQ ID NO: 23366 - protein, 9 aa, synthetic construct
PINATVHVR

SEQ ID NO: 23367 - protein, 9 aa, synthetic construct
PINATVHVF

SEQ ID NO: 23368 - protein, 9 aa, synthetic construct
PLQAAIHLR

SEQ ID NO: 23369 - protein, 9 aa, synthetic construct
PINATVRLR

SEQ ID NO: 23370 - protein, 9 aa, synthetic construct
PINATVRVY

SEQ ID NO: 23371 - protein, 9 aa, synthetic construct
PINATVRVF

SEQ ID NO: 23372 - protein, 9 aa, synthetic construct
PINATVKLR

SEQ ID NO: 23373 - protein, 9 aa, synthetic construct
PINATVKLH

SEQ ID NO: 23374 - protein, 9 aa, synthetic construct
PINATVKLK

SEQ ID NO: 23375 - protein, 9 aa, synthetic construct
PINATVKVH

SEQ ID NO: 23376 - protein, 9 aa, synthetic construct
PINATLHLK

SEQ ID NO: 23377 - protein, 9 aa, synthetic construct
PINATLHVH

SEQ ID NO: 23378 - protein, 9 aa, synthetic construct
PLQAAIHVY

SEQ ID NO: 23379 - protein, 9 aa, synthetic construct
PINATLKLY

SEQ ID NO: 23380 - protein, 9 aa, synthetic construct
PINATLKLF

SEQ ID NO: 23381 - protein, 9 aa, synthetic construct
PLQAAIHVR

SEQ ID NO: 23382 - protein, 9 aa, synthetic construct
PINATARLF

SEQ ID NO: 23383 - protein, 9 aa, synthetic construct
PINATARVR

SEQ ID NO: 23384 - protein, 9 aa, synthetic construct
PINATAKLR

SEQ ID NO: 23385 - protein, 9 aa, synthetic construct
PINATIRLH

SEQ ID NO: 23386 - protein, 9 aa, synthetic construct
PINATIRVY

SEQ ID NO: 23387 - protein, 9 aa, synthetic construct
PINATIRVH

SEQ ID NO: 23388 - protein, 9 aa, synthetic construct
PINATIRVF

SEQ ID NO: 23389 - protein, 9 aa, synthetic construct
PINATIKLK

SEQ ID NO: 23390 - protein, 9 aa, synthetic construct
PINATIKVH

SEQ ID NO: 23391 - protein, 9 aa, synthetic construct
PINATGHLR

SEQ ID NO: 23392 - protein, 9 aa, synthetic construct
PINATGHLK

SEQ ID NO: 23393 - protein, 9 aa, synthetic construct
PINATGRLR

SEQ ID NO: 23394 - protein, 9 aa, synthetic construct
PINATGRVY

SEQ ID NO: 23395 - protein, 9 aa, synthetic construct
PINATGRVH

SEQ ID NO: 23396 - protein, 9 aa, synthetic construct
PINATGRVF

SEQ ID NO: 23397 - protein, 9 aa, synthetic construct
PINATGKLF

SEQ ID NO: 23398 - protein, 9 aa, synthetic construct
PINASVHLY

SEQ ID NO: 23399 - protein, 9 aa, synthetic construct
PINASVHLR

SEQ ID NO: 23400 - protein, 9 aa, synthetic construct
PINASVHLH

SEQ ID NO: 23401 - protein, 9 aa, synthetic construct
PINASVHLF

SEQ ID NO: 23402 - protein, 9 aa, synthetic construct
PINASVHVR

SEQ ID NO: 23403 - protein, 9 aa, synthetic construct
PINASVRLH

SEQ ID NO: 23404 - protein, 9 aa, synthetic construct
PINASVKVY

SEQ ID NO: 23405 - protein, 9 aa, synthetic construct
PINASVKVH

SEQ ID NO: 23406 - protein, 9 aa, synthetic construct
PINASLHLK

SEQ ID NO: 23407 - protein, 9 aa, synthetic construct
PINASLHLF

SEQ ID NO: 23408 - protein, 9 aa, synthetic construct
PINASLHVH

SEQ ID NO: 23409 - protein, 9 aa, synthetic construct
PINASLHVK

SEQ ID NO: 23410 - protein, 9 aa, synthetic construct
PINASLRVF

SEQ ID NO: 23411 - protein, 9 aa, synthetic construct
PLQAAIKLY

SEQ ID NO: 23412 - protein, 9 aa, synthetic construct
PINASLKLH

SEQ ID NO: 23413 - protein, 9 aa, synthetic construct
PINASLKVY

SEQ ID NO: 23414 - protein, 9 aa, synthetic construct
PINASLKVH

SEQ ID NO: 23415 - protein, 9 aa, synthetic construct
PINASLKVF

SEQ ID NO: 23416 - protein, 9 aa, synthetic construct
PLQAAIKLR

SEQ ID NO: 23417 - protein, 9 aa, synthetic construct
PINASARLY

SEQ ID NO: 23418 - protein, 9 aa, synthetic construct
PINASARLF

SEQ ID NO: 23419 - protein, 9 aa, synthetic construct
PINASARVF

SEQ ID NO: 23420 - protein, 9 aa, synthetic construct
PLQAAIKLK

SEQ ID NO: 23421 - protein, 9 aa, synthetic construct
PINASAKLR

SEQ ID NO: 23422 - protein, 9 aa, synthetic construct
PINASAKVY

SEQ ID NO: 23423 - protein, 9 aa, synthetic construct
PINASAKVK

SEQ ID NO: 23424 - protein, 9 aa, synthetic construct
PLQAAIKLF

SEQ ID NO: 23425 - protein, 9 aa, synthetic construct
PINASIHLY

SEQ ID NO: 23426 - protein, 9 aa, synthetic construct
PINASIHLH

SEQ ID NO: 23427 - protein, 9 aa, synthetic construct
PINASIHLF

SEQ ID NO: 23428 - protein, 9 aa, synthetic construct
PINASIHVY

SEQ ID NO: 23429 - protein, 9 aa, synthetic construct
PINASIHVR

SEQ ID NO: 23430 - protein, 9 aa, synthetic construct
PINASIKLY

SEQ ID NO: 23431 - protein, 9 aa, synthetic construct
PINASIKLF

SEQ ID NO: 23432 - protein, 9 aa, synthetic construct
PINASIKVF

SEQ ID NO: 23433 - protein, 9 aa, synthetic construct
PINASGHLK

SEQ ID NO: 23434 - protein, 9 aa, synthetic construct
PINASGRLY

SEQ ID NO: 23435 - protein, 9 aa, synthetic construct
PINASGRLR

SEQ ID NO: 23436 - protein, 9 aa, synthetic construct
PINASGKLF

SEQ ID NO: 23437 - protein, 9 aa, synthetic construct
PINASGKVY

SEQ ID NO: 23438 - protein, 9 aa, synthetic construct
PINAVVHLY

SEQ ID NO: 23439 - protein, 9 aa, synthetic construct
PINAVVHLH

SEQ ID NO: 23440 - protein, 9 aa, synthetic construct
PINAVVRLY

SEQ ID NO: 23441 - protein, 9 aa, synthetic construct
PINAVVRLH

SEQ ID NO: 23442 - protein, 9 aa, synthetic construct
PINAVVRVH

SEQ ID NO: 23443 - protein, 9 aa, synthetic construct
PINAVVKLY

SEQ ID NO: 23444 - protein, 9 aa, synthetic construct
PINAVVKLR

SEQ ID NO: 23445 - protein, 9 aa, synthetic construct
PINAVVKLF

SEQ ID NO: 23446 - protein, 9 aa, synthetic construct
PINAVVKVH

SEQ ID NO: 23447 - protein, 9 aa, synthetic construct
PINAVVKVK

SEQ ID NO: 23448 - protein, 9 aa, synthetic construct
PINAVLHVK

SEQ ID NO: 23449 - protein, 9 aa, synthetic construct
PINAVLRVY

SEQ ID NO: 23450 - protein, 9 aa, synthetic construct
PINAVLRVF

SEQ ID NO: 23451 - protein, 9 aa, synthetic construct
PINAVLKLF

SEQ ID NO: 23452 - protein, 9 aa, synthetic construct
PINAVLKVY

SEQ ID NO: 23453 - protein, 9 aa, synthetic construct
PINAVAHLR

SEQ ID NO: 23454 - protein, 9 aa, synthetic construct
PINAVAHLK

SEQ ID NO: 23455 - protein, 9 aa, synthetic construct
PINAVAHVH

SEQ ID NO: 23456 - protein, 9 aa, synthetic construct
PINAVAHVK

SEQ ID NO: 23457 - protein, 9 aa, synthetic construct
PINAVAHVF

SEQ ID NO: 23458 - protein, 9 aa, synthetic construct
PINAVARLH

SEQ ID NO: 23459 - protein, 9 aa, synthetic construct
PINAVARVY

SEQ ID NO: 23460 - protein, 9 aa, synthetic construct
PINAVARVR

SEQ ID NO: 23461 - protein, 9 aa, synthetic construct
PINAVARVH

SEQ ID NO: 23462 - protein, 9 aa, synthetic construct
PINAVAKLR

SEQ ID NO: 23463 - protein, 9 aa, synthetic construct
PINAVAKLK

SEQ ID NO: 23464 - protein, 9 aa, synthetic construct
PINAVAKVY

SEQ ID NO: 23465 - protein, 9 aa, synthetic construct
PINAVAKVR

SEQ ID NO: 23466 - protein, 9 aa, synthetic construct
PINAVAKVH

SEQ ID NO: 23467 - protein, 9 aa, synthetic construct
PINAVAKVK

SEQ ID NO: 23468 - protein, 9 aa, synthetic construct
PINAVIHLF

SEQ ID NO: 23469 - protein, 9 aa, synthetic construct
PINAVIHVR

SEQ ID NO: 23470 - protein, 9 aa, synthetic construct
PINAVIHVH

SEQ ID NO: 23471 - protein, 9 aa, synthetic construct
PINAVIHVF

SEQ ID NO: 23472 - protein, 9 aa, synthetic construct
PLQAAGRLY

SEQ ID NO: 23473 - protein, 9 aa, synthetic construct
PINAVIRLR

SEQ ID NO: 23474 - protein, 9 aa, synthetic construct
PINAVIRLH

SEQ ID NO: 23475 - protein, 9 aa, synthetic construct
PINAVIRVH

SEQ ID NO: 23476 - protein, 9 aa, synthetic construct
PINAVIKVY

SEQ ID NO: 23477 - protein, 9 aa, synthetic construct
PINAVIKVH

SEQ ID NO: 23478 - protein, 9 aa, synthetic construct
PINAVGHLY

SEQ ID NO: 23479 - protein, 9 aa, synthetic construct
PINAVGHLH

SEQ ID NO: 23480 - protein, 9 aa, synthetic construct
PINAVGHLK

SEQ ID NO: 23481 - protein, 9 aa, synthetic construct
PINAVGHLF

SEQ ID NO: 23482 - protein, 9 aa, synthetic construct
PINAVGHVK

SEQ ID NO: 23483 - protein, 9 aa, synthetic construct
PINAVGHVF

SEQ ID NO: 23484 - protein, 9 aa, synthetic construct
PLQAAGRLK

SEQ ID NO: 23485 - protein, 9 aa, synthetic construct
PINAVGRLY

SEQ ID NO: 23486 - protein, 9 aa, synthetic construct
PINAVGRLH

SEQ ID NO: 23487 - protein, 9 aa, synthetic construct
PINAVGRLF

SEQ ID NO: 23488 - protein, 9 aa, synthetic construct
PINAVGRVY

SEQ ID NO: 23489 - protein, 9 aa, synthetic construct
PINAVGRVR

SEQ ID NO: 23490 - protein, 9 aa, synthetic construct
PINAVGRVF

SEQ ID NO: 23491 - protein, 9 aa, synthetic construct
PINAVGKLY

SEQ ID NO: 23492 - protein, 9 aa, synthetic construct
PINAVGKLR

SEQ ID NO: 23493 - protein, 9 aa, synthetic construct
PINAVGKLF

SEQ ID NO: 23494 - protein, 9 aa, synthetic construct
PINAVGKVR

SEQ ID NO: 23495 - protein, 9 aa, synthetic construct
PINAVGKVH

SEQ ID NO: 23496 - protein, 9 aa, synthetic construct
PINAGVHLY

SEQ ID NO: 23497 - protein, 9 aa, synthetic construct
PINAGVHLH

SEQ ID NO: 23498 - protein, 9 aa, synthetic construct
PINAGVHLK

SEQ ID NO: 23499 - protein, 9 aa, synthetic construct
PINAGVHLF

SEQ ID NO: 23500 - protein, 9 aa, synthetic construct
PINAGVHVY

SEQ ID NO: 23501 - protein, 9 aa, synthetic construct
PINAGVHVF

SEQ ID NO: 23502 - protein, 9 aa, synthetic construct
PINAGVRLY

SEQ ID NO: 23503 - protein, 9 aa, synthetic construct
PINAGVRLH

SEQ ID NO: 23504 - protein, 9 aa, synthetic construct
PINAGVRLF

SEQ ID NO: 23505 - protein, 9 aa, synthetic construct
PINAGVRVY

SEQ ID NO: 23506 - protein, 9 aa, synthetic construct
PINAGVRVR

SEQ ID NO: 23507 - protein, 9 aa, synthetic construct
PINAGVRVK

SEQ ID NO: 23508 - protein, 9 aa, synthetic construct
PINAGVRVF

SEQ ID NO: 23509 - protein, 9 aa, synthetic construct
PINAGVKLH

SEQ ID NO: 23510 - protein, 9 aa, synthetic construct
PINAGVKVR

SEQ ID NO: 23511 - protein, 9 aa, synthetic construct
PINAGVKVH

SEQ ID NO: 23512 - protein, 9 aa, synthetic construct
PINAGVKVK

SEQ ID NO: 23513 - protein, 9 aa, synthetic construct
PLQAAGRVK

SEQ ID NO: 23514 - protein, 9 aa, synthetic construct
PINAGLHLY

SEQ ID NO: 23515 - protein, 9 aa, synthetic construct
PINAGLHLH

SEQ ID NO: 23516 - protein, 9 aa, synthetic construct
PINAGLHLK

SEQ ID NO: 23517 - protein, 9 aa, synthetic construct
PINAGLHVY

SEQ ID NO: 23518 - protein, 9 aa, synthetic construct
PINAGLHVK

SEQ ID NO: 23519 - protein, 9 aa, synthetic construct
PLQAAGRVF

SEQ ID NO: 23520 - protein, 9 aa, synthetic construct
PINAGLRLF

SEQ ID NO: 23521 - protein, 9 aa, synthetic construct
PINAGLRVF

SEQ ID NO: 23522 - protein, 9 aa, synthetic construct
PINAGLKVY

SEQ ID NO: 23523 - protein, 9 aa, synthetic construct
PINAGLKVH

SEQ ID NO: 23524 - protein, 9 aa, synthetic construct
PINAGAHLR

SEQ ID NO: 23525 - protein, 9 aa, synthetic construct
PINAGARVY

SEQ ID NO: 23526 - protein, 9 aa, synthetic construct
PINAGARVR

SEQ ID NO: 23527 - protein, 9 aa, synthetic construct
PINAGARVH

SEQ ID NO: 23528 - protein, 9 aa, synthetic construct
PINAGARVK

SEQ ID NO: 23529 - protein, 9 aa, synthetic construct
PINAGIHLR

SEQ ID NO: 23530 - protein, 9 aa, synthetic construct
PINAGIHLH

SEQ ID NO: 23531 - protein, 9 aa, synthetic construct
PINAGIHLF

SEQ ID NO: 23532 - protein, 9 aa, synthetic construct
PINAGIHVF

SEQ ID NO: 23533 - protein, 9 aa, synthetic construct
PINAGIRVH

SEQ ID NO: 23534 - protein, 9 aa, synthetic construct
PINAGIKLY

SEQ ID NO: 23535 - protein, 9 aa, synthetic construct
PINAGIKLH

SEQ ID NO: 23536 - protein, 9 aa, synthetic construct
PINAGIKLK

SEQ ID NO: 23537 - protein, 9 aa, synthetic construct
PINAGIKLF

SEQ ID NO: 23538 - protein, 9 aa, synthetic construct
PINAGIKVY

SEQ ID NO: 23539 - protein, 9 aa, synthetic construct
PINAGIKVH

SEQ ID NO: 23540 - protein, 9 aa, synthetic construct
PINAGGHLR

SEQ ID NO: 23541 - protein, 9 aa, synthetic construct
PINAGGRLY

SEQ ID NO: 23542 - protein, 9 aa, synthetic construct
PINAGGRVY

SEQ ID NO: 23543 - protein, 9 aa, synthetic construct
PINAGGRVR

SEQ ID NO: 23544 - protein, 9 aa, synthetic construct
PINAGGRVH

SEQ ID NO: 23545 - protein, 9 aa, synthetic construct
PINAGGRVF

SEQ ID NO: 23546 - protein, 9 aa, synthetic construct
PINAGGKVH

SEQ ID NO: 23547 - protein, 9 aa, synthetic construct
PINAGGKVK

SEQ ID NO: 23548 - protein, 9 aa, synthetic construct
PIQGAVHLY

SEQ ID NO: 23549 - protein, 9 aa, synthetic construct
PIQGAVHLH

SEQ ID NO: 23550 - protein, 9 aa, synthetic construct
PIQGAVHLK

SEQ ID NO: 23551 - protein, 9 aa, synthetic construct
PIQGAVHLF

SEQ ID NO: 23552 - protein, 9 aa, synthetic construct
PIQGAVHVR

SEQ ID NO: 23553 - protein, 9 aa, synthetic construct
PIQGAVHVF

SEQ ID NO: 23554 - protein, 9 aa, synthetic construct
PIQGAVRLY

SEQ ID NO: 23555 - protein, 9 aa, synthetic construct
PIQGAVRLH

SEQ ID NO: 23556 - protein, 9 aa, synthetic construct
PIQGAVRLF

SEQ ID NO: 23557 - protein, 9 aa, synthetic construct
PIQGAVRVY

SEQ ID NO: 23558 - protein, 9 aa, synthetic construct
PIQGAVRVF

SEQ ID NO: 23559 - protein, 9 aa, synthetic construct
PIQGAVKLH

SEQ ID NO: 23560 - protein, 9 aa, synthetic construct
PIQGAVKLF

SEQ ID NO: 23561 - protein, 9 aa, synthetic construct
PIQGAVKVY

SEQ ID NO: 23562 - protein, 9 aa, synthetic construct
PIQGALHLY

SEQ ID NO: 23563 - protein, 9 aa, synthetic construct
PIQGALHLR

SEQ ID NO: 23564 - protein, 9 aa, synthetic construct
PIQGALHLH

SEQ ID NO: 23565 - protein, 9 aa, synthetic construct
PIQGALHLK

SEQ ID NO: 23566 - protein, 9 aa, synthetic construct
PIQGALHLF

SEQ ID NO: 23567 - protein, 9 aa, synthetic construct
PIQGALHVF

SEQ ID NO: 23568 - protein, 9 aa, synthetic construct
PLQATVHLF

SEQ ID NO: 23569 - protein, 9 aa, synthetic construct
PIQGALRLY

SEQ ID NO: 23570 - protein, 9 aa, synthetic construct
PIQGALRLH

SEQ ID NO: 23571 - protein, 9 aa, synthetic construct
PIQGALRVH

SEQ ID NO: 23572 - protein, 9 aa, synthetic construct
PIQGALRVK

SEQ ID NO: 23573 - protein, 9 aa, synthetic construct
PIQGALRVF

SEQ ID NO: 23574 - protein, 9 aa, synthetic construct
PIQGALKLY

SEQ ID NO: 23575 - protein, 9 aa, synthetic construct
PIQGALKLR

SEQ ID NO: 23576 - protein, 9 aa, synthetic construct
PIQGALKLH

SEQ ID NO: 23577 - protein, 9 aa, synthetic construct
PIQGALKLF

SEQ ID NO: 23578 - protein, 9 aa, synthetic construct
PIQGALKVH

SEQ ID NO: 23579 - protein, 9 aa, synthetic construct
PIQGAAHLY

SEQ ID NO: 23580 - protein, 9 aa, synthetic construct
PIQGAAHLR

SEQ ID NO: 23581 - protein, 9 aa, synthetic construct
PIQGAAHLF

SEQ ID NO: 23582 - protein, 9 aa, synthetic construct
PIQGAARLH

SEQ ID NO: 23583 - protein, 9 aa, synthetic construct
PIQGAARLF

SEQ ID NO: 23584 - protein, 9 aa, synthetic construct
PIQGAARVY

SEQ ID NO: 23585 - protein, 9 aa, synthetic construct
PIQGAARVR

SEQ ID NO: 23586 - protein, 9 aa, synthetic construct
PIQGAAKLR

SEQ ID NO: 23587 - protein, 9 aa, synthetic construct
PIQGAAKVY

SEQ ID NO: 23588 - protein, 9 aa, synthetic construct
PLQATVHVF

SEQ ID NO: 23589 - protein, 9 aa, synthetic construct
PIQGAIHLY

SEQ ID NO: 23590 - protein, 9 aa, synthetic construct
PIQGAIHLR

SEQ ID NO: 23591 - protein, 9 aa, synthetic construct
PIQGAIHLH

SEQ ID NO: 23592 - protein, 9 aa, synthetic construct
PIQGAIHLK

SEQ ID NO: 23593 - protein, 9 aa, synthetic construct
PIQGAIHLF

SEQ ID NO: 23594 - protein, 9 aa, synthetic construct
PIQGAIHVY

SEQ ID NO: 23595 - protein, 9 aa, synthetic construct
PIQGAIHVR

SEQ ID NO: 23596 - protein, 9 aa, synthetic construct
PIQGAIRLH

SEQ ID NO: 23597 - protein, 9 aa, synthetic construct
PIQGAIRLF

SEQ ID NO: 23598 - protein, 9 aa, synthetic construct
PIQGAIRVY

SEQ ID NO: 23599 - protein, 9 aa, synthetic construct
PIQGAIRVR

SEQ ID NO: 23600 - protein, 9 aa, synthetic construct
PIQGAIRVK

SEQ ID NO: 23601 - protein, 9 aa, synthetic construct
PIQGAIRVF

SEQ ID NO: 23602 - protein, 9 aa, synthetic construct
PIQGAIKLR

SEQ ID NO: 23603 - protein, 9 aa, synthetic construct
PIQGAIKLH

SEQ ID NO: 23604 - protein, 9 aa, synthetic construct
PIQGAIKLK

SEQ ID NO: 23605 - protein, 9 aa, synthetic construct
PIQGAIKLF

SEQ ID NO: 23606 - protein, 9 aa, synthetic construct
PIQGAIKVY

SEQ ID NO: 23607 - protein, 9 aa, synthetic construct
PIQGAIKVR

SEQ ID NO: 23608 - protein, 9 aa, synthetic construct
PIQGAIKVH

SEQ ID NO: 23609 - protein, 9 aa, synthetic construct
PIQGAIKVK

SEQ ID NO: 23610 - protein, 9 aa, synthetic construct
PIQGAIKVF

SEQ ID NO: 23611 - protein, 9 aa, synthetic construct
PLQATVRLH

SEQ ID NO: 23612 - protein, 9 aa, synthetic construct
PIQGAGHLR

SEQ ID NO: 23613 - protein, 9 aa, synthetic construct
PIQGAGHLK

SEQ ID NO: 23614 - protein, 9 aa, synthetic construct
PIQGAGHVY

SEQ ID NO: 23615 - protein, 9 aa, synthetic construct
PIQGAGHVR

SEQ ID NO: 23616 - protein, 9 aa, synthetic construct
PIQGAGHVH

SEQ ID NO: 23617 - protein, 9 aa, synthetic construct
PIQGAGHVK

SEQ ID NO: 23618 - protein, 9 aa, synthetic construct
PIQGAGHVF

SEQ ID NO: 23619 - protein, 9 aa, synthetic construct
PIQGAGRLY

SEQ ID NO: 23620 - protein, 9 aa, synthetic construct
PIQGAGRVH

SEQ ID NO: 23621 - protein, 9 aa, synthetic construct
PIQGAGRVK

SEQ ID NO: 23622 - protein, 9 aa, synthetic construct
PIQGAGRVF

SEQ ID NO: 23623 - protein, 9 aa, synthetic construct
PIQGAGKLY

SEQ ID NO: 23624 - protein, 9 aa, synthetic construct
PIQGAGKLH

SEQ ID NO: 23625 - protein, 9 aa, synthetic construct
PIQGAGKLF

SEQ ID NO: 23626 - protein, 9 aa, synthetic construct
PIQGAGKVY

SEQ ID NO: 23627 - protein, 9 aa, synthetic construct
PIQGAGKVH

SEQ ID NO: 23628 - protein, 9 aa, synthetic construct
PIQGAGKVF

SEQ ID NO: 23629 - protein, 9 aa, synthetic construct
PLQATVRVY

SEQ ID NO: 23630 - protein, 9 aa, synthetic construct
PIQGTVHLF

SEQ ID NO: 23631 - protein, 9 aa, synthetic construct
PIQGTVRLH

SEQ ID NO: 23632 - protein, 9 aa, synthetic construct
PIQGTVRLF

SEQ ID NO: 23633 - protein, 9 aa, synthetic construct
PIQGTVRVY

SEQ ID NO: 23634 - protein, 9 aa, synthetic construct
PIQGTVRVH

SEQ ID NO: 23635 - protein, 9 aa, synthetic construct
PIQGTVKVH

SEQ ID NO: 23636 - protein, 9 aa, synthetic construct
PIQGTVKVF

SEQ ID NO: 23637 - protein, 9 aa, synthetic construct
PIQGTLHLR

SEQ ID NO: 23638 - protein, 9 aa, synthetic construct
PIQGTLHLK

SEQ ID NO: 23639 - protein, 9 aa, synthetic construct
PIQGTLHVY

SEQ ID NO: 23640 - protein, 9 aa, synthetic construct
PIQGTLHVF

SEQ ID NO: 23641 - protein, 9 aa, synthetic construct
PIQGTLRLY

SEQ ID NO: 23642 - protein, 9 aa, synthetic construct
PIQGTLRLK

SEQ ID NO: 23643 - protein, 9 aa, synthetic construct
PLQATVKLY

SEQ ID NO: 23644 - protein, 9 aa, synthetic construct
PIQGTLKLY

SEQ ID NO: 23645 - protein, 9 aa, synthetic construct
PIQGTLKLF

SEQ ID NO: 23646 - protein, 9 aa, synthetic construct
PIQGTLKVF

SEQ ID NO: 23647 - protein, 9 aa, synthetic construct
PLQATVKLR

SEQ ID NO: 23648 - protein, 9 aa, synthetic construct
PLQATVKLH

SEQ ID NO: 23649 - protein, 9 aa, synthetic construct
PIQGTARLY

SEQ ID NO: 23650 - protein, 9 aa, synthetic construct
PLQATVKLK

SEQ ID NO: 23651 - protein, 9 aa, synthetic construct
PIQGTAKLR

SEQ ID NO: 23652 - protein, 9 aa, synthetic construct
PLQATVKLF

SEQ ID NO: 23653 - protein, 9 aa, synthetic construct
PIQGTIHLY

SEQ ID NO: 23654 - protein, 9 aa, synthetic construct
PIQGTIHLR

SEQ ID NO: 23655 - protein, 9 aa, synthetic construct
PIQGTIHLF

SEQ ID NO: 23656 - protein, 9 aa, synthetic construct
PIQGTIHVY

SEQ ID NO: 23657 - protein, 9 aa, synthetic construct
PIQGTIRVF

SEQ ID NO: 23658 - protein, 9 aa, synthetic construct
PIQGTIKLF

SEQ ID NO: 23659 - protein, 9 aa, synthetic construct
PIQGTIKVH

SEQ ID NO: 23660 - protein, 9 aa, synthetic construct
PLQATVKVH

SEQ ID NO: 23661 - protein, 9 aa, synthetic construct
PIQGTGHVR

SEQ ID NO: 23662 - protein, 9 aa, synthetic construct
PIQGTGHVK

SEQ ID NO: 23663 - protein, 9 aa, synthetic construct
PIQGTGRLK

SEQ ID NO: 23664 - protein, 9 aa, synthetic construct
PIQGTGRVY

SEQ ID NO: 23665 - protein, 9 aa, synthetic construct
PIQGTGRVH

SEQ ID NO: 23666 - protein, 9 aa, synthetic construct
PIQGTGRVK

SEQ ID NO: 23667 - protein, 9 aa, synthetic construct
PLQATVKVF

SEQ ID NO: 23668 - protein, 9 aa, synthetic construct
PIQGTGKLH

SEQ ID NO: 23669 - protein, 9 aa, synthetic construct
PIQGTGKVY

SEQ ID NO: 23670 - protein, 9 aa, synthetic construct
PIQGTGKVF

SEQ ID NO: 23671 - protein, 9 aa, synthetic construct
PIQGSVHLY

SEQ ID NO: 23672 - protein, 9 aa, synthetic construct
PIQGSVHLH

SEQ ID NO: 23673 - protein, 9 aa, synthetic construct
PIQGSVHVR

SEQ ID NO: 23674 - protein, 9 aa, synthetic construct
PIQGSVRLR

SEQ ID NO: 23675 - protein, 9 aa, synthetic construct
PIQGSVRVF

SEQ ID NO: 23676 - protein, 9 aa, synthetic construct
PIQGSVKLH

SEQ ID NO: 23677 - protein, 9 aa, synthetic construct
PIQGSVKLF

SEQ ID NO: 23678 - protein, 9 aa, synthetic construct
PLQATLHLK

SEQ ID NO: 23679 - protein, 9 aa, synthetic construct
PIQGSLHLK

SEQ ID NO: 23680 - protein, 9 aa, synthetic construct
PIQGSLHVR

SEQ ID NO: 23681 - protein, 9 aa, synthetic construct
PIQGSLHVH

SEQ ID NO: 23682 - protein, 9 aa, synthetic construct
PIQGSLHVK

SEQ ID NO: 23683 - protein, 9 aa, synthetic construct
PIQGSLHVF

SEQ ID NO: 23684 - protein, 9 aa, synthetic construct
PIQGSLRVK

SEQ ID NO: 23685 - protein, 9 aa, synthetic construct
PIQGSLRVF

SEQ ID NO: 23686 - protein, 9 aa, synthetic construct
PIQGSLKLY

SEQ ID NO: 23687 - protein, 9 aa, synthetic construct
PIQGSLKLH

SEQ ID NO: 23688 - protein, 9 aa, synthetic construct
PIQGSLKVY

SEQ ID NO: 23689 - protein, 9 aa, synthetic construct
PIQGSLKVH

SEQ ID NO: 23690 - protein, 9 aa, synthetic construct
PLQATLHVR

SEQ ID NO: 23691 - protein, 9 aa, synthetic construct
PIQGSAHLY

SEQ ID NO: 23692 - protein, 9 aa, synthetic construct
PIQGSAHLR

SEQ ID NO: 23693 - protein, 9 aa, synthetic construct
PIQGSAHLH

SEQ ID NO: 23694 - protein, 9 aa, synthetic construct
PIQGSAHLK

SEQ ID NO: 23695 - protein, 9 aa, synthetic construct
PIQGSAHVK

SEQ ID NO: 23696 - protein, 9 aa, synthetic construct
PIQGSARLY

SEQ ID NO: 23697 - protein, 9 aa, synthetic construct
PIQGSARLF

SEQ ID NO: 23698 - protein, 9 aa, synthetic construct
PLQATLHVK

SEQ ID NO: 23699 - protein, 9 aa, synthetic construct
PIQGSAKLY

SEQ ID NO: 23700 - protein, 9 aa, synthetic construct
PIQGSAKLF

SEQ ID NO: 23701 - protein, 9 aa, synthetic construct
PIQGSIHLF

SEQ ID NO: 23702 - protein, 9 aa, synthetic construct
PIQGSIHVH

SEQ ID NO: 23703 - protein, 9 aa, synthetic construct
PIQGSIRLH

SEQ ID NO: 23704 - protein, 9 aa, synthetic construct
PIQGSIRLF

SEQ ID NO: 23705 - protein, 9 aa, synthetic construct
PIQGSIRVK

SEQ ID NO: 23706 - protein, 9 aa, synthetic construct
PIQGSIRVF

SEQ ID NO: 23707 - protein, 9 aa, synthetic construct
PIQGSIKLH

SEQ ID NO: 23708 - protein, 9 aa, synthetic construct
PIQGSIKVY

SEQ ID NO: 23709 - protein, 9 aa, synthetic construct
PIQGSIKVH

SEQ ID NO: 23710 - protein, 9 aa, synthetic construct
PIQGSIKVF

SEQ ID NO: 23711 - protein, 9 aa, synthetic construct
PLQATLRLH

SEQ ID NO: 23712 - protein, 9 aa, synthetic construct
PIQGSGHLY

SEQ ID NO: 23713 - protein, 9 aa, synthetic construct
PIQGSGHLR

SEQ ID NO: 23714 - protein, 9 aa, synthetic construct
PIQGSGHLH

SEQ ID NO: 23715 - protein, 9 aa, synthetic construct
PIQGSGHLK

SEQ ID NO: 23716 - protein, 9 aa, synthetic construct
PIQGSGHLF

SEQ ID NO: 23717 - protein, 9 aa, synthetic construct
PIQGSGHVY

SEQ ID NO: 23718 - protein, 9 aa, synthetic construct
PIQGSGHVH

SEQ ID NO: 23719 - protein, 9 aa, synthetic construct
PIQGSGHVK

SEQ ID NO: 23720 - protein, 9 aa, synthetic construct
PIQGSGHVF

SEQ ID NO: 23721 - protein, 9 aa, synthetic construct
PIQGSGRLY

SEQ ID NO: 23722 - protein, 9 aa, synthetic construct
PIQGSGRLR

SEQ ID NO: 23723 - protein, 9 aa, synthetic construct
PIQGSGRLH

SEQ ID NO: 23724 - protein, 9 aa, synthetic construct
PIQGSGRLK

SEQ ID NO: 23725 - protein, 9 aa, synthetic construct
PIQGSGRVH

SEQ ID NO: 23726 - protein, 9 aa, synthetic construct
PIQGSGRVK

SEQ ID NO: 23727 - protein, 9 aa, synthetic construct
PIQGSGKLH

SEQ ID NO: 23728 - protein, 9 aa, synthetic construct
PIQGSGKVY

SEQ ID NO: 23729 - protein, 9 aa, synthetic construct
PIQGSGKVH

SEQ ID NO: 23730 - protein, 9 aa, synthetic construct
PIQGVVHLY

SEQ ID NO: 23731 - protein, 9 aa, synthetic construct
PIQGVVHLR

SEQ ID NO: 23732 - protein, 9 aa, synthetic construct
PIQGVVHLK

SEQ ID NO: 23733 - protein, 9 aa, synthetic construct
PIQGVVHLF

SEQ ID NO: 23734 - protein, 9 aa, synthetic construct
PIQGVVHVK

SEQ ID NO: 23735 - protein, 9 aa, synthetic construct
PIQGVVRVY

SEQ ID NO: 23736 - protein, 9 aa, synthetic construct
PIQGVVRVF

SEQ ID NO: 23737 - protein, 9 aa, synthetic construct
PLQATLRVH

SEQ ID NO: 23738 - protein, 9 aa, synthetic construct
PIQGVVKLY

SEQ ID NO: 23739 - protein, 9 aa, synthetic construct
PIQGVVKVR

SEQ ID NO: 23740 - protein, 9 aa, synthetic construct
PIQGVVKVH

SEQ ID NO: 23741 - protein, 9 aa, synthetic construct
PIQGVVKVF

SEQ ID NO: 23742 - protein, 9 aa, synthetic construct
PIQGVLHLH

SEQ ID NO: 23743 - protein, 9 aa, synthetic construct
PIQGVLHLF

SEQ ID NO: 23744 - protein, 9 aa, synthetic construct
PIQGVLHVF

SEQ ID NO: 23745 - protein, 9 aa, synthetic construct
PIQGVLRLF

SEQ ID NO: 23746 - protein, 9 aa, synthetic construct
PIQGVLRVY

SEQ ID NO: 23747 - protein, 9 aa, synthetic construct
PIQGVLRVR

SEQ ID NO: 23748 - protein, 9 aa, synthetic construct
PIQGVLRVH

SEQ ID NO: 23749 - protein, 9 aa, synthetic construct
PLQATLKLY

SEQ ID NO: 23750 - protein, 9 aa, synthetic construct
PIQGVLKLR

SEQ ID NO: 23751 - protein, 9 aa, synthetic construct
PIQGVLKLF

SEQ ID NO: 23752 - protein, 9 aa, synthetic construct
PIQGVLKVY

SEQ ID NO: 23753 - protein, 9 aa, synthetic construct
PLQATLKLR

SEQ ID NO: 23754 - protein, 9 aa, synthetic construct
PLQATLKLH

SEQ ID NO: 23755 - protein, 9 aa, synthetic construct
PIQGVARLF

SEQ ID NO: 23756 - protein, 9 aa, synthetic construct
PIQGVARVY

SEQ ID NO: 23757 - protein, 9 aa, synthetic construct
PIQGVAKLH

SEQ ID NO: 23758 - protein, 9 aa, synthetic construct
PIQGVAKVY

SEQ ID NO: 23759 - protein, 9 aa, synthetic construct
PLQATLKLF

SEQ ID NO: 23760 - protein, 9 aa, synthetic construct
PIQGVIHLR

SEQ ID NO: 23761 - protein, 9 aa, synthetic construct
PIQGVIHVR

SEQ ID NO: 23762 - protein, 9 aa, synthetic construct
PIQGVIRLH

SEQ ID NO: 23763 - protein, 9 aa, synthetic construct
PIQGVIRVK

SEQ ID NO: 23764 - protein, 9 aa, synthetic construct
PIQGVIRVF

SEQ ID NO: 23765 - protein, 9 aa, synthetic construct
PIQGVIKLY

SEQ ID NO: 23766 - protein, 9 aa, synthetic construct
PIQGVIKLR

SEQ ID NO: 23767 - protein, 9 aa, synthetic construct
PIQGVIKLK

SEQ ID NO: 23768 - protein, 9 aa, synthetic construct
PIQGVIKLF

SEQ ID NO: 23769 - protein, 9 aa, synthetic construct
PIQGVIKVY

SEQ ID NO: 23770 - protein, 9 aa, synthetic construct
PIQGVIKVR

SEQ ID NO: 23771 - protein, 9 aa, synthetic construct
PLQATLKVH

SEQ ID NO: 23772 - protein, 9 aa, synthetic construct
PIQGVGHLY

SEQ ID NO: 23773 - protein, 9 aa, synthetic construct
PIQGVGHVK

SEQ ID NO: 23774 - protein, 9 aa, synthetic construct
PIQGVGHVF

SEQ ID NO: 23775 - protein, 9 aa, synthetic construct
PIQGVGRLF

SEQ ID NO: 23776 - protein, 9 aa, synthetic construct
PLQATLKVF

SEQ ID NO: 23777 - protein, 9 aa, synthetic construct
PIQGVGKLH

SEQ ID NO: 23778 - protein, 9 aa, synthetic construct
PIQGVGKVH

SEQ ID NO: 23779 - protein, 9 aa, synthetic construct
PIQGGVHLY

SEQ ID NO: 23780 - protein, 9 aa, synthetic construct
PIQGGVHLR

SEQ ID NO: 23781 - protein, 9 aa, synthetic construct
PIQGGVHLH

SEQ ID NO: 23782 - protein, 9 aa, synthetic construct
PIQGGVHLK

SEQ ID NO: 23783 - protein, 9 aa, synthetic construct
PIQGGVHLF

SEQ ID NO: 23784 - protein, 9 aa, synthetic construct
PIQGGVRLF

SEQ ID NO: 23785 - protein, 9 aa, synthetic construct
PIQGGVRVY

SEQ ID NO: 23786 - protein, 9 aa, synthetic construct
PIQGGVRVR

SEQ ID NO: 23787 - protein, 9 aa, synthetic construct
PIQGGVKLR

SEQ ID NO: 23788 - protein, 9 aa, synthetic construct
PIQGGLHLY

SEQ ID NO: 23789 - protein, 9 aa, synthetic construct
PIQGGLHLR

SEQ ID NO: 23790 - protein, 9 aa, synthetic construct
PIQGGLHVY

SEQ ID NO: 23791 - protein, 9 aa, synthetic construct
PIQGGLHVR

SEQ ID NO: 23792 - protein, 9 aa, synthetic construct
PIQGGLHVK

SEQ ID NO: 23793 - protein, 9 aa, synthetic construct
PIQGGLHVF

SEQ ID NO: 23794 - protein, 9 aa, synthetic construct
PIQGGLRLY

SEQ ID NO: 23795 - protein, 9 aa, synthetic construct
PIQGGLRLH

SEQ ID NO: 23796 - protein, 9 aa, synthetic construct
PIQGGLRVY

SEQ ID NO: 23797 - protein, 9 aa, synthetic construct
PIQGGLRVR

SEQ ID NO: 23798 - protein, 9 aa, synthetic construct
PIQGGLRVH

SEQ ID NO: 23799 - protein, 9 aa, synthetic construct
PIQGGLRVK

SEQ ID NO: 23800 - protein, 9 aa, synthetic construct
PIQGGLRVF

SEQ ID NO: 23801 - protein, 9 aa, synthetic construct
PIQGGLKLY

SEQ ID NO: 23802 - protein, 9 aa, synthetic construct
PIQGGLKLH

SEQ ID NO: 23803 - protein, 9 aa, synthetic construct
PIQGGLKLF

SEQ ID NO: 23804 - protein, 9 aa, synthetic construct
PIQGGLKVY

SEQ ID NO: 23805 - protein, 9 aa, synthetic construct
PIQGGLKVH

SEQ ID NO: 23806 - protein, 9 aa, synthetic construct
PIQGGLKVK

SEQ ID NO: 23807 - protein, 9 aa, synthetic construct
PIQGGAHLR

SEQ ID NO: 23808 - protein, 9 aa, synthetic construct
PIQGGARLY

SEQ ID NO: 23809 - protein, 9 aa, synthetic construct
PIQGGARLH

SEQ ID NO: 23810 - protein, 9 aa, synthetic construct
PIQGGARLF

SEQ ID NO: 23811 - protein, 9 aa, synthetic construct
PIQGGARVR

SEQ ID NO: 23812 - protein, 9 aa, synthetic construct
PIQGGARVH

SEQ ID NO: 23813 - protein, 9 aa, synthetic construct
PIQGGARVK

SEQ ID NO: 23814 - protein, 9 aa, synthetic construct
PIQGGARVF

SEQ ID NO: 23815 - protein, 9 aa, synthetic construct
PIQGGAKLY

SEQ ID NO: 23816 - protein, 9 aa, synthetic construct
PIQGGAKLR

SEQ ID NO: 23817 - protein, 9 aa, synthetic construct
PIQGGAKLH

SEQ ID NO: 23818 - protein, 9 aa, synthetic construct
PIQGGAKVY

SEQ ID NO: 23819 - protein, 9 aa, synthetic construct
PLQATARLY

SEQ ID NO: 23820 - protein, 9 aa, synthetic construct
PIQGGIRVR

SEQ ID NO: 23821 - protein, 9 aa, synthetic construct
PIQGGIRVH

SEQ ID NO: 23822 - protein, 9 aa, synthetic construct
PIQGGIRVF

SEQ ID NO: 23823 - protein, 9 aa, synthetic construct
PIQGGIKLK

SEQ ID NO: 23824 - protein, 9 aa, synthetic construct
PIQGGGHLY

SEQ ID NO: 23825 - protein, 9 aa, synthetic construct
PIQGGGHLR

SEQ ID NO: 23826 - protein, 9 aa, synthetic construct
PIQGGGHLF

SEQ ID NO: 23827 - protein, 9 aa, synthetic construct
PIQGGGHVY

SEQ ID NO: 23828 - protein, 9 aa, synthetic construct
PIQGGGHVR

SEQ ID NO: 23829 - protein, 9 aa, synthetic construct
PIQGGGHVH

SEQ ID NO: 23830 - protein, 9 aa, synthetic construct
PIQGGGHVF

SEQ ID NO: 23831 - protein, 9 aa, synthetic construct
PIQGGGRLR

SEQ ID NO: 23832 - protein, 9 aa, synthetic construct
PIQGGGRLH

SEQ ID NO: 23833 - protein, 9 aa, synthetic construct
PIQGGGRLK

SEQ ID NO: 23834 - protein, 9 aa, synthetic construct
PIQGGGRVY

SEQ ID NO: 23835 - protein, 9 aa, synthetic construct
PIQGGGRVR

SEQ ID NO: 23836 - protein, 9 aa, synthetic construct
PIQGGGRVH

SEQ ID NO: 23837 - protein, 9 aa, synthetic construct
PIQGGGRVK

SEQ ID NO: 23838 - protein, 9 aa, synthetic construct
PIQGGGRVF

SEQ ID NO: 23839 - protein, 9 aa, synthetic construct
PLQATARLF

SEQ ID NO: 23840 - protein, 9 aa, synthetic construct
PIQGGGKLY

SEQ ID NO: 23841 - protein, 9 aa, synthetic construct
PIQGGGKLH

SEQ ID NO: 23842 - protein, 9 aa, synthetic construct
PIQGGGKVH

SEQ ID NO: 23843 - protein, 9 aa, synthetic construct
PIQGGGKVK

SEQ ID NO: 23844 - protein, 9 aa, synthetic construct
PLQATARVY

SEQ ID NO: 23845 - protein, 9 aa, synthetic construct
PIQAAVHLY

SEQ ID NO: 23846 - protein, 9 aa, synthetic construct
PIQAAVHLH

SEQ ID NO: 23847 - protein, 9 aa, synthetic construct
PIQAAVHLK

SEQ ID NO: 23848 - protein, 9 aa, synthetic construct
PIQAAVHVY

SEQ ID NO: 23849 - protein, 9 aa, synthetic construct
PIQAAVHVF

SEQ ID NO: 23850 - protein, 9 aa, synthetic construct
PLQATARVR

SEQ ID NO: 23851 - protein, 9 aa, synthetic construct
PIQAAVRLY

SEQ ID NO: 23852 - protein, 9 aa, synthetic construct
PIQAAVRLF

SEQ ID NO: 23853 - protein, 9 aa, synthetic construct
PIQAAVRVY

SEQ ID NO: 23854 - protein, 9 aa, synthetic construct
PLQATARVH

SEQ ID NO: 23855 - protein, 9 aa, synthetic construct
PIQAAVKLH

SEQ ID NO: 23856 - protein, 9 aa, synthetic construct
PIQAAVKVY

SEQ ID NO: 23857 - protein, 9 aa, synthetic construct
PIQAAVKVH

SEQ ID NO: 23858 - protein, 9 aa, synthetic construct
PIQAALHLY

SEQ ID NO: 23859 - protein, 9 aa, synthetic construct
PIQAALHLR

SEQ ID NO: 23860 - protein, 9 aa, synthetic construct
PIQAALHLH

SEQ ID NO: 23861 - protein, 9 aa, synthetic construct
PIQAALHLK

SEQ ID NO: 23862 - protein, 9 aa, synthetic construct
PIQAALHLF

SEQ ID NO: 23863 - protein, 9 aa, synthetic construct
PIQAALHVR

SEQ ID NO: 23864 - protein, 9 aa, synthetic construct
PIQAALHVH

SEQ ID NO: 23865 - protein, 9 aa, synthetic construct
PIQAALHVK

SEQ ID NO: 23866 - protein, 9 aa, synthetic construct
PIQAALRLH

SEQ ID NO: 23867 - protein, 9 aa, synthetic construct
PIQAALRVF

SEQ ID NO: 23868 - protein, 9 aa, synthetic construct
PIQAALKLR

SEQ ID NO: 23869 - protein, 9 aa, synthetic construct
PIQAALKLH

SEQ ID NO: 23870 - protein, 9 aa, synthetic construct
PIQAALKLF

SEQ ID NO: 23871 - protein, 9 aa, synthetic construct
PIQAALKVH

SEQ ID NO: 23872 - protein, 9 aa, synthetic construct
PIQAALKVF

SEQ ID NO: 23873 - protein, 9 aa, synthetic construct
PIQAAAHLR

SEQ ID NO: 23874 - protein, 9 aa, synthetic construct
PIQAAAHVF

SEQ ID NO: 23875 - protein, 9 aa, synthetic construct
PIQAAARLY

SEQ ID NO: 23876 - protein, 9 aa, synthetic construct
PIQAAARLH

SEQ ID NO: 23877 - protein, 9 aa, synthetic construct
PIQAAARLF

SEQ ID NO: 23878 - protein, 9 aa, synthetic construct
PIQAAARVY

SEQ ID NO: 23879 - protein, 9 aa, synthetic construct
PIQAAARVR

SEQ ID NO: 23880 - protein, 9 aa, synthetic construct
PIQAAARVH

SEQ ID NO: 23881 - protein, 9 aa, synthetic construct
PIQAAARVF

SEQ ID NO: 23882 - protein, 9 aa, synthetic construct
PIQAAAKLY

SEQ ID NO: 23883 - protein, 9 aa, synthetic construct
PIQAAAKLF

SEQ ID NO: 23884 - protein, 9 aa, synthetic construct
PIQAAAKVY

SEQ ID NO: 23885 - protein, 9 aa, synthetic construct
PIQAAAKVR

SEQ ID NO: 23886 - protein, 9 aa, synthetic construct
PIQAAAKVH

SEQ ID NO: 23887 - protein, 9 aa, synthetic construct
PIQAAAKVF

SEQ ID NO: 23888 - protein, 9 aa, synthetic construct
PIQAAIHLR

SEQ ID NO: 23889 - protein, 9 aa, synthetic construct
PIQAAIHVY

SEQ ID NO: 23890 - protein, 9 aa, synthetic construct
PIQAAIHVR

SEQ ID NO: 23891 - protein, 9 aa, synthetic construct
PIQAAIHVH

SEQ ID NO: 23892 - protein, 9 aa, synthetic construct
PIQAAIRLH

SEQ ID NO: 23893 - protein, 9 aa, synthetic construct
PIQAAIRLF

SEQ ID NO: 23894 - protein, 9 aa, synthetic construct
PIQAAIRVR

SEQ ID NO: 23895 - protein, 9 aa, synthetic construct
PIQAAIRVK

SEQ ID NO: 23896 - protein, 9 aa, synthetic construct
PIQAAIRVF

SEQ ID NO: 23897 - protein, 9 aa, synthetic construct
PIQAAIKLY

SEQ ID NO: 23898 - protein, 9 aa, synthetic construct
PIQAAIKLK

SEQ ID NO: 23899 - protein, 9 aa, synthetic construct
PIQAAIKLF

SEQ ID NO: 23900 - protein, 9 aa, synthetic construct
PIQAAIKVY

SEQ ID NO: 23901 - protein, 9 aa, synthetic construct
PLQATAKVH

SEQ ID NO: 23902 - protein, 9 aa, synthetic construct
PIQAAGHLY

SEQ ID NO: 23903 - protein, 9 aa, synthetic construct
PIQAAGHLF

SEQ ID NO: 23904 - protein, 9 aa, synthetic construct
PIQAAGHVY

SEQ ID NO: 23905 - protein, 9 aa, synthetic construct
PIQAAGHVR

SEQ ID NO: 23906 - protein, 9 aa, synthetic construct
PIQAAGHVK

SEQ ID NO: 23907 - protein, 9 aa, synthetic construct
PIQAAGHVF

SEQ ID NO: 23908 - protein, 9 aa, synthetic construct
PIQAAGRLY

SEQ ID NO: 23909 - protein, 9 aa, synthetic construct
PIQAAGRLH

SEQ ID NO: 23910 - protein, 9 aa, synthetic construct
PIQAAGRLF

SEQ ID NO: 23911 - protein, 9 aa, synthetic construct
PIQAAGRVK

SEQ ID NO: 23912 - protein, 9 aa, synthetic construct
PIQAAGRVF

SEQ ID NO: 23913 - protein, 9 aa, synthetic construct
PIQAAGKLY

SEQ ID NO: 23914 - protein, 9 aa, synthetic construct
PIQAAGKLH

SEQ ID NO: 23915 - protein, 9 aa, synthetic construct
PIQAAGKVY

SEQ ID NO: 23916 - protein, 9 aa, synthetic construct
PIQAAGKVH

SEQ ID NO: 23917 - protein, 9 aa, synthetic construct
PLQATIHLY

SEQ ID NO: 23918 - protein, 9 aa, synthetic construct
PIQATVHLK

SEQ ID NO: 23919 - protein, 9 aa, synthetic construct
PIQATVHVR

SEQ ID NO: 23920 - protein, 9 aa, synthetic construct
PLQATIHLR

SEQ ID NO: 23921 - protein, 9 aa, synthetic construct
PIQATVRLR

SEQ ID NO: 23922 - protein, 9 aa, synthetic construct
PIQATVRLH

SEQ ID NO: 23923 - protein, 9 aa, synthetic construct
PIQATVRVH

SEQ ID NO: 23924 - protein, 9 aa, synthetic construct
PIQATVKLY

SEQ ID NO: 23925 - protein, 9 aa, synthetic construct
PIQATVKLH

SEQ ID NO: 23926 - protein, 9 aa, synthetic construct
PIQATVKLF

SEQ ID NO: 23927 - protein, 9 aa, synthetic construct
PIQATVKVY

SEQ ID NO: 23928 - protein, 9 aa, synthetic construct
PIQATVKVH

SEQ ID NO: 23929 - protein, 9 aa, synthetic construct
PIQATVKVF

SEQ ID NO: 23930 - protein, 9 aa, synthetic construct
PIQATLHLR

SEQ ID NO: 23931 - protein, 9 aa, synthetic construct
PIQATLHLF

SEQ ID NO: 23932 - protein, 9 aa, synthetic construct
PIQATLHVR

SEQ ID NO: 23933 - protein, 9 aa, synthetic construct
PIQATLHVH

SEQ ID NO: 23934 - protein, 9 aa, synthetic construct
PIQATLHVK

SEQ ID NO: 23935 - protein, 9 aa, synthetic construct
PIQATLRVH

SEQ ID NO: 23936 - protein, 9 aa, synthetic construct
PLQATIHVY

SEQ ID NO: 23937 - protein, 9 aa, synthetic construct
PIQATLKVH

SEQ ID NO: 23938 - protein, 9 aa, synthetic construct
PIQATLKVF

SEQ ID NO: 23939 - protein, 9 aa, synthetic construct
PIQATAHLR

SEQ ID NO: 23940 - protein, 9 aa, synthetic construct
PIQATAHLF

SEQ ID NO: 23941 - protein, 9 aa, synthetic construct
PIQATAHVF

SEQ ID NO: 23942 - protein, 9 aa, synthetic construct
PIQATARLY

SEQ ID NO: 23943 - protein, 9 aa, synthetic construct
PIQATARLF

SEQ ID NO: 23944 - protein, 9 aa, synthetic construct
PIQATARVY

SEQ ID NO: 23945 - protein, 9 aa, synthetic construct
PIQATARVH

SEQ ID NO: 23946 - protein, 9 aa, synthetic construct
PIQATAKLH

SEQ ID NO: 23947 - protein, 9 aa, synthetic construct
PIQATAKLF

SEQ ID NO: 23948 - protein, 9 aa, synthetic construct
PIQATAKVH

SEQ ID NO: 23949 - protein, 9 aa, synthetic construct
PIQATAKVF

SEQ ID NO: 23950 - protein, 9 aa, synthetic construct
PIQATIHLY

SEQ ID NO: 23951 - protein, 9 aa, synthetic construct
PIQATIHLR

SEQ ID NO: 23952 - protein, 9 aa, synthetic construct
PIQATIHVY

SEQ ID NO: 23953 - protein, 9 aa, synthetic construct
PIQATIRLF

SEQ ID NO: 23954 - protein, 9 aa, synthetic construct
PIQATIRVY

SEQ ID NO: 23955 - protein, 9 aa, synthetic construct
PIQATIRVH

SEQ ID NO: 23956 - protein, 9 aa, synthetic construct
PIQATIRVF

SEQ ID NO: 23957 - protein, 9 aa, synthetic construct
PLQATIRLR

SEQ ID NO: 23958 - protein, 9 aa, synthetic construct
PIQATIKLY

SEQ ID NO: 23959 - protein, 9 aa, synthetic construct
PIQATIKLK

SEQ ID NO: 23960 - protein, 9 aa, synthetic construct
PLQATIRLH

SEQ ID NO: 23961 - protein, 9 aa, synthetic construct
PIQATGHLR

SEQ ID NO: 23962 - protein, 9 aa, synthetic construct
PLQATIRLK

SEQ ID NO: 23963 - protein, 9 aa, synthetic construct
PIQATGRLK

SEQ ID NO: 23964 - protein, 9 aa, synthetic construct
PIQATGRVY

SEQ ID NO: 23965 - protein, 9 aa, synthetic construct
PIQATGKLF

SEQ ID NO: 23966 - protein, 9 aa, synthetic construct
PIQATGKVH

SEQ ID NO: 23967 - protein, 9 aa, synthetic construct
PLQATIRVY

SEQ ID NO: 23968 - protein, 9 aa, synthetic construct
PIQASVRLY

SEQ ID NO: 23969 - protein, 9 aa, synthetic construct
PIQASVRLR

SEQ ID NO: 23970 - protein, 9 aa, synthetic construct
PIQASVRVH

SEQ ID NO: 23971 - protein, 9 aa, synthetic construct
PIQASVRVF

SEQ ID NO: 23972 - protein, 9 aa, synthetic construct
PIQASVKLY

SEQ ID NO: 23973 - protein, 9 aa, synthetic construct
PIQASVKVY

SEQ ID NO: 23974 - protein, 9 aa, synthetic construct
PIQASLHLR

SEQ ID NO: 23975 - protein, 9 aa, synthetic construct
PIQASLHVR

SEQ ID NO: 23976 - protein, 9 aa, synthetic construct
PLQATIRVF

SEQ ID NO: 23977 - protein, 9 aa, synthetic construct
PLQATIKLY

SEQ ID NO: 23978 - protein, 9 aa, synthetic construct
PIQASLKVH

SEQ ID NO: 23979 - protein, 9 aa, synthetic construct
PLQATIKLR

SEQ ID NO: 23980 - protein, 9 aa, synthetic construct
PIQASAHLF

SEQ ID NO: 23981 - protein, 9 aa, synthetic construct
PIQASAHVR

SEQ ID NO: 23982 - protein, 9 aa, synthetic construct
PIQASARLF

SEQ ID NO: 23983 - protein, 9 aa, synthetic construct
PIQASARVF

SEQ ID NO: 23984 - protein, 9 aa, synthetic construct
PIQASAKLF

SEQ ID NO: 23985 - protein, 9 aa, synthetic construct
PIQASAKVY

SEQ ID NO: 23986 - protein, 9 aa, synthetic construct
PIQASAKVH

SEQ ID NO: 23987 - protein, 9 aa, synthetic construct
PIQASAKVF

SEQ ID NO: 23988 - protein, 9 aa, synthetic construct
PLQATIKLF

SEQ ID NO: 23989 - protein, 9 aa, synthetic construct
PIQASIHVR

SEQ ID NO: 23990 - protein, 9 aa, synthetic construct
PIQASIRVR

SEQ ID NO: 23991 - protein, 9 aa, synthetic construct
PIQASIRVH

SEQ ID NO: 23992 - protein, 9 aa, synthetic construct
PIQASIRVF

SEQ ID NO: 23993 - protein, 9 aa, synthetic construct
PLQATIKVH

SEQ ID NO: 23994 - protein, 9 aa, synthetic construct
PIQASGHLK

SEQ ID NO: 23995 - protein, 9 aa, synthetic construct
PIQASGHVY

SEQ ID NO: 23996 - protein, 9 aa, synthetic construct
PIQASGHVR

SEQ ID NO: 23997 - protein, 9 aa, synthetic construct
PIQASGHVF

SEQ ID NO: 23998 - protein, 9 aa, synthetic construct
PIQASGRLY

SEQ ID NO: 23999 - protein, 9 aa, synthetic construct
PIQASGRLH

SEQ ID NO: 24000 - protein, 9 aa, synthetic construct
PIQASGRLF

SEQ ID NO: 24001 - protein, 9 aa, synthetic construct
PIQASGRVY

SEQ ID NO: 24002 - protein, 9 aa, synthetic construct
PIQASGRVR

SEQ ID NO: 24003 - protein, 9 aa, synthetic construct
PLQATIKVF

SEQ ID NO: 24004 - protein, 9 aa, synthetic construct
PIQASGKLR

SEQ ID NO: 24005 - protein, 9 aa, synthetic construct
PIQASGKVY

SEQ ID NO: 24006 - protein, 9 aa, synthetic construct
PIQASGKVH

SEQ ID NO: 24007 - protein, 9 aa, synthetic construct
PIQASGKVF

SEQ ID NO: 24008 - protein, 9 aa, synthetic construct
PLNGTIRLH

SEQ ID NO: 24009 - protein, 9 aa, synthetic construct
PIQAVVHVR

SEQ ID NO: 24010 - protein, 9 aa, synthetic construct
PLQATGHLR

SEQ ID NO: 24011 - protein, 9 aa, synthetic construct
PIQAVVRVF

SEQ ID NO: 24012 - protein, 9 aa, synthetic construct
PIQAVVKLR

SEQ ID NO: 24013 - protein, 9 aa, synthetic construct
PIQAVVKLH

SEQ ID NO: 24014 - protein, 9 aa, synthetic construct
PIQAVVKVY

SEQ ID NO: 24015 - protein, 9 aa, synthetic construct
PIQAVVKVH

SEQ ID NO: 24016 - protein, 9 aa, synthetic construct
PIQAVVKVK

SEQ ID NO: 24017 - protein, 9 aa, synthetic construct
PIQAVVKVF

SEQ ID NO: 24018 - protein, 9 aa, synthetic construct
PIQAVLHVF

SEQ ID NO: 24019 - protein, 9 aa, synthetic construct
PIQAVLRLH

SEQ ID NO: 24020 - protein, 9 aa, synthetic construct
PIQAVLRLF

SEQ ID NO: 24021 - protein, 9 aa, synthetic construct
PIQAVLRVH

SEQ ID NO: 24022 - protein, 9 aa, synthetic construct
PLQATGHVY

SEQ ID NO: 24023 - protein, 9 aa, synthetic construct
PIQAVLKVY

SEQ ID NO: 24024 - protein, 9 aa, synthetic construct
PLQATGHVR

SEQ ID NO: 24025 - protein, 9 aa, synthetic construct
PIQAVAHLY

SEQ ID NO: 24026 - protein, 9 aa, synthetic construct
PIQAVAHLR

SEQ ID NO: 24027 - protein, 9 aa, synthetic construct
PIQAVAHLH

SEQ ID NO: 24028 - protein, 9 aa, synthetic construct
PIQAVAHLK

SEQ ID NO: 24029 - protein, 9 aa, synthetic construct
PIQAVAHVY

SEQ ID NO: 24030 - protein, 9 aa, synthetic construct
PIQAVAHVR

SEQ ID NO: 24031 - protein, 9 aa, synthetic construct
PIQAVAHVH

SEQ ID NO: 24032 - protein, 9 aa, synthetic construct
PIQAVAHVK

SEQ ID NO: 24033 - protein, 9 aa, synthetic construct
PIQAVAHVF

SEQ ID NO: 24034 - protein, 9 aa, synthetic construct
PLQATGHVK

SEQ ID NO: 24035 - protein, 9 aa, synthetic construct
PIQAVAKLY

SEQ ID NO: 24036 - protein, 9 aa, synthetic construct
PIQAVAKLH

SEQ ID NO: 24037 - protein, 9 aa, synthetic construct
PIQAVAKVY

SEQ ID NO: 24038 - protein, 9 aa, synthetic construct
PIQAVAKVH

SEQ ID NO: 24039 - protein, 9 aa, synthetic construct
PIQAVIHLY

SEQ ID NO: 24040 - protein, 9 aa, synthetic construct
PIQAVIHLR

SEQ ID NO: 24041 - protein, 9 aa, synthetic construct
PIQAVIHLF

SEQ ID NO: 24042 - protein, 9 aa, synthetic construct
PIQAVIHVK

SEQ ID NO: 24043 - protein, 9 aa, synthetic construct
PIQAVIRLR

SEQ ID NO: 24044 - protein, 9 aa, synthetic construct
PIQAVIRLF

SEQ ID NO: 24045 - protein, 9 aa, synthetic construct
PLQATGRLH

SEQ ID NO: 24046 - protein, 9 aa, synthetic construct
PIQAVGHLY

SEQ ID NO: 24047 - protein, 9 aa, synthetic construct
PIQAVGHLR

SEQ ID NO: 24048 - protein, 9 aa, synthetic construct
PIQAVGHLH

SEQ ID NO: 24049 - protein, 9 aa, synthetic construct
PIQAVGHLF

SEQ ID NO: 24050 - protein, 9 aa, synthetic construct
PIQAVGHVY

SEQ ID NO: 24051 - protein, 9 aa, synthetic construct
PIQAVGHVR

SEQ ID NO: 24052 - protein, 9 aa, synthetic construct
PIQAVGHVH

SEQ ID NO: 24053 - protein, 9 aa, synthetic construct
PIQAVGHVK

SEQ ID NO: 24054 - protein, 9 aa, synthetic construct
PLQATGRLK

SEQ ID NO: 24055 - protein, 9 aa, synthetic construct
PIQAVGRLH

SEQ ID NO: 24056 - protein, 9 aa, synthetic construct
PIQAVGRLF

SEQ ID NO: 24057 - protein, 9 aa, synthetic construct
PIQAVGKLH

SEQ ID NO: 24058 - protein, 9 aa, synthetic construct
PIQAVGKLK

SEQ ID NO: 24059 - protein, 9 aa, synthetic construct
PIQAVGKLF

SEQ ID NO: 24060 - protein, 9 aa, synthetic construct
PIQAVGKVY

SEQ ID NO: 24061 - protein, 9 aa, synthetic construct
PLQATGRVY

SEQ ID NO: 24062 - protein, 9 aa, synthetic construct
PIQAGVHLY

SEQ ID NO: 24063 - protein, 9 aa, synthetic construct
PIQAGVHLR

SEQ ID NO: 24064 - protein, 9 aa, synthetic construct
PIQAGVHLH

SEQ ID NO: 24065 - protein, 9 aa, synthetic construct
PIQAGVHLF

SEQ ID NO: 24066 - protein, 9 aa, synthetic construct
PIQAGVHVY

SEQ ID NO: 24067 - protein, 9 aa, synthetic construct
PIQAGVHVR

SEQ ID NO: 24068 - protein, 9 aa, synthetic construct
PIQAGVHVK

SEQ ID NO: 24069 - protein, 9 aa, synthetic construct
PIQAGVRLY

SEQ ID NO: 24070 - protein, 9 aa, synthetic construct
PIQAGVRLH

SEQ ID NO: 24071 - protein, 9 aa, synthetic construct
PIQAGVRLF

SEQ ID NO: 24072 - protein, 9 aa, synthetic construct
PIQAGVRVY

SEQ ID NO: 24073 - protein, 9 aa, synthetic construct
PIQAGVRVR

SEQ ID NO: 24074 - protein, 9 aa, synthetic construct
PIQAGVRVK

SEQ ID NO: 24075 - protein, 9 aa, synthetic construct
PIQAGVRVF

SEQ ID NO: 24076 - protein, 9 aa, synthetic construct
PIQAGVKLF

SEQ ID NO: 24077 - protein, 9 aa, synthetic construct
PIQAGVKVY

SEQ ID NO: 24078 - protein, 9 aa, synthetic construct
PIQAGVKVR

SEQ ID NO: 24079 - protein, 9 aa, synthetic construct
PIQAGVKVK

SEQ ID NO: 24080 - protein, 9 aa, synthetic construct
PLQATGRVF

SEQ ID NO: 24081 - protein, 9 aa, synthetic construct
PIQAGLRLH

SEQ ID NO: 24082 - protein, 9 aa, synthetic construct
PLNGTIRLF

SEQ ID NO: 24083 - protein, 9 aa, synthetic construct
PLQATGKLY

SEQ ID NO: 24084 - protein, 9 aa, synthetic construct
PIQAGLKLF

SEQ ID NO: 24085 - protein, 9 aa, synthetic construct
PIQAGLKVK

SEQ ID NO: 24086 - protein, 9 aa, synthetic construct
PIQAGAHLY

SEQ ID NO: 24087 - protein, 9 aa, synthetic construct
PIQAGAHLR

SEQ ID NO: 24088 - protein, 9 aa, synthetic construct
PIQAGAHLH

SEQ ID NO: 24089 - protein, 9 aa, synthetic construct
PIQAGAHLF

SEQ ID NO: 24090 - protein, 9 aa, synthetic construct
PIQAGAHVY

SEQ ID NO: 24091 - protein, 9 aa, synthetic construct
PIQAGAHVF

SEQ ID NO: 24092 - protein, 9 aa, synthetic construct
PIQAGARVY

SEQ ID NO: 24093 - protein, 9 aa, synthetic construct
PIQAGAKLY

SEQ ID NO: 24094 - protein, 9 aa, synthetic construct
PIQAGAKVY

SEQ ID NO: 24095 - protein, 9 aa, synthetic construct
PIQAGAKVH

SEQ ID NO: 24096 - protein, 9 aa, synthetic construct
PIQAGIHLR

SEQ ID NO: 24097 - protein, 9 aa, synthetic construct
PIQAGIHLH

SEQ ID NO: 24098 - protein, 9 aa, synthetic construct
PIQAGIHLF

SEQ ID NO: 24099 - protein, 9 aa, synthetic construct
PIQAGIRLY

SEQ ID NO: 24100 - protein, 9 aa, synthetic construct
PIQAGIRLH

SEQ ID NO: 24101 - protein, 9 aa, synthetic construct
PIQAGIRVY

SEQ ID NO: 24102 - protein, 9 aa, synthetic construct
PIQAGIRVR

SEQ ID NO: 24103 - protein, 9 aa, synthetic construct
PIQAGIRVF

SEQ ID NO: 24104 - protein, 9 aa, synthetic construct
PIQAGIKLH

SEQ ID NO: 24105 - protein, 9 aa, synthetic construct
PIQAGIKLF

SEQ ID NO: 24106 - protein, 9 aa, synthetic construct
PIQAGIKVF

SEQ ID NO: 24107 - protein, 9 aa, synthetic construct
PIQAGGHLR

SEQ ID NO: 24108 - protein, 9 aa, synthetic construct
PIQAGGHLH

SEQ ID NO: 24109 - protein, 9 aa, synthetic construct
PIQAGGHLF

SEQ ID NO: 24110 - protein, 9 aa, synthetic construct
PIQAGGHVY

SEQ ID NO: 24111 - protein, 9 aa, synthetic construct
PIQAGGHVR

SEQ ID NO: 24112 - protein, 9 aa, synthetic construct
PIQAGGHVH

SEQ ID NO: 24113 - protein, 9 aa, synthetic construct
PIQAGGHVK

SEQ ID NO: 24114 - protein, 9 aa, synthetic construct
PIQAGGRLR

SEQ ID NO: 24115 - protein, 9 aa, synthetic construct
PIQAGGRLH

SEQ ID NO: 24116 - protein, 9 aa, synthetic construct
PIQAGGRVR

SEQ ID NO: 24117 - protein, 9 aa, synthetic construct
PIQAGGRVH

SEQ ID NO: 24118 - protein, 9 aa, synthetic construct
PLQATGKVF

SEQ ID NO: 24119 - protein, 9 aa, synthetic construct
PIQAGGKLK

SEQ ID NO: 24120 - protein, 9 aa, synthetic construct
PIQAGGKLF

SEQ ID NO: 24121 - protein, 9 aa, synthetic construct
PIQAGGKVH

SEQ ID NO: 24122 - protein, 9 aa, synthetic construct
PLQASVHLY

SEQ ID NO: 24123 - protein, 9 aa, synthetic construct
PIPGAVHLY

SEQ ID NO: 24124 - protein, 9 aa, synthetic construct
PIPGAVHLR

SEQ ID NO: 24125 - protein, 9 aa, synthetic construct
PIPGAVHLK

SEQ ID NO: 24126 - protein, 9 aa, synthetic construct
PIPGAVHLF

SEQ ID NO: 24127 - protein, 9 aa, synthetic construct
PIPGAVHVY

SEQ ID NO: 24128 - protein, 9 aa, synthetic construct
PIPGAVHVR

SEQ ID NO: 24129 - protein, 9 aa, synthetic construct
PIPGAVHVH

SEQ ID NO: 24130 - protein, 9 aa, synthetic construct
PIPGAVHVF

SEQ ID NO: 24131 - protein, 9 aa, synthetic construct
PIPGAVRLY

SEQ ID NO: 24132 - protein, 9 aa, synthetic construct
PIPGAVRLK

SEQ ID NO: 24133 - protein, 9 aa, synthetic construct
PIPGAVRLF

SEQ ID NO: 24134 - protein, 9 aa, synthetic construct
PIPGAVRVY

SEQ ID NO: 24135 - protein, 9 aa, synthetic construct
PIPGAVRVK

SEQ ID NO: 24136 - protein, 9 aa, synthetic construct
PIPGAVRVF

SEQ ID NO: 24137 - protein, 9 aa, synthetic construct
PLQASVHLH

SEQ ID NO: 24138 - protein, 9 aa, synthetic construct
PIPGAVKLY

SEQ ID NO: 24139 - protein, 9 aa, synthetic construct
PIPGAVKLH

SEQ ID NO: 24140 - protein, 9 aa, synthetic construct
PIPGAVKLF

SEQ ID NO: 24141 - protein, 9 aa, synthetic construct
PIPGALHLH

SEQ ID NO: 24142 - protein, 9 aa, synthetic construct
PIPGALHVY

SEQ ID NO: 24143 - protein, 9 aa, synthetic construct
PIPGALHVR

SEQ ID NO: 24144 - protein, 9 aa, synthetic construct
PIPGALHVH

SEQ ID NO: 24145 - protein, 9 aa, synthetic construct
PIPGALHVK

SEQ ID NO: 24146 - protein, 9 aa, synthetic construct
PIPGALHVF

SEQ ID NO: 24147 - protein, 9 aa, synthetic construct
PLQASVHLF

SEQ ID NO: 24148 - protein, 9 aa, synthetic construct
PIPGALRLY

SEQ ID NO: 24149 - protein, 9 aa, synthetic construct
PIPGALRVK

SEQ ID NO: 24150 - protein, 9 aa, synthetic construct
PIPGALKLR

SEQ ID NO: 24151 - protein, 9 aa, synthetic construct
PIPGALKLH

SEQ ID NO: 24152 - protein, 9 aa, synthetic construct
PIPGALKLF

SEQ ID NO: 24153 - protein, 9 aa, synthetic construct
PLQASVHVR

SEQ ID NO: 24154 - protein, 9 aa, synthetic construct
PIPGAAHLR

SEQ ID NO: 24155 - protein, 9 aa, synthetic construct
PIPGAAHLK

SEQ ID NO: 24156 - protein, 9 aa, synthetic construct
PIPGAAHLF

SEQ ID NO: 24157 - protein, 9 aa, synthetic construct
PIPGAAHVR

SEQ ID NO: 24158 - protein, 9 aa, synthetic construct
PIPGAARLY

SEQ ID NO: 24159 - protein, 9 aa, synthetic construct
PIPGAARLH

SEQ ID NO: 24160 - protein, 9 aa, synthetic construct
PIPGAARLF

SEQ ID NO: 24161 - protein, 9 aa, synthetic construct
PIPGAARVR

SEQ ID NO: 24162 - protein, 9 aa, synthetic construct
PIPGAARVF

SEQ ID NO: 24163 - protein, 9 aa, synthetic construct
PIPGAAKLR

SEQ ID NO: 24164 - protein, 9 aa, synthetic construct
PIPGAAKLF

SEQ ID NO: 24165 - protein, 9 aa, synthetic construct
PIPGAAKVR

SEQ ID NO: 24166 - protein, 9 aa, synthetic construct
PIPGAIHLR

SEQ ID NO: 24167 - protein, 9 aa, synthetic construct
PLNGTIRVR

SEQ ID NO: 24168 - protein, 9 aa, synthetic construct
PLQASVRLY

SEQ ID NO: 24169 - protein, 9 aa, synthetic construct
PIPGAIRLY

SEQ ID NO: 24170 - protein, 9 aa, synthetic construct
PIPGAIRLH

SEQ ID NO: 24171 - protein, 9 aa, synthetic construct
PIPGAIRLK

SEQ ID NO: 24172 - protein, 9 aa, synthetic construct
PIPGAIRLF

SEQ ID NO: 24173 - protein, 9 aa, synthetic construct
PIPGAIRVY

SEQ ID NO: 24174 - protein, 9 aa, synthetic construct
PIPGAIRVR

SEQ ID NO: 24175 - protein, 9 aa, synthetic construct
PIPGAIRVH

SEQ ID NO: 24176 - protein, 9 aa, synthetic construct
PIPGAIRVF

SEQ ID NO: 24177 - protein, 9 aa, synthetic construct
PIPGAIKLY

SEQ ID NO: 24178 - protein, 9 aa, synthetic construct
PIPGAIKLF

SEQ ID NO: 24179 - protein, 9 aa, synthetic construct
PIPGAIKVH

SEQ ID NO: 24180 - protein, 9 aa, synthetic construct
PIPGAIKVF

SEQ ID NO: 24181 - protein, 9 aa, synthetic construct
PIPGAGHLY

SEQ ID NO: 24182 - protein, 9 aa, synthetic construct
PIPGAGHLR

SEQ ID NO: 24183 - protein, 9 aa, synthetic construct
PIPGAGHLK

SEQ ID NO: 24184 - protein, 9 aa, synthetic construct
PIPGAGHLF

SEQ ID NO: 24185 - protein, 9 aa, synthetic construct
PIPGAGHVY

SEQ ID NO: 24186 - protein, 9 aa, synthetic construct
PIPGAGRLY

SEQ ID NO: 24187 - protein, 9 aa, synthetic construct
PIPGAGRVY

SEQ ID NO: 24188 - protein, 9 aa, synthetic construct
PIPGAGRVR

SEQ ID NO: 24189 - protein, 9 aa, synthetic construct
PIPGAGRVH

SEQ ID NO: 24190 - protein, 9 aa, synthetic construct
PIPGAGRVK

SEQ ID NO: 24191 - protein, 9 aa, synthetic construct
PIPGAGRVF

SEQ ID NO: 24192 - protein, 9 aa, synthetic construct
PLQASVRLF

SEQ ID NO: 24193 - protein, 9 aa, synthetic construct
PIPGTVHLH

SEQ ID NO: 24194 - protein, 9 aa, synthetic construct
PIPGTVHLK

SEQ ID NO: 24195 - protein, 9 aa, synthetic construct
PIPGTVHLF

SEQ ID NO: 24196 - protein, 9 aa, synthetic construct
PIPGTVHVR

SEQ ID NO: 24197 - protein, 9 aa, synthetic construct
PIPGTVHVH

SEQ ID NO: 24198 - protein, 9 aa, synthetic construct
PIPGTVHVF

SEQ ID NO: 24199 - protein, 9 aa, synthetic construct
PLQASVRVR

SEQ ID NO: 24200 - protein, 9 aa, synthetic construct
PIPGTVRVY

SEQ ID NO: 24201 - protein, 9 aa, synthetic construct
PIPGTVRVF

SEQ ID NO: 24202 - protein, 9 aa, synthetic construct
PIPGTVKLY

SEQ ID NO: 24203 - protein, 9 aa, synthetic construct
PIPGTVKLH

SEQ ID NO: 24204 - protein, 9 aa, synthetic construct
PIPGTVKLF

SEQ ID NO: 24205 - protein, 9 aa, synthetic construct
PIPGTVKVR

SEQ ID NO: 24206 - protein, 9 aa, synthetic construct
PIPGTVKVH

SEQ ID NO: 24207 - protein, 9 aa, synthetic construct
PIPGTLHLY

SEQ ID NO: 24208 - protein, 9 aa, synthetic construct
PIPGTLHLR

SEQ ID NO: 24209 - protein, 9 aa, synthetic construct
PIPGTLHLH

SEQ ID NO: 24210 - protein, 9 aa, synthetic construct
PIPGTLHLK

SEQ ID NO: 24211 - protein, 9 aa, synthetic construct
PIPGTLHVR

SEQ ID NO: 24212 - protein, 9 aa, synthetic construct
PIPGTLHVK

SEQ ID NO: 24213 - protein, 9 aa, synthetic construct
PLQASVRVF

SEQ ID NO: 24214 - protein, 9 aa, synthetic construct
PIPGTLRLY

SEQ ID NO: 24215 - protein, 9 aa, synthetic construct
PIPGTLRLH

SEQ ID NO: 24216 - protein, 9 aa, synthetic construct
PIPGTLRLF

SEQ ID NO: 24217 - protein, 9 aa, synthetic construct
PIPGTLRVY

SEQ ID NO: 24218 - protein, 9 aa, synthetic construct
PIPGTLRVK

SEQ ID NO: 24219 - protein, 9 aa, synthetic construct
PLQASVKLY

SEQ ID NO: 24220 - protein, 9 aa, synthetic construct
PIPGTLKLR

SEQ ID NO: 24221 - protein, 9 aa, synthetic construct
PIPGTLKLF

SEQ ID NO: 24222 - protein, 9 aa, synthetic construct
PIPGTLKVY

SEQ ID NO: 24223 - protein, 9 aa, synthetic construct
PIPGTLKVR

SEQ ID NO: 24224 - protein, 9 aa, synthetic construct
PIPGTAHVF

SEQ ID NO: 24225 - protein, 9 aa, synthetic construct
PIPGTARLH

SEQ ID NO: 24226 - protein, 9 aa, synthetic construct
PIPGTARLF

SEQ ID NO: 24227 - protein, 9 aa, synthetic construct
PIPGTARVY

SEQ ID NO: 24228 - protein, 9 aa, synthetic construct
PIPGTAKLR

SEQ ID NO: 24229 - protein, 9 aa, synthetic construct
PIPGTIHLY

SEQ ID NO: 24230 - protein, 9 aa, synthetic construct
PIPGTIHLR

SEQ ID NO: 24231 - protein, 9 aa, synthetic construct
PLQASVKVY

SEQ ID NO: 24232 - protein, 9 aa, synthetic construct
PIPGTIRLY

SEQ ID NO: 24233 - protein, 9 aa, synthetic construct
PIPGTIRLH

SEQ ID NO: 24234 - protein, 9 aa, synthetic construct
PIPGTIRLF

SEQ ID NO: 24235 - protein, 9 aa, synthetic construct
PIPGTIKLR

SEQ ID NO: 24236 - protein, 9 aa, synthetic construct
PIPGTIKLH

SEQ ID NO: 24237 - protein, 9 aa, synthetic construct
PIPGTIKLF

SEQ ID NO: 24238 - protein, 9 aa, synthetic construct
PIPGTIKVF

SEQ ID NO: 24239 - protein, 9 aa, synthetic construct
PIPGTGHLR

SEQ ID NO: 24240 - protein, 9 aa, synthetic construct
PIPGTGHLF

SEQ ID NO: 24241 - protein, 9 aa, synthetic construct
PLQASVKVK

SEQ ID NO: 24242 - protein, 9 aa, synthetic construct
PIPGTGRLR

SEQ ID NO: 24243 - protein, 9 aa, synthetic construct
PIPGTGRLH

SEQ ID NO: 24244 - protein, 9 aa, synthetic construct
PIPGTGRLK

SEQ ID NO: 24245 - protein, 9 aa, synthetic construct
PIPGTGRVY

SEQ ID NO: 24246 - protein, 9 aa, synthetic construct
PIPGTGRVK

SEQ ID NO: 24247 - protein, 9 aa, synthetic construct
PIPGTGKLF

SEQ ID NO: 24248 - protein, 9 aa, synthetic construct
PIPGTGKVR

SEQ ID NO: 24249 - protein, 9 aa, synthetic construct
PLNGTIRVK

SEQ ID NO: 24250 - protein, 9 aa, synthetic construct
PIPGSVHLY

SEQ ID NO: 24251 - protein, 9 aa, synthetic construct
PIPGSVHLR

SEQ ID NO: 24252 - protein, 9 aa, synthetic construct
PIPGSVHLH

SEQ ID NO: 24253 - protein, 9 aa, synthetic construct
PIPGSVHVY

SEQ ID NO: 24254 - protein, 9 aa, synthetic construct
PLQASLHLR

SEQ ID NO: 24255 - protein, 9 aa, synthetic construct
PIPGSVRLY

SEQ ID NO: 24256 - protein, 9 aa, synthetic construct
PIPGSLHLY

SEQ ID NO: 24257 - protein, 9 aa, synthetic construct
PIPGSLHLR

SEQ ID NO: 24258 - protein, 9 aa, synthetic construct
PIPGSLHLK

SEQ ID NO: 24259 - protein, 9 aa, synthetic construct
PIPGSLHLF

SEQ ID NO: 24260 - protein, 9 aa, synthetic construct
PIPGSLHVR

SEQ ID NO: 24261 - protein, 9 aa, synthetic construct
PIPGSLHVF

SEQ ID NO: 24262 - protein, 9 aa, synthetic construct
PIPGSLRVY

SEQ ID NO: 24263 - protein, 9 aa, synthetic construct
PIPGSLRVH

SEQ ID NO: 24264 - protein, 9 aa, synthetic construct
PIPGSLRVF

SEQ ID NO: 24265 - protein, 9 aa, synthetic construct
PIPGSLKLY

SEQ ID NO: 24266 - protein, 9 aa, synthetic construct
PIPGSLKLH

SEQ ID NO: 24267 - protein, 9 aa, synthetic construct
PLQASLHVR

SEQ ID NO: 24268 - protein, 9 aa, synthetic construct
PIPGSAHLR

SEQ ID NO: 24269 - protein, 9 aa, synthetic construct
PIPGSAHLF

SEQ ID NO: 24270 - protein, 9 aa, synthetic construct
PIPGSARVH

SEQ ID NO: 24271 - protein, 9 aa, synthetic construct
PIPGSARVF

SEQ ID NO: 24272 - protein, 9 aa, synthetic construct
PIPGSAKLF

SEQ ID NO: 24273 - protein, 9 aa, synthetic construct
PIPGSAKVR

SEQ ID NO: 24274 - protein, 9 aa, synthetic construct
PIPGSAKVH

SEQ ID NO: 24275 - protein, 9 aa, synthetic construct
PIPGSIHLY

SEQ ID NO: 24276 - protein, 9 aa, synthetic construct
PIPGSIHLK

SEQ ID NO: 24277 - protein, 9 aa, synthetic construct
PIPGSIHVR

SEQ ID NO: 24278 - protein, 9 aa, synthetic construct
PIPGSIHVF

SEQ ID NO: 24279 - protein, 9 aa, synthetic construct
PLNGTIRVF

SEQ ID NO: 24280 - protein, 9 aa, synthetic construct
PIPGSIRLY

SEQ ID NO: 24281 - protein, 9 aa, synthetic construct
PIPGSIRLR

SEQ ID NO: 24282 - protein, 9 aa, synthetic construct
PIPGSIRVR

SEQ ID NO: 24283 - protein, 9 aa, synthetic construct
PIPGSIRVH

SEQ ID NO: 24284 - protein, 9 aa, synthetic construct
PIPGSIRVF

SEQ ID NO: 24285 - protein, 9 aa, synthetic construct
PIPGSIKVY

SEQ ID NO: 24286 - protein, 9 aa, synthetic construct
PIPGSGHLF

SEQ ID NO: 24287 - protein, 9 aa, synthetic construct
PIPGSGHVY

SEQ ID NO: 24288 - protein, 9 aa, synthetic construct
PIPGSGHVR

SEQ ID NO: 24289 - protein, 9 aa, synthetic construct
PIPGSGHVK

SEQ ID NO: 24290 - protein, 9 aa, synthetic construct
PIPGSGRLF

SEQ ID NO: 24291 - protein, 9 aa, synthetic construct
PIPGSGKLH

SEQ ID NO: 24292 - protein, 9 aa, synthetic construct
PIPGSGKVY

SEQ ID NO: 24293 - protein, 9 aa, synthetic construct
PIPGVVHLY

SEQ ID NO: 24294 - protein, 9 aa, synthetic construct
PIPGVVHLR

SEQ ID NO: 24295 - protein, 9 aa, synthetic construct
PIPGVVHLK

SEQ ID NO: 24296 - protein, 9 aa, synthetic construct
PIPGVVHLF

SEQ ID NO: 24297 - protein, 9 aa, synthetic construct
PIPGVVHVF

SEQ ID NO: 24298 - protein, 9 aa, synthetic construct
PIPGVVRVF

SEQ ID NO: 24299 - protein, 9 aa, synthetic construct
PIPGVVKLH

SEQ ID NO: 24300 - protein, 9 aa, synthetic construct
PIPGVVKVK

SEQ ID NO: 24301 - protein, 9 aa, synthetic construct
PIPGVVKVF

SEQ ID NO: 24302 - protein, 9 aa, synthetic construct
PIPGVLHLR

SEQ ID NO: 24303 - protein, 9 aa, synthetic construct
PIPGVLHLH

SEQ ID NO: 24304 - protein, 9 aa, synthetic construct
PIPGVLRLK

SEQ ID NO: 24305 - protein, 9 aa, synthetic construct
PIPGVLRVH

SEQ ID NO: 24306 - protein, 9 aa, synthetic construct
PIPGVLRVK

SEQ ID NO: 24307 - protein, 9 aa, synthetic construct
PIPGVLRVF

SEQ ID NO: 24308 - protein, 9 aa, synthetic construct
PLQASLKLY

SEQ ID NO: 24309 - protein, 9 aa, synthetic construct
PIPGVLKLF

SEQ ID NO: 24310 - protein, 9 aa, synthetic construct
PIPGVLKVY

SEQ ID NO: 24311 - protein, 9 aa, synthetic construct
PIPGVLKVF

SEQ ID NO: 24312 - protein, 9 aa, synthetic construct
PIPGVAHLR

SEQ ID NO: 24313 - protein, 9 aa, synthetic construct
PIPGVAHLK

SEQ ID NO: 24314 - protein, 9 aa, synthetic construct
PIPGVARLY

SEQ ID NO: 24315 - protein, 9 aa, synthetic construct
PIPGVARLF

SEQ ID NO: 24316 - protein, 9 aa, synthetic construct
PIPGVARVR

SEQ ID NO: 24317 - protein, 9 aa, synthetic construct
PIPGVARVF

SEQ ID NO: 24318 - protein, 9 aa, synthetic construct
PIPGVAKLH

SEQ ID NO: 24319 - protein, 9 aa, synthetic construct
PIPGVAKVY

SEQ ID NO: 24320 - protein, 9 aa, synthetic construct
PIPGVAKVR

SEQ ID NO: 24321 - protein, 9 aa, synthetic construct
PIPGVAKVF

SEQ ID NO: 24322 - protein, 9 aa, synthetic construct
PIPGVIHLH

SEQ ID NO: 24323 - protein, 9 aa, synthetic construct
PIPGVIHLF

SEQ ID NO: 24324 - protein, 9 aa, synthetic construct
PIPGVIHVH

SEQ ID NO: 24325 - protein, 9 aa, synthetic construct
PLQASLKVY

SEQ ID NO: 24326 - protein, 9 aa, synthetic construct
PIPGVIRLY

SEQ ID NO: 24327 - protein, 9 aa, synthetic construct
PIPGVIRLR

SEQ ID NO: 24328 - protein, 9 aa, synthetic construct
PIPGVIRVY

SEQ ID NO: 24329 - protein, 9 aa, synthetic construct
PIPGVIRVH

SEQ ID NO: 24330 - protein, 9 aa, synthetic construct
PIPGVIRVK

SEQ ID NO: 24331 - protein, 9 aa, synthetic construct
PIPGVIRVF

SEQ ID NO: 24332 - protein, 9 aa, synthetic construct
PIPGVIKLY

SEQ ID NO: 24333 - protein, 9 aa, synthetic construct
PIPGVIKLH

SEQ ID NO: 24334 - protein, 9 aa, synthetic construct
PIPGVIKLF

SEQ ID NO: 24335 - protein, 9 aa, synthetic construct
PIPGVIKVY

SEQ ID NO: 24336 - protein, 9 aa, synthetic construct
PIPGVIKVF

SEQ ID NO: 24337 - protein, 9 aa, synthetic construct
PLQASLKVH

SEQ ID NO: 24338 - protein, 9 aa, synthetic construct
PIPGVGRLH

SEQ ID NO: 24339 - protein, 9 aa, synthetic construct
PIPGVGRVK

SEQ ID NO: 24340 - protein, 9 aa, synthetic construct
PIPGVGKLR

SEQ ID NO: 24341 - protein, 9 aa, synthetic construct
PIPGVGKLK

SEQ ID NO: 24342 - protein, 9 aa, synthetic construct
PIPGVGKVR

SEQ ID NO: 24343 - protein, 9 aa, synthetic construct
PIPGVGKVH

SEQ ID NO: 24344 - protein, 9 aa, synthetic construct
PIPGGVHLH

SEQ ID NO: 24345 - protein, 9 aa, synthetic construct
PIPGGVHLF

SEQ ID NO: 24346 - protein, 9 aa, synthetic construct
PIPGGVRLY

SEQ ID NO: 24347 - protein, 9 aa, synthetic construct
PIPGGVRLR

SEQ ID NO: 24348 - protein, 9 aa, synthetic construct
PIPGGVRLH

SEQ ID NO: 24349 - protein, 9 aa, synthetic construct
PIPGGVRVY

SEQ ID NO: 24350 - protein, 9 aa, synthetic construct
PIPGGVRVK

SEQ ID NO: 24351 - protein, 9 aa, synthetic construct
PIPGGVRVF

SEQ ID NO: 24352 - protein, 9 aa, synthetic construct
PIPGGVKLR

SEQ ID NO: 24353 - protein, 9 aa, synthetic construct
PIPGGVKLH

SEQ ID NO: 24354 - protein, 9 aa, synthetic construct
PIPGGVKVR

SEQ ID NO: 24355 - protein, 9 aa, synthetic construct
PIPGGLHLY

SEQ ID NO: 24356 - protein, 9 aa, synthetic construct
PIPGGLHLH

SEQ ID NO: 24357 - protein, 9 aa, synthetic construct
PIPGGLHLK

SEQ ID NO: 24358 - protein, 9 aa, synthetic construct
PIPGGLHLF

SEQ ID NO: 24359 - protein, 9 aa, synthetic construct
PIPGGLHVY

SEQ ID NO: 24360 - protein, 9 aa, synthetic construct
PIPGGLHVR

SEQ ID NO: 24361 - protein, 9 aa, synthetic construct
PIPGGLHVF

SEQ ID NO: 24362 - protein, 9 aa, synthetic construct
PIPGGLRVY

SEQ ID NO: 24363 - protein, 9 aa, synthetic construct
PIPGGLKLY

SEQ ID NO: 24364 - protein, 9 aa, synthetic construct
PIPGGLKLH

SEQ ID NO: 24365 - protein, 9 aa, synthetic construct
PIPGGLKLF

SEQ ID NO: 24366 - protein, 9 aa, synthetic construct
PIPGGLKVY

SEQ ID NO: 24367 - protein, 9 aa, synthetic construct
PIPGGLKVH

SEQ ID NO: 24368 - protein, 9 aa, synthetic construct
PLQASAHVR

SEQ ID NO: 24369 - protein, 9 aa, synthetic construct
PIPGGARLF

SEQ ID NO: 24370 - protein, 9 aa, synthetic construct
PIPGGARVK

SEQ ID NO: 24371 - protein, 9 aa, synthetic construct
PIPGGARVF

SEQ ID NO: 24372 - protein, 9 aa, synthetic construct
PLQASAHVK

SEQ ID NO: 24373 - protein, 9 aa, synthetic construct
PIPGGAKVR

SEQ ID NO: 24374 - protein, 9 aa, synthetic construct
PIPGGIHLF

SEQ ID NO: 24375 - protein, 9 aa, synthetic construct
PIPGGIRLF

SEQ ID NO: 24376 - protein, 9 aa, synthetic construct
PIPGGIRVY

SEQ ID NO: 24377 - protein, 9 aa, synthetic construct
PIPGGIKLY

SEQ ID NO: 24378 - protein, 9 aa, synthetic construct
PIPGGIKLR

SEQ ID NO: 24379 - protein, 9 aa, synthetic construct
PIPGGIKVY

SEQ ID NO: 24380 - protein, 9 aa, synthetic construct
PIPGGIKVF

SEQ ID NO: 24381 - protein, 9 aa, synthetic construct
PIPGGGHLF

SEQ ID NO: 24382 - protein, 9 aa, synthetic construct
PIPGGGHVY

SEQ ID NO: 24383 - protein, 9 aa, synthetic construct
PIPGGGHVR

SEQ ID NO: 24384 - protein, 9 aa, synthetic construct
PIPGGGRLH

SEQ ID NO: 24385 - protein, 9 aa, synthetic construct
PIPGGGRVR

SEQ ID NO: 24386 - protein, 9 aa, synthetic construct
PIPGGGRVH

SEQ ID NO: 24387 - protein, 9 aa, synthetic construct
PLQASARLF

SEQ ID NO: 24388 - protein, 9 aa, synthetic construct
PIPGGGKLY

SEQ ID NO: 24389 - protein, 9 aa, synthetic construct
PIPGGGKVK

SEQ ID NO: 24390 - protein, 9 aa, synthetic construct
PIPAAVRLH

SEQ ID NO: 24391 - protein, 9 aa, synthetic construct
PIPAAVRVY

SEQ ID NO: 24392 - protein, 9 aa, synthetic construct
PIPAAVRVH

SEQ ID NO: 24393 - protein, 9 aa, synthetic construct
PIPAAVRVF

SEQ ID NO: 24394 - protein, 9 aa, synthetic construct
PIPAAVKLY

SEQ ID NO: 24395 - protein, 9 aa, synthetic construct
PIPAAVKLR

SEQ ID NO: 24396 - protein, 9 aa, synthetic construct
PIPAAVKVK

SEQ ID NO: 24397 - protein, 9 aa, synthetic construct
PIPAAVKVF

SEQ ID NO: 24398 - protein, 9 aa, synthetic construct
PIPAALHLY

SEQ ID NO: 24399 - protein, 9 aa, synthetic construct
PIPAALHLR

SEQ ID NO: 24400 - protein, 9 aa, synthetic construct
PIPAALHLK

SEQ ID NO: 24401 - protein, 9 aa, synthetic construct
PIPAALHLF

SEQ ID NO: 24402 - protein, 9 aa, synthetic construct
PIPAALHVY

SEQ ID NO: 24403 - protein, 9 aa, synthetic construct
PIPAALHVR

SEQ ID NO: 24404 - protein, 9 aa, synthetic construct
PIPAALHVH

SEQ ID NO: 24405 - protein, 9 aa, synthetic construct
PIPAALHVF

SEQ ID NO: 24406 - protein, 9 aa, synthetic construct
PIPAALRLH

SEQ ID NO: 24407 - protein, 9 aa, synthetic construct
PIPAALRVH

SEQ ID NO: 24408 - protein, 9 aa, synthetic construct
PIPAALKLY

SEQ ID NO: 24409 - protein, 9 aa, synthetic construct
PIPAALKLH

SEQ ID NO: 24410 - protein, 9 aa, synthetic construct
PIPAALKLF

SEQ ID NO: 24411 - protein, 9 aa, synthetic construct
PIPAALKVH

SEQ ID NO: 24412 - protein, 9 aa, synthetic construct
PIPAALKVF

SEQ ID NO: 24413 - protein, 9 aa, synthetic construct
PLQASAKLR

SEQ ID NO: 24414 - protein, 9 aa, synthetic construct
PLQASAKLH

SEQ ID NO: 24415 - protein, 9 aa, synthetic construct
PIPAAARLF

SEQ ID NO: 24416 - protein, 9 aa, synthetic construct
PIPAAARVR

SEQ ID NO: 24417 - protein, 9 aa, synthetic construct
PIPAAARVH

SEQ ID NO: 24418 - protein, 9 aa, synthetic construct
PIPAAAKLK

SEQ ID NO: 24419 - protein, 9 aa, synthetic construct
PIPAAAKVY

SEQ ID NO: 24420 - protein, 9 aa, synthetic construct
PIPAAAKVR

SEQ ID NO: 24421 - protein, 9 aa, synthetic construct
PIPAAAKVF

SEQ ID NO: 24422 - protein, 9 aa, synthetic construct
PLQASAKLF

SEQ ID NO: 24423 - protein, 9 aa, synthetic construct
PIPAAIHLY

SEQ ID NO: 24424 - protein, 9 aa, synthetic construct
PIPAAIHLR

SEQ ID NO: 24425 - protein, 9 aa, synthetic construct
PIPAAIHVF

SEQ ID NO: 24426 - protein, 9 aa, synthetic construct
PLQASAKVY

SEQ ID NO: 24427 - protein, 9 aa, synthetic construct
PIPAAIRLY

SEQ ID NO: 24428 - protein, 9 aa, synthetic construct
PIPAAIRLH

SEQ ID NO: 24429 - protein, 9 aa, synthetic construct
PIPAAIRLK

SEQ ID NO: 24430 - protein, 9 aa, synthetic construct
PIPAAIRVY

SEQ ID NO: 24431 - protein, 9 aa, synthetic construct
PIPAAIRVH

SEQ ID NO: 24432 - protein, 9 aa, synthetic construct
PIPAAIKLY

SEQ ID NO: 24433 - protein, 9 aa, synthetic construct
PIPAAIKLH

SEQ ID NO: 24434 - protein, 9 aa, synthetic construct
PIPAAIKLK

SEQ ID NO: 24435 - protein, 9 aa, synthetic construct
PIPAAIKLF

SEQ ID NO: 24436 - protein, 9 aa, synthetic construct
PIPAAIKVH

SEQ ID NO: 24437 - protein, 9 aa, synthetic construct
PIPAAIKVF

SEQ ID NO: 24438 - protein, 9 aa, synthetic construct
PIPAAGHVY

SEQ ID NO: 24439 - protein, 9 aa, synthetic construct
PIPAAGHVR

SEQ ID NO: 24440 - protein, 9 aa, synthetic construct
PIPAAGRLY

SEQ ID NO: 24441 - protein, 9 aa, synthetic construct
PIPAAGRLH

SEQ ID NO: 24442 - protein, 9 aa, synthetic construct
PIPAAGRVF

SEQ ID NO: 24443 - protein, 9 aa, synthetic construct
PLQASAKVF

SEQ ID NO: 24444 - protein, 9 aa, synthetic construct
PIPAAGKLY

SEQ ID NO: 24445 - protein, 9 aa, synthetic construct
PIPATVHLK

SEQ ID NO: 24446 - protein, 9 aa, synthetic construct
PIPATVHLF

SEQ ID NO: 24447 - protein, 9 aa, synthetic construct
PLQASIHLR

SEQ ID NO: 24448 - protein, 9 aa, synthetic construct
PIPATVRLY

SEQ ID NO: 24449 - protein, 9 aa, synthetic construct
PIPATVRLH

SEQ ID NO: 24450 - protein, 9 aa, synthetic construct
PIPATVRVY

SEQ ID NO: 24451 - protein, 9 aa, synthetic construct
PIPATVRVF

SEQ ID NO: 24452 - protein, 9 aa, synthetic construct
PIPATVKLH

SEQ ID NO: 24453 - protein, 9 aa, synthetic construct
PLQASIHLK

SEQ ID NO: 24454 - protein, 9 aa, synthetic construct
PIPATLHLH

SEQ ID NO: 24455 - protein, 9 aa, synthetic construct
PIPATLHLK

SEQ ID NO: 24456 - protein, 9 aa, synthetic construct
PIPATLHVR

SEQ ID NO: 24457 - protein, 9 aa, synthetic construct
PIPATLHVH

SEQ ID NO: 24458 - protein, 9 aa, synthetic construct
PIPATLHVK

SEQ ID NO: 24459 - protein, 9 aa, synthetic construct
PLQASIHLF

SEQ ID NO: 24460 - protein, 9 aa, synthetic construct
PIPATLRLY

SEQ ID NO: 24461 - protein, 9 aa, synthetic construct
PIPATLRLH

SEQ ID NO: 24462 - protein, 9 aa, synthetic construct
PIPATLRLK

SEQ ID NO: 24463 - protein, 9 aa, synthetic construct
PIPATLKLY

SEQ ID NO: 24464 - protein, 9 aa, synthetic construct
PIPATLKLH

SEQ ID NO: 24465 - protein, 9 aa, synthetic construct
PIPATLKLF

SEQ ID NO: 24466 - protein, 9 aa, synthetic construct
PIPATLKVH

SEQ ID NO: 24467 - protein, 9 aa, synthetic construct
PIPATLKVK

SEQ ID NO: 24468 - protein, 9 aa, synthetic construct
PIPATLKVF

SEQ ID NO: 24469 - protein, 9 aa, synthetic construct
PLQASIHVR

SEQ ID NO: 24470 - protein, 9 aa, synthetic construct
PIPATAHLH

SEQ ID NO: 24471 - protein, 9 aa, synthetic construct
PIPATAHLF

SEQ ID NO: 24472 - protein, 9 aa, synthetic construct
PIPATAHVY

SEQ ID NO: 24473 - protein, 9 aa, synthetic construct
PIPATAHVR

SEQ ID NO: 24474 - protein, 9 aa, synthetic construct
PIPATAHVF

SEQ ID NO: 24475 - protein, 9 aa, synthetic construct
PLQASIHVH

SEQ ID NO: 24476 - protein, 9 aa, synthetic construct
PIPATARLY

SEQ ID NO: 24477 - protein, 9 aa, synthetic construct
PIPATARVY

SEQ ID NO: 24478 - protein, 9 aa, synthetic construct
PLQASIHVK

SEQ ID NO: 24479 - protein, 9 aa, synthetic construct
PIPATAKVH

SEQ ID NO: 24480 - protein, 9 aa, synthetic construct
PIPATIHLY

SEQ ID NO: 24481 - protein, 9 aa, synthetic construct
PIPATIHLR

SEQ ID NO: 24482 - protein, 9 aa, synthetic construct
PIPATIHLF

SEQ ID NO: 24483 - protein, 9 aa, synthetic construct
PIPATIHVY

SEQ ID NO: 24484 - protein, 9 aa, synthetic construct
PIPATIHVR

SEQ ID NO: 24485 - protein, 9 aa, synthetic construct
PIPATIHVF

SEQ ID NO: 24486 - protein, 9 aa, synthetic construct
PLQASIRLY

SEQ ID NO: 24487 - protein, 9 aa, synthetic construct
PIPATIRLY

SEQ ID NO: 24488 - protein, 9 aa, synthetic construct
PIPATIRLR

SEQ ID NO: 24489 - protein, 9 aa, synthetic construct
PIPATIRLH

SEQ ID NO: 24490 - protein, 9 aa, synthetic construct
PIPATIRLF

SEQ ID NO: 24491 - protein, 9 aa, synthetic construct
PIPATIRVH

SEQ ID NO: 24492 - protein, 9 aa, synthetic construct
PIPATIRVF

SEQ ID NO: 24493 - protein, 9 aa, synthetic construct
PIPATIKLY

SEQ ID NO: 24494 - protein, 9 aa, synthetic construct
PIPATIKLR

SEQ ID NO: 24495 - protein, 9 aa, synthetic construct
PIPATIKVH

SEQ ID NO: 24496 - protein, 9 aa, synthetic construct
PIPATIKVF

SEQ ID NO: 24497 - protein, 9 aa, synthetic construct
PIPATGHLH

SEQ ID NO: 24498 - protein, 9 aa, synthetic construct
PIPATGHLK

SEQ ID NO: 24499 - protein, 9 aa, synthetic construct
PIPATGHVR

SEQ ID NO: 24500 - protein, 9 aa, synthetic construct
PIPATGRLY

SEQ ID NO: 24501 - protein, 9 aa, synthetic construct
PIPATGRLH

SEQ ID NO: 24502 - protein, 9 aa, synthetic construct
PIPATGRLK

SEQ ID NO: 24503 - protein, 9 aa, synthetic construct
PIPATGRVY

SEQ ID NO: 24504 - protein, 9 aa, synthetic construct
PIPATGRVF

SEQ ID NO: 24505 - protein, 9 aa, synthetic construct
PLQASIRLF

SEQ ID NO: 24506 - protein, 9 aa, synthetic construct
PIPATGKVF

SEQ ID NO: 24507 - protein, 9 aa, synthetic construct
PLQASIRVY

SEQ ID NO: 24508 - protein, 9 aa, synthetic construct
PIPASVHLY

SEQ ID NO: 24509 - protein, 9 aa, synthetic construct
PIPASVHLR

SEQ ID NO: 24510 - protein, 9 aa, synthetic construct
PIPASVHLH

SEQ ID NO: 24511 - protein, 9 aa, synthetic construct
PIPASVHLK

SEQ ID NO: 24512 - protein, 9 aa, synthetic construct
PIPASVHLF

SEQ ID NO: 24513 - protein, 9 aa, synthetic construct
PIPASVHVF

SEQ ID NO: 24514 - protein, 9 aa, synthetic construct
PLQASIRVH

SEQ ID NO: 24515 - protein, 9 aa, synthetic construct
PIPASVKLY

SEQ ID NO: 24516 - protein, 9 aa, synthetic construct
PIPASVKLH

SEQ ID NO: 24517 - protein, 9 aa, synthetic construct
PIPASLHLR

SEQ ID NO: 24518 - protein, 9 aa, synthetic construct
PIPASLHLH

SEQ ID NO: 24519 - protein, 9 aa, synthetic construct
PIPASLHVY

SEQ ID NO: 24520 - protein, 9 aa, synthetic construct
PIPASLHVR

SEQ ID NO: 24521 - protein, 9 aa, synthetic construct
PIPASLHVH

SEQ ID NO: 24522 - protein, 9 aa, synthetic construct
PIPASLHVF

SEQ ID NO: 24523 - protein, 9 aa, synthetic construct
PIPASLRLH

SEQ ID NO: 24524 - protein, 9 aa, synthetic construct
PIPASLRVF

SEQ ID NO: 24525 - protein, 9 aa, synthetic construct
PIPASLKLY

SEQ ID NO: 24526 - protein, 9 aa, synthetic construct
PIPASLKLF

SEQ ID NO: 24527 - protein, 9 aa, synthetic construct
PIPASLKVY

SEQ ID NO: 24528 - protein, 9 aa, synthetic construct
PIPASLKVF

SEQ ID NO: 24529 - protein, 9 aa, synthetic construct
PIPASAHLR

SEQ ID NO: 24530 - protein, 9 aa, synthetic construct
PIPASAHVR

SEQ ID NO: 24531 - protein, 9 aa, synthetic construct
PIPASAHVK

SEQ ID NO: 24532 - protein, 9 aa, synthetic construct
PIPASAHVF

SEQ ID NO: 24533 - protein, 9 aa, synthetic construct
PLQASIKLH

SEQ ID NO: 24534 - protein, 9 aa, synthetic construct
PIPASARLH

SEQ ID NO: 24535 - protein, 9 aa, synthetic construct
PIPASARLF

SEQ ID NO: 24536 - protein, 9 aa, synthetic construct
PIPASARVY

SEQ ID NO: 24537 - protein, 9 aa, synthetic construct
PIPASARVF

SEQ ID NO: 24538 - protein, 9 aa, synthetic construct
PLQASIKLK

SEQ ID NO: 24539 - protein, 9 aa, synthetic construct
PIPASAKLY

SEQ ID NO: 24540 - protein, 9 aa, synthetic construct
PIPASAKLR

SEQ ID NO: 24541 - protein, 9 aa, synthetic construct
PIPASAKVH

SEQ ID NO: 24542 - protein, 9 aa, synthetic construct
PIPASAKVF

SEQ ID NO: 24543 - protein, 9 aa, synthetic construct
PLQASIKLF

SEQ ID NO: 24544 - protein, 9 aa, synthetic construct
PIPASIHLK

SEQ ID NO: 24545 - protein, 9 aa, synthetic construct
PIPASIHVR

SEQ ID NO: 24546 - protein, 9 aa, synthetic construct
PLQASIKVY

SEQ ID NO: 24547 - protein, 9 aa, synthetic construct
PIPASIRLK

SEQ ID NO: 24548 - protein, 9 aa, synthetic construct
PIPASIRVF

SEQ ID NO: 24549 - protein, 9 aa, synthetic construct
PIPASIKLK

SEQ ID NO: 24550 - protein, 9 aa, synthetic construct
PIPASIKVY

SEQ ID NO: 24551 - protein, 9 aa, synthetic construct
PIPASGHVR

SEQ ID NO: 24552 - protein, 9 aa, synthetic construct
PIPASGRLY

SEQ ID NO: 24553 - protein, 9 aa, synthetic construct
PIPASGRLH

SEQ ID NO: 24554 - protein, 9 aa, synthetic construct
PIPASGRLF

SEQ ID NO: 24555 - protein, 9 aa, synthetic construct
PIPASGRVY

SEQ ID NO: 24556 - protein, 9 aa, synthetic construct
PIPASGRVH

SEQ ID NO: 24557 - protein, 9 aa, synthetic construct
PIPASGRVK

SEQ ID NO: 24558 - protein, 9 aa, synthetic construct
PIPASGRVF

SEQ ID NO: 24559 - protein, 9 aa, synthetic construct
PIPASGKLY

SEQ ID NO: 24560 - protein, 9 aa, synthetic construct
PIPASGKLH

SEQ ID NO: 24561 - protein, 9 aa, synthetic construct
PIPASGKLF

SEQ ID NO: 24562 - protein, 9 aa, synthetic construct
PIPASGKVY

SEQ ID NO: 24563 - protein, 9 aa, synthetic construct
PIPAVVHLK

SEQ ID NO: 24564 - protein, 9 aa, synthetic construct
PIPAVVHVR

SEQ ID NO: 24565 - protein, 9 aa, synthetic construct
PIPAVVRLY

SEQ ID NO: 24566 - protein, 9 aa, synthetic construct
PIPAVVRLF

SEQ ID NO: 24567 - protein, 9 aa, synthetic construct
PIPAVVRVK

SEQ ID NO: 24568 - protein, 9 aa, synthetic construct
PIPAVVKLY

SEQ ID NO: 24569 - protein, 9 aa, synthetic construct
PIPAVVKLR

SEQ ID NO: 24570 - protein, 9 aa, synthetic construct
PIPAVVKLH

SEQ ID NO: 24571 - protein, 9 aa, synthetic construct
PIPAVVKLF

SEQ ID NO: 24572 - protein, 9 aa, synthetic construct
PIPAVVKVR

SEQ ID NO: 24573 - protein, 9 aa, synthetic construct
PIPAVVKVH

SEQ ID NO: 24574 - protein, 9 aa, synthetic construct
PLQASGHLF

SEQ ID NO: 24575 - protein, 9 aa, synthetic construct
PLQASGHVY

SEQ ID NO: 24576 - protein, 9 aa, synthetic construct
PIPAVLKLF

SEQ ID NO: 24577 - protein, 9 aa, synthetic construct
PIPAVLKVY

SEQ ID NO: 24578 - protein, 9 aa, synthetic construct
PIPAVLKVF

SEQ ID NO: 24579 - protein, 9 aa, synthetic construct
PLQASGHVR

SEQ ID NO: 24580 - protein, 9 aa, synthetic construct
PIPAVAHLR

SEQ ID NO: 24581 - protein, 9 aa, synthetic construct
PIPAVAHLK

SEQ ID NO: 24582 - protein, 9 aa, synthetic construct
PIPAVAHVY

SEQ ID NO: 24583 - protein, 9 aa, synthetic construct
PIPAVAHVF

SEQ ID NO: 24584 - protein, 9 aa, synthetic construct
PIPAVARLH

SEQ ID NO: 24585 - protein, 9 aa, synthetic construct
PLQASGHVK

SEQ ID NO: 24586 - protein, 9 aa, synthetic construct
PIPAVAKLH

SEQ ID NO: 24587 - protein, 9 aa, synthetic construct
PIPAVAKVR

SEQ ID NO: 24588 - protein, 9 aa, synthetic construct
PIPAVIHLH

SEQ ID NO: 24589 - protein, 9 aa, synthetic construct
PIPAVIHLF

SEQ ID NO: 24590 - protein, 9 aa, synthetic construct
PIPAVIHVY

SEQ ID NO: 24591 - protein, 9 aa, synthetic construct
PIPAVIHVH

SEQ ID NO: 24592 - protein, 9 aa, synthetic construct
PIPAVIHVF

SEQ ID NO: 24593 - protein, 9 aa, synthetic construct
PIPAVIRLR

SEQ ID NO: 24594 - protein, 9 aa, synthetic construct
PIPAVIRVK

SEQ ID NO: 24595 - protein, 9 aa, synthetic construct
PIPAVIKLF

SEQ ID NO: 24596 - protein, 9 aa, synthetic construct
PIPAVIKVY

SEQ ID NO: 24597 - protein, 9 aa, synthetic construct
PIPAVGHLY

SEQ ID NO: 24598 - protein, 9 aa, synthetic construct
PIPAVGHLR

SEQ ID NO: 24599 - protein, 9 aa, synthetic construct
PIPAVGHLH

SEQ ID NO: 24600 - protein, 9 aa, synthetic construct
PIPAVGHVY

SEQ ID NO: 24601 - protein, 9 aa, synthetic construct
PIPAVGHVR

SEQ ID NO: 24602 - protein, 9 aa, synthetic construct
PIPAVGHVK

SEQ ID NO: 24603 - protein, 9 aa, synthetic construct
PIPAVGHVF

SEQ ID NO: 24604 - protein, 9 aa, synthetic construct
PIPAVGRLH

SEQ ID NO: 24605 - protein, 9 aa, synthetic construct
PIPAVGRLF

SEQ ID NO: 24606 - protein, 9 aa, synthetic construct
PIPAVGRVY

SEQ ID NO: 24607 - protein, 9 aa, synthetic construct
PIPAVGRVF

SEQ ID NO: 24608 - protein, 9 aa, synthetic construct
PIPAVGKLH

SEQ ID NO: 24609 - protein, 9 aa, synthetic construct
PIPAVGKLF

SEQ ID NO: 24610 - protein, 9 aa, synthetic construct
PIPAVGKVY

SEQ ID NO: 24611 - protein, 9 aa, synthetic construct
PIPAVGKVR

SEQ ID NO: 24612 - protein, 9 aa, synthetic construct
PIPAVGKVF

SEQ ID NO: 24613 - protein, 9 aa, synthetic construct
PIPAGVHLY

SEQ ID NO: 24614 - protein, 9 aa, synthetic construct
PIPAGVHLK

SEQ ID NO: 24615 - protein, 9 aa, synthetic construct
PIPAGVHLF

SEQ ID NO: 24616 - protein, 9 aa, synthetic construct
PIPAGVHVR

SEQ ID NO: 24617 - protein, 9 aa, synthetic construct
PIPAGVHVF

SEQ ID NO: 24618 - protein, 9 aa, synthetic construct
PIPAGVRLH

SEQ ID NO: 24619 - protein, 9 aa, synthetic construct
PIPAGVRVY

SEQ ID NO: 24620 - protein, 9 aa, synthetic construct
PIPAGVRVK

SEQ ID NO: 24621 - protein, 9 aa, synthetic construct
PIPAGVRVF

SEQ ID NO: 24622 - protein, 9 aa, synthetic construct
PIPAGVKVY

SEQ ID NO: 24623 - protein, 9 aa, synthetic construct
PIPAGVKVH

SEQ ID NO: 24624 - protein, 9 aa, synthetic construct
PIPAGVKVK

SEQ ID NO: 24625 - protein, 9 aa, synthetic construct
PIPAGLHVR

SEQ ID NO: 24626 - protein, 9 aa, synthetic construct
PIPAGLRVF

SEQ ID NO: 24627 - protein, 9 aa, synthetic construct
PLQASGKLY

SEQ ID NO: 24628 - protein, 9 aa, synthetic construct
PIPAGLKLY

SEQ ID NO: 24629 - protein, 9 aa, synthetic construct
PIPAGLKLH

SEQ ID NO: 24630 - protein, 9 aa, synthetic construct
PIPAGLKLF

SEQ ID NO: 24631 - protein, 9 aa, synthetic construct
PIPAGLKVY

SEQ ID NO: 24632 - protein, 9 aa, synthetic construct
PIPAGLKVF

SEQ ID NO: 24633 - protein, 9 aa, synthetic construct
PIPAGAHLR

SEQ ID NO: 24634 - protein, 9 aa, synthetic construct
PIPAGAHLK

SEQ ID NO: 24635 - protein, 9 aa, synthetic construct
PIPAGAHVR

SEQ ID NO: 24636 - protein, 9 aa, synthetic construct
PIPAGARLY

SEQ ID NO: 24637 - protein, 9 aa, synthetic construct
PIPAGARVY

SEQ ID NO: 24638 - protein, 9 aa, synthetic construct
PIPAGARVH

SEQ ID NO: 24639 - protein, 9 aa, synthetic construct
PIPAGARVK

SEQ ID NO: 24640 - protein, 9 aa, synthetic construct
PIPAGARVF

SEQ ID NO: 24641 - protein, 9 aa, synthetic construct
PIPAGAKVY

SEQ ID NO: 24642 - protein, 9 aa, synthetic construct
PIPAGAKVR

SEQ ID NO: 24643 - protein, 9 aa, synthetic construct
PIPAGAKVH

SEQ ID NO: 24644 - protein, 9 aa, synthetic construct
PLQASGKVY

SEQ ID NO: 24645 - protein, 9 aa, synthetic construct
PIPAGIRLY

SEQ ID NO: 24646 - protein, 9 aa, synthetic construct
PIPAGIRVH

SEQ ID NO: 24647 - protein, 9 aa, synthetic construct
PIPAGIRVF

SEQ ID NO: 24648 - protein, 9 aa, synthetic construct
PIPAGIKLK

SEQ ID NO: 24649 - protein, 9 aa, synthetic construct
PIPAGGHLR

SEQ ID NO: 24650 - protein, 9 aa, synthetic construct
PIPAGGHVY

SEQ ID NO: 24651 - protein, 9 aa, synthetic construct
PIPAGGHVR

SEQ ID NO: 24652 - protein, 9 aa, synthetic construct
PIPAGGHVK

SEQ ID NO: 24653 - protein, 9 aa, synthetic construct
PIPAGGHVF

SEQ ID NO: 24654 - protein, 9 aa, synthetic construct
PIPAGGRLY

SEQ ID NO: 24655 - protein, 9 aa, synthetic construct
PIPAGGRVR

SEQ ID NO: 24656 - protein, 9 aa, synthetic construct
PIPAGGRVH

SEQ ID NO: 24657 - protein, 9 aa, synthetic construct
PIPAGGRVK

SEQ ID NO: 24658 - protein, 9 aa, synthetic construct
PIPAGGKLY

SEQ ID NO: 24659 - protein, 9 aa, synthetic construct
PIPAGGKLR

SEQ ID NO: 24660 - protein, 9 aa, synthetic construct
PIPAGGKLH

SEQ ID NO: 24661 - protein, 9 aa, synthetic construct
PIPAGGKLK

SEQ ID NO: 24662 - protein, 9 aa, synthetic construct
PIPAGGKVH

SEQ ID NO: 24663 - protein, 9 aa, synthetic construct
PIPAGGKVK

SEQ ID NO: 24664 - protein, 9 aa, synthetic construct
GLNGAVHVY

SEQ ID NO: 24665 - protein, 9 aa, synthetic construct
GLNGAVHVK

SEQ ID NO: 24666 - protein, 9 aa, synthetic construct
GLNGAVRLH

SEQ ID NO: 24667 - protein, 9 aa, synthetic construct
PLQAVVHLH

SEQ ID NO: 24668 - protein, 9 aa, synthetic construct
GLNGAVKLY

SEQ ID NO: 24669 - protein, 9 aa, synthetic construct
GLNGAVKLH

SEQ ID NO: 24670 - protein, 9 aa, synthetic construct
GLNGAVKVH

SEQ ID NO: 24671 - protein, 9 aa, synthetic construct
PLQAVVHLK

SEQ ID NO: 24672 - protein, 9 aa, synthetic construct
GLNGALRLY

SEQ ID NO: 24673 - protein, 9 aa, synthetic construct
GLNGALRVK

SEQ ID NO: 24674 - protein, 9 aa, synthetic construct
PLQAVVHVY

SEQ ID NO: 24675 - protein, 9 aa, synthetic construct
GLNGALKLF

SEQ ID NO: 24676 - protein, 9 aa, synthetic construct
PLQAVVHVR

SEQ ID NO: 24677 - protein, 9 aa, synthetic construct
GLNGAAHLK

SEQ ID NO: 24678 - protein, 9 aa, synthetic construct
GLNGAAHLF

SEQ ID NO: 24679 - protein, 9 aa, synthetic construct
GLNGAARLY

SEQ ID NO: 24680 - protein, 9 aa, synthetic construct
GLNGAARLR

SEQ ID NO: 24681 - protein, 9 aa, synthetic construct
GLNGAARLF

SEQ ID NO: 24682 - protein, 9 aa, synthetic construct
GLNGAARVY

SEQ ID NO: 24683 - protein, 9 aa, synthetic construct
GLNGAARVR

SEQ ID NO: 24684 - protein, 9 aa, synthetic construct
GLNGAARVH

SEQ ID NO: 24685 - protein, 9 aa, synthetic construct
PLQAVVHVK

SEQ ID NO: 24686 - protein, 9 aa, synthetic construct
PLQAVVHVF

SEQ ID NO: 24687 - protein, 9 aa, synthetic construct
GLNGAIHLR

SEQ ID NO: 24688 - protein, 9 aa, synthetic construct
GLNGAIHVR

SEQ ID NO: 24689 - protein, 9 aa, synthetic construct
GLNGAIKLH

SEQ ID NO: 24690 - protein, 9 aa, synthetic construct
GLNGAIKLF

SEQ ID NO: 24691 - protein, 9 aa, synthetic construct
GLNGAIKVH

SEQ ID NO: 24692 - protein, 9 aa, synthetic construct
PLQAVVRLH

SEQ ID NO: 24693 - protein, 9 aa, synthetic construct
GLNGAGHLY

SEQ ID NO: 24694 - protein, 9 aa, synthetic construct
GLNGAGHVY

SEQ ID NO: 24695 - protein, 9 aa, synthetic construct
GLNGAGHVR

SEQ ID NO: 24696 - protein, 9 aa, synthetic construct
GLNGAGHVK

SEQ ID NO: 24697 - protein, 9 aa, synthetic construct
GLNGAGHVF

SEQ ID NO: 24698 - protein, 9 aa, synthetic construct
GLNGAGRLY

SEQ ID NO: 24699 - protein, 9 aa, synthetic construct
GLNGAGRVY

SEQ ID NO: 24700 - protein, 9 aa, synthetic construct
GLNGAGRVK

SEQ ID NO: 24701 - protein, 9 aa, synthetic construct
GLNGAGKLF

SEQ ID NO: 24702 - protein, 9 aa, synthetic construct
GLNGAGKVH

SEQ ID NO: 24703 - protein, 9 aa, synthetic construct
GLNGTVHLR

SEQ ID NO: 24704 - protein, 9 aa, synthetic construct
GLNGTVHLK

SEQ ID NO: 24705 - protein, 9 aa, synthetic construct
GLNGTVHVR

SEQ ID NO: 24706 - protein, 9 aa, synthetic construct
GLNGTVRLH

SEQ ID NO: 24707 - protein, 9 aa, synthetic construct
GLNGTVRVY

SEQ ID NO: 24708 - protein, 9 aa, synthetic construct
GLNGTVRVH

SEQ ID NO: 24709 - protein, 9 aa, synthetic construct
GLNGTVRVF

SEQ ID NO: 24710 - protein, 9 aa, synthetic construct
GLNGTVKLY

SEQ ID NO: 24711 - protein, 9 aa, synthetic construct
GLNGTVKVF

SEQ ID NO: 24712 - protein, 9 aa, synthetic construct
GLNGTLHVR

SEQ ID NO: 24713 - protein, 9 aa, synthetic construct
GLNGTLHVH

SEQ ID NO: 24714 - protein, 9 aa, synthetic construct
GLNGTLHVK

SEQ ID NO: 24715 - protein, 9 aa, synthetic construct
GLNGTLHVF

SEQ ID NO: 24716 - protein, 9 aa, synthetic construct
PLQAVVRVF

SEQ ID NO: 24717 - protein, 9 aa, synthetic construct
GLNGTLRLF

SEQ ID NO: 24718 - protein, 9 aa, synthetic construct
PLQAVVKLY

SEQ ID NO: 24719 - protein, 9 aa, synthetic construct
GLNGTLKLY

SEQ ID NO: 24720 - protein, 9 aa, synthetic construct
GLNGTLKVF

SEQ ID NO: 24721 - protein, 9 aa, synthetic construct
PLQAVVKLR

SEQ ID NO: 24722 - protein, 9 aa, synthetic construct
GLNGTAHLK

SEQ ID NO: 24723 - protein, 9 aa, synthetic construct
GLNGTAHVF

SEQ ID NO: 24724 - protein, 9 aa, synthetic construct
PLQAVVKLH

SEQ ID NO: 24725 - protein, 9 aa, synthetic construct
GLNGTARLF

SEQ ID NO: 24726 - protein, 9 aa, synthetic construct
GLNGTARVY

SEQ ID NO: 24727 - protein, 9 aa, synthetic construct
GLNGTARVH

SEQ ID NO: 24728 - protein, 9 aa, synthetic construct
GLNGTAKLY

SEQ ID NO: 24729 - protein, 9 aa, synthetic construct
GLNGTAKLR

SEQ ID NO: 24730 - protein, 9 aa, synthetic construct
GLNGTAKLH

SEQ ID NO: 24731 - protein, 9 aa, synthetic construct
GLNGTAKLF

SEQ ID NO: 24732 - protein, 9 aa, synthetic construct
GLNGTAKVY

SEQ ID NO: 24733 - protein, 9 aa, synthetic construct
GLNGTAKVH

SEQ ID NO: 24734 - protein, 9 aa, synthetic construct
GLNGTAKVF

SEQ ID NO: 24735 - protein, 9 aa, synthetic construct
GLNGTIHLR

SEQ ID NO: 24736 - protein, 9 aa, synthetic construct
GLNGTIHVY

SEQ ID NO: 24737 - protein, 9 aa, synthetic construct
GLNGTIHVH

SEQ ID NO: 24738 - protein, 9 aa, synthetic construct
GLNGTIHVF

SEQ ID NO: 24739 - protein, 9 aa, synthetic construct
GLNGTIRLH

SEQ ID NO: 24740 - protein, 9 aa, synthetic construct
GLNGTIRLF

SEQ ID NO: 24741 - protein, 9 aa, synthetic construct
GLNGTIRVR

SEQ ID NO: 24742 - protein, 9 aa, synthetic construct
GLNGTIRVH

SEQ ID NO: 24743 - protein, 9 aa, synthetic construct
GLNGTIRVF

SEQ ID NO: 24744 - protein, 9 aa, synthetic construct
GLNGTIKLY

SEQ ID NO: 24745 - protein, 9 aa, synthetic construct
GLNGTIKLH

SEQ ID NO: 24746 - protein, 9 aa, synthetic construct
GLNGTIKLF

SEQ ID NO: 24747 - protein, 9 aa, synthetic construct
PLQAVVKVH

SEQ ID NO: 24748 - protein, 9 aa, synthetic construct
GLNGTGHLY

SEQ ID NO: 24749 - protein, 9 aa, synthetic construct
GLNGTGHLR

SEQ ID NO: 24750 - protein, 9 aa, synthetic construct
GLNGTGHLH

SEQ ID NO: 24751 - protein, 9 aa, synthetic construct
GLNGTGHVY

SEQ ID NO: 24752 - protein, 9 aa, synthetic construct
GLNGTGHVH

SEQ ID NO: 24753 - protein, 9 aa, synthetic construct
GLNGTGHVK

SEQ ID NO: 24754 - protein, 9 aa, synthetic construct
GLNGTGHVF

SEQ ID NO: 24755 - protein, 9 aa, synthetic construct
GLNGTGRLY

SEQ ID NO: 24756 - protein, 9 aa, synthetic construct
GLNGTGRLH

SEQ ID NO: 24757 - protein, 9 aa, synthetic construct
GLNGTGRLF

SEQ ID NO: 24758 - protein, 9 aa, synthetic construct
GLNGTGRVY

SEQ ID NO: 24759 - protein, 9 aa, synthetic construct
GLNGTGRVR

SEQ ID NO: 24760 - protein, 9 aa, synthetic construct
GLNGTGRVH

SEQ ID NO: 24761 - protein, 9 aa, synthetic construct
GLNGTGRVK

SEQ ID NO: 24762 - protein, 9 aa, synthetic construct
GLNGTGRVF

SEQ ID NO: 24763 - protein, 9 aa, synthetic construct
GLNGTGKLH

SEQ ID NO: 24764 - protein, 9 aa, synthetic construct
GLNGTGKVY

SEQ ID NO: 24765 - protein, 9 aa, synthetic construct
GLNGTGKVF

SEQ ID NO: 24766 - protein, 9 aa, synthetic construct
PLNGTGHLK

SEQ ID NO: 24767 - protein, 9 aa, synthetic construct
GLNGSVHVY

SEQ ID NO: 24768 - protein, 9 aa, synthetic construct
GLNGSVRLY

SEQ ID NO: 24769 - protein, 9 aa, synthetic construct
GLNGSVRVF

SEQ ID NO: 24770 - protein, 9 aa, synthetic construct
GLNGSVKVK

SEQ ID NO: 24771 - protein, 9 aa, synthetic construct
GLNGSLHLY

SEQ ID NO: 24772 - protein, 9 aa, synthetic construct
GLNGSLHLR

SEQ ID NO: 24773 - protein, 9 aa, synthetic construct
GLNGSLHLH

SEQ ID NO: 24774 - protein, 9 aa, synthetic construct
GLNGSLHLK

SEQ ID NO: 24775 - protein, 9 aa, synthetic construct
GLNGSLHVY

SEQ ID NO: 24776 - protein, 9 aa, synthetic construct
GLNGSLHVR

SEQ ID NO: 24777 - protein, 9 aa, synthetic construct
GLNGSLHVF

SEQ ID NO: 24778 - protein, 9 aa, synthetic construct
GLNGSLRVF

SEQ ID NO: 24779 - protein, 9 aa, synthetic construct
GLNGSAHLH

SEQ ID NO: 24780 - protein, 9 aa, synthetic construct
GLNGSAHVY

SEQ ID NO: 24781 - protein, 9 aa, synthetic construct
GLNGSAHVR

SEQ ID NO: 24782 - protein, 9 aa, synthetic construct
GLNGSAHVK

SEQ ID NO: 24783 - protein, 9 aa, synthetic construct
GLNGSARLY

SEQ ID NO: 24784 - protein, 9 aa, synthetic construct
PLQAVLHVK

SEQ ID NO: 24785 - protein, 9 aa, synthetic construct
GLNGSAKLY

SEQ ID NO: 24786 - protein, 9 aa, synthetic construct
GLNGSAKLR

SEQ ID NO: 24787 - protein, 9 aa, synthetic construct
GLNGSAKLF

SEQ ID NO: 24788 - protein, 9 aa, synthetic construct
GLNGSAKVY

SEQ ID NO: 24789 - protein, 9 aa, synthetic construct
GLNGSIHLY

SEQ ID NO: 24790 - protein, 9 aa, synthetic construct
GLNGSIHVR

SEQ ID NO: 24791 - protein, 9 aa, synthetic construct
GLNGSIRLF

SEQ ID NO: 24792 - protein, 9 aa, synthetic construct
GLNGSIRVH

SEQ ID NO: 24793 - protein, 9 aa, synthetic construct
GLNGSIKLH

SEQ ID NO: 24794 - protein, 9 aa, synthetic construct
GLNGSGHLR

SEQ ID NO: 24795 - protein, 9 aa, synthetic construct
GLNGSGHLF

SEQ ID NO: 24796 - protein, 9 aa, synthetic construct
GLNGSGHVY

SEQ ID NO: 24797 - protein, 9 aa, synthetic construct
GLNGSGHVR

SEQ ID NO: 24798 - protein, 9 aa, synthetic construct
GLNGSGHVH

SEQ ID NO: 24799 - protein, 9 aa, synthetic construct
GLNGSGHVK

SEQ ID NO: 24800 - protein, 9 aa, synthetic construct
GLNGSGHVF

SEQ ID NO: 24801 - protein, 9 aa, synthetic construct
GLNGSGRLR

SEQ ID NO: 24802 - protein, 9 aa, synthetic construct
GLNGSGRLK

SEQ ID NO: 24803 - protein, 9 aa, synthetic construct
GLNGSGRLF

SEQ ID NO: 24804 - protein, 9 aa, synthetic construct
GLNGSGRVR

SEQ ID NO: 24805 - protein, 9 aa, synthetic construct
GLNGSGRVH

SEQ ID NO: 24806 - protein, 9 aa, synthetic construct
GLNGSGKLY

SEQ ID NO: 24807 - protein, 9 aa, synthetic construct
GLNGSGKLH

SEQ ID NO: 24808 - protein, 9 aa, synthetic construct
GLNGSGKVY

SEQ ID NO: 24809 - protein, 9 aa, synthetic construct
GLNGSGKVF

SEQ ID NO: 24810 - protein, 9 aa, synthetic construct
GLNGVVHLR

SEQ ID NO: 24811 - protein, 9 aa, synthetic construct
GLNGVVHVR

SEQ ID NO: 24812 - protein, 9 aa, synthetic construct
GLNGVVKLH

SEQ ID NO: 24813 - protein, 9 aa, synthetic construct
GLNGVLHLY

SEQ ID NO: 24814 - protein, 9 aa, synthetic construct
GLNGVLHLR

SEQ ID NO: 24815 - protein, 9 aa, synthetic construct
GLNGVLHLH

SEQ ID NO: 24816 - protein, 9 aa, synthetic construct
GLNGVLRLY

SEQ ID NO: 24817 - protein, 9 aa, synthetic construct
GLNGVLRLR

SEQ ID NO: 24818 - protein, 9 aa, synthetic construct
GLNGVLRLH

SEQ ID NO: 24819 - protein, 9 aa, synthetic construct
GLNGVLRLF

SEQ ID NO: 24820 - protein, 9 aa, synthetic construct
PLNGTGHVY

SEQ ID NO: 24821 - protein, 9 aa, synthetic construct
GLNGVLKLY

SEQ ID NO: 24822 - protein, 9 aa, synthetic construct
GLNGVLKVR

SEQ ID NO: 24823 - protein, 9 aa, synthetic construct
GLNGVAKVH

SEQ ID NO: 24824 - protein, 9 aa, synthetic construct
GLNGVIHLY

SEQ ID NO: 24825 - protein, 9 aa, synthetic construct
GLNGVIHLH

SEQ ID NO: 24826 - protein, 9 aa, synthetic construct
GLNGVIHVH

SEQ ID NO: 24827 - protein, 9 aa, synthetic construct
GLNGVIHVK

SEQ ID NO: 24828 - protein, 9 aa, synthetic construct
GLNGVIRLF

SEQ ID NO: 24829 - protein, 9 aa, synthetic construct
GLNGVIRVH

SEQ ID NO: 24830 - protein, 9 aa, synthetic construct
GLNGVIKLF

SEQ ID NO: 24831 - protein, 9 aa, synthetic construct
GLNGVIKVY

SEQ ID NO: 24832 - protein, 9 aa, synthetic construct
GLNGVIKVH

SEQ ID NO: 24833 - protein, 9 aa, synthetic construct
GLNGVGHLY

SEQ ID NO: 24834 - protein, 9 aa, synthetic construct
GLNGVGHLH

SEQ ID NO: 24835 - protein, 9 aa, synthetic construct
GLNGVGHVY

SEQ ID NO: 24836 - protein, 9 aa, synthetic construct
GLNGVGRLY

SEQ ID NO: 24837 - protein, 9 aa, synthetic construct
GLNGVGRLH

SEQ ID NO: 24838 - protein, 9 aa, synthetic construct
GLNGVGRLK

SEQ ID NO: 24839 - protein, 9 aa, synthetic construct
GLNGVGRLF

SEQ ID NO: 24840 - protein, 9 aa, synthetic construct
GLNGVGRVY

SEQ ID NO: 24841 - protein, 9 aa, synthetic construct
GLNGVGRVF

SEQ ID NO: 24842 - protein, 9 aa, synthetic construct
GLNGVGKLR

SEQ ID NO: 24843 - protein, 9 aa, synthetic construct
GLNGVGKLF

SEQ ID NO: 24844 - protein, 9 aa, synthetic construct
GLNGVGKVY

SEQ ID NO: 24845 - protein, 9 aa, synthetic construct
GLNGVGKVH

SEQ ID NO: 24846 - protein, 9 aa, synthetic construct
PLNGTGHVR

SEQ ID NO: 24847 - protein, 9 aa, synthetic construct
GLNGGVHLH

SEQ ID NO: 24848 - protein, 9 aa, synthetic construct
GLNGGVHLK

SEQ ID NO: 24849 - protein, 9 aa, synthetic construct
GLNGGVHVY

SEQ ID NO: 24850 - protein, 9 aa, synthetic construct
GLNGGVHVR

SEQ ID NO: 24851 - protein, 9 aa, synthetic construct
PLQAVAHLR

SEQ ID NO: 24852 - protein, 9 aa, synthetic construct
GLNGGVRLY

SEQ ID NO: 24853 - protein, 9 aa, synthetic construct
GLNGGVRLR

SEQ ID NO: 24854 - protein, 9 aa, synthetic construct
GLNGGVRLH

SEQ ID NO: 24855 - protein, 9 aa, synthetic construct
GLNGGVRLK

SEQ ID NO: 24856 - protein, 9 aa, synthetic construct
GLNGGVRLF

SEQ ID NO: 24857 - protein, 9 aa, synthetic construct
GLNGGVRVY

SEQ ID NO: 24858 - protein, 9 aa, synthetic construct
GLNGGVRVK

SEQ ID NO: 24859 - protein, 9 aa, synthetic construct
GLNGGVKVH

SEQ ID NO: 24860 - protein, 9 aa, synthetic construct
PLQAVAHLK

SEQ ID NO: 24861 - protein, 9 aa, synthetic construct
GLNGGLHVY

SEQ ID NO: 24862 - protein, 9 aa, synthetic construct
GLNGGLHVR

SEQ ID NO: 24863 - protein, 9 aa, synthetic construct
GLNGGLHVK

SEQ ID NO: 24864 - protein, 9 aa, synthetic construct
GLNGGLKVY

SEQ ID NO: 24865 - protein, 9 aa, synthetic construct
GLNGGLKVH

SEQ ID NO: 24866 - protein, 9 aa, synthetic construct
PLQAVAHVR

SEQ ID NO: 24867 - protein, 9 aa, synthetic construct
GLNGGAHLY

SEQ ID NO: 24868 - protein, 9 aa, synthetic construct
GLNGGAHLR

SEQ ID NO: 24869 - protein, 9 aa, synthetic construct
GLNGGAHVY

SEQ ID NO: 24870 - protein, 9 aa, synthetic construct
GLNGGAHVR

SEQ ID NO: 24871 - protein, 9 aa, synthetic construct
GLNGGARLF

SEQ ID NO: 24872 - protein, 9 aa, synthetic construct
GLNGGARVH

SEQ ID NO: 24873 - protein, 9 aa, synthetic construct
GLNGGARVF

SEQ ID NO: 24874 - protein, 9 aa, synthetic construct
PLQAVAHVK

SEQ ID NO: 24875 - protein, 9 aa, synthetic construct
GLNGGAKLF

SEQ ID NO: 24876 - protein, 9 aa, synthetic construct
PLQAVAHVF

SEQ ID NO: 24877 - protein, 9 aa, synthetic construct
GLNGGIRLF

SEQ ID NO: 24878 - protein, 9 aa, synthetic construct
GLNGGIRVF

SEQ ID NO: 24879 - protein, 9 aa, synthetic construct
GLNGGGHLY

SEQ ID NO: 24880 - protein, 9 aa, synthetic construct
GLNGGGHLR

SEQ ID NO: 24881 - protein, 9 aa, synthetic construct
GLNGGGHLK

SEQ ID NO: 24882 - protein, 9 aa, synthetic construct
GLNGGGHLF

SEQ ID NO: 24883 - protein, 9 aa, synthetic construct
GLNGGGHVY

SEQ ID NO: 24884 - protein, 9 aa, synthetic construct
GLNGGGHVH

SEQ ID NO: 24885 - protein, 9 aa, synthetic construct
GLNGGGHVK

SEQ ID NO: 24886 - protein, 9 aa, synthetic construct
GLNGGGRLY

SEQ ID NO: 24887 - protein, 9 aa, synthetic construct
GLNGGGRVR

SEQ ID NO: 24888 - protein, 9 aa, synthetic construct
GLNGGGRVH

SEQ ID NO: 24889 - protein, 9 aa, synthetic construct
GLNGGGRVK

SEQ ID NO: 24890 - protein, 9 aa, synthetic construct
GLNGGGRVF

SEQ ID NO: 24891 - protein, 9 aa, synthetic construct
GLNGGGKVK

SEQ ID NO: 24892 - protein, 9 aa, synthetic construct
GLNAAVHLR

SEQ ID NO: 24893 - protein, 9 aa, synthetic construct
GLNAAVHLH

SEQ ID NO: 24894 - protein, 9 aa, synthetic construct
GLNAAVHLK

SEQ ID NO: 24895 - protein, 9 aa, synthetic construct
GLNAAVHLF

SEQ ID NO: 24896 - protein, 9 aa, synthetic construct
GLNAAVHVR

SEQ ID NO: 24897 - protein, 9 aa, synthetic construct
GLNAAVRLY

SEQ ID NO: 24898 - protein, 9 aa, synthetic construct
GLNAAVRLH

SEQ ID NO: 24899 - protein, 9 aa, synthetic construct
GLNAAVRVF

SEQ ID NO: 24900 - protein, 9 aa, synthetic construct
PLQAVARVH

SEQ ID NO: 24901 - protein, 9 aa, synthetic construct
GLNAAVKLY

SEQ ID NO: 24902 - protein, 9 aa, synthetic construct
GLNAAVKLF

SEQ ID NO: 24903 - protein, 9 aa, synthetic construct
GLNAAVKVH

SEQ ID NO: 24904 - protein, 9 aa, synthetic construct
GLNAAVKVF

SEQ ID NO: 24905 - protein, 9 aa, synthetic construct
GLNAALHLY

SEQ ID NO: 24906 - protein, 9 aa, synthetic construct
GLNAALHLH

SEQ ID NO: 24907 - protein, 9 aa, synthetic construct
GLNAALHLK

SEQ ID NO: 24908 - protein, 9 aa, synthetic construct
GLNAALHVR

SEQ ID NO: 24909 - protein, 9 aa, synthetic construct
GLNAALHVK

SEQ ID NO: 24910 - protein, 9 aa, synthetic construct
GLNAALKLR

SEQ ID NO: 24911 - protein, 9 aa, synthetic construct
GLNAALKLF

SEQ ID NO: 24912 - protein, 9 aa, synthetic construct
GLNAALKVF

SEQ ID NO: 24913 - protein, 9 aa, synthetic construct
GLNAAAHLR

SEQ ID NO: 24914 - protein, 9 aa, synthetic construct
GLNAAAHLK

SEQ ID NO: 24915 - protein, 9 aa, synthetic construct
GLNAAAHVK

SEQ ID NO: 24916 - protein, 9 aa, synthetic construct
PLQAVAKLH

SEQ ID NO: 24917 - protein, 9 aa, synthetic construct
GLNAAARLY

SEQ ID NO: 24918 - protein, 9 aa, synthetic construct
GLNAAARLH

SEQ ID NO: 24919 - protein, 9 aa, synthetic construct
GLNAAARLF

SEQ ID NO: 24920 - protein, 9 aa, synthetic construct
GLNAAARVY

SEQ ID NO: 24921 - protein, 9 aa, synthetic construct
GLNAAARVR

SEQ ID NO: 24922 - protein, 9 aa, synthetic construct
GLNAAARVH

SEQ ID NO: 24923 - protein, 9 aa, synthetic construct
GLNAAAKLF

SEQ ID NO: 24924 - protein, 9 aa, synthetic construct
GLNAAAKVH

SEQ ID NO: 24925 - protein, 9 aa, synthetic construct
GLNAAAKVF

SEQ ID NO: 24926 - protein, 9 aa, synthetic construct
PLQAVAKLF

SEQ ID NO: 24927 - protein, 9 aa, synthetic construct
GLNAAIHLK

SEQ ID NO: 24928 - protein, 9 aa, synthetic construct
GLNAAIHVR

SEQ ID NO: 24929 - protein, 9 aa, synthetic construct
GLNAAIHVH

SEQ ID NO: 24930 - protein, 9 aa, synthetic construct
GLNAAIHVF

SEQ ID NO: 24931 - protein, 9 aa, synthetic construct
PLQAVAKVY

SEQ ID NO: 24932 - protein, 9 aa, synthetic construct
GLNAAIRLF

SEQ ID NO: 24933 - protein, 9 aa, synthetic construct
GLNAAIRVH

SEQ ID NO: 24934 - protein, 9 aa, synthetic construct
GLNAAIRVF

SEQ ID NO: 24935 - protein, 9 aa, synthetic construct
PLQAVAKVR

SEQ ID NO: 24936 - protein, 9 aa, synthetic construct
GLNAAIKLH

SEQ ID NO: 24937 - protein, 9 aa, synthetic construct
GLNAAIKLK

SEQ ID NO: 24938 - protein, 9 aa, synthetic construct
GLNAAIKLF

SEQ ID NO: 24939 - protein, 9 aa, synthetic construct
GLNAAIKVY

SEQ ID NO: 24940 - protein, 9 aa, synthetic construct
GLNAAIKVR

SEQ ID NO: 24941 - protein, 9 aa, synthetic construct
GLNAAIKVH

SEQ ID NO: 24942 - protein, 9 aa, synthetic construct
PLQAVAKVH

SEQ ID NO: 24943 - protein, 9 aa, synthetic construct
GLNAAGHLY

SEQ ID NO: 24944 - protein, 9 aa, synthetic construct
GLNAAGHLK

SEQ ID NO: 24945 - protein, 9 aa, synthetic construct
GLNAAGHLF

SEQ ID NO: 24946 - protein, 9 aa, synthetic construct
GLNAAGHVY

SEQ ID NO: 24947 - protein, 9 aa, synthetic construct
GLNAAGHVH

SEQ ID NO: 24948 - protein, 9 aa, synthetic construct
GLNAAGHVK

SEQ ID NO: 24949 - protein, 9 aa, synthetic construct
GLNAAGHVF

SEQ ID NO: 24950 - protein, 9 aa, synthetic construct
GLNAAGRLY

SEQ ID NO: 24951 - protein, 9 aa, synthetic construct
GLNAAGRLK

SEQ ID NO: 24952 - protein, 9 aa, synthetic construct
GLNAAGRVF

SEQ ID NO: 24953 - protein, 9 aa, synthetic construct
PLQAVAKVF

SEQ ID NO: 24954 - protein, 9 aa, synthetic construct
GLNAAGKVY

SEQ ID NO: 24955 - protein, 9 aa, synthetic construct
GLNAAGKVH

SEQ ID NO: 24956 - protein, 9 aa, synthetic construct
GLNATVHLH

SEQ ID NO: 24957 - protein, 9 aa, synthetic construct
GLNATVHVY

SEQ ID NO: 24958 - protein, 9 aa, synthetic construct
GLNATVHVR

SEQ ID NO: 24959 - protein, 9 aa, synthetic construct
GLNATVHVK

SEQ ID NO: 24960 - protein, 9 aa, synthetic construct
GLNATVHVF

SEQ ID NO: 24961 - protein, 9 aa, synthetic construct
PLQAVIHLR

SEQ ID NO: 24962 - protein, 9 aa, synthetic construct
GLNATVRLF

SEQ ID NO: 24963 - protein, 9 aa, synthetic construct
GLNATVRVY

SEQ ID NO: 24964 - protein, 9 aa, synthetic construct
GLNATVRVH

SEQ ID NO: 24965 - protein, 9 aa, synthetic construct
PLQAVIHLH

SEQ ID NO: 24966 - protein, 9 aa, synthetic construct
GLNATVKLR

SEQ ID NO: 24967 - protein, 9 aa, synthetic construct
GLNATVKLH

SEQ ID NO: 24968 - protein, 9 aa, synthetic construct
GLNATVKVY

SEQ ID NO: 24969 - protein, 9 aa, synthetic construct
GLNATVKVH

SEQ ID NO: 24970 - protein, 9 aa, synthetic construct
GLNATVKVF

SEQ ID NO: 24971 - protein, 9 aa, synthetic construct
PLQAVIHLK

SEQ ID NO: 24972 - protein, 9 aa, synthetic construct
PLQAVIHLF

SEQ ID NO: 24973 - protein, 9 aa, synthetic construct
PLQAVIHVY

SEQ ID NO: 24974 - protein, 9 aa, synthetic construct
GLNATLKLY

SEQ ID NO: 24975 - protein, 9 aa, synthetic construct
GLNATLKLH

SEQ ID NO: 24976 - protein, 9 aa, synthetic construct
GLNATLKLF

SEQ ID NO: 24977 - protein, 9 aa, synthetic construct
PLQAVIHVR

SEQ ID NO: 24978 - protein, 9 aa, synthetic construct
GLNATAHLY

SEQ ID NO: 24979 - protein, 9 aa, synthetic construct
GLNATAHLR

SEQ ID NO: 24980 - protein, 9 aa, synthetic construct
GLNATAHLF

SEQ ID NO: 24981 - protein, 9 aa, synthetic construct
GLNATAHVF

SEQ ID NO: 24982 - protein, 9 aa, synthetic construct
PLQAVIHVH

SEQ ID NO: 24983 - protein, 9 aa, synthetic construct
GLNATARLF

SEQ ID NO: 24984 - protein, 9 aa, synthetic construct
GLNATARVH

SEQ ID NO: 24985 - protein, 9 aa, synthetic construct
PLQAVIHVK

SEQ ID NO: 24986 - protein, 9 aa, synthetic construct
GLNATAKLR

SEQ ID NO: 24987 - protein, 9 aa, synthetic construct
GLNATAKLK

SEQ ID NO: 24988 - protein, 9 aa, synthetic construct
GLNATAKLF

SEQ ID NO: 24989 - protein, 9 aa, synthetic construct
GLNATAKVY

SEQ ID NO: 24990 - protein, 9 aa, synthetic construct
GLNATAKVH

SEQ ID NO: 24991 - protein, 9 aa, synthetic construct
GLNATAKVF

SEQ ID NO: 24992 - protein, 9 aa, synthetic construct
GLNATIHLY

SEQ ID NO: 24993 - protein, 9 aa, synthetic construct
GLNATIHLR

SEQ ID NO: 24994 - protein, 9 aa, synthetic construct
GLNATIHVY

SEQ ID NO: 24995 - protein, 9 aa, synthetic construct
GLNATIHVF

SEQ ID NO: 24996 - protein, 9 aa, synthetic construct
PLQAVIRLY

SEQ ID NO: 24997 - protein, 9 aa, synthetic construct
GLNATIRLY

SEQ ID NO: 24998 - protein, 9 aa, synthetic construct
GLNATIRLH

SEQ ID NO: 24999 - protein, 9 aa, synthetic construct
GLNATIRLF

SEQ ID NO: 25000 - protein, 9 aa, synthetic construct
GLNATIRVY

SEQ ID NO: 25001 - protein, 9 aa, synthetic construct
GLNATIRVH

SEQ ID NO: 25002 - protein, 9 aa, synthetic construct
GLNATIRVF

SEQ ID NO: 25003 - protein, 9 aa, synthetic construct
GLNATIKLY

SEQ ID NO: 25004 - protein, 9 aa, synthetic construct
GLNATIKLH

SEQ ID NO: 25005 - protein, 9 aa, synthetic construct
GLNATIKLF

SEQ ID NO: 25006 - protein, 9 aa, synthetic construct
GLNATIKVH

SEQ ID NO: 25007 - protein, 9 aa, synthetic construct
GLNATIKVF

SEQ ID NO: 25008 - protein, 9 aa, synthetic construct
GLNATGHLY

SEQ ID NO: 25009 - protein, 9 aa, synthetic construct
GLNATGHLR

SEQ ID NO: 25010 - protein, 9 aa, synthetic construct
GLNATGHLH

SEQ ID NO: 25011 - protein, 9 aa, synthetic construct
GLNATGHLK

SEQ ID NO: 25012 - protein, 9 aa, synthetic construct
GLNATGHVR

SEQ ID NO: 25013 - protein, 9 aa, synthetic construct
GLNATGRLH

SEQ ID NO: 25014 - protein, 9 aa, synthetic construct
GLNATGRLF

SEQ ID NO: 25015 - protein, 9 aa, synthetic construct
GLNATGRVY

SEQ ID NO: 25016 - protein, 9 aa, synthetic construct
GLNATGRVH

SEQ ID NO: 25017 - protein, 9 aa, synthetic construct
GLNATGRVK

SEQ ID NO: 25018 - protein, 9 aa, synthetic construct
GLNATGKLY

SEQ ID NO: 25019 - protein, 9 aa, synthetic construct
GLNATGKLH

SEQ ID NO: 25020 - protein, 9 aa, synthetic construct
GLNATGKLF

SEQ ID NO: 25021 - protein, 9 aa, synthetic construct
GLNATGKVY

SEQ ID NO: 25022 - protein, 9 aa, synthetic construct
GLNATGKVF

SEQ ID NO: 25023 - protein, 9 aa, synthetic construct
GLNASVHLY

SEQ ID NO: 25024 - protein, 9 aa, synthetic construct
GLNASVHLH

SEQ ID NO: 25025 - protein, 9 aa, synthetic construct
GLNASVHLK

SEQ ID NO: 25026 - protein, 9 aa, synthetic construct
GLNASVHVY

SEQ ID NO: 25027 - protein, 9 aa, synthetic construct
GLNASVHVR

SEQ ID NO: 25028 - protein, 9 aa, synthetic construct
GLNASVHVK

SEQ ID NO: 25029 - protein, 9 aa, synthetic construct
GLNASVHVF

SEQ ID NO: 25030 - protein, 9 aa, synthetic construct
GLNASVRLY

SEQ ID NO: 25031 - protein, 9 aa, synthetic construct
GLNASVRLH

SEQ ID NO: 25032 - protein, 9 aa, synthetic construct
GLNASVRLF

SEQ ID NO: 25033 - protein, 9 aa, synthetic construct
GLNASVRVY

SEQ ID NO: 25034 - protein, 9 aa, synthetic construct
GLNASVRVH

SEQ ID NO: 25035 - protein, 9 aa, synthetic construct
GLNASVKLH

SEQ ID NO: 25036 - protein, 9 aa, synthetic construct
GLNASVKVK

SEQ ID NO: 25037 - protein, 9 aa, synthetic construct
GLNASVKVF

SEQ ID NO: 25038 - protein, 9 aa, synthetic construct
GLNASLHVY

SEQ ID NO: 25039 - protein, 9 aa, synthetic construct
GLNASLHVR

SEQ ID NO: 25040 - protein, 9 aa, synthetic construct
GLNASLHVK

SEQ ID NO: 25041 - protein, 9 aa, synthetic construct
GLNASLRLY

SEQ ID NO: 25042 - protein, 9 aa, synthetic construct
GLNASLRLH

SEQ ID NO: 25043 - protein, 9 aa, synthetic construct
GLNASLRVH

SEQ ID NO: 25044 - protein, 9 aa, synthetic construct
GLNASLRVF

SEQ ID NO: 25045 - protein, 9 aa, synthetic construct
PLQAVIKLY

SEQ ID NO: 25046 - protein, 9 aa, synthetic construct
GLNASLKLY

SEQ ID NO: 25047 - protein, 9 aa, synthetic construct
GLNASLKLH

SEQ ID NO: 25048 - protein, 9 aa, synthetic construct
GLNASLKLF

SEQ ID NO: 25049 - protein, 9 aa, synthetic construct
GLNASLKVY

SEQ ID NO: 25050 - protein, 9 aa, synthetic construct
GLNASLKVH

SEQ ID NO: 25051 - protein, 9 aa, synthetic construct
GLNASAHLY

SEQ ID NO: 25052 - protein, 9 aa, synthetic construct
GLNASAHLK

SEQ ID NO: 25053 - protein, 9 aa, synthetic construct
GLNASAHLF

SEQ ID NO: 25054 - protein, 9 aa, synthetic construct
GLNASAHVY

SEQ ID NO: 25055 - protein, 9 aa, synthetic construct
GLNASAHVR

SEQ ID NO: 25056 - protein, 9 aa, synthetic construct
PLQAVIKLH

SEQ ID NO: 25057 - protein, 9 aa, synthetic construct
GLNASARLF

SEQ ID NO: 25058 - protein, 9 aa, synthetic construct
GLNASARVY

SEQ ID NO: 25059 - protein, 9 aa, synthetic construct
GLNASAKLY

SEQ ID NO: 25060 - protein, 9 aa, synthetic construct
GLNASAKLR

SEQ ID NO: 25061 - protein, 9 aa, synthetic construct
GLNASAKLH

SEQ ID NO: 25062 - protein, 9 aa, synthetic construct
GLNASAKLF

SEQ ID NO: 25063 - protein, 9 aa, synthetic construct
GLNASAKVF

SEQ ID NO: 25064 - protein, 9 aa, synthetic construct
PLQAVIKLF

SEQ ID NO: 25065 - protein, 9 aa, synthetic construct
GLNASIRLK

SEQ ID NO: 25066 - protein, 9 aa, synthetic construct
GLNASIKVH

SEQ ID NO: 25067 - protein, 9 aa, synthetic construct
GLNASGHLY

SEQ ID NO: 25068 - protein, 9 aa, synthetic construct
GLNASGHLR

SEQ ID NO: 25069 - protein, 9 aa, synthetic construct
GLNASGHLK

SEQ ID NO: 25070 - protein, 9 aa, synthetic construct
GLNASGHLF

SEQ ID NO: 25071 - protein, 9 aa, synthetic construct
GLNASGHVY

SEQ ID NO: 25072 - protein, 9 aa, synthetic construct
GLNASGHVH

SEQ ID NO: 25073 - protein, 9 aa, synthetic construct
GLNASGHVK

SEQ ID NO: 25074 - protein, 9 aa, synthetic construct
GLNASGRLY

SEQ ID NO: 25075 - protein, 9 aa, synthetic construct
GLNASGRLR

SEQ ID NO: 25076 - protein, 9 aa, synthetic construct
GLNASGRVR

SEQ ID NO: 25077 - protein, 9 aa, synthetic construct
GLNASGKLY

SEQ ID NO: 25078 - protein, 9 aa, synthetic construct
GLNASGKLF

SEQ ID NO: 25079 - protein, 9 aa, synthetic construct
GLNASGKVY

SEQ ID NO: 25080 - protein, 9 aa, synthetic construct
PLQAVGHLY

SEQ ID NO: 25081 - protein, 9 aa, synthetic construct
GLNAVVHLY

SEQ ID NO: 25082 - protein, 9 aa, synthetic construct
GLNAVVHLH

SEQ ID NO: 25083 - protein, 9 aa, synthetic construct
GLNAVVHVF

SEQ ID NO: 25084 - protein, 9 aa, synthetic construct
PLQAVGHLR

SEQ ID NO: 25085 - protein, 9 aa, synthetic construct
GLNAVVRVH

SEQ ID NO: 25086 - protein, 9 aa, synthetic construct
PLQAVGHLH

SEQ ID NO: 25087 - protein, 9 aa, synthetic construct
GLNAVVKLY

SEQ ID NO: 25088 - protein, 9 aa, synthetic construct
PLQAVGHLK

SEQ ID NO: 25089 - protein, 9 aa, synthetic construct
GLNAVLHLY

SEQ ID NO: 25090 - protein, 9 aa, synthetic construct
GLNAVLHLH

SEQ ID NO: 25091 - protein, 9 aa, synthetic construct
GLNAVLHVF

SEQ ID NO: 25092 - protein, 9 aa, synthetic construct
GLNAVLRLF

SEQ ID NO: 25093 - protein, 9 aa, synthetic construct
PLQAVGHVY

SEQ ID NO: 25094 - protein, 9 aa, synthetic construct
GLNAVLKLH

SEQ ID NO: 25095 - protein, 9 aa, synthetic construct
PLQAVGHVR

SEQ ID NO: 25096 - protein, 9 aa, synthetic construct
GLNAVAKLH

SEQ ID NO: 25097 - protein, 9 aa, synthetic construct
GLNAVAKVR

SEQ ID NO: 25098 - protein, 9 aa, synthetic construct
GLNAVAKVH

SEQ ID NO: 25099 - protein, 9 aa, synthetic construct
PLQAVGHVF

SEQ ID NO: 25100 - protein, 9 aa, synthetic construct
GLNAVIHLR

SEQ ID NO: 25101 - protein, 9 aa, synthetic construct
GLNAVIHLH

SEQ ID NO: 25102 - protein, 9 aa, synthetic construct
GLNAVIHLK

SEQ ID NO: 25103 - protein, 9 aa, synthetic construct
GLNAVIHVY

SEQ ID NO: 25104 - protein, 9 aa, synthetic construct
GLNAVIHVR

SEQ ID NO: 25105 - protein, 9 aa, synthetic construct
GLNAVIHVH

SEQ ID NO: 25106 - protein, 9 aa, synthetic construct
PLQAVGRLH

SEQ ID NO: 25107 - protein, 9 aa, synthetic construct
GLNAVGHLR

SEQ ID NO: 25108 - protein, 9 aa, synthetic construct
GLNAVGHLH

SEQ ID NO: 25109 - protein, 9 aa, synthetic construct
GLNAVGHVK

SEQ ID NO: 25110 - protein, 9 aa, synthetic construct
GLNAVGHVF

SEQ ID NO: 25111 - protein, 9 aa, synthetic construct
GLNAVGRVY

SEQ ID NO: 25112 - protein, 9 aa, synthetic construct
GLNAVGRVH

SEQ ID NO: 25113 - protein, 9 aa, synthetic construct
GLNAVGRVF

SEQ ID NO: 25114 - protein, 9 aa, synthetic construct
PLQAVGRLF

SEQ ID NO: 25115 - protein, 9 aa, synthetic construct
GLNAVGKLY

SEQ ID NO: 25116 - protein, 9 aa, synthetic construct
GLNAVGKLR

SEQ ID NO: 25117 - protein, 9 aa, synthetic construct
GLNAVGKLF

SEQ ID NO: 25118 - protein, 9 aa, synthetic construct
GLNAVGKVY

SEQ ID NO: 25119 - protein, 9 aa, synthetic construct
GLNAVGKVR

SEQ ID NO: 25120 - protein, 9 aa, synthetic construct
GLNAVGKVF

SEQ ID NO: 25121 - protein, 9 aa, synthetic construct
PLQAVGRVY

SEQ ID NO: 25122 - protein, 9 aa, synthetic construct
GLNAGVHVY

SEQ ID NO: 25123 - protein, 9 aa, synthetic construct
GLNAGVHVK

SEQ ID NO: 25124 - protein, 9 aa, synthetic construct
GLNAGVHVF

SEQ ID NO: 25125 - protein, 9 aa, synthetic construct
GLNAGVRLY

SEQ ID NO: 25126 - protein, 9 aa, synthetic construct
GLNAGVRLH

SEQ ID NO: 25127 - protein, 9 aa, synthetic construct
GLNAGVRVY

SEQ ID NO: 25128 - protein, 9 aa, synthetic construct
GLNAGVRVR

SEQ ID NO: 25129 - protein, 9 aa, synthetic construct
GLNAGVRVK

SEQ ID NO: 25130 - protein, 9 aa, synthetic construct
GLNAGVRVF

SEQ ID NO: 25131 - protein, 9 aa, synthetic construct
PLQAVGRVH

SEQ ID NO: 25132 - protein, 9 aa, synthetic construct
GLNAGVKLH

SEQ ID NO: 25133 - protein, 9 aa, synthetic construct
GLNAGVKVK

SEQ ID NO: 25134 - protein, 9 aa, synthetic construct
GLNAGVKVF

SEQ ID NO: 25135 - protein, 9 aa, synthetic construct
PLQAVGRVF

SEQ ID NO: 25136 - protein, 9 aa, synthetic construct
GLNAGLRVH

SEQ ID NO: 25137 - protein, 9 aa, synthetic construct
GLNAGLKVF

SEQ ID NO: 25138 - protein, 9 aa, synthetic construct
GLNAGAHLY

SEQ ID NO: 25139 - protein, 9 aa, synthetic construct
GLNAGAHLR

SEQ ID NO: 25140 - protein, 9 aa, synthetic construct
GLNAGAHLH

SEQ ID NO: 25141 - protein, 9 aa, synthetic construct
GLNAGAHLF

SEQ ID NO: 25142 - protein, 9 aa, synthetic construct
GLNAGAHVK

SEQ ID NO: 25143 - protein, 9 aa, synthetic construct
GLNAGARLY

SEQ ID NO: 25144 - protein, 9 aa, synthetic construct
GLNAGARLF

SEQ ID NO: 25145 - protein, 9 aa, synthetic construct
GLNAGARVR

SEQ ID NO: 25146 - protein, 9 aa, synthetic construct
GLNAGARVK

SEQ ID NO: 25147 - protein, 9 aa, synthetic construct
PLQAVGKLK

SEQ ID NO: 25148 - protein, 9 aa, synthetic construct
GLNAGAKLY

SEQ ID NO: 25149 - protein, 9 aa, synthetic construct
GLNAGAKLH

SEQ ID NO: 25150 - protein, 9 aa, synthetic construct
GLNAGAKLF

SEQ ID NO: 25151 - protein, 9 aa, synthetic construct
GLNAGAKVY

SEQ ID NO: 25152 - protein, 9 aa, synthetic construct
GLNAGAKVH

SEQ ID NO: 25153 - protein, 9 aa, synthetic construct
GLNAGAKVF

SEQ ID NO: 25154 - protein, 9 aa, synthetic construct
PLQAVGKLF

SEQ ID NO: 25155 - protein, 9 aa, synthetic construct
PLQAVGKVY

SEQ ID NO: 25156 - protein, 9 aa, synthetic construct
GLNAGIRVH

SEQ ID NO: 25157 - protein, 9 aa, synthetic construct
GLNAGIKLK

SEQ ID NO: 25158 - protein, 9 aa, synthetic construct
GLNAGIKLF

SEQ ID NO: 25159 - protein, 9 aa, synthetic construct
GLNAGIKVY

SEQ ID NO: 25160 - protein, 9 aa, synthetic construct
GLNAGIKVH

SEQ ID NO: 25161 - protein, 9 aa, synthetic construct
GLNAGIKVF

SEQ ID NO: 25162 - protein, 9 aa, synthetic construct
PLQAVGKVH

SEQ ID NO: 25163 - protein, 9 aa, synthetic construct
GLNAGGHLY

SEQ ID NO: 25164 - protein, 9 aa, synthetic construct
GLNAGGHLR

SEQ ID NO: 25165 - protein, 9 aa, synthetic construct
GLNAGGHLH

SEQ ID NO: 25166 - protein, 9 aa, synthetic construct
GLNAGGHLK

SEQ ID NO: 25167 - protein, 9 aa, synthetic construct
GLNAGGHLF

SEQ ID NO: 25168 - protein, 9 aa, synthetic construct
GLNAGGHVY

SEQ ID NO: 25169 - protein, 9 aa, synthetic construct
GLNAGGHVK

SEQ ID NO: 25170 - protein, 9 aa, synthetic construct
GLNAGGHVF

SEQ ID NO: 25171 - protein, 9 aa, synthetic construct
GLNAGGRLY

SEQ ID NO: 25172 - protein, 9 aa, synthetic construct
GLNAGGRLR

SEQ ID NO: 25173 - protein, 9 aa, synthetic construct
GLNAGGRLH

SEQ ID NO: 25174 - protein, 9 aa, synthetic construct
GLNAGGRLK

SEQ ID NO: 25175 - protein, 9 aa, synthetic construct
GLNAGGRVY

SEQ ID NO: 25176 - protein, 9 aa, synthetic construct
GLNAGGRVR

SEQ ID NO: 25177 - protein, 9 aa, synthetic construct
GLNAGGRVH

SEQ ID NO: 25178 - protein, 9 aa, synthetic construct
GLNAGGRVK

SEQ ID NO: 25179 - protein, 9 aa, synthetic construct
GLNAGGRVF

SEQ ID NO: 25180 - protein, 9 aa, synthetic construct
GLNAGGKLY

SEQ ID NO: 25181 - protein, 9 aa, synthetic construct
GLNAGGKLH

SEQ ID NO: 25182 - protein, 9 aa, synthetic construct
GLNAGGKLF

SEQ ID NO: 25183 - protein, 9 aa, synthetic construct
GLNAGGKVY

SEQ ID NO: 25184 - protein, 9 aa, synthetic construct
GLNAGGKVR

SEQ ID NO: 25185 - protein, 9 aa, synthetic construct
GLNAGGKVH

SEQ ID NO: 25186 - protein, 9 aa, synthetic construct
GLNAGGKVF

SEQ ID NO: 25187 - protein, 9 aa, synthetic construct
GLQGAVHLR

SEQ ID NO: 25188 - protein, 9 aa, synthetic construct
GLQGAVHLK

SEQ ID NO: 25189 - protein, 9 aa, synthetic construct
GLQGAVHLF

SEQ ID NO: 25190 - protein, 9 aa, synthetic construct
GLQGAVHVK

SEQ ID NO: 25191 - protein, 9 aa, synthetic construct
GLQGAVHVF

SEQ ID NO: 25192 - protein, 9 aa, synthetic construct
PLQAGVHLR

SEQ ID NO: 25193 - protein, 9 aa, synthetic construct
GLQGAVRLY

SEQ ID NO: 25194 - protein, 9 aa, synthetic construct
GLQGAVRLH

SEQ ID NO: 25195 - protein, 9 aa, synthetic construct
GLQGAVRLF

SEQ ID NO: 25196 - protein, 9 aa, synthetic construct
GLQGAVRVY

SEQ ID NO: 25197 - protein, 9 aa, synthetic construct
GLQGAVRVH

SEQ ID NO: 25198 - protein, 9 aa, synthetic construct
GLQGAVKVH

SEQ ID NO: 25199 - protein, 9 aa, synthetic construct
PLQAGVHLK

SEQ ID NO: 25200 - protein, 9 aa, synthetic construct
GLQGALHVR

SEQ ID NO: 25201 - protein, 9 aa, synthetic construct
GLQGALHVK

SEQ ID NO: 25202 - protein, 9 aa, synthetic construct
PLQAGVHVR

SEQ ID NO: 25203 - protein, 9 aa, synthetic construct
GLQGAAHLR

SEQ ID NO: 25204 - protein, 9 aa, synthetic construct
GLQGAAHVR

SEQ ID NO: 25205 - protein, 9 aa, synthetic construct
GLQGAARLY

SEQ ID NO: 25206 - protein, 9 aa, synthetic construct
GLQGAAKLH

SEQ ID NO: 25207 - protein, 9 aa, synthetic construct
GLQGAAKLF

SEQ ID NO: 25208 - protein, 9 aa, synthetic construct
PLQAGVHVF

SEQ ID NO: 25209 - protein, 9 aa, synthetic construct
GLQGAIHLY

SEQ ID NO: 25210 - protein, 9 aa, synthetic construct
GLQGAIHLR

SEQ ID NO: 25211 - protein, 9 aa, synthetic construct
GLQGAIHVR

SEQ ID NO: 25212 - protein, 9 aa, synthetic construct
PLQAGVRLY

SEQ ID NO: 25213 - protein, 9 aa, synthetic construct
GLQGAIRVY

SEQ ID NO: 25214 - protein, 9 aa, synthetic construct
GLQGAIKVH

SEQ ID NO: 25215 - protein, 9 aa, synthetic construct
GLQGAIKVK

SEQ ID NO: 25216 - protein, 9 aa, synthetic construct
PLQAGVRLH

SEQ ID NO: 25217 - protein, 9 aa, synthetic construct
GLQGAGHLR

SEQ ID NO: 25218 - protein, 9 aa, synthetic construct
GLQGAGHVY

SEQ ID NO: 25219 - protein, 9 aa, synthetic construct
GLQGAGHVR

SEQ ID NO: 25220 - protein, 9 aa, synthetic construct
GLQGAGHVK

SEQ ID NO: 25221 - protein, 9 aa, synthetic construct
GLQGAGRLY

SEQ ID NO: 25222 - protein, 9 aa, synthetic construct
GLQGAGRVY

SEQ ID NO: 25223 - protein, 9 aa, synthetic construct
GLQGAGRVH

SEQ ID NO: 25224 - protein, 9 aa, synthetic construct
GLQGAGRVK

SEQ ID NO: 25225 - protein, 9 aa, synthetic construct
GLQGAGRVF

SEQ ID NO: 25226 - protein, 9 aa, synthetic construct
PLQAGVRLF

SEQ ID NO: 25227 - protein, 9 aa, synthetic construct
GLQGAGKLY

SEQ ID NO: 25228 - protein, 9 aa, synthetic construct
GLQGAGKVY

SEQ ID NO: 25229 - protein, 9 aa, synthetic construct
GLQGTVHVR

SEQ ID NO: 25230 - protein, 9 aa, synthetic construct
PLQAGVRVR

SEQ ID NO: 25231 - protein, 9 aa, synthetic construct
GLQGTVRVF

SEQ ID NO: 25232 - protein, 9 aa, synthetic construct
GLQGTVKVH

SEQ ID NO: 25233 - protein, 9 aa, synthetic construct
PLQAGVRVK

SEQ ID NO: 25234 - protein, 9 aa, synthetic construct
GLQGTLHVK

SEQ ID NO: 25235 - protein, 9 aa, synthetic construct
GLQGTLRLY

SEQ ID NO: 25236 - protein, 9 aa, synthetic construct
GLQGTLRLH

SEQ ID NO: 25237 - protein, 9 aa, synthetic construct
GLQGTARLF

SEQ ID NO: 25238 - protein, 9 aa, synthetic construct
GLQGTARVY

SEQ ID NO: 25239 - protein, 9 aa, synthetic construct
GLQGTARVH

SEQ ID NO: 25240 - protein, 9 aa, synthetic construct
GLQGTAKLF

SEQ ID NO: 25241 - protein, 9 aa, synthetic construct
GLQGTIHLY

SEQ ID NO: 25242 - protein, 9 aa, synthetic construct
GLQGTIHLR

SEQ ID NO: 25243 - protein, 9 aa, synthetic construct
GLQGTIHLF

SEQ ID NO: 25244 - protein, 9 aa, synthetic construct
GLQGTIHVY

SEQ ID NO: 25245 - protein, 9 aa, synthetic construct
GLQGTIHVR

SEQ ID NO: 25246 - protein, 9 aa, synthetic construct
GLQGTIRLF

SEQ ID NO: 25247 - protein, 9 aa, synthetic construct
GLQGTIKLY

SEQ ID NO: 25248 - protein, 9 aa, synthetic construct
GLQGTIKLF

SEQ ID NO: 25249 - protein, 9 aa, synthetic construct
GLQGTIKVF

SEQ ID NO: 25250 - protein, 9 aa, synthetic construct
GLQGTGHLR

SEQ ID NO: 25251 - protein, 9 aa, synthetic construct
GLQGTGHVR

SEQ ID NO: 25252 - protein, 9 aa, synthetic construct
PLQAGVKVK

SEQ ID NO: 25253 - protein, 9 aa, synthetic construct
GLQGTGRLY

SEQ ID NO: 25254 - protein, 9 aa, synthetic construct
GLQGTGRVY

SEQ ID NO: 25255 - protein, 9 aa, synthetic construct
GLQGTGRVF

SEQ ID NO: 25256 - protein, 9 aa, synthetic construct
GLQGSVHLR

SEQ ID NO: 25257 - protein, 9 aa, synthetic construct
GLQGSVHVR

SEQ ID NO: 25258 - protein, 9 aa, synthetic construct
GLQGSVHVK

SEQ ID NO: 25259 - protein, 9 aa, synthetic construct
GLQGSVRLY

SEQ ID NO: 25260 - protein, 9 aa, synthetic construct
GLQGSVRLH

SEQ ID NO: 25261 - protein, 9 aa, synthetic construct
GLQGSVRLF

SEQ ID NO: 25262 - protein, 9 aa, synthetic construct
GLQGSVKVY

SEQ ID NO: 25263 - protein, 9 aa, synthetic construct
GLQGSVKVH

SEQ ID NO: 25264 - protein, 9 aa, synthetic construct
GLQGSLHLR

SEQ ID NO: 25265 - protein, 9 aa, synthetic construct
GLQGSLHVY

SEQ ID NO: 25266 - protein, 9 aa, synthetic construct
GLQGSLHVR

SEQ ID NO: 25267 - protein, 9 aa, synthetic construct
GLQGSLRVY

SEQ ID NO: 25268 - protein, 9 aa, synthetic construct
PLQAGLHVY

SEQ ID NO: 25269 - protein, 9 aa, synthetic construct
GLQGSLKVH

SEQ ID NO: 25270 - protein, 9 aa, synthetic construct
PLQAGLHVR

SEQ ID NO: 25271 - protein, 9 aa, synthetic construct
GLQGSAHLR

SEQ ID NO: 25272 - protein, 9 aa, synthetic construct
GLQGSAHLK

SEQ ID NO: 25273 - protein, 9 aa, synthetic construct
GLQGSAHLF

SEQ ID NO: 25274 - protein, 9 aa, synthetic construct
GLQGSAHVY

SEQ ID NO: 25275 - protein, 9 aa, synthetic construct
GLQGSAHVF

SEQ ID NO: 25276 - protein, 9 aa, synthetic construct
GLQGSARLY

SEQ ID NO: 25277 - protein, 9 aa, synthetic construct
GLQGSAKLF

SEQ ID NO: 25278 - protein, 9 aa, synthetic construct
GLQGSIHLR

SEQ ID NO: 25279 - protein, 9 aa, synthetic construct
GLQGSIHLH

SEQ ID NO: 25280 - protein, 9 aa, synthetic construct
GLQGSIHLK

SEQ ID NO: 25281 - protein, 9 aa, synthetic construct
GLQGSIHVH

SEQ ID NO: 25282 - protein, 9 aa, synthetic construct
GLQGSIHVK

SEQ ID NO: 25283 - protein, 9 aa, synthetic construct
GLQGSIRLY

SEQ ID NO: 25284 - protein, 9 aa, synthetic construct
GLQGSIRLF

SEQ ID NO: 25285 - protein, 9 aa, synthetic construct
GLQGSIRVH

SEQ ID NO: 25286 - protein, 9 aa, synthetic construct
GLQGSIRVF

SEQ ID NO: 25287 - protein, 9 aa, synthetic construct
GLQGSIKLH

SEQ ID NO: 25288 - protein, 9 aa, synthetic construct
GLQGSIKLF

SEQ ID NO: 25289 - protein, 9 aa, synthetic construct
GLQGSIKVY

SEQ ID NO: 25290 - protein, 9 aa, synthetic construct
GLQGSIKVF

SEQ ID NO: 25291 - protein, 9 aa, synthetic construct
GLQGSGHLY

SEQ ID NO: 25292 - protein, 9 aa, synthetic construct
GLQGSGHLH

SEQ ID NO: 25293 - protein, 9 aa, synthetic construct
GLQGSGHLF

SEQ ID NO: 25294 - protein, 9 aa, synthetic construct
GLQGSGHVH

SEQ ID NO: 25295 - protein, 9 aa, synthetic construct
GLQGSGHVK

SEQ ID NO: 25296 - protein, 9 aa, synthetic construct
GLQGSGRLY

SEQ ID NO: 25297 - protein, 9 aa, synthetic construct
GLQGSGRLF

SEQ ID NO: 25298 - protein, 9 aa, synthetic construct
GLQGSGKLY

SEQ ID NO: 25299 - protein, 9 aa, synthetic construct
GLQGVVHLY

SEQ ID NO: 25300 - protein, 9 aa, synthetic construct
GLQGVVHLH

SEQ ID NO: 25301 - protein, 9 aa, synthetic construct
GLQGVVHLK

SEQ ID NO: 25302 - protein, 9 aa, synthetic construct
GLQGVVHVR

SEQ ID NO: 25303 - protein, 9 aa, synthetic construct
GLQGVVHVK

SEQ ID NO: 25304 - protein, 9 aa, synthetic construct
GLQGVVHVF

SEQ ID NO: 25305 - protein, 9 aa, synthetic construct
GLQGVVRLY

SEQ ID NO: 25306 - protein, 9 aa, synthetic construct
GLQGVVRVF

SEQ ID NO: 25307 - protein, 9 aa, synthetic construct
GLQGVVKLY

SEQ ID NO: 25308 - protein, 9 aa, synthetic construct
GLQGVVKLH

SEQ ID NO: 25309 - protein, 9 aa, synthetic construct
GLQGVVKVY

SEQ ID NO: 25310 - protein, 9 aa, synthetic construct
GLQGVVKVH

SEQ ID NO: 25311 - protein, 9 aa, synthetic construct
GLQGVLRVH

SEQ ID NO: 25312 - protein, 9 aa, synthetic construct
GLQGVLKLF

SEQ ID NO: 25313 - protein, 9 aa, synthetic construct
GLQGVLKVY

SEQ ID NO: 25314 - protein, 9 aa, synthetic construct
GLQGVLKVH

SEQ ID NO: 25315 - protein, 9 aa, synthetic construct
GLQGVLKVF

SEQ ID NO: 25316 - protein, 9 aa, synthetic construct
GLQGVAHLR

SEQ ID NO: 25317 - protein, 9 aa, synthetic construct
GLQGVAHLH

SEQ ID NO: 25318 - protein, 9 aa, synthetic construct
GLQGVAHLK

SEQ ID NO: 25319 - protein, 9 aa, synthetic construct
GLQGVAHLF

SEQ ID NO: 25320 - protein, 9 aa, synthetic construct
GLQGVAHVY

SEQ ID NO: 25321 - protein, 9 aa, synthetic construct
GLQGVAHVF

SEQ ID NO: 25322 - protein, 9 aa, synthetic construct
GLQGVARLH

SEQ ID NO: 25323 - protein, 9 aa, synthetic construct
GLQGVARVY

SEQ ID NO: 25324 - protein, 9 aa, synthetic construct
GLQGVARVH

SEQ ID NO: 25325 - protein, 9 aa, synthetic construct
GLQGVARVF

SEQ ID NO: 25326 - protein, 9 aa, synthetic construct
GLQGVAKLY

SEQ ID NO: 25327 - protein, 9 aa, synthetic construct
GLQGVAKVY

SEQ ID NO: 25328 - protein, 9 aa, synthetic construct
GLQGVAKVH

SEQ ID NO: 25329 - protein, 9 aa, synthetic construct
GLQGVAKVF

SEQ ID NO: 25330 - protein, 9 aa, synthetic construct
PLQAGLKLF

SEQ ID NO: 25331 - protein, 9 aa, synthetic construct
GLQGVIHLR

SEQ ID NO: 25332 - protein, 9 aa, synthetic construct
GLQGVIHLH

SEQ ID NO: 25333 - protein, 9 aa, synthetic construct
GLQGVIHLK

SEQ ID NO: 25334 - protein, 9 aa, synthetic construct
GLQGVIHVK

SEQ ID NO: 25335 - protein, 9 aa, synthetic construct
GLQGVIRVH

SEQ ID NO: 25336 - protein, 9 aa, synthetic construct
GLQGVIKLH

SEQ ID NO: 25337 - protein, 9 aa, synthetic construct
GLQGVIKLF

SEQ ID NO: 25338 - protein, 9 aa, synthetic construct
GLQGVIKVY

SEQ ID NO: 25339 - protein, 9 aa, synthetic construct
GLQGVIKVR

SEQ ID NO: 25340 - protein, 9 aa, synthetic construct
GLQGVIKVF

SEQ ID NO: 25341 - protein, 9 aa, synthetic construct
GLQGVGHLY

SEQ ID NO: 25342 - protein, 9 aa, synthetic construct
GLQGVGHLF

SEQ ID NO: 25343 - protein, 9 aa, synthetic construct
GLQGVGHVH

SEQ ID NO: 25344 - protein, 9 aa, synthetic construct
GLQGVGHVK

SEQ ID NO: 25345 - protein, 9 aa, synthetic construct
GLQGVGHVF

SEQ ID NO: 25346 - protein, 9 aa, synthetic construct
GLQGVGRLY

SEQ ID NO: 25347 - protein, 9 aa, synthetic construct
GLQGVGRLH

SEQ ID NO: 25348 - protein, 9 aa, synthetic construct
GLQGVGRLF

SEQ ID NO: 25349 - protein, 9 aa, synthetic construct
GLQGVGRVY

SEQ ID NO: 25350 - protein, 9 aa, synthetic construct
GLQGVGRVH

SEQ ID NO: 25351 - protein, 9 aa, synthetic construct
GLQGVGRVF

SEQ ID NO: 25352 - protein, 9 aa, synthetic construct
GLQGVGKLY

SEQ ID NO: 25353 - protein, 9 aa, synthetic construct
GLQGVGKLF

SEQ ID NO: 25354 - protein, 9 aa, synthetic construct
GLQGVGKVH

SEQ ID NO: 25355 - protein, 9 aa, synthetic construct
GLQGVGKVF

SEQ ID NO: 25356 - protein, 9 aa, synthetic construct
GLQGGVHLR

SEQ ID NO: 25357 - protein, 9 aa, synthetic construct
GLQGGVHLK

SEQ ID NO: 25358 - protein, 9 aa, synthetic construct
GLQGGVHVY

SEQ ID NO: 25359 - protein, 9 aa, synthetic construct
GLQGGVHVR

SEQ ID NO: 25360 - protein, 9 aa, synthetic construct
GLQGGVRLR

SEQ ID NO: 25361 - protein, 9 aa, synthetic construct
GLQGGVRVF

SEQ ID NO: 25362 - protein, 9 aa, synthetic construct
GLQGGVKLF

SEQ ID NO: 25363 - protein, 9 aa, synthetic construct
GLQGGLHVY

SEQ ID NO: 25364 - protein, 9 aa, synthetic construct
GLQGGLHVR

SEQ ID NO: 25365 - protein, 9 aa, synthetic construct
GLQGGLHVK

SEQ ID NO: 25366 - protein, 9 aa, synthetic construct
GLQGGLRVK

SEQ ID NO: 25367 - protein, 9 aa, synthetic construct
GLQGGLKVH

SEQ ID NO: 25368 - protein, 9 aa, synthetic construct
GLQGGLKVK

SEQ ID NO: 25369 - protein, 9 aa, synthetic construct
PLQAGAHVR

SEQ ID NO: 25370 - protein, 9 aa, synthetic construct
GLQGGAHLY

SEQ ID NO: 25371 - protein, 9 aa, synthetic construct
GLQGGAHVF

SEQ ID NO: 25372 - protein, 9 aa, synthetic construct
PLQAGAHVH

SEQ ID NO: 25373 - protein, 9 aa, synthetic construct
GLQGGARLF

SEQ ID NO: 25374 - protein, 9 aa, synthetic construct
GLQGGARVF

SEQ ID NO: 25375 - protein, 9 aa, synthetic construct
PLQAGAHVK

SEQ ID NO: 25376 - protein, 9 aa, synthetic construct
GLQGGAKLY

SEQ ID NO: 25377 - protein, 9 aa, synthetic construct
GLQGGAKVY

SEQ ID NO: 25378 - protein, 9 aa, synthetic construct
GLQGGAKVF

SEQ ID NO: 25379 - protein, 9 aa, synthetic construct
GLQGGIHLR

SEQ ID NO: 25380 - protein, 9 aa, synthetic construct
GLQGGIHVR

SEQ ID NO: 25381 - protein, 9 aa, synthetic construct
GLQGGIHVH

SEQ ID NO: 25382 - protein, 9 aa, synthetic construct
GLQGGIRLF

SEQ ID NO: 25383 - protein, 9 aa, synthetic construct
GLQGGIRVR

SEQ ID NO: 25384 - protein, 9 aa, synthetic construct
GLQGGIKLF

SEQ ID NO: 25385 - protein, 9 aa, synthetic construct
GLQGGIKVY

SEQ ID NO: 25386 - protein, 9 aa, synthetic construct
GLQGGGHLY

SEQ ID NO: 25387 - protein, 9 aa, synthetic construct
GLQGGGHLR

SEQ ID NO: 25388 - protein, 9 aa, synthetic construct
GLQGGGHVY

SEQ ID NO: 25389 - protein, 9 aa, synthetic construct
GLQGGGRLF

SEQ ID NO: 25390 - protein, 9 aa, synthetic construct
GLQGGGRVF

SEQ ID NO: 25391 - protein, 9 aa, synthetic construct
GLQGGGKVH

SEQ ID NO: 25392 - protein, 9 aa, synthetic construct
PLQAGARVY

SEQ ID NO: 25393 - protein, 9 aa, synthetic construct
GLQAAVHLY

SEQ ID NO: 25394 - protein, 9 aa, synthetic construct
GLQAAVHLK

SEQ ID NO: 25395 - protein, 9 aa, synthetic construct
GLQAAVHVR

SEQ ID NO: 25396 - protein, 9 aa, synthetic construct
GLQAAVHVH

SEQ ID NO: 25397 - protein, 9 aa, synthetic construct
GLQAAVHVK

SEQ ID NO: 25398 - protein, 9 aa, synthetic construct
GLQAAVHVF

SEQ ID NO: 25399 - protein, 9 aa, synthetic construct
GLQAAVRLY

SEQ ID NO: 25400 - protein, 9 aa, synthetic construct
GLQAAVRLH

SEQ ID NO: 25401 - protein, 9 aa, synthetic construct
GLQAAVRVY

SEQ ID NO: 25402 - protein, 9 aa, synthetic construct
GLQAAVRVH

SEQ ID NO: 25403 - protein, 9 aa, synthetic construct
GLQAAVKLY

SEQ ID NO: 25404 - protein, 9 aa, synthetic construct
GLQAAVKLH

SEQ ID NO: 25405 - protein, 9 aa, synthetic construct
GLQAAVKLF

SEQ ID NO: 25406 - protein, 9 aa, synthetic construct
GLQAAVKVH

SEQ ID NO: 25407 - protein, 9 aa, synthetic construct
GLQAAVKVF

SEQ ID NO: 25408 - protein, 9 aa, synthetic construct
GLQAALHVK

SEQ ID NO: 25409 - protein, 9 aa, synthetic construct
PLQAGARVF

SEQ ID NO: 25410 - protein, 9 aa, synthetic construct
GLQAALRLR

SEQ ID NO: 25411 - protein, 9 aa, synthetic construct
GLQAALKLR

SEQ ID NO: 25412 - protein, 9 aa, synthetic construct
GLQAAAHVK

SEQ ID NO: 25413 - protein, 9 aa, synthetic construct
GLQAAARLH

SEQ ID NO: 25414 - protein, 9 aa, synthetic construct
GLQAAARLF

SEQ ID NO: 25415 - protein, 9 aa, synthetic construct
GLQAAARVY

SEQ ID NO: 25416 - protein, 9 aa, synthetic construct
GLQAAARVR

SEQ ID NO: 25417 - protein, 9 aa, synthetic construct
GLQAAARVH

SEQ ID NO: 25418 - protein, 9 aa, synthetic construct
GLQAAAKLY

SEQ ID NO: 25419 - protein, 9 aa, synthetic construct
GLQAAAKLF

SEQ ID NO: 25420 - protein, 9 aa, synthetic construct
GLQAAAKVY

SEQ ID NO: 25421 - protein, 9 aa, synthetic construct
GLQAAAKVF

SEQ ID NO: 25422 - protein, 9 aa, synthetic construct
PLQAGAKLF

SEQ ID NO: 25423 - protein, 9 aa, synthetic construct
GLQAAIHLY

SEQ ID NO: 25424 - protein, 9 aa, synthetic construct
GLQAAIHLR

SEQ ID NO: 25425 - protein, 9 aa, synthetic construct
GLQAAIHLH

SEQ ID NO: 25426 - protein, 9 aa, synthetic construct
GLQAAIHLK

SEQ ID NO: 25427 - protein, 9 aa, synthetic construct
GLQAAIHVY

SEQ ID NO: 25428 - protein, 9 aa, synthetic construct
GLQAAIHVR

SEQ ID NO: 25429 - protein, 9 aa, synthetic construct
GLQAAIHVH

SEQ ID NO: 25430 - protein, 9 aa, synthetic construct
GLQAAIHVK

SEQ ID NO: 25431 - protein, 9 aa, synthetic construct
GLQAAIHVF

SEQ ID NO: 25432 - protein, 9 aa, synthetic construct
GLQAAIRVY

SEQ ID NO: 25433 - protein, 9 aa, synthetic construct
GLQAAIRVF

SEQ ID NO: 25434 - protein, 9 aa, synthetic construct
GLQAAIKLH

SEQ ID NO: 25435 - protein, 9 aa, synthetic construct
GLQAAIKLK

SEQ ID NO: 25436 - protein, 9 aa, synthetic construct
GLQAAIKLF

SEQ ID NO: 25437 - protein, 9 aa, synthetic construct
GLQAAIKVY

SEQ ID NO: 25438 - protein, 9 aa, synthetic construct
GLQAAIKVR

SEQ ID NO: 25439 - protein, 9 aa, synthetic construct
GLQAAIKVH

SEQ ID NO: 25440 - protein, 9 aa, synthetic construct
GLQAAIKVK

SEQ ID NO: 25441 - protein, 9 aa, synthetic construct
GLQAAIKVF

SEQ ID NO: 25442 - protein, 9 aa, synthetic construct
PLQAGAKVH

SEQ ID NO: 25443 - protein, 9 aa, synthetic construct
GLQAAGHLY

SEQ ID NO: 25444 - protein, 9 aa, synthetic construct
GLQAAGHVY

SEQ ID NO: 25445 - protein, 9 aa, synthetic construct
GLQAAGHVR

SEQ ID NO: 25446 - protein, 9 aa, synthetic construct
GLQAAGHVK

SEQ ID NO: 25447 - protein, 9 aa, synthetic construct
GLQAAGHVF

SEQ ID NO: 25448 - protein, 9 aa, synthetic construct
GLQAAGRVY

SEQ ID NO: 25449 - protein, 9 aa, synthetic construct
GLQAAGRVH

SEQ ID NO: 25450 - protein, 9 aa, synthetic construct
GLQAAGRVK

SEQ ID NO: 25451 - protein, 9 aa, synthetic construct
GLQAAGRVF

SEQ ID NO: 25452 - protein, 9 aa, synthetic construct
GLQAAGKLY

SEQ ID NO: 25453 - protein, 9 aa, synthetic construct
GLQAAGKLH

SEQ ID NO: 25454 - protein, 9 aa, synthetic construct
GLQAAGKVY

SEQ ID NO: 25455 - protein, 9 aa, synthetic construct
GLQAAGKVH

SEQ ID NO: 25456 - protein, 9 aa, synthetic construct
GLQATVHLR

SEQ ID NO: 25457 - protein, 9 aa, synthetic construct
GLQATVHLK

SEQ ID NO: 25458 - protein, 9 aa, synthetic construct
GLQATVHVR

SEQ ID NO: 25459 - protein, 9 aa, synthetic construct
PLQAGIHLR

SEQ ID NO: 25460 - protein, 9 aa, synthetic construct
PLQAGIHLH

SEQ ID NO: 25461 - protein, 9 aa, synthetic construct
GLQATVKLH

SEQ ID NO: 25462 - protein, 9 aa, synthetic construct
GLQATVKVH

SEQ ID NO: 25463 - protein, 9 aa, synthetic construct
GLQATLHVR

SEQ ID NO: 25464 - protein, 9 aa, synthetic construct
PLQAGIHLF

SEQ ID NO: 25465 - protein, 9 aa, synthetic construct
PLQAGIHVR

SEQ ID NO: 25466 - protein, 9 aa, synthetic construct
PLQAGIHVH

SEQ ID NO: 25467 - protein, 9 aa, synthetic construct
GLQATIHLR

SEQ ID NO: 25468 - protein, 9 aa, synthetic construct
GLQATIHVK

SEQ ID NO: 25469 - protein, 9 aa, synthetic construct
GLQATIRLY

SEQ ID NO: 25470 - protein, 9 aa, synthetic construct
GLQATIRVY

SEQ ID NO: 25471 - protein, 9 aa, synthetic construct
GLQATIRVF

SEQ ID NO: 25472 - protein, 9 aa, synthetic construct
GLQATGHVR

SEQ ID NO: 25473 - protein, 9 aa, synthetic construct
GLQATGRLH

SEQ ID NO: 25474 - protein, 9 aa, synthetic construct
PLQAGIRLF

SEQ ID NO: 25475 - protein, 9 aa, synthetic construct
GLQATGKLY

SEQ ID NO: 25476 - protein, 9 aa, synthetic construct
GLQATGKLH

SEQ ID NO: 25477 - protein, 9 aa, synthetic construct
GLQATGKLF

SEQ ID NO: 25478 - protein, 9 aa, synthetic construct
PLQAGIRVY

SEQ ID NO: 25479 - protein, 9 aa, synthetic construct
GLQASVHLR

SEQ ID NO: 25480 - protein, 9 aa, synthetic construct
GLQASVHVR

SEQ ID NO: 25481 - protein, 9 aa, synthetic construct
GLQASVHVK

SEQ ID NO: 25482 - protein, 9 aa, synthetic construct
GLQASVRLY

SEQ ID NO: 25483 - protein, 9 aa, synthetic construct
GLQASVKVF

SEQ ID NO: 25484 - protein, 9 aa, synthetic construct
GLQASLHLH

SEQ ID NO: 25485 - protein, 9 aa, synthetic construct
GLQASLHLK

SEQ ID NO: 25486 - protein, 9 aa, synthetic construct
GLQASLHVY

SEQ ID NO: 25487 - protein, 9 aa, synthetic construct
GLQASLHVR

SEQ ID NO: 25488 - protein, 9 aa, synthetic construct
GLQASLHVK

SEQ ID NO: 25489 - protein, 9 aa, synthetic construct
GLQASLRVF

SEQ ID NO: 25490 - protein, 9 aa, synthetic construct
PLQAGIKLY

SEQ ID NO: 25491 - protein, 9 aa, synthetic construct
GLQASLKLF

SEQ ID NO: 25492 - protein, 9 aa, synthetic construct
GLQASLKVY

SEQ ID NO: 25493 - protein, 9 aa, synthetic construct
GLQASLKVH

SEQ ID NO: 25494 - protein, 9 aa, synthetic construct
GLQASLKVF

SEQ ID NO: 25495 - protein, 9 aa, synthetic construct
GLQASAHLH

SEQ ID NO: 25496 - protein, 9 aa, synthetic construct
GLQASAHVR

SEQ ID NO: 25497 - protein, 9 aa, synthetic construct
PLQAGIKLH

SEQ ID NO: 25498 - protein, 9 aa, synthetic construct
PLQAGIKLK

SEQ ID NO: 25499 - protein, 9 aa, synthetic construct
GLQASAKVH

SEQ ID NO: 25500 - protein, 9 aa, synthetic construct
GLQASAKVF

SEQ ID NO: 25501 - protein, 9 aa, synthetic construct
PLQAGIKLF

SEQ ID NO: 25502 - protein, 9 aa, synthetic construct
GLQASIHLY

SEQ ID NO: 25503 - protein, 9 aa, synthetic construct
GLQASIHLH

SEQ ID NO: 25504 - protein, 9 aa, synthetic construct
GLQASIHLK

SEQ ID NO: 25505 - protein, 9 aa, synthetic construct
GLQASIHLF

SEQ ID NO: 25506 - protein, 9 aa, synthetic construct
GLQASIHVR

SEQ ID NO: 25507 - protein, 9 aa, synthetic construct
GLQASIHVH

SEQ ID NO: 25508 - protein, 9 aa, synthetic construct
GLQASIHVK

SEQ ID NO: 25509 - protein, 9 aa, synthetic construct
PLQAGIKVY

SEQ ID NO: 25510 - protein, 9 aa, synthetic construct
GLQASIRLY

SEQ ID NO: 25511 - protein, 9 aa, synthetic construct
GLQASIRLF

SEQ ID NO: 25512 - protein, 9 aa, synthetic construct
GLQASIRVH

SEQ ID NO: 25513 - protein, 9 aa, synthetic construct
GLQASIKLH

SEQ ID NO: 25514 - protein, 9 aa, synthetic construct
GLQASIKLF

SEQ ID NO: 25515 - protein, 9 aa, synthetic construct
GLQASIKVR

SEQ ID NO: 25516 - protein, 9 aa, synthetic construct
GLQASGHLY

SEQ ID NO: 25517 - protein, 9 aa, synthetic construct
GLQASGHLR

SEQ ID NO: 25518 - protein, 9 aa, synthetic construct
GLQASGHLK

SEQ ID NO: 25519 - protein, 9 aa, synthetic construct
GLQASGHLF

SEQ ID NO: 25520 - protein, 9 aa, synthetic construct
GLQASGHVK

SEQ ID NO: 25521 - protein, 9 aa, synthetic construct
GLQASGRLH

SEQ ID NO: 25522 - protein, 9 aa, synthetic construct
GLQASGRLF

SEQ ID NO: 25523 - protein, 9 aa, synthetic construct
PLQAGIKVF

SEQ ID NO: 25524 - protein, 9 aa, synthetic construct
GLQASGKLY

SEQ ID NO: 25525 - protein, 9 aa, synthetic construct
GLQASGKLH

SEQ ID NO: 25526 - protein, 9 aa, synthetic construct
GLQASGKLF

SEQ ID NO: 25527 - protein, 9 aa, synthetic construct
GLQAVVHVK

SEQ ID NO: 25528 - protein, 9 aa, synthetic construct
GLQAVVKVH

SEQ ID NO: 25529 - protein, 9 aa, synthetic construct
GLQAVLKVY

SEQ ID NO: 25530 - protein, 9 aa, synthetic construct
GLQAVAHLR

SEQ ID NO: 25531 - protein, 9 aa, synthetic construct
GLQAVAHLK

SEQ ID NO: 25532 - protein, 9 aa, synthetic construct
GLQAVAHVK

SEQ ID NO: 25533 - protein, 9 aa, synthetic construct
GLQAVAKVH

SEQ ID NO: 25534 - protein, 9 aa, synthetic construct
GLQAVIHVK

SEQ ID NO: 25535 - protein, 9 aa, synthetic construct
PLQAGGRLY

SEQ ID NO: 25536 - protein, 9 aa, synthetic construct
GLQAVIKLH

SEQ ID NO: 25537 - protein, 9 aa, synthetic construct
GLQAVGHLR

SEQ ID NO: 25538 - protein, 9 aa, synthetic construct
GLQAVGHLH

SEQ ID NO: 25539 - protein, 9 aa, synthetic construct
GLQAVGHLK

SEQ ID NO: 25540 - protein, 9 aa, synthetic construct
GLQAVGHVK

SEQ ID NO: 25541 - protein, 9 aa, synthetic construct
PLQAGGRLK

SEQ ID NO: 25542 - protein, 9 aa, synthetic construct
GLQAVGRLF

SEQ ID NO: 25543 - protein, 9 aa, synthetic construct
GLQAVGRVY

SEQ ID NO: 25544 - protein, 9 aa, synthetic construct
GLQAVGKLH

SEQ ID NO: 25545 - protein, 9 aa, synthetic construct
GLQAVGKLF

SEQ ID NO: 25546 - protein, 9 aa, synthetic construct
GLQAVGKVH

SEQ ID NO: 25547 - protein, 9 aa, synthetic construct
GLQAGVHLY

SEQ ID NO: 25548 - protein, 9 aa, synthetic construct
GLQAGVHVY

SEQ ID NO: 25549 - protein, 9 aa, synthetic construct
GLQAGVHVR

SEQ ID NO: 25550 - protein, 9 aa, synthetic construct
GLQAGVHVK

SEQ ID NO: 25551 - protein, 9 aa, synthetic construct
GLQAGVHVF

SEQ ID NO: 25552 - protein, 9 aa, synthetic construct
GLQAGVRLY

SEQ ID NO: 25553 - protein, 9 aa, synthetic construct
GLQAGVRVY

SEQ ID NO: 25554 - protein, 9 aa, synthetic construct
GLQAGVRVR

SEQ ID NO: 25555 - protein, 9 aa, synthetic construct
GLQAGVRVF

SEQ ID NO: 25556 - protein, 9 aa, synthetic construct
GLQAGVKLY

SEQ ID NO: 25557 - protein, 9 aa, synthetic construct
GLQAGVKLH

SEQ ID NO: 25558 - protein, 9 aa, synthetic construct
GLQAGVKLF

SEQ ID NO: 25559 - protein, 9 aa, synthetic construct
GLQAGVKVH

SEQ ID NO: 25560 - protein, 9 aa, synthetic construct
GLQAGVKVK

SEQ ID NO: 25561 - protein, 9 aa, synthetic construct
GLQAGLHVY

SEQ ID NO: 25562 - protein, 9 aa, synthetic construct
GLQAGLHVR

SEQ ID NO: 25563 - protein, 9 aa, synthetic construct
GLQAGLRLF

SEQ ID NO: 25564 - protein, 9 aa, synthetic construct
PLQAGGKLY

SEQ ID NO: 25565 - protein, 9 aa, synthetic construct
GLQAGLKLY

SEQ ID NO: 25566 - protein, 9 aa, synthetic construct
GLQAGLKLH

SEQ ID NO: 25567 - protein, 9 aa, synthetic construct
GLQAGLKVY

SEQ ID NO: 25568 - protein, 9 aa, synthetic construct
GLQAGLKVH

SEQ ID NO: 25569 - protein, 9 aa, synthetic construct
GLQAGLKVF

SEQ ID NO: 25570 - protein, 9 aa, synthetic construct
GLQAGAHLY

SEQ ID NO: 25571 - protein, 9 aa, synthetic construct
GLQAGAHLH

SEQ ID NO: 25572 - protein, 9 aa, synthetic construct
GLQAGAHVH

SEQ ID NO: 25573 - protein, 9 aa, synthetic construct
GLQAGARVF

SEQ ID NO: 25574 - protein, 9 aa, synthetic construct
GLQAGAKLY

SEQ ID NO: 25575 - protein, 9 aa, synthetic construct
GLQAGAKVH

SEQ ID NO: 25576 - protein, 9 aa, synthetic construct
GLQAGAKVF

SEQ ID NO: 25577 - protein, 9 aa, synthetic construct
GLQAGIHLF

SEQ ID NO: 25578 - protein, 9 aa, synthetic construct
GLQAGIHVK

SEQ ID NO: 25579 - protein, 9 aa, synthetic construct
PLQAGGKVY

SEQ ID NO: 25580 - protein, 9 aa, synthetic construct
GLQAGIRLH

SEQ ID NO: 25581 - protein, 9 aa, synthetic construct
GLQAGIKLY

SEQ ID NO: 25582 - protein, 9 aa, synthetic construct
GLQAGIKLH

SEQ ID NO: 25583 - protein, 9 aa, synthetic construct
GLQAGIKLF

SEQ ID NO: 25584 - protein, 9 aa, synthetic construct
GLQAGIKVY

SEQ ID NO: 25585 - protein, 9 aa, synthetic construct
GLQAGIKVR

SEQ ID NO: 25586 - protein, 9 aa, synthetic construct
GLQAGIKVK

SEQ ID NO: 25587 - protein, 9 aa, synthetic construct
GLQAGIKVF

SEQ ID NO: 25588 - protein, 9 aa, synthetic construct
GLQAGGHVR

SEQ ID NO: 25589 - protein, 9 aa, synthetic construct
GLQAGGHVH

SEQ ID NO: 25590 - protein, 9 aa, synthetic construct
GLQAGGHVF

SEQ ID NO: 25591 - protein, 9 aa, synthetic construct
PLQAGGKVK

SEQ ID NO: 25592 - protein, 9 aa, synthetic construct
GLQAGGRLY

SEQ ID NO: 25593 - protein, 9 aa, synthetic construct
GLQAGGRVF

SEQ ID NO: 25594 - protein, 9 aa, synthetic construct
GLQAGGKLH

SEQ ID NO: 25595 - protein, 9 aa, synthetic construct
GLQAGGKVH

SEQ ID NO: 25596 - protein, 9 aa, synthetic construct
GLQAGGKVK

SEQ ID NO: 25597 - protein, 9 aa, synthetic construct
GLPGAVHLR

SEQ ID NO: 25598 - protein, 9 aa, synthetic construct
GLPGAVHVR

SEQ ID NO: 25599 - protein, 9 aa, synthetic construct
GLPGAVHVH

SEQ ID NO: 25600 - protein, 9 aa, synthetic construct
GLPGAVHVF

SEQ ID NO: 25601 - protein, 9 aa, synthetic construct
GLPGAVRLH

SEQ ID NO: 25602 - protein, 9 aa, synthetic construct
GLPGAVRVY

SEQ ID NO: 25603 - protein, 9 aa, synthetic construct
GLPGAVRVH

SEQ ID NO: 25604 - protein, 9 aa, synthetic construct
GLPGAVRVF

SEQ ID NO: 25605 - protein, 9 aa, synthetic construct
GLPGAVKLR

SEQ ID NO: 25606 - protein, 9 aa, synthetic construct
GLPGAVKLF

SEQ ID NO: 25607 - protein, 9 aa, synthetic construct
GLPGAVKVR

SEQ ID NO: 25608 - protein, 9 aa, synthetic construct
GLPGAVKVK

SEQ ID NO: 25609 - protein, 9 aa, synthetic construct
GLPGAVKVF

SEQ ID NO: 25610 - protein, 9 aa, synthetic construct
PLPGAVHLK

SEQ ID NO: 25611 - protein, 9 aa, synthetic construct
GLPGALHLK

SEQ ID NO: 25612 - protein, 9 aa, synthetic construct
GLPGALHVY

SEQ ID NO: 25613 - protein, 9 aa, synthetic construct
GLPGALHVR

SEQ ID NO: 25614 - protein, 9 aa, synthetic construct
GLPGALHVH

SEQ ID NO: 25615 - protein, 9 aa, synthetic construct
GLPGALHVK

SEQ ID NO: 25616 - protein, 9 aa, synthetic construct
GLPGALHVF

SEQ ID NO: 25617 - protein, 9 aa, synthetic construct
PLPGAVHLF

SEQ ID NO: 25618 - protein, 9 aa, synthetic construct
GLPGALRLY

SEQ ID NO: 25619 - protein, 9 aa, synthetic construct
GLPGALRVK

SEQ ID NO: 25620 - protein, 9 aa, synthetic construct
GLPGALRVF

SEQ ID NO: 25621 - protein, 9 aa, synthetic construct
PLPGAVHVY

SEQ ID NO: 25622 - protein, 9 aa, synthetic construct
GLPGALKLY

SEQ ID NO: 25623 - protein, 9 aa, synthetic construct
GLPGALKLR

SEQ ID NO: 25624 - protein, 9 aa, synthetic construct
GLPGALKLH

SEQ ID NO: 25625 - protein, 9 aa, synthetic construct
GLPGALKLF

SEQ ID NO: 25626 - protein, 9 aa, synthetic construct
GLPGALKVH

SEQ ID NO: 25627 - protein, 9 aa, synthetic construct
PLPGAVHVR

SEQ ID NO: 25628 - protein, 9 aa, synthetic construct
GLPGAAHLK

SEQ ID NO: 25629 - protein, 9 aa, synthetic construct
GLPGAAHVF

SEQ ID NO: 25630 - protein, 9 aa, synthetic construct
GLPGAARLY

SEQ ID NO: 25631 - protein, 9 aa, synthetic construct
GLPGAARLF

SEQ ID NO: 25632 - protein, 9 aa, synthetic construct
GLPGAARVY

SEQ ID NO: 25633 - protein, 9 aa, synthetic construct
GLPGAARVR

SEQ ID NO: 25634 - protein, 9 aa, synthetic construct
GLPGAARVH

SEQ ID NO: 25635 - protein, 9 aa, synthetic construct
GLPGAARVF

SEQ ID NO: 25636 - protein, 9 aa, synthetic construct
PLPGAVHVK

SEQ ID NO: 25637 - protein, 9 aa, synthetic construct
GLPGAAKLF

SEQ ID NO: 25638 - protein, 9 aa, synthetic construct
PLPGAVHVF

SEQ ID NO: 25639 - protein, 9 aa, synthetic construct
GLPGAIHLR

SEQ ID NO: 25640 - protein, 9 aa, synthetic construct
GLPGAIHVY

SEQ ID NO: 25641 - protein, 9 aa, synthetic construct
GLPGAIHVR

SEQ ID NO: 25642 - protein, 9 aa, synthetic construct
GLPGAIHVH

SEQ ID NO: 25643 - protein, 9 aa, synthetic construct
PLPGAVRLY

SEQ ID NO: 25644 - protein, 9 aa, synthetic construct
GLPGAIRLH

SEQ ID NO: 25645 - protein, 9 aa, synthetic construct
GLPGAIRVH

SEQ ID NO: 25646 - protein, 9 aa, synthetic construct
GLPGAIRVF

SEQ ID NO: 25647 - protein, 9 aa, synthetic construct
GLPGAIKLH

SEQ ID NO: 25648 - protein, 9 aa, synthetic construct
GLPGAIKLK

SEQ ID NO: 25649 - protein, 9 aa, synthetic construct
GLPGAIKLF

SEQ ID NO: 25650 - protein, 9 aa, synthetic construct
GLPGAIKVR

SEQ ID NO: 25651 - protein, 9 aa, synthetic construct
GLPGAIKVH

SEQ ID NO: 25652 - protein, 9 aa, synthetic construct
PLPGAVRLH

SEQ ID NO: 25653 - protein, 9 aa, synthetic construct
GLPGAGRLY

SEQ ID NO: 25654 - protein, 9 aa, synthetic construct
GLPGAGRVY

SEQ ID NO: 25655 - protein, 9 aa, synthetic construct
GLPGAGRVR

SEQ ID NO: 25656 - protein, 9 aa, synthetic construct
GLPGAGRVH

SEQ ID NO: 25657 - protein, 9 aa, synthetic construct
GLPGAGRVK

SEQ ID NO: 25658 - protein, 9 aa, synthetic construct
GLPGAGRVF

SEQ ID NO: 25659 - protein, 9 aa, synthetic construct
GLPGAGKLY

SEQ ID NO: 25660 - protein, 9 aa, synthetic construct
PLPGAVRVY

SEQ ID NO: 25661 - protein, 9 aa, synthetic construct
GLPGTVHLR

SEQ ID NO: 25662 - protein, 9 aa, synthetic construct
GLPGTVHLK

SEQ ID NO: 25663 - protein, 9 aa, synthetic construct
GLPGTVHVR

SEQ ID NO: 25664 - protein, 9 aa, synthetic construct
GLPGTVHVK

SEQ ID NO: 25665 - protein, 9 aa, synthetic construct
GLPGTVRLH

SEQ ID NO: 25666 - protein, 9 aa, synthetic construct
GLPGTVRLK

SEQ ID NO: 25667 - protein, 9 aa, synthetic construct
GLPGTVRLF

SEQ ID NO: 25668 - protein, 9 aa, synthetic construct
GLPGTVRVY

SEQ ID NO: 25669 - protein, 9 aa, synthetic construct
GLPGTVRVH

SEQ ID NO: 25670 - protein, 9 aa, synthetic construct
GLPGTVRVK

SEQ ID NO: 25671 - protein, 9 aa, synthetic construct
GLPGTVRVF

SEQ ID NO: 25672 - protein, 9 aa, synthetic construct
GLPGTVKVY

SEQ ID NO: 25673 - protein, 9 aa, synthetic construct
GLPGTVKVH

SEQ ID NO: 25674 - protein, 9 aa, synthetic construct
GLPGTVKVF

SEQ ID NO: 25675 - protein, 9 aa, synthetic construct
GLPGTLHLR

SEQ ID NO: 25676 - protein, 9 aa, synthetic construct
GLPGTLHVH

SEQ ID NO: 25677 - protein, 9 aa, synthetic construct
GLPGTLHVK

SEQ ID NO: 25678 - protein, 9 aa, synthetic construct
GLPGTLRLF

SEQ ID NO: 25679 - protein, 9 aa, synthetic construct
GLPGTLKLY

SEQ ID NO: 25680 - protein, 9 aa, synthetic construct
GLPGTLKLR

SEQ ID NO: 25681 - protein, 9 aa, synthetic construct
GLPGTLKVH

SEQ ID NO: 25682 - protein, 9 aa, synthetic construct
GLPGTLKVF

SEQ ID NO: 25683 - protein, 9 aa, synthetic construct
GLPGTAHVF

SEQ ID NO: 25684 - protein, 9 aa, synthetic construct
GLPGTARLY

SEQ ID NO: 25685 - protein, 9 aa, synthetic construct
GLPGTARLK

SEQ ID NO: 25686 - protein, 9 aa, synthetic construct
GLPGTARLF

SEQ ID NO: 25687 - protein, 9 aa, synthetic construct
GLPGTARVY

SEQ ID NO: 25688 - protein, 9 aa, synthetic construct
GLPGTARVH

SEQ ID NO: 25689 - protein, 9 aa, synthetic construct
GLPGTAKLY

SEQ ID NO: 25690 - protein, 9 aa, synthetic construct
GLPGTAKLH

SEQ ID NO: 25691 - protein, 9 aa, synthetic construct
GLPGTAKLF

SEQ ID NO: 25692 - protein, 9 aa, synthetic construct
GLPGTIHVR

SEQ ID NO: 25693 - protein, 9 aa, synthetic construct
GLPGTIRLH

SEQ ID NO: 25694 - protein, 9 aa, synthetic construct
GLPGTIKLY

SEQ ID NO: 25695 - protein, 9 aa, synthetic construct
GLPGTIKLH

SEQ ID NO: 25696 - protein, 9 aa, synthetic construct
GLPGTIKLF

SEQ ID NO: 25697 - protein, 9 aa, synthetic construct
GLPGTIKVF

SEQ ID NO: 25698 - protein, 9 aa, synthetic construct
PLPGAVKVH

SEQ ID NO: 25699 - protein, 9 aa, synthetic construct
GLPGTGRLY

SEQ ID NO: 25700 - protein, 9 aa, synthetic construct
GLPGTGRLK

SEQ ID NO: 25701 - protein, 9 aa, synthetic construct
GLPGTGRVY

SEQ ID NO: 25702 - protein, 9 aa, synthetic construct
GLPGTGRVH

SEQ ID NO: 25703 - protein, 9 aa, synthetic construct
GLPGTGRVF

SEQ ID NO: 25704 - protein, 9 aa, synthetic construct
PLPGAVKVF

SEQ ID NO: 25705 - protein, 9 aa, synthetic construct
GLPGTGKVF

SEQ ID NO: 25706 - protein, 9 aa, synthetic construct
GLPGSVHLY

SEQ ID NO: 25707 - protein, 9 aa, synthetic construct
GLPGSVHLR

SEQ ID NO: 25708 - protein, 9 aa, synthetic construct
GLPGSVHLH

SEQ ID NO: 25709 - protein, 9 aa, synthetic construct
GLPGSVHLK

SEQ ID NO: 25710 - protein, 9 aa, synthetic construct
GLPGSVRLY

SEQ ID NO: 25711 - protein, 9 aa, synthetic construct
GLPGSVRLH

SEQ ID NO: 25712 - protein, 9 aa, synthetic construct
GLPGSVRVY

SEQ ID NO: 25713 - protein, 9 aa, synthetic construct
GLPGSVKLY

SEQ ID NO: 25714 - protein, 9 aa, synthetic construct
GLPGSVKLH

SEQ ID NO: 25715 - protein, 9 aa, synthetic construct
GLPGSVKLF

SEQ ID NO: 25716 - protein, 9 aa, synthetic construct
GLPGSVKVY

SEQ ID NO: 25717 - protein, 9 aa, synthetic construct
GLPGSVKVH

SEQ ID NO: 25718 - protein, 9 aa, synthetic construct
GLPGSVKVF

SEQ ID NO: 25719 - protein, 9 aa, synthetic construct
GLPGSLHLH

SEQ ID NO: 25720 - protein, 9 aa, synthetic construct
GLPGSLHLK

SEQ ID NO: 25721 - protein, 9 aa, synthetic construct
GLPGSLHVY

SEQ ID NO: 25722 - protein, 9 aa, synthetic construct
GLPGSLHVR

SEQ ID NO: 25723 - protein, 9 aa, synthetic construct
GLPGSLHVH

SEQ ID NO: 25724 - protein, 9 aa, synthetic construct
GLPGSLHVF

SEQ ID NO: 25725 - protein, 9 aa, synthetic construct
GLPGSLRVY

SEQ ID NO: 25726 - protein, 9 aa, synthetic construct
GLPGSLRVH

SEQ ID NO: 25727 - protein, 9 aa, synthetic construct
GLPGSLRVF

SEQ ID NO: 25728 - protein, 9 aa, synthetic construct
GLPGSLKLY

SEQ ID NO: 25729 - protein, 9 aa, synthetic construct
GLPGSLKLH

SEQ ID NO: 25730 - protein, 9 aa, synthetic construct
GLPGSLKVH

SEQ ID NO: 25731 - protein, 9 aa, synthetic construct
GLPGSLKVF

SEQ ID NO: 25732 - protein, 9 aa, synthetic construct
GLPGSAHLY

SEQ ID NO: 25733 - protein, 9 aa, synthetic construct
GLPGSAHLR

SEQ ID NO: 25734 - protein, 9 aa, synthetic construct
GLPGSAHLH

SEQ ID NO: 25735 - protein, 9 aa, synthetic construct
GLPGSAHVK

SEQ ID NO: 25736 - protein, 9 aa, synthetic construct
GLPGSAHVF

SEQ ID NO: 25737 - protein, 9 aa, synthetic construct
PLPGALHVH

SEQ ID NO: 25738 - protein, 9 aa, synthetic construct
GLPGSARLY

SEQ ID NO: 25739 - protein, 9 aa, synthetic construct
GLPGSARLH

SEQ ID NO: 25740 - protein, 9 aa, synthetic construct
GLPGSARLF

SEQ ID NO: 25741 - protein, 9 aa, synthetic construct
GLPGSARVF

SEQ ID NO: 25742 - protein, 9 aa, synthetic construct
PLPGALHVK

SEQ ID NO: 25743 - protein, 9 aa, synthetic construct
GLPGSAKVH

SEQ ID NO: 25744 - protein, 9 aa, synthetic construct
GLPGSIHLY

SEQ ID NO: 25745 - protein, 9 aa, synthetic construct
GLPGSIHLK

SEQ ID NO: 25746 - protein, 9 aa, synthetic construct
GLPGSIHVR

SEQ ID NO: 25747 - protein, 9 aa, synthetic construct
GLPGSIHVH

SEQ ID NO: 25748 - protein, 9 aa, synthetic construct
GLPGSIHVK

SEQ ID NO: 25749 - protein, 9 aa, synthetic construct
PLPGALRLY

SEQ ID NO: 25750 - protein, 9 aa, synthetic construct
GLPGSIKLH

SEQ ID NO: 25751 - protein, 9 aa, synthetic construct
GLPGSIKLK

SEQ ID NO: 25752 - protein, 9 aa, synthetic construct
GLPGSIKLF

SEQ ID NO: 25753 - protein, 9 aa, synthetic construct
GLPGSGHLR

SEQ ID NO: 25754 - protein, 9 aa, synthetic construct
GLPGSGHLH

SEQ ID NO: 25755 - protein, 9 aa, synthetic construct
GLPGSGHLF

SEQ ID NO: 25756 - protein, 9 aa, synthetic construct
GLPGSGHVY

SEQ ID NO: 25757 - protein, 9 aa, synthetic construct
GLPGSGHVR

SEQ ID NO: 25758 - protein, 9 aa, synthetic construct
GLPGSGHVH

SEQ ID NO: 25759 - protein, 9 aa, synthetic construct
GLPGSGHVK

SEQ ID NO: 25760 - protein, 9 aa, synthetic construct
GLPGSGRLY

SEQ ID NO: 25761 - protein, 9 aa, synthetic construct
GLPGSGRLH

SEQ ID NO: 25762 - protein, 9 aa, synthetic construct
GLPGSGRLF

SEQ ID NO: 25763 - protein, 9 aa, synthetic construct
GLPGSGRVY

SEQ ID NO: 25764 - protein, 9 aa, synthetic construct
GLPGSGRVH

SEQ ID NO: 25765 - protein, 9 aa, synthetic construct
GLPGSGRVF

SEQ ID NO: 25766 - protein, 9 aa, synthetic construct
GLPGSGKLY

SEQ ID NO: 25767 - protein, 9 aa, synthetic construct
GLPGSGKLH

SEQ ID NO: 25768 - protein, 9 aa, synthetic construct
GLPGSGKLF

SEQ ID NO: 25769 - protein, 9 aa, synthetic construct
GLPGSGKVY

SEQ ID NO: 25770 - protein, 9 aa, synthetic construct
GLPGSGKVH

SEQ ID NO: 25771 - protein, 9 aa, synthetic construct
GLPGSGKVF

SEQ ID NO: 25772 - protein, 9 aa, synthetic construct
GLPGVVHLY

SEQ ID NO: 25773 - protein, 9 aa, synthetic construct
PLPGALRVH

SEQ ID NO: 25774 - protein, 9 aa, synthetic construct
GLPGVVKLH

SEQ ID NO: 25775 - protein, 9 aa, synthetic construct
GLPGVVKVY

SEQ ID NO: 25776 - protein, 9 aa, synthetic construct
PLPGALRVK

SEQ ID NO: 25777 - protein, 9 aa, synthetic construct
PLPGALKLR

SEQ ID NO: 25778 - protein, 9 aa, synthetic construct
GLPGVAHLY

SEQ ID NO: 25779 - protein, 9 aa, synthetic construct
GLPGVAHLR

SEQ ID NO: 25780 - protein, 9 aa, synthetic construct
GLPGVAHLK

SEQ ID NO: 25781 - protein, 9 aa, synthetic construct
GLPGVAHVR

SEQ ID NO: 25782 - protein, 9 aa, synthetic construct
GLPGVAHVK

SEQ ID NO: 25783 - protein, 9 aa, synthetic construct
PLPGALKLH

SEQ ID NO: 25784 - protein, 9 aa, synthetic construct
GLPGVARLY

SEQ ID NO: 25785 - protein, 9 aa, synthetic construct
GLPGVARLH

SEQ ID NO: 25786 - protein, 9 aa, synthetic construct
GLPGVARVF

SEQ ID NO: 25787 - protein, 9 aa, synthetic construct
PLPGALKLF

SEQ ID NO: 25788 - protein, 9 aa, synthetic construct
GLPGVIHLR

SEQ ID NO: 25789 - protein, 9 aa, synthetic construct
GLPGVIHVR

SEQ ID NO: 25790 - protein, 9 aa, synthetic construct
GLPGVIHVH

SEQ ID NO: 25791 - protein, 9 aa, synthetic construct
GLPGVIRLR

SEQ ID NO: 25792 - protein, 9 aa, synthetic construct
GLPGVIKLF

SEQ ID NO: 25793 - protein, 9 aa, synthetic construct
GLPGVGHLR

SEQ ID NO: 25794 - protein, 9 aa, synthetic construct
GLPGVGHLK

SEQ ID NO: 25795 - protein, 9 aa, synthetic construct
GLPGVGHVY

SEQ ID NO: 25796 - protein, 9 aa, synthetic construct
GLPGVGHVK

SEQ ID NO: 25797 - protein, 9 aa, synthetic construct
GLPGVGHVF

SEQ ID NO: 25798 - protein, 9 aa, synthetic construct
GLPGVGRVF

SEQ ID NO: 25799 - protein, 9 aa, synthetic construct
PLPGALKVF

SEQ ID NO: 25800 - protein, 9 aa, synthetic construct
GLPGVGKLY

SEQ ID NO: 25801 - protein, 9 aa, synthetic construct
GLPGVGKLF

SEQ ID NO: 25802 - protein, 9 aa, synthetic construct
GLPGVGKVF

SEQ ID NO: 25803 - protein, 9 aa, synthetic construct
GLPGGVHLR

SEQ ID NO: 25804 - protein, 9 aa, synthetic construct
GLPGGVHLH

SEQ ID NO: 25805 - protein, 9 aa, synthetic construct
GLPGGVHLF

SEQ ID NO: 25806 - protein, 9 aa, synthetic construct
GLPGGVRVY

SEQ ID NO: 25807 - protein, 9 aa, synthetic construct
GLPGGVRVK

SEQ ID NO: 25808 - protein, 9 aa, synthetic construct
GLPGGVKLF

SEQ ID NO: 25809 - protein, 9 aa, synthetic construct
GLPGGLHLH

SEQ ID NO: 25810 - protein, 9 aa, synthetic construct
GLPGGLHLF

SEQ ID NO: 25811 - protein, 9 aa, synthetic construct
GLPGGLHVR

SEQ ID NO: 25812 - protein, 9 aa, synthetic construct
GLPGGLHVK

SEQ ID NO: 25813 - protein, 9 aa, synthetic construct
GLPGGLRLY

SEQ ID NO: 25814 - protein, 9 aa, synthetic construct
PLPGAAHVY

SEQ ID NO: 25815 - protein, 9 aa, synthetic construct
GLPGGLKLY

SEQ ID NO: 25816 - protein, 9 aa, synthetic construct
GLPGGLKLH

SEQ ID NO: 25817 - protein, 9 aa, synthetic construct
GLPGGAHLF

SEQ ID NO: 25818 - protein, 9 aa, synthetic construct
GLPGGAHVK

SEQ ID NO: 25819 - protein, 9 aa, synthetic construct
GLPGGAHVF

SEQ ID NO: 25820 - protein, 9 aa, synthetic construct
GLPGGARLF

SEQ ID NO: 25821 - protein, 9 aa, synthetic construct
GLPGGARVY

SEQ ID NO: 25822 - protein, 9 aa, synthetic construct
GLPGGARVF

SEQ ID NO: 25823 - protein, 9 aa, synthetic construct
GLPGGAKLY

SEQ ID NO: 25824 - protein, 9 aa, synthetic construct
GLPGGAKVY

SEQ ID NO: 25825 - protein, 9 aa, synthetic construct
GLPGGAKVF

SEQ ID NO: 25826 - protein, 9 aa, synthetic construct
PLPGAAHVF

SEQ ID NO: 25827 - protein, 9 aa, synthetic construct
GLPGGIHLY

SEQ ID NO: 25828 - protein, 9 aa, synthetic construct
GLPGGIHLR

SEQ ID NO: 25829 - protein, 9 aa, synthetic construct
GLPGGIHLK

SEQ ID NO: 25830 - protein, 9 aa, synthetic construct
GLPGGIHVY

SEQ ID NO: 25831 - protein, 9 aa, synthetic construct
GLPGGIHVR

SEQ ID NO: 25832 - protein, 9 aa, synthetic construct
GLPGGIHVH

SEQ ID NO: 25833 - protein, 9 aa, synthetic construct
PLPGAARLY

SEQ ID NO: 25834 - protein, 9 aa, synthetic construct
GLPGGIKLY

SEQ ID NO: 25835 - protein, 9 aa, synthetic construct
GLPGGIKLR

SEQ ID NO: 25836 - protein, 9 aa, synthetic construct
GLPGGIKLH

SEQ ID NO: 25837 - protein, 9 aa, synthetic construct
GLPGGIKLF

SEQ ID NO: 25838 - protein, 9 aa, synthetic construct
GLPGGIKVH

SEQ ID NO: 25839 - protein, 9 aa, synthetic construct
GLPGGGHLY

SEQ ID NO: 25840 - protein, 9 aa, synthetic construct
GLPGGGHLF

SEQ ID NO: 25841 - protein, 9 aa, synthetic construct
GLPGGGHVY

SEQ ID NO: 25842 - protein, 9 aa, synthetic construct
GLPGGGHVK

SEQ ID NO: 25843 - protein, 9 aa, synthetic construct
GLPGGGRVF

SEQ ID NO: 25844 - protein, 9 aa, synthetic construct
GLPGGGKLY

SEQ ID NO: 25845 - protein, 9 aa, synthetic construct
GLPGGGKVY

SEQ ID NO: 25846 - protein, 9 aa, synthetic construct
GLPGGGKVH

SEQ ID NO: 25847 - protein, 9 aa, synthetic construct
GLPGGGKVF

SEQ ID NO: 25848 - protein, 9 aa, synthetic construct
GLPAAVHLK

SEQ ID NO: 25849 - protein, 9 aa, synthetic construct
GLPAAVHVY

SEQ ID NO: 25850 - protein, 9 aa, synthetic construct
PLPGAARVR

SEQ ID NO: 25851 - protein, 9 aa, synthetic construct
GLPAAVRLH

SEQ ID NO: 25852 - protein, 9 aa, synthetic construct
GLPAAVRVY

SEQ ID NO: 25853 - protein, 9 aa, synthetic construct
GLPAAVRVH

SEQ ID NO: 25854 - protein, 9 aa, synthetic construct
PLPGAARVH

SEQ ID NO: 25855 - protein, 9 aa, synthetic construct
GLPAAVKLY

SEQ ID NO: 25856 - protein, 9 aa, synthetic construct
GLPAAVKLR

SEQ ID NO: 25857 - protein, 9 aa, synthetic construct
GLPAAVKLH

SEQ ID NO: 25858 - protein, 9 aa, synthetic construct
GLPAAVKLF

SEQ ID NO: 25859 - protein, 9 aa, synthetic construct
GLPAAVKVH

SEQ ID NO: 25860 - protein, 9 aa, synthetic construct
GLPAAVKVF

SEQ ID NO: 25861 - protein, 9 aa, synthetic construct
GLPAALHVK

SEQ ID NO: 25862 - protein, 9 aa, synthetic construct
GLPAALKLH

SEQ ID NO: 25863 - protein, 9 aa, synthetic construct
GLPAALKVY

SEQ ID NO: 25864 - protein, 9 aa, synthetic construct
GLPAAAHLY

SEQ ID NO: 25865 - protein, 9 aa, synthetic construct
GLPAAAHLR

SEQ ID NO: 25866 - protein, 9 aa, synthetic construct
GLPAAAHLK

SEQ ID NO: 25867 - protein, 9 aa, synthetic construct
GLPAAAHLF

SEQ ID NO: 25868 - protein, 9 aa, synthetic construct
GLPAAAHVY

SEQ ID NO: 25869 - protein, 9 aa, synthetic construct
GLPAAAHVR

SEQ ID NO: 25870 - protein, 9 aa, synthetic construct
GLPAAAHVH

SEQ ID NO: 25871 - protein, 9 aa, synthetic construct
GLPAAAHVK

SEQ ID NO: 25872 - protein, 9 aa, synthetic construct
GLPAAAHVF

SEQ ID NO: 25873 - protein, 9 aa, synthetic construct
GLPAAARVY

SEQ ID NO: 25874 - protein, 9 aa, synthetic construct
GLPAAARVR

SEQ ID NO: 25875 - protein, 9 aa, synthetic construct
GLPAAARVH

SEQ ID NO: 25876 - protein, 9 aa, synthetic construct
GLPAAARVF

SEQ ID NO: 25877 - protein, 9 aa, synthetic construct
GLPAAAKLF

SEQ ID NO: 25878 - protein, 9 aa, synthetic construct
GLPAAAKVY

SEQ ID NO: 25879 - protein, 9 aa, synthetic construct
PLPGAAKLF

SEQ ID NO: 25880 - protein, 9 aa, synthetic construct
GLPAAIHLY

SEQ ID NO: 25881 - protein, 9 aa, synthetic construct
GLPAAIHLH

SEQ ID NO: 25882 - protein, 9 aa, synthetic construct
GLPAAIHLK

SEQ ID NO: 25883 - protein, 9 aa, synthetic construct
GLPAAIHVY

SEQ ID NO: 25884 - protein, 9 aa, synthetic construct
GLPAAIHVR

SEQ ID NO: 25885 - protein, 9 aa, synthetic construct
GLPAAIHVH

SEQ ID NO: 25886 - protein, 9 aa, synthetic construct
GLPAAIHVF

SEQ ID NO: 25887 - protein, 9 aa, synthetic construct
GLPAAIRLY

SEQ ID NO: 25888 - protein, 9 aa, synthetic construct
GLPAAIRLH

SEQ ID NO: 25889 - protein, 9 aa, synthetic construct
GLPAAIRLF

SEQ ID NO: 25890 - protein, 9 aa, synthetic construct
GLPAAIKLH

SEQ ID NO: 25891 - protein, 9 aa, synthetic construct
GLPAAIKVH

SEQ ID NO: 25892 - protein, 9 aa, synthetic construct
GLPAAGHLY

SEQ ID NO: 25893 - protein, 9 aa, synthetic construct
GLPAAGHLR

SEQ ID NO: 25894 - protein, 9 aa, synthetic construct
GLPAAGHVY

SEQ ID NO: 25895 - protein, 9 aa, synthetic construct
GLPAAGHVH

SEQ ID NO: 25896 - protein, 9 aa, synthetic construct
GLPAAGHVK

SEQ ID NO: 25897 - protein, 9 aa, synthetic construct
GLPAAGRLY

SEQ ID NO: 25898 - protein, 9 aa, synthetic construct
GLPAAGRLF

SEQ ID NO: 25899 - protein, 9 aa, synthetic construct
GLPAAGRVY

SEQ ID NO: 25900 - protein, 9 aa, synthetic construct
GLPAAGRVR

SEQ ID NO: 25901 - protein, 9 aa, synthetic construct
GLPAAGRVK

SEQ ID NO: 25902 - protein, 9 aa, synthetic construct
GLPAAGKLY

SEQ ID NO: 25903 - protein, 9 aa, synthetic construct
GLPAAGKLH

SEQ ID NO: 25904 - protein, 9 aa, synthetic construct
GLPAAGKLF

SEQ ID NO: 25905 - protein, 9 aa, synthetic construct
GLPAAGKVY

SEQ ID NO: 25906 - protein, 9 aa, synthetic construct
GLPAAGKVH

SEQ ID NO: 25907 - protein, 9 aa, synthetic construct
PLPGAIHLY

SEQ ID NO: 25908 - protein, 9 aa, synthetic construct
GLPATVHLR

SEQ ID NO: 25909 - protein, 9 aa, synthetic construct
GLPATVHLK

SEQ ID NO: 25910 - protein, 9 aa, synthetic construct
GLPATVHLF

SEQ ID NO: 25911 - protein, 9 aa, synthetic construct
GLPATVHVY

SEQ ID NO: 25912 - protein, 9 aa, synthetic construct
GLPATVHVR

SEQ ID NO: 25913 - protein, 9 aa, synthetic construct
GLPATVHVK

SEQ ID NO: 25914 - protein, 9 aa, synthetic construct
GLPATVHVF

SEQ ID NO: 25915 - protein, 9 aa, synthetic construct
PLPGAIHLR

SEQ ID NO: 25916 - protein, 9 aa, synthetic construct
GLPATVRLY

SEQ ID NO: 25917 - protein, 9 aa, synthetic construct
GLPATVRLH

SEQ ID NO: 25918 - protein, 9 aa, synthetic construct
GLPATVRVY

SEQ ID NO: 25919 - protein, 9 aa, synthetic construct
GLPATVRVH

SEQ ID NO: 25920 - protein, 9 aa, synthetic construct
GLPATVRVF

SEQ ID NO: 25921 - protein, 9 aa, synthetic construct
GLPATVKLY

SEQ ID NO: 25922 - protein, 9 aa, synthetic construct
GLPATVKLR

SEQ ID NO: 25923 - protein, 9 aa, synthetic construct
GLPATVKLH

SEQ ID NO: 25924 - protein, 9 aa, synthetic construct
GLPATVKLF

SEQ ID NO: 25925 - protein, 9 aa, synthetic construct
GLPATVKVY

SEQ ID NO: 25926 - protein, 9 aa, synthetic construct
GLPATVKVH

SEQ ID NO: 25927 - protein, 9 aa, synthetic construct
GLPATLHLR

SEQ ID NO: 25928 - protein, 9 aa, synthetic construct
GLPATLHLH

SEQ ID NO: 25929 - protein, 9 aa, synthetic construct
GLPATLHLK

SEQ ID NO: 25930 - protein, 9 aa, synthetic construct
GLPATLHVH

SEQ ID NO: 25931 - protein, 9 aa, synthetic construct
GLPATLHVK

SEQ ID NO: 25932 - protein, 9 aa, synthetic construct
GLPATLRLY

SEQ ID NO: 25933 - protein, 9 aa, synthetic construct
GLPATLRVY

SEQ ID NO: 25934 - protein, 9 aa, synthetic construct
GLPATLRVH

SEQ ID NO: 25935 - protein, 9 aa, synthetic construct
GLPATLRVF

SEQ ID NO: 25936 - protein, 9 aa, synthetic construct
PLPGAIHVY

SEQ ID NO: 25937 - protein, 9 aa, synthetic construct
GLPATLKLY

SEQ ID NO: 25938 - protein, 9 aa, synthetic construct
GLPATLKVY

SEQ ID NO: 25939 - protein, 9 aa, synthetic construct
GLPATLKVH

SEQ ID NO: 25940 - protein, 9 aa, synthetic construct
PLPGAIHVR

SEQ ID NO: 25941 - protein, 9 aa, synthetic construct
GLPATAHVR

SEQ ID NO: 25942 - protein, 9 aa, synthetic construct
GLPATAHVF

SEQ ID NO: 25943 - protein, 9 aa, synthetic construct
PLPGAIHVH

SEQ ID NO: 25944 - protein, 9 aa, synthetic construct
GLPATARLY

SEQ ID NO: 25945 - protein, 9 aa, synthetic construct
GLPATARLH

SEQ ID NO: 25946 - protein, 9 aa, synthetic construct
GLPATARLF

SEQ ID NO: 25947 - protein, 9 aa, synthetic construct
GLPATARVY

SEQ ID NO: 25948 - protein, 9 aa, synthetic construct
GLPATARVR

SEQ ID NO: 25949 - protein, 9 aa, synthetic construct
GLPATARVH

SEQ ID NO: 25950 - protein, 9 aa, synthetic construct
GLPATAKLY

SEQ ID NO: 25951 - protein, 9 aa, synthetic construct
GLPATAKLH

SEQ ID NO: 25952 - protein, 9 aa, synthetic construct
GLPATAKLF

SEQ ID NO: 25953 - protein, 9 aa, synthetic construct
GLPATAKVH

SEQ ID NO: 25954 - protein, 9 aa, synthetic construct
GLPATAKVF

SEQ ID NO: 25955 - protein, 9 aa, synthetic construct
GLPATIHLY

SEQ ID NO: 25956 - protein, 9 aa, synthetic construct
GLPATIHLF

SEQ ID NO: 25957 - protein, 9 aa, synthetic construct
GLPATIHVY

SEQ ID NO: 25958 - protein, 9 aa, synthetic construct
GLPATIHVR

SEQ ID NO: 25959 - protein, 9 aa, synthetic construct
GLPATIHVK

SEQ ID NO: 25960 - protein, 9 aa, synthetic construct
GLPATIHVF

SEQ ID NO: 25961 - protein, 9 aa, synthetic construct
GLPATIRLY

SEQ ID NO: 25962 - protein, 9 aa, synthetic construct
GLPATIRLH

SEQ ID NO: 25963 - protein, 9 aa, synthetic construct
GLPATIRLF

SEQ ID NO: 25964 - protein, 9 aa, synthetic construct
GLPATIRVY

SEQ ID NO: 25965 - protein, 9 aa, synthetic construct
GLPATIRVF

SEQ ID NO: 25966 - protein, 9 aa, synthetic construct
GLPATIKLY

SEQ ID NO: 25967 - protein, 9 aa, synthetic construct
GLPATIKVH

SEQ ID NO: 25968 - protein, 9 aa, synthetic construct
GLPATIKVF

SEQ ID NO: 25969 - protein, 9 aa, synthetic construct
PLPGAIRLH

SEQ ID NO: 25970 - protein, 9 aa, synthetic construct
GLPATGHLR

SEQ ID NO: 25971 - protein, 9 aa, synthetic construct
GLPATGHVY

SEQ ID NO: 25972 - protein, 9 aa, synthetic construct
GLPATGHVK

SEQ ID NO: 25973 - protein, 9 aa, synthetic construct
GLPATGHVF

SEQ ID NO: 25974 - protein, 9 aa, synthetic construct
GLPATGRLY

SEQ ID NO: 25975 - protein, 9 aa, synthetic construct
GLPATGRLH

SEQ ID NO: 25976 - protein, 9 aa, synthetic construct
GLPATGRLF

SEQ ID NO: 25977 - protein, 9 aa, synthetic construct
GLPATGRVY

SEQ ID NO: 25978 - protein, 9 aa, synthetic construct
GLPATGRVH

SEQ ID NO: 25979 - protein, 9 aa, synthetic construct
PLPGAIRLF

SEQ ID NO: 25980 - protein, 9 aa, synthetic construct
GLPATGKLH

SEQ ID NO: 25981 - protein, 9 aa, synthetic construct
GLPATGKLF

SEQ ID NO: 25982 - protein, 9 aa, synthetic construct
GLPATGKVH

SEQ ID NO: 25983 - protein, 9 aa, synthetic construct
GLPATGKVF

SEQ ID NO: 25984 - protein, 9 aa, synthetic construct
PLPGAIRVY

SEQ ID NO: 25985 - protein, 9 aa, synthetic construct
GLPASVHLY

SEQ ID NO: 25986 - protein, 9 aa, synthetic construct
GLPASVHLR

SEQ ID NO: 25987 - protein, 9 aa, synthetic construct
GLPASVHLK

SEQ ID NO: 25988 - protein, 9 aa, synthetic construct
GLPASVHVR

SEQ ID NO: 25989 - protein, 9 aa, synthetic construct
PLPGAIRVR

SEQ ID NO: 25990 - protein, 9 aa, synthetic construct
GLPASVRLY

SEQ ID NO: 25991 - protein, 9 aa, synthetic construct
GLPASVRLR

SEQ ID NO: 25992 - protein, 9 aa, synthetic construct
GLPASVRLH

SEQ ID NO: 25993 - protein, 9 aa, synthetic construct
GLPASVRLK

SEQ ID NO: 25994 - protein, 9 aa, synthetic construct
GLPASVRLF

SEQ ID NO: 25995 - protein, 9 aa, synthetic construct
GLPASVRVY

SEQ ID NO: 25996 - protein, 9 aa, synthetic construct
GLPASVRVH

SEQ ID NO: 25997 - protein, 9 aa, synthetic construct
GLPASVRVF

SEQ ID NO: 25998 - protein, 9 aa, synthetic construct
PLPGAIRVH

SEQ ID NO: 25999 - protein, 9 aa, synthetic construct
GLPASVKLR

SEQ ID NO: 26000 - protein, 9 aa, synthetic construct
GLPASVKLH

SEQ ID NO: 26001 - protein, 9 aa, synthetic construct
GLPASVKLF

SEQ ID NO: 26002 - protein, 9 aa, synthetic construct
GLPASVKVY

SEQ ID NO: 26003 - protein, 9 aa, synthetic construct
GLPASVKVH

SEQ ID NO: 26004 - protein, 9 aa, synthetic construct
GLPASVKVK

SEQ ID NO: 26005 - protein, 9 aa, synthetic construct
GLPASLHLK

SEQ ID NO: 26006 - protein, 9 aa, synthetic construct
GLPASLHVY

SEQ ID NO: 26007 - protein, 9 aa, synthetic construct
GLPASLHVR

SEQ ID NO: 26008 - protein, 9 aa, synthetic construct
GLPASLHVK

SEQ ID NO: 26009 - protein, 9 aa, synthetic construct
GLPASLHVF

SEQ ID NO: 26010 - protein, 9 aa, synthetic construct
PLPGAIRVF

SEQ ID NO: 26011 - protein, 9 aa, synthetic construct
GLPASLRLY

SEQ ID NO: 26012 - protein, 9 aa, synthetic construct
GLPASLRLH

SEQ ID NO: 26013 - protein, 9 aa, synthetic construct
GLPASLRVY

SEQ ID NO: 26014 - protein, 9 aa, synthetic construct
GLPASLRVF

SEQ ID NO: 26015 - protein, 9 aa, synthetic construct
PLPGAIKLY

SEQ ID NO: 26016 - protein, 9 aa, synthetic construct
GLPASLKLH

SEQ ID NO: 26017 - protein, 9 aa, synthetic construct
GLPASLKVY

SEQ ID NO: 26018 - protein, 9 aa, synthetic construct
PLPGAIKLH

SEQ ID NO: 26019 - protein, 9 aa, synthetic construct
GLPASARLY

SEQ ID NO: 26020 - protein, 9 aa, synthetic construct
GLPASARLF

SEQ ID NO: 26021 - protein, 9 aa, synthetic construct
GLPASAKLY

SEQ ID NO: 26022 - protein, 9 aa, synthetic construct
GLPASAKLH

SEQ ID NO: 26023 - protein, 9 aa, synthetic construct
GLPASAKLF

SEQ ID NO: 26024 - protein, 9 aa, synthetic construct
PLPGAIKLF

SEQ ID NO: 26025 - protein, 9 aa, synthetic construct
GLPASIHLY

SEQ ID NO: 26026 - protein, 9 aa, synthetic construct
GLPASIHLR

SEQ ID NO: 26027 - protein, 9 aa, synthetic construct
GLPASIHLH

SEQ ID NO: 26028 - protein, 9 aa, synthetic construct
GLPASIHVY

SEQ ID NO: 26029 - protein, 9 aa, synthetic construct
GLPASIHVR

SEQ ID NO: 26030 - protein, 9 aa, synthetic construct
GLPASIHVH

SEQ ID NO: 26031 - protein, 9 aa, synthetic construct
GLPASIHVK

SEQ ID NO: 26032 - protein, 9 aa, synthetic construct
GLPASIRLY

SEQ ID NO: 26033 - protein, 9 aa, synthetic construct
GLPASIRVY

SEQ ID NO: 26034 - protein, 9 aa, synthetic construct
GLPASIKLH

SEQ ID NO: 26035 - protein, 9 aa, synthetic construct
GLPASIKLF

SEQ ID NO: 26036 - protein, 9 aa, synthetic construct
PLPGAIKVH

SEQ ID NO: 26037 - protein, 9 aa, synthetic construct
GLPASGHLY

SEQ ID NO: 26038 - protein, 9 aa, synthetic construct
GLPASGHLK

SEQ ID NO: 26039 - protein, 9 aa, synthetic construct
GLPASGHLF

SEQ ID NO: 26040 - protein, 9 aa, synthetic construct
GLPASGHVY

SEQ ID NO: 26041 - protein, 9 aa, synthetic construct
GLPASGHVR

SEQ ID NO: 26042 - protein, 9 aa, synthetic construct
GLPASGHVH

SEQ ID NO: 26043 - protein, 9 aa, synthetic construct
GLPASGHVK

SEQ ID NO: 26044 - protein, 9 aa, synthetic construct
GLPASGRLY

SEQ ID NO: 26045 - protein, 9 aa, synthetic construct
GLPASGRLF

SEQ ID NO: 26046 - protein, 9 aa, synthetic construct
PLPGAIKVF

SEQ ID NO: 26047 - protein, 9 aa, synthetic construct
GLPASGKLF

SEQ ID NO: 26048 - protein, 9 aa, synthetic construct
GLPASGKVH

SEQ ID NO: 26049 - protein, 9 aa, synthetic construct
GLPASGKVF

SEQ ID NO: 26050 - protein, 9 aa, synthetic construct
PLNGSVRLH

SEQ ID NO: 26051 - protein, 9 aa, synthetic construct
GLPAVVHLY

SEQ ID NO: 26052 - protein, 9 aa, synthetic construct
GLPAVVHLR

SEQ ID NO: 26053 - protein, 9 aa, synthetic construct
GLPAVVHLH

SEQ ID NO: 26054 - protein, 9 aa, synthetic construct
GLPAVVHVK

SEQ ID NO: 26055 - protein, 9 aa, synthetic construct
GLPAVVHVF

SEQ ID NO: 26056 - protein, 9 aa, synthetic construct
GLPAVVKLH

SEQ ID NO: 26057 - protein, 9 aa, synthetic construct
GLPAVVKVH

SEQ ID NO: 26058 - protein, 9 aa, synthetic construct
GLPAVVKVK

SEQ ID NO: 26059 - protein, 9 aa, synthetic construct
GLPAVVKVF

SEQ ID NO: 26060 - protein, 9 aa, synthetic construct
GLPAVLKLY

SEQ ID NO: 26061 - protein, 9 aa, synthetic construct
GLPAVLKLF

SEQ ID NO: 26062 - protein, 9 aa, synthetic construct
GLPAVLKVY

SEQ ID NO: 26063 - protein, 9 aa, synthetic construct
PLPGAGHVR

SEQ ID NO: 26064 - protein, 9 aa, synthetic construct
GLPAVAHLR

SEQ ID NO: 26065 - protein, 9 aa, synthetic construct
GLPAVAHLK

SEQ ID NO: 26066 - protein, 9 aa, synthetic construct
GLPAVAHVY

SEQ ID NO: 26067 - protein, 9 aa, synthetic construct
GLPAVAHVR

SEQ ID NO: 26068 - protein, 9 aa, synthetic construct
GLPAVAHVK

SEQ ID NO: 26069 - protein, 9 aa, synthetic construct
GLPAVAHVF

SEQ ID NO: 26070 - protein, 9 aa, synthetic construct
GLPAVARLY

SEQ ID NO: 26071 - protein, 9 aa, synthetic construct
GLPAVARLH

SEQ ID NO: 26072 - protein, 9 aa, synthetic construct
GLPAVARVY

SEQ ID NO: 26073 - protein, 9 aa, synthetic construct
GLPAVARVH

SEQ ID NO: 26074 - protein, 9 aa, synthetic construct
GLPAVAKLH

SEQ ID NO: 26075 - protein, 9 aa, synthetic construct
PLPGAGHVF

SEQ ID NO: 26076 - protein, 9 aa, synthetic construct
GLPAVIHLR

SEQ ID NO: 26077 - protein, 9 aa, synthetic construct
GLPAVIHLH

SEQ ID NO: 26078 - protein, 9 aa, synthetic construct
GLPAVIHLK

SEQ ID NO: 26079 - protein, 9 aa, synthetic construct
GLPAVIHVR

SEQ ID NO: 26080 - protein, 9 aa, synthetic construct
GLPAVIHVF

SEQ ID NO: 26081 - protein, 9 aa, synthetic construct
GLPAVIRLR

SEQ ID NO: 26082 - protein, 9 aa, synthetic construct
GLPAVIKLH

SEQ ID NO: 26083 - protein, 9 aa, synthetic construct
GLPAVIKLF

SEQ ID NO: 26084 - protein, 9 aa, synthetic construct
GLPAVGHLR

SEQ ID NO: 26085 - protein, 9 aa, synthetic construct
GLPAVGHVY

SEQ ID NO: 26086 - protein, 9 aa, synthetic construct
GLPAVGHVH

SEQ ID NO: 26087 - protein, 9 aa, synthetic construct
GLPAVGHVK

SEQ ID NO: 26088 - protein, 9 aa, synthetic construct
GLPAVGRVY

SEQ ID NO: 26089 - protein, 9 aa, synthetic construct
GLPAVGRVF

SEQ ID NO: 26090 - protein, 9 aa, synthetic construct
GLPAVGKLY

SEQ ID NO: 26091 - protein, 9 aa, synthetic construct
GLPAVGKLH

SEQ ID NO: 26092 - protein, 9 aa, synthetic construct
GLPAVGKLF

SEQ ID NO: 26093 - protein, 9 aa, synthetic construct
GLPAVGKVY

SEQ ID NO: 26094 - protein, 9 aa, synthetic construct
GLPAVGKVR

SEQ ID NO: 26095 - protein, 9 aa, synthetic construct
GLPAVGKVH

SEQ ID NO: 26096 - protein, 9 aa, synthetic construct
GLPAGVHVR

SEQ ID NO: 26097 - protein, 9 aa, synthetic construct
GLPAGVRLY

SEQ ID NO: 26098 - protein, 9 aa, synthetic construct
GLPAGVRLF

SEQ ID NO: 26099 - protein, 9 aa, synthetic construct
GLPAGVRVY

SEQ ID NO: 26100 - protein, 9 aa, synthetic construct
GLPAGVRVH

SEQ ID NO: 26101 - protein, 9 aa, synthetic construct
GLPAGVRVK

SEQ ID NO: 26102 - protein, 9 aa, synthetic construct
GLPAGVKVK

SEQ ID NO: 26103 - protein, 9 aa, synthetic construct
GLPAGVKVF

SEQ ID NO: 26104 - protein, 9 aa, synthetic construct
PLPGAGRVK

SEQ ID NO: 26105 - protein, 9 aa, synthetic construct
GLPAGLKLH

SEQ ID NO: 26106 - protein, 9 aa, synthetic construct
GLPAGAHLY

SEQ ID NO: 26107 - protein, 9 aa, synthetic construct
GLPAGAHLR

SEQ ID NO: 26108 - protein, 9 aa, synthetic construct
GLPAGAHLH

SEQ ID NO: 26109 - protein, 9 aa, synthetic construct
GLPAGAHVY

SEQ ID NO: 26110 - protein, 9 aa, synthetic construct
GLPAGAHVR

SEQ ID NO: 26111 - protein, 9 aa, synthetic construct
GLPAGAHVH

SEQ ID NO: 26112 - protein, 9 aa, synthetic construct
GLPAGARLY

SEQ ID NO: 26113 - protein, 9 aa, synthetic construct
GLPAGARVH

SEQ ID NO: 26114 - protein, 9 aa, synthetic construct
GLPAGARVF

SEQ ID NO: 26115 - protein, 9 aa, synthetic construct
GLPAGAKLF

SEQ ID NO: 26116 - protein, 9 aa, synthetic construct
GLPAGAKVH

SEQ ID NO: 26117 - protein, 9 aa, synthetic construct
GLPAGAKVF

SEQ ID NO: 26118 - protein, 9 aa, synthetic construct
GLPAGIHLK

SEQ ID NO: 26119 - protein, 9 aa, synthetic construct
GLPAGIHVR

SEQ ID NO: 26120 - protein, 9 aa, synthetic construct
GLPAGIHVH

SEQ ID NO: 26121 - protein, 9 aa, synthetic construct
GLPAGIHVF

SEQ ID NO: 26122 - protein, 9 aa, synthetic construct
GLPAGIRLY

SEQ ID NO: 26123 - protein, 9 aa, synthetic construct
GLPAGIKLY

SEQ ID NO: 26124 - protein, 9 aa, synthetic construct
GLPAGIKVH

SEQ ID NO: 26125 - protein, 9 aa, synthetic construct
GLPAGGHLR

SEQ ID NO: 26126 - protein, 9 aa, synthetic construct
GLPAGGHLH

SEQ ID NO: 26127 - protein, 9 aa, synthetic construct
GLPAGGHLK

SEQ ID NO: 26128 - protein, 9 aa, synthetic construct
GLPAGGHVY

SEQ ID NO: 26129 - protein, 9 aa, synthetic construct
GLPAGGHVR

SEQ ID NO: 26130 - protein, 9 aa, synthetic construct
GLPAGGHVH

SEQ ID NO: 26131 - protein, 9 aa, synthetic construct
GLPAGGHVK

SEQ ID NO: 26132 - protein, 9 aa, synthetic construct
GLPAGGHVF

SEQ ID NO: 26133 - protein, 9 aa, synthetic construct
GLPAGGRLY

SEQ ID NO: 26134 - protein, 9 aa, synthetic construct
GLPAGGRVY

SEQ ID NO: 26135 - protein, 9 aa, synthetic construct
GLPAGGRVR

SEQ ID NO: 26136 - protein, 9 aa, synthetic construct
GLPAGGKLY

SEQ ID NO: 26137 - protein, 9 aa, synthetic construct
GLPAGGKLH

SEQ ID NO: 26138 - protein, 9 aa, synthetic construct
GLPAGGKLF

SEQ ID NO: 26139 - protein, 9 aa, synthetic construct
GLPAGGKVF

SEQ ID NO: 26140 - protein, 9 aa, synthetic construct
GTNGAVHLH

SEQ ID NO: 26141 - protein, 9 aa, synthetic construct
GTNGAVHVY

SEQ ID NO: 26142 - protein, 9 aa, synthetic construct
PLPGTVHLR

SEQ ID NO: 26143 - protein, 9 aa, synthetic construct
GTNGAVRLY

SEQ ID NO: 26144 - protein, 9 aa, synthetic construct
GTNGAVRLH

SEQ ID NO: 26145 - protein, 9 aa, synthetic construct
GTNGAVRLF

SEQ ID NO: 26146 - protein, 9 aa, synthetic construct
GTNGAVRVY

SEQ ID NO: 26147 - protein, 9 aa, synthetic construct
GTNGAVKLK

SEQ ID NO: 26148 - protein, 9 aa, synthetic construct
GTNGAVKLF

SEQ ID NO: 26149 - protein, 9 aa, synthetic construct
GTNGAVKVY

SEQ ID NO: 26150 - protein, 9 aa, synthetic construct
GTNGAVKVH

SEQ ID NO: 26151 - protein, 9 aa, synthetic construct
PLPGTVHLK

SEQ ID NO: 26152 - protein, 9 aa, synthetic construct
GTNGALHLH

SEQ ID NO: 26153 - protein, 9 aa, synthetic construct
GTNGALHLK

SEQ ID NO: 26154 - protein, 9 aa, synthetic construct
GTNGALHVY

SEQ ID NO: 26155 - protein, 9 aa, synthetic construct
GTNGALHVR

SEQ ID NO: 26156 - protein, 9 aa, synthetic construct
GTNGALHVH

SEQ ID NO: 26157 - protein, 9 aa, synthetic construct
GTNGALHVK

SEQ ID NO: 26158 - protein, 9 aa, synthetic construct
PLPGTVHLF

SEQ ID NO: 26159 - protein, 9 aa, synthetic construct
GTNGALRLF

SEQ ID NO: 26160 - protein, 9 aa, synthetic construct
GTNGALRVY

SEQ ID NO: 26161 - protein, 9 aa, synthetic construct
GTNGALRVK

SEQ ID NO: 26162 - protein, 9 aa, synthetic construct
PLPGTVHVY

SEQ ID NO: 26163 - protein, 9 aa, synthetic construct
GTNGALKLY

SEQ ID NO: 26164 - protein, 9 aa, synthetic construct
GTNGALKLR

SEQ ID NO: 26165 - protein, 9 aa, synthetic construct
GTNGALKLH

SEQ ID NO: 26166 - protein, 9 aa, synthetic construct
GTNGALKVR

SEQ ID NO: 26167 - protein, 9 aa, synthetic construct
GTNGALKVF

SEQ ID NO: 26168 - protein, 9 aa, synthetic construct
PLPGTVHVR

SEQ ID NO: 26169 - protein, 9 aa, synthetic construct
GTNGAAHLY

SEQ ID NO: 26170 - protein, 9 aa, synthetic construct
GTNGAAHLR

SEQ ID NO: 26171 - protein, 9 aa, synthetic construct
GTNGAAHLH

SEQ ID NO: 26172 - protein, 9 aa, synthetic construct
GTNGAAHLK

SEQ ID NO: 26173 - protein, 9 aa, synthetic construct
GTNGAAHLF

SEQ ID NO: 26174 - protein, 9 aa, synthetic construct
GTNGAAHVR

SEQ ID NO: 26175 - protein, 9 aa, synthetic construct
GTNGAAHVK

SEQ ID NO: 26176 - protein, 9 aa, synthetic construct
GTNGAARLH

SEQ ID NO: 26177 - protein, 9 aa, synthetic construct
GTNGAARVR

SEQ ID NO: 26178 - protein, 9 aa, synthetic construct
GTNGAARVK

SEQ ID NO: 26179 - protein, 9 aa, synthetic construct
PLPGTVHVF

SEQ ID NO: 26180 - protein, 9 aa, synthetic construct
GTNGAIHLR

SEQ ID NO: 26181 - protein, 9 aa, synthetic construct
GTNGAIHVR

SEQ ID NO: 26182 - protein, 9 aa, synthetic construct
GTNGAIRVH

SEQ ID NO: 26183 - protein, 9 aa, synthetic construct
GTNGAIKLF

SEQ ID NO: 26184 - protein, 9 aa, synthetic construct
GTNGAIKVR

SEQ ID NO: 26185 - protein, 9 aa, synthetic construct
GTNGAIKVH

SEQ ID NO: 26186 - protein, 9 aa, synthetic construct
PLPGTVRLH

SEQ ID NO: 26187 - protein, 9 aa, synthetic construct
GTNGAGHLY

SEQ ID NO: 26188 - protein, 9 aa, synthetic construct
GTNGAGHLR

SEQ ID NO: 26189 - protein, 9 aa, synthetic construct
GTNGAGHLK

SEQ ID NO: 26190 - protein, 9 aa, synthetic construct
GTNGAGHVY

SEQ ID NO: 26191 - protein, 9 aa, synthetic construct
GTNGAGHVR

SEQ ID NO: 26192 - protein, 9 aa, synthetic construct
GTNGAGHVH

SEQ ID NO: 26193 - protein, 9 aa, synthetic construct
GTNGAGHVK

SEQ ID NO: 26194 - protein, 9 aa, synthetic construct
PLPGTVRLK

SEQ ID NO: 26195 - protein, 9 aa, synthetic construct
GTNGAGRLY

SEQ ID NO: 26196 - protein, 9 aa, synthetic construct
GTNGAGRVH

SEQ ID NO: 26197 - protein, 9 aa, synthetic construct
GTNGAGRVK

SEQ ID NO: 26198 - protein, 9 aa, synthetic construct
PLPGTVRLF

SEQ ID NO: 26199 - protein, 9 aa, synthetic construct
GTNGAGKLR

SEQ ID NO: 26200 - protein, 9 aa, synthetic construct
GTNGAGKVY

SEQ ID NO: 26201 - protein, 9 aa, synthetic construct
GTNGAGKVH

SEQ ID NO: 26202 - protein, 9 aa, synthetic construct
PLPGTVRVY

SEQ ID NO: 26203 - protein, 9 aa, synthetic construct
GTNGTVHLR

SEQ ID NO: 26204 - protein, 9 aa, synthetic construct
GTNGTVHLF

SEQ ID NO: 26205 - protein, 9 aa, synthetic construct
GTNGTVHVY

SEQ ID NO: 26206 - protein, 9 aa, synthetic construct
GTNGTVHVR

SEQ ID NO: 26207 - protein, 9 aa, synthetic construct
GTNGTVHVK

SEQ ID NO: 26208 - protein, 9 aa, synthetic construct
GTNGTVHVF

SEQ ID NO: 26209 - protein, 9 aa, synthetic construct
GTNGTVRLH

SEQ ID NO: 26210 - protein, 9 aa, synthetic construct
GTNGTVRLF

SEQ ID NO: 26211 - protein, 9 aa, synthetic construct
GTNGTVRVY

SEQ ID NO: 26212 - protein, 9 aa, synthetic construct
GTNGTVRVH

SEQ ID NO: 26213 - protein, 9 aa, synthetic construct
GTNGTVRVK

SEQ ID NO: 26214 - protein, 9 aa, synthetic construct
GTNGTVRVF

SEQ ID NO: 26215 - protein, 9 aa, synthetic construct
GTNGTVKLK

SEQ ID NO: 26216 - protein, 9 aa, synthetic construct
GTNGTVKVY

SEQ ID NO: 26217 - protein, 9 aa, synthetic construct
GTNGTVKVH

SEQ ID NO: 26218 - protein, 9 aa, synthetic construct
GTNGTVKVF

SEQ ID NO: 26219 - protein, 9 aa, synthetic construct
GTNGTLHLR

SEQ ID NO: 26220 - protein, 9 aa, synthetic construct
GTNGTLHLH

SEQ ID NO: 26221 - protein, 9 aa, synthetic construct
GTNGTLHLF

SEQ ID NO: 26222 - protein, 9 aa, synthetic construct
GTNGTLHVH

SEQ ID NO: 26223 - protein, 9 aa, synthetic construct
PLPGTVRVF

SEQ ID NO: 26224 - protein, 9 aa, synthetic construct
GTNGTLRLY

SEQ ID NO: 26225 - protein, 9 aa, synthetic construct
GTNGTLRLH

SEQ ID NO: 26226 - protein, 9 aa, synthetic construct
GTNGTLRLF

SEQ ID NO: 26227 - protein, 9 aa, synthetic construct
GTNGTLRVK

SEQ ID NO: 26228 - protein, 9 aa, synthetic construct
GTNGTLRVF

SEQ ID NO: 26229 - protein, 9 aa, synthetic construct
GTNGTLKVF

SEQ ID NO: 26230 - protein, 9 aa, synthetic construct
PLPGTVKLR

SEQ ID NO: 26231 - protein, 9 aa, synthetic construct
GTNGTARLH

SEQ ID NO: 26232 - protein, 9 aa, synthetic construct
PLPGTVKLK

SEQ ID NO: 26233 - protein, 9 aa, synthetic construct
GTNGTAKLR

SEQ ID NO: 26234 - protein, 9 aa, synthetic construct
GTNGTAKLH

SEQ ID NO: 26235 - protein, 9 aa, synthetic construct
GTNGTAKLF

SEQ ID NO: 26236 - protein, 9 aa, synthetic construct
GTNGTAKVH

SEQ ID NO: 26237 - protein, 9 aa, synthetic construct
GTNGTIHLY

SEQ ID NO: 26238 - protein, 9 aa, synthetic construct
GTNGTIHLR

SEQ ID NO: 26239 - protein, 9 aa, synthetic construct
GTNGTIHVY

SEQ ID NO: 26240 - protein, 9 aa, synthetic construct
GTNGTIHVR

SEQ ID NO: 26241 - protein, 9 aa, synthetic construct
GTNGTIHVH

SEQ ID NO: 26242 - protein, 9 aa, synthetic construct
GTNGTIRLY

SEQ ID NO: 26243 - protein, 9 aa, synthetic construct
GTNGTIRLH

SEQ ID NO: 26244 - protein, 9 aa, synthetic construct
GTNGTIRLF

SEQ ID NO: 26245 - protein, 9 aa, synthetic construct
GTNGTIRVH

SEQ ID NO: 26246 - protein, 9 aa, synthetic construct
GTNGTIKLY

SEQ ID NO: 26247 - protein, 9 aa, synthetic construct
GTNGTIKLH

SEQ ID NO: 26248 - protein, 9 aa, synthetic construct
GTNGTIKLK

SEQ ID NO: 26249 - protein, 9 aa, synthetic construct
GTNGTIKLF

SEQ ID NO: 26250 - protein, 9 aa, synthetic construct
GTNGTIKVF

SEQ ID NO: 26251 - protein, 9 aa, synthetic construct
PLPGTVKVH

SEQ ID NO: 26252 - protein, 9 aa, synthetic construct
GTNGTGHLR

SEQ ID NO: 26253 - protein, 9 aa, synthetic construct
GTNGTGHLK

SEQ ID NO: 26254 - protein, 9 aa, synthetic construct
GTNGTGHLF

SEQ ID NO: 26255 - protein, 9 aa, synthetic construct
GTNGTGHVY

SEQ ID NO: 26256 - protein, 9 aa, synthetic construct
GTNGTGHVR

SEQ ID NO: 26257 - protein, 9 aa, synthetic construct
GTNGTGHVH

SEQ ID NO: 26258 - protein, 9 aa, synthetic construct
GTNGTGHVK

SEQ ID NO: 26259 - protein, 9 aa, synthetic construct
GTNGTGHVF

SEQ ID NO: 26260 - protein, 9 aa, synthetic construct
GTNGTGRLY

SEQ ID NO: 26261 - protein, 9 aa, synthetic construct
GTNGTGRLH

SEQ ID NO: 26262 - protein, 9 aa, synthetic construct
GTNGTGRLF

SEQ ID NO: 26263 - protein, 9 aa, synthetic construct
GTNGTGRVY

SEQ ID NO: 26264 - protein, 9 aa, synthetic construct
GTNGTGRVK

SEQ ID NO: 26265 - protein, 9 aa, synthetic construct
PLPGTVKVF

SEQ ID NO: 26266 - protein, 9 aa, synthetic construct
GTNGTGKLH

SEQ ID NO: 26267 - protein, 9 aa, synthetic construct
GTNGTGKLF

SEQ ID NO: 26268 - protein, 9 aa, synthetic construct
GTNGTGKVY

SEQ ID NO: 26269 - protein, 9 aa, synthetic construct
GTNGTGKVR

SEQ ID NO: 26270 - protein, 9 aa, synthetic construct
GTNGTGKVF

SEQ ID NO: 26271 - protein, 9 aa, synthetic construct
GTNGSVHLR

SEQ ID NO: 26272 - protein, 9 aa, synthetic construct
GTNGSVHVR

SEQ ID NO: 26273 - protein, 9 aa, synthetic construct
GTNGSVRLH

SEQ ID NO: 26274 - protein, 9 aa, synthetic construct
GTNGSVRVH

SEQ ID NO: 26275 - protein, 9 aa, synthetic construct
GTNGSVRVF

SEQ ID NO: 26276 - protein, 9 aa, synthetic construct
PLPGTLHLH

SEQ ID NO: 26277 - protein, 9 aa, synthetic construct
GTNGSVKLH

SEQ ID NO: 26278 - protein, 9 aa, synthetic construct
GTNGSVKVH

SEQ ID NO: 26279 - protein, 9 aa, synthetic construct
GTNGSLHLH

SEQ ID NO: 26280 - protein, 9 aa, synthetic construct
GTNGSLHLK

SEQ ID NO: 26281 - protein, 9 aa, synthetic construct
PLPGTLHVY

SEQ ID NO: 26282 - protein, 9 aa, synthetic construct
PLPGTLHVR

SEQ ID NO: 26283 - protein, 9 aa, synthetic construct
GTNGSAKLK

SEQ ID NO: 26284 - protein, 9 aa, synthetic construct
PLPGTLHVF

SEQ ID NO: 26285 - protein, 9 aa, synthetic construct
GTNGSIHLY

SEQ ID NO: 26286 - protein, 9 aa, synthetic construct
GTNGSIHLK

SEQ ID NO: 26287 - protein, 9 aa, synthetic construct
GTNGSIHVR

SEQ ID NO: 26288 - protein, 9 aa, synthetic construct
GTNGSIHVH

SEQ ID NO: 26289 - protein, 9 aa, synthetic construct
GTNGSIHVF

SEQ ID NO: 26290 - protein, 9 aa, synthetic construct
PLNGSVRVF

SEQ ID NO: 26291 - protein, 9 aa, synthetic construct
PLPGTLRLY

SEQ ID NO: 26292 - protein, 9 aa, synthetic construct
GTNGSIRLY

SEQ ID NO: 26293 - protein, 9 aa, synthetic construct
GTNGSIRLF

SEQ ID NO: 26294 - protein, 9 aa, synthetic construct
GTNGSIRVR

SEQ ID NO: 26295 - protein, 9 aa, synthetic construct
GTNGSIRVH

SEQ ID NO: 26296 - protein, 9 aa, synthetic construct
PLPGTLRLH

SEQ ID NO: 26297 - protein, 9 aa, synthetic construct
GTNGSGHLK

SEQ ID NO: 26298 - protein, 9 aa, synthetic construct
GTNGSGHLF

SEQ ID NO: 26299 - protein, 9 aa, synthetic construct
GTNGSGHVY

SEQ ID NO: 26300 - protein, 9 aa, synthetic construct
GTNGSGHVK

SEQ ID NO: 26301 - protein, 9 aa, synthetic construct
GTNGSGRLY

SEQ ID NO: 26302 - protein, 9 aa, synthetic construct
GTNGSGRLR

SEQ ID NO: 26303 - protein, 9 aa, synthetic construct
GTNGSGRLF

SEQ ID NO: 26304 - protein, 9 aa, synthetic construct
GTNGSGRVH

SEQ ID NO: 26305 - protein, 9 aa, synthetic construct
PLPGTLRLF

SEQ ID NO: 26306 - protein, 9 aa, synthetic construct
GTNGSGKLR

SEQ ID NO: 26307 - protein, 9 aa, synthetic construct
GTNGSGKLK

SEQ ID NO: 26308 - protein, 9 aa, synthetic construct
GTNGSGKVY

SEQ ID NO: 26309 - protein, 9 aa, synthetic construct
GTNGSGKVH

SEQ ID NO: 26310 - protein, 9 aa, synthetic construct
GTNGSGKVK

SEQ ID NO: 26311 - protein, 9 aa, synthetic construct
PLPGTLRVY

SEQ ID NO: 26312 - protein, 9 aa, synthetic construct
GTNGVVHLY

SEQ ID NO: 26313 - protein, 9 aa, synthetic construct
GTNGVVHLK

SEQ ID NO: 26314 - protein, 9 aa, synthetic construct
GTNGVVHVF

SEQ ID NO: 26315 - protein, 9 aa, synthetic construct
GTNGVVRLH

SEQ ID NO: 26316 - protein, 9 aa, synthetic construct
GTNGVVRLF

SEQ ID NO: 26317 - protein, 9 aa, synthetic construct
GTNGVVRVF

SEQ ID NO: 26318 - protein, 9 aa, synthetic construct
GTNGVVKLY

SEQ ID NO: 26319 - protein, 9 aa, synthetic construct
GTNGVVKLH

SEQ ID NO: 26320 - protein, 9 aa, synthetic construct
GTNGVLHLH

SEQ ID NO: 26321 - protein, 9 aa, synthetic construct
GTNGVLHVR

SEQ ID NO: 26322 - protein, 9 aa, synthetic construct
GTNGVLHVF

SEQ ID NO: 26323 - protein, 9 aa, synthetic construct
GTNGVLRLY

SEQ ID NO: 26324 - protein, 9 aa, synthetic construct
GTNGVLRLR

SEQ ID NO: 26325 - protein, 9 aa, synthetic construct
GTNGVLRLF

SEQ ID NO: 26326 - protein, 9 aa, synthetic construct
GTNGVLRVK

SEQ ID NO: 26327 - protein, 9 aa, synthetic construct
GTNGVLRVF

SEQ ID NO: 26328 - protein, 9 aa, synthetic construct
GTNGVLKLY

SEQ ID NO: 26329 - protein, 9 aa, synthetic construct
GTNGVLKLR

SEQ ID NO: 26330 - protein, 9 aa, synthetic construct
GTNGVLKVY

SEQ ID NO: 26331 - protein, 9 aa, synthetic construct
GTNGVLKVR

SEQ ID NO: 26332 - protein, 9 aa, synthetic construct
GTNGVLKVF

SEQ ID NO: 26333 - protein, 9 aa, synthetic construct
PLPGTLKLR

SEQ ID NO: 26334 - protein, 9 aa, synthetic construct
GTNGVAHLY

SEQ ID NO: 26335 - protein, 9 aa, synthetic construct
GTNGVAHLK

SEQ ID NO: 26336 - protein, 9 aa, synthetic construct
GTNGVARLH

SEQ ID NO: 26337 - protein, 9 aa, synthetic construct
GTNGVARLF

SEQ ID NO: 26338 - protein, 9 aa, synthetic construct
GTNGVARVY

SEQ ID NO: 26339 - protein, 9 aa, synthetic construct
GTNGVARVR

SEQ ID NO: 26340 - protein, 9 aa, synthetic construct
GTNGVARVH

SEQ ID NO: 26341 - protein, 9 aa, synthetic construct
GTNGVAKLY

SEQ ID NO: 26342 - protein, 9 aa, synthetic construct
GTNGVAKLF

SEQ ID NO: 26343 - protein, 9 aa, synthetic construct
GTNGVAKVR

SEQ ID NO: 26344 - protein, 9 aa, synthetic construct
GTNGVAKVF

SEQ ID NO: 26345 - protein, 9 aa, synthetic construct
PLPGTLKLF

SEQ ID NO: 26346 - protein, 9 aa, synthetic construct
GTNGVIHLF

SEQ ID NO: 26347 - protein, 9 aa, synthetic construct
GTNGVIRLY

SEQ ID NO: 26348 - protein, 9 aa, synthetic construct
GTNGVIRLR

SEQ ID NO: 26349 - protein, 9 aa, synthetic construct
GTNGVIRVH

SEQ ID NO: 26350 - protein, 9 aa, synthetic construct
GTNGVIKLY

SEQ ID NO: 26351 - protein, 9 aa, synthetic construct
GTNGVIKVH

SEQ ID NO: 26352 - protein, 9 aa, synthetic construct
PLPGTLKVH

SEQ ID NO: 26353 - protein, 9 aa, synthetic construct
GTNGVGHLK

SEQ ID NO: 26354 - protein, 9 aa, synthetic construct
GTNGVGRLF

SEQ ID NO: 26355 - protein, 9 aa, synthetic construct
GTNGVGRVY

SEQ ID NO: 26356 - protein, 9 aa, synthetic construct
GTNGVGRVH

SEQ ID NO: 26357 - protein, 9 aa, synthetic construct
PLPGTLKVF

SEQ ID NO: 26358 - protein, 9 aa, synthetic construct
GTNGVGKLY

SEQ ID NO: 26359 - protein, 9 aa, synthetic construct
GTNGVGKLR

SEQ ID NO: 26360 - protein, 9 aa, synthetic construct
GTNGVGKVY

SEQ ID NO: 26361 - protein, 9 aa, synthetic construct
GTNGVGKVH

SEQ ID NO: 26362 - protein, 9 aa, synthetic construct
PLNGSVKLR

SEQ ID NO: 26363 - protein, 9 aa, synthetic construct
GTNGGVRLY

SEQ ID NO: 26364 - protein, 9 aa, synthetic construct
GTNGGVRLH

SEQ ID NO: 26365 - protein, 9 aa, synthetic construct
GTNGGVRVY

SEQ ID NO: 26366 - protein, 9 aa, synthetic construct
GTNGGVRVF

SEQ ID NO: 26367 - protein, 9 aa, synthetic construct
GTNGGVKLH

SEQ ID NO: 26368 - protein, 9 aa, synthetic construct
GTNGGVKVY

SEQ ID NO: 26369 - protein, 9 aa, synthetic construct
GTNGGVKVH

SEQ ID NO: 26370 - protein, 9 aa, synthetic construct
GTNGGLHVR

SEQ ID NO: 26371 - protein, 9 aa, synthetic construct
GTNGGLHVK

SEQ ID NO: 26372 - protein, 9 aa, synthetic construct
GTNGGLRLF

SEQ ID NO: 26373 - protein, 9 aa, synthetic construct
GTNGGAKLF

SEQ ID NO: 26374 - protein, 9 aa, synthetic construct
GTNGGAKVR

SEQ ID NO: 26375 - protein, 9 aa, synthetic construct
GTNGGIHLH

SEQ ID NO: 26376 - protein, 9 aa, synthetic construct
GTNGGIHLK

SEQ ID NO: 26377 - protein, 9 aa, synthetic construct
GTNGGIHLF

SEQ ID NO: 26378 - protein, 9 aa, synthetic construct
PLNGSVKLH

SEQ ID NO: 26379 - protein, 9 aa, synthetic construct
PLPGTARLY

SEQ ID NO: 26380 - protein, 9 aa, synthetic construct
PLPGTARLR

SEQ ID NO: 26381 - protein, 9 aa, synthetic construct
GTNGGIKVY

SEQ ID NO: 26382 - protein, 9 aa, synthetic construct
GTNGGGHLK

SEQ ID NO: 26383 - protein, 9 aa, synthetic construct
GTNGGGHLF

SEQ ID NO: 26384 - protein, 9 aa, synthetic construct
GTNGGGHVH

SEQ ID NO: 26385 - protein, 9 aa, synthetic construct
PLPGTARLK

SEQ ID NO: 26386 - protein, 9 aa, synthetic construct
GTNGGGRVH

SEQ ID NO: 26387 - protein, 9 aa, synthetic construct
PLPGTARLF

SEQ ID NO: 26388 - protein, 9 aa, synthetic construct
GTNGGGKVY

SEQ ID NO: 26389 - protein, 9 aa, synthetic construct
GTNGGGKVH

SEQ ID NO: 26390 - protein, 9 aa, synthetic construct
GTNAAVHVR

SEQ ID NO: 26391 - protein, 9 aa, synthetic construct
GTNAAVHVF

SEQ ID NO: 26392 - protein, 9 aa, synthetic construct
GTNAAVRLY

SEQ ID NO: 26393 - protein, 9 aa, synthetic construct
GTNAAVRLF

SEQ ID NO: 26394 - protein, 9 aa, synthetic construct
GTNAAVKLH

SEQ ID NO: 26395 - protein, 9 aa, synthetic construct
GTNAAVKLK

SEQ ID NO: 26396 - protein, 9 aa, synthetic construct
GTNAAVKVH

SEQ ID NO: 26397 - protein, 9 aa, synthetic construct
GTNAAVKVK

SEQ ID NO: 26398 - protein, 9 aa, synthetic construct
GTNAAVKVF

SEQ ID NO: 26399 - protein, 9 aa, synthetic construct
GTNAALHLY

SEQ ID NO: 26400 - protein, 9 aa, synthetic construct
GTNAALHLH

SEQ ID NO: 26401 - protein, 9 aa, synthetic construct
GTNAALHVH

SEQ ID NO: 26402 - protein, 9 aa, synthetic construct
GTNAALHVF

SEQ ID NO: 26403 - protein, 9 aa, synthetic construct
GTNAALRLH

SEQ ID NO: 26404 - protein, 9 aa, synthetic construct
GTNAALRVR

SEQ ID NO: 26405 - protein, 9 aa, synthetic construct
GTNAALRVH

SEQ ID NO: 26406 - protein, 9 aa, synthetic construct
GTNAALRVK

SEQ ID NO: 26407 - protein, 9 aa, synthetic construct
GTNAALKLF

SEQ ID NO: 26408 - protein, 9 aa, synthetic construct
GTNAALKVF

SEQ ID NO: 26409 - protein, 9 aa, synthetic construct
GTNAAAHLY

SEQ ID NO: 26410 - protein, 9 aa, synthetic construct
GTNAAAHLF

SEQ ID NO: 26411 - protein, 9 aa, synthetic construct
GTNAAAHVR

SEQ ID NO: 26412 - protein, 9 aa, synthetic construct
GTNAAAHVF

SEQ ID NO: 26413 - protein, 9 aa, synthetic construct
GTNAAARLY

SEQ ID NO: 26414 - protein, 9 aa, synthetic construct
GTNAAARLF

SEQ ID NO: 26415 - protein, 9 aa, synthetic construct
GTNAAARVR

SEQ ID NO: 26416 - protein, 9 aa, synthetic construct
GTNAAARVH

SEQ ID NO: 26417 - protein, 9 aa, synthetic construct
PLPGTAKLF

SEQ ID NO: 26418 - protein, 9 aa, synthetic construct
GTNAAIHLY

SEQ ID NO: 26419 - protein, 9 aa, synthetic construct
GTNAAIHLR

SEQ ID NO: 26420 - protein, 9 aa, synthetic construct
GTNAAIHVR

SEQ ID NO: 26421 - protein, 9 aa, synthetic construct
GTNAAIHVF

SEQ ID NO: 26422 - protein, 9 aa, synthetic construct
GTNAAIRLF

SEQ ID NO: 26423 - protein, 9 aa, synthetic construct
PLPGTAKVR

SEQ ID NO: 26424 - protein, 9 aa, synthetic construct
GTNAAIKLH

SEQ ID NO: 26425 - protein, 9 aa, synthetic construct
GTNAAIKLK

SEQ ID NO: 26426 - protein, 9 aa, synthetic construct
GTNAAIKLF

SEQ ID NO: 26427 - protein, 9 aa, synthetic construct
GTNAAIKVR

SEQ ID NO: 26428 - protein, 9 aa, synthetic construct
GTNAAIKVH

SEQ ID NO: 26429 - protein, 9 aa, synthetic construct
GTNAAGHVY

SEQ ID NO: 26430 - protein, 9 aa, synthetic construct
GTNAAGRVR

SEQ ID NO: 26431 - protein, 9 aa, synthetic construct
GTNAAGRVK

SEQ ID NO: 26432 - protein, 9 aa, synthetic construct
GTNAAGKLF

SEQ ID NO: 26433 - protein, 9 aa, synthetic construct
PLPGTIHLY

SEQ ID NO: 26434 - protein, 9 aa, synthetic construct
PLPGTIHLR

SEQ ID NO: 26435 - protein, 9 aa, synthetic construct
GTNATVRLH

SEQ ID NO: 26436 - protein, 9 aa, synthetic construct
GTNATVRVF

SEQ ID NO: 26437 - protein, 9 aa, synthetic construct
GTNATVKLR

SEQ ID NO: 26438 - protein, 9 aa, synthetic construct
GTNATLHLH

SEQ ID NO: 26439 - protein, 9 aa, synthetic construct
GTNATLHLK

SEQ ID NO: 26440 - protein, 9 aa, synthetic construct
GTNATLHVK

SEQ ID NO: 26441 - protein, 9 aa, synthetic construct
PLPGTIHLF

SEQ ID NO: 26442 - protein, 9 aa, synthetic construct
PLPGTIHVY

SEQ ID NO: 26443 - protein, 9 aa, synthetic construct
GTNATLKLF

SEQ ID NO: 26444 - protein, 9 aa, synthetic construct
PLPGTIHVR

SEQ ID NO: 26445 - protein, 9 aa, synthetic construct
GTNATARLF

SEQ ID NO: 26446 - protein, 9 aa, synthetic construct
PLPGTIHVF

SEQ ID NO: 26447 - protein, 9 aa, synthetic construct
GTNATIHVY

SEQ ID NO: 26448 - protein, 9 aa, synthetic construct
GTNATIHVF

SEQ ID NO: 26449 - protein, 9 aa, synthetic construct
GTNATIRLK

SEQ ID NO: 26450 - protein, 9 aa, synthetic construct
GTNATIRLF

SEQ ID NO: 26451 - protein, 9 aa, synthetic construct
GTNATIRVY

SEQ ID NO: 26452 - protein, 9 aa, synthetic construct
GTNATIRVH

SEQ ID NO: 26453 - protein, 9 aa, synthetic construct
GTNATIRVF

SEQ ID NO: 26454 - protein, 9 aa, synthetic construct
GTNATIKLY

SEQ ID NO: 26455 - protein, 9 aa, synthetic construct
GTNATIKLK

SEQ ID NO: 26456 - protein, 9 aa, synthetic construct
GTNATIKLF

SEQ ID NO: 26457 - protein, 9 aa, synthetic construct
PLPGTIRLH

SEQ ID NO: 26458 - protein, 9 aa, synthetic construct
GTNATGRLY

SEQ ID NO: 26459 - protein, 9 aa, synthetic construct
GTNATGRVY

SEQ ID NO: 26460 - protein, 9 aa, synthetic construct
PLPGTIRLF

SEQ ID NO: 26461 - protein, 9 aa, synthetic construct
PLPGTIRVY

SEQ ID NO: 26462 - protein, 9 aa, synthetic construct
GTNASVHLY

SEQ ID NO: 26463 - protein, 9 aa, synthetic construct
GTNASVHLR

SEQ ID NO: 26464 - protein, 9 aa, synthetic construct
GTNASVHLK

SEQ ID NO: 26465 - protein, 9 aa, synthetic construct
GTNASVHVR

SEQ ID NO: 26466 - protein, 9 aa, synthetic construct
GTNASVRLH

SEQ ID NO: 26467 - protein, 9 aa, synthetic construct
GTNASVRVY

SEQ ID NO: 26468 - protein, 9 aa, synthetic construct
GTNASVKVH

SEQ ID NO: 26469 - protein, 9 aa, synthetic construct
GTNASLHVR

SEQ ID NO: 26470 - protein, 9 aa, synthetic construct
PLPGTIRVF

SEQ ID NO: 26471 - protein, 9 aa, synthetic construct
GTNASLRLH

SEQ ID NO: 26472 - protein, 9 aa, synthetic construct
GTNASLRVY

SEQ ID NO: 26473 - protein, 9 aa, synthetic construct
GTNASLRVF

SEQ ID NO: 26474 - protein, 9 aa, synthetic construct
PLNGSVKVR

SEQ ID NO: 26475 - protein, 9 aa, synthetic construct
PLPGTIKLY

SEQ ID NO: 26476 - protein, 9 aa, synthetic construct
GTNASLKVH

SEQ ID NO: 26477 - protein, 9 aa, synthetic construct
PLPGTIKLR

SEQ ID NO: 26478 - protein, 9 aa, synthetic construct
PLPGTIKLH

SEQ ID NO: 26479 - protein, 9 aa, synthetic construct
GTNASARLY

SEQ ID NO: 26480 - protein, 9 aa, synthetic construct
GTNASARLH

SEQ ID NO: 26481 - protein, 9 aa, synthetic construct
GTNASAKLR

SEQ ID NO: 26482 - protein, 9 aa, synthetic construct
GTNASAKVY

SEQ ID NO: 26483 - protein, 9 aa, synthetic construct
PLPGTIKLF

SEQ ID NO: 26484 - protein, 9 aa, synthetic construct
GTNASIHLY

SEQ ID NO: 26485 - protein, 9 aa, synthetic construct
GTNASIHVK

SEQ ID NO: 26486 - protein, 9 aa, synthetic construct
GTNASIRLY

SEQ ID NO: 26487 - protein, 9 aa, synthetic construct
GTNASIRLH

SEQ ID NO: 26488 - protein, 9 aa, synthetic construct
GTNASIRLK

SEQ ID NO: 26489 - protein, 9 aa, synthetic construct
GTNASIRVF

SEQ ID NO: 26490 - protein, 9 aa, synthetic construct
GTNASIKLR

SEQ ID NO: 26491 - protein, 9 aa, synthetic construct
GTNASIKLF

SEQ ID NO: 26492 - protein, 9 aa, synthetic construct
GTNASIKVY

SEQ ID NO: 26493 - protein, 9 aa, synthetic construct
GTNASIKVH

SEQ ID NO: 26494 - protein, 9 aa, synthetic construct
GTNASIKVF

SEQ ID NO: 26495 - protein, 9 aa, synthetic construct
PLPGTIKVH

SEQ ID NO: 26496 - protein, 9 aa, synthetic construct
GTNASGRLR

SEQ ID NO: 26497 - protein, 9 aa, synthetic construct
GTNASGRVY

SEQ ID NO: 26498 - protein, 9 aa, synthetic construct
PLPGTIKVF

SEQ ID NO: 26499 - protein, 9 aa, synthetic construct
GTNASGKLY

SEQ ID NO: 26500 - protein, 9 aa, synthetic construct
GTNASGKLF

SEQ ID NO: 26501 - protein, 9 aa, synthetic construct
GTNASGKVY

SEQ ID NO: 26502 - protein, 9 aa, synthetic construct
GTNASGKVK

SEQ ID NO: 26503 - protein, 9 aa, synthetic construct
GTNAVVHLY

SEQ ID NO: 26504 - protein, 9 aa, synthetic construct
GTNAVVHLH

SEQ ID NO: 26505 - protein, 9 aa, synthetic construct
GTNAVVHVY

SEQ ID NO: 26506 - protein, 9 aa, synthetic construct
GTNAVVHVR

SEQ ID NO: 26507 - protein, 9 aa, synthetic construct
GTNAVVHVF

SEQ ID NO: 26508 - protein, 9 aa, synthetic construct
PLPGTGHLR

SEQ ID NO: 26509 - protein, 9 aa, synthetic construct
GTNAVVRLF

SEQ ID NO: 26510 - protein, 9 aa, synthetic construct
GTNAVVRVF

SEQ ID NO: 26511 - protein, 9 aa, synthetic construct
GTNAVVKLR

SEQ ID NO: 26512 - protein, 9 aa, synthetic construct
GTNAVVKLH

SEQ ID NO: 26513 - protein, 9 aa, synthetic construct
GTNAVVKVY

SEQ ID NO: 26514 - protein, 9 aa, synthetic construct
GTNAVVKVF

SEQ ID NO: 26515 - protein, 9 aa, synthetic construct
GTNAVLRLH

SEQ ID NO: 26516 - protein, 9 aa, synthetic construct
GTNAVLRLF

SEQ ID NO: 26517 - protein, 9 aa, synthetic construct
GTNAVLRVH

SEQ ID NO: 26518 - protein, 9 aa, synthetic construct
GTNAVLRVF

SEQ ID NO: 26519 - protein, 9 aa, synthetic construct
PLPGTGHVY

SEQ ID NO: 26520 - protein, 9 aa, synthetic construct
GTNAVLKVY

SEQ ID NO: 26521 - protein, 9 aa, synthetic construct
GTNAVLKVH

SEQ ID NO: 26522 - protein, 9 aa, synthetic construct
GTNAVLKVF

SEQ ID NO: 26523 - protein, 9 aa, synthetic construct
PLPGTGHVR

SEQ ID NO: 26524 - protein, 9 aa, synthetic construct
GTNAVAHVH

SEQ ID NO: 26525 - protein, 9 aa, synthetic construct
GTNAVAKLK

SEQ ID NO: 26526 - protein, 9 aa, synthetic construct
GTNAVAKVY

SEQ ID NO: 26527 - protein, 9 aa, synthetic construct
GTNAVAKVR

SEQ ID NO: 26528 - protein, 9 aa, synthetic construct
GTNAVAKVH

SEQ ID NO: 26529 - protein, 9 aa, synthetic construct
GTNAVAKVK

SEQ ID NO: 26530 - protein, 9 aa, synthetic construct
PLPGTGHVF

SEQ ID NO: 26531 - protein, 9 aa, synthetic construct
GTNAVIHVR

SEQ ID NO: 26532 - protein, 9 aa, synthetic construct
GTNAVIHVF

SEQ ID NO: 26533 - protein, 9 aa, synthetic construct
PLNGSVKVK

SEQ ID NO: 26534 - protein, 9 aa, synthetic construct
PLPGTGRLY

SEQ ID NO: 26535 - protein, 9 aa, synthetic construct
GTNAVIRLY

SEQ ID NO: 26536 - protein, 9 aa, synthetic construct
GTNAVIRLR

SEQ ID NO: 26537 - protein, 9 aa, synthetic construct
GTNAVIRLH

SEQ ID NO: 26538 - protein, 9 aa, synthetic construct
GTNAVIRLF

SEQ ID NO: 26539 - protein, 9 aa, synthetic construct
GTNAVIRVH

SEQ ID NO: 26540 - protein, 9 aa, synthetic construct
GTNAVIRVF

SEQ ID NO: 26541 - protein, 9 aa, synthetic construct
PLPGTGRLR

SEQ ID NO: 26542 - protein, 9 aa, synthetic construct
GTNAVIKVY

SEQ ID NO: 26543 - protein, 9 aa, synthetic construct
GTNAVIKVR

SEQ ID NO: 26544 - protein, 9 aa, synthetic construct
PLPGTGRLH

SEQ ID NO: 26545 - protein, 9 aa, synthetic construct
GTNAVGHVF

SEQ ID NO: 26546 - protein, 9 aa, synthetic construct
PLPGTGRLK

SEQ ID NO: 26547 - protein, 9 aa, synthetic construct
GTNAVGRVF

SEQ ID NO: 26548 - protein, 9 aa, synthetic construct
GTNAVGKLF

SEQ ID NO: 26549 - protein, 9 aa, synthetic construct
GTNAVGKVY

SEQ ID NO: 26550 - protein, 9 aa, synthetic construct
GTNAVGKVH

SEQ ID NO: 26551 - protein, 9 aa, synthetic construct
PLPGTGRVY

SEQ ID NO: 26552 - protein, 9 aa, synthetic construct
GTNAGVHLY

SEQ ID NO: 26553 - protein, 9 aa, synthetic construct
GTNAGVHVY

SEQ ID NO: 26554 - protein, 9 aa, synthetic construct
GTNAGVHVR

SEQ ID NO: 26555 - protein, 9 aa, synthetic construct
GTNAGVHVF

SEQ ID NO: 26556 - protein, 9 aa, synthetic construct
PLPGTGRVR

SEQ ID NO: 26557 - protein, 9 aa, synthetic construct
GTNAGVRLY

SEQ ID NO: 26558 - protein, 9 aa, synthetic construct
GTNAGVRLH

SEQ ID NO: 26559 - protein, 9 aa, synthetic construct
GTNAGVRLF

SEQ ID NO: 26560 - protein, 9 aa, synthetic construct
GTNAGVRVY

SEQ ID NO: 26561 - protein, 9 aa, synthetic construct
GTNAGVRVF

SEQ ID NO: 26562 - protein, 9 aa, synthetic construct
PLPGTGRVH

SEQ ID NO: 26563 - protein, 9 aa, synthetic construct
GTNAGVKLY

SEQ ID NO: 26564 - protein, 9 aa, synthetic construct
GTNAGVKLH

SEQ ID NO: 26565 - protein, 9 aa, synthetic construct
GTNAGVKVY

SEQ ID NO: 26566 - protein, 9 aa, synthetic construct
GTNAGVKVK

SEQ ID NO: 26567 - protein, 9 aa, synthetic construct
GTNAGVKVF

SEQ ID NO: 26568 - protein, 9 aa, synthetic construct
GTNAGLHVK

SEQ ID NO: 26569 - protein, 9 aa, synthetic construct
GTNAGLRVF

SEQ ID NO: 26570 - protein, 9 aa, synthetic construct
GTNAGLKVY

SEQ ID NO: 26571 - protein, 9 aa, synthetic construct
GTNAGLKVH

SEQ ID NO: 26572 - protein, 9 aa, synthetic construct
GTNAGLKVF

SEQ ID NO: 26573 - protein, 9 aa, synthetic construct
PLPGTGKLR

SEQ ID NO: 26574 - protein, 9 aa, synthetic construct
GTNAGAHLR

SEQ ID NO: 26575 - protein, 9 aa, synthetic construct
GTNAGAHLK

SEQ ID NO: 26576 - protein, 9 aa, synthetic construct
GTNAGAHLF

SEQ ID NO: 26577 - protein, 9 aa, synthetic construct
GTNAGAHVY

SEQ ID NO: 26578 - protein, 9 aa, synthetic construct
GTNAGAHVR

SEQ ID NO: 26579 - protein, 9 aa, synthetic construct
GTNAGAHVK

SEQ ID NO: 26580 - protein, 9 aa, synthetic construct
GTNAGARLF

SEQ ID NO: 26581 - protein, 9 aa, synthetic construct
GTNAGARVH

SEQ ID NO: 26582 - protein, 9 aa, synthetic construct
GTNAGARVK

SEQ ID NO: 26583 - protein, 9 aa, synthetic construct
GTNAGARVF

SEQ ID NO: 26584 - protein, 9 aa, synthetic construct
PLPGTGKLK

SEQ ID NO: 26585 - protein, 9 aa, synthetic construct
GTNAGAKLY

SEQ ID NO: 26586 - protein, 9 aa, synthetic construct
GTNAGAKVY

SEQ ID NO: 26587 - protein, 9 aa, synthetic construct
GTNAGAKVH

SEQ ID NO: 26588 - protein, 9 aa, synthetic construct
GTNAGAKVK

SEQ ID NO: 26589 - protein, 9 aa, synthetic construct
GTNAGIHLR

SEQ ID NO: 26590 - protein, 9 aa, synthetic construct
GTNAGIHLH

SEQ ID NO: 26591 - protein, 9 aa, synthetic construct
GTNAGIHLK

SEQ ID NO: 26592 - protein, 9 aa, synthetic construct
GTNAGIHLF

SEQ ID NO: 26593 - protein, 9 aa, synthetic construct
GTNAGIHVY

SEQ ID NO: 26594 - protein, 9 aa, synthetic construct
GTNAGIHVR

SEQ ID NO: 26595 - protein, 9 aa, synthetic construct
GTNAGIHVH

SEQ ID NO: 26596 - protein, 9 aa, synthetic construct
GTNAGIHVK

SEQ ID NO: 26597 - protein, 9 aa, synthetic construct
GTNAGIHVF

SEQ ID NO: 26598 - protein, 9 aa, synthetic construct
GTNAGIRLY

SEQ ID NO: 26599 - protein, 9 aa, synthetic construct
GTNAGIRLH

SEQ ID NO: 26600 - protein, 9 aa, synthetic construct
GTNAGIRLK

SEQ ID NO: 26601 - protein, 9 aa, synthetic construct
GTNAGIRLF

SEQ ID NO: 26602 - protein, 9 aa, synthetic construct
GTNAGIRVH

SEQ ID NO: 26603 - protein, 9 aa, synthetic construct
GTNAGIRVF

SEQ ID NO: 26604 - protein, 9 aa, synthetic construct
PLPGTGKVR

SEQ ID NO: 26605 - protein, 9 aa, synthetic construct
GTNAGIKLY

SEQ ID NO: 26606 - protein, 9 aa, synthetic construct
GTNAGIKLH

SEQ ID NO: 26607 - protein, 9 aa, synthetic construct
GTNAGIKLK

SEQ ID NO: 26608 - protein, 9 aa, synthetic construct
GTNAGIKLF

SEQ ID NO: 26609 - protein, 9 aa, synthetic construct
GTNAGIKVY

SEQ ID NO: 26610 - protein, 9 aa, synthetic construct
GTNAGIKVR

SEQ ID NO: 26611 - protein, 9 aa, synthetic construct
GTNAGIKVK

SEQ ID NO: 26612 - protein, 9 aa, synthetic construct
GTNAGIKVF

SEQ ID NO: 26613 - protein, 9 aa, synthetic construct
GTNAGGHLR

SEQ ID NO: 26614 - protein, 9 aa, synthetic construct
GTNAGGHLK

SEQ ID NO: 26615 - protein, 9 aa, synthetic construct
GTNAGGHLF

SEQ ID NO: 26616 - protein, 9 aa, synthetic construct
GTNAGGHVH

SEQ ID NO: 26617 - protein, 9 aa, synthetic construct
GTNAGGHVF

SEQ ID NO: 26618 - protein, 9 aa, synthetic construct
PLPGTGKVK

SEQ ID NO: 26619 - protein, 9 aa, synthetic construct
GTNAGGRLY

SEQ ID NO: 26620 - protein, 9 aa, synthetic construct
GTNAGGRLR

SEQ ID NO: 26621 - protein, 9 aa, synthetic construct
GTNAGGRLH

SEQ ID NO: 26622 - protein, 9 aa, synthetic construct
GTNAGGRLF

SEQ ID NO: 26623 - protein, 9 aa, synthetic construct
GTNAGGRVY

SEQ ID NO: 26624 - protein, 9 aa, synthetic construct
GTNAGGRVR

SEQ ID NO: 26625 - protein, 9 aa, synthetic construct
GTNAGGRVH

SEQ ID NO: 26626 - protein, 9 aa, synthetic construct
GTNAGGRVK

SEQ ID NO: 26627 - protein, 9 aa, synthetic construct
GTNAGGRVF

SEQ ID NO: 26628 - protein, 9 aa, synthetic construct
GTNAGGKLY

SEQ ID NO: 26629 - protein, 9 aa, synthetic construct
GTNAGGKLR

SEQ ID NO: 26630 - protein, 9 aa, synthetic construct
GTNAGGKLH

SEQ ID NO: 26631 - protein, 9 aa, synthetic construct
GTNAGGKLK

SEQ ID NO: 26632 - protein, 9 aa, synthetic construct
GTNAGGKLF

SEQ ID NO: 26633 - protein, 9 aa, synthetic construct
GTNAGGKVY

SEQ ID NO: 26634 - protein, 9 aa, synthetic construct
GTNAGGKVR

SEQ ID NO: 26635 - protein, 9 aa, synthetic construct
GTNAGGKVK

SEQ ID NO: 26636 - protein, 9 aa, synthetic construct
GTNAGGKVF

SEQ ID NO: 26637 - protein, 9 aa, synthetic construct
GTQGAVHLY

SEQ ID NO: 26638 - protein, 9 aa, synthetic construct
GTQGAVHLR

SEQ ID NO: 26639 - protein, 9 aa, synthetic construct
GTQGAVHLK

SEQ ID NO: 26640 - protein, 9 aa, synthetic construct
GTQGAVHLF

SEQ ID NO: 26641 - protein, 9 aa, synthetic construct
GTQGAVHVR

SEQ ID NO: 26642 - protein, 9 aa, synthetic construct
GTQGAVHVH

SEQ ID NO: 26643 - protein, 9 aa, synthetic construct
GTQGAVHVK

SEQ ID NO: 26644 - protein, 9 aa, synthetic construct
PLPGSVHLR

SEQ ID NO: 26645 - protein, 9 aa, synthetic construct
GTQGAVRLY

SEQ ID NO: 26646 - protein, 9 aa, synthetic construct
GTQGAVRLH

SEQ ID NO: 26647 - protein, 9 aa, synthetic construct
GTQGAVRVY

SEQ ID NO: 26648 - protein, 9 aa, synthetic construct
GTQGAVRVH

SEQ ID NO: 26649 - protein, 9 aa, synthetic construct
GTQGAVRVF

SEQ ID NO: 26650 - protein, 9 aa, synthetic construct
GTQGAVKLY

SEQ ID NO: 26651 - protein, 9 aa, synthetic construct
GTQGAVKLH

SEQ ID NO: 26652 - protein, 9 aa, synthetic construct
GTQGAVKLF

SEQ ID NO: 26653 - protein, 9 aa, synthetic construct
GTQGAVKVY

SEQ ID NO: 26654 - protein, 9 aa, synthetic construct
GTQGAVKVF

SEQ ID NO: 26655 - protein, 9 aa, synthetic construct
PLPGSVHLK

SEQ ID NO: 26656 - protein, 9 aa, synthetic construct
GTQGALHLY

SEQ ID NO: 26657 - protein, 9 aa, synthetic construct
GTQGALHLH

SEQ ID NO: 26658 - protein, 9 aa, synthetic construct
GTQGALHVR

SEQ ID NO: 26659 - protein, 9 aa, synthetic construct
GTQGALHVK

SEQ ID NO: 26660 - protein, 9 aa, synthetic construct
GTQGALHVF

SEQ ID NO: 26661 - protein, 9 aa, synthetic construct
GTQGALRLY

SEQ ID NO: 26662 - protein, 9 aa, synthetic construct
GTQGALRVK

SEQ ID NO: 26663 - protein, 9 aa, synthetic construct
PLPGSVHVY

SEQ ID NO: 26664 - protein, 9 aa, synthetic construct
GTQGALKLH

SEQ ID NO: 26665 - protein, 9 aa, synthetic construct
PLPGSVHVR

SEQ ID NO: 26666 - protein, 9 aa, synthetic construct
GTQGAAHLY

SEQ ID NO: 26667 - protein, 9 aa, synthetic construct
GTQGAAHLR

SEQ ID NO: 26668 - protein, 9 aa, synthetic construct
GTQGAAHLK

SEQ ID NO: 26669 - protein, 9 aa, synthetic construct
GTQGAAHLF

SEQ ID NO: 26670 - protein, 9 aa, synthetic construct
GTQGAARLY

SEQ ID NO: 26671 - protein, 9 aa, synthetic construct
GTQGAARLH

SEQ ID NO: 26672 - protein, 9 aa, synthetic construct
GTQGAARLF

SEQ ID NO: 26673 - protein, 9 aa, synthetic construct
GTQGAAKLY

SEQ ID NO: 26674 - protein, 9 aa, synthetic construct
GTQGAAKLH

SEQ ID NO: 26675 - protein, 9 aa, synthetic construct
GTQGAAKLF

SEQ ID NO: 26676 - protein, 9 aa, synthetic construct
GTQGAAKVY

SEQ ID NO: 26677 - protein, 9 aa, synthetic construct
GTQGAAKVF

SEQ ID NO: 26678 - protein, 9 aa, synthetic construct
PLPGSVHVF

SEQ ID NO: 26679 - protein, 9 aa, synthetic construct
GTQGAIHLY

SEQ ID NO: 26680 - protein, 9 aa, synthetic construct
GTQGAIHLR

SEQ ID NO: 26681 - protein, 9 aa, synthetic construct
GTQGAIHLH

SEQ ID NO: 26682 - protein, 9 aa, synthetic construct
GTQGAIHLF

SEQ ID NO: 26683 - protein, 9 aa, synthetic construct
GTQGAIHVF

SEQ ID NO: 26684 - protein, 9 aa, synthetic construct
PLPGSVRLY

SEQ ID NO: 26685 - protein, 9 aa, synthetic construct
GTQGAIRLY

SEQ ID NO: 26686 - protein, 9 aa, synthetic construct
GTQGAIRLH

SEQ ID NO: 26687 - protein, 9 aa, synthetic construct
GTQGAIRLF

SEQ ID NO: 26688 - protein, 9 aa, synthetic construct
GTQGAIRVK

SEQ ID NO: 26689 - protein, 9 aa, synthetic construct
GTQGAIRVF

SEQ ID NO: 26690 - protein, 9 aa, synthetic construct
GTQGAIKLF

SEQ ID NO: 26691 - protein, 9 aa, synthetic construct
GTQGAIKVY

SEQ ID NO: 26692 - protein, 9 aa, synthetic construct
GTQGAIKVH

SEQ ID NO: 26693 - protein, 9 aa, synthetic construct
GTQGAIKVK

SEQ ID NO: 26694 - protein, 9 aa, synthetic construct
GTQGAIKVF

SEQ ID NO: 26695 - protein, 9 aa, synthetic construct
PLPGSVRLH

SEQ ID NO: 26696 - protein, 9 aa, synthetic construct
GTQGAGHLR

SEQ ID NO: 26697 - protein, 9 aa, synthetic construct
GTQGAGHLK

SEQ ID NO: 26698 - protein, 9 aa, synthetic construct
GTQGAGHLF

SEQ ID NO: 26699 - protein, 9 aa, synthetic construct
GTQGAGHVY

SEQ ID NO: 26700 - protein, 9 aa, synthetic construct
GTQGAGHVR

SEQ ID NO: 26701 - protein, 9 aa, synthetic construct
GTQGAGHVH

SEQ ID NO: 26702 - protein, 9 aa, synthetic construct
GTQGAGHVK

SEQ ID NO: 26703 - protein, 9 aa, synthetic construct
GTQGAGRLY

SEQ ID NO: 26704 - protein, 9 aa, synthetic construct
GTQGAGRLH

SEQ ID NO: 26705 - protein, 9 aa, synthetic construct
GTQGAGRVH

SEQ ID NO: 26706 - protein, 9 aa, synthetic construct
GTQGAGRVK

SEQ ID NO: 26707 - protein, 9 aa, synthetic construct
GTQGAGRVF

SEQ ID NO: 26708 - protein, 9 aa, synthetic construct
GTQGAGKLY

SEQ ID NO: 26709 - protein, 9 aa, synthetic construct
GTQGAGKLH

SEQ ID NO: 26710 - protein, 9 aa, synthetic construct
GTQGAGKLF

SEQ ID NO: 26711 - protein, 9 aa, synthetic construct
GTQGAGKVY

SEQ ID NO: 26712 - protein, 9 aa, synthetic construct
PLPGSVRVY

SEQ ID NO: 26713 - protein, 9 aa, synthetic construct
GTQGTVHLR

SEQ ID NO: 26714 - protein, 9 aa, synthetic construct
GTQGTVHLK

SEQ ID NO: 26715 - protein, 9 aa, synthetic construct
GTQGTVRLH

SEQ ID NO: 26716 - protein, 9 aa, synthetic construct
GTQGTVRVF

SEQ ID NO: 26717 - protein, 9 aa, synthetic construct
PLPGSVRVH

SEQ ID NO: 26718 - protein, 9 aa, synthetic construct
GTQGTLHVK

SEQ ID NO: 26719 - protein, 9 aa, synthetic construct
GTQGTLHVF

SEQ ID NO: 26720 - protein, 9 aa, synthetic construct
GTQGTLRLH

SEQ ID NO: 26721 - protein, 9 aa, synthetic construct
GTQGTLRLF

SEQ ID NO: 26722 - protein, 9 aa, synthetic construct
PLNGSLHLH

SEQ ID NO: 26723 - protein, 9 aa, synthetic construct
PLPGSVKLY

SEQ ID NO: 26724 - protein, 9 aa, synthetic construct
PLPGSVKLR

SEQ ID NO: 26725 - protein, 9 aa, synthetic construct
GTQGTAHLH

SEQ ID NO: 26726 - protein, 9 aa, synthetic construct
GTQGTAHLF

SEQ ID NO: 26727 - protein, 9 aa, synthetic construct
GTQGTAHVF

SEQ ID NO: 26728 - protein, 9 aa, synthetic construct
PLPGSVKLH

SEQ ID NO: 26729 - protein, 9 aa, synthetic construct
GTQGTARLF

SEQ ID NO: 26730 - protein, 9 aa, synthetic construct
GTQGTAKVY

SEQ ID NO: 26731 - protein, 9 aa, synthetic construct
GTQGTAKVH

SEQ ID NO: 26732 - protein, 9 aa, synthetic construct
PLPGSVKLF

SEQ ID NO: 26733 - protein, 9 aa, synthetic construct
PLPGSVKVR

SEQ ID NO: 26734 - protein, 9 aa, synthetic construct
GTQGTIKVH

SEQ ID NO: 26735 - protein, 9 aa, synthetic construct
GTQGTGHLF

SEQ ID NO: 26736 - protein, 9 aa, synthetic construct
GTQGTGHVR

SEQ ID NO: 26737 - protein, 9 aa, synthetic construct
PLPGSVKVK

SEQ ID NO: 26738 - protein, 9 aa, synthetic construct
GTQGTGRVY

SEQ ID NO: 26739 - protein, 9 aa, synthetic construct
GTQGTGRVH

SEQ ID NO: 26740 - protein, 9 aa, synthetic construct
GTQGTGRVK

SEQ ID NO: 26741 - protein, 9 aa, synthetic construct
GTQGTGRVF

SEQ ID NO: 26742 - protein, 9 aa, synthetic construct
GTQGTGKLR

SEQ ID NO: 26743 - protein, 9 aa, synthetic construct
GTQGTGKVY

SEQ ID NO: 26744 - protein, 9 aa, synthetic construct
GTQGSVHVR

SEQ ID NO: 26745 - protein, 9 aa, synthetic construct
PLPGSLHLH

SEQ ID NO: 26746 - protein, 9 aa, synthetic construct
GTQGSLHVH

SEQ ID NO: 26747 - protein, 9 aa, synthetic construct
GTQGSLHVK

SEQ ID NO: 26748 - protein, 9 aa, synthetic construct
GTQGSLRVH

SEQ ID NO: 26749 - protein, 9 aa, synthetic construct
GTQGSLKVH

SEQ ID NO: 26750 - protein, 9 aa, synthetic construct
GTQGSARLY

SEQ ID NO: 26751 - protein, 9 aa, synthetic construct
PLPGSLHVF

SEQ ID NO: 26752 - protein, 9 aa, synthetic construct
GTQGSIHLY

SEQ ID NO: 26753 - protein, 9 aa, synthetic construct
GTQGSIHLR

SEQ ID NO: 26754 - protein, 9 aa, synthetic construct
GTQGSIHLH

SEQ ID NO: 26755 - protein, 9 aa, synthetic construct
GTQGSIHLF

SEQ ID NO: 26756 - protein, 9 aa, synthetic construct
GTQGSIHVR

SEQ ID NO: 26757 - protein, 9 aa, synthetic construct
PLNGSLHLF

SEQ ID NO: 26758 - protein, 9 aa, synthetic construct
GTQGSIRLH

SEQ ID NO: 26759 - protein, 9 aa, synthetic construct
GTQGSIRLF

SEQ ID NO: 26760 - protein, 9 aa, synthetic construct
GTQGSIRVH

SEQ ID NO: 26761 - protein, 9 aa, synthetic construct
GTQGSIRVF

SEQ ID NO: 26762 - protein, 9 aa, synthetic construct
GTQGSIKLK

SEQ ID NO: 26763 - protein, 9 aa, synthetic construct
GTQGSIKLF

SEQ ID NO: 26764 - protein, 9 aa, synthetic construct
GTQGSGRVH

SEQ ID NO: 26765 - protein, 9 aa, synthetic construct
PLPGSLRVY

SEQ ID NO: 26766 - protein, 9 aa, synthetic construct
GTQGVVHLH

SEQ ID NO: 26767 - protein, 9 aa, synthetic construct
GTQGVVHVF

SEQ ID NO: 26768 - protein, 9 aa, synthetic construct
PLPGSLRVH

SEQ ID NO: 26769 - protein, 9 aa, synthetic construct
PLPGSLRVF

SEQ ID NO: 26770 - protein, 9 aa, synthetic construct
GTQGVLRVY

SEQ ID NO: 26771 - protein, 9 aa, synthetic construct
PLNGSLHVY

SEQ ID NO: 26772 - protein, 9 aa, synthetic construct
GTQGVLKVY

SEQ ID NO: 26773 - protein, 9 aa, synthetic construct
PLPGSLKLR

SEQ ID NO: 26774 - protein, 9 aa, synthetic construct
GTQGVAHVK

SEQ ID NO: 26775 - protein, 9 aa, synthetic construct
GTQGVAHVF

SEQ ID NO: 26776 - protein, 9 aa, synthetic construct
PLPGSLKLH

SEQ ID NO: 26777 - protein, 9 aa, synthetic construct
GTQGVAKLY

SEQ ID NO: 26778 - protein, 9 aa, synthetic construct
GTQGVAKLH

SEQ ID NO: 26779 - protein, 9 aa, synthetic construct
GTQGVAKVY

SEQ ID NO: 26780 - protein, 9 aa, synthetic construct
GTQGVAKVF

SEQ ID NO: 26781 - protein, 9 aa, synthetic construct
GTQGVIHLR

SEQ ID NO: 26782 - protein, 9 aa, synthetic construct
GTQGVIKLH

SEQ ID NO: 26783 - protein, 9 aa, synthetic construct
GTQGVIKLF

SEQ ID NO: 26784 - protein, 9 aa, synthetic construct
GTQGVIKVY

SEQ ID NO: 26785 - protein, 9 aa, synthetic construct
PLPGSLKVH

SEQ ID NO: 26786 - protein, 9 aa, synthetic construct
GTQGVGRLF

SEQ ID NO: 26787 - protein, 9 aa, synthetic construct
GTQGVGRVF

SEQ ID NO: 26788 - protein, 9 aa, synthetic construct
PLPGSLKVF

SEQ ID NO: 26789 - protein, 9 aa, synthetic construct
GTQGVGKLF

SEQ ID NO: 26790 - protein, 9 aa, synthetic construct
PLPGSAHLY

SEQ ID NO: 26791 - protein, 9 aa, synthetic construct
PLPGSAHLR

SEQ ID NO: 26792 - protein, 9 aa, synthetic construct
GTQGGVRLH

SEQ ID NO: 26793 - protein, 9 aa, synthetic construct
GTQGGVRVY

SEQ ID NO: 26794 - protein, 9 aa, synthetic construct
GTQGGVRVF

SEQ ID NO: 26795 - protein, 9 aa, synthetic construct
PLPGSAHLH

SEQ ID NO: 26796 - protein, 9 aa, synthetic construct
GTQGGVKLF

SEQ ID NO: 26797 - protein, 9 aa, synthetic construct
GTQGGLHVY

SEQ ID NO: 26798 - protein, 9 aa, synthetic construct
GTQGGLHVR

SEQ ID NO: 26799 - protein, 9 aa, synthetic construct
GTQGGLRVF

SEQ ID NO: 26800 - protein, 9 aa, synthetic construct
GTQGGLKLF

SEQ ID NO: 26801 - protein, 9 aa, synthetic construct
GTQGGLKVY

SEQ ID NO: 26802 - protein, 9 aa, synthetic construct
GTQGGLKVH

SEQ ID NO: 26803 - protein, 9 aa, synthetic construct
GTQGGAHLF

SEQ ID NO: 26804 - protein, 9 aa, synthetic construct
GTQGGARLF

SEQ ID NO: 26805 - protein, 9 aa, synthetic construct
GTQGGARVF

SEQ ID NO: 26806 - protein, 9 aa, synthetic construct
GTQGGAKVY

SEQ ID NO: 26807 - protein, 9 aa, synthetic construct
GTQGGIHLR

SEQ ID NO: 26808 - protein, 9 aa, synthetic construct
PLNGSLHVH

SEQ ID NO: 26809 - protein, 9 aa, synthetic construct
GTQGGIRLY

SEQ ID NO: 26810 - protein, 9 aa, synthetic construct
GTQGGIRLH

SEQ ID NO: 26811 - protein, 9 aa, synthetic construct
GTQGGIRVF

SEQ ID NO: 26812 - protein, 9 aa, synthetic construct
GTQGGIKLY

SEQ ID NO: 26813 - protein, 9 aa, synthetic construct
GTQGGIKLF

SEQ ID NO: 26814 - protein, 9 aa, synthetic construct
GTQGGIKVY

SEQ ID NO: 26815 - protein, 9 aa, synthetic construct
GTQGGGHLY

SEQ ID NO: 26816 - protein, 9 aa, synthetic construct
GTQGGGHLK

SEQ ID NO: 26817 - protein, 9 aa, synthetic construct
GTQGGGHLF

SEQ ID NO: 26818 - protein, 9 aa, synthetic construct
GTQGGGHVY

SEQ ID NO: 26819 - protein, 9 aa, synthetic construct
GTQGGGHVK

SEQ ID NO: 26820 - protein, 9 aa, synthetic construct
GTQGGGHVF

SEQ ID NO: 26821 - protein, 9 aa, synthetic construct
GTQGGGRVK

SEQ ID NO: 26822 - protein, 9 aa, synthetic construct
PLPGSARLF

SEQ ID NO: 26823 - protein, 9 aa, synthetic construct
GTQGGGKLY

SEQ ID NO: 26824 - protein, 9 aa, synthetic construct
GTQGGGKLR

SEQ ID NO: 26825 - protein, 9 aa, synthetic construct
GTQGGGKLH

SEQ ID NO: 26826 - protein, 9 aa, synthetic construct
GTQGGGKLF

SEQ ID NO: 26827 - protein, 9 aa, synthetic construct
GTQGGGKVR

SEQ ID NO: 26828 - protein, 9 aa, synthetic construct
GTQGGGKVH

SEQ ID NO: 26829 - protein, 9 aa, synthetic construct
GTQAAVHLY

SEQ ID NO: 26830 - protein, 9 aa, synthetic construct
GTQAAVHLR

SEQ ID NO: 26831 - protein, 9 aa, synthetic construct
GTQAAVHLH

SEQ ID NO: 26832 - protein, 9 aa, synthetic construct
GTQAAVHLK

SEQ ID NO: 26833 - protein, 9 aa, synthetic construct
GTQAAVHVR

SEQ ID NO: 26834 - protein, 9 aa, synthetic construct
GTQAAVHVH

SEQ ID NO: 26835 - protein, 9 aa, synthetic construct
GTQAAVHVK

SEQ ID NO: 26836 - protein, 9 aa, synthetic construct
GTQAAVHVF

SEQ ID NO: 26837 - protein, 9 aa, synthetic construct
GTQAAVRLY

SEQ ID NO: 26838 - protein, 9 aa, synthetic construct
GTQAAVRLH

SEQ ID NO: 26839 - protein, 9 aa, synthetic construct
GTQAAVRVY

SEQ ID NO: 26840 - protein, 9 aa, synthetic construct
GTQAAVKLH

SEQ ID NO: 26841 - protein, 9 aa, synthetic construct
GTQAAVKLF

SEQ ID NO: 26842 - protein, 9 aa, synthetic construct
GTQAAVKVY

SEQ ID NO: 26843 - protein, 9 aa, synthetic construct
GTQAAVKVH

SEQ ID NO: 26844 - protein, 9 aa, synthetic construct
GTQAAVKVF

SEQ ID NO: 26845 - protein, 9 aa, synthetic construct
GTQAALHLY

SEQ ID NO: 26846 - protein, 9 aa, synthetic construct
GTQAALHVK

SEQ ID NO: 26847 - protein, 9 aa, synthetic construct
PLPGSARVF

SEQ ID NO: 26848 - protein, 9 aa, synthetic construct
GTQAALRVH

SEQ ID NO: 26849 - protein, 9 aa, synthetic construct
PLPGSAKLY

SEQ ID NO: 26850 - protein, 9 aa, synthetic construct
GTQAALKLF

SEQ ID NO: 26851 - protein, 9 aa, synthetic construct
GTQAALKVY

SEQ ID NO: 26852 - protein, 9 aa, synthetic construct
GTQAALKVF

SEQ ID NO: 26853 - protein, 9 aa, synthetic construct
GTQAAAHLY

SEQ ID NO: 26854 - protein, 9 aa, synthetic construct
GTQAAAHLR

SEQ ID NO: 26855 - protein, 9 aa, synthetic construct
GTQAAAHLK

SEQ ID NO: 26856 - protein, 9 aa, synthetic construct
GTQAAAHVK

SEQ ID NO: 26857 - protein, 9 aa, synthetic construct
GTQAAAHVF

SEQ ID NO: 26858 - protein, 9 aa, synthetic construct
PLPGSAKLH

SEQ ID NO: 26859 - protein, 9 aa, synthetic construct
GTQAAARLH

SEQ ID NO: 26860 - protein, 9 aa, synthetic construct
GTQAAARLF

SEQ ID NO: 26861 - protein, 9 aa, synthetic construct
GTQAAARVR

SEQ ID NO: 26862 - protein, 9 aa, synthetic construct
GTQAAAKLY

SEQ ID NO: 26863 - protein, 9 aa, synthetic construct
GTQAAAKLH

SEQ ID NO: 26864 - protein, 9 aa, synthetic construct
GTQAAAKLF

SEQ ID NO: 26865 - protein, 9 aa, synthetic construct
GTQAAAKVY

SEQ ID NO: 26866 - protein, 9 aa, synthetic construct
GTQAAAKVH

SEQ ID NO: 26867 - protein, 9 aa, synthetic construct
PLPGSAKLF

SEQ ID NO: 26868 - protein, 9 aa, synthetic construct
GTQAAIHLY

SEQ ID NO: 26869 - protein, 9 aa, synthetic construct
GTQAAIHLR

SEQ ID NO: 26870 - protein, 9 aa, synthetic construct
GTQAAIHVY

SEQ ID NO: 26871 - protein, 9 aa, synthetic construct
GTQAAIHVF

SEQ ID NO: 26872 - protein, 9 aa, synthetic construct
PLPGSAKVY

SEQ ID NO: 26873 - protein, 9 aa, synthetic construct
GTQAAIRLY

SEQ ID NO: 26874 - protein, 9 aa, synthetic construct
GTQAAIRLH

SEQ ID NO: 26875 - protein, 9 aa, synthetic construct
GTQAAIRVY

SEQ ID NO: 26876 - protein, 9 aa, synthetic construct
GTQAAIRVF

SEQ ID NO: 26877 - protein, 9 aa, synthetic construct
GTQAAIKLY

SEQ ID NO: 26878 - protein, 9 aa, synthetic construct
GTQAAIKLH

SEQ ID NO: 26879 - protein, 9 aa, synthetic construct
GTQAAIKLK

SEQ ID NO: 26880 - protein, 9 aa, synthetic construct
GTQAAIKLF

SEQ ID NO: 26881 - protein, 9 aa, synthetic construct
GTQAAIKVY

SEQ ID NO: 26882 - protein, 9 aa, synthetic construct
GTQAAIKVF

SEQ ID NO: 26883 - protein, 9 aa, synthetic construct
PLPGSAKVH

SEQ ID NO: 26884 - protein, 9 aa, synthetic construct
GTQAAGHLY

SEQ ID NO: 26885 - protein, 9 aa, synthetic construct
GTQAAGHLH

SEQ ID NO: 26886 - protein, 9 aa, synthetic construct
GTQAAGHLK

SEQ ID NO: 26887 - protein, 9 aa, synthetic construct
GTQAAGHVY

SEQ ID NO: 26888 - protein, 9 aa, synthetic construct
GTQAAGHVR

SEQ ID NO: 26889 - protein, 9 aa, synthetic construct
GTQAAGHVK

SEQ ID NO: 26890 - protein, 9 aa, synthetic construct
GTQAAGRLY

SEQ ID NO: 26891 - protein, 9 aa, synthetic construct
GTQAAGRLF

SEQ ID NO: 26892 - protein, 9 aa, synthetic construct
GTQAAGRVY

SEQ ID NO: 26893 - protein, 9 aa, synthetic construct
GTQAAGRVR

SEQ ID NO: 26894 - protein, 9 aa, synthetic construct
GTQAAGRVK

SEQ ID NO: 26895 - protein, 9 aa, synthetic construct
GTQAAGRVF

SEQ ID NO: 26896 - protein, 9 aa, synthetic construct
GTQAAGKLY

SEQ ID NO: 26897 - protein, 9 aa, synthetic construct
GTQAAGKVY

SEQ ID NO: 26898 - protein, 9 aa, synthetic construct
GTQAAGKVH

SEQ ID NO: 26899 - protein, 9 aa, synthetic construct
GTQAAGKVF

SEQ ID NO: 26900 - protein, 9 aa, synthetic construct
PLNGSLHVF

SEQ ID NO: 26901 - protein, 9 aa, synthetic construct
GTQATVHVR

SEQ ID NO: 26902 - protein, 9 aa, synthetic construct
GTQATVHVF

SEQ ID NO: 26903 - protein, 9 aa, synthetic construct
PLPGSIHLR

SEQ ID NO: 26904 - protein, 9 aa, synthetic construct
GTQATVRLR

SEQ ID NO: 26905 - protein, 9 aa, synthetic construct
GTQATVRLH

SEQ ID NO: 26906 - protein, 9 aa, synthetic construct
GTQATVRVH

SEQ ID NO: 26907 - protein, 9 aa, synthetic construct
GTQATVKLH

SEQ ID NO: 26908 - protein, 9 aa, synthetic construct
PLPGSIHLK

SEQ ID NO: 26909 - protein, 9 aa, synthetic construct
GTQATLHLF

SEQ ID NO: 26910 - protein, 9 aa, synthetic construct
GTQATLHVY

SEQ ID NO: 26911 - protein, 9 aa, synthetic construct
GTQATLHVR

SEQ ID NO: 26912 - protein, 9 aa, synthetic construct
GTQATLHVH

SEQ ID NO: 26913 - protein, 9 aa, synthetic construct
GTQATAHLR

SEQ ID NO: 26914 - protein, 9 aa, synthetic construct
GTQATAHLF

SEQ ID NO: 26915 - protein, 9 aa, synthetic construct
GTQATAHVR

SEQ ID NO: 26916 - protein, 9 aa, synthetic construct
GTQATAHVK

SEQ ID NO: 26917 - protein, 9 aa, synthetic construct
GTQATARVH

SEQ ID NO: 26918 - protein, 9 aa, synthetic construct
PLPGSIHVK

SEQ ID NO: 26919 - protein, 9 aa, synthetic construct
GTQATAKLY

SEQ ID NO: 26920 - protein, 9 aa, synthetic construct
GTQATAKLH

SEQ ID NO: 26921 - protein, 9 aa, synthetic construct
GTQATAKLF

SEQ ID NO: 26922 - protein, 9 aa, synthetic construct
GTQATAKVY

SEQ ID NO: 26923 - protein, 9 aa, synthetic construct
GTQATAKVH

SEQ ID NO: 26924 - protein, 9 aa, synthetic construct
GTQATAKVF

SEQ ID NO: 26925 - protein, 9 aa, synthetic construct
PLPGSIHVF

SEQ ID NO: 26926 - protein, 9 aa, synthetic construct
GTQATIHLY

SEQ ID NO: 26927 - protein, 9 aa, synthetic construct
GTQATIHLR

SEQ ID NO: 26928 - protein, 9 aa, synthetic construct
GTQATIRLY

SEQ ID NO: 26929 - protein, 9 aa, synthetic construct
GTQATIRVF

SEQ ID NO: 26930 - protein, 9 aa, synthetic construct
GTQATIKLY

SEQ ID NO: 26931 - protein, 9 aa, synthetic construct
GTQATIKLF

SEQ ID NO: 26932 - protein, 9 aa, synthetic construct
GTQATIKVH

SEQ ID NO: 26933 - protein, 9 aa, synthetic construct
GTQATGHLR

SEQ ID NO: 26934 - protein, 9 aa, synthetic construct
GTQATGHVY

SEQ ID NO: 26935 - protein, 9 aa, synthetic construct
GTQATGHVK

SEQ ID NO: 26936 - protein, 9 aa, synthetic construct
GTQATGRLY

SEQ ID NO: 26937 - protein, 9 aa, synthetic construct
GTQATGRLH

SEQ ID NO: 26938 - protein, 9 aa, synthetic construct
GTQATGRLK

SEQ ID NO: 26939 - protein, 9 aa, synthetic construct
GTQATGRVY

SEQ ID NO: 26940 - protein, 9 aa, synthetic construct
GTQATGRVH

SEQ ID NO: 26941 - protein, 9 aa, synthetic construct
GTQATGRVF

SEQ ID NO: 26942 - protein, 9 aa, synthetic construct
PLPGSIRLF

SEQ ID NO: 26943 - protein, 9 aa, synthetic construct
GTQATGKLY

SEQ ID NO: 26944 - protein, 9 aa, synthetic construct
GTQATGKLF

SEQ ID NO: 26945 - protein, 9 aa, synthetic construct
GTQASVHLY

SEQ ID NO: 26946 - protein, 9 aa, synthetic construct
GTQASVHLF

SEQ ID NO: 26947 - protein, 9 aa, synthetic construct
GTQASVHVR

SEQ ID NO: 26948 - protein, 9 aa, synthetic construct
GTQASVHVK

SEQ ID NO: 26949 - protein, 9 aa, synthetic construct
GTQASVRLY

SEQ ID NO: 26950 - protein, 9 aa, synthetic construct
GTQASVRLR

SEQ ID NO: 26951 - protein, 9 aa, synthetic construct
GTQASVRLH

SEQ ID NO: 26952 - protein, 9 aa, synthetic construct
GTQASVRLK

SEQ ID NO: 26953 - protein, 9 aa, synthetic construct
GTQASVRLF

SEQ ID NO: 26954 - protein, 9 aa, synthetic construct
GTQASVRVF

SEQ ID NO: 26955 - protein, 9 aa, synthetic construct
GTQASVKLH

SEQ ID NO: 26956 - protein, 9 aa, synthetic construct
GTQASVKVY

SEQ ID NO: 26957 - protein, 9 aa, synthetic construct
GTQASLHLK

SEQ ID NO: 26958 - protein, 9 aa, synthetic construct
GTQASLHVR

SEQ ID NO: 26959 - protein, 9 aa, synthetic construct
GTQASLHVK

SEQ ID NO: 26960 - protein, 9 aa, synthetic construct
PLPGSIKLY

SEQ ID NO: 26961 - protein, 9 aa, synthetic construct
GTQASLKLY

SEQ ID NO: 26962 - protein, 9 aa, synthetic construct
GTQASLKVH

SEQ ID NO: 26963 - protein, 9 aa, synthetic construct
GTQASAHLH

SEQ ID NO: 26964 - protein, 9 aa, synthetic construct
GTQASAHLF

SEQ ID NO: 26965 - protein, 9 aa, synthetic construct
GTQASAHVY

SEQ ID NO: 26966 - protein, 9 aa, synthetic construct
GTQASAHVR

SEQ ID NO: 26967 - protein, 9 aa, synthetic construct
GTQASAHVH

SEQ ID NO: 26968 - protein, 9 aa, synthetic construct
GTQASAHVF

SEQ ID NO: 26969 - protein, 9 aa, synthetic construct
GTQASARLY

SEQ ID NO: 26970 - protein, 9 aa, synthetic construct
GTQASARLF

SEQ ID NO: 26971 - protein, 9 aa, synthetic construct
GTQASARVF

SEQ ID NO: 26972 - protein, 9 aa, synthetic construct
PLPGSIKLK

SEQ ID NO: 26973 - protein, 9 aa, synthetic construct
GTQASAKLF

SEQ ID NO: 26974 - protein, 9 aa, synthetic construct
GTQASAKVY

SEQ ID NO: 26975 - protein, 9 aa, synthetic construct
GTQASAKVF

SEQ ID NO: 26976 - protein, 9 aa, synthetic construct
PLPGSIKLF

SEQ ID NO: 26977 - protein, 9 aa, synthetic construct
GTQASIHVR

SEQ ID NO: 26978 - protein, 9 aa, synthetic construct
GTQASIHVH

SEQ ID NO: 26979 - protein, 9 aa, synthetic construct
GTQASIHVK

SEQ ID NO: 26980 - protein, 9 aa, synthetic construct
PLPGSIKVY

SEQ ID NO: 26981 - protein, 9 aa, synthetic construct
GTQASIRLY

SEQ ID NO: 26982 - protein, 9 aa, synthetic construct
GTQASIRLH

SEQ ID NO: 26983 - protein, 9 aa, synthetic construct
GTQASIRLF

SEQ ID NO: 26984 - protein, 9 aa, synthetic construct
GTQASIRVH

SEQ ID NO: 26985 - protein, 9 aa, synthetic construct
GTQASIKLK

SEQ ID NO: 26986 - protein, 9 aa, synthetic construct
GTQASIKLF

SEQ ID NO: 26987 - protein, 9 aa, synthetic construct
GTQASIKVH

SEQ ID NO: 26988 - protein, 9 aa, synthetic construct
PLPGSIKVH

SEQ ID NO: 26989 - protein, 9 aa, synthetic construct
GTQASGHLR

SEQ ID NO: 26990 - protein, 9 aa, synthetic construct
GTQASGHLK

SEQ ID NO: 26991 - protein, 9 aa, synthetic construct
GTQASGHLF

SEQ ID NO: 26992 - protein, 9 aa, synthetic construct
GTQASGHVY

SEQ ID NO: 26993 - protein, 9 aa, synthetic construct
GTQASGHVH

SEQ ID NO: 26994 - protein, 9 aa, synthetic construct
GTQASGHVF

SEQ ID NO: 26995 - protein, 9 aa, synthetic construct
GTQASGRLY

SEQ ID NO: 26996 - protein, 9 aa, synthetic construct
GTQASGRLR

SEQ ID NO: 26997 - protein, 9 aa, synthetic construct
GTQASGRLH

SEQ ID NO: 26998 - protein, 9 aa, synthetic construct
GTQASGRLK

SEQ ID NO: 26999 - protein, 9 aa, synthetic construct
GTQASGRLF

SEQ ID NO: 27000 - protein, 9 aa, synthetic construct
GTQASGRVY

SEQ ID NO: 27001 - protein, 9 aa, synthetic construct
GTQASGRVR

SEQ ID NO: 27002 - protein, 9 aa, synthetic construct
GTQASGKLY

SEQ ID NO: 27003 - protein, 9 aa, synthetic construct
GTQASGKLH

SEQ ID NO: 27004 - protein, 9 aa, synthetic construct
GTQASGKLF

SEQ ID NO: 27005 - protein, 9 aa, synthetic construct
GTQASGKVY

SEQ ID NO: 27006 - protein, 9 aa, synthetic construct
GTQASGKVK

SEQ ID NO: 27007 - protein, 9 aa, synthetic construct
GTQASGKVF

SEQ ID NO: 27008 - protein, 9 aa, synthetic construct
GTQAVVHLH

SEQ ID NO: 27009 - protein, 9 aa, synthetic construct
PLPGSGHLR

SEQ ID NO: 27010 - protein, 9 aa, synthetic construct
GTQAVVRVF

SEQ ID NO: 27011 - protein, 9 aa, synthetic construct
GTQAVVKVH

SEQ ID NO: 27012 - protein, 9 aa, synthetic construct
PLPGSGHLK

SEQ ID NO: 27013 - protein, 9 aa, synthetic construct
GTQAVLRLH

SEQ ID NO: 27014 - protein, 9 aa, synthetic construct
PLPGSGHVY

SEQ ID NO: 27015 - protein, 9 aa, synthetic construct
GTQAVLKLY

SEQ ID NO: 27016 - protein, 9 aa, synthetic construct
GTQAVLKLH

SEQ ID NO: 27017 - protein, 9 aa, synthetic construct
GTQAVAHLY

SEQ ID NO: 27018 - protein, 9 aa, synthetic construct
GTQAVAHLK

SEQ ID NO: 27019 - protein, 9 aa, synthetic construct
GTQAVAHVY

SEQ ID NO: 27020 - protein, 9 aa, synthetic construct
GTQAVAHVR

SEQ ID NO: 27021 - protein, 9 aa, synthetic construct
GTQAVAHVH

SEQ ID NO: 27022 - protein, 9 aa, synthetic construct
GTQAVAHVF

SEQ ID NO: 27023 - protein, 9 aa, synthetic construct
PLPGSGHVK

SEQ ID NO: 27024 - protein, 9 aa, synthetic construct
PLPGSGHVF

SEQ ID NO: 27025 - protein, 9 aa, synthetic construct
GTQAVIHLH

SEQ ID NO: 27026 - protein, 9 aa, synthetic construct
GTQAVIHLK

SEQ ID NO: 27027 - protein, 9 aa, synthetic construct
GTQAVIHVK

SEQ ID NO: 27028 - protein, 9 aa, synthetic construct
GTQAVIKLH

SEQ ID NO: 27029 - protein, 9 aa, synthetic construct
GTQAVIKVF

SEQ ID NO: 27030 - protein, 9 aa, synthetic construct
GTQAVGHLH

SEQ ID NO: 27031 - protein, 9 aa, synthetic construct
GTQAVGHLK

SEQ ID NO: 27032 - protein, 9 aa, synthetic construct
GTQAVGHVK

SEQ ID NO: 27033 - protein, 9 aa, synthetic construct
PLPGSGRLK

SEQ ID NO: 27034 - protein, 9 aa, synthetic construct
GTQAVGRVH

SEQ ID NO: 27035 - protein, 9 aa, synthetic construct
PLPGSGRLF

SEQ ID NO: 27036 - protein, 9 aa, synthetic construct
GTQAVGKLK

SEQ ID NO: 27037 - protein, 9 aa, synthetic construct
GTQAVGKLF

SEQ ID NO: 27038 - protein, 9 aa, synthetic construct
GTQAGVHVR

SEQ ID NO: 27039 - protein, 9 aa, synthetic construct
GTQAGVHVK

SEQ ID NO: 27040 - protein, 9 aa, synthetic construct
GTQAGVRVY

SEQ ID NO: 27041 - protein, 9 aa, synthetic construct
PLPGSGRVH

SEQ ID NO: 27042 - protein, 9 aa, synthetic construct
GTQAGVKLF

SEQ ID NO: 27043 - protein, 9 aa, synthetic construct
GTQAGVKVY

SEQ ID NO: 27044 - protein, 9 aa, synthetic construct
PLPGSGRVF

SEQ ID NO: 27045 - protein, 9 aa, synthetic construct
GTQAGLKVK

SEQ ID NO: 27046 - protein, 9 aa, synthetic construct
GTQAGAHLY

SEQ ID NO: 27047 - protein, 9 aa, synthetic construct
GTQAGAHLH

SEQ ID NO: 27048 - protein, 9 aa, synthetic construct
GTQAGAHVY

SEQ ID NO: 27049 - protein, 9 aa, synthetic construct
PLPGSGKLH

SEQ ID NO: 27050 - protein, 9 aa, synthetic construct
GTQAGAKLY

SEQ ID NO: 27051 - protein, 9 aa, synthetic construct
GTQAGAKVF

SEQ ID NO: 27052 - protein, 9 aa, synthetic construct
PLPGSGKLF

SEQ ID NO: 27053 - protein, 9 aa, synthetic construct
GTQAGIHLF

SEQ ID NO: 27054 - protein, 9 aa, synthetic construct
PLPGSGKVY

SEQ ID NO: 27055 - protein, 9 aa, synthetic construct
GTQAGIRLH

SEQ ID NO: 27056 - protein, 9 aa, synthetic construct
GTQAGIRLF

SEQ ID NO: 27057 - protein, 9 aa, synthetic construct
GTQAGIKLF

SEQ ID NO: 27058 - protein, 9 aa, synthetic construct
GTQAGGHLH

SEQ ID NO: 27059 - protein, 9 aa, synthetic construct
GTQAGGHLF

SEQ ID NO: 27060 - protein, 9 aa, synthetic construct
GTQAGGHVY

SEQ ID NO: 27061 - protein, 9 aa, synthetic construct
GTQAGGHVR

SEQ ID NO: 27062 - protein, 9 aa, synthetic construct
GTQAGGHVK

SEQ ID NO: 27063 - protein, 9 aa, synthetic construct
GTQAGGHVF

SEQ ID NO: 27064 - protein, 9 aa, synthetic construct
GTQAGGRLY

SEQ ID NO: 27065 - protein, 9 aa, synthetic construct
GTQAGGRLF

SEQ ID NO: 27066 - protein, 9 aa, synthetic construct
GTQAGGRVY

SEQ ID NO: 27067 - protein, 9 aa, synthetic construct
GTQAGGRVR

SEQ ID NO: 27068 - protein, 9 aa, synthetic construct
GTQAGGRVF

SEQ ID NO: 27069 - protein, 9 aa, synthetic construct
GTQAGGKLY

SEQ ID NO: 27070 - protein, 9 aa, synthetic construct
GTQAGGKLH

SEQ ID NO: 27071 - protein, 9 aa, synthetic construct
GTQAGGKVY

SEQ ID NO: 27072 - protein, 9 aa, synthetic construct
GTQAGGKVK

SEQ ID NO: 27073 - protein, 9 aa, synthetic construct
GTQAGGKVF

SEQ ID NO: 27074 - protein, 9 aa, synthetic construct
PLNGSLRVY

SEQ ID NO: 27075 - protein, 9 aa, synthetic construct
PLPGVVHLY

SEQ ID NO: 27076 - protein, 9 aa, synthetic construct
GTPGAVHLR

SEQ ID NO: 27077 - protein, 9 aa, synthetic construct
GTPGAVHLH

SEQ ID NO: 27078 - protein, 9 aa, synthetic construct
GTPGAVHLK

SEQ ID NO: 27079 - protein, 9 aa, synthetic construct
GTPGAVHLF

SEQ ID NO: 27080 - protein, 9 aa, synthetic construct
GTPGAVHVY

SEQ ID NO: 27081 - protein, 9 aa, synthetic construct
GTPGAVHVR

SEQ ID NO: 27082 - protein, 9 aa, synthetic construct
GTPGAVHVK

SEQ ID NO: 27083 - protein, 9 aa, synthetic construct
GTPGAVHVF

SEQ ID NO: 27084 - protein, 9 aa, synthetic construct
PLPGVVHLR

SEQ ID NO: 27085 - protein, 9 aa, synthetic construct
GTPGAVRLY

SEQ ID NO: 27086 - protein, 9 aa, synthetic construct
GTPGAVRLH

SEQ ID NO: 27087 - protein, 9 aa, synthetic construct
GTPGAVRLK

SEQ ID NO: 27088 - protein, 9 aa, synthetic construct
GTPGAVRVY

SEQ ID NO: 27089 - protein, 9 aa, synthetic construct
GTPGAVRVH

SEQ ID NO: 27090 - protein, 9 aa, synthetic construct
GTPGAVRVK

SEQ ID NO: 27091 - protein, 9 aa, synthetic construct
GTPGAVRVF

SEQ ID NO: 27092 - protein, 9 aa, synthetic construct
GTPGAVKLY

SEQ ID NO: 27093 - protein, 9 aa, synthetic construct
GTPGAVKLH

SEQ ID NO: 27094 - protein, 9 aa, synthetic construct
GTPGAVKLF

SEQ ID NO: 27095 - protein, 9 aa, synthetic construct
GTPGAVKVH

SEQ ID NO: 27096 - protein, 9 aa, synthetic construct
PLPGVVHLK

SEQ ID NO: 27097 - protein, 9 aa, synthetic construct
GTPGALHLY

SEQ ID NO: 27098 - protein, 9 aa, synthetic construct
GTPGALHLK

SEQ ID NO: 27099 - protein, 9 aa, synthetic construct
GTPGALHVY

SEQ ID NO: 27100 - protein, 9 aa, synthetic construct
GTPGALHVR

SEQ ID NO: 27101 - protein, 9 aa, synthetic construct
GTPGALHVH

SEQ ID NO: 27102 - protein, 9 aa, synthetic construct
GTPGALHVK

SEQ ID NO: 27103 - protein, 9 aa, synthetic construct
GTPGALHVF

SEQ ID NO: 27104 - protein, 9 aa, synthetic construct
GTPGALRLY

SEQ ID NO: 27105 - protein, 9 aa, synthetic construct
GTPGALRVY

SEQ ID NO: 27106 - protein, 9 aa, synthetic construct
GTPGALRVK

SEQ ID NO: 27107 - protein, 9 aa, synthetic construct
GTPGALKLR

SEQ ID NO: 27108 - protein, 9 aa, synthetic construct
GTPGALKLH

SEQ ID NO: 27109 - protein, 9 aa, synthetic construct
GTPGALKLF

SEQ ID NO: 27110 - protein, 9 aa, synthetic construct
PLPGVVHVR

SEQ ID NO: 27111 - protein, 9 aa, synthetic construct
GTPGAAHLR

SEQ ID NO: 27112 - protein, 9 aa, synthetic construct
GTPGAAHLF

SEQ ID NO: 27113 - protein, 9 aa, synthetic construct
GTPGAAHVY

SEQ ID NO: 27114 - protein, 9 aa, synthetic construct
GTPGAAHVK

SEQ ID NO: 27115 - protein, 9 aa, synthetic construct
GTPGAARLY

SEQ ID NO: 27116 - protein, 9 aa, synthetic construct
GTPGAARLH

SEQ ID NO: 27117 - protein, 9 aa, synthetic construct
GTPGAARLF

SEQ ID NO: 27118 - protein, 9 aa, synthetic construct
GTPGAARVY

SEQ ID NO: 27119 - protein, 9 aa, synthetic construct
GTPGAARVR

SEQ ID NO: 27120 - protein, 9 aa, synthetic construct
GTPGAARVH

SEQ ID NO: 27121 - protein, 9 aa, synthetic construct
GTPGAARVF

SEQ ID NO: 27122 - protein, 9 aa, synthetic construct
GTPGAAKLY

SEQ ID NO: 27123 - protein, 9 aa, synthetic construct
GTPGAAKLH

SEQ ID NO: 27124 - protein, 9 aa, synthetic construct
GTPGAAKLF

SEQ ID NO: 27125 - protein, 9 aa, synthetic construct
GTPGAAKVY

SEQ ID NO: 27126 - protein, 9 aa, synthetic construct
GTPGAAKVR

SEQ ID NO: 27127 - protein, 9 aa, synthetic construct
GTPGAAKVH

SEQ ID NO: 27128 - protein, 9 aa, synthetic construct
PLPGVVHVF

SEQ ID NO: 27129 - protein, 9 aa, synthetic construct
GTPGAIHLY

SEQ ID NO: 27130 - protein, 9 aa, synthetic construct
GTPGAIHLH

SEQ ID NO: 27131 - protein, 9 aa, synthetic construct
GTPGAIHLF

SEQ ID NO: 27132 - protein, 9 aa, synthetic construct
GTPGAIHVY

SEQ ID NO: 27133 - protein, 9 aa, synthetic construct
GTPGAIRLY

SEQ ID NO: 27134 - protein, 9 aa, synthetic construct
GTPGAIRLH

SEQ ID NO: 27135 - protein, 9 aa, synthetic construct
GTPGAIRLF

SEQ ID NO: 27136 - protein, 9 aa, synthetic construct
GTPGAIRVY

SEQ ID NO: 27137 - protein, 9 aa, synthetic construct
GTPGAIRVH

SEQ ID NO: 27138 - protein, 9 aa, synthetic construct
GTPGAIRVK

SEQ ID NO: 27139 - protein, 9 aa, synthetic construct
GTPGAIRVF

SEQ ID NO: 27140 - protein, 9 aa, synthetic construct
GTPGAIKLK

SEQ ID NO: 27141 - protein, 9 aa, synthetic construct
GTPGAIKLF

SEQ ID NO: 27142 - protein, 9 aa, synthetic construct
GTPGAIKVH

SEQ ID NO: 27143 - protein, 9 aa, synthetic construct
GTPGAIKVF

SEQ ID NO: 27144 - protein, 9 aa, synthetic construct
PLPGVVRLH

SEQ ID NO: 27145 - protein, 9 aa, synthetic construct
GTPGAGHLR

SEQ ID NO: 27146 - protein, 9 aa, synthetic construct
GTPGAGRLH

SEQ ID NO: 27147 - protein, 9 aa, synthetic construct
GTPGAGRVY

SEQ ID NO: 27148 - protein, 9 aa, synthetic construct
GTPGAGRVK

SEQ ID NO: 27149 - protein, 9 aa, synthetic construct
GTPGAGRVF

SEQ ID NO: 27150 - protein, 9 aa, synthetic construct
GTPGAGKVY

SEQ ID NO: 27151 - protein, 9 aa, synthetic construct
GTPGAGKVH

SEQ ID NO: 27152 - protein, 9 aa, synthetic construct
GTPGTVHLH

SEQ ID NO: 27153 - protein, 9 aa, synthetic construct
GTPGTVHLK

SEQ ID NO: 27154 - protein, 9 aa, synthetic construct
GTPGTVHLF

SEQ ID NO: 27155 - protein, 9 aa, synthetic construct
GTPGTVHVY

SEQ ID NO: 27156 - protein, 9 aa, synthetic construct
GTPGTVHVR

SEQ ID NO: 27157 - protein, 9 aa, synthetic construct
GTPGTVHVH

SEQ ID NO: 27158 - protein, 9 aa, synthetic construct
GTPGTVHVK

SEQ ID NO: 27159 - protein, 9 aa, synthetic construct
GTPGTVHVF

SEQ ID NO: 27160 - protein, 9 aa, synthetic construct
GTPGTVRLH

SEQ ID NO: 27161 - protein, 9 aa, synthetic construct
GTPGTVRVY

SEQ ID NO: 27162 - protein, 9 aa, synthetic construct
GTPGTVRVR

SEQ ID NO: 27163 - protein, 9 aa, synthetic construct
GTPGTVRVF

SEQ ID NO: 27164 - protein, 9 aa, synthetic construct
GTPGTVKLY

SEQ ID NO: 27165 - protein, 9 aa, synthetic construct
GTPGTVKLH

SEQ ID NO: 27166 - protein, 9 aa, synthetic construct
GTPGTVKLK

SEQ ID NO: 27167 - protein, 9 aa, synthetic construct
GTPGTVKLF

SEQ ID NO: 27168 - protein, 9 aa, synthetic construct
GTPGTVKVH

SEQ ID NO: 27169 - protein, 9 aa, synthetic construct
GTPGTVKVK

SEQ ID NO: 27170 - protein, 9 aa, synthetic construct
GTPGTVKVF

SEQ ID NO: 27171 - protein, 9 aa, synthetic construct
GTPGTLHLK

SEQ ID NO: 27172 - protein, 9 aa, synthetic construct
GTPGTLHVR

SEQ ID NO: 27173 - protein, 9 aa, synthetic construct
GTPGTLHVK

SEQ ID NO: 27174 - protein, 9 aa, synthetic construct
GTPGTLHVF

SEQ ID NO: 27175 - protein, 9 aa, synthetic construct
GTPGTLRLY

SEQ ID NO: 27176 - protein, 9 aa, synthetic construct
GTPGTLRLF

SEQ ID NO: 27177 - protein, 9 aa, synthetic construct
GTPGTLRVY

SEQ ID NO: 27178 - protein, 9 aa, synthetic construct
GTPGTLRVH

SEQ ID NO: 27179 - protein, 9 aa, synthetic construct
GTPGTLRVK

SEQ ID NO: 27180 - protein, 9 aa, synthetic construct
GTPGTLRVF

SEQ ID NO: 27181 - protein, 9 aa, synthetic construct
PLNGSLRVH

SEQ ID NO: 27182 - protein, 9 aa, synthetic construct
PLPGVVKLY

SEQ ID NO: 27183 - protein, 9 aa, synthetic construct
GTPGTLKLR

SEQ ID NO: 27184 - protein, 9 aa, synthetic construct
GTPGTLKLF

SEQ ID NO: 27185 - protein, 9 aa, synthetic construct
GTPGTLKVY

SEQ ID NO: 27186 - protein, 9 aa, synthetic construct
GTPGTLKVH

SEQ ID NO: 27187 - protein, 9 aa, synthetic construct
GTPGTAHLK

SEQ ID NO: 27188 - protein, 9 aa, synthetic construct
GTPGTAHVF

SEQ ID NO: 27189 - protein, 9 aa, synthetic construct
GTPGTARLY

SEQ ID NO: 27190 - protein, 9 aa, synthetic construct
GTPGTARLH

SEQ ID NO: 27191 - protein, 9 aa, synthetic construct
GTPGTARLF

SEQ ID NO: 27192 - protein, 9 aa, synthetic construct
GTPGTARVY

SEQ ID NO: 27193 - protein, 9 aa, synthetic construct
GTPGTARVH

SEQ ID NO: 27194 - protein, 9 aa, synthetic construct
GTPGTARVF

SEQ ID NO: 27195 - protein, 9 aa, synthetic construct
GTPGTAKLY

SEQ ID NO: 27196 - protein, 9 aa, synthetic construct
GTPGTAKLR

SEQ ID NO: 27197 - protein, 9 aa, synthetic construct
GTPGTAKLH

SEQ ID NO: 27198 - protein, 9 aa, synthetic construct
GTPGTAKLF

SEQ ID NO: 27199 - protein, 9 aa, synthetic construct
GTPGTAKVY

SEQ ID NO: 27200 - protein, 9 aa, synthetic construct
GTPGTAKVH

SEQ ID NO: 27201 - protein, 9 aa, synthetic construct
GTPGTIHLY

SEQ ID NO: 27202 - protein, 9 aa, synthetic construct
GTPGTIHLR

SEQ ID NO: 27203 - protein, 9 aa, synthetic construct
GTPGTIHLK

SEQ ID NO: 27204 - protein, 9 aa, synthetic construct
GTPGTIHLF

SEQ ID NO: 27205 - protein, 9 aa, synthetic construct
GTPGTIHVY

SEQ ID NO: 27206 - protein, 9 aa, synthetic construct
GTPGTIHVR

SEQ ID NO: 27207 - protein, 9 aa, synthetic construct
GTPGTIHVF

SEQ ID NO: 27208 - protein, 9 aa, synthetic construct
GTPGTIRLY

SEQ ID NO: 27209 - protein, 9 aa, synthetic construct
GTPGTIRLH

SEQ ID NO: 27210 - protein, 9 aa, synthetic construct
GTPGTIRLF

SEQ ID NO: 27211 - protein, 9 aa, synthetic construct
GTPGTIRVY

SEQ ID NO: 27212 - protein, 9 aa, synthetic construct
GTPGTIRVH

SEQ ID NO: 27213 - protein, 9 aa, synthetic construct
GTPGTIRVF

SEQ ID NO: 27214 - protein, 9 aa, synthetic construct
GTPGTIKLY

SEQ ID NO: 27215 - protein, 9 aa, synthetic construct
GTPGTIKLR

SEQ ID NO: 27216 - protein, 9 aa, synthetic construct
GTPGTIKLH

SEQ ID NO: 27217 - protein, 9 aa, synthetic construct
GTPGTIKLK

SEQ ID NO: 27218 - protein, 9 aa, synthetic construct
GTPGTIKLF

SEQ ID NO: 27219 - protein, 9 aa, synthetic construct
GTPGTIKVY

SEQ ID NO: 27220 - protein, 9 aa, synthetic construct
GTPGTIKVH

SEQ ID NO: 27221 - protein, 9 aa, synthetic construct
GTPGTIKVF

SEQ ID NO: 27222 - protein, 9 aa, synthetic construct
GTPGTGHLR

SEQ ID NO: 27223 - protein, 9 aa, synthetic construct
GTPGTGHLF

SEQ ID NO: 27224 - protein, 9 aa, synthetic construct
GTPGTGHVY

SEQ ID NO: 27225 - protein, 9 aa, synthetic construct
GTPGTGHVR

SEQ ID NO: 27226 - protein, 9 aa, synthetic construct
PLPGVVKVK

SEQ ID NO: 27227 - protein, 9 aa, synthetic construct
GTPGTGRLY

SEQ ID NO: 27228 - protein, 9 aa, synthetic construct
GTPGTGRLH

SEQ ID NO: 27229 - protein, 9 aa, synthetic construct
GTPGTGRLK

SEQ ID NO: 27230 - protein, 9 aa, synthetic construct
GTPGTGRLF

SEQ ID NO: 27231 - protein, 9 aa, synthetic construct
GTPGTGRVY

SEQ ID NO: 27232 - protein, 9 aa, synthetic construct
GTPGTGRVH

SEQ ID NO: 27233 - protein, 9 aa, synthetic construct
GTPGTGRVK

SEQ ID NO: 27234 - protein, 9 aa, synthetic construct
GTPGTGRVF

SEQ ID NO: 27235 - protein, 9 aa, synthetic construct
GTPGTGKLH

SEQ ID NO: 27236 - protein, 9 aa, synthetic construct
GTPGTGKVY

SEQ ID NO: 27237 - protein, 9 aa, synthetic construct
GTPGTGKVR

SEQ ID NO: 27238 - protein, 9 aa, synthetic construct
GTPGSVHLR

SEQ ID NO: 27239 - protein, 9 aa, synthetic construct
GTPGSVHLH

SEQ ID NO: 27240 - protein, 9 aa, synthetic construct
GTPGSVHLK

SEQ ID NO: 27241 - protein, 9 aa, synthetic construct
GTPGSVHVY

SEQ ID NO: 27242 - protein, 9 aa, synthetic construct
PLPGVLHLH

SEQ ID NO: 27243 - protein, 9 aa, synthetic construct
GTPGSVKLY

SEQ ID NO: 27244 - protein, 9 aa, synthetic construct
GTPGSVKVH

SEQ ID NO: 27245 - protein, 9 aa, synthetic construct
PLPGVLHLK

SEQ ID NO: 27246 - protein, 9 aa, synthetic construct
GTPGSLHLK

SEQ ID NO: 27247 - protein, 9 aa, synthetic construct
GTPGSLHLF

SEQ ID NO: 27248 - protein, 9 aa, synthetic construct
GTPGSLHVY

SEQ ID NO: 27249 - protein, 9 aa, synthetic construct
GTPGSLHVH

SEQ ID NO: 27250 - protein, 9 aa, synthetic construct
GTPGSLHVF

SEQ ID NO: 27251 - protein, 9 aa, synthetic construct
GTPGSLRLY

SEQ ID NO: 27252 - protein, 9 aa, synthetic construct
GTPGSLRVY

SEQ ID NO: 27253 - protein, 9 aa, synthetic construct
GTPGSLRVF

SEQ ID NO: 27254 - protein, 9 aa, synthetic construct
PLPGVLHVY

SEQ ID NO: 27255 - protein, 9 aa, synthetic construct
GTPGSLKLY

SEQ ID NO: 27256 - protein, 9 aa, synthetic construct
GTPGSLKLH

SEQ ID NO: 27257 - protein, 9 aa, synthetic construct
GTPGSLKVY

SEQ ID NO: 27258 - protein, 9 aa, synthetic construct
GTPGSLKVF

SEQ ID NO: 27259 - protein, 9 aa, synthetic construct
GTPGSARLF

SEQ ID NO: 27260 - protein, 9 aa, synthetic construct
GTPGSAKLH

SEQ ID NO: 27261 - protein, 9 aa, synthetic construct
GTPGSAKLF

SEQ ID NO: 27262 - protein, 9 aa, synthetic construct
GTPGSAKVH

SEQ ID NO: 27263 - protein, 9 aa, synthetic construct
GTPGSIHLY

SEQ ID NO: 27264 - protein, 9 aa, synthetic construct
GTPGSIHLR

SEQ ID NO: 27265 - protein, 9 aa, synthetic construct
GTPGSIHLK

SEQ ID NO: 27266 - protein, 9 aa, synthetic construct
GTPGSIHVR

SEQ ID NO: 27267 - protein, 9 aa, synthetic construct
GTPGSIHVF

SEQ ID NO: 27268 - protein, 9 aa, synthetic construct
PLNGSLRVF

SEQ ID NO: 27269 - protein, 9 aa, synthetic construct
GTPGSIRLF

SEQ ID NO: 27270 - protein, 9 aa, synthetic construct
GTPGSIRVF

SEQ ID NO: 27271 - protein, 9 aa, synthetic construct
GTPGSIKLH

SEQ ID NO: 27272 - protein, 9 aa, synthetic construct
GTPGSIKLK

SEQ ID NO: 27273 - protein, 9 aa, synthetic construct
GTPGSIKLF

SEQ ID NO: 27274 - protein, 9 aa, synthetic construct
GTPGSIKVY

SEQ ID NO: 27275 - protein, 9 aa, synthetic construct
GTPGSIKVH

SEQ ID NO: 27276 - protein, 9 aa, synthetic construct
GTPGSIKVF

SEQ ID NO: 27277 - protein, 9 aa, synthetic construct
GTPGSGHLK

SEQ ID NO: 27278 - protein, 9 aa, synthetic construct
GTPGSGHLF

SEQ ID NO: 27279 - protein, 9 aa, synthetic construct
GTPGSGHVK

SEQ ID NO: 27280 - protein, 9 aa, synthetic construct
GTPGSGRLF

SEQ ID NO: 27281 - protein, 9 aa, synthetic construct
GTPGSGKLH

SEQ ID NO: 27282 - protein, 9 aa, synthetic construct
GTPGVVHLR

SEQ ID NO: 27283 - protein, 9 aa, synthetic construct
GTPGVVHVR

SEQ ID NO: 27284 - protein, 9 aa, synthetic construct
GTPGVVRLF

SEQ ID NO: 27285 - protein, 9 aa, synthetic construct
GTPGVVKLY

SEQ ID NO: 27286 - protein, 9 aa, synthetic construct
GTPGVVKLH

SEQ ID NO: 27287 - protein, 9 aa, synthetic construct
GTPGVVKVH

SEQ ID NO: 27288 - protein, 9 aa, synthetic construct
GTPGVVKVF

SEQ ID NO: 27289 - protein, 9 aa, synthetic construct
PLPGVLRVK

SEQ ID NO: 27290 - protein, 9 aa, synthetic construct
GTPGVLHLH

SEQ ID NO: 27291 - protein, 9 aa, synthetic construct
GTPGVLRVH

SEQ ID NO: 27292 - protein, 9 aa, synthetic construct
PLNGSLKLY

SEQ ID NO: 27293 - protein, 9 aa, synthetic construct
GTPGVLKLF

SEQ ID NO: 27294 - protein, 9 aa, synthetic construct
GTPGVLKVY

SEQ ID NO: 27295 - protein, 9 aa, synthetic construct
GTPGVLKVF

SEQ ID NO: 27296 - protein, 9 aa, synthetic construct
GTPGVAHLR

SEQ ID NO: 27297 - protein, 9 aa, synthetic construct
GTPGVAHLK

SEQ ID NO: 27298 - protein, 9 aa, synthetic construct
GTPGVAHVY

SEQ ID NO: 27299 - protein, 9 aa, synthetic construct
GTPGVAHVR

SEQ ID NO: 27300 - protein, 9 aa, synthetic construct
GTPGVAHVK

SEQ ID NO: 27301 - protein, 9 aa, synthetic construct
GTPGVAHVF

SEQ ID NO: 27302 - protein, 9 aa, synthetic construct
GTPGVARLY

SEQ ID NO: 27303 - protein, 9 aa, synthetic construct
GTPGVARLR

SEQ ID NO: 27304 - protein, 9 aa, synthetic construct
GTPGVARLF

SEQ ID NO: 27305 - protein, 9 aa, synthetic construct
GTPGVARVR

SEQ ID NO: 27306 - protein, 9 aa, synthetic construct
GTPGVARVF

SEQ ID NO: 27307 - protein, 9 aa, synthetic construct
GTPGVAKLH

SEQ ID NO: 27308 - protein, 9 aa, synthetic construct
GTPGVAKVH

SEQ ID NO: 27309 - protein, 9 aa, synthetic construct
PLPGVLKLF

SEQ ID NO: 27310 - protein, 9 aa, synthetic construct
PLPGVLKVY

SEQ ID NO: 27311 - protein, 9 aa, synthetic construct
GTPGVIRLR

SEQ ID NO: 27312 - protein, 9 aa, synthetic construct
GTPGVIRVY

SEQ ID NO: 27313 - protein, 9 aa, synthetic construct
GTPGVIRVH

SEQ ID NO: 27314 - protein, 9 aa, synthetic construct
GTPGVIKLY

SEQ ID NO: 27315 - protein, 9 aa, synthetic construct
GTPGVIKLH

SEQ ID NO: 27316 - protein, 9 aa, synthetic construct
GTPGVIKVY

SEQ ID NO: 27317 - protein, 9 aa, synthetic construct
GTPGVGHLR

SEQ ID NO: 27318 - protein, 9 aa, synthetic construct
GTPGVGHLF

SEQ ID NO: 27319 - protein, 9 aa, synthetic construct
GTPGVGHVY

SEQ ID NO: 27320 - protein, 9 aa, synthetic construct
GTPGVGHVK

SEQ ID NO: 27321 - protein, 9 aa, synthetic construct
GTPGVGRLY

SEQ ID NO: 27322 - protein, 9 aa, synthetic construct
GTPGVGRLF

SEQ ID NO: 27323 - protein, 9 aa, synthetic construct
GTPGVGRVK

SEQ ID NO: 27324 - protein, 9 aa, synthetic construct
GTPGVGRVF

SEQ ID NO: 27325 - protein, 9 aa, synthetic construct
PLPGVLKVF

SEQ ID NO: 27326 - protein, 9 aa, synthetic construct
GTPGVGKLY

SEQ ID NO: 27327 - protein, 9 aa, synthetic construct
GTPGVGKLF

SEQ ID NO: 27328 - protein, 9 aa, synthetic construct
GTPGVGKVF

SEQ ID NO: 27329 - protein, 9 aa, synthetic construct
GTPGGVHLY

SEQ ID NO: 27330 - protein, 9 aa, synthetic construct
GTPGGVHLR

SEQ ID NO: 27331 - protein, 9 aa, synthetic construct
GTPGGVHLH

SEQ ID NO: 27332 - protein, 9 aa, synthetic construct
GTPGGVHLF

SEQ ID NO: 27333 - protein, 9 aa, synthetic construct
GTPGGVHVY

SEQ ID NO: 27334 - protein, 9 aa, synthetic construct
GTPGGVHVR

SEQ ID NO: 27335 - protein, 9 aa, synthetic construct
GTPGGVRLH

SEQ ID NO: 27336 - protein, 9 aa, synthetic construct
GTPGGVRLK

SEQ ID NO: 27337 - protein, 9 aa, synthetic construct
GTPGGVRLF

SEQ ID NO: 27338 - protein, 9 aa, synthetic construct
GTPGGVRVY

SEQ ID NO: 27339 - protein, 9 aa, synthetic construct
GTPGGVRVK

SEQ ID NO: 27340 - protein, 9 aa, synthetic construct
GTPGGVRVF

SEQ ID NO: 27341 - protein, 9 aa, synthetic construct
GTPGGVKLF

SEQ ID NO: 27342 - protein, 9 aa, synthetic construct
GTPGGVKVH

SEQ ID NO: 27343 - protein, 9 aa, synthetic construct
GTPGGVKVK

SEQ ID NO: 27344 - protein, 9 aa, synthetic construct
GTPGGLHLH

SEQ ID NO: 27345 - protein, 9 aa, synthetic construct
GTPGGLHVR

SEQ ID NO: 27346 - protein, 9 aa, synthetic construct
GTPGGLRVF

SEQ ID NO: 27347 - protein, 9 aa, synthetic construct
GTPGGLKLH

SEQ ID NO: 27348 - protein, 9 aa, synthetic construct
GTPGGLKVH

SEQ ID NO: 27349 - protein, 9 aa, synthetic construct
GTPGGAHLR

SEQ ID NO: 27350 - protein, 9 aa, synthetic construct
GTPGGAHLF

SEQ ID NO: 27351 - protein, 9 aa, synthetic construct
GTPGGARLY

SEQ ID NO: 27352 - protein, 9 aa, synthetic construct
GTPGGARLF

SEQ ID NO: 27353 - protein, 9 aa, synthetic construct
GTPGGARVY

SEQ ID NO: 27354 - protein, 9 aa, synthetic construct
GTPGGARVF

SEQ ID NO: 27355 - protein, 9 aa, synthetic construct
GTPGGAKLY

SEQ ID NO: 27356 - protein, 9 aa, synthetic construct
GTPGGAKLH

SEQ ID NO: 27357 - protein, 9 aa, synthetic construct
GTPGGAKLF

SEQ ID NO: 27358 - protein, 9 aa, synthetic construct
GTPGGAKVY

SEQ ID NO: 27359 - protein, 9 aa, synthetic construct
GTPGGAKVH

SEQ ID NO: 27360 - protein, 9 aa, synthetic construct
GTPGGAKVF

SEQ ID NO: 27361 - protein, 9 aa, synthetic construct
GTPGGIHLY

SEQ ID NO: 27362 - protein, 9 aa, synthetic construct
GTPGGIHLH

SEQ ID NO: 27363 - protein, 9 aa, synthetic construct
GTPGGIHLF

SEQ ID NO: 27364 - protein, 9 aa, synthetic construct
GTPGGIHVR

SEQ ID NO: 27365 - protein, 9 aa, synthetic construct
GTPGGIHVF

SEQ ID NO: 27366 - protein, 9 aa, synthetic construct
PLNGSLKLH

SEQ ID NO: 27367 - protein, 9 aa, synthetic construct
GTPGGIRLY

SEQ ID NO: 27368 - protein, 9 aa, synthetic construct
GTPGGIRLH

SEQ ID NO: 27369 - protein, 9 aa, synthetic construct
GTPGGIRLF

SEQ ID NO: 27370 - protein, 9 aa, synthetic construct
GTPGGIRVY

SEQ ID NO: 27371 - protein, 9 aa, synthetic construct
GTPGGIRVH

SEQ ID NO: 27372 - protein, 9 aa, synthetic construct
GTPGGIKLY

SEQ ID NO: 27373 - protein, 9 aa, synthetic construct
GTPGGIKLR

SEQ ID NO: 27374 - protein, 9 aa, synthetic construct
GTPGGIKLF

SEQ ID NO: 27375 - protein, 9 aa, synthetic construct
GTPGGIKVR

SEQ ID NO: 27376 - protein, 9 aa, synthetic construct
GTPGGIKVH

SEQ ID NO: 27377 - protein, 9 aa, synthetic construct
GTPGGIKVF

SEQ ID NO: 27378 - protein, 9 aa, synthetic construct
GTPGGGHLR

SEQ ID NO: 27379 - protein, 9 aa, synthetic construct
GTPGGGHLK

SEQ ID NO: 27380 - protein, 9 aa, synthetic construct
GTPGGGHLF

SEQ ID NO: 27381 - protein, 9 aa, synthetic construct
GTPGGGHVY

SEQ ID NO: 27382 - protein, 9 aa, synthetic construct
GTPGGGHVR

SEQ ID NO: 27383 - protein, 9 aa, synthetic construct
GTPGGGHVH

SEQ ID NO: 27384 - protein, 9 aa, synthetic construct
GTPGGGHVK

SEQ ID NO: 27385 - protein, 9 aa, synthetic construct
GTPGGGRLR

SEQ ID NO: 27386 - protein, 9 aa, synthetic construct
GTPGGGRLH

SEQ ID NO: 27387 - protein, 9 aa, synthetic construct
GTPGGGRLK

SEQ ID NO: 27388 - protein, 9 aa, synthetic construct
GTPGGGRVR

SEQ ID NO: 27389 - protein, 9 aa, synthetic construct
GTPGGGRVH

SEQ ID NO: 27390 - protein, 9 aa, synthetic construct
GTPGGGRVK

SEQ ID NO: 27391 - protein, 9 aa, synthetic construct
GTPGGGRVF

SEQ ID NO: 27392 - protein, 9 aa, synthetic construct
PLPGVARLF

SEQ ID NO: 27393 - protein, 9 aa, synthetic construct
GTPGGGKLY

SEQ ID NO: 27394 - protein, 9 aa, synthetic construct
GTPGGGKLR

SEQ ID NO: 27395 - protein, 9 aa, synthetic construct
GTPGGGKLH

SEQ ID NO: 27396 - protein, 9 aa, synthetic construct
GTPGGGKVY

SEQ ID NO: 27397 - protein, 9 aa, synthetic construct
GTPGGGKVK

SEQ ID NO: 27398 - protein, 9 aa, synthetic construct
PLPGVARVY

SEQ ID NO: 27399 - protein, 9 aa, synthetic construct
GTPAAVHLR

SEQ ID NO: 27400 - protein, 9 aa, synthetic construct
GTPAAVHLF

SEQ ID NO: 27401 - protein, 9 aa, synthetic construct
GTPAAVHVY

SEQ ID NO: 27402 - protein, 9 aa, synthetic construct
GTPAAVHVF

SEQ ID NO: 27403 - protein, 9 aa, synthetic construct
GTPAAVRLH

SEQ ID NO: 27404 - protein, 9 aa, synthetic construct
GTPAAVRVH

SEQ ID NO: 27405 - protein, 9 aa, synthetic construct
GTPAAVKVK

SEQ ID NO: 27406 - protein, 9 aa, synthetic construct
GTPAALHLY

SEQ ID NO: 27407 - protein, 9 aa, synthetic construct
GTPAALHLK

SEQ ID NO: 27408 - protein, 9 aa, synthetic construct
GTPAALHVY

SEQ ID NO: 27409 - protein, 9 aa, synthetic construct
GTPAALHVR

SEQ ID NO: 27410 - protein, 9 aa, synthetic construct
GTPAALHVK

SEQ ID NO: 27411 - protein, 9 aa, synthetic construct
GTPAALHVF

SEQ ID NO: 27412 - protein, 9 aa, synthetic construct
PLPGVARVF

SEQ ID NO: 27413 - protein, 9 aa, synthetic construct
GTPAALRVH

SEQ ID NO: 27414 - protein, 9 aa, synthetic construct
GTPAALRVK

SEQ ID NO: 27415 - protein, 9 aa, synthetic construct
PLPGVAKLY

SEQ ID NO: 27416 - protein, 9 aa, synthetic construct
GTPAALKLY

SEQ ID NO: 27417 - protein, 9 aa, synthetic construct
GTPAALKLH

SEQ ID NO: 27418 - protein, 9 aa, synthetic construct
GTPAALKVF

SEQ ID NO: 27419 - protein, 9 aa, synthetic construct
GTPAAAHLR

SEQ ID NO: 27420 - protein, 9 aa, synthetic construct
GTPAAAHLK

SEQ ID NO: 27421 - protein, 9 aa, synthetic construct
GTPAAAHLF

SEQ ID NO: 27422 - protein, 9 aa, synthetic construct
GTPAAAHVR

SEQ ID NO: 27423 - protein, 9 aa, synthetic construct
PLPGVAKLH

SEQ ID NO: 27424 - protein, 9 aa, synthetic construct
GTPAAARLY

SEQ ID NO: 27425 - protein, 9 aa, synthetic construct
GTPAAARLF

SEQ ID NO: 27426 - protein, 9 aa, synthetic construct
GTPAAARVY

SEQ ID NO: 27427 - protein, 9 aa, synthetic construct
GTPAAARVR

SEQ ID NO: 27428 - protein, 9 aa, synthetic construct
GTPAAAKLF

SEQ ID NO: 27429 - protein, 9 aa, synthetic construct
GTPAAAKVR

SEQ ID NO: 27430 - protein, 9 aa, synthetic construct
GTPAAIHLY

SEQ ID NO: 27431 - protein, 9 aa, synthetic construct
GTPAAIHLR

SEQ ID NO: 27432 - protein, 9 aa, synthetic construct
GTPAAIHVY

SEQ ID NO: 27433 - protein, 9 aa, synthetic construct
GTPAAIHVR

SEQ ID NO: 27434 - protein, 9 aa, synthetic construct
GTPAAIHVH

SEQ ID NO: 27435 - protein, 9 aa, synthetic construct
GTPAAIRLF

SEQ ID NO: 27436 - protein, 9 aa, synthetic construct
GTPAAIRVY

SEQ ID NO: 27437 - protein, 9 aa, synthetic construct
GTPAAIRVH

SEQ ID NO: 27438 - protein, 9 aa, synthetic construct
GTPAAIRVK

SEQ ID NO: 27439 - protein, 9 aa, synthetic construct
GTPAAIKLY

SEQ ID NO: 27440 - protein, 9 aa, synthetic construct
GTPAAIKLH

SEQ ID NO: 27441 - protein, 9 aa, synthetic construct
GTPAAIKLF

SEQ ID NO: 27442 - protein, 9 aa, synthetic construct
GTPAAIKVH

SEQ ID NO: 27443 - protein, 9 aa, synthetic construct
GTPAAGHLR

SEQ ID NO: 27444 - protein, 9 aa, synthetic construct
GTPAAGHVY

SEQ ID NO: 27445 - protein, 9 aa, synthetic construct
GTPAAGHVR

SEQ ID NO: 27446 - protein, 9 aa, synthetic construct
GTPAAGRLY

SEQ ID NO: 27447 - protein, 9 aa, synthetic construct
GTPAAGRVK

SEQ ID NO: 27448 - protein, 9 aa, synthetic construct
GTPAAGRVF

SEQ ID NO: 27449 - protein, 9 aa, synthetic construct
GTPAAGKLY

SEQ ID NO: 27450 - protein, 9 aa, synthetic construct
GTPAAGKLR

SEQ ID NO: 27451 - protein, 9 aa, synthetic construct
GTPAAGKLF

SEQ ID NO: 27452 - protein, 9 aa, synthetic construct
GTPAAGKVH

SEQ ID NO: 27453 - protein, 9 aa, synthetic construct
GTPAAGKVK

SEQ ID NO: 27454 - protein, 9 aa, synthetic construct
PLPGVIHLY

SEQ ID NO: 27455 - protein, 9 aa, synthetic construct
GTPATVHLY

SEQ ID NO: 27456 - protein, 9 aa, synthetic construct
GTPATVHLR

SEQ ID NO: 27457 - protein, 9 aa, synthetic construct
GTPATVHLH

SEQ ID NO: 27458 - protein, 9 aa, synthetic construct
GTPATVHLF

SEQ ID NO: 27459 - protein, 9 aa, synthetic construct
GTPATVHVR

SEQ ID NO: 27460 - protein, 9 aa, synthetic construct
GTPATVHVK

SEQ ID NO: 27461 - protein, 9 aa, synthetic construct
GTPATVHVF

SEQ ID NO: 27462 - protein, 9 aa, synthetic construct
PLPGVIHLR

SEQ ID NO: 27463 - protein, 9 aa, synthetic construct
GTPATVRLH

SEQ ID NO: 27464 - protein, 9 aa, synthetic construct
GTPATVRVY

SEQ ID NO: 27465 - protein, 9 aa, synthetic construct
GTPATVRVF

SEQ ID NO: 27466 - protein, 9 aa, synthetic construct
PLPGVIHLH

SEQ ID NO: 27467 - protein, 9 aa, synthetic construct
GTPATVKLY

SEQ ID NO: 27468 - protein, 9 aa, synthetic construct
GTPATVKLR

SEQ ID NO: 27469 - protein, 9 aa, synthetic construct
GTPATVKLH

SEQ ID NO: 27470 - protein, 9 aa, synthetic construct
GTPATLHLY

SEQ ID NO: 27471 - protein, 9 aa, synthetic construct
GTPATLHLK

SEQ ID NO: 27472 - protein, 9 aa, synthetic construct
GTPATLHVY

SEQ ID NO: 27473 - protein, 9 aa, synthetic construct
GTPATLHVR

SEQ ID NO: 27474 - protein, 9 aa, synthetic construct
GTPATLHVK

SEQ ID NO: 27475 - protein, 9 aa, synthetic construct
PLPGVIHLF

SEQ ID NO: 27476 - protein, 9 aa, synthetic construct
GTPATLRLY

SEQ ID NO: 27477 - protein, 9 aa, synthetic construct
GTPATLRVY

SEQ ID NO: 27478 - protein, 9 aa, synthetic construct
GTPATLRVR

SEQ ID NO: 27479 - protein, 9 aa, synthetic construct
GTPATLRVK

SEQ ID NO: 27480 - protein, 9 aa, synthetic construct
GTPATLKVY

SEQ ID NO: 27481 - protein, 9 aa, synthetic construct
GTPATLKVK

SEQ ID NO: 27482 - protein, 9 aa, synthetic construct
GTPATLKVF

SEQ ID NO: 27483 - protein, 9 aa, synthetic construct
PLPGVIHVR

SEQ ID NO: 27484 - protein, 9 aa, synthetic construct
GTPATAHLR

SEQ ID NO: 27485 - protein, 9 aa, synthetic construct
GTPATAHLF

SEQ ID NO: 27486 - protein, 9 aa, synthetic construct
GTPATAHVR

SEQ ID NO: 27487 - protein, 9 aa, synthetic construct
GTPATARLH

SEQ ID NO: 27488 - protein, 9 aa, synthetic construct
GTPATARLF

SEQ ID NO: 27489 - protein, 9 aa, synthetic construct
GTPATARVH

SEQ ID NO: 27490 - protein, 9 aa, synthetic construct
PLPGVIHVK

SEQ ID NO: 27491 - protein, 9 aa, synthetic construct
GTPATAKLY

SEQ ID NO: 27492 - protein, 9 aa, synthetic construct
GTPATAKLR

SEQ ID NO: 27493 - protein, 9 aa, synthetic construct
GTPATAKLF

SEQ ID NO: 27494 - protein, 9 aa, synthetic construct
GTPATAKVR

SEQ ID NO: 27495 - protein, 9 aa, synthetic construct
GTPATAKVH

SEQ ID NO: 27496 - protein, 9 aa, synthetic construct
GTPATAKVK

SEQ ID NO: 27497 - protein, 9 aa, synthetic construct
PLPGVIHVF

SEQ ID NO: 27498 - protein, 9 aa, synthetic construct
GTPATIHLR

SEQ ID NO: 27499 - protein, 9 aa, synthetic construct
GTPATIHVR

SEQ ID NO: 27500 - protein, 9 aa, synthetic construct
PLNGSLKVY

SEQ ID NO: 27501 - protein, 9 aa, synthetic construct
PLPGVIRLY

SEQ ID NO: 27502 - protein, 9 aa, synthetic construct
GTPATIRLY

SEQ ID NO: 27503 - protein, 9 aa, synthetic construct
GTPATIRLH

SEQ ID NO: 27504 - protein, 9 aa, synthetic construct
GTPATIRLF

SEQ ID NO: 27505 - protein, 9 aa, synthetic construct
GTPATIRVF

SEQ ID NO: 27506 - protein, 9 aa, synthetic construct
PLPGVIRLR

SEQ ID NO: 27507 - protein, 9 aa, synthetic construct
GTPATIKLR

SEQ ID NO: 27508 - protein, 9 aa, synthetic construct
GTPATIKLK

SEQ ID NO: 27509 - protein, 9 aa, synthetic construct
GTPATIKVH

SEQ ID NO: 27510 - protein, 9 aa, synthetic construct
PLPGVIRLH

SEQ ID NO: 27511 - protein, 9 aa, synthetic construct
GTPATGHLK

SEQ ID NO: 27512 - protein, 9 aa, synthetic construct
PLPGVIRLK

SEQ ID NO: 27513 - protein, 9 aa, synthetic construct
GTPATGRLY

SEQ ID NO: 27514 - protein, 9 aa, synthetic construct
GTPATGRLH

SEQ ID NO: 27515 - protein, 9 aa, synthetic construct
PLPGVIRLF

SEQ ID NO: 27516 - protein, 9 aa, synthetic construct
GTPATGKLF

SEQ ID NO: 27517 - protein, 9 aa, synthetic construct
GTPATGKVH

SEQ ID NO: 27518 - protein, 9 aa, synthetic construct
PLPGVIRVY

SEQ ID NO: 27519 - protein, 9 aa, synthetic construct
GTPASVHLY

SEQ ID NO: 27520 - protein, 9 aa, synthetic construct
GTPASVHLR

SEQ ID NO: 27521 - protein, 9 aa, synthetic construct
GTPASVHLH

SEQ ID NO: 27522 - protein, 9 aa, synthetic construct
GTPASVHLK

SEQ ID NO: 27523 - protein, 9 aa, synthetic construct
GTPASVRLY

SEQ ID NO: 27524 - protein, 9 aa, synthetic construct
GTPASVRLH

SEQ ID NO: 27525 - protein, 9 aa, synthetic construct
PLPGVIRVH

SEQ ID NO: 27526 - protein, 9 aa, synthetic construct
GTPASVKLY

SEQ ID NO: 27527 - protein, 9 aa, synthetic construct
GTPASVKLH

SEQ ID NO: 27528 - protein, 9 aa, synthetic construct
GTPASVKVY

SEQ ID NO: 27529 - protein, 9 aa, synthetic construct
GTPASVKVH

SEQ ID NO: 27530 - protein, 9 aa, synthetic construct
GTPASVKVK

SEQ ID NO: 27531 - protein, 9 aa, synthetic construct
GTPASVKVF

SEQ ID NO: 27532 - protein, 9 aa, synthetic construct
GTPASLHLH

SEQ ID NO: 27533 - protein, 9 aa, synthetic construct
GTPASLHLK

SEQ ID NO: 27534 - protein, 9 aa, synthetic construct
GTPASLHVH

SEQ ID NO: 27535 - protein, 9 aa, synthetic construct
GTPASLHVK

SEQ ID NO: 27536 - protein, 9 aa, synthetic construct
GTPASLRLH

SEQ ID NO: 27537 - protein, 9 aa, synthetic construct
GTPASLRVY

SEQ ID NO: 27538 - protein, 9 aa, synthetic construct
GTPASLRVK

SEQ ID NO: 27539 - protein, 9 aa, synthetic construct
GTPASLRVF

SEQ ID NO: 27540 - protein, 9 aa, synthetic construct
GTPASLKLY

SEQ ID NO: 27541 - protein, 9 aa, synthetic construct
GTPASLKLF

SEQ ID NO: 27542 - protein, 9 aa, synthetic construct
GTPASLKVY

SEQ ID NO: 27543 - protein, 9 aa, synthetic construct
GTPASLKVH

SEQ ID NO: 27544 - protein, 9 aa, synthetic construct
GTPASLKVF

SEQ ID NO: 27545 - protein, 9 aa, synthetic construct
GTPASAHLK

SEQ ID NO: 27546 - protein, 9 aa, synthetic construct
GTPASAHVK

SEQ ID NO: 27547 - protein, 9 aa, synthetic construct
GTPASAHVF

SEQ ID NO: 27548 - protein, 9 aa, synthetic construct
PLPGVIKLH

SEQ ID NO: 27549 - protein, 9 aa, synthetic construct
GTPASARLY

SEQ ID NO: 27550 - protein, 9 aa, synthetic construct
GTPASARLH

SEQ ID NO: 27551 - protein, 9 aa, synthetic construct
GTPASARLF

SEQ ID NO: 27552 - protein, 9 aa, synthetic construct
GTPASARVF

SEQ ID NO: 27553 - protein, 9 aa, synthetic construct
GTPASAKLR

SEQ ID NO: 27554 - protein, 9 aa, synthetic construct
GTPASAKVY

SEQ ID NO: 27555 - protein, 9 aa, synthetic construct
GTPASAKVF

SEQ ID NO: 27556 - protein, 9 aa, synthetic construct
GTPASIHLY

SEQ ID NO: 27557 - protein, 9 aa, synthetic construct
GTPASIHLR

SEQ ID NO: 27558 - protein, 9 aa, synthetic construct
GTPASIHLK

SEQ ID NO: 27559 - protein, 9 aa, synthetic construct
GTPASIHVY

SEQ ID NO: 27560 - protein, 9 aa, synthetic construct
GTPASIHVR

SEQ ID NO: 27561 - protein, 9 aa, synthetic construct
GTPASIHVK

SEQ ID NO: 27562 - protein, 9 aa, synthetic construct
GTPASIRLH

SEQ ID NO: 27563 - protein, 9 aa, synthetic construct
GTPASIRLK

SEQ ID NO: 27564 - protein, 9 aa, synthetic construct
GTPASIRVF

SEQ ID NO: 27565 - protein, 9 aa, synthetic construct
GTPASIKLK

SEQ ID NO: 27566 - protein, 9 aa, synthetic construct
GTPASIKVH

SEQ ID NO: 27567 - protein, 9 aa, synthetic construct
GTPASIKVK

SEQ ID NO: 27568 - protein, 9 aa, synthetic construct
GTPASIKVF

SEQ ID NO: 27569 - protein, 9 aa, synthetic construct
GTPASGHLK

SEQ ID NO: 27570 - protein, 9 aa, synthetic construct
GTPASGHVR

SEQ ID NO: 27571 - protein, 9 aa, synthetic construct
PLPGVIKVK

SEQ ID NO: 27572 - protein, 9 aa, synthetic construct
GTPASGRLY

SEQ ID NO: 27573 - protein, 9 aa, synthetic construct
GTPASGRLR

SEQ ID NO: 27574 - protein, 9 aa, synthetic construct
GTPASGRLH

SEQ ID NO: 27575 - protein, 9 aa, synthetic construct
GTPASGRLK

SEQ ID NO: 27576 - protein, 9 aa, synthetic construct
GTPASGRLF

SEQ ID NO: 27577 - protein, 9 aa, synthetic construct
GTPASGRVY

SEQ ID NO: 27578 - protein, 9 aa, synthetic construct
GTPASGRVK

SEQ ID NO: 27579 - protein, 9 aa, synthetic construct
GTPASGRVF

SEQ ID NO: 27580 - protein, 9 aa, synthetic construct
GTPASGKLF

SEQ ID NO: 27581 - protein, 9 aa, synthetic construct
GTPASGKVY

SEQ ID NO: 27582 - protein, 9 aa, synthetic construct
GTPASGKVH

SEQ ID NO: 27583 - protein, 9 aa, synthetic construct
GTPASGKVK

SEQ ID NO: 27584 - protein, 9 aa, synthetic construct
PLPGVGHLY

SEQ ID NO: 27585 - protein, 9 aa, synthetic construct
GTPAVVHLY

SEQ ID NO: 27586 - protein, 9 aa, synthetic construct
GTPAVVHLK

SEQ ID NO: 27587 - protein, 9 aa, synthetic construct
GTPAVVHVY

SEQ ID NO: 27588 - protein, 9 aa, synthetic construct
GTPAVVHVR

SEQ ID NO: 27589 - protein, 9 aa, synthetic construct
GTPAVVHVK

SEQ ID NO: 27590 - protein, 9 aa, synthetic construct
GTPAVVHVF

SEQ ID NO: 27591 - protein, 9 aa, synthetic construct
PLPGVGHLR

SEQ ID NO: 27592 - protein, 9 aa, synthetic construct
GTPAVVRLY

SEQ ID NO: 27593 - protein, 9 aa, synthetic construct
GTPAVVRLH

SEQ ID NO: 27594 - protein, 9 aa, synthetic construct
GTPAVVRLF

SEQ ID NO: 27595 - protein, 9 aa, synthetic construct
GTPAVVRVF

SEQ ID NO: 27596 - protein, 9 aa, synthetic construct
GTPAVVKLR

SEQ ID NO: 27597 - protein, 9 aa, synthetic construct
GTPAVVKLH

SEQ ID NO: 27598 - protein, 9 aa, synthetic construct
GTPAVVKLK

SEQ ID NO: 27599 - protein, 9 aa, synthetic construct
GTPAVVKVY

SEQ ID NO: 27600 - protein, 9 aa, synthetic construct
GTPAVVKVR

SEQ ID NO: 27601 - protein, 9 aa, synthetic construct
GTPAVVKVH

SEQ ID NO: 27602 - protein, 9 aa, synthetic construct
GTPAVLRLF

SEQ ID NO: 27603 - protein, 9 aa, synthetic construct
GTPAVLKVH

SEQ ID NO: 27604 - protein, 9 aa, synthetic construct
GTPAVAHLK

SEQ ID NO: 27605 - protein, 9 aa, synthetic construct
GTPAVAHLF

SEQ ID NO: 27606 - protein, 9 aa, synthetic construct
GTPAVAHVY

SEQ ID NO: 27607 - protein, 9 aa, synthetic construct
GTPAVAHVR

SEQ ID NO: 27608 - protein, 9 aa, synthetic construct
GTPAVAHVH

SEQ ID NO: 27609 - protein, 9 aa, synthetic construct
GTPAVAHVK

SEQ ID NO: 27610 - protein, 9 aa, synthetic construct
GTPAVAHVF

SEQ ID NO: 27611 - protein, 9 aa, synthetic construct
GTPAVARLY

SEQ ID NO: 27612 - protein, 9 aa, synthetic construct
GTPAVARLH

SEQ ID NO: 27613 - protein, 9 aa, synthetic construct
GTPAVARLF

SEQ ID NO: 27614 - protein, 9 aa, synthetic construct
GTPAVARVY

SEQ ID NO: 27615 - protein, 9 aa, synthetic construct
GTPAVAKLH

SEQ ID NO: 27616 - protein, 9 aa, synthetic construct
GTPAVAKVR

SEQ ID NO: 27617 - protein, 9 aa, synthetic construct
GTPAVAKVF

SEQ ID NO: 27618 - protein, 9 aa, synthetic construct
PLPGVGHVF

SEQ ID NO: 27619 - protein, 9 aa, synthetic construct
GTPAVIHLH

SEQ ID NO: 27620 - protein, 9 aa, synthetic construct
GTPAVIHLF

SEQ ID NO: 27621 - protein, 9 aa, synthetic construct
GTPAVIHVF

SEQ ID NO: 27622 - protein, 9 aa, synthetic construct
PLPGVGRLY

SEQ ID NO: 27623 - protein, 9 aa, synthetic construct
GTPAVIRLR

SEQ ID NO: 27624 - protein, 9 aa, synthetic construct
GTPAVIRVH

SEQ ID NO: 27625 - protein, 9 aa, synthetic construct
GTPAVIKLY

SEQ ID NO: 27626 - protein, 9 aa, synthetic construct
GTPAVIKLF

SEQ ID NO: 27627 - protein, 9 aa, synthetic construct
GTPAVIKVY

SEQ ID NO: 27628 - protein, 9 aa, synthetic construct
GTPAVGHLR

SEQ ID NO: 27629 - protein, 9 aa, synthetic construct
GTPAVGRLY

SEQ ID NO: 27630 - protein, 9 aa, synthetic construct
GTPAVGRLF

SEQ ID NO: 27631 - protein, 9 aa, synthetic construct
GTPAVGRVY

SEQ ID NO: 27632 - protein, 9 aa, synthetic construct
GTPAVGRVR

SEQ ID NO: 27633 - protein, 9 aa, synthetic construct
GTPAVGRVK

SEQ ID NO: 27634 - protein, 9 aa, synthetic construct
GTPAVGRVF

SEQ ID NO: 27635 - protein, 9 aa, synthetic construct
PLPGVGRLF

SEQ ID NO: 27636 - protein, 9 aa, synthetic construct
GTPAVGKLR

SEQ ID NO: 27637 - protein, 9 aa, synthetic construct
GTPAVGKLH

SEQ ID NO: 27638 - protein, 9 aa, synthetic construct
GTPAVGKLF

SEQ ID NO: 27639 - protein, 9 aa, synthetic construct
GTPAVGKVR

SEQ ID NO: 27640 - protein, 9 aa, synthetic construct
GTPAVGKVH

SEQ ID NO: 27641 - protein, 9 aa, synthetic construct
GTPAGVHVY

SEQ ID NO: 27642 - protein, 9 aa, synthetic construct
GTPAGVHVK

SEQ ID NO: 27643 - protein, 9 aa, synthetic construct
GTPAGVRVY

SEQ ID NO: 27644 - protein, 9 aa, synthetic construct
GTPAGVRVK

SEQ ID NO: 27645 - protein, 9 aa, synthetic construct
GTPAGVKVY

SEQ ID NO: 27646 - protein, 9 aa, synthetic construct
GTPAGVKVK

SEQ ID NO: 27647 - protein, 9 aa, synthetic construct
GTPAGVKVF

SEQ ID NO: 27648 - protein, 9 aa, synthetic construct
PLPGVGRVK

SEQ ID NO: 27649 - protein, 9 aa, synthetic construct
PLPGVGRVF

SEQ ID NO: 27650 - protein, 9 aa, synthetic construct
GTPAGLRVF

SEQ ID NO: 27651 - protein, 9 aa, synthetic construct
PLNGSLKVF

SEQ ID NO: 27652 - protein, 9 aa, synthetic construct
GTPAGLKVF

SEQ ID NO: 27653 - protein, 9 aa, synthetic construct
PLPGVGKLR

SEQ ID NO: 27654 - protein, 9 aa, synthetic construct
GTPAGAHLY

SEQ ID NO: 27655 - protein, 9 aa, synthetic construct
GTPAGAHLR

SEQ ID NO: 27656 - protein, 9 aa, synthetic construct
GTPAGAHVK

SEQ ID NO: 27657 - protein, 9 aa, synthetic construct
GTPAGARLF

SEQ ID NO: 27658 - protein, 9 aa, synthetic construct
GTPAGARVY

SEQ ID NO: 27659 - protein, 9 aa, synthetic construct
GTPAGARVF

SEQ ID NO: 27660 - protein, 9 aa, synthetic construct
PLPGVGKLK

SEQ ID NO: 27661 - protein, 9 aa, synthetic construct
GTPAGAKVY

SEQ ID NO: 27662 - protein, 9 aa, synthetic construct
GTPAGAKVF

SEQ ID NO: 27663 - protein, 9 aa, synthetic construct
GTPAGIHLK

SEQ ID NO: 27664 - protein, 9 aa, synthetic construct
GTPAGIHVR

SEQ ID NO: 27665 - protein, 9 aa, synthetic construct
GTPAGIHVF

SEQ ID NO: 27666 - protein, 9 aa, synthetic construct
GTPAGIRLY

SEQ ID NO: 27667 - protein, 9 aa, synthetic construct
GTPAGIRVR

SEQ ID NO: 27668 - protein, 9 aa, synthetic construct
GTPAGIKLY

SEQ ID NO: 27669 - protein, 9 aa, synthetic construct
GTPAGIKVY

SEQ ID NO: 27670 - protein, 9 aa, synthetic construct
GTPAGIKVF

SEQ ID NO: 27671 - protein, 9 aa, synthetic construct
PLPGVGKVH

SEQ ID NO: 27672 - protein, 9 aa, synthetic construct
GTPAGGHLR

SEQ ID NO: 27673 - protein, 9 aa, synthetic construct
GTPAGGHLK

SEQ ID NO: 27674 - protein, 9 aa, synthetic construct
GTPAGGHVR

SEQ ID NO: 27675 - protein, 9 aa, synthetic construct
GTPAGGHVF

SEQ ID NO: 27676 - protein, 9 aa, synthetic construct
GTPAGGRLY

SEQ ID NO: 27677 - protein, 9 aa, synthetic construct
GTPAGGRLH

SEQ ID NO: 27678 - protein, 9 aa, synthetic construct
GTPAGGRVY

SEQ ID NO: 27679 - protein, 9 aa, synthetic construct
GTPAGGRVR

SEQ ID NO: 27680 - protein, 9 aa, synthetic construct
GTPAGGRVF

SEQ ID NO: 27681 - protein, 9 aa, synthetic construct
PLPGVGKVF

SEQ ID NO: 27682 - protein, 9 aa, synthetic construct
GTPAGGKLH

SEQ ID NO: 27683 - protein, 9 aa, synthetic construct
GTPAGGKLF

SEQ ID NO: 27684 - protein, 9 aa, synthetic construct
GTPAGGKVH

SEQ ID NO: 27685 - protein, 9 aa, synthetic construct
GTPAGGKVK

SEQ ID NO: 27686 - protein, 9 aa, synthetic construct
PLNGALHVR

SEQ ID NO: 27687 - protein, 9 aa, synthetic construct
GSNGAVHVY

SEQ ID NO: 27688 - protein, 9 aa, synthetic construct
PLPGGVHLR

SEQ ID NO: 27689 - protein, 9 aa, synthetic construct
GSNGAVRLY

SEQ ID NO: 27690 - protein, 9 aa, synthetic construct
GSNGAVRLH

SEQ ID NO: 27691 - protein, 9 aa, synthetic construct
GSNGAVRVY

SEQ ID NO: 27692 - protein, 9 aa, synthetic construct
GSNGAVRVK

SEQ ID NO: 27693 - protein, 9 aa, synthetic construct
PLPGGVHLH

SEQ ID NO: 27694 - protein, 9 aa, synthetic construct
GSNGAVKLR

SEQ ID NO: 27695 - protein, 9 aa, synthetic construct
GSNGAVKLK

SEQ ID NO: 27696 - protein, 9 aa, synthetic construct
GSNGAVKLF

SEQ ID NO: 27697 - protein, 9 aa, synthetic construct
GSNGAVKVY

SEQ ID NO: 27698 - protein, 9 aa, synthetic construct
GSNGAVKVH

SEQ ID NO: 27699 - protein, 9 aa, synthetic construct
GSNGAVKVF

SEQ ID NO: 27700 - protein, 9 aa, synthetic construct
GSNGALHLY

SEQ ID NO: 27701 - protein, 9 aa, synthetic construct
GSNGALHLH

SEQ ID NO: 27702 - protein, 9 aa, synthetic construct
GSNGALHLK

SEQ ID NO: 27703 - protein, 9 aa, synthetic construct
GSNGALHVY

SEQ ID NO: 27704 - protein, 9 aa, synthetic construct
GSNGALHVR

SEQ ID NO: 27705 - protein, 9 aa, synthetic construct
GSNGALHVH

SEQ ID NO: 27706 - protein, 9 aa, synthetic construct
GSNGALHVK

SEQ ID NO: 27707 - protein, 9 aa, synthetic construct
GSNGALHVF

SEQ ID NO: 27708 - protein, 9 aa, synthetic construct
PLPGGVHLF

SEQ ID NO: 27709 - protein, 9 aa, synthetic construct
GSNGALRLY

SEQ ID NO: 27710 - protein, 9 aa, synthetic construct
GSNGALRLH

SEQ ID NO: 27711 - protein, 9 aa, synthetic construct
GSNGALRLF

SEQ ID NO: 27712 - protein, 9 aa, synthetic construct
GSNGALRVY

SEQ ID NO: 27713 - protein, 9 aa, synthetic construct
GSNGALRVR

SEQ ID NO: 27714 - protein, 9 aa, synthetic construct
GSNGALRVK

SEQ ID NO: 27715 - protein, 9 aa, synthetic construct
GSNGALKLY

SEQ ID NO: 27716 - protein, 9 aa, synthetic construct
GSNGALKLR

SEQ ID NO: 27717 - protein, 9 aa, synthetic construct
GSNGALKLF

SEQ ID NO: 27718 - protein, 9 aa, synthetic construct
GSNGALKVR

SEQ ID NO: 27719 - protein, 9 aa, synthetic construct
GSNGALKVH

SEQ ID NO: 27720 - protein, 9 aa, synthetic construct
GSNGALKVK

SEQ ID NO: 27721 - protein, 9 aa, synthetic construct
GSNGALKVF

SEQ ID NO: 27722 - protein, 9 aa, synthetic construct
GSNGAAHLY

SEQ ID NO: 27723 - protein, 9 aa, synthetic construct
GSNGAAHLR

SEQ ID NO: 27724 - protein, 9 aa, synthetic construct
GSNGAAHVR

SEQ ID NO: 27725 - protein, 9 aa, synthetic construct
GSNGAARLY

SEQ ID NO: 27726 - protein, 9 aa, synthetic construct
GSNGAARLH

SEQ ID NO: 27727 - protein, 9 aa, synthetic construct
GSNGAARVR

SEQ ID NO: 27728 - protein, 9 aa, synthetic construct
GSNGAAKLR

SEQ ID NO: 27729 - protein, 9 aa, synthetic construct
GSNGAAKVY

SEQ ID NO: 27730 - protein, 9 aa, synthetic construct
GSNGAAKVR

SEQ ID NO: 27731 - protein, 9 aa, synthetic construct
PLPGGVHVF

SEQ ID NO: 27732 - protein, 9 aa, synthetic construct
GSNGAIHLH

SEQ ID NO: 27733 - protein, 9 aa, synthetic construct
GSNGAIHLK

SEQ ID NO: 27734 - protein, 9 aa, synthetic construct
GSNGAIHLF

SEQ ID NO: 27735 - protein, 9 aa, synthetic construct
GSNGAIHVY

SEQ ID NO: 27736 - protein, 9 aa, synthetic construct
GSNGAIHVR

SEQ ID NO: 27737 - protein, 9 aa, synthetic construct
GSNGAIRLF

SEQ ID NO: 27738 - protein, 9 aa, synthetic construct
GSNGAIRVY

SEQ ID NO: 27739 - protein, 9 aa, synthetic construct
GSNGAIRVH

SEQ ID NO: 27740 - protein, 9 aa, synthetic construct
GSNGAIKLY

SEQ ID NO: 27741 - protein, 9 aa, synthetic construct
GSNGAIKLK

SEQ ID NO: 27742 - protein, 9 aa, synthetic construct
GSNGAIKLF

SEQ ID NO: 27743 - protein, 9 aa, synthetic construct
GSNGAIKVY

SEQ ID NO: 27744 - protein, 9 aa, synthetic construct
GSNGAIKVR

SEQ ID NO: 27745 - protein, 9 aa, synthetic construct
GSNGAIKVF

SEQ ID NO: 27746 - protein, 9 aa, synthetic construct
PLPGGVRLH

SEQ ID NO: 27747 - protein, 9 aa, synthetic construct
GSNGAGHLY

SEQ ID NO: 27748 - protein, 9 aa, synthetic construct
GSNGAGHLR

SEQ ID NO: 27749 - protein, 9 aa, synthetic construct
GSNGAGHLK

SEQ ID NO: 27750 - protein, 9 aa, synthetic construct
GSNGAGHVY

SEQ ID NO: 27751 - protein, 9 aa, synthetic construct
GSNGAGHVR

SEQ ID NO: 27752 - protein, 9 aa, synthetic construct
GSNGAGHVK

SEQ ID NO: 27753 - protein, 9 aa, synthetic construct
GSNGAGRVY

SEQ ID NO: 27754 - protein, 9 aa, synthetic construct
GSNGAGRVK

SEQ ID NO: 27755 - protein, 9 aa, synthetic construct
GSNGAGKLF

SEQ ID NO: 27756 - protein, 9 aa, synthetic construct
GSNGAGKVY

SEQ ID NO: 27757 - protein, 9 aa, synthetic construct
GSNGAGKVH

SEQ ID NO: 27758 - protein, 9 aa, synthetic construct
PLPGGVRVY

SEQ ID NO: 27759 - protein, 9 aa, synthetic construct
GSNGTVHVR

SEQ ID NO: 27760 - protein, 9 aa, synthetic construct
PLPGGVRVR

SEQ ID NO: 27761 - protein, 9 aa, synthetic construct
GSNGTVRLR

SEQ ID NO: 27762 - protein, 9 aa, synthetic construct
GSNGTVRVY

SEQ ID NO: 27763 - protein, 9 aa, synthetic construct
GSNGTVKLR

SEQ ID NO: 27764 - protein, 9 aa, synthetic construct
GSNGTVKLK

SEQ ID NO: 27765 - protein, 9 aa, synthetic construct
GSNGTVKVH

SEQ ID NO: 27766 - protein, 9 aa, synthetic construct
GSNGTVKVF

SEQ ID NO: 27767 - protein, 9 aa, synthetic construct
PLPGGVRVK

SEQ ID NO: 27768 - protein, 9 aa, synthetic construct
GSNGTLHVR

SEQ ID NO: 27769 - protein, 9 aa, synthetic construct
PLPGGVRVF

SEQ ID NO: 27770 - protein, 9 aa, synthetic construct
GSNGTLRLH

SEQ ID NO: 27771 - protein, 9 aa, synthetic construct
GSNGTLRLF

SEQ ID NO: 27772 - protein, 9 aa, synthetic construct
GSNGTLRVY

SEQ ID NO: 27773 - protein, 9 aa, synthetic construct
GSNGTLRVH

SEQ ID NO: 27774 - protein, 9 aa, synthetic construct
GSNGTLRVK

SEQ ID NO: 27775 - protein, 9 aa, synthetic construct
PLPGGVKLY

SEQ ID NO: 27776 - protein, 9 aa, synthetic construct
GSNGTLKLY

SEQ ID NO: 27777 - protein, 9 aa, synthetic construct
GSNGTLKLR

SEQ ID NO: 27778 - protein, 9 aa, synthetic construct
GSNGTLKVY

SEQ ID NO: 27779 - protein, 9 aa, synthetic construct
GSNGTLKVF

SEQ ID NO: 27780 - protein, 9 aa, synthetic construct
GSNGTAHLK

SEQ ID NO: 27781 - protein, 9 aa, synthetic construct
GSNGTAHVF

SEQ ID NO: 27782 - protein, 9 aa, synthetic construct
PLPGGVKLH

SEQ ID NO: 27783 - protein, 9 aa, synthetic construct
GSNGTARLY

SEQ ID NO: 27784 - protein, 9 aa, synthetic construct
GSNGTARLH

SEQ ID NO: 27785 - protein, 9 aa, synthetic construct
GSNGTARLF

SEQ ID NO: 27786 - protein, 9 aa, synthetic construct
GSNGTARVR

SEQ ID NO: 27787 - protein, 9 aa, synthetic construct
GSNGTAKLR

SEQ ID NO: 27788 - protein, 9 aa, synthetic construct
GSNGTAKVF

SEQ ID NO: 27789 - protein, 9 aa, synthetic construct
GSNGTIHLR

SEQ ID NO: 27790 - protein, 9 aa, synthetic construct
GSNGTIHVY

SEQ ID NO: 27791 - protein, 9 aa, synthetic construct
GSNGTIHVF

SEQ ID NO: 27792 - protein, 9 aa, synthetic construct
GSNGTIRLH

SEQ ID NO: 27793 - protein, 9 aa, synthetic construct
GSNGTIRLF

SEQ ID NO: 27794 - protein, 9 aa, synthetic construct
GSNGTIRVH

SEQ ID NO: 27795 - protein, 9 aa, synthetic construct
GSNGTIRVF

SEQ ID NO: 27796 - protein, 9 aa, synthetic construct
PLPGGVKVH

SEQ ID NO: 27797 - protein, 9 aa, synthetic construct
GSNGTGHLR

SEQ ID NO: 27798 - protein, 9 aa, synthetic construct
GSNGTGHLK

SEQ ID NO: 27799 - protein, 9 aa, synthetic construct
GSNGTGHVY

SEQ ID NO: 27800 - protein, 9 aa, synthetic construct
GSNGTGHVR

SEQ ID NO: 27801 - protein, 9 aa, synthetic construct
PLPGGVKVK

SEQ ID NO: 27802 - protein, 9 aa, synthetic construct
GSNGTGRLF

SEQ ID NO: 27803 - protein, 9 aa, synthetic construct
GSNGTGRVY

SEQ ID NO: 27804 - protein, 9 aa, synthetic construct
GSNGTGRVF

SEQ ID NO: 27805 - protein, 9 aa, synthetic construct
PLPGGLHLY

SEQ ID NO: 27806 - protein, 9 aa, synthetic construct
GSNGSVHLR

SEQ ID NO: 27807 - protein, 9 aa, synthetic construct
GSNGSVHVR

SEQ ID NO: 27808 - protein, 9 aa, synthetic construct
PLPGGLHLR

SEQ ID NO: 27809 - protein, 9 aa, synthetic construct
PLPGGLHLH

SEQ ID NO: 27810 - protein, 9 aa, synthetic construct
GSNGSVKLF

SEQ ID NO: 27811 - protein, 9 aa, synthetic construct
GSNGSVKVH

SEQ ID NO: 27812 - protein, 9 aa, synthetic construct
GSNGSLHLY

SEQ ID NO: 27813 - protein, 9 aa, synthetic construct
GSNGSLHLK

SEQ ID NO: 27814 - protein, 9 aa, synthetic construct
GSNGSLHVY

SEQ ID NO: 27815 - protein, 9 aa, synthetic construct
GSNGSLHVK

SEQ ID NO: 27816 - protein, 9 aa, synthetic construct
GSNGSLHVF

SEQ ID NO: 27817 - protein, 9 aa, synthetic construct
PLPGGLHLF

SEQ ID NO: 27818 - protein, 9 aa, synthetic construct
GSNGSLKLH

SEQ ID NO: 27819 - protein, 9 aa, synthetic construct
GSNGSLKVY

SEQ ID NO: 27820 - protein, 9 aa, synthetic construct
GSNGSLKVH

SEQ ID NO: 27821 - protein, 9 aa, synthetic construct
GSNGSLKVF

SEQ ID NO: 27822 - protein, 9 aa, synthetic construct
PLPGGLHVR

SEQ ID NO: 27823 - protein, 9 aa, synthetic construct
GSNGSAHLY

SEQ ID NO: 27824 - protein, 9 aa, synthetic construct
GSNGSAHLH

SEQ ID NO: 27825 - protein, 9 aa, synthetic construct
GSNGSAHVY

SEQ ID NO: 27826 - protein, 9 aa, synthetic construct
GSNGSAHVH

SEQ ID NO: 27827 - protein, 9 aa, synthetic construct
GSNGSAHVK

SEQ ID NO: 27828 - protein, 9 aa, synthetic construct
GSNGSARLY

SEQ ID NO: 27829 - protein, 9 aa, synthetic construct
GSNGSARLH

SEQ ID NO: 27830 - protein, 9 aa, synthetic construct
GSNGSARVH

SEQ ID NO: 27831 - protein, 9 aa, synthetic construct
GSNGSARVF

SEQ ID NO: 27832 - protein, 9 aa, synthetic construct
GSNGSIHLY

SEQ ID NO: 27833 - protein, 9 aa, synthetic construct
GSNGSIHVH

SEQ ID NO: 27834 - protein, 9 aa, synthetic construct
GSNGSIRLY

SEQ ID NO: 27835 - protein, 9 aa, synthetic construct
GSNGSIRLH

SEQ ID NO: 27836 - protein, 9 aa, synthetic construct
GSNGSIRLF

SEQ ID NO: 27837 - protein, 9 aa, synthetic construct
GSNGSIRVR

SEQ ID NO: 27838 - protein, 9 aa, synthetic construct
GSNGSIKVH

SEQ ID NO: 27839 - protein, 9 aa, synthetic construct
GSNGSGHLY

SEQ ID NO: 27840 - protein, 9 aa, synthetic construct
GSNGSGHVY

SEQ ID NO: 27841 - protein, 9 aa, synthetic construct
GSNGSGRLY

SEQ ID NO: 27842 - protein, 9 aa, synthetic construct
GSNGSGRLR

SEQ ID NO: 27843 - protein, 9 aa, synthetic construct
GSNGSGRLF

SEQ ID NO: 27844 - protein, 9 aa, synthetic construct
GSNGSGRVY

SEQ ID NO: 27845 - protein, 9 aa, synthetic construct
GSNGSGRVF

SEQ ID NO: 27846 - protein, 9 aa, synthetic construct
GSNGSGKLH

SEQ ID NO: 27847 - protein, 9 aa, synthetic construct
GSNGSGKVY

SEQ ID NO: 27848 - protein, 9 aa, synthetic construct
GSNGSGKVH

SEQ ID NO: 27849 - protein, 9 aa, synthetic construct
GSNGSGKVF

SEQ ID NO: 27850 - protein, 9 aa, synthetic construct
GSNGVVHLY

SEQ ID NO: 27851 - protein, 9 aa, synthetic construct
GSNGVVHLR

SEQ ID NO: 27852 - protein, 9 aa, synthetic construct
GSNGVVHLH

SEQ ID NO: 27853 - protein, 9 aa, synthetic construct
GSNGVVHLK

SEQ ID NO: 27854 - protein, 9 aa, synthetic construct
GSNGVVHVY

SEQ ID NO: 27855 - protein, 9 aa, synthetic construct
GSNGVVHVR

SEQ ID NO: 27856 - protein, 9 aa, synthetic construct
GSNGVVHVK

SEQ ID NO: 27857 - protein, 9 aa, synthetic construct
GSNGVVHVF

SEQ ID NO: 27858 - protein, 9 aa, synthetic construct
GSNGVVRLH

SEQ ID NO: 27859 - protein, 9 aa, synthetic construct
GSNGVVRLF

SEQ ID NO: 27860 - protein, 9 aa, synthetic construct
GSNGVVRVH

SEQ ID NO: 27861 - protein, 9 aa, synthetic construct
GSNGVVKLY

SEQ ID NO: 27862 - protein, 9 aa, synthetic construct
GSNGVVKLH

SEQ ID NO: 27863 - protein, 9 aa, synthetic construct
GSNGVVKVF

SEQ ID NO: 27864 - protein, 9 aa, synthetic construct
GSNGVLHLY

SEQ ID NO: 27865 - protein, 9 aa, synthetic construct
GSNGVLHLK

SEQ ID NO: 27866 - protein, 9 aa, synthetic construct
GSNGVLHVY

SEQ ID NO: 27867 - protein, 9 aa, synthetic construct
GSNGVLHVR

SEQ ID NO: 27868 - protein, 9 aa, synthetic construct
GSNGVLHVH

SEQ ID NO: 27869 - protein, 9 aa, synthetic construct
GSNGVLHVF

SEQ ID NO: 27870 - protein, 9 aa, synthetic construct
GSNGVLRLY

SEQ ID NO: 27871 - protein, 9 aa, synthetic construct
GSNGVLRLR

SEQ ID NO: 27872 - protein, 9 aa, synthetic construct
GSNGVLRLF

SEQ ID NO: 27873 - protein, 9 aa, synthetic construct
GSNGVLRVK

SEQ ID NO: 27874 - protein, 9 aa, synthetic construct
GSNGVLKLY

SEQ ID NO: 27875 - protein, 9 aa, synthetic construct
GSNGVLKLR

SEQ ID NO: 27876 - protein, 9 aa, synthetic construct
GSNGVLKLH

SEQ ID NO: 27877 - protein, 9 aa, synthetic construct
GSNGVLKLK

SEQ ID NO: 27878 - protein, 9 aa, synthetic construct
GSNGVLKLF

SEQ ID NO: 27879 - protein, 9 aa, synthetic construct
GSNGVLKVY

SEQ ID NO: 27880 - protein, 9 aa, synthetic construct
GSNGVLKVR

SEQ ID NO: 27881 - protein, 9 aa, synthetic construct
GSNGVAHLR

SEQ ID NO: 27882 - protein, 9 aa, synthetic construct
GSNGVAHLK

SEQ ID NO: 27883 - protein, 9 aa, synthetic construct
GSNGVAHLF

SEQ ID NO: 27884 - protein, 9 aa, synthetic construct
GSNGVAHVR

SEQ ID NO: 27885 - protein, 9 aa, synthetic construct
GSNGVAHVF

SEQ ID NO: 27886 - protein, 9 aa, synthetic construct
PLPGGLKLH

SEQ ID NO: 27887 - protein, 9 aa, synthetic construct
GSNGVARLY

SEQ ID NO: 27888 - protein, 9 aa, synthetic construct
GSNGVARLF

SEQ ID NO: 27889 - protein, 9 aa, synthetic construct
GSNGVARVY

SEQ ID NO: 27890 - protein, 9 aa, synthetic construct
GSNGVARVH

SEQ ID NO: 27891 - protein, 9 aa, synthetic construct
GSNGVARVK

SEQ ID NO: 27892 - protein, 9 aa, synthetic construct
GSNGVARVF

SEQ ID NO: 27893 - protein, 9 aa, synthetic construct
GSNGVAKLY

SEQ ID NO: 27894 - protein, 9 aa, synthetic construct
GSNGVAKLK

SEQ ID NO: 27895 - protein, 9 aa, synthetic construct
GSNGVAKVY

SEQ ID NO: 27896 - protein, 9 aa, synthetic construct
GSNGVAKVR

SEQ ID NO: 27897 - protein, 9 aa, synthetic construct
GSNGVAKVH

SEQ ID NO: 27898 - protein, 9 aa, synthetic construct
GSNGVAKVF

SEQ ID NO: 27899 - protein, 9 aa, synthetic construct
GSNGVIHLY

SEQ ID NO: 27900 - protein, 9 aa, synthetic construct
GSNGVIHLR

SEQ ID NO: 27901 - protein, 9 aa, synthetic construct
GSNGVIRLR

SEQ ID NO: 27902 - protein, 9 aa, synthetic construct
GSNGVIRVY

SEQ ID NO: 27903 - protein, 9 aa, synthetic construct
GSNGVIKLY

SEQ ID NO: 27904 - protein, 9 aa, synthetic construct
GSNGVIKVY

SEQ ID NO: 27905 - protein, 9 aa, synthetic construct
GSNGVIKVH

SEQ ID NO: 27906 - protein, 9 aa, synthetic construct
GSNGVGHLH

SEQ ID NO: 27907 - protein, 9 aa, synthetic construct
GSNGVGHLK

SEQ ID NO: 27908 - protein, 9 aa, synthetic construct
GSNGVGHVK

SEQ ID NO: 27909 - protein, 9 aa, synthetic construct
GSNGVGRLY

SEQ ID NO: 27910 - protein, 9 aa, synthetic construct
GSNGVGRLF

SEQ ID NO: 27911 - protein, 9 aa, synthetic construct
GSNGVGRVH

SEQ ID NO: 27912 - protein, 9 aa, synthetic construct
GSNGVGRVF

SEQ ID NO: 27913 - protein, 9 aa, synthetic construct
GSNGVGKLY

SEQ ID NO: 27914 - protein, 9 aa, synthetic construct
GSNGVGKLR

SEQ ID NO: 27915 - protein, 9 aa, synthetic construct
GSNGVGKLF

SEQ ID NO: 27916 - protein, 9 aa, synthetic construct
GSNGVGKVY

SEQ ID NO: 27917 - protein, 9 aa, synthetic construct
PLPGGAHLY

SEQ ID NO: 27918 - protein, 9 aa, synthetic construct
GSNGGVHVR

SEQ ID NO: 27919 - protein, 9 aa, synthetic construct
PLPGGAHLR

SEQ ID NO: 27920 - protein, 9 aa, synthetic construct
GSNGGVRLH

SEQ ID NO: 27921 - protein, 9 aa, synthetic construct
GSNGGVRVY

SEQ ID NO: 27922 - protein, 9 aa, synthetic construct
GSNGGVRVH

SEQ ID NO: 27923 - protein, 9 aa, synthetic construct
GSNGGVRVK

SEQ ID NO: 27924 - protein, 9 aa, synthetic construct
GSNGGVKVY

SEQ ID NO: 27925 - protein, 9 aa, synthetic construct
GSNGGVKVF

SEQ ID NO: 27926 - protein, 9 aa, synthetic construct
GSNGGLHLH

SEQ ID NO: 27927 - protein, 9 aa, synthetic construct
GSNGGLHVY

SEQ ID NO: 27928 - protein, 9 aa, synthetic construct
GSNGGLHVK

SEQ ID NO: 27929 - protein, 9 aa, synthetic construct
GSNGGLHVF

SEQ ID NO: 27930 - protein, 9 aa, synthetic construct
PLPGGAHLF

SEQ ID NO: 27931 - protein, 9 aa, synthetic construct
GSNGGLRLY

SEQ ID NO: 27932 - protein, 9 aa, synthetic construct
PLPGGAHVY

SEQ ID NO: 27933 - protein, 9 aa, synthetic construct
GSNGGLKLH

SEQ ID NO: 27934 - protein, 9 aa, synthetic construct
GSNGGLKLF

SEQ ID NO: 27935 - protein, 9 aa, synthetic construct
PLPGGAHVR

SEQ ID NO: 27936 - protein, 9 aa, synthetic construct
GSNGGAHLR

SEQ ID NO: 27937 - protein, 9 aa, synthetic construct
PLPGGAHVH

SEQ ID NO: 27938 - protein, 9 aa, synthetic construct
GSNGGARLY

SEQ ID NO: 27939 - protein, 9 aa, synthetic construct
GSNGGARLH

SEQ ID NO: 27940 - protein, 9 aa, synthetic construct
GSNGGARLF

SEQ ID NO: 27941 - protein, 9 aa, synthetic construct
GSNGGARVH

SEQ ID NO: 27942 - protein, 9 aa, synthetic construct
GSNGGARVF

SEQ ID NO: 27943 - protein, 9 aa, synthetic construct
PLPGGAHVK

SEQ ID NO: 27944 - protein, 9 aa, synthetic construct
GSNGGAKLF

SEQ ID NO: 27945 - protein, 9 aa, synthetic construct
GSNGGIHLR

SEQ ID NO: 27946 - protein, 9 aa, synthetic construct
GSNGGIHLH

SEQ ID NO: 27947 - protein, 9 aa, synthetic construct
GSNGGIHLK

SEQ ID NO: 27948 - protein, 9 aa, synthetic construct
GSNGGIHLF

SEQ ID NO: 27949 - protein, 9 aa, synthetic construct
PLPGGARLY

SEQ ID NO: 27950 - protein, 9 aa, synthetic construct
GSNGGIRVY

SEQ ID NO: 27951 - protein, 9 aa, synthetic construct
GSNGGIKLY

SEQ ID NO: 27952 - protein, 9 aa, synthetic construct
GSNGGIKVY

SEQ ID NO: 27953 - protein, 9 aa, synthetic construct
GSNGGIKVH

SEQ ID NO: 27954 - protein, 9 aa, synthetic construct
GSNGGIKVK

SEQ ID NO: 27955 - protein, 9 aa, synthetic construct
GSNGGIKVF

SEQ ID NO: 27956 - protein, 9 aa, synthetic construct
PLPGGARLH

SEQ ID NO: 27957 - protein, 9 aa, synthetic construct
GSNGGGHVY

SEQ ID NO: 27958 - protein, 9 aa, synthetic construct
GSNGGGRVR

SEQ ID NO: 27959 - protein, 9 aa, synthetic construct
GSNGGGRVH

SEQ ID NO: 27960 - protein, 9 aa, synthetic construct
GSNGGGRVF

SEQ ID NO: 27961 - protein, 9 aa, synthetic construct
PLPGGARLF

SEQ ID NO: 27962 - protein, 9 aa, synthetic construct
PLPGGARVY

SEQ ID NO: 27963 - protein, 9 aa, synthetic construct
GSNAAVHVY

SEQ ID NO: 27964 - protein, 9 aa, synthetic construct
GSNAAVHVK

SEQ ID NO: 27965 - protein, 9 aa, synthetic construct
GSNAAVHVF

SEQ ID NO: 27966 - protein, 9 aa, synthetic construct
GSNAAVRLY

SEQ ID NO: 27967 - protein, 9 aa, synthetic construct
GSNAAVRLH

SEQ ID NO: 27968 - protein, 9 aa, synthetic construct
GSNAAVRLF

SEQ ID NO: 27969 - protein, 9 aa, synthetic construct
GSNAAVRVH

SEQ ID NO: 27970 - protein, 9 aa, synthetic construct
PLPGGARVH

SEQ ID NO: 27971 - protein, 9 aa, synthetic construct
GSNAAVKLR

SEQ ID NO: 27972 - protein, 9 aa, synthetic construct
GSNAAVKLK

SEQ ID NO: 27973 - protein, 9 aa, synthetic construct
GSNAAVKVH

SEQ ID NO: 27974 - protein, 9 aa, synthetic construct
GSNAAVKVK

SEQ ID NO: 27975 - protein, 9 aa, synthetic construct
GSNAALHLH

SEQ ID NO: 27976 - protein, 9 aa, synthetic construct
GSNAALHVY

SEQ ID NO: 27977 - protein, 9 aa, synthetic construct
GSNAALHVK

SEQ ID NO: 27978 - protein, 9 aa, synthetic construct
GSNAALHVF

SEQ ID NO: 27979 - protein, 9 aa, synthetic construct
PLPGGARVF

SEQ ID NO: 27980 - protein, 9 aa, synthetic construct
GSNAALRLH

SEQ ID NO: 27981 - protein, 9 aa, synthetic construct
GSNAALRVH

SEQ ID NO: 27982 - protein, 9 aa, synthetic construct
GSNAALRVK

SEQ ID NO: 27983 - protein, 9 aa, synthetic construct
GSNAALKLF

SEQ ID NO: 27984 - protein, 9 aa, synthetic construct
GSNAALKVH

SEQ ID NO: 27985 - protein, 9 aa, synthetic construct
GSNAAARLY

SEQ ID NO: 27986 - protein, 9 aa, synthetic construct
GSNAAARLF

SEQ ID NO: 27987 - protein, 9 aa, synthetic construct
GSNAAARVR

SEQ ID NO: 27988 - protein, 9 aa, synthetic construct
PLPGGAKLK

SEQ ID NO: 27989 - protein, 9 aa, synthetic construct
GSNAAAKLF

SEQ ID NO: 27990 - protein, 9 aa, synthetic construct
GSNAAAKVR

SEQ ID NO: 27991 - protein, 9 aa, synthetic construct
GSNAAAKVH

SEQ ID NO: 27992 - protein, 9 aa, synthetic construct
GSNAAIHLR

SEQ ID NO: 27993 - protein, 9 aa, synthetic construct
GSNAAIHLH

SEQ ID NO: 27994 - protein, 9 aa, synthetic construct
GSNAAIHLK

SEQ ID NO: 27995 - protein, 9 aa, synthetic construct
GSNAAIHVY

SEQ ID NO: 27996 - protein, 9 aa, synthetic construct
GSNAAIHVF

SEQ ID NO: 27997 - protein, 9 aa, synthetic construct
GSNAAIRLH

SEQ ID NO: 27998 - protein, 9 aa, synthetic construct
GSNAAIRVH

SEQ ID NO: 27999 - protein, 9 aa, synthetic construct
GSNAAIRVF

SEQ ID NO: 28000 - protein, 9 aa, synthetic construct
PLPGGAKVR

SEQ ID NO: 28001 - protein, 9 aa, synthetic construct
GSNAAIKLY

SEQ ID NO: 28002 - protein, 9 aa, synthetic construct
GSNAAIKLK

SEQ ID NO: 28003 - protein, 9 aa, synthetic construct
GSNAAIKVR

SEQ ID NO: 28004 - protein, 9 aa, synthetic construct
GSNAAIKVH

SEQ ID NO: 28005 - protein, 9 aa, synthetic construct
PLPGGAKVH

SEQ ID NO: 28006 - protein, 9 aa, synthetic construct
GSNAAGRLR

SEQ ID NO: 28007 - protein, 9 aa, synthetic construct
GSNAAGRVY

SEQ ID NO: 28008 - protein, 9 aa, synthetic construct
GSNAAGRVK

SEQ ID NO: 28009 - protein, 9 aa, synthetic construct
PLPGGAKVF

SEQ ID NO: 28010 - protein, 9 aa, synthetic construct
GSNAAGKLY

SEQ ID NO: 28011 - protein, 9 aa, synthetic construct
GSNAAGKVY

SEQ ID NO: 28012 - protein, 9 aa, synthetic construct
GSNAAGKVH

SEQ ID NO: 28013 - protein, 9 aa, synthetic construct
PLPGGIHLR

SEQ ID NO: 28014 - protein, 9 aa, synthetic construct
GSNATVRLH

SEQ ID NO: 28015 - protein, 9 aa, synthetic construct
GSNATVRLK

SEQ ID NO: 28016 - protein, 9 aa, synthetic construct
GSNATVRLF

SEQ ID NO: 28017 - protein, 9 aa, synthetic construct
GSNATVRVH

SEQ ID NO: 28018 - protein, 9 aa, synthetic construct
PLPGGIHLH

SEQ ID NO: 28019 - protein, 9 aa, synthetic construct
GSNATVKLR

SEQ ID NO: 28020 - protein, 9 aa, synthetic construct
GSNATVKVH

SEQ ID NO: 28021 - protein, 9 aa, synthetic construct
GSNATVKVF

SEQ ID NO: 28022 - protein, 9 aa, synthetic construct
PLPGGIHLK

SEQ ID NO: 28023 - protein, 9 aa, synthetic construct
GSNATLHLK

SEQ ID NO: 28024 - protein, 9 aa, synthetic construct
GSNATLHVK

SEQ ID NO: 28025 - protein, 9 aa, synthetic construct
PLPGGIHLF

SEQ ID NO: 28026 - protein, 9 aa, synthetic construct
PLPGGIHVY

SEQ ID NO: 28027 - protein, 9 aa, synthetic construct
GSNATLKLF

SEQ ID NO: 28028 - protein, 9 aa, synthetic construct
PLPGGIHVH

SEQ ID NO: 28029 - protein, 9 aa, synthetic construct
GSNATARLF

SEQ ID NO: 28030 - protein, 9 aa, synthetic construct
GSNATARVY

SEQ ID NO: 28031 - protein, 9 aa, synthetic construct
GSNATARVR

SEQ ID NO: 28032 - protein, 9 aa, synthetic construct
GSNATARVK

SEQ ID NO: 28033 - protein, 9 aa, synthetic construct
GSNATAKLR

SEQ ID NO: 28034 - protein, 9 aa, synthetic construct
GSNATAKLF

SEQ ID NO: 28035 - protein, 9 aa, synthetic construct
GSNATAKVH

SEQ ID NO: 28036 - protein, 9 aa, synthetic construct
GSNATAKVF

SEQ ID NO: 28037 - protein, 9 aa, synthetic construct
PLPGGIHVF

SEQ ID NO: 28038 - protein, 9 aa, synthetic construct
GSNATIHVY

SEQ ID NO: 28039 - protein, 9 aa, synthetic construct
GSNATIHVF

SEQ ID NO: 28040 - protein, 9 aa, synthetic construct
GSNATIRLF

SEQ ID NO: 28041 - protein, 9 aa, synthetic construct
GSNATIRVH

SEQ ID NO: 28042 - protein, 9 aa, synthetic construct
GSNATIRVF

SEQ ID NO: 28043 - protein, 9 aa, synthetic construct
GSNATIKLK

SEQ ID NO: 28044 - protein, 9 aa, synthetic construct
GSNATIKVF

SEQ ID NO: 28045 - protein, 9 aa, synthetic construct
GSNATGHLK

SEQ ID NO: 28046 - protein, 9 aa, synthetic construct
GSNATGRLY

SEQ ID NO: 28047 - protein, 9 aa, synthetic construct
GSNATGRLR

SEQ ID NO: 28048 - protein, 9 aa, synthetic construct
GSNATGRVY

SEQ ID NO: 28049 - protein, 9 aa, synthetic construct
GSNATGRVH

SEQ ID NO: 28050 - protein, 9 aa, synthetic construct
PLPGGIRLF

SEQ ID NO: 28051 - protein, 9 aa, synthetic construct
GSNATGKLF

SEQ ID NO: 28052 - protein, 9 aa, synthetic construct
GSNATGKVF

SEQ ID NO: 28053 - protein, 9 aa, synthetic construct
GSNASVHLR

SEQ ID NO: 28054 - protein, 9 aa, synthetic construct
GSNASVHLK

SEQ ID NO: 28055 - protein, 9 aa, synthetic construct
GSNASVRLY

SEQ ID NO: 28056 - protein, 9 aa, synthetic construct
GSNASVRLF

SEQ ID NO: 28057 - protein, 9 aa, synthetic construct
GSNASVRVR

SEQ ID NO: 28058 - protein, 9 aa, synthetic construct
GSNASVRVH

SEQ ID NO: 28059 - protein, 9 aa, synthetic construct
GSNASVKLH

SEQ ID NO: 28060 - protein, 9 aa, synthetic construct
GSNASVKVY

SEQ ID NO: 28061 - protein, 9 aa, synthetic construct
GSNASVKVR

SEQ ID NO: 28062 - protein, 9 aa, synthetic construct
GSNASVKVH

SEQ ID NO: 28063 - protein, 9 aa, synthetic construct
GSNASVKVK

SEQ ID NO: 28064 - protein, 9 aa, synthetic construct
GSNASLHLH

SEQ ID NO: 28065 - protein, 9 aa, synthetic construct
GSNASLHLK

SEQ ID NO: 28066 - protein, 9 aa, synthetic construct
GSNASLHLF

SEQ ID NO: 28067 - protein, 9 aa, synthetic construct
GSNASLHVH

SEQ ID NO: 28068 - protein, 9 aa, synthetic construct
GSNASLHVK

SEQ ID NO: 28069 - protein, 9 aa, synthetic construct
GSNASLRLY

SEQ ID NO: 28070 - protein, 9 aa, synthetic construct
GSNASLRLF

SEQ ID NO: 28071 - protein, 9 aa, synthetic construct
GSNASLRVF

SEQ ID NO: 28072 - protein, 9 aa, synthetic construct
GSNASLKLH

SEQ ID NO: 28073 - protein, 9 aa, synthetic construct
GSNASLKVY

SEQ ID NO: 28074 - protein, 9 aa, synthetic construct
GSNASLKVH

SEQ ID NO: 28075 - protein, 9 aa, synthetic construct
GSNASLKVF

SEQ ID NO: 28076 - protein, 9 aa, synthetic construct
PLPGGIKLR

SEQ ID NO: 28077 - protein, 9 aa, synthetic construct
PLPGGIKLH

SEQ ID NO: 28078 - protein, 9 aa, synthetic construct
GSNASARLY

SEQ ID NO: 28079 - protein, 9 aa, synthetic construct
PLPGGIKLK

SEQ ID NO: 28080 - protein, 9 aa, synthetic construct
GSNASAKLR

SEQ ID NO: 28081 - protein, 9 aa, synthetic construct
PLPGGIKLF

SEQ ID NO: 28082 - protein, 9 aa, synthetic construct
GSNASIHLY

SEQ ID NO: 28083 - protein, 9 aa, synthetic construct
GSNASIHLH

SEQ ID NO: 28084 - protein, 9 aa, synthetic construct
GSNASIHLF

SEQ ID NO: 28085 - protein, 9 aa, synthetic construct
GSNASIHVY

SEQ ID NO: 28086 - protein, 9 aa, synthetic construct
GSNASIHVR

SEQ ID NO: 28087 - protein, 9 aa, synthetic construct
GSNASIHVH

SEQ ID NO: 28088 - protein, 9 aa, synthetic construct
PLPGGIKVY

SEQ ID NO: 28089 - protein, 9 aa, synthetic construct
GSNASIRLK

SEQ ID NO: 28090 - protein, 9 aa, synthetic construct
GSNASIKLK

SEQ ID NO: 28091 - protein, 9 aa, synthetic construct
GSNASGRLY

SEQ ID NO: 28092 - protein, 9 aa, synthetic construct
GSNASGRLR

SEQ ID NO: 28093 - protein, 9 aa, synthetic construct
PLPGGIKVF

SEQ ID NO: 28094 - protein, 9 aa, synthetic construct
GSNASGKLK

SEQ ID NO: 28095 - protein, 9 aa, synthetic construct
GSNASGKLF

SEQ ID NO: 28096 - protein, 9 aa, synthetic construct
GSNASGKVY

SEQ ID NO: 28097 - protein, 9 aa, synthetic construct
PLNGSARLH

SEQ ID NO: 28098 - protein, 9 aa, synthetic construct
PLPGGGHLY

SEQ ID NO: 28099 - protein, 9 aa, synthetic construct
GSNAVVHLY

SEQ ID NO: 28100 - protein, 9 aa, synthetic construct
GSNAVVHLH

SEQ ID NO: 28101 - protein, 9 aa, synthetic construct
GSNAVVHVY

SEQ ID NO: 28102 - protein, 9 aa, synthetic construct
PLPGGGHLR

SEQ ID NO: 28103 - protein, 9 aa, synthetic construct
GSNAVVRLY

SEQ ID NO: 28104 - protein, 9 aa, synthetic construct
GSNAVVRLH

SEQ ID NO: 28105 - protein, 9 aa, synthetic construct
GSNAVVRLF

SEQ ID NO: 28106 - protein, 9 aa, synthetic construct
GSNAVVRVY

SEQ ID NO: 28107 - protein, 9 aa, synthetic construct
GSNAVVRVH

SEQ ID NO: 28108 - protein, 9 aa, synthetic construct
GSNAVVRVK

SEQ ID NO: 28109 - protein, 9 aa, synthetic construct
GSNAVVRVF

SEQ ID NO: 28110 - protein, 9 aa, synthetic construct
GSNAVVKLY

SEQ ID NO: 28111 - protein, 9 aa, synthetic construct
GSNAVVKLR

SEQ ID NO: 28112 - protein, 9 aa, synthetic construct
GSNAVVKLH

SEQ ID NO: 28113 - protein, 9 aa, synthetic construct
GSNAVVKLF

SEQ ID NO: 28114 - protein, 9 aa, synthetic construct
GSNAVVKVH

SEQ ID NO: 28115 - protein, 9 aa, synthetic construct
PLPGGGHLK

SEQ ID NO: 28116 - protein, 9 aa, synthetic construct
GSNAVLHVF

SEQ ID NO: 28117 - protein, 9 aa, synthetic construct
PLPGGGHLF

SEQ ID NO: 28118 - protein, 9 aa, synthetic construct
GSNAVLRLH

SEQ ID NO: 28119 - protein, 9 aa, synthetic construct
GSNAVLRLF

SEQ ID NO: 28120 - protein, 9 aa, synthetic construct
GSNAVLRVH

SEQ ID NO: 28121 - protein, 9 aa, synthetic construct
PLPGGGHVY

SEQ ID NO: 28122 - protein, 9 aa, synthetic construct
GSNAVLKVY

SEQ ID NO: 28123 - protein, 9 aa, synthetic construct
PLPGGGHVR

SEQ ID NO: 28124 - protein, 9 aa, synthetic construct
GSNAVAHLY

SEQ ID NO: 28125 - protein, 9 aa, synthetic construct
GSNAVAHLR

SEQ ID NO: 28126 - protein, 9 aa, synthetic construct
GSNAVAHLK

SEQ ID NO: 28127 - protein, 9 aa, synthetic construct
GSNAVAHLF

SEQ ID NO: 28128 - protein, 9 aa, synthetic construct
PLPGGGHVH

SEQ ID NO: 28129 - protein, 9 aa, synthetic construct
GSNAVARLH

SEQ ID NO: 28130 - protein, 9 aa, synthetic construct
PLPGGGHVK

SEQ ID NO: 28131 - protein, 9 aa, synthetic construct
GSNAVAKLY

SEQ ID NO: 28132 - protein, 9 aa, synthetic construct
GSNAVAKLK

SEQ ID NO: 28133 - protein, 9 aa, synthetic construct
GSNAVAKVR

SEQ ID NO: 28134 - protein, 9 aa, synthetic construct
GSNAVAKVH

SEQ ID NO: 28135 - protein, 9 aa, synthetic construct
GSNAVAKVK

SEQ ID NO: 28136 - protein, 9 aa, synthetic construct
GSNAVAKVF

SEQ ID NO: 28137 - protein, 9 aa, synthetic construct
PLPGGGHVF

SEQ ID NO: 28138 - protein, 9 aa, synthetic construct
GSNAVIHLR

SEQ ID NO: 28139 - protein, 9 aa, synthetic construct
GSNAVIHLH

SEQ ID NO: 28140 - protein, 9 aa, synthetic construct
GSNAVIHLK

SEQ ID NO: 28141 - protein, 9 aa, synthetic construct
GSNAVIHVF

SEQ ID NO: 28142 - protein, 9 aa, synthetic construct
GSNAVIRLR

SEQ ID NO: 28143 - protein, 9 aa, synthetic construct
GSNAVIRVH

SEQ ID NO: 28144 - protein, 9 aa, synthetic construct
PLPGGGRLH

SEQ ID NO: 28145 - protein, 9 aa, synthetic construct
GSNAVGHLR

SEQ ID NO: 28146 - protein, 9 aa, synthetic construct
GSNAVGHLH

SEQ ID NO: 28147 - protein, 9 aa, synthetic construct
GSNAVGHLK

SEQ ID NO: 28148 - protein, 9 aa, synthetic construct
GSNAVGHVY

SEQ ID NO: 28149 - protein, 9 aa, synthetic construct
GSNAVGHVH

SEQ ID NO: 28150 - protein, 9 aa, synthetic construct
GSNAVGHVK

SEQ ID NO: 28151 - protein, 9 aa, synthetic construct
GSNAVGHVF

SEQ ID NO: 28152 - protein, 9 aa, synthetic construct
GSNAVGRLY

SEQ ID NO: 28153 - protein, 9 aa, synthetic construct
GSNAVGRVY

SEQ ID NO: 28154 - protein, 9 aa, synthetic construct
GSNAVGRVF

SEQ ID NO: 28155 - protein, 9 aa, synthetic construct
PLPGGGRLF

SEQ ID NO: 28156 - protein, 9 aa, synthetic construct
GSNAVGKLF

SEQ ID NO: 28157 - protein, 9 aa, synthetic construct
GSNAVGKVY

SEQ ID NO: 28158 - protein, 9 aa, synthetic construct
GSNAGVRLH

SEQ ID NO: 28159 - protein, 9 aa, synthetic construct
GSNAGVRVH

SEQ ID NO: 28160 - protein, 9 aa, synthetic construct
GSNAGVKVR

SEQ ID NO: 28161 - protein, 9 aa, synthetic construct
PLPGGGRVK

SEQ ID NO: 28162 - protein, 9 aa, synthetic construct
GSNAGLHLF

SEQ ID NO: 28163 - protein, 9 aa, synthetic construct
GSNAGLRVF

SEQ ID NO: 28164 - protein, 9 aa, synthetic construct
PLNGSARLF

SEQ ID NO: 28165 - protein, 9 aa, synthetic construct
PLPGGGKLY

SEQ ID NO: 28166 - protein, 9 aa, synthetic construct
GSNAGLKVY

SEQ ID NO: 28167 - protein, 9 aa, synthetic construct
GSNAGLKVH

SEQ ID NO: 28168 - protein, 9 aa, synthetic construct
GSNAGARLY

SEQ ID NO: 28169 - protein, 9 aa, synthetic construct
GSNAGARVY

SEQ ID NO: 28170 - protein, 9 aa, synthetic construct
GSNAGARVF

SEQ ID NO: 28171 - protein, 9 aa, synthetic construct
GSNAGIHLR

SEQ ID NO: 28172 - protein, 9 aa, synthetic construct
GSNAGIHLK

SEQ ID NO: 28173 - protein, 9 aa, synthetic construct
GSNAGIHVY

SEQ ID NO: 28174 - protein, 9 aa, synthetic construct
GSNAGIKLY

SEQ ID NO: 28175 - protein, 9 aa, synthetic construct
GSNAGIKVF

SEQ ID NO: 28176 - protein, 9 aa, synthetic construct
PLPGGGKVK

SEQ ID NO: 28177 - protein, 9 aa, synthetic construct
GSNAGGRVR

SEQ ID NO: 28178 - protein, 9 aa, synthetic construct
GSNAGGKVH

SEQ ID NO: 28179 - protein, 9 aa, synthetic construct
GSNAGGKVK

SEQ ID NO: 28180 - protein, 9 aa, synthetic construct
PLPAAVHLY

SEQ ID NO: 28181 - protein, 9 aa, synthetic construct
GSQGAVHLR

SEQ ID NO: 28182 - protein, 9 aa, synthetic construct
GSQGAVHLH

SEQ ID NO: 28183 - protein, 9 aa, synthetic construct
GSQGAVHLK

SEQ ID NO: 28184 - protein, 9 aa, synthetic construct
GSQGAVHVR

SEQ ID NO: 28185 - protein, 9 aa, synthetic construct
GSQGAVHVF

SEQ ID NO: 28186 - protein, 9 aa, synthetic construct
PLPAAVHLR

SEQ ID NO: 28187 - protein, 9 aa, synthetic construct
GSQGAVRLY

SEQ ID NO: 28188 - protein, 9 aa, synthetic construct
GSQGAVRLH

SEQ ID NO: 28189 - protein, 9 aa, synthetic construct
GSQGAVRVY

SEQ ID NO: 28190 - protein, 9 aa, synthetic construct
GSQGAVRVH

SEQ ID NO: 28191 - protein, 9 aa, synthetic construct
GSQGAVRVK

SEQ ID NO: 28192 - protein, 9 aa, synthetic construct
GSQGAVKLH

SEQ ID NO: 28193 - protein, 9 aa, synthetic construct
GSQGAVKLF

SEQ ID NO: 28194 - protein, 9 aa, synthetic construct
GSQGAVKVH

SEQ ID NO: 28195 - protein, 9 aa, synthetic construct
GSQGAVKVF

SEQ ID NO: 28196 - protein, 9 aa, synthetic construct
PLPAAVHLK

SEQ ID NO: 28197 - protein, 9 aa, synthetic construct
GSQGALRLY

SEQ ID NO: 28198 - protein, 9 aa, synthetic construct
GSQGALRVY

SEQ ID NO: 28199 - protein, 9 aa, synthetic construct
GSQGALRVK

SEQ ID NO: 28200 - protein, 9 aa, synthetic construct
GSQGALRVF

SEQ ID NO: 28201 - protein, 9 aa, synthetic construct
PLPAAVHVY

SEQ ID NO: 28202 - protein, 9 aa, synthetic construct
PLPAAVHVR

SEQ ID NO: 28203 - protein, 9 aa, synthetic construct
GSQGAAHLR

SEQ ID NO: 28204 - protein, 9 aa, synthetic construct
GSQGAAHLF

SEQ ID NO: 28205 - protein, 9 aa, synthetic construct
GSQGAAHVK

SEQ ID NO: 28206 - protein, 9 aa, synthetic construct
GSQGAAHVF

SEQ ID NO: 28207 - protein, 9 aa, synthetic construct
GSQGAARLY

SEQ ID NO: 28208 - protein, 9 aa, synthetic construct
GSQGAARLH

SEQ ID NO: 28209 - protein, 9 aa, synthetic construct
GSQGAARLF

SEQ ID NO: 28210 - protein, 9 aa, synthetic construct
GSQGAARVR

SEQ ID NO: 28211 - protein, 9 aa, synthetic construct
GSQGAARVK

SEQ ID NO: 28212 - protein, 9 aa, synthetic construct
PLPAAVHVK

SEQ ID NO: 28213 - protein, 9 aa, synthetic construct
GSQGAAKLF

SEQ ID NO: 28214 - protein, 9 aa, synthetic construct
GSQGAAKVY

SEQ ID NO: 28215 - protein, 9 aa, synthetic construct
GSQGAAKVR

SEQ ID NO: 28216 - protein, 9 aa, synthetic construct
PLPAAVHVF

SEQ ID NO: 28217 - protein, 9 aa, synthetic construct
GSQGAIHLR

SEQ ID NO: 28218 - protein, 9 aa, synthetic construct
GSQGAIHLH

SEQ ID NO: 28219 - protein, 9 aa, synthetic construct
GSQGAIHLF

SEQ ID NO: 28220 - protein, 9 aa, synthetic construct
GSQGAIHVR

SEQ ID NO: 28221 - protein, 9 aa, synthetic construct
GSQGAIRLH

SEQ ID NO: 28222 - protein, 9 aa, synthetic construct
GSQGAIRLF

SEQ ID NO: 28223 - protein, 9 aa, synthetic construct
GSQGAIRVY

SEQ ID NO: 28224 - protein, 9 aa, synthetic construct
GSQGAIRVF

SEQ ID NO: 28225 - protein, 9 aa, synthetic construct
GSQGAIKLF

SEQ ID NO: 28226 - protein, 9 aa, synthetic construct
GSQGAIKVY

SEQ ID NO: 28227 - protein, 9 aa, synthetic construct
GSQGAIKVH

SEQ ID NO: 28228 - protein, 9 aa, synthetic construct
GSQGAIKVK

SEQ ID NO: 28229 - protein, 9 aa, synthetic construct
GSQGAIKVF

SEQ ID NO: 28230 - protein, 9 aa, synthetic construct
PLPAAVRLH

SEQ ID NO: 28231 - protein, 9 aa, synthetic construct
GSQGAGHVK

SEQ ID NO: 28232 - protein, 9 aa, synthetic construct
GSQGAGRLY

SEQ ID NO: 28233 - protein, 9 aa, synthetic construct
GSQGAGRLR

SEQ ID NO: 28234 - protein, 9 aa, synthetic construct
GSQGAGRLK

SEQ ID NO: 28235 - protein, 9 aa, synthetic construct
GSQGAGRVY

SEQ ID NO: 28236 - protein, 9 aa, synthetic construct
GSQGAGRVR

SEQ ID NO: 28237 - protein, 9 aa, synthetic construct
GSQGAGRVH

SEQ ID NO: 28238 - protein, 9 aa, synthetic construct
GSQGAGRVK

SEQ ID NO: 28239 - protein, 9 aa, synthetic construct
GSQGAGRVF

SEQ ID NO: 28240 - protein, 9 aa, synthetic construct
PLPAAVRLF

SEQ ID NO: 28241 - protein, 9 aa, synthetic construct
GSQGAGKLY

SEQ ID NO: 28242 - protein, 9 aa, synthetic construct
GSQGAGKVY

SEQ ID NO: 28243 - protein, 9 aa, synthetic construct
GSQGAGKVH

SEQ ID NO: 28244 - protein, 9 aa, synthetic construct
GSQGAGKVK

SEQ ID NO: 28245 - protein, 9 aa, synthetic construct
PLPAAVRVY

SEQ ID NO: 28246 - protein, 9 aa, synthetic construct
GSQGTVHLR

SEQ ID NO: 28247 - protein, 9 aa, synthetic construct
GSQGTVHVR

SEQ ID NO: 28248 - protein, 9 aa, synthetic construct
GSQGTVHVF

SEQ ID NO: 28249 - protein, 9 aa, synthetic construct
PLPAAVRVH

SEQ ID NO: 28250 - protein, 9 aa, synthetic construct
GSQGTLHLR

SEQ ID NO: 28251 - protein, 9 aa, synthetic construct
GSQGTLHVR

SEQ ID NO: 28252 - protein, 9 aa, synthetic construct
GSQGTLHVK

SEQ ID NO: 28253 - protein, 9 aa, synthetic construct
GSQGTLHVF

SEQ ID NO: 28254 - protein, 9 aa, synthetic construct
GSQGTLRLY

SEQ ID NO: 28255 - protein, 9 aa, synthetic construct
PLPAAVKLR

SEQ ID NO: 28256 - protein, 9 aa, synthetic construct
GSQGTAKVH

SEQ ID NO: 28257 - protein, 9 aa, synthetic construct
PLPAAVKLF

SEQ ID NO: 28258 - protein, 9 aa, synthetic construct
GSQGTIHLR

SEQ ID NO: 28259 - protein, 9 aa, synthetic construct
GSQGTIKLY

SEQ ID NO: 28260 - protein, 9 aa, synthetic construct
GSQGTIKLF

SEQ ID NO: 28261 - protein, 9 aa, synthetic construct
GSQGTIKVH

SEQ ID NO: 28262 - protein, 9 aa, synthetic construct
GSQGTIKVF

SEQ ID NO: 28263 - protein, 9 aa, synthetic construct
PLPAAVKVH

SEQ ID NO: 28264 - protein, 9 aa, synthetic construct
GSQGTGHVR

SEQ ID NO: 28265 - protein, 9 aa, synthetic construct
GSQGTGRLY

SEQ ID NO: 28266 - protein, 9 aa, synthetic construct
GSQGTGRVK

SEQ ID NO: 28267 - protein, 9 aa, synthetic construct
GSQGTGRVF

SEQ ID NO: 28268 - protein, 9 aa, synthetic construct
GSQGTGKLF

SEQ ID NO: 28269 - protein, 9 aa, synthetic construct
GSQGSVHLR

SEQ ID NO: 28270 - protein, 9 aa, synthetic construct
GSQGSVRLY

SEQ ID NO: 28271 - protein, 9 aa, synthetic construct
PLPAALHLH

SEQ ID NO: 28272 - protein, 9 aa, synthetic construct
GSQGSLHVR

SEQ ID NO: 28273 - protein, 9 aa, synthetic construct
GSQGSLHVH

SEQ ID NO: 28274 - protein, 9 aa, synthetic construct
GSQGSLHVK

SEQ ID NO: 28275 - protein, 9 aa, synthetic construct
GSQGSLKLH

SEQ ID NO: 28276 - protein, 9 aa, synthetic construct
PLPAALHVR

SEQ ID NO: 28277 - protein, 9 aa, synthetic construct
GSQGSAHLY

SEQ ID NO: 28278 - protein, 9 aa, synthetic construct
GSQGSAHVF

SEQ ID NO: 28279 - protein, 9 aa, synthetic construct
GSQGSARLY

SEQ ID NO: 28280 - protein, 9 aa, synthetic construct
PLPAALHVK

SEQ ID NO: 28281 - protein, 9 aa, synthetic construct
PLPAALHVF

SEQ ID NO: 28282 - protein, 9 aa, synthetic construct
GSQGSIRLH

SEQ ID NO: 28283 - protein, 9 aa, synthetic construct
GSQGSIRVF

SEQ ID NO: 28284 - protein, 9 aa, synthetic construct
GSQGSIKLY

SEQ ID NO: 28285 - protein, 9 aa, synthetic construct
GSQGSIKLH

SEQ ID NO: 28286 - protein, 9 aa, synthetic construct
GSQGSIKLF

SEQ ID NO: 28287 - protein, 9 aa, synthetic construct
GSQGSIKVY

SEQ ID NO: 28288 - protein, 9 aa, synthetic construct
GSQGSGHLR

SEQ ID NO: 28289 - protein, 9 aa, synthetic construct
GSQGSGHLH

SEQ ID NO: 28290 - protein, 9 aa, synthetic construct
GSQGSGHLK

SEQ ID NO: 28291 - protein, 9 aa, synthetic construct
GSQGSGHLF

SEQ ID NO: 28292 - protein, 9 aa, synthetic construct
GSQGSGHVH

SEQ ID NO: 28293 - protein, 9 aa, synthetic construct
GSQGSGHVF

SEQ ID NO: 28294 - protein, 9 aa, synthetic construct
GSQGSGRLF

SEQ ID NO: 28295 - protein, 9 aa, synthetic construct
GSQGSGRVH

SEQ ID NO: 28296 - protein, 9 aa, synthetic construct
GSQGSGKLH

SEQ ID NO: 28297 - protein, 9 aa, synthetic construct
GSQGSGKVH

SEQ ID NO: 28298 - protein, 9 aa, synthetic construct
GSQGVVHLY

SEQ ID NO: 28299 - protein, 9 aa, synthetic construct
GSQGVVHLR

SEQ ID NO: 28300 - protein, 9 aa, synthetic construct
GSQGVVHLH

SEQ ID NO: 28301 - protein, 9 aa, synthetic construct
GSQGVVHVK

SEQ ID NO: 28302 - protein, 9 aa, synthetic construct
GSQGVVHVF

SEQ ID NO: 28303 - protein, 9 aa, synthetic construct
GSQGVVRVF

SEQ ID NO: 28304 - protein, 9 aa, synthetic construct
GSQGVVKVH

SEQ ID NO: 28305 - protein, 9 aa, synthetic construct
GSQGVVKVF

SEQ ID NO: 28306 - protein, 9 aa, synthetic construct
GSQGVLHLY

SEQ ID NO: 28307 - protein, 9 aa, synthetic construct
GSQGVLHLR

SEQ ID NO: 28308 - protein, 9 aa, synthetic construct
GSQGVLHLH

SEQ ID NO: 28309 - protein, 9 aa, synthetic construct
GSQGVLHLK

SEQ ID NO: 28310 - protein, 9 aa, synthetic construct
GSQGVLHVR

SEQ ID NO: 28311 - protein, 9 aa, synthetic construct
GSQGVLHVK

SEQ ID NO: 28312 - protein, 9 aa, synthetic construct
GSQGVLRLF

SEQ ID NO: 28313 - protein, 9 aa, synthetic construct
GSQGVLRVY

SEQ ID NO: 28314 - protein, 9 aa, synthetic construct
GSQGVLKLY

SEQ ID NO: 28315 - protein, 9 aa, synthetic construct
GSQGVLKLR

SEQ ID NO: 28316 - protein, 9 aa, synthetic construct
GSQGVLKVR

SEQ ID NO: 28317 - protein, 9 aa, synthetic construct
GSQGVLKVH

SEQ ID NO: 28318 - protein, 9 aa, synthetic construct
GSQGVLKVK

SEQ ID NO: 28319 - protein, 9 aa, synthetic construct
GSQGVLKVF

SEQ ID NO: 28320 - protein, 9 aa, synthetic construct
PLPAALKLH

SEQ ID NO: 28321 - protein, 9 aa, synthetic construct
GSQGVARVH

SEQ ID NO: 28322 - protein, 9 aa, synthetic construct
GSQGVARVF

SEQ ID NO: 28323 - protein, 9 aa, synthetic construct
GSQGVAKLH

SEQ ID NO: 28324 - protein, 9 aa, synthetic construct
GSQGVAKVY

SEQ ID NO: 28325 - protein, 9 aa, synthetic construct
GSQGVIHLR

SEQ ID NO: 28326 - protein, 9 aa, synthetic construct
GSQGVIHVR

SEQ ID NO: 28327 - protein, 9 aa, synthetic construct
PLPAALKVY

SEQ ID NO: 28328 - protein, 9 aa, synthetic construct
GSQGVIRLR

SEQ ID NO: 28329 - protein, 9 aa, synthetic construct
GSQGVIRLH

SEQ ID NO: 28330 - protein, 9 aa, synthetic construct
GSQGVIRLF

SEQ ID NO: 28331 - protein, 9 aa, synthetic construct
GSQGVGRLY

SEQ ID NO: 28332 - protein, 9 aa, synthetic construct
PLPAALKVF

SEQ ID NO: 28333 - protein, 9 aa, synthetic construct
GSQGVGKLY

SEQ ID NO: 28334 - protein, 9 aa, synthetic construct
GSQGVGKLH

SEQ ID NO: 28335 - protein, 9 aa, synthetic construct
GSQGVGKLF

SEQ ID NO: 28336 - protein, 9 aa, synthetic construct
GSQGGVHLH

SEQ ID NO: 28337 - protein, 9 aa, synthetic construct
GSQGGVHVY

SEQ ID NO: 28338 - protein, 9 aa, synthetic construct
GSQGGVHVR

SEQ ID NO: 28339 - protein, 9 aa, synthetic construct
GSQGGVRLY

SEQ ID NO: 28340 - protein, 9 aa, synthetic construct
GSQGGVRVY

SEQ ID NO: 28341 - protein, 9 aa, synthetic construct
GSQGGVKLY

SEQ ID NO: 28342 - protein, 9 aa, synthetic construct
GSQGGVKVY

SEQ ID NO: 28343 - protein, 9 aa, synthetic construct
GSQGGLHVY

SEQ ID NO: 28344 - protein, 9 aa, synthetic construct
GSQGGLHVR

SEQ ID NO: 28345 - protein, 9 aa, synthetic construct
GSQGGLHVH

SEQ ID NO: 28346 - protein, 9 aa, synthetic construct
GSQGGLHVK

SEQ ID NO: 28347 - protein, 9 aa, synthetic construct
GSQGGLRVK

SEQ ID NO: 28348 - protein, 9 aa, synthetic construct
GSQGGLRVF

SEQ ID NO: 28349 - protein, 9 aa, synthetic construct
GSQGGLKVF

SEQ ID NO: 28350 - protein, 9 aa, synthetic construct
PLPAAAHVR

SEQ ID NO: 28351 - protein, 9 aa, synthetic construct
GSQGGAHLY

SEQ ID NO: 28352 - protein, 9 aa, synthetic construct
GSQGGAHLH

SEQ ID NO: 28353 - protein, 9 aa, synthetic construct
GSQGGAHLF

SEQ ID NO: 28354 - protein, 9 aa, synthetic construct
GSQGGAHVY

SEQ ID NO: 28355 - protein, 9 aa, synthetic construct
GSQGGARLF

SEQ ID NO: 28356 - protein, 9 aa, synthetic construct
GSQGGARVY

SEQ ID NO: 28357 - protein, 9 aa, synthetic construct
GSQGGARVH

SEQ ID NO: 28358 - protein, 9 aa, synthetic construct
GSQGGAKLY

SEQ ID NO: 28359 - protein, 9 aa, synthetic construct
GSQGGAKLH

SEQ ID NO: 28360 - protein, 9 aa, synthetic construct
GSQGGAKLF

SEQ ID NO: 28361 - protein, 9 aa, synthetic construct
GSQGGAKVF

SEQ ID NO: 28362 - protein, 9 aa, synthetic construct
PLPAAAHVF

SEQ ID NO: 28363 - protein, 9 aa, synthetic construct
GSQGGIHLR

SEQ ID NO: 28364 - protein, 9 aa, synthetic construct
GSQGGIHLH

SEQ ID NO: 28365 - protein, 9 aa, synthetic construct
GSQGGIHLF

SEQ ID NO: 28366 - protein, 9 aa, synthetic construct
GSQGGIHVY

SEQ ID NO: 28367 - protein, 9 aa, synthetic construct
GSQGGIHVF

SEQ ID NO: 28368 - protein, 9 aa, synthetic construct
PLNGSAKLH

SEQ ID NO: 28369 - protein, 9 aa, synthetic construct
GSQGGIRLY

SEQ ID NO: 28370 - protein, 9 aa, synthetic construct
GSQGGIRLH

SEQ ID NO: 28371 - protein, 9 aa, synthetic construct
GSQGGIRLF

SEQ ID NO: 28372 - protein, 9 aa, synthetic construct
GSQGGIRVH

SEQ ID NO: 28373 - protein, 9 aa, synthetic construct
GSQGGIKLK

SEQ ID NO: 28374 - protein, 9 aa, synthetic construct
GSQGGIKVY

SEQ ID NO: 28375 - protein, 9 aa, synthetic construct
GSQGGIKVF

SEQ ID NO: 28376 - protein, 9 aa, synthetic construct
GSQGGGHLR

SEQ ID NO: 28377 - protein, 9 aa, synthetic construct
GSQGGGHLH

SEQ ID NO: 28378 - protein, 9 aa, synthetic construct
GSQGGGHLK

SEQ ID NO: 28379 - protein, 9 aa, synthetic construct
GSQGGGHLF

SEQ ID NO: 28380 - protein, 9 aa, synthetic construct
GSQGGGHVY

SEQ ID NO: 28381 - protein, 9 aa, synthetic construct
GSQGGGHVR

SEQ ID NO: 28382 - protein, 9 aa, synthetic construct
GSQGGGHVH

SEQ ID NO: 28383 - protein, 9 aa, synthetic construct
GSQGGGHVF

SEQ ID NO: 28384 - protein, 9 aa, synthetic construct
GSQGGGRLF

SEQ ID NO: 28385 - protein, 9 aa, synthetic construct
GSQGGGRVR

SEQ ID NO: 28386 - protein, 9 aa, synthetic construct
GSQGGGKLH

SEQ ID NO: 28387 - protein, 9 aa, synthetic construct
GSQGGGKLF

SEQ ID NO: 28388 - protein, 9 aa, synthetic construct
GSQGGGKVY

SEQ ID NO: 28389 - protein, 9 aa, synthetic construct
GSQGGGKVH

SEQ ID NO: 28390 - protein, 9 aa, synthetic construct
GSQGGGKVK

SEQ ID NO: 28391 - protein, 9 aa, synthetic construct
GSQGGGKVF

SEQ ID NO: 28392 - protein, 9 aa, synthetic construct
GSQAAVHLR

SEQ ID NO: 28393 - protein, 9 aa, synthetic construct
GSQAAVHLK

SEQ ID NO: 28394 - protein, 9 aa, synthetic construct
GSQAAVHVR

SEQ ID NO: 28395 - protein, 9 aa, synthetic construct
GSQAAVHVH

SEQ ID NO: 28396 - protein, 9 aa, synthetic construct
GSQAAVHVF

SEQ ID NO: 28397 - protein, 9 aa, synthetic construct
GSQAAVRLY

SEQ ID NO: 28398 - protein, 9 aa, synthetic construct
GSQAAVRLH

SEQ ID NO: 28399 - protein, 9 aa, synthetic construct
GSQAAVRVY

SEQ ID NO: 28400 - protein, 9 aa, synthetic construct
GSQAAVRVH

SEQ ID NO: 28401 - protein, 9 aa, synthetic construct
GSQAAVKLY

SEQ ID NO: 28402 - protein, 9 aa, synthetic construct
GSQAAVKLF

SEQ ID NO: 28403 - protein, 9 aa, synthetic construct
GSQAALHLH

SEQ ID NO: 28404 - protein, 9 aa, synthetic construct
GSQAALHVR

SEQ ID NO: 28405 - protein, 9 aa, synthetic construct
GSQAALHVH

SEQ ID NO: 28406 - protein, 9 aa, synthetic construct
GSQAALHVK

SEQ ID NO: 28407 - protein, 9 aa, synthetic construct
GSQAALRVH

SEQ ID NO: 28408 - protein, 9 aa, synthetic construct
PLNGSAKLK

SEQ ID NO: 28409 - protein, 9 aa, synthetic construct
GSQAALKLF

SEQ ID NO: 28410 - protein, 9 aa, synthetic construct
GSQAALKVY

SEQ ID NO: 28411 - protein, 9 aa, synthetic construct
GSQAALKVF

SEQ ID NO: 28412 - protein, 9 aa, synthetic construct
GSQAAAHLY

SEQ ID NO: 28413 - protein, 9 aa, synthetic construct
GSQAAAHLR

SEQ ID NO: 28414 - protein, 9 aa, synthetic construct
GSQAAAHLH

SEQ ID NO: 28415 - protein, 9 aa, synthetic construct
GSQAAAHLK

SEQ ID NO: 28416 - protein, 9 aa, synthetic construct
GSQAAAHVY

SEQ ID NO: 28417 - protein, 9 aa, synthetic construct
GSQAAAHVF

SEQ ID NO: 28418 - protein, 9 aa, synthetic construct
GSQAAARLY

SEQ ID NO: 28419 - protein, 9 aa, synthetic construct
GSQAAARLH

SEQ ID NO: 28420 - protein, 9 aa, synthetic construct
GSQAAARLF

SEQ ID NO: 28421 - protein, 9 aa, synthetic construct
GSQAAARVY

SEQ ID NO: 28422 - protein, 9 aa, synthetic construct
GSQAAAKLH

SEQ ID NO: 28423 - protein, 9 aa, synthetic construct
GSQAAAKVR

SEQ ID NO: 28424 - protein, 9 aa, synthetic construct
GSQAAAKVF

SEQ ID NO: 28425 - protein, 9 aa, synthetic construct
PLPAAAKLF

SEQ ID NO: 28426 - protein, 9 aa, synthetic construct
GSQAAIHLY

SEQ ID NO: 28427 - protein, 9 aa, synthetic construct
GSQAAIHLR

SEQ ID NO: 28428 - protein, 9 aa, synthetic construct
GSQAAIHLK

SEQ ID NO: 28429 - protein, 9 aa, synthetic construct
GSQAAIHVY

SEQ ID NO: 28430 - protein, 9 aa, synthetic construct
GSQAAIHVR

SEQ ID NO: 28431 - protein, 9 aa, synthetic construct
GSQAAIRLH

SEQ ID NO: 28432 - protein, 9 aa, synthetic construct
GSQAAIRLF

SEQ ID NO: 28433 - protein, 9 aa, synthetic construct
GSQAAIRVF

SEQ ID NO: 28434 - protein, 9 aa, synthetic construct
PLPAAAKVR

SEQ ID NO: 28435 - protein, 9 aa, synthetic construct
GSQAAIKLH

SEQ ID NO: 28436 - protein, 9 aa, synthetic construct
GSQAAIKLK

SEQ ID NO: 28437 - protein, 9 aa, synthetic construct
GSQAAIKLF

SEQ ID NO: 28438 - protein, 9 aa, synthetic construct
GSQAAIKVY

SEQ ID NO: 28439 - protein, 9 aa, synthetic construct
GSQAAIKVR

SEQ ID NO: 28440 - protein, 9 aa, synthetic construct
GSQAAIKVF

SEQ ID NO: 28441 - protein, 9 aa, synthetic construct
GSQAAGHLH

SEQ ID NO: 28442 - protein, 9 aa, synthetic construct
GSQAAGHVY

SEQ ID NO: 28443 - protein, 9 aa, synthetic construct
GSQAAGHVR

SEQ ID NO: 28444 - protein, 9 aa, synthetic construct
GSQAAGHVK

SEQ ID NO: 28445 - protein, 9 aa, synthetic construct
GSQAAGHVF

SEQ ID NO: 28446 - protein, 9 aa, synthetic construct
GSQAAGRLY

SEQ ID NO: 28447 - protein, 9 aa, synthetic construct
GSQAAGRLF

SEQ ID NO: 28448 - protein, 9 aa, synthetic construct
GSQAAGRVK

SEQ ID NO: 28449 - protein, 9 aa, synthetic construct
GSQAAGRVF

SEQ ID NO: 28450 - protein, 9 aa, synthetic construct
GSQAAGKLK

SEQ ID NO: 28451 - protein, 9 aa, synthetic construct
GSQAAGKVY

SEQ ID NO: 28452 - protein, 9 aa, synthetic construct
GSQAAGKVH

SEQ ID NO: 28453 - protein, 9 aa, synthetic construct
PLPAAIHLY

SEQ ID NO: 28454 - protein, 9 aa, synthetic construct
GSQATVHVR

SEQ ID NO: 28455 - protein, 9 aa, synthetic construct
PLPAAIHLR

SEQ ID NO: 28456 - protein, 9 aa, synthetic construct
GSQATVRLH

SEQ ID NO: 28457 - protein, 9 aa, synthetic construct
GSQATVRVH

SEQ ID NO: 28458 - protein, 9 aa, synthetic construct
PLPAAIHLH

SEQ ID NO: 28459 - protein, 9 aa, synthetic construct
GSQATVKLH

SEQ ID NO: 28460 - protein, 9 aa, synthetic construct
GSQATLHLY

SEQ ID NO: 28461 - protein, 9 aa, synthetic construct
GSQATLHVY

SEQ ID NO: 28462 - protein, 9 aa, synthetic construct
GSQATLHVH

SEQ ID NO: 28463 - protein, 9 aa, synthetic construct
GSQATLRVY

SEQ ID NO: 28464 - protein, 9 aa, synthetic construct
GSQATLRVF

SEQ ID NO: 28465 - protein, 9 aa, synthetic construct
PLPAAIHVY

SEQ ID NO: 28466 - protein, 9 aa, synthetic construct
PLPAAIHVR

SEQ ID NO: 28467 - protein, 9 aa, synthetic construct
GSQATAHLR

SEQ ID NO: 28468 - protein, 9 aa, synthetic construct
GSQATARLF

SEQ ID NO: 28469 - protein, 9 aa, synthetic construct
GSQATARVR

SEQ ID NO: 28470 - protein, 9 aa, synthetic construct
GSQATAKLF

SEQ ID NO: 28471 - protein, 9 aa, synthetic construct
GSQATAKVH

SEQ ID NO: 28472 - protein, 9 aa, synthetic construct
GSQATAKVF

SEQ ID NO: 28473 - protein, 9 aa, synthetic construct
PLPAAIHVF

SEQ ID NO: 28474 - protein, 9 aa, synthetic construct
GSQATIHLY

SEQ ID NO: 28475 - protein, 9 aa, synthetic construct
GSQATIHLR

SEQ ID NO: 28476 - protein, 9 aa, synthetic construct
GSQATIHVY

SEQ ID NO: 28477 - protein, 9 aa, synthetic construct
GSQATIHVR

SEQ ID NO: 28478 - protein, 9 aa, synthetic construct
GSQATIHVK

SEQ ID NO: 28479 - protein, 9 aa, synthetic construct
GSQATIRLY

SEQ ID NO: 28480 - protein, 9 aa, synthetic construct
GSQATIRLR

SEQ ID NO: 28481 - protein, 9 aa, synthetic construct
GSQATIRLF

SEQ ID NO: 28482 - protein, 9 aa, synthetic construct
PLPAAIRLH

SEQ ID NO: 28483 - protein, 9 aa, synthetic construct
GSQATGHLR

SEQ ID NO: 28484 - protein, 9 aa, synthetic construct
GSQATGHVY

SEQ ID NO: 28485 - protein, 9 aa, synthetic construct
GSQATGRLK

SEQ ID NO: 28486 - protein, 9 aa, synthetic construct
GSQATGRLF

SEQ ID NO: 28487 - protein, 9 aa, synthetic construct
GSQATGRVY

SEQ ID NO: 28488 - protein, 9 aa, synthetic construct
GSQATGRVH

SEQ ID NO: 28489 - protein, 9 aa, synthetic construct
PLPAAIRLF

SEQ ID NO: 28490 - protein, 9 aa, synthetic construct
GSQATGKVF

SEQ ID NO: 28491 - protein, 9 aa, synthetic construct
PLPAAIRVY

SEQ ID NO: 28492 - protein, 9 aa, synthetic construct
GSQASVHLR

SEQ ID NO: 28493 - protein, 9 aa, synthetic construct
GSQASVHLH

SEQ ID NO: 28494 - protein, 9 aa, synthetic construct
GSQASVHLK

SEQ ID NO: 28495 - protein, 9 aa, synthetic construct
GSQASVRLY

SEQ ID NO: 28496 - protein, 9 aa, synthetic construct
GSQASVRLR

SEQ ID NO: 28497 - protein, 9 aa, synthetic construct
GSQASVRLF

SEQ ID NO: 28498 - protein, 9 aa, synthetic construct
GSQASVRVF

SEQ ID NO: 28499 - protein, 9 aa, synthetic construct
GSQASVKVY

SEQ ID NO: 28500 - protein, 9 aa, synthetic construct
GSQASVKVH

SEQ ID NO: 28501 - protein, 9 aa, synthetic construct
GSQASLHVR

SEQ ID NO: 28502 - protein, 9 aa, synthetic construct
PLPAAIKLY

SEQ ID NO: 28503 - protein, 9 aa, synthetic construct
PLPAAIKLH

SEQ ID NO: 28504 - protein, 9 aa, synthetic construct
PLPAAIKLK

SEQ ID NO: 28505 - protein, 9 aa, synthetic construct
GSQASAKLY

SEQ ID NO: 28506 - protein, 9 aa, synthetic construct
GSQASAKVY

SEQ ID NO: 28507 - protein, 9 aa, synthetic construct
PLPAAIKLF

SEQ ID NO: 28508 - protein, 9 aa, synthetic construct
GSQASIHLK

SEQ ID NO: 28509 - protein, 9 aa, synthetic construct
GSQASIHVR

SEQ ID NO: 28510 - protein, 9 aa, synthetic construct
GSQASIRLY

SEQ ID NO: 28511 - protein, 9 aa, synthetic construct
GSQASIRLF

SEQ ID NO: 28512 - protein, 9 aa, synthetic construct
GSQASIRVY

SEQ ID NO: 28513 - protein, 9 aa, synthetic construct
GSQASIRVH

SEQ ID NO: 28514 - protein, 9 aa, synthetic construct
PLPAAIKVR

SEQ ID NO: 28515 - protein, 9 aa, synthetic construct
GSQASIKLF

SEQ ID NO: 28516 - protein, 9 aa, synthetic construct
PLPAAIKVH

SEQ ID NO: 28517 - protein, 9 aa, synthetic construct
GSQASGHVY

SEQ ID NO: 28518 - protein, 9 aa, synthetic construct
PLPAAIKVK

SEQ ID NO: 28519 - protein, 9 aa, synthetic construct
GSQASGRLY

SEQ ID NO: 28520 - protein, 9 aa, synthetic construct
GSQASGKLY

SEQ ID NO: 28521 - protein, 9 aa, synthetic construct
GSQASGKLF

SEQ ID NO: 28522 - protein, 9 aa, synthetic construct
PLNGSAKVH

SEQ ID NO: 28523 - protein, 9 aa, synthetic construct
GSQAVVHLH

SEQ ID NO: 28524 - protein, 9 aa, synthetic construct
GSQAVVHLK

SEQ ID NO: 28525 - protein, 9 aa, synthetic construct
GSQAVVHVF

SEQ ID NO: 28526 - protein, 9 aa, synthetic construct
PLPAAGHLR

SEQ ID NO: 28527 - protein, 9 aa, synthetic construct
GSQAVVRVF

SEQ ID NO: 28528 - protein, 9 aa, synthetic construct
GSQAVLRLH

SEQ ID NO: 28529 - protein, 9 aa, synthetic construct
PLPAAGHVY

SEQ ID NO: 28530 - protein, 9 aa, synthetic construct
GSQAVAHLR

SEQ ID NO: 28531 - protein, 9 aa, synthetic construct
GSQAVAHLH

SEQ ID NO: 28532 - protein, 9 aa, synthetic construct
GSQAVAHLK

SEQ ID NO: 28533 - protein, 9 aa, synthetic construct
GSQAVAHVY

SEQ ID NO: 28534 - protein, 9 aa, synthetic construct
GSQAVAHVH

SEQ ID NO: 28535 - protein, 9 aa, synthetic construct
GSQAVAHVK

SEQ ID NO: 28536 - protein, 9 aa, synthetic construct
GSQAVAHVF

SEQ ID NO: 28537 - protein, 9 aa, synthetic construct
GSQAVARVY

SEQ ID NO: 28538 - protein, 9 aa, synthetic construct
GSQAVARVH

SEQ ID NO: 28539 - protein, 9 aa, synthetic construct
GSQAVARVF

SEQ ID NO: 28540 - protein, 9 aa, synthetic construct
PLPAAGHVK

SEQ ID NO: 28541 - protein, 9 aa, synthetic construct
GSQAVAKVY

SEQ ID NO: 28542 - protein, 9 aa, synthetic construct
GSQAVAKVR

SEQ ID NO: 28543 - protein, 9 aa, synthetic construct
GSQAVAKVH

SEQ ID NO: 28544 - protein, 9 aa, synthetic construct
PLPAAGHVF

SEQ ID NO: 28545 - protein, 9 aa, synthetic construct
GSQAVIHVH

SEQ ID NO: 28546 - protein, 9 aa, synthetic construct
GSQAVIHVK

SEQ ID NO: 28547 - protein, 9 aa, synthetic construct
PLPAAGRLY

SEQ ID NO: 28548 - protein, 9 aa, synthetic construct
GSQAVIRLH

SEQ ID NO: 28549 - protein, 9 aa, synthetic construct
GSQAVIKLY

SEQ ID NO: 28550 - protein, 9 aa, synthetic construct
GSQAVIKLF

SEQ ID NO: 28551 - protein, 9 aa, synthetic construct
GSQAVGHLR

SEQ ID NO: 28552 - protein, 9 aa, synthetic construct
GSQAVGHLH

SEQ ID NO: 28553 - protein, 9 aa, synthetic construct
GSQAVGHLK

SEQ ID NO: 28554 - protein, 9 aa, synthetic construct
GSQAVGHLF

SEQ ID NO: 28555 - protein, 9 aa, synthetic construct
GSQAVGHVR

SEQ ID NO: 28556 - protein, 9 aa, synthetic construct
GSQAVGHVH

SEQ ID NO: 28557 - protein, 9 aa, synthetic construct
GSQAVGHVK

SEQ ID NO: 28558 - protein, 9 aa, synthetic construct
GSQAVGRVY

SEQ ID NO: 28559 - protein, 9 aa, synthetic construct
GSQAVGKLK

SEQ ID NO: 28560 - protein, 9 aa, synthetic construct
GSQAVGKLF

SEQ ID NO: 28561 - protein, 9 aa, synthetic construct
GSQAVGKVY

SEQ ID NO: 28562 - protein, 9 aa, synthetic construct
PLPAAGRVY

SEQ ID NO: 28563 - protein, 9 aa, synthetic construct
GSQAGVHLY

SEQ ID NO: 28564 - protein, 9 aa, synthetic construct
GSQAGVHLK

SEQ ID NO: 28565 - protein, 9 aa, synthetic construct
GSQAGVHVY

SEQ ID NO: 28566 - protein, 9 aa, synthetic construct
GSQAGVHVR

SEQ ID NO: 28567 - protein, 9 aa, synthetic construct
GSQAGVHVK

SEQ ID NO: 28568 - protein, 9 aa, synthetic construct
GSQAGVRLY

SEQ ID NO: 28569 - protein, 9 aa, synthetic construct
GSQAGVRLF

SEQ ID NO: 28570 - protein, 9 aa, synthetic construct
GSQAGVRVY

SEQ ID NO: 28571 - protein, 9 aa, synthetic construct
GSQAGVRVR

SEQ ID NO: 28572 - protein, 9 aa, synthetic construct
GSQAGVKLY

SEQ ID NO: 28573 - protein, 9 aa, synthetic construct
GSQAGVKLH

SEQ ID NO: 28574 - protein, 9 aa, synthetic construct
GSQAGVKLF

SEQ ID NO: 28575 - protein, 9 aa, synthetic construct
GSQAGVKVY

SEQ ID NO: 28576 - protein, 9 aa, synthetic construct
PLPAAGRVK

SEQ ID NO: 28577 - protein, 9 aa, synthetic construct
PLPAAGKLY

SEQ ID NO: 28578 - protein, 9 aa, synthetic construct
GSQAGLKLF

SEQ ID NO: 28579 - protein, 9 aa, synthetic construct
PLPAAGKLR

SEQ ID NO: 28580 - protein, 9 aa, synthetic construct
GSQAGAHLY

SEQ ID NO: 28581 - protein, 9 aa, synthetic construct
GSQAGAHLR

SEQ ID NO: 28582 - protein, 9 aa, synthetic construct
GSQAGAHLF

SEQ ID NO: 28583 - protein, 9 aa, synthetic construct
GSQAGAHVR

SEQ ID NO: 28584 - protein, 9 aa, synthetic construct
GSQAGAHVK

SEQ ID NO: 28585 - protein, 9 aa, synthetic construct
GSQAGAHVF

SEQ ID NO: 28586 - protein, 9 aa, synthetic construct
GSQAGARLY

SEQ ID NO: 28587 - protein, 9 aa, synthetic construct
GSQAGARLH

SEQ ID NO: 28588 - protein, 9 aa, synthetic construct
GSQAGARLF

SEQ ID NO: 28589 - protein, 9 aa, synthetic construct
GSQAGARVK

SEQ ID NO: 28590 - protein, 9 aa, synthetic construct
GSQAGARVF

SEQ ID NO: 28591 - protein, 9 aa, synthetic construct
PLPAAGKLK

SEQ ID NO: 28592 - protein, 9 aa, synthetic construct
GSQAGAKLK

SEQ ID NO: 28593 - protein, 9 aa, synthetic construct
GSQAGAKVY

SEQ ID NO: 28594 - protein, 9 aa, synthetic construct
GSQAGAKVH

SEQ ID NO: 28595 - protein, 9 aa, synthetic construct
GSQAGAKVF

SEQ ID NO: 28596 - protein, 9 aa, synthetic construct
PLPAAGKLF

SEQ ID NO: 28597 - protein, 9 aa, synthetic construct
GSQAGIHLK

SEQ ID NO: 28598 - protein, 9 aa, synthetic construct
GSQAGIHVR

SEQ ID NO: 28599 - protein, 9 aa, synthetic construct
GSQAGIRLH

SEQ ID NO: 28600 - protein, 9 aa, synthetic construct
GSQAGIRLF

SEQ ID NO: 28601 - protein, 9 aa, synthetic construct
GSQAGIRVY

SEQ ID NO: 28602 - protein, 9 aa, synthetic construct
GSQAGIRVF

SEQ ID NO: 28603 - protein, 9 aa, synthetic construct
PLPAAGKVH

SEQ ID NO: 28604 - protein, 9 aa, synthetic construct
GSQAGGHLF

SEQ ID NO: 28605 - protein, 9 aa, synthetic construct
GSQAGGHVY

SEQ ID NO: 28606 - protein, 9 aa, synthetic construct
GSQAGGHVK

SEQ ID NO: 28607 - protein, 9 aa, synthetic construct
GSQAGGHVF

SEQ ID NO: 28608 - protein, 9 aa, synthetic construct
GSQAGGRLY

SEQ ID NO: 28609 - protein, 9 aa, synthetic construct
GSQAGGRLF

SEQ ID NO: 28610 - protein, 9 aa, synthetic construct
GSQAGGRVY

SEQ ID NO: 28611 - protein, 9 aa, synthetic construct
GSQAGGRVR

SEQ ID NO: 28612 - protein, 9 aa, synthetic construct
GSQAGGRVF

SEQ ID NO: 28613 - protein, 9 aa, synthetic construct
GSQAGGKLY

SEQ ID NO: 28614 - protein, 9 aa, synthetic construct
GSQAGGKLR

SEQ ID NO: 28615 - protein, 9 aa, synthetic construct
GSQAGGKLH

SEQ ID NO: 28616 - protein, 9 aa, synthetic construct
GSQAGGKLF

SEQ ID NO: 28617 - protein, 9 aa, synthetic construct
GSQAGGKVY

SEQ ID NO: 28618 - protein, 9 aa, synthetic construct
GSQAGGKVK

SEQ ID NO: 28619 - protein, 9 aa, synthetic construct
GSQAGGKVF

SEQ ID NO: 28620 - protein, 9 aa, synthetic construct
GSPGAVHLH

SEQ ID NO: 28621 - protein, 9 aa, synthetic construct
GSPGAVHLK

SEQ ID NO: 28622 - protein, 9 aa, synthetic construct
GSPGAVHVH

SEQ ID NO: 28623 - protein, 9 aa, synthetic construct
GSPGAVHVK

SEQ ID NO: 28624 - protein, 9 aa, synthetic construct
GSPGAVRLY

SEQ ID NO: 28625 - protein, 9 aa, synthetic construct
GSPGAVRLH

SEQ ID NO: 28626 - protein, 9 aa, synthetic construct
GSPGAVRLK

SEQ ID NO: 28627 - protein, 9 aa, synthetic construct
GSPGAVRVH

SEQ ID NO: 28628 - protein, 9 aa, synthetic construct
GSPGAVKLY

SEQ ID NO: 28629 - protein, 9 aa, synthetic construct
GSPGAVKLF

SEQ ID NO: 28630 - protein, 9 aa, synthetic construct
GSPGAVKVH

SEQ ID NO: 28631 - protein, 9 aa, synthetic construct
GSPGALHLY

SEQ ID NO: 28632 - protein, 9 aa, synthetic construct
GSPGALHLR

SEQ ID NO: 28633 - protein, 9 aa, synthetic construct
GSPGALHLH

SEQ ID NO: 28634 - protein, 9 aa, synthetic construct
GSPGALHLK

SEQ ID NO: 28635 - protein, 9 aa, synthetic construct
GSPGALHVR

SEQ ID NO: 28636 - protein, 9 aa, synthetic construct
GSPGALHVF

SEQ ID NO: 28637 - protein, 9 aa, synthetic construct
GSPGALRVK

SEQ ID NO: 28638 - protein, 9 aa, synthetic construct
GSPGALKLR

SEQ ID NO: 28639 - protein, 9 aa, synthetic construct
GSPGALKLH

SEQ ID NO: 28640 - protein, 9 aa, synthetic construct
GSPGALKLF

SEQ ID NO: 28641 - protein, 9 aa, synthetic construct
PLPATVHVR

SEQ ID NO: 28642 - protein, 9 aa, synthetic construct
GSPGAAHLH

SEQ ID NO: 28643 - protein, 9 aa, synthetic construct
GSPGAAHLK

SEQ ID NO: 28644 - protein, 9 aa, synthetic construct
GSPGAAHVR

SEQ ID NO: 28645 - protein, 9 aa, synthetic construct
GSPGAAHVF

SEQ ID NO: 28646 - protein, 9 aa, synthetic construct
GSPGAARLY

SEQ ID NO: 28647 - protein, 9 aa, synthetic construct
GSPGAARLH

SEQ ID NO: 28648 - protein, 9 aa, synthetic construct
GSPGAARLF

SEQ ID NO: 28649 - protein, 9 aa, synthetic construct
GSPGAARVR

SEQ ID NO: 28650 - protein, 9 aa, synthetic construct
GSPGAARVH

SEQ ID NO: 28651 - protein, 9 aa, synthetic construct
GSPGAARVF

SEQ ID NO: 28652 - protein, 9 aa, synthetic construct
PLPATVHVK

SEQ ID NO: 28653 - protein, 9 aa, synthetic construct
GSPGAAKLR

SEQ ID NO: 28654 - protein, 9 aa, synthetic construct
GSPGAAKVR

SEQ ID NO: 28655 - protein, 9 aa, synthetic construct
GSPGAIHLY

SEQ ID NO: 28656 - protein, 9 aa, synthetic construct
GSPGAIHLR

SEQ ID NO: 28657 - protein, 9 aa, synthetic construct
GSPGAIHLH

SEQ ID NO: 28658 - protein, 9 aa, synthetic construct
GSPGAIHLK

SEQ ID NO: 28659 - protein, 9 aa, synthetic construct
GSPGAIHVR

SEQ ID NO: 28660 - protein, 9 aa, synthetic construct
GSPGAIHVF

SEQ ID NO: 28661 - protein, 9 aa, synthetic construct
GSPGAIRLY

SEQ ID NO: 28662 - protein, 9 aa, synthetic construct
GSPGAIRLF

SEQ ID NO: 28663 - protein, 9 aa, synthetic construct
GSPGAIRVR

SEQ ID NO: 28664 - protein, 9 aa, synthetic construct
GSPGAIRVF

SEQ ID NO: 28665 - protein, 9 aa, synthetic construct
GSPGAIKLF

SEQ ID NO: 28666 - protein, 9 aa, synthetic construct
GSPGAIKVH

SEQ ID NO: 28667 - protein, 9 aa, synthetic construct
GSPGAIKVF

SEQ ID NO: 28668 - protein, 9 aa, synthetic construct
PLPATVRLH

SEQ ID NO: 28669 - protein, 9 aa, synthetic construct
GSPGAGHLY

SEQ ID NO: 28670 - protein, 9 aa, synthetic construct
GSPGAGHLR

SEQ ID NO: 28671 - protein, 9 aa, synthetic construct
GSPGAGHLK

SEQ ID NO: 28672 - protein, 9 aa, synthetic construct
GSPGAGHLF

SEQ ID NO: 28673 - protein, 9 aa, synthetic construct
GSPGAGHVY

SEQ ID NO: 28674 - protein, 9 aa, synthetic construct
GSPGAGHVR

SEQ ID NO: 28675 - protein, 9 aa, synthetic construct
GSPGAGHVK

SEQ ID NO: 28676 - protein, 9 aa, synthetic construct
PLPATVRLK

SEQ ID NO: 28677 - protein, 9 aa, synthetic construct
GSPGAGRLY

SEQ ID NO: 28678 - protein, 9 aa, synthetic construct
GSPGAGRVY

SEQ ID NO: 28679 - protein, 9 aa, synthetic construct
GSPGAGRVK

SEQ ID NO: 28680 - protein, 9 aa, synthetic construct
GSPGAGRVF

SEQ ID NO: 28681 - protein, 9 aa, synthetic construct
GSPGAGKLY

SEQ ID NO: 28682 - protein, 9 aa, synthetic construct
GSPGAGKLH

SEQ ID NO: 28683 - protein, 9 aa, synthetic construct
GSPGAGKVY

SEQ ID NO: 28684 - protein, 9 aa, synthetic construct
GSPGAGKVH

SEQ ID NO: 28685 - protein, 9 aa, synthetic construct
PLPATVRVY

SEQ ID NO: 28686 - protein, 9 aa, synthetic construct
GSPGTVHLK

SEQ ID NO: 28687 - protein, 9 aa, synthetic construct
GSPGTVHVR

SEQ ID NO: 28688 - protein, 9 aa, synthetic construct
GSPGTVHVK

SEQ ID NO: 28689 - protein, 9 aa, synthetic construct
GSPGTVHVF

SEQ ID NO: 28690 - protein, 9 aa, synthetic construct
GSPGTVRLH

SEQ ID NO: 28691 - protein, 9 aa, synthetic construct
GSPGTVRLF

SEQ ID NO: 28692 - protein, 9 aa, synthetic construct
GSPGTVRVF

SEQ ID NO: 28693 - protein, 9 aa, synthetic construct
GSPGTVKVY

SEQ ID NO: 28694 - protein, 9 aa, synthetic construct
GSPGTVKVR

SEQ ID NO: 28695 - protein, 9 aa, synthetic construct
GSPGTVKVH

SEQ ID NO: 28696 - protein, 9 aa, synthetic construct
GSPGTVKVF

SEQ ID NO: 28697 - protein, 9 aa, synthetic construct
GSPGTLHVY

SEQ ID NO: 28698 - protein, 9 aa, synthetic construct
GSPGTLHVR

SEQ ID NO: 28699 - protein, 9 aa, synthetic construct
GSPGTLRLF

SEQ ID NO: 28700 - protein, 9 aa, synthetic construct
GSPGTLRVY

SEQ ID NO: 28701 - protein, 9 aa, synthetic construct
GSPGTLRVK

SEQ ID NO: 28702 - protein, 9 aa, synthetic construct
PLPATVKLY

SEQ ID NO: 28703 - protein, 9 aa, synthetic construct
GSPGTLKLR

SEQ ID NO: 28704 - protein, 9 aa, synthetic construct
GSPGTLKVF

SEQ ID NO: 28705 - protein, 9 aa, synthetic construct
PLPATVKLR

SEQ ID NO: 28706 - protein, 9 aa, synthetic construct
PLPATVKLH

SEQ ID NO: 28707 - protein, 9 aa, synthetic construct
GSPGTARLF

SEQ ID NO: 28708 - protein, 9 aa, synthetic construct
GSPGTARVR

SEQ ID NO: 28709 - protein, 9 aa, synthetic construct
GSPGTARVH

SEQ ID NO: 28710 - protein, 9 aa, synthetic construct
GSPGTAKLH

SEQ ID NO: 28711 - protein, 9 aa, synthetic construct
GSPGTAKLF

SEQ ID NO: 28712 - protein, 9 aa, synthetic construct
PLPATVKLF

SEQ ID NO: 28713 - protein, 9 aa, synthetic construct
GSPGTIHLY

SEQ ID NO: 28714 - protein, 9 aa, synthetic construct
GSPGTIHLR

SEQ ID NO: 28715 - protein, 9 aa, synthetic construct
GSPGTIHLF

SEQ ID NO: 28716 - protein, 9 aa, synthetic construct
GSPGTIHVY

SEQ ID NO: 28717 - protein, 9 aa, synthetic construct
GSPGTIHVR

SEQ ID NO: 28718 - protein, 9 aa, synthetic construct
GSPGTIHVF

SEQ ID NO: 28719 - protein, 9 aa, synthetic construct
GSPGTIRLY

SEQ ID NO: 28720 - protein, 9 aa, synthetic construct
GSPGTIRLR

SEQ ID NO: 28721 - protein, 9 aa, synthetic construct
GSPGTIRLH

SEQ ID NO: 28722 - protein, 9 aa, synthetic construct
GSPGTIRLF

SEQ ID NO: 28723 - protein, 9 aa, synthetic construct
GSPGTIRVH

SEQ ID NO: 28724 - protein, 9 aa, synthetic construct
GSPGTIRVF

SEQ ID NO: 28725 - protein, 9 aa, synthetic construct
GSPGTIKLY

SEQ ID NO: 28726 - protein, 9 aa, synthetic construct
GSPGTIKLR

SEQ ID NO: 28727 - protein, 9 aa, synthetic construct
GSPGTIKLH

SEQ ID NO: 28728 - protein, 9 aa, synthetic construct
GSPGTIKLF

SEQ ID NO: 28729 - protein, 9 aa, synthetic construct
GSPGTIKVH

SEQ ID NO: 28730 - protein, 9 aa, synthetic construct
GSPGTIKVF

SEQ ID NO: 28731 - protein, 9 aa, synthetic construct
PLPATVKVH

SEQ ID NO: 28732 - protein, 9 aa, synthetic construct
GSPGTGHLR

SEQ ID NO: 28733 - protein, 9 aa, synthetic construct
GSPGTGHLK

SEQ ID NO: 28734 - protein, 9 aa, synthetic construct
GSPGTGHVR

SEQ ID NO: 28735 - protein, 9 aa, synthetic construct
GSPGTGHVK

SEQ ID NO: 28736 - protein, 9 aa, synthetic construct
GSPGTGRLH

SEQ ID NO: 28737 - protein, 9 aa, synthetic construct
GSPGTGRLF

SEQ ID NO: 28738 - protein, 9 aa, synthetic construct
GSPGTGRVY

SEQ ID NO: 28739 - protein, 9 aa, synthetic construct
GSPGTGRVH

SEQ ID NO: 28740 - protein, 9 aa, synthetic construct
GSPGTGRVK

SEQ ID NO: 28741 - protein, 9 aa, synthetic construct
GSPGTGRVF

SEQ ID NO: 28742 - protein, 9 aa, synthetic construct
PLPATVKVF

SEQ ID NO: 28743 - protein, 9 aa, synthetic construct
GSPGTGKLH

SEQ ID NO: 28744 - protein, 9 aa, synthetic construct
GSPGTGKLF

SEQ ID NO: 28745 - protein, 9 aa, synthetic construct
GSPGTGKVR

SEQ ID NO: 28746 - protein, 9 aa, synthetic construct
PLNGSIHLK

SEQ ID NO: 28747 - protein, 9 aa, synthetic construct
GSPGSVHLY

SEQ ID NO: 28748 - protein, 9 aa, synthetic construct
GSPGSVHLR

SEQ ID NO: 28749 - protein, 9 aa, synthetic construct
GSPGSVHLK

SEQ ID NO: 28750 - protein, 9 aa, synthetic construct
GSPGSVHVY

SEQ ID NO: 28751 - protein, 9 aa, synthetic construct
PLPATLHLR

SEQ ID NO: 28752 - protein, 9 aa, synthetic construct
GSPGSVRVR

SEQ ID NO: 28753 - protein, 9 aa, synthetic construct
GSPGSVKLY

SEQ ID NO: 28754 - protein, 9 aa, synthetic construct
GSPGSVKLF

SEQ ID NO: 28755 - protein, 9 aa, synthetic construct
GSPGSLHLH

SEQ ID NO: 28756 - protein, 9 aa, synthetic construct
GSPGSLHLK

SEQ ID NO: 28757 - protein, 9 aa, synthetic construct
GSPGSLHLF

SEQ ID NO: 28758 - protein, 9 aa, synthetic construct
GSPGSLHVY

SEQ ID NO: 28759 - protein, 9 aa, synthetic construct
GSPGSLHVH

SEQ ID NO: 28760 - protein, 9 aa, synthetic construct
GSPGSLHVF

SEQ ID NO: 28761 - protein, 9 aa, synthetic construct
GSPGSLRVY

SEQ ID NO: 28762 - protein, 9 aa, synthetic construct
GSPGSLRVF

SEQ ID NO: 28763 - protein, 9 aa, synthetic construct
GSPGSLKLH

SEQ ID NO: 28764 - protein, 9 aa, synthetic construct
GSPGSLKVF

SEQ ID NO: 28765 - protein, 9 aa, synthetic construct
PLPATLHVR

SEQ ID NO: 28766 - protein, 9 aa, synthetic construct
PLPATLHVK

SEQ ID NO: 28767 - protein, 9 aa, synthetic construct
GSPGSAKLH

SEQ ID NO: 28768 - protein, 9 aa, synthetic construct
GSPGSAKVH

SEQ ID NO: 28769 - protein, 9 aa, synthetic construct
GSPGSIHLY

SEQ ID NO: 28770 - protein, 9 aa, synthetic construct
GSPGSIHLR

SEQ ID NO: 28771 - protein, 9 aa, synthetic construct
GSPGSIHLH

SEQ ID NO: 28772 - protein, 9 aa, synthetic construct
GSPGSIHLK

SEQ ID NO: 28773 - protein, 9 aa, synthetic construct
GSPGSIHLF

SEQ ID NO: 28774 - protein, 9 aa, synthetic construct
GSPGSIHVR

SEQ ID NO: 28775 - protein, 9 aa, synthetic construct
GSPGSIHVH

SEQ ID NO: 28776 - protein, 9 aa, synthetic construct
GSPGSIHVK

SEQ ID NO: 28777 - protein, 9 aa, synthetic construct
GSPGSIHVF

SEQ ID NO: 28778 - protein, 9 aa, synthetic construct
PLPATLRLY

SEQ ID NO: 28779 - protein, 9 aa, synthetic construct
GSPGSIRLF

SEQ ID NO: 28780 - protein, 9 aa, synthetic construct
GSPGSIKLY

SEQ ID NO: 28781 - protein, 9 aa, synthetic construct
GSPGSIKVY

SEQ ID NO: 28782 - protein, 9 aa, synthetic construct
PLPATLRLH

SEQ ID NO: 28783 - protein, 9 aa, synthetic construct
GSPGSGHLK

SEQ ID NO: 28784 - protein, 9 aa, synthetic construct
GSPGSGHLF

SEQ ID NO: 28785 - protein, 9 aa, synthetic construct
GSPGSGHVY

SEQ ID NO: 28786 - protein, 9 aa, synthetic construct
GSPGSGKLH

SEQ ID NO: 28787 - protein, 9 aa, synthetic construct
GSPGSGKLF

SEQ ID NO: 28788 - protein, 9 aa, synthetic construct
GSPGSGKVY

SEQ ID NO: 28789 - protein, 9 aa, synthetic construct
PLPATLRVY

SEQ ID NO: 28790 - protein, 9 aa, synthetic construct
GSPGVVHLY

SEQ ID NO: 28791 - protein, 9 aa, synthetic construct
GSPGVVHLH

SEQ ID NO: 28792 - protein, 9 aa, synthetic construct
GSPGVVHLK

SEQ ID NO: 28793 - protein, 9 aa, synthetic construct
GSPGVVHVR

SEQ ID NO: 28794 - protein, 9 aa, synthetic construct
GSPGVVHVK

SEQ ID NO: 28795 - protein, 9 aa, synthetic construct
GSPGVVHVF

SEQ ID NO: 28796 - protein, 9 aa, synthetic construct
GSPGVVRLH

SEQ ID NO: 28797 - protein, 9 aa, synthetic construct
GSPGVVRVY

SEQ ID NO: 28798 - protein, 9 aa, synthetic construct
GSPGVVRVH

SEQ ID NO: 28799 - protein, 9 aa, synthetic construct
GSPGVVRVK

SEQ ID NO: 28800 - protein, 9 aa, synthetic construct
GSPGVVRVF

SEQ ID NO: 28801 - protein, 9 aa, synthetic construct
GSPGVVKLY

SEQ ID NO: 28802 - protein, 9 aa, synthetic construct
GSPGVVKLH

SEQ ID NO: 28803 - protein, 9 aa, synthetic construct
GSPGVVKLF

SEQ ID NO: 28804 - protein, 9 aa, synthetic construct
GSPGVVKVY

SEQ ID NO: 28805 - protein, 9 aa, synthetic construct
GSPGVVKVH

SEQ ID NO: 28806 - protein, 9 aa, synthetic construct
GSPGVVKVF

SEQ ID NO: 28807 - protein, 9 aa, synthetic construct
GSPGVLHLH

SEQ ID NO: 28808 - protein, 9 aa, synthetic construct
GSPGVLHVY

SEQ ID NO: 28809 - protein, 9 aa, synthetic construct
GSPGVLHVH

SEQ ID NO: 28810 - protein, 9 aa, synthetic construct
GSPGVLHVF

SEQ ID NO: 28811 - protein, 9 aa, synthetic construct
GSPGVLRLK

SEQ ID NO: 28812 - protein, 9 aa, synthetic construct
GSPGVLRVH

SEQ ID NO: 28813 - protein, 9 aa, synthetic construct
GSPGVLKLY

SEQ ID NO: 28814 - protein, 9 aa, synthetic construct
GSPGVLKLR

SEQ ID NO: 28815 - protein, 9 aa, synthetic construct
GSPGVLKLF

SEQ ID NO: 28816 - protein, 9 aa, synthetic construct
GSPGVLKVY

SEQ ID NO: 28817 - protein, 9 aa, synthetic construct
GSPGVLKVF

SEQ ID NO: 28818 - protein, 9 aa, synthetic construct
GSPGVAHLY

SEQ ID NO: 28819 - protein, 9 aa, synthetic construct
GSPGVAHLR

SEQ ID NO: 28820 - protein, 9 aa, synthetic construct
GSPGVAHLK

SEQ ID NO: 28821 - protein, 9 aa, synthetic construct
GSPGVAHLF

SEQ ID NO: 28822 - protein, 9 aa, synthetic construct
GSPGVAHVY

SEQ ID NO: 28823 - protein, 9 aa, synthetic construct
GSPGVAHVH

SEQ ID NO: 28824 - protein, 9 aa, synthetic construct
GSPGVAHVK

SEQ ID NO: 28825 - protein, 9 aa, synthetic construct
GSPGVAHVF

SEQ ID NO: 28826 - protein, 9 aa, synthetic construct
GSPGVARLY

SEQ ID NO: 28827 - protein, 9 aa, synthetic construct
GSPGVARLH

SEQ ID NO: 28828 - protein, 9 aa, synthetic construct
GSPGVARLF

SEQ ID NO: 28829 - protein, 9 aa, synthetic construct
GSPGVARVY

SEQ ID NO: 28830 - protein, 9 aa, synthetic construct
GSPGVARVH

SEQ ID NO: 28831 - protein, 9 aa, synthetic construct
GSPGVARVF

SEQ ID NO: 28832 - protein, 9 aa, synthetic construct
GSPGVAKLH

SEQ ID NO: 28833 - protein, 9 aa, synthetic construct
GSPGVAKLF

SEQ ID NO: 28834 - protein, 9 aa, synthetic construct
GSPGVAKVY

SEQ ID NO: 28835 - protein, 9 aa, synthetic construct
GSPGVAKVH

SEQ ID NO: 28836 - protein, 9 aa, synthetic construct
GSPGVIHLR

SEQ ID NO: 28837 - protein, 9 aa, synthetic construct
GSPGVIHVR

SEQ ID NO: 28838 - protein, 9 aa, synthetic construct
GSPGVIHVH

SEQ ID NO: 28839 - protein, 9 aa, synthetic construct
GSPGVIHVK

SEQ ID NO: 28840 - protein, 9 aa, synthetic construct
GSPGVIHVF

SEQ ID NO: 28841 - protein, 9 aa, synthetic construct
PLPATLKVY

SEQ ID NO: 28842 - protein, 9 aa, synthetic construct
GSPGVIRLR

SEQ ID NO: 28843 - protein, 9 aa, synthetic construct
GSPGVIRVY

SEQ ID NO: 28844 - protein, 9 aa, synthetic construct
GSPGVIRVH

SEQ ID NO: 28845 - protein, 9 aa, synthetic construct
GSPGVIKLY

SEQ ID NO: 28846 - protein, 9 aa, synthetic construct
GSPGVIKLF

SEQ ID NO: 28847 - protein, 9 aa, synthetic construct
GSPGVIKVY

SEQ ID NO: 28848 - protein, 9 aa, synthetic construct
GSPGVIKVH

SEQ ID NO: 28849 - protein, 9 aa, synthetic construct
PLPATLKVH

SEQ ID NO: 28850 - protein, 9 aa, synthetic construct
GSPGVGHLF

SEQ ID NO: 28851 - protein, 9 aa, synthetic construct
GSPGVGRLY

SEQ ID NO: 28852 - protein, 9 aa, synthetic construct
GSPGVGRLF

SEQ ID NO: 28853 - protein, 9 aa, synthetic construct
GSPGVGRVY

SEQ ID NO: 28854 - protein, 9 aa, synthetic construct
GSPGVGRVH

SEQ ID NO: 28855 - protein, 9 aa, synthetic construct
GSPGVGRVK

SEQ ID NO: 28856 - protein, 9 aa, synthetic construct
GSPGVGRVF

SEQ ID NO: 28857 - protein, 9 aa, synthetic construct
PLPATLKVF

SEQ ID NO: 28858 - protein, 9 aa, synthetic construct
GSPGVGKLY

SEQ ID NO: 28859 - protein, 9 aa, synthetic construct
GSPGVGKLH

SEQ ID NO: 28860 - protein, 9 aa, synthetic construct
GSPGVGKLK

SEQ ID NO: 28861 - protein, 9 aa, synthetic construct
GSPGVGKLF

SEQ ID NO: 28862 - protein, 9 aa, synthetic construct
GSPGVGKVF

SEQ ID NO: 28863 - protein, 9 aa, synthetic construct
GSPGGVHLY

SEQ ID NO: 28864 - protein, 9 aa, synthetic construct
GSPGGVHLR

SEQ ID NO: 28865 - protein, 9 aa, synthetic construct
GSPGGVHLH

SEQ ID NO: 28866 - protein, 9 aa, synthetic construct
GSPGGVRLH

SEQ ID NO: 28867 - protein, 9 aa, synthetic construct
GSPGGVRLF

SEQ ID NO: 28868 - protein, 9 aa, synthetic construct
GSPGGVRVY

SEQ ID NO: 28869 - protein, 9 aa, synthetic construct
GSPGGVRVF

SEQ ID NO: 28870 - protein, 9 aa, synthetic construct
GSPGGVKLH

SEQ ID NO: 28871 - protein, 9 aa, synthetic construct
GSPGGVKLF

SEQ ID NO: 28872 - protein, 9 aa, synthetic construct
GSPGGVKVR

SEQ ID NO: 28873 - protein, 9 aa, synthetic construct
GSPGGVKVH

SEQ ID NO: 28874 - protein, 9 aa, synthetic construct
GSPGGLHLF

SEQ ID NO: 28875 - protein, 9 aa, synthetic construct
GSPGGLHVR

SEQ ID NO: 28876 - protein, 9 aa, synthetic construct
GSPGGLHVK

SEQ ID NO: 28877 - protein, 9 aa, synthetic construct
GSPGGLKLH

SEQ ID NO: 28878 - protein, 9 aa, synthetic construct
GSPGGLKVF

SEQ ID NO: 28879 - protein, 9 aa, synthetic construct
PLPATAHVR

SEQ ID NO: 28880 - protein, 9 aa, synthetic construct
GSPGGAHLY

SEQ ID NO: 28881 - protein, 9 aa, synthetic construct
GSPGGAHLR

SEQ ID NO: 28882 - protein, 9 aa, synthetic construct
GSPGGAHVY

SEQ ID NO: 28883 - protein, 9 aa, synthetic construct
GSPGGAHVK

SEQ ID NO: 28884 - protein, 9 aa, synthetic construct
GSPGGARLF

SEQ ID NO: 28885 - protein, 9 aa, synthetic construct
GSPGGARVY

SEQ ID NO: 28886 - protein, 9 aa, synthetic construct
GSPGGARVF

SEQ ID NO: 28887 - protein, 9 aa, synthetic construct
GSPGGAKVY

SEQ ID NO: 28888 - protein, 9 aa, synthetic construct
GSPGGAKVF

SEQ ID NO: 28889 - protein, 9 aa, synthetic construct
GSPGGIHLY

SEQ ID NO: 28890 - protein, 9 aa, synthetic construct
GSPGGIHLR

SEQ ID NO: 28891 - protein, 9 aa, synthetic construct
GSPGGIHLH

SEQ ID NO: 28892 - protein, 9 aa, synthetic construct
GSPGGIHLK

SEQ ID NO: 28893 - protein, 9 aa, synthetic construct
GSPGGIHVR

SEQ ID NO: 28894 - protein, 9 aa, synthetic construct
GSPGGIHVH

SEQ ID NO: 28895 - protein, 9 aa, synthetic construct
GSPGGIHVF

SEQ ID NO: 28896 - protein, 9 aa, synthetic construct
PLNGSIHVH

SEQ ID NO: 28897 - protein, 9 aa, synthetic construct
PLPATARLY

SEQ ID NO: 28898 - protein, 9 aa, synthetic construct
GSPGGIRLY

SEQ ID NO: 28899 - protein, 9 aa, synthetic construct
GSPGGIRLF

SEQ ID NO: 28900 - protein, 9 aa, synthetic construct
GSPGGIRVH

SEQ ID NO: 28901 - protein, 9 aa, synthetic construct
PLPATARLR

SEQ ID NO: 28902 - protein, 9 aa, synthetic construct
GSPGGIKVY

SEQ ID NO: 28903 - protein, 9 aa, synthetic construct
GSPGGIKVF

SEQ ID NO: 28904 - protein, 9 aa, synthetic construct
GSPGGGHLH

SEQ ID NO: 28905 - protein, 9 aa, synthetic construct
GSPGGGHVY

SEQ ID NO: 28906 - protein, 9 aa, synthetic construct
GSPGGGHVR

SEQ ID NO: 28907 - protein, 9 aa, synthetic construct
GSPGGGHVK

SEQ ID NO: 28908 - protein, 9 aa, synthetic construct
GSPGGGHVF

SEQ ID NO: 28909 - protein, 9 aa, synthetic construct
PLPATARLK

SEQ ID NO: 28910 - protein, 9 aa, synthetic construct
GSPGGGRLH

SEQ ID NO: 28911 - protein, 9 aa, synthetic construct
GSPGGGRVF

SEQ ID NO: 28912 - protein, 9 aa, synthetic construct
GSPGGGKLY

SEQ ID NO: 28913 - protein, 9 aa, synthetic construct
GSPGGGKLH

SEQ ID NO: 28914 - protein, 9 aa, synthetic construct
GSPGGGKVY

SEQ ID NO: 28915 - protein, 9 aa, synthetic construct
GSPGGGKVF

SEQ ID NO: 28916 - protein, 9 aa, synthetic construct
GSPAAVHLY

SEQ ID NO: 28917 - protein, 9 aa, synthetic construct
GSPAAVHLF

SEQ ID NO: 28918 - protein, 9 aa, synthetic construct
GSPAAVHVR

SEQ ID NO: 28919 - protein, 9 aa, synthetic construct
GSPAAVHVF

SEQ ID NO: 28920 - protein, 9 aa, synthetic construct
PLPATARVR

SEQ ID NO: 28921 - protein, 9 aa, synthetic construct
GSPAAVRLY

SEQ ID NO: 28922 - protein, 9 aa, synthetic construct
GSPAAVRLR

SEQ ID NO: 28923 - protein, 9 aa, synthetic construct
GSPAAVRLH

SEQ ID NO: 28924 - protein, 9 aa, synthetic construct
GSPAAVRLK

SEQ ID NO: 28925 - protein, 9 aa, synthetic construct
GSPAAVRLF

SEQ ID NO: 28926 - protein, 9 aa, synthetic construct
GSPAAVRVY

SEQ ID NO: 28927 - protein, 9 aa, synthetic construct
GSPAAVRVH

SEQ ID NO: 28928 - protein, 9 aa, synthetic construct
GSPAAVRVK

SEQ ID NO: 28929 - protein, 9 aa, synthetic construct
GSPAAVRVF

SEQ ID NO: 28930 - protein, 9 aa, synthetic construct
PLPATARVH

SEQ ID NO: 28931 - protein, 9 aa, synthetic construct
GSPAAVKLY

SEQ ID NO: 28932 - protein, 9 aa, synthetic construct
GSPAAVKLR

SEQ ID NO: 28933 - protein, 9 aa, synthetic construct
GSPAAVKLH

SEQ ID NO: 28934 - protein, 9 aa, synthetic construct
GSPAAVKLK

SEQ ID NO: 28935 - protein, 9 aa, synthetic construct
GSPAAVKLF

SEQ ID NO: 28936 - protein, 9 aa, synthetic construct
GSPAAVKVH

SEQ ID NO: 28937 - protein, 9 aa, synthetic construct
GSPAAVKVK

SEQ ID NO: 28938 - protein, 9 aa, synthetic construct
GSPAALHLH

SEQ ID NO: 28939 - protein, 9 aa, synthetic construct
GSPAALHLK

SEQ ID NO: 28940 - protein, 9 aa, synthetic construct
GSPAALHVY

SEQ ID NO: 28941 - protein, 9 aa, synthetic construct
GSPAALHVH

SEQ ID NO: 28942 - protein, 9 aa, synthetic construct
GSPAALHVK

SEQ ID NO: 28943 - protein, 9 aa, synthetic construct
GSPAALHVF

SEQ ID NO: 28944 - protein, 9 aa, synthetic construct
GSPAALRLH

SEQ ID NO: 28945 - protein, 9 aa, synthetic construct
GSPAALRVR

SEQ ID NO: 28946 - protein, 9 aa, synthetic construct
GSPAALRVH

SEQ ID NO: 28947 - protein, 9 aa, synthetic construct
GSPAALRVK

SEQ ID NO: 28948 - protein, 9 aa, synthetic construct
GSPAALKLY

SEQ ID NO: 28949 - protein, 9 aa, synthetic construct
GSPAALKLH

SEQ ID NO: 28950 - protein, 9 aa, synthetic construct
GSPAALKLF

SEQ ID NO: 28951 - protein, 9 aa, synthetic construct
GSPAALKVH

SEQ ID NO: 28952 - protein, 9 aa, synthetic construct
GSPAALKVF

SEQ ID NO: 28953 - protein, 9 aa, synthetic construct
GSPAAAHLR

SEQ ID NO: 28954 - protein, 9 aa, synthetic construct
GSPAAAHLK

SEQ ID NO: 28955 - protein, 9 aa, synthetic construct
GSPAAAHLF

SEQ ID NO: 28956 - protein, 9 aa, synthetic construct
GSPAAAHVY

SEQ ID NO: 28957 - protein, 9 aa, synthetic construct
GSPAAAHVR

SEQ ID NO: 28958 - protein, 9 aa, synthetic construct
GSPAAAHVF

SEQ ID NO: 28959 - protein, 9 aa, synthetic construct
GSPAAARLF

SEQ ID NO: 28960 - protein, 9 aa, synthetic construct
GSPAAARVR

SEQ ID NO: 28961 - protein, 9 aa, synthetic construct
GSPAAARVH

SEQ ID NO: 28962 - protein, 9 aa, synthetic construct
GSPAAARVK

SEQ ID NO: 28963 - protein, 9 aa, synthetic construct
GSPAAAKLR

SEQ ID NO: 28964 - protein, 9 aa, synthetic construct
GSPAAAKVY

SEQ ID NO: 28965 - protein, 9 aa, synthetic construct
GSPAAAKVR

SEQ ID NO: 28966 - protein, 9 aa, synthetic construct
GSPAAAKVK

SEQ ID NO: 28967 - protein, 9 aa, synthetic construct
GSPAAIHLY

SEQ ID NO: 28968 - protein, 9 aa, synthetic construct
GSPAAIHLR

SEQ ID NO: 28969 - protein, 9 aa, synthetic construct
GSPAAIHLH

SEQ ID NO: 28970 - protein, 9 aa, synthetic construct
GSPAAIHLK

SEQ ID NO: 28971 - protein, 9 aa, synthetic construct
GSPAAIHVY

SEQ ID NO: 28972 - protein, 9 aa, synthetic construct
GSPAAIHVF

SEQ ID NO: 28973 - protein, 9 aa, synthetic construct
GSPAAIRLY

SEQ ID NO: 28974 - protein, 9 aa, synthetic construct
GSPAAIRLH

SEQ ID NO: 28975 - protein, 9 aa, synthetic construct
GSPAAIRLF

SEQ ID NO: 28976 - protein, 9 aa, synthetic construct
GSPAAIRVY

SEQ ID NO: 28977 - protein, 9 aa, synthetic construct
GSPAAIRVF

SEQ ID NO: 28978 - protein, 9 aa, synthetic construct
GSPAAIKLH

SEQ ID NO: 28979 - protein, 9 aa, synthetic construct
GSPAAIKLK

SEQ ID NO: 28980 - protein, 9 aa, synthetic construct
GSPAAIKVR

SEQ ID NO: 28981 - protein, 9 aa, synthetic construct
GSPAAGHLY

SEQ ID NO: 28982 - protein, 9 aa, synthetic construct
GSPAAGHLR

SEQ ID NO: 28983 - protein, 9 aa, synthetic construct
GSPAAGHVY

SEQ ID NO: 28984 - protein, 9 aa, synthetic construct
GSPAAGHVR

SEQ ID NO: 28985 - protein, 9 aa, synthetic construct
GSPAAGHVK

SEQ ID NO: 28986 - protein, 9 aa, synthetic construct
PLPATAKVK

SEQ ID NO: 28987 - protein, 9 aa, synthetic construct
GSPAAGRLY

SEQ ID NO: 28988 - protein, 9 aa, synthetic construct
GSPAAGRVH

SEQ ID NO: 28989 - protein, 9 aa, synthetic construct
GSPAAGRVK

SEQ ID NO: 28990 - protein, 9 aa, synthetic construct
GSPAAGRVF

SEQ ID NO: 28991 - protein, 9 aa, synthetic construct
GSPAAGKVH

SEQ ID NO: 28992 - protein, 9 aa, synthetic construct
PLNGSIHVF

SEQ ID NO: 28993 - protein, 9 aa, synthetic construct
GSPATVHLR

SEQ ID NO: 28994 - protein, 9 aa, synthetic construct
GSPATVHLH

SEQ ID NO: 28995 - protein, 9 aa, synthetic construct
GSPATVHLF

SEQ ID NO: 28996 - protein, 9 aa, synthetic construct
GSPATVHVY

SEQ ID NO: 28997 - protein, 9 aa, synthetic construct
GSPATVHVR

SEQ ID NO: 28998 - protein, 9 aa, synthetic construct
GSPATVHVK

SEQ ID NO: 28999 - protein, 9 aa, synthetic construct
GSPATVHVF

SEQ ID NO: 29000 - protein, 9 aa, synthetic construct
GSPATVRLY

SEQ ID NO: 29001 - protein, 9 aa, synthetic construct
GSPATVRLH

SEQ ID NO: 29002 - protein, 9 aa, synthetic construct
GSPATVRVH

SEQ ID NO: 29003 - protein, 9 aa, synthetic construct
GSPATVRVF

SEQ ID NO: 29004 - protein, 9 aa, synthetic construct
GSPATVKLR

SEQ ID NO: 29005 - protein, 9 aa, synthetic construct
GSPATVKLH

SEQ ID NO: 29006 - protein, 9 aa, synthetic construct
GSPATVKVH

SEQ ID NO: 29007 - protein, 9 aa, synthetic construct
GSPATVKVF

SEQ ID NO: 29008 - protein, 9 aa, synthetic construct
GSPATLHLH

SEQ ID NO: 29009 - protein, 9 aa, synthetic construct
GSPATLHLK

SEQ ID NO: 29010 - protein, 9 aa, synthetic construct
GSPATLHVY

SEQ ID NO: 29011 - protein, 9 aa, synthetic construct
GSPATLHVR

SEQ ID NO: 29012 - protein, 9 aa, synthetic construct
GSPATLHVK

SEQ ID NO: 29013 - protein, 9 aa, synthetic construct
GSPATLHVF

SEQ ID NO: 29014 - protein, 9 aa, synthetic construct
GSPATLRLY

SEQ ID NO: 29015 - protein, 9 aa, synthetic construct
GSPATLRLH

SEQ ID NO: 29016 - protein, 9 aa, synthetic construct
GSPATLRLK

SEQ ID NO: 29017 - protein, 9 aa, synthetic construct
GSPATLRVH

SEQ ID NO: 29018 - protein, 9 aa, synthetic construct
GSPATLRVK

SEQ ID NO: 29019 - protein, 9 aa, synthetic construct
GSPATLKLY

SEQ ID NO: 29020 - protein, 9 aa, synthetic construct
GSPATLKLH

SEQ ID NO: 29021 - protein, 9 aa, synthetic construct
GSPATLKVY

SEQ ID NO: 29022 - protein, 9 aa, synthetic construct
GSPATLKVK

SEQ ID NO: 29023 - protein, 9 aa, synthetic construct
GSPATLKVF

SEQ ID NO: 29024 - protein, 9 aa, synthetic construct
GSPATARLY

SEQ ID NO: 29025 - protein, 9 aa, synthetic construct
GSPATARLF

SEQ ID NO: 29026 - protein, 9 aa, synthetic construct
GSPATARVY

SEQ ID NO: 29027 - protein, 9 aa, synthetic construct
GSPATARVR

SEQ ID NO: 29028 - protein, 9 aa, synthetic construct
GSPATAKLF

SEQ ID NO: 29029 - protein, 9 aa, synthetic construct
GSPATIHLR

SEQ ID NO: 29030 - protein, 9 aa, synthetic construct
GSPATIHLF

SEQ ID NO: 29031 - protein, 9 aa, synthetic construct
GSPATIHVR

SEQ ID NO: 29032 - protein, 9 aa, synthetic construct
PLPATIRLY

SEQ ID NO: 29033 - protein, 9 aa, synthetic construct
GSPATIRLY

SEQ ID NO: 29034 - protein, 9 aa, synthetic construct
GSPATIRLR

SEQ ID NO: 29035 - protein, 9 aa, synthetic construct
GSPATIRLH

SEQ ID NO: 29036 - protein, 9 aa, synthetic construct
GSPATIRVH

SEQ ID NO: 29037 - protein, 9 aa, synthetic construct
GSPATIRVF

SEQ ID NO: 29038 - protein, 9 aa, synthetic construct
PLPATIRLR

SEQ ID NO: 29039 - protein, 9 aa, synthetic construct
GSPATIKLR

SEQ ID NO: 29040 - protein, 9 aa, synthetic construct
GSPATIKVF

SEQ ID NO: 29041 - protein, 9 aa, synthetic construct
PLPATIRLH

SEQ ID NO: 29042 - protein, 9 aa, synthetic construct
GSPATGHVY

SEQ ID NO: 29043 - protein, 9 aa, synthetic construct
GSPATGHVR

SEQ ID NO: 29044 - protein, 9 aa, synthetic construct
GSPATGRLY

SEQ ID NO: 29045 - protein, 9 aa, synthetic construct
GSPASVHLH

SEQ ID NO: 29046 - protein, 9 aa, synthetic construct
GSPASVHLK

SEQ ID NO: 29047 - protein, 9 aa, synthetic construct
GSPASVRLY

SEQ ID NO: 29048 - protein, 9 aa, synthetic construct
GSPASVKLY

SEQ ID NO: 29049 - protein, 9 aa, synthetic construct
GSPASLHVR

SEQ ID NO: 29050 - protein, 9 aa, synthetic construct
PLPATIRVF

SEQ ID NO: 29051 - protein, 9 aa, synthetic construct
GSPASLRLH

SEQ ID NO: 29052 - protein, 9 aa, synthetic construct
GSPASLKVY

SEQ ID NO: 29053 - protein, 9 aa, synthetic construct
PLPATIKLR

SEQ ID NO: 29054 - protein, 9 aa, synthetic construct
PLPATIKLH

SEQ ID NO: 29055 - protein, 9 aa, synthetic construct
PLPATIKLK

SEQ ID NO: 29056 - protein, 9 aa, synthetic construct
GSPASAKLH

SEQ ID NO: 29057 - protein, 9 aa, synthetic construct
GSPASIHLY

SEQ ID NO: 29058 - protein, 9 aa, synthetic construct
GSPASIHVR

SEQ ID NO: 29059 - protein, 9 aa, synthetic construct
GSPASIHVH

SEQ ID NO: 29060 - protein, 9 aa, synthetic construct
GSPASIHVK

SEQ ID NO: 29061 - protein, 9 aa, synthetic construct
GSPASIRVF

SEQ ID NO: 29062 - protein, 9 aa, synthetic construct
GSPASIKLF

SEQ ID NO: 29063 - protein, 9 aa, synthetic construct
GSPASIKVY

SEQ ID NO: 29064 - protein, 9 aa, synthetic construct
PLPATIKVH

SEQ ID NO: 29065 - protein, 9 aa, synthetic construct
PLPATIKVK

SEQ ID NO: 29066 - protein, 9 aa, synthetic construct
PLPATIKVF

SEQ ID NO: 29067 - protein, 9 aa, synthetic construct
GSPASGKLY

SEQ ID NO: 29068 - protein, 9 aa, synthetic construct
GSPASGKLH

SEQ ID NO: 29069 - protein, 9 aa, synthetic construct
GSPASGKLF

SEQ ID NO: 29070 - protein, 9 aa, synthetic construct
PLNGSIRLH

SEQ ID NO: 29071 - protein, 9 aa, synthetic construct
GSPAVVHLY

SEQ ID NO: 29072 - protein, 9 aa, synthetic construct
GSPAVVHVK

SEQ ID NO: 29073 - protein, 9 aa, synthetic construct
GSPAVVHVF

SEQ ID NO: 29074 - protein, 9 aa, synthetic construct
PLPATGHLR

SEQ ID NO: 29075 - protein, 9 aa, synthetic construct
GSPAVVRLY

SEQ ID NO: 29076 - protein, 9 aa, synthetic construct
GSPAVVRLH

SEQ ID NO: 29077 - protein, 9 aa, synthetic construct
GSPAVVRLF

SEQ ID NO: 29078 - protein, 9 aa, synthetic construct
GSPAVVRVF

SEQ ID NO: 29079 - protein, 9 aa, synthetic construct
GSPAVVKLY

SEQ ID NO: 29080 - protein, 9 aa, synthetic construct
GSPAVVKLR

SEQ ID NO: 29081 - protein, 9 aa, synthetic construct
GSPAVVKLH

SEQ ID NO: 29082 - protein, 9 aa, synthetic construct
GSPAVVKLK

SEQ ID NO: 29083 - protein, 9 aa, synthetic construct
GSPAVVKVY

SEQ ID NO: 29084 - protein, 9 aa, synthetic construct
GSPAVVKVH

SEQ ID NO: 29085 - protein, 9 aa, synthetic construct
GSPAVVKVK

SEQ ID NO: 29086 - protein, 9 aa, synthetic construct
GSPAVLRLF

SEQ ID NO: 29087 - protein, 9 aa, synthetic construct
GSPAVLKLF

SEQ ID NO: 29088 - protein, 9 aa, synthetic construct
GSPAVLKVH

SEQ ID NO: 29089 - protein, 9 aa, synthetic construct
GSPAVLKVF

SEQ ID NO: 29090 - protein, 9 aa, synthetic construct
GSPAVAHLY

SEQ ID NO: 29091 - protein, 9 aa, synthetic construct
GSPAVAHLR

SEQ ID NO: 29092 - protein, 9 aa, synthetic construct
GSPAVAHLH

SEQ ID NO: 29093 - protein, 9 aa, synthetic construct
GSPAVAHLK

SEQ ID NO: 29094 - protein, 9 aa, synthetic construct
GSPAVAHLF

SEQ ID NO: 29095 - protein, 9 aa, synthetic construct
GSPAVAHVY

SEQ ID NO: 29096 - protein, 9 aa, synthetic construct
GSPAVAHVR

SEQ ID NO: 29097 - protein, 9 aa, synthetic construct
GSPAVAHVH

SEQ ID NO: 29098 - protein, 9 aa, synthetic construct
GSPAVAHVK

SEQ ID NO: 29099 - protein, 9 aa, synthetic construct
GSPAVAHVF

SEQ ID NO: 29100 - protein, 9 aa, synthetic construct
GSPAVARLF

SEQ ID NO: 29101 - protein, 9 aa, synthetic construct
GSPAVARVH

SEQ ID NO: 29102 - protein, 9 aa, synthetic construct
GSPAVAKLY

SEQ ID NO: 29103 - protein, 9 aa, synthetic construct
GSPAVAKVR

SEQ ID NO: 29104 - protein, 9 aa, synthetic construct
GSPAVAKVF

SEQ ID NO: 29105 - protein, 9 aa, synthetic construct
GSPAVIHLY

SEQ ID NO: 29106 - protein, 9 aa, synthetic construct
GSPAVIHLH

SEQ ID NO: 29107 - protein, 9 aa, synthetic construct
GSPAVIHLK

SEQ ID NO: 29108 - protein, 9 aa, synthetic construct
GSPAVIHLF

SEQ ID NO: 29109 - protein, 9 aa, synthetic construct
GSPAVIHVY

SEQ ID NO: 29110 - protein, 9 aa, synthetic construct
GSPAVIHVH

SEQ ID NO: 29111 - protein, 9 aa, synthetic construct
GSPAVIHVF

SEQ ID NO: 29112 - protein, 9 aa, synthetic construct
PLPATGRLY

SEQ ID NO: 29113 - protein, 9 aa, synthetic construct
GSPAVIRLR

SEQ ID NO: 29114 - protein, 9 aa, synthetic construct
GSPAVIRVY

SEQ ID NO: 29115 - protein, 9 aa, synthetic construct
GSPAVIRVR

SEQ ID NO: 29116 - protein, 9 aa, synthetic construct
GSPAVIRVH

SEQ ID NO: 29117 - protein, 9 aa, synthetic construct
GSPAVIKLY

SEQ ID NO: 29118 - protein, 9 aa, synthetic construct
GSPAVIKLH

SEQ ID NO: 29119 - protein, 9 aa, synthetic construct
GSPAVIKLF

SEQ ID NO: 29120 - protein, 9 aa, synthetic construct
GSPAVIKVY

SEQ ID NO: 29121 - protein, 9 aa, synthetic construct
PLPATGRLH

SEQ ID NO: 29122 - protein, 9 aa, synthetic construct
GSPAVGHLR

SEQ ID NO: 29123 - protein, 9 aa, synthetic construct
GSPAVGHLH

SEQ ID NO: 29124 - protein, 9 aa, synthetic construct
GSPAVGHLK

SEQ ID NO: 29125 - protein, 9 aa, synthetic construct
GSPAVGHVY

SEQ ID NO: 29126 - protein, 9 aa, synthetic construct
GSPAVGHVF

SEQ ID NO: 29127 - protein, 9 aa, synthetic construct
PLPATGRLK

SEQ ID NO: 29128 - protein, 9 aa, synthetic construct
GSPAVGRLF

SEQ ID NO: 29129 - protein, 9 aa, synthetic construct
GSPAVGRVY

SEQ ID NO: 29130 - protein, 9 aa, synthetic construct
GSPAVGRVK

SEQ ID NO: 29131 - protein, 9 aa, synthetic construct
GSPAVGRVF

SEQ ID NO: 29132 - protein, 9 aa, synthetic construct
GSPAVGKLY

SEQ ID NO: 29133 - protein, 9 aa, synthetic construct
GSPAVGKLH

SEQ ID NO: 29134 - protein, 9 aa, synthetic construct
GSPAVGKLF

SEQ ID NO: 29135 - protein, 9 aa, synthetic construct
GSPAVGKVR

SEQ ID NO: 29136 - protein, 9 aa, synthetic construct
GSPAVGKVH

SEQ ID NO: 29137 - protein, 9 aa, synthetic construct
GSPAVGKVF

SEQ ID NO: 29138 - protein, 9 aa, synthetic construct
GSPAGVHLK

SEQ ID NO: 29139 - protein, 9 aa, synthetic construct
GSPAGVHVY

SEQ ID NO: 29140 - protein, 9 aa, synthetic construct
GSPAGVHVR

SEQ ID NO: 29141 - protein, 9 aa, synthetic construct
GSPAGVHVK

SEQ ID NO: 29142 - protein, 9 aa, synthetic construct
GSPAGVRLY

SEQ ID NO: 29143 - protein, 9 aa, synthetic construct
GSPAGVRLF

SEQ ID NO: 29144 - protein, 9 aa, synthetic construct
GSPAGVRVY

SEQ ID NO: 29145 - protein, 9 aa, synthetic construct
GSPAGVRVK

SEQ ID NO: 29146 - protein, 9 aa, synthetic construct
GSPAGVKLY

SEQ ID NO: 29147 - protein, 9 aa, synthetic construct
GSPAGVKLH

SEQ ID NO: 29148 - protein, 9 aa, synthetic construct
GSPAGVKVY

SEQ ID NO: 29149 - protein, 9 aa, synthetic construct
GSPAGVKVH

SEQ ID NO: 29150 - protein, 9 aa, synthetic construct
GSPAGVKVK

SEQ ID NO: 29151 - protein, 9 aa, synthetic construct
GSPAGVKVF

SEQ ID NO: 29152 - protein, 9 aa, synthetic construct
PLNGSIRLF

SEQ ID NO: 29153 - protein, 9 aa, synthetic construct
GSPAGLKVF

SEQ ID NO: 29154 - protein, 9 aa, synthetic construct
PLPATGKLR

SEQ ID NO: 29155 - protein, 9 aa, synthetic construct
GSPAGAHLF

SEQ ID NO: 29156 - protein, 9 aa, synthetic construct
GSPAGAHVR

SEQ ID NO: 29157 - protein, 9 aa, synthetic construct
GSPAGARVK

SEQ ID NO: 29158 - protein, 9 aa, synthetic construct
GSPAGARVF

SEQ ID NO: 29159 - protein, 9 aa, synthetic construct
GSPAGAKVH

SEQ ID NO: 29160 - protein, 9 aa, synthetic construct
GSPAGIHLY

SEQ ID NO: 29161 - protein, 9 aa, synthetic construct
GSPAGIHLR

SEQ ID NO: 29162 - protein, 9 aa, synthetic construct
GSPAGIHLH

SEQ ID NO: 29163 - protein, 9 aa, synthetic construct
GSPAGIHLK

SEQ ID NO: 29164 - protein, 9 aa, synthetic construct
GSPAGIHLF

SEQ ID NO: 29165 - protein, 9 aa, synthetic construct
GSPAGIHVY

SEQ ID NO: 29166 - protein, 9 aa, synthetic construct
GSPAGIHVR

SEQ ID NO: 29167 - protein, 9 aa, synthetic construct
GSPAGIHVK

SEQ ID NO: 29168 - protein, 9 aa, synthetic construct
GSPAGIHVF

SEQ ID NO: 29169 - protein, 9 aa, synthetic construct
GSPAGIRLY

SEQ ID NO: 29170 - protein, 9 aa, synthetic construct
GSPAGIRVY

SEQ ID NO: 29171 - protein, 9 aa, synthetic construct
GSPAGIRVH

SEQ ID NO: 29172 - protein, 9 aa, synthetic construct
GSPAGIKLY

SEQ ID NO: 29173 - protein, 9 aa, synthetic construct
GSPAGIKLF

SEQ ID NO: 29174 - protein, 9 aa, synthetic construct
GSPAGIKVY

SEQ ID NO: 29175 - protein, 9 aa, synthetic construct
GSPAGIKVH

SEQ ID NO: 29176 - protein, 9 aa, synthetic construct
GSPAGIKVF

SEQ ID NO: 29177 - protein, 9 aa, synthetic construct
GSPAGGHLR

SEQ ID NO: 29178 - protein, 9 aa, synthetic construct
GSPAGGHLK

SEQ ID NO: 29179 - protein, 9 aa, synthetic construct
GSPAGGHLF

SEQ ID NO: 29180 - protein, 9 aa, synthetic construct
GSPAGGHVY

SEQ ID NO: 29181 - protein, 9 aa, synthetic construct
GSPAGGHVR

SEQ ID NO: 29182 - protein, 9 aa, synthetic construct
GSPAGGHVH

SEQ ID NO: 29183 - protein, 9 aa, synthetic construct
GSPAGGHVK

SEQ ID NO: 29184 - protein, 9 aa, synthetic construct
GSPAGGHVF

SEQ ID NO: 29185 - protein, 9 aa, synthetic construct
GSPAGGRLY

SEQ ID NO: 29186 - protein, 9 aa, synthetic construct
GSPAGGRVY

SEQ ID NO: 29187 - protein, 9 aa, synthetic construct
GSPAGGRVR

SEQ ID NO: 29188 - protein, 9 aa, synthetic construct
GSPAGGRVH

SEQ ID NO: 29189 - protein, 9 aa, synthetic construct
GSPAGGKLH

SEQ ID NO: 29190 - protein, 9 aa, synthetic construct
GSPAGGKLF

SEQ ID NO: 29191 - protein, 9 aa, synthetic construct
GSPAGGKVY

SEQ ID NO: 29192 - protein, 9 aa, synthetic construct
GSPAGGKVK

SEQ ID NO: 29193 - protein, 9 aa, synthetic construct
GSPAGGKVF

SEQ ID NO: 29194 - protein, 9 aa, synthetic construct
PLNGSIRVY

SEQ ID NO: 29195 - protein, 9 aa, synthetic construct
PLPASVHLY

SEQ ID NO: 29196 - protein, 9 aa, synthetic construct
GANGAVHLY

SEQ ID NO: 29197 - protein, 9 aa, synthetic construct
GANGAVHVK

SEQ ID NO: 29198 - protein, 9 aa, synthetic construct
PLPASVHLR

SEQ ID NO: 29199 - protein, 9 aa, synthetic construct
PLPASVHLH

SEQ ID NO: 29200 - protein, 9 aa, synthetic construct
GANGAVKLH

SEQ ID NO: 29201 - protein, 9 aa, synthetic construct
PLPASVHLK

SEQ ID NO: 29202 - protein, 9 aa, synthetic construct
PLPASVHLF

SEQ ID NO: 29203 - protein, 9 aa, synthetic construct
GANGALRVK

SEQ ID NO: 29204 - protein, 9 aa, synthetic construct
GANGALKLF

SEQ ID NO: 29205 - protein, 9 aa, synthetic construct
PLPASVHVR

SEQ ID NO: 29206 - protein, 9 aa, synthetic construct
GANGAAHLY

SEQ ID NO: 29207 - protein, 9 aa, synthetic construct
GANGAAHVK

SEQ ID NO: 29208 - protein, 9 aa, synthetic construct
PLPASVRLY

SEQ ID NO: 29209 - protein, 9 aa, synthetic construct
GANGAIKVY

SEQ ID NO: 29210 - protein, 9 aa, synthetic construct
GANGAGHLF

SEQ ID NO: 29211 - protein, 9 aa, synthetic construct
GANGAGHVR

SEQ ID NO: 29212 - protein, 9 aa, synthetic construct
GANGAGRVY

SEQ ID NO: 29213 - protein, 9 aa, synthetic construct
GANGAGRVH

SEQ ID NO: 29214 - protein, 9 aa, synthetic construct
GANGAGKLY

SEQ ID NO: 29215 - protein, 9 aa, synthetic construct
GANGAGKLH

SEQ ID NO: 29216 - protein, 9 aa, synthetic construct
GANGAGKVY

SEQ ID NO: 29217 - protein, 9 aa, synthetic construct
GANGTVHLR

SEQ ID NO: 29218 - protein, 9 aa, synthetic construct
GANGTVHVR

SEQ ID NO: 29219 - protein, 9 aa, synthetic construct
GANGTVHVK

SEQ ID NO: 29220 - protein, 9 aa, synthetic construct
GANGTVHVF

SEQ ID NO: 29221 - protein, 9 aa, synthetic construct
GANGTVRLH

SEQ ID NO: 29222 - protein, 9 aa, synthetic construct
GANGTVRVH

SEQ ID NO: 29223 - protein, 9 aa, synthetic construct
GANGTVRVF

SEQ ID NO: 29224 - protein, 9 aa, synthetic construct
GANGTVKVH

SEQ ID NO: 29225 - protein, 9 aa, synthetic construct
GANGTVKVF

SEQ ID NO: 29226 - protein, 9 aa, synthetic construct
PLPASVRVK

SEQ ID NO: 29227 - protein, 9 aa, synthetic construct
GANGTLHLF

SEQ ID NO: 29228 - protein, 9 aa, synthetic construct
GANGTLHVF

SEQ ID NO: 29229 - protein, 9 aa, synthetic construct
GANGTLRVK

SEQ ID NO: 29230 - protein, 9 aa, synthetic construct
PLPASVKLY

SEQ ID NO: 29231 - protein, 9 aa, synthetic construct
GANGTLKLF

SEQ ID NO: 29232 - protein, 9 aa, synthetic construct
PLPASVKLH

SEQ ID NO: 29233 - protein, 9 aa, synthetic construct
GANGTARLY

SEQ ID NO: 29234 - protein, 9 aa, synthetic construct
GANGTARLR

SEQ ID NO: 29235 - protein, 9 aa, synthetic construct
GANGTARLH

SEQ ID NO: 29236 - protein, 9 aa, synthetic construct
GANGTARLF

SEQ ID NO: 29237 - protein, 9 aa, synthetic construct
GANGTAKLF

SEQ ID NO: 29238 - protein, 9 aa, synthetic construct
PLPASVKLF

SEQ ID NO: 29239 - protein, 9 aa, synthetic construct
GANGTIHLR

SEQ ID NO: 29240 - protein, 9 aa, synthetic construct
GANGTIHVR

SEQ ID NO: 29241 - protein, 9 aa, synthetic construct
GANGTIHVH

SEQ ID NO: 29242 - protein, 9 aa, synthetic construct
PLPASVKVY

SEQ ID NO: 29243 - protein, 9 aa, synthetic construct
GANGTIRLH

SEQ ID NO: 29244 - protein, 9 aa, synthetic construct
GANGTIRLF

SEQ ID NO: 29245 - protein, 9 aa, synthetic construct
GANGTIRVY

SEQ ID NO: 29246 - protein, 9 aa, synthetic construct
GANGTIRVR

SEQ ID NO: 29247 - protein, 9 aa, synthetic construct
GANGTIRVH

SEQ ID NO: 29248 - protein, 9 aa, synthetic construct
GANGTIRVF

SEQ ID NO: 29249 - protein, 9 aa, synthetic construct
GANGTIKLY

SEQ ID NO: 29250 - protein, 9 aa, synthetic construct
GANGTIKLH

SEQ ID NO: 29251 - protein, 9 aa, synthetic construct
GANGTIKLK

SEQ ID NO: 29252 - protein, 9 aa, synthetic construct
GANGTIKLF

SEQ ID NO: 29253 - protein, 9 aa, synthetic construct
GANGTIKVH

SEQ ID NO: 29254 - protein, 9 aa, synthetic construct
GANGTIKVF

SEQ ID NO: 29255 - protein, 9 aa, synthetic construct
GANGTGHLR

SEQ ID NO: 29256 - protein, 9 aa, synthetic construct
GANGTGHLK

SEQ ID NO: 29257 - protein, 9 aa, synthetic construct
GANGTGHVY

SEQ ID NO: 29258 - protein, 9 aa, synthetic construct
GANGTGRLY

SEQ ID NO: 29259 - protein, 9 aa, synthetic construct
GANGTGRLH

SEQ ID NO: 29260 - protein, 9 aa, synthetic construct
GANGTGRLF

SEQ ID NO: 29261 - protein, 9 aa, synthetic construct
GANGTGRVY

SEQ ID NO: 29262 - protein, 9 aa, synthetic construct
GANGTGRVF

SEQ ID NO: 29263 - protein, 9 aa, synthetic construct
GANGTGKLF

SEQ ID NO: 29264 - protein, 9 aa, synthetic construct
GANGSVHLY

SEQ ID NO: 29265 - protein, 9 aa, synthetic construct
GANGSVHLR

SEQ ID NO: 29266 - protein, 9 aa, synthetic construct
GANGSVHLH

SEQ ID NO: 29267 - protein, 9 aa, synthetic construct
GANGSVHVR

SEQ ID NO: 29268 - protein, 9 aa, synthetic construct
GANGSVRLH

SEQ ID NO: 29269 - protein, 9 aa, synthetic construct
GANGSVRVH

SEQ ID NO: 29270 - protein, 9 aa, synthetic construct
GANGSVKLF

SEQ ID NO: 29271 - protein, 9 aa, synthetic construct
GANGSLHLR

SEQ ID NO: 29272 - protein, 9 aa, synthetic construct
GANGSLHVY

SEQ ID NO: 29273 - protein, 9 aa, synthetic construct
GANGSLHVK

SEQ ID NO: 29274 - protein, 9 aa, synthetic construct
GANGSLKLH

SEQ ID NO: 29275 - protein, 9 aa, synthetic construct
PLPASLHVR

SEQ ID NO: 29276 - protein, 9 aa, synthetic construct
GANGSAHLY

SEQ ID NO: 29277 - protein, 9 aa, synthetic construct
GANGSAHLR

SEQ ID NO: 29278 - protein, 9 aa, synthetic construct
GANGSAHLH

SEQ ID NO: 29279 - protein, 9 aa, synthetic construct
GANGSAHLK

SEQ ID NO: 29280 - protein, 9 aa, synthetic construct
GANGSAHLF

SEQ ID NO: 29281 - protein, 9 aa, synthetic construct
GANGSAHVY

SEQ ID NO: 29282 - protein, 9 aa, synthetic construct
GANGSAHVK

SEQ ID NO: 29283 - protein, 9 aa, synthetic construct
GANGSARLY

SEQ ID NO: 29284 - protein, 9 aa, synthetic construct
GANGSAKLR

SEQ ID NO: 29285 - protein, 9 aa, synthetic construct
GANGSAKLH

SEQ ID NO: 29286 - protein, 9 aa, synthetic construct
PLPASLHVF

SEQ ID NO: 29287 - protein, 9 aa, synthetic construct
GANGSIRLH

SEQ ID NO: 29288 - protein, 9 aa, synthetic construct
GANGSIRVY

SEQ ID NO: 29289 - protein, 9 aa, synthetic construct
GANGSIRVR

SEQ ID NO: 29290 - protein, 9 aa, synthetic construct
GANGSIRVH

SEQ ID NO: 29291 - protein, 9 aa, synthetic construct
GANGSIRVK

SEQ ID NO: 29292 - protein, 9 aa, synthetic construct
GANGSIRVF

SEQ ID NO: 29293 - protein, 9 aa, synthetic construct
GANGSGHLF

SEQ ID NO: 29294 - protein, 9 aa, synthetic construct
GANGSGHVY

SEQ ID NO: 29295 - protein, 9 aa, synthetic construct
GANGSGRLY

SEQ ID NO: 29296 - protein, 9 aa, synthetic construct
GANGSGRLF

SEQ ID NO: 29297 - protein, 9 aa, synthetic construct
GANGSGKLY

SEQ ID NO: 29298 - protein, 9 aa, synthetic construct
GANGSGKLF

SEQ ID NO: 29299 - protein, 9 aa, synthetic construct
GANGVVHLH

SEQ ID NO: 29300 - protein, 9 aa, synthetic construct
GANGVVHVR

SEQ ID NO: 29301 - protein, 9 aa, synthetic construct
GANGVVRLF

SEQ ID NO: 29302 - protein, 9 aa, synthetic construct
GANGVVKLH

SEQ ID NO: 29303 - protein, 9 aa, synthetic construct
GANGVVKLF

SEQ ID NO: 29304 - protein, 9 aa, synthetic construct
GANGVLHVR

SEQ ID NO: 29305 - protein, 9 aa, synthetic construct
GANGVLRVY

SEQ ID NO: 29306 - protein, 9 aa, synthetic construct
PLNGSIKLY

SEQ ID NO: 29307 - protein, 9 aa, synthetic construct
PLPASLKLY

SEQ ID NO: 29308 - protein, 9 aa, synthetic construct
GANGVLKLY

SEQ ID NO: 29309 - protein, 9 aa, synthetic construct
GANGVLKLF

SEQ ID NO: 29310 - protein, 9 aa, synthetic construct
GANGVAHLY

SEQ ID NO: 29311 - protein, 9 aa, synthetic construct
GANGVAHLR

SEQ ID NO: 29312 - protein, 9 aa, synthetic construct
GANGVAHVK

SEQ ID NO: 29313 - protein, 9 aa, synthetic construct
GANGVAHVF

SEQ ID NO: 29314 - protein, 9 aa, synthetic construct
GANGVARVH

SEQ ID NO: 29315 - protein, 9 aa, synthetic construct
GANGVARVF

SEQ ID NO: 29316 - protein, 9 aa, synthetic construct
GANGVAKLH

SEQ ID NO: 29317 - protein, 9 aa, synthetic construct
GANGVAKVY

SEQ ID NO: 29318 - protein, 9 aa, synthetic construct
PLPASLKVY

SEQ ID NO: 29319 - protein, 9 aa, synthetic construct
GANGVIRLY

SEQ ID NO: 29320 - protein, 9 aa, synthetic construct
GANGVGHVF

SEQ ID NO: 29321 - protein, 9 aa, synthetic construct
GANGVGRLF

SEQ ID NO: 29322 - protein, 9 aa, synthetic construct
GANGVGRVY

SEQ ID NO: 29323 - protein, 9 aa, synthetic construct
GANGVGRVH

SEQ ID NO: 29324 - protein, 9 aa, synthetic construct
GANGVGKVF

SEQ ID NO: 29325 - protein, 9 aa, synthetic construct
GANGGVHLR

SEQ ID NO: 29326 - protein, 9 aa, synthetic construct
GANGGVHVR

SEQ ID NO: 29327 - protein, 9 aa, synthetic construct
GANGGVHVF

SEQ ID NO: 29328 - protein, 9 aa, synthetic construct
PLPASAHLR

SEQ ID NO: 29329 - protein, 9 aa, synthetic construct
GANGGVRVK

SEQ ID NO: 29330 - protein, 9 aa, synthetic construct
GANGGVRVF

SEQ ID NO: 29331 - protein, 9 aa, synthetic construct
GANGGVKLF

SEQ ID NO: 29332 - protein, 9 aa, synthetic construct
GANGGVKVY

SEQ ID NO: 29333 - protein, 9 aa, synthetic construct
GANGGVKVH

SEQ ID NO: 29334 - protein, 9 aa, synthetic construct
PLPASAHLK

SEQ ID NO: 29335 - protein, 9 aa, synthetic construct
GANGGLHVK

SEQ ID NO: 29336 - protein, 9 aa, synthetic construct
PLPASAHVR

SEQ ID NO: 29337 - protein, 9 aa, synthetic construct
GANGGARVF

SEQ ID NO: 29338 - protein, 9 aa, synthetic construct
PLPASAHVF

SEQ ID NO: 29339 - protein, 9 aa, synthetic construct
GANGGIHLH

SEQ ID NO: 29340 - protein, 9 aa, synthetic construct
GANGGIHLK

SEQ ID NO: 29341 - protein, 9 aa, synthetic construct
GANGGIHLF

SEQ ID NO: 29342 - protein, 9 aa, synthetic construct
PLPASARLY

SEQ ID NO: 29343 - protein, 9 aa, synthetic construct
GANGGIRLF

SEQ ID NO: 29344 - protein, 9 aa, synthetic construct
GANGGIKLY

SEQ ID NO: 29345 - protein, 9 aa, synthetic construct
GANGGGHLY

SEQ ID NO: 29346 - protein, 9 aa, synthetic construct
GANGGGRLY

SEQ ID NO: 29347 - protein, 9 aa, synthetic construct
GANGGGRVH

SEQ ID NO: 29348 - protein, 9 aa, synthetic construct
GANGGGRVF

SEQ ID NO: 29349 - protein, 9 aa, synthetic construct
PLPASARLF

SEQ ID NO: 29350 - protein, 9 aa, synthetic construct
GANGGGKLY

SEQ ID NO: 29351 - protein, 9 aa, synthetic construct
GANGGGKLK

SEQ ID NO: 29352 - protein, 9 aa, synthetic construct
GANGGGKVY

SEQ ID NO: 29353 - protein, 9 aa, synthetic construct
GANGGGKVH

SEQ ID NO: 29354 - protein, 9 aa, synthetic construct
GANGGGKVF

SEQ ID NO: 29355 - protein, 9 aa, synthetic construct
GANAAVHLY

SEQ ID NO: 29356 - protein, 9 aa, synthetic construct
GANAAVHLK

SEQ ID NO: 29357 - protein, 9 aa, synthetic construct
GANAAVHVR

SEQ ID NO: 29358 - protein, 9 aa, synthetic construct
GANAAVHVF

SEQ ID NO: 29359 - protein, 9 aa, synthetic construct
GANAAVRLH

SEQ ID NO: 29360 - protein, 9 aa, synthetic construct
GANAAVRLF

SEQ ID NO: 29361 - protein, 9 aa, synthetic construct
GANAAVRVY

SEQ ID NO: 29362 - protein, 9 aa, synthetic construct
GANAAVRVK

SEQ ID NO: 29363 - protein, 9 aa, synthetic construct
GANAAVKLY

SEQ ID NO: 29364 - protein, 9 aa, synthetic construct
GANAAVKLH

SEQ ID NO: 29365 - protein, 9 aa, synthetic construct
GANAAVKVR

SEQ ID NO: 29366 - protein, 9 aa, synthetic construct
GANAAVKVK

SEQ ID NO: 29367 - protein, 9 aa, synthetic construct
GANAAVKVF

SEQ ID NO: 29368 - protein, 9 aa, synthetic construct
GANAALHLH

SEQ ID NO: 29369 - protein, 9 aa, synthetic construct
GANAALHLF

SEQ ID NO: 29370 - protein, 9 aa, synthetic construct
GANAALHVY

SEQ ID NO: 29371 - protein, 9 aa, synthetic construct
GANAALHVR

SEQ ID NO: 29372 - protein, 9 aa, synthetic construct
GANAALHVH

SEQ ID NO: 29373 - protein, 9 aa, synthetic construct
GANAALHVK

SEQ ID NO: 29374 - protein, 9 aa, synthetic construct
GANAALHVF

SEQ ID NO: 29375 - protein, 9 aa, synthetic construct
PLPASARVF

SEQ ID NO: 29376 - protein, 9 aa, synthetic construct
GANAALRVK

SEQ ID NO: 29377 - protein, 9 aa, synthetic construct
PLPASAKLY

SEQ ID NO: 29378 - protein, 9 aa, synthetic construct
GANAALKVY

SEQ ID NO: 29379 - protein, 9 aa, synthetic construct
GANAALKVF

SEQ ID NO: 29380 - protein, 9 aa, synthetic construct
GANAAAHLY

SEQ ID NO: 29381 - protein, 9 aa, synthetic construct
GANAAAHLR

SEQ ID NO: 29382 - protein, 9 aa, synthetic construct
GANAAAHLK

SEQ ID NO: 29383 - protein, 9 aa, synthetic construct
GANAAAHVK

SEQ ID NO: 29384 - protein, 9 aa, synthetic construct
GANAAARLF

SEQ ID NO: 29385 - protein, 9 aa, synthetic construct
GANAAARVY

SEQ ID NO: 29386 - protein, 9 aa, synthetic construct
GANAAARVR

SEQ ID NO: 29387 - protein, 9 aa, synthetic construct
GANAAARVF

SEQ ID NO: 29388 - protein, 9 aa, synthetic construct
GANAAAKLF

SEQ ID NO: 29389 - protein, 9 aa, synthetic construct
GANAAAKVR

SEQ ID NO: 29390 - protein, 9 aa, synthetic construct
GANAAAKVF

SEQ ID NO: 29391 - protein, 9 aa, synthetic construct
GANAAIHVY

SEQ ID NO: 29392 - protein, 9 aa, synthetic construct
GANAAIHVF

SEQ ID NO: 29393 - protein, 9 aa, synthetic construct
PLPASAKVY

SEQ ID NO: 29394 - protein, 9 aa, synthetic construct
GANAAIKLK

SEQ ID NO: 29395 - protein, 9 aa, synthetic construct
GANAAIKLF

SEQ ID NO: 29396 - protein, 9 aa, synthetic construct
GANAAIKVR

SEQ ID NO: 29397 - protein, 9 aa, synthetic construct
GANAAIKVH

SEQ ID NO: 29398 - protein, 9 aa, synthetic construct
GANAAGHLY

SEQ ID NO: 29399 - protein, 9 aa, synthetic construct
GANAAGHLK

SEQ ID NO: 29400 - protein, 9 aa, synthetic construct
GANAAGHVY

SEQ ID NO: 29401 - protein, 9 aa, synthetic construct
GANAAGRLY

SEQ ID NO: 29402 - protein, 9 aa, synthetic construct
GANAAGRLF

SEQ ID NO: 29403 - protein, 9 aa, synthetic construct
GANAAGRVK

SEQ ID NO: 29404 - protein, 9 aa, synthetic construct
GANAAGKLY

SEQ ID NO: 29405 - protein, 9 aa, synthetic construct
GANAAGKLH

SEQ ID NO: 29406 - protein, 9 aa, synthetic construct
GANAAGKLF

SEQ ID NO: 29407 - protein, 9 aa, synthetic construct
GANAAGKVY

SEQ ID NO: 29408 - protein, 9 aa, synthetic construct
GANAAGKVH

SEQ ID NO: 29409 - protein, 9 aa, synthetic construct
PLPASIHLY

SEQ ID NO: 29410 - protein, 9 aa, synthetic construct
GANATVHVY

SEQ ID NO: 29411 - protein, 9 aa, synthetic construct
GANATVHVR

SEQ ID NO: 29412 - protein, 9 aa, synthetic construct
GANATVHVF

SEQ ID NO: 29413 - protein, 9 aa, synthetic construct
PLPASIHLR

SEQ ID NO: 29414 - protein, 9 aa, synthetic construct
GANATVRVH

SEQ ID NO: 29415 - protein, 9 aa, synthetic construct
GANATVRVF

SEQ ID NO: 29416 - protein, 9 aa, synthetic construct
GANATVKLY

SEQ ID NO: 29417 - protein, 9 aa, synthetic construct
GANATVKLR

SEQ ID NO: 29418 - protein, 9 aa, synthetic construct
GANATVKVH

SEQ ID NO: 29419 - protein, 9 aa, synthetic construct
GANATVKVF

SEQ ID NO: 29420 - protein, 9 aa, synthetic construct
GANATLHLH

SEQ ID NO: 29421 - protein, 9 aa, synthetic construct
GANATLHLK

SEQ ID NO: 29422 - protein, 9 aa, synthetic construct
GANATLHVY

SEQ ID NO: 29423 - protein, 9 aa, synthetic construct
PLPASIHVR

SEQ ID NO: 29424 - protein, 9 aa, synthetic construct
GANATAHVF

SEQ ID NO: 29425 - protein, 9 aa, synthetic construct
PLPASIHVH

SEQ ID NO: 29426 - protein, 9 aa, synthetic construct
GANATARLF

SEQ ID NO: 29427 - protein, 9 aa, synthetic construct
PLPASIHVK

SEQ ID NO: 29428 - protein, 9 aa, synthetic construct
GANATAKLF

SEQ ID NO: 29429 - protein, 9 aa, synthetic construct
GANATAKVH

SEQ ID NO: 29430 - protein, 9 aa, synthetic construct
GANATIHVY

SEQ ID NO: 29431 - protein, 9 aa, synthetic construct
PLPASIRLY

SEQ ID NO: 29432 - protein, 9 aa, synthetic construct
GANATIRLY

SEQ ID NO: 29433 - protein, 9 aa, synthetic construct
GANATIRVY

SEQ ID NO: 29434 - protein, 9 aa, synthetic construct
GANATIRVH

SEQ ID NO: 29435 - protein, 9 aa, synthetic construct
GANATIRVF

SEQ ID NO: 29436 - protein, 9 aa, synthetic construct
GANATIKLY

SEQ ID NO: 29437 - protein, 9 aa, synthetic construct
GANATIKLH

SEQ ID NO: 29438 - protein, 9 aa, synthetic construct
GANATIKLK

SEQ ID NO: 29439 - protein, 9 aa, synthetic construct
GANATIKLF

SEQ ID NO: 29440 - protein, 9 aa, synthetic construct
PLPASIRLH

SEQ ID NO: 29441 - protein, 9 aa, synthetic construct
GANATGHLK

SEQ ID NO: 29442 - protein, 9 aa, synthetic construct
GANATGHVK

SEQ ID NO: 29443 - protein, 9 aa, synthetic construct
GANATGRLY

SEQ ID NO: 29444 - protein, 9 aa, synthetic construct
GANATGRLR

SEQ ID NO: 29445 - protein, 9 aa, synthetic construct
GANATGRLH

SEQ ID NO: 29446 - protein, 9 aa, synthetic construct
GANATGRLF

SEQ ID NO: 29447 - protein, 9 aa, synthetic construct
GANATGRVY

SEQ ID NO: 29448 - protein, 9 aa, synthetic construct
GANATGKLH

SEQ ID NO: 29449 - protein, 9 aa, synthetic construct
GANATGKLF

SEQ ID NO: 29450 - protein, 9 aa, synthetic construct
GANATGKVF

SEQ ID NO: 29451 - protein, 9 aa, synthetic construct
GANASVHLR

SEQ ID NO: 29452 - protein, 9 aa, synthetic construct
GANASVKVY

SEQ ID NO: 29453 - protein, 9 aa, synthetic construct
GANASVKVK

SEQ ID NO: 29454 - protein, 9 aa, synthetic construct
GANASLHVY

SEQ ID NO: 29455 - protein, 9 aa, synthetic construct
GANASLHVR

SEQ ID NO: 29456 - protein, 9 aa, synthetic construct
GANASLHVK

SEQ ID NO: 29457 - protein, 9 aa, synthetic construct
PLPASIRVF

SEQ ID NO: 29458 - protein, 9 aa, synthetic construct
GANASLRLH

SEQ ID NO: 29459 - protein, 9 aa, synthetic construct
GANASLRVF

SEQ ID NO: 29460 - protein, 9 aa, synthetic construct
PLPASIKLY

SEQ ID NO: 29461 - protein, 9 aa, synthetic construct
GANASLKVY

SEQ ID NO: 29462 - protein, 9 aa, synthetic construct
GANASLKVH

SEQ ID NO: 29463 - protein, 9 aa, synthetic construct
GANASAHVR

SEQ ID NO: 29464 - protein, 9 aa, synthetic construct
GANASAHVK

SEQ ID NO: 29465 - protein, 9 aa, synthetic construct
GANASARLY

SEQ ID NO: 29466 - protein, 9 aa, synthetic construct
GANASARVR

SEQ ID NO: 29467 - protein, 9 aa, synthetic construct
GANASARVK

SEQ ID NO: 29468 - protein, 9 aa, synthetic construct
GANASARVF

SEQ ID NO: 29469 - protein, 9 aa, synthetic construct
PLPASIKLK

SEQ ID NO: 29470 - protein, 9 aa, synthetic construct
GANASAKLF

SEQ ID NO: 29471 - protein, 9 aa, synthetic construct
GANASAKVY

SEQ ID NO: 29472 - protein, 9 aa, synthetic construct
GANASAKVH

SEQ ID NO: 29473 - protein, 9 aa, synthetic construct
GANASAKVF

SEQ ID NO: 29474 - protein, 9 aa, synthetic construct
PLPASIKLF

SEQ ID NO: 29475 - protein, 9 aa, synthetic construct
GANASIHLY

SEQ ID NO: 29476 - protein, 9 aa, synthetic construct
GANASIHLR

SEQ ID NO: 29477 - protein, 9 aa, synthetic construct
GANASIHVR

SEQ ID NO: 29478 - protein, 9 aa, synthetic construct
GANASIRLR

SEQ ID NO: 29479 - protein, 9 aa, synthetic construct
GANASIKLY

SEQ ID NO: 29480 - protein, 9 aa, synthetic construct
GANASIKLH

SEQ ID NO: 29481 - protein, 9 aa, synthetic construct
GANASIKLK

SEQ ID NO: 29482 - protein, 9 aa, synthetic construct
GANASIKVH

SEQ ID NO: 29483 - protein, 9 aa, synthetic construct
PLPASIKVH

SEQ ID NO: 29484 - protein, 9 aa, synthetic construct
GANASGHVK

SEQ ID NO: 29485 - protein, 9 aa, synthetic construct
GANASGRLY

SEQ ID NO: 29486 - protein, 9 aa, synthetic construct
GANASGRLR

SEQ ID NO: 29487 - protein, 9 aa, synthetic construct
GANASGRLH

SEQ ID NO: 29488 - protein, 9 aa, synthetic construct
GANASGRLK

SEQ ID NO: 29489 - protein, 9 aa, synthetic construct
GANASGRLF

SEQ ID NO: 29490 - protein, 9 aa, synthetic construct
GANASGRVR

SEQ ID NO: 29491 - protein, 9 aa, synthetic construct
GANASGRVH

SEQ ID NO: 29492 - protein, 9 aa, synthetic construct
GANASGKLY

SEQ ID NO: 29493 - protein, 9 aa, synthetic construct
GANASGKLH

SEQ ID NO: 29494 - protein, 9 aa, synthetic construct
GANASGKLF

SEQ ID NO: 29495 - protein, 9 aa, synthetic construct
GANASGKVY

SEQ ID NO: 29496 - protein, 9 aa, synthetic construct
GANASGKVK

SEQ ID NO: 29497 - protein, 9 aa, synthetic construct
PLNGSIKVH

SEQ ID NO: 29498 - protein, 9 aa, synthetic construct
GANAVVHLY

SEQ ID NO: 29499 - protein, 9 aa, synthetic construct
GANAVVHLH

SEQ ID NO: 29500 - protein, 9 aa, synthetic construct
GANAVVHVK

SEQ ID NO: 29501 - protein, 9 aa, synthetic construct
GANAVVRLH

SEQ ID NO: 29502 - protein, 9 aa, synthetic construct
GANAVVRVF

SEQ ID NO: 29503 - protein, 9 aa, synthetic construct
GANAVVKLY

SEQ ID NO: 29504 - protein, 9 aa, synthetic construct
GANAVVKLH

SEQ ID NO: 29505 - protein, 9 aa, synthetic construct
GANAVVKVY

SEQ ID NO: 29506 - protein, 9 aa, synthetic construct
GANAVVKVH

SEQ ID NO: 29507 - protein, 9 aa, synthetic construct
PLPASGHLF

SEQ ID NO: 29508 - protein, 9 aa, synthetic construct
GANAVLRLY

SEQ ID NO: 29509 - protein, 9 aa, synthetic construct
GANAVLRLH

SEQ ID NO: 29510 - protein, 9 aa, synthetic construct
GANAVLRLF

SEQ ID NO: 29511 - protein, 9 aa, synthetic construct
PLPASGHVY

SEQ ID NO: 29512 - protein, 9 aa, synthetic construct
GANAVLKVY

SEQ ID NO: 29513 - protein, 9 aa, synthetic construct
PLPASGHVR

SEQ ID NO: 29514 - protein, 9 aa, synthetic construct
GANAVARLY

SEQ ID NO: 29515 - protein, 9 aa, synthetic construct
PLPASGHVK

SEQ ID NO: 29516 - protein, 9 aa, synthetic construct
GANAVAKLH

SEQ ID NO: 29517 - protein, 9 aa, synthetic construct
GANAVAKVR

SEQ ID NO: 29518 - protein, 9 aa, synthetic construct
GANAVAKVF

SEQ ID NO: 29519 - protein, 9 aa, synthetic construct
PLPASGRLY

SEQ ID NO: 29520 - protein, 9 aa, synthetic construct
GANAVIRVH

SEQ ID NO: 29521 - protein, 9 aa, synthetic construct
PLPASGRLR

SEQ ID NO: 29522 - protein, 9 aa, synthetic construct
PLPASGRLH

SEQ ID NO: 29523 - protein, 9 aa, synthetic construct
GANAVGHLR

SEQ ID NO: 29524 - protein, 9 aa, synthetic construct
GANAVGHVY

SEQ ID NO: 29525 - protein, 9 aa, synthetic construct
GANAVGRVY

SEQ ID NO: 29526 - protein, 9 aa, synthetic construct
PLPASGRLF

SEQ ID NO: 29527 - protein, 9 aa, synthetic construct
GANAVGKLF

SEQ ID NO: 29528 - protein, 9 aa, synthetic construct
GANAVGKVY

SEQ ID NO: 29529 - protein, 9 aa, synthetic construct
PLPASGRVY

SEQ ID NO: 29530 - protein, 9 aa, synthetic construct
GANAGVRVY

SEQ ID NO: 29531 - protein, 9 aa, synthetic construct
GANAGVRVH

SEQ ID NO: 29532 - protein, 9 aa, synthetic construct
GANAGVRVF

SEQ ID NO: 29533 - protein, 9 aa, synthetic construct
GANAGVKVR

SEQ ID NO: 29534 - protein, 9 aa, synthetic construct
GANAGLRVF

SEQ ID NO: 29535 - protein, 9 aa, synthetic construct
PLPASGKLR

SEQ ID NO: 29536 - protein, 9 aa, synthetic construct
GANAGAHLY

SEQ ID NO: 29537 - protein, 9 aa, synthetic construct
PLPASGKLH

SEQ ID NO: 29538 - protein, 9 aa, synthetic construct
GANAGARLY

SEQ ID NO: 29539 - protein, 9 aa, synthetic construct
GANAGARVF

SEQ ID NO: 29540 - protein, 9 aa, synthetic construct
PLPASGKLK

SEQ ID NO: 29541 - protein, 9 aa, synthetic construct
PLPASGKLF

SEQ ID NO: 29542 - protein, 9 aa, synthetic construct
GANAGIHLY

SEQ ID NO: 29543 - protein, 9 aa, synthetic construct
GANAGIHLR

SEQ ID NO: 29544 - protein, 9 aa, synthetic construct
GANAGIHLH

SEQ ID NO: 29545 - protein, 9 aa, synthetic construct
GANAGIHLK

SEQ ID NO: 29546 - protein, 9 aa, synthetic construct
GANAGIHVY

SEQ ID NO: 29547 - protein, 9 aa, synthetic construct
GANAGIHVR

SEQ ID NO: 29548 - protein, 9 aa, synthetic construct
GANAGIHVF

SEQ ID NO: 29549 - protein, 9 aa, synthetic construct
PLPASGKVY

SEQ ID NO: 29550 - protein, 9 aa, synthetic construct
GANAGIRLH

SEQ ID NO: 29551 - protein, 9 aa, synthetic construct
GANAGIRLK

SEQ ID NO: 29552 - protein, 9 aa, synthetic construct
GANAGIRVF

SEQ ID NO: 29553 - protein, 9 aa, synthetic construct
GANAGIKLR

SEQ ID NO: 29554 - protein, 9 aa, synthetic construct
GANAGIKLH

SEQ ID NO: 29555 - protein, 9 aa, synthetic construct
GANAGIKLF

SEQ ID NO: 29556 - protein, 9 aa, synthetic construct
GANAGIKVY

SEQ ID NO: 29557 - protein, 9 aa, synthetic construct
GANAGIKVH

SEQ ID NO: 29558 - protein, 9 aa, synthetic construct
GANAGIKVF

SEQ ID NO: 29559 - protein, 9 aa, synthetic construct
GANAGGHLR

SEQ ID NO: 29560 - protein, 9 aa, synthetic construct
GANAGGHLH

SEQ ID NO: 29561 - protein, 9 aa, synthetic construct
GANAGGRLY

SEQ ID NO: 29562 - protein, 9 aa, synthetic construct
GANAGGRLR

SEQ ID NO: 29563 - protein, 9 aa, synthetic construct
GANAGGRVR

SEQ ID NO: 29564 - protein, 9 aa, synthetic construct
GANAGGKLF

SEQ ID NO: 29565 - protein, 9 aa, synthetic construct
GANAGGKVH

SEQ ID NO: 29566 - protein, 9 aa, synthetic construct
GANAGGKVK

SEQ ID NO: 29567 - protein, 9 aa, synthetic construct
PLPAVVHLY

SEQ ID NO: 29568 - protein, 9 aa, synthetic construct
GAQGAVHVH

SEQ ID NO: 29569 - protein, 9 aa, synthetic construct
GAQGAVHVF

SEQ ID NO: 29570 - protein, 9 aa, synthetic construct
GAQGAVRLY

SEQ ID NO: 29571 - protein, 9 aa, synthetic construct
PLPAVVHLH

SEQ ID NO: 29572 - protein, 9 aa, synthetic construct
GAQGAVKLF

SEQ ID NO: 29573 - protein, 9 aa, synthetic construct
GAQGAVKVY

SEQ ID NO: 29574 - protein, 9 aa, synthetic construct
PLPAVVHLK

SEQ ID NO: 29575 - protein, 9 aa, synthetic construct
GAQGALHLY

SEQ ID NO: 29576 - protein, 9 aa, synthetic construct
GAQGALHLR

SEQ ID NO: 29577 - protein, 9 aa, synthetic construct
GAQGALHLH

SEQ ID NO: 29578 - protein, 9 aa, synthetic construct
GAQGALHLK

SEQ ID NO: 29579 - protein, 9 aa, synthetic construct
GAQGALHVR

SEQ ID NO: 29580 - protein, 9 aa, synthetic construct
GAQGALHVK

SEQ ID NO: 29581 - protein, 9 aa, synthetic construct
GAQGALHVF

SEQ ID NO: 29582 - protein, 9 aa, synthetic construct
GAQGALKLH

SEQ ID NO: 29583 - protein, 9 aa, synthetic construct
GAQGALKVH

SEQ ID NO: 29584 - protein, 9 aa, synthetic construct
GAQGALKVF

SEQ ID NO: 29585 - protein, 9 aa, synthetic construct
GAQGAAHLY

SEQ ID NO: 29586 - protein, 9 aa, synthetic construct
GAQGAAHVF

SEQ ID NO: 29587 - protein, 9 aa, synthetic construct
GAQGAARLF

SEQ ID NO: 29588 - protein, 9 aa, synthetic construct
PLPAVVHVK

SEQ ID NO: 29589 - protein, 9 aa, synthetic construct
GAQGAAKLH

SEQ ID NO: 29590 - protein, 9 aa, synthetic construct
GAQGAAKVY

SEQ ID NO: 29591 - protein, 9 aa, synthetic construct
GAQGAAKVF

SEQ ID NO: 29592 - protein, 9 aa, synthetic construct
GAQGAIHLY

SEQ ID NO: 29593 - protein, 9 aa, synthetic construct
GAQGAIRLH

SEQ ID NO: 29594 - protein, 9 aa, synthetic construct
GAQGAIRLF

SEQ ID NO: 29595 - protein, 9 aa, synthetic construct
GAQGAIRVY

SEQ ID NO: 29596 - protein, 9 aa, synthetic construct
GAQGAIKLY

SEQ ID NO: 29597 - protein, 9 aa, synthetic construct
GAQGAIKLH

SEQ ID NO: 29598 - protein, 9 aa, synthetic construct
GAQGAIKLF

SEQ ID NO: 29599 - protein, 9 aa, synthetic construct
GAQGAIKVY

SEQ ID NO: 29600 - protein, 9 aa, synthetic construct
GAQGAIKVH

SEQ ID NO: 29601 - protein, 9 aa, synthetic construct
GAQGAGHLH

SEQ ID NO: 29602 - protein, 9 aa, synthetic construct
GAQGAGHLK

SEQ ID NO: 29603 - protein, 9 aa, synthetic construct
GAQGAGRLY

SEQ ID NO: 29604 - protein, 9 aa, synthetic construct
GAQGAGRLH

SEQ ID NO: 29605 - protein, 9 aa, synthetic construct
GAQGAGRVY

SEQ ID NO: 29606 - protein, 9 aa, synthetic construct
GAQGAGRVH

SEQ ID NO: 29607 - protein, 9 aa, synthetic construct
GAQGAGRVF

SEQ ID NO: 29608 - protein, 9 aa, synthetic construct
GAQGAGKLY

SEQ ID NO: 29609 - protein, 9 aa, synthetic construct
GAQGAGKLH

SEQ ID NO: 29610 - protein, 9 aa, synthetic construct
GAQGAGKLF

SEQ ID NO: 29611 - protein, 9 aa, synthetic construct
GAQGAGKVF

SEQ ID NO: 29612 - protein, 9 aa, synthetic construct
GAQGTVHVF

SEQ ID NO: 29613 - protein, 9 aa, synthetic construct
GAQGTVRLH

SEQ ID NO: 29614 - protein, 9 aa, synthetic construct
GAQGTVRVY

SEQ ID NO: 29615 - protein, 9 aa, synthetic construct
GAQGTVRVF

SEQ ID NO: 29616 - protein, 9 aa, synthetic construct
GAQGTLHLK

SEQ ID NO: 29617 - protein, 9 aa, synthetic construct
GAQGTLRLY

SEQ ID NO: 29618 - protein, 9 aa, synthetic construct
GAQGTAHLR

SEQ ID NO: 29619 - protein, 9 aa, synthetic construct
GAQGTAHVF

SEQ ID NO: 29620 - protein, 9 aa, synthetic construct
GAQGTARLY

SEQ ID NO: 29621 - protein, 9 aa, synthetic construct
GAQGTARVY

SEQ ID NO: 29622 - protein, 9 aa, synthetic construct
GAQGTARVF

SEQ ID NO: 29623 - protein, 9 aa, synthetic construct
GAQGTAKVY

SEQ ID NO: 29624 - protein, 9 aa, synthetic construct
GAQGTIHLR

SEQ ID NO: 29625 - protein, 9 aa, synthetic construct
GAQGTIHLH

SEQ ID NO: 29626 - protein, 9 aa, synthetic construct
GAQGTIHLF

SEQ ID NO: 29627 - protein, 9 aa, synthetic construct
GAQGTIRLF

SEQ ID NO: 29628 - protein, 9 aa, synthetic construct
GAQGTIKVF

SEQ ID NO: 29629 - protein, 9 aa, synthetic construct
GAQGTGHLR

SEQ ID NO: 29630 - protein, 9 aa, synthetic construct
GAQGTGHLH

SEQ ID NO: 29631 - protein, 9 aa, synthetic construct
GAQGTGHLK

SEQ ID NO: 29632 - protein, 9 aa, synthetic construct
GAQGTGHLF

SEQ ID NO: 29633 - protein, 9 aa, synthetic construct
GAQGTGHVR

SEQ ID NO: 29634 - protein, 9 aa, synthetic construct
GAQGTGHVK

SEQ ID NO: 29635 - protein, 9 aa, synthetic construct
GAQGTGHVF

SEQ ID NO: 29636 - protein, 9 aa, synthetic construct
GAQGTGRLY

SEQ ID NO: 29637 - protein, 9 aa, synthetic construct
GAQGTGRLF

SEQ ID NO: 29638 - protein, 9 aa, synthetic construct
GAQGTGRVY

SEQ ID NO: 29639 - protein, 9 aa, synthetic construct
GAQGTGKLY

SEQ ID NO: 29640 - protein, 9 aa, synthetic construct
GAQGTGKLH

SEQ ID NO: 29641 - protein, 9 aa, synthetic construct
GAQGTGKVY

SEQ ID NO: 29642 - protein, 9 aa, synthetic construct
GAQGTGKVF

SEQ ID NO: 29643 - protein, 9 aa, synthetic construct
PLNGSGHLK

SEQ ID NO: 29644 - protein, 9 aa, synthetic construct
GAQGSVHLF

SEQ ID NO: 29645 - protein, 9 aa, synthetic construct
GAQGSVHVR

SEQ ID NO: 29646 - protein, 9 aa, synthetic construct
GAQGSVHVK

SEQ ID NO: 29647 - protein, 9 aa, synthetic construct
GAQGSVRLR

SEQ ID NO: 29648 - protein, 9 aa, synthetic construct
GAQGSLHVK

SEQ ID NO: 29649 - protein, 9 aa, synthetic construct
GAQGSLRVY

SEQ ID NO: 29650 - protein, 9 aa, synthetic construct
GAQGSLKVH

SEQ ID NO: 29651 - protein, 9 aa, synthetic construct
GAQGSAHVF

SEQ ID NO: 29652 - protein, 9 aa, synthetic construct
GAQGSARLY

SEQ ID NO: 29653 - protein, 9 aa, synthetic construct
GAQGSARVY

SEQ ID NO: 29654 - protein, 9 aa, synthetic construct
GAQGSIHLY

SEQ ID NO: 29655 - protein, 9 aa, synthetic construct
GAQGSIHLH

SEQ ID NO: 29656 - protein, 9 aa, synthetic construct
GAQGSIHVR

SEQ ID NO: 29657 - protein, 9 aa, synthetic construct
GAQGSIHVH

SEQ ID NO: 29658 - protein, 9 aa, synthetic construct
PLNGSGHLF

SEQ ID NO: 29659 - protein, 9 aa, synthetic construct
GAQGSIRVR

SEQ ID NO: 29660 - protein, 9 aa, synthetic construct
GAQGSIRVF

SEQ ID NO: 29661 - protein, 9 aa, synthetic construct
GAQGSIKLH

SEQ ID NO: 29662 - protein, 9 aa, synthetic construct
GAQGSIKVY

SEQ ID NO: 29663 - protein, 9 aa, synthetic construct
GAQGSIKVH

SEQ ID NO: 29664 - protein, 9 aa, synthetic construct
GAQGSIKVF

SEQ ID NO: 29665 - protein, 9 aa, synthetic construct
GAQGSGHLY

SEQ ID NO: 29666 - protein, 9 aa, synthetic construct
GAQGSGHLR

SEQ ID NO: 29667 - protein, 9 aa, synthetic construct
GAQGSGHLK

SEQ ID NO: 29668 - protein, 9 aa, synthetic construct
GAQGSGRLF

SEQ ID NO: 29669 - protein, 9 aa, synthetic construct
PLPAVLRLF

SEQ ID NO: 29670 - protein, 9 aa, synthetic construct
GAQGSGKLY

SEQ ID NO: 29671 - protein, 9 aa, synthetic construct
GAQGSGKLF

SEQ ID NO: 29672 - protein, 9 aa, synthetic construct
GAQGSGKVY

SEQ ID NO: 29673 - protein, 9 aa, synthetic construct
GAQGVVHLY

SEQ ID NO: 29674 - protein, 9 aa, synthetic construct
GAQGVVHLH

SEQ ID NO: 29675 - protein, 9 aa, synthetic construct
GAQGVVHLF

SEQ ID NO: 29676 - protein, 9 aa, synthetic construct
GAQGVVHVR

SEQ ID NO: 29677 - protein, 9 aa, synthetic construct
GAQGVVHVH

SEQ ID NO: 29678 - protein, 9 aa, synthetic construct
GAQGVVHVF

SEQ ID NO: 29679 - protein, 9 aa, synthetic construct
GAQGVVRLH

SEQ ID NO: 29680 - protein, 9 aa, synthetic construct
GAQGVVRLF

SEQ ID NO: 29681 - protein, 9 aa, synthetic construct
GAQGVVKLY

SEQ ID NO: 29682 - protein, 9 aa, synthetic construct
GAQGVVKLH

SEQ ID NO: 29683 - protein, 9 aa, synthetic construct
GAQGVVKVF

SEQ ID NO: 29684 - protein, 9 aa, synthetic construct
PLPAVLRVK

SEQ ID NO: 29685 - protein, 9 aa, synthetic construct
GAQGVLHLR

SEQ ID NO: 29686 - protein, 9 aa, synthetic construct
GAQGVLHLK

SEQ ID NO: 29687 - protein, 9 aa, synthetic construct
GAQGVLHVY

SEQ ID NO: 29688 - protein, 9 aa, synthetic construct
GAQGVLHVR

SEQ ID NO: 29689 - protein, 9 aa, synthetic construct
GAQGVLHVK

SEQ ID NO: 29690 - protein, 9 aa, synthetic construct
GAQGVLHVF

SEQ ID NO: 29691 - protein, 9 aa, synthetic construct
GAQGVLRLY

SEQ ID NO: 29692 - protein, 9 aa, synthetic construct
GAQGVLRLF

SEQ ID NO: 29693 - protein, 9 aa, synthetic construct
GAQGVLRVH

SEQ ID NO: 29694 - protein, 9 aa, synthetic construct
GAQGVLKLR

SEQ ID NO: 29695 - protein, 9 aa, synthetic construct
GAQGVLKLF

SEQ ID NO: 29696 - protein, 9 aa, synthetic construct
GAQGVLKVY

SEQ ID NO: 29697 - protein, 9 aa, synthetic construct
GAQGVLKVK

SEQ ID NO: 29698 - protein, 9 aa, synthetic construct
GAQGVAHLR

SEQ ID NO: 29699 - protein, 9 aa, synthetic construct
GAQGVARLH

SEQ ID NO: 29700 - protein, 9 aa, synthetic construct
GAQGVARLF

SEQ ID NO: 29701 - protein, 9 aa, synthetic construct
GAQGVARVR

SEQ ID NO: 29702 - protein, 9 aa, synthetic construct
GAQGVARVF

SEQ ID NO: 29703 - protein, 9 aa, synthetic construct
GAQGVAKLY

SEQ ID NO: 29704 - protein, 9 aa, synthetic construct
GAQGVAKLF

SEQ ID NO: 29705 - protein, 9 aa, synthetic construct
GAQGVAKVR

SEQ ID NO: 29706 - protein, 9 aa, synthetic construct
PLPAVLKLF

SEQ ID NO: 29707 - protein, 9 aa, synthetic construct
GAQGVIHLR

SEQ ID NO: 29708 - protein, 9 aa, synthetic construct
GAQGVIHVR

SEQ ID NO: 29709 - protein, 9 aa, synthetic construct
GAQGVIKLY

SEQ ID NO: 29710 - protein, 9 aa, synthetic construct
GAQGVIKVY

SEQ ID NO: 29711 - protein, 9 aa, synthetic construct
GAQGVGHLR

SEQ ID NO: 29712 - protein, 9 aa, synthetic construct
GAQGVGHVK

SEQ ID NO: 29713 - protein, 9 aa, synthetic construct
GAQGVGKLK

SEQ ID NO: 29714 - protein, 9 aa, synthetic construct
PLNGSGHVR

SEQ ID NO: 29715 - protein, 9 aa, synthetic construct
PLPAVAHLY

SEQ ID NO: 29716 - protein, 9 aa, synthetic construct
GAQGGVHLK

SEQ ID NO: 29717 - protein, 9 aa, synthetic construct
GAQGGVHLF

SEQ ID NO: 29718 - protein, 9 aa, synthetic construct
GAQGGVHVR

SEQ ID NO: 29719 - protein, 9 aa, synthetic construct
GAQGGVRLY

SEQ ID NO: 29720 - protein, 9 aa, synthetic construct
GAQGGVRVY

SEQ ID NO: 29721 - protein, 9 aa, synthetic construct
GAQGGVKLY

SEQ ID NO: 29722 - protein, 9 aa, synthetic construct
GAQGGVKLR

SEQ ID NO: 29723 - protein, 9 aa, synthetic construct
GAQGGVKLH

SEQ ID NO: 29724 - protein, 9 aa, synthetic construct
GAQGGVKLF

SEQ ID NO: 29725 - protein, 9 aa, synthetic construct
GAQGGVKVY

SEQ ID NO: 29726 - protein, 9 aa, synthetic construct
GAQGGVKVH

SEQ ID NO: 29727 - protein, 9 aa, synthetic construct
PLPAVAHLK

SEQ ID NO: 29728 - protein, 9 aa, synthetic construct
GAQGGLHVK

SEQ ID NO: 29729 - protein, 9 aa, synthetic construct
PLPAVAHLF

SEQ ID NO: 29730 - protein, 9 aa, synthetic construct
GAQGGLRVF

SEQ ID NO: 29731 - protein, 9 aa, synthetic construct
GAQGGLKVF

SEQ ID NO: 29732 - protein, 9 aa, synthetic construct
PLPAVAHVR

SEQ ID NO: 29733 - protein, 9 aa, synthetic construct
GAQGGAHLR

SEQ ID NO: 29734 - protein, 9 aa, synthetic construct
GAQGGAHLH

SEQ ID NO: 29735 - protein, 9 aa, synthetic construct
GAQGGAHVF

SEQ ID NO: 29736 - protein, 9 aa, synthetic construct
GAQGGARVY

SEQ ID NO: 29737 - protein, 9 aa, synthetic construct
GAQGGARVF

SEQ ID NO: 29738 - protein, 9 aa, synthetic construct
GAQGGAKLY

SEQ ID NO: 29739 - protein, 9 aa, synthetic construct
GAQGGAKLH

SEQ ID NO: 29740 - protein, 9 aa, synthetic construct
PLPAVAHVF

SEQ ID NO: 29741 - protein, 9 aa, synthetic construct
GAQGGIHLY

SEQ ID NO: 29742 - protein, 9 aa, synthetic construct
GAQGGIHLH

SEQ ID NO: 29743 - protein, 9 aa, synthetic construct
GAQGGIHVR

SEQ ID NO: 29744 - protein, 9 aa, synthetic construct
GAQGGIHVF

SEQ ID NO: 29745 - protein, 9 aa, synthetic construct
GAQGGIRLY

SEQ ID NO: 29746 - protein, 9 aa, synthetic construct
GAQGGIRLH

SEQ ID NO: 29747 - protein, 9 aa, synthetic construct
GAQGGIRLK

SEQ ID NO: 29748 - protein, 9 aa, synthetic construct
GAQGGIRVH

SEQ ID NO: 29749 - protein, 9 aa, synthetic construct
GAQGGIKLH

SEQ ID NO: 29750 - protein, 9 aa, synthetic construct
GAQGGIKVY

SEQ ID NO: 29751 - protein, 9 aa, synthetic construct
GAQGGIKVF

SEQ ID NO: 29752 - protein, 9 aa, synthetic construct
PLPAVARLH

SEQ ID NO: 29753 - protein, 9 aa, synthetic construct
GAQGGGHLF

SEQ ID NO: 29754 - protein, 9 aa, synthetic construct
GAQGGGRVF

SEQ ID NO: 29755 - protein, 9 aa, synthetic construct
PLPAVARLF

SEQ ID NO: 29756 - protein, 9 aa, synthetic construct
GAQGGGKLH

SEQ ID NO: 29757 - protein, 9 aa, synthetic construct
GAQGGGKVY

SEQ ID NO: 29758 - protein, 9 aa, synthetic construct
GAQGGGKVF

SEQ ID NO: 29759 - protein, 9 aa, synthetic construct
GAQAAVHLH

SEQ ID NO: 29760 - protein, 9 aa, synthetic construct
GAQAAVHLK

SEQ ID NO: 29761 - protein, 9 aa, synthetic construct
GAQAAVHLF

SEQ ID NO: 29762 - protein, 9 aa, synthetic construct
GAQAAVHVY

SEQ ID NO: 29763 - protein, 9 aa, synthetic construct
GAQAAVHVR

SEQ ID NO: 29764 - protein, 9 aa, synthetic construct
GAQAAVHVH

SEQ ID NO: 29765 - protein, 9 aa, synthetic construct
GAQAAVHVK

SEQ ID NO: 29766 - protein, 9 aa, synthetic construct
GAQAAVHVF

SEQ ID NO: 29767 - protein, 9 aa, synthetic construct
GAQAAVRLY

SEQ ID NO: 29768 - protein, 9 aa, synthetic construct
GAQAAVRLH

SEQ ID NO: 29769 - protein, 9 aa, synthetic construct
GAQAAVRVH

SEQ ID NO: 29770 - protein, 9 aa, synthetic construct
PLPAVARVH

SEQ ID NO: 29771 - protein, 9 aa, synthetic construct
GAQAAVKLY

SEQ ID NO: 29772 - protein, 9 aa, synthetic construct
GAQAAVKLF

SEQ ID NO: 29773 - protein, 9 aa, synthetic construct
GAQAAVKVH

SEQ ID NO: 29774 - protein, 9 aa, synthetic construct
GAQAALHVR

SEQ ID NO: 29775 - protein, 9 aa, synthetic construct
GAQAALHVF

SEQ ID NO: 29776 - protein, 9 aa, synthetic construct
GAQAALRLH

SEQ ID NO: 29777 - protein, 9 aa, synthetic construct
GAQAALRVY

SEQ ID NO: 29778 - protein, 9 aa, synthetic construct
GAQAALRVH

SEQ ID NO: 29779 - protein, 9 aa, synthetic construct
GAQAALRVF

SEQ ID NO: 29780 - protein, 9 aa, synthetic construct
PLNGSGHVK

SEQ ID NO: 29781 - protein, 9 aa, synthetic construct
GAQAALKLF

SEQ ID NO: 29782 - protein, 9 aa, synthetic construct
GAQAALKVY

SEQ ID NO: 29783 - protein, 9 aa, synthetic construct
PLPAVAKLH

SEQ ID NO: 29784 - protein, 9 aa, synthetic construct
GAQAAARLY

SEQ ID NO: 29785 - protein, 9 aa, synthetic construct
GAQAAARVR

SEQ ID NO: 29786 - protein, 9 aa, synthetic construct
GAQAAAKLF

SEQ ID NO: 29787 - protein, 9 aa, synthetic construct
GAQAAIHLY

SEQ ID NO: 29788 - protein, 9 aa, synthetic construct
GAQAAIHLR

SEQ ID NO: 29789 - protein, 9 aa, synthetic construct
GAQAAIHLH

SEQ ID NO: 29790 - protein, 9 aa, synthetic construct
GAQAAIHLK

SEQ ID NO: 29791 - protein, 9 aa, synthetic construct
GAQAAIHLF

SEQ ID NO: 29792 - protein, 9 aa, synthetic construct
GAQAAIHVR

SEQ ID NO: 29793 - protein, 9 aa, synthetic construct
GAQAAIRLH

SEQ ID NO: 29794 - protein, 9 aa, synthetic construct
GAQAAIRLF

SEQ ID NO: 29795 - protein, 9 aa, synthetic construct
PLPAVAKVR

SEQ ID NO: 29796 - protein, 9 aa, synthetic construct
GAQAAIKLH

SEQ ID NO: 29797 - protein, 9 aa, synthetic construct
GAQAAIKLK

SEQ ID NO: 29798 - protein, 9 aa, synthetic construct
GAQAAIKLF

SEQ ID NO: 29799 - protein, 9 aa, synthetic construct
GAQAAIKVR

SEQ ID NO: 29800 - protein, 9 aa, synthetic construct
GAQAAIKVH

SEQ ID NO: 29801 - protein, 9 aa, synthetic construct
GAQAAIKVF

SEQ ID NO: 29802 - protein, 9 aa, synthetic construct
GAQAAGHVY

SEQ ID NO: 29803 - protein, 9 aa, synthetic construct
GAQAAGHVK

SEQ ID NO: 29804 - protein, 9 aa, synthetic construct
GAQAAGRLY

SEQ ID NO: 29805 - protein, 9 aa, synthetic construct
GAQAAGRVK

SEQ ID NO: 29806 - protein, 9 aa, synthetic construct
PLPAVAKVF

SEQ ID NO: 29807 - protein, 9 aa, synthetic construct
GAQAAGKVH

SEQ ID NO: 29808 - protein, 9 aa, synthetic construct
GAQATVHVR

SEQ ID NO: 29809 - protein, 9 aa, synthetic construct
GAQATVHVF

SEQ ID NO: 29810 - protein, 9 aa, synthetic construct
PLPAVIHLR

SEQ ID NO: 29811 - protein, 9 aa, synthetic construct
GAQATVRLR

SEQ ID NO: 29812 - protein, 9 aa, synthetic construct
GAQATVRLH

SEQ ID NO: 29813 - protein, 9 aa, synthetic construct
GAQATVRVH

SEQ ID NO: 29814 - protein, 9 aa, synthetic construct
PLPAVIHLH

SEQ ID NO: 29815 - protein, 9 aa, synthetic construct
GAQATVKVF

SEQ ID NO: 29816 - protein, 9 aa, synthetic construct
GAQATLHLR

SEQ ID NO: 29817 - protein, 9 aa, synthetic construct
GAQATLHLK

SEQ ID NO: 29818 - protein, 9 aa, synthetic construct
GAQATLHLF

SEQ ID NO: 29819 - protein, 9 aa, synthetic construct
PLPAVIHLF

SEQ ID NO: 29820 - protein, 9 aa, synthetic construct
GAQATLRVH

SEQ ID NO: 29821 - protein, 9 aa, synthetic construct
PLPAVIHVY

SEQ ID NO: 29822 - protein, 9 aa, synthetic construct
GAQATLKLY

SEQ ID NO: 29823 - protein, 9 aa, synthetic construct
GAQATLKVF

SEQ ID NO: 29824 - protein, 9 aa, synthetic construct
GAQATAHLK

SEQ ID NO: 29825 - protein, 9 aa, synthetic construct
GAQATAHVF

SEQ ID NO: 29826 - protein, 9 aa, synthetic construct
PLPAVIHVH

SEQ ID NO: 29827 - protein, 9 aa, synthetic construct
GAQATAKLY

SEQ ID NO: 29828 - protein, 9 aa, synthetic construct
GAQATAKLH

SEQ ID NO: 29829 - protein, 9 aa, synthetic construct
GAQATAKVH

SEQ ID NO: 29830 - protein, 9 aa, synthetic construct
GAQATAKVF

SEQ ID NO: 29831 - protein, 9 aa, synthetic construct
PLPAVIHVF

SEQ ID NO: 29832 - protein, 9 aa, synthetic construct
GAQATIHLY

SEQ ID NO: 29833 - protein, 9 aa, synthetic construct
GAQATIHLR

SEQ ID NO: 29834 - protein, 9 aa, synthetic construct
GAQATIHLF

SEQ ID NO: 29835 - protein, 9 aa, synthetic construct
GAQATIHVY

SEQ ID NO: 29836 - protein, 9 aa, synthetic construct
GAQATIHVK

SEQ ID NO: 29837 - protein, 9 aa, synthetic construct
GAQATIRLH

SEQ ID NO: 29838 - protein, 9 aa, synthetic construct
GAQATIRVH

SEQ ID NO: 29839 - protein, 9 aa, synthetic construct
PLPAVIRLR

SEQ ID NO: 29840 - protein, 9 aa, synthetic construct
GAQATIKLY

SEQ ID NO: 29841 - protein, 9 aa, synthetic construct
GAQATIKVY

SEQ ID NO: 29842 - protein, 9 aa, synthetic construct
GAQATIKVF

SEQ ID NO: 29843 - protein, 9 aa, synthetic construct
GAQATGHLR

SEQ ID NO: 29844 - protein, 9 aa, synthetic construct
GAQATGHVY

SEQ ID NO: 29845 - protein, 9 aa, synthetic construct
GAQATGHVK

SEQ ID NO: 29846 - protein, 9 aa, synthetic construct
GAQATGHVF

SEQ ID NO: 29847 - protein, 9 aa, synthetic construct
GAQATGRLY

SEQ ID NO: 29848 - protein, 9 aa, synthetic construct
GAQATGRLK

SEQ ID NO: 29849 - protein, 9 aa, synthetic construct
GAQATGRVY

SEQ ID NO: 29850 - protein, 9 aa, synthetic construct
GAQATGRVF

SEQ ID NO: 29851 - protein, 9 aa, synthetic construct
GAQATGKLY

SEQ ID NO: 29852 - protein, 9 aa, synthetic construct
GAQATGKLF

SEQ ID NO: 29853 - protein, 9 aa, synthetic construct
GAQATGKVH

SEQ ID NO: 29854 - protein, 9 aa, synthetic construct
GAQASVHLR

SEQ ID NO: 29855 - protein, 9 aa, synthetic construct
GAQASVHLH

SEQ ID NO: 29856 - protein, 9 aa, synthetic construct
GAQASVHLK

SEQ ID NO: 29857 - protein, 9 aa, synthetic construct
GAQASVHVR

SEQ ID NO: 29858 - protein, 9 aa, synthetic construct
GAQASVHVF

SEQ ID NO: 29859 - protein, 9 aa, synthetic construct
GAQASVRLY

SEQ ID NO: 29860 - protein, 9 aa, synthetic construct
GAQASVRLR

SEQ ID NO: 29861 - protein, 9 aa, synthetic construct
GAQASVRVY

SEQ ID NO: 29862 - protein, 9 aa, synthetic construct
GAQASVRVF

SEQ ID NO: 29863 - protein, 9 aa, synthetic construct
GAQASVKLY

SEQ ID NO: 29864 - protein, 9 aa, synthetic construct
GAQASVKLH

SEQ ID NO: 29865 - protein, 9 aa, synthetic construct
GAQASVKVY

SEQ ID NO: 29866 - protein, 9 aa, synthetic construct
GAQASVKVK

SEQ ID NO: 29867 - protein, 9 aa, synthetic construct
PLPAVIRVK

SEQ ID NO: 29868 - protein, 9 aa, synthetic construct
GAQASLHLK

SEQ ID NO: 29869 - protein, 9 aa, synthetic construct
GAQASLHLF

SEQ ID NO: 29870 - protein, 9 aa, synthetic construct
GAQASLHVY

SEQ ID NO: 29871 - protein, 9 aa, synthetic construct
GAQASLHVR

SEQ ID NO: 29872 - protein, 9 aa, synthetic construct
GAQASLHVH

SEQ ID NO: 29873 - protein, 9 aa, synthetic construct
GAQASLHVK

SEQ ID NO: 29874 - protein, 9 aa, synthetic construct
PLNGSGRLR

SEQ ID NO: 29875 - protein, 9 aa, synthetic construct
GAQASLKVH

SEQ ID NO: 29876 - protein, 9 aa, synthetic construct
GAQASAHLR

SEQ ID NO: 29877 - protein, 9 aa, synthetic construct
GAQASAHVR

SEQ ID NO: 29878 - protein, 9 aa, synthetic construct
GAQASAHVH

SEQ ID NO: 29879 - protein, 9 aa, synthetic construct
GAQASAHVK

SEQ ID NO: 29880 - protein, 9 aa, synthetic construct
GAQASAHVF

SEQ ID NO: 29881 - protein, 9 aa, synthetic construct
GAQASARLY

SEQ ID NO: 29882 - protein, 9 aa, synthetic construct
GAQASARVF

SEQ ID NO: 29883 - protein, 9 aa, synthetic construct
GAQASAKLY

SEQ ID NO: 29884 - protein, 9 aa, synthetic construct
GAQASAKLF

SEQ ID NO: 29885 - protein, 9 aa, synthetic construct
GAQASIHLY

SEQ ID NO: 29886 - protein, 9 aa, synthetic construct
GAQASIHLR

SEQ ID NO: 29887 - protein, 9 aa, synthetic construct
GAQASIHLK

SEQ ID NO: 29888 - protein, 9 aa, synthetic construct
GAQASIHVY

SEQ ID NO: 29889 - protein, 9 aa, synthetic construct
GAQASIHVR

SEQ ID NO: 29890 - protein, 9 aa, synthetic construct
GAQASIHVH

SEQ ID NO: 29891 - protein, 9 aa, synthetic construct
GAQASIHVK

SEQ ID NO: 29892 - protein, 9 aa, synthetic construct
GAQASIRLH

SEQ ID NO: 29893 - protein, 9 aa, synthetic construct
GAQASIRLF

SEQ ID NO: 29894 - protein, 9 aa, synthetic construct
GAQASIRVF

SEQ ID NO: 29895 - protein, 9 aa, synthetic construct
GAQASIKLY

SEQ ID NO: 29896 - protein, 9 aa, synthetic construct
GAQASIKLH

SEQ ID NO: 29897 - protein, 9 aa, synthetic construct
GAQASIKLF

SEQ ID NO: 29898 - protein, 9 aa, synthetic construct
GAQASIKVY

SEQ ID NO: 29899 - protein, 9 aa, synthetic construct
GAQASIKVH

SEQ ID NO: 29900 - protein, 9 aa, synthetic construct
GAQASGHLY

SEQ ID NO: 29901 - protein, 9 aa, synthetic construct
GAQASGHLH

SEQ ID NO: 29902 - protein, 9 aa, synthetic construct
GAQASGHLF

SEQ ID NO: 29903 - protein, 9 aa, synthetic construct
GAQASGHVY

SEQ ID NO: 29904 - protein, 9 aa, synthetic construct
GAQASGHVK

SEQ ID NO: 29905 - protein, 9 aa, synthetic construct
GAQASGHVF

SEQ ID NO: 29906 - protein, 9 aa, synthetic construct
GAQASGRLY

SEQ ID NO: 29907 - protein, 9 aa, synthetic construct
GAQASGRLH

SEQ ID NO: 29908 - protein, 9 aa, synthetic construct
GAQASGRLF

SEQ ID NO: 29909 - protein, 9 aa, synthetic construct
GAQASGRVR

SEQ ID NO: 29910 - protein, 9 aa, synthetic construct
GAQASGKLY

SEQ ID NO: 29911 - protein, 9 aa, synthetic construct
GAQASGKLH

SEQ ID NO: 29912 - protein, 9 aa, synthetic construct
GAQASGKLF

SEQ ID NO: 29913 - protein, 9 aa, synthetic construct
GAQASGKVY

SEQ ID NO: 29914 - protein, 9 aa, synthetic construct
GAQASGKVH

SEQ ID NO: 29915 - protein, 9 aa, synthetic construct
PLNGSGRLH

SEQ ID NO: 29916 - protein, 9 aa, synthetic construct
PLPAVGHLY

SEQ ID NO: 29917 - protein, 9 aa, synthetic construct
GAQAVVHLR

SEQ ID NO: 29918 - protein, 9 aa, synthetic construct
GAQAVVHLH

SEQ ID NO: 29919 - protein, 9 aa, synthetic construct
GAQAVVHLF

SEQ ID NO: 29920 - protein, 9 aa, synthetic construct
GAQAVVHVY

SEQ ID NO: 29921 - protein, 9 aa, synthetic construct
GAQAVVHVK

SEQ ID NO: 29922 - protein, 9 aa, synthetic construct
GAQAVVHVF

SEQ ID NO: 29923 - protein, 9 aa, synthetic construct
GAQAVVRLY

SEQ ID NO: 29924 - protein, 9 aa, synthetic construct
GAQAVVRVF

SEQ ID NO: 29925 - protein, 9 aa, synthetic construct
GAQAVVKVH

SEQ ID NO: 29926 - protein, 9 aa, synthetic construct
PLPAVGHLK

SEQ ID NO: 29927 - protein, 9 aa, synthetic construct
GAQAVLHLF

SEQ ID NO: 29928 - protein, 9 aa, synthetic construct
GAQAVLRLH

SEQ ID NO: 29929 - protein, 9 aa, synthetic construct
PLPAVGHVY

SEQ ID NO: 29930 - protein, 9 aa, synthetic construct
GAQAVLKLH

SEQ ID NO: 29931 - protein, 9 aa, synthetic construct
PLPAVGHVR

SEQ ID NO: 29932 - protein, 9 aa, synthetic construct
GAQAVAHLR

SEQ ID NO: 29933 - protein, 9 aa, synthetic construct
GAQAVAHLK

SEQ ID NO: 29934 - protein, 9 aa, synthetic construct
GAQAVAHLF

SEQ ID NO: 29935 - protein, 9 aa, synthetic construct
GAQAVAHVK

SEQ ID NO: 29936 - protein, 9 aa, synthetic construct
GAQAVARVY

SEQ ID NO: 29937 - protein, 9 aa, synthetic construct
GAQAVARVH

SEQ ID NO: 29938 - protein, 9 aa, synthetic construct
GAQAVAKLY

SEQ ID NO: 29939 - protein, 9 aa, synthetic construct
GAQAVAKLF

SEQ ID NO: 29940 - protein, 9 aa, synthetic construct
GAQAVAKVY

SEQ ID NO: 29941 - protein, 9 aa, synthetic construct
GAQAVAKVR

SEQ ID NO: 29942 - protein, 9 aa, synthetic construct
GAQAVAKVH

SEQ ID NO: 29943 - protein, 9 aa, synthetic construct
GAQAVAKVF

SEQ ID NO: 29944 - protein, 9 aa, synthetic construct
PLPAVGHVF

SEQ ID NO: 29945 - protein, 9 aa, synthetic construct
GAQAVIHLR

SEQ ID NO: 29946 - protein, 9 aa, synthetic construct
GAQAVIHLF

SEQ ID NO: 29947 - protein, 9 aa, synthetic construct
GAQAVIHVR

SEQ ID NO: 29948 - protein, 9 aa, synthetic construct
GAQAVIHVH

SEQ ID NO: 29949 - protein, 9 aa, synthetic construct
GAQAVIHVK

SEQ ID NO: 29950 - protein, 9 aa, synthetic construct
GAQAVIHVF

SEQ ID NO: 29951 - protein, 9 aa, synthetic construct
PLNGSGRLK

SEQ ID NO: 29952 - protein, 9 aa, synthetic construct
GAQAVIRVF

SEQ ID NO: 29953 - protein, 9 aa, synthetic construct
GAQAVGHLR

SEQ ID NO: 29954 - protein, 9 aa, synthetic construct
GAQAVGHLH

SEQ ID NO: 29955 - protein, 9 aa, synthetic construct
GAQAVGHLK

SEQ ID NO: 29956 - protein, 9 aa, synthetic construct
GAQAVGHVF

SEQ ID NO: 29957 - protein, 9 aa, synthetic construct
PLPAVGRLK

SEQ ID NO: 29958 - protein, 9 aa, synthetic construct
GAQAVGRLF

SEQ ID NO: 29959 - protein, 9 aa, synthetic construct
GAQAVGRVH

SEQ ID NO: 29960 - protein, 9 aa, synthetic construct
GAQAVGRVK

SEQ ID NO: 29961 - protein, 9 aa, synthetic construct
GAQAVGRVF

SEQ ID NO: 29962 - protein, 9 aa, synthetic construct
PLPAVGRLF

SEQ ID NO: 29963 - protein, 9 aa, synthetic construct
GAQAVGKLY

SEQ ID NO: 29964 - protein, 9 aa, synthetic construct
GAQAVGKLH

SEQ ID NO: 29965 - protein, 9 aa, synthetic construct
GAQAVGKLK

SEQ ID NO: 29966 - protein, 9 aa, synthetic construct
GAQAVGKVR

SEQ ID NO: 29967 - protein, 9 aa, synthetic construct
PLPAVGRVY

SEQ ID NO: 29968 - protein, 9 aa, synthetic construct
GAQAGVHLF

SEQ ID NO: 29969 - protein, 9 aa, synthetic construct
GAQAGVHVY

SEQ ID NO: 29970 - protein, 9 aa, synthetic construct
GAQAGVHVR

SEQ ID NO: 29971 - protein, 9 aa, synthetic construct
GAQAGVHVF

SEQ ID NO: 29972 - protein, 9 aa, synthetic construct
PLPAVGRVR

SEQ ID NO: 29973 - protein, 9 aa, synthetic construct
GAQAGVRLY

SEQ ID NO: 29974 - protein, 9 aa, synthetic construct
GAQAGVRLH

SEQ ID NO: 29975 - protein, 9 aa, synthetic construct
GAQAGVRVY

SEQ ID NO: 29976 - protein, 9 aa, synthetic construct
GAQAGVRVK

SEQ ID NO: 29977 - protein, 9 aa, synthetic construct
GAQAGVRVF

SEQ ID NO: 29978 - protein, 9 aa, synthetic construct
GAQAGVKLY

SEQ ID NO: 29979 - protein, 9 aa, synthetic construct
GAQAGVKLR

SEQ ID NO: 29980 - protein, 9 aa, synthetic construct
GAQAGVKLF

SEQ ID NO: 29981 - protein, 9 aa, synthetic construct
GAQAGVKVY

SEQ ID NO: 29982 - protein, 9 aa, synthetic construct
GAQAGVKVR

SEQ ID NO: 29983 - protein, 9 aa, synthetic construct
GAQAGVKVK

SEQ ID NO: 29984 - protein, 9 aa, synthetic construct
GAQAGLHVY

SEQ ID NO: 29985 - protein, 9 aa, synthetic construct
PLPAVGRVF

SEQ ID NO: 29986 - protein, 9 aa, synthetic construct
GAQAGLRVF

SEQ ID NO: 29987 - protein, 9 aa, synthetic construct
PLNGSGRLF

SEQ ID NO: 29988 - protein, 9 aa, synthetic construct
PLPAVGKLR

SEQ ID NO: 29989 - protein, 9 aa, synthetic construct
GAQAGAHLR

SEQ ID NO: 29990 - protein, 9 aa, synthetic construct
GAQAGAHLH

SEQ ID NO: 29991 - protein, 9 aa, synthetic construct
GAQAGAHLK

SEQ ID NO: 29992 - protein, 9 aa, synthetic construct
GAQAGAHVY

SEQ ID NO: 29993 - protein, 9 aa, synthetic construct
GAQAGAHVR

SEQ ID NO: 29994 - protein, 9 aa, synthetic construct
GAQAGAHVH

SEQ ID NO: 29995 - protein, 9 aa, synthetic construct
GAQAGAHVK

SEQ ID NO: 29996 - protein, 9 aa, synthetic construct
GAQAGARLY

SEQ ID NO: 29997 - protein, 9 aa, synthetic construct
GAQAGARVY

SEQ ID NO: 29998 - protein, 9 aa, synthetic construct
GAQAGARVF

SEQ ID NO: 29999 - protein, 9 aa, synthetic construct
PLPAVGKLF

SEQ ID NO: 30000 - protein, 9 aa, synthetic construct
GAQAGIHLK

SEQ ID NO: 30001 - protein, 9 aa, synthetic construct
GAQAGIHVR

SEQ ID NO: 30002 - protein, 9 aa, synthetic construct
GAQAGIHVH

SEQ ID NO: 30003 - protein, 9 aa, synthetic construct
GAQAGIHVK

SEQ ID NO: 30004 - protein, 9 aa, synthetic construct
GAQAGIRLY

SEQ ID NO: 30005 - protein, 9 aa, synthetic construct
GAQAGIRLR

SEQ ID NO: 30006 - protein, 9 aa, synthetic construct
GAQAGIRLH

SEQ ID NO: 30007 - protein, 9 aa, synthetic construct
GAQAGIRVH

SEQ ID NO: 30008 - protein, 9 aa, synthetic construct
PLPAVGKVR

SEQ ID NO: 30009 - protein, 9 aa, synthetic construct
GAQAGIKLY

SEQ ID NO: 30010 - protein, 9 aa, synthetic construct
GAQAGIKLF

SEQ ID NO: 30011 - protein, 9 aa, synthetic construct
GAQAGIKVY

SEQ ID NO: 30012 - protein, 9 aa, synthetic construct
GAQAGIKVF

SEQ ID NO: 30013 - protein, 9 aa, synthetic construct
PLPAVGKVH

SEQ ID NO: 30014 - protein, 9 aa, synthetic construct
GAQAGGHVY

SEQ ID NO: 30015 - protein, 9 aa, synthetic construct
GAQAGGHVR

SEQ ID NO: 30016 - protein, 9 aa, synthetic construct
GAQAGGHVH

SEQ ID NO: 30017 - protein, 9 aa, synthetic construct
GAQAGGRLY

SEQ ID NO: 30018 - protein, 9 aa, synthetic construct
GAQAGGRLF

SEQ ID NO: 30019 - protein, 9 aa, synthetic construct
GAQAGGRVR

SEQ ID NO: 30020 - protein, 9 aa, synthetic construct
GAQAGGRVF

SEQ ID NO: 30021 - protein, 9 aa, synthetic construct
GAQAGGKLH

SEQ ID NO: 30022 - protein, 9 aa, synthetic construct
GAQAGGKLF

SEQ ID NO: 30023 - protein, 9 aa, synthetic construct
GAQAGGKVY

SEQ ID NO: 30024 - protein, 9 aa, synthetic construct
GAQAGGKVK

SEQ ID NO: 30025 - protein, 9 aa, synthetic construct
PLNGSGRVY

SEQ ID NO: 30026 - protein, 9 aa, synthetic construct
PLPAGVHLY

SEQ ID NO: 30027 - protein, 9 aa, synthetic construct
GAPGAVHLY

SEQ ID NO: 30028 - protein, 9 aa, synthetic construct
GAPGAVHLH

SEQ ID NO: 30029 - protein, 9 aa, synthetic construct
GAPGAVHLF

SEQ ID NO: 30030 - protein, 9 aa, synthetic construct
GAPGAVHVH

SEQ ID NO: 30031 - protein, 9 aa, synthetic construct
GAPGAVHVK

SEQ ID NO: 30032 - protein, 9 aa, synthetic construct
PLPAGVHLR

SEQ ID NO: 30033 - protein, 9 aa, synthetic construct
GAPGAVRLY

SEQ ID NO: 30034 - protein, 9 aa, synthetic construct
GAPGAVRLR

SEQ ID NO: 30035 - protein, 9 aa, synthetic construct
GAPGAVRLH

SEQ ID NO: 30036 - protein, 9 aa, synthetic construct
GAPGAVRLK

SEQ ID NO: 30037 - protein, 9 aa, synthetic construct
GAPGAVRLF

SEQ ID NO: 30038 - protein, 9 aa, synthetic construct
GAPGAVRVY

SEQ ID NO: 30039 - protein, 9 aa, synthetic construct
GAPGAVRVH

SEQ ID NO: 30040 - protein, 9 aa, synthetic construct
PLPAGVHLH

SEQ ID NO: 30041 - protein, 9 aa, synthetic construct
GAPGAVKLY

SEQ ID NO: 30042 - protein, 9 aa, synthetic construct
GAPGAVKLH

SEQ ID NO: 30043 - protein, 9 aa, synthetic construct
GAPGAVKLF

SEQ ID NO: 30044 - protein, 9 aa, synthetic construct
GAPGAVKVH

SEQ ID NO: 30045 - protein, 9 aa, synthetic construct
GAPGAVKVF

SEQ ID NO: 30046 - protein, 9 aa, synthetic construct
PLPAGVHLK

SEQ ID NO: 30047 - protein, 9 aa, synthetic construct
GAPGALHVY

SEQ ID NO: 30048 - protein, 9 aa, synthetic construct
GAPGALHVH

SEQ ID NO: 30049 - protein, 9 aa, synthetic construct
GAPGALHVK

SEQ ID NO: 30050 - protein, 9 aa, synthetic construct
PLPAGVHLF

SEQ ID NO: 30051 - protein, 9 aa, synthetic construct
PLPAGVHVY

SEQ ID NO: 30052 - protein, 9 aa, synthetic construct
GAPGALKLF

SEQ ID NO: 30053 - protein, 9 aa, synthetic construct
GAPGALKVY

SEQ ID NO: 30054 - protein, 9 aa, synthetic construct
GAPGALKVH

SEQ ID NO: 30055 - protein, 9 aa, synthetic construct
GAPGALKVF

SEQ ID NO: 30056 - protein, 9 aa, synthetic construct
GAPGAAHLY

SEQ ID NO: 30057 - protein, 9 aa, synthetic construct
GAPGAAHLR

SEQ ID NO: 30058 - protein, 9 aa, synthetic construct
GAPGAAHLH

SEQ ID NO: 30059 - protein, 9 aa, synthetic construct
GAPGAAHLK

SEQ ID NO: 30060 - protein, 9 aa, synthetic construct
GAPGAAHVF

SEQ ID NO: 30061 - protein, 9 aa, synthetic construct
GAPGAIHLH

SEQ ID NO: 30062 - protein, 9 aa, synthetic construct
GAPGAIHLK

SEQ ID NO: 30063 - protein, 9 aa, synthetic construct
PLNGSGRVR

SEQ ID NO: 30064 - protein, 9 aa, synthetic construct
PLPAGVRLY

SEQ ID NO: 30065 - protein, 9 aa, synthetic construct
GAPGAIRVH

SEQ ID NO: 30066 - protein, 9 aa, synthetic construct
GAPGAIKLH

SEQ ID NO: 30067 - protein, 9 aa, synthetic construct
PLPAGVRLH

SEQ ID NO: 30068 - protein, 9 aa, synthetic construct
GAPGAGHLY

SEQ ID NO: 30069 - protein, 9 aa, synthetic construct
GAPGAGHLF

SEQ ID NO: 30070 - protein, 9 aa, synthetic construct
GAPGAGHVR

SEQ ID NO: 30071 - protein, 9 aa, synthetic construct
GAPGAGHVK

SEQ ID NO: 30072 - protein, 9 aa, synthetic construct
GAPGAGRLY

SEQ ID NO: 30073 - protein, 9 aa, synthetic construct
GAPGAGRVY

SEQ ID NO: 30074 - protein, 9 aa, synthetic construct
GAPGAGRVF

SEQ ID NO: 30075 - protein, 9 aa, synthetic construct
GAPGAGKLY

SEQ ID NO: 30076 - protein, 9 aa, synthetic construct
GAPGAGKVH

SEQ ID NO: 30077 - protein, 9 aa, synthetic construct
PLPAGVRVY

SEQ ID NO: 30078 - protein, 9 aa, synthetic construct
GAPGTVHLR

SEQ ID NO: 30079 - protein, 9 aa, synthetic construct
GAPGTVHLK

SEQ ID NO: 30080 - protein, 9 aa, synthetic construct
GAPGTVHVH

SEQ ID NO: 30081 - protein, 9 aa, synthetic construct
GAPGTVHVK

SEQ ID NO: 30082 - protein, 9 aa, synthetic construct
GAPGTVHVF

SEQ ID NO: 30083 - protein, 9 aa, synthetic construct
GAPGTVRLH

SEQ ID NO: 30084 - protein, 9 aa, synthetic construct
GAPGTVRVF

SEQ ID NO: 30085 - protein, 9 aa, synthetic construct
GAPGTVKVR

SEQ ID NO: 30086 - protein, 9 aa, synthetic construct
GAPGTVKVH

SEQ ID NO: 30087 - protein, 9 aa, synthetic construct
GAPGTVKVF

SEQ ID NO: 30088 - protein, 9 aa, synthetic construct
PLPAGVRVK

SEQ ID NO: 30089 - protein, 9 aa, synthetic construct
GAPGTLHLK

SEQ ID NO: 30090 - protein, 9 aa, synthetic construct
GAPGTLHVK

SEQ ID NO: 30091 - protein, 9 aa, synthetic construct
GAPGTLHVF

SEQ ID NO: 30092 - protein, 9 aa, synthetic construct
GAPGTLRLF

SEQ ID NO: 30093 - protein, 9 aa, synthetic construct
GAPGTLRVY

SEQ ID NO: 30094 - protein, 9 aa, synthetic construct
PLNGSGRVH

SEQ ID NO: 30095 - protein, 9 aa, synthetic construct
PLPAGVKLY

SEQ ID NO: 30096 - protein, 9 aa, synthetic construct
GAPGTLKLR

SEQ ID NO: 30097 - protein, 9 aa, synthetic construct
GAPGTLKVH

SEQ ID NO: 30098 - protein, 9 aa, synthetic construct
GAPGTLKVF

SEQ ID NO: 30099 - protein, 9 aa, synthetic construct
GAPGTARLY

SEQ ID NO: 30100 - protein, 9 aa, synthetic construct
GAPGTARLF

SEQ ID NO: 30101 - protein, 9 aa, synthetic construct
GAPGTARVY

SEQ ID NO: 30102 - protein, 9 aa, synthetic construct
GAPGTARVH

SEQ ID NO: 30103 - protein, 9 aa, synthetic construct
GAPGTARVF

SEQ ID NO: 30104 - protein, 9 aa, synthetic construct
GAPGTAKLY

SEQ ID NO: 30105 - protein, 9 aa, synthetic construct
GAPGTAKLF

SEQ ID NO: 30106 - protein, 9 aa, synthetic construct
GAPGTAKVH

SEQ ID NO: 30107 - protein, 9 aa, synthetic construct
GAPGTIHLY

SEQ ID NO: 30108 - protein, 9 aa, synthetic construct
GAPGTIHLR

SEQ ID NO: 30109 - protein, 9 aa, synthetic construct
GAPGTIHLF

SEQ ID NO: 30110 - protein, 9 aa, synthetic construct
GAPGTIHVY

SEQ ID NO: 30111 - protein, 9 aa, synthetic construct
GAPGTIHVR

SEQ ID NO: 30112 - protein, 9 aa, synthetic construct
GAPGTIHVH

SEQ ID NO: 30113 - protein, 9 aa, synthetic construct
GAPGTIHVF

SEQ ID NO: 30114 - protein, 9 aa, synthetic construct
GAPGTIRLH

SEQ ID NO: 30115 - protein, 9 aa, synthetic construct
GAPGTIRLF

SEQ ID NO: 30116 - protein, 9 aa, synthetic construct
GAPGTIRVY

SEQ ID NO: 30117 - protein, 9 aa, synthetic construct
GAPGTIRVH

SEQ ID NO: 30118 - protein, 9 aa, synthetic construct
GAPGTIRVF

SEQ ID NO: 30119 - protein, 9 aa, synthetic construct
PLPAGVKVR

SEQ ID NO: 30120 - protein, 9 aa, synthetic construct
GAPGTIKLY

SEQ ID NO: 30121 - protein, 9 aa, synthetic construct
GAPGTIKLH

SEQ ID NO: 30122 - protein, 9 aa, synthetic construct
GAPGTIKLF

SEQ ID NO: 30123 - protein, 9 aa, synthetic construct
GAPGTIKVH

SEQ ID NO: 30124 - protein, 9 aa, synthetic construct
GAPGTIKVF

SEQ ID NO: 30125 - protein, 9 aa, synthetic construct
PLPAGVKVH

SEQ ID NO: 30126 - protein, 9 aa, synthetic construct
PLPAGVKVK

SEQ ID NO: 30127 - protein, 9 aa, synthetic construct
GAPGTGRLY

SEQ ID NO: 30128 - protein, 9 aa, synthetic construct
GAPGTGRVY

SEQ ID NO: 30129 - protein, 9 aa, synthetic construct
GAPGTGRVH

SEQ ID NO: 30130 - protein, 9 aa, synthetic construct
GAPGTGRVF

SEQ ID NO: 30131 - protein, 9 aa, synthetic construct
GAPGTGKLH

SEQ ID NO: 30132 - protein, 9 aa, synthetic construct
GAPGTGKLF

SEQ ID NO: 30133 - protein, 9 aa, synthetic construct
GAPGTGKVR

SEQ ID NO: 30134 - protein, 9 aa, synthetic construct
GAPGSVHVR

SEQ ID NO: 30135 - protein, 9 aa, synthetic construct
GAPGSVHVF

SEQ ID NO: 30136 - protein, 9 aa, synthetic construct
GAPGSVRLY

SEQ ID NO: 30137 - protein, 9 aa, synthetic construct
GAPGSVKLY

SEQ ID NO: 30138 - protein, 9 aa, synthetic construct
GAPGSVKLF

SEQ ID NO: 30139 - protein, 9 aa, synthetic construct
GAPGSVKVH

SEQ ID NO: 30140 - protein, 9 aa, synthetic construct
GAPGSLHLK

SEQ ID NO: 30141 - protein, 9 aa, synthetic construct
GAPGSLHLF

SEQ ID NO: 30142 - protein, 9 aa, synthetic construct
GAPGSLHVH

SEQ ID NO: 30143 - protein, 9 aa, synthetic construct
GAPGSLHVF

SEQ ID NO: 30144 - protein, 9 aa, synthetic construct
GAPGSLRLH

SEQ ID NO: 30145 - protein, 9 aa, synthetic construct
GAPGSLRLF

SEQ ID NO: 30146 - protein, 9 aa, synthetic construct
GAPGSLRVY

SEQ ID NO: 30147 - protein, 9 aa, synthetic construct
GAPGSLRVF

SEQ ID NO: 30148 - protein, 9 aa, synthetic construct
PLPAGLHVY

SEQ ID NO: 30149 - protein, 9 aa, synthetic construct
GAPGSLKLH

SEQ ID NO: 30150 - protein, 9 aa, synthetic construct
GAPGSAHLF

SEQ ID NO: 30151 - protein, 9 aa, synthetic construct
GAPGSARLY

SEQ ID NO: 30152 - protein, 9 aa, synthetic construct
GAPGSARLF

SEQ ID NO: 30153 - protein, 9 aa, synthetic construct
GAPGSAKLY

SEQ ID NO: 30154 - protein, 9 aa, synthetic construct
GAPGSIHLY

SEQ ID NO: 30155 - protein, 9 aa, synthetic construct
GAPGSIHLR

SEQ ID NO: 30156 - protein, 9 aa, synthetic construct
GAPGSIHLF

SEQ ID NO: 30157 - protein, 9 aa, synthetic construct
GAPGSIHVF

SEQ ID NO: 30158 - protein, 9 aa, synthetic construct
GAPGSIRLF

SEQ ID NO: 30159 - protein, 9 aa, synthetic construct
GAPGSIRVF

SEQ ID NO: 30160 - protein, 9 aa, synthetic construct
GAPGSIKLY

SEQ ID NO: 30161 - protein, 9 aa, synthetic construct
GAPGSIKLH

SEQ ID NO: 30162 - protein, 9 aa, synthetic construct
GAPGSIKLK

SEQ ID NO: 30163 - protein, 9 aa, synthetic construct
GAPGSIKLF

SEQ ID NO: 30164 - protein, 9 aa, synthetic construct
GAPGSIKVH

SEQ ID NO: 30165 - protein, 9 aa, synthetic construct
GAPGSIKVF

SEQ ID NO: 30166 - protein, 9 aa, synthetic construct
GAPGSGHLF

SEQ ID NO: 30167 - protein, 9 aa, synthetic construct
GAPGSGRLY

SEQ ID NO: 30168 - protein, 9 aa, synthetic construct
GAPGSGRLF

SEQ ID NO: 30169 - protein, 9 aa, synthetic construct
GAPGSGRVH

SEQ ID NO: 30170 - protein, 9 aa, synthetic construct
GAPGSGRVF

SEQ ID NO: 30171 - protein, 9 aa, synthetic construct
GAPGSGKLH

SEQ ID NO: 30172 - protein, 9 aa, synthetic construct
GAPGSGKLF

SEQ ID NO: 30173 - protein, 9 aa, synthetic construct
GAPGSGKVY

SEQ ID NO: 30174 - protein, 9 aa, synthetic construct
GAPGSGKVH

SEQ ID NO: 30175 - protein, 9 aa, synthetic construct
GAPGVVHLR

SEQ ID NO: 30176 - protein, 9 aa, synthetic construct
GAPGVVHLH

SEQ ID NO: 30177 - protein, 9 aa, synthetic construct
GAPGVVHLK

SEQ ID NO: 30178 - protein, 9 aa, synthetic construct
GAPGVVHLF

SEQ ID NO: 30179 - protein, 9 aa, synthetic construct
GAPGVVHVR

SEQ ID NO: 30180 - protein, 9 aa, synthetic construct
GAPGVVHVF

SEQ ID NO: 30181 - protein, 9 aa, synthetic construct
GAPGVVRLY

SEQ ID NO: 30182 - protein, 9 aa, synthetic construct
GAPGVVRLH

SEQ ID NO: 30183 - protein, 9 aa, synthetic construct
GAPGVVKLY

SEQ ID NO: 30184 - protein, 9 aa, synthetic construct
GAPGVVKLR

SEQ ID NO: 30185 - protein, 9 aa, synthetic construct
GAPGVVKVH

SEQ ID NO: 30186 - protein, 9 aa, synthetic construct
GAPGVVKVK

SEQ ID NO: 30187 - protein, 9 aa, synthetic construct
GAPGVLHLY

SEQ ID NO: 30188 - protein, 9 aa, synthetic construct
GAPGVLHLH

SEQ ID NO: 30189 - protein, 9 aa, synthetic construct
GAPGVLHLF

SEQ ID NO: 30190 - protein, 9 aa, synthetic construct
GAPGVLRVY

SEQ ID NO: 30191 - protein, 9 aa, synthetic construct
GAPGVLRVH

SEQ ID NO: 30192 - protein, 9 aa, synthetic construct
GAPGVLKLY

SEQ ID NO: 30193 - protein, 9 aa, synthetic construct
GAPGVLKLH

SEQ ID NO: 30194 - protein, 9 aa, synthetic construct
GAPGVLKLF

SEQ ID NO: 30195 - protein, 9 aa, synthetic construct
GAPGVLKVF

SEQ ID NO: 30196 - protein, 9 aa, synthetic construct
GAPGVAHLF

SEQ ID NO: 30197 - protein, 9 aa, synthetic construct
GAPGVAHVY

SEQ ID NO: 30198 - protein, 9 aa, synthetic construct
GAPGVAHVR

SEQ ID NO: 30199 - protein, 9 aa, synthetic construct
GAPGVAHVF

SEQ ID NO: 30200 - protein, 9 aa, synthetic construct
PLPAGLKLH

SEQ ID NO: 30201 - protein, 9 aa, synthetic construct
GAPGVARLY

SEQ ID NO: 30202 - protein, 9 aa, synthetic construct
GAPGVARVY

SEQ ID NO: 30203 - protein, 9 aa, synthetic construct
GAPGVARVR

SEQ ID NO: 30204 - protein, 9 aa, synthetic construct
GAPGVARVH

SEQ ID NO: 30205 - protein, 9 aa, synthetic construct
GAPGVARVF

SEQ ID NO: 30206 - protein, 9 aa, synthetic construct
GAPGVAKLY

SEQ ID NO: 30207 - protein, 9 aa, synthetic construct
GAPGVAKLH

SEQ ID NO: 30208 - protein, 9 aa, synthetic construct
GAPGVAKVR

SEQ ID NO: 30209 - protein, 9 aa, synthetic construct
GAPGVAKVH

SEQ ID NO: 30210 - protein, 9 aa, synthetic construct
GAPGVIHVR

SEQ ID NO: 30211 - protein, 9 aa, synthetic construct
GAPGVIRLR

SEQ ID NO: 30212 - protein, 9 aa, synthetic construct
GAPGVIRVY

SEQ ID NO: 30213 - protein, 9 aa, synthetic construct
GAPGVIRVR

SEQ ID NO: 30214 - protein, 9 aa, synthetic construct
GAPGVIRVH

SEQ ID NO: 30215 - protein, 9 aa, synthetic construct
GAPGVIKLY

SEQ ID NO: 30216 - protein, 9 aa, synthetic construct
GAPGVIKLF

SEQ ID NO: 30217 - protein, 9 aa, synthetic construct
GAPGVIKVY

SEQ ID NO: 30218 - protein, 9 aa, synthetic construct
GAPGVIKVF

SEQ ID NO: 30219 - protein, 9 aa, synthetic construct
GAPGVGHVK

SEQ ID NO: 30220 - protein, 9 aa, synthetic construct
GAPGVGRLY

SEQ ID NO: 30221 - protein, 9 aa, synthetic construct
GAPGVGRLF

SEQ ID NO: 30222 - protein, 9 aa, synthetic construct
GAPGVGRVY

SEQ ID NO: 30223 - protein, 9 aa, synthetic construct
GAPGVGRVF

SEQ ID NO: 30224 - protein, 9 aa, synthetic construct
GAPGVGKLY

SEQ ID NO: 30225 - protein, 9 aa, synthetic construct
GAPGVGKLK

SEQ ID NO: 30226 - protein, 9 aa, synthetic construct
GAPGVGKLF

SEQ ID NO: 30227 - protein, 9 aa, synthetic construct
GAPGVGKVH

SEQ ID NO: 30228 - protein, 9 aa, synthetic construct
PLNGSGKLR

SEQ ID NO: 30229 - protein, 9 aa, synthetic construct
GAPGGVHLR

SEQ ID NO: 30230 - protein, 9 aa, synthetic construct
GAPGGVHLH

SEQ ID NO: 30231 - protein, 9 aa, synthetic construct
GAPGGVHLK

SEQ ID NO: 30232 - protein, 9 aa, synthetic construct
GAPGGVHLF

SEQ ID NO: 30233 - protein, 9 aa, synthetic construct
GAPGGVHVY

SEQ ID NO: 30234 - protein, 9 aa, synthetic construct
GAPGGVHVR

SEQ ID NO: 30235 - protein, 9 aa, synthetic construct
GAPGGVHVF

SEQ ID NO: 30236 - protein, 9 aa, synthetic construct
GAPGGVRLR

SEQ ID NO: 30237 - protein, 9 aa, synthetic construct
GAPGGVRVY

SEQ ID NO: 30238 - protein, 9 aa, synthetic construct
GAPGGVRVK

SEQ ID NO: 30239 - protein, 9 aa, synthetic construct
GAPGGVKLH

SEQ ID NO: 30240 - protein, 9 aa, synthetic construct
GAPGGLHLH

SEQ ID NO: 30241 - protein, 9 aa, synthetic construct
GAPGGLHVR

SEQ ID NO: 30242 - protein, 9 aa, synthetic construct
GAPGGLHVK

SEQ ID NO: 30243 - protein, 9 aa, synthetic construct
GAPGGLRLY

SEQ ID NO: 30244 - protein, 9 aa, synthetic construct
GAPGGLKVH

SEQ ID NO: 30245 - protein, 9 aa, synthetic construct
GAPGGAKVH

SEQ ID NO: 30246 - protein, 9 aa, synthetic construct
GAPGGIRLF

SEQ ID NO: 30247 - protein, 9 aa, synthetic construct
GAPGGIKLR

SEQ ID NO: 30248 - protein, 9 aa, synthetic construct
GAPGGIKLF

SEQ ID NO: 30249 - protein, 9 aa, synthetic construct
GAPGGIKVH

SEQ ID NO: 30250 - protein, 9 aa, synthetic construct
GAPGGGHVY

SEQ ID NO: 30251 - protein, 9 aa, synthetic construct
GAPGGGHVK

SEQ ID NO: 30252 - protein, 9 aa, synthetic construct
PLPAGARLF

SEQ ID NO: 30253 - protein, 9 aa, synthetic construct
GAPAAVHLY

SEQ ID NO: 30254 - protein, 9 aa, synthetic construct
GAPAAVHLR

SEQ ID NO: 30255 - protein, 9 aa, synthetic construct
GAPAAVHLK

SEQ ID NO: 30256 - protein, 9 aa, synthetic construct
GAPAAVHLF

SEQ ID NO: 30257 - protein, 9 aa, synthetic construct
GAPAAVHVY

SEQ ID NO: 30258 - protein, 9 aa, synthetic construct
GAPAAVHVH

SEQ ID NO: 30259 - protein, 9 aa, synthetic construct
GAPAAVRLY

SEQ ID NO: 30260 - protein, 9 aa, synthetic construct
GAPAAVRLH

SEQ ID NO: 30261 - protein, 9 aa, synthetic construct
GAPAAVRLF

SEQ ID NO: 30262 - protein, 9 aa, synthetic construct
GAPAAVRVY

SEQ ID NO: 30263 - protein, 9 aa, synthetic construct
GAPAAVRVH

SEQ ID NO: 30264 - protein, 9 aa, synthetic construct
GAPAAVRVF

SEQ ID NO: 30265 - protein, 9 aa, synthetic construct
GAPAAVKLH

SEQ ID NO: 30266 - protein, 9 aa, synthetic construct
GAPAAVKVH

SEQ ID NO: 30267 - protein, 9 aa, synthetic construct
GAPAALHLH

SEQ ID NO: 30268 - protein, 9 aa, synthetic construct
GAPAALHLK

SEQ ID NO: 30269 - protein, 9 aa, synthetic construct
GAPAALHVY

SEQ ID NO: 30270 - protein, 9 aa, synthetic construct
GAPAALHVR

SEQ ID NO: 30271 - protein, 9 aa, synthetic construct
GAPAALHVH

SEQ ID NO: 30272 - protein, 9 aa, synthetic construct
GAPAALHVF

SEQ ID NO: 30273 - protein, 9 aa, synthetic construct
GAPAALRLH

SEQ ID NO: 30274 - protein, 9 aa, synthetic construct
GAPAALRLF

SEQ ID NO: 30275 - protein, 9 aa, synthetic construct
PLNGSGKLK

SEQ ID NO: 30276 - protein, 9 aa, synthetic construct
GAPAALKLY

SEQ ID NO: 30277 - protein, 9 aa, synthetic construct
GAPAALKLH

SEQ ID NO: 30278 - protein, 9 aa, synthetic construct
GAPAALKVY

SEQ ID NO: 30279 - protein, 9 aa, synthetic construct
GAPAALKVF

SEQ ID NO: 30280 - protein, 9 aa, synthetic construct
GAPAAAHLR

SEQ ID NO: 30281 - protein, 9 aa, synthetic construct
GAPAAAHVF

SEQ ID NO: 30282 - protein, 9 aa, synthetic construct
GAPAAARLY

SEQ ID NO: 30283 - protein, 9 aa, synthetic construct
GAPAAARLF

SEQ ID NO: 30284 - protein, 9 aa, synthetic construct
GAPAAARVY

SEQ ID NO: 30285 - protein, 9 aa, synthetic construct
GAPAAARVR

SEQ ID NO: 30286 - protein, 9 aa, synthetic construct
GAPAAARVH

SEQ ID NO: 30287 - protein, 9 aa, synthetic construct
GAPAAAKLR

SEQ ID NO: 30288 - protein, 9 aa, synthetic construct
GAPAAAKLH

SEQ ID NO: 30289 - protein, 9 aa, synthetic construct
GAPAAAKLF

SEQ ID NO: 30290 - protein, 9 aa, synthetic construct
GAPAAAKVR

SEQ ID NO: 30291 - protein, 9 aa, synthetic construct
GAPAAAKVH

SEQ ID NO: 30292 - protein, 9 aa, synthetic construct
GAPAAAKVK

SEQ ID NO: 30293 - protein, 9 aa, synthetic construct
GAPAAAKVF

SEQ ID NO: 30294 - protein, 9 aa, synthetic construct
GAPAAIHLY

SEQ ID NO: 30295 - protein, 9 aa, synthetic construct
GAPAAIHLR

SEQ ID NO: 30296 - protein, 9 aa, synthetic construct
GAPAAIHLH

SEQ ID NO: 30297 - protein, 9 aa, synthetic construct
GAPAAIHVY

SEQ ID NO: 30298 - protein, 9 aa, synthetic construct
GAPAAIHVR

SEQ ID NO: 30299 - protein, 9 aa, synthetic construct
GAPAAIHVH

SEQ ID NO: 30300 - protein, 9 aa, synthetic construct
GAPAAIHVF

SEQ ID NO: 30301 - protein, 9 aa, synthetic construct
GAPAAIRLY

SEQ ID NO: 30302 - protein, 9 aa, synthetic construct
GAPAAIRLH

SEQ ID NO: 30303 - protein, 9 aa, synthetic construct
GAPAAIRLF

SEQ ID NO: 30304 - protein, 9 aa, synthetic construct
GAPAAIRVY

SEQ ID NO: 30305 - protein, 9 aa, synthetic construct
GAPAAIRVH

SEQ ID NO: 30306 - protein, 9 aa, synthetic construct
GAPAAIRVF

SEQ ID NO: 30307 - protein, 9 aa, synthetic construct
GAPAAIKLY

SEQ ID NO: 30308 - protein, 9 aa, synthetic construct
GAPAAIKLH

SEQ ID NO: 30309 - protein, 9 aa, synthetic construct
GAPAAIKLK

SEQ ID NO: 30310 - protein, 9 aa, synthetic construct
GAPAAIKLF

SEQ ID NO: 30311 - protein, 9 aa, synthetic construct
GAPAAGHLY

SEQ ID NO: 30312 - protein, 9 aa, synthetic construct
GAPAAGHLR

SEQ ID NO: 30313 - protein, 9 aa, synthetic construct
GAPAAGHLF

SEQ ID NO: 30314 - protein, 9 aa, synthetic construct
GAPAAGHVY

SEQ ID NO: 30315 - protein, 9 aa, synthetic construct
GAPAAGHVR

SEQ ID NO: 30316 - protein, 9 aa, synthetic construct
GAPAAGHVK

SEQ ID NO: 30317 - protein, 9 aa, synthetic construct
GAPAAGHVF

SEQ ID NO: 30318 - protein, 9 aa, synthetic construct
GAPAAGRLY

SEQ ID NO: 30319 - protein, 9 aa, synthetic construct
GAPAAGRLK

SEQ ID NO: 30320 - protein, 9 aa, synthetic construct
GAPAAGRVY

SEQ ID NO: 30321 - protein, 9 aa, synthetic construct
GAPAAGRVR

SEQ ID NO: 30322 - protein, 9 aa, synthetic construct
GAPAAGRVH

SEQ ID NO: 30323 - protein, 9 aa, synthetic construct
GAPAAGRVK

SEQ ID NO: 30324 - protein, 9 aa, synthetic construct
GAPAAGRVF

SEQ ID NO: 30325 - protein, 9 aa, synthetic construct
GAPAAGKLY

SEQ ID NO: 30326 - protein, 9 aa, synthetic construct
GAPAAGKLR

SEQ ID NO: 30327 - protein, 9 aa, synthetic construct
GAPAAGKLK

SEQ ID NO: 30328 - protein, 9 aa, synthetic construct
GAPAAGKLF

SEQ ID NO: 30329 - protein, 9 aa, synthetic construct
GAPAAGKVR

SEQ ID NO: 30330 - protein, 9 aa, synthetic construct
GAPAAGKVK

SEQ ID NO: 30331 - protein, 9 aa, synthetic construct
PLPAGIHLY

SEQ ID NO: 30332 - protein, 9 aa, synthetic construct
GAPATVHLY

SEQ ID NO: 30333 - protein, 9 aa, synthetic construct
GAPATVHLR

SEQ ID NO: 30334 - protein, 9 aa, synthetic construct
GAPATVHLH

SEQ ID NO: 30335 - protein, 9 aa, synthetic construct
GAPATVHLK

SEQ ID NO: 30336 - protein, 9 aa, synthetic construct
GAPATVHLF

SEQ ID NO: 30337 - protein, 9 aa, synthetic construct
GAPATVHVY

SEQ ID NO: 30338 - protein, 9 aa, synthetic construct
GAPATVHVR

SEQ ID NO: 30339 - protein, 9 aa, synthetic construct
GAPATVHVK

SEQ ID NO: 30340 - protein, 9 aa, synthetic construct
GAPATVHVF

SEQ ID NO: 30341 - protein, 9 aa, synthetic construct
PLPAGIHLR

SEQ ID NO: 30342 - protein, 9 aa, synthetic construct
GAPATVRLY

SEQ ID NO: 30343 - protein, 9 aa, synthetic construct
GAPATVRLH

SEQ ID NO: 30344 - protein, 9 aa, synthetic construct
GAPATVRLF

SEQ ID NO: 30345 - protein, 9 aa, synthetic construct
GAPATVRVY

SEQ ID NO: 30346 - protein, 9 aa, synthetic construct
GAPATVRVH

SEQ ID NO: 30347 - protein, 9 aa, synthetic construct
GAPATVRVF

SEQ ID NO: 30348 - protein, 9 aa, synthetic construct
PLPAGIHLH

SEQ ID NO: 30349 - protein, 9 aa, synthetic construct
GAPATVKLR

SEQ ID NO: 30350 - protein, 9 aa, synthetic construct
GAPATVKVY

SEQ ID NO: 30351 - protein, 9 aa, synthetic construct
GAPATVKVH

SEQ ID NO: 30352 - protein, 9 aa, synthetic construct
GAPATVKVF

SEQ ID NO: 30353 - protein, 9 aa, synthetic construct
GAPATLHLH

SEQ ID NO: 30354 - protein, 9 aa, synthetic construct
GAPATLHLK

SEQ ID NO: 30355 - protein, 9 aa, synthetic construct
GAPATLHVH

SEQ ID NO: 30356 - protein, 9 aa, synthetic construct
GAPATLHVK

SEQ ID NO: 30357 - protein, 9 aa, synthetic construct
GAPATLRLY

SEQ ID NO: 30358 - protein, 9 aa, synthetic construct
PLPAGIHVY

SEQ ID NO: 30359 - protein, 9 aa, synthetic construct
GAPATLKLY

SEQ ID NO: 30360 - protein, 9 aa, synthetic construct
GAPATLKLH

SEQ ID NO: 30361 - protein, 9 aa, synthetic construct
GAPATLKVY

SEQ ID NO: 30362 - protein, 9 aa, synthetic construct
GAPATLKVH

SEQ ID NO: 30363 - protein, 9 aa, synthetic construct
GAPATLKVK

SEQ ID NO: 30364 - protein, 9 aa, synthetic construct
GAPATLKVF

SEQ ID NO: 30365 - protein, 9 aa, synthetic construct
PLPAGIHVR

SEQ ID NO: 30366 - protein, 9 aa, synthetic construct
GAPATAHVR

SEQ ID NO: 30367 - protein, 9 aa, synthetic construct
GAPATAHVF

SEQ ID NO: 30368 - protein, 9 aa, synthetic construct
GAPATARLY

SEQ ID NO: 30369 - protein, 9 aa, synthetic construct
GAPATARVY

SEQ ID NO: 30370 - protein, 9 aa, synthetic construct
GAPATARVH

SEQ ID NO: 30371 - protein, 9 aa, synthetic construct
GAPATAKLF

SEQ ID NO: 30372 - protein, 9 aa, synthetic construct
GAPATAKVH

SEQ ID NO: 30373 - protein, 9 aa, synthetic construct
GAPATAKVK

SEQ ID NO: 30374 - protein, 9 aa, synthetic construct
GAPATAKVF

SEQ ID NO: 30375 - protein, 9 aa, synthetic construct
PLPAGIHVF

SEQ ID NO: 30376 - protein, 9 aa, synthetic construct
GAPATIHLY

SEQ ID NO: 30377 - protein, 9 aa, synthetic construct
GAPATIHLR

SEQ ID NO: 30378 - protein, 9 aa, synthetic construct
GAPATIHVY

SEQ ID NO: 30379 - protein, 9 aa, synthetic construct
GAPATIHVF

SEQ ID NO: 30380 - protein, 9 aa, synthetic construct
PLPAGIRLY

SEQ ID NO: 30381 - protein, 9 aa, synthetic construct
GAPATIRLY

SEQ ID NO: 30382 - protein, 9 aa, synthetic construct
GAPATIRLF

SEQ ID NO: 30383 - protein, 9 aa, synthetic construct
GAPATIRVH

SEQ ID NO: 30384 - protein, 9 aa, synthetic construct
GAPATIRVF

SEQ ID NO: 30385 - protein, 9 aa, synthetic construct
GAPATIKLY

SEQ ID NO: 30386 - protein, 9 aa, synthetic construct
GAPATIKLR

SEQ ID NO: 30387 - protein, 9 aa, synthetic construct
GAPATIKVF

SEQ ID NO: 30388 - protein, 9 aa, synthetic construct
PLPAGIRLH

SEQ ID NO: 30389 - protein, 9 aa, synthetic construct
GAPATGHLR

SEQ ID NO: 30390 - protein, 9 aa, synthetic construct
GAPATGHVY

SEQ ID NO: 30391 - protein, 9 aa, synthetic construct
GAPATGHVR

SEQ ID NO: 30392 - protein, 9 aa, synthetic construct
GAPATGHVK

SEQ ID NO: 30393 - protein, 9 aa, synthetic construct
GAPATGRLH

SEQ ID NO: 30394 - protein, 9 aa, synthetic construct
GAPATGRLF

SEQ ID NO: 30395 - protein, 9 aa, synthetic construct
GAPATGRVY

SEQ ID NO: 30396 - protein, 9 aa, synthetic construct
GAPATGRVF

SEQ ID NO: 30397 - protein, 9 aa, synthetic construct
PLPAGIRLF

SEQ ID NO: 30398 - protein, 9 aa, synthetic construct
GAPATGKLY

SEQ ID NO: 30399 - protein, 9 aa, synthetic construct
GAPATGKLH

SEQ ID NO: 30400 - protein, 9 aa, synthetic construct
GAPATGKVF

SEQ ID NO: 30401 - protein, 9 aa, synthetic construct
GAPASVHLR

SEQ ID NO: 30402 - protein, 9 aa, synthetic construct
GAPASVHLH

SEQ ID NO: 30403 - protein, 9 aa, synthetic construct
GAPASVHLK

SEQ ID NO: 30404 - protein, 9 aa, synthetic construct
GAPASVHLF

SEQ ID NO: 30405 - protein, 9 aa, synthetic construct
GAPASVHVY

SEQ ID NO: 30406 - protein, 9 aa, synthetic construct
GAPASVRLY

SEQ ID NO: 30407 - protein, 9 aa, synthetic construct
GAPASVRLH

SEQ ID NO: 30408 - protein, 9 aa, synthetic construct
GAPASVRVY

SEQ ID NO: 30409 - protein, 9 aa, synthetic construct
GAPASVRVH

SEQ ID NO: 30410 - protein, 9 aa, synthetic construct
PLPAGIRVH

SEQ ID NO: 30411 - protein, 9 aa, synthetic construct
GAPASVKLY

SEQ ID NO: 30412 - protein, 9 aa, synthetic construct
GAPASVKVY

SEQ ID NO: 30413 - protein, 9 aa, synthetic construct
GAPASVKVH

SEQ ID NO: 30414 - protein, 9 aa, synthetic construct
GAPASVKVK

SEQ ID NO: 30415 - protein, 9 aa, synthetic construct
GAPASLHLK

SEQ ID NO: 30416 - protein, 9 aa, synthetic construct
GAPASLHVR

SEQ ID NO: 30417 - protein, 9 aa, synthetic construct
GAPASLRLH

SEQ ID NO: 30418 - protein, 9 aa, synthetic construct
GAPASLRVR

SEQ ID NO: 30419 - protein, 9 aa, synthetic construct
GAPASLRVF

SEQ ID NO: 30420 - protein, 9 aa, synthetic construct
PLPAGIKLY

SEQ ID NO: 30421 - protein, 9 aa, synthetic construct
GAPASLKLY

SEQ ID NO: 30422 - protein, 9 aa, synthetic construct
GAPASLKLH

SEQ ID NO: 30423 - protein, 9 aa, synthetic construct
GAPASLKVY

SEQ ID NO: 30424 - protein, 9 aa, synthetic construct
GAPASLKVH

SEQ ID NO: 30425 - protein, 9 aa, synthetic construct
GAPASLKVF

SEQ ID NO: 30426 - protein, 9 aa, synthetic construct
PLPAGIKLR

SEQ ID NO: 30427 - protein, 9 aa, synthetic construct
GAPASAHVR

SEQ ID NO: 30428 - protein, 9 aa, synthetic construct
GAPASAHVK

SEQ ID NO: 30429 - protein, 9 aa, synthetic construct
GAPASAHVF

SEQ ID NO: 30430 - protein, 9 aa, synthetic construct
PLPAGIKLH

SEQ ID NO: 30431 - protein, 9 aa, synthetic construct
GAPASARLF

SEQ ID NO: 30432 - protein, 9 aa, synthetic construct
GAPASARVY

SEQ ID NO: 30433 - protein, 9 aa, synthetic construct
GAPASARVF

SEQ ID NO: 30434 - protein, 9 aa, synthetic construct
GAPASAKLY

SEQ ID NO: 30435 - protein, 9 aa, synthetic construct
GAPASAKLR

SEQ ID NO: 30436 - protein, 9 aa, synthetic construct
GAPASAKLH

SEQ ID NO: 30437 - protein, 9 aa, synthetic construct
GAPASAKLF

SEQ ID NO: 30438 - protein, 9 aa, synthetic construct
GAPASAKVH

SEQ ID NO: 30439 - protein, 9 aa, synthetic construct
GAPASAKVF

SEQ ID NO: 30440 - protein, 9 aa, synthetic construct
PLPAGIKLF

SEQ ID NO: 30441 - protein, 9 aa, synthetic construct
GAPASIHLY

SEQ ID NO: 30442 - protein, 9 aa, synthetic construct
GAPASIHLR

SEQ ID NO: 30443 - protein, 9 aa, synthetic construct
GAPASIHLK

SEQ ID NO: 30444 - protein, 9 aa, synthetic construct
GAPASIHVY

SEQ ID NO: 30445 - protein, 9 aa, synthetic construct
GAPASIHVH

SEQ ID NO: 30446 - protein, 9 aa, synthetic construct
GAPASIHVF

SEQ ID NO: 30447 - protein, 9 aa, synthetic construct
PLPAGIKVY

SEQ ID NO: 30448 - protein, 9 aa, synthetic construct
GAPASIRLH

SEQ ID NO: 30449 - protein, 9 aa, synthetic construct
GAPASIRLK

SEQ ID NO: 30450 - protein, 9 aa, synthetic construct
GAPASIRLF

SEQ ID NO: 30451 - protein, 9 aa, synthetic construct
GAPASIRVH

SEQ ID NO: 30452 - protein, 9 aa, synthetic construct
GAPASIRVF

SEQ ID NO: 30453 - protein, 9 aa, synthetic construct
GAPASIKLY

SEQ ID NO: 30454 - protein, 9 aa, synthetic construct
GAPASIKLR

SEQ ID NO: 30455 - protein, 9 aa, synthetic construct
GAPASIKLK

SEQ ID NO: 30456 - protein, 9 aa, synthetic construct
GAPASIKVY

SEQ ID NO: 30457 - protein, 9 aa, synthetic construct
GAPASIKVH

SEQ ID NO: 30458 - protein, 9 aa, synthetic construct
GAPASIKVF

SEQ ID NO: 30459 - protein, 9 aa, synthetic construct
GAPASGHLY

SEQ ID NO: 30460 - protein, 9 aa, synthetic construct
GAPASGHLK

SEQ ID NO: 30461 - protein, 9 aa, synthetic construct
GAPASGHLF

SEQ ID NO: 30462 - protein, 9 aa, synthetic construct
GAPASGHVY

SEQ ID NO: 30463 - protein, 9 aa, synthetic construct
GAPASGHVR

SEQ ID NO: 30464 - protein, 9 aa, synthetic construct
GAPASGHVK

SEQ ID NO: 30465 - protein, 9 aa, synthetic construct
GAPASGHVF

SEQ ID NO: 30466 - protein, 9 aa, synthetic construct
GAPASGRLY

SEQ ID NO: 30467 - protein, 9 aa, synthetic construct
GAPASGRLR

SEQ ID NO: 30468 - protein, 9 aa, synthetic construct
GAPASGRLH

SEQ ID NO: 30469 - protein, 9 aa, synthetic construct
GAPASGRLK

SEQ ID NO: 30470 - protein, 9 aa, synthetic construct
GAPASGRLF

SEQ ID NO: 30471 - protein, 9 aa, synthetic construct
GAPASGRVY

SEQ ID NO: 30472 - protein, 9 aa, synthetic construct
GAPASGRVR

SEQ ID NO: 30473 - protein, 9 aa, synthetic construct
GAPASGRVH

SEQ ID NO: 30474 - protein, 9 aa, synthetic construct
GAPASGRVK

SEQ ID NO: 30475 - protein, 9 aa, synthetic construct
GAPASGRVF

SEQ ID NO: 30476 - protein, 9 aa, synthetic construct
PLPAGIKVF

SEQ ID NO: 30477 - protein, 9 aa, synthetic construct
GAPASGKLY

SEQ ID NO: 30478 - protein, 9 aa, synthetic construct
GAPASGKLR

SEQ ID NO: 30479 - protein, 9 aa, synthetic construct
GAPASGKLK

SEQ ID NO: 30480 - protein, 9 aa, synthetic construct
GAPASGKLF

SEQ ID NO: 30481 - protein, 9 aa, synthetic construct
GAPASGKVY

SEQ ID NO: 30482 - protein, 9 aa, synthetic construct
GAPASGKVR

SEQ ID NO: 30483 - protein, 9 aa, synthetic construct
GAPASGKVH

SEQ ID NO: 30484 - protein, 9 aa, synthetic construct
GAPASGKVK

SEQ ID NO: 30485 - protein, 9 aa, synthetic construct
PLNGSGKVH

SEQ ID NO: 30486 - protein, 9 aa, synthetic construct
PLPAGGHLY

SEQ ID NO: 30487 - protein, 9 aa, synthetic construct
GAPAVVHVK

SEQ ID NO: 30488 - protein, 9 aa, synthetic construct
GAPAVVHVF

SEQ ID NO: 30489 - protein, 9 aa, synthetic construct
GAPAVVRLF

SEQ ID NO: 30490 - protein, 9 aa, synthetic construct
GAPAVVKLH

SEQ ID NO: 30491 - protein, 9 aa, synthetic construct
GAPAVVKLF

SEQ ID NO: 30492 - protein, 9 aa, synthetic construct
GAPAVVKVH

SEQ ID NO: 30493 - protein, 9 aa, synthetic construct
GAPAVVKVK

SEQ ID NO: 30494 - protein, 9 aa, synthetic construct
GAPAVVKVF

SEQ ID NO: 30495 - protein, 9 aa, synthetic construct
PLPAGGHLF

SEQ ID NO: 30496 - protein, 9 aa, synthetic construct
PLPAGGHVY

SEQ ID NO: 30497 - protein, 9 aa, synthetic construct
GAPAVLKLH

SEQ ID NO: 30498 - protein, 9 aa, synthetic construct
GAPAVLKLF

SEQ ID NO: 30499 - protein, 9 aa, synthetic construct
GAPAVLKVY

SEQ ID NO: 30500 - protein, 9 aa, synthetic construct
GAPAVLKVH

SEQ ID NO: 30501 - protein, 9 aa, synthetic construct
GAPAVAHLR

SEQ ID NO: 30502 - protein, 9 aa, synthetic construct
GAPAVAHLK

SEQ ID NO: 30503 - protein, 9 aa, synthetic construct
GAPAVAHVR

SEQ ID NO: 30504 - protein, 9 aa, synthetic construct
GAPAVAHVH

SEQ ID NO: 30505 - protein, 9 aa, synthetic construct
GAPAVAHVF

SEQ ID NO: 30506 - protein, 9 aa, synthetic construct
GAPAVARLH

SEQ ID NO: 30507 - protein, 9 aa, synthetic construct
GAPAVARVH

SEQ ID NO: 30508 - protein, 9 aa, synthetic construct
PLPAGGHVK

SEQ ID NO: 30509 - protein, 9 aa, synthetic construct
GAPAVAKLH

SEQ ID NO: 30510 - protein, 9 aa, synthetic construct
GAPAVAKVR

SEQ ID NO: 30511 - protein, 9 aa, synthetic construct
GAPAVIHLR

SEQ ID NO: 30512 - protein, 9 aa, synthetic construct
GAPAVIHLH

SEQ ID NO: 30513 - protein, 9 aa, synthetic construct
GAPAVIHLF

SEQ ID NO: 30514 - protein, 9 aa, synthetic construct
GAPAVIHVY

SEQ ID NO: 30515 - protein, 9 aa, synthetic construct
GAPAVIHVF

SEQ ID NO: 30516 - protein, 9 aa, synthetic construct
GAPAVIRVY

SEQ ID NO: 30517 - protein, 9 aa, synthetic construct
GAPAVIRVF

SEQ ID NO: 30518 - protein, 9 aa, synthetic construct
GAPAVGHLR

SEQ ID NO: 30519 - protein, 9 aa, synthetic construct
GAPAVGHLH

SEQ ID NO: 30520 - protein, 9 aa, synthetic construct
GAPAVGHLK

SEQ ID NO: 30521 - protein, 9 aa, synthetic construct
GAPAVGHVY

SEQ ID NO: 30522 - protein, 9 aa, synthetic construct
GAPAVGHVR

SEQ ID NO: 30523 - protein, 9 aa, synthetic construct
GAPAVGHVH

SEQ ID NO: 30524 - protein, 9 aa, synthetic construct
GAPAVGHVK

SEQ ID NO: 30525 - protein, 9 aa, synthetic construct
GAPAVGHVF

SEQ ID NO: 30526 - protein, 9 aa, synthetic construct
GAPAVGRLY

SEQ ID NO: 30527 - protein, 9 aa, synthetic construct
GAPAVGRLF

SEQ ID NO: 30528 - protein, 9 aa, synthetic construct
GAPAVGRVY

SEQ ID NO: 30529 - protein, 9 aa, synthetic construct
GAPAVGRVK

SEQ ID NO: 30530 - protein, 9 aa, synthetic construct
GAPAVGRVF

SEQ ID NO: 30531 - protein, 9 aa, synthetic construct
GAPAVGKLH

SEQ ID NO: 30532 - protein, 9 aa, synthetic construct
GAPAVGKLF

SEQ ID NO: 30533 - protein, 9 aa, synthetic construct
GAPAVGKVY

SEQ ID NO: 30534 - protein, 9 aa, synthetic construct
GAPAVGKVR

SEQ ID NO: 30535 - protein, 9 aa, synthetic construct
PLPAGGRVY

SEQ ID NO: 30536 - protein, 9 aa, synthetic construct
GAPAGVHLR

SEQ ID NO: 30537 - protein, 9 aa, synthetic construct
GAPAGVHLK

SEQ ID NO: 30538 - protein, 9 aa, synthetic construct
GAPAGVHVY

SEQ ID NO: 30539 - protein, 9 aa, synthetic construct
GAPAGVHVR

SEQ ID NO: 30540 - protein, 9 aa, synthetic construct
GAPAGVHVK

SEQ ID NO: 30541 - protein, 9 aa, synthetic construct
GAPAGVHVF

SEQ ID NO: 30542 - protein, 9 aa, synthetic construct
GAPAGVRLF

SEQ ID NO: 30543 - protein, 9 aa, synthetic construct
GAPAGVRVY

SEQ ID NO: 30544 - protein, 9 aa, synthetic construct
GAPAGVRVH

SEQ ID NO: 30545 - protein, 9 aa, synthetic construct
GAPAGVRVK

SEQ ID NO: 30546 - protein, 9 aa, synthetic construct
GAPAGVRVF

SEQ ID NO: 30547 - protein, 9 aa, synthetic construct
PLPAGGRVH

SEQ ID NO: 30548 - protein, 9 aa, synthetic construct
GAPAGVKLF

SEQ ID NO: 30549 - protein, 9 aa, synthetic construct
GAPAGVKVY

SEQ ID NO: 30550 - protein, 9 aa, synthetic construct
GAPAGVKVH

SEQ ID NO: 30551 - protein, 9 aa, synthetic construct
GAPAGVKVK

SEQ ID NO: 30552 - protein, 9 aa, synthetic construct
PLPAGGRVF

SEQ ID NO: 30553 - protein, 9 aa, synthetic construct
GAPAGLRVF

SEQ ID NO: 30554 - protein, 9 aa, synthetic construct
GAPAGLKVF

SEQ ID NO: 30555 - protein, 9 aa, synthetic construct
GAPAGARVH

SEQ ID NO: 30556 - protein, 9 aa, synthetic construct
GAPAGARVF

SEQ ID NO: 30557 - protein, 9 aa, synthetic construct
GAPAGAKVY

SEQ ID NO: 30558 - protein, 9 aa, synthetic construct
GAPAGAKVH

SEQ ID NO: 30559 - protein, 9 aa, synthetic construct
GAPAGAKVF

SEQ ID NO: 30560 - protein, 9 aa, synthetic construct
GAPAGIHLK

SEQ ID NO: 30561 - protein, 9 aa, synthetic construct
GAPAGIHVR

SEQ ID NO: 30562 - protein, 9 aa, synthetic construct
GAPAGIHVF

SEQ ID NO: 30563 - protein, 9 aa, synthetic construct
PLPAGGKVY

SEQ ID NO: 30564 - protein, 9 aa, synthetic construct
GAPAGIRVH

SEQ ID NO: 30565 - protein, 9 aa, synthetic construct
PLPAGGKVR

SEQ ID NO: 30566 - protein, 9 aa, synthetic construct
GAPAGIKLY

SEQ ID NO: 30567 - protein, 9 aa, synthetic construct
GAPAGIKLF

SEQ ID NO: 30568 - protein, 9 aa, synthetic construct
GAPAGIKVY

SEQ ID NO: 30569 - protein, 9 aa, synthetic construct
GAPAGIKVF

SEQ ID NO: 30570 - protein, 9 aa, synthetic construct
GAPAGGHLK

SEQ ID NO: 30571 - protein, 9 aa, synthetic construct
GAPAGGHVR

SEQ ID NO: 30572 - protein, 9 aa, synthetic construct
GAPAGGHVH

SEQ ID NO: 30573 - protein, 9 aa, synthetic construct
GAPAGGHVF

SEQ ID NO: 30574 - protein, 9 aa, synthetic construct
PLPAGGKVK

SEQ ID NO: 30575 - protein, 9 aa, synthetic construct
GAPAGGRVH

SEQ ID NO: 30576 - protein, 9 aa, synthetic construct
GAPAGGRVF

SEQ ID NO: 30577 - protein, 9 aa, synthetic construct
GAPAGGKLY

SEQ ID NO: 30578 - protein, 9 aa, synthetic construct
GAPAGGKLH

SEQ ID NO: 30579 - protein, 9 aa, synthetic construct
GAPAGGKLF

SEQ ID NO: 30580 - protein, 9 aa, synthetic construct
GAPAGGKVY

SEQ ID NO: 30581 - protein, 9 aa, synthetic construct
GAPAGGKVK

SEQ ID NO: 30582 - protein, 9 aa, synthetic construct
GAPAGGKVF

SEQ ID NO: 30583 - protein, 9 aa, synthetic construct
PLNGALRVY

SEQ ID NO: 30584 - protein, 9 aa, synthetic construct
GVNGAVHLK

SEQ ID NO: 30585 - protein, 9 aa, synthetic construct
GVNGAVRLY

SEQ ID NO: 30586 - protein, 9 aa, synthetic construct
GVNGAVRLH

SEQ ID NO: 30587 - protein, 9 aa, synthetic construct
GVNGAVRVY

SEQ ID NO: 30588 - protein, 9 aa, synthetic construct
GVNGAVKLY

SEQ ID NO: 30589 - protein, 9 aa, synthetic construct
GVNGAVKLF

SEQ ID NO: 30590 - protein, 9 aa, synthetic construct
GVNGAVKVY

SEQ ID NO: 30591 - protein, 9 aa, synthetic construct
GVNGAVKVH

SEQ ID NO: 30592 - protein, 9 aa, synthetic construct
GVNGAVKVK

SEQ ID NO: 30593 - protein, 9 aa, synthetic construct
GVNGALHLY

SEQ ID NO: 30594 - protein, 9 aa, synthetic construct
GVNGALHVH

SEQ ID NO: 30595 - protein, 9 aa, synthetic construct
GVNGALHVK

SEQ ID NO: 30596 - protein, 9 aa, synthetic construct
PTNGAVHLF

SEQ ID NO: 30597 - protein, 9 aa, synthetic construct
GVNGALRLH

SEQ ID NO: 30598 - protein, 9 aa, synthetic construct
GVNGALRVK

SEQ ID NO: 30599 - protein, 9 aa, synthetic construct
GVNGALKLH

SEQ ID NO: 30600 - protein, 9 aa, synthetic construct
GVNGAAHLY

SEQ ID NO: 30601 - protein, 9 aa, synthetic construct
GVNGAAHLR

SEQ ID NO: 30602 - protein, 9 aa, synthetic construct
GVNGAAHVK

SEQ ID NO: 30603 - protein, 9 aa, synthetic construct
GVNGAAHVF

SEQ ID NO: 30604 - protein, 9 aa, synthetic construct
GVNGAARLF

SEQ ID NO: 30605 - protein, 9 aa, synthetic construct
GVNGAARVR

SEQ ID NO: 30606 - protein, 9 aa, synthetic construct
GVNGAARVH

SEQ ID NO: 30607 - protein, 9 aa, synthetic construct
GVNGAARVF

SEQ ID NO: 30608 - protein, 9 aa, synthetic construct
GVNGAAKLR

SEQ ID NO: 30609 - protein, 9 aa, synthetic construct
GVNGAAKLH

SEQ ID NO: 30610 - protein, 9 aa, synthetic construct
GVNGAAKVY

SEQ ID NO: 30611 - protein, 9 aa, synthetic construct
PTNGAVHVF

SEQ ID NO: 30612 - protein, 9 aa, synthetic construct
GVNGAIHLR

SEQ ID NO: 30613 - protein, 9 aa, synthetic construct
GVNGAIHVR

SEQ ID NO: 30614 - protein, 9 aa, synthetic construct
GVNGAIHVH

SEQ ID NO: 30615 - protein, 9 aa, synthetic construct
GVNGAIRLF

SEQ ID NO: 30616 - protein, 9 aa, synthetic construct
GVNGAIRVY

SEQ ID NO: 30617 - protein, 9 aa, synthetic construct
GVNGAIKVY

SEQ ID NO: 30618 - protein, 9 aa, synthetic construct
GVNGAIKVH

SEQ ID NO: 30619 - protein, 9 aa, synthetic construct
GVNGAIKVF

SEQ ID NO: 30620 - protein, 9 aa, synthetic construct
GVNGAGRVY

SEQ ID NO: 30621 - protein, 9 aa, synthetic construct
GVNGAGRVH

SEQ ID NO: 30622 - protein, 9 aa, synthetic construct
GVNGAGRVK

SEQ ID NO: 30623 - protein, 9 aa, synthetic construct
PTNGAVRVY

SEQ ID NO: 30624 - protein, 9 aa, synthetic construct
GVNGTVRVY

SEQ ID NO: 30625 - protein, 9 aa, synthetic construct
GVNGTVRVF

SEQ ID NO: 30626 - protein, 9 aa, synthetic construct
GVNGTVKVY

SEQ ID NO: 30627 - protein, 9 aa, synthetic construct
GVNGTLKVY

SEQ ID NO: 30628 - protein, 9 aa, synthetic construct
GVNGTLKVF

SEQ ID NO: 30629 - protein, 9 aa, synthetic construct
PTNGAVKLR

SEQ ID NO: 30630 - protein, 9 aa, synthetic construct
GVNGTAKLR

SEQ ID NO: 30631 - protein, 9 aa, synthetic construct
GVNGTAKLF

SEQ ID NO: 30632 - protein, 9 aa, synthetic construct
GVNGTIRLH

SEQ ID NO: 30633 - protein, 9 aa, synthetic construct
GVNGTIRLF

SEQ ID NO: 30634 - protein, 9 aa, synthetic construct
GVNGTIRVF

SEQ ID NO: 30635 - protein, 9 aa, synthetic construct
GVNGTIKLH

SEQ ID NO: 30636 - protein, 9 aa, synthetic construct
PTNGAVKVH

SEQ ID NO: 30637 - protein, 9 aa, synthetic construct
PTNGAVKVK

SEQ ID NO: 30638 - protein, 9 aa, synthetic construct
GVNGTGRLH

SEQ ID NO: 30639 - protein, 9 aa, synthetic construct
GVNGTGRVY

SEQ ID NO: 30640 - protein, 9 aa, synthetic construct
GVNGTGKLH

SEQ ID NO: 30641 - protein, 9 aa, synthetic construct
GVNGTGKVF

SEQ ID NO: 30642 - protein, 9 aa, synthetic construct
GVNGSVHLR

SEQ ID NO: 30643 - protein, 9 aa, synthetic construct
GVNGSVHLH

SEQ ID NO: 30644 - protein, 9 aa, synthetic construct
GVNGSVRVH

SEQ ID NO: 30645 - protein, 9 aa, synthetic construct
GVNGSVKLF

SEQ ID NO: 30646 - protein, 9 aa, synthetic construct
GVNGSVKVR

SEQ ID NO: 30647 - protein, 9 aa, synthetic construct
GVNGSLHLY

SEQ ID NO: 30648 - protein, 9 aa, synthetic construct
GVNGSLHLR

SEQ ID NO: 30649 - protein, 9 aa, synthetic construct
GVNGSLHLH

SEQ ID NO: 30650 - protein, 9 aa, synthetic construct
GVNGSLHLF

SEQ ID NO: 30651 - protein, 9 aa, synthetic construct
GVNGSLRVY

SEQ ID NO: 30652 - protein, 9 aa, synthetic construct
GVNGSLRVF

SEQ ID NO: 30653 - protein, 9 aa, synthetic construct
GVNGSLKLH

SEQ ID NO: 30654 - protein, 9 aa, synthetic construct
GVNGSLKVH

SEQ ID NO: 30655 - protein, 9 aa, synthetic construct
PTNGALHVH

SEQ ID NO: 30656 - protein, 9 aa, synthetic construct
PTNGALHVF

SEQ ID NO: 30657 - protein, 9 aa, synthetic construct
GVNGSIHLK

SEQ ID NO: 30658 - protein, 9 aa, synthetic construct
GVNGSIHLF

SEQ ID NO: 30659 - protein, 9 aa, synthetic construct
PTNGALRLY

SEQ ID NO: 30660 - protein, 9 aa, synthetic construct
GVNGSIRLY

SEQ ID NO: 30661 - protein, 9 aa, synthetic construct
GVNGSIRLH

SEQ ID NO: 30662 - protein, 9 aa, synthetic construct
GVNGSIRLF

SEQ ID NO: 30663 - protein, 9 aa, synthetic construct
GVNGSIRVY

SEQ ID NO: 30664 - protein, 9 aa, synthetic construct
GVNGSIRVR

SEQ ID NO: 30665 - protein, 9 aa, synthetic construct
GVNGSIRVH

SEQ ID NO: 30666 - protein, 9 aa, synthetic construct
GVNGSIKLH

SEQ ID NO: 30667 - protein, 9 aa, synthetic construct
GVNGSIKVY

SEQ ID NO: 30668 - protein, 9 aa, synthetic construct
PTNGALRLH

SEQ ID NO: 30669 - protein, 9 aa, synthetic construct
GVNGSGHLF

SEQ ID NO: 30670 - protein, 9 aa, synthetic construct
GVNGSGHVY

SEQ ID NO: 30671 - protein, 9 aa, synthetic construct
GVNGSGRLY

SEQ ID NO: 30672 - protein, 9 aa, synthetic construct
GVNGSGRLK

SEQ ID NO: 30673 - protein, 9 aa, synthetic construct
PTNGALRLF

SEQ ID NO: 30674 - protein, 9 aa, synthetic construct
GVNGSGKVY

SEQ ID NO: 30675 - protein, 9 aa, synthetic construct
GVNGVVHLF

SEQ ID NO: 30676 - protein, 9 aa, synthetic construct
PTNGALRVR

SEQ ID NO: 30677 - protein, 9 aa, synthetic construct
PTNGALRVH

SEQ ID NO: 30678 - protein, 9 aa, synthetic construct
PTNGALRVK

SEQ ID NO: 30679 - protein, 9 aa, synthetic construct
GVNGVLHLR

SEQ ID NO: 30680 - protein, 9 aa, synthetic construct
GVNGVLHLH

SEQ ID NO: 30681 - protein, 9 aa, synthetic construct
GVNGVLHLK

SEQ ID NO: 30682 - protein, 9 aa, synthetic construct
GVNGVLHVR

SEQ ID NO: 30683 - protein, 9 aa, synthetic construct
GVNGVLRLR

SEQ ID NO: 30684 - protein, 9 aa, synthetic construct
GVNGVLRLH

SEQ ID NO: 30685 - protein, 9 aa, synthetic construct
GVNGVLRLF

SEQ ID NO: 30686 - protein, 9 aa, synthetic construct
PTNGALKLY

SEQ ID NO: 30687 - protein, 9 aa, synthetic construct
GVNGVLKLY

SEQ ID NO: 30688 - protein, 9 aa, synthetic construct
GVNGVLKLR

SEQ ID NO: 30689 - protein, 9 aa, synthetic construct
PTNGALKLR

SEQ ID NO: 30690 - protein, 9 aa, synthetic construct
PTNGALKLH

SEQ ID NO: 30691 - protein, 9 aa, synthetic construct
GVNGVIHLH

SEQ ID NO: 30692 - protein, 9 aa, synthetic construct
GVNGVIHVR

SEQ ID NO: 30693 - protein, 9 aa, synthetic construct
PTNGALKVR

SEQ ID NO: 30694 - protein, 9 aa, synthetic construct
GVNGVIKLF

SEQ ID NO: 30695 - protein, 9 aa, synthetic construct
GVNGVGHLR

SEQ ID NO: 30696 - protein, 9 aa, synthetic construct
GVNGVGHVR

SEQ ID NO: 30697 - protein, 9 aa, synthetic construct
GVNGVGHVK

SEQ ID NO: 30698 - protein, 9 aa, synthetic construct
GVNGVGRLH

SEQ ID NO: 30699 - protein, 9 aa, synthetic construct
PTNGALKVF

SEQ ID NO: 30700 - protein, 9 aa, synthetic construct
GVNGVGKLR

SEQ ID NO: 30701 - protein, 9 aa, synthetic construct
GVNGGVHLH

SEQ ID NO: 30702 - protein, 9 aa, synthetic construct
GVNGGVHLF

SEQ ID NO: 30703 - protein, 9 aa, synthetic construct
GVNGGVRLY

SEQ ID NO: 30704 - protein, 9 aa, synthetic construct
GVNGGVRLH

SEQ ID NO: 30705 - protein, 9 aa, synthetic construct
GVNGGVRLK

SEQ ID NO: 30706 - protein, 9 aa, synthetic construct
GVNGGVRVY

SEQ ID NO: 30707 - protein, 9 aa, synthetic construct
GVNGGVRVH

SEQ ID NO: 30708 - protein, 9 aa, synthetic construct
GVNGGVRVF

SEQ ID NO: 30709 - protein, 9 aa, synthetic construct
GVNGGVKVH

SEQ ID NO: 30710 - protein, 9 aa, synthetic construct
GVNGGLHLR

SEQ ID NO: 30711 - protein, 9 aa, synthetic construct
GVNGGLHLH

SEQ ID NO: 30712 - protein, 9 aa, synthetic construct
GVNGGIRLR

SEQ ID NO: 30713 - protein, 9 aa, synthetic construct
GVNGGIRLF

SEQ ID NO: 30714 - protein, 9 aa, synthetic construct
GVNGGIRVY

SEQ ID NO: 30715 - protein, 9 aa, synthetic construct
GVNGGIRVR

SEQ ID NO: 30716 - protein, 9 aa, synthetic construct
GVNGGIKLR

SEQ ID NO: 30717 - protein, 9 aa, synthetic construct
GVNGGIKVH

SEQ ID NO: 30718 - protein, 9 aa, synthetic construct
GVNGGIKVF

SEQ ID NO: 30719 - protein, 9 aa, synthetic construct
GVNGGGHLR

SEQ ID NO: 30720 - protein, 9 aa, synthetic construct
GVNGGGHLK

SEQ ID NO: 30721 - protein, 9 aa, synthetic construct
GVNGGGHVH

SEQ ID NO: 30722 - protein, 9 aa, synthetic construct
GVNGGGHVF

SEQ ID NO: 30723 - protein, 9 aa, synthetic construct
GVNGGGRLF

SEQ ID NO: 30724 - protein, 9 aa, synthetic construct
GVNGGGRVR

SEQ ID NO: 30725 - protein, 9 aa, synthetic construct
GVNGGGRVF

SEQ ID NO: 30726 - protein, 9 aa, synthetic construct
GVNGGGKLK

SEQ ID NO: 30727 - protein, 9 aa, synthetic construct
GVNGGGKVY

SEQ ID NO: 30728 - protein, 9 aa, synthetic construct
GVNAAVHVR

SEQ ID NO: 30729 - protein, 9 aa, synthetic construct
GVNAAVHVK

SEQ ID NO: 30730 - protein, 9 aa, synthetic construct
PTNGAARVR

SEQ ID NO: 30731 - protein, 9 aa, synthetic construct
GVNAAVRLH

SEQ ID NO: 30732 - protein, 9 aa, synthetic construct
GVNAAVRLF

SEQ ID NO: 30733 - protein, 9 aa, synthetic construct
GVNAAVRVY

SEQ ID NO: 30734 - protein, 9 aa, synthetic construct
GVNAAVRVF

SEQ ID NO: 30735 - protein, 9 aa, synthetic construct
GVNAAVKVH

SEQ ID NO: 30736 - protein, 9 aa, synthetic construct
GVNAAVKVK

SEQ ID NO: 30737 - protein, 9 aa, synthetic construct
GVNAALHLY

SEQ ID NO: 30738 - protein, 9 aa, synthetic construct
GVNAALHLH

SEQ ID NO: 30739 - protein, 9 aa, synthetic construct
GVNAALHLK

SEQ ID NO: 30740 - protein, 9 aa, synthetic construct
GVNAALHLF

SEQ ID NO: 30741 - protein, 9 aa, synthetic construct
GVNAALHVR

SEQ ID NO: 30742 - protein, 9 aa, synthetic construct
GVNAALHVK

SEQ ID NO: 30743 - protein, 9 aa, synthetic construct
GVNAALRLH

SEQ ID NO: 30744 - protein, 9 aa, synthetic construct
GVNAALRVH

SEQ ID NO: 30745 - protein, 9 aa, synthetic construct
GVNAALKVY

SEQ ID NO: 30746 - protein, 9 aa, synthetic construct
GVNAAAHLY

SEQ ID NO: 30747 - protein, 9 aa, synthetic construct
GVNAAAHLR

SEQ ID NO: 30748 - protein, 9 aa, synthetic construct
GVNAAAHVY

SEQ ID NO: 30749 - protein, 9 aa, synthetic construct
GVNAAAHVH

SEQ ID NO: 30750 - protein, 9 aa, synthetic construct
GVNAAARLH

SEQ ID NO: 30751 - protein, 9 aa, synthetic construct
GVNAAARLF

SEQ ID NO: 30752 - protein, 9 aa, synthetic construct
GVNAAARVY

SEQ ID NO: 30753 - protein, 9 aa, synthetic construct
GVNAAARVR

SEQ ID NO: 30754 - protein, 9 aa, synthetic construct
GVNAAARVH

SEQ ID NO: 30755 - protein, 9 aa, synthetic construct
GVNAAAKLY

SEQ ID NO: 30756 - protein, 9 aa, synthetic construct
GVNAAAKLH

SEQ ID NO: 30757 - protein, 9 aa, synthetic construct
GVNAAAKLF

SEQ ID NO: 30758 - protein, 9 aa, synthetic construct
GVNAAAKVH

SEQ ID NO: 30759 - protein, 9 aa, synthetic construct
GVNAAIHLY

SEQ ID NO: 30760 - protein, 9 aa, synthetic construct
GVNAAIHLK

SEQ ID NO: 30761 - protein, 9 aa, synthetic construct
GVNAAIHVR

SEQ ID NO: 30762 - protein, 9 aa, synthetic construct
GVNAAIRLY

SEQ ID NO: 30763 - protein, 9 aa, synthetic construct
GVNAAIRLH

SEQ ID NO: 30764 - protein, 9 aa, synthetic construct
GVNAAIRLF

SEQ ID NO: 30765 - protein, 9 aa, synthetic construct
GVNAAIRVH

SEQ ID NO: 30766 - protein, 9 aa, synthetic construct
GVNAAIKLH

SEQ ID NO: 30767 - protein, 9 aa, synthetic construct
GVNAAIKLK

SEQ ID NO: 30768 - protein, 9 aa, synthetic construct
GVNAAIKLF

SEQ ID NO: 30769 - protein, 9 aa, synthetic construct
GVNAAIKVY

SEQ ID NO: 30770 - protein, 9 aa, synthetic construct
GVNAAIKVR

SEQ ID NO: 30771 - protein, 9 aa, synthetic construct
GVNAAIKVH

SEQ ID NO: 30772 - protein, 9 aa, synthetic construct
GVNAAGHLY

SEQ ID NO: 30773 - protein, 9 aa, synthetic construct
GVNAAGHLR

SEQ ID NO: 30774 - protein, 9 aa, synthetic construct
GVNAAGHLK

SEQ ID NO: 30775 - protein, 9 aa, synthetic construct
GVNAAGHVY

SEQ ID NO: 30776 - protein, 9 aa, synthetic construct
GVNAAGHVK

SEQ ID NO: 30777 - protein, 9 aa, synthetic construct
GVNAAGRLY

SEQ ID NO: 30778 - protein, 9 aa, synthetic construct
GVNAAGRLH

SEQ ID NO: 30779 - protein, 9 aa, synthetic construct
GVNAAGRVY

SEQ ID NO: 30780 - protein, 9 aa, synthetic construct
GVNAAGRVR

SEQ ID NO: 30781 - protein, 9 aa, synthetic construct
GVNAAGRVH

SEQ ID NO: 30782 - protein, 9 aa, synthetic construct
GVNAAGRVF

SEQ ID NO: 30783 - protein, 9 aa, synthetic construct
GVNAAGKLY

SEQ ID NO: 30784 - protein, 9 aa, synthetic construct
GVNAAGKLR

SEQ ID NO: 30785 - protein, 9 aa, synthetic construct
GVNAAGKLF

SEQ ID NO: 30786 - protein, 9 aa, synthetic construct
GVNAAGKVY

SEQ ID NO: 30787 - protein, 9 aa, synthetic construct
GVNAAGKVR

SEQ ID NO: 30788 - protein, 9 aa, synthetic construct
GVNAAGKVH

SEQ ID NO: 30789 - protein, 9 aa, synthetic construct
GVNAAGKVF

SEQ ID NO: 30790 - protein, 9 aa, synthetic construct
PTNGAIHLY

SEQ ID NO: 30791 - protein, 9 aa, synthetic construct
GVNATVHLR

SEQ ID NO: 30792 - protein, 9 aa, synthetic construct
GVNATVHLH

SEQ ID NO: 30793 - protein, 9 aa, synthetic construct
GVNATVHVK

SEQ ID NO: 30794 - protein, 9 aa, synthetic construct
GVNATVRLY

SEQ ID NO: 30795 - protein, 9 aa, synthetic construct
GVNATVKLR

SEQ ID NO: 30796 - protein, 9 aa, synthetic construct
GVNATVKVH

SEQ ID NO: 30797 - protein, 9 aa, synthetic construct
GVNATVKVK

SEQ ID NO: 30798 - protein, 9 aa, synthetic construct
GVNATVKVF

SEQ ID NO: 30799 - protein, 9 aa, synthetic construct
GVNATLHLY

SEQ ID NO: 30800 - protein, 9 aa, synthetic construct
GVNATLHLK

SEQ ID NO: 30801 - protein, 9 aa, synthetic construct
GVNATLHVK

SEQ ID NO: 30802 - protein, 9 aa, synthetic construct
GVNATLKLY

SEQ ID NO: 30803 - protein, 9 aa, synthetic construct
GVNATLKVH

SEQ ID NO: 30804 - protein, 9 aa, synthetic construct
GVNATAHLR

SEQ ID NO: 30805 - protein, 9 aa, synthetic construct
GVNATAHLF

SEQ ID NO: 30806 - protein, 9 aa, synthetic construct
GVNATAHVR

SEQ ID NO: 30807 - protein, 9 aa, synthetic construct
GVNATAHVF

SEQ ID NO: 30808 - protein, 9 aa, synthetic construct
GVNATARLH

SEQ ID NO: 30809 - protein, 9 aa, synthetic construct
GVNATARLF

SEQ ID NO: 30810 - protein, 9 aa, synthetic construct
GVNATARVR

SEQ ID NO: 30811 - protein, 9 aa, synthetic construct
GVNATARVH

SEQ ID NO: 30812 - protein, 9 aa, synthetic construct
GVNATAKLR

SEQ ID NO: 30813 - protein, 9 aa, synthetic construct
GVNATAKLK

SEQ ID NO: 30814 - protein, 9 aa, synthetic construct
GVNATAKLF

SEQ ID NO: 30815 - protein, 9 aa, synthetic construct
GVNATAKVY

SEQ ID NO: 30816 - protein, 9 aa, synthetic construct
GVNATAKVH

SEQ ID NO: 30817 - protein, 9 aa, synthetic construct
GVNATAKVF

SEQ ID NO: 30818 - protein, 9 aa, synthetic construct
GVNATIRLY

SEQ ID NO: 30819 - protein, 9 aa, synthetic construct
GVNATIRLH

SEQ ID NO: 30820 - protein, 9 aa, synthetic construct
GVNATIRLF

SEQ ID NO: 30821 - protein, 9 aa, synthetic construct
GVNATIRVF

SEQ ID NO: 30822 - protein, 9 aa, synthetic construct
GVNATIKLK

SEQ ID NO: 30823 - protein, 9 aa, synthetic construct
GVNATGHLR

SEQ ID NO: 30824 - protein, 9 aa, synthetic construct
GVNATGHLK

SEQ ID NO: 30825 - protein, 9 aa, synthetic construct
GVNATGHVY

SEQ ID NO: 30826 - protein, 9 aa, synthetic construct
GVNATGHVR

SEQ ID NO: 30827 - protein, 9 aa, synthetic construct
GVNATGHVK

SEQ ID NO: 30828 - protein, 9 aa, synthetic construct
GVNATGRLY

SEQ ID NO: 30829 - protein, 9 aa, synthetic construct
GVNATGRLH

SEQ ID NO: 30830 - protein, 9 aa, synthetic construct
GVNATGRLF

SEQ ID NO: 30831 - protein, 9 aa, synthetic construct
GVNATGRVY

SEQ ID NO: 30832 - protein, 9 aa, synthetic construct
GVNATGRVH

SEQ ID NO: 30833 - protein, 9 aa, synthetic construct
GVNATGKLY

SEQ ID NO: 30834 - protein, 9 aa, synthetic construct
GVNATGKLH

SEQ ID NO: 30835 - protein, 9 aa, synthetic construct
GVNATGKLK

SEQ ID NO: 30836 - protein, 9 aa, synthetic construct
GVNATGKLF

SEQ ID NO: 30837 - protein, 9 aa, synthetic construct
GVNATGKVY

SEQ ID NO: 30838 - protein, 9 aa, synthetic construct
GVNATGKVF

SEQ ID NO: 30839 - protein, 9 aa, synthetic construct
PTNGAIRVY

SEQ ID NO: 30840 - protein, 9 aa, synthetic construct
GVNASVHLY

SEQ ID NO: 30841 - protein, 9 aa, synthetic construct
GVNASVHLK

SEQ ID NO: 30842 - protein, 9 aa, synthetic construct
GVNASVHVY

SEQ ID NO: 30843 - protein, 9 aa, synthetic construct
GVNASVHVR

SEQ ID NO: 30844 - protein, 9 aa, synthetic construct
GVNASVRLY

SEQ ID NO: 30845 - protein, 9 aa, synthetic construct
GVNASVRLH

SEQ ID NO: 30846 - protein, 9 aa, synthetic construct
GVNASVRVH

SEQ ID NO: 30847 - protein, 9 aa, synthetic construct
GVNASVRVK

SEQ ID NO: 30848 - protein, 9 aa, synthetic construct
GVNASVKLY

SEQ ID NO: 30849 - protein, 9 aa, synthetic construct
GVNASVKLR

SEQ ID NO: 30850 - protein, 9 aa, synthetic construct
GVNASVKLH

SEQ ID NO: 30851 - protein, 9 aa, synthetic construct
GVNASVKLK

SEQ ID NO: 30852 - protein, 9 aa, synthetic construct
GVNASVKLF

SEQ ID NO: 30853 - protein, 9 aa, synthetic construct
GVNASVKVY

SEQ ID NO: 30854 - protein, 9 aa, synthetic construct
GVNASVKVR

SEQ ID NO: 30855 - protein, 9 aa, synthetic construct
GVNASVKVH

SEQ ID NO: 30856 - protein, 9 aa, synthetic construct
GVNASVKVK

SEQ ID NO: 30857 - protein, 9 aa, synthetic construct
GVNASLHLR

SEQ ID NO: 30858 - protein, 9 aa, synthetic construct
GVNASLHLH

SEQ ID NO: 30859 - protein, 9 aa, synthetic construct
GVNASLHLK

SEQ ID NO: 30860 - protein, 9 aa, synthetic construct
GVNASLHLF

SEQ ID NO: 30861 - protein, 9 aa, synthetic construct
GVNASLHVY

SEQ ID NO: 30862 - protein, 9 aa, synthetic construct
GVNASLHVR

SEQ ID NO: 30863 - protein, 9 aa, synthetic construct
PTNGAIRVF

SEQ ID NO: 30864 - protein, 9 aa, synthetic construct
GVNASLRLH

SEQ ID NO: 30865 - protein, 9 aa, synthetic construct
GVNASLRVH

SEQ ID NO: 30866 - protein, 9 aa, synthetic construct
GVNASLRVF

SEQ ID NO: 30867 - protein, 9 aa, synthetic construct
GVNASLKLH

SEQ ID NO: 30868 - protein, 9 aa, synthetic construct
GVNASLKVY

SEQ ID NO: 30869 - protein, 9 aa, synthetic construct
GVNASLKVH

SEQ ID NO: 30870 - protein, 9 aa, synthetic construct
GVNASLKVF

SEQ ID NO: 30871 - protein, 9 aa, synthetic construct
GVNASAHVR

SEQ ID NO: 30872 - protein, 9 aa, synthetic construct
GVNASARLY

SEQ ID NO: 30873 - protein, 9 aa, synthetic construct
GVNASARVY

SEQ ID NO: 30874 - protein, 9 aa, synthetic construct
GVNASAKLY

SEQ ID NO: 30875 - protein, 9 aa, synthetic construct
GVNASAKLR

SEQ ID NO: 30876 - protein, 9 aa, synthetic construct
GVNASAKLH

SEQ ID NO: 30877 - protein, 9 aa, synthetic construct
GVNASAKVY

SEQ ID NO: 30878 - protein, 9 aa, synthetic construct
GVNASAKVH

SEQ ID NO: 30879 - protein, 9 aa, synthetic construct
GVNASAKVF

SEQ ID NO: 30880 - protein, 9 aa, synthetic construct
GVNASIHLY

SEQ ID NO: 30881 - protein, 9 aa, synthetic construct
GVNASIHLR

SEQ ID NO: 30882 - protein, 9 aa, synthetic construct
GVNASIHVY

SEQ ID NO: 30883 - protein, 9 aa, synthetic construct
GVNASIHVF

SEQ ID NO: 30884 - protein, 9 aa, synthetic construct
GVNASIRLK

SEQ ID NO: 30885 - protein, 9 aa, synthetic construct
PTNGAIKVR

SEQ ID NO: 30886 - protein, 9 aa, synthetic construct
GVNASIKVH

SEQ ID NO: 30887 - protein, 9 aa, synthetic construct
GVNASGHLK

SEQ ID NO: 30888 - protein, 9 aa, synthetic construct
GVNASGHLF

SEQ ID NO: 30889 - protein, 9 aa, synthetic construct
GVNASGHVY

SEQ ID NO: 30890 - protein, 9 aa, synthetic construct
GVNASGHVR

SEQ ID NO: 30891 - protein, 9 aa, synthetic construct
GVNASGRLY

SEQ ID NO: 30892 - protein, 9 aa, synthetic construct
GVNASGRLR

SEQ ID NO: 30893 - protein, 9 aa, synthetic construct
GVNASGRLF

SEQ ID NO: 30894 - protein, 9 aa, synthetic construct
GVNASGKLY

SEQ ID NO: 30895 - protein, 9 aa, synthetic construct
GVNASGKLH

SEQ ID NO: 30896 - protein, 9 aa, synthetic construct
GVNASGKVY

SEQ ID NO: 30897 - protein, 9 aa, synthetic construct
GVNASGKVH

SEQ ID NO: 30898 - protein, 9 aa, synthetic construct
GVNAVVHLY

SEQ ID NO: 30899 - protein, 9 aa, synthetic construct
GVNAVVHLH

SEQ ID NO: 30900 - protein, 9 aa, synthetic construct
GVNAVVHVY

SEQ ID NO: 30901 - protein, 9 aa, synthetic construct
GVNAVVHVR

SEQ ID NO: 30902 - protein, 9 aa, synthetic construct
GVNAVVHVK

SEQ ID NO: 30903 - protein, 9 aa, synthetic construct
GVNAVVKLY

SEQ ID NO: 30904 - protein, 9 aa, synthetic construct
GVNAVLHLF

SEQ ID NO: 30905 - protein, 9 aa, synthetic construct
GVNAVLHVY

SEQ ID NO: 30906 - protein, 9 aa, synthetic construct
GVNAVLHVR

SEQ ID NO: 30907 - protein, 9 aa, synthetic construct
GVNAVLHVK

SEQ ID NO: 30908 - protein, 9 aa, synthetic construct
GVNAVLHVF

SEQ ID NO: 30909 - protein, 9 aa, synthetic construct
GVNAVLRLF

SEQ ID NO: 30910 - protein, 9 aa, synthetic construct
GVNAVLRVF

SEQ ID NO: 30911 - protein, 9 aa, synthetic construct
PTNGAGHVY

SEQ ID NO: 30912 - protein, 9 aa, synthetic construct
GVNAVLKLR

SEQ ID NO: 30913 - protein, 9 aa, synthetic construct
GVNAVLKVY

SEQ ID NO: 30914 - protein, 9 aa, synthetic construct
PTNGAGHVR

SEQ ID NO: 30915 - protein, 9 aa, synthetic construct
GVNAVAHLK

SEQ ID NO: 30916 - protein, 9 aa, synthetic construct
GVNAVAHVR

SEQ ID NO: 30917 - protein, 9 aa, synthetic construct
GVNAVARVH

SEQ ID NO: 30918 - protein, 9 aa, synthetic construct
PTNGAGHVK

SEQ ID NO: 30919 - protein, 9 aa, synthetic construct
GVNAVAKLY

SEQ ID NO: 30920 - protein, 9 aa, synthetic construct
GVNAVAKLR

SEQ ID NO: 30921 - protein, 9 aa, synthetic construct
GVNAVAKLK

SEQ ID NO: 30922 - protein, 9 aa, synthetic construct
GVNAVAKLF

SEQ ID NO: 30923 - protein, 9 aa, synthetic construct
GVNAVAKVY

SEQ ID NO: 30924 - protein, 9 aa, synthetic construct
GVNAVAKVR

SEQ ID NO: 30925 - protein, 9 aa, synthetic construct
GVNAVAKVH

SEQ ID NO: 30926 - protein, 9 aa, synthetic construct
GVNAVIHLY

SEQ ID NO: 30927 - protein, 9 aa, synthetic construct
GVNAVIHLR

SEQ ID NO: 30928 - protein, 9 aa, synthetic construct
GVNAVIHLH

SEQ ID NO: 30929 - protein, 9 aa, synthetic construct
GVNAVIHVR

SEQ ID NO: 30930 - protein, 9 aa, synthetic construct
GVNAVIHVF

SEQ ID NO: 30931 - protein, 9 aa, synthetic construct
GVNAVIRLH

SEQ ID NO: 30932 - protein, 9 aa, synthetic construct
GVNAVIRVH

SEQ ID NO: 30933 - protein, 9 aa, synthetic construct
PTNGAGRLR

SEQ ID NO: 30934 - protein, 9 aa, synthetic construct
GVNAVIKVH

SEQ ID NO: 30935 - protein, 9 aa, synthetic construct
GVNAVGHLK

SEQ ID NO: 30936 - protein, 9 aa, synthetic construct
GVNAVGRLH

SEQ ID NO: 30937 - protein, 9 aa, synthetic construct
GVNAVGRVY

SEQ ID NO: 30938 - protein, 9 aa, synthetic construct
GVNAVGRVH

SEQ ID NO: 30939 - protein, 9 aa, synthetic construct
GVNAVGKLR

SEQ ID NO: 30940 - protein, 9 aa, synthetic construct
GVNAVGKLF

SEQ ID NO: 30941 - protein, 9 aa, synthetic construct
GVNAVGKVY

SEQ ID NO: 30942 - protein, 9 aa, synthetic construct
GVNAVGKVR

SEQ ID NO: 30943 - protein, 9 aa, synthetic construct
GVNAVGKVF

SEQ ID NO: 30944 - protein, 9 aa, synthetic construct
PTNGAGRVY

SEQ ID NO: 30945 - protein, 9 aa, synthetic construct
GVNAGVHVY

SEQ ID NO: 30946 - protein, 9 aa, synthetic construct
GVNAGVHVK

SEQ ID NO: 30947 - protein, 9 aa, synthetic construct
GVNAGVHVF

SEQ ID NO: 30948 - protein, 9 aa, synthetic construct
GVNAGVRLY

SEQ ID NO: 30949 - protein, 9 aa, synthetic construct
GVNAGVRLH

SEQ ID NO: 30950 - protein, 9 aa, synthetic construct
GVNAGVRLF

SEQ ID NO: 30951 - protein, 9 aa, synthetic construct
GVNAGVRVR

SEQ ID NO: 30952 - protein, 9 aa, synthetic construct
GVNAGVRVH

SEQ ID NO: 30953 - protein, 9 aa, synthetic construct
GVNAGVRVK

SEQ ID NO: 30954 - protein, 9 aa, synthetic construct
GVNAGVKLH

SEQ ID NO: 30955 - protein, 9 aa, synthetic construct
GVNAGVKVH

SEQ ID NO: 30956 - protein, 9 aa, synthetic construct
GVNAGVKVK

SEQ ID NO: 30957 - protein, 9 aa, synthetic construct
PTNGAGRVK

SEQ ID NO: 30958 - protein, 9 aa, synthetic construct
GVNAGLHLR

SEQ ID NO: 30959 - protein, 9 aa, synthetic construct
GVNAGLHVY

SEQ ID NO: 30960 - protein, 9 aa, synthetic construct
GVNAGLHVH

SEQ ID NO: 30961 - protein, 9 aa, synthetic construct
GVNAGLHVF

SEQ ID NO: 30962 - protein, 9 aa, synthetic construct
PLNGVVRLF

SEQ ID NO: 30963 - protein, 9 aa, synthetic construct
GVNAGAHLF

SEQ ID NO: 30964 - protein, 9 aa, synthetic construct
GVNAGARLY

SEQ ID NO: 30965 - protein, 9 aa, synthetic construct
GVNAGARLF

SEQ ID NO: 30966 - protein, 9 aa, synthetic construct
GVNAGARVY

SEQ ID NO: 30967 - protein, 9 aa, synthetic construct
GVNAGARVR

SEQ ID NO: 30968 - protein, 9 aa, synthetic construct
GVNAGARVH

SEQ ID NO: 30969 - protein, 9 aa, synthetic construct
GVNAGARVF

SEQ ID NO: 30970 - protein, 9 aa, synthetic construct
GVNAGAKLR

SEQ ID NO: 30971 - protein, 9 aa, synthetic construct
GVNAGAKLH

SEQ ID NO: 30972 - protein, 9 aa, synthetic construct
GVNAGAKLK

SEQ ID NO: 30973 - protein, 9 aa, synthetic construct
GVNAGIHLR

SEQ ID NO: 30974 - protein, 9 aa, synthetic construct
GVNAGIHLH

SEQ ID NO: 30975 - protein, 9 aa, synthetic construct
GVNAGIHLK

SEQ ID NO: 30976 - protein, 9 aa, synthetic construct
GVNAGIHVY

SEQ ID NO: 30977 - protein, 9 aa, synthetic construct
GVNAGIHVR

SEQ ID NO: 30978 - protein, 9 aa, synthetic construct
GVNAGIHVH

SEQ ID NO: 30979 - protein, 9 aa, synthetic construct
GVNAGIRLF

SEQ ID NO: 30980 - protein, 9 aa, synthetic construct
GVNAGIRVH

SEQ ID NO: 30981 - protein, 9 aa, synthetic construct
GVNAGIRVK

SEQ ID NO: 30982 - protein, 9 aa, synthetic construct
GVNAGIKLF

SEQ ID NO: 30983 - protein, 9 aa, synthetic construct
GVNAGIKVY

SEQ ID NO: 30984 - protein, 9 aa, synthetic construct
GVNAGIKVH

SEQ ID NO: 30985 - protein, 9 aa, synthetic construct
GVNAGIKVF

SEQ ID NO: 30986 - protein, 9 aa, synthetic construct
GVNAGGHLY

SEQ ID NO: 30987 - protein, 9 aa, synthetic construct
GVNAGGHLR

SEQ ID NO: 30988 - protein, 9 aa, synthetic construct
GVNAGGHVH

SEQ ID NO: 30989 - protein, 9 aa, synthetic construct
GVNAGGRLR

SEQ ID NO: 30990 - protein, 9 aa, synthetic construct
GVNAGGRVR

SEQ ID NO: 30991 - protein, 9 aa, synthetic construct
GVNAGGRVH

SEQ ID NO: 30992 - protein, 9 aa, synthetic construct
GVNAGGKLY

SEQ ID NO: 30993 - protein, 9 aa, synthetic construct
GVNAGGKLH

SEQ ID NO: 30994 - protein, 9 aa, synthetic construct
GVNAGGKVK

SEQ ID NO: 30995 - protein, 9 aa, synthetic construct
GVNAGGKVF

SEQ ID NO: 30996 - protein, 9 aa, synthetic construct
GVQGAVHLH

SEQ ID NO: 30997 - protein, 9 aa, synthetic construct
GVQGAVHLK

SEQ ID NO: 30998 - protein, 9 aa, synthetic construct
GVQGAVHLF

SEQ ID NO: 30999 - protein, 9 aa, synthetic construct
GVQGAVHVY

SEQ ID NO: 31000 - protein, 9 aa, synthetic construct
GVQGAVHVR

SEQ ID NO: 31001 - protein, 9 aa, synthetic construct
GVQGAVHVH

SEQ ID NO: 31002 - protein, 9 aa, synthetic construct
GVQGAVHVF

SEQ ID NO: 31003 - protein, 9 aa, synthetic construct
PTNGTVHLR

SEQ ID NO: 31004 - protein, 9 aa, synthetic construct
GVQGAVRLH

SEQ ID NO: 31005 - protein, 9 aa, synthetic construct
GVQGAVRLF

SEQ ID NO: 31006 - protein, 9 aa, synthetic construct
GVQGAVRVY

SEQ ID NO: 31007 - protein, 9 aa, synthetic construct
GVQGAVKLY

SEQ ID NO: 31008 - protein, 9 aa, synthetic construct
GVQGAVKVY

SEQ ID NO: 31009 - protein, 9 aa, synthetic construct
PTNGTVHLK

SEQ ID NO: 31010 - protein, 9 aa, synthetic construct
GVQGALRVK

SEQ ID NO: 31011 - protein, 9 aa, synthetic construct
GVQGALKVR

SEQ ID NO: 31012 - protein, 9 aa, synthetic construct
PTNGTVHVR

SEQ ID NO: 31013 - protein, 9 aa, synthetic construct
GVQGAAHVR

SEQ ID NO: 31014 - protein, 9 aa, synthetic construct
GVQGAAHVH

SEQ ID NO: 31015 - protein, 9 aa, synthetic construct
GVQGAAHVK

SEQ ID NO: 31016 - protein, 9 aa, synthetic construct
PTNGTVHVH

SEQ ID NO: 31017 - protein, 9 aa, synthetic construct
GVQGAARLH

SEQ ID NO: 31018 - protein, 9 aa, synthetic construct
GVQGAARVY

SEQ ID NO: 31019 - protein, 9 aa, synthetic construct
GVQGAARVH

SEQ ID NO: 31020 - protein, 9 aa, synthetic construct
PTNGTVHVK

SEQ ID NO: 31021 - protein, 9 aa, synthetic construct
GVQGAAKLH

SEQ ID NO: 31022 - protein, 9 aa, synthetic construct
GVQGAAKVY

SEQ ID NO: 31023 - protein, 9 aa, synthetic construct
GVQGAAKVH

SEQ ID NO: 31024 - protein, 9 aa, synthetic construct
PTNGTVHVF

SEQ ID NO: 31025 - protein, 9 aa, synthetic construct
GVQGAIHLY

SEQ ID NO: 31026 - protein, 9 aa, synthetic construct
GVQGAIHLR

SEQ ID NO: 31027 - protein, 9 aa, synthetic construct
GVQGAIHLK

SEQ ID NO: 31028 - protein, 9 aa, synthetic construct
GVQGAIHLF

SEQ ID NO: 31029 - protein, 9 aa, synthetic construct
GVQGAIHVK

SEQ ID NO: 31030 - protein, 9 aa, synthetic construct
GVQGAIRLH

SEQ ID NO: 31031 - protein, 9 aa, synthetic construct
GVQGAIRVY

SEQ ID NO: 31032 - protein, 9 aa, synthetic construct
GVQGAIKLY

SEQ ID NO: 31033 - protein, 9 aa, synthetic construct
GVQGAIKLH

SEQ ID NO: 31034 - protein, 9 aa, synthetic construct
GVQGAIKLF

SEQ ID NO: 31035 - protein, 9 aa, synthetic construct
GVQGAIKVY

SEQ ID NO: 31036 - protein, 9 aa, synthetic construct
GVQGAIKVH

SEQ ID NO: 31037 - protein, 9 aa, synthetic construct
GVQGAIKVF

SEQ ID NO: 31038 - protein, 9 aa, synthetic construct
GVQGAGHVF

SEQ ID NO: 31039 - protein, 9 aa, synthetic construct
GVQGAGRLH

SEQ ID NO: 31040 - protein, 9 aa, synthetic construct
GVQGAGRVY

SEQ ID NO: 31041 - protein, 9 aa, synthetic construct
GVQGAGRVR

SEQ ID NO: 31042 - protein, 9 aa, synthetic construct
GVQGAGRVH

SEQ ID NO: 31043 - protein, 9 aa, synthetic construct
GVQGAGRVK

SEQ ID NO: 31044 - protein, 9 aa, synthetic construct
GVQGAGRVF

SEQ ID NO: 31045 - protein, 9 aa, synthetic construct
GVQGAGKLY

SEQ ID NO: 31046 - protein, 9 aa, synthetic construct
GVQGAGKLF

SEQ ID NO: 31047 - protein, 9 aa, synthetic construct
GVQGAGKVH

SEQ ID NO: 31048 - protein, 9 aa, synthetic construct
GVQGTVHLR

SEQ ID NO: 31049 - protein, 9 aa, synthetic construct
GVQGTVHLK

SEQ ID NO: 31050 - protein, 9 aa, synthetic construct
GVQGTVHVR

SEQ ID NO: 31051 - protein, 9 aa, synthetic construct
GVQGTVHVF

SEQ ID NO: 31052 - protein, 9 aa, synthetic construct
GVQGTVRVH

SEQ ID NO: 31053 - protein, 9 aa, synthetic construct
GVQGTVRVF

SEQ ID NO: 31054 - protein, 9 aa, synthetic construct
GVQGTVKVH

SEQ ID NO: 31055 - protein, 9 aa, synthetic construct
GVQGTVKVF

SEQ ID NO: 31056 - protein, 9 aa, synthetic construct
PTNGTVRVF

SEQ ID NO: 31057 - protein, 9 aa, synthetic construct
GVQGTLRLK

SEQ ID NO: 31058 - protein, 9 aa, synthetic construct
GVQGTLKLR

SEQ ID NO: 31059 - protein, 9 aa, synthetic construct
PTNGTVKLR

SEQ ID NO: 31060 - protein, 9 aa, synthetic construct
GVQGTAHLF

SEQ ID NO: 31061 - protein, 9 aa, synthetic construct
GVQGTAHVF

SEQ ID NO: 31062 - protein, 9 aa, synthetic construct
GVQGTARLY

SEQ ID NO: 31063 - protein, 9 aa, synthetic construct
GVQGTARLF

SEQ ID NO: 31064 - protein, 9 aa, synthetic construct
GVQGTARVH

SEQ ID NO: 31065 - protein, 9 aa, synthetic construct
GVQGTARVK

SEQ ID NO: 31066 - protein, 9 aa, synthetic construct
GVQGTAKLF

SEQ ID NO: 31067 - protein, 9 aa, synthetic construct
GVQGTAKVY

SEQ ID NO: 31068 - protein, 9 aa, synthetic construct
GVQGTIHLR

SEQ ID NO: 31069 - protein, 9 aa, synthetic construct
GVQGTIHVY

SEQ ID NO: 31070 - protein, 9 aa, synthetic construct
GVQGTIRVY

SEQ ID NO: 31071 - protein, 9 aa, synthetic construct
GVQGTIRVH

SEQ ID NO: 31072 - protein, 9 aa, synthetic construct
GVQGTIRVF

SEQ ID NO: 31073 - protein, 9 aa, synthetic construct
PTNGTVKVR

SEQ ID NO: 31074 - protein, 9 aa, synthetic construct
GVQGTIKLY

SEQ ID NO: 31075 - protein, 9 aa, synthetic construct
GVQGTIKLH

SEQ ID NO: 31076 - protein, 9 aa, synthetic construct
GVQGTIKLF

SEQ ID NO: 31077 - protein, 9 aa, synthetic construct
GVQGTIKVY

SEQ ID NO: 31078 - protein, 9 aa, synthetic construct
GVQGTIKVH

SEQ ID NO: 31079 - protein, 9 aa, synthetic construct
GVQGTIKVF

SEQ ID NO: 31080 - protein, 9 aa, synthetic construct
PTNGTVKVH

SEQ ID NO: 31081 - protein, 9 aa, synthetic construct
GVQGTGHLR

SEQ ID NO: 31082 - protein, 9 aa, synthetic construct
GVQGTGHVR

SEQ ID NO: 31083 - protein, 9 aa, synthetic construct
PTNGTVKVK

SEQ ID NO: 31084 - protein, 9 aa, synthetic construct
GVQGTGRLH

SEQ ID NO: 31085 - protein, 9 aa, synthetic construct
GVQGTGRLK

SEQ ID NO: 31086 - protein, 9 aa, synthetic construct
GVQGTGRVY

SEQ ID NO: 31087 - protein, 9 aa, synthetic construct
GVQGTGRVR

SEQ ID NO: 31088 - protein, 9 aa, synthetic construct
GVQGTGRVH

SEQ ID NO: 31089 - protein, 9 aa, synthetic construct
GVQGTGRVK

SEQ ID NO: 31090 - protein, 9 aa, synthetic construct
GVQGTGKLR

SEQ ID NO: 31091 - protein, 9 aa, synthetic construct
GVQGTGKVY

SEQ ID NO: 31092 - protein, 9 aa, synthetic construct
PTNGTLHLY

SEQ ID NO: 31093 - protein, 9 aa, synthetic construct
GVQGSVHLK

SEQ ID NO: 31094 - protein, 9 aa, synthetic construct
GVQGSVHVR

SEQ ID NO: 31095 - protein, 9 aa, synthetic construct
GVQGSVRVR

SEQ ID NO: 31096 - protein, 9 aa, synthetic construct
PTNGTLHLH

SEQ ID NO: 31097 - protein, 9 aa, synthetic construct
GVQGSVKLK

SEQ ID NO: 31098 - protein, 9 aa, synthetic construct
GVQGSLHLY

SEQ ID NO: 31099 - protein, 9 aa, synthetic construct
GVQGSLHLR

SEQ ID NO: 31100 - protein, 9 aa, synthetic construct
GVQGSLHLK

SEQ ID NO: 31101 - protein, 9 aa, synthetic construct
GVQGSLHLF

SEQ ID NO: 31102 - protein, 9 aa, synthetic construct
GVQGSLHVR

SEQ ID NO: 31103 - protein, 9 aa, synthetic construct
GVQGSLHVK

SEQ ID NO: 31104 - protein, 9 aa, synthetic construct
GVQGSLKLH

SEQ ID NO: 31105 - protein, 9 aa, synthetic construct
GVQGSLKVH

SEQ ID NO: 31106 - protein, 9 aa, synthetic construct
GVQGSLKVF

SEQ ID NO: 31107 - protein, 9 aa, synthetic construct
GVQGSAHLK

SEQ ID NO: 31108 - protein, 9 aa, synthetic construct
GVQGSAHVH

SEQ ID NO: 31109 - protein, 9 aa, synthetic construct
GVQGSAHVK

SEQ ID NO: 31110 - protein, 9 aa, synthetic construct
GVQGSARLH

SEQ ID NO: 31111 - protein, 9 aa, synthetic construct
GVQGSAKLH

SEQ ID NO: 31112 - protein, 9 aa, synthetic construct
GVQGSAKVH

SEQ ID NO: 31113 - protein, 9 aa, synthetic construct
GVQGSIHLR

SEQ ID NO: 31114 - protein, 9 aa, synthetic construct
GVQGSIHVH

SEQ ID NO: 31115 - protein, 9 aa, synthetic construct
GVQGSIHVF

SEQ ID NO: 31116 - protein, 9 aa, synthetic construct
GVQGSIRLY

SEQ ID NO: 31117 - protein, 9 aa, synthetic construct
GVQGSIRLF

SEQ ID NO: 31118 - protein, 9 aa, synthetic construct
GVQGSIRVH

SEQ ID NO: 31119 - protein, 9 aa, synthetic construct
GVQGSIRVK

SEQ ID NO: 31120 - protein, 9 aa, synthetic construct
GVQGSIKLH

SEQ ID NO: 31121 - protein, 9 aa, synthetic construct
GVQGSIKLF

SEQ ID NO: 31122 - protein, 9 aa, synthetic construct
GVQGSIKVY

SEQ ID NO: 31123 - protein, 9 aa, synthetic construct
GVQGSIKVF

SEQ ID NO: 31124 - protein, 9 aa, synthetic construct
PTNGTLRLH

SEQ ID NO: 31125 - protein, 9 aa, synthetic construct
GVQGSGHLR

SEQ ID NO: 31126 - protein, 9 aa, synthetic construct
GVQGSGHLK

SEQ ID NO: 31127 - protein, 9 aa, synthetic construct
GVQGSGHLF

SEQ ID NO: 31128 - protein, 9 aa, synthetic construct
GVQGSGHVK

SEQ ID NO: 31129 - protein, 9 aa, synthetic construct
GVQGSGHVF

SEQ ID NO: 31130 - protein, 9 aa, synthetic construct
GVQGSGRLR

SEQ ID NO: 31131 - protein, 9 aa, synthetic construct
GVQGSGRLH

SEQ ID NO: 31132 - protein, 9 aa, synthetic construct
GVQGSGRLF

SEQ ID NO: 31133 - protein, 9 aa, synthetic construct
GVQGSGRVY

SEQ ID NO: 31134 - protein, 9 aa, synthetic construct
GVQGSGRVH

SEQ ID NO: 31135 - protein, 9 aa, synthetic construct
PTNGTLRLF

SEQ ID NO: 31136 - protein, 9 aa, synthetic construct
GVQGSGKLY

SEQ ID NO: 31137 - protein, 9 aa, synthetic construct
GVQGSGKLH

SEQ ID NO: 31138 - protein, 9 aa, synthetic construct
GVQGSGKVY

SEQ ID NO: 31139 - protein, 9 aa, synthetic construct
GVQGSGKVF

SEQ ID NO: 31140 - protein, 9 aa, synthetic construct
PTNGTLRVY

SEQ ID NO: 31141 - protein, 9 aa, synthetic construct
GVQGVVHLY

SEQ ID NO: 31142 - protein, 9 aa, synthetic construct
GVQGVVHLH

SEQ ID NO: 31143 - protein, 9 aa, synthetic construct
GVQGVVHLK

SEQ ID NO: 31144 - protein, 9 aa, synthetic construct
GVQGVVHLF

SEQ ID NO: 31145 - protein, 9 aa, synthetic construct
GVQGVVHVR

SEQ ID NO: 31146 - protein, 9 aa, synthetic construct
GVQGVVHVH

SEQ ID NO: 31147 - protein, 9 aa, synthetic construct
GVQGVVHVF

SEQ ID NO: 31148 - protein, 9 aa, synthetic construct
GVQGVVRLH

SEQ ID NO: 31149 - protein, 9 aa, synthetic construct
GVQGVVRLF

SEQ ID NO: 31150 - protein, 9 aa, synthetic construct
GVQGVVRVY

SEQ ID NO: 31151 - protein, 9 aa, synthetic construct
GVQGVVRVK

SEQ ID NO: 31152 - protein, 9 aa, synthetic construct
GVQGVVRVF

SEQ ID NO: 31153 - protein, 9 aa, synthetic construct
GVQGVVKLR

SEQ ID NO: 31154 - protein, 9 aa, synthetic construct
GVQGVVKVY

SEQ ID NO: 31155 - protein, 9 aa, synthetic construct
GVQGVVKVH

SEQ ID NO: 31156 - protein, 9 aa, synthetic construct
GVQGVVKVF

SEQ ID NO: 31157 - protein, 9 aa, synthetic construct
PTNGTLRVK

SEQ ID NO: 31158 - protein, 9 aa, synthetic construct
GVQGVLHLK

SEQ ID NO: 31159 - protein, 9 aa, synthetic construct
GVQGVLHLF

SEQ ID NO: 31160 - protein, 9 aa, synthetic construct
PTNGTLRVF

SEQ ID NO: 31161 - protein, 9 aa, synthetic construct
GVQGVLRLK

SEQ ID NO: 31162 - protein, 9 aa, synthetic construct
GVQGVLRLF

SEQ ID NO: 31163 - protein, 9 aa, synthetic construct
GVQGVLRVH

SEQ ID NO: 31164 - protein, 9 aa, synthetic construct
GVQGVLKLY

SEQ ID NO: 31165 - protein, 9 aa, synthetic construct
GVQGVLKLF

SEQ ID NO: 31166 - protein, 9 aa, synthetic construct
PTNGTLKLR

SEQ ID NO: 31167 - protein, 9 aa, synthetic construct
GVQGVAHLY

SEQ ID NO: 31168 - protein, 9 aa, synthetic construct
GVQGVAHLK

SEQ ID NO: 31169 - protein, 9 aa, synthetic construct
GVQGVAHVR

SEQ ID NO: 31170 - protein, 9 aa, synthetic construct
GVQGVAHVH

SEQ ID NO: 31171 - protein, 9 aa, synthetic construct
GVQGVAHVK

SEQ ID NO: 31172 - protein, 9 aa, synthetic construct
GVQGVAHVF

SEQ ID NO: 31173 - protein, 9 aa, synthetic construct
GVQGVARVR

SEQ ID NO: 31174 - protein, 9 aa, synthetic construct
GVQGVARVF

SEQ ID NO: 31175 - protein, 9 aa, synthetic construct
GVQGVAKLY

SEQ ID NO: 31176 - protein, 9 aa, synthetic construct
GVQGVAKLH

SEQ ID NO: 31177 - protein, 9 aa, synthetic construct
GVQGVAKLF

SEQ ID NO: 31178 - protein, 9 aa, synthetic construct
GVQGVAKVY

SEQ ID NO: 31179 - protein, 9 aa, synthetic construct
GVQGVAKVH

SEQ ID NO: 31180 - protein, 9 aa, synthetic construct
GVQGVAKVF

SEQ ID NO: 31181 - protein, 9 aa, synthetic construct
GVQGVIHLR

SEQ ID NO: 31182 - protein, 9 aa, synthetic construct
GVQGVIRLH

SEQ ID NO: 31183 - protein, 9 aa, synthetic construct
GVQGVIRVH

SEQ ID NO: 31184 - protein, 9 aa, synthetic construct
GVQGVIKLK

SEQ ID NO: 31185 - protein, 9 aa, synthetic construct
GVQGVIKVR

SEQ ID NO: 31186 - protein, 9 aa, synthetic construct
GVQGVIKVF

SEQ ID NO: 31187 - protein, 9 aa, synthetic construct
GVQGVGHLR

SEQ ID NO: 31188 - protein, 9 aa, synthetic construct
GVQGVGHVH

SEQ ID NO: 31189 - protein, 9 aa, synthetic construct
GVQGVGHVK

SEQ ID NO: 31190 - protein, 9 aa, synthetic construct
GVQGVGRLF

SEQ ID NO: 31191 - protein, 9 aa, synthetic construct
GVQGVGRVY

SEQ ID NO: 31192 - protein, 9 aa, synthetic construct
GVQGVGRVK

SEQ ID NO: 31193 - protein, 9 aa, synthetic construct
GVQGVGRVF

SEQ ID NO: 31194 - protein, 9 aa, synthetic construct
PTNGTLKVF

SEQ ID NO: 31195 - protein, 9 aa, synthetic construct
GVQGVGKLY

SEQ ID NO: 31196 - protein, 9 aa, synthetic construct
GVQGGVHLY

SEQ ID NO: 31197 - protein, 9 aa, synthetic construct
GVQGGVHVY

SEQ ID NO: 31198 - protein, 9 aa, synthetic construct
GVQGGVHVR

SEQ ID NO: 31199 - protein, 9 aa, synthetic construct
GVQGGVRLY

SEQ ID NO: 31200 - protein, 9 aa, synthetic construct
GVQGGVRLH

SEQ ID NO: 31201 - protein, 9 aa, synthetic construct
GVQGGVRVR

SEQ ID NO: 31202 - protein, 9 aa, synthetic construct
GVQGGVRVF

SEQ ID NO: 31203 - protein, 9 aa, synthetic construct
GVQGGVKLY

SEQ ID NO: 31204 - protein, 9 aa, synthetic construct
GVQGGVKLH

SEQ ID NO: 31205 - protein, 9 aa, synthetic construct
GVQGGLHLY

SEQ ID NO: 31206 - protein, 9 aa, synthetic construct
GVQGGLHLF

SEQ ID NO: 31207 - protein, 9 aa, synthetic construct
GVQGGLHVY

SEQ ID NO: 31208 - protein, 9 aa, synthetic construct
GVQGGLRLH

SEQ ID NO: 31209 - protein, 9 aa, synthetic construct
GVQGGLRVK

SEQ ID NO: 31210 - protein, 9 aa, synthetic construct
GVQGGAHLR

SEQ ID NO: 31211 - protein, 9 aa, synthetic construct
GVQGGAHLF

SEQ ID NO: 31212 - protein, 9 aa, synthetic construct
GVQGGARLY

SEQ ID NO: 31213 - protein, 9 aa, synthetic construct
GVQGGARLF

SEQ ID NO: 31214 - protein, 9 aa, synthetic construct
GVQGGARVY

SEQ ID NO: 31215 - protein, 9 aa, synthetic construct
GVQGGARVH

SEQ ID NO: 31216 - protein, 9 aa, synthetic construct
GVQGGARVF

SEQ ID NO: 31217 - protein, 9 aa, synthetic construct
GVQGGAKLY

SEQ ID NO: 31218 - protein, 9 aa, synthetic construct
GVQGGAKLH

SEQ ID NO: 31219 - protein, 9 aa, synthetic construct
GVQGGAKLF

SEQ ID NO: 31220 - protein, 9 aa, synthetic construct
GVQGGAKVY

SEQ ID NO: 31221 - protein, 9 aa, synthetic construct
GVQGGAKVF

SEQ ID NO: 31222 - protein, 9 aa, synthetic construct
GVQGGIHLR

SEQ ID NO: 31223 - protein, 9 aa, synthetic construct
GVQGGIHLH

SEQ ID NO: 31224 - protein, 9 aa, synthetic construct
GVQGGIHLF

SEQ ID NO: 31225 - protein, 9 aa, synthetic construct
GVQGGIHVY

SEQ ID NO: 31226 - protein, 9 aa, synthetic construct
GVQGGIHVK

SEQ ID NO: 31227 - protein, 9 aa, synthetic construct
GVQGGIHVF

SEQ ID NO: 31228 - protein, 9 aa, synthetic construct
GVQGGIRLY

SEQ ID NO: 31229 - protein, 9 aa, synthetic construct
GVQGGIRLH

SEQ ID NO: 31230 - protein, 9 aa, synthetic construct
GVQGGIRVY

SEQ ID NO: 31231 - protein, 9 aa, synthetic construct
GVQGGIRVR

SEQ ID NO: 31232 - protein, 9 aa, synthetic construct
GVQGGIRVH

SEQ ID NO: 31233 - protein, 9 aa, synthetic construct
GVQGGIKLY

SEQ ID NO: 31234 - protein, 9 aa, synthetic construct
GVQGGIKLR

SEQ ID NO: 31235 - protein, 9 aa, synthetic construct
GVQGGIKLF

SEQ ID NO: 31236 - protein, 9 aa, synthetic construct
GVQGGIKVY

SEQ ID NO: 31237 - protein, 9 aa, synthetic construct
GVQGGIKVR

SEQ ID NO: 31238 - protein, 9 aa, synthetic construct
GVQGGIKVH

SEQ ID NO: 31239 - protein, 9 aa, synthetic construct
GVQGGIKVF

SEQ ID NO: 31240 - protein, 9 aa, synthetic construct
PTNGTARLH

SEQ ID NO: 31241 - protein, 9 aa, synthetic construct
GVQGGGHLK

SEQ ID NO: 31242 - protein, 9 aa, synthetic construct
GVQGGGHLF

SEQ ID NO: 31243 - protein, 9 aa, synthetic construct
GVQGGGHVR

SEQ ID NO: 31244 - protein, 9 aa, synthetic construct
GVQGGGHVH

SEQ ID NO: 31245 - protein, 9 aa, synthetic construct
GVQGGGHVK

SEQ ID NO: 31246 - protein, 9 aa, synthetic construct
GVQGGGHVF

SEQ ID NO: 31247 - protein, 9 aa, synthetic construct
GVQGGGRLY

SEQ ID NO: 31248 - protein, 9 aa, synthetic construct
GVQGGGRLH

SEQ ID NO: 31249 - protein, 9 aa, synthetic construct
GVQGGGRVR

SEQ ID NO: 31250 - protein, 9 aa, synthetic construct
GVQGGGRVK

SEQ ID NO: 31251 - protein, 9 aa, synthetic construct
PTNGTARLF

SEQ ID NO: 31252 - protein, 9 aa, synthetic construct
GVQGGGKLH

SEQ ID NO: 31253 - protein, 9 aa, synthetic construct
GVQGGGKLF

SEQ ID NO: 31254 - protein, 9 aa, synthetic construct
GVQGGGKVY

SEQ ID NO: 31255 - protein, 9 aa, synthetic construct
GVQGGGKVF

SEQ ID NO: 31256 - protein, 9 aa, synthetic construct
GVQAAVHLY

SEQ ID NO: 31257 - protein, 9 aa, synthetic construct
GVQAAVHVR

SEQ ID NO: 31258 - protein, 9 aa, synthetic construct
GVQAAVHVH

SEQ ID NO: 31259 - protein, 9 aa, synthetic construct
GVQAAVHVK

SEQ ID NO: 31260 - protein, 9 aa, synthetic construct
GVQAAVHVF

SEQ ID NO: 31261 - protein, 9 aa, synthetic construct
PTNGTARVR

SEQ ID NO: 31262 - protein, 9 aa, synthetic construct
GVQAAVRLY

SEQ ID NO: 31263 - protein, 9 aa, synthetic construct
GVQAAVRLH

SEQ ID NO: 31264 - protein, 9 aa, synthetic construct
GVQAAVRLF

SEQ ID NO: 31265 - protein, 9 aa, synthetic construct
GVQAAVRVY

SEQ ID NO: 31266 - protein, 9 aa, synthetic construct
GVQAAVRVH

SEQ ID NO: 31267 - protein, 9 aa, synthetic construct
GVQAAVKLY

SEQ ID NO: 31268 - protein, 9 aa, synthetic construct
GVQAAVKLF

SEQ ID NO: 31269 - protein, 9 aa, synthetic construct
GVQAAVKVY

SEQ ID NO: 31270 - protein, 9 aa, synthetic construct
GVQAAVKVH

SEQ ID NO: 31271 - protein, 9 aa, synthetic construct
GVQAALHLR

SEQ ID NO: 31272 - protein, 9 aa, synthetic construct
GVQAALHLH

SEQ ID NO: 31273 - protein, 9 aa, synthetic construct
GVQAALHLK

SEQ ID NO: 31274 - protein, 9 aa, synthetic construct
GVQAALHVF

SEQ ID NO: 31275 - protein, 9 aa, synthetic construct
GVQAALRVF

SEQ ID NO: 31276 - protein, 9 aa, synthetic construct
GVQAALKLH

SEQ ID NO: 31277 - protein, 9 aa, synthetic construct
PTNGTAKLR

SEQ ID NO: 31278 - protein, 9 aa, synthetic construct
GVQAAAHLY

SEQ ID NO: 31279 - protein, 9 aa, synthetic construct
GVQAAAHLK

SEQ ID NO: 31280 - protein, 9 aa, synthetic construct
GVQAAAHVK

SEQ ID NO: 31281 - protein, 9 aa, synthetic construct
GVQAAARLY

SEQ ID NO: 31282 - protein, 9 aa, synthetic construct
GVQAAARLH

SEQ ID NO: 31283 - protein, 9 aa, synthetic construct
GVQAAARLF

SEQ ID NO: 31284 - protein, 9 aa, synthetic construct
GVQAAARVR

SEQ ID NO: 31285 - protein, 9 aa, synthetic construct
GVQAAARVH

SEQ ID NO: 31286 - protein, 9 aa, synthetic construct
GVQAAARVF

SEQ ID NO: 31287 - protein, 9 aa, synthetic construct
GVQAAAKLY

SEQ ID NO: 31288 - protein, 9 aa, synthetic construct
GVQAAAKVH

SEQ ID NO: 31289 - protein, 9 aa, synthetic construct
GVQAAAKVF

SEQ ID NO: 31290 - protein, 9 aa, synthetic construct
GVQAAIHLR

SEQ ID NO: 31291 - protein, 9 aa, synthetic construct
GVQAAIHLH

SEQ ID NO: 31292 - protein, 9 aa, synthetic construct
GVQAAIHLK

SEQ ID NO: 31293 - protein, 9 aa, synthetic construct
GVQAAIHVY

SEQ ID NO: 31294 - protein, 9 aa, synthetic construct
GVQAAIHVH

SEQ ID NO: 31295 - protein, 9 aa, synthetic construct
GVQAAIHVK

SEQ ID NO: 31296 - protein, 9 aa, synthetic construct
GVQAAIHVF

SEQ ID NO: 31297 - protein, 9 aa, synthetic construct
GVQAAIRLY

SEQ ID NO: 31298 - protein, 9 aa, synthetic construct
GVQAAIRLH

SEQ ID NO: 31299 - protein, 9 aa, synthetic construct
GVQAAIRLF

SEQ ID NO: 31300 - protein, 9 aa, synthetic construct
GVQAAIRVY

SEQ ID NO: 31301 - protein, 9 aa, synthetic construct
GVQAAIRVF

SEQ ID NO: 31302 - protein, 9 aa, synthetic construct
GVQAAIKLY

SEQ ID NO: 31303 - protein, 9 aa, synthetic construct
GVQAAIKLH

SEQ ID NO: 31304 - protein, 9 aa, synthetic construct
GVQAAIKLK

SEQ ID NO: 31305 - protein, 9 aa, synthetic construct
GVQAAIKLF

SEQ ID NO: 31306 - protein, 9 aa, synthetic construct
GVQAAIKVH

SEQ ID NO: 31307 - protein, 9 aa, synthetic construct
GVQAAIKVF

SEQ ID NO: 31308 - protein, 9 aa, synthetic construct
GVQAAGHLF

SEQ ID NO: 31309 - protein, 9 aa, synthetic construct
GVQAAGHVY

SEQ ID NO: 31310 - protein, 9 aa, synthetic construct
GVQAAGHVK

SEQ ID NO: 31311 - protein, 9 aa, synthetic construct
GVQAAGRLH

SEQ ID NO: 31312 - protein, 9 aa, synthetic construct
GVQAAGRVF

SEQ ID NO: 31313 - protein, 9 aa, synthetic construct
GVQAAGKLY

SEQ ID NO: 31314 - protein, 9 aa, synthetic construct
GVQAAGKLH

SEQ ID NO: 31315 - protein, 9 aa, synthetic construct
GVQAAGKVY

SEQ ID NO: 31316 - protein, 9 aa, synthetic construct
GVQAAGKVH

SEQ ID NO: 31317 - protein, 9 aa, synthetic construct
GVQAAGKVF

SEQ ID NO: 31318 - protein, 9 aa, synthetic construct
GVQATVHLK

SEQ ID NO: 31319 - protein, 9 aa, synthetic construct
GVQATVHVR

SEQ ID NO: 31320 - protein, 9 aa, synthetic construct
PTNGTIHLR

SEQ ID NO: 31321 - protein, 9 aa, synthetic construct
GVQATVRVH

SEQ ID NO: 31322 - protein, 9 aa, synthetic construct
GVQATVKLY

SEQ ID NO: 31323 - protein, 9 aa, synthetic construct
GVQATVKLH

SEQ ID NO: 31324 - protein, 9 aa, synthetic construct
GVQATVKLK

SEQ ID NO: 31325 - protein, 9 aa, synthetic construct
PTNGTIHVY

SEQ ID NO: 31326 - protein, 9 aa, synthetic construct
GVQATLKLH

SEQ ID NO: 31327 - protein, 9 aa, synthetic construct
GVQATLKLF

SEQ ID NO: 31328 - protein, 9 aa, synthetic construct
GVQATAHLR

SEQ ID NO: 31329 - protein, 9 aa, synthetic construct
GVQATAHLK

SEQ ID NO: 31330 - protein, 9 aa, synthetic construct
GVQATAHLF

SEQ ID NO: 31331 - protein, 9 aa, synthetic construct
GVQATAHVH

SEQ ID NO: 31332 - protein, 9 aa, synthetic construct
GVQATAHVK

SEQ ID NO: 31333 - protein, 9 aa, synthetic construct
GVQATAHVF

SEQ ID NO: 31334 - protein, 9 aa, synthetic construct
GVQATARLY

SEQ ID NO: 31335 - protein, 9 aa, synthetic construct
GVQATARVY

SEQ ID NO: 31336 - protein, 9 aa, synthetic construct
GVQATAKLH

SEQ ID NO: 31337 - protein, 9 aa, synthetic construct
GVQATAKLF

SEQ ID NO: 31338 - protein, 9 aa, synthetic construct
GVQATAKVY

SEQ ID NO: 31339 - protein, 9 aa, synthetic construct
GVQATAKVH

SEQ ID NO: 31340 - protein, 9 aa, synthetic construct
GVQATAKVF

SEQ ID NO: 31341 - protein, 9 aa, synthetic construct
GVQATIHLY

SEQ ID NO: 31342 - protein, 9 aa, synthetic construct
GVQATIHLR

SEQ ID NO: 31343 - protein, 9 aa, synthetic construct
GVQATIHVH

SEQ ID NO: 31344 - protein, 9 aa, synthetic construct
GVQATIHVK

SEQ ID NO: 31345 - protein, 9 aa, synthetic construct
GVQATIRVY

SEQ ID NO: 31346 - protein, 9 aa, synthetic construct
GVQATIRVF

SEQ ID NO: 31347 - protein, 9 aa, synthetic construct
GVQATIKLY

SEQ ID NO: 31348 - protein, 9 aa, synthetic construct
GVQATIKLH

SEQ ID NO: 31349 - protein, 9 aa, synthetic construct
GVQATIKVH

SEQ ID NO: 31350 - protein, 9 aa, synthetic construct
GVQATIKVF

SEQ ID NO: 31351 - protein, 9 aa, synthetic construct
GVQATGHLK

SEQ ID NO: 31352 - protein, 9 aa, synthetic construct
GVQATGHVR

SEQ ID NO: 31353 - protein, 9 aa, synthetic construct
GVQATGHVK

SEQ ID NO: 31354 - protein, 9 aa, synthetic construct
GVQATGRLY

SEQ ID NO: 31355 - protein, 9 aa, synthetic construct
GVQATGRLK

SEQ ID NO: 31356 - protein, 9 aa, synthetic construct
GVQATGRVY

SEQ ID NO: 31357 - protein, 9 aa, synthetic construct
GVQATGRVH

SEQ ID NO: 31358 - protein, 9 aa, synthetic construct
PTNGTIRLF

SEQ ID NO: 31359 - protein, 9 aa, synthetic construct
GVQATGKLY

SEQ ID NO: 31360 - protein, 9 aa, synthetic construct
GVQATGKLH

SEQ ID NO: 31361 - protein, 9 aa, synthetic construct
GVQATGKLF

SEQ ID NO: 31362 - protein, 9 aa, synthetic construct
GVQASVHLR

SEQ ID NO: 31363 - protein, 9 aa, synthetic construct
GVQASVHLF

SEQ ID NO: 31364 - protein, 9 aa, synthetic construct
GVQASVRLY

SEQ ID NO: 31365 - protein, 9 aa, synthetic construct
GVQASVRLH

SEQ ID NO: 31366 - protein, 9 aa, synthetic construct
GVQASVRLK

SEQ ID NO: 31367 - protein, 9 aa, synthetic construct
GVQASVRLF

SEQ ID NO: 31368 - protein, 9 aa, synthetic construct
GVQASVRVH

SEQ ID NO: 31369 - protein, 9 aa, synthetic construct
GVQASVRVK

SEQ ID NO: 31370 - protein, 9 aa, synthetic construct
GVQASVRVF

SEQ ID NO: 31371 - protein, 9 aa, synthetic construct
PTNGTIRVH

SEQ ID NO: 31372 - protein, 9 aa, synthetic construct
GVQASVKLY

SEQ ID NO: 31373 - protein, 9 aa, synthetic construct
GVQASVKVY

SEQ ID NO: 31374 - protein, 9 aa, synthetic construct
GVQASVKVF

SEQ ID NO: 31375 - protein, 9 aa, synthetic construct
PTNGTIRVK

SEQ ID NO: 31376 - protein, 9 aa, synthetic construct
PTNGTIRVF

SEQ ID NO: 31377 - protein, 9 aa, synthetic construct
GVQASLKLY

SEQ ID NO: 31378 - protein, 9 aa, synthetic construct
GVQASLKLR

SEQ ID NO: 31379 - protein, 9 aa, synthetic construct
GVQASLKLH

SEQ ID NO: 31380 - protein, 9 aa, synthetic construct
GVQASLKVY

SEQ ID NO: 31381 - protein, 9 aa, synthetic construct
GVQASLKVH

SEQ ID NO: 31382 - protein, 9 aa, synthetic construct
GVQASLKVF

SEQ ID NO: 31383 - protein, 9 aa, synthetic construct
GVQASAHLY

SEQ ID NO: 31384 - protein, 9 aa, synthetic construct
GVQASAHLR

SEQ ID NO: 31385 - protein, 9 aa, synthetic construct
GVQASAHVY

SEQ ID NO: 31386 - protein, 9 aa, synthetic construct
GVQASARLF

SEQ ID NO: 31387 - protein, 9 aa, synthetic construct
PTNGTIKLK

SEQ ID NO: 31388 - protein, 9 aa, synthetic construct
GVQASAKLY

SEQ ID NO: 31389 - protein, 9 aa, synthetic construct
GVQASAKLH

SEQ ID NO: 31390 - protein, 9 aa, synthetic construct
GVQASAKVY

SEQ ID NO: 31391 - protein, 9 aa, synthetic construct
GVQASAKVH

SEQ ID NO: 31392 - protein, 9 aa, synthetic construct
GVQASAKVF

SEQ ID NO: 31393 - protein, 9 aa, synthetic construct
GVQASIHLK

SEQ ID NO: 31394 - protein, 9 aa, synthetic construct
GVQASIHVR

SEQ ID NO: 31395 - protein, 9 aa, synthetic construct
GVQASIKLF

SEQ ID NO: 31396 - protein, 9 aa, synthetic construct
GVQASIKVF

SEQ ID NO: 31397 - protein, 9 aa, synthetic construct
GVQASGHLH

SEQ ID NO: 31398 - protein, 9 aa, synthetic construct
GVQASGHLF

SEQ ID NO: 31399 - protein, 9 aa, synthetic construct
GVQASGHVK

SEQ ID NO: 31400 - protein, 9 aa, synthetic construct
GVQASGRLY

SEQ ID NO: 31401 - protein, 9 aa, synthetic construct
GVQASGRLF

SEQ ID NO: 31402 - protein, 9 aa, synthetic construct
PTNGTIKVF

SEQ ID NO: 31403 - protein, 9 aa, synthetic construct
GVQASGKLY

SEQ ID NO: 31404 - protein, 9 aa, synthetic construct
GVQASGKLH

SEQ ID NO: 31405 - protein, 9 aa, synthetic construct
GVQASGKLF

SEQ ID NO: 31406 - protein, 9 aa, synthetic construct
GVQAVVHLY

SEQ ID NO: 31407 - protein, 9 aa, synthetic construct
GVQAVVHLR

SEQ ID NO: 31408 - protein, 9 aa, synthetic construct
GVQAVVHLH

SEQ ID NO: 31409 - protein, 9 aa, synthetic construct
GVQAVVHLK

SEQ ID NO: 31410 - protein, 9 aa, synthetic construct
GVQAVVHVY

SEQ ID NO: 31411 - protein, 9 aa, synthetic construct
GVQAVVHVR

SEQ ID NO: 31412 - protein, 9 aa, synthetic construct
GVQAVVHVH

SEQ ID NO: 31413 - protein, 9 aa, synthetic construct
GVQAVVHVK

SEQ ID NO: 31414 - protein, 9 aa, synthetic construct
GVQAVVHVF

SEQ ID NO: 31415 - protein, 9 aa, synthetic construct
PTNGTGHLR

SEQ ID NO: 31416 - protein, 9 aa, synthetic construct
GVQAVVRVH

SEQ ID NO: 31417 - protein, 9 aa, synthetic construct
GVQAVVRVF

SEQ ID NO: 31418 - protein, 9 aa, synthetic construct
GVQAVVKVH

SEQ ID NO: 31419 - protein, 9 aa, synthetic construct
GVQAVLHVK

SEQ ID NO: 31420 - protein, 9 aa, synthetic construct
PTNGTGHVY

SEQ ID NO: 31421 - protein, 9 aa, synthetic construct
GVQAVLKLH

SEQ ID NO: 31422 - protein, 9 aa, synthetic construct
GVQAVAHLY

SEQ ID NO: 31423 - protein, 9 aa, synthetic construct
GVQAVAHLR

SEQ ID NO: 31424 - protein, 9 aa, synthetic construct
GVQAVAHLH

SEQ ID NO: 31425 - protein, 9 aa, synthetic construct
GVQAVAHLK

SEQ ID NO: 31426 - protein, 9 aa, synthetic construct
GVQAVAHLF

SEQ ID NO: 31427 - protein, 9 aa, synthetic construct
GVQAVAHVY

SEQ ID NO: 31428 - protein, 9 aa, synthetic construct
GVQAVAHVR

SEQ ID NO: 31429 - protein, 9 aa, synthetic construct
GVQAVAHVH

SEQ ID NO: 31430 - protein, 9 aa, synthetic construct
GVQAVAHVK

SEQ ID NO: 31431 - protein, 9 aa, synthetic construct
GVQAVAKLY

SEQ ID NO: 31432 - protein, 9 aa, synthetic construct
GVQAVAKLH

SEQ ID NO: 31433 - protein, 9 aa, synthetic construct
GVQAVAKVR

SEQ ID NO: 31434 - protein, 9 aa, synthetic construct
GVQAVAKVH

SEQ ID NO: 31435 - protein, 9 aa, synthetic construct
GVQAVAKVF

SEQ ID NO: 31436 - protein, 9 aa, synthetic construct
GVQAVIHLR

SEQ ID NO: 31437 - protein, 9 aa, synthetic construct
GVQAVIHVH

SEQ ID NO: 31438 - protein, 9 aa, synthetic construct
GVQAVIKLY

SEQ ID NO: 31439 - protein, 9 aa, synthetic construct
GVQAVIKLR

SEQ ID NO: 31440 - protein, 9 aa, synthetic construct
GVQAVGHLY

SEQ ID NO: 31441 - protein, 9 aa, synthetic construct
GVQAVGHLR

SEQ ID NO: 31442 - protein, 9 aa, synthetic construct
GVQAVGHLH

SEQ ID NO: 31443 - protein, 9 aa, synthetic construct
GVQAVGHLK

SEQ ID NO: 31444 - protein, 9 aa, synthetic construct
GVQAVGHLF

SEQ ID NO: 31445 - protein, 9 aa, synthetic construct
GVQAVGHVY

SEQ ID NO: 31446 - protein, 9 aa, synthetic construct
GVQAVGHVR

SEQ ID NO: 31447 - protein, 9 aa, synthetic construct
GVQAVGHVH

SEQ ID NO: 31448 - protein, 9 aa, synthetic construct
GVQAVGHVF

SEQ ID NO: 31449 - protein, 9 aa, synthetic construct
GVQAVGRLF

SEQ ID NO: 31450 - protein, 9 aa, synthetic construct
GVQAVGRVH

SEQ ID NO: 31451 - protein, 9 aa, synthetic construct
GVQAVGRVF

SEQ ID NO: 31452 - protein, 9 aa, synthetic construct
GVQAVGKLY

SEQ ID NO: 31453 - protein, 9 aa, synthetic construct
GVQAVGKLR

SEQ ID NO: 31454 - protein, 9 aa, synthetic construct
GVQAVGKLH

SEQ ID NO: 31455 - protein, 9 aa, synthetic construct
GVQAVGKLF

SEQ ID NO: 31456 - protein, 9 aa, synthetic construct
GVQAVGKVR

SEQ ID NO: 31457 - protein, 9 aa, synthetic construct
GVQAVGKVH

SEQ ID NO: 31458 - protein, 9 aa, synthetic construct
GVQAGVHLR

SEQ ID NO: 31459 - protein, 9 aa, synthetic construct
GVQAGVHLH

SEQ ID NO: 31460 - protein, 9 aa, synthetic construct
GVQAGVHLK

SEQ ID NO: 31461 - protein, 9 aa, synthetic construct
GVQAGVHVY

SEQ ID NO: 31462 - protein, 9 aa, synthetic construct
GVQAGVHVR

SEQ ID NO: 31463 - protein, 9 aa, synthetic construct
GVQAGVHVK

SEQ ID NO: 31464 - protein, 9 aa, synthetic construct
GVQAGVHVF

SEQ ID NO: 31465 - protein, 9 aa, synthetic construct
GVQAGVRLY

SEQ ID NO: 31466 - protein, 9 aa, synthetic construct
GVQAGVRLH

SEQ ID NO: 31467 - protein, 9 aa, synthetic construct
GVQAGVRLF

SEQ ID NO: 31468 - protein, 9 aa, synthetic construct
GVQAGVRVY

SEQ ID NO: 31469 - protein, 9 aa, synthetic construct
GVQAGVRVR

SEQ ID NO: 31470 - protein, 9 aa, synthetic construct
GVQAGVRVH

SEQ ID NO: 31471 - protein, 9 aa, synthetic construct
GVQAGVRVF

SEQ ID NO: 31472 - protein, 9 aa, synthetic construct
PTNGTGRVH

SEQ ID NO: 31473 - protein, 9 aa, synthetic construct
GVQAGVKLH

SEQ ID NO: 31474 - protein, 9 aa, synthetic construct
GVQAGVKLF

SEQ ID NO: 31475 - protein, 9 aa, synthetic construct
GVQAGVKVY

SEQ ID NO: 31476 - protein, 9 aa, synthetic construct
GVQAGVKVH

SEQ ID NO: 31477 - protein, 9 aa, synthetic construct
PTNGTGRVF

SEQ ID NO: 31478 - protein, 9 aa, synthetic construct
GVQAGLKLF

SEQ ID NO: 31479 - protein, 9 aa, synthetic construct
PTNGTGKLR

SEQ ID NO: 31480 - protein, 9 aa, synthetic construct
GVQAGAHLY

SEQ ID NO: 31481 - protein, 9 aa, synthetic construct
GVQAGAHVY

SEQ ID NO: 31482 - protein, 9 aa, synthetic construct
GVQAGAHVR

SEQ ID NO: 31483 - protein, 9 aa, synthetic construct
GVQAGAHVK

SEQ ID NO: 31484 - protein, 9 aa, synthetic construct
PTNGTGKLH

SEQ ID NO: 31485 - protein, 9 aa, synthetic construct
GVQAGAKLY

SEQ ID NO: 31486 - protein, 9 aa, synthetic construct
GVQAGAKLF

SEQ ID NO: 31487 - protein, 9 aa, synthetic construct
GVQAGAKVY

SEQ ID NO: 31488 - protein, 9 aa, synthetic construct
GVQAGAKVH

SEQ ID NO: 31489 - protein, 9 aa, synthetic construct
GVQAGAKVF

SEQ ID NO: 31490 - protein, 9 aa, synthetic construct
GVQAGIHLR

SEQ ID NO: 31491 - protein, 9 aa, synthetic construct
GVQAGIHLH

SEQ ID NO: 31492 - protein, 9 aa, synthetic construct
GVQAGIHLK

SEQ ID NO: 31493 - protein, 9 aa, synthetic construct
GVQAGIHVR

SEQ ID NO: 31494 - protein, 9 aa, synthetic construct
GVQAGIHVH

SEQ ID NO: 31495 - protein, 9 aa, synthetic construct
GVQAGIHVK

SEQ ID NO: 31496 - protein, 9 aa, synthetic construct
GVQAGIRLR

SEQ ID NO: 31497 - protein, 9 aa, synthetic construct
GVQAGIRLH

SEQ ID NO: 31498 - protein, 9 aa, synthetic construct
GVQAGIRVH

SEQ ID NO: 31499 - protein, 9 aa, synthetic construct
GVQAGIKLY

SEQ ID NO: 31500 - protein, 9 aa, synthetic construct
GVQAGGHVF

SEQ ID NO: 31501 - protein, 9 aa, synthetic construct
GVQAGGRLY

SEQ ID NO: 31502 - protein, 9 aa, synthetic construct
GVQAGGRLK

SEQ ID NO: 31503 - protein, 9 aa, synthetic construct
GVQAGGRLF

SEQ ID NO: 31504 - protein, 9 aa, synthetic construct
GVQAGGRVR

SEQ ID NO: 31505 - protein, 9 aa, synthetic construct
GVQAGGRVF

SEQ ID NO: 31506 - protein, 9 aa, synthetic construct
PTNGTGKVF

SEQ ID NO: 31507 - protein, 9 aa, synthetic construct
GVQAGGKVH

SEQ ID NO: 31508 - protein, 9 aa, synthetic construct
PLNGALRVK

SEQ ID NO: 31509 - protein, 9 aa, synthetic construct
PLNGVLHLY

SEQ ID NO: 31510 - protein, 9 aa, synthetic construct
GVPGAVRLH

SEQ ID NO: 31511 - protein, 9 aa, synthetic construct
GVPGAVRLK

SEQ ID NO: 31512 - protein, 9 aa, synthetic construct
GVPGAVRVY

SEQ ID NO: 31513 - protein, 9 aa, synthetic construct
GVPGAVRVK

SEQ ID NO: 31514 - protein, 9 aa, synthetic construct
GVPGAVRVF

SEQ ID NO: 31515 - protein, 9 aa, synthetic construct
GVPGAVKLF

SEQ ID NO: 31516 - protein, 9 aa, synthetic construct
GVPGAVKVH

SEQ ID NO: 31517 - protein, 9 aa, synthetic construct
GVPGALHLH

SEQ ID NO: 31518 - protein, 9 aa, synthetic construct
GVPGALHVH

SEQ ID NO: 31519 - protein, 9 aa, synthetic construct
GVPGALHVK

SEQ ID NO: 31520 - protein, 9 aa, synthetic construct
GVPGALRVK

SEQ ID NO: 31521 - protein, 9 aa, synthetic construct
GVPGALKLY

SEQ ID NO: 31522 - protein, 9 aa, synthetic construct
GVPGALKLH

SEQ ID NO: 31523 - protein, 9 aa, synthetic construct
GVPGALKLF

SEQ ID NO: 31524 - protein, 9 aa, synthetic construct
GVPGALKVH

SEQ ID NO: 31525 - protein, 9 aa, synthetic construct
GVPGALKVF

SEQ ID NO: 31526 - protein, 9 aa, synthetic construct
PTNGSVHVR

SEQ ID NO: 31527 - protein, 9 aa, synthetic construct
GVPGAAHLR

SEQ ID NO: 31528 - protein, 9 aa, synthetic construct
GVPGAAHLH

SEQ ID NO: 31529 - protein, 9 aa, synthetic construct
GVPGAAHLK

SEQ ID NO: 31530 - protein, 9 aa, synthetic construct
GVPGAAHLF

SEQ ID NO: 31531 - protein, 9 aa, synthetic construct
GVPGAAHVY

SEQ ID NO: 31532 - protein, 9 aa, synthetic construct
GVPGAAHVR

SEQ ID NO: 31533 - protein, 9 aa, synthetic construct
GVPGAAHVK

SEQ ID NO: 31534 - protein, 9 aa, synthetic construct
GVPGAARLH

SEQ ID NO: 31535 - protein, 9 aa, synthetic construct
GVPGAARVH

SEQ ID NO: 31536 - protein, 9 aa, synthetic construct
GVPGAARVF

SEQ ID NO: 31537 - protein, 9 aa, synthetic construct
GVPGAAKLF

SEQ ID NO: 31538 - protein, 9 aa, synthetic construct
GVPGAAKVY

SEQ ID NO: 31539 - protein, 9 aa, synthetic construct
GVPGAIHLY

SEQ ID NO: 31540 - protein, 9 aa, synthetic construct
GVPGAIHVY

SEQ ID NO: 31541 - protein, 9 aa, synthetic construct
GVPGAIHVH

SEQ ID NO: 31542 - protein, 9 aa, synthetic construct
PLNGVLHLR

SEQ ID NO: 31543 - protein, 9 aa, synthetic construct
GVPGAIRLF

SEQ ID NO: 31544 - protein, 9 aa, synthetic construct
GVPGAIRVH

SEQ ID NO: 31545 - protein, 9 aa, synthetic construct
GVPGAIKLH

SEQ ID NO: 31546 - protein, 9 aa, synthetic construct
GVPGAIKVH

SEQ ID NO: 31547 - protein, 9 aa, synthetic construct
GVPGAIKVF

SEQ ID NO: 31548 - protein, 9 aa, synthetic construct
PTNGSVRLH

SEQ ID NO: 31549 - protein, 9 aa, synthetic construct
GVPGAGRLY

SEQ ID NO: 31550 - protein, 9 aa, synthetic construct
GVPGAGRVY

SEQ ID NO: 31551 - protein, 9 aa, synthetic construct
GVPGAGRVK

SEQ ID NO: 31552 - protein, 9 aa, synthetic construct
GVPGAGRVF

SEQ ID NO: 31553 - protein, 9 aa, synthetic construct
GVPGAGKLH

SEQ ID NO: 31554 - protein, 9 aa, synthetic construct
GVPGAGKVH

SEQ ID NO: 31555 - protein, 9 aa, synthetic construct
GVPGTVHLK

SEQ ID NO: 31556 - protein, 9 aa, synthetic construct
GVPGTVHVH

SEQ ID NO: 31557 - protein, 9 aa, synthetic construct
GVPGTVRLH

SEQ ID NO: 31558 - protein, 9 aa, synthetic construct
GVPGTVRVY

SEQ ID NO: 31559 - protein, 9 aa, synthetic construct
GVPGTVRVH

SEQ ID NO: 31560 - protein, 9 aa, synthetic construct
PTNGSVRVH

SEQ ID NO: 31561 - protein, 9 aa, synthetic construct
GVPGTVKLY

SEQ ID NO: 31562 - protein, 9 aa, synthetic construct
GVPGTVKLH

SEQ ID NO: 31563 - protein, 9 aa, synthetic construct
GVPGTVKVF

SEQ ID NO: 31564 - protein, 9 aa, synthetic construct
GVPGTLHVK

SEQ ID NO: 31565 - protein, 9 aa, synthetic construct
GVPGTLRLY

SEQ ID NO: 31566 - protein, 9 aa, synthetic construct
GVPGTLRLF

SEQ ID NO: 31567 - protein, 9 aa, synthetic construct
PLNGVLHLH

SEQ ID NO: 31568 - protein, 9 aa, synthetic construct
GVPGTLKLR

SEQ ID NO: 31569 - protein, 9 aa, synthetic construct
GVPGTLKVF

SEQ ID NO: 31570 - protein, 9 aa, synthetic construct
GVPGTAHLK

SEQ ID NO: 31571 - protein, 9 aa, synthetic construct
PTNGSVKLH

SEQ ID NO: 31572 - protein, 9 aa, synthetic construct
GVPGTARLF

SEQ ID NO: 31573 - protein, 9 aa, synthetic construct
GVPGTARVY

SEQ ID NO: 31574 - protein, 9 aa, synthetic construct
GVPGTARVH

SEQ ID NO: 31575 - protein, 9 aa, synthetic construct
GVPGTARVF

SEQ ID NO: 31576 - protein, 9 aa, synthetic construct
GVPGTAKLH

SEQ ID NO: 31577 - protein, 9 aa, synthetic construct
GVPGTIHLY

SEQ ID NO: 31578 - protein, 9 aa, synthetic construct
GVPGTIHVR

SEQ ID NO: 31579 - protein, 9 aa, synthetic construct
GVPGTIHVF

SEQ ID NO: 31580 - protein, 9 aa, synthetic construct
GVPGTIRLH

SEQ ID NO: 31581 - protein, 9 aa, synthetic construct
PTNGSVKVR

SEQ ID NO: 31582 - protein, 9 aa, synthetic construct
GVPGTIKLY

SEQ ID NO: 31583 - protein, 9 aa, synthetic construct
GVPGTIKLH

SEQ ID NO: 31584 - protein, 9 aa, synthetic construct
GVPGTIKLF

SEQ ID NO: 31585 - protein, 9 aa, synthetic construct
GVPGTGRLY

SEQ ID NO: 31586 - protein, 9 aa, synthetic construct
GVPGTGRLR

SEQ ID NO: 31587 - protein, 9 aa, synthetic construct
GVPGTGRLH

SEQ ID NO: 31588 - protein, 9 aa, synthetic construct
GVPGTGKLH

SEQ ID NO: 31589 - protein, 9 aa, synthetic construct
GVPGTGKLF

SEQ ID NO: 31590 - protein, 9 aa, synthetic construct
GVPGTGKVY

SEQ ID NO: 31591 - protein, 9 aa, synthetic construct
GVPGSVHLY

SEQ ID NO: 31592 - protein, 9 aa, synthetic construct
GVPGSVHLR

SEQ ID NO: 31593 - protein, 9 aa, synthetic construct
GVPGSVHLH

SEQ ID NO: 31594 - protein, 9 aa, synthetic construct
GVPGSVHLF

SEQ ID NO: 31595 - protein, 9 aa, synthetic construct
GVPGSVHVY

SEQ ID NO: 31596 - protein, 9 aa, synthetic construct
GVPGSVHVR

SEQ ID NO: 31597 - protein, 9 aa, synthetic construct
GVPGSVRLY

SEQ ID NO: 31598 - protein, 9 aa, synthetic construct
GVPGSVKLY

SEQ ID NO: 31599 - protein, 9 aa, synthetic construct
GVPGSVKVH

SEQ ID NO: 31600 - protein, 9 aa, synthetic construct
GVPGSVKVF

SEQ ID NO: 31601 - protein, 9 aa, synthetic construct
GVPGSLHLH

SEQ ID NO: 31602 - protein, 9 aa, synthetic construct
GVPGSLHLK

SEQ ID NO: 31603 - protein, 9 aa, synthetic construct
GVPGSLHVY

SEQ ID NO: 31604 - protein, 9 aa, synthetic construct
GVPGSLHVR

SEQ ID NO: 31605 - protein, 9 aa, synthetic construct
GVPGSLHVF

SEQ ID NO: 31606 - protein, 9 aa, synthetic construct
GVPGSLRVY

SEQ ID NO: 31607 - protein, 9 aa, synthetic construct
GVPGSLRVH

SEQ ID NO: 31608 - protein, 9 aa, synthetic construct
GVPGSLRVF

SEQ ID NO: 31609 - protein, 9 aa, synthetic construct
PTNGSLHVY

SEQ ID NO: 31610 - protein, 9 aa, synthetic construct
GVPGSLKLY

SEQ ID NO: 31611 - protein, 9 aa, synthetic construct
GVPGSLKLH

SEQ ID NO: 31612 - protein, 9 aa, synthetic construct
GVPGSLKVF

SEQ ID NO: 31613 - protein, 9 aa, synthetic construct
GVPGSAHLR

SEQ ID NO: 31614 - protein, 9 aa, synthetic construct
GVPGSAHLF

SEQ ID NO: 31615 - protein, 9 aa, synthetic construct
GVPGSAHVK

SEQ ID NO: 31616 - protein, 9 aa, synthetic construct
PTNGSLHVH

SEQ ID NO: 31617 - protein, 9 aa, synthetic construct
GVPGSARLH

SEQ ID NO: 31618 - protein, 9 aa, synthetic construct
GVPGSARVR

SEQ ID NO: 31619 - protein, 9 aa, synthetic construct
GVPGSARVF

SEQ ID NO: 31620 - protein, 9 aa, synthetic construct
GVPGSIHLY

SEQ ID NO: 31621 - protein, 9 aa, synthetic construct
GVPGSIHLH

SEQ ID NO: 31622 - protein, 9 aa, synthetic construct
GVPGSIHLK

SEQ ID NO: 31623 - protein, 9 aa, synthetic construct
GVPGSIHVR

SEQ ID NO: 31624 - protein, 9 aa, synthetic construct
GVPGSIHVK

SEQ ID NO: 31625 - protein, 9 aa, synthetic construct
PLNGVLHLF

SEQ ID NO: 31626 - protein, 9 aa, synthetic construct
GVPGSIRLK

SEQ ID NO: 31627 - protein, 9 aa, synthetic construct
GVPGSIRVH

SEQ ID NO: 31628 - protein, 9 aa, synthetic construct
GVPGSIKLY

SEQ ID NO: 31629 - protein, 9 aa, synthetic construct
GVPGSIKLR

SEQ ID NO: 31630 - protein, 9 aa, synthetic construct
GVPGSIKLH

SEQ ID NO: 31631 - protein, 9 aa, synthetic construct
GVPGSIKLK

SEQ ID NO: 31632 - protein, 9 aa, synthetic construct
GVPGSIKVY

SEQ ID NO: 31633 - protein, 9 aa, synthetic construct
PTNGSLRLH

SEQ ID NO: 31634 - protein, 9 aa, synthetic construct
GVPGSGRLF

SEQ ID NO: 31635 - protein, 9 aa, synthetic construct
GVPGSGKVY

SEQ ID NO: 31636 - protein, 9 aa, synthetic construct
GVPGVVHLY

SEQ ID NO: 31637 - protein, 9 aa, synthetic construct
GVPGVVHLK

SEQ ID NO: 31638 - protein, 9 aa, synthetic construct
GVPGVVHVR

SEQ ID NO: 31639 - protein, 9 aa, synthetic construct
GVPGVVHVF

SEQ ID NO: 31640 - protein, 9 aa, synthetic construct
GVPGVVRLY

SEQ ID NO: 31641 - protein, 9 aa, synthetic construct
GVPGVVRLH

SEQ ID NO: 31642 - protein, 9 aa, synthetic construct
GVPGVVRLF

SEQ ID NO: 31643 - protein, 9 aa, synthetic construct
PTNGSLRVH

SEQ ID NO: 31644 - protein, 9 aa, synthetic construct
GVPGVVKLH

SEQ ID NO: 31645 - protein, 9 aa, synthetic construct
PTNGSLRVK

SEQ ID NO: 31646 - protein, 9 aa, synthetic construct
GVPGVLHVK

SEQ ID NO: 31647 - protein, 9 aa, synthetic construct
PTNGSLRVF

SEQ ID NO: 31648 - protein, 9 aa, synthetic construct
PLNGVLHVY

SEQ ID NO: 31649 - protein, 9 aa, synthetic construct
GVPGVLKLR

SEQ ID NO: 31650 - protein, 9 aa, synthetic construct
GVPGVLKLH

SEQ ID NO: 31651 - protein, 9 aa, synthetic construct
GVPGVLKVY

SEQ ID NO: 31652 - protein, 9 aa, synthetic construct
GVPGVLKVF

SEQ ID NO: 31653 - protein, 9 aa, synthetic construct
PTNGSLKLR

SEQ ID NO: 31654 - protein, 9 aa, synthetic construct
GVPGVAHLY

SEQ ID NO: 31655 - protein, 9 aa, synthetic construct
GVPGVAHLR

SEQ ID NO: 31656 - protein, 9 aa, synthetic construct
GVPGVAHLK

SEQ ID NO: 31657 - protein, 9 aa, synthetic construct
GVPGVAHLF

SEQ ID NO: 31658 - protein, 9 aa, synthetic construct
GVPGVAHVY

SEQ ID NO: 31659 - protein, 9 aa, synthetic construct
GVPGVAHVK

SEQ ID NO: 31660 - protein, 9 aa, synthetic construct
GVPGVAHVF

SEQ ID NO: 31661 - protein, 9 aa, synthetic construct
PTNGSLKLH

SEQ ID NO: 31662 - protein, 9 aa, synthetic construct
GVPGVARLY

SEQ ID NO: 31663 - protein, 9 aa, synthetic construct
GVPGVARLF

SEQ ID NO: 31664 - protein, 9 aa, synthetic construct
GVPGVARVH

SEQ ID NO: 31665 - protein, 9 aa, synthetic construct
GVPGVARVF

SEQ ID NO: 31666 - protein, 9 aa, synthetic construct
GVPGVAKLH

SEQ ID NO: 31667 - protein, 9 aa, synthetic construct
GVPGVAKVF

SEQ ID NO: 31668 - protein, 9 aa, synthetic construct
GVPGVIHLR

SEQ ID NO: 31669 - protein, 9 aa, synthetic construct
GVPGVIHLH

SEQ ID NO: 31670 - protein, 9 aa, synthetic construct
GVPGVIHVF

SEQ ID NO: 31671 - protein, 9 aa, synthetic construct
GVPGVIRLR

SEQ ID NO: 31672 - protein, 9 aa, synthetic construct
GVPGVIRLH

SEQ ID NO: 31673 - protein, 9 aa, synthetic construct
GVPGVIRLF

SEQ ID NO: 31674 - protein, 9 aa, synthetic construct
GVPGVIRVY

SEQ ID NO: 31675 - protein, 9 aa, synthetic construct
GVPGVIRVH

SEQ ID NO: 31676 - protein, 9 aa, synthetic construct
PTNGSLKVR

SEQ ID NO: 31677 - protein, 9 aa, synthetic construct
GVPGVIKLY

SEQ ID NO: 31678 - protein, 9 aa, synthetic construct
GVPGVIKVY

SEQ ID NO: 31679 - protein, 9 aa, synthetic construct
GVPGVGHLY

SEQ ID NO: 31680 - protein, 9 aa, synthetic construct
GVPGVGHLR

SEQ ID NO: 31681 - protein, 9 aa, synthetic construct
GVPGVGHLK

SEQ ID NO: 31682 - protein, 9 aa, synthetic construct
GVPGVGHLF

SEQ ID NO: 31683 - protein, 9 aa, synthetic construct
GVPGVGHVY

SEQ ID NO: 31684 - protein, 9 aa, synthetic construct
GVPGVGHVR

SEQ ID NO: 31685 - protein, 9 aa, synthetic construct
GVPGVGHVK

SEQ ID NO: 31686 - protein, 9 aa, synthetic construct
GVPGVGHVF

SEQ ID NO: 31687 - protein, 9 aa, synthetic construct
PTNGSLKVK

SEQ ID NO: 31688 - protein, 9 aa, synthetic construct
GVPGVGRLY

SEQ ID NO: 31689 - protein, 9 aa, synthetic construct
GVPGVGRLF

SEQ ID NO: 31690 - protein, 9 aa, synthetic construct
GVPGVGRVY

SEQ ID NO: 31691 - protein, 9 aa, synthetic construct
GVPGVGRVR

SEQ ID NO: 31692 - protein, 9 aa, synthetic construct
GVPGVGRVK

SEQ ID NO: 31693 - protein, 9 aa, synthetic construct
GVPGVGRVF

SEQ ID NO: 31694 - protein, 9 aa, synthetic construct
GVPGVGKLR

SEQ ID NO: 31695 - protein, 9 aa, synthetic construct
GVPGVGKLH

SEQ ID NO: 31696 - protein, 9 aa, synthetic construct
GVPGVGKLF

SEQ ID NO: 31697 - protein, 9 aa, synthetic construct
GVPGVGKVY

SEQ ID NO: 31698 - protein, 9 aa, synthetic construct
GVPGVGKVR

SEQ ID NO: 31699 - protein, 9 aa, synthetic construct
GVPGVGKVH

SEQ ID NO: 31700 - protein, 9 aa, synthetic construct
GVPGVGKVF

SEQ ID NO: 31701 - protein, 9 aa, synthetic construct
PLNGVLHVR

SEQ ID NO: 31702 - protein, 9 aa, synthetic construct
GVPGGVHLF

SEQ ID NO: 31703 - protein, 9 aa, synthetic construct
GVPGGVHVF

SEQ ID NO: 31704 - protein, 9 aa, synthetic construct
GVPGGVKLH

SEQ ID NO: 31705 - protein, 9 aa, synthetic construct
GVPGGLHLF

SEQ ID NO: 31706 - protein, 9 aa, synthetic construct
GVPGGLHVR

SEQ ID NO: 31707 - protein, 9 aa, synthetic construct
GVPGGLKLH

SEQ ID NO: 31708 - protein, 9 aa, synthetic construct
GVPGGAHVR

SEQ ID NO: 31709 - protein, 9 aa, synthetic construct
GVPGGARLF

SEQ ID NO: 31710 - protein, 9 aa, synthetic construct
GVPGGAKVF

SEQ ID NO: 31711 - protein, 9 aa, synthetic construct
GVPGGIHLR

SEQ ID NO: 31712 - protein, 9 aa, synthetic construct
GVPGGIHLK

SEQ ID NO: 31713 - protein, 9 aa, synthetic construct
GVPGGIHVF

SEQ ID NO: 31714 - protein, 9 aa, synthetic construct
PTNGSARLY

SEQ ID NO: 31715 - protein, 9 aa, synthetic construct
GVPGGIRLF

SEQ ID NO: 31716 - protein, 9 aa, synthetic construct
GVPGGIKLR

SEQ ID NO: 31717 - protein, 9 aa, synthetic construct
GVPGGIKLH

SEQ ID NO: 31718 - protein, 9 aa, synthetic construct
GVPGGIKLK

SEQ ID NO: 31719 - protein, 9 aa, synthetic construct
GVPGGIKLF

SEQ ID NO: 31720 - protein, 9 aa, synthetic construct
GVPGGIKVY

SEQ ID NO: 31721 - protein, 9 aa, synthetic construct
GVPGGIKVR

SEQ ID NO: 31722 - protein, 9 aa, synthetic construct
GVPGGIKVH

SEQ ID NO: 31723 - protein, 9 aa, synthetic construct
GVPGGIKVK

SEQ ID NO: 31724 - protein, 9 aa, synthetic construct
GVPGGIKVF

SEQ ID NO: 31725 - protein, 9 aa, synthetic construct
GVPGGGHVY

SEQ ID NO: 31726 - protein, 9 aa, synthetic construct
GVPGGGHVR

SEQ ID NO: 31727 - protein, 9 aa, synthetic construct
GVPGGGRVF

SEQ ID NO: 31728 - protein, 9 aa, synthetic construct
PTNGSARLF

SEQ ID NO: 31729 - protein, 9 aa, synthetic construct
GVPAAVHLY

SEQ ID NO: 31730 - protein, 9 aa, synthetic construct
GVPAAVHVH

SEQ ID NO: 31731 - protein, 9 aa, synthetic construct
GVPAAVRVF

SEQ ID NO: 31732 - protein, 9 aa, synthetic construct
GVPAAVKLR

SEQ ID NO: 31733 - protein, 9 aa, synthetic construct
GVPAAVKLH

SEQ ID NO: 31734 - protein, 9 aa, synthetic construct
GVPAAVKVH

SEQ ID NO: 31735 - protein, 9 aa, synthetic construct
GVPAAVKVF

SEQ ID NO: 31736 - protein, 9 aa, synthetic construct
GVPAALHLK

SEQ ID NO: 31737 - protein, 9 aa, synthetic construct
GVPAALHVR

SEQ ID NO: 31738 - protein, 9 aa, synthetic construct
GVPAALHVF

SEQ ID NO: 31739 - protein, 9 aa, synthetic construct
PTNGSARVF

SEQ ID NO: 31740 - protein, 9 aa, synthetic construct
GVPAALRLH

SEQ ID NO: 31741 - protein, 9 aa, synthetic construct
GVPAALRLK

SEQ ID NO: 31742 - protein, 9 aa, synthetic construct
GVPAALRVY

SEQ ID NO: 31743 - protein, 9 aa, synthetic construct
GVPAALRVK

SEQ ID NO: 31744 - protein, 9 aa, synthetic construct
GVPAALKLY

SEQ ID NO: 31745 - protein, 9 aa, synthetic construct
GVPAALKLR

SEQ ID NO: 31746 - protein, 9 aa, synthetic construct
GVPAALKLH

SEQ ID NO: 31747 - protein, 9 aa, synthetic construct
GVPAALKLK

SEQ ID NO: 31748 - protein, 9 aa, synthetic construct
GVPAALKLF

SEQ ID NO: 31749 - protein, 9 aa, synthetic construct
GVPAALKVH

SEQ ID NO: 31750 - protein, 9 aa, synthetic construct
GVPAALKVF

SEQ ID NO: 31751 - protein, 9 aa, synthetic construct
PTNGSAKLR

SEQ ID NO: 31752 - protein, 9 aa, synthetic construct
GVPAAAHVR

SEQ ID NO: 31753 - protein, 9 aa, synthetic construct
GVPAAAHVF

SEQ ID NO: 31754 - protein, 9 aa, synthetic construct
GVPAAARLY

SEQ ID NO: 31755 - protein, 9 aa, synthetic construct
GVPAAARLF

SEQ ID NO: 31756 - protein, 9 aa, synthetic construct
GVPAAARVR

SEQ ID NO: 31757 - protein, 9 aa, synthetic construct
GVPAAARVF

SEQ ID NO: 31758 - protein, 9 aa, synthetic construct
PTNGSAKLK

SEQ ID NO: 31759 - protein, 9 aa, synthetic construct
GVPAAAKLK

SEQ ID NO: 31760 - protein, 9 aa, synthetic construct
GVPAAAKLF

SEQ ID NO: 31761 - protein, 9 aa, synthetic construct
GVPAAAKVR

SEQ ID NO: 31762 - protein, 9 aa, synthetic construct
GVPAAAKVH

SEQ ID NO: 31763 - protein, 9 aa, synthetic construct
GVPAAIRLY

SEQ ID NO: 31764 - protein, 9 aa, synthetic construct
GVPAAIRLH

SEQ ID NO: 31765 - protein, 9 aa, synthetic construct
GVPAAIRLK

SEQ ID NO: 31766 - protein, 9 aa, synthetic construct
GVPAAIRLF

SEQ ID NO: 31767 - protein, 9 aa, synthetic construct
GVPAAIRVY

SEQ ID NO: 31768 - protein, 9 aa, synthetic construct
GVPAAIKLY

SEQ ID NO: 31769 - protein, 9 aa, synthetic construct
GVPAAIKLK

SEQ ID NO: 31770 - protein, 9 aa, synthetic construct
GVPAAIKLF

SEQ ID NO: 31771 - protein, 9 aa, synthetic construct
GVPAAIKVH

SEQ ID NO: 31772 - protein, 9 aa, synthetic construct
GVPAAIKVK

SEQ ID NO: 31773 - protein, 9 aa, synthetic construct
GVPAAGHLR

SEQ ID NO: 31774 - protein, 9 aa, synthetic construct
GVPAAGRLY

SEQ ID NO: 31775 - protein, 9 aa, synthetic construct
GVPAAGKLK

SEQ ID NO: 31776 - protein, 9 aa, synthetic construct
GVPATVHLR

SEQ ID NO: 31777 - protein, 9 aa, synthetic construct
GVPATVHLH

SEQ ID NO: 31778 - protein, 9 aa, synthetic construct
GVPATVHVY

SEQ ID NO: 31779 - protein, 9 aa, synthetic construct
GVPATVHVF

SEQ ID NO: 31780 - protein, 9 aa, synthetic construct
GVPATVKLR

SEQ ID NO: 31781 - protein, 9 aa, synthetic construct
GVPATVKLH

SEQ ID NO: 31782 - protein, 9 aa, synthetic construct
GVPATVKVY

SEQ ID NO: 31783 - protein, 9 aa, synthetic construct
GVPATVKVH

SEQ ID NO: 31784 - protein, 9 aa, synthetic construct
GVPATVKVF

SEQ ID NO: 31785 - protein, 9 aa, synthetic construct
GVPATLHLH

SEQ ID NO: 31786 - protein, 9 aa, synthetic construct
GVPATLHLK

SEQ ID NO: 31787 - protein, 9 aa, synthetic construct
GVPATLHVY

SEQ ID NO: 31788 - protein, 9 aa, synthetic construct
GVPATLHVK

SEQ ID NO: 31789 - protein, 9 aa, synthetic construct
GVPATLHVF

SEQ ID NO: 31790 - protein, 9 aa, synthetic construct
GVPATLRLY

SEQ ID NO: 31791 - protein, 9 aa, synthetic construct
GVPATLRVY

SEQ ID NO: 31792 - protein, 9 aa, synthetic construct
GVPATLKLY

SEQ ID NO: 31793 - protein, 9 aa, synthetic construct
GVPATLKVY

SEQ ID NO: 31794 - protein, 9 aa, synthetic construct
GVPATLKVK

SEQ ID NO: 31795 - protein, 9 aa, synthetic construct
GVPATAHLR

SEQ ID NO: 31796 - protein, 9 aa, synthetic construct
GVPATAHLH

SEQ ID NO: 31797 - protein, 9 aa, synthetic construct
GVPATAHLF

SEQ ID NO: 31798 - protein, 9 aa, synthetic construct
GVPATAHVF

SEQ ID NO: 31799 - protein, 9 aa, synthetic construct
GVPATARLF

SEQ ID NO: 31800 - protein, 9 aa, synthetic construct
GVPATAKLY

SEQ ID NO: 31801 - protein, 9 aa, synthetic construct
GVPATAKLF

SEQ ID NO: 31802 - protein, 9 aa, synthetic construct
GVPATIHVY

SEQ ID NO: 31803 - protein, 9 aa, synthetic construct
GVPATIHVR

SEQ ID NO: 31804 - protein, 9 aa, synthetic construct
GVPATIHVF

SEQ ID NO: 31805 - protein, 9 aa, synthetic construct
PLNGVLRLY

SEQ ID NO: 31806 - protein, 9 aa, synthetic construct
GVPATIRLR

SEQ ID NO: 31807 - protein, 9 aa, synthetic construct
GVPATIRLH

SEQ ID NO: 31808 - protein, 9 aa, synthetic construct
PTNGSIRLR

SEQ ID NO: 31809 - protein, 9 aa, synthetic construct
GVPATIKLR

SEQ ID NO: 31810 - protein, 9 aa, synthetic construct
GVPATGHVR

SEQ ID NO: 31811 - protein, 9 aa, synthetic construct
PTNGSIRLK

SEQ ID NO: 31812 - protein, 9 aa, synthetic construct
GVPATGRLY

SEQ ID NO: 31813 - protein, 9 aa, synthetic construct
GVPATGRVY

SEQ ID NO: 31814 - protein, 9 aa, synthetic construct
GVPATGKLF

SEQ ID NO: 31815 - protein, 9 aa, synthetic construct
GVPATGKVH

SEQ ID NO: 31816 - protein, 9 aa, synthetic construct
GVPATGKVF

SEQ ID NO: 31817 - protein, 9 aa, synthetic construct
GVPASVHLY

SEQ ID NO: 31818 - protein, 9 aa, synthetic construct
GVPASVHLK

SEQ ID NO: 31819 - protein, 9 aa, synthetic construct
PTNGSIRVR

SEQ ID NO: 31820 - protein, 9 aa, synthetic construct
GVPASVRLY

SEQ ID NO: 31821 - protein, 9 aa, synthetic construct
GVPASVRVH

SEQ ID NO: 31822 - protein, 9 aa, synthetic construct
GVPASVRVF

SEQ ID NO: 31823 - protein, 9 aa, synthetic construct
GVPASVKLH

SEQ ID NO: 31824 - protein, 9 aa, synthetic construct
GVPASVKVY

SEQ ID NO: 31825 - protein, 9 aa, synthetic construct
GVPASVKVK

SEQ ID NO: 31826 - protein, 9 aa, synthetic construct
GVPASVKVF

SEQ ID NO: 31827 - protein, 9 aa, synthetic construct
GVPASLHLR

SEQ ID NO: 31828 - protein, 9 aa, synthetic construct
GVPASLHLK

SEQ ID NO: 31829 - protein, 9 aa, synthetic construct
GVPASLHVR

SEQ ID NO: 31830 - protein, 9 aa, synthetic construct
GVPASLRVF

SEQ ID NO: 31831 - protein, 9 aa, synthetic construct
GVPASLKVY

SEQ ID NO: 31832 - protein, 9 aa, synthetic construct
GVPASLKVF

SEQ ID NO: 31833 - protein, 9 aa, synthetic construct
GVPASAHLK

SEQ ID NO: 31834 - protein, 9 aa, synthetic construct
GVPASAHVR

SEQ ID NO: 31835 - protein, 9 aa, synthetic construct
GVPASAHVK

SEQ ID NO: 31836 - protein, 9 aa, synthetic construct
GVPASARLY

SEQ ID NO: 31837 - protein, 9 aa, synthetic construct
GVPASARLF

SEQ ID NO: 31838 - protein, 9 aa, synthetic construct
GVPASARVY

SEQ ID NO: 31839 - protein, 9 aa, synthetic construct
GVPASARVF

SEQ ID NO: 31840 - protein, 9 aa, synthetic construct
GVPASAKLH

SEQ ID NO: 31841 - protein, 9 aa, synthetic construct
GVPASAKVY

SEQ ID NO: 31842 - protein, 9 aa, synthetic construct
GVPASAKVH

SEQ ID NO: 31843 - protein, 9 aa, synthetic construct
GVPASIHLY

SEQ ID NO: 31844 - protein, 9 aa, synthetic construct
GVPASIHLH

SEQ ID NO: 31845 - protein, 9 aa, synthetic construct
GVPASIHLK

SEQ ID NO: 31846 - protein, 9 aa, synthetic construct
GVPASIHVR

SEQ ID NO: 31847 - protein, 9 aa, synthetic construct
GVPASIHVH

SEQ ID NO: 31848 - protein, 9 aa, synthetic construct
GVPASIRLH

SEQ ID NO: 31849 - protein, 9 aa, synthetic construct
GVPASIKLY

SEQ ID NO: 31850 - protein, 9 aa, synthetic construct
GVPASIKLK

SEQ ID NO: 31851 - protein, 9 aa, synthetic construct
GVPASGHLK

SEQ ID NO: 31852 - protein, 9 aa, synthetic construct
GVPASGRLY

SEQ ID NO: 31853 - protein, 9 aa, synthetic construct
GVPASGKLY

SEQ ID NO: 31854 - protein, 9 aa, synthetic construct
GVPASGKLH

SEQ ID NO: 31855 - protein, 9 aa, synthetic construct
GVPASGKLF

SEQ ID NO: 31856 - protein, 9 aa, synthetic construct
GVPAVVHLY

SEQ ID NO: 31857 - protein, 9 aa, synthetic construct
GVPAVVHLH

SEQ ID NO: 31858 - protein, 9 aa, synthetic construct
GVPAVVHLK

SEQ ID NO: 31859 - protein, 9 aa, synthetic construct
GVPAVVHLF

SEQ ID NO: 31860 - protein, 9 aa, synthetic construct
GVPAVVHVY

SEQ ID NO: 31861 - protein, 9 aa, synthetic construct
GVPAVVHVR

SEQ ID NO: 31862 - protein, 9 aa, synthetic construct
GVPAVVHVK

SEQ ID NO: 31863 - protein, 9 aa, synthetic construct
GVPAVVHVF

SEQ ID NO: 31864 - protein, 9 aa, synthetic construct
GVPAVVRLY

SEQ ID NO: 31865 - protein, 9 aa, synthetic construct
GVPAVVRLH

SEQ ID NO: 31866 - protein, 9 aa, synthetic construct
GVPAVVRLK

SEQ ID NO: 31867 - protein, 9 aa, synthetic construct
GVPAVVRLF

SEQ ID NO: 31868 - protein, 9 aa, synthetic construct
GVPAVVKLH

SEQ ID NO: 31869 - protein, 9 aa, synthetic construct
GVPAVVKLF

SEQ ID NO: 31870 - protein, 9 aa, synthetic construct
PTNGSGHLK

SEQ ID NO: 31871 - protein, 9 aa, synthetic construct
GVPAVLHVF

SEQ ID NO: 31872 - protein, 9 aa, synthetic construct
GVPAVLRLH

SEQ ID NO: 31873 - protein, 9 aa, synthetic construct
GVPAVLRLF

SEQ ID NO: 31874 - protein, 9 aa, synthetic construct
GVPAVLRVK

SEQ ID NO: 31875 - protein, 9 aa, synthetic construct
PTNGSGHVY

SEQ ID NO: 31876 - protein, 9 aa, synthetic construct
GVPAVLKLR

SEQ ID NO: 31877 - protein, 9 aa, synthetic construct
GVPAVLKLF

SEQ ID NO: 31878 - protein, 9 aa, synthetic construct
GVPAVLKVY

SEQ ID NO: 31879 - protein, 9 aa, synthetic construct
GVPAVLKVH

SEQ ID NO: 31880 - protein, 9 aa, synthetic construct
GVPAVLKVF

SEQ ID NO: 31881 - protein, 9 aa, synthetic construct
PTNGSGHVR

SEQ ID NO: 31882 - protein, 9 aa, synthetic construct
GVPAVAHLH

SEQ ID NO: 31883 - protein, 9 aa, synthetic construct
GVPAVAHVR

SEQ ID NO: 31884 - protein, 9 aa, synthetic construct
GVPAVAHVK

SEQ ID NO: 31885 - protein, 9 aa, synthetic construct
GVPAVARLY

SEQ ID NO: 31886 - protein, 9 aa, synthetic construct
GVPAVARLF

SEQ ID NO: 31887 - protein, 9 aa, synthetic construct
PTNGSGHVK

SEQ ID NO: 31888 - protein, 9 aa, synthetic construct
GVPAVAKLH

SEQ ID NO: 31889 - protein, 9 aa, synthetic construct
GVPAVAKVR

SEQ ID NO: 31890 - protein, 9 aa, synthetic construct
GVPAVAKVH

SEQ ID NO: 31891 - protein, 9 aa, synthetic construct
GVPAVAKVF

SEQ ID NO: 31892 - protein, 9 aa, synthetic construct
GVPAVIRLR

SEQ ID NO: 31893 - protein, 9 aa, synthetic construct
GVPAVIRLH

SEQ ID NO: 31894 - protein, 9 aa, synthetic construct
GVPAVIRVR

SEQ ID NO: 31895 - protein, 9 aa, synthetic construct
GVPAVIRVH

SEQ ID NO: 31896 - protein, 9 aa, synthetic construct
PTNGSGRLR

SEQ ID NO: 31897 - protein, 9 aa, synthetic construct
GVPAVIKLY

SEQ ID NO: 31898 - protein, 9 aa, synthetic construct
GVPAVIKLH

SEQ ID NO: 31899 - protein, 9 aa, synthetic construct
GVPAVIKLF

SEQ ID NO: 31900 - protein, 9 aa, synthetic construct
GVPAVIKVY

SEQ ID NO: 31901 - protein, 9 aa, synthetic construct
PTNGSGRLH

SEQ ID NO: 31902 - protein, 9 aa, synthetic construct
GVPAVGHLR

SEQ ID NO: 31903 - protein, 9 aa, synthetic construct
GVPAVGHLH

SEQ ID NO: 31904 - protein, 9 aa, synthetic construct
GVPAVGHLK

SEQ ID NO: 31905 - protein, 9 aa, synthetic construct
GVPAVGHVH

SEQ ID NO: 31906 - protein, 9 aa, synthetic construct
GVPAVGHVK

SEQ ID NO: 31907 - protein, 9 aa, synthetic construct
GVPAVGHVF

SEQ ID NO: 31908 - protein, 9 aa, synthetic construct
PTNGSGRLK

SEQ ID NO: 31909 - protein, 9 aa, synthetic construct
GVPAVGRLY

SEQ ID NO: 31910 - protein, 9 aa, synthetic construct
GVPAVGRLH

SEQ ID NO: 31911 - protein, 9 aa, synthetic construct
GVPAVGRLK

SEQ ID NO: 31912 - protein, 9 aa, synthetic construct
GVPAVGRLF

SEQ ID NO: 31913 - protein, 9 aa, synthetic construct
GVPAVGRVY

SEQ ID NO: 31914 - protein, 9 aa, synthetic construct
GVPAVGRVR

SEQ ID NO: 31915 - protein, 9 aa, synthetic construct
GVPAVGRVK

SEQ ID NO: 31916 - protein, 9 aa, synthetic construct
GVPAVGRVF

SEQ ID NO: 31917 - protein, 9 aa, synthetic construct
PTNGSGRLF

SEQ ID NO: 31918 - protein, 9 aa, synthetic construct
GVPAVGKLR

SEQ ID NO: 31919 - protein, 9 aa, synthetic construct
GVPAVGKLH

SEQ ID NO: 31920 - protein, 9 aa, synthetic construct
GVPAVGKLF

SEQ ID NO: 31921 - protein, 9 aa, synthetic construct
GVPAVGKVY

SEQ ID NO: 31922 - protein, 9 aa, synthetic construct
GVPAVGKVR

SEQ ID NO: 31923 - protein, 9 aa, synthetic construct
GVPAVGKVH

SEQ ID NO: 31924 - protein, 9 aa, synthetic construct
GVPAVGKVK

SEQ ID NO: 31925 - protein, 9 aa, synthetic construct
GVPAVGKVF

SEQ ID NO: 31926 - protein, 9 aa, synthetic construct
GVPAGVRLH

SEQ ID NO: 31927 - protein, 9 aa, synthetic construct
GVPAGVRVY

SEQ ID NO: 31928 - protein, 9 aa, synthetic construct
GVPAGVRVK

SEQ ID NO: 31929 - protein, 9 aa, synthetic construct
PTNGSGRVH

SEQ ID NO: 31930 - protein, 9 aa, synthetic construct
GVPAGVKLY

SEQ ID NO: 31931 - protein, 9 aa, synthetic construct
GVPAGVKVY

SEQ ID NO: 31932 - protein, 9 aa, synthetic construct
GVPAGVKVH

SEQ ID NO: 31933 - protein, 9 aa, synthetic construct
GVPAGVKVK

SEQ ID NO: 31934 - protein, 9 aa, synthetic construct
PLNGVLRLF

SEQ ID NO: 31935 - protein, 9 aa, synthetic construct
PTNGSGKLR

SEQ ID NO: 31936 - protein, 9 aa, synthetic construct
GVPAGAHLY

SEQ ID NO: 31937 - protein, 9 aa, synthetic construct
GVPAGAHLK

SEQ ID NO: 31938 - protein, 9 aa, synthetic construct
GVPAGAHVR

SEQ ID NO: 31939 - protein, 9 aa, synthetic construct
GVPAGAHVK

SEQ ID NO: 31940 - protein, 9 aa, synthetic construct
GVPAGARLY

SEQ ID NO: 31941 - protein, 9 aa, synthetic construct
GVPAGAKLF

SEQ ID NO: 31942 - protein, 9 aa, synthetic construct
GVPAGAKVY

SEQ ID NO: 31943 - protein, 9 aa, synthetic construct
GVPAGAKVH

SEQ ID NO: 31944 - protein, 9 aa, synthetic construct
GVPAGAKVF

SEQ ID NO: 31945 - protein, 9 aa, synthetic construct
PTNGSGKLF

SEQ ID NO: 31946 - protein, 9 aa, synthetic construct
GVPAGIHLY

SEQ ID NO: 31947 - protein, 9 aa, synthetic construct
GVPAGIHLR

SEQ ID NO: 31948 - protein, 9 aa, synthetic construct
GVPAGIHLH

SEQ ID NO: 31949 - protein, 9 aa, synthetic construct
GVPAGIHLK

SEQ ID NO: 31950 - protein, 9 aa, synthetic construct
GVPAGIHVY

SEQ ID NO: 31951 - protein, 9 aa, synthetic construct
GVPAGIHVH

SEQ ID NO: 31952 - protein, 9 aa, synthetic construct
GVPAGIHVF

SEQ ID NO: 31953 - protein, 9 aa, synthetic construct
PTNGSGKVY

SEQ ID NO: 31954 - protein, 9 aa, synthetic construct
GVPAGIRLY

SEQ ID NO: 31955 - protein, 9 aa, synthetic construct
GVPAGIRLF

SEQ ID NO: 31956 - protein, 9 aa, synthetic construct
GVPAGIRVH

SEQ ID NO: 31957 - protein, 9 aa, synthetic construct
GVPAGIKLY

SEQ ID NO: 31958 - protein, 9 aa, synthetic construct
GVPAGIKVY

SEQ ID NO: 31959 - protein, 9 aa, synthetic construct
GVPAGIKVH

SEQ ID NO: 31960 - protein, 9 aa, synthetic construct
GVPAGGRLY

SEQ ID NO: 31961 - protein, 9 aa, synthetic construct
GVPAGGRLF

SEQ ID NO: 31962 - protein, 9 aa, synthetic construct
GVPAGGRVY

SEQ ID NO: 31963 - protein, 9 aa, synthetic construct
GVPAGGRVF

SEQ ID NO: 31964 - protein, 9 aa, synthetic construct
GVPAGGKLH

SEQ ID NO: 31965 - protein, 9 aa, synthetic construct
GVPAGGKVY

SEQ ID NO: 31966 - protein, 9 aa, synthetic construct
GVPAGGKVR

SEQ ID NO: 31967 - protein, 9 aa, synthetic construct
GVPAGGKVK

SEQ ID NO: 31968 - protein, 9 aa, synthetic construct
GVPAGGKVF

SEQ ID NO: 31969 - protein, 9 aa, synthetic construct
PLNGVLRVY

SEQ ID NO: 31970 - protein, 9 aa, synthetic construct
GINGAVHLY

SEQ ID NO: 31971 - protein, 9 aa, synthetic construct
GINGAVHLH

SEQ ID NO: 31972 - protein, 9 aa, synthetic construct
GINGAVHVK

SEQ ID NO: 31973 - protein, 9 aa, synthetic construct
GINGAVHVF

SEQ ID NO: 31974 - protein, 9 aa, synthetic construct
PTNGVVHLR

SEQ ID NO: 31975 - protein, 9 aa, synthetic construct
GINGAVRLY

SEQ ID NO: 31976 - protein, 9 aa, synthetic construct
GINGAVRLH

SEQ ID NO: 31977 - protein, 9 aa, synthetic construct
GINGAVRVY

SEQ ID NO: 31978 - protein, 9 aa, synthetic construct
GINGAVRVH

SEQ ID NO: 31979 - protein, 9 aa, synthetic construct
GINGAVKLY

SEQ ID NO: 31980 - protein, 9 aa, synthetic construct
GINGAVKLF

SEQ ID NO: 31981 - protein, 9 aa, synthetic construct
GINGAVKVF

SEQ ID NO: 31982 - protein, 9 aa, synthetic construct
GINGALHLK

SEQ ID NO: 31983 - protein, 9 aa, synthetic construct
GINGALHVY

SEQ ID NO: 31984 - protein, 9 aa, synthetic construct
GINGALHVR

SEQ ID NO: 31985 - protein, 9 aa, synthetic construct
GINGALRLY

SEQ ID NO: 31986 - protein, 9 aa, synthetic construct
GINGALRLK

SEQ ID NO: 31987 - protein, 9 aa, synthetic construct
GINGALRVH

SEQ ID NO: 31988 - protein, 9 aa, synthetic construct
GINGALRVK

SEQ ID NO: 31989 - protein, 9 aa, synthetic construct
GINGALKLY

SEQ ID NO: 31990 - protein, 9 aa, synthetic construct
GINGALKLR

SEQ ID NO: 31991 - protein, 9 aa, synthetic construct
GINGALKLH

SEQ ID NO: 31992 - protein, 9 aa, synthetic construct
GINGALKLF

SEQ ID NO: 31993 - protein, 9 aa, synthetic construct
GINGALKVF

SEQ ID NO: 31994 - protein, 9 aa, synthetic construct
GINGAAHLY

SEQ ID NO: 31995 - protein, 9 aa, synthetic construct
GINGAAHLR

SEQ ID NO: 31996 - protein, 9 aa, synthetic construct
GINGAAHLH

SEQ ID NO: 31997 - protein, 9 aa, synthetic construct
GINGAAHLK

SEQ ID NO: 31998 - protein, 9 aa, synthetic construct
GINGAAHLF

SEQ ID NO: 31999 - protein, 9 aa, synthetic construct
GINGAAHVR

SEQ ID NO: 32000 - protein, 9 aa, synthetic construct
GINGAAHVH

SEQ ID NO: 32001 - protein, 9 aa, synthetic construct
GINGAAHVK

SEQ ID NO: 32002 - protein, 9 aa, synthetic construct
GINGAAHVF

SEQ ID NO: 32003 - protein, 9 aa, synthetic construct
GINGAARLY

SEQ ID NO: 32004 - protein, 9 aa, synthetic construct
GINGAARLH

SEQ ID NO: 32005 - protein, 9 aa, synthetic construct
GINGAARLF

SEQ ID NO: 32006 - protein, 9 aa, synthetic construct
GINGAARVH

SEQ ID NO: 32007 - protein, 9 aa, synthetic construct
GINGAARVF

SEQ ID NO: 32008 - protein, 9 aa, synthetic construct
GINGAAKLH

SEQ ID NO: 32009 - protein, 9 aa, synthetic construct
GINGAAKLF

SEQ ID NO: 32010 - protein, 9 aa, synthetic construct
GINGAAKVY

SEQ ID NO: 32011 - protein, 9 aa, synthetic construct
GINGAIHLR

SEQ ID NO: 32012 - protein, 9 aa, synthetic construct
GINGAIHLH

SEQ ID NO: 32013 - protein, 9 aa, synthetic construct
GINGAIHVR

SEQ ID NO: 32014 - protein, 9 aa, synthetic construct
GINGAIHVK

SEQ ID NO: 32015 - protein, 9 aa, synthetic construct
GINGAIHVF

SEQ ID NO: 32016 - protein, 9 aa, synthetic construct
GINGAIRVY

SEQ ID NO: 32017 - protein, 9 aa, synthetic construct
GINGAIRVH

SEQ ID NO: 32018 - protein, 9 aa, synthetic construct
GINGAIKVR

SEQ ID NO: 32019 - protein, 9 aa, synthetic construct
PTNGVVRLH

SEQ ID NO: 32020 - protein, 9 aa, synthetic construct
GINGAGHLY

SEQ ID NO: 32021 - protein, 9 aa, synthetic construct
GINGAGHLR

SEQ ID NO: 32022 - protein, 9 aa, synthetic construct
GINGAGHLK

SEQ ID NO: 32023 - protein, 9 aa, synthetic construct
GINGAGHLF

SEQ ID NO: 32024 - protein, 9 aa, synthetic construct
GINGAGHVY

SEQ ID NO: 32025 - protein, 9 aa, synthetic construct
GINGAGHVR

SEQ ID NO: 32026 - protein, 9 aa, synthetic construct
GINGAGHVH

SEQ ID NO: 32027 - protein, 9 aa, synthetic construct
GINGAGHVK

SEQ ID NO: 32028 - protein, 9 aa, synthetic construct
GINGAGHVF

SEQ ID NO: 32029 - protein, 9 aa, synthetic construct
GINGAGRLR

SEQ ID NO: 32030 - protein, 9 aa, synthetic construct
GINGAGRLF

SEQ ID NO: 32031 - protein, 9 aa, synthetic construct
GINGAGRVH

SEQ ID NO: 32032 - protein, 9 aa, synthetic construct
GINGAGRVK

SEQ ID NO: 32033 - protein, 9 aa, synthetic construct
GINGAGRVF

SEQ ID NO: 32034 - protein, 9 aa, synthetic construct
PTNGVVRLF

SEQ ID NO: 32035 - protein, 9 aa, synthetic construct
GINGAGKLY

SEQ ID NO: 32036 - protein, 9 aa, synthetic construct
GINGAGKLR

SEQ ID NO: 32037 - protein, 9 aa, synthetic construct
GINGAGKLF

SEQ ID NO: 32038 - protein, 9 aa, synthetic construct
GINGAGKVY

SEQ ID NO: 32039 - protein, 9 aa, synthetic construct
GINGAGKVR

SEQ ID NO: 32040 - protein, 9 aa, synthetic construct
GINGAGKVH

SEQ ID NO: 32041 - protein, 9 aa, synthetic construct
GINGAGKVK

SEQ ID NO: 32042 - protein, 9 aa, synthetic construct
GINGAGKVF

SEQ ID NO: 32043 - protein, 9 aa, synthetic construct
PTNGVVRVY

SEQ ID NO: 32044 - protein, 9 aa, synthetic construct
GINGTVHLR

SEQ ID NO: 32045 - protein, 9 aa, synthetic construct
GINGTVHLK

SEQ ID NO: 32046 - protein, 9 aa, synthetic construct
GINGTVHLF

SEQ ID NO: 32047 - protein, 9 aa, synthetic construct
GINGTVHVY

SEQ ID NO: 32048 - protein, 9 aa, synthetic construct
GINGTVHVR

SEQ ID NO: 32049 - protein, 9 aa, synthetic construct
GINGTVHVK

SEQ ID NO: 32050 - protein, 9 aa, synthetic construct
GINGTVHVF

SEQ ID NO: 32051 - protein, 9 aa, synthetic construct
GINGTVRLF

SEQ ID NO: 32052 - protein, 9 aa, synthetic construct
GINGTVRVY

SEQ ID NO: 32053 - protein, 9 aa, synthetic construct
GINGTVKLR

SEQ ID NO: 32054 - protein, 9 aa, synthetic construct
GINGTVKLH

SEQ ID NO: 32055 - protein, 9 aa, synthetic construct
GINGTVKLK

SEQ ID NO: 32056 - protein, 9 aa, synthetic construct
GINGTVKVY

SEQ ID NO: 32057 - protein, 9 aa, synthetic construct
GINGTVKVH

SEQ ID NO: 32058 - protein, 9 aa, synthetic construct
GINGTVKVF

SEQ ID NO: 32059 - protein, 9 aa, synthetic construct
GINGTLHLH

SEQ ID NO: 32060 - protein, 9 aa, synthetic construct
GINGTLHLK

SEQ ID NO: 32061 - protein, 9 aa, synthetic construct
GINGTLHVR

SEQ ID NO: 32062 - protein, 9 aa, synthetic construct
GINGTLHVH

SEQ ID NO: 32063 - protein, 9 aa, synthetic construct
GINGTLHVK

SEQ ID NO: 32064 - protein, 9 aa, synthetic construct
GINGTLHVF

SEQ ID NO: 32065 - protein, 9 aa, synthetic construct
PLNGVLRVH

SEQ ID NO: 32066 - protein, 9 aa, synthetic construct
PTNGVVKLY

SEQ ID NO: 32067 - protein, 9 aa, synthetic construct
GINGTLKLH

SEQ ID NO: 32068 - protein, 9 aa, synthetic construct
GINGTAHLY

SEQ ID NO: 32069 - protein, 9 aa, synthetic construct
GINGTAHLF

SEQ ID NO: 32070 - protein, 9 aa, synthetic construct
GINGTAHVY

SEQ ID NO: 32071 - protein, 9 aa, synthetic construct
GINGTAHVK

SEQ ID NO: 32072 - protein, 9 aa, synthetic construct
GINGTAHVF

SEQ ID NO: 32073 - protein, 9 aa, synthetic construct
PTNGVVKLH

SEQ ID NO: 32074 - protein, 9 aa, synthetic construct
GINGTARLF

SEQ ID NO: 32075 - protein, 9 aa, synthetic construct
GINGTARVY

SEQ ID NO: 32076 - protein, 9 aa, synthetic construct
GINGTAKLR

SEQ ID NO: 32077 - protein, 9 aa, synthetic construct
GINGTAKLH

SEQ ID NO: 32078 - protein, 9 aa, synthetic construct
GINGTAKLK

SEQ ID NO: 32079 - protein, 9 aa, synthetic construct
GINGTAKVY

SEQ ID NO: 32080 - protein, 9 aa, synthetic construct
GINGTIHLR

SEQ ID NO: 32081 - protein, 9 aa, synthetic construct
GINGTIHLH

SEQ ID NO: 32082 - protein, 9 aa, synthetic construct
GINGTIHVY

SEQ ID NO: 32083 - protein, 9 aa, synthetic construct
GINGTIHVR

SEQ ID NO: 32084 - protein, 9 aa, synthetic construct
GINGTIHVF

SEQ ID NO: 32085 - protein, 9 aa, synthetic construct
GINGTIRLH

SEQ ID NO: 32086 - protein, 9 aa, synthetic construct
GINGTIRLF

SEQ ID NO: 32087 - protein, 9 aa, synthetic construct
GINGTIRVH

SEQ ID NO: 32088 - protein, 9 aa, synthetic construct
GINGTIRVF

SEQ ID NO: 32089 - protein, 9 aa, synthetic construct
GINGTIKLH

SEQ ID NO: 32090 - protein, 9 aa, synthetic construct
GINGTGHLY

SEQ ID NO: 32091 - protein, 9 aa, synthetic construct
GINGTGHLR

SEQ ID NO: 32092 - protein, 9 aa, synthetic construct
GINGTGHLH

SEQ ID NO: 32093 - protein, 9 aa, synthetic construct
GINGTGHLK

SEQ ID NO: 32094 - protein, 9 aa, synthetic construct
GINGTGHVY

SEQ ID NO: 32095 - protein, 9 aa, synthetic construct
GINGTGHVH

SEQ ID NO: 32096 - protein, 9 aa, synthetic construct
GINGTGHVF

SEQ ID NO: 32097 - protein, 9 aa, synthetic construct
PTNGVVKVK

SEQ ID NO: 32098 - protein, 9 aa, synthetic construct
GINGTGRLY

SEQ ID NO: 32099 - protein, 9 aa, synthetic construct
GINGTGRLF

SEQ ID NO: 32100 - protein, 9 aa, synthetic construct
GINGTGRVF

SEQ ID NO: 32101 - protein, 9 aa, synthetic construct
GINGTGKLR

SEQ ID NO: 32102 - protein, 9 aa, synthetic construct
GINGTGKLH

SEQ ID NO: 32103 - protein, 9 aa, synthetic construct
GINGTGKLF

SEQ ID NO: 32104 - protein, 9 aa, synthetic construct
GINGTGKVY

SEQ ID NO: 32105 - protein, 9 aa, synthetic construct
GINGTGKVH

SEQ ID NO: 32106 - protein, 9 aa, synthetic construct
GINGSVHLR

SEQ ID NO: 32107 - protein, 9 aa, synthetic construct
GINGSVHLH

SEQ ID NO: 32108 - protein, 9 aa, synthetic construct
GINGSVHLK

SEQ ID NO: 32109 - protein, 9 aa, synthetic construct
GINGSVHVR

SEQ ID NO: 32110 - protein, 9 aa, synthetic construct
GINGSVRLY

SEQ ID NO: 32111 - protein, 9 aa, synthetic construct
GINGSVRLH

SEQ ID NO: 32112 - protein, 9 aa, synthetic construct
GINGSVRLF

SEQ ID NO: 32113 - protein, 9 aa, synthetic construct
GINGSVRVY

SEQ ID NO: 32114 - protein, 9 aa, synthetic construct
GINGSVRVF

SEQ ID NO: 32115 - protein, 9 aa, synthetic construct
GINGSVKLR

SEQ ID NO: 32116 - protein, 9 aa, synthetic construct
GINGSVKLH

SEQ ID NO: 32117 - protein, 9 aa, synthetic construct
GINGSVKLF

SEQ ID NO: 32118 - protein, 9 aa, synthetic construct
GINGSVKVK

SEQ ID NO: 32119 - protein, 9 aa, synthetic construct
GINGSVKVF

SEQ ID NO: 32120 - protein, 9 aa, synthetic construct
GINGSLHLK

SEQ ID NO: 32121 - protein, 9 aa, synthetic construct
GINGSLHVY

SEQ ID NO: 32122 - protein, 9 aa, synthetic construct
GINGSLRVF

SEQ ID NO: 32123 - protein, 9 aa, synthetic construct
GINGSLKLY

SEQ ID NO: 32124 - protein, 9 aa, synthetic construct
GINGSLKLH

SEQ ID NO: 32125 - protein, 9 aa, synthetic construct
GINGSLKVY

SEQ ID NO: 32126 - protein, 9 aa, synthetic construct
GINGSAHLF

SEQ ID NO: 32127 - protein, 9 aa, synthetic construct
GINGSAHVY

SEQ ID NO: 32128 - protein, 9 aa, synthetic construct
GINGSAHVR

SEQ ID NO: 32129 - protein, 9 aa, synthetic construct
GINGSAHVK

SEQ ID NO: 32130 - protein, 9 aa, synthetic construct
GINGSAHVF

SEQ ID NO: 32131 - protein, 9 aa, synthetic construct
GINGSARLY

SEQ ID NO: 32132 - protein, 9 aa, synthetic construct
GINGSARLH

SEQ ID NO: 32133 - protein, 9 aa, synthetic construct
GINGSARLF

SEQ ID NO: 32134 - protein, 9 aa, synthetic construct
GINGSARVY

SEQ ID NO: 32135 - protein, 9 aa, synthetic construct
GINGSARVH

SEQ ID NO: 32136 - protein, 9 aa, synthetic construct
GINGSARVF

SEQ ID NO: 32137 - protein, 9 aa, synthetic construct
GINGSAKLR

SEQ ID NO: 32138 - protein, 9 aa, synthetic construct
GINGSAKVY

SEQ ID NO: 32139 - protein, 9 aa, synthetic construct
GINGSIHLY

SEQ ID NO: 32140 - protein, 9 aa, synthetic construct
GINGSIHLF

SEQ ID NO: 32141 - protein, 9 aa, synthetic construct
GINGSIRLH

SEQ ID NO: 32142 - protein, 9 aa, synthetic construct
GINGSIRVR

SEQ ID NO: 32143 - protein, 9 aa, synthetic construct
GINGSIRVH

SEQ ID NO: 32144 - protein, 9 aa, synthetic construct
PTNGVLRLR

SEQ ID NO: 32145 - protein, 9 aa, synthetic construct
GINGSIKVR

SEQ ID NO: 32146 - protein, 9 aa, synthetic construct
GINGSGHLY

SEQ ID NO: 32147 - protein, 9 aa, synthetic construct
GINGSGHLH

SEQ ID NO: 32148 - protein, 9 aa, synthetic construct
GINGSGHLK

SEQ ID NO: 32149 - protein, 9 aa, synthetic construct
GINGSGHLF

SEQ ID NO: 32150 - protein, 9 aa, synthetic construct
GINGSGRLY

SEQ ID NO: 32151 - protein, 9 aa, synthetic construct
GINGSGRLR

SEQ ID NO: 32152 - protein, 9 aa, synthetic construct
GINGSGRLF

SEQ ID NO: 32153 - protein, 9 aa, synthetic construct
GINGSGRVF

SEQ ID NO: 32154 - protein, 9 aa, synthetic construct
PTNGVLRLF

SEQ ID NO: 32155 - protein, 9 aa, synthetic construct
GINGSGKLH

SEQ ID NO: 32156 - protein, 9 aa, synthetic construct
GINGSGKVY

SEQ ID NO: 32157 - protein, 9 aa, synthetic construct
GINGSGKVH

SEQ ID NO: 32158 - protein, 9 aa, synthetic construct
GINGVVHLY

SEQ ID NO: 32159 - protein, 9 aa, synthetic construct
GINGVVHLR

SEQ ID NO: 32160 - protein, 9 aa, synthetic construct
GINGVVHVR

SEQ ID NO: 32161 - protein, 9 aa, synthetic construct
GINGVVHVK

SEQ ID NO: 32162 - protein, 9 aa, synthetic construct
GINGVVHVF

SEQ ID NO: 32163 - protein, 9 aa, synthetic construct
GINGVVKLH

SEQ ID NO: 32164 - protein, 9 aa, synthetic construct
GINGVVKVH

SEQ ID NO: 32165 - protein, 9 aa, synthetic construct
PTNGVLRVK

SEQ ID NO: 32166 - protein, 9 aa, synthetic construct
GINGVLHLK

SEQ ID NO: 32167 - protein, 9 aa, synthetic construct
GINGVLHVH

SEQ ID NO: 32168 - protein, 9 aa, synthetic construct
PTNGVLRVF

SEQ ID NO: 32169 - protein, 9 aa, synthetic construct
GINGVLRLY

SEQ ID NO: 32170 - protein, 9 aa, synthetic construct
GINGVLKLY

SEQ ID NO: 32171 - protein, 9 aa, synthetic construct
GINGVAHLY

SEQ ID NO: 32172 - protein, 9 aa, synthetic construct
GINGVAHLR

SEQ ID NO: 32173 - protein, 9 aa, synthetic construct
GINGVAHLH

SEQ ID NO: 32174 - protein, 9 aa, synthetic construct
GINGVAHLF

SEQ ID NO: 32175 - protein, 9 aa, synthetic construct
GINGVAHVK

SEQ ID NO: 32176 - protein, 9 aa, synthetic construct
GINGVAHVF

SEQ ID NO: 32177 - protein, 9 aa, synthetic construct
GINGVARLH

SEQ ID NO: 32178 - protein, 9 aa, synthetic construct
GINGVARVY

SEQ ID NO: 32179 - protein, 9 aa, synthetic construct
GINGVARVR

SEQ ID NO: 32180 - protein, 9 aa, synthetic construct
GINGVAKLH

SEQ ID NO: 32181 - protein, 9 aa, synthetic construct
GINGVAKLF

SEQ ID NO: 32182 - protein, 9 aa, synthetic construct
GINGVAKVY

SEQ ID NO: 32183 - protein, 9 aa, synthetic construct
GINGVAKVH

SEQ ID NO: 32184 - protein, 9 aa, synthetic construct
PTNGVLKLF

SEQ ID NO: 32185 - protein, 9 aa, synthetic construct
GINGVIHLH

SEQ ID NO: 32186 - protein, 9 aa, synthetic construct
GINGVIHVY

SEQ ID NO: 32187 - protein, 9 aa, synthetic construct
GINGVIHVK

SEQ ID NO: 32188 - protein, 9 aa, synthetic construct
PTNGVLKVY

SEQ ID NO: 32189 - protein, 9 aa, synthetic construct
GINGVIRLY

SEQ ID NO: 32190 - protein, 9 aa, synthetic construct
GINGVIRVH

SEQ ID NO: 32191 - protein, 9 aa, synthetic construct
PTNGVLKVR

SEQ ID NO: 32192 - protein, 9 aa, synthetic construct
GINGVIKLH

SEQ ID NO: 32193 - protein, 9 aa, synthetic construct
GINGVIKVH

SEQ ID NO: 32194 - protein, 9 aa, synthetic construct
GINGVGHLR

SEQ ID NO: 32195 - protein, 9 aa, synthetic construct
GINGVGRLY

SEQ ID NO: 32196 - protein, 9 aa, synthetic construct
GINGVGRLF

SEQ ID NO: 32197 - protein, 9 aa, synthetic construct
GINGVGRVY

SEQ ID NO: 32198 - protein, 9 aa, synthetic construct
GINGVGRVH

SEQ ID NO: 32199 - protein, 9 aa, synthetic construct
GINGVGRVF

SEQ ID NO: 32200 - protein, 9 aa, synthetic construct
PTNGVLKVF

SEQ ID NO: 32201 - protein, 9 aa, synthetic construct
GINGVGKLF

SEQ ID NO: 32202 - protein, 9 aa, synthetic construct
GINGVGKVH

SEQ ID NO: 32203 - protein, 9 aa, synthetic construct
GINGVGKVF

SEQ ID NO: 32204 - protein, 9 aa, synthetic construct
PLNGVLKLR

SEQ ID NO: 32205 - protein, 9 aa, synthetic construct
GINGGVHLY

SEQ ID NO: 32206 - protein, 9 aa, synthetic construct
GINGGVHLR

SEQ ID NO: 32207 - protein, 9 aa, synthetic construct
GINGGVHLH

SEQ ID NO: 32208 - protein, 9 aa, synthetic construct
GINGGVHLK

SEQ ID NO: 32209 - protein, 9 aa, synthetic construct
GINGGVHLF

SEQ ID NO: 32210 - protein, 9 aa, synthetic construct
GINGGVHVY

SEQ ID NO: 32211 - protein, 9 aa, synthetic construct
GINGGVRLY

SEQ ID NO: 32212 - protein, 9 aa, synthetic construct
GINGGVRLH

SEQ ID NO: 32213 - protein, 9 aa, synthetic construct
GINGGVRLK

SEQ ID NO: 32214 - protein, 9 aa, synthetic construct
GINGGVRLF

SEQ ID NO: 32215 - protein, 9 aa, synthetic construct
GINGGVRVY

SEQ ID NO: 32216 - protein, 9 aa, synthetic construct
GINGGVKLH

SEQ ID NO: 32217 - protein, 9 aa, synthetic construct
GINGGVKVR

SEQ ID NO: 32218 - protein, 9 aa, synthetic construct
GINGGVKVH

SEQ ID NO: 32219 - protein, 9 aa, synthetic construct
GINGGVKVK

SEQ ID NO: 32220 - protein, 9 aa, synthetic construct
GINGGVKVF

SEQ ID NO: 32221 - protein, 9 aa, synthetic construct
GINGGLHLY

SEQ ID NO: 32222 - protein, 9 aa, synthetic construct
GINGGLHLR

SEQ ID NO: 32223 - protein, 9 aa, synthetic construct
GINGGLHLH

SEQ ID NO: 32224 - protein, 9 aa, synthetic construct
GINGGLHLK

SEQ ID NO: 32225 - protein, 9 aa, synthetic construct
GINGGLHLF

SEQ ID NO: 32226 - protein, 9 aa, synthetic construct
GINGGLHVY

SEQ ID NO: 32227 - protein, 9 aa, synthetic construct
GINGGLHVH

SEQ ID NO: 32228 - protein, 9 aa, synthetic construct
GINGGLHVK

SEQ ID NO: 32229 - protein, 9 aa, synthetic construct
GINGGLHVF

SEQ ID NO: 32230 - protein, 9 aa, synthetic construct
GINGGLRLF

SEQ ID NO: 32231 - protein, 9 aa, synthetic construct
GINGGLRVK

SEQ ID NO: 32232 - protein, 9 aa, synthetic construct
GINGGLKLH

SEQ ID NO: 32233 - protein, 9 aa, synthetic construct
GINGGLKLF

SEQ ID NO: 32234 - protein, 9 aa, synthetic construct
GINGGLKVY

SEQ ID NO: 32235 - protein, 9 aa, synthetic construct
GINGGLKVH

SEQ ID NO: 32236 - protein, 9 aa, synthetic construct
GINGGLKVF

SEQ ID NO: 32237 - protein, 9 aa, synthetic construct
GINGGAHLY

SEQ ID NO: 32238 - protein, 9 aa, synthetic construct
GINGGAHLR

SEQ ID NO: 32239 - protein, 9 aa, synthetic construct
GINGGAHLK

SEQ ID NO: 32240 - protein, 9 aa, synthetic construct
GINGGAHLF

SEQ ID NO: 32241 - protein, 9 aa, synthetic construct
GINGGAHVR

SEQ ID NO: 32242 - protein, 9 aa, synthetic construct
GINGGAHVH

SEQ ID NO: 32243 - protein, 9 aa, synthetic construct
GINGGAHVK

SEQ ID NO: 32244 - protein, 9 aa, synthetic construct
GINGGARLY

SEQ ID NO: 32245 - protein, 9 aa, synthetic construct
GINGGARLH

SEQ ID NO: 32246 - protein, 9 aa, synthetic construct
GINGGARVR

SEQ ID NO: 32247 - protein, 9 aa, synthetic construct
GINGGARVK

SEQ ID NO: 32248 - protein, 9 aa, synthetic construct
GINGGARVF

SEQ ID NO: 32249 - protein, 9 aa, synthetic construct
GINGGAKLY

SEQ ID NO: 32250 - protein, 9 aa, synthetic construct
GINGGAKLH

SEQ ID NO: 32251 - protein, 9 aa, synthetic construct
GINGGAKVY

SEQ ID NO: 32252 - protein, 9 aa, synthetic construct
GINGGAKVR

SEQ ID NO: 32253 - protein, 9 aa, synthetic construct
GINGGAKVF

SEQ ID NO: 32254 - protein, 9 aa, synthetic construct
GINGGIHLR

SEQ ID NO: 32255 - protein, 9 aa, synthetic construct
GINGGIHLH

SEQ ID NO: 32256 - protein, 9 aa, synthetic construct
GINGGIHLF

SEQ ID NO: 32257 - protein, 9 aa, synthetic construct
GINGGIHVY

SEQ ID NO: 32258 - protein, 9 aa, synthetic construct
GINGGIHVR

SEQ ID NO: 32259 - protein, 9 aa, synthetic construct
GINGGIHVH

SEQ ID NO: 32260 - protein, 9 aa, synthetic construct
PTNGVARLY

SEQ ID NO: 32261 - protein, 9 aa, synthetic construct
GINGGIRLF

SEQ ID NO: 32262 - protein, 9 aa, synthetic construct
GINGGIRVY

SEQ ID NO: 32263 - protein, 9 aa, synthetic construct
PTNGVARLR

SEQ ID NO: 32264 - protein, 9 aa, synthetic construct
GINGGIKLR

SEQ ID NO: 32265 - protein, 9 aa, synthetic construct
GINGGIKVY

SEQ ID NO: 32266 - protein, 9 aa, synthetic construct
GINGGIKVH

SEQ ID NO: 32267 - protein, 9 aa, synthetic construct
GINGGIKVK

SEQ ID NO: 32268 - protein, 9 aa, synthetic construct
PTNGVARLH

SEQ ID NO: 32269 - protein, 9 aa, synthetic construct
GINGGGHLY

SEQ ID NO: 32270 - protein, 9 aa, synthetic construct
GINGGGHLR

SEQ ID NO: 32271 - protein, 9 aa, synthetic construct
GINGGGHLK

SEQ ID NO: 32272 - protein, 9 aa, synthetic construct
GINGGGHLF

SEQ ID NO: 32273 - protein, 9 aa, synthetic construct
GINGGGHVR

SEQ ID NO: 32274 - protein, 9 aa, synthetic construct
GINGGGHVK

SEQ ID NO: 32275 - protein, 9 aa, synthetic construct
GINGGGRLF

SEQ ID NO: 32276 - protein, 9 aa, synthetic construct
GINGGGRVY

SEQ ID NO: 32277 - protein, 9 aa, synthetic construct
GINGGGRVR

SEQ ID NO: 32278 - protein, 9 aa, synthetic construct
GINGGGRVK

SEQ ID NO: 32279 - protein, 9 aa, synthetic construct
PTNGVARLF

SEQ ID NO: 32280 - protein, 9 aa, synthetic construct
GINGGGKLY

SEQ ID NO: 32281 - protein, 9 aa, synthetic construct
GINGGGKVY

SEQ ID NO: 32282 - protein, 9 aa, synthetic construct
GINGGGKVK

SEQ ID NO: 32283 - protein, 9 aa, synthetic construct
GINGGGKVF

SEQ ID NO: 32284 - protein, 9 aa, synthetic construct
PTNGVARVY

SEQ ID NO: 32285 - protein, 9 aa, synthetic construct
GINAAVHLY

SEQ ID NO: 32286 - protein, 9 aa, synthetic construct
GINAAVHLR

SEQ ID NO: 32287 - protein, 9 aa, synthetic construct
GINAAVHVY

SEQ ID NO: 32288 - protein, 9 aa, synthetic construct
GINAAVHVK

SEQ ID NO: 32289 - protein, 9 aa, synthetic construct
GINAAVHVF

SEQ ID NO: 32290 - protein, 9 aa, synthetic construct
PTNGVARVR

SEQ ID NO: 32291 - protein, 9 aa, synthetic construct
GINAAVRLH

SEQ ID NO: 32292 - protein, 9 aa, synthetic construct
GINAAVRLF

SEQ ID NO: 32293 - protein, 9 aa, synthetic construct
GINAAVRVY

SEQ ID NO: 32294 - protein, 9 aa, synthetic construct
PTNGVARVH

SEQ ID NO: 32295 - protein, 9 aa, synthetic construct
GINAAVKLY

SEQ ID NO: 32296 - protein, 9 aa, synthetic construct
GINAAVKLR

SEQ ID NO: 32297 - protein, 9 aa, synthetic construct
GINAAVKLK

SEQ ID NO: 32298 - protein, 9 aa, synthetic construct
GINAAVKLF

SEQ ID NO: 32299 - protein, 9 aa, synthetic construct
GINAAVKVK

SEQ ID NO: 32300 - protein, 9 aa, synthetic construct
GINAAVKVF

SEQ ID NO: 32301 - protein, 9 aa, synthetic construct
PTNGVARVK

SEQ ID NO: 32302 - protein, 9 aa, synthetic construct
GINAALHLY

SEQ ID NO: 32303 - protein, 9 aa, synthetic construct
GINAALHLH

SEQ ID NO: 32304 - protein, 9 aa, synthetic construct
GINAALHLK

SEQ ID NO: 32305 - protein, 9 aa, synthetic construct
GINAALHVY

SEQ ID NO: 32306 - protein, 9 aa, synthetic construct
GINAALHVK

SEQ ID NO: 32307 - protein, 9 aa, synthetic construct
GINAALHVF

SEQ ID NO: 32308 - protein, 9 aa, synthetic construct
GINAALRLH

SEQ ID NO: 32309 - protein, 9 aa, synthetic construct
GINAALRVR

SEQ ID NO: 32310 - protein, 9 aa, synthetic construct
GINAALRVH

SEQ ID NO: 32311 - protein, 9 aa, synthetic construct
GINAALRVK

SEQ ID NO: 32312 - protein, 9 aa, synthetic construct
GINAALKVY

SEQ ID NO: 32313 - protein, 9 aa, synthetic construct
GINAALKVH

SEQ ID NO: 32314 - protein, 9 aa, synthetic construct
GINAALKVF

SEQ ID NO: 32315 - protein, 9 aa, synthetic construct
PTNGVAKLR

SEQ ID NO: 32316 - protein, 9 aa, synthetic construct
GINAAAHLY

SEQ ID NO: 32317 - protein, 9 aa, synthetic construct
GINAAAHLR

SEQ ID NO: 32318 - protein, 9 aa, synthetic construct
GINAAAHLK

SEQ ID NO: 32319 - protein, 9 aa, synthetic construct
GINAAAHLF

SEQ ID NO: 32320 - protein, 9 aa, synthetic construct
GINAAAHVY

SEQ ID NO: 32321 - protein, 9 aa, synthetic construct
GINAAAHVR

SEQ ID NO: 32322 - protein, 9 aa, synthetic construct
GINAAAHVH

SEQ ID NO: 32323 - protein, 9 aa, synthetic construct
GINAAAHVF

SEQ ID NO: 32324 - protein, 9 aa, synthetic construct
GINAAARLY

SEQ ID NO: 32325 - protein, 9 aa, synthetic construct
GINAAARLF

SEQ ID NO: 32326 - protein, 9 aa, synthetic construct
GINAAARVY

SEQ ID NO: 32327 - protein, 9 aa, synthetic construct
GINAAARVR

SEQ ID NO: 32328 - protein, 9 aa, synthetic construct
PTNGVAKLK

SEQ ID NO: 32329 - protein, 9 aa, synthetic construct
GINAAAKLF

SEQ ID NO: 32330 - protein, 9 aa, synthetic construct
PTNGVAKLF

SEQ ID NO: 32331 - protein, 9 aa, synthetic construct
GINAAIHLY

SEQ ID NO: 32332 - protein, 9 aa, synthetic construct
GINAAIHLR

SEQ ID NO: 32333 - protein, 9 aa, synthetic construct
GINAAIHLH

SEQ ID NO: 32334 - protein, 9 aa, synthetic construct
GINAAIHLK

SEQ ID NO: 32335 - protein, 9 aa, synthetic construct
GINAAIHVY

SEQ ID NO: 32336 - protein, 9 aa, synthetic construct
GINAAIHVR

SEQ ID NO: 32337 - protein, 9 aa, synthetic construct
GINAAIHVF

SEQ ID NO: 32338 - protein, 9 aa, synthetic construct
GINAAIRLY

SEQ ID NO: 32339 - protein, 9 aa, synthetic construct
GINAAIRLH

SEQ ID NO: 32340 - protein, 9 aa, synthetic construct
GINAAIRLF

SEQ ID NO: 32341 - protein, 9 aa, synthetic construct
GINAAIRVR

SEQ ID NO: 32342 - protein, 9 aa, synthetic construct
GINAAIRVF

SEQ ID NO: 32343 - protein, 9 aa, synthetic construct
GINAAIKLY

SEQ ID NO: 32344 - protein, 9 aa, synthetic construct
GINAAIKLH

SEQ ID NO: 32345 - protein, 9 aa, synthetic construct
GINAAIKLK

SEQ ID NO: 32346 - protein, 9 aa, synthetic construct
GINAAIKLF

SEQ ID NO: 32347 - protein, 9 aa, synthetic construct
GINAAIKVY

SEQ ID NO: 32348 - protein, 9 aa, synthetic construct
GINAAIKVR

SEQ ID NO: 32349 - protein, 9 aa, synthetic construct
GINAAIKVK

SEQ ID NO: 32350 - protein, 9 aa, synthetic construct
GINAAGHLY

SEQ ID NO: 32351 - protein, 9 aa, synthetic construct
GINAAGHLR

SEQ ID NO: 32352 - protein, 9 aa, synthetic construct
GINAAGHLF

SEQ ID NO: 32353 - protein, 9 aa, synthetic construct
GINAAGHVR

SEQ ID NO: 32354 - protein, 9 aa, synthetic construct
GINAAGHVK

SEQ ID NO: 32355 - protein, 9 aa, synthetic construct
PTNGVAKVK

SEQ ID NO: 32356 - protein, 9 aa, synthetic construct
GINAAGRLF

SEQ ID NO: 32357 - protein, 9 aa, synthetic construct
GINAAGRVR

SEQ ID NO: 32358 - protein, 9 aa, synthetic construct
GINAAGRVH

SEQ ID NO: 32359 - protein, 9 aa, synthetic construct
GINAAGRVK

SEQ ID NO: 32360 - protein, 9 aa, synthetic construct
GINAAGRVF

SEQ ID NO: 32361 - protein, 9 aa, synthetic construct
PTNGVAKVF

SEQ ID NO: 32362 - protein, 9 aa, synthetic construct
GINAAGKLF

SEQ ID NO: 32363 - protein, 9 aa, synthetic construct
GINAAGKVY

SEQ ID NO: 32364 - protein, 9 aa, synthetic construct
GINAAGKVH

SEQ ID NO: 32365 - protein, 9 aa, synthetic construct
PLNGVLKLF

SEQ ID NO: 32366 - protein, 9 aa, synthetic construct
PTNGVIHLY

SEQ ID NO: 32367 - protein, 9 aa, synthetic construct
GINATVHVR

SEQ ID NO: 32368 - protein, 9 aa, synthetic construct
PTNGVIHLR

SEQ ID NO: 32369 - protein, 9 aa, synthetic construct
PTNGVIHLH

SEQ ID NO: 32370 - protein, 9 aa, synthetic construct
GINATVKLR

SEQ ID NO: 32371 - protein, 9 aa, synthetic construct
GINATVKLH

SEQ ID NO: 32372 - protein, 9 aa, synthetic construct
GINATVKLF

SEQ ID NO: 32373 - protein, 9 aa, synthetic construct
GINATVKVF

SEQ ID NO: 32374 - protein, 9 aa, synthetic construct
GINATLHLY

SEQ ID NO: 32375 - protein, 9 aa, synthetic construct
GINATLHLH

SEQ ID NO: 32376 - protein, 9 aa, synthetic construct
GINATLHLF

SEQ ID NO: 32377 - protein, 9 aa, synthetic construct
GINATLHVK

SEQ ID NO: 32378 - protein, 9 aa, synthetic construct
PTNGVIHLF

SEQ ID NO: 32379 - protein, 9 aa, synthetic construct
GINATLKLF

SEQ ID NO: 32380 - protein, 9 aa, synthetic construct
PTNGVIHVR

SEQ ID NO: 32381 - protein, 9 aa, synthetic construct
GINATAHLF

SEQ ID NO: 32382 - protein, 9 aa, synthetic construct
GINATAHVF

SEQ ID NO: 32383 - protein, 9 aa, synthetic construct
GINATARLF

SEQ ID NO: 32384 - protein, 9 aa, synthetic construct
GINATARVY

SEQ ID NO: 32385 - protein, 9 aa, synthetic construct
GINATARVK

SEQ ID NO: 32386 - protein, 9 aa, synthetic construct
GINATAKLF

SEQ ID NO: 32387 - protein, 9 aa, synthetic construct
GINATAKVH

SEQ ID NO: 32388 - protein, 9 aa, synthetic construct
GINATIHLY

SEQ ID NO: 32389 - protein, 9 aa, synthetic construct
GINATIHLR

SEQ ID NO: 32390 - protein, 9 aa, synthetic construct
GINATIHVY

SEQ ID NO: 32391 - protein, 9 aa, synthetic construct
GINATIHVR

SEQ ID NO: 32392 - protein, 9 aa, synthetic construct
GINATIHVF

SEQ ID NO: 32393 - protein, 9 aa, synthetic construct
GINATIRLY

SEQ ID NO: 32394 - protein, 9 aa, synthetic construct
GINATIRLF

SEQ ID NO: 32395 - protein, 9 aa, synthetic construct
GINATIRVF

SEQ ID NO: 32396 - protein, 9 aa, synthetic construct
PTNGVIRLR

SEQ ID NO: 32397 - protein, 9 aa, synthetic construct
GINATIKLK

SEQ ID NO: 32398 - protein, 9 aa, synthetic construct
GINATIKVR

SEQ ID NO: 32399 - protein, 9 aa, synthetic construct
GINATGHLR

SEQ ID NO: 32400 - protein, 9 aa, synthetic construct
GINATGHLK

SEQ ID NO: 32401 - protein, 9 aa, synthetic construct
GINATGHVK

SEQ ID NO: 32402 - protein, 9 aa, synthetic construct
GINATGRLY

SEQ ID NO: 32403 - protein, 9 aa, synthetic construct
GINATGRLR

SEQ ID NO: 32404 - protein, 9 aa, synthetic construct
GINATGRLH

SEQ ID NO: 32405 - protein, 9 aa, synthetic construct
GINATGRLF

SEQ ID NO: 32406 - protein, 9 aa, synthetic construct
GINATGRVY

SEQ ID NO: 32407 - protein, 9 aa, synthetic construct
GINATGRVH

SEQ ID NO: 32408 - protein, 9 aa, synthetic construct
PTNGVIRLF

SEQ ID NO: 32409 - protein, 9 aa, synthetic construct
GINATGKLY

SEQ ID NO: 32410 - protein, 9 aa, synthetic construct
GINATGKLH

SEQ ID NO: 32411 - protein, 9 aa, synthetic construct
GINATGKLF

SEQ ID NO: 32412 - protein, 9 aa, synthetic construct
PTNGVIRVY

SEQ ID NO: 32413 - protein, 9 aa, synthetic construct
GINASVHLR

SEQ ID NO: 32414 - protein, 9 aa, synthetic construct
GINASVRLK

SEQ ID NO: 32415 - protein, 9 aa, synthetic construct
PTNGVIRVH

SEQ ID NO: 32416 - protein, 9 aa, synthetic construct
GINASVKLR

SEQ ID NO: 32417 - protein, 9 aa, synthetic construct
GINASVKLK

SEQ ID NO: 32418 - protein, 9 aa, synthetic construct
GINASVKVR

SEQ ID NO: 32419 - protein, 9 aa, synthetic construct
GINASLHLH

SEQ ID NO: 32420 - protein, 9 aa, synthetic construct
GINASLHLK

SEQ ID NO: 32421 - protein, 9 aa, synthetic construct
GINASLHVY

SEQ ID NO: 32422 - protein, 9 aa, synthetic construct
GINASLHVR

SEQ ID NO: 32423 - protein, 9 aa, synthetic construct
GINASLHVF

SEQ ID NO: 32424 - protein, 9 aa, synthetic construct
GINASLRLH

SEQ ID NO: 32425 - protein, 9 aa, synthetic construct
GINASLRVF

SEQ ID NO: 32426 - protein, 9 aa, synthetic construct
PLNGVLKVR

SEQ ID NO: 32427 - protein, 9 aa, synthetic construct
GINASLKLH

SEQ ID NO: 32428 - protein, 9 aa, synthetic construct
GINASLKVY

SEQ ID NO: 32429 - protein, 9 aa, synthetic construct
GINASLKVH

SEQ ID NO: 32430 - protein, 9 aa, synthetic construct
PTNGVIKLK

SEQ ID NO: 32431 - protein, 9 aa, synthetic construct
GINASAKLR

SEQ ID NO: 32432 - protein, 9 aa, synthetic construct
GINASAKVY

SEQ ID NO: 32433 - protein, 9 aa, synthetic construct
GINASAKVH

SEQ ID NO: 32434 - protein, 9 aa, synthetic construct
GINASIHLY

SEQ ID NO: 32435 - protein, 9 aa, synthetic construct
GINASIHLH

SEQ ID NO: 32436 - protein, 9 aa, synthetic construct
GINASIHVY

SEQ ID NO: 32437 - protein, 9 aa, synthetic construct
GINASIHVR

SEQ ID NO: 32438 - protein, 9 aa, synthetic construct
GINASIHVH

SEQ ID NO: 32439 - protein, 9 aa, synthetic construct
GINASIRLK

SEQ ID NO: 32440 - protein, 9 aa, synthetic construct
GINASIKLY

SEQ ID NO: 32441 - protein, 9 aa, synthetic construct
GINASIKLK

SEQ ID NO: 32442 - protein, 9 aa, synthetic construct
GINASIKVH

SEQ ID NO: 32443 - protein, 9 aa, synthetic construct
GINASGRLY

SEQ ID NO: 32444 - protein, 9 aa, synthetic construct
GINASGKLY

SEQ ID NO: 32445 - protein, 9 aa, synthetic construct
GINASGKLF

SEQ ID NO: 32446 - protein, 9 aa, synthetic construct
GINASGKVH

SEQ ID NO: 32447 - protein, 9 aa, synthetic construct
GINASGKVF

SEQ ID NO: 32448 - protein, 9 aa, synthetic construct
GINAVVHLY

SEQ ID NO: 32449 - protein, 9 aa, synthetic construct
GINAVVHLH

SEQ ID NO: 32450 - protein, 9 aa, synthetic construct
GINAVVHLK

SEQ ID NO: 32451 - protein, 9 aa, synthetic construct
GINAVVHVY

SEQ ID NO: 32452 - protein, 9 aa, synthetic construct
GINAVVHVR

SEQ ID NO: 32453 - protein, 9 aa, synthetic construct
GINAVVHVK

SEQ ID NO: 32454 - protein, 9 aa, synthetic construct
PTNGVGHLR

SEQ ID NO: 32455 - protein, 9 aa, synthetic construct
GINAVVRLY

SEQ ID NO: 32456 - protein, 9 aa, synthetic construct
GINAVVRLH

SEQ ID NO: 32457 - protein, 9 aa, synthetic construct
GINAVVRLF

SEQ ID NO: 32458 - protein, 9 aa, synthetic construct
GINAVVRVF

SEQ ID NO: 32459 - protein, 9 aa, synthetic construct
GINAVVKLY

SEQ ID NO: 32460 - protein, 9 aa, synthetic construct
GINAVVKLR

SEQ ID NO: 32461 - protein, 9 aa, synthetic construct
GINAVVKLH

SEQ ID NO: 32462 - protein, 9 aa, synthetic construct
GINAVVKLF

SEQ ID NO: 32463 - protein, 9 aa, synthetic construct
GINAVVKVY

SEQ ID NO: 32464 - protein, 9 aa, synthetic construct
GINAVVKVH

SEQ ID NO: 32465 - protein, 9 aa, synthetic construct
GINAVVKVK

SEQ ID NO: 32466 - protein, 9 aa, synthetic construct
GINAVLHVF

SEQ ID NO: 32467 - protein, 9 aa, synthetic construct
PTNGVGHLF

SEQ ID NO: 32468 - protein, 9 aa, synthetic construct
GINAVLRLH

SEQ ID NO: 32469 - protein, 9 aa, synthetic construct
GINAVLRLF

SEQ ID NO: 32470 - protein, 9 aa, synthetic construct
GINAVLRVH

SEQ ID NO: 32471 - protein, 9 aa, synthetic construct
GINAVLKLY

SEQ ID NO: 32472 - protein, 9 aa, synthetic construct
GINAVLKVY

SEQ ID NO: 32473 - protein, 9 aa, synthetic construct
GINAVLKVF

SEQ ID NO: 32474 - protein, 9 aa, synthetic construct
GINAVAHVR

SEQ ID NO: 32475 - protein, 9 aa, synthetic construct
GINAVAHVH

SEQ ID NO: 32476 - protein, 9 aa, synthetic construct
GINAVAHVK

SEQ ID NO: 32477 - protein, 9 aa, synthetic construct
PTNGVGHVK

SEQ ID NO: 32478 - protein, 9 aa, synthetic construct
GINAVAKLH

SEQ ID NO: 32479 - protein, 9 aa, synthetic construct
GINAVAKLK

SEQ ID NO: 32480 - protein, 9 aa, synthetic construct
GINAVAKVR

SEQ ID NO: 32481 - protein, 9 aa, synthetic construct
GINAVAKVH

SEQ ID NO: 32482 - protein, 9 aa, synthetic construct
PTNGVGHVF

SEQ ID NO: 32483 - protein, 9 aa, synthetic construct
GINAVIHLR

SEQ ID NO: 32484 - protein, 9 aa, synthetic construct
GINAVIHLH

SEQ ID NO: 32485 - protein, 9 aa, synthetic construct
GINAVIHLK

SEQ ID NO: 32486 - protein, 9 aa, synthetic construct
GINAVIHLF

SEQ ID NO: 32487 - protein, 9 aa, synthetic construct
GINAVIHVY

SEQ ID NO: 32488 - protein, 9 aa, synthetic construct
GINAVIHVR

SEQ ID NO: 32489 - protein, 9 aa, synthetic construct
GINAVIHVH

SEQ ID NO: 32490 - protein, 9 aa, synthetic construct
GINAVIHVF

SEQ ID NO: 32491 - protein, 9 aa, synthetic construct
PLNGVLKVK

SEQ ID NO: 32492 - protein, 9 aa, synthetic construct
GINAVIRLR

SEQ ID NO: 32493 - protein, 9 aa, synthetic construct
GINAVIRVR

SEQ ID NO: 32494 - protein, 9 aa, synthetic construct
GINAVIRVH

SEQ ID NO: 32495 - protein, 9 aa, synthetic construct
GINAVIKVR

SEQ ID NO: 32496 - protein, 9 aa, synthetic construct
GINAVIKVH

SEQ ID NO: 32497 - protein, 9 aa, synthetic construct
GINAVIKVK

SEQ ID NO: 32498 - protein, 9 aa, synthetic construct
GINAVGHLR

SEQ ID NO: 32499 - protein, 9 aa, synthetic construct
GINAVGHLH

SEQ ID NO: 32500 - protein, 9 aa, synthetic construct
GINAVGHVY

SEQ ID NO: 32501 - protein, 9 aa, synthetic construct
GINAVGHVR

SEQ ID NO: 32502 - protein, 9 aa, synthetic construct
GINAVGHVH

SEQ ID NO: 32503 - protein, 9 aa, synthetic construct
GINAVGHVK

SEQ ID NO: 32504 - protein, 9 aa, synthetic construct
GINAVGHVF

SEQ ID NO: 32505 - protein, 9 aa, synthetic construct
GINAVGRLF

SEQ ID NO: 32506 - protein, 9 aa, synthetic construct
GINAVGRVR

SEQ ID NO: 32507 - protein, 9 aa, synthetic construct
GINAVGRVF

SEQ ID NO: 32508 - protein, 9 aa, synthetic construct
PTNGVGRLF

SEQ ID NO: 32509 - protein, 9 aa, synthetic construct
GINAVGKLY

SEQ ID NO: 32510 - protein, 9 aa, synthetic construct
GINAVGKLF

SEQ ID NO: 32511 - protein, 9 aa, synthetic construct
GINAVGKVY

SEQ ID NO: 32512 - protein, 9 aa, synthetic construct
GINAVGKVH

SEQ ID NO: 32513 - protein, 9 aa, synthetic construct
GINAVGKVF

SEQ ID NO: 32514 - protein, 9 aa, synthetic construct
GINAGVHLY

SEQ ID NO: 32515 - protein, 9 aa, synthetic construct
GINAGVHLR

SEQ ID NO: 32516 - protein, 9 aa, synthetic construct
GINAGVHLF

SEQ ID NO: 32517 - protein, 9 aa, synthetic construct
GINAGVHVY

SEQ ID NO: 32518 - protein, 9 aa, synthetic construct
PTNGVGRVR

SEQ ID NO: 32519 - protein, 9 aa, synthetic construct
GINAGVRLY

SEQ ID NO: 32520 - protein, 9 aa, synthetic construct
GINAGVRVY

SEQ ID NO: 32521 - protein, 9 aa, synthetic construct
GINAGVRVK

SEQ ID NO: 32522 - protein, 9 aa, synthetic construct
GINAGVRVF

SEQ ID NO: 32523 - protein, 9 aa, synthetic construct
PTNGVGRVH

SEQ ID NO: 32524 - protein, 9 aa, synthetic construct
GINAGVKLH

SEQ ID NO: 32525 - protein, 9 aa, synthetic construct
GINAGVKLK

SEQ ID NO: 32526 - protein, 9 aa, synthetic construct
GINAGVKVH

SEQ ID NO: 32527 - protein, 9 aa, synthetic construct
PTNGVGRVF

SEQ ID NO: 32528 - protein, 9 aa, synthetic construct
PLNGVLKVF

SEQ ID NO: 32529 - protein, 9 aa, synthetic construct
GINAGLKVY

SEQ ID NO: 32530 - protein, 9 aa, synthetic construct
PTNGVGKLR

SEQ ID NO: 32531 - protein, 9 aa, synthetic construct
GINAGAHVK

SEQ ID NO: 32532 - protein, 9 aa, synthetic construct
GINAGARLY

SEQ ID NO: 32533 - protein, 9 aa, synthetic construct
GINAGARLF

SEQ ID NO: 32534 - protein, 9 aa, synthetic construct
GINAGARVY

SEQ ID NO: 32535 - protein, 9 aa, synthetic construct
GINAGARVH

SEQ ID NO: 32536 - protein, 9 aa, synthetic construct
GINAGARVK

SEQ ID NO: 32537 - protein, 9 aa, synthetic construct
GINAGAKLR

SEQ ID NO: 32538 - protein, 9 aa, synthetic construct
GINAGAKVY

SEQ ID NO: 32539 - protein, 9 aa, synthetic construct
GINAGIHLY

SEQ ID NO: 32540 - protein, 9 aa, synthetic construct
GINAGIHLR

SEQ ID NO: 32541 - protein, 9 aa, synthetic construct
GINAGIHLH

SEQ ID NO: 32542 - protein, 9 aa, synthetic construct
GINAGIHLK

SEQ ID NO: 32543 - protein, 9 aa, synthetic construct
GINAGIHVR

SEQ ID NO: 32544 - protein, 9 aa, synthetic construct
PTNGVGKVR

SEQ ID NO: 32545 - protein, 9 aa, synthetic construct
GINAGIKLY

SEQ ID NO: 32546 - protein, 9 aa, synthetic construct
GINAGIKLF

SEQ ID NO: 32547 - protein, 9 aa, synthetic construct
GINAGIKVY

SEQ ID NO: 32548 - protein, 9 aa, synthetic construct
GINAGIKVF

SEQ ID NO: 32549 - protein, 9 aa, synthetic construct
PTNGVGKVH

SEQ ID NO: 32550 - protein, 9 aa, synthetic construct
GINAGGRLH

SEQ ID NO: 32551 - protein, 9 aa, synthetic construct
GINAGGRLF

SEQ ID NO: 32552 - protein, 9 aa, synthetic construct
GINAGGRVY

SEQ ID NO: 32553 - protein, 9 aa, synthetic construct
GINAGGRVR

SEQ ID NO: 32554 - protein, 9 aa, synthetic construct
GINAGGKVY

SEQ ID NO: 32555 - protein, 9 aa, synthetic construct
GINAGGKVK

SEQ ID NO: 32556 - protein, 9 aa, synthetic construct
GINAGGKVF

SEQ ID NO: 32557 - protein, 9 aa, synthetic construct
PLNGALKLR

SEQ ID NO: 32558 - protein, 9 aa, synthetic construct
GIQGAVHLY

SEQ ID NO: 32559 - protein, 9 aa, synthetic construct
GIQGAVHLH

SEQ ID NO: 32560 - protein, 9 aa, synthetic construct
GIQGAVHVR

SEQ ID NO: 32561 - protein, 9 aa, synthetic construct
GIQGAVHVF

SEQ ID NO: 32562 - protein, 9 aa, synthetic construct
GIQGAVRLH

SEQ ID NO: 32563 - protein, 9 aa, synthetic construct
GIQGAVRVF

SEQ ID NO: 32564 - protein, 9 aa, synthetic construct
PTNGGVHLH

SEQ ID NO: 32565 - protein, 9 aa, synthetic construct
GIQGAVKLY

SEQ ID NO: 32566 - protein, 9 aa, synthetic construct
GIQGAVKLF

SEQ ID NO: 32567 - protein, 9 aa, synthetic construct
GIQGAVKVY

SEQ ID NO: 32568 - protein, 9 aa, synthetic construct
GIQGAVKVF

SEQ ID NO: 32569 - protein, 9 aa, synthetic construct
GIQGALHLY

SEQ ID NO: 32570 - protein, 9 aa, synthetic construct
GIQGALHLK

SEQ ID NO: 32571 - protein, 9 aa, synthetic construct
GIQGALHVK

SEQ ID NO: 32572 - protein, 9 aa, synthetic construct
GIQGALHVF

SEQ ID NO: 32573 - protein, 9 aa, synthetic construct
GIQGALRLY

SEQ ID NO: 32574 - protein, 9 aa, synthetic construct
GIQGALRLH

SEQ ID NO: 32575 - protein, 9 aa, synthetic construct
GIQGALRVK

SEQ ID NO: 32576 - protein, 9 aa, synthetic construct
GIQGALRVF

SEQ ID NO: 32577 - protein, 9 aa, synthetic construct
GIQGALKLH

SEQ ID NO: 32578 - protein, 9 aa, synthetic construct
GIQGALKVH

SEQ ID NO: 32579 - protein, 9 aa, synthetic construct
GIQGAAHLR

SEQ ID NO: 32580 - protein, 9 aa, synthetic construct
GIQGAAHLH

SEQ ID NO: 32581 - protein, 9 aa, synthetic construct
GIQGAAHLK

SEQ ID NO: 32582 - protein, 9 aa, synthetic construct
GIQGAAHLF

SEQ ID NO: 32583 - protein, 9 aa, synthetic construct
GIQGAAHVY

SEQ ID NO: 32584 - protein, 9 aa, synthetic construct
GIQGAAHVR

SEQ ID NO: 32585 - protein, 9 aa, synthetic construct
GIQGAARLF

SEQ ID NO: 32586 - protein, 9 aa, synthetic construct
GIQGAARVY

SEQ ID NO: 32587 - protein, 9 aa, synthetic construct
GIQGAAKVY

SEQ ID NO: 32588 - protein, 9 aa, synthetic construct
GIQGAAKVH

SEQ ID NO: 32589 - protein, 9 aa, synthetic construct
GIQGAAKVF

SEQ ID NO: 32590 - protein, 9 aa, synthetic construct
GIQGAIHLY

SEQ ID NO: 32591 - protein, 9 aa, synthetic construct
GIQGAIHLR

SEQ ID NO: 32592 - protein, 9 aa, synthetic construct
GIQGAIHLH

SEQ ID NO: 32593 - protein, 9 aa, synthetic construct
GIQGAIHVY

SEQ ID NO: 32594 - protein, 9 aa, synthetic construct
GIQGAIHVH

SEQ ID NO: 32595 - protein, 9 aa, synthetic construct
GIQGAIRVR

SEQ ID NO: 32596 - protein, 9 aa, synthetic construct
GIQGAIKLY

SEQ ID NO: 32597 - protein, 9 aa, synthetic construct
GIQGAIKVY

SEQ ID NO: 32598 - protein, 9 aa, synthetic construct
GIQGAIKVK

SEQ ID NO: 32599 - protein, 9 aa, synthetic construct
GIQGAIKVF

SEQ ID NO: 32600 - protein, 9 aa, synthetic construct
PTNGGVRLH

SEQ ID NO: 32601 - protein, 9 aa, synthetic construct
GIQGAGHLR

SEQ ID NO: 32602 - protein, 9 aa, synthetic construct
GIQGAGHLH

SEQ ID NO: 32603 - protein, 9 aa, synthetic construct
GIQGAGHLK

SEQ ID NO: 32604 - protein, 9 aa, synthetic construct
GIQGAGHLF

SEQ ID NO: 32605 - protein, 9 aa, synthetic construct
GIQGAGHVY

SEQ ID NO: 32606 - protein, 9 aa, synthetic construct
GIQGAGHVH

SEQ ID NO: 32607 - protein, 9 aa, synthetic construct
GIQGAGHVK

SEQ ID NO: 32608 - protein, 9 aa, synthetic construct
GIQGAGHVF

SEQ ID NO: 32609 - protein, 9 aa, synthetic construct
PTNGGVRLK

SEQ ID NO: 32610 - protein, 9 aa, synthetic construct
GIQGAGRLY

SEQ ID NO: 32611 - protein, 9 aa, synthetic construct
GIQGAGRLH

SEQ ID NO: 32612 - protein, 9 aa, synthetic construct
GIQGAGRLF

SEQ ID NO: 32613 - protein, 9 aa, synthetic construct
GIQGAGRVY

SEQ ID NO: 32614 - protein, 9 aa, synthetic construct
GIQGAGRVH

SEQ ID NO: 32615 - protein, 9 aa, synthetic construct
GIQGAGRVK

SEQ ID NO: 32616 - protein, 9 aa, synthetic construct
GIQGAGKLY

SEQ ID NO: 32617 - protein, 9 aa, synthetic construct
GIQGAGKLH

SEQ ID NO: 32618 - protein, 9 aa, synthetic construct
GIQGAGKVY

SEQ ID NO: 32619 - protein, 9 aa, synthetic construct
GIQGAGKVH

SEQ ID NO: 32620 - protein, 9 aa, synthetic construct
GIQGAGKVF

SEQ ID NO: 32621 - protein, 9 aa, synthetic construct
PTNGGVRVY

SEQ ID NO: 32622 - protein, 9 aa, synthetic construct
GIQGTVHLK

SEQ ID NO: 32623 - protein, 9 aa, synthetic construct
GIQGTVHVR

SEQ ID NO: 32624 - protein, 9 aa, synthetic construct
GIQGTVHVK

SEQ ID NO: 32625 - protein, 9 aa, synthetic construct
GIQGTVHVF

SEQ ID NO: 32626 - protein, 9 aa, synthetic construct
GIQGTVRLY

SEQ ID NO: 32627 - protein, 9 aa, synthetic construct
GIQGTVRLH

SEQ ID NO: 32628 - protein, 9 aa, synthetic construct
GIQGTVRVF

SEQ ID NO: 32629 - protein, 9 aa, synthetic construct
GIQGTVKVF

SEQ ID NO: 32630 - protein, 9 aa, synthetic construct
PTNGGVRVK

SEQ ID NO: 32631 - protein, 9 aa, synthetic construct
GIQGTLHLK

SEQ ID NO: 32632 - protein, 9 aa, synthetic construct
GIQGTLHVR

SEQ ID NO: 32633 - protein, 9 aa, synthetic construct
GIQGTLRLY

SEQ ID NO: 32634 - protein, 9 aa, synthetic construct
GIQGTLRLH

SEQ ID NO: 32635 - protein, 9 aa, synthetic construct
GIQGTLRLK

SEQ ID NO: 32636 - protein, 9 aa, synthetic construct
GIQGTLRLF

SEQ ID NO: 32637 - protein, 9 aa, synthetic construct
GIQGTLRVY

SEQ ID NO: 32638 - protein, 9 aa, synthetic construct
GIQGTLRVK

SEQ ID NO: 32639 - protein, 9 aa, synthetic construct
GIQGTLKLY

SEQ ID NO: 32640 - protein, 9 aa, synthetic construct
GIQGTLKLR

SEQ ID NO: 32641 - protein, 9 aa, synthetic construct
GIQGTLKLH

SEQ ID NO: 32642 - protein, 9 aa, synthetic construct
GIQGTLKVY

SEQ ID NO: 32643 - protein, 9 aa, synthetic construct
GIQGTLKVH

SEQ ID NO: 32644 - protein, 9 aa, synthetic construct
GIQGTLKVF

SEQ ID NO: 32645 - protein, 9 aa, synthetic construct
PTNGGVKLR

SEQ ID NO: 32646 - protein, 9 aa, synthetic construct
GIQGTARLY

SEQ ID NO: 32647 - protein, 9 aa, synthetic construct
GIQGTARLH

SEQ ID NO: 32648 - protein, 9 aa, synthetic construct
GIQGTARLF

SEQ ID NO: 32649 - protein, 9 aa, synthetic construct
GIQGTAKLY

SEQ ID NO: 32650 - protein, 9 aa, synthetic construct
GIQGTAKLF

SEQ ID NO: 32651 - protein, 9 aa, synthetic construct
GIQGTAKVY

SEQ ID NO: 32652 - protein, 9 aa, synthetic construct
GIQGTIHLR

SEQ ID NO: 32653 - protein, 9 aa, synthetic construct
GIQGTIHLF

SEQ ID NO: 32654 - protein, 9 aa, synthetic construct
GIQGTIHVY

SEQ ID NO: 32655 - protein, 9 aa, synthetic construct
GIQGTIHVR

SEQ ID NO: 32656 - protein, 9 aa, synthetic construct
GIQGTIHVH

SEQ ID NO: 32657 - protein, 9 aa, synthetic construct
GIQGTIRVY

SEQ ID NO: 32658 - protein, 9 aa, synthetic construct
GIQGTIRVF

SEQ ID NO: 32659 - protein, 9 aa, synthetic construct
PTNGGVKVR

SEQ ID NO: 32660 - protein, 9 aa, synthetic construct
GIQGTIKLY

SEQ ID NO: 32661 - protein, 9 aa, synthetic construct
GIQGTIKLF

SEQ ID NO: 32662 - protein, 9 aa, synthetic construct
GIQGTIKVH

SEQ ID NO: 32663 - protein, 9 aa, synthetic construct
GIQGTIKVF

SEQ ID NO: 32664 - protein, 9 aa, synthetic construct
GIQGTGHLR

SEQ ID NO: 32665 - protein, 9 aa, synthetic construct
GIQGTGHLH

SEQ ID NO: 32666 - protein, 9 aa, synthetic construct
GIQGTGHLK

SEQ ID NO: 32667 - protein, 9 aa, synthetic construct
GIQGTGHLF

SEQ ID NO: 32668 - protein, 9 aa, synthetic construct
GIQGTGHVY

SEQ ID NO: 32669 - protein, 9 aa, synthetic construct
GIQGTGHVR

SEQ ID NO: 32670 - protein, 9 aa, synthetic construct
GIQGTGHVH

SEQ ID NO: 32671 - protein, 9 aa, synthetic construct
GIQGTGHVK

SEQ ID NO: 32672 - protein, 9 aa, synthetic construct
GIQGTGHVF

SEQ ID NO: 32673 - protein, 9 aa, synthetic construct
PTNGGVKVK

SEQ ID NO: 32674 - protein, 9 aa, synthetic construct
GIQGTGRLY

SEQ ID NO: 32675 - protein, 9 aa, synthetic construct
GIQGTGRVY

SEQ ID NO: 32676 - protein, 9 aa, synthetic construct
GIQGTGRVH

SEQ ID NO: 32677 - protein, 9 aa, synthetic construct
GIQGTGKLH

SEQ ID NO: 32678 - protein, 9 aa, synthetic construct
GIQGTGKVY

SEQ ID NO: 32679 - protein, 9 aa, synthetic construct
PLNGVAHLK

SEQ ID NO: 32680 - protein, 9 aa, synthetic construct
GIQGSVHLR

SEQ ID NO: 32681 - protein, 9 aa, synthetic construct
GIQGSVHLH

SEQ ID NO: 32682 - protein, 9 aa, synthetic construct
GIQGSVHLK

SEQ ID NO: 32683 - protein, 9 aa, synthetic construct
GIQGSVHVR

SEQ ID NO: 32684 - protein, 9 aa, synthetic construct
GIQGSVRLY

SEQ ID NO: 32685 - protein, 9 aa, synthetic construct
GIQGSVKVY

SEQ ID NO: 32686 - protein, 9 aa, synthetic construct
GIQGSLHLY

SEQ ID NO: 32687 - protein, 9 aa, synthetic construct
GIQGSLHLR

SEQ ID NO: 32688 - protein, 9 aa, synthetic construct
GIQGSLHLH

SEQ ID NO: 32689 - protein, 9 aa, synthetic construct
GIQGSLHLK

SEQ ID NO: 32690 - protein, 9 aa, synthetic construct
GIQGSLHVY

SEQ ID NO: 32691 - protein, 9 aa, synthetic construct
GIQGSLHVR

SEQ ID NO: 32692 - protein, 9 aa, synthetic construct
GIQGSLHVH

SEQ ID NO: 32693 - protein, 9 aa, synthetic construct
GIQGSLHVK

SEQ ID NO: 32694 - protein, 9 aa, synthetic construct
GIQGSLHVF

SEQ ID NO: 32695 - protein, 9 aa, synthetic construct
PTNGGLHLF

SEQ ID NO: 32696 - protein, 9 aa, synthetic construct
GIQGSLRLY

SEQ ID NO: 32697 - protein, 9 aa, synthetic construct
GIQGSLRVY

SEQ ID NO: 32698 - protein, 9 aa, synthetic construct
GIQGSLRVK

SEQ ID NO: 32699 - protein, 9 aa, synthetic construct
PTNGGLHVY

SEQ ID NO: 32700 - protein, 9 aa, synthetic construct
GIQGSLKLY

SEQ ID NO: 32701 - protein, 9 aa, synthetic construct
GIQGSLKLH

SEQ ID NO: 32702 - protein, 9 aa, synthetic construct
GIQGSLKVH

SEQ ID NO: 32703 - protein, 9 aa, synthetic construct
GIQGSLKVF

SEQ ID NO: 32704 - protein, 9 aa, synthetic construct
GIQGSAHLY

SEQ ID NO: 32705 - protein, 9 aa, synthetic construct
GIQGSAHLH

SEQ ID NO: 32706 - protein, 9 aa, synthetic construct
GIQGSAHLK

SEQ ID NO: 32707 - protein, 9 aa, synthetic construct
GIQGSAHVY

SEQ ID NO: 32708 - protein, 9 aa, synthetic construct
GIQGSAHVF

SEQ ID NO: 32709 - protein, 9 aa, synthetic construct
GIQGSARLY

SEQ ID NO: 32710 - protein, 9 aa, synthetic construct
GIQGSARVF

SEQ ID NO: 32711 - protein, 9 aa, synthetic construct
PTNGGLHVK

SEQ ID NO: 32712 - protein, 9 aa, synthetic construct
GIQGSAKVY

SEQ ID NO: 32713 - protein, 9 aa, synthetic construct
GIQGSAKVH

SEQ ID NO: 32714 - protein, 9 aa, synthetic construct
PTNGGLHVF

SEQ ID NO: 32715 - protein, 9 aa, synthetic construct
GIQGSIHLR

SEQ ID NO: 32716 - protein, 9 aa, synthetic construct
GIQGSIHVH

SEQ ID NO: 32717 - protein, 9 aa, synthetic construct
GIQGSIRVH

SEQ ID NO: 32718 - protein, 9 aa, synthetic construct
GIQGSIRVF

SEQ ID NO: 32719 - protein, 9 aa, synthetic construct
GIQGSIKLK

SEQ ID NO: 32720 - protein, 9 aa, synthetic construct
GIQGSIKLF

SEQ ID NO: 32721 - protein, 9 aa, synthetic construct
GIQGSIKVY

SEQ ID NO: 32722 - protein, 9 aa, synthetic construct
GIQGSIKVH

SEQ ID NO: 32723 - protein, 9 aa, synthetic construct
GIQGSIKVK

SEQ ID NO: 32724 - protein, 9 aa, synthetic construct
GIQGSIKVF

SEQ ID NO: 32725 - protein, 9 aa, synthetic construct
GIQGSGHLY

SEQ ID NO: 32726 - protein, 9 aa, synthetic construct
GIQGSGHLF

SEQ ID NO: 32727 - protein, 9 aa, synthetic construct
GIQGSGHVY

SEQ ID NO: 32728 - protein, 9 aa, synthetic construct
GIQGSGHVH

SEQ ID NO: 32729 - protein, 9 aa, synthetic construct
GIQGSGRLF

SEQ ID NO: 32730 - protein, 9 aa, synthetic construct
GIQGSGRVY

SEQ ID NO: 32731 - protein, 9 aa, synthetic construct
GIQGSGRVH

SEQ ID NO: 32732 - protein, 9 aa, synthetic construct
PTNGGLRLF

SEQ ID NO: 32733 - protein, 9 aa, synthetic construct
GIQGSGKVY

SEQ ID NO: 32734 - protein, 9 aa, synthetic construct
GIQGSGKVH

SEQ ID NO: 32735 - protein, 9 aa, synthetic construct
GIQGSGKVF

SEQ ID NO: 32736 - protein, 9 aa, synthetic construct
GIQGVVHLY

SEQ ID NO: 32737 - protein, 9 aa, synthetic construct
GIQGVVHLH

SEQ ID NO: 32738 - protein, 9 aa, synthetic construct
GIQGVVRVF

SEQ ID NO: 32739 - protein, 9 aa, synthetic construct
GIQGVVKLY

SEQ ID NO: 32740 - protein, 9 aa, synthetic construct
GIQGVVKLH

SEQ ID NO: 32741 - protein, 9 aa, synthetic construct
GIQGVVKVR

SEQ ID NO: 32742 - protein, 9 aa, synthetic construct
GIQGVVKVH

SEQ ID NO: 32743 - protein, 9 aa, synthetic construct
GIQGVVKVF

SEQ ID NO: 32744 - protein, 9 aa, synthetic construct
GIQGVLHLY

SEQ ID NO: 32745 - protein, 9 aa, synthetic construct
GIQGVLHLR

SEQ ID NO: 32746 - protein, 9 aa, synthetic construct
GIQGVLHLH

SEQ ID NO: 32747 - protein, 9 aa, synthetic construct
GIQGVLHLK

SEQ ID NO: 32748 - protein, 9 aa, synthetic construct
GIQGVLHLF

SEQ ID NO: 32749 - protein, 9 aa, synthetic construct
GIQGVLHVK

SEQ ID NO: 32750 - protein, 9 aa, synthetic construct
GIQGVLHVF

SEQ ID NO: 32751 - protein, 9 aa, synthetic construct
PTNGGLRVF

SEQ ID NO: 32752 - protein, 9 aa, synthetic construct
GIQGVLRVY

SEQ ID NO: 32753 - protein, 9 aa, synthetic construct
GIQGVLKLY

SEQ ID NO: 32754 - protein, 9 aa, synthetic construct
GIQGVLKLF

SEQ ID NO: 32755 - protein, 9 aa, synthetic construct
GIQGVLKVY

SEQ ID NO: 32756 - protein, 9 aa, synthetic construct
GIQGVLKVH

SEQ ID NO: 32757 - protein, 9 aa, synthetic construct
GIQGVLKVK

SEQ ID NO: 32758 - protein, 9 aa, synthetic construct
GIQGVAHLK

SEQ ID NO: 32759 - protein, 9 aa, synthetic construct
GIQGVAHVR

SEQ ID NO: 32760 - protein, 9 aa, synthetic construct
GIQGVAHVK

SEQ ID NO: 32761 - protein, 9 aa, synthetic construct
PTNGGLKLH

SEQ ID NO: 32762 - protein, 9 aa, synthetic construct
GIQGVARVY

SEQ ID NO: 32763 - protein, 9 aa, synthetic construct
GIQGVARVH

SEQ ID NO: 32764 - protein, 9 aa, synthetic construct
GIQGVAKVF

SEQ ID NO: 32765 - protein, 9 aa, synthetic construct
GIQGVIHLY

SEQ ID NO: 32766 - protein, 9 aa, synthetic construct
GIQGVIHLR

SEQ ID NO: 32767 - protein, 9 aa, synthetic construct
GIQGVIHLH

SEQ ID NO: 32768 - protein, 9 aa, synthetic construct
GIQGVIHLF

SEQ ID NO: 32769 - protein, 9 aa, synthetic construct
GIQGVIHVY

SEQ ID NO: 32770 - protein, 9 aa, synthetic construct
GIQGVIHVK

SEQ ID NO: 32771 - protein, 9 aa, synthetic construct
GIQGVIHVF

SEQ ID NO: 32772 - protein, 9 aa, synthetic construct
PTNGGLKVY

SEQ ID NO: 32773 - protein, 9 aa, synthetic construct
GIQGVIRLH

SEQ ID NO: 32774 - protein, 9 aa, synthetic construct
GIQGVIRVY

SEQ ID NO: 32775 - protein, 9 aa, synthetic construct
GIQGVIRVH

SEQ ID NO: 32776 - protein, 9 aa, synthetic construct
GIQGVIKLY

SEQ ID NO: 32777 - protein, 9 aa, synthetic construct
GIQGVIKLH

SEQ ID NO: 32778 - protein, 9 aa, synthetic construct
GIQGVIKLK

SEQ ID NO: 32779 - protein, 9 aa, synthetic construct
GIQGVIKLF

SEQ ID NO: 32780 - protein, 9 aa, synthetic construct
GIQGVIKVK

SEQ ID NO: 32781 - protein, 9 aa, synthetic construct
GIQGVIKVF

SEQ ID NO: 32782 - protein, 9 aa, synthetic construct
PTNGGLKVH

SEQ ID NO: 32783 - protein, 9 aa, synthetic construct
GIQGVGHLR

SEQ ID NO: 32784 - protein, 9 aa, synthetic construct
GIQGVGHLF

SEQ ID NO: 32785 - protein, 9 aa, synthetic construct
GIQGVGHVK

SEQ ID NO: 32786 - protein, 9 aa, synthetic construct
GIQGVGRLH

SEQ ID NO: 32787 - protein, 9 aa, synthetic construct
GIQGVGRLF

SEQ ID NO: 32788 - protein, 9 aa, synthetic construct
GIQGVGRVH

SEQ ID NO: 32789 - protein, 9 aa, synthetic construct
GIQGVGRVF

SEQ ID NO: 32790 - protein, 9 aa, synthetic construct
GIQGVGKLK

SEQ ID NO: 32791 - protein, 9 aa, synthetic construct
PTNGGAHLR

SEQ ID NO: 32792 - protein, 9 aa, synthetic construct
GIQGGVRLY

SEQ ID NO: 32793 - protein, 9 aa, synthetic construct
GIQGGVRVK

SEQ ID NO: 32794 - protein, 9 aa, synthetic construct
GIQGGVKLH

SEQ ID NO: 32795 - protein, 9 aa, synthetic construct
GIQGGVKVH

SEQ ID NO: 32796 - protein, 9 aa, synthetic construct
GIQGGLHLK

SEQ ID NO: 32797 - protein, 9 aa, synthetic construct
GIQGGLHVR

SEQ ID NO: 32798 - protein, 9 aa, synthetic construct
GIQGGLHVF

SEQ ID NO: 32799 - protein, 9 aa, synthetic construct
GIQGGLRVK

SEQ ID NO: 32800 - protein, 9 aa, synthetic construct
PTNGGAHVY

SEQ ID NO: 32801 - protein, 9 aa, synthetic construct
GIQGGLKLY

SEQ ID NO: 32802 - protein, 9 aa, synthetic construct
GIQGGLKLH

SEQ ID NO: 32803 - protein, 9 aa, synthetic construct
PTNGGAHVR

SEQ ID NO: 32804 - protein, 9 aa, synthetic construct
GIQGGAHLR

SEQ ID NO: 32805 - protein, 9 aa, synthetic construct
GIQGGAHLF

SEQ ID NO: 32806 - protein, 9 aa, synthetic construct
GIQGGARLY

SEQ ID NO: 32807 - protein, 9 aa, synthetic construct
GIQGGARLH

SEQ ID NO: 32808 - protein, 9 aa, synthetic construct
GIQGGARLF

SEQ ID NO: 32809 - protein, 9 aa, synthetic construct
GIQGGARVH

SEQ ID NO: 32810 - protein, 9 aa, synthetic construct
GIQGGAKLH

SEQ ID NO: 32811 - protein, 9 aa, synthetic construct
GIQGGAKVR

SEQ ID NO: 32812 - protein, 9 aa, synthetic construct
GIQGGAKVH

SEQ ID NO: 32813 - protein, 9 aa, synthetic construct
GIQGGIHVR

SEQ ID NO: 32814 - protein, 9 aa, synthetic construct
PTNGGARLY

SEQ ID NO: 32815 - protein, 9 aa, synthetic construct
GIQGGIRLF

SEQ ID NO: 32816 - protein, 9 aa, synthetic construct
GIQGGGHLY

SEQ ID NO: 32817 - protein, 9 aa, synthetic construct
GIQGGGHLH

SEQ ID NO: 32818 - protein, 9 aa, synthetic construct
GIQGGGHLF

SEQ ID NO: 32819 - protein, 9 aa, synthetic construct
GIQGGGHVY

SEQ ID NO: 32820 - protein, 9 aa, synthetic construct
GIQGGGHVH

SEQ ID NO: 32821 - protein, 9 aa, synthetic construct
GIQGGGHVF

SEQ ID NO: 32822 - protein, 9 aa, synthetic construct
GIQGGGRLY

SEQ ID NO: 32823 - protein, 9 aa, synthetic construct
GIQGGGRVH

SEQ ID NO: 32824 - protein, 9 aa, synthetic construct
GIQGGGKLR

SEQ ID NO: 32825 - protein, 9 aa, synthetic construct
GIQGGGKVH

SEQ ID NO: 32826 - protein, 9 aa, synthetic construct
GIQAAVHLY

SEQ ID NO: 32827 - protein, 9 aa, synthetic construct
GIQAAVHLR

SEQ ID NO: 32828 - protein, 9 aa, synthetic construct
GIQAAVHLH

SEQ ID NO: 32829 - protein, 9 aa, synthetic construct
GIQAAVHVH

SEQ ID NO: 32830 - protein, 9 aa, synthetic construct
GIQAAVHVK

SEQ ID NO: 32831 - protein, 9 aa, synthetic construct
GIQAAVHVF

SEQ ID NO: 32832 - protein, 9 aa, synthetic construct
GIQAAVRLY

SEQ ID NO: 32833 - protein, 9 aa, synthetic construct
GIQAAVRVY

SEQ ID NO: 32834 - protein, 9 aa, synthetic construct
GIQAAVKLY

SEQ ID NO: 32835 - protein, 9 aa, synthetic construct
GIQAAVKLH

SEQ ID NO: 32836 - protein, 9 aa, synthetic construct
GIQAAVKLK

SEQ ID NO: 32837 - protein, 9 aa, synthetic construct
GIQAAVKVY

SEQ ID NO: 32838 - protein, 9 aa, synthetic construct
GIQAAVKVH

SEQ ID NO: 32839 - protein, 9 aa, synthetic construct
GIQAAVKVF

SEQ ID NO: 32840 - protein, 9 aa, synthetic construct
GIQAALHLY

SEQ ID NO: 32841 - protein, 9 aa, synthetic construct
GIQAALHLH

SEQ ID NO: 32842 - protein, 9 aa, synthetic construct
GIQAALHLK

SEQ ID NO: 32843 - protein, 9 aa, synthetic construct
GIQAALHVR

SEQ ID NO: 32844 - protein, 9 aa, synthetic construct
GIQAALHVH

SEQ ID NO: 32845 - protein, 9 aa, synthetic construct
GIQAALHVK

SEQ ID NO: 32846 - protein, 9 aa, synthetic construct
GIQAALRVF

SEQ ID NO: 32847 - protein, 9 aa, synthetic construct
GIQAALKLY

SEQ ID NO: 32848 - protein, 9 aa, synthetic construct
GIQAALKLR

SEQ ID NO: 32849 - protein, 9 aa, synthetic construct
GIQAALKLK

SEQ ID NO: 32850 - protein, 9 aa, synthetic construct
GIQAALKVH

SEQ ID NO: 32851 - protein, 9 aa, synthetic construct
GIQAAAHLY

SEQ ID NO: 32852 - protein, 9 aa, synthetic construct
GIQAAAHLR

SEQ ID NO: 32853 - protein, 9 aa, synthetic construct
GIQAAAHLH

SEQ ID NO: 32854 - protein, 9 aa, synthetic construct
GIQAAAHVY

SEQ ID NO: 32855 - protein, 9 aa, synthetic construct
GIQAAAHVR

SEQ ID NO: 32856 - protein, 9 aa, synthetic construct
GIQAAAHVK

SEQ ID NO: 32857 - protein, 9 aa, synthetic construct
GIQAAAHVF

SEQ ID NO: 32858 - protein, 9 aa, synthetic construct
GIQAAARLH

SEQ ID NO: 32859 - protein, 9 aa, synthetic construct
GIQAAARLF

SEQ ID NO: 32860 - protein, 9 aa, synthetic construct
GIQAAARVR

SEQ ID NO: 32861 - protein, 9 aa, synthetic construct
GIQAAARVH

SEQ ID NO: 32862 - protein, 9 aa, synthetic construct
GIQAAARVF

SEQ ID NO: 32863 - protein, 9 aa, synthetic construct
GIQAAAKLY

SEQ ID NO: 32864 - protein, 9 aa, synthetic construct
GIQAAAKLH

SEQ ID NO: 32865 - protein, 9 aa, synthetic construct
GIQAAAKVR

SEQ ID NO: 32866 - protein, 9 aa, synthetic construct
GIQAAAKVH

SEQ ID NO: 32867 - protein, 9 aa, synthetic construct
GIQAAAKVF

SEQ ID NO: 32868 - protein, 9 aa, synthetic construct
GIQAAIHLY

SEQ ID NO: 32869 - protein, 9 aa, synthetic construct
GIQAAIHLH

SEQ ID NO: 32870 - protein, 9 aa, synthetic construct
GIQAAIHVY

SEQ ID NO: 32871 - protein, 9 aa, synthetic construct
GIQAAIHVR

SEQ ID NO: 32872 - protein, 9 aa, synthetic construct
GIQAAIHVH

SEQ ID NO: 32873 - protein, 9 aa, synthetic construct
GIQAAIHVK

SEQ ID NO: 32874 - protein, 9 aa, synthetic construct
GIQAAIHVF

SEQ ID NO: 32875 - protein, 9 aa, synthetic construct
GIQAAIRLY

SEQ ID NO: 32876 - protein, 9 aa, synthetic construct
GIQAAIRLF

SEQ ID NO: 32877 - protein, 9 aa, synthetic construct
GIQAAIRVY

SEQ ID NO: 32878 - protein, 9 aa, synthetic construct
GIQAAIRVF

SEQ ID NO: 32879 - protein, 9 aa, synthetic construct
PTNGGAKVR

SEQ ID NO: 32880 - protein, 9 aa, synthetic construct
GIQAAIKLY

SEQ ID NO: 32881 - protein, 9 aa, synthetic construct
GIQAAIKLH

SEQ ID NO: 32882 - protein, 9 aa, synthetic construct
GIQAAIKLK

SEQ ID NO: 32883 - protein, 9 aa, synthetic construct
GIQAAIKLF

SEQ ID NO: 32884 - protein, 9 aa, synthetic construct
GIQAAIKVH

SEQ ID NO: 32885 - protein, 9 aa, synthetic construct
GIQAAIKVF

SEQ ID NO: 32886 - protein, 9 aa, synthetic construct
GIQAAGHLY

SEQ ID NO: 32887 - protein, 9 aa, synthetic construct
GIQAAGHLR

SEQ ID NO: 32888 - protein, 9 aa, synthetic construct
GIQAAGHLH

SEQ ID NO: 32889 - protein, 9 aa, synthetic construct
GIQAAGHLF

SEQ ID NO: 32890 - protein, 9 aa, synthetic construct
GIQAAGHVY

SEQ ID NO: 32891 - protein, 9 aa, synthetic construct
GIQAAGHVR

SEQ ID NO: 32892 - protein, 9 aa, synthetic construct
GIQAAGHVK

SEQ ID NO: 32893 - protein, 9 aa, synthetic construct
GIQAAGHVF

SEQ ID NO: 32894 - protein, 9 aa, synthetic construct
GIQAAGRLY

SEQ ID NO: 32895 - protein, 9 aa, synthetic construct
GIQAAGRLH

SEQ ID NO: 32896 - protein, 9 aa, synthetic construct
GIQAAGRLF

SEQ ID NO: 32897 - protein, 9 aa, synthetic construct
GIQAAGRVY

SEQ ID NO: 32898 - protein, 9 aa, synthetic construct
GIQAAGRVK

SEQ ID NO: 32899 - protein, 9 aa, synthetic construct
GIQAAGKLY

SEQ ID NO: 32900 - protein, 9 aa, synthetic construct
GIQAAGKLH

SEQ ID NO: 32901 - protein, 9 aa, synthetic construct
GIQAAGKVY

SEQ ID NO: 32902 - protein, 9 aa, synthetic construct
GIQAAGKVH

SEQ ID NO: 32903 - protein, 9 aa, synthetic construct
PLNGVAHVF

SEQ ID NO: 32904 - protein, 9 aa, synthetic construct
GIQATVHLH

SEQ ID NO: 32905 - protein, 9 aa, synthetic construct
GIQATVHVR

SEQ ID NO: 32906 - protein, 9 aa, synthetic construct
GIQATVHVK

SEQ ID NO: 32907 - protein, 9 aa, synthetic construct
GIQATVRLY

SEQ ID NO: 32908 - protein, 9 aa, synthetic construct
GIQATVRLH

SEQ ID NO: 32909 - protein, 9 aa, synthetic construct
GIQATVRLF

SEQ ID NO: 32910 - protein, 9 aa, synthetic construct
GIQATVRVY

SEQ ID NO: 32911 - protein, 9 aa, synthetic construct
GIQATVRVH

SEQ ID NO: 32912 - protein, 9 aa, synthetic construct
GIQATVRVF

SEQ ID NO: 32913 - protein, 9 aa, synthetic construct
GIQATVKLY

SEQ ID NO: 32914 - protein, 9 aa, synthetic construct
GIQATVKLH

SEQ ID NO: 32915 - protein, 9 aa, synthetic construct
GIQATVKLF

SEQ ID NO: 32916 - protein, 9 aa, synthetic construct
GIQATLHLK

SEQ ID NO: 32917 - protein, 9 aa, synthetic construct
GIQATLHVY

SEQ ID NO: 32918 - protein, 9 aa, synthetic construct
GIQATLHVH

SEQ ID NO: 32919 - protein, 9 aa, synthetic construct
GIQATLHVK

SEQ ID NO: 32920 - protein, 9 aa, synthetic construct
GIQATLRLH

SEQ ID NO: 32921 - protein, 9 aa, synthetic construct
GIQATLRVH

SEQ ID NO: 32922 - protein, 9 aa, synthetic construct
GIQATLRVF

SEQ ID NO: 32923 - protein, 9 aa, synthetic construct
GIQATLKLH

SEQ ID NO: 32924 - protein, 9 aa, synthetic construct
GIQATLKVF

SEQ ID NO: 32925 - protein, 9 aa, synthetic construct
GIQATAHLF

SEQ ID NO: 32926 - protein, 9 aa, synthetic construct
GIQATAHVF

SEQ ID NO: 32927 - protein, 9 aa, synthetic construct
GIQATARLY

SEQ ID NO: 32928 - protein, 9 aa, synthetic construct
GIQATARVY

SEQ ID NO: 32929 - protein, 9 aa, synthetic construct
GIQATARVH

SEQ ID NO: 32930 - protein, 9 aa, synthetic construct
GIQATAKLH

SEQ ID NO: 32931 - protein, 9 aa, synthetic construct
GIQATAKVH

SEQ ID NO: 32932 - protein, 9 aa, synthetic construct
GIQATAKVF

SEQ ID NO: 32933 - protein, 9 aa, synthetic construct
GIQATIHLY

SEQ ID NO: 32934 - protein, 9 aa, synthetic construct
GIQATIHLR

SEQ ID NO: 32935 - protein, 9 aa, synthetic construct
GIQATIHVY

SEQ ID NO: 32936 - protein, 9 aa, synthetic construct
GIQATIHVR

SEQ ID NO: 32937 - protein, 9 aa, synthetic construct
GIQATIHVF

SEQ ID NO: 32938 - protein, 9 aa, synthetic construct
PLNGALKLH

SEQ ID NO: 32939 - protein, 9 aa, synthetic construct
GIQATIRLY

SEQ ID NO: 32940 - protein, 9 aa, synthetic construct
GIQATIRLR

SEQ ID NO: 32941 - protein, 9 aa, synthetic construct
GIQATIRVF

SEQ ID NO: 32942 - protein, 9 aa, synthetic construct
GIQATIKVY

SEQ ID NO: 32943 - protein, 9 aa, synthetic construct
GIQATGHLR

SEQ ID NO: 32944 - protein, 9 aa, synthetic construct
GIQATGHLK

SEQ ID NO: 32945 - protein, 9 aa, synthetic construct
GIQATGHVY

SEQ ID NO: 32946 - protein, 9 aa, synthetic construct
GIQATGRLY

SEQ ID NO: 32947 - protein, 9 aa, synthetic construct
GIQATGRLK

SEQ ID NO: 32948 - protein, 9 aa, synthetic construct
GIQATGRVY

SEQ ID NO: 32949 - protein, 9 aa, synthetic construct
GIQATGRVR

SEQ ID NO: 32950 - protein, 9 aa, synthetic construct
GIQATGRVH

SEQ ID NO: 32951 - protein, 9 aa, synthetic construct
GIQATGRVK

SEQ ID NO: 32952 - protein, 9 aa, synthetic construct
GIQATGKLY

SEQ ID NO: 32953 - protein, 9 aa, synthetic construct
GIQATGKLF

SEQ ID NO: 32954 - protein, 9 aa, synthetic construct
GIQATGKVF

SEQ ID NO: 32955 - protein, 9 aa, synthetic construct
GIQASVRLF

SEQ ID NO: 32956 - protein, 9 aa, synthetic construct
GIQASVRVH

SEQ ID NO: 32957 - protein, 9 aa, synthetic construct
GIQASVRVF

SEQ ID NO: 32958 - protein, 9 aa, synthetic construct
GIQASVKLH

SEQ ID NO: 32959 - protein, 9 aa, synthetic construct
GIQASVKLF

SEQ ID NO: 32960 - protein, 9 aa, synthetic construct
GIQASVKVH

SEQ ID NO: 32961 - protein, 9 aa, synthetic construct
GIQASLHLK

SEQ ID NO: 32962 - protein, 9 aa, synthetic construct
GIQASLHVR

SEQ ID NO: 32963 - protein, 9 aa, synthetic construct
GIQASLHVK

SEQ ID NO: 32964 - protein, 9 aa, synthetic construct
GIQASLRVR

SEQ ID NO: 32965 - protein, 9 aa, synthetic construct
GIQASLKVH

SEQ ID NO: 32966 - protein, 9 aa, synthetic construct
GIQASAHLR

SEQ ID NO: 32967 - protein, 9 aa, synthetic construct
GIQASAHLK

SEQ ID NO: 32968 - protein, 9 aa, synthetic construct
GIQASAHVK

SEQ ID NO: 32969 - protein, 9 aa, synthetic construct
GIQASARLH

SEQ ID NO: 32970 - protein, 9 aa, synthetic construct
GIQASARLF

SEQ ID NO: 32971 - protein, 9 aa, synthetic construct
GIQASARVY

SEQ ID NO: 32972 - protein, 9 aa, synthetic construct
GIQASARVF

SEQ ID NO: 32973 - protein, 9 aa, synthetic construct
GIQASAKLR

SEQ ID NO: 32974 - protein, 9 aa, synthetic construct
GIQASAKLH

SEQ ID NO: 32975 - protein, 9 aa, synthetic construct
GIQASAKVR

SEQ ID NO: 32976 - protein, 9 aa, synthetic construct
GIQASAKVH

SEQ ID NO: 32977 - protein, 9 aa, synthetic construct
GIQASAKVF

SEQ ID NO: 32978 - protein, 9 aa, synthetic construct
GIQASIHLK

SEQ ID NO: 32979 - protein, 9 aa, synthetic construct
GIQASIHVR

SEQ ID NO: 32980 - protein, 9 aa, synthetic construct
GIQASIHVH

SEQ ID NO: 32981 - protein, 9 aa, synthetic construct
GIQASIHVK

SEQ ID NO: 32982 - protein, 9 aa, synthetic construct
GIQASIRLF

SEQ ID NO: 32983 - protein, 9 aa, synthetic construct
GIQASIRVY

SEQ ID NO: 32984 - protein, 9 aa, synthetic construct
GIQASIKLF

SEQ ID NO: 32985 - protein, 9 aa, synthetic construct
GIQASGHLY

SEQ ID NO: 32986 - protein, 9 aa, synthetic construct
GIQASGHVY

SEQ ID NO: 32987 - protein, 9 aa, synthetic construct
GIQASGHVK

SEQ ID NO: 32988 - protein, 9 aa, synthetic construct
GIQASGRLR

SEQ ID NO: 32989 - protein, 9 aa, synthetic construct
GIQASGRLH

SEQ ID NO: 32990 - protein, 9 aa, synthetic construct
GIQASGRLF

SEQ ID NO: 32991 - protein, 9 aa, synthetic construct
GIQASGRVY

SEQ ID NO: 32992 - protein, 9 aa, synthetic construct
GIQASGRVR

SEQ ID NO: 32993 - protein, 9 aa, synthetic construct
GIQASGRVH

SEQ ID NO: 32994 - protein, 9 aa, synthetic construct
GIQASGKLY

SEQ ID NO: 32995 - protein, 9 aa, synthetic construct
GIQASGKLH

SEQ ID NO: 32996 - protein, 9 aa, synthetic construct
GIQASGKLF

SEQ ID NO: 32997 - protein, 9 aa, synthetic construct
GIQASGKVY

SEQ ID NO: 32998 - protein, 9 aa, synthetic construct
GIQASGKVF

SEQ ID NO: 32999 - protein, 9 aa, synthetic construct
GIQAVVHLH

SEQ ID NO: 33000 - protein, 9 aa, synthetic construct
GIQAVVRVF

SEQ ID NO: 33001 - protein, 9 aa, synthetic construct
GIQAVVKVH

SEQ ID NO: 33002 - protein, 9 aa, synthetic construct
GIQAVLRVY

SEQ ID NO: 33003 - protein, 9 aa, synthetic construct
GIQAVLRVH

SEQ ID NO: 33004 - protein, 9 aa, synthetic construct
GIQAVLKLH

SEQ ID NO: 33005 - protein, 9 aa, synthetic construct
GIQAVLKLF

SEQ ID NO: 33006 - protein, 9 aa, synthetic construct
GIQAVAHLY

SEQ ID NO: 33007 - protein, 9 aa, synthetic construct
GIQAVAHLR

SEQ ID NO: 33008 - protein, 9 aa, synthetic construct
GIQAVAHLK

SEQ ID NO: 33009 - protein, 9 aa, synthetic construct
GIQAVAHVY

SEQ ID NO: 33010 - protein, 9 aa, synthetic construct
GIQAVAHVK

SEQ ID NO: 33011 - protein, 9 aa, synthetic construct
GIQAVAHVF

SEQ ID NO: 33012 - protein, 9 aa, synthetic construct
GIQAVARVY

SEQ ID NO: 33013 - protein, 9 aa, synthetic construct
GIQAVARVH

SEQ ID NO: 33014 - protein, 9 aa, synthetic construct
GIQAVARVF

SEQ ID NO: 33015 - protein, 9 aa, synthetic construct
GIQAVAKVY

SEQ ID NO: 33016 - protein, 9 aa, synthetic construct
GIQAVIHVH

SEQ ID NO: 33017 - protein, 9 aa, synthetic construct
GIQAVIHVK

SEQ ID NO: 33018 - protein, 9 aa, synthetic construct
GIQAVIRLY

SEQ ID NO: 33019 - protein, 9 aa, synthetic construct
GIQAVIRVF

SEQ ID NO: 33020 - protein, 9 aa, synthetic construct
PTNGGGRLR

SEQ ID NO: 33021 - protein, 9 aa, synthetic construct
GIQAVIKLY

SEQ ID NO: 33022 - protein, 9 aa, synthetic construct
GIQAVIKLH

SEQ ID NO: 33023 - protein, 9 aa, synthetic construct
GIQAVIKVY

SEQ ID NO: 33024 - protein, 9 aa, synthetic construct
GIQAVIKVF

SEQ ID NO: 33025 - protein, 9 aa, synthetic construct
GIQAVGHLR

SEQ ID NO: 33026 - protein, 9 aa, synthetic construct
GIQAVGHLH

SEQ ID NO: 33027 - protein, 9 aa, synthetic construct
GIQAVGHLK

SEQ ID NO: 33028 - protein, 9 aa, synthetic construct
GIQAVGHVK

SEQ ID NO: 33029 - protein, 9 aa, synthetic construct
PTNGGGRLK

SEQ ID NO: 33030 - protein, 9 aa, synthetic construct
GIQAVGRVF

SEQ ID NO: 33031 - protein, 9 aa, synthetic construct
GIQAVGKLH

SEQ ID NO: 33032 - protein, 9 aa, synthetic construct
GIQAVGKLK

SEQ ID NO: 33033 - protein, 9 aa, synthetic construct
GIQAVGKLF

SEQ ID NO: 33034 - protein, 9 aa, synthetic construct
GIQAGVHVR

SEQ ID NO: 33035 - protein, 9 aa, synthetic construct
GIQAGVHVF

SEQ ID NO: 33036 - protein, 9 aa, synthetic construct
PTNGGGRVR

SEQ ID NO: 33037 - protein, 9 aa, synthetic construct
GIQAGVRLY

SEQ ID NO: 33038 - protein, 9 aa, synthetic construct
GIQAGVRVY

SEQ ID NO: 33039 - protein, 9 aa, synthetic construct
GIQAGVRVR

SEQ ID NO: 33040 - protein, 9 aa, synthetic construct
GIQAGVKLY

SEQ ID NO: 33041 - protein, 9 aa, synthetic construct
GIQAGVKLH

SEQ ID NO: 33042 - protein, 9 aa, synthetic construct
GIQAGVKLF

SEQ ID NO: 33043 - protein, 9 aa, synthetic construct
GIQAGVKVY

SEQ ID NO: 33044 - protein, 9 aa, synthetic construct
PTNGGGRVK

SEQ ID NO: 33045 - protein, 9 aa, synthetic construct
GIQAGLHVY

SEQ ID NO: 33046 - protein, 9 aa, synthetic construct
GIQAGLRLH

SEQ ID NO: 33047 - protein, 9 aa, synthetic construct
GIQAGLKLH

SEQ ID NO: 33048 - protein, 9 aa, synthetic construct
GIQAGLKVY

SEQ ID NO: 33049 - protein, 9 aa, synthetic construct
GIQAGLKVH

SEQ ID NO: 33050 - protein, 9 aa, synthetic construct
GIQAGLKVK

SEQ ID NO: 33051 - protein, 9 aa, synthetic construct
GIQAGLKVF

SEQ ID NO: 33052 - protein, 9 aa, synthetic construct
PTNGGGKLR

SEQ ID NO: 33053 - protein, 9 aa, synthetic construct
GIQAGAHLY

SEQ ID NO: 33054 - protein, 9 aa, synthetic construct
GIQAGAHLR

SEQ ID NO: 33055 - protein, 9 aa, synthetic construct
GIQAGAHLH

SEQ ID NO: 33056 - protein, 9 aa, synthetic construct
GIQAGAHLK

SEQ ID NO: 33057 - protein, 9 aa, synthetic construct
GIQAGAHVY

SEQ ID NO: 33058 - protein, 9 aa, synthetic construct
GIQAGAHVK

SEQ ID NO: 33059 - protein, 9 aa, synthetic construct
GIQAGARLF

SEQ ID NO: 33060 - protein, 9 aa, synthetic construct
GIQAGARVY

SEQ ID NO: 33061 - protein, 9 aa, synthetic construct
GIQAGARVF

SEQ ID NO: 33062 - protein, 9 aa, synthetic construct
PTNGGGKLK

SEQ ID NO: 33063 - protein, 9 aa, synthetic construct
GIQAGAKLY

SEQ ID NO: 33064 - protein, 9 aa, synthetic construct
GIQAGAKLF

SEQ ID NO: 33065 - protein, 9 aa, synthetic construct
GIQAGAKVH

SEQ ID NO: 33066 - protein, 9 aa, synthetic construct
GIQAGAKVF

SEQ ID NO: 33067 - protein, 9 aa, synthetic construct
GIQAGIHLR

SEQ ID NO: 33068 - protein, 9 aa, synthetic construct
GIQAGIHLF

SEQ ID NO: 33069 - protein, 9 aa, synthetic construct
GIQAGIHVR

SEQ ID NO: 33070 - protein, 9 aa, synthetic construct
GIQAGIHVH

SEQ ID NO: 33071 - protein, 9 aa, synthetic construct
GIQAGIHVF

SEQ ID NO: 33072 - protein, 9 aa, synthetic construct
GIQAGIRLY

SEQ ID NO: 33073 - protein, 9 aa, synthetic construct
GIQAGIRLH

SEQ ID NO: 33074 - protein, 9 aa, synthetic construct
GIQAGIRVY

SEQ ID NO: 33075 - protein, 9 aa, synthetic construct
GIQAGIRVH

SEQ ID NO: 33076 - protein, 9 aa, synthetic construct
GIQAGIRVF

SEQ ID NO: 33077 - protein, 9 aa, synthetic construct
GIQAGIKLH

SEQ ID NO: 33078 - protein, 9 aa, synthetic construct
GIQAGIKLF

SEQ ID NO: 33079 - protein, 9 aa, synthetic construct
GIQAGIKVY

SEQ ID NO: 33080 - protein, 9 aa, synthetic construct
GIQAGIKVF

SEQ ID NO: 33081 - protein, 9 aa, synthetic construct
PTNGGGKVH

SEQ ID NO: 33082 - protein, 9 aa, synthetic construct
GIQAGGHLR

SEQ ID NO: 33083 - protein, 9 aa, synthetic construct
GIQAGGHVY

SEQ ID NO: 33084 - protein, 9 aa, synthetic construct
GIQAGGHVR

SEQ ID NO: 33085 - protein, 9 aa, synthetic construct
GIQAGGHVH

SEQ ID NO: 33086 - protein, 9 aa, synthetic construct
GIQAGGHVF

SEQ ID NO: 33087 - protein, 9 aa, synthetic construct
PTNGGGKVK

SEQ ID NO: 33088 - protein, 9 aa, synthetic construct
GIQAGGRLY

SEQ ID NO: 33089 - protein, 9 aa, synthetic construct
GIQAGGRLH

SEQ ID NO: 33090 - protein, 9 aa, synthetic construct
GIQAGGRLK

SEQ ID NO: 33091 - protein, 9 aa, synthetic construct
GIQAGGRLF

SEQ ID NO: 33092 - protein, 9 aa, synthetic construct
GIQAGGRVY

SEQ ID NO: 33093 - protein, 9 aa, synthetic construct
GIQAGGRVR

SEQ ID NO: 33094 - protein, 9 aa, synthetic construct
GIQAGGRVH

SEQ ID NO: 33095 - protein, 9 aa, synthetic construct
GIQAGGRVK

SEQ ID NO: 33096 - protein, 9 aa, synthetic construct
GIQAGGRVF

SEQ ID NO: 33097 - protein, 9 aa, synthetic construct
GIQAGGKLY

SEQ ID NO: 33098 - protein, 9 aa, synthetic construct
GIQAGGKLR

SEQ ID NO: 33099 - protein, 9 aa, synthetic construct
GIQAGGKLH

SEQ ID NO: 33100 - protein, 9 aa, synthetic construct
GIQAGGKLF

SEQ ID NO: 33101 - protein, 9 aa, synthetic construct
GIQAGGKVY

SEQ ID NO: 33102 - protein, 9 aa, synthetic construct
GIQAGGKVH

SEQ ID NO: 33103 - protein, 9 aa, synthetic construct
GIQAGGKVK

SEQ ID NO: 33104 - protein, 9 aa, synthetic construct
GIQAGGKVF

SEQ ID NO: 33105 - protein, 9 aa, synthetic construct
PLNGVARVY

SEQ ID NO: 33106 - protein, 9 aa, synthetic construct
PTNAAVHLY

SEQ ID NO: 33107 - protein, 9 aa, synthetic construct
GIPGAVHLR

SEQ ID NO: 33108 - protein, 9 aa, synthetic construct
GIPGAVHLH

SEQ ID NO: 33109 - protein, 9 aa, synthetic construct
GIPGAVHLF

SEQ ID NO: 33110 - protein, 9 aa, synthetic construct
GIPGAVHVH

SEQ ID NO: 33111 - protein, 9 aa, synthetic construct
GIPGAVHVF

SEQ ID NO: 33112 - protein, 9 aa, synthetic construct
GIPGAVRLH

SEQ ID NO: 33113 - protein, 9 aa, synthetic construct
GIPGAVRVY

SEQ ID NO: 33114 - protein, 9 aa, synthetic construct
GIPGAVRVH

SEQ ID NO: 33115 - protein, 9 aa, synthetic construct
GIPGAVRVK

SEQ ID NO: 33116 - protein, 9 aa, synthetic construct
GIPGAVKLY

SEQ ID NO: 33117 - protein, 9 aa, synthetic construct
GIPGAVKLR

SEQ ID NO: 33118 - protein, 9 aa, synthetic construct
GIPGAVKLH

SEQ ID NO: 33119 - protein, 9 aa, synthetic construct
GIPGAVKVR

SEQ ID NO: 33120 - protein, 9 aa, synthetic construct
GIPGAVKVK

SEQ ID NO: 33121 - protein, 9 aa, synthetic construct
GIPGAVKVF

SEQ ID NO: 33122 - protein, 9 aa, synthetic construct
GIPGALHLY

SEQ ID NO: 33123 - protein, 9 aa, synthetic construct
GIPGALHLH

SEQ ID NO: 33124 - protein, 9 aa, synthetic construct
GIPGALHVR

SEQ ID NO: 33125 - protein, 9 aa, synthetic construct
GIPGALHVK

SEQ ID NO: 33126 - protein, 9 aa, synthetic construct
GIPGALHVF

SEQ ID NO: 33127 - protein, 9 aa, synthetic construct
PTNAAVHLF

SEQ ID NO: 33128 - protein, 9 aa, synthetic construct
GIPGALRLY

SEQ ID NO: 33129 - protein, 9 aa, synthetic construct
GIPGALRLH

SEQ ID NO: 33130 - protein, 9 aa, synthetic construct
GIPGALRLF

SEQ ID NO: 33131 - protein, 9 aa, synthetic construct
GIPGALRVR

SEQ ID NO: 33132 - protein, 9 aa, synthetic construct
GIPGALRVH

SEQ ID NO: 33133 - protein, 9 aa, synthetic construct
GIPGALRVK

SEQ ID NO: 33134 - protein, 9 aa, synthetic construct
GIPGALKLY

SEQ ID NO: 33135 - protein, 9 aa, synthetic construct
GIPGALKLR

SEQ ID NO: 33136 - protein, 9 aa, synthetic construct
GIPGALKLH

SEQ ID NO: 33137 - protein, 9 aa, synthetic construct
GIPGALKLF

SEQ ID NO: 33138 - protein, 9 aa, synthetic construct
GIPGALKVH

SEQ ID NO: 33139 - protein, 9 aa, synthetic construct
GIPGALKVK

SEQ ID NO: 33140 - protein, 9 aa, synthetic construct
PTNAAVHVR

SEQ ID NO: 33141 - protein, 9 aa, synthetic construct
GIPGAAHLR

SEQ ID NO: 33142 - protein, 9 aa, synthetic construct
GIPGAAHLK

SEQ ID NO: 33143 - protein, 9 aa, synthetic construct
GIPGAAHLF

SEQ ID NO: 33144 - protein, 9 aa, synthetic construct
GIPGAAHVR

SEQ ID NO: 33145 - protein, 9 aa, synthetic construct
GIPGAARLY

SEQ ID NO: 33146 - protein, 9 aa, synthetic construct
GIPGAARLH

SEQ ID NO: 33147 - protein, 9 aa, synthetic construct
GIPGAARVR

SEQ ID NO: 33148 - protein, 9 aa, synthetic construct
GIPGAARVF

SEQ ID NO: 33149 - protein, 9 aa, synthetic construct
PTNAAVHVK

SEQ ID NO: 33150 - protein, 9 aa, synthetic construct
GIPGAAKLY

SEQ ID NO: 33151 - protein, 9 aa, synthetic construct
GIPGAAKLR

SEQ ID NO: 33152 - protein, 9 aa, synthetic construct
GIPGAAKLH

SEQ ID NO: 33153 - protein, 9 aa, synthetic construct
GIPGAAKLF

SEQ ID NO: 33154 - protein, 9 aa, synthetic construct
GIPGAAKVY

SEQ ID NO: 33155 - protein, 9 aa, synthetic construct
GIPGAAKVR

SEQ ID NO: 33156 - protein, 9 aa, synthetic construct
GIPGAIHLR

SEQ ID NO: 33157 - protein, 9 aa, synthetic construct
GIPGAIHLH

SEQ ID NO: 33158 - protein, 9 aa, synthetic construct
GIPGAIHVY

SEQ ID NO: 33159 - protein, 9 aa, synthetic construct
PLNGVARVR

SEQ ID NO: 33160 - protein, 9 aa, synthetic construct
GIPGAIRLY

SEQ ID NO: 33161 - protein, 9 aa, synthetic construct
GIPGAIRLR

SEQ ID NO: 33162 - protein, 9 aa, synthetic construct
GIPGAIRLH

SEQ ID NO: 33163 - protein, 9 aa, synthetic construct
GIPGAIRLF

SEQ ID NO: 33164 - protein, 9 aa, synthetic construct
GIPGAIRVY

SEQ ID NO: 33165 - protein, 9 aa, synthetic construct
GIPGAIRVR

SEQ ID NO: 33166 - protein, 9 aa, synthetic construct
GIPGAIRVH

SEQ ID NO: 33167 - protein, 9 aa, synthetic construct
GIPGAIRVK

SEQ ID NO: 33168 - protein, 9 aa, synthetic construct
GIPGAIRVF

SEQ ID NO: 33169 - protein, 9 aa, synthetic construct
GIPGAIKLY

SEQ ID NO: 33170 - protein, 9 aa, synthetic construct
GIPGAIKLR

SEQ ID NO: 33171 - protein, 9 aa, synthetic construct
GIPGAIKLH

SEQ ID NO: 33172 - protein, 9 aa, synthetic construct
GIPGAIKLK

SEQ ID NO: 33173 - protein, 9 aa, synthetic construct
GIPGAIKVY

SEQ ID NO: 33174 - protein, 9 aa, synthetic construct
GIPGAIKVR

SEQ ID NO: 33175 - protein, 9 aa, synthetic construct
GIPGAIKVH

SEQ ID NO: 33176 - protein, 9 aa, synthetic construct
GIPGAIKVK

SEQ ID NO: 33177 - protein, 9 aa, synthetic construct
GIPGAIKVF

SEQ ID NO: 33178 - protein, 9 aa, synthetic construct
PTNAAVRLH

SEQ ID NO: 33179 - protein, 9 aa, synthetic construct
GIPGAGHLR

SEQ ID NO: 33180 - protein, 9 aa, synthetic construct
GIPGAGHLF

SEQ ID NO: 33181 - protein, 9 aa, synthetic construct
GIPGAGHVY

SEQ ID NO: 33182 - protein, 9 aa, synthetic construct
GIPGAGRLY

SEQ ID NO: 33183 - protein, 9 aa, synthetic construct
GIPGAGRLH

SEQ ID NO: 33184 - protein, 9 aa, synthetic construct
GIPGAGRVY

SEQ ID NO: 33185 - protein, 9 aa, synthetic construct
GIPGAGRVK

SEQ ID NO: 33186 - protein, 9 aa, synthetic construct
GIPGAGRVF

SEQ ID NO: 33187 - protein, 9 aa, synthetic construct
GIPGAGKLY

SEQ ID NO: 33188 - protein, 9 aa, synthetic construct
GIPGAGKVY

SEQ ID NO: 33189 - protein, 9 aa, synthetic construct
GIPGTVHLK

SEQ ID NO: 33190 - protein, 9 aa, synthetic construct
GIPGTVHLF

SEQ ID NO: 33191 - protein, 9 aa, synthetic construct
GIPGTVHVK

SEQ ID NO: 33192 - protein, 9 aa, synthetic construct
GIPGTVRLH

SEQ ID NO: 33193 - protein, 9 aa, synthetic construct
GIPGTVRLF

SEQ ID NO: 33194 - protein, 9 aa, synthetic construct
GIPGTVRVY

SEQ ID NO: 33195 - protein, 9 aa, synthetic construct
GIPGTVRVH

SEQ ID NO: 33196 - protein, 9 aa, synthetic construct
PTNAAVRVH

SEQ ID NO: 33197 - protein, 9 aa, synthetic construct
GIPGTVKVR

SEQ ID NO: 33198 - protein, 9 aa, synthetic construct
GIPGTVKVH

SEQ ID NO: 33199 - protein, 9 aa, synthetic construct
GIPGTLHLK

SEQ ID NO: 33200 - protein, 9 aa, synthetic construct
GIPGTLHVY

SEQ ID NO: 33201 - protein, 9 aa, synthetic construct
GIPGTLHVR

SEQ ID NO: 33202 - protein, 9 aa, synthetic construct
GIPGTLHVK

SEQ ID NO: 33203 - protein, 9 aa, synthetic construct
GIPGTLHVF

SEQ ID NO: 33204 - protein, 9 aa, synthetic construct
PTNAAVRVF

SEQ ID NO: 33205 - protein, 9 aa, synthetic construct
GIPGTLRLY

SEQ ID NO: 33206 - protein, 9 aa, synthetic construct
GIPGTLRLF

SEQ ID NO: 33207 - protein, 9 aa, synthetic construct
GIPGTLRVY

SEQ ID NO: 33208 - protein, 9 aa, synthetic construct
GIPGTLRVK

SEQ ID NO: 33209 - protein, 9 aa, synthetic construct
GIPGTLKLR

SEQ ID NO: 33210 - protein, 9 aa, synthetic construct
GIPGTLKLF

SEQ ID NO: 33211 - protein, 9 aa, synthetic construct
GIPGTLKVY

SEQ ID NO: 33212 - protein, 9 aa, synthetic construct
GIPGTLKVH

SEQ ID NO: 33213 - protein, 9 aa, synthetic construct
PTNAAVKLR

SEQ ID NO: 33214 - protein, 9 aa, synthetic construct
GIPGTAHVR

SEQ ID NO: 33215 - protein, 9 aa, synthetic construct
GIPGTARLF

SEQ ID NO: 33216 - protein, 9 aa, synthetic construct
GIPGTARVH

SEQ ID NO: 33217 - protein, 9 aa, synthetic construct
GIPGTAKLR

SEQ ID NO: 33218 - protein, 9 aa, synthetic construct
GIPGTAKLF

SEQ ID NO: 33219 - protein, 9 aa, synthetic construct
GIPGTAKVY

SEQ ID NO: 33220 - protein, 9 aa, synthetic construct
GIPGTIHLY

SEQ ID NO: 33221 - protein, 9 aa, synthetic construct
GIPGTIHLR

SEQ ID NO: 33222 - protein, 9 aa, synthetic construct
GIPGTIHLK

SEQ ID NO: 33223 - protein, 9 aa, synthetic construct
GIPGTIHLF

SEQ ID NO: 33224 - protein, 9 aa, synthetic construct
GIPGTIHVY

SEQ ID NO: 33225 - protein, 9 aa, synthetic construct
GIPGTIHVF

SEQ ID NO: 33226 - protein, 9 aa, synthetic construct
GIPGTIRLY

SEQ ID NO: 33227 - protein, 9 aa, synthetic construct
GIPGTIRLR

SEQ ID NO: 33228 - protein, 9 aa, synthetic construct
GIPGTIRLF

SEQ ID NO: 33229 - protein, 9 aa, synthetic construct
GIPGTIRVY

SEQ ID NO: 33230 - protein, 9 aa, synthetic construct
GIPGTIRVR

SEQ ID NO: 33231 - protein, 9 aa, synthetic construct
GIPGTIRVH

SEQ ID NO: 33232 - protein, 9 aa, synthetic construct
GIPGTIRVK

SEQ ID NO: 33233 - protein, 9 aa, synthetic construct
GIPGTIRVF

SEQ ID NO: 33234 - protein, 9 aa, synthetic construct
GIPGTIKLH

SEQ ID NO: 33235 - protein, 9 aa, synthetic construct
GIPGTIKLK

SEQ ID NO: 33236 - protein, 9 aa, synthetic construct
GIPGTIKVY

SEQ ID NO: 33237 - protein, 9 aa, synthetic construct
GIPGTIKVH

SEQ ID NO: 33238 - protein, 9 aa, synthetic construct
GIPGTIKVF

SEQ ID NO: 33239 - protein, 9 aa, synthetic construct
GIPGTGHLY

SEQ ID NO: 33240 - protein, 9 aa, synthetic construct
GIPGTGHLR

SEQ ID NO: 33241 - protein, 9 aa, synthetic construct
GIPGTGHLF

SEQ ID NO: 33242 - protein, 9 aa, synthetic construct
GIPGTGHVY

SEQ ID NO: 33243 - protein, 9 aa, synthetic construct
GIPGTGHVH

SEQ ID NO: 33244 - protein, 9 aa, synthetic construct
GIPGTGRLY

SEQ ID NO: 33245 - protein, 9 aa, synthetic construct
GIPGTGRLH

SEQ ID NO: 33246 - protein, 9 aa, synthetic construct
GIPGTGRLK

SEQ ID NO: 33247 - protein, 9 aa, synthetic construct
GIPGTGRLF

SEQ ID NO: 33248 - protein, 9 aa, synthetic construct
GIPGTGRVY

SEQ ID NO: 33249 - protein, 9 aa, synthetic construct
GIPGTGRVR

SEQ ID NO: 33250 - protein, 9 aa, synthetic construct
GIPGTGRVH

SEQ ID NO: 33251 - protein, 9 aa, synthetic construct
GIPGTGRVF

SEQ ID NO: 33252 - protein, 9 aa, synthetic construct
GIPGTGKLR

SEQ ID NO: 33253 - protein, 9 aa, synthetic construct
GIPGTGKLH

SEQ ID NO: 33254 - protein, 9 aa, synthetic construct
GIPGTGKLK

SEQ ID NO: 33255 - protein, 9 aa, synthetic construct
GIPGTGKVR

SEQ ID NO: 33256 - protein, 9 aa, synthetic construct
GIPGTGKVH

SEQ ID NO: 33257 - protein, 9 aa, synthetic construct
GIPGTGKVK

SEQ ID NO: 33258 - protein, 9 aa, synthetic construct
GIPGSVHLY

SEQ ID NO: 33259 - protein, 9 aa, synthetic construct
GIPGSVHLR

SEQ ID NO: 33260 - protein, 9 aa, synthetic construct
GIPGSVHLH

SEQ ID NO: 33261 - protein, 9 aa, synthetic construct
GIPGSVHLK

SEQ ID NO: 33262 - protein, 9 aa, synthetic construct
GIPGSVHVY

SEQ ID NO: 33263 - protein, 9 aa, synthetic construct
GIPGSVHVF

SEQ ID NO: 33264 - protein, 9 aa, synthetic construct
GIPGSVRLY

SEQ ID NO: 33265 - protein, 9 aa, synthetic construct
GIPGSVRVR

SEQ ID NO: 33266 - protein, 9 aa, synthetic construct
GIPGSVKLY

SEQ ID NO: 33267 - protein, 9 aa, synthetic construct
GIPGSVKLH

SEQ ID NO: 33268 - protein, 9 aa, synthetic construct
PTNAALHLK

SEQ ID NO: 33269 - protein, 9 aa, synthetic construct
GIPGSLHLY

SEQ ID NO: 33270 - protein, 9 aa, synthetic construct
GIPGSLHLR

SEQ ID NO: 33271 - protein, 9 aa, synthetic construct
GIPGSLHLH

SEQ ID NO: 33272 - protein, 9 aa, synthetic construct
GIPGSLHLK

SEQ ID NO: 33273 - protein, 9 aa, synthetic construct
GIPGSLHLF

SEQ ID NO: 33274 - protein, 9 aa, synthetic construct
GIPGSLHVY

SEQ ID NO: 33275 - protein, 9 aa, synthetic construct
GIPGSLHVR

SEQ ID NO: 33276 - protein, 9 aa, synthetic construct
GIPGSLHVH

SEQ ID NO: 33277 - protein, 9 aa, synthetic construct
GIPGSLHVK

SEQ ID NO: 33278 - protein, 9 aa, synthetic construct
GIPGSLHVF

SEQ ID NO: 33279 - protein, 9 aa, synthetic construct
GIPGSLRLY

SEQ ID NO: 33280 - protein, 9 aa, synthetic construct
GIPGSLRLH

SEQ ID NO: 33281 - protein, 9 aa, synthetic construct
GIPGSLRLF

SEQ ID NO: 33282 - protein, 9 aa, synthetic construct
GIPGSLRVY

SEQ ID NO: 33283 - protein, 9 aa, synthetic construct
GIPGSLRVH

SEQ ID NO: 33284 - protein, 9 aa, synthetic construct
GIPGSLRVK

SEQ ID NO: 33285 - protein, 9 aa, synthetic construct
GIPGSLRVF

SEQ ID NO: 33286 - protein, 9 aa, synthetic construct
PTNAALHVY

SEQ ID NO: 33287 - protein, 9 aa, synthetic construct
GIPGSLKLY

SEQ ID NO: 33288 - protein, 9 aa, synthetic construct
GIPGSLKLR

SEQ ID NO: 33289 - protein, 9 aa, synthetic construct
GIPGSLKLH

SEQ ID NO: 33290 - protein, 9 aa, synthetic construct
GIPGSLKLK

SEQ ID NO: 33291 - protein, 9 aa, synthetic construct
GIPGSLKLF

SEQ ID NO: 33292 - protein, 9 aa, synthetic construct
GIPGSLKVY

SEQ ID NO: 33293 - protein, 9 aa, synthetic construct
GIPGSLKVH

SEQ ID NO: 33294 - protein, 9 aa, synthetic construct
PTNAALHVR

SEQ ID NO: 33295 - protein, 9 aa, synthetic construct
GIPGSAHLR

SEQ ID NO: 33296 - protein, 9 aa, synthetic construct
GIPGSAHLF

SEQ ID NO: 33297 - protein, 9 aa, synthetic construct
GIPGSAHVY

SEQ ID NO: 33298 - protein, 9 aa, synthetic construct
GIPGSAHVK

SEQ ID NO: 33299 - protein, 9 aa, synthetic construct
GIPGSAHVF

SEQ ID NO: 33300 - protein, 9 aa, synthetic construct
PTNAALHVH

SEQ ID NO: 33301 - protein, 9 aa, synthetic construct
GIPGSARLH

SEQ ID NO: 33302 - protein, 9 aa, synthetic construct
GIPGSARLF

SEQ ID NO: 33303 - protein, 9 aa, synthetic construct
GIPGSARVF

SEQ ID NO: 33304 - protein, 9 aa, synthetic construct
PTNAALHVK

SEQ ID NO: 33305 - protein, 9 aa, synthetic construct
GIPGSAKLY

SEQ ID NO: 33306 - protein, 9 aa, synthetic construct
GIPGSAKLH

SEQ ID NO: 33307 - protein, 9 aa, synthetic construct
GIPGSAKVY

SEQ ID NO: 33308 - protein, 9 aa, synthetic construct
GIPGSAKVR

SEQ ID NO: 33309 - protein, 9 aa, synthetic construct
GIPGSAKVH

SEQ ID NO: 33310 - protein, 9 aa, synthetic construct
PTNAALHVF

SEQ ID NO: 33311 - protein, 9 aa, synthetic construct
GIPGSIHLY

SEQ ID NO: 33312 - protein, 9 aa, synthetic construct
GIPGSIHLR

SEQ ID NO: 33313 - protein, 9 aa, synthetic construct
GIPGSIHLH

SEQ ID NO: 33314 - protein, 9 aa, synthetic construct
GIPGSIHLK

SEQ ID NO: 33315 - protein, 9 aa, synthetic construct
GIPGSIHVR

SEQ ID NO: 33316 - protein, 9 aa, synthetic construct
GIPGSIHVH

SEQ ID NO: 33317 - protein, 9 aa, synthetic construct
GIPGSIHVK

SEQ ID NO: 33318 - protein, 9 aa, synthetic construct
GIPGSIHVF

SEQ ID NO: 33319 - protein, 9 aa, synthetic construct
GIPGSIRLH

SEQ ID NO: 33320 - protein, 9 aa, synthetic construct
GIPGSIRLF

SEQ ID NO: 33321 - protein, 9 aa, synthetic construct
GIPGSIRVF

SEQ ID NO: 33322 - protein, 9 aa, synthetic construct
GIPGSIKLY

SEQ ID NO: 33323 - protein, 9 aa, synthetic construct
GIPGSIKLK

SEQ ID NO: 33324 - protein, 9 aa, synthetic construct
GIPGSIKVY

SEQ ID NO: 33325 - protein, 9 aa, synthetic construct
GIPGSIKVR

SEQ ID NO: 33326 - protein, 9 aa, synthetic construct
GIPGSIKVH

SEQ ID NO: 33327 - protein, 9 aa, synthetic construct
PTNAALRLH

SEQ ID NO: 33328 - protein, 9 aa, synthetic construct
GIPGSGHLR

SEQ ID NO: 33329 - protein, 9 aa, synthetic construct
GIPGSGHLK

SEQ ID NO: 33330 - protein, 9 aa, synthetic construct
GIPGSGHLF

SEQ ID NO: 33331 - protein, 9 aa, synthetic construct
GIPGSGHVY

SEQ ID NO: 33332 - protein, 9 aa, synthetic construct
GIPGSGHVR

SEQ ID NO: 33333 - protein, 9 aa, synthetic construct
GIPGSGHVK

SEQ ID NO: 33334 - protein, 9 aa, synthetic construct
GIPGSGRLR

SEQ ID NO: 33335 - protein, 9 aa, synthetic construct
GIPGSGRLK

SEQ ID NO: 33336 - protein, 9 aa, synthetic construct
GIPGSGRLF

SEQ ID NO: 33337 - protein, 9 aa, synthetic construct
GIPGSGRVY

SEQ ID NO: 33338 - protein, 9 aa, synthetic construct
GIPGSGRVH

SEQ ID NO: 33339 - protein, 9 aa, synthetic construct
GIPGSGRVF

SEQ ID NO: 33340 - protein, 9 aa, synthetic construct
PTNAALRLF

SEQ ID NO: 33341 - protein, 9 aa, synthetic construct
GIPGSGKLY

SEQ ID NO: 33342 - protein, 9 aa, synthetic construct
GIPGSGKLH

SEQ ID NO: 33343 - protein, 9 aa, synthetic construct
GIPGSGKLF

SEQ ID NO: 33344 - protein, 9 aa, synthetic construct
GIPGSGKVY

SEQ ID NO: 33345 - protein, 9 aa, synthetic construct
GIPGSGKVH

SEQ ID NO: 33346 - protein, 9 aa, synthetic construct
PTNAALRVY

SEQ ID NO: 33347 - protein, 9 aa, synthetic construct
PTNAALRVR

SEQ ID NO: 33348 - protein, 9 aa, synthetic construct
GIPGVVRVY

SEQ ID NO: 33349 - protein, 9 aa, synthetic construct
GIPGVVRVF

SEQ ID NO: 33350 - protein, 9 aa, synthetic construct
PTNAALRVH

SEQ ID NO: 33351 - protein, 9 aa, synthetic construct
GIPGVVKVK

SEQ ID NO: 33352 - protein, 9 aa, synthetic construct
PTNAALRVK

SEQ ID NO: 33353 - protein, 9 aa, synthetic construct
GIPGVLHLH

SEQ ID NO: 33354 - protein, 9 aa, synthetic construct
GIPGVLHVR

SEQ ID NO: 33355 - protein, 9 aa, synthetic construct
PTNAALRVF

SEQ ID NO: 33356 - protein, 9 aa, synthetic construct
GIPGVLRLK

SEQ ID NO: 33357 - protein, 9 aa, synthetic construct
GIPGVLRVR

SEQ ID NO: 33358 - protein, 9 aa, synthetic construct
GIPGVLRVH

SEQ ID NO: 33359 - protein, 9 aa, synthetic construct
PTNAALKLY

SEQ ID NO: 33360 - protein, 9 aa, synthetic construct
GIPGVLKLR

SEQ ID NO: 33361 - protein, 9 aa, synthetic construct
GIPGVLKVY

SEQ ID NO: 33362 - protein, 9 aa, synthetic construct
GIPGVLKVF

SEQ ID NO: 33363 - protein, 9 aa, synthetic construct
PTNAALKLR

SEQ ID NO: 33364 - protein, 9 aa, synthetic construct
GIPGVAHLR

SEQ ID NO: 33365 - protein, 9 aa, synthetic construct
GIPGVAHVR

SEQ ID NO: 33366 - protein, 9 aa, synthetic construct
GIPGVAHVF

SEQ ID NO: 33367 - protein, 9 aa, synthetic construct
PTNAALKLH

SEQ ID NO: 33368 - protein, 9 aa, synthetic construct
GIPGVARLY

SEQ ID NO: 33369 - protein, 9 aa, synthetic construct
GIPGVARLR

SEQ ID NO: 33370 - protein, 9 aa, synthetic construct
GIPGVARLH

SEQ ID NO: 33371 - protein, 9 aa, synthetic construct
GIPGVARLF

SEQ ID NO: 33372 - protein, 9 aa, synthetic construct
GIPGVARVH

SEQ ID NO: 33373 - protein, 9 aa, synthetic construct
GIPGVARVF

SEQ ID NO: 33374 - protein, 9 aa, synthetic construct
GIPGVAKVY

SEQ ID NO: 33375 - protein, 9 aa, synthetic construct
GIPGVAKVR

SEQ ID NO: 33376 - protein, 9 aa, synthetic construct
PTNAALKLF

SEQ ID NO: 33377 - protein, 9 aa, synthetic construct
GIPGVIHLR

SEQ ID NO: 33378 - protein, 9 aa, synthetic construct
GIPGVIHLH

SEQ ID NO: 33379 - protein, 9 aa, synthetic construct
GIPGVIHVR

SEQ ID NO: 33380 - protein, 9 aa, synthetic construct
GIPGVIHVF

SEQ ID NO: 33381 - protein, 9 aa, synthetic construct
GIPGVIRLY

SEQ ID NO: 33382 - protein, 9 aa, synthetic construct
GIPGVIRLR

SEQ ID NO: 33383 - protein, 9 aa, synthetic construct
GIPGVIRLH

SEQ ID NO: 33384 - protein, 9 aa, synthetic construct
GIPGVIRVY

SEQ ID NO: 33385 - protein, 9 aa, synthetic construct
GIPGVIRVH

SEQ ID NO: 33386 - protein, 9 aa, synthetic construct
GIPGVIRVF

SEQ ID NO: 33387 - protein, 9 aa, synthetic construct
PTNAALKVR

SEQ ID NO: 33388 - protein, 9 aa, synthetic construct
GIPGVIKLY

SEQ ID NO: 33389 - protein, 9 aa, synthetic construct
GIPGVIKLF

SEQ ID NO: 33390 - protein, 9 aa, synthetic construct
GIPGVIKVY

SEQ ID NO: 33391 - protein, 9 aa, synthetic construct
GIPGVIKVH

SEQ ID NO: 33392 - protein, 9 aa, synthetic construct
GIPGVIKVF

SEQ ID NO: 33393 - protein, 9 aa, synthetic construct
PTNAALKVH

SEQ ID NO: 33394 - protein, 9 aa, synthetic construct
GIPGVGHLR

SEQ ID NO: 33395 - protein, 9 aa, synthetic construct
GIPGVGHVK

SEQ ID NO: 33396 - protein, 9 aa, synthetic construct
GIPGVGHVF

SEQ ID NO: 33397 - protein, 9 aa, synthetic construct
PTNAALKVK

SEQ ID NO: 33398 - protein, 9 aa, synthetic construct
GIPGVGRLY

SEQ ID NO: 33399 - protein, 9 aa, synthetic construct
GIPGVGRLF

SEQ ID NO: 33400 - protein, 9 aa, synthetic construct
GIPGVGRVK

SEQ ID NO: 33401 - protein, 9 aa, synthetic construct
GIPGVGRVF

SEQ ID NO: 33402 - protein, 9 aa, synthetic construct
PTNAALKVF

SEQ ID NO: 33403 - protein, 9 aa, synthetic construct
GIPGVGKLY

SEQ ID NO: 33404 - protein, 9 aa, synthetic construct
GIPGVGKLF

SEQ ID NO: 33405 - protein, 9 aa, synthetic construct
GIPGVGKVR

SEQ ID NO: 33406 - protein, 9 aa, synthetic construct
GIPGVGKVH

SEQ ID NO: 33407 - protein, 9 aa, synthetic construct
GIPGVGKVF

SEQ ID NO: 33408 - protein, 9 aa, synthetic construct
GIPGGVHLR

SEQ ID NO: 33409 - protein, 9 aa, synthetic construct
GIPGGVHLH

SEQ ID NO: 33410 - protein, 9 aa, synthetic construct
GIPGGVHLK

SEQ ID NO: 33411 - protein, 9 aa, synthetic construct
GIPGGVHLF

SEQ ID NO: 33412 - protein, 9 aa, synthetic construct
GIPGGVRLR

SEQ ID NO: 33413 - protein, 9 aa, synthetic construct
GIPGGVRLH

SEQ ID NO: 33414 - protein, 9 aa, synthetic construct
GIPGGVRLK

SEQ ID NO: 33415 - protein, 9 aa, synthetic construct
GIPGGVRLF

SEQ ID NO: 33416 - protein, 9 aa, synthetic construct
GIPGGVRVR

SEQ ID NO: 33417 - protein, 9 aa, synthetic construct
GIPGGVRVK

SEQ ID NO: 33418 - protein, 9 aa, synthetic construct
GIPGGVRVF

SEQ ID NO: 33419 - protein, 9 aa, synthetic construct
GIPGGLHLY

SEQ ID NO: 33420 - protein, 9 aa, synthetic construct
GIPGGLHLH

SEQ ID NO: 33421 - protein, 9 aa, synthetic construct
GIPGGLHLF

SEQ ID NO: 33422 - protein, 9 aa, synthetic construct
GIPGGLHVY

SEQ ID NO: 33423 - protein, 9 aa, synthetic construct
GIPGGLHVR

SEQ ID NO: 33424 - protein, 9 aa, synthetic construct
GIPGGLHVK

SEQ ID NO: 33425 - protein, 9 aa, synthetic construct
GIPGGLHVF

SEQ ID NO: 33426 - protein, 9 aa, synthetic construct
PTNAAAHLF

SEQ ID NO: 33427 - protein, 9 aa, synthetic construct
GIPGGLRLY

SEQ ID NO: 33428 - protein, 9 aa, synthetic construct
GIPGGLRVY

SEQ ID NO: 33429 - protein, 9 aa, synthetic construct
GIPGGLKLH

SEQ ID NO: 33430 - protein, 9 aa, synthetic construct
GIPGGLKVH

SEQ ID NO: 33431 - protein, 9 aa, synthetic construct
GIPGGAHLY

SEQ ID NO: 33432 - protein, 9 aa, synthetic construct
GIPGGAHLR

SEQ ID NO: 33433 - protein, 9 aa, synthetic construct
GIPGGAHLH

SEQ ID NO: 33434 - protein, 9 aa, synthetic construct
GIPGGAHLF

SEQ ID NO: 33435 - protein, 9 aa, synthetic construct
GIPGGAHVY

SEQ ID NO: 33436 - protein, 9 aa, synthetic construct
GIPGGAHVH

SEQ ID NO: 33437 - protein, 9 aa, synthetic construct
GIPGGAHVK

SEQ ID NO: 33438 - protein, 9 aa, synthetic construct
GIPGGARLR

SEQ ID NO: 33439 - protein, 9 aa, synthetic construct
GIPGGARLH

SEQ ID NO: 33440 - protein, 9 aa, synthetic construct
GIPGGARLF

SEQ ID NO: 33441 - protein, 9 aa, synthetic construct
GIPGGARVR

SEQ ID NO: 33442 - protein, 9 aa, synthetic construct
GIPGGARVH

SEQ ID NO: 33443 - protein, 9 aa, synthetic construct
GIPGGARVF

SEQ ID NO: 33444 - protein, 9 aa, synthetic construct
GIPGGAKLY

SEQ ID NO: 33445 - protein, 9 aa, synthetic construct
GIPGGAKLR

SEQ ID NO: 33446 - protein, 9 aa, synthetic construct
GIPGGAKLH

SEQ ID NO: 33447 - protein, 9 aa, synthetic construct
GIPGGAKVY

SEQ ID NO: 33448 - protein, 9 aa, synthetic construct
GIPGGIHLY

SEQ ID NO: 33449 - protein, 9 aa, synthetic construct
GIPGGIHLH

SEQ ID NO: 33450 - protein, 9 aa, synthetic construct
GIPGGIHLK

SEQ ID NO: 33451 - protein, 9 aa, synthetic construct
GIPGGIHLF

SEQ ID NO: 33452 - protein, 9 aa, synthetic construct
GIPGGIHVY

SEQ ID NO: 33453 - protein, 9 aa, synthetic construct
GIPGGIHVR

SEQ ID NO: 33454 - protein, 9 aa, synthetic construct
GIPGGIHVF

SEQ ID NO: 33455 - protein, 9 aa, synthetic construct
GIPGGIRLY

SEQ ID NO: 33456 - protein, 9 aa, synthetic construct
GIPGGIRLH

SEQ ID NO: 33457 - protein, 9 aa, synthetic construct
GIPGGIRVY

SEQ ID NO: 33458 - protein, 9 aa, synthetic construct
GIPGGIRVH

SEQ ID NO: 33459 - protein, 9 aa, synthetic construct
GIPGGIKLY

SEQ ID NO: 33460 - protein, 9 aa, synthetic construct
GIPGGIKLR

SEQ ID NO: 33461 - protein, 9 aa, synthetic construct
GIPGGIKLF

SEQ ID NO: 33462 - protein, 9 aa, synthetic construct
GIPGGIKVH

SEQ ID NO: 33463 - protein, 9 aa, synthetic construct
GIPGGIKVF

SEQ ID NO: 33464 - protein, 9 aa, synthetic construct
GIPGGGHLY

SEQ ID NO: 33465 - protein, 9 aa, synthetic construct
GIPGGGHLR

SEQ ID NO: 33466 - protein, 9 aa, synthetic construct
GIPGGGHLK

SEQ ID NO: 33467 - protein, 9 aa, synthetic construct
GIPGGGHLF

SEQ ID NO: 33468 - protein, 9 aa, synthetic construct
GIPGGGHVY

SEQ ID NO: 33469 - protein, 9 aa, synthetic construct
GIPGGGHVR

SEQ ID NO: 33470 - protein, 9 aa, synthetic construct
GIPGGGHVH

SEQ ID NO: 33471 - protein, 9 aa, synthetic construct
GIPGGGHVK

SEQ ID NO: 33472 - protein, 9 aa, synthetic construct
GIPGGGHVF

SEQ ID NO: 33473 - protein, 9 aa, synthetic construct
GIPGGGRLY

SEQ ID NO: 33474 - protein, 9 aa, synthetic construct
GIPGGGRLR

SEQ ID NO: 33475 - protein, 9 aa, synthetic construct
GIPGGGRLH

SEQ ID NO: 33476 - protein, 9 aa, synthetic construct
GIPGGGRLK

SEQ ID NO: 33477 - protein, 9 aa, synthetic construct
GIPGGGRVR

SEQ ID NO: 33478 - protein, 9 aa, synthetic construct
GIPGGGRVH

SEQ ID NO: 33479 - protein, 9 aa, synthetic construct
GIPGGGRVK

SEQ ID NO: 33480 - protein, 9 aa, synthetic construct
GIPGGGRVF

SEQ ID NO: 33481 - protein, 9 aa, synthetic construct
GIPGGGKLY

SEQ ID NO: 33482 - protein, 9 aa, synthetic construct
GIPGGGKLR

SEQ ID NO: 33483 - protein, 9 aa, synthetic construct
GIPGGGKLK

SEQ ID NO: 33484 - protein, 9 aa, synthetic construct
GIPGGGKLF

SEQ ID NO: 33485 - protein, 9 aa, synthetic construct
GIPGGGKVY

SEQ ID NO: 33486 - protein, 9 aa, synthetic construct
GIPGGGKVR

SEQ ID NO: 33487 - protein, 9 aa, synthetic construct
GIPGGGKVH

SEQ ID NO: 33488 - protein, 9 aa, synthetic construct
GIPGGGKVK

SEQ ID NO: 33489 - protein, 9 aa, synthetic construct
GIPAAVHVY

SEQ ID NO: 33490 - protein, 9 aa, synthetic construct
GIPAAVHVF

SEQ ID NO: 33491 - protein, 9 aa, synthetic construct
PTNAAARVR

SEQ ID NO: 33492 - protein, 9 aa, synthetic construct
GIPAAVRLH

SEQ ID NO: 33493 - protein, 9 aa, synthetic construct
GIPAAVRVF

SEQ ID NO: 33494 - protein, 9 aa, synthetic construct
PTNAAARVH

SEQ ID NO: 33495 - protein, 9 aa, synthetic construct
GIPAAVKLY

SEQ ID NO: 33496 - protein, 9 aa, synthetic construct
GIPAAVKLH

SEQ ID NO: 33497 - protein, 9 aa, synthetic construct
GIPAAVKVH

SEQ ID NO: 33498 - protein, 9 aa, synthetic construct
GIPAAVKVK

SEQ ID NO: 33499 - protein, 9 aa, synthetic construct
GIPAALHLH

SEQ ID NO: 33500 - protein, 9 aa, synthetic construct
GIPAALHVY

SEQ ID NO: 33501 - protein, 9 aa, synthetic construct
GIPAALHVR

SEQ ID NO: 33502 - protein, 9 aa, synthetic construct
GIPAALHVH

SEQ ID NO: 33503 - protein, 9 aa, synthetic construct
GIPAALHVF

SEQ ID NO: 33504 - protein, 9 aa, synthetic construct
GIPAALRLH

SEQ ID NO: 33505 - protein, 9 aa, synthetic construct
GIPAALRVK

SEQ ID NO: 33506 - protein, 9 aa, synthetic construct
GIPAALKLY

SEQ ID NO: 33507 - protein, 9 aa, synthetic construct
GIPAALKLH

SEQ ID NO: 33508 - protein, 9 aa, synthetic construct
GIPAALKVY

SEQ ID NO: 33509 - protein, 9 aa, synthetic construct
GIPAALKVF

SEQ ID NO: 33510 - protein, 9 aa, synthetic construct
GIPAAAHLK

SEQ ID NO: 33511 - protein, 9 aa, synthetic construct
GIPAAAHLF

SEQ ID NO: 33512 - protein, 9 aa, synthetic construct
GIPAAAHVR

SEQ ID NO: 33513 - protein, 9 aa, synthetic construct
GIPAAARLY

SEQ ID NO: 33514 - protein, 9 aa, synthetic construct
GIPAAARLR

SEQ ID NO: 33515 - protein, 9 aa, synthetic construct
GIPAAARLF

SEQ ID NO: 33516 - protein, 9 aa, synthetic construct
GIPAAARVY

SEQ ID NO: 33517 - protein, 9 aa, synthetic construct
GIPAAARVR

SEQ ID NO: 33518 - protein, 9 aa, synthetic construct
GIPAAARVH

SEQ ID NO: 33519 - protein, 9 aa, synthetic construct
GIPAAARVK

SEQ ID NO: 33520 - protein, 9 aa, synthetic construct
GIPAAAKLR

SEQ ID NO: 33521 - protein, 9 aa, synthetic construct
GIPAAAKLF

SEQ ID NO: 33522 - protein, 9 aa, synthetic construct
GIPAAAKVR

SEQ ID NO: 33523 - protein, 9 aa, synthetic construct
GIPAAAKVH

SEQ ID NO: 33524 - protein, 9 aa, synthetic construct
GIPAAAKVK

SEQ ID NO: 33525 - protein, 9 aa, synthetic construct
GIPAAIRLF

SEQ ID NO: 33526 - protein, 9 aa, synthetic construct
GIPAAIKLH

SEQ ID NO: 33527 - protein, 9 aa, synthetic construct
GIPAAIKLK

SEQ ID NO: 33528 - protein, 9 aa, synthetic construct
PTNAAAKVH

SEQ ID NO: 33529 - protein, 9 aa, synthetic construct
GIPAAGHLR

SEQ ID NO: 33530 - protein, 9 aa, synthetic construct
GIPAAGHVY

SEQ ID NO: 33531 - protein, 9 aa, synthetic construct
GIPAAGHVK

SEQ ID NO: 33532 - protein, 9 aa, synthetic construct
GIPAAGHVF

SEQ ID NO: 33533 - protein, 9 aa, synthetic construct
PTNAAAKVK

SEQ ID NO: 33534 - protein, 9 aa, synthetic construct
GIPAAGRLY

SEQ ID NO: 33535 - protein, 9 aa, synthetic construct
GIPAAGRLF

SEQ ID NO: 33536 - protein, 9 aa, synthetic construct
GIPAAGRVY

SEQ ID NO: 33537 - protein, 9 aa, synthetic construct
GIPAAGRVF

SEQ ID NO: 33538 - protein, 9 aa, synthetic construct
GIPAAGKLY

SEQ ID NO: 33539 - protein, 9 aa, synthetic construct
GIPAAGKLF

SEQ ID NO: 33540 - protein, 9 aa, synthetic construct
PLNGVAKLF

SEQ ID NO: 33541 - protein, 9 aa, synthetic construct
PTNAAIHLY

SEQ ID NO: 33542 - protein, 9 aa, synthetic construct
GIPATVHLY

SEQ ID NO: 33543 - protein, 9 aa, synthetic construct
GIPATVHLR

SEQ ID NO: 33544 - protein, 9 aa, synthetic construct
GIPATVHLH

SEQ ID NO: 33545 - protein, 9 aa, synthetic construct
GIPATVHLF

SEQ ID NO: 33546 - protein, 9 aa, synthetic construct
GIPATVHVR

SEQ ID NO: 33547 - protein, 9 aa, synthetic construct
GIPATVHVH

SEQ ID NO: 33548 - protein, 9 aa, synthetic construct
GIPATVHVF

SEQ ID NO: 33549 - protein, 9 aa, synthetic construct
GIPATVRLH

SEQ ID NO: 33550 - protein, 9 aa, synthetic construct
GIPATVRLF

SEQ ID NO: 33551 - protein, 9 aa, synthetic construct
GIPATVRVY

SEQ ID NO: 33552 - protein, 9 aa, synthetic construct
PTNAAIHLH

SEQ ID NO: 33553 - protein, 9 aa, synthetic construct
GIPATVKLY

SEQ ID NO: 33554 - protein, 9 aa, synthetic construct
GIPATVKLR

SEQ ID NO: 33555 - protein, 9 aa, synthetic construct
GIPATVKLH

SEQ ID NO: 33556 - protein, 9 aa, synthetic construct
GIPATVKLF

SEQ ID NO: 33557 - protein, 9 aa, synthetic construct
GIPATVKVY

SEQ ID NO: 33558 - protein, 9 aa, synthetic construct
GIPATVKVH

SEQ ID NO: 33559 - protein, 9 aa, synthetic construct
GIPATVKVF

SEQ ID NO: 33560 - protein, 9 aa, synthetic construct
PTNAAIHLK

SEQ ID NO: 33561 - protein, 9 aa, synthetic construct
GIPATLHLH

SEQ ID NO: 33562 - protein, 9 aa, synthetic construct
GIPATLHLK

SEQ ID NO: 33563 - protein, 9 aa, synthetic construct
GIPATLHVR

SEQ ID NO: 33564 - protein, 9 aa, synthetic construct
GIPATLHVH

SEQ ID NO: 33565 - protein, 9 aa, synthetic construct
GIPATLRLK

SEQ ID NO: 33566 - protein, 9 aa, synthetic construct
GIPATLKLY

SEQ ID NO: 33567 - protein, 9 aa, synthetic construct
GIPATLKLH

SEQ ID NO: 33568 - protein, 9 aa, synthetic construct
GIPATLKLF

SEQ ID NO: 33569 - protein, 9 aa, synthetic construct
GIPATLKVH

SEQ ID NO: 33570 - protein, 9 aa, synthetic construct
PTNAAIHVR

SEQ ID NO: 33571 - protein, 9 aa, synthetic construct
GIPATAHLR

SEQ ID NO: 33572 - protein, 9 aa, synthetic construct
GIPATAHLF

SEQ ID NO: 33573 - protein, 9 aa, synthetic construct
GIPATAHVY

SEQ ID NO: 33574 - protein, 9 aa, synthetic construct
GIPATAHVR

SEQ ID NO: 33575 - protein, 9 aa, synthetic construct
GIPATAHVK

SEQ ID NO: 33576 - protein, 9 aa, synthetic construct
GIPATARLY

SEQ ID NO: 33577 - protein, 9 aa, synthetic construct
GIPATARLH

SEQ ID NO: 33578 - protein, 9 aa, synthetic construct
GIPATARVR

SEQ ID NO: 33579 - protein, 9 aa, synthetic construct
GIPATAKLY

SEQ ID NO: 33580 - protein, 9 aa, synthetic construct
GIPATAKLF

SEQ ID NO: 33581 - protein, 9 aa, synthetic construct
GIPATAKVR

SEQ ID NO: 33582 - protein, 9 aa, synthetic construct
GIPATAKVH

SEQ ID NO: 33583 - protein, 9 aa, synthetic construct
GIPATAKVK

SEQ ID NO: 33584 - protein, 9 aa, synthetic construct
PTNAAIHVF

SEQ ID NO: 33585 - protein, 9 aa, synthetic construct
GIPATIHLY

SEQ ID NO: 33586 - protein, 9 aa, synthetic construct
GIPATIHLR

SEQ ID NO: 33587 - protein, 9 aa, synthetic construct
GIPATIHVY

SEQ ID NO: 33588 - protein, 9 aa, synthetic construct
GIPATIHVF

SEQ ID NO: 33589 - protein, 9 aa, synthetic construct
PTNAAIRLY

SEQ ID NO: 33590 - protein, 9 aa, synthetic construct
GIPATIRLY

SEQ ID NO: 33591 - protein, 9 aa, synthetic construct
GIPATIRLH

SEQ ID NO: 33592 - protein, 9 aa, synthetic construct
GIPATIRLK

SEQ ID NO: 33593 - protein, 9 aa, synthetic construct
GIPATIRLF

SEQ ID NO: 33594 - protein, 9 aa, synthetic construct
GIPATIRVF

SEQ ID NO: 33595 - protein, 9 aa, synthetic construct
GIPATIKLY

SEQ ID NO: 33596 - protein, 9 aa, synthetic construct
GIPATIKLR

SEQ ID NO: 33597 - protein, 9 aa, synthetic construct
GIPATIKLH

SEQ ID NO: 33598 - protein, 9 aa, synthetic construct
GIPATIKVF

SEQ ID NO: 33599 - protein, 9 aa, synthetic construct
PTNAAIRLH

SEQ ID NO: 33600 - protein, 9 aa, synthetic construct
GIPATGHLK

SEQ ID NO: 33601 - protein, 9 aa, synthetic construct
GIPATGHVR

SEQ ID NO: 33602 - protein, 9 aa, synthetic construct
GIPATGHVK

SEQ ID NO: 33603 - protein, 9 aa, synthetic construct
GIPATGRLR

SEQ ID NO: 33604 - protein, 9 aa, synthetic construct
GIPATGRLH

SEQ ID NO: 33605 - protein, 9 aa, synthetic construct
GIPATGRLF

SEQ ID NO: 33606 - protein, 9 aa, synthetic construct
GIPATGRVY

SEQ ID NO: 33607 - protein, 9 aa, synthetic construct
GIPATGRVH

SEQ ID NO: 33608 - protein, 9 aa, synthetic construct
PTNAAIRLF

SEQ ID NO: 33609 - protein, 9 aa, synthetic construct
GIPATGKLH

SEQ ID NO: 33610 - protein, 9 aa, synthetic construct
GIPATGKLF

SEQ ID NO: 33611 - protein, 9 aa, synthetic construct
GIPATGKVF

SEQ ID NO: 33612 - protein, 9 aa, synthetic construct
GIPASVHLY

SEQ ID NO: 33613 - protein, 9 aa, synthetic construct
GIPASVHLR

SEQ ID NO: 33614 - protein, 9 aa, synthetic construct
GIPASVHLK

SEQ ID NO: 33615 - protein, 9 aa, synthetic construct
GIPASVHVY

SEQ ID NO: 33616 - protein, 9 aa, synthetic construct
GIPASVHVR

SEQ ID NO: 33617 - protein, 9 aa, synthetic construct
GIPASVRLY

SEQ ID NO: 33618 - protein, 9 aa, synthetic construct
GIPASVRVY

SEQ ID NO: 33619 - protein, 9 aa, synthetic construct
GIPASVKLY

SEQ ID NO: 33620 - protein, 9 aa, synthetic construct
GIPASVKVY

SEQ ID NO: 33621 - protein, 9 aa, synthetic construct
GIPASVKVH

SEQ ID NO: 33622 - protein, 9 aa, synthetic construct
GIPASVKVF

SEQ ID NO: 33623 - protein, 9 aa, synthetic construct
GIPASLHLR

SEQ ID NO: 33624 - protein, 9 aa, synthetic construct
GIPASLHLH

SEQ ID NO: 33625 - protein, 9 aa, synthetic construct
GIPASLHLK

SEQ ID NO: 33626 - protein, 9 aa, synthetic construct
GIPASLHVY

SEQ ID NO: 33627 - protein, 9 aa, synthetic construct
GIPASLHVH

SEQ ID NO: 33628 - protein, 9 aa, synthetic construct
GIPASLHVF

SEQ ID NO: 33629 - protein, 9 aa, synthetic construct
PTNAAIRVF

SEQ ID NO: 33630 - protein, 9 aa, synthetic construct
GIPASLRLH

SEQ ID NO: 33631 - protein, 9 aa, synthetic construct
GIPASLRVF

SEQ ID NO: 33632 - protein, 9 aa, synthetic construct
PLNGVAKVR

SEQ ID NO: 33633 - protein, 9 aa, synthetic construct
PTNAAIKLY

SEQ ID NO: 33634 - protein, 9 aa, synthetic construct
GIPASLKLY

SEQ ID NO: 33635 - protein, 9 aa, synthetic construct
GIPASLKLH

SEQ ID NO: 33636 - protein, 9 aa, synthetic construct
GIPASLKVY

SEQ ID NO: 33637 - protein, 9 aa, synthetic construct
GIPASARLY

SEQ ID NO: 33638 - protein, 9 aa, synthetic construct
GIPASARLF

SEQ ID NO: 33639 - protein, 9 aa, synthetic construct
GIPASARVF

SEQ ID NO: 33640 - protein, 9 aa, synthetic construct
PTNAAIKLK

SEQ ID NO: 33641 - protein, 9 aa, synthetic construct
GIPASAKLY

SEQ ID NO: 33642 - protein, 9 aa, synthetic construct
GIPASAKLR

SEQ ID NO: 33643 - protein, 9 aa, synthetic construct
GIPASAKLH

SEQ ID NO: 33644 - protein, 9 aa, synthetic construct
GIPASAKLF

SEQ ID NO: 33645 - protein, 9 aa, synthetic construct
GIPASAKVY

SEQ ID NO: 33646 - protein, 9 aa, synthetic construct
GIPASAKVF

SEQ ID NO: 33647 - protein, 9 aa, synthetic construct
PTNAAIKLF

SEQ ID NO: 33648 - protein, 9 aa, synthetic construct
GIPASIHLH

SEQ ID NO: 33649 - protein, 9 aa, synthetic construct
GIPASIHLF

SEQ ID NO: 33650 - protein, 9 aa, synthetic construct
GIPASIHVY

SEQ ID NO: 33651 - protein, 9 aa, synthetic construct
GIPASIHVR

SEQ ID NO: 33652 - protein, 9 aa, synthetic construct
GIPASIHVK

SEQ ID NO: 33653 - protein, 9 aa, synthetic construct
GIPASIRVY

SEQ ID NO: 33654 - protein, 9 aa, synthetic construct
GIPASIRVK

SEQ ID NO: 33655 - protein, 9 aa, synthetic construct
GIPASIRVF

SEQ ID NO: 33656 - protein, 9 aa, synthetic construct
PTNAAIKVR

SEQ ID NO: 33657 - protein, 9 aa, synthetic construct
GIPASIKLY

SEQ ID NO: 33658 - protein, 9 aa, synthetic construct
GIPASIKLK

SEQ ID NO: 33659 - protein, 9 aa, synthetic construct
GIPASGHLK

SEQ ID NO: 33660 - protein, 9 aa, synthetic construct
GIPASGHVK

SEQ ID NO: 33661 - protein, 9 aa, synthetic construct
GIPASGRLR

SEQ ID NO: 33662 - protein, 9 aa, synthetic construct
GIPASGRLH

SEQ ID NO: 33663 - protein, 9 aa, synthetic construct
GIPASGRLF

SEQ ID NO: 33664 - protein, 9 aa, synthetic construct
GIPASGRVY

SEQ ID NO: 33665 - protein, 9 aa, synthetic construct
GIPASGRVK

SEQ ID NO: 33666 - protein, 9 aa, synthetic construct
GIPASGKLY

SEQ ID NO: 33667 - protein, 9 aa, synthetic construct
GIPASGKLH

SEQ ID NO: 33668 - protein, 9 aa, synthetic construct
GIPASGKLF

SEQ ID NO: 33669 - protein, 9 aa, synthetic construct
GIPASGKVY

SEQ ID NO: 33670 - protein, 9 aa, synthetic construct
GIPAVVHLY

SEQ ID NO: 33671 - protein, 9 aa, synthetic construct
GIPAVVHVK

SEQ ID NO: 33672 - protein, 9 aa, synthetic construct
GIPAVVHVF

SEQ ID NO: 33673 - protein, 9 aa, synthetic construct
GIPAVVRLF

SEQ ID NO: 33674 - protein, 9 aa, synthetic construct
GIPAVVKLY

SEQ ID NO: 33675 - protein, 9 aa, synthetic construct
GIPAVVKLK

SEQ ID NO: 33676 - protein, 9 aa, synthetic construct
GIPAVVKVY

SEQ ID NO: 33677 - protein, 9 aa, synthetic construct
GIPAVAHLR

SEQ ID NO: 33678 - protein, 9 aa, synthetic construct
GIPAVAHLK

SEQ ID NO: 33679 - protein, 9 aa, synthetic construct
GIPAVAHVY

SEQ ID NO: 33680 - protein, 9 aa, synthetic construct
GIPAVAHVF

SEQ ID NO: 33681 - protein, 9 aa, synthetic construct
GIPAVAKVR

SEQ ID NO: 33682 - protein, 9 aa, synthetic construct
GIPAVAKVH

SEQ ID NO: 33683 - protein, 9 aa, synthetic construct
GIPAVIHLH

SEQ ID NO: 33684 - protein, 9 aa, synthetic construct
GIPAVIHLF

SEQ ID NO: 33685 - protein, 9 aa, synthetic construct
GIPAVIHVY

SEQ ID NO: 33686 - protein, 9 aa, synthetic construct
GIPAVIHVH

SEQ ID NO: 33687 - protein, 9 aa, synthetic construct
GIPAVIHVF

SEQ ID NO: 33688 - protein, 9 aa, synthetic construct
GIPAVIRLR

SEQ ID NO: 33689 - protein, 9 aa, synthetic construct
GIPAVIRLF

SEQ ID NO: 33690 - protein, 9 aa, synthetic construct
GIPAVIRVY

SEQ ID NO: 33691 - protein, 9 aa, synthetic construct
PTNAAGRLR

SEQ ID NO: 33692 - protein, 9 aa, synthetic construct
GIPAVIKLY

SEQ ID NO: 33693 - protein, 9 aa, synthetic construct
GIPAVIKVY

SEQ ID NO: 33694 - protein, 9 aa, synthetic construct
GIPAVGHLR

SEQ ID NO: 33695 - protein, 9 aa, synthetic construct
GIPAVGHVY

SEQ ID NO: 33696 - protein, 9 aa, synthetic construct
GIPAVGHVR

SEQ ID NO: 33697 - protein, 9 aa, synthetic construct
GIPAVGHVK

SEQ ID NO: 33698 - protein, 9 aa, synthetic construct
GIPAVGHVF

SEQ ID NO: 33699 - protein, 9 aa, synthetic construct
PTNAAGRLK

SEQ ID NO: 33700 - protein, 9 aa, synthetic construct
GIPAVGKVR

SEQ ID NO: 33701 - protein, 9 aa, synthetic construct
PTNAAGRVY

SEQ ID NO: 33702 - protein, 9 aa, synthetic construct
GIPAGVHLY

SEQ ID NO: 33703 - protein, 9 aa, synthetic construct
GIPAGVHVY

SEQ ID NO: 33704 - protein, 9 aa, synthetic construct
GIPAGVHVR

SEQ ID NO: 33705 - protein, 9 aa, synthetic construct
GIPAGVHVK

SEQ ID NO: 33706 - protein, 9 aa, synthetic construct
GIPAGVHVF

SEQ ID NO: 33707 - protein, 9 aa, synthetic construct
PTNAAGRVR

SEQ ID NO: 33708 - protein, 9 aa, synthetic construct
GIPAGVRLH

SEQ ID NO: 33709 - protein, 9 aa, synthetic construct
GIPAGVRLF

SEQ ID NO: 33710 - protein, 9 aa, synthetic construct
GIPAGVRVY

SEQ ID NO: 33711 - protein, 9 aa, synthetic construct
GIPAGVRVR

SEQ ID NO: 33712 - protein, 9 aa, synthetic construct
GIPAGVRVH

SEQ ID NO: 33713 - protein, 9 aa, synthetic construct
GIPAGVRVK

SEQ ID NO: 33714 - protein, 9 aa, synthetic construct
GIPAGVKLY

SEQ ID NO: 33715 - protein, 9 aa, synthetic construct
GIPAGVKLR

SEQ ID NO: 33716 - protein, 9 aa, synthetic construct
GIPAGVKLH

SEQ ID NO: 33717 - protein, 9 aa, synthetic construct
GIPAGVKVH

SEQ ID NO: 33718 - protein, 9 aa, synthetic construct
GIPAGVKVK

SEQ ID NO: 33719 - protein, 9 aa, synthetic construct
GIPAGVKVF

SEQ ID NO: 33720 - protein, 9 aa, synthetic construct
PTNAAGRVK

SEQ ID NO: 33721 - protein, 9 aa, synthetic construct
GIPAGLHVR

SEQ ID NO: 33722 - protein, 9 aa, synthetic construct
GIPAGLKLF

SEQ ID NO: 33723 - protein, 9 aa, synthetic construct
PTNAAGKLR

SEQ ID NO: 33724 - protein, 9 aa, synthetic construct
GIPAGAHLY

SEQ ID NO: 33725 - protein, 9 aa, synthetic construct
GIPAGAHLR

SEQ ID NO: 33726 - protein, 9 aa, synthetic construct
GIPAGAHLK

SEQ ID NO: 33727 - protein, 9 aa, synthetic construct
GIPAGAHLF

SEQ ID NO: 33728 - protein, 9 aa, synthetic construct
GIPAGAHVY

SEQ ID NO: 33729 - protein, 9 aa, synthetic construct
GIPAGAHVR

SEQ ID NO: 33730 - protein, 9 aa, synthetic construct
GIPAGAHVK

SEQ ID NO: 33731 - protein, 9 aa, synthetic construct
GIPAGAHVF

SEQ ID NO: 33732 - protein, 9 aa, synthetic construct
GIPAGARVY

SEQ ID NO: 33733 - protein, 9 aa, synthetic construct
GIPAGARVF

SEQ ID NO: 33734 - protein, 9 aa, synthetic construct
GIPAGAKVY

SEQ ID NO: 33735 - protein, 9 aa, synthetic construct
GIPAGAKVH

SEQ ID NO: 33736 - protein, 9 aa, synthetic construct
GIPAGIHLY

SEQ ID NO: 33737 - protein, 9 aa, synthetic construct
GIPAGIHLR

SEQ ID NO: 33738 - protein, 9 aa, synthetic construct
GIPAGIHLK

SEQ ID NO: 33739 - protein, 9 aa, synthetic construct
GIPAGIHVY

SEQ ID NO: 33740 - protein, 9 aa, synthetic construct
GIPAGIHVR

SEQ ID NO: 33741 - protein, 9 aa, synthetic construct
GIPAGIHVH

SEQ ID NO: 33742 - protein, 9 aa, synthetic construct
GIPAGIHVF

SEQ ID NO: 33743 - protein, 9 aa, synthetic construct
GIPAGIRLY

SEQ ID NO: 33744 - protein, 9 aa, synthetic construct
GIPAGIRVH

SEQ ID NO: 33745 - protein, 9 aa, synthetic construct
PTNAAGKVR

SEQ ID NO: 33746 - protein, 9 aa, synthetic construct
GIPAGIKLY

SEQ ID NO: 33747 - protein, 9 aa, synthetic construct
GIPAGIKLH

SEQ ID NO: 33748 - protein, 9 aa, synthetic construct
GIPAGIKLF

SEQ ID NO: 33749 - protein, 9 aa, synthetic construct
GIPAGIKVY

SEQ ID NO: 33750 - protein, 9 aa, synthetic construct
GIPAGIKVF

SEQ ID NO: 33751 - protein, 9 aa, synthetic construct
GIPAGGHLR

SEQ ID NO: 33752 - protein, 9 aa, synthetic construct
GIPAGGHLH

SEQ ID NO: 33753 - protein, 9 aa, synthetic construct
GIPAGGHLK

SEQ ID NO: 33754 - protein, 9 aa, synthetic construct
GIPAGGHLF

SEQ ID NO: 33755 - protein, 9 aa, synthetic construct
GIPAGGHVF

SEQ ID NO: 33756 - protein, 9 aa, synthetic construct
PTNAAGKVK

SEQ ID NO: 33757 - protein, 9 aa, synthetic construct
GIPAGGRLY

SEQ ID NO: 33758 - protein, 9 aa, synthetic construct
GIPAGGRLH

SEQ ID NO: 33759 - protein, 9 aa, synthetic construct
GIPAGGRVY

SEQ ID NO: 33760 - protein, 9 aa, synthetic construct
GIPAGGRVH

SEQ ID NO: 33761 - protein, 9 aa, synthetic construct
GIPAGGRVF

SEQ ID NO: 33762 - protein, 9 aa, synthetic construct
GIPAGGKLY

SEQ ID NO: 33763 - protein, 9 aa, synthetic construct
GIPAGGKLH

SEQ ID NO: 33764 - protein, 9 aa, synthetic construct
GIPAGGKLF

SEQ ID NO: 33765 - protein, 9 aa, synthetic construct
GIPAGGKVY

SEQ ID NO: 33766 - protein, 9 aa, synthetic construct
GIPAGGKVK

SEQ ID NO: 33767 - protein, 9 aa, synthetic construct
GIPAGGKVF

SEQ ID NO: 33768 - protein, 9 aa, synthetic construct
PTNATVHLY

SEQ ID NO: 33769 - protein, 9 aa, synthetic construct
PLNGASHVK

SEQ ID NO: 33770 - protein, 9 aa, synthetic construct
PLNGASRLF

SEQ ID NO: 33771 - protein, 9 aa, synthetic construct
PLNGASRVY

SEQ ID NO: 33772 - protein, 9 aa, synthetic construct
PLNGASRVH

SEQ ID NO: 33773 - protein, 9 aa, synthetic construct
PLNGASRVF

SEQ ID NO: 33774 - protein, 9 aa, synthetic construct
PLNGASKLH

SEQ ID NO: 33775 - protein, 9 aa, synthetic construct
PLNGASKLF

SEQ ID NO: 33776 - protein, 9 aa, synthetic construct
PLNGASKVH

SEQ ID NO: 33777 - protein, 9 aa, synthetic construct
PLNGASKVK

SEQ ID NO: 33778 - protein, 9 aa, synthetic construct
PLNGASKVF

SEQ ID NO: 33779 - protein, 9 aa, synthetic construct
PLNGATHLY

SEQ ID NO: 33780 - protein, 9 aa, synthetic construct
PLNGATHLR

SEQ ID NO: 33781 - protein, 9 aa, synthetic construct
PLNGATHLK

SEQ ID NO: 33782 - protein, 9 aa, synthetic construct
PLNGATHLF

SEQ ID NO: 33783 - protein, 9 aa, synthetic construct
PLNGATRLY

SEQ ID NO: 33784 - protein, 9 aa, synthetic construct
PLNGATRLH

SEQ ID NO: 33785 - protein, 9 aa, synthetic construct
PLNGATRLF

SEQ ID NO: 33786 - protein, 9 aa, synthetic construct
PLNGATRVF

SEQ ID NO: 33787 - protein, 9 aa, synthetic construct
PTNATVHVY

SEQ ID NO: 33788 - protein, 9 aa, synthetic construct
PLNGATKLF

SEQ ID NO: 33789 - protein, 9 aa, synthetic construct
PTNATVHVR

SEQ ID NO: 33790 - protein, 9 aa, synthetic construct
PLNGTSHLY

SEQ ID NO: 33791 - protein, 9 aa, synthetic construct
PLNGTSHLR

SEQ ID NO: 33792 - protein, 9 aa, synthetic construct
PLNGTSHLK

SEQ ID NO: 33793 - protein, 9 aa, synthetic construct
PLNGTSRLF

SEQ ID NO: 33794 - protein, 9 aa, synthetic construct
PLNGTSRVY

SEQ ID NO: 33795 - protein, 9 aa, synthetic construct
PLNGTSRVF

SEQ ID NO: 33796 - protein, 9 aa, synthetic construct
PLNGTSKLY

SEQ ID NO: 33797 - protein, 9 aa, synthetic construct
PLNGTSKLH

SEQ ID NO: 33798 - protein, 9 aa, synthetic construct
PLNGTSKVY

SEQ ID NO: 33799 - protein, 9 aa, synthetic construct
PLNGTSKVR

SEQ ID NO: 33800 - protein, 9 aa, synthetic construct
PLNGTSKVH

SEQ ID NO: 33801 - protein, 9 aa, synthetic construct
PLNGTSKVK

SEQ ID NO: 33802 - protein, 9 aa, synthetic construct
PLNGTSKVF

SEQ ID NO: 33803 - protein, 9 aa, synthetic construct
PLNGTTHLY

SEQ ID NO: 33804 - protein, 9 aa, synthetic construct
PLNGTTHLH

SEQ ID NO: 33805 - protein, 9 aa, synthetic construct
PLNGTTHLK

SEQ ID NO: 33806 - protein, 9 aa, synthetic construct
PLNGTTHVY

SEQ ID NO: 33807 - protein, 9 aa, synthetic construct
PLNGTTHVR

SEQ ID NO: 33808 - protein, 9 aa, synthetic construct
PLNGTTHVH

SEQ ID NO: 33809 - protein, 9 aa, synthetic construct
PLNGVIHLR

SEQ ID NO: 33810 - protein, 9 aa, synthetic construct
PLNGTTRLY

SEQ ID NO: 33811 - protein, 9 aa, synthetic construct
PLNGTTRLF

SEQ ID NO: 33812 - protein, 9 aa, synthetic construct
PLNGTTKLY

SEQ ID NO: 33813 - protein, 9 aa, synthetic construct
PLNGTTKVF

SEQ ID NO: 33814 - protein, 9 aa, synthetic construct
PTNATVRLH

SEQ ID NO: 33815 - protein, 9 aa, synthetic construct
PLNGSSKLY

SEQ ID NO: 33816 - protein, 9 aa, synthetic construct
PLNGSSKLH

SEQ ID NO: 33817 - protein, 9 aa, synthetic construct
PLNGSSKVY

SEQ ID NO: 33818 - protein, 9 aa, synthetic construct
PLNGSSKVH

SEQ ID NO: 33819 - protein, 9 aa, synthetic construct
PLNGSTHLY

SEQ ID NO: 33820 - protein, 9 aa, synthetic construct
PLNGSTHLR

SEQ ID NO: 33821 - protein, 9 aa, synthetic construct
PLNGSTHLK

SEQ ID NO: 33822 - protein, 9 aa, synthetic construct
PLNGSTHLF

SEQ ID NO: 33823 - protein, 9 aa, synthetic construct
PLNGSTHVR

SEQ ID NO: 33824 - protein, 9 aa, synthetic construct
PLNGSTRVY

SEQ ID NO: 33825 - protein, 9 aa, synthetic construct
PLNGSTKLY

SEQ ID NO: 33826 - protein, 9 aa, synthetic construct
PLNGSTKLH

SEQ ID NO: 33827 - protein, 9 aa, synthetic construct
PLNGSTKLF

SEQ ID NO: 33828 - protein, 9 aa, synthetic construct
PLNGSTKVY

SEQ ID NO: 33829 - protein, 9 aa, synthetic construct
PLNGSTKVH

SEQ ID NO: 33830 - protein, 9 aa, synthetic construct
PLNGSTKVF

SEQ ID NO: 33831 - protein, 9 aa, synthetic construct
PLNGVSRLF

SEQ ID NO: 33832 - protein, 9 aa, synthetic construct
PLNGVSRVY

SEQ ID NO: 33833 - protein, 9 aa, synthetic construct
PLNGVSRVH

SEQ ID NO: 33834 - protein, 9 aa, synthetic construct
PLNGVSRVF

SEQ ID NO: 33835 - protein, 9 aa, synthetic construct
PLNGVIHLH

SEQ ID NO: 33836 - protein, 9 aa, synthetic construct
PTNATVKLR

SEQ ID NO: 33837 - protein, 9 aa, synthetic construct
PLNGVTHVR

SEQ ID NO: 33838 - protein, 9 aa, synthetic construct
PTNATVKLH

SEQ ID NO: 33839 - protein, 9 aa, synthetic construct
PLNGVTRVY

SEQ ID NO: 33840 - protein, 9 aa, synthetic construct
PLNGVTRVF

SEQ ID NO: 33841 - protein, 9 aa, synthetic construct
PLNGVTKLR

SEQ ID NO: 33842 - protein, 9 aa, synthetic construct
PLNGVTKLH

SEQ ID NO: 33843 - protein, 9 aa, synthetic construct
PLNGVTKLF

SEQ ID NO: 33844 - protein, 9 aa, synthetic construct
PLNGVTKVF

SEQ ID NO: 33845 - protein, 9 aa, synthetic construct
PLNGGSHVF

SEQ ID NO: 33846 - protein, 9 aa, synthetic construct
PLNGGSRLF

SEQ ID NO: 33847 - protein, 9 aa, synthetic construct
PLNGGSRVF

SEQ ID NO: 33848 - protein, 9 aa, synthetic construct
PLNGGSKLY

SEQ ID NO: 33849 - protein, 9 aa, synthetic construct
PLNGGSKLH

SEQ ID NO: 33850 - protein, 9 aa, synthetic construct
PLNGGSKVY

SEQ ID NO: 33851 - protein, 9 aa, synthetic construct
PLNGGSKVH

SEQ ID NO: 33852 - protein, 9 aa, synthetic construct
PTNATVKVH

SEQ ID NO: 33853 - protein, 9 aa, synthetic construct
PLNGGTHLY

SEQ ID NO: 33854 - protein, 9 aa, synthetic construct
PLNGGTHLR

SEQ ID NO: 33855 - protein, 9 aa, synthetic construct
PLNGGTHLK

SEQ ID NO: 33856 - protein, 9 aa, synthetic construct
PLNGGTHVH

SEQ ID NO: 33857 - protein, 9 aa, synthetic construct
PLNGGTHVK

SEQ ID NO: 33858 - protein, 9 aa, synthetic construct
PLQGASHLY

SEQ ID NO: 33859 - protein, 9 aa, synthetic construct
PLQGASHVF

SEQ ID NO: 33860 - protein, 9 aa, synthetic construct
PLQGASRLF

SEQ ID NO: 33861 - protein, 9 aa, synthetic construct
PLQGASKVY

SEQ ID NO: 33862 - protein, 9 aa, synthetic construct
PLQGASKVF

SEQ ID NO: 33863 - protein, 9 aa, synthetic construct
PTNATLHLK

SEQ ID NO: 33864 - protein, 9 aa, synthetic construct
PLQGATHLY

SEQ ID NO: 33865 - protein, 9 aa, synthetic construct
PLQGATHLH

SEQ ID NO: 33866 - protein, 9 aa, synthetic construct
PLQGATHVR

SEQ ID NO: 33867 - protein, 9 aa, synthetic construct
PLQGATHVK

SEQ ID NO: 33868 - protein, 9 aa, synthetic construct
PLQGATRLY

SEQ ID NO: 33869 - protein, 9 aa, synthetic construct
PLQGATRLH

SEQ ID NO: 33870 - protein, 9 aa, synthetic construct
PLQGATRLF

SEQ ID NO: 33871 - protein, 9 aa, synthetic construct
PLQGATRVY

SEQ ID NO: 33872 - protein, 9 aa, synthetic construct
PLQGATRVH

SEQ ID NO: 33873 - protein, 9 aa, synthetic construct
PLQGATKLY

SEQ ID NO: 33874 - protein, 9 aa, synthetic construct
PLQGATKLH

SEQ ID NO: 33875 - protein, 9 aa, synthetic construct
PLQGATKVY

SEQ ID NO: 33876 - protein, 9 aa, synthetic construct
PLQGATKVF

SEQ ID NO: 33877 - protein, 9 aa, synthetic construct
PLQGTSHVK

SEQ ID NO: 33878 - protein, 9 aa, synthetic construct
PTNATLHVH

SEQ ID NO: 33879 - protein, 9 aa, synthetic construct
PLQGTSRLY

SEQ ID NO: 33880 - protein, 9 aa, synthetic construct
PLQGTSRLH

SEQ ID NO: 33881 - protein, 9 aa, synthetic construct
PLQGTSRLF

SEQ ID NO: 33882 - protein, 9 aa, synthetic construct
PLQGTSRVY

SEQ ID NO: 33883 - protein, 9 aa, synthetic construct
PLQGTSRVF

SEQ ID NO: 33884 - protein, 9 aa, synthetic construct
PTNATLHVK

SEQ ID NO: 33885 - protein, 9 aa, synthetic construct
PLQGTSKLY

SEQ ID NO: 33886 - protein, 9 aa, synthetic construct
PLQGTSKVF

SEQ ID NO: 33887 - protein, 9 aa, synthetic construct
PLQGTTHLY

SEQ ID NO: 33888 - protein, 9 aa, synthetic construct
PLQGTTHLH

SEQ ID NO: 33889 - protein, 9 aa, synthetic construct
PLQGTTHLK

SEQ ID NO: 33890 - protein, 9 aa, synthetic construct
PLQGTTHVY

SEQ ID NO: 33891 - protein, 9 aa, synthetic construct
PLQGTTHVR

SEQ ID NO: 33892 - protein, 9 aa, synthetic construct
PLQGTTHVF

SEQ ID NO: 33893 - protein, 9 aa, synthetic construct
PLQGTTRLY

SEQ ID NO: 33894 - protein, 9 aa, synthetic construct
PLQGTTRLH

SEQ ID NO: 33895 - protein, 9 aa, synthetic construct
PLQGTTRLF

SEQ ID NO: 33896 - protein, 9 aa, synthetic construct
PLQGTTRVY

SEQ ID NO: 33897 - protein, 9 aa, synthetic construct
PLQGTTRVH

SEQ ID NO: 33898 - protein, 9 aa, synthetic construct
PLQGTTKLY

SEQ ID NO: 33899 - protein, 9 aa, synthetic construct
PLQGTTKLF

SEQ ID NO: 33900 - protein, 9 aa, synthetic construct
PLQGTTKVY

SEQ ID NO: 33901 - protein, 9 aa, synthetic construct
PLQGTTKVH

SEQ ID NO: 33902 - protein, 9 aa, synthetic construct
PLQGTTKVF

SEQ ID NO: 33903 - protein, 9 aa, synthetic construct
PLQGSSRLY

SEQ ID NO: 33904 - protein, 9 aa, synthetic construct
PLQGSSRLH

SEQ ID NO: 33905 - protein, 9 aa, synthetic construct
PLQGSSRLK

SEQ ID NO: 33906 - protein, 9 aa, synthetic construct
PLQGSSRLF

SEQ ID NO: 33907 - protein, 9 aa, synthetic construct
PLQGSSRVY

SEQ ID NO: 33908 - protein, 9 aa, synthetic construct
PLQGSSRVK

SEQ ID NO: 33909 - protein, 9 aa, synthetic construct
PLQGSSRVF

SEQ ID NO: 33910 - protein, 9 aa, synthetic construct
PLQGSTHLY

SEQ ID NO: 33911 - protein, 9 aa, synthetic construct
PLQGSTHVF

SEQ ID NO: 33912 - protein, 9 aa, synthetic construct
PTNATLRVR

SEQ ID NO: 33913 - protein, 9 aa, synthetic construct
PLQGSTRLF

SEQ ID NO: 33914 - protein, 9 aa, synthetic construct
PLQGSTKLY

SEQ ID NO: 33915 - protein, 9 aa, synthetic construct
PLQGSTKLH

SEQ ID NO: 33916 - protein, 9 aa, synthetic construct
PLQGSTKVH

SEQ ID NO: 33917 - protein, 9 aa, synthetic construct
PLQGVSHLY

SEQ ID NO: 33918 - protein, 9 aa, synthetic construct
PLQGVSHLR

SEQ ID NO: 33919 - protein, 9 aa, synthetic construct
PLQGVSHLH

SEQ ID NO: 33920 - protein, 9 aa, synthetic construct
PLQGVSHLK

SEQ ID NO: 33921 - protein, 9 aa, synthetic construct
PLQGVSHVY

SEQ ID NO: 33922 - protein, 9 aa, synthetic construct
PLQGVSHVH

SEQ ID NO: 33923 - protein, 9 aa, synthetic construct
PLQGVSHVK

SEQ ID NO: 33924 - protein, 9 aa, synthetic construct
PTNATLRVF

SEQ ID NO: 33925 - protein, 9 aa, synthetic construct
PTNATLKLY

SEQ ID NO: 33926 - protein, 9 aa, synthetic construct
PLQGVTHLY

SEQ ID NO: 33927 - protein, 9 aa, synthetic construct
PLQGVTHLR

SEQ ID NO: 33928 - protein, 9 aa, synthetic construct
PLQGVTHLH

SEQ ID NO: 33929 - protein, 9 aa, synthetic construct
PLQGVTHLF

SEQ ID NO: 33930 - protein, 9 aa, synthetic construct
PLQGVTHVY

SEQ ID NO: 33931 - protein, 9 aa, synthetic construct
PLQGVTHVH

SEQ ID NO: 33932 - protein, 9 aa, synthetic construct
PLQGVTHVK

SEQ ID NO: 33933 - protein, 9 aa, synthetic construct
PLQGVTRLY

SEQ ID NO: 33934 - protein, 9 aa, synthetic construct
PLQGVTRLH

SEQ ID NO: 33935 - protein, 9 aa, synthetic construct
PLQGVTRVF

SEQ ID NO: 33936 - protein, 9 aa, synthetic construct
PLQGVTKLY

SEQ ID NO: 33937 - protein, 9 aa, synthetic construct
PLQGVTKVY

SEQ ID NO: 33938 - protein, 9 aa, synthetic construct
PLQGVTKVH

SEQ ID NO: 33939 - protein, 9 aa, synthetic construct
PLQGGSHVY

SEQ ID NO: 33940 - protein, 9 aa, synthetic construct
PLQGGSHVF

SEQ ID NO: 33941 - protein, 9 aa, synthetic construct
PLQGGSRLY

SEQ ID NO: 33942 - protein, 9 aa, synthetic construct
PLQGGSRLH

SEQ ID NO: 33943 - protein, 9 aa, synthetic construct
PLQGGSKVH

SEQ ID NO: 33944 - protein, 9 aa, synthetic construct
PLQGGTHLF

SEQ ID NO: 33945 - protein, 9 aa, synthetic construct
PLQGGTHVH

SEQ ID NO: 33946 - protein, 9 aa, synthetic construct
PLQGGTRLF

SEQ ID NO: 33947 - protein, 9 aa, synthetic construct
PLQGGTRVR

SEQ ID NO: 33948 - protein, 9 aa, synthetic construct
PTNATLKVF

SEQ ID NO: 33949 - protein, 9 aa, synthetic construct
PLQGGTKLY

SEQ ID NO: 33950 - protein, 9 aa, synthetic construct
PLQGGTKLH

SEQ ID NO: 33951 - protein, 9 aa, synthetic construct
PLQGGTKVY

SEQ ID NO: 33952 - protein, 9 aa, synthetic construct
PLQGGTKVH

SEQ ID NO: 33953 - protein, 9 aa, synthetic construct
PLNGVIHVR

SEQ ID NO: 33954 - protein, 9 aa, synthetic construct
PTNGASHLR

SEQ ID NO: 33955 - protein, 9 aa, synthetic construct
PTNGASHLK

SEQ ID NO: 33956 - protein, 9 aa, synthetic construct
PTNGASHVK

SEQ ID NO: 33957 - protein, 9 aa, synthetic construct
PTNGASKLY

SEQ ID NO: 33958 - protein, 9 aa, synthetic construct
PTNGASKLH

SEQ ID NO: 33959 - protein, 9 aa, synthetic construct
PTNGASKVH

SEQ ID NO: 33960 - protein, 9 aa, synthetic construct
PTNGATRLR

SEQ ID NO: 33961 - protein, 9 aa, synthetic construct
PTNGATRVK

SEQ ID NO: 33962 - protein, 9 aa, synthetic construct
PTNGATKLF

SEQ ID NO: 33963 - protein, 9 aa, synthetic construct
PTNGATKVR

SEQ ID NO: 33964 - protein, 9 aa, synthetic construct
PTNGATKVH

SEQ ID NO: 33965 - protein, 9 aa, synthetic construct
PTNGATKVK

SEQ ID NO: 33966 - protein, 9 aa, synthetic construct
PTNGTSRLH

SEQ ID NO: 33967 - protein, 9 aa, synthetic construct
PTNGTSRVY

SEQ ID NO: 33968 - protein, 9 aa, synthetic construct
PTNGTSKLY

SEQ ID NO: 33969 - protein, 9 aa, synthetic construct
PTNGTSKLH

SEQ ID NO: 33970 - protein, 9 aa, synthetic construct
PTNGTSKLF

SEQ ID NO: 33971 - protein, 9 aa, synthetic construct
PTNATAHVF

SEQ ID NO: 33972 - protein, 9 aa, synthetic construct
PTNGTTHLY

SEQ ID NO: 33973 - protein, 9 aa, synthetic construct
PTNGTTHLH

SEQ ID NO: 33974 - protein, 9 aa, synthetic construct
PTNGTTHVR

SEQ ID NO: 33975 - protein, 9 aa, synthetic construct
PTNGTTHVK

SEQ ID NO: 33976 - protein, 9 aa, synthetic construct
PTNGTTRLR

SEQ ID NO: 33977 - protein, 9 aa, synthetic construct
PTNGTTRLH

SEQ ID NO: 33978 - protein, 9 aa, synthetic construct
PTNGTTRLK

SEQ ID NO: 33979 - protein, 9 aa, synthetic construct
PTNGTTRLF

SEQ ID NO: 33980 - protein, 9 aa, synthetic construct
PTNGTTKLY

SEQ ID NO: 33981 - protein, 9 aa, synthetic construct
PTNGTTKVY

SEQ ID NO: 33982 - protein, 9 aa, synthetic construct
PTNGTTKVH

SEQ ID NO: 33983 - protein, 9 aa, synthetic construct
PTNGTTKVF

SEQ ID NO: 33984 - protein, 9 aa, synthetic construct
PTNGSSRVH

SEQ ID NO: 33985 - protein, 9 aa, synthetic construct
PTNATARLF

SEQ ID NO: 33986 - protein, 9 aa, synthetic construct
PTNGSSKVY

SEQ ID NO: 33987 - protein, 9 aa, synthetic construct
PTNGSSKVR

SEQ ID NO: 33988 - protein, 9 aa, synthetic construct
PTNGSTHLY

SEQ ID NO: 33989 - protein, 9 aa, synthetic construct
PTNGSTHLH

SEQ ID NO: 33990 - protein, 9 aa, synthetic construct
PTNGSTHLK

SEQ ID NO: 33991 - protein, 9 aa, synthetic construct
PTNGSTHLF

SEQ ID NO: 33992 - protein, 9 aa, synthetic construct
PTNGSTHVH

SEQ ID NO: 33993 - protein, 9 aa, synthetic construct
PTNGSTHVK

SEQ ID NO: 33994 - protein, 9 aa, synthetic construct
PTNATARVH

SEQ ID NO: 33995 - protein, 9 aa, synthetic construct
PTNGSTKLY

SEQ ID NO: 33996 - protein, 9 aa, synthetic construct
PTNGSTKVY

SEQ ID NO: 33997 - protein, 9 aa, synthetic construct
PTNGSTKVH

SEQ ID NO: 33998 - protein, 9 aa, synthetic construct
PTNGSTKVF

SEQ ID NO: 33999 - protein, 9 aa, synthetic construct
PTNGVSHLY

SEQ ID NO: 34000 - protein, 9 aa, synthetic construct
PTNGVSHLF

SEQ ID NO: 34001 - protein, 9 aa, synthetic construct
PTNGVSHVK

SEQ ID NO: 34002 - protein, 9 aa, synthetic construct
PTNATAKLR

SEQ ID NO: 34003 - protein, 9 aa, synthetic construct
PTNGVTHLY

SEQ ID NO: 34004 - protein, 9 aa, synthetic construct
PTNGVTHLR

SEQ ID NO: 34005 - protein, 9 aa, synthetic construct
PTNGVTHLK

SEQ ID NO: 34006 - protein, 9 aa, synthetic construct
PTNGVTHLF

SEQ ID NO: 34007 - protein, 9 aa, synthetic construct
PTNGVTHVY

SEQ ID NO: 34008 - protein, 9 aa, synthetic construct
PTNGVTHVR

SEQ ID NO: 34009 - protein, 9 aa, synthetic construct
PTNGVTHVF

SEQ ID NO: 34010 - protein, 9 aa, synthetic construct
PTNGVTRLH

SEQ ID NO: 34011 - protein, 9 aa, synthetic construct
PTNGVTRLF

SEQ ID NO: 34012 - protein, 9 aa, synthetic construct
PTNGVTRVR

SEQ ID NO: 34013 - protein, 9 aa, synthetic construct
PTNGVTRVH

SEQ ID NO: 34014 - protein, 9 aa, synthetic construct
PTNGVTKLK

SEQ ID NO: 34015 - protein, 9 aa, synthetic construct
PTNGVTKVR

SEQ ID NO: 34016 - protein, 9 aa, synthetic construct
PTNGGSHLH

SEQ ID NO: 34017 - protein, 9 aa, synthetic construct
PTNGGSHVK

SEQ ID NO: 34018 - protein, 9 aa, synthetic construct
PTNGGSRLY

SEQ ID NO: 34019 - protein, 9 aa, synthetic construct
PTNGGSRLR

SEQ ID NO: 34020 - protein, 9 aa, synthetic construct
PTNGGSRLH

SEQ ID NO: 34021 - protein, 9 aa, synthetic construct
PTNGGSRLK

SEQ ID NO: 34022 - protein, 9 aa, synthetic construct
PTNGGSRLF

SEQ ID NO: 34023 - protein, 9 aa, synthetic construct
PTNGGSKLY

SEQ ID NO: 34024 - protein, 9 aa, synthetic construct
PTNGGSKLK

SEQ ID NO: 34025 - protein, 9 aa, synthetic construct
PTNGGSKLF

SEQ ID NO: 34026 - protein, 9 aa, synthetic construct
PTNGGSKVH

SEQ ID NO: 34027 - protein, 9 aa, synthetic construct
PTNGGSKVK

SEQ ID NO: 34028 - protein, 9 aa, synthetic construct
PTNGGSKVF

SEQ ID NO: 34029 - protein, 9 aa, synthetic construct
PTNGGTHLY

SEQ ID NO: 34030 - protein, 9 aa, synthetic construct
PTNGGTHLH

SEQ ID NO: 34031 - protein, 9 aa, synthetic construct
PTNGGTHLF

SEQ ID NO: 34032 - protein, 9 aa, synthetic construct
PTNGGTHVR

SEQ ID NO: 34033 - protein, 9 aa, synthetic construct
PTNGGTHVK

SEQ ID NO: 34034 - protein, 9 aa, synthetic construct
PTNGGTHVF

SEQ ID NO: 34035 - protein, 9 aa, synthetic construct
PTNGGTRLY

SEQ ID NO: 34036 - protein, 9 aa, synthetic construct
PTNGGTRLH

SEQ ID NO: 34037 - protein, 9 aa, synthetic construct
PTNGGTRLF

SEQ ID NO: 34038 - protein, 9 aa, synthetic construct
PTNGGTRVH

SEQ ID NO: 34039 - protein, 9 aa, synthetic construct
PTNATAKVF

SEQ ID NO: 34040 - protein, 9 aa, synthetic construct
PTNGGTKLH

SEQ ID NO: 34041 - protein, 9 aa, synthetic construct
PTNGGTKVH

SEQ ID NO: 34042 - protein, 9 aa, synthetic construct
PTNATIHLY

SEQ ID NO: 34043 - protein, 9 aa, synthetic construct
PTQGASHLR

SEQ ID NO: 34044 - protein, 9 aa, synthetic construct
PTQGASHVK

SEQ ID NO: 34045 - protein, 9 aa, synthetic construct
PTQGASRVF

SEQ ID NO: 34046 - protein, 9 aa, synthetic construct
PTQGATHLF

SEQ ID NO: 34047 - protein, 9 aa, synthetic construct
PTQGATRVY

SEQ ID NO: 34048 - protein, 9 aa, synthetic construct
PTQGATRVH

SEQ ID NO: 34049 - protein, 9 aa, synthetic construct
PTQGATRVF

SEQ ID NO: 34050 - protein, 9 aa, synthetic construct
PTNATIHVY

SEQ ID NO: 34051 - protein, 9 aa, synthetic construct
PTQGATKVY

SEQ ID NO: 34052 - protein, 9 aa, synthetic construct
PTQGATKVH

SEQ ID NO: 34053 - protein, 9 aa, synthetic construct
PTNATIHVR

SEQ ID NO: 34054 - protein, 9 aa, synthetic construct
PTQGTSRLF

SEQ ID NO: 34055 - protein, 9 aa, synthetic construct
PTQGTSRVY

SEQ ID NO: 34056 - protein, 9 aa, synthetic construct
PTQGTSRVH

SEQ ID NO: 34057 - protein, 9 aa, synthetic construct
PTQGTSRVF

SEQ ID NO: 34058 - protein, 9 aa, synthetic construct
PTQGTSKLH

SEQ ID NO: 34059 - protein, 9 aa, synthetic construct
PTQGTSKVY

SEQ ID NO: 34060 - protein, 9 aa, synthetic construct
PTQGTSKVF

SEQ ID NO: 34061 - protein, 9 aa, synthetic construct
PTNATIHVF

SEQ ID NO: 34062 - protein, 9 aa, synthetic construct
PTQGTTRLY

SEQ ID NO: 34063 - protein, 9 aa, synthetic construct
PTQGTTRLR

SEQ ID NO: 34064 - protein, 9 aa, synthetic construct
PTQGTTRLH

SEQ ID NO: 34065 - protein, 9 aa, synthetic construct
PTQGTTRLF

SEQ ID NO: 34066 - protein, 9 aa, synthetic construct
PTQGTTRVY

SEQ ID NO: 34067 - protein, 9 aa, synthetic construct
PTQGTTRVF

SEQ ID NO: 34068 - protein, 9 aa, synthetic construct
PTQGTTKLY

SEQ ID NO: 34069 - protein, 9 aa, synthetic construct
PTQGTTKLH

SEQ ID NO: 34070 - protein, 9 aa, synthetic construct
PTQGTTKVF

SEQ ID NO: 34071 - protein, 9 aa, synthetic construct
PTNATIRLH

SEQ ID NO: 34072 - protein, 9 aa, synthetic construct
PTQGSSHLR

SEQ ID NO: 34073 - protein, 9 aa, synthetic construct
PTQGSSHLH

SEQ ID NO: 34074 - protein, 9 aa, synthetic construct
PTQGSSHLK

SEQ ID NO: 34075 - protein, 9 aa, synthetic construct
PTQGSSHVY

SEQ ID NO: 34076 - protein, 9 aa, synthetic construct
PTQGSSHVH

SEQ ID NO: 34077 - protein, 9 aa, synthetic construct
PTQGSSHVK

SEQ ID NO: 34078 - protein, 9 aa, synthetic construct
PTQGSSHVF

SEQ ID NO: 34079 - protein, 9 aa, synthetic construct
PTQGSSRLY

SEQ ID NO: 34080 - protein, 9 aa, synthetic construct
PTQGSSRLR

SEQ ID NO: 34081 - protein, 9 aa, synthetic construct
PTQGSSRLH

SEQ ID NO: 34082 - protein, 9 aa, synthetic construct
PTQGSSRLF

SEQ ID NO: 34083 - protein, 9 aa, synthetic construct
PTNATIRLF

SEQ ID NO: 34084 - protein, 9 aa, synthetic construct
PTQGSSKLF

SEQ ID NO: 34085 - protein, 9 aa, synthetic construct
PTQGSTHLY

SEQ ID NO: 34086 - protein, 9 aa, synthetic construct
PTQGSTHLK

SEQ ID NO: 34087 - protein, 9 aa, synthetic construct
PTQGSTHLF

SEQ ID NO: 34088 - protein, 9 aa, synthetic construct
PTQGSTHVH

SEQ ID NO: 34089 - protein, 9 aa, synthetic construct
PTQGSTHVF

SEQ ID NO: 34090 - protein, 9 aa, synthetic construct
PTNATIRVH

SEQ ID NO: 34091 - protein, 9 aa, synthetic construct
PTQGVSHLR

SEQ ID NO: 34092 - protein, 9 aa, synthetic construct
PTQGVSHVR

SEQ ID NO: 34093 - protein, 9 aa, synthetic construct
PTQGVSHVH

SEQ ID NO: 34094 - protein, 9 aa, synthetic construct
PTQGVSHVK

SEQ ID NO: 34095 - protein, 9 aa, synthetic construct
PTQGVSHVF

SEQ ID NO: 34096 - protein, 9 aa, synthetic construct
PTNATIRVF

SEQ ID NO: 34097 - protein, 9 aa, synthetic construct
PTQGVSRLY

SEQ ID NO: 34098 - protein, 9 aa, synthetic construct
PTQGVSRLF

SEQ ID NO: 34099 - protein, 9 aa, synthetic construct
PTQGVSRVH

SEQ ID NO: 34100 - protein, 9 aa, synthetic construct
PTNATIKLY

SEQ ID NO: 34101 - protein, 9 aa, synthetic construct
PTNATIKLR

SEQ ID NO: 34102 - protein, 9 aa, synthetic construct
PTQGVTHLR

SEQ ID NO: 34103 - protein, 9 aa, synthetic construct
PTQGVTHVY

SEQ ID NO: 34104 - protein, 9 aa, synthetic construct
PTQGVTHVR

SEQ ID NO: 34105 - protein, 9 aa, synthetic construct
PTQGVTHVH

SEQ ID NO: 34106 - protein, 9 aa, synthetic construct
PTQGVTHVK

SEQ ID NO: 34107 - protein, 9 aa, synthetic construct
PTQGVTRLY

SEQ ID NO: 34108 - protein, 9 aa, synthetic construct
PTQGVTRLH

SEQ ID NO: 34109 - protein, 9 aa, synthetic construct
PTQGVTRLF

SEQ ID NO: 34110 - protein, 9 aa, synthetic construct
PTNATIKLK

SEQ ID NO: 34111 - protein, 9 aa, synthetic construct
PTQGVTKLH

SEQ ID NO: 34112 - protein, 9 aa, synthetic construct
PTQGGSHLR

SEQ ID NO: 34113 - protein, 9 aa, synthetic construct
PTQGGSHLH

SEQ ID NO: 34114 - protein, 9 aa, synthetic construct
PTQGGSHLF

SEQ ID NO: 34115 - protein, 9 aa, synthetic construct
PTQGGSHVR

SEQ ID NO: 34116 - protein, 9 aa, synthetic construct
PTQGGSHVK

SEQ ID NO: 34117 - protein, 9 aa, synthetic construct
PTQGGSRLF

SEQ ID NO: 34118 - protein, 9 aa, synthetic construct
PTQGGSRVR

SEQ ID NO: 34119 - protein, 9 aa, synthetic construct
PTQGGSRVF

SEQ ID NO: 34120 - protein, 9 aa, synthetic construct
PTNATIKVH

SEQ ID NO: 34121 - protein, 9 aa, synthetic construct
PTQGGTHLY

SEQ ID NO: 34122 - protein, 9 aa, synthetic construct
PTQGGTHLH

SEQ ID NO: 34123 - protein, 9 aa, synthetic construct
PTQGGTHLK

SEQ ID NO: 34124 - protein, 9 aa, synthetic construct
PTQGGTHLF

SEQ ID NO: 34125 - protein, 9 aa, synthetic construct
PTQGGTHVH

SEQ ID NO: 34126 - protein, 9 aa, synthetic construct
PTQGGTHVK

SEQ ID NO: 34127 - protein, 9 aa, synthetic construct
PTQGGTHVF

SEQ ID NO: 34128 - protein, 9 aa, synthetic construct
PTNATIKVF

SEQ ID NO: 34129 - protein, 9 aa, synthetic construct
PTQGGTKLY

SEQ ID NO: 34130 - protein, 9 aa, synthetic construct
PTQGGTKLF

SEQ ID NO: 34131 - protein, 9 aa, synthetic construct
PTNATGHLF

SEQ ID NO: 34132 - protein, 9 aa, synthetic construct
PTNATGHVR

SEQ ID NO: 34133 - protein, 9 aa, synthetic construct
PTNATGRLY

SEQ ID NO: 34134 - protein, 9 aa, synthetic construct
PTNATGRLR

SEQ ID NO: 34135 - protein, 9 aa, synthetic construct
PTNATGRVY

SEQ ID NO: 34136 - protein, 9 aa, synthetic construct
PTNATGRVH

SEQ ID NO: 34137 - protein, 9 aa, synthetic construct
PTNATGRVF

SEQ ID NO: 34138 - protein, 9 aa, synthetic construct
PLNGVIRLF

SEQ ID NO: 34139 - protein, 9 aa, synthetic construct
PTNATGKLY

SEQ ID NO: 34140 - protein, 9 aa, synthetic construct
PTNATGKVY

SEQ ID NO: 34141 - protein, 9 aa, synthetic construct
PTNATGKVF

SEQ ID NO: 34142 - protein, 9 aa, synthetic construct
PLNGVIRVY

SEQ ID NO: 34143 - protein, 9 aa, synthetic construct
PTNASVHLY

SEQ ID NO: 34144 - protein, 9 aa, synthetic construct
PTNASVHLR

SEQ ID NO: 34145 - protein, 9 aa, synthetic construct
PTNASVHLH

SEQ ID NO: 34146 - protein, 9 aa, synthetic construct
PTNASVHLK

SEQ ID NO: 34147 - protein, 9 aa, synthetic construct
PTNASVHVY

SEQ ID NO: 34148 - protein, 9 aa, synthetic construct
PTNASVHVR

SEQ ID NO: 34149 - protein, 9 aa, synthetic construct
PTNASVHVF

SEQ ID NO: 34150 - protein, 9 aa, synthetic construct
PTNASVRLY

SEQ ID NO: 34151 - protein, 9 aa, synthetic construct
PTNASVRVY

SEQ ID NO: 34152 - protein, 9 aa, synthetic construct
PTNASVRVF

SEQ ID NO: 34153 - protein, 9 aa, synthetic construct
PLNGVIRVH

SEQ ID NO: 34154 - protein, 9 aa, synthetic construct
PTNASVKVY

SEQ ID NO: 34155 - protein, 9 aa, synthetic construct
PTNASVKVH

SEQ ID NO: 34156 - protein, 9 aa, synthetic construct
PTNASVKVK

SEQ ID NO: 34157 - protein, 9 aa, synthetic construct
PTNASLHLK

SEQ ID NO: 34158 - protein, 9 aa, synthetic construct
PTNASLHVK

SEQ ID NO: 34159 - protein, 9 aa, synthetic construct
PTNASLRLY

SEQ ID NO: 34160 - protein, 9 aa, synthetic construct
PTNASLRLH

SEQ ID NO: 34161 - protein, 9 aa, synthetic construct
PTNASLRLF

SEQ ID NO: 34162 - protein, 9 aa, synthetic construct
PTNASLRVY

SEQ ID NO: 34163 - protein, 9 aa, synthetic construct
PTNASLRVH

SEQ ID NO: 34164 - protein, 9 aa, synthetic construct
PTNASLRVK

SEQ ID NO: 34165 - protein, 9 aa, synthetic construct
PTNASLRVF

SEQ ID NO: 34166 - protein, 9 aa, synthetic construct
PLNGALKVR

SEQ ID NO: 34167 - protein, 9 aa, synthetic construct
PTNASLKLH

SEQ ID NO: 34168 - protein, 9 aa, synthetic construct
PTNASLKLF

SEQ ID NO: 34169 - protein, 9 aa, synthetic construct
PTNASLKVY

SEQ ID NO: 34170 - protein, 9 aa, synthetic construct
PTNASLKVF

SEQ ID NO: 34171 - protein, 9 aa, synthetic construct
PTNASAHLR

SEQ ID NO: 34172 - protein, 9 aa, synthetic construct
PTNASAHLK

SEQ ID NO: 34173 - protein, 9 aa, synthetic construct
PTNASAHVY

SEQ ID NO: 34174 - protein, 9 aa, synthetic construct
PTNASAHVR

SEQ ID NO: 34175 - protein, 9 aa, synthetic construct
PTNASAHVK

SEQ ID NO: 34176 - protein, 9 aa, synthetic construct
PTNASARLY

SEQ ID NO: 34177 - protein, 9 aa, synthetic construct
PTNASARLH

SEQ ID NO: 34178 - protein, 9 aa, synthetic construct
PTNASARLF

SEQ ID NO: 34179 - protein, 9 aa, synthetic construct
PTNASARVH

SEQ ID NO: 34180 - protein, 9 aa, synthetic construct
PTNASAKLY

SEQ ID NO: 34181 - protein, 9 aa, synthetic construct
PTNASAKLR

SEQ ID NO: 34182 - protein, 9 aa, synthetic construct
PTNASAKVY

SEQ ID NO: 34183 - protein, 9 aa, synthetic construct
PLNGVIKLF

SEQ ID NO: 34184 - protein, 9 aa, synthetic construct
PTNASIHLK

SEQ ID NO: 34185 - protein, 9 aa, synthetic construct
PTNASIHVY

SEQ ID NO: 34186 - protein, 9 aa, synthetic construct
PTNASIHVR

SEQ ID NO: 34187 - protein, 9 aa, synthetic construct
PLNGVIKVY

SEQ ID NO: 34188 - protein, 9 aa, synthetic construct
PTNASIRLK

SEQ ID NO: 34189 - protein, 9 aa, synthetic construct
PTNASIRVH

SEQ ID NO: 34190 - protein, 9 aa, synthetic construct
PTNASIRVF

SEQ ID NO: 34191 - protein, 9 aa, synthetic construct
PLNGVIKVR

SEQ ID NO: 34192 - protein, 9 aa, synthetic construct
PTNASIKLY

SEQ ID NO: 34193 - protein, 9 aa, synthetic construct
PTNASIKVY

SEQ ID NO: 34194 - protein, 9 aa, synthetic construct
PTNASIKVH

SEQ ID NO: 34195 - protein, 9 aa, synthetic construct
PTNASGHLK

SEQ ID NO: 34196 - protein, 9 aa, synthetic construct
PTNASGHVK

SEQ ID NO: 34197 - protein, 9 aa, synthetic construct
PTNASGRLR

SEQ ID NO: 34198 - protein, 9 aa, synthetic construct
PTNASGRLH

SEQ ID NO: 34199 - protein, 9 aa, synthetic construct
PTNASGRVY

SEQ ID NO: 34200 - protein, 9 aa, synthetic construct
PTNASGRVH

SEQ ID NO: 34201 - protein, 9 aa, synthetic construct
PLNGVIKVF

SEQ ID NO: 34202 - protein, 9 aa, synthetic construct
PTNASGKLY

SEQ ID NO: 34203 - protein, 9 aa, synthetic construct
PTNASGKLR

SEQ ID NO: 34204 - protein, 9 aa, synthetic construct
PTNAVVHLY

SEQ ID NO: 34205 - protein, 9 aa, synthetic construct
PTNAVVHLH

SEQ ID NO: 34206 - protein, 9 aa, synthetic construct
PTNAVVHLK

SEQ ID NO: 34207 - protein, 9 aa, synthetic construct
PTNAVVHVY

SEQ ID NO: 34208 - protein, 9 aa, synthetic construct
PTNAVVHVK

SEQ ID NO: 34209 - protein, 9 aa, synthetic construct
PLNGVGHLR

SEQ ID NO: 34210 - protein, 9 aa, synthetic construct
PTNAVVRLY

SEQ ID NO: 34211 - protein, 9 aa, synthetic construct
PTNAVVRLH

SEQ ID NO: 34212 - protein, 9 aa, synthetic construct
PTNAVVRLF

SEQ ID NO: 34213 - protein, 9 aa, synthetic construct
PTNAVVRVH

SEQ ID NO: 34214 - protein, 9 aa, synthetic construct
PTNAVVRVF

SEQ ID NO: 34215 - protein, 9 aa, synthetic construct
PTNAVVKLY

SEQ ID NO: 34216 - protein, 9 aa, synthetic construct
PTNAVVKLR

SEQ ID NO: 34217 - protein, 9 aa, synthetic construct
PTNAVVKLF

SEQ ID NO: 34218 - protein, 9 aa, synthetic construct
PTNAVVKVR

SEQ ID NO: 34219 - protein, 9 aa, synthetic construct
PTNAVVKVK

SEQ ID NO: 34220 - protein, 9 aa, synthetic construct
PTNAVLHVR

SEQ ID NO: 34221 - protein, 9 aa, synthetic construct
PTNAVLHVF

SEQ ID NO: 34222 - protein, 9 aa, synthetic construct
PLNGVGHLF

SEQ ID NO: 34223 - protein, 9 aa, synthetic construct
PTNAVLRLY

SEQ ID NO: 34224 - protein, 9 aa, synthetic construct
PTNAVLRLH

SEQ ID NO: 34225 - protein, 9 aa, synthetic construct
PTNAVLRLF

SEQ ID NO: 34226 - protein, 9 aa, synthetic construct
PTNAVLRVH

SEQ ID NO: 34227 - protein, 9 aa, synthetic construct
PTNAVLRVF

SEQ ID NO: 34228 - protein, 9 aa, synthetic construct
PTNAVLKLY

SEQ ID NO: 34229 - protein, 9 aa, synthetic construct
PTNAVLKLR

SEQ ID NO: 34230 - protein, 9 aa, synthetic construct
PTNAVLKLH

SEQ ID NO: 34231 - protein, 9 aa, synthetic construct
PTNAVLKLF

SEQ ID NO: 34232 - protein, 9 aa, synthetic construct
PTNAVLKVY

SEQ ID NO: 34233 - protein, 9 aa, synthetic construct
PTNAVLKVH

SEQ ID NO: 34234 - protein, 9 aa, synthetic construct
PTNAVLKVF

SEQ ID NO: 34235 - protein, 9 aa, synthetic construct
PTNAVAHLR

SEQ ID NO: 34236 - protein, 9 aa, synthetic construct
PTNAVAHLK

SEQ ID NO: 34237 - protein, 9 aa, synthetic construct
PTNAVAHVK

SEQ ID NO: 34238 - protein, 9 aa, synthetic construct
PTNAVARVR

SEQ ID NO: 34239 - protein, 9 aa, synthetic construct
PTNAVAKLK

SEQ ID NO: 34240 - protein, 9 aa, synthetic construct
PTNAVAKLF

SEQ ID NO: 34241 - protein, 9 aa, synthetic construct
PTNAVAKVR

SEQ ID NO: 34242 - protein, 9 aa, synthetic construct
PTNAVAKVH

SEQ ID NO: 34243 - protein, 9 aa, synthetic construct
PTNAVAKVK

SEQ ID NO: 34244 - protein, 9 aa, synthetic construct
PTNAVAKVF

SEQ ID NO: 34245 - protein, 9 aa, synthetic construct
PLNGVGHVF

SEQ ID NO: 34246 - protein, 9 aa, synthetic construct
PTNAVIHLK

SEQ ID NO: 34247 - protein, 9 aa, synthetic construct
PTNAVIHLF

SEQ ID NO: 34248 - protein, 9 aa, synthetic construct
PTNAVIHVR

SEQ ID NO: 34249 - protein, 9 aa, synthetic construct
PTNAVIHVH

SEQ ID NO: 34250 - protein, 9 aa, synthetic construct
PTNAVIRLY

SEQ ID NO: 34251 - protein, 9 aa, synthetic construct
PTNAVIRLR

SEQ ID NO: 34252 - protein, 9 aa, synthetic construct
PTNAVIRVH

SEQ ID NO: 34253 - protein, 9 aa, synthetic construct
PTNAVIKVY

SEQ ID NO: 34254 - protein, 9 aa, synthetic construct
PTNAVIKVH

SEQ ID NO: 34255 - protein, 9 aa, synthetic construct
PTNAVGHLR

SEQ ID NO: 34256 - protein, 9 aa, synthetic construct
PTNAVGHLH

SEQ ID NO: 34257 - protein, 9 aa, synthetic construct
PTNAVGHLK

SEQ ID NO: 34258 - protein, 9 aa, synthetic construct
PTNAVGHLF

SEQ ID NO: 34259 - protein, 9 aa, synthetic construct
PTNAVGHVY

SEQ ID NO: 34260 - protein, 9 aa, synthetic construct
PTNAVGHVR

SEQ ID NO: 34261 - protein, 9 aa, synthetic construct
PTNAVGHVK

SEQ ID NO: 34262 - protein, 9 aa, synthetic construct
PTNAVGHVF

SEQ ID NO: 34263 - protein, 9 aa, synthetic construct
PTNAVGRLY

SEQ ID NO: 34264 - protein, 9 aa, synthetic construct
PTNAVGRLH

SEQ ID NO: 34265 - protein, 9 aa, synthetic construct
PTNAVGRVH

SEQ ID NO: 34266 - protein, 9 aa, synthetic construct
PTNAVGRVF

SEQ ID NO: 34267 - protein, 9 aa, synthetic construct
PTNAGVHLR

SEQ ID NO: 34268 - protein, 9 aa, synthetic construct
PTNAGVHVR

SEQ ID NO: 34269 - protein, 9 aa, synthetic construct
PTNAGVHVF

SEQ ID NO: 34270 - protein, 9 aa, synthetic construct
PTNAGVRLY

SEQ ID NO: 34271 - protein, 9 aa, synthetic construct
PTNAGVRLH

SEQ ID NO: 34272 - protein, 9 aa, synthetic construct
PTNAGVRLF

SEQ ID NO: 34273 - protein, 9 aa, synthetic construct
PTNAGVRVY

SEQ ID NO: 34274 - protein, 9 aa, synthetic construct
PTNAGVKLH

SEQ ID NO: 34275 - protein, 9 aa, synthetic construct
PTNAGVKVR

SEQ ID NO: 34276 - protein, 9 aa, synthetic construct
PTNAGVKVH

SEQ ID NO: 34277 - protein, 9 aa, synthetic construct
PTNAGVKVK

SEQ ID NO: 34278 - protein, 9 aa, synthetic construct
PTNAGLHLF

SEQ ID NO: 34279 - protein, 9 aa, synthetic construct
PTNAGLRLH

SEQ ID NO: 34280 - protein, 9 aa, synthetic construct
PTNAGLRVH

SEQ ID NO: 34281 - protein, 9 aa, synthetic construct
PTNAGLRVF

SEQ ID NO: 34282 - protein, 9 aa, synthetic construct
PTNAGLKVH

SEQ ID NO: 34283 - protein, 9 aa, synthetic construct
PTNAGAHLR

SEQ ID NO: 34284 - protein, 9 aa, synthetic construct
PTNAGAHVR

SEQ ID NO: 34285 - protein, 9 aa, synthetic construct
PTNAGARLF

SEQ ID NO: 34286 - protein, 9 aa, synthetic construct
PTNAGARVY

SEQ ID NO: 34287 - protein, 9 aa, synthetic construct
PTNAGARVH

SEQ ID NO: 34288 - protein, 9 aa, synthetic construct
PTNAGARVK

SEQ ID NO: 34289 - protein, 9 aa, synthetic construct
PTNAGAKVY

SEQ ID NO: 34290 - protein, 9 aa, synthetic construct
PTNAGAKVH

SEQ ID NO: 34291 - protein, 9 aa, synthetic construct
PTNAGIHLH

SEQ ID NO: 34292 - protein, 9 aa, synthetic construct
PTNAGIHLK

SEQ ID NO: 34293 - protein, 9 aa, synthetic construct
PTNAGIHLF

SEQ ID NO: 34294 - protein, 9 aa, synthetic construct
PTNAGIHVY

SEQ ID NO: 34295 - protein, 9 aa, synthetic construct
PTNAGIHVF

SEQ ID NO: 34296 - protein, 9 aa, synthetic construct
PTNAGIRVF

SEQ ID NO: 34297 - protein, 9 aa, synthetic construct
PTNAGIKLY

SEQ ID NO: 34298 - protein, 9 aa, synthetic construct
PTNAGGHLY

SEQ ID NO: 34299 - protein, 9 aa, synthetic construct
PTNAGGHLK

SEQ ID NO: 34300 - protein, 9 aa, synthetic construct
PLNGVGKVK

SEQ ID NO: 34301 - protein, 9 aa, synthetic construct
PTNAGGRLY

SEQ ID NO: 34302 - protein, 9 aa, synthetic construct
PTNAGGRVY

SEQ ID NO: 34303 - protein, 9 aa, synthetic construct
PTNAGGRVR

SEQ ID NO: 34304 - protein, 9 aa, synthetic construct
PTNAGGRVH

SEQ ID NO: 34305 - protein, 9 aa, synthetic construct
PTNAGGKLY

SEQ ID NO: 34306 - protein, 9 aa, synthetic construct
PTNAGGKLF

SEQ ID NO: 34307 - protein, 9 aa, synthetic construct
PTNAGGKVY

SEQ ID NO: 34308 - protein, 9 aa, synthetic construct
PTNAGGKVH

SEQ ID NO: 34309 - protein, 9 aa, synthetic construct
PTNAGGKVK

SEQ ID NO: 34310 - protein, 9 aa, synthetic construct
PTQGAVHLR

SEQ ID NO: 34311 - protein, 9 aa, synthetic construct
PTQGAVHLH

SEQ ID NO: 34312 - protein, 9 aa, synthetic construct
PTQGAVHLK

SEQ ID NO: 34313 - protein, 9 aa, synthetic construct
PTQGAVHLF

SEQ ID NO: 34314 - protein, 9 aa, synthetic construct
PTQGAVHVY

SEQ ID NO: 34315 - protein, 9 aa, synthetic construct
PTQGAVHVR

SEQ ID NO: 34316 - protein, 9 aa, synthetic construct
PTQGAVHVF

SEQ ID NO: 34317 - protein, 9 aa, synthetic construct
PTQGAVRLH

SEQ ID NO: 34318 - protein, 9 aa, synthetic construct
PTQGAVRLF

SEQ ID NO: 34319 - protein, 9 aa, synthetic construct
PTQGAVRVH

SEQ ID NO: 34320 - protein, 9 aa, synthetic construct
PTQGAVKLY

SEQ ID NO: 34321 - protein, 9 aa, synthetic construct
PTQGAVKLR

SEQ ID NO: 34322 - protein, 9 aa, synthetic construct
PTQGAVKLH

SEQ ID NO: 34323 - protein, 9 aa, synthetic construct
PTQGAVKVH

SEQ ID NO: 34324 - protein, 9 aa, synthetic construct
PTQGAVKVK

SEQ ID NO: 34325 - protein, 9 aa, synthetic construct
PTQGAVKVF

SEQ ID NO: 34326 - protein, 9 aa, synthetic construct
PTQGALHLY

SEQ ID NO: 34327 - protein, 9 aa, synthetic construct
PTQGALHLK

SEQ ID NO: 34328 - protein, 9 aa, synthetic construct
PTQGALHVK

SEQ ID NO: 34329 - protein, 9 aa, synthetic construct
PTQGALHVF

SEQ ID NO: 34330 - protein, 9 aa, synthetic construct
PTQGALRLY

SEQ ID NO: 34331 - protein, 9 aa, synthetic construct
PTQGALRVH

SEQ ID NO: 34332 - protein, 9 aa, synthetic construct
PTQGALRVK

SEQ ID NO: 34333 - protein, 9 aa, synthetic construct
PTQGALKLY

SEQ ID NO: 34334 - protein, 9 aa, synthetic construct
PTQGALKLR

SEQ ID NO: 34335 - protein, 9 aa, synthetic construct
PTQGALKLH

SEQ ID NO: 34336 - protein, 9 aa, synthetic construct
PTQGAAHLR

SEQ ID NO: 34337 - protein, 9 aa, synthetic construct
PTQGAARLY

SEQ ID NO: 34338 - protein, 9 aa, synthetic construct
PTQGAARLH

SEQ ID NO: 34339 - protein, 9 aa, synthetic construct
PTQGAARLF

SEQ ID NO: 34340 - protein, 9 aa, synthetic construct
PTQGAARVY

SEQ ID NO: 34341 - protein, 9 aa, synthetic construct
PTQGAARVR

SEQ ID NO: 34342 - protein, 9 aa, synthetic construct
PTQGAAKLR

SEQ ID NO: 34343 - protein, 9 aa, synthetic construct
PTQGAAKLF

SEQ ID NO: 34344 - protein, 9 aa, synthetic construct
PTQGAAKVY

SEQ ID NO: 34345 - protein, 9 aa, synthetic construct
PTQGAAKVR

SEQ ID NO: 34346 - protein, 9 aa, synthetic construct
PTQGAIHLY

SEQ ID NO: 34347 - protein, 9 aa, synthetic construct
PTQGAIHLH

SEQ ID NO: 34348 - protein, 9 aa, synthetic construct
PTQGAIHLF

SEQ ID NO: 34349 - protein, 9 aa, synthetic construct
PTQGAIHVY

SEQ ID NO: 34350 - protein, 9 aa, synthetic construct
PTQGAIRLH

SEQ ID NO: 34351 - protein, 9 aa, synthetic construct
PTQGAIRLF

SEQ ID NO: 34352 - protein, 9 aa, synthetic construct
PTQGAIRVY

SEQ ID NO: 34353 - protein, 9 aa, synthetic construct
PTQGAIRVF

SEQ ID NO: 34354 - protein, 9 aa, synthetic construct
PTQGAIKLR

SEQ ID NO: 34355 - protein, 9 aa, synthetic construct
PTQGAIKLK

SEQ ID NO: 34356 - protein, 9 aa, synthetic construct
PTQGAIKVH

SEQ ID NO: 34357 - protein, 9 aa, synthetic construct
PTQGAIKVK

SEQ ID NO: 34358 - protein, 9 aa, synthetic construct
PTQGAIKVF

SEQ ID NO: 34359 - protein, 9 aa, synthetic construct
PLNGGVRLH

SEQ ID NO: 34360 - protein, 9 aa, synthetic construct
PTQGAGHLR

SEQ ID NO: 34361 - protein, 9 aa, synthetic construct
PTQGAGHLK

SEQ ID NO: 34362 - protein, 9 aa, synthetic construct
PTQGAGHVY

SEQ ID NO: 34363 - protein, 9 aa, synthetic construct
PTQGAGHVR

SEQ ID NO: 34364 - protein, 9 aa, synthetic construct
PTQGAGHVH

SEQ ID NO: 34365 - protein, 9 aa, synthetic construct
PLNGGVRLK

SEQ ID NO: 34366 - protein, 9 aa, synthetic construct
PTQGAGRLK

SEQ ID NO: 34367 - protein, 9 aa, synthetic construct
PTQGAGRVK

SEQ ID NO: 34368 - protein, 9 aa, synthetic construct
PTQGAGKLY

SEQ ID NO: 34369 - protein, 9 aa, synthetic construct
PTQGAGKLH

SEQ ID NO: 34370 - protein, 9 aa, synthetic construct
PTQGAGKVH

SEQ ID NO: 34371 - protein, 9 aa, synthetic construct
PLNGGVRVY

SEQ ID NO: 34372 - protein, 9 aa, synthetic construct
PTQGTVHLK

SEQ ID NO: 34373 - protein, 9 aa, synthetic construct
PTQGTVHVR

SEQ ID NO: 34374 - protein, 9 aa, synthetic construct
PTQGTVRLR

SEQ ID NO: 34375 - protein, 9 aa, synthetic construct
PTQGTVRVH

SEQ ID NO: 34376 - protein, 9 aa, synthetic construct
PTQGTVRVF

SEQ ID NO: 34377 - protein, 9 aa, synthetic construct
PTQGTVKLR

SEQ ID NO: 34378 - protein, 9 aa, synthetic construct
PTQGTVKVH

SEQ ID NO: 34379 - protein, 9 aa, synthetic construct
PTQGTVKVF

SEQ ID NO: 34380 - protein, 9 aa, synthetic construct
PLNGGVRVK

SEQ ID NO: 34381 - protein, 9 aa, synthetic construct
PTQGTLHLY

SEQ ID NO: 34382 - protein, 9 aa, synthetic construct
PTQGTLHLR

SEQ ID NO: 34383 - protein, 9 aa, synthetic construct
PTQGTLHVR

SEQ ID NO: 34384 - protein, 9 aa, synthetic construct
PLNGGVRVF

SEQ ID NO: 34385 - protein, 9 aa, synthetic construct
PTQGTLRLY

SEQ ID NO: 34386 - protein, 9 aa, synthetic construct
PTQGTLRLK

SEQ ID NO: 34387 - protein, 9 aa, synthetic construct
PTQGTLRVH

SEQ ID NO: 34388 - protein, 9 aa, synthetic construct
PTQGTLRVF

SEQ ID NO: 34389 - protein, 9 aa, synthetic construct
PTQGTLKVF

SEQ ID NO: 34390 - protein, 9 aa, synthetic construct
PLNGGVKLH

SEQ ID NO: 34391 - protein, 9 aa, synthetic construct
PTQGTARVH

SEQ ID NO: 34392 - protein, 9 aa, synthetic construct
PTQGTAKLR

SEQ ID NO: 34393 - protein, 9 aa, synthetic construct
PTQGTAKVH

SEQ ID NO: 34394 - protein, 9 aa, synthetic construct
PTQGTIHLR

SEQ ID NO: 34395 - protein, 9 aa, synthetic construct
PTQGTIHLF

SEQ ID NO: 34396 - protein, 9 aa, synthetic construct
PTQGTIHVY

SEQ ID NO: 34397 - protein, 9 aa, synthetic construct
PTQGTIRVH

SEQ ID NO: 34398 - protein, 9 aa, synthetic construct
PTQGTIKVH

SEQ ID NO: 34399 - protein, 9 aa, synthetic construct
PTQGTGRLY

SEQ ID NO: 34400 - protein, 9 aa, synthetic construct
PTQGTGRLH

SEQ ID NO: 34401 - protein, 9 aa, synthetic construct
PTQGTGRLK

SEQ ID NO: 34402 - protein, 9 aa, synthetic construct
PTQGTGRVR

SEQ ID NO: 34403 - protein, 9 aa, synthetic construct
PTQGTGRVK

SEQ ID NO: 34404 - protein, 9 aa, synthetic construct
PTQGSVRLR

SEQ ID NO: 34405 - protein, 9 aa, synthetic construct
PTQGSVRLH

SEQ ID NO: 34406 - protein, 9 aa, synthetic construct
PTQGSVKLR

SEQ ID NO: 34407 - protein, 9 aa, synthetic construct
PTQGSVKLK

SEQ ID NO: 34408 - protein, 9 aa, synthetic construct
PTQGSVKVR

SEQ ID NO: 34409 - protein, 9 aa, synthetic construct
PTQGSVKVK

SEQ ID NO: 34410 - protein, 9 aa, synthetic construct
PTQGSLHVR

SEQ ID NO: 34411 - protein, 9 aa, synthetic construct
PTQGSLHVF

SEQ ID NO: 34412 - protein, 9 aa, synthetic construct
PTQGSLRVY

SEQ ID NO: 34413 - protein, 9 aa, synthetic construct
PTQGSLRVH

SEQ ID NO: 34414 - protein, 9 aa, synthetic construct
PTQGSLRVF

SEQ ID NO: 34415 - protein, 9 aa, synthetic construct
PLNGGLHVY

SEQ ID NO: 34416 - protein, 9 aa, synthetic construct
PTQGSLKLF

SEQ ID NO: 34417 - protein, 9 aa, synthetic construct
PTQGSLKVY

SEQ ID NO: 34418 - protein, 9 aa, synthetic construct
PTQGSAHVH

SEQ ID NO: 34419 - protein, 9 aa, synthetic construct
PTQGSARLY

SEQ ID NO: 34420 - protein, 9 aa, synthetic construct
PTQGSARLH

SEQ ID NO: 34421 - protein, 9 aa, synthetic construct
PTQGSARVF

SEQ ID NO: 34422 - protein, 9 aa, synthetic construct
PTQGSAKLY

SEQ ID NO: 34423 - protein, 9 aa, synthetic construct
PTQGSAKLR

SEQ ID NO: 34424 - protein, 9 aa, synthetic construct
PTQGSAKLF

SEQ ID NO: 34425 - protein, 9 aa, synthetic construct
PTQGSAKVR

SEQ ID NO: 34426 - protein, 9 aa, synthetic construct
PLNGGLHVF

SEQ ID NO: 34427 - protein, 9 aa, synthetic construct
PTQGSIHLF

SEQ ID NO: 34428 - protein, 9 aa, synthetic construct
PTQGSIHVH

SEQ ID NO: 34429 - protein, 9 aa, synthetic construct
PTQGSIHVF

SEQ ID NO: 34430 - protein, 9 aa, synthetic construct
PTQGSIRLF

SEQ ID NO: 34431 - protein, 9 aa, synthetic construct
PTQGSIRVK

SEQ ID NO: 34432 - protein, 9 aa, synthetic construct
PTQGSIKLK

SEQ ID NO: 34433 - protein, 9 aa, synthetic construct
PTQGSIKLF

SEQ ID NO: 34434 - protein, 9 aa, synthetic construct
PTQGSGHLK

SEQ ID NO: 34435 - protein, 9 aa, synthetic construct
PTQGSGHVY

SEQ ID NO: 34436 - protein, 9 aa, synthetic construct
PTQGSGHVK

SEQ ID NO: 34437 - protein, 9 aa, synthetic construct
PTQGSGHVF

SEQ ID NO: 34438 - protein, 9 aa, synthetic construct
PTQGSGRLY

SEQ ID NO: 34439 - protein, 9 aa, synthetic construct
PTQGSGRLH

SEQ ID NO: 34440 - protein, 9 aa, synthetic construct
PTQGSGRVH

SEQ ID NO: 34441 - protein, 9 aa, synthetic construct
PTQGSGKLY

SEQ ID NO: 34442 - protein, 9 aa, synthetic construct
PTQGSGKLH

SEQ ID NO: 34443 - protein, 9 aa, synthetic construct
PTQGSGKLF

SEQ ID NO: 34444 - protein, 9 aa, synthetic construct
PTQGSGKVY

SEQ ID NO: 34445 - protein, 9 aa, synthetic construct
PTQGSGKVH

SEQ ID NO: 34446 - protein, 9 aa, synthetic construct
PTQGSGKVF

SEQ ID NO: 34447 - protein, 9 aa, synthetic construct
PTQGVVHLY

SEQ ID NO: 34448 - protein, 9 aa, synthetic construct
PTQGVVHLF

SEQ ID NO: 34449 - protein, 9 aa, synthetic construct
PTQGVVKLR

SEQ ID NO: 34450 - protein, 9 aa, synthetic construct
PTQGVVKVR

SEQ ID NO: 34451 - protein, 9 aa, synthetic construct
PTQGVVKVK

SEQ ID NO: 34452 - protein, 9 aa, synthetic construct
PTQGVLRLY

SEQ ID NO: 34453 - protein, 9 aa, synthetic construct
PTQGVLRLF

SEQ ID NO: 34454 - protein, 9 aa, synthetic construct
PTQGVLRVR

SEQ ID NO: 34455 - protein, 9 aa, synthetic construct
PTQGVLRVH

SEQ ID NO: 34456 - protein, 9 aa, synthetic construct
PTQGVLRVF

SEQ ID NO: 34457 - protein, 9 aa, synthetic construct
PTQGVLKVF

SEQ ID NO: 34458 - protein, 9 aa, synthetic construct
PTQGVAHVK

SEQ ID NO: 34459 - protein, 9 aa, synthetic construct
PTQGVARLY

SEQ ID NO: 34460 - protein, 9 aa, synthetic construct
PTQGVARLH

SEQ ID NO: 34461 - protein, 9 aa, synthetic construct
PTQGVARLF

SEQ ID NO: 34462 - protein, 9 aa, synthetic construct
PTQGVARVY

SEQ ID NO: 34463 - protein, 9 aa, synthetic construct
PTQGVARVR

SEQ ID NO: 34464 - protein, 9 aa, synthetic construct
PTQGVARVH

SEQ ID NO: 34465 - protein, 9 aa, synthetic construct
PTQGVARVF

SEQ ID NO: 34466 - protein, 9 aa, synthetic construct
PTQGVAKLH

SEQ ID NO: 34467 - protein, 9 aa, synthetic construct
PTQGVAKVY

SEQ ID NO: 34468 - protein, 9 aa, synthetic construct
PTQGVAKVH

SEQ ID NO: 34469 - protein, 9 aa, synthetic construct
PTQGVIHLY

SEQ ID NO: 34470 - protein, 9 aa, synthetic construct
PTQGVIHLR

SEQ ID NO: 34471 - protein, 9 aa, synthetic construct
PTQGVIHLH

SEQ ID NO: 34472 - protein, 9 aa, synthetic construct
PTQGVIHVH

SEQ ID NO: 34473 - protein, 9 aa, synthetic construct
PTQGVIKLF

SEQ ID NO: 34474 - protein, 9 aa, synthetic construct
PTQGVIKVY

SEQ ID NO: 34475 - protein, 9 aa, synthetic construct
PTQGVIKVK

SEQ ID NO: 34476 - protein, 9 aa, synthetic construct
PTQGVIKVF

SEQ ID NO: 34477 - protein, 9 aa, synthetic construct
PLNGGLKVK

SEQ ID NO: 34478 - protein, 9 aa, synthetic construct
PTQGVGRLY

SEQ ID NO: 34479 - protein, 9 aa, synthetic construct
PTQGVGRLF

SEQ ID NO: 34480 - protein, 9 aa, synthetic construct
PTQGVGRVY

SEQ ID NO: 34481 - protein, 9 aa, synthetic construct
PTQGVGRVF

SEQ ID NO: 34482 - protein, 9 aa, synthetic construct
PTQGVGKVH

SEQ ID NO: 34483 - protein, 9 aa, synthetic construct
PTQGGVHLH

SEQ ID NO: 34484 - protein, 9 aa, synthetic construct
PTQGGVHLF

SEQ ID NO: 34485 - protein, 9 aa, synthetic construct
PTQGGVHVR

SEQ ID NO: 34486 - protein, 9 aa, synthetic construct
PTQGGVRLY

SEQ ID NO: 34487 - protein, 9 aa, synthetic construct
PTQGGVRLH

SEQ ID NO: 34488 - protein, 9 aa, synthetic construct
PTQGGVRVY

SEQ ID NO: 34489 - protein, 9 aa, synthetic construct
PTQGGVRVR

SEQ ID NO: 34490 - protein, 9 aa, synthetic construct
PTQGGVRVF

SEQ ID NO: 34491 - protein, 9 aa, synthetic construct
PTQGGVKVY

SEQ ID NO: 34492 - protein, 9 aa, synthetic construct
PTQGGVKVH

SEQ ID NO: 34493 - protein, 9 aa, synthetic construct
PTQGGLHVY

SEQ ID NO: 34494 - protein, 9 aa, synthetic construct
PTQGGLHVR

SEQ ID NO: 34495 - protein, 9 aa, synthetic construct
PTQGGLRLH

SEQ ID NO: 34496 - protein, 9 aa, synthetic construct
PTQGGLRVY

SEQ ID NO: 34497 - protein, 9 aa, synthetic construct
PTQGGLRVH

SEQ ID NO: 34498 - protein, 9 aa, synthetic construct
PTQGGLRVK

SEQ ID NO: 34499 - protein, 9 aa, synthetic construct
PTQGGLRVF

SEQ ID NO: 34500 - protein, 9 aa, synthetic construct
PTQGGLKLH

SEQ ID NO: 34501 - protein, 9 aa, synthetic construct
PTQGGLKLF

SEQ ID NO: 34502 - protein, 9 aa, synthetic construct
PTQGGLKVH

SEQ ID NO: 34503 - protein, 9 aa, synthetic construct
PTQGGAHLY

SEQ ID NO: 34504 - protein, 9 aa, synthetic construct
PTQGGAHLR

SEQ ID NO: 34505 - protein, 9 aa, synthetic construct
PTQGGAHVY

SEQ ID NO: 34506 - protein, 9 aa, synthetic construct
PTQGGARLY

SEQ ID NO: 34507 - protein, 9 aa, synthetic construct
PTQGGARLH

SEQ ID NO: 34508 - protein, 9 aa, synthetic construct
PTQGGARLF

SEQ ID NO: 34509 - protein, 9 aa, synthetic construct
PTQGGARVR

SEQ ID NO: 34510 - protein, 9 aa, synthetic construct
PTQGGARVH

SEQ ID NO: 34511 - protein, 9 aa, synthetic construct
PTQGGARVF

SEQ ID NO: 34512 - protein, 9 aa, synthetic construct
PTQGGAKLY

SEQ ID NO: 34513 - protein, 9 aa, synthetic construct
PTQGGAKLR

SEQ ID NO: 34514 - protein, 9 aa, synthetic construct
PTQGGAKLH

SEQ ID NO: 34515 - protein, 9 aa, synthetic construct
PTQGGAKVF

SEQ ID NO: 34516 - protein, 9 aa, synthetic construct
PTQGGIHLR

SEQ ID NO: 34517 - protein, 9 aa, synthetic construct
PTQGGIHLH

SEQ ID NO: 34518 - protein, 9 aa, synthetic construct
PTQGGIHVF

SEQ ID NO: 34519 - protein, 9 aa, synthetic construct
PTQGGIRVF

SEQ ID NO: 34520 - protein, 9 aa, synthetic construct
PTQGGIKLF

SEQ ID NO: 34521 - protein, 9 aa, synthetic construct
PTQGGIKVH

SEQ ID NO: 34522 - protein, 9 aa, synthetic construct
PTQGGGHLY

SEQ ID NO: 34523 - protein, 9 aa, synthetic construct
PTQGGGHLR

SEQ ID NO: 34524 - protein, 9 aa, synthetic construct
PTQGGGHLK

SEQ ID NO: 34525 - protein, 9 aa, synthetic construct
PTQGGGHVH

SEQ ID NO: 34526 - protein, 9 aa, synthetic construct
PTQGGGHVK

SEQ ID NO: 34527 - protein, 9 aa, synthetic construct
PTQGGGRLY

SEQ ID NO: 34528 - protein, 9 aa, synthetic construct
PTQGGGRLF

SEQ ID NO: 34529 - protein, 9 aa, synthetic construct
PTQGGGRVH

SEQ ID NO: 34530 - protein, 9 aa, synthetic construct
PTQGGGRVF

SEQ ID NO: 34531 - protein, 9 aa, synthetic construct
PLNGGARLF

SEQ ID NO: 34532 - protein, 9 aa, synthetic construct
PTQGGGKLY

SEQ ID NO: 34533 - protein, 9 aa, synthetic construct
PTQGGGKLR

SEQ ID NO: 34534 - protein, 9 aa, synthetic construct
PTQGGGKLF

SEQ ID NO: 34535 - protein, 9 aa, synthetic construct
PTQGGGKVH

SEQ ID NO: 34536 - protein, 9 aa, synthetic construct
PTQGGGKVK

SEQ ID NO: 34537 - protein, 9 aa, synthetic construct
PTQAAVHLH

SEQ ID NO: 34538 - protein, 9 aa, synthetic construct
PTQAAVHLF

SEQ ID NO: 34539 - protein, 9 aa, synthetic construct
PTQAAVHVR

SEQ ID NO: 34540 - protein, 9 aa, synthetic construct
PTQAALHLY

SEQ ID NO: 34541 - protein, 9 aa, synthetic construct
PTQAALHLR

SEQ ID NO: 34542 - protein, 9 aa, synthetic construct
PTQAALHLH

SEQ ID NO: 34543 - protein, 9 aa, synthetic construct
PTQAALHLK

SEQ ID NO: 34544 - protein, 9 aa, synthetic construct
PTQAALHLF

SEQ ID NO: 34545 - protein, 9 aa, synthetic construct
PTQAALHVR

SEQ ID NO: 34546 - protein, 9 aa, synthetic construct
PTQAALHVF

SEQ ID NO: 34547 - protein, 9 aa, synthetic construct
PLNGGARVF

SEQ ID NO: 34548 - protein, 9 aa, synthetic construct
PTQAALRVH

SEQ ID NO: 34549 - protein, 9 aa, synthetic construct
PTQAALKLY

SEQ ID NO: 34550 - protein, 9 aa, synthetic construct
PTQAALKLH

SEQ ID NO: 34551 - protein, 9 aa, synthetic construct
PTQAALKVH

SEQ ID NO: 34552 - protein, 9 aa, synthetic construct
PTQAAAHLR

SEQ ID NO: 34553 - protein, 9 aa, synthetic construct
PTQAAAHVR

SEQ ID NO: 34554 - protein, 9 aa, synthetic construct
PTQAAARLF

SEQ ID NO: 34555 - protein, 9 aa, synthetic construct
PTQAAARVR

SEQ ID NO: 34556 - protein, 9 aa, synthetic construct
PTQAAAKLF

SEQ ID NO: 34557 - protein, 9 aa, synthetic construct
PTQAAAKVH

SEQ ID NO: 34558 - protein, 9 aa, synthetic construct
PTQAAIHLY

SEQ ID NO: 34559 - protein, 9 aa, synthetic construct
PTQAAIHLR

SEQ ID NO: 34560 - protein, 9 aa, synthetic construct
PTQAAIHVY

SEQ ID NO: 34561 - protein, 9 aa, synthetic construct
PTQAAIHVR

SEQ ID NO: 34562 - protein, 9 aa, synthetic construct
PTQAAIHVF

SEQ ID NO: 34563 - protein, 9 aa, synthetic construct
PTQAAIRLY

SEQ ID NO: 34564 - protein, 9 aa, synthetic construct
PTQAAIRLF

SEQ ID NO: 34565 - protein, 9 aa, synthetic construct
PTQAAIRVY

SEQ ID NO: 34566 - protein, 9 aa, synthetic construct
PTQAAIRVK

SEQ ID NO: 34567 - protein, 9 aa, synthetic construct
PTQAAIRVF

SEQ ID NO: 34568 - protein, 9 aa, synthetic construct
PTQAAIKLR

SEQ ID NO: 34569 - protein, 9 aa, synthetic construct
PTQAAIKLK

SEQ ID NO: 34570 - protein, 9 aa, synthetic construct
PTQAAIKLF

SEQ ID NO: 34571 - protein, 9 aa, synthetic construct
PTQAAGHVY

SEQ ID NO: 34572 - protein, 9 aa, synthetic construct
PTQAAGHVR

SEQ ID NO: 34573 - protein, 9 aa, synthetic construct
PTQAAGRLR

SEQ ID NO: 34574 - protein, 9 aa, synthetic construct
PTQAAGRLF

SEQ ID NO: 34575 - protein, 9 aa, synthetic construct
PTQAAGKLH

SEQ ID NO: 34576 - protein, 9 aa, synthetic construct
PTQATVHLF

SEQ ID NO: 34577 - protein, 9 aa, synthetic construct
PTQATVHVY

SEQ ID NO: 34578 - protein, 9 aa, synthetic construct
PTQATVHVR

SEQ ID NO: 34579 - protein, 9 aa, synthetic construct
PTQATVHVK

SEQ ID NO: 34580 - protein, 9 aa, synthetic construct
PTQATVRLR

SEQ ID NO: 34581 - protein, 9 aa, synthetic construct
PTQATVRLH

SEQ ID NO: 34582 - protein, 9 aa, synthetic construct
PTQATVKLR

SEQ ID NO: 34583 - protein, 9 aa, synthetic construct
PTQATVKLH

SEQ ID NO: 34584 - protein, 9 aa, synthetic construct
PTQATVKVH

SEQ ID NO: 34585 - protein, 9 aa, synthetic construct
PTQATLHLY

SEQ ID NO: 34586 - protein, 9 aa, synthetic construct
PTQATLHLR

SEQ ID NO: 34587 - protein, 9 aa, synthetic construct
PTQATLHLH

SEQ ID NO: 34588 - protein, 9 aa, synthetic construct
PTQATLHLK

SEQ ID NO: 34589 - protein, 9 aa, synthetic construct
PTQATLHLF

SEQ ID NO: 34590 - protein, 9 aa, synthetic construct
PTQATLHVY

SEQ ID NO: 34591 - protein, 9 aa, synthetic construct
PTQATLHVR

SEQ ID NO: 34592 - protein, 9 aa, synthetic construct
PTQATLHVH

SEQ ID NO: 34593 - protein, 9 aa, synthetic construct
PTQATLHVF

SEQ ID NO: 34594 - protein, 9 aa, synthetic construct
PLNGGIHLF

SEQ ID NO: 34595 - protein, 9 aa, synthetic construct
PTQATLRLY

SEQ ID NO: 34596 - protein, 9 aa, synthetic construct
PTQATLRLH

SEQ ID NO: 34597 - protein, 9 aa, synthetic construct
PTQATLRVY

SEQ ID NO: 34598 - protein, 9 aa, synthetic construct
PTQATLKLY

SEQ ID NO: 34599 - protein, 9 aa, synthetic construct
PTQATLKLH

SEQ ID NO: 34600 - protein, 9 aa, synthetic construct
PTQATLKVY

SEQ ID NO: 34601 - protein, 9 aa, synthetic construct
PTQATLKVH

SEQ ID NO: 34602 - protein, 9 aa, synthetic construct
PTQATIHLR

SEQ ID NO: 34603 - protein, 9 aa, synthetic construct
PTQATIHLF

SEQ ID NO: 34604 - protein, 9 aa, synthetic construct
PTQATIHVY

SEQ ID NO: 34605 - protein, 9 aa, synthetic construct
PTQATIHVF

SEQ ID NO: 34606 - protein, 9 aa, synthetic construct
PTQATIRLH

SEQ ID NO: 34607 - protein, 9 aa, synthetic construct
PTQATIRLF

SEQ ID NO: 34608 - protein, 9 aa, synthetic construct
PTQATIRVF

SEQ ID NO: 34609 - protein, 9 aa, synthetic construct
PTQATIKLY

SEQ ID NO: 34610 - protein, 9 aa, synthetic construct
PTQATIKVH

SEQ ID NO: 34611 - protein, 9 aa, synthetic construct
PTQATIKVF

SEQ ID NO: 34612 - protein, 9 aa, synthetic construct
PTQATGRLK

SEQ ID NO: 34613 - protein, 9 aa, synthetic construct
PTQATGRLF

SEQ ID NO: 34614 - protein, 9 aa, synthetic construct
PLNGGIRLF

SEQ ID NO: 34615 - protein, 9 aa, synthetic construct
PTQASVHLY

SEQ ID NO: 34616 - protein, 9 aa, synthetic construct
PTQASVHLK

SEQ ID NO: 34617 - protein, 9 aa, synthetic construct
PTQASVHVR

SEQ ID NO: 34618 - protein, 9 aa, synthetic construct
PTQASVRLY

SEQ ID NO: 34619 - protein, 9 aa, synthetic construct
PTQASVRLR

SEQ ID NO: 34620 - protein, 9 aa, synthetic construct
PTQASVRLH

SEQ ID NO: 34621 - protein, 9 aa, synthetic construct
PTQASVRVY

SEQ ID NO: 34622 - protein, 9 aa, synthetic construct
PTQASVRVR

SEQ ID NO: 34623 - protein, 9 aa, synthetic construct
PTQASVRVF

SEQ ID NO: 34624 - protein, 9 aa, synthetic construct
PTQASVKLR

SEQ ID NO: 34625 - protein, 9 aa, synthetic construct
PTQASVKVY

SEQ ID NO: 34626 - protein, 9 aa, synthetic construct
PTQASVKVK

SEQ ID NO: 34627 - protein, 9 aa, synthetic construct
PTQASLHLK

SEQ ID NO: 34628 - protein, 9 aa, synthetic construct
PTQASLHVY

SEQ ID NO: 34629 - protein, 9 aa, synthetic construct
PTQASLHVR

SEQ ID NO: 34630 - protein, 9 aa, synthetic construct
PTQASLHVK

SEQ ID NO: 34631 - protein, 9 aa, synthetic construct
PTQASLHVF

SEQ ID NO: 34632 - protein, 9 aa, synthetic construct
PLNGGIRVF

SEQ ID NO: 34633 - protein, 9 aa, synthetic construct
PTQASLRLY

SEQ ID NO: 34634 - protein, 9 aa, synthetic construct
PTQASLRLH

SEQ ID NO: 34635 - protein, 9 aa, synthetic construct
PTQASLRVY

SEQ ID NO: 34636 - protein, 9 aa, synthetic construct
PTQASLRVH

SEQ ID NO: 34637 - protein, 9 aa, synthetic construct
PTQASLRVF

SEQ ID NO: 34638 - protein, 9 aa, synthetic construct
PLNGAARLR

SEQ ID NO: 34639 - protein, 9 aa, synthetic construct
PLNGGIKLY

SEQ ID NO: 34640 - protein, 9 aa, synthetic construct
PLNGGIKLR

SEQ ID NO: 34641 - protein, 9 aa, synthetic construct
PTQASAHLR

SEQ ID NO: 34642 - protein, 9 aa, synthetic construct
PTQASAHLK

SEQ ID NO: 34643 - protein, 9 aa, synthetic construct
PTQASAHVR

SEQ ID NO: 34644 - protein, 9 aa, synthetic construct
PTQASAHVH

SEQ ID NO: 34645 - protein, 9 aa, synthetic construct
PTQASAHVK

SEQ ID NO: 34646 - protein, 9 aa, synthetic construct
PTQASAHVF

SEQ ID NO: 34647 - protein, 9 aa, synthetic construct
PTQASARVY

SEQ ID NO: 34648 - protein, 9 aa, synthetic construct
PTQASARVF

SEQ ID NO: 34649 - protein, 9 aa, synthetic construct
PLNGGIKLK

SEQ ID NO: 34650 - protein, 9 aa, synthetic construct
PTQASAKLR

SEQ ID NO: 34651 - protein, 9 aa, synthetic construct
PTQASAKVF

SEQ ID NO: 34652 - protein, 9 aa, synthetic construct
PLNGGIKLF

SEQ ID NO: 34653 - protein, 9 aa, synthetic construct
PTQASIHLY

SEQ ID NO: 34654 - protein, 9 aa, synthetic construct
PTQASIHLR

SEQ ID NO: 34655 - protein, 9 aa, synthetic construct
PTQASIHLH

SEQ ID NO: 34656 - protein, 9 aa, synthetic construct
PTQASIHLF

SEQ ID NO: 34657 - protein, 9 aa, synthetic construct
PTQASIHVY

SEQ ID NO: 34658 - protein, 9 aa, synthetic construct
PTQASIHVR

SEQ ID NO: 34659 - protein, 9 aa, synthetic construct
PLNGGIKVY

SEQ ID NO: 34660 - protein, 9 aa, synthetic construct
PTQASIRLY

SEQ ID NO: 34661 - protein, 9 aa, synthetic construct
PTQASIRVY

SEQ ID NO: 34662 - protein, 9 aa, synthetic construct
PTQASIRVR

SEQ ID NO: 34663 - protein, 9 aa, synthetic construct
PTQASIKLY

SEQ ID NO: 34664 - protein, 9 aa, synthetic construct
PTQASIKLH

SEQ ID NO: 34665 - protein, 9 aa, synthetic construct
PLNGGIKVH

SEQ ID NO: 34666 - protein, 9 aa, synthetic construct
PTQASGHVY

SEQ ID NO: 34667 - protein, 9 aa, synthetic construct
PTQASGRLY

SEQ ID NO: 34668 - protein, 9 aa, synthetic construct
PTQASGRLH

SEQ ID NO: 34669 - protein, 9 aa, synthetic construct
PTQASGKLY

SEQ ID NO: 34670 - protein, 9 aa, synthetic construct
PTQASGKLH

SEQ ID NO: 34671 - protein, 9 aa, synthetic construct
PTQASGKVH

SEQ ID NO: 34672 - protein, 9 aa, synthetic construct
PTQAVVHLY

SEQ ID NO: 34673 - protein, 9 aa, synthetic construct
PTQAVVHVF

SEQ ID NO: 34674 - protein, 9 aa, synthetic construct
PTQAVVRLY

SEQ ID NO: 34675 - protein, 9 aa, synthetic construct
PTQAVVRVY

SEQ ID NO: 34676 - protein, 9 aa, synthetic construct
PTQAVVRVF

SEQ ID NO: 34677 - protein, 9 aa, synthetic construct
PTQAVVKLY

SEQ ID NO: 34678 - protein, 9 aa, synthetic construct
PTQAVVKLR

SEQ ID NO: 34679 - protein, 9 aa, synthetic construct
PTQAVVKLH

SEQ ID NO: 34680 - protein, 9 aa, synthetic construct
PTQAVVKLK

SEQ ID NO: 34681 - protein, 9 aa, synthetic construct
PTQAVVKLF

SEQ ID NO: 34682 - protein, 9 aa, synthetic construct
PTQAVVKVH

SEQ ID NO: 34683 - protein, 9 aa, synthetic construct
PTQAVVKVK

SEQ ID NO: 34684 - protein, 9 aa, synthetic construct
PTQAVVKVF

SEQ ID NO: 34685 - protein, 9 aa, synthetic construct
PTQAVLHVF

SEQ ID NO: 34686 - protein, 9 aa, synthetic construct
PTQAVLRLH

SEQ ID NO: 34687 - protein, 9 aa, synthetic construct
PTQAVLRLF

SEQ ID NO: 34688 - protein, 9 aa, synthetic construct
PTQAVLKLF

SEQ ID NO: 34689 - protein, 9 aa, synthetic construct
PTQAVLKVY

SEQ ID NO: 34690 - protein, 9 aa, synthetic construct
PTQAVAHLY

SEQ ID NO: 34691 - protein, 9 aa, synthetic construct
PTQAVAHVR

SEQ ID NO: 34692 - protein, 9 aa, synthetic construct
PTQAVAHVH

SEQ ID NO: 34693 - protein, 9 aa, synthetic construct
PTQAVAHVF

SEQ ID NO: 34694 - protein, 9 aa, synthetic construct
PTQAVARVY

SEQ ID NO: 34695 - protein, 9 aa, synthetic construct
PTQAVAKLF

SEQ ID NO: 34696 - protein, 9 aa, synthetic construct
PTQAVAKVR

SEQ ID NO: 34697 - protein, 9 aa, synthetic construct
PTQAVAKVH

SEQ ID NO: 34698 - protein, 9 aa, synthetic construct
PTQAVIHLF

SEQ ID NO: 34699 - protein, 9 aa, synthetic construct
PTQAVIRLR

SEQ ID NO: 34700 - protein, 9 aa, synthetic construct
PTQAVIRVY

SEQ ID NO: 34701 - protein, 9 aa, synthetic construct
PTQAVIKLY

SEQ ID NO: 34702 - protein, 9 aa, synthetic construct
PTQAVIKLF

SEQ ID NO: 34703 - protein, 9 aa, synthetic construct
PTQAVIKVH

SEQ ID NO: 34704 - protein, 9 aa, synthetic construct
PTQAVGHLH

SEQ ID NO: 34705 - protein, 9 aa, synthetic construct
PTQAVGHLF

SEQ ID NO: 34706 - protein, 9 aa, synthetic construct
PTQAVGHVR

SEQ ID NO: 34707 - protein, 9 aa, synthetic construct
PLNGGGRLK

SEQ ID NO: 34708 - protein, 9 aa, synthetic construct
PTQAVGRLF

SEQ ID NO: 34709 - protein, 9 aa, synthetic construct
PTQAVGRVY

SEQ ID NO: 34710 - protein, 9 aa, synthetic construct
PTQAVGRVK

SEQ ID NO: 34711 - protein, 9 aa, synthetic construct
PTQAGLRVF

SEQ ID NO: 34712 - protein, 9 aa, synthetic construct
PTQAGLKVH

SEQ ID NO: 34713 - protein, 9 aa, synthetic construct
PTQAGLKVF

SEQ ID NO: 34714 - protein, 9 aa, synthetic construct
PTQAGAHVR

SEQ ID NO: 34715 - protein, 9 aa, synthetic construct
PTQAGAHVK

SEQ ID NO: 34716 - protein, 9 aa, synthetic construct
PTQAGARLH

SEQ ID NO: 34717 - protein, 9 aa, synthetic construct
PTQAGARLF

SEQ ID NO: 34718 - protein, 9 aa, synthetic construct
PTQAGIHLF

SEQ ID NO: 34719 - protein, 9 aa, synthetic construct
PTQAGIRLY

SEQ ID NO: 34720 - protein, 9 aa, synthetic construct
PTQAGIRVY

SEQ ID NO: 34721 - protein, 9 aa, synthetic construct
PTQAGIRVF

SEQ ID NO: 34722 - protein, 9 aa, synthetic construct
PTQAGIKLH

SEQ ID NO: 34723 - protein, 9 aa, synthetic construct
PTQAGGHLR

SEQ ID NO: 34724 - protein, 9 aa, synthetic construct
PTQAGGHVY

SEQ ID NO: 34725 - protein, 9 aa, synthetic construct
PTQAGGRLH

SEQ ID NO: 34726 - protein, 9 aa, synthetic construct
PTPGAVHLF

SEQ ID NO: 34727 - protein, 9 aa, synthetic construct
PTPGAVHVY

SEQ ID NO: 34728 - protein, 9 aa, synthetic construct
PTPGAVHVR

SEQ ID NO: 34729 - protein, 9 aa, synthetic construct
PTPGAVHVF

SEQ ID NO: 34730 - protein, 9 aa, synthetic construct
PTPGAVRLY

SEQ ID NO: 34731 - protein, 9 aa, synthetic construct
PTPGAVRLH

SEQ ID NO: 34732 - protein, 9 aa, synthetic construct
PTPGAVRLK

SEQ ID NO: 34733 - protein, 9 aa, synthetic construct
PTPGAVRVY

SEQ ID NO: 34734 - protein, 9 aa, synthetic construct
PTPGAVRVF

SEQ ID NO: 34735 - protein, 9 aa, synthetic construct
PLNAAVHLH

SEQ ID NO: 34736 - protein, 9 aa, synthetic construct
PTPGAVKLY

SEQ ID NO: 34737 - protein, 9 aa, synthetic construct
PTPGAVKLF

SEQ ID NO: 34738 - protein, 9 aa, synthetic construct
PTPGAVKVH

SEQ ID NO: 34739 - protein, 9 aa, synthetic construct
PTPGAVKVF

SEQ ID NO: 34740 - protein, 9 aa, synthetic construct
PTPGALHLH

SEQ ID NO: 34741 - protein, 9 aa, synthetic construct
PTPGALHVR

SEQ ID NO: 34742 - protein, 9 aa, synthetic construct
PTPGALHVK

SEQ ID NO: 34743 - protein, 9 aa, synthetic construct
PTPGALHVF

SEQ ID NO: 34744 - protein, 9 aa, synthetic construct
PLNAAVHLF

SEQ ID NO: 34745 - protein, 9 aa, synthetic construct
PTPGALRLY

SEQ ID NO: 34746 - protein, 9 aa, synthetic construct
PTPGALRVK

SEQ ID NO: 34747 - protein, 9 aa, synthetic construct
PTPGALKLY

SEQ ID NO: 34748 - protein, 9 aa, synthetic construct
PTPGALKLR

SEQ ID NO: 34749 - protein, 9 aa, synthetic construct
PTPGALKLF

SEQ ID NO: 34750 - protein, 9 aa, synthetic construct
PTPGALKVR

SEQ ID NO: 34751 - protein, 9 aa, synthetic construct
PTPGALKVH

SEQ ID NO: 34752 - protein, 9 aa, synthetic construct
PTPGAAHLY

SEQ ID NO: 34753 - protein, 9 aa, synthetic construct
PTPGAAHLF

SEQ ID NO: 34754 - protein, 9 aa, synthetic construct
PTPGAAHVR

SEQ ID NO: 34755 - protein, 9 aa, synthetic construct
PTPGAARLY

SEQ ID NO: 34756 - protein, 9 aa, synthetic construct
PTPGAARLH

SEQ ID NO: 34757 - protein, 9 aa, synthetic construct
PTPGAARLF

SEQ ID NO: 34758 - protein, 9 aa, synthetic construct
PTPGAARVR

SEQ ID NO: 34759 - protein, 9 aa, synthetic construct
PTPGAARVF

SEQ ID NO: 34760 - protein, 9 aa, synthetic construct
PTPGAAKLR

SEQ ID NO: 34761 - protein, 9 aa, synthetic construct
PTPGAAKLH

SEQ ID NO: 34762 - protein, 9 aa, synthetic construct
PTPGAAKVY

SEQ ID NO: 34763 - protein, 9 aa, synthetic construct
PTPGAAKVR

SEQ ID NO: 34764 - protein, 9 aa, synthetic construct
PTPGAAKVK

SEQ ID NO: 34765 - protein, 9 aa, synthetic construct
PTPGAIHLY

SEQ ID NO: 34766 - protein, 9 aa, synthetic construct
PTPGAIHLR

SEQ ID NO: 34767 - protein, 9 aa, synthetic construct
PTPGAIHLF

SEQ ID NO: 34768 - protein, 9 aa, synthetic construct
PTPGAIHVR

SEQ ID NO: 34769 - protein, 9 aa, synthetic construct
PLNGAARVR

SEQ ID NO: 34770 - protein, 9 aa, synthetic construct
PTPGAIRLY

SEQ ID NO: 34771 - protein, 9 aa, synthetic construct
PTPGAIRLR

SEQ ID NO: 34772 - protein, 9 aa, synthetic construct
PTPGAIRVY

SEQ ID NO: 34773 - protein, 9 aa, synthetic construct
PTPGAIRVR

SEQ ID NO: 34774 - protein, 9 aa, synthetic construct
PTPGAIRVF

SEQ ID NO: 34775 - protein, 9 aa, synthetic construct
PTPGAIKLY

SEQ ID NO: 34776 - protein, 9 aa, synthetic construct
PTPGAIKLR

SEQ ID NO: 34777 - protein, 9 aa, synthetic construct
PTPGAIKLK

SEQ ID NO: 34778 - protein, 9 aa, synthetic construct
PTPGAIKLF

SEQ ID NO: 34779 - protein, 9 aa, synthetic construct
PTPGAIKVY

SEQ ID NO: 34780 - protein, 9 aa, synthetic construct
PTPGAIKVH

SEQ ID NO: 34781 - protein, 9 aa, synthetic construct
PTPGAIKVK

SEQ ID NO: 34782 - protein, 9 aa, synthetic construct
PTPGAGHLR

SEQ ID NO: 34783 - protein, 9 aa, synthetic construct
PTPGAGHLK

SEQ ID NO: 34784 - protein, 9 aa, synthetic construct
PTPGAGHLF

SEQ ID NO: 34785 - protein, 9 aa, synthetic construct
PTPGAGHVR

SEQ ID NO: 34786 - protein, 9 aa, synthetic construct
PTPGAGHVH

SEQ ID NO: 34787 - protein, 9 aa, synthetic construct
PTPGAGRLY

SEQ ID NO: 34788 - protein, 9 aa, synthetic construct
PTPGAGRLR

SEQ ID NO: 34789 - protein, 9 aa, synthetic construct
PTPGAGRLH

SEQ ID NO: 34790 - protein, 9 aa, synthetic construct
PTPGAGRLK

SEQ ID NO: 34791 - protein, 9 aa, synthetic construct
PTPGAGRVY

SEQ ID NO: 34792 - protein, 9 aa, synthetic construct
PTPGAGRVR

SEQ ID NO: 34793 - protein, 9 aa, synthetic construct
PTPGAGRVH

SEQ ID NO: 34794 - protein, 9 aa, synthetic construct
PTPGAGRVK

SEQ ID NO: 34795 - protein, 9 aa, synthetic construct
PTPGAGRVF

SEQ ID NO: 34796 - protein, 9 aa, synthetic construct
PTPGAGKVH

SEQ ID NO: 34797 - protein, 9 aa, synthetic construct
PTPGTVHVR

SEQ ID NO: 34798 - protein, 9 aa, synthetic construct
PTPGTVHVF

SEQ ID NO: 34799 - protein, 9 aa, synthetic construct
PTPGTVRLK

SEQ ID NO: 34800 - protein, 9 aa, synthetic construct
PTPGTVRLF

SEQ ID NO: 34801 - protein, 9 aa, synthetic construct
PTPGTVRVF

SEQ ID NO: 34802 - protein, 9 aa, synthetic construct
PTPGTVKLY

SEQ ID NO: 34803 - protein, 9 aa, synthetic construct
PTPGTVKLR

SEQ ID NO: 34804 - protein, 9 aa, synthetic construct
PTPGTVKVR

SEQ ID NO: 34805 - protein, 9 aa, synthetic construct
PTPGTVKVK

SEQ ID NO: 34806 - protein, 9 aa, synthetic construct
PTPGTLRLY

SEQ ID NO: 34807 - protein, 9 aa, synthetic construct
PTPGTLRLH

SEQ ID NO: 34808 - protein, 9 aa, synthetic construct
PTPGTLRLF

SEQ ID NO: 34809 - protein, 9 aa, synthetic construct
PTPGTLRVY

SEQ ID NO: 34810 - protein, 9 aa, synthetic construct
PTPGTLRVR

SEQ ID NO: 34811 - protein, 9 aa, synthetic construct
PTPGTLRVK

SEQ ID NO: 34812 - protein, 9 aa, synthetic construct
PTPGTLKLR

SEQ ID NO: 34813 - protein, 9 aa, synthetic construct
PTPGTLKLF

SEQ ID NO: 34814 - protein, 9 aa, synthetic construct
PTPGTLKVR

SEQ ID NO: 34815 - protein, 9 aa, synthetic construct
PTPGTLKVK

SEQ ID NO: 34816 - protein, 9 aa, synthetic construct
PLNAAVKLR

SEQ ID NO: 34817 - protein, 9 aa, synthetic construct
PTPGTARLY

SEQ ID NO: 34818 - protein, 9 aa, synthetic construct
PTPGTAKLH

SEQ ID NO: 34819 - protein, 9 aa, synthetic construct
PTPGTIRLH

SEQ ID NO: 34820 - protein, 9 aa, synthetic construct
PTPGTIKLY

SEQ ID NO: 34821 - protein, 9 aa, synthetic construct
PTPGTIKLK

SEQ ID NO: 34822 - protein, 9 aa, synthetic construct
PTPGTIKLF

SEQ ID NO: 34823 - protein, 9 aa, synthetic construct
PTPGTIKVH

SEQ ID NO: 34824 - protein, 9 aa, synthetic construct
PTPGTIKVF

SEQ ID NO: 34825 - protein, 9 aa, synthetic construct
PTPGTGHVY

SEQ ID NO: 34826 - protein, 9 aa, synthetic construct
PTPGTGHVR

SEQ ID NO: 34827 - protein, 9 aa, synthetic construct
PLNAAVKVK

SEQ ID NO: 34828 - protein, 9 aa, synthetic construct
PTPGTGRLR

SEQ ID NO: 34829 - protein, 9 aa, synthetic construct
PTPGTGRLK

SEQ ID NO: 34830 - protein, 9 aa, synthetic construct
PTPGTGRVY

SEQ ID NO: 34831 - protein, 9 aa, synthetic construct
PTPGTGKLH

SEQ ID NO: 34832 - protein, 9 aa, synthetic construct
PTPGTGKVR

SEQ ID NO: 34833 - protein, 9 aa, synthetic construct
PTPGSVHLY

SEQ ID NO: 34834 - protein, 9 aa, synthetic construct
PTPGSVHLR

SEQ ID NO: 34835 - protein, 9 aa, synthetic construct
PTPGSVHLK

SEQ ID NO: 34836 - protein, 9 aa, synthetic construct
PTPGSVHLF

SEQ ID NO: 34837 - protein, 9 aa, synthetic construct
PTPGSVHVR

SEQ ID NO: 34838 - protein, 9 aa, synthetic construct
PTPGSVHVF

SEQ ID NO: 34839 - protein, 9 aa, synthetic construct
PTPGSVRVF

SEQ ID NO: 34840 - protein, 9 aa, synthetic construct
PTPGSVKLH

SEQ ID NO: 34841 - protein, 9 aa, synthetic construct
PTPGSLHLK

SEQ ID NO: 34842 - protein, 9 aa, synthetic construct
PTPGSLHVY

SEQ ID NO: 34843 - protein, 9 aa, synthetic construct
PTPGSLHVR

SEQ ID NO: 34844 - protein, 9 aa, synthetic construct
PTPGSLHVF

SEQ ID NO: 34845 - protein, 9 aa, synthetic construct
PTPGSLRVY

SEQ ID NO: 34846 - protein, 9 aa, synthetic construct
PTPGSLRVH

SEQ ID NO: 34847 - protein, 9 aa, synthetic construct
PTPGSLRVF

SEQ ID NO: 34848 - protein, 9 aa, synthetic construct
PLNAALHVY

SEQ ID NO: 34849 - protein, 9 aa, synthetic construct
PTPGSLKLY

SEQ ID NO: 34850 - protein, 9 aa, synthetic construct
PTPGSLKLH

SEQ ID NO: 34851 - protein, 9 aa, synthetic construct
PTPGSLKVH

SEQ ID NO: 34852 - protein, 9 aa, synthetic construct
PTPGSLKVF

SEQ ID NO: 34853 - protein, 9 aa, synthetic construct
PTPGSARLH

SEQ ID NO: 34854 - protein, 9 aa, synthetic construct
PTPGSARLF

SEQ ID NO: 34855 - protein, 9 aa, synthetic construct
PTPGSAKLY

SEQ ID NO: 34856 - protein, 9 aa, synthetic construct
PTPGSAKLR

SEQ ID NO: 34857 - protein, 9 aa, synthetic construct
PTPGSAKVY

SEQ ID NO: 34858 - protein, 9 aa, synthetic construct
PTPGSAKVH

SEQ ID NO: 34859 - protein, 9 aa, synthetic construct
PTPGSIHLF

SEQ ID NO: 34860 - protein, 9 aa, synthetic construct
PTPGSIHVR

SEQ ID NO: 34861 - protein, 9 aa, synthetic construct
PTPGSIRLY

SEQ ID NO: 34862 - protein, 9 aa, synthetic construct
PTPGSIRLH

SEQ ID NO: 34863 - protein, 9 aa, synthetic construct
PTPGSIRLF

SEQ ID NO: 34864 - protein, 9 aa, synthetic construct
PTPGSIRVH

SEQ ID NO: 34865 - protein, 9 aa, synthetic construct
PTPGSIRVF

SEQ ID NO: 34866 - protein, 9 aa, synthetic construct
PTPGSIKLY

SEQ ID NO: 34867 - protein, 9 aa, synthetic construct
PTPGSIKLH

SEQ ID NO: 34868 - protein, 9 aa, synthetic construct
PTPGSIKLK

SEQ ID NO: 34869 - protein, 9 aa, synthetic construct
PTPGSIKVR

SEQ ID NO: 34870 - protein, 9 aa, synthetic construct
PTPGSIKVH

SEQ ID NO: 34871 - protein, 9 aa, synthetic construct
PLNAALRLH

SEQ ID NO: 34872 - protein, 9 aa, synthetic construct
PTPGSGHLK

SEQ ID NO: 34873 - protein, 9 aa, synthetic construct
PTPGSGHLF

SEQ ID NO: 34874 - protein, 9 aa, synthetic construct
PTPGSGHVY

SEQ ID NO: 34875 - protein, 9 aa, synthetic construct
PTPGSGHVR

SEQ ID NO: 34876 - protein, 9 aa, synthetic construct
PTPGSGRLH

SEQ ID NO: 34877 - protein, 9 aa, synthetic construct
PTPGSGRLK

SEQ ID NO: 34878 - protein, 9 aa, synthetic construct
PTPGSGRLF

SEQ ID NO: 34879 - protein, 9 aa, synthetic construct
PTPGSGRVY

SEQ ID NO: 34880 - protein, 9 aa, synthetic construct
PTPGSGRVH

SEQ ID NO: 34881 - protein, 9 aa, synthetic construct
PTPGSGRVF

SEQ ID NO: 34882 - protein, 9 aa, synthetic construct
PLNAALRLF

SEQ ID NO: 34883 - protein, 9 aa, synthetic construct
PTPGSGKLY

SEQ ID NO: 34884 - protein, 9 aa, synthetic construct
PTPGSGKLR

SEQ ID NO: 34885 - protein, 9 aa, synthetic construct
PTPGSGKLH

SEQ ID NO: 34886 - protein, 9 aa, synthetic construct
PTPGSGKLK

SEQ ID NO: 34887 - protein, 9 aa, synthetic construct
PTPGSGKLF

SEQ ID NO: 34888 - protein, 9 aa, synthetic construct
PTPGSGKVY

SEQ ID NO: 34889 - protein, 9 aa, synthetic construct
PTPGSGKVH

SEQ ID NO: 34890 - protein, 9 aa, synthetic construct
PTPGSGKVK

SEQ ID NO: 34891 - protein, 9 aa, synthetic construct
PTPGVVHLY

SEQ ID NO: 34892 - protein, 9 aa, synthetic construct
PTPGVVHLR

SEQ ID NO: 34893 - protein, 9 aa, synthetic construct
PTPGVVHVR

SEQ ID NO: 34894 - protein, 9 aa, synthetic construct
PTPGVVHVF

SEQ ID NO: 34895 - protein, 9 aa, synthetic construct
PTPGVVRLY

SEQ ID NO: 34896 - protein, 9 aa, synthetic construct
PTPGVVRLH

SEQ ID NO: 34897 - protein, 9 aa, synthetic construct
PTPGVVRLF

SEQ ID NO: 34898 - protein, 9 aa, synthetic construct
PLNAALRVH

SEQ ID NO: 34899 - protein, 9 aa, synthetic construct
PTPGVVKLH

SEQ ID NO: 34900 - protein, 9 aa, synthetic construct
PTPGVVKVR

SEQ ID NO: 34901 - protein, 9 aa, synthetic construct
PTPGVVKVH

SEQ ID NO: 34902 - protein, 9 aa, synthetic construct
PTPGVVKVF

SEQ ID NO: 34903 - protein, 9 aa, synthetic construct
PTPGVLHVY

SEQ ID NO: 34904 - protein, 9 aa, synthetic construct
PTPGVLHVR

SEQ ID NO: 34905 - protein, 9 aa, synthetic construct
PTPGVLHVH

SEQ ID NO: 34906 - protein, 9 aa, synthetic construct
PTPGVLHVF

SEQ ID NO: 34907 - protein, 9 aa, synthetic construct
PTPGVLRLK

SEQ ID NO: 34908 - protein, 9 aa, synthetic construct
PTPGVLRLF

SEQ ID NO: 34909 - protein, 9 aa, synthetic construct
PTPGVLRVY

SEQ ID NO: 34910 - protein, 9 aa, synthetic construct
PTPGVLRVR

SEQ ID NO: 34911 - protein, 9 aa, synthetic construct
PTPGVLRVK

SEQ ID NO: 34912 - protein, 9 aa, synthetic construct
PLNAALKLY

SEQ ID NO: 34913 - protein, 9 aa, synthetic construct
PTPGVLKLR

SEQ ID NO: 34914 - protein, 9 aa, synthetic construct
PTPGVLKVY

SEQ ID NO: 34915 - protein, 9 aa, synthetic construct
PTPGVLKVF

SEQ ID NO: 34916 - protein, 9 aa, synthetic construct
PTPGVAHLY

SEQ ID NO: 34917 - protein, 9 aa, synthetic construct
PTPGVAHLF

SEQ ID NO: 34918 - protein, 9 aa, synthetic construct
PTPGVAHVR

SEQ ID NO: 34919 - protein, 9 aa, synthetic construct
PTPGVAHVK

SEQ ID NO: 34920 - protein, 9 aa, synthetic construct
PTPGVAHVF

SEQ ID NO: 34921 - protein, 9 aa, synthetic construct
PTPGVARVY

SEQ ID NO: 34922 - protein, 9 aa, synthetic construct
PTPGVARVR

SEQ ID NO: 34923 - protein, 9 aa, synthetic construct
PTPGVARVH

SEQ ID NO: 34924 - protein, 9 aa, synthetic construct
PLNAALKLK

SEQ ID NO: 34925 - protein, 9 aa, synthetic construct
PTPGVIHLR

SEQ ID NO: 34926 - protein, 9 aa, synthetic construct
PTPGVIHLH

SEQ ID NO: 34927 - protein, 9 aa, synthetic construct
PTPGVIHLF

SEQ ID NO: 34928 - protein, 9 aa, synthetic construct
PTPGVIHVR

SEQ ID NO: 34929 - protein, 9 aa, synthetic construct
PTPGVIHVH

SEQ ID NO: 34930 - protein, 9 aa, synthetic construct
PTPGVIHVF

SEQ ID NO: 34931 - protein, 9 aa, synthetic construct
PLNAALKVY

SEQ ID NO: 34932 - protein, 9 aa, synthetic construct
PTPGVIRLY

SEQ ID NO: 34933 - protein, 9 aa, synthetic construct
PTPGVIRLR

SEQ ID NO: 34934 - protein, 9 aa, synthetic construct
PTPGVIRVY

SEQ ID NO: 34935 - protein, 9 aa, synthetic construct
PTPGVIRVH

SEQ ID NO: 34936 - protein, 9 aa, synthetic construct
PTPGVIRVK

SEQ ID NO: 34937 - protein, 9 aa, synthetic construct
PTPGVIRVF

SEQ ID NO: 34938 - protein, 9 aa, synthetic construct
PTPGVIKLY

SEQ ID NO: 34939 - protein, 9 aa, synthetic construct
PTPGVIKLR

SEQ ID NO: 34940 - protein, 9 aa, synthetic construct
PTPGVIKLH

SEQ ID NO: 34941 - protein, 9 aa, synthetic construct
PTPGVIKLK

SEQ ID NO: 34942 - protein, 9 aa, synthetic construct
PTPGVIKLF

SEQ ID NO: 34943 - protein, 9 aa, synthetic construct
PTPGVGHLY

SEQ ID NO: 34944 - protein, 9 aa, synthetic construct
PTPGVGHLR

SEQ ID NO: 34945 - protein, 9 aa, synthetic construct
PTPGVGHLK

SEQ ID NO: 34946 - protein, 9 aa, synthetic construct
PTPGVGHLF

SEQ ID NO: 34947 - protein, 9 aa, synthetic construct
PTPGVGHVR

SEQ ID NO: 34948 - protein, 9 aa, synthetic construct
PTPGVGHVK

SEQ ID NO: 34949 - protein, 9 aa, synthetic construct
PTPGVGHVF

SEQ ID NO: 34950 - protein, 9 aa, synthetic construct
PTPGVGRLY

SEQ ID NO: 34951 - protein, 9 aa, synthetic construct
PTPGVGRLR

SEQ ID NO: 34952 - protein, 9 aa, synthetic construct
PTPGVGRLH

SEQ ID NO: 34953 - protein, 9 aa, synthetic construct
PTPGVGRLK

SEQ ID NO: 34954 - protein, 9 aa, synthetic construct
PTPGVGRVR

SEQ ID NO: 34955 - protein, 9 aa, synthetic construct
PTPGVGRVK

SEQ ID NO: 34956 - protein, 9 aa, synthetic construct
PLNAALKVF

SEQ ID NO: 34957 - protein, 9 aa, synthetic construct
PTPGVGKLR

SEQ ID NO: 34958 - protein, 9 aa, synthetic construct
PTPGVGKLK

SEQ ID NO: 34959 - protein, 9 aa, synthetic construct
PTPGVGKVR

SEQ ID NO: 34960 - protein, 9 aa, synthetic construct
PTPGGVHLY

SEQ ID NO: 34961 - protein, 9 aa, synthetic construct
PTPGGVHLH

SEQ ID NO: 34962 - protein, 9 aa, synthetic construct
PTPGGVHLF

SEQ ID NO: 34963 - protein, 9 aa, synthetic construct
PTPGGVRLR

SEQ ID NO: 34964 - protein, 9 aa, synthetic construct
PTPGGVRLK

SEQ ID NO: 34965 - protein, 9 aa, synthetic construct
PTPGGVRLF

SEQ ID NO: 34966 - protein, 9 aa, synthetic construct
PTPGGVRVY

SEQ ID NO: 34967 - protein, 9 aa, synthetic construct
PTPGGVRVK

SEQ ID NO: 34968 - protein, 9 aa, synthetic construct
PTPGGVKLH

SEQ ID NO: 34969 - protein, 9 aa, synthetic construct
PTPGGVKVH

SEQ ID NO: 34970 - protein, 9 aa, synthetic construct
PTPGGVKVK

SEQ ID NO: 34971 - protein, 9 aa, synthetic construct
PTPGGLHVY

SEQ ID NO: 34972 - protein, 9 aa, synthetic construct
PTPGGLHVH

SEQ ID NO: 34973 - protein, 9 aa, synthetic construct
PTPGGLHVF

SEQ ID NO: 34974 - protein, 9 aa, synthetic construct
PTPGGLRLY

SEQ ID NO: 34975 - protein, 9 aa, synthetic construct
PTPGGLRVY

SEQ ID NO: 34976 - protein, 9 aa, synthetic construct
PTPGGLRVK

SEQ ID NO: 34977 - protein, 9 aa, synthetic construct
PTPGGLRVF

SEQ ID NO: 34978 - protein, 9 aa, synthetic construct
PTPGGLKLY

SEQ ID NO: 34979 - protein, 9 aa, synthetic construct
PTPGGLKLR

SEQ ID NO: 34980 - protein, 9 aa, synthetic construct
PTPGGLKLH

SEQ ID NO: 34981 - protein, 9 aa, synthetic construct
PTPGGLKLK

SEQ ID NO: 34982 - protein, 9 aa, synthetic construct
PTPGGLKVY

SEQ ID NO: 34983 - protein, 9 aa, synthetic construct
PTPGGLKVR

SEQ ID NO: 34984 - protein, 9 aa, synthetic construct
PTPGGLKVH

SEQ ID NO: 34985 - protein, 9 aa, synthetic construct
PTPGGAHLR

SEQ ID NO: 34986 - protein, 9 aa, synthetic construct
PTPGGARLF

SEQ ID NO: 34987 - protein, 9 aa, synthetic construct
PTPGGARVY

SEQ ID NO: 34988 - protein, 9 aa, synthetic construct
PTPGGARVF

SEQ ID NO: 34989 - protein, 9 aa, synthetic construct
PTPGGAKLR

SEQ ID NO: 34990 - protein, 9 aa, synthetic construct
PTPGGAKLH

SEQ ID NO: 34991 - protein, 9 aa, synthetic construct
PTPGGIRLY

SEQ ID NO: 34992 - protein, 9 aa, synthetic construct
PTPGGIRLH

SEQ ID NO: 34993 - protein, 9 aa, synthetic construct
PTPGGIRVH

SEQ ID NO: 34994 - protein, 9 aa, synthetic construct
PTPGGIKLY

SEQ ID NO: 34995 - protein, 9 aa, synthetic construct
PTPGGIKLR

SEQ ID NO: 34996 - protein, 9 aa, synthetic construct
PTPGGIKLK

SEQ ID NO: 34997 - protein, 9 aa, synthetic construct
PTPGGIKLF

SEQ ID NO: 34998 - protein, 9 aa, synthetic construct
PTPGGIKVY

SEQ ID NO: 34999 - protein, 9 aa, synthetic construct
PTPGGIKVF

SEQ ID NO: 35000 - protein, 9 aa, synthetic construct
PTPGGGHVR

SEQ ID NO: 35001 - protein, 9 aa, synthetic construct
PTPGGGRLH

SEQ ID NO: 35002 - protein, 9 aa, synthetic construct
PTPGGGRLK

SEQ ID NO: 35003 - protein, 9 aa, synthetic construct
PTPGGGRVR

SEQ ID NO: 35004 - protein, 9 aa, synthetic construct
PTPGGGRVH

SEQ ID NO: 35005 - protein, 9 aa, synthetic construct
PTPGGGRVK

SEQ ID NO: 35006 - protein, 9 aa, synthetic construct
PTPGGGRVF

SEQ ID NO: 35007 - protein, 9 aa, synthetic construct
PLNAAARLF

SEQ ID NO: 35008 - protein, 9 aa, synthetic construct
PTPGGGKLR

SEQ ID NO: 35009 - protein, 9 aa, synthetic construct
PTPGGGKLK

SEQ ID NO: 35010 - protein, 9 aa, synthetic construct
PTPGGGKVY

SEQ ID NO: 35011 - protein, 9 aa, synthetic construct
PTPGGGKVK

SEQ ID NO: 35012 - protein, 9 aa, synthetic construct
PLNAAARVY

SEQ ID NO: 35013 - protein, 9 aa, synthetic construct
PTPAAVHLR

SEQ ID NO: 35014 - protein, 9 aa, synthetic construct
PTPAAVHLF

SEQ ID NO: 35015 - protein, 9 aa, synthetic construct
PTPAAVHVR

SEQ ID NO: 35016 - protein, 9 aa, synthetic construct
PTPAAVHVF

SEQ ID NO: 35017 - protein, 9 aa, synthetic construct
PLNAAARVR

SEQ ID NO: 35018 - protein, 9 aa, synthetic construct
PTPAAVRLR

SEQ ID NO: 35019 - protein, 9 aa, synthetic construct
PTPAAVRVY

SEQ ID NO: 35020 - protein, 9 aa, synthetic construct
PTPAAVKLR

SEQ ID NO: 35021 - protein, 9 aa, synthetic construct
PTPAAVKVK

SEQ ID NO: 35022 - protein, 9 aa, synthetic construct
PTPAALHLY

SEQ ID NO: 35023 - protein, 9 aa, synthetic construct
PTPAALHLH

SEQ ID NO: 35024 - protein, 9 aa, synthetic construct
PTPAALHLK

SEQ ID NO: 35025 - protein, 9 aa, synthetic construct
PTPAALHVR

SEQ ID NO: 35026 - protein, 9 aa, synthetic construct
PTPAALHVH

SEQ ID NO: 35027 - protein, 9 aa, synthetic construct
PTPAALHVK

SEQ ID NO: 35028 - protein, 9 aa, synthetic construct
PTPAALHVF

SEQ ID NO: 35029 - protein, 9 aa, synthetic construct
PTPAALRLH

SEQ ID NO: 35030 - protein, 9 aa, synthetic construct
PTPAALRVR

SEQ ID NO: 35031 - protein, 9 aa, synthetic construct
PLNGAAKLK

SEQ ID NO: 35032 - protein, 9 aa, synthetic construct
PTPAALKLY

SEQ ID NO: 35033 - protein, 9 aa, synthetic construct
PTPAALKLK

SEQ ID NO: 35034 - protein, 9 aa, synthetic construct
PTPAALKVY

SEQ ID NO: 35035 - protein, 9 aa, synthetic construct
PTPAALKVH

SEQ ID NO: 35036 - protein, 9 aa, synthetic construct
PTPAALKVK

SEQ ID NO: 35037 - protein, 9 aa, synthetic construct
PTPAAAHVR

SEQ ID NO: 35038 - protein, 9 aa, synthetic construct
PTPAAARLY

SEQ ID NO: 35039 - protein, 9 aa, synthetic construct
PTPAAARLF

SEQ ID NO: 35040 - protein, 9 aa, synthetic construct
PTPAAARVR

SEQ ID NO: 35041 - protein, 9 aa, synthetic construct
PTPAAARVF

SEQ ID NO: 35042 - protein, 9 aa, synthetic construct
PTPAAAKLR

SEQ ID NO: 35043 - protein, 9 aa, synthetic construct
PTPAAAKVR

SEQ ID NO: 35044 - protein, 9 aa, synthetic construct
PTPAAAKVK

SEQ ID NO: 35045 - protein, 9 aa, synthetic construct
PLNAAAKLF

SEQ ID NO: 35046 - protein, 9 aa, synthetic construct
PTPAAIHLY

SEQ ID NO: 35047 - protein, 9 aa, synthetic construct
PTPAAIHLR

SEQ ID NO: 35048 - protein, 9 aa, synthetic construct
PTPAAIHLH

SEQ ID NO: 35049 - protein, 9 aa, synthetic construct
PTPAAIRLY

SEQ ID NO: 35050 - protein, 9 aa, synthetic construct
PTPAAIRLH

SEQ ID NO: 35051 - protein, 9 aa, synthetic construct
PTPAAIRLF

SEQ ID NO: 35052 - protein, 9 aa, synthetic construct
PTPAAIRVK

SEQ ID NO: 35053 - protein, 9 aa, synthetic construct
PTPAAIRVF

SEQ ID NO: 35054 - protein, 9 aa, synthetic construct
PTPAAIKLY

SEQ ID NO: 35055 - protein, 9 aa, synthetic construct
PTPAAIKLH

SEQ ID NO: 35056 - protein, 9 aa, synthetic construct
PTPAAIKLK

SEQ ID NO: 35057 - protein, 9 aa, synthetic construct
PTPAAIKLF

SEQ ID NO: 35058 - protein, 9 aa, synthetic construct
PTPAAIKVR

SEQ ID NO: 35059 - protein, 9 aa, synthetic construct
PTPAAIKVH

SEQ ID NO: 35060 - protein, 9 aa, synthetic construct
PTPAAGHLR

SEQ ID NO: 35061 - protein, 9 aa, synthetic construct
PTPAAGRLY

SEQ ID NO: 35062 - protein, 9 aa, synthetic construct
PTPAAGRLK

SEQ ID NO: 35063 - protein, 9 aa, synthetic construct
PTPAAGRVH

SEQ ID NO: 35064 - protein, 9 aa, synthetic construct
PTPAAGRVK

SEQ ID NO: 35065 - protein, 9 aa, synthetic construct
PTPAAGKVR

SEQ ID NO: 35066 - protein, 9 aa, synthetic construct
PTPAAGKVK

SEQ ID NO: 35067 - protein, 9 aa, synthetic construct
PLNAAIHLY

SEQ ID NO: 35068 - protein, 9 aa, synthetic construct
PTPATVHLF

SEQ ID NO: 35069 - protein, 9 aa, synthetic construct
PTPATVHVR

SEQ ID NO: 35070 - protein, 9 aa, synthetic construct
PLNAAIHLR

SEQ ID NO: 35071 - protein, 9 aa, synthetic construct
PTPATVRLY

SEQ ID NO: 35072 - protein, 9 aa, synthetic construct
PTPATVRVY

SEQ ID NO: 35073 - protein, 9 aa, synthetic construct
PTPATVRVF

SEQ ID NO: 35074 - protein, 9 aa, synthetic construct
PLNAAIHLH

SEQ ID NO: 35075 - protein, 9 aa, synthetic construct
PTPATVKLR

SEQ ID NO: 35076 - protein, 9 aa, synthetic construct
PTPATVKVR

SEQ ID NO: 35077 - protein, 9 aa, synthetic construct
PTPATLHLY

SEQ ID NO: 35078 - protein, 9 aa, synthetic construct
PTPATLHLH

SEQ ID NO: 35079 - protein, 9 aa, synthetic construct
PTPATLHVY

SEQ ID NO: 35080 - protein, 9 aa, synthetic construct
PTPATLHVR

SEQ ID NO: 35081 - protein, 9 aa, synthetic construct
PTPATLHVK

SEQ ID NO: 35082 - protein, 9 aa, synthetic construct
PTPATLRLF

SEQ ID NO: 35083 - protein, 9 aa, synthetic construct
PTPATLRVY

SEQ ID NO: 35084 - protein, 9 aa, synthetic construct
PTPATLKLY

SEQ ID NO: 35085 - protein, 9 aa, synthetic construct
PTPATLKLH

SEQ ID NO: 35086 - protein, 9 aa, synthetic construct
PTPATLKVF

SEQ ID NO: 35087 - protein, 9 aa, synthetic construct
PTPATARLY

SEQ ID NO: 35088 - protein, 9 aa, synthetic construct
PTPATARLH

SEQ ID NO: 35089 - protein, 9 aa, synthetic construct
PTPATARVH

SEQ ID NO: 35090 - protein, 9 aa, synthetic construct
PTPATAKLR

SEQ ID NO: 35091 - protein, 9 aa, synthetic construct
PTPATAKLF

SEQ ID NO: 35092 - protein, 9 aa, synthetic construct
PTPATAKVK

SEQ ID NO: 35093 - protein, 9 aa, synthetic construct
PTPATIHLR

SEQ ID NO: 35094 - protein, 9 aa, synthetic construct
PLNAAIRLY

SEQ ID NO: 35095 - protein, 9 aa, synthetic construct
PTPATIKVF

SEQ ID NO: 35096 - protein, 9 aa, synthetic construct
PTPATGHVR

SEQ ID NO: 35097 - protein, 9 aa, synthetic construct
PTPATGRLY

SEQ ID NO: 35098 - protein, 9 aa, synthetic construct
PTPATGRLR

SEQ ID NO: 35099 - protein, 9 aa, synthetic construct
PTPATGRLH

SEQ ID NO: 35100 - protein, 9 aa, synthetic construct
PTPATGRLK

SEQ ID NO: 35101 - protein, 9 aa, synthetic construct
PTPATGRLF

SEQ ID NO: 35102 - protein, 9 aa, synthetic construct
PTPATGRVH

SEQ ID NO: 35103 - protein, 9 aa, synthetic construct
PLNAAIRLF

SEQ ID NO: 35104 - protein, 9 aa, synthetic construct
PTPATGKVH

SEQ ID NO: 35105 - protein, 9 aa, synthetic construct
PTPASVRLY

SEQ ID NO: 35106 - protein, 9 aa, synthetic construct
PTPASVRLH

SEQ ID NO: 35107 - protein, 9 aa, synthetic construct
PTPASVRVF

SEQ ID NO: 35108 - protein, 9 aa, synthetic construct
PTPASVKVK

SEQ ID NO: 35109 - protein, 9 aa, synthetic construct
PTPASLHLK

SEQ ID NO: 35110 - protein, 9 aa, synthetic construct
PTPASLHVR

SEQ ID NO: 35111 - protein, 9 aa, synthetic construct
PTPASLRVK

SEQ ID NO: 35112 - protein, 9 aa, synthetic construct
PTPASLRVF

SEQ ID NO: 35113 - protein, 9 aa, synthetic construct
PLNAAIKLY

SEQ ID NO: 35114 - protein, 9 aa, synthetic construct
PTPASLKVY

SEQ ID NO: 35115 - protein, 9 aa, synthetic construct
PTPASLKVF

SEQ ID NO: 35116 - protein, 9 aa, synthetic construct
PTPASARLF

SEQ ID NO: 35117 - protein, 9 aa, synthetic construct
PLNAAIKLK

SEQ ID NO: 35118 - protein, 9 aa, synthetic construct
PTPASAKLY

SEQ ID NO: 35119 - protein, 9 aa, synthetic construct
PTPASAKLH

SEQ ID NO: 35120 - protein, 9 aa, synthetic construct
PTPASAKLF

SEQ ID NO: 35121 - protein, 9 aa, synthetic construct
PTPASAKVH

SEQ ID NO: 35122 - protein, 9 aa, synthetic construct
PTPASIHLY

SEQ ID NO: 35123 - protein, 9 aa, synthetic construct
PTPASIHLR

SEQ ID NO: 35124 - protein, 9 aa, synthetic construct
PTPASIHLH

SEQ ID NO: 35125 - protein, 9 aa, synthetic construct
PTPASIHVR

SEQ ID NO: 35126 - protein, 9 aa, synthetic construct
PTPASIRLY

SEQ ID NO: 35127 - protein, 9 aa, synthetic construct
PTPASIRLK

SEQ ID NO: 35128 - protein, 9 aa, synthetic construct
PTPASIRVF

SEQ ID NO: 35129 - protein, 9 aa, synthetic construct
PLNAAIKVR

SEQ ID NO: 35130 - protein, 9 aa, synthetic construct
PTPASIKLY

SEQ ID NO: 35131 - protein, 9 aa, synthetic construct
PTPASIKLK

SEQ ID NO: 35132 - protein, 9 aa, synthetic construct
PTPASIKVH

SEQ ID NO: 35133 - protein, 9 aa, synthetic construct
PLNAAIKVH

SEQ ID NO: 35134 - protein, 9 aa, synthetic construct
PTPASGRLY

SEQ ID NO: 35135 - protein, 9 aa, synthetic construct
PTPASGRLR

SEQ ID NO: 35136 - protein, 9 aa, synthetic construct
PTPASGRLH

SEQ ID NO: 35137 - protein, 9 aa, synthetic construct
PTPASGRLK

SEQ ID NO: 35138 - protein, 9 aa, synthetic construct
PTPASGRVK

SEQ ID NO: 35139 - protein, 9 aa, synthetic construct
PTPASGKVK

SEQ ID NO: 35140 - protein, 9 aa, synthetic construct
PTPAVVHLY

SEQ ID NO: 35141 - protein, 9 aa, synthetic construct
PTPAVVHVY

SEQ ID NO: 35142 - protein, 9 aa, synthetic construct
PTPAVVHVK

SEQ ID NO: 35143 - protein, 9 aa, synthetic construct
PTPAVVHVF

SEQ ID NO: 35144 - protein, 9 aa, synthetic construct
PTPAVVRLY

SEQ ID NO: 35145 - protein, 9 aa, synthetic construct
PTPAVVRLH

SEQ ID NO: 35146 - protein, 9 aa, synthetic construct
PTPAVVRVY

SEQ ID NO: 35147 - protein, 9 aa, synthetic construct
PTPAVVRVF

SEQ ID NO: 35148 - protein, 9 aa, synthetic construct
PTPAVVKLY

SEQ ID NO: 35149 - protein, 9 aa, synthetic construct
PTPAVVKLR

SEQ ID NO: 35150 - protein, 9 aa, synthetic construct
PTPAVVKLH

SEQ ID NO: 35151 - protein, 9 aa, synthetic construct
PTPAVVKLK

SEQ ID NO: 35152 - protein, 9 aa, synthetic construct
PTPAVVKVR

SEQ ID NO: 35153 - protein, 9 aa, synthetic construct
PTPAVVKVH

SEQ ID NO: 35154 - protein, 9 aa, synthetic construct
PTPAVVKVF

SEQ ID NO: 35155 - protein, 9 aa, synthetic construct
PTPAVLRLF

SEQ ID NO: 35156 - protein, 9 aa, synthetic construct
PTPAVLRVK

SEQ ID NO: 35157 - protein, 9 aa, synthetic construct
PTPAVLKLF

SEQ ID NO: 35158 - protein, 9 aa, synthetic construct
PTPAVLKVY

SEQ ID NO: 35159 - protein, 9 aa, synthetic construct
PTPAVLKVH

SEQ ID NO: 35160 - protein, 9 aa, synthetic construct
PTPAVLKVF

SEQ ID NO: 35161 - protein, 9 aa, synthetic construct
PTPAVAHLY

SEQ ID NO: 35162 - protein, 9 aa, synthetic construct
PTPAVAHLR

SEQ ID NO: 35163 - protein, 9 aa, synthetic construct
PTPAVAHLK

SEQ ID NO: 35164 - protein, 9 aa, synthetic construct
PTPAVAHVY

SEQ ID NO: 35165 - protein, 9 aa, synthetic construct
PTPAVAHVR

SEQ ID NO: 35166 - protein, 9 aa, synthetic construct
PTPAVAHVF

SEQ ID NO: 35167 - protein, 9 aa, synthetic construct
PTPAVARLH

SEQ ID NO: 35168 - protein, 9 aa, synthetic construct
PTPAVARLF

SEQ ID NO: 35169 - protein, 9 aa, synthetic construct
PTPAVARVY

SEQ ID NO: 35170 - protein, 9 aa, synthetic construct
PTPAVARVH

SEQ ID NO: 35171 - protein, 9 aa, synthetic construct
PTPAVAKLR

SEQ ID NO: 35172 - protein, 9 aa, synthetic construct
PTPAVAKLH

SEQ ID NO: 35173 - protein, 9 aa, synthetic construct
PTPAVAKLK

SEQ ID NO: 35174 - protein, 9 aa, synthetic construct
PTPAVAKVY

SEQ ID NO: 35175 - protein, 9 aa, synthetic construct
PTPAVAKVR

SEQ ID NO: 35176 - protein, 9 aa, synthetic construct
PTPAVAKVH

SEQ ID NO: 35177 - protein, 9 aa, synthetic construct
PTPAVAKVF

SEQ ID NO: 35178 - protein, 9 aa, synthetic construct
PTPAVIHLR

SEQ ID NO: 35179 - protein, 9 aa, synthetic construct
PTPAVIHLH

SEQ ID NO: 35180 - protein, 9 aa, synthetic construct
PTPAVIHLK

SEQ ID NO: 35181 - protein, 9 aa, synthetic construct
PTPAVIHLF

SEQ ID NO: 35182 - protein, 9 aa, synthetic construct
PTPAVIHVY

SEQ ID NO: 35183 - protein, 9 aa, synthetic construct
PTPAVIHVH

SEQ ID NO: 35184 - protein, 9 aa, synthetic construct
PTPAVIHVF

SEQ ID NO: 35185 - protein, 9 aa, synthetic construct
PTPAVIRLY

SEQ ID NO: 35186 - protein, 9 aa, synthetic construct
PTPAVIRLR

SEQ ID NO: 35187 - protein, 9 aa, synthetic construct
PTPAVIRLH

SEQ ID NO: 35188 - protein, 9 aa, synthetic construct
PTPAVIRLK

SEQ ID NO: 35189 - protein, 9 aa, synthetic construct
PTPAVIRLF

SEQ ID NO: 35190 - protein, 9 aa, synthetic construct
PTPAVIRVY

SEQ ID NO: 35191 - protein, 9 aa, synthetic construct
PTPAVIRVR

SEQ ID NO: 35192 - protein, 9 aa, synthetic construct
PTPAVIRVH

SEQ ID NO: 35193 - protein, 9 aa, synthetic construct
PTPAVIKLY

SEQ ID NO: 35194 - protein, 9 aa, synthetic construct
PTPAVIKLR

SEQ ID NO: 35195 - protein, 9 aa, synthetic construct
PTPAVIKLH

SEQ ID NO: 35196 - protein, 9 aa, synthetic construct
PTPAVIKLF

SEQ ID NO: 35197 - protein, 9 aa, synthetic construct
PTPAVIKVF

SEQ ID NO: 35198 - protein, 9 aa, synthetic construct
PTPAVGHLY

SEQ ID NO: 35199 - protein, 9 aa, synthetic construct
PTPAVGHLR

SEQ ID NO: 35200 - protein, 9 aa, synthetic construct
PTPAVGHLH

SEQ ID NO: 35201 - protein, 9 aa, synthetic construct
PTPAVGHLF

SEQ ID NO: 35202 - protein, 9 aa, synthetic construct
PTPAVGHVR

SEQ ID NO: 35203 - protein, 9 aa, synthetic construct
PTPAVGHVF

SEQ ID NO: 35204 - protein, 9 aa, synthetic construct
PLNAAGRLK

SEQ ID NO: 35205 - protein, 9 aa, synthetic construct
PTPAVGRLH

SEQ ID NO: 35206 - protein, 9 aa, synthetic construct
PTPAVGRLF

SEQ ID NO: 35207 - protein, 9 aa, synthetic construct
PTPAVGRVK

SEQ ID NO: 35208 - protein, 9 aa, synthetic construct
PTPAVGKLR

SEQ ID NO: 35209 - protein, 9 aa, synthetic construct
PTPAVGKVR

SEQ ID NO: 35210 - protein, 9 aa, synthetic construct
PTPAVGKVK

SEQ ID NO: 35211 - protein, 9 aa, synthetic construct
PLNAAGRVY

SEQ ID NO: 35212 - protein, 9 aa, synthetic construct
PTPAGVHLY

SEQ ID NO: 35213 - protein, 9 aa, synthetic construct
PTPAGVHLF

SEQ ID NO: 35214 - protein, 9 aa, synthetic construct
PTPAGVHVY

SEQ ID NO: 35215 - protein, 9 aa, synthetic construct
PTPAGVHVR

SEQ ID NO: 35216 - protein, 9 aa, synthetic construct
PTPAGVRVY

SEQ ID NO: 35217 - protein, 9 aa, synthetic construct
PTPAGVRVK

SEQ ID NO: 35218 - protein, 9 aa, synthetic construct
PTPAGVRVF

SEQ ID NO: 35219 - protein, 9 aa, synthetic construct
PTPAGVKVY

SEQ ID NO: 35220 - protein, 9 aa, synthetic construct
PTPAGVKVH

SEQ ID NO: 35221 - protein, 9 aa, synthetic construct
PTPAGVKVK

SEQ ID NO: 35222 - protein, 9 aa, synthetic construct
PTPAGVKVF

SEQ ID NO: 35223 - protein, 9 aa, synthetic construct
PLNAAGRVK

SEQ ID NO: 35224 - protein, 9 aa, synthetic construct
PTPAGLHVR

SEQ ID NO: 35225 - protein, 9 aa, synthetic construct
PTPAGLHVK

SEQ ID NO: 35226 - protein, 9 aa, synthetic construct
PTPAGLKVY

SEQ ID NO: 35227 - protein, 9 aa, synthetic construct
PTPAGAHVY

SEQ ID NO: 35228 - protein, 9 aa, synthetic construct
PTPAGAHVR

SEQ ID NO: 35229 - protein, 9 aa, synthetic construct
PTPAGARLY

SEQ ID NO: 35230 - protein, 9 aa, synthetic construct
PTPAGARLH

SEQ ID NO: 35231 - protein, 9 aa, synthetic construct
PTPAGARVY

SEQ ID NO: 35232 - protein, 9 aa, synthetic construct
PTPAGARVK

SEQ ID NO: 35233 - protein, 9 aa, synthetic construct
PTPAGAKVY

SEQ ID NO: 35234 - protein, 9 aa, synthetic construct
PTPAGAKVH

SEQ ID NO: 35235 - protein, 9 aa, synthetic construct
PLNAAGKLF

SEQ ID NO: 35236 - protein, 9 aa, synthetic construct
PTPAGIHLY

SEQ ID NO: 35237 - protein, 9 aa, synthetic construct
PTPAGIHLR

SEQ ID NO: 35238 - protein, 9 aa, synthetic construct
PTPAGIHLH

SEQ ID NO: 35239 - protein, 9 aa, synthetic construct
PTPAGIHLK

SEQ ID NO: 35240 - protein, 9 aa, synthetic construct
PTPAGIHVY

SEQ ID NO: 35241 - protein, 9 aa, synthetic construct
PTPAGIHVR

SEQ ID NO: 35242 - protein, 9 aa, synthetic construct
PTPAGIHVF

SEQ ID NO: 35243 - protein, 9 aa, synthetic construct
PLNAAGKVY

SEQ ID NO: 35244 - protein, 9 aa, synthetic construct
PTPAGIRLY

SEQ ID NO: 35245 - protein, 9 aa, synthetic construct
PTPAGIRLR

SEQ ID NO: 35246 - protein, 9 aa, synthetic construct
PTPAGIRLH

SEQ ID NO: 35247 - protein, 9 aa, synthetic construct
PTPAGIRVH

SEQ ID NO: 35248 - protein, 9 aa, synthetic construct
PTPAGIRVF

SEQ ID NO: 35249 - protein, 9 aa, synthetic construct
PTPAGIKLY

SEQ ID NO: 35250 - protein, 9 aa, synthetic construct
PTPAGIKLR

SEQ ID NO: 35251 - protein, 9 aa, synthetic construct
PTPAGIKLF

SEQ ID NO: 35252 - protein, 9 aa, synthetic construct
PTPAGIKVY

SEQ ID NO: 35253 - protein, 9 aa, synthetic construct
PTPAGIKVH

SEQ ID NO: 35254 - protein, 9 aa, synthetic construct
PTPAGGRVY

SEQ ID NO: 35255 - protein, 9 aa, synthetic construct
PTPAGGRVR

SEQ ID NO: 35256 - protein, 9 aa, synthetic construct
PTPAGGRVH

SEQ ID NO: 35257 - protein, 9 aa, synthetic construct
PTPAGGKLH

SEQ ID NO: 35258 - protein, 9 aa, synthetic construct
PTPAGGKVY

SEQ ID NO: 35259 - protein, 9 aa, synthetic construct
PTPAGGKVK

SEQ ID NO: 35260 - protein, 9 aa, synthetic construct
PSNGAVHVY

SEQ ID NO: 35261 - protein, 9 aa, synthetic construct
PSNGAVHVH

SEQ ID NO: 35262 - protein, 9 aa, synthetic construct
PSNGAVHVF

SEQ ID NO: 35263 - protein, 9 aa, synthetic construct
PSNGAVRLY

SEQ ID NO: 35264 - protein, 9 aa, synthetic construct
PSNGAVRLH

SEQ ID NO: 35265 - protein, 9 aa, synthetic construct
PSNGAVRVY

SEQ ID NO: 35266 - protein, 9 aa, synthetic construct
PSNGAVKLF

SEQ ID NO: 35267 - protein, 9 aa, synthetic construct
PSNGAVKVY

SEQ ID NO: 35268 - protein, 9 aa, synthetic construct
PSNGAVKVH

SEQ ID NO: 35269 - protein, 9 aa, synthetic construct
PSNGAVKVF

SEQ ID NO: 35270 - protein, 9 aa, synthetic construct
PSNGALHVR

SEQ ID NO: 35271 - protein, 9 aa, synthetic construct
PSNGALHVH

SEQ ID NO: 35272 - protein, 9 aa, synthetic construct
PSNGALRLY

SEQ ID NO: 35273 - protein, 9 aa, synthetic construct
PSNGALRLH

SEQ ID NO: 35274 - protein, 9 aa, synthetic construct
PSNGALRVR

SEQ ID NO: 35275 - protein, 9 aa, synthetic construct
PSNGALRVK

SEQ ID NO: 35276 - protein, 9 aa, synthetic construct
PSNGALKLR

SEQ ID NO: 35277 - protein, 9 aa, synthetic construct
PSNGALKLH

SEQ ID NO: 35278 - protein, 9 aa, synthetic construct
PSNGALKLF

SEQ ID NO: 35279 - protein, 9 aa, synthetic construct
PSNGALKVR

SEQ ID NO: 35280 - protein, 9 aa, synthetic construct
PSNGALKVH

SEQ ID NO: 35281 - protein, 9 aa, synthetic construct
PSNGALKVK

SEQ ID NO: 35282 - protein, 9 aa, synthetic construct
PSNGALKVF

SEQ ID NO: 35283 - protein, 9 aa, synthetic construct
PSNGAAHLY

SEQ ID NO: 35284 - protein, 9 aa, synthetic construct
PSNGAAHLR

SEQ ID NO: 35285 - protein, 9 aa, synthetic construct
PSNGAAHLK

SEQ ID NO: 35286 - protein, 9 aa, synthetic construct
PSNGAAHLF

SEQ ID NO: 35287 - protein, 9 aa, synthetic construct
PSNGAAHVK

SEQ ID NO: 35288 - protein, 9 aa, synthetic construct
PSNGAAHVF

SEQ ID NO: 35289 - protein, 9 aa, synthetic construct
PSNGAARLY

SEQ ID NO: 35290 - protein, 9 aa, synthetic construct
PSNGAARLH

SEQ ID NO: 35291 - protein, 9 aa, synthetic construct
PSNGAARLF

SEQ ID NO: 35292 - protein, 9 aa, synthetic construct
PSNGAARVR

SEQ ID NO: 35293 - protein, 9 aa, synthetic construct
PSNGAARVH

SEQ ID NO: 35294 - protein, 9 aa, synthetic construct
PSNGAAKLR

SEQ ID NO: 35295 - protein, 9 aa, synthetic construct
PSNGAIHLR

SEQ ID NO: 35296 - protein, 9 aa, synthetic construct
PSNGAIHLH

SEQ ID NO: 35297 - protein, 9 aa, synthetic construct
PSNGAIHVY

SEQ ID NO: 35298 - protein, 9 aa, synthetic construct
PLNATVRLY

SEQ ID NO: 35299 - protein, 9 aa, synthetic construct
PSNGAIRLF

SEQ ID NO: 35300 - protein, 9 aa, synthetic construct
PSNGAIRVH

SEQ ID NO: 35301 - protein, 9 aa, synthetic construct
PLNATVRLR

SEQ ID NO: 35302 - protein, 9 aa, synthetic construct
PSNGAIKLF

SEQ ID NO: 35303 - protein, 9 aa, synthetic construct
PSNGAIKVY

SEQ ID NO: 35304 - protein, 9 aa, synthetic construct
PLNATVRLH

SEQ ID NO: 35305 - protein, 9 aa, synthetic construct
PSNGAGHLK

SEQ ID NO: 35306 - protein, 9 aa, synthetic construct
PSNGAGHVY

SEQ ID NO: 35307 - protein, 9 aa, synthetic construct
PSNGAGRVY

SEQ ID NO: 35308 - protein, 9 aa, synthetic construct
PSNGAGRVR

SEQ ID NO: 35309 - protein, 9 aa, synthetic construct
PSNGAGRVH

SEQ ID NO: 35310 - protein, 9 aa, synthetic construct
PSNGAGRVK

SEQ ID NO: 35311 - protein, 9 aa, synthetic construct
PSNGAGKLF

SEQ ID NO: 35312 - protein, 9 aa, synthetic construct
PSNGAGKVY

SEQ ID NO: 35313 - protein, 9 aa, synthetic construct
PSNGTVHVK

SEQ ID NO: 35314 - protein, 9 aa, synthetic construct
PSNGTVRVY

SEQ ID NO: 35315 - protein, 9 aa, synthetic construct
PSNGTVRVF

SEQ ID NO: 35316 - protein, 9 aa, synthetic construct
PLNATVRVH

SEQ ID NO: 35317 - protein, 9 aa, synthetic construct
PSNGTVKLR

SEQ ID NO: 35318 - protein, 9 aa, synthetic construct
PSNGTVKVH

SEQ ID NO: 35319 - protein, 9 aa, synthetic construct
PSNGTVKVK

SEQ ID NO: 35320 - protein, 9 aa, synthetic construct
PSNGTVKVF

SEQ ID NO: 35321 - protein, 9 aa, synthetic construct
PSNGTLHLH

SEQ ID NO: 35322 - protein, 9 aa, synthetic construct
PSNGTLHVF

SEQ ID NO: 35323 - protein, 9 aa, synthetic construct
PLNATVRVF

SEQ ID NO: 35324 - protein, 9 aa, synthetic construct
PSNGTLRLY

SEQ ID NO: 35325 - protein, 9 aa, synthetic construct
PSNGTLRLF

SEQ ID NO: 35326 - protein, 9 aa, synthetic construct
PSNGTLRVK

SEQ ID NO: 35327 - protein, 9 aa, synthetic construct
PSNGTLRVF

SEQ ID NO: 35328 - protein, 9 aa, synthetic construct
PSNGTLKLR

SEQ ID NO: 35329 - protein, 9 aa, synthetic construct
PSNGTLKVF

SEQ ID NO: 35330 - protein, 9 aa, synthetic construct
PLNATVKLR

SEQ ID NO: 35331 - protein, 9 aa, synthetic construct
PSNGTARVR

SEQ ID NO: 35332 - protein, 9 aa, synthetic construct
PSNGTARVH

SEQ ID NO: 35333 - protein, 9 aa, synthetic construct
PSNGTARVK

SEQ ID NO: 35334 - protein, 9 aa, synthetic construct
PSNGTAKLR

SEQ ID NO: 35335 - protein, 9 aa, synthetic construct
PSNGTAKLF

SEQ ID NO: 35336 - protein, 9 aa, synthetic construct
PSNGTIRLF

SEQ ID NO: 35337 - protein, 9 aa, synthetic construct
PSNGTIRVY

SEQ ID NO: 35338 - protein, 9 aa, synthetic construct
PSNGTIRVR

SEQ ID NO: 35339 - protein, 9 aa, synthetic construct
PSNGTIRVK

SEQ ID NO: 35340 - protein, 9 aa, synthetic construct
PSNGTIRVF

SEQ ID NO: 35341 - protein, 9 aa, synthetic construct
PSNGTIKLK

SEQ ID NO: 35342 - protein, 9 aa, synthetic construct
PSNGTIKLF

SEQ ID NO: 35343 - protein, 9 aa, synthetic construct
PSNGTIKVF

SEQ ID NO: 35344 - protein, 9 aa, synthetic construct
PLNATVKVH

SEQ ID NO: 35345 - protein, 9 aa, synthetic construct
PSNGTGRLR

SEQ ID NO: 35346 - protein, 9 aa, synthetic construct
PSNGTGRVY

SEQ ID NO: 35347 - protein, 9 aa, synthetic construct
PSNGTGRVH

SEQ ID NO: 35348 - protein, 9 aa, synthetic construct
PLNATLHLY

SEQ ID NO: 35349 - protein, 9 aa, synthetic construct
PSNGSVRLH

SEQ ID NO: 35350 - protein, 9 aa, synthetic construct
PSNGSVRVH

SEQ ID NO: 35351 - protein, 9 aa, synthetic construct
PSNGSVRVF

SEQ ID NO: 35352 - protein, 9 aa, synthetic construct
PSNGSVKLH

SEQ ID NO: 35353 - protein, 9 aa, synthetic construct
PSNGSVKVH

SEQ ID NO: 35354 - protein, 9 aa, synthetic construct
PSNGSLHLH

SEQ ID NO: 35355 - protein, 9 aa, synthetic construct
PSNGSLHVY

SEQ ID NO: 35356 - protein, 9 aa, synthetic construct
PSNGSLHVH

SEQ ID NO: 35357 - protein, 9 aa, synthetic construct
PSNGSLHVF

SEQ ID NO: 35358 - protein, 9 aa, synthetic construct
PSNGSLRLH

SEQ ID NO: 35359 - protein, 9 aa, synthetic construct
PSNGSLRVY

SEQ ID NO: 35360 - protein, 9 aa, synthetic construct
PSNGSLKLH

SEQ ID NO: 35361 - protein, 9 aa, synthetic construct
PSNGSLKVF

SEQ ID NO: 35362 - protein, 9 aa, synthetic construct
PLNATLHVR

SEQ ID NO: 35363 - protein, 9 aa, synthetic construct
PSNGSARLH

SEQ ID NO: 35364 - protein, 9 aa, synthetic construct
PSNGSARLF

SEQ ID NO: 35365 - protein, 9 aa, synthetic construct
PSNGSARVF

SEQ ID NO: 35366 - protein, 9 aa, synthetic construct
PSNGSAKLR

SEQ ID NO: 35367 - protein, 9 aa, synthetic construct
PSNGSAKLH

SEQ ID NO: 35368 - protein, 9 aa, synthetic construct
PSNGSAKLK

SEQ ID NO: 35369 - protein, 9 aa, synthetic construct
PSNGSAKLF

SEQ ID NO: 35370 - protein, 9 aa, synthetic construct
PSNGSAKVH

SEQ ID NO: 35371 - protein, 9 aa, synthetic construct
PSNGSIHLK

SEQ ID NO: 35372 - protein, 9 aa, synthetic construct
PSNGSIHVF

SEQ ID NO: 35373 - protein, 9 aa, synthetic construct
PLNGAIHLF

SEQ ID NO: 35374 - protein, 9 aa, synthetic construct
PSNGSIRLY

SEQ ID NO: 35375 - protein, 9 aa, synthetic construct
PSNGSIRLF

SEQ ID NO: 35376 - protein, 9 aa, synthetic construct
PSNGSIRVY

SEQ ID NO: 35377 - protein, 9 aa, synthetic construct
PSNGSIRVR

SEQ ID NO: 35378 - protein, 9 aa, synthetic construct
PSNGSIRVH

SEQ ID NO: 35379 - protein, 9 aa, synthetic construct
PSNGSIKLY

SEQ ID NO: 35380 - protein, 9 aa, synthetic construct
PSNGSGHLK

SEQ ID NO: 35381 - protein, 9 aa, synthetic construct
PSNGSGHVY

SEQ ID NO: 35382 - protein, 9 aa, synthetic construct
PSNGSGRLF

SEQ ID NO: 35383 - protein, 9 aa, synthetic construct
PSNGSGRVF

SEQ ID NO: 35384 - protein, 9 aa, synthetic construct
PSNGSGKLF

SEQ ID NO: 35385 - protein, 9 aa, synthetic construct
PSNGSGKVY

SEQ ID NO: 35386 - protein, 9 aa, synthetic construct
PSNGSGKVF

SEQ ID NO: 35387 - protein, 9 aa, synthetic construct
PSNGVVHLY

SEQ ID NO: 35388 - protein, 9 aa, synthetic construct
PSNGVVHLH

SEQ ID NO: 35389 - protein, 9 aa, synthetic construct
PSNGVVHLF

SEQ ID NO: 35390 - protein, 9 aa, synthetic construct
PSNGVVHVY

SEQ ID NO: 35391 - protein, 9 aa, synthetic construct
PSNGVVHVK

SEQ ID NO: 35392 - protein, 9 aa, synthetic construct
PSNGVVHVF

SEQ ID NO: 35393 - protein, 9 aa, synthetic construct
PSNGVVRLY

SEQ ID NO: 35394 - protein, 9 aa, synthetic construct
PSNGVVRLH

SEQ ID NO: 35395 - protein, 9 aa, synthetic construct
PSNGVVRLF

SEQ ID NO: 35396 - protein, 9 aa, synthetic construct
PSNGVVRVY

SEQ ID NO: 35397 - protein, 9 aa, synthetic construct
PSNGVVRVH

SEQ ID NO: 35398 - protein, 9 aa, synthetic construct
PSNGVVKLY

SEQ ID NO: 35399 - protein, 9 aa, synthetic construct
PSNGVVKLH

SEQ ID NO: 35400 - protein, 9 aa, synthetic construct
PSNGVVKLF

SEQ ID NO: 35401 - protein, 9 aa, synthetic construct
PSNGVLHLH

SEQ ID NO: 35402 - protein, 9 aa, synthetic construct
PSNGVLHVY

SEQ ID NO: 35403 - protein, 9 aa, synthetic construct
PSNGVLHVR

SEQ ID NO: 35404 - protein, 9 aa, synthetic construct
PSNGVLHVH

SEQ ID NO: 35405 - protein, 9 aa, synthetic construct
PSNGVLHVF

SEQ ID NO: 35406 - protein, 9 aa, synthetic construct
PSNGVLRLF

SEQ ID NO: 35407 - protein, 9 aa, synthetic construct
PLNATLKLY

SEQ ID NO: 35408 - protein, 9 aa, synthetic construct
PSNGVLKLY

SEQ ID NO: 35409 - protein, 9 aa, synthetic construct
PSNGVLKLR

SEQ ID NO: 35410 - protein, 9 aa, synthetic construct
PSNGVLKLF

SEQ ID NO: 35411 - protein, 9 aa, synthetic construct
PSNGVLKVY

SEQ ID NO: 35412 - protein, 9 aa, synthetic construct
PSNGVAHVK

SEQ ID NO: 35413 - protein, 9 aa, synthetic construct
PSNGVAHVF

SEQ ID NO: 35414 - protein, 9 aa, synthetic construct
PLNATLKLH

SEQ ID NO: 35415 - protein, 9 aa, synthetic construct
PSNGVARLY

SEQ ID NO: 35416 - protein, 9 aa, synthetic construct
PSNGVARLH

SEQ ID NO: 35417 - protein, 9 aa, synthetic construct
PSNGVARLF

SEQ ID NO: 35418 - protein, 9 aa, synthetic construct
PSNGVARVY

SEQ ID NO: 35419 - protein, 9 aa, synthetic construct
PSNGVARVH

SEQ ID NO: 35420 - protein, 9 aa, synthetic construct
PSNGVAKLY

SEQ ID NO: 35421 - protein, 9 aa, synthetic construct
PSNGVAKLF

SEQ ID NO: 35422 - protein, 9 aa, synthetic construct
PSNGVAKVR

SEQ ID NO: 35423 - protein, 9 aa, synthetic construct
PSNGVAKVH

SEQ ID NO: 35424 - protein, 9 aa, synthetic construct
PSNGVIHVR

SEQ ID NO: 35425 - protein, 9 aa, synthetic construct
PSNGVIHVF

SEQ ID NO: 35426 - protein, 9 aa, synthetic construct
PSNGVIRLR

SEQ ID NO: 35427 - protein, 9 aa, synthetic construct
PSNGVIRVR

SEQ ID NO: 35428 - protein, 9 aa, synthetic construct
PSNGVIRVH

SEQ ID NO: 35429 - protein, 9 aa, synthetic construct
PSNGVIKVY

SEQ ID NO: 35430 - protein, 9 aa, synthetic construct
PSNGVIKVF

SEQ ID NO: 35431 - protein, 9 aa, synthetic construct
PSNGVGHLR

SEQ ID NO: 35432 - protein, 9 aa, synthetic construct
PSNGVGHLK

SEQ ID NO: 35433 - protein, 9 aa, synthetic construct
PSNGVGHLF

SEQ ID NO: 35434 - protein, 9 aa, synthetic construct
PSNGVGHVR

SEQ ID NO: 35435 - protein, 9 aa, synthetic construct
PLNATLKVK

SEQ ID NO: 35436 - protein, 9 aa, synthetic construct
PSNGVGRLY

SEQ ID NO: 35437 - protein, 9 aa, synthetic construct
PSNGVGRLF

SEQ ID NO: 35438 - protein, 9 aa, synthetic construct
PSNGVGRVH

SEQ ID NO: 35439 - protein, 9 aa, synthetic construct
PSNGVGKLY

SEQ ID NO: 35440 - protein, 9 aa, synthetic construct
PSNGVGKLR

SEQ ID NO: 35441 - protein, 9 aa, synthetic construct
PSNGVGKVY

SEQ ID NO: 35442 - protein, 9 aa, synthetic construct
PSNGGVRLY

SEQ ID NO: 35443 - protein, 9 aa, synthetic construct
PSNGGVRLH

SEQ ID NO: 35444 - protein, 9 aa, synthetic construct
PSNGGVRLF

SEQ ID NO: 35445 - protein, 9 aa, synthetic construct
PSNGGVRVY

SEQ ID NO: 35446 - protein, 9 aa, synthetic construct
PSNGGVRVK

SEQ ID NO: 35447 - protein, 9 aa, synthetic construct
PSNGGVKLK

SEQ ID NO: 35448 - protein, 9 aa, synthetic construct
PSNGGVKVH

SEQ ID NO: 35449 - protein, 9 aa, synthetic construct
PSNGGVKVK

SEQ ID NO: 35450 - protein, 9 aa, synthetic construct
PSNGGLHLF

SEQ ID NO: 35451 - protein, 9 aa, synthetic construct
PSNGGLHVF

SEQ ID NO: 35452 - protein, 9 aa, synthetic construct
PSNGGLRLF

SEQ ID NO: 35453 - protein, 9 aa, synthetic construct
PSNGGLKVH

SEQ ID NO: 35454 - protein, 9 aa, synthetic construct
PSNGGLKVF

SEQ ID NO: 35455 - protein, 9 aa, synthetic construct
PSNGGAHLY

SEQ ID NO: 35456 - protein, 9 aa, synthetic construct
PSNGGAHVY

SEQ ID NO: 35457 - protein, 9 aa, synthetic construct
PSNGGAHVR

SEQ ID NO: 35458 - protein, 9 aa, synthetic construct
PSNGGARLF

SEQ ID NO: 35459 - protein, 9 aa, synthetic construct
PSNGGARVF

SEQ ID NO: 35460 - protein, 9 aa, synthetic construct
PSNGGAKVH

SEQ ID NO: 35461 - protein, 9 aa, synthetic construct
PSNGGAKVF

SEQ ID NO: 35462 - protein, 9 aa, synthetic construct
PSNGGIHLF

SEQ ID NO: 35463 - protein, 9 aa, synthetic construct
PSNGGIRVF

SEQ ID NO: 35464 - protein, 9 aa, synthetic construct
PSNGGIKLR

SEQ ID NO: 35465 - protein, 9 aa, synthetic construct
PSNGGIKVF

SEQ ID NO: 35466 - protein, 9 aa, synthetic construct
PSNGGGHLK

SEQ ID NO: 35467 - protein, 9 aa, synthetic construct
PSNGGGRLF

SEQ ID NO: 35468 - protein, 9 aa, synthetic construct
PSNGGGRVR

SEQ ID NO: 35469 - protein, 9 aa, synthetic construct
PSNGGGKVY

SEQ ID NO: 35470 - protein, 9 aa, synthetic construct
PSNGGGKVH

SEQ ID NO: 35471 - protein, 9 aa, synthetic construct
PSNGGGKVK

SEQ ID NO: 35472 - protein, 9 aa, synthetic construct
PSNAAVHVY

SEQ ID NO: 35473 - protein, 9 aa, synthetic construct
PSNAAVHVF

SEQ ID NO: 35474 - protein, 9 aa, synthetic construct
PSNAAVRVY

SEQ ID NO: 35475 - protein, 9 aa, synthetic construct
PSNAAVKVK

SEQ ID NO: 35476 - protein, 9 aa, synthetic construct
PSNAAVKVF

SEQ ID NO: 35477 - protein, 9 aa, synthetic construct
PSNAALHLY

SEQ ID NO: 35478 - protein, 9 aa, synthetic construct
PSNAALHLH

SEQ ID NO: 35479 - protein, 9 aa, synthetic construct
PSNAALHLK

SEQ ID NO: 35480 - protein, 9 aa, synthetic construct
PSNAALHLF

SEQ ID NO: 35481 - protein, 9 aa, synthetic construct
PSNAALHVH

SEQ ID NO: 35482 - protein, 9 aa, synthetic construct
PSNAALRLH

SEQ ID NO: 35483 - protein, 9 aa, synthetic construct
PSNAALRLF

SEQ ID NO: 35484 - protein, 9 aa, synthetic construct
PSNAALRVK

SEQ ID NO: 35485 - protein, 9 aa, synthetic construct
PSNAALKLY

SEQ ID NO: 35486 - protein, 9 aa, synthetic construct
PSNAALKLH

SEQ ID NO: 35487 - protein, 9 aa, synthetic construct
PSNAALKLF

SEQ ID NO: 35488 - protein, 9 aa, synthetic construct
PSNAALKVY

SEQ ID NO: 35489 - protein, 9 aa, synthetic construct
PSNAALKVF

SEQ ID NO: 35490 - protein, 9 aa, synthetic construct
PLNATAKLK

SEQ ID NO: 35491 - protein, 9 aa, synthetic construct
PSNAAIHLY

SEQ ID NO: 35492 - protein, 9 aa, synthetic construct
PSNAAIRLF

SEQ ID NO: 35493 - protein, 9 aa, synthetic construct
PSNAAIRVR

SEQ ID NO: 35494 - protein, 9 aa, synthetic construct
PSNAAIKLY

SEQ ID NO: 35495 - protein, 9 aa, synthetic construct
PSNAAIKLK

SEQ ID NO: 35496 - protein, 9 aa, synthetic construct
PSNAAIKLF

SEQ ID NO: 35497 - protein, 9 aa, synthetic construct
PSNAAIKVH

SEQ ID NO: 35498 - protein, 9 aa, synthetic construct
PSNAAIKVK

SEQ ID NO: 35499 - protein, 9 aa, synthetic construct
PSNAAGHVY

SEQ ID NO: 35500 - protein, 9 aa, synthetic construct
PSNAAGHVR

SEQ ID NO: 35501 - protein, 9 aa, synthetic construct
PSNAAGRLY

SEQ ID NO: 35502 - protein, 9 aa, synthetic construct
PSNAAGRLR

SEQ ID NO: 35503 - protein, 9 aa, synthetic construct
PSNAAGRVH

SEQ ID NO: 35504 - protein, 9 aa, synthetic construct
PSNAAGRVK

SEQ ID NO: 35505 - protein, 9 aa, synthetic construct
PSNATVHLR

SEQ ID NO: 35506 - protein, 9 aa, synthetic construct
PSNATVHVY

SEQ ID NO: 35507 - protein, 9 aa, synthetic construct
PSNATVHVR

SEQ ID NO: 35508 - protein, 9 aa, synthetic construct
PSNATVHVF

SEQ ID NO: 35509 - protein, 9 aa, synthetic construct
PSNATVRVH

SEQ ID NO: 35510 - protein, 9 aa, synthetic construct
PSNATVKLR

SEQ ID NO: 35511 - protein, 9 aa, synthetic construct
PSNATLHLY

SEQ ID NO: 35512 - protein, 9 aa, synthetic construct
PSNATLHLH

SEQ ID NO: 35513 - protein, 9 aa, synthetic construct
PSNATLHLK

SEQ ID NO: 35514 - protein, 9 aa, synthetic construct
PSNATLHLF

SEQ ID NO: 35515 - protein, 9 aa, synthetic construct
PSNATLHVY

SEQ ID NO: 35516 - protein, 9 aa, synthetic construct
PSNATLHVR

SEQ ID NO: 35517 - protein, 9 aa, synthetic construct
PLNATIHLF

SEQ ID NO: 35518 - protein, 9 aa, synthetic construct
PSNATLRLH

SEQ ID NO: 35519 - protein, 9 aa, synthetic construct
PSNATLRVK

SEQ ID NO: 35520 - protein, 9 aa, synthetic construct
PSNATLKLH

SEQ ID NO: 35521 - protein, 9 aa, synthetic construct
PSNATLKVH

SEQ ID NO: 35522 - protein, 9 aa, synthetic construct
PSNATLKVF

SEQ ID NO: 35523 - protein, 9 aa, synthetic construct
PSNATARLF

SEQ ID NO: 35524 - protein, 9 aa, synthetic construct
PSNATARVY

SEQ ID NO: 35525 - protein, 9 aa, synthetic construct
PSNATARVH

SEQ ID NO: 35526 - protein, 9 aa, synthetic construct
PSNATAKLR

SEQ ID NO: 35527 - protein, 9 aa, synthetic construct
PSNATAKLF

SEQ ID NO: 35528 - protein, 7 aa, synthetic construct
PTQGTVR

SEQ ID NO: 35529 - protein, 9 aa, synthetic construct
PSNATIKLR

SEQ ID NO: 35530 - protein, 9 aa, synthetic construct
PSNATIKVK

SEQ ID NO: 35531 - protein, 9 aa, synthetic construct
PSNATGHLR

SEQ ID NO: 35532 - protein, 9 aa, synthetic construct
PSNATGRVH

SEQ ID NO: 35533 - protein, 9 aa, synthetic construct
PSNASVRLF

SEQ ID NO: 35534 - protein, 9 aa, synthetic construct
PSNASVRVY

SEQ ID NO: 35535 - protein, 9 aa, synthetic construct
PSNASVRVR

SEQ ID NO: 35536 - protein, 9 aa, synthetic construct
PSNASVRVK

SEQ ID NO: 35537 - protein, 9 aa, synthetic construct
PSNASVKVH

SEQ ID NO: 35538 - protein, 9 aa, synthetic construct
PSNASLHVH

SEQ ID NO: 35539 - protein, 9 aa, synthetic construct
PSNASAKLH

SEQ ID NO: 35540 - protein, 9 aa, synthetic construct
PSNASIKLR

SEQ ID NO: 35541 - protein, 9 aa, synthetic construct
PLNATIKVH

SEQ ID NO: 35542 - protein, 9 aa, synthetic construct
PLNATIKVK

SEQ ID NO: 35543 - protein, 9 aa, synthetic construct
PSNASGRVY

SEQ ID NO: 35544 - protein, 9 aa, synthetic construct
PSNASGRVH

SEQ ID NO: 35545 - protein, 9 aa, synthetic construct
PLNATIKVF

SEQ ID NO: 35546 - protein, 9 aa, synthetic construct
PSNASGKVK

SEQ ID NO: 35547 - protein, 9 aa, synthetic construct
PSNAVVRLK

SEQ ID NO: 35548 - protein, 9 aa, synthetic construct
PSNAVVKLH

SEQ ID NO: 35549 - protein, 9 aa, synthetic construct
PSNAVVKVH

SEQ ID NO: 35550 - protein, 9 aa, synthetic construct
PSNAVLRLH

SEQ ID NO: 35551 - protein, 9 aa, synthetic construct
PSNAVLRVY

SEQ ID NO: 35552 - protein, 9 aa, synthetic construct
PSNAVLKVH

SEQ ID NO: 35553 - protein, 9 aa, synthetic construct
PSNAVLKVF

SEQ ID NO: 35554 - protein, 9 aa, synthetic construct
PSNAVARLF

SEQ ID NO: 35555 - protein, 9 aa, synthetic construct
PSNAVIHLH

SEQ ID NO: 35556 - protein, 9 aa, synthetic construct
PSNAVIRLF

SEQ ID NO: 35557 - protein, 9 aa, synthetic construct
PSNAVIRVY

SEQ ID NO: 35558 - protein, 9 aa, synthetic construct
PSNAVIRVF

SEQ ID NO: 35559 - protein, 9 aa, synthetic construct
PSNAVIKLK

SEQ ID NO: 35560 - protein, 9 aa, synthetic construct
PLNATGRLH

SEQ ID NO: 35561 - protein, 9 aa, synthetic construct
PLNATGRVR

SEQ ID NO: 35562 - protein, 9 aa, synthetic construct
PLNATGRVH

SEQ ID NO: 35563 - protein, 9 aa, synthetic construct
PSNAGVKLK

SEQ ID NO: 35564 - protein, 9 aa, synthetic construct
PLNATGRVK

SEQ ID NO: 35565 - protein, 9 aa, synthetic construct
PLNATGKVR

SEQ ID NO: 35566 - protein, 9 aa, synthetic construct
PSNAGIKLK

SEQ ID NO: 35567 - protein, 9 aa, synthetic construct
PSNAGGRVK

SEQ ID NO: 35568 - protein, 9 aa, synthetic construct
PSNAGGKVR

SEQ ID NO: 35569 - protein, 9 aa, synthetic construct
PSQGAVHLR

SEQ ID NO: 35570 - protein, 9 aa, synthetic construct
PSQGAVRVF

SEQ ID NO: 35571 - protein, 9 aa, synthetic construct
PSQGAVKLY

SEQ ID NO: 35572 - protein, 9 aa, synthetic construct
PSQGALHLR

SEQ ID NO: 35573 - protein, 9 aa, synthetic construct
PSQGALHLH

SEQ ID NO: 35574 - protein, 9 aa, synthetic construct
PSQGALHLK

SEQ ID NO: 35575 - protein, 9 aa, synthetic construct
PSQGALHLF

SEQ ID NO: 35576 - protein, 9 aa, synthetic construct
PSQGALHVY

SEQ ID NO: 35577 - protein, 9 aa, synthetic construct
PSQGALHVH

SEQ ID NO: 35578 - protein, 9 aa, synthetic construct
PSQGALKVF

SEQ ID NO: 35579 - protein, 9 aa, synthetic construct
PSQGAAHLY

SEQ ID NO: 35580 - protein, 9 aa, synthetic construct
PSQGAAHLR

SEQ ID NO: 35581 - protein, 9 aa, synthetic construct
PSQGAAHLK

SEQ ID NO: 35582 - protein, 9 aa, synthetic construct
PSQGAAHVY

SEQ ID NO: 35583 - protein, 9 aa, synthetic construct
PSQGAAHVH

SEQ ID NO: 35584 - protein, 9 aa, synthetic construct
PSQGAARLY

SEQ ID NO: 35585 - protein, 9 aa, synthetic construct
PSQGAAKLY

SEQ ID NO: 35586 - protein, 9 aa, synthetic construct
PSQGAIHVK

SEQ ID NO: 35587 - protein, 9 aa, synthetic construct
PSQGAIRVR

SEQ ID NO: 35588 - protein, 9 aa, synthetic construct
PSQGAGRVF

SEQ ID NO: 35589 - protein, 9 aa, synthetic construct
PSQGAGKVH

SEQ ID NO: 35590 - protein, 9 aa, synthetic construct
PSQGTVHLY

SEQ ID NO: 35591 - protein, 9 aa, synthetic construct
PSQGTVRLH

SEQ ID NO: 35592 - protein, 9 aa, synthetic construct
PSQGTVKLF

SEQ ID NO: 35593 - protein, 9 aa, synthetic construct
PSQGTLHVY

SEQ ID NO: 35594 - protein, 9 aa, synthetic construct
PSQGTLKLH

SEQ ID NO: 35595 - protein, 9 aa, synthetic construct
PSQGTLKLF

SEQ ID NO: 35596 - protein, 9 aa, synthetic construct
PSQGTLKVH

SEQ ID NO: 35597 - protein, 9 aa, synthetic construct
PSQGTLKVF

SEQ ID NO: 35598 - protein, 9 aa, synthetic construct
PSQGTARLH

SEQ ID NO: 35599 - protein, 9 aa, synthetic construct
PSQGTAKLF

SEQ ID NO: 35600 - protein, 9 aa, synthetic construct
PSQGTAKVH

SEQ ID NO: 35601 - protein, 9 aa, synthetic construct
PSQGTIRLF

SEQ ID NO: 35602 - protein, 9 aa, synthetic construct
PSQGTIRVF

SEQ ID NO: 35603 - protein, 9 aa, synthetic construct
PSQGTIKVK

SEQ ID NO: 35604 - protein, 9 aa, synthetic construct
PSQGTGRLH

SEQ ID NO: 35605 - protein, 9 aa, synthetic construct
PSQGTGKLH

SEQ ID NO: 35606 - protein, 9 aa, synthetic construct
PSQGSVHLK

SEQ ID NO: 35607 - protein, 9 aa, synthetic construct
PLNASLHLR

SEQ ID NO: 35608 - protein, 9 aa, synthetic construct
PSQGSVRLH

SEQ ID NO: 35609 - protein, 9 aa, synthetic construct
PSQGSVKVR

SEQ ID NO: 35610 - protein, 9 aa, synthetic construct
PLNASLHLK

SEQ ID NO: 35611 - protein, 9 aa, synthetic construct
PSQGSLHLK

SEQ ID NO: 35612 - protein, 9 aa, synthetic construct
PSQGSLHVY

SEQ ID NO: 35613 - protein, 9 aa, synthetic construct
PSQGSLHVH

SEQ ID NO: 35614 - protein, 9 aa, synthetic construct
PLNASLHVY

SEQ ID NO: 35615 - protein, 9 aa, synthetic construct
PSQGSIHLR

SEQ ID NO: 35616 - protein, 9 aa, synthetic construct
PSQGSIHVY

SEQ ID NO: 35617 - protein, 9 aa, synthetic construct
PSQGSIHVH

SEQ ID NO: 35618 - protein, 9 aa, synthetic construct
PSQGSIHVK

SEQ ID NO: 35619 - protein, 9 aa, synthetic construct
PSQGSIHVF

SEQ ID NO: 35620 - protein, 9 aa, synthetic construct
PSQGSIKVF

SEQ ID NO: 35621 - protein, 9 aa, synthetic construct
PSQGSGHLH

SEQ ID NO: 35622 - protein, 9 aa, synthetic construct
PSQGSGHVY

SEQ ID NO: 35623 - protein, 9 aa, synthetic construct
PSQGSGHVH

SEQ ID NO: 35624 - protein, 9 aa, synthetic construct
PSQGSGRLY

SEQ ID NO: 35625 - protein, 9 aa, synthetic construct
PSQGSGRVF

SEQ ID NO: 35626 - protein, 9 aa, synthetic construct
PSQGVVHLR

SEQ ID NO: 35627 - protein, 9 aa, synthetic construct
PSQGVVHVY

SEQ ID NO: 35628 - protein, 9 aa, synthetic construct
PSQGVVHVH

SEQ ID NO: 35629 - protein, 9 aa, synthetic construct
PLNASLRVK

SEQ ID NO: 35630 - protein, 9 aa, synthetic construct
PSQGVLRVF

SEQ ID NO: 35631 - protein, 9 aa, synthetic construct
PSQGVLKLR

SEQ ID NO: 35632 - protein, 9 aa, synthetic construct
PLNASLKLR

SEQ ID NO: 35633 - protein, 9 aa, synthetic construct
PSQGVAKVH

SEQ ID NO: 35634 - protein, 9 aa, synthetic construct
PSQGVIHLH

SEQ ID NO: 35635 - protein, 9 aa, synthetic construct
PLNASLKVY

SEQ ID NO: 35636 - protein, 9 aa, synthetic construct
PSQGVIRLF

SEQ ID NO: 35637 - protein, 9 aa, synthetic construct
PSQGVIRVH

SEQ ID NO: 35638 - protein, 9 aa, synthetic construct
PLNASLKVR

SEQ ID NO: 35639 - protein, 9 aa, synthetic construct
PSQGVIKVF

SEQ ID NO: 35640 - protein, 9 aa, synthetic construct
PLNASLKVK

SEQ ID NO: 35641 - protein, 9 aa, synthetic construct
PSQGVGRVH

SEQ ID NO: 35642 - protein, 9 aa, synthetic construct
PSQGVGRVF

SEQ ID NO: 35643 - protein, 9 aa, synthetic construct
PSQGVGKLY

SEQ ID NO: 35644 - protein, 9 aa, synthetic construct
PSQGGVHVY

SEQ ID NO: 35645 - protein, 9 aa, synthetic construct
PSQGGVHVK

SEQ ID NO: 35646 - protein, 9 aa, synthetic construct
PSQGGVRLH

SEQ ID NO: 35647 - protein, 9 aa, synthetic construct
PSQGGVRVY

SEQ ID NO: 35648 - protein, 9 aa, synthetic construct
PSQGGVKLF

SEQ ID NO: 35649 - protein, 9 aa, synthetic construct
PSQGGLHLR

SEQ ID NO: 35650 - protein, 9 aa, synthetic construct
PSQGGLHLH

SEQ ID NO: 35651 - protein, 9 aa, synthetic construct
PSQGGLHLK

SEQ ID NO: 35652 - protein, 9 aa, synthetic construct
PSQGGLHLF

SEQ ID NO: 35653 - protein, 9 aa, synthetic construct
PSQGGLHVK

SEQ ID NO: 35654 - protein, 9 aa, synthetic construct
PSQGGLKLH

SEQ ID NO: 35655 - protein, 9 aa, synthetic construct
PSQGGLKVF

SEQ ID NO: 35656 - protein, 9 aa, synthetic construct
PSQGGAHLF

SEQ ID NO: 35657 - protein, 9 aa, synthetic construct
PSQGGAHVR

SEQ ID NO: 35658 - protein, 9 aa, synthetic construct
PSQGGAKLH

SEQ ID NO: 35659 - protein, 9 aa, synthetic construct
PSQGGIHVY

SEQ ID NO: 35660 - protein, 9 aa, synthetic construct
PSQGGIKVY

SEQ ID NO: 35661 - protein, 9 aa, synthetic construct
PSQGGIKVH

SEQ ID NO: 35662 - protein, 9 aa, synthetic construct
PSQGGGHVH

SEQ ID NO: 35663 - protein, 9 aa, synthetic construct
PLNASARLK

SEQ ID NO: 35664 - protein, 9 aa, synthetic construct
PSQGGGRVF

SEQ ID NO: 35665 - protein, 9 aa, synthetic construct
PSQGGGKLY

SEQ ID NO: 35666 - protein, 9 aa, synthetic construct
PSQGGGKVY

SEQ ID NO: 35667 - protein, 9 aa, synthetic construct
PSQAAVHLR

SEQ ID NO: 35668 - protein, 9 aa, synthetic construct
PSQAAVKLR

SEQ ID NO: 35669 - protein, 9 aa, synthetic construct
PSQAAVKLK

SEQ ID NO: 35670 - protein, 9 aa, synthetic construct
PSQAALHLR

SEQ ID NO: 35671 - protein, 9 aa, synthetic construct
PSQAAAHVR

SEQ ID NO: 35672 - protein, 9 aa, synthetic construct
PSQAAARVY

SEQ ID NO: 35673 - protein, 9 aa, synthetic construct
PSQAAAKVH

SEQ ID NO: 35674 - protein, 9 aa, synthetic construct
PSQAAAKVK

SEQ ID NO: 35675 - protein, 9 aa, synthetic construct
PSQAAIHLR

SEQ ID NO: 35676 - protein, 9 aa, synthetic construct
PSQAAIHLF

SEQ ID NO: 35677 - protein, 9 aa, synthetic construct
PSQAAIRLY

SEQ ID NO: 35678 - protein, 9 aa, synthetic construct
PSQAAIRLR

SEQ ID NO: 35679 - protein, 9 aa, synthetic construct
PSQAAIRLK

SEQ ID NO: 35680 - protein, 9 aa, synthetic construct
PSQAAIRVR

SEQ ID NO: 35681 - protein, 9 aa, synthetic construct
PSQAAIKVY

SEQ ID NO: 35682 - protein, 9 aa, synthetic construct
PSQATVHVY

SEQ ID NO: 35683 - protein, 9 aa, synthetic construct
PSQATVHVF

SEQ ID NO: 35684 - protein, 9 aa, synthetic construct
PSQATVRVY

SEQ ID NO: 35685 - protein, 9 aa, synthetic construct
PSQATLHLK

SEQ ID NO: 35686 - protein, 9 aa, synthetic construct
PSQATLHLF

SEQ ID NO: 35687 - protein, 9 aa, synthetic construct
PSQATLHVY

SEQ ID NO: 35688 - protein, 9 aa, synthetic construct
PSQATLHVF

SEQ ID NO: 35689 - protein, 9 aa, synthetic construct
PSQATLRLH

SEQ ID NO: 35690 - protein, 9 aa, synthetic construct
PSQATLRVF

SEQ ID NO: 35691 - protein, 9 aa, synthetic construct
PSQATLKLY

SEQ ID NO: 35692 - protein, 9 aa, synthetic construct
PSQATLKLR

SEQ ID NO: 35693 - protein, 9 aa, synthetic construct
PSQATLKLF

SEQ ID NO: 35694 - protein, 9 aa, synthetic construct
PSQATLKVF

SEQ ID NO: 35695 - protein, 9 aa, synthetic construct
PSQATAKLR

SEQ ID NO: 35696 - protein, 9 aa, synthetic construct
PLNASIHVF

SEQ ID NO: 35697 - protein, 9 aa, synthetic construct
PSQATIKLH

SEQ ID NO: 35698 - protein, 9 aa, synthetic construct
PSQATIKLF

SEQ ID NO: 35699 - protein, 9 aa, synthetic construct
PSQATIKVF

SEQ ID NO: 35700 - protein, 9 aa, synthetic construct
PSQATGRVK

SEQ ID NO: 35701 - protein, 9 aa, synthetic construct
PSQASVHLK

SEQ ID NO: 35702 - protein, 9 aa, synthetic construct
PSQASVHVY

SEQ ID NO: 35703 - protein, 9 aa, synthetic construct
PSQASVRVY

SEQ ID NO: 35704 - protein, 9 aa, synthetic construct
PLNASIRVH

SEQ ID NO: 35705 - protein, 9 aa, synthetic construct
PSQASVKLY

SEQ ID NO: 35706 - protein, 9 aa, synthetic construct
PSQASVKVR

SEQ ID NO: 35707 - protein, 9 aa, synthetic construct
PSQASLHLH

SEQ ID NO: 35708 - protein, 9 aa, synthetic construct
PSQASLHVF

SEQ ID NO: 35709 - protein, 9 aa, synthetic construct
PLNGAIKVR

SEQ ID NO: 35710 - protein, 9 aa, synthetic construct
PLNASIKLR

SEQ ID NO: 35711 - protein, 9 aa, synthetic construct
PSQASAHLR

SEQ ID NO: 35712 - protein, 9 aa, synthetic construct
PSQASAHVY

SEQ ID NO: 35713 - protein, 9 aa, synthetic construct
PSQASAHVK

SEQ ID NO: 35714 - protein, 9 aa, synthetic construct
PSQASARLK

SEQ ID NO: 35715 - protein, 9 aa, synthetic construct
PSQASARLF

SEQ ID NO: 35716 - protein, 9 aa, synthetic construct
PSQASARVF

SEQ ID NO: 35717 - protein, 9 aa, synthetic construct
PSQASAKLH

SEQ ID NO: 35718 - protein, 9 aa, synthetic construct
PSQASAKVH

SEQ ID NO: 35719 - protein, 9 aa, synthetic construct
PLNASIKVR

SEQ ID NO: 35720 - protein, 9 aa, synthetic construct
PSQASIKVH

SEQ ID NO: 35721 - protein, 9 aa, synthetic construct
PSQASGRLH

SEQ ID NO: 35722 - protein, 9 aa, synthetic construct
PSQAVVHLR

SEQ ID NO: 35723 - protein, 9 aa, synthetic construct
PSQAVVHVK

SEQ ID NO: 35724 - protein, 9 aa, synthetic construct
PSQAVVRLH

SEQ ID NO: 35725 - protein, 9 aa, synthetic construct
PSQAVVKLY

SEQ ID NO: 35726 - protein, 9 aa, synthetic construct
PSQAVVKVY

SEQ ID NO: 35727 - protein, 9 aa, synthetic construct
PSQAVVKVF

SEQ ID NO: 35728 - protein, 9 aa, synthetic construct
PSQAVLKVF

SEQ ID NO: 35729 - protein, 9 aa, synthetic construct
PSQAVARVF

SEQ ID NO: 35730 - protein, 9 aa, synthetic construct
PSQAVIHLH

SEQ ID NO: 35731 - protein, 9 aa, synthetic construct
PSQAVIRLF

SEQ ID NO: 35732 - protein, 9 aa, synthetic construct
PSQAVIKLK

SEQ ID NO: 35733 - protein, 9 aa, synthetic construct
PSQAVIKLF

SEQ ID NO: 35734 - protein, 9 aa, synthetic construct
PSQAVIKVH

SEQ ID NO: 35735 - protein, 9 aa, synthetic construct
PSQAVGHLY

SEQ ID NO: 35736 - protein, 9 aa, synthetic construct
PSQAVGHLR

SEQ ID NO: 35737 - protein, 9 aa, synthetic construct
PSQAVGHVH

SEQ ID NO: 35738 - protein, 9 aa, synthetic construct
PSQAVGHVF

SEQ ID NO: 35739 - protein, 9 aa, synthetic construct
PLNASGRLK

SEQ ID NO: 35740 - protein, 9 aa, synthetic construct
PSQAVGRLY

SEQ ID NO: 35741 - protein, 9 aa, synthetic construct
PSQAVGRLH

SEQ ID NO: 35742 - protein, 9 aa, synthetic construct
PSQAVGRVY

SEQ ID NO: 35743 - protein, 9 aa, synthetic construct
PSQAVGKLY

SEQ ID NO: 35744 - protein, 9 aa, synthetic construct
PSQAVGKLH

SEQ ID NO: 35745 - protein, 9 aa, synthetic construct
PSQAVGKVY

SEQ ID NO: 35746 - protein, 9 aa, synthetic construct
PSQAVGKVK

SEQ ID NO: 35747 - protein, 9 aa, synthetic construct
PLNASGRVY

SEQ ID NO: 35748 - protein, 9 aa, synthetic construct
PSQAGVRLH

SEQ ID NO: 35749 - protein, 9 aa, synthetic construct
PSQAGAHLR

SEQ ID NO: 35750 - protein, 9 aa, synthetic construct
PSQAGAHLF

SEQ ID NO: 35751 - protein, 9 aa, synthetic construct
PSQAGAHVR

SEQ ID NO: 35752 - protein, 9 aa, synthetic construct
PSQAGAHVH

SEQ ID NO: 35753 - protein, 9 aa, synthetic construct
PSQAGAHVF

SEQ ID NO: 35754 - protein, 9 aa, synthetic construct
PSQAGAKLR

SEQ ID NO: 35755 - protein, 9 aa, synthetic construct
PSQAGGHLK

SEQ ID NO: 35756 - protein, 9 aa, synthetic construct
PSQAGGHVF

SEQ ID NO: 35757 - protein, 9 aa, synthetic construct
PLNASGKVK

SEQ ID NO: 35758 - protein, 9 aa, synthetic construct
PSQAGGRLH

SEQ ID NO: 35759 - protein, 9 aa, synthetic construct
PSQAGGKLY

SEQ ID NO: 35760 - protein, 9 aa, synthetic construct
PSQAGGKLH

SEQ ID NO: 35761 - protein, 9 aa, synthetic construct
PSPGALHVH

SEQ ID NO: 35762 - protein, 9 aa, synthetic construct
PSPGAAHVR

SEQ ID NO: 35763 - protein, 9 aa, synthetic construct
PSPGAARLY

SEQ ID NO: 35764 - protein, 9 aa, synthetic construct
PSPGAAKLK

SEQ ID NO: 35765 - protein, 9 aa, synthetic construct
PSPGAAKVK

SEQ ID NO: 35766 - protein, 9 aa, synthetic construct
PLNAVVRLY

SEQ ID NO: 35767 - protein, 9 aa, synthetic construct
PSPGAIRVY

SEQ ID NO: 35768 - protein, 9 aa, synthetic construct
PLNAVVRLR

SEQ ID NO: 35769 - protein, 9 aa, synthetic construct
PLNAVVRLK

SEQ ID NO: 35770 - protein, 9 aa, synthetic construct
PLNAVVRLF

SEQ ID NO: 35771 - protein, 9 aa, synthetic construct
PSPGTVKVK

SEQ ID NO: 35772 - protein, 9 aa, synthetic construct
PSPGTAKLK

SEQ ID NO: 35773 - protein, 9 aa, synthetic construct
PSPGTIRVF

SEQ ID NO: 35774 - protein, 9 aa, synthetic construct
PSPGTIKVR

SEQ ID NO: 35775 - protein, 9 aa, synthetic construct
PLNAVVKVH

SEQ ID NO: 35776 - protein, 9 aa, synthetic construct
PSPGTGRVR

SEQ ID NO: 35777 - protein, 9 aa, synthetic construct
PSPGTGKVK

SEQ ID NO: 35778 - protein, 9 aa, synthetic construct
PSPGSVRLH

SEQ ID NO: 35779 - protein, 9 aa, synthetic construct
PSPGSVRVY

SEQ ID NO: 35780 - protein, 9 aa, synthetic construct
PSPGSVKLF

SEQ ID NO: 35781 - protein, 9 aa, synthetic construct
PSPGSVKVK

SEQ ID NO: 35782 - protein, 9 aa, synthetic construct
PSPGSLHVR

SEQ ID NO: 35783 - protein, 9 aa, synthetic construct
PSPGSLHVK

SEQ ID NO: 35784 - protein, 9 aa, synthetic construct
PSPGSAHLR

SEQ ID NO: 35785 - protein, 9 aa, synthetic construct
PSPGSAKLY

SEQ ID NO: 35786 - protein, 9 aa, synthetic construct
PSPGSAKLF

SEQ ID NO: 35787 - protein, 9 aa, synthetic construct
PSPGSAKVY

SEQ ID NO: 35788 - protein, 9 aa, synthetic construct
PSPGSIKLY

SEQ ID NO: 35789 - protein, 9 aa, synthetic construct
PSPGSIKLK

SEQ ID NO: 35790 - protein, 9 aa, synthetic construct
PLNAVLRLH

SEQ ID NO: 35791 - protein, 9 aa, synthetic construct
PSPGSGHLH

SEQ ID NO: 35792 - protein, 9 aa, synthetic construct
PSPGSGHVH

SEQ ID NO: 35793 - protein, 9 aa, synthetic construct
PSPGSGRLK

SEQ ID NO: 35794 - protein, 9 aa, synthetic construct
PSPGSGRVY

SEQ ID NO: 35795 - protein, 9 aa, synthetic construct
PSPGSGRVR

SEQ ID NO: 35796 - protein, 9 aa, synthetic construct
PSPGSGRVH

SEQ ID NO: 35797 - protein, 9 aa, synthetic construct
PLNAVLRVR

SEQ ID NO: 35798 - protein, 9 aa, synthetic construct
PSPGVLHVY

SEQ ID NO: 35799 - protein, 9 aa, synthetic construct
PSPGVARVY

SEQ ID NO: 35800 - protein, 9 aa, synthetic construct
PSPGVIHLF

SEQ ID NO: 35801 - protein, 9 aa, synthetic construct
PSPGVIKLH

SEQ ID NO: 35802 - protein, 9 aa, synthetic construct
PLNAVLKVF

SEQ ID NO: 35803 - protein, 9 aa, synthetic construct
PLNAVAHLR

SEQ ID NO: 35804 - protein, 9 aa, synthetic construct
PLNAVAHLF

SEQ ID NO: 35805 - protein, 9 aa, synthetic construct
PSPGGLKLY

SEQ ID NO: 35806 - protein, 9 aa, synthetic construct
PSPGGAKVR

SEQ ID NO: 35807 - protein, 9 aa, synthetic construct
PSPGGIRVF

SEQ ID NO: 35808 - protein, 9 aa, synthetic construct
PSPGGIKVY

SEQ ID NO: 35809 - protein, 9 aa, synthetic construct
PSPAAVRVY

SEQ ID NO: 35810 - protein, 9 aa, synthetic construct
PSPAAVRVK

SEQ ID NO: 35811 - protein, 9 aa, synthetic construct
PSPAALRLY

SEQ ID NO: 35812 - protein, 9 aa, synthetic construct
PSPAALRVH

SEQ ID NO: 35813 - protein, 9 aa, synthetic construct
PSPAALKLR

SEQ ID NO: 35814 - protein, 9 aa, synthetic construct
PSPAALKVH

SEQ ID NO: 35815 - protein, 9 aa, synthetic construct
PSPAAIHLR

SEQ ID NO: 35816 - protein, 9 aa, synthetic construct
PSPAAIRLK

SEQ ID NO: 35817 - protein, 9 aa, synthetic construct
PSPAAIKLK

SEQ ID NO: 35818 - protein, 9 aa, synthetic construct
PSPATVHVH

SEQ ID NO: 35819 - protein, 9 aa, synthetic construct
PSPATVRLF

SEQ ID NO: 35820 - protein, 9 aa, synthetic construct
PSPATLHLF

SEQ ID NO: 35821 - protein, 9 aa, synthetic construct
PSPATLRVY

SEQ ID NO: 35822 - protein, 9 aa, synthetic construct
PLNAVIHVY

SEQ ID NO: 35823 - protein, 9 aa, synthetic construct
PSPATLKVY

SEQ ID NO: 35824 - protein, 9 aa, synthetic construct
PSPATLKVH

SEQ ID NO: 35825 - protein, 9 aa, synthetic construct
PSPATARLH

SEQ ID NO: 35826 - protein, 9 aa, synthetic construct
PSPATIKVK

SEQ ID NO: 35827 - protein, 9 aa, synthetic construct
PSPATGRVH

SEQ ID NO: 35828 - protein, 9 aa, synthetic construct
PSPATGKLK

SEQ ID NO: 35829 - protein, 9 aa, synthetic construct
PSPASVHVR

SEQ ID NO: 35830 - protein, 9 aa, synthetic construct
PSPASVRVY

SEQ ID NO: 35831 - protein, 9 aa, synthetic construct
PSPASIRLH

SEQ ID NO: 35832 - protein, 9 aa, synthetic construct
PSPASIRVH

SEQ ID NO: 35833 - protein, 9 aa, synthetic construct
PSPASIKLY

SEQ ID NO: 35834 - protein, 9 aa, synthetic construct
PSPASGHLF

SEQ ID NO: 35835 - protein, 9 aa, synthetic construct
PSPASGHVY

SEQ ID NO: 35836 - protein, 9 aa, synthetic construct
PSPASGHVR

SEQ ID NO: 35837 - protein, 9 aa, synthetic construct
PSPASGRLF

SEQ ID NO: 35838 - protein, 9 aa, synthetic construct
PLNAVGHLY

SEQ ID NO: 35839 - protein, 9 aa, synthetic construct
PSPAVVRLH

SEQ ID NO: 35840 - protein, 9 aa, synthetic construct
PSPAVVKVR

SEQ ID NO: 35841 - protein, 9 aa, synthetic construct
PSPAVLHVH

SEQ ID NO: 35842 - protein, 9 aa, synthetic construct
PSPAVLHVK

SEQ ID NO: 35843 - protein, 9 aa, synthetic construct
PSPAVLRLY

SEQ ID NO: 35844 - protein, 9 aa, synthetic construct
PSPAVLRLH

SEQ ID NO: 35845 - protein, 9 aa, synthetic construct
PSPAVLKVF

SEQ ID NO: 35846 - protein, 9 aa, synthetic construct
PSPAVARVF

SEQ ID NO: 35847 - protein, 9 aa, synthetic construct
PSPAVAKVH

SEQ ID NO: 35848 - protein, 9 aa, synthetic construct
PSPAVIHLK

SEQ ID NO: 35849 - protein, 9 aa, synthetic construct
PSPAVIHVR

SEQ ID NO: 35850 - protein, 9 aa, synthetic construct
PSPAVIRLH

SEQ ID NO: 35851 - protein, 9 aa, synthetic construct
PSPAVIRVK

SEQ ID NO: 35852 - protein, 9 aa, synthetic construct
PSPAVGHLF

SEQ ID NO: 35853 - protein, 9 aa, synthetic construct
PSPAVGHVH

SEQ ID NO: 35854 - protein, 9 aa, synthetic construct
PSPAVGKLH

SEQ ID NO: 35855 - protein, 9 aa, synthetic construct
PSPAGVKLR

SEQ ID NO: 35856 - protein, 9 aa, synthetic construct
PSPAGLKVH

SEQ ID NO: 35857 - protein, 9 aa, synthetic construct
PSPAGAHVH

SEQ ID NO: 35858 - protein, 9 aa, synthetic construct
PSPAGARVH

SEQ ID NO: 35859 - protein, 9 aa, synthetic construct
PSPAGGHVK

SEQ ID NO: 35860 - protein, 9 aa, synthetic construct
PSPAGGRLH

SEQ ID NO: 35861 - protein, 9 aa, synthetic construct
PANGAVRVY

SEQ ID NO: 35862 - protein, 9 aa, synthetic construct
PANGAVKLR

SEQ ID NO: 35863 - protein, 9 aa, synthetic construct
PANGAVKLK

SEQ ID NO: 35864 - protein, 9 aa, synthetic construct
PANGALHLY

SEQ ID NO: 35865 - protein, 9 aa, synthetic construct
PANGALHVH

SEQ ID NO: 35866 - protein, 9 aa, synthetic construct
PANGALRVH

SEQ ID NO: 35867 - protein, 9 aa, synthetic construct
PANGALRVF

SEQ ID NO: 35868 - protein, 9 aa, synthetic construct
PANGALKVH

SEQ ID NO: 35869 - protein, 9 aa, synthetic construct
PANGAAKLK

SEQ ID NO: 35870 - protein, 9 aa, synthetic construct
PANGAIKVR

SEQ ID NO: 35871 - protein, 9 aa, synthetic construct
PANGTLHLF

SEQ ID NO: 35872 - protein, 9 aa, synthetic construct
PANGTLRLF

SEQ ID NO: 35873 - protein, 9 aa, synthetic construct
PANGTAKLK

SEQ ID NO: 35874 - protein, 9 aa, synthetic construct
PANGTIRVR

SEQ ID NO: 35875 - protein, 9 aa, synthetic construct
PANGTIRVK

SEQ ID NO: 35876 - protein, 9 aa, synthetic construct
PANGTGRLR

SEQ ID NO: 35877 - protein, 9 aa, synthetic construct
PANGTGRVR

SEQ ID NO: 35878 - protein, 9 aa, synthetic construct
PANGSVRLH

SEQ ID NO: 35879 - protein, 9 aa, synthetic construct
PANGSVRLF

SEQ ID NO: 35880 - protein, 9 aa, synthetic construct
PANGSVRVH

SEQ ID NO: 35881 - protein, 9 aa, synthetic construct
PANGSVRVK

SEQ ID NO: 35882 - protein, 9 aa, synthetic construct
PANGSVKVR

SEQ ID NO: 35883 - protein, 9 aa, synthetic construct
PANGSVKVK

SEQ ID NO: 35884 - protein, 9 aa, synthetic construct
PANGSLHLF

SEQ ID NO: 35885 - protein, 9 aa, synthetic construct
PANGSLKVH

SEQ ID NO: 35886 - protein, 9 aa, synthetic construct
PLNAGLHVH

SEQ ID NO: 35887 - protein, 9 aa, synthetic construct
PANGSARLK

SEQ ID NO: 35888 - protein, 9 aa, synthetic construct
PANGSARLF

SEQ ID NO: 35889 - protein, 9 aa, synthetic construct
PLNAGLHVK

SEQ ID NO: 35890 - protein, 9 aa, synthetic construct
PANGSIKLK

SEQ ID NO: 35891 - protein, 9 aa, synthetic construct
PANGSGHVR

SEQ ID NO: 35892 - protein, 9 aa, synthetic construct
PANGSGHVH

SEQ ID NO: 35893 - protein, 9 aa, synthetic construct
PANGSGHVK

SEQ ID NO: 35894 - protein, 9 aa, synthetic construct
PANGSGHVF

SEQ ID NO: 35895 - protein, 9 aa, synthetic construct
PANGSGRLH

SEQ ID NO: 35896 - protein, 9 aa, synthetic construct
PANGSGRVY

SEQ ID NO: 35897 - protein, 9 aa, synthetic construct
PANGSGKLR

SEQ ID NO: 35898 - protein, 9 aa, synthetic construct
PANGSGKVK

SEQ ID NO: 35899 - protein, 9 aa, synthetic construct
PANGVVHLF

SEQ ID NO: 35900 - protein, 9 aa, synthetic construct
PANGVLHLF

SEQ ID NO: 35901 - protein, 9 aa, synthetic construct
PLNAGLKLH

SEQ ID NO: 35902 - protein, 9 aa, synthetic construct
PANGVARLY

SEQ ID NO: 35903 - protein, 9 aa, synthetic construct
PANGVIHLR

SEQ ID NO: 35904 - protein, 9 aa, synthetic construct
PANGVIRLF

SEQ ID NO: 35905 - protein, 9 aa, synthetic construct
PANGVIKLK

SEQ ID NO: 35906 - protein, 9 aa, synthetic construct
PANGVIKVF

SEQ ID NO: 35907 - protein, 9 aa, synthetic construct
PLNAGLKVH

SEQ ID NO: 35908 - protein, 9 aa, synthetic construct
PLNAGLKVK

SEQ ID NO: 35909 - protein, 9 aa, synthetic construct
PANGGLHLH

SEQ ID NO: 35910 - protein, 9 aa, synthetic construct
PANGGLRLK

SEQ ID NO: 35911 - protein, 9 aa, synthetic construct
PANGGLRVH

SEQ ID NO: 35912 - protein, 9 aa, synthetic construct
PANGGLKLF

SEQ ID NO: 35913 - protein, 9 aa, synthetic construct
PANGGIRVK

SEQ ID NO: 35914 - protein, 9 aa, synthetic construct
PANGGIKVR

SEQ ID NO: 35915 - protein, 9 aa, synthetic construct
PLNAGARLH

SEQ ID NO: 35916 - protein, 9 aa, synthetic construct
PANGGGHLK

SEQ ID NO: 35917 - protein, 9 aa, synthetic construct
PANGGGRLR

SEQ ID NO: 35918 - protein, 9 aa, synthetic construct
PANGGGRLK

SEQ ID NO: 35919 - protein, 9 aa, synthetic construct
PANAAVRLK

SEQ ID NO: 35920 - protein, 9 aa, synthetic construct
PANAALKLY

SEQ ID NO: 35921 - protein, 9 aa, synthetic construct
PANAALKLR

SEQ ID NO: 35922 - protein, 9 aa, synthetic construct
PANAALKLK

SEQ ID NO: 35923 - protein, 9 aa, synthetic construct
PANAALKVH

SEQ ID NO: 35924 - protein, 9 aa, synthetic construct
PANAAAKLK

SEQ ID NO: 35925 - protein, 9 aa, synthetic construct
PANAAAKVK

SEQ ID NO: 35926 - protein, 9 aa, synthetic construct
PANATVRLF

SEQ ID NO: 35927 - protein, 9 aa, synthetic construct
PANATVRVY

SEQ ID NO: 35928 - protein, 9 aa, synthetic construct
PANATLHVR

SEQ ID NO: 35929 - protein, 9 aa, synthetic construct
PANATLHVF

SEQ ID NO: 35930 - protein, 9 aa, synthetic construct
PANATLRLY

SEQ ID NO: 35931 - protein, 9 aa, synthetic construct
PANATLKLR

SEQ ID NO: 35932 - protein, 9 aa, synthetic construct
PANATLKVF

SEQ ID NO: 35933 - protein, 9 aa, synthetic construct
PANATAKVK

SEQ ID NO: 35934 - protein, 9 aa, synthetic construct
PANATIHVR

SEQ ID NO: 35935 - protein, 9 aa, synthetic construct
PANATIKLR

SEQ ID NO: 35936 - protein, 9 aa, synthetic construct
PANATIKVH

SEQ ID NO: 35937 - protein, 9 aa, synthetic construct
PANATGRLH

SEQ ID NO: 35938 - protein, 9 aa, synthetic construct
PANATGRVR

SEQ ID NO: 35939 - protein, 9 aa, synthetic construct
PANASVHLH

SEQ ID NO: 35940 - protein, 9 aa, synthetic construct
PANASVHLF

SEQ ID NO: 35941 - protein, 9 aa, synthetic construct
PANASVHVY

SEQ ID NO: 35942 - protein, 9 aa, synthetic construct
PANASVHVH

SEQ ID NO: 35943 - protein, 9 aa, synthetic construct
PANASVRVK

SEQ ID NO: 35944 - protein, 9 aa, synthetic construct
PANASLHLK

SEQ ID NO: 35945 - protein, 9 aa, synthetic construct
PANASLHVY

SEQ ID NO: 35946 - protein, 9 aa, synthetic construct
PANASLHVH

SEQ ID NO: 35947 - protein, 9 aa, synthetic construct
PANASLHVF

SEQ ID NO: 35948 - protein, 9 aa, synthetic construct
PLNAGIRVF

SEQ ID NO: 35949 - protein, 9 aa, synthetic construct
PANASARLH

SEQ ID NO: 35950 - protein, 9 aa, synthetic construct
PANASARLK

SEQ ID NO: 35951 - protein, 9 aa, synthetic construct
PANASIHLF

SEQ ID NO: 35952 - protein, 9 aa, synthetic construct
PANASIRLH

SEQ ID NO: 35953 - protein, 9 aa, synthetic construct
PANASIKVY

SEQ ID NO: 35954 - protein, 9 aa, synthetic construct
PANASGKVK

SEQ ID NO: 35955 - protein, 9 aa, synthetic construct
PANAVVKLH

SEQ ID NO: 35956 - protein, 9 aa, synthetic construct
PANAVLKVH

SEQ ID NO: 35957 - protein, 9 aa, synthetic construct
PANAVIRVK

SEQ ID NO: 35958 - protein, 9 aa, synthetic construct
PANAVIKLK

SEQ ID NO: 35959 - protein, 9 aa, synthetic construct
PANAVIKVF

SEQ ID NO: 35960 - protein, 9 aa, synthetic construct
PLNAGGRLF

SEQ ID NO: 35961 - protein, 9 aa, synthetic construct
PANAVGKVR

SEQ ID NO: 35962 - protein, 9 aa, synthetic construct
PANAGVHLK

SEQ ID NO: 35963 - protein, 9 aa, synthetic construct
PLNAGGRVH

SEQ ID NO: 35964 - protein, 9 aa, synthetic construct
PANAGAKVK

SEQ ID NO: 35965 - protein, 9 aa, synthetic construct
PANAGGRLH

SEQ ID NO: 35966 - protein, 9 aa, synthetic construct
PAQGAVRLK

SEQ ID NO: 35967 - protein, 9 aa, synthetic construct
PAQGALHLF

SEQ ID NO: 35968 - protein, 9 aa, synthetic construct
PAQGALKVR

SEQ ID NO: 35969 - protein, 9 aa, synthetic construct
PAQGAARLR

SEQ ID NO: 35970 - protein, 9 aa, synthetic construct
PAQGAARLK

SEQ ID NO: 35971 - protein, 9 aa, synthetic construct
PAQGAAKLR

SEQ ID NO: 35972 - protein, 9 aa, synthetic construct
PAQGAAKLK

SEQ ID NO: 35973 - protein, 9 aa, synthetic construct
PAQGAAKVK

SEQ ID NO: 35974 - protein, 9 aa, synthetic construct
PAQGAIRVR

SEQ ID NO: 35975 - protein, 9 aa, synthetic construct
PAQGTVHLF

SEQ ID NO: 35976 - protein, 9 aa, synthetic construct
PAQGTVKLR

SEQ ID NO: 35977 - protein, 9 aa, synthetic construct
PAQGTVKVR

SEQ ID NO: 35978 - protein, 9 aa, synthetic construct
PAQGTLHLY

SEQ ID NO: 35979 - protein, 9 aa, synthetic construct
PAQGTLHLH

SEQ ID NO: 35980 - protein, 9 aa, synthetic construct
PAQGTLHLF

SEQ ID NO: 35981 - protein, 9 aa, synthetic construct
PLQGAVRVF

SEQ ID NO: 35982 - protein, 9 aa, synthetic construct
PLQGAVKLR

SEQ ID NO: 35983 - protein, 9 aa, synthetic construct
PAQGTARLK

SEQ ID NO: 35984 - protein, 9 aa, synthetic construct
PAQGTARVH

SEQ ID NO: 35985 - protein, 9 aa, synthetic construct
PAQGTAKLR

SEQ ID NO: 35986 - protein, 9 aa, synthetic construct
PAQGTAKLK

SEQ ID NO: 35987 - protein, 9 aa, synthetic construct
PAQGTAKVK

SEQ ID NO: 35988 - protein, 9 aa, synthetic construct
PAQGTIRVF

SEQ ID NO: 35989 - protein, 9 aa, synthetic construct
PAQGTIKVK

SEQ ID NO: 35990 - protein, 9 aa, synthetic construct
PAQGTGRLH

SEQ ID NO: 35991 - protein, 9 aa, synthetic construct
PAQGTGRLK

SEQ ID NO: 35992 - protein, 9 aa, synthetic construct
PAQGTGRVK

SEQ ID NO: 35993 - protein, 9 aa, synthetic construct
PLQGALHLR

SEQ ID NO: 35994 - protein, 9 aa, synthetic construct
PAQGSVKVR

SEQ ID NO: 35995 - protein, 9 aa, synthetic construct
PAQGSLHLF

SEQ ID NO: 35996 - protein, 9 aa, synthetic construct
PLQGALHLF

SEQ ID NO: 35997 - protein, 9 aa, synthetic construct
PAQGSLKLF

SEQ ID NO: 35998 - protein, 9 aa, synthetic construct
PAQGSARLK

SEQ ID NO: 35999 - protein, 9 aa, synthetic construct
PLQGALRLY

SEQ ID NO: 36000 - protein, 9 aa, synthetic construct
PAQGSGRVY

SEQ ID NO: 36001 - protein, 9 aa, synthetic construct
PAQGVVHLF

SEQ ID NO: 36002 - protein, 9 aa, synthetic construct
PAQGVLHLR

SEQ ID NO: 36003 - protein, 9 aa, synthetic construct
PAQGVLHVR

SEQ ID NO: 36004 - protein, 9 aa, synthetic construct
PAQGVLRVK

SEQ ID NO: 36005 - protein, 9 aa, synthetic construct
PAQGVLRVF

SEQ ID NO: 36006 - protein, 9 aa, synthetic construct
PAQGVLKLR

SEQ ID NO: 36007 - protein, 9 aa, synthetic construct
PAQGVARVK

SEQ ID NO: 36008 - protein, 9 aa, synthetic construct
PAQGVARVF

SEQ ID NO: 36009 - protein, 9 aa, synthetic construct
PAQGVAKLF

SEQ ID NO: 36010 - protein, 9 aa, synthetic construct
PAQGVIRVK

SEQ ID NO: 36011 - protein, 9 aa, synthetic construct
PLQGALKVR

SEQ ID NO: 36012 - protein, 9 aa, synthetic construct
PAQGVGRLR

SEQ ID NO: 36013 - protein, 9 aa, synthetic construct
PAQGVGRLF

SEQ ID NO: 36014 - protein, 9 aa, synthetic construct
PAQGVGRVR

SEQ ID NO: 36015 - protein, 9 aa, synthetic construct
PAQGVGRVF

SEQ ID NO: 36016 - protein, 9 aa, synthetic construct
PAQGVGKVR

SEQ ID NO: 36017 - protein, 9 aa, synthetic construct
PAQGGVRLK

SEQ ID NO: 36018 - protein, 9 aa, synthetic construct
PAQGGVKVR

SEQ ID NO: 36019 - protein, 9 aa, synthetic construct
PAQGGLHLY

SEQ ID NO: 36020 - protein, 9 aa, synthetic construct
PAQGGLHLH

SEQ ID NO: 36021 - protein, 9 aa, synthetic construct
PAQGGLHLK

SEQ ID NO: 36022 - protein, 9 aa, synthetic construct
PAQGGLHLF

SEQ ID NO: 36023 - protein, 9 aa, synthetic construct
PAQGGARVH

SEQ ID NO: 36024 - protein, 9 aa, synthetic construct
PLQGAARLY

SEQ ID NO: 36025 - protein, 9 aa, synthetic construct
PAQGGIRVK

SEQ ID NO: 36026 - protein, 9 aa, synthetic construct
PAQGGIKVR

SEQ ID NO: 36027 - protein, 9 aa, synthetic construct
PAQGGGRLK

SEQ ID NO: 36028 - protein, 9 aa, synthetic construct
PAQAAVRLK

SEQ ID NO: 36029 - protein, 9 aa, synthetic construct
PAQAAARLR

SEQ ID NO: 36030 - protein, 9 aa, synthetic construct
PAQAAARLK

SEQ ID NO: 36031 - protein, 9 aa, synthetic construct
PLQGAAKLK

SEQ ID NO: 36032 - protein, 9 aa, synthetic construct
PAQAAAKLR

SEQ ID NO: 36033 - protein, 9 aa, synthetic construct
PAQAAAKLK

SEQ ID NO: 36034 - protein, 9 aa, synthetic construct
PAQAAAKVK

SEQ ID NO: 36035 - protein, 9 aa, synthetic construct
PAQAAIRLK

SEQ ID NO: 36036 - protein, 9 aa, synthetic construct
PAQAAIRVR

SEQ ID NO: 36037 - protein, 9 aa, synthetic construct
PAQAAGKLR

SEQ ID NO: 36038 - protein, 9 aa, synthetic construct
PAQAAGKLK

SEQ ID NO: 36039 - protein, 9 aa, synthetic construct
PAQAAGKVK

SEQ ID NO: 36040 - protein, 9 aa, synthetic construct
PLQGAIHLR

SEQ ID NO: 36041 - protein, 9 aa, synthetic construct
PAQATVRLK

SEQ ID NO: 36042 - protein, 9 aa, synthetic construct
PAQATARLK

SEQ ID NO: 36043 - protein, 9 aa, synthetic construct
PAQATAKLR

SEQ ID NO: 36044 - protein, 9 aa, synthetic construct
PAQATAKVK

SEQ ID NO: 36045 - protein, 9 aa, synthetic construct
PAQATIKVK

SEQ ID NO: 36046 - protein, 9 aa, synthetic construct
PAQASVHLH

SEQ ID NO: 36047 - protein, 9 aa, synthetic construct
PAQASVHVF

SEQ ID NO: 36048 - protein, 9 aa, synthetic construct
PLQGAIRVR

SEQ ID NO: 36049 - protein, 9 aa, synthetic construct
PAQASLHLF

SEQ ID NO: 36050 - protein, 9 aa, synthetic construct
PAQASLKVK

SEQ ID NO: 36051 - protein, 9 aa, synthetic construct
PAQASARLK

SEQ ID NO: 36052 - protein, 9 aa, synthetic construct
PLQGAIKLK

SEQ ID NO: 36053 - protein, 9 aa, synthetic construct
PLQGAIKVR

SEQ ID NO: 36054 - protein, 9 aa, synthetic construct
PAQASGKVK

SEQ ID NO: 36055 - protein, 9 aa, synthetic construct
PAQAVVRVR

SEQ ID NO: 36056 - protein, 9 aa, synthetic construct
PAQAVVRVK

SEQ ID NO: 36057 - protein, 9 aa, synthetic construct
PAQAVLHVH

SEQ ID NO: 36058 - protein, 9 aa, synthetic construct
PAQAVLHVK

SEQ ID NO: 36059 - protein, 9 aa, synthetic construct
PAQAVLKVF

SEQ ID NO: 36060 - protein, 9 aa, synthetic construct
PAQAVARLH

SEQ ID NO: 36061 - protein, 9 aa, synthetic construct
PAQAVARVF

SEQ ID NO: 36062 - protein, 9 aa, synthetic construct
PAQAVIRLK

SEQ ID NO: 36063 - protein, 9 aa, synthetic construct
PAQAVIRVK

SEQ ID NO: 36064 - protein, 9 aa, synthetic construct
PLQGAGRLH

SEQ ID NO: 36065 - protein, 9 aa, synthetic construct
PAQAVGHLY

SEQ ID NO: 36066 - protein, 9 aa, synthetic construct
PAQAVGRLH

SEQ ID NO: 36067 - protein, 9 aa, synthetic construct
PAQAVGKLR

SEQ ID NO: 36068 - protein, 9 aa, synthetic construct
PAQAVGKVK

SEQ ID NO: 36069 - protein, 9 aa, synthetic construct
PAQAGVHLH

SEQ ID NO: 36070 - protein, 9 aa, synthetic construct
PAQAGVKLR

SEQ ID NO: 36071 - protein, 9 aa, synthetic construct
PAQAGLKVH

SEQ ID NO: 36072 - protein, 9 aa, synthetic construct
PAQAGAHVH

SEQ ID NO: 36073 - protein, 9 aa, synthetic construct
PAQAGARLK

SEQ ID NO: 36074 - protein, 9 aa, synthetic construct
PAQAGAKLH

SEQ ID NO: 36075 - protein, 9 aa, synthetic construct
PAQAGGHLY

SEQ ID NO: 36076 - protein, 9 aa, synthetic construct
PAQAGGRLH

SEQ ID NO: 36077 - protein, 9 aa, synthetic construct
PAPGAVKLR

SEQ ID NO: 36078 - protein, 9 aa, synthetic construct
PAPGAVKLK

SEQ ID NO: 36079 - protein, 9 aa, synthetic construct
PAPGAVKVK

SEQ ID NO: 36080 - protein, 9 aa, synthetic construct
PAPGALHLF

SEQ ID NO: 36081 - protein, 9 aa, synthetic construct
PAPGALRVH

SEQ ID NO: 36082 - protein, 9 aa, synthetic construct
PAPGAARLR

SEQ ID NO: 36083 - protein, 9 aa, synthetic construct
PAPGAAKLK

SEQ ID NO: 36084 - protein, 9 aa, synthetic construct
PLQGTVRLY

SEQ ID NO: 36085 - protein, 9 aa, synthetic construct
PAPGAIRLK

SEQ ID NO: 36086 - protein, 9 aa, synthetic construct
PAPGAIKLK

SEQ ID NO: 36087 - protein, 9 aa, synthetic construct
PAPGAIKVR

SEQ ID NO: 36088 - protein, 9 aa, synthetic construct
PAPGTVKVK

SEQ ID NO: 36089 - protein, 9 aa, synthetic construct
PAPGTLHLY

SEQ ID NO: 36090 - protein, 9 aa, synthetic construct
PAPGTLHLH

SEQ ID NO: 36091 - protein, 9 aa, synthetic construct
PLQGTVKLR

SEQ ID NO: 36092 - protein, 9 aa, synthetic construct
PAPGTARLH

SEQ ID NO: 36093 - protein, 9 aa, synthetic construct
PAPGTAKVK

SEQ ID NO: 36094 - protein, 9 aa, synthetic construct
PLQGTVKVR

SEQ ID NO: 36095 - protein, 9 aa, synthetic construct
PLQGTVKVK

SEQ ID NO: 36096 - protein, 9 aa, synthetic construct
PLQGTLHLY

SEQ ID NO: 36097 - protein, 9 aa, synthetic construct
PLQGTLRVR

SEQ ID NO: 36098 - protein, 9 aa, synthetic construct
PAPGVLHLF

SEQ ID NO: 36099 - protein, 9 aa, synthetic construct
PAPGVLHVY

SEQ ID NO: 36100 - protein, 9 aa, synthetic construct
PAPGVLHVF

SEQ ID NO: 36101 - protein, 9 aa, synthetic construct
PAPGVLRLH

SEQ ID NO: 36102 - protein, 9 aa, synthetic construct
PAPGVLKLR

SEQ ID NO: 36103 - protein, 9 aa, synthetic construct
PAPGVIRVK

SEQ ID NO: 36104 - protein, 9 aa, synthetic construct
PAPGVIRVF

SEQ ID NO: 36105 - protein, 9 aa, synthetic construct
PAPGVIKVF

SEQ ID NO: 36106 - protein, 9 aa, synthetic construct
PAPGGLRVR

SEQ ID NO: 36107 - protein, 9 aa, synthetic construct
PAPGGARLK

SEQ ID NO: 36108 - protein, 9 aa, synthetic construct
PAPGGAKVK

SEQ ID NO: 36109 - protein, 9 aa, synthetic construct
PAPGGIRLK

SEQ ID NO: 36110 - protein, 9 aa, synthetic construct
PAPGGGRLK

SEQ ID NO: 36111 - protein, 9 aa, synthetic construct
PAPAAVRVK

SEQ ID NO: 36112 - protein, 9 aa, synthetic construct
PAPAAVKLK

SEQ ID NO: 36113 - protein, 9 aa, synthetic construct
PAPAALHVH

SEQ ID NO: 36114 - protein, 9 aa, synthetic construct
PAPAALRLY

SEQ ID NO: 36115 - protein, 9 aa, synthetic construct
PAPAALRLH

SEQ ID NO: 36116 - protein, 9 aa, synthetic construct
PAPAALRVR

SEQ ID NO: 36117 - protein, 9 aa, synthetic construct
PAPAALRVH

SEQ ID NO: 36118 - protein, 9 aa, synthetic construct
PAPAALKLR

SEQ ID NO: 36119 - protein, 9 aa, synthetic construct
PAPAALKVH

SEQ ID NO: 36120 - protein, 9 aa, synthetic construct
PAPAAARLR

SEQ ID NO: 36121 - protein, 9 aa, synthetic construct
PAPAAIRLK

SEQ ID NO: 36122 - protein, 9 aa, synthetic construct
PAPAAIRVF

SEQ ID NO: 36123 - protein, 9 aa, synthetic construct
PAPATIKVK

SEQ ID NO: 36124 - protein, 9 aa, synthetic construct
PAPATGKLK

SEQ ID NO: 36125 - protein, 9 aa, synthetic construct
PAPASVRVY

SEQ ID NO: 36126 - protein, 9 aa, synthetic construct
PAPASVKVY

SEQ ID NO: 36127 - protein, 9 aa, synthetic construct
PAPASLKVH

SEQ ID NO: 36128 - protein, 9 aa, synthetic construct
PAPASARLH

SEQ ID NO: 36129 - protein, 9 aa, synthetic construct
PAPASARLK

SEQ ID NO: 36130 - protein, 9 aa, synthetic construct
PAPASIHLF

SEQ ID NO: 36131 - protein, 9 aa, synthetic construct
PAPASIKVK

SEQ ID NO: 36132 - protein, 9 aa, synthetic construct
PAPASIKVF

SEQ ID NO: 36133 - protein, 9 aa, synthetic construct
PAPASGHVY

SEQ ID NO: 36134 - protein, 9 aa, synthetic construct
PLQGTIKVK

SEQ ID NO: 36135 - protein, 9 aa, synthetic construct
PAPASGRVH

SEQ ID NO: 36136 - protein, 9 aa, synthetic construct
PAPASGKLK

SEQ ID NO: 36137 - protein, 9 aa, synthetic construct
PAPASGKVR

SEQ ID NO: 36138 - protein, 9 aa, synthetic construct
PAPAVVRLK

SEQ ID NO: 36139 - protein, 9 aa, synthetic construct
PAPAVLHVK

SEQ ID NO: 36140 - protein, 9 aa, synthetic construct
PAPAVLRLR

SEQ ID NO: 36141 - protein, 9 aa, synthetic construct
PAPAVLRLH

SEQ ID NO: 36142 - protein, 9 aa, synthetic construct
PAPAVLRLK

SEQ ID NO: 36143 - protein, 9 aa, synthetic construct
PAPAVLKLK

SEQ ID NO: 36144 - protein, 9 aa, synthetic construct
PAPAVLKVF

SEQ ID NO: 36145 - protein, 9 aa, synthetic construct
PAPAVAHLF

SEQ ID NO: 36146 - protein, 9 aa, synthetic construct
PAPAVARVF

SEQ ID NO: 36147 - protein, 9 aa, synthetic construct
PAPAVAKVY

SEQ ID NO: 36148 - protein, 9 aa, synthetic construct
PAPAVIRLY

SEQ ID NO: 36149 - protein, 9 aa, synthetic construct
PAPAVIRLH

SEQ ID NO: 36150 - protein, 9 aa, synthetic construct
PAPAVIRLK

SEQ ID NO: 36151 - protein, 9 aa, synthetic construct
PAPAVIRLF

SEQ ID NO: 36152 - protein, 9 aa, synthetic construct
PAPAVIRVY

SEQ ID NO: 36153 - protein, 9 aa, synthetic construct
PAPAVIKLK

SEQ ID NO: 36154 - protein, 9 aa, synthetic construct
PAPAVIKVF

SEQ ID NO: 36155 - protein, 9 aa, synthetic construct
PLQGTGRLH

SEQ ID NO: 36156 - protein, 9 aa, synthetic construct
PAPAVGRLY

SEQ ID NO: 36157 - protein, 9 aa, synthetic construct
PAPAVGRLH

SEQ ID NO: 36158 - protein, 9 aa, synthetic construct
PAPAVGKVK

SEQ ID NO: 36159 - protein, 9 aa, synthetic construct
PAPAGVKLH

SEQ ID NO: 36160 - protein, 9 aa, synthetic construct
PAPAGLKVY

SEQ ID NO: 36161 - protein, 9 aa, synthetic construct
PAPAGLKVH

SEQ ID NO: 36162 - protein, 9 aa, synthetic construct
PAPAGARVH

SEQ ID NO: 36163 - protein, 9 aa, synthetic construct
PAPAGAKVK

SEQ ID NO: 36164 - protein, 9 aa, synthetic construct
PAPAGIHLY

SEQ ID NO: 36165 - protein, 9 aa, synthetic construct
PAPAGIHVY

SEQ ID NO: 36166 - protein, 9 aa, synthetic construct
PAPAGIRVF

SEQ ID NO: 36167 - protein, 9 aa, synthetic construct
PAPAGIKLH

SEQ ID NO: 36168 - protein, 9 aa, synthetic construct
PAPAGIKLF

SEQ ID NO: 36169 - protein, 9 aa, synthetic construct
PVNGAVKLR

SEQ ID NO: 36170 - protein, 9 aa, synthetic construct
PVNGAVKLK

SEQ ID NO: 36171 - protein, 9 aa, synthetic construct
PVNGAVKVR

SEQ ID NO: 36172 - protein, 9 aa, synthetic construct
PLQGSVHLF

SEQ ID NO: 36173 - protein, 9 aa, synthetic construct
PVNGAAKLK

SEQ ID NO: 36174 - protein, 9 aa, synthetic construct
PVNGAAKVK

SEQ ID NO: 36175 - protein, 9 aa, synthetic construct
PVNGAIRVY

SEQ ID NO: 36176 - protein, 9 aa, synthetic construct
PVNGAIRVR

SEQ ID NO: 36177 - protein, 9 aa, synthetic construct
PVNGAIKLR

SEQ ID NO: 36178 - protein, 9 aa, synthetic construct
PVNGAIKLK

SEQ ID NO: 36179 - protein, 9 aa, synthetic construct
PVNGAIKVR

SEQ ID NO: 36180 - protein, 9 aa, synthetic construct
PLQGSVRLF

SEQ ID NO: 36181 - protein, 9 aa, synthetic construct
PVNGAGKLK

SEQ ID NO: 36182 - protein, 9 aa, synthetic construct
PVNGTVRLK

SEQ ID NO: 36183 - protein, 9 aa, synthetic construct
PVNGTVRLF

SEQ ID NO: 36184 - protein, 9 aa, synthetic construct
PVNGTLHLF

SEQ ID NO: 36185 - protein, 9 aa, synthetic construct
PVNGTLRLH

SEQ ID NO: 36186 - protein, 9 aa, synthetic construct
PVNGTLRVY

SEQ ID NO: 36187 - protein, 9 aa, synthetic construct
PLQGSVKVR

SEQ ID NO: 36188 - protein, 9 aa, synthetic construct
PVNGTIKVR

SEQ ID NO: 36189 - protein, 9 aa, synthetic construct
PVNGTGRLR

SEQ ID NO: 36190 - protein, 9 aa, synthetic construct
PVNGSVRLF

SEQ ID NO: 36191 - protein, 9 aa, synthetic construct
PVNGSLRLH

SEQ ID NO: 36192 - protein, 9 aa, synthetic construct
PLQGSLHVH

SEQ ID NO: 36193 - protein, 9 aa, synthetic construct
PVNGSARVH

SEQ ID NO: 36194 - protein, 9 aa, synthetic construct
PVNGSIKVR

SEQ ID NO: 36195 - protein, 9 aa, synthetic construct
PVNGSGHVH

SEQ ID NO: 36196 - protein, 9 aa, synthetic construct
PVNGSGKLR

SEQ ID NO: 36197 - protein, 9 aa, synthetic construct
PVNGSGKVR

SEQ ID NO: 36198 - protein, 9 aa, synthetic construct
PVNGVVRLK

SEQ ID NO: 36199 - protein, 9 aa, synthetic construct
PVNGVVKLR

SEQ ID NO: 36200 - protein, 9 aa, synthetic construct
PVNGVLRLH

SEQ ID NO: 36201 - protein, 9 aa, synthetic construct
PVNGVLRVK

SEQ ID NO: 36202 - protein, 9 aa, synthetic construct
PVNGVLRVF

SEQ ID NO: 36203 - protein, 9 aa, synthetic construct
PVNGVARLY

SEQ ID NO: 36204 - protein, 9 aa, synthetic construct
PVNGVARLR

SEQ ID NO: 36205 - protein, 9 aa, synthetic construct
PVNGVARLK

SEQ ID NO: 36206 - protein, 9 aa, synthetic construct
PVNGVGRLK

SEQ ID NO: 36207 - protein, 9 aa, synthetic construct
PVNGGVKLR

SEQ ID NO: 36208 - protein, 9 aa, synthetic construct
PLQGSAHVR

SEQ ID NO: 36209 - protein, 9 aa, synthetic construct
PVNGGGRLR

SEQ ID NO: 36210 - protein, 9 aa, synthetic construct
PVNAAVRLK

SEQ ID NO: 36211 - protein, 9 aa, synthetic construct
PLQGSARVH

SEQ ID NO: 36212 - protein, 9 aa, synthetic construct
PVNAAVKLK

SEQ ID NO: 36213 - protein, 9 aa, synthetic construct
PVNAAVKVR

SEQ ID NO: 36214 - protein, 9 aa, synthetic construct
PVNAALHLF

SEQ ID NO: 36215 - protein, 9 aa, synthetic construct
PVNAALRLF

SEQ ID NO: 36216 - protein, 9 aa, synthetic construct
PVNAALRVY

SEQ ID NO: 36217 - protein, 9 aa, synthetic construct
PVNAALKLR

SEQ ID NO: 36218 - protein, 9 aa, synthetic construct
PVNAAAKVK

SEQ ID NO: 36219 - protein, 9 aa, synthetic construct
PVNAAIHLF

SEQ ID NO: 36220 - protein, 9 aa, synthetic construct
PVNAAIRLK

SEQ ID NO: 36221 - protein, 9 aa, synthetic construct
PLQGSAKVH

SEQ ID NO: 36222 - protein, 9 aa, synthetic construct
PLQGSAKVK

SEQ ID NO: 36223 - protein, 9 aa, synthetic construct
PVNATVRVY

SEQ ID NO: 36224 - protein, 9 aa, synthetic construct
PVNATLHLF

SEQ ID NO: 36225 - protein, 9 aa, synthetic construct
PVNATLHVF

SEQ ID NO: 36226 - protein, 9 aa, synthetic construct
PVNATLKLH

SEQ ID NO: 36227 - protein, 9 aa, synthetic construct
PVNATAKLR

SEQ ID NO: 36228 - protein, 9 aa, synthetic construct
PVNATIKLF

SEQ ID NO: 36229 - protein, 9 aa, synthetic construct
PVNATIKVK

SEQ ID NO: 36230 - protein, 9 aa, synthetic construct
PVNATIKVF

SEQ ID NO: 36231 - protein, 9 aa, synthetic construct
PVNATGRLH

SEQ ID NO: 36232 - protein, 9 aa, synthetic construct
PVNASLHVF

SEQ ID NO: 36233 - protein, 9 aa, synthetic construct
PVNASLKLR

SEQ ID NO: 36234 - protein, 9 aa, synthetic construct
PVNASARLH

SEQ ID NO: 36235 - protein, 9 aa, synthetic construct
PVNASARLK

SEQ ID NO: 36236 - protein, 9 aa, synthetic construct
PVNASIHVH

SEQ ID NO: 36237 - protein, 9 aa, synthetic construct
PVNASIRVH

SEQ ID NO: 36238 - protein, 9 aa, synthetic construct
PVNASIKVY

SEQ ID NO: 36239 - protein, 9 aa, synthetic construct
PVNASIKVR

SEQ ID NO: 36240 - protein, 9 aa, synthetic construct
PLQGSIKVK

SEQ ID NO: 36241 - protein, 9 aa, synthetic construct
PVNASGKVK

SEQ ID NO: 36242 - protein, 9 aa, synthetic construct
PVNAVVRLK

SEQ ID NO: 36243 - protein, 9 aa, synthetic construct
PVNAVLRLH

SEQ ID NO: 36244 - protein, 9 aa, synthetic construct
PVNAVIKLK

SEQ ID NO: 36245 - protein, 9 aa, synthetic construct
PVNAVIKVY

SEQ ID NO: 36246 - protein, 9 aa, synthetic construct
PVNAGVKLK

SEQ ID NO: 36247 - protein, 9 aa, synthetic construct
PVNAGLRLH

SEQ ID NO: 36248 - protein, 9 aa, synthetic construct
PVNAGLRVF

SEQ ID NO: 36249 - protein, 9 aa, synthetic construct
PVNAGLKLR

SEQ ID NO: 36250 - protein, 9 aa, synthetic construct
PVNAGLKLH

SEQ ID NO: 36251 - protein, 9 aa, synthetic construct
PVNAGLKLF

SEQ ID NO: 36252 - protein, 9 aa, synthetic construct
PVNAGLKVR

SEQ ID NO: 36253 - protein, 9 aa, synthetic construct
PVNAGIRVF

SEQ ID NO: 36254 - protein, 9 aa, synthetic construct
PVNAGIKVK

SEQ ID NO: 36255 - protein, 9 aa, synthetic construct
PVNAGGHLF

SEQ ID NO: 36256 - protein, 9 aa, synthetic construct
PVQGAVRLH

SEQ ID NO: 36257 - protein, 9 aa, synthetic construct
PVQGAVRVK

SEQ ID NO: 36258 - protein, 9 aa, synthetic construct
PVQGAVKLR

SEQ ID NO: 36259 - protein, 9 aa, synthetic construct
PVQGALRLY

SEQ ID NO: 36260 - protein, 9 aa, synthetic construct
PVQGALRLH

SEQ ID NO: 36261 - protein, 9 aa, synthetic construct
PVQGALRVY

SEQ ID NO: 36262 - protein, 9 aa, synthetic construct
PVQGALRVK

SEQ ID NO: 36263 - protein, 9 aa, synthetic construct
PVQGALKVR

SEQ ID NO: 36264 - protein, 9 aa, synthetic construct
PVQGAAKLK

SEQ ID NO: 36265 - protein, 9 aa, synthetic construct
PVQGAAKVK

SEQ ID NO: 36266 - protein, 9 aa, synthetic construct
PVQGAIRVR

SEQ ID NO: 36267 - protein, 9 aa, synthetic construct
PLQGVVRLR

SEQ ID NO: 36268 - protein, 9 aa, synthetic construct
PVQGAIKVR

SEQ ID NO: 36269 - protein, 9 aa, synthetic construct
PVQGTVRLF

SEQ ID NO: 36270 - protein, 9 aa, synthetic construct
PVQGTVRVH

SEQ ID NO: 36271 - protein, 9 aa, synthetic construct
PVQGTVKVR

SEQ ID NO: 36272 - protein, 9 aa, synthetic construct
PVQGTVKVK

SEQ ID NO: 36273 - protein, 9 aa, synthetic construct
PVQGTLHLY

SEQ ID NO: 36274 - protein, 9 aa, synthetic construct
PVQGTLHLR

SEQ ID NO: 36275 - protein, 9 aa, synthetic construct
PVQGTLRLK

SEQ ID NO: 36276 - protein, 9 aa, synthetic construct
PVQGTLRVH

SEQ ID NO: 36277 - protein, 9 aa, synthetic construct
PVQGTARLH

SEQ ID NO: 36278 - protein, 9 aa, synthetic construct
PVQGTAKLR

SEQ ID NO: 36279 - protein, 9 aa, synthetic construct
PVQGTAKLK

SEQ ID NO: 36280 - protein, 9 aa, synthetic construct
PVQGTIHVF

SEQ ID NO: 36281 - protein, 9 aa, synthetic construct
PVQGTIRLF

SEQ ID NO: 36282 - protein, 9 aa, synthetic construct
PVQGTIRVY

SEQ ID NO: 36283 - protein, 9 aa, synthetic construct
PVQGTIRVK

SEQ ID NO: 36284 - protein, 9 aa, synthetic construct
PVQGTIKVR

SEQ ID NO: 36285 - protein, 9 aa, synthetic construct
PVQGTIKVK

SEQ ID NO: 36286 - protein, 9 aa, synthetic construct
PVQGTGRLR

SEQ ID NO: 36287 - protein, 9 aa, synthetic construct
PVQGTGRLH

SEQ ID NO: 36288 - protein, 9 aa, synthetic construct
PVQGTGRVR

SEQ ID NO: 36289 - protein, 9 aa, synthetic construct
PVQGTGRVK

SEQ ID NO: 36290 - protein, 9 aa, synthetic construct
PVQGSVRVR

SEQ ID NO: 36291 - protein, 9 aa, synthetic construct
PVQGSVKVK

SEQ ID NO: 36292 - protein, 9 aa, synthetic construct
PVQGSLKLK

SEQ ID NO: 36293 - protein, 9 aa, synthetic construct
PVQGSLKLF

SEQ ID NO: 36294 - protein, 9 aa, synthetic construct
PVQGSARLK

SEQ ID NO: 36295 - protein, 9 aa, synthetic construct
PVQGSARVH

SEQ ID NO: 36296 - protein, 9 aa, synthetic construct
PVQGSAKVH

SEQ ID NO: 36297 - protein, 9 aa, synthetic construct
PVQGSIKVK

SEQ ID NO: 36298 - protein, 9 aa, synthetic construct
PVQGSGRLH

SEQ ID NO: 36299 - protein, 9 aa, synthetic construct
PVQGSGRVR

SEQ ID NO: 36300 - protein, 9 aa, synthetic construct
PVQGSGRVK

SEQ ID NO: 36301 - protein, 9 aa, synthetic construct
PVQGSGKVK

SEQ ID NO: 36302 - protein, 9 aa, synthetic construct
PVQGVVHLR

SEQ ID NO: 36303 - protein, 9 aa, synthetic construct
PVQGVLRLH

SEQ ID NO: 36304 - protein, 9 aa, synthetic construct
PVQGVLRVF

SEQ ID NO: 36305 - protein, 9 aa, synthetic construct
PVQGVLKVF

SEQ ID NO: 36306 - protein, 9 aa, synthetic construct
PVQGVARVK

SEQ ID NO: 36307 - protein, 9 aa, synthetic construct
PVQGVAKVK

SEQ ID NO: 36308 - protein, 9 aa, synthetic construct
PVQGVIRLK

SEQ ID NO: 36309 - protein, 9 aa, synthetic construct
PVQGVIRVK

SEQ ID NO: 36310 - protein, 9 aa, synthetic construct
PVQGVGRLR

SEQ ID NO: 36311 - protein, 9 aa, synthetic construct
PLQGVLKVF

SEQ ID NO: 36312 - protein, 9 aa, synthetic construct
PVQGGVKLR

SEQ ID NO: 36313 - protein, 9 aa, synthetic construct
PVQGGVKVR

SEQ ID NO: 36314 - protein, 9 aa, synthetic construct
PVQGGLKLH

SEQ ID NO: 36315 - protein, 9 aa, synthetic construct
PVQGGAKLK

SEQ ID NO: 36316 - protein, 9 aa, synthetic construct
PVQGGAKVK

SEQ ID NO: 36317 - protein, 9 aa, synthetic construct
PVQGGGHLH

SEQ ID NO: 36318 - protein, 9 aa, synthetic construct
PVQGGGHVF

SEQ ID NO: 36319 - protein, 9 aa, synthetic construct
PVQGGGKVY

SEQ ID NO: 36320 - protein, 9 aa, synthetic construct
PVQAAVHVY

SEQ ID NO: 36321 - protein, 9 aa, synthetic construct
PVQAAVRLK

SEQ ID NO: 36322 - protein, 9 aa, synthetic construct
PVQAAVRVK

SEQ ID NO: 36323 - protein, 9 aa, synthetic construct
PVQAAVKLR

SEQ ID NO: 36324 - protein, 9 aa, synthetic construct
PVQAAVKLK

SEQ ID NO: 36325 - protein, 9 aa, synthetic construct
PVQAAVKVR

SEQ ID NO: 36326 - protein, 9 aa, synthetic construct
PLQGVARVK

SEQ ID NO: 36327 - protein, 9 aa, synthetic construct
PVQAALHLY

SEQ ID NO: 36328 - protein, 9 aa, synthetic construct
PVQAALHLH

SEQ ID NO: 36329 - protein, 9 aa, synthetic construct
PVQAALHLK

SEQ ID NO: 36330 - protein, 9 aa, synthetic construct
PVQAALHLF

SEQ ID NO: 36331 - protein, 9 aa, synthetic construct
PVQAALRLY

SEQ ID NO: 36332 - protein, 9 aa, synthetic construct
PVQAALRLH

SEQ ID NO: 36333 - protein, 9 aa, synthetic construct
PVQAALRVR

SEQ ID NO: 36334 - protein, 9 aa, synthetic construct
PVQAALRVK

SEQ ID NO: 36335 - protein, 9 aa, synthetic construct
PVQAALKLY

SEQ ID NO: 36336 - protein, 9 aa, synthetic construct
PVQAALKLR

SEQ ID NO: 36337 - protein, 9 aa, synthetic construct
PVQAALKLK

SEQ ID NO: 36338 - protein, 9 aa, synthetic construct
PVQAAARLR

SEQ ID NO: 36339 - protein, 9 aa, synthetic construct
PVQAAAKVK

SEQ ID NO: 36340 - protein, 9 aa, synthetic construct
PVQAAIRVR

SEQ ID NO: 36341 - protein, 9 aa, synthetic construct
PVQAAIRVK

SEQ ID NO: 36342 - protein, 9 aa, synthetic construct
PVQAAGRVR

SEQ ID NO: 36343 - protein, 9 aa, synthetic construct
PVQAAGRVK

SEQ ID NO: 36344 - protein, 9 aa, synthetic construct
PVQAAGKLR

SEQ ID NO: 36345 - protein, 9 aa, synthetic construct
PVQATVHLF

SEQ ID NO: 36346 - protein, 9 aa, synthetic construct
PVQATVRLY

SEQ ID NO: 36347 - protein, 9 aa, synthetic construct
PVQATLHLR

SEQ ID NO: 36348 - protein, 9 aa, synthetic construct
PVQATLHLH

SEQ ID NO: 36349 - protein, 9 aa, synthetic construct
PVQATLHVY

SEQ ID NO: 36350 - protein, 9 aa, synthetic construct
PVQATLHVH

SEQ ID NO: 36351 - protein, 9 aa, synthetic construct
PVQATLHVF

SEQ ID NO: 36352 - protein, 9 aa, synthetic construct
PVQATLRVK

SEQ ID NO: 36353 - protein, 9 aa, synthetic construct
PVQATLKVF

SEQ ID NO: 36354 - protein, 9 aa, synthetic construct
PVQATAKLR

SEQ ID NO: 36355 - protein, 9 aa, synthetic construct
PVQATIHLF

SEQ ID NO: 36356 - protein, 9 aa, synthetic construct
PVQATGRVR

SEQ ID NO: 36357 - protein, 9 aa, synthetic construct
PVQATGRVK

SEQ ID NO: 36358 - protein, 9 aa, synthetic construct
PVQASVRLH

SEQ ID NO: 36359 - protein, 9 aa, synthetic construct
PVQASVKLR

SEQ ID NO: 36360 - protein, 9 aa, synthetic construct
PVQASVKVR

SEQ ID NO: 36361 - protein, 9 aa, synthetic construct
PVQASLHLY

SEQ ID NO: 36362 - protein, 9 aa, synthetic construct
PVQASLHLF

SEQ ID NO: 36363 - protein, 9 aa, synthetic construct
PVQASLRVH

SEQ ID NO: 36364 - protein, 9 aa, synthetic construct
PVQASLKVR

SEQ ID NO: 36365 - protein, 9 aa, synthetic construct
PVQASLKVK

SEQ ID NO: 36366 - protein, 9 aa, synthetic construct
PVQASARLK

SEQ ID NO: 36367 - protein, 9 aa, synthetic construct
PVQASIHLF

SEQ ID NO: 36368 - protein, 9 aa, synthetic construct
PVQASGRVK

SEQ ID NO: 36369 - protein, 9 aa, synthetic construct
PVQASGKVR

SEQ ID NO: 36370 - protein, 9 aa, synthetic construct
PVQASGKVK

SEQ ID NO: 36371 - protein, 9 aa, synthetic construct
PVQAVVRLY

SEQ ID NO: 36372 - protein, 9 aa, synthetic construct
PVQAVVRVH

SEQ ID NO: 36373 - protein, 9 aa, synthetic construct
PVQAVVKLF

SEQ ID NO: 36374 - protein, 9 aa, synthetic construct
PVQAVVKVF

SEQ ID NO: 36375 - protein, 9 aa, synthetic construct
PVQAVLHVH

SEQ ID NO: 36376 - protein, 9 aa, synthetic construct
PVQAVLRLK

SEQ ID NO: 36377 - protein, 9 aa, synthetic construct
PVQAVLKVY

SEQ ID NO: 36378 - protein, 9 aa, synthetic construct
PVQAVLKVH

SEQ ID NO: 36379 - protein, 9 aa, synthetic construct
PVQAVLKVF

SEQ ID NO: 36380 - protein, 9 aa, synthetic construct
PVQAVARVH

SEQ ID NO: 36381 - protein, 9 aa, synthetic construct
PVQAVARVF

SEQ ID NO: 36382 - protein, 9 aa, synthetic construct
PVQAVIHLY

SEQ ID NO: 36383 - protein, 9 aa, synthetic construct
PVQAVIHLH

SEQ ID NO: 36384 - protein, 9 aa, synthetic construct
PVQAVIHLF

SEQ ID NO: 36385 - protein, 9 aa, synthetic construct
PVQAVIRLK

SEQ ID NO: 36386 - protein, 9 aa, synthetic construct
PVQAVIRVR

SEQ ID NO: 36387 - protein, 9 aa, synthetic construct
PVQAVIRVK

SEQ ID NO: 36388 - protein, 9 aa, synthetic construct
PLQGVGRLR

SEQ ID NO: 36389 - protein, 9 aa, synthetic construct
PVQAVIKLK

SEQ ID NO: 36390 - protein, 9 aa, synthetic construct
PVQAVGKVK

SEQ ID NO: 36391 - protein, 9 aa, synthetic construct
PVQAGVKLR

SEQ ID NO: 36392 - protein, 9 aa, synthetic construct
PVQAGLRVY

SEQ ID NO: 36393 - protein, 9 aa, synthetic construct
PVQAGLRVF

SEQ ID NO: 36394 - protein, 9 aa, synthetic construct
PVQAGLKVH

SEQ ID NO: 36395 - protein, 9 aa, synthetic construct
PVQAGAHLF

SEQ ID NO: 36396 - protein, 9 aa, synthetic construct
PVQAGAHVF

SEQ ID NO: 36397 - protein, 9 aa, synthetic construct
PVQAGIHVF

SEQ ID NO: 36398 - protein, 9 aa, synthetic construct
PVQAGIRVY

SEQ ID NO: 36399 - protein, 9 aa, synthetic construct
PVQAGIKLK

SEQ ID NO: 36400 - protein, 9 aa, synthetic construct
PVQAGGHVY

SEQ ID NO: 36401 - protein, 9 aa, synthetic construct
PVPGALHLF

SEQ ID NO: 36402 - protein, 9 aa, synthetic construct
PVPGALRLH

SEQ ID NO: 36403 - protein, 9 aa, synthetic construct
PVPGALRVH

SEQ ID NO: 36404 - protein, 9 aa, synthetic construct
PVPGAAKLK

SEQ ID NO: 36405 - protein, 9 aa, synthetic construct
PVPGAAKVK

SEQ ID NO: 36406 - protein, 9 aa, synthetic construct
PVPGAIRLK

SEQ ID NO: 36407 - protein, 9 aa, synthetic construct
PVPGAIRVY

SEQ ID NO: 36408 - protein, 9 aa, synthetic construct
PVPGAIKLK

SEQ ID NO: 36409 - protein, 9 aa, synthetic construct
PVPGAIKVR

SEQ ID NO: 36410 - protein, 9 aa, synthetic construct
PVPGAGRVK

SEQ ID NO: 36411 - protein, 9 aa, synthetic construct
PVPGTVRLF

SEQ ID NO: 36412 - protein, 9 aa, synthetic construct
PVPGTVRVR

SEQ ID NO: 36413 - protein, 9 aa, synthetic construct
PVPGTLHLY

SEQ ID NO: 36414 - protein, 9 aa, synthetic construct
PLQGGVKLR

SEQ ID NO: 36415 - protein, 9 aa, synthetic construct
PVPGTAKLK

SEQ ID NO: 36416 - protein, 9 aa, synthetic construct
PVPGTAKVR

SEQ ID NO: 36417 - protein, 9 aa, synthetic construct
PVPGTIRLK

SEQ ID NO: 36418 - protein, 9 aa, synthetic construct
PVPGTIRLF

SEQ ID NO: 36419 - protein, 9 aa, synthetic construct
PVPGTIRVF

SEQ ID NO: 36420 - protein, 9 aa, synthetic construct
PVPGTIKLK

SEQ ID NO: 36421 - protein, 9 aa, synthetic construct
PVPGTIKVR

SEQ ID NO: 36422 - protein, 9 aa, synthetic construct
PVPGTIKVK

SEQ ID NO: 36423 - protein, 9 aa, synthetic construct
PVPGTGRVR

SEQ ID NO: 36424 - protein, 9 aa, synthetic construct
PVPGTGKVK

SEQ ID NO: 36425 - protein, 9 aa, synthetic construct
PVPGSVRLH

SEQ ID NO: 36426 - protein, 9 aa, synthetic construct
PLQGGLHLH

SEQ ID NO: 36427 - protein, 9 aa, synthetic construct
PVPGSVKVR

SEQ ID NO: 36428 - protein, 9 aa, synthetic construct
PVPGSVKVK

SEQ ID NO: 36429 - protein, 9 aa, synthetic construct
PVPGSAKVY

SEQ ID NO: 36430 - protein, 9 aa, synthetic construct
PVPGSIRLY

SEQ ID NO: 36431 - protein, 9 aa, synthetic construct
PVPGSIKVK

SEQ ID NO: 36432 - protein, 9 aa, synthetic construct
PVPGSGHVF

SEQ ID NO: 36433 - protein, 9 aa, synthetic construct
PVPGSGRLH

SEQ ID NO: 36434 - protein, 9 aa, synthetic construct
PVPGSGRVH

SEQ ID NO: 36435 - protein, 9 aa, synthetic construct
PVPGSGKVH

SEQ ID NO: 36436 - protein, 9 aa, synthetic construct
PVPGVVRLY

SEQ ID NO: 36437 - protein, 9 aa, synthetic construct
PVPGVLHVY

SEQ ID NO: 36438 - protein, 9 aa, synthetic construct
PVPGVLHVF

SEQ ID NO: 36439 - protein, 9 aa, synthetic construct
PVPGVIHLF

SEQ ID NO: 36440 - protein, 9 aa, synthetic construct
PVPGVIRVK

SEQ ID NO: 36441 - protein, 9 aa, synthetic construct
PVPGVIKLY

SEQ ID NO: 36442 - protein, 9 aa, synthetic construct
PVPGVIKVF

SEQ ID NO: 36443 - protein, 9 aa, synthetic construct
PVPGGIRLK

SEQ ID NO: 36444 - protein, 9 aa, synthetic construct
PVPGGGRLK

SEQ ID NO: 36445 - protein, 9 aa, synthetic construct
PVPAAVHLY

SEQ ID NO: 36446 - protein, 9 aa, synthetic construct
PVPAAVHLF

SEQ ID NO: 36447 - protein, 9 aa, synthetic construct
PVPAAVRLK

SEQ ID NO: 36448 - protein, 9 aa, synthetic construct
PVPAAVKLK

SEQ ID NO: 36449 - protein, 9 aa, synthetic construct
PVPAAVKVR

SEQ ID NO: 36450 - protein, 9 aa, synthetic construct
PVPAALHLY

SEQ ID NO: 36451 - protein, 9 aa, synthetic construct
PVPAALHLR

SEQ ID NO: 36452 - protein, 9 aa, synthetic construct
PVPAALHLF

SEQ ID NO: 36453 - protein, 9 aa, synthetic construct
PVPAALRVH

SEQ ID NO: 36454 - protein, 9 aa, synthetic construct
PVPAALRVK

SEQ ID NO: 36455 - protein, 9 aa, synthetic construct
PVPAAARLR

SEQ ID NO: 36456 - protein, 9 aa, synthetic construct
PVPAAARLK

SEQ ID NO: 36457 - protein, 9 aa, synthetic construct
PVPAAAKVK

SEQ ID NO: 36458 - protein, 9 aa, synthetic construct
PVPAAIRVR

SEQ ID NO: 36459 - protein, 9 aa, synthetic construct
PVPAAIKLR

SEQ ID NO: 36460 - protein, 9 aa, synthetic construct
PVPAAGRVK

SEQ ID NO: 36461 - protein, 9 aa, synthetic construct
PVPATVRLK

SEQ ID NO: 36462 - protein, 9 aa, synthetic construct
PVPATVRLF

SEQ ID NO: 36463 - protein, 9 aa, synthetic construct
PVPATLHLF

SEQ ID NO: 36464 - protein, 9 aa, synthetic construct
PVPATLHVF

SEQ ID NO: 36465 - protein, 9 aa, synthetic construct
PVPATAKLK

SEQ ID NO: 36466 - protein, 9 aa, synthetic construct
PVPATIHLF

SEQ ID NO: 36467 - protein, 9 aa, synthetic construct
PVPATIKVH

SEQ ID NO: 36468 - protein, 9 aa, synthetic construct
PVPATIKVK

SEQ ID NO: 36469 - protein, 9 aa, synthetic construct
PVPATIKVF

SEQ ID NO: 36470 - protein, 9 aa, synthetic construct
PVPATGRVR

SEQ ID NO: 36471 - protein, 9 aa, synthetic construct
PVPATGKLK

SEQ ID NO: 36472 - protein, 9 aa, synthetic construct
PVPASVHLH

SEQ ID NO: 36473 - protein, 9 aa, synthetic construct
PVPASVRLH

SEQ ID NO: 36474 - protein, 9 aa, synthetic construct
PVPASVRVY

SEQ ID NO: 36475 - protein, 9 aa, synthetic construct
PVPASLHVY

SEQ ID NO: 36476 - protein, 9 aa, synthetic construct
PVPASLHVH

SEQ ID NO: 36477 - protein, 9 aa, synthetic construct
PVPASLHVF

SEQ ID NO: 36478 - protein, 9 aa, synthetic construct
PVPASARLK

SEQ ID NO: 36479 - protein, 9 aa, synthetic construct
PVPASIHLF

SEQ ID NO: 36480 - protein, 9 aa, synthetic construct
PVPASGHVK

SEQ ID NO: 36481 - protein, 9 aa, synthetic construct
PVPASGRLK

SEQ ID NO: 36482 - protein, 9 aa, synthetic construct
PVPASGKVH

SEQ ID NO: 36483 - protein, 9 aa, synthetic construct
PVPAVVHLK

SEQ ID NO: 36484 - protein, 9 aa, synthetic construct
PVPAVVRLH

SEQ ID NO: 36485 - protein, 9 aa, synthetic construct
PVPAVVRLK

SEQ ID NO: 36486 - protein, 9 aa, synthetic construct
PVPAVLRLH

SEQ ID NO: 36487 - protein, 9 aa, synthetic construct
PVPAVLRLK

SEQ ID NO: 36488 - protein, 9 aa, synthetic construct
PVPAVLKVF

SEQ ID NO: 36489 - protein, 9 aa, synthetic construct
PVPAVIHLY

SEQ ID NO: 36490 - protein, 9 aa, synthetic construct
PVPAVIHLK

SEQ ID NO: 36491 - protein, 9 aa, synthetic construct
PVPAVIRLY

SEQ ID NO: 36492 - protein, 9 aa, synthetic construct
PVPAVIRLH

SEQ ID NO: 36493 - protein, 9 aa, synthetic construct
PVPAVIRVK

SEQ ID NO: 36494 - protein, 9 aa, synthetic construct
PLQGGGRLH

SEQ ID NO: 36495 - protein, 9 aa, synthetic construct
PVPAGLHVH

SEQ ID NO: 36496 - protein, 9 aa, synthetic construct
PVPAGLKVH

SEQ ID NO: 36497 - protein, 9 aa, synthetic construct
PVPAGAKVK

SEQ ID NO: 36498 - protein, 9 aa, synthetic construct
PVPAGGKLR

SEQ ID NO: 36499 - protein, 9 aa, synthetic construct
PVPAGGKLK

SEQ ID NO: 36500 - protein, 9 aa, synthetic construct
PINGAVKLR

SEQ ID NO: 36501 - protein, 9 aa, synthetic construct
PINGAVKLK

SEQ ID NO: 36502 - protein, 9 aa, synthetic construct
PINGALRVH

SEQ ID NO: 36503 - protein, 9 aa, synthetic construct
PINGALRVF

SEQ ID NO: 36504 - protein, 9 aa, synthetic construct
PINGAIHLY

SEQ ID NO: 36505 - protein, 9 aa, synthetic construct
PINGAIRLF

SEQ ID NO: 36506 - protein, 9 aa, synthetic construct
PINGAIRVY

SEQ ID NO: 36507 - protein, 9 aa, synthetic construct
PLQAAVRLK

SEQ ID NO: 36508 - protein, 9 aa, synthetic construct
PINGTLHLF

SEQ ID NO: 36509 - protein, 9 aa, synthetic construct
PINGTLRLY

SEQ ID NO: 36510 - protein, 9 aa, synthetic construct
PINGTLRVY

SEQ ID NO: 36511 - protein, 9 aa, synthetic construct
PLQAAVKLK

SEQ ID NO: 36512 - protein, 9 aa, synthetic construct
PINGTIKVH

SEQ ID NO: 36513 - protein, 9 aa, synthetic construct
PINGTGKLK

SEQ ID NO: 36514 - protein, 9 aa, synthetic construct
PINGSVRLF

SEQ ID NO: 36515 - protein, 9 aa, synthetic construct
PINGSVKVK

SEQ ID NO: 36516 - protein, 9 aa, synthetic construct
PLQAALHLF

SEQ ID NO: 36517 - protein, 9 aa, synthetic construct
PINGSLRLY

SEQ ID NO: 36518 - protein, 9 aa, synthetic construct
PINGSLRLH

SEQ ID NO: 36519 - protein, 9 aa, synthetic construct
PINGSLRVY

SEQ ID NO: 36520 - protein, 9 aa, synthetic construct
PINGSLRVH

SEQ ID NO: 36521 - protein, 9 aa, synthetic construct
PLQAALRLY

SEQ ID NO: 36522 - protein, 9 aa, synthetic construct
PINGSIKLK

SEQ ID NO: 36523 - protein, 9 aa, synthetic construct
PLQAALRLH

SEQ ID NO: 36524 - protein, 9 aa, synthetic construct
PINGSGHVR

SEQ ID NO: 36525 - protein, 9 aa, synthetic construct
PINGSGHVH

SEQ ID NO: 36526 - protein, 9 aa, synthetic construct
PINGSGRVY

SEQ ID NO: 36527 - protein, 9 aa, synthetic construct
PINGSGRVH

SEQ ID NO: 36528 - protein, 9 aa, synthetic construct
PINGSGKLR

SEQ ID NO: 36529 - protein, 9 aa, synthetic construct
PINGSGKLK

SEQ ID NO: 36530 - protein, 9 aa, synthetic construct
PINGSGKVH

SEQ ID NO: 36531 - protein, 9 aa, synthetic construct
PINGSGKVK

SEQ ID NO: 36532 - protein, 9 aa, synthetic construct
PINGVVHLF

SEQ ID NO: 36533 - protein, 9 aa, synthetic construct
PINGVVRVK

SEQ ID NO: 36534 - protein, 9 aa, synthetic construct
PLQAALRVH

SEQ ID NO: 36535 - protein, 9 aa, synthetic construct
PINGVLHLR

SEQ ID NO: 36536 - protein, 9 aa, synthetic construct
PINGVLRLH

SEQ ID NO: 36537 - protein, 9 aa, synthetic construct
PINGVLRVY

SEQ ID NO: 36538 - protein, 9 aa, synthetic construct
PLQAALKLY

SEQ ID NO: 36539 - protein, 9 aa, synthetic construct
PLQAALKLR

SEQ ID NO: 36540 - protein, 9 aa, synthetic construct
PINGVARLR

SEQ ID NO: 36541 - protein, 9 aa, synthetic construct
PINGVIHLR

SEQ ID NO: 36542 - protein, 9 aa, synthetic construct
PLQAALKVR

SEQ ID NO: 36543 - protein, 9 aa, synthetic construct
PINGVIKVY

SEQ ID NO: 36544 - protein, 9 aa, synthetic construct
PLQAALKVH

SEQ ID NO: 36545 - protein, 9 aa, synthetic construct
PINGVGHVR

SEQ ID NO: 36546 - protein, 9 aa, synthetic construct
PLQAALKVK

SEQ ID NO: 36547 - protein, 9 aa, synthetic construct
PINGVGKVR

SEQ ID NO: 36548 - protein, 9 aa, synthetic construct
PINGGVKLR

SEQ ID NO: 36549 - protein, 9 aa, synthetic construct
PINGGLRLK

SEQ ID NO: 36550 - protein, 9 aa, synthetic construct
PINGGLKLF

SEQ ID NO: 36551 - protein, 9 aa, synthetic construct
PINGGLKVH

SEQ ID NO: 36552 - protein, 9 aa, synthetic construct
PINGGIRLK

SEQ ID NO: 36553 - protein, 9 aa, synthetic construct
PINGGIKLK

SEQ ID NO: 36554 - protein, 9 aa, synthetic construct
PINGGGHVF

SEQ ID NO: 36555 - protein, 9 aa, synthetic construct
PINGGGRLK

SEQ ID NO: 36556 - protein, 9 aa, synthetic construct
PINAAVHLF

SEQ ID NO: 36557 - protein, 9 aa, synthetic construct
PINAAVRVK

SEQ ID NO: 36558 - protein, 9 aa, synthetic construct
PINAALHVR

SEQ ID NO: 36559 - protein, 9 aa, synthetic construct
PINAALKLY

SEQ ID NO: 36560 - protein, 9 aa, synthetic construct
PINAAIHLY

SEQ ID NO: 36561 - protein, 9 aa, synthetic construct
PLQAAAKVK

SEQ ID NO: 36562 - protein, 9 aa, synthetic construct
PINATVRLF

SEQ ID NO: 36563 - protein, 9 aa, synthetic construct
PINATLHLY

SEQ ID NO: 36564 - protein, 9 aa, synthetic construct
PINATLHLH

SEQ ID NO: 36565 - protein, 9 aa, synthetic construct
PINATLHLF

SEQ ID NO: 36566 - protein, 9 aa, synthetic construct
PINATLHVR

SEQ ID NO: 36567 - protein, 9 aa, synthetic construct
PINATLHVF

SEQ ID NO: 36568 - protein, 9 aa, synthetic construct
PINATLKLH

SEQ ID NO: 36569 - protein, 9 aa, synthetic construct
PINATARLY

SEQ ID NO: 36570 - protein, 9 aa, synthetic construct
PINATIKLR

SEQ ID NO: 36571 - protein, 9 aa, synthetic construct
PLQAAIRVR

SEQ ID NO: 36572 - protein, 9 aa, synthetic construct
PINASVRLY

SEQ ID NO: 36573 - protein, 9 aa, synthetic construct
PINASVRVY

SEQ ID NO: 36574 - protein, 9 aa, synthetic construct
PINASVRVH

SEQ ID NO: 36575 - protein, 9 aa, synthetic construct
PINASVRVK

SEQ ID NO: 36576 - protein, 9 aa, synthetic construct
PINASVKLY

SEQ ID NO: 36577 - protein, 9 aa, synthetic construct
PINASVKLK

SEQ ID NO: 36578 - protein, 9 aa, synthetic construct
PINASVKVR

SEQ ID NO: 36579 - protein, 9 aa, synthetic construct
PINASLHVY

SEQ ID NO: 36580 - protein, 9 aa, synthetic construct
PINASARLK

SEQ ID NO: 36581 - protein, 9 aa, synthetic construct
PINASARVY

SEQ ID NO: 36582 - protein, 9 aa, synthetic construct
PINASARVH

SEQ ID NO: 36583 - protein, 9 aa, synthetic construct
PINASAKVH

SEQ ID NO: 36584 - protein, 9 aa, synthetic construct
PINASIRLH

SEQ ID NO: 36585 - protein, 9 aa, synthetic construct
PINASIKVY

SEQ ID NO: 36586 - protein, 9 aa, synthetic construct
PINASGHVR

SEQ ID NO: 36587 - protein, 9 aa, synthetic construct
PINASGRLK

SEQ ID NO: 36588 - protein, 9 aa, synthetic construct
PINASGRLF

SEQ ID NO: 36589 - protein, 9 aa, synthetic construct
PINASGRVY

SEQ ID NO: 36590 - protein, 9 aa, synthetic construct
PINASGKVK

SEQ ID NO: 36591 - protein, 9 aa, synthetic construct
PINAVVHLR

SEQ ID NO: 36592 - protein, 9 aa, synthetic construct
PINAVVRLK

SEQ ID NO: 36593 - protein, 9 aa, synthetic construct
PINAVVRLF

SEQ ID NO: 36594 - protein, 9 aa, synthetic construct
PINAVVRVK

SEQ ID NO: 36595 - protein, 9 aa, synthetic construct
PINAVVKVY

SEQ ID NO: 36596 - protein, 9 aa, synthetic construct
PINAVLRLY

SEQ ID NO: 36597 - protein, 9 aa, synthetic construct
PINAVLKVF

SEQ ID NO: 36598 - protein, 9 aa, synthetic construct
PINAVAHLY

SEQ ID NO: 36599 - protein, 9 aa, synthetic construct
PINAVAHLF

SEQ ID NO: 36600 - protein, 9 aa, synthetic construct
PINAVAHVY

SEQ ID NO: 36601 - protein, 9 aa, synthetic construct
PINAVIHLK

SEQ ID NO: 36602 - protein, 9 aa, synthetic construct
PINAVIRLF

SEQ ID NO: 36603 - protein, 9 aa, synthetic construct
PINAVIKLY

SEQ ID NO: 36604 - protein, 9 aa, synthetic construct
PINAVIKLK

SEQ ID NO: 36605 - protein, 9 aa, synthetic construct
PINAVIKLF

SEQ ID NO: 36606 - protein, 9 aa, synthetic construct
PINAVIKVF

SEQ ID NO: 36607 - protein, 9 aa, synthetic construct
PINAVGKLH

SEQ ID NO: 36608 - protein, 9 aa, synthetic construct
PINAGLHVH

SEQ ID NO: 36609 - protein, 9 aa, synthetic construct
PINAGLKLF

SEQ ID NO: 36610 - protein, 9 aa, synthetic construct
PINAGIRVF

SEQ ID NO: 36611 - protein, 9 aa, synthetic construct
PINAGGRLR

SEQ ID NO: 36612 - protein, 9 aa, synthetic construct
PINAGGRLH

SEQ ID NO: 36613 - protein, 9 aa, synthetic construct
PINAGGRLK

SEQ ID NO: 36614 - protein, 9 aa, synthetic construct
PINAGGKLK

SEQ ID NO: 36615 - protein, 9 aa, synthetic construct
PIQGAVRLK

SEQ ID NO: 36616 - protein, 9 aa, synthetic construct
PIQGAVKLR

SEQ ID NO: 36617 - protein, 9 aa, synthetic construct
PIQGALRLF

SEQ ID NO: 36618 - protein, 9 aa, synthetic construct
PLQATVHVY

SEQ ID NO: 36619 - protein, 9 aa, synthetic construct
PIQGAAKLK

SEQ ID NO: 36620 - protein, 9 aa, synthetic construct
PIQGAAKVR

SEQ ID NO: 36621 - protein, 9 aa, synthetic construct
PIQGAAKVK

SEQ ID NO: 36622 - protein, 9 aa, synthetic construct
PIQGTVKVR

SEQ ID NO: 36623 - protein, 9 aa, synthetic construct
PIQGTLRVH

SEQ ID NO: 36624 - protein, 9 aa, synthetic construct
PIQGTAKVR

SEQ ID NO: 36625 - protein, 9 aa, synthetic construct
PIQGTIKVK

SEQ ID NO: 36626 - protein, 9 aa, synthetic construct
PLQATLHLR

SEQ ID NO: 36627 - protein, 9 aa, synthetic construct
PIQGSVRLF

SEQ ID NO: 36628 - protein, 9 aa, synthetic construct
PIQGSVKLR

SEQ ID NO: 36629 - protein, 9 aa, synthetic construct
PIQGSVKVR

SEQ ID NO: 36630 - protein, 9 aa, synthetic construct
PIQGSVKVH

SEQ ID NO: 36631 - protein, 9 aa, synthetic construct
PIQGSVKVK

SEQ ID NO: 36632 - protein, 9 aa, synthetic construct
PIQGSLHLY

SEQ ID NO: 36633 - protein, 9 aa, synthetic construct
PIQGSLHLR

SEQ ID NO: 36634 - protein, 9 aa, synthetic construct
PIQGSLHLF

SEQ ID NO: 36635 - protein, 9 aa, synthetic construct
PIQGSLHVY

SEQ ID NO: 36636 - protein, 9 aa, synthetic construct
PLQATLHLF

SEQ ID NO: 36637 - protein, 9 aa, synthetic construct
PLQATLHVY

SEQ ID NO: 36638 - protein, 9 aa, synthetic construct
PIQGSLKLF

SEQ ID NO: 36639 - protein, 9 aa, synthetic construct
PLQATLHVH

SEQ ID NO: 36640 - protein, 9 aa, synthetic construct
PIQGSARLK

SEQ ID NO: 36641 - protein, 9 aa, synthetic construct
PLQATLHVF

SEQ ID NO: 36642 - protein, 9 aa, synthetic construct
PIQGVVRVR

SEQ ID NO: 36643 - protein, 9 aa, synthetic construct
PIQGVLHLY

SEQ ID NO: 36644 - protein, 9 aa, synthetic construct
PLQATLRVF

SEQ ID NO: 36645 - protein, 9 aa, synthetic construct
PIQGVLRLH

SEQ ID NO: 36646 - protein, 9 aa, synthetic construct
PIQGVLRVF

SEQ ID NO: 36647 - protein, 9 aa, synthetic construct
PIQGVARLH

SEQ ID NO: 36648 - protein, 9 aa, synthetic construct
PIQGVARVK

SEQ ID NO: 36649 - protein, 9 aa, synthetic construct
PIQGVGRLR

SEQ ID NO: 36650 - protein, 9 aa, synthetic construct
PIQGVGRLH

SEQ ID NO: 36651 - protein, 9 aa, synthetic construct
PIQGVGRVF

SEQ ID NO: 36652 - protein, 9 aa, synthetic construct
PIQGGVKVR

SEQ ID NO: 36653 - protein, 9 aa, synthetic construct
PIQGGLHLF

SEQ ID NO: 36654 - protein, 9 aa, synthetic construct
PIQGGLKLR

SEQ ID NO: 36655 - protein, 9 aa, synthetic construct
PIQGGIRVK

SEQ ID NO: 36656 - protein, 9 aa, synthetic construct
PIQGGGHVK

SEQ ID NO: 36657 - protein, 9 aa, synthetic construct
PIQAAVRLK

SEQ ID NO: 36658 - protein, 9 aa, synthetic construct
PIQAAVRVK

SEQ ID NO: 36659 - protein, 9 aa, synthetic construct
PIQAAVKLR

SEQ ID NO: 36660 - protein, 9 aa, synthetic construct
PIQAAVKLK

SEQ ID NO: 36661 - protein, 9 aa, synthetic construct
PIQAALHVY

SEQ ID NO: 36662 - protein, 9 aa, synthetic construct
PIQAALHVF

SEQ ID NO: 36663 - protein, 9 aa, synthetic construct
PIQAALRLY

SEQ ID NO: 36664 - protein, 9 aa, synthetic construct
PIQAALRVY

SEQ ID NO: 36665 - protein, 9 aa, synthetic construct
PIQAALRVH

SEQ ID NO: 36666 - protein, 9 aa, synthetic construct
PIQAALKLY

SEQ ID NO: 36667 - protein, 9 aa, synthetic construct
PLQATAKLR

SEQ ID NO: 36668 - protein, 9 aa, synthetic construct
PIQAAARLR

SEQ ID NO: 36669 - protein, 9 aa, synthetic construct
PIQAAAKLR

SEQ ID NO: 36670 - protein, 9 aa, synthetic construct
PIQAAAKVK

SEQ ID NO: 36671 - protein, 9 aa, synthetic construct
PIQAAIKVK

SEQ ID NO: 36672 - protein, 9 aa, synthetic construct
PIQAAGKLR

SEQ ID NO: 36673 - protein, 9 aa, synthetic construct
PIQATLHVY

SEQ ID NO: 36674 - protein, 9 aa, synthetic construct
PLQATIHLF

SEQ ID NO: 36675 - protein, 9 aa, synthetic construct
PIQATLRVR

SEQ ID NO: 36676 - protein, 9 aa, synthetic construct
PIQATLRVF

SEQ ID NO: 36677 - protein, 9 aa, synthetic construct
PIQATAKLR

SEQ ID NO: 36678 - protein, 9 aa, synthetic construct
PLQATIHVF

SEQ ID NO: 36679 - protein, 9 aa, synthetic construct
PIQATIKLF

SEQ ID NO: 36680 - protein, 9 aa, synthetic construct
PIQATIKVR

SEQ ID NO: 36681 - protein, 9 aa, synthetic construct
PIQATIKVF

SEQ ID NO: 36682 - protein, 9 aa, synthetic construct
PIQATGRVK

SEQ ID NO: 36683 - protein, 9 aa, synthetic construct
PIQASVRLH

SEQ ID NO: 36684 - protein, 9 aa, synthetic construct
PIQASVKLR

SEQ ID NO: 36685 - protein, 9 aa, synthetic construct
PIQASLHLY

SEQ ID NO: 36686 - protein, 9 aa, synthetic construct
PIQASLKLF

SEQ ID NO: 36687 - protein, 9 aa, synthetic construct
PIQASLKVY

SEQ ID NO: 36688 - protein, 9 aa, synthetic construct
PIQASAHLR

SEQ ID NO: 36689 - protein, 9 aa, synthetic construct
PIQASAHLK

SEQ ID NO: 36690 - protein, 9 aa, synthetic construct
PIQASARLK

SEQ ID NO: 36691 - protein, 9 aa, synthetic construct
PIQASAKLH

SEQ ID NO: 36692 - protein, 9 aa, synthetic construct
PIQASIKVH

SEQ ID NO: 36693 - protein, 9 aa, synthetic construct
PIQAVVRLR

SEQ ID NO: 36694 - protein, 9 aa, synthetic construct
PIQAVVKLY

SEQ ID NO: 36695 - protein, 9 aa, synthetic construct
PIQAVLHVY

SEQ ID NO: 36696 - protein, 9 aa, synthetic construct
PIQAVLRLY

SEQ ID NO: 36697 - protein, 9 aa, synthetic construct
PIQAVLKVF

SEQ ID NO: 36698 - protein, 9 aa, synthetic construct
PIQAVIHLK

SEQ ID NO: 36699 - protein, 9 aa, synthetic construct
PIQAVIKLK

SEQ ID NO: 36700 - protein, 9 aa, synthetic construct
PIQAVIKLF

SEQ ID NO: 36701 - protein, 9 aa, synthetic construct
PLQATGRLF

SEQ ID NO: 36702 - protein, 9 aa, synthetic construct
PIQAVGKLY

SEQ ID NO: 36703 - protein, 9 aa, synthetic construct
PIQAVGKVK

SEQ ID NO: 36704 - protein, 9 aa, synthetic construct
PIQAGVHLK

SEQ ID NO: 36705 - protein, 9 aa, synthetic construct
PIQAGVRLK

SEQ ID NO: 36706 - protein, 9 aa, synthetic construct
PIQAGVKLR

SEQ ID NO: 36707 - protein, 9 aa, synthetic construct
PLQATGRVK

SEQ ID NO: 36708 - protein, 9 aa, synthetic construct
PIQAGLRVY

SEQ ID NO: 36709 - protein, 9 aa, synthetic construct
PIQAGLKVH

SEQ ID NO: 36710 - protein, 9 aa, synthetic construct
PIQAGARLY

SEQ ID NO: 36711 - protein, 9 aa, synthetic construct
PIQAGARLK

SEQ ID NO: 36712 - protein, 9 aa, synthetic construct
PIQAGARVH

SEQ ID NO: 36713 - protein, 9 aa, synthetic construct
PIQAGARVF

SEQ ID NO: 36714 - protein, 9 aa, synthetic construct
PIQAGAKLH

SEQ ID NO: 36715 - protein, 9 aa, synthetic construct
PIQAGAKVK

SEQ ID NO: 36716 - protein, 9 aa, synthetic construct
PIPGALHLY

SEQ ID NO: 36717 - protein, 9 aa, synthetic construct
PIPGALHLR

SEQ ID NO: 36718 - protein, 9 aa, synthetic construct
PIPGALHLF

SEQ ID NO: 36719 - protein, 9 aa, synthetic construct
PIPGALRVH

SEQ ID NO: 36720 - protein, 9 aa, synthetic construct
PIPGALRVF

SEQ ID NO: 36721 - protein, 9 aa, synthetic construct
PIPGAARLR

SEQ ID NO: 36722 - protein, 9 aa, synthetic construct
PIPGAAKLK

SEQ ID NO: 36723 - protein, 9 aa, synthetic construct
PIPGAAKVK

SEQ ID NO: 36724 - protein, 9 aa, synthetic construct
PIPGAIHLY

SEQ ID NO: 36725 - protein, 9 aa, synthetic construct
PIPGAIKVR

SEQ ID NO: 36726 - protein, 9 aa, synthetic construct
PIPGAIKVK

SEQ ID NO: 36727 - protein, 9 aa, synthetic construct
PIPGAGKVK

SEQ ID NO: 36728 - protein, 9 aa, synthetic construct
PIPGTVRLF

SEQ ID NO: 36729 - protein, 9 aa, synthetic construct
PIPGTVKVK

SEQ ID NO: 36730 - protein, 9 aa, synthetic construct
PLQASVKLR

SEQ ID NO: 36731 - protein, 9 aa, synthetic construct
PIPGTARLK

SEQ ID NO: 36732 - protein, 9 aa, synthetic construct
PIPGTAKVK

SEQ ID NO: 36733 - protein, 9 aa, synthetic construct
PIPGTIKVY

SEQ ID NO: 36734 - protein, 9 aa, synthetic construct
PIPGTIKVR

SEQ ID NO: 36735 - protein, 9 aa, synthetic construct
PIPGTIKVH

SEQ ID NO: 36736 - protein, 9 aa, synthetic construct
PIPGSVRVF

SEQ ID NO: 36737 - protein, 9 aa, synthetic construct
PIPGSVKVR

SEQ ID NO: 36738 - protein, 9 aa, synthetic construct
PIPGSVKVK

SEQ ID NO: 36739 - protein, 9 aa, synthetic construct
PLQASLHLK

SEQ ID NO: 36740 - protein, 9 aa, synthetic construct
PLQASLHVY

SEQ ID NO: 36741 - protein, 9 aa, synthetic construct
PIPGSIHLH

SEQ ID NO: 36742 - protein, 9 aa, synthetic construct
PIPGSIHLF

SEQ ID NO: 36743 - protein, 9 aa, synthetic construct
PIPGSGRLH

SEQ ID NO: 36744 - protein, 9 aa, synthetic construct
PIPGSGRVY

SEQ ID NO: 36745 - protein, 9 aa, synthetic construct
PIPGSGRVH

SEQ ID NO: 36746 - protein, 9 aa, synthetic construct
PIPGSGRVF

SEQ ID NO: 36747 - protein, 9 aa, synthetic construct
PIPGSGKVK

SEQ ID NO: 36748 - protein, 9 aa, synthetic construct
PIPGVVRLY

SEQ ID NO: 36749 - protein, 9 aa, synthetic construct
PIPGVVRVY

SEQ ID NO: 36750 - protein, 9 aa, synthetic construct
PIPGVVKLY

SEQ ID NO: 36751 - protein, 9 aa, synthetic construct
PIPGVLHVY

SEQ ID NO: 36752 - protein, 9 aa, synthetic construct
PIPGVLRLH

SEQ ID NO: 36753 - protein, 9 aa, synthetic construct
PIPGVLKLR

SEQ ID NO: 36754 - protein, 9 aa, synthetic construct
PIPGVLKLK

SEQ ID NO: 36755 - protein, 9 aa, synthetic construct
PIPGVARLR

SEQ ID NO: 36756 - protein, 9 aa, synthetic construct
PIPGVARLK

SEQ ID NO: 36757 - protein, 9 aa, synthetic construct
PIPGVAKLR

SEQ ID NO: 36758 - protein, 9 aa, synthetic construct
PIPGVAKVK

SEQ ID NO: 36759 - protein, 9 aa, synthetic construct
PLQASLKLF

SEQ ID NO: 36760 - protein, 9 aa, synthetic construct
PIPGVIRLH

SEQ ID NO: 36761 - protein, 9 aa, synthetic construct
PIPGVIRLF

SEQ ID NO: 36762 - protein, 9 aa, synthetic construct
PIPGVIKLR

SEQ ID NO: 36763 - protein, 9 aa, synthetic construct
PIPGVIKVR

SEQ ID NO: 36764 - protein, 9 aa, synthetic construct
PIPGVIKVK

SEQ ID NO: 36765 - protein, 9 aa, synthetic construct
PLQASLKVK

SEQ ID NO: 36766 - protein, 9 aa, synthetic construct
PIPGVGRLR

SEQ ID NO: 36767 - protein, 9 aa, synthetic construct
PLQASAHLR

SEQ ID NO: 36768 - protein, 9 aa, synthetic construct
PLQASAHLK

SEQ ID NO: 36769 - protein, 9 aa, synthetic construct
PIPGGLRLH

SEQ ID NO: 36770 - protein, 9 aa, synthetic construct
PIPGGLRVH

SEQ ID NO: 36771 - protein, 9 aa, synthetic construct
PIPGGLRVF

SEQ ID NO: 36772 - protein, 9 aa, synthetic construct
PLQASAHVH

SEQ ID NO: 36773 - protein, 9 aa, synthetic construct
PIPGGIRLK

SEQ ID NO: 36774 - protein, 9 aa, synthetic construct
PIPGGGRLK

SEQ ID NO: 36775 - protein, 9 aa, synthetic construct
PIPAAVKLK

SEQ ID NO: 36776 - protein, 9 aa, synthetic construct
PLQASARVF

SEQ ID NO: 36777 - protein, 9 aa, synthetic construct
PIPAALRLF

SEQ ID NO: 36778 - protein, 9 aa, synthetic construct
PIPAAARLR

SEQ ID NO: 36779 - protein, 9 aa, synthetic construct
PIPAAIRVR

SEQ ID NO: 36780 - protein, 9 aa, synthetic construct
PIPAAIRVF

SEQ ID NO: 36781 - protein, 9 aa, synthetic construct
PIPAAGKLR

SEQ ID NO: 36782 - protein, 9 aa, synthetic construct
PIPAAGKLK

SEQ ID NO: 36783 - protein, 9 aa, synthetic construct
PIPAAGKVK

SEQ ID NO: 36784 - protein, 9 aa, synthetic construct
PIPATVRLF

SEQ ID NO: 36785 - protein, 9 aa, synthetic construct
PIPATVRVK

SEQ ID NO: 36786 - protein, 9 aa, synthetic construct
PIPATLHLF

SEQ ID NO: 36787 - protein, 9 aa, synthetic construct
PIPATLHVF

SEQ ID NO: 36788 - protein, 9 aa, synthetic construct
PIPATLKVY

SEQ ID NO: 36789 - protein, 9 aa, synthetic construct
PIPATARLH

SEQ ID NO: 36790 - protein, 9 aa, synthetic construct
PIPATAKLR

SEQ ID NO: 36791 - protein, 9 aa, synthetic construct
PIPATAKVK

SEQ ID NO: 36792 - protein, 9 aa, synthetic construct
PIPATIKVK

SEQ ID NO: 36793 - protein, 9 aa, synthetic construct
PIPATGRVH

SEQ ID NO: 36794 - protein, 9 aa, synthetic construct
PIPATGRVK

SEQ ID NO: 36795 - protein, 9 aa, synthetic construct
PIPATGKLK

SEQ ID NO: 36796 - protein, 9 aa, synthetic construct
PIPATGKVK

SEQ ID NO: 36797 - protein, 9 aa, synthetic construct
PIPASVRVY

SEQ ID NO: 36798 - protein, 9 aa, synthetic construct
PIPASVRVH

SEQ ID NO: 36799 - protein, 9 aa, synthetic construct
PIPASVKVR

SEQ ID NO: 36800 - protein, 9 aa, synthetic construct
PIPASVKVK

SEQ ID NO: 36801 - protein, 9 aa, synthetic construct
PIPASIHLR

SEQ ID NO: 36802 - protein, 9 aa, synthetic construct
PIPASIHLH

SEQ ID NO: 36803 - protein, 9 aa, synthetic construct
PIPASIHLF

SEQ ID NO: 36804 - protein, 9 aa, synthetic construct
PIPASIRVH

SEQ ID NO: 36805 - protein, 9 aa, synthetic construct
PIPASIKVF

SEQ ID NO: 36806 - protein, 9 aa, synthetic construct
PLQASIKVH

SEQ ID NO: 36807 - protein, 9 aa, synthetic construct
PIPASGHLF

SEQ ID NO: 36808 - protein, 9 aa, synthetic construct
PIPASGHVY

SEQ ID NO: 36809 - protein, 9 aa, synthetic construct
PIPASGHVF

SEQ ID NO: 36810 - protein, 9 aa, synthetic construct
PIPASGKVH

SEQ ID NO: 36811 - protein, 9 aa, synthetic construct
PIPASGKVK

SEQ ID NO: 36812 - protein, 9 aa, synthetic construct
PIPAVLRLH

SEQ ID NO: 36813 - protein, 9 aa, synthetic construct
PIPAVAHLF

SEQ ID NO: 36814 - protein, 9 aa, synthetic construct
PIPAVARVY

SEQ ID NO: 36815 - protein, 9 aa, synthetic construct
PIPAVARVH

SEQ ID NO: 36816 - protein, 9 aa, synthetic construct
PIPAVAKLY

SEQ ID NO: 36817 - protein, 9 aa, synthetic construct
PIPAVAKVY

SEQ ID NO: 36818 - protein, 9 aa, synthetic construct
PIPAVAKVH

SEQ ID NO: 36819 - protein, 9 aa, synthetic construct
PIPAVIHLK

SEQ ID NO: 36820 - protein, 9 aa, synthetic construct
PIPAVIRLH

SEQ ID NO: 36821 - protein, 9 aa, synthetic construct
PLQASGRLR

SEQ ID NO: 36822 - protein, 9 aa, synthetic construct
PIPAVIKLY

SEQ ID NO: 36823 - protein, 9 aa, synthetic construct
PIPAGVKVR

SEQ ID NO: 36824 - protein, 9 aa, synthetic construct
PIPAGLKVH

SEQ ID NO: 36825 - protein, 9 aa, synthetic construct
PLQASGKLR

SEQ ID NO: 36826 - protein, 9 aa, synthetic construct
PIPAGARLH

SEQ ID NO: 36827 - protein, 9 aa, synthetic construct
PIPAGAKVK

SEQ ID NO: 36828 - protein, 9 aa, synthetic construct
PIPAGIHLY

SEQ ID NO: 36829 - protein, 9 aa, synthetic construct
PLQASGKVK

SEQ ID NO: 36830 - protein, 9 aa, synthetic construct
PIPAGGRLH

SEQ ID NO: 36831 - protein, 9 aa, synthetic construct
GLNGAVHLK

SEQ ID NO: 36832 - protein, 9 aa, synthetic construct
GLNGAVKLK

SEQ ID NO: 36833 - protein, 9 aa, synthetic construct
GLNGALRLH

SEQ ID NO: 36834 - protein, 9 aa, synthetic construct
GLNGALRVH

SEQ ID NO: 36835 - protein, 9 aa, synthetic construct
GLNGALKLR

SEQ ID NO: 36836 - protein, 9 aa, synthetic construct
GLNGAIHLY

SEQ ID NO: 36837 - protein, 9 aa, synthetic construct
GLNGAIHVH

SEQ ID NO: 36838 - protein, 9 aa, synthetic construct
PLQAVVRLY

SEQ ID NO: 36839 - protein, 9 aa, synthetic construct
GLNGAIRLH

SEQ ID NO: 36840 - protein, 9 aa, synthetic construct
GLNGAIRVY

SEQ ID NO: 36841 - protein, 9 aa, synthetic construct
GLNGAIKVR

SEQ ID NO: 36842 - protein, 9 aa, synthetic construct
GLNGAGHLR

SEQ ID NO: 36843 - protein, 9 aa, synthetic construct
GLNGTVKLK

SEQ ID NO: 36844 - protein, 9 aa, synthetic construct
GLNGTVKVH

SEQ ID NO: 36845 - protein, 9 aa, synthetic construct
GLNGTVKVK

SEQ ID NO: 36846 - protein, 9 aa, synthetic construct
GLNGTLHLY

SEQ ID NO: 36847 - protein, 9 aa, synthetic construct
GLNGTLHLF

SEQ ID NO: 36848 - protein, 9 aa, synthetic construct
GLNGTLRLY

SEQ ID NO: 36849 - protein, 9 aa, synthetic construct
GLNGTLRVY

SEQ ID NO: 36850 - protein, 9 aa, synthetic construct
GLNGTLRVH

SEQ ID NO: 36851 - protein, 9 aa, synthetic construct
GLNGTLKLR

SEQ ID NO: 36852 - protein, 9 aa, synthetic construct
GLNGTLKVY

SEQ ID NO: 36853 - protein, 9 aa, synthetic construct
GLNGTLKVH

SEQ ID NO: 36854 - protein, 9 aa, synthetic construct
GLNGTARLH

SEQ ID NO: 36855 - protein, 9 aa, synthetic construct
GLNGTIHLF

SEQ ID NO: 36856 - protein, 9 aa, synthetic construct
GLNGTIRLY

SEQ ID NO: 36857 - protein, 9 aa, synthetic construct
GLNGTIKVR

SEQ ID NO: 36858 - protein, 9 aa, synthetic construct
GLNGTGRLR

SEQ ID NO: 36859 - protein, 9 aa, synthetic construct
GLNGTGRLK

SEQ ID NO: 36860 - protein, 9 aa, synthetic construct
PLQAVVKVF

SEQ ID NO: 36861 - protein, 9 aa, synthetic construct
GLNGTGKVH

SEQ ID NO: 36862 - protein, 9 aa, synthetic construct
GLNGSLKVR

SEQ ID NO: 36863 - protein, 9 aa, synthetic construct
PLQAVLHVH

SEQ ID NO: 36864 - protein, 9 aa, synthetic construct
GLNGSIHVF

SEQ ID NO: 36865 - protein, 9 aa, synthetic construct
GLNGSGKLR

SEQ ID NO: 36866 - protein, 9 aa, synthetic construct
GLNGVVHLK

SEQ ID NO: 36867 - protein, 9 aa, synthetic construct
GLNGVVRLK

SEQ ID NO: 36868 - protein, 9 aa, synthetic construct
GLNGVVRVF

SEQ ID NO: 36869 - protein, 9 aa, synthetic construct
GLNGVVKLR

SEQ ID NO: 36870 - protein, 9 aa, synthetic construct
GLNGVVKVH

SEQ ID NO: 36871 - protein, 9 aa, synthetic construct
GLNGVLKLR

SEQ ID NO: 36872 - protein, 9 aa, synthetic construct
GLNGVLKVY

SEQ ID NO: 36873 - protein, 9 aa, synthetic construct
GLNGVLKVF

SEQ ID NO: 36874 - protein, 9 aa, synthetic construct
GLNGVAHLF

SEQ ID NO: 36875 - protein, 9 aa, synthetic construct
GLNGVAKVF

SEQ ID NO: 36876 - protein, 9 aa, synthetic construct
PLQAVLKLF

SEQ ID NO: 36877 - protein, 9 aa, synthetic construct
PLQAVLKVY

SEQ ID NO: 36878 - protein, 9 aa, synthetic construct
GLNGVIKLH

SEQ ID NO: 36879 - protein, 9 aa, synthetic construct
PLQAVLKVH

SEQ ID NO: 36880 - protein, 9 aa, synthetic construct
GLNGVGHLK

SEQ ID NO: 36881 - protein, 9 aa, synthetic construct
PLQAVLKVF

SEQ ID NO: 36882 - protein, 9 aa, synthetic construct
PLQAVAHLY

SEQ ID NO: 36883 - protein, 9 aa, synthetic construct
GLNGGVKLR

SEQ ID NO: 36884 - protein, 9 aa, synthetic construct
GLNGGVKLH

SEQ ID NO: 36885 - protein, 9 aa, synthetic construct
GLNGGVKLK

SEQ ID NO: 36886 - protein, 9 aa, synthetic construct
GLNGGLHLK

SEQ ID NO: 36887 - protein, 9 aa, synthetic construct
GLNGGLHLF

SEQ ID NO: 36888 - protein, 9 aa, synthetic construct
GLNGGLHVF

SEQ ID NO: 36889 - protein, 9 aa, synthetic construct
PLQAVAHLF

SEQ ID NO: 36890 - protein, 9 aa, synthetic construct
GLNGGAHVH

SEQ ID NO: 36891 - protein, 9 aa, synthetic construct
GLNGGIRLK

SEQ ID NO: 36892 - protein, 9 aa, synthetic construct
GLNGGIKLY

SEQ ID NO: 36893 - protein, 9 aa, synthetic construct
GLNGGIKLR

SEQ ID NO: 36894 - protein, 9 aa, synthetic construct
GLNGGIKLK

SEQ ID NO: 36895 - protein, 9 aa, synthetic construct
GLNGGIKVH

SEQ ID NO: 36896 - protein, 9 aa, synthetic construct
GLNGGGRLK

SEQ ID NO: 36897 - protein, 9 aa, synthetic construct
PLQAVARVY

SEQ ID NO: 36898 - protein, 9 aa, synthetic construct
GLNAAVHVH

SEQ ID NO: 36899 - protein, 9 aa, synthetic construct
GLNAAVRVY

SEQ ID NO: 36900 - protein, 9 aa, synthetic construct
GLNAAVRVH

SEQ ID NO: 36901 - protein, 9 aa, synthetic construct
GLNAAVKLR

SEQ ID NO: 36902 - protein, 9 aa, synthetic construct
GLNAAVKLK

SEQ ID NO: 36903 - protein, 9 aa, synthetic construct
GLNAAVKVY

SEQ ID NO: 36904 - protein, 9 aa, synthetic construct
GLNAAVKVR

SEQ ID NO: 36905 - protein, 9 aa, synthetic construct
GLNAALHVH

SEQ ID NO: 36906 - protein, 9 aa, synthetic construct
GLNAALRVH

SEQ ID NO: 36907 - protein, 9 aa, synthetic construct
GLNAALRVF

SEQ ID NO: 36908 - protein, 9 aa, synthetic construct
GLNAAAHVY

SEQ ID NO: 36909 - protein, 9 aa, synthetic construct
GLNAAAHVR

SEQ ID NO: 36910 - protein, 9 aa, synthetic construct
GLNAAAHVH

SEQ ID NO: 36911 - protein, 9 aa, synthetic construct
GLNAAAKVY

SEQ ID NO: 36912 - protein, 9 aa, synthetic construct
GLNAAAKVK

SEQ ID NO: 36913 - protein, 9 aa, synthetic construct
GLNAAIHLR

SEQ ID NO: 36914 - protein, 9 aa, synthetic construct
GLNAAIHLF

SEQ ID NO: 36915 - protein, 9 aa, synthetic construct
GLNAAIHVK

SEQ ID NO: 36916 - protein, 9 aa, synthetic construct
GLNAAIKVK

SEQ ID NO: 36917 - protein, 9 aa, synthetic construct
GLNAAGHLR

SEQ ID NO: 36918 - protein, 9 aa, synthetic construct
GLNAAGRVY

SEQ ID NO: 36919 - protein, 9 aa, synthetic construct
GLNAAGKVK

SEQ ID NO: 36920 - protein, 9 aa, synthetic construct
GLNATVKLY

SEQ ID NO: 36921 - protein, 9 aa, synthetic construct
GLNATARLY

SEQ ID NO: 36922 - protein, 9 aa, synthetic construct
GLNATARLH

SEQ ID NO: 36923 - protein, 9 aa, synthetic construct
PLQAVIRLK

SEQ ID NO: 36924 - protein, 9 aa, synthetic construct
GLNASVRVK

SEQ ID NO: 36925 - protein, 9 aa, synthetic construct
GLNASVKLY

SEQ ID NO: 36926 - protein, 9 aa, synthetic construct
GLNASVKLF

SEQ ID NO: 36927 - protein, 9 aa, synthetic construct
GLNASVKVH

SEQ ID NO: 36928 - protein, 9 aa, synthetic construct
PLQAVIRVK

SEQ ID NO: 36929 - protein, 9 aa, synthetic construct
PLNGTGRLR

SEQ ID NO: 36930 - protein, 9 aa, synthetic construct
GLNASLKLR

SEQ ID NO: 36931 - protein, 9 aa, synthetic construct
GLNASARLH

SEQ ID NO: 36932 - protein, 9 aa, synthetic construct
GLNASARVF

SEQ ID NO: 36933 - protein, 9 aa, synthetic construct
GLNASAKVH

SEQ ID NO: 36934 - protein, 9 aa, synthetic construct
GLNASIRVF

SEQ ID NO: 36935 - protein, 9 aa, synthetic construct
PLQAVIKVR

SEQ ID NO: 36936 - protein, 9 aa, synthetic construct
GLNASIKVY

SEQ ID NO: 36937 - protein, 9 aa, synthetic construct
GLNASGRLF

SEQ ID NO: 36938 - protein, 9 aa, synthetic construct
GLNASGKVH

SEQ ID NO: 36939 - protein, 9 aa, synthetic construct
GLNAVVHLR

SEQ ID NO: 36940 - protein, 9 aa, synthetic construct
GLNAVVHVY

SEQ ID NO: 36941 - protein, 9 aa, synthetic construct
GLNAVVHVK

SEQ ID NO: 36942 - protein, 9 aa, synthetic construct
GLNAVVRLK

SEQ ID NO: 36943 - protein, 9 aa, synthetic construct
GLNAVVKLH

SEQ ID NO: 36944 - protein, 9 aa, synthetic construct
GLNAVLKVF

SEQ ID NO: 36945 - protein, 9 aa, synthetic construct
GLNAVIKLK

SEQ ID NO: 36946 - protein, 9 aa, synthetic construct
GLNAVGRLY

SEQ ID NO: 36947 - protein, 9 aa, synthetic construct
GLNAVGKLH

SEQ ID NO: 36948 - protein, 9 aa, synthetic construct
GLNAVGKVH

SEQ ID NO: 36949 - protein, 9 aa, synthetic construct
GLNAGLHVH

SEQ ID NO: 36950 - protein, 9 aa, synthetic construct
GLNAGLRVF

SEQ ID NO: 36951 - protein, 9 aa, synthetic construct
GLNAGLKLH

SEQ ID NO: 36952 - protein, 9 aa, synthetic construct
GLNAGLKLF

SEQ ID NO: 36953 - protein, 9 aa, synthetic construct
GLNAGLKVY

SEQ ID NO: 36954 - protein, 9 aa, synthetic construct
GLNAGLKVH

SEQ ID NO: 36955 - protein, 9 aa, synthetic construct
GLNAGAHVY

SEQ ID NO: 36956 - protein, 9 aa, synthetic construct
GLNAGAHVR

SEQ ID NO: 36957 - protein, 9 aa, synthetic construct
GLNAGAHVH

SEQ ID NO: 36958 - protein, 9 aa, synthetic construct
GLNAGIRVF

SEQ ID NO: 36959 - protein, 9 aa, synthetic construct
GLNAGIKVR

SEQ ID NO: 36960 - protein, 9 aa, synthetic construct
GLQGALHLF

SEQ ID NO: 36961 - protein, 9 aa, synthetic construct
GLQGALRLH

SEQ ID NO: 36962 - protein, 9 aa, synthetic construct
GLQGAAKLK

SEQ ID NO: 36963 - protein, 9 aa, synthetic construct
PLQAGVRLR

SEQ ID NO: 36964 - protein, 9 aa, synthetic construct
GLQGAIKLF

SEQ ID NO: 36965 - protein, 9 aa, synthetic construct
GLQGTVRVY

SEQ ID NO: 36966 - protein, 9 aa, synthetic construct
GLQGTVRVH

SEQ ID NO: 36967 - protein, 9 aa, synthetic construct
GLQGTVKVR

SEQ ID NO: 36968 - protein, 9 aa, synthetic construct
PLQAGVKLR

SEQ ID NO: 36969 - protein, 9 aa, synthetic construct
GLQGTARLY

SEQ ID NO: 36970 - protein, 9 aa, synthetic construct
PLQAGVKLK

SEQ ID NO: 36971 - protein, 9 aa, synthetic construct
GLQGTAKLK

SEQ ID NO: 36972 - protein, 9 aa, synthetic construct
PLQAGVKVR

SEQ ID NO: 36973 - protein, 9 aa, synthetic construct
GLQGSVKVR

SEQ ID NO: 36974 - protein, 9 aa, synthetic construct
GLQGSLHVH

SEQ ID NO: 36975 - protein, 9 aa, synthetic construct
GLQGSLRLY

SEQ ID NO: 36976 - protein, 9 aa, synthetic construct
GLQGSLKLY

SEQ ID NO: 36977 - protein, 9 aa, synthetic construct
PLQAGLHVH

SEQ ID NO: 36978 - protein, 9 aa, synthetic construct
PLQAGLHVF

SEQ ID NO: 36979 - protein, 9 aa, synthetic construct
GLQGSIHLF

SEQ ID NO: 36980 - protein, 9 aa, synthetic construct
GLQGSIHVR

SEQ ID NO: 36981 - protein, 9 aa, synthetic construct
GLQGSIHVF

SEQ ID NO: 36982 - protein, 9 aa, synthetic construct
GLQGSIKLY

SEQ ID NO: 36983 - protein, 9 aa, synthetic construct
GLQGVVRLH

SEQ ID NO: 36984 - protein, 9 aa, synthetic construct
PLQAGLKLH

SEQ ID NO: 36985 - protein, 9 aa, synthetic construct
GLQGVAKLF

SEQ ID NO: 36986 - protein, 9 aa, synthetic construct
GLQGVAKVK

SEQ ID NO: 36987 - protein, 9 aa, synthetic construct
GLQGVIHVY

SEQ ID NO: 36988 - protein, 9 aa, synthetic construct
PLQAGLKVY

SEQ ID NO: 36989 - protein, 9 aa, synthetic construct
PLQAGLKVH

SEQ ID NO: 36990 - protein, 9 aa, synthetic construct
GLQGGAHLR

SEQ ID NO: 36991 - protein, 9 aa, synthetic construct
GLQGGAHLF

SEQ ID NO: 36992 - protein, 9 aa, synthetic construct
GLQGGIHVF

SEQ ID NO: 36993 - protein, 9 aa, synthetic construct
GLQGGGHLH

SEQ ID NO: 36994 - protein, 9 aa, synthetic construct
PLQAGARLK

SEQ ID NO: 36995 - protein, 9 aa, synthetic construct
GLQGGGRVH

SEQ ID NO: 36996 - protein, 9 aa, synthetic construct
GLQAAVKLR

SEQ ID NO: 36997 - protein, 9 aa, synthetic construct
GLQAAVKVY

SEQ ID NO: 36998 - protein, 9 aa, synthetic construct
GLQAALHLH

SEQ ID NO: 36999 - protein, 9 aa, synthetic construct
GLQAALKVH

SEQ ID NO: 37000 - protein, 9 aa, synthetic construct
GLQAALKVF

SEQ ID NO: 37001 - protein, 9 aa, synthetic construct
GLQAAAHVR

SEQ ID NO: 37002 - protein, 9 aa, synthetic construct
GLQAAARLY

SEQ ID NO: 37003 - protein, 9 aa, synthetic construct
GLQAAAKVK

SEQ ID NO: 37004 - protein, 9 aa, synthetic construct
GLQAAIRVR

SEQ ID NO: 37005 - protein, 9 aa, synthetic construct
GLQAAIKLY

SEQ ID NO: 37006 - protein, 9 aa, synthetic construct
GLQAAGHLR

SEQ ID NO: 37007 - protein, 9 aa, synthetic construct
GLQATAHVR

SEQ ID NO: 37008 - protein, 9 aa, synthetic construct
PLQAGIHVF

SEQ ID NO: 37009 - protein, 9 aa, synthetic construct
GLQATGRLF

SEQ ID NO: 37010 - protein, 9 aa, synthetic construct
PLQAGIRVF

SEQ ID NO: 37011 - protein, 9 aa, synthetic construct
GLQASAHVH

SEQ ID NO: 37012 - protein, 9 aa, synthetic construct
GLQASAKLH

SEQ ID NO: 37013 - protein, 9 aa, synthetic construct
GLQASIHVF

SEQ ID NO: 37014 - protein, 9 aa, synthetic construct
GLQASIRVR

SEQ ID NO: 37015 - protein, 9 aa, synthetic construct
PLQAGIKVR

SEQ ID NO: 37016 - protein, 9 aa, synthetic construct
GLQASGRLY

SEQ ID NO: 37017 - protein, 9 aa, synthetic construct
GLQASGRVH

SEQ ID NO: 37018 - protein, 9 aa, synthetic construct
GLQASGKVF

SEQ ID NO: 37019 - protein, 9 aa, synthetic construct
GLQAVVHLR

SEQ ID NO: 37020 - protein, 9 aa, synthetic construct
GLQAVVHVR

SEQ ID NO: 37021 - protein, 9 aa, synthetic construct
GLQAVVRLY

SEQ ID NO: 37022 - protein, 9 aa, synthetic construct
GLQAVVRVF

SEQ ID NO: 37023 - protein, 9 aa, synthetic construct
GLQAVVKLY

SEQ ID NO: 37024 - protein, 9 aa, synthetic construct
GLQAVVKVY

SEQ ID NO: 37025 - protein, 9 aa, synthetic construct
GLQAVLHVK

SEQ ID NO: 37026 - protein, 9 aa, synthetic construct
GLQAVLRVH

SEQ ID NO: 37027 - protein, 9 aa, synthetic construct
GLQAVLKVF

SEQ ID NO: 37028 - protein, 9 aa, synthetic construct
GLQAVAHLH

SEQ ID NO: 37029 - protein, 9 aa, synthetic construct
GLQAVAKLY

SEQ ID NO: 37030 - protein, 9 aa, synthetic construct
GLQAVAKLH

SEQ ID NO: 37031 - protein, 9 aa, synthetic construct
GLQAVAKLF

SEQ ID NO: 37032 - protein, 9 aa, synthetic construct
GLQAVAKVF

SEQ ID NO: 37033 - protein, 9 aa, synthetic construct
GLQAVIHLK

SEQ ID NO: 37034 - protein, 9 aa, synthetic construct
GLQAVIHVH

SEQ ID NO: 37035 - protein, 9 aa, synthetic construct
GLQAVIRLK

SEQ ID NO: 37036 - protein, 9 aa, synthetic construct
GLQAVIRLF

SEQ ID NO: 37037 - protein, 9 aa, synthetic construct
GLQAVIRVK

SEQ ID NO: 37038 - protein, 9 aa, synthetic construct
GLQAVIRVF

SEQ ID NO: 37039 - protein, 9 aa, synthetic construct
PLQAGGRLR

SEQ ID NO: 37040 - protein, 9 aa, synthetic construct
GLQAVGHVH

SEQ ID NO: 37041 - protein, 9 aa, synthetic construct
GLQAVGRLY

SEQ ID NO: 37042 - protein, 9 aa, synthetic construct
GLQAVGRLH

SEQ ID NO: 37043 - protein, 9 aa, synthetic construct
GLQAVGKLR

SEQ ID NO: 37044 - protein, 9 aa, synthetic construct
GLQAVGKVY

SEQ ID NO: 37045 - protein, 9 aa, synthetic construct
GLQAVGKVK

SEQ ID NO: 37046 - protein, 9 aa, synthetic construct
GLQAVGKVF

SEQ ID NO: 37047 - protein, 9 aa, synthetic construct
GLQAGVKLR

SEQ ID NO: 37048 - protein, 9 aa, synthetic construct
GLQAGAHLK

SEQ ID NO: 37049 - protein, 9 aa, synthetic construct
GLQAGAHVY

SEQ ID NO: 37050 - protein, 9 aa, synthetic construct
GLQAGARVH

SEQ ID NO: 37051 - protein, 9 aa, synthetic construct
PLQAGGKLK

SEQ ID NO: 37052 - protein, 9 aa, synthetic construct
GLQAGAKLF

SEQ ID NO: 37053 - protein, 9 aa, synthetic construct
GLQAGIHVR

SEQ ID NO: 37054 - protein, 9 aa, synthetic construct
GLQAGIKVH

SEQ ID NO: 37055 - protein, 9 aa, synthetic construct
GLQAGGKVF

SEQ ID NO: 37056 - protein, 9 aa, synthetic construct
GLPGAVHLK

SEQ ID NO: 37057 - protein, 9 aa, synthetic construct
GLPGTVHLF

SEQ ID NO: 37058 - protein, 9 aa, synthetic construct
GLPGTVKVK

SEQ ID NO: 37059 - protein, 9 aa, synthetic construct
PLPGAVRVF

SEQ ID NO: 37060 - protein, 9 aa, synthetic construct
GLPGTLKLF

SEQ ID NO: 37061 - protein, 9 aa, synthetic construct
GLPGTARLH

SEQ ID NO: 37062 - protein, 9 aa, synthetic construct
GLPGTAKLK

SEQ ID NO: 37063 - protein, 9 aa, synthetic construct
GLPGTAKVH

SEQ ID NO: 37064 - protein, 9 aa, synthetic construct
PLPGAVKVK

SEQ ID NO: 37065 - protein, 9 aa, synthetic construct
GLPGSVRVF

SEQ ID NO: 37066 - protein, 9 aa, synthetic construct
PLPGALHLF

SEQ ID NO: 37067 - protein, 9 aa, synthetic construct
GLPGSLRLF

SEQ ID NO: 37068 - protein, 9 aa, synthetic construct
PLPGALHVY

SEQ ID NO: 37069 - protein, 9 aa, synthetic construct
PLPGALHVR

SEQ ID NO: 37070 - protein, 9 aa, synthetic construct
GLPGSAKLY

SEQ ID NO: 37071 - protein, 9 aa, synthetic construct
GLPGSIKVY

SEQ ID NO: 37072 - protein, 9 aa, synthetic construct
GLPGVVHVR

SEQ ID NO: 37073 - protein, 9 aa, synthetic construct
GLPGVVRLY

SEQ ID NO: 37074 - protein, 9 aa, synthetic construct
GLPGVVRLR

SEQ ID NO: 37075 - protein, 9 aa, synthetic construct
GLPGVVRVH

SEQ ID NO: 37076 - protein, 9 aa, synthetic construct
GLPGVVKLY

SEQ ID NO: 37077 - protein, 9 aa, synthetic construct
GLPGVVKVH

SEQ ID NO: 37078 - protein, 9 aa, synthetic construct
GLPGVVKVF

SEQ ID NO: 37079 - protein, 9 aa, synthetic construct
GLPGVLHVY

SEQ ID NO: 37080 - protein, 9 aa, synthetic construct
GLPGVLHVK

SEQ ID NO: 37081 - protein, 9 aa, synthetic construct
GLPGVLKLR

SEQ ID NO: 37082 - protein, 9 aa, synthetic construct
GLPGVLKVY

SEQ ID NO: 37083 - protein, 9 aa, synthetic construct
GLPGVAKVH

SEQ ID NO: 37084 - protein, 9 aa, synthetic construct
GLPGVIKLH

SEQ ID NO: 37085 - protein, 9 aa, synthetic construct
GLPGVIKVF

SEQ ID NO: 37086 - protein, 9 aa, synthetic construct
GLPGVGHLY

SEQ ID NO: 37087 - protein, 9 aa, synthetic construct
GLPGVGHVR

SEQ ID NO: 37088 - protein, 9 aa, synthetic construct
GLPGVGRVY

SEQ ID NO: 37089 - protein, 9 aa, synthetic construct
GLPGGVRLY

SEQ ID NO: 37090 - protein, 9 aa, synthetic construct
GLPGGLKVH

SEQ ID NO: 37091 - protein, 9 aa, synthetic construct
GLPGGAHLR

SEQ ID NO: 37092 - protein, 9 aa, synthetic construct
GLPGGIHLF

SEQ ID NO: 37093 - protein, 9 aa, synthetic construct
GLPGGIRLY

SEQ ID NO: 37094 - protein, 9 aa, synthetic construct
GLPGGIRLR

SEQ ID NO: 37095 - protein, 9 aa, synthetic construct
GLPGGIRLH

SEQ ID NO: 37096 - protein, 9 aa, synthetic construct
GLPGGIRLK

SEQ ID NO: 37097 - protein, 9 aa, synthetic construct
GLPGGIKVY

SEQ ID NO: 37098 - protein, 9 aa, synthetic construct
GLPGGGHLH

SEQ ID NO: 37099 - protein, 9 aa, synthetic construct
GLPGGGRVH

SEQ ID NO: 37100 - protein, 9 aa, synthetic construct
GLPAAVHLR

SEQ ID NO: 37101 - protein, 9 aa, synthetic construct
GLPAAVHVH

SEQ ID NO: 37102 - protein, 9 aa, synthetic construct
GLPAAVHVF

SEQ ID NO: 37103 - protein, 9 aa, synthetic construct
GLPAAVKLK

SEQ ID NO: 37104 - protein, 9 aa, synthetic construct
GLPAALHLH

SEQ ID NO: 37105 - protein, 9 aa, synthetic construct
GLPAALHVH

SEQ ID NO: 37106 - protein, 9 aa, synthetic construct
GLPAALRLH

SEQ ID NO: 37107 - protein, 9 aa, synthetic construct
GLPAALRVH

SEQ ID NO: 37108 - protein, 9 aa, synthetic construct
GLPAALRVF

SEQ ID NO: 37109 - protein, 9 aa, synthetic construct
GLPAALKVH

SEQ ID NO: 37110 - protein, 9 aa, synthetic construct
GLPAALKVF

SEQ ID NO: 37111 - protein, 9 aa, synthetic construct
GLPAAARLY

SEQ ID NO: 37112 - protein, 9 aa, synthetic construct
GLPAAARLR

SEQ ID NO: 37113 - protein, 9 aa, synthetic construct
GLPAAARLK

SEQ ID NO: 37114 - protein, 9 aa, synthetic construct
PLPGAAKLK

SEQ ID NO: 37115 - protein, 9 aa, synthetic construct
GLPAAAKVH

SEQ ID NO: 37116 - protein, 9 aa, synthetic construct
GLPAAAKVK

SEQ ID NO: 37117 - protein, 9 aa, synthetic construct
GLPAAIHLR

SEQ ID NO: 37118 - protein, 9 aa, synthetic construct
GLPAAIRLK

SEQ ID NO: 37119 - protein, 9 aa, synthetic construct
GLPAAIRVY

SEQ ID NO: 37120 - protein, 9 aa, synthetic construct
GLPAAIRVR

SEQ ID NO: 37121 - protein, 9 aa, synthetic construct
GLPAAIRVH

SEQ ID NO: 37122 - protein, 9 aa, synthetic construct
GLPAAIKLY

SEQ ID NO: 37123 - protein, 9 aa, synthetic construct
GLPAAIKLK

SEQ ID NO: 37124 - protein, 9 aa, synthetic construct
GLPAAIKLF

SEQ ID NO: 37125 - protein, 9 aa, synthetic construct
GLPAAIKVR

SEQ ID NO: 37126 - protein, 9 aa, synthetic construct
GLPAAIKVF

SEQ ID NO: 37127 - protein, 9 aa, synthetic construct
GLPAAGHVR

SEQ ID NO: 37128 - protein, 9 aa, synthetic construct
PLPGAAKVK

SEQ ID NO: 37129 - protein, 9 aa, synthetic construct
GLPATVHVH

SEQ ID NO: 37130 - protein, 9 aa, synthetic construct
GLPATVRLK

SEQ ID NO: 37131 - protein, 9 aa, synthetic construct
GLPATLHLF

SEQ ID NO: 37132 - protein, 9 aa, synthetic construct
GLPATLHVF

SEQ ID NO: 37133 - protein, 9 aa, synthetic construct
GLPATAKLR

SEQ ID NO: 37134 - protein, 9 aa, synthetic construct
GLPATAKVK

SEQ ID NO: 37135 - protein, 9 aa, synthetic construct
GLPATIKVK

SEQ ID NO: 37136 - protein, 9 aa, synthetic construct
GLPATGRVR

SEQ ID NO: 37137 - protein, 9 aa, synthetic construct
GLPASLKVF

SEQ ID NO: 37138 - protein, 9 aa, synthetic construct
GLPASARLH

SEQ ID NO: 37139 - protein, 9 aa, synthetic construct
GLPASARLK

SEQ ID NO: 37140 - protein, 9 aa, synthetic construct
PLPGAIKLK

SEQ ID NO: 37141 - protein, 9 aa, synthetic construct
GLPASAKVH

SEQ ID NO: 37142 - protein, 9 aa, synthetic construct
GLPASAKVK

SEQ ID NO: 37143 - protein, 9 aa, synthetic construct
GLPASIHLF

SEQ ID NO: 37144 - protein, 9 aa, synthetic construct
GLPASIKLY

SEQ ID NO: 37145 - protein, 9 aa, synthetic construct
GLPASIKLK

SEQ ID NO: 37146 - protein, 9 aa, synthetic construct
GLPASIKVH

SEQ ID NO: 37147 - protein, 9 aa, synthetic construct
GLPASGRLH

SEQ ID NO: 37148 - protein, 9 aa, synthetic construct
GLPASGRVY

SEQ ID NO: 37149 - protein, 9 aa, synthetic construct
GLPASGRVH

SEQ ID NO: 37150 - protein, 9 aa, synthetic construct
GLPASGKVK

SEQ ID NO: 37151 - protein, 9 aa, synthetic construct
GLPAVVRLY

SEQ ID NO: 37152 - protein, 9 aa, synthetic construct
GLPAVVRLH

SEQ ID NO: 37153 - protein, 9 aa, synthetic construct
GLPAVVKLY

SEQ ID NO: 37154 - protein, 9 aa, synthetic construct
GLPAVVKLF

SEQ ID NO: 37155 - protein, 9 aa, synthetic construct
GLPAVVKVY

SEQ ID NO: 37156 - protein, 9 aa, synthetic construct
GLPAVLHVK

SEQ ID NO: 37157 - protein, 9 aa, synthetic construct
GLPAVLRLH

SEQ ID NO: 37158 - protein, 9 aa, synthetic construct
GLPAVAHLY

SEQ ID NO: 37159 - protein, 9 aa, synthetic construct
GLPAVIHLY

SEQ ID NO: 37160 - protein, 9 aa, synthetic construct
GLPAVIHVY

SEQ ID NO: 37161 - protein, 9 aa, synthetic construct
GLPAVIKLY

SEQ ID NO: 37162 - protein, 9 aa, synthetic construct
GLPAGVHLF

SEQ ID NO: 37163 - protein, 9 aa, synthetic construct
GLPAGVHVK

SEQ ID NO: 37164 - protein, 9 aa, synthetic construct
GLPAGVKLH

SEQ ID NO: 37165 - protein, 9 aa, synthetic construct
GLPAGVKVH

SEQ ID NO: 37166 - protein, 9 aa, synthetic construct
GLPAGLKVY

SEQ ID NO: 37167 - protein, 9 aa, synthetic construct
GLPAGLKVH

SEQ ID NO: 37168 - protein, 9 aa, synthetic construct
GLPAGLKVF

SEQ ID NO: 37169 - protein, 9 aa, synthetic construct
GLPAGAHLK

SEQ ID NO: 37170 - protein, 9 aa, synthetic construct
GLPAGIHLY

SEQ ID NO: 37171 - protein, 9 aa, synthetic construct
GLPAGIHLR

SEQ ID NO: 37172 - protein, 9 aa, synthetic construct
GLPAGIHLH

SEQ ID NO: 37173 - protein, 9 aa, synthetic construct
GLPAGIHLF

SEQ ID NO: 37174 - protein, 9 aa, synthetic construct
GLPAGIRVF

SEQ ID NO: 37175 - protein, 9 aa, synthetic construct
GLPAGIKLH

SEQ ID NO: 37176 - protein, 9 aa, synthetic construct
GLPAGIKLF

SEQ ID NO: 37177 - protein, 9 aa, synthetic construct
GLPAGGHLY

SEQ ID NO: 37178 - protein, 9 aa, synthetic construct
GLPAGGHLF

SEQ ID NO: 37179 - protein, 9 aa, synthetic construct
GLPAGGRLH

SEQ ID NO: 37180 - protein, 9 aa, synthetic construct
GLPAGGRVH

SEQ ID NO: 37181 - protein, 9 aa, synthetic construct
GLPAGGKVH

SEQ ID NO: 37182 - protein, 9 aa, synthetic construct
GTNGAVKLR

SEQ ID NO: 37183 - protein, 9 aa, synthetic construct
GTNGALHLF

SEQ ID NO: 37184 - protein, 9 aa, synthetic construct
GTNGALRLH

SEQ ID NO: 37185 - protein, 9 aa, synthetic construct
GTNGALKVH

SEQ ID NO: 37186 - protein, 9 aa, synthetic construct
GTNGAAKVK

SEQ ID NO: 37187 - protein, 9 aa, synthetic construct
GTNGAIHLY

SEQ ID NO: 37188 - protein, 9 aa, synthetic construct
GTNGAIHLF

SEQ ID NO: 37189 - protein, 9 aa, synthetic construct
GTNGAIHVY

SEQ ID NO: 37190 - protein, 9 aa, synthetic construct
GTNGAIRLH

SEQ ID NO: 37191 - protein, 9 aa, synthetic construct
GTNGAIKLY

SEQ ID NO: 37192 - protein, 9 aa, synthetic construct
PLPGTVRVK

SEQ ID NO: 37193 - protein, 9 aa, synthetic construct
GTNGTLRVY

SEQ ID NO: 37194 - protein, 9 aa, synthetic construct
GTNGTLRVH

SEQ ID NO: 37195 - protein, 9 aa, synthetic construct
GTNGTIHLF

SEQ ID NO: 37196 - protein, 9 aa, synthetic construct
PLPGTVKVR

SEQ ID NO: 37197 - protein, 9 aa, synthetic construct
PLPGTVKVK

SEQ ID NO: 37198 - protein, 9 aa, synthetic construct
GTNGTGRVR

SEQ ID NO: 37199 - protein, 9 aa, synthetic construct
GTNGSVRLF

SEQ ID NO: 37200 - protein, 9 aa, synthetic construct
GTNGSVKVR

SEQ ID NO: 37201 - protein, 9 aa, synthetic construct
GTNGSVKVK

SEQ ID NO: 37202 - protein, 9 aa, synthetic construct
GTNGSLHLR

SEQ ID NO: 37203 - protein, 9 aa, synthetic construct
GTNGSLHVH

SEQ ID NO: 37204 - protein, 9 aa, synthetic construct
GTNGSLRVH

SEQ ID NO: 37205 - protein, 9 aa, synthetic construct
GTNGSLKVH

SEQ ID NO: 37206 - protein, 9 aa, synthetic construct
GTNGSARLF

SEQ ID NO: 37207 - protein, 9 aa, synthetic construct
GTNGSIKLK

SEQ ID NO: 37208 - protein, 9 aa, synthetic construct
GTNGVVHLR

SEQ ID NO: 37209 - protein, 9 aa, synthetic construct
GTNGVVHVK

SEQ ID NO: 37210 - protein, 9 aa, synthetic construct
GTNGVVRVK

SEQ ID NO: 37211 - protein, 9 aa, synthetic construct
GTNGVVKVH

SEQ ID NO: 37212 - protein, 9 aa, synthetic construct
GTNGVVKVF

SEQ ID NO: 37213 - protein, 9 aa, synthetic construct
GTNGVLHVY

SEQ ID NO: 37214 - protein, 9 aa, synthetic construct
GTNGVLHVH

SEQ ID NO: 37215 - protein, 9 aa, synthetic construct
PLPGTLKLY

SEQ ID NO: 37216 - protein, 9 aa, synthetic construct
GTNGVAHLF

SEQ ID NO: 37217 - protein, 9 aa, synthetic construct
GTNGVIHVR

SEQ ID NO: 37218 - protein, 9 aa, synthetic construct
GTNGVIRLF

SEQ ID NO: 37219 - protein, 9 aa, synthetic construct
GTNGVIKLF

SEQ ID NO: 37220 - protein, 9 aa, synthetic construct
GTNGVGRLH

SEQ ID NO: 37221 - protein, 9 aa, synthetic construct
GTNGGVHLH

SEQ ID NO: 37222 - protein, 9 aa, synthetic construct
GTNGGVRLF

SEQ ID NO: 37223 - protein, 9 aa, synthetic construct
GTNGGVKLR

SEQ ID NO: 37224 - protein, 9 aa, synthetic construct
GTNGGVKLK

SEQ ID NO: 37225 - protein, 9 aa, synthetic construct
GTNGGVKVK

SEQ ID NO: 37226 - protein, 9 aa, synthetic construct
GTNGGLHLH

SEQ ID NO: 37227 - protein, 9 aa, synthetic construct
GTNGGLHLK

SEQ ID NO: 37228 - protein, 9 aa, synthetic construct
GTNGGLHLF

SEQ ID NO: 37229 - protein, 9 aa, synthetic construct
GTNGGLHVY

SEQ ID NO: 37230 - protein, 9 aa, synthetic construct
GTNGGLHVF

SEQ ID NO: 37231 - protein, 9 aa, synthetic construct
GTNGGLRLH

SEQ ID NO: 37232 - protein, 9 aa, synthetic construct
GTNGGLRLK

SEQ ID NO: 37233 - protein, 9 aa, synthetic construct
GTNGGLRVH

SEQ ID NO: 37234 - protein, 9 aa, synthetic construct
GTNGGLKLR

SEQ ID NO: 37235 - protein, 9 aa, synthetic construct
GTNGGLKLH

SEQ ID NO: 37236 - protein, 9 aa, synthetic construct
GTNGGLKVY

SEQ ID NO: 37237 - protein, 9 aa, synthetic construct
GTNGGIHVF

SEQ ID NO: 37238 - protein, 9 aa, synthetic construct
GTNGGIRLK

SEQ ID NO: 37239 - protein, 9 aa, synthetic construct
GTNGGIKVH

SEQ ID NO: 37240 - protein, 9 aa, synthetic construct
GTNGGGRLK

SEQ ID NO: 37241 - protein, 9 aa, synthetic construct
GTNAAVHLR

SEQ ID NO: 37242 - protein, 9 aa, synthetic construct
GTNAAVRVH

SEQ ID NO: 37243 - protein, 9 aa, synthetic construct
GTNAAVRVK

SEQ ID NO: 37244 - protein, 9 aa, synthetic construct
GTNAAVKLY

SEQ ID NO: 37245 - protein, 9 aa, synthetic construct
GTNAAVKLR

SEQ ID NO: 37246 - protein, 9 aa, synthetic construct
GTNAALHLF

SEQ ID NO: 37247 - protein, 9 aa, synthetic construct
GTNAALHVK

SEQ ID NO: 37248 - protein, 9 aa, synthetic construct
GTNAALRVF

SEQ ID NO: 37249 - protein, 9 aa, synthetic construct
GTNAALKLH

SEQ ID NO: 37250 - protein, 9 aa, synthetic construct
GTNAALKVH

SEQ ID NO: 37251 - protein, 9 aa, synthetic construct
PLPGTAKLK

SEQ ID NO: 37252 - protein, 9 aa, synthetic construct
GTNAAAKVK

SEQ ID NO: 37253 - protein, 9 aa, synthetic construct
GTNATVRLF

SEQ ID NO: 37254 - protein, 9 aa, synthetic construct
GTNATLHLR

SEQ ID NO: 37255 - protein, 9 aa, synthetic construct
GTNATLHLF

SEQ ID NO: 37256 - protein, 9 aa, synthetic construct
GTNATLHVY

SEQ ID NO: 37257 - protein, 9 aa, synthetic construct
GTNATLHVR

SEQ ID NO: 37258 - protein, 9 aa, synthetic construct
GTNATLHVH

SEQ ID NO: 37259 - protein, 9 aa, synthetic construct
GTNATLHVF

SEQ ID NO: 37260 - protein, 9 aa, synthetic construct
GTNATIHLF

SEQ ID NO: 37261 - protein, 9 aa, synthetic construct
GTNATIHVR

SEQ ID NO: 37262 - protein, 9 aa, synthetic construct
GTNATIRLR

SEQ ID NO: 37263 - protein, 9 aa, synthetic construct
GTNATIKVH

SEQ ID NO: 37264 - protein, 9 aa, synthetic construct
GTNATIKVK

SEQ ID NO: 37265 - protein, 9 aa, synthetic construct
GTNASVHLH

SEQ ID NO: 37266 - protein, 9 aa, synthetic construct
GTNASVHLF

SEQ ID NO: 37267 - protein, 9 aa, synthetic construct
GTNASVHVY

SEQ ID NO: 37268 - protein, 9 aa, synthetic construct
GTNASVHVH

SEQ ID NO: 37269 - protein, 9 aa, synthetic construct
GTNASVRLY

SEQ ID NO: 37270 - protein, 9 aa, synthetic construct
GTNASVRVH

SEQ ID NO: 37271 - protein, 9 aa, synthetic construct
GTNASVKLY

SEQ ID NO: 37272 - protein, 9 aa, synthetic construct
GTNASLHLH

SEQ ID NO: 37273 - protein, 9 aa, synthetic construct
GTNASLHLK

SEQ ID NO: 37274 - protein, 9 aa, synthetic construct
GTNASLHVH

SEQ ID NO: 37275 - protein, 9 aa, synthetic construct
GTNASARLK

SEQ ID NO: 37276 - protein, 9 aa, synthetic construct
GTNASARVY

SEQ ID NO: 37277 - protein, 9 aa, synthetic construct
GTNASAKLY

SEQ ID NO: 37278 - protein, 9 aa, synthetic construct
GTNASAKLH

SEQ ID NO: 37279 - protein, 9 aa, synthetic construct
GTNASAKLF

SEQ ID NO: 37280 - protein, 9 aa, synthetic construct
GTNASAKVH

SEQ ID NO: 37281 - protein, 9 aa, synthetic construct
GTNASIHLR

SEQ ID NO: 37282 - protein, 9 aa, synthetic construct
PLPGTIKVR

SEQ ID NO: 37283 - protein, 9 aa, synthetic construct
GTNASGHLF

SEQ ID NO: 37284 - protein, 9 aa, synthetic construct
GTNASGHVH

SEQ ID NO: 37285 - protein, 9 aa, synthetic construct
GTNASGHVK

SEQ ID NO: 37286 - protein, 9 aa, synthetic construct
PLPGTIKVK

SEQ ID NO: 37287 - protein, 9 aa, synthetic construct
GTNASGRLH

SEQ ID NO: 37288 - protein, 9 aa, synthetic construct
GTNAVVRVH

SEQ ID NO: 37289 - protein, 9 aa, synthetic construct
GTNAVAHLK

SEQ ID NO: 37290 - protein, 9 aa, synthetic construct
GTNAVIKLK

SEQ ID NO: 37291 - protein, 9 aa, synthetic construct
GTNAVIKVF

SEQ ID NO: 37292 - protein, 9 aa, synthetic construct
GTNAVGRLY

SEQ ID NO: 37293 - protein, 9 aa, synthetic construct
GTNAVGRLF

SEQ ID NO: 37294 - protein, 9 aa, synthetic construct
GTNAVGKLH

SEQ ID NO: 37295 - protein, 9 aa, synthetic construct
GTNAVGKVF

SEQ ID NO: 37296 - protein, 9 aa, synthetic construct
GTNAGLKLF

SEQ ID NO: 37297 - protein, 9 aa, synthetic construct
GTQGALHLR

SEQ ID NO: 37298 - protein, 9 aa, synthetic construct
GTQGALHLF

SEQ ID NO: 37299 - protein, 9 aa, synthetic construct
GTQGALRVY

SEQ ID NO: 37300 - protein, 9 aa, synthetic construct
GTQGALKLF

SEQ ID NO: 37301 - protein, 9 aa, synthetic construct
GTQGAARLK

SEQ ID NO: 37302 - protein, 9 aa, synthetic construct
GTQGAAKLR

SEQ ID NO: 37303 - protein, 9 aa, synthetic construct
GTQGAAKLK

SEQ ID NO: 37304 - protein, 9 aa, synthetic construct
GTQGAAKVH

SEQ ID NO: 37305 - protein, 9 aa, synthetic construct
GTQGAAKVK

SEQ ID NO: 37306 - protein, 9 aa, synthetic construct
PLPGSVRLF

SEQ ID NO: 37307 - protein, 9 aa, synthetic construct
GTQGTVRVH

SEQ ID NO: 37308 - protein, 9 aa, synthetic construct
GTQGTLHLR

SEQ ID NO: 37309 - protein, 9 aa, synthetic construct
GTQGTLHLK

SEQ ID NO: 37310 - protein, 9 aa, synthetic construct
PLPGSVRVF

SEQ ID NO: 37311 - protein, 9 aa, synthetic construct
GTQGTLKVH

SEQ ID NO: 37312 - protein, 9 aa, synthetic construct
GTQGTAHVR

SEQ ID NO: 37313 - protein, 9 aa, synthetic construct
GTQGTARLY

SEQ ID NO: 37314 - protein, 9 aa, synthetic construct
GTQGTARLH

SEQ ID NO: 37315 - protein, 9 aa, synthetic construct
GTQGTAKLK

SEQ ID NO: 37316 - protein, 9 aa, synthetic construct
GTQGTIRLF

SEQ ID NO: 37317 - protein, 9 aa, synthetic construct
GTQGTIRVH

SEQ ID NO: 37318 - protein, 9 aa, synthetic construct
GTQGTGRLH

SEQ ID NO: 37319 - protein, 9 aa, synthetic construct
GTQGSVRLF

SEQ ID NO: 37320 - protein, 9 aa, synthetic construct
GTQGSLHLY

SEQ ID NO: 37321 - protein, 9 aa, synthetic construct
GTQGSLHLR

SEQ ID NO: 37322 - protein, 9 aa, synthetic construct
GTQGSLHLK

SEQ ID NO: 37323 - protein, 9 aa, synthetic construct
GTQGSLHLF

SEQ ID NO: 37324 - protein, 9 aa, synthetic construct
GTQGSLHVY

SEQ ID NO: 37325 - protein, 9 aa, synthetic construct
GTQGSLHVR

SEQ ID NO: 37326 - protein, 9 aa, synthetic construct
GTQGSLKLF

SEQ ID NO: 37327 - protein, 9 aa, synthetic construct
GTQGSAHLR

SEQ ID NO: 37328 - protein, 9 aa, synthetic construct
GTQGSAHLK

SEQ ID NO: 37329 - protein, 9 aa, synthetic construct
GTQGSARLK

SEQ ID NO: 37330 - protein, 9 aa, synthetic construct
GTQGSAKVH

SEQ ID NO: 37331 - protein, 9 aa, synthetic construct
GTQGSGHVF

SEQ ID NO: 37332 - protein, 9 aa, synthetic construct
GTQGSGRLY

SEQ ID NO: 37333 - protein, 9 aa, synthetic construct
GTQGSGRLH

SEQ ID NO: 37334 - protein, 9 aa, synthetic construct
GTQGSGRLK

SEQ ID NO: 37335 - protein, 9 aa, synthetic construct
GTQGSGKLY

SEQ ID NO: 37336 - protein, 9 aa, synthetic construct
GTQGSGKLH

SEQ ID NO: 37337 - protein, 9 aa, synthetic construct
GTQGSGKVY

SEQ ID NO: 37338 - protein, 9 aa, synthetic construct
GTQGSGKVF

SEQ ID NO: 37339 - protein, 9 aa, synthetic construct
GTQGVLRLH

SEQ ID NO: 37340 - protein, 9 aa, synthetic construct
GTQGVLRVF

SEQ ID NO: 37341 - protein, 9 aa, synthetic construct
GTQGVAHVR

SEQ ID NO: 37342 - protein, 9 aa, synthetic construct
GTQGVARLY

SEQ ID NO: 37343 - protein, 9 aa, synthetic construct
GTQGVARVF

SEQ ID NO: 37344 - protein, 9 aa, synthetic construct
GTQGVIKLY

SEQ ID NO: 37345 - protein, 9 aa, synthetic construct
GTQGVIKLK

SEQ ID NO: 37346 - protein, 9 aa, synthetic construct
GTQGVGRLR

SEQ ID NO: 37347 - protein, 9 aa, synthetic construct
GTQGGVHLY

SEQ ID NO: 37348 - protein, 9 aa, synthetic construct
GTQGGVHLH

SEQ ID NO: 37349 - protein, 9 aa, synthetic construct
GTQGGVRLY

SEQ ID NO: 37350 - protein, 9 aa, synthetic construct
GTQGGVRLF

SEQ ID NO: 37351 - protein, 9 aa, synthetic construct
GTQGGVKLR

SEQ ID NO: 37352 - protein, 9 aa, synthetic construct
GTQGGVKLH

SEQ ID NO: 37353 - protein, 9 aa, synthetic construct
GTQGGVKLK

SEQ ID NO: 37354 - protein, 9 aa, synthetic construct
GTQGGVKVR

SEQ ID NO: 37355 - protein, 9 aa, synthetic construct
GTQGGVKVK

SEQ ID NO: 37356 - protein, 9 aa, synthetic construct
GTQGGLHLY

SEQ ID NO: 37357 - protein, 9 aa, synthetic construct
GTQGGLHLK

SEQ ID NO: 37358 - protein, 9 aa, synthetic construct
GTQGGLHLF

SEQ ID NO: 37359 - protein, 9 aa, synthetic construct
GTQGGLHVK

SEQ ID NO: 37360 - protein, 9 aa, synthetic construct
GTQGGLKLY

SEQ ID NO: 37361 - protein, 9 aa, synthetic construct
GTQGGLKLH

SEQ ID NO: 37362 - protein, 9 aa, synthetic construct
GTQGGARLY

SEQ ID NO: 37363 - protein, 9 aa, synthetic construct
GTQGGARLK

SEQ ID NO: 37364 - protein, 9 aa, synthetic construct
GTQGGAKLK

SEQ ID NO: 37365 - protein, 9 aa, synthetic construct
GTQGGIRVH

SEQ ID NO: 37366 - protein, 9 aa, synthetic construct
GTQGGIRVK

SEQ ID NO: 37367 - protein, 9 aa, synthetic construct
GTQGGIKVF

SEQ ID NO: 37368 - protein, 9 aa, synthetic construct
GTQGGGRLK

SEQ ID NO: 37369 - protein, 9 aa, synthetic construct
GTQAAVKLR

SEQ ID NO: 37370 - protein, 9 aa, synthetic construct
GTQAALHLK

SEQ ID NO: 37371 - protein, 9 aa, synthetic construct
GTQAALHVY

SEQ ID NO: 37372 - protein, 9 aa, synthetic construct
GTQAALHVH

SEQ ID NO: 37373 - protein, 9 aa, synthetic construct
GTQAALKLH

SEQ ID NO: 37374 - protein, 9 aa, synthetic construct
GTQAALKVH

SEQ ID NO: 37375 - protein, 9 aa, synthetic construct
GTQAAAHVR

SEQ ID NO: 37376 - protein, 9 aa, synthetic construct
GTQAAARLY

SEQ ID NO: 37377 - protein, 9 aa, synthetic construct
GTQAAAKVK

SEQ ID NO: 37378 - protein, 9 aa, synthetic construct
GTQAAIHVR

SEQ ID NO: 37379 - protein, 9 aa, synthetic construct
GTQATVHLK

SEQ ID NO: 37380 - protein, 9 aa, synthetic construct
GTQATVHVH

SEQ ID NO: 37381 - protein, 9 aa, synthetic construct
GTQATVHVK

SEQ ID NO: 37382 - protein, 9 aa, synthetic construct
GTQATVRLY

SEQ ID NO: 37383 - protein, 9 aa, synthetic construct
GTQATVRLF

SEQ ID NO: 37384 - protein, 9 aa, synthetic construct
GTQATVRVY

SEQ ID NO: 37385 - protein, 9 aa, synthetic construct
GTQATVRVF

SEQ ID NO: 37386 - protein, 9 aa, synthetic construct
GTQATVKLR

SEQ ID NO: 37387 - protein, 9 aa, synthetic construct
GTQATLHVF

SEQ ID NO: 37388 - protein, 9 aa, synthetic construct
GTQATLRVF

SEQ ID NO: 37389 - protein, 9 aa, synthetic construct
GTQATLKLY

SEQ ID NO: 37390 - protein, 9 aa, synthetic construct
GTQATLKLH

SEQ ID NO: 37391 - protein, 9 aa, synthetic construct
GTQATAHVY

SEQ ID NO: 37392 - protein, 9 aa, synthetic construct
GTQATAHVF

SEQ ID NO: 37393 - protein, 9 aa, synthetic construct
GTQATARVY

SEQ ID NO: 37394 - protein, 9 aa, synthetic construct
GTQATAKLR

SEQ ID NO: 37395 - protein, 9 aa, synthetic construct
GTQATIHVF

SEQ ID NO: 37396 - protein, 9 aa, synthetic construct
PLNGALHLF

SEQ ID NO: 37397 - protein, 9 aa, synthetic construct
GTQATIRLF

SEQ ID NO: 37398 - protein, 9 aa, synthetic construct
GTQATIKVY

SEQ ID NO: 37399 - protein, 9 aa, synthetic construct
GTQATGHVR

SEQ ID NO: 37400 - protein, 9 aa, synthetic construct
GTQATGRVK

SEQ ID NO: 37401 - protein, 9 aa, synthetic construct
GTQATGKVH

SEQ ID NO: 37402 - protein, 9 aa, synthetic construct
GTQATGKVF

SEQ ID NO: 37403 - protein, 9 aa, synthetic construct
GTQASVHLH

SEQ ID NO: 37404 - protein, 9 aa, synthetic construct
GTQASVHLK

SEQ ID NO: 37405 - protein, 9 aa, synthetic construct
GTQASVRVY

SEQ ID NO: 37406 - protein, 9 aa, synthetic construct
GTQASVRVH

SEQ ID NO: 37407 - protein, 9 aa, synthetic construct
GTQASLKLF

SEQ ID NO: 37408 - protein, 9 aa, synthetic construct
GTQASAHLR

SEQ ID NO: 37409 - protein, 9 aa, synthetic construct
GTQASAHVK

SEQ ID NO: 37410 - protein, 9 aa, synthetic construct
GTQASARLH

SEQ ID NO: 37411 - protein, 9 aa, synthetic construct
GTQASARVY

SEQ ID NO: 37412 - protein, 9 aa, synthetic construct
GTQASAKLH

SEQ ID NO: 37413 - protein, 9 aa, synthetic construct
GTQASAKVH

SEQ ID NO: 37414 - protein, 9 aa, synthetic construct
GTQASIKVK

SEQ ID NO: 37415 - protein, 9 aa, synthetic construct
GTQASGRVH

SEQ ID NO: 37416 - protein, 9 aa, synthetic construct
PLPGSGHLY

SEQ ID NO: 37417 - protein, 9 aa, synthetic construct
GTQAVVHVK

SEQ ID NO: 37418 - protein, 9 aa, synthetic construct
GTQAVVRLH

SEQ ID NO: 37419 - protein, 9 aa, synthetic construct
GTQAVVRLF

SEQ ID NO: 37420 - protein, 9 aa, synthetic construct
GTQAVVRVY

SEQ ID NO: 37421 - protein, 9 aa, synthetic construct
GTQAVVKLY

SEQ ID NO: 37422 - protein, 9 aa, synthetic construct
GTQAVVKVF

SEQ ID NO: 37423 - protein, 9 aa, synthetic construct
GTQAVLHVH

SEQ ID NO: 37424 - protein, 9 aa, synthetic construct
PLPGSGHVR

SEQ ID NO: 37425 - protein, 9 aa, synthetic construct
GTQAVAHLF

SEQ ID NO: 37426 - protein, 9 aa, synthetic construct
PLPGSGHVH

SEQ ID NO: 37427 - protein, 9 aa, synthetic construct
GTQAVARVH

SEQ ID NO: 37428 - protein, 9 aa, synthetic construct
GTQAVARVF

SEQ ID NO: 37429 - protein, 9 aa, synthetic construct
PLPGSGRLY

SEQ ID NO: 37430 - protein, 9 aa, synthetic construct
GTQAVIRLY

SEQ ID NO: 37431 - protein, 9 aa, synthetic construct
GTQAVIRVF

SEQ ID NO: 37432 - protein, 9 aa, synthetic construct
GTQAVIKLK

SEQ ID NO: 37433 - protein, 9 aa, synthetic construct
GTQAVIKLF

SEQ ID NO: 37434 - protein, 9 aa, synthetic construct
PLPGSGRLH

SEQ ID NO: 37435 - protein, 9 aa, synthetic construct
GTQAVGHVY

SEQ ID NO: 37436 - protein, 9 aa, synthetic construct
GTQAVGHVH

SEQ ID NO: 37437 - protein, 9 aa, synthetic construct
GTQAVGRLH

SEQ ID NO: 37438 - protein, 9 aa, synthetic construct
GTQAVGRVY

SEQ ID NO: 37439 - protein, 9 aa, synthetic construct
GTQAVGRVF

SEQ ID NO: 37440 - protein, 9 aa, synthetic construct
GTQAVGKLY

SEQ ID NO: 37441 - protein, 9 aa, synthetic construct
GTQAVGKLH

SEQ ID NO: 37442 - protein, 9 aa, synthetic construct
GTQAVGKVY

SEQ ID NO: 37443 - protein, 9 aa, synthetic construct
PLPGSGRVY

SEQ ID NO: 37444 - protein, 9 aa, synthetic construct
GTQAGVKLH

SEQ ID NO: 37445 - protein, 9 aa, synthetic construct
GTQAGVKVH

SEQ ID NO: 37446 - protein, 9 aa, synthetic construct
GTQAGLKVH

SEQ ID NO: 37447 - protein, 9 aa, synthetic construct
GTQAGAHLK

SEQ ID NO: 37448 - protein, 9 aa, synthetic construct
GTQAGAHVK

SEQ ID NO: 37449 - protein, 9 aa, synthetic construct
GTQAGAHVF

SEQ ID NO: 37450 - protein, 9 aa, synthetic construct
GTQAGARLY

SEQ ID NO: 37451 - protein, 9 aa, synthetic construct
GTQAGARVF

SEQ ID NO: 37452 - protein, 9 aa, synthetic construct
GTQAGAKLH

SEQ ID NO: 37453 - protein, 9 aa, synthetic construct
GTQAGAKLF

SEQ ID NO: 37454 - protein, 9 aa, synthetic construct
GTQAGAKVY

SEQ ID NO: 37455 - protein, 9 aa, synthetic construct
GTQAGAKVH

SEQ ID NO: 37456 - protein, 9 aa, synthetic construct
GTQAGIHLR

SEQ ID NO: 37457 - protein, 9 aa, synthetic construct
GTQAGIHVF

SEQ ID NO: 37458 - protein, 9 aa, synthetic construct
GTQAGIRVK

SEQ ID NO: 37459 - protein, 9 aa, synthetic construct
GTQAGIRVF

SEQ ID NO: 37460 - protein, 9 aa, synthetic construct
GTQAGIKLH

SEQ ID NO: 37461 - protein, 9 aa, synthetic construct
GTQAGIKVK

SEQ ID NO: 37462 - protein, 9 aa, synthetic construct
GTQAGIKVF

SEQ ID NO: 37463 - protein, 9 aa, synthetic construct
GTQAGGHLK

SEQ ID NO: 37464 - protein, 9 aa, synthetic construct
GTQAGGRLH

SEQ ID NO: 37465 - protein, 9 aa, synthetic construct
GTPGALHLF

SEQ ID NO: 37466 - protein, 9 aa, synthetic construct
PLPGVVHLF

SEQ ID NO: 37467 - protein, 9 aa, synthetic construct
GTPGALRVH

SEQ ID NO: 37468 - protein, 9 aa, synthetic construct
GTPGAAKVK

SEQ ID NO: 37469 - protein, 9 aa, synthetic construct
GTPGTLHLY

SEQ ID NO: 37470 - protein, 9 aa, synthetic construct
GTPGTLRLH

SEQ ID NO: 37471 - protein, 9 aa, synthetic construct
GTPGTLKLY

SEQ ID NO: 37472 - protein, 9 aa, synthetic construct
PLPGVVKLK

SEQ ID NO: 37473 - protein, 9 aa, synthetic construct
GTPGSVRLH

SEQ ID NO: 37474 - protein, 9 aa, synthetic construct
GTPGSVKVK

SEQ ID NO: 37475 - protein, 9 aa, synthetic construct
GTPGSLRLH

SEQ ID NO: 37476 - protein, 9 aa, synthetic construct
GTPGSIHLF

SEQ ID NO: 37477 - protein, 9 aa, synthetic construct
GTPGSIRLY

SEQ ID NO: 37478 - protein, 9 aa, synthetic construct
GTPGVVRVY

SEQ ID NO: 37479 - protein, 9 aa, synthetic construct
GTPGVVKVR

SEQ ID NO: 37480 - protein, 9 aa, synthetic construct
GTPGVLRLR

SEQ ID NO: 37481 - protein, 9 aa, synthetic construct
GTPGVLKLR

SEQ ID NO: 37482 - protein, 9 aa, synthetic construct
PLPGVLKLR

SEQ ID NO: 37483 - protein, 9 aa, synthetic construct
GTPGVAHLF

SEQ ID NO: 37484 - protein, 9 aa, synthetic construct
GTPGVIHLF

SEQ ID NO: 37485 - protein, 9 aa, synthetic construct
GTPGVIRLH

SEQ ID NO: 37486 - protein, 9 aa, synthetic construct
GTPGVIKVF

SEQ ID NO: 37487 - protein, 9 aa, synthetic construct
GTPGVGRLK

SEQ ID NO: 37488 - protein, 9 aa, synthetic construct
GTPGVGKVR

SEQ ID NO: 37489 - protein, 9 aa, synthetic construct
GTPGGLHLY

SEQ ID NO: 37490 - protein, 9 aa, synthetic construct
GTPGGLHLF

SEQ ID NO: 37491 - protein, 9 aa, synthetic construct
GTPGGLHVY

SEQ ID NO: 37492 - protein, 9 aa, synthetic construct
GTPGGLHVF

SEQ ID NO: 37493 - protein, 9 aa, synthetic construct
GTPGGLRLY

SEQ ID NO: 37494 - protein, 9 aa, synthetic construct
GTPGGLRVH

SEQ ID NO: 37495 - protein, 9 aa, synthetic construct
GTPGGLKLY

SEQ ID NO: 37496 - protein, 9 aa, synthetic construct
GTPGGLKLR

SEQ ID NO: 37497 - protein, 9 aa, synthetic construct
GTPGGLKLF

SEQ ID NO: 37498 - protein, 9 aa, synthetic construct
GTPGGIRLK

SEQ ID NO: 37499 - protein, 9 aa, synthetic construct
GTPGGIRVR

SEQ ID NO: 37500 - protein, 9 aa, synthetic construct
GTPAAVRVK

SEQ ID NO: 37501 - protein, 9 aa, synthetic construct
GTPAAVKLR

SEQ ID NO: 37502 - protein, 9 aa, synthetic construct
GTPAAVKLK

SEQ ID NO: 37503 - protein, 9 aa, synthetic construct
GTPAALHLR

SEQ ID NO: 37504 - protein, 9 aa, synthetic construct
GTPAALHLF

SEQ ID NO: 37505 - protein, 9 aa, synthetic construct
GTPAALRLY

SEQ ID NO: 37506 - protein, 9 aa, synthetic construct
GTPAALRLF

SEQ ID NO: 37507 - protein, 9 aa, synthetic construct
GTPAALRVY

SEQ ID NO: 37508 - protein, 9 aa, synthetic construct
GTPAALKLR

SEQ ID NO: 37509 - protein, 9 aa, synthetic construct
GTPAALKLK

SEQ ID NO: 37510 - protein, 9 aa, synthetic construct
GTPAALKLF

SEQ ID NO: 37511 - protein, 9 aa, synthetic construct
GTPAALKVH

SEQ ID NO: 37512 - protein, 9 aa, synthetic construct
GTPAAARLR

SEQ ID NO: 37513 - protein, 9 aa, synthetic construct
GTPAAAKVK

SEQ ID NO: 37514 - protein, 9 aa, synthetic construct
PLPGVAKVY

SEQ ID NO: 37515 - protein, 9 aa, synthetic construct
GTPAAIRLK

SEQ ID NO: 37516 - protein, 9 aa, synthetic construct
GTPAAIRVF

SEQ ID NO: 37517 - protein, 9 aa, synthetic construct
GTPAAIKLK

SEQ ID NO: 37518 - protein, 9 aa, synthetic construct
GTPATVKVR

SEQ ID NO: 37519 - protein, 9 aa, synthetic construct
GTPATLRVH

SEQ ID NO: 37520 - protein, 9 aa, synthetic construct
GTPATARLR

SEQ ID NO: 37521 - protein, 9 aa, synthetic construct
GTPATARLK

SEQ ID NO: 37522 - protein, 9 aa, synthetic construct
GTPATIKVK

SEQ ID NO: 37523 - protein, 9 aa, synthetic construct
GTPATGKLR

SEQ ID NO: 37524 - protein, 9 aa, synthetic construct
GTPATGKLK

SEQ ID NO: 37525 - protein, 9 aa, synthetic construct
GTPASVRVY

SEQ ID NO: 37526 - protein, 9 aa, synthetic construct
GTPASVRVH

SEQ ID NO: 37527 - protein, 9 aa, synthetic construct
GTPASLHLR

SEQ ID NO: 37528 - protein, 9 aa, synthetic construct
GTPASLHVY

SEQ ID NO: 37529 - protein, 9 aa, synthetic construct
GTPASLHVF

SEQ ID NO: 37530 - protein, 9 aa, synthetic construct
GTPASARLK

SEQ ID NO: 37531 - protein, 9 aa, synthetic construct
GTPASAKVK

SEQ ID NO: 37532 - protein, 9 aa, synthetic construct
GTPASIHLF

SEQ ID NO: 37533 - protein, 9 aa, synthetic construct
GTPASIRVH

SEQ ID NO: 37534 - protein, 9 aa, synthetic construct
GTPAVVRVY

SEQ ID NO: 37535 - protein, 9 aa, synthetic construct
GTPAVLHVK

SEQ ID NO: 37536 - protein, 9 aa, synthetic construct
GTPAVLRLH

SEQ ID NO: 37537 - protein, 9 aa, synthetic construct
GTPAVLKVF

SEQ ID NO: 37538 - protein, 9 aa, synthetic construct
GTPAVAKVY

SEQ ID NO: 37539 - protein, 9 aa, synthetic construct
GTPAVIRLH

SEQ ID NO: 37540 - protein, 9 aa, synthetic construct
GTPAVIRVK

SEQ ID NO: 37541 - protein, 9 aa, synthetic construct
GTPAGLKVY

SEQ ID NO: 37542 - protein, 9 aa, synthetic construct
GTPAGLKVH

SEQ ID NO: 37543 - protein, 9 aa, synthetic construct
GTPAGAHLF

SEQ ID NO: 37544 - protein, 9 aa, synthetic construct
GTPAGAHVR

SEQ ID NO: 37545 - protein, 9 aa, synthetic construct
GTPAGAHVH

SEQ ID NO: 37546 - protein, 9 aa, synthetic construct
GTPAGARVH

SEQ ID NO: 37547 - protein, 9 aa, synthetic construct
GTPAGAKVK

SEQ ID NO: 37548 - protein, 9 aa, synthetic construct
GTPAGIHLY

SEQ ID NO: 37549 - protein, 9 aa, synthetic construct
GTPAGIHVY

SEQ ID NO: 37550 - protein, 9 aa, synthetic construct
GTPAGIRLH

SEQ ID NO: 37551 - protein, 9 aa, synthetic construct
GTPAGGHLF

SEQ ID NO: 37552 - protein, 9 aa, synthetic construct
GTPAGGHVY

SEQ ID NO: 37553 - protein, 9 aa, synthetic construct
GTPAGGHVK

SEQ ID NO: 37554 - protein, 9 aa, synthetic construct
GSNGAAKVK

SEQ ID NO: 37555 - protein, 9 aa, synthetic construct
GSNGTVRVF

SEQ ID NO: 37556 - protein, 9 aa, synthetic construct
GSNGTVKVK

SEQ ID NO: 37557 - protein, 9 aa, synthetic construct
GSNGTLHLF

SEQ ID NO: 37558 - protein, 9 aa, synthetic construct
GSNGTLHVF

SEQ ID NO: 37559 - protein, 9 aa, synthetic construct
GSNGTLRLY

SEQ ID NO: 37560 - protein, 9 aa, synthetic construct
GSNGTGRLR

SEQ ID NO: 37561 - protein, 9 aa, synthetic construct
GSNGTGRVR

SEQ ID NO: 37562 - protein, 9 aa, synthetic construct
GSNGTGRVK

SEQ ID NO: 37563 - protein, 9 aa, synthetic construct
GSNGTGKVK

SEQ ID NO: 37564 - protein, 9 aa, synthetic construct
GSNGSVRLY

SEQ ID NO: 37565 - protein, 9 aa, synthetic construct
GSNGSVRVY

SEQ ID NO: 37566 - protein, 9 aa, synthetic construct
GSNGSVRVF

SEQ ID NO: 37567 - protein, 9 aa, synthetic construct
GSNGSVKLY

SEQ ID NO: 37568 - protein, 9 aa, synthetic construct
GSNGSVKLH

SEQ ID NO: 37569 - protein, 9 aa, synthetic construct
GSNGSVKVY

SEQ ID NO: 37570 - protein, 9 aa, synthetic construct
GSNGSLHLF

SEQ ID NO: 37571 - protein, 9 aa, synthetic construct
GSNGSLRLY

SEQ ID NO: 37572 - protein, 9 aa, synthetic construct
GSNGSLKLR

SEQ ID NO: 37573 - protein, 9 aa, synthetic construct
GSNGSAKLH

SEQ ID NO: 37574 - protein, 9 aa, synthetic construct
GSNGSIHVF

SEQ ID NO: 37575 - protein, 9 aa, synthetic construct
GSNGSIRVH

SEQ ID NO: 37576 - protein, 9 aa, synthetic construct
GSNGSIKLK

SEQ ID NO: 37577 - protein, 9 aa, synthetic construct
GSNGSIKVY

SEQ ID NO: 37578 - protein, 9 aa, synthetic construct
GSNGSIKVF

SEQ ID NO: 37579 - protein, 9 aa, synthetic construct
GSNGSGHLR

SEQ ID NO: 37580 - protein, 9 aa, synthetic construct
GSNGSGHLK

SEQ ID NO: 37581 - protein, 9 aa, synthetic construct
GSNGSGHVR

SEQ ID NO: 37582 - protein, 9 aa, synthetic construct
GSNGSGHVK

SEQ ID NO: 37583 - protein, 9 aa, synthetic construct
GSNGSGHVF

SEQ ID NO: 37584 - protein, 9 aa, synthetic construct
GSNGSGRLH

SEQ ID NO: 37585 - protein, 9 aa, synthetic construct
GSNGSGRVH

SEQ ID NO: 37586 - protein, 9 aa, synthetic construct
GSNGVVRVK

SEQ ID NO: 37587 - protein, 9 aa, synthetic construct
GSNGVVKVH

SEQ ID NO: 37588 - protein, 9 aa, synthetic construct
GSNGVLRLH

SEQ ID NO: 37589 - protein, 9 aa, synthetic construct
PLPGGLKLY

SEQ ID NO: 37590 - protein, 9 aa, synthetic construct
GSNGVLKVF

SEQ ID NO: 37591 - protein, 9 aa, synthetic construct
GSNGVIRLF

SEQ ID NO: 37592 - protein, 9 aa, synthetic construct
PLPGGLKVH

SEQ ID NO: 37593 - protein, 9 aa, synthetic construct
GSNGVGHVF

SEQ ID NO: 37594 - protein, 9 aa, synthetic construct
GSNGVGKVR

SEQ ID NO: 37595 - protein, 9 aa, synthetic construct
GSNGGVHVY

SEQ ID NO: 37596 - protein, 9 aa, synthetic construct
GSNGGVKLH

SEQ ID NO: 37597 - protein, 9 aa, synthetic construct
GSNGGLKVH

SEQ ID NO: 37598 - protein, 9 aa, synthetic construct
GSNGGAHLF

SEQ ID NO: 37599 - protein, 9 aa, synthetic construct
GSNGGAHVY

SEQ ID NO: 37600 - protein, 9 aa, synthetic construct
GSNGGAKVH

SEQ ID NO: 37601 - protein, 9 aa, synthetic construct
GSNGGAKVK

SEQ ID NO: 37602 - protein, 9 aa, synthetic construct
GSNGGGHVR

SEQ ID NO: 37603 - protein, 9 aa, synthetic construct
GSNGGGHVK

SEQ ID NO: 37604 - protein, 9 aa, synthetic construct
PLPGGARLK

SEQ ID NO: 37605 - protein, 9 aa, synthetic construct
GSNAAVHLF

SEQ ID NO: 37606 - protein, 9 aa, synthetic construct
GSNAAVRLK

SEQ ID NO: 37607 - protein, 9 aa, synthetic construct
GSNAAVRVY

SEQ ID NO: 37608 - protein, 9 aa, synthetic construct
GSNAAVRVK

SEQ ID NO: 37609 - protein, 9 aa, synthetic construct
GSNAAVKVR

SEQ ID NO: 37610 - protein, 9 aa, synthetic construct
GSNAALHLF

SEQ ID NO: 37611 - protein, 9 aa, synthetic construct
GSNAALKLR

SEQ ID NO: 37612 - protein, 9 aa, synthetic construct
GSNAAARLR

SEQ ID NO: 37613 - protein, 9 aa, synthetic construct
GSNAAAKVK

SEQ ID NO: 37614 - protein, 9 aa, synthetic construct
GSNAAIRLY

SEQ ID NO: 37615 - protein, 9 aa, synthetic construct
GSNAAIRLK

SEQ ID NO: 37616 - protein, 9 aa, synthetic construct
PLPGGAKVK

SEQ ID NO: 37617 - protein, 9 aa, synthetic construct
GSNAAGRLY

SEQ ID NO: 37618 - protein, 9 aa, synthetic construct
GSNATVRVF

SEQ ID NO: 37619 - protein, 9 aa, synthetic construct
GSNATVKLK

SEQ ID NO: 37620 - protein, 9 aa, synthetic construct
GSNATLHLF

SEQ ID NO: 37621 - protein, 9 aa, synthetic construct
GSNATLHVR

SEQ ID NO: 37622 - protein, 9 aa, synthetic construct
GSNATLHVF

SEQ ID NO: 37623 - protein, 9 aa, synthetic construct
GSNATAHLR

SEQ ID NO: 37624 - protein, 9 aa, synthetic construct
GSNATAHLF

SEQ ID NO: 37625 - protein, 9 aa, synthetic construct
GSNATARLY

SEQ ID NO: 37626 - protein, 9 aa, synthetic construct
GSNATARLH

SEQ ID NO: 37627 - protein, 9 aa, synthetic construct
GSNATIKVH

SEQ ID NO: 37628 - protein, 9 aa, synthetic construct
GSNATGHVY

SEQ ID NO: 37629 - protein, 9 aa, synthetic construct
PLPGGIRLK

SEQ ID NO: 37630 - protein, 9 aa, synthetic construct
GSNATGRVR

SEQ ID NO: 37631 - protein, 9 aa, synthetic construct
GSNASVHLH

SEQ ID NO: 37632 - protein, 9 aa, synthetic construct
GSNASVHVR

SEQ ID NO: 37633 - protein, 9 aa, synthetic construct
GSNASVRVK

SEQ ID NO: 37634 - protein, 9 aa, synthetic construct
GSNASVKLY

SEQ ID NO: 37635 - protein, 9 aa, synthetic construct
GSNASAKVH

SEQ ID NO: 37636 - protein, 9 aa, synthetic construct
GSNASGRLH

SEQ ID NO: 37637 - protein, 9 aa, synthetic construct
GSNASGRLF

SEQ ID NO: 37638 - protein, 9 aa, synthetic construct
GSNASGRVY

SEQ ID NO: 37639 - protein, 9 aa, synthetic construct
GSNASGRVH

SEQ ID NO: 37640 - protein, 9 aa, synthetic construct
GSNAVVRLK

SEQ ID NO: 37641 - protein, 9 aa, synthetic construct
GSNAVVKLK

SEQ ID NO: 37642 - protein, 9 aa, synthetic construct
GSNAVLHVR

SEQ ID NO: 37643 - protein, 9 aa, synthetic construct
GSNAVLKVF

SEQ ID NO: 37644 - protein, 9 aa, synthetic construct
GSNAVARLF

SEQ ID NO: 37645 - protein, 9 aa, synthetic construct
GSNAVIRLF

SEQ ID NO: 37646 - protein, 9 aa, synthetic construct
GSNAVIKLK

SEQ ID NO: 37647 - protein, 9 aa, synthetic construct
GSNAVIKVY

SEQ ID NO: 37648 - protein, 9 aa, synthetic construct
PLPGGGRLK

SEQ ID NO: 37649 - protein, 9 aa, synthetic construct
GSNAGVRVR

SEQ ID NO: 37650 - protein, 9 aa, synthetic construct
GSNAGVKVH

SEQ ID NO: 37651 - protein, 9 aa, synthetic construct
GSNAGIHLH

SEQ ID NO: 37652 - protein, 9 aa, synthetic construct
GSNAGIHVR

SEQ ID NO: 37653 - protein, 9 aa, synthetic construct
GSNAGIHVH

SEQ ID NO: 37654 - protein, 9 aa, synthetic construct
GSNAGIHVF

SEQ ID NO: 37655 - protein, 9 aa, synthetic construct
GSNAGIKLF

SEQ ID NO: 37656 - protein, 9 aa, synthetic construct
GSNAGGKVY

SEQ ID NO: 37657 - protein, 9 aa, synthetic construct
GSQGAVKLR

SEQ ID NO: 37658 - protein, 9 aa, synthetic construct
GSQGAVKLK

SEQ ID NO: 37659 - protein, 9 aa, synthetic construct
GSQGALRLH

SEQ ID NO: 37660 - protein, 9 aa, synthetic construct
GSQGALRVH

SEQ ID NO: 37661 - protein, 9 aa, synthetic construct
GSQGALKLY

SEQ ID NO: 37662 - protein, 9 aa, synthetic construct
GSQGALKLR

SEQ ID NO: 37663 - protein, 9 aa, synthetic construct
GSQGALKVR

SEQ ID NO: 37664 - protein, 9 aa, synthetic construct
GSQGAAHVR

SEQ ID NO: 37665 - protein, 9 aa, synthetic construct
GSQGAAKVK

SEQ ID NO: 37666 - protein, 9 aa, synthetic construct
GSQGAIHLY

SEQ ID NO: 37667 - protein, 9 aa, synthetic construct
GSQGAIRVR

SEQ ID NO: 37668 - protein, 9 aa, synthetic construct
PLPAAVRLK

SEQ ID NO: 37669 - protein, 9 aa, synthetic construct
PLPAAVRVK

SEQ ID NO: 37670 - protein, 9 aa, synthetic construct
GSQGTLHLH

SEQ ID NO: 37671 - protein, 9 aa, synthetic construct
GSQGTLKLF

SEQ ID NO: 37672 - protein, 9 aa, synthetic construct
GSQGTLKVH

SEQ ID NO: 37673 - protein, 9 aa, synthetic construct
PLPAAVKLK

SEQ ID NO: 37674 - protein, 9 aa, synthetic construct
GSQGTIHLY

SEQ ID NO: 37675 - protein, 9 aa, synthetic construct
GSQGTIHVY

SEQ ID NO: 37676 - protein, 9 aa, synthetic construct
GSQGTIHVR

SEQ ID NO: 37677 - protein, 9 aa, synthetic construct
GSQGTIHVF

SEQ ID NO: 37678 - protein, 9 aa, synthetic construct
GSQGTIRLF

SEQ ID NO: 37679 - protein, 9 aa, synthetic construct
GSQGTGRLH

SEQ ID NO: 37680 - protein, 9 aa, synthetic construct
GSQGTGKLR

SEQ ID NO: 37681 - protein, 9 aa, synthetic construct
GSQGTGKLK

SEQ ID NO: 37682 - protein, 9 aa, synthetic construct
PLPAALHLY

SEQ ID NO: 37683 - protein, 9 aa, synthetic construct
GSQGSVHLK

SEQ ID NO: 37684 - protein, 9 aa, synthetic construct
GSQGSVHVK

SEQ ID NO: 37685 - protein, 9 aa, synthetic construct
GSQGSLHLY

SEQ ID NO: 37686 - protein, 9 aa, synthetic construct
GSQGSLHLR

SEQ ID NO: 37687 - protein, 9 aa, synthetic construct
PLPAALHLF

SEQ ID NO: 37688 - protein, 9 aa, synthetic construct
PLPAALHVY

SEQ ID NO: 37689 - protein, 9 aa, synthetic construct
GSQGSLKLF

SEQ ID NO: 37690 - protein, 9 aa, synthetic construct
GSQGSAHLF

SEQ ID NO: 37691 - protein, 9 aa, synthetic construct
GSQGSAHVH

SEQ ID NO: 37692 - protein, 9 aa, synthetic construct
PLPAALHVH

SEQ ID NO: 37693 - protein, 9 aa, synthetic construct
GSQGSAKVH

SEQ ID NO: 37694 - protein, 9 aa, synthetic construct
GSQGSIHLY

SEQ ID NO: 37695 - protein, 9 aa, synthetic construct
GSQGSIHLF

SEQ ID NO: 37696 - protein, 9 aa, synthetic construct
PLPAALRLH

SEQ ID NO: 37697 - protein, 9 aa, synthetic construct
GSQGVVRLH

SEQ ID NO: 37698 - protein, 9 aa, synthetic construct
GSQGVVRVR

SEQ ID NO: 37699 - protein, 9 aa, synthetic construct
PLPAALRVH

SEQ ID NO: 37700 - protein, 9 aa, synthetic construct
GSQGVVKLR

SEQ ID NO: 37701 - protein, 9 aa, synthetic construct
GSQGVVKLH

SEQ ID NO: 37702 - protein, 9 aa, synthetic construct
PLPAALRVF

SEQ ID NO: 37703 - protein, 9 aa, synthetic construct
GSQGVLRLH

SEQ ID NO: 37704 - protein, 9 aa, synthetic construct
GSQGVLRVF

SEQ ID NO: 37705 - protein, 9 aa, synthetic construct
PLPAALKLR

SEQ ID NO: 37706 - protein, 9 aa, synthetic construct
GSQGVAKVH

SEQ ID NO: 37707 - protein, 9 aa, synthetic construct
GSQGVIHLF

SEQ ID NO: 37708 - protein, 9 aa, synthetic construct
GSQGVIKLK

SEQ ID NO: 37709 - protein, 9 aa, synthetic construct
PLPAALKVH

SEQ ID NO: 37710 - protein, 9 aa, synthetic construct
GSQGVGRLR

SEQ ID NO: 37711 - protein, 9 aa, synthetic construct
GSQGVGKLK

SEQ ID NO: 37712 - protein, 9 aa, synthetic construct
GSQGGVRLH

SEQ ID NO: 37713 - protein, 9 aa, synthetic construct
GSQGGVRVF

SEQ ID NO: 37714 - protein, 9 aa, synthetic construct
GSQGGLHLH

SEQ ID NO: 37715 - protein, 9 aa, synthetic construct
GSQGGLHLF

SEQ ID NO: 37716 - protein, 9 aa, synthetic construct
GSQGGLKLH

SEQ ID NO: 37717 - protein, 9 aa, synthetic construct
GSQGGAHLK

SEQ ID NO: 37718 - protein, 9 aa, synthetic construct
GSQGGIRLR

SEQ ID NO: 37719 - protein, 9 aa, synthetic construct
GSQGGIKVR

SEQ ID NO: 37720 - protein, 9 aa, synthetic construct
PLPAAARLK

SEQ ID NO: 37721 - protein, 9 aa, synthetic construct
GSQAAVRLK

SEQ ID NO: 37722 - protein, 9 aa, synthetic construct
GSQAAVRLF

SEQ ID NO: 37723 - protein, 9 aa, synthetic construct
GSQAAVKLR

SEQ ID NO: 37724 - protein, 9 aa, synthetic construct
GSQAAVKLH

SEQ ID NO: 37725 - protein, 9 aa, synthetic construct
GSQAAVKLK

SEQ ID NO: 37726 - protein, 9 aa, synthetic construct
GSQAALHLY

SEQ ID NO: 37727 - protein, 9 aa, synthetic construct
GSQAALHLR

SEQ ID NO: 37728 - protein, 9 aa, synthetic construct
GSQAALHLF

SEQ ID NO: 37729 - protein, 9 aa, synthetic construct
GSQAALHVY

SEQ ID NO: 37730 - protein, 9 aa, synthetic construct
GSQAALHVF

SEQ ID NO: 37731 - protein, 9 aa, synthetic construct
GSQAALRLY

SEQ ID NO: 37732 - protein, 9 aa, synthetic construct
GSQAALRLH

SEQ ID NO: 37733 - protein, 9 aa, synthetic construct
GSQAALKLY

SEQ ID NO: 37734 - protein, 9 aa, synthetic construct
GSQAALKLR

SEQ ID NO: 37735 - protein, 9 aa, synthetic construct
GSQAALKLH

SEQ ID NO: 37736 - protein, 9 aa, synthetic construct
GSQAALKVH

SEQ ID NO: 37737 - protein, 9 aa, synthetic construct
GSQAAAHVR

SEQ ID NO: 37738 - protein, 9 aa, synthetic construct
GSQAAARLR

SEQ ID NO: 37739 - protein, 9 aa, synthetic construct
GSQAAAKLK

SEQ ID NO: 37740 - protein, 9 aa, synthetic construct
GSQAAAKVK

SEQ ID NO: 37741 - protein, 9 aa, synthetic construct
GSQAAIHLF

SEQ ID NO: 37742 - protein, 9 aa, synthetic construct
GSQAAIRVR

SEQ ID NO: 37743 - protein, 9 aa, synthetic construct
PLPAAAKVK

SEQ ID NO: 37744 - protein, 9 aa, synthetic construct
GSQATVHVY

SEQ ID NO: 37745 - protein, 9 aa, synthetic construct
GSQATVHVH

SEQ ID NO: 37746 - protein, 9 aa, synthetic construct
GSQATVHVF

SEQ ID NO: 37747 - protein, 9 aa, synthetic construct
GSQATVRVY

SEQ ID NO: 37748 - protein, 9 aa, synthetic construct
GSQATVKLF

SEQ ID NO: 37749 - protein, 9 aa, synthetic construct
GSQATLHLR

SEQ ID NO: 37750 - protein, 9 aa, synthetic construct
GSQATLHLF

SEQ ID NO: 37751 - protein, 9 aa, synthetic construct
GSQATLKLH

SEQ ID NO: 37752 - protein, 9 aa, synthetic construct
GSQATLKLF

SEQ ID NO: 37753 - protein, 9 aa, synthetic construct
GSQATAHLF

SEQ ID NO: 37754 - protein, 9 aa, synthetic construct
GSQATAHVR

SEQ ID NO: 37755 - protein, 9 aa, synthetic construct
GSQATARLY

SEQ ID NO: 37756 - protein, 9 aa, synthetic construct
GSQATAKLR

SEQ ID NO: 37757 - protein, 9 aa, synthetic construct
GSQATIHVF

SEQ ID NO: 37758 - protein, 9 aa, synthetic construct
GSQATIRVK

SEQ ID NO: 37759 - protein, 9 aa, synthetic construct
GSQATIKVH

SEQ ID NO: 37760 - protein, 9 aa, synthetic construct
GSQATIKVF

SEQ ID NO: 37761 - protein, 9 aa, synthetic construct
PLPAAIRLK

SEQ ID NO: 37762 - protein, 9 aa, synthetic construct
GSQASVHVR

SEQ ID NO: 37763 - protein, 9 aa, synthetic construct
GSQASVRLH

SEQ ID NO: 37764 - protein, 9 aa, synthetic construct
GSQASVKLH

SEQ ID NO: 37765 - protein, 9 aa, synthetic construct
GSQASLHLK

SEQ ID NO: 37766 - protein, 9 aa, synthetic construct
PLPAAIRVF

SEQ ID NO: 37767 - protein, 9 aa, synthetic construct
GSQASLKLF

SEQ ID NO: 37768 - protein, 9 aa, synthetic construct
GSQASAHLK

SEQ ID NO: 37769 - protein, 9 aa, synthetic construct
GSQASAHVR

SEQ ID NO: 37770 - protein, 9 aa, synthetic construct
GSQASAHVK

SEQ ID NO: 37771 - protein, 9 aa, synthetic construct
GSQASARLK

SEQ ID NO: 37772 - protein, 9 aa, synthetic construct
GSQASARLF

SEQ ID NO: 37773 - protein, 9 aa, synthetic construct
GSQASAKLH

SEQ ID NO: 37774 - protein, 9 aa, synthetic construct
GSQASAKLF

SEQ ID NO: 37775 - protein, 9 aa, synthetic construct
GSQASAKVH

SEQ ID NO: 37776 - protein, 9 aa, synthetic construct
GSQASIHLY

SEQ ID NO: 37777 - protein, 9 aa, synthetic construct
GSQASIHLF

SEQ ID NO: 37778 - protein, 9 aa, synthetic construct
GSQASGHVK

SEQ ID NO: 37779 - protein, 9 aa, synthetic construct
GSQAVVHLR

SEQ ID NO: 37780 - protein, 9 aa, synthetic construct
GSQAVVKLY

SEQ ID NO: 37781 - protein, 9 aa, synthetic construct
GSQAVVKVF

SEQ ID NO: 37782 - protein, 9 aa, synthetic construct
GSQAVLHVH

SEQ ID NO: 37783 - protein, 9 aa, synthetic construct
GSQAVLRVY

SEQ ID NO: 37784 - protein, 9 aa, synthetic construct
GSQAVLRVH

SEQ ID NO: 37785 - protein, 9 aa, synthetic construct
GSQAVLKVY

SEQ ID NO: 37786 - protein, 9 aa, synthetic construct
GSQAVLKVR

SEQ ID NO: 37787 - protein, 9 aa, synthetic construct
GSQAVLKVH

SEQ ID NO: 37788 - protein, 9 aa, synthetic construct
GSQAVLKVF

SEQ ID NO: 37789 - protein, 9 aa, synthetic construct
GSQAVAHLF

SEQ ID NO: 37790 - protein, 9 aa, synthetic construct
GSQAVIHLK

SEQ ID NO: 37791 - protein, 9 aa, synthetic construct
GSQAVIRLY

SEQ ID NO: 37792 - protein, 9 aa, synthetic construct
GSQAVIRLK

SEQ ID NO: 37793 - protein, 9 aa, synthetic construct
GSQAVIRLF

SEQ ID NO: 37794 - protein, 9 aa, synthetic construct
GSQAVIRVY

SEQ ID NO: 37795 - protein, 9 aa, synthetic construct
GSQAVIRVF

SEQ ID NO: 37796 - protein, 9 aa, synthetic construct
GSQAVIKVF

SEQ ID NO: 37797 - protein, 9 aa, synthetic construct
PLPAAGRLK

SEQ ID NO: 37798 - protein, 9 aa, synthetic construct
GSQAVGRLY

SEQ ID NO: 37799 - protein, 9 aa, synthetic construct
GSQAVGRLH

SEQ ID NO: 37800 - protein, 9 aa, synthetic construct
GSQAVGRLF

SEQ ID NO: 37801 - protein, 9 aa, synthetic construct
GSQAVGKLY

SEQ ID NO: 37802 - protein, 9 aa, synthetic construct
GSQAVGKLR

SEQ ID NO: 37803 - protein, 9 aa, synthetic construct
GSQAVGKLH

SEQ ID NO: 37804 - protein, 9 aa, synthetic construct
GSQAVGKVK

SEQ ID NO: 37805 - protein, 9 aa, synthetic construct
GSQAGVKLR

SEQ ID NO: 37806 - protein, 9 aa, synthetic construct
GSQAGVKVH

SEQ ID NO: 37807 - protein, 9 aa, synthetic construct
GSQAGLHVK

SEQ ID NO: 37808 - protein, 9 aa, synthetic construct
GSQAGLRVF

SEQ ID NO: 37809 - protein, 9 aa, synthetic construct
GSQAGLKLY

SEQ ID NO: 37810 - protein, 9 aa, synthetic construct
GSQAGLKLH

SEQ ID NO: 37811 - protein, 9 aa, synthetic construct
GSQAGLKVY

SEQ ID NO: 37812 - protein, 9 aa, synthetic construct
GSQAGLKVH

SEQ ID NO: 37813 - protein, 9 aa, synthetic construct
GSQAGLKVF

SEQ ID NO: 37814 - protein, 9 aa, synthetic construct
GSQAGIHLY

SEQ ID NO: 37815 - protein, 9 aa, synthetic construct
GSQAGIRVR

SEQ ID NO: 37816 - protein, 9 aa, synthetic construct
GSPGAVHLR

SEQ ID NO: 37817 - protein, 9 aa, synthetic construct
GSPGAVHVR

SEQ ID NO: 37818 - protein, 9 aa, synthetic construct
GSPGALHLF

SEQ ID NO: 37819 - protein, 9 aa, synthetic construct
GSPGALRVH

SEQ ID NO: 37820 - protein, 9 aa, synthetic construct
GSPGALRVF

SEQ ID NO: 37821 - protein, 9 aa, synthetic construct
GSPGAARLR

SEQ ID NO: 37822 - protein, 9 aa, synthetic construct
GSPGAAKVK

SEQ ID NO: 37823 - protein, 9 aa, synthetic construct
GSPGAIRLH

SEQ ID NO: 37824 - protein, 9 aa, synthetic construct
GSPGAIRVY

SEQ ID NO: 37825 - protein, 9 aa, synthetic construct
PLPATVRLR

SEQ ID NO: 37826 - protein, 9 aa, synthetic construct
PLPATVRLF

SEQ ID NO: 37827 - protein, 9 aa, synthetic construct
GSPGTVRVY

SEQ ID NO: 37828 - protein, 9 aa, synthetic construct
GSPGTVKVK

SEQ ID NO: 37829 - protein, 9 aa, synthetic construct
GSPGTLHLR

SEQ ID NO: 37830 - protein, 9 aa, synthetic construct
GSPGTLHLF

SEQ ID NO: 37831 - protein, 9 aa, synthetic construct
GSPGTLHVF

SEQ ID NO: 37832 - protein, 9 aa, synthetic construct
GSPGTLKLF

SEQ ID NO: 37833 - protein, 9 aa, synthetic construct
PLPATVKVK

SEQ ID NO: 37834 - protein, 9 aa, synthetic construct
GSPGTGKVH

SEQ ID NO: 37835 - protein, 9 aa, synthetic construct
PLPATLHLY

SEQ ID NO: 37836 - protein, 9 aa, synthetic construct
GSPGSVHVR

SEQ ID NO: 37837 - protein, 9 aa, synthetic construct
GSPGSVRLH

SEQ ID NO: 37838 - protein, 9 aa, synthetic construct
GSPGSVKVK

SEQ ID NO: 37839 - protein, 9 aa, synthetic construct
GSPGSLHLY

SEQ ID NO: 37840 - protein, 9 aa, synthetic construct
GSPGSLHVR

SEQ ID NO: 37841 - protein, 9 aa, synthetic construct
PLPATLHLF

SEQ ID NO: 37842 - protein, 9 aa, synthetic construct
GSPGSLRLY

SEQ ID NO: 37843 - protein, 9 aa, synthetic construct
PLPATLHVY

SEQ ID NO: 37844 - protein, 9 aa, synthetic construct
GSPGSLKLF

SEQ ID NO: 37845 - protein, 9 aa, synthetic construct
GSPGSAKVY

SEQ ID NO: 37846 - protein, 9 aa, synthetic construct
PLPATLHVF

SEQ ID NO: 37847 - protein, 9 aa, synthetic construct
PLNGSIHLF

SEQ ID NO: 37848 - protein, 9 aa, synthetic construct
GSPGSIRLH

SEQ ID NO: 37849 - protein, 9 aa, synthetic construct
GSPGSIRLK

SEQ ID NO: 37850 - protein, 9 aa, synthetic construct
GSPGSIKLR

SEQ ID NO: 37851 - protein, 9 aa, synthetic construct
GSPGSGHVF

SEQ ID NO: 37852 - protein, 9 aa, synthetic construct
GSPGSGKLK

SEQ ID NO: 37853 - protein, 9 aa, synthetic construct
GSPGVLKVH

SEQ ID NO: 37854 - protein, 9 aa, synthetic construct
GSPGVIHLF

SEQ ID NO: 37855 - protein, 9 aa, synthetic construct
GSPGVIKLH

SEQ ID NO: 37856 - protein, 9 aa, synthetic construct
GSPGVIKVF

SEQ ID NO: 37857 - protein, 9 aa, synthetic construct
GSPGVGHLY

SEQ ID NO: 37858 - protein, 9 aa, synthetic construct
GSPGGVKVK

SEQ ID NO: 37859 - protein, 9 aa, synthetic construct
GSPGGLHVY

SEQ ID NO: 37860 - protein, 9 aa, synthetic construct
GSPGGLRLY

SEQ ID NO: 37861 - protein, 9 aa, synthetic construct
GSPGGLRVH

SEQ ID NO: 37862 - protein, 9 aa, synthetic construct
GSPGGLKLY

SEQ ID NO: 37863 - protein, 9 aa, synthetic construct
GSPGGLKLF

SEQ ID NO: 37864 - protein, 9 aa, synthetic construct
GSPGGLKVY

SEQ ID NO: 37865 - protein, 9 aa, synthetic construct
GSPGGLKVH

SEQ ID NO: 37866 - protein, 9 aa, synthetic construct
GSPGGARLH

SEQ ID NO: 37867 - protein, 9 aa, synthetic construct
GSPGGARLK

SEQ ID NO: 37868 - protein, 9 aa, synthetic construct
GSPGGARVH

SEQ ID NO: 37869 - protein, 9 aa, synthetic construct
GSPGGAKLH

SEQ ID NO: 37870 - protein, 9 aa, synthetic construct
GSPGGAKVK

SEQ ID NO: 37871 - protein, 9 aa, synthetic construct
GSPGGIHLF

SEQ ID NO: 37872 - protein, 9 aa, synthetic construct
GSPGGIRLK

SEQ ID NO: 37873 - protein, 9 aa, synthetic construct
GSPGGGHLF

SEQ ID NO: 37874 - protein, 9 aa, synthetic construct
GSPGGGRLK

SEQ ID NO: 37875 - protein, 9 aa, synthetic construct
GSPGGGRVH

SEQ ID NO: 37876 - protein, 9 aa, synthetic construct
GSPGGGKLR

SEQ ID NO: 37877 - protein, 9 aa, synthetic construct
GSPGGGKLK

SEQ ID NO: 37878 - protein, 9 aa, synthetic construct
GSPGGGKVK

SEQ ID NO: 37879 - protein, 9 aa, synthetic construct
GSPAALHLF

SEQ ID NO: 37880 - protein, 9 aa, synthetic construct
GSPAALRLY

SEQ ID NO: 37881 - protein, 9 aa, synthetic construct
GSPAALRVF

SEQ ID NO: 37882 - protein, 9 aa, synthetic construct
GSPAAARLR

SEQ ID NO: 37883 - protein, 9 aa, synthetic construct
GSPAAIRLK

SEQ ID NO: 37884 - protein, 9 aa, synthetic construct
GSPAAGKLR

SEQ ID NO: 37885 - protein, 9 aa, synthetic construct
GSPAAGKLK

SEQ ID NO: 37886 - protein, 9 aa, synthetic construct
GSPAAGKVK

SEQ ID NO: 37887 - protein, 9 aa, synthetic construct
GSPATVRLF

SEQ ID NO: 37888 - protein, 9 aa, synthetic construct
GSPATVRVK

SEQ ID NO: 37889 - protein, 9 aa, synthetic construct
GSPATLHLF

SEQ ID NO: 37890 - protein, 9 aa, synthetic construct
GSPATGRVH

SEQ ID NO: 37891 - protein, 9 aa, synthetic construct
GSPATGKLK

SEQ ID NO: 37892 - protein, 9 aa, synthetic construct
GSPASVRVY

SEQ ID NO: 37893 - protein, 9 aa, synthetic construct
GSPASVKLH

SEQ ID NO: 37894 - protein, 9 aa, synthetic construct
GSPASVKVY

SEQ ID NO: 37895 - protein, 9 aa, synthetic construct
PLPATIRVK

SEQ ID NO: 37896 - protein, 9 aa, synthetic construct
GSPASLHVF

SEQ ID NO: 37897 - protein, 9 aa, synthetic construct
GSPASLKLF

SEQ ID NO: 37898 - protein, 9 aa, synthetic construct
GSPASARLF

SEQ ID NO: 37899 - protein, 9 aa, synthetic construct
GSPASAKVH

SEQ ID NO: 37900 - protein, 9 aa, synthetic construct
GSPASIHLF

SEQ ID NO: 37901 - protein, 9 aa, synthetic construct
PLPATIKVR

SEQ ID NO: 37902 - protein, 9 aa, synthetic construct
GSPASIKLY

SEQ ID NO: 37903 - protein, 9 aa, synthetic construct
GSPASIKVH

SEQ ID NO: 37904 - protein, 9 aa, synthetic construct
GSPASIKVF

SEQ ID NO: 37905 - protein, 9 aa, synthetic construct
GSPASGHLF

SEQ ID NO: 37906 - protein, 9 aa, synthetic construct
GSPASGHVY

SEQ ID NO: 37907 - protein, 9 aa, synthetic construct
GSPASGHVR

SEQ ID NO: 37908 - protein, 9 aa, synthetic construct
GSPASGHVK

SEQ ID NO: 37909 - protein, 9 aa, synthetic construct
GSPASGRLH

SEQ ID NO: 37910 - protein, 9 aa, synthetic construct
GSPASGRLK

SEQ ID NO: 37911 - protein, 9 aa, synthetic construct
GSPASGRLF

SEQ ID NO: 37912 - protein, 9 aa, synthetic construct
GSPASGRVY

SEQ ID NO: 37913 - protein, 9 aa, synthetic construct
GSPASGRVH

SEQ ID NO: 37914 - protein, 9 aa, synthetic construct
GSPASGKVH

SEQ ID NO: 37915 - protein, 9 aa, synthetic construct
GSPASGKVK

SEQ ID NO: 37916 - protein, 9 aa, synthetic construct
GSPAVLHVH

SEQ ID NO: 37917 - protein, 9 aa, synthetic construct
GSPAVLRLH

SEQ ID NO: 37918 - protein, 9 aa, synthetic construct
GSPAVLRVR

SEQ ID NO: 37919 - protein, 9 aa, synthetic construct
GSPAVLKVR

SEQ ID NO: 37920 - protein, 9 aa, synthetic construct
GSPAVIHLR

SEQ ID NO: 37921 - protein, 9 aa, synthetic construct
GSPAVIHVR

SEQ ID NO: 37922 - protein, 9 aa, synthetic construct
GSPAVGRVR

SEQ ID NO: 37923 - protein, 9 aa, synthetic construct
PLPATGRVK

SEQ ID NO: 37924 - protein, 9 aa, synthetic construct
GSPAGLHVY

SEQ ID NO: 37925 - protein, 9 aa, synthetic construct
GSPAGLKVY

SEQ ID NO: 37926 - protein, 9 aa, synthetic construct
GSPAGLKVH

SEQ ID NO: 37927 - protein, 9 aa, synthetic construct
GSPAGARVH

SEQ ID NO: 37928 - protein, 9 aa, synthetic construct
PLPATGKLK

SEQ ID NO: 37929 - protein, 9 aa, synthetic construct
GSPAGAKVK

SEQ ID NO: 37930 - protein, 9 aa, synthetic construct
GANGAVHLH

SEQ ID NO: 37931 - protein, 9 aa, synthetic construct
GANGAVHVH

SEQ ID NO: 37932 - protein, 9 aa, synthetic construct
GANGAVKLF

SEQ ID NO: 37933 - protein, 9 aa, synthetic construct
GANGALHLY

SEQ ID NO: 37934 - protein, 9 aa, synthetic construct
GANGALHVY

SEQ ID NO: 37935 - protein, 9 aa, synthetic construct
GANGALHVH

SEQ ID NO: 37936 - protein, 9 aa, synthetic construct
GANGALRLH

SEQ ID NO: 37937 - protein, 9 aa, synthetic construct
GANGALKLY

SEQ ID NO: 37938 - protein, 9 aa, synthetic construct
GANGALKLR

SEQ ID NO: 37939 - protein, 9 aa, synthetic construct
GANGAAHLR

SEQ ID NO: 37940 - protein, 9 aa, synthetic construct
GANGAAHLF

SEQ ID NO: 37941 - protein, 9 aa, synthetic construct
GANGAAHVF

SEQ ID NO: 37942 - protein, 9 aa, synthetic construct
PLPASVHVH

SEQ ID NO: 37943 - protein, 9 aa, synthetic construct
PLPASVHVF

SEQ ID NO: 37944 - protein, 9 aa, synthetic construct
GANGAIHLY

SEQ ID NO: 37945 - protein, 9 aa, synthetic construct
GANGAIHVY

SEQ ID NO: 37946 - protein, 9 aa, synthetic construct
GANGAIHVH

SEQ ID NO: 37947 - protein, 9 aa, synthetic construct
GANGAIRLH

SEQ ID NO: 37948 - protein, 9 aa, synthetic construct
GANGAIRVY

SEQ ID NO: 37949 - protein, 9 aa, synthetic construct
GANGAIKLY

SEQ ID NO: 37950 - protein, 9 aa, synthetic construct
GANGAIKLF

SEQ ID NO: 37951 - protein, 9 aa, synthetic construct
GANGAGHVK

SEQ ID NO: 37952 - protein, 9 aa, synthetic construct
GANGAGRLF

SEQ ID NO: 37953 - protein, 9 aa, synthetic construct
GANGAGRVF

SEQ ID NO: 37954 - protein, 9 aa, synthetic construct
PLPASVRVY

SEQ ID NO: 37955 - protein, 9 aa, synthetic construct
GANGTVHLF

SEQ ID NO: 37956 - protein, 9 aa, synthetic construct
PLPASVRVH

SEQ ID NO: 37957 - protein, 9 aa, synthetic construct
GANGTLHLY

SEQ ID NO: 37958 - protein, 9 aa, synthetic construct
GANGTLRVY

SEQ ID NO: 37959 - protein, 9 aa, synthetic construct
GANGTIHLY

SEQ ID NO: 37960 - protein, 9 aa, synthetic construct
GANGTIHLF

SEQ ID NO: 37961 - protein, 9 aa, synthetic construct
GANGTGRLR

SEQ ID NO: 37962 - protein, 9 aa, synthetic construct
PLPASLHLR

SEQ ID NO: 37963 - protein, 9 aa, synthetic construct
GANGSVRLF

SEQ ID NO: 37964 - protein, 9 aa, synthetic construct
GANGSVKLY

SEQ ID NO: 37965 - protein, 9 aa, synthetic construct
PLPASLHLK

SEQ ID NO: 37966 - protein, 9 aa, synthetic construct
GANGSLHLK

SEQ ID NO: 37967 - protein, 9 aa, synthetic construct
GANGSLHVH

SEQ ID NO: 37968 - protein, 9 aa, synthetic construct
PLPASLHLF

SEQ ID NO: 37969 - protein, 9 aa, synthetic construct
GANGSLRLY

SEQ ID NO: 37970 - protein, 9 aa, synthetic construct
GANGSLRLF

SEQ ID NO: 37971 - protein, 9 aa, synthetic construct
GANGSLRVH

SEQ ID NO: 37972 - protein, 9 aa, synthetic construct
PLPASLHVY

SEQ ID NO: 37973 - protein, 9 aa, synthetic construct
GANGSLKVH

SEQ ID NO: 37974 - protein, 9 aa, synthetic construct
PLPASLHVH

SEQ ID NO: 37975 - protein, 9 aa, synthetic construct
GANGSARLF

SEQ ID NO: 37976 - protein, 9 aa, synthetic construct
GANGSAKLY

SEQ ID NO: 37977 - protein, 9 aa, synthetic construct
GANGSAKVH

SEQ ID NO: 37978 - protein, 9 aa, synthetic construct
GANGSIKVY

SEQ ID NO: 37979 - protein, 9 aa, synthetic construct
GANGSIKVF

SEQ ID NO: 37980 - protein, 9 aa, synthetic construct
GANGSGHLY

SEQ ID NO: 37981 - protein, 9 aa, synthetic construct
GANGSGHLR

SEQ ID NO: 37982 - protein, 9 aa, synthetic construct
GANGSGHLH

SEQ ID NO: 37983 - protein, 9 aa, synthetic construct
GANGSGHLK

SEQ ID NO: 37984 - protein, 9 aa, synthetic construct
GANGSGRVH

SEQ ID NO: 37985 - protein, 9 aa, synthetic construct
GANGSGRVF

SEQ ID NO: 37986 - protein, 9 aa, synthetic construct
GANGSGKVH

SEQ ID NO: 37987 - protein, 9 aa, synthetic construct
GANGSGKVK

SEQ ID NO: 37988 - protein, 9 aa, synthetic construct
GANGVVHLK

SEQ ID NO: 37989 - protein, 9 aa, synthetic construct
GANGVVHVK

SEQ ID NO: 37990 - protein, 9 aa, synthetic construct
GANGVVRLY

SEQ ID NO: 37991 - protein, 9 aa, synthetic construct
GANGVVRLH

SEQ ID NO: 37992 - protein, 9 aa, synthetic construct
GANGVVRVY

SEQ ID NO: 37993 - protein, 9 aa, synthetic construct
GANGVVRVH

SEQ ID NO: 37994 - protein, 9 aa, synthetic construct
GANGVVKLY

SEQ ID NO: 37995 - protein, 9 aa, synthetic construct
GANGVVKVY

SEQ ID NO: 37996 - protein, 9 aa, synthetic construct
GANGVVKVF

SEQ ID NO: 37997 - protein, 9 aa, synthetic construct
GANGVLHLK

SEQ ID NO: 37998 - protein, 9 aa, synthetic construct
GANGVLRLH

SEQ ID NO: 37999 - protein, 9 aa, synthetic construct
GANGVLRVH

SEQ ID NO: 38000 - protein, 9 aa, synthetic construct
GANGVLKLR

SEQ ID NO: 38001 - protein, 9 aa, synthetic construct
GANGVLKVF

SEQ ID NO: 38002 - protein, 9 aa, synthetic construct
GANGVAHLF

SEQ ID NO: 38003 - protein, 9 aa, synthetic construct
GANGVAKVF

SEQ ID NO: 38004 - protein, 9 aa, synthetic construct
GANGVIHLR

SEQ ID NO: 38005 - protein, 9 aa, synthetic construct
GANGVIHLF

SEQ ID NO: 38006 - protein, 9 aa, synthetic construct
GANGVIHVR

SEQ ID NO: 38007 - protein, 9 aa, synthetic construct
GANGVIRLF

SEQ ID NO: 38008 - protein, 9 aa, synthetic construct
GANGVIRVY

SEQ ID NO: 38009 - protein, 9 aa, synthetic construct
GANGVIRVH

SEQ ID NO: 38010 - protein, 9 aa, synthetic construct
GANGVIKLH

SEQ ID NO: 38011 - protein, 9 aa, synthetic construct
GANGVIKVH

SEQ ID NO: 38012 - protein, 9 aa, synthetic construct
GANGVIKVF

SEQ ID NO: 38013 - protein, 9 aa, synthetic construct
GANGVGHLK

SEQ ID NO: 38014 - protein, 9 aa, synthetic construct
GANGVGHVK

SEQ ID NO: 38015 - protein, 9 aa, synthetic construct
GANGVGKVR

SEQ ID NO: 38016 - protein, 9 aa, synthetic construct
GANGVGKVH

SEQ ID NO: 38017 - protein, 9 aa, synthetic construct
GANGGVHLH

SEQ ID NO: 38018 - protein, 9 aa, synthetic construct
GANGGVRLY

SEQ ID NO: 38019 - protein, 9 aa, synthetic construct
GANGGVRLH

SEQ ID NO: 38020 - protein, 9 aa, synthetic construct
GANGGVRLF

SEQ ID NO: 38021 - protein, 9 aa, synthetic construct
GANGGVKLH

SEQ ID NO: 38022 - protein, 9 aa, synthetic construct
GANGGLHLF

SEQ ID NO: 38023 - protein, 9 aa, synthetic construct
GANGGLHVH

SEQ ID NO: 38024 - protein, 9 aa, synthetic construct
GANGGLRLF

SEQ ID NO: 38025 - protein, 9 aa, synthetic construct
GANGGLKLY

SEQ ID NO: 38026 - protein, 9 aa, synthetic construct
GANGGLKLH

SEQ ID NO: 38027 - protein, 9 aa, synthetic construct
GANGGLKLF

SEQ ID NO: 38028 - protein, 9 aa, synthetic construct
GANGGLKVH

SEQ ID NO: 38029 - protein, 9 aa, synthetic construct
GANGGLKVF

SEQ ID NO: 38030 - protein, 9 aa, synthetic construct
GANGGAHLR

SEQ ID NO: 38031 - protein, 9 aa, synthetic construct
GANGGAHLK

SEQ ID NO: 38032 - protein, 9 aa, synthetic construct
GANGGAHLF

SEQ ID NO: 38033 - protein, 9 aa, synthetic construct
GANGGAHVY

SEQ ID NO: 38034 - protein, 9 aa, synthetic construct
GANGGAHVR

SEQ ID NO: 38035 - protein, 9 aa, synthetic construct
GANGGARLY

SEQ ID NO: 38036 - protein, 9 aa, synthetic construct
GANGGARLF

SEQ ID NO: 38037 - protein, 9 aa, synthetic construct
GANGGAKLY

SEQ ID NO: 38038 - protein, 9 aa, synthetic construct
GANGGAKLF

SEQ ID NO: 38039 - protein, 9 aa, synthetic construct
GANGGAKVH

SEQ ID NO: 38040 - protein, 9 aa, synthetic construct
GANGGAKVF

SEQ ID NO: 38041 - protein, 9 aa, synthetic construct
GANGGIHLY

SEQ ID NO: 38042 - protein, 9 aa, synthetic construct
GANGGIHVH

SEQ ID NO: 38043 - protein, 9 aa, synthetic construct
GANGGIHVF

SEQ ID NO: 38044 - protein, 9 aa, synthetic construct
GANGGIRVY

SEQ ID NO: 38045 - protein, 9 aa, synthetic construct
GANGGIRVF

SEQ ID NO: 38046 - protein, 9 aa, synthetic construct
GANGGIKLF

SEQ ID NO: 38047 - protein, 9 aa, synthetic construct
GANGGIKVY

SEQ ID NO: 38048 - protein, 9 aa, synthetic construct
GANGGIKVH

SEQ ID NO: 38049 - protein, 9 aa, synthetic construct
GANGGIKVF

SEQ ID NO: 38050 - protein, 9 aa, synthetic construct
GANGGGHLK

SEQ ID NO: 38051 - protein, 9 aa, synthetic construct
GANGGGHVY

SEQ ID NO: 38052 - protein, 9 aa, synthetic construct
GANGGGHVR

SEQ ID NO: 38053 - protein, 9 aa, synthetic construct
GANGGGHVH

SEQ ID NO: 38054 - protein, 9 aa, synthetic construct
GANGGGHVK

SEQ ID NO: 38055 - protein, 9 aa, synthetic construct
GANGGGHVF

SEQ ID NO: 38056 - protein, 9 aa, synthetic construct
PLPASARLK

SEQ ID NO: 38057 - protein, 9 aa, synthetic construct
GANGGGRLH

SEQ ID NO: 38058 - protein, 9 aa, synthetic construct
GANGGGRLK

SEQ ID NO: 38059 - protein, 9 aa, synthetic construct
GANGGGKVK

SEQ ID NO: 38060 - protein, 9 aa, synthetic construct
GANAAVHLR

SEQ ID NO: 38061 - protein, 9 aa, synthetic construct
GANAAVKLR

SEQ ID NO: 38062 - protein, 9 aa, synthetic construct
GANAAVKLK

SEQ ID NO: 38063 - protein, 9 aa, synthetic construct
GANAALRLH

SEQ ID NO: 38064 - protein, 9 aa, synthetic construct
PLNGSIKLK

SEQ ID NO: 38065 - protein, 9 aa, synthetic construct
GANAALKLY

SEQ ID NO: 38066 - protein, 9 aa, synthetic construct
GANAALKLR

SEQ ID NO: 38067 - protein, 9 aa, synthetic construct
GANAALKLH

SEQ ID NO: 38068 - protein, 9 aa, synthetic construct
GANAALKLK

SEQ ID NO: 38069 - protein, 9 aa, synthetic construct
GANAALKLF

SEQ ID NO: 38070 - protein, 9 aa, synthetic construct
GANAAAHLF

SEQ ID NO: 38071 - protein, 9 aa, synthetic construct
GANAAAHVR

SEQ ID NO: 38072 - protein, 9 aa, synthetic construct
GANAAAHVF

SEQ ID NO: 38073 - protein, 9 aa, synthetic construct
PLPASAKLK

SEQ ID NO: 38074 - protein, 9 aa, synthetic construct
GANAAAKVK

SEQ ID NO: 38075 - protein, 9 aa, synthetic construct
GANAAIHLF

SEQ ID NO: 38076 - protein, 9 aa, synthetic construct
GANAAIRVY

SEQ ID NO: 38077 - protein, 9 aa, synthetic construct
GANAAIRVF

SEQ ID NO: 38078 - protein, 9 aa, synthetic construct
GANAAIKLH

SEQ ID NO: 38079 - protein, 9 aa, synthetic construct
PLPASAKVK

SEQ ID NO: 38080 - protein, 9 aa, synthetic construct
GANATVHLY

SEQ ID NO: 38081 - protein, 9 aa, synthetic construct
GANATVRVY

SEQ ID NO: 38082 - protein, 9 aa, synthetic construct
GANATLHLF

SEQ ID NO: 38083 - protein, 9 aa, synthetic construct
GANATLHVR

SEQ ID NO: 38084 - protein, 9 aa, synthetic construct
GANATLHVH

SEQ ID NO: 38085 - protein, 9 aa, synthetic construct
PLPASIHLF

SEQ ID NO: 38086 - protein, 9 aa, synthetic construct
PLPASIHVY

SEQ ID NO: 38087 - protein, 9 aa, synthetic construct
GANATLKLY

SEQ ID NO: 38088 - protein, 9 aa, synthetic construct
GANATLKLF

SEQ ID NO: 38089 - protein, 9 aa, synthetic construct
GANATAHLR

SEQ ID NO: 38090 - protein, 9 aa, synthetic construct
GANATARLH

SEQ ID NO: 38091 - protein, 9 aa, synthetic construct
GANATARVH

SEQ ID NO: 38092 - protein, 9 aa, synthetic construct
PLPASIHVF

SEQ ID NO: 38093 - protein, 9 aa, synthetic construct
GANATIHLH

SEQ ID NO: 38094 - protein, 9 aa, synthetic construct
PLNGSIKVY

SEQ ID NO: 38095 - protein, 9 aa, synthetic construct
GANATIKVH

SEQ ID NO: 38096 - protein, 9 aa, synthetic construct
GANATIKVF

SEQ ID NO: 38097 - protein, 9 aa, synthetic construct
GANATGRVH

SEQ ID NO: 38098 - protein, 9 aa, synthetic construct
GANASVHLH

SEQ ID NO: 38099 - protein, 9 aa, synthetic construct
GANASVHVY

SEQ ID NO: 38100 - protein, 9 aa, synthetic construct
GANASVRVF

SEQ ID NO: 38101 - protein, 9 aa, synthetic construct
GANASVKLY

SEQ ID NO: 38102 - protein, 9 aa, synthetic construct
GANASLKLR

SEQ ID NO: 38103 - protein, 9 aa, synthetic construct
GANASARLH

SEQ ID NO: 38104 - protein, 9 aa, synthetic construct
GANASAKLH

SEQ ID NO: 38105 - protein, 9 aa, synthetic construct
PLPASIKVK

SEQ ID NO: 38106 - protein, 9 aa, synthetic construct
GANAVVHLK

SEQ ID NO: 38107 - protein, 9 aa, synthetic construct
GANAVVRLY

SEQ ID NO: 38108 - protein, 9 aa, synthetic construct
GANAVVRLF

SEQ ID NO: 38109 - protein, 9 aa, synthetic construct
GANAVVKLF

SEQ ID NO: 38110 - protein, 9 aa, synthetic construct
GANAVLKLF

SEQ ID NO: 38111 - protein, 9 aa, synthetic construct
GANAVLKVF

SEQ ID NO: 38112 - protein, 9 aa, synthetic construct
GANAVAKLY

SEQ ID NO: 38113 - protein, 9 aa, synthetic construct
GANAVIHLH

SEQ ID NO: 38114 - protein, 9 aa, synthetic construct
GANAVIRLY

SEQ ID NO: 38115 - protein, 9 aa, synthetic construct
GANAVIRLH

SEQ ID NO: 38116 - protein, 9 aa, synthetic construct
GANAVIRLK

SEQ ID NO: 38117 - protein, 9 aa, synthetic construct
GANAVIRLF

SEQ ID NO: 38118 - protein, 9 aa, synthetic construct
GANAVIRVF

SEQ ID NO: 38119 - protein, 9 aa, synthetic construct
GANAVIKLF

SEQ ID NO: 38120 - protein, 9 aa, synthetic construct
GANAVIKVH

SEQ ID NO: 38121 - protein, 9 aa, synthetic construct
GANAVGKLY

SEQ ID NO: 38122 - protein, 9 aa, synthetic construct
GANAGLKLF

SEQ ID NO: 38123 - protein, 9 aa, synthetic construct
GANAGLKVH

SEQ ID NO: 38124 - protein, 9 aa, synthetic construct
GANAGARVY

SEQ ID NO: 38125 - protein, 9 aa, synthetic construct
GANAGGRLH

SEQ ID NO: 38126 - protein, 9 aa, synthetic construct
GANAGGRVY

SEQ ID NO: 38127 - protein, 9 aa, synthetic construct
GANAGGKLY

SEQ ID NO: 38128 - protein, 9 aa, synthetic construct
GANAGGKLH

SEQ ID NO: 38129 - protein, 9 aa, synthetic construct
GANAGGKVY

SEQ ID NO: 38130 - protein, 9 aa, synthetic construct
GAQGAVHLY

SEQ ID NO: 38131 - protein, 9 aa, synthetic construct
GAQGAVRLF

SEQ ID NO: 38132 - protein, 9 aa, synthetic construct
GAQGAVKLH

SEQ ID NO: 38133 - protein, 9 aa, synthetic construct
GAQGALRLY

SEQ ID NO: 38134 - protein, 9 aa, synthetic construct
GAQGAAHVH

SEQ ID NO: 38135 - protein, 9 aa, synthetic construct
GAQGAAKLK

SEQ ID NO: 38136 - protein, 9 aa, synthetic construct
GAQGAAKLF

SEQ ID NO: 38137 - protein, 9 aa, synthetic construct
GAQGAIHVK

SEQ ID NO: 38138 - protein, 9 aa, synthetic construct
GAQGAIRVF

SEQ ID NO: 38139 - protein, 9 aa, synthetic construct
GAQGAGHLF

SEQ ID NO: 38140 - protein, 9 aa, synthetic construct
GAQGTVRVH

SEQ ID NO: 38141 - protein, 9 aa, synthetic construct
GAQGTLRLF

SEQ ID NO: 38142 - protein, 9 aa, synthetic construct
GAQGTLKLH

SEQ ID NO: 38143 - protein, 9 aa, synthetic construct
GAQGTAHVR

SEQ ID NO: 38144 - protein, 9 aa, synthetic construct
GAQGTIHLY

SEQ ID NO: 38145 - protein, 9 aa, synthetic construct
GAQGTIHVF

SEQ ID NO: 38146 - protein, 9 aa, synthetic construct
GAQGTIRLH

SEQ ID NO: 38147 - protein, 9 aa, synthetic construct
GAQGTIKVH

SEQ ID NO: 38148 - protein, 9 aa, synthetic construct
GAQGTGHVY

SEQ ID NO: 38149 - protein, 9 aa, synthetic construct
GAQGSVHLY

SEQ ID NO: 38150 - protein, 9 aa, synthetic construct
GAQGSVHLK

SEQ ID NO: 38151 - protein, 9 aa, synthetic construct
GAQGSVHVF

SEQ ID NO: 38152 - protein, 9 aa, synthetic construct
GAQGSVRLH

SEQ ID NO: 38153 - protein, 9 aa, synthetic construct
GAQGSVRLF

SEQ ID NO: 38154 - protein, 9 aa, synthetic construct
GAQGSVRVY

SEQ ID NO: 38155 - protein, 9 aa, synthetic construct
GAQGSVKVR

SEQ ID NO: 38156 - protein, 9 aa, synthetic construct
GAQGSLHLY

SEQ ID NO: 38157 - protein, 9 aa, synthetic construct
GAQGSLHLR

SEQ ID NO: 38158 - protein, 9 aa, synthetic construct
GAQGSLRVF

SEQ ID NO: 38159 - protein, 9 aa, synthetic construct
PLPAVLHVY

SEQ ID NO: 38160 - protein, 9 aa, synthetic construct
GAQGSLKLF

SEQ ID NO: 38161 - protein, 9 aa, synthetic construct
PLPAVLHVR

SEQ ID NO: 38162 - protein, 9 aa, synthetic construct
GAQGSAHLR

SEQ ID NO: 38163 - protein, 9 aa, synthetic construct
GAQGSAHVH

SEQ ID NO: 38164 - protein, 9 aa, synthetic construct
GAQGSAHVK

SEQ ID NO: 38165 - protein, 9 aa, synthetic construct
GAQGSARLK

SEQ ID NO: 38166 - protein, 9 aa, synthetic construct
GAQGSARLF

SEQ ID NO: 38167 - protein, 9 aa, synthetic construct
PLPAVLHVK

SEQ ID NO: 38168 - protein, 9 aa, synthetic construct
GAQGSAKLH

SEQ ID NO: 38169 - protein, 9 aa, synthetic construct
GAQGSIHLR

SEQ ID NO: 38170 - protein, 9 aa, synthetic construct
GAQGSIHVF

SEQ ID NO: 38171 - protein, 9 aa, synthetic construct
PLPAVLRLH

SEQ ID NO: 38172 - protein, 9 aa, synthetic construct
GAQGSGHLH

SEQ ID NO: 38173 - protein, 9 aa, synthetic construct
GAQGSGHVH

SEQ ID NO: 38174 - protein, 9 aa, synthetic construct
GAQGSGRLY

SEQ ID NO: 38175 - protein, 9 aa, synthetic construct
GAQGSGKVH

SEQ ID NO: 38176 - protein, 9 aa, synthetic construct
GAQGVLRLH

SEQ ID NO: 38177 - protein, 9 aa, synthetic construct
GAQGVLRVF

SEQ ID NO: 38178 - protein, 9 aa, synthetic construct
GAQGVLKVF

SEQ ID NO: 38179 - protein, 9 aa, synthetic construct
GAQGVIKLR

SEQ ID NO: 38180 - protein, 9 aa, synthetic construct
GAQGVIKLK

SEQ ID NO: 38181 - protein, 9 aa, synthetic construct
GAQGVIKVF

SEQ ID NO: 38182 - protein, 9 aa, synthetic construct
GAQGVGRLR

SEQ ID NO: 38183 - protein, 9 aa, synthetic construct
GAQGVGKLR

SEQ ID NO: 38184 - protein, 9 aa, synthetic construct
GAQGGLRLF

SEQ ID NO: 38185 - protein, 9 aa, synthetic construct
GAQGGLKLR

SEQ ID NO: 38186 - protein, 9 aa, synthetic construct
GAQGGAHLF

SEQ ID NO: 38187 - protein, 9 aa, synthetic construct
GAQGGIHLR

SEQ ID NO: 38188 - protein, 9 aa, synthetic construct
GAQGGIRVY

SEQ ID NO: 38189 - protein, 9 aa, synthetic construct
GAQGGIRVK

SEQ ID NO: 38190 - protein, 9 aa, synthetic construct
GAQGGIRVF

SEQ ID NO: 38191 - protein, 9 aa, synthetic construct
GAQGGIKVR

SEQ ID NO: 38192 - protein, 9 aa, synthetic construct
GAQGGIKVK

SEQ ID NO: 38193 - protein, 9 aa, synthetic construct
GAQAAVRLK

SEQ ID NO: 38194 - protein, 9 aa, synthetic construct
GAQAAVKLR

SEQ ID NO: 38195 - protein, 9 aa, synthetic construct
GAQAAVKLK

SEQ ID NO: 38196 - protein, 9 aa, synthetic construct
GAQAALHLY

SEQ ID NO: 38197 - protein, 9 aa, synthetic construct
GAQAALHLR

SEQ ID NO: 38198 - protein, 9 aa, synthetic construct
GAQAALHLH

SEQ ID NO: 38199 - protein, 9 aa, synthetic construct
GAQAALHLK

SEQ ID NO: 38200 - protein, 9 aa, synthetic construct
GAQAALHLF

SEQ ID NO: 38201 - protein, 9 aa, synthetic construct
GAQAALHVH

SEQ ID NO: 38202 - protein, 9 aa, synthetic construct
GAQAALRLY

SEQ ID NO: 38203 - protein, 9 aa, synthetic construct
GAQAALKLY

SEQ ID NO: 38204 - protein, 9 aa, synthetic construct
GAQAALKLH

SEQ ID NO: 38205 - protein, 9 aa, synthetic construct
GAQAAIRLY

SEQ ID NO: 38206 - protein, 9 aa, synthetic construct
GAQAAIRLK

SEQ ID NO: 38207 - protein, 9 aa, synthetic construct
GAQAAIRVY

SEQ ID NO: 38208 - protein, 9 aa, synthetic construct
GAQAAIRVR

SEQ ID NO: 38209 - protein, 9 aa, synthetic construct
GAQAAIKVK

SEQ ID NO: 38210 - protein, 9 aa, synthetic construct
GAQAAGKLR

SEQ ID NO: 38211 - protein, 9 aa, synthetic construct
GAQAAGKVK

SEQ ID NO: 38212 - protein, 9 aa, synthetic construct
PLPAVIHLY

SEQ ID NO: 38213 - protein, 9 aa, synthetic construct
GAQATVRVY

SEQ ID NO: 38214 - protein, 9 aa, synthetic construct
PLPAVIHLK

SEQ ID NO: 38215 - protein, 9 aa, synthetic construct
GAQATLHVY

SEQ ID NO: 38216 - protein, 9 aa, synthetic construct
GAQATLHVF

SEQ ID NO: 38217 - protein, 9 aa, synthetic construct
GAQATLRLH

SEQ ID NO: 38218 - protein, 9 aa, synthetic construct
GAQATLRVF

SEQ ID NO: 38219 - protein, 9 aa, synthetic construct
GAQATLKLK

SEQ ID NO: 38220 - protein, 9 aa, synthetic construct
GAQATLKVH

SEQ ID NO: 38221 - protein, 9 aa, synthetic construct
GAQATAHVR

SEQ ID NO: 38222 - protein, 9 aa, synthetic construct
GAQATAKLR

SEQ ID NO: 38223 - protein, 9 aa, synthetic construct
GAQATAKVK

SEQ ID NO: 38224 - protein, 9 aa, synthetic construct
GAQATIHVR

SEQ ID NO: 38225 - protein, 9 aa, synthetic construct
GAQATIHVF

SEQ ID NO: 38226 - protein, 9 aa, synthetic construct
GAQATIKLH

SEQ ID NO: 38227 - protein, 9 aa, synthetic construct
GAQATIKVH

SEQ ID NO: 38228 - protein, 9 aa, synthetic construct
PLPAVIRLH

SEQ ID NO: 38229 - protein, 9 aa, synthetic construct
GAQATGRLH

SEQ ID NO: 38230 - protein, 9 aa, synthetic construct
GAQATGRVK

SEQ ID NO: 38231 - protein, 9 aa, synthetic construct
PLPAVIRVY

SEQ ID NO: 38232 - protein, 9 aa, synthetic construct
GAQASVRLH

SEQ ID NO: 38233 - protein, 9 aa, synthetic construct
GAQASVRVH

SEQ ID NO: 38234 - protein, 9 aa, synthetic construct
GAQASLRLF

SEQ ID NO: 38235 - protein, 9 aa, synthetic construct
GAQASLKLR

SEQ ID NO: 38236 - protein, 9 aa, synthetic construct
GAQASLKLH

SEQ ID NO: 38237 - protein, 9 aa, synthetic construct
GAQASARLK

SEQ ID NO: 38238 - protein, 9 aa, synthetic construct
GAQASAKLH

SEQ ID NO: 38239 - protein, 9 aa, synthetic construct
GAQASAKVH

SEQ ID NO: 38240 - protein, 9 aa, synthetic construct
GAQASGHLK

SEQ ID NO: 38241 - protein, 9 aa, synthetic construct
GAQASGRVY

SEQ ID NO: 38242 - protein, 9 aa, synthetic construct
GAQASGKVK

SEQ ID NO: 38243 - protein, 9 aa, synthetic construct
GAQAVVHVR

SEQ ID NO: 38244 - protein, 9 aa, synthetic construct
GAQAVVKLH

SEQ ID NO: 38245 - protein, 9 aa, synthetic construct
GAQAVVKLF

SEQ ID NO: 38246 - protein, 9 aa, synthetic construct
GAQAVVKVY

SEQ ID NO: 38247 - protein, 9 aa, synthetic construct
GAQAVVKVF

SEQ ID NO: 38248 - protein, 9 aa, synthetic construct
GAQAVLHVH

SEQ ID NO: 38249 - protein, 9 aa, synthetic construct
GAQAVLKVY

SEQ ID NO: 38250 - protein, 9 aa, synthetic construct
GAQAVLKVF

SEQ ID NO: 38251 - protein, 9 aa, synthetic construct
GAQAVAHVH

SEQ ID NO: 38252 - protein, 9 aa, synthetic construct
GAQAVARLH

SEQ ID NO: 38253 - protein, 9 aa, synthetic construct
GAQAVARVF

SEQ ID NO: 38254 - protein, 9 aa, synthetic construct
GAQAVIRLK

SEQ ID NO: 38255 - protein, 9 aa, synthetic construct
GAQAVIRVK

SEQ ID NO: 38256 - protein, 9 aa, synthetic construct
GAQAVGHLF

SEQ ID NO: 38257 - protein, 9 aa, synthetic construct
GAQAVGRLH

SEQ ID NO: 38258 - protein, 9 aa, synthetic construct
GAQAVGRVY

SEQ ID NO: 38259 - protein, 9 aa, synthetic construct
GAQAVGKVH

SEQ ID NO: 38260 - protein, 9 aa, synthetic construct
GAQAVGKVK

SEQ ID NO: 38261 - protein, 9 aa, synthetic construct
GAQAGLKLF

SEQ ID NO: 38262 - protein, 9 aa, synthetic construct
GAQAGLKVH

SEQ ID NO: 38263 - protein, 9 aa, synthetic construct
GAQAGLKVF

SEQ ID NO: 38264 - protein, 9 aa, synthetic construct
GAQAGAKLH

SEQ ID NO: 38265 - protein, 9 aa, synthetic construct
GAQAGIHLF

SEQ ID NO: 38266 - protein, 9 aa, synthetic construct
GAQAGIRVF

SEQ ID NO: 38267 - protein, 9 aa, synthetic construct
GAQAGGHLF

SEQ ID NO: 38268 - protein, 9 aa, synthetic construct
GAQAGGHVF

SEQ ID NO: 38269 - protein, 9 aa, synthetic construct
GAQAGGRVY

SEQ ID NO: 38270 - protein, 9 aa, synthetic construct
GAQAGGKVF

SEQ ID NO: 38271 - protein, 9 aa, synthetic construct
GAPGAVHLK

SEQ ID NO: 38272 - protein, 9 aa, synthetic construct
GAPGALRVH

SEQ ID NO: 38273 - protein, 9 aa, synthetic construct
GAPGAAHVY

SEQ ID NO: 38274 - protein, 9 aa, synthetic construct
GAPGAARLY

SEQ ID NO: 38275 - protein, 9 aa, synthetic construct
GAPGAAKVY

SEQ ID NO: 38276 - protein, 9 aa, synthetic construct
GAPGAIKLF

SEQ ID NO: 38277 - protein, 9 aa, synthetic construct
GAPGAIKVY

SEQ ID NO: 38278 - protein, 9 aa, synthetic construct
GAPGAGHLR

SEQ ID NO: 38279 - protein, 9 aa, synthetic construct
PLPAGVRLF

SEQ ID NO: 38280 - protein, 9 aa, synthetic construct
GAPGTLRLR

SEQ ID NO: 38281 - protein, 9 aa, synthetic construct
GAPGTLKVY

SEQ ID NO: 38282 - protein, 9 aa, synthetic construct
GAPGTAKLK

SEQ ID NO: 38283 - protein, 9 aa, synthetic construct
GAPGTGRVR

SEQ ID NO: 38284 - protein, 9 aa, synthetic construct
GAPGTGRVK

SEQ ID NO: 38285 - protein, 9 aa, synthetic construct
GAPGSVRLH

SEQ ID NO: 38286 - protein, 9 aa, synthetic construct
GAPGSVKVK

SEQ ID NO: 38287 - protein, 9 aa, synthetic construct
GAPGSLHVR

SEQ ID NO: 38288 - protein, 9 aa, synthetic construct
GAPGSAHLR

SEQ ID NO: 38289 - protein, 9 aa, synthetic construct
GAPGSAHVK

SEQ ID NO: 38290 - protein, 9 aa, synthetic construct
GAPGSARLH

SEQ ID NO: 38291 - protein, 9 aa, synthetic construct
GAPGSAKVY

SEQ ID NO: 38292 - protein, 9 aa, synthetic construct
GAPGSAKVH

SEQ ID NO: 38293 - protein, 9 aa, synthetic construct
GAPGSIKVY

SEQ ID NO: 38294 - protein, 9 aa, synthetic construct
GAPGSGHLH

SEQ ID NO: 38295 - protein, 9 aa, synthetic construct
GAPGSGHVY

SEQ ID NO: 38296 - protein, 9 aa, synthetic construct
GAPGSGHVH

SEQ ID NO: 38297 - protein, 9 aa, synthetic construct
GAPGSGHVK

SEQ ID NO: 38298 - protein, 9 aa, synthetic construct
GAPGVLHVY

SEQ ID NO: 38299 - protein, 9 aa, synthetic construct
GAPGVLHVR

SEQ ID NO: 38300 - protein, 9 aa, synthetic construct
GAPGVLHVF

SEQ ID NO: 38301 - protein, 9 aa, synthetic construct
GAPGVLKLR

SEQ ID NO: 38302 - protein, 9 aa, synthetic construct
PLPAGLKVY

SEQ ID NO: 38303 - protein, 9 aa, synthetic construct
GAPGVIRLF

SEQ ID NO: 38304 - protein, 9 aa, synthetic construct
GAPGVIRVK

SEQ ID NO: 38305 - protein, 9 aa, synthetic construct
PLPAGLKVH

SEQ ID NO: 38306 - protein, 9 aa, synthetic construct
GAPGGVRLY

SEQ ID NO: 38307 - protein, 9 aa, synthetic construct
GAPGGLKLY

SEQ ID NO: 38308 - protein, 9 aa, synthetic construct
GAPGGGHVR

SEQ ID NO: 38309 - protein, 9 aa, synthetic construct
GAPGGGRLK

SEQ ID NO: 38310 - protein, 9 aa, synthetic construct
GAPAAVRVK

SEQ ID NO: 38311 - protein, 9 aa, synthetic construct
GAPAAVKLR

SEQ ID NO: 38312 - protein, 9 aa, synthetic construct
GAPAAVKLK

SEQ ID NO: 38313 - protein, 9 aa, synthetic construct
GAPAALRVY

SEQ ID NO: 38314 - protein, 9 aa, synthetic construct
GAPAALRVH

SEQ ID NO: 38315 - protein, 9 aa, synthetic construct
GAPAALRVF

SEQ ID NO: 38316 - protein, 9 aa, synthetic construct
GAPAALKLR

SEQ ID NO: 38317 - protein, 9 aa, synthetic construct
GAPAALKVH

SEQ ID NO: 38318 - protein, 9 aa, synthetic construct
GAPAAARLR

SEQ ID NO: 38319 - protein, 9 aa, synthetic construct
GAPAAARLK

SEQ ID NO: 38320 - protein, 9 aa, synthetic construct
GAPAAARVK

SEQ ID NO: 38321 - protein, 9 aa, synthetic construct
GAPAAAKLK

SEQ ID NO: 38322 - protein, 9 aa, synthetic construct
GAPAAIRLK

SEQ ID NO: 38323 - protein, 9 aa, synthetic construct
GAPATARLH

SEQ ID NO: 38324 - protein, 9 aa, synthetic construct
GAPATAKLR

SEQ ID NO: 38325 - protein, 9 aa, synthetic construct
GAPATIHVH

SEQ ID NO: 38326 - protein, 9 aa, synthetic construct
GAPATGRVH

SEQ ID NO: 38327 - protein, 9 aa, synthetic construct
GAPASVHVR

SEQ ID NO: 38328 - protein, 9 aa, synthetic construct
GAPASVRVF

SEQ ID NO: 38329 - protein, 9 aa, synthetic construct
GAPASLHLH

SEQ ID NO: 38330 - protein, 9 aa, synthetic construct
GAPASLHVY

SEQ ID NO: 38331 - protein, 9 aa, synthetic construct
GAPASAHLR

SEQ ID NO: 38332 - protein, 9 aa, synthetic construct
GAPASAHVH

SEQ ID NO: 38333 - protein, 9 aa, synthetic construct
GAPASARLY

SEQ ID NO: 38334 - protein, 9 aa, synthetic construct
GAPASARLH

SEQ ID NO: 38335 - protein, 9 aa, synthetic construct
GAPASARVR

SEQ ID NO: 38336 - protein, 9 aa, synthetic construct
GAPASAKVK

SEQ ID NO: 38337 - protein, 9 aa, synthetic construct
GAPASIHLF

SEQ ID NO: 38338 - protein, 9 aa, synthetic construct
GAPAVVHLY

SEQ ID NO: 38339 - protein, 9 aa, synthetic construct
GAPAVVHLR

SEQ ID NO: 38340 - protein, 9 aa, synthetic construct
GAPAVVHLK

SEQ ID NO: 38341 - protein, 9 aa, synthetic construct
GAPAVVHVY

SEQ ID NO: 38342 - protein, 9 aa, synthetic construct
GAPAVVHVR

SEQ ID NO: 38343 - protein, 9 aa, synthetic construct
GAPAVVRLK

SEQ ID NO: 38344 - protein, 9 aa, synthetic construct
GAPAVVKLY

SEQ ID NO: 38345 - protein, 9 aa, synthetic construct
GAPAVVKVY

SEQ ID NO: 38346 - protein, 9 aa, synthetic construct
GAPAVLHVH

SEQ ID NO: 38347 - protein, 9 aa, synthetic construct
GAPAVLHVK

SEQ ID NO: 38348 - protein, 9 aa, synthetic construct
GAPAVLRLH

SEQ ID NO: 38349 - protein, 9 aa, synthetic construct
GAPAVLRLK

SEQ ID NO: 38350 - protein, 9 aa, synthetic construct
GAPAVLRVY

SEQ ID NO: 38351 - protein, 9 aa, synthetic construct
GAPAVLRVH

SEQ ID NO: 38352 - protein, 9 aa, synthetic construct
GAPAVLRVF

SEQ ID NO: 38353 - protein, 9 aa, synthetic construct
GAPAVLKVF

SEQ ID NO: 38354 - protein, 9 aa, synthetic construct
GAPAVIRLH

SEQ ID NO: 38355 - protein, 9 aa, synthetic construct
GAPAVIRLF

SEQ ID NO: 38356 - protein, 9 aa, synthetic construct
GAPAVIKLY

SEQ ID NO: 38357 - protein, 9 aa, synthetic construct
GAPAGLKVY

SEQ ID NO: 38358 - protein, 9 aa, synthetic construct
GAPAGAHLF

SEQ ID NO: 38359 - protein, 9 aa, synthetic construct
GAPAGAHVK

SEQ ID NO: 38360 - protein, 9 aa, synthetic construct
GAPAGARLF

SEQ ID NO: 38361 - protein, 9 aa, synthetic construct
GAPAGIHLY

SEQ ID NO: 38362 - protein, 9 aa, synthetic construct
GAPAGIKLH

SEQ ID NO: 38363 - protein, 9 aa, synthetic construct
GAPAGGHLF

SEQ ID NO: 38364 - protein, 9 aa, synthetic construct
GAPAGGHVY

SEQ ID NO: 38365 - protein, 9 aa, synthetic construct
GVNGAVKLK

SEQ ID NO: 38366 - protein, 9 aa, synthetic construct
GVNGALHLH

SEQ ID NO: 38367 - protein, 9 aa, synthetic construct
GVNGALHLF

SEQ ID NO: 38368 - protein, 9 aa, synthetic construct
GVNGALHVY

SEQ ID NO: 38369 - protein, 9 aa, synthetic construct
GVNGALRVY

SEQ ID NO: 38370 - protein, 9 aa, synthetic construct
GVNGALRVF

SEQ ID NO: 38371 - protein, 9 aa, synthetic construct
GVNGALKLR

SEQ ID NO: 38372 - protein, 9 aa, synthetic construct
GVNGALKLF

SEQ ID NO: 38373 - protein, 9 aa, synthetic construct
GVNGAAHVR

SEQ ID NO: 38374 - protein, 9 aa, synthetic construct
GVNGAAKLK

SEQ ID NO: 38375 - protein, 9 aa, synthetic construct
GVNGAAKVK

SEQ ID NO: 38376 - protein, 9 aa, synthetic construct
GVNGAIHLF

SEQ ID NO: 38377 - protein, 9 aa, synthetic construct
GVNGAIRLH

SEQ ID NO: 38378 - protein, 9 aa, synthetic construct
GVNGAIKLY

SEQ ID NO: 38379 - protein, 9 aa, synthetic construct
GVNGAIKVR

SEQ ID NO: 38380 - protein, 9 aa, synthetic construct
GVNGAGRVR

SEQ ID NO: 38381 - protein, 9 aa, synthetic construct
GVNGAGKVK

SEQ ID NO: 38382 - protein, 9 aa, synthetic construct
GVNGTLHLY

SEQ ID NO: 38383 - protein, 9 aa, synthetic construct
GVNGTLHLH

SEQ ID NO: 38384 - protein, 9 aa, synthetic construct
GVNGTLHLF

SEQ ID NO: 38385 - protein, 9 aa, synthetic construct
GVNGTLHVR

SEQ ID NO: 38386 - protein, 9 aa, synthetic construct
GVNGTLRLY

SEQ ID NO: 38387 - protein, 9 aa, synthetic construct
GVNGTLRVY

SEQ ID NO: 38388 - protein, 9 aa, synthetic construct
GVNGTLRVH

SEQ ID NO: 38389 - protein, 9 aa, synthetic construct
GVNGTLKLY

SEQ ID NO: 38390 - protein, 9 aa, synthetic construct
GVNGTAHVF

SEQ ID NO: 38391 - protein, 9 aa, synthetic construct
GVNGTIRLK

SEQ ID NO: 38392 - protein, 9 aa, synthetic construct
GVNGTIKLY

SEQ ID NO: 38393 - protein, 9 aa, synthetic construct
GVNGTGRLR

SEQ ID NO: 38394 - protein, 9 aa, synthetic construct
GVNGTGRVR

SEQ ID NO: 38395 - protein, 9 aa, synthetic construct
GVNGSVHVR

SEQ ID NO: 38396 - protein, 9 aa, synthetic construct
GVNGSVRLY

SEQ ID NO: 38397 - protein, 9 aa, synthetic construct
GVNGSVRLH

SEQ ID NO: 38398 - protein, 9 aa, synthetic construct
GVNGSVRLF

SEQ ID NO: 38399 - protein, 9 aa, synthetic construct
GVNGSVRVF

SEQ ID NO: 38400 - protein, 9 aa, synthetic construct
GVNGSVKLR

SEQ ID NO: 38401 - protein, 9 aa, synthetic construct
GVNGSVKLK

SEQ ID NO: 38402 - protein, 9 aa, synthetic construct
GVNGSVKVH

SEQ ID NO: 38403 - protein, 9 aa, synthetic construct
GVNGSVKVK

SEQ ID NO: 38404 - protein, 9 aa, synthetic construct
GVNGSARLK

SEQ ID NO: 38405 - protein, 9 aa, synthetic construct
GVNGSARLF

SEQ ID NO: 38406 - protein, 9 aa, synthetic construct
GVNGSAKLH

SEQ ID NO: 38407 - protein, 9 aa, synthetic construct
GVNGSAKLK

SEQ ID NO: 38408 - protein, 9 aa, synthetic construct
GVNGSIKLK

SEQ ID NO: 38409 - protein, 9 aa, synthetic construct
GVNGSGHLR

SEQ ID NO: 38410 - protein, 9 aa, synthetic construct
GVNGSGHLK

SEQ ID NO: 38411 - protein, 9 aa, synthetic construct
GVNGSGHVR

SEQ ID NO: 38412 - protein, 9 aa, synthetic construct
GVNGSGHVH

SEQ ID NO: 38413 - protein, 9 aa, synthetic construct
GVNGSGHVK

SEQ ID NO: 38414 - protein, 9 aa, synthetic construct
GVNGSGRVY

SEQ ID NO: 38415 - protein, 9 aa, synthetic construct
GVNGSGRVH

SEQ ID NO: 38416 - protein, 9 aa, synthetic construct
GVNGSGRVF

SEQ ID NO: 38417 - protein, 9 aa, synthetic construct
GVNGSGKVH

SEQ ID NO: 38418 - protein, 9 aa, synthetic construct
PTNGALRVY

SEQ ID NO: 38419 - protein, 9 aa, synthetic construct
GVNGVVHLR

SEQ ID NO: 38420 - protein, 9 aa, synthetic construct
GVNGVVHLH

SEQ ID NO: 38421 - protein, 9 aa, synthetic construct
GVNGVVRLK

SEQ ID NO: 38422 - protein, 9 aa, synthetic construct
GVNGVVRVK

SEQ ID NO: 38423 - protein, 9 aa, synthetic construct
GVNGVLHVY

SEQ ID NO: 38424 - protein, 9 aa, synthetic construct
GVNGVLRVF

SEQ ID NO: 38425 - protein, 9 aa, synthetic construct
GVNGVARLY

SEQ ID NO: 38426 - protein, 9 aa, synthetic construct
GVNGVARLR

SEQ ID NO: 38427 - protein, 9 aa, synthetic construct
GVNGVARLF

SEQ ID NO: 38428 - protein, 9 aa, synthetic construct
GVNGVARVH

SEQ ID NO: 38429 - protein, 9 aa, synthetic construct
GVNGVIHLR

SEQ ID NO: 38430 - protein, 9 aa, synthetic construct
GVNGVIKVF

SEQ ID NO: 38431 - protein, 9 aa, synthetic construct
GVNGVGHVF

SEQ ID NO: 38432 - protein, 9 aa, synthetic construct
GVNGVGRLR

SEQ ID NO: 38433 - protein, 9 aa, synthetic construct
GVNGVGKLK

SEQ ID NO: 38434 - protein, 9 aa, synthetic construct
GVNGGVRLF

SEQ ID NO: 38435 - protein, 9 aa, synthetic construct
GVNGGVKLR

SEQ ID NO: 38436 - protein, 9 aa, synthetic construct
GVNGGVKLH

SEQ ID NO: 38437 - protein, 9 aa, synthetic construct
GVNGGLHLY

SEQ ID NO: 38438 - protein, 9 aa, synthetic construct
GVNGGLHLK

SEQ ID NO: 38439 - protein, 9 aa, synthetic construct
GVNGGLHLF

SEQ ID NO: 38440 - protein, 9 aa, synthetic construct
GVNGGLHVY

SEQ ID NO: 38441 - protein, 9 aa, synthetic construct
GVNGGLHVF

SEQ ID NO: 38442 - protein, 9 aa, synthetic construct
GVNGGLKLY

SEQ ID NO: 38443 - protein, 9 aa, synthetic construct
GVNGGLKVY

SEQ ID NO: 38444 - protein, 9 aa, synthetic construct
GVNGGLKVH

SEQ ID NO: 38445 - protein, 9 aa, synthetic construct
GVNGGGRLK

SEQ ID NO: 38446 - protein, 9 aa, synthetic construct
GVNAAVRVH

SEQ ID NO: 38447 - protein, 9 aa, synthetic construct
GVNAAVKLR

SEQ ID NO: 38448 - protein, 9 aa, synthetic construct
GVNAAVKLK

SEQ ID NO: 38449 - protein, 9 aa, synthetic construct
GVNAAVKVR

SEQ ID NO: 38450 - protein, 9 aa, synthetic construct
GVNAALRVF

SEQ ID NO: 38451 - protein, 9 aa, synthetic construct
GVNAALKLK

SEQ ID NO: 38452 - protein, 9 aa, synthetic construct
GVNAAAHVR

SEQ ID NO: 38453 - protein, 9 aa, synthetic construct
GVNAAAHVF

SEQ ID NO: 38454 - protein, 9 aa, synthetic construct
GVNAAARLY

SEQ ID NO: 38455 - protein, 9 aa, synthetic construct
GVNAAAKVK

SEQ ID NO: 38456 - protein, 9 aa, synthetic construct
GVNAAIHLR

SEQ ID NO: 38457 - protein, 9 aa, synthetic construct
GVNAAIHLF

SEQ ID NO: 38458 - protein, 9 aa, synthetic construct
GVNATVRVH

SEQ ID NO: 38459 - protein, 9 aa, synthetic construct
GVNATVKLF

SEQ ID NO: 38460 - protein, 9 aa, synthetic construct
GVNATLHLF

SEQ ID NO: 38461 - protein, 9 aa, synthetic construct
GVNATLHVY

SEQ ID NO: 38462 - protein, 9 aa, synthetic construct
GVNATLHVR

SEQ ID NO: 38463 - protein, 9 aa, synthetic construct
GVNATLHVH

SEQ ID NO: 38464 - protein, 9 aa, synthetic construct
GVNATLHVF

SEQ ID NO: 38465 - protein, 9 aa, synthetic construct
GVNATLKLH

SEQ ID NO: 38466 - protein, 9 aa, synthetic construct
GVNATIHVR

SEQ ID NO: 38467 - protein, 9 aa, synthetic construct
GVNATIHVH

SEQ ID NO: 38468 - protein, 9 aa, synthetic construct
PLNGVVRLY

SEQ ID NO: 38469 - protein, 9 aa, synthetic construct
GVNATIKVH

SEQ ID NO: 38470 - protein, 9 aa, synthetic construct
GVNATIKVK

SEQ ID NO: 38471 - protein, 9 aa, synthetic construct
GVNATGHVF

SEQ ID NO: 38472 - protein, 9 aa, synthetic construct
GVNATGRVR

SEQ ID NO: 38473 - protein, 9 aa, synthetic construct
GVNATGRVK

SEQ ID NO: 38474 - protein, 9 aa, synthetic construct
GVNATGRVF

SEQ ID NO: 38475 - protein, 9 aa, synthetic construct
GVNASVRLF

SEQ ID NO: 38476 - protein, 9 aa, synthetic construct
GVNASLRLY

SEQ ID NO: 38477 - protein, 9 aa, synthetic construct
GVNASLKLR

SEQ ID NO: 38478 - protein, 9 aa, synthetic construct
GVNASARLH

SEQ ID NO: 38479 - protein, 9 aa, synthetic construct
GVNASARLK

SEQ ID NO: 38480 - protein, 9 aa, synthetic construct
GVNASARVH

SEQ ID NO: 38481 - protein, 9 aa, synthetic construct
GVNASARVF

SEQ ID NO: 38482 - protein, 9 aa, synthetic construct
GVNASIHVK

SEQ ID NO: 38483 - protein, 9 aa, synthetic construct
GVNASIRLH

SEQ ID NO: 38484 - protein, 9 aa, synthetic construct
GVNASIRVF

SEQ ID NO: 38485 - protein, 9 aa, synthetic construct
GVNASGHVH

SEQ ID NO: 38486 - protein, 9 aa, synthetic construct
GVNASGHVK

SEQ ID NO: 38487 - protein, 9 aa, synthetic construct
GVNASGRVY

SEQ ID NO: 38488 - protein, 9 aa, synthetic construct
GVNAVVHLR

SEQ ID NO: 38489 - protein, 9 aa, synthetic construct
GVNAVVHLK

SEQ ID NO: 38490 - protein, 9 aa, synthetic construct
GVNAVVRLY

SEQ ID NO: 38491 - protein, 9 aa, synthetic construct
GVNAVVRLK

SEQ ID NO: 38492 - protein, 9 aa, synthetic construct
GVNAVVRVF

SEQ ID NO: 38493 - protein, 9 aa, synthetic construct
GVNAVVKLH

SEQ ID NO: 38494 - protein, 9 aa, synthetic construct
GVNAVVKVY

SEQ ID NO: 38495 - protein, 9 aa, synthetic construct
GVNAVVKVH

SEQ ID NO: 38496 - protein, 9 aa, synthetic construct
GVNAVLRVR

SEQ ID NO: 38497 - protein, 9 aa, synthetic construct
GVNAVLKVF

SEQ ID NO: 38498 - protein, 9 aa, synthetic construct
GVNAVAHVY

SEQ ID NO: 38499 - protein, 9 aa, synthetic construct
GVNAVIHLK

SEQ ID NO: 38500 - protein, 9 aa, synthetic construct
PLNGVVRLK

SEQ ID NO: 38501 - protein, 9 aa, synthetic construct
GVNAVIRLF

SEQ ID NO: 38502 - protein, 9 aa, synthetic construct
PTNGAGRLK

SEQ ID NO: 38503 - protein, 9 aa, synthetic construct
GVNAGLKLR

SEQ ID NO: 38504 - protein, 9 aa, synthetic construct
GVNAGLKVH

SEQ ID NO: 38505 - protein, 9 aa, synthetic construct
GVNAGARLK

SEQ ID NO: 38506 - protein, 9 aa, synthetic construct
GVNAGAKVK

SEQ ID NO: 38507 - protein, 9 aa, synthetic construct
GVNAGIRLY

SEQ ID NO: 38508 - protein, 9 aa, synthetic construct
GVNAGIRLH

SEQ ID NO: 38509 - protein, 9 aa, synthetic construct
GVNAGIRLK

SEQ ID NO: 38510 - protein, 9 aa, synthetic construct
GVNAGIRVY

SEQ ID NO: 38511 - protein, 9 aa, synthetic construct
GVNAGIRVF

SEQ ID NO: 38512 - protein, 9 aa, synthetic construct
GVNAGGHLF

SEQ ID NO: 38513 - protein, 9 aa, synthetic construct
PTNGAGKVK

SEQ ID NO: 38514 - protein, 9 aa, synthetic construct
GVNAGGKVH

SEQ ID NO: 38515 - protein, 9 aa, synthetic construct
GVQGAVHLR

SEQ ID NO: 38516 - protein, 9 aa, synthetic construct
GVQGAVRVH

SEQ ID NO: 38517 - protein, 9 aa, synthetic construct
GVQGAVRVF

SEQ ID NO: 38518 - protein, 9 aa, synthetic construct
GVQGAVKLR

SEQ ID NO: 38519 - protein, 9 aa, synthetic construct
GVQGAVKLK

SEQ ID NO: 38520 - protein, 9 aa, synthetic construct
PTNGTVHLF

SEQ ID NO: 38521 - protein, 9 aa, synthetic construct
GVQGALRLY

SEQ ID NO: 38522 - protein, 9 aa, synthetic construct
GVQGALRVH

SEQ ID NO: 38523 - protein, 9 aa, synthetic construct
GVQGALKVK

SEQ ID NO: 38524 - protein, 9 aa, synthetic construct
GVQGAAKVK

SEQ ID NO: 38525 - protein, 9 aa, synthetic construct
GVQGAIHLH

SEQ ID NO: 38526 - protein, 9 aa, synthetic construct
GVQGAIHVH

SEQ ID NO: 38527 - protein, 9 aa, synthetic construct
GVQGAIHVF

SEQ ID NO: 38528 - protein, 9 aa, synthetic construct
GVQGAIRVF

SEQ ID NO: 38529 - protein, 9 aa, synthetic construct
GVQGAGKLR

SEQ ID NO: 38530 - protein, 9 aa, synthetic construct
GVQGTVHLF

SEQ ID NO: 38531 - protein, 9 aa, synthetic construct
GVQGTVRLK

SEQ ID NO: 38532 - protein, 9 aa, synthetic construct
GVQGTVKLR

SEQ ID NO: 38533 - protein, 9 aa, synthetic construct
GVQGTVKLK

SEQ ID NO: 38534 - protein, 9 aa, synthetic construct
GVQGTVKVR

SEQ ID NO: 38535 - protein, 9 aa, synthetic construct
GVQGTVKVK

SEQ ID NO: 38536 - protein, 9 aa, synthetic construct
GVQGTLHLY

SEQ ID NO: 38537 - protein, 9 aa, synthetic construct
GVQGTLHLR

SEQ ID NO: 38538 - protein, 9 aa, synthetic construct
GVQGTLHLK

SEQ ID NO: 38539 - protein, 9 aa, synthetic construct
GVQGTLRLR

SEQ ID NO: 38540 - protein, 9 aa, synthetic construct
GVQGTLRVK

SEQ ID NO: 38541 - protein, 9 aa, synthetic construct
GVQGTLRVF

SEQ ID NO: 38542 - protein, 9 aa, synthetic construct
GVQGTLKLK

SEQ ID NO: 38543 - protein, 9 aa, synthetic construct
GVQGTLKLF

SEQ ID NO: 38544 - protein, 9 aa, synthetic construct
GVQGTAHVR

SEQ ID NO: 38545 - protein, 9 aa, synthetic construct
GVQGTARLH

SEQ ID NO: 38546 - protein, 9 aa, synthetic construct
GVQGTAKLR

SEQ ID NO: 38547 - protein, 9 aa, synthetic construct
GVQGTAKLK

SEQ ID NO: 38548 - protein, 9 aa, synthetic construct
GVQGTAKVH

SEQ ID NO: 38549 - protein, 9 aa, synthetic construct
GVQGTIHVF

SEQ ID NO: 38550 - protein, 9 aa, synthetic construct
GVQGTIRLF

SEQ ID NO: 38551 - protein, 9 aa, synthetic construct
GVQGTIKVK

SEQ ID NO: 38552 - protein, 9 aa, synthetic construct
GVQGSVKVR

SEQ ID NO: 38553 - protein, 9 aa, synthetic construct
GVQGSVKVK

SEQ ID NO: 38554 - protein, 9 aa, synthetic construct
GVQGSLHVY

SEQ ID NO: 38555 - protein, 9 aa, synthetic construct
GVQGSLHVH

SEQ ID NO: 38556 - protein, 9 aa, synthetic construct
PTNGTLHLF

SEQ ID NO: 38557 - protein, 9 aa, synthetic construct
GVQGSAHLR

SEQ ID NO: 38558 - protein, 9 aa, synthetic construct
GVQGSAKLY

SEQ ID NO: 38559 - protein, 9 aa, synthetic construct
GVQGSIHVR

SEQ ID NO: 38560 - protein, 9 aa, synthetic construct
GVQGSIKVH

SEQ ID NO: 38561 - protein, 9 aa, synthetic construct
GVQGSGKVR

SEQ ID NO: 38562 - protein, 9 aa, synthetic construct
GVQGVVHLR

SEQ ID NO: 38563 - protein, 9 aa, synthetic construct
PTNGTLRVH

SEQ ID NO: 38564 - protein, 9 aa, synthetic construct
GVQGVLRLH

SEQ ID NO: 38565 - protein, 9 aa, synthetic construct
GVQGVLKLR

SEQ ID NO: 38566 - protein, 9 aa, synthetic construct
GVQGVLKLH

SEQ ID NO: 38567 - protein, 9 aa, synthetic construct
GVQGVLKLK

SEQ ID NO: 38568 - protein, 9 aa, synthetic construct
GVQGVLKVH

SEQ ID NO: 38569 - protein, 9 aa, synthetic construct
GVQGVLKVF

SEQ ID NO: 38570 - protein, 9 aa, synthetic construct
GVQGVARVK

SEQ ID NO: 38571 - protein, 9 aa, synthetic construct
GVQGVIHLH

SEQ ID NO: 38572 - protein, 9 aa, synthetic construct
GVQGVGRLR

SEQ ID NO: 38573 - protein, 9 aa, synthetic construct
GVQGVGKLR

SEQ ID NO: 38574 - protein, 9 aa, synthetic construct
GVQGGVHLR

SEQ ID NO: 38575 - protein, 9 aa, synthetic construct
GVQGGVKLR

SEQ ID NO: 38576 - protein, 9 aa, synthetic construct
GVQGGVKVR

SEQ ID NO: 38577 - protein, 9 aa, synthetic construct
GVQGGLHVK

SEQ ID NO: 38578 - protein, 9 aa, synthetic construct
GVQGGAHLY

SEQ ID NO: 38579 - protein, 9 aa, synthetic construct
GVQGGAHLK

SEQ ID NO: 38580 - protein, 9 aa, synthetic construct
GVQGGAHVY

SEQ ID NO: 38581 - protein, 9 aa, synthetic construct
GVQGGIRVK

SEQ ID NO: 38582 - protein, 9 aa, synthetic construct
GVQAAVHLR

SEQ ID NO: 38583 - protein, 9 aa, synthetic construct
GVQAAVHLH

SEQ ID NO: 38584 - protein, 9 aa, synthetic construct
GVQAAVHLK

SEQ ID NO: 38585 - protein, 9 aa, synthetic construct
GVQAAVRLK

SEQ ID NO: 38586 - protein, 9 aa, synthetic construct
GVQAAVKLK

SEQ ID NO: 38587 - protein, 9 aa, synthetic construct
GVQAALHLY

SEQ ID NO: 38588 - protein, 9 aa, synthetic construct
GVQAALHLF

SEQ ID NO: 38589 - protein, 9 aa, synthetic construct
GVQAALRLH

SEQ ID NO: 38590 - protein, 9 aa, synthetic construct
GVQAALKVY

SEQ ID NO: 38591 - protein, 9 aa, synthetic construct
GVQAALKVH

SEQ ID NO: 38592 - protein, 9 aa, synthetic construct
GVQAAAHLR

SEQ ID NO: 38593 - protein, 9 aa, synthetic construct
GVQAAAHVR

SEQ ID NO: 38594 - protein, 9 aa, synthetic construct
GVQAAAHVF

SEQ ID NO: 38595 - protein, 9 aa, synthetic construct
GVQAAARLR

SEQ ID NO: 38596 - protein, 9 aa, synthetic construct
GVQAAARLK

SEQ ID NO: 38597 - protein, 9 aa, synthetic construct
GVQAAARVY

SEQ ID NO: 38598 - protein, 9 aa, synthetic construct
PTNGTAKLK

SEQ ID NO: 38599 - protein, 9 aa, synthetic construct
GVQAAAKLR

SEQ ID NO: 38600 - protein, 9 aa, synthetic construct
GVQAAAKLF

SEQ ID NO: 38601 - protein, 9 aa, synthetic construct
GVQAAAKVY

SEQ ID NO: 38602 - protein, 9 aa, synthetic construct
GVQAAAKVK

SEQ ID NO: 38603 - protein, 9 aa, synthetic construct
GVQAAIHLF

SEQ ID NO: 38604 - protein, 9 aa, synthetic construct
GVQAAIHVR

SEQ ID NO: 38605 - protein, 9 aa, synthetic construct
GVQAAIRVR

SEQ ID NO: 38606 - protein, 9 aa, synthetic construct
PTNGTAKVR

SEQ ID NO: 38607 - protein, 9 aa, synthetic construct
GVQAAGHLY

SEQ ID NO: 38608 - protein, 9 aa, synthetic construct
GVQAAGHVR

SEQ ID NO: 38609 - protein, 9 aa, synthetic construct
GVQAAGRLY

SEQ ID NO: 38610 - protein, 9 aa, synthetic construct
GVQAAGRLF

SEQ ID NO: 38611 - protein, 9 aa, synthetic construct
GVQAAGRVH

SEQ ID NO: 38612 - protein, 9 aa, synthetic construct
GVQAAGRVK

SEQ ID NO: 38613 - protein, 9 aa, synthetic construct
GVQATVHLF

SEQ ID NO: 38614 - protein, 9 aa, synthetic construct
GVQATVHVY

SEQ ID NO: 38615 - protein, 9 aa, synthetic construct
GVQATVHVH

SEQ ID NO: 38616 - protein, 9 aa, synthetic construct
GVQATVHVF

SEQ ID NO: 38617 - protein, 9 aa, synthetic construct
GVQATVRVY

SEQ ID NO: 38618 - protein, 9 aa, synthetic construct
GVQATLHLR

SEQ ID NO: 38619 - protein, 9 aa, synthetic construct
GVQATLHVH

SEQ ID NO: 38620 - protein, 9 aa, synthetic construct
GVQATLRVF

SEQ ID NO: 38621 - protein, 9 aa, synthetic construct
GVQATAHVY

SEQ ID NO: 38622 - protein, 9 aa, synthetic construct
GVQATAHVR

SEQ ID NO: 38623 - protein, 9 aa, synthetic construct
GVQATARLH

SEQ ID NO: 38624 - protein, 9 aa, synthetic construct
GVQATAKLR

SEQ ID NO: 38625 - protein, 9 aa, synthetic construct
GVQATIHVF

SEQ ID NO: 38626 - protein, 9 aa, synthetic construct
GVQATGHVF

SEQ ID NO: 38627 - protein, 9 aa, synthetic construct
GVQATGRLH

SEQ ID NO: 38628 - protein, 9 aa, synthetic construct
GVQATGRLF

SEQ ID NO: 38629 - protein, 9 aa, synthetic construct
GVQASVHVR

SEQ ID NO: 38630 - protein, 9 aa, synthetic construct
GVQASVHVK

SEQ ID NO: 38631 - protein, 9 aa, synthetic construct
GVQASLKLF

SEQ ID NO: 38632 - protein, 9 aa, synthetic construct
GVQASLKVK

SEQ ID NO: 38633 - protein, 9 aa, synthetic construct
GVQASAHLK

SEQ ID NO: 38634 - protein, 9 aa, synthetic construct
GVQASAHLF

SEQ ID NO: 38635 - protein, 9 aa, synthetic construct
GVQASAHVR

SEQ ID NO: 38636 - protein, 9 aa, synthetic construct
GVQASAHVH

SEQ ID NO: 38637 - protein, 9 aa, synthetic construct
GVQASAHVF

SEQ ID NO: 38638 - protein, 9 aa, synthetic construct
GVQASARVF

SEQ ID NO: 38639 - protein, 9 aa, synthetic construct
GVQASIHLR

SEQ ID NO: 38640 - protein, 9 aa, synthetic construct
PTNGTIKVR

SEQ ID NO: 38641 - protein, 9 aa, synthetic construct
GVQASIKVH

SEQ ID NO: 38642 - protein, 9 aa, synthetic construct
GVQASGHLK

SEQ ID NO: 38643 - protein, 9 aa, synthetic construct
GVQASGHVH

SEQ ID NO: 38644 - protein, 9 aa, synthetic construct
GVQASGKVF

SEQ ID NO: 38645 - protein, 9 aa, synthetic construct
GVQAVVRLY

SEQ ID NO: 38646 - protein, 9 aa, synthetic construct
GVQAVVKLY

SEQ ID NO: 38647 - protein, 9 aa, synthetic construct
GVQAVLHVH

SEQ ID NO: 38648 - protein, 9 aa, synthetic construct
GVQAVLRLK

SEQ ID NO: 38649 - protein, 9 aa, synthetic construct
GVQAVLKVY

SEQ ID NO: 38650 - protein, 9 aa, synthetic construct
GVQAVLKVF

SEQ ID NO: 38651 - protein, 9 aa, synthetic construct
GVQAVARLY

SEQ ID NO: 38652 - protein, 9 aa, synthetic construct
GVQAVARLH

SEQ ID NO: 38653 - protein, 9 aa, synthetic construct
GVQAVARLF

SEQ ID NO: 38654 - protein, 9 aa, synthetic construct
GVQAVARVY

SEQ ID NO: 38655 - protein, 9 aa, synthetic construct
GVQAVARVH

SEQ ID NO: 38656 - protein, 9 aa, synthetic construct
GVQAVARVF

SEQ ID NO: 38657 - protein, 9 aa, synthetic construct
GVQAVIHLK

SEQ ID NO: 38658 - protein, 9 aa, synthetic construct
GVQAVIRLY

SEQ ID NO: 38659 - protein, 9 aa, synthetic construct
GVQAVIRLR

SEQ ID NO: 38660 - protein, 9 aa, synthetic construct
GVQAVIRLH

SEQ ID NO: 38661 - protein, 9 aa, synthetic construct
GVQAVIRLK

SEQ ID NO: 38662 - protein, 9 aa, synthetic construct
GVQAVIRLF

SEQ ID NO: 38663 - protein, 9 aa, synthetic construct
GVQAVIRVF

SEQ ID NO: 38664 - protein, 9 aa, synthetic construct
PTNGTGRLR

SEQ ID NO: 38665 - protein, 9 aa, synthetic construct
GVQAVIKVH

SEQ ID NO: 38666 - protein, 9 aa, synthetic construct
GVQAVGKVK

SEQ ID NO: 38667 - protein, 9 aa, synthetic construct
PTNGTGRVR

SEQ ID NO: 38668 - protein, 9 aa, synthetic construct
GVQAGLRVF

SEQ ID NO: 38669 - protein, 9 aa, synthetic construct
GVQAGLKVY

SEQ ID NO: 38670 - protein, 9 aa, synthetic construct
GVQAGLKVH

SEQ ID NO: 38671 - protein, 9 aa, synthetic construct
GVQAGAHLR

SEQ ID NO: 38672 - protein, 9 aa, synthetic construct
GVQAGAHLF

SEQ ID NO: 38673 - protein, 9 aa, synthetic construct
GVQAGAHVF

SEQ ID NO: 38674 - protein, 9 aa, synthetic construct
GVQAGARLY

SEQ ID NO: 38675 - protein, 9 aa, synthetic construct
GVQAGARVY

SEQ ID NO: 38676 - protein, 9 aa, synthetic construct
GVQAGAKLH

SEQ ID NO: 38677 - protein, 9 aa, synthetic construct
GVQAGIHLY

SEQ ID NO: 38678 - protein, 9 aa, synthetic construct
GVQAGIHVF

SEQ ID NO: 38679 - protein, 9 aa, synthetic construct
GVQAGIRVF

SEQ ID NO: 38680 - protein, 9 aa, synthetic construct
GVQAGIKLK

SEQ ID NO: 38681 - protein, 9 aa, synthetic construct
GVQAGIKLF

SEQ ID NO: 38682 - protein, 9 aa, synthetic construct
GVQAGGHLH

SEQ ID NO: 38683 - protein, 9 aa, synthetic construct
GVQAGGHLF

SEQ ID NO: 38684 - protein, 9 aa, synthetic construct
GVQAGGHVY

SEQ ID NO: 38685 - protein, 9 aa, synthetic construct
GVQAGGKLY

SEQ ID NO: 38686 - protein, 9 aa, synthetic construct
GVQAGGKLH

SEQ ID NO: 38687 - protein, 9 aa, synthetic construct
GVQAGGKLF

SEQ ID NO: 38688 - protein, 9 aa, synthetic construct
GVQAGGKVY

SEQ ID NO: 38689 - protein, 9 aa, synthetic construct
GVQAGGKVF

SEQ ID NO: 38690 - protein, 9 aa, synthetic construct
GVPGAVRLF

SEQ ID NO: 38691 - protein, 9 aa, synthetic construct
GVPGAVKLR

SEQ ID NO: 38692 - protein, 9 aa, synthetic construct
GVPGAVKLK

SEQ ID NO: 38693 - protein, 9 aa, synthetic construct
GVPGAVKVK

SEQ ID NO: 38694 - protein, 9 aa, synthetic construct
GVPGALHLY

SEQ ID NO: 38695 - protein, 9 aa, synthetic construct
GVPGALHLF

SEQ ID NO: 38696 - protein, 9 aa, synthetic construct
GVPGALHVF

SEQ ID NO: 38697 - protein, 9 aa, synthetic construct
GVPGALRLY

SEQ ID NO: 38698 - protein, 9 aa, synthetic construct
GVPGALRLH

SEQ ID NO: 38699 - protein, 9 aa, synthetic construct
GVPGALRVH

SEQ ID NO: 38700 - protein, 9 aa, synthetic construct
GVPGALRVF

SEQ ID NO: 38701 - protein, 9 aa, synthetic construct
GVPGALKLR

SEQ ID NO: 38702 - protein, 9 aa, synthetic construct
GVPGAARLY

SEQ ID NO: 38703 - protein, 9 aa, synthetic construct
GVPGAARLR

SEQ ID NO: 38704 - protein, 9 aa, synthetic construct
GVPGAAKLK

SEQ ID NO: 38705 - protein, 9 aa, synthetic construct
GVPGAAKVK

SEQ ID NO: 38706 - protein, 9 aa, synthetic construct
GVPGAIRLH

SEQ ID NO: 38707 - protein, 9 aa, synthetic construct
GVPGAIRLK

SEQ ID NO: 38708 - protein, 9 aa, synthetic construct
GVPGAIRVY

SEQ ID NO: 38709 - protein, 9 aa, synthetic construct
GVPGAIKLY

SEQ ID NO: 38710 - protein, 9 aa, synthetic construct
GVPGAIKLK

SEQ ID NO: 38711 - protein, 9 aa, synthetic construct
GVPGAIKVY

SEQ ID NO: 38712 - protein, 9 aa, synthetic construct
GVPGAIKVR

SEQ ID NO: 38713 - protein, 9 aa, synthetic construct
GVPGAGRVH

SEQ ID NO: 38714 - protein, 9 aa, synthetic construct
PTNGSVRLF

SEQ ID NO: 38715 - protein, 9 aa, synthetic construct
GVPGAGKVY

SEQ ID NO: 38716 - protein, 9 aa, synthetic construct
GVPGTVHLR

SEQ ID NO: 38717 - protein, 9 aa, synthetic construct
GVPGTVHVR

SEQ ID NO: 38718 - protein, 9 aa, synthetic construct
GVPGTVRVR

SEQ ID NO: 38719 - protein, 9 aa, synthetic construct
GVPGTVRVK

SEQ ID NO: 38720 - protein, 9 aa, synthetic construct
GVPGTVRVF

SEQ ID NO: 38721 - protein, 9 aa, synthetic construct
GVPGTVKVK

SEQ ID NO: 38722 - protein, 9 aa, synthetic construct
PTNGSVRVK

SEQ ID NO: 38723 - protein, 9 aa, synthetic construct
GVPGTLHLY

SEQ ID NO: 38724 - protein, 9 aa, synthetic construct
GVPGTLHVR

SEQ ID NO: 38725 - protein, 9 aa, synthetic construct
GVPGTLHVF

SEQ ID NO: 38726 - protein, 9 aa, synthetic construct
GVPGTLKLF

SEQ ID NO: 38727 - protein, 9 aa, synthetic construct
PTNGSVKLR

SEQ ID NO: 38728 - protein, 9 aa, synthetic construct
GVPGTARLH

SEQ ID NO: 38729 - protein, 9 aa, synthetic construct
GVPGTAKVH

SEQ ID NO: 38730 - protein, 9 aa, synthetic construct
GVPGTIRVY

SEQ ID NO: 38731 - protein, 9 aa, synthetic construct
GVPGTIRVH

SEQ ID NO: 38732 - protein, 9 aa, synthetic construct
GVPGTIKVF

SEQ ID NO: 38733 - protein, 9 aa, synthetic construct
PTNGSVKVK

SEQ ID NO: 38734 - protein, 9 aa, synthetic construct
GVPGTGRVH

SEQ ID NO: 38735 - protein, 9 aa, synthetic construct
GVPGTGRVF

SEQ ID NO: 38736 - protein, 9 aa, synthetic construct
GVPGSVRLH

SEQ ID NO: 38737 - protein, 9 aa, synthetic construct
GVPGSVRVF

SEQ ID NO: 38738 - protein, 9 aa, synthetic construct
GVPGSVKVK

SEQ ID NO: 38739 - protein, 9 aa, synthetic construct
GVPGSLHLF

SEQ ID NO: 38740 - protein, 9 aa, synthetic construct
PTNGSLRLY

SEQ ID NO: 38741 - protein, 9 aa, synthetic construct
GVPGSGRLH

SEQ ID NO: 38742 - protein, 9 aa, synthetic construct
GVPGSGRVY

SEQ ID NO: 38743 - protein, 9 aa, synthetic construct
GVPGSGRVH

SEQ ID NO: 38744 - protein, 9 aa, synthetic construct
GVPGSGKVH

SEQ ID NO: 38745 - protein, 9 aa, synthetic construct
GVPGVVHLR

SEQ ID NO: 38746 - protein, 9 aa, synthetic construct
GVPGVVHLH

SEQ ID NO: 38747 - protein, 9 aa, synthetic construct
GVPGVVHLF

SEQ ID NO: 38748 - protein, 9 aa, synthetic construct
GVPGVVHVK

SEQ ID NO: 38749 - protein, 9 aa, synthetic construct
GVPGVVKLY

SEQ ID NO: 38750 - protein, 9 aa, synthetic construct
GVPGVVKVH

SEQ ID NO: 38751 - protein, 9 aa, synthetic construct
GVPGVVKVF

SEQ ID NO: 38752 - protein, 9 aa, synthetic construct
GVPGVLHVY

SEQ ID NO: 38753 - protein, 9 aa, synthetic construct
GVPGVAKVH

SEQ ID NO: 38754 - protein, 9 aa, synthetic construct
GVPGVIHLF

SEQ ID NO: 38755 - protein, 9 aa, synthetic construct
GVPGVIKLH

SEQ ID NO: 38756 - protein, 9 aa, synthetic construct
GVPGVIKVH

SEQ ID NO: 38757 - protein, 9 aa, synthetic construct
GVPGVIKVF

SEQ ID NO: 38758 - protein, 9 aa, synthetic construct
GVPGGVRLY

SEQ ID NO: 38759 - protein, 9 aa, synthetic construct
GVPGGVRLH

SEQ ID NO: 38760 - protein, 9 aa, synthetic construct
GVPGGVKVH

SEQ ID NO: 38761 - protein, 9 aa, synthetic construct
GVPGGAHVY

SEQ ID NO: 38762 - protein, 9 aa, synthetic construct
GVPGGARVF

SEQ ID NO: 38763 - protein, 9 aa, synthetic construct
GVPGGIHLF

SEQ ID NO: 38764 - protein, 9 aa, synthetic construct
GVPGGIRLK

SEQ ID NO: 38765 - protein, 9 aa, synthetic construct
GVPGGGHLR

SEQ ID NO: 38766 - protein, 9 aa, synthetic construct
GVPGGGHLH

SEQ ID NO: 38767 - protein, 9 aa, synthetic construct
PTNGSARLK

SEQ ID NO: 38768 - protein, 9 aa, synthetic construct
GVPGGGRLK

SEQ ID NO: 38769 - protein, 9 aa, synthetic construct
GVPGGGKVH

SEQ ID NO: 38770 - protein, 9 aa, synthetic construct
GVPAAVHLK

SEQ ID NO: 38771 - protein, 9 aa, synthetic construct
GVPAAVHLF

SEQ ID NO: 38772 - protein, 9 aa, synthetic construct
GVPAAVKLK

SEQ ID NO: 38773 - protein, 9 aa, synthetic construct
GVPAALHLY

SEQ ID NO: 38774 - protein, 9 aa, synthetic construct
GVPAALHLH

SEQ ID NO: 38775 - protein, 9 aa, synthetic construct
GVPAALHLF

SEQ ID NO: 38776 - protein, 9 aa, synthetic construct
GVPAALHVH

SEQ ID NO: 38777 - protein, 9 aa, synthetic construct
GVPAALRVH

SEQ ID NO: 38778 - protein, 9 aa, synthetic construct
GVPAAARLR

SEQ ID NO: 38779 - protein, 9 aa, synthetic construct
GVPAAARLK

SEQ ID NO: 38780 - protein, 9 aa, synthetic construct
GVPAAAKVK

SEQ ID NO: 38781 - protein, 9 aa, synthetic construct
GVPAAIRVR

SEQ ID NO: 38782 - protein, 9 aa, synthetic construct
GVPAAIRVF

SEQ ID NO: 38783 - protein, 9 aa, synthetic construct
GVPAAGKLR

SEQ ID NO: 38784 - protein, 9 aa, synthetic construct
GVPATVHLY

SEQ ID NO: 38785 - protein, 9 aa, synthetic construct
GVPATVHLF

SEQ ID NO: 38786 - protein, 9 aa, synthetic construct
GVPATVRLF

SEQ ID NO: 38787 - protein, 9 aa, synthetic construct
GVPATVKLY

SEQ ID NO: 38788 - protein, 9 aa, synthetic construct
GVPATLHLF

SEQ ID NO: 38789 - protein, 9 aa, synthetic construct
GVPATLHVR

SEQ ID NO: 38790 - protein, 9 aa, synthetic construct
GVPATARLY

SEQ ID NO: 38791 - protein, 9 aa, synthetic construct
GVPATARLH

SEQ ID NO: 38792 - protein, 9 aa, synthetic construct
GVPATARLK

SEQ ID NO: 38793 - protein, 9 aa, synthetic construct
GVPATIKVK

SEQ ID NO: 38794 - protein, 9 aa, synthetic construct
GVPATGRLH

SEQ ID NO: 38795 - protein, 9 aa, synthetic construct
GVPATGRLF

SEQ ID NO: 38796 - protein, 9 aa, synthetic construct
GVPATGRVH

SEQ ID NO: 38797 - protein, 9 aa, synthetic construct
GVPASVHLH

SEQ ID NO: 38798 - protein, 9 aa, synthetic construct
GVPASVHVK

SEQ ID NO: 38799 - protein, 9 aa, synthetic construct
GVPASVRLH

SEQ ID NO: 38800 - protein, 9 aa, synthetic construct
GVPASVRVY

SEQ ID NO: 38801 - protein, 9 aa, synthetic construct
GVPASARLH

SEQ ID NO: 38802 - protein, 9 aa, synthetic construct
GVPASARLK

SEQ ID NO: 38803 - protein, 9 aa, synthetic construct
PTNGSIKLK

SEQ ID NO: 38804 - protein, 9 aa, synthetic construct
GVPASIHLF

SEQ ID NO: 38805 - protein, 9 aa, synthetic construct
GVPASIHVY

SEQ ID NO: 38806 - protein, 9 aa, synthetic construct
GVPASIRVY

SEQ ID NO: 38807 - protein, 9 aa, synthetic construct
GVPASGHLF

SEQ ID NO: 38808 - protein, 9 aa, synthetic construct
GVPASGHVR

SEQ ID NO: 38809 - protein, 9 aa, synthetic construct
GVPASGHVK

SEQ ID NO: 38810 - protein, 9 aa, synthetic construct
GVPASGRLH

SEQ ID NO: 38811 - protein, 9 aa, synthetic construct
GVPASGRLF

SEQ ID NO: 38812 - protein, 9 aa, synthetic construct
GVPASGRVH

SEQ ID NO: 38813 - protein, 9 aa, synthetic construct
GVPASGKVK

SEQ ID NO: 38814 - protein, 9 aa, synthetic construct
PLNGVLRLH

SEQ ID NO: 38815 - protein, 9 aa, synthetic construct
GVPAVLHVK

SEQ ID NO: 38816 - protein, 9 aa, synthetic construct
GVPAVLRLK

SEQ ID NO: 38817 - protein, 9 aa, synthetic construct
GVPAVLRVH

SEQ ID NO: 38818 - protein, 9 aa, synthetic construct
GVPAVIRLY

SEQ ID NO: 38819 - protein, 9 aa, synthetic construct
GVPAVIRVK

SEQ ID NO: 38820 - protein, 9 aa, synthetic construct
GVPAGVKLH

SEQ ID NO: 38821 - protein, 9 aa, synthetic construct
GVPAGLKVY

SEQ ID NO: 38822 - protein, 9 aa, synthetic construct
GVPAGLKVF

SEQ ID NO: 38823 - protein, 9 aa, synthetic construct
GVPAGAHLF

SEQ ID NO: 38824 - protein, 9 aa, synthetic construct
GVPAGAHVH

SEQ ID NO: 38825 - protein, 9 aa, synthetic construct
GVPAGARLH

SEQ ID NO: 38826 - protein, 9 aa, synthetic construct
GVPAGIRVR

SEQ ID NO: 38827 - protein, 9 aa, synthetic construct
GVPAGIRVF

SEQ ID NO: 38828 - protein, 9 aa, synthetic construct
GVPAGIKLH

SEQ ID NO: 38829 - protein, 9 aa, synthetic construct
PTNGSGKVK

SEQ ID NO: 38830 - protein, 9 aa, synthetic construct
GVPAGGRLH

SEQ ID NO: 38831 - protein, 9 aa, synthetic construct
GVPAGGRLK

SEQ ID NO: 38832 - protein, 9 aa, synthetic construct
GVPAGGKVH

SEQ ID NO: 38833 - protein, 9 aa, synthetic construct
GINGAVHVY

SEQ ID NO: 38834 - protein, 9 aa, synthetic construct
GINGAVHVH

SEQ ID NO: 38835 - protein, 9 aa, synthetic construct
GINGAVKLK

SEQ ID NO: 38836 - protein, 9 aa, synthetic construct
GINGALHLR

SEQ ID NO: 38837 - protein, 9 aa, synthetic construct
GINGALHLF

SEQ ID NO: 38838 - protein, 9 aa, synthetic construct
GINGALHVH

SEQ ID NO: 38839 - protein, 9 aa, synthetic construct
PTNGVVHLF

SEQ ID NO: 38840 - protein, 9 aa, synthetic construct
GINGALRLH

SEQ ID NO: 38841 - protein, 9 aa, synthetic construct
GINGALRVF

SEQ ID NO: 38842 - protein, 9 aa, synthetic construct
GINGALKLK

SEQ ID NO: 38843 - protein, 9 aa, synthetic construct
GINGALKVH

SEQ ID NO: 38844 - protein, 9 aa, synthetic construct
GINGAARLR

SEQ ID NO: 38845 - protein, 9 aa, synthetic construct
GINGAARLK

SEQ ID NO: 38846 - protein, 9 aa, synthetic construct
GINGAAKVK

SEQ ID NO: 38847 - protein, 9 aa, synthetic construct
GINGAIHLY

SEQ ID NO: 38848 - protein, 9 aa, synthetic construct
GINGAIHLF

SEQ ID NO: 38849 - protein, 9 aa, synthetic construct
GINGAIHVY

SEQ ID NO: 38850 - protein, 9 aa, synthetic construct
PTNGVVRLY

SEQ ID NO: 38851 - protein, 9 aa, synthetic construct
GINGAIRLY

SEQ ID NO: 38852 - protein, 9 aa, synthetic construct
GINGAIKLY

SEQ ID NO: 38853 - protein, 9 aa, synthetic construct
GINGTVRVF

SEQ ID NO: 38854 - protein, 9 aa, synthetic construct
PTNGVVRVK

SEQ ID NO: 38855 - protein, 9 aa, synthetic construct
GINGTLHLY

SEQ ID NO: 38856 - protein, 9 aa, synthetic construct
GINGTLHLR

SEQ ID NO: 38857 - protein, 9 aa, synthetic construct
GINGTLHLF

SEQ ID NO: 38858 - protein, 9 aa, synthetic construct
GINGTLRLY

SEQ ID NO: 38859 - protein, 9 aa, synthetic construct
GINGTLRVY

SEQ ID NO: 38860 - protein, 9 aa, synthetic construct
GINGTARLH

SEQ ID NO: 38861 - protein, 9 aa, synthetic construct
GINGTARVF

SEQ ID NO: 38862 - protein, 9 aa, synthetic construct
GINGTGRLR

SEQ ID NO: 38863 - protein, 9 aa, synthetic construct
GINGTGRVY

SEQ ID NO: 38864 - protein, 9 aa, synthetic construct
GINGTGRVR

SEQ ID NO: 38865 - protein, 9 aa, synthetic construct
GINGSLHLR

SEQ ID NO: 38866 - protein, 9 aa, synthetic construct
GINGSLHVH

SEQ ID NO: 38867 - protein, 9 aa, synthetic construct
GINGSLHVK

SEQ ID NO: 38868 - protein, 9 aa, synthetic construct
PTNGVLHLF

SEQ ID NO: 38869 - protein, 9 aa, synthetic construct
GINGSLKVH

SEQ ID NO: 38870 - protein, 9 aa, synthetic construct
GINGSAHLY

SEQ ID NO: 38871 - protein, 9 aa, synthetic construct
GINGSAHLR

SEQ ID NO: 38872 - protein, 9 aa, synthetic construct
GINGSAHLK

SEQ ID NO: 38873 - protein, 9 aa, synthetic construct
GINGSAHVH

SEQ ID NO: 38874 - protein, 9 aa, synthetic construct
GINGSARLK

SEQ ID NO: 38875 - protein, 9 aa, synthetic construct
GINGSAKVK

SEQ ID NO: 38876 - protein, 9 aa, synthetic construct
PTNGVLRLY

SEQ ID NO: 38877 - protein, 9 aa, synthetic construct
GINGSIKLR

SEQ ID NO: 38878 - protein, 9 aa, synthetic construct
PTNGVLRLH

SEQ ID NO: 38879 - protein, 9 aa, synthetic construct
GINGSGHVH

SEQ ID NO: 38880 - protein, 9 aa, synthetic construct
GINGSGHVF

SEQ ID NO: 38881 - protein, 9 aa, synthetic construct
PTNGVLRLK

SEQ ID NO: 38882 - protein, 9 aa, synthetic construct
GINGSGRVY

SEQ ID NO: 38883 - protein, 9 aa, synthetic construct
GINGSGRVH

SEQ ID NO: 38884 - protein, 9 aa, synthetic construct
GINGVVHLK

SEQ ID NO: 38885 - protein, 9 aa, synthetic construct
GINGVVHVY

SEQ ID NO: 38886 - protein, 9 aa, synthetic construct
GINGVVRLH

SEQ ID NO: 38887 - protein, 9 aa, synthetic construct
GINGVVRLK

SEQ ID NO: 38888 - protein, 9 aa, synthetic construct
GINGVVRVY

SEQ ID NO: 38889 - protein, 9 aa, synthetic construct
GINGVVRVH

SEQ ID NO: 38890 - protein, 9 aa, synthetic construct
GINGVVKLY

SEQ ID NO: 38891 - protein, 9 aa, synthetic construct
GINGVVKLF

SEQ ID NO: 38892 - protein, 9 aa, synthetic construct
GINGVVKVY

SEQ ID NO: 38893 - protein, 9 aa, synthetic construct
GINGVVKVK

SEQ ID NO: 38894 - protein, 9 aa, synthetic construct
GINGVVKVF

SEQ ID NO: 38895 - protein, 9 aa, synthetic construct
GINGVLHVY

SEQ ID NO: 38896 - protein, 9 aa, synthetic construct
GINGVLRLF

SEQ ID NO: 38897 - protein, 9 aa, synthetic construct
GINGVLRVH

SEQ ID NO: 38898 - protein, 9 aa, synthetic construct
GINGVLRVF

SEQ ID NO: 38899 - protein, 9 aa, synthetic construct
GINGVLKLH

SEQ ID NO: 38900 - protein, 9 aa, synthetic construct
GINGVLKVY

SEQ ID NO: 38901 - protein, 9 aa, synthetic construct
GINGVLKVF

SEQ ID NO: 38902 - protein, 9 aa, synthetic construct
GINGVARLY

SEQ ID NO: 38903 - protein, 9 aa, synthetic construct
GINGVARLF

SEQ ID NO: 38904 - protein, 9 aa, synthetic construct
GINGVARVF

SEQ ID NO: 38905 - protein, 9 aa, synthetic construct
GINGVAKVF

SEQ ID NO: 38906 - protein, 9 aa, synthetic construct
GINGVIHLR

SEQ ID NO: 38907 - protein, 9 aa, synthetic construct
GINGVIHVR

SEQ ID NO: 38908 - protein, 9 aa, synthetic construct
GINGVIRLF

SEQ ID NO: 38909 - protein, 9 aa, synthetic construct
GINGVIKLK

SEQ ID NO: 38910 - protein, 9 aa, synthetic construct
GINGVGHLH

SEQ ID NO: 38911 - protein, 9 aa, synthetic construct
GINGVGHLK

SEQ ID NO: 38912 - protein, 9 aa, synthetic construct
GINGVGHVY

SEQ ID NO: 38913 - protein, 9 aa, synthetic construct
GINGVGHVR

SEQ ID NO: 38914 - protein, 9 aa, synthetic construct
GINGVGHVK

SEQ ID NO: 38915 - protein, 9 aa, synthetic construct
GINGVGHVF

SEQ ID NO: 38916 - protein, 9 aa, synthetic construct
GINGVGRLR

SEQ ID NO: 38917 - protein, 9 aa, synthetic construct
GINGVGRLK

SEQ ID NO: 38918 - protein, 9 aa, synthetic construct
GINGVGKLR

SEQ ID NO: 38919 - protein, 9 aa, synthetic construct
GINGVGKLH

SEQ ID NO: 38920 - protein, 9 aa, synthetic construct
GINGVGKVR

SEQ ID NO: 38921 - protein, 9 aa, synthetic construct
GINGGLKLY

SEQ ID NO: 38922 - protein, 9 aa, synthetic construct
GINAAVRVK

SEQ ID NO: 38923 - protein, 9 aa, synthetic construct
GINAAVKVR

SEQ ID NO: 38924 - protein, 9 aa, synthetic construct
GINAALHLF

SEQ ID NO: 38925 - protein, 9 aa, synthetic construct
GINAALHVH

SEQ ID NO: 38926 - protein, 9 aa, synthetic construct
GINAALRLY

SEQ ID NO: 38927 - protein, 9 aa, synthetic construct
GINAALRLF

SEQ ID NO: 38928 - protein, 9 aa, synthetic construct
GINAALKLY

SEQ ID NO: 38929 - protein, 9 aa, synthetic construct
GINAALKLR

SEQ ID NO: 38930 - protein, 9 aa, synthetic construct
GINAALKLH

SEQ ID NO: 38931 - protein, 9 aa, synthetic construct
GINAALKLK

SEQ ID NO: 38932 - protein, 9 aa, synthetic construct
GINAALKLF

SEQ ID NO: 38933 - protein, 9 aa, synthetic construct
GINAAARLR

SEQ ID NO: 38934 - protein, 9 aa, synthetic construct
GINAAAKVK

SEQ ID NO: 38935 - protein, 9 aa, synthetic construct
GINAAIRVY

SEQ ID NO: 38936 - protein, 9 aa, synthetic construct
GINATVRLF

SEQ ID NO: 38937 - protein, 9 aa, synthetic construct
GINATVRVK

SEQ ID NO: 38938 - protein, 9 aa, synthetic construct
GINATVKLK

SEQ ID NO: 38939 - protein, 9 aa, synthetic construct
GINATLHVR

SEQ ID NO: 38940 - protein, 9 aa, synthetic construct
GINATLHVH

SEQ ID NO: 38941 - protein, 9 aa, synthetic construct
GINATLHVF

SEQ ID NO: 38942 - protein, 9 aa, synthetic construct
GINATLRLH

SEQ ID NO: 38943 - protein, 9 aa, synthetic construct
GINATLKLY

SEQ ID NO: 38944 - protein, 9 aa, synthetic construct
GINATLKLH

SEQ ID NO: 38945 - protein, 9 aa, synthetic construct
GINATARLY

SEQ ID NO: 38946 - protein, 9 aa, synthetic construct
GINATAKVK

SEQ ID NO: 38947 - protein, 9 aa, synthetic construct
GINATIHLF

SEQ ID NO: 38948 - protein, 9 aa, synthetic construct
GINATIKVH

SEQ ID NO: 38949 - protein, 9 aa, synthetic construct
GINATGHVF

SEQ ID NO: 38950 - protein, 9 aa, synthetic construct
GINATGRVR

SEQ ID NO: 38951 - protein, 9 aa, synthetic construct
GINASVRVK

SEQ ID NO: 38952 - protein, 9 aa, synthetic construct
PTNGVIRVK

SEQ ID NO: 38953 - protein, 9 aa, synthetic construct
GINASAHLR

SEQ ID NO: 38954 - protein, 9 aa, synthetic construct
GINASAHLK

SEQ ID NO: 38955 - protein, 9 aa, synthetic construct
GINASARVF

SEQ ID NO: 38956 - protein, 9 aa, synthetic construct
GINASAKLH

SEQ ID NO: 38957 - protein, 9 aa, synthetic construct
GINASAKLF

SEQ ID NO: 38958 - protein, 9 aa, synthetic construct
GINASIRLY

SEQ ID NO: 38959 - protein, 9 aa, synthetic construct
GINASIRVF

SEQ ID NO: 38960 - protein, 9 aa, synthetic construct
PTNGVIKVR

SEQ ID NO: 38961 - protein, 9 aa, synthetic construct
GINASIKLR

SEQ ID NO: 38962 - protein, 9 aa, synthetic construct
GINASGHLF

SEQ ID NO: 38963 - protein, 9 aa, synthetic construct
GINASGHVH

SEQ ID NO: 38964 - protein, 9 aa, synthetic construct
GINASGRLF

SEQ ID NO: 38965 - protein, 9 aa, synthetic construct
GINASGRVY

SEQ ID NO: 38966 - protein, 9 aa, synthetic construct
PTNGVIKVF

SEQ ID NO: 38967 - protein, 9 aa, synthetic construct
GINASGKLH

SEQ ID NO: 38968 - protein, 9 aa, synthetic construct
GINAVLHVY

SEQ ID NO: 38969 - protein, 9 aa, synthetic construct
GINAVLHVK

SEQ ID NO: 38970 - protein, 9 aa, synthetic construct
GINAVLRVF

SEQ ID NO: 38971 - protein, 9 aa, synthetic construct
GINAVLKLR

SEQ ID NO: 38972 - protein, 9 aa, synthetic construct
GINAVLKVR

SEQ ID NO: 38973 - protein, 9 aa, synthetic construct
GINAVLKVH

SEQ ID NO: 38974 - protein, 9 aa, synthetic construct
GINAVAHLK

SEQ ID NO: 38975 - protein, 9 aa, synthetic construct
GINAVARVH

SEQ ID NO: 38976 - protein, 9 aa, synthetic construct
GINAVIRLF

SEQ ID NO: 38977 - protein, 9 aa, synthetic construct
GINAVIKLK

SEQ ID NO: 38978 - protein, 9 aa, synthetic construct
GINAVIKVY

SEQ ID NO: 38979 - protein, 9 aa, synthetic construct
GINAGLHLK

SEQ ID NO: 38980 - protein, 9 aa, synthetic construct
GINAGLKLF

SEQ ID NO: 38981 - protein, 9 aa, synthetic construct
GINAGLKVH

SEQ ID NO: 38982 - protein, 9 aa, synthetic construct
GINAGIRLH

SEQ ID NO: 38983 - protein, 9 aa, synthetic construct
GINAGIKLH

SEQ ID NO: 38984 - protein, 9 aa, synthetic construct
GINAGIKVH

SEQ ID NO: 38985 - protein, 9 aa, synthetic construct
PTNGVGKVK

SEQ ID NO: 38986 - protein, 9 aa, synthetic construct
GIQGAVHLR

SEQ ID NO: 38987 - protein, 9 aa, synthetic construct
GIQGAVHLK

SEQ ID NO: 38988 - protein, 9 aa, synthetic construct
GIQGAVRLK

SEQ ID NO: 38989 - protein, 9 aa, synthetic construct
GIQGAVRLF

SEQ ID NO: 38990 - protein, 9 aa, synthetic construct
GIQGAVRVH

SEQ ID NO: 38991 - protein, 9 aa, synthetic construct
GIQGAVKLR

SEQ ID NO: 38992 - protein, 9 aa, synthetic construct
GIQGAVKLH

SEQ ID NO: 38993 - protein, 9 aa, synthetic construct
GIQGAVKVH

SEQ ID NO: 38994 - protein, 9 aa, synthetic construct
GIQGALHLF

SEQ ID NO: 38995 - protein, 9 aa, synthetic construct
GIQGALKLF

SEQ ID NO: 38996 - protein, 9 aa, synthetic construct
GIQGAARLY

SEQ ID NO: 38997 - protein, 9 aa, synthetic construct
GIQGAAKLK

SEQ ID NO: 38998 - protein, 9 aa, synthetic construct
GIQGAAKVK

SEQ ID NO: 38999 - protein, 9 aa, synthetic construct
GIQGAGHVR

SEQ ID NO: 39000 - protein, 9 aa, synthetic construct
GIQGAGRVF

SEQ ID NO: 39001 - protein, 9 aa, synthetic construct
GIQGTVHLF

SEQ ID NO: 39002 - protein, 9 aa, synthetic construct
GIQGTVRVY

SEQ ID NO: 39003 - protein, 9 aa, synthetic construct
GIQGTVRVH

SEQ ID NO: 39004 - protein, 9 aa, synthetic construct
GIQGTVKVK

SEQ ID NO: 39005 - protein, 9 aa, synthetic construct
GIQGTLHLY

SEQ ID NO: 39006 - protein, 9 aa, synthetic construct
GIQGTLHLR

SEQ ID NO: 39007 - protein, 9 aa, synthetic construct
GIQGTLHLH

SEQ ID NO: 39008 - protein, 9 aa, synthetic construct
GIQGTLHLF

SEQ ID NO: 39009 - protein, 9 aa, synthetic construct
GIQGTLHVF

SEQ ID NO: 39010 - protein, 9 aa, synthetic construct
GIQGTLRVF

SEQ ID NO: 39011 - protein, 9 aa, synthetic construct
GIQGTLKLF

SEQ ID NO: 39012 - protein, 9 aa, synthetic construct
GIQGTAKLR

SEQ ID NO: 39013 - protein, 9 aa, synthetic construct
GIQGTAKLK

SEQ ID NO: 39014 - protein, 9 aa, synthetic construct
GIQGTAKVH

SEQ ID NO: 39015 - protein, 9 aa, synthetic construct
GIQGTIHLY

SEQ ID NO: 39016 - protein, 9 aa, synthetic construct
GIQGTIHVF

SEQ ID NO: 39017 - protein, 9 aa, synthetic construct
GIQGTIRLF

SEQ ID NO: 39018 - protein, 9 aa, synthetic construct
GIQGTIKLK

SEQ ID NO: 39019 - protein, 9 aa, synthetic construct
GIQGTIKVY

SEQ ID NO: 39020 - protein, 9 aa, synthetic construct
GIQGTIKVK

SEQ ID NO: 39021 - protein, 9 aa, synthetic construct
GIQGTGRLH

SEQ ID NO: 39022 - protein, 9 aa, synthetic construct
GIQGTGKLK

SEQ ID NO: 39023 - protein, 9 aa, synthetic construct
GIQGSVRLH

SEQ ID NO: 39024 - protein, 9 aa, synthetic construct
GIQGSVRLF

SEQ ID NO: 39025 - protein, 9 aa, synthetic construct
PTNGGLHLK

SEQ ID NO: 39026 - protein, 9 aa, synthetic construct
GIQGSAHVH

SEQ ID NO: 39027 - protein, 9 aa, synthetic construct
GIQGSARLF

SEQ ID NO: 39028 - protein, 9 aa, synthetic construct
GIQGSARVH

SEQ ID NO: 39029 - protein, 9 aa, synthetic construct
GIQGSIHLY

SEQ ID NO: 39030 - protein, 9 aa, synthetic construct
GIQGSIHVF

SEQ ID NO: 39031 - protein, 9 aa, synthetic construct
PTNGGLRLY

SEQ ID NO: 39032 - protein, 9 aa, synthetic construct
GIQGSGRLY

SEQ ID NO: 39033 - protein, 9 aa, synthetic construct
GIQGVVRLY

SEQ ID NO: 39034 - protein, 9 aa, synthetic construct
GIQGVVRLR

SEQ ID NO: 39035 - protein, 9 aa, synthetic construct
GIQGVVRLH

SEQ ID NO: 39036 - protein, 9 aa, synthetic construct
GIQGVVRLK

SEQ ID NO: 39037 - protein, 9 aa, synthetic construct
GIQGVVRLF

SEQ ID NO: 39038 - protein, 9 aa, synthetic construct
GIQGVVRVK

SEQ ID NO: 39039 - protein, 9 aa, synthetic construct
PTNGGLRVH

SEQ ID NO: 39040 - protein, 9 aa, synthetic construct
GIQGVLRLY

SEQ ID NO: 39041 - protein, 9 aa, synthetic construct
GIQGVLRLF

SEQ ID NO: 39042 - protein, 9 aa, synthetic construct
GIQGVLKLR

SEQ ID NO: 39043 - protein, 9 aa, synthetic construct
GIQGVLKVF

SEQ ID NO: 39044 - protein, 9 aa, synthetic construct
GIQGVAHLY

SEQ ID NO: 39045 - protein, 9 aa, synthetic construct
GIQGVARLY

SEQ ID NO: 39046 - protein, 9 aa, synthetic construct
GIQGVARLR

SEQ ID NO: 39047 - protein, 9 aa, synthetic construct
GIQGVARLH

SEQ ID NO: 39048 - protein, 9 aa, synthetic construct
GIQGVARLK

SEQ ID NO: 39049 - protein, 9 aa, synthetic construct
GIQGVARVK

SEQ ID NO: 39050 - protein, 9 aa, synthetic construct
GIQGVAKLK

SEQ ID NO: 39051 - protein, 9 aa, synthetic construct
GIQGVAKVK

SEQ ID NO: 39052 - protein, 9 aa, synthetic construct
GIQGVIRLK

SEQ ID NO: 39053 - protein, 9 aa, synthetic construct
GIQGVIKVY

SEQ ID NO: 39054 - protein, 9 aa, synthetic construct
GIQGVGHLY

SEQ ID NO: 39055 - protein, 9 aa, synthetic construct
GIQGVGHVF

SEQ ID NO: 39056 - protein, 9 aa, synthetic construct
GIQGVGRLR

SEQ ID NO: 39057 - protein, 9 aa, synthetic construct
GIQGVGKVK

SEQ ID NO: 39058 - protein, 9 aa, synthetic construct
GIQGGLHLH

SEQ ID NO: 39059 - protein, 9 aa, synthetic construct
GIQGGLHLF

SEQ ID NO: 39060 - protein, 9 aa, synthetic construct
GIQGGLKVH

SEQ ID NO: 39061 - protein, 9 aa, synthetic construct
GIQGGAKVK

SEQ ID NO: 39062 - protein, 9 aa, synthetic construct
GIQGGIRVK

SEQ ID NO: 39063 - protein, 9 aa, synthetic construct
GIQAAVRLK

SEQ ID NO: 39064 - protein, 9 aa, synthetic construct
GIQAAVKLR

SEQ ID NO: 39065 - protein, 9 aa, synthetic construct
GIQAALHVY

SEQ ID NO: 39066 - protein, 9 aa, synthetic construct
GIQAALRLH

SEQ ID NO: 39067 - protein, 9 aa, synthetic construct
GIQAALRVH

SEQ ID NO: 39068 - protein, 9 aa, synthetic construct
GIQAAARLY

SEQ ID NO: 39069 - protein, 9 aa, synthetic construct
GIQAAAKVK

SEQ ID NO: 39070 - protein, 9 aa, synthetic construct
GIQAAIHLF

SEQ ID NO: 39071 - protein, 9 aa, synthetic construct
GIQAAIRVR

SEQ ID NO: 39072 - protein, 9 aa, synthetic construct
GIQATVHVF

SEQ ID NO: 39073 - protein, 9 aa, synthetic construct
GIQATLHLR

SEQ ID NO: 39074 - protein, 9 aa, synthetic construct
GIQATLHVF

SEQ ID NO: 39075 - protein, 9 aa, synthetic construct
GIQATLKLY

SEQ ID NO: 39076 - protein, 9 aa, synthetic construct
GIQATLKVH

SEQ ID NO: 39077 - protein, 9 aa, synthetic construct
GIQATAKLR

SEQ ID NO: 39078 - protein, 9 aa, synthetic construct
GIQATIKLY

SEQ ID NO: 39079 - protein, 9 aa, synthetic construct
GIQATIKLH

SEQ ID NO: 39080 - protein, 9 aa, synthetic construct
GIQATIKVH

SEQ ID NO: 39081 - protein, 9 aa, synthetic construct
GIQATIKVF

SEQ ID NO: 39082 - protein, 9 aa, synthetic construct
GIQATGHVR

SEQ ID NO: 39083 - protein, 9 aa, synthetic construct
GIQATGHVF

SEQ ID NO: 39084 - protein, 9 aa, synthetic construct
GIQATGRLH

SEQ ID NO: 39085 - protein, 9 aa, synthetic construct
GIQATGRLF

SEQ ID NO: 39086 - protein, 9 aa, synthetic construct
GIQATGRVF

SEQ ID NO: 39087 - protein, 9 aa, synthetic construct
PTNGGIRVR

SEQ ID NO: 39088 - protein, 9 aa, synthetic construct
PTNGGIRVK

SEQ ID NO: 39089 - protein, 9 aa, synthetic construct
PLNGVARLR

SEQ ID NO: 39090 - protein, 9 aa, synthetic construct
GIQASLKLF

SEQ ID NO: 39091 - protein, 9 aa, synthetic construct
GIQASARLK

SEQ ID NO: 39092 - protein, 9 aa, synthetic construct
GIQASAKLK

SEQ ID NO: 39093 - protein, 9 aa, synthetic construct
GIQASAKVK

SEQ ID NO: 39094 - protein, 9 aa, synthetic construct
GIQASIHLY

SEQ ID NO: 39095 - protein, 9 aa, synthetic construct
GIQASIKVF

SEQ ID NO: 39096 - protein, 9 aa, synthetic construct
GIQASGHLK

SEQ ID NO: 39097 - protein, 9 aa, synthetic construct
GIQASGKVK

SEQ ID NO: 39098 - protein, 9 aa, synthetic construct
GIQAVVRLH

SEQ ID NO: 39099 - protein, 9 aa, synthetic construct
GIQAVVKLY

SEQ ID NO: 39100 - protein, 9 aa, synthetic construct
GIQAVVKVF

SEQ ID NO: 39101 - protein, 9 aa, synthetic construct
GIQAVLHVH

SEQ ID NO: 39102 - protein, 9 aa, synthetic construct
GIQAVLRLH

SEQ ID NO: 39103 - protein, 9 aa, synthetic construct
GIQAVLKVY

SEQ ID NO: 39104 - protein, 9 aa, synthetic construct
GIQAVLKVF

SEQ ID NO: 39105 - protein, 9 aa, synthetic construct
GIQAVAHLF

SEQ ID NO: 39106 - protein, 9 aa, synthetic construct
GIQAVIHLY

SEQ ID NO: 39107 - protein, 9 aa, synthetic construct
GIQAVIHLR

SEQ ID NO: 39108 - protein, 9 aa, synthetic construct
GIQAVIHLH

SEQ ID NO: 39109 - protein, 9 aa, synthetic construct
GIQAVIHLK

SEQ ID NO: 39110 - protein, 9 aa, synthetic construct
GIQAVIHVY

SEQ ID NO: 39111 - protein, 9 aa, synthetic construct
GIQAVIHVF

SEQ ID NO: 39112 - protein, 9 aa, synthetic construct
GIQAVIRLK

SEQ ID NO: 39113 - protein, 9 aa, synthetic construct
GIQAVIRVK

SEQ ID NO: 39114 - protein, 9 aa, synthetic construct
GIQAVGHVF

SEQ ID NO: 39115 - protein, 9 aa, synthetic construct
GIQAVGRVH

SEQ ID NO: 39116 - protein, 9 aa, synthetic construct
GIQAVGKLY

SEQ ID NO: 39117 - protein, 9 aa, synthetic construct
GIQAVGKVR

SEQ ID NO: 39118 - protein, 9 aa, synthetic construct
GIQAVGKVK

SEQ ID NO: 39119 - protein, 9 aa, synthetic construct
GIQAGVRLH

SEQ ID NO: 39120 - protein, 9 aa, synthetic construct
GIQAGVRVF

SEQ ID NO: 39121 - protein, 9 aa, synthetic construct
GIQAGVKLR

SEQ ID NO: 39122 - protein, 9 aa, synthetic construct
GIQAGVKVH

SEQ ID NO: 39123 - protein, 9 aa, synthetic construct
GIQAGLRVF

SEQ ID NO: 39124 - protein, 9 aa, synthetic construct
GIQAGAHLF

SEQ ID NO: 39125 - protein, 9 aa, synthetic construct
GIQAGARLY

SEQ ID NO: 39126 - protein, 9 aa, synthetic construct
GIQAGARLK

SEQ ID NO: 39127 - protein, 9 aa, synthetic construct
GIQAGARVH

SEQ ID NO: 39128 - protein, 9 aa, synthetic construct
GIQAGAKLH

SEQ ID NO: 39129 - protein, 9 aa, synthetic construct
GIQAGAKVK

SEQ ID NO: 39130 - protein, 9 aa, synthetic construct
GIQAGIKLK

SEQ ID NO: 39131 - protein, 9 aa, synthetic construct
GIQAGGHLY

SEQ ID NO: 39132 - protein, 9 aa, synthetic construct
PTNAAVHLR

SEQ ID NO: 39133 - protein, 9 aa, synthetic construct
GIPGALHLF

SEQ ID NO: 39134 - protein, 9 aa, synthetic construct
GIPGAAKLK

SEQ ID NO: 39135 - protein, 9 aa, synthetic construct
GIPGAAKVK

SEQ ID NO: 39136 - protein, 9 aa, synthetic construct
GIPGAIRLK

SEQ ID NO: 39137 - protein, 9 aa, synthetic construct
PTNAAVRLK

SEQ ID NO: 39138 - protein, 9 aa, synthetic construct
GIPGAGRVR

SEQ ID NO: 39139 - protein, 9 aa, synthetic construct
PTNAAVRVR

SEQ ID NO: 39140 - protein, 9 aa, synthetic construct
GIPGTVKVK

SEQ ID NO: 39141 - protein, 9 aa, synthetic construct
PTNAAVRVK

SEQ ID NO: 39142 - protein, 9 aa, synthetic construct
GIPGTLHLY

SEQ ID NO: 39143 - protein, 9 aa, synthetic construct
GIPGTLHLH

SEQ ID NO: 39144 - protein, 9 aa, synthetic construct
GIPGTLHLF

SEQ ID NO: 39145 - protein, 9 aa, synthetic construct
GIPGTLRVH

SEQ ID NO: 39146 - protein, 9 aa, synthetic construct
GIPGTARLH

SEQ ID NO: 39147 - protein, 9 aa, synthetic construct
GIPGTARVK

SEQ ID NO: 39148 - protein, 9 aa, synthetic construct
GIPGTAKLK

SEQ ID NO: 39149 - protein, 9 aa, synthetic construct
GIPGTAKVK

SEQ ID NO: 39150 - protein, 9 aa, synthetic construct
GIPGSVHVR

SEQ ID NO: 39151 - protein, 9 aa, synthetic construct
GIPGSVRLH

SEQ ID NO: 39152 - protein, 9 aa, synthetic construct
GIPGSVRLF

SEQ ID NO: 39153 - protein, 9 aa, synthetic construct
GIPGSVRVY

SEQ ID NO: 39154 - protein, 9 aa, synthetic construct
GIPGSVRVH

SEQ ID NO: 39155 - protein, 9 aa, synthetic construct
GIPGSVRVK

SEQ ID NO: 39156 - protein, 9 aa, synthetic construct
GIPGSVRVF

SEQ ID NO: 39157 - protein, 9 aa, synthetic construct
GIPGSVKLR

SEQ ID NO: 39158 - protein, 9 aa, synthetic construct
GIPGSVKLK

SEQ ID NO: 39159 - protein, 9 aa, synthetic construct
GIPGSVKLF

SEQ ID NO: 39160 - protein, 9 aa, synthetic construct
GIPGSVKVK

SEQ ID NO: 39161 - protein, 9 aa, synthetic construct
GIPGSLRVR

SEQ ID NO: 39162 - protein, 9 aa, synthetic construct
GIPGSLKVR

SEQ ID NO: 39163 - protein, 9 aa, synthetic construct
GIPGSGRVK

SEQ ID NO: 39164 - protein, 9 aa, synthetic construct
GIPGSGKVK

SEQ ID NO: 39165 - protein, 9 aa, synthetic construct
GIPGVVRVK

SEQ ID NO: 39166 - protein, 9 aa, synthetic construct
GIPGVLHLY

SEQ ID NO: 39167 - protein, 9 aa, synthetic construct
GIPGVLHLF

SEQ ID NO: 39168 - protein, 9 aa, synthetic construct
GIPGVLHVY

SEQ ID NO: 39169 - protein, 9 aa, synthetic construct
GIPGVLRLH

SEQ ID NO: 39170 - protein, 9 aa, synthetic construct
GIPGVLRVF

SEQ ID NO: 39171 - protein, 9 aa, synthetic construct
PLNGVAKLY

SEQ ID NO: 39172 - protein, 9 aa, synthetic construct
GIPGVAHLF

SEQ ID NO: 39173 - protein, 9 aa, synthetic construct
PTNAALKLK

SEQ ID NO: 39174 - protein, 9 aa, synthetic construct
GIPGVAKVH

SEQ ID NO: 39175 - protein, 9 aa, synthetic construct
GIPGVIHLF

SEQ ID NO: 39176 - protein, 9 aa, synthetic construct
GIPGVIKLR

SEQ ID NO: 39177 - protein, 9 aa, synthetic construct
GIPGVGRLH

SEQ ID NO: 39178 - protein, 9 aa, synthetic construct
GIPGGLRLH

SEQ ID NO: 39179 - protein, 9 aa, synthetic construct
GIPGGLRLF

SEQ ID NO: 39180 - protein, 9 aa, synthetic construct
GIPGGLKLY

SEQ ID NO: 39181 - protein, 9 aa, synthetic construct
GIPGGIRLK

SEQ ID NO: 39182 - protein, 9 aa, synthetic construct
PTNAAARLR

SEQ ID NO: 39183 - protein, 9 aa, synthetic construct
GIPAAVRVY

SEQ ID NO: 39184 - protein, 9 aa, synthetic construct
GIPAAVKLK

SEQ ID NO: 39185 - protein, 9 aa, synthetic construct
GIPAALRLF

SEQ ID NO: 39186 - protein, 9 aa, synthetic construct
GIPAALRVY

SEQ ID NO: 39187 - protein, 9 aa, synthetic construct
GIPAALRVH

SEQ ID NO: 39188 - protein, 9 aa, synthetic construct
GIPAALKVH

SEQ ID NO: 39189 - protein, 9 aa, synthetic construct
GIPAAARLK

SEQ ID NO: 39190 - protein, 9 aa, synthetic construct
GIPATLHLF

SEQ ID NO: 39191 - protein, 9 aa, synthetic construct
GIPATLHVY

SEQ ID NO: 39192 - protein, 9 aa, synthetic construct
GIPATLHVF

SEQ ID NO: 39193 - protein, 9 aa, synthetic construct
PTNAAIHLF

SEQ ID NO: 39194 - protein, 9 aa, synthetic construct
GIPATLKVR

SEQ ID NO: 39195 - protein, 9 aa, synthetic construct
GIPATIKLK

SEQ ID NO: 39196 - protein, 9 aa, synthetic construct
GIPATIKVK

SEQ ID NO: 39197 - protein, 9 aa, synthetic construct
PTNAAIRLK

SEQ ID NO: 39198 - protein, 9 aa, synthetic construct
GIPASVHLH

SEQ ID NO: 39199 - protein, 9 aa, synthetic construct
PTNAAIRVR

SEQ ID NO: 39200 - protein, 9 aa, synthetic construct
GIPASVRLF

SEQ ID NO: 39201 - protein, 9 aa, synthetic construct
GIPASVRVH

SEQ ID NO: 39202 - protein, 9 aa, synthetic construct
GIPASVKLH

SEQ ID NO: 39203 - protein, 9 aa, synthetic construct
GIPASVKVK

SEQ ID NO: 39204 - protein, 9 aa, synthetic construct
PTNAAIKLR

SEQ ID NO: 39205 - protein, 9 aa, synthetic construct
GIPASARLH

SEQ ID NO: 39206 - protein, 9 aa, synthetic construct
GIPASAKVH

SEQ ID NO: 39207 - protein, 9 aa, synthetic construct
GIPASGHLF

SEQ ID NO: 39208 - protein, 9 aa, synthetic construct
GIPASGHVR

SEQ ID NO: 39209 - protein, 9 aa, synthetic construct
GIPASGRVH

SEQ ID NO: 39210 - protein, 9 aa, synthetic construct
GIPASGKVK

SEQ ID NO: 39211 - protein, 9 aa, synthetic construct
GIPAVVRLY

SEQ ID NO: 39212 - protein, 9 aa, synthetic construct
GIPAVLHVY

SEQ ID NO: 39213 - protein, 9 aa, synthetic construct
GIPAVLKVR

SEQ ID NO: 39214 - protein, 9 aa, synthetic construct
GIPAVIHLY

SEQ ID NO: 39215 - protein, 9 aa, synthetic construct
GIPAVIHLR

SEQ ID NO: 39216 - protein, 9 aa, synthetic construct
GIPAGARLY

SEQ ID NO: 39217 - protein, 9 aa, synthetic construct
GIPAGARVH

SEQ ID NO: 39218 - protein, 9 aa, synthetic construct
GIPAGIRLH

SEQ ID NO: 39219 - protein, 9 aa, synthetic construct
PLNGASHLY

SEQ ID NO: 39220 - protein, 9 aa, synthetic construct
PLNGASHVR

SEQ ID NO: 39221 - protein, 9 aa, synthetic construct
PLNGATHVR

SEQ ID NO: 39222 - protein, 9 aa, synthetic construct
PLNGATHVK

SEQ ID NO: 39223 - protein, 9 aa, synthetic construct
PLNGATKLY

SEQ ID NO: 39224 - protein, 9 aa, synthetic construct
PLNGATKLH

SEQ ID NO: 39225 - protein, 9 aa, synthetic construct
PLNGTSHVR

SEQ ID NO: 39226 - protein, 9 aa, synthetic construct
PLNGTSHVH

SEQ ID NO: 39227 - protein, 9 aa, synthetic construct
PLNGTSHVK

SEQ ID NO: 39228 - protein, 9 aa, synthetic construct
PLNGTTHVF

SEQ ID NO: 39229 - protein, 9 aa, synthetic construct
PLNGTTRVF

SEQ ID NO: 39230 - protein, 9 aa, synthetic construct
PLNGTTKVY

SEQ ID NO: 39231 - protein, 9 aa, synthetic construct
PLNGSSHLY

SEQ ID NO: 39232 - protein, 9 aa, synthetic construct
PLNGSSHLH

SEQ ID NO: 39233 - protein, 9 aa, synthetic construct
PLNGSSHLK

SEQ ID NO: 39234 - protein, 9 aa, synthetic construct
PLNGSSHLF

SEQ ID NO: 39235 - protein, 9 aa, synthetic construct
PLNGSSHVH

SEQ ID NO: 39236 - protein, 9 aa, synthetic construct
PTNATVRLK

SEQ ID NO: 39237 - protein, 9 aa, synthetic construct
PLNGSSRLY

SEQ ID NO: 39238 - protein, 9 aa, synthetic construct
PLNGSSRVY

SEQ ID NO: 39239 - protein, 9 aa, synthetic construct
PLNGSTHVY

SEQ ID NO: 39240 - protein, 9 aa, synthetic construct
PLNGSTHVK

SEQ ID NO: 39241 - protein, 9 aa, synthetic construct
PLNGSTKVR

SEQ ID NO: 39242 - protein, 9 aa, synthetic construct
PLNGVSRLK

SEQ ID NO: 39243 - protein, 9 aa, synthetic construct
PLNGVSKLY

SEQ ID NO: 39244 - protein, 9 aa, synthetic construct
PLNGVSKLK

SEQ ID NO: 39245 - protein, 9 aa, synthetic construct
PLNGVSKVH

SEQ ID NO: 39246 - protein, 9 aa, synthetic construct
PLNGVTRLK

SEQ ID NO: 39247 - protein, 9 aa, synthetic construct
PLNGVTRVH

SEQ ID NO: 39248 - protein, 9 aa, synthetic construct
PLNGVTKLK

SEQ ID NO: 39249 - protein, 9 aa, synthetic construct
PLNGVTKVH

SEQ ID NO: 39250 - protein, 9 aa, synthetic construct
PLNGGSHLH

SEQ ID NO: 39251 - protein, 9 aa, synthetic construct
PLNGGSRLH

SEQ ID NO: 39252 - protein, 9 aa, synthetic construct
PLNGGSRVR

SEQ ID NO: 39253 - protein, 9 aa, synthetic construct
PLNGGSRVK

SEQ ID NO: 39254 - protein, 9 aa, synthetic construct
PTNATVKVR

SEQ ID NO: 39255 - protein, 9 aa, synthetic construct
PLNGGTHLF

SEQ ID NO: 39256 - protein, 9 aa, synthetic construct
PLNGGTHVY

SEQ ID NO: 39257 - protein, 9 aa, synthetic construct
PLNGGTRLY

SEQ ID NO: 39258 - protein, 9 aa, synthetic construct
PLNGGTRVY

SEQ ID NO: 39259 - protein, 9 aa, synthetic construct
PLNGGTRVR

SEQ ID NO: 39260 - protein, 9 aa, synthetic construct
PLNGGTRVF

SEQ ID NO: 39261 - protein, 9 aa, synthetic construct
PLQGASHLR

SEQ ID NO: 39262 - protein, 9 aa, synthetic construct
PLQGASHLH

SEQ ID NO: 39263 - protein, 9 aa, synthetic construct
PTNATLHLH

SEQ ID NO: 39264 - protein, 9 aa, synthetic construct
PLQGATHLR

SEQ ID NO: 39265 - protein, 9 aa, synthetic construct
PLQGATHVF

SEQ ID NO: 39266 - protein, 9 aa, synthetic construct
PTNATLHVY

SEQ ID NO: 39267 - protein, 9 aa, synthetic construct
PTNATLHVR

SEQ ID NO: 39268 - protein, 9 aa, synthetic construct
PLQGTSHLY

SEQ ID NO: 39269 - protein, 9 aa, synthetic construct
PLQGTSHLR

SEQ ID NO: 39270 - protein, 9 aa, synthetic construct
PLQGTSHLK

SEQ ID NO: 39271 - protein, 9 aa, synthetic construct
PLQGTSHLF

SEQ ID NO: 39272 - protein, 9 aa, synthetic construct
PLQGTSHVR

SEQ ID NO: 39273 - protein, 9 aa, synthetic construct
PLQGTSHVH

SEQ ID NO: 39274 - protein, 9 aa, synthetic construct
PLQGTSHVF

SEQ ID NO: 39275 - protein, 9 aa, synthetic construct
PTNATLHVF

SEQ ID NO: 39276 - protein, 9 aa, synthetic construct
PLQGTTHLF

SEQ ID NO: 39277 - protein, 9 aa, synthetic construct
PTNATLRLH

SEQ ID NO: 39278 - protein, 9 aa, synthetic construct
PLQGSSKVY

SEQ ID NO: 39279 - protein, 9 aa, synthetic construct
PLQGSSKVH

SEQ ID NO: 39280 - protein, 9 aa, synthetic construct
PLQGSTRLY

SEQ ID NO: 39281 - protein, 9 aa, synthetic construct
PLQGVSKLR

SEQ ID NO: 39282 - protein, 9 aa, synthetic construct
PLQGVSKLH

SEQ ID NO: 39283 - protein, 9 aa, synthetic construct
PLQGVSKLK

SEQ ID NO: 39284 - protein, 9 aa, synthetic construct
PLQGVTKLK

SEQ ID NO: 39285 - protein, 9 aa, synthetic construct
PLQGGSHLR

SEQ ID NO: 39286 - protein, 9 aa, synthetic construct
PLQGGSHLH

SEQ ID NO: 39287 - protein, 9 aa, synthetic construct
PLQGGSHVH

SEQ ID NO: 39288 - protein, 9 aa, synthetic construct
PLQGGTRLY

SEQ ID NO: 39289 - protein, 9 aa, synthetic construct
PTNGASHLH

SEQ ID NO: 39290 - protein, 9 aa, synthetic construct
PTNGASHVY

SEQ ID NO: 39291 - protein, 9 aa, synthetic construct
PTNGASHVF

SEQ ID NO: 39292 - protein, 9 aa, synthetic construct
PTNGASRLY

SEQ ID NO: 39293 - protein, 9 aa, synthetic construct
PTNGASRLH

SEQ ID NO: 39294 - protein, 9 aa, synthetic construct
PTNGASRVH

SEQ ID NO: 39295 - protein, 9 aa, synthetic construct
PTNGASRVF

SEQ ID NO: 39296 - protein, 9 aa, synthetic construct
PTNATAHLF

SEQ ID NO: 39297 - protein, 9 aa, synthetic construct
PTNGTTRVH

SEQ ID NO: 39298 - protein, 9 aa, synthetic construct
PTNGTTRVF

SEQ ID NO: 39299 - protein, 9 aa, synthetic construct
PTNGSSKLY

SEQ ID NO: 39300 - protein, 9 aa, synthetic construct
PTNGSSKLH

SEQ ID NO: 39301 - protein, 9 aa, synthetic construct
PTNGSSKVH

SEQ ID NO: 39302 - protein, 9 aa, synthetic construct
PTNGSTKLH

SEQ ID NO: 39303 - protein, 9 aa, synthetic construct
PTNGVSHVY

SEQ ID NO: 39304 - protein, 9 aa, synthetic construct
PTNGVSRLY

SEQ ID NO: 39305 - protein, 9 aa, synthetic construct
PTNGGSHLY

SEQ ID NO: 39306 - protein, 9 aa, synthetic construct
PTNGGSHVF

SEQ ID NO: 39307 - protein, 9 aa, synthetic construct
PTNGGTRVF

SEQ ID NO: 39308 - protein, 9 aa, synthetic construct
PTQGASKLY

SEQ ID NO: 39309 - protein, 9 aa, synthetic construct
PTQGATKLY

SEQ ID NO: 39310 - protein, 9 aa, synthetic construct
PTQGTSKVH

SEQ ID NO: 39311 - protein, 9 aa, synthetic construct
PTQGTTRVH

SEQ ID NO: 39312 - protein, 9 aa, synthetic construct
PTNATIRLR

SEQ ID NO: 39313 - protein, 9 aa, synthetic construct
PTQGSSHLY

SEQ ID NO: 39314 - protein, 9 aa, synthetic construct
PTQGSSHLF

SEQ ID NO: 39315 - protein, 9 aa, synthetic construct
PTQGSSRVR

SEQ ID NO: 39316 - protein, 9 aa, synthetic construct
PTQGSSRVK

SEQ ID NO: 39317 - protein, 9 aa, synthetic construct
PTQGSTKLH

SEQ ID NO: 39318 - protein, 9 aa, synthetic construct
PTQGVSHLY

SEQ ID NO: 39319 - protein, 9 aa, synthetic construct
PTQGVSKVF

SEQ ID NO: 39320 - protein, 9 aa, synthetic construct
PTQGVTHLY

SEQ ID NO: 39321 - protein, 9 aa, synthetic construct
PTQGVTHLH

SEQ ID NO: 39322 - protein, 9 aa, synthetic construct
PTQGVTHLF

SEQ ID NO: 39323 - protein, 9 aa, synthetic construct
PTQGVTRVH

SEQ ID NO: 39324 - protein, 9 aa, synthetic construct
PTQGGTRLY

SEQ ID NO: 39325 - protein, 9 aa, synthetic construct
PTQGGTRLH

SEQ ID NO: 39326 - protein, 9 aa, synthetic construct
PTQGGTRLK

SEQ ID NO: 39327 - protein, 9 aa, synthetic construct
PTQGGTRLF

SEQ ID NO: 39328 - protein, 9 aa, synthetic construct
PTQGGTRVY

SEQ ID NO: 39329 - protein, 9 aa, synthetic construct
PTQGGTRVF

SEQ ID NO: 39330 - protein, 9 aa, synthetic construct
PTQGGTKLH

SEQ ID NO: 39331 - protein, 9 aa, synthetic construct
PTQGGTKVH

SEQ ID NO: 39332 - protein, 9 aa, synthetic construct
PTNATGRLH

SEQ ID NO: 39333 - protein, 9 aa, synthetic construct
PTNATGRVR

SEQ ID NO: 39334 - protein, 9 aa, synthetic construct
PTNATGRVK

SEQ ID NO: 39335 - protein, 9 aa, synthetic construct
PTNATGKVK

SEQ ID NO: 39336 - protein, 9 aa, synthetic construct
PTNASVRVH

SEQ ID NO: 39337 - protein, 9 aa, synthetic construct
PTNASVRVK

SEQ ID NO: 39338 - protein, 9 aa, synthetic construct
PTNASVKLY

SEQ ID NO: 39339 - protein, 9 aa, synthetic construct
PTNASLHVH

SEQ ID NO: 39340 - protein, 9 aa, synthetic construct
PTNASARLK

SEQ ID NO: 39341 - protein, 9 aa, synthetic construct
PTNASIHLR

SEQ ID NO: 39342 - protein, 9 aa, synthetic construct
PTNASIHLH

SEQ ID NO: 39343 - protein, 9 aa, synthetic construct
PTNASIHLF

SEQ ID NO: 39344 - protein, 9 aa, synthetic construct
PTNASIKLR

SEQ ID NO: 39345 - protein, 9 aa, synthetic construct
PTNASGHLF

SEQ ID NO: 39346 - protein, 9 aa, synthetic construct
PTNASGHVY

SEQ ID NO: 39347 - protein, 9 aa, synthetic construct
PTNASGHVR

SEQ ID NO: 39348 - protein, 9 aa, synthetic construct
PTNASGHVH

SEQ ID NO: 39349 - protein, 9 aa, synthetic construct
PTNASGKVK

SEQ ID NO: 39350 - protein, 9 aa, synthetic construct
PTNAVVRLK

SEQ ID NO: 39351 - protein, 9 aa, synthetic construct
PTNAVVKLH

SEQ ID NO: 39352 - protein, 9 aa, synthetic construct
PTNAVIHLH

SEQ ID NO: 39353 - protein, 9 aa, synthetic construct
PTNAVIRLH

SEQ ID NO: 39354 - protein, 9 aa, synthetic construct
PTNAVIRLK

SEQ ID NO: 39355 - protein, 9 aa, synthetic construct
PTNAVIRLF

SEQ ID NO: 39356 - protein, 9 aa, synthetic construct
PTNAVIRVK

SEQ ID NO: 39357 - protein, 9 aa, synthetic construct
PTNAVIKLY

SEQ ID NO: 39358 - protein, 9 aa, synthetic construct
PTNAVIKLR

SEQ ID NO: 39359 - protein, 9 aa, synthetic construct
PTNAVIKLF

SEQ ID NO: 39360 - protein, 9 aa, synthetic construct
PTNAVIKVK

SEQ ID NO: 39361 - protein, 9 aa, synthetic construct
PTNAVIKVF

SEQ ID NO: 39362 - protein, 9 aa, synthetic construct
PTNAVGRVR

SEQ ID NO: 39363 - protein, 9 aa, synthetic construct
PTNAVGKVR

SEQ ID NO: 39364 - protein, 9 aa, synthetic construct
PTNAGVHLY

SEQ ID NO: 39365 - protein, 9 aa, synthetic construct
PTNAGVHLF

SEQ ID NO: 39366 - protein, 9 aa, synthetic construct
PTNAGLHLK

SEQ ID NO: 39367 - protein, 9 aa, synthetic construct
PTNAGLHVK

SEQ ID NO: 39368 - protein, 9 aa, synthetic construct
PTNAGARLK

SEQ ID NO: 39369 - protein, 9 aa, synthetic construct
PLNGVGKLK

SEQ ID NO: 39370 - protein, 9 aa, synthetic construct
PTNAGAKLK

SEQ ID NO: 39371 - protein, 9 aa, synthetic construct
PTNAGAKVK

SEQ ID NO: 39372 - protein, 9 aa, synthetic construct
PTNAGIHVH

SEQ ID NO: 39373 - protein, 9 aa, synthetic construct
PTNAGIRVY

SEQ ID NO: 39374 - protein, 9 aa, synthetic construct
PTNAGIKLK

SEQ ID NO: 39375 - protein, 9 aa, synthetic construct
PTNAGIKVR

SEQ ID NO: 39376 - protein, 9 aa, synthetic construct
PTNAGGRLH

SEQ ID NO: 39377 - protein, 9 aa, synthetic construct
PTNAGGRLK

SEQ ID NO: 39378 - protein, 9 aa, synthetic construct
PTQGAVRLK

SEQ ID NO: 39379 - protein, 9 aa, synthetic construct
PTQGALHLF

SEQ ID NO: 39380 - protein, 9 aa, synthetic construct
PTQGAAKLK

SEQ ID NO: 39381 - protein, 9 aa, synthetic construct
PTQGAAKVK

SEQ ID NO: 39382 - protein, 9 aa, synthetic construct
PLNGGVRLY

SEQ ID NO: 39383 - protein, 9 aa, synthetic construct
PTQGAIRVR

SEQ ID NO: 39384 - protein, 9 aa, synthetic construct
PTQGAIKVR

SEQ ID NO: 39385 - protein, 9 aa, synthetic construct
PTQGTVKVR

SEQ ID NO: 39386 - protein, 9 aa, synthetic construct
PTQGTLRVY

SEQ ID NO: 39387 - protein, 9 aa, synthetic construct
PLNGGVKLR

SEQ ID NO: 39388 - protein, 9 aa, synthetic construct
PTQGTARLK

SEQ ID NO: 39389 - protein, 9 aa, synthetic construct
PTQGTAKLK

SEQ ID NO: 39390 - protein, 9 aa, synthetic construct
PTQGTAKVR

SEQ ID NO: 39391 - protein, 9 aa, synthetic construct
PTQGTAKVK

SEQ ID NO: 39392 - protein, 9 aa, synthetic construct
PTQGTIKVK

SEQ ID NO: 39393 - protein, 9 aa, synthetic construct
PTQGSLHLF

SEQ ID NO: 39394 - protein, 9 aa, synthetic construct
PLNGGLHLF

SEQ ID NO: 39395 - protein, 9 aa, synthetic construct
PTQGSARLK

SEQ ID NO: 39396 - protein, 9 aa, synthetic construct
PTQGSAKVH

SEQ ID NO: 39397 - protein, 9 aa, synthetic construct
PTQGSGKVK

SEQ ID NO: 39398 - protein, 9 aa, synthetic construct
PTQGVVHLR

SEQ ID NO: 39399 - protein, 9 aa, synthetic construct
PTQGVVRLY

SEQ ID NO: 39400 - protein, 9 aa, synthetic construct
PTQGVVRVR

SEQ ID NO: 39401 - protein, 9 aa, synthetic construct
PTQGVLRVK

SEQ ID NO: 39402 - protein, 9 aa, synthetic construct
PTQGVLKLR

SEQ ID NO: 39403 - protein, 9 aa, synthetic construct
PLNGGLKLH

SEQ ID NO: 39404 - protein, 9 aa, synthetic construct
PTQGVIHLF

SEQ ID NO: 39405 - protein, 9 aa, synthetic construct
PLNGGLKVH

SEQ ID NO: 39406 - protein, 9 aa, synthetic construct
PTQGVGRLH

SEQ ID NO: 39407 - protein, 9 aa, synthetic construct
PTQGGVRLF

SEQ ID NO: 39408 - protein, 9 aa, synthetic construct
PTQGGVKLR

SEQ ID NO: 39409 - protein, 9 aa, synthetic construct
PTQGGLHLF

SEQ ID NO: 39410 - protein, 9 aa, synthetic construct
PTQGGARLK

SEQ ID NO: 39411 - protein, 9 aa, synthetic construct
PTQGGAKLK

SEQ ID NO: 39412 - protein, 9 aa, synthetic construct
PTQGGAKVK

SEQ ID NO: 39413 - protein, 9 aa, synthetic construct
PTQGGIRVY

SEQ ID NO: 39414 - protein, 9 aa, synthetic construct
PTQGGIRVK

SEQ ID NO: 39415 - protein, 9 aa, synthetic construct
PTQGGIKLK

SEQ ID NO: 39416 - protein, 9 aa, synthetic construct
PTQGGGRLH

SEQ ID NO: 39417 - protein, 9 aa, synthetic construct
PTQAAVRLK

SEQ ID NO: 39418 - protein, 9 aa, synthetic construct
PTQAAVRVR

SEQ ID NO: 39419 - protein, 9 aa, synthetic construct
PTQAAVRVK

SEQ ID NO: 39420 - protein, 9 aa, synthetic construct
PTQAAVKLR

SEQ ID NO: 39421 - protein, 9 aa, synthetic construct
PTQAAVKLK

SEQ ID NO: 39422 - protein, 9 aa, synthetic construct
PTQAALHVH

SEQ ID NO: 39423 - protein, 9 aa, synthetic construct
PTQAALRLH

SEQ ID NO: 39424 - protein, 9 aa, synthetic construct
PTQAAARLY

SEQ ID NO: 39425 - protein, 9 aa, synthetic construct
PTQAAAKLR

SEQ ID NO: 39426 - protein, 9 aa, synthetic construct
PTQAAAKVK

SEQ ID NO: 39427 - protein, 9 aa, synthetic construct
PTQAAIRVR

SEQ ID NO: 39428 - protein, 9 aa, synthetic construct
PTQAAGRVK

SEQ ID NO: 39429 - protein, 9 aa, synthetic construct
PTQAAGKLR

SEQ ID NO: 39430 - protein, 9 aa, synthetic construct
PTQAAGKLK

SEQ ID NO: 39431 - protein, 9 aa, synthetic construct
PTQATVRLF

SEQ ID NO: 39432 - protein, 9 aa, synthetic construct
PTQATVRVY

SEQ ID NO: 39433 - protein, 9 aa, synthetic construct
PTQATVKLK

SEQ ID NO: 39434 - protein, 9 aa, synthetic construct
PTQATARLK

SEQ ID NO: 39435 - protein, 9 aa, synthetic construct
PTQATAKLR

SEQ ID NO: 39436 - protein, 9 aa, synthetic construct
PTQATIKLF

SEQ ID NO: 39437 - protein, 9 aa, synthetic construct
PTQATIKVK

SEQ ID NO: 39438 - protein, 9 aa, synthetic construct
PTQATGKLR

SEQ ID NO: 39439 - protein, 9 aa, synthetic construct
PTQASLHLY

SEQ ID NO: 39440 - protein, 9 aa, synthetic construct
PTQASLHLF

SEQ ID NO: 39441 - protein, 9 aa, synthetic construct
PTQASARLK

SEQ ID NO: 39442 - protein, 9 aa, synthetic construct
PTQASAKLK

SEQ ID NO: 39443 - protein, 9 aa, synthetic construct
PTQASAKVH

SEQ ID NO: 39444 - protein, 9 aa, synthetic construct
PTQASIRLF

SEQ ID NO: 39445 - protein, 9 aa, synthetic construct
PTQASGHLK

SEQ ID NO: 39446 - protein, 9 aa, synthetic construct
PTQASGHVR

SEQ ID NO: 39447 - protein, 9 aa, synthetic construct
PLNGGIKVF

SEQ ID NO: 39448 - protein, 9 aa, synthetic construct
PTQASGKVK

SEQ ID NO: 39449 - protein, 9 aa, synthetic construct
PTQAVVHLR

SEQ ID NO: 39450 - protein, 9 aa, synthetic construct
PTQAVVRLH

SEQ ID NO: 39451 - protein, 9 aa, synthetic construct
PTQAVVRVH

SEQ ID NO: 39452 - protein, 9 aa, synthetic construct
PTQAVLRLR

SEQ ID NO: 39453 - protein, 9 aa, synthetic construct
PTQAVLRLK

SEQ ID NO: 39454 - protein, 9 aa, synthetic construct
PTQAVLRVR

SEQ ID NO: 39455 - protein, 9 aa, synthetic construct
PTQAVLRVH

SEQ ID NO: 39456 - protein, 9 aa, synthetic construct
PTQAVLRVF

SEQ ID NO: 39457 - protein, 9 aa, synthetic construct
PTQAVLKVH

SEQ ID NO: 39458 - protein, 9 aa, synthetic construct
PTQAVLKVF

SEQ ID NO: 39459 - protein, 9 aa, synthetic construct
PTQAVARVH

SEQ ID NO: 39460 - protein, 9 aa, synthetic construct
PTQAVARVF

SEQ ID NO: 39461 - protein, 9 aa, synthetic construct
PTQAVIHLH

SEQ ID NO: 39462 - protein, 9 aa, synthetic construct
PTQAVIRLK

SEQ ID NO: 39463 - protein, 9 aa, synthetic construct
PTQAVIRVK

SEQ ID NO: 39464 - protein, 9 aa, synthetic construct
PTQAVGRLH

SEQ ID NO: 39465 - protein, 9 aa, synthetic construct
PTQAVGKVK

SEQ ID NO: 39466 - protein, 9 aa, synthetic construct
PTQAGVHVR

SEQ ID NO: 39467 - protein, 9 aa, synthetic construct
PTQAGVKLR

SEQ ID NO: 39468 - protein, 9 aa, synthetic construct
PTQAGLHLY

SEQ ID NO: 39469 - protein, 9 aa, synthetic construct
PTQAGLHVY

SEQ ID NO: 39470 - protein, 9 aa, synthetic construct
PTQAGLKLF

SEQ ID NO: 39471 - protein, 9 aa, synthetic construct
PTQAGLKVY

SEQ ID NO: 39472 - protein, 9 aa, synthetic construct
PTQAGAHLF

SEQ ID NO: 39473 - protein, 9 aa, synthetic construct
PTQAGARLK

SEQ ID NO: 39474 - protein, 9 aa, synthetic construct
PTQAGIHLY

SEQ ID NO: 39475 - protein, 9 aa, synthetic construct
PTQAGIHLR

SEQ ID NO: 39476 - protein, 9 aa, synthetic construct
PTQAGIKLK

SEQ ID NO: 39477 - protein, 9 aa, synthetic construct
PTPGAVRVK

SEQ ID NO: 39478 - protein, 9 aa, synthetic construct
PTPGAVKLR

SEQ ID NO: 39479 - protein, 9 aa, synthetic construct
PTPGAVKLK

SEQ ID NO: 39480 - protein, 9 aa, synthetic construct
PTPGAVKVK

SEQ ID NO: 39481 - protein, 9 aa, synthetic construct
PTPGALHLF

SEQ ID NO: 39482 - protein, 9 aa, synthetic construct
PTPGALRLH

SEQ ID NO: 39483 - protein, 9 aa, synthetic construct
PTPGALRVH

SEQ ID NO: 39484 - protein, 9 aa, synthetic construct
PTPGAARLR

SEQ ID NO: 39485 - protein, 9 aa, synthetic construct
PTPGAAKLK

SEQ ID NO: 39486 - protein, 9 aa, synthetic construct
PTPGAIRLK

SEQ ID NO: 39487 - protein, 9 aa, synthetic construct
PTPGAIKVR

SEQ ID NO: 39488 - protein, 9 aa, synthetic construct
PTPGAGKVK

SEQ ID NO: 39489 - protein, 9 aa, synthetic construct
PLNAAVRVY

SEQ ID NO: 39490 - protein, 9 aa, synthetic construct
PLNAAVRVR

SEQ ID NO: 39491 - protein, 9 aa, synthetic construct
PLNAAVRVK

SEQ ID NO: 39492 - protein, 9 aa, synthetic construct
PTPGTLHLY

SEQ ID NO: 39493 - protein, 9 aa, synthetic construct
PTPGTLHLF

SEQ ID NO: 39494 - protein, 9 aa, synthetic construct
PTPGTLRVH

SEQ ID NO: 39495 - protein, 9 aa, synthetic construct
PLNAAVKLK

SEQ ID NO: 39496 - protein, 9 aa, synthetic construct
PTPGTAKLK

SEQ ID NO: 39497 - protein, 9 aa, synthetic construct
PLNAAVKVR

SEQ ID NO: 39498 - protein, 9 aa, synthetic construct
PTPGTIKVR

SEQ ID NO: 39499 - protein, 9 aa, synthetic construct
PTPGTGRVR

SEQ ID NO: 39500 - protein, 9 aa, synthetic construct
PTPGSVRLH

SEQ ID NO: 39501 - protein, 9 aa, synthetic construct
PTPGSVRLF

SEQ ID NO: 39502 - protein, 9 aa, synthetic construct
PLNAALHLH

SEQ ID NO: 39503 - protein, 9 aa, synthetic construct
PTPGSVKVK

SEQ ID NO: 39504 - protein, 9 aa, synthetic construct
PTPGSLHLR

SEQ ID NO: 39505 - protein, 9 aa, synthetic construct
PLNAALHLF

SEQ ID NO: 39506 - protein, 9 aa, synthetic construct
PLNAALHVR

SEQ ID NO: 39507 - protein, 9 aa, synthetic construct
PLNAALHVH

SEQ ID NO: 39508 - protein, 9 aa, synthetic construct
PLNAALRVY

SEQ ID NO: 39509 - protein, 9 aa, synthetic construct
PTPGVVRVY

SEQ ID NO: 39510 - protein, 9 aa, synthetic construct
PTPGVVKLY

SEQ ID NO: 39511 - protein, 9 aa, synthetic construct
PLNAALRVF

SEQ ID NO: 39512 - protein, 9 aa, synthetic construct
PTPGVARLR

SEQ ID NO: 39513 - protein, 9 aa, synthetic construct
PTPGVIKVF

SEQ ID NO: 39514 - protein, 9 aa, synthetic construct
PLNAALKVH

SEQ ID NO: 39515 - protein, 9 aa, synthetic construct
PTPGGVKLR

SEQ ID NO: 39516 - protein, 9 aa, synthetic construct
PTPGGVKLK

SEQ ID NO: 39517 - protein, 9 aa, synthetic construct
PTPGGVKVR

SEQ ID NO: 39518 - protein, 9 aa, synthetic construct
PLNAAARLY

SEQ ID NO: 39519 - protein, 9 aa, synthetic construct
PTPGGIRLK

SEQ ID NO: 39520 - protein, 9 aa, synthetic construct
PTPGGIRVF

SEQ ID NO: 39521 - protein, 9 aa, synthetic construct
PTPAAVRLK

SEQ ID NO: 39522 - protein, 9 aa, synthetic construct
PTPAAVRVK

SEQ ID NO: 39523 - protein, 9 aa, synthetic construct
PTPAAVKVR

SEQ ID NO: 39524 - protein, 9 aa, synthetic construct
PLNAAARVK

SEQ ID NO: 39525 - protein, 9 aa, synthetic construct
PTPAALKLR

SEQ ID NO: 39526 - protein, 9 aa, synthetic construct
PTPAAARLR

SEQ ID NO: 39527 - protein, 9 aa, synthetic construct
PLNAAAKLK

SEQ ID NO: 39528 - protein, 9 aa, synthetic construct
PTPAAAKLK

SEQ ID NO: 39529 - protein, 9 aa, synthetic construct
PTPAAIRLK

SEQ ID NO: 39530 - protein, 9 aa, synthetic construct
PLNAAAKVK

SEQ ID NO: 39531 - protein, 9 aa, synthetic construct
PTPATLHLF

SEQ ID NO: 39532 - protein, 9 aa, synthetic construct
PTPATLHVF

SEQ ID NO: 39533 - protein, 9 aa, synthetic construct
PTPATLRVH

SEQ ID NO: 39534 - protein, 9 aa, synthetic construct
PLNAAIRLH

SEQ ID NO: 39535 - protein, 9 aa, synthetic construct
PLNAAIRLK

SEQ ID NO: 39536 - protein, 9 aa, synthetic construct
PTPATGRVK

SEQ ID NO: 39537 - protein, 9 aa, synthetic construct
PTPATGKLK

SEQ ID NO: 39538 - protein, 9 aa, synthetic construct
PTPASVRVY

SEQ ID NO: 39539 - protein, 9 aa, synthetic construct
PTPASVRVH

SEQ ID NO: 39540 - protein, 9 aa, synthetic construct
PTPASLHLR

SEQ ID NO: 39541 - protein, 9 aa, synthetic construct
PTPASLHLF

SEQ ID NO: 39542 - protein, 9 aa, synthetic construct
PTPASLHVY

SEQ ID NO: 39543 - protein, 9 aa, synthetic construct
PTPASLHVH

SEQ ID NO: 39544 - protein, 9 aa, synthetic construct
PTPASLHVF

SEQ ID NO: 39545 - protein, 9 aa, synthetic construct
PLNAAIRVF

SEQ ID NO: 39546 - protein, 9 aa, synthetic construct
PTPASLKVH

SEQ ID NO: 39547 - protein, 9 aa, synthetic construct
PTPASARLH

SEQ ID NO: 39548 - protein, 9 aa, synthetic construct
PTPASARLK

SEQ ID NO: 39549 - protein, 9 aa, synthetic construct
PTPASIHLF

SEQ ID NO: 39550 - protein, 9 aa, synthetic construct
PTPASIHVF

SEQ ID NO: 39551 - protein, 9 aa, synthetic construct
PTPASIRVH

SEQ ID NO: 39552 - protein, 9 aa, synthetic construct
PTPASIKVK

SEQ ID NO: 39553 - protein, 9 aa, synthetic construct
PTPAVVHLK

SEQ ID NO: 39554 - protein, 9 aa, synthetic construct
PTPAVVHVR

SEQ ID NO: 39555 - protein, 9 aa, synthetic construct
PTPAVVRLK

SEQ ID NO: 39556 - protein, 9 aa, synthetic construct
PTPAVLHVH

SEQ ID NO: 39557 - protein, 9 aa, synthetic construct
PTPAVLHVK

SEQ ID NO: 39558 - protein, 9 aa, synthetic construct
PTPAVIHVR

SEQ ID NO: 39559 - protein, 9 aa, synthetic construct
PTPAVIKLK

SEQ ID NO: 39560 - protein, 9 aa, synthetic construct
PTPAGVHLK

SEQ ID NO: 39561 - protein, 9 aa, synthetic construct
PLNAAGRVR

SEQ ID NO: 39562 - protein, 9 aa, synthetic construct
PTPAGVKLH

SEQ ID NO: 39563 - protein, 9 aa, synthetic construct
PTPAGLRVH

SEQ ID NO: 39564 - protein, 9 aa, synthetic construct
PTPAGLKLF

SEQ ID NO: 39565 - protein, 9 aa, synthetic construct
PTPAGLKVH

SEQ ID NO: 39566 - protein, 9 aa, synthetic construct
PTPAGARLR

SEQ ID NO: 39567 - protein, 9 aa, synthetic construct
PTPAGARLK

SEQ ID NO: 39568 - protein, 9 aa, synthetic construct
PTPAGAKVK

SEQ ID NO: 39569 - protein, 9 aa, synthetic construct
PLNAAGKVR

SEQ ID NO: 39570 - protein, 9 aa, synthetic construct
PTPAGGRLK

SEQ ID NO: 39571 - protein, 9 aa, synthetic construct
PSNGAVHLF

SEQ ID NO: 39572 - protein, 9 aa, synthetic construct
PSNGAVRVF

SEQ ID NO: 39573 - protein, 9 aa, synthetic construct
PSNGAVKLR

SEQ ID NO: 39574 - protein, 9 aa, synthetic construct
PSNGAVKLK

SEQ ID NO: 39575 - protein, 9 aa, synthetic construct
PSNGALHVK

SEQ ID NO: 39576 - protein, 9 aa, synthetic construct
PSNGALHVF

SEQ ID NO: 39577 - protein, 9 aa, synthetic construct
PSNGALRVF

SEQ ID NO: 39578 - protein, 9 aa, synthetic construct
PSNGALKLY

SEQ ID NO: 39579 - protein, 9 aa, synthetic construct
PSNGAIHLF

SEQ ID NO: 39580 - protein, 9 aa, synthetic construct
PSNGAIRLH

SEQ ID NO: 39581 - protein, 9 aa, synthetic construct
PSNGAIRLK

SEQ ID NO: 39582 - protein, 9 aa, synthetic construct
PSNGAIKLY

SEQ ID NO: 39583 - protein, 9 aa, synthetic construct
PSNGAIKVR

SEQ ID NO: 39584 - protein, 9 aa, synthetic construct
PSNGAGHVR

SEQ ID NO: 39585 - protein, 9 aa, synthetic construct
PSNGAGKLR

SEQ ID NO: 39586 - protein, 9 aa, synthetic construct
PSNGAGKVK

SEQ ID NO: 39587 - protein, 9 aa, synthetic construct
PSNGTLHLF

SEQ ID NO: 39588 - protein, 9 aa, synthetic construct
PSNGTLRVY

SEQ ID NO: 39589 - protein, 9 aa, synthetic construct
PSNGTLRVH

SEQ ID NO: 39590 - protein, 9 aa, synthetic construct
PSNGTARLH

SEQ ID NO: 39591 - protein, 9 aa, synthetic construct
PSNGTIRLK

SEQ ID NO: 39592 - protein, 9 aa, synthetic construct
PLNATVKVR

SEQ ID NO: 39593 - protein, 9 aa, synthetic construct
PSNGTIKVR

SEQ ID NO: 39594 - protein, 9 aa, synthetic construct
PLNATVKVK

SEQ ID NO: 39595 - protein, 9 aa, synthetic construct
PSNGSVRLF

SEQ ID NO: 39596 - protein, 9 aa, synthetic construct
PLNATLHLF

SEQ ID NO: 39597 - protein, 9 aa, synthetic construct
PSNGSGHVR

SEQ ID NO: 39598 - protein, 9 aa, synthetic construct
PSNGSGHVH

SEQ ID NO: 39599 - protein, 9 aa, synthetic construct
PSNGSGRVY

SEQ ID NO: 39600 - protein, 9 aa, synthetic construct
PSNGSGRVH

SEQ ID NO: 39601 - protein, 9 aa, synthetic construct
PSNGSGKVH

SEQ ID NO: 39602 - protein, 9 aa, synthetic construct
PLNATLRVH

SEQ ID NO: 39603 - protein, 9 aa, synthetic construct
PSNGVVKVF

SEQ ID NO: 39604 - protein, 9 aa, synthetic construct
PSNGVLRLR

SEQ ID NO: 39605 - protein, 9 aa, synthetic construct
PSNGVLRLH

SEQ ID NO: 39606 - protein, 9 aa, synthetic construct
PSNGVLKLH

SEQ ID NO: 39607 - protein, 9 aa, synthetic construct
PSNGVLKLK

SEQ ID NO: 39608 - protein, 9 aa, synthetic construct
PSNGVLKVF

SEQ ID NO: 39609 - protein, 9 aa, synthetic construct
PSNGVARLR

SEQ ID NO: 39610 - protein, 9 aa, synthetic construct
PSNGVARLK

SEQ ID NO: 39611 - protein, 9 aa, synthetic construct
PSNGVIHLY

SEQ ID NO: 39612 - protein, 9 aa, synthetic construct
PSNGVIHLR

SEQ ID NO: 39613 - protein, 9 aa, synthetic construct
PSNGVIHLH

SEQ ID NO: 39614 - protein, 9 aa, synthetic construct
PLNATLKVY

SEQ ID NO: 39615 - protein, 9 aa, synthetic construct
PSNGVIKLK

SEQ ID NO: 39616 - protein, 9 aa, synthetic construct
PLNATLKVH

SEQ ID NO: 39617 - protein, 9 aa, synthetic construct
PSNGVGKVH

SEQ ID NO: 39618 - protein, 9 aa, synthetic construct
PSNGGLHLK

SEQ ID NO: 39619 - protein, 9 aa, synthetic construct
PSNGGLHVY

SEQ ID NO: 39620 - protein, 9 aa, synthetic construct
PSNGGLKLH

SEQ ID NO: 39621 - protein, 9 aa, synthetic construct
PSNGGLKVY

SEQ ID NO: 39622 - protein, 9 aa, synthetic construct
PSNGGAKVY

SEQ ID NO: 39623 - protein, 9 aa, synthetic construct
PSNGGIRLK

SEQ ID NO: 39624 - protein, 9 aa, synthetic construct
PSNGGIKLK

SEQ ID NO: 39625 - protein, 9 aa, synthetic construct
PSNGGGRLH

SEQ ID NO: 39626 - protein, 9 aa, synthetic construct
PSNGGGRLK

SEQ ID NO: 39627 - protein, 9 aa, synthetic construct
PSNAAVRVK

SEQ ID NO: 39628 - protein, 9 aa, synthetic construct
PSNAALHVY

SEQ ID NO: 39629 - protein, 9 aa, synthetic construct
PSNAALHVR

SEQ ID NO: 39630 - protein, 9 aa, synthetic construct
PSNAALRVH

SEQ ID NO: 39631 - protein, 9 aa, synthetic construct
PSNAALKVH

SEQ ID NO: 39632 - protein, 9 aa, synthetic construct
PSNAAARLR

SEQ ID NO: 39633 - protein, 9 aa, synthetic construct
PSNAAIRLH

SEQ ID NO: 39634 - protein, 9 aa, synthetic construct
PSNAAIRLK

SEQ ID NO: 39635 - protein, 9 aa, synthetic construct
PSNAAGKLK

SEQ ID NO: 39636 - protein, 9 aa, synthetic construct
PSNATLHVF

SEQ ID NO: 39637 - protein, 9 aa, synthetic construct
PSNATLKVY

SEQ ID NO: 39638 - protein, 9 aa, synthetic construct
PSNATLKVR

SEQ ID NO: 39639 - protein, 9 aa, synthetic construct
PSNATARLY

SEQ ID NO: 39640 - protein, 9 aa, synthetic construct
PSNATARLH

SEQ ID NO: 39641 - protein, 9 aa, synthetic construct
PSNATARVR

SEQ ID NO: 39642 - protein, 9 aa, synthetic construct
PLNATIRLY

SEQ ID NO: 39643 - protein, 9 aa, synthetic construct
PSNASVHVH

SEQ ID NO: 39644 - protein, 9 aa, synthetic construct
PSNASVKLH

SEQ ID NO: 39645 - protein, 9 aa, synthetic construct
PSNASVKLK

SEQ ID NO: 39646 - protein, 9 aa, synthetic construct
PSNASARLR

SEQ ID NO: 39647 - protein, 9 aa, synthetic construct
PSNASIHLH

SEQ ID NO: 39648 - protein, 9 aa, synthetic construct
PSNASGHVR

SEQ ID NO: 39649 - protein, 9 aa, synthetic construct
PSNASGRLH

SEQ ID NO: 39650 - protein, 9 aa, synthetic construct
PSNAVVRVY

SEQ ID NO: 39651 - protein, 9 aa, synthetic construct
PSNAVLHLK

SEQ ID NO: 39652 - protein, 9 aa, synthetic construct
PSNAVLKVR

SEQ ID NO: 39653 - protein, 9 aa, synthetic construct
PSNAVIKVK

SEQ ID NO: 39654 - protein, 9 aa, synthetic construct
PSNAVIKVF

SEQ ID NO: 39655 - protein, 9 aa, synthetic construct
PSNAGLRLY

SEQ ID NO: 39656 - protein, 9 aa, synthetic construct
PSNAGIRVR

SEQ ID NO: 39657 - protein, 9 aa, synthetic construct
PSQGAVHLF

SEQ ID NO: 39658 - protein, 9 aa, synthetic construct
PSQGAVHVY

SEQ ID NO: 39659 - protein, 9 aa, synthetic construct
PSQGAVRVR

SEQ ID NO: 39660 - protein, 9 aa, synthetic construct
PSQGAVKVK

SEQ ID NO: 39661 - protein, 9 aa, synthetic construct
PSQGALKVY

SEQ ID NO: 39662 - protein, 9 aa, synthetic construct
PSQGAARLK

SEQ ID NO: 39663 - protein, 9 aa, synthetic construct
PSQGAARVH

SEQ ID NO: 39664 - protein, 9 aa, synthetic construct
PSQGAAKVH

SEQ ID NO: 39665 - protein, 9 aa, synthetic construct
PSQGAIRVH

SEQ ID NO: 39666 - protein, 9 aa, synthetic construct
PSQGAGHLH

SEQ ID NO: 39667 - protein, 9 aa, synthetic construct
PSQGAGHVH

SEQ ID NO: 39668 - protein, 9 aa, synthetic construct
PSQGAGHVF

SEQ ID NO: 39669 - protein, 9 aa, synthetic construct
PSQGAGKLY

SEQ ID NO: 39670 - protein, 9 aa, synthetic construct
PSQGAGKLF

SEQ ID NO: 39671 - protein, 9 aa, synthetic construct
PSQGTLHLR

SEQ ID NO: 39672 - protein, 9 aa, synthetic construct
PSQGTLHLH

SEQ ID NO: 39673 - protein, 9 aa, synthetic construct
PSQGTLHVF

SEQ ID NO: 39674 - protein, 9 aa, synthetic construct
PLNASVKLR

SEQ ID NO: 39675 - protein, 9 aa, synthetic construct
PLNASVKLK

SEQ ID NO: 39676 - protein, 9 aa, synthetic construct
PSQGTIHVF

SEQ ID NO: 39677 - protein, 9 aa, synthetic construct
PSQGSVHLF

SEQ ID NO: 39678 - protein, 9 aa, synthetic construct
PSQGSVKLY

SEQ ID NO: 39679 - protein, 9 aa, synthetic construct
PSQGSVKVY

SEQ ID NO: 39680 - protein, 9 aa, synthetic construct
PSQGSVKVK

SEQ ID NO: 39681 - protein, 9 aa, synthetic construct
PSQGSLHLF

SEQ ID NO: 39682 - protein, 9 aa, synthetic construct
PLNASLHLF

SEQ ID NO: 39683 - protein, 9 aa, synthetic construct
PSQGSAHVY

SEQ ID NO: 39684 - protein, 9 aa, synthetic construct
PSQGSAHVR

SEQ ID NO: 39685 - protein, 9 aa, synthetic construct
PSQGSARVF

SEQ ID NO: 39686 - protein, 9 aa, synthetic construct
PSQGSAKLF

SEQ ID NO: 39687 - protein, 9 aa, synthetic construct
PSQGSIHLH

SEQ ID NO: 39688 - protein, 9 aa, synthetic construct
PSQGSIHVR

SEQ ID NO: 39689 - protein, 9 aa, synthetic construct
PSQGSIRLY

SEQ ID NO: 39690 - protein, 9 aa, synthetic construct
PSQGSIRLF

SEQ ID NO: 39691 - protein, 9 aa, synthetic construct
PSQGSIKLY

SEQ ID NO: 39692 - protein, 9 aa, synthetic construct
PLNASLRLH

SEQ ID NO: 39693 - protein, 9 aa, synthetic construct
PSQGVLHLH

SEQ ID NO: 39694 - protein, 9 aa, synthetic construct
PLNGAVRLR

SEQ ID NO: 39695 - protein, 9 aa, synthetic construct
PSQGVAKLH

SEQ ID NO: 39696 - protein, 9 aa, synthetic construct
PLNASLKVH

SEQ ID NO: 39697 - protein, 9 aa, synthetic construct
PSQGVGHVY

SEQ ID NO: 39698 - protein, 9 aa, synthetic construct
PSQGVGKVH

SEQ ID NO: 39699 - protein, 9 aa, synthetic construct
PSQGVGKVF

SEQ ID NO: 39700 - protein, 9 aa, synthetic construct
PSQGGVHLH

SEQ ID NO: 39701 - protein, 9 aa, synthetic construct
PSQGGVRVF

SEQ ID NO: 39702 - protein, 9 aa, synthetic construct
PSQGGVKVH

SEQ ID NO: 39703 - protein, 9 aa, synthetic construct
PSQGGAHLY

SEQ ID NO: 39704 - protein, 9 aa, synthetic construct
PSQGGGHLY

SEQ ID NO: 39705 - protein, 9 aa, synthetic construct
PSQGGGHLF

SEQ ID NO: 39706 - protein, 9 aa, synthetic construct
PSQGGGHVF

SEQ ID NO: 39707 - protein, 9 aa, synthetic construct
PSQGGGKLF

SEQ ID NO: 39708 - protein, 9 aa, synthetic construct
PSQGGGKVH

SEQ ID NO: 39709 - protein, 9 aa, synthetic construct
PSQGGGKVF

SEQ ID NO: 39710 - protein, 9 aa, synthetic construct
PSQAAVHLY

SEQ ID NO: 39711 - protein, 9 aa, synthetic construct
PLNASAKVK

SEQ ID NO: 39712 - protein, 9 aa, synthetic construct
PSQATVHLH

SEQ ID NO: 39713 - protein, 9 aa, synthetic construct
PSQATARLK

SEQ ID NO: 39714 - protein, 9 aa, synthetic construct
PSQATAKLH

SEQ ID NO: 39715 - protein, 9 aa, synthetic construct
PSQATAKVK

SEQ ID NO: 39716 - protein, 9 aa, synthetic construct
PSQATIRLH

SEQ ID NO: 39717 - protein, 9 aa, synthetic construct
PSQATIRVH

SEQ ID NO: 39718 - protein, 9 aa, synthetic construct
PLNASIRLR

SEQ ID NO: 39719 - protein, 9 aa, synthetic construct
PSQASLHLF

SEQ ID NO: 39720 - protein, 9 aa, synthetic construct
PSQASIKLY

SEQ ID NO: 39721 - protein, 9 aa, synthetic construct
PSQAVLRVR

SEQ ID NO: 39722 - protein, 9 aa, synthetic construct
PSQAVLKLH

SEQ ID NO: 39723 - protein, 9 aa, synthetic construct
PSQAVIHLY

SEQ ID NO: 39724 - protein, 9 aa, synthetic construct
PSQAVGKVH

SEQ ID NO: 39725 - protein, 9 aa, synthetic construct
PSQAGGRVH

SEQ ID NO: 39726 - protein, 9 aa, synthetic construct
PSPGAVHVY

SEQ ID NO: 39727 - protein, 9 aa, synthetic construct
PLNAVVHLR

SEQ ID NO: 39728 - protein, 9 aa, synthetic construct
PSPGALHLH

SEQ ID NO: 39729 - protein, 9 aa, synthetic construct
PLNAVVKLH

SEQ ID NO: 39730 - protein, 9 aa, synthetic construct
PLNAVLHLH

SEQ ID NO: 39731 - protein, 9 aa, synthetic construct
PLNAVLHVR

SEQ ID NO: 39732 - protein, 9 aa, synthetic construct
PSPGSAKLH

SEQ ID NO: 39733 - protein, 9 aa, synthetic construct
PSPGSAKVK

SEQ ID NO: 39734 - protein, 9 aa, synthetic construct
PSPGSIRVR

SEQ ID NO: 39735 - protein, 9 aa, synthetic construct
PSPGSIRVF

SEQ ID NO: 39736 - protein, 9 aa, synthetic construct
PSPGVLHVF

SEQ ID NO: 39737 - protein, 9 aa, synthetic construct
PLNAVLKLF

SEQ ID NO: 39738 - protein, 9 aa, synthetic construct
PSPGVIHVF

SEQ ID NO: 39739 - protein, 9 aa, synthetic construct
PLNAVLKVY

SEQ ID NO: 39740 - protein, 9 aa, synthetic construct
PSPGVIKVK

SEQ ID NO: 39741 - protein, 9 aa, synthetic construct
PSPGGIRVY

SEQ ID NO: 39742 - protein, 9 aa, synthetic construct
PSPAAARLK

SEQ ID NO: 39743 - protein, 9 aa, synthetic construct
PLNAVAKVY

SEQ ID NO: 39744 - protein, 9 aa, synthetic construct
PSPAAIRVF

SEQ ID NO: 39745 - protein, 9 aa, synthetic construct
PSPAAIKVR

SEQ ID NO: 39746 - protein, 9 aa, synthetic construct
PSPATLKLF

SEQ ID NO: 39747 - protein, 9 aa, synthetic construct
PSPATARLK

SEQ ID NO: 39748 - protein, 9 aa, synthetic construct
PSPATAKLK

SEQ ID NO: 39749 - protein, 9 aa, synthetic construct
PSPASVRLF

SEQ ID NO: 39750 - protein, 9 aa, synthetic construct
PSPASAKLH

SEQ ID NO: 39751 - protein, 9 aa, synthetic construct
PLNAVIKVK

SEQ ID NO: 39752 - protein, 9 aa, synthetic construct
PSPAVLKVR

SEQ ID NO: 39753 - protein, 9 aa, synthetic construct
PLNAVGRLR

SEQ ID NO: 39754 - protein, 9 aa, synthetic construct
PLNAVGRLK

SEQ ID NO: 39755 - protein, 9 aa, synthetic construct
PSPAGIRLK

SEQ ID NO: 39756 - protein, 9 aa, synthetic construct
PANGAVHLF

SEQ ID NO: 39757 - protein, 9 aa, synthetic construct
PANGAVHVF

SEQ ID NO: 39758 - protein, 9 aa, synthetic construct
PANGAVRVR

SEQ ID NO: 39759 - protein, 9 aa, synthetic construct
PLNAGVHLH

SEQ ID NO: 39760 - protein, 9 aa, synthetic construct
PANGAARLK

SEQ ID NO: 39761 - protein, 9 aa, synthetic construct
PANGAARVR

SEQ ID NO: 39762 - protein, 9 aa, synthetic construct
PANGAARVK

SEQ ID NO: 39763 - protein, 9 aa, synthetic construct
PANGAAKVR

SEQ ID NO: 39764 - protein, 9 aa, synthetic construct
PLNAGVHVF

SEQ ID NO: 39765 - protein, 9 aa, synthetic construct
PANGTLRLK

SEQ ID NO: 39766 - protein, 9 aa, synthetic construct
PANGTLRVR

SEQ ID NO: 39767 - protein, 9 aa, synthetic construct
PANGTLRVK

SEQ ID NO: 39768 - protein, 9 aa, synthetic construct
PLNAGVKLK

SEQ ID NO: 39769 - protein, 9 aa, synthetic construct
PANGSAKVR

SEQ ID NO: 39770 - protein, 9 aa, synthetic construct
PANGSAKVK

SEQ ID NO: 39771 - protein, 9 aa, synthetic construct
PLNAGLRLH

SEQ ID NO: 39772 - protein, 9 aa, synthetic construct
PANGGLHLY

SEQ ID NO: 39773 - protein, 9 aa, synthetic construct
PANGGLRLH

SEQ ID NO: 39774 - protein, 9 aa, synthetic construct
PANGGLRLF

SEQ ID NO: 39775 - protein, 9 aa, synthetic construct
PANGGLRVF

SEQ ID NO: 39776 - protein, 9 aa, synthetic construct
PANGGAKVR

SEQ ID NO: 39777 - protein, 9 aa, synthetic construct
PANGGIRLK

SEQ ID NO: 39778 - protein, 9 aa, synthetic construct
PANGGIRVR

SEQ ID NO: 39779 - protein, 9 aa, synthetic construct
PANGGIRVF

SEQ ID NO: 39780 - protein, 9 aa, synthetic construct
PANGGGKLK

SEQ ID NO: 39781 - protein, 9 aa, synthetic construct
PANGGGKVR

SEQ ID NO: 39782 - protein, 9 aa, synthetic construct
PANAAARLK

SEQ ID NO: 39783 - protein, 9 aa, synthetic construct
PANAAGKVR

SEQ ID NO: 39784 - protein, 9 aa, synthetic construct
PANATIHLF

SEQ ID NO: 39785 - protein, 9 aa, synthetic construct
PLNAGIRLR

SEQ ID NO: 39786 - protein, 9 aa, synthetic construct
PLNAGIRLH

SEQ ID NO: 39787 - protein, 9 aa, synthetic construct
PLNAGIRLK

SEQ ID NO: 39788 - protein, 9 aa, synthetic construct
PLNAGIRLF

SEQ ID NO: 39789 - protein, 9 aa, synthetic construct
PANASVRLF

SEQ ID NO: 39790 - protein, 9 aa, synthetic construct
PANASVKLK

SEQ ID NO: 39791 - protein, 9 aa, synthetic construct
PANASLHLF

SEQ ID NO: 39792 - protein, 9 aa, synthetic construct
PLNAGIKLR

SEQ ID NO: 39793 - protein, 9 aa, synthetic construct
PANASAKVK

SEQ ID NO: 39794 - protein, 9 aa, synthetic construct
PLNAGIKVR

SEQ ID NO: 39795 - protein, 9 aa, synthetic construct
PANAVLHVY

SEQ ID NO: 39796 - protein, 9 aa, synthetic construct
PANAGLRLH

SEQ ID NO: 39797 - protein, 9 aa, synthetic construct
PANAGIRVR

SEQ ID NO: 39798 - protein, 9 aa, synthetic construct
PANAGIKVK

SEQ ID NO: 39799 - protein, 9 aa, synthetic construct
PLNAGGKVH

SEQ ID NO: 39800 - protein, 9 aa, synthetic construct
PANAGGKVH

SEQ ID NO: 39801 - protein, 9 aa, synthetic construct
PAQGAVHLF

SEQ ID NO: 39802 - protein, 9 aa, synthetic construct
PAQGAVRVK

SEQ ID NO: 39803 - protein, 9 aa, synthetic construct
PAQGAGRVR

SEQ ID NO: 39804 - protein, 9 aa, synthetic construct
PAQGTVKVK

SEQ ID NO: 39805 - protein, 9 aa, synthetic construct
PLQGAVKVK

SEQ ID NO: 39806 - protein, 9 aa, synthetic construct
PAQGTGRLR

SEQ ID NO: 39807 - protein, 9 aa, synthetic construct
PAQGTGRVR

SEQ ID NO: 39808 - protein, 9 aa, synthetic construct
PAQGSVHLH

SEQ ID NO: 39809 - protein, 9 aa, synthetic construct
PAQGSVKVK

SEQ ID NO: 39810 - protein, 9 aa, synthetic construct
PAQGSLHVY

SEQ ID NO: 39811 - protein, 9 aa, synthetic construct
PAQGSARLR

SEQ ID NO: 39812 - protein, 9 aa, synthetic construct
PAQGSGHVR

SEQ ID NO: 39813 - protein, 9 aa, synthetic construct
PLQGALRLF

SEQ ID NO: 39814 - protein, 9 aa, synthetic construct
PAQGVVRLY

SEQ ID NO: 39815 - protein, 9 aa, synthetic construct
PAQGVVRLK

SEQ ID NO: 39816 - protein, 9 aa, synthetic construct
PAQGVVKLR

SEQ ID NO: 39817 - protein, 9 aa, synthetic construct
PAQGVLHLH

SEQ ID NO: 39818 - protein, 9 aa, synthetic construct
PAQGVIKVK

SEQ ID NO: 39819 - protein, 9 aa, synthetic construct
PAQGVGRLH

SEQ ID NO: 39820 - protein, 9 aa, synthetic construct
PAQGVGRLK

SEQ ID NO: 39821 - protein, 9 aa, synthetic construct
PAQGGVKVK

SEQ ID NO: 39822 - protein, 9 aa, synthetic construct
PAQGGLHLR

SEQ ID NO: 39823 - protein, 9 aa, synthetic construct
PAQGGAKVR

SEQ ID NO: 39824 - protein, 9 aa, synthetic construct
PLQGAARLK

SEQ ID NO: 39825 - protein, 9 aa, synthetic construct
PAQAAGRVR

SEQ ID NO: 39826 - protein, 9 aa, synthetic construct
PAQATARVK

SEQ ID NO: 39827 - protein, 9 aa, synthetic construct
PLQGAIKLR

SEQ ID NO: 39828 - protein, 9 aa, synthetic construct
PAQASARLR

SEQ ID NO: 39829 - protein, 9 aa, synthetic construct
PAQAVVRLR

SEQ ID NO: 39830 - protein, 9 aa, synthetic construct
PAQAVVKLK

SEQ ID NO: 39831 - protein, 9 aa, synthetic construct
PAQAVLHVY

SEQ ID NO: 39832 - protein, 9 aa, synthetic construct
PAQAVLRVY

SEQ ID NO: 39833 - protein, 9 aa, synthetic construct
PAQAVLRVR

SEQ ID NO: 39834 - protein, 9 aa, synthetic construct
PAQAVLRVK

SEQ ID NO: 39835 - protein, 9 aa, synthetic construct
PAQAVIHLY

SEQ ID NO: 39836 - protein, 9 aa, synthetic construct
PAQAVGHLF

SEQ ID NO: 39837 - protein, 9 aa, synthetic construct
PAQAGVHLY

SEQ ID NO: 39838 - protein, 9 aa, synthetic construct
PLQGAGRVR

SEQ ID NO: 39839 - protein, 9 aa, synthetic construct
PAPGAARLK

SEQ ID NO: 39840 - protein, 9 aa, synthetic construct
PAPGAGKVK

SEQ ID NO: 39841 - protein, 9 aa, synthetic construct
PAPGTVKLK

SEQ ID NO: 39842 - protein, 9 aa, synthetic construct
PAPGTLRVR

SEQ ID NO: 39843 - protein, 9 aa, synthetic construct
PAPGTGRLR

SEQ ID NO: 39844 - protein, 9 aa, synthetic construct
PAPGTGRVR

SEQ ID NO: 39845 - protein, 9 aa, synthetic construct
PAPGTGRVK

SEQ ID NO: 39846 - protein, 9 aa, synthetic construct
PAPGTGKVK

SEQ ID NO: 39847 - protein, 9 aa, synthetic construct
PLQGTLHLF

SEQ ID NO: 39848 - protein, 9 aa, synthetic construct
PAPGVLHLR

SEQ ID NO: 39849 - protein, 9 aa, synthetic construct
PAPGVLRLF

SEQ ID NO: 39850 - protein, 9 aa, synthetic construct
PAPGVLKLH

SEQ ID NO: 39851 - protein, 9 aa, synthetic construct
PAPGVIRLH

SEQ ID NO: 39852 - protein, 9 aa, synthetic construct
PAPGVIRLF

SEQ ID NO: 39853 - protein, 9 aa, synthetic construct
PAPGVIKLK

SEQ ID NO: 39854 - protein, 9 aa, synthetic construct
PAPGVIKVK

SEQ ID NO: 39855 - protein, 9 aa, synthetic construct
PAPGVGRVR

SEQ ID NO: 39856 - protein, 9 aa, synthetic construct
PAPGVGKVK

SEQ ID NO: 39857 - protein, 9 aa, synthetic construct
PAPGGVRLF

SEQ ID NO: 39858 - protein, 9 aa, synthetic construct
PAPGGVKLK

SEQ ID NO: 39859 - protein, 9 aa, synthetic construct
PAPGGIRVF

SEQ ID NO: 39860 - protein, 9 aa, synthetic construct
PAPAAARLK

SEQ ID NO: 39861 - protein, 9 aa, synthetic construct
PAPAAGRLK

SEQ ID NO: 39862 - protein, 9 aa, synthetic construct
PAPAAGRVR

SEQ ID NO: 39863 - protein, 9 aa, synthetic construct
PAPATARLK

SEQ ID NO: 39864 - protein, 9 aa, synthetic construct
PAPASVRVR

SEQ ID NO: 39865 - protein, 9 aa, synthetic construct
PAPASAKLK

SEQ ID NO: 39866 - protein, 9 aa, synthetic construct
PAPASAKVR

SEQ ID NO: 39867 - protein, 9 aa, synthetic construct
PAPASAKVK

SEQ ID NO: 39868 - protein, 9 aa, synthetic construct
PAPAGVHLR

SEQ ID NO: 39869 - protein, 9 aa, synthetic construct
PAPAGVHLH

SEQ ID NO: 39870 - protein, 9 aa, synthetic construct
PAPAGLRLH

SEQ ID NO: 39871 - protein, 9 aa, synthetic construct
PAPAGARLK

SEQ ID NO: 39872 - protein, 9 aa, synthetic construct
PAPAGIHLH

SEQ ID NO: 39873 - protein, 9 aa, synthetic construct
PAPAGIRVR

SEQ ID NO: 39874 - protein, 9 aa, synthetic construct
PAPAGIKVR

SEQ ID NO: 39875 - protein, 9 aa, synthetic construct
PVNGAVRVR

SEQ ID NO: 39876 - protein, 9 aa, synthetic construct
PVNGAVKVK

SEQ ID NO: 39877 - protein, 9 aa, synthetic construct
PVNGAARLK

SEQ ID NO: 39878 - protein, 9 aa, synthetic construct
PVNGAGRLK

SEQ ID NO: 39879 - protein, 9 aa, synthetic construct
PVNGAGKVK

SEQ ID NO: 39880 - protein, 9 aa, synthetic construct
PVNGTLRLK

SEQ ID NO: 39881 - protein, 9 aa, synthetic construct
PVNGTARVK

SEQ ID NO: 39882 - protein, 9 aa, synthetic construct
PVNGSVRVR

SEQ ID NO: 39883 - protein, 9 aa, synthetic construct
PVNGSVKLK

SEQ ID NO: 39884 - protein, 9 aa, synthetic construct
PVNGSLKVY

SEQ ID NO: 39885 - protein, 9 aa, synthetic construct
PVNGSARVK

SEQ ID NO: 39886 - protein, 9 aa, synthetic construct
PVNGSAKVR

SEQ ID NO: 39887 - protein, 9 aa, synthetic construct
PVNGSAKVK

SEQ ID NO: 39888 - protein, 9 aa, synthetic construct
PVNGSIRLR

SEQ ID NO: 39889 - protein, 9 aa, synthetic construct
PVNGSIRVK

SEQ ID NO: 39890 - protein, 9 aa, synthetic construct
PVNGVLRLF

SEQ ID NO: 39891 - protein, 9 aa, synthetic construct
PVNGVIHLY

SEQ ID NO: 39892 - protein, 9 aa, synthetic construct
PVNGVIHLF

SEQ ID NO: 39893 - protein, 9 aa, synthetic construct
PVNGVIRLK

SEQ ID NO: 39894 - protein, 9 aa, synthetic construct
PVNGVIKVK

SEQ ID NO: 39895 - protein, 9 aa, synthetic construct
PVNGVGKVK

SEQ ID NO: 39896 - protein, 9 aa, synthetic construct
PVNGGLRLH

SEQ ID NO: 39897 - protein, 9 aa, synthetic construct
PVNGGIRVR

SEQ ID NO: 39898 - protein, 9 aa, synthetic construct
PVNAALHLK

SEQ ID NO: 39899 - protein, 9 aa, synthetic construct
PLQGSARVF

SEQ ID NO: 39900 - protein, 9 aa, synthetic construct
PVNAAARLK

SEQ ID NO: 39901 - protein, 9 aa, synthetic construct
PVNATARLK

SEQ ID NO: 39902 - protein, 9 aa, synthetic construct
PVNATAKLK

SEQ ID NO: 39903 - protein, 9 aa, synthetic construct
PVNATAKVR

SEQ ID NO: 39904 - protein, 9 aa, synthetic construct
PVNATGKVK

SEQ ID NO: 39905 - protein, 9 aa, synthetic construct
PVNASVRLF

SEQ ID NO: 39906 - protein, 9 aa, synthetic construct
PVNASVKLK

SEQ ID NO: 39907 - protein, 9 aa, synthetic construct
PVNASLHLH

SEQ ID NO: 39908 - protein, 9 aa, synthetic construct
PVNASLHLF

SEQ ID NO: 39909 - protein, 9 aa, synthetic construct
PVNASARLR

SEQ ID NO: 39910 - protein, 9 aa, synthetic construct
PVNASARVK

SEQ ID NO: 39911 - protein, 9 aa, synthetic construct
PVNASAKVK

SEQ ID NO: 39912 - protein, 9 aa, synthetic construct
PVNASIRVR

SEQ ID NO: 39913 - protein, 9 aa, synthetic construct
PVNAVVHLR

SEQ ID NO: 39914 - protein, 9 aa, synthetic construct
PVNAVVRLF

SEQ ID NO: 39915 - protein, 9 aa, synthetic construct
PLQGSGHLK

SEQ ID NO: 39916 - protein, 9 aa, synthetic construct
PVNAVLHLH

SEQ ID NO: 39917 - protein, 9 aa, synthetic construct
PVNAVLRVY

SEQ ID NO: 39918 - protein, 9 aa, synthetic construct
PLQGSGHVR

SEQ ID NO: 39919 - protein, 9 aa, synthetic construct
PLNGTLRLK

SEQ ID NO: 39920 - protein, 9 aa, synthetic construct
PVNAGAKVK

SEQ ID NO: 39921 - protein, 9 aa, synthetic construct
PVNAGIRLR

SEQ ID NO: 39922 - protein, 9 aa, synthetic construct
PLNGTLRVY

SEQ ID NO: 39923 - protein, 9 aa, synthetic construct
PVQGAVRVR

SEQ ID NO: 39924 - protein, 9 aa, synthetic construct
PVQGAVKVK

SEQ ID NO: 39925 - protein, 9 aa, synthetic construct
PVQGALRLF

SEQ ID NO: 39926 - protein, 9 aa, synthetic construct
PVQGTVKLK

SEQ ID NO: 39927 - protein, 9 aa, synthetic construct
PVQGTLRVF

SEQ ID NO: 39928 - protein, 9 aa, synthetic construct
PVQGTAKVK

SEQ ID NO: 39929 - protein, 9 aa, synthetic construct
PVQGTGHVY

SEQ ID NO: 39930 - protein, 9 aa, synthetic construct
PVQGTGKVK

SEQ ID NO: 39931 - protein, 9 aa, synthetic construct
PVQGSVHVH

SEQ ID NO: 39932 - protein, 9 aa, synthetic construct
PVQGSARLR

SEQ ID NO: 39933 - protein, 9 aa, synthetic construct
PLQGVLHVK

SEQ ID NO: 39934 - protein, 9 aa, synthetic construct
PVQGSAKVK

SEQ ID NO: 39935 - protein, 9 aa, synthetic construct
PVQGVVRLK

SEQ ID NO: 39936 - protein, 9 aa, synthetic construct
PVQGVLHLH

SEQ ID NO: 39937 - protein, 9 aa, synthetic construct
PVQGVLHVK

SEQ ID NO: 39938 - protein, 9 aa, synthetic construct
PLNGTLKLY

SEQ ID NO: 39939 - protein, 9 aa, synthetic construct
PVQGVLKVH

SEQ ID NO: 39940 - protein, 9 aa, synthetic construct
PVQGGAKVR

SEQ ID NO: 39941 - protein, 9 aa, synthetic construct
PVQAALKVK

SEQ ID NO: 39942 - protein, 9 aa, synthetic construct
PVQAAARLK

SEQ ID NO: 39943 - protein, 9 aa, synthetic construct
PVQAAGRLR

SEQ ID NO: 39944 - protein, 9 aa, synthetic construct
PVQAAGKLK

SEQ ID NO: 39945 - protein, 9 aa, synthetic construct
PVQAAGKVK

SEQ ID NO: 39946 - protein, 9 aa, synthetic construct
PVQATVKVK

SEQ ID NO: 39947 - protein, 9 aa, synthetic construct
PVQATLRVY

SEQ ID NO: 39948 - protein, 9 aa, synthetic construct
PVQATAKVK

SEQ ID NO: 39949 - protein, 9 aa, synthetic construct
PVQASVKLK

SEQ ID NO: 39950 - protein, 9 aa, synthetic construct
PVQASLHLH

SEQ ID NO: 39951 - protein, 9 aa, synthetic construct
PVQASLRLH

SEQ ID NO: 39952 - protein, 9 aa, synthetic construct
PVQASARLR

SEQ ID NO: 39953 - protein, 9 aa, synthetic construct
PVQASARLH

SEQ ID NO: 39954 - protein, 9 aa, synthetic construct
PVQASARVR

SEQ ID NO: 39955 - protein, 9 aa, synthetic construct
PVQASARVH

SEQ ID NO: 39956 - protein, 9 aa, synthetic construct
PVQASAKVR

SEQ ID NO: 39957 - protein, 9 aa, synthetic construct
PVQASAKVK

SEQ ID NO: 39958 - protein, 9 aa, synthetic construct
PVQASIKVK

SEQ ID NO: 39959 - protein, 9 aa, synthetic construct
PVQAVVRLF

SEQ ID NO: 39960 - protein, 9 aa, synthetic construct
PVQAVLHLH

SEQ ID NO: 39961 - protein, 9 aa, synthetic construct
PVQAVLRLF

SEQ ID NO: 39962 - protein, 9 aa, synthetic construct
PVQAVLRVR

SEQ ID NO: 39963 - protein, 9 aa, synthetic construct
PVQAVLKLY

SEQ ID NO: 39964 - protein, 9 aa, synthetic construct
PVQAVLKLH

SEQ ID NO: 39965 - protein, 9 aa, synthetic construct
PVQAVIHVY

SEQ ID NO: 39966 - protein, 9 aa, synthetic construct
PVQAVIHVF

SEQ ID NO: 39967 - protein, 9 aa, synthetic construct
PLQGVGRVY

SEQ ID NO: 39968 - protein, 9 aa, synthetic construct
PVQAGVHLF

SEQ ID NO: 39969 - protein, 9 aa, synthetic construct
PVQAGVRVF

SEQ ID NO: 39970 - protein, 9 aa, synthetic construct
PVQAGIRLY

SEQ ID NO: 39971 - protein, 9 aa, synthetic construct
PVQAGIKVR

SEQ ID NO: 39972 - protein, 9 aa, synthetic construct
PVQAGIKVK

SEQ ID NO: 39973 - protein, 9 aa, synthetic construct
PVPGAVKLR

SEQ ID NO: 39974 - protein, 9 aa, synthetic construct
PVPGALRLR

SEQ ID NO: 39975 - protein, 9 aa, synthetic construct
PVPGALKLY

SEQ ID NO: 39976 - protein, 9 aa, synthetic construct
PVPGALKVR

SEQ ID NO: 39977 - protein, 9 aa, synthetic construct
PVPGAARLK

SEQ ID NO: 39978 - protein, 9 aa, synthetic construct
PVPGAIHLF

SEQ ID NO: 39979 - protein, 9 aa, synthetic construct
PVPGAGKLR

SEQ ID NO: 39980 - protein, 9 aa, synthetic construct
PVPGAGKVK

SEQ ID NO: 39981 - protein, 9 aa, synthetic construct
PVPGTLHLH

SEQ ID NO: 39982 - protein, 9 aa, synthetic construct
PVPGSAKLR

SEQ ID NO: 39983 - protein, 9 aa, synthetic construct
PVPGSAKLK

SEQ ID NO: 39984 - protein, 9 aa, synthetic construct
PVPGSAKVR

SEQ ID NO: 39985 - protein, 9 aa, synthetic construct
PVPGSAKVK

SEQ ID NO: 39986 - protein, 9 aa, synthetic construct
PVPGSIRVR

SEQ ID NO: 39987 - protein, 9 aa, synthetic construct
PVPGVARLY

SEQ ID NO: 39988 - protein, 9 aa, synthetic construct
PVPGVIKVK

SEQ ID NO: 39989 - protein, 9 aa, synthetic construct
PLQGGLKVH

SEQ ID NO: 39990 - protein, 9 aa, synthetic construct
PVPGGLRLY

SEQ ID NO: 39991 - protein, 9 aa, synthetic construct
PVPGGLRLH

SEQ ID NO: 39992 - protein, 9 aa, synthetic construct
PVPGGAKVR

SEQ ID NO: 39993 - protein, 9 aa, synthetic construct
PVPGGIRVR

SEQ ID NO: 39994 - protein, 9 aa, synthetic construct
PVPGGIRVK

SEQ ID NO: 39995 - protein, 9 aa, synthetic construct
PVPAALRLF

SEQ ID NO: 39996 - protein, 9 aa, synthetic construct
PVPAAARVK

SEQ ID NO: 39997 - protein, 9 aa, synthetic construct
PVPATLRLH

SEQ ID NO: 39998 - protein, 9 aa, synthetic construct
PVPATLKLF

SEQ ID NO: 39999 - protein, 9 aa, synthetic construct
PVPATARVK

SEQ ID NO: 40000 - protein, 9 aa, synthetic construct
PVPASVRVF

SEQ ID NO: 40001 - protein, 9 aa, synthetic construct
PVPASLKLH

SEQ ID NO: 40002 - protein, 9 aa, synthetic construct
PVPAVLKVR

SEQ ID NO: 40003 - protein, 9 aa, synthetic construct
PLNGTARLK

SEQ ID NO: 40004 - protein, 9 aa, synthetic construct
PVPAGIRVR

SEQ ID NO: 40005 - protein, 9 aa, synthetic construct
PINGAVKVK

SEQ ID NO: 40006 - protein, 9 aa, synthetic construct
PLQAAVHLF

SEQ ID NO: 40007 - protein, 9 aa, synthetic construct
PLQAAVHVY

SEQ ID NO: 40008 - protein, 9 aa, synthetic construct
PINGAARLK

SEQ ID NO: 40009 - protein, 9 aa, synthetic construct
PINGAAKVR

SEQ ID NO: 40010 - protein, 9 aa, synthetic construct
PINGAGRVR

SEQ ID NO: 40011 - protein, 9 aa, synthetic construct
PINGTVKVK

SEQ ID NO: 40012 - protein, 9 aa, synthetic construct
PINGTLRLK

SEQ ID NO: 40013 - protein, 9 aa, synthetic construct
PINGTLRVR

SEQ ID NO: 40014 - protein, 9 aa, synthetic construct
PINGTARLK

SEQ ID NO: 40015 - protein, 9 aa, synthetic construct
PINGTIHLF

SEQ ID NO: 40016 - protein, 9 aa, synthetic construct
PLQAAVKVK

SEQ ID NO: 40017 - protein, 9 aa, synthetic construct
PINGSVKLK

SEQ ID NO: 40018 - protein, 9 aa, synthetic construct
PINGSLHLF

SEQ ID NO: 40019 - protein, 9 aa, synthetic construct
PINGSAKVR

SEQ ID NO: 40020 - protein, 9 aa, synthetic construct
PINGSAKVK

SEQ ID NO: 40021 - protein, 9 aa, synthetic construct
PINGSIRLR

SEQ ID NO: 40022 - protein, 9 aa, synthetic construct
PINGSIRVR

SEQ ID NO: 40023 - protein, 9 aa, synthetic construct
PLQAALRVY

SEQ ID NO: 40024 - protein, 9 aa, synthetic construct
PINGVARVK

SEQ ID NO: 40025 - protein, 9 aa, synthetic construct
PINGVIHLY

SEQ ID NO: 40026 - protein, 9 aa, synthetic construct
PINGVIHLH

SEQ ID NO: 40027 - protein, 9 aa, synthetic construct
PINGVIHLF

SEQ ID NO: 40028 - protein, 9 aa, synthetic construct
PINGVIHVF

SEQ ID NO: 40029 - protein, 9 aa, synthetic construct
PINGVIRVY

SEQ ID NO: 40030 - protein, 9 aa, synthetic construct
PINGVIRVF

SEQ ID NO: 40031 - protein, 9 aa, synthetic construct
PINGVIKLY

SEQ ID NO: 40032 - protein, 9 aa, synthetic construct
PINGVIKLK

SEQ ID NO: 40033 - protein, 9 aa, synthetic construct
PINGVIKLF

SEQ ID NO: 40034 - protein, 9 aa, synthetic construct
PINGVIKVK

SEQ ID NO: 40035 - protein, 9 aa, synthetic construct
PINGGVKVK

SEQ ID NO: 40036 - protein, 9 aa, synthetic construct
PINGGLRVF

SEQ ID NO: 40037 - protein, 9 aa, synthetic construct
PINGGARLK

SEQ ID NO: 40038 - protein, 9 aa, synthetic construct
PINGGGHVH

SEQ ID NO: 40039 - protein, 9 aa, synthetic construct
PLQAAARLK

SEQ ID NO: 40040 - protein, 9 aa, synthetic construct
PINGGGKVR

SEQ ID NO: 40041 - protein, 9 aa, synthetic construct
PINAAARLK

SEQ ID NO: 40042 - protein, 9 aa, synthetic construct
PINAAGRVR

SEQ ID NO: 40043 - protein, 9 aa, synthetic construct
PINASVRLF

SEQ ID NO: 40044 - protein, 9 aa, synthetic construct
PINASLRLF

SEQ ID NO: 40045 - protein, 9 aa, synthetic construct
PINASARLH

SEQ ID NO: 40046 - protein, 9 aa, synthetic construct
PINASAKVR

SEQ ID NO: 40047 - protein, 9 aa, synthetic construct
PINASIHVH

SEQ ID NO: 40048 - protein, 9 aa, synthetic construct
PINASIKLK

SEQ ID NO: 40049 - protein, 9 aa, synthetic construct
PLQAAIKVK

SEQ ID NO: 40050 - protein, 9 aa, synthetic construct
PINAGAKVR

SEQ ID NO: 40051 - protein, 9 aa, synthetic construct
PINAGIRLK

SEQ ID NO: 40052 - protein, 9 aa, synthetic construct
PINAGIRVR

SEQ ID NO: 40053 - protein, 9 aa, synthetic construct
PINAGIKLR

SEQ ID NO: 40054 - protein, 9 aa, synthetic construct
PINAGGKLR

SEQ ID NO: 40055 - protein, 9 aa, synthetic construct
PINAGGKVR

SEQ ID NO: 40056 - protein, 9 aa, synthetic construct
PIQGAVHVY

SEQ ID NO: 40057 - protein, 9 aa, synthetic construct
PIQGAVRVR

SEQ ID NO: 40058 - protein, 9 aa, synthetic construct
PIQGAVKVK

SEQ ID NO: 40059 - protein, 9 aa, synthetic construct
PIQGAARLK

SEQ ID NO: 40060 - protein, 9 aa, synthetic construct
PIQGAGRVR

SEQ ID NO: 40061 - protein, 9 aa, synthetic construct
PIQGTLHLY

SEQ ID NO: 40062 - protein, 9 aa, synthetic construct
PIQGTIRVK

SEQ ID NO: 40063 - protein, 9 aa, synthetic construct
PIQGTGRVR

SEQ ID NO: 40064 - protein, 9 aa, synthetic construct
PLQATLHLY

SEQ ID NO: 40065 - protein, 9 aa, synthetic construct
PIQGSARLH

SEQ ID NO: 40066 - protein, 9 aa, synthetic construct
PIQGSARVF

SEQ ID NO: 40067 - protein, 9 aa, synthetic construct
PIQGSIRVR

SEQ ID NO: 40068 - protein, 9 aa, synthetic construct
PIQGGAKVR

SEQ ID NO: 40069 - protein, 9 aa, synthetic construct
PIQGGIRLR

SEQ ID NO: 40070 - protein, 9 aa, synthetic construct
PIQGGIRVY

SEQ ID NO: 40071 - protein, 9 aa, synthetic construct
PIQAAVHLF

SEQ ID NO: 40072 - protein, 9 aa, synthetic construct
PIQAAVKVK

SEQ ID NO: 40073 - protein, 9 aa, synthetic construct
PIQAALKVK

SEQ ID NO: 40074 - protein, 9 aa, synthetic construct
PIQAAARLK

SEQ ID NO: 40075 - protein, 9 aa, synthetic construct
PLQATAKVR

SEQ ID NO: 40076 - protein, 9 aa, synthetic construct
PLQATAKVK

SEQ ID NO: 40077 - protein, 9 aa, synthetic construct
PIQAAGRVR

SEQ ID NO: 40078 - protein, 9 aa, synthetic construct
PIQATLHLY

SEQ ID NO: 40079 - protein, 9 aa, synthetic construct
PIQATLHLH

SEQ ID NO: 40080 - protein, 9 aa, synthetic construct
PIQATLKVY

SEQ ID NO: 40081 - protein, 9 aa, synthetic construct
PIQATAKVR

SEQ ID NO: 40082 - protein, 9 aa, synthetic construct
PIQATAKVK

SEQ ID NO: 40083 - protein, 9 aa, synthetic construct
PIQASLHLH

SEQ ID NO: 40084 - protein, 9 aa, synthetic construct
PIQASLHLF

SEQ ID NO: 40085 - protein, 9 aa, synthetic construct
PIQASLHVH

SEQ ID NO: 40086 - protein, 9 aa, synthetic construct
PIQAVVRLK

SEQ ID NO: 40087 - protein, 9 aa, synthetic construct
PIQAVVRLF

SEQ ID NO: 40088 - protein, 9 aa, synthetic construct
PIQAVLHLH

SEQ ID NO: 40089 - protein, 9 aa, synthetic construct
PIQAVLRVR

SEQ ID NO: 40090 - protein, 9 aa, synthetic construct
PIQAVLKLY

SEQ ID NO: 40091 - protein, 9 aa, synthetic construct
PIQAVAKVF

SEQ ID NO: 40092 - protein, 9 aa, synthetic construct
PIQAVIHLH

SEQ ID NO: 40093 - protein, 9 aa, synthetic construct
PIQAVGRLY

SEQ ID NO: 40094 - protein, 9 aa, synthetic construct
PIQAGVKLK

SEQ ID NO: 40095 - protein, 9 aa, synthetic construct
PIQAGLKLH

SEQ ID NO: 40096 - protein, 9 aa, synthetic construct
PIQAGARVR

SEQ ID NO: 40097 - protein, 9 aa, synthetic construct
PIPGAVKLK

SEQ ID NO: 40098 - protein, 9 aa, synthetic construct
PIPGALRLF

SEQ ID NO: 40099 - protein, 9 aa, synthetic construct
PIPGAARLK

SEQ ID NO: 40100 - protein, 9 aa, synthetic construct
PIPGAGRLR

SEQ ID NO: 40101 - protein, 9 aa, synthetic construct
PIPGAGRLK

SEQ ID NO: 40102 - protein, 9 aa, synthetic construct
PIPGAGKVR

SEQ ID NO: 40103 - protein, 9 aa, synthetic construct
PIPGTVRLK

SEQ ID NO: 40104 - protein, 9 aa, synthetic construct
PIPGTLHLF

SEQ ID NO: 40105 - protein, 9 aa, synthetic construct
PIPGTLRVR

SEQ ID NO: 40106 - protein, 9 aa, synthetic construct
PIPGTARVK

SEQ ID NO: 40107 - protein, 9 aa, synthetic construct
PIPGTGRVR

SEQ ID NO: 40108 - protein, 9 aa, synthetic construct
PIPGTGKVK

SEQ ID NO: 40109 - protein, 9 aa, synthetic construct
PIPGSVHLF

SEQ ID NO: 40110 - protein, 9 aa, synthetic construct
PIPGSVRLF

SEQ ID NO: 40111 - protein, 9 aa, synthetic construct
PLQASLHLH

SEQ ID NO: 40112 - protein, 9 aa, synthetic construct
PLQASLHLF

SEQ ID NO: 40113 - protein, 9 aa, synthetic construct
PLQASLHVH

SEQ ID NO: 40114 - protein, 9 aa, synthetic construct
PIPGVLKVR

SEQ ID NO: 40115 - protein, 9 aa, synthetic construct
PIPGGVHVH

SEQ ID NO: 40116 - protein, 9 aa, synthetic construct
PIPGGVRLF

SEQ ID NO: 40117 - protein, 9 aa, synthetic construct
PIPGGVRVR

SEQ ID NO: 40118 - protein, 9 aa, synthetic construct
PIPGGVKLK

SEQ ID NO: 40119 - protein, 9 aa, synthetic construct
PIPGGLHLR

SEQ ID NO: 40120 - protein, 9 aa, synthetic construct
PIPGGLRLF

SEQ ID NO: 40121 - protein, 9 aa, synthetic construct
PLQASARLY

SEQ ID NO: 40122 - protein, 9 aa, synthetic construct
PIPGGIRVR

SEQ ID NO: 40123 - protein, 9 aa, synthetic construct
PIPGGIRVK

SEQ ID NO: 40124 - protein, 9 aa, synthetic construct
PIPGGIRVF

SEQ ID NO: 40125 - protein, 9 aa, synthetic construct
PIPAAARLK

SEQ ID NO: 40126 - protein, 9 aa, synthetic construct
PIPAAGRLK

SEQ ID NO: 40127 - protein, 9 aa, synthetic construct
PIPAAGRVR

SEQ ID NO: 40128 - protein, 9 aa, synthetic construct
PIPATLHLY

SEQ ID NO: 40129 - protein, 9 aa, synthetic construct
PIPATLHLR

SEQ ID NO: 40130 - protein, 9 aa, synthetic construct
PIPATLRVY

SEQ ID NO: 40131 - protein, 9 aa, synthetic construct
PIPATLRVH

SEQ ID NO: 40132 - protein, 9 aa, synthetic construct
PIPASVRLF

SEQ ID NO: 40133 - protein, 9 aa, synthetic construct
PIPASVRVF

SEQ ID NO: 40134 - protein, 9 aa, synthetic construct
PIPASVKLK

SEQ ID NO: 40135 - protein, 9 aa, synthetic construct
PIPASLHLY

SEQ ID NO: 40136 - protein, 9 aa, synthetic construct
PIPASLHLK

SEQ ID NO: 40137 - protein, 9 aa, synthetic construct
PIPASLHLF

SEQ ID NO: 40138 - protein, 9 aa, synthetic construct
PIPASLRLR

SEQ ID NO: 40139 - protein, 9 aa, synthetic construct
PIPASLRLF

SEQ ID NO: 40140 - protein, 9 aa, synthetic construct
PIPASLRVY

SEQ ID NO: 40141 - protein, 9 aa, synthetic construct
PIPASLRVR

SEQ ID NO: 40142 - protein, 9 aa, synthetic construct
PIPASLRVH

SEQ ID NO: 40143 - protein, 9 aa, synthetic construct
PIPASLRVK

SEQ ID NO: 40144 - protein, 9 aa, synthetic construct
PLQASIKLY

SEQ ID NO: 40145 - protein, 9 aa, synthetic construct
PIPASLKVH

SEQ ID NO: 40146 - protein, 9 aa, synthetic construct
PIPASIRLY

SEQ ID NO: 40147 - protein, 9 aa, synthetic construct
PIPAVLRVR

SEQ ID NO: 40148 - protein, 9 aa, synthetic construct
PIPAVLKLR

SEQ ID NO: 40149 - protein, 9 aa, synthetic construct
PIPAVLKVR

SEQ ID NO: 40150 - protein, 9 aa, synthetic construct
PIPAVLKVH

SEQ ID NO: 40151 - protein, 9 aa, synthetic construct
PIPAVLKVK

SEQ ID NO: 40152 - protein, 9 aa, synthetic construct
PIPAVAHLY

SEQ ID NO: 40153 - protein, 9 aa, synthetic construct
PIPAVAKVF

SEQ ID NO: 40154 - protein, 9 aa, synthetic construct
PIPAVIRVH

SEQ ID NO: 40155 - protein, 9 aa, synthetic construct
PIPAVIKVR

SEQ ID NO: 40156 - protein, 9 aa, synthetic construct
PIPAVGRLY

SEQ ID NO: 40157 - protein, 9 aa, synthetic construct
PIPAGLRVY

SEQ ID NO: 40158 - protein, 9 aa, synthetic construct
GLNGAVHVF

SEQ ID NO: 40159 - protein, 9 aa, synthetic construct
GLNGAVRLF

SEQ ID NO: 40160 - protein, 9 aa, synthetic construct
GLNGAVRVF

SEQ ID NO: 40161 - protein, 9 aa, synthetic construct
GLNGAVKVK

SEQ ID NO: 40162 - protein, 9 aa, synthetic construct
PLQAVVRLK

SEQ ID NO: 40163 - protein, 9 aa, synthetic construct
PLQAVVKLF

SEQ ID NO: 40164 - protein, 9 aa, synthetic construct
PLQAVVKVY

SEQ ID NO: 40165 - protein, 9 aa, synthetic construct
GLNGTIKVH

SEQ ID NO: 40166 - protein, 9 aa, synthetic construct
PLQAVVKVK

SEQ ID NO: 40167 - protein, 9 aa, synthetic construct
GLNGSIHLF

SEQ ID NO: 40168 - protein, 9 aa, synthetic construct
GLNGSIRVR

SEQ ID NO: 40169 - protein, 9 aa, synthetic construct
GLNGSIRVF

SEQ ID NO: 40170 - protein, 9 aa, synthetic construct
GLNGVVHLH

SEQ ID NO: 40171 - protein, 9 aa, synthetic construct
PLQAVLRVR

SEQ ID NO: 40172 - protein, 9 aa, synthetic construct
GLNGVVRVY

SEQ ID NO: 40173 - protein, 9 aa, synthetic construct
GLNGVLRVY

SEQ ID NO: 40174 - protein, 9 aa, synthetic construct
PLQAVLKLY

SEQ ID NO: 40175 - protein, 9 aa, synthetic construct
GLNGVARLK

SEQ ID NO: 40176 - protein, 9 aa, synthetic construct
GLNGVAKLF

SEQ ID NO: 40177 - protein, 9 aa, synthetic construct
GLNGVIHLF

SEQ ID NO: 40178 - protein, 9 aa, synthetic construct
GLNGVIHVF

SEQ ID NO: 40179 - protein, 9 aa, synthetic construct
GLNGVIKLK

SEQ ID NO: 40180 - protein, 9 aa, synthetic construct
GLNGVIKVK

SEQ ID NO: 40181 - protein, 9 aa, synthetic construct
GLNGVGHVF

SEQ ID NO: 40182 - protein, 9 aa, synthetic construct
GLNGVGRVK

SEQ ID NO: 40183 - protein, 9 aa, synthetic construct
GLNGVGKLK

SEQ ID NO: 40184 - protein, 9 aa, synthetic construct
GLNGGVHLR

SEQ ID NO: 40185 - protein, 9 aa, synthetic construct
GLNGGVKVR

SEQ ID NO: 40186 - protein, 9 aa, synthetic construct
GLNGGVKVK

SEQ ID NO: 40187 - protein, 9 aa, synthetic construct
GLNGGAKLH

SEQ ID NO: 40188 - protein, 9 aa, synthetic construct
GLNGGAKVR

SEQ ID NO: 40189 - protein, 9 aa, synthetic construct
PLQAVARLY

SEQ ID NO: 40190 - protein, 9 aa, synthetic construct
GLNGGIRVY

SEQ ID NO: 40191 - protein, 9 aa, synthetic construct
GLNGGIRVR

SEQ ID NO: 40192 - protein, 9 aa, synthetic construct
GLNGGGKLR

SEQ ID NO: 40193 - protein, 9 aa, synthetic construct
GLNGGGKLK

SEQ ID NO: 40194 - protein, 9 aa, synthetic construct
GLNAAVHVY

SEQ ID NO: 40195 - protein, 9 aa, synthetic construct
GLNAALHLF

SEQ ID NO: 40196 - protein, 9 aa, synthetic construct
GLNAALRLF

SEQ ID NO: 40197 - protein, 9 aa, synthetic construct
GLNAALKLY

SEQ ID NO: 40198 - protein, 9 aa, synthetic construct
GLNAAIRLH

SEQ ID NO: 40199 - protein, 9 aa, synthetic construct
GLNAAIKLY

SEQ ID NO: 40200 - protein, 9 aa, synthetic construct
PLQAVIHLY

SEQ ID NO: 40201 - protein, 9 aa, synthetic construct
GLNATLKVF

SEQ ID NO: 40202 - protein, 9 aa, synthetic construct
GLNATAHVR

SEQ ID NO: 40203 - protein, 9 aa, synthetic construct
GLNATIHLF

SEQ ID NO: 40204 - protein, 9 aa, synthetic construct
PLNGAVKVK

SEQ ID NO: 40205 - protein, 9 aa, synthetic construct
GLNATGHVH

SEQ ID NO: 40206 - protein, 9 aa, synthetic construct
GLNATGHVF

SEQ ID NO: 40207 - protein, 9 aa, synthetic construct
GLNATGKVH

SEQ ID NO: 40208 - protein, 9 aa, synthetic construct
GLNASVKLK

SEQ ID NO: 40209 - protein, 9 aa, synthetic construct
GLNASLHLY

SEQ ID NO: 40210 - protein, 9 aa, synthetic construct
GLNASLHLK

SEQ ID NO: 40211 - protein, 9 aa, synthetic construct
GLNASLHLF

SEQ ID NO: 40212 - protein, 9 aa, synthetic construct
GLNASLHVF

SEQ ID NO: 40213 - protein, 9 aa, synthetic construct
GLNAVVHLF

SEQ ID NO: 40214 - protein, 9 aa, synthetic construct
GLNAVLKVR

SEQ ID NO: 40215 - protein, 9 aa, synthetic construct
GLNAVIHVF

SEQ ID NO: 40216 - protein, 9 aa, synthetic construct
GLNAVIKLH

SEQ ID NO: 40217 - protein, 9 aa, synthetic construct
GLNAVIKLF

SEQ ID NO: 40218 - protein, 9 aa, synthetic construct
GLNAVGRLF

SEQ ID NO: 40219 - protein, 9 aa, synthetic construct
GLNAGVHVR

SEQ ID NO: 40220 - protein, 9 aa, synthetic construct
GLNAGVRLF

SEQ ID NO: 40221 - protein, 9 aa, synthetic construct
GLQGAVHVR

SEQ ID NO: 40222 - protein, 9 aa, synthetic construct
GLQGAVKLH

SEQ ID NO: 40223 - protein, 9 aa, synthetic construct
GLQGAVKVK

SEQ ID NO: 40224 - protein, 9 aa, synthetic construct
GLQGAIRVF

SEQ ID NO: 40225 - protein, 9 aa, synthetic construct
GLQGAIKLR

SEQ ID NO: 40226 - protein, 9 aa, synthetic construct
GLQGAIKLK

SEQ ID NO: 40227 - protein, 9 aa, synthetic construct
PLNGTGRVH

SEQ ID NO: 40228 - protein, 9 aa, synthetic construct
GLQGTIKLR

SEQ ID NO: 40229 - protein, 9 aa, synthetic construct
GLQGTIKVH

SEQ ID NO: 40230 - protein, 9 aa, synthetic construct
GLQGSLHLF

SEQ ID NO: 40231 - protein, 9 aa, synthetic construct
GLQGSAHVR

SEQ ID NO: 40232 - protein, 9 aa, synthetic construct
GLQGSAHVH

SEQ ID NO: 40233 - protein, 9 aa, synthetic construct
GLQGSAHVK

SEQ ID NO: 40234 - protein, 9 aa, synthetic construct
GLQGSARVF

SEQ ID NO: 40235 - protein, 9 aa, synthetic construct
GLQGSAKLY

SEQ ID NO: 40236 - protein, 9 aa, synthetic construct
GLQGSAKVY

SEQ ID NO: 40237 - protein, 9 aa, synthetic construct
GLQGSAKVH

SEQ ID NO: 40238 - protein, 9 aa, synthetic construct
GLQGSIKVH

SEQ ID NO: 40239 - protein, 9 aa, synthetic construct
GLQGVVHLF

SEQ ID NO: 40240 - protein, 9 aa, synthetic construct
GLQGVVHVY

SEQ ID NO: 40241 - protein, 9 aa, synthetic construct
GLQGVVKVF

SEQ ID NO: 40242 - protein, 9 aa, synthetic construct
GLQGVLHLH

SEQ ID NO: 40243 - protein, 9 aa, synthetic construct
GLQGVAHLY

SEQ ID NO: 40244 - protein, 9 aa, synthetic construct
GLQGVIHLY

SEQ ID NO: 40245 - protein, 9 aa, synthetic construct
GLQGVIKVK

SEQ ID NO: 40246 - protein, 9 aa, synthetic construct
GLQGGVHLH

SEQ ID NO: 40247 - protein, 9 aa, synthetic construct
GLQGGVRLF

SEQ ID NO: 40248 - protein, 9 aa, synthetic construct
GLQGGVKVY

SEQ ID NO: 40249 - protein, 9 aa, synthetic construct
GLQGGVKVK

SEQ ID NO: 40250 - protein, 9 aa, synthetic construct
GLQGGAHLH

SEQ ID NO: 40251 - protein, 9 aa, synthetic construct
GLQGGAHVR

SEQ ID NO: 40252 - protein, 9 aa, synthetic construct
GLQGGAHVK

SEQ ID NO: 40253 - protein, 9 aa, synthetic construct
GLQGGAKLH

SEQ ID NO: 40254 - protein, 9 aa, synthetic construct
GLQGGAKVR

SEQ ID NO: 40255 - protein, 9 aa, synthetic construct
GLQGGIRLY

SEQ ID NO: 40256 - protein, 9 aa, synthetic construct
GLQGGIKLY

SEQ ID NO: 40257 - protein, 9 aa, synthetic construct
GLQGGIKVH

SEQ ID NO: 40258 - protein, 9 aa, synthetic construct
GLQGGGHLF

SEQ ID NO: 40259 - protein, 9 aa, synthetic construct
GLQGGGHVR

SEQ ID NO: 40260 - protein, 9 aa, synthetic construct
GLQGGGHVH

SEQ ID NO: 40261 - protein, 9 aa, synthetic construct
GLQGGGHVF

SEQ ID NO: 40262 - protein, 9 aa, synthetic construct
GLQGGGRLH

SEQ ID NO: 40263 - protein, 9 aa, synthetic construct
GLQGGGKLY

SEQ ID NO: 40264 - protein, 9 aa, synthetic construct
GLQGGGKLF

SEQ ID NO: 40265 - protein, 9 aa, synthetic construct
GLQGGGKVF

SEQ ID NO: 40266 - protein, 9 aa, synthetic construct
GLQAAVHVY

SEQ ID NO: 40267 - protein, 9 aa, synthetic construct
GLQAAVKVK

SEQ ID NO: 40268 - protein, 9 aa, synthetic construct
GLQAALHVY

SEQ ID NO: 40269 - protein, 9 aa, synthetic construct
GLQAALKVK

SEQ ID NO: 40270 - protein, 9 aa, synthetic construct
GLQATVHLH

SEQ ID NO: 40271 - protein, 9 aa, synthetic construct
GLQATLKLY

SEQ ID NO: 40272 - protein, 9 aa, synthetic construct
GLQATAKLY

SEQ ID NO: 40273 - protein, 9 aa, synthetic construct
GLQATAKLF

SEQ ID NO: 40274 - protein, 9 aa, synthetic construct
GLQATIHVR

SEQ ID NO: 40275 - protein, 9 aa, synthetic construct
GLQASVHVF

SEQ ID NO: 40276 - protein, 9 aa, synthetic construct
GLQASVRVF

SEQ ID NO: 40277 - protein, 9 aa, synthetic construct
GLQASVKLY

SEQ ID NO: 40278 - protein, 9 aa, synthetic construct
GLQASVKLH

SEQ ID NO: 40279 - protein, 9 aa, synthetic construct
GLQASLHLF

SEQ ID NO: 40280 - protein, 9 aa, synthetic construct
GLQASAHLY

SEQ ID NO: 40281 - protein, 9 aa, synthetic construct
GLQASAHLR

SEQ ID NO: 40282 - protein, 9 aa, synthetic construct
GLQASAHLK

SEQ ID NO: 40283 - protein, 9 aa, synthetic construct
GLQASAHLF

SEQ ID NO: 40284 - protein, 9 aa, synthetic construct
GLQASAHVY

SEQ ID NO: 40285 - protein, 9 aa, synthetic construct
GLQASAHVK

SEQ ID NO: 40286 - protein, 9 aa, synthetic construct
GLQASAHVF

SEQ ID NO: 40287 - protein, 9 aa, synthetic construct
GLQASARLY

SEQ ID NO: 40288 - protein, 9 aa, synthetic construct
GLQASARVY

SEQ ID NO: 40289 - protein, 9 aa, synthetic construct
GLQASARVH

SEQ ID NO: 40290 - protein, 9 aa, synthetic construct
GLQASAKLF

SEQ ID NO: 40291 - protein, 9 aa, synthetic construct
GLQASIKLY

SEQ ID NO: 40292 - protein, 9 aa, synthetic construct
GLQASGHVR

SEQ ID NO: 40293 - protein, 9 aa, synthetic construct
GLQASGHVH

SEQ ID NO: 40294 - protein, 9 aa, synthetic construct
GLQASGKVY

SEQ ID NO: 40295 - protein, 9 aa, synthetic construct
GLQAVIHLY

SEQ ID NO: 40296 - protein, 9 aa, synthetic construct
PLNGTGKVK

SEQ ID NO: 40297 - protein, 9 aa, synthetic construct
GLQAGAHVR

SEQ ID NO: 40298 - protein, 9 aa, synthetic construct
GLQAGGHLF

SEQ ID NO: 40299 - protein, 9 aa, synthetic construct
GLQAGGKLF

SEQ ID NO: 40300 - protein, 9 aa, synthetic construct
PLPGAVRLF

SEQ ID NO: 40301 - protein, 9 aa, synthetic construct
GLPGTVKLK

SEQ ID NO: 40302 - protein, 9 aa, synthetic construct
GLPGTLHVF

SEQ ID NO: 40303 - protein, 9 aa, synthetic construct
GLPGTIRVH

SEQ ID NO: 40304 - protein, 9 aa, synthetic construct
GLPGTIKVH

SEQ ID NO: 40305 - protein, 9 aa, synthetic construct
GLPGSIRVF

SEQ ID NO: 40306 - protein, 9 aa, synthetic construct
PLPGALRLF

SEQ ID NO: 40307 - protein, 9 aa, synthetic construct
GLPGVVHLH

SEQ ID NO: 40308 - protein, 9 aa, synthetic construct
GLPGVLHLH

SEQ ID NO: 40309 - protein, 9 aa, synthetic construct
PLPGALRVF

SEQ ID NO: 40310 - protein, 9 aa, synthetic construct
GLPGVAHLF

SEQ ID NO: 40311 - protein, 9 aa, synthetic construct
GLPGVARVY

SEQ ID NO: 40312 - protein, 9 aa, synthetic construct
GLPGVARVH

SEQ ID NO: 40313 - protein, 9 aa, synthetic construct
GLPGVAKVF

SEQ ID NO: 40314 - protein, 9 aa, synthetic construct
GLPGVIKVK

SEQ ID NO: 40315 - protein, 9 aa, synthetic construct
GLPGVGKVH

SEQ ID NO: 40316 - protein, 9 aa, synthetic construct
GLPGGVRVH

SEQ ID NO: 40317 - protein, 9 aa, synthetic construct
GLPGGVRVF

SEQ ID NO: 40318 - protein, 9 aa, synthetic construct
GLPGGAHLY

SEQ ID NO: 40319 - protein, 9 aa, synthetic construct
GLPGGAHVY

SEQ ID NO: 40320 - protein, 9 aa, synthetic construct
GLPGGAKLH

SEQ ID NO: 40321 - protein, 9 aa, synthetic construct
GLPGGIHLH

SEQ ID NO: 40322 - protein, 9 aa, synthetic construct
GLPGGIRVY

SEQ ID NO: 40323 - protein, 9 aa, synthetic construct
GLPGGIRVR

SEQ ID NO: 40324 - protein, 9 aa, synthetic construct
GLPGGIRVF

SEQ ID NO: 40325 - protein, 9 aa, synthetic construct
GLPGGIKVR

SEQ ID NO: 40326 - protein, 9 aa, synthetic construct
GLPGGIKVF

SEQ ID NO: 40327 - protein, 9 aa, synthetic construct
PLPGAARLK

SEQ ID NO: 40328 - protein, 9 aa, synthetic construct
GLPGGGKVK

SEQ ID NO: 40329 - protein, 9 aa, synthetic construct
GLPAAVHVR

SEQ ID NO: 40330 - protein, 9 aa, synthetic construct
GLPAAVRLF

SEQ ID NO: 40331 - protein, 9 aa, synthetic construct
GLPAAIRVK

SEQ ID NO: 40332 - protein, 9 aa, synthetic construct
GLPATIRVH

SEQ ID NO: 40333 - protein, 9 aa, synthetic construct
GLPATIKLH

SEQ ID NO: 40334 - protein, 9 aa, synthetic construct
GLPATIKLF

SEQ ID NO: 40335 - protein, 9 aa, synthetic construct
GLPATIKVY

SEQ ID NO: 40336 - protein, 9 aa, synthetic construct
GLPATIKVR

SEQ ID NO: 40337 - protein, 9 aa, synthetic construct
PLPGAIKVR

SEQ ID NO: 40338 - protein, 9 aa, synthetic construct
GLPAVVHVR

SEQ ID NO: 40339 - protein, 9 aa, synthetic construct
GLPAVLHVH

SEQ ID NO: 40340 - protein, 9 aa, synthetic construct
GLPAVAKVH

SEQ ID NO: 40341 - protein, 9 aa, synthetic construct
GLPAVAKVF

SEQ ID NO: 40342 - protein, 9 aa, synthetic construct
GLPAVIRVH

SEQ ID NO: 40343 - protein, 9 aa, synthetic construct
GLPAVIKVY

SEQ ID NO: 40344 - protein, 9 aa, synthetic construct
GLPAVIKVK

SEQ ID NO: 40345 - protein, 9 aa, synthetic construct
GLPAVIKVF

SEQ ID NO: 40346 - protein, 9 aa, synthetic construct
GLPAVGRLY

SEQ ID NO: 40347 - protein, 9 aa, synthetic construct
GLPAGVHVF

SEQ ID NO: 40348 - protein, 9 aa, synthetic construct
GLPAGVKLY

SEQ ID NO: 40349 - protein, 9 aa, synthetic construct
GLPAGLRLR

SEQ ID NO: 40350 - protein, 9 aa, synthetic construct
GLPAGLRLH

SEQ ID NO: 40351 - protein, 9 aa, synthetic construct
GLPAGLRLK

SEQ ID NO: 40352 - protein, 9 aa, synthetic construct
PLNGSVRLF

SEQ ID NO: 40353 - protein, 9 aa, synthetic construct
GLPAGIRLF

SEQ ID NO: 40354 - protein, 9 aa, synthetic construct
GLPAGIRVR

SEQ ID NO: 40355 - protein, 9 aa, synthetic construct
GLPAGIKVR

SEQ ID NO: 40356 - protein, 9 aa, synthetic construct
PLPGAGKVK

SEQ ID NO: 40357 - protein, 9 aa, synthetic construct
GTNGAVHLF

SEQ ID NO: 40358 - protein, 9 aa, synthetic construct
GTNGAVHVF

SEQ ID NO: 40359 - protein, 9 aa, synthetic construct
GTNGAVRVF

SEQ ID NO: 40360 - protein, 9 aa, synthetic construct
GTNGAVKVK

SEQ ID NO: 40361 - protein, 9 aa, synthetic construct
GTNGALRVF

SEQ ID NO: 40362 - protein, 9 aa, synthetic construct
GTNGALKVY

SEQ ID NO: 40363 - protein, 9 aa, synthetic construct
GTNGAARLK

SEQ ID NO: 40364 - protein, 9 aa, synthetic construct
GTNGAAKVR

SEQ ID NO: 40365 - protein, 9 aa, synthetic construct
GTNGAIRLF

SEQ ID NO: 40366 - protein, 9 aa, synthetic construct
GTNGAIRVR

SEQ ID NO: 40367 - protein, 9 aa, synthetic construct
GTNGAIKVY

SEQ ID NO: 40368 - protein, 9 aa, synthetic construct
GTNGAGRVR

SEQ ID NO: 40369 - protein, 9 aa, synthetic construct
GTNGTLRLK

SEQ ID NO: 40370 - protein, 9 aa, synthetic construct
GTNGTLRVR

SEQ ID NO: 40371 - protein, 9 aa, synthetic construct
GTNGTLKVY

SEQ ID NO: 40372 - protein, 9 aa, synthetic construct
GTNGTGKLK

SEQ ID NO: 40373 - protein, 9 aa, synthetic construct
PLPGTLHLY

SEQ ID NO: 40374 - protein, 9 aa, synthetic construct
GTNGSLHVR

SEQ ID NO: 40375 - protein, 9 aa, synthetic construct
GTNGSIRLR

SEQ ID NO: 40376 - protein, 9 aa, synthetic construct
GTNGVVRVY

SEQ ID NO: 40377 - protein, 9 aa, synthetic construct
GTNGVLHLY

SEQ ID NO: 40378 - protein, 9 aa, synthetic construct
GTNGVLHLF

SEQ ID NO: 40379 - protein, 9 aa, synthetic construct
GTNGVLRVY

SEQ ID NO: 40380 - protein, 9 aa, synthetic construct
GTNGVAHVR

SEQ ID NO: 40381 - protein, 9 aa, synthetic construct
GTNGGIRVY

SEQ ID NO: 40382 - protein, 9 aa, synthetic construct
GTNGGIKVR

SEQ ID NO: 40383 - protein, 9 aa, synthetic construct
GTNGGGKVR

SEQ ID NO: 40384 - protein, 9 aa, synthetic construct
GTNAAVHLY

SEQ ID NO: 40385 - protein, 9 aa, synthetic construct
GTNAAVHLF

SEQ ID NO: 40386 - protein, 9 aa, synthetic construct
GTNAAVHVY

SEQ ID NO: 40387 - protein, 9 aa, synthetic construct
GTNAALKLY

SEQ ID NO: 40388 - protein, 9 aa, synthetic construct
GTNAAARLK

SEQ ID NO: 40389 - protein, 9 aa, synthetic construct
GTNATLKLR

SEQ ID NO: 40390 - protein, 9 aa, synthetic construct
GTNATLKLH

SEQ ID NO: 40391 - protein, 9 aa, synthetic construct
GTNATLKVY

SEQ ID NO: 40392 - protein, 9 aa, synthetic construct
GTNASVRLF

SEQ ID NO: 40393 - protein, 9 aa, synthetic construct
GTNASAHLR

SEQ ID NO: 40394 - protein, 9 aa, synthetic construct
GTNASIHVF

SEQ ID NO: 40395 - protein, 9 aa, synthetic construct
GTNAVLHLH

SEQ ID NO: 40396 - protein, 9 aa, synthetic construct
GTNAVLKLF

SEQ ID NO: 40397 - protein, 9 aa, synthetic construct
GTNAVAHVY

SEQ ID NO: 40398 - protein, 9 aa, synthetic construct
GTNAVAHVR

SEQ ID NO: 40399 - protein, 9 aa, synthetic construct
GTNAVIHLF

SEQ ID NO: 40400 - protein, 9 aa, synthetic construct
GTNAVIKLF

SEQ ID NO: 40401 - protein, 9 aa, synthetic construct
GTNAVGHVK

SEQ ID NO: 40402 - protein, 9 aa, synthetic construct
GTNAGLRLH

SEQ ID NO: 40403 - protein, 9 aa, synthetic construct
GTNAGAKVR

SEQ ID NO: 40404 - protein, 9 aa, synthetic construct
GTNAGIRVR

SEQ ID NO: 40405 - protein, 9 aa, synthetic construct
PLPGSVHLF

SEQ ID NO: 40406 - protein, 9 aa, synthetic construct
GTQGAGRVR

SEQ ID NO: 40407 - protein, 9 aa, synthetic construct
GTQGTLHLY

SEQ ID NO: 40408 - protein, 9 aa, synthetic construct
GTQGSVRLH

SEQ ID NO: 40409 - protein, 9 aa, synthetic construct
GTQGSVKVK

SEQ ID NO: 40410 - protein, 9 aa, synthetic construct
GTQGSLHVF

SEQ ID NO: 40411 - protein, 9 aa, synthetic construct
GTQGSLKVY

SEQ ID NO: 40412 - protein, 9 aa, synthetic construct
GTQGSARVF

SEQ ID NO: 40413 - protein, 9 aa, synthetic construct
GTQGSAKLH

SEQ ID NO: 40414 - protein, 9 aa, synthetic construct
GTQGSAKLF

SEQ ID NO: 40415 - protein, 9 aa, synthetic construct
GTQGSGHVY

SEQ ID NO: 40416 - protein, 9 aa, synthetic construct
GTQGVLHLY

SEQ ID NO: 40417 - protein, 9 aa, synthetic construct
GTQGVLHLH

SEQ ID NO: 40418 - protein, 9 aa, synthetic construct
GTQGVLRLF

SEQ ID NO: 40419 - protein, 9 aa, synthetic construct
GTQGVLKLF

SEQ ID NO: 40420 - protein, 9 aa, synthetic construct
GTQGVGRLY

SEQ ID NO: 40421 - protein, 9 aa, synthetic construct
GTQGGAKVR

SEQ ID NO: 40422 - protein, 9 aa, synthetic construct
GTQGGIRVR

SEQ ID NO: 40423 - protein, 9 aa, synthetic construct
GTQAAVRLF

SEQ ID NO: 40424 - protein, 9 aa, synthetic construct
GTQAALHLH

SEQ ID NO: 40425 - protein, 9 aa, synthetic construct
GTQAALKVK

SEQ ID NO: 40426 - protein, 9 aa, synthetic construct
GTQATLHLY

SEQ ID NO: 40427 - protein, 9 aa, synthetic construct
GTQATLHLK

SEQ ID NO: 40428 - protein, 9 aa, synthetic construct
GTQATIHLF

SEQ ID NO: 40429 - protein, 9 aa, synthetic construct
GTQASVHVF

SEQ ID NO: 40430 - protein, 9 aa, synthetic construct
PLPGSIRVR

SEQ ID NO: 40431 - protein, 9 aa, synthetic construct
GTQASLHLF

SEQ ID NO: 40432 - protein, 9 aa, synthetic construct
GTQASLHVH

SEQ ID NO: 40433 - protein, 9 aa, synthetic construct
PLPGSIRVF

SEQ ID NO: 40434 - protein, 9 aa, synthetic construct
GTQASIKVY

SEQ ID NO: 40435 - protein, 9 aa, synthetic construct
GTQAVIHLY

SEQ ID NO: 40436 - protein, 9 aa, synthetic construct
GTQAVIHLR

SEQ ID NO: 40437 - protein, 9 aa, synthetic construct
GTQAVIHLF

SEQ ID NO: 40438 - protein, 9 aa, synthetic construct
GTQAGAHLR

SEQ ID NO: 40439 - protein, 9 aa, synthetic construct
GTPGAVRLF

SEQ ID NO: 40440 - protein, 9 aa, synthetic construct
GTPGAVKLK

SEQ ID NO: 40441 - protein, 9 aa, synthetic construct
GTPGAVKVK

SEQ ID NO: 40442 - protein, 9 aa, synthetic construct
GTPGALHLH

SEQ ID NO: 40443 - protein, 9 aa, synthetic construct
GTPGALRLH

SEQ ID NO: 40444 - protein, 9 aa, synthetic construct
GTPGAARLK

SEQ ID NO: 40445 - protein, 9 aa, synthetic construct
GTPGAAKLK

SEQ ID NO: 40446 - protein, 9 aa, synthetic construct
GTPGAIKVR

SEQ ID NO: 40447 - protein, 9 aa, synthetic construct
GTPGAGRLR

SEQ ID NO: 40448 - protein, 9 aa, synthetic construct
GTPGAGRVR

SEQ ID NO: 40449 - protein, 9 aa, synthetic construct
GTPGAGKVK

SEQ ID NO: 40450 - protein, 9 aa, synthetic construct
GTPGTLRVR

SEQ ID NO: 40451 - protein, 9 aa, synthetic construct
GTPGTGRLR

SEQ ID NO: 40452 - protein, 9 aa, synthetic construct
GTPGTGKVH

SEQ ID NO: 40453 - protein, 9 aa, synthetic construct
GTPGSVHVR

SEQ ID NO: 40454 - protein, 9 aa, synthetic construct
GTPGSVRVY

SEQ ID NO: 40455 - protein, 9 aa, synthetic construct
GTPGSVRVH

SEQ ID NO: 40456 - protein, 9 aa, synthetic construct
GTPGSLRLF

SEQ ID NO: 40457 - protein, 9 aa, synthetic construct
GTPGSLKLF

SEQ ID NO: 40458 - protein, 9 aa, synthetic construct
GTPGSLKVH

SEQ ID NO: 40459 - protein, 9 aa, synthetic construct
GTPGSIRVH

SEQ ID NO: 40460 - protein, 9 aa, synthetic construct
GTPGSGHVF

SEQ ID NO: 40461 - protein, 9 aa, synthetic construct
GTPGVLRVY

SEQ ID NO: 40462 - protein, 9 aa, synthetic construct
GTPGVAHLY

SEQ ID NO: 40463 - protein, 9 aa, synthetic construct
GTPGVAKVF

SEQ ID NO: 40464 - protein, 9 aa, synthetic construct
GTPGVIRLY

SEQ ID NO: 40465 - protein, 9 aa, synthetic construct
GTPGVIKVK

SEQ ID NO: 40466 - protein, 9 aa, synthetic construct
GTPGGVRLR

SEQ ID NO: 40467 - protein, 9 aa, synthetic construct
GTPGGLRLF

SEQ ID NO: 40468 - protein, 9 aa, synthetic construct
GTPGGARLK

SEQ ID NO: 40469 - protein, 9 aa, synthetic construct
GTPGGAKVR

SEQ ID NO: 40470 - protein, 9 aa, synthetic construct
GTPGGIRVF

SEQ ID NO: 40471 - protein, 9 aa, synthetic construct
GTPGGGKLK

SEQ ID NO: 40472 - protein, 9 aa, synthetic construct
GTPGGGKVR

SEQ ID NO: 40473 - protein, 9 aa, synthetic construct
GTPAAARLK

SEQ ID NO: 40474 - protein, 9 aa, synthetic construct
GTPAAIRVR

SEQ ID NO: 40475 - protein, 9 aa, synthetic construct
PLPGVAKVR

SEQ ID NO: 40476 - protein, 9 aa, synthetic construct
GTPAAIKVR

SEQ ID NO: 40477 - protein, 9 aa, synthetic construct
GTPAAIKVK

SEQ ID NO: 40478 - protein, 9 aa, synthetic construct
PLPGVAKVK

SEQ ID NO: 40479 - protein, 9 aa, synthetic construct
GTPAAGRLK

SEQ ID NO: 40480 - protein, 9 aa, synthetic construct
PLPGVAKVF

SEQ ID NO: 40481 - protein, 9 aa, synthetic construct
GTPATLHLR

SEQ ID NO: 40482 - protein, 9 aa, synthetic construct
GTPATLKLF

SEQ ID NO: 40483 - protein, 9 aa, synthetic construct
GTPATIKVR

SEQ ID NO: 40484 - protein, 9 aa, synthetic construct
GTPATGRLK

SEQ ID NO: 40485 - protein, 9 aa, synthetic construct
GTPATGKVK

SEQ ID NO: 40486 - protein, 9 aa, synthetic construct
GTPASVHVF

SEQ ID NO: 40487 - protein, 9 aa, synthetic construct
GTPASVRLF

SEQ ID NO: 40488 - protein, 9 aa, synthetic construct
GTPASVKLK

SEQ ID NO: 40489 - protein, 9 aa, synthetic construct
PLPGVIRVK

SEQ ID NO: 40490 - protein, 9 aa, synthetic construct
GTPASLHLF

SEQ ID NO: 40491 - protein, 9 aa, synthetic construct
PLPGVIKLY

SEQ ID NO: 40492 - protein, 9 aa, synthetic construct
PLPGVIKLK

SEQ ID NO: 40493 - protein, 9 aa, synthetic construct
GTPASIRVR

SEQ ID NO: 40494 - protein, 9 aa, synthetic construct
PLPGVIKVR

SEQ ID NO: 40495 - protein, 9 aa, synthetic construct
PLPGVIKVF

SEQ ID NO: 40496 - protein, 9 aa, synthetic construct
GTPAVLRVY

SEQ ID NO: 40497 - protein, 9 aa, synthetic construct
GTPAVLKVR

SEQ ID NO: 40498 - protein, 9 aa, synthetic construct
GTPAVARLK

SEQ ID NO: 40499 - protein, 9 aa, synthetic construct
GTPAVARVF

SEQ ID NO: 40500 - protein, 9 aa, synthetic construct
GTPAVAKVH

SEQ ID NO: 40501 - protein, 9 aa, synthetic construct
GTPAVAKVK

SEQ ID NO: 40502 - protein, 9 aa, synthetic construct
GTPAVIHLY

SEQ ID NO: 40503 - protein, 9 aa, synthetic construct
GTPAGVHVF

SEQ ID NO: 40504 - protein, 9 aa, synthetic construct
GTPAGVRLF

SEQ ID NO: 40505 - protein, 9 aa, synthetic construct
GTPAGVRVF

SEQ ID NO: 40506 - protein, 9 aa, synthetic construct
GTPAGVKLY

SEQ ID NO: 40507 - protein, 9 aa, synthetic construct
GTPAGIHLH

SEQ ID NO: 40508 - protein, 9 aa, synthetic construct
GTPAGIHVH

SEQ ID NO: 40509 - protein, 9 aa, synthetic construct
GTPAGIRLR

SEQ ID NO: 40510 - protein, 9 aa, synthetic construct
GTPAGIRLK

SEQ ID NO: 40511 - protein, 9 aa, synthetic construct
GTPAGIRVY

SEQ ID NO: 40512 - protein, 9 aa, synthetic construct
GTPAGIRVH

SEQ ID NO: 40513 - protein, 9 aa, synthetic construct
GTPAGIRVK

SEQ ID NO: 40514 - protein, 9 aa, synthetic construct
GTPAGIRVF

SEQ ID NO: 40515 - protein, 9 aa, synthetic construct
GTPAGIKLH

SEQ ID NO: 40516 - protein, 9 aa, synthetic construct
GTPAGGHLH

SEQ ID NO: 40517 - protein, 9 aa, synthetic construct
GSNGAVRLF

SEQ ID NO: 40518 - protein, 9 aa, synthetic construct
GSNGAVKVK

SEQ ID NO: 40519 - protein, 9 aa, synthetic construct
GSNGAARLK

SEQ ID NO: 40520 - protein, 9 aa, synthetic construct
GSNGAIKVK

SEQ ID NO: 40521 - protein, 9 aa, synthetic construct
GSNGTLHLR

SEQ ID NO: 40522 - protein, 9 aa, synthetic construct
GSNGTLRLR

SEQ ID NO: 40523 - protein, 9 aa, synthetic construct
GSNGTLRLK

SEQ ID NO: 40524 - protein, 9 aa, synthetic construct
GSNGTIHLF

SEQ ID NO: 40525 - protein, 9 aa, synthetic construct
GSNGTIKVF

SEQ ID NO: 40526 - protein, 9 aa, synthetic construct
GSNGTGRLK

SEQ ID NO: 40527 - protein, 9 aa, synthetic construct
GSNGTGKLR

SEQ ID NO: 40528 - protein, 9 aa, synthetic construct
GSNGTGKLK

SEQ ID NO: 40529 - protein, 9 aa, synthetic construct
GSNGSAHLK

SEQ ID NO: 40530 - protein, 9 aa, synthetic construct
GSNGSIRVF

SEQ ID NO: 40531 - protein, 9 aa, synthetic construct
PLPGGLRLF

SEQ ID NO: 40532 - protein, 9 aa, synthetic construct
GSNGSGKVK

SEQ ID NO: 40533 - protein, 9 aa, synthetic construct
GSNGVVHLF

SEQ ID NO: 40534 - protein, 9 aa, synthetic construct
GSNGVVRVY

SEQ ID NO: 40535 - protein, 9 aa, synthetic construct
GSNGVLHLF

SEQ ID NO: 40536 - protein, 9 aa, synthetic construct
PLPGGLRVF

SEQ ID NO: 40537 - protein, 9 aa, synthetic construct
GSNGVIHLF

SEQ ID NO: 40538 - protein, 9 aa, synthetic construct
GSNGVIKLK

SEQ ID NO: 40539 - protein, 9 aa, synthetic construct
GSNGVIKVK

SEQ ID NO: 40540 - protein, 9 aa, synthetic construct
GSNGVGRLK

SEQ ID NO: 40541 - protein, 9 aa, synthetic construct
GSNGGVHLH

SEQ ID NO: 40542 - protein, 9 aa, synthetic construct
GSNGGVKVK

SEQ ID NO: 40543 - protein, 9 aa, synthetic construct
GSNGGAKVR

SEQ ID NO: 40544 - protein, 9 aa, synthetic construct
GSNGGIRVR

SEQ ID NO: 40545 - protein, 9 aa, synthetic construct
GSNAALKLY

SEQ ID NO: 40546 - protein, 9 aa, synthetic construct
GSNAAARLK

SEQ ID NO: 40547 - protein, 9 aa, synthetic construct
GSNATVHLF

SEQ ID NO: 40548 - protein, 9 aa, synthetic construct
GSNATLKVY

SEQ ID NO: 40549 - protein, 9 aa, synthetic construct
GSNATAKVK

SEQ ID NO: 40550 - protein, 9 aa, synthetic construct
GSNATIHLH

SEQ ID NO: 40551 - protein, 9 aa, synthetic construct
GSNATIHLF

SEQ ID NO: 40552 - protein, 9 aa, synthetic construct
GSNATGHVR

SEQ ID NO: 40553 - protein, 9 aa, synthetic construct
PLPGGIRVY

SEQ ID NO: 40554 - protein, 9 aa, synthetic construct
GSNASVHLY

SEQ ID NO: 40555 - protein, 9 aa, synthetic construct
GSNASVHLF

SEQ ID NO: 40556 - protein, 9 aa, synthetic construct
GSNASVRVY

SEQ ID NO: 40557 - protein, 9 aa, synthetic construct
GSNASVKLK

SEQ ID NO: 40558 - protein, 9 aa, synthetic construct
GSNASLHVF

SEQ ID NO: 40559 - protein, 9 aa, synthetic construct
PLPGGIRVF

SEQ ID NO: 40560 - protein, 9 aa, synthetic construct
GSNASARLH

SEQ ID NO: 40561 - protein, 9 aa, synthetic construct
GSNASAKVK

SEQ ID NO: 40562 - protein, 9 aa, synthetic construct
GSNASIHVF

SEQ ID NO: 40563 - protein, 9 aa, synthetic construct
GSNASIRVR

SEQ ID NO: 40564 - protein, 9 aa, synthetic construct
GSNASIKVR

SEQ ID NO: 40565 - protein, 9 aa, synthetic construct
GSNASGKLH

SEQ ID NO: 40566 - protein, 9 aa, synthetic construct
GSNASGKVK

SEQ ID NO: 40567 - protein, 9 aa, synthetic construct
GSNAVGRLF

SEQ ID NO: 40568 - protein, 9 aa, synthetic construct
GSNAVGKLH

SEQ ID NO: 40569 - protein, 9 aa, synthetic construct
GSNAVGKVH

SEQ ID NO: 40570 - protein, 9 aa, synthetic construct
GSNAVGKVF

SEQ ID NO: 40571 - protein, 9 aa, synthetic construct
GSNAGLRVY

SEQ ID NO: 40572 - protein, 9 aa, synthetic construct
GSNAGIRVR

SEQ ID NO: 40573 - protein, 9 aa, synthetic construct
PLPGGGKVR

SEQ ID NO: 40574 - protein, 9 aa, synthetic construct
GSNAGIKVR

SEQ ID NO: 40575 - protein, 9 aa, synthetic construct
GSQGTLHLY

SEQ ID NO: 40576 - protein, 9 aa, synthetic construct
GSQGTLHLF

SEQ ID NO: 40577 - protein, 9 aa, synthetic construct
GSQGTIRVH

SEQ ID NO: 40578 - protein, 9 aa, synthetic construct
PLPAAVKVK

SEQ ID NO: 40579 - protein, 9 aa, synthetic construct
GSQGSVHLH

SEQ ID NO: 40580 - protein, 9 aa, synthetic construct
GSQGSVRLF

SEQ ID NO: 40581 - protein, 9 aa, synthetic construct
GSQGSVRVH

SEQ ID NO: 40582 - protein, 9 aa, synthetic construct
GSQGSVRVF

SEQ ID NO: 40583 - protein, 9 aa, synthetic construct
GSQGSVKLH

SEQ ID NO: 40584 - protein, 9 aa, synthetic construct
GSQGSVKVH

SEQ ID NO: 40585 - protein, 9 aa, synthetic construct
GSQGSVKVK

SEQ ID NO: 40586 - protein, 9 aa, synthetic construct
GSQGSLHLF

SEQ ID NO: 40587 - protein, 9 aa, synthetic construct
GSQGSLHVF

SEQ ID NO: 40588 - protein, 9 aa, synthetic construct
GSQGSLKVH

SEQ ID NO: 40589 - protein, 9 aa, synthetic construct
GSQGSAHLR

SEQ ID NO: 40590 - protein, 9 aa, synthetic construct
GSQGSAHLK

SEQ ID NO: 40591 - protein, 9 aa, synthetic construct
GSQGSAHVY

SEQ ID NO: 40592 - protein, 9 aa, synthetic construct
GSQGSAHVK

SEQ ID NO: 40593 - protein, 9 aa, synthetic construct
GSQGSAKLY

SEQ ID NO: 40594 - protein, 9 aa, synthetic construct
GSQGSAKLH

SEQ ID NO: 40595 - protein, 9 aa, synthetic construct
GSQGSIRLY

SEQ ID NO: 40596 - protein, 9 aa, synthetic construct
GSQGSIRLF

SEQ ID NO: 40597 - protein, 9 aa, synthetic construct
GSQGVVRLK

SEQ ID NO: 40598 - protein, 9 aa, synthetic construct
GSQGVVRLF

SEQ ID NO: 40599 - protein, 9 aa, synthetic construct
GSQGVVKVK

SEQ ID NO: 40600 - protein, 9 aa, synthetic construct
PLPAALKLY

SEQ ID NO: 40601 - protein, 9 aa, synthetic construct
GSQGVAHVR

SEQ ID NO: 40602 - protein, 9 aa, synthetic construct
GSQGVARVY

SEQ ID NO: 40603 - protein, 9 aa, synthetic construct
GSQGVAKLY

SEQ ID NO: 40604 - protein, 9 aa, synthetic construct
GSQGVAKLF

SEQ ID NO: 40605 - protein, 9 aa, synthetic construct
GSQGVIHLY

SEQ ID NO: 40606 - protein, 9 aa, synthetic construct
GSQGVGRLH

SEQ ID NO: 40607 - protein, 9 aa, synthetic construct
GSQGGVHLY

SEQ ID NO: 40608 - protein, 9 aa, synthetic construct
GSQGGVHLR

SEQ ID NO: 40609 - protein, 9 aa, synthetic construct
GSQGGVHLK

SEQ ID NO: 40610 - protein, 9 aa, synthetic construct
GSQGGVHLF

SEQ ID NO: 40611 - protein, 9 aa, synthetic construct
GSQGGVRLF

SEQ ID NO: 40612 - protein, 9 aa, synthetic construct
GSQGGVKLH

SEQ ID NO: 40613 - protein, 9 aa, synthetic construct
GSQGGVKVH

SEQ ID NO: 40614 - protein, 9 aa, synthetic construct
GSQGGVKVK

SEQ ID NO: 40615 - protein, 9 aa, synthetic construct
GSQGGLHLK

SEQ ID NO: 40616 - protein, 9 aa, synthetic construct
GSQGGLRLH

SEQ ID NO: 40617 - protein, 9 aa, synthetic construct
GSQGGLKLY

SEQ ID NO: 40618 - protein, 9 aa, synthetic construct
GSQGGLKLF

SEQ ID NO: 40619 - protein, 9 aa, synthetic construct
GSQGGLKVY

SEQ ID NO: 40620 - protein, 9 aa, synthetic construct
GSQGGAHVH

SEQ ID NO: 40621 - protein, 9 aa, synthetic construct
GSQGGARLY

SEQ ID NO: 40622 - protein, 9 aa, synthetic construct
GSQGGAKVR

SEQ ID NO: 40623 - protein, 9 aa, synthetic construct
GSQGGIRVY

SEQ ID NO: 40624 - protein, 9 aa, synthetic construct
GSQGGIRVR

SEQ ID NO: 40625 - protein, 9 aa, synthetic construct
GSQGGIRVF

SEQ ID NO: 40626 - protein, 9 aa, synthetic construct
GSQAAVHVY

SEQ ID NO: 40627 - protein, 9 aa, synthetic construct
GSQAAVKVK

SEQ ID NO: 40628 - protein, 9 aa, synthetic construct
GSQAALRVY

SEQ ID NO: 40629 - protein, 9 aa, synthetic construct
GSQAALKVR

SEQ ID NO: 40630 - protein, 9 aa, synthetic construct
GSQAALKVK

SEQ ID NO: 40631 - protein, 9 aa, synthetic construct
GSQATLHLK

SEQ ID NO: 40632 - protein, 9 aa, synthetic construct
GSQATLHVR

SEQ ID NO: 40633 - protein, 9 aa, synthetic construct
GSQATLRLY

SEQ ID NO: 40634 - protein, 9 aa, synthetic construct
GSQATLKVY

SEQ ID NO: 40635 - protein, 9 aa, synthetic construct
GSQATLKVF

SEQ ID NO: 40636 - protein, 9 aa, synthetic construct
GSQATIHLF

SEQ ID NO: 40637 - protein, 9 aa, synthetic construct
GSQATGHVR

SEQ ID NO: 40638 - protein, 9 aa, synthetic construct
GSQASVKVK

SEQ ID NO: 40639 - protein, 9 aa, synthetic construct
GSQASLHLH

SEQ ID NO: 40640 - protein, 9 aa, synthetic construct
GSQASLHLF

SEQ ID NO: 40641 - protein, 9 aa, synthetic construct
GSQASARLY

SEQ ID NO: 40642 - protein, 9 aa, synthetic construct
GSQASIRLH

SEQ ID NO: 40643 - protein, 9 aa, synthetic construct
GSQASGHVR

SEQ ID NO: 40644 - protein, 9 aa, synthetic construct
GSQAVVHLF

SEQ ID NO: 40645 - protein, 9 aa, synthetic construct
GSQAVVHVR

SEQ ID NO: 40646 - protein, 9 aa, synthetic construct
GSQAVVRLF

SEQ ID NO: 40647 - protein, 9 aa, synthetic construct
GSQAVLHLK

SEQ ID NO: 40648 - protein, 9 aa, synthetic construct
GSQAVLHVK

SEQ ID NO: 40649 - protein, 9 aa, synthetic construct
GSQAVLKLF

SEQ ID NO: 40650 - protein, 9 aa, synthetic construct
GSQAVAKVF

SEQ ID NO: 40651 - protein, 9 aa, synthetic construct
GSQAVIHLY

SEQ ID NO: 40652 - protein, 9 aa, synthetic construct
GSQAVIHLH

SEQ ID NO: 40653 - protein, 9 aa, synthetic construct
GSQAVGHLY

SEQ ID NO: 40654 - protein, 9 aa, synthetic construct
GSQAGVHLF

SEQ ID NO: 40655 - protein, 9 aa, synthetic construct
PLPAAGRVR

SEQ ID NO: 40656 - protein, 9 aa, synthetic construct
GSQAGVRVF

SEQ ID NO: 40657 - protein, 9 aa, synthetic construct
GSQAGIHLR

SEQ ID NO: 40658 - protein, 9 aa, synthetic construct
GSQAGIKVR

SEQ ID NO: 40659 - protein, 9 aa, synthetic construct
GSQAGGRLH

SEQ ID NO: 40660 - protein, 9 aa, synthetic construct
GSPGAVHVY

SEQ ID NO: 40661 - protein, 9 aa, synthetic construct
GSPGAVRLF

SEQ ID NO: 40662 - protein, 9 aa, synthetic construct
GSPGAVRVF

SEQ ID NO: 40663 - protein, 9 aa, synthetic construct
GSPGAVKVK

SEQ ID NO: 40664 - protein, 9 aa, synthetic construct
GSPGAARLK

SEQ ID NO: 40665 - protein, 9 aa, synthetic construct
GSPGAIHLF

SEQ ID NO: 40666 - protein, 9 aa, synthetic construct
GSPGAIKVR

SEQ ID NO: 40667 - protein, 9 aa, synthetic construct
GSPGAGRVR

SEQ ID NO: 40668 - protein, 9 aa, synthetic construct
GSPGAGKVK

SEQ ID NO: 40669 - protein, 9 aa, synthetic construct
GSPGTVHLF

SEQ ID NO: 40670 - protein, 9 aa, synthetic construct
GSPGTLRLK

SEQ ID NO: 40671 - protein, 9 aa, synthetic construct
GSPGTIKVR

SEQ ID NO: 40672 - protein, 9 aa, synthetic construct
GSPGTIKVK

SEQ ID NO: 40673 - protein, 9 aa, synthetic construct
GSPGTGRLR

SEQ ID NO: 40674 - protein, 9 aa, synthetic construct
GSPGTGRVR

SEQ ID NO: 40675 - protein, 9 aa, synthetic construct
GSPGSVHLF

SEQ ID NO: 40676 - protein, 9 aa, synthetic construct
GSPGSLHLR

SEQ ID NO: 40677 - protein, 9 aa, synthetic construct
GSPGSAHLR

SEQ ID NO: 40678 - protein, 9 aa, synthetic construct
GSPGSIRLY

SEQ ID NO: 40679 - protein, 9 aa, synthetic construct
GSPGSIRVY

SEQ ID NO: 40680 - protein, 9 aa, synthetic construct
GSPGSIRVR

SEQ ID NO: 40681 - protein, 9 aa, synthetic construct
GSPGSIRVH

SEQ ID NO: 40682 - protein, 9 aa, synthetic construct
GSPGVAKVR

SEQ ID NO: 40683 - protein, 9 aa, synthetic construct
GSPGVAKVK

SEQ ID NO: 40684 - protein, 9 aa, synthetic construct
GSPGVAKVF

SEQ ID NO: 40685 - protein, 9 aa, synthetic construct
GSPGVIKVK

SEQ ID NO: 40686 - protein, 9 aa, synthetic construct
GSPGGARVR

SEQ ID NO: 40687 - protein, 9 aa, synthetic construct
GSPGGAKVR

SEQ ID NO: 40688 - protein, 9 aa, synthetic construct
GSPGGIRVY

SEQ ID NO: 40689 - protein, 9 aa, synthetic construct
GSPGGIRVR

SEQ ID NO: 40690 - protein, 9 aa, synthetic construct
GSPGGIRVK

SEQ ID NO: 40691 - protein, 9 aa, synthetic construct
GSPGGIRVF

SEQ ID NO: 40692 - protein, 9 aa, synthetic construct
GSPGGGHVH

SEQ ID NO: 40693 - protein, 9 aa, synthetic construct
GSPGGGRVR

SEQ ID NO: 40694 - protein, 9 aa, synthetic construct
GSPAAARLK

SEQ ID NO: 40695 - protein, 9 aa, synthetic construct
GSPAAIRVR

SEQ ID NO: 40696 - protein, 9 aa, synthetic construct
GSPAAIKLR

SEQ ID NO: 40697 - protein, 9 aa, synthetic construct
GSPAAIKVK

SEQ ID NO: 40698 - protein, 9 aa, synthetic construct
GSPAAGRVR

SEQ ID NO: 40699 - protein, 9 aa, synthetic construct
GSPATLRVY

SEQ ID NO: 40700 - protein, 9 aa, synthetic construct
GSPATLKLF

SEQ ID NO: 40701 - protein, 9 aa, synthetic construct
GSPATARLK

SEQ ID NO: 40702 - protein, 9 aa, synthetic construct
GSPATAKLK

SEQ ID NO: 40703 - protein, 9 aa, synthetic construct
GSPATIKVR

SEQ ID NO: 40704 - protein, 9 aa, synthetic construct
GSPATIKVH

SEQ ID NO: 40705 - protein, 9 aa, synthetic construct
GSPASVRLF

SEQ ID NO: 40706 - protein, 9 aa, synthetic construct
GSPASVRVH

SEQ ID NO: 40707 - protein, 9 aa, synthetic construct
GSPASVRVF

SEQ ID NO: 40708 - protein, 9 aa, synthetic construct
GSPASVKVK

SEQ ID NO: 40709 - protein, 9 aa, synthetic construct
GSPASIKVR

SEQ ID NO: 40710 - protein, 9 aa, synthetic construct
GSPAVAKVH

SEQ ID NO: 40711 - protein, 9 aa, synthetic construct
PLPATGRLR

SEQ ID NO: 40712 - protein, 9 aa, synthetic construct
GSPAVGHVH

SEQ ID NO: 40713 - protein, 9 aa, synthetic construct
GSPAGVRVF

SEQ ID NO: 40714 - protein, 9 aa, synthetic construct
GSPAGIHVH

SEQ ID NO: 40715 - protein, 9 aa, synthetic construct
GSPAGIRVR

SEQ ID NO: 40716 - protein, 9 aa, synthetic construct
GSPAGIRVF

SEQ ID NO: 40717 - protein, 9 aa, synthetic construct
GSPAGIKVK

SEQ ID NO: 40718 - protein, 9 aa, synthetic construct
GANGAVHVY

SEQ ID NO: 40719 - protein, 9 aa, synthetic construct
GANGAVHVF

SEQ ID NO: 40720 - protein, 9 aa, synthetic construct
GANGAVRVF

SEQ ID NO: 40721 - protein, 9 aa, synthetic construct
GANGAVKLY

SEQ ID NO: 40722 - protein, 9 aa, synthetic construct
GANGALKVH

SEQ ID NO: 40723 - protein, 9 aa, synthetic construct
GANGAARLY

SEQ ID NO: 40724 - protein, 9 aa, synthetic construct
PLNGSIRVR

SEQ ID NO: 40725 - protein, 9 aa, synthetic construct
GANGAGHVF

SEQ ID NO: 40726 - protein, 9 aa, synthetic construct
PLPASVRLF

SEQ ID NO: 40727 - protein, 9 aa, synthetic construct
GANGTVKVK

SEQ ID NO: 40728 - protein, 9 aa, synthetic construct
GANGTLHLR

SEQ ID NO: 40729 - protein, 9 aa, synthetic construct
GANGTLHVR

SEQ ID NO: 40730 - protein, 9 aa, synthetic construct
PLPASVRVF

SEQ ID NO: 40731 - protein, 9 aa, synthetic construct
GANGTLRLK

SEQ ID NO: 40732 - protein, 9 aa, synthetic construct
GANGTLKVY

SEQ ID NO: 40733 - protein, 9 aa, synthetic construct
PLPASVKLK

SEQ ID NO: 40734 - protein, 9 aa, synthetic construct
GANGTGKLK

SEQ ID NO: 40735 - protein, 9 aa, synthetic construct
GANGSVHVK

SEQ ID NO: 40736 - protein, 9 aa, synthetic construct
GANGSVRVF

SEQ ID NO: 40737 - protein, 9 aa, synthetic construct
PLPASLHLH

SEQ ID NO: 40738 - protein, 9 aa, synthetic construct
GANGSVKLH

SEQ ID NO: 40739 - protein, 9 aa, synthetic construct
GANGSVKVK

SEQ ID NO: 40740 - protein, 9 aa, synthetic construct
GANGSLHLF

SEQ ID NO: 40741 - protein, 9 aa, synthetic construct
GANGSLHVR

SEQ ID NO: 40742 - protein, 9 aa, synthetic construct
GANGSLHVF

SEQ ID NO: 40743 - protein, 9 aa, synthetic construct
GANGSARVF

SEQ ID NO: 40744 - protein, 9 aa, synthetic construct
GANGSAKVR

SEQ ID NO: 40745 - protein, 9 aa, synthetic construct
GANGSAKVK

SEQ ID NO: 40746 - protein, 9 aa, synthetic construct
PLNGSIRVF

SEQ ID NO: 40747 - protein, 9 aa, synthetic construct
GANGSGHVH

SEQ ID NO: 40748 - protein, 9 aa, synthetic construct
GANGSGHVF

SEQ ID NO: 40749 - protein, 9 aa, synthetic construct
GANGSGKLH

SEQ ID NO: 40750 - protein, 9 aa, synthetic construct
GANGVLHLH

SEQ ID NO: 40751 - protein, 9 aa, synthetic construct
GANGVLHLF

SEQ ID NO: 40752 - protein, 9 aa, synthetic construct
GANGVLRVF

SEQ ID NO: 40753 - protein, 9 aa, synthetic construct
GANGVLKVY

SEQ ID NO: 40754 - protein, 9 aa, synthetic construct
GANGVAHVR

SEQ ID NO: 40755 - protein, 9 aa, synthetic construct
PLPASLKLH

SEQ ID NO: 40756 - protein, 9 aa, synthetic construct
GANGVAKVH

SEQ ID NO: 40757 - protein, 9 aa, synthetic construct
GANGVIHVF

SEQ ID NO: 40758 - protein, 9 aa, synthetic construct
GANGVIKLY

SEQ ID NO: 40759 - protein, 9 aa, synthetic construct
GANGVIKVK

SEQ ID NO: 40760 - protein, 9 aa, synthetic construct
GANGVGHVY

SEQ ID NO: 40761 - protein, 9 aa, synthetic construct
GANGGVHLF

SEQ ID NO: 40762 - protein, 9 aa, synthetic construct
GANGGVHVY

SEQ ID NO: 40763 - protein, 9 aa, synthetic construct
GANGGVKVK

SEQ ID NO: 40764 - protein, 9 aa, synthetic construct
GANGGLKVY

SEQ ID NO: 40765 - protein, 9 aa, synthetic construct
GANAAVHLH

SEQ ID NO: 40766 - protein, 9 aa, synthetic construct
GANAAVHLF

SEQ ID NO: 40767 - protein, 9 aa, synthetic construct
GANAAVHVY

SEQ ID NO: 40768 - protein, 9 aa, synthetic construct
GANAAARLY

SEQ ID NO: 40769 - protein, 9 aa, synthetic construct
GANAAGHLF

SEQ ID NO: 40770 - protein, 9 aa, synthetic construct
GANAAGHVK

SEQ ID NO: 40771 - protein, 9 aa, synthetic construct
GANATLHVK

SEQ ID NO: 40772 - protein, 9 aa, synthetic construct
GANATLKLH

SEQ ID NO: 40773 - protein, 9 aa, synthetic construct
GANATAHVR

SEQ ID NO: 40774 - protein, 9 aa, synthetic construct
GANATIHLR

SEQ ID NO: 40775 - protein, 9 aa, synthetic construct
GANATIHVR

SEQ ID NO: 40776 - protein, 9 aa, synthetic construct
GANATGHLF

SEQ ID NO: 40777 - protein, 9 aa, synthetic construct
GANASVRLH

SEQ ID NO: 40778 - protein, 9 aa, synthetic construct
GANASVRLF

SEQ ID NO: 40779 - protein, 9 aa, synthetic construct
GANASVKLH

SEQ ID NO: 40780 - protein, 9 aa, synthetic construct
GANASLHVH

SEQ ID NO: 40781 - protein, 9 aa, synthetic construct
GANASLKVF

SEQ ID NO: 40782 - protein, 9 aa, synthetic construct
GANASARVH

SEQ ID NO: 40783 - protein, 9 aa, synthetic construct
GANASIHLF

SEQ ID NO: 40784 - protein, 9 aa, synthetic construct
GANASIHVF

SEQ ID NO: 40785 - protein, 9 aa, synthetic construct
GANAVGHVR

SEQ ID NO: 40786 - protein, 9 aa, synthetic construct
GANAVGRLF

SEQ ID NO: 40787 - protein, 9 aa, synthetic construct
PLPASGRVH

SEQ ID NO: 40788 - protein, 9 aa, synthetic construct
GANAGVKVH

SEQ ID NO: 40789 - protein, 9 aa, synthetic construct
GANAGLRLH

SEQ ID NO: 40790 - protein, 9 aa, synthetic construct
PLPAVVHLR

SEQ ID NO: 40791 - protein, 9 aa, synthetic construct
GAQGAVRLH

SEQ ID NO: 40792 - protein, 9 aa, synthetic construct
GAQGAAKVH

SEQ ID NO: 40793 - protein, 9 aa, synthetic construct
GAQGAIHVY

SEQ ID NO: 40794 - protein, 9 aa, synthetic construct
GAQGTVHLF

SEQ ID NO: 40795 - protein, 9 aa, synthetic construct
GAQGTVRLF

SEQ ID NO: 40796 - protein, 9 aa, synthetic construct
GAQGTVKLK

SEQ ID NO: 40797 - protein, 9 aa, synthetic construct
GAQGTVKVH

SEQ ID NO: 40798 - protein, 9 aa, synthetic construct
GAQGTVKVF

SEQ ID NO: 40799 - protein, 9 aa, synthetic construct
GAQGTIRVH

SEQ ID NO: 40800 - protein, 9 aa, synthetic construct
GAQGTGKVH

SEQ ID NO: 40801 - protein, 9 aa, synthetic construct
GAQGSVHLR

SEQ ID NO: 40802 - protein, 9 aa, synthetic construct
GAQGSVHLH

SEQ ID NO: 40803 - protein, 9 aa, synthetic construct
GAQGSVKLH

SEQ ID NO: 40804 - protein, 9 aa, synthetic construct
GAQGSVKVK

SEQ ID NO: 40805 - protein, 9 aa, synthetic construct
GAQGSLHLF

SEQ ID NO: 40806 - protein, 9 aa, synthetic construct
GAQGSLHVF

SEQ ID NO: 40807 - protein, 9 aa, synthetic construct
GAQGSIKLY

SEQ ID NO: 40808 - protein, 9 aa, synthetic construct
GAQGVVRLK

SEQ ID NO: 40809 - protein, 9 aa, synthetic construct
GAQGVIHLY

SEQ ID NO: 40810 - protein, 9 aa, synthetic construct
GAQGGVHLH

SEQ ID NO: 40811 - protein, 9 aa, synthetic construct
GAQGGVRLF

SEQ ID NO: 40812 - protein, 9 aa, synthetic construct
GAQGGLHVH

SEQ ID NO: 40813 - protein, 9 aa, synthetic construct
GAQGGLKVH

SEQ ID NO: 40814 - protein, 9 aa, synthetic construct
GAQGGAHLY

SEQ ID NO: 40815 - protein, 9 aa, synthetic construct
GAQGGAHVY

SEQ ID NO: 40816 - protein, 9 aa, synthetic construct
GAQGGAHVH

SEQ ID NO: 40817 - protein, 9 aa, synthetic construct
GAQGGAHVK

SEQ ID NO: 40818 - protein, 9 aa, synthetic construct
GAQGGAKVH

SEQ ID NO: 40819 - protein, 9 aa, synthetic construct
GAQGGGHVF

SEQ ID NO: 40820 - protein, 9 aa, synthetic construct
GAQGGGKVH

SEQ ID NO: 40821 - protein, 9 aa, synthetic construct
GAQAAVRLF

SEQ ID NO: 40822 - protein, 9 aa, synthetic construct
GAQAALKVK

SEQ ID NO: 40823 - protein, 9 aa, synthetic construct
GAQATLHLY

SEQ ID NO: 40824 - protein, 9 aa, synthetic construct
GAQATLHLH

SEQ ID NO: 40825 - protein, 9 aa, synthetic construct
GAQATIRLF

SEQ ID NO: 40826 - protein, 9 aa, synthetic construct
GAQASLHLY

SEQ ID NO: 40827 - protein, 9 aa, synthetic construct
GAQASLHLH

SEQ ID NO: 40828 - protein, 9 aa, synthetic construct
GAQASLHVF

SEQ ID NO: 40829 - protein, 9 aa, synthetic construct
GAQASGHVR

SEQ ID NO: 40830 - protein, 9 aa, synthetic construct
GAQAVVRLK

SEQ ID NO: 40831 - protein, 9 aa, synthetic construct
GAQAVVRLF

SEQ ID NO: 40832 - protein, 9 aa, synthetic construct
GAQAVLRVR

SEQ ID NO: 40833 - protein, 9 aa, synthetic construct
GAQAVLKLY

SEQ ID NO: 40834 - protein, 9 aa, synthetic construct
GAQAVAHVR

SEQ ID NO: 40835 - protein, 9 aa, synthetic construct
GAQAVIHLH

SEQ ID NO: 40836 - protein, 9 aa, synthetic construct
GAQAVGHLY

SEQ ID NO: 40837 - protein, 9 aa, synthetic construct
GAQAVGHVY

SEQ ID NO: 40838 - protein, 9 aa, synthetic construct
GAQAVGHVR

SEQ ID NO: 40839 - protein, 9 aa, synthetic construct
GAQAGIRVR

SEQ ID NO: 40840 - protein, 9 aa, synthetic construct
GAPGAVHVY

SEQ ID NO: 40841 - protein, 9 aa, synthetic construct
GAPGAVRVF

SEQ ID NO: 40842 - protein, 9 aa, synthetic construct
GAPGALHLH

SEQ ID NO: 40843 - protein, 9 aa, synthetic construct
GAPGALRLH

SEQ ID NO: 40844 - protein, 9 aa, synthetic construct
PLPAGVHVF

SEQ ID NO: 40845 - protein, 9 aa, synthetic construct
GAPGAGRVR

SEQ ID NO: 40846 - protein, 9 aa, synthetic construct
GAPGAGKLF

SEQ ID NO: 40847 - protein, 9 aa, synthetic construct
GAPGAGKVK

SEQ ID NO: 40848 - protein, 9 aa, synthetic construct
GAPGTVHVY

SEQ ID NO: 40849 - protein, 9 aa, synthetic construct
GAPGTVKLK

SEQ ID NO: 40850 - protein, 9 aa, synthetic construct
GAPGTLHLY

SEQ ID NO: 40851 - protein, 9 aa, synthetic construct
GAPGTLRLY

SEQ ID NO: 40852 - protein, 9 aa, synthetic construct
GAPGTLRLH

SEQ ID NO: 40853 - protein, 9 aa, synthetic construct
GAPGTLRVR

SEQ ID NO: 40854 - protein, 9 aa, synthetic construct
GAPGTLRVH

SEQ ID NO: 40855 - protein, 9 aa, synthetic construct
GAPGSVRLR

SEQ ID NO: 40856 - protein, 9 aa, synthetic construct
GAPGSVRVY

SEQ ID NO: 40857 - protein, 9 aa, synthetic construct
GAPGSVRVH

SEQ ID NO: 40858 - protein, 9 aa, synthetic construct
GAPGSVKLH

SEQ ID NO: 40859 - protein, 9 aa, synthetic construct
GAPGSLHLR

SEQ ID NO: 40860 - protein, 9 aa, synthetic construct
GAPGSARLK

SEQ ID NO: 40861 - protein, 9 aa, synthetic construct
GAPGSAKLH

SEQ ID NO: 40862 - protein, 9 aa, synthetic construct
GAPGSAKVR

SEQ ID NO: 40863 - protein, 9 aa, synthetic construct
GAPGSAKVK

SEQ ID NO: 40864 - protein, 9 aa, synthetic construct
GAPGSIRLY

SEQ ID NO: 40865 - protein, 9 aa, synthetic construct
GAPGSIRLR

SEQ ID NO: 40866 - protein, 9 aa, synthetic construct
GAPGSIRLH

SEQ ID NO: 40867 - protein, 9 aa, synthetic construct
GAPGSIRVR

SEQ ID NO: 40868 - protein, 9 aa, synthetic construct
GAPGSIRVH

SEQ ID NO: 40869 - protein, 9 aa, synthetic construct
GAPGSIKVR

SEQ ID NO: 40870 - protein, 9 aa, synthetic construct
GAPGSGHVR

SEQ ID NO: 40871 - protein, 9 aa, synthetic construct
GAPGSGRLH

SEQ ID NO: 40872 - protein, 9 aa, synthetic construct
GAPGSGKVK

SEQ ID NO: 40873 - protein, 9 aa, synthetic construct
GAPGVIKVK

SEQ ID NO: 40874 - protein, 9 aa, synthetic construct
GAPGGVRLH

SEQ ID NO: 40875 - protein, 9 aa, synthetic construct
GAPGGVRLK

SEQ ID NO: 40876 - protein, 9 aa, synthetic construct
GAPGGVRLF

SEQ ID NO: 40877 - protein, 9 aa, synthetic construct
GAPGGVRVH

SEQ ID NO: 40878 - protein, 9 aa, synthetic construct
GAPGGVKVH

SEQ ID NO: 40879 - protein, 9 aa, synthetic construct
GAPGGVKVK

SEQ ID NO: 40880 - protein, 9 aa, synthetic construct
GAPGGARLY

SEQ ID NO: 40881 - protein, 9 aa, synthetic construct
GAPGGAKLH

SEQ ID NO: 40882 - protein, 9 aa, synthetic construct
GAPGGAKLF

SEQ ID NO: 40883 - protein, 9 aa, synthetic construct
GAPGGAKVR

SEQ ID NO: 40884 - protein, 9 aa, synthetic construct
GAPGGIRVR

SEQ ID NO: 40885 - protein, 9 aa, synthetic construct
GAPGGIRVF

SEQ ID NO: 40886 - protein, 9 aa, synthetic construct
GAPGGGHLF

SEQ ID NO: 40887 - protein, 9 aa, synthetic construct
GAPGGGRLR

SEQ ID NO: 40888 - protein, 9 aa, synthetic construct
GAPGGGKVK

SEQ ID NO: 40889 - protein, 9 aa, synthetic construct
GAPAAVKVK

SEQ ID NO: 40890 - protein, 9 aa, synthetic construct
GAPAAIKVR

SEQ ID NO: 40891 - protein, 9 aa, synthetic construct
GAPATLHLR

SEQ ID NO: 40892 - protein, 9 aa, synthetic construct
GAPATLHVR

SEQ ID NO: 40893 - protein, 9 aa, synthetic construct
GAPATLRVK

SEQ ID NO: 40894 - protein, 9 aa, synthetic construct
GAPATIHLF

SEQ ID NO: 40895 - protein, 9 aa, synthetic construct
GAPATIHVR

SEQ ID NO: 40896 - protein, 9 aa, synthetic construct
GAPATIKVH

SEQ ID NO: 40897 - protein, 9 aa, synthetic construct
PLPAGIRVR

SEQ ID NO: 40898 - protein, 9 aa, synthetic construct
GAPASVRLF

SEQ ID NO: 40899 - protein, 9 aa, synthetic construct
GAPASLHLF

SEQ ID NO: 40900 - protein, 9 aa, synthetic construct
GAPAVAKVF

SEQ ID NO: 40901 - protein, 9 aa, synthetic construct
GAPAGVKLH

SEQ ID NO: 40902 - protein, 9 aa, synthetic construct
GAPAGIRVR

SEQ ID NO: 40903 - protein, 9 aa, synthetic construct
GAPAGIRVF

SEQ ID NO: 40904 - protein, 9 aa, synthetic construct
GAPAGIKVR

SEQ ID NO: 40905 - protein, 9 aa, synthetic construct
GAPAGGHLH

SEQ ID NO: 40906 - protein, 9 aa, synthetic construct
GVNGAVHLF

SEQ ID NO: 40907 - protein, 9 aa, synthetic construct
GVNGAVRLF

SEQ ID NO: 40908 - protein, 9 aa, synthetic construct
GVNGAVRVK

SEQ ID NO: 40909 - protein, 9 aa, synthetic construct
GVNGAVRVF

SEQ ID NO: 40910 - protein, 9 aa, synthetic construct
GVNGAVKVR

SEQ ID NO: 40911 - protein, 9 aa, synthetic construct
GVNGALKVH

SEQ ID NO: 40912 - protein, 9 aa, synthetic construct
GVNGAARLK

SEQ ID NO: 40913 - protein, 9 aa, synthetic construct
PTNGAVRLR

SEQ ID NO: 40914 - protein, 9 aa, synthetic construct
GVNGTVKVK

SEQ ID NO: 40915 - protein, 9 aa, synthetic construct
GVNGTLRLK

SEQ ID NO: 40916 - protein, 9 aa, synthetic construct
GVNGTIRVH

SEQ ID NO: 40917 - protein, 9 aa, synthetic construct
PTNGAVKVR

SEQ ID NO: 40918 - protein, 9 aa, synthetic construct
GVNGTIKVF

SEQ ID NO: 40919 - protein, 9 aa, synthetic construct
GVNGTGHVY

SEQ ID NO: 40920 - protein, 9 aa, synthetic construct
PTNGALRLK

SEQ ID NO: 40921 - protein, 9 aa, synthetic construct
GVNGSGKVK

SEQ ID NO: 40922 - protein, 9 aa, synthetic construct
GVNGVLHLF

SEQ ID NO: 40923 - protein, 9 aa, synthetic construct
GVNGVAHVR

SEQ ID NO: 40924 - protein, 9 aa, synthetic construct
GVNGVARVY

SEQ ID NO: 40925 - protein, 9 aa, synthetic construct
GVNGVIHVF

SEQ ID NO: 40926 - protein, 9 aa, synthetic construct
GVNGVIKLK

SEQ ID NO: 40927 - protein, 9 aa, synthetic construct
GVNGVIKVK

SEQ ID NO: 40928 - protein, 9 aa, synthetic construct
PTNGALKVK

SEQ ID NO: 40929 - protein, 9 aa, synthetic construct
GVNGGVKVK

SEQ ID NO: 40930 - protein, 9 aa, synthetic construct
GVNGGLRLH

SEQ ID NO: 40931 - protein, 9 aa, synthetic construct
GVNGGLRLF

SEQ ID NO: 40932 - protein, 9 aa, synthetic construct
GVNGGARLR

SEQ ID NO: 40933 - protein, 9 aa, synthetic construct
GVNGGARVK

SEQ ID NO: 40934 - protein, 9 aa, synthetic construct
GVNGGAKVR

SEQ ID NO: 40935 - protein, 9 aa, synthetic construct
GVNGGAKVK

SEQ ID NO: 40936 - protein, 9 aa, synthetic construct
GVNGGIRLK

SEQ ID NO: 40937 - protein, 9 aa, synthetic construct
GVNGGIKVR

SEQ ID NO: 40938 - protein, 9 aa, synthetic construct
GVNAAVHLF

SEQ ID NO: 40939 - protein, 9 aa, synthetic construct
GVNAAVHVY

SEQ ID NO: 40940 - protein, 9 aa, synthetic construct
GVNAAVHVF

SEQ ID NO: 40941 - protein, 9 aa, synthetic construct
GVNAALKLY

SEQ ID NO: 40942 - protein, 9 aa, synthetic construct
GVNAAARLK

SEQ ID NO: 40943 - protein, 9 aa, synthetic construct
GVNAAGKLK

SEQ ID NO: 40944 - protein, 9 aa, synthetic construct
GVNATVHVR

SEQ ID NO: 40945 - protein, 9 aa, synthetic construct
GVNATVRVY

SEQ ID NO: 40946 - protein, 9 aa, synthetic construct
GVNATARVK

SEQ ID NO: 40947 - protein, 9 aa, synthetic construct
GVNATAKVK

SEQ ID NO: 40948 - protein, 9 aa, synthetic construct
GVNATIHLR

SEQ ID NO: 40949 - protein, 9 aa, synthetic construct
GVNATIHLF

SEQ ID NO: 40950 - protein, 9 aa, synthetic construct
GVNATIKVF

SEQ ID NO: 40951 - protein, 9 aa, synthetic construct
GVNATGHLH

SEQ ID NO: 40952 - protein, 9 aa, synthetic construct
GVNATGHLF

SEQ ID NO: 40953 - protein, 9 aa, synthetic construct
GVNATGHVH

SEQ ID NO: 40954 - protein, 9 aa, synthetic construct
GVNATGKLR

SEQ ID NO: 40955 - protein, 9 aa, synthetic construct
GVNASVHVH

SEQ ID NO: 40956 - protein, 9 aa, synthetic construct
GVNAVVRLH

SEQ ID NO: 40957 - protein, 9 aa, synthetic construct
GVNAVLHLH

SEQ ID NO: 40958 - protein, 9 aa, synthetic construct
GVNAVLRLY

SEQ ID NO: 40959 - protein, 9 aa, synthetic construct
GVNAVLRLH

SEQ ID NO: 40960 - protein, 9 aa, synthetic construct
GVNAVLRVH

SEQ ID NO: 40961 - protein, 9 aa, synthetic construct
GVNAVLKLF

SEQ ID NO: 40962 - protein, 9 aa, synthetic construct
GVNAVIKVR

SEQ ID NO: 40963 - protein, 9 aa, synthetic construct
GVNAVGHLR

SEQ ID NO: 40964 - protein, 9 aa, synthetic construct
GVNAVGKLH

SEQ ID NO: 40965 - protein, 9 aa, synthetic construct
GVNAGVHLY

SEQ ID NO: 40966 - protein, 9 aa, synthetic construct
GVNAGVHLR

SEQ ID NO: 40967 - protein, 9 aa, synthetic construct
GVNAGVHLK

SEQ ID NO: 40968 - protein, 9 aa, synthetic construct
GVNAGVHLF

SEQ ID NO: 40969 - protein, 9 aa, synthetic construct
PTNGAGRVR

SEQ ID NO: 40970 - protein, 9 aa, synthetic construct
GVNAGLKLH

SEQ ID NO: 40971 - protein, 9 aa, synthetic construct
GVNAGIRLR

SEQ ID NO: 40972 - protein, 9 aa, synthetic construct
GVNAGIRVR

SEQ ID NO: 40973 - protein, 9 aa, synthetic construct
GVQGAVKVK

SEQ ID NO: 40974 - protein, 9 aa, synthetic construct
GVQGALRLF

SEQ ID NO: 40975 - protein, 9 aa, synthetic construct
GVQGAIHVY

SEQ ID NO: 40976 - protein, 9 aa, synthetic construct
GVQGAIKLR

SEQ ID NO: 40977 - protein, 9 aa, synthetic construct
GVQGAGHVR

SEQ ID NO: 40978 - protein, 9 aa, synthetic construct
GVQGSARVF

SEQ ID NO: 40979 - protein, 9 aa, synthetic construct
GVQGSIHLF

SEQ ID NO: 40980 - protein, 9 aa, synthetic construct
GVQGSIRLR

SEQ ID NO: 40981 - protein, 9 aa, synthetic construct
GVQGSIRLH

SEQ ID NO: 40982 - protein, 9 aa, synthetic construct
GVQGSIRVR

SEQ ID NO: 40983 - protein, 9 aa, synthetic construct
GVQGSIRVF

SEQ ID NO: 40984 - protein, 9 aa, synthetic construct
PTNGTLRLK

SEQ ID NO: 40985 - protein, 9 aa, synthetic construct
GVQGVLHVK

SEQ ID NO: 40986 - protein, 9 aa, synthetic construct
PTNGTLKLK

SEQ ID NO: 40987 - protein, 9 aa, synthetic construct
GVQGVGRLY

SEQ ID NO: 40988 - protein, 9 aa, synthetic construct
GVQGVGRLH

SEQ ID NO: 40989 - protein, 9 aa, synthetic construct
GVQGVGRVR

SEQ ID NO: 40990 - protein, 9 aa, synthetic construct
GVQGVGKVH

SEQ ID NO: 40991 - protein, 9 aa, synthetic construct
GVQGVGKVF

SEQ ID NO: 40992 - protein, 9 aa, synthetic construct
GVQGGVHLH

SEQ ID NO: 40993 - protein, 9 aa, synthetic construct
GVQGGVHLF

SEQ ID NO: 40994 - protein, 9 aa, synthetic construct
GVQGGVKVK

SEQ ID NO: 40995 - protein, 9 aa, synthetic construct
GVQGGLHVF

SEQ ID NO: 40996 - protein, 9 aa, synthetic construct
GVQGGLRLF

SEQ ID NO: 40997 - protein, 9 aa, synthetic construct
GVQGGLKVY

SEQ ID NO: 40998 - protein, 9 aa, synthetic construct
PTNGTARLK

SEQ ID NO: 40999 - protein, 9 aa, synthetic construct
GVQAAVHLF

SEQ ID NO: 41000 - protein, 9 aa, synthetic construct
GVQAAVHVY

SEQ ID NO: 41001 - protein, 9 aa, synthetic construct
GVQAAVKVK

SEQ ID NO: 41002 - protein, 9 aa, synthetic construct
GVQAALRLY

SEQ ID NO: 41003 - protein, 9 aa, synthetic construct
GVQAALKLF

SEQ ID NO: 41004 - protein, 9 aa, synthetic construct
GVQAALKVK

SEQ ID NO: 41005 - protein, 9 aa, synthetic construct
GVQAAIKVR

SEQ ID NO: 41006 - protein, 9 aa, synthetic construct
GVQAAIKVK

SEQ ID NO: 41007 - protein, 9 aa, synthetic construct
GVQATVHLH

SEQ ID NO: 41008 - protein, 9 aa, synthetic construct
GVQATVRLF

SEQ ID NO: 41009 - protein, 9 aa, synthetic construct
GVQATVKVH

SEQ ID NO: 41010 - protein, 9 aa, synthetic construct
GVQATLHLK

SEQ ID NO: 41011 - protein, 9 aa, synthetic construct
GVQATLHVR

SEQ ID NO: 41012 - protein, 9 aa, synthetic construct
GVQATLRLY

SEQ ID NO: 41013 - protein, 9 aa, synthetic construct
GVQATLRVH

SEQ ID NO: 41014 - protein, 9 aa, synthetic construct
GVQATLKVY

SEQ ID NO: 41015 - protein, 9 aa, synthetic construct
GVQATAKVK

SEQ ID NO: 41016 - protein, 9 aa, synthetic construct
PTNGTIRLR

SEQ ID NO: 41017 - protein, 9 aa, synthetic construct
GVQATGHLR

SEQ ID NO: 41018 - protein, 9 aa, synthetic construct
GVQATGHVY

SEQ ID NO: 41019 - protein, 9 aa, synthetic construct
GVQATGRVF

SEQ ID NO: 41020 - protein, 9 aa, synthetic construct
GVQASVHLY

SEQ ID NO: 41021 - protein, 9 aa, synthetic construct
GVQASLHLF

SEQ ID NO: 41022 - protein, 9 aa, synthetic construct
GVQASARLR

SEQ ID NO: 41023 - protein, 9 aa, synthetic construct
GVQASIRLF

SEQ ID NO: 41024 - protein, 9 aa, synthetic construct
GVQASIRVF

SEQ ID NO: 41025 - protein, 9 aa, synthetic construct
GVQASIKLY

SEQ ID NO: 41026 - protein, 9 aa, synthetic construct
GVQASIKVY

SEQ ID NO: 41027 - protein, 9 aa, synthetic construct
GVQASGHLR

SEQ ID NO: 41028 - protein, 9 aa, synthetic construct
GVQASGHVR

SEQ ID NO: 41029 - protein, 9 aa, synthetic construct
GVQAVVRLK

SEQ ID NO: 41030 - protein, 9 aa, synthetic construct
GVQAVLKLY

SEQ ID NO: 41031 - protein, 9 aa, synthetic construct
GVQAVGRLY

SEQ ID NO: 41032 - protein, 9 aa, synthetic construct
GVQAGIRLY

SEQ ID NO: 41033 - protein, 9 aa, synthetic construct
GVQAGIKVF

SEQ ID NO: 41034 - protein, 9 aa, synthetic construct
GVPGALRLF

SEQ ID NO: 41035 - protein, 9 aa, synthetic construct
GVPGAARLK

SEQ ID NO: 41036 - protein, 9 aa, synthetic construct
GVPGAGRVR

SEQ ID NO: 41037 - protein, 9 aa, synthetic construct
GVPGTVHVF

SEQ ID NO: 41038 - protein, 9 aa, synthetic construct
GVPGTLRLK

SEQ ID NO: 41039 - protein, 9 aa, synthetic construct
GVPGTLKVH

SEQ ID NO: 41040 - protein, 9 aa, synthetic construct
GVPGTAKVK

SEQ ID NO: 41041 - protein, 9 aa, synthetic construct
GVPGTIHLF

SEQ ID NO: 41042 - protein, 9 aa, synthetic construct
GVPGTIKVH

SEQ ID NO: 41043 - protein, 9 aa, synthetic construct
GVPGTGRVY

SEQ ID NO: 41044 - protein, 9 aa, synthetic construct
GVPGTGRVR

SEQ ID NO: 41045 - protein, 9 aa, synthetic construct
GVPGTGKVK

SEQ ID NO: 41046 - protein, 9 aa, synthetic construct
GVPGSVRLF

SEQ ID NO: 41047 - protein, 9 aa, synthetic construct
GVPGSVRVY

SEQ ID NO: 41048 - protein, 9 aa, synthetic construct
GVPGSVRVH

SEQ ID NO: 41049 - protein, 9 aa, synthetic construct
GVPGSVKLH

SEQ ID NO: 41050 - protein, 9 aa, synthetic construct
GVPGSVKVR

SEQ ID NO: 41051 - protein, 9 aa, synthetic construct
GVPGSIRVR

SEQ ID NO: 41052 - protein, 9 aa, synthetic construct
GVPGSIRVF

SEQ ID NO: 41053 - protein, 9 aa, synthetic construct
GVPGSGKVK

SEQ ID NO: 41054 - protein, 9 aa, synthetic construct
GVPGVLHLH

SEQ ID NO: 41055 - protein, 9 aa, synthetic construct
GVPGVIKVK

SEQ ID NO: 41056 - protein, 9 aa, synthetic construct
GVPGGVRVF

SEQ ID NO: 41057 - protein, 9 aa, synthetic construct
GVPGGVKVK

SEQ ID NO: 41058 - protein, 9 aa, synthetic construct
GVPGGLRLF

SEQ ID NO: 41059 - protein, 9 aa, synthetic construct
GVPGGIRVY

SEQ ID NO: 41060 - protein, 9 aa, synthetic construct
GVPGGIRVR

SEQ ID NO: 41061 - protein, 9 aa, synthetic construct
GVPAALKVK

SEQ ID NO: 41062 - protein, 9 aa, synthetic construct
GVPAAIKVR

SEQ ID NO: 41063 - protein, 9 aa, synthetic construct
GVPATVKLF

SEQ ID NO: 41064 - protein, 9 aa, synthetic construct
GVPATLKLF

SEQ ID NO: 41065 - protein, 9 aa, synthetic construct
GVPATLKVF

SEQ ID NO: 41066 - protein, 9 aa, synthetic construct
GVPATAKVK

SEQ ID NO: 41067 - protein, 9 aa, synthetic construct
GVPATIHLF

SEQ ID NO: 41068 - protein, 9 aa, synthetic construct
GVPATGKVK

SEQ ID NO: 41069 - protein, 9 aa, synthetic construct
GVPASVRLF

SEQ ID NO: 41070 - protein, 9 aa, synthetic construct
GVPASLKLF

SEQ ID NO: 41071 - protein, 9 aa, synthetic construct
GVPASAKVK

SEQ ID NO: 41072 - protein, 9 aa, synthetic construct
GVPAVLRVF

SEQ ID NO: 41073 - protein, 9 aa, synthetic construct
GINGAVHLF

SEQ ID NO: 41074 - protein, 9 aa, synthetic construct
GINGAVRVF

SEQ ID NO: 41075 - protein, 9 aa, synthetic construct
GINGAVKLR

SEQ ID NO: 41076 - protein, 9 aa, synthetic construct
GINGAVKVY

SEQ ID NO: 41077 - protein, 9 aa, synthetic construct
GINGAVKVK

SEQ ID NO: 41078 - protein, 9 aa, synthetic construct
GINGALHLH

SEQ ID NO: 41079 - protein, 9 aa, synthetic construct
GINGALKVY

SEQ ID NO: 41080 - protein, 9 aa, synthetic construct
GINGAIKVH

SEQ ID NO: 41081 - protein, 9 aa, synthetic construct
GINGAGRVR

SEQ ID NO: 41082 - protein, 9 aa, synthetic construct
GINGTVKVK

SEQ ID NO: 41083 - protein, 9 aa, synthetic construct
GINGTLRLH

SEQ ID NO: 41084 - protein, 9 aa, synthetic construct
GINGTLRLK

SEQ ID NO: 41085 - protein, 9 aa, synthetic construct
GINGTLRVK

SEQ ID NO: 41086 - protein, 9 aa, synthetic construct
GINGTLKVY

SEQ ID NO: 41087 - protein, 9 aa, synthetic construct
GINGTIRLY

SEQ ID NO: 41088 - protein, 9 aa, synthetic construct
GINGTIKVH

SEQ ID NO: 41089 - protein, 9 aa, synthetic construct
GINGTGKLK

SEQ ID NO: 41090 - protein, 9 aa, synthetic construct
GINGSVHVY

SEQ ID NO: 41091 - protein, 9 aa, synthetic construct
GINGSVKLK

SEQ ID NO: 41092 - protein, 9 aa, synthetic construct
GINGSVKVR

SEQ ID NO: 41093 - protein, 9 aa, synthetic construct
GINGSLHLH

SEQ ID NO: 41094 - protein, 9 aa, synthetic construct
GINGSLHVF

SEQ ID NO: 41095 - protein, 9 aa, synthetic construct
GINGSAKVR

SEQ ID NO: 41096 - protein, 9 aa, synthetic construct
GINGSIRLY

SEQ ID NO: 41097 - protein, 9 aa, synthetic construct
GINGSGHVR

SEQ ID NO: 41098 - protein, 9 aa, synthetic construct
GINGSGRVR

SEQ ID NO: 41099 - protein, 9 aa, synthetic construct
GINGSGKVK

SEQ ID NO: 41100 - protein, 9 aa, synthetic construct
PTNGVLRVY

SEQ ID NO: 41101 - protein, 9 aa, synthetic construct
GINGVVHLH

SEQ ID NO: 41102 - protein, 9 aa, synthetic construct
GINGVLHLH

SEQ ID NO: 41103 - protein, 9 aa, synthetic construct
GINGVLHLF

SEQ ID NO: 41104 - protein, 9 aa, synthetic construct
GINGVLRVY

SEQ ID NO: 41105 - protein, 9 aa, synthetic construct
GINGVAHVR

SEQ ID NO: 41106 - protein, 9 aa, synthetic construct
GINGVARVH

SEQ ID NO: 41107 - protein, 9 aa, synthetic construct
GINGVIHLF

SEQ ID NO: 41108 - protein, 9 aa, synthetic construct
GINGVIHVF

SEQ ID NO: 41109 - protein, 9 aa, synthetic construct
GINGVIKLY

SEQ ID NO: 41110 - protein, 9 aa, synthetic construct
GINGVIKLF

SEQ ID NO: 41111 - protein, 9 aa, synthetic construct
GINGVIKVK

SEQ ID NO: 41112 - protein, 9 aa, synthetic construct
GINGVGRVR

SEQ ID NO: 41113 - protein, 9 aa, synthetic construct
GINGVGRVK

SEQ ID NO: 41114 - protein, 9 aa, synthetic construct
GINGGIRVR

SEQ ID NO: 41115 - protein, 9 aa, synthetic construct
GINGGGHVH

SEQ ID NO: 41116 - protein, 9 aa, synthetic construct
GINAAVHLF

SEQ ID NO: 41117 - protein, 9 aa, synthetic construct
GINAAARLK

SEQ ID NO: 41118 - protein, 9 aa, synthetic construct
GINATLKVY

SEQ ID NO: 41119 - protein, 9 aa, synthetic construct
GINATLKVF

SEQ ID NO: 41120 - protein, 9 aa, synthetic construct
GINATARLK

SEQ ID NO: 41121 - protein, 9 aa, synthetic construct
GINATIRLH

SEQ ID NO: 41122 - protein, 9 aa, synthetic construct
GINATIKLY

SEQ ID NO: 41123 - protein, 9 aa, synthetic construct
GINATIKVF

SEQ ID NO: 41124 - protein, 9 aa, synthetic construct
GINATGHVR

SEQ ID NO: 41125 - protein, 9 aa, synthetic construct
GINASVHVR

SEQ ID NO: 41126 - protein, 9 aa, synthetic construct
GINASVKVK

SEQ ID NO: 41127 - protein, 9 aa, synthetic construct
GINASIHVF

SEQ ID NO: 41128 - protein, 9 aa, synthetic construct
PTNGVIKVK

SEQ ID NO: 41129 - protein, 9 aa, synthetic construct
GINASGRLH

SEQ ID NO: 41130 - protein, 9 aa, synthetic construct
GINASGRLK

SEQ ID NO: 41131 - protein, 9 aa, synthetic construct
GINASGKLR

SEQ ID NO: 41132 - protein, 9 aa, synthetic construct
GINAVAHVY

SEQ ID NO: 41133 - protein, 9 aa, synthetic construct
GINAVIKLF

SEQ ID NO: 41134 - protein, 9 aa, synthetic construct
GINAVGRLY

SEQ ID NO: 41135 - protein, 9 aa, synthetic construct
GINAGVHVF

SEQ ID NO: 41136 - protein, 9 aa, synthetic construct
GINAGLRVF

SEQ ID NO: 41137 - protein, 9 aa, synthetic construct
GINAGARLK

SEQ ID NO: 41138 - protein, 9 aa, synthetic construct
GINAGAKVR

SEQ ID NO: 41139 - protein, 9 aa, synthetic construct
GINAGAKVK

SEQ ID NO: 41140 - protein, 9 aa, synthetic construct
GINAGIRVR

SEQ ID NO: 41141 - protein, 9 aa, synthetic construct
GINAGIRVF

SEQ ID NO: 41142 - protein, 9 aa, synthetic construct
GINAGIKLK

SEQ ID NO: 41143 - protein, 9 aa, synthetic construct
GINAGGRLR

SEQ ID NO: 41144 - protein, 9 aa, synthetic construct
GIQGAVHLF

SEQ ID NO: 41145 - protein, 9 aa, synthetic construct
GIQGAVRVR

SEQ ID NO: 41146 - protein, 9 aa, synthetic construct
GIQGAVKVK

SEQ ID NO: 41147 - protein, 9 aa, synthetic construct
GIQGAIKVR

SEQ ID NO: 41148 - protein, 9 aa, synthetic construct
GIQGAGRVR

SEQ ID NO: 41149 - protein, 9 aa, synthetic construct
GIQGTGRLR

SEQ ID NO: 41150 - protein, 9 aa, synthetic construct
GIQGTGKVK

SEQ ID NO: 41151 - protein, 9 aa, synthetic construct
GIQGSVRVH

SEQ ID NO: 41152 - protein, 9 aa, synthetic construct
GIQGSVKLH

SEQ ID NO: 41153 - protein, 9 aa, synthetic construct
GIQGSVKVH

SEQ ID NO: 41154 - protein, 9 aa, synthetic construct
GIQGSVKVK

SEQ ID NO: 41155 - protein, 9 aa, synthetic construct
GIQGSLHLF

SEQ ID NO: 41156 - protein, 9 aa, synthetic construct
GIQGSAKLY

SEQ ID NO: 41157 - protein, 9 aa, synthetic construct
GIQGSAKLH

SEQ ID NO: 41158 - protein, 9 aa, synthetic construct
GIQGSAKLF

SEQ ID NO: 41159 - protein, 9 aa, synthetic construct
GIQGSIHLF

SEQ ID NO: 41160 - protein, 9 aa, synthetic construct
GIQGSIRLY

SEQ ID NO: 41161 - protein, 9 aa, synthetic construct
GIQGSIRLH

SEQ ID NO: 41162 - protein, 9 aa, synthetic construct
GIQGSGHLH

SEQ ID NO: 41163 - protein, 9 aa, synthetic construct
GIQGSGHVF

SEQ ID NO: 41164 - protein, 9 aa, synthetic construct
PTNGGLRVY

SEQ ID NO: 41165 - protein, 9 aa, synthetic construct
PTNGGLKVK

SEQ ID NO: 41166 - protein, 9 aa, synthetic construct
GIQGVGRVR

SEQ ID NO: 41167 - protein, 9 aa, synthetic construct
GIQGGVKVK

SEQ ID NO: 41168 - protein, 9 aa, synthetic construct
GIQGGIRLK

SEQ ID NO: 41169 - protein, 9 aa, synthetic construct
GIQGGIRVR

SEQ ID NO: 41170 - protein, 9 aa, synthetic construct
GIQGGGRVR

SEQ ID NO: 41171 - protein, 9 aa, synthetic construct
GIQAAVKVK

SEQ ID NO: 41172 - protein, 9 aa, synthetic construct
GIQAALHLF

SEQ ID NO: 41173 - protein, 9 aa, synthetic construct
GIQAALKVY

SEQ ID NO: 41174 - protein, 9 aa, synthetic construct
GIQAALKVR

SEQ ID NO: 41175 - protein, 9 aa, synthetic construct
GIQAALKVK

SEQ ID NO: 41176 - protein, 9 aa, synthetic construct
GIQAAARLK

SEQ ID NO: 41177 - protein, 9 aa, synthetic construct
PTNGGAKVK

SEQ ID NO: 41178 - protein, 9 aa, synthetic construct
GIQATLHLY

SEQ ID NO: 41179 - protein, 9 aa, synthetic construct
GIQATLHLH

SEQ ID NO: 41180 - protein, 9 aa, synthetic construct
GIQATLHLF

SEQ ID NO: 41181 - protein, 9 aa, synthetic construct
GIQATIHLF

SEQ ID NO: 41182 - protein, 9 aa, synthetic construct
GIQASVRVR

SEQ ID NO: 41183 - protein, 9 aa, synthetic construct
GIQASVKVK

SEQ ID NO: 41184 - protein, 9 aa, synthetic construct
GIQASLHLH

SEQ ID NO: 41185 - protein, 9 aa, synthetic construct
GIQASLHLF

SEQ ID NO: 41186 - protein, 9 aa, synthetic construct
GIQASLHVH

SEQ ID NO: 41187 - protein, 9 aa, synthetic construct
GIQASIRVF

SEQ ID NO: 41188 - protein, 9 aa, synthetic construct
GIQAVVRLK

SEQ ID NO: 41189 - protein, 9 aa, synthetic construct
GIQAVVRLF

SEQ ID NO: 41190 - protein, 9 aa, synthetic construct
GIQAVLRLY

SEQ ID NO: 41191 - protein, 9 aa, synthetic construct
GIQAVLRVR

SEQ ID NO: 41192 - protein, 9 aa, synthetic construct
GIQAVLKVH

SEQ ID NO: 41193 - protein, 9 aa, synthetic construct
GIQAGVHLF

SEQ ID NO: 41194 - protein, 9 aa, synthetic construct
GIQAGVRLF

SEQ ID NO: 41195 - protein, 9 aa, synthetic construct
GIQAGARVR

SEQ ID NO: 41196 - protein, 9 aa, synthetic construct
GIQAGAKVR

SEQ ID NO: 41197 - protein, 9 aa, synthetic construct
GIQAGIRVR

SEQ ID NO: 41198 - protein, 9 aa, synthetic construct
PTNGGGKVR

SEQ ID NO: 41199 - protein, 9 aa, synthetic construct
GIQAGIKVR

SEQ ID NO: 41200 - protein, 9 aa, synthetic construct
GIPGAARLK

SEQ ID NO: 41201 - protein, 9 aa, synthetic construct
GIPGAGKVK

SEQ ID NO: 41202 - protein, 9 aa, synthetic construct
GIPGTLRLH

SEQ ID NO: 41203 - protein, 9 aa, synthetic construct
GIPGTLRVR

SEQ ID NO: 41204 - protein, 9 aa, synthetic construct
GIPGSVHLF

SEQ ID NO: 41205 - protein, 9 aa, synthetic construct
GIPGSIRLY

SEQ ID NO: 41206 - protein, 9 aa, synthetic construct
GIPGSIRVR

SEQ ID NO: 41207 - protein, 9 aa, synthetic construct
GIPGSIRVH

SEQ ID NO: 41208 - protein, 9 aa, synthetic construct
GIPGVAHLY

SEQ ID NO: 41209 - protein, 9 aa, synthetic construct
GIPGVAKVF

SEQ ID NO: 41210 - protein, 9 aa, synthetic construct
GIPGVIKVK

SEQ ID NO: 41211 - protein, 9 aa, synthetic construct
GIPGGARLK

SEQ ID NO: 41212 - protein, 9 aa, synthetic construct
GIPGGAKVR

SEQ ID NO: 41213 - protein, 9 aa, synthetic construct
GIPGGIRVR

SEQ ID NO: 41214 - protein, 9 aa, synthetic construct
GIPGGIRVK

SEQ ID NO: 41215 - protein, 9 aa, synthetic construct
GIPGGIKVK

SEQ ID NO: 41216 - protein, 9 aa, synthetic construct
PTNAAARLK

SEQ ID NO: 41217 - protein, 9 aa, synthetic construct
GIPAALHLY

SEQ ID NO: 41218 - protein, 9 aa, synthetic construct
GIPAALKLF

SEQ ID NO: 41219 - protein, 9 aa, synthetic construct
GIPAALKVK

SEQ ID NO: 41220 - protein, 9 aa, synthetic construct
GIPAAGHVR

SEQ ID NO: 41221 - protein, 9 aa, synthetic construct
GIPAAGRVR

SEQ ID NO: 41222 - protein, 9 aa, synthetic construct
GIPATLHLR

SEQ ID NO: 41223 - protein, 9 aa, synthetic construct
GIPATLRVK

SEQ ID NO: 41224 - protein, 9 aa, synthetic construct
GIPATLKVY

SEQ ID NO: 41225 - protein, 9 aa, synthetic construct
GIPATIKVH

SEQ ID NO: 41226 - protein, 9 aa, synthetic construct
GIPASVRVK

SEQ ID NO: 41227 - protein, 9 aa, synthetic construct
GIPASLKVF

SEQ ID NO: 41228 - protein, 9 aa, synthetic construct
GIPAVVHVR

SEQ ID NO: 41229 - protein, 9 aa, synthetic construct
GIPAVVRLK

SEQ ID NO: 41230 - protein, 9 aa, synthetic construct
GIPAVIHVR

SEQ ID NO: 41231 - protein, 9 aa, synthetic construct
GIPAVGHLY

SEQ ID NO: 41232 - protein, 9 aa, synthetic construct
GIPAVGHLF

SEQ ID NO: 41233 - protein, 9 aa, synthetic construct
GIPAGLKVH

SEQ ID NO: 41234 - protein, 9 aa, synthetic construct
GIPAGARLH

SEQ ID NO: 41235 - protein, 9 aa, synthetic construct
GIPAGARLF

SEQ ID NO: 41236 - protein, 9 aa, synthetic construct
GIPAGAKLH

SEQ ID NO: 41237 - protein, 9 aa, synthetic construct
GIPAGIKLK

SEQ ID NO: 41238 - protein, 9 aa, synthetic construct
GIPAGGKVH

SEQ ID NO: 41239 - protein, 9 aa, synthetic construct
PLNGASHVF

SEQ ID NO: 41240 - protein, 9 aa, synthetic construct
PLNGATRLK

SEQ ID NO: 41241 - protein, 9 aa, synthetic construct
PLNGATRVY

SEQ ID NO: 41242 - protein, 9 aa, synthetic construct
PLNGATRVH

SEQ ID NO: 41243 - protein, 9 aa, synthetic construct
PLNGATKVH

SEQ ID NO: 41244 - protein, 9 aa, synthetic construct
PLNGATKVK

SEQ ID NO: 41245 - protein, 9 aa, synthetic construct
PLNGATKVF

SEQ ID NO: 41246 - protein, 9 aa, synthetic construct
PLNGTTKVK

SEQ ID NO: 41247 - protein, 9 aa, synthetic construct
PLNGVSKLH

SEQ ID NO: 41248 - protein, 9 aa, synthetic construct
PLNGVSKVY

SEQ ID NO: 41249 - protein, 9 aa, synthetic construct
PLNGGTRLF

SEQ ID NO: 41250 - protein, 9 aa, synthetic construct
PLQGASRVR

SEQ ID NO: 41251 - protein, 9 aa, synthetic construct
PLQGASRVK

SEQ ID NO: 41252 - protein, 9 aa, synthetic construct
PLQGASRVF

SEQ ID NO: 41253 - protein, 9 aa, synthetic construct
PLNGVIHLF

SEQ ID NO: 41254 - protein, 9 aa, synthetic construct
PLQGSSHLR

SEQ ID NO: 41255 - protein, 9 aa, synthetic construct
PLQGSSRLR

SEQ ID NO: 41256 - protein, 9 aa, synthetic construct
PTNATLRLF

SEQ ID NO: 41257 - protein, 9 aa, synthetic construct
PTNATLRVY

SEQ ID NO: 41258 - protein, 9 aa, synthetic construct
PLQGVTRVH

SEQ ID NO: 41259 - protein, 9 aa, synthetic construct
PTNATLKVY

SEQ ID NO: 41260 - protein, 9 aa, synthetic construct
PLQGGSRLR

SEQ ID NO: 41261 - protein, 9 aa, synthetic construct
PTNGASHVR

SEQ ID NO: 41262 - protein, 9 aa, synthetic construct
PTNGTSRLY

SEQ ID NO: 41263 - protein, 9 aa, synthetic construct
PTNGTSRVH

SEQ ID NO: 41264 - protein, 9 aa, synthetic construct
PTNGTSKVF

SEQ ID NO: 41265 - protein, 9 aa, synthetic construct
PTNGTTKLH

SEQ ID NO: 41266 - protein, 9 aa, synthetic construct
PTNATARLK

SEQ ID NO: 41267 - protein, 9 aa, synthetic construct
PTNGSSRLR

SEQ ID NO: 41268 - protein, 9 aa, synthetic construct
PTNGSTRLY

SEQ ID NO: 41269 - protein, 9 aa, synthetic construct
PTNGSTRLF

SEQ ID NO: 41270 - protein, 9 aa, synthetic construct
PTNGSTRVR

SEQ ID NO: 41271 - protein, 9 aa, synthetic construct
PTNATARVK

SEQ ID NO: 41272 - protein, 9 aa, synthetic construct
PTNGVSHVH

SEQ ID NO: 41273 - protein, 9 aa, synthetic construct
PTNGVSHVF

SEQ ID NO: 41274 - protein, 9 aa, synthetic construct
PTNGVSRLH

SEQ ID NO: 41275 - protein, 9 aa, synthetic construct
PTNGVSKLH

SEQ ID NO: 41276 - protein, 9 aa, synthetic construct
PTNGVSKVH

SEQ ID NO: 41277 - protein, 9 aa, synthetic construct
PTNGVSKVF

SEQ ID NO: 41278 - protein, 9 aa, synthetic construct
PTNGVTKVK

SEQ ID NO: 41279 - protein, 9 aa, synthetic construct
PTNATAKVK

SEQ ID NO: 41280 - protein, 9 aa, synthetic construct
PLNGVIHVF

SEQ ID NO: 41281 - protein, 9 aa, synthetic construct
PTQGASKLH

SEQ ID NO: 41282 - protein, 9 aa, synthetic construct
PTNATIHLF

SEQ ID NO: 41283 - protein, 9 aa, synthetic construct
PTQGATRLY

SEQ ID NO: 41284 - protein, 9 aa, synthetic construct
PTQGTSRLR

SEQ ID NO: 41285 - protein, 9 aa, synthetic construct
PTQGTSRLH

SEQ ID NO: 41286 - protein, 9 aa, synthetic construct
PTQGTTRLK

SEQ ID NO: 41287 - protein, 9 aa, synthetic construct
PTQGSSRLK

SEQ ID NO: 41288 - protein, 9 aa, synthetic construct
PTQGSSRVY

SEQ ID NO: 41289 - protein, 9 aa, synthetic construct
PTQGSSRVH

SEQ ID NO: 41290 - protein, 9 aa, synthetic construct
PTQGSSRVF

(The sequence listing continues in the following parts.)
